(19) United States
(12) Patent Application Publication
(10) Pub. No.: US 2011/0288155 A1
(43) Pub. Date: Nov. 24, 2011

(54) SIRNA COMPOUNDS AND METHODS OF USE THEREOF

(76) Inventors: Elena Feinstein, Rehovot (IL); Igor Mett, Rehovot (IL); Hagar Kalinski, Rishon-le-Zion (IL)

(21) Appl. No.: 13/140,790

(22) PCT Filed: Dec. 17, 2009
(86) PCT No.: PCT/US09/68342

§ 371 Date: Aug. 3, 2011

Related U.S. Application Data
(60) Provisional application No. 61/203,310, filed on Dec. 18, 2008.
(60) Provisional application No. 61/204,053, filed on Dec. 30, 2008.

(51) Int. Cl. A61K 31/713; A61P 25/28; A61P 11/00; C07H 21/04; A61P 9/00; A61P 27/16; A61P 9/10; C07H 21/02; A61P 27/02

(52) U.S. Cl. 514/44 A; 536/24.5

(57) ABSTRACT

The present application relates to double stranded oligonucleotide inhibitors of target genes, pharmaceutical compositions comprising same and the use of such molecules to treat, inter alia, neurodegenerative disorders including Alzheimer's disease and Amyotrophic Lateral Sclerosis, eye diseases including glaucoma and ION, acute renal failure, hearing loss, acute respiratory distress syndrome and in preventing or treating ischemia-reperfusion injury in organ transplant patients.

### RELATED APPLICATIONS

[0001] The present application claims priority from U.S. Application Nos. 61/203,310 filed Dec. 18, 2008 and 61/204,053 filed Dec. 30, 2008, the contents of which are incorporated by reference herein in their entirety.

### FIELD OF THE INVENTION

[0002] The present application relates to double stranded oligonucleotide inhibitors of target gene expression including the NADPH oxidase (NOX) genes, pharmaceutical compositions comprising same and methods of use thereof. The compounds and compositions are thus useful in the treatment of subjects suffering from diseases or conditions and or symptoms associated with such diseases or conditions in which expression of one or more target genes has adverse consequences in mammalians. In particular embodiments, the application provides chemically modified siRNA oligonucleotides, compositions comprising same and the use of such molecules to treat, inter alia, neurodegenerative disorders including Alzheimer's disease and Amyotrophic Lateral Sclerosis, eye diseases including glaucoma and ION, acute renal failure, hearing loss, acute respiratory distress syndrome and to prevent injury and complications in transplant patients.

### BACKGROUND OF THE INVENTION

[0003] International Patent Publication No. WO 2005/119251 discloses a method of inhibiting NOX3 for treating hearing loss. International Patent Publication No. WO 2002/030453 discloses NADPH oxidase inhibitors for reducing angiogenesis. U.S. Pat. No. 6,846,672 and related patents and patent applications disclose the polynucleotide and polypeptide sequences of the NOX enzymes. US Patent Publication No. 2007/0037883 relates to NOX4 inhibition.

[0004] U.S. Pat. Nos. 6,846,672; 7,029,673; 7,202,052; 7,202,053 and 7,226,769 disclose NOX enzymes and regulators thereof. International Patent Publication No. WO 2008/050329 assigned to the assignee of the present application, hereby incorporated by reference in its entirety, relates to certain NOX genes. International Patent Application Nos. WO 2008/104978 and WO 2009/044392 assigned to the assignee of the current application and hereby incorporated by reference in their entirety relate to novel siRNA structures. In particular, Publication No. WO 2009/044392 relates to siRNA oligonucleotides targetting some NOX-related genes useful in preparing siRNA compounds.

[0005] International Patent Publication No. WO 2008/152636 assigned to the assignee of the present application and hereby incorporated by reference in its entirety discloses siRNA compounds to the NOX genes, to compositions comprising same and to methods of use thereof.

[0006] International Patent Publication No. WO 00/44364 discloses temporary TP53 inhibitors and their use for treatment of disease. International Patent Publication No. WO 2006/035434 and US Patent Publication No. 2008/0108583 both assigned to the assignee of the present application and hereby incorporated by reference in their entirety discloses TP53 inhibitors for the treatment of, inter alia, acute renal failure and hearing loss. International Patent Publication No. WO 2009/001359 assigned to the assignee of the present application, hereby incorporated by reference in its entirety, discloses siRNA inhibitors for TP53; HTRA2; KEAP1; SHC1-SHC, ZNHIT1, LGALS3, and HI95 (SESN2). U.S. Pat. No. 7,074,895 and US Publication No. US2006/0241290-A1 assigned to the assignee of the present application and hereby incorporated by reference in their entirety teach full length HI95 polypeptide and antibody. GB 2420119 discloses certain KEAP1 siRNA. International Patent Publication Nos. WO 03/087368 and WO 03/087367 teach methods of treating various eye and CNS diseases with RNAi to selected target genes.

[0007] There remains an unmet need for siRNA compounds having improved stability and/or improved activity and/or reduced off target effects and/or reduced immune response useful in therapeutic applications.

### SUMMARY OF THE INVENTION

[0008] The present application relates in part to chemically modified siRNA useful in inhibiting expression of target genes, having mRNA polynucleotide sequence set forth in any one of SEQ ID NOS 1-23 and listed in table A. The target genes include members of the NADPH oxidase (NOX) family of genes, TP53; HTRA2; KEAP1; SHC1, ZNHIT1, LGALS3, and HI95. The present application relates in part to chemically modified siRNA and in particular to chemically modified siRNA oligonucleotides having sense and complementary antisense sequences set forth in SEQ ID NOS:24-23,157. Oligonucleotide pairs useful in preparing the siRNA compounds are set forth in Tables A1-A18, B1-B15 and C1-C2, infra. The chemically modified siRNA compounds disclosed herein are useful in down regulating expression of one or more of the target genes. The compounds according to the present application exhibit properties that render them useful as therapeutic agents for treatment of a subject suffering from a disease, a disorder or an injury associated with target gene expression such as increased expression (up-regulation). Specifically the compounds exhibit high activity, and/or serum stability and/or reduced off-target effects and/or reduced adverse immune response as compared to an unmodified siRNA compound.

[0009] PCT Publication Nos. WO/2008/152636 and WO 2009/001359, assigned to the assignee of the present application and hereby incorporated by reference in their entirety, disclose some of the antisense and sense oligonucleotide pairs disclosed herein.

[0010] The present application also provides pharmaceutical compositions comprising one or more such oligonucleotides, and a pharmaceutically acceptable excipient.

[0011] The present application further relates to methods for treating or preventing the incidence or severity of various diseases, injuries or conditions in a subject in need thereof wherein the disease, injury or condition and/or symptoms associated therewith is selected from the group consisting of a neurodegenerative disease or disorder, an ophthalmic disease or condition, a respiratory disease, an ischemic disease or ischemia-reperfusion injury, an angiogenesis-related condition, a hearing impairment or any other disease, injury, condition or combination of conditions as disclosed herein. Such methods involve administering to a mammal in need of such treatment a prophylactically or therapeutically effective amount of one or more such chemically modified siRNA compound, which suppresses or reduces (down-regulates) expression and/or activity of one or more of the target genes, disclosed herein. Preferably the mammal is a human. The Nox family of genes refers to NOX4, NOX1, NOX2 (gp91phox, CYBB), NOX5, DUOX2, NOXO1, NOXO2 (NCF1), NOXA1 and NOXA2 (p67phox, NCF2), listed in Table 1 hereinbelow. Other target genes include TP53; HTRA2; KEAP1; SHC1; ZNHIT1; LGALS3 and HI95, listed in Table 1, hereinbelow.

[0012] The present application provides novel siRNA oligonucleotidepairs, set forth as antisense and sense pairs in Tables A1-A18 B1-B15 and C1-C2, SEQ ID NOS: 24-23,157. The siRNA oligonucleotides shown in any one of the tables consist of unmodified ribonucleotides or comprise a combination of unmodified ribonucleotides and modified ribonucleotides and/or unconventional moieties, and optionally a capping moiety.

[0013] Accordingly in one aspect the present application provides a siRNA compound having the following structure:

| | |
|---|---|
| 5′ (N)ₓ-Z 3′ | (antisense strand) |
| 3′ Z′-(N′)_{y}-z″ 5′ | (sense strand) |

[0014] wherein each of N and N′ is a ribonucleotide which may be unmodified or modified, or an unconventional moiety;

[0015] wherein each of (N)x and (N′)y is an oligonucleotide in which each consecutive N or N′ is joined to the next N or N′ by a covalent bond;

[0016] wherein Z and Z′ may be present or absent, but if present is independently 1-5 consecutive nucleotides covalently attached at the 3′ terminus of the strand in which it is present;

[0017] wherein z″ may be present or absent, but if present is a capping moiety covalently attached at the 5′ terminus of (N′)y;

[0018] each of x and y is independently an integer between 18 and 40;

[0019] wherein the sequence of (N′)y has complementary to the sequence of (N)x; and wherein (N)x comprises an oligonucleotide set forth in any one of SEQ ID NOS: 668-1311, 1812-2311, 2931-3549, 4050-4549, 5571-6391, 6892-7391, 7712-8031, 8532-9031, 9532-10031, 10532-11031, 11084-11135, 11177-11217, 11314-11409, 11584-11757, 11796-11833, 11862-11889, 12416-12941, 13442-13941, 14333-14723, 15224-15723, 15905-16085, 16514-16941, 17167-17391, 17881-18369, 18512-18653, 18973-19291, 19454-19615, 19906-20195, 20356-20515, 20847-21177, 21522-21865, 22366-22865, 23012-23157.

[0020] In some embodiments the sequence of (N′)y is fully complementary to the sequence of (N)x. In other embodiments the sequence of (N′)y is substantially complementary to the sequence of (N)x.

[0021] In certain preferred embodiments (N)x comprises an antisense sequence set forth in any one of SEQ ID Nos:23012-23157.

[0022] In certain preferred embodiments (N)x comprises an antisense sequences set forth in any one of SEQ ID Nos: 668-1311, 1812-2311.

[0023] In certain preferred embodiments (N)x comprises an antisense sequences set forth in any one of SEQ ID Nos: 4050-4549 or 5571-6391.

[0024] In another aspect the present application provides a compound having the following structure:

| | |
|---|---|
| 5′ (N)ₓ-Z 3′ | (antisense strand) |
| 3′ Z′-(N′)_{y}-z″ 5′ | (sense strand) |

[0025] wherein each of N and N′ is a ribonucleotide which may be unmodified or modified, or an unconventional moiety and wherein at least one of N or N′ is a modified ribonucleotide or an unconventional moiety;

[0026] wherein each of (N)x and (N′)y is an oligonucleotide in which each consecutive N or N′ is joined to the next N or N′ by a covalent bond;

[0027] wherein Z and Z′ may be present or absent, but if present is independently 1-5 consecutive nucleotides covalently attached at the 3′ terminus of the strand in which it is present;

[0028] wherein z″ may be present or absent, but if present is a capping moiety covalently attached at the 5′ terminus of (N′)y;

[0029] each of x and y is independently an integer between 18 and 40;

[0030] wherein the sequence of (N′)_{y} has complementary to (N)x; and wherein the sequence of (N)ₓ comprises an antisense sequence having complementarity to about 18 to about 40 consecutive ribonucleotides in an mRNA set forth in any one of SEQ ID NOS:1-23. Preferably (N)ₓ comprises an antisense sequence set forth in any one of SEQ ID NOs: 668-1311, 1812-2311, 2931-3549, 4050-4549, 5571-6391, 6892-7391, 7712-8031, 8532-9031, 9532-10031, 10532-11031, 11084-11135, 11177-11217, 11314-11409, 11584-11757, 11796-11833, 11862-11889, 12416-12941, 13442-13941, 14333-14723, 15224-15723, 15905-16085, 16514-16941, 17167-17391, 17881-18369, 18512-18653, 18973-19291, 19454-19615, 19906-20195, 20356-20515, 20847-21177, 21522-21865, 22366-22865, 23012-23157.

[0031] In some embodiments the sequence of (N′)y is fully complementary to the sequence of (N)x. In other embodiments the sequence of (N′)y is substantially complementary to the sequence of (N)x.

[0032] In some embodiments the sequence of (N)ₓ comprises an antisense sequence having full complementarity to about 18 to about 40 consecutive ribonucleotides in an mRNA set forth in any one of SEQ ID NOS:1-23. In other embodiments the sequence of (N)ₓ comprises an antisense sequence having substantial complementarity to about 18 to about 40 consecutive ribonucleotides in an mRNA set forth in any one of SEQ ID NOS:1-23.

[0033] In certain preferred embodiments (N)x comprises any one of the antisense sequences set forth in any one of SEQ ID Nos:23012-23157. The siRNA compounds according to the antisense and sense pairs as set forth in any one of Tables A1-A18, B1-B15 and C1-C2 comprise a combination of unmodified ribonucleotides and modified ribonucleotides and/or unconventional moieties, and optionally a capping moiety z″.

[0034] In some embodiments of the above structure (N)x comprises modified and unmodified ribonucleotides, each modified ribonucleotide having a 2′-O-methyl on its sugar, wherein N at the 3′ terminus of (N)x is a modified ribonucleotide, (N)x comprises at least five alternating modified ribonucleotides beginning at the 3′ end and at least nine modified ribonucleotides in total and each remaining N is an unmodified ribonucleotide and the sense (N′)y comprises at least one mirror nucleotide, or a nucleotide joined to an adjacent nucleotide by a 2′-5′ internucleotide phosphate bond.

[0035] In additional embodiments (N)x comprises modified ribonucleotides in alternating positions wherein each N at the 5′ and 3′ termini are 2′OMe sugar modified ribonucleotides, and the middle ribonucleotide is not modified, e.g. ribonucleotide in position 10 in a 19-mer strand or position 12 in a 23-mer strand.

[0036] For all the structures, in some embodiments the covalent bond joining each consecutive N or N′ is a phosphodiester bond. In various embodiments all the covalent bonds are phosphodiester bonds.

[0037] In various embodiments x=y and each of x and y is 19, 20, 21, 22 or 23. In some embodiments x=y=23. In other embodiments x=y=19.

[0038] In one embodiment of the above structure, the compound comprises at least one mirror nucleotide at one or both termini in (N′)y. In various embodiments the compound comprises two consecutive mirror nucleotides, one at the 3′ penultimate position and one at the 3′ terminus in (N′)y. In one preferred embodiment x=y=19 and (N′)y comprises a mirror nucleotide at position 18.

[0039] In some embodiments the mirror nucleotide is selected from an L-ribonucleotide and an L-deoxyribonucleotide. In various embodiments the mirror nucleotide is an L-deoxyribonucleotide. In some embodiments y=19 and (N′)y, consists of unmodified ribonucleotides at positions 1-17 and 19 and one L-DNA at the 3′ penultimate position (position 18). In other embodiments y=19 and (N′)y consists of unmodified ribonucleotides at position 1-16 and 19 and two consecutive L-DNA at the 3′ penultimate position (positions 17 and 18). In one preferred embodiment x=y=19 and (N′)y comprises an L-deoxyribonucleotide at position 18.

[0040] In another embodiment of the above structure, (N′)y further comprises one or more nucleotides containing an intra-sugar bridge at one or both termini.

[0041] In another embodiment of the above structure, (N′)y comprises at least two consecutive nucleotide joined together to the next nucleotide by a 2′-5′ phosphodiester bond at one or both termini. In certain preferred embodiments in (N′)y the 3′ penultimate nucleotide is linked to the 3′ terminal nucleotide with a 2′-5′ phosphodiester bridge.

[0042] In certain preferred embodiments the compound of the application is a blunt-ended (z″, Z and Z′ are absent), double stranded oligonucleotide structure, x=y and x=19 or 23, wherein (N′)y comprises unmodified ribonucleotides in which three consecutive nucleotides at the 3′ terminus are joined together by two 2′-5′ phosphodiester bonds; and (N)x comprises alternating unmodified and 2′-O methyl sugar-modified ribonucleotides.

[0043] In some embodiments, neither (N)x nor (N′)y are phosphorylated at the 3′ and 5′ termini. In other embodiments either or both (N)x and (N′)y are phosphorylated at the 3′ termini.

[0044] In certain embodiments for all the above-mentioned structures, the compound is blunt ended, for example wherein both Z and Z′ are absent. In an alternative embodiment, the compound comprises at least one 3′ overhang and or a 5′ capping moiety at the 5′ terminus of (N′)y, wherein at least one of Z or Z′ or z″ is present. Z, Z′ and z″ are independently one or more covalently linked modified or non-modified nucleotides, for example inverted dT or dA; dT, LNA, mirror nucleotide and the like. In some embodiments each of Z and Z′ are independently selected from dT and dTdT. In other enmbodiments each of Z and Z′ is independently selected from 1-5 covalently attached nucleotide or non-nucleotide moieties.

[0045] In a second aspect the present application provides a pharmaceutical composition comprising one or more compounds of the present application, in an amount effective to down-regulate target gene expression, and a pharmaceutically acceptable carrier wherein the target gene is selected from NOX4, NOX1, NOX2 (gp91phox, CYBB), NOX5, DUOX2, NOXO1, NOXO2 (NCF1), NOXA1, NOXA2 (p67phox, NCF2), TP53; HTRA2; KEAP1; SHC1, ZNHIT1, LGALS3, and HI95 having mRNA set forth in any one of SEQ ID NOS 1-23.

[0046] In another aspect, the present application relates to a method for the treatment of a subject in need of treatment for a disease, injury or disorder or symptom or condition associated with the disease, injury or disorder, associated with the expression of a at least one target gene comprising administering to the subject an amount of at least one siRNA which reduces (down-regulates) or inhibits expression or over-expression of at least one target gene. In preferred embodiments the at least one siRNA compound is chemically modified according to the embodiments of the present application.

[0047] In some embodiments, the present application relates to a method for the treatment of a subject in need of treatment for a disease, injury or disorder or symptom or condition associated with the disease, injury or disorder, associated with the expression of at least two target genes comprising administering to the subject at least two siRNA compounds which reduce (down-regulate) or inhibit expression or over-expression of the target genes. In preferred embodiments the siRNA compounds are chemically modified according to the embodiments of the present application. In some embodiments, the siRNA compounds are administered by the same route, either from the same or from different pharmaceutical compositions. However, in other embodiments, using the same mute of administration for two or more of the therapeutic siRNA compounds either is impossible or is not preferred. Persons skilled in the art are aware of the best modes of administration for each therapeutic agent, either alone or in a combination

[0048] More specifically, the present application provides methods, compounds and compositions useful in therapy for treating a subject suffering from or at risk of a neurodegenerative disease (ND), injury or disorder including spinal cord injury, Alzheimer's Disease (AD) and Amyotrophic lateral sclerosis (ALS); acute renal failure (ARF); hearing loss; an ophthalmic disease including glaucoma, dry eye syndrome and ION; a respiratory disease including acute respiratory distress syndrome (ARDS), chronic obstructive pulmonary disease (COPD) and other acute lung and respiratory injuries; injury (e.g. ischemia-reperfusion injury), graft disfunction and acute rejection after organ transplantation, including lung, kidney, bone marrow, heart, pancreas, cornea or liver transplantation; nephrotoxicity; pressure sores, oral mucositis. The methods of the application comprise administering to the subject one or more siRNA compounds which down-regulate expression of a target gene in a therapeutically effective dose so as to thereby treat the patient.

[0049] An additional embodiment of the present application provides for the use of a therapeutically effective amount of a siRNA compound according to the application for the preparation of a medicament for promoting recovery in a patient suffering from a disorder listed herein.

### DETAILED DESCRIPTION OF THE INVENTION

[0050] The present application, relates to novel oligonucleotide compounds useful in inhibiting one or more of the target genes disclosed herein for the treatment of neurodegenerative diseases and disorders, CNS injury, eye diseases, respiratory disorders, microvascular disorders, hearing disorders and ischemic conditions, inter alia. As will be described herein, the preferred inhibitors to be used with the present application are chemically modified siRNA.

[0051] Compounds and compositions comprising same which inhibit one or more of the target genes are discussed herein at length, and any of said compounds and/or compositions may be beneficially employed in the treatment of a patient suffering from or at risk of a disease, an injury or a disorder associated with target gene expression or over-expression.

[0052] The present application relates generally to compounds which down-regulate expression of target genes, particularly to novel small interfering RNAs (siRNAs), and to the use of these siRNAs in the treatment of various diseases and medical conditions. Particular diseases and conditions to be treated are hearing loss including chemical-induced ototoxicity; acute renal failure (ARF), nephritis, ocular disease (e.g. glaucoma), Acute Respiratory Distress Syndrome (ARDS) and other acute lung injuries, lung transplantationkidney transplantation, nephrotoxicity, spinal cord injury, pressure sores, osteoarthritis (OA) and Chronic Obstructive Pulmonary Disease (COPD) and prevention of ischemia-reperfusion (I/R) injury in organ transplant patients, including lung and kidney transplant. In some embodiments one or more of the compounds of the application is useful in neuroprotection, including optic nerve protection.

[0053] Lists of preferred 19-mer siRNA pairs are provided in SEQ ID NOS:22,866-23,157. Other oligonucleotide pairs useful in preparation of a siRNA drug candidate are shown in Tables A1-A18, B1-B15 and C1-C2.

[0054] Methods, molecules and compositions, which inhibit the target genes are discussed herein at length, and any of said molecules and/or compositions may be beneficially employed in the treatment of a patient suffering from any of said conditions. Table 1, below, sets forth the gene identification number (gi) with an NCBI accession number for the respective mRNA sequences, corresponding oligomer tables' listings and associated indications in which inhibition of gene expression is useful.

TABLE 1

| | | Preferred indications or diseases to be |
|---|---|---|
| | | prevented or treated according to the |
| | Full name and Human Gene ID | present application (certain preferred |
| Gene | (mRNA) | indications are underlined) |
| NOX4 | NADPH oxidase 4 | ARF, hearing loss, ARDS, glaucoma, |
| | (gi:20149638, NM_016931, SEQ | spinal cord injury (SCI), COPD, diabetic |
| | ID NO:1) | retinopathy (DR), nephritis, I/R injury in |
| | | organ transplantation patients |
| NOX1 | NADPH oxidase 1 | ARF, hearing loss, ARDS, glaucoma, |
| | (gi:21614529, NM_007052 isoform | spinal cord injury, COPD, DR, nephritis, |
| | 1L; SEQ ID NO:2) | ND |
| | (gi:7669509, NM_013955 isoform | |
| | 1Lv; SEQ ID NO:3) | |
| NOX2 | NADPH oxidase 2 | ND (AD and ALS), ARF, hearing loss, |
| (gp91pho, | (gi:6996020, NM_000397; SEQ ID | ARDS, glaucoma, spinal cord injury, |
| CYBB) | NO:4) | COPD, OA, DR, nephritis, I/R injury in |
| | | organ transplantation patients |
| NOX5 | NADPH oxidase 5 | ARF, hearing loss, ARDS, glaucoma, |
| | (gi:20127623, NM_024505; SEQ | spinal cord injury, COPD, DR, nephritis, |
| | ID NO:5) | ND |
| DUOX2 | Dual oxidase 2 | ARF, hearing loss, ARDS, glaucoma, |
| | (gi:132566531, NM_014080; SEQ | spinal cord injury, COPD, DR, nephritis, |
| | ID NO:6) | ND |
| NOXO1 | NADPH oxidase organizer 1 | ARF, hearing loss, ARDS, glaucoma, |
| | (gi:34222190, variant a, | spinal cord injury, COPD, DR, nephritis, |
| | NM_144603, SEQ ID NO:7) | ND |
| | (gi:41281810, variant b, | |
| | NM_172167; SEQ ID NO:8) | |
| | (gi:41281827, variant c, | |
| | NM_172168; SEQ ID NO:9) | |
| NOXO2 | NADPH oxidase organizer 2 | ARF, hearing loss, ARDS, glaucoma, |
| (p47phox, | (gi:115298671, NM_000265; SEQ | spinal cord injury, COPD, DR, nephritis, |
| NCF1) | ID NO:10) | ND |
| NOXA1 | NADPH oxidase activator 1 | ARF, hearing loss, ARDS, glaucoma, |
| | (gi:41393186, NM_006647; SEQ | spinal cord injury, COPD, DR, nephritis |
| | ID NO:11) | |
| NOXA2 | NADPH oxidase activator 2 | ARF, hearing loss, ARDS, glaucoma, |
| (p67phox, | (gi:67189969, NM_000433; SEQ | spinal cord injury, COPD, DR, nephritis |
| NCF2) | ID NO:12) | |
| p53 (TP53) | tumor protein p53 | organ transplant (e.g. lung, kidney), |
| | gi8400737, NM_000546.2 | glaucoma, hearing loss, AKI, acute lung |
| | SEQ ID NO:13 | injury, ischemic optic neuropathy (ION) |
| HTRA2 | Htra serine peptidase 2 | ARF, hearing loss, ARDS, glaucoma, SCI, |
| | var 1 gi:73747817, NM_013247 | COPD, osteoarthritis, DR, toxicity, organ |
| | SEQ ID NO:14 | transplant, acute ischemia-reperfusion lung |
| | var 2 gi:73747818, NM_145074 | injury |
| | SEQ ID NO:15 | |
| KEAP1 | Kelch-like ECH-associated protein 1 | ARF, hearing loss, ARDS, glaucoma, SCI, |
| | var 1 gi:45269144 NM_203500 | COPD, osteoarthritis, diabetic retinopathy, |
| | SEQ ID NO:16 | pressure sores, nephrotoxicity, |
| | var 2 gi:45269143 NM_012289 | neurotoxicity, organ transplant |
| | SEQ ID NO:17 | |
| SHC1 | Src homology 2 domain containing) | ARF, hearing loss, ARDS, glaucoma, SCI, |
| | transforming prot. 1 | COPD, osteoarthritis, diabetic retinopathy, |
| | var 1 gi:52693920 NM_183001 | pressure sores, toxicity, organ transplant, |
| | SEQ ID NO:18 | acute ischemia-reperfusion lung injury, |
| | var 2 gi:34147725 NM_003029 | AD, ALS |
| | SEQ ID NO:19 | |
| ZNHIT1 | Zn finger HIT type 1 | ARF, hearing loss, ARDS, glaucoma, SCI, |
| | gi:375944391; NM_006349 | COPD, osteoarthritis, DR, pressure sores, |
| | SEQ ID NO:20 | toxicity, organ transplant |
| LGALS3 | lectin galactoside-binding soluble 3 | ARF, hearing loss, ARDS, glaucoma, SCI, |
| | var 1 gi:115430222 NM_002306 | COPD, osteoarthritis, DR, pressure sores, |
| | SEQ ID NO:21 | organ transplant |
| | var 2 gi:115430224 NR_003225 | |
| | SEQ ID NO:22 | |
| HI95 | Sestrin2 | ARF, hearing loss, ARDS, glaucoma, SCI, |
| | gi:32454742 NM_031459 | COPD, osteoarthritis, DR, pressure sores, |
| | SEQ ID NO:23 | organ transplant |

ND: neurodegenerative diseases and disorders;
AD: Alzheimer's disease;
ALS: Amyotrophic Lateral Sclerosis;
AKI: acute kidney injury;
ARF: acute renal failure,
ARDS, acute respiratory distress syndrome,
COPD chronic obstructive pulmonary disease,
DR: diabetic retinopathy,
ION: ischemic optic neuropathy;
I/R: ischemia-reperfusion injury;
SCI: spinal cord injury.

[0055] In various embodiments the siRNAs of the present application possess structures and modifications which increase activity and/or increase stability and/or minimize toxicity; the novel modifications of the siRNAs of the present application are beneficially applied to double stranded RNA useful in preventing or attenuating one or more of the target genes' expression.

[0056] Definitions

[0057] For convenience certain terms employed in the specification, examples and claims are described herein.

[0058] It is to be noted that, as used herein, the singular forms “a”, “an” and “the” include plural forms unless the content clearly dictates otherwise.

[0059] Where aspects or embodiments of the application are described in terms of Markush groups or other grouping of alternatives, those skilled in the art will recognize that the application is also thereby described in terms of any individual member or subgroup of members of the group.

[0060] A “siRNA inhibitor” is a compound which is capable of reducing the expression or over-expression of a target gene or the activity of the product of such gene to an extent sufficient to achieve a desired biological or physiological effect. The term “siRNA inhibitor” as used herein refers to one or more of a siRNA, shRNA, synthetic shRNA; miRNA. Inhibition may also be referred to as down-regulation or, for RNAi, silencing.

[0061] The term “inhibit” as used herein refers to reducing the expression or over-expression of a target gene or the activity of the product of such gene to an extent sufficient to achieve a desired biological or physiological effect. Inhibition may be complete or partial.

[0062] As used herein, the term “inhibition” of a target gene refers to inhibition (down-regulation) of the gene expression (transcription or translation) or of a polypeptide activity of a gene selected from the group NOX4, NOX1, NOX2 (gp91phox, CYBB), NOX5, DUOX2, NOXO1, NOXO2, NOXA1, NOXA2 (p67phox), TP53; HTRA2; KEAP1; SHC1, ZNHIT1, LGALS3, and HI95, or SNP (single nucleotide polymorphism) or other variants thereof. The gi number for the mRNA of each target gene is set forth in Table 1. The polynucleotide sequence of target mRNA sequence, refers to the mRNA sequences set forth in SEQ ID NO:1-23, or any homologous sequences thereof preferably having at least 70% identity, more preferably 80% identity, even more preferably 90% or 95% identity to any one of mRNA set forth in SEQ ID NOS:1-23. Therefore, polynucleotide sequences derived from any one of SEQ ID NO:1-23 which have undergone mutations, alterations or modifications as described herein are encompassed in the present application. The terms “mRNA polynucleotide sequence” and “mRNA” are used interchangeably.

[0063] A “NOX inhibitor” is a compound which is capable of down-regulating the activity of the NOX genes or NOX gene products, particularly one of the human NOX genes or gene products. Such inhibitors include substances that affect the transcription or translation of the gene as well as substances that affect the activity of the gene product. Examples of such inhibitors include, inter alia: polynucleotides such as antisense (AS) fragments, siRNA, or vectors comprising them; catalytic RNAs such as ribozymes. Specific siRNA inhibitors are provided herein.

[0064] As used herein, the terms “polynucleotide” and “nucleic acid” are used interchangeably and refer to nucleotide sequences comprising unmodified and or modified deoxyribonucleic acid (DNA), and ribonucleic acid (RNA). The terms should also be understood to include, as equivalents, analogs of either RNA or DNA made from nucleotide analogs. Throughout this application mRNA sequences are set forth as representing the corresponding genes.

[0065] “Oligonucleotide” or “oligomer” refers to a deoxyribonucleotide or ribonucleotide sequence from about 2 to about 50 nucleotides. Each DNA or RNA nucleotide is independently natural or synthetic, and/or modified or unmodified. Modifications include changes to the sugar moiety, the base moiety and or the linkages between nucleotides in the oligonucleotide. The compounds of the present application encompass molecules comprising deoxyribonucleotides, ribonucleotides, modified deoxyribonucleotides, modified ribonucleotides, unconventional moieties and combinations thereof

[0066] “Nucleotide” is meant to encompass deoxyribonucleotides and ribonucleotides, which is natural or synthetic, and/or modified or unmodified. Modifications include changes to the sugar moiety, the base moiety and or the linkages between ribonucleotides in the oligoribonucleotide. According to one aspect the present application provides inhibitory oligonucleotide compounds comprising unmodified and modified nucleotides and/or unconventional moieties. The compound comprises at least one modified nucleotide selected from the group consisting of a sugar modification, a base modification and an internucleotide linkage modification and may contain DNA, and modified nucleotides such as LNA (locked nucleic acid), ENA (ethylene-bridged nucleic acid, PNA (peptide nucleic acid), arabinoside, PACE, mirror nucleotide, or nucleotides with a 6 carbon sugar.

[0067] All analogs of, or modifications to, a nucleotide/oligonucleotide are employed with the present application, provided that said analog or modification does not substantially adversely affect the function of the nucleotide/oligonucleotide. Acceptable modifications include modifications of the sugar moiety, modifications of the base moiety, modifications in the internucleotide linkages and combinations thereof.

[0068] In one embodiment the compound comprises a 2′ modification on the sugar moiety of at least one ribonucleotide (“2′ sugar modification”). In certain embodiments the compound comprises 2′O-alkyl or 2′-fluoro or 2′O-allyl or any other 2′ modification, optionally on alternate positions. Other stabilizing modifications are also possible (e.g. terminal modifications). In some embodiments a preferred 2′O-alkyl is 2′O-methyl (methoxy) sugar modification.

[0069] In some embodiments the backbone of the oligonucleotides is modified and comprises phosphate-D-ribose entities. In other embodiments the backbone comprises thiophosphate-D-ribose entities, triester, thioate, 2′-5′ bridged backbone (also referred to as 5′-2′), PACE and the like.

[0070] As used herein, the terms “non-pairing nucleotide analog” means a nucleotide analog which comprises a non-base pairing moiety including but not limited to: 6 des amino adenosine (Nebularine), 4-Me-indole, 3-nitropyrrole, 5-nitroindole, Ds, Pa, N3-Me ribo U, N3-Me riboT, N3-Me dC, N3-Me-dT, N1-Me-dG, N1-Me-dA, N3-ethyl-dC, N3-Me dC. In some embodiments the non-base pairing nucleotide analog is a ribonucleotide. In other embodiments it is a deoxyribonucleotide.

[0071] Other modifications include terminal modifications on the 5′ and/or 3′ region of the oligonucleotides and are also known as capping moieties. Such terminal modifications are selected from a nucleotide, a modified nucleotide, a lipid, a peptide, and a sugar.

[0072] The term “amino acid” refers to a molecule which consists of any one of the 20 naturally occurring amino acids, amino acids which have been chemically modified (see below), or synthetic amino acids.

[0073] The term “polypeptide” refers to a molecule composed of two or more amino acids residues. The term includes peptides, polypeptides, proteins and peptidomimetics.

[0074] “Apoptosis” refers to a physiological type of cell death which results from activation of some cellular mechanisms, i.e. death that is controlled by the machinery of the cell. Apoptosis may, for example, be the result of activation of the cell machinery by an external trigger, e.g. a cytokine or anti-FAS antibody, which leads to cell death or by an internal signal. The term “programmed cell death” is also used interchangeably with “apoptosis”.

[0075] “Apoptosis-related disease” refers to a disease whose etiology is related either wholly or partially to the process of apoptosis. The disease may be caused either by a malfunction of the apoptotic process (such as in cancer or an autoimmune disease) or by over activity of the apoptotic process (such as in certain neurodegenerative diseases). For example, apoptosis is a significant mechanism in dry Age-Related Macular Degeneration (AMD), whereby slow atrophy of photoreceptor and pigment epithelium cells, primarily in the central (macular) region of retina takes place. Neuroretinal apoptosis is also a significant mechanism in diabetic retinopathy (DR).

[0076] An “expression vector” refers to a vector that has the ability to incorporate and express heterologous DNA fragments in a foreign cell. Many prokaryotic and eukaryotic expression vectors are known and/or commercially available. Selection of appropriate expression vectors is within the knowledge of those having skill in the art.

[0077] By “small interfering RNA” (siRNA) is meant an RNA molecule which down-regulates or silences (prevents) the expression of a gene/mRNA of its endogenous cellular counterpart. RNA interference (RNAi) refers to the process of sequence-specific post transcriptional gene silencing in mammals mediated by small interfering RNAs (siRNAs) (Fire et al, 1998, Nature 391, 806). The corresponding process in plants is commonly referred to as specific post transcriptional gene silencing or RNA silencing and is also referred to as quelling in fungi. The RNA interference response may feature an endonuclease complex containing an siRNA, commonly referred to as an RNA-induced silencing complex (RISC), which mediates cleavage of single-stranded RNA having sequence complementary to the antisense strand of the siRNA duplex. Cleavage of the target RNA may take place in the middle of the region complementary to the antisense strand of the siRNA duplex (Elbashir et al 2001, Genes Dev., 15, 188). For information on these terms and proposed mechanisms, see Bernstein E., et al., 2001 November; 7(11):1509-21; and Nishikura K.: Cell. 2001. 107(4):415-8. Examples of siRNA molecules which are used in the present application are provided in Tables A1-A18, B1-B15 and C1-C2.

[0078] siRNA and RNA Interference

[0079] During recent years, RNAi has emerged as one of the most efficient methods for inactivation of genes (Nature Reviews, 2002, v. 3, p. 737-47; Nature, 2002, v. 418, p. 244-51). As a method, it is based on the ability of dsRNA species to enter a specific protein complex, where it is then targeted to the complementary cellular RNA and specifically degrades it. In more detail, dsRNAs are digested into short (17-29 bp) inhibitory RNAs (siRNAs) by type III RNAses (DICER, DROSHA, etc) (Nature, 2001, v. 409, p. 363-6; Nature, 2003, 0.425, p. 415-9). The specific RISC protein complex recognizes these fragments and complementary mRNA. The whole process is culminated by endonuclease cleavage of target mRNA (Nature Reviews, 2002, v. 3, p. 737-47; Curr Opin Mol Ther. 2003 5(3):217-24).

[0080] PCT publication WO 00/44895; PCT publication WO 00/49035; PCT publication WO 00/63364; PCT publication WO 01/36641; PCT publication WO 01/36646; PCT publication WO 99/32619; PCT publication WO 00/44914; PCT publication WO 01/29058; and PCT publication WO 01/75164 and other relate to the phenomenon of RNAi.

[0081] RNA interference (RNAi) is based on the ability of dsRNA specie to enter a cytoplasmic protein complex, where it is then targeted to the complementary cellular RNA and specifically degrades it. The RNA interference response features an endonuclease complex containing a siRNA, commonly referred to as an RNA-induced silencing complex (RISC), which mediates cleavage of single-stranded mRNA having a sequence complementary to the antisense strand of the siRNA duplex. Cleavage of the target mRNA may take place in the middle of the region complementary to the antisense strand of the siRNA duplex (Elbashir et al., Genes Dev., 2001, 15(2):188-200). In more detail, longer dsRNAs are digested into short (17-29 bp) dsRNA fragments (also referred to as short inhibitory RNAs, “siRNAs”) by type III RNAses (DICER, DROSHA, etc.; Bernstein et al., Nature, 2001, 409(6818):363-6; Lee et al., Nature, 2003, 425(6956):415-9). The RISC protein complex recognizes these fragments and complementary mRNA. The whole process is culminated by endonuclease cleavage of target mRNA (McManus & Sharp, Nature Rev Genet, 2002, 3(10):737-47; Paddison & Hannon, Curr Opin Mol Ther. 2003, 5(3):217-24). (For additional information on these terms and proposed mechanisms, see for example Bernstein et al., RNA 2001, 7(11):1509-21; Nishikura, Cell 2001, 107(4):415-8 and PCT publication WO 01/36646).

[0082] Attempts to study RNAi and to manipulate mammalian cells experimentally were frustrated by an active, non-specific antiviral defense mechanism which was activated in response to long dsRNA molecules (Gil et al. Apoptosis, 2000. 5:107-114). Later it was discovered that synthetic duplexes of 21 nucleotide RNAs could mediate gene specific RNAi in mammalian cells, without the stimulation of the generic antiviral defense mechanisms (see for example Elbashir et al. Nature 2001, 411:494-498 and Caplen et al. PNAS USA 2001, 98:9742-9747). As a result, small interfering RNAs (siRNAs), which are short double-stranded RNAs, have become powerful tools in attempting to understand gene function. Thus, RNA interference (RNAi) refers to the process of sequence-specific post-transcriptional gene silencing in mammals mediated by small interfering RNAs (siRNAs) (Fire et al, Nature 1998. 391, 806) or microRNAs (miRNA; Ambros, Nature 2004 431:7006,350-55; and Bartel, Cell. 2004. 116(2):281-97).

[0083] A siRNA is a double-stranded RNA molecule which inhibits, either partially or fully, the expression of a gene/mRNA of its endogenous or cellular counterpart, or of an exogenous gene such as a viral nucleic acid. Several studies have revealed that siRNA therapeutics are effective in vivo in both mammals and in humans. Bitko et al., have shown that specific siRNA molecules directed against the respiratory syncytial virus (RSV) nucleocapsid N gene are effective in treating mice when administered intranasally (Bitko et al., Nat. Med. 2005, 11(1):50-55). For a review of the use of siRNA as therapeutics, see for example Batik (J. Mol. Med. 2005. 83: 764-773).

[0084] siRNA Structures

[0085] The selection and synthesis of siRNA corresponding to known genes has been widely reported; (see for example Ui-Tei et al., J Biomed Biotech. 2006; 2006: 65052; Chalk et al., BBRC. 2004, 319(1): 264-74; Sioud & Leirdal, Met. Mol Biol.; 2004, 252:457-69; Levenkova et al., Bioinform. 2004, 20(3):430-2; Ui-Tei et al., NAR. 2004, 32(3):936-48).

[0086] For examples of the use of, and production of, modified siRNA see, for example, Braasch et al., Biochem. 2003, 42(26):7967-75; Chiu et al., RNA, 2003, 9(9):1034-48; PCT publications WO 2004/015107 (atugen AG) and WO 02/44321 (Tuschl et al). U.S. Pat. Nos. 5,898,031 and 6,107,094, teach chemically modified oligomers. US Patent Publication Nos. 2005/0080246 and 2005/0042647 relate to oligomeric compounds having an alternating motif and dsRNA compounds having chemically modified internucleoside linkages, respectively.

[0087] Other modifications have been disclosed. The inclusion of a 5′-phosphate moiety was shown to enhance activity of siRNAs in Drosophila embryos (Boutla, et al., Curr. Biol. 2001, 11:1776-1780) and is required for siRNA function in human HeLa cells (Schwarz et al., Mol. Cell, 2002, 10:537-48). Amarzguioui et al., (NAR, 2003, 31(2):589-95) showed that siRNA activity depended on the positioning of the 2′-O-methyl modifications. Holen et al (NAR. 2003, 31(9):2401-07) report that an siRNA having small numbers of 2′-O-methyl modified nucleosides gave good activity compared to wild type but that the activity decreased as the numbers of 2′-O-methyl modified nucleosides was increased. Chiu and Rana (RNA. 2003, 9:1034-48) teach that incorporation of 2′-O-methyl modified nucleosides in the sense or antisense strand (fully modified strands) severely reduced siRNA activity relative to unmodified siRNA. The placement of a 2′-O-methyl group at the 5′-terminus on the antisense strand was reported to severely limit activity whereas placement at the 3′-terminus of the antisense and at both termini of the sense strand was tolerated (Czauderna et al., NAR. 2003, 31(11):2705-16; WO 2004/015107). The siRNA molecules of the present application offer an advantage in that they are non-toxic and may be formulated as pharmaceutical compositions for treatment of various diseases.

[0088] NADPH Oxidase

[0089] The NADPH oxidase (NOX) family of proteins in humans consists of at least thirteen unique gene products: NOX1, NOX2 (gp91phox, CYBB), NOX3, NOX4, NOX5, DUOX1 and DUOX2 and associated proteins p22phox (CYBA), NOXO1, NOXO2 (p47phox, NCF1) NOXA1, NOXA2 (p67phox, NCF2) and p40phox (NCF4) (hereinafter “NOX genes”). Each member of the NOX family has a specific tissue expression pattern. For example, NOX1 is highly expressed in colonic epithelium, NOX2 has a broad expression pattern while NOX4 has been detected primarily in renal tubular epithelium (Geiszt et al., PNAS USA 2000, 97:8010-8014) and proliferating vascular smooth muscle (Lassegue et al., Circ Res. 2001 88(9):888-94). Reactive oxygen species (ROS) generated in many tissues has been shown to originate from the activity of NOX enzymes and NOX gene expression has been associated with various pathological processes (comprehensive review in Bedard and Krause, Physiol. Rev. 2007. 87:245-313, hereby incorporated by reference in its entirety).

[0090] Chemically Modified siRNA

[0091] The present application provides chemically modified siRNA compounds that are active and/or stable and/or have reduced off target or immunostimulatory effects, compared to unmodified siRNA oligonucleotides.

[0092] The nucleotides used in synthesizing siRNA are selected from naturally occurring or synthetic modified bases. Naturally occurring bases include adenine, guanine, cytosine, thymine and uracil. Modified bases of nucleotides include inosine, xanthine, hypoxanthine, 2-aminoadenine, 6-methyl, 2-propyl and other alkyl adenines, 5-halo uracil, 5-halo cytosine, 6-aza cytosine and 6-aza thymine, pseudo uracil, 4-thiouracil, 8-haloadenine, 8-aminoadenine, 8-thiol adenine, 8-thiolalkyl adenines, 8-hydroxyl adenine and other 8-substituted adenines, 8-haloguanines, 8-aminoguanine, 8-thiolguanine, 8-thioalkyl guanines, 8-hydroxyl guanine and other substituted guanines, other aza and deaza adenines, other aza and deaza guanines, 5-trifluoromethyl uracil, 5-trifluoromethylcytosine and 5-fluoro cytosine.

[0093] In addition, analogs of polynucleotides can be prepared wherein the structure of one or more nucleotide is fundamentally altered and better suited for a therapeutic agent or an experimental reagent. An example of a nucleotide analog is a peptide nucleic acid (PNA) wherein the deoxyribose (or ribose) phosphate backbone in DNA (or RNA) is replaced with a polyamide backbone which is similar to that found in peptides. PNA analogs have been shown to be resistant to enzymatic degradation and to have extended lives in vivo and in vitro. Mirror nucleotides (“L-nucleotides”) may also be employed.

[0094] Possible modifications to the sugar residue are manifold and include 2′-O alkyl, locked nucleic acid (LNA), glycol nucleic acid (GNA), threose nucleic acid (TNA), arabinoside, altritol (ANA) and other 6-membered sugars including morpholinos, and cyclohexinyls.

[0095] LNA nucleotides are disclosed in International Patent Publication Nos. WO 00/47599, WO 99/14226, and WO 98/39352. Examples of siRNA compounds comprising LNA nucleotides are disclosed in Elmen et al., (NAR 2005. 33(0:439-447) and in PCT Patent Publication No. WO 2004/083430.

[0096] Examples of PACE nucleotides and analogs are disclosed in U.S. Pat. Nos. 6,693,187 and 7,067,641 both herein incorporated by reference in their entirety.

[0097] In various embodiments, the compounds of the present application are synthesized using one or more inverted nucleotides, for example inverted thymidine or inverted adenine (for example see Takei, et al., 2002. JBC 277(26):23800-06.)

[0098] Certain structures include siRNA compounds having one or a plurality of 2′-5′ internucleotide linkages (bridges or backbone).

[0099] In the context of the present application, a “mirror” nucleotide also referred to as a Spiegelmer, is a nucleotide with reverse chirality to the naturally occurring or commonly employed nucleotide, i.e., a mirror image of the naturally occurring or commonly employed nucleotide. In various embodiments, the mirror nucleotide is a ribonucleotide (L-RNA) or a deoxyribonucleotide (L-DNA). deoxyriboabasic 5′-phosphate. Non-limiting examples of mirror nucleotide include L-DNA (L-deoxyriboadenosine-3′-phosphate (mirror dA); L-deoxyribocytidine-3′-phosphate (mirror dC); L-deoxyriboguanosine-3′-phosphate (mirror dG); L-deoxyribothymidine-3′-phosphate (mirror image dT)) and L-RNA (L-riboadenosine-3′-phosphate (mirror rA); L-ribocytidine-3′-phosphate (mirror rC); L-riboguanosine-3′-phosphate (mirror rG); L-ribouracil-3′-phosphate (mirror dU). In some embodiment the mirror nucleotide further comprises at least one sugar, base and or backbone modification. U.S. Pat. No. 6,602,858 discloses nucleic acid catalysts comprising at least one L-nucleotide substitution.

[0100] The term “unconventional moiety” as used herein refers to abasic ribose moiety, an abasic deoxyribose moiety, a deoxyribonucleotide, a modified deoxyribonucleotide, a mirror nucleotide, a non-base pairing nucleotide analog and a nucleotide joined to an adjacent nucleotide by a 2′-5′ internucleotide phosphate bond; bridged nucleic acids including LNA and ethylene bridged nucleic acids.

[0101] The term “capping moiety” as used herein includes abasic ribose moiety, abasic deoxyribose moiety, modifications abasic ribose and abasic deoxyribose moieties including 2′ O alkyl modifications; inverted abasic ribose and abasic deoxyribose moieties and modifications thereof; C6-imino-Pi; a mirror nucleotide including L-DNA and L-RNA; 5′OMe nucleotide; and nucleotide analogs including 4′,5′-methylene nucleotide; 1-(β-D-erythrofuranosyl)nucleotide; 4′-thio nucleotide, carbocyclic nucleotide; 5′-amino-alkyl phosphate; 1,3-diamino-2-propyl phosphate, 3-aminopropyl phosphate; 6-aminohexyl phosphate; 12-aminododecyl phosphate; hydroxypropyl phosphate; 1,5 -anhydrohexitol nucleotide; alpha-nucleotide; threo-pentofuranosyl nucleotide; acyclic 3′,4′-seco nucleotide; 3,4-dihydroxybutyl nucleotide; 3,5-dihydroxypentyl nucleotide, 5′-5′-inverted abasic moiety; 1,4-butanediol phosphate; 5′-amino; and bridging or non bridging methylphosphonate and 5′-mercapto moieties.

[0102] Abasic deoxyribose moiety includes for example abasic deoxyribose-3′-phosphate; 1,2-dideoxy-D-ribofuranose-3-phosphate;1,4-anhydro-2-deoxy-D-ribitol-3-phosphate. Inverted abasic deoxyribose moiety includes inverted deoxyriboabasic; 3′,5′ inverted.

[0103] In some embodiments, backbone modifications, such as ethyl (resulting in a phospho-ethyl triester); propyl (resulting in a phospho-propyl triester); and butyl (resulting in a phospho-butyl triester) are also present. Other backbone modifications include polymer backbones, cyclic backbones, acyclic backbones, thiophosphate-D-ribose backbones, amidates, phosphonoacetates. Certain structures include siRNA compounds having one or a plurality of 2′-5′ internucleotide linkages (bridges or backbone). Other possible backbone modifications include thioate modifications or 2′-5′ bridged backbone modifications.

[0104] Additional modifications which present in various embodiments of the siRNA molecules according to the present application include nucleoside modifications such as artificial nucleic acids, peptide nucleic acid (PNA), morpholino and locked nucleic acid (LNA), glycol nucleic acid (GNA), threose nucleic acid (TNA), arabinoside, and mirror nucleoside (for example, beta-L-deoxynucleoside instead of beta-D-deoxynucleoside). In further embodiments, said molecules additionally contain modifications on the sugar, such as 2′ alkyl, 2′ fluoro, 2′O allyl 2′amine and 2′alkoxy. Many additional sugar modifications are discussed herein.

[0105] In further embodiments, the inhibitory nucleic acid molecules of the present application comprise one or more gaps and/or one or more nicks and/or one ore more mismatches. Without wishing to be bound by theory, gaps, nicks and mismatches have the advantage of partially destabilizing the nucleic acid/siRNA, so that it is more easily processed by endogenous cellular machinery such as DICER, DROSHA or RISC into its inhibitory components.

[0106] In the context of the present application, a gap in a nucleic acid refers to the absence of one or more internal nucleotides in one strand, while a nick in a nucleic acid refers to the absence of a internucleotide linkage between two adjacent nucleotides in one strand. In various embodiments, the siRNA molecules of the present application contain one or more gaps and/or one or more nicks.

[0107] Further provided by the present application is an siRNA compound encoded by any of the molecules disclosed herein, a vector encoding any of the molecules disclosed herein, and a pharmaceutical composition comprising any of the molecules disclosed herein or the vectors encoding them; and a pharmaceutically acceptable carrier.

[0108] The selection and synthesis of siRNA corresponding to known genes has been widely reported; see for example Ui-Tei et al., J Biomed Biotechnol. 2006; 65052; Chalk et al., BBRC. 2004, 319(1):264-74; Sioud & Leirdal, Met. Mol Biol. 2004, 252:457-69; Levenkova et al., Bioinform. 2004, 20(3):430-2; Ui-Tei et al., NAR. 2004, 32(3):936-48. For examples of the use and production of modified siRNA see for example Braasch et al., Biochem. 2003, 42(26):7967-75; Chiu et al., RNA. 2003, 9(9):1034-48; PCT Publication Nos. WO 2004/015107 and WO 02/44321 and U.S. Pat. Nos. 5,898,031 and 6,107,094.

[0109] Tables A1-A18 and B1-B15 provide sense and antisense oligonucleotide pairs useful in preparing corresponding siRNA compounds of the present application.

[0110] In general, some deviation from the target mRNA sequence is tolerated without compromising the siRNA activity (see e.g. Czauderna et al., 2003, NAR 31(11), 2705-2716). An siRNA of the application down-regulates target gene expression or over-expression on a post-transcriptional level with or without destroying the mRNA. Without being bound by theory, siRNA targets the mRNA for specific cleavage and degradation and/or inhibits translation from the targeted message.

[0111] Possible modifications on the 2′ moiety of the sugar residue include amino, fluoro, methoxy alkoxy, alkyl, amino, fluoro, chloro, bromo, CN, CF, imidazole, carboxylate, thioate, C₁ to C₁₀ lower alkyl, substituted lower alkyl, alkaryl or aralkyl, OCF₃, OCN, O-, S-, or N-alkyl; O-, S-, or N-alkenyl; SOCH₃; SO₂CH₃; ONO₂; NO₂, N₃; heterozycloalkyl; heterozycloalkaryl; aminoalkylamino; polyalkylamino or substituted silyl, as, among others, described in European patents EP 0 586 520 B1 or EP 0 618 925 B1. One or more deoxyribonucleotides are also tolerated in the compounds of the present application. As used herein, in the description of any strategy for the design of molecules, RNAi or any embodiment of RNAi disclosed herein, the term “end modification” means a chemical entity added to the terminal 5′ or 3′ nucleotide of the sense and/or antisense strand. Examples for such end modifications include, but are not limited to, 3′ or 5′ phosphate, inverted abasic, abasic, amino, fluoro, chloro, bromo, CN, CF₃, methoxy, imidazolyl, carboxylate, phosphorothioate, C₁ to C₂₂ and lower alkyl, lipids, sugars and polyaminoacids (i.e. peptides), substituted lower alkyl, alkaryl or aralkyl, OCF₃, OCN, O-, S-, or N-alkyl; O-, S-, or N-alkenyl; SOCH₃; SO₂CH₃; ONO₂; NO₂, N₃; heterocycloalkyl; heterocycloalkaryl; aminoalkylamino; polyalkylamino or substituted silyl, as, among others, described in European patents EP 0586520B1 or EP 0618925 B1.

[0112] In some embodiments the siRNA is blunt ended, i.e. Z and Z′ are absent, on one or both ends. More specifically, in some embodiments, the siRNA is blunt ended on the end defined by the 5′-terminus of the first strand and the 3′-terminus of the second strand, and/or the end defined by the 3′-terminus of the first strand and the 5′-terminus of the second strand.

[0113] In other embodiments at least one of the two strands have an overhang of at least one nucleotide at the 5′-terminus; in some embodiments the overhang consist of at least one deoxyribonucleotide. In other embodiments at least one of the strands also optionally has an overhang of at least one nucleotide at the 3′-terminus. In various embodiments the overhang consists of from about 1 to about 5 nucleotides.

[0114] In some embodiments the compounds of the present application further comprise an end (terminus) modification. In some embodiments a biotin group is attached to either the most 5′ or the most 3′ nucleotide of the antisense and/or sense strand or to both ends. In one preferred embodiment the biotin group is coupled to a polypeptide or a protein, as among others described in Chun-Fang Xia et al., Mol. Pharmaceutics, 2009, 6 (3), pp 747-751. It is also within the scope of the present application that the polypeptide or protein is attached through any of the other aforementioned modifications.

[0115] The various end modifications as disclosed herein are preferably located at the ribose moiety of a nucleotide of the nucleic acid according to the present application. More particularly, in various embodiments the end modification is attached to or replaces any of the OH-groups of the ribose moiety, including but not limited to the 2′OH, 3′OH and 5′OH position, provided that the nucleotide thus modified is a terminal nucleotide. Inverted abasic or abasic are nucleotides, either deoxyribonucleotides or ribonucleotides which do not have a nucleobase moiety. This kind of compound is, inter alia, described in Sternberger, et al., (Antisense Nucleic Acid Drug Dev, 2002.12, 131-43).

[0116] The length of RNA duplex is from about 18 to about 40 ribonucleotides, preferably 19, 21 or 23 ribonucleotides. Further, in various embodiments the length of each strand independently has a length selected from the group consisting of about 15 to about 40 bases, preferably 18 to 23 bases and more preferably 19, 21 or 23 ribonucleotides.

[0117] In certain embodiments the complementarity between said antisense strand and the target nucleic acid is perfect. In some embodiments, the strands are substantially complementary, i.e. having one, two or up to three mismatches between said antisense strand and the target nucleic acid. “Substantially complementary” refers to complementarity of greater than about 84%, to another sequence. For example in a duplex region consisting of 19 base pairs one mismatch results in 94.7% complementarity, two mismatches results in about 89.5% complementarity and 3 mismatches results in about 84.2% complementarity, rendering the duplex region substantially complementary. Accordingly “substantially identical” refers to identity of greater than about 84%, to another sequence.

[0118] In some embodiments the antisense strand and the sense strand are linked by a loop structure, which is comprised of a non-nucleic acid polymer such as, inter alia, polyethylene glycol. Alternatively, the loop structure is comprised of a nucleic acid, including modified and non-modified ribonucleotides and modified and non-modified deoxyribonucleotides.

[0119] Further, in some embodiments the 5′-terminus of the antisense strand of the siRNA is linked to the 3′-terminus of the sense strand, or the 3′-terminus of the antisense strand is linked to the 5′-terminus of the sense strand, said linkage being via a nucleic acid linker typically having a length between 2-100 nucleobases, preferably about 2 to about 30 nucleobases.

[0120] In preferred embodiments the compounds of the application have alternating ribonucleotides modified in at least one of the antisense and the sense strands of the compound, for 19 mer and 23 mer oligomers the ribonucleotides at the 5′ and 3′ termini of the antisense strand are modified in their sugar residues, and the ribonucleotides at the 5′ and 3′ termini of the sense strand are unmodified in their sugar residues. For 21 mer oligomers the ribonucleotides at the 5′ and 3′ termini of the sense strand are modified in their sugar residues, and the ribonucleotides at the 5′ and 3′ termini of the antisense strand are unmodified in their sugar residues, or have an optional additional modification at the 3′ terminus. As mentioned above, it is preferred that the middle nucleotide of the antisense strand is unmodified.

[0121] Additionally, the application provides siRNA compounds comprising a double stranded nucleic acid molecule wherein 1, 2, or 3 of the nucleotides in one strand or both strands are substituted thereby providing at least one base pair mismatch. The substituted nucleotides in each strand are preferably in the terminal region of one strand or both strands.

[0122] According to one preferred embodiment , the antisense and the sense strands of the oligonucleotide/siRNA are phosphorylated only at the 3′-terminus and not at the 5′-terminus. According to another preferred embodiment of the application, the antisense and the sense strands are non-phosphorylated. According to yet another preferred embodiment of the application, the 5′ most ribonucleotide in the sense strand is modified to abolish any possibility of in vivo 5′-phosphorylation.

[0123] In various embodiments siRNA sequence disclosed herein are modified to yield modifications/structures disclosed herein. The combination of sequence plus structure is novel. The novel siRNA compounds are useful in prevention and/or treatment of various medical conditions and pathologies, including diseases, injuries and disorders disclosed herein.

[0124] Particular molecules to be administered according to the methods of the present application are disclosed below under the heading “structural motifs”. For the sake of clarity, any of these molecules can be administered according to any of the methods of the present application.

[0125] Structural Motifs

[0126] According to the present application the siRNA compounds are chemically and or structurally modified according to one of the following modifications set forth in Structures below or as tandem siRNA or RNAstar.

[0127] In one aspect the present invention provides a compound having Structure (IX) set forth below:

| | | |
|---|---|---|
| (IX) | 5′ (N)x-Z 3′ | (antisense strand) |
| | 3′ Z′-(N′)y-z″ 5′ | (sense strand) |

[0128] wherein each of N and N′ is a ribonucleotide which may be unmodified or modified, or an unconventional moiety;

[0129] wherein each of (N)x and (N′)y is an oligonucleotide in which each consecutive N or N′ is joined to the next N or N′ by a covalent bond;

[0130] wherein Z and Z′ may be present or absent, but if present is independently 1-5 consecutive nucleotides covalently attached at the 3′ terminus of the strand in which it is present;

[0131] wherein z″ may be present or absent, but if present is a capping moiety covalently attached at the 5′ terminus of (N′)y;

[0132] wherein x=18 to 27;

[0133] wherein y=18 to 27;

[0134] wherein (N)x comprises modified and unmodified ribonucleotides, each modified ribonucleotide having a 2′-O-methyl on its sugar, wherein N at the 3′ terminus of (N)x is a modified ribonucleotide, (N)x comprises at least five alternating modified ribonucleotides beginning at the 3′ end and at least nine modified ribonucleotides in total and each remaining N is an unmodified ribonucleotide;

[0135] wherein in (N′)y at least one unconventional moiety is present, which unconventional moiety may be an abasic ribose moiety, an abasic deoxyribose moiety, a modified or unmodified deoxyribonucleotide, a mirror nucleotide, and a nucleotide joined to an adjacent nucleotide by a 2′-5′ internucleotide phosphate bond; and wherein the sequence of (N)x has complementary to the sequence of (N′)y; and the sequence of (N′)y has identity to the sequence of an mRNA encoded by a target gene.

[0136] In some embodiments x=y=19. In other embodiments x=y=23. In some embodiments x=y=19 and the at least one unconventional moiety is present at positions 15, 16, 17, or 18 in (N′)y. In some embodiments the unconventional moiety is selected from a mirror nucleotide, an abasic ribose moiety and an abasic deoxyribose moiety. In some preferred embodiments the unconventional moiety is a mirror nucleotide, preferably an L-DNA moiety. In some embodiments an L-DNA moiety is present at position 17, position 18 or positions 17 and 18.

[0137] In other embodiments the unconventional moiety is an abasic moiety.

[0138] In some embodiments of Structure (IX) (N)x comprises nine alternating modified ribonucleotides. In other embodiments of Structure (IX) (N)x comprises nine alternating modified ribonucleotides further comprising a 2′O modified nucleotide at position 2. In some embodiments (N)x comprises 2′OMe sugar modified ribonucleotides at the odd numbered positions 1, 3, 5, 7, 9, 11, 13, 15, 17, 19. In other embodiments (N)x further comprises a 2′OMe sugar modified ribonucleotide at one or both of positions 2 and 18. In yet other embodiments (N)x comprises 2′OMe sugar modified ribonucleotides at positions 2, 4, 6, 8, 11, 13, 15, 17, 19.

[0139] In various embodiments z″ is present and is selected from an abasic ribose moiety, a deoxyribose moiety; an inverted abasic ribose moiety, a deoxyribose moiety; C6-amino-Pi; a mirror nucleotide.

[0140] In various embodiments of structure IX, Z and Z′ are absent; x=y=19; in (N′)y the nucleotide in at least one of positions 15, 16, 17, 18 and 19 comprises a nucleotide selected from an abasic pseudo-nucleotide, a mirror nucleotide, a deoxyribonucleotide and a nucleotide joined to an adjacent nucleotide by a 2′-5′ internucleotide bond; and

[0141] (N)x comprises alternating 2′OMe sugar modified ribonucleotides and unmodified ribonucleotides and the ribonucleotide located at the middle position of (N)x being modified or unmodified, preferably unmodified.

[0142] In various embodiments (N)x comprises 2′O-Me modified ribonucleotides at the odd numbered positions (5′ to 3′; positions 1, 3, 5, 7, 9, 11, 13, 15, 17, 19). In some embodiments (N)x further comprises 2′O-Me modified ribonucleotides at one or both positions 2 and 18. In other embodiments (N)x comprises 2′OMe sugar modified ribonucleotides at positions 2, 4, 6, 8, 11, 13, 15, 17, 19.

[0143] In various embodiments of Structure (IX) (N)ₓ comprises an antisense sequence set forth in any one of SEQ ID NOS: 668-1311, 1812-2311, 2931-3549, 4050-4549, 5571-6391, 6892-7391, 7712-8031, 8532-9031, 9532-10031, 10532-11031, 11084-11135, 11177-11217, 11314-11409, 11584-11757, 11796-11833, 11862-11889, 12416-12941, 13442-13941, 14333-14723, 15224-15723, 15905-16085, 16514-16941, 17167-17391, 17881-18369, 18512-18653, 18973-19291, 19454-19615, 19906-20195, 20356-20515, 20847-21177, 21522-21865, 22366-22865, 23012-23157.

[0144] In some embodiments the sequence of (N′)y is fully complementary to the sequence of (N)x. In other embodiments the sequence of (N′)y is substantially complementary to the sequence of (N)x.

[0145] In one aspect the present application provides a compound set forth as Structure (A):

| | | |
|---|---|---|
| (A) | 5′ (N)ₓ-Z 3′ | (antisense strand) |
| | 3′ Z′-(N′)_{y} 5′ | (sense strand) |

[0146] wherein each of N and N′ is a nucleotide selected from an unmodified ribonucleotide, a modified ribonucleotide, an unmodified deoxyribonucleotide and, a modified deoxyribonucleotide;

[0147] wherein each of (N)ₓ and (N′)_{y} is an oligonucleotide in which each consecutive N or N′ is joined to the next N or N′ by a covalent bond;

[0148] wherein each of x and y is an integer between 18 and 40;

[0149] wherein each of Z and Z′ may be present or absent, but if present is 1-5 consecutive nucleotides covalently attached at the 3′ terminus of the strand in which it is present;

[0150] wherein the sequence of (N′)_{y} has complementary to (N)x; and wherein the sequence of (N)ₓ comprises an antisense sequence set forth in any one of SEQ ID NOS: 668-1311, 1812-2311, 2931-3549, 4050-4549, 5571-6391, 6892-7391, 7712-8031, 8532-9031, 9532-10031, 10532-11031, 11084-11135, 11177-11217, 11314-11409, 11584-11757, 11796-11833, 11862-11889, 12416-12941, 13442-13941, 14333-14723, 15224-15723, 15905-16085, 16514-16941, 17167-17391, 17881-18369, 18512-18653, 18973-19291, 19454-19615, 19906-20195, 20356-20515, 20847-21177, 21522-21865, 22366-22865, 23012-23157.

[0151] In some embodiments the sequence of (N′)y is fully complementary to the sequence of (N)x. In other embodiments the sequence of (N′)y is substantially complementary to the sequence of (N)x.

[0152] In certain embodiments the present application provides a compound having Structure (B):

| | | |
|---|---|---|
| (B) | 5′ (N)x 3′ | antisense strand |
| | 3′ (N′)y 5′ | sense strand |

[0153] wherein each of (N)ₓ and (N′)_{y} is an oligomer in which each consecutive N or N′ is an unmodified ribonucleotide or a modified ribonucleotide joined to the next N or N′ by a covalent bond;

[0154] wherein each of x and y=19, 21 or 23 and (N)ₓ and (N′)_{y} are fully complementary wherein alternating ribonucleotides in each of (N)ₓ and (N′)_{y} are 2′OMe sugar modified ribonucleotides;

[0155] wherein the sequence of (N)_{y} has complementary to (N)x; and wherein the sequence of (N)ₓ comprises an antisense sequence set forth in any one of SEQ ID NOS: 1812-2311, 4050-4549, 6892-7391, 8532-9031, 10532-11031, 11177-11217, 11584-11757, 11862-11889, 13442-13941, 15224-15723, 16514-16941, 17881-18369, 18973-19291, 19906-20195, 20847-21177, 22366-22865, 23012-23157.

[0156] In some embodiments each of (N)ₓ and (N′)_{y} is independently phosphorylated or non-phosphorylated at the 3′ and 5′ termini.

[0157] In certain embodiments wherein each of x and y=19 or 23, each N at the 5′ and 3′ termini of (N)ₓ is modified; and each N′ at the 5′ and 3′ termini of (N′)_{y} is unmodified.

[0158] In certain embodiments wherein each of x and y=21, each N at the 5′ and 3′ termini of (N)ₓ is unmodified; and each N′ at the 5′ and 3′ termini of (N′)_{y} is modified.

[0159] In particular embodiments, when x and y=19, the siRNA is modified such that a 2′-O-methyl (2′-OMe) group is present on the first, third, fifth, seventh, ninth, eleventh, thirteenth, fifteenth, seventeenth and nineteenth nucleotide of the antisense strand (N)ₓ, and whereby the very same modification, i. e. a 2′-OMe group, is present at the second, fourth, sixth, eighth, tenth, twelfth, fourteenth, sixteenth and eighteenth nucleotide of the sense strand (N′)_{y}. In various embodiments these particular siRNA compounds are blunt ended at both termini.

[0160] In some embodiments, the present application provides a compound having Structure (C):

| | | |
|---|---|---|
| (C) | 5′ (N)x-Z 3′ | antisense strand |
| | 3′ Z′-(N′)y 5′ | sense strand |

[0161] wherein each of N and N′ is a nucleotide independently selected from an unmodified ribonucleotide, a modified ribonucleotide, an unmodified deoxyribonucleotide and a modified deoxyribonucleotide;

[0162] wherein each of (N)x and (N′)y is an oligomer in which each consecutive nucleotide is joined to the next nucleotide by a covalent bond;

[0163] each of x and y is an integer between 18 and 40;

[0164] wherein in (N)x the nucleotides are unmodified or (N)x comprises alternating 2′OMe sugar modified ribonucleotides and unmodified ribonucleotides; and the ribonucleotide located at the middle position of (N)x being modified or unmodified preferably unmodified;

[0165] wherein (N′)y comprises unmodified ribonucleotides further comprising one modified nucleotide at a terminal or penultimate position, wherein the modified nucleotide is selected from the group consisting of a mirror nucleotide, a bicyclic nucleotide, a 2′-sugar modified nucleotide, an altritol nucleotide, or a nucleotide joined to an adjacent nucleotide by an internucleotide linkage selected from a 2′-5′ phosphodiester bond, a P-alkoxy linkage or a PACE linkage;

[0166] wherein if more than one nucleotide is modified in (N′)y, the modified nucleotides may be consecutive;

[0167] wherein each of Z and Z′ may be present or absent, but if present is 1-5 deoxyribonucleotides covalently attached at the 3′ terminus of any oligomer to which it is attached;

[0168] wherein the sequence of (N′)_{y} comprises a sequence having complementarity to (N)x; and wherein the sequence of (N)ₓ comprises an antisense sequence having complementary to about 18 to about 40 consecutive ribonucleotides in an mRNA set forth in any one SEQ ID NOS:1-23. In some preferred embodiments (N)ₓ comprises an antisense sequence set forth in any one of SEQ ID NOS: 668-1311, 1812-2311, 2931-3549, 4050-4549, 5571-6391, 6892-7391, 7712-8031, 8532-9031, 9532-10031, 10532-11031, 11084-11135, 11177-11217, 11314-11409, 11584-11757, 11796-11833, 11862-11889, 12416-12941, 13442-13941, 14333-14723, 15224-15723, 15905-16085, 16514-16941, 17167-17391, 17881-18369, 18512-18653, 18973-19291, 19454-19615, 19906-20195, 20356-20515, 20847-21177, 21522-21865, 22366-22865, 23012-23157.

[0169] In some embodiments the sequence of (N′)y is fully complementary to the sequence of (N)x. In other embodiments the sequence of (N′)y is substantially complementary to the sequence of (N)x.

[0170] In particular embodiments, x=y=19 and in (N)x each modified ribonucleotide is modified so as to have a 2′-O-methyl on its sugar and the ribonucleotide located at the middle of (N)x is unmodified. Accordingly, in a compound wherein x=19, (N)x comprises 2′-O-methyl sugar modified ribonucleotides at positions 1, 3, 5, 7, 9, 11, 13, 15, 17 and 19. In other embodiments, (N)x comprises 2′OMe sugar modified ribonucleotides at positions 2, 4, 6, 8, 11, 13, 15, 17 and 19. In other embodiments, (N)x comprises 2′OMe sugar modified ribonucleotides at positions 2, 4, 8, 11, 13, 15, 17 and 19 and may further comprise at least one abasic or inverted abasic unconventional moiety for example in position 6. In other embodiments, (N)x comprises 2′OMe modified ribonucleotides at positions 2, 4, 6, 8, 11, 13, 17 and 19 and may further comprise at least one abasic or inverted abasic unconventional moiety for example in position 15. In other embodiments, (N)x comprises 2′OMe modified ribonucleotides at positions 2, 4, 6, 8, 11, 13, 15, 17 and 19 and may further comprise at least one abasic or inverted abasic unconventional moiety for example in position 14. In other embodiments, (N)x comprises 2′OMe modified ribonucleotides at positions 1, 2, 3, 7, 9, 11, 13, 15, 17 and 19 and may further comprise at least one abasic or inverted abasic unconventional moiety for example in position 5. In other embodiments, (N)x comprises 2′OMe modified ribonucleotides at positions 1, 2, 3, 5, 7, 9, 11, 13, 15, 17 and 19 and may further comprise at least one abasic or inverted abasic unconventional moiety for example in position 6. In other embodiments, (N)x comprises 2′OMe modified ribonucleotides at positions 1, 2, 3, 5, 7, 9, 11, 13, 17 and 19 and may further comprise at least one abasic or inverted abasic unconventional moiety for example in position 15. In other embodiments, (N)x comprises 2′OMe modified ribonucleotides at positions 1, 2, 3, 5, 7, 9, 11, 13, 15, 17 and 19 and may further comprise at least one abasic or inverted abasic unconventional moiety for example in position 14. In other embodiments, (N)x comprises 2′OMe sugar modified ribonucleotides at positions 2, 4, 6, 7, 9, 11, 13, 15, 17 and 19 and may further comprise at least one abasic or inverted abasic unconventional moiety for example in position 5. In other embodiments, (N)x comprises 2′OMe sugar modified ribonucleotides at positions 1, 2, 4, 6, 7, 9, 11, 13, 15, 17 and 19 and may further comprise at least one abasic or inverted abasic unconventional moiety for example in position 5. In other embodiments, (N)x comprises 2′OMe sugar modified ribonucleotides at positions 2, 4, 6, 8, 11, 13, 14, 16, 17 and 19 and may further comprise at least one abasic or inverted abasic unconventional moiety for example in position 15. In other embodiments, (N)x comprises 2′OMe sugar modified ribonucleotides at positions 1, 2, 3, 5, 7, 9, 11, 13, 14, 16, 17 and 19 and may further comprise at least one abasic or inverted abasic unconventional moiety for example in position 15. In other embodiments, (N)x comprises 2′OMe sugar modified ribonucleotides at positions 2, 4, 6, 8, 11, 13, 15, 17 and 19 and may further comprise at least one abasic or inverted abasic unconventional moiety for example in position 7. In other embodiments, (N)x comprises 2′OMe sugar modified ribonucleotides at positions 2, 4, 6, 11, 13, 15, 17 and 19 and may further comprise at least one abasic or inverted abasic unconventional moiety for example in position 8. In other embodiments, (N)x comprises 2′OMe sugar modified ribonucleotides at positions 2, 4, 6, 8, 11, 13, 15, 17 and 19 and may further comprise at least one abasic or inverted abasic unconventional moiety for example in position 9. In other embodiments, (N)x comprises 2′OMe sugar modified ribonucleotides at positions 2, 4, 6, 8, 11, 13, 15, 17 and 19 and may further comprise at least one abasic or inverted abasic unconventional moiety for example in position 10. In other embodiments, (N)x comprises 2′OMe sugar modified ribonucleotides at positions 2, 4, 6, 8, 13, 15, 17 and 19 and may further comprise at least one abasic or inverted abasic unconventional moiety for example in position 11. In other embodiments, (N)x comprises 2′OMe sugar modified ribonucleotides at positions 2, 4, 6, 8, 11, 13, 15, 17 and 19 and may further comprise at least one abasic or inverted abasic unconventional moiety for example in position 12. In other embodiments, (N)x comprises 2′OMe sugar modified ribonucleotides at positions 2, 4, 6, 8, 11, 15, 17 and 19 and may further comprise at least one abasic or inverted abasic unconventional moiety for example in position 13.

[0171] In one embodiment of Structure (C), at least two nucleotides at either or both the 5′ and 3′ termini of (N′)y are joined by a 2′-5′ phosphodiester bond. In certain preferred embodiments x=y=19 or x=y=23; in (N)x the nucleotides alternate between 2′OMe sugar modified ribonucleotides and unmodified ribonucleotides, and the ribonucleotide located at the middle of (N)x being unmodified; and three nucleotides at the 3′ terminus of (N′)y are joined by two 2′-5′ phosphodiester bonds (set forth herein as Structure I).

[0172] In other preferred embodiments, x=y=19; in (N)x the nucleotides alternate between 2′OMe sugar modified ribonucleotides and unmodified ribonucleotides, and the ribonucleotide located at the middle of (N)x being unmodified; and four consecutive nucleotides at the 5′ terminus of (N′)y are joined by three 2′-5′ phosphodiester bonds. In a further embodiment, an additional nucleotide located in the middle position of (N)y may be 2′OMe sugar modified. In another preferred embodiment, in (N)x the nucleotides alternate between 2′OMe sugar modified ribonucleotides and unmodified ribonucleotides, and in (N′)y four consecutive nucleotides at the 5′ terminus are joined by three 2′-5′ phosphodiester bonds and the 5′ terminal nucleotide or two or three consecutive nucleotides at the 5′ terminus comprise 3′-O-methyl modifications.

[0173] In certain preferred embodiments of Structure (C), x=y=19 and in (N′)y, at least one position comprises an abasic or inverted abasic unconventional moiety, preferably five positions comprises an abasic or inverted abasic unconventional moieties. In various embodiments, the following positions comprise an abasic or inverted abasic: positions 1 and 16-19, positions 15-19, positions 1-2 and 17-19, positions 1-3 and 18-19, positions 1-4 and 19 and positions 1-5. (N′)y may further comprise at least one LNA nucleotide.

[0174] In certain preferred embodiments of Structure (C), x=y=19 and in (N′)y the nucleotide in at least one position comprises a mirror nucleotide, a deoxyribonucleotide and a nucleotide joined to an adjacent nucleotide by a 2′-5′ internucleotide bond.

[0175] In certain preferred embodiments of Structure (C), x=y=19 and (N′)y comprises a mirror nucleotide. In various embodiments the mirror nucleotide is an L-DNA nucleotide. In certain embodiments the L-DNA is L-deoxyribocytidine. In some embodiments (N′)y comprises L-DNA at position 18. In other embodiments (N′)y comprises L-DNA at positions 17 and 18. In certain embodiments (N′)y comprises L-DNA substitutions at positions 2 and at one or both of positions 17 and 18. In certain embodiments (N′)y further comprises a 5′ terminal cap nucleotide such as 5′-O-methyl DNA or an abasic or inverted abasic moiety as an overhang.

[0176] In yet other embodiments (N′)y comprises a DNA at position 15 and L-DNA at one or both of positions 17 and 18. In that structure, position 2 may further comprise an L-DNA or an abasic unconventional moiety.

[0177] Other embodiments of Structure (C) are envisaged wherein x=y=21 or wherein x=y=23; in these embodiments the modifications for (N′)y discussed above instead of being on positions 15, 16, 17, 18 are on positions 17, 18, 19, 20 for 21 mer and on positions 19, 20, 21, 22 for 23 mer; similarly the modifications at one or both of positions 17 and 18 are on one or both of positions 19 or 20 for the 21 mer and one or both of positions 21 and 22 for the 23 mer. All modifications in the 19 mer are similarly adjusted for the 21 and 23 mers.

[0178] According to various embodiments of Structure (C), in (N′)y 2, 3, 4, 5, 6, 7, 8 , 9, 10, 11, 12, 13 or 14 consecutive ribonucleotides at the 3′ terminus are linked by 2′-5′ internucleotide linkages In one preferred embodiment, four consecutive nucleotides at the 3′ terminus of (N′)y are joined by three 2′-5′ phosphodiester bonds, wherein one or more of the 2′-5′ nucleotides which form the 2′-5′ phosphodiester bonds further comprises a 3′-O-methyl sugar modification. Preferably the 3′ terminal nucleotide of (N′)y comprises a 2′OMe sugar modification. In certain preferred embodiments of Structure (C), x=y=19 and in (N′)y two or more consecutive nucleotides at positions 15, 16, 17, 18 and 19 comprise a nucleotide joined to an adjacent nucleotide by a 2′-5′ internucleotide bond. In various embodiments the nucleotide forming the 2′-5′ internucleotide bond comprises a 3′ deoxyribose nucleotide or a 3′ methoxy nucleotide. In some embodiments the nucleotides at positions 17 and 18 in (N′)y are joined by a 2′-5′ internucleotide bond. In other embodiments the nucleotides at positions 16, 17, 18, 16-17, 17-18, or 16-18 in (N′)y are joined by a 2′-5′ internucleotide bond.

[0179] In certain embodiments (N′)y comprises an L-DNA at position 2 and 2′-5′ internucleotide bonds at positions 16-17, 17-18, or 16-18. In certain embodiments (N′)y comprises 2′-5′ internucleotide bonds at positions 16-17, 17-18, or 16-18 and a 5′ terminal cap nucleotide.

[0180] According to various embodiments of Structure (C), in (N′)y 2, 3, 4, 5, 6, 7, 8, 9, 10, 11, 12, 13 or 14 consecutive nucleotides at either terminus or 2-8 modified nucleotides at each of the 5′ and 3′ termini are independently mirror nucleotides. In some embodiments the mirror nucleotide is an L-ribonucleotide. In other embodiments the mirror nucleotide is an L-deoxyribonucleotide. The mirror nucleotide may further be modified at the sugar or base moiety or in an internucleotide linkage.

[0181] In one preferred embodiment of Structure (C), the 3′ terminal nucleotide or two or three consecutive nucleotides at the 3′ terminus of (N′)y are L-deoxyribonucleotides.

[0182] In other embodiments of Structure (C), in (N′)y 2, 3, 4, 5, 6, 7, 8, 9, 10, 11, 12, 13 or 14 consecutive ribonucleotides at either terminus or 2-8 modified nucleotides at each of the 5′ and 3′ termini are independently 2′ sugar modified nucleotides. In some embodiments the 2′ sugar modification comprises the presence of an amino, a fluoro, an alkoxy or an alkyl moiety. In certain embodiments the 2′ sugar modification comprises a methoxy moiety (2′-OMe). In one series of preferred embodiments, three, four or five consecutive nucleotides at the 5′ terminus of (N′)y comprise the 2′-OMe modification. In another preferred embodiment, three consecutive nucleotides at the 3′ terminus of (N′)y comprise the 2′OMe modification.

[0183] In some embodiments of Structure (C), in (N′)y 2, 3, 4, 5, 6, 7, 8, 9, 10, 11, 12, 13 or 14 consecutive ribonucleotides at either or 2-8 modified nucleotides at each of the 5′ and 3′ termini are independently bicyclic nucleotide. In various embodiments the bicyclic nucleotide is a locked nucleic acid (LNA). A 2′-O, 4′-C-ethylene-bridged nucleic acid (ENA) is a species of LNA (see below).

[0184] In various embodiments (N′)y comprises modified nucleotides at the 5′ terminus or at both the 3′ and 5′ termini.

[0185] In some embodiments of Structure (C), at least two nucleotides at either or both the 5′ and 3′ termini of (N′)y are joined by P-ethoxy backbone modifications. In certain preferred embodiments x=y=19 or x=y=23; in (N)x the nucleotides alternate between 2′OMe sugar modified ribonucleotides and unmodified ribonucleotides, and the ribonucleotide located at the middle position of (N)x being unmodified; and four consecutive nucleotides at the 3′ terminus or at the 5′ terminus of (N′)y are joined by three P-ethoxy backbone modifications. In another preferred embodiment, three consecutive nucleotides at the 3′ terminus or at the 5′ terminus of (N′)y are joined by two P-ethoxy backbone modifications.

[0186] In some embodiments of Structure (C), in (N′)y 2, 3, 4, 5, 6, 7 or 8, consecutive ribonucleotides at each of the 5′ and 3′ termini are independently mirror nucleotides, nucleotides joined by 2′-5′ phosphodiester bond, 2′ sugar modified nucleotides or bicyclic nucleotide. In one embodiment, the modification at the 5′ and 3′ termini of (N′)y is identical. In one preferred embodiment, four consecutive nucleotides at the 5′ terminus of (N′)y are joined by three 2′-5′ phosphodiester bonds and three consecutive nucleotides at the 3′ terminus of (N′)y are joined by two 2′-5′ phosphodiester bonds. In another embodiment, the modification at the 5′ terminus of (N′)y is different from the modification at the 3′ terminus of (N′)y. In one specific embodiment, the modified nucleotides at the 5′ terminus of (N′)y are mirror nucleotides and the modified nucleotides at the 3′ terminus of (N′)y are joined by 2′-5′ phosphodiester bond. In another specific embodiment, three consecutive nucleotides at the 5′ terminus of (N′)y are LNA nucleotides and three consecutive nucleotides at the 3′ terminus of (N′)y are joined by two 2′-5′ phosphodiester bonds. In (N)x the nucleotides alternate between 2′OMe sugar modified ribonucleotides and unmodified ribonucleotides, and the ribonucleotide located at the middle of (N)x being unmodified, or the ribonucleotides in (N)x being unmodified

[0187] In another embodiment of Structure (C), the present application provides a compound wherein x=y=19 or x=y=23; in (N)x the nucleotides alternate between 2′OMe sugar modified ribonucleotides and unmodified ribonucleotides, and the ribonucleotide located at the middle of (N)x being unmodified; three nucleotides at the 3′ terminus of (N′)y are joined by two 2′-5′ phosphodiester bonds and three nucleotides at the 5′ terminus of (N′)y are LNA such as ENA.

[0188] In another embodiment of Structure (C), five consecutive nucleotides at the 5′ terminus of (N′)y comprise the 2′OMe sugar modification and two consecutive nucleotides at the 3′ terminus of (N′)y are L-DNA.

[0189] In yet another embodiment, the present application provides a compound wherein x=y=19 or x=y=23; (N)x consists of unmodified ribonucleotides; three consecutive nucleotides at the 3′ terminus of (N′)y are joined by two 2′-5′ phosphodiester bonds and three consecutive nucleotides at the 5′ terminus of (N′)y are LNA such as ENA.

[0190] According to other embodiments of Structure (C), in (N′)y the 5′ or 3′ terminal nucleotide, or 2, 3, 4, 5 or 6 consecutive nucleotides at either termini or 1-4 modified nucleotides at each of the 5′ and 3′ termini are independently phosphonocarboxylate or phosphinocarboxylate nucleotides (PACE nucleotides). In some embodiments the PACE nucleotides are deoxyribonucleotides. In some preferred embodiments in (N′)y, 1 or 2 consecutive nucleotides at each of the 5′ and 3′ termini are PACE nucleotides.

[0191] In additional embodiments, the present application provides a compound having Structure (D):

| | | |
|---|---|---|
| (D) | 5′ (N)x-Z 3′ | antisense strand |
| | 3′ Z′-(N′)y 5′ | sense strand |

[0192] wherein each of N and N′ is a nucleotide selected from an unmodified ribonucleotide, a modified ribonucleotide, an unmodified deoxyribonucleotide, a modified deoxyribonucleotide or an unconventional moiety;

[0193] wherein each of (N)x and (N′)y is an oligomer in which each consecutive nucleotide is joined to the next nucleotide by a covalent bond;

[0194] each of x and y is an integer between 18 and 40;

[0195] wherein (N)x comprises unmodified ribonucleotides further comprising one modified nucleotide at the 3′ terminal or penultimate position, wherein the modified nucleotide is selected from the group consisting of a bicyclic nucleotide, a 2′ sugar modified nucleotide, a mirror nucleotide, an altritol nucleotide, or a nucleotide joined to an adjacent nucleotide by an internucleotide linkage selected from a 2′-5′ phosphodiester bond, a P-alkoxy linkage or a PACE linkage;

[0196] wherein (N′)y comprises unmodified ribonucleotides further comprising one modified nucleotide at the 5′ terminal or penultimate position, wherein the modified nucleotide is selected from the group consisting of a bicyclic nucleotide, a 2′ sugar modified nucleotide, a mirror nucleotide, an altritol nucleotide, or a nucleotide joined to an adjacent nucleotide by an internucleotide linkage selected from a 2′-5′ phosphodiester bond, a P-alkoxy linkage or a PACE linkage;

[0197] wherein in each of (N)x and (N′)y modified and unmodified nucleotides are not alternating;

[0198] wherein each of Z and Z′ may be present or absent, but if present is 1-5 deoxyribonucleotides covalently attached at the 3′ terminus of any oligomer to which it is attached;

[0199] wherein the sequence of (N′)_{y} is a sequence having complementarity to (N)x; and wherein the sequence of (N)ₓ comprises an antisense sequence having complementarity to about 18 to about 40 consecutive ribonucleotides in mRNA set forth in any one of SEQ ID NOS:1-23. Preferably (N)ₓ comprises an antisense sequence set forth in any one of SEQ ID NOs: 668-1311, 1812-2311, 2931-3549, 4050-4549, 5571-6391, 6892-7391, 7712-8031, 8532-9031, 9532-10031, 10532-11031, 11084-11135, 11177-11217, 11314-11409, 11584-11757, 11796-11833, 11862-11889, 12416-12941, 13442-13941, 14333-14723, 15224-15723, 15905-16085, 16514-16941, 17167-17391, 17881-18369, 18512-18653, 18973-19291, 19454-19615, 19906-20195, 20356-20515, 20847-21177, 21522-21865, 22366-22865, 23012-23157.

[0200] In some embodiments the sequence of (N′)y is fully complementary to the sequence of (N)x. In other embodiments the sequence of (N′)y is substantially complementary to the sequence of (N)x.

[0201] In some embodiments the sequence of (N)ₓ comprises an antisense sequence having full complementarity to about 18 to about 40 consecutive ribonucleotides in an mRNA set forth in any one of SEQ ID NOS:1-23. In other embodiments the sequence of (N)ₓ comprises an antisense sequence having complementarity to about 18 to about 40 consecutive ribonucleotides in an mRNA set forth in any one of SEQ ID NOS:1-23.

[0202] In one embodiment of Structure (D), x=y=19 or x=y=23; (N)x comprises unmodified ribonucleotides in which two consecutive nucleotides linked by one 2′-5′ internucleotide linkage at the 3′ terminus; and (N′)y comprises unmodified ribonucleotides in which two consecutive nucleotides linked by one 2′-5′ internucleotide linkage at the 5′ terminus.

[0203] In some embodiments, x=y=19 or x=y=23; (N)x comprises unmodified ribonucleotides in which three consecutive nucleotides at the 3′ terminus are joined together by two 2′-5′ phosphodiester bonds; and (N′)y comprises unmodified ribonucleotides in which four consecutive nucleotides at the 5′ terminus are joined together by three 2′-5′ phosphodiester bonds (set forth herein as Structure II).

[0204] According to various embodiments of Structure (D) 2, 3, 4, 5, 6, 7, 8, 9, 10, 11, 12, 13 or 14 consecutive ribonucleotides starting at the ultimate or penultimate position of the 3′ terminus of (N)x and 2, 3, 4, 5, 6, 7, 8 , 9, 10, 11, 12, 13 or 14 consecutive ribonucleotides starting at the ultimate or penultimate position of the 5′ terminus of (N′)y are linked by 2′-5′ internucleotide linkages.

[0205] According to one preferred embodiment of Structure (D), four consecutive nucleotides at the 5′ terminus of (N′)y are joined by three 2′-5′ phosphodiester bonds and three consecutive nucleotides at the 3′ terminus of (N′)x are joined by two 2′-5′ phosphodiester bonds. Three nucleotides at the 5′ terminus of (N′)y and two nucleotides at the 3′ terminus of (N′)x may also comprise 3′-O-methyl modifications.

[0206] According to various embodiments of Structure (D), 2, 3, 4, 5, 6, 7, 8, 9, 10, 11, 12, 13 or 14 consecutive nucleotides starting at the ultimate or penultimate position of the 3′ terminus of (N)x and 2, 3, 4, 5, 6, 7, 8 , 9, 10, 11, 12, 13 or 14 consecutive ribonucleotides starting at the ultimate or penultimate position of the 5′ terminus of (N′)y are independently mirror nucleotides. In some embodiments the mirror is an L-ribonucleotide. In other embodiments the mirror nucleotide is L-deoxyribonucleotide.

[0207] In other embodiments of Structure (D), 2, 3, 4, 5, 6, 7, 8, 9, 10, 11, 12, 13 or 14 consecutive ribonucleotides starting at the ultimate or penultimate position of the 3′ terminus of (N)x and 2, 3, 4, 5, 6, 7, 8, 9, 10, 11, 12, 13 or 14 consecutive ribonucleotides starting at the ultimate or penultimate position of the 5′ terminus of (N′)y are independently 2′ sugar modified nucleotides. In some embodiments the 2′ sugar modification comprises the presence of an amino, a fluoro, an alkoxy or an alkyl moiety. In certain embodiments the 2′ sugar modification comprises a methoxy moiety (2′-OMe).

[0208] In one preferred embodiment of Structure (D), five consecutive nucleotides at the 5′ terminus of (N′)y comprise the 2′OMe modification and five consecutive nucleotides at the 3′ terminus of (N′)x comprise the 2′OMe modification. In another preferred embodiment of Structure (D), ten consecutive nucleotides at the 5′ terminus of (N′)y comprise the 2′OMe modification and five consecutive nucleotides at the 3′ terminus of (N′)x comprise the 2′OMe modification. In another preferred embodiment of Structure (D), thirteen consecutive nucleotides at the 5′ terminus of (N′)y comprise the 2′OMe modification and five consecutive nucleotides at the 3′ terminus of (N′)x comprise the 2′OMe modification.

[0209] In some embodiments of Structure (D), in (N′)y 2, 3, 4, 5, 6, 7, 8, 9, 10, 11, 12, 13 or 14 consecutive ribonucleotides starting at the ultimate or penultimate position of the 3′ terminus of (N)x and 2, 3, 4, 5, 6, 7, 8 , 9, 10, 11, 12, 13 or 14 consecutive ribonucleotides starting at the ultimate or penultimate position of the 5′ terminus of (N′)y are independently a bicyclic nucleotide. In various embodiments the bicyclic nucleotide is a locked nucleic acid (LNA) such as a 2′-O, 4′-C-ethylene-bridged nucleic acid (ENA).

[0210] In various embodiments of Structure (D), (N′)y comprises a modified nucleotide selected from a bicyclic nucleotide, a 2′ sugar modified nucleotide, a mirror nucleotide, an altritol nucleotide or a nucleotide joined to an adjacent nucleotide by an internucleotide linkage selected from a 2′-5′ phosphodiester bond, a P-alkoxy linkage or a PACE linkage;

[0211] In various embodiments of Structure (D), (N)x comprises a modified nucleotide selected from a bicyclic nucleotide, a 2′ sugar modified nucleotide, a mirror nucleotide, an altritol nucleotide or a nucleotide joined to an adjacent nucleotide by an internucleotide linkage selected from a 2′-5′ phosphodiester bond, a P-alkoxy linkage or a PACE linkage;

[0212] In embodiments wherein each of the 3′ and 5′ termini of the same strand comprises a modified nucleotide, the modification at the 5′ and 3′ termini is identical. In another embodiment, the modification at the 5′ terminus is different from the modification at the 3′ terminus of the same strand. In one specific embodiment, the modified nucleotides at the 5′ terminus are mirror nucleotides and the modified nucleotides at the 3′ terminus of the same strand are joined by 2′-5′ phosphodiester bond.

[0213] In one specific embodiment of Structure (D), five consecutive nucleotides at the 5′ terminus of (N′)y comprise the 2′OMe modification and two consecutive nucleotides at the 3′ terminus of (N′)y are L-DNA. In addition, the compound may further comprise five consecutive 2′OMe sugar modified nucleotides at the 3′ terminus of (N′)x.

[0214] In various embodiments of Structure (D), the modified nucleotides in (N)x are different from the modified nucleotides in (N′)y. For example, the modified nucleotides in (N)x are 2′ sugar modified nucleotides and the modified nucleotides in (N′)y are nucleotides linked by 2′-5′ internucleotide linkages. In another example, the modified nucleotides in (N)x are mirror nucleotides and the modified nucleotides in (N′)y are nucleotides linked by 2′-5′ internucleotide linkages. In another example, the modified nucleotides in (N)x are nucleotides linked by 2′-5′ internucleotide linkages and the modified nucleotides in (N′)y are mirror nucleotides.

[0215] In additional embodiments, the present application provides a compound having Structure (E):

| | | |
|---|---|---|
| (E) | 5′ (N)x-Z | 3′ antisense strand |
| | 3′ Z′-(N′)y | 5′ sense strand |

[0216] wherein each of N and N′ is a nucleotide selected from an unmodified ribonucleotide, a modified ribonucleotide, an unmodified deoxyribonucleotide, a modified deoxyribonucleotide or an unconventional moiety;

[0217] wherein each of (N)x and (N′)y is an oligomer in which each consecutive nucleotide is joined to the next nucleotide by a covalent bond;

[0218] each of x and y is an integer between 18 and 40;

[0219] wherein (N)x comprises unmodified ribonucleotides further comprising one modified nucleotide at the 5′ terminal or penultimate position, wherein the modified nucleotide is selected from the group consisting of a bicyclic nucleotide, a 2′ sugar modified nucleotide, a mirror nucleotide, an altritol nucleotide, or a nucleotide joined to an adjacent nucleotide by an internucleotide linkage selected from a 2′-5′ phosphodiester bond, a P-alkoxy linkage or a PACE linkage;

[0220] wherein (N′)y comprises unmodified ribonucleotides further comprising one modified nucleotide at the 3′ terminal or penultimate position, wherein the modified nucleotide is selected from the group consisting of a bicyclic nucleotide, a 2′ sugar modified nucleotide, a mirror nucleotide, an altritol nucleotide, or a nucleotide joined to an adjacent nucleotide by an internucleotide linkage selected from a 2′-5′ phosphodiester bond, a P-alkoxy linkage or a PACE linkage;

[0221] wherein in each of (N)x and (N′)y modified and unmodified nucleotides are not alternating;

[0222] wherein each of Z and Z′ may be present or absent, but if present is 1-5 deoxyribonucleotides covalently attached at the 3′ terminus of any oligomer to which it is attached;

[0223] wherein the sequence of (N′)_{y} is a sequence having complementarity to (N)x; and wherein the sequence of (N)ₓ comprises an antisense sequence having complementarity to about 18 to about 40 consecutive ribonucleotides in an mRNA set forth in any one of SEQ ID NOS:1-23. Preferably (N)ₓ comprises an antisense sequence set forth in any one of SEQ ID NOs: 668-1311, 1812-2311, 2931-3549, 4050-4549, 5571-6391, 6892-7391, 7712-8031, 8532-9031, 9532-10031, 10532-11031, 11084-11135, 11177-11217, 11314-11409, 11584-11757, 11796-11833, 11862-11889, 12416-12941, 13442-13941, 14333-14723, 15224-15723, 15905-16085, 16514-16941, 17167-17391, 17881-18369, 18512-18653, 18973-19291, 19454-19615, 19906-20195, 20356-20515, 20847-21177, 21522-21865, 22366-22865, 23012-23157.

[0224] In some embodiments the sequence of (N′)y is fully complementary to the sequence of (N)x. In other embodiments the sequence of (N′)y is substantially complementary to the sequence of (N)x.

[0225] In some embodiments the sequence of (N)ₓ comprises an antisense sequence having full complementarity to about 18 to about 40 consecutive ribonucleotides in an mRNA set forth in any one of SEQ ID NOS:1-23. In other embodiments the sequence of (N)ₓ comprises an antisense sequence having complementarity to about 18 to about 40 consecutive ribonucleotides in an mRNA set forth in any one of SEQ ID NOS:1-23.

[0226] In certain preferred embodiments the ultimate nucleotide at the 5′ terminus of (N)x is unmodified.

[0227] According to various embodiments of Structure (E) 2, 3, 4, 5, 6, 7, 8, 9, 10, 11, 12, 13 or 14 consecutive ribonucleotides starting at the ultimate or penultimate position of the 5′ terminus of (N)x, preferably starting at the 5′ penultimate position, and 2, 3, 4, 5, 6, 7, 8, 9, 10, 11, 12, 13 or 14 consecutive ribonucleotides starting at the ultimate or penultimate position of the 3′ terminus of (N′)y are linked by 2′-5′ internucleotide linkages.

[0228] According to various embodiments of Structure (E), 2, 3, 4, 5, 6, 7, 8, 9, 10, 11, 12, 13 or 14 consecutive nucleotides starting at the ultimate or penultimate position of the 5′ terminus of (N)x, preferably starting at the 5′ penultimate position, and 2, 3, 4, 5, 6, 7, 8 , 9, 10, 11, 12, 13 or 14 consecutive nucleotides starting at the ultimate or penultimate position of the 3′ terminus of (N′)y are independently mirror nucleotides. In some embodiments the mirror is an L-ribonucleotide. In other embodiments the mirror nucleotide is L-deoxyribonucleotide.

[0229] In other embodiments of Structure (E), 2, 3, 4, 5, 6, 7, 8, 9, 10, 11, 12, 13 or 14 consecutive ribonucleotides starting at the ultimate or penultimate position of the 5′ terminus of (N)x, preferably starting at the 5′ penultimate position, and 2, 3, 4, 5, 6, 7, 8, 9, 10, 11, 12, 13 or 14 consecutive ribonucleotides starting at the ultimate or penultimate position of the 3′ terminus of (N′)y are independently 2′ sugar modified nucleotides. In some embodiments the 2′ sugar modification comprises the presence of an amino, a fluoro, an alkoxy or an alkyl moiety. In certain embodiments the 2′ sugar modification comprises a methoxy moiety (2′-OMe).

[0230] In some embodiments of Structure (E), in (N′)y 2, 3, 4, 5, 6, 7, 8, 9, 10, 11, 12, 13 or 14 consecutive ribonucleotides starting at the ultimate or penultimate position of the 5′ terminus of (N)x, preferably starting at the 5′ penultimate position, and 2, 3, 4, 5, 6, 7, 8, 9, 10, 11, 12, 13 or 14 consecutive ribonucleotides starting at the ultimate or penultimate position of the 3′ terminus of (N′)y are independently a bicyclic nucleotide. In various embodiments the bicyclic nucleotide is a locked nucleic acid (LNA) such as a 2′-O, 4′-C-ethylene-bridged nucleic acid (ENA).

[0231] In various embodiments of Structure (E), (N′)y comprises modified nucleotides selected from a bicyclic nucleotide, a 2′ sugar modified nucleotide, a mirror nucleotide, an altritol nucleotide, a nucleotide joined to an adjacent nucleotide by a P-alkoxy backbone modification or a nucleotide joined to an adjacent nucleotide by an internucleotide linkage selected from a 2′-5′ phosphodiester bond, a P-alkoxy linkage or a PACE linkage at the 3′ terminus or at each of the 3′ and 5′ termini.

[0232] In various embodiments of Structure (E), (N)x comprises a modified nucleotide selected from a bicyclic nucleotide, a 2′ sugar modified nucleotide, a mirror nucleotide, an altritol nucleotide, or a nucleotide joined to an adjacent nucleotide by an internucleotide linkage selected from a 2′-5′ phosphodiester bond, a P-alkoxy linkage or a PACE linkage at the 5′ terminus or at each of the 3′ and 5′ termini.

[0233] In one embodiment where both 3′ and 5′ termini of the same strand comprise a modified nucleotide, the modification at the 5′ and 3′ termini is identical. In another embodiment, the modification at the 5′ terminus is different from the modification at the 3′ terminus of the same strand. In one specific embodiment, the modified nucleotides at the 5′ terminus are mirror nucleotides and the modified nucleotides at the 3′ terminus of the same strand are joined by 2′-5′ phosphodiester bond.

[0234] In various embodiments of Structure (E), the modified nucleotides in (N)x are different from the modified nucleotides in (N′)y. For example, the modified nucleotides in (N)x are 2′ sugar modified nucleotides and the modified nucleotides in (N′)y are nucleotides linked by 2′-5′ internucleotide linkages. In another example, the modified nucleotides in (N)x are mirror nucleotides and the modified nucleotides in (N′)y are nucleotides linked by 2′-5′ internucleotide linkages. In another example, the modified nucleotides in (N)x are nucleotides linked by 2′-5′ internucleotide linkages and the modified nucleotides in (N′)y are mirror nucleotides.

[0235] In additional embodiments, the present application provides a compound having Structure (F):

| | | |
|---|---|---|
| (F) | 5′ (N)x-Z | 3′ antisense strand |
| | 3′ Z′-(N′)y | 5′ sense strand |

[0236] wherein each of N and N′ is a nucleotide selected from an unmodified ribonucleotide, a modified ribonucleotide, an unmodified deoxyribonucleotide, a modified deoxyribonucleotide or an unconventional moiety;

[0237] wherein each of (N)x and (N′)y is an oligomer in which each consecutive nucleotide is joined to the next nucleotide by a covalent bond;

[0238] each of x and y is an integer between 18 and 40;

[0239] wherein each of (N)x and (N′)y comprise unmodified ribonucleotides in which each of (N)x and (N′)y independently comprise one modified nucleotide at the 3′ terminal or penultimate position wherein the modified nucleotide is selected from the group consisting of a bicyclic nucleotide, a 2′ sugar modified nucleotide, a mirror nucleotide, a nucleotide joined to an adjacent nucleotide by a P-alkoxy backbone modification or a nucleotide joined to an adjacent nucleotide by a 2′-5′ phosphodiester bond;

[0240] wherein in each of (N)x and (N′)y modified and unmodified nucleotides are not alternating;

[0241] wherein each of Z and Z′ may be present or absent, but if present is 1-5 deoxyribonucleotides covalently attached at the 3′ terminus of any oligomer to which it is attached;

[0242] wherein the sequence of (N′)_{y} is a sequence having complementarity to (N)x; and wherein the sequence of (N)ₓ comprises an antisense sequence having complementarity to about 18 to about 40 consecutive ribonucleotides in an mRNA set forth in any one of SEQ ID NOS:1-23. Preferably (N)ₓ comprises an antisense sequence set forth in any one of SEQ ID NOs: 668-1311, 1812-2311, 2931-3549, 4050-4549, 5571-6391, 6892-7391, 7712-8031, 8532-9031, 9532-10031, 10532-11031, 11084-11135, 11177-11217, 11314-11409, 11584-11757, 11796-11833, 11862-11889, 12416-12941, 13442-13941, 14333-14723, 15224-15723, 15905-16085, 16514-16941, 17167-17391, 17881-18369, 18512-18653, 18973-19291, 19454-19615, 19906-20195, 20356-20515, 20847-21177, 21522-21865, 22366-22865, 23012-23157.

[0243] In some embodiments the sequence of (N′)y is fully complementary to the sequence of (N)x. In other embodiments the sequence of (N′)y is substantially complementary to the sequence of (N)x.

[0244] In some embodiments the sequence of (N)ₓ comprises an antisense sequence having full complementarity to about 18 to about 40 consecutive ribonucleotides in an mRNA set forth in any one of SEQ ID NOS:1-23. In other embodiments the sequence of (N)ₓ comprises an antisense sequence having complementarity to about 18 to about 40 consecutive ribonucleotides in an mRNA set forth in any one of SEQ ID NOS:1-23.

[0245] In some embodiments of Structure (F), x=y=19 or x=y=23; (N′)y comprises unmodified ribonucleotides in which two consecutive nucleotides at the 3′ terminus comprises two consecutive mirror deoxyribonucleotides; and (N)x comprises unmodified ribonucleotides in which one nucleotide at the 3′ terminus comprises a mirror deoxyribonucleotide (set forth as Structure III).

[0246] According to various embodiments of Structure (F) 2, 3, 4, 5, 6, 7, 8, 9, 10, 11, 12, 13 or 14 consecutive ribonucleotides independently beginning at the ultimate or penultimate position of the 3′ termini of (N)x and (N′)y are linked by 2′-5′ internucleotide linkages.

[0247] According to one preferred embodiment of Structure (F), three consecutive nucleotides at the 3′ terminus of (N′)y are joined by two 2′-5′ phosphodiester bonds and three consecutive nucleotides at the 3′ terminus of (N′)x are joined by two 2′-5′ phosphodiester bonds.

[0248] According to various embodiments of Structure (F), 2, 3, 4, 5, 6, 7, 8, 9, 10, 11, 12, 13 or 14 consecutive nucleotides independently beginning at the ultimate or penultimate position of the 3′ termini of (N)x and (N′)y are independently mirror nucleotides. In some embodiments the mirror nucleotide is an L-ribonucleotide. In other embodiments the mirror nucleotide is an L-deoxyribonucleotide.

[0249] In other embodiments of Structure (F), 2, 3, 4, 5, 6, 7, 8, 9, 10, 11, 12, 13 or 14 consecutive ribonucleotides independently beginning at the ultimate or penultimate position of the 3′ termini of (N)x and (N′)y are independently 2′ sugar modified nucleotides. In some embodiments the 2′ sugar modification comprises the presence of an amino, a fluoro, an alkoxy or an alkyl moiety. In certain embodiments the 2′ sugar modification comprises a methoxy moiety (2′-OMe).

[0250] In some embodiments of Structure (F), 2, 3, 4, 5, 6, 7, 8, 9, 10, 11, 12, 13 or 14 consecutive ribonucleotides independently beginning at the ultimate or penultimate position of the 3′ termini of (N)x and (N′)y are independently a bicyclic nucleotide. In various embodiments the bicyclic nucleotide is a locked nucleic acid (LNA) such as a 2′-O, 4′-C-ethylene-bridged nucleic acid (ENA).

[0251] In various embodiments of Structure (F), (N′)y comprises a modified nucleotide selected from a bicyclic nucleotide, a 2′ sugar modified nucleotide, a mirror nucleotide, an altritol nucleotide, or a nucleotide joined to an adjacent nucleotide by an internucleotide linkage selected from a 2′-5′ phosphodiester bond, a P-alkoxy linkage or a PACE linkage at the 3′ terminus or at both the 3′ and 5′ termini.

[0252] In various embodiments of Structure (F), (N)x comprises a modified nucleotide selected from a bicyclic nucleotide, a 2′ sugar modified nucleotide, a mirror nucleotide, an altritol nucleotide, or a nucleotide joined to an adjacent nucleotide by an internucleotide linkage selected from a 2′-5′ phosphodiester bond, a P-alkoxy linkage or a PACE linkage at the 3′ terminus or at each of the 3′ and 5′ termini.

[0253] In one embodiment where each of 3′ and 5′ termini of the same strand comprise a modified nucleotide, the modification at the 5′ and 3′ termini is identical. In another embodiment, the modification at the 5′ terminus is different from the modification at the 3′ terminus of the same strand. In one specific embodiment, the modified nucleotides at the 5′ terminus are mirror nucleotides and the modified nucleotides at the 3′ terminus of the same strand are joined by 2′-5′ phosphodiester bond.

[0254] In various embodiments of Structure (F), the modified nucleotides in (N)x are different from the modified nucleotides in (N′)y. For example, the modified nucleotides in (N)x are 2′ sugar modified nucleotides and the modified nucleotides in (N′)y are nucleotides linked by 2′-5′ internucleotide linkages. In another example, the modified nucleotides in (N)x are mirror nucleotides and the modified nucleotides in (N′)y are nucleotides linked by 2′-5′ internucleotide linkages. In another example, the modified nucleotides in (N)x are nucleotides linked by 2′-5′ internucleotide linkages and the modified nucleotides in (N′)y are mirror nucleotides.

[0255] In additional embodiments, the present application provides a compound having Structure (G):

| | | |
|---|---|---|
| (G) | 5′ (N)x-Z | 3′ antisense strand |
| | 3′ Z′-(N′)y | 5′ sense strand |

[0256] wherein each of N and N′ is a nucleotide selected from an unmodified ribonucleotide, a modified ribonucleotide, an unmodified deoxyribonucleotide, a modified deoxyribonucleotide or an unconventional moiety;

[0257] wherein each of (N)x and (N′)y is an oligomer in which each consecutive nucleotide is joined to the next nucleotide by a covalent bond;

[0258] each of x and y is an integer between 18 and 40;

[0259] wherein each of (N)x and (N′)y comprise unmodified ribonucleotides in which each of (N)x and (N′)y independently comprise one modified nucleotide at the 5′ terminal or penultimate position wherein the modified nucleotide is selected from the group consisting of a bicyclic nucleotide, a 2′ sugar modified nucleotide, a mirror nucleotide, a nucleotide joined to an adjacent nucleotide by a P-alkoxy backbone modification or a nucleotide joined to an adjacent nucleotide by a 2′-5′ phosphodiester bond;

[0260] wherein for (N)x the modified nucleotide is preferably at penultimate position of the 5′ terminal;

[0261] wherein in each of (N)x and (N′)y modified and unmodified nucleotides are not alternating;

[0262] wherein each of Z and Z′ may be present or absent, but if present is 1-5 deoxyribonucleotides covalently attached at the 3′ terminus of any oligomer to which it is attached;

[0263] wherein the sequence of (N′)_{y} is a sequence having complementarity to (N)x; and wherein the sequence of (N)ₓ comprises an antisense sequence having complementarity to about 18 to about 40 consecutive ribonucleotides in an mRNA set forth in any one of SEQ ID NOS:1-23. Preferably (N)ₓ comprises an antisense sequence set forth in any one of SEQ ID NOs: 668-1311, 1812-2311, 2931-3549, 4050-4549, 5571-6391, 6892-7391, 7712-8031, 8532-9031, 9532-10031, 10532-11031, 11084-11135, 11177-11217, 11314-11409, 11584-11757, 11796-11833, 11862-11889, 12416-12941, 13442-13941, 14333-14723, 15224-15723, 15905-16085, 16514-16941, 17167-17391, 17881-18369, 18512-18653, 18973-19291, 19454-19615, 19906-20195, 20356-20515, 20847-21177, 21522-21865, 22366-22865, 23012-23157.

[0264] In some embodiments the sequence of (N′)y is fully complementary to the sequence of (N)x. In other embodiments the sequence of (N′)y is substantially complementary to the sequence of (N)x.

[0265] In some embodiments the sequence of (N)ₓ comprises an antisense sequence having full complementarity to about 18 to about 40 consecutive ribonucleotides in an mRNA set forth in any one of SEQ ID NOS:1-23. In other embodiments the sequence of (N)ₓ comprises an antisense sequence having complementarity to about 18 to about 40 consecutive ribonucleotides in an mRNA set forth in any one of SEQ ID NOS:1-23.

[0266] In some embodiments of Structure (G), x=y=19 or x=y=23.

[0267] According to various embodiments of Structure (G) 2, 3, 4, 5, 6, 7, 8, 9, 10, 11, 12, 13 or 14 consecutive ribonucleotides independently beginning at the ultimate or penultimate position of the 5′ termini of (N)x and (N′)y are linked by 2′-5′ internucleotide linkages. For (N)x the modified nucleotides preferably starting at the penultimate position of the 5′ terminal.

[0268] According to various embodiments of Structure (G), 2, 3, 4, 5, 6, 7, 8, 9, 10, 11, 12, 13 or 14 consecutive nucleotides independently beginning at the ultimate or penultimate position of the 5′ termini of (N)x and (N′)y are independently mirror nucleotides. In some embodiments the mirror nucleotide is an L-ribonucleotide. In other embodiments the mirror nucleotide is an L-deoxyribonucleotide. For (N)x the modified nucleotides preferably starting at the penultimate position of the 5′ terminal.

[0269] In other embodiments of Structure (G), 2, 3, 4, 5, 6, 7, 8 , 9, 10, 11, 12, 13 or 14 consecutive ribonucleotides independently beginning at the ultimate or penultimate position of the 5′ termini of (N)x and (N′)y are independently 2′ sugar modified nucleotides. In some embodiments the 2′ sugar modification comprises the presence of an amino, a fluoro, an alkoxy or an alkyl moiety. In certain embodiments the 2′ sugar modification comprises a methoxy moiety (2′-OMe). In some preferred embodiments the consecutive modified nucleotides preferably begin at the penultimate position of the 5′ terminus of (N)x.

[0270] In one preferred embodiment of Structure (G), five consecutive ribonucleotides at the 5′ terminus of (N′)y comprise a 2′OMe modification and one ribonucleotide at the 5′ penultimate position of (N′)x comprises a 2′OMe modification. In another preferred embodiment of Structure (G), five consecutive ribonucleotides at the 5′ terminus of (N′)y comprise a 2′OMe modification and two consecutive ribonucleotides at the 5′ terminal position of (N′)x comprise a 2′OMe modification.

[0271] In some embodiments of Structure (G), 2, 3, 4, 5, 6, 7, 8, 9, 10, 11, 12, 13 or 14 consecutive ribonucleotides independently beginning at the ultimate or penultimate position of the 5′ termini of (N)x and (N′)y are bicyclic nucleotides. In various embodiments the bicyclic nucleotide is a locked nucleic acid (LNA) such as a 2′-O, 4′-C-ethylene-bridged nucleic acid (ENA). In some preferred embodiments the consecutive modified nucleotides preferably begin at the penultimate position of the 5′ terminus of (N)x.

[0272] In various embodiments of Structure (G), (N′)y comprises a modified nucleotide selected from a bicyclic nucleotide, a 2′ sugar modified nucleotide, a mirror nucleotide, an altritol nucleotide, or a nucleotide joined to an adjacent nucleotide by an internucleotide linkage selected from a 2′-5′ phosphodiester bond, a P-alkoxy linkage or a PACE linkage at the 5′ terminus or at each of the 3′ and 5′ termini.

[0273] In various embodiments of Structure (G), (N)x comprises a modified nucleotide selected from a bicyclic nucleotide, a 2′ sugar modified nucleotide, a mirror nucleotide, an altritol nucleotide, or a nucleotide joined to an adjacent nucleotide by an internucleotide linkage selected from a 2′-5′ phosphodiester bond, a P-alkoxy linkage or a PACE linkage at the 5′ terminus or at each of the 3′ and 5′ termini.

[0274] In one embodiment where each of 3′ and 5′ termini of the same strand comprise a modified nucleotide, the modification at the 5′ and 3′ termini is identical. In another embodiment, the modification at the 5′ terminus is different from the modification at the 3′ terminus of the same strand. In one specific embodiment, the modified nucleotides at the 5′ terminus are mirror nucleotides and the modified nucleotides at the 3′ terminus of the same strand are joined by 2′-5′ phosphodiester bond. In various embodiments of Structure (G), the modified nucleotides in (N)x are different from the modified nucleotides in (N′)y. For example, the modified nucleotides in (N)x are 2′ sugar modified nucleotides and the modified nucleotides in (N′)y are nucleotides linked by 2′-5′ internucleotide linkages. In another example, the modified nucleotides in (N)x are mirror nucleotides and the modified nucleotides in (N′)y are nucleotides linked by 2′-5′ internucleotide linkages. In another example, the modified nucleotides in (N)x are nucleotides linked by 2′-5′ internucleotide linkages and the modified nucleotides in (N′)y are mirror nucleotides.

[0275] In additional embodiments, the present application provides a compound having Structure (H):

| | | |
|---|---|---|
| (H) | 5′ (N)x-Z | 3′ antisense strand |
| | 3′ Z′-(N′)y | 5′ sense strand |

[0276] wherein each of N and N′ is a nucleotide selected from an unmodified ribonucleotide, a modified ribonucleotide, an unmodified deoxyribonucleotide, a modified deoxyribonucleotide or an unconventional moiety;

[0277] wherein each of (N)x and (N′)y is an oligomer in which each consecutive nucleotide is joined to the next nucleotide by a covalent bond;

[0278] each of x and y is an integer between 18 and 40;

[0279] wherein (N)x comprises unmodified ribonucleotides further comprising one modified nucleotide at the 3′ terminal or penultimate position or the 5′ terminal or penultimate position, wherein the modified nucleotide is selected from the group consisting of a bicyclic nucleotide, a 2′ sugar modified nucleotide, a mirror nucleotide, an altritol nucleotide, or a nucleotide joined to an adjacent nucleotide by an internucleotide linkage selected from a 2′-5′ phosphodiester bond, a P-alkoxy linkage or a PACE linkage;

[0280] wherein (N′)y comprises unmodified ribonucleotides further comprising one modified nucleotide at an internal position, wherein the modified nucleotide is selected from the group consisting of a bicyclic nucleotide, a 2′ sugar modified nucleotide, a mirror nucleotide, an altritol nucleotide, or a nucleotide joined to an adjacent nucleotide by an internucleotide linkage selected from a 2′-5′ phosphodiester bond, a P-alkoxy linkage or a PACE linkage;

[0281] wherein in each of (N)x and (N′)y modified and unmodified nucleotides are not alternating;

[0282] wherein each of Z and Z′ may be present or absent, but if present is 1-5 deoxyribonucleotides covalently attached at the 3′ terminus of any oligomer to which it is attached;

[0283] wherein the sequence of (N′)_{y} is a sequence having complementarity to (N)x; and wherein the sequence of (N)ₓ comprises an antisense sequence having complementarity to about 18 to about 40 consecutive ribonucleotides in an mRNA set forth in any one of SEQ ID NOS:1-23.

[0284] Preferably (N)ₓ comprises an antisense sequence set forth in any one of SEQ ID NOs: 668-1311, 1812-2311, 2931-3549, 4050-4549, 5571-6391, 6892-7391, 7712-8031, 8532-9031, 9532-10031, 10532-11031, 11084-11135, 11177-11217, 11314-11409, 11584-11757, 11796-11833, 11862-11889, 12416-12941, 13442-13941, 14333-14723, 15224-15723, 15905-16085, 16514-16941, 17167-17391, 17881-18369, 18512-18653, 18973-19291, 19454-19615, 19906-20195, 20356-20515, 20847-21177, 21522-21865, 22366-22865, 23012-23157.

[0285] In some embodiments the sequence of (N′)y is fully complementary to the sequence of (N)x. In other embodiments the sequence of (N′)y is substantially complementary to the sequence of (N)x.

[0286] In some embodiments the sequence of (N)ₓ comprises an antisense sequence having full complementarity to about 18 to about 40 consecutive ribonucleotides in an mRNA set forth in any one of SEQ ID NOS:1-23. In other embodiments the sequence of (N)ₓ comprises an antisense sequence having complementarity to about 18 to about 40 consecutive ribonucleotides in an mRNA set forth in any one of SEQ ID NOS:1-23.

[0287] In one embodiment of Structure (H), 2, 3, 4, 5, 6, 7, 8, 9, 10, 11, 12, 13 or 14 consecutive ribonucleotides independently beginning at the ultimate or penultimate position of the 3′ terminus or the 5′ terminus or both termini of (N)x are independently 2′ sugar modified nucleotides, bicyclic nucleotides, mirror nucleotides, altritol nucleotides or nucleotides joined to an adjacent nucleotide by a 2′-5′ phosphodiester bond and 2, 3, 4, 5, 6, 7, 8, 9, 10, 11, 12, 13 or 14 consecutive internal ribonucleotides in (N′)y are independently 2′ sugar modified nucleotides, bicyclic nucleotides, mirror nucleotides, altritol nucleotides or nucleotides joined to an adjacent nucleotide by a 2′-5′ phosphodiester bond. In some embodiments the 2′ sugar modification comprises the presence of an amino, a fluoro, an alkoxy or an alkyl moiety. In certain embodiments the 2′ sugar modification comprises a methoxy moiety (2′-OMe).

[0288] In another embodiment of Structure (H), 2, 3, 4, 5, 6, 7, 8, 9, 10, 11, 12, 13 or 14 consecutive ribonucleotides independently beginning at the ultimate or penultimate position of the 3′ terminus or the 5′ terminus or 2-8 consecutive nucleotides at each of 5′ and 3′ termini of (N′)y are independently 2′ sugar modified nucleotides, bicyclic nucleotides, mirror nucleotides, altritol nucleotides or nucleotides joined to an adjacent nucleotide by a 2′-5′ phosphodiester bond, and 2, 3, 4, 5, 6, 7, 8, 9, 10, 11, 12, 13 or 14 consecutive internal ribonucleotides in (N)x are independently 2′ sugar modified nucleotides, bicyclic nucleotides, mirror nucleotides, altritol nucleotides or nucleotides joined to an adjacent nucleotide by a 2′-5′ phosphodiester bond.

[0289] In one embodiment wherein each of 3′ and 5′ termini of the same strand comprises a modified nucleotide, the modification at the 5′ and 3′ termini is identical. In another embodiment, the modification at the 5′ terminus is different from the modification at the 3′ terminus of the same strand. In one specific embodiment, the modified nucleotides at the 5′ terminus are mirror nucleotides and the modified nucleotides at the 3′ terminus of the same strand are joined by 2′-5′ phosphodiester bond.

[0290] In various embodiments of Structure (H), the modified nucleotides in (N)x are different from the modified nucleotides in (N′)y. For example, the modified nucleotides in (N)x are 2′ sugar modified nucleotides and the modified nucleotides in (N′)y are nucleotides linked by 2′-5′ internucleotide linkages. In another example, the modified nucleotides in (N)x are mirror nucleotides and the modified nucleotides in (N′)y are nucleotides linked by 2′-5′ internucleotide linkages. In another example, the modified nucleotides in (N)x are nucleotides linked by 2′-5′ internucleotide linkages and the modified nucleotides in (N′)y are mirror nucleotides.

[0291] In one preferred embodiment of Structure (H), x=y=19; three consecutive ribonucleotides at the 9-11 nucleotide positions 9-11 of (N′)y comprise 2′OMe modification and five consecutive ribonucleotides at the 3′ terminal position of (N′)x comprise 2′OMe modification.

[0292] For all the above Structures (A)-(H), in various embodiments x=y and each of x and y is 19, 20, 21, 22 or 23. In certain embodiments, x=y=19. In yet other embodiments x=y=23. In additional embodiments the compound comprises modified ribonucleotides in alternating positions wherein each N at the 5′ and 3′ termini of (N)x are modified in their sugar residues and the middle ribonucleotide is not modified, e.g. ribonucleotide in position 10 in a 19-mer strand, position 11 in a 21 mer and position 12 in a 23-mer strand.

[0293] In some embodiments where x=y=21 or x=y=23 the position of modifications in the 19 mer are adjusted for the 21 and 23 mers with the proviso that the middle nucleotide of the antisense strand is preferably not modified.

[0294] In some embodiments, neither (N)x nor (N′)y are phosphorylated at the 3′ and 5′ termini. In other embodiments either or both (N)x and (N′)y are phosphorylated at the 3′ termini. In yet another embodiment, either or both (N)x and (N′)y are phosphorylated at the 3′ termini using non-cleavable phosphate groups. In yet another embodiment, either or both (N)x and (N′)y are phosphorylated at the terminal 2′ termini position using cleavable or non-cleavable phosphate groups. These particular siRNA compounds are also blunt ended and are non-phosphorylated at the termini; however, comparative experiments have shown that siRNA compounds phosphorylated at one or both of the 3′-termini have similar activity in vivo compared to the non-phosphorylated compounds.

[0295] In certain embodiments for all the above-mentioned Structures, the compound is blunt ended, for example wherein both Z and Z′ are absent. In an alternative embodiment, the compound comprises at least one 3′ overhang, wherein at least one of Z or Z′ is present. Z and Z′ independently comprises one or more covalently linked modified or non-modified nucleotides, for example inverted dT or dA; dT, LNA, mirror nucleotide and the like. In some embodiments each of Z and Z′ are independently selected from dT and dTdT. siRNA in which Z and/or Z′ is present have similar activity and stability as siRNA in which Z and Z′ are absent.

[0296] In certain embodiments for all the above-mentioned Structures, the compound comprises one or more phosphonocarboxylate and/or phosphinocarboxylate nucleotides (PACE nucleotides). In some embodiments the PACE nucleotides are deoxyribonucleotides and the phosphinocarboxylate nucleotides are phosphinoacetate nucleotides. Examples of PACE nucleotides and analogs are disclosed in U.S. Pat. Nos. 6,693,187 and 7,067,641, both incorporated herein by reference in their entirety.

[0297] In certain embodiments for all the above-mentioned Structures, the compound comprises one or more locked nucleic acids (LNA) also defined as bridged nucleic acids or bicyclic nucleotides. Preferred locked nucleic acids are 2′-O, 4′-C-ethylene nucleosides (ENA) or 2′-O, 4′-C-methylene nucleosides. Other examples of LNA and ENA nucleotides are disclosed in WO 98/39352, WO 00/47599 and WO 99/14226, all incorporated herein by reference in their entirety.

[0298] In certain embodiments for all the above-mentioned Structures, the compound comprises one or more altritol monomers (nucleotides), also defined as 1,5 anhydro-2-deoxy-D-altrito-hexitol (see for example, Allart, et al., 1998. Nucleosides & Nucleotides 17.1523-1526; Herdewijn et al., 1999. Nucleosides & Nucleotides 18:1371-1376; Fisher et al., 2007, NAR 35(4):1064-1074; all incorporated herein by reference).

[0299] The present application explicitly excludes compounds in which each of N and/or N′ is a deoxyribonucleotide (D-A, D-C, D-G, D-T). In certain embodiments (N)x and (N′)y comprise independently 1, 2, 3, 4, 5, 6, 7, 8, 9 or more deoxyribonucleotides. In certain embodiments the present application provides a compound wherein each of N is an unmodified ribonucleotide and the 3′ terminal nucleotide or 2, 3, 4, 5, 6, 7, 8, 9, 10, 11, 12, 13 or 14 consecutive nucleotides at the 3′ terminus of (N′)y are deoxyribonucleotides. In yet other embodiments each of N is an unmodified ribonucleotide and the 5′ terminal nucleotide or 2, 3, 4, 5, 6, 7, 8, 9, 10, 11, 12, 13 or 14 consecutive nucleotides at the 5′ terminus of (N′)y are deoxyribonucleotides. In further embodiments the 5′ terminal nucleotide or 2, 3, 4, 5, 6, 7, 8, or 9 consecutive nucleotides at the 5′ terminus and 1, 2, 3, 4, 5, or 6 consecutive nucleotides at the 3′ termini of (N)x are deoxyribonucleotides and each of N′ is an unmodified ribonucleotide. In yet further embodiments (N)x comprises unmodified ribonucleotides and 1 or 2, 3 or 4 consecutive deoxyribonucleotides independently at each of the 5′ and 3′ termini and 1 or 2, 3, 4, 5 or 6 consecutive deoxyribonucleotides in internal positions; and each of N′ is an unmodified ribonucleotide. In certain embodiments the 3′ terminal nucleotide or 2, 3, 4, 5, 6, 7, 8, 9, 10, 11, 12 13 or 14 consecutive nucleotides at the 3′ terminus of (N′)y and the terminal 5′ nucleotide or 2, 3, 4, 5, 6, 7, 8, 9, 10, 11, 12 13 or 14 consecutive nucleotides at the 5′ terminus of (N)x are deoxyribonucleotides. In some embodiments the 5′ terminal nucleotide of N or 2 or 3 consecutive of N and 1,2, or 3 of N′ is a deoxyribonucleotide. Certain examples of active DNA/RNA siRNA chimeras are disclosed in US patent publication 2005/0004064, and Ui-Tei, 2008 (NAR 36(7):2136-2151) incorporated herein by reference in their entirety.

[0300] Unless otherwise indicated, in preferred embodiments of the structures discussed herein the covalent bond between each consecutive N and N′ is a phosphodiester bond.

[0301] An additional novel molecule provided by the present application is an oligonucleotide comprising consecutive nucleotides wherein a first segment of such nucleotides encode a first inhibitory RNA molecule, a second segment of such nucleotides encode a second inhibitory RNA molecule, and a third segment of such nucleotides encode a third inhibitory RNA molecule. In various embodiments each of the first, the second and the third segment comprise one strand of a double stranded RNA and the first, second and third segments are joined together by a linker. In further embodiments, the oligonucleotide comprises three double stranded segments joined together by one or more linker(s).

[0302] Thus, one molecule provided by the present application is an oligonucleotide comprising consecutive nucleotides which encode three inhibitory RNA molecules; in some embodiments said oligonucleotide possess a triple stranded structure, such that three double stranded arms are linked together by one or more linker, such as any of the linkers presented hereinabove. This molecule forms a “star”-like structure, also referred to herein as RNAstar. Such structures are disclosed in PCT patent publication WO 2007/091269, assigned to the assignee of the present application and incorporated herein by reference in its entirety.

[0303] A covalent bond refers to an internucleotide linkage linking one nucleotide monomer to an adjacent nucleotide monomer. A covalent bond includes for example, a phosphodiester bond, a phosphorothioate bond, a P-alkoxy bond, a P-carboxy bond and the like. The normal internucleoside linkage of RNA and DNA is a 3′ to 5′ phosphodiester linkage. In certain preferred embodiments a covalent bond is a phosphodiester bond. Covalent bond encompasses non-phosphorous-containing internucleoside linkages, such as those disclosed in WO 2004/041924 inter alia. Unless otherwise indicated, in preferred embodiments of the structures discussed herein the covalent bond between each consecutive N and N′ is a phosphodiester bond.

[0304] For all of the structures above, in some embodiments the oligonucleotide sequence of (N)x is fully complementary to the oligonucleotide sequence of (N′)y. In other embodiments (N)x and (N′)y are substantially complementary. In certain embodiments (N)x is fully complementary to a target mRNA sequence. In other embodiments (N)x is substantially complementary to a target mRNA sequence.

[0305] In some embodiments, neither (N)x nor (N′)y are phosphorylated at the 3′ and 5′ termini. In other embodiments either or both (N)x and (N′)y are phosphorylated at the 3′ termini (3′ Pi). In yet another embodiment, either or both (N)x and (N′)y are phosphorylated at the 3′ termini with non-cleavable phosphate groups. In yet another embodiment, either or both (N)x and (N′)y are phosphorylated at the terminal 2′ termini position using cleavable or non-cleavable phosphate groups. In further embodiments, the inhibitory nucleic acid molecules of the present application comprise one or more gaps and/or one or more nicks and/or one or more mismatches. Without wishing to be bound by theory, gaps, nicks and mismatches have the advantage of partially destabilizing the nucleic acid/siRNA, so that it is more easily processed by endogenous cellular machinery such as DICER, DROSHA or RISC into its inhibitory components.

[0306] In one aspect the present application provides a compound having Structure (I) set forth below:

| | | |
|---|---|---|
| (I) | 5′ (N)x-Z | 3′ (antisense strand) |
| | 3′ Z′-(N′)y-z″ | 5′ (sense strand) |

[0307] wherein each of N and N′ is a ribonucleotide which may be unmodified or modified, or an unconventional moiety;

[0308] wherein each of (N)x and (N′)y is an oligonucleotide in which each consecutive N or N′ is joined to the next N or N′ by a covalent bond;

[0309] wherein Z and Z′ may be present or absent, but if present is independently 1-5 consecutive nucleotides covalently attached at the 3′ terminus of the strand in which it is present;

[0310] wherein z″ may be present or absent, but if present is a capping moiety covalently attached at the 5′ terminus of (N′)y;

[0311] wherein x=18 to 27;

[0312] wherein y=18 to 27;

[0313] wherein (N)x comprises modified and unmodified ribonucleotides, each modified ribonucleotide having a 2′ OMe on its sugar, wherein N at the 3′ terminus of (N)x is a modified ribonucleotide, (N)x comprises at least five alternating modified ribonucleotides beginning at the 3′ end and at least nine modified ribonucleotides in total and each remaining N is an unmodified ribonucleotide;

[0314] wherein in (N′)y at least one unconventional moiety is present, which unconventional moiety may be an abasic ribose moiety, an abasic deoxyribose moiety, a modified or unmodified deoxyribonucleotide, a mirror nucleotide, and a nucleotide joined to an adjacent nucleotide by a 2′-5′ internucleotide phosphate bond; and

[0315] wherein the sequence of (N′)_{y} is a sequence having complementarity to (N)x; and wherein the sequence of (N)ₓ comprises an antisense sequence having complementarity to about 18 to about 40 consecutive ribonucleotides in an mRNA set forth in any one of SEQ ID NOS:1-23. Preferably (N)ₓ comprises an antisense sequence set forth in any one of SEQ ID NOs: 668-1311, 1812-2311, 2931-3549, 4050-4549, 5571-6391, 6892-7391, 7712-8031, 8532-9031, 9532-10031, 10532-11031, 11084-11135, 11177-11217, 11314-11409, 11584-11757, 11796-11833, 11862-11889, 12416-12941, 13442-13941, 14333-14723, 15224-15723, 15905-16085, 16514-16941, 17167-17391, 17881-18369, 18512-18653, 18973-19291, 19454-19615, 19906-20195, 20356-20515, 20847-21177, 21522-21865, 22366-22865, 23012-23157.

[0316] In some embodiments the sequence of (N′)y is fully complementary to the sequence of (N)x. In other embodiments the sequence of (N′)y is substantially complementary to the sequence of (N)x.

[0317] In some embodiments the sequence of (N)ₓ comprises an antisense sequence having full complementarity to about 18 to about 40 consecutive ribonucleotides in an mRNA set forth in any one of SEQ ID NOS:1-23. In other embodiments the sequence of (N)ₓ comprises an antisense sequence having complementarity to about 18 to about 40 consecutive ribonucleotides in an mRNA set forth in any one of SEQ ID NOS:1-23.

[0318] In some embodiments x=y=19. In other embodiments x=y=23. In some embodiments the at least one unconventional moiety is present at positions 15, 16, 17, or 18 in (N′)y. In some embodiments the unconventional moiety is selected from a mirror nucleotide, an abasic ribose moiety and an abasic deoxyribose moiety. In some preferred embodiments the unconventional moiety is a mirror nucleotide, preferably an L-DNA moiety. In some embodiments an L-DNA moiety is present at position 17, position 18 or positions 17 and 18.

[0319] In other embodiments the unconventional moiety is an abasic moiety. In various embodiments (N′)y comprises at least five abasic ribose moieties or abasic deoxyribose moieties.

[0320] In yet other embodiments (N′)y comprises at least five abasic ribose moieties or abasic deoxyribose moieties and at least one of N′ is an LNA.

[0321] In some embodiments of Structure (IX) (N)x comprises nine alternating modified ribonucleotides. In other embodiments of Structure (I) (N)x comprises nine alternating modified ribonucleotides further comprising a 2′O modified nucleotide at position 2. In some embodiments (N)x comprises 2′OMe sugar modified ribonucleotides at the odd numbered positions 1, 3, 5, 7, 9, 11, 13, 15, 17, 19. In other embodiments (N)x further comprises a 2′ OMe sugar modified ribonucleotide at one or both of positions 2 and 18. In yet other embodiments (N)x comprises 2′OMe sugar modified ribonucleotides at positions 2, 4, 6, 8, 11, 13, 15, 17, 19.

[0322] In various embodiments z″ is present and is selected from an abasic ribose moiety, a deoxyribose moiety; an inverted abasic ribose moiety, a deoxyribose moiety; C6-amino-Pi; a mirror nucleotide.

[0323] In another aspect the present application provides a compound having Structure (J) set forth below:

| | | |
|---|---|---|
| (J) | 5′ (N)x-Z | 3′ (antisense strand) |
| | 3′ Z′-(N′)y-z″ | 5′ (sense strand) |

[0324] wherein each of N and N′ is a ribonucleotide which may be unmodified or modified, or an unconventional moiety;

[0325] wherein each of (N)x and (N′)y is an oligonucleotide in which each consecutive N or N′ is joined to the next N or N′ by a covalent bond;

[0326] wherein Z and Z′ may be present or absent, but if present is independently 1-5 consecutive nucleotides covalently attached at the 3′ terminus of the strand in which it is present;

[0327] wherein z″ may be present or absent but if present is a capping moiety covalently attached at the 5′ terminus of (N′)y;

[0328] wherein x=18 to 27;

[0329] wherein y=18 to 27;

[0330] wherein (N)x comprises modified or unmodified ribonucleotides, and optionally at least one unconventional moiety;

[0331] wherein in (N′)y at least one unconventional moiety is present, which unconventional moiety may be an abasic ribose moiety, an abasic deoxyribose moiety, a modified or unmodified deoxyribonucleotide, a mirror nucleotide, a non-base pairing nucleotide analog or a nucleotide joined to an adjacent nucleotide by a 2′-5′ internucleotide phosphate bond; and

[0332] wherein the sequence of (N′)_{y} is a sequence having complementarity to (N)x; and wherein the sequence of (N)ₓ comprises an antisense sequence having complementarity to about 18 to about 40 consecutive ribonucleotides in mRNA set forth in any one of SEQ ID NOS:1-23. Preferably (N)ₓ comprises an antisense sequence set forth in any one of SEQ ID NOs: 668-1311, 1812-2311, 2931-3549, 4050-4549, 5571-6391, 6892-7391, 7712-8031, 8532-9031, 9532-10031, 10532-11031, 11084-11135, 11177-11217, 11314-11409, 11584-11757, 11796-11833, 11862-11889, 12416-12941, 13442-13941, 14333-14723, 15224-15723, 15905-16085, 16514-16941, 17167-17391, 17881-18369, 18512-18653, 18973-19291, 19454-19615, 19906-20195, 20356-20515, 20847-21177, 21522-21865, 22366-22865, 23012-23157.

[0333] In some embodiments the sequence of (N′)y is fully complementary to the sequence of (N)x. In other embodiments the sequence of (N′)y is substantially complementary to the sequence of (N)x.

[0334] In some embodiments the sequence of (N)ₓ comprises an antisense sequence having full complementarity to about 18 to about 40 consecutive ribonucleotides in an mRNA set forth in any one of SEQ ID NOS:1-23. In other embodiments the sequence of (N)ₓ comprises an antisense sequence having complementarity to about 18 to about 40 consecutive ribonucleotides in an mRNA set forth in any one of SEQ ID NOS:1-23.

[0335] In some embodiments x=y=19. In other embodiments x=y=23. In some preferred embodiments (N)x comprises modified and unmodified ribonucleotides, and at least one unconventional moiety.

[0336] In some embodiments in (N)x the N at the 3′ terminus is a modified ribonucleotide and (N)x comprises at least 8 modified ribonucleotides. In other embodiments at least 5 of the at least 8 modified ribonucleotides are alternating beginning at the 3′ end. In some embodiments (N)x comprises an abasic moiety in one of positions 5, 6, 7, 8, 9, 10, 11, 12, 13, 14 or 15.

[0337] In some embodiments the at least one unconventional moiety in (N′)y is present at positions 15, 16, 17, or 18. In some embodiments the unconventional moiety is selected from a mirror nucleotide, an abasic ribose moiety and an abasic deoxyribose moiety. In some preferred embodiments the unconventional moiety is a mirror nucleotide, preferably an L-DNA moiety. In some embodiments an L-DNA moiety is present at position 17, position 18 or positions 17 and 18. In other embodiments the at least one unconventional moiety in (N′)y is an abasic ribose moiety or an abasic deoxyribose moiety.

[0338] In various embodiments of Structure (J) z″ is present and is selected from an abasic ribose moiety, a deoxyribose moiety; an inverted abasic ribose moiety, a deoxyribose moiety; C6-amino-Pi; a mirror nucleotide.

[0339] In yet another aspect the present application provides a compound having Structure (K) set forth below:

| | | |
|---|---|---|
| (K) | 5′ (N)ₓ-Z | 3′ (antisense strand) |
| | 3′ Z′-(N′)_{y}-z″ | 5′ (sense strand) |

[0340] wherein each of N and N′ is a ribonucleotide which may be unmodified or modified, or an unconventional moiety;

[0341] wherein each of (N)x and (N′)y is an oligonucleotide in which each consecutive N or N′ is joined to the next N or N′ by a covalent bond;

[0342] wherein Z and Z′ may be present or absent, but if present is independently 1-5 consecutive nucleotides covalently attached at the 3′ terminus of the strand in which it is present;

[0343] wherein z″ may be present or absent but if present is a capping moiety covalently attached at the 5′ terminus of (N′)y;

[0344] wherein x=18 to 27;

[0345] wherein y=18 to 27;

[0346] wherein (N)x comprises a combination of modified or unmodified ribonucleotides and unconventional moieties, any modified ribonucleotide having a 2′OMe on its sugar;

[0347] wherein (N′)y comprises modified or unmodified ribonucleotides and optionally an unconventional moiety, any modified ribonucleotide having a 2′OMe on its sugar;

[0348] wherein the sequence of (N′)_{y} is a sequence having complementarity to (N)x; and wherein the sequence of (N)ₓ comprises an antisense sequence having complementarity to about 18 to about 40 consecutive ribonucleotides in mRNA set forth in any one of SEQ ID NOS:1-23. Preferably (N)ₓ comprises an antisense sequence set forth in any one of SEQ ID NOs: 668-1311, 1812-2311, 2931-3549, 4050-4549, 5571-6391, 6892-7391, 7712-8031, 8532-9031, 9532-10031, 10532-11031, 11084-11135, 11177-11217, 11314-11409, 11584-11757, 11796-11833, 11862-11889, 12416-12941, 13442-13941, 14333-14723, 15224-15723, 15905-16085, 16514-16941, 17167-17391, 17881-18369, 18512-18653, 18973-19291, 19454-19615, 19906-20195, 20356-20515, 20847-21177, 21522-21865, 22366-22865, 23012-23157.

[0349] In some embodiments the sequence of (N′)y is fully complementary to the sequence of (N)x. In other embodiments the sequence of (N′)y is substantially complementary to the sequence of (N)x.

[0350] In some embodiments the sequence of (N)ₓ comprises an antisense sequence having full complementarity to about 18 to about 40 consecutive ribonucleotides in an mRNA set forth in any one of SEQ ID NOS:1-23. In other embodiments the sequence of (N)ₓ comprises an antisense sequence having complementarity to about 18 to about 40 consecutive ribonucleotides in an mRNA set forth in any one of SEQ ID NOS:1-23.

[0351] In some embodiments x=y=19. In other embodiments x=y=23. In some preferred embodiments the at least one preferred one unconventional moiety is present in (N)x and is an abasic ribose moiety or an abasic deoxyribose moiety. In other embodiments the at least one unconventional moiety is present in (N)x and is a non-base pairing nucleotide analog. In various embodiments (N′)y comprises unmodified ribonucleotides. In some embodiments (N)x comprises at least five abasic ribose moieties or abasic deoxyribose moieties or a combination thereof In certain embodiments (N)x and/or (N′)y comprise modified ribonucleotides which do not base pair with corresponding modified or unmodified ribonucleotides in (N′)y and/or (N)x.

[0352] In various embodiments the present application provides an siRNA set forth in Structure (L):

| | | |
|---|---|---|
| (L) | 5′ (N)ₓ-Z | 3′ (antisense strand) |
| | 3′ Z′-(N′)_{y} | 5′ (sense strand) |

[0353] wherein each of N and N′ is a nucleotide selected from an unmodified ribonucleotide, a modified ribonucleotide, an unmodified deoxyribonucleotide, a modified deoxyribonucleotide or an unconventional moiety;

[0354] wherein each of (N)ₓ and (N′)_{y} is an oligonucleotide in which each consecutive N or N′ is joined to the next N or N′ by a covalent bond;

[0355] wherein Z and Z′ are absent;

[0356] wherein x=y=19;

[0357] wherein in (N′)y the nucleotide in at least one of positions 15, 16, 17, 18 and 19 comprises a nucleotide selected from an abasic unconventional moiety, a mirror nucleotide, a deoxyribonucleotide and a nucleotide joined to an adjacent nucleotide by a 2′-5′ internucleotide bond;

[0358] wherein (N)x comprises alternating 2′OMe sugar modified ribonucleotides and unmodified ribonucleotides and the ribonucleotide located at the middle position of (N)x being modified or unmodified, preferably unmodified; and

[0359] wherein the sequence of (N′)_{y} is a sequence having complementarity to (N)x; and wherein the sequence of (N)ₓ comprises an antisense sequence having complementarity to about 18 to about 40 consecutive ribonucleotides in mRNA set forth in any one of SEQ ID NOS:1-23. Preferably (N)ₓ comprises an antisense sequence set forth in any one of SEQ ID NOs: 668-1311, 1812-2311, 2931-3549, 4050-4549, 5571-6391, 6892-7391, 7712-8031, 8532-9031, 9532-10031, 10532-11031, 11084-11135, 11177-11217, 11314-11409, 11584-11757, 11796-11833, 11862-11889, 12416-12941, 13442-13941, 14333-14723, 15224-15723, 15905-16085, 16514-16941, 17167-17391, 17881-18369, 18512-18653, 18973-19291, 19454-19615, 19906-20195, 20356-20515, 20847-21177, 21522-21865, 22366-22865, 23012-23157.

[0360] In some embodiments the sequence of (N′)y is fully complementary to the sequence of (N)x. In other embodiments the sequence of (N′)y is substantially complementary to the sequence of (N)x.

[0361] In some embodiments the sequence of (N)ₓ comprises an antisense sequence having full complementarity to about 18 to about 40 consecutive ribonucleotides in an mRNA set forth in any one of SEQ ID NOS:1-23. In other embodiments the sequence of (N)ₓ comprises an antisense sequence having complementarity to about 18 to about 40 consecutive ribonucleotides in an mRNA set forth in any one of SEQ ID NOS:1-23.

[0362] In some embodiments of Structure (L), in (N′)y the nucleotide in one or both of positions 17 and 18 comprises a modified nucleotide selected from an abasic unconventional moiety, a mirror nucleotide and a nucleotide joined to an adjacent nucleotide by a 2′-5′ internucleotide bond. In some embodiments the mirror nucleotide is selected from L-DNA and L-RNA. In various embodiments the mirror nucleotide is L-DNA.

[0363] In various embodiments (N′)y comprises a modified nucleotide at position 15 wherein the modified nucleotide is selected from a mirror nucleotide and a deoxyribonucleotide.

[0364] In certain embodiments (N′)y further comprises a modified nucleotide or pseudo nucleotide at position 2, wherein the pseudo nucleotide may be an abasic unconventional moiety and the modified nucleotide is optionally a mirror nucleotide.

[0365] In various embodiments the antisense strand (N)x comprises 2′O-Me modified ribonucleotides at the odd numbered positions (5′ to 3′; positions 1, 3, 5, 7, 9, 11, 13, 15, 17, 19). In some embodiments (N)x further comprises 2′O-Me modified ribonucleotides at one or both positions 2 and 18. In other embodiments (N)x comprises 2′ OMe sugar modified ribonucleotides at positions 2, 4, 6, 8, 11, 13, 15, 17, 19.

[0366] Other embodiments of Structures (L), (I) and (J) are envisaged wherein x=y=21 or wherein x=y=23; in these embodiments the modifications for (N′)y discussed above instead of being in positions 17 and 18 are in positions 19 and 20 for 21-mer oligonucleotide and 21 and 22 for 23 mer oligonucleotide; similarly the modifications in positions 15, 16, 17, 18 or 19 are in positions 17, 18, 19, 20 or 21 for the 21-mer oligonucleotide and positions 19, 20, 21, 22, or 23 for the 23-mer oligonucleotide. The 2′OMe modifications on the antisense strand are similarly adjusted. In some embodiments (N)x comprises 2′OMe sugar modified ribonucleotides at the odd numbered positions (5′ to 3′; positions 1, 3, 5, 7, 9, 12, 14, 16, 18, 20 for the 21 mer oligonucleotide [nucleotide at position 11 unmodified] and 1, 3, 5, 7, 9, 11, 13, 15, 17, 19, 21, 23 for the 23 mer oligonucleotide [nucleotide at position 12 unmodified]. In other embodiments (N)x comprises 2′OMe sugar modified ribonucleotides at positions 2, 4, 6, 8, 10, 12, 14, 16, 18, 20 [nucleotide at position 11 unmodified for the 21 mer oligonucleotide and at positions 2, 4, 6, 8, 10, 13, 15, 17, 19, 21, 23 for the 23 mer oligonucleotide [nucleotide at position 12 unmodified].

[0367] In some embodiments (N′)y further comprises a 5′ terminal cap nucleotide. In various embodiments the terminal cap moiety is selected from an abasic unconventional moiety, an inverted abasic unconventional moiety, an L-DNA nucleotide, and a C6-imine phosphate (C6 amino linker with phosphate at terminus).

[0368] In other embodiments the present application provides a compound having Structure (M) set forth below:

| | |
|---|---|
| 5′ (N)ₓ-Z | 3′(antisense strand) |
| 3′ Z′-(N′)_{y} | 5′(sense strand) |

[0369] wherein each of N and N′ is selected from a pseudo-nucleotide and a nucleotide;

[0370] wherein each nucleotide is selected from an unmodified ribonucleotide, a modified ribonucleotide, an unmodified deoxyribonucleotide, a modified deoxyribonucleotide or an unconventional moiety;

[0371] wherein each of (N)ₓ and (N′)_{y} is an oligonucleotide in which each consecutive N or N′ is joined to the next N or N′ by a covalent bond;

[0372] wherein Z and Z′ are absent;

[0373] wherein x=18 to 27;

[0374] wherein y=18 to 27;

[0375] wherein the sequence of (N′)_{y} is a sequence having complementarity to (N)x; and wherein the sequence of (N)ₓ comprises an antisense sequence having complementarity to about 18 to about 40 consecutive ribonucleotides in mRNA set forth in any one of SEQ ID NOS:1-23. Preferably (N)ₓ comprises an antisense sequence set forth in any one of SEQ ID NOs: 668-1311, 1812-2311, 2931-3549, 4050-4549, 5571-6391, 6892-7391, 7712-8031, 8532-9031, 9532-10031, 10532-11031, 11084-11135, 11177-11217, 11314-11409, 11584-11757, 11796-11833, 11862-11889, 12416-12941, 13442-13941, 14333-14723, 15224-15723, 15905-16085, 16514-16941, 17167-17391, 17881-18369, 18512-18653, 18973-19291, 19454-19615, 19906-20195, 20356-20515, 20847-21177, 21522-21865, 22366-22865, 23012-23157.

[0376] In some embodiments the sequence of (N′)y is fully complementary to the sequence of (N)x. In other embodiments the sequence of (N′)y is substantially complementary to the sequence of (N)x.

[0377] In some embodiments the sequence of (N)ₓ comprises an antisense sequence having full complementarity to about 18 to about 40 consecutive ribonucleotides in an mRNA set forth in any one of SEQ ID NOS:1-23. In other embodiments the sequence of (N)ₓ comprises an antisense sequence having complementarity to about 18 to about 40 consecutive ribonucleotides in an mRNA set forth in any one of SEQ ID NOS:1-23.

[0378] In other embodiments the present application provides a double stranded compound having Structure (N) set forth below:

| | | |
|---|---|---|
| (N) | 5′ (N)ₓ-Z | 3′ (antisense strand) |
| | 3′ Z′-(N′)_{y} | 5′ (sense strand) |

[0379] wherein each of N and N′ is a nucleotide selected from an unmodified ribonucleotide, a modified ribonucleotide, an unmodified deoxyribonucleotide, a modified deoxyribonucleotide or an unconventional moiety;

[0380] wherein each of (N)ₓ and (N′)_{y} is an oligonucleotide in which each consecutive N or N′ is joined to the next N or N′ by a covalent bond;

[0381] wherein Z and Z′ are absent;

[0382] wherein each of x and y is an integer between 18 and 40;

[0383] wherein the sequence of (N′)_{y} is a sequence having complementarity to (N)x; and wherein the sequence of (N)ₓ comprises an antisense sequence having complementarity to about 18 to about 40 consecutive ribonucleotides in mRNA set forth in any one of SEQ ID NOS:1-23. Preferably (N)ₓ comprises an antisense sequence set forth in any one of SEQ ID NOs: 668-1311, 1812-2311, 2931-3549, 4050-4549, 5571-6391, 6892-7391, 7712-8031, 8532-9031, 9532-10031, 10532-11031, 11084-11135, 11177-11217, 11314-11409, 11584-11757, 11796-11833, 11862-11889, 12416-12941, 13442-13941, 14333-14723, 15224-15723, 15905-16085, 16514-16941, 17167-17391, 17881-18369, 18512-18653, 18973-19291, 19454-19615, 19906-20195, 20356-20515, 20847-21177, 21522-21865, 22366-22865, 23012-23157.

[0384] In some embodiments the sequence of (N′)y is fully complementary to the sequence of (N)x. In other embodiments the sequence of (N′)y is substantially complementary to the sequence of (N)x.

[0385] In some embodiments the sequence of (N)ₓ comprises an antisense sequence having full complementarity to about 18 to about 40 consecutive ribonucleotides in an mRNA set forth in any one of SEQ ID NOS:1-23. In other embodiments the sequence of (N)ₓ comprises an antisense sequence having complementarity to about 18 to about 40 consecutive ribonucleotides in an mRNA set forth in any one of SEQ ID NOS:1-23. wherein (N)x, (N′)y or (N)x and (N′)y comprise non base-pairing modified nucleotides such that (N)x and (N′)y form less than 15 base pairs in the double stranded compound.

[0386] In other embodiments the present application provides a compound having Structure (O) set forth below:

| | | |
|---|---|---|
| (O) | 5′ (N)ₓ-Z | 3′ (antisense strand) |
| | 3′ Z′-(N′)_{y} | 5′ (sense strand) |

[0387] wherein each of N is a nucleotide selected from an unmodified ribonucleotide, a modified ribonucleotide, an unmodified deoxyribonucleotide, a modified deoxyribonucleotide or an unconventional moiety;

[0388] wherein each of N′ is a nucleotide analog selected from a six membered sugar nucleotide, seven membered sugar nucleotide, morpholino moiety, peptide nucleic acid and combinations thereof;

[0389] wherein each of (N)ₓ and (N′)_{y} is an oligonucleotide in which each consecutive N or N′ is joined to the next N or N′ by a covalent bond;

[0390] wherein Z and Z′ are absent;

[0391] wherein each of x and y is an integer between 18 and 40;

[0392] wherein the sequence of (N′)_{y} is a sequence having complementarity to (N)x; and wherein the sequence of (N)ₓ comprises an antisense sequence having complementarity to about 18 to about 40 consecutive ribonucleotides in mRNA set forth in any one of SEQ ID NOS:1-23. Preferably (N)ₓ comprises an antisense sequence set forth in any one of SEQ ID NOs: 668-1311, 1812-2311, 2931-3549, 4050-4549, 5571-6391, 6892-7391, 7712-8031, 8532-9031, 9532-10031, 10532-11031, 11084-11135, 11177-11217, 11314-11409, 11584-11757, 11796-11833, 11862-11889, 12416-12941, 13442-13941, 14333-14723, 15224-15723, 15905-16085, 16514-16941, 17167-17391, 17881-18369, 18512-18653, 18973-19291, 19454-19615, 19906-20195, 20356-20515, 20847-21177, 21522-21865, 22366-22865, 23012-23157.

[0393] In some embodiments the sequence of (N′)y is fully complementary to the sequence of (N)x. In other embodiments the sequence of (N′)y is substantially complementary to the sequence of (N)x.

[0394] In some embodiments the sequence of (N)ₓ comprises an antisense sequence having full complementarity to about 18 to about 40 consecutive ribonucleotides in an mRNA set forth in any one of SEQ ID NOS:1-23. In other embodiments the sequence of (N)ₓ comprises an antisense sequence having complementarity to about 18 to about 40 consecutive ribonucleotides in an mRNA set forth in any one of SEQ ID NOS:1-23.

[0395] In other embodiments the present application provides a compound having Structure (P) set forth below:

| | | |
|---|---|---|
| (P) | 5′ (N)ₓ-Z | 3′ (antisense strand) |
| | 3′ Z′-(N′)_{y} | 5′ (sense strand) |

[0396] wherein each of N and N′ is a nucleotide selected from an unmodified ribonucleotide, a modified ribonucleotide, an unmodified deoxyribonucleotide, a modified deoxyribonucleotide or an unconventional moiety;

[0397] wherein each of (N)ₓ and (N′)_{y} is an oligonucleotide in which each consecutive N or N′ is joined to the next N or N′ by a covalent bond;

[0398] wherein Z and Z′ are absent;

[0399] wherein each of x and y is an integer between 18 and 40;

[0400] wherein one of N or N′ in an internal position of (N)x or (N′)y or one or more of N or N′ at a terminal position of (N)x or (N′)y comprises an abasic moiety or a 2′ sugar modified ribonucleotide;

[0401] wherein the sequence of (N′)_{y} is a sequence having complementarity to (N)x; and wherein the sequence of (N)ₓ comprises an antisense sequence having complementarity to about 18 to about 40 consecutive ribonucleotides in mRNA set forth in any one of SEQ ID NOS:1-23. Preferably (N)ₓ comprises an antisense sequence set forth in any one of SEQ ID NOs: 668-1311, 1812-2311, 2931-3549, 4050-4549, 5571-6391, 6892-7391, 7712-8031, 8532-9031, 9532-10031, 10532-11031, 11084-11135, 11177-11217, 11314-11409, 11584-11757, 11796-11833, 11862-11889, 12416-12941, 13442-13941, 14333-14723, 15224-15723, 15905-16085, 16514-16941, 17167-17391, 17881-18369, 18512-18653, 18973-19291, 19454-19615, 19906-20195, 20356-20515, 20847-21177, 21522-21865, 22366-22865, 23012-23157.

[0402] In some embodiments the sequence of (N′)y is fully complementary to the sequence of (N)x. In other embodiments the sequence of (N′)y is substantially complementary to the sequence of (N)x.

[0403] In some embodiments the sequence of (N)ₓ comprises an antisense sequence having full complementarity to about 18 to about 40 consecutive ribonucleotides in an mRNA set forth in any one of SEQ ID NOS:1-23. In other embodiments the sequence of (N)ₓ comprises an antisense sequence having complementarity to about 18 to about 40 consecutive ribonucleotides in an mRNA set forth in any one of SEQ ID NOS:1-23.

[0404] In various embodiments (N′)y comprises a modified nucleotide at position 15 wherein the modified nucleotide is selected from a mirror nucleotide and a deoxyribonucleotide.

[0405] In certain embodiments (N′)y further comprises a modified nucleotide at position 2 wherein the modified nucleotide is selected from a mirror nucleotide and an abasic unconventional moiety.

[0406] In various embodiments the antisense strand (N)x comprises 2′O-Me modified ribonucleotides at the odd numbered positions (5′ to 3′; positions 1, 3, 5, 7, 9, 11, 13, 15, 17, 19). In some embodiments (N)_{X} further comprises 2′O-Me modified ribonucleotides at one or both positions 2 and 18. In other embodiments (N)x comprises 2′OMe sugar modified ribonucleotides at positions 2, 4, 6, 8, 11, 13, 15, 17, 19.

[0407] The Structural motifs described above are useful with any oligonucleotide pair (sense and antisense strands) to a mammalian target gene, and preferably to one of the human genes set forth in Table 1.

[0408] Any siRNA sequence disclosed herein can be prepared having any of the modifications/structures disclosed herein.

[0409] In another aspect the present application provides a pharmaceutical composition comprising a modified or unmodified compound of the present application, in an amount effective to down-regulate a human target gene expression or over-expression wherein the compound comprises an antisense sequence, (N)_{x,}; and a pharmaceutically acceptable carrier.

[0410] In yet another aspect the present application provides a pharmaceutical composition comprising one or more of modified compounds of the present application, in an amount effective to down-regulate expression or over-expression of one or more human target genes wherein the compound comprises an antisense sequence, (N)_{x,}; and a pharmaceutically acceptable carrier.

[0411] In another aspect, the present application relates to a method for the treatment of a subject in need of prevention of or treatment for, a disease, injury or disorder or symptoms associated with the disease, injury or disorder, associated with the expression of a target gene comprising administering to the subject an amount of at least one siRNA, according to the present application, in a therapeutically effective dose so as to thereby treat the subject or so as to prevent the disease, injury or disorder from occurring.

[0412] The methods of the application comprise administering to the subject one or more siRNA compounds which down-regulate expression of a target gene. The novel structures disclosed herein, when integrated into antisense and corresponding sense nucleic acid sequences, provide siRNA compounds useful in reducing expression of the target genes.

[0413] In various embodiment the target gene is selected from NOX4, NOX1, NOX2 (gp91phox, CYBB), NOX5, DUOX2, NOXO1, NOXO2 (NCF1), NOXA1, NOXA2 (p67phox, NCF2), TP53; HTRA2; KEAP1; SHC1, ZNHIT1, LGALS3, and HI95.

[0414] In some embodiments, the present application relates to a method for the treatment of a subject in need of treatment for a disease, injury or disorder or symptom or condition associated with the disease, injury or disorder, associated with the expression of at least two target genes comprising administering to the subject at least two siRNA compounds which down-regulate or inhibit expression or over-expression of the target genes. In preferred embodiments the siRNA compounds are chemically modified according to the embodiments of the present application. In some embodiments, the siRNA compounds are administered by the same route, either from the same or from different pharmaceutical compositions. However, in other embodiments, using the same route of administration for the two or more of the therapeutic siRNA compounds either is impossible or is not preferred. Persons skilled in the art are aware of the best modes of administration for each therapeutic agent, either alone or in a combination.

[0415] Indications and Methods of Treatment

[0416] In one aspect, the present application relates to a method for the treatment of a subject in need of prevention of or treatment for, a disease, injury or disorder associated with expression or over-expression of one or more of the target genes, comprising administering to the subject an amount of at least one chemically modified siRNA which inhibits expression of one or more of the target genes disclosed herein. In certain preferred embodiments more than one siRNA compound is administered.

[0417] In preferred embodiments the subject being treated is a warm-blooded animal and, in particular, mammal including human.

[0418] The methods of the application comprise administering to the subject one or more of the siRNA compounds which down-regulate expression of one or more of the target genes; and in particular at least one siRNA in a therapeutically effective dose so as to thereby treat the subject.

[0419] Thus, in one embodiment the present application provides for a method of treating a subject suffering from or at risk of a neurodegenerative disease or disorder, including Alzheimer's Disease (AD) and Amyotrophic lateral sclerosis (ALS), a microvascular disorder, a respiratory disorder, a hearing disorder, hearing loss; acute renal failure (ARF); an ophthalmic disease including glaucoma and ION; a respiratory disease including acute respiratory distress syndrome (ARDS), chronic obstructive pulmonary disease (COPD) and other acute lung and respiratory injuries; injury (e.g. ischemia-reperfusion injury), graft dysfunction and acute rejection after organ transplantation, including lung, kidney, bone marrow, heart, pancreas, cornea or liver transplantation; nephrotoxicity; pressure sores, dry eye syndrome, oral mucositis, comprising administering to the patient a pharmaceutical composition comprising a at least one siRNA compound as disclosed herein in a therapeutically effective amount so as to thereby treat the patient. Oligonucleotide sequences of certain preferred siRNA inhibitors are set forth in any one of Tables A1-A18, Tables B1-15 and Tables C1-C2.

[0420] The term “treatment” as used herein refers to administration of a therapeutic substance to a subject in need thereof in an amount effective to ameliorate symptoms associated with a disease, an injury or a disorder, to lessen the severity or cure the disease, the injury or the disorder, to delay the onset or the progression of the disease, the injury or the disorder or to prevent the disease, the injury or the disorder from occurring.

[0421] Additionally, the application provides a method of down-regulating the expression of a mammalian gene selected from the group consisting of NOX4, NOX1, NOX2 (gp91phox, CYBB), NOX5, DUOX2, NOXO1, NOXO2, NOXA1, NOXA2 (p67phox) TP53; HTRA2; KEAP1; SHC1-SHC, ZNHIT1, LGALS3, and HI95, by at least 40%, preferably by 50%, 60% or 70%, more preferably by 75%, 80% or 90% as compared to a control, comprising contacting a target mRNA transcript selected from the group consisting of NOX4, NOX1, NOX2 (gp9lphox, CYBB), NOX5, DUOX2, NOXO1, NOXO2, NOXA1, NOXA2 (p67phox), TP53; HTRA2; KEAP1; SHC1-SHC, ZNHIT1, LGALS3, and HI95, respectively with one or more of the compounds of the present application.

[0422] In one embodiment the compound of the present application is down-regulating one or more mammalian target genes selected from the group consisting of NOX4, NOX1, NOX2 (gp91phox, CYBB), NOX5, DUOX2, NOXO1, NOXO2, NOXA1, NOXA2 (p67phox), TP53; HTRA2; KEAP1; SHC1-SHC, ZNHIT1, LGALS3, and HI95, whereby the down-regulation is selected from the group comprising down-regulation of gene function, down-regulation of polypeptide and down-regulation of mRNA expression.

[0423] In one embodiment the compound is down-regulating a mammalian target polypeptide, whereby the down-regulation is selected from the group comprising down-regulation of function (which may be examined by an enzymatic assay or a binding assay with a known interactor of the native gene/polypeptide, inter alia), down-regulation of protein (which may be examined by Western blotting, ELISA or immuno-precipitation, inter alia) and down-regulation of mRNA expression (which may be examined by Northern blotting, quantitative RT-PCR, in-situ hybridization or microarray hybridization, inter alia).

[0424] In some embodiments the application provides a method of reducing the level of target gene expression in a cell comprising contacting the cell with a compound or composition of the application in a therapeutically effective dose thereby reducing the level of the target gene. In some embodiments the application provides a method of reducing the level of at least one target gene expression in a cell comprising contacting the cell with at least one compound or at least one composition of the application in a therapeutically effective dose thereby reducing the level of at least one target gene.

[0425] In additional embodiments the application provides a method of treating a patient at risk of or suffering from, a disease accompanied by an elevated level of a mammalian target gene comprising mRNA set forth in any one of SEQ ID NOS:1-23, the method comprising administering to the patient at least one compound or composition of the application in a therapeutically effective dose thereby treating the patient.

[0426] The present application relates to the use of compounds which down-regulate the expression of a mammalian target gene particularly to novel small interfering RNAs (siRNAs), in the treatment of the following diseases or conditions in which inhibition of the expression of the mammalian gene is beneficial: neurodegenerative diseases and disorders, including Alzheimer's disease, ALS, Parkinson's Disease, multiple sclerosis and the like; spinal cord injury, brain injury, hearing loss, acute renal failure, ocular disease e.g. glaucoma, dry eye syndrome and ION, a respiratory disease including Acute Respiratory Distress Syndrome and other acute lung injuries, injury (e.g. ischemia-reperfusion injury), graft dysfunction and acute rejection after organ transplantation, including lung, kidney, bone marrow, heart, pancreas, cornea or liver transplantation; pressure sores, osteoarthritis, an ophthalmic disease including glaucoma and ION; and Chronic Obstructive Pulmonary Disease (COPD). Other indications include chemical-induced nephrotoxicity and chemical-induced neurotoxicity, for example toxicity induced by cisplatin and cisplatin—like compounds, by aminoglycosides, by loop diuretics, and by hydroquinone and their analogs.

[0427] Methods, molecules and compositions which inhibit the mammalian target gene or polypeptide are discussed herein at length, and any of said molecules and/or compositions may be beneficially employed in the treatment of a patient at risk of or suffering from any of said conditions. In certain preferred embodiments the target gene is NOX4. A list of siRNAs directed to target genes is provided in Tables A1-A18 and B1-B15, infra. The number in parenthesis (#) indicates the number of the compound in the respective table.

[0428] Certain preferred siRNA compounds are provided in Table B15, infra.

[0429] The compounds disclosed herein are preferably chemically modified according to the embodiments of the present application.

[0430] “Treatment” refers to both therapeutic treatment and prophylactic or preventative measures, wherein the object is to prevent or slow down the onset or progression of a disease related to one or more of the target genes listed in Table 1. Those in need of treatment include those already experiencing the disease or condition, those prone to having the disease or condition, and those in which the disease or condition is to be prevented. The compounds of the application may be administered before, during or subsequent to the onset of the disease or condition.

[0431] The method of the application includes administering a therapeutically effective amount of one or more compounds which down-regulate expression of one or more target genes, particularly the novel siRNAs of the present application.

[0432] In some preferred embodiments, the siRNA compounds of the application are administered in various conditions of hearing loss. Without being bound by theory, the hearing loss may be due to inner ear hair cell damage or loss, wherein the damage or loss is caused by, inter alia, infection, mechanical injury, loud sound, aging (presbycusis or loss of hearing that gradually occurs in most individuals as they grow older), or chemical-induced ototoxicity. Ototoxins include therapeutic drugs including antineoplastic agents, salicylates, quinines, and aminoglycoside antibiotics, contaminants in foods or medicinals, and environmental or industrial pollutants. Typically, treatment is performed to prevent or reduce ototoxicity, especially resulting from or expected to result from administration of therapeutic drugs. Preferably a therapeutically effective composition is given immediately after the exposure to prevent or reduce the ototoxic effect. More preferably, treatment is provided prophylactically, either by administration of the composition prior to or concomitantly with the ototoxic pharmaceutical or the exposure to the ototoxin.

[0433] By “ototoxin” in the context of the present application is meant a substance that through its chemical action injures, impairs or inhibits the activity of the sound receptors component of the nervous system related to hearing, which in turn impairs hearing (and/or balance). In the context of the present application, ototoxicity includes a deleterious effect on the inner ear hair cells Ototoxic agents that cause hearing impairments include, but are not limited to, neoplastic agents such as vincristine, vinblastine, cisplatin and cisplatin-like compounds, taxol and taxol-like compounds, dideoxy-compounds, e.g., dideoxyinosine; alcohol; metals; industrial toxins involved in occupational or environmental exposure; contaminants of food or medicinals; and over-doses of vitamins or therapeutic drugs, e.g., antibiotics such as penicillin or chloramphenicol, and megadoses of vitamins A, D, or B6, salicylates, quinines and loop diuretics.

[0434] The ototoxic effects of various therapeutic drugs on auditory cells and spiral ganglion neurons are often the limiting factor for their therapeutic usefulness. Main ototoxic drugs include the widely used chemotherapeutic agent cisplatin and its analogs, commonly used aminoglycoside antibiotics, e.g. gentamycin, for the treatment of infections caused by gram-negative bacteria, quinine and its analogs, salicylate and its analogs, and loop-diuretics.

[0435] For example, antibacterial aminoglycosides such as gentamycin, streptomycin, kanamycin, tobramycin, and the like are known to have serious toxicity, particularly ototoxicity and nephrotoxicity, which reduce the value of such antimicrobials as therapeutic agents (see Goodman and Gilman's The Pharmacological Basis of Therapeutics, 6th ed., A. Goodman Gilman et al., eds; Macmillan Publishing Co., Inc., New York, 1980, pp. 1169-71).

[0436] Clearly, ototoxicity is a dose limiting side effect of antibiotic administration. Studies have shown that from 4% to 15% of patients receiving 1 gram per day for greater than 1 week develop measurable hearing loss, which slowly becomes worse and can lead to complete permanent deafness if treatment continues.

[0437] Nephrotoxicity and ototoxicity are serious dose limiting side effect for cisplatin, a platinum coordination complex, that has proven effective on a variety of human cancers including testicular, ovarian, bladder, and head and neck cancer. Cisplatin (Platinol®) damages auditory and vestibular systems. Salicylates, such as aspirin, are the most commonly used therapeutic drugs for their anti-inflammatory, analgesic, anti-pyretic and anti-thrombotic effects. Unfortunately, they too have ototoxic side effects and can lead to tinnitus (“ringing in the ears”) and temporary hearing loss. Moreover, if the drug is used at high doses for a prolonged time, chronic and irreversible hearing impairment can become an issue. Another target organ for cisplatin toxicity is the kidney. This toxicity is manifested by reduced renal function and leads to serum electrolyte changes and pathological changes in the urine analysis. Doses of cisplatin, which produce changes in renal function may cause no histopathological changes. Higher doses of the drug lead to terstitial nephritis. Cisplatin also causes bone marrow hypoplasia, and can cause autonomic neuropathy. Slight changes in liver function and histopathology are also observed following cisplatin therapy.

[0438] Without being bound by theory, it is believed that cisplatin drugs and other potentially ototoxic drugs (such as aminoglycoside antibiotics) may induce the ototoxic effects via programmed cell death or apoptosis in inner ear tissue, particularly inner ear hair cells (Zhang et al., Neuroscience 2003, 120(1):191-205; Wang et al., J. Neuroscience 2003, 23(24):8596-8607). In mammals, auditory hair cells are produced only during embryonic development and do not regenerate if lost during postnatal life, therefore, a loss of hair cells will result in profound and irreversible deafness. Unfortunately, at present, there are no effective therapies to treat the cochlea and reverse this condition. Thus, an effective therapy to prevent cell death of auditory hair cells would be of great therapeutic value.

[0439] Another type of hearing loss is presbycusis, which is age related hearing loss. It is estimated that about 30-35 percent of adults between the ages of 65 and 75 years and about 40-50 percent of people aged 75 and older have hearing loss. Accordingly, there exists a need for means to prevent, reduce or treat the incidence and/or severity of inner ear disorders and hearing impairments involving inner ear tissue, particularly inner ear hair cells.

[0440] By “exposure to an toxic agent” is meant that the toxic agent is made available to, or comes into contact with, a mammal. A toxic agent can be toxic to one or more organs in the body, for example, the ear, kidney, nervous system, liver and the like. Exposure to an toxic agent can occur by direct administration, e.g., by ingestion or administration of a food, medicinal, or therapeutic agent, e.g., a chemotherapeutic agent, by accidental contamination, or by environmental exposure, e g., aerial or aqueous exposure.

[0441] Hearing loss relevant to the application may be due to end-organ lesions involving inner ear hair cells, e.g., acoustic trauma, viral endolymphatic labyrinthitis, Meniere's disease. Hearing impairments include tinnitus, which is a perception of sound in the absence of an acoustic stimulus, and may be intermittent or continuous, wherein there is diagnosed a sensorineural loss. Hearing loss may be due to bacterial or viral infection, such as in herpes zoster oticus, purulent labyrinthitis arising from acute otitis media, purulent meningitis, chronic otitis media, sudden deafness including that of viral origin, e.g., viral endolymphatic labyrinthitis caused by viruses including mumps, measles, influenza, chicken pox, mononucleosis and adenoviruses. The hearing loss can be congenital, such as that caused by rubella, anoxia during birth, bleeding into the inner ear due to trauma during delivery, ototoxic drugs administered to the mother, erythroblastosis fetalis, and hereditary conditions including Waardenburg's syndrome and Hurler's syndrome.

[0442] The hearing loss can be noise-induced, generally due to a noise greater than about 85 decibels (db) that damages the inner ear. In a particular aspect of the application, the hearing loss is caused by an ototoxic drug that effects the auditory portion of the inner ear, particularly inner ear hair cells. Incorporated herein by reference are chapters 196, 197, 198 and 199 of The Merck Manual of Diagnosis and Therapy, 14th Edition, (1982), Merck Sharp & Dome Research Laboratories, N.J. and corresponding chapters in the most recent 16th edition, including Chapters 207 and 210 relating to description and diagnosis of hearing and balance impairments.

[0443] It is the object of the present application to provide a method and compositions for treating a mammal, to prevent, reduce, or treat a hearing impairment, disorder or imbalance, preferably an ototoxin-induced hearing condition, by administering to a mammal in need of such treatment a composition of the application. One embodiment of the application is a method for treating a hearing disorder or impairment wherein the ototoxicity results from administration of a therapeutically effective amount of an ototoxic pharmaceutical drug. Typical ototoxic drugs are chemotherapeutic agents, e.g. antineoplastic agents, and antibiotics. Other possible candidates include loop-diuretics, quinines or a quinine-like compound, and salicylate or salicylate-like compounds.

[0444] Ototoxic aminoglycoside antibiotics include but are not limited to neomycin, paromomycin, ribostamycin, lividomycin, kanamycin, amikacin, tobramycin, viomycin, gentamycin, sisomicin, netilmicin, streptomycin, dibekacin, fortimicin, and dihydrostreptomycin, or combinations thereof. Particular antibiotics include neomycin B, kanamycin A, kanamycin B, gentamycin C1, gentamycin C1a, and gentamycin C2.

[0445] The methods and compositions of the present application are also effective in the treatment of acoustic trauma or mechanical trauma, preferably acoustic or mechanical trauma that leads to inner ear hair cell loss. Acoustic trauma to be treated in the present application may be caused by a single exposure to an extremely loud sound, or following long-term exposure to everyday loud sounds above 85 decibels. Mechanical inner ear trauma to be treated in the present application is for example the inner ear trauma following insertion and operation of an electronic device in the inner ear. The compositions of the present application prevent or minimize the damage to inner ear hair cells associated with the device.

[0446] In some embodiments the composition of the application is co-administered with an ototoxin. For example, the present application provides an improved method for treatment of infection of a mammal receiving an antibiotic for treatment of the infection, comprising administering a therapeutically effective amount of one or more compounds (particularly novel siRNAs) which down-regulate expression of the mammalian NOX4 gene, to the patient in need of such treatment to reduce or prevent ototoxin-induced hearing impairment associated with the antibiotic. The compounds which down-regulate expression of a target gene, in particular novel siRNA compounds of the application are preferably administered locally within the inner ear. In one specific embodiment the siRNA compounds target mammalian NOX4.

[0447] In yet another embodiment an improved method for treatment of cancer in a mammal by administration of a chemotherapeutic compound is provided, wherein the improvement comprises administering a therapeutically effective amount of a composition of the application to the patient in need of such treatment to reduce or prevent ototoxin-induced hearing impairment associated with the chemotherapeutic drug. The compounds which reduce or prevent the ototoxin-induced hearing impairment, e.g. the novel siRNAs inter alia are preferably administered locally within the inner ear.

[0448] In another embodiment the methods of treatment are applied to treatment of hearing loss resulting from the administration of a chemotherapeutic agent in order to treat its ototoxic side effect.

[0449] In another embodiment the methods of the application are applied to hearing impairments resulting from the administration of quinine and its synthetic substitutes, typically used in the treatment of malaria, to treat its ototoxic side effect.

[0450] In another embodiment the methods of the application are applied to hearing impairments resulting from administration of a diuretic to treat its ototoxic side effect. Diuretics, particularly “loop” diuretics, i.e. those that act primarily in the Loop of Henle, are candidate ototoxins. Illustrative examples, not limiting to the application method, include furosemide, ethacrylic acid, and mercurials. Diuretics are typically used to prevent or eliminate edema. Diuretics are also used in nonedematous states for example hypertension, hypercalcemia, idiopathic hypercalciuria, and nephrogenic diabetes insipidus.

[0451] In another preferred embodiment, the compounds of the application are used for treating acute renal failure, in particular acute renal failure due to ischemia in post surgical patients, and acute renal failure due to chemotherapy treatment such as cisplatin administration or sepsis-associated acute renal failure. A preferred use of the compounds of the application is for the prevention of acute renal failure in high-risk patients undergoing major cardiac surgery or vascular surgery. The patients at high-risk of developing acute renal failure can be identified using various scoring methods such as the Cleveland Clinic algorithm or that developed by US Academic Hospitals (QMMI) and by Veterans' Administration (CICSS). Other preferred uses of the compounds of the application are for the prevention of ischemic acute renal failure in kidney transplant patients or for the prevention of toxic ARF in patients receiving chemotherapy.

[0452] In another preferred embodiment, the compounds of the application are used for treating ocular diseases (e.g. glaucoma, ocular ischemic conditions and dry eye syndrome).

[0453] In other embodiments the compounds and methods of the application are useful for treating or preventing the incidence or severity of various diseases and conditions in a patient, in particular conditions which are result from ischemic/reperfusion injury or oxidative stress, Acute Respiratory Distress Syndrome (ARDS) for example due to coronavirus infection or endotoxins, severe acute respiratory syndrome (SARS), and other acute lung injuries, ischemia reperfusion injury associated with lung transplantation, glaucoma, spinal cord injury, pressure sores, osteoarthritis and Chronic Obstructive Pulmonary Disease (COPD). The methods comprising administering to the patient a composition comprising one or more inhibitors (such as siRNA compounds) which inhibit at least one target gene in a therapeutically effective dose, thereby treating the patient.

[0454] In other embodiments the compounds and methods of the application are useful for treating or preventing the incidence or severity of other diseases and conditions in a patient. These diseases and conditions include, without being limited to, stroke and stroke-like situations (e.g. cerebral, renal, cardiac failure), neuronal cell death, brain injuries with or without reperfusion, chronic degenerative diseases e.g. neurodegenerative disease including Alzheimer's disease, Huntington's disease, Parkinson's disease, multiple sclerosis, amyotrophic lateral sclerosis, spinobulbar atrophy, prion disease, and apoptosis resulting from traumatic brain injury (TBI).

[0455] The compounds and methods of the application are directed to providing neuroprotection, cerebroprotection, or to prevent and/or treat cytotoxic T cell and natural killer cell-mediated apoptosis associated with autoimmune disease and transplant rejection, or to prevent cell death of cardiac cells including heart failure, cardiomyopathy, viral infection or bacterial infection of the heart, myocardial ischemia, myocardial infarct, and myocardial ischemia, coronary artery by-pass graft, or to prevent and/or treat mitochondrial drug toxicity e. g. as a result of chemotherapy or HIV therapy, to prevent cell death during viral infection or bacterial infection, or to prevent and/or treat inflammation or inflammatory diseases, inflammatory bowel disease, sepsis and septic shock. Other uses include prevention of cell death from follicle to ovocyte stages, from ovocyte to mature egg stages and sperm (for example, methods of freezing and transplanting ovarian tissue, artificial fertilization), or to preserve fertility in mammals after chemotherapy, in particular human mammals, or to prevent and/or treat, macular degeneration, or to prevent and/or treat acute hepatitis, chronic active hepatitis, hepatitis-B, and hepatitis-C, or to prevent hair loss, (e.g. hair loss due-to male-pattern baldness, or hair loss due to radiation, chemotherapy or emotional stress), or to treat or ameliorate skin damage whereby the skin damage may be due to exposure to high levels of radiation, heat, chemicals, sun, or to burns and autoimmune diseases), or to prevent cell death of bone marrow cells in myelodysplastic syndromes (MDS), or to treat pancreatisis, or to treat, rheumatoid arthritis, psoriasis, glomerulonephritis, atherosclerosis, and graft versus host disease (GVHD), or to treat retinal pericyte apoptosis, retinal damages resulting from ischemia, diabetic retinopathy, or to treat any disease states associated expression of at least one target gene selected from NOX4, NOX1, NOX2 (gp91phox, CYBB), NOX5, DUOX2, NOXO1, NOXO2 (NCF1), NOXA1, NOXA2 (p67phox, NCF2), TP53; HTRA2; KEAP1; SHC1, ZNHIT1, LGALS3, and HI95.

[0456] The present application also relates to organ transplantation in general. For organ transplantation, either the donor or the recipient or both are treated with a compound or composition of the present application. Accordingly, the present application relates to a method of treating an organ donor and/or an organ recipient comprising the step of administering to the organ donor and/or organ recipient a therapeutically effective amount of a compound according to the present application. In some embodiments the compounds of the present application are useful in preventing delayed graft function following a cadaveric organ transplant such as kidney transplant.

[0457] The application further relates to a method for preserving an organ comprising contacting the organ with an effective amount of compound of the present application. Also provided is a method for reducing or preventing injury (in particular reperfusion injury) of an organ during surgery and/or following removal of the organ from a subject comprising placing the organ in an organ preserving solution wherein the solution comprises a compound according to the present application.

[0458] The methods and compositions of the present application are effective in the treatment and prevention of any chronic wounds including inter alia pressure sores, venous ulcers, and diabetic ulcers. In all these chronic wound types, the underlying precipitating event is a period of ischemia followed by a period of reperfusion. These ischemia-reperfusion events are usually repetitive, which means the deleterious effects of ischemia-reperfusion are potentiated and eventually sufficient to cause ulceration. For both pressure sores and diabetic foot ulcers, the ischemic event is the result of prolonged pressure sufficient to prevent tissue perfusion, and when the pressure is finally relieved, the reperfusion injury occurs. The present compositions are effective in inhibiting the damage caused by ischemia-reperfusion in chronic wounds.

[0459] The present compositions are also effective in other conditions associated with ischemia-reperfusion such as but not limited to: organ transplantation, intestinal and colon anastamoses, operations on large blood vessels, stitching detached limbs, balloon angioplasty or any cardiac surgery, stroke or brain trauma, limb transplantation, pulmonary hypertension, hypoxemia, and noncardiogenic pulmonary edema, acute renal failure, acute glaucoma, diabetic retinopathy, hypertensive retinopathy, and retinal vascular occlusion, cochlear ischemia, microvascular surgery and ischemic lesions in scleroderma.

[0460] “Treating a subject suffering from a disease, an injury or a disorder” refers to administering a therapeutic siRNA substance effective to ameliorate symptoms associated with a disease, an injury or a disorder, to lessen the severity or cure the disease, the injury or the disorder, to delay onset or progression of the disease, the injury or the disorder, or to prevent the disease, the injury or the disorder from occurring.” Treatment” refers to both therapeutic treatment and prophylactic or preventative measures, wherein the object is to prevent or slow down (lessen) a disease or disorder.

[0461] A “therapeutically effective dose” refers to an amount of a pharmaceutical compound or composition which is effective to achieve an improvement in a patient or his physiological systems including, but not limited to, improved survival rate, more rapid recovery, or improvement or elimination of symptoms, and other indicators as are selected as appropriate determining measures by those skilled in the art.

[0462] “Respiratory disorder” refers to conditions, diseases or syndromes of the respiratory system including but not limited to pulmonary disorders of all types including chronic obstructive pulmonary disease (COPD), acute lung injury (ALI), emphysema, chronic bronchitis, asthma and lung cancer, inter alia. Emphysema and chronic bronchitis may occur as part of COPD or independently. Conditions resulting from lung transplantation may also be viewed as such.

[0463] “Ischemic diseases/conditions” relates to any disease in which ischemia is involved, as well as ischemia-reperfusion injury and ischemia in connection with organ transplantation.

[0464] “Microvascular disorder” refers to any condition that affects microscopic capillaries and lymphatics, in particular vasospastic diseases, vasculitic diseases and lymphatic occlusive diseases. Examples of microvascular disorders include, inter alia: eye disorders such as Amaurosis Fugax (embolic or secondary to SLE), apla syndrome, Prot CS and ATIII deficiency, microvascular pathologies caused by IV drug use, dysproteinemia, temporal arteritis, anterior ischemic optic neuropathy, optic neuritis (primary or secondary to autoimmune diseases), glaucoma, von Hippel Lindau syndrome, corneal disease, corneal transplant rejection cataracts, Eales' disease, frosted branch angiitis, encircling buckling operation, uveitis including pars planitis, choroidal melanoma, choroidal hemangioma, optic nerve aplasia; retinal conditions such as retinal artery occlusion, retinal vein occlusion, retinopathy of prematurity, HIV retinopathy, Purtscher retinopathy, retinopathy of systemic vasculitis and autoimmune diseases, diabetic retinopathy, hypertensive retinopathy, radiation retinopathy, branch retinal artery or vein occlusion, idiopathic retinal vasculitis, aneurysms, neuroretinitis, retinal embolization, acute retinal necrosis, Birdshot retinochoroidopathy, long-standing retinal detachment; systemic conditions such as Diabetes mellitus, diabetic retinopathy (DR), diabetes-related microvascular pathologies (as detailed herein), hyperviscosity syndromes, aortic arch syndromes and ocular ischemic syndromes, carotid-cavernous fistula, multiple sclerosis, systemic lupus erythematosus, arteriolitis with SS-A autoantibody, acute multifocal hemorrhagic vasculitis, vasculitis resulting from infection, vasculitis resulting from Behcet's disease, sarcoidosis, coagulopathies, neuropathies, nephropathies, microvascular diseases of the kidney, acute renal failure and ischemic microvascular conditions, inter alia.

[0465] Microvascular disorders may comprise a neovascular element. The term “neovascular disorder” refers to those conditions where the formation of blood vessels (neovascularization) is harmful to the patient. Examples of ocular neovascularization include: retinal diseases (diabetic retinopathy, diabetic Macular Edema, chronic glaucoma, retinal detachment, and sickle cell retinopathy); rubeosis iritis; proliferative vitreo-retinopathy; inflammatory diseases; chronic uveitis; neoplasms (retinoblastoma, pseudoglioma and melanoma); Fuchs' heterochromic iridocyclitis; neovascular glaucoma; corneal neovascularization (inflammatory, transplantation and developmental hypoplasia of the iris); neovascularization following a combined vitrectomy and lensectomy; vascular diseases (retinal ischemia, choroidal vascular insufficiency, choroidal thrombosis and carotid artery ischemia); neovascularization of the optic nerve; and neovascularization due to penetration of the eye or contusive ocular injury. All these neovascular conditions may be treated using the compounds and pharmaceutical compositions of the present application.

[0466] Eye disease or ocular disease or ocular disorder or ophthalmic disease or ophthalmic disorder refers to refers to conditions, diseases or syndromes of the eye including but not limited to any conditions involving choroidal neovascularization (CNV), wet and dry AMD, ocular histoplasmosis syndrome, angiod streaks, ruptures in Bruch's membrane, myopic degeneration, ocular tumors, retinal degenerative diseases, glaucoma, ION, AION, NAION and retinal vein occlusion (RVO). Some conditions disclosed herein, such as DR, which may be treated according to the methods of the present application have been regarded as either a microvascular disorder and an eye disease, or both, under the definitions presented herein.

[0467] In some embodiments the compounds and methods of the application are useful for treating or preventing the incidence or severity of other diseases, injuries and conditions in a patient. These diseases, injuries and conditions include, without being limited to, stroke and stroke-like situations (e.g. cerebral, renal, cardiac failure), neuronal cell death, brain injuries with or without reperfusion, chronic degenerative diseases e.g. neurodegenerative disease including Alzheimer's disease, Huntington's disease, Parkinson's disease, multiple sclerosis, amyotrophic lateral sclerosis, spinobulbar atrophy, prion disease, and apoptosis resulting from traumatic brain injury (TBI).

[0468] The compounds and methods of the application are directed to providing neuroprotection for example in the optic nerve and cerebroprotection.

[0469] Emphysema and COPD

[0470] Among the mechanisms that underlie lung destruction in emphysema, excessive formation of reactive oxygen species (ROS) should be first of all mentioned. It is well established that prooxidant/antioxidant imbalance exists in the blood and in the lung tissue of smokers (Hulea S A, et al: 1995. J Environ Pathol Toxicol Oncol. 14(3-4):173-80; Rahman I, MacNee W. 1999. Am J Physiol. 277(6 Pt 1):L1067-88; MacNee W. 2000 Chest. 117(5 Suppl 1):303S-17S; Marwick J A, et al., 2002. Ann NY Acad Sci. 973:278-83; Aoshiba K, et al., 2003. Inhal Toxicol. (10):1029-38; Dekhuijzen P N. 2004. Eur Respir J. 23(4):629-36; Tuder R M, et al., 2003. Am J Respir Cell Mol Biol, 29:88-97). After one hour exposure of mice to CS, there is a dramatic increase of 8-hydroxy-2′-deoxyguanosine (8-OHdG) in the alveolar epithelial cells, particularly of type II (see Inhal Toxicol. 2003 15(10):1029-38, above).

[0471] Overproduced reactive oxygen species are known for their cytotoxic activity, which stems from a direct DNA damaging effect and from the activation of apoptotic signal transduction pathways (Takahashi et al., 2004. Brain Res Bull. 62(6):497-504; Taniyama Y, Griendling K K. 2003. Hypertension. 42(6):1075-81; Higuchi Y. 2003. Biochem Pharmacol. 66(8):1527-35; Punj V, Chakrabarty A M. 2003. Cell Microbiol. (4):225-31; Ueda et al., 2002 Antioxid Redox Signal. 4(3):405-14).

[0472] Acute Renal Failure

[0473] Acute renal failure (ARF) is a clinical syndrome characterized by rapid deterioration of renal function that occurs within days. The principal feature of ARF is an abrupt decline in glomerular filtration rate (GFR), resulting in the retention of nitrogenous wastes (urea, creatinine) Worldwide, severe ARF occurs in about 170-200 per million population annually. To date, there is no specific treatment for established ARF. Several drugs have been found to ameliorate toxic and ischemic experimental ARF, as manifested by lower serum creatinine levels, reduced histological damage and faster recovery of renal function in different animal models. These include anti-oxidants, calcium channel blockers, diuretics, vasoactive substances, growth factors, anti-inflammatory agents and more. However, the drugs tested in clinical trials showed no benefit, and their use in clinical ARF has not been approved.

[0474] In the majority of hospitalized ARF patients, ARF is caused by acute tubular necrosis (ATN), which results from ischemic and/or nephrotoxic insults. Renal hypoperfusion is caused by hypovolemic, cardiogenic and septic shock, by administration of vasoconstrictive drugs or renovascular injury. Nephrotoxins include exogenous toxins such as contrast media, aminoglycosides and cisplatin and cisplatin-like compounds as well as endogenous toxin such as myoglobin. Recent studies, however, support the theory that apoptosis in renal tissues is prominent in most human cases of ARF. The principal site of apoptotic cell death is the distal nephron. During the initial phase of ischemic injury, loss of integrity of the actin cytoskeleton leads to flattening of the epithelium, with loss of the brush border, loss of focal cell contacts, and subsequent disengagement of the cell from the underlying substratum. It has been suggested that apoptotic tubule cell death may be more predictive of functional changes than necrotic cell death (Komarov et al., Science 1999, 10;285(5434):1733-7); Supavekin et al., Kidney Int. 2003, 63(5):1714-24).

[0475] In conclusion, currently there are no satisfactory modes of therapy for the prevention and/or treatment of acute renal failure, and there is a need therefore to develop novel compounds for this purpose.

[0476] Glaucoma

[0477] Glaucoma is one of the leading causes of blindness in the world. It affects approximately 66.8 million people worldwide and at least 12,000 Americans are blinded by this disease each year (Kahn and Milton, Am J Epidemiol. 1980, 111(6):769-76). Glaucoma is characterized by the degeneration of axons in the optic nerve head, primarily due to elevated intraocular pressure (IOP). One of the most common forms of glaucoma, known as primary open-angle glaucoma (POAG), results from the increased resistance of aqueous humor outflow in the trabecular meshwork (TM), causing IOP elevation and eventual optic nerve damage.

[0478] Acute Respiratory Distress Syndrome

[0479] Acute respiratory distress syndrome (ARDS), also known as respiratory distress syndrome (RDS) or adult respiratory distress syndrome (in contrast with infant respiratory distress syndrome, IRDS) is a serious reaction to various forms of injuries to the lung. This is the most important disorder resulting in increased permeability pulmonary edema.

[0480] ARDS is a severe lung disease caused by a variety of direct and indirect insults. It is characterized by inflammation of the lung parenchyma leading to impaired gas exchange with concomitant systemic release of inflammatory mediators causing inflammation, hypoxemia and frequently resulting in multiple organ failure. This condition is life threatening, usually requiring mechanical ventilation and admission to an intensive care unit. A less severe form is called acute lung injury (ALI).

[0481] Spinal Cord Injury

[0482] Spinal cord injury or myelopathy, is a disturbance of the spinal cord that results in loss of sensation and/or mobility. The two common types of spinal cord injury are due to trauma and disease. Traumatic injury can be due to automobile accidents, falls, gunshot, diving accidents inter alia, and diseases which can affect the spinal cord include polio, spina bifida, tumors and Friedreich's ataxia.

[0483] Ischemia Reperfusion Injury Following Lung Transplantation

[0484] Lung transplantation, the only definitive therapy for many patients with end stage lung disease, has poor survival rates in all solid allograft recipients. Ischemia reperfusion (IR) injury is one of the leading causes of death in lung allograft recipients.

[0485] International patent application no. WO 2006/035434 assigned to the assignee of the present application discloses p53 inhibitors for the treatment of, inter alia, acute renal failure and hearing loss.

[0486] Diabetic Retinopathy

[0487] In the diabetic state, hyperglycemia leads to decreased retinal blood flow, retinal hyperpermeability, delays in photoreceptor nerve conduction, and retinal neuronal cell death. In short duration diabetes, neuronal cell death has been identified within the inner nuclear layer of the retina. Specifically, apoptosis has been localized to glial cells such as Mueller cells and astrocytes and has been shown to occur within 1 month of diabetes in the STZ-induced diabetic rat model. The cause of these events is multi-factorial including activation of the diacylglycerol/PKC pathway, oxidative stress, and nonenzymatic glycosylation. The combination of these events renders the retina hypoxic and ultimately leads to the development of diabetic retinopathy. One possible connection between retinal ischemia and the early changes in the diabetic retina is the hypoxia-induced production of growth factors such as VEGF. The master regulator of the hypoxic response has been identified as hypoxia inducible factor-1 (HIF-1), which controls genes that regulate cellular proliferation and angiogenesis. Prior studies have demonstrated that inhibition of HIF-1 ubiquitination leads to binding with hypoxia responsive elements (HRE) and production of VEGF mRNA.

[0488] Diabetic Retinopathy is defined as the progressive dysfunction of the retinal vasculature caused by chronic hyperglycemia. Key features of diabetic retinopathy include microaneurysms, retinal hemorrhages, retinal lipid exudates, cotton-wool spots, capillary nonperfusion, macular edema and neovascularization. Associated features include vitreous hemorrhage, retinal detachment, neovascular glaucoma, premature cataract and cranial nerve palsies.

[0489] A microvascular disease that primarily affects the capillaries, diabetes mellitus affects the eye by destroying the vasculature in the conjunctiva, retina and central nervous system.

[0490] Neuropathy

[0491] Neuropathy affects all peripheral nerves: pain fibers, motor neurons, autonomic nerves. It therefore necessarily can affect all organs and systems since all are innervated. There are several distinct syndromes based on the organ systems and members affected, but these are by no means exclusive. A patient can have sensorimotor and autonomic neuropathy or any other combination. Despite advances in the understanding of the metabolic causes of neuropathy, treatments aimed at interrupting these pathological processes have been limited by side effects and lack of efficacy. Thus, treatments are symptomatic and do not address the underlying problems. Agents for pain caused by sensorimotor neuropathy include tricyclic antidepressants (TCAs), serotonin reuptake inhibitors (SSRIs) and antiepileptic drugs (AEDs). None of these agents reverse the pathological processes leading to diabetic neuropathy and none alter the relentless course of the illness. Thus, it would be useful to have a pharmaceutical composition that could better treat these conditions and/or alleviate the symptoms.

[0492] Retinal Microvasculopathy (AIDS Retinopathy)

[0493] Retinal microvasculopathy is seen in 100% of AIDS patients. It is characterized by intraretinal hemorrhages, microaneurysms, Roth spots, cotton-wool spots (microinfarctions of the nerve fiber layer) and perivascular sheathing. The etiology of the retinopathy is unknown though it has been thought to be due to circulating immune complexes, local release of cytotoxic substances, abnormal hemorheology, and HIV infection of endothelial cells. AIDS retinopathy is now so common that cotton wool spots in a patient without diabetes or hypertension but at risk for HIV should prompt the physician to consider viral testing. There is no specific treatment for AIDS retinopathy but its continued presence may prompt a physician to reexamine the efficacy of the HIV therapy and patient compliance.

[0494] Bone Marrow Transplantation (BMT) Retinopathy

[0495] Bone marrow transplantation retinopathy was first reported in 1983. It typically occurs within six months, but it can occur as late as 62 months after BMT. Risk factors such as diabetes and hypertension may facilitate the development of BMT retinopathy by heightening the ischemic microvasculopathy. There is no known age, gender or race predilection for development of BMT retinopathy. Patients present with decreased visual acuity and/or visual field deficit. Posterior segment findings are typically bilateral and symmetric. Clinical manifestations include multiple cotton wool spots, telangiectasia, microaneurysms, macular edema, hard exudates and retinal hemorrhages. Fluorescein angiography demonstrates capillary nonperfusion and dropout, intraretinal microvascular abnormalities, microaneurysms and macular edema. Although the precise etiology of BMT retinopathy has not been elucidated, it appears to be affected by several factors: cyclosporine toxicity, total body irradiation (TBI), and chemotherapeutic agents. Cyclosporine is a powerful immunomodulatory agent that suppresses graft-versus-host immune response. It may lead to endothelial cell injury and neurological side effects, and as a result, it has been suggested as the cause of BMT retinopathy. However, BMT retinopathy can develop in the absence of cyclosporine use, and cyclosporine has not been shown to cause BMT retinopathy in autologous or syngeneic bone marrow recipients. Cyclosporine does not, therefore, appear to be the sole cause of BMT retinopathy. Total body irradiation (TBI) has also been implicated as the cause of BMT retinopathy. Radiation injures the retinal microvasculature and leads to ischemic vasculopathy. Variables such as the total dose of radiation and the time interval between radiation and bone marrow ablation appear to be important. However, BMT retinopathy can occur in patients who did not receive TBI, and BMT retinopathy is not observed in solid organ transplant recipients who received similar doses of radiation. Thus, TBI is not the sole cause, but it is another contributing factor in development of BMT retinopathy. Chemotherapeutic agents have been suggested as a potential contributing factor in BMT retinopathy. Medications such as cisplatin, carmustine, and cyclophosphamide can cause ocular side effects including papilledema, optic neuritis, visual field deficit and cortical blindness. It has been suggested that these chemotherapeutic drugs may predispose patients to radiation-induced retinal damages and enhance the deleterious effect of radiation. In general, patients with BMT retinopathy have a good prognosis. The retinopathy usually resolves within two to four months after stopping or lowering the dosage of cyclosporine. In one report, 69 percent of patients experienced complete resolution of the retinal findings, and 46 percent of patients fully recovered their baseline visual acuity. Because of the favorable prognosis and relatively non-progressive nature of BMT retinopathy, aggressive intervention is usually not necessary.

[0496] Microvascular Diseases of the Kidney

[0497] The kidney is involved in a number of discreet clinicopathologic conditions that affect systemic and renal microvasculature. Certain of these conditions are characterized by primary injury to endothelial cells, such as: Hemolytic-uremic syndrome (HUS) and thrombotic thrombocytopenic purpura (TTP) and Radiation nephritis—The long-term consequences of renal irradiation in excess of 2500 rad.

[0498] In other kidney diseases, the microvasculature of the kidney is involved in autoimmune disorders, such as systemic sclerosis (scleroderma). Kidney involvement in systemic sclerosis manifests as a slowly progressing chronic renal disease or as scleroderma renal crisis (SRC), which is characterized by malignant hypertension and acute azotemia. It is postulated that SRC is caused by a Raynaud-like phenomenon in the kidney. Severe vasospasm leads to cortical ischemia and enhanced production of renin and angiotensin II, which in turn perpetuate renal vasoconstriction. Hormonal changes (pregnancy), physical and emotional stress, or cold temperature may trigger the Raynaud-like arterial vasospasm. The role of the renin-angiotensin system in perpetuating renal ischemia is underscored by the significant benefit of ACE inhibitors in treating SRC. In patients with SRC who progress to severe renal insufficiency despite antihypertensive treatment, dialysis becomes a necessity. Both peritoneal dialysis and hemodialysis have been employed. The End-Stage Renal Disease (ESRD) Network report on 311 patients with systemic sclerosis-induced ESRD dialyzed between 1983 and 1985 revealed a 33% survival rate at 3 years.

[0499] The renal microcirculation can also be affected in sickle cell disease, to which the kidney is particularly susceptible because of the low oxygen tension attained in the deep vessels of the renal medulla as a result of countercurrent transfer of oxygen along the vasa recta. The smaller renal arteries and arterioles can also be the site of thromboembolic injury from cholesterol-containing material dislodged from the walls of the large vessels.

[0500] Taken as a group, diseases that cause transient or permanent occlusion of renal microvasculature uniformly result in disruption of glomerular perfusion, and hence of the glomerular filtration rate, thereby constituting a serious threat to systemic homeostasis.

[0501] Oral Mucositis

[0502] Oral mucositis, also referred to as stomatitis, is a common and debilitating side effect of chemotherapy and radiotherapy regimens, which manifests itself as erythema and painful ulcerative lesions of the mouth and throat. Routine activities such as eating, drinking, swallowing, and talking may be difficult or impossible for subjects with severe oral mucositis. Palliative therapy includes administration of analgesics and topical rinses.

[0503] Dry-Eye Syndrome

[0504] Dry eye syndrome is a common problem usually resulting from a decrease in the production of tear film that lubricates the eyes. Most patients with dry eye experience discomfort, and no vision loss; although in severe cases, the cornea may become damaged or infected. Wetting drops (artificial tears) may be used for treatment while lubricating ointments may help more severe cases.

[0505] Ocular Ischemic Conditions

[0506] Ischemic optic neuropathy (ION) includes a variety of disorders that produce ischemia to the optic nerve. By definition, ION is termed anterior if disc edema is present acutely, suggesting infarction of the portion of the optic nerve closest to the globe. ION also may be posterior, lying several centimeters behind the globe. Ischemic optic neuropathy usually occurs only in people older than 60 years of age. Most cases are nonarteritic and attributed to the effects of atherosclerosis, diabetes, or hypertension on optic nerve perfusion. Temporal arteritis causes about 5% of cases (arteritic ION).

[0507] Ischemic Optic Neuropathy (ION)

[0508] A severely blinding disease resulting from loss of the arterial blood supply to the optic nerve (usually in one eye), as a result of occlusive disorders of the nutrient arteries. Optic neuropathy can be anterior (AION), which causes a pale edema of the optic disc, or posterior, in which the optic disc is not swollen and the abnormality occurs between the eyeball and the optic chiasm. Ischemic anterior optic neuropathy usually causes a loss of vision that may be sudden or occur over several days. Ischemic posterior optic neuropathy is uncommon, and the diagnosis depends largely upon exclusion of other causes, chiefly stroke and brain tumor.

[0509] More effective therapies to treat the above mentioned diseases and disorders would be of great therapeutic value.

[0510] Organ Transplantation

[0511] In various embodiments the chemically modified siRNA compounds of the application are useful for treating or preventing injury, including reperfusion injury, following organ transplantation including lung, liver, heart, bone pancreas, intestine, skin, blood vessels, heart valve, bone and kidney transplantation.

[0512] The term “organ transplant” is meant to encompass transplant of any one or more of the following organs including, inter alia, lung, kidney, heart, skin, vein, bone, cartilage, liver transplantation. Although a xenotransplant can be contemplated in certain situations, an allotransplant is usually preferable. An autograft can be considered for bone marrow, skin, bone, cartilage and or blood vessel transplantation.

[0513] The siRNA compounds of the present application are particularly useful in treating a subject experiencing the adverse effects of organ transplant, including ameliorating, treating or preventing perfusion injury.

[0514] For organ transplantation, either the donor or the recipient or both may be treated with a chemically modified siRNA compound of the present application or pharmaceutical composition comprising at least one of the siRNA compounds of the application. Accordingly, the present application relates to a method of treating an organ donor or an organ recipient comprising the step of administering to the organ donor or organ recipient or both a therapeutically effective amount of at least one chemically modified siRNA compound according to the present application.

[0515] The application further relates to a method for preserving an organ comprising contacting the organ with an effective amount of at least one siRNA compound of the present application. Also provided is a method for reducing or preventing injury (in particular reperfusion injury) of an organ during surgery and/or following removal of the organ from a subject comprising placing the organ in an organ preserving solution wherein the solution comprises at least one chemically modified siRNA compound according to the present application.

[0516] Lung Transplantation

[0517] Indications for lung transplantation include chronic obstructive pulmonary disease (COPD), pulmonary hypertension, cystic fibrosis, idiopathic pulmonary fibrosis, and Eisenmenger syndrome. Typically, four different surgical techniques are used: single-lung transplantation, bilateral sequential transplantation, combined heart-lung transplantation, and lobar transplantation, with the majority of organs obtained from deceased donors.

[0518] The medical complications associated with lung transplantation include surgical complications, graft rejection, or immunosuppression.

[0519] Graft rejection has been categorized into three subcategories (i) hyperacute rejection is the term applied to very early graft destruction, usually within the first 48-72 hours; (ii) acute rejection has an onset of several days to months or even years after transplantation and can involve humoral and/or cellular mechanisms; (iii) Chronic rejection relates to chronic alloreactive immune response.

[0520] Hyperacute, or primary, graft failure occurs within 72 hours postoperatively resulting from ischemia-reperfusion (IR) injury and presents similarly to acute respiratory distress syndrome (ARDS). Mortality may reach up to 60%, and patients who survive may have a prolonged recovery period with significant pulmonary function impairments.

[0521] Acute graft rejection typically occurs in the first 3 months post transplantation. Acute graft rejection is characterized by a host T-cell response toward the transplanted organ. Clinical features of acute graft rejection are nonspecific and include one or more of dyspnea, fever, leukocytosis, nonproductive cough, hypoxemia, and malaise. Acute allograft rejection remains a significant problem in lung transplantation despite advances in immunosuppressive medication. Rejection, and ultimately early morbidity and mortality may result from ischemia-reperfusion (I/R) injury and hypoxic injury.

[0522] The clinical course is variable and depends on the severity of rejection; mild cases of rejection may even be asymptomatic. Treatment for acute graft rejection is high-dose parenteral steroids.

[0523] In mild chronic rejection, the patient may present with a nonproductive cough and dyspnea on exertion, that can progress to dyspnea at rest, productive cough, pseudomonas colonization, and chest radiographic findings of bronchiectasis and air trapping. Histologic changes involve either the vasculature or the airways. Chronic vascular rejection is caused by atherosclerosis of the pulmonary vasculature, while chronic airway rejection is caused by bronchiolitis obliterans.

[0524] In some embodiments the target gene is selected from P53, NOX2 and NOX4. In yet other embodiments the sense and antisense oligonucleotide sequences useful in synthesizing siRNA compounds are set forth in Tables B1, A5, A1 and A2.

[0525] Pharmaceutical Compositions

[0526] The present application provides a pharmaceutical composition comprising one or more of the compounds of the application; and a pharmaceutically acceptable carrier. In various embodiments such compositions comprise a mixture of two or more different oligonucleotides/siRNAs.

[0527] The application further provides a pharmaceutical composition comprising at least one compound of the application covalently or non-covalently bound to one or more compounds of the application in an amount effective to down-regulate target gene expression or activity; and a pharmaceutically acceptable carrier. Endogenous cellular complexes to produce one or more oligoribonucleotides of the application may process the compound intracellularly.

[0528] The present application also provides for a process of preparing a pharmaceutical composition, which comprises:

[0529] providing one or more siRNA compounds of the application; and

[0530] admixing said compound with a pharmaceutically acceptable carrier.

[0531] Substantially complementary refers to complementarity of greater than about 84%, to another sequence. For example in a duplex region consisting of 19 base pairs one mismatch results in 94.7% complementarity, two mismatches results in about 89.5% complementarity and 3 mismatches results in about 84.2% complementarity, rendering the duplex region substantially complementary. Accordingly substantially identical refers to identity of greater than about 84%, to another sequence.

[0532] Additionally, the application provides a method of inhibiting the expression of the genes of the present application by at least 50% as compared to a control comprising contacting an mRNA transcript of the gene of the present application with one or more of the compounds of the application.

[0533] In one embodiment the oligoribonucleotide is inhibiting a target gene, whereby the inhibition is selected from the group comprising inhibition of gene function, inhibition of polypeptide and inhibition of mRNA expression. In various embodiments target gene is selected from NOX4, NOX1, NOX2 (gp91phox, CYBB), NOX5, DUOX2, NOXO1, NOXO2 (NCF1), NOXA1, NOXA2 (p67phox, NCF2), TP53; HTRA2; KEAP1; SHC1, ZNHIT1, LGALS3, and HI95.

[0534] In additional embodiments the application provides a method of treating a subject at risk of or suffering from, a disease accompanied by an elevated level of one or more of the target genes/polypeptides, the method comprising administering to the subject a compound of the application in a therapeutically effective dose thereby treating the subject.

[0535] More particularly, the application provides a chemically modified double stranded oligoribonucleotide wherein one strand comprises consecutive nucleotides having, from 5′ to 3′, the sequence set forth in any one of Tables A1-A18 or Tables B1-B15, SEQ ID NOS:24-23,157, or a homolog thereof wherein in up to two of the ribonucleotides in each terminal region is altered.

[0536] Delivery

[0537] The siRNA molecules of the present application may be delivered to the target tissue by direct application of the naked molecules prepared with a carrier or a diluent.

[0538] The term “naked siRNA” refers to siRNA molecules that are free from any delivery vehicle that acts to assist, promote or facilitate entry into the cell, including viral sequences, viral particles, liposome formulations, lipofectin or precipitating agents and the like. For example, siRNA in PBS is “naked siRNA”.

[0539] However, in some embodiments the siRNA molecules of the application are delivered in liposome formulations and lipofectin formulations and the like and can be prepared by methods well known to those skilled in the art. Such methods are described, for example, in U.S. Pat. Nos. 5,593,972, 5,589,466, and 5,580,859, which are herein incorporated by reference.

[0540] For delivery of siRNAs, see, for example, Larson, S D et al., Surgery 2007. 142:262-69; Shen et al., 2003. FEBS Letters 539: 111-114; Xia et al., 2002. Nat Biotech 20: 1006-1010, Reich et al., 2003. Molec. Vision 9: 210-216, Sorensen et al. 2003. J. Mol. Biol. 327: 761-766, Lewis et al., 2002. Nat Genet 32: 107-108; Simeoni et al., 2003. NAR 31, 11: 2717-2724. International Patent Application Publication No. WO 2007/107789 relates to intranasal delivery of siRNA to the CNS.

[0541] The pharmaceutically acceptable carriers, solvents, diluents, excipients, adjuvants and vehicles as well as implant carriers generally refer to inert, non-toxic solid or liquid fillers, diluents or encapsulating material not reacting with the active ingredients of the application and they include liposomes and microspheres. Examples of delivery systems useful in the present application include U.S. Pat. Nos. 5,225,182; 5,169,383; 5,167,616; 4,959,217; 4,925,678; 4,487,603; 4,486,194; 4,447,233; 4,447,224; 4,439,196; and 4,475,196. Many other such implants, delivery systems, and modules are well known to those skilled in the art. In one specific embodiment of this application topical and transdermal formulations may be selected. The siRNAs or pharmaceutical compositions of the present application are administered and dosed in accordance with good medical practice, taking into account the clinical condition of the individual patient, the disease to be treated, the site and method of administration, scheduling of administration, patient age, sex, body weight and other factors known to medical practitioners.

[0542] The “therapeutically effective dose” for purposes herein is thus determined by such considerations as are known in the art. The dose must be effective to achieve improvement including but not limited to improved survival rate or more rapid recovery, or improvement or elimination of symptoms and other indicators as are selected as appropriate measures by those skilled in the art.

[0543] In general, the active dose of compound for humans is in the range of from 1 ng/kg to about 20-100 mg/kg body weight per day, preferably about 0.01 mg to about 2-10 mg/kg body weight per day, in a regimen of a single does, one dose per day or twice or three or more times per day for 1 day or for several days or for a period of 1-4 weeks or longer.

[0544] The compounds of the present application can be administered by any of the conventional routes of administration. It should be noted that the compound can be administered as the compound or as pharmaceutically acceptable salt and can be administered alone or as an active ingredient in combination with pharmaceutically acceptable carriers, solvents, diluents, excipients, adjuvants and vehicles. The compounds can be administered orally, subcutaneously or parenterally including intravenous, intraarterial, intramuscular, intraperitoneally, and intranasal, inhalation, transtympanic administration as well as intrathecal and infusion techniques. Implants of the compounds are also useful. Liquid forms may be prepared for injection, the term including subcutaneous, transdermal, intravenous, intramuscular, intrathecal, intranasal and other parental routes of administration. The liquid compositions include aqueous solutions, with and without organic co-solvents, aqueous or oil suspensions, emulsions with edible oils, as well as similar pharmaceutical vehicles. In a particular embodiment, the administration comprises intravenous administration. In another embodiment the administration comprises topical or local administration. In a non-limiting example, siRNA that targets NOX2 or NOXO1 is useful in treating a subject suffering from a neurodegenerative disease (AD, ALS) and the siRNA is delivered to the CNS by intranasal administration.

[0545] In addition, in certain embodiments the compositions for use in the novel treatments of the present application may be formed as aerosols, for example for intranasal administration.

[0546] In certain embodiments, oral compositions (such as tablets, suspensions, solutions) may be effective for local delivery to the oral cavity such as oral composition suitable for mouthwash for the treatment of oral mucositis.

[0547] The compounds of the present application can be administered topically to the surface of the eye. It should be noted that the compound is preferably administered as the compound or as pharmaceutically acceptable salt active ingredient in combination with pharmaceutically acceptable carriers, solvents, diluents, excipients, adjuvants and or vehicles. According to the present application the preferred method of delivery is topical administration for topical delivery to the eye.

[0548] Liquid forms are prepared for drops or spray. The liquid compositions include aqueous solutions, with and without organic co-solvents, aqueous or oil suspensions, emulsions with oils, as well as similar pharmaceutical vehicles. In some embodiments administration comprises topical or local administration.

[0549] These compounds are administered to humans and other animals for therapy by any suitable route of administration to the eye, as by, for example, a spray or drops, and topically, as by ointments, suspensions or drops.

[0550] In preferred embodiments the subject being treated is a warm-blooded animal and, in particular, mammals including human.

[0551] Further, the present application provides for a pharmaceutical composition comprising any one of the above compounds and a pharmaceutically acceptable excipient.

[0552] Suitable methods for delivery of the siRNA comprise, among others, transfection, lipofection, electroporation and infection with recombinant viral vectors. In connection with the present application, an additional feature of the vector is in one embodiment an expression limiting feature such as a promoter and regulatory element, respectively, that are specific for the desired cell type thus allowing the expression of the nucleic acid sequence according to the present application only once the background is provided which allows the desired expression.

[0553] In a further aspect the present application is related to a pharmaceutical composition comprising a nucleic acid according to the present application and/or a vector according to the present application and, optionally, a pharmaceutically acceptable carrier, diluent or adjuvants or other vehicle(s). Preferably, such carrier, diluents, adjuvants and vehicles are inert, and non-toxic. The pharmaceutical composition is in its various embodiments adapted for administration in various ways. Such administration comprises systemic and local administration as well as oral, subcutaneous, parenteral, intravenous, intraarterial, intramuscular, intraperitonial, intranasal, and intrategral.

[0554] In particular embodiments the siRNA compound is formulated as eye drops for administration to the surface of the eye. In other embodiments the siRNA compound is administered to the lung by inhalation. In yet other embodiments the siRNA compound is formulated for delivery to the inner ear by transtympanic injection or via eardrops.

[0555] It will be acknowledged by the one skilled in the art that the amount of the pharmaceutical composition and the respective siRNA depends on the clinical condition of the individual patient, the site and method of administration, scheduling of administration, patient age, sex, bodyweight and other factors known to medical practitioners. The pharmaceutically effective amount for purposes of prevention and/or treatment is thus determined by such considerations as are known in the medical arts. Preferably, the amount is effective to achieve improvement including but limited to improve the diseased condition or to provide for a more rapid recovery, improvement or elimination of symptoms and other indicators as are selected as appropriate measures by those skilled in the medical arts.

[0556] In a preferred embodiment, the pharmaceutical composition according to the present application may comprise other pharmaceutically active compounds. Preferably, such other pharmaceutically active compounds are selected from the group comprising compounds which allow for uptake intracellular cell delivery, compounds which allow for endosomal release, compounds which allow for, longer circulation time and compounds which allow for targeting of endothelial cells or pathogenic cells.

[0557] The pharmaceutical composition is preferably formulated so as to provide for a single dosage administration or a multi-dosage administration.

[0558] The pharmaceutical composition according to the present application can also be used in a method for preventing and/or treating a disease as disclosed herein, whereby the method comprises the administration of a nucleic acid according to the present application, a vector according to the present application or a pharmaceutical composition or medicament according to the present application for any of the diseases described herein.

[0559] The synthesis of any of the nucleic acids described herein is within the skills of the one of the art. Such synthesis is, among others, described in Beaucage S L and Iyer R P, 1992 Tetrahedron; 48: 2223-2311, Beaucage S. and Iyer R P, 1993 Tetrahedron; 49: 6123-6194 and Caruthers M H et. al., 1987 Methods Enzymol.; 154: 287-313, the synthesis of thioates is, among others, described in Eckstein F., 1985 Annu Rev. Biochem.; 54: 367-402, the synthesis of RNA molecules is described in Sproat B., in Humana Press 2005 Edited by Herdewijn P.; Kap. 2: 17-31 and respective downstream processes are, among others, described in Pingoud A. et. al., in IRL Press 1989 Edited by Oliver R. W. A.; Kap. 7: 183-208 and Sproat B., in Humana Press 2005 Edited by Herdewijn P.; Kap. 2: 17-31 (supra).

[0560] siRNA for any one of the target genes are synthesized using methods known in the art as described above, based on the known sequence of the target mRNA (SEQ ID NOS:1-23), and can be made stable by various modifications as described above.

[0561] An additional aspect of the present application provides for methods of treating an apoptosis related disease. Methods for therapy of diseases or disorders associated with uncontrolled, pathological cell growth, e.g. cancer, psoriasis, autoimmune diseases, inter alia, and methods for therapy of diseases associated with ischemia and lack of proper blood flow, e.g. myocardial infarction (MI) and stroke, are provided. “Cancer” or “Tumor” refers to an uncontrolled growing mass of abnormal cells. These terms include both primary tumors, which may be benign or malignant, as well as secondary tumors, or metastases which have spread to other sites in the body. Examples of cancer-type diseases include, inter alia: carcinoma (e.g.: breast, colon and lung), leukemia such as B cell leukemia, lymphoma such as B-cell lymphoma, blastoma such as neuroblastoma and melanoma and sarcoma. It will be acknowledged that the pharmaceutical composition according to the present application can be used for any disease which involves undesired development or growth of vasculature including angiogenesis, as well as any of the diseases and conditions described herein. Preferably, these kind of diseases are tumor diseases. Among tumor diseases, the following tumors are most preferred: endometrial cancer, colorectal carcinomas, gliomas, endometrial cancers, adenocarcinomas, endometrial hyperplasias, Cowden's syndrome, hereditary non-polyposis colorectal carcinoma, Li-Fraumene's syndrome, breast-ovarian cancer, prostate cancer (Ali, I. U., Journal of the National Cancer Institute, Vol. 92, no. 11, Jun. 7, 2000, page 861-863), Bannayan-Zonana syndrome, LDD (Lhermitte-Duklos' syndrome) (Macleod, K., supra) hamartoma-macrocephaly diseases including Cow disease (CD) and Bannayan-Ruvalcaba-Rily syndrome (BRR), mucocutaneous lesions (e. g. trichilemmonmas), macrocephaly, mental retardation, gastrointestinal harmatomas, lipomas, thyroid adenomas, fibrocystic disease of the breast, cerebellar dysplastic gangliocytoma and breast and thyroid malignancies (Vazquez, F., Sellers, W. R., supra).

[0562] Combination Therapy

[0563] The present application provides for combination therapy for all the conditions disclosed herein and in particular ischemic and ND conditions. In said combination therapy, one or more of the target genes are targeted to ameliorate symptoms of the disease being treated. These genes are inhibited with a combination of siRNAs or antibodies (including aptamer antibodies) or both.

[0564] This application also comprises a tandem double-stranded structure which comprises two or more siRNA sequences, which is processed intracellularly to form two or more different siRNAs, one inhibiting one target gene and a second inhibiting another target gene. In a related aspect, this application also comprises a tandem double-stranded structure which comprises two or more siRNA sequences, which is degraded intracellularly to form two or more different siRNAs, both inhibiting the same target gene.

[0565] In particular, it is envisaged that a long oligonucleotide (typically about 80-500 nucleotides in length) comprising one or more stem and loop structures, where stem regions comprise the sequences of the oligonucleotides of the application, are delivered in a carrier, preferably a pharmaceutically acceptable carrier, and may be processed intracellularly by endogenous cellular complexes (e.g. by DROSHA and DICER as described above) to produce one or more smaller double stranded oligonucleotides (siRNAs) which are oligonucleotides of the application. This oligonucleotide can be termed a tandem shRNA construct. It is envisaged that this long oligonucleotide is a single stranded oligonucleotide comprising one or more stem and loop structures, wherein each stem region comprises a sense and corresponding antisense siRNA sequence of one or more of the target genes. In particular, it is envisaged that this oligonucleotide comprises sense and antisense siRNA oligonucleotide pairs as depicted in any one of Tables A1-A18, B1-B15 or C1-C2. Alternatively, the tandem construct may comprise sense and complementary antisense siRNA sequence corresponding to a target gene.

[0566] The application has been described in an illustrative manner, and it is to be understood that the terminology which has been used is intended to be in the nature of words of description rather than of limitation.

[0567] Obviously, many modifications and variations of the present application are possible in light of the above teachings. It is, therefore, to be understood that within the scope of the appended claims, the application can be practiced otherwise than as specifically described.

[0568] Throughout this application, various publications, including United States patents, are referenced by author and year and patents by number. The disclosures of these publications and patents and patent applications in their entireties are hereby incorporated by reference into this application in order to more fully describe the state of the art to which this application pertains.

[0569] Citation of any document herein is not intended as an admission that such document is pertinent prior art, or considered material to the patentability of any claim of the present application. Any statement as to content or a date of any document is based on the information available to applicant at the time of filing and does not constitute an admission as to the correctness of such a statement.

[0570] The present application is illustrated in detail below with reference to examples, but is not to be construed as being limited thereto.

### EXAMPLES

[0571] Without further elaboration, it is believed that one skilled in the art can, using the preceding description, utilize the present application to its fullest extent. The following preferred specific embodiments are, therefore, to be construed as merely illustrative, and not limitative of the claimed invention in any way.

[0572] Standard molecular biology protocols known in the art not specifically described herein are generally followed essentially as in Sambrook et al., Molecular cloning: A laboratory manual, Cold Springs Harbor Laboratory, New-York (1989, 1992), and in Ausubel et al., Current Protocols in Molecular Biology, John Wiley and Sons, Baltimore, Md. (1988).

[0573] Standard organic synthesis protocols known in the art not specifically described herein are generally followed essentially as in Organic Syntheses: Vol. 1-79, editors vary, J. Wiley, New York, (1941-2003); Gewert et al., Organic synthesis workbook, Wiley-VCH, Weinheim (2000); Smith & March, Advanced Organic Chemistry, Wiley-Interscience; 5th ed. (2001).

[0574] Standard medicinal chemistry methods known in the art not specifically described herein are generally followed essentially as in the series “Comprehensive Medicinal Chemistry”, by various authors and editors, published by Pergamon Press.

[0575] The features of the present application disclosed in the specification, the claims and/or the drawings may both separately and in any combination thereof be material for realizing the invention in various forms thereof.

[0576] General Materials and Methods

[0577] Cell Culture

[0578] The first human cell line, namely HeLa cells (American Type Culture Collection) were cultured as follows: HeLa cells (American Type Culture Collection) were cultured as described in Czauderna F et al. (Czauderna, F., et al., 2003. NAR, 31, 670-82).

[0579] The second human cell line was a human keratinocyte cell line which was cultivated as follows: Human keratinocytes were cultured at 37° C. In Dulbecco's modified Eagle medium (DMEM) containing 10% FCS. The mouse cell line was B16V (American Type Culture Collection) cultured at 37° C. In Dulbecco's modified Eagle medium (DMEM) containing 10% FCS. Culture conditions were as described in Methods Find Exp Clin Pharmacol. 1997 19(4):231-9.

[0580] In each case, the cells were subject to the experiments as described herein at a density of about 50,000 cells per well and the double-stranded nucleic acid according to the present application was added at 20 nM, whereby the double-stranded nucleic acid was complexed using 1 μg/ml of a proprietary lipid.

[0581] Induction of Hypoxia-Like Condition

[0582] The cells are treated with CoCl₂ for inducing a hypoxia-like condition as follows: siRNA transfections are carried out in 10-cm plates (30-50% confluency) as described by (Czauderna et al., 2003; Kretschmer et al., 2003). Briefly, siRNA are transfected by adding a preformed 10× concentrated complex of GB and lipid in serum-free medium to cells in complete medium. The total transfection volume is 10 ml. The final lipid concentration is 1.0 μg/ml; the final siRNA concentration is 20 nM unless otherwise stated. Induction of the hypoxic responses is carried out by adding CoCl₂ (100 μM) directly to the tissue culture medium 24 h before lysis.

[0583] Preparation of Cell Extracts and Immuno Blotting

[0584] The preparation of cell extracts and immuno blot analysis were carried out essentially as described by Klippel et al. (Klippel, A., et al., 1998. Mol Cell Biol, 18, 5699-711; Klippel, A., et al., 1996. Mol Cell Biol, 16, 4117-27). The murine monoclonal anti-p110a and anti-p85 antibodies have been described by Klippel et al. (supra).

[0585] In Vitro Testing of siRNA Compounds

[0586] About 1.5-2×10⁵ tested cells (HeLa cells and/or 293T cells for siRNA targeting human genes and NRK52 (normal rat kidney proximal tubule cells) cells and/or NMuMG cells (mouse mammary epithelial cell line) for siRNA targeting the rat/mouse gene) were seeded per well in 6 wells plate (70-80% confluent). See also Examples hereinbelow.

[0587] About 24 hours later, cells were transfected with siRNA compounds using the Lipofectamine™ 2000 reagent (Invitrogen) at final concentrations of 5 nM or 20 nM. The cells were incubated at 37° C. In a CO₂ incubator for 72 h.

[0588] As positive control for transfection PTEN-Cy3 labeled siRNA compounds were used. Various chemically modified blunt ended siRNA compounds having alternating modified and unmodified ribonucleotides (modified at the 2′ position of the sugar residue in both the antisense and the sense strands, wherein the moiety at the 2′ position of the sugar is methoxy) and wherein the ribonucleotides at the 5′ and 3′ termini of the antisense strand are modified in their sugar residues, and the ribonucleotides at the 5′ and 3′ termini of the sense strand are unmodified in their sugar residues were tested. Another siRNA compound comprised a blunt ended structure having an antisense with an alternating pattern of methoxy moieties and a sense strand with three ribonucleotides linked by two 2′5′ bridges at the 3′ terminus; and another siRNA compound comprising antisense and sense strands having three ribonucleotides linked by 2′5′ bridges at the 3′ terminus was used. Some of the tested compounds comprised a blunt ended structure having an antisense with an alternating pattern of methoxy moieties and a sense strand with one or two L-deoxyribonucleotides at the 3′ terminal or 3′ penultimate positions.

[0589] GFP and or scrambled siRNA compounds were used as negative control for siRNA activity.

[0590] At 72 h after transfection cells were harvested and RNA was extracted from cells. Transfection efficiency was tested by fluorescent microscopy.

[0591] The percent of inhibition of gene expression using specific preferred siRNA structures was determined using qPCR analysis of a target gene in cells expressing the endogenous gene.

[0592] In general, the siRNAs having specific sequences that were selected for in vitro testing were specific for human and a second species such as non-human primate, rat or rabbit genes. Similar results are obtained using siRNAs having these RNA sequences and modified as described herein.

[0593] Serum Stability Experiments

[0594] Chemically modified siRNA compounds according to the present application were tested for duplex stability in human serum, as follows:

[0595] siRNA molecules at final concentration of 7 uM were incubated at 37° C. In 100% human serum (Sigma Cat #H4522). (siRNA stock 100 uM diluted in human serum 1:14.29).

[0596] 5 ul were added to 15 ul 1.5XTBE-loading buffer at different time points (0, 30 min, 1 h, 3 h, 6 h, 8 h, 10 h, 16 h and 24 h)

[0597] Samples were immediately frozen in liquid nitrogen and were kept at −20° C.

[0598] Each sample was loaded onto a non-denaturing 20% acrylamide gel, prepared according to methods known in the art.

[0599] The oligos were visualized with Ethidium bromide under UV light.

### Example 1

### Selection and Preparation of siRNAs

[0600] Using proprietary algorithms and the known sequence of the mRNA of the target genes mRNA polynucleotides (SEQ ID NO:1-23), the sequences of many potential siRNAs were generated. siRNA molecules according to the above specifications were prepared essentially as described herein.

[0601] The siRNAs of the present application can be synthesized by any of the methods which are well-known in the art for synthesis of ribonucleic (or deoxyribonucleic) oligonucleotides. For example, a commercially available machine (available, inter alia, from Applied Biosystems) can be used; the oligonucleotides are prepared according to the sequences disclosed herein. Overlapping pairs of chemically synthesized fragments can be ligated using methods well known in the art (e.g., see U.S. Pat. No. 6,121,426). The strands are synthesized separately and then are annealed to each other in the tube. Then, the double-stranded siRNAs are separated from the single-stranded oligonucleotides that were not annealed (e.g. because of the excess of one of them) by HPLC. In relation to the siRNAs or siRNA fragments of the present application, two or more such sequences can be synthesized and linked together for use in the present application.

[0602] The siRNA molecules of the application are synthesized by procedures known in the art e.g. the procedures as described in Usman et al., 1987, J. Am. Chem. Soc., 109, 7845; Scaringe et al., 1990, Nucleic Acids Res., 18, 5433; Wincott et al., 1995, Nucleic Acids Res. 23, 2677-2684; and Wincott et al., 1997, Methods Mol. Bio., 74, 59, and may make use of common nucleic acid protecting and coupling groups, such as dimethoxytrityl at the 5′-end, and phosphoramidites at the 3′-end. The modified (e.g.—DNA, 2′-5′, 2′-O-methylated)nucleotides and unmodified nucleotides are incorporated as desired.

[0603] Alternatively, the nucleic acid molecules of the present application can be synthesized separately and joined together post-synthetically, for example, by ligation (Moore et al., 1992, Science 256, 9923; Draper et al., International PCT publication No. WO93/23569; Shabarova et al., 1991, Nucleic Acids Research 19, 4247; Bellon et al., 1997, Nucleosides & Nucleotides, 16, 951; Bellon et al., 1997, Bioconjugate Chem. 8, 204), or by hybridization following synthesis and/or deprotection.

[0604] The siRNA molecules of the application can also be synthesized via a tandem synthesis methodology, as described in US patent application publication No. US2004/0019001 (McSwiggen) wherein both siRNA strands are synthesized as a single contiguous oligonucleotide fragment or strand separated by a cleavable linker which is subsequently cleaved to provide separate siRNA fragments or strands that hybridize and permit purification of the siRNA duplex. The linker can be a polynucleotide linker or a non-nucleotide linker.

[0605] Sense and antisense sequences presented in Tables A1-A18, B1-B15 and C1-C2 are depicted in the 5′ to 3′ orientation.

### Example 2

### Chemically Modified siRNA Compounds

[0606] Table 2 hereinbelow provides a code of the modified nucleotides/unconventional moieties utilized in preparing the siRNA oligonucleotides of the present application.

TABLE 2

| Code | modification |
|---|---|
| Nuc | |
| 5medG | 5-methyl-deoxyriboguanosine-3′-phosphate |
| c6Np | Amino modifier C6 (Glen Research 10-1906-xx) |
| dA | deoxyriboadenosine-3′-phosphate |
| dB | abasic deoxyribose-3′-phosphate |
| dC | deoxyribocytidine-3′-phosphate |
| dG | deoxyriboguanosine-3′-phosphate |
| dT | thymidine-3′-phosphate |
| dT$ | thymidine (no phosphate) |
| enaA$ | ethylene-bridged nucleic acid adenosine (no phosphate) |
| enaC | ethylene-bridged nucleic acid cytidine 3′ phosphate |
| enaG | ethylene-bridged nucleic acid guanosine 3′ phosphate |
| enaT | ethylene-bridged nucleic acid thymidine 3′ phosphate |
| iB | inverted deoxyabasic |
| LdA | L-deoxyriboadenosine-3′-phosphate (mirror image dA) |
| LdA$ | L-deoxyriboadenosine (no phosphate) (mirror image dA) |
| LdC | L-deoxyribocytidine-3′-phosphate (mirror image dC) |
| LdC$ | L-deoxyribocytidine (no phosphate) (mirror image dC) |
| LdG | L-deoxyriboguanosine-3′-phosphate (mirror image dG) |
| LdT | L-deoxyribothymidine-3′-phosphate (mirror image dT) |
| LdT$ | L-deoxyribothymidine (no phosphate) (mirror image dT) |
| mA | 2′-O-methyladenosine-3′-phosphate |
| mA$ | 2′-O-methyladenosine (no phosphate) |
| mC | 2′-O-methylcytidine-3′-phosphate |
| mC$ | 2′-O-methylcytidine (no 3′-phosphate) |
| mG | 2′-O-methylguanosine-3′-phosphate |
| mG$ | 2′-O-methylguanosine (no phosphate) |
| mU | 2′-O-methyluridine-3′-phosphate |
| mU$ | 2′-O-methyluridine (no phosphate) |
| rA | riboadenosine-3′-phosphate |
| rA$ | riboadenosine (no phosphate) |
| rC | ribocytidine-3′-phosphate |
| rC$ | ribocytidine (no phosphate) |
| rC2p | ribocytidine-2′-phosphate |
| rG | riboguanosine-3′-phosphate |
| rG2p | riboguanosine-2′-phosphate |
| rU | ribouridine-3′-phosphate |
| rU$ | ribouridine (no phosphate) |
| rU2p | ribouridine-2′-phosphate |

[0607] Tables A1-A18, B1-B15 and C1-C2 provide antisense and sense oligonucleotide pairs useful in synthesis of the siRNA compounds according to the present application. All oligonucleotides are presented as 5′-3′ sequences. (Hum=human, chn or chl=chinchilla, chimp or chmp=chimpanzee, ms=mouse, GP=guinea-pig; Rb=rabbit, MnkK or MK=monkey).

[0608] This application contains nucleotide sequences which are filed in electronic form via EFS-web. The file [199-PCT1_ST25.txt] was prepared using PatentIn v3.3 on Dec. 17, 2009. The sequences are also shown in Tables A1-A18 and B1-B15 infra, following the Examples. The entire content of this file is incorporated by reference into this application.

[0609] Certain preferred sense and antisense oligonucleotide pairs are shown in Tables C1 and C2 herein below.

TABLE C1

| siRNA | Sense (5′ > 3′) | Antisense (5′ > 3′) |
|---|---|---|
| NOX4_55 | CAGAAGAUAAUUGGAGAAA | UUUCUCCAAUUAUCUUCUG |
| NOX4_1 | CCAAGACTCTTCATAATTT | AAATTATGAAGAGTCTTGG |
| NOX4_21 | GGAACTCCGTATGATCAAA | TTTGATCATACGGAGTTCC |
| NOX4_22 | CCGTTTGCATCGATACTAA | TTAGTATCGATGCAAACGG |
| NOX4_25 | GCCCTTCATTCACTCTAGA | TCTAGAGTGAATGAAGGGC |
| NOX4_a | AUGCAAUUUCUAAGACUU | AAGUCUUAGAAAUUGCACU |
| CYBB_a | CCAACUGGGAUAAUGAAUU | AAUUCAUUAUCCCAGUUGG |
| CYBB_b | GGGUCUCAUAUUGGUCAUU | AAUGACCAAUAUGAGACCC |
| CYBB_c | CCAGAUCAUUAGGACAUAA | UUAUGUCCUAAUGAUCUGG |
| CYBB_d | GGGUUUUGUUUUUGUUCUU | AAGAACAAAAAGAAAACCC |
| NOX1_a | GGCUCAAUGUUUUCCUGUU | AACAGGAAAACAUUCAGCC |
| NOX1_b | CUCUCUGCUUGAAUUUUAA | UUAAAAUUCAAGCAGAGAG |
| NOX1_c | CCGACAAAUACUACUACAC | GUGUAGUAGUAUUUGUCGG |
| NOX1_d | CUCCAGCCUAUCUCAUGAU | AUCAUGAGAUAGGCUGGAG |
| NOX1_e | CACAUCUGUUUAACUUUGA | UCAAAGUUAAACAGGUGUG |
| NOXO1_a | CAGAUCAAGAGGCUCCAAA | UUUGGAGCCUCUUGAUCUG |
| NOXO1_b | GACUGUUGGAAACGUCAGA | UCUGACGUUUCCAACACGC |
| NOXO1_c | GCUUGUUGGAAACCUAUUCU | AGAAUAGGUUUCCAACAGC |
| NOXO1_d | GGAGUUGGGACGAAUUCAG | CUGAAUUCGUCCCAACUCC |

TABLE C2

| siRNA | Sense (5′ > 3′) | Antisense (5′ > 3′) |
|---|---|---|
| TP53-I5 | GAGAAUAUUUCACCCUUCA | UGAAGGGUGAAAUAUUCUC |
| TP53-F3 | CCGAGUGGAAGGAAAUUUG | CAAAUUUCCUUCCACUCGG |
| TP53-G1 | GACAGAAACACUUUUCGAC | GUCGAAAAGUGUUUCUGUC |
| HTRA2_11 | GAAUCACAGAAACACUUUU | AAAAGUGUUUCUGUGAUUC |
| HTRA2_12 | GGCCUGGUGAUGUGAUUUU | AAAAUCACAUCACCAGGCC |
| HTRA2_13 | CCGUGGUCUAUAUCGAGAU | AUCUCGAUAUAGACCACGG |
| HTRA2_15 | CCUAGCAACAUAUUAUAGU | ACUAUAAUAUGUUGCUAGG |
| HTRA2_16 | GCCGUGGUCUAUAUCGAGA | UCUCGAUAUAGACCACGGC |
| HTRA2_17 | GUGCUGCUCUUUGUGGUGU | ACACCACAAAGAGCAGCAC |
| HTRA2_18 | CAGCUAUUGAUUUUGGAAA | UUUCCAAAAUCAAUAGCUG |
| HTRA2_21 | GCUAUUGAUUUUGGAAACU | AGUUUCCAAAAUCAAUAGC |
| HTRA2_22 | AGCUAUUGAUUUUGGAAAC | GUUUCCAAAAUCAAUAGCU |
| KEAP1_2 | GCCUCAUUGAAUUCGCCUA | UAGGCGAAUUCAAUGAGGC |
| KEAP1_11 | CACCAUGUGAUUUAUUCUU | AAGAAUAAAUCACAUGGUG |
| KEAP1_12 | ACUGCAAAUAACCCAUCUU | AAGAUGGGUUAUUUGCAGU |
| KEAP1_13 | CACUGCAAAUAACCCAUCU | AGAUGGGUUAUUUGCAGUG |
| KEAP1_14 | GCAGCUGUCACCAUGUGAU | AUCACAUGGUGACAGCUGC |
| KEAP1_17 | UGCAUCAACUGGGUCAAGU | ACUUGACCCAGUUGAUGCA |
| SHC1_1 | ACCUGAAAUUUGCUGGAAU | AUUCCAGCAAAUUUCAGGU |
| SHC1_2 | CAGAGAGCUUUUUGAUGAU | AUCAUCAAAAAGCUCUCUG |
| SHC1_3 | CACAUGCAAUCUAUCUCAU | AUGAGAUAGAUUGCAUGUG |
| SHC1_6 | CGGGAGCUUUGUCAAUAAG | CUUAUUGACAAAGCUCCCG |
| SHC1_8 | GGGUUCUUAUAAUGGAAAA | UUUUCCAUUAUAAGAACCC |
| SHC1_11 | CCCAAGCCCAAGUACAAUC | GAUUGUACUUGGGCUUGGG |
| SHC1_14 | AGGAAGGGCAGCUGAUGAU | AUCAUCAGCUGCCCUUCCU |
| ZNHIT1_1 | CCGAGGUGAUCAUUUUAAA | UUUAAAAUGAUCACCUCGG |
| ZNHIT1_5 | GUGACCACAUCUUUAAAAU | AUUUUAAAGAUGUGGUCAC |
| ZNHIT1_10 | CUGGAAAGAAAAAGAAGAA | UUCUUCUUUUUCUUUCCAG |
| ZNHIT1_11 | ACACUGGAAAGAAAAAGAA | UUCUUUUUCUUUCCAGUGU |
| LGALS3_3 | GGGAAUUUCUGGUGACAUA | UAUGUCACCAGAAAUUCCC |
| LGALS3_5 | GCAGACGGCUUCUCACUUA | UAAGUGAGAAGCCGUCUGC |
| LGALS3_17 | AGCGGAAAAUGGCAGACAA | UUGUCUGCCAUUUUCCGCU |
| LGALS3_18 | GGGUUAAAAAACUCAAUGA | UCAUUGAGUUUUUUAACCC |

### Example 3

### Experimental Models, Methods and Results Relating to Ocular Disease

[0610] The compounds of the present application are tested in the following animal model of Choroidal neovascularization (CNV). This hallmark of wet AMD is induced in model animals by laser treatment.

[0611] A) Non-Human Primate Model

[0612] CNV induction: Choroidal neovascularization (CNV) is induced by perimacular laser treatment of both eyes prior to dose administration. Nine lesions are placed in the macula with a laser [OcuLight GL (532 nm) Laser Photo-coagulator with an IRIS Medical® Portable Slit Lamp Adaptor], and laser spots in the right eye mirror the placement in the left eye. The approximate laser parameters are as follows: spot size: 50-100 μm diameter; laser power: 300-700 milliwatts; exposure time: 0.1 seconds.

[0613] Treatment: Immediately following laser treatment, both eyes of all animals are subjected to a single intravitreal injection. Left eye is typically dosed with 350 ug of synthetic stabilized NOX siRNA in the final volume of 50 ul, whereas the contralateral eye receives 50 ul of PBS (vehicle).

[0614] Evaluation
[0615] 1. All the animals are subjected to daily examination of food consumption and body weight measurements.
[0616] 2. two monkeys are euthanized at day 6 following CNV induction. Their eyes are enucleated and the posterior pole is flattened. Then the fovea region is excised and separated into choroids and neuroretina which are separately (for every animal) frozen in liquid nitrogen to be subsequently used for RNA extraction and real time PCR evaluation of NOX expression.
[0617] 3. Fluorescein angiograms are performed pre-study, and at the end of weeks 1, 2, and 3 following CNV induction. Photographs are taken, using a fundus camera (TRC-50EX Retina Camera). Images are captured using the TOPCON IMAGEnet™ system. Fluorescein dye (10% fluorescein sodium, approximately 0.1 mL/kg) is injected via vascular access ports. Photographs are taken at several time points following dye injection, to include the arterial phase, early arteriovenous phase and several late arteriovenous phases in order to evaluate neovascularization and to monitor leakage of fluorescein associated with CNV lesions. Interpretation and analysis of the fluorescein angiograms is independently conducted by two ophthalmologists.

[0618] Neovascularization (NV) is assessed in early angiograms and every spot is graded according to the following scheme:
[0619] 0—no signs of NV
[0620] 0.5—suspicious spot
[0621] 1—“hot” spot
[0622] 2—NV in the laser burn
[0623] 3—evident NV

[0624] Leakage is assessed according to the following scheme:
[0625] 0—no leakage
[0626] 0.5—suspicious spot
[0627] 1—evident small spot leakage
[0628] 2—leakage growing with time
[0629] 3—leakage greater than previous borders (evidently)

[0630] In addition, the size of every spot is compared between the early and the late angiograms using morphometric measurements, and the increase in the spot's size resulting from the leakage is calculated.

[0631] Electroretinograms (ERGs) are recorded using an Epic 2000 electroretinograph according to Sierra's SOPs and the study-specific SOP, including the use of the Ganzfield apparatus, at prestudy and in the end of week 3. A veterinary ophthalmologist evaluates the tabulated ERG data.

[0632] C) Efficacy of Combination Therapy of the Target Gene Sirnas

[0633] The efficacy of combination therapy of NOX siRNAs and anti-VEGF antibody or aptamer (such as macugen) or additional NOX siRNA sequences in the treatment of diseases in which CNV occurs is tested in the above mouse CNV model.

[0634] A) CNV volume studies: The volume of choroidal neovascularization (CNV) 3 weeks after laser injury is computed by confocal fluorescence microscopy as previously described (Sakurai et al. 2003;44: 3578-85 & Sakurai et al. IOVS 2003; 44: 2743-2749).

[0635] B) CNV leakage studies

[0636] Experiment 1

[0637] Materials: Chemically modified NOX siRNA; negative control siRNA (GFP or scrambled); Anti-VEGF antibodies or Macugen® and negative control.

[0638] CNV is induced on day zero as described above; the test material is injected to the subjects on day zero and day 7.

[0639] The results are evaluated by Fluorescein angiography on weeks 1, 2, 3, and by CNV volume measurement on week 3.

[0640] Experimental Groups:

[0641] VEGF Ab or Macugen® 0.5 ng/eye, 1 ng/eye, 2 ng/eye, 4 ng/eye

[0642] NOX siRNA 0.05 ug/eye, 0.1 ug/eye, 0.25 ug/eye

[0643] NOX siRNA:

[0644] NOX siRNA 0.05 ug/eye+VEGF Ab or Macugen® 1 ng/eye

[0645] NOX siRNA 0.1 ug/eye+VEGF Ab or Macugen® 1 ng/eye

[0646] NOX siRNA 0.25 ug/eye+VEGF Ab or Macugen® 1 ng/eye

[0647] Control Groups:

[0648] PBS

[0649] Non-specific IgG 2 ng/eye

[0650] negative control 0.1 ug/eye

[0651] negative control 0.1 ug/eye+VEGF Ab or Macugen® 1 ng/eye

[0652] Experiment 2

[0653] This experiment was designed in order to study the effect of test siRNA on gene expression in RPE and neural retina.

[0654] Experimental Design

[0655] Groups:

[0656] PBS

[0657] Test siRNA 0.25 mg

[0658] CNV is induced by laser treatment as described above on day zero; the test material is also injected on day zero, and the effect evaluated by qPCR analysis of gene expression in RPE and neural retina on days zero and 5.

[0659] Additional AMD models which are used to test the methods of the present application: Cc1-2 or Ccr-2 deficient animals—deficiency in either of these proteins causes the development of some of the main features of AMD. Animals deficient in these proteins can be used to test the methods of the present application.

[0660] For further information on AMD animal models, see: Chader, Vision research 42 (2002) 393-399; Ambati et al., Nature Medicine 9(11) (2003) 1390-1397; Tolentino et al., Retina 24 (2004) 132-138.

### Example 4

### Models and Results Relating to COPD and Emphysema

[0661] The compounds of the present application are tested in the following an animal models and are shown to prevent emphysema:
[0662] Cigarette smoke-induced emphysema model: chronic exposure to cigarette smoke causes emphysema in several animal models including mouse, guinea pig.
[0663] Lung protease activity as a trigger of emphysema.
[0664] VEGFR inhibition model of emphysema.
[0665] Bronchial instillation with human neutrophil/pancreatic elastase in rodents.
[0666] MMP (matrix metalloprotease)-induced enphysema.
[0667] Inflammation-inducedemphysema.

[0668] Additionally, emphysema models are generated through genetic means (e.g., mice carrying the TSK mutation), and emphysematous animals may be generated by known modifiers of susceptibility to emphysema such as, inter alia, lung injury, alveolar hypoplasia, hyperoxia, glucocorticoid treatment and nutrition.

[0669] Evaluation of the influence of lack of one of the target genes on disease progression in mouse models of emphysema by inhibiting endogenous target gene employing intralung delivery—of siRNA.

[0670] CS-induced inflammation is induced by 7 day smoking in 2 groups of C57BL6 mice, 10 mice per group. Group 1: CS+delivery of control siRNA; Group 2: CS+test siRNA. Control groups of mice are instilled with either type of siRNA but kept in room air conditions. The lungs are subsequently agarose-inflated, fixed and imbedded in paraffin, and development oxidative stress in the KO mice is assessed by:

[0671] immunohistochemical localization and quantitation of 8-oxo-dG in the lung sections;

[0672] immunohistochemical localization and quantitation of active caspase 3 in the lung sections using specific antibodies, or quantitative evaluation of the number of TUNEL-positive cells;

[0673] measurement of ceramide concentration in the lung extracts;

[0674] measurement of caspase activity in the lung extracts.

[0675] Methods

[0676] Exposure to Cigarette Smoking (CS)

[0677] Exposure is carried out (7 h/day, 7 days/week) by burning 2R4F reference cigarettes (2.45 mg nicotine per cigarette; purchased from the Tobacco Research Institute, University of Kentucky, Lexington, Ky., USA) using a smoking machine (Model TE-10, Teague Enterprises, Davis, Calif., USA). Each smoldering cigarette is puffed for 2 sec, once every minute for a total of eight puffs, at a flow rate of 1.05 L/min, to provide a standard puff of 35 cm3. The smoke machine is adjusted to produce a mixture of sidestream smoke (89%) and mainstream smoke (11%) by burning five cigarettes at one time. Chamber atmosphere is monitored for total suspended particulates and carbon monoxide, with concentrations of 90 mg/m3 and 350 ppm, respectively.

[0678] Morphologic and Morphometric Analyses

[0679] After exposing the mice to CS or instillation of chemically modified NOX siRNA the mice are anesthetized with halothane and the lungs are inflated with 0.5% low-melting agarose at a constant pressure of 25 cm as previously described. The inflated lungs are fixed in 10% buffered formalin and embedded in paraffin. Sections (5 μm) are stained with hematoxylin and eosin. Mean alveolar diameter, alveolar length, and mean linear intercepts are determined by computer-assisted morphometry with the Image Pro Plus software (Media Cybernetics, Silver Spring, Md., USA). The lung sections in each group are coded and representative images (15 per lung section) are acquired by an investigator masked to the identity of the slides, with a Nikon E800 microscope, 20× lens. The results show that chemically modified test siRNA prevents emphysema caused by smoking as measured by the four parameters described above.

[0680] Bronchoalveolar Lavage (BAL) and Phenotyping

[0681] Following exposure to CS or instillation of chemically modified NOX siRNA, the mice are anesthetized with sodium pentobarbital. The BAL fluid collected from the lungs of the mice is centrifuged (500 'g at 4° C.), and the cell pellet is resuspended in phosphate-buffered saline. The total number of cells in the lavage fluid is determined, and 2×104 cells are cytocentrifuged (Shandon Southern Products, Pittsburgh, Pa., USA) onto glass slides and stained with Wright-Giemsa stain. Differential cell counts are performed on 300 cells, according to standard cytological techniques .

[0682] Identification of Alveolar Apoptotic Cell Populations in the Lungs.

[0683] To identify the different alveolar cell types undergoing apoptosis in the lungs, an immunohistochemical staining of active caspase 3 is performed in the lung sections from the room air (RA) as well as CS exposed mice. To identify the apoptotic type II epithelial cells in the lungs, after active caspase 3 labeling, the lung sections are incubated first with anti-mouse surfactant protein C (SpC) antibody and then with an anti-rabbit Texas red antibody. Apoptotic endothelial cells are identified by incubating the sections first with the anti-mouse CD 31 antibody and then with the biotinylated rabbit anti-mouse secondary antibody. The lung sections are rinsed in PBS and then incubated with the streptavidin-Texas red conjugated complex. The apoptotic macrophages in the lungs are identified by incubating the sections first with the rat anti-mouse Mac-3 antibody and then with the anti-rat Texas red antibody. Finally, DAPI is applied to all lung sections, incubated for 5 minutes, washed and mounted with Vectashield HardSet mounting medium. DAPI and fluorescein are visualized at 330-380 nm and 465-495 nm, respectively. Images of the lung sections are acquired with the Nikon E800 microscope, 40× lens.

[0684] Immunohistochemical Localization of Active Caspase-3

[0685] Immunohistochemical staining of active caspase-3 assay is performed using anti-active caspase-3 antibody and the active caspase-3-positive cells are counted with a macro, using Image Pro Plus program. The counts are normalized by the sum of the alveolar profiles herein named as alveolar length and expressed in gm. Alveolar length correlates inversely with mean linear intercept, i.e., as the alveolar septa are destroyed, mean linear intercepts increases as total alveolar length, i.e., total alveolar septal length decreases.

[0686] Caspase 3 Activity Assay

[0687] The caspase-3/7 activity is measured in lung tissue extracts using a fluorometric assay according to the manufacturer's instructions. Snap-frozen lung tissue (n=3 per group) was homogenized with the assay buffer, followed by sonication and centrifugation at 800×g. After removal of nuclei and cellular debris, the supernatant (300 μg protein) is then incubated with the pro-fluorescent substrate at room temperature for 1 h and the fluorescence intensity was measured utilizing a Typhoon phosphoimager (Amersham Biosciences, Inc., Piscataway, N.J., USA). The results are expressed as the rate of specific caspase-3 substrate cleavage, expressed in units of caspase 3 enzymatic activity, normalized by total protein concentration. Active recombinant caspase 3 was utilized as the assay standard (0-4 U). Tissue lysates without substrate, assay buffer alone, and lysates with caspase 3 inhibitor were utilized as negative controls.

[0688] Immunohistochemical Localization of 8-oxo-dG

[0689] For the immunohistochemical localization and quantification of 8-oxo-dG, lung sections from the mice exposed to CS or instilled with chemically modified NOX siRNA are incubated with anti-8-oxo-dG antibody and stained using InnoGenex™ Iso-IHC DAB kit using mouse antibodies. The 8-oxo-dG-positive cells are counted with a macro (using Image Pro Plus), and the counts were normalized by alveolar length as described.

[0690] Instillation of siRNA into Mouse Lungs

[0691] Chemically modified siRNA (50 ug) is delivered in 80 ul sterile perfluorocarbon. The oxygen carrying properties of perfluorocarbon make it well-tolerated at these volumes, while its physical-chemical properties allow for extremely efficient distal lung delivery when instilled intratracheally. Mice are anesthetized by brief inhalational halothane exposure, the tongue is gently pulled forward by forceps and the trachea instilled with perfluorocarbon solution applied at the base of the tongue via a blunt angiocatheter.

[0692] Mice are anesthetized with an intra-peritoneal injection of Ketamine/Xylazine (115/22 mg/kg). 50 μg of siRNA is instilled intranasally in 50 μl volume of 0.9% NaCl by delivering five consecutive 10 μl portions. At the end of the intranasal instillation, the mouse's head is held straight up for 1 minute to ensure that all the instilled solution drains inside.

[0693] For further information, see: Rangasamy T, et al., 2004. J.C.I. 114(9):1248-59; Kasahara, Y et al., Am J Respir Crit Care Med Vol 163. pp 737-744, 2001; Kasahara, Y et al., 2000. J. Clin. Invest. 106:1311-1319; and Tuder, R M et al., Pulmonary Pharmacology & Therpaeutics 2002.

### Example 5

### Models and Results Relating to Microvascular Disorders

[0694] The compounds of the present application are tested in animal models of a range of microvascular disorders as described below.

[0695] 1. Retinopathy of Prematurity

[0696] Retinopathy of prematurity is induced by exposing the test animals to hypoxic and hyperoxic conditions, and subsequently testing the effects on the retina.

[0697] 2. Myocardial Infarction

[0698] Myocardial infarction is induced by Left Anterior Descending artery ligation in mice, both short term and long term.

[0699] 3. Microvascular Ischemic Conditions

[0700] Animal models for assessing ischemic conditions include:
[0701] 1. Closed Head Injury (CHI)—Experimental TBI produces a series of events contributing to neurological and neurometabolic cascades, which are related to the degree and extent of behavioral deficits. CHI is induced under anesthesia, while a weight is allowed to free-fall from a prefixed height (Chen et al, J. Neurotrauma 13, 557, 1996) over the exposed skull covering the left hemisphere in the midcoronal plane.
[0702] 2. Transient middle cerebral artery occlusion (MCAO)—a 90 to 120 minutes transient focal ischemia is performed in adult, male Sprague Dawley rats, 300-370 gr. The method employed is the intraluminal suture MCAO (Longa et al., Stroke, 30, 84, 1989, and Dogan et al., J. Neurochem. 72, 765, 1999). Briefly, under halothane anesthesia, a 3-0-nylon suture material coated with Poly-L-Lysine is inserted into the right internal carotid artery (ICA) through a hole in the external carotid artery. The nylon thread is pushed into the ICA to the right MCA origin (20-23 mm). 90-120 minutes later the thread is pulled off, the animal is closed and allowed to recover.
[0703] 3. Permanent middle cerebral artery occlusion (MCAO)—occlusion is permanent, unilateral-induced by electrocoagulation of MCA. Both methods lead to focal brain ischemia of the ipsilateral side of the brain cortex leaving the contralateral side intact (control). The left MCA is exposed via a temporal craniectomy, as described for rats by Tamura A., et al., J Cereb Blood Flow Metab. 1981; 1:53-60. The MCA and its lenticulostriatal branch are occluded proximally to the medial border of the olfactory tract with microbipolar coagulation. The wound is sutured, and animals returned to their home cage in a room warmed at 26° C. to 28° C. The temperature of the animals is maintained all the time with an automatic thermostat.

[0704] 4. Acute Renal Failure (ARF)

[0705] Testing active NOX siRNA for treating ARF is done using sepsis-induced ARF or ischemia-reperfusion-induced ARF.

[0706] 1. Sepsis Induced ARF

[0707] Two predictive animal models of sepsis-induced ARF are described by Miyaji T, et al., Kidney Int. 64(5):1620-31. These two models are lipopolysaccharide administration and cecal ligation puncture in mice, preferably in aged mice.

[0708] 2. Ischemia-Reperfusion-Induced ARF

[0709] This predictive animal model is described by Kelly K J, et al., 2003. J Am Soc Nephrol.; 14(1):128-38.

[0710] Ischemia-reperfusion injury is induced in rats following 45 minutes bilateral kidney arterial clamp and subsequent release of the clamp to allow 24 hours of reperfusion. Chemically modified siRNA or GFP siRNA (negative control) is injected into the jugular vein 2 hrs prior to and 30 minutes following the clamp. Additional siRNA is given via the tail vein at 4 and 8 hrs after the clamp. ARF progression is monitored by measurement of serum creatinine levels before and 24 hrs post surgery. At the end of the experiment, the rats are perfused via an indwelling femoral line with warm PBS followed by 4% paraformaldehyde. The left kidneys are removed and stored in 4% paraformaldehyde for subsequent histological analysis. Acute renal failure is frequently defined as an acute increase of the serum creatinine level from baseline. An increase of at least 0.5 mg per dL or 44.2 μmol per L of serum creatinine is considered as an indication for acute renal failure. Serum creatinine is measured at time zero before the surgery and at 24 hours post ARF surgery. siRNA to target gene prevents production of ARF in this model.

[0711] To study the distribution of siRNA in the rat kidney, Cy3-labeled 19-mer blunt-ended siRNA molecules (2 mg/kg) having alternating O-methyl modification in the sugar residues were administered iv for 3-5 min, after which in vivo imaging was conducted using two-photon confocal microscopy. The confocal microscopy analysis revealed that the majority of siRNA in the kidneys is concentrated in the endosomal compartment of proximal tubular cells. Both endosomal and cytoplasmic siRNA fluorescence were relatively stable during the first 2 hrs post delivery and disappeared at 24 hrs.

[0712] The expression of a target gene during ischemia-reperfusion induced ARF is examined in rat kidneys. In both kidney regions, cortex and medulla, NOX transcript level is decreased in the ARF-10 hr group relative to the control group transcript level. Target gene transcript level is also elevated (up-regulated) in the kidney medulla, 3 and 6 hrs following the ARF operation (bilateral renal artery clamp).

### Example 6

### Pharmacology and Drug Delivery

[0713] The compounds or pharmaceutical compositions of the present application are administered and dosed in accordance with good medical practice, taking into account the clinical condition of the individual patient, the disease to be treated, the site and method of administration, scheduling of administration, patient age, sex, body weight and other factors known to medical practitioners.

[0714] The pharmaceutically “effective amount” for purposes herein is thus determined by such considerations as are known in the art. The amount must be effective to achieve improvement including but not limited to improved survival rate or more rapid recovery, or improvement or elimination of symptoms and other indicators as are selected as appropriate measures by those skilled in the art.

[0715] The treatment generally has a length proportional to the length of the disease process and drug effectiveness and the patient species being treated. It is noted that humans are treated generally longer than the mice or other experimental animals exemplified herein.

[0716] The compounds of the present application are administered by any of the conventional routes of administration. It should be noted that the compound can be administered as the compound or as pharmaceutically acceptable salt and can be administered alone or as an active ingredient in combination with pharmaceutically acceptable carriers, solvents, diluents, excipients, adjuvants and vehicles. The compounds can be administered orally, subcutaneously or parenterally including intravenous, intraarterial, intramuscular, intraperitoneally, and intranasal administration as well as intrathecal and infusion techniques. Implants of the compounds are also useful. Liquid forms are prepared for injection, the term including subcutaneous, transdermal, intravenous, intramuscular, intrathecal, and other parental routes of administration. The liquid compositions include aqueous solutions, with and without organic cosolvents, aqueous or oil suspensions, emulsions with edible oils, as well as similar pharmaceutical vehicles. In addition, under certain circumstances the compositions for use in the novel treatments of the present application are formed as aerosols, for intranasal and like administration. The patient being treated is a warm-blooded animal and, in particular, mammals including man. The pharmaceutically acceptable carriers, solvents, diluents, excipients, adjuvants and vehicles as well as implant carriers generally refer to inert, non-toxic solid or liquid fillers, diluents or encapsulating material not reacting with the active ingredients of the application.

[0717] When administering the compound of the present application parenterally, it is generally formulated in a unit dosage injectable form (solution, suspension, emulsion). The pharmaceutical formulations suitable for injection include sterile aqueous solutions or dispersions and sterile powders for reconstitution into sterile injectable solutions or dispersions. The carrier can be a solvent or dispersing medium containing, for example, water, ethanol, polyol (for example, glycerol, propylene glycol, liquid polyethylene glycol, and the like), suitable mixtures thereof, and vegetable oils.

[0718] Proper fluidity can be maintained, for example, by the use of a coating such as lecithin, by the maintenance of the required particle size in the case of dispersion and by the use of surfactants. Nonaqueous vehicles such a cottonseed oil, sesame oil, olive oil, soybean oil, corn oil, sunflower oil, or peanut oil and esters, such as isopropyl myristate, can also be used as solvent systems for compound compositions. Additionally, various additives which enhance the stability, sterility, and isotonicity of the compositions, including antimicrobial preservatives, antioxidants, chelating agents, and buffers, can be added. Prevention of the action of microorganisms can be ensured by various antibacterial and antifungal agents, for example, parabens, chlorobutanol, phenol, sorbic acid, and the like. In many cases, it is desirable to include isotonic agents, for example, sugars, sodium chloride, and the like. Prolonged absorption of the injectable pharmaceutical form can be brought about by the use of agents delaying absorption, for example, aluminum monostearate and gelatin. According to the present application, however, any vehicle, diluent, or additive used have to be compatible with the compounds.

[0719] Sterile injectable solutions can be prepared by incorporating the compounds utilized in practicing the present application in the required amount of the appropriate solvent with various of the other ingredients, as desired.

[0720] A pharmacological formulation of the present application can be administered to the patient in an injectable formulation containing any compatible carrier, such as various vehicle, adjuvants, additives, and diluents; or the compounds utilized in the present application can be administered parenterally to the patient in the form of slow-release subcutaneous implants or targeted delivery systems such as monoclonal antibodies, vectored delivery, iontophoretic, polymer matrices, liposomes, and microspheres. Examples of delivery systems useful in the present application include U.S. Pat. Nos. 5,225,182; 5,169,383; 5,167,616; 4,959,217; 4,925,678; 4,487,603; 4,486,194; 4,447,233; 4,447,224; 4,439,196; and 4,475,196. Many other such implants, delivery systems, and modules are well known to those skilled in the art.

[0721] A pharmacological formulation of the compound utilized in the present application can be administered orally to the patient. Conventional methods such as administering the compound in tablets, suspensions, solutions, emulsions, capsules, powders, syrups and the like are usable. Known techniques which deliver it orally or intravenously and retain the biological activity are preferred. In one embodiment, the compound of the present application can be administered initially by intravenous injection to bring blood levels to a suitable level. The patient's levels are then maintained by an oral dosage form, although other forms of administration, dependent upon the patient's condition and as indicated above, can be used.

[0722] In general, the active dose of compound for humans is in the range of from 1 ng/kg to about 20-100 mg/kg body weight per day, preferably about 0.01 mg to about 2-10 mg/kg body weight per day, in a regimen of a single dose, one dose per day or twice or three or more times per day for a period of one day, of several days or of 1-2 weeks or longer, preferably for 24 to 48 hrs or by continuous infusion during a period of 1-2 weeks or longer.

[0723] Administration of Compounds of the Present Application to the Eye

[0724] The compounds of the present application can be administered to the eye topically or in the form of an injection, such as an intravitreal injection, a sub-retinal injection or a bilateral injection. Preferred methods of delivery to the eye is using siRNA formulated as eye drops.

[0725] Further information on administration of the compounds of the present application can be found in Tolentino et al., Retina 24 (2004) 132-138; Reich et al., Molecular vision 9 (2003) 210-216.

[0726] Pulmonary Administration of Compounds of the Present Application

[0727] The therapeutic compositions of the present application are preferably administered into the lung by inhalation of an aerosol containing these compositions/compounds, or by intranasal or intratracheal instillation of said compositions. Formulating the compositions in liposomes may benefit absorption. Additionally, the compositions may include a PFC liquid such as perflubron, and the compositions formulated as a complex of the compounds of the application with polyethylemeimine (PEI).

[0728] For further information on pulmonary delivery of pharmaceutical compositions see Weiss et al., Human gene therapy 10:2287-2293 (1999); Densmore et al., Molecular therapy 1:180-188 (1999); Gautam et al., Molecular therapy 3:551-556 (2001); and Shahiwala & Misra, AAPS Pharm Sci Tech 5 (2004). Additionally, respiratory formulations for siRNA are described in U.S. patent application No. 2004/0063654 of Davis et el.

[0729] Further, the compounds of the present application are administered topically where appropriate (such as in the case of diabetic foot ulcers for example), optionally in a lipid/liposome formulation, or for use in iontophoresis.

[0730] A preferred administration mode is topical delivery of the siRNA compounds onto the round window membrane of the cochlea as disclosed for example in Tanaka et al. (Hear Res. 2003; 177(1-2):21-31). Preferred delivery to the inner ear comprising administering the siRNA as an eardrop formulation.

[0731] In the treatment of pressure sores or other wounds, the administration of the pharmaceutical composition is preferably by topical application to the damages area, but the compositions may also be administered systemically.

[0732] Additional formulations for improved delivery of the compounds of the present application can include non-formulated compounds, compounds covalently bound to cholesterol, and compounds bound to targeting antibodies (Song et al., 2005. Nat Biotechnol. 23(6):709-17).

### Example 7

### Model Systems for Pressure Sores or Pressure Ulcers

[0733] Pressure sores or pressure ulcers including diabetic ulcers, are areas of damaged skin and tissue that develop when sustained pressure (usually from a bed or wheelchair) cuts off circulation to vulnerable parts of the body, especially the skin on the buttocks, hips and heels. The lack of adequate blood flow leads to ischemic necrosis and ulceration of the affected tissue. Pressure sores occur most often in patients with diminished or absent sensation or who are debilitated, emaciated, paralyzed, or long bedridden. Tissues over the sacrum, ischia, greater trochanters, external malleoli, and heels are especially susceptible; other sites may be involved depending on the patient's situation.

[0734] Testing the active siRNA compounds of the application for treating pressure sore, ulcers and similar wounds is done in the mouse model described in Reid R R, et al., J Surgical Research. 116: 172-180, 2004.

[0735] Additionally, a rabbit model is described by Mustoe et al, JCI, 1991; Ahn & Mustoe, Ann P1 Surg, 1991 and is used for testing the siRNAs of the application.

### Example 8

### Model Systems for Spinal Cord Injury

[0736] Spinal cord injury, or myelopathy, is a disturbance of the spinal cord that results in loss of sensation and/or mobility. The two common types of spinal cord injury are due to trauma and disease. Traumatic injury can be due to automobile accidents, falls, gunshot, diving accidents inter alia, and diseases which can affect the spinal cord include polio, spina bifida, tumors and Friedreich's ataxia.

[0737] Testing the active siRNA compounds of the application for treating spinal cord injury is done in the rat spinal cord contusion model as described by Young, W. in Prog Brain Res. 2002;137:231-55. Other predictive animal models of spinal cord injury are described in the following references: Gruner, J A 1992. J Neurotrauma 9(2): 123; Hasegawa, K. and M. Grumet 2003. J Neurosurg 98(5): 1065-71; and Huang, P P and W. Young (1994). J Neurotrauma 11(5): 547.

### Example A

### Efficacy Using Intranasal Administration of siRNA Compounds in a Rat Model of Spinal Cord Injury

[0738] Objective. The objective of this study is to test functional recovery after intranasal administration of an siRNA compound of the application following mild SCI.

[0739] Animals and Treatment. The study includes eighteen (18) female SD rats of 77+1 day age that are randomly divided into three equal groups. The animals are subjected to mild spinal cord injury, as described in Basso D M, et al. (Exp Neurol. 1996 June; 139(2):244-56) by using 12.5 mm weight drop and are subsequently treated as described in Table Example 8A.

TABLE EXAMPLE 8A

| | | | | | | Total |
|---|---|---|---|---|---|---|
| | | | | | | amount |
| | | siRNA | | | Termi- | of |
| | | delivery | siRNA | Instillation | nation | siRNA/ |
| Group | siRNA | method | dose | regime | time | rat |
| A | siRNA | Intra- | 300 - 600 | 1st week - | 6 weeks | 5.4 mg |
| | NOX2 | nasal | μg/total | 3 times | | |
| B | siRNA | | | a week | | |
| | RhoA | | | 2nd week - | | |
| C | siRNA | | | 3 times | | |
| | CLN_1 | | | a week | | |
| | (Control) | | | 3d week - | | |
| | | | | 3 times | | |
| | | | | a week | | |

[0740] Tissue harvesting for analysis. Three (3) rats in each group are perfused with cold PBS, and spinal cord and brain are dissected as follows. Spinal cord is divided into 5 pieces (centered at the impact site) as well as a piece from T1 as a control (uninjured region) for each cord, and separately fresh frozen and placed in Trizol. Brain is dissected into the following regions: 1. Left/right Olfactory bulbs; 2. Cerebellum; 3. Brain stem; 4. Left/right cerebral cortex; 5. Pons; 6. Hippocampus Left/Right. Each region is separately fresh frozen and stored in Trizol.

[0741] One (1) rat in each group is perfused with 4% PFA, and whole spinal cord and longitudinally dissected brain is stored in 4% PFA.

[0742] In the remaining two (2) rats in each group, spinal cord and brain are dissected as follows: Spinal cord is divided into 5 pieces (centered at the impact site) as well as a piece from T1 as a control (uninjured region) for each cord. Brain is dissected into: 1. cerebral cortex (L/R); 2. hippocampus; 3. cerebellum.

[0743] Evaluation. The following test are performed:

[0744] 1. Assessment of behavioral outcome. The effect of treatment on restoring the locomotor function is analyzed by applying the Basso, Beattie and Bresnahan (BBB) locomotor score (Baaso et al., 1995).

[0745] 2. Molecular Biology. RhoA activity is tested using rhotectin (pull down assay). siRNA NOX2 , siRNA RhoA_{—}4 and CLN_{—}1 are detected by qPCR and ISH.

### Example 9

### Model Systems for Glaucoma

[0746] Testing of the active siRNA compounds of the application for treating or preventing Glaucoma is done in the animal model for example as described by Pease et al., J. Glaucoma, 2006, 15(6):512-9 (Manometric calibration and comparison of TonoLab and TonoPen tonometers in rats with experimental glaucoma and in normal mice).

[0747] Rat Optic Nerve Crush (ONC) Model: Intravitreal siRNA Delivery and Eye Drop Delivery

[0748] For optic nerve transsection the orbital optic nerve (ON) of anesthetized rats is exposed through a supraorbital approach, the meninges severed and all axons in the ON transected by crushing with forceps for 10 seconds, 2 mm from the lamina cribrosa.

[0749] The siRNA compounds are delivered alone or in combination in 5 uL volume (10 ug/uL) as eye drops. Immediately after optic nerve crush (ONC), 20 ug/10 ul test siRNA or 10 ul PBS is administered to one or both eyes of adult Wistar rats and the levels of siRNA taken up into the dissected and snap frozen whole retinae at 5 h and 1 d, and later at 2 d, 4 d, 7 d, 14 d and 21 d post injection is determined. Similar experiments are performed in order to test activity and efficacy of siRNA administered via eye drops.

### Example 10

### Animal Models of Allograft Transplant

[0750] The animal models disclosed in the following publications are useful for testing the compounds of the present application, in particular siRNA that target the NOX target genes including NOX2 (CYBB) and NOX4, p53, HTRA2, KEAP1, SHC1, ZNHIT1, LGALS3 and HI95, or any combination thereof.

[0751] Yasufuku et al., Transplantation. 2002 73(4):500-5. (Erratum in: Transplantation 2002 May 15; 73(9):1529.) Prevention of bronchiolitis obliterans in rat lung allografts by type V collagen-induced oral tolerance.

[0752] Krupnick et al., Nat Protoc. 2009; 4(1):86-93. Orthotopic mouse lung transplantation as experimental methodology to study transplant and tumor biology.

[0753] Mizobuchi et al., J Heart Lung Transplant. 2004 23(7):889-93. Comparison of surgical procedures for vascular and airway anastomoses that utilize a modified non-suture external cuff technique for experimental lung transplantation in rats.

[0754] Wilkes, et al., 1999. Transplantation 67:890-896. Allergenic bronchoalveolar lavage cells induce the histology and immunology of lung allograft rejection in recipient murine lungs: role of intercellular adhesion molecule-1 on donor cells.

[0755] siRNA compounds of the present application are tested in these animal models, which show that the siRNA compounds treat and/or prevent complications following lung transplantation and thus may be used in conjunction with transplant surgery.

### Example 11

### Prevention of Primary Graft Dysfunction in Rat Lung Transplantation Model Using siRNA Compounds

[0756] Design: Orthotopic left lung transplantation is performed on SD rats, with 1 h cold ischemia time according to the method previously described (Yasufuku et al., 2001. “Oral tolerance induction by type V collagen Downregulates Lung Allograft rejection”, Am J Respir Cell Mol Biol, 25:26-34; Yoshida et al., 2007 “Metalloproteinase inhibition has differential effects on alloimmunity, autoimmunity, and histopathology in the transplanted lungs” Transplantation, 27:683-684).

[0757] After the donor rats are anesthetized with an intramuscular injection of ketamine/xylazine, the chest is shaved, a sternotomy is performed and the heart and lungs is removed en bloc. The donor lung is wrapped in sterile gauze saturated with saline and placed on ice (4° C.) in a sterile beaker for 1 h followed by orthotopic transplantation to recipient rats. A siRNA compound of the application is administered intratracheally to the recipients at a dose of 350 mg/500 ml sterile saline/rat, 15-30 minutes after anastomosis/reperfusion.

[0758] Bronchoalveolar lavage fluid (BALF) is collected from the transplanted (left) and control right lung 4 h, 24 h and 5 d after the induction of ischemia in the recipients. BALF is collected by 5 subsequent lavages with 1 ml of warm PBS. The lungs are then perfused with saline and blood is collected for serum isolation.

[0759] At 24 hours post lung transplantation, pulmonary function is determined by evaluating elastance, compliance and resistance in a single-compartment model, by evaluating total lung capacity and/or by using the constant phase model.

### Example 12

### Model Systems for Acute Lung Injury (ALI)

[0760] Intratracheal (i.t) administration of LPS (Lipopolysaccharide), a bacterial cell wall component, is an accepted experimental model of acute lung injury (ALI), as LPS stimulates profound lung recruitment of inflammatory cells and the subsequent development of systemic inflammation.

[0761] (See, for example, Fang W F, et al., Am J Physiol Lung Cell Mol Physiol. 2007 293(2):L336-44; Hagiwara S, Iwasaka H, Noguchi T. J Anesth. 2007; 21(2):164-70).

[0762] Time-dependent changes of NOX gene expression in mice lungs during the first 24 hours (time points 0.5; 1; 2; 4; 8 & 24 hours), after Intratracheal (i.t) administration of LPS is assessed. The assessment of gene expression is done using qPCR.

### Example 13

### Model Systems for Acute Respiratory Distress Syndrome

[0763] Testing of the siRNA compound for treating Acute respiratory distress syndrome is performed, inter alia, in the animal model as described by Chen et al. in J Biomed Sci. 2003; 10(6 Pt 1):588-92.

### Example 14

### Model Systems for Hearing Loss Conditions

[0764] (i) Animal Model of Carboplatin-Induced or Cisplatin-Induced Hair Cell Death in the Cochlea of Chinchilla:

[0765] Chinchillas are pre-treated by direct administration of target gene specific siRNAs in saline or another formulation to the left ear of each animal. Saline is given to the right ear of each animal as placebo. Two days following the administration of the specific siRNA, the animals are treated with carboplatin (75 mg/kg ip) or cisplatin (intraperitoneal infusion of 13 mg/kg over 30 minutes). After sacrifice of the chinchillas (two weeks post carboplatin treatment) the percentage of dead cells of inner hair cells (IHC) and outer hair cells (OHC) is calculated in the left ear (siRNA treated) and in the right ear (saline treated).The percentage of dead cells is lower in the siRNA treated ear than in the control

[0766] (ii) Animal Model of Acoustic-Induced Hair Cell Death in the Cochlea of Chinchilla:

[0767] The activity of target specific siRNA in an acoustic trauma model is studied in chinchilla. The animals are exposed to an octave band of noise centered at 4 kHz for 2.5 h at 105 dB. The left ear of the noise-exposed chinchillas is pre-treated (48 h before the acoustic trauma) with 30 μg of either siRNA in ˜10 μL of saline; the right ear is pre-treated with vehicle (saline). The compound action potential (CAP) is a convenient and reliable electrophysiological method for measuring the neural activity transmitted from the cochlea. The CAP is recorded by placing an electrode near the base of the cochlea in order to detect the local field potential that is generated when a sound stimulus, such as click or tone burst, is abruptly turned on. The functional status of each ear is assessed 2.5 weeks after the acoustic trauma. Specifically, the mean threshold of the compound action potential recorded from the round window is determined 2.5 weeks after the acoustic trauma in order to determine if the thresholds in the siRNA-treated ear are lower (better) than the untreated (saline) ear. In addition, the amount of inner and outer hair cell loss is determined in the siRNA-treated and the control ear. It is found that the thresholds in the siRNA-treated ear are lower than the untreated (saline) ear Also, the amount of hair cell loss is lower in the siRNA-treated ear than in the control ear.

### Example 15

### Model Systems of Acute Renal Failure (ARF)

[0768] ARF is a clinical syndrome characterized by rapid deterioration of renal function that occurs within days. Without being bound by theory the acute kidney injury may be the result of renal ischemia-reperfusion injury such as renal ischemia-reperfusion injury in patients undergoing major surgery such as major cardiac surgery. The principal feature of ARF is an abrupt decline in glomerular filtration rate (GFR), resulting in the retention of nitrogenous wastes (urea, creatinine) Recent studies support the hypothesis that apoptosis in renal tissues is prominent in most human cases of ARF. The principal site of apoptotic cell death is the distal nephron. During the initial phase of ischemic injury, loss of integrity of the actin cytoskeleton leads to flattening of the epithelium, with loss of the brush border, loss of focal cell contacts, and subsequent disengagement of the cell from the underlying substratum.

[0769] Testing of the active siRNA for each target gene separately for treating ARF is done using an animal model for ischemia-reperfusion-induced ARF.

[0770] Ischemia-reperfusion induced ARF: Ischemia-reperfusion injury is induced in rats following 45 minutes bilateral kidney arterial clamp and subsequent release of the clamp to allow 24 hours of reperfusion. Twelve mg/kg of siRNA of the application (i.e. siRNA to a specific pro-apoptotic gene) are injected into the jugular vein 30 minutes prior to and 4 hours following the clamp. ARF progression is monitored by measurement of serum creatinine levels before (baseline) and 24 hrs post surgery. At the end of the experiment, the rats are perfused via an indwelling femoral line with warm PBS followed by 4% paraformaldehyde. The left kidneys are removed and stored in 4% paraformaldehyde for subsequent histological analysis. Acute renal failure is frequently defined as an acute increase of the serum creatinine level from baseline. An increase of at least 0.5 mg per dL or 44.2 μmol per L of serum creatinine is considered as an indication for acute renal failure. Serum creatinine is measured at time zero before the surgery and at 24 hours post ARF surgery. The results show that the siRNA compounds of the application prevent onset of acute renal failure in this model.

### Example 16

### Model Systems for Transplantation-Associated Acute Kidney Injury

[0771] Warm ischemia—A left nephrectomy was performed, followed by auto transplantation that resulted in a warm kidney graft preservation period of 45 minutes. Following auto transplantation, a right nephrectomy was performed on the same animal. A siRNA compound targeting P53 is administered intravenously via the femoral vein either before harvesting of the kidney graft (mimicking donor treatment) (“pre”), or after the kidney autotransplantation (mimicking recipient treatment), or both before harvest and after transplantation (combined donor and recipient treatment) (“pre-post”).

[0772] Cold ischemia—A left nephrectomy is performed on a donor animal, followed by a cold preservation (on ice) of the harvested kidney for a period of 5 hours. At the end of this period, the recipient rat undergoes a bilateral nephrectomy, followed by transplantation of the cold-preserved kidney graft. The total warm ischemia time (including surgical procedure) is 30 minutes. SiRNA is administered intravenously via the femoral vein, either to the donor animal prior to the kidney harvest (“pre”), or to the recipient animal 15 minutes (“post 15 min”) or 4 hours (post 4 hrs) post-transplantation.

[0773] To assess the efficacy of test siRNA in improvement of post-transplantation renal function, serum creatinine levels are measured on days 1, 2, and 7 post-transplantation in both warm and cold ischemia models.

### Example 17

### Model Systems for Neurodegenerative Diseases and Disorders

### Example A

### Evaluating the Efficacy of Intranasal Administration of siRNA Compounds in a Mouse Model of Alzheimer's Disease

[0774] Animals and Treatment. The study includes twenty-four (24) APP [V717I] transgenic mice (female), a model for Alzheimer's disease (Moechars D. et al., EMBO J. 15(6):1265-74, 1996; Moechars D. et al., Neuroscience. 91(3):819-30), aged 11 months that are randomly divided into two equal groups (Group I and Group II).

[0775] Animals are treated with intranasal administration of: NOX2 siRNA or SHC 1 siRNA or a combination thereof, (200-400 μg/mice, Group I) and vehicle (Group II), 2-3 times a week, during 3 months.

[0776] Termination. Mice are sacrificed; brains are dissected and process one hemisphere for histology and freeze one hemisphere for shipment.

[0777] Evaluation. The following histological analysis is performed:

[0778] 1. Anti-Aβ staining and quantification (4 slides/mouse):

[0779] 2. Thio S staining and quantification (4 slides/mouse):

[0780] 3. CD45 staining and quantification (4 slides/mouse):

[0781] 4. GFAP (astrocytosis) staining and quantification:

### Example B

### Evaluating the Efficacy of Intranasal Administration of siRNA in a Mouse Model of ALS

[0782] Objective. To examine the efficacy of siRNA to target genes (i.e. NOX2 and SHC1) in the mutant SOD1^{G93A} mouse model of ALS.

[0783] Animals and Treatment. The following experimental groups are used for studying disease progression and lifespan:

[0784] 1. Group 1—Mismatch siRNA—wild-type (n=10) and SOD1^{G93A} mice (n=10)

[0785] 2. Group 2—NOX siRNA—wild-type (n=10) and SOD1^{G93A} mice (n=10)

[0786] 3. Group 3—Untreated controls—wild-type (n=10) and SOD1^{G93A} mice (n=10)

[0787] Each experimental group is sex matched (5 male, 5 female) and contain littermates from at least 3 different litters. This design reduces bias that may be introduced by using mice from only a small number of litters, or groups of mice with a larger percentage of female SOD1^{G93A} mice (since these mice live 3-4 days longer than males).

[0788] Administration of siRNA. The route of administration of the siRNA is intranasal, with administration twice weekly, starting from 30 days of age.

[0789] Analysis of disease progression. Behavioral and electromyography (EMG) analysis in treated and untreated mice is performed to monitor disease onset and progression. Mice are pre-tested before start of siRNA treatment, followed by weekly assessments. All results are compared statistically. The following tests are performed:

[0790] 1. Swimming tank test: this test is particularly sensitive at detecting changes in hind-limb motor function (Raoul et al., 2005. Nat Med. 11, 423-428; Towne et al, 2008. Mol Ther. 16: 1018-1025).

[0791] 2. Electromyography: EMG assessments are performed in the gastrocnemius muscle of the hind limbs, where compound muscle action potential (CMAP) is recorded (Raoul et al., 2005. supra).

[0792] 3. Body weight: The body weight of mice is recorded weekly, as there is a significant reduction in the body weight of SOD1^{G93A} mice during disease progression (Kieran et al., 2007. PNAS USA. 104, 20606-20611).

[0793] Assessment of lifespan. The lifespan in days for treated and untreated mice is recorded and compared statistically to determine whether siRNA treatment has any significant effect on lifespan. Mice are sacrificed at a well-defined disease end point, when they have lost >20% of body weight and are unable to raise themselves in under 20 seconds. All results are compared statistically.

[0794] Post mortem histopathology. At the disease end-point mice are terminally anaesthetised and spinal cord and hind-limb muscle tissue are collected for histological and biochemical analysis.

[0795] Examining motoneuron survival. Transverse sections of lumbar spinal cord are cut using a cryostat and stained with gallocyanin, a nissl stain. From these sections the number of motoneurons in the lumbar spinal cord is counted (Kieran et al., 2007. supra), to determine whether siRNA treatment prevents motoneuron degeneration in SOD1 ^{G93A} mice.

[0796] Examining spinal cord histopathology. Motoneuron degeneration in SOD1^{G93A} mice results in astrogliosis and activation of microglial cells. Here, using transverse sections of lumbar spinal cord the activation of astocytes and microglial cells is examined using immunocytochemistry to determine whether siRNA treatment reduced or prevented their activation.

[0797] Examining muscle histology. Hind-limb muscle denervation and atrophy occur as a consequence of motoneuron degeneration in SOD1^{G93A} mice. At the disease end point the weight of individual hind-limb muscles (gastrocnemius, soleus, tibialis anterior, extensor digitorium longus muscles) is recorded and compared between treated and untreated mice. Muscles are then processed histologicaly to examine motor end plate denervation and muscle atrophy (Kieran et al., 2005. J Cell Biol. 169, 561-567).

[0798] Tables A1-A18 and B1-B15 which set forth sense and antisense oligonucleotide pairs uuseful in preparing siRNA compounds according to the present application are presented herein below.

TABLE A1
NOX4 19-mer oligomer pairs (NADPH oxidase 4)

| | | | | Human- |
|---|---|---|---|---|
| | | | | 20149638 |
| No. | Sense siRNA | AntiSense siRNA | Other Sp | ORF: 240-1976 |
| 1 | GCCCUUCAUUCAAUCUAGA | UCUAGAUUGAAUGAAGGGC | Chmp, Rat | [1427-1445] |
| 2 | CAUCCAUUUACCCUCACAA | UUGUGAGGGUAAAUGGAUG | Chmp | [1293-1311] |
| 3 | UCAUCCAUUUACCCUCACA | UGUGAGGGUAAAUGGAUGA | Chmp | [1292-1310] |
| 4 | GCCUUAUCCUUUUACCCAU | AUGGGUAAAAGGAUAAGGC | | [445-463] |
| 5 | CAAUACUCAACACCCUGUU | AACAGGGUGUUGAGUAUUG | | [1558-1576] |
| 6 | CCCUUCAUUCAAUCUAGAA | UUCUAGAUUGAAUGAAGGG | Chmp, Rat | [1428-1446] |
| 7 | GGACUCUAAAGAAGGAAUG | CAUUCCUUCUUUAGAGUCC | Chmp | [1996-2014] |
| 8 | GGAAACUUUUGUUUGAUGA | UCAUCAAACAAAAGUUUCC | Chmp | [1816-1834] |
| 9 | CCGUUGGUUUGCAGAUUUA | UAAAUCUGCAAACCAACGG | Chmp | [1646-1664] |
| 10 | CUGCCCUUCAUUCAAUCUA | UAGAUUGAAUGAAGGGCAG | Chmp, Rat | [1425-1443] |
| 11 | GAGUAUUUCUCAGAACAUU | AAUGUUCUGAGAAAUACUC | Chmp | [960-978] |
| 12 | CCAUGAAUGUCCUGCUUUU | AAAAGCAGGACAUUCAUGG | Chmp | [310-328] |
| 13 | CUGCCUCCAUCUAGUCAAG | CUUGACUAGAUGGAGGCAG | Chmp | [1395-1413] |
| 14 | GGGUUCAUCUUAAAAUAGU | ACUAUUUUAAGAUGAACCC | Chmp | [1342-1360] |
| 15 | CCAACUGAAACCAAAGCAA | UUGCUUUGGUUUCAGUUGG | Chmp | [1317-1335] |
| 16 | CGAAAGACUUUACAGGUAU | AUACCUGUAAAGUCUUUCG | Chmp | [1127-1145] |
| 17 | CCGAAAGACUUUACAGGUA | UACCUGUAAAGUCUUUCGG | Chmp | [1126-1144] |
| 18 | GGAUUUUCAAAACCGGCAG | CUGCCGGUUUUGAAAAUCC | Chmp | [999-1017] |
| 19 | GGAGAUUGUUGGAUAAAAG | CUUUUAUCCAACAAUCUCC | Chmp | [523-541] |
| 20 | GCACACUGUUGAUUUUCAU | AUGAAAAUCAACAGUGUGC | | [2237-2255] |
| 21 | GGAGAAAAAUAUCAUGCAC | GUGCAUGAUAUUUUUCUCC | Chmp | [1764-1782] |
| 22 | UGCCCUUCAUUCAAUCUAG | CUAGAUUGAAUGAAGGGCA | Chmp, Rat | [1426-1444] |
| 23 | UGCUAUUCCUCAUGAUCAC | GUGAUCAUGAGGAAUAGCA | Chmp | [748-766] |
| 24 | GUGGAAACUUUUGUUUGAU | AUCAAACAAAAGUUUCCAC | Chmp | [1814-1832] |
| 25 | UCAAUACUCAACACCCUGU | ACAGGGUGUUGAGUAUUGA | | [1557-1575] |
| 26 | GUAUAUUGAUGGUCCUUUU | AAAAGGACCAUCAAUAUAC | Chmp | [1460-1478] |
| 27 | ACUGCCUCCAUCUAGUCAA | UUGACUAGAUGGAGGCAGU | Chmp | [1394-1412] |
| 28 | GGAGACUGGACAGAACGAU | AUCGUUCUGUCCAGUCUCC | Chmp, Ms | [1362-1380] |
| 29 | CACAAUGUGUCCAACUGAA | UUCAGUUGGACACAUUGUG | Chmp | [1307-1325] |
| 30 | CCGGCUGCAUCAGUCUUAA | UUAAGACUGAUGCAGCCGG | Chmp | [910-928] |
| 31 | CUAUUCCUCAUGAUCACAG | CUGUGAUCAUGAGGAAUAG | Chmp | [750-768] |
| 32 | UCACAACUGUUCCUGGCCU | AGGCCAGGAACAGUUGUGA | Chmp | [706-724] |
| 33 | UGAGGAUCCUAGAAAACUU | AAGUUUUCUAGGAUCCUCA | Chmp | [683-701] |
| 34 | CAACUUCUCAGUGAAUUAC | GUAAUUCACUGAGAAGUUG | Chmp | [623-641] |
| 35 | AGGAGAUUGUUGGAUAAAA | UUUUAUCCAACAAUCUCCU | Chmp | [522-540] |
| 36 | CCUUAUCCUUUUACCCAUG | CAUGGGUAAAAGGAUAAGG | | [446-464] |
| 37 | AGGACUCUAAAGAAGGAAU | AUUCCUUCUUUAGAGUCCU | Chmp | [1995-2013] |
| 38 | CCCAAUUCACUAUCCAAGA | UCUUGGAUAGUGAAUUGGG | Chmp | [1884-1902] |
| 39 | GACCCAAUUCACUAUCCAA | UUGGAUAGUGAAUUGGGUC | Chmp | [1882-1900] |
| 40 | GCAUAACAAGUUUUGGCAA | UUGCCAAAACUUGUUAUGC | Chmp, Rat, Ms | [1676-1694] |
| 41 | GGCUAGGAUUGUGUCUAAG | CUUAGACACAAUCCUAGCC | Chmp | [391-409] |
| 42 | CAGAACGAUUUCGAGAUUU | AAAUCUCGAAAUCGUUCUG | Chmp | [1372-1390] |
| 43 | CGAAUGGUCAAAGAAAAUU | AAUUUUCUUUGACCAUUCG | Chmp | [1212-1230] |
| 44 | CUCAUGAUCACAGCCUCUA | UAGAGGCUGUGAUCAUGAG | Chmp | [756-774] |
| 45 | UGGUGUUACUAUCUGUAUU | AAUACAGAUAGUAACACCA | Chmp | [563-581] |
| 46 | GGUUGAACAAAUGCAAGAU | AUCUUGCAUUUGUUCAACC | Chmp | [2338-2356] |
| 47 | CUAGUGAGGAGCUGAACUU | AAGUUCAGCUCCUCACUAG | Chmp | [2274-2292] |
| 48 | GGAAUCAAUCAGCUGUGUU | AACACAGCUGAUUGAUUCC | Chmp | [2045-2063] |
| 49 | CGGAAUCAAUCAGCUGUGU | ACACAGCUGAUUGAUUCCG | Chmp | [2044-2062] |
| 50 | GCAAUUUCUAAGACUUUGA | UCAAAGUCUUAGAAAUUGC | Chmp | [2018-2036] |
| 51 | ACCCAAUUCACUAUCCAAG | CUUGGAUAGUGAAUUGGGU | Chmp | [1883-1901] |
| 52 | AGGAAAAACAGUUGGUGUU | AACACCAACUGUUUUUCCU | | [1853-1871] |
| 53 | UGGAAACUUUUGUUUGAUG | CAUCAAACAAAAGUUUCCA | Chmp | [1815-1833] |
| 54 | CUGAAUUCAAGACUGUUUA | UAAACAGUCUUGAAUUCAG | Chmp | [1782-1800] |
| 55 | CAGAAGAUAAUUGGAGAAA | UUUCUCCAAUUAUCUUCUG | Chmp, Rat, Ms | [1752-1770] |
| 56 | GUAACUCCAUUUGCAUCAA | UUGAUGCAAAUGGAGUUAC | Chmp | [1542-1560] |
| 57 | AGAAAAUCAUCCAUUUACC | GGUAAAUGGAUGAUUUUCU | Chmp | [1286-1304] |
| 58 | GAAAGACUUUACAGGUAUA | UAUACCUGUAAAGUCUUUC | Chmp | [1128-1146] |
| 59 | GAAAACUUCUCUUCACAAC | GUUGUGAAGAGAAGUUUUC | Chmp | [694-712] |
| 60 | GGAUCCUAGAAAACUUCUC | GAGAAGUUUUCUAGGAUCC | Chmp | [686-704] |
| 61 | AGACUUUGUUGAACUGAAU | AUUCAGUUCAACAAAGUCU | | [647-665] |
| 62 | GUUGAACAAAUGCAAGAUU | AAUCUUGCAUUUGUUCAAC | Chmp | [2339-2357] |
| 63 | CUUAUCCUUUUACCCAUGU | ACAUGGGUAAAAGGAUAAG | | [447-465] |
| 64 | CUGCAGCCUUAUCCUUUUA | UAAAAGGAUAAGGCUGCAG | Chmp | [440-458] |
| 65 | UGCCAAAGAAUAGUAAGGU | ACCUUACUAUUCUUUGGCA | Chmp | [2065-2083] |
| 66 | AGAAGGAAUGAGUGCAAUU | AAUUGCACUCAUUCCUUCU | Chmp | [2005-2023] |
| 67 | AAAGAAGGAAUGAGUGCAA | UUGCACUCAUUCCUUCUUU | Chmp | [2003-2021] |
| 68 | CUCUAAAGAAGGAAUGAGU | ACUCAUUCCUUCUUUAGAG | Chmp | [1999-2017] |
| 69 | CAGGACUCUAAAGAAGGAA | UUCCUUCUUUAGAGUCCUG | Chmp | [1994-2012] |
| 70 | CCAAGACUCUUCAUAAACU | AGUUUAUGAAGAGUCUUGG | Chmp | [1897-1915] |
| 71 | CUGUUCUUAACCUCAACUG | CAGUUGAGGUUAAGAACAG | Chmp | [424-442] |
| 72 | CAAUUCACUAUCCAAGACU | AGUCUUGGAUAGUGAAUUG | Chmp | [1886-1904] |
| 73 | CAUCUGUUCUUAACCUCAA | UUGAGGUUAAGAACAGAUG | Chmp | [421-439] |
| 74 | GCAAAAUAUAACAGAGGAA | UUCCUCUGUUAUAUUUUGC | | [1839-1857] |
| 75 | GGUGGAAACUUUUGUUUGA | UCAAACAAAAGUUUCCACC | Chmp | [1813-1831] |
| 76 | UCGGUGGAAACUUUUGUUU | AAACAAAAGUUUCCACCGA | Chmp | [1811-1829] |
| 77 | AGAAAAAUAUCAUGCACUG | CAGUGCAUGAUAUUUUUCU | Chmp | [1766-1784] |
| 78 | ACAGAAGAUAAUUGGAGAA | UUCUCCAAUUAUCUUCUGU | Chmp, Rat | [1751-1769] |
| 79 | CUAGGAUUGUGUCUAAGCA | UGCUUAGACACAAUCCUAG | Chmp | [393-411] |
| 80 | CCCAAGCUGUAUAUUGAUG | CAUCAAUAUACAGCUUGGG | Chmp | [1452-1470] |
| 81 | ACGAUUUCGAGAUUUACUA | UAGUAAAUCUCGAAAUCGU | Chmp | [1376-1394] |
| 82 | GACAGAACGAUUUCGAGAU | AUCUCGAAAUCGUUCUGUC | Chmp | [1370-1388] |
| 83 | ACAAUGUGUCCAACUGAAA | UUUCAGUUGGACACAUUGU | Chmp | [1308-1326] |
| 84 | ACCCUCACAAUGUGUCCAA | UUGGACACAUUGUGAGGGU | Chmp | [1302-1320] |
| 85 | CCUGUACUGUGCCGAAAGA | UCUUUCGGCACAGUACAGG | Chmp | [1115-1133] |
| 86 | CAGAUUCCAAGCUAAUUUU | AAAAUUAGCUUGGAAUCUG | Chmp | [1061-1079] |
| 87 | CAAACUAAUUUAGAUACCC | GGGUAUCUAAAUUAGUUUG | Chmp | [885-903] |
| 88 | AGAUGAGGAUCCUAGAAAA | UUUUCUAGGAUCCUCAUCU | Chmp | [680-698] |
| 89 | CGAGAUGAGGAUCCUAGAA | UUCUAGGAUCCUCAUCUCG | Chmp | [678-696] |
| 90 | UGAAUUACAGUGAAGACUU | AAGUCUUCACUGUAAUUCA | | [634-652] |
| 91 | UCGUGUUCCUCUUUAAAUU | AAUUUAAAGAGGAACACGA | Chmp | [2313-2331] |
| 92 | GAGACCCUGAAGAAUAUUU | AAAUAUUCUUCAGGGUCUC | Chmp | [2168-2186] |
| 93 | ACAUGUUUAAUCUGGAAAC | GUUUCCAGAUUAAACAUGU | Chmp | [2145-2163] |
| 94 | GCAGCCUUAUCCUUUUACC | GGUAAAAGGAUAAGGCUGC | Chmp | [442-460] |
| 95 | GUUAUGCCAAAGAAUAGUA | UACUAUUCUUUGGCAUAAC | Chmp | [2061-2079] |
| 96 | UGAGUGCAAUUUCUAAGAC | GUCUUAGAAAUUGCACUCA | Chmp | [2013-2031] |
| 97 | ACAAUAAAGAGUCUUUCAG | CUGAAAGACUCUUUAUUGU | Chmp | [1954-1972] |
| 98 | ACAACUCAUAUGGGACAAG | CUUGUCCCAUAUGAGUUGU | | [1927-1945] |
| 99 | GUGGACCCAAUUCACUAUC | GAUAGUGAAUUGGGUCCAC | Chmp | [1879-1897] |
| 100 | CUCGGUGGAAACUUUUGUU | AACAAAAGUUUCCACCGAG | Chmp | [1810-1828] |
| 101 | GAGAAAAAUAUCAUGCACU | AGUGCAUGAUAUUUUUCUC | Chmp | [1765-1783] |
| 102 | UGGAGAAAAAUAUCAUGCA | UGCAUGAUAUUUUUCUCCA | Chmp | [1763-1781] |
| 103 | ACAAGUUUUGGCAAGAGAA | UUCUCUUGCCAAAACUUGU | Chmp | [1681-1699] |
| 104 | UGAGGAAUCACUGAACUAU | AUAGUUCAGUGAUUCCUCA | Chmp | [1490-1508] |
| 105 | GCUGUAUAUUGAUGGUCCU | AGGACCAUCAAUAUACAGC | Chmp | [1457-1475] |
| 106 | CAAGCUGUAUAUUGAUGGU | ACCAUCAAUAUACAGCUUG | Chmp | [1454-1472] |
| 107 | UGGUCAGUAUAUUACUCUA | UAGAGUAAUAUACUGACCA | Chmp | [1244-1262] |
| 108 | CCGAAUGGUCAAAGAAAAU | AUUUUCUUUGACCAUUCGG | Chmp | [1211-1229] |
| 109 | AGUUUACCCAGCACAAAUU | AAUUUGUGCUGGGUAAACU | Chmp | [1018-1036] |
| 110 | GAGUUUACCCAGCACAAAU | AUUUGUGCUGGGUAAACUC | Chmp | [1017-1035] |
| 111 | UCCUCAUGAUCACAGCCUC | GAGGCUGUGAUCAUGAGGA | Chmp | [754-772] |
| 112 | CUCCAUGAAUGUCCUGCUU | AAGCAGGACAUUCAUGGAG | Chmp | [308-326] |
| 113 | GUGAAUUACAGUGAAGACU | AGUCUUCACUGUAAUUCAC | | [633-651] |
| 114 | CAGUGAAUUACAGUGAAGA | UCUUCACUGUAAUUCACUG | | [631-649] |
| 115 | CCGAGGAUCACAGAAGGUU | AACCUUCUGUGAUCCUCGG | Chmp | [488-506] |
| 116 | CCGAACACUCUUGGCUUAC | GUAAGCCAAGAGUGUUCGG | Chmp | [467-485] |
| 117 | CUUUUACCCAUGUGCCGAA | UUCGGCACAUGGGUAAAAG | | [453-471] |
| 118 | UGAUUUUCAUGGUGGAUUC | GAAUCCACCAUGAAAAUCA | | [2246-2264] |
| 119 | AGGAAUGAGUGCAAUUUCU | AGAAAUUGCACUCAUUCCU | Chmp | [2008-2026] |
| 120 | AAGAAGGAAUGAGUGCAAU | AUUGCACUCAUUCCUUCUU | Chmp | [2004-2022] |
| 121 | UGGGACAAGAUUUGAAUAC | GUAUUCAAAUCUUGUCCCA | | [1937-1955] |
| 122 | GCAUCUGUUCUUAACCUCA | UGAGGUUAAGAACAGAUGC | Chmp | [420-438] |
| 123 | ACUGAAUUCAAGACUGUUU | AAACAGUCUUGAAUUCAGU | Chmp | [1781-1799] |
| 124 | GGGAUACAGAAGAUAAUUG | CAAUUAUCUUCUGUAUCCC | Chmp, Rat | [1746-1764] |
| 125 | CUCUGUAUGUUGCAUAACA | UGUUAUGCAACAUACAGAG | Chmp | [1665-1683] |
| 126 | UGCAGAGAUAUCCAGUCCU | AGGACUGGAUAUCUCUGCA | Chmp | [1626-1644] |
| 127 | GACUAUACUUUAUUUGGGU | ACCCAAAUAAAGUAUAGUC | Chmp | [1606-1624] |
| 128 | CCUGUUGGAUGACUGGAAA | UUUCCAGUCAUCCAACAGG | | [1571-1589] |
| 129 | GGAUUGUGUCUAAGCAGAG | CUCUGCUUAGACACAAUCC | Chmp | [396-414] |
| 130 | AGGAUUGUGUCUAAGCAGA | UCUGCUUAGACACAAUCCU | Chmp | [395-413] |
| 131 | AACUCCAUUUGCAUCAAUA | UAUUGAUGCAAAUGGAGUU | Chmp | [1544-1562] |
| 132 | CCAAGCUGUAUAUUGAUGG | CCAUCAAUAUACAGCUUGG | Chmp | [1453-1471] |
| 133 | ACUCCGAAAUUCUGCCCUU | AAGGGCAGAAUUUCGGAGU | Chmp | [1414-1432] |
| 134 | CUGGACAGAACGAUUUCGA | UCGAAAUCGUUCUGUCCAG | Chmp | [1367-1385] |
| 135 | GCCGAAAGACUUUACAGGU | ACCUGUAAAGUCUUUCGGC | Chmp | [1125-1143] |
| 136 | CGGCUGCAUCAGUCUUAAC | GUUAAGACUGAUGCAGCCG | Chmp | [911-929] |
| 137 | UCUACAUGCUGCUGACGUU | AACGUCAGCAGCAUGUAGA | Chmp | [838-856] |
| 138 | UCUUCUGGUAUACUCAUAA | UUAUGAGUAUACCAGAAGA | Chmp | [805-823] |
| 139 | GUGGUGUUACUAUCUGUAU | AUACAGAUAGUAACACCAC | Chmp | [562-580] |
| 140 | CCUGUGGUGUUACUAUCUG | CAGAUAGUAACACCACAGG | Chmp | [559-577] |
| 141 | CAGGAGAUUGUUGGAUAAA | UUUAUCCAACAAUCUCCUG | Chmp | [521-539] |
| 142 | UGGUUGAACAAAUGCAAGA | UCUUGCAUUUGUUCAACCA | Chmp | [2337-2355] |
| 143 | CCCUGAAGAAUAUUUGAUG | CAUCAAAUAUUCUUCAGGG | Chmp, Rat | [2172-2190] |
| 144 | ACCCUGAAGAAUAUUUGAU | AUCAAAUAUUCUUCAGGGU | Chmp | [2171-2189] |
| 145 | AGAGACCCUGAAGAAUAUU | AAUAUUCUUCAGGGUCUCU | Chmp | [2167-2185] |
| 146 | CUGUGUUAUGCCAAAGAAU | AUUCUUUGGCAUAACACAG | Chmp | [2057-2075] |
| 147 | GAGUGCAAUUUCUAAGACU | AGUCUUAGAAAUUGCACUC | Chmp | [2014-2032] |
| 148 | UGAAAACUUUUGCCAUGAA | UUCAUGGCAAAAGUUUUCA | Chmp | [1974-1992]+ |
| 149 | GAACAACUCAUAUGGGACA | UGUCCCAUAUGAGUUGUUC | Rat, Ms | [1925-1943] |
| 150 | AGAGGAAAAACAGUUGGUG | CACCAACUGUUUUUCCUCU | | [1851-1869] |
| 151 | CGGUGGAAACUUUUGUUUG | CAAACAAAAGUUUCCACCG | Chmp | [1812-1830] |
| 152 | CAGCAUCUGUUCUUAACCU | AGGUUAAGAACAGAUGCUG | Chmp | [418-436] |
| 153 | UAACAAGUUUUGGCAAGAG | CUCUUGCCAAAACUUGUUA | Chmp | [1679-1697] |
| 154 | UGCAUAACAAGUUUUGGCA | UGCCAAAACUUGUUAUGCA | Chmp, Rat, Ms | [1675-1693] |
| 155 | UUACUCUGUAUGUUGCAUA | UAUGCAACAUACAGAGUAA | Chmp | [1662-1680] |
| 156 | UGUAUAUUGAUGGUCCUUU | AAAGGACCAUCAAUAUACA | Chmp | [1459-1477] |
| 157 | CGAUUUCGAGAUUUACUAC | GUAGUAAAUCUCGAAAUCG | Chmp | [1377-1395] |
| 158 | GGACAGAACGAUUUCGAGA | UCUCGAAAUCGUUCUGUCC | Chmp | [1369-1387] |
| 159 | CCCUCAGAUGUCAUGGAAA | UUUCCAUGACAUCUGAGGG | Chmp | [1191-1209] |
| 160 | CCUUCUUGCUGUAUAACCA | UGGUUAUACAGCAAGAAGG | Chmp | [337-355] |
| 161 | CAUGAACCUUUCCCUGAAG | CUUCAGGGAAAGGUUCAUG | Chmp | [981-999] |
| 162 | CCAGAGUAUUUCUCAGAAC | GUUCUGAGAAAUACUCUGG | Chmp | [957-975] |
| 163 | CCAGCUCUCAGAAUAUUUC | GAAAUAUUCUGAGAGCUGG | Chmp | [934-952] |
| 164 | GACGUUGCAUGUUUCAGGA | UCCUGAAACAUGCAACGUC | Chmp | [851-869] |
| 165 | CUAUGAUAUCUUCUGGUAU | AUACCAGAAGAUAUCAUAG | Chmp | [797-815] |
| 166 | UGAAUGUCCUGCUUUUCUG | CAGAAAAGCAGGACAUUCA | Chmp | [313-331] |
| 167 | CUAACUAUGAUAUCUUCUG | CAGAAGAUAUCAUAGUUAG | Chmp | [793-811] |
| 168 | GCAAUAAGAGUUUCUAACU | AGUUAGAAACUCUUAUUGC | Chmp | [780-798] |
| 169 | UGAUCACAGCCUCUACAUA | UAUGUAGAGGCUGUGAUCA | Chmp | [760-778] |
| 170 | GAGGAUCCUAGAAAACUUC | GAAGUUUUCUAGGAUCCUC | Chmp | [684-702] |
| 171 | UUACAGUGAAGACUUUGUU | AACAAAGUCUUCACUGUAA | | [638-656] |
| 172 | ACAUUCCAUAUUACCUGUG | CACAGGUAAUAUGGAAUGU | Chmp | [546-564] |
| 173 | GAACAUUCCAUAUUACCUG | CAGGUAAUAUGGAAUGUUC | Chmp | [544-562] |
| 174 | GUGUUCCUCUUUAAAUUGU | ACAAUUUAAAGAGGAACAC | Chmp | [2315-2333] |
| 175 | GUCGUGUUCCUCUUUAAAU | AUUUAAAGAGGAACACGAC | Chmp | [2312-2330] |
| 176 | GGCUGAUUGUCGUGUUCCU | AGGAACACGACAAUCAGCC | Chmp | [2304-2322] |
| 177 | CACUGUUGAUUUUCAUGGU | ACCAUGAAAAUCAACAGUG | | [2240-2258] |
| 178 | UGCACACUGUUGAUUUUCA | UGAAAAUCAACAGUGUGCA | | [2236-2254] |
| 179 | AGACCCUGAAGAAUAUUUG | CAAAUAUUCUUCAGGGUCU | Chmp | [2169-2187] |
| 180 | GCAAGAUGACCGUCACAUU | AAUGUGACGGUCAUCUUGC | | [2126-2144] |
| 181 | UGCAGCCUUAUCCUUUUAC | GUAAAAGGAUAAGGCUGCA | Chmp | [441-459] |
| 182 | ACUGCAGCCUUAUCCUUUU | AAAAGGAUAAGGCUGCAGU | Chmp | [439-457] |
| 183 | GUGCAAUUUCUAAGACUUU | AAAGUCUUAGAAAUUGCAC | Chmp | [2016-2034] |
| 184 | AGUGCAAUUUCUAAGACUU | AAGUCUUAGAAAUUGCACU | Chmp, Rat, Ms | [2015-2033] |
| 185 | UGAAGCAGGACUCUAAAGA | UCUUUAGAGUCCUGCUUCA | Chmp | [1989-2007] |
| 186 | AAAGAGUCUUUCAGCUGAA | UUCAGCUGAAAGACUCUUU | Chmp | [1959-1977]+ |
| 187 | UCAUAUGGGACAAGAUUUG | CAAAUCUUGUCCCAUAUGA | | [1932-1950] |
| 188 | AACAACUCAUAUGGGACAA | UUGUCCCAUAUGAGUUGUU | Rat, Ms | [1926-1944] |
| 189 | CUAUCCAAGACUCUUCAUA | UAUGAAGAGUCUUGGAUAG | Chmp | [1893-1911] |
| 190 | UCACUAUCCAAGACUCUUC | GAAGAGUCUUGGAUAGUGA | Chmp | [1890-1908] |
| 191 | CAGAGGAAAAACAGUUGGU | ACCAACUGUUUUUCCUCUG | | [1850-1868] |
| 192 | AGCAUCUGUUCUUAACCUC | GAGGUUAAGAACAGAUGCU | Chmp | [419-437] |
| 193 | CCUCGGUGGAAACUUUUGU | ACAAAAGUUUCCACCGAGG | Chmp | [1809-1827] |
| 194 | AGAUGGGAUACAGAAGAUA | UAUCUUCUGUAUCCCAUCU | Chmp, Rat | [1742-1760] |
| 195 | UACUCUGUAUGUUGCAUAA | UUAUGCAACAUACAGAGUA | Chmp | [1663-1681] |
| 196 | AGACUAUACUUUAUUUGGG | CCCAAAUAAAGUAUAGUCU | Chmp | [1605-1623] |
| 197 | GCUGGAGGCAUUGGAGUAA | UUACUCCAAUGCCUCCAGC | Chmp | [1527-1545] |
| 198 | UCCCAAGCUGUAUAUUGAU | AUCAAUAUACAGCUUGGGA | Chmp | [1451-1469] |
| 199 | UCCAACUGAAACCAAAGCA | UGCUUUGGUUUCAGUUGGA | Chmp | [1316-1334] |
| 200 | CUGGUCAGUAUAUUACUCU | AGAGUAAUAUACUGACCAG | Chmp | [1243-1261] |
| 201 | CCAUCAUUUCGGUCAUAAG | CUUAUGACCGAAAUGAUGG | Chmp | [1168-1186] |
| 202 | GGUAUAUCCGGAGCAAUAA | UUAUUGCUCCGGAUAUACC | Chmp | [1141-1159] |
| 203 | GGAUUUCUGGACCUUUGUG | CACAAAGGUCCAGAAAUCC | Chmp, Rat, Ms | [1096-1114] |
| 204 | AAAACCUUCUUGCUGUAUA | UAUACAGCAAGAAGGUUUU | Chmp | [333-351] |
| 205 | AUACUCAUAACCUCUUCUU | AAGAAGAGGUUAUGAGUAU | Chmp | [814-832] |
| 206 | GUAUACUCAUAACCUCUUC | GAAGAGGUUAUGAGUAUAC | Chmp | [812-830] |
| 207 | CUUCUGGUAUACUCAUAAC | GUUAUGAGUAUACCAGAAG | Chmp | [806-824] |
| 208 | AUCUUCUGGUAUACUCAUA | UAUGAGUAUACCAGAAGAU | Chmp | [804-822] |
| 209 | UCCAUGAAUGUCCUGCUUU | AAAGCAGGACAUUCAUGGA | Chmp | [309-327] |
| 210 | GUGAAGACUUUGUUGAACU | AGUUCAACAAAGUCUUCAC | | [643-661] |
| 211 | ACAGUGAAGACUUUGUUGA | UCAACAAAGUCUUCACUGU | | [640-658] |
| 212 | ACAAAUGCAAGAUUGAACA | UGUUCAAUCUUGCAUUUGU | Chmp | [2344-2362] |
| 213 | UUGAUUUUCAUGGUGGAUU | AAUCCACCAUGAAAAUCAA | | [2245-2263] |
| 214 | AGAUGCACACUGUUGAUUU | AAAUCAACAGUGUGCAUCU | Chmp, Rat | [2233-2251] |
| 215 | ACCUCAACUGCAGCCUUAU | AUAAGGCUGCAGUUGAGGU | Chmp | [433-451] |
| 216 | CUCAUAUGGGACAAGAUUU | AAAUCUUGUCCCAUAUGAG | | [1931-1949] |
| 217 | CAGAACAACUCAUAUGGGA | UCCCAUAUGAGUUGUUCUG | | [1923-1941] |
| 218 | CCAGAACAACUCAUAUGGG | CCCAUAUGAGUUGUUCUGG | | [1922-1940] |
| 219 | CAAGACUCUUCAUAAACUG | CAGUUUAUGAAGAGUCUUG | Chmp | [1898-1916] |
| 220 | GGUGUUUUCUGUUGUGGAC | GUCCACAACAGAAAACACC | Chmp | [1866-1884] |
| 221 | CAGUUGGUGUUUUCUGUUG | CAACAGAAAACACCAACUG | Chmp | [1861-1879] |
| 222 | UCAAGACUGUUUAUAGGAC | GUCCUAUAAACAGUCUUGA | | [1788-1806] |
| 223 | CACUGAAUUCAAGACUGUU | AACAGUCUUGAAUUCAGUG | Chmp | [1780-1798] |
| 224 | GGAUACAGAAGAUAAUUGG | CCAAUUAUCUUCUGUAUCC | Chmp, Rat | [1747-1765] |
| 225 | AUGGGAUACAGAAGAUAAU | AUUAUCUUCUGUAUCCCAU | Chmp, Rat | [1744-1762] |
| 226 | AGAUUUACUCUGUAUGUUG | CAACAUACAGAGUAAAUCU | Chmp | [1658-1676] |
| 227 | CUGUAUAUUGAUGGUCCUU | AAGGACCAUCAAUAUACAG | Chmp | [1458-1476] |
| 228 | UCGAGAUUUACUACUGCCU | AGGCAGUAGUAAAUCUCGA | Chmp | [1382-1400] |
| 229 | GUAUCUGCAUUAGAAAAUC | GAUUUUCUAAUGCAGAUAC | Chmp | [1275-1293] |
| 230 | CCUGGUCAGUAUAUUACUC | GAGUAAUAUACUGACCAGG | Chmp | [1242-1260] |
| 231 | GACUUGGCUUUGGAUUUCU | AGAAAUCCAAAGCCAAGUC | Chmp | [1085-1103] |
| 232 | UGAUAUCUUCUGGUAUACU | AGUAUACCAGAAGAUAUCA | Chmp, Rat, Ms | [800-818] |
| 233 | AAGACUUUGUUGAACUGAA | UUCAGUUCAACAAAGUCUU | | [646-664] |
| 234 | UGAAGACUUUGUUGAACUG | CAGUUCAACAAAGUCUUCA | | [644-662] |
| 235 | CAGUGAAGACUUUGUUGAA | UUCAACAAAGUCUUCACUG | | [641-659] |
| 236 | UGUGGUGUUACUAUCUGUA | UACAGAUAGUAACACCACA | Chmp | [561-579] |
| 237 | CUGUGGUGUUACUAUCUGU | ACAGAUAGUAACACCACAG | Chmp | [560-578] |
| 238 | UGAACAAAUGCAAGAUUGA | UCAAUCUUGCAUUUGUUCA | Chmp | [2341-2359] |
| 239 | UUGUCGUGUUCCUCUUUAA | UUAAAGAGGAACACGACAA | Chmp | [2310-2328] |
| 240 | UGAUUGUCGUGUUCCUCUU | AAGAGGAACACGACAAUCA | Chmp | [2307-2325] |
| 241 | ACUGUUGAUUUUCAUGGUG | CACCAUGAAAAUCAACAGU | | [2241-2259] |
| 242 | CCUGAAGAAUAUUUGAUGU | ACAUCAAAUAUUCUUCAGG | Chmp, Rat | [2173-2191] |
| 243 | GGAAAUGUGAGAAUGUGGC | GCCACAUUCUCACAUUUCC | Chmp | [2109-2127] |
| 244 | CAACUGCAGCCUUAUCCUU | AAGGAUAAGGCUGCAGUUG | Chmp | [437-455] |
| 245 | UGCAAUUUCUAAGACUUUG | CAAAGUCUUAGAAAUUGCA | Chmp | [2017-2035] |
| 246 | GCUGAAAACUUUUGCCAUG | CAUGGCAAAAGUUUUCAGC | Chmp | [1972-1990]+ |
| 247 | AUAUGGGACAAGAUUUGAA | UUCAAAUCUUGUCCCAUAU | | [1934-1952] |
| 248 | AUCCAAGACUCUUCAUAAA | UUUAUGAAGAGUCUUGGAU | Chmp | [1895-1913] |
| 249 | CACUAUCCAAGACUCUUCA | UGAAGAGUCUUGGAUAGUG | Chmp | [1891-1909] |
| 250 | UAACAGAGGAAAAACAGUU | AACUGUUUUUCCUCUGUUA | | [1847-1865] |
| 251 | UGGGAUACAGAAGAUAAUU | AAUUAUCUUCUGUAUCCCA | Chmp, Rat | [1745-1763] |
| 252 | CAGUCAAACAGAUGGGAUA | UAUCCCAUCUGUUUGACUG | Chmp, Rat | [1733-1751] |
| 253 | GGGUAUGCAGAGAUAUCCA | UGGAUAUCUCUGCAUACCC | Chmp | [1621-1639] |
| 254 | UGGAGGCAUUGGAGUAACU | AGUUACUCCAAUGCCUCCA | Chmp | [1529-1547] |
| 255 | CCAUUUGAGGAAUCACUGA | UCAGUGAUUCCUCAAAUGG | Chmp | [1485-1503] |
| 256 | GACCUGGUCAGUAUAUUAC | GUAAUAUACUGACCAGGUC | Chmp | [1240-1258] |
| 257 | GGAAAUCCGAAUGGUCAAA | UUUGACCAUUCGGAUUUCC | Chmp | [1205-1223] |
| 258 | UCACCAUCAUUUCGGUCAU | AUGACCGAAAUGAUGGUGA | Chmp | [1165-1183] |
| 259 | CAGACUUGGCUUUGGAUUU | AAAUCCAAAGCCAAGUCUG | Chmp | [1083-1101] |
| 260 | ACAGACUUGGCUUUGGAUU | AAUCCAAAGCCAAGUCUGU | Chmp | [1082-1100] |
| 261 | GCUAAUUUUCCACAGACUU | AAGUCUGUGGAAAAUUAGC | Chmp | [1071-1089] |
| 262 | UGUGAAGAUUUGUAUGGAA | UUCCAUACAAAUCUUCACA | Chmp | [1037-1055] |
| 263 | GAAAACCUUCUUGCUGUAU | AUACAGCAAGAAGGUUUUC | Chmp | [332-350] |
| 264 | CUCAUAACCUCUUCUUUGU | ACAAAGAAGAGGUUAUGAG | Chmp | [817-835] |
| 265 | UGCAAUAAGAGUUUCUAAC | GUUAGAAACUCUUAUUGCA | Chmp | [779-797] |
| 266 | AAAAGCAGAACAUUCCAUA | UAUGGAAUGUUCUGCUUUU | Chmp | [537-555] |
| 267 | UAAAAGCAGAACAUUCCAU | AUGGAAUGUUCUGCUUUUA | Chmp | [536-554] |
| 268 | CGUGUUCCUCUUUAAAUUG | CAAUUUAAAGAGGAACACG | Chmp | [2314-2332] |
| 269 | UAAGGCUGAUUGUCGUGUU | AACACGACAAUCAGCCUUA | Chmp | [2301-2319] |
| 270 | UCAUGGUGGAUUCAAGAAC | GUUCUUGAAUCCACCAUGA | | [2252-2270] |
| 271 | CUGAAGAAUAUUUGAUGUG | CACAUCAAAUAUUCUUCAG | Chmp, Rat | [2174-2192] |
| 272 | CUUUGAAACUCAGCGGAAU | AUUCCGCUGAGUUUCAAAG | Chmp | [2031-2049] |
| 273 | AGUAACCAGAACAACUCAU | AUGAGUUGUUCUGGUUACU | | [1917-1935] |
| 274 | GGUAUGCAGAGAUAUCCAG | CUGGAUAUCUCUGCAUACC | Chmp | [1622-1640] |
| 275 | GGAGGCAUUGGAGUAACUC | GAGUUACUCCAAUGCCUCC | Chmp | [1530-1548] |
| 276 | CUGGAGGCAUUGGAGUAAC | GUUACUCCAAUGCCUCCAG | Chmp | [1528-1546] |
| 277 | CAUUUGAGGAAUCACUGAA | UUCAGUGAUUCCUCAAAUG | Chmp | [1486-1504] |
| 278 | GUGUAUCUGCAUUAGAAAA | UUUUCUAAUGCAGAUACAC | Chmp | [1273-1291] |
| 279 | AGCAAGACCUGGUCAGUAU | AUACUGACCAGGUCUUGCU | Chmp | [1235-1253] |
| 280 | CACAGACUUGGCUUUGGAU | AUCCAAAGCCAAGUCUGUG | Chmp | [1081-1099] |
| 281 | ACCAGCUCUCAGAAUAUUU | AAAUAUUCUGAGAGCUGGU | Chmp | [933-951] |
| 282 | AGAUGACCGUCACAUUACA | UGUAAUGUGACGGUCAUCU | | [2129-2147] |
| 283 | CAAGAUGACCGUCACAUUA | UAAUGUGACGGUCAUCUUG | | [2127-2145] |
| 284 | GACUUUGAAACUCAGCGGA | UCCGCUGAGUUUCAAAGUC | Chmp | [2029-2047] |
| 285 | CUGAAAACUUUUGCCAUGA | UCAUGGCAAAAGUUUUCAG | Chmp | [1973-1991]+ |
| 286 | GUUGGUGUUUUCUGUUGUG | CACAACAGAAAACACCAAC | Chmp | [1863-1881] |
| 287 | ACAGAUGGGAUACAGAAGA | UCUUCUGUAUCCCAUCUGU | Chmp, Rat | [1740-1758] |
| 288 | GUCAAACAGAUGGGAUACA | UGUAUCCCAUCUGUUUGAC | Chmp, Rat | [1735-1753] |
| 289 | GGCUUCCACUCAGUCUUUG | CAAAGACUGAGUGGAAGCC | | [104-122] |
| 290 | CUAGUCAAGACUCCGAAAU | AUUUCGGAGUCUUGACUAG | Chmp | [1405-1423] |
| 291 | AGCUCUCAGAAUAUUUCCU | AGGAAAUAUUCUGAGAGCU | Chmp | [936-954] |
| 292 | AACCAGCUCUCAGAAUAUU | AAUAUUCUGAGAGCUGGUU | Chmp | [932-950] |
| 293 | AUAACCUCUUCUUUGUCUU | AAGACAAAGAAGAGGUUAU | Chmp | [820-838] |
| 294 | CACAGAAGGUUCCAAGCAG | CUGCUUGGAACCUUCUGUG | Chmp | [496-514] |
| 295 | GAAAACUUUUGCCAUGAAG | CUUCAUGGCAAAAGUUUUC | Chmp | [1975-1993]+ |
| 296 | AGCAAAAUAUAACAGAGGA | UCCUCUGUUAUAUUUUGCU | | [1838-1856] |
| 297 | UCAAACAGAUGGGAUACAG | CUGUAUCCCAUCUGUUUGA | Chmp, Rat | [1736-1754] |
| 298 | UCAGUCAAACAGAUGGGAU | AUCCCAUCUGUUUGACUGA | Chmp, Rat, Ms | [1732-1750] |
| 299 | CCCUCACAAUGUGUCCAAC | GUUGGACACAUUGUGAGGG | Chmp | [1303-1321] |
| 300 | CCAUUUACCCUCACAAUGU | ACAUUGUGAGGGUAAAUGG | Chmp | [1296-1314] |
| 301 | AGACUUUACAGGUAUAUCC | GGAUAUACCUGUAAAGUCU | Chmp | [1131-1149] |
| 302 | CAGAGUAUUUCUCAGAACA | UGUUCUGAGAAAUACUCUG | Chmp | [958-976] |
| 303 | AGAAAACUGUUAGAUGCAC | GUGCAUCUAACAGUUUUCU | Chmp | [2222-2240] |
| 304 | GCCUCCAUCUAGUCAAGAC | GUCUUGACUAGAUGGAGGC | Chmp | [1397-1415] |
| 305 | AUAAGCCAGUCACCAUCAU | AUGAUGGUGACUGGCUUAU | Chmp | [1156-1174] |
| 306 | GGAGCAAUAAGCCAGUCAC | GUGACUGGCUUAUUGCUCC | Chmp | [1150-1168] |
| 307 | ACCUUUCCCUGAAGGAUUU | AAAUCCUUCAGGGAAAGGU | Chmp | [986-1004] |
| 308 | ACCUCUUCUUUGUCUUCUA | UAGAAGACAAAGAAGAGGU | Chmp, Rat, Ms | [823-841] |
| 309 | CCGAAAUUCUGCCCUUCAU | AUGAAGGGCAGAAUUUCGG | Chmp | [1417-1435] |
| 310 | AAGCCAGUCACCAUCAUUU | AAAUGAUGGUGACUGGCUU | Chmp | [1158-1176] |
| 311 | CGGAGCAAUAAGCCAGUCA | UGACUGGCUUAUUGCUCCG | Chmp | [1149-1167] |
| 312 | GUAUGGAAGAGCCCAGAUU | AAUCUGGGCUCUUCCAUAC | Chmp | [1048-1066] |
| 313 | CCCUGAAGGAUUUUCAAAA | UUUUGAAAAUCCUUCAGGG | Chmp | [992-1010] |
| 314 | CCCUCAACUUCUCAGUGAA | UUCACUGAGAAGUUGAGGG | Chmp | [619-637] |
| 315 | CCAUGUGCCGAACACUCUU | AAGAGUGUUCGGCACAUGG | | [460-478] |
| 316 | GGACCCAAUUCACUAUCCA | UGGAUAGUGAAUUGGGUCC | Chmp | [1881-1899] |
| 317 | GCAUUGGAGUAACUCCAUU | AAUGGAGUUACUCCAAUGC | Chmp | [1534-1552] |
| 318 | CCUUCAUUCAAUCUAGAAA | UUUCUAGAUUGAAUGAAGG | Chmp, Rat | [1429-1447] |
| 319 | GGCCAGAGUAUCACUACCU | AGGUAGUGAUACUCUGGCC | Chmp | [358-376] |
| 320 | CUCACAAUGUGUCCAACUG | CAGUUGGACACAUUGUGAG | Chmp | [1305-1323] |
| 321 | CCAGUCACCAUCAUUUCGG | CCGAAAUGAUGGUGACUGG | Chmp | [1161-1179] |
| 322 | CCAAGCUAAUUUUCCACAG | CUGUGGAAAAUUAGCUUGG | Chmp | [1067-1085] |
| 323 | ACCAGAGUAUUUCUCAGAA | UUCUGAGAAAUACUCUGGU | Chmp | [956-974] |
| 324 | GCCUCUACAUAUGCAAUAA | UUAUUGCAUAUGUAGAGGC | Chmp | [768-786] |
| 325 | UGGUGGUGCUAUUCCUCAU | AUGAGGAAUAGCACCACCA | Chmp | [742-760] |
| 326 | GGAUAAAAGCAGAACAUUC | GAAUGUUCUGCUUUUAUCC | Chmp | [533-551] |
| 327 | UGGAUAAAAGCAGAACAUU | AAUGUUCUGCUUUUAUCCA | Chmp | [532-550] |
| 328 | UUGGAUAAAAGCAGAACAU | AUGUUCUGCUUUUAUCCAA | Chmp | [531-549] |
| 329 | GCCUCAGCAUCUGUUCUUA | UAAGAACAGAUGCUGAGGC | Chmp | [414-432] |
| 330 | GUAUGUUGCAUAACAAGUU | AACUUGUUAUGCAACAUAC | Chmp | [1669-1687] |
| 331 | UCCUUUUGGAAGUCCAUUU | AAAUGGACUUCCAAAAGGA | Chmp | [1472-1490] |
| 332 | CCUCCAUCUAGUCAAGACU | AGUCUUGACUAGAUGGAGG | Chmp | [1398-1416] |
| 333 | GCCAGAGUAUCACUACCUC | GAGGUAGUGAUACUCUGGC | Chmp | [359-377] |
| 334 | CCUCACAAUGUGUCCAACU | AGUUGGACACAUUGUGAGG | Chmp | [1304-1322] |
| 335 | GCAUUAGAAAAUCAUCCAU | AUGGAUGAUUUUCUAAUGC | Chmp | [1281-1299] |
| 336 | GAAAUCCGAAUGGUCAAAG | CUUUGACCAUUCGGAUUUC | Chmp | [1206-1224] |
| 337 | CAUAAGUCAUCCCUCAGAU | AUCUGAGGGAUGACUUAUG | Chmp | [1181-1199] |
| 338 | UCAUAAGUCAUCCCUCAGA | UCUGAGGGAUGACUUAUGA | Chmp | [1180-1198] |
| 339 | GUCACCAUCAUUUCGGUCA | UGACCGAAAUGAUGGUGAC | Chmp | [1164-1182] |
| 340 | CAAUAAGCCAGUCACCAUC | GAUGGUGACUGGCUUAUUG | Chmp | [1154-1172] |
| 341 | AGAGUAUUUCUCAGAACAU | AUGUUCUGAGAAAUACUCU | Chmp | [959-977] |
| 342 | GCAUCAGUCUUAACCGAAC | GUUCGGUUAAGACUGAUGC | Chmp | [916-934] |
| 343 | UGCUGAAGUAUCAAACUAA | UUAGUUUGAUACUUCAGCA | Chmp | [874-892] |
| 344 | UGGUGCUAUUCCUCAUGAU | AUCAUGAGGAAUAGCACCA | Chmp | [745-763] |
| 345 | GGUGGUGCUAUUCCUCAUG | CAUGAGGAAUAGCACCACC | Chmp | [743-761] |
| 346 | CUAGAAAACUUCUCUUCAC | GUGAAGAGAAGUUUUCUAG | Chmp | [691-709] |
| 347 | CUCAACUUCUCAGUGAAUU | AAUUCACUGAGAAGUUGAG | Chmp | [621-639] |
| 348 | CCAUAUUACCUGUGGUGUU | AACACCACAGGUAAUAUGG | Chmp | [551-569] |
| 349 | CCGUCACAUUACAUGUUUA | UAAACAUGUAAUGUGACGG | | [2135-2153] |
| 350 | GCAAGACCUGGUCAGUAUA | UAUACUGACCAGGUCUUGC | Chmp | [1236-1254] |
| 351 | AGCUAAUUUUCCACAGACU | AGUCUGUGGAAAAUUAGCU | Chmp | [1070-1088] |
| 352 | CAAGCUAAUUUUCCACAGA | UCUGUGGAAAAUUAGCUUG | Chmp | [1068-1086] |
| 353 | GAAGAUUUGUAUGGAAGAG | CUCUUCCAUACAAAUCUUC | Chmp | [1040-1058] |
| 354 | GGGCUGCUGAAGUAUCAAA | UUUGAUACUUCAGCAGCCC | Chmp | [870-888] |
| 355 | CCUCUUCUUUGUCUUCUAC | GUAGAAGACAAAGAAGAGG | Chmp, Rat, Ms | [824-842] |
| 356 | UCAACUUCUCAGUGAAUUA | UAAUUCACUGAGAAGUUGA | Chmp | [622-640] |
| 357 | UUGUUGGAUAAAAGCAGAA | UUCUGCUUUUAUCCAACAA | Chmp | [528-546] |
| 358 | ACCUCUGCCUGUUCAUCUG | CAGAUGAACAGGCAGAGGU | | [286-304] |
| 359 | AGCUGAACUUGCUCAAUCU | AGAUUGAGCAAGUUCAGCU | Chmp | [2283-2301] |
| 360 | AGGAGCUGAACUUGCUCAA | UUGAGCAAGUUCAGCUCCU | Chmp | [2280-2298] |
| 361 | GGAAACCAAAGAGACCCUG | CAGGGUCUCUUUGGUUUCC | Chmp | [2158-2176] |
| 362 | CUGUUGUGGACCCAAUUCA | UGAAUUGGGUCCACAACAG | Chmp | [1874-1892] |
| 363 | GACCUGACUAUGUCAACAU | AUGUUGACAUAGUCAGGUC | Chmp | [1702-1720] |
| 364 | UCCAUUUGCAUCAAUACUC | GAGUAUUGAUGCAAAUGGA | Chmp | [1547-1565] |
| 365 | CCUUUUGGAAGUCCAUUUG | CAAAUGGACUUCCAAAAGG | Chmp | [1473-1491] |
| 366 | CGAAAUUCUGCCCUUCAUU | AAUGAAGGGCAGAAUUUCG | Chmp | [1418-1436] |
| 367 | CCCAGUGUAUCUGCAUUAG | CUAAUGCAGAUACACUGGG | Chmp | [1269-1287] |
| 368 | CAGAGUUUACCCAGCACAA | UUGUGCUGGGUAAACUCUG | Chmp | [1015-1033] |
| 369 | GCAGAGUUUACCCAGCACA | UGUGCUGGGUAAACUCUGC | Chmp | [1014-1032] |
| 370 | UCAAAACCGGCAGAGUUUA | UAAACUCUGCCGGUUUUGA | Chmp | [1005-1023] |
| 371 | CCUGAAGGAUUUUCAAAAC | GUUUUGAAAAUCCUUCAGG | Chmp | [993-1011] |
| 372 | CUCAGAACAUUUUCAUGAA | UUCAUGAAAAUGUUCUGAG | Chmp | [968-986] |
| 373 | UCUUCUUUGUCUUCUACAU | AUGUAGAAGACAAAGAAGA | Chmp, Rat, Ms | [826-844] |
| 374 | AGCCUCUACAUAUGCAAUA | UAUUGCAUAUGUAGAGGCU | Chmp | [767-785] |
| 375 | CCUCAACUUCUCAGUGAAU | AUUCACUGAGAAGUUGAGG | Chmp | [620-638] |
| 376 | GGAGAACCAGGAGAUUGUU | AACAAUCUCCUGGUUCUCC | Chmp | [514-532] |
| 377 | AAACCAAAGAGACCCUGAA | UUCAGGGUCUCUUUGGUUU | Chmp | [2160-2178] |
| 378 | CGUCACAUUACAUGUUUAA | UUAAACAUGUAAUGUGACG | | [2136-2154] |
| 379 | GGAAAAACAGUUGGUGUUU | AAACACCAACUGUUUUUCC | | [1854-1872] |
| 380 | UGCAGAUUUACUCUGUAUG | CAUACAGAGUAAAUCUGCA | Chmp | [1655-1673] |
| 381 | UUGCAGAUUUACUCUGUAU | AUACAGAGUAAAUCUGCAA | Chmp | [1654-1672] |
| 382 | GUCCCAGUGUAUCUGCAUU | AAUGCAGAUACACUGGGAC | Chmp | [1267-1285] |
| 383 | CAAGACCUGGUCAGUAUAU | AUAUACUGACCAGGUCUUG | Chmp | [1237-1255] |
| 384 | GUAUAACCAAGGGCCAGAG | CUCUGGCCCUUGGUUAUAC | Chmp | [347-365] |
| 385 | CUGUGCCGAAAGACUUUAC | GUAAAGUCUUUCGGCACAG | Chmp | [1121-1139] |
| 386 | UGGCUUUGGAUUUCUGGAC | GUCCAGAAAUCCAAAGCCA | Chmp | [1089-1107] |
| 387 | GCCCAGAUUCCAAGCUAAU | AUUAGCUUGGAAUCUGGGC | Chmp | [1058-1076] |
| 388 | AGCCCAGAUUCCAAGCUAA | UUAGCUUGGAAUCUGGGCU | Chmp | [1057-1075] |
| 389 | AGCACAAAUUUGUGAAGAU | AUCUUCACAAAUUUGUGCU | Chmp | [1027-1045] |
| 390 | CCCAGCACAAAUUUGUGAA | UUCACAAAUUUGUGCUGGG | Chmp | [1024-1042] |
| 391 | CUCAGUGAAUUACAGUGAA | UUCACUGUAAUUCACUGAG | | [629-647] |
| 392 | GCAGGAGAACCAGGAGAUU | AAUCUCCUGGUUCUCCUGC | Chmp | [511-529] |
| 393 | GAACACUCUUGGCUUACCU | AGGUAAGCCAAGAGUGUUC | Chmp | [469-487] |
| 394 | GGAGCUGAACUUGCUCAAU | AUUGAGCAAGUUCAGCUCC | Chmp | [2281-2299] |
| 395 | UGGAAACCAAAGAGACCCU | AGGGUCUCUUUGGUUUCCA | Chmp | [2157-2175] |
| 396 | CCUCAGCAUCUGUUCUUAA | UUAAGAACAGAUGCUGAGG | Chmp | [415-433] |
| 397 | CCAGCUGUACCUCAGUCAA | UUGACUGAGGUACAGCUGG | Chmp, Rat, Ms | [1721-1739] |
| 398 | GCAGAUUUACUCUGUAUGU | ACAUACAGAGUAAAUCUGC | Chmp | [1656-1674] |
| 399 | UCCGUUGGUUUGCAGAUUU | AAAUCUGCAAACCAACGGA | Chmp | [1645-1663] |
| 400 | UGAUGGUCCUUUUGGAAGU | ACUUCCAAAAGGACCAUCA | Chmp | [1466-1484] |
| 401 | CUGAAACCAAAGCAACAUU | AAUGUUGCUUUGGUUUCAG | Chmp, Rat, Ms | [1321-1339] |
| 402 | GUGUCCAACUGAAACCAAA | UUUGGUUUCAGUUGGACAC | Chmp | [1313-1331] |
| 403 | CUUUGGAUUUCUGGACCUU | AAGGUCCAGAAAUCCAAAG | Chmp | [1092-1110] |
| 404 | GUGAAGAUUUGUAUGGAAG | CUUCCAUACAAAUCUUCAC | Chmp | [1038-1056] |
| 405 | GCACAAAUUUGUGAAGAUU | AAUCUUCACAAAUUUGUGC | Chmp | [1028-1046] |
| 406 | UCAGAACAUUUUCAUGAAC | GUUCAUGAAAAUGUUCUGA | Chmp | [969-987] |
| 407 | CUCUCAGAAUAUUUCCUUA | UAAGGAAAUAUUCUGAGAG | Chmp | [938-956] |
| 408 | CUGCUUUUCUGGAAAACCU | AGGUUUUCCAGAAAAGCAG | Chmp, Rat | [321-339] |
| 409 | GGCUGCUGAAGUAUCAAAC | GUUUGAUACUUCAGCAGCC | Chmp | [871-889] |
| 410 | GUCCUGCUUUUCUGGAAAA | UUUUCCAGAAAAGCAGGAC | Chmp, Rat | [318-336] |
| 411 | CCUCUACAUAUGCAAUAAG | CUUAUUGCAUAUGUAGAGG | Chmp | [769-787] |
| 412 | AUCUGGUGAAUGCCCUCAA | UUGAGGGCAUUCACCAGAU | Chmp | [607-625] |
| 413 | CGAGGAUCACAGAAGGUUC | GAACCUUCUGUGAUCCUCG | Chmp | [489-507] |
| 414 | CGAACACUCUUGGCUUACC | GGUAAGCCAAGAGUGUUCG | Chmp | [468-486] |
| 415 | GUUUUUGGUUGAACAAAUG | CAUUUGUUCAACCAAAAAC | Chmp | [2332-2350] |
| 416 | UGAACUUGCUCAAUCUAAG | CUUAGAUUGAGCAAGUUCA | Chmp | [2286-2304] |
| 417 | UCACUUUUCAGUUCUCAAA | UUUGAGAACUGAAAAGUGA | Chmp | [2198-2216] |
| 418 | ACCAAAGAGACCCUGAAGA | UCUUCAGGGUCUCUUUGGU | Chmp | [2162-2180] |
| 419 | ACCGUCACAUUACAUGUUU | AAACAUGUAAUGUGACGGU | | [2134-2152] |
| 420 | GCGGAAUCAAUCAGCUGUG | CACAGCUGAUUGAUUCCGC | Chmp | [2043-2061] |
| 421 | UGAAACUCAGCGGAAUCAA | UUGAUUCCGCUGAGUUUCA | Chmp | [2034-2052] |
| 422 | UUAAACACCUCUGCCUGUU | AACAGGCAGAGGUGUUUAA | | [280-298] |
| 423 | CUCAGCAUCUGUUCUUAAC | GUUAAGAACAGAUGCUGAG | Chmp | [416-434] |
| 424 | AGAGAACAGACCUGACUAU | AUAGUCAGGUCUGUUCUCU | Chmp | [1694-1712] |
| 425 | CAGAUUUACUCUGUAUGUU | AACAUACAGAGUAAAUCUG | Chmp | [1657-1675] |
| 426 | GUCCUUCCGUUGGUUUGCA | UGCAAACCAACGGAAGGAC | Chmp | [1640-1658] |
| 427 | AGCUUAGAAGACUAUACUU | AAGUAUAGUCUUCUAAGCU | Chmp | [1597-1615] |
| 428 | CCCUGUUGGAUGACUGGAA | UUCCAGUCAUCCAACAGGG | | [1570-1588] |
| 429 | GUCCUUUUGGAAGUCCAUU | AAUGGACUUCCAAAAGGAC | Chmp | [1471-1489] |
| 430 | ACUACCUCCACCAGAUGUU | AACAUCUGGUGGAGGUAGU | Chmp | [370-388] |
| 431 | CAGAGUAUCACUACCUCCA | UGGAGGUAGUGAUACUCUG | Chmp | [361-379] |
| 432 | GGACCUUUGUGCCUGUACU | AGUACAGGCACAAAGGUCC | Chmp | [1104-1122] |
| 433 | CUGGACCUUUGUGCCUGUA | UACAGGCACAAAGGUCCAG | Chmp | [1102-1120] |
| 434 | AAGCUAAUUUUCCACAGAC | GUCUGUGGAAAAUUAGCUU | Chmp | [1069-1087] |
| 435 | UCCAAGCUAAUUUUCCACA | UGUGGAAAAUUAGCUUGGA | Chmp | [1066-1084] |
| 436 | CCCAGAUUCCAAGCUAAUU | AAUUAGCUUGGAAUCUGGG | Chmp | [1059-1077] |
| 437 | GGAAGAGCCCAGAUUCCAA | UUGGAAUCUGGGCUCUUCC | Chmp | [1052-1070] |
| 438 | UGAAGAUUUGUAUGGAAGA | UCUUCCAUACAAAUCUUCA | Chmp | [1039-1057] |
| 439 | AGAGUUUACCCAGCACAAA | UUUGUGCUGGGUAAACUCU | Chmp | [1016-1034] |
| 440 | AUAUUUCCUUACCAGAGUA | UACUCUGGUAAGGAAAUAU | Chmp | [946-964] |
| 441 | GCUGCUGACGUUGCAUGUU | AACAUGCAACGUCAGCAGC | Chmp | [845-863] |
| 442 | CUGGUAUACUCAUAACCUC | GAGGUUAUGAGUAUACCAG | Chmp | [809-827] |
| 443 | CUCUACAUAUGCAAUAAGA | UCUUAUUGCAUAUGUAGAG | Chmp | [770-788] |
| 444 | UGCAGCAAGAUACCGAGAU | AUCUCGGUAUCUUGCUGCA | Chmp | [665-683] |
| 445 | UCAGUGAAUUACAGUGAAG | CUUCACUGUAAUUCACUGA | | [630-648] |
| 446 | CUGAACUUGCUCAAUCUAA | UUAGAUUGAGCAAGUUCAG | Chmp | [2285-2303] |
| 447 | GCUGAACUUGCUCAAUCUA | UAGAUUGAGCAAGUUCAGC | Chmp | [2284-2302] |
| 448 | UGUUUAAUCUGGAAACCAA | UUGGUUUCCAGAUUAAACA | Chmp | [2148-2166] |
| 449 | AACUGAGUAACCAGAACAA | UUGUUCUGGUUACUCAGUU | | [1912-1930] |
| 450 | CUCUUCAUAAACUGAGUAA | UUACUCAGUUUAUGAAGAG | Chmp | [1903-1921] |
| 451 | ACCUGACUAUGUCAACAUC | GAUGUUGACAUAGUCAGGU | Chmp | [1703-1721] |
| 452 | UCCUUCCGUUGGUUUGCAG | CUGCAAACCAACGGAAGGA | Chmp | [1641-1659] |
| 453 | GAUAUCCAGUCCUUCCGUU | AACGGAAGGACUGGAUAUC | Chmp | [1632-1650] |
| 454 | UGACUGGAAACCAUACAAG | CUUGUAUGGUUUCCAGUCA | Chmp, Rat, Ms | [1580-1598] |
| 455 | CUAGAAAUUAUCCCAAGCU | AGCUUGGGAUAAUUUCUAG | Chmp | [1441-1459] |
| 456 | UCCCAGUGUAUCUGCAUUA | UAAUGCAGAUACACUGGGA | Chmp | [1268-1286] |
| 457 | AAGACCUGGUCAGUAUAUU | AAUAUACUGACCAGGUCUU | Chmp | [1238-1256] |
| 458 | GGUCAUAAGUCAUCCCUCA | UGAGGGAUGACUUAUGACC | Chmp | [1178-1196] |
| 459 | UCGGUCAUAAGUCAUCCCU | AGGGAUGACUUAUGACCGA | Chmp | [1176-1194] |
| 460 | CAGUCACCAUCAUUUCGGU | ACCGAAAUGAUGGUGACUG | Chmp | [1162-1180] |
| 461 | UGCCUGUACUGUGCCGAAA | UUUCGGCACAGUACAGGCA | Chmp | [1113-1131] |
| 462 | AGAGCCCAGAUUCCAAGCU | AGCUUGGAAUCUGGGCUCU | Chmp | [1055-1073] |
| 463 | AGGAUUUUCAAAACCGGCA | UGCCGGUUUUGAAAAUCCU | Chmp | [998-1016] |
| 464 | AGAAAACUUCUCUUCACAA | UUGUGAAGAGAAGUUUUCU | Chmp | [693-711] |
| 465 | UGAAUGCCCUCAACUUCUC | GAGAAGUUGAGGGCAUUCA | Chmp | [613-631] |
| 466 | UGGUGAAUGCCCUCAACUU | AAGUUGAGGGCAUUCACCA | Chmp, Ms | [610-628] |
| 467 | UCAUCUGGCUCUCCAUGAA | UUCAUGGAGAGCCAGAUGA | Chmp | [298-316] |
| 468 | AGCAGGAGAACCAGGAGAU | AUCUCCUGGUUCUCCUGCU | Chmp | [510-528] |
| 469 | GAGCUGAACUUGCUCAAUC | GAUUGAGCAAGUUCAGCUC | Chmp | [2282-2300] |
| 470 | GGAUUCAAGAACUCCCUAG | CUAGGGAGUUCUUGAAUCC | Chmp | [2259-2277] |
| 471 | GUGGAUUCAAGAACUCCCU | AGGGAGUUCUUGAAUCCAC | Chmp | [2257-2275] |
| 472 | UGAUUCACUUUUCAGUUCU | AGAACUGAAAAGUGAAUCA | Chmp | [2194-2212] |
| 473 | GACCGUCACAUUACAUGUU | AACAUGUAAUGUGACGGUC | | [2133-2151] |
| 474 | UCAGCUGUGUUAUGCCAAA | UUUGGCAUAACACAGCUGA | Chmp | [2053-2071] |
| 475 | GUCUUUCAGCUGAAAACUU | AAGUUUUCAGCUGAAAGAC | Chmp | [1964-1982]+ |
| 476 | CAGCUGUACCUCAGUCAAA | UUUGACUGAGGUACAGCUG | Chmp, Rat, Ms | [1722-1740] |
| 477 | AUGUCAACAUCCAGCUGUA | UACAGCUGGAUGUUGACAU | Chmp | [1711-1729] |
| 478 | AGACCUGACUAUGUCAACA | UGUUGACAUAGUCAGGUCU | Chmp | [1701-1719] |
| 479 | CCAGUCCUUCCGUUGGUUU | AAACCAACGGAAGGACUGG | Chmp | [1637-1655] |
| 480 | UCAACACCCUGUUGGAUGA | UCAUCCAACAGGGUGUUGA | | [1564-1582] |
| 481 | GGAGUAACUCCAUUUGCAU | AUGCAAAUGGAGUUACUCC | Chmp | [1539-1557] |
| 482 | CAUUGGAGUAACUCCAUUU | AAAUGGAGUUACUCCAAUG | Chmp | [1535-1553] |
| 483 | GGGUUAAACACCUCUGCCU | AGGCAGAGGUGUUUAACCC | Ms | [277-295] |
| 484 | UGGAAGUCCAUUUGAGGAA | UUCCUCAAAUGGACUUCCA | Chmp | [1478-1496] |
| 485 | AUCACUACCUCCACCAGAU | AUCUGGUGGAGGUAGUGAU | Chmp | [367-385] |
| 486 | ACUGAAACCAAAGCAACAU | AUGUUGCUUUGGUUUCAGU | Chmp, Rat, Ms | [1320-1338] |
| 487 | UCACAAUGUGUCCAACUGA | UCAGUUGGACACAUUGUGA | Chmp | [1306-1324] |
| 488 | GUCAGUAUAUUACUCUACA | UGUAGAGUAAUAUACUGAC | Chmp | [1246-1264] |
| 489 | UCCGAAUGGUCAAAGAAAA | UUUUCUUUGACCAUUCGGA | Chmp | [1210-1228] |
| 490 | CGGUCAUAAGUCAUCCCUC | GAGGGAUGACUUAUGACCG | Chmp | [1177-1195] |
| 491 | CAGCACAAAUUUGUGAAGA | UCUUCACAAAUUUGUGCUG | Chmp | [1026-1044] |
| 492 | UGAAGGAUUUUCAAAACCG | CGGUUUUGAAAAUCCUUCA | Chmp | [995-1013] |
| 493 | CUGAAGGAUUUUCAAAACC | GGUUUUGAAAAUCCUUCAG | Chmp | [994-1012] |
| 494 | CCUUACCAGAGUAUUUCUC | GAGAAAUACUCUGGUAAGG | Chmp | [952-970] |
| 495 | CUCAGAAUAUUUCCUUACC | GGUAAGGAAAUAUUCUGAG | Chmp | [940-958] |
| 496 | GCUGCUGAAGUAUCAAACU | AGUUUGAUACUUCAGCAGC | Chmp | [872-890] |
| 497 | GGUAUACUCAUAACCUCUU | AAGAGGUUAUGAGUAUACC | Chmp | [811-829] |
| 498 | GCUCAAUCUAAGGCUGAUU | AAUCAGCCUUAGAUUGAGC | Chmp | [2293-2311] |
| 499 | GAUGUGAUGAUUCACUUUU | AAAAGUGAAUCAUCACAUC | Chmp | [2187-2205] |
| 500 | UGUGGACCCAAUUCACUAU | AUAGUGAAUUGGGUCCACA | Chmp | [1878-1896] |
| 501 | UCUGUAUGUUGCAUAACAA | UUGUUAUGCAACAUACAGA | Chmp | [1666-1684] |
| 502 | GGCAUUGGAGUAACUCCAU | AUGGAGUUACUCCAAUGCC | Chmp | [1533-1551] |
| 503 | GGUCCUUUUGGAAGUCCAU | AUGGACUUCCAAAAGGACC | Chmp | [1470-1488] |
| 504 | UGCAUUAGAAAAUCAUCCA | UGGAUGAUUUUCUAAUGCA | Chmp | [1280-1298] |
| 505 | CCAGUGUAUCUGCAUUAGA | UCUAAUGCAGAUACACUGG | Chmp | [1270-1288] |
| 506 | CUACAUUGUCCCAGUGUAU | AUACACUGGGACAAUGUAG | Chmp, Rat | [1260-1278] |
| 507 | GGUCAGUAUAUUACUCUAC | GUAGAGUAAUAUACUGACC | Chmp | [1245-1263] |
| 508 | CAGGUAUAUCCGGAGCAAU | AUUGCUCCGGAUAUACCUG | Chmp | [1139-1157] |
| 509 | GCUUUGGAUUUCUGGACCU | AGGUCCAGAAAUCCAAAGC | Chmp | [1091-1109] |
| 510 | CCAGCACAAAUUUGUGAAG | CUUCACAAAUUUGUGCUGG | Chmp | [1025-1043] |
| 511 | GCUCUCAGAAUAUUUCCUU | AAGGAAAUAUUCUGAGAGC | Chmp | [937-955] |
| 512 | UGCUGACGUUGCAUGUUUC | GAAACAUGCAACGUCAGCA | Chmp | [847-865] |
| 513 | ACAGCCUCUACAUAUGCAA | UUGCAUAUGUAGAGGCUGU | Chmp | [765-783] |
| 514 | UCCUAGAAAACUUCUCUUC | GAAGAGAAGUUUUCUAGGA | Chmp | [689-707] |
| 515 | GAACUGAAUGCAGCAAGAU | AUCUUGCUGCAUUCAGUUC | Chmp, Ms | [657-675] |
| 516 | CUAUCUGUAUUUUCUCAGG | CCUGAGAAAAUACAGAUAG | Chmp, Ms | [571-589] |
| 517 | UGCUCAAUCUAAGGCUGAU | AUCAGCCUUAGAUUGAGCA | Chmp | [2292-2310] |
| 518 | UCCCUAGUGAGGAGCUGAA | UUCAGCUCCUCACUAGGGA | Chmp | [2271-2289] |
| 519 | UGAUGUGAUGAUUCACUUU | AAAGUGAAUCAUCACAUCA | Chmp | [2186-2204] |
| 520 | GGCAAGAUGACCGUCACAU | AUGUGACGGUCAUCUUGCC | | [2125-2143] |
| 521 | AGCUGUGUUAUGCCAAAGA | UCUUUGGCAUAACACAGCU | Chmp | [2055-2073] |
| 522 | UGCACUGAAUUCAAGACUG | CAGUCUUGAAUUCAGUGCA | Chmp | [1778-1796] |
| 523 | AGCCUCAGCAUCUGUUCUU | AAGAACAGAUGCUGAGGCU | Chmp | [413-431] |
| 524 | AGCUGUACCUCAGUCAAAC | GUUUGACUGAGGUACAGCU | Chmp, Rat, Ms | [1723-1741] |
| 525 | ACAGACCUGACUAUGUCAA | UUGACAUAGUCAGGUCUGU | Chmp | [1699-1717] |
| 526 | UCCAGUCCUUCCGUUGGUU | AACCAACGGAAGGACUGGA | Chmp | [1636-1654] |
| 527 | CAAUCUAGAAAUUAUCCCA | UGGGAUAAUUUCUAGAUUG | Chmp | [1437-1455] |
| 528 | UCCGAAAUUCUGCCCUUCA | UGAAGGGCAGAAUUUCGGA | Chmp | [1416-1434] |
| 529 | CUCCGAAAUUCUGCCCUUC | GAAGGGCAGAAUUUCGGAG | Chmp | [1415-1433] |
| 530 | AGAUUUACUACUGCCUCCA | UGGAGGCAGUAGUAAAUCU | Chmp, Rat | [1385-1403] |
| 531 | CGAGAUUUACUACUGCCUC | GAGGCAGUAGUAAAUCUCG | Chmp, Rat | [1383-1401] |
| 532 | UCUACAUUGUCCCAGUGUA | UACACUGGGACAAUGUAGA | Chmp, Rat | [1259-1277] |
| 533 | UCAUGGAAAUCCGAAUGGU | ACCAUUCGGAUUUCCAUGA | Chmp | [1201-1219] |
| 534 | UCCCUCAGAUGUCAUGGAA | UUCCAUGACAUCUGAGGGA | Chmp, Rat | [1190-1208] |
| 535 | ACCAUCAUUUCGGUCAUAA | UUAUGACCGAAAUGAUGGU | Chmp | [1167-1185] |
| 536 | UCCGGAGCAAUAAGCCAGU | ACUGGCUUAUUGCUCCGGA | Chmp | [1147-1165] |
| 537 | ACAGGUAUAUCCGGAGCAA | UUGCUCCGGAUAUACCUGU | Chmp | [1138-1156] |
| 538 | CCACUCAGUCUUUGACCCU | AGGGUCAAAGACUGAGUGG | | [109-127] |
| 539 | GAACCUUUCCCUGAAGGAU | AUCCUUCAGGGAAAGGUUC | Chmp | [984-1002] |
| 540 | CAGAACAUUUUCAUGAACC | GGUUCAUGAAAAUGUUCUG | Chmp | [970-988] |
| 541 | UCUCAGAAUAUUUCCUUAC | GUAAGGAAAUAUUCUGAGA | Chmp | [939-957] |
| 542 | AUCCUAGAAAACUUCUCUU | AAGAGAAGUUUUCUAGGAU | Chmp | [688-706] |
| 543 | GGCUCUCCAUGAAUGUCCU | AGGACAUUCAUGGAGAGCC | Chmp | [304-322] |
| 544 | UGCCGAACACUCUUGGCUU | AAGCCAAGAGUGUUCGGCA | Chmp | [465-483] |
| 545 | CAAAUGCAAGAUUGAACAA | UUGUUCAAUCUUGCAUUUG | Chmp | [2345-2363] |
| 546 | UUGAUGUGAUGAUUCACUU | AAGUGAAUCAUCACAUCAA | Chmp | [2185-2203] |
| 547 | UCAGCGGAAUCAAUCAGCU | AGCUGAUUGAUUCCGCUGA | Chmp | [2040-2058] |
| 548 | UGAGUAACCAGAACAACUC | GAGUUGUUCUGGUUACUCA | | [1915-1933] |
| 549 | UCCAGCUGUACCUCAGUCA | UGACUGAGGUACAGCUGGA | Chmp, Rat, | [1720-1738] |
| | | | Ms | |
| 550 | GGCAAGAGAACAGACCUGA | UCAGGUCUGUUCUCUUGCC | Chmp | [1690-1708] |
| 551 | UUCCGUUGGUUUGCAGAUU | AAUCUGCAAACCAACGGAA | Chmp | [1644-1662] |
| 552 | GGAUGACUGGAAACCAUAC | GUAUGGUUUCCAGUCAUCC | Chmp, Rat, Ms | [1577-1595] |
| 553 | ACACCCUGUUGGAUGACUG | CAGUCAUCCAACAGGGUGU | | [1567-1585] |
| 554 | GUCCAUUUGAGGAAUCACU | AGUGAUUCCUCAAAUGGAC | Chmp | [1483-1501] |
| 555 | UGGUCCUUUUGGAAGUCCA | UGGACUUCCAAAAGGACCA | Chmp | [1469-1487] |
| 556 | AGACCUGGUCAGUAUAUUA | UAAUAUACUGACCAGGUCU | Chmp | [1239-1257] |
| 557 | CCGAACCAGCUCUCAGAAU | AUUCUGAGAGCUGGUUCGG | Chmp | [929-947] |
| 558 | UCAGUCUUAACCGAACCAG | CUGGUUCGGUUAAGACUGA | Chmp | [919-937] |
| 559 | GGCUGCAUCAGUCUUAACC | GGUUAAGACUGAUGCAGCC | Chmp | [912-930] |
| 560 | UCCUGCUUUUCUGGAAAAC | GUUUUCCAGAAAAGCAGGA | Chmp, Rat | [319-337] |
| 561 | UGGUGGUGGUGCUAUUCCU | AGGAAUAGCACCACCACCA | Chmp | [739-757] |
| 562 | CCUAGAAAACUUCUCUUCA | UGAAGAGAAGUUUUCUAGG | Chmp | [690-708] |
| 563 | CCGAGAUGAGGAUCCUAGA | UCUAGGAUCCUCAUCUCGG | Chmp | [677-695] |
| 564 | AUGUGAUGAUUCACUUUUC | GAAAAGUGAAUCAUCACAU | Chmp | [2188-2206] |
| 565 | AGCGGAAUCAAUCAGCUGU | ACAGCUGAUUGAUUCCGCU | Chmp | [2042-2060] |
| 566 | AGAGUCUUUCAGCUGAAAA | UUUUCAGCUGAAAGACUCU | Chmp | [1961-1979]+ |
| 567 | ACAGUUGGUGUUUUCUGUU | AACAGAAAACACCAACUGU | Chmp | [1860-1878] |
| 568 | GUCCUCGGUGGAAACUUUU | AAAAGUUUCCACCGAGGAC | Chmp, Ms | [1807-1825] |
| 569 | CAAGAGAACAGACCUGACU | AGUCAGGUCUGUUCUCUUG | Chmp | [1692-1710] |
| 570 | GGUUUGCAGAUUUACUCUG | CAGAGUAAAUCUGCAAACC | Chmp, Ms | [1651-1669] |
| 571 | UGGAUGACUGGAAACCAUA | UAUGGUUUCCAGUCAUCCA | Chmp, Rat, Ms | [1576-1594] |
| 572 | UGGAGUAACUCCAUUUGCA | UGCAAAUGGAGUUACUCCA | Chmp | [1538-1556] |
| 573 | GGAAUCACUGAACUAUGAG | CUCAUAGUUCAGUGAUUCC | Chmp | [1493-1511] |
| 574 | AGGUAUAUCCGGAGCAAUA | UAUUGCUCCGGAUAUACCU | Chmp | [1140-1158] |
| 575 | CCUUUCCCUGAAGGAUUUU | AAAAUCCUUCAGGGAAAGG | Chmp | [987-1005] |
| 576 | UCAGAAUAUUUCCUUACCA | UGGUAAGGAAAUAUUCUGA | Chmp | [941-959] |
| 577 | UGCUUUUCUGGAAAACCUU | AAGGUUUUCCAGAAAAGCA | Chmp, Rat | [322-340] |
| 578 | UGCAUCAGUCUUAACCGAA | UUCGGUUAAGACUGAUGCA | Chmp | [915-933] |
| 579 | CUGCAUCAGUCUUAACCGA | UCGGUUAAGACUGAUGCAG | Chmp | [914-932] |
| 580 | ACAUGCUGCUGACGUUGCA | UGCAACGUCAGCAGCAUGU | Chmp | [841-859] |
| 581 | ACCGAGAUGAGGAUCCUAG | CUAGGAUCCUCAUCUCGGU | Chmp | [676-694] |
| 582 | CUGUUCAUCUGGCUCUCCA | UGGAGAGCCAGAUGAACAG | | [294-312] |
| 583 | AAGGUUCCAAGCAGGAGAA | UUCUCCUGCUUGGAACCUU | Chmp | [501-519] |
| 584 | CUCAAUCUAAGGCUGAUUG | CAAUCAGCCUUAGAUUGAG | Chmp | [2294-2312] |
| 585 | UGGAUUCAAGAACUCCCUA | UAGGGAGUUCUUGAAUCCA | Chmp | [2258-2276] |
| 586 | ACUGUUAGAUGCACACUGU | ACAGUGUGCAUCUAACAGU | Chmp | [2227-2245] |
| 587 | CAGCUGUGUUAUGCCAAAG | CUUUGGCAUAACACAGCUG | Chmp | [2054-2072] |
| 588 | GCCAUGAAGCAGGACUCUA | UAGAGUCCUGCUUCAUGGC | Chmp | [1985-2003] |
| 589 | UCUUUCAGCUGAAAACUUU | AAAGUUUUCAGCUGAAAGA | Chmp | [1965-1983]+ |
| 590 | GAGUCUUUCAGCUGAAAAC | GUUUUCAGCUGAAAGACUC | Chmp | [1962-1980]+ |
| 591 | AGACUGUUUAUAGGACGUC | GACGUCCUAUAAACAGUCU | | [1791-1809] |
| 592 | CUGACUAUGUCAACAUCCA | UGGAUGUUGACAUAGUCAG | Chmp | [1705-1723] |
| 593 | UGGCAAGAGAACAGACCUG | CAGGUCUGUUCUCUUGCCA | Chmp | [1689-1707] |
| 594 | UCAUCCCUCAGAUGUCAUG | CAUGACAUCUGAGGGAUGA | Chmp, Rat | [1187-1205] |
| 595 | GAACAUUUUCAUGAACCUU | AAGGUUCAUGAAAAUGUUC | Chmp | [972-990] |
| 596 | CAGCCUCUACAUAUGCAAU | AUUGCAUAUGUAGAGGCUG | Chmp | [766-784] |
| 597 | CACAGCCUCUACAUAUGCA | UGCAUAUGUAGAGGCUGUG | Chmp | [764-782] |
| 598 | AGGAGAACCAGGAGAUUGU | ACAAUCUCCUGGUUCUCCU | Chmp | [513-531] |
| 599 | GAAGGUUCCAAGCAGGAGA | UCUCCUGCUUGGAACCUUC | Chmp | [500-518] |
| 600 | CUAAGACUUUGAAACUCAG | CUGAGUUUCAAAGUCUUAG | Chmp | [2025-2043] |
| 601 | AAGAGUCUUUCAGCUGAAA | UUUCAGCUGAAAGACUCUU | Chmp | [1960-1978]+ |
| 602 | GAAAAACAGUUGGUGUUUU | AAAACACCAACUGUUUUUC | | [1855-1873] |
| 603 | GCAAGAGAACAGACCUGAC | GUCAGGUCUGUUCUCUUGC | Chmp | [1691-1709] |
| 604 | UGAACUAUGAGGUCAGCCU | AGGCUGACCUCAUAGUUCA | Chmp | [1501-1519] |
| 605 | CACUGAACUAUGAGGUCAG | CUGACCUCAUAGUUCAGUG | Chmp | [1498-1516] |
| 606 | UCACUGAACUAUGAGGUCA | UGACCUCAUAGUUCAGUGA | Chmp | [1497-1515] |
| 607 | UGGAAAACCUUCUUGCUGU | ACAGCAAGAAGGUUUUCCA | Chmp | [330-348] |
| 608 | CAGCAAGAUACCGAGAUGA | UCAUCUCGGUAUCUUGCUG | Chmp | [667-685] |
| 609 | UCAAUCUAAGGCUGAUUGU | ACAAUCAGCCUUAGAUUGA | Chmp | [2295-2313] |
| 610 | AGAACUCCCUAGUGAGGAG | CUCCUCACUAGGGAGUUCU | Chmp | [2266-2284] |
| 611 | CACUUUUCAGUUCUCAAAU | AUUUGAGAACUGAAAAGUG | Chmp | [2199-2217] |
| 612 | UGAUGAUUCACUUUUCAGU | ACUGAAAAGUGAAUCAUCA | Chmp | [2191-2209] |
| 613 | AGCUGAAAACUUUUGCCAU | AUGGCAAAAGUUUUCAGCU | Chmp | [1971-1989]+ |
| 614 | CAGCUGAAAACUUUUGCCA | UGGCAAAAGUUUUCAGCUG | Chmp | [1970-1988]+ |
| 615 | AGACUCUUCAUAAACUGAG | CUCAGUUUAUGAAGAGUCU | Chmp | [1900-1918] |
| 616 | CUGUACCUCAGUCAAACAG | CUGUUUGACUGAGGUACAG | Chmp, Rat, Ms | [1725-1743] |
| 617 | ACAUCCAGCUGUACCUCAG | CUGAGGUACAGCUGGAUGU | Chmp, Rat, Ms | [1717-1735] |
| 618 | UCAACAUCCAGCUGUACCU | AGGUACAGCUGGAUGUUGA | Chmp | [1714-1732] |
| 619 | AUGACUGGAAACCAUACAA | UUGUAUGGUUUCCAGUCAU | Chmp, Rat, Ms | [1579-1597] |
| 620 | AGGCAUUGGAGUAACUCCA | UGGAGUUACUCCAAUGCCU | Chmp | [1532-1550] |
| 621 | ACCCAGCACAAAUUUGUGA | UCACAAAUUUGUGCUGGGU | Chmp | [1023-1041] |
| 622 | ACCGAACCAGCUCUCAGAA | UUCUGAGAGCUGGUUCGGU | Chmp | [928-946] |
| 623 | UGUCCUGCUUUUCUGGAAA | UUUCCAGAAAAGCAGGACA | Chmp, Rat | [317-335] |
| 624 | CUGUUAGAUGCACACUGUU | AACAGUGUGCAUCUAACAG | Chmp, Rat | [2228-2246] |
| 625 | GAAAACUGUUAGAUGCACA | UGUGCAUCUAACAGUUUUC | Chmp | [2223-2241] |
| 626 | UGUGAUGAUUCACUUUUCA | UGAAAAGUGAAUCAUCACA | Chmp | [2189-2207] |
| 627 | ACUCUUCAUAAACUGAGUA | UACUCAGUUUAUGAAGAGU | Chmp | [1902-1920] |
| 628 | GACUCUUCAUAAACUGAGU | ACUCAGUUUAUGAAGAGUC | Chmp | [1901-1919] |
| 629 | CAGAGCCUCAGCAUCUGUU | AACAGAUGCUGAGGCUCUG | Chmp | [410-428] |
| 630 | CUAAGCAGAGCCUCAGCAU | AUGCUGAGGCUCUGCUUAG | Chmp | [405-423] |
| 631 | UUGGAUGACUGGAAACCAU | AUGGUUUCCAGUCAUCCAA | Chmp | [1575-1593] |
| 632 | ACAUUUUCAUGAACCUUUC | GAAAGGUUCAUGAAAAUGU | Chmp | [974-992] |
| 633 | AGAACAUUUUCAUGAACCU | AGGUUCAUGAAAAUGUUCU | Chmp | [971-989] |
| 634 | GAUUCACUUUUCAGUUCUC | GAGAACUGAAAAGUGAAUC | Chmp | [2195-2213] |
| 635 | UGGAAAUCCGAAUGGUCAA | UUGACCAUUCGGAUUUCCA | Chmp | [1204-1222] |
| 636 | UCCCUGAAGGAUUUUCAAA | UUUGAAAAUCCUUCAGGGA | Chmp | [991-1009] |
| 637 | GGAUCACAGAAGGUUCCAA | UUGGAACCUUCUGUGAUCC | Chmp | [492-510] |
| 638 | CAGAAUAUUUCCUUACCAG | CUGGUAAGGAAAUAUUCUG | Chmp | [942-960] |
| 639 | AAAAACAGUUGGUGUUUUC | GAAAACACCAACUGUUUUU | | [1856-1874] |
| 640 | GGCUUUGGAUUUCUGGACC | GGUCCAGAAAUCCAAAGCC | Chmp | [1090-1108] |
| 641 | GUCUUCUACAUGCUGCUGA | UCAGCAGCAUGUAGAAGAC | Chmp | [834-852] |
| 642 | GUUGAACUGAAUGCAGCAA | UUGCUGCAUUCAGUUCAAC | Chmp | [654-672] |
| 643 | AUGUCCUGCUUUUCUGGAA | UUCCAGAAAAGCAGGACAU | Chmp, Rat | [316-334] |
| 644 | UGCCUGUUCAUCUGGCUCU | AGAGCCAGAUGAACAGGCA | | [291-309] |

TABLE A2
NOX4 - NADPH oxidase 4 (19-mers)

| | | | | Human-20149638 |
|---|---|---|---|---|
| No. | Sense siRNA | AntiSense siRNA | Other Sp | ORF: 240-1976 |
| 1 | GGACAAGAUUUGAAUACAA | UUGUAUUCAAAUCUUGUCC | | [1939-1957] |
| 2 | GAAGAUAAUUGGAGAAAAA | UUUUUCUCCAAUUAUCUUC | Rat, Ms, GP, Chmp | [1754-1772] |
| 3 | CCAGGAGAUUGUUGGAUAA | UUAUCCAACAAUCUCCUGG | Chmp | [520-538] |
| 4 | GAAGCAGGACUCUAAAGAA | UUCUUUAGAGUCCUGCUUC | Chmp | [1990-2008] |
| 5 | CAUGAAGCAGGACUCUAAA | UUUAGAGUCCUGCUUCAUG | Chmp | [1987-2005] |
| 6 | CAGUGUAUCUGCAUUAGAA | UUCUAAUGCAGAUACACUG | Chmp | [1271-1289] |
| 7 | GCUGAAGUAUCAAACUAAU | AUUAGUUUGAUACUUCAGC | Chmp | [875-893] |
| 8 | GGUUCAUCUUAAAAUAGUA | UACUAUUUUAAGAUGAACC | Chmp | [1343-1361] |
| 9 | CCAUGAAGCAGGACUCUAA | UUAGAGUCCUGCUUCAUGG | Chmp | [1986-2004] |
| 10 | GGUCAAAGAAAAUUUUAAA | UUUAAAAUUUUCUUUGACC | GP, Chmp | [1217-1235] |
| 11 | CCAAAGAGACCCUGAAGAA | UUCUUCAGGGUCUCUUUGG | Chmp | [2163-2181] |
| 12 | GUUUAAUCUGGAAACCAAA | UUUGGUUUCCAGAUUAAAC | Chmp | [2149-2167] |
| 13 | GAAUGAGUGCAAUUUCUAA | UUAGAAAUUGCACUCAUUC | Chmp | [2010-2028] |
| 14 | GAUGAAAUAGCAAAAUAUA | UAUAUUUUGCUAUUUCAUC | Chmp | [1830-1848] |
| 15 | AAUGCAAGAUUGAACAAAA | UUUUGUUCAAUCUUGCAUU | Chmp | [2347-2365] |
| 16 | CGUCCUCGGUGGAAACUUU | AAAGUUUCCACCGAGGACG | Ms, Chmp | [1806-1824] |
| 17 | AAACCUUCUUGCUGUAUAA | UUAUACAGCAAGAAGGUUU | Chmp | [334-352] |
| 18 | GAAACUUUUGUUUGAUGAA | UUCAUCAAACAAAAGUUUC | Chmp | [1817-1835] |
| 19 | GCAGGACUCUAAAGAAGGA | UCCUUCUUUAGAGUCCUGC | Chmp | [1993-2011] |
| 20 | CAAGAUUUGAAUACAAUAA | UUAUUGUAUUCAAAUCUUG | Chmp | [1942-1960] |
| 21 | CAAUUUCUAAGACUUUGAA | UUCAAAGUCUUAGAAAUUG | Chmp | [2019-2037] |
| 22 | GAGGGCUGCUGAAGUAUCA | UGAUACUUCAGCAGCCCUC | Chin, GP, Chmp | [868-886] |
| 23 | GAACAAAUGCAAGAUUGAA | UUCAAUCUUGCAUUUGUUC | Chmp | [2342-2360] |
| 24 | ACAAGAUUUGAAUACAAUA | UAUUGUAUUCAAAUCUUGU | Chmp | [1941-1959] |
| 25 | AGAUAAUUGGAGAAAAAUA | UAUUUUUCUCCAAUUAUCU | Rat, Ms, GP, Chmp | [1756-1774] |
| 26 | GACCCUGAAGAAUAUUUGA | UCAAAUAUUCUUCAGGGUC | Chmp | [2170-2188] |
| 27 | GCAAGAUUGAACAAAAUUA | UAAUUUUGUUCAAUCUUGC | Chmp | [2350-2368] |
| 28 | GAUGGGAUACAGAAGAUAA | UUAUCUUCUGUAUCCCAUC | Rat, GP, Chmp | [1743-1761] |
| 29 | UGUCGUGUUCCUCUUUAAA | UUUAAAGAGGAACACGACA | Chmp | [2311-2329] |
| 30 | GGGACAAGAUUUGAAUACA | UGUAUUCAAAUCUUGUCCC | | [1938-1956] |
| 31 | UGGUCAAAGAAAAUUUUAA | UUAAAAUUUUCUUUGACCA | GP, Chmp | [1216-1234] |
| 32 | CAUUCAAUCUAGAAAUUAU | AUAAUUUCUAGAUUGAAUG | Chin, Chmp | [1433-1451] |
| 33 | AAGAGACCCUGAAGAAUAU | AUAUUCUUCAGGGUCUCUU | Chmp | [2166-2184] |
| 34 | GAAGUAUCAAACUAAUUUA | UAAAUUAGUUUGAUACUUC | Chmp | [878-896] |
| 35 | GUUUGAUGAAAUAGCAAAA | UUUUGCUAUUUCAUCAAAC | GP, Chmp | [1826-1844] |
| 36 | GAACCAGGAGAUUGUUGGA | UCCAACAAUCUCCUGGUUC | Chmp | [517-535] |
| 37 | GACAAGAUUUGAAUACAAU | AUUGUAUUCAAAUCUUGUC | Chmp | [1940-1958] |
| 38 | GUACCUCAGUCAAACAGAU | AUCUGUUUGACUGAGGUAC | Rat, Ms, Chmp | [1727-1745] |
| 39 | UUUCAGUUCUCAAAUUAAA | UUUAAUUUGAGAACUGAAA | Chmp | [2203-2221] |
| 40 | CAAAGAAAAUUUUAAAGCA | UGCUUUAAAAUUUUCUUUG | GP, Chmp | [1220-1238] |
| 41 | GCAUGGUGGUGGUGCUAUU | AAUAGCACCACCACCAUGC | Chmp | [736-754] |
| 42 | GAAACUCAGCGGAAUCAAU | AUUGAUUCCGCUGAGUUUC | Chmp | [2035-2053] |
| 43 | GGAAAACCUUCUUGCUGUA | UACAGCAAGAAGGUUUUCC | Chmp | [331-349] |
| 44 | AGAAGAUAAUUGGAGAAAA | UUUUCUCCAAUUAUCUUCU | Rat, Ms, GP, Chmp | [1753-1771] |
| 45 | CAAGAUACCGAGAUGAGGA | UCCUCAUCUCGGUAUCUUG | GP, Chmp | [670-688] |
| 46 | AGAAAAUUUUAAAGCAAGA | UCUUGCUUUAAAAUUUUCU | GP, Chmp | [1223-1241] |
| 47 | AGGGCUGCUGAAGUAUCAA | UUGAUACUUCAGCAGCCCU | Chin, GP, Chmp | [869-887] |
| 48 | CAAACAGAUGGGAUACAGA | UCUGUAUCCCAUCUGUUUG | Rat, GP, Chmp | [1737-1755] |
| 49 | AUGCAAGAUUGAACAAAAU | AUUUUGUUCAAUCUUGCAU | Chmp | [2348-2366] |
| 50 | GAUAAUUGGAGAAAAAUAU | AUAUUUUUCUCCAAUUAUC | Ms, GP, Chmp | [1757-1775] |
| 51 | CUUAGAAGACUAUACUUUA | UAAAGUAUAGUCUUCUAAG | Chmp | [1599-1617] |
| 52 | AAACCAUACAAGCUUAGAA | UUCUAAGCUUGUAUGGUUU | Chin, GP, Chmp | [1587-1605] |
| 53 | AGUGUAUCUGCAUUAGAAA | UUUCUAAUGCAGAUACACU | Chmp | [1272-1290] |
| 54 | AGCAGAACAUUCCAUAUUA | UAAUAUGGAAUGUUCUGCU | Chmp | [540-558] |
| 55 | CCAUUUGCAUCAAUACUCA | UGAGUAUUGAUGCAAAUGG | Chmp | [1548-1566] |
| 56 | ACUUUUGUUUGAUGAAAUA | UAUUUCAUCAAACAAAAGU | Chmp | [1820-1838] |
| 57 | CGAACCAGCUCUCAGAAUA | UAUUCUGAGAGCUGGUUCG | Chmp | [930-948] |
| 58 | CUUCUUGCUGUAUAACCAA | UUGGUUAUACAGCAAGAAG | Chmp | [338-356] |
| 59 | UUCAGUUCUCAAAUUAAAA | UUUUAAUUUGAGAACUGAA | Chmp | [2204-2222] |
| 60 | GUAUCAAACUAAUUUAGAU | AUCUAAAUUAGUUUGAUAC | Chmp | [881-899] |
| 61 | CAAUAAGAGUUUCUAACUA | UAGUUAGAAACUCUUAUUG | Chmp | [781-799] |
| 62 | GCUGUACCUCAGUCAAACA | UGUUUGACUGAGGUACAGC | Rat, Ms, Chmp | [1724-1742] |
| 63 | AUACAAGCUUAGAAGACUA | UAGUCUUCUAAGCUUGUAU | Chmp | [1592-1610] |
| 64 | UCAUGAACCUUUCCCUGAA | UUCAGGGAAAGGUUCAUGA | Chmp | [980-998] |
| 65 | UGUUGAUUUUCAUGGUGGA | UCCACCAUGAAAAUCAACA | | [2243-2261] |
| 66 | CAUUUGCAUCAAUACUCAA | UUGAGUAUUGAUGCAAAUG | Chmp | [1549-1567] |
| 67 | GGAAUGAGUGCAAUUUCUA | UAGAAAUUGCACUCAUUCC | Chmp | [2009-2027] |
| 68 | UGAUGAAAUAGCAAAAUAU | AUAUUUUGCUAUUUCAUCA | Chmp | [1829-1847] |
| 69 | AAACAGAUGGGAUACAGAA | UUCUGUAUCCCAUCUGUUU | Rat, GP, Chmp | [1738-1756] |
| 70 | GAAUUACAGUGAAGACUUU | AAAGUCUUCACUGUAAUUC | | [635-653] |
| 71 | UGGAAACCAUACAAGCUUA | UAAGCUUGUAUGGUUUCCA | Chin, GP, Chmp | [1584-1602] |
| 72 | GUUCUCAAAUUAAAAGAAA | UUUCUUUUAAUUUGAGAAC | Chmp | [2208-2226] |
| 73 | GAAUAGUAAGGUUUUCUUA | UAAGAAAACCUUACUAUUC | Chmp | [2072-2090] |
| 74 | AACUGAAACCAAAGCAACA | UGUUGCUUUGGUUUCAGUU | Chmp | [1319-1337] |
| 75 | UUUGGUUGAACAAAUGCAA | UUGCAUUUGUUCAACCAAA | Chmp | [2335-2353] |
| 76 | AAUUCUGCCCUUCAUUCAA | UUGAAUGAAGGGCAGAAUU | Chmp | [1421-1439] |
| 77 | AUGCAAUAAGAGUUUCUAA | UUAGAAACUCUUAUUGCAU | Rat, Chmp | [778-796] |
| 78 | UUCCCUGAAGGAUUUUCAA | UUGAAAAUCCUUCAGGGAA | Chmp | [990-1008] |
| 79 | CUGCUGAAGUAUCAAACUA | UAGUUUGAUACUUCAGCAG | Chmp | [873-891] |
| 80 | GAAGAAUAUUUGAUGUGAU | AUCACAUCAAAUAUUCUUC | Chmp | [2176-2194] |
| 81 | GAGCCCAGAUUCCAAGCUA | UAGCUUGGAAUCUGGGCUC | Chmp | [1056-1074] |
| 82 | AGAUGUCAUGGAAAUCCGA | UCGGAUUUCCAUGACAUCU | GP, Chin, Chmp | [1196-1214] |
| 83 | AAGAGUUUCUAACUAUGAU | AUCAUAGUUAGAAACUCUU | Chmp | [785-803] |
| 84 | GAGUAACCAGAACAACUCA | UGAGUUGUUCUGGUUACUC | | [1916-1934] |
| 85 | AGAACGAUUUCGAGAUUUA | UAAAUCUCGAAAUCGUUCU | Chmp | [1373-1391] |
| 86 | CAAAGAGACCCUGAAGAAU | AUUCUUCAGGGUCUCUUUG | Chmp | [2164-2182] |
| 87 | GAUGCACACUGUUGAUUUU | AAAAUCAACAGUGUGCAUC | Rat, Chmp | [2234-2252] |
| 88 | UAUCCAAGACUCUUCAUAA | UUAUGAAGAGUCUUGGAUA | Chmp | [1894-1912] |
| 89 | GUAAGGUUUUCUUAUUUAU | AUAAAUAAGAAAACCUUAC | Chmp | [2077-2095] |
| 90 | AUCCGAAUGGUCAAAGAAA | UUUCUUUGACCAUUCGGAU | GP, Chin, Chmp | [1209-1227] |
| 91 | UAUCAUGCACUGAAUUCAA | UUGAAUUCAGUGCAUGAUA | Chmp | [1773-1791] |
| 92 | GAUACAGAAGAUAAUUGGA | UCCAAUUAUCUUCUGUAUC | Rat, GP, Chmp | [1748-1766] |
| 93 | CCUCAGAUGUCAUGGAAAU | AUUUCCAUGACAUCUGAGG | Chmp | [1192-1210] |
| 94 | UAUUGAUGGUCCUUUUGGA | UCCAAAAGGACCAUCAAUA | Chmp | [1463-1481] |
| 95 | GUUGGAUAAAAGCAGAACA | UGUUCUGCUUUUAUCCAAC | Chmp | [530-548] |
| 96 | GAUGUCAUGGAAAUCCGAA | UUCGGAUUUCCAUGACAUC | GP, Chin, Chmp | [1197-1215] |
| 97 | GAGAUGAGGAUCCUAGAAA | UUUCUAGGAUCCUCAUCUC | GP, Chmp | [679-697] |
| 98 | UGAACUGAAUGCAGCAAGA | UCUUGCUGCAUUCAGUUCA | Ms, GP, Chmp | [656-674] |
| 99 | AGGAAUCACUGAACUAUGA | UCAUAGUUCAGUGAUUCCU | Chmp | [1492-1510] |
| 100 | GAAAUUAUCCCAAGCUGUA | UACAGCUUGGGAUAAUUUC | Chmp | [1444-1462] |
| 101 | AGGUUUUCUUAUUUAUGAU | AUCAUAAAUAAGAAAACCU | Chmp | [2080-2098] |
| 102 | AAAGAGACCCUGAAGAAUA | UAUUCUUCAGGGUCUCUUU | Chmp | [2165-2183] |
| 103 | GAUUUGAAUACAAUAAAGA | UCUUUAUUGUAUUCAAAUC | Chmp | [1945-1963] |
| 104 | CAUGGUGGAUUCAAGAACU | AGUUCUUGAAUCCACCAUG | | [2253-2271] |
| 105 | GUUCUUAACCUCAACUGCA | UGCAGUUGAGGUUAAGAAC | Chmp | [426-444] |
| 106 | AAAAUAUAACAGAGGAAAA | UUUUCCUCUGUUAUAUUUU | | [1841-1859] |
| 107 | CAGAUGGGAUACAGAAGAU | AUCUUCUGUAUCCCAUCUG | Rat, GP, Chmp | [1741-1759] |
| 108 | AAGGUUUUCUUAUUUAUGA | UCAUAAAUAAGAAAACCUU | Chmp | [2079-2097] |
| 109 | AGAAUAUUUCCUUACCAGA | UCUGGUAAGGAAAUAUUCU | Chmp | [943-961] |
| 110 | CAUCAAUACUCAACACCCU | AGGGUGUUGAGUAUUGAUG | | [1555-1573] |
| 111 | UCUAGUCAAGACUCCGAAA | UUUCGGAGUCUUGACUAGA | Chmp | [1404-1422] |
| 112 | GAUGACUGGAAACCAUACA | UGUAUGGUUUCCAGUCAUC | Rat, Ms, Chin, GP, Chmp | [1578-1596] |
| 113 | CAUGAUCACAGCCUCUACA | UGUAGAGGCUGUGAUCAUG | Chmp | [758-776] |
| 114 | GUAUAUUACUCUACAUUGU | ACAAUGUAGAGUAAUAUAC | Chmp | [1250-1268] |
| 115 | UUACAUGUUUAAUCUGGAA | UUCCAGAUUAAACAUGUAA | Chmp | [2143-2161] |
| 116 | UUGUGGACCCAAUUCACUA | UAGUGAAUUGGGUCCACAA | Chmp | [1877-1895] |
| 117 | AACUCAUAUGGGACAAGAU | AUCUUGUCCCAUAUGAGUU | | [1929-1947] |
| 118 | AAUUUCUAAGACUUUGAAA | UUUCAAAGUCUUAGAAAUU | Chmp | [2020-2038] |
| 119 | AAUCCGAAUGGUCAAAGAA | UUCUUUGACCAUUCGGAUU | GP, Chin, Chmp | [1208-1226] |
| 120 | CAUCAUUUCGGUCAUAAGU | ACUUAUGACCGAAAUGAUG | Chmp | [1169-1187] |
| 121 | GAACCAGCUCUCAGAAUAU | AUAUUCUGAGAGCUGGUUC | Chmp | [931-949] |
| 122 | AGUUCUCAAAUUAAAAGAA | UUCUUUUAAUUUGAGAACU | Chmp | [2207-2225] |
| 123 | GAAAUAGCAAAAUAUAACA | UGUUAUAUUUUGCUAUUUC | Chmp | [1833-1851] |
| 124 | GACUCUAAAGAAGGAAUGA | UCAUUCCUUCUUUAGAGUC | Chmp | [1997-2015] |
| 125 | CAAGCUUAGAAGACUAUAC | GUAUAGUCUUCUAAGCUUG | Chmp | [1595-1613] |
| 126 | AAAAUAUCAUGCACUGAAU | AUUCAGUGCAUGAUAUUUU | Chmp | [1769-1787] |
| 127 | GUGCUAUUCCUCAUGAUCA | UGAUCAUGAGGAAUAGCAC | Chmp | [747-765] |
| 128 | GUACUGUGCCGAAAGACUU | AAGUCUUUCGGCACAGUAC | Chin, Chmp | [1118-1136] |
| 129 | CAACUCAUAUGGGACAAGA | UCUUGUCCCAUAUGAGUUG | | [1928-1946] |
| 130 | AGAUUUGAAUACAAUAAAG | CUUUAUUGUAUUCAAAUCU | Chmp | [1944-1962] |
| 131 | AAUUGUUUUUGGUUGAACA | UGUUCAACCAAAAACAAUU | Chmp | [2328-2346] |
| 132 | UGUUUUUGGUUGAACAAAU | AUUUGUUCAACCAAAAACA | Chmp | [2331-2349] |
| 133 | AACUGAAUGCAGCAAGAUA | UAUCUUGCUGCAUUCAGUU | Ms, GP, Chmp | [658-676] |
| 134 | UGUGCCGAAAGACUUUACA | UGUAAAGUCUUUCGGCACA | Chin, Chmp | [1122-1140] |
| 135 | AACCGAACCAGCUCUCAGA | UCUGAGAGCUGGUUCGGUU | Chmp | [927-945] |
| 136 | AUGGGACAAGAUUUGAAUA | UAUUCAAAUCUUGUCCCAU | | [1936-1954] |
| 137 | GUUAGAUGCACACUGUUGA | UCAACAGUGUGCAUCUAAC | Rat, Chmp | [2230-2248] |
| 138 | GCAGAGAUAUCCAGUCCUU | AAGGACUGGAUAUCUCUGC | Chmp | [1627-1645] |
| 139 | UCAGUAUAUUACUCUACAU | AUGUAGAGUAAUAUACUGA | Chmp | [1247-1265] |
| 140 | AAAUCCGAAUGGUCAAAGA | UCUUUGACCAUUCGGAUUU | GP, Chin, Chmp | [1207-1225] |
| 141 | GUUGGUUUGCAGAUUUACU | AGUAAAUCUGCAAACCAAC | Chmp | [1648-1666] |
| 142 | CAUAAACUGAGUAACCAGA | UCUGGUUACUCAGUUUAUG | Chmp | [1908-1926] |
| 143 | CACCAUCAUUUCGGUCAUA | UAUGACCGAAAUGAUGGUG | Chmp | [1166-1184] |
| 144 | UACAGAAGAUAAUUGGAGA | UCUCCAAUUAUCUUCUGUA | Rat, GP, Chmp | [1750-1768] |
| 145 | AAACUUUUGUUUGAUGAAA | UUUCAUCAAACAAAAGUUU | Chmp | [1818-1836] |
| 146 | ACCUCCGAGGAUCACAGAA | UUCUGUGAUCCUCGGAGGU | Chmp | [484-502] |
| 147 | ACAAGCUUAGAAGACUAUA | UAUAGUCUUCUAAGCUUGU | Chmp | [1594-1612] |
| 148 | CCUUCCGUUGGUUUGCAGA | UCUGCAAACCAACGGAAGG | Chmp | [1642-1660] |
| 149 | GCAGAACAUUCCAUAUUAC | GUAAUAUGGAAUGUUCUGC | Chmp | [541-559] |
| 150 | GAGACUGGACAGAACGAUU | AAUCGUUCUGUCCAGUCUC | Ms, Chin, GP, Chmp | [1363-1381] |
| 151 | UACUCAACACCCUGUUGGA | UCCAACAGGGUGUUGAGUA | | [1561-1579] |
| 152 | UAGAAAACUUCUCUUCACA | UGUGAAGAGAAGUUUUCUA | GP, Chmp | [692-710] |
| 153 | AGGAGACUGGACAGAACGA | UCGUUCUGUCCAGUCUCCU | Ms, Chin, GP, Chmp | [1361-1379] |
| 154 | UUUUCAGUUCUCAAAUUAA | UUAAUUUGAGAACUGAAAA | Chmp | [2202-2220] |
| 155 | AGAGUUUCUAACUAUGAUA | UAUCAUAGUUAGAAACUCU | Chmp | [786-804] |
| 156 | UCAUUUCGGUCAUAAGUCA | UGACUUAUGACCGAAAUGA | Chmp | [1171-1189] |
| 157 | GCUGACGUUGCAUGUUUCA | UGAAACAUGCAACGUCAGC | Chmp | [848-866] |
| 158 | CGUUGGUUUGCAGAUUUAC | GUAAAUCUGCAAACCAACG | Chmp | [1647-1665] |
| 159 | CAGUUCUCAAAUUAAAAGA | UCUUUUAAUUUGAGAACUG | Chmp | [2206-2224] |
| 160 | UUUCAGGAGGGCUGCUGAA | UUCAGCAGCCCUCCUGAAA | GP, Chmp | [862-880] |
| 161 | UGUUGUGGACCCAAUUCAC | GUGAAUUGGGUCCACAACA | Chmp | [1875-1893] |
| 162 | GAAACCAUACAAGCUUAGA | UCUAAGCUUGUAUGGUUUC | Chin, GP, Chmp | [1586-1604] |
| 163 | AUUUGGGUAUGCAGAGAUA | UAUCUCUGCAUACCCAAAU | Chmp | [1617-1635] |
| 164 | AUCCAUUUACCCUCACAAU | AUUGUGAGGGUAAAUGGAU | GP, Chmp | [1294-1312] |
| 165 | AAAUAUAACAGAGGAAAAA | UUUUUCCUCUGUUAUAUUU | | [1842-1860] |
| 166 | AGUAGGAGACUGGACAGAA | UUCUGUCCAGUCUCCUACU | Rat, Ms, Chin, GP, Chmp | [1358-1376] |
| 167 | GAAACCAAAGAGACCCUGA | UCAGGGUCUCUUUGGUUUC | Chmp | [2159-2177] |
| 168 | GAAUAUUUGAUGUGAUGAU | AUCAUCACAUCAAAUAUUC | Chmp | [2179-2197] |
| 169 | AAGCAAGACCUGGUCAGUA | UACUGACCAGGUCUUGCUU | GP, Chmp | [1234-1252] |
| 170 | CUUCAUUCAAUCUAGAAAU | AUUUCUAGAUUGAAUGAAG | Chin, Chmp | [1430-1448] |
| 171 | AUCCCAAGCUGUAUAUUGA | UCAAUAUACAGCUUGGGAU | Chmp | [1450-1468] |
| 172 | ACCAGGAGAUUGUUGGAUA | UAUCCAACAAUCUCCUGGU | Chmp | [519-537] |
| 173 | GAACGAUUUCGAGAUUUAC | GUAAAUCUCGAAAUCGUUC | Chmp | [1374-1392] |
| 174 | AAACUAAUUUAGAUACCCA | UGGGUAUCUAAAUUAGUUU | Chmp | [886-904] |
| 175 | CAAAGAAUAGUAAGGUUUU | AAAACCUUACUAUUCUUUG | Chmp | [2068-2086] |
| 176 | GUAGGAGACUGGACAGAAC | GUUCUGUCCAGUCUCCUAC | Ms, Chin, GP, Chmp | [1359-1377] |
| 177 | AGUAAGGUUUUCUUAUUUA | UAAAUAAGAAAACCUUACU | Chmp | [2076-2094] |
| 178 | GAUCACAGCCUCUACAUAU | AUAUGUAGAGGCUGUGAUC | Chmp | [761-779] |
| 179 | UGGUGUUUUCUGUUGUGGA | UCCACAACAGAAAACACCA | Chmp | [1865-1883] |
| 180 | AACCUCAACUGCAGCCUUA | UAAGGCUGCAGUUGAGGUU | Chin, Chmp | [432-450] |
| 181 | CUGAGUAACCAGAACAACU | AGUUGUUCUGGUUACUCAG | | [1914-1932] |
| 182 | UUUGUUUGAUGAAAUAGCA | UGCUAUUUCAUCAAACAAA | Chmp | [1823-1841] |
| 183 | CAGAAGGUUCCAAGCAGGA | UCCUGCUUGGAACCUUCUG | Chin, GP, Chmp | [498-516] |
| 184 | UAUGGGACAAGAUUUGAAU | AUUCAAAUCUUGUCCCAUA | | [1935-1953] |
| 185 | CAUCUAGUCAAGACUCCGA | UCGGAGUCUUGACUAGAUG | Chmp | [1402-1420] |
| 186 | CUGAAGUAUCAAACUAAUU | AAUUAGUUUGAUACUUCAG | Chmp | [876-894] |
| 187 | UAUGAUAUCUUCUGGUAUA | UAUACCAGAAGAUAUCAUA | Rat, Ms, Chin, GP, Chmp | [798-816] |
| 188 | GAGGAAAAACAGUUGGUGU | ACACCAACUGUUUUUCCUC | | [1852-1870] |
| 189 | AACUUUUGUUUGAUGAAAU | AUUUCAUCAAACAAAAGUU | Chmp | [1819-1837] |
| 190 | CAUACAAGCUUAGAAGACU | AGUCUUCUAAGCUUGUAUG | Chin, GP, Chmp | [1591-1609] |
| 191 | GUUCCAAGCAGGAGAACCA | UGGUUCUCCUGCUUGGAAC | Chmp | [504-522] |
| 192 | GUGUCUAAGCAGAGCCUCA | UGAGGCUCUGCUUAGACAC | Chmp | [401-419] |
| 193 | UACUGUGCCGAAAGACUUU | AAAGUCUUUCGGCACAGUA | Chin, Chmp | [1119-1137] |
| 194 | UUAGAAGACUAUACUUUAU | AUAAAGUAUAGUCUUCUAA | Chmp | [1600-1618] |
| 195 | GGAAGUCCAUUUGAGGAAU | AUUCCUCAAAUGGACUUCC | Chin, Chmp | [1479-1497] |
| 196 | CAUCCAGCUGUACCUCAGU | ACUGAGGUACAGCUGGAUG | Rat, Ms, Chmp | [1718-1736] |
| 197 | CUACAUAUGCAAUAAGAGU | ACUCUUAUUGCAUAUGUAG | Chmp | [772-790] |
| 198 | AACUCAGCGGAAUCAAUCA | UGAUUGAUUCCGCUGAGUU | Chmp | [2037-2055] |
| 199 | AGAAGACUAUACUUUAUUU | AAAUAAAGUAUAGUCUUCU | Chmp | [1602-1620] |
| 200 | UGAAUUCAAGACUGUUUAU | AUAAACAGUCUUGAAUUCA | Chmp | [1783-1801] |
| 201 | AAGAGAACAGACCUGACUA | UAGUCAGGUCUGUUCUCUU | Chin, GP, Chmp | [1693-1711] |
| 202 | AAAGCAGAACAUUCCAUAU | AUAUGGAAUGUUCUGCUUU | Chmp | [538-556] |
| 203 | ACCAUACAAGCUUAGAAGA | UCUUCUAAGCUUGUAUGGU | Chin, GP, Chmp | [1589-1607] |
| 204 | GUGGUGCUAUUCCUCAUGA | UCAUGAGGAAUAGCACCAC | Chmp | [744-762] |
| 205 | GCCCUCAACUUCUCAGUGA | UCACUGAGAAGUUGAGGGC | Chmp | [618-636] |
| 206 | UUGUUUGAUGAAAUAGCAA | UUGCUAUUUCAUCAAACAA | Chmp | [1824-1842] |
| 207 | UUGAUGAAAUAGCAAAAUA | UAUUUUGCUAUUUCAUCAA | Chmp | [1828-1846] |
| 208 | UAACCAGAACAACUCAUAU | AUAUGAGUUGUUCUGGUUA | | [1919-1937] |
| 209 | AUUGUUGGAUAAAAGCAGA | UCUGCUUUUAUCCAACAAU | Chmp | [527-545] |
| 210 | UGUUUGAUGAAAUAGCAAA | UUUGCUAUUUCAUCAAACA | GP, Chmp | [1825-1843] |
| 211 | UGUACCUCAGUCAAACAGA | UCUGUUUGACUGAGGUACA | Rat, Ms, Chmp | [1726-1744] |
| 212 | UACAAUAAAGAGUCUUUCA | UGAAAGACUCUUUAUUGUA | Chmp | [1953-1971] |
| 213 | AAUUGGAGAAAAAUAUCAU | AUGAUAUUUUUCUCCAAUU | GP, Chmp | [1760-1778] |
| 214 | CUGUAUGUUGCAUAACAAG | CUUGUUAUGCAACAUACAG | Chmp | [1667-1685] |
| 215 | GUAACCAGAACAACUCAUA | UAUGAGUUGUUCUGGUUAC | | [1918-1936] |
| 216 | UUUCAUGGUGGAUUCAAGA | UCUUGAAUCCACCAUGAAA | | [2250-2268] |
| 217 | CAAAAUAUAACAGAGGAAA | UUUCCUCUGUUAUAUUUUG | | [1840-1858] |
| 218 | AAAAAUAUCAUGCACUGAA | UUCAGUGCAUGAUAUUUUU | Chmp | [1768-1786] |
| 219 | GACUGGAAACCAUACAAGC | GCUUGUAUGGUUUCCAGUC | Rat, Chin, GP, Chmp | [1581-1599] |
| 220 | CAAAUUAAAAGAAAACUGU | ACAGUUUUCUUUUAAUUUG | Chmp | [2213-2231] |
| 221 | AUCUAGUCAAGACUCCGAA | UUCGGAGUCUUGACUAGAU | Chmp | [1403-1421] |
| 222 | AGUGAAUUACAGUGAAGAC | GUCUUCACUGUAAUUCACU | | [632-650] |
| 223 | AUUCCAAGCUAAUUUUCCA | UGGAAAAUUAGCUUGGAAU | Chmp | [1064-1082] |
| 224 | CCAGAUUCCAAGCUAAUUU | AAAUUAGCUUGGAAUCUGG | Chmp | [1060-1078] |
| 225 | CUUUAUUUGGGUAUGCAGA | UCUGCAUACCCAAAUAAAG | Chmp | [1613-1631] |
| 226 | AUUGUUUUUGGUUGAACAA | UUGUUCAACCAAAAACAAU | Chmp | [2329-2347] |
| 227 | GUUGGAUGACUGGAAACCA | UGGUUUCCAGUCAUCCAAC | Chmp | [1574-1592] |
| 228 | AAGAUAAUUGGAGAAAAAU | AUUUUUCUCCAAUUAUCUU | Rat, Ms, GP, Chmp | [1755-1773] |
| 229 | AAAUUCUGCCCUUCAUUCA | UGAAUGAAGGGCAGAAUUU | Chmp | [1420-1438] |
| 230 | GAAUGCCCUCAACUUCUCA | UGAGAAGUUGAGGGCAUUC | Chmp | [614-632] |
| 231 | CUUUCAGCUGAAAACUUUU | AAAAGUUUUCAGCUGAAAG | Chmp | [1966-1984]+ |
| 232 | GAUUUUCAAAACCGGCAGA | UCUGCCGGUUUUGAAAAUC | Chmp | [1000-1018] |
| 233 | GGUGUUACUAUCUGUAUUU | AAAUACAGAUAGUAACACC | Chin, GP, Chmp | [564-582] |
| 234 | CUUCCGUUGGUUUGCAGAU | AUCUGCAAACCAACGGAAG | Chmp | [1643-1661] |
| 235 | UAAGAGUUUCUAACUAUGA | UCAUAGUUAGAAACUCUUA | Chmp | [784-802] |
| 236 | UGUUGAACUGAAUGCAGCA | UGCUGCAUUCAGUUCAACA | GP, Chmp | [653-671] |
| 237 | UUAGAUGCACACUGUUGAU | AUCAACAGUGUGCAUCUAA | Rat, Chmp | [2231-2249] |
| 238 | GAAUGCAGCAAGAUACCGA | UCGGUAUCUUGCUGCAUUC | GP, Chmp | [662-680] |
| 239 | GCACUGAAUUCAAGACUGU | ACAGUCUUGAAUUCAGUGC | Chmp | [1779-1797] |
| 240 | CAUAUUACCUGUGGUGUUA | UAACACCACAGGUAAUAUG | Chmp | [552-570] |
| 241 | AUUUAAAAUGGAAAUGUGA | UCACAUUUCCAUUUUAAAU | Chmp | [2100-2118] |
| 242 | GUGAGGAGCUGAACUUGCU | AGCAAGUUCAGCUCCUCAC | Chmp | [2277-2295] |
| 243 | GAGGAAUCACUGAACUAUG | CAUAGUUCAGUGAUUCCUC | Chmp | [1491-1509] |
| 244 | CUGGAAACCAUACAAGCUU | AAGCUUGUAUGGUUUCCAG | Chin, GP, Chmp | [1583-1601] |
| 245 | ACUACUGCCUCCAUCUAGU | ACUAGAUGGAGGCAGUAGU | Chmp | [1391-1409] |
| 246 | CUUUUGGAAGUCCAUUUGA | UCAAAUGGACUUCCAAAAG | Chmp | [1474-1492] |
| 247 | AAGCAGGACUCUAAAGAAG | CUUCUUUAGAGUCCUGCUU | Chmp | [1991-2009] |
| 248 | AUUACAUGUUUAAUCUGGA | UCCAGAUUAAACAUGUAAU | Chmp | [2142-2160] |
| 249 | GAUUCAAGAACUCCCUAGU | ACUAGGGAGUUCUUGAAUC | Chmp | [2260-2278] |
| 250 | AUAAACUGAGUAACCAGAA | UUCUGGUUACUCAGUUUAU | Chmp | [1909-1927] |
| 251 | AUGUCAUGGAAAUCCGAAU | AUUCGGAUUUCCAUGACAU | GP, Chin, Chmp | [1198-1216] |
| 252 | AGUAUCAAACUAAUUUAGA | UCUAAAUUAGUUUGAUACU | Chmp | [880-898] |
| 253 | CUUUUCAGUUCUCAAAUUA | UAAUUUGAGAACUGAAAAG | Chmp | [2201-2219] |
| 254 | GUGCCGAAAGACUUUACAG | CUGUAAAGUCUUUCGGCAC | Chin, Chmp | [1123-1141] |
| 255 | AAUCUGGAAACCAAAGAGA | UCUCUUUGGUUUCCAGAUU | Chmp | [2153-2171] |
| 256 | AUUGAUGGUCCUUUUGGAA | UUCCAAAAGGACCAUCAAU | Chmp | [1464-1482] |
| 257 | UUCACUUUUCAGUUCUCAA | UUGAGAACUGAAAAGUGAA | Chmp | [2197-2215] |
| 258 | CAUAUGGGACAAGAUUUGA | UCAAAUCUUGUCCCAUAUG | | [1933-1951] |
| 259 | AUAUCUUCUGGUAUACUCA | UGAGUAUACCAGAAGAUAU | Rat, Ms, Chin, GP, Chmp | [802-820] |
| 260 | UACCGAGAUGAGGAUCCUA | UAGGAUCCUCAUCUCGGUA | GP, Chmp | [675-693] |
| 261 | AACUUCUCAGUGAAUUACA | UGUAAUUCACUGAGAAGUU | Chmp | [624-642] |
| 262 | GUGGUGGUGCUAUUCCUCA | UGAGGAAUAGCACCACCAC | Chmp | [741-759] |
| 263 | UCAUGCACUGAAUUCAAGA | UCUUGAAUUCAGUGCAUGA | Chmp | [1775-1793] |
| 264 | AAGACUCUUCAUAAACUGA | UCAGUUUAUGAAGAGUCUU | Chmp | [1899-1917] |
| 265 | GUUGUGGACCCAAUUCACU | AGUGAAUUGGGUCCACAAC | Chmp | [1876-1894] |
| 266 | UACCUCCGAGGAUCACAGA | UCUGUGAUCCUCGGAGGUA | Chmp | [483-501] |
| 267 | CAGUAUAUUACUCUACAUU | AAUGUAGAGUAAUAUACUG | Chmp | [1248-1266] |
| 268 | UGGACAGAACGAUUUCGAG | CUCGAAAUCGUUCUGUCCA | Chmp | [1368-1386] |
| 269 | UACUAUCUGUAUUUUCUCA | UGAGAAAAUACAGAUAGUA | Chin, GP, Chmp | [569-587] |
| 270 | CAUUUCGGUCAUAAGUCAU | AUGACUUAUGACCGAAAUG | Chmp | [1172-1190] |
| 271 | CACAUUACAUGUUUAAUCU | AGAUUAAACAUGUAAUGUG | Chmp | [2139-2157] |
| 272 | GUAUAUCCGGAGCAAUAAG | CUUAUUGCUCCGGAUAUAC | Chmp | [1142-1160] |
| 273 | AGUCAUCCCUCAGAUGUCA | UGACAUCUGAGGGAUGACU | Chmp | [1185-1203] |
| 274 | GCAGCAAGAUACCGAGAUG | CAUCUCGGUAUCUUGCUGC | GP, Chmp | [666-684] |
| 275 | CAUUUACCCUCACAAUGUG | CACAUUGUGAGGGUAAAUG | GP, Chmp | [1297-1315] |
| 276 | AAAUUUGUGAAGAUUUGUA | UACAAAUCUUCACAAAUUU | Chmp | [1032-1050] |
| 277 | UAGUCAAGACUCCGAAAUU | AAUUUCGGAGUCUUGACUA | Chmp | [1406-1424] |
| 278 | ACUUUGAAACUCAGCGGAA | UUCCGCUGAGUUUCAAAGU | Chmp | [2030-2048] |
| 279 | GAAUUCAAGACUGUUUAUA | UAUAAACAGUCUUGAAUUC | | [1784-1802] |
| 280 | UUAGAAAAUCAUCCAUUUA | UAAAUGGAUGAUUUUCUAA | Chmp | [1284-1302] |
| 281 | GAAUGGUCAAAGAAAAUUU | AAAUUUUCUUUGACCAUUC | GP, Chmp | [1213-1231] |
| 282 | CCUCAUGAUCACAGCCUCU | AGAGGCUGUGAUCAUGAGG | Chmp | [755-773] |
| 283 | AAUAGUAAGGUUUUCUUAU | AUAAGAAAACCUUACUAUU | Chmp | [2073-2091] |
| 284 | AAGAAAACUGUUAGAUGCA | UGCAUCUAACAGUUUUCUU | Chmp | [2221-2239] |
| 285 | UGUACUGUGCCGAAAGACU | AGUCUUUCGGCACAGUACA | Chin, Chmp | [1117-1135] |
| 286 | CUUACCAGAGUAUUUCUCA | UGAGAAAUACUCUGGUAAG | Chmp | [953-971] |
| 287 | AUGAGUGCAAUUUCUAAGA | UCUUAGAAAUUGCACUCAU | Chmp | [2012-2030] |
| 288 | AAGCUUAGAAGACUAUACU | AGUAUAGUCUUCUAAGCUU | Chmp | [1596-1614] |
| 289 | GAUGACCGUCACAUUACAU | AUGUAAUGUGACGGUCAUC | | [2130-2148] |
| 290 | GAUGAUUCACUUUUCAGUU | AACUGAAAAGUGAAUCAUC | Chmp | [2192-2210] |
| 291 | GGAAACCAUACAAGCUUAG | CUAAGCUUGUAUGGUUUCC | Chin, GP, Chmp | [1585-1603] |
| 292 | AACCGGCAGAGUUUACCCA | UGGGUAAACUCUGCCGGUU | Chmp | [1009-1027] |
| 293 | CAACUGAAACCAAAGCAAC | GUUGCUUUGGUUUCAGUUG | Chmp | [1318-1336] |
| 294 | UUACCUGUGGUGUUACUAU | AUAGUAACACCACAGGUAA | Chmp | [556-574] |
| 295 | ACUUCUCAGUGAAUUACAG | CUGUAAUUCACUGAGAAGU | | [625-643] |
| 296 | UUUGCAGAUUUACUCUGUA | UACAGAGUAAAUCUGCAAA | Chmp | [1653-1671] |
| 297 | UUGAGGAAUCACUGAACUA | UAGUUCAGUGAUUCCUCAA | Chmp | [1489-1507] |
| 298 | AUGGUCAAAGAAAAUUUUA | UAAAAUUUUCUUUGACCAU | GP, Chmp | [1215-1233] |
| 299 | CACAAAUUUGUGAAGAUUU | AAAUCUUCACAAAUUUGUG | Chmp | [1029-1047] |
| 300 | AAUAAGAGUUUCUAACUAU | AUAGUUAGAAACUCUUAUU | Chmp | [782-800] |
| 301 | AAAAUAGUAGGAGACUGGA | UCCAGUCUCCUACUAUUUU | Chin, GP, Chmp | [1353-1371] |
| 302 | GAACUUGCUCAAUCUAAGG | CCUUAGAUUGAGCAAGUUC | Chmp | [2287-2305] |
| 303 | UGGAUUUCUGGACCUUUGU | ACAAAGGUCCAGAAAUCCA | Rat, Ms, GP, Chin, Chmp | [1095-1113] |
| 304 | UGAACCUUUCCCUGAAGGA | UCCUUCAGGGAAAGGUUCA | Chmp | [983-1001] |
| 305 | GUUACUAUCUGUAUUUUCU | AGAAAAUACAGAUAGUAAC | Chin, GP, Chmp | [567-585] |
| 306 | AAACACCUCUGCCUGUUCA | UGAACAGGCAGAGGUGUUU | | [282-300] |
| 307 | UUAAAAGAAAACUGUUAGA | UCUAACAGUUUUCUUUUAA | Chmp | [2217-2235] |
| 308 | AUAUAACAGAGGAAAAACA | UGUUUUUCCUCUGUUAUAU | | [1844-1862] |
| 309 | AACACCUCUGCCUGUUCAU | AUGAACAGGCAGAGGUGUU | | [283-301] |
| 310 | GAUGAGGAUCCUAGAAAAC | GUUUUCUAGGAUCCUCAUC | GP, Chmp | [681-699] |
| 311 | GAUUUUCAUGGUGGAUUCA | UGAAUCCACCAUGAAAAUC | | [2247-2265] |
| 312 | GAAGGAUUUUCAAAACCGG | CCGGUUUUGAAAAUCCUUC | Chmp | [996-1014] |
| 313 | AUUAGAAAAUCAUCCAUUU | AAAUGGAUGAUUUUCUAAU | Chmp | [1283-1301] |
| 314 | ACCUGGUCAGUAUAUUACU | AGUAAUAUACUGACCAGGU | Chmp | [1241-1259] |
| 315 | ACUCAUAUGGGACAAGAUU | AAUCUUGUCCCAUAUGAGU | | [1930-1948] |
| 316 | AAGAUACCGAGAUGAGGAU | AUCCUCAUCUCGGUAUCUU | GP, Chmp | [671-689] |
| 317 | AGAAUAGUAAGGUUUUCUU | AAGAAAACCUUACUAUUCU | Chmp | [2071-2089] |
| 318 | ACUGGAAACCAUACAAGCU | AGCUUGUAUGGUUUCCAGU | Rat, Chin, GP, Chmp | [1582-1600] |
| 319 | UCUGGUGAAUGCCCUCAAC | GUUGAGGGCAUUCACCAGA | Chmp | [608-626] |
| 320 | AUCUUAAAAUAGUAGGAGA | UCUCCUACUAUUUUAAGAU | Chin, GP, Chmp | [1348-1366] |
| 321 | GAAUAUUUCCUUACCAGAG | CUCUGGUAAGGAAAUAUUC | Chmp | [944-962] |
| 322 | GCAAGAUACCGAGAUGAGG | CCUCAUCUCGGUAUCUUGC | GP, Chmp | [669-687] |
| 323 | GGUGAAUGCCCUCAACUUC | GAAGUUGAGGGCAUUCACC | Chmp | [611-629] |
| 324 | GAUUUACUACUGCCUCCAU | AUGGAGGCAGUAGUAAAUC | Rat, Chmp | [1386-1404] |
| 325 | AGAUUGUUGGAUAAAAGCA | UGCUUUUAUCCAACAAUCU | Ms, Chmp | [525-543] |
| 326 | ACUUCUCUUCACAACUGUU | AACAGUUGUGAAGAGAAGU | Chmp | [698-716] |
| 327 | UAUGCAAUAAGAGUUUCUA | UAGAAACUCUUAUUGCAUA | Rat, Chmp | [777-795] |
| 328 | GAUCCUAGAAAACUUCUCU | AGAGAAGUUUUCUAGGAUC | GP, Chmp | [687-705] |
| 329 | ACUGUGCCGAAAGACUUUA | UAAAGUCUUUCGGCACAGU | Chin, Chmp | [1120-1138] |
| 330 | CCAAUUCACUAUCCAAGAC | GUCUUGGAUAGUGAAUUGG | Chmp | [1885-1903] |
| 331 | AAUCAUCCAUUUACCCUCA | UGAGGGUAAAUGGAUGAUU | Chmp | [1290-1308] |
| 332 | AUGGAAAUCCGAAUGGUCA | UGACCAUUCGGAUUUCCAU | GP, Chin, Chmp | [1203-1221] |
| 333 | CUUACCUCCGAGGAUCACA | UGUGAUCCUCGGAGGUAAG | Chmp | [481-499] |
| 334 | GCUAUUCCUCAUGAUCACA | UGUGAUCAUGAGGAAUAGC | Chmp | [749-767] |
| 335 | CAGAUGUCAUGGAAAUCCG | CGGAUUUCCAUGACAUCUG | GP, Chin, Chmp | [1195-1213] |
| 336 | AAAUGCAAGAUUGAACAAA | UUUGUUCAAUCUUGCAUUU | Chmp | [2346-2364] |
| 337 | UAUUUGAUGUGAUGAUUCA | UGAAUCAUCACAUCAAAUA | Chmp | [2182-2200] |
| 338 | CUGGUGAAUGCCCUCAACU | AGUUGAGGGCAUUCACCAG | Chmp | [609-627] |
| 339 | AAUGGAAAUGUGAGAAUGU | ACAUUCUCACAUUUCCAUU | Chmp | [2106-2124] |
| 340 | GGGCUUCCACUCAGUCUUU | AAAGACUGAGUGGAAGCCC | | [103-121] |
| 341 | UGCAAGAUUGAACAAAAUU | AAUUUUGUUCAAUCUUGCA | Chmp | [2349-2367] |
| 342 | AACCAAAGAGACCCUGAAG | CUUCAGGGUCUCUUUGGUU | Chmp | [2161-2179] |
| 343 | AAUGGUCAAAGAAAAUUUU | AAAAUUUUCUUUGACCAUU | GP, Chmp | [1214-1232] |
| 344 | UAAUUGGAGAAAAAUAUCA | UGAUAUUUUUCUCCAAUUA | Ms, GP, Chmp | [1759-1777] |
| 345 | GAAAAAUAUCAUGCACUGA | UCAGUGCAUGAUAUUUUUC | Chmp | [1767-1785] |
| 346 | AACUUCUCUUCACAACUGU | ACAGUUGUGAAGAGAAGUU | Chmp | [697-715] |
| 347 | AUAAAAGCAGAACAUUCCA | UGGAAUGUUCUGCUUUUAU | Chmp | [535-553] |
| 348 | GAGUUUCUAACUAUGAUAU | AUAUCAUAGUUAGAAACUC | Chmp | [787-805] |
| 349 | AUAGUAAGGUUUUCUUAUU | AAUAAGAAAACCUUACUAU | Chmp | [2074-2092] |
| 350 | GAAGGAAUGAGUGCAAUUU | AAAUUGCACUCAUUCCUUC | Chmp | [2006-2024] |
| 351 | UUAAAUUGUUUUUGGUUGA | UCAACCAAAAACAAUUUAA | Chmp | [2325-2343] |
| 352 | UGGAAGAGCCCAGAUUCCA | UGGAAUCUGGGCUCUUCCA | Chmp | [1051-1069] |
| 353 | UGAAGAAUAUUUGAUGUGA | UCACAUCAAAUAUUCUUCA | Chmp | [2175-2193] |
| 354 | UAAAUUGUUUUUGGUUGAA | UUCAACCAAAAACAAUUUA | Chmp | [2326-2344] |
| 355 | UCUAAGACUUUGAAACUCA | UGAGUUUCAAAGUCUUAGA | Chmp | [2024-2042] |
| 356 | AAUCUAGAAAUUAUCCCAA | UUGGGAUAAUUUCUAGAUU | Chin, Chmp | [1438-1456] |
| 357 | AAAGCAAGACCUGGUCAGU | ACUGACCAGGUCUUGCUUU | GP, Chmp | [1233-1251] |
| 358 | CAAAACCGGCAGAGUUUAC | GUAAACUCUGCCGGUUUUG | Chmp | [1006-1024] |
| 359 | AGAACAGACCUGACUAUGU | ACAUAGUCAGGUCUGUUCU | Chin, GP, Chmp | [1696-1714] |
| 360 | UUUCAAAACCGGCAGAGUU | AACUCUGCCGGUUUUGAAA | Chmp | [1003-1021] |
| 361 | AACGAUUUCGAGAUUUACU | AGUAAAUCUCGAAAUCGUU | Chmp | [1375-1393] |
| 362 | UUUGCAUCAAUACUCAACA | UGUUGAGUAUUGAUGCAAA | Chmp | [1551-1569] |
| 363 | UAAAGAGUCUUUCAGCUGA | UCAGCUGAAAGACUCUUUA | Chmp | [1958-1976] |
| 364 | UUUUCAUGGUGGAUUCAAG | CUUGAAUCCACCAUGAAAA | | [2249-2267] |
| 365 | AAGAAAAUUUUAAAGCAAG | CUUGCUUUAAAAUUUUCUU | GP, Chmp | [1222-1240] |
| 366 | CUGCUGACGUUGCAUGUUU | AAACAUGCAACGUCAGCAG | Chmp | [846-864] |
| 367 | GAAGAGCCCAGAUUCCAAG | CUUGGAAUCUGGGCUCUUC | Chmp | [1053-1071] |
| 368 | AAUUCAAGACUGUUUAUAG | CUAUAAACAGUCUUGAAUU | | [1785-1803] |
| 369 | AACAGUUGGUGUUUUCUGU | ACAGAAAACACCAACUGUU | Chmp | [1859-1877] |
| 370 | GUAUUUCUCAGAACAUUUU | AAAAUGUUCUGAGAAAUAC | Chmp | [962-980] |
| 371 | GUCACAUUACAUGUUUAAU | AUUAAACAUGUAAUGUGAC | Chmp | [2137-2155] |
| 372 | UUUUGGUUGAACAAAUGCA | UGCAUUUGUUCAACCAAAA | Chmp | [2334-2352] |
| 373 | GUAUUUUCUCAGGCGUGCA | UGCACGCCUGAGAAAAUAC | Chmp | [577-595] |
| 374 | GUUCCUCUUUAAAUUGUUU | AAACAAUUUAAAGAGGAAC | Chmp | [2317-2335] |
| 375 | UGAAGUAUCAAACUAAUUU | AAAUUAGUUUGAUACUUCA | Chmp | [877-895] |
| 376 | CUUGCUGUAUAACCAAGGG | CCCUUGGUUAUACAGCAAG | Chmp | [341-359] |
| 377 | AUUCUGCCCUUCAUUCAAU | AUUGAAUGAAGGGCAGAAU | Rat, Chin, Chmp | [1422-1440] |
| 378 | UAUGUUGCAUAACAAGUUU | AAACUUGUUAUGCAACAUA | Chmp | [1670-1688] |
| 379 | UUUCCUUACCAGAGUAUUU | AAAUACUCUGGUAAGGAAA | Chmp | [949-967] |
| 380 | GCUUCCACUCAGUCUUUGA | UCAAAGACUGAGUGGAAGC | | [105-123] |
| 381 | AAUAGUAGGAGACUGGACA | UGUCCAGUCUCCUACUAUU | Chin, GP, Chmp | [1355-1373] |
| 382 | UGUUCCUCUUUAAAUUGUU | AACAAUUUAAAGAGGAACA | Chmp | [2316-2334] |
| 383 | CAUGCUGCUGACGUUGCAU | AUGCAACGUCAGCAGCAUG | Chmp | [842-860] |
| 384 | UCCUUACCAGAGUAUUUCU | AGAAAUACUCUGGUAAGGA | Chmp | [951-969] |
| 385 | UGAAUACAAUAAAGAGUCU | AGACUCUUUAUUGUAUUCA | Chmp | [1949-1967] |
| 386 | CCAUACAAGCUUAGAAGAC | GUCUUCUAAGCUUGUAUGG | Chin, GP, Chmp | [1590-1608] |
| 387 | UACCAGAGUAUUUCUCAGA | UCUGAGAAAUACUCUGGUA | Chmp | [955-973] |
| 388 | AGAACAUUCCAUAUUACCU | AGGUAAUAUGGAAUGUUCU | Chmp | [543-561] |
| 389 | AAAACUUCUCUUCACAACU | AGUUGUGAAGAGAAGUUUU | Chmp | [695-713] |
| 390 | UACAAGCUUAGAAGACUAU | AUAGUCUUCUAAGCUUGUA | Chmp | [1593-1611] |
| 391 | AGUAUUUCUCAGAACAUUU | AAAUGUUCUGAGAAAUACU | Chmp | [961-979] |
| 392 | AAUUAUCCCAAGCUGUAUA | UAUACAGCUUGGGAUAAUU | Chmp | [1446-1464] |
| 393 | GAUUGUUGGAUAAAAGCAG | CUGCUUUUAUCCAACAAUC | Chmp | [526-544] |
| 394 | AAAUUUUAAAGCAAGACCU | AGGUCUUGCUUUAAAAUUU | GP, Chmp | [1226-1244] |
| 395 | UUCAAAACCGGCAGAGUUU | AAACUCUGCCGGUUUUGAA | Chmp | [1004-1022] |
| 396 | AAGUCCAUUUGAGGAAUCA | UGAUUCCUCAAAUGGACUU | Chin, Chmp | [1481-1499] |
| 397 | GCUUAGAAGACUAUACUUU | AAAGUAUAGUCUUCUAAGC | Chmp | [1598-1616] |
| 398 | AACCAUACAAGCUUAGAAG | CUUCUAAGCUUGUAUGGUU | Chin, GP, Chmp | [1588-1606] |
| 399 | CUUUGUUGAACUGAAUGCA | UGCAUUCAGUUCAACAAAG | | [650-668] |
| 400 | UCAUCUUAAAAUAGUAGGA | UCCUACUAUUUUAAGAUGA | Chmp | [1346-1364] |
| 401 | AAUUUGUGAAGAUUUGUAU | AUACAAAUCUUCACAAAUU | Chmp | [1033-1051] |
| 402 | AGGAGGGCUGCUGAAGUAU | AUACUUCAGCAGCCCUCCU | GP, Chmp | [866-884] |
| 403 | GUGUUACUAUCUGUAUUUU | AAAAUACAGAUAGUAACAC | Chin, GP, Chmp | [565-583] |
| 404 | CAUUAGAAAAUCAUCCAUU | AAUGGAUGAUUUUCUAAUG | Chmp | [1282-1300] |
| 405 | UUCUGUUGUGGACCCAAUU | AAUUGGGUCCACAACAGAA | Chmp | [1872-1890] |
| 406 | ACUAUCCAAGACUCUUCAU | AUGAAGAGUCUUGGAUAGU | Chmp | [1892-1910] |
| 407 | UCUUUAAAUUGUUUUUGGU | ACCAAAAACAAUUUAAAGA | Chmp | [2322-2340] |
| 408 | ACUAUGAUAUCUUCUGGUA | UACCAGAAGAUAUCAUAGU | Chmp | [796-814] |
| 409 | AUCUAAGGCUGAUUGUCGU | ACGACAAUCAGCCUUAGAU | Chmp | [2298-2316] |
| 410 | UUACUACUGCCUCCAUCUA | UAGAUGGAGGCAGUAGUAA | Chmp | [1389-1407] |
| 411 | UUACCAGAGUAUUUCUCAG | CUGAGAAAUACUCUGGUAA | Chmp | [954-972] |
| 412 | GGUGCUAUUCCUCAUGAUC | GAUCAUGAGGAAUAGCACC | Chmp | [746-764] |
| 413 | AACAGACCUGACUAUGUCA | UGACAUAGUCAGGUCUGUU | Chin, GP, Chmp | [1698-1716] |
| 414 | CAAAUUUGUGAAGAUUUGU | ACAAAUCUUCACAAAUUUG | Chmp | [1031-1049] |
| 415 | AGCCUUAUCCUUUUACCCA | UGGGUAAAAGGAUAAGGCU | Chin, GP | [444-462] |
| 416 | CUCCAUUUGCAUCAAUACU | AGUAUUGAUGCAAAUGGAG | Chmp | [1546-1564] |
| 417 | CCUAGUGAGGAGCUGAACU | AGUUCAGCUCCUCACUAGG | Chmp | [2273-2291] |
| 418 | UUAAAAUGGAAAUGUGAGA | UCUCACAUUUCCAUUUUAA | Chmp | [2102-2120] |
| 419 | ACGUCCUCGGUGGAAACUU | AAGUUUCCACCGAGGACGU | Chmp | [1805-1823] |
| 420 | AAACUGAGUAACCAGAACA | UGUUCUGGUUACUCAGUUU | | [1911-1929] |
| 421 | UGUCCAACUGAAACCAAAG | CUUUGGUUUCAGUUGGACA | Chmp | [1314-1332] |
| 422 | GUGAAUGCCCUCAACUUCU | AGAAGUUGAGGGCAUUCAC | Chmp | [612-630] |
| 423 | UAGUAAGGUUUUCUUAUUU | AAAUAAGAAAACCUUACUA | Chmp | [2075-2093] |
| 424 | AACCUUUCCCUGAAGGAUU | AAUCCUUCAGGGAAAGGUU | Chmp | [985-1003] |
| 425 | CAGUCUUAACCGAACCAGC | GCUGGUUCGGUUAAGACUG | Chmp | [920-938] |
| 426 | GCUGCAUCAGUCUUAACCG | CGGUUAAGACUGAUGCAGC | Chmp | [913-931] |
| 427 | UAUCUGCAUUAGAAAAUCA | UGAUUUUCUAAUGCAGAUA | Chmp | [1276-1294] |
| 428 | GGUUUUCUUAUUUAUGAUU | AAUCAUAAAUAAGAAAACC | Chmp | [2081-2099] |
| 429 | UAUCUUCUGGUAUACUCAU | AUGAGUAUACCAGAAGAUA | Chin, GP, Chmp | [803-821] |
| 430 | GUCAAGACUCCGAAAUUCU | AGAAUUUCGGAGUCUUGAC | Chmp | [1408-1426] |
| 431 | UUGUUUUUGGUUGAACAAA | UUUGUUCAACCAAAAACAA | Chmp | [2330-2348] |
| 432 | UUCAUGGUGGAUUCAAGAA | UUCUUGAAUCCACCAUGAA | | [2251-2269] |
| 433 | UUUCUGUUGUGGACCCAAU | AUUGGGUCCACAACAGAAA | Chmp | [1871-1889] |
| 434 | CAUGGAAAUCCGAAUGGUC | GACCAUUCGGAUUUCCAUG | GP, Chin, Chmp | [1202-1220] |
| 435 | UCAAGACUCCGAAAUUCUG | CAGAAUUUCGGAGUCUUGA | Chmp | [1409-1427] |
| 436 | UGUAUGGAAGAGCCCAGAU | AUCUGGGCUCUUCCAUACA | Chmp | [1047-1065] |
| 437 | AGACUGGACAGAACGAUUU | AAAUCGUUCUGUCCAGUCU | Chmp | [1364-1382] |
| 438 | CACCUCUGCCUGUUCAUCU | AGAUGAACAGGCAGAGGUG | | [285-303] |
| 439 | AGUCUUAACCGAACCAGCU | AGCUGGUUCGGUUAAGACU | Chmp | [921-939] |
| 440 | AUUUGAAUACAAUAAAGAG | CUCUUUAUUGUAUUCAAAU | Chmp | [1946-1964] |
| 441 | ACCUGUGGUGUUACUAUCU | AGAUAGUAACACCACAGGU | Chmp | [558-576] |
| 442 | ACAGAACGAUUUCGAGAUU | AAUCUCGAAAUCGUUCUGU | Chmp | [1371-1389] |
| 443 | UCUGGUAUACUCAUAACCU | AGGUUAUGAGUAUACCAGA | Chin, GP, Chmp | [808-826] |
| 444 | UUCUUAACCUCAACUGCAG | CUGCAGUUGAGGUUAAGAA | Chmp | [427-445] |
| 445 | CCAAAGAAUAGUAAGGUUU | AAACCUUACUAUUCUUUGG | Chmp | [2067-2085] |
| 446 | UUGUAUGGAAGAGCCCAGA | UCUGGGCUCUUCCAUACAA | Chmp | [1046-1064] |
| 447 | UGGUAUACUCAUAACCUCU | AGAGGUUAUGAGUAUACCA | Chin, GP, Chmp | [810-828] |
| 448 | AAGUAUCAAACUAAUUUAG | CUAAAUUAGUUUGAUACUU | Chmp | [879-897] |
| 449 | UUGUGAAGAUUUGUAUGGA | UCCAUACAAAUCUUCACAA | Chmp | [1036-1054] |
| 450 | AUCUGCAUUAGAAAAUCAU | AUGAUUUUCUAAUGCAGAU | Chmp | [1277-1295] |
| 451 | CAAUAAAGAGUCUUUCAGC | GCUGAAAGACUCUUUAUUG | Chmp | [1955-1973] |
| 452 | GAUUGUCGUGUUCCUCUUU | AAAGAGGAACACGACAAUC | Chmp | [2308-2326] |
| 453 | ACUUUUCAGUUCUCAAAUU | AAUUUGAGAACUGAAAAGU | Chmp | [2200-2218] |
| 454 | GUUGAUUUUCAUGGUGGAU | AUCCACCAUGAAAAUCAAC | | [2244-2262] |
| 455 | UACUCAUAACCUCUUCUUU | AAAGAAGAGGUUAUGAGUA | Chin, GP, Chmp | [815-833] |
| 456 | AGAGUAUCACUACCUCCAC | GUGGAGGUAGUGAUACUCU | Chin, GP, Chmp | [362-380] |
| 457 | GACUGGACAGAACGAUUUC | GAAAUCGUUCUGUCCAGUC | Chmp | [1365-1383] |
| 458 | CCUCAACUGCAGCCUUAUC | GAUAAGGCUGCAGUUGAGG | Chin, Chmp | [434-452] |
| 459 | UAAUCUGGAAACCAAAGAG | CUCUUUGGUUUCCAGAUUA | Chmp | [2152-2170] |
| 460 | AAUAUUUCCUUACCAGAGU | ACUCUGGUAAGGAAAUAUU | Chmp | [945-963] |
| 461 | AGAAAUUAUCCCAAGCUGU | ACAGCUUGGGAUAAUUUCU | Chmp | [1443-1461] |
| 462 | CUUCUCAGUGAAUUACAGU | ACUGUAAUUCACUGAGAAG | | [626-644] |
| 463 | ACAUAUGCAAUAAGAGUUU | AAACUCUUAUUGCAUAUGU | Chmp | [774-792] |
| 464 | CAGACCUGACUAUGUCAAC | GUUGACAUAGUCAGGUCUG | Chmp | [1700-1718] |
| 465 | GGUUAAACACCUCUGCCUG | CAGGCAGAGGUGUUUAACC | Ms | [278-296] |
| 466 | AAUGCAGCAAGAUACCGAG | CUCGGUAUCUUGCUGCAUU | GP, Chmp | [663-681] |
| 467 | GAACAGACCUGACUAUGUC | GACAUAGUCAGGUCUGUUC | Chin, GP, Chmp | [1697-1715] |
| 468 | GUUUACCCAGCACAAAUUU | AAAUUUGUGCUGGGUAAAC | Chmp | [1019-1037] |
| 469 | UCAUGAUCACAGCCUCUAC | GUAGAGGCUGUGAUCAUGA | Chmp | [757-775] |
| 470 | AAAUAUCAUGCACUGAAUU | AAUUCAGUGCAUGAUAUUU | Chmp | [1770-1788] |
| 471 | GAAGACUUUGUUGAACUGA | UCAGUUCAACAAAGUCUUC | | [645-663] |
| 472 | AACAGAUGGGAUACAGAAG | CUUCUGUAUCCCAUCUGUU | Rat, GP, Chmp | [1739-1757] |
| 473 | AAGCAGGAGAACCAGGAGA | UCUCCUGGUUCUCCUGCUU | Chmp | [509-527] |
| 474 | AUUUCUCAGAACAUUUUCA | UGAAAAUGUUCUGAGAAAU | Chmp | [964-982] |
| 475 | AUGAUCACAGCCUCUACAU | AUGUAGAGGCUGUGAUCAU | Chmp | [759-777] |
| 476 | GUUAAACACCUCUGCCUGU | ACAGGCAGAGGUGUUUAAC | | [279-297] |
| 477 | GACCUUUGUGCCUGUACUG | CAGUACAGGCACAAAGGUC | GP, Chin, Chmp | [1105-1123] |
| 478 | AAAUUAUCCCAAGCUGUAU | AUACAGCUUGGGAUAAUUU | Chmp | [1445-1463] |
| 479 | CUUUAAAUUGUUUUUGGUU | AACCAAAAACAAUUUAAAG | Chmp | [2323-2341] |
| 480 | UCUACAUAUGCAAUAAGAG | CUCUUAUUGCAUAUGUAGA | Chmp | [771-789] |
| 481 | AGCAAGAUACCGAGAUGAG | CUCAUCUCGGUAUCUUGCU | GP, Chmp | [668-686] |
| 482 | UUUCCCUGAAGGAUUUUCA | UGAAAAUCCUUCAGGGAAA | Chmp | [989-1007] |
| 483 | ACAAAUUUGUGAAGAUUUG | CAAAUCUUCACAAAUUUGU | Chmp | [1030-1048] |
| 484 | GGUGGAUUCAAGAACUCCC | GGGAGUUCUUGAAUCCACC | Chmp | [2256-2274] |
| 485 | UACUCUACAUUGUCCCAGU | ACUGGGACAAUGUAGAGUA | Chmp | [1256-1274] |
| 486 | CAGUCCUUCCGUUGGUUUG | CAAACCAACGGAAGGACUG | Chmp | [1638-1656] |
| 487 | AUCUGUUCUUAACCUCAAC | GUUGAGGUUAAGAACAGAU | Chmp | [422-440] |
| 488 | UAUUUAAAAUGGAAAUGUG | CACAUUUCCAUUUUAAAUA | Chmp | [2099-2117] |
| 489 | AGAUAUCCAGUCCUUCCGU | ACGGAAGGACUGGAUAUCU | Chmp | [1631-1649] |
| 490 | AAUACAAUAAAGAGUCUUU | AAAGACUCUUUAUUGUAUU | Chmp | [1951-1969] |
| 491 | AUAACAGAGGAAAAACAGU | ACUGUUUUUCCUCUGUUAU | | [1846-1864] |
| 492 | UACUUUAUUUGGGUAUGCA | UGCAUACCCAAAUAAAGUA | Chmp | [1611-1629] |
| 493 | GAGGAGCUGAACUUGCUCA | UGAGCAAGUUCAGCUCCUC | Chmp | [2279-2297] |
| 494 | UUAAUCUGGAAACCAAAGA | UCUUUGGUUUCCAGAUUAA | Chmp | [2151-2169] |
| 495 | UAUCACUACCUCCACCAGA | UCUGGUGGAGGUAGUGAUA | Chin, GP, Chmp | [366-384] |
| 496 | UCUGGAAAACCUUCUUGCU | AGCAAGAAGGUUUUCCAGA | Chmp | [328-346] |
| 497 | UCAAGAACUCCCUAGUGAG | CUCACUAGGGAGUUCUUGA | Chmp | [2263-2281] |
| 498 | UUGGAAGUCCAUUUGAGGA | UCCUCAAAUGGACUUCCAA | Rat, Chin, Chmp | [1477-1495] |
| 499 | CCUUUUACCCAUGUGCCGA | UCGGCACAUGGGUAAAAGG | Chin | [452-470] |
| 500 | GUAUGCAGAGAUAUCCAGU | ACUGGAUAUCUCUGCAUAC | Chmp | [1623-1641] |

TABLE A3
NOX1 19-mer oligomer pairs (NADPH oxidase 1)

| | | | | Human- | Human- |
|---|---|---|---|---|---|
| | | | | 21614529 | 7669509 |
| No. | Sense siRNA | AntiSense siRNA | Other Sp | ORF: 207-1901 | ORF: 71-1618 |
| 1 | CUCUCUGCUUGAAUUUUAA | UUAAAAUUCAAGCAGAGAG | | [376-394] | [240-258] |
| 2 | GGAGUUAUUUUGAAGUCUU | AAGACUUCAAAAUAACUCC | | [799-817] | [663-681] |
| 3 | GGCUGAAUGUUUUCCUGUU | AACAGGAAAACAUUCAGCC | | [265-283] | [129-147] |
| 4 | GCAAAGUGGGUUUUCUAAA | UUUAGAAAACCCACUUUGC | | [1594-1612] | — |
| 5 | GCAGACCACAACCUCAAAA | UUUUGAGGUUGUGGUCUGC | GP | [1476-1494] | [1340-1358] |
| 6 | GGACAGAAAAUCUCAUAAG | CUUAUGAGAUUUUCUGUCC | Rat | [1288-1306] | [1152-1170] |
| 7 | CCGGAGGAGUUAUUUUGAA | UUCAAAAUAACUCCUCCGG | | [794-812] | [658-676] |
| 8 | ACAUGUUUACUGUCACUUU | AAAGUGACAGUAAACAUGU | | [2487-2505] | — |
| 9 | GUAGGGUGACUUUUUAAAU | AUUUAAAAAGUCACCCUAC | | [2371-2389] | — |
| 10 | CCAGGUGAUUUUAUCAAUU | AAUUGAUAAAAUCACCUGG | | [2281-2299] | — |
| 11 | CACUUUAGGAUAAGAAUGU | ACAUUCUUAUCCUAAAGUG | | [2041-2059] | [1701-1719] |
| 12 | GUCACUUUAGGAUAAGAAU | AUUCUUAUCCUAAAGUGAC | | [2039-2057] | [1699-1717] |
| 13 | AGUCACUUUAGGAUAAGAA | UUCUUAUCCUAAAGUGACU | | [2038-2056] | [1698-1716] |
| 14 | AGGUUCAAUUCUACUUCAA | UUGAAGUAGAAUUGAACCU | Rat | [1867-1885] | [1584-1602] |
| 15 | GGCAUCCUUUUACUUUGAC | GUCAAAGUAAAAGGAUGCC | | [1216-1234] | [1080-1098] |
| 16 | GCAGAGUCUUUUGAGAUGU | ACAUCUCAAAAGACUCUGC | | [936-954] | [800-818] |
| 17 | CUCCAGCCUAUCUCAUGAU | AUCAUGAGAUAGGCUGGAG | | [629-647] | [493-511] |
| 18 | CAGUCACUUUAGGAUAAGA | UCUUAUCCUAAAGUGACUG | | [2037-2055] | [1697-1715] |
| 19 | CAAAGUGGGUUUUCUAAAC | GUUUAGAAAACCCACUUUG | | [1595-1613] | — |
| 20 | CGGUCAUUCUUUAUAUCUG | CAGAUAUAAAGAAUGACCG | | [1033-1051] | [897-915] |
| 21 | CGGCAUUGGUGGAAUUGUC | GACAAUUCCACCAAUGCCG | | [869-887] | [733-751] |
| 22 | CCACCUUUUUAUCUUCUAU | AUAGAAGAUAAAAAGGUGG | | [830-848] | [694-712] |
| 23 | GGAGGAGUUAUUUUGAAGU | ACUUCAAAAUAACUCCUCC | | [796-814] | [660-678] |
| 24 | CAGUGGAGUAUGUGACAUU | AAUGUCACAUACUCCACUG | | [697-715] | [561-579] |
| 25 | ACACCUGUUUAACUUUGAC | GUCAAAGUUAAACAGGUGU | | [560-578] | [424-442] |
| 26 | CACACCUGUUUAACUUUGA | UCAAAGUUAAACAGGUGUG | Rb | [559-577] | [423-441] |
| 27 | GCUAUUCACAUCAUUGCAC | GUGCAAUGAUGUGAAUAGC | | [543-561] | [407-425] |
| 28 | GGAUCACAACCUCACCUUC | GAAGGUGAGGUUGUGAUCC | Rat, Ms | [488-506] | [352-370] |
| 29 | UCACUUUUGAUAUGGUCUU | AAGACCAUAUCAAAAGUGA | | [2499-2517] | — |
| 30 | AGUAGGGUGACUUUUUAAA | UUUAAAAAGUCACCCUACU | | [2370-2388] | — |
| 31 | CCCAGGUGAUUUUAUCAAU | AUUGAUAAAAUCACCUGGG | | [2280-2298] | — |
| 32 | GCAUUAAACUUUGACAAGG | CCUUGUCAAAGUUUAAUGC | | [1662-1680] | [1379-1397] |
| 33 | AAGUGGGUUUUCUAAACUA | UAGUUUAGAAAACCCACUU | | [1597-1615] | — |
| 34 | CUCCAUUCAUAUCCGAGCA | UGCUCGGAUAUGAAUGGAG | | [1259-1277] | [1123-1141] |
| 35 | AGAUUUCUUCUCCAUUCAU | AUGAAUGGAGAAGAAAUCU | | [1250-1268] | [1114-1132] |
| 36 | UGGCAUCCUUUUACUUUGA | UCAAAGUAAAAGGAUGCCA | | [1215-1233] | [1079-1097] |
| 37 | UCAAUCUCUCUCCUGGAAU | AUUCCAGGAGAGAGAUUGA | | [1197-1215] | [1061-1079] |
| 38 | CAAGUGUGCAGAGUCUUUU | AAAAGACUCUGCACACUUG | | [929-947] | [793-811] |
| 39 | ACAGUGGAGUAUGUGACAU | AUGUCACAUACUCCACUGU | | [696-714] | [560-578] |
| 40 | CCAGCCUAUCUCAUGAUGA | UCAUCAUGAGAUAGGCUGG | | [631-649] | [495-513] |
| 41 | CUAUUCACAUCAUUGCACA | UGUGCAAUGAUGUGAAUAG | | [544-562] | [408-426] |
| 42 | UACAGCUAUUCACAUCAUU | AAUGAUGUGAAUAGCUGUA | | [539-557] | [403-421] |
| 43 | CACUUUUGAUAUGGUCUUA | UAAGACCAUAUCAAAAGUG | | [2500-2518] | — |
| 44 | CCUGAGUUUUGGUUUGUAA | UUACAAACCAAAACUCAGG | | [2315-2333] | — |
| 45 | AGGAUAAGAAUGUGCCUCU | AGAGGCACAUUCUUAUCCU | | [2047-2065] | [1707-1725] |
| 46 | UGAGCAGUCACUUUAGGAU | AUCCUAAAGUGACUGCUCA | | [2033-2051] | [1693-1711] |
| 47 | GGAGUUUUCUUAUGUGGCC | GGCCACAUAAGAAAACUCC | | [1785-1803] | [1502-1520] |
| 48 | CCACAACCUCAAAACAAAA | UUUUGUUUUGAGGUUGUGG | | [1481-1499] | [1345-1363] |
| 49 | ACCACAACCUCAAAACAAA | UUUGUUUUGAGGUUGUGGU | | [1480-1498] | [1344-1362] |
| 50 | AGAAUCCGGAUUGCUGAAU | AUUCAGCAAUCCGGAUUCU | | [147-165] | [11-29] |
| 51 | CCUUUUACUUUGACCUCUG | CAGAGGUCAAAGUAAAAGG | | [1221-1239] | [1085-1103] |
| 52 | UGAUUACCAAGGUUGUUAU | AUAACAACCUUGGUAAUCA | | [1093-1111] | [957-975] |
| 53 | CCGGUCAUUCUUUAUAUCU | AGAUAUAAAGAAUGACCGG | | [1032-1050] | [896-914] |
| 54 | ACCGGUCAUUCUUUAUAUC | GAUAUAAAGAAUGACCGGU | | [1031-1049] | [895-913] |
| 55 | CGGAGGAGUUAUUUUGAAG | CUUCAAAAUAACUCCUCCG | | [795-813] | [659-677] |
| 56 | CAAUAGCCUUGAUUCUCAU | AUGAGAAUCAAGGCUAUUG | | [751-769] | [615-633] |
| 57 | CUGUUUAACUUUGACUGCU | AGCAGUCAAAGUUAAACAG | | [564-582] | [428-446] |
| 58 | CACCUGUUUAACUUUGACU | AGUCAAAGUUAAACAGGUG | | [561-579] | [425-443] |
| 59 | UGAAUUUUAACAGCACGCU | AGCGUGCUGUUAAAAUUCA | | [385-403] | [249-267] |
| 60 | CCGACAAAUACUACUACAC | GUGUAGUAGUAUUUGUCGG | | [313-331] | [177-195] |
| 61 | CCUUCCUGAAAUAUGAGAA | UUCUCAUAUUUCAGGAAGG | | [292-310] | [156-174] |
| 62 | GCCUUCCUGAAAUAUGAGA | UCUCAUAUUUCAGGAAGGC | | [291-309] | [155-173] |
| 63 | CUGUAAAUCUUUCUGGACA | UGUCCAGAAAGAUUUACAG | | [2201-2219] | — |
| 64 | UGCAUUCAACUUCGUUACU | AGUAACGAAGUUGAAUGCA | | [2099-2117] | — |
| 65 | GCAUUUUGUCUCUUUGUAU | AUACAAAGAGACAAAAUGC | | [1984-2002] | [1644-1662] |
| 66 | GUAGUGGGAGUUUUCUUAU | AUAAGAAAACUCCCACUAC | | [1779-1797] | [1496-1514] |
| 67 | CCAAGUCUGUAGUGGGAGU | ACUCCCACUACAGACUUGG | | [1771-1789] | [1488-1506] |
| 68 | CCGGAUGGGACAGCAAUAU | AUAUUGCUGUCCCAUCCGG | | [1630-1648] | — |
| 69 | AAAGUGGGUUUUCUAAACU | AGUUUAGAAAACCCACUUU | | [1596-1614] | — |
| 70 | ACAAAUUCCAGUGUGCAGA | UCUGCACACUGGAAUUUGU | | [1462-1480] | [1326-1344] |
| 71 | GGUACAAAUUCCAGUGUGC | GCACACUGGAAUUUGUACC | | [1459-1477] | [1323-1341] |
| 72 | CUUCUAUCUUGAAAUCCAU | AUGGAUUUCAAGAUAGAAG | | [1438-1456] | [1302-1320] |
| 73 | GCAUCCUUUUACUUUGACC | GGUCAAAGUAAAAGGAUGC | | [1217-1235] | [1081-1099] |
| 74 | CAGAGUCUUUUGAGAUGUG | CACAUCUCAAAAGACUCUG | | [937-955] | [801-819] |
| 75 | GAGUUAUUUUGAAGUCUUC | GAAGACUUCAAAAUAACUC | | [800-818] | [664-682] |
| 76 | GAGGAGUUAUUUUGAAGUC | GACUUCAAAAUAACUCCUC | | [797-815] | [661-679] |
| 77 | CGACAGUGGAGUAUGUGAC | GUCACAUACUCCACUGUCG | | [694-712] | [558-576] |
| 78 | UCCAGCCUAUCUCAUGAUG | CAUCAUGAGAUAGGCUGGA | | [630-648] | [494-512] |
| 79 | ACCUGUUUAACUUUGACUG | CAGUCAAAGUUAAACAGGU | | [562-580] | [426-444] |
| 80 | UGCACACCUGUUUAACUUU | AAAGUUAAACAGGUGUGCA | | [557-575] | [421-439] |
| 81 | ACAUCAUUGCACACCUGUU | AACAGGUGUGCAAUGAUGU | | [550-568] | [414-432] |
| 82 | GCCUAUAUGAUCUGCCUAC | GUAGGCAGAUCAUAUAGGC | | [519-537] | [383-401] |
| 83 | GGCCGACAAAUACUACUAC | GUAGUAGUAUUUGUCGGCC | | [311-329] | [175-193] |
| 84 | UGAAUGUUUUCCUGUUUGU | ACAAACAGGAAAACAUUCA | | [268-286] | [132-150] |
| 85 | CUGAAUGUUUUCCUGUUUG | CAAACAGGAAAACAUUCAG | | [267-285] | [131-149] |
| 86 | CAGUUUUGUUUCUGGUUGU | ACAACCAGAAACAAAACUG | | [238-256] | [102-120] |
| 87 | UGUUUACUGUCACUUUUGA | UCAAAAGUGACAGUAAACA | | [2490-2508] | — |
| 88 | CAACUUAAGAACUUCUGAA | UUCAGAAGUUCUUAAGUUG | | [2128-2146] | — |
| 89 | CAACUUCGUUACUUGAGCU | AGCUCAAGUAACGAAGUUG | | [2105-2123] | — |
| 90 | UGAUUGCAUUCAACUUCGU | ACGAAGUUGAAUGCAAUCA | | [2095-2113] | — |
| 91 | UCCCUGGUAUUCUUUUUUU | AAAAAAAGAAUACCAGGGA | | [2077-2095] | — |
| 92 | UGCAUUUUGUCUCUUUGUA | UACAAAGAGACAAAAUGCA | | [1983-2001] | [1643-1661] |
| 93 | GUGGGAGUUUUCUUAUGUG | CACAUAAGAAAACUCCCAC | | [1782-1800] | [1499-1517] |
| 94 | AGUCUGUAGUGGGAGUUUU | AAAACUCCCACUACAGACU | | [1774-1792] | [1491-1509] |
| 95 | CAAGUCUGUAGUGGGAGUU | AACUCCCACUACAGACUUG | | [1772-1790] | [1489-1507] |
| 96 | GGACAAUGAGUUUUCUACA | UGUAGAAAACUCAUUGUCC | | [1736-1754] | [1453-1471] |
| 97 | CAGCAAUAUUGUUGGUCAU | AUGACCAACAAUAUUGCUG | | [1640-1658] | — |
| 98 | CACAACCUCAAAACAAAAA | UUUUUGUUUUGAGGUUGUG | | [1482-1500] | [1346-1364] |
| 99 | GACCACAACCUCAAAACAA | UUGUUUUGAGGUUGUGGUC | | [1479-1497] | [1343-1361] |
| 100 | CUAUCUUGAAAUCCAUCUG | CAGAUGGAUUUCAAGAUAG | | [1441-1459] | [1305-1323] |
| 101 | CCCUUUGCUUCUAUCUUGA | UCAAGAUAGAAGCAAAGGG | | [1431-1449] | [1295-1313] |
| 102 | UCCUUUUACUUUGACCUCU | AGAGGUCAAAGUAAAAGGA | | [1220-1238] | [1084-1102] |
| 103 | GUCAUUCUUUAUAUCUGUG | CACAGAUAUAAAGAAUGAC | | [1035-1053] | [899-917] |
| 104 | AGAGCAUGAAUGAGAGUCA | UGACUCUCAUUCAUGCUCU | | [904-922] | [768-786] |
| 105 | GCUUAGGGAUUCACGGCAU | AUGCCGUGAAUCCCUAAGC | | [856-874] | [720-738] |
| 106 | ACCACCUUUUUAUCUUCUA | UAGAAGAUAAAAAGGUGGU | | [829-847] | [693-711] |
| 107 | AGGAGUUAUUUUGAAGUCU | AGACUUCAAAAUAACUCCU | | [798-816] | [662-680] |
| 108 | UGAUUCUCAUGGUAACUUC | GAAGUUACCAUGAGAAUCA | GP, Rb | [760-778] | [624-642] |
| 109 | CUGGAGUGAUCAUGACAAU | AUUGUCAUGAUCACUCCAG | | [736-754] | [600-618] |
| 110 | GGGUAGGUGUGUGUUUUUC | GAAAAACACACACCUACCC | | [67-85] | — |
| 111 | CCUACAUACAGCUAUUCAC | GUGAAUAGCUGUAUGUAGG | | [533-551] | [397-415] |
| 112 | UGAAAUAUGAGAAGGCCGA | UCGGCCUUCUCAUAUUUCA | | [298-316] | [162-180] |
| 113 | GAAGGCGGAAUAAACUUAU | AUAAGUUUAUUCCGCCUUC | | [29-47] | — |
| 114 | AGUUUUGUUUCUGGUUGUU | AACAACCAGAAACAAAACU | | [239-257] | [103-121] |
| 115 | CUGUCACUUUUGAUAUGGU | ACCAUAUCAAAAGUGACAG | | [2496-2514] | — |
| 116 | CCCAUAUAACACCAACAGU | ACUGUUGGUGUUAUAUGGG | | [2466-2484] | — |
| 117 | ACAACUAAUCCCAGGUGAU | AUCACCUGGGAUUAGUUGU | | [2271-2289] | — |
| 118 | CAGAGUUAUACAACUAAUC | GAUUAGUUGUAUAACUCUG | | [2262-2280] | — |
| 119 | GUUCAGAGUUAUACAACUA | UAGUUGUAUAACUCUGAAC | | [2259-2277] | — |
| 120 | GGUUCAGAGUUAUACAACU | AGUUGUAUAACUCUGAACC | | [2258-2276] | — |
| 121 | GUGGUUCAGAGUUAUACAA | UUGUAUAACUCUGAACCAC | | [2256-2274] | — |
| 122 | UGGGAAACUGGGUGGUUAA | UUAACCACCCAGUUUCCCA | | [208-226] | [72-90] |
| 123 | GUAAUUUACUUGGUCUCGU | ACGAGACCAAGUAAAUUAC | | [2008-2026] | [1668-1686] |
| 124 | UCAGUAAUUUACUUGGUCU | AGACCAAGUAAAUUACUGA | | [2005-2023] | [1665-1683] |
| 125 | AGGACGGUAAUCUGCAUUU | AAAUGCAGAUUACCGUCCU | | [1971-1989] | [1631-1649] |
| 126 | AGCAUUAAACUUUGACAAG | CUUGUCAAAGUUUAAUGCU | | [1661-1679] | [1378-1396] |
| 127 | GCCUUUUCCUGGUUCAACA | UGUUGAACCAGGAAAAGGC | | [1536-1554] | — |
| 128 | CCUCAAAACAAAAAAGAUC | GAUCUUUUUUGUUUUGAGG | | [1487-1505] | [1351-1366] |
| | | | | | (16/16 |
| 129 | CAGACCACAACCUCAAAAC | GUUUUGAGGUUGUGGUCUG | | [1477-1495] | [1341-1359] |
| 130 | AGCAGAAGGUUGUGAUUAC | GUAAUCACAACCUUCUGCU | | [1081-1099] | [945-963] |
| 131 | UGCAGAGUCUUUUGAGAUG | CAUCUCAAAAGACUCUGCA | | [935-953] | [799-817] |
| 132 | GGAGAGCAUGAAUGAGAGU | ACUCUCAUUCAUGCUCUCC | | [902-920] | [766-784] |
| 133 | ACAUCUUAAAGGCUCACAG | CUGUGAGCCUUUAAGAUGU | | [86-104] | — |
| 134 | CUAUAUGAUCUGCCUACAU | AUGUAGGCAGAUCAUAUAG | | [521-539] | [385-403] |
| 135 | GAAAAAUCCUUGGGUCAAC | GUUGACCCAAGGAUUUUUC | | [334-352] | [198-216] |
| 136 | AGGCCGACAAAUACUACUA | UAGUAGUAUUUGUCGGCCU | | [310-328] | [174-192] |
| 137 | GGGCUGAAUGUUUUCCUGU | ACAGGAAAACAUUCAGCCC | | [264-282] | [128-146] |
| 138 | UCCCAGGUGAUUUUAUCAA | UUGAUAAAAUCACCUGGGA | | [2279-2297] | — |
| 139 | UGUAAAUCUUUCUGGACAG | CUGUCCAGAAAGAUUUACA | | [2202-2220] | — |
| 140 | CCCUGGUAUUCUUUUUUUG | CAAAAAAAGAAUACCAGGG | | [2078-2096] | — |
| 141 | CUCCCUGGUAUUCUUUUUU | AAAAAAGAAUACCAGGGAG | | [2076-2094] | — |
| 142 | GCCUUGACUCCCUGGUAUU | AAUACCAGGGAGUCAAGGC | | [2069-2087] | — |
| 143 | CAGUAAUUUACUUGGUCUC | GAGACCAAGUAAAUUACUG | | [2006-2024] | [1666-1684] |
| 144 | CUCUUUGUAUCUUCAGUAA | UUACUGAAGAUACAAAGAG | | [1993-2011] | [1653-1671] |
| 145 | CACCUCUUGACAAUGGGAA | UUCCCAUUGUCAAGAGGUG | | [195-213] | [59-77] |
| 146 | AAGGUUCAAUUCUACUUCA | UGAAGUAGAAUUGAACCUU | Rat | [1866-1884] | [1583-1601] |
| 147 | AGUGGGAGUUUUCUUAUGU | ACAUAAGAAAACUCCCACU | | [1781-1799] | [1498-1516] |
| 148 | UGUAGUGGGAGUUUUCUUA | UAAGAAAACUCCCACUACA | | [1778-1796] | [1495-1513] |
| 149 | CUGUAGUGGGAGUUUUCUU | AAGAAAACUCCCACUACAG | | [1777-1795] | [1494-1512] |
| 150 | UGGUCAUGCAGCAUUAAAC | GUUUAAUGCUGCAUGACCA | GP, Rat, | [1652-1670] | [1369-1387] |
| | | | Ms | | |
| 151 | GGUUUUCUAAACUACCGUC | GACGGUAGUUUAGAAAACC | | [1602-1620] | — |
| 152 | UGGAGGAAUUAGGCAAAGU | ACUUUGCCUAAUUCCUCCA | | [1582-1600] | — |
| 153 | GGAUUGCUGAAUCUUCCCU | AGGGAAGAUUCAGCAAUCC | | [154-172] | [18-36] |
| 154 | CUUUGCUUCUAUCUUGAAA | UUUCAAGAUAGAAGCAAAG | | [1433-1451] | [1297-1315] |
| 155 | CCUUUGCUUCUAUCUUGAA | UUCAAGAUAGAAGCAAAGG | | [1432-1450] | [1296-1314] |
| 156 | UGCACCGGUCAUUCUUUAU | AUAAAGAAUGACCGGUGCA | | [1028-1046] | [892-910] |
| 157 | GUGCAGAGUCUUUUGAGAU | AUCUCAAAAGACUCUGCAC | | [934-952] | [798-816] |
| 158 | AGGAGAGCAUGAAUGAGAG | CUCUCAUUCAUGCUCUCCU | | [901-919] | [765-783] |
| 159 | CUCACCACCUUUUUAUCUU | AAGAUAAAAAGGUGGUGAG | | [826-844] | [690-708] |
| 160 | GUAUACUCACCACCUUUUU | AAAAAGGUGGUGAGUAUAC | | [821-839] | [685-703] |
| 161 | CACAUCUUAAAGGCUCACA | UGUGAGCCUUUAAGAUGUG | | [85-103] | — |
| 162 | UCACAUCUUAAAGGCUCAC | GUGAGCCUUUAAGAUGUGA | | [84-102] | — |
| 163 | GUGGAGUAUGUGACAUUCA | UGAAUGUCACAUACUCCAC | | [699-717] | [563-581] |
| 164 | CCAUUCUCUCCAGCCUAUC | GAUAGGCUGGAGAGAAUGG | | [622-640] | [486-504] |
| 165 | CCUAUAUGAUCUGCCUACA | UGUAGGCAGAUCAUAUAGG | | [520-538] | [384-402] |
| 166 | UCCUGUGUGUCGCAAUCUG | CAGAUUGCGACACACAGGA | | [413-431] | [277-295] |
| 167 | AGAAAAAUCCUUGGGUCAA | UUGACCCAAGGAUUUUUCU | | [333-351] | [197-215] |
| 168 | AGGGCUGAAUGUUUUCCUG | CAGGAAAACAUUCAGCCCU | | [263-281] | [127-145] |
| 169 | AAACAAAAUUACCGAGAAC | GUUCUCGGUAAUUUUGUUU | | [2441-2459] | — |
| 170 | UGGUUUGUAAUCUUUUGUC | GACAAAAGAUUACAAACCA | | [2324-2342] | — |
| 171 | GAGUUUUGGUUUGUAAUCU | AGAUUACAAACCAAAACUC | | [2318-2336] | — |
| 172 | CAGGUGAUUUUAUCAAUUC | GAAUUGAUAAAAUCACCUG | | [2282-2300] | — |
| 173 | UGAAGUUCUUAAAGCCCAU | AUGGGCUUUAAGAACUUCA | | [2160-2178] | — |
| 174 | GGGAAACUGGGUGGUUAAC | GUUAACCACCCAGUUUCCC | | [209-227] | [73-91] |
| 175 | GCAACUUAAGAACUUCUGA | UCAGAAGUUCUUAAGUUGC | | [2127-2145] | — |
| 176 | AACUUCGUUACUUGAGCUU | AAGCUCAAGUAACGAAGUU | | [2106-2124] | — |
| 177 | CUCUUGACAAUGGGAAACU | AGUUUCCCAUUGUCAAGAG | | [198-216] | [62-80] |
| 178 | ACGGUAAUCUGCAUUUUGU | ACAAAAUGCAGAUUACCGU | | [1974-1992] | [1634-1652] |
| 179 | CUCGGACUUUGGCAAAGAG | CUCUUUGCCAAAGUCCGAG | | [1804-1822] | [1521-1539] |
| 180 | CAAUAUUGUUGGUCAUGCA | UGCAUGACCAACAAUAUUG | | [1643-1661] | [1367-1378] |
| | | | | | (12/12) |
| 181 | GCAAUAUUGUUGGUCAUGC | GCAUGACCAACAAUAUUGC | | [1642-1660] | [1367-1377] |
| | | | | | (11/11) |
| 182 | ACAGCAAUAUUGUUGGUCA | UGACCAACAAUAUUGCUGU | | [1639-1657] | — |
| 183 | GAAUUAGGCAAAGUGGGUU | AACCCACUUUGCCUAAUUC | | [1587-1605] | — |
| 184 | AGAUGGAGGAAUUAGGCAA | UUGCCUAAUUCCUCCAUCU | Ms | [1579-1597] | — |
| 185 | ACAGGAGAUGGAGGAAUUA | UAAUUCCUCCAUCUCCUGU | | [1574-1592] | — |
| 186 | CAACCUCAAAACAAAAAAG | CUUUUUUGUUUUGAGGUUG | | [1484-1502] | [1348-1366] |
| 187 | CCAGGAUUGAAGUGGAUGG | CCAUCCACUUCAAUCCUGG | | [1336-1354] | [1200-1218] |
| 188 | GACAGAAAAUCUCAUAAGG | CCUUAUGAGAUUUUCUGUC | Rat | [1289-1307] | [1153-1171] |
| 189 | GAAUGGCAUCCUUUUACUU | AAGUAAAAGGAUGCCAUUC | | [1212-1230] | [1076-1094] |
| 190 | GUUUUGGAAUUGCAGAUGA | UCAUCUGCAAUUCCAAAAC | Rat, Ms | [1125-1143] | [989-1007] |
| 191 | AAGUUUUGGAAUUGCAGAU | AUCUGCAAUUCCAAAACUU | Rat | [1123-1141] | [987-1005] |
| 192 | GUCAAACAGAGGAGAGCAU | AUGCUCUCCUCUGUUUGAC | | [892-910] | [756-774] |
| 193 | CUUAGGGAUUCACGGCAUU | AAUGCCGUGAAUCCCUAAG | | [857-875] | [721-739] |
| 194 | GAAGUCUUCUGGUAUACUC | GAGUAUACCAGAAGACUUC | | [810-828] | [674-692] |
| 195 | UUUGAAGUCUUCUGGUAUA | UAUACCAGAAGACUUCAAA | | [807-825] | [671-689] |
| 196 | UUGAUUCUCAUGGUAACUU | AAGUUACCAUGAGAAUCAA | GP, Rb | [759-777] | [623-641] |
| 197 | UCCCUUGCCUCCAUUCUCU | AGAGAAUGGAGGCAAGGGA | | [612-630] | [476-494] |
| 198 | GAGAAAGCAAUUGGAUCAC | GUGAUCCAAUUGCUUUCUC | | [476-494] | [340-358] |
| 199 | AAGGCGGAAUAAACUUAUU | AAUAAGUUUAUUCCGCCUU | | [30-48] | — |
| 200 | CUGAGUUUUGGUUUGUAAU | AUUACAAACCAAAACUCAG | | [2316-2334] | — |
| 201 | GGUGAUUUUAUCAAUUCCA | UGGAAUUGAUAAAAUCACC | | [2284-2302] | — |
| 202 | CUGAAGUUCUUAAAGUUCU | AGAACUUUAAGAACUUCAG | | [2142-2160] | — |
| 203 | AUCUGCAUUUUGUCUCUUU | AAAGAGACAAAAUGCAGAU | | [1980-1998] | [1640-1658] |
| 204 | GAAACAGAAAACCUCCUUU | AAAGGAGGUUUUCUGUUUC | Rat | [1703-1721] | [1420-1438] |
| 205 | UGUUGGUCAUGCAGCAUUA | UAAUGCUGCAUGACCAACA | | [1649-1667] | [1367-1384] |
| | | | | | (18/18) |
| 206 | GCUGAAUCUUCCCUGUUGC | GCAACAGGGAAGAUUCAGC | | [159-177] | [23-41] |
| 207 | ACAACCUGUUGACUUCCCU | AGGGAAGUCAACAGGUUGU | | [1552-1570] | — |
| 208 | CCUUUUCCUGGUUCAACAA | UUGUUGAACCAGGAAAAGG | | [1537-1555] | — |
| 209 | GGUGCCUUUUCCUGGUUCA | UGAACCAGGAAAAGGCACC | GP | [1533-1551] | — |
| 210 | UGCAGACCACAACCUCAAA | UUUGAGGUUGUGGUCUGCA | GP | [1475-1493] | [1339-1357] |
| 211 | GGCUUUCGAACAACAAUAU | AUAUUGUUGUUCGAAAGCC | | [1307-1325] | [1171-1189] |
| 212 | GGGACUGGACAGAAAAUCU | AGAUUUUCUGUCCAGUCCC | Rat | [1282-1300] | [1146-1164] |
| 213 | GGACAAAUGUUCCAUUCCU | AGGAAUGGAACAUUUGUCC | | [115-133] | — |
| 214 | CACCACCUUUUUAUCUUCU | AGAAGAUAAAAAGGUGGUG | | [828-846] | [692-710] |
| 215 | UCACCACCUUUUUAUCUUC | GAAGAUAAAAAGGUGGUGA | | [827-845] | [691-709] |
| 216 | AUACUCACCACCUUUUUAU | AUAAAAAGGUGGUGAGUAU | | [823-841] | [687-705] |
| 217 | CUCCAUUCUCUCCAGCCUA | UAGGCUGGAGAGAAUGGAG | | [620-638] | [484-502] |
| 218 | CACUGAGAAAGCAAUUGGA | UCCAAUUGCUUUCUCAGUG | | [472-490] | [336-354] |
| 219 | UGGUUAGGGCUGAAUGUUU | AAACAUUCAGCCCUAACCA | | [258-276] | [122-140] |
| 220 | GGUUUGUAAUCUUUUGUCC | GGACAAAAGAUUACAAACC | | [2325-2343] | — |
| 221 | UGAGUUUUGGUUUGUAAUC | GAUUACAAACCAAAACUCA | | [2317-2335] | — |
| 222 | UCAAUUCCAGUGUUACCAU | AUGGUAACACUGGAAUUGA | | [2294-2312] | [1329-1339] |
| | | | | | (11/11) |
| 223 | CUUCUGAAGUUCUUAAAGU | ACUUUAAGAACUUCAGAAG | | [2139-2157] | — |
| 224 | AGCAACUUAAGAACUUCUG | CAGAAGUUCUUAAGUUGCU | | [2126-2144] | — |
| 225 | CUUCGUUACUUGAGCUUCA | UGAAGCUCAAGUAACGAAG | | [2108-2126] | — |
| 226 | CUUCAGUAAUUUACUUGGU | ACCAAGUAAAUUACUGAAG | | [2003-2021] | [1663-1681] |
| 227 | CAGUAAUUGAGUUAUAGGA | UCCUAUAACUCAAUUACUG | | [1949-1967] | [1615-1627] |
| | | | | | (13/13) |
| 228 | CCUCUUGACAAUGGGAAAC | GUUUCCCAUUGUCAAGAGG | | [197-215] | [61-79 |
| 229 | CGGUAAUCUGCAUUUUGUC | GACAAAAUGCAGAUUACCG | | [1975-1993] | [1635-1653] |
| 230 | AUAGGAAUAAGGACGGUAA | UUACCGUCCUUAUUCCUAU | | [1962-1980] | [1622-1640] |
| 231 | UGAGUUAUAGGAAUAAGGA | UCCUUAUUCCUAUAACUCA | | [1956-1974] | [1616-1634]+ |
| 232 | GGAAUUAGGCAAAGUGGGU | ACCCACUUUGCCUAAUUCC | | [1586-1604] | — |
| 233 | CAGGAUUGAAGUGGAUGGU | ACCAUCCACUUCAAUCCUG | | [1337-1355] | [1201-1219] |
| 234 | GGGCUUUCGAACAACAAUA | UAUUGUUGUUCGAAAGCCC | | [1306-1324] | [1170-1188] |
| 235 | CAGAUGAACAAGCGUGGCU | AGCCACGCUUGUUCAUCUG | | [1137-1155] | [1001-1019] |
| 236 | ACAGAGGAGAGCAUGAAUG | CAUUCAUGCUCUCCUCUGU | | [897-915] | [761-779] |
| 237 | UCUUCUAUAUCCUUGGCUU | AAGCCAAGGAUAUAGAAGA | | [841-859] | [705-723] |
| 238 | UGGAGUGAUCAUGACAAUA | UAUUGUCAUGAUCACUCCA | | [737-755] | [601-619] |
| 239 | ACUGGAGUGAUCAUGACAA | UUGUCAUGAUCACUCCAGU | | [735-753] | [599-617] |
| 240 | CACACUGAGAAAGCAAUUG | CAAUUGCUUUCUCAGUGUG | | [470-488] | [334-352] |
| 241 | GCUUCCUGUGUGUCGCAAU | AUUGCGACACACAGGAAGC | | [410-428] | [274-292] |
| 242 | UGUUUGGUUAGGGCUGAAU | AUUCAGCCCUAACCAAACA | | [254-272] | [118-136] |
| 243 | GUGUUACCAUCUCCUGAGU | ACUCAGGAGAUGGUAACAC | | [2303-2321] | — |
| 244 | CAAUUCCAGUGUUACCAUC | GAUGGUAACACUGGAAUUG | | [2295-2313] | [1329-1339] |
| | | | | | (11/11 |
| 245 | GUGAUUUUAUCAAUUCCAG | CUGGAAUUGAUAAAAUCAC | | [2285-2303] | — |
| 246 | CAGCAACUUAAGAACUUCU | AGAAGUUCUUAAGUUGCUG | | [2125-2143] | — |
| 247 | ACUCCCUGGUAUUCUUUUU | AAAAAGAAUACCAGGGAGU | | [2075-2093] | — |
| 248 | AGGUUUGAGCAGUCACUUU | AAAGUGACUGCUCAAACCU | | [2028-2046] | [1688-1706] |
| 249 | CUGCAUUUUGUCUCUUUGU | ACAAAGAGACAAAAUGCAG | | [1982-2000] | [1642-1660] |
| 250 | GUAAUCUGCAUUUUGUCUC | GAGACAAAAUGCAGAUUAC | | [1977-1995] | [1637-1655] |
| 251 | ACCUCUUGACAAUGGGAAA | UUUCCCAUUGUCAAGAGGU | | [196-214] | [60-78] |
| 252 | UUGUUGGUCAUGCAGCAUU | AAUGCUGCAUGACCAACAA | | [1648-1666] | [1367-1383] |
| | | | | | (17/17 |
| 253 | GGCAAAGUGGGUUUUCUAA | UUAGAAAACCCACUUUGCC | | [1593-1611] | — |
| 254 | GUGCCUUUUCCUGGUUCAA | UUGAACCAGGAAAAGGCAC | GP | [1534-1552] | — |
| 255 | CCUGAGUCUUGGAAGUGGA | UCCACUUCCAAGACUCAGG | GP, Rat, Ms | [1005-1023] | [869-887] |
| 256 | CUACUGAGUUCAUCCGGAG | CUCCGGAUGAACUCAGUAG | | [781-799] | [645-663] |
| 257 | GCUACUGAGUUCAUCCGGA | UCCGGAUGAACUCAGUAGC | | [780-798] | [644-662] |
| 258 | CCUAUCUCAUGAUGAGAAA | UUUCUCAUCAUGAGAUAGG | | [635-653] | [499-517] |
| 259 | UGGUGGCCUAUAUGAUCUG | CAGAUCAUAUAGGCCACCA | | [514-532] | [378-396] |
| 260 | CUGGUGGCCUAUAUGAUCU | AGAUCAUAUAGGCCACCAG | | [513-531] | [377-395] |
| 261 | ACAACCUCACCUUCCACAA | UUGUGGAAGGUGAGGUUGU | | [493-511] | [357-375] |
| 262 | UUGUUUGGUUAGGGCUGAA | UUCAGCCCUAACCAAACAA | | [253-271] | [117-135] |
| 263 | AGAAGGAAGGCGGAAUAAA | UUUAUUCCGCCUUCCUUCU | | [24-42] | — |
| 264 | UGGUGGUUCAGAGUUAUAC | GUAUAACUCUGAACCACCA | | [2254-2272] | — |
| 265 | GGUUUGGUGGUUCAGAGUU | AACUCUGAACCACCAAACC | | [2250-2268] | — |
| 266 | GAGGUUUGGUGGUUCAGAG | CUCUGAACCACCAAACCUC | | [2248-2266] | — |
| 267 | CAGAGAAGGAAGGCGGAAU | AUUCCGCCUUCCUUCUCUG | | [21-39] | — |
| 268 | AGCCCAUGGAUCCUUUCUC | GAGAAAGGAUCCAUGGGCU | | [2172-2190] | — |
| 269 | GAAGUUCUUAAAGCCCAUG | CAUGGGCUUUAAGAACUUC | | [2161-2179] | — |
| 270 | UCAGCAACUUAAGAACUUC | GAAGUUCUUAAGUUGCUGA | | [2124-2142] | — |
| 271 | UGACUCCCUGGUAUUCUUU | AAAGAAUACCAGGGAGUCA | | [2073-2091] | — |
| 272 | UUGACUCCCUGGUAUUCUU | AAGAAUACCAGGGAGUCAA | | [2072-2090] | — |
| 273 | UCAGGUUUGAGCAGUCACU | AGUGACUGCUCAAACCUGA | | [2026-2044] | [1686-1704] |
| 274 | CGUCAGGUUUGAGCAGUCA | UGACUGCUCAAACCUGACG | | [2024-2042] | [1684-1702] |
| 275 | UCGUCAGGUUUGAGCAGUC | GACUGCUCAAACCUGACGA | | [2023-2041] | [1683-1701] |
| 276 | CUCGUCAGGUUUGAGCAGU | ACUGCUCAAACCUGACGAG | | [2022-2040] | [1682-1700] |
| 277 | UACUUGGUCUCGUCAGGUU | AACCUGACGAGACCAAGUA | | [2014-2032] | [1674-1692] |
| 278 | UCUCUUUGUAUCUUCAGUA | UACUGAAGAUACAAAGAGA | | [1992-2010] | [1652-1670] |
| 279 | UCUGCAUUUUGUCUCUUUG | CAAAGAGACAAAAUGCAGA | | [1981-1999] | [1641-1659] |
| 280 | GACGGUAAUCUGCAUUUUG | CAAAAUGCAGAUUACCGUC | | [1973-1991] | [1633-1651] |
| 281 | GGGACAGCAAUAUUGUUGG | CCAACAAUAUUGCUGUCCC | | [1636-1654] | — |
| 282 | GAAAAUCUCAUAAGGGCUU | AAGCCCUUAUGAGAUUUUC | | [1293-1311] | [1157-1175] |
| 283 | UUGUUAUGCACCCAUCCAA | UUGGAUGGGUGCAUAACAA | | [1105-1123] | [969-987] |
| 284 | CCAGCAGAAGGUUGUGAUU | AAUCACAACCUUCUGCUGG | | [1079-1097] | [943-961] |
| 285 | CUGAGUCUUGGAAGUGGAU | AUCCACUUCCAAGACUCAG | GP, Rat, Ms | [1006-1024] | [870-888] |
| 286 | CUGCUCUCUGCUUGAAUUU | AAAUUCAAGCAGAGAGCAG | | [373-391] | [237-255] |
| 287 | GCGGAAUAAACUUAUUCAU | AUGAAUAAGUUUAUUCCGC | | [33-51] | — |
| 288 | AGCAGAGGUUUGGUGGUUC | GAACCACCAAACCUCUGCU | | [2244-2262] | — |
| 289 | UGAUAGCAGAGGUUUGGUG | CACCAAACCUCUGCUAUCA | | [2240-2258] | — |
| 290 | CCCAUGGAUCCUUUCUCAG | CUGAGAAAGGAUCCAUGGG | | [2174-2192] | — |
| 291 | CUGAAGUUCUUAAAGCCCA | UGGGCUUUAAGAACUUCAG | | [2159-2177] | — |
| 292 | UUCAGCAACUUAAGAACUU | AAGUUCUUAAGUUGCUGAA | | [2123-2141] | — |
| 293 | GACUCCCUGGUAUUCUUUU | AAAAGAAUACCAGGGAGUC | | [2074-2092] | — |
| 294 | CAGGUUUGAGCAGUCACUU | AAGUGACUGCUCAAACCUG | | [2027-2045] | [1687-1705] |
| 295 | GUCUCUUUGUAUCUUCAGU | ACUGAAGAUACAAAGAGAC | | [1991-2009] | [1651-1669] |
| 296 | GACAGCAAUAUUGUUGGUC | GACCAACAAUAUUGCUGUC | | [1638-1656] | — |
| 297 | UGGGACAGCAAUAUUGUUG | CAACAAUAUUGCUGUCCCA | | [1635-1653] | — |
| 298 | AGAUGUGGGAUGAUCGUGA | UCACGAUCAUCCCACAUCU | | [949-967] | [813-831] |
| 299 | GCAAUUGGAUCACAACCUC | GAGGUUGUGAUCCAAUUGC | | [482-500] | [346-364] |
| 300 | CUACUACACAAGAAAAAUC | GAUUUUUCUUGUGUAGUAG | | [323-341] | [187-205] |
| 301 | UCCAGUGUGAACAGCAAUU | AAUUGCUGUUCACACUGGA | | [2519-2537] | — |
| 302 | GGUUUUCAGUUUUGUUUCU | AGAAACAAAACUGAAAACC | | [232-250] | [96-114] |
| 303 | CUAAGUAGGGUGACUUUUU | AAAAAGUCACCCUACUUAG | | [2367-2385] | — |
| 304 | UCCAGUGUUACCAUCUCCU | AGGAGAUGGUAACACUGGA | | [2299-2317] | — |
| 305 | CCUGGUAUUCUUUUUUUGA | UCAAAAAAAGAAUACCAGG | | [2079-2097] | — |
| 306 | GCAGCAUUAAACUUUGACA | UGUCAAAGUUUAAUGCUGC | GP, Rat, Ms | [1659-1677] | [1376-1394] |
| 307 | GCUGGACAAAUGUUCCAUU | AAUGGAACAUUUGUCCAGC | | [112-130] | — |
| 308 | UGAUCCUGCUUCCUGUGUG | CACACAGGAAGCAGGAUCA | | [403-421] | [267-285] |
| 309 | CCACAGAAGAUUUCCUAAG | CUUAGGAAAUCUUCUGUGG | | [2353-2371] | — |
| 310 | GGGUGGUUAACCACUGGUU | AACCAGUGGUUAACCACCC | | [217-235] | [81-99] |
| 311 | GCUUCAGCAACUUAAGAAC | GUUCUUAAGUUGCUGAAGC | | [2121-2139] | — |
| 312 | GAGUUUUCUACAAUAGCUA | UAGCUAUUGUAGAAAACUC | | [1743-1761] | [1460-1478] |
| 313 | UGAGUUUUCUACAAUAGCU | AGCUAUUGUAGAAAACUCA | | [1742-1760] | [1459-1477] |
| 314 | GGGACAAUGAGUUUUCUAC | GUAGAAAACUCAUUGUCCC | | [1735-1753] | [1452-1470] |
| 315 | AGGCAAAGUGGGUUUUCUA | UAGAAAACCCACUUUGCCU | | [1592-1610] | — |
| 316 | GAACAGGAGAUGGAGGAAU | AUUCCUCCAUCUCCUGUUC | | [1572-1590] | — |
| 317 | CCAUUCCUGAAGGACCUCU | AGAGGUCCUUCAGGAAUGG | | [126-144] | — |
| 318 | GACAAAUGUUCCAUUCCUG | CAGGAAUGGAACAUUUGUC | | [116-134] | — |
| 319 | GCCUAUCUCAUGAUGAGAA | UUCUCAUCAUGAGAUAGGC | | [634-652] | [498-516] |
| 320 | GUCUGCUCUCUGCUUGAAU | AUUCAAGCAGAGAGCAGAC | | [371-389] | [235-253] |
| 321 | CCACUGGUUUUCAGUUUUG | CAAAACUGAAAACCAGUGG | | [227-245] | [91-109] |
| 322 | ACUGUAGCAAGGCUUGAUA | UAUCAAGCCUUGCUACAGU | | [2226-2244] | — |
| 323 | UCAUGCAGCAUUAAACUUU | AAAGUUUAAUGCUGCAUGA | GP, Rat, Ms | [1655-1673] | [1372-1390] |
| 324 | AAAAUCUCAUAAGGGCUUU | AAAGCCCUUAUGAGAUUUU | | [1294-1312] | [1158-1176] |
| 325 | CCAUCCAAAGUUUUGGAAU | AUUCCAAAACUUUGGAUGG | | [1116-1134] | [980-998] |
| 326 | CCCUAAGUUUGAAGGGCAU | AUGCCCUUCAAACUUAGGG | | [983-1001] | [847-865] |
| 327 | AGCCUUGAUUCUCAUGGUA | UACCAUGAGAAUCAAGGCU | GP, Rb | [755-773] | [619-637] |
| 328 | CACCAACAGUGUACAUGUU | AACAUGUACACUGUUGGUG | | [2475-2493] | — |
| 329 | CGGAUGGGACAGCAAUAUU | AAUAUUGCUGUCCCAUCCG | | [1631-1649] | — |
| 330 | GGAACAGGAGAUGGAGGAA | UUCCUCCAUCUCCUGUUCC | | [1571-1589] | — |
| 331 | CCAUCUGGUACAAAUUCCA | UGGAAUUUGUACCAGAUGG | | [1453-1471] | [1317-1335] |
| 332 | CUAUCUCAUGAUGAGAAAA | UUUUCUCAUCAUGAGAUAG | | [636-654] | [500-518] |
| 333 | CUGCCUACAUACAGCUAUU | AAUAGCUGUAUGUAGGCAG | | [530-548] | [394-412] |
| 334 | UGGAUCACAACCUCACCUU | AAGGUGAGGUUGUGAUCCA | Rat, Ms | [487-505] | [351-369] |
| 335 | UGCUCUCUGCUUGAAUUUU | AAAAUUCAAGCAGAGAGCA | | [374-392] | [238-256] |
| 336 | UUCCUAAGUAGGGUGACUU | AAGUCACCCUACUUAGGAA | | [2364-2382] | — |
| 337 | ACCACUGGUUUUCAGUUUU | AAAACUGAAAACCAGUGGU | | [226-244] | [90-108] |
| 338 | GGAUCCUUUCUCAGAAAAA | UUUUUCUGAGAAAGGAUCC | | [2179-2197] | — |
| 339 | UGGGACAAUGAGUUUUCUA | UAGAAAACUCAUUGUCCCA | Rat, Ms | [1734-1752] | [1451-1469] |
| 340 | GUGGGACAAUGAGUUUUCU | AGAAAACUCAUUGUCCCAC | Rat, Ms | [1733-1751] | [1450-1468] |
| 341 | CCUGGUUCAACAACCUGUU | AACAGGUUGUUGAACCAGG | | [1543-1561] | — |
| 342 | CCUCUCCAGAAUCCGGAUU | AAUCCGGAUUCUGGAGAGG | | [140-158] | [4-22] |
| 343 | CAUCCAAAGUUUUGGAAUU | AAUUCCAAAACUUUGGAUG | | [1117-1135] | [981-999] |
| 344 | CUGGUAUACUCACCACCUU | AAGGUGGUGAGUAUACCAG | | [818-836] | [682-700] |
| 345 | UAAGUAGGGUGACUUUUUA | UAAAAAGUCACCCUACUUA | | [2368-2386] | — |
| 346 | GGAUAAGAAUGUGCCUCUC | GAGAGGCACAUUCUUAUCC | | [2048-2066] | [1708-1726] |
| 347 | CCAGUCUGGAUCCUAGAAA | UUUCUAGGAUCCAGACUGG | | [1849-1867] | [1566-1584] |
| 348 | CGAUAUUCCAGUCUGGAUC | GAUCCAGACUGGAAUAUCG | | [1842-1860] | [1559-1577] |
| 349 | GAGACCAAUGUGGGACAAU | AUUGUCCCACAUUGGUCUC | Rat, Ms | [1724-1742] | [1441-1459] |
| 350 | CAGCAUUAAACUUUGACAA | UUGUCAAAGUUUAAUGCUG | GP | [1660-1678] | [1377-1395] |
| 351 | GGAAGAUUUCUUCUCCAUU | AAUGGAGAAGAAAUCUUCC | | [1247-1265] | [1111-1129] |
| 352 | AGGAAGAUUUCUUCUCCAU | AUGGAGAAGAAAUCUUCCU | | [1246-1264] | [1110-1128] |
| 353 | CCAAAGUUUUGGAAUUGCA | UGCAAUUCCAAAACUUUGG | | [1120-1138] | [984-1002] |
| 354 | CAAAUGUUCCAUUCCUGAA | UUCAGGAAUGGAACAUUUG | | [118-136] | — |
| 355 | CGCUGGACAAAUGUUCCAU | AUGGAACAUUUGUCCAGCG | | [111-129] | — |
| 356 | UGUGUGUUUUUCACAUCUU | AAGAUGUGAAAAACACACA | | [74-92] | — |
| 357 | GGAUGCCUUCCUGAAAUAU | AUAUUUCAGGAAGGCAUCC | | [287-305] | [151-169] |
| 358 | UGUUUCUGGUUGUUUGGUU | AACCAAACAACCAGAAACA | | [244-262] | [108-126] |
| 359 | CCAACAGUGUACAUGUUUA | UAAACAUGUACACUGUUGG | | [2477-2495] | — |
| 360 | UCCUAAGUAGGGUGACUUU | AAAGUCACCCUACUUAGGA | | [2365-2383] | — |
| 361 | UGGAUCCUUUCUCAGAAAA | UUUUCUGAGAAAGGAUCCA | | [2178-2196] | — |
| 362 | UGAAGUUCUUAAAGUUCUG | CAGAACUUUAAGAACUUCA | | [2143-2161] | — |
| 363 | UCACCGAUAUUCCAGUCUG | CAGACUGGAAUAUCGGUGA | | [1838-1856] | [1555-1573] |
| 364 | UGCAGCAUUAAACUUUGAC | GUCAAAGUUUAAUGCUGCA | GP, Rat, Ms | [1658-1676] | [1375-1393] |
| 365 | UGGUACAAAUUCCAGUGUG | CACACUGGAAUUUGUACCA | | [1458-1476] | [1322-1340] |
| 366 | CUGGUACAAAUUCCAGUGU | ACACUGGAAUUUGUACCAG | | [1457-1475] | [1321-1339] |
| 367 | CGAACAACAAUAUUCACCA | UGGUGAAUAUUGUUGUUCG | | [1313-1331] | [1177-1195] |
| 368 | ACAGUUCUGUCCAGAGAAG | CUUCUCUGGACAGAACUGU | | [10-28] | — |
| 369 | CCCAUCCAAAGUUUUGGAA | UUCCAAAACUUUGGAUGGG | | [1115-1133] | [979-997] |
| 370 | GCCCUAAGUUUGAAGGGCA | UGCCCUUCAAACUUAGGGC | | [982-1000] | [846-864] |
| 371 | CGAAACACGACAGUGGAGU | ACUCCACUGUCGUGUUUCG | | [687-705] | [551-569] |
| 372 | GGCUAAAUCCCAUCCAGUC | GACUGGAUGGGAUUUAGCC | Rat, Ms | [667-685] | [531-549] |
| 373 | GUGUGUGUUUUUCACAUCU | AGAUGUGAAAAACACACAC | | [73-91] | — |
| 374 | GGUGUGUGUUUUUCACAUC | GAUGUGAAAAACACACACC | | [72-90] | — |
| 375 | UCACAUCAUUGCACACCUG | CAGGUGUGCAAUGAUGUGA | | [548-566] | [412-430] |
| 376 | UCAUUUUGCAGCCGCACAC | GUGUGCGGCUGCAAAAUGA | | [456-474] | [320-338] |
| 377 | GGCACCUGCUCAUUUUGCA | UGCAAAAUGAGCAGGUGCC | GP, Rat, Ms | [447-465] | [311-329] |
| 378 | CCUAAGUAGGGUGACUUUU | AAAAGUCACCCUACUUAGG | | [2366-2384] | — |
| 379 | AACCACUGGUUUUCAGUUU | AAACUGAAAACCAGUGGUU | | [225-243] | [89-107] |
| 380 | AGGCUUGAUAGCAGAGGUU | AACCUCUGCUAUCAAGCCU | | [2235-2253] | — |
| 381 | CUAGAAAGGUUCAAUUCUA | UAGAAUUGAACCUUUCUAG | | [1861-1879] | [1578-1596] |
| 382 | ACAGGUCUGAAACAGAAAA | UUUUCUGUUUCAGACCUGU | GP, Rat | [1695-1713] | [1412-1430] |
| 383 | UUCUAAACUACCGUCUCUU | AAGAGACGGUAGUUUAGAA | Ms | [1606-1624] | — |
| 384 | GGGUUUUCUAAACUACCGU | ACGGUAGUUUAGAAAACCC | | [1601-1619] | — |
| 385 | CCUGUUGACUUCCCUGGAA | UUCCAGGGAAGUCAACAGG | | [1556-1574] | — |
| 386 | UGAGGAUGUUUUCCAGUAU | AUACUGGAAAACAUCCUCA | Ms | [1373-1391] | [1237-1255] |
| 387 | CUCUCCAGAAUCCGGAUUG | CAAUCCGGAUUCUGGAGAG | | [141-159] | [5-23] |
| 388 | GCUUUCGAACAACAAUAUU | AAUAUUGUUGUUCGAAAGC | | [1308-1326] | [1172-1190] |
| 389 | UGGACAGAAAAUCUCAUAA | UUAUGAGAUUUUCUGUCCA | Rat | [1287-1305] | [1151-1169] |
| 390 | CUGGACAGAAAAUCUCAUA | UAUGAGAUUUUCUGUCCAG | Rat | [1286-1304] | [1150-1168] |
| 391 | UCCAUUCAUAUCCGAGCAG | CUGCUCGGAUAUGAAUGGA | | [1260-1278] | [1124-1142] |
| 392 | CUCCUGGAAUGGCAUCCUU | AAGGAUGCCAUUCCAGGAG | | [1206-1224] | [1070-1088] |
| 393 | GCACAGUUCUGUCCAGAGA | UCUCUGGACAGAACUGUGC | | [8-26] | — |
| 394 | GCGCUGGACAAAUGUUCCA | UGGAACAUUUGUCCAGCGC | | [110-128] | — |
| 395 | UCAUCCGGAGGAGUUAUUU | AAAUAACUCCUCCGGAUGA | | [790-808] | [654-672] |
| 396 | AAACACGACAGUGGAGUAU | AUACUCCACUGUCGUGUUU | | [689-707] | [553-571] |
| 397 | ACCUCACCUUCCACAAGCU | AGCUUGUGGAAGGUGAGGU | | [496-514] | [360-378] |
| 398 | CUACACAAGAAAAAUCCUU | AAGGAUUUUUCUUGUGUAG | | [326-344] | [190-208] |
| 399 | AGAUUUCCUAAGUAGGGUG | CACCCUACUUAGGAAAUCU | | [2360-2378] | — |
| 400 | CUCCUGAGUUUUGGUUUGU | ACAAACCAAAACUCAGGAG | | [2313-2331] | — |
| 401 | UGGGUGGUUAACCACUGGU | ACCAGUGGUUAACCACCCA | | [216-234] | [80-98] |
| 402 | GAUCCUUUCUCAGAAAAAU | AUUUUUCUGAGAAAGGAUC | | [2180-2198] | — |
| 403 | GAAGUUCUUAAAGUUCUGA | UCAGAACUUUAAGAACUUC | | [2144-2162] | — |
| 404 | GGAUCCUAGAAAGGUUCAA | UUGAACCUUUCUAGGAUCC | | [1856-1874] | [1573-1591] |
| 405 | UCUGGAUCCUAGAAAGGUU | AACCUUUCUAGGAUCCAGA | | [1853-1871] | [1570-1588] |
| 406 | GUCACCGAUAUUCCAGUCU | AGACUGGAAUAUCGGUGAC | GP | [1837-1855] | [1554-1572] |
| 407 | CGCAAAUGCUGUCACCGAU | AUCGGUGACAGCAUUUGCG | GP | [1827-1845] | [1544-1562] |
| 408 | AGGGCUUUCGAACAACAAU | AUUGUUGUUCGAAAGCCCU | | [1305-1323] | [1169-1187] |
| 409 | CCAUUCAUAUCCGAGCAGC | GCUGCUCGGAUAUGAAUGG | | [1261-1279] | [1125-1143] |
| 410 | GAAGAUUUCUUCUCCAUUC | GAAUGGAGAAGAAAUCUUC | | [1248-1266] | [1112-1130] |
| 411 | CUCCAGAGGAAGAUUUCUU | AAGAAAUCUUCCUCUGGAG | | [1240-1258] | [1104-1122] |
| 412 | GGAAUGGCAUCCUUUUACU | AGUAAAAGGAUGCCAUUCC | | [1211-1229] | [1075-1093] |
| 413 | UGGAAUUGCAGAUGAACAA | UUGUUCAUCUGCAAUUCCA | | [1129-1147] | [993-1011] |
| 414 | CACAGUUCUGUCCAGAGAA | UUCUCUGGACAGAACUGUG | | [9-27] | — |
| 415 | GCACCCAUCCAAAGUUUUG | CAAAACUUUGGAUGGGUGC | | [1112-1130] | [976-994] |
| 416 | AUGCACCCAUCCAAAGUUU | AAACUUUGGAUGGGUGCAU | | [1110-1128] | [974-992] |
| 417 | GGUUGUGAUUACCAAGGUU | AACCUUGGUAAUCACAACC | | [1088-1106] | [952-970] |
| 418 | GUGAAAGGAUCCUCCGGUU | AACCGGAGGAUCCUUUCAC | | [1051-1069] | [915-933] |
| 419 | CUGGACAAAUGUUCCAUUC | GAAUGGAACAUUUGUCCAG | | [113-131] | — |
| 420 | UUCAUCCGGAGGAGUUAUU | AAUAACUCCUCCGGAUGAA | | [789-807] | [653-671] |
| 421 | GCCUUGAUUCUCAUGGUAA | UUACCAUGAGAAUCAAGGC | GP, Rb | [756-774] | [620-638] |
| 422 | UGGUCUCACUGGAGUGAUC | GAUCACUCCAGUGAGACCA | | [728-746] | [592-610] |
| 423 | GUGUGUUUUUCACAUCUUA | UAAGAUGUGAAAAACACAC | | [75-93] | — |
| 424 | CGCACACUGAGAAAGCAAU | AUUGCUUUCUCAGUGUGCG | | [468-486] | [332-350] |
| 425 | GGCGGAAUAAACUUAUUCA | UGAAUAAGUUUAUUCCGCC | | [32-50] | — |
| 426 | UACAUGUUUACUGUCACUU | AAGUGACAGUAAACAUGUA | | [2486-2504] | — |
| 427 | CCAUAUAACACCAACAGUG | CACUGUUGGUGUUAUAUGG | | [2467-2485] | — |
| 428 | CCCACAGAAGAUUUCCUAA | UUAGGAAAUCUUCUGUGGG | | [2352-2370] | — |
| 429 | ACUAAUCCCAGGUGAUUUU | AAAAUCACCUGGGAUUAGU | | [2274-2292] | — |
| 430 | GACUGUAGCAAGGCUUGAU | AUCAAGCCUUGCUACAGUC | | [2225-2243] | — |
| 431 | AUCCUAGAAAGGUUCAAUU | AAUUGAACCUUUCUAGGAU | | [1858-1876] | [1575-1593] |
| 432 | CAGUCUGGAUCCUAGAAAG | CUUUCUAGGAUCCAGACUG | | [1850-1868] | [1567-1585] |
| 433 | GAAUCUUCCCUGUUGCCUA | UAGGCAACAGGGAAGAUUC | | [162-180] | [26-44] |
| 434 | UCCCAGGAUUGAAGUGGAU | AUCCACUUCAAUCCUGGGA | | [1334-1352] | [1198-1216] |
| 435 | CCAAUUCCCAGGAUUGAAG | CUUCAAUCCUGGGAAUUGG | | [1329-1347] | [1193-1211] |
| 436 | GGACUGGACAGAAAAUCUC | GAGAUUUUCUGUCCAGUCC | Rat | [1283-1301] | [1147-1165] |
| 437 | GAGGAAGAUUUCUUCUCCA | UGGAGAAGAAAUCUUCCUC | | [1245-1263] | [1109-1127] |
| 438 | CCAGAGGAAGAUUUCUUCU | AGAAGAAAUCUUCCUCUGG | | [1242-1260] | [1106-1124] |
| 439 | CGCAAGUGUGCAGAGUCUU | AAGACUCUGCACACUUGCG | | [927-945] | [791-809] |
| 440 | GAGCAUGAAUGAGAGUCAU | AUGACUCUCAUUCAUGCUC | | [905-923] | [769-787] |
| 441 | GGUAUACUCACCACCUUUU | AAAAGGUGGUGAGUAUACC | | [820-838] | [684-702] |
| 442 | CAUGACAAUAGCCUUGAUU | AAUCAAGGCUAUUGUCAUG | | [746-764] | [610-628] |
| 443 | UCAUGACAAUAGCCUUGAU | AUCAAGGCUAUUGUCAUGA | | [745-763] | [609-627] |
| 444 | UGAUCAUGACAAUAGCCUU | AAGGCUAUUGUCAUGAUCA | | [742-760] | [606-624] |
| 445 | GUCUCACUGGAGUGAUCAU | AUGAUCACUCCAGUGAGAC | | [730-748] | [594-612] |
| 446 | GAGUAUGUGACAUUCACCA | UGGUGAAUGUCACAUACUC | | [702-720] | [566-584] |
| 447 | CAGCCUAUCUCAUGAUGAG | CUCAUCAUGAGAUAGGCUG | | [632-650] | [496-514] |
| 448 | AGCAAUUGGAUCACAACCU | AGGUUGUGAUCCAAUUGCU | | [481-499] | [345-363] |
| 449 | ACUUAUUCAUUCCCAGGAA | UUCCUGGGAAUGAAUAAGU | | [42-60] | — |
| 450 | UCAGUUUUGUUUCUGGUUG | CAACCAGAAACAAAACUGA | | [237-255] | [101-119] |
| 451 | UCCUGAGUUUUGGUUUGUA | UACAAACCAAAACUCAGGA | | [2314-2332] | — |
| 452 | GAACUUCUGAAGUUCUUAA | UUAAGAACUUCAGAAGUUC | | [2136-2154] | — |
| 453 | GAUCCUAGAAAGGUUCAAU | AUUGAACCUUUCUAGGAUC | | [1857-1875] | [1574-1592] |
| 454 | CCGAUAUUCCAGUCUGGAU | AUCCAGACUGGAAUAUCGG | | [1841-1859] | [1558-1576] |
| 455 | AGACCAAUGUGGGACAAUG | CAUUGUCCCACAUUGGUCU | Rat, Ms | [1725-1743] | [1442-1460] |
| 456 | GAAUCCGGAUUGCUGAAUC | GAUUCAGCAAUCCGGAUUC | | [148-166] | [12-30] |
| 457 | CCAGUAUGAAGUGGCUGUG | CACAGCCACUUCAUACUGG | | [1385-1403] | [1249-1267] |
| 458 | UUCACCAAUUCCCAGGAUU | AAUCCUGGGAAUUGGUGAA | | [1325-1343] | [1189-1207] |
| 459 | CAGAGGAAGAUUUCUUCUC | GAGAAGAAAUCUUCCUCUG | | [1243-1261] | [1107-1125] |
| 460 | CUGGAAUGGCAUCCUUUUA | UAAAAGGAUGCCAUUCCAG | | [1209-1227] | [1073-1091] |
| 461 | CCUGGAAUGGCAUCCUUUU | AAAAGGAUGCCAUUCCAGG | | [1208-1226] | [1072-1090] |
| 462 | UGCACCCAUCCAAAGUUUU | AAAACUUUGGAUGGGUGCA | | [1111-1129] | [975-993] |
| 463 | UGAGAGUCAUCCUCGCAAG | CUUGCGAGGAUGACUCUCA | | [914-932] | [778-796] |
| 464 | CUCAUGGUAACUUCAGCUA | UAGCUGAAGUUACCAUGAG | GP, Rat | [765-783] | [629-647] |
| 465 | AGGUGUGUGUUUUUCACAU | AUGUGAAAAACACACACCU | | [71-89] | — |
| 466 | GCCUACAUACAGCUAUUCA | UGAAUAGCUGUAUGUAGGC | | [532-550] | [396-414] |
| 467 | GGCCUAUAUGAUCUGCCUA | UAGGCAGAUCAUAUAGGCC | | [518-536] | [382-400] |
| 468 | UCACCUUCCACAAGCUGGU | ACCAGCUUGUGGAAGGUGA | | [499-517] | [363-381] |
| 469 | UGCUCAUUUUGCAGCCGCA | UGCGGCUGCAAAAUGAGCA | | [453-471] | [317-335] |
| 470 | GCACCUGCUCAUUUUGCAG | CUGCAAAAUGAGCAGGUGC | | [448-466] | [312-330] |
| 471 | UGGGUCAACAUUGGCCUGU | ACAGGCCAAUGUUGACCCA | | [344-362] | [208-226] |
| 472 | ACAGUGUACAUGUUUACUG | CAGUAAACAUGUACACUGU | | [2480-2498] | — |
| 473 | CAUCUCCUGAGUUUUGGUU | AACCAAAACUCAGGAGAUG | | [2310-2328] | — |
| 474 | CUAAUCCCAGGUGAUUUUA | UAAAAUCACCUGGGAUUAG | | [2275-2293] | — |
| 475 | CCAUGACUGUAGCAAGGCU | AGCCUUGCUACAGUCAUGG | | [2221-2239] | — |
| 476 | UGGACAGCCAUGACUGUAG | CUACAGUCAUGGCUGUCCA | | [2214-2232] | — |
| 477 | GAAUGUGCCUCUCAAGCCU | AGGCUUGAGAGGCACAUUC | | [2054-2072] | [1714-1732] |
| 478 | CCUCGGACUUUGGCAAAGA | UCUUUGCCAAAGUCCGAGG | | [1803-1821] | [1520-1538] |
| 479 | CAGGUCUGAAACAGAAAAC | GUUUUCUGUUUCAGACCUG | GP, Rat | [1696-1714] | [1413-1431] |
| 480 | GGUUCAACAACCUGUUGAC | GUCAACAGGUUGUUGAACC | | [1546-1564] | — |
| 481 | GCUGGUUGGAGCAGGAAUU | AAUUCCUGCUCCAACCAGC | | [1403-1421] | [1267-1285] |
| 482 | CUGAAGGACCUCUCCAGAA | UUCUGGAGAGGUCCUUCAG | | [132-150] | [1-14] |
| | | | | | (14/14) |
| 483 | AGAUGAACAAGCGUGGCUU | AAGCCACGCUUGUUCAUCU | | [1138-1156] | [1002-1020] |
| 484 | AGGUUGUGAUUACCAAGGU | ACCUUGGUAAUCACAACCU | | [1087-1105] | [951-969] |
| 485 | GCAGAAGGUUGUGAUUACC | GGUAAUCACAACCUUCUGC | | [1082-1100] | [946-964] |
| 486 | AAAGGAUCCUCCGGUUUUA | UAAAACCGGAGGAUCCUUU | | [1054-1072] | [918-936] |
| 487 | UCGCAAGUGUGCAGAGUCU | AGACUCUGCACACUUGCGA | | [926-944] | [790-808] |
| 488 | CCUGCGCUGGACAAAUGUU | AACAUUUGUCCAGCGCAGG | | [107-125] | — |
| 489 | CCUUGAUUCUCAUGGUAAC | GUUACCAUGAGAAUCAAGG | GP, Rb | [757-775] | [621-639] |
| 490 | UGGAGUAUGUGACAUUCAC | GUGAAUGUCACAUACUCCA | | [700-718] | [564-582] |
| 491 | CUAUAGCAGAAGCCGACAG | CUGUCGGCUUCUGCUAUAG | | [581-599] | [445-463] |
| 492 | CAAGAAAAAUCCUUGGGUC | GACCCAAGGAUUUUUCUUG | | [331-349] | [195-213] |
| 493 | ACAAGAAAAAUCCUUGGGU | ACCCAAGGAUUUUUCUUGU | | [330-348] | [194-212] |
| 494 | UCCUGUUUGUGGAUGCCUU | AAGGCAUCCACAAACAGGA | | [277-295] | [141-159] |
| 495 | CAGUGUACAUGUUUACUGU | ACAGUAAACAUGUACACUG | | [2481-2499] | — |
| 496 | CAACUAAUCCCAGGUGAUU | AAUCACCUGGGAUUAGUUG | | [2272-2290] | — |
| 497 | GGCUUGAUAGCAGAGGUUU | AAACCUCUGCUAUCAAGCC | | [2236-2254] | — |
| 498 | AGCAAGGCUUGAUAGCAGA | UCUGCUAUCAAGCCUUGCU | | [2231-2249] | — |
| 499 | AGCCUUGACUCCCUGGUAU | AUACCAGGGAGUCAAGGCU | | [2068-2086] | — |
| 500 | GACAGGUCUGAAACAGAAA | UUUCUGUUUCAGACCUGUC | GP, Rat | [1694-1712] | [1411-1429] |
| 501 | UGACAGGUCUGAAACAGAA | UUCUGUUUCAGACCUGUCA | GP, Rat | [1693-1711] | [1410-1428] |
| 502 | UCUUCCCUGUUGCCUAGAA | UUCUAGGCAACAGGGAAGA | | [165-183] | [29-47] |
| 503 | GUCAUGCAGCAUUAAACUU | AAGUUUAAUGCUGCAUGAC | GP, Rat, Ms | [1654-1672] | [1371-1389] |
| 504 | CAGGUGCCUUUUCCUGGUU | AACCAGGAAAAGGCACCUG | GP | [1531-1549] | — |
| 505 | CCGGAUUGCUGAAUCUUCC | GGAAGAUUCAGCAAUCCGG | | [152-170] | [16-34] |
| 506 | GUGCAGACCACAACCUCAA | UUGAGGUUGUGGUCUGCAC | GP | [1474-1492] | [1338-1356] |
| 507 | UUGCUUCUAUCUUGAAAUC | GAUUUCAAGAUAGAAGCAA | | [1435-1453] | [1299-1317] |
| 508 | CCAGAAUCCGGAUUGCUGA | UCAGCAAUCCGGAUUCUGG | | [145-163] | [9-27] |
| 509 | GAGGAUGUUUUCCAGUAUG | CAUACUGGAAAACAUCCUC | Ms | [1374-1392] | [1238-1256] |
| 510 | ACUGGACAGAAAAUCUCAU | AUGAGAUUUUCUGUCCAGU | Rat | [1285-1303] | [1149-1167] |
| 511 | AAGAUUUCUUCUCCAUUCA | UGAAUGGAGAAGAAAUCUU | | [1249-1267] | [1113-1131] |
| 512 | AGAGGAAGAUUUCUUCUCC | GGAGAAGAAAUCUUCCUCU | | [1244-1262] | [1108-1126] |
| 513 | UCCAGAGGAAGAUUUCUUC | GAAGAAAUCUUCCUCUGGA | | [1241-1259] | [1105-1123] |
| 514 | CUCUGCUCCAGAGGAAGAU | AUCUUCCUCUGGAGCAGAG | | [1235-1253] | [1099-1117] |
| 515 | UCCUGGAAUGGCAUCCUUU | AAAGGAUGCCAUUCCAGGA | | [1207-1225] | [1071-1089] |
| 516 | GGAAUUGCAGAUGAACAAG | CUUGUUCAUCUGCAAUUCC | | [1130-1148] | [994-1012] |
| 517 | AUCCAAAGUUUUGGAAUUG | CAAUUCCAAAACUUUGGAU | | [1118-1136] | [982-1000] |
| 518 | GAUCCUUGCACCGGUCAUU | AAUGACCGGUGCAAGGAUC | | [1022-1040] | [886-904] |
| 519 | GAGUCAUCCUCGCAAGUGU | ACACUUGCGAGGAUGACUC | | [917-935] | [781-799] |
| 520 | UCACUGGAGUGAUCAUGAC | GUCAUGAUCACUCCAGUGA | | [733-751] | [597-615] |
| 521 | GUAGGUGUGUGUUUUUCAC | GUGAAAAACACACACCUAC | | [69-87] | — |
| 522 | UGCCUACAUACAGCUAUUC | GAAUAGCUGUAUGUAGGCA | | [531-549] | [395-413] |
| 523 | CCGCACACUGAGAAAGCAA | UUGCUUUCUCAGUGUGCGG | | [467-485] | [331-349] |
| 524 | GUGGUUAACCACUGGUUUU | AAAACCAGUGGUUAACCAC | | [219-237] | [83-101] |
| 525 | GGUGGUUAACCACUGGUUU | AAACCAGUGGUUAACCACC | | [218-236] | [82-100] |
| 526 | GCAAGGCUUGAUAGCAGAG | CUCUGCUAUCAAGCCUUGC | | [2232-2250] | — |
| 527 | CUUAAGAACUUCUGAAGUU | AACUUCAGAAGUUCUUAAG | | [2131-2149] | — |
| 528 | CGUUACUUGAGCUUCAGCA | UGCUGAAGCUCAAGUAACG | | [2111-2129] | — |
| 529 | GGUUCAAUUCUACUUCAAC | GUUGAAGUAGAAUUGAACC | Rat | [1868-1886] | [1585-1603] |
| 530 | CCAAUGUGGGACAAUGAGU | ACUCAUUGUCCCACAUUGG | Rat, Ms | [1728-1746] | [1445-1463] |
| 531 | UCAACAACCUGUUGACUUC | GAAGUCAACAGGUUGUUGA | | [1549-1567] | — |
| 532 | UGGUUCAACAACCUGUUGA | UCAACAGGUUGUUGAACCA | | [1545-1563] | — |
| 533 | GCUGAUAGCACAGUUCUGU | ACAGAACUGUGCUAUCAGC | | [1-19] | — |
| 534 | CUGCUCCAGAGGAAGAUUU | AAAUCUUCCUCUGGAGCAG | | [1237-1255] | [1101-1119] |
| 535 | UCCAAAGUUUUGGAAUUGC | GCAAUUCCAAAACUUUGGA | | [1119-1137] | [983-1001] |
| 536 | CCAAGGUUGUUAUGCACCC | GGGUGCAUAACAACCUUGG | | [1099-1117] | [963-981] |
| 537 | GCAUGAAUGAGAGUCAUCC | GGAUGACUCUCAUUCAUGC | | [907-925] | [771-789] |
| 538 | UGGCCUAUAUGAUCUGCCU | AGGCAGAUCAUAUAGGCCA | | [517-535] | [381-399] |
| 539 | GCUUGAAUUUUAACAGCAC | GUGCUGUUAAAAUUCAAGC | | [382-400] | [246-264] |
| 540 | UGCUUGAAUUUUAACAGCA | UGCUGUUAAAAUUCAAGCA | Ms | [381-399] | [245-263] |
| 541 | CUCUGCUUGAAUUUUAACA | UGUUAAAAUUCAAGCAGAG | | [378-396] | [242-260] |
| 542 | AGGCGGAAUAAACUUAUUC | GAAUAAGUUUAUUCCGCCU | | [31-49] | — |
| 543 | CACUGGUUUUCAGUUUUGU | ACAAAACUGAAAACCAGUG | | [228-246] | [92-110] |
| 544 | AUGGAUCCUUUCUCAGAAA | UUUCUGAGAAAGGAUCCAU | | [2177-2195] | — |
| 545 | GAAACUGGGUGGUUAACCA | UGGUUAACCACCCAGUUUC | | [211-229] | [75-93] |
| 546 | UUGAGCUUCAGCAACUUAA | UUAAGUUGCUGAAGCUCAA | | [2117-2135] | — |
| 547 | CCACCUCUUGACAAUGGGA | UCCCAUUGUCAAGAGGUGG | | [194-212] | [58-76] |
| 548 | CUGGAUCCUAGAAAGGUUC | GAACCUUUCUAGGAUCCAG | | [1854-1872] | [1571-1589] |
| 549 | GGACUUUGGCAAAGAGCCU | AGGCUCUUUGCCAAAGUCC | | [1807-1825] | [1524-1542] |
| 550 | UGAAACAGAAAACCUCCUU | AAGGAGGUUUUCUGUUUCA | Rat | [1702-1720] | [1419-1437] |
| 551 | CUGAAACAGAAAACCUCCU | AGGAGGUUUUCUGUUUCAG | Rat | [1701-1719] | [1418-1436] |
| 552 | CUGUUGACUUCCCUGGAAC | GUUCCAGGGAAGUCAACAG | | [1557-1575] | — |
| 553 | CCAGUGAGGAUGUUUUCCA | UGGAAAACAUCCUCACUGG | | [1369-1387] | [1233-1251] |
| 554 | CAGCCAGUGAGGAUGUUUU | AAAACAUCCUCACUGGCUG | | [1366-1384] | [1230-1248] |
| 555 | CACAGCCAGUGAGGAUGUU | AACAUCCUCACUGGCUGUG | | [1364-1382] | [1228-1246] |
| 556 | ACCAAUUCCCAGGAUUGAA | UUCAAUCCUGGGAAUUGGU | | [1328-1346] | [1192-1210] |
| 557 | UGGAAUGGCAUCCUUUUAC | GUAAAAGGAUGCCAUUCCA | | [1210-1228] | [1074-1092] |
| 558 | ACCCAUCCAAAGUUUUGGA | UCCAAAACUUUGGAUGGGU | | [1114-1132] | [978-996] |
| 559 | CAAGGUUGUUAUGCACCCA | UGGGUGCAUAACAACCUUG | | [1100-1118] | [964-982] |
| 560 | UGGUAUACUCACCACCUUU | AAAGGUGGUGAGUAUACCA | | [819-837] | [683-701] |
| 561 | GUGACAUUCACCAGCGUUG | CAACGCUGGUGAAUGUCAC | | [708-726] | [572-586] |
| | | | | | (15/15 |
| 562 | UCUGCCUACAUACAGCUAU | AUAGCUGUAUGUAGGCAGA | | [529-547] | [393-411] |
| 563 | CUUUUGAUAUGGUCUUAUC | GAUAAGACCAUAUCAAAAG | | [2502-2520] | — |
| 564 | UGGUUAACCACUGGUUUUC | GAAAACCAGUGGUUAACCA | | [220-238] | [84-102] |
| 565 | CAUGGAUCCUUUCUCAGAA | UUCUGAGAAAGGAUCCAUG | | [2176-2194] | — |
| 566 | AGAACUUCUGAAGUUCUUA | UAAGAACUUCAGAAGUUCU | | [2135-2153] | — |
| 567 | AAGAACUUCUGAAGUUCUU | AAGAACUUCAGAAGUUCUU | | [2134-2152] | — |
| 568 | CUCCAAACCACCUCUUGAC | GUCAAGAGGUGGUUUGGAG | | [187-205] | [51-69] |
| 569 | UGCCUAGAAGGGCUCCAAA | UUUGGAGCCCUUCUAGGCA | | [175-193] | [39-57] |
| 570 | CGUGACAGGUCUGAAACAG | CUGUUUCAGACCUGUCACG | | [1691-1709] | [1408-1426] |
| 571 | CUGACAUCGUGACAGGUCU | AGACCUGUCACGAUGUCAG | | [1684-1702] | [1401-1419] |
| 572 | UGACUUCCCUGGAACAGGA | UCCUGUUCCAGGGAAGUCA | | [1561-1579] | — |
| 573 | UCCAGUAUGAAGUGGCUGU | ACAGCCACUUCAUACUGGA | Ms | [1384-1402] | [1248-1266] |
| 574 | CAGUGAGGAUGUUUUCCAG | CUGGAAAACAUCCUCACUG | Ms | [1370-1388] | [1234-1252] |
| 575 | AGGUUGUUAUGCACCCAUC | GAUGGGUGCAUAACAACCU | | [1102-1120] | [966-984] |
| 576 | AAGGUUGUUAUGCACCCAU | AUGGGUGCAUAACAACCUU | | [1101-1119] | [965-983] |
| 577 | CCCAGCAGAAGGUUGUGAU | AUCACAACCUUCUGCUGGG | | [1078-1096] | [942-960] |
| 578 | CCUUGCACCGGUCAUUCUU | AAGAAUGACCGGUGCAAGG | | [1025-1043] | [889-907] |
| 579 | GUGAUCAUGACAAUAGCCU | AGGCUAUUGUCAUGAUCAC | | [741-759] | [605-623] |
| 580 | CUGGUCUCACUGGAGUGAU | AUCACUCCAGUGAGACCAG | | [727-745] | [591-609] |
| 581 | UGCUUCCUGUGUGUCGCAA | UUGCGACACACAGGAAGCA | | [409-427] | [273-291] |
| 582 | CUGCUUGAAUUUUAACAGC | GCUGUUAAAAUUCAAGCAG | | [380-398] | [244-262] |
| 583 | CCAUCUCCUGAGUUUUGGU | ACCAAAACUCAGGAGAUGG | | [2309-2327] | — |
| 584 | CAUGACUGUAGCAAGGCUU | AAGCCUUGCUACAGUCAUG | | [2222-2240] | — |
| 585 | ACUUGAGCUUCAGCAACUU | AAGUUGCUGAAGCUCAAGU | | [2115-2133] | — |
| 586 | CCUAGAAAGGUUCAAUUCU | AGAAUUGAACCUUUCUAGG | | [1860-1878] | [1577-1595] |
| 587 | UCCAGUCUGGAUCCUAGAA | UUCUAGGAUCCAGACUGGA | | [1848-1866] | [1565-1583] |
| 588 | AGGUGCCUUUUCCUGGUUC | GAACCAGGAAAAGGCACCU | GP | [1532-1550] | — |
| 589 | ACAGGUGCCUUUUCCUGGU | ACCAGGAAAAGGCACCUGU | GP | [1530-1548] | — |
| 590 | GGAUUGAAGUGGAUGGUCC | GGACCAUCCACUUCAAUCC | | [1339-1357] | [1203-1221] |
| 591 | UGGAAGUGGAUCCUUGCAC | GUGCAAGGAUCCACUUCCA | Ms | [1014-1032] | [878-896] |
| 592 | UGACAAUAGCCUUGAUUCU | AGAAUCAAGGCUAUUGUCA | | [748-766] | [612-630] |
| 593 | GUUCUUGGCUAAAUCCCAU | AUGGGAUUUAGCCAAGAAC | | [661-679] | [525-543] |
| 594 | GUCUUAUCCAGUGUGAACA | UGUUCACACUGGAUAAGAC | | [2513-2531] | — |
| 595 | UGGUCUUAUCCAGUGUGAA | UUCACACUGGAUAAGACCA | | [2511-2529] | — |
| 596 | CCAGUGUUACCAUCUCCUG | CAGGAGAUGGUAACACUGG | | [2300-2318] | — |
| 597 | AGCUUCAGCAACUUAAGAA | UUCUUAAGUUGCUGAAGCU | | [2120-2138] | — |
| 598 | CCUCCUUUGGGAGACCAAU | AUUGGUCUCCCAAAGGAGG | Rat | [1714-1732] | [1431-1449] |
| 599 | ACAGCCAGUGAGGAUGUUU | AAACAUCCUCACUGGCUGU | | [1365-1383] | [1229-1247] |
| 600 | UCCUUGGCUUAGGGAUUCA | UGAAUCCCUAAGCCAAGGA | | [850-868] | [714-732] |
| 601 | CACAAGCUGGUGGCCUAUA | UAUAGGCCACCAGCUUGUG | | [507-525] | [371-389] |
| 602 | ACCAACAGUGUACAUGUUU | AAACAUGUACACUGUUGGU | | [2476-2494] | — |
| 603 | UGCCUCUCAAGCCUUGACU | AGUCAAGGCUUGAGAGGCA | | [2059-2077] | [1719-1734] |
| | | | | | (16/16) |
| 604 | ACCUCCUUUGGGAGACCAA | UUGGUCUCCCAAAGGAGGU | Rat | [1713-1731] | [1430-1448] |
| 605 | CAGAAAACCUCCUUUGGGA | UCCCAAAGGAGGUUUUCUG | Rat | [1707-1725] | [1424-1442] |
| 606 | ACCGGAUGGGACAGCAAUA | UAUUGCUGUCCCAUCCGGU | | [1629-1647] | — |
| 607 | CCUUGGCUUAGGGAUUCAC | GUGAAUCCCUAAGCCAAGG | | [851-869] | [715-733] |
| 608 | CUGGUUUUCAGUUUUGUUU | AAACAAAACUGAAAACCAG | | [230-248] | [94-112] |
| 609 | CAACAGUGUACAUGUUUAC | GUAAACAUGUACACUGUUG | | [2478-2496] | — |
| 610 | AGGUGAUUUUAUCAAUUCC | GGAAUUGAUAAAAUCACCU | | [2283-2301] | — |
| 611 | UAAAGCCCAUGGAUCCUUU | AAAGGAUCCAUGGGCUUUA | | [2169-2187] | — |
| 612 | GUCUGAAACAGAAAACCUC | GAGGUUUUCUGUUUCAGAC | Rat | [1699-1717] | [1416-1434] |
| 613 | GUCUUGGAAGUGGAUCCUU | AAGGAUCCACUUCCAAGAC | Ms | [1010-1028] | [874-892] |
| 614 | GGAUGUUUUCCAGUAUGAA | UUCAUACUGGAAAACAUCC | Ms | [1376-1394] | [1240-1258] |
| 615 | UCCUUUGGGAGACCAAUGU | ACAUUGGUCUCCCAAAGGA | Rat, Ms | [1716-1734] | [1433-1451] |
| 616 | ACAGCCAUGACUGUAGCAA | UUGCUACAGUCAUGGCUGU | | [2217-2235] | — |
| 617 | AGGGAGACAGGUGCCUUUU | AAAAGGCACCUGUCUCCCU | GP | [1524-1542] | — |
| 618 | AGGAUGUUUUCCAGUAUGA | UCAUACUGGAAAACAUCCU | Ms | [1375-1393] | [1239-1257] |
| 619 | GGUAACUUCAGCUACUGAG | CUCAGUAGCUGAAGUUACC | | [770-788] | [634-652] |

TABLE A4
NOX1 19-mer oligomer pairs - NADPH oxidase 1

| | | | | | |
|---|---|---|---|---|---|
| | | | | Human- | Human- |
| | | | | 148536872 | 148536874 |
| No. | Sense siRNA | AntiSense siRNA | Other Sp | ORF: 207-1901 | ORF: 207-1754 |

| | | | | | |
|---|---|---|---|---|---|
| 1 | GGGUGACUUUUUAAAUAAA | UUUAUUUAAAAAGUCACCC | | [2316-2334] | [2169-2187] |
| 2 | GGCAGUAUAUCUUUGUUAA | UUAACAAAGAUAUACUGCC | | [1171-1189] | [1171-1189] |
| 3 | GGUGACUUUUUAAAUAAAA | UUUUAUUUAAAAAGUCACC | | [2317-2335] | [2170-2188] |
| 4 | CAAUGAGUUUUCUACAAUA | UAUUGUAGAAAACUCAUUG | | [1739-1757] | [1592-1610] |
| 5 | CAGUGUGAACAGCAAUUUA | UAAAUUGCUGUUCACACUG | | [2463-2481] | [2316-2334] |
| 6 | AGAAGGUUGUGAUUACCAA | UUGGUAAUCACAACCUUCU | | [1084-1102] | [1084-1102] |
| 7 | GGUGGUUCAGAGUUAUACA | UGUAUAACUCUGAACCACC | | [2198-2216] | [2051-2069] |
| 8 | CAUCGUGACAGGUCUGAAA | UUUCAGACCUGUCACGAUG | | [1688-1706] | [1541-1559] |
| 9 | AGGGUGACUUUUUAAAUAA | UUAUUUAAAAAGUCACCCU | | [2315-2333] | [2168-2186] |
| 10 | GAGAAGGAAGGCAGAAUAA | UUAUUCUGCCUUCCUUCUC | | [23-41] | [23-41] |
| 11 | GACCAAUGUGGGACAAUGA | UCAUUGUCCCACAUUGGUC | Rat, Ms | [1726-1744] | [1579-1597] |
| 12 | CACCGGUCAUUCUUUAUAU | AUAUAAAGAAUGACCGGUG | | [1030-1048] | [1030-1048] |
| 13 | GAAAGCAAUUGGAUCACAA | UUGUGAUCCAAUUGCUUUC | | [478-496] | [478-496] |
| 14 | CAUUCUUUAUAUCUGUGAA | UUCACAGAUAUAAAGAAUG | | [1037-1055] | [1037-1055] |
| 15 | GUGUUUUUCACAUCUUAAA | UUUAAGAUGUGAAAAACAC | | [77-95] | [77-95] |
| 16 | GAACAACAAUAUUCACCAA | UUGGUGAAUAUUGUUGUUC | | [1314-1332] | [1314-1332] |
| 17 | AAGUAGGGUGACUUUUUAA | UUAAAAAGUCACCCUACUU | | [2311-2329] | [2164-2182] |
| 18 | UAUUUUUGCUCAUCAAAAA | UUUUUGAUGAGCAAAAAUA | | [2486-2504] | [2339-2357] |
| 19 | GCUCUCUGCUUGAAUUUUA | UAAAAUUCAAGCAGAGAGC | | [375-393] | [375-393] |
| 20 | CAGAGGAGAGCAUGAAUGA | UCAUUCAUGCUCUCCUCUG | | [898-916] | [898-916] |
| 21 | AAGGGCUUUCGAACAACAA | UUGUUGUUCGAAAGCCCUU | | [1304-1322] | [1304-1322] |
| 22 | CAACAAAGAAAAUUUUUGA | UCAAAAAUUUUCUUUGUUG | | [1883-1901] | [1736-1754] |
| 23 | UAGGGUGACUUUUUAAAUA | UAUUUAAAAAGUCACCCUA | | [2314-2332] | [2167-2185] |
| 24 | UCAGAAAAAUAACUGUAAA | UUUACAGUUAUUUUUCUGA | | [2132-2150] | [1985-2003] |
| 25 | GUGUGAACAGCAAUUUAUU | AAUAAAUUGCUGUUCACAC | | [2465-2483] | [2318-2336] |
| 26 | GAUCGUGACUCCCACUGUA | UACAGUGGGAGUCACGAUC | | [960-978] | [960-978] |
| 27 | UCUUAUUUUUGCUCAUCAA | UUGAUGAGCAAAAAUAAGA | | [2483-2501] | [2336-2354] |
| 28 | GACAGUGGAGUAUGUGACA | UGUCACAUACUCCACUGUC | | [695-713] | [695-713] |
| 29 | GACAAUGAGUUUUCUACAA | UUGUAGAAAACUCAUUGUC | | [1737-1755] | [1590-1608] |
| 30 | GCAGUAUAUCUUUGUUAAU | AUUAACAAAGAUAUACUGC | | [1172-1190] | [1172-1190] |
| 31 | AGAAGGAAGGCAGAAUAAA | UUUAUUCUGCCUUCCUUCU | | [24-42] | [24-42] |
| 32 | CAGAAUCCGGAUUGCUGAA | UUCAGCAAUCCGGAUUCUG | | [146-164] | [146-164] |
| 33 | GCUUCUAUCUUGAAAUCCA | UGGAUUUCAAGAUAGAAGC | | [1437-1455] | [1437-1455] |
| 34 | CGUCUGCUCUCUGCUUGAA | UUCAAGCAGAGAGCAGACG | | [370-388] | [370-388] |
| 35 | UAUCCAGUGUGAACAGCAA | UUGCUGUUCACACUGGAUA | | [2459-2477] | [2312-2330] |
| 36 | GCAGAAUAAACUUAUUCAU | AUGAAUAAGUUUAUUCUGC | | [33-51] | [33-51] |
| 37 | AAUUCUACUUCAACAAAGA | UCUUUGUUGAAGUAGAAUU | Rat | [1873-1891] | [1726-1744] |
| 38 | UGUUAUGCACCCAUCCAAA | UUUGGAUGGGUGCAUAACA | | [1106-1124] | [1106-1124] |
| 39 | AGCAGUCACUUUAGGAUAA | UUAUCCUAAAGUGACUGCU | | [1978-1996] | [1831-1849] |
| 40 | CAUAAGGGCUUUCGAACAA | UUGUUCGAAAGCCCUUAUG | | [1301-1319] | [1301-1319] |
| 41 | AUAUGAGAAGGCCGACAAA | UUUGUCGGCCUUCUCAUAU | | [302-320] | [302-320] |
| 42 | UGUGGAUGCCUUCCUGAAA | UUUCAGGAAGGCAUCCACA | | [284-302] | [284-302] |
| 43 | AUGCCUUCCUGAAAUAUGA | UCAUAUUUCAGGAAGGCAU | | [289-307] | [289-307] |
| 44 | CAUUCAUAUCCGAGCAGCA | UGCUGCUCGGAUAUGAAUG | | [1262-1280] | [1262-1280] |
| 45 | GCAGAGGUUUGGUGGUUCA | UGAACCACCAAACCUCUGC | | [2188-2206] | [2041-2059] |
| 46 | AAGGCAGAAUAAACUUAUU | AAUAAGUUUAUUCUGCCUU | | [30-48] | [30-48] |
| 47 | CACAGAAGAUUUCUAAGUA | UACUUAGAAAUCUUCUGUG | Rat | [2297-2315] | [2150-2168] |
| 48 | UCCAGUGUGCAGACCACAA | UUGUGGUCUGCACACUGGA | | [1468-1486] | [1468-1486] |
| 49 | GUUCAAUUCUACUUCAACA | UGUUGAAGUAGAAUUGAAC | Rat | [1869-1887] | [1722-1740] |
| 50 | CAAACAGAGGAGAGCAUGA | UCAUGCUCUCCUCUGUUUG | | [894-912] | [894-912] |
| 51 | GGCAGAAUAAACUUAUUCA | UGAAUAAGUUUAUUCUGCC | | [32-50] | [32-50] |
| 52 | AUAAGAAUGUGCCUCUCAA | UUGAGAGGCACAUUCUUAU | | [1993-2011] | [1846-1864] |
| 53 | CAAUAUUCACCAAUUCCCA | UGGGAAUUGGUGAAUAUUG | | [1320-1338] | [1320-1338] |
| 54 | GAGGAGAGCAUGAAUGAGA | UCUCAUUCAUGCUCUCCUC | | [900-918] | [900-918] |
| 55 | GUUGGUCAUGCAGCAUUAA | UUAAUGCUGCAUGACCAAC | | [1650-1668] | [1503-1521] |
| 56 | CUGGUAUUCUUUUUUUGAU | AUCAAAAAAAGAAUACCAG | | [2023-2041] | [1876-1894] |
| 57 | GAAACACGACAGUGGAGUA | UACUCCACUGUCGUGUUUC | | [688-706] | [688-706] |
| 58 | CAUCUUAAAGGCUCACAGA | UCUGUGAGCCUUUAAGAUG | | [87-105] | [87-105] |
| 59 | UCUCAUAAGGGCUUUCGAA | UUCGAAAGCCCUUAUGAGA | | [1298-1316] | [1298-1316] |
| 60 | GCCGACAAAUACUACUACA | UGUAGUAGUAUUUGUCGGC | | [312-330] | [312-330] |
| 61 | UUUUGGAAUUGCAGAUGAA | UUCAUCUGCAAUUCCAAAA | | [1126-1144] | [1126-1144] |
| 62 | GGUCAUUCUUUAUAUCUGU | ACAGAUAUAAAGAAUGACC | | [1034-1052] | [1034-1052] |
| 63 | GUGACAGGUCUGAAACAGA | UCUGUUUCAGACCUGUCAC | | [1692-1710] | [1545-1563] |
| 64 | GGAGACCAAUGUGGGACAA | UUGUCCCACAUUGGUCUCC | Rat, Ms | [1723-1741] | [1576-1594] |
| 65 | GGACGGUAAUCUGCAUUUU | AAAAUGCAGAUUACCGUCC | | [1915-1933] | [1768-1786] |
| 66 | GCACCGGUCAUUCUUUAUA | UAUAAAGAAUGACCGGUGC | | [1029-1047] | [1029-1047] |
| 67 | GAAGGAAGGCAGAAUAAAC | GUUUAUUCUGCCUUCCUUC | | [25-43] | [25-43] |
| 68 | GAGUGAUCAUGACAAUAGC | GCUAUUGUCAUGAUCACUC | | [739-757] | [739-757] |
| 69 | UCUACUUCAACAAAGAAAA | UUUUCUUUGUUGAAGUAGA | | [1876-1894] | [1729-1747] |
| 70 | GAGCAGUCACUUUAGGAUA | UAUCCUAAAGUGACUGCUC | | [1977-1995] | [1830-1848] |
| 71 | AGAGAAGGAAGGCAGAAUA | UAUUCUGCCUUCCUUCUCU | | [22-40] | [22-40] |
| 72 | GACUGGACAGAAAAUCUCA | UGAGAUUUUCUGUCCAGUC | Rat | [1284-1302] | [1284-1302] |
| 73 | CCAGAGAAGGAAGGCAGAA | UUCUGCCUUCCUUCUCUGG | | [20-38] | [20-38] |
| 74 | GGUCAUGCAGCAUUAAACU | AGUUUAAUGCUGCAUGACC | Rat, Ms, GP | [1653-1671] | [1506-1524] |
| 75 | UGGAUGCCUUCCUGAAAUA | UAUUUCAGGAAGGCAUCCA | | [286-304] | [286-304] |
| 76 | CUUAUUUUUGCUCAUCAAA | UUUGAUGAGCAAAAAUAAG | | [2484-2502] | [2337-2355] |
| 77 | UUUGCUCAUCAAAAAAUAA | UUAUUUUUUGAUGAGCAAA | | [2490-2508] | [2343-2361] |
| 78 | UCAGAGUUAUACAACUAAU | AUUAGUUGUAUAACUCUGA | | [2204-2222] | [2057-2075] |
| 79 | CAGAAAAAUAACUGUAAAU | AUUUACAGUUAUUUUUCUG | | [2133-2151] | [1986-2004] |
| 80 | GGUUAGGGCUGAAUGUUUU | AAAACAUUCAGCCCUAACC | | [259-277] | [259-277] |
| 81 | CUCAGAAAAAUAACUGUAA | UUACAGUUAUUUUUCUGAG | | [2131-2149] | [1984-2002] |
| 82 | CUACUUCAACAAAGAAAAU | AUUUUCUUUGUUGAAGUAG | | [1877-1895] | [1730-1748] |
| 83 | GAUUUCUUCUCCAUUCAUA | UAUGAAUGGAGAAGAAAUC | | [1251-1269] | [1251-1269] |
| 84 | UGAAAUCCAUCUGGUACAA | UUGUACCAGAUGGAUUUCA | | [1447-1465] | [1447-1465] |
| 85 | AACUGUAAAUCUUUCUGGA | UCCAGAAAGAUUUACAGUU | | [2142-2160] | [1995-2013] |
| 86 | AAAUCCAUCUGGUACAAAU | AUUUGUACCAGAUGGAUUU | | [1449-1467] | [1449-1467] |
| 87 | UUUUUUUGAUUGCAUUCAA | UUGAAUGCAAUCAAAAAAA | | [2032-2050] | [1885-1903] |
| 88 | CACCAAUUCCCAGGAUUGA | UCAAUCCUGGGAAUUGGUG | | [1327-1345] | [1327-1345] |
| 89 | GUGGAUGCCUUCCUGAAAU | AUUUCAGGAAGGCAUCCAC | | [285-303] | [285-303] |
| 90 | GAUUCUCAUGGUAACUUCA | UGAAGUUACCAUGAGAAUC | Rb, GP | [761-779] | [761-779] |
| 91 | AUGAGAAGGCCGACAAAUA | UAUUUGUCGGCCUUCUCAU | | [304-322] | [304-322] |
| 92 | GAAGGCAGAAUAAACUUAU | AUAAGUUUAUUCUGCCUUC | | [29-47] | [29-47] |
| 93 | GCAAAGAGCCUGCGCAAAU | AUUUGCGCAGGCUCUUUGC | | [1815-1833] | [1668-1686] |
| 94 | CAGUGUUACCAUCUCCUGA | UCAGGAGAUGGUAACACUG | | [2244-2262] | [2097-2115] |
| 95 | UAGGAAUAAGGACGGUAAU | AUUACCGUCCUUAUUCCUA | | [1906-1924] | [1759-1777] |
| 96 | UGCUGUCACCGAUAUUCCA | UGGAAUAUCGGUGACAGCA | GP | [1833-1851] | [1686-1704] |
| 97 | UCUUGAAAUCCAUCUGGUA | UACCAGAUGGAUUUCAAGA | GP | [1444-1462] | [1444-1462] |
| 98 | ACACGACAGUGGAGUAUGU | ACAUACUCCACUGUCGUGU | | [691-709] | [691-709] |
| 99 | UCGUGACAGGUCUGAAACA | UGUUUCAGACCUGUCACGA | | [1690-1708] | [1543-1561] |
| 100 | GUAGGCGCCCUAAGUUUGA | UCAAACUUAGGGCGCCUAC | | [976-994] | [976-994] |
| 101 | GGAAGGCAGAAUAAACUUA | UAAGUUUAUUCUGCCUUCC | | [28-46] | [28-46] |
| 102 | AGACCACAACCUCAAAACA | UGUUUUGAGGUUGUGGUCU | | [1478-1496] | [1478-1496] |
| 103 | UCAUUGCACACCUGUUUAA | UUAAACAGGUGUGCAAUGA | | [553-571] | [553-571] |
| 104 | UUUUGCUCAUCAAAAAAUA | UAUUUUUUGAUGAGCAAAA | | [2489-2507] | [2342-2360] |
| 105 | CAUGGUAACUUCAGCUACU | AGUAGCUGAAGUUACCAUG | | [767-785] | [767-785] |
| 106 | CCUCAAUCUCUCUCCUGGA | UCCAGGAGAGAGAUUGAGG | GP | [1195-1213] | [1195-1213] |
| 107 | GGGCAGUAUAUCUUUGUUA | UAACAAAGAUAUACUGCCC | | [1170-1188] | [1170-1188] |
| 108 | GCCCAUGGAUCCUUUCUCA | UGAGAAAGGAUCCAUGGGC | | [2116-2134] | [1969-1987] |
| 109 | AGUGUGAACAGCAAUUUAU | AUAAAUUGCUGUUCACACU | | [2464-2482] | [2317-2335] |
| 110 | CUACAUACAGCUAUUCACA | UGUGAAUAGCUGUAUGUAG | | [534-552] | [534-552] |
| 111 | ACAUCGUGACAGGUCUGAA | UUCAGACCUGUCACGAUGU | | [1687-1705] | [1540-1558] |
| 112 | CAGAAGGUUGUGAUUACCA | UGGUAAUCACAACCUUCUG | | [1083-1101] | [1083-1101] |
| 113 | UGUGCAGAGUCUUUUGAGA | UCUCAAAAGACUCUGCACA | | [933-951] | [933-951] |
| 114 | UAAGGACGGUAAUCUGCAU | AUGCAGAUUACCGUCCUUA | | [1912-1930] | [1765-1783] |
| 115 | GUGAGGAUGUUUUCCAGUA | UACUGGAAAACAUCCUCAC | Ms | [1372-1390] | [1372-1390] |
| 116 | UAGGCGCCCUAAGUUUGAA | UUCAAACUUAGGGCGCCUA | | [977-995] | [977-995] |
| 117 | GUUUGGUGGUUCAGAGUUA | UAACUCUGAACCACCAAAC | | [2194-2212] | [2047-2065] |
| 118 | UAAGGGCUUUCGAACAACA | UGUUGUUCGAAAGCCCUUA | | [1303-1321] | [1303-1321] |
| 119 | AUCACAACCUCACCUUCCA | UGGAAGGUGAGGUUGUGAU | Rat, Ms | [490-508] | [490-508] |
| 120 | GAACAGCAAUUUAUUCUUA | UAAGAAUAAAUUGCUGUUC | | [2469-2487] | [2322-2340] |
| 121 | UGUUUAACUUUGACUGCUA | UAGCAGUCAAAGUUAAACA | | [565-583] | [565-583] |
| 122 | GAAGGUUGUGAUUACCAAG | CUUGGUAAUCACAACCUUC | | [1085-1103] | [1085-1103] |
| 123 | AGGGAUUCACGGCAUUGGU | ACCAAUGCCGUGAAUCCCU | | [860-878] | [860-878] |
| 124 | UAAACAAAAUUACCGAGAA | UUCUCGGUAAUUUUGUUUA | | [2382-2400] | [2235-2253] |
| 125 | GUUUAACUUUGACUGCUAU | AUAGCAGUCAAAGUUAAAC | | [566-584] | [566-584] |
| 126 | GUUACUUGAGCUUCAGCAA | UUGCUGAAGCUCAAGUAAC | | [2055-2073] | [1908-1926] |
| 127 | CACUGGAGUGAUCAUGACA | UGUCAUGAUCACUCCAGUG | | [734-752] | [734-752] |
| 128 | UUAUUUUUGCUCAUCAAAA | UUUUGAUGAGCAAAAAUAA | | [2485-2503] | [2338-2356] |
| 129 | GAGCUUCAGCAACUUAAGA | UCUUAAGUUGCUGAAGCUC | | [2062-2080] | [1915-1933] |
| 130 | CACCUUUUUAUCUUCUAUA | UAUAGAAGAUAAAAAGGUG | | [831-849] | [831-849] |
| 131 | CUCAAUCUCUCUCCUGGAA | UUCCAGGAGAGAGAUUGAG | | [1196-1214] | [1196-1214] |
| 132 | AGCUAUUCACAUCAUUGCA | UGCAAUGAUGUGAAUAGCU | | [542-560] | [542-560] |
| 133 | CAUGUUUACUGUCACUUUU | AAAAGUGACAGUAAACAUG | | [2430-2448] | [2283-2301] |
| 134 | GAUUCACGGCAUUGGUGGA | UCCACCAAUGCCGUGAAUC | | [863-881] | [863-881] |
| 135 | AGUUCUGUCCAGAGAAGGA | UCCUUCUCUGGACAGAACU | | [12-30] | [12-30] |
| 136 | CAAUGUGGGACAAUGAGUU | AACUCAUUGUCCCACAUUG | Rat, Ms | [1729-1747] | [1582-1600] |
| 137 | ACGACAGUGGAGUAUGUGA | UCACAUACUCCACUGUCGU | | [693-711] | [693-711] |
| 138 | GCAAAUGCUGUCACCGAUA | UAUCGGUGACAGCAUUUGC | GP | [1828-1846] | [1681-1699] |
| 139 | CUUCAACAAAGAAAAUUUU | AAAAUUUUCUUUGUUGAAG | | [1880-1898] | [1733-1751] |
| 140 | AUUCUACUUCAACAAAGAA | UUCUUUGUUGAAGUAGAAU | Rat | [1874-1892] | [1727-1745] |
| 141 | AGAGGUUUGGUGGUUCAGA | UCUGAACCACCAAACCUCU | | [2190-2208] | [2043-2061] |
| 142 | CAAAGAAAAUUUUUGAGUU | AACUCAAAAAUUUUCUUUG | | [1886-1904] | [1739-1757] |
| 143 | GCUCCAAACCACCUCUUGA | UCAAGAGGUGGUUUGGAGC | | [186-204] | [186-204] |
| 144 | AAGUUCUGAAGUUCUUAAA | UUUAAGAACUUCAGAACUU | | [2097-2115] | [1950-1968] |
| 145 | UUGCUCAUCAAAAAAUAAA | UUUAUUUUUUGAUGAGCAA | | [2491-2509] | [2344-2362] |
| 146 | AAUCCAUCUGGUACAAAUU | AAUUUGUACCAGAUGGAUU | | [1450-1468] | [1450-1468] |
| 147 | UUGGUCAUGCAGCAUUAAA | UUUAAUGCUGCAUGACCAA | | [1651-1669] | [1504-1522] |
| 148 | GGUUUGAGCAGUCACUUUA | UAAAGUGACUGCUCAAACC | | [1972-1990] | [1825-1843] |
| 149 | UCCAGAGAAGGAAGGCAGA | UCUGCCUUCCUUCUCUGGA | | [19-37] | [19-37] |
| 150 | CAAACCACCUCUUGACAAU | AUUGUCAAGAGGUGGUUUG | | [190-208] ORF | [190-208] ORF |
| 151 | ACAAUAGCCUUGAUUCUCA | UGAGAAUCAAGGCUAUUGU | | [750-768] | [750-768] |
| 152 | AACUUUGACUGCUAUAGCA | UGCUAUAGCAGUCAAAGUU | | [570-588] | [570-588] |
| 153 | GUCGCAAUCUGCUGUCCUU | AAGGACAGCAGAUUGCGAC | | [421-439] | [421-439] |
| 154 | CAGAAUAAACUUAUUCAUU | AAUGAAUAAGUUUAUUCUG | | [34-52] | [34-52] |
| 155 | AGAAGGCCGACAAAUACUA | UAGUAUUUGUCGGCCUUCU | | [307-325] | [307-325] |
| 156 | CUCACUGGAGUGAUCAUGA | UCAUGAUCACUCCAGUGAG | | [732-750] | [732-750] |
| 157 | UUGUGGAUGCCUUCCUGAA | UUCAGGAAGGCAUCCACAA | | [283-301] | [283-301] |
| 158 | AAUUUUUGAGUUAUAGGAA | UUCCUAUAACUCAAAAAUU | | [1893-1911] | [1746-1764] |
| 159 | UGGUAUUCUUUUUUUGAUU | AAUCAAAAAAAGAAUACCA | | [2024-2042] | [1877-1895] |
| 160 | ACAAAUGUUCCAUUCCUGA | UCAGGAAUGGAACAUUUGU | | [117-135] | [117-135] |
| 161 | AACAGAGGAGAGCAUGAAU | AUUCAUGCUCUCCUCUGUU | | [896-914] | [896-914] |
| 162 | UCCGGAGGAGUUAUUUUGA | UCAAAAUAACUCCUCCGGA | | [793-811] | [793-811] |
| 163 | AAACAGAGGAGAGCAUGAA | UUCAUGCUCUCCUCUGUUU | | [895-913] | [895-913] |
| 164 | GGUUAACCACUGGUUUUCA | UGAAAACCAGUGGUUAACC | | [221-239] | [221-239] |
| 165 | CAGCAUUGCUGGUCUCACU | AGUGAGACCAGCAAUGCUG | GP | [719-737] | [719-737] |
| 166 | CAUGAAUGAGAGUCAUCCU | AGGAUGACUCUCAUUCAUG | | [908-926] | [908-926] |
| 167 | GGUCAAACAGAGGAGAGCA | UGCUCUCCUCUGUUUGACC | | [891-909] | [891-909] |
| 168 | AUGUUUUCCUGUUUGUGGA | UCCACAAACAGGAAAACAU | | [271-289] | [271-289] |
| 169 | CAUGCAGCAUUAAACUUUG | CAAAGUUUAAUGCUGCAUG | Rat, Ms, GP | [1656-1674] | [1509-1527] |
| 170 | CAGUAUAUCUUUGUUAAUU | AAUUAACAAAGAUAUACUG | | [1173-1191] | [1173-1191] |
| 171 | GUACAAAUUCCAGUGUGCA | UGCACACUGGAAUUUGUAC | | [1460-1478] | [1460-1478] |
| 172 | GUUUCUGGUUGUUUGGUUA | UAACCAAACAACCAGAAAC | | [245-263] | [245-263] |
| 173 | ACAACCUCAAAACAAAAAA | UUUUUUGUUUUGAGGUUGU | | [1483-1501] | [1483-1501] |
| 174 | CUUUGACUGCUAUAGCAGA | UCUGCUAUAGCAGUCAAAG | | [572-590] | [572-590] |
| 175 | AUUUUUGCUCAUCAAAAAA | UUUUUUGAUGAGCAAAAAU | | [2487-2505] | [2340-2358] |
| 176 | CAAUUGGAUCACAACCUCA | UGAGGUUGUGAUCCAAUUG | | [483-501] | [483-501] |
| 177 | CAAAGAGCCUGCGCAAAUG | CAUUUGCGCAGGCUCUUUG | | [1816-1834] | [1669-1687] |
| 178 | UGAAGGACCUCUCCAGAAU | AUUCUGGAGAGGUCCUUCA | | [133-151] | [133-151] |
| 179 | CUUUGACCUCUGCUCCAGA | UCUGGAGCAGAGGUCAAAG | GP | [1228-1246] | [1228-1246] |
| 180 | AAGGAAGGCAGAAUAAACU | AGUUUAUUCUGCCUUCCUU | | [26-44] | [26-44] |
| 181 | AUGCAGCAUUAAACUUUGA | UCAAAGUUUAAUGCUGCAU | Rat, Ms, GP | [1657-1675] | [1510-1528] |
| 182 | AUGGGAAACUGGGUGGUUA | UAACCACCCAGUUUCCCAU | | [207-225] | [207-225] |
| 183 | GAAAUCCAUCUGGUACAAA | UUUGUACCAGAUGGAUUUC | | [1448-1466] | [1448-1466] |
| 184 | CAUCAUUGCACACCUGUUU | AAACAGGUGUGCAAUGAUG | | [551-569] | [551-569] |
| 185 | GCACACUGAGAAAGCAAUU | AAUUGCUUUCUCAGUGUGC | | [469-487] | [469-487] |
| 186 | UCCUUUCUCAGAAAAAUAA | UUAUUUUUCUGAGAAAGGA | | [2125-2143] | [1978-1996] |
| 187 | AACUUCUGAAGUUCUUAAA | UUUAAGAACUUCAGAAGUU | | [2080-2098] | [1933-1951] |
| 188 | AUCCAGUCCCGAAACACGA | UCGUGUUUCGGGACUGGAU | | [678-696] | [678-696] |
| 189 | AAAGUUCUGAAGUUCUUAA | UUAAGAACUUCAGAACUUU | | [2096-2114] | [1949-1967] |
| 190 | CAGCAGAAGGUUGUGAUUA | UAAUCACAACCUUCUGCUG | | [1080-1098] | [1080-1098] |
| 191 | AGGAAGGCAGAAUAAACUU | AAGUUUAUUCUGCCUUCCU | | [27-45] | [27-45] |
| 192 | UGAAGUGGAUGGUCCCUUU | AAAGGGACCAUCCACUUCA | | [1343-1361] | [1343-1361] |
| 193 | AUCUCAUAAGGGCUUUCGA | UCGAAAGCCCUUAUGAGAU | | [1297-1315] | [1297-1315] |
| 194 | CAACCUCACCUUCCACAAG | CUUGUGGAAGGUGAGGUUG | | [494-512] | [494-512] |
| 195 | AUUCUUUAUAUCUGUGAAA | UUUCACAGAUAUAAAGAAU | | [1038-1056] | [1038-1056] |
| 196 | AGUUCAUCCGGAGGAGUUA | UAACUCCUCCGGAUGAACU | | [787-805] | [787-805] |
| 197 | UGCUCAUCAAAAAAUAAAG | CUUUAUUUUUUGAUGAGCA | | [2492-2510] | [2345-2363] |
| 198 | UCAAUUCUACUUCAACAAA | UUUGUUGAAGUAGAAUUGA | Rat | [1871-1889] | [1724-1742] |
| 199 | CAAUUCUACUUCAACAAAG | CUUUGUUGAAGUAGAAUUG | Rat | [1872-1890] | [1725-1743] |
| 200 | UUCAGAGUUAUACAACUAA | UUAGUUGUAUAACUCUGAA | | [2203-2221] | [2056-2074] |
| 201 | CCAAACCACCUCUUGACAA | UUGUCAAGAGGUGGUUUGG | | [189-207] | [189-207] |
| 202 | GAAAAAUAACUGUAAAUCU | AGAUUUACAGUUAUUUUUC | | [2135-2153] | [1988-2006] |
| 203 | UUGCACCGGUCAUUCUUUA | UAAAGAAUGACCGGUGCAA | | [1027-1045] | [1027-1045] |
| 204 | GUUCUGUCCAGAGAAGGAA | UUCCUUCUCUGGACAGAAC | | [13-31] | [13-31] |
| 205 | GAAUAAGGACGGUAAUCUG | CAGAUUACCGUCCUUAUUC | | [1909-1927] | [1762-1780] |
| 206 | AGUUCUUAAAGCCCAUGGA | UCCAUGGGCUUUAAGAACU | | [2106-2124] | [1959-1977] |
| 207 | UUCCCAGGAUUGAAGUGGA | UCCACUUCAAUCCUGGGAA | | [1333-1351] | [1333-1351] |
| 208 | GGUCUUAUCCAGUGUGAAC | GUUCACACUGGAUAAGACC | | [2454-2472] | [2307-2325] |
| 209 | AUCCCAUCCAGUCCCGAAA | UUUCGGGACUGGAUGGGAU | | [673-691] | [673-691] |
| 210 | CUAGAAGGGCUCCAAACCA | UGGUUUGGAGCCCUUCUAG | | [178-196] | [178-196] |
| 211 | CAUUGCUGGUCUCACUGGA | UCCAGUGAGACCAGCAAUG | GP | [722-740] | [722-740] |
| 212 | CAUCUGGUACAAAUUCCAG | CUGGAAUUUGUACCAGAUG | | [1454-1472] | [1454-1472] |
| 213 | GUUUACUGUCACUUUUGAU | AUCAAAAGUGACAGUAAAC | | [2433-2451] | [2286-2304] |
| 214 | CAGAGAAGGAAGGCAGAAU | AUUCUGCCUUCCUUCUCUG | | [21-39] | [21-39] |
| 215 | UUGGUGGUUCAGAGUUAUA | UAUAACUCUGAACCACCAA | | [2196-2214] | [2049-2067] |
| 216 | GAUUUUCUUCUUCACUUGA | UCAAGUGAAGAAGAAAAUC | | [2511-2529] | [2364-2382] |
| 217 | CUUUGUAUCUUCAGUAAUU | AAUUACUGAAGAUACAAAG | | [1938-1956] | [1791-1809] |
| 218 | GUAGCAAGGCUUGAUAGCA | UGCUAUCAAGCCUUGCUAC | | [2172-2190] | [2025-2043] |
| 219 | GCAAGUGUGCAGAGUCUUU | AAAGACUCUGCACACUUGC | | [928-946] | [928-946] |
| 220 | ACAGCAAUUUAUUCUUAUU | AAUAAGAAUAAAUUGCUGU | | [2471-2489] | [2324-2342] |
| 221 | GCUUGAUAGCAGAGGUUUG | CAAACCUCUGCUAUCAAGC | | [2180-2198] | [2033-2051] |
| 222 | UCUGCUCUCUGCUUGAAUU | AAUUCAAGCAGAGAGCAGA | | [372-390] | [372-390] |
| 223 | UUGGGAGACCAAUGUGGGA | UCCCACAUUGGUCUCCCAA | Rat, Ms | [1720-1738] | [1573-1591] |
| 224 | GCUCCAGAGGAAGAUUUCU | AGAAAUCUUCCUCUGGAGC | | [1239-1257] | [1239-1257] |
| 225 | CAUCCGGAGGAGUUAUUUU | AAAAUAACUCCUCCGGAUG | | [791-809] | [791-809] |
| 226 | GAGAAGGCCGACAAAUACU | AGUAUUUGUCGGCCUUCUC | | [306-324] | [306-324] |
| 227 | AAUCCCAUCCAGUCCCGAA | UUCGGGACUGGAUGGGAUU | | [672-690] | [672-690] |
| 228 | CCAUGGAUCCUUUCUCAGA | UCUGAGAAAGGAUCCAUGG | | [2118-2136] | [1971-1989] |
| 229 | UUACCAAGGUUGUUAUGCA | UGCAUAACAACCUUGGUAA | | [1096-1114] | [1096-1114] |
| 230 | GAAAAUUUUUGAGUUAUAG | CUAUAACUCAAAAAUUUUC | | [1890-1908] | [1743-1761] |
| 231 | AGUUAUACAACUAAUCCCA | UGGGAUUAGUUGUAUAACU | | [2208-2226] | [2061-2079] |
| 232 | UCUCCAGCCUAUCUCAUGA | UCAUGAGAUAGGCUGGAGA | | [628-646] | [628-646] |
| 233 | UGUGCAGACCACAACCUCA | UGAGGUUGUGGUCUGCACA | | [1473-1491] | [1473-1491] |
| 234 | CACCGAUAUUCCAGUCUGG | CCAGACUGGAAUAUCGGUG | | [1839-1857] | [1692-1710] |
| 235 | UAUCUCAUGAUGAGAAAAA | UUUUUCUCAUCAUGAGAUA | | [637-655] | [637-655] |
| 236 | GAUAGCACAGUUCUGUCCA | UGGACAGAACUGUGCUAUC | | [4-22] | [4-22] |
| 237 | GGUCUGAAACAGAAAACCU | AGGUUUUCUGUUUCAGACC | Rat, GP | [1698-1716] | [1551-1569] |
| 238 | AGCCUAUCUCAUGAUGAGA | UCUCAUCAUGAGAUAGGCU | | [633-651] | [633-651] |
| 239 | UAGCCUUGAUUCUCAUGGU | ACCAUGAGAAUCAAGGCUA | Rb, GP | [754-772] | [754-772] |
| 240 | AAAUUUUUGAGUUAUAGGA | UCCUAUAACUCAAAAAUUU | | [1892-1910] | [1745-1763] |
| 241 | AAAGGAUUUUCUUCUUCAC | GUGAAGAAGAAAAUCCUUU | | [2507-2525] | [2360-2378] |
| 242 | UUGGAAUUGCAGAUGAACA | UGUUCAUCUGCAAUUCCAA | | [1128-1146] | [1128-1146] |
| 243 | UCAUAAGGGCUUUCGAACA | UGUUCGAAAGCCCUUAUGA | | [1300-1318] | [1300-1318] |
| 244 | CAUCAAAAAAUAAAGGAUU | AAUCCUUUAUUUUUUGAUG | | [2496-2514] | [2349-2367] |
| 245 | AAGCCUUGACUCCCUGGUA | UACCAGGGAGUCAAGGCUU | | [2010-2028] | [1863-1881] |
| 246 | CUUCAGCUACUGAGUUCAU | AUGAACUCAGUAGCUGAAG | | [775-793] | [775-793] |
| 247 | ACCUUUUUAUCUUCUAUAU | AUAUAGAAGAUAAAAAGGU | | [832-850] | [832-850] |
| 248 | GCUGAAUGUUUUCCUGUUU | AAACAGGAAAACAUUCAGC | | [266-284] | [266-284] |
| 249 | UUCCAGUCUGGAUCCUAGA | UCUAGGAUCCAGACUGGAA | | [1847-1865] | [1700-1718] |
| 250 | AUUUCUUCUCCAUUCAUAU | AUAUGAAUGGAGAAGAAAU | | [1252-1270] | [1252-1270] |
| 251 | CUGCUAUAGCAGAAGCCGA | UCGGCUUCUGCUAUAGCAG | | [578-596] | [578-596] |
| 252 | UAAAGGAUUUUCUUCUUCA | UGAAGAAGAAAAUCCUUUA | | [2506-2524] | [2359-2377] |
| 253 | CUGUAGGCGCCCUAAGUUU | AAACUUAGGGCGCCUACAG | | [974-992] | [974-992] |
| 254 | AGUCUUUUGAGAUGUGGGA | UCCCACAUCUCAAAAGACU | | [940-958] | [940-958] |
| 255 | GAGUUAUAGGAAUAAGGAC | GUCCUUAUUCCUAUAACUC | | [1900-1918] | [1753-1771] |
| 256 | UGGUAACUUCAGCUACUGA | UCAGUAGCUGAAGUUACCA | | [769-787] | [769-787] |
| 257 | CCCACAGAAGAUUUCUAAG | CUUAGAAAUCUUCUGUGGG | | [2295-2313] | [2148-2166] |
| 258 | UGAGCUUCAGCAACUUAAG | CUUAAGUUGCUGAAGCUCA | | [2061-2079] | [1914-1932] |
| 259 | UUCAAUUCUACUUCAACAA | UUGUUGAAGUAGAAUUGAA | Rat | [1870-1888] | [1723-1741] |
| 260 | CACAACCUCACCUUCCACA | UGUGGAAGGUGAGGUUGUG | | [492-510] | [492-510] |
| 261 | GUACAUGUUUACUGUCACU | AGUGACAGUAAACAUGUAC | | [2427-2445] | [2280-2298] |
| 262 | CAAAUGCUGUCACCGAUAU | AUAUCGGUGACAGCAUUUG | GP | [1829-1847] | [1682-1700] |
| 263 | UGAGAAGGCCGACAAAUAC | GUAUUUGUCGGCCUUCUCA | | [305-323] | [305-323] |
| 264 | AUAUAACACCAACAGUGUA | UACACUGUUGGUGUUAUAU | | [2411-2429] | [2264-2282] |
| 265 | AUGUGACAUUCACCAGCAU | AUGCUGGUGAAUGUCACAU | GP | [706-724] | [706-724] |
| 266 | GGAUUUUCUUCUUCACUUG | CAAGUGAAGAAGAAAAUCC | | [2510-2528] | [2363-2381] |
| 267 | UAGAAAGGUUCAAUUCUAC | GUAGAAUUGAACCUUUCUA | | [1862-1880] | [1715-1733] |
| 268 | AAGUCUUCUGGUAUACUCA | UGAGUAUACCAGAAGACUU | | [811-829] | [811-829] |
| 269 | AGAAAGGUUCAAUUCUACU | AGUAGAAUUGAACCUUUCU | | [1863-1881] | [1716-1734] |
| 270 | ACUGAGAAAGCAAUUGGAU | AUCCAAUUGCUUUCUCAGU | | [473-491] | [473-491] |
| 271 | UGAGAAAGCAAUUGGAUCA | UGAUCCAAUUGCUUUCUCA | | [475-493] | [475-493] |
| 272 | AGGAUUUUCUUCUUCACUU | AAGUGAAGAAGAAAAUCCU | | [2509-2527] | [2362-2380] |
| 273 | UUUCGAACAACAAUAUUCA | UGAAUAUUGUUGUUCGAAA | | [1310-1328] | [1310-1328] |
| 274 | ACAGAAGAUUUCUAAGUAG | CUACUUAGAAAUCUUCUGU | Rat | [2298-2316] | [2151-2169] |
| 275 | UGAGAUGUGGGAUGAUCGU | ACGAUCAUCCCACAUCUCA | | [947-965] | [947-965] |
| 276 | AUCUCAUGAUGAGAAAAAG | CUUUUUCUCAUCAUGAGAU | | [638-656] | [638-656] |
| 277 | GUAUCUUCAGUAAUUUACU | AGUAAAUUACUGAAGAUAC | | [1942-1960] | [1795-1813] |
| 278 | AUCCUUUCUCAGAAAAAUA | UAUUUUUCUGAGAAAGGAU | | [2124-2142] | [1977-1995] |
| 279 | CAUAUAACACCAACAGUGU | ACACUGUUGGUGUUAUAUG | | [2410-2428] | [2263-2281] |
| 280 | UAUAUGAUCUGCCUACAUA | UAUGUAGGCAGAUCAUAUA | | [522-540] | [522-540] |
| 281 | GUCUCGUCAGGUUUGAGCA | UGCUCAAACCUGACGAGAC | | [1963-1981] | [1816-1834] |
| 282 | ACAACAAUAUUCACCAAUU | AAUUGGUGAAUAUUGUUGU | | [1316-1334] | [1316-1334] |
| 283 | ACUGGUUUUCAGUUUUGUU | AACAAAACUGAAAACCAGU | | [229-247] | [229-247] |
| 284 | CAUUCAACUUCGUUACUUG | CAAGUAACGAAGUUGAAUG | | [2044-2062] | [1897-1915] |
| 285 | GGAGUGAUCAUGACAAUAG | CUAUUGUCAUGAUCACUCC | | [738-756] | [738-756] |
| 286 | GUUUGAGCAGUCACUUUAG | CUAAAGUGACUGCUCAAAC | | [1973-1991] | [1826-1844] |
| 287 | GUUGUUAUGCACCCAUCCA | UGGAUGGGUGCAUAACAAC | | [1104-1122] | [1104-1122] |
| 288 | CAAUCUCUCUCCUGGAAUG | CAUUCCAGGAGAGAGAUUG | | [1198-1216] | [1198-1216] |
| 289 | UUGUGAUUACCAAGGUUGU | ACAACCUUGGUAAUCACAA | | [1090-1108] | [1090-1108] |
| 290 | AAUCCGGAUUGCUGAAUCU | AGAUUCAGCAAUCCGGAUU | | [149-167] | [149-167] |
| 291 | ACACCAACAGUGUACAUGU | ACAUGUACACUGUUGGUGU | | [2416-2434] | [2269-2287] |
| 292 | GAGAGUCAUCCUCGCAAGU | ACUUGCGAGGAUGACUCUC | | [915-933] | [915-933] |
| 293 | GUUCUUAAAGCCCAUGGAU | AUCCAUGGGCUUUAAGAAC | | [2107-2125] | [1960-1978] |
| 294 | CAAAGUUUUGGAAUUGCAG | CUGCAAUUCCAAAACUUUG | | [1121-1139] | [1121-1139] |
| 295 | CUUCUCCAUUCAUAUCCGA | UCGGAUAUGAAUGGAGAAG | | [1256-1274] | [1256-1274] |
| 296 | UGCUGGUUGGAGCAGGAAU | AUUCCUGCUCCAACCAGCA | | [1402-1420] | [1402-1420] |
| 297 | AACAGCAAUUUAUUCUUAU | AUAAGAAUAAAUUGCUGUU | | [2470-2488] | [2323-2341] |
| 298 | CUACAAUAGCUACCUCCCA | UGGGAGGUAGCUAUUGUAG | | [1750-1768] | [1603-1621] |
| 299 | AAAUGCUGUCACCGAUAUU | AAUAUCGGUGACAGCAUUU | GP | [1830-1848] | [1683-1701] |
| 300 | CUUGCACCGGUCAUUCUUU | AAAGAAUGACCGGUGCAAG | | [1026-1044] | [1026-1044] |
| 301 | CCAGUGUGAACAGCAAUUU | AAAUUGCUGUUCACACUGG | | [2462-2480] | [2315-2333] |
| 302 | UAAUAAACAAAAUUACCGA | UCGGUAAUUUUGUUUAUUA | | [2379-2397] | [2232-2250] |
| 303 | UUUUGAGUUAUAGGAAUAA | UUAUUCCUAUAACUCAAAA | | [1896-1914] | [1749-1767] |
| 304 | UUGAAAUCCAUCUGGUACA | UGUACCAGAUGGAUUUCAA | | [1446-1464] | [1446-1464] |
| 305 | UGACAAUGGGAAACUGGGU | ACCCAGUUUCCCAUUGUCA | | [202-220] ORF | [202-220] ORF |
| 306 | CAGAAAAUCUCAUAAGGGC | GCCCUUAUGAGAUUUUCUG | | [1291-1309] | [1291-1309] |
| 307 | UCACGGCAUUGGUGGAAUU | AAUUCCACCAAUGCCGUGA | | [866-884] | [866-884] |
| 308 | CAACAAUAUUCACCAAUUC | GAAUUGGUGAAUAUUGUUG | | [1317-1335] | [1317-1335] |
| 309 | AAGGCUUGAUAGCAGAGGU | ACCUCUGCUAUCAAGCCUU | | [2177-2195] | [2030-2048] |
| 310 | AUUCAACUUCGUUACUUGA | UCAAGUAACGAAGUUGAAU | | [2045-2063] | [1898-1916] |
| 311 | ACUUCAACAAAGAAAAUUU | AAAUUUUCUUUGUUGAAGU | | [1879-1897] | [1732-1750] |
| 312 | AAAGUUUUGGAAUUGCAGA | UCUGCAAUUCCAAAACUUU | Rat | [1122-1140] | [1122-1140] |
| 313 | AGAGGAGAGCAUGAAUGAG | CUCAUUCAUGCUCUCCUCU | | [899-917] | [899-917] |
| 314 | GAAGAUUUCUAAGUAGGGU | ACCCUACUUAGAAAUCUUC | Rat | [2301-2319] | [2154-2172] |
| 315 | CUUUAUAUCUGUGAAAGGA | UCCUUUCACAGAUAUAAAG | | [1041-1059] | [1041-1059] |
| 316 | AUGGUCUUAUCCAGUGUGA | UCACACUGGAUAAGACCAU | | [2452-2470] | [2305-2323] |
| 317 | UAUUCUUAUUUUUGCUCAU | AUGAGCAAAAAUAAGAAUA | | [2480-2498] | [2333-2351] |
| 318 | GCAGUCACUUUAGGAUAAG | CUUAUCCUAAAGUGACUGC | | [1979-1997] | [1832-1850] |
| 319 | UUUGACUGCUAUAGCAGAA | UUCUGCUAUAGCAGUCAAA | | [573-591] | [573-591] |
| 320 | AUUCUUUUUUUGAUUGCAU | AUGCAAUCAAAAAAAGAAU | | [2028-2046] | [1881-1899] |
| 321 | GAAAGGUUCAAUUCUACUU | AAGUAGAAUUGAACCUUUC | | [1864-1882] | [1717-1735] |
| 322 | ACCAAUGUGGGACAAUGAG | CUCAUUGUCCCACAUUGGU | Rat, Ms | [1727-1745] | [1580-1598] |
| 323 | AGUUUUGGUUUGUAAUCUU | AAGAUUACAAACCAAAACU | | [2262-2280] | [2115-2133] |
| 324 | GAUAAGAAUGUGCCUCUCA | UGAGAGGCACAUUCUUAUC | | [1992-2010] | [1845-1863] |
| 325 | AAUAUGAGAAGGCCGACAA | UUGUCGGCCUUCUCAUAUU | | [301-319] | [301-319] |
| 326 | CAUACAGCUAUUCACAUCA | UGAUGUGAAUAGCUGUAUG | | [537-555] | [537-555] |
| 327 | AUCCCAGGUGAUUUUAUCA | UGAUAAAAUCACCUGGGAU | | [2221-2239] | [2074-2092] |
| 328 | AUAAGGACGGUAAUCUGCA | UGCAGAUUACCGUCCUUAU | | [1911-1929] | [1764-1782] |
| 329 | GAUGUUUUCCAGUAUGAAG | CUUCAUACUGGAAAACAUC | Ms | [1377-1395] | [1377-1395] |
| 330 | UAUGAUCUGCCUACAUACA | UGUAUGUAGGCAGAUCAUA | | [524-542] | [524-542] |
| 331 | CAAUUCCCAGGAUUGAAGU | ACUUCAAUCCUGGGAAUUG | | [1330-1348] | [1330-1348] |
| 332 | UUCUACUUCAACAAAGAAA | UUUCUUUGUUGAAGUAGAA | Rat, Ms | [1875-1893] | [1728-1746] |
| 333 | UGAUAUGGUCUUAUCCAGU | ACUGGAUAAGACCAUAUCA | | [2448-2466] | [2301-2319] |
| 334 | UCAUCAAAAAAUAAAGGAU | AUCCUUUAUUUUUUGAUGA | | [2495-2513] | [2348-2366] |
| 335 | UUUGGUGGUUCAGAGUUAU | AUAACUCUGAACCACCAAA | | [2195-2213] | [2048-2066] |
| 336 | ACCGAUAUUCCAGUCUGGA | UCCAGACUGGAAUAUCGGU | | [1840-1858] | [1693-1711] |
| 337 | UUGUAUCUUCAGUAAUUUA | UAAAUUACUGAAGAUACAA | | [1940-1958] | [1793-1811] |
| 338 | CUCAUUUUGCAGCCGCACA | UGUGCGGCUGCAAAAUGAG | | [455-473] | [455-473] |
| 339 | CUUGAGCUUCAGCAACUUA | UAAGUUGCUGAAGCUCAAG | | [2059-2077] | [1912-1930] |
| 340 | AUCAUUGCACACCUGUUUA | UAAACAGGUGUGCAAUGAU | | [552-570] | [552-570] |
| 341 | GUGAUUACCAAGGUUGUUA | UAACAACCUUGGUAAUCAC | | [1092-1110] | [1092-1110] |
| 342 | CUCAUCAAAAAAUAAAGGA | UCCUUUAUUUUUUGAUGAG | | [2494-2512] | [2347-2365] |
| 343 | AAGUUCUUAAAGUUCUGAA | UUCAGAACUUUAAGAACUU | | [2088-2106] | [1941-1959] |
| 344 | UUCUUUUUUUGAUUGCAUU | AAUGCAAUCAAAAAAAGAA | | [2029-2047] | [1882-1900] |
| 345 | AAGAAAAAUCCUUGGGUCA | UGACCCAAGGAUUUUUCUU | | [332-350] | [332-350] |
| 346 | GAAUGAGAGUCAUCCUCGC | GCGAGGAUGACUCUCAUUC | | [911-929] | [911-929] |
| 347 | AUUUUUGAGUUAUAGGAAU | AUUCCUAUAACUCAAAAAU | | [1894-1912] | [1747-1765] |
| 348 | AGUGUGCAGAGUCUUUUGA | UCAAAAGACUCUGCACACU | | [931-949] | [931-949] |
| 349 | UUCUCUCCAGCCUAUCUCA | UGAGAUAGGCUGGAGAGAA | Ms | [625-643] | [625-643] |
| 350 | CAGCAAUUUAUUCUUAUUU | AAAUAAGAAUAAAUUGCUG | | [2472-2490] | [2325-2343] |
| 351 | AGAAAGCAAUUGGAUCACA | UGUGAUCCAAUUGCUUUCU | | [477-495] | [477-495] |
| 352 | UUCUAAGUAGGGUGACUUU | AAAGUCACCCUACUUAGAA | | [2307-2325] | [2160-2178] |
| 353 | UUUACCGCUCCCAGCAGAA | UUCUGCUGGGAGCGGUAAA | | [1069-1087] | [1069-1087] |
| 354 | UUUAACUUUGACUGCUAUA | UAUAGCAGUCAAAGUUAAA | | [567-585] | [567-585] |
| 355 | UGUGAUUACCAAGGUUGUU | AACAACCUUGGUAAUCACA | | [1091-1109] | [1091-1109] |
| 356 | AGGUUUGGUGGUUCAGAGU | ACUCUGAACCACCAAACCU | | [2192-2210] | [2045-2063] |
| 357 | CAGAGGUUUGGUGGUUCAG | CUGAACCACCAAACCUCUG | | [2189-2207] | [2042-2060] |
| 358 | ACAAUGAGUUUUCUACAAU | AUUGUAGAAAACUCAUUGU | | [1738-1756] | [1591-1609] |
| 359 | GAUGUGGGAUGAUCGUGAC | GUCACGAUCAUCCCACAUC | | [950-968] | [950-968] |
| 360 | UUCACAUCUUAAAGGCUCA | UGAGCCUUUAAGAUGUGAA | | [83-101] | [83-101] |
| 361 | AAUUCCAGUGUGCAGACCA | UGGUCUGCACACUGGAAUU | | [1465-1483] | [1465-1483] |
| 362 | AAUAAAGGAUUUUCUUCUU | AAGAAGAAAAUCCUUUAUU | | [2504-2522] | [2357-2375] |
| 363 | UAACACCAACAGUGUACAU | AUGUACACUGUUGGUGUUA | | [2414-2432] | [2267-2285] |
| 364 | AUGAGAGUCAUCCUCGCAA | UUGCGAGGAUGACUCUCAU | | [913-931] | [913-931] |
| 365 | UAAUCCCAGGUGAUUUUAU | AUAAAAUCACCUGGGAUUA | | [2219-2237] | [2072-2090] |
| 366 | UAGCAAGGCUUGAUAGCAG | CUGCUAUCAAGCCUUGCUA | | [2173-2191] | [2026-2044] |
| 367 | GCAAUCUGCUGUCCUUCCU | AGGAAGGACAGCAGAUUGC | | [424-442] | [424-442] |
| 368 | CCACAGAAGAUUUCUAAGU | ACUUAGAAAUCUUCUGUGG | | [2296-2314] | [2149-2167] |
| 369 | AGAUUUCUAAGUAGGGUGA | UCACCCUACUUAGAAAUCU | Rat | [2303-2321] | [2156-2174] |
| 370 | GUGUACAUGUUUACUGUCA | UGACAGUAAACAUGUACAC | | [2425-2443] | [2278-2296] |
| 371 | AUUCCAGUGUGCAGACCAC | GUGGUCUGCACACUGGAAU | | [1466-1484] | [1466-1484] |
| 372 | UUUUUGAGUUAUAGGAAUA | UAUUCCUAUAACUCAAAAA | | [1895-1913] | [1748-1766] |
| 373 | ACUGUAGGCGCCCUAAGUU | AACUUAGGGCGCCUACAGU | | [973-991] | [973-991] |
| 374 | UUCUGAAGUUCUUAAAGUU | AACUUUAAGAACUUCAGAA | | [2083-2101] | [1936-1954] |
| 375 | GAUUGCAUUCAACUUCGUU | AACGAAGUUGAAUGCAAUC | | [2039-2057] | [1892-1910] |
| 376 | AAAGCAAUUGGAUCACAAC | GUUGUGAUCCAAUUGCUUU | | [479-497] | [479-497] |
| 377 | AUCCAGUGUGAACAGCAAU | AUUGCUGUUCACACUGGAU | | [2460-2478] | [2313-2331] |
| 378 | UUGAUAUGGUCUUAUCCAG | CUGGAUAAGACCAUAUCAA | | [2447-2465] | [2300-2318] |
| 379 | AGGCGCCCUAAGUUUGAAG | CUUCAAACUUAGGGCGCCU | | [978-996] | [978-996] |
| 380 | CAAAUUCCAGUGUGCAGAC | GUCUGCACACUGGAAUUUG | | [1463-1481] | [1463-1481] |
| 381 | CACUGACAUCGUGACAGGU | ACCUGUCACGAUGUCAGUG | | [1682-1700] | [1535-1553] |
| 382 | UUUUGCAGCCGCACACUGA | UCAGUGUGCGGCUGCAAAA | | [459-477] | [459-477] |
| 383 | UAAGAAUGUGCCUCUCAAG | CUUGAGAGGCACAUUCUUA | | [1994-2012] | [1847-1865] |
| 384 | GGUCUCACUGGAGUGAUCA | UGAUCACUCCAGUGAGACC | | [729-747] | [729-747] |
| 385 | UAUACUCACCACCUUUUUA | UAAAAAGGUGGUGAGUAUA | | [822-840] | [822-840] |
| 386 | GUGUGCAGAGUCUUUUGAG | CUCAAAAGACUCUGCACAC | | [932-950] | [932-950] |
| 387 | AUUGCAUUCAACUUCGUUA | UAACGAAGUUGAAUGCAAU | | [2040-2058] | [1893-1911] |
| 388 | AAUCUGCUGUCCUUCCUGA | UCAGGAAGGACAGCAGAUU | | [426-444] | [426-444] |
| 389 | UAUUCUUUUUUUGAUUGCA | UGCAAUCAAAAAAAGAAUA | | [2027-2045] | [1880-1898] |
| 390 | AAAAAUCCUUGGGUCAACA | UGUUGACCCAAGGAUUUUU | | [335-353] | [335-353] |
| 391 | GCUAUAGCAGAAGCCGACA | UGUCGGCUUCUGCUAUAGC | | [580-598] | [580-598] |
| 392 | AUACAGCUAUUCACAUCAU | AUGAUGUGAAUAGCUGUAU | | [538-556] | [538-556] |
| 393 | UUGCACACCUGUUUAACUU | AAGUUAAACAGGUGUGCAA | | [556-574] | [556-574] |
| 394 | GUAACUUCAGCUACUGAGU | ACUCAGUAGCUGAAGUUAC | | [771-789] | [771-789] |
| 395 | UAAAGUUCUGAAGUUCUUA | UAAGAACUUCAGAACUUUA | | [2095-2113] | [1948-1966] |
| 396 | UUAGGAUAAGAAUGUGCCU | AGGCACAUUCUUAUCCUAA | | [1988-2006] | [1841-1859] |
| 397 | UUUGAUAUGGUCUUAUCCA | UGGAUAAGACCAUAUCAAA | | [2446-2464] | [2299-2317] |
| 398 | CAUUCUCUCCAGCCUAUCU | AGAUAGGCUGGAGAGAAUG | | [623-641] | [623-641] |
| 399 | UCCAUUCUCUCCAGCCUAU | AUAGGCUGGAGAGAAUGGA | | [621-639] | [621-639] |
| 400 | ACCUCUCCAGAAUCCGGAU | AUCCGGAUUCUGGAGAGGU | | [139-157] | [139-157] |
| 401 | UAGCACAGUUCUGUCCAGA | UCUGGACAGAACUGUGCUA | | [6-24] | [6-24] |
| 402 | GAUGCCUUCCUGAAAUAUG | CAUAUUUCAGGAAGGCAUC | | [288-306] | [288-306] |
| 403 | UUUUGAUUGCAUUCAACUU | AAGUUGAAUGCAAUCAAAA | | [2035-2053] | [1888-1906] |
| 404 | GUUCAUCCGGAGGAGUUAU | AUAACUCCUCCGGAUGAAC | | [788-806] | [788-806] |
| 405 | UUGAGCAGUCACUUUAGGA | UCCUAAAGUGACUGCUCAA | | [1975-1993] | [1828-1846] |
| 406 | UGUUUUCCUGUUUGUGGAU | AUCCACAAACAGGAAAACA | | [272-290] | [272-290] |
| 407 | UUCCAGUGUGCAGACCACA | UGUGGUCUGCACACUGGAA | | [1467-1485] | [1467-1485] |
| 408 | CAUUGCACACCUGUUUAAC | GUUAAACAGGUGUGCAAUG | | [554-572] | [554-572] |
| 409 | AUGUUCCAUUCCUGAAGGA | UCCUUCAGGAAUGGAACAU | | [121-139] | [121-139] |
| 410 | CUUCCCUGUUGCCUAGAAG | CUUCUAGGCAACAGGGAAG | | [166-184] | [166-184] |
| 411 | UUGUCUCUUUGUAUCUUCA | UGAAGAUACAAAGAGACAA | | [1932-1950] | [1785-1803] |
| 412 | UGUCCAGAGAAGGAAGGCA | UGCCUUCCUUCUCUGGACA | | [17-35] | [17-35] |
| 413 | UGACUGUAGCAAGGCUUGA | UCAAGCCUUGCUACAGUCA | | [2167-2185] | [2020-2038] |
| 414 | UACAACUAAUCCCAGGUGA | UCACCUGGGAUUAGUUGUA | | [2213-2231] | [2066-2084] |
| 415 | GCAUUCAACUUCGUUACUU | AAGUAACGAAGUUGAAUGC | | [2043-2061] | [1896-1914] |
| 416 | UGAUUUUAUCAAUUCCAGU | ACUGGAAUUGAUAAAAUCA | | [2229-2247] | [2082-2100] |
| 417 | GGAGUAUGUGACAUUCACC | GGUGAAUGUCACAUACUCC | | [701-719] | [701-719] |
| 418 | UGAACAGCAAUUUAUUCUU | AAGAAUAAAUUGCUGUUCA | | [2468-2486] | [2321-2339] |
| 419 | CUUCCUGAAAUAUGAGAAG | CUUCUCAUAUUUCAGGAAG | | [293-311] | [293-311] |
| 420 | UACUUUGACCUCUGCUCCA | UGGAGCAGAGGUCAAAGUA | GP | [1226-1244] | [1226-1244] |
| 421 | AGUCCCGAAACACGACAGU | ACUGUCGUGUUUCGGGACU | | [682-700] | [682-700] |
| 422 | AAUGUGGGACAAUGAGUUU | AAACUCAUUGUCCCACAUU | Rat, Ms | [1730-1748] | [1583-1601] |
| 423 | GUUACCAUCUCCUGAGUUU | AAACUCAGGAGAUGGUAAC | | [2248-2266] | [2101-2119] |
| 424 | GGAAUAAGGACGGUAAUCU | AGAUUACCGUCCUUAUUCC | | [1908-1926] | [1761-1779] |
| 425 | GAAGGCCGACAAAUACUAC | GUAGUAUUUGUCGGCCUUC | | [308-326] | [308-326] |
| 426 | AUUGCACACCUGUUUAACU | AGUUAAACAGGUGUGCAAU | | [555-573] | [555-573] |
| 427 | AUAUGAUCUGCCUACAUAC | GUAUGUAGGCAGAUCAUAU | | [523-541] | [523-541] |
| 428 | UUCUUAUUUUUGCUCAUCA | UGAUGAGCAAAAAUAAGAA | | [2482-2500] | [2335-2353] |
| 429 | CAGAAGAUUUCUAAGUAGG | CCUACUUAGAAAUCUUCUG | Rat | [2299-2317] | [2152-2170] |
| 430 | GAGUUCAUCCGGAGGAGUU | AACUCCUCCGGAUGAACUC | | [786-804] | [786-804] |
| 431 | UCUCAGAAAAAUAACUGUA | UACAGUUAUUUUUCUGAGA | | [2130-2148] | [1983-2001] |
| 432 | AAGUGUGCAGAGUCUUUUG | CAAAAGACUCUGCACACUU | | [930-948] | [930-948] |
| 433 | AAGAGCCUGCGCAAAUGCU | AGCAUUUGCGCAGGCUCUU | | [1818-1836] | [1671-1689] |
| 434 | CUGAUAGCACAGUUCUGUC | GACAGAACUGUGCUAUCAG | | [2-20] | [2-20] |
| 435 | GAAGGACCUCUCCAGAAUC | GAUUCUGGAGAGGUCCUUC | | [134-152] | [134-152] |
| 436 | AUAGCACAGUUCUGUCCAG | CUGGACAGAACUGUGCUAU | | [5-23] | [5-23] |
| 437 | UUUGGUUAGGGCUGAAUGU | ACAUUCAGCCCUAACCAAA | | [256-274] | [256-274] |
| 438 | AGCACAGUUCUGUCCAGAG | CUCUGGACAGAACUGUGCU | | [7-25] | [7-25] |
| 439 | CCUUUCUCAGAAAAAUAAC | GUUAUUUUUCUGAGAAAGG | | [2126-2144] | [1979-1997] |
| 440 | GUCUGUAGUGGGAGUUUUC | GAAAACUCCCACUACAGAC | | [1775-1793] | [1628-1646] |
| 441 | CUUUUGAGAUGUGGGAUGA | UCAUCCCACAUCUCAAAAG | | [943-961] | [943-961] |
| 442 | AAGGAUUUUCUUCUUCACU | AGUGAAGAAGAAAAUCCUU | | [2508-2526] | [2361-2379] |
| 443 | CACAUCAUUGCACACCUGU | ACAGGUGUGCAAUGAUGUG | | [549-567] | [549-567] |
| 444 | GCUCAUCAAAAAAUAAAGG | CCUUUAUUUUUUGAUGAGC | | [2493-2511] | [2346-2364] |
| 445 | GUUUGUGGAUGCCUUCCUG | CAGGAAGGCAUCCACAAAC | | [281-299] | [281-299] |
| 446 | UUGCCUAGAAGGGCUCCAA | UUGGAGCCCUUCUAGGCAA | | [174-192] | [174-192] |
| 447 | AGUAUAUCUUUGUUAAUUG | CAAUUAACAAAGAUAUACU | | [1174-1192] | [1174-1192] |
| 448 | AUUUUAACAGCACGCUGAU | AUCAGCGUGCUGUUAAAAU | | [388-406] | [388-406] |
| 449 | UGCCUUCCUGAAAUAUGAG | CUCAUAUUUCAGGAAGGCA | | [290-308] | [290-308] |
| 450 | ACGGCAUUGGUGGAAUUGU | ACAAUUCCACCAAUGCCGU | | [868-886] | [868-886] |
| 451 | CAGCUAUUCACAUCAUUGC | GCAAUGAUGUGAAUAGCUG | | [541-559] | [541-559] |
| 452 | GUUGUUUGGUUAGGGCUGA | UCAGCCCUAACCAAACAAC | | [252-270] | [252-270] |
| 453 | AAUGAGUUUUCUACAAUAG | CUAUUGUAGAAAACUCAUU | | [1740-1758] | [1593-1611] |
| 454 | CAUUAAACUUUGACAAGGC | GCCUUGUCAAAGUUUAAUG | | [1663-1681] | [1516-1534] |
| 455 | GGUAAUCUGCAUUUUGUCU | AGACAAAAUGCAGAUUACC | | [1919-1937] | [1772-1790] |
| 456 | CUGUAGCAAGGCUUGAUAG | CUAUCAAGCCUUGCUACAG | | [2170-2188] | [2023-2041] |
| 457 | UAUGUGACAUUCACCAGCA | UGCUGGUGAAUGUCACAUA | GP | [705-723] | [705-723] |
| 458 | UUUUGAGAUGUGGGAUGAU | AUCAUCCCACAUCUCAAAA | | [944-962] | [944-962] |
| 459 | AAUCCCAGGUGAUUUUAUC | GAUAAAAUCACCUGGGAUU | | [2220-2238] | [2073-2091] |
| 460 | UACAUACAGCUAUUCACAU | AUGUGAAUAGCUGUAUGUA | | [535-553] | [535-553] |
| 461 | CGGAUUGCUGAAUCUUCCC | GGGAAGAUUCAGCAAUCCG | | [153-171] | [153-171] |
| 462 | AAUGAGAGUCAUCCUCGCA | UGCGAGGAUGACUCUCAUU | | [912-930] | [912-930] |
| 463 | UUUUUUGAUUGCAUUCAAC | GUUGAAUGCAAUCAAAAAA | | [2033-2051] | [1886-1904] |
| 464 | AGAAGAUUUCUAAGUAGGG | CCCUACUUAGAAAUCUUCU | Rat | [2300-2318] | [2153-2171] |
| 465 | UAUGAGAAGGCCGACAAAU | AUUUGUCGGCCUUCUCAUA | | [303-321] | [303-321] |
| 466 | UUAAAGUUCUGAAGUUCUU | AAGAACUUCAGAACUUUAA | | [2094-2112] | [1947-1965] |
| 467 | GACAUCGUGACAGGUCUGA | UCAGACCUGUCACGAUGUC | | [1686-1704] | [1539-1557] |
| 468 | GAAAACCUCCUUUGGGAGA | UCUCCCAAAGGAGGUUUUC | Rat | [1709-1727] | [1562-1580] |
| 469 | UUUGCUUCUAUCUUGAAAU | AUUUCAAGAUAGAAGCAAA | | [1434-1452] | [1434-1452] |
| 470 | UUUACUGUCACUUUUGAUA | UAUCAAAAGUGACAGUAAA | | [2434-2452] | [2287-2305] |
| 471 | GCACACCUGUUUAACUUUG | CAAAGUUAAACAGGUGUGC | Rb | [558-576] | [558-576] |
| 472 | CAAUCUGCUGUCCUUCCUG | CAGGAAGGACAGCAGAUUG | | [425-443] | [425-443] |
| 473 | CAUUUUGCAGCCGCACACU | AGUGUGCGGCUGCAAAAUG | | [457-475] | [457-475] |
| 474 | AUUGCUGAAUCUUCCCUGU | ACAGGGAAGAUUCAGCAAU | | [156-174] | [156-174] |
| 475 | UUGGUCUCGUCAGGUUUGA | UCAAACCUGACGAGACCAA | | [1960-1978] | [1813-1831] |
| 476 | UUCCAUUCCUGAAGGACCU | AGGUCCUUCAGGAAUGGAA | | [124-142] | [124-142] |
| 477 | GAUUGAAGUGGAUGGUCCC | GGGACCAUCCACUUCAAUC | | [1340-1358] | [1340-1358] |
| 478 | AUCUUGAAAUCCAUCUGGU | ACCAGAUGGAUUUCAAGAU | GP | [1443-1461] | [1443-1461] |
| 479 | CCUUUGGGAGACCAAUGUG | CACAUUGGUCUCCCAAAGG | Rat, Ms | [1717-1735] | [1570-1588] |
| 480 | GUUUUGGUUUGUAAUCUUU | AAAGAUUACAAACCAAAAC | | [2263-2281] | [2116-2134] |
| 481 | GUUAACCACUGGUUUUCAG | CUGAAAACCAGUGGUUAAC | | [222-240] | [222-240] |
| 482 | CUGUCACCGAUAUUCCAGU | ACUGGAAUAUCGGUGACAG | GP | [1835-1853] | [1688-1706] |
| 483 | AACUAAUCCCAGGUGAUUU | AAAUCACCUGGGAUUAGUU | | [2216-2234] | [2069-2087] |
| 484 | AUUCCAGUCUGGAUCCUAG | CUAGGAUCCAGACUGGAAU | | [1846-1864] | [1699-1717] |
| 485 | GAUGAUCGUGACUCCCACU | AGUGGGAGUCACGAUCAUC | | [957-975] | [957-975] |
| 486 | CUCCUUUGGGAGACCAAUG | CAUUGGUCUCCCAAAGGAG | Rat | [1715-1733] | [1568-1586] |
| 487 | UAGUGGGAGUUUUCUUAUG | CAUAAGAAAACUCCCACUA | | [1780-1798] | [1633-1651] |
| 488 | AAUUUUAACAGCACGCUGA | UCAGCGUGCUGUUAAAAUU | | [387-405] | [387-405] |
| 489 | UGUUUUUCACAUCUUAAAG | CUUUAAGAUGUGAAAAACA | | [78-96] | [78-96] |
| 490 | CUUUCUCAGAAAAAUAACU | AGUUAUUUUUCUGAGAAAG | | [2127-2145] | [1980-1998] |
| 491 | AUCUGGUACAAAUUCCAGU | ACUGGAAUUUGUACCAGAU | | [1455-1473] | [1455-1473] |
| 492 | GACAUUCACCAGCAUUGCU | AGCAAUGCUGGUGAAUGUC | GP | [710-728] | [710-728] |
| 493 | AUUUUGAAGUCUUCUGGUA | UACCAGAAGACUUCAAAAU | | [805-823] | [805-823] |
| 494 | UAAUCUUUUGUCCCUCCCA | UGGGAGGGACAAAAGAUUA | | [2274-2292] | [2127-2145] |
| 495 | CUUGAUUCUCAUGGUAACU | AGUUACCAUGAGAAUCAAG | Rb, GP | [758-776] | [758-776] |
| 496 | AGUGAGGAUGUUUUCCAGU | ACUGGAAAACAUCCUCACU | Ms | [1371-1389] | [1371-1389] |
| 497 | GGUUGUUAUGCACCCAUCC | GGAUGGGUGCAUAACAACC | | [1103-1121] | [1103-1121] |
| 498 | ACUGGGUGGUUAACCACUG | CAGUGGUUAACCACCCAGU | | [214-232] | [214-232] |
| 499 | UCACAACCUCACCUUCCAC | GUGGAAGGUGAGGUUGUGA | | [491-509] | [491-509] |
| 500 | GAGUCUUUUGAGAUGUGGG | CCCACAUCUCAAAAGACUC | | [939-957] | [939-957] |

TABLE A5
CYBB 19-mer oligomers NOX2 (NADPH oxidase 2; CYBB)

| | | | | |
|---|---|---|---|---|
| | | | | Human-6996020 |
| No. | Sense siRNA | AntiSense siRNA | Other Sp | ORF: 15-1727 |

| | | | | |
|---|---|---|---|---|
| 1 | GGGUUUUCUUUUUGUUCUU | AAGAACAAAAAGAAAACCC | | [3055-3073] |
| 2 | CCAGAUCAUUAGGACAUAA | UUAUGUCCUAAUGAUCUGG | | [2240-2258] |
| 3 | GCCUCAUAUUAAUUAUCAC | GUGAUAAUUAAUAUGAGGC | | [568-586] |
| 4 | GCAUAAUUAAAACCAGCUU | AAGCUGGUUUUAAUUAUGC | | [3800-3818] |
| 5 | GCAGGGUUUUCUUUUUGUU | AACAAAAAGAAAACCCUGC | | [3052-3070] |
| 6 | CCAACUGGGAUAAUGAAUU | AAUUCAUUAUCCCAGUUGG | | [1555-1573] |
| 7 | GGGUCUCAUAUUGGUCAUU | AAUGACCAAUAUGAGACCC | | [3291-3309] |
| 8 | GGAUAAUGAAUUCAAGACA | UGUCUUGAAUUCAUUAUCC | | [1562-1580] |
| 9 | GCCUGAAUUUCAACUGCAU | AUGCAGUUGAAAUUCAGGC | Rat | [190-208] |
| 10 | CGCUGUGCCUCAUAUUAAU | AUUAAUAUGAGGCACAGCG | | [562-580] |
| 11 | CUAACCUAUGUGCAUAAUU | AAUUAUGCACAUAGGUUAG | | [3789-3807] |
| 12 | CAAUUCAUCUAUUCAACAG | CUGUUGAAUAGAUGAAUUG | | [3653-3671] |
| 13 | GUGUGACUAAUGGUUUAUU | AAUAAACCAUUAGUCACAC | | [2892-2910] |
| 14 | ACCACACAAUGCCAAGAUA | UAUCUUGGCAUUGUGUGGU | | [2473-2491] |
| 15 | GCCUCAGAAUCCUCAAAAU | AUUUUGAGGAUUCUGAGGC | | [2118-2136] |
| 16 | GAAACCCUGAGUAAACAAA | UUUGUUUACUCAGGGUUUC | | [1644-1662] |
| 17 | CCAACUAAGUUAUGAAAGU | ACUUUCAUAACUUAGUUGG | | [3866-3884] |
| 18 | CCAUUGCACAUCUAUUUAA | UUAAAUAGAUGUGCAAUGG | | [361-379] |
| 19 | CAGGUAUCAAUUCAUCUAU | AUAGAUGAAUUGAUACCUG | | [3646-3664] |
| 20 | CGAAUAUAGCCUUUCUGAA | UUCAGAAAGGCUAUAUUCG | | [3568-3586] |
| 21 | GGCCUGCUGUGCGAAUAUA | UAUAUUCGCACAGCAGGCC | | [3557-3575] |
| 22 | AGGGUUUUCUUUUUGUUCU | AGAACAAAAAGAAAACCCU | | [3054-3072] |
| 23 | CCCUUAUGAAUAUUGAACU | AGUUCAAUAUUCAUAAGGG | | [2775-2793] |
| 24 | CUAAUUUCCUGCCCAAAGU | ACUUUGGGCAGGAAAUUAG | | [2740-2758] |
| 25 | CAACACCCUAAUACCAGAA | UUCUGGUAUUAGGGUGUUG | Rb | [1590-1608] |
| 26 | GGGAUAAUGAAUUCAAGAC | GUCUUGAAUUCAUUAUCCC | | [1561-1579] |
| 27 | ACUGGGAUAAUGAAUUCAA | UUGAAUUCAUUAUCCCAGU | | [1558-1576] |
| 28 | CCAUCCGGAGGUCUUACUU | AAGUAAGACCUCCGGAUGG | | [601-619] |
| 29 | GUGCCUCAUAUUAAUUAUC | GAUAAUUAAUAUGAGGCAC | | [566-584] |
| 30 | CUGUGCCUCAUAUUAAUUA | UAAUUAAUAUGAGGCACAG | | [564-582] |
| 31 | CCGAGUCAAUAAUUCUGAU | AUCAGAAUUAUUGACUCGG | | [401-419] |
| 32 | GGCUUUGUAUGUGAAUAAU | AUUAUUCACAUACAAAGCC | | [4171-4189] |
| 33 | UCUAACCUAUGUGCAUAAU | AUUAUGCACAUAGGUUAGA | | [3788-3806] |
| 34 | UCAGGUAUCAAUUCAUCUA | UAGAUGAAUUGAUACCUGA | | [3645-3663] |
| 35 | CCCAGAUUUCUUAAAGUUU | AAACUUUAAGAAAUCUGGG | | [3316-3334] |
| 36 | GAGCCACAAAUGUUUAGAA | UUCUAAACAUUUGUGGCUC | | [3128-3146] |
| 37 | AGAGCAGGGUUUUCUUUUU | AAAAAGAAAACCCUGCUCU | | [3049-3067] |
| 38 | UCAUCAUCAUCAUCCUAAA | UUUAGGAUGAUGAUGAUGA | | [2920-2938] |
| 39 | CUGUGUGACUAAUGGUUUA | UAAACCAUUAGUCACACAG | | [2890-2908] |
| 40 | CUGGGAUAAUGAAUUCAAG | CUUGAAUUCAUUAUCCCAG | | [1559-1577] |
| 41 | UCGAGCUACAGAUGAAGAA | UUCUUCAUCUGUAGCUCGA | | [937-955] |
| 42 | GGUCUUACUUUGAAGUCUU | AAGACUUCAAAGUAAGACC | | [610-628] |
| 43 | GGGAAUUCUUAAAACUGUG | CACAGUUUUAAGAAUUCCC | | [4221-4239] |
| 44 | GAGUGCUUGUCAUUAUAAA | UUUAUAAUGACAAGCACUC | | [3935-3953] |
| 45 | GGGACUAGGAUGAACUAAA | UUUAGUUCAUCCUAGUCCC | | [3453-3471] |
| 46 | GGAGAAAAGAGAAUGGGAG | CUCCCAUUCUCUUUUCUCC | | [3228-3246] |
| 47 | GGAGCCACAAAUGUUUAGA | UCUAAACAUUUGUGGCUCC | | [3127-3145] |
| 48 | CCCUUAUUUUCCGUAAAUA | UAUUUACGGAAAAUAAGGG | | [2850-2868] |
| 49 | GCCCUUAUGAAUAUUGAAC | GUUCAAUAUUCAUAAGGGC | | [2774-2792] |
| 50 | AACCACACAAUGCCAAGAU | AUCUUGGCAUUGUGUGGUU | | [2472-2490] |
| 51 | UGAAUUUAGAACCACACAA | UUGUGUGGUUCUAAAUUCA | | [2463-2481] |
| 52 | ACAUUUAUGUGGAGCUCUA | UAGAGCUCCACAUAAAUGU | | [1892-1910] |
| 53 | UGAAACCCUGAGUAAACAA | UUGUUUACUCAGGGUUUCA | | [1643-1661] |
| 54 | CUGAAACCCUGAGUAAACA | UGUUUACUCAGGGUUUCAG | | [1642-1660] |
| 55 | GGCUGUGCAUAAUAUAACA | UGUUAUAUUAUGCACAGCC | | [722-740] |
| 56 | GUCUUACUUUGAAGUCUUU | AAAGACUUCAAAGUAAGAC | | [611-629] |
| 57 | UUAAAACUGUGCUCAACUA | UAGUUGAGCACAGUUUUAA | | [4229-4247] |
| 58 | AGGCUUUGUAUGUGAAUAA | UUAUUCACAUACAAAGCCU | | [4170-4188] |
| 59 | GCAUUUAUUAACAGGUACU | AGUACCUGUUAAUAAAUGC | | [4053-4071] |
| 60 | UGUGCAUAAUUAAAACCAG | CUGGUUUUAAUUAUGCACA | | [3797-3815] |
| 61 | UUCUAACCUAUGUGCAUAA | UUAUGCACAUAGGUUAGAA | | [3787-3805] |
| 62 | UCAAUUCUUUACACCAAAG | CUUUGGUGUAAAGAAUUGA | | [3716-3734] |
| 63 | GAAUAUAGCCUUUCUGAAA | UUUCAGAAAGGCUAUAUUC | | [3569-3587] |
| 64 | GGUCUCAUAUUGGUCAUUC | GAAUGACCAAUAUGAGACC | | [3292-3310] |
| 65 | CCAAGAGCAGGGUUUUCUU | AAGAAAACCCUGCUCUUGG | | [3046-3064] |
| 66 | CCACACAAUGCCAAGAUAG | CUAUCUUGGCAUUGUGUGG | | [2474-2492] |
| 67 | UGGAUUGAUUGGAGUUAAU | AUUAACUCCAAUCAAUCCA | | [2373-2391] |
| 68 | CCAGGUUUGAUACUCUUUC | GAAAGAGUAUCAAACCUGG | | [2085-2103] |
| 69 | CUCCAGGUUUGAUACUCUU | AAGAGUAUCAAACCUGGAG | | [2083-2101] |
| 70 | UCAAAAGGUUCAGUAACUU | AAGUUACUGAACCUUUUGA | | [2023-2041] |
| 71 | GGAUCAAAAGGUUCAGUAA | UUACUGAACCUUUUGAUCC | | [2020-2038] |
| 72 | GCAUUUCAUUUUCAACAAG | CUUGUUGAAAAUGAAAUGC | | [1697-1715] |
| 73 | GAAUUCAAGACAAUUGCAA | UUGCAAUUGUCUUGAAUUC | | [1569-1587] |
| 74 | GGAUGAGUCUCAGGCCAAU | AUUGGCCUGAGACUCAUCC | | [1463-1481] |
| 75 | GCCAGAUGCAGGAAAGGAA | UUCCUUUCCUGCAUCUGGC | | [1402-1420] |
| 76 | GAGCUACAGAUGAAGAAGA | UCUUCUUCAUCUGUAGCUC | | [939-957] |
| 77 | GCGGUUUUGGCGAUCUCAA | UUGAGAUCGCCAAAACCGC | | [872-890] |
| 78 | GGAGGUCUUACUUUGAAGU | ACUUCAAAGUAAGACCUCC | Rat, Rb | [607-625] |
| 79 | CGGAGGUCUUACUUUGAAG | CUUCAAAGUAAGACCUCCG | Rat, Rb | [606-624] |
| 80 | AUCACUUCCUCCACCAAAA | UUUUGGUGGAGGAAGUGAU | | [582-600] |
| 81 | GCAGGCUUUGUAUGUGAAU | AUUCACAUACAAAGCCUGC | | [4168-4186] |
| 82 | AGAGUGCUUGUCAUUAUAA | UUAUAAUGACAAGCACUCU | | [3934-3952] |
| 83 | CUAUCUUCAAAACCAACUA | UAGUUGGUUUUGAAGAUAG | | [3854-3872] |
| 84 | GCCCUUUCUAACCUAUGUG | CACAUAGGUUAGAAAGGGC | | [3782-3800] |
| 85 | ACCUCAGGUAUCAAUUCAU | AUGAAUUGAUACCUGAGGU | | [3642-3660] |
| 86 | AGCAGGGUUUUCUUUUUGU | ACAAAAAGAAAACCCUGCU | | [3051-3069] |
| 87 | AUAAAAUGGUGGCAUGGAU | AUCCAUGCCACCAUUUUAU | | [316-334] |
| 88 | UGUGUGACUAAUGGUUUAU | AUAAACCAUUAGUCACACA | | [2891-2909] |
| 89 | AGCUAGCCCUUAUGAAUAU | AUAUUCAUAAGGGCUAGCU | | [2769-2787] |
| 90 | GACUAAUUUCCUGCCCAAA | UUUGGGCAGGAAAUUAGUC | | [2738-2756] |
| 91 | GCAUGAAAAAAGAGGGUUG | CAACCCUCUUUUUUCAUGC | | [2646-2664] |
| 92 | ACAAUGCCAAGAUAGAAUU | AAUUCUAUCUUGGCAUUGU | | [2478-2496] |
| 93 | CACAAUGCCAAGAUAGAAU | AUUCUAUCUUGGCAUUGUG | | [2477-2495] |
| 94 | GAACCACACAAUGCCAAGA | UCUUGGCAUUGUGUGGUUC | | [2471-2489] |
| 95 | ACAUAAUACAUGUUGAGAG | CUCUCAACAUGUAUUAUGU | | [2253-2271] |
| 96 | GGAGUAGCUAUAUAUUUCU | AGAAAUAUAUAGCUACUCC | | [2173-2191] |
| 97 | UGCCUCAGAAUCCUCAAAA | UUUUGAGGAUUCUGAGGCA | | [2117-2135] |
| 98 | GGAGCUCUAUGGUUUUGAG | CUCAAAACCAUAGAGCUCC | | [1902-1920] |
| 99 | GCUGAAACCCUGAGUAAAC | GUUUACUCAGGGUUUCAGC | | [1641-1659] |
| 100 | UCAACACCCUAAUACCAGA | UCUGGUAUUAGGGUGUUGA | Rb | [1589-1607] |
| 101 | CCACCUAAGUUCUUUUACA | UGUAAAAGAACUUAGGUGG | | [120-138] |
| 102 | CGAGCUACAGAUGAAGAAG | CUUCUUCAUCUGUAGCUCG | | [938-956] |
| 103 | GCUGUGCCUCAUAUUAAUU | AAUUAAUAUGAGGCACAGC | | [563-581] |
| 104 | GGCAAAAUGAAAGUUAUCU | AGAUAACUUUCAUUUUGCC | | [454-472] |
| 105 | CAGGCAAAAUGAAAGUUAU | AUAACUUUCAUUUUGCCUG | | [452-470] |
| 106 | ACAGGCAAAAUGAAAGUUA | UAACUUUCAUUUUGCCUGU | | [451-469] |
| 107 | GUCAAUAAUUCUGAUCCUU | AAGGAUCAGAAUUAUUGAC | | [405-423] |
| 108 | CCCGAGUCAAUAAUUCUGA | UCAGAAUUAUUGACUCGGG | | [400-418] |
| 109 | CUGUGCUCAACUAUUAAAA | UUUUAAUAGUUGAGCACAG | | [4235-4253] |
| 110 | GAAUUCUUAAAACUGUGCU | AGCACAGUUUUAAGAAUUC | | [4223-4241] |
| 111 | GGAAUUCUUAAAACUGUGC | GCACAGUUUUAAGAAUUCC | | [4222-4240] |
| 112 | UCUUAGUUCUUCUGCUUUU | AAAAGCAGAAGAACUAAGA | | [4120-4138] |
| 113 | GUGCUUGUCAUUAUAAAAG | CUUUUAUAAUGACAAGCAC | | [3937-3955] |
| 114 | GUUAUAAGGAGUCUGAGAA | UUCUCAGACUCCUUAUAAC | | [3758-3776] |
| 115 | GCUCUGUUUAUUGUUUCAA | UUGAAACAAUAAACAGAGC | | [3701-3719] |
| 116 | CCUCAGGUAUCAAUUCAUC | GAUGAAUUGAUACCUGAGG | | [3643-3661] |
| 117 | GCCUUUCUGAAAUGUACCA | UGGUACAUUUCAGAAAGGC | | [3576-3594] |
| 118 | GGAUGAACUAAAUAAGAAC | GUUCUUAUUUAGUUCAUCC | | [3460-3478] |
| 119 | CACAAAUGUUUAGAACUCU | AGAGUUCUAAACAUUUGUG | | [3132-3150] |
| 120 | GCCACAAAUGUUUAGAACU | AGUUCUAAACAUUUGUGGC | | [3130-3148] |
| 121 | AGCCACAAAUGUUUAGAAC | GUUCUAAACAUUUGUGGCU | | [3129-3147] |
| 122 | GAGCAGGGUUUUCUUUUUG | CAAAAAGAAAACCCUGCUC | | [3050-3068] |
| 123 | CUCAAUAGUAUGUUCUGAA | UUCAGAACAUACUAUUGAG | | [2986-3004] |
| 124 | ACAACCCAGAAACAAAAAU | AUUUUUGUUUCUGGGUUGU | | [2943-2961] |
| 125 | GGAAUUGUGACAAAUAUGU | ACAUAUUUGUCACAAUUCC | | [2796-2814] |
| 126 | GCUAGCCCUUAUGAAUAUU | AAUAUUCAUAAGGGCUAGC | | [2770-2788] |
| 127 | CUCCUUGUGCUAUAAAAUA | UAUUUUAUAGCACAAGGAG | | [2713-2731] |
| 128 | GCUCCUUGUGCUAUAAAAU | AUUUUAUAGCACAAGGAGC | | [2712-2730] |
| 129 | GCCAUCAUUAUUAUCAUAC | GUAUGAUAAUAAUGAUGGC | | [2208-2226] |
| 130 | CCAUCUUACUCCAGGUUUG | CAAACCUGGAGUAAGAUGG | | [2075-2093] |
| 131 | AGGAUCAAAAGGUUCAGUA | UACUGAACCUUUUGAUCCU | | [2019-2037] |
| 132 | GUCGAAAUCUGCUGUCCUU | AAGGACAGCAGAUUUCGAC | | [229-247] |
| 133 | GGGAAAGGAUCAAAAGGUU | AACCUUUUGAUCCUUUCCC | | [2014-2032] |
| 134 | GGAAAAGAUUCUUGGACUC | GAGUCCAAGAAUCUUUUCC | | [1979-1997] |
| 135 | GGGAAAAGAUUCUUGGACU | AGUCCAAGAAUCUUUUCCC | | [1978-1996] |
| 136 | CCUGAGUAAACAAAGCAUC | GAUGCUUUGUUUACUCAGG | | [1649-1667] |
| 137 | UCAGUCUGGUACAAAUAUU | AAUAUUUGUACCAGACUGA | Rb | [1278-1296] |
| 138 | UGGGACAAUACAUUUUUGU | ACAAAAAUGUAUUGUCCCA | | [976-994] |
| 139 | GUGGGACAAUACAUUUUUG | CAAAAAUGUAUUGUCCCAC | | [975-993] |
| 140 | AGUGGGACAAUACAUUUUU | AAAAAUGUAUUGUCCCACU | | [974-992] |
| 141 | CCGGGUUUAUGAUAUUCCA | UGGAAUAUCAUAAACCCGG | | [104-122] |
| 142 | GGAAAAAUAAAGGAAUGCC | GGCAUUCCUUUAUUUUUCC | | [768-786] |
| 143 | GGCUCUCCAUUUUUGUCAU | AUGACAAAAAUGGAGAGCC | | [40-58] |
| 144 | ACGCUGUGCCUCAUAUUAA | UUAAUAUGAGGCACAGCGU | | [561-579] |
| 145 | CGAAAGAGAAUAAAGAACC | GGUUCUUUAUUCUCUUUCG | | [483-501] |
| 146 | GAAUGCCCGAGUCAAUAAU | AUUAUUGACUCGGGCAUUC | | [395-413] |
| 147 | CAGGCUUUGUAUGUGAAUA | UAUUCACAUACAAAGCCUG | | [4169-4187] |
| 148 | GGCUCUGUUUAUUGUUUCA | UGAAACAAUAAACAGAGCC | | [3700-3718] |
| 149 | GUUGUUCUUUGUCAUACUA | UAGUAUGACAAAGAACAAC | | [3482-3500] |
| 150 | UCAGUUGUUCUUUGUCAUA | UAUGACAAAGAACAACUGA | | [3479-3497] |
| 151 | CUCAGUUGUUCUUUGUCAU | AUGACAAAGAACAACUGAG | | [3478-3496] |
| 152 | GAAAAGAGAAUGGGAGAGU | ACUCUCCCAUUCUCUUUUC | | [3231-3249] |
| 153 | GAAAAGGAAAUAAGGAGAA | UUCUCCUUAUUUCCUUUUC | | [3215-3233] |
| 154 | CAAAUGUUUAGAACUCUUC | GAAGAGUUCUAAACAUUUG | | [3134-3152] |
| 155 | GAGUCUCUAAAUCACUGUU | AACAGUGAUUUAGAGACUC | | [3020-3038] |
| 156 | GUAUCUGAUAUGGUCAUUU | AAAUGACCAUAUCAGAUAC | | [2813-2831] |
| 157 | AGCAUGAAAAAAGAGGGUU | AACCCUCUUUUUUCAUGCU | | [2645-2663] |
| 158 | ACACAAUGCCAAGAUAGAA | UUCUAUCUUGGCAUUGUGU | | [2476-2494] |
| 159 | CUACAGAAGAAUAUUGGAU | AUCCAAUAUUCUUCUGUAG | | [2359-2377] |
| 160 | ACCAAGGAGUAGCUAUAUA | UAUAUAGCUACUCCUUGGU | | [2168-2186] |
| 161 | CUGCCUCAGAAUCCUCAAA | UUUGAGGAUUCUGAGGCAG | | [2116-2134] |
| 162 | CCACAAUACUGAGCUGCCU | AGGCAGCUCAGUAUUGUGG | | [2103-2121] |
| 163 | UUGAUACUCUUUCCACAAU | AUUGUGGAAAGAGUAUCAA | | [2091-2109] |
| 164 | GUAAUGGUUUUCCCUUAAA | UUUAAGGGAAAACCAUUAC | | [1840-1858] |
| 165 | CCAUGAGGAAAUAAAUGUG | CACAUUUAUUUCCUCAUGG | | [1738-1756] |
| 166 | GGAGUGCAUUUCAUUUUCA | UGAAAAUGAAAUGCACUCC | | [1692-1710] |
| 167 | GUAAACAAAGCAUCUCCAA | UUGGAGAUGCUUUGUUUAC | | [1654-1672] |
| 168 | GGAGAAAGAUGUGAUCACA | UGUGAUCACAUCUUUCUCC | Rb, Ms | [1505-1523] |
| 169 | CCAUUCUCAAGUCAGUCUG | CAGACUGACUUGAGAAUGG | | [1267-1285] |
| 170 | UCAAGAUGCGUGGAAACUA | UAGUUUCCACGCAUCUUGA | | [1142-1160] |
| 171 | AGUUUCAAGAUGCGUGGAA | UUCCACGCAUCUUGAAACU | | [1138-1156] |
| 172 | GGAGUUUCAAGAUGCGUGG | CCACGCAUCUUGAAACUCC | | [1136-1154] |
| 173 | AGACUUCUUUAGUAUCCAU | AUGGAUACUAAAGAAGUCU | | [1058-1076] |
| 174 | GAGGAAGACUUCUUUAGUA | UACUAAAGAAGUCUUCCUC | | [1053-1071] |
| 175 | AAACCAUCGAGCUACAGAU | AUCUGUAGCUCGAUGGUUU | | [931-949] |
| 176 | AGAGGUUGGUGCGGUUUUG | CAAAACCGCACCAACCUCU | | [862-880] |
| 177 | GAGAGGUUGGUGCGGUUUU | AAAACCGCACCAACCUCUC | | [861-879] |
| 178 | GCUCUCCAUUUUUGUCAUU | AAUGACAAAAAUGGAGAGC | | [41-59] |
| 179 | GUGAACAAAAAAUCUCAGA | UCUGAGAUUUUUUGUUCAC | | [745-763] |
| 180 | CACGCUGUGCCUCAUAUUA | UAAUAUGAGGCACAGCGUG | | [560-578] |
| 181 | GCCCGAGUCAAUAAUUCUG | CAGAAUUAUUGACUCGGGC | | [399-417] |
| 182 | GUGCUCAACUAUUAAAAUG | CAUUUUAAUAGUUGAGCAC | | [4237-4255] |
| 183 | ACUGUGCUCAACUAUUAAA | UUUAAUAGUUGAGCACAGU | | [4234-4252] |
| 184 | UGCAGGCUUUGUAUGUGAA | UUCACAUACAAAGCCUGCA | | [4167-4185] |
| 185 | GGUUUUUCUUAGUUCUUCU | AGAAGAACUAAGAAAAACC | | [4114-4132] |
| 186 | AGGUUUUUCUUAGUUCUUC | GAAGAACUAAGAAAAACCU | | [4113-4131] |
| 187 | GAAGGUUUUUCUUAGUUCU | AGAACUAAGAAAAACCUUC | | [4111-4129] |
| 188 | GAAUGAUGAAGCAUUGUUU | AAACAAUGCUUCAUCAUUC | | [4076-4094] |
| 189 | AGAAUGAUGAAGCAUUGUU | AACAAUGCUUCAUCAUUCU | | [4075-4093] |
| 190 | CUAAGAAUGAUGAAGCAUU | AAUGCUUCAUCAUUCUUAG | | [4072-4090] |
| 191 | AUAUAAGAGUGCUUGUCAU | AUGACAAGCACUCUUAUAU | | [3929-3947] |
| 192 | GAAUAUAAGAGUGCUUGUC | GACAAGCACUCUUAUAUUC | | [3927-3945] |
| 193 | CCCUUUCUAACCUAUGUGC | GCACAUAGGUUAGAAAGGG | | [3783-3801] |
| 194 | AUAUAGCCUUUCUGAAAUG | CAUUUCAGAAAGGCUAUAU | | [3571-3589] |
| 195 | AGGCCUGCUGUGCGAAUAU | AUAUUCGCACAGCAGGCCU | | [3556-3574] |
| 196 | CUAGGAUGAACUAAAUAAG | CUUAUUUAGUUCAUCCUAG | | [3457-3475] |
| 197 | GGAUUAUUCAAGGGACUAG | CUAGUCCCUUGAAUAAUCC | | [3442-3460] |
| 198 | GGAGAGUGAGAGAAAAUAA | UUAUUUUCUCUCACUCUCC | | [3243-3261] |
| 199 | GGGAGAGUGAGAGAAAAUA | UAUUUUCUCUCACUCUCCC | | [3242-3260] |
| 200 | AGAAAAGAGAAUGGGAGAG | CUCUCCCAUUCUCUUUUCU | | [3230-3248] |
| 201 | GGAAAUAAGGAGAAAAGAG | CUCUUUUCUCCUUAUUUCC | | [3220-3238] |
| 202 | GGAAAAGGAAAUAAGGAGA | UCUCCUUAUUUCCUUUUCC | | [3214-3232] |
| 203 | GAACUCUUCAACUUCGGUA | UACCGAAGUUGAAGAGUUC | | [3144-3162] |
| 204 | UGGAGCCACAAAUGUUUAG | CUAAACAUUUGUGGCUCCA | | [3126-3144] |
| 205 | GGUUGAACGUCUUCCUCUU | AAGAGGAAGACGUUCAACC | | [73-91] |
| 206 | CAAGAGCAGGGUUUUCUUU | AAAGAAAACCCUGCUCUUG | | [3047-3065] |
| 207 | AGUCUCUAAAUCACUGUUA | UAACAGUGAUUUAGAGACU | | [3021-3039] |
| 208 | AGAGUCUCUAAAUCACUGU | ACAGUGAUUUAGAGACUCU | | [3019-3037] |
| 209 | UAACAACCCAGAAACAAAA | UUUUGUUUCUGGGUUGUUA | | [2941-2959] |
| 210 | CUAAAAUUAACAACCCAGA | UCUGGGUUGUUAAUUUUAG | | [2934-2952] |
| 211 | UCCUAAAAUUAACAACCCA | UGGGUUGUUAAUUUUAGGA | | [2932-2950] |
| 212 | AGCCCUUAUGAAUAUUGAA | UUCAAUAUUCAUAAGGGCU | | [2773-2791] |
| 213 | CCAGCUAGCCCUUAUGAAU | AUUCAUAAGGGCUAGCUGG | | [2767-2785] |
| 214 | CAAUGCCAAGAUAGAAUUA | UAAUUCUAUCUUGGCAUUG | | [2479-2497] |
| 215 | GGAUUGAUUGGAGUUAAUG | CAUUAACUCCAAUCAAUCC | | [2374-2392] |
| 216 | GAAUCCUCAAAAUCAGUUU | AAACUGAUUUUGAGGAUUC | | [2124-2142] |
| 217 | CAGUGGAAGUUAGGGAAAA | UUUUCCCUAACUUCCACUG | | [1966-1984] |
| 218 | AGAGCACUUUUACAAACAU | AUGUUUGUAAAAGUGCUCU | | [1919-1937] |
| 219 | GGUUUUGAGAGCACUUUUA | UAAAAGUGCUCUCAAAACC | | [1912-1930] |
| 220 | ACUGCAUGCUGAUUCUCUU | AAGAGAAUCAGCAUGCAGU | | [202-220] |
| 221 | UGUGAUCACAGGCCUGAAA | UUUCAGGCCUGUGAUCACA | | [1514-1532] |
| 222 | CCAUGAUGAGGAGAAAGAU | AUCUUUCUCCUCAUCAUGG | Rb, Ms | [1496-1514] |
| 223 | UGAAUUUCAACUGCAUGCU | AGCAUGCAGUUGAAAUUCA | Rat | [193-211] |
| 224 | CGCAUCCAUUCUCAAGUCA | UGACUUGAGAAUGGAUGCG | | [1262-1280] |
| 225 | CCCUUCGCAUCCAUUCUCA | UGAGAAUGGAUGCGAAGGG | | [1257-1275] |
| 226 | GUUUCAAGAUGCGUGGAAA | UUUCCACGCAUCUUGAAAC | | [1139-1157] |
| 227 | GCAGGAGUUUCAAGAUGCG | CGCAUCUUGAAACUCCUGC | | [1133-1151] |
| 228 | AGGAAGACUUCUUUAGUAU | AUACUAAAGAAGUCUUCCU | | [1054-1072] |
| 229 | CCAUGUUUCUGUAUCUCUG | CAGAGAUACAGAAACAUGG | | [841-859] |
| 230 | UGGCUGUGCAUAAUAUAAC | GUUAUAUUAUGCACAGCCA | | [721-739] |
| 231 | GGUACACACAUCAUCUCUU | AAGAGAUGAUGUGUGUACC | | [631-649] |
| 232 | AGGUCUUACUUUGAAGUCU | AGACUUCAAAGUAAGACCU | | [609-627] |
| 233 | GGAGUUGUCAUCACGCUGU | ACAGCGUGAUGACAACUCC | | [549-567] |
| 234 | UCGAAAGAGAAUAAAGAAC | GUUCUUUAUUCUCUUUCGA | | [482-500] |
| 235 | GGAGACAGGCAAAAUGAAA | UUUCAUUUUGCCUGUCUCC | | [447-465] |
| 236 | AGUCAAUAAUUCUGAUCCU | AGGAUCAGAAUUAUUGACU | | [404-422] |
| 237 | UGAAUGCCCGAGUCAAUAA | UUAUUGACUCGGGCAUUCA | | [394-412] |
| 238 | GCUUUUGCAAUUGUGUUUG | CAAACACAAUUGCAAAAGC | | [4133-4151] |
| 239 | UGAAUAUAAGAGUGCUUGU | ACAAGCACUCUUAUAUUCA | | [3926-3944] |
| 240 | CUCAGUUAUAAGGAGUCUG | CAGACUCCUUAUAACUGAG | | [3754-3772] |
| 241 | UCACACCAUUGCACAUCUA | UAGAUGUGCAAUGGUGUGA | | [356-374] |
| 242 | GCCUGCUGUGCGAAUAUAG | CUAUAUUCGCACAGCAGGC | | [3558-3576] |
| 243 | AGGGUAGGUCUGACAAAUA | UAUUUGUCAGACCUACCCU | | [3537-3555] |
| 244 | CAGUUGUUCUUUGUCAUAC | GUAUGACAAAGAACAACUG | | [3480-3498] |
| 245 | GACUAGGAUGAACUAAAUA | UAUUUAGUUCAUCCUAGUC | | [3455-3473] |
| 246 | GGGAUUAUUCAAGGGACUA | UAGUCCCUUGAAUAAUCCC | | [3441-3459] |
| 247 | ACAUACUGAUGUUGUUUUG | CAAAACAACAUCAGUAUGU | | [3368-3386] |
| 248 | GAGAGUGAGAGAAAAUAAA | UUUAUUUUCUCUCACUCUC | | [3244-3262] |
| 249 | UGAGGAAGAAGGAGAAAGA | UCUUUCUCCUUCUUCCUCA | | [3164-3182] |
| 250 | GAAUAUAUGUUCAAGAGAG | CUCUCUUGAACAUAUAUUC | | [3002-3020] |
| 251 | CAUCAUCAUCAUCCUAAAA | UUUUAGGAUGAUGAUGAUG | | [2921-2939] |
| 252 | ACUUAGGAAUUGUGACAAA | UUUGUCACAAUUCCUAAGU | | [2791-2809] |
| 253 | CUAGCCCUUAUGAAUAUUG | CAAUAUUCAUAAGGGCUAG | | [2771-2789] |
| 254 | UGAAAAAAGAGGGUUGGAG | CUCCAACCCUCUUUUUUCA | | [2649-2667] |
| 255 | GGGUUCUGCACAUUCUUAU | AUAAGAAUGUGCAGAACCC | | [2622-2640] |
| 256 | UUGGAUUGAUUGGAGUUAA | UUAACUCCAAUCAAUCCAA | | [2372-2390] |
| 257 | GUGUCAUUUUUGCCAUCAU | AUGAUGGCAAAAAUGACAC | | [2197-2215] |
| 258 | AGAAUCCUCAAAAUCAGUU | AACUGAUUUUGAGGAUUCU | | [2123-2141] |
| 259 | AGGUUUGAUACUCUUUCCA | UGGAAAGAGUAUCAAACCU | | [2087-2105] |
| 260 | UCCAGGUUUGAUACUCUUU | AAAGAGUAUCAAACCUGGA | | [2084-2102] |
| 261 | GUAACUUCCCUAAGAUUAU | AUAAUCUUAGGGAAGUUAC | | [2035-2053] |
| 262 | CAAAAGGGAAAGGAUCAAA | UUUGAUCCUUUCCCUUUUG | | [2009-2027] |
| 263 | AAAGAUUCUUGGACUCAAU | AUUGAGUCCAAGAAUCUUU | | [1982-2000] |
| 264 | GGAAGUUAGGGAAAAGAUU | AAUCUUUUCCCUAACUUCC | | [1970-1988] |
| 265 | GAGCACUUUUACAAACAUU | AAUGUUUGUAAAAGUGCUC | | [1920-1938] |
| 266 | GGAAUGUCAAAGAUUGUUU | AAACAAUCUUUGACAUUCC | | [1859-1877] |
| 267 | GAGUGCAUUUCAUUUUCAA | UUGAAAAUGAAAUGCACUC | | [1693-1711] |
| 268 | GGGAGUGCAUUUCAUUUUC | GAAAAUGAAAUGCACUCCC | | [1691-1709] |
| 269 | GACUUCUUUAGUAUCCAUA | UAUGGAUACUAAAGAAGUC | | [1059-1077] |
| 270 | GCACCCUUUUACACUGACA | UGUCAGUGUAAAAGGGUGC | | [1025-1043] |
| 271 | CCUAAGUUCUUUUACACAA | UUGUGUAAAAGAACUUAGG | | [123-141] |
| 272 | AAGUGGGACAAUACAUUUU | AAAAUGUAUUGUCCCACUU | | [973-991] |
| 273 | CAAAAUGGAAGUGGGACAA | UUGUCCCACUUCCAUUUUG | | [965-983] |
| 274 | CUCACCCUUUCAAAACCAU | AUGGUUUUGAAAGGGUGAG | Rb | [919-937] |
| 275 | CGGUUUUGGCGAUCUCAAC | GUUGAGAUCGCCAAAACCG | | [873-891] |
| 276 | UGAGAGGUUGGUGCGGUUU | AAACCGCACCAACCUCUCA | | [860-878] |
| 277 | AGAGAGUUUGGCUGUGCAU | AUGCACAGCCAAACUCUCU | | [713-731] |
| 278 | CAGAGAGUUUGGCUGUGCA | UGCACAGCCAAACUCUCUG | | [712-730] |
| 279 | ACACACAUCAUCUCUUUGU | ACAAAGAGAUGAUGUGUGU | | [634-652] |
| 280 | ACUUUGAAGUCUUUUGGUA | UACCAAAAGACUUCAAAGU | | [616-634] |
| 281 | UCACUGGAGUUGUCAUCAC | GUGAUGACAACUCCAGUGA | | [544-562] |
| 282 | UCCUCUUUGUCUGGUAUUA | UAAUACCAGACAAAGAGGA | | [85-103] |
| 283 | GACAGGCAAAAUGAAAGUU | AACUUUCAUUUUGCCUGUC | | [450-468] |
| 284 | UGCAAUUGUGUUUGUGAAA | UUUCACAAACACAAUUGCA | | [4138-4156] |
| 285 | UUGCAAUUGUGUUUGUGAA | UUCACAAACACAAUUGCAA | | [4137-4155] |
| 286 | CUUUUGCAAUUGUGUUUGU | ACAAACACAAUUGCAAAAG | | [4134-4152] |
| 287 | CUUAAGACUAUGAAGGUUU | AAACCUUCAUAGUCUUAAG | | [4100-4118] |
| 288 | AGCAUUUAUUAACAGGUAC | GUACCUGUUAAUAAAUGCU | | [4052-4070] |
| 289 | AGCACUUAGUAUUUAGCAU | AUGCUAAAUACUAAGUGCU | | [4038-4056] |
| 290 | CCAAGGUUUUCUAUCUUCA | UGAAGAUAGAAAACCUUGG | | [3844-3862] |
| 291 | CUCCAAGGUUUUCUAUCUU | AAGAUAGAAAACCUUGGAG | | [3842-3860] |
| 292 | AGAAUAUUGGCCCUUUCUA | UAGAAAGGGCCAAUAUUCU | | [3773-3791] |
| 293 | ACCAUUGCACAUCUAUUUA | UAAAUAGAUGUGCAAUGGU | | [360-378] |
| 294 | AGUUGUUCUUUGUCAUACU | AGUAUGACAAAGAACAACU | | [3481-3499] |
| 295 | GAAUAUAAUUGAAGGAGGU | ACCUCCUUCAAUUAUAUUC | | [3345-3363] |
| 296 | GAAUGGGAGAGUGAGAGAA | UUCUCUCACUCUCCCAUUC | | [3238-3256] |
| 297 | CUUGGAGCCACAAAUGUUU | AAACAUUUGUGGCUCCAAG | | [3124-3142] |
| 298 | GUCUCUAAAUCACUGUUAG | CUAACAGUGAUUUAGAGAC | | [3022-3040] |
| 299 | GAGAGUCUCUAAAUCACUG | CAGUGAUUUAGAGACUCUC | | [3018-3036] |
| 300 | CAACCCAGAAACAAAAAUC | GAUUUUUGUUUCUGGGUUG | | [2944-2962] |
| 301 | UGUAUCUGAUAUGGUCAUU | AAUGACCAUAUCAGAUACA | | [2812-2830] |
| 302 | CUCAUCUAGUCCUGCUCCU | AGGAGCAGGACUAGAUGAG | | [2699-2717] |
| 303 | UGCACAUUCUUAUUUGAAG | CUUCAAAUAAGAAUGUGCA | | [2628-2646] |
| 304 | CUGCACAUUCUUAUUUGAA | UUCAAAUAAGAAUGUGCAG | | [2627-2645] |
| 305 | CCUGAAGGGUUCUGCACAU | AUGUGCAGAACCCUUCAGG | | [2616-2634] |
| 306 | UACUAAUACAGCAGGGUAA | UUACCCUGCUGUAUUAGUA | | [2322-2340] |
| 307 | CAAGGAGUAGCUAUAUAUU | AAUAUAUAGCUACUCCUUG | | [2170-2188] |
| 308 | UCAGAAUCCUCAAAAUCAG | CUGAUUUUGAGGAUUCUGA | | [2121-2139] |
| 309 | CCCUAAGAUUAUGAAACUG | CAGUUUCAUAAUCUUAGGG | | [2042-2060] |
| 310 | CAGUAACUUCCCUAAGAUU | AAUCUUAGGGAAGUUACUG | | [2033-2051] |
| 311 | AUCAAAAGGUUCAGUAACU | AGUUACUGAACCUUUUGAU | | [2022-2040] |
| 312 | UCAAAAGGGAAAGGAUCAA | UUGAUCCUUUCCCUUUUGA | | [2008-2026] |
| 313 | AAAAGAUUCUUGGACUCAA | UUGAGUCCAAGAAUCUUUU | | [1981-1999] |
| 314 | CUGCUUAAAAAUGGACAAA | UUUGUCCAUUUUUAAGCAG | | [1808-1826] |
| 315 | CCUGCUUAAAAAUGGACAA | UUGUCCAUUUUUAAGCAGG | | [1807-1825] |
| 316 | GAGGAAAUAAAUGUGGGUU | AACCCACAUUUAUUUCCUC | | [1742-1760] |
| 317 | CAACAAGGAAAACUUCUAA | UUAGAAGUUUUCCUUGUUG | Rat, Ms | [1709-1727] |
| 318 | GUGCAUUUCAUUUUCAACA | UGUUGAAAAUGAAAUGCAC | | [1695-1713] |
| 319 | ACAGGCCUGAAACAAAAGA | UCUUUUGUUUCAGGCCUGU | | [1521-1539] |
| 320 | UCCUCAGCUACAACAUCUA | UAGAUGUUGUAGCUGAGGA | Rat, Rb | [1432-1450] |
| 321 | AGAUGCAGGAAAGGAACAA | UUGUUCCUUUCCUGCAUCU | Ms | [1405-1423] |
| 322 | CCAGAUGCAGGAAAGGAAC | GUUCCUUUCCUGCAUCUGG | Ms | [1403-1421] |
| 323 | UCGCAUCCAUUCUCAAGUC | GACUUGAGAAUGGAUGCGA | | [1261-1279] |
| 324 | UCAGCUAUGAGGUGGUGAU | AUCACCACCUCAUAGCUGA | Rat, Rb, Ms | [1210-1228] |
| 325 | CUCCAUUUUUGUCAUUCUG | CAGAAUGACAAAAAUGGAG | | [44-62] |
| 326 | CACCCUUUUACACUGACAU | AUGUCAGUGUAAAAGGGUG | | [1026-1044] |
| 327 | UUCCACCUAAGUUCUUUUA | UAAAAGAACUUAGGUGGAA | | [118-136] |
| 328 | GUCCCAUGUUUCUGUAUCU | AGAUACAGAAACAUGGGAC | | [838-856] |
| 329 | GGGUCCCAUGUUUCUGUAU | AUACAGAAACAUGGGACCC | | [836-854] |
| 330 | GUUUAUGAUAUUCCACCUA | UAGGUGGAAUAUCAUAAAC | | [108-126] |
| 331 | CGGGUUUAUGAUAUUCCAC | GUGGAAUAUCAUAAACCCG | | [105-123] |
| 332 | AGAGUUUGGCUGUGCAUAA | UUAUGCACAGCCAAACUCU | | [715-733] |
| 333 | UGAAGUCUUUUGGUACACA | UGUGUACCAAAAGACUUCA | | [620-638] |
| 334 | GCAUCACUGGAGUUGUCAU | AUGACAACUCCAGUGAUGC | | [541-559] |
| 335 | AGACAGGCAAAAUGAAAGU | ACUUUCAUUUUGCCUGUCU | | [449-467] |
| 336 | UGAACUUGGAGACAGGCAA | UUGCCUGUCUCCAAGUUCA | | [440-458] |
| 337 | UGAUCCUUAUUCAGUAGCA | UGCUACUGAAUAAGGAUCA | | [416-434] |
| 338 | GGACCUGGGAGAUAAUUCU | AGAAUUAUCUCCCAGGUCC | | [4199-4217] |
| 339 | UCUUAAGACUAUGAAGGUU | AACCUUCAUAGUCUUAAGA | | [4099-4117] |
| 340 | CUCUAAGAAUGAUGAAGCA | UGCUUCAUCAUUCUUAGAG | | [4070-4088] |
| 341 | GUACUCUAAGAAUGAUGAA | UUCAUCAUUCUUAGAGUAC | | [4067-4085] |
| 342 | CAGGUACUCUAAGAAUGAU | AUCAUUCUUAGAGUACCUG | | [4064-4082] |
| 343 | AAAACCAGCUUCAUUUGUU | AACAAAUGAAGCUGGUUUU | | [3808-3826] |
| 344 | GUGUUAUUACUAUGAGUCA | UGACUCAUAGUAAUAACAC | | [3681-3699] |
| 345 | UGCUUAGAGACACUUAGGU | ACCUAAGUGUCUCUAAGCA | | [3605-3623] |
| 346 | GGAUGGUUUCUGCUUAGAG | CUCUAAGCAGAAACCAUCC | | [3595-3613] |
| 347 | UCAUACUACUAUUCCUUUC | GAAAGGAAUAGUAGUAUGA | | [3493-3511] |
| 348 | UGUCAUACUACUAUUCCUU | AAGGAAUAGUAGUAUGACA | | [3491-3509] |
| 349 | GAAGGAGGUAUACACAUAC | GUAUGUGUAUACCUCCUUC | | [3355-3373] |
| 350 | AAGGAAAUAAGGAGAAAAG | CUUUUCUCCUUAUUUCCUU | | [3218-3236] |
| 351 | GACUGGUUUAGGAGGAAAA | UUUUCCUCCUAAACCAGUC | | [3201-3219] |
| 352 | CGGUAAUGAGGAAGAAGGA | UCCUUCUUCCUCAUUACCG | | [3158-3176] |
| 353 | CUCUUCAACUUCGGUAAUG | CAUUACCGAAGUUGAAGAG | | [3147-3165] |
| 354 | CAUGGAUGAUUGCACUUCA | UGAAGUGCAAUCAUCCAUG | | [328-346] |
| 355 | CCUUGGAGCCACAAAUGUU | AACAUUUGUGGCUCCAAGG | | [3123-3141] |
| 356 | CCCUUGGAGCCACAAAUGU | ACAUUUGUGGCUCCAAGGG | | [3122-3140] |
| 357 | CAAAUUCACACUCAAUAGU | ACUAUUGAGUGUGAAUUUG | | [2976-2994] |
| 358 | AUGUAUCUGAUAUGGUCAU | AUGACCAUAUCAGAUACAU | | [2811-2829] |
| 359 | CUUAGGAAUUGUGACAAAU | AUUUGUCACAAUUCCUAAG | | [2792-2810] |
| 360 | UCAUCUAGUCCUGCUCCUU | AAGGAGCAGGACUAGAUGA | | [2700-2718] |
| 361 | GGGUUGGAGGUGGAGAAUU | AAUUCUCCACCUCCAACCC | | [2659-2677] |
| 362 | CAUUCUUAUUUGAAGCAUG | CAUGCUUCAAAUAAGAAUG | | [2632-2650] |
| 363 | GUAAUACUCAUCAUUUACC | GGUAAAUGAUGAGUAUUAC | | [2392-2410] |
| 364 | AAAAGAAGAAGGAAACCAA | UUGGUUUCCUUCUUCUUUU | | [2154-2172] |
| 365 | CAAAAGAAGAAGGAAACCA | UGGUUUCCUUCUUCUUUUG | | [2153-2171] |
| 366 | GCUGCCUCAGAAUCCUCAA | UUGAGGAUUCUGAGGCAGC | | [2115-2133] |
| 367 | CAGGUUUGAUACUCUUUCC | GGAAAGAGUAUCAAACCUG | | [2086-2104] |
| 368 | UCUUACUCCAGGUUUGAUA | UAUCAAACCUGGAGUAAGA | | [2078-2096] |
| 369 | CCUAAGAUUAUGAAACUGU | ACAGUUUCAUAAUCUUAGG | | [2043-2061] |
| 370 | UCCCUAAGAUUAUGAAACU | AGUUUCAUAAUCUUAGGGA | | [2041-2059] |
| 371 | AAAAGGGAAAGGAUCAAAA | UUUUGAUCCUUUCCCUUUU | | [2010-2028] |
| 372 | AGGGAAAAGAUUCUUGGAC | GUCCAAGAAUCUUUUCCCU | | [1977-1995] |
| 373 | UCAGUGGAAGUUAGGGAAA | UUUCCCUAACUUCCACUGA | | [1965-1983] |
| 374 | CUAUGGUUUUGAGAGCACU | AGUGCUCUCAAAACCAUAG | | [1908-1926] |
| 375 | UGGAGCUCUAUGGUUUUGA | UCAAAACCAUAGAGCUCCA | | [1901-1919] |
| 376 | GUGGAGCUCUAUGGUUUUG | CAAAACCAUAGAGCUCCAC | | [1900-1918] |
| 377 | CUCUUGCCAGUCUGUCGAA | UUCGACAGACUGGCAAGAG | | [216-234] |
| 378 | AGGAAAUAAAUGUGGGUUG | CAACCCACAUUUAUUUCCU | | [1743-1761] |
| 379 | UGAUUCUCUUGCCAGUCUG | CAGACUGGCAAGAGAAUCA | | [211-229] |
| 380 | AAAGGAACAAUGCCGGCUU | AAGCCGGCAUUGUUCCUUU | | [1414-1432] |
| 381 | GUCAGUCUGGUACAAAUAU | AUAUUUGUACCAGACUGAC | Rb | [1277-1295] |
| 382 | CAAGUCAGUCUGGUACAAA | UUUGUACCAGACUGACUUG | Rb | [1274-1292] |
| 383 | GGAAGACUUCUUUAGUAUC | GAUACUAAAGAAGUCUUCC | | [1055-1073] |
| 384 | CCUGAGGAAGACUUCUUUA | UAAAGAAGUCUUCCUCAGG | Rat | [1050-1068] |
| 385 | GGCACCCUUUUACACUGAC | GUCAGUGUAAAAGGGUGCC | | [1024-1042] |
| 386 | CACCUAAGUUCUUUUACAC | GUGUAAAAGAACUUAGGUG | | [121-139] |
| 387 | AGCUACAGAUGAAGAAGAA | UUCUUCUUCAUCUGUAGCU | | [940-958] |
| 388 | CUCAACAGAAGGUGGUCAU | AUGACCACCUUCUGUUGAG | | [886-904] |
| 389 | GGCGAUCUCAACAGAAGGU | ACCUUCUGUUGAGAUCGCC | | [880-898] |
| 390 | UGAUAUUCCACCUAAGUUC | GAACUUAGGUGGAAUAUCA | | [113-131] |
| 391 | CCCAUGUUUCUGUAUCUCU | AGAGAUACAGAAACAUGGG | | [840-858] |
| 392 | GGUCCCAUGUUUCUGUAUC | GAUACAGAAACAUGGGACC | | [837-855] |
| 393 | GUUUGGCUGUGCAUAAUAU | AUAUUAUGCACAGCCAAAC | | [718-736] |
| 394 | UCUUUGUGAUCUUCUUCAU | AUGAAGAAGAUCACAAAGA | Rat, Ms | [646-664] |
| 395 | AUCUCUUUGUGAUCUUCUU | AAGAAGAUCACAAAGAGAU | Rat, Ms | [643-661] |
| 396 | UCAUCUCUUUGUGAUCUUC | GAAGAUCACAAAGAGAUGA | | [641-659] |
| 397 | GAAGUCUUUUGGUACACAC | GUGUGUACCAAAAGACUUC | | [621-639] |
| 398 | AGGCAAAAUGAAAGUUAUC | GAUAACUUUCAUUUUGCCU | | [453-471] |
| 399 | GGGCUCUCCAUUUUUGUCA | UGACAAAAAUGGAGAGCCC | | [39-57] |
| 400 | GGUACUCUAAGAAUGAUGA | UCAUCAUUCUUAGAGUACC | | [4066-4084] |
| 401 | CAAGGUUUUCUAUCUUCAA | UUGAAGAUAGAAAACCUUG | | [3845-3863] |
| 402 | CUAUUUAAUGUGGAAUGGU | ACCAUUCCACAUUAAAUAG | | [372-390] |
| 403 | AGGCUCUGUUUAUUGUUUC | GAAACAAUAAACAGAGCCU | | [3699-3717] |
| 404 | ACACCAUUGCACAUCUAUU | AAUAGAUGUGCAAUGGUGU | | [358-376] |
| 405 | AGGAUGGUUUCUGCUUAGA | UCUAAGCAGAAACCAUCCU | | [3594-3612] |
| 406 | UGAGGGUAGGUCUGACAAA | UUUGUCAGACCUACCCUCA | | [3535-3553] |
| 407 | GUCAUACUACUAUUCCUUU | AAAGGAAUAGUAGUAUGAC | | [3492-3510] |
| 408 | ACUCAGUUGUUCUUUGUCA | UGACAAAGAACAACUGAGU | | [3477-3495] |
| 409 | CUGGUCACAAAUUUUGAUG | CAUCAAAAUUUGUGACCAG | | [3416-3434] |
| 410 | UCUGGUCACAAAUUUUGAU | AUCAAAAUUUGUGACCAGA | | [3415-3433] |
| 411 | AGACUGGUUUAGGAGGAAA | UUUCCUCCUAAACCAGUCU | | [3200-3218] |
| 412 | UAAUGAGGAAGAAGGAGAA | UUCUCCUUCUUCCUCAUUA | | [3161-3179] |
| 413 | GUAAUGAGGAAGAAGGAGA | UCUCCUUCUUCCUCAUUAC | | [3160-3178] |
| 414 | CUUCGGUAAUGAGGAAGAA | UUCUUCCUCAUUACCGAAG | | [3155-3173] |
| 415 | AACUCUUCAACUUCGGUAA | UUACCGAAGUUGAAGAGUU | | [3145-3163] |
| 416 | ACAGAGAUCAAAUUCACAC | GUGUGAAUUUGAUCUCUGU | | [2968-2986] |
| 417 | CUGAAGGGUUCUGCACAUU | AAUGUGCAGAACCCUUCAG | | [2617-2635] |
| 418 | AGGGUCAAGAACAGGCUAA | UUAGCCUGUUCUUGACCCU | | [2576-2594] |
| 419 | UCAUUUACCACUGUGCUUG | CAAGCACAGUGGUAAAUGA | | [2402-2420] |
| 420 | CUCAUCAUUUACCACUGUG | CACAGUGGUAAAUGAUGAG | | [2398-2416] |
| 421 | CAGAAGAAUAUUGGAUUGA | UCAAUCCAAUAUUCUUCUG | | [2362-2380] |
| 422 | CCUCAGAAUCCUCAAAAUC | GAUUUUGAGGAUUCUGAGG | | [2119-2137] |
| 423 | CUAAGAUUAUGAAACUGUG | CACAGUUUCAUAAUCUUAG | | [2044-2062] |
| 424 | AGAUUCUUGGACUCAAUUU | AAAUUGAGUCCAAGAAUCU | | [1984-2002] |
| 425 | GUCAGUGGAAGUUAGGGAA | UUCCCUAACUUCCACUGAC | | [1964-1982] |
| 426 | CCCUGCUUAAAAAUGGACA | UGUCCAUUUUUAAGCAGGG | | [1806-1824] |
| 427 | UGAGGAAAUAAAUGUGGGU | ACCCACAUUUAUUUCCUCA | | [1741-1759] |
| 428 | UCUAACUUGUCUCUUCCAU | AUGGAAGAGACAAGUUAGA | | [1723-1741]+ |
| 429 | CAAGGAAAACUUCUAACUU | AAGUUAGAAGUUUUCCUUG | | [1712-1730]+ |
| 430 | ACAAGGAAAACUUCUAACU | AGUUAGAAGUUUUCCUUGU | Ms | [1711-1729]+ |
| 431 | UCAACAAGGAAAACUUCUA | UAGAAGUUUUCCUUGUUGA | Rat, Ms | [1708-1726] |
| 432 | UGAGGAGAAAGAUGUGAUC | GAUCACAUCUUUCUCCUCA | Rb, Ms | [1502-1520] |
| 433 | UCAGCUACAACAUCUACCU | AGGUAGAUGUUGUAGCUGA | Rat | [1435-1453] |
| 434 | GCCUUUGAGUGGUUUGCAG | CUGCAAACCACUCAAAGGC | Rb, Ms | [1362-1380] |
| 435 | ACAUGCCUUUGAGUGGUUU | AAACCACUCAAAGGCAUGU | Rb | [1358-1376] |
| 436 | AAGUCAGUCUGGUACAAAU | AUUUGUACCAGACUGACUU | Rb | [1275-1293] |
| 437 | UCCAUUCUCAAGUCAGUCU | AGACUGACUUGAGAAUGGA | | [1266-1284] |
| 438 | ACCCUUCGCAUCCAUUCUC | GAGAAUGGAUGCGAAGGGU | | [1256-1274] |
| 439 | CUGCCAGUGAAGAUGUGUU | AACACAUCUUCACUGGCAG | | [1192-1210] |
| 440 | UGGAAGUGGGACAAUACAU | AUGUAUUGUCCCACUUCCA | | [970-988] |
| 441 | UCAAAAUGGAAGUGGGACA | UGUCCCACUUCCAUUUUGA | | [964-982] |
| 442 | GGGUUCAAAAUGGAAGUGG | CCACUUCCAUUUUGAACCC | | [960-978] |
| 443 | GUCACUCACCCUUUCAAAA | UUUUGAAAGGGUGAGUGAC | Rb | [915-933] |
| 444 | UCCCAUGUUUCUGUAUCUC | GAGAUACAGAAACAUGGGA | | [839-857] |
| 445 | UGGGUCCCAUGUUUCUGUA | UACAGAAACAUGGGACCCA | | [835-853] |
| 446 | CCUAUGACUUGGAAAUGGA | UCCAUUUCCAAGUCAUAGG | Rat, Ms | [813-831] |
| 447 | CUCUUUGUGAUCUUCUUCA | UGAAGAAGAUCACAAAGAG | Rat, Ms | [645-663] |
| 448 | GUCUUUUGGUACACACAUC | GAUGUGUGUACCAAAAGAC | | [624-642] |
| 449 | CUGGAGUUGUCAUCACGCU | AGCGUGAUGACAACUCCAG | | [547-565] |
| 450 | AGCACUCUCUGAACUUGGA | UCCAAGUUCAGAGAGUGCU | | [431-449] |
| 451 | UUAACAGGUACUCUAAGAA | UUCUUAGAGUACCUGUUAA | | [4060-4078] |
| 452 | GUGUUAUCCAGUUAUGAGA | UCUCAUAACUGGAUAACAC | | [3900-3918] |
| 453 | GAGAAUAUUGGCCCUUUCU | AGAAAGGGCCAAUAUUCUC | | [3772-3790] |
| 454 | CAAAGUAUGAACUGGAGAG | CUCUCCAGUUCAUACUUUG | | [3730-3748] |
| 455 | AGGGACUAGGAUGAACUAA | UUAGUUCAUCCUAGUCCCU | | [3452-3470] |
| 456 | CAAGGGACUAGGAUGAACU | AGUUCAUCCUAGUCCCUUG | | [3450-3468] |
| 457 | CUUUUAAAAUCUGGUCACA | UGUGACCAGAUUUUAAAAG | | [3406-3424] |
| 458 | UCUUUUAAAAUCUGGUCAC | GUGACCAGAUUUUAAAAGA | | [3405-3423] |
| 459 | AGAAUAUAAUUGAAGGAGG | CCUCCUUCAAUUAUAUUCU | | [3344-3362] |
| 460 | UGGGAGAGUGAGAGAAAAU | AUUUUCUCUCACUCUCCCA | | [3241-3259] |
| 461 | ACUCUUCAACUUCGGUAAU | AUUACCGAAGUUGAAGAGU | | [3146-3164] |
| 462 | GGAACUAAAACCAGUUUUA | UAAAACUGGUUUUAGUUCC | | [3093-3111] |
| 463 | CAGAGAUCAAAUUCACACU | AGUGUGAAUUUGAUCUCUG | | [2969-2987] |
| 464 | UCUGAUAUGGUCAUUUGUU | AACAAAUGACCAUAUCAGA | | [2816-2834] |
| 465 | AACUUAGGAAUUGUGACAA | UUGUCACAAUUCCUAAGUU | | [2790-2808] |
| 466 | GGGUCAAGAACAGGCUAAG | CUUAGCCUGUUCUUGACCC | | [2577-2595] |
| 467 | ACUCAUCAUUUACCACUGU | ACAGUGGUAAAUGAUGAGU | | [2397-2415] |
| 468 | GAAUAUUGGAUUGAUUGGA | UCCAAUCAAUCCAAUAUUC | | [2367-2385] |
| 469 | UGGGCCAGAUGUUCUUUCU | AGAAAGAACAUCUGGCCCA | | [2342-2360] |
| 470 | AACAAGAGUUCGAAGACAA | UUGUCUUCGAACUCUUGUU | | [275-293] |
| 471 | AGUAUUGACAUCUGAGCAU | AUGCUCAGAUGUCAAUACU | | [2294-2312] |
| 472 | UGAAGGAAAUUUUCCAGAU | AUCUGGAAAAUUUCCUUCA | | [2227-2245] |
| 473 | UGUCAUUUUUGCCAUCAUU | AAUGAUGGCAAAAAUGACA | | [2198-2216] |
| 474 | GAAAGGAUCAAAAGGUUCA | UGAACCUUUUGAUCCUUUC | | [2016-2034] |
| 475 | AGGGAAAGGAUCAAAAGGU | ACCUUUUGAUCCUUUCCCU | | [2013-2031] |
| 476 | GAAUCAAAAGGGAAAGGAU | AUCCUUUCCCUUUUGAUUC | | [2005-2023] |
| 477 | AGAAUCAAAAGGGAAAGGA | UCCUUUCCCUUUUGAUUCU | | [2004-2022] |
| 478 | CUUGGACUCAAUUUUAGAA | UUCUAAAAUUGAGUCCAAG | | [1989-2007] |
| 479 | GAUUCUUGGACUCAAUUUU | AAAAUUGAGUCCAAGAAUC | | [1985-2003] |
| 480 | AGUUAGGGAAAAGAUUCUU | AAGAAUCUUUUCCCUAACU | | [1973-1991] |
| 481 | UGGAAGUUAGGGAAAAGAU | AUCUUUUCCCUAACUUCCA | | [1969-1987] |
| 482 | GUGGAAGUUAGGGAAAAGA | UCUUUUCCCUAACUUCCAC | | [1968-1986] |
| 483 | CUCAGUAAUGUCAGUGGAA | UUCCACUGACAUUACUGAG | | [1955-1973] |
| 484 | GAGAGCACUUUUACAAACA | UGUUUGUAAAAGUGCUCUC | | [1918-1936] |
| 485 | UGAGAGCACUUUUACAAAC | GUUUGUAAAAGUGCUCUCA | | [1917-1935] |
| 486 | UGGUUUUGAGAGCACUUUU | AAAAGUGCUCUCAAAACCA | | [1911-1929] |
| 487 | AUGGUUUUGAGAGCACUUU | AAAGUGCUCUCAAAACCAU | | [1910-1928] |
| 488 | GGAAAACUUCUAACUUGUC | GACAAGUUAGAAGUUUUCC | | [1715-1733]+ |
| 489 | AGGAGAAAGAUGUGAUCAC | GUGAUCACAUCUUUCUCCU | Rb, Ms | [1504-1522] |
| 490 | CCAAUCUGAAGCUCAAAAA | UUUUUGAGCUUCAGAUUGG | | [1309-1327] |
| 491 | CAGUCUGGUACAAAUAUUG | CAAUAUUUGUACCAGACUG | Rb | [1279-1297] |
| 492 | GCAUCCAUUCUCAAGUCAG | CUGACUUGAGAAUGGAUGC | | [1263-1281] |
| 493 | UGAAGAUGUGUUCAGCUAU | AUAGCUGAACACAUCUUCA | Rat, Rb, Ms | [1199-1217] |
| 494 | CUGAGGAAGACUUCUUUAG | CUAAAGAAGUCUUCCUCAG | Rat | [1051-1069] |
| 495 | UCUCCAUUUUUGUCAUUCU | AGAAUGACAAAAAUGGAGA | | [43-61] |
| 496 | CUCUCCAUUUUUGUCAUUC | GAAUGACAAAAAUGGAGAG | | [42-60] |
| 497 | GCGAUCUCAACAGAAGGUG | CACCUUCUGUUGAGAUCGC | | [881-899] |
| 498 | UUAUGAUAUUCCACCUAAG | CUUAGGUGGAAUAUCAUAA | | [110-128] |
| 499 | UGAUCUUCUUCAUUGGCCU | AGGCCAAUGAAGAAGAUCA | | [652-670] |
| 500 | GAGUUGUCAUCACGCUGUG | CACAGCGUGAUGACAACUC | | [550-568] |
| 501 | AGGCAUCACUGGAGUUGUC | GACAACUCCAGUGAUGCCU | | [539-557] |
| 502 | UCCUUAUUCAGUAGCACUC | GAGUGCUACUGAAUAAGGA | | [419-437] |
| 503 | UAAGAAUGAUGAAGCAUUG | CAAUGCUUCAUCAUUCUUA | | [4073-4091] |
| 504 | AGGUACUCUAAGAAUGAUG | CAUCAUUCUUAGAGUACCU | | [4065-4083] |
| 505 | UCCAAGGUUUUCUAUCUUC | GAAGAUAGAAAACCUUGGA | | [3843-3861] |
| 506 | CACACCAUUGCACAUCUAU | AUAGAUGUGCAAUGGUGUG | | [357-375] |
| 507 | CCUUUCGUCUCCCAGAAUC | GAUUCUGGGAGACGAAAGG | | [3506-3524] |
| 508 | UCAAGGGACUAGGAUGAAC | GUUCAUCCUAGUCCCUUGA | | [3449-3467] |
| 509 | AUGGGAGAGUGAGAGAAAA | UUUUCUCUCACUCUCCCAU | | [3240-3258] |
| 510 | AGGAAAAGGAAAUAAGGAG | CUCCUUAUUUCCUUUUCCU | | [3213-3231] |
| 511 | AGGAGGAAAAGGAAAUAAG | CUUAUUUCCUUUUCCUCCU | | [3210-3228] |
| 512 | CUGUUAGUGUGGCCAAGAG | CUCUUGGCCACACUAACAG | | [3034-3052] |
| 513 | UCCAGCUAGCCCUUAUGAA | UUCAUAAGGGCUAGCUGGA | | [2766-2784] |
| 514 | UCUGCACAUUCUUAUUUGA | UCAAAUAAGAAUGUGCAGA | | [2626-2644] |
| 515 | GAACAGGCUAAGGAUACUA | UAGUAUCCUUAGCCUGUUC | | [2584-2602] |
| 516 | AGGAAAUUUUCCAGAUCAU | AUGAUCUGGAAAAUUUCCU | | [2230-2248] |
| 517 | GAAGGAAAUUUUCCAGAUC | GAUCUGGAAAAUUUCCUUC | | [2228-2246] |
| 518 | AGAAGAAGGAAACCAAGGA | UCCUUGGUUUCCUUCUUCU | | [2157-2175] |
| 519 | ACUUCCCUAAGAUUAUGAA | UUCAUAAUCUUAGGGAAGU | | [2038-2056] |
| 520 | GGAAAGGAUCAAAAGGUUC | GAACCUUUUGAUCCUUUCC | | [2015-2033] |
| 521 | GUAAUGUCAGUGGAAGUUA | UAACUUCCACUGACAUUAC | | [1959-1977] |
| 522 | UCAGUAAUGUCAGUGGAAG | CUUCCACUGACAUUACUGA | | [1956-1974] |
| 523 | CAAAGAUUGUUUGAUAGUG | CACUAUCAAACAAUCUUUG | | [1866-1884] |
| 524 | AGGAAUGUCAAAGAUUGUU | AACAAUCUUUGACAUUCCU | | [1858-1876] |
| 525 | GAAAUAAAUGUGGGUUGUG | CACAACCCACAUUUAUUUC | | [1745-1763] |
| 526 | GAAAACUUCUAACUUGUCU | AGACAAGUUAGAAGUUUUC | | [1716-1734]+ |
| 527 | CUGAAACAAAAGACUUUGU | ACAAAGUCUUUUGUUUCAG | | [1527-1545] |
| 528 | CCUGAAACAAAAGACUUUG | CAAAGUCUUUUGUUUCAGG | | [1526-1544] |
| 529 | GCUACAACAUCUACCUCAC | GUGAGGUAGAUGUUGUAGC | | [1438-1456] |
| 530 | GAUGCAGGAAAGGAACAAU | AUUGUUCCUUUCCUGCAUC | Ms | [1406-1424] |
| 531 | CCUUCGCAUCCAUUCUCAA | UUGAGAAUGGAUGCGAAGG | | [1258-1276] |
| 532 | UGAUAAGCAGGAGUUUCAA | UUGAAACUCCUGCUUAUCA | Rat, Rb | [1127-1145] |
| 533 | GUAUCCAUAUCCGCAUCGU | ACGAUGCGGAUAUGGAUAC | | [1069-1087] |
| 534 | UGAGGAAGACUUCUUUAGU | ACUAAAGAAGUCUUCCUCA | | [1052-1070] |
| 535 | CCCUGAGGAAGACUUCUUU | AAAGAAGUCUUCCUCAGGG | Rat | [1049-1067] |
| 536 | UGGCACCCUUUUACACUGA | UCAGUGUAAAAGGGUGCCA | | [1023-1041] |
| 537 | UGACUUGGAAAUGGAUAGU | ACUAUCCAUUUCCAAGUCA | Ms | [817-835] |
| 538 | CUAUGACUUGGAAAUGGAU | AUCCAUUUCCAAGUCAUAG | Rat, Ms | [814-832] |
| 539 | UGGAGACAGGCAAAAUGAA | UUCAUUUUGCCUGUCUCCA | | [446-464] |
| 540 | CUUCCUCUUUGUCUGGUAU | AUACCAGACAAAGAGGAAG | | [83-101] |
| 541 | UCUUCCUCUUUGUCUGGUA | UACCAGACAAAGAGGAAGA | | [82-100] |
| 542 | GUAGCACUCUCUGAACUUG | CAAGUUCAGAGAGUGCUAC | | [429-447] |
| 543 | ACGUCUUCCUCUUUGUCUG | CAGACAAAGAGGAAGACGU | | [79-97] |
| 544 | GACCUGGGAGAUAAUUCUA | UAGAAUUAUCUCCCAGGUC | | [4200-4218] |
| 545 | GAAAUUUGAAUACUUGCAG | CUGCAAGUAUUCAAAUUUC | | [4153-4171] |
| 546 | GGAAUGGUGUGUGAAUGCC | GGCAUUCACACACCAUUCC | | [383-401] |
| 547 | GUGGAAUGGUGUGUGAAUG | CAUUCACACACCAUUCCAC | | [381-399] |
| 548 | GUUUCUCCAAGGUUUUCUA | UAGAAAACCUUGGAGAAAC | | [3838-3856] |
| 549 | GUGCGAAUAUAGCCUUUCU | AGAAAGGCUAUAUUCGCAC | | [3565-3583] |
| 550 | UAGGAGGAAAAGGAAAUAA | UUAUUUCCUUUUCCUCCUA | | [3209-3227] |
| 551 | UUAGGAGGAAAAGGAAAUA | UAUUUCCUUUUCCUCCUAA | | [3208-3226] |
| 552 | GGUUUAGGAGGAAAAGGAA | UUCCUUUUCCUCCUAAACC | | [3205-3223] |
| 553 | UGGUUUAGGAGGAAAAGGA | UCCUUUUCCUCCUAAACCA | | [3204-3222] |
| 554 | CCUUAUUUUCCGUAAAUAC | GUAUUUACGGAAAAUAAGG | | [2851-2869] |
| 555 | GGUUCUGCACAUUCUUAUU | AAUAAGAAUGUGCAGAACC | | [2623-2641] |
| 556 | GGUAACUGGGCCAGAUGUU | AACAUCUGGCCCAGUUACC | | [2336-2354] |
| 557 | GCAUACUCCAGUUUACUAA | UUAGUAAACUGGAGUAUGC | | [2309-2327] |
| 558 | GUCAUUUUUGCCAUCAUUA | UAAUGAUGGCAAAAAUGAC | | [2199-2217] |
| 559 | GAAGAAGGAAACCAAGGAG | CUCCUUGGUUUCCUUCUUC | | [2158-2176] |
| 560 | AGGAAAACUUCUAACUUGU | ACAAGUUAGAAGUUUUCCU | | [1714-1732]+ |
| 561 | ACAAAAGACUUUGUAUGGA | UCCAUACAAAGUCUUUUGU | | [1532-1550] |
| 562 | AGCUACAACAUCUACCUCA | UGAGGUAGAUGUUGUAGCU | | [1437-1455] |
| 563 | GGUGAUGUUAGUGGGAGCA | UGCUCCCACUAACAUCACC | Rb | [1223-1241] |
| 564 | CUAUGAGGUGGUGAUGUUA | UAACAUCACCACCUCAUAG | Rat, Rb, Ms | [1214-1232] |
| 565 | UGCCAGUGAAGAUGUGUUC | GAACACAUCUUCACUGGCA | | [1193-1211] |
| 566 | UUAGUAUCCAUAUCCGCAU | AUGCGGAUAUGGAUACUAA | | [1066-1084] |
| 567 | CUUCUUUAGUAUCCAUAUC | GAUAUGGAUACUAAAGAAG | | [1061-1079] |
| 568 | CCCUUUUACACUGACAUCC | GGAUGUCAGUGUAAAAGGG | | [1028-1046] |
| 569 | GUGGCACCCUUUUACACUG | CAGUGUAAAAGGGUGCCAC | | [1022-1040] |
| 570 | GACUUGGAAAUGGAUAGUG | CACUAUCCAUUUCCAAGUC | Ms | [818-836] |
| 571 | GUAUUACCGGGUUUAUGAU | AUCAUAAACCCGGUAAUAC | | [98-116] |
| 572 | GGCAUCACUGGAGUUGUCA | UGACAACUCCAGUGAUGCC | | [540-558] |
| 573 | CCUCUUUGUCUGGUAUUAC | GUAAUACCAGACAAAGAGG | | [86-104] |
| 574 | GUCUUCCUCUUUGUCUGGU | ACCAGACAAAGAGGAAGAC | | [81-99] |
| 575 | ACCUGGGAGAUAAUUCUAC | GUAGAAUUAUCUCCCAGGU | | [4201-4219] |
| 576 | GGGACCUGGGAGAUAAUUC | GAAUUAUCUCCCAGGUCCC | | [4198-4216] |
| 577 | UUGAAUACUUGCAGGCUUU | AAAGCCUGCAAGUAUUCAA | | [4158-4176] |
| 578 | ACAGGUACUCUAAGAAUGA | UCAUUCUUAGAGUACCUGU | | [4063-4081] |
| 579 | UCCUUUUUAUCUCUCAAGC | GCUUGAGAGAUAAAAAGGA | | [3958-3976] |
| 580 | UUCCUUUUUAUCUCUCAAG | CUUGAGAGAUAAAAAGGAA | | [3957-3975] |
| 581 | GUUUCCUUUUUAUCUCUCA | UGAGAGAUAAAAAGGAAAC | | [3955-3973] |
| 582 | CUGUGCGAAUAUAGCCUUU | AAAGGCUAUAUUCGCACAG | | [3563-3581] |
| 583 | GGAGGAAAAGGAAAUAAGG | CCUUAUUUCCUUUUCCUCC | | [3211-3229] |
| 584 | GGGAACUAAAACCAGUUUU | AAAACUGGUUUUAGUUCCC | | [3092-3110] |
| 585 | AGGGUUGGAGGUGGAGAAU | AUUCUCCACCUCCAACCCU | | [2658-2676] |
| 586 | AGGGUUCUGCACAUUCUUA | UAAGAAUGUGCAGAACCCU | | [2621-2639] |
| 587 | GGAUUGCCUGAAGGGUUCU | AGAACCCUUCAGGCAAUCC | | [2610-2628] |
| 588 | UCAAGAACAGGCUAAGGAU | AUCCUUAGCCUGUUCUUGA | | [2580-2598] |
| 589 | GUCAAGAACAGGCUAAGGA | UCCUUAGCCUGUUCUUGAC | | [2579-2597] |
| 590 | CUAGGGUCAAGAACAGGCU | AGCCUGUUCUUGACCCUAG | | [2574-2592] |
| 591 | CUGGGCCAGAUGUUCUUUC | GAAAGAACAUCUGGCCCAG | | [2341-2359] |
| 592 | CUCCAGUUUACUAAUACAG | CUGUAUUAGUAAACUGGAG | | [2314-2332] |
| 593 | GGACAUAAUACAUGUUGAG | CUCAACAUGUAUUAUGUCC | | [2251-2269] |
| 594 | GGAAAUUUUCCAGAUCAUU | AAUGAUCUGGAAAAUUUCC | | [2231-2249] |
| 595 | CUACUUUGUGUCAUUUUUG | CAAAAAUGACACAAAGUAG | | [2190-2208] |
| 596 | AGUAAUGUCAGUGGAAGUU | AACUUCCACUGACAUUACU | | [1958-1976] |
| 597 | CUUAAAGGAAUGUCAAAGA | UCUUUGACAUUCCUUUAAG | | [1853-1871] |
| 598 | CCUGAAGCCUUGGCUGAAA | UUUCAGCCAAGGCUUCAGG | Rb, Ms | [1629-1647] |
| 599 | UGCAAGUCAACACCCUAAU | AUUAGGGUGUUGACUUGCA | Rb | [1583-1601] |
| 600 | CAAAAGACUUUGUAUGGAC | GUCCAUACAAAGUCUUUUG | | [1533-1551] |
| 601 | CUACAACAUCUACCUCACU | AGUGAGGUAGAUGUUGUAG | | [1439-1457] |
| 602 | GGGAAAAAUAAAGGAAUGC | GCAUUCCUUUAUUUUUCCC | | [767-785] |
| 603 | UGGAGCUGAACGAAUUGUA | UACAAUUCGUUCAGCUCCA | Rat, Rb, Ms | [680-698] |
| 604 | UCUCCAAGGUUUUCUAUCU | AGAUAGAAAACCUUGGAGA | | [3841-3859] |
| 605 | GCUGUGCGAAUAUAGCCUU | AAGGCUAUAUUCGCACAGC | | [3562-3580] |
| 606 | GAAGACUGGUUUAGGAGGA | UCCUCCUAAACCAGUCUUC | | [3198-3216] |
| 607 | UUCUCCAGCUAGCCCUUAU | AUAAGGGCUAGCUGGAGAA | | [2763-2781] |
| 608 | CCUGCUCCUUGUGCUAUAA | UUAUAGCACAAGGAGCAGG | | [2709-2727] |
| 609 | CCAAUAGGAUUGCCUGAAG | CUUCAGGCAAUCCUAUUGG | | [2604-2622] |
| 610 | AGAACAGGCUAAGGAUACU | AGUAUCCUUAGCCUGUUCU | | [2583-2601] |
| 611 | ACUCCAGUUUACUAAUACA | UGUAUUAGUAAACUGGAGU | | [2313-2331] |
| 612 | CAGAUCAUUAGGACAUAAU | AUUAUGUCCUAAUGAUCUG | | [2241-2259] |
| 613 | AAGGAAAUUUUCCAGAUCA | UGAUCUGGAAAAUUUCCUU | | [2229-2247] |
| 614 | GAAUGUCAAAGAUUGUUUG | CAAACAAUCUUUGACAUUC | | [1860-1878] |
| 615 | ACUUCUAACUUGUCUCUUC | GAAGAGACAAGUUAGAAGU | | [1720-1738]+ |
| 616 | AAGGAAAACUUCUAACUUG | CAAGUUAGAAGUUUUCCUU | | [1713-1731]+ |
| 617 | CCAAUCACUUUGCUGUGCA | UGCACAGCAAAGUGAUUGG | Rat, Rb, Ms | [1477-1495] |
| 618 | GUGGUGAUGUUAGUGGGAG | CUCCCACUAACAUCACCAC | Rat, Rb, Ms | [1221-1239] |
| 619 | GUGGGUCCCAUGUUUCUGU | ACAGAAACAUGGGACCCAC | | [834-852] |
| 620 | UGUCUGGUAUUACCGGGUU | AACCCGGUAAUACCAGACA | | [92-110] |
| 621 | CCCUGUGUUAUCCAGUUAU | AUAACUGGAUAACACAGGG | | [3896-3914] |
| 622 | GCCCUGUGUUAUCCAGUUA | UAACUGGAUAACACAGGGC | | [3895-3913] |
| 623 | AAGACUGGUUUAGGAGGAA | UUCCUCCUAAACCAGUCUU | | [3199-3217] |
| 624 | GGAAGAAGGAGAAAGAGCU | AGCUCUUUCUCCUUCUUCC | | [3167-3185] |
| 625 | AUCAUCAUCAUCAUCCUAA | UUAGGAUGAUGAUGAUGAU | | [2919-2937] |
| 626 | AACAGGCUAAGGAUACUAA | UUAGUAUCCUUAGCCUGUU | | [2585-2603] |
| 627 | CCAGUUUACUAAUACAGCA | UGCUGUAUUAGUAAACUGG | | [2316-2334] |
| 628 | UCCAGAUCAUUAGGACAUA | UAUGUCCUAAUGAUCUGGA | | [2239-2257] |
| 629 | UGUGUCAUUUUUGCCAUCA | UGAUGGCAAAAAUGACACA | | [2196-2214] |
| 630 | UCAUUUUUUUCCUCUCAGU | ACUGAGAGGAAAAAAAUGA | | [1942-1960] |
| 631 | CCCUGAGUAAACAAAGCAU | AUGCUUUGUUUACUCAGGG | | [1648-1666] |
| 632 | GGGACACACAUGCCUUUGA | UCAAAGGCAUGUGUGUCCC | | [1351-1369] |
| 633 | UCAAGUCAGUCUGGUACAA | UUGUACCAGACUGACUUGA | Rb | [1273-1291] |
| 634 | CGUGGAAACUACCUAAGAU | AUCUUAGGUAGUUUCCACG | | [1150-1168] |
| 635 | CAAUGCUUGUGGCUGUGAU | AUCACAGCCACAAGCAUUG | Rb, Ms | [1112-1130] |
| 636 | CCAUCGAGCUACAGAUGAA | UUCAUCUGUAGCUCGAUGG | | [934-952] |
| 637 | GGAGCUGAACGAAUUGUAC | GUACAAUUCGUUCAGCUCC | Rat, Rb, Ms | [681-699] |
| 638 | UUCUUCUGCUUUUGCAAUU | AAUUGCAAAAGCAGAAGAA | | [4126-4144] |
| 639 | UCGCAUCUGUGUGACUAAU | AUUAGUCACACAGAUGCGA | | [2884-2902] |
| 640 | UCCUGCCCAAAGUGGUCUU | AAGACCACUUUGGGCAGGA | | [2746-2764] |
| 641 | AGACUAAUUUCCUGCCCAA | UUGGGCAGGAAAUUAGUCU | | [2737-2755] |
| 642 | CUGCUCCUUGUGCUAUAAA | UUUAUAGCACAAGGAGCAG | | [2710-2728] |
| 643 | UCCUGCUCCUUGUGCUAUA | UAUAGCACAAGGAGCAGGA | | [2708-2726] |
| 644 | ACACCCUAAUACCAGAAUA | UAUUCUGGUAUUAGGGUGU | Rb | [1592-1610] |
| 645 | GUACCUCAGUUAUAAGGAG | CUCCUUAUAACUGAGGUAC | | [3750-3768] |
| 646 | GGAGAGGGUACCUCAGUUA | UAACUGAGGUACCCUCUCC | | [3743-3761] |
| 647 | UGAACGUCUUCCUCUUUGU | ACAAAGAGGAAGACGUUCA | Rb | [76-94] |
| 648 | GAGGUAUACACAUACUGAU | AUCAGUAUGUGUAUACCUC | | [3359-3377] |
| 649 | CAAGAGAGAGUCUCUAAAU | AUUUAGAGACUCUCUCUUG | | [3013-3031] |
| 650 | UCAAGAGAGAGUCUCUAAA | UUUAGAGACUCUCUCUUGA | | [3012-3030] |
| 651 | CUGAGCAUACUCCAGUUUA | UAAACUGGAGUAUGCUCAG | | [2305-2323] |
| 652 | GGCUGAAACCCUGAGUAAA | UUUACUCAGGGUUUCAGCC | | [1640-1658] |
| 653 | UUGGCUGAAACCCUGAGUA | UACUCAGGGUUUCAGCCAA | | [1638-1656] |
| 654 | GGCCCAACUGGGAUAAUGA | UCAUUAUCCCAGUUGGGCC | | [1552-1570] |
| 655 | UCACACCCUUCGCAUCCAU | AUGGAUGCGAAGGGUGUGA | | [1252-1270] |
| 656 | GUGGAAACUACCUAAGAUA | UAUCUUAGGUAGUUUCCAC | | [1151-1169] |
| 657 | GGACAAUACAUUUUUGUCA | UGACAAAAAUGUAUUGUCC | | [978-996] |
| 658 | AUCAUCUCUUUGUGAUCUU | AAGAUCACAAAGAGAUGAU | | [640-658] |
| 659 | CUGAGAAUAUUGGCCCUUU | AAAGGGCCAAUAUUCUCAG | | [3770-3788] |
| 660 | CGCAUCUGUGUGACUAAUG | CAUUAGUCACACAGAUGCG | | [2885-2903] |
| 661 | CGAAGACAACUGGACAGGA | UCCUGUCCAGUUGUCUUCG | Rat, Ms | [285-303] |
| 662 | AGGACAUAAUACAUGUUGA | UCAACAUGUAUUAUGUCCU | | [2250-2268] |
| 663 | UGAUACUCUUUCCACAAUA | UAUUGUGGAAAGAGUAUCA | | [2092-2110] |
| 664 | CUGAAGCCUUGGCUGAAAC | GUUUCAGCCAAGGCUUCAG | Rb, Ms | [1630-1648] |
| 665 | GCCCAACUGGGAUAAUGAA | UUCAUUAUCCCAGUUGGGC | | [1553-1571] |
| 666 | CCUGCCUGAAUUUCAACUG | CAGUUGAAAUUCAGGCAGG | Rat, Ms | [187-205] |
| 667 | CUGGUACAAAUAUUGCAAU | AUUGCAAUAUUUGUACCAG | | [1283-1301] |
| 668 | GCGUGGAAACUACCUAAGA | UCUUAGGUAGUUUCCACGC | | [1149-1167] |
| 669 | AGAAGGUGGUCAUCACCAA | UUGGUGAUGACCACCUUCU | Rb | [892-910] |
| 670 | CGAAUUGUACGUGGGCAGA | UCUGCCCACGUACAAUUCG | | [690-708] |
| 671 | ACGAAUUGUACGUGGGCAG | CUGCCCACGUACAAUUCGU | | [689-707] |
| 672 | AGCUGAACGAAUUGUACGU | ACGUACAAUUCGUUCAGCU | Rat, Rb, Ms | [683-701] |
| 673 | CGAGUCAAUAAUUCUGAUC | GAUCAGAAUUAUUGACUCG | | [402-420] |
| 674 | CUUCUGCUUUUGCAAUUGU | ACAAUUGCAAAAGCAGAAG | | [4128-4146] |
| 675 | CUAUGAGUCAGGCUCUGUU | AACAGAGCCUGACUCAUAG | | [3690-3708] |
| 676 | UGCGAAUAUAGCCUUUCUG | CAGAAAGGCUAUAUUCGCA | | [3566-3584] |
| 677 | GGAGGUAUACACAUACUGA | UCAGUAUGUGUAUACCUCC | | [3358-3376] |
| 678 | CCAUUUCUGGGAACUAAAA | UUUUAGUUCCCAGAAAUGG | | [3084-3102] |
| 679 | UGCCCAAAGUGGUCUUCUC | GAGAAGACCACUUUGGGCA | | [2749-2767] |
| 680 | UGCUCCUUGUGCUAUAAAA | UUUUAUAGCACAAGGAGCA | | [2711-2729] |
| 681 | CCAUGACUCUGGCUCAUCU | AGAUGAGCCAGAGUCAUGG | | [2687-2705] |
| 682 | ACCAAUAGGAUUGCCUGAA | UUCAGGCAAUCCUAUUGGU | | [2603-2621] |
| 683 | GCCAGAUGUUCUUUCUACA | UGUAGAAAGAACAUCUGGC | | [2345-2363] |
| 684 | AUCUGAGCAUACUCCAGUU | AACUGGAGUAUGCUCAGAU | | [2303-2321] |
| 685 | GAAAUCUGCUGUCCUUCCU | AGGAAGGACAGCAGAUUUC | | [232-250] |
| 686 | UGUAAUGGUUUUCCCUUAA | UUAAGGGAAAACCAUUACA | | [1839-1857] |
| 687 | UGGCUGAAACCCUGAGUAA | UUACUCAGGGUUUCAGCCA | | [1639-1657] |
| 688 | CAAGUCAACACCCUAAUAC | GUAUUAGGGUGUUGACUUG | Rb | [1585-1603] |
| 689 | CCCAACUGGGAUAAUGAAU | AUUCAUUAUCCCAGUUGGG | | [1554-1572] |
| 690 | ACGGCCCAACUGGGAUAAU | AUUAUCCCAGUUGGGCCGU | | [1550-1568] |
| 691 | CAAUCACUUUGCUGUGCAC | GUGCACAGCAAAGUGAUUG | Rat, Rb, Ms | [1478-1496] |
| 692 | CUGCAGCCUGCCUGAAUUU | AAAUUCAGGCAGGCUGCAG | Rat, Ms | [181-199] |
| 693 | UGCGUGGAAACUACCUAAG | CUUAGGUAGUUUCCACGCA | | [1148-1166] |
| 694 | UCAAAACCAUCGAGCUACA | UGUAGCUCGAUGGUUUUGA | | [928-946] |
| 695 | UCAGUUUGCUGGAAACCCU | AGGGUUUCCAGCAAACUGA | | [794-812] |
| 696 | UUGCUCGAAAGAGAAUAAA | UUUAUUCUCUUUCGAGCAA | | [478-496] |
| 697 | UGCCCUGUGUUAUCCAGUU | AACUGGAUAACACAGGGCA | | [3894-3912] |
| 698 | UGCAUAAUUAAAACCAGCU | AGCUGGUUUUAAUUAUGCA | | [3799-3817] |
| 699 | GGCCCUUUCUAACCUAUGU | ACAUAGGUUAGAAAGGGCC | | [3781-3799] |
| 700 | CAAUUCUUUACACCAAAGU | ACUUUGGUGUAAAGAAUUG | | [3717-3735] |
| 701 | UCACAAAUUUUGAUGCUGA | UCAGCAUCAAAAUUUGUGA | | [3420-3438] |
| 702 | UCAUAUUGGUCAUUCCCUG | CAGGGAAUGACCAAUAUGA | | [3296-3314] |
| 703 | CCCAUUUCUGGGAACUAAA | UUUAGUUCCCAGAAAUGGG | | [3083-3101] |
| 704 | UCUUAGAACUGCUCCCAUU | AAUGGGAGCAGUUCUAAGA | | [3070-3088] |
| 705 | CCAGAAACAAAAAUCUCUA | UAGAGAUUUUUGUUUCUGG | | [2948-2966] |
| 706 | GUGACAAAUAUGUAUCUGA | UCAGAUACAUAUUUGUCAC | | [2802-2820] |
| 707 | UCACCUUUCAUAAAAUGGU | ACCAUUUUAUGAAAGGUGA | | [307-325] |
| 708 | AGGAAUCUCACCUUUCAUA | UAUGAAAGGUGAGAUUCCU | | [300-318] |
| 709 | GGAUACUAACCAAUAGGAU | AUCCUAUUGGUUAGUAUCC | | [2595-2613] |
| 710 | GGAUACUCAAGUAAGUUUU | AAAACUUACUUGAGUAUCC | | [2430-2448] |
| 711 | UGAGCAUACUCCAGUUUAC | GUAAACUGGAGUAUGCUCA | | [2306-2324] |
| 712 | GAGAGUGUCUCAACACUUA | UAAGUGUUGAGACACUCUC | | [2267-2285] |
| 713 | UUCCAGAUCAUUAGGACAU | AUGUCCUAAUGAUCUGGAA | | [2238-2256] |
| 714 | UCAGUAACUUCCCUAAGAU | AUCUUAGGGAAGUUACUGA | | [2032-2050] |
| 715 | UUCAUUUUUUUCCUCUCAG | CUGAGAGGAAAAAAAUGAA | | [1941-1959] |
| 716 | GCAUCUCCAACUCUGAGUC | GACUCAGAGUUGGAGAUGC | Rat, Rb | [1663-1681] |
| 717 | AUACCAGAAUAGGAGUUUU | AAAACUCCUAUUCUGGUAU | Rb | [1600-1618] |
| 718 | UAAUACCAGAAUAGGAGUU | AACUCCUAUUCUGGUAUUA | Rb | [1598-1616] |
| 719 | UGCACCAUGAUGAGGAGAA | UUCUCCUCAUCAUGGUGCA | Rb, Ms | [1492-1510] |
| 720 | AGGCCAAUCACUUUGCUGU | ACAGCAAAGUGAUUGGCCU | Rat, Rb, Ms | [1474-1492] |
| 721 | ACCUAAGAUAGCGGUUGAU | AUCAACCGCUAUCUUAGGU | | [1160-1178] |
| 722 | CUACCUAAGAUAGCGGUUG | CAACCGCUAUCUUAGGUAG | | [1158-1176] |
| 723 | GUGAUAAGCAGGAGUUUCA | UGAAACUCCUGCUUAUCAC | Rat, Rb | [1126-1144] |
| 724 | CUGUGAUAAGCAGGAGUUU | AAACUCCUGCUUAUCACAG | Rat, Rb | [1124-1142] |
| 725 | CUGGAGUGGCACCCUUUUA | UAAAAGGGUGCCACUCCAG | | [1017-1035] |
| 726 | UCCCUCAGUUUGCUGGAAA | UUUCCAGCAAACUGAGGGA | | [790-808] |
| 727 | ACCAAAACCAUCCGGAGGU | ACCUCCGGAUGGUUUUGGU | | [594-612] |
| 728 | GCAAAAUGAAAGUUAUCUC | GAGAUAACUUUCAUUUUGC | | [455-473] |
| 729 | UCAGUUAUAAGGAGUCUGA | UCAGACUCCUUAUAACUGA | | [3755-3773] |
| 730 | CCUCAGUUAUAAGGAGUCU | AGACUCCUUAUAACUGAGG | | [3753-3771] |
| 731 | CUUUACACCAAAGUAUGAA | UUCAUACUUUGGUGUAAAG | | [3722-3740] |
| 732 | CUAAAUAAGAACUCAGUUG | CAACUGAGUUCUUAUUUAG | | [3467-3485] |
| 733 | ACACAUACUGAUGUUGUUU | AAACAACAUCAGUAUGUGU | | [3366-3384] |
| 734 | GUAUACACAUACUGAUGUU | AACAUCAGUAUGUGUAUAC | | [3362-3380] |
| 735 | UCCCAUUUCUGGGAACUAA | UUAGUUCCCAGAAAUGGGA | | [3082-3100] |
| 736 | GCAGACUAAUUUCCUGCCC | GGGCAGGAAAUUAGUCUGC | | [2735-2753] |
| 737 | UGCCAUGACUCUGGCUCAU | AUGAGCCAGAGUCAUGGCA | | [2685-2703] |
| 738 | GAAUUAACCUCCUGCCAUG | CAUGGCAGGAGGUUAAUUC | | [2673-2691] |
| 739 | UGGACAGGAAUCUCACCUU | AAGGUGAGAUUCCUGUCCA | | [295-313] |
| 740 | CUGUCAUAGACCAAAGGAA | UUCCUUUGGUCUAUGACAG | | [2544-2562] |
| 741 | CGGAUACUCAAGUAAGUUU | AAACUUACUUGAGUAUCCG | | [2429-2447] |
| 742 | GGAGUUAAUGUAAUACUCA | UGAGUAUUACAUUAACUCC | | [2383-2401] |
| 743 | AGCAUACUCCAGUUUACUA | UAGUAAACUGGAGUAUGCU | | [2308-2326] |
| 744 | CUGAAGGAAAUUUUCCAGA | UCUGGAAAAUUUCCUUCAG | | [2226-2244] |
| 745 | CCCAAAAGAAGAAGGAAAC | GUUUCCUUCUUCUUUUGGG | | [2151-2169] |
| 746 | AUACUGAGCUGCCUCAGAA | UUCUGAGGCAGCUCAGUAU | | [2108-2126] |
| 747 | GCCCAUCUUACUCCAGGUU | AACCUGGAGUAAGAUGGGC | | [2073-2091] |
| 748 | GGACUCAAUUUUAGAAUCA | UGAUUCUAAAAUUGAGUCC | | [1992-2010] |
| 749 | AUGUAAUGGUUUUCCCUUA | UAAGGGAAAACCAUUACAU | | [1838-1856] |
| 750 | CACCCUAAUACCAGAAUAG | CUAUUCUGGUAUUAGGGUG | Rb | [1593-1611] |
| 751 | AACACCCUAAUACCAGAAU | AUUCUGGUAUUAGGGUGUU | Rb | [1591-1609] |
| 752 | UCACUUUGCUGUGCACCAU | AUGGUGCACAGCAAAGUGA | Rb, Ms | [1481-1499] |
| 753 | AGAGCCAGAUGCAGGAAAG | CUUUCCUGCAUCUGGCUCU | | [1399-1417] |
| 754 | GAGAGCCAGAUGCAGGAAA | UUUCCUGCAUCUGGCUCUC | | [1398-1416] |
| 755 | UUGCUGGAAACCCUCCUAU | AUAGGAGGGUUUCCAGCAA | | [799-817] |
| 756 | CCCUCAGUUUGCUGGAAAC | GUUUCCAGCAAACUGAGGG | | [791-809] |
| 757 | AAAUAAAGGAAUGCCCAAU | AUUGGGCAUUCCUUUAUUU | | [772-790] |
| 758 | GUCUGGUAUUACCGGGUUU | AAACCCGGUAAUACCAGAC | | [93-111] |
| 759 | ACCAUCCGGAGGUCUUACU | AGUAAGACCUCCGGAUGGU | | [600-618] |
| 760 | UGCUUUUGCAAUUGUGUUU | AAACACAAUUGCAAAAGCA | | [4132-4150] |
| 761 | CCGAGAGUGUUUCUCCAAG | CUUGGAGAAACACUCUCGG | | [3830-3848] |
| 762 | UUGGCCCUUUCUAACCUAU | AUAGGUUAGAAAGGGCCAA | | [3779-3797] |
| 763 | UCUGAGAAUAUUGGCCCUU | AAGGGCCAAUAUUCUCAGA | | [3769-3787] |
| 764 | ACCUCAGUUAUAAGGAGUC | GACUCCUUAUAACUGAGGU | | [3752-3770] |
| 765 | GCACAUCUAUUUAAUGUGG | CCACAUUAAAUAGAUGUGC | | [366-384] |
| 766 | CUGACAAAUAAGGCCUGCU | AGCAGGCCUUAUUUGUCAG | | [3546-3564] |
| 767 | GAACUAAAUAAGAACUCAG | CUGAGUUCUUAUUUAGUUC | | [3464-3482] |
| 768 | CACAUACUGAUGUUGUUUU | AAAACAACAUCAGUAUGUG | | [3367-3385] |
| 769 | AGGAGGUAUACACAUACUG | CAGUAUGUGUAUACCUCCU | | [3357-3375] |
| 770 | GCCAAGAGCAGGGUUUUCU | AGAAAACCCUGCUCUUGGC | | [3045-3063] |
| 771 | CACCUUUCAUAAAAUGGUG | CACCAUUUUAUGAAAGGUG | | [308-326] |
| 772 | UCUCACCUUUCAUAAAAUG | CAUUUUAUGAAAGGUGAGA | | [305-323] |
| 773 | CAGACUAAUUUCCUGCCCA | UGGGCAGGAAAUUAGUCUG | | [2736-2754] |
| 774 | GUGGAGAAUUAACCUCCUG | CAGGAGGUUAAUUCUCCAC | | [2668-2686] |
| 775 | GCUAAGGAUACUAACCAAU | AUUGGUUAGUAUCCUUAGC | | [2590-2608] |
| 776 | UGGAGUUAAUGUAAUACUC | GAGUAUUACAUUAACUCCA | | [2382-2400] |
| 777 | CAGUUUACUAAUACAGCAG | CUGCUGUAUUAGUAAACUG | | [2317-2335] |
| 778 | UCUGAGCAUACUCCAGUUU | AAACUGGAGUAUGCUCAGA | | [2304-2322] |
| 779 | ACCCUGAGUAAACAAAGCA | UGCUUUGUUUACUCAGGGU | | [1647-1665] |
| 780 | GCCUGAAACAAAAGACUUU | AAAGUCUUUUGUUUCAGGC | | [1525-1543] |
| 781 | GCCUGCCUGAAUUUCAACU | AGUUGAAAUUCAGGCAGGC | Rat, Ms | [186-204] |
| 782 | ACCAAUCUGAAGCUCAAAA | UUUUGAGCUUCAGAUUGGU | | [1308-1326] |
| 783 | GGGCUGUUCAAUGCUUGUG | CACAAGCAUUGAACAGCCC | Rb | [1104-1122] |
| 784 | CCCUUUCAAAACCAUCGAG | CUCGAUGGUUUUGAAAGGG | | [923-941] |
| 785 | GGAUAGUGGGUCCCAUGUU | AACAUGGGACCCACUAUCC | Rb | [829-847] |
| 786 | GCUGUGCAUAAUAUAACAG | CUGUUAUAUUAUGCACAGC | | [723-741] |
| 787 | UCACGCUGUGCCUCAUAUU | AAUAUGAGGCACAGCGUGA | | [559-577] |
| 788 | GAGGGUACCUCAGUUAUAA | UUAUAACUGAGGUACCCUC | | [3746-3764] |
| 789 | ACACUUAGGUCCAGCCUGU | ACAGGCUGGACCUAAGUGU | | [3614-3632] |
| 790 | UGACAAAUAAGGCCUGCUG | CAGCAGGCCUUAUUUGUCA | | [3547-3565] |
| 791 | GUCUGACAAAUAAGGCCUG | CAGGCCUUAUUUGUCAGAC | | [3544-3562] |
| 792 | GUCACAAAUUUUGAUGCUG | CAGCAUCAAAAUUUGUGAC | | [3419-3437] |
| 793 | GGAUGAUUGCACUUCACUC | GAGUGAAGUGCAAUCAUCC | | [331-349] |
| 794 | GCAUGGAUGAUUGCACUUC | GAAGUGCAAUCAUCCAUGC | | [327-345] |
| 795 | UGGGAACUAAAACCAGUUU | AAACUGGUUUUAGUUCCCA | | [3091-3109] |
| 796 | UGGCCAAGAGCAGGGUUUU | AAAACCCUGCUCUUGGCCA | | [3043-3061] |
| 797 | AGAUCAAAUUCACACUCAA | UUGAGUGUGAAUUUGAUCU | | [2972-2990] |
| 798 | GCAUCUGUGUGACUAAUGG | CCAUUAGUCACACAGAUGC | | [2886-2904] |
| 799 | CGUAAAUACACACACAAAA | UUUUGUGUGUGUAUUUACG | | [2861-2879] |
| 800 | CCGUAAAUACACACACAAA | UUUGUGUGUGUAUUUACGG | | [2860-2878] |
| 801 | CCAAAGUGGUCUUCUCCAG | CUGGAGAAGACCACUUUGG | | [2752-2770] |
| 802 | CAGGAAUCUCACCUUUCAU | AUGAAAGGUGAGAUUCCUG | | [299-317] |
| 803 | AGGAUUGCCUGAAGGGUUC | GAACCCUUCAGGCAAUCCU | | [2609-2627] |
| 804 | GGCUAAGGAUACUAACCAA | UUGGUUAGUAUCCUUAGCC | | [2589-2607] |
| 805 | CUAUUACUGUCAUAGACCA | UGGUCUAUGACAGUAAUAG | | [2538-2556] |
| 806 | UGUUCUUUCUACAGAAGAA | UUCUUCUGUAGAAAGAACA | | [2351-2369] |
| 807 | AGAUGUUCUUUCUACAGAA | UUCUGUAGAAAGAACAUCU | | [2348-2366] |
| 808 | AGAGUGUCUCAACACUUAU | AUAAGUGUUGAGACACUCU | | [2268-2286] |
| 809 | UGCUCAACAAGAGUUCGAA | UUCGAACUCUUGUUGAGCA | | [270-288] |
| 810 | GGUUCAGUAACUUCCCUAA | UUAGGGAAGUUACUGAACC | | [2029-2047] |
| 811 | CUGCCAAAUGCUCAAAUAA | UUAUUUGAGCAUUUGGCAG | | [1764-1782] |
| 812 | GUGCUGCCAAAUGCUCAAA | UUUGAGCAUUUGGCAGCAC | | [1761-1779] |
| 813 | UCUCUUCCAUGAGGAAAUA | UAUUUCCUCAUGGAAGAGA | | [1732-1750] |
| 814 | UGAGUAAACAAAGCAUCUC | GAGAUGCUUUGUUUACUCA | | [1651-1669] |
| 815 | GAAUAGGAGUUUUCCUCUG | CAGAGGAAAACUCCUAUUC | Rb | [1606-1624] |
| 816 | CCCUAAUACCAGAAUAGGA | UCCUAUUCUGGUAUUAGGG | Rb | [1595-1613] |
| 817 | UCAACUGCAUGCUGAUUCU | AGAAUCAGCAUGCAGUUGA | | [199-217] |
| 818 | CCAUUUUUGUCAUUCUGGU | ACCAGAAUGACAAAAAUGG | | [46-64] |
| 819 | GGCCAAUCACUUUGCUGUG | CACAGCAAAGUGAUUGGCC | Rat, Rb, Ms | [1475-1493] |
| 820 | UGCCUGAAUUUCAACUGCA | UGCAGUUGAAAUUCAGGCA | Rat | [189-207] |
| 821 | CAGCCUGCCUGAAUUUCAA | UUGAAAUUCAGGCAGGCUG | Rat, Ms | [184-202] |
| 822 | GCUGUGAUAAGCAGGAGUU | AACUCCUGCUUAUCACAGC | Rat, Rb, Ms | [1123-1141] |
| 823 | UGGCUGUGAUAAGCAGGAG | CUCCUGCUUAUCACAGCCA | Rat, Rb, Ms | [1121-1139] |
| 824 | GUGGCUGUGAUAAGCAGGA | UCCUGCUUAUCACAGCCAC | Rat, Rb, Ms | [1120-1138] |
| 825 | GGGACAAUACAUUUUUGUC | GACAAAAAUGUAUUGUCCC | | [977-995] |
| 826 | GGAAACCCUCCUAUGACUU | AAGUCAUAGGAGGGUUUCC | Rat, Ms | [804-822] |
| 827 | CUGUGCAUAAUAUAACAGU | ACUGUUAUAUUAUGCACAG | | [724-742] |
| 828 | CUGGUAUUACCGGGUUUAU | AUAAACCCGGUAAUACCAG | | [95-113] |
| 829 | UCAUCACGCUGUGCCUCAU | AUGAGGCACAGCGUGAUGA | | [556-574] |
| 830 | CUCGAAAGAGAAUAAAGAA | UUCUUUAUUCUCUUUCGAG | | [481-499] |
| 831 | GACUAUGAAGGUUUUUCUU | AAGAAAAACCUUCAUAGUC | | [4105-4123] |
| 832 | UGAGAAUAUUGGCCCUUUC | GAAAGGGCCAAUAUUCUCA | | [3771-3789] |
| 833 | UGGAGAGGGUACCUCAGUU | AACUGAGGUACCCUCUCCA | | [3742-3760] |
| 834 | GUCAGGCUCUGUUUAUUGU | ACAAUAAACAGAGCCUGAC | | [3696-3714] |
| 835 | CUGCACCUCAGGUAUCAAU | AUUGAUACCUGAGGUGCAG | | [3638-3656] |
| 836 | CUCUGCGAUUCACACCAUU | AAUGGUGUGAAUCGCAGAG | | [347-365] |
| 837 | GAACUCAGUUGUUCUUUGU | ACAAAGAACAACUGAGUUC | | [3475-3493] |
| 838 | GUCUCAUAUUGGUCAUUCC | GGAAUGACCAAUAUGAGAC | | [3293-3311] |
| 839 | CUAAAUCACUGUUAGUGUG | CACACUAACAGUGAUUUAG | | [3026-3044] |
| 840 | UCACACUCAAUAGUAUGUU | AACAUACUAUUGAGUGUGA | | [2981-2999] |
| 841 | CACACAAAAUGGAUCGCAU | AUGCGAUCCAUUUUGUGUG | | [2871-2889] |
| 842 | GGAAUCUGAUUCUCCCUAG | CUAGGGAGAAUCAGAUUCC | | [2559-2577] |
| 843 | CCAAAGGAAUCUGAUUCUC | GAGAAUCAGAUUCCUUUGG | | [2554-2572] |
| 844 | CAACACUUAUUAGUGACAG | CUGUCACUAAUAAGUGUUG | | [2277-2295] |
| 845 | UCAACACUUAUUAGUGACA | UGUCACUAAUAAGUGUUGA | | [2276-2294] |
| 846 | GUGCUGCUCAACAAGAGUU | AACUCUUGUUGAGCAGCAC | | [266-284] |
| 847 | CCCAUCUUACUCCAGGUUU | AAACCUGGAGUAAGAUGGG | | [2074-2092] |
| 848 | UAAUGGUUUUCCCUUAAAG | CUUUAAGGGAAAACCAUUA | | [1841-1859] |
| 849 | CCUAAUACCAGAAUAGGAG | CUCCUAUUCUGGUAUUAGG | Rb | [1596-1614] |
| 850 | UUGCAAGUCAACACCCUAA | UUAGGGUGUUGACUUGCAA | Rb | [1582-1600] |
| 851 | GCCAAUCACUUUGCUGUGC | GCACAGCAAAGUGAUUGGC | Rat, Rb, Ms | [1476-1494] |
| 852 | UCAGGCCAAUCACUUUGCU | AGCAAAGUGAUUGGCCUGA | Rat, Ms | [1472-1490] |
| 853 | GGCUGUGAUAAGCAGGAGU | ACUCCUGCUUAUCACAGCC | Rat, Rb, Ms | [1122-1140] |
| 854 | AGUGCCCAAAGGUGUCCAA | UUGGACACCUUUGGGCACU | | [997-1015] |
| 855 | CCUCCUAUGACUUGGAAAU | AUUUCCAAGUCAUAGGAGG | Rat, Ms | [810-828] |
| 856 | ACCCUCCUAUGACUUGGAA | UUCCAAGUCAUAGGAGGGU | Rat, Ms | [808-826] |
| 857 | UCUGGUAUUACCGGGUUUA | UAAACCCGGUAAUACCAGA | | [94-112] |
| 858 | AUCACGCUGUGCCUCAUAU | AUAUGAGGCACAGCGUGAU | | [558-576] |
| 859 | AUCUCAAUUUUGCUCGAAA | UUUCGAGCAAAAUUGAGAU | | [469-487] |
| 860 | UUCUGAUCCUUAUUCAGUA | UACUGAAUAAGGAUCAGAA | | [413-431] |
| 861 | CUGCUUUUGCAAUUGUGUU | AACACAAUUGCAAAAGCAG | | [4131-4149] |
| 862 | UGAAGGUUUUUCUUAGUUC | GAACUAAGAAAAACCUUCA | | [4110-4128] |
| 863 | CCUGUGUUAUCCAGUUAUG | CAUAACUGGAUAACACAGG | | [3897-3915] |
| 864 | CCAGCUUCAUUUGUUGCUC | GAGCAACAAAUGAAGCUGG | | [3812-3830] |
| 865 | CACAUCUAUUUAAUGUGGA | UCCACAUUAAAUAGAUGUG | | [367-385] |
| 866 | GGGUACCUCAGUUAUAAGG | CCUUAUAACUGAGGUACCC | | [3748-3766] |
| 867 | GAGAGGGUACCUCAGUUAU | AUAACUGAGGUACCCUCUC | | [3744-3762] |
| 868 | CACCUCAGGUAUCAAUUCA | UGAAUUGAUACCUGAGGUG | | [3641-3659] |
| 869 | GCACCUCAGGUAUCAAUUC | GAAUUGAUACCUGAGGUGC | | [3640-3658] |
| 870 | UCACACUGCACCUCAGGUA | UACCUGAGGUGCAGUGUGA | | [3633-3651] |
| 871 | ACUCUGCGAUUCACACCAU | AUGGUGUGAAUCGCAGAGU | | [346-364] |
| 872 | AGAACUCAGUUGUUCUUUG | CAAAGAACAACUGAGUUCU | | [3474-3492] |
| 873 | GGUCACAAAUUUUGAUGCU | AGCAUCAAAAUUUGUGACC | | [3418-3436] |
| 874 | CUGGGAACUAAAACCAGUU | AACUGGUUUUAGUUCCCAG | | [3090-3108] |
| 875 | GGCAUGGAUGAUUGCACUU | AAGUGCAAUCAUCCAUGCC | | [326-344] |
| 876 | GAGAGAGUCUCUAAAUCAC | GUGAUUUAGAGACUCUCUC | | [3016-3034] |
| 877 | CUGAAUAUAUGUUCAAGAG | CUCUUGAACAUAUAUUCAG | | [3000-3018] |
| 878 | ACACUCAAUAGUAUGUUCU | AGAACAUACUAUUGAGUGU | | [2983-3001] |
| 879 | CUCUAUACAGAGAUCAAAU | AUUUGAUCUCUGUAUAGAG | | [2962-2980] |
| 880 | CCUAAAAUUAACAACCCAG | CUGGGUUGUUAAUUUUAGG | | [2933-2951] |
| 881 | GGAUCGCAUCUGUGUGACU | AGUCACACAGAUGCGAUCC | | [2881-2899] |
| 882 | UCCGUAAAUACACACACAA | UUGUGUGUGUAUUUACGGA | | [2859-2877] |
| 883 | GGUGGAGAAUUAACCUCCU | AGGAGGUUAAUUCUCCACC | | [2667-2685] |
| 884 | GCACAUUCUUAUUUGAAGC | GCUUCAAAUAAGAAUGUGC | | [2629-2647] |
| 885 | GACAACUGGACAGGAAUCU | AGAUUCCUGUCCAGUUGUC | | [289-307] |
| 886 | GAAUGAAUUUAGAACCACA | UGUGGUUCUAAAUUCAUUC | | [2460-2478] |
| 887 | GAGAGCGGAUACUCAAGUA | UACUUGAGUAUCCGCUCUC | | [2424-2442] |
| 888 | GGGCCAGAUGUUCUUUCUA | UAGAAAGAACAUCUGGCCC | | [2343-2361] |
| 889 | GUGACAGUAUUGACAUCUG | CAGAUGUCAAUACUGUCAC | | [2289-2307] |
| 890 | GAGUGUCUCAACACUUAUU | AAUAAGUGUUGAGACACUC | | [2269-2287] |
| 891 | CUGCUCAACAAGAGUUCGA | UCGAACUCUUGUUGAGCAG | | [269-287] |
| 892 | GAAACCAAGGAGUAGCUAU | AUAGCUACUCCUUGGUUUC | | [2165-2183] |
| 893 | AGGUUCAGUAACUUCCCUA | UAGGGAAGUUACUGAACCU | | [2028-2046] |
| 894 | CUCUAUGGUUUUGAGAGCA | UGCUCUCAAAACCAUAGAG | | [1906-1924] |
| 895 | CCCUUAAAGGAAUGUCAAA | UUUGACAUUCCUUUAAGGG | | [1851-1869] |
| 896 | GUGGGUUGUGCUGCCAAAU | AUUUGGCAGCACAACCCAC | | [1754-1772] |
| 897 | CUCUUCCAUGAGGAAAUAA | UUAUUUCCUCAUGGAAGAG | | [1733-1751] |
| 898 | GGCCUGAAACAAAAGACUU | AAGUCUUUUGUUUCAGGCC | | [1524-1542] |
| 899 | GCAGCCUGCCUGAAUUUCA | UGAAAUUCAGGCAGGCUGC | Rat, Ms | [183-201] |
| 900 | UCACCAAGGUGGUCACUCA | UGAGUGACCACCUUGGUGA | Rb | [904-922] |
| 901 | GUAUCUCUGUGAGAGGUUG | CAACCUCUCACAGAGAUAC | | [851-869] |
| 902 | CUGUAUCUCUGUGAGAGGU | ACCUCUCACAGAGAUACAG | | [849-867] |
| 903 | UGGAAACCCUCCUAUGACU | AGUCAUAGGAGGGUUUCCA | Ms | [803-821] |
| 904 | CCCAAUCCCUCAGUUUGCU | AGCAAACUGAGGGAUUGGG | | [785-803] |
| 905 | UCAUUGGCCUUGCCAUCCA | UGGAUGGCAAGGCCAAUGA | | [661-679] |
| 906 | AGAGGGUACCUCAGUUAUA | UAUAACUGAGGUACCCUCU | | [3745-3763] |
| 907 | UGCACAUCUAUUUAAUGUG | CACAUUAAAUAGAUGUGCA | | [365-383] |
| 908 | ACCAGGAUGGUUUCUGCUU | AAGCAGAAACCAUCCUGGU | | [3591-3609] |
| 909 | GCGAUUCACACCAUUGCAC | GUGCAAUGGUGUGAAUCGC | | [351-369] |
| 910 | CUAUUCCUUUCGUCUCCCA | UGGGAGACGAAAGGAAUAG | | [3501-3519] |
| 911 | UACACAUACUGAUGUUGUU | AACAACAUCAGUAUGUGUA | | [3365-3383] |
| 912 | GGUAUACACAUACUGAUGU | ACAUCAGUAUGUGUAUACC | | [3361-3379] |
| 913 | GGGCAGAAGACUGGUUUAG | CUAAACCAGUCUUCUGCCC | | [3193-3211] |
| 914 | GAAGGGCAGAAGACUGGUU | AACCAGUCUUCUGCCCUUC | | [3190-3208] |
| 915 | CUCCCAUUUCUGGGAACUA | UAGUUCCCAGAAAUGGGAG | | [3081-3099] |
| 916 | AGAGAGAGUCUCUAAAUCA | UGAUUUAGAGACUCUCUCU | | [3015-3033] |
| 917 | UCUCUAUACAGAGAUCAAA | UUUGAUCUCUGUAUAGAGA | | [2961-2979] |
| 918 | CCCAGAAACAAAAAUCUCU | AGAGAUUUUUGUUUCUGGG | | [2947-2965] |
| 919 | ACAAAAUGGAUCGCAUCUG | CAGAUGCGAUCCAUUUUGU | | [2874-2892] |
| 920 | GACUCUGGCUCAUCUAGUC | GACUAGAUGAGCCAGAGUC | | [2691-2709] |
| 921 | CACAUUCUUAUUUGAAGCA | UGCUUCAAAUAAGAAUGUG | | [2630-2648] |

TABLE A6

CYBB 19-mer oligomer pairs - cytochrome b-245,
beta polypeptide 19 MER

| | | | | |
|---|---|---|---|---|
| | | | | Human-6996020 |
| No. | Sense siRNA | AntiSense siRNA | Other Sp | ORF: 15-1727 |

| | | | | |
|---|---|---|---|---|
| 1 | GGACAAAAAGAAACUAUAA | UUAUAGUUUCUUUUUGUCC | | [1820-1838] |
| 2 | CCACCAAUCUGAAGCUCAA | UUGAGCUUCAGAUUGGUGG | | [1306-1324] |
| 3 | GCUUAAAAAUGGACAAAAA | UUUUUGUCCAUUUUUAAGC | | [1810-1828] |
| 4 | GGACUAGGAUGAACUAAAU | AUUUAGUUCAUCCUAGUCC | | [3454-3472] |
| 5 | CCAGUUAUGAGAUAAAAAA | UUUUUUAUCUCAUAACUGG | | [3907-3925] |
| 6 | GAGUGAGAGAAAAUAAAAA | UUUUUAUUUUCUCUCACUC | | [3246-3264] |
| 7 | GCUCAACUAUUAAAAUGAA | UUCAUUUUAAUAGUUGAGC | | [4239-4257] |
| 8 | GAUGAAGCAUUGUUUUUAA | UUAAAAACAAUGCUUCAUC | | [4080-4098] |
| 9 | GGGUAGGUCUGACAAAUAA | UUAUUUGUCAGACCUACCC | | [3538-3556] |
| 10 | GCACCAUGAUGAGGAGAAA | UUUCUCCUCAUCAUGGUGC | Ms, Rb | [1493-1511] |
| 11 | CCUUGUGCUAUAAAAUAAA | UUUAUUUUAUAGCACAAGG | | [2715-2733] |
| 12 | GGUAUUGAAUCUUUUAAAA | UUUUAAAAGAUUCAAUACC | | [3396-3414] |
| 13 | CAAGACAAUUGCAAGUCAA | UUGACUUGCAAUUGUCUUG | Rb | [1574-1592] |
| 14 | GGUCAUUUGUUUUAAAUAA | UUAUUUAAAACAAAUGACC | | [2824-2842] |
| 15 | AACUGUGCUCAACUAUUAA | UUAAUAGUUGAGCACAGUU | | [4233-4251] |
| 16 | AACCUAUGUGCAUAAUUAA | UUAAUUAUGCACAUAGGUU | | [3791-3809] |
| 17 | AACAGUUUGUGAACAAAAA | UUUUUGUUCACAAACUGUU | | [737-755] |
| 18 | CAAUAAUUCUGAUCCUUAU | AUAAGGAUCAGAAUUAUUG | | [407-425] |
| 19 | GUUUGAUAGUGAUAAGUUA | UAACUUAUCACUAUCAAAC | | [1874-1892] |
| 20 | GAUUAUCUAUGGUAUUGAA | UUCAAUACCAUAGAUAAUC | | [3386-3404] |
| 21 | GGUUGGAGGUGGAGAAUUA | UAAUUCUCCACCUCCAACC | | [2660-2678] |
| 22 | GAAGACAACUGGACAGGAA | UUCCUGUCCAGUUGUCUUC | Rat, Ms | [286-304] |
| 23 | GCUCGAAAGAGAAUAAAGA | UCUUUAUUCUCUUUCGAGC | | [480-498] |
| 24 | AGAUCAUUAGGACAUAAUA | UAUUAUGUCCUAAUGAUCU | | [2242-2260] |
| 25 | GAUUGGAGUUAAUGUAAUA | UAUUACAUUAACUCCAAUC | | [2379-2397] |
| 26 | UGGACAAAAAGAAACUAUA | UAUAGUUUCUUUUUGUCCA | | [1819-1837] |
| 27 | GCAAGUCAACACCCUAAUA | UAUUAGGGUGUUGACUUGC | Rb | [1584-1602] |
| 28 | GCAGAGAGCGGAUACUCAA | UUGAGUAUCCGCUCUCUGC | | [2421-2439] |
| 29 | AGUGCUUGUCAUUAUAAAA | UUUUAUAAUGACAAGCACU | | [3936-3954] |
| 30 | ACUCAAUUUUAGAAUCAAA | UUUGAUUCUAAAAUUGAGU | | [1994-2012] |
| 31 | CCGGAGGUCUUACUUUGAA | UUCAAAGUAAGACCUCCGG | Rb | [605-623] |
| 32 | GACUAAUGGUUUAUUUGUA | UACAAAUAAACCAUUAGUC | | [2896-2914] |
| 33 | UCACAGGCCUGAAACAAAA | UUUUGUUUCAGGCCUGUGA | | [1519-1537] |
| 34 | AGAGUGAGAGAAAAUAAAA | UUUUAUUUUCUCUCACUCU | | [3245-3263] |
| 35 | GAUAAUGAAUUCAAGACAA | UUGUCUUGAAUUCAUUAUC | | [1563-1581] |
| 36 | GACUCAAUUUUAGAAUCAA | UUGAUUCUAAAAUUGAGUC | | [1993-2011] |
| 37 | CAGUUAUGAGAUAAAAAAU | AUUUUUUAUCUCAUAACUG | | [3908-3926] |
| 38 | AAACUGUGCUCAACUAUUA | UAAUAGUUGAGCACAGUUU | | [4232-4250] |
| 39 | GGAACUGGGCUGUGAAUGA | UCAUUCACAGCCCAGUUCC | Rat | [19-37] |
| 40 | GCAUUGUUUUUAAUCUUAA | UUAAGAUUAAAAACAAUGC | | [4086-4104] |
| 41 | GCGAAUAUAGCCUUUCUGA | UCAGAAAGGCUAUAUUCGC | | [3567-3585] |
| 42 | GAAUCUCACCUUUCAUAAA | UUUAUGAAAGGUGAGAUUC | | [302-320] |
| 43 | CAUCCAUGGAGCUGAACGA | UCGUUCAGCUCCAUGGAUG | Rat, Ms, Rb | [674-692] |
| 44 | CAACUUCGGUAAUGAGGAA | UUCCUCAUUACCGAAGUUG | | [3152-3170] |
| 45 | ACCUAUGUGCAUAAUUAAA | UUUAAUUAUGCACAUAGGU | | [3792-3810] |
| 46 | AGUGAGAGAAAAUAAAAAA | UUUUUUAUUUUCUCUCACU | | [3247-3265] |
| 47 | CACCAAUCUGAAGCUCAAA | UUUGAGCUUCAGAUUGGUG | | [1307-1325] |
| 48 | CCUAUGUGCAUAAUUAAAA | UUUUAAUUAUGCACAUAGG | | [3793-3811] |
| 49 | GUUGGAGGUGGAGAAUUAA | UUAAUUCUCCACCUCCAAC | | [2661-2679] |
| 50 | CCUCAAAAUCAGUUUUUAU | AUAAAAACUGAUUUUGAGG | | [2128-2146] |
| 51 | UGGUAUUGAAUCUUUUAAA | UUUAAAAGAUUCAAUACCA | | [3395-3413] |
| 52 | UCCAGUUAUGAGAUAAAAA | UUUUUAUCUCAUAACUGGA | | [3906-3924] |
| 53 | GAGAAUAAAGAACCCUGAA | UUCAGGGUUCUUUAUUCUC | | [488-506] |
| 54 | ACAGUUUGUGAACAAAAAA | UUUUUUGUUCACAAACUGU | | [738-756] |
| 55 | GAGGAAAAGGAAAUAAGGA | UCCUUAUUUCCUUUUCCUC | | [3212-3230] |
| 56 | AAGAGUGCUUGUCAUUAUA | UAUAAUGACAAGCACUCUU | | [3933-3951] |
| 57 | AGUGCGUGCUGCUCAACAA | UUGUUGAGCAGCACGCACU | Rb | [261-279] |
| 58 | AAAAAUGGACAAAAAGAAA | UUUCUUUUUGUCCAUUUUU | | [1814-1832] |
| 59 | CCAUGGAGCUGAACGAAUU | AAUUCGUUCAGCUCCAUGG | Rat, Ms, Rb | [677-695] |
| 60 | UUAUUUGAAGCAUGAAAAA | UUUUUCAUGCUUCAAAUAA | | [2637-2655] |
| 61 | GCAGAAGACUGGUUUAGGA | UCCUAAACCAGUCUUCUGC | | [3195-3213] |
| 62 | CUUAUUUGAAGCAUGAAAA | UUUUCAUGCUUCAAAUAAG | | [2636-2654] |
| 63 | GAUGGUUUCUGCUUAGAGA | UCUCUAAGCAGAAACCAUC | | [3596-3614] |
| 64 | CAGAUUUCUUAAAGUUUGA | UCAAACUUUAAGAAAUCUG | | [3318-3336] |
| 65 | CUUCCAUGAGGAAAUAAAU | AUUUAUUUCCUCAUGGAAG | | [1735-1753] |
| 66 | GUAAGUUUUGUUAAAUGAA | UUCAUUUAACAAAACUUAC | | [2440-2458] |
| 67 | GGUCACUCACCCUUUCAAA | UUUGAAAGGGUGAGUGACC | Rb | [914-932] |
| 68 | GUGUGAAUGCCCGAGUCAA | UUGACUCGGGCAUUCACAC | Rb | [391-409] |
| 69 | UUUGAAGCAUGAAAAAAGA | UCUUUUUUCAUGCUUCAAA | | [2640-2658] |
| 70 | CAAUUUUGCUCGAAAGAGA | UCUCUUUCGAGCAAAAUUG | | [473-491] |
| 71 | UAUGGUCAUUUGUUUUAAA | UUUAAAACAAAUGACCAUA | | [2821-2839] |
| 72 | UCAUUAUUAUCAUACUGAA | UUCAGUAUGAUAAUAAUGA | | [2212-2230] |
| 73 | AGGAAAUAAGGAGAAAAGA | UCUUUUCUCCUUAUUUCCU | | [3219-3237] |
| 74 | CAACUAUUAAAAUGAAUGA | UCAUUCAUUUUAAUAGUUG | | [4242-4260] |
| 75 | UGGGAUAAUGAAUUCAAGA | UCUUGAAUUCAUUAUCCCA | | [1560-1578] |
| 76 | AGGAUGAACUAAAUAAGAA | UUCUUAUUUAGUUCAUCCU | | [3459-3477] |
| 77 | CUCAAAUAAUGCUAAUUGA | UCAAUUAGCAUUAUUUGAG | | [1774-1792] |
| 78 | CCAAGAUAGAAUUAAUUUA | UAAAUUAAUUCUAUCUUGG | | [2484-2502] |
| 79 | GCUGGAAACCCUCCUAUGA | UCAUAGGAGGGUUUCCAGC | Ms | [801-819] |
| 80 | AAGCCUUAAACAAAAUUUA | UAAAUUUUGUUUAAGGCUU | | [2503-2521] |
| 81 | UGUCAAAGAUUGUUUGAUA | UAUCAAACAAUCUUUGACA | | [1863-1881] |
| 82 | CUCAAUUUUAGAAUCAAAA | UUUUGAUUCUAAAAUUGAG | | [1995-2013] |
| 83 | GUUUAGGAGGAAAAGGAAA | UUUCCUUUUCCUCCUAAAC | | [3206-3224] |
| 84 | GAGUUAAUGUAAUACUCAU | AUGAGUAUUACAUUAACUC | | [2384-2402] |
| 85 | GAACUUGGAGACAGGCAAA | UUUGCCUGUCUCCAAGUUC | | [441-459] |
| 86 | GAAUUAAUUUAAAGCCUUA | UAAGGCUUUAAAUUAAUUC | | [2492-2510] |
| 87 | CAUCAUCAUCCUAAAAUUA | UAAUUUUAGGAUGAUGAUG | | [2924-2942] |
| 88 | AUCUGAAGCUCAAAAAGAU | AUCUUUUUGAGCUUCAGAU | | [1312-1330] |
| 89 | GGAAUCUCACCUUUCAUAA | UUAUGAAAGGUGAGAUUCC | | [301-319] |
| 90 | GUUUGAUAUGUAUAGAAUA | UAUUCUAUACAUAUCAAAC | | [3331-3349] |
| 91 | GAAUUGUGACAAAUAUGUA | UACAUAUUUGUCACAAUUC | | [2797-2815] |
| 92 | AAUGGGAGAGUGAGAGAAA | UUUCUCUCACUCUCCCAUU | | [3239-3257] |
| 93 | UAAAAAUGGACAAAAAGAA | UUCUUUUUGUCCAUUUUUA | | [1813-1831] |
| 94 | UAACCUAUGUGCAUAAUUA | UAAUUAUGCACAUAGGUUA | | [3790-3808] |
| 95 | AAAUAAGGAGAAAAGAGAA | UUCUCUUUUCUCCUUAUUU | | [3222-3240] |
| 96 | AAGGGACUAGGAUGAACUA | UAGUUCAUCCUAGUCCCUU | | [3451-3469] |
| 97 | CAACAAGAGUUCGAAGACA | UGUCUUCGAACUCUUGUUG | | [274-292] |
| 98 | AGGAGAAAAGAGAAUGGGA | UCCCAUUCUCUUUUCUCCU | | [3227-3245] |
| 99 | UGUGAAUGCCCGAGUCAAU | AUUGACUCGGGCAUUCACA | | [392-410] |
| 100 | AGAGAAUGGGAGAGUGAGA | UCUCACUCUCCCAUUCUCU | | [3235-3253] |
| 101 | GACAAAAAGAAACUAUAAU | AUUAUAGUUUCUUUUUGUC | | [1821-1839] |
| 102 | CAAAGGUGUCCAAGCUGGA | UCCAGCUUGGACACCUUUG | | [1003-1021] |
| 103 | AAAUGAAAGUUAUCUCAAU | AUUGAGAUAACUUUCAUUU | | [458-476] |
| 104 | UAGGAAUUGUGACAAAUAU | AUAUUUGUCACAAUUCCUA | | [2794-2812] |
| 105 | CCAGGAUGGUUUCUGCUUA | UAAGCAGAAACCAUCCUGG | | [3592-3610] |
| 106 | UGCAUUUCAUUUUCAACAA | UUGUUGAAAAUGAAAUGCA | | [1696-1714] |
| 107 | GAAAAUAAAAAAGGCAAAA | UUUUGCCUUUUUUAUUUUC | | [3254-3272] |
| 108 | AUGAAUGAAUGAAUUUAGA | UCUAAAUUCAUUCAUUCAU | | [2454-2472] |
| 109 | UCAAGUAAGUUUUGUUAAA | UUUAACAAAACUUACUUGA | | [2436-2454] |
| 110 | AGCCUUAAACAAAAUUUAU | AUAAAUUUUGUUUAAGGCU | | [2504-2522] |
| 111 | GAGAAAAGAGAAUGGGAGA | UCUCCCAUUCUCUUUUCUC | | [3229-3247] |
| 112 | AGAAAAUAAAAAAGGCAAA | UUUGCCUUUUUUAUUUUCU | | [3253-3271] |
| 113 | GACAAAUAUGUAUCUGAUA | UAUCAGAUACAUAUUUGUC | | [2804-2822] |
| 114 | GAGAAAAUAAAAAAGGCAA | UUGCCUUUUUUAUUUUCUC | | [3252-3270] |
| 115 | UCCCUUAAAGGAAUGUCAA | UUGACAUUCCUUUAAGGGA | | [1850-1868] |
| 116 | AAACAAAAAUCUCUAUACA | UGUAUAGAGAUUUUUGUUU | | [2952-2970] |
| 117 | AAUUUAAAGCCUUAAACAA | UUGUUUAAGGCUUUAAAUU | | [2497-2515] |
| 118 | UAAAAUAAAUGCAGACUAA | UUAGUCUGCAUUUAUUUUA | | [2725-2743] |
| 119 | GAGUUCGAAGACAACUGGA | UCCAGUUGUCUUCGAACUC | | [280-298] |
| 120 | ACAGGAAUCUCACCUUUCA | UGAAAGGUGAGAUUCCUGU | | [298-316] |
| 121 | AGUCAGUCUGGUACAAAUA | UAUUUGUACCAGACUGACU | Rb | [1276-1294] |
| 122 | GCUAUAAAAUAAAUGCAGA | UCUGCAUUUAUUUUAUAGC | | [2721-2739] |
| 123 | UUAACAACCCAGAAACAAA | UUUGUUUCUGGGUUGUUAA | | [2940-2958] |
| 124 | AUGUAAUACUCAUCAUUUA | UAAAUGAUGAGUAUUACAU | | [2390-2408] |
| 125 | GAAGAAUAUUGGAUUGAUU | AAUCAAUCCAAUAUUCUUC | | [2364-2382] |
| 126 | UGACAGUAUUGACAUCUGA | UCAGAUGUCAAUACUGUCA | | [2290-2308] |
| 127 | UCAUCAUCAUCCUAAAAUU | AAUUUUAGGAUGAUGAUGA | | [2923-2941] |
| 128 | CAUUGCACAUCUAUUUAAU | AUUAAAUAGAUGUGCAAUG | | [362-380] |
| 129 | CAACUGGACAGGAAUCUCA | UGAGAUUCCUGUCCAGUUG | | [291-309] |
| 130 | AGGGCAGAAGACUGGUUUA | UAAACCAGUCUUCUGCCCU | | [3192-3210] |
| 131 | GUGAAUGCCCGAGUCAAUA | UAUUGACUCGGGCAUUCAC | | [393-411] |
| 132 | UCCUUGUGCUAUAAAAUAA | UUAUUUUAUAGCACAAGGA | | [2714-2732] |
| 133 | CUAUGGUAUUGAAUCUUUU | AAAAGAUUCAAUACCAUAG | | [3392-3410] |
| 134 | GAACAAAAAAUCUCAGAAU | AUUCUGAGAUUUUUUGUUC | | [747-765] |
| 135 | CAGUUUGUGAACAAAAAAU | AUUUUUUGUUCACAAACUG | | [739-757] |
| 136 | UGGUCAUUUGUUUUAAAUA | UAUUUAAAACAAAUGACCA | | [2823-2841] |
| 137 | ACAUCUAUUUAAUGUGGAA | UUCCACAUUAAAUAGAUGU | | [368-386] |
| 138 | AAAGGAAAUAAGGAGAAAA | UUUUCUCCUUAUUUCCUUU | | [3217-3235] |
| 139 | UUUAAAGCCUUAAACAAAA | UUUUGUUUAAGGCUUUAAA | | [2499-2517] |
| 140 | AAACCAACUAAGUUAUGAA | UUCAUAACUUAGUUGGUUU | | [3863-3881] |
| 141 | AAGUUUGAUAUGUAUAGAA | UUCUAUACAUAUCAAACUU | | [3329-3347] |
| 142 | GAAAUUUUCCAGAUCAUUA | UAAUGAUCUGGAAAAUUUC | | [2232-2250] |
| 143 | GGUAUUACCGGGUUUAUGA | UCAUAAACCCGGUAAUACC | | [97-115] |
| 144 | CUCUGUUUAUUGUUUCAAU | AUUGAAACAAUAAACAGAG | | [3702-3720] |
| 145 | GUUCGAAGACAACUGGACA | UGUCCAGUUGUCUUCGAAC | | [282-300] |
| 146 | CUUAUUUUCCGUAAAUACA | UGUAUUUACGGAAAAUAAG | | [2852-2870] |
| 147 | GAAAUAAGGAGAAAAGAGA | UCUCUUUUCUCCUUAUUUC | | [3221-3239] |
| 148 | GACAAUACAUUUUUGUCAA | UUGACAAAAAUGUAUUGUC | | [979-997] |
| 149 | CUCAAAAUCAGUUUUUAUA | UAUAAAAACUGAUUUUGAG | | [2129-2147] |
| 150 | CAAAUAAUGCUAAUUGAUA | UAUCAAUUAGCAUUAUUUG | | [1776-1794] |
| 151 | AGUGAUAAGUUACAUUUAU | AUAAAUGUAACUUAUCACU | | [1881-1899] |
| 152 | GAGCUCUAUGGUUUUGAGA | UCUCAAAACCAUAGAGCUC | | [1903-1921] |
| 153 | GAGUAGCUAUAUAUUUCUA | UAGAAAUAUAUAGCUACUC | | [2174-2192] |
| 154 | AAGGCAAAAGGGAGAGAGA | UCUCUCUCCCUUUUGCCUU | | [3264-3282] |
| 155 | CCAUCAUUAUUAUCAUACU | AGUAUGAUAAUAAUGAUGG | | [2209-2227] |
| 156 | CAUCAUCCUAAAAUUAACA | UGUUAAUUUUAGGAUGAUG | | [2927-2945] |
| 157 | UGACAAAUAUGUAUCUGAU | AUCAGAUACAUAUUUGUCA | | [2803-2821] |
| 158 | CCAGAUCUAGCCCAUCUUA | UAAGAUGGGCUAGAUCUGG | | [2064-2082] |
| 159 | GCACUUUUACAAACAUUAU | AUAAUGUUUGUAAAAGUGC | | [1922-1940] |
| 160 | AAAAGGAAAUAAGGAGAAA | UUUCUCCUUAUUUCCUUUU | | [3216-3234] |
| 161 | UGAACAAAAAAUCUCAGAA | UUCUGAGAUUUUUUGUUCA | | [746-764] |
| 162 | AGUCAACACCCUAAUACCA | UGGUAUUAGGGUGUUGACU | Rb | [1587-1605] |
| 163 | UUCAAUUCUUUACACCAAA | UUUGGUGUAAAGAAUUGAA | | [3715-3733] |
| 164 | UGAAUGAAUGAAUUUAGAA | UUCUAAAUUCAUUCAUUCA | | [2455-2473] |
| 165 | AUCCAGUUAUGAGAUAAAA | UUUUAUCUCAUAACUGGAU | | [3905-3923] |
| 166 | CUUAGUAUUUAGCAUUUAU | AUAAAUGCUAAAUACUAAG | | [4042-4060] |
| 167 | CCAAGGAGUAGCUAUAUAU | AUAUAUAGCUACUCCUUGG | | [2169-2187] |
| 168 | GGUACAAAUAUUGCAAUAA | UUAUUGCAAUAUUUGUACC | | [1285-1303] |
| 169 | GGAGGUGGAGAAUUAACCU | AGGUUAAUUCUCCACCUCC | | [2664-2682] |
| 170 | CAAGAUGCGUGGAAACUAC | GUAGUUUCCACGCAUCUUG | | [1143-1161] |
| 171 | UCCUCAAAAUCAGUUUUUA | UAAAAACUGAUUUUGAGGA | | [2127-2145] |
| 172 | UUUAAAAUCUGGUCACAAA | UUUGUGACCAGAUUUUAAA | | [3408-3426] |
| 173 | UAGGAUGAACUAAAUAAGA | UCUUAUUUAGUUCAUCCUA | | [3458-3476] |
| 174 | GUUUGAUACUCUUUCCACA | UGUGGAAAGAGUAUCAAAC | | [2089-2107] |
| 175 | AUCACAGGCCUGAAACAAA | UUUGUUUCAGGCCUGUGAU | | [1518-1536] |
| 176 | AAUUUUGCUCGAAAGAGAA | UUCUCUUUCGAGCAAAAUU | | [474-492] |
| 177 | GUAUGUUCUGAAUAUAUGU | ACAUAUAUUCAGAACAUAC | | [2993-3011] |
| 178 | AAGGUUUUCUAUCUUCAAA | UUUGAAGAUAGAAAACCUU | | [3846-3864] |
| 179 | GCUUGUCAUUAUAAAAGUU | AACUUUUAUAAUGACAAGC | | [3939-3957] |
| 180 | UAUGGUAUUGAAUCUUUUA | UAAAAGAUUCAAUACCAUA | | [3393-3411] |
| 181 | AUGCGUGGAAACUACCUAA | UUAGGUAGUUUCCACGCAU | | [1147-1165] |
| 182 | UCAAAAAGAUCUACUUCUA | UAGAAGUAGAUCUUUUUGA | Rat, Ms, Rb | [1321-1339] |
| 183 | GAAACUGUGACCAGAUCUA | UAGAUCUGGUCACAGUUUC | | [2054-2072] |
| 184 | CAAGAACAGGCUAAGGAUA | UAUCCUUAGCCUGUUCUUG | | [2581-2599] |
| 185 | UUUCCUCUGUGGACCUGAA | UUCAGGUCCACAGAGGAAA | Rb | [1616-1634] |
| 186 | UAUCCAGUUAUGAGAUAAA | UUUAUCUCAUAACUGGAUA | | [3904-3922] |
| 187 | GAAUAUUGAACUUAGGAAU | AUUCCUAAGUUCAAUAUUC | | [2782-2800] |
| 188 | AGCGGAUACUCAAGUAAGU | ACUUACUUGAGUAUCCGCU | | [2427-2445] |
| 189 | CAACUAAGUUAUGAAAGUA | UACUUUCAUAACUUAGUUG | | [3867-3885] |
| 190 | ACUAGGAUGAACUAAAUAA | UUAUUUAGUUCAUCCUAGU | | [3456-3474] |
| 191 | AAGACAACUGGACAGGAAU | AUUCCUGUCCAGUUGUCUU | | [287-305] |
| 192 | AAUUCUUUACACCAAAGUA | UACUUUGGUGUAAAGAAUU | | [3718-3736] |
| 193 | UAACAGUUUGUGAACAAAA | UUUUGUUCACAAACUGUUA | | [736-754] |
| 194 | CAUUGUUUUUAAUCUUAAG | CUUAAGAUUAAAAACAAUG | | [4087-4105] |
| 195 | UUCUUAAAACUGUGCUCAA | UUGAGCACAGUUUUAAGAA | | [4226-4244] |
| 196 | UGGUACAAAUAUUGCAAUA | UAUUGCAAUAUUUGUACCA | | [1284-1302] |
| 197 | UGUGCUCAACUAUUAAAAU | AUUUUAAUAGUUGAGCACA | | [4236-4254] |
| 198 | CUAUGUGCAUAAUUAAAAC | GUUUUAAUUAUGCACAUAG | | [3794-3812] |
| 199 | CAUCACGCUGUGCCUCAUA | UAUGAGGCACAGCGUGAUG | | [557-575] |
| 200 | CUCAGAAUCCUCAAAAUCA | UGAUUUUGAGGAUUCUGAG | | [2120-2138] |
| 201 | UGAUCACAGGCCUGAAACA | UGUUUCAGGCCUGUGAUCA | | [1516-1534] |
| 202 | CUUCCCUAAGAUUAUGAAA | UUUCAUAAUCUUAGGGAAG | | [2039-2057] |
| 203 | CUUAAAGUUUGAUAUGUAU | AUACAUAUCAAACUUUAAG | | [3325-3343] |
| 204 | AUGGAAGUGGGACAAUACA | UGUAUUGUCCCACUUCCAU | | [969-987] |
| 205 | CUUGUGCUAUAAAAUAAAU | AUUUAUUUUAUAGCACAAG | | [2716-2734] |
| 206 | AAUGUUUAGAACUCUUCAA | UUGAAGAGUUCUAAACAUU | | [3136-3154] |
| 207 | GAUUGUUUGAUAGUGAUAA | UUAUCACUAUCAAACAAUC | | [1870-1888] |
| 208 | CUUUGCUGUGCACCAUGAU | AUCAUGGUGCACAGCAAAG | Ms, Rb | [1484-1502] |
| 209 | AAAUGGAAGUGGGACAAUA | UAUUGUCCCACUUCCAUUU | | [967-985] |
| 210 | UCUUAUUUGAAGCAUGAAA | UUUCAUGCUUCAAAUAAGA | | [2635-2653] |
| 211 | UGAAUAUUGAACUUAGGAA | UUCCUAAGUUCAAUAUUCA | | [2781-2799] |
| 212 | UAUCAAUUCAUCUAUUCAA | UUGAAUAGAUGAAUUGAUA | | [3650-3668] |
| 213 | GAGGAAGAAGGAGAAAGAG | CUCUUUCUCCUUCUUCCUC | | [3165-3183] |
| 214 | AGGUUUUCUAUCUUCAAAA | UUUUGAAGAUAGAAAACCU | | [3847-3865] |
| 215 | GAGGGUAGGUCUGACAAAU | AUUUGUCAGACCUACCCUC | | [3536-3554] |
| 216 | CUAAGGAUACUAACCAAUA | UAUUGGUUAGUAUCCUUAG | | [2591-2609] |
| 217 | CAGCUAGCCCUUAUGAAUA | UAUUCAUAAGGGCUAGCUG | | [2768-2786] |
| 218 | AGUUCUUCUGCUUUUGCAA | UUGCAAAAGCAGAAGAACU | | [4124-4142] |
| 219 | ACAAAAAUCUCUAUACAGA | UCUGUAUAGAGAUUUUUGU | | [2954-2972] |
| 220 | CAAUCUGAAGCUCAAAAAG | CUUUUUGAGCUUCAGAUUG | | [1310-1328] |
| 221 | AAAAUUAACAACCCAGAAA | UUUCUGGGUUGUUAAUUUU | | [2936-2954] |
| 222 | UAGUGAUAAGUUACAUUUA | UAAAUGUAACUUAUCACUA | | [1880-1898] |
| 223 | CUCCCUAGGGUCAAGAACA | UGUUCUUGACCCUAGGGAG | | [2570-2588] |
| 224 | GGAAGUGGGACAAUACAUU | AAUGUAUUGUCCCACUUCC | | [971-989] |
| 225 | AUGUUGUUUUGAUUAUCUA | UAGAUAAUCAAAACAACAU | | [3376-3394] |
| 226 | CCCUCCUAUGACUUGGAAA | UUUCCAAGUCAUAGGAGGG | Rat, Ms | [809-827] |
| 227 | GGUGGUGAUGUUAGUGGGA | UCCCACUAACAUCACCACC | Rat, Ms, Rb | [1220-1238] |
| 228 | UUAUCAUACUGAAGGAAAU | AUUUCCUUCAGUAUGAUAA | | [2218-2236] |
| 229 | UCUUGGACUCAAUUUUAGA | UCUAAAAUUGAGUCCAAGA | | [1988-2006] |
| 230 | CAUCCAUUCUCAAGUCAGU | ACUGACUUGAGAAUGGAUG | | [1264-1282] |
| 231 | AUUUAAAGCCUUAAACAAA | UUUGUUUAAGGCUUUAAAU | | [2498-2516] |
| 232 | CAAUAGUAUGUUCUGAAUA | UAUUCAGAACAUACUAUUG | | [2988-3006] |
| 233 | UCUGGUACAAAUAUUGCAA | UUGCAAUAUUUGUACCAGA | | [1282-1300] |
| 234 | CAAAAUGGAUCGCAUCUGU | ACAGAUGCGAUCCAUUUUG | | [2875-2893] |
| 235 | AGAGAAUAAAGAACCCUGA | UCAGGGUUCUUUAUUCUCU | | [487-505] |
| 236 | UUAUUAACAGGUACUCUAA | UUAGAGUACCUGUUAAUAA | | [4057-4075] |
| 237 | CUCAACUAUUAAAAUGAAU | AUUCAUUUUAAUAGUUGAG | | [4240-4258] |
| 238 | CUCCGAGAGUGUUUCUCCA | UGGAGAAACACUCUCGGAG | | [3828-3846] |
| 239 | GGUUUUCCCUUAAAGGAAU | AUUCCUUUAAGGGAAAACC | | [1845-1863] |
| 240 | GUUUGUGAACAAAAAAUCU | AGAUUUUUUGUUCACAAAC | | [741-759] |
| 241 | CAUUUUUUUCCUCUCAGUA | UACUGAGAGGAAAAAAAUG | | [1943-1961] |
| 242 | UGGUUUUCCCUUAAAGGAA | UUCCUUUAAGGGAAAACCA | | [1844-1862] |
| 243 | GAUUGAUUGGAGUUAAUGU | ACAUUAACUCCAAUCAAUC | | [2375-2393] |
| 244 | UGUAUUAUAUCAUCAUCAU | AUGAUGAUGAUAUAAUACA | | [2911-2929] |
| 245 | UGUGCCUCAUAUUAAUUAU | AUAAUUAAUAUGAGGCACA | | [565-583] |
| 246 | GAGUCAGGCUCUGUUUAUU | AAUAAACAGAGCCUGACUC | | [3694-3712] |
| 247 | AAAAUAAAGGAAUGCCCAA | UUGGGCAUUCCUUUAUUUU | | [771-789] |
| 248 | AGACAAUUGCAAGUCAACA | UGUUGACUUGCAAUUGUCU | Rb | [1576-1594] |
| 249 | CCUUAUGAAUAUUGAACUU | AAGUUCAAUAUUCAUAAGG | | [2776-2794] |
| 250 | UAAAAUUAACAACCCAGAA | UUCUGGGUUGUUAAUUUUA | | [2935-2953] |
| 251 | AAUUAACAACCCAGAAACA | UGUUUCUGGGUUGUUAAUU | | [2938-2956] |
| 252 | UUUCUAUCUUCAAAACCAA | UUGGUUUUGAAGAUAGAAA | | [3851-3869] |
| 253 | AACCAACUAAGUUAUGAAA | UUUCAUAACUUAGUUGGUU | | [3864-3882] |
| 254 | UCUUAAAGUUUGAUAUGUA | UACAUAUCAAACUUUAAGA | | [3324-3342] |
| 255 | UGCUGUGCACCAUGAUGAG | CUCAUCAUGGUGCACAGCA | Ms, Rb | [1487-1505] |
| 256 | AGUAAGUUUUGUUAAAUGA | UCAUUUAACAAAACUUACU | | [2439-2457] |
| 257 | CAUACUCCAGUUUACUAAU | AUUAGUAAACUGGAGUAUG | | [2310-2328] |
| 258 | UUGAGAGCACUUUUACAAA | UUUGUAAAAGUGCUCUCAA | | [1916-1934] |
| 259 | GAUCACAGGCCUGAAACAA | UUGUUUCAGGCCUGUGAUC | | [1517-1535] |
| 260 | GUUCAAAAUGGAAGUGGGA | UCCCACUUCCAUUUUGAAC | | [962-980] |
| 261 | UUUUCUUUUUGUUCUUAGA | UCUAAGAACAAAAAGAAAA | | [3058-3076] |
| 262 | UCAUUUUCAACAAGGAAAA | UUUUCCUUGUUGAAAAUGA | Ms, Rb | [1702-1720] |
| 263 | CAGAAACAAAAAUCUCUAU | AUAGAGAUUUUUGUUUCUG | | [2949-2967] |
| 264 | CAAGUAAGUUUUGUUAAAU | AUUUAACAAAACUUACUUG | | [2437-2455] |
| 265 | GUUAAAUGAAUGAAUGAAU | AUUCAUUCAUUCAUUUAAC | | [2449-2467] |
| 266 | GAAGGGUUCUGCACAUUCU | AGAAUGUGCAGAACCCUUC | | [2619-2637] |
| 267 | AAACCAAGGAGUAGCUAUA | UAUAGCUACUCCUUGGUUU | | [2166-2184] |
| 268 | GAACUAAAACCAGUUUUAU | AUAAAACUGGUUUUAGUUC | | [3094-3112] |
| 269 | AAAGCAUCUCCAACUCUGA | UCAGAGUUGGAGAUGCUUU | | [1660-1678] |
| 270 | CACCAAAGUAUGAACUGGA | UCCAGUUCAUACUUUGGUG | | [3727-3745] |
| 271 | AACAACCCAGAAACAAAAA | UUUUUGUUUCUGGGUUGUU | | [2942-2960] |
| 272 | GAGUGUUUCUCCAAGGUUU | AAACCUUGGAGAAACACUC | | [3834-3852] |
| 273 | AAGAUUGUUUGAUAGUGAU | AUCACUAUCAAACAAUCUU | | [1868-1886] |
| 274 | AUAGUAUGUUCUGAAUAUA | UAUAUUCAGAACAUACUAU | | [2990-3008] |
| 275 | CUUCCUCCACCAAAACCAU | AUGGUUUUGGUGGAGGAAG | | [586-604] |
| 276 | AAUAGUAUGUUCUGAAUAU | AUAUUCAGAACAUACUAUU | | [2989-3007] |
| 277 | GUGCUAUAAAAUAAAUGCA | UGCAUUUAUUUUAUAGCAC | | [2719-2737] |
| 278 | UAGCAUUUAUUAACAGGUA | UACCUGUUAAUAAAUGCUA | | [4051-4069] |
| 279 | CUGAUGUUGUUUUGAUUAU | AUAAUCAAAACAACAUCAG | | [3373-3391] |
| 280 | AAAUGUUUAGAACUCUUCA | UGAAGAGUUCUAAACAUUU | | [3135-3153] |
| 281 | UAGGGAAAAGAUUCUUGGA | UCCAAGAAUCUUUUCCCUA | | [1976-1994] |
| 282 | CAAAAUGAAAGUUAUCUCA | UGAGAUAACUUUCAUUUUG | | [456-474] |
| 283 | AGUUUGAUAUGUAUAGAAU | AUUCUAUACAUAUCAAACU | | [3330-3348] |
| 284 | UCAUCAUCCUAAAAUUAAC | GUUAAUUUUAGGAUGAUGA | | [2926-2944] |
| 285 | UUAGGAAUUGUGACAAAUA | UAUUUGUCACAAUUCCUAA | | [2793-2811] |
| 286 | AAAGAUUGUUUGAUAGUGA | UCACUAUCAAACAAUCUUU | | [1867-1885] |
| 287 | AUUCUUAUUUGAAGCAUGA | UCAUGCUUCAAAUAAGAAU | | [2633-2651] |
| 288 | AAUCUCACCUUUCAUAAAA | UUUUAUGAAAGGUGAGAUU | | [303-321] |
| 289 | AGGUAUCAAUUCAUCUAUU | AAUAGAUGAAUUGAUACCU | | [3647-3665] |
| 290 | CACUGCACCUCAGGUAUCA | UGAUACCUGAGGUGCAGUG | | [3636-3654] |
| 291 | AUAGCCUUUCUGAAAUGUA | UACAUUUCAGAAAGGCUAU | | [3573-3591] |
| 292 | AGUUAUAAGGAGUCUGAGA | UCUCAGACUCCUUAUAACU | | [3757-3775] |
| 293 | AGCUCAAAAAGAUCUACUU | AAGUAGAUCUUUUUGAGCU | | [1318-1336] |
| 294 | UGGUCACUCACCCUUUCAA | UUGAAAGGGUGAGUGACCA | Rb | [913-931] |
| 295 | AAUCUGAAGCUCAAAAAGA | UCUUUUUGAGCUUCAGAUU | | [1311-1329] |
| 296 | UGUUAAAUGAAUGAAUGAA | UUCAUUCAUUCAUUUAACA | | [2448-2466] |
| 297 | UGAAUUCAAGACAAUUGCA | UGCAAUUGUCUUGAAUUCA | | [1568-1586] |
| 298 | CACAAAUUUUGAUGCUGAG | CUCAGCAUCAAAAUUUGUG | | [3421-3439] |
| 299 | UAGCCCUUAUGAAUAUUGA | UCAAUAUUCAUAAGGGCUA | | [2772-2790] |
| 300 | GUUUAUUGUUUCAAUUCUU | AAGAAUUGAAACAAUAAAC | | [3706-3724] |
| 301 | UAGUAUGUUCUGAAUAUAU | AUAUAUUCAGAACAUACUA | | [2991-3009] |
| 302 | ACUAAGUUAUGAAAGUAGA | UCUACUUUCAUAACUUAGU | | [3869-3887] |
| 303 | GUCUGGUACAAAUAUUGCA | UGCAAUAUUUGUACCAGAC | | [1281-1299] |
| 304 | CUUCUAUUACUGUCAUAGA | UCUAUGACAGUAAUAGAAG | | [2535-2553] |
| 305 | CGUGCUGCUCAACAAGAGU | ACUCUUGUUGAGCAGCACG | | [265-283] |
| 306 | GAUGCGUGGAAACUACCUA | UAGGUAGUUUCCACGCAUC | | [1146-1164] |
| 307 | UCAAGACAAUUGCAAGUCA | UGACUUGCAAUUGUCUUGA | Rb | [1573-1591] |
| 308 | GUGUUUGUGAAAUUUGAAU | AUUCAAAUUUCACAAACAC | | [4145-4163] |
| 309 | UAAGGAGUCUGAGAAUAUU | AAUAUUCUCAGACUCCUUA | | [3762-3780] |
| 310 | AUUUCAUUUUCAACAAGGA | UCCUUGUUGAAAAUGAAAU | | [1699-1717] |
| 311 | GGACAGGAAUCUCACCUUU | AAAGGUGAGAUUCCUGUCC | | [296-314] |
| 312 | CAUCUUACUCCAGGUUUGA | UCAAACCUGGAGUAAGAUG | | [2076-2094] |
| 313 | AAAGAGAAUGGGAGAGUGA | UCACUCUCCCAUUCUCUUU | | [3233-3251] |
| 314 | GAUCAAAUUCACACUCAAU | AUUGAGUGUGAAUUUGAUC | | [2973-2991] |
| 315 | UAAGAGUGCUUGUCAUUAU | AUAAUGACAAGCACUCUUA | | [3932-3950] |
| 316 | UCAAUAGUAUGUUCUGAAU | AUUCAGAACAUACUAUUGA | | [2987-3005] |
| 317 | AAAGUUUGAUAUGUAUAGA | UCUAUACAUAUCAAACUUU | | [3328-3346] |
| 318 | GUUCUGAAUAUAUGUUCAA | UUGAACAUAUAUUCAGAAC | | [2997-3015] |
| 319 | GUUAUGAGAUAAAAAAUGA | UCAUUUUUUAUCUCAUAAC | | [3910-3928] |
| 320 | UGAAGCUCAAAAAGAUCUA | UAGAUCUUUUUGAGCUUCA | | [1315-1333] |
| 321 | AGAGAAAAUAAAAAAGGCA | UGCCUUUUUUAUUUUCUCU | | [3251-3269] |
| 322 | UGUUGUUUUGAUUAUCUAU | AUAGAUAAUCAAAACAACA | | [3377-3395] |
| 323 | CAAAAAGAAACUAUAAUGU | ACAUUAUAGUUUCUUUUUG | | [1823-1841] |
| 324 | UAGCCUUUCUGAAAUGUAC | GUACAUUUCAGAAAGGCUA | | [3574-3592] |
| 325 | ACUGCACCUCAGGUAUCAA | UUGAUACCUGAGGUGCAGU | | [3637-3655] |
| 326 | AGAAGGAAACCAAGGAGUA | UACUCCUUGGUUUCCUUCU | | [2160-2178] |
| 327 | CAGAAUCCUCAAAAUCAGU | ACUGAUUUUGAGGAUUCUG | | [2122-2140] |
| 328 | CAUCUAUUCAACAGAUAUU | AAUAUCUGUUGAAUAGAUG | | [3658-3676] |
| 329 | AUGGUAUUGAAUCUUUUAA | UUAAAAGAUUCAAUACCAU | | [3394-3412] |
| 330 | AUAACAGUUUGUGAACAAA | UUUGUUCACAAACUGUUAU | | [735-753] |
| 331 | GUAUCAAUUCAUCUAUUCA | UGAAUAGAUGAAUUGAUAC | | [3649-3667] |
| 332 | UUUCAAUUCUUUACACCAA | UUGGUGUAAAGAAUUGAAA | | [3714-3732] |
| 333 | UGAUUGGAGUUAAUGUAAU | AUUACAUUAACUCCAAUCA | | [2378-2396] |
| 334 | AAACCAUCCGGAGGUCUUA | UAAGACCUCCGGAUGGUUU | | [598-616] |
| 335 | CAGGAUGGUUUCUGCUUAG | CUAAGCAGAAACCAUCCUG | | [3593-3611] |
| 336 | UACUGAUGUUGUUUUGAUU | AAUCAAAACAACAUCAGUA | | [3371-3389] |
| 337 | AGUCCUGCUCCUUGUGCUA | UAGCACAAGGAGCAGGACU | | [2706-2724] |
| 338 | ACUAAUGGUUUAUUUGUAU | AUACAAAUAAACCAUUAGU | | [2897-2915] |
| 339 | AAUUCACACUCAAUAGUAU | AUACUAUUGAGUGUGAAUU | | [2978-2996] |
| 340 | CAGAUGCAGGAAAGGAACA | UGUUCCUUUCCUGCAUCUG | Ms | [1404-1422] |
| 341 | GCUAUGAGGUGGUGAUGUU | AACAUCACCACCUCAUAGC | Rat, Ms, Rb | [1213-1231] |
| 342 | UGCUCAACUAUUAAAAUGA | UCAUUUUAAUAGUUGAGCA | | [4238-4256] |
| 343 | UUGUGAACAAAAAAUCUCA | UGAGAUUUUUUGUUCACAA | | [743-761] |
| 344 | UAAUAUAACAGUUUGUGAA | UUCACAAACUGUUAUAUUA | | [731-749] |
| 345 | AAUAUAUGUUCAAGAGAGA | UCUCUCUUGAACAUAUAUU | | [3003-3021] |
| 346 | CAGUAUUGACAUCUGAGCA | UGCUCAGAUGUCAAUACUG | | [2293-2311] |
| 347 | CUAUAUAUUUCUACUUUGU | ACAAAGUAGAAAUAUAUAG | | [2180-2198] |
| 348 | AUAUGGUCAUUUGUUUUAA | UUAAAACAAAUGACCAUAU | | [2820-2838] |
| 349 | GAAGCAUUGUUUUUAAUCU | AGAUUAAAAACAAUGCUUC | | [4083-4101] |
| 350 | CUAUUCAACAGAUAUUUAU | AUAAAUAUCUGUUGAAUAG | | [3661-3679] |
| 351 | UAUUUGAAGCAUGAAAAAA | UUUUUUCAUGCUUCAAAUA | | [2638-2656] |
| 352 | GGUACCUCAGUUAUAAGGA | UCCUUAUAACUGAGGUACC | | [3749-3767] |
| 353 | UAAUUUAAAGCCUUAAACA | UGUUUAAGGCUUUAAAUUA | | [2496-2514] |
| 354 | AGCACUUUUACAAACAUUA | UAAUGUUUGUAAAAGUGCU | | [1921-1939] |
| 355 | CACACUGCACCUCAGGUAU | AUACCUGAGGUGCAGUGUG | | [3634-3652] |
| 356 | GUAGCUAUAUAUUUCUACU | AGUAGAAAUAUAUAGCUAC | | [2176-2194] |
| 357 | CAUUUAUGUGGAGCUCUAU | AUAGAGCUCCACAUAAAUG | | [1893-1911] |
| 358 | UUGUUAAAUGAAUGAAUGA | UCAUUCAUUCAUUUAACAA | | [2447-2465] |
| 359 | GAUAGUGGGUCCCAUGUUU | AAACAUGGGACCCACUAUC | | [830-848] |
| 360 | AGGCUAAGGAUACUAACCA | UGGUUAGUAUCCUUAGCCU | | [2588-2606] |
| 361 | AGAGCGGAUACUCAAGUAA | UUACUUGAGUAUCCGCUCU | | [2425-2443] |
| 362 | AGAAGAAUAUUGGAUUGAU | AUCAAUCCAAUAUUCUUCU | | [2363-2381] |
| 363 | GCUUUGUAUGUGAAUAAUU | AAUUAUUCACAUACAAAGC | | [4172-4190] |
| 364 | AGAUCUAGCCCAUCUUACU | AGUAAGAUGGGCUAGAUCU | | [2066-2084] |
| 365 | AGGUGGUCAUCACCAAGGU | ACCUUGGUGAUGACCACCU | Ms, Rb | [895-913] |
| 366 | UAAUUCUGAUCCUUAUUCA | UGAAUAAGGAUCAGAAUUA | | [410-428] |
| 367 | UGUGACUAAUGGUUUAUUU | AAAUAAACCAUUAGUCACA | | [2893-2911] |
| 368 | CAGUAAUGUCAGUGGAAGU | ACUUCCACUGACAUUACUG | | [1957-1975] |
| 369 | GGUUUUCUUUUUGUUCUUA | UAAGAACAAAAAGAAAACC | | [3056-3074] |
| 370 | CUGAUAUGGUCAUUUGUUU | AAACAAAUGACCAUAUCAG | | [2817-2835] |
| 371 | GACAUCUGAGCAUACUCCA | UGGAGUAUGCUCAGAUGUC | | [2300-2318] |
| 372 | AUUGCAAGUCAACACCCUA | UAGGGUGUUGACUUGCAAU | Rb | [1581-1599] |
| 373 | UGUUGAGAGUGUCUCAACA | UGUUGAGACACUCUCAACA | | [2263-2281] |
| 374 | UCUUCCAUGAGGAAAUAAA | UUUAUUUCCUCAUGGAAGA | | [1734-1752] |
| 375 | GGAAAUAAAUGUGGGUUGU | ACAACCCACAUUUAUUUCC | | [1744-1762] |
| 376 | AGAUUGUUUGAUAGUGAUA | UAUCACUAUCAAACAAUCU | | [1869-1887] |
| 377 | CCCAAAGUGGUCUUCUCCA | UGGAGAAGACCACUUUGGG | | [2751-2769] |
| 378 | UCUUUACACCAAAGUAUGA | UCAUACUUUGGUGUAAAGA | | [3721-3739] |
| 379 | GCAUAAUAUAACAGUUUGU | ACAAACUGUUAUAUUAUGC | | [728-746] |
| 380 | UGUGCAUAAUAUAACAGUU | AACUGUUAUAUUAUGCACA | | [725-743] |
| 381 | ACUUUGCUGUGCACCAUGA | UCAUGGUGCACAGCAAAGU | Ms, Rb | [1483-1501] |
| 382 | GUUUGCAGAUCUGCUGCAA | UUGCAGCAGAUCUGCAAAC | | [1373-1391] |
| 383 | UCUACAGAAGAAUAUUGGA | UCCAAUAUUCUUCUGUAGA | | [2358-2376] |
| 384 | AAAAUGAAAGUUAUCUCAA | UUGAGAUAACUUUCAUUUU | | [457-475] |
| 385 | UCCGGAGGUCUUACUUUGA | UCAAAGUAAGACCUCCGGA | Rb | [604-622] |
| 386 | GAAACAAAAGACUUUGUAU | AUACAAAGUCUUUUGUUUC | | [1529-1547] |
| 387 | GUAUGUGAAUAAUUCUAGC | GCUAGAAUUAUUCACAUAC | | [4177-4195] |
| 388 | UUAAAAAUGGACAAAAAGA | UCUUUUUGUCCAUUUUUAA | | [1812-1830] |
| 389 | AAUGGACAAAAAGAAACUA | UAGUUUCUUUUUGUCCAUU | | [1817-1835] |
| 390 | GGUAGGUCUGACAAAUAAG | CUUAUUUGUCAGACCUACC | | [3539-3557] |
| 391 | GUACAAAUAUUGCAAUAAC | GUUAUUGCAAUAUUUGUAC | | [1286-1304] |
| 392 | UGCUUGUCAUUAUAAAAGU | ACUUUUAUAAUGACAAGCA | | [3938-3956] |
| 393 | CACUUAUUAGUGACAGUAU | AUACUGUCACUAAUAAGUG | | [2280-2298] |
| 394 | UACCUAAGAUAGCGGUUGA | UCAACCGCUAUCUUAGGUA | | [1159-1177] |
| 395 | CUAUUAAAAUGAAUGAGCU | AGCUCAUUCAUUUUAAUAG | | [4245-4263] |
| 396 | AUCUGGUCACAAAUUUUGA | UCAAAAUUUGUGACCAGAU | | [3414-3432] |
| 397 | AGAAUGGGAGAGUGAGAGA | UCUCUCACUCUCCCAUUCU | | [3237-3255] |
| 398 | UUUCAUUUUCAACAAGGAA | UUCCUUGUUGAAAAUGAAA | | [1700-1718] |
| 399 | UUUUGAGAGCACUUUUACA | UGUAAAAGUGCUCUCAAAA | | [1914-1932] |
| 400 | AAAACUGUGCUCAACUAUU | AAUAGUUGAGCACAGUUUU | | [4231-4249] |
| 401 | ACAAGAGUUCGAAGACAAC | GUUGUCUUCGAACUCUUGU | | [276-294] |
| 402 | AUGUGAUCACAGGCCUGAA | UUCAGGCCUGUGAUCACAU | | [1513-1531] |
| 403 | ACAUGUUGAGAGUGUCUCA | UGAGACACUCUCAACAUGU | | [2260-2278] |
| 404 | CUUAAAAAUGGACAAAAAG | CUUUUUGUCCAUUUUUAAG | | [1811-1829] |
| 405 | AGCAUUGUUUUUAAUCUUA | UAAGAUUAAAAACAAUGCU | | [4085-4103] |
| 406 | GUGAGAGAAAAUAAAAAAG | CUUUUUUAUUUUCUCUCAC | | [3248-3266] |
| 407 | CUGAGGGUAGGUCUGACAA | UUGUCAGACCUACCCUCAG | | [3534-3552] |
| 408 | GAACUUAGGAAUUGUGACA | UGUCACAAUUCCUAAGUUC | | [2789-2807] |
| 409 | GUUCUUUGUCAUACUACUA | UAGUAGUAUGACAAAGAAC | | [3485-3503] |
| 410 | AAUGAGGAAGAAGGAGAAA | UUUCUCCUUCUUCCUCAUU | | [3162-3180] |
| 411 | UGGUCAUCACCAAGGUGGU | ACCACCUUGGUGAUGACCA | Ms, Rb | [898-916] |
| 412 | UGUUCUGAAUAUAUGUUCA | UGAACAUAUAUUCAGAACA | | [2996-3014] |
| 413 | AAGGGUUCUGCACAUUCUU | AAGAAUGUGCAGAACCCUU | | [2620-2638] |
| 414 | UUGGAGACAGGCAAAAUGA | UCAUUUUGCCUGUCUCCAA | | [445-463] |
| 415 | CCAGAAUAGGAGUUUUCCU | AGGAAAACUCCUAUUCUGG | Rb | [1603-1621] |
| 416 | AUCUCUAUACAGAGAUCAA | UUGAUCUCUGUAUAGAGAU | | [2960-2978] |
| 417 | UGUUCUUUGUCAUACUACU | AGUAGUAUGACAAAGAACA | | [3484-3502] |
| 418 | AAUUGUGACAAAUAUGUAU | AUACAUAUUUGUCACAAUU | | [2798-2816] |
| 419 | AUUCUUGGACUCAAUUUUA | UAAAAUUGAGUCCAAGAAU | | [1986-2004] |
| 420 | AAUAUAGCCUUUCUGAAAU | AUUUCAGAAAGGCUAUAUU | | [3570-3588] |
| 421 | UAAGAUUAUGAAACUGUGA | UCACAGUUUCAUAAUCUUA | | [2045-2063] |
| 422 | GAGAGAAAAUAAAAAAGGC | GCCUUUUUUAUUUUCUCUC | | [3250-3268] |
| 423 | UACUGAAGGAAAUUUUCCA | UGGAAAAUUUCCUUCAGUA | | [2224-2242] |
| 424 | AUCAUCAUCCUAAAAUUAA | UUAAUUUUAGGAUGAUGAU | | [2925-2943] |
| 425 | UUGUAUGUGAAUAAUUCUA | UAGAAUUAUUCACAUACAA | | [4175-4193] |
| 426 | AGUUUUGUUAAAUGAAUGA | UCAUUCAUUUAACAAAACU | | [2443-2461] |
| 427 | GCUUCCUCAGCUACAACAU | AUGUUGUAGCUGAGGAAGC | Rb | [1429-1447] |
| 428 | AAGGAAUGUCAAAGAUUGU | ACAAUCUUUGACAUUCCUU | | [1857-1875] |
| 429 | GAUAGUGAUAAGUUACAUU | AAUGUAACUUAUCACUAUC | | [1878-1896] |
| 430 | UGAUAGUGAUAAGUUACAU | AUGUAACUUAUCACUAUCA | | [1877-1895] |
| 431 | UCAUUAGGACAUAAUACAU | AUGUAUUAUGUCCUAAUGA | | [2245-2263] |
| 432 | GAAACUAUAAUGUAAUGGU | ACCAUUACAUUAUAGUUUC | | [1829-1847] |
| 433 | UGCUUAAAAAUGGACAAAA | UUUUGUCCAUUUUUAAGCA | | [1809-1827] |
| 434 | AAGUGGUCUUCUCCAGCUA | UAGCUGGAGAAGACCACUU | | [2755-2773] |
| 435 | AAGCAUUGUUUUUAAUCUU | AAGAUUAAAAACAAUGCUU | | [4084-4102] |
| 436 | ACUUAUUAGUGACAGUAUU | AAUACUGUCACUAAUAAGU | | [2281-2299] |
| 437 | GAAGAAGGAGAAAGAGCUG | CAGCUCUUUCUCCUUCUUC | | [3168-3186] |
| 438 | CCUUUGAGUGGUUUGCAGA | UCUGCAAACCACUCAAAGG | Ms, Rb | [1363-1381] |
| 439 | GGCUUCCUCAGCUACAACA | UGUUGUAGCUGAGGAAGCC | Rb | [1428-1446] |
| 440 | CAUGGAGCUGAACGAAUUG | CAAUUCGUUCAGCUCCAUG | Rat, Ms, Rb | [678-696] |
| 441 | CUUUGAGUGGUUUGCAGAU | AUCUGCAAACCACUCAAAG | | [1364-1382] |
| 442 | CCAAAGUAUGAACUGGAGA | UCUCCAGUUCAUACUUUGG | | [3729-3747] |
| 443 | UAUAACAGUUUGUGAACAA | UUGUUCACAAACUGUUAUA | | [734-752] |
| 444 | CAUAAUACAUGUUGAGAGU | ACUCUCAACAUGUAUUAUG | | [2254-2272] |
| 445 | AUAAUGAAUUCAAGACAAU | AUUGUCUUGAAUUCAUUAU | | [1564-1582] |
| 446 | AUCCAUGGAGCUGAACGAA | UUCGUUCAGCUCCAUGGAU | Rat, Ms, Rb | [675-693] |
| 447 | UGCCUCAUAUUAAUUAUCA | UGAUAAUUAAUAUGAGGCA | | [567-585] |
| 448 | UAGGGUCAAGAACAGGCUA | UAGCCUGUUCUUGACCCUA | | [2575-2593] |
| 449 | CACUUAGUAUUUAGCAUUU | AAAUGCUAAAUACUAAGUG | | [4040-4058] |
| 450 | AUUAUAUCAUCAUCAUCAU | AUGAUGAUGAUGAUAUAAU | | [2914-2932] |
| 451 | CUCAAGUAAGUUUUGUUAA | UUAACAAAACUUACUUGAG | | [2435-2453] |
| 452 | AUUUUUUUCCUCUCAGUAA | UUACUGAGAGGAAAAAAAU | | [1944-1962] |
| 453 | CUCAAUUUUGCUCGAAAGA | UCUUUCGAGCAAAAUUGAG | | [471-489] |
| 454 | GAUGUUGUUUUGAUUAUCU | AGAUAAUCAAAACAACAUC | | [3375-3393] |
| 455 | AUCUCACCUUUCAUAAAAU | AUUUUAUGAAAGGUGAGAU | | [304-322] |
| 456 | AUUGAUUGGAGUUAAUGUA | UACAUUAACUCCAAUCAAU | | [2376-2394] |
| 457 | CAUGUUGAGAGUGUCUCAA | UUGAGACACUCUCAACAUG | | [2261-2279] |
| 458 | GGUUCAAAAUGGAAGUGGG | CCCACUUCCAUUUUGAACC | | [961-979] |
| 459 | AAAGAAGAAGGAAACCAAG | CUUGGUUUCCUUCUUCUUU | | [2155-2173] |
| 460 | AGAAAUAACUUCUAUUACU | AGUAAUAGAAGUUAUUUCU | | [2527-2545] |
| 461 | UGAGUCAGGCUCUGUUUAU | AUAAACAGAGCCUGACUCA | | [3693-3711] |
| 462 | UUGAUUGGAGUUAAUGUAA | UUACAUUAACUCCAAUCAA | | [2377-2395] |
| 463 | UUAUUAUCAUACUGAAGGA | UCCUUCAGUAUGAUAAUAA | | [2215-2233] |
| 464 | AGGAUACUAACCAAUAGGA | UCCUAUUGGUUAGUAUCCU | | [2594-2612] |
| 465 | UGUUCACACUGCACCUCAG | CUGAGGUGCAGUGUGAACA | | [3630-3648] |
| 466 | AUGAAGCAUUGUUUUUAAU | AUUAAAAACAAUGCUUCAU | | [4081-4099] |
| 467 | GAAUCUUUUAAAAUCUGGU | ACCAGAUUUUAAAAGAUUC | | [3402-3420] |
| 468 | UGAUGAAGCAUUGUUUUUA | UAAAAACAAUGCUUCAUCA | | [4079-4097] |
| 469 | AAUAAAGAACCCUGAAGGA | UCCUUCAGGGUUCUUUAUU | | [491-509] |
| 470 | GUUUCAAUUCUUUACACCA | UGGUGUAAAGAAUUGAAAC | | [3713-3731] |
| 471 | GUGACCAGAUCUAGCCCAU | AUGGGCUAGAUCUGGUCAC | | [2060-2078] |
| 472 | AGAGAGUCUCUAAAUCACU | AGUGAUUUAGAGACUCUCU | | [3017-3035] |
| 473 | AAAGGGAAAGGAUCAAAAG | CUUUUGAUCCUUUCCCUUU | | [2011-2029] |
| 474 | AUGAGGUGGUGAUGUUAGU | ACUAACAUCACCACCUCAU | Rat, Ms, Rb | [1216-1234] |
| 475 | GAUUUCUUAAAGUUUGAUA | UAUCAAACUUUAAGAAAUC | | [3320-3338] |
| 476 | UUCUUAUUUGAAGCAUGAA | UUCAUGCUUCAAAUAAGAA | | [2634-2652] |
| 477 | AGUUAUGAAAGUAGAGAGA | UCUCUCUACUUUCAUAACU | | [3873-3891] |
| 478 | CUGAGUAAACAAAGCAUCU | AGAUGCUUUGUUUACUCAG | | [1650-1668] |
| 479 | CUUUCUAACCUAUGUGCAU | AUGCACAUAGGUUAGAAAG | | [3785-3803] |
| 480 | UUUGCUCGAAAGAGAAUAA | UUAUUCUCUUUCGAGCAAA | | [477-495] |
| 481 | GAGAGUGUUUCUCCAAGGU | ACCUUGGAGAAACACUCUC | | [3832-3850] |
| 482 | AAAGAGGGUUGGAGGUGGA | UCCACCUCCAACCCUCUUU | | [2654-2672] |
| 483 | GAUCAUUAGGACAUAAUAC | GUAUUAUGUCCUAAUGAUC | | [2243-2261] |
| 484 | UUAUGAAACUGUGACCAGA | UCUGGUCACAGUUUCAUAA | | [2050-2068] |
| 485 | UCAUCUAUUCAACAGAUAU | AUAUCUGUUGAAUAGAUGA | | [3657-3675] |
| 486 | GGUUUAUUUGUAUUAUAUC | GAUAUAAUACAAAUAAACC | | [2903-2921] |
| 487 | CUAAAGAAAUAACUUCUAU | AUAGAAGUUAUUUCUUUAG | | [2523-2541] |
| 488 | CAAGAGUUCGAAGACAACU | AGUUGUCUUCGAACUCUUG | | [277-295] |
| 489 | ACAAAUAUGUAUCUGAUAU | AUAUCAGAUACAUAUUUGU | | [2805-2823] |
| 490 | AAAUCUGGUCACAAAUUUU | AAAAUUUGUGACCAGAUUU | | [3412-3430] |
| 491 | UGAACUAAAUAAGAACUCA | UGAGUUCUUAUUUAGUUCA | | [3463-3481] |
| 492 | AGUAAACAAAGCAUCUCCA | UGGAGAUGCUUUGUUUACU | | [1653-1671] |
| 493 | CUAUGAAGGUUUUUCUUAG | CUAAGAAAAACCUUCAUAG | | [4107-4125] |
| 494 | UAUAAUUGAAGGAGGUAUA | UAUACCUCCUUCAAUUAUA | | [3348-3366] |
| 495 | ACUUAGUAUUUAGCAUUUA | UAAAUGCUAAAUACUAAGU | | [4041-4059] |
| 496 | GAGCGGAUACUCAAGUAAG | CUUACUUGAGUAUCCGCUC | | [2426-2444] |
| 497 | UGUGGAGCUCUAUGGUUUU | AAAACCAUAGAGCUCCACA | | [1899-1917] |
| 498 | CAGAUCUGCUGCAACUGCU | AGCAGUUGCAGCAGAUCUG | | [1378-1396] |
| 499 | CAGAUGUUCUUUCUACAGA | UCUGUAGAAAGAACAUCUG | | [2347-2365] |
| 500 | UACUGAGCUGCCUCAGAAU | AUUCUGAGGCAGCUCAGUA | | [2109-2127] |

TABLE A7
NOX5 19-mer 19-mer oligomer pairs to NADPH oxidase 5

| | | | | |
|---|---|---|---|---|
| | | | | Human-20127623 |
| No. | Sense siRNA | AntiSense siRNA | Other Sp | ORF: 302-2545 |

| | | | |
|---|---|---|---|
| 1 | CCCUAUUUGACUCCGAUAG | CUAUCGGAGUCAAAUAGGG | [447-465 |
| 2 | CUAUUUGACUCCGAUAGAA | UUCUAUCGGAGUCAAAUAG | [449-467 |
| 3 | AGAUACUUUUGGAGAAACA | UGUUUCUCCAAAAGUAUCU | [1902-1920 |
| 4 | CUGAGAUACUUUUGGAGAA | UUCUCCAAAAGUAUCUCAG | [1899-1917 |
| 5 | CCCUUUUUUUCACUAUAGA | UCUAUAGUGAAAAAAAGGG | [1645-1663 |
| 6 | GUGCCUGGAAUCUUGUUUU | AAAACAAGAUUCCAGGCAC | [1520-1538 |
| 7 | GAACUUUGUACUCCAGGCU | AGCCUGGAGUACAAAGUUC | [1249-1267 |
| 8 | GAGAUACUUUUGGAGAAAC | GUUUCUCCAAAAGUAUCUC | [1901-1919 |
| 9 | GGCUGUAUGAGUCCUUCAA | UUGAAGGACUCAUACAGCC | [1797-1815 |
| 10 | AGGGCUCUGAGAUACUUUU | AAAAGUAUCUCAGAGCCCU | [1893-1911 |
| 11 | GAAUCUUGUUUUUCCUGGA | UCCAGGAAAAACAAGAUUC | [1527-1545 |
| 12 | GGUGCCUGGAAUCUUGUUU | AAACAAGAUUCCAGGCACC | [1519-1537 |
| 13 | ACACUGUGAACUUUGUACU | AGUACAAAGUUCACAGUGU | [1242-1260 |
| 14 | UGCUGACUAAACUGGAGAU | AUCUCCAGUUUAGUCAGCA | [2202-2220 |
| 15 | CCUAUUUGACUCCGAUAGA | UCUAUCGGAGUCAAAUAGG | [448-466 |
| 16 | GCAGUUUAAGACCAUUGCA | UGCAAUGGUCUUAAACUGC | [346-364 |
| 17 | GCUGACUAAACUGGAGAUG | CAUCUCCAGUUUAGUCAGC | [2203-2221 |
| 18 | AGAAAAGAAAGCAUACUUG | CAAGUAUGCUUUCUUUUCU | [2070-2088 |
| 19 | UACUUUUGGAGAAACACAA | UUGUGUUUCUCCAAAAGUA | [1905-1923 |
| 20 | CCAAGAGAAUUUCUAGCCU | AGGCUAGAAAUUCUCUUGG | [2530-2548 |
| 21 | CCAUUCUGCAGAGUAUCAU | AUGAUACUCUGCAGAAUGG | [2040-2058 |
| 22 | GGGCUCUGAGAUACUUUUG | CAAAAGUAUCUCAGAGCCC | [1894-1912 |
| 23 | GGACAAACAGGCUGUAUGA | UCAUACAGCCUGUUUGUCC | [1788-1806 |
| 24 | CCCAUGGACAAACUCAAAU | AUUUGAGUUUGUCCAUGGG | [527-545 |
| 25 | UGCAUGUGAAAGAGUCCUU | AAGGACUCUUUCACAUGCA | [408-426 |
| 26 | CAGCAGUUUAAGACCAUUG | CAAUGGUCUUAAACUGCUG | [344-362 |
| 27 | UCAUGUUGUAUCUGGAAUU | AAUUCCAGAUACAACAUGA | [228-246] |
| 28 | ACAGGCACCAGAAAAGAAA | UUUCUUUUCUGGUGCCUGU | [2061-2079 |
| 29 | GGCUCUGAGAUACUUUUGG | CCAAAAGUAUCUCAGAGCC | [1895-1913 |
| 30 | CCAAGGGCUCUGAGAUACU | AGUAUCUCAGAGCCCUUGG | [1890-1908 |
| 31 | UCAGCCUGCAAGAAUUCAA | UUGAAUUCUUGCAGGCUGA | [381-399 |
| 32 | UGGACUUUAUCUGGAUCAA | UUGAUCCAGAUAAAGUCCA | [2148-2166 |
| 33 | AGGUCACUCAUCUCCUCAU | AUGAGGAGAUGAGUGACCU | [1617-1635 |
| 34 | CCGUGUGCAUCAUGGAAGU | ACUUCCAUGAUGCACACGG | [1581-1599 |
| 35 | CAGCCUGCAAGAAUUCAAA | UUUGAAUUCUUGCAGGCUG | [382-400 |
| 36 | GGGCCAUUGUGAGAAGUUC | GAACUUCUCACAAUGGCCC | [2497-2515 |
| 37 | AGCAAGGUGUUCCAGAAAG | CUUUCUGGAACACCUUGCU | [2408-2426 |
| 38 | CUGCUGACUAAACUGGAGA | UCUCCAGUUUAGUCAGCAG | [2201-2219 |
| 39 | CCUGCUGACUAAACUGGAG | CUCCAGUUUAGUCAGCAGG | [2200-2218 |
| 40 | GGACUUUAUCUGGAUCAAC | GUUGAUCCAGAUAAAGUCC | [2149-2167 |
| 41 | AGGUGGACUUUAUCUGGAU | AUCCAGAUAAAGUCCACCU | [2145-2163 |
| 42 | GUCAUGUUGUAUCUGGAAU | AUUCCAGAUACAACAUGAC | [227-245] |
| 43 | CUCUGAGAUACUUUUGGAG | CUCCAAAAGUAUCUCAGAG | [1897-1915 |
| 44 | AGAGUCAAAGGUCGUCCAA | UUGGACGACCUUUGACUCU | [1875-1893 |
| 45 | UGCCUGGAAUCUUGUUUUU | AAAAACAAGAUUCCAGGCA | [1521-1539 |
| 46 | UACCACUGGACCAGAACAU | AUGUUCUGGUCCAGUGGUA | [1161-1179 |
| 47 | ACAAACUCAAAUUCCUCUU | AAGAGGAAUUUGAGUUUGU | [534-552 |
| 48 | UGGGCAAGAAUGACAUGAA | UUCAUGUCAUUCUUGCCCA | [2286-2304 |
| 49 | GCAGUCAUGUUGUAUCUGG | CCAGAUACAACAUGACUGC | [224-242] |
| 50 | GACAAUGAGAAAGAGUCAA | UUGACUCUUUCUCAUUGUC | [1864-1882 |
| 51 | GCUGUAUGAGUCCUUCAAG | CUUGAAGGACUCAUACAGC | [1798-1816 |
| 52 | UGGACAAACAGGCUGUAUG | CAUACAGCCUGUUUGUCCA | [1787-1805 |
| 53 | CGAGGUCUCAAUCCAUUGC | GCAAUGGAUUGAGACCUCG | [191-209] |
| 54 | CCUUUUUUUCACUAUAGAC | GUCUAUAGUGAAAAAAAGG | [1646-1664 |
| 55 | UGUGCAUCAUGGAAGUCAA | UUGACUUCCAUGAUGCACA | [1584-1602 |
| 56 | UCAUCUUUCAUGGGCCCAA | UUGGGCCCAUGAAAGAUGA | [1482-1500 |
| 57 | UGCUCCUCCUCAUGUUCAU | AUGAACAUGAGGAGGAGCA | [1377-1395 |
| 58 | GCAAGAAUUCAAAGCAGCU | AGCUGCUUUGAAUUCUUGC | [388-406 |
| 59 | AGCGGUCUUUCGAGUGGUU | AACCACUCGAAAGACCGCU | [2175-2193 |
| 60 | CCAGAAAAGAAAGCAUACU | AGUAUGCUUUCUUUUCUGG | [2068-2086 |
| 61 | CAAUGAGAAAGAGUCAAAG | CUUUGACUCUUUCUCAUUG | [1866-1884 |
| 62 | CUGGUAUGCAGUCAUGUUG | CAACAUGACUGCAUACCAG | [217-235] |
| 63 | AGGAGUGUGACAAUGAGAA | UUCUCAUUGUCACACUCCU | [1856-1874 |
| 64 | GUGGACAAACAGGCUGUAU | AUACAGCCUGUUUGUCCAC | [1786-1804 |
| 65 | CCAAGGUCACUCAUCUCCU | AGGAGAUGAGUGACCUUGG | [1614-1632 |
| 66 | UGCUGCUCCUCCUCAUGUU | AACAUGAGGAGGAGCAGCA | [1374-1392 |
| 67 | CAAGAAUUCAAAGCAGCUC | GAGCUGCUUUGAAUUCUUG | [389-407 |
| 68 | AGGGCCAUUGUGAGAAGUU | AACUUCUCACAAUGGCCCU | [2496-2514 |
| 69 | UGAAGGGCCAUUGUGAGAA | UUCUCACAAUGGCCCUUCA | [2493-2511 |
| 70 | GUGGACUUUAUCUGGAUCA | UGAUCCAGAUAAAGUCCAC | [2147-2165 |
| 71 | UCCAAGACAACAUGAAGCU | AGCUUCAUGUUGUCUUGGA | [2121-2139 |
| 72 | CAGAAAAGAAAGCAUACUU | AAGUAUGCUUUCUUUUCUG | [2069-2087 |
| 73 | GCACCAGAAAAGAAAGCAU | AUGCUUUCUUUUCUGGUGC | [2065-2083 |
| 74 | GCUUCCAUUCUGCAGAGUA | UACUCUGCAGAAUGGAAGC | [2036-2054 |
| 75 | GCUACAUCGAUGGGCCUUA | UAAGGCCCAUCGAUGUAGC | [1941-1959 |
| 76 | CAAACAGGCUGUAUGAGUC | GACUCAUACAGCCUGUUUG | [1791-1809 |
| 77 | ACACUAUCUGGCUGCACAU | AUGUGCAGCCAGAUAGUGU | [1752-1770 |
| 78 | CUGAGCAGAAAGACACUAU | AUAGUGUCUUUCUGCUCAG | [1740-1758 |
| 79 | CCUGAGCAGAAAGACACUA | UAGUGUCUUUCUGCUCAGG | [1739-1757 |
| 80 | GACUACUUGUAUCUGAACA | UGUUCAGAUACAAGUAGUC | [1670-1688 |
| 81 | CCGAGGUCUCAAUCCAUUG | CAAUGGAUUGAGACCUCGG | [190-208] |
| 82 | ACCUGGUGACUACUUGUAU | AUACAAGUAGUCACCAGGU | [1663-1681 |
| 83 | AGGUGUAUGACAUCGAUGU | ACAUCGAUGUCAUACACCU | [555-573 |
| 84 | UGGGUGACUCAGCAGUUUA | UAAACUGCUGAGUCACCCA | [335-353 |
| 85 | AGAAUUUCUAGCCUCACCU | AGGUGAGGCUAGAAAUUCU | [2535-2553 |
| 86 | AAGUUCGGCUUCAGAUUUU | AAAAUCUGAAGCCGAACUU | [2510-2528 |
| 87 | GCCAUUGUGAGAAGUUCGG | CCGAACUUCUCACAAUGGC | [2499-2517 |
| 88 | GCAAGAAUGACAUGAAGGC | GCCUUCAUGUCAUUCUUGC | [2289-2307 |
| 89 | GGUGGACUUUAUCUGGAUC | GAUCCAGAUAAAGUCCACC | [2146-2164 |
| 90 | AGAGUAUCAUGUACAGGCA | UGCCUGUACAUGAUACUCU | [2049-2067 |
| 91 | CAGUCAUGUUGUAUCUGGA | UCCAGAUACAACAUGACUG | [225-243] |
| 92 | GUAUGCAGUCAUGUUGUAU | AUACAACAUGACUGCAUAC | [220-238] |
| 93 | GUGUGACAAUGAGAAAGAG | CUCUUUCUCAUUGUCACAC | [1860-1878 |
| 94 | GGUUCUAAGAGGCUGUCGA | UCGACAGCCUCUUAGAACC | [1838-1856 |
| 95 | CGUGGUUCUAAGAGGCUGU | ACAGCCUCUUAGAACCACG | [1835-1853 |
| 96 | AGUGGACAAACAGGCUGUA | UACAGCCUGUUUGUCCACU | [1785-1803 |
| 97 | GACACUAUCUGGCUGCACA | UGUGCAGCCAGAUAGUGUC | [1751-1769 |
| 98 | GUGUGCAUCAUGGAAGUCA | UGACUUCCAUGAUGCACAC | [1583-1601 |
| 99 | AGGUGUUCUAUUGGACUCA | UGAGUCCAAUAGAACACCU | [1434-1452 |
| 100 | GAGGUGUUCUAUUGGACUC | GAGUCCAAUAGAACACCUC | [1433-1451 |
| 101 | CUCCUCCUCAUGUUCAUCU | AGAUGAACAUGAGGAGGAG | [1379-1397 |
| 102 | UCCAGGUGUAUGACAUCGA | UCGAUGUCAUACACCUGGA | [552-570 |
| 103 | UCCGAUAGAAGUGGCACCA | UGGUGCCACUUCUAUCGGA | [458-476 |
| 104 | CGAUUCUUUGCCCUAUUUG | CAAAUAGGGCAAAGAAUCG | [437-455 |
| 105 | UCAGCAGUUUAAGACCAUU | AAUGGUCUUAAACUGCUGA | [343-361 |
| 106 | AGCCCUUAGUCCUUCUAGU | ACUAGAAGGACUAAGGGCU | [134-152] |
| 107 | AGUUCGGCUUCAGAUUUUU | AAAAAUCUGAAGCCGAACU | [2511-2529 |
| 108 | CACUGGGCAAGAAUGACAU | AUGUCAUUCUUGCCCAGUG | [2283-2301 |
| 109 | UGCAGAGUAUCAUGUACAG | CUGUACAUGAUACUCUGCA | [2046-2064 |
| 110 | CUGCAGAGUAUCAUGUACA | UGUACAUGAUACUCUGCAG | [2045-2063 |
| 111 | CUUUUGGAGAAACACAAAU | AUUUGUGUUUCUCCAAAAG | [1907-1925 |
| 112 | AGUGUGACAAUGAGAAAGA | UCUUUCUCAUUGUCACACU | [1859-1877 |
| 113 | GUGGUUCUAAGAGGCUGUC | GACAGCCUCUUAGAACCAC | [1836-1854 |
| 114 | CACUAUCUGGCUGCACAUU | AAUGUGCAGCCAGAUAGUG | [1753-1771 |
| 115 | GCCUGGAAUCUUGUUUUUC | GAAAAACAAGAUUCCAGGC | [1522-1540 |
| 116 | UCCUCCUCAUGUUCAUCUG | CAGAUGAACAUGAGGAGGA | [1380-1398 |
| 117 | UGACAUCGAUGUGUGUGCA | UGCACACACAUCGAUGUCA | [562-580 |
| 118 | GUGUAUGACAUCGAUGUGU | ACACAUCGAUGUCAUACAC | [557-575 |
| 119 | UCUUUGCAGAGCGAUUCUU | AAGAAUCGCUCUGCAAAGA | [426-444 |
| 120 | CCCUUAGUCCUUCUAGUUG | CAACUAGAAGGACUAAGGG | [136-154] |
| 121 | CUCAGCAGUUUAAGACCAU | AUGGUCUUAAACUGCUGAG | [342-360 |
| 122 | GUAUCUGGAAUUGGUGGGU | ACCCACCAAUUCCAGAUAC | [235-253] |
| 123 | CACCAGAAAAGAAAGCAUA | UAUGCUUUCUUUUCUGGUG | [2066-2084 |
| 124 | GUCGAGGAGUGUGACAAUG | CAUUGUCACACUCCUCGAC | [1852-1870 |
| 125 | GAAAGACACUAUCUGGCUG | CAGCCAGAUAGUGUCUUUC | [1747-1765 |
| 126 | UCUUGUUUUUCCUGGAGAA | UUCUCCAGGAAAAACAAGA | [1530-1548 |
| 127 | GCUUCUGCUCAUCUUUCAU | AUGAAAGAUGAGCAGAAGC | [1474-1492 |
| 128 | GUCCUUCUAGUUGCGCUUU | AAAGCGCAACUAGAAGGAC | [142-160] |
| 129 | AGUCCUUCUAGUUGCGCUU | AAGCGCAACUAGAAGGACU | [141-159] |
| 130 | GGAGAAACACAAAUUCUGU | ACAGAAUUUGUGUUUCUCC | [1912-1930 |
| 131 | UCUUCCAGGUGUAUGACAU | AUGUCAUACACCUGGAAGA | [549-567 |
| 132 | GCCCUAUUUGACUCCGAUA | UAUCGGAGUCAAAUAGGGC | [446-464 |
| 133 | CAGUUUAAGACCAUUGCAG | CUGCAAUGGUCUUAAACUG | [347-365 |
| 134 | UGCCCUAUUUGACUCCGAU | AUCGGAGUCAAAUAGGGCA | [445-463 |
| 135 | GGCCAACAAGGAGAAGAAA | UUUCUUCUCCUUGUUGGCC | [2338-2356 |
| 136 | GCCACUUUGAGGUGUUCUA | UAGAACACCUCAAAGUGGC | [1425-1443 |
| 137 | UCCUUCUAGUUGCGCUUUU | AAAAGCGCAACUAGAAGGA | [143-161] |
| 138 | UGGCCAACAAGGAGAAGAA | UUCUUCUCCUUGUUGGCCA | [2337-2355 |
| 139 | GAGAAACACAAAUUCUGUA | UACAGAAUUUGUGUUUCUC | [1913-1931 |
| 140 | CCACCAUUGCUCGCUAUGA | UCAUAGCGAGCAAUGGUGG | [1692-1710 |
| 141 | GGCUCACACUGUGAACUUU | AAAGUUCACAGUGUGAGCC | [1237-1255 |
| 142 | AGCGAUUCUUUGCCCUAUU | AAUAGGGCAAAGAAUCGCU | [435-453 |
| 143 | UGGCUCACACUGUGAACUU | AAGUUCACAGUGUGAGCCA | [1236-1254 |
| 144 | GGAGAAGAAAGACUCCAUC | GAUGGAGUCUUUCUUCUCC | [2347-2365 |
| 145 | GCGGUCUUUCGAGUGGUUU | AAACCACUCGAAAGACCGC | [2176-2194 |
| 146 | ACAGAGACCAGCGGUCUUU | AAAGACCGCUGGUCUCUGU | [2166-2184 |
| 147 | GGAAUCUUGUUUUUCCUGG | CCAGGAAAAACAAGAUUCC | [1526-1544 |
| 148 | GCUUAUCCGAGGUCUCAAU | AUUGAGACCUCGGAUAAGC | [184-202] |
| 149 | CUGUGAACUUUGUACUCCA | UGGAGUACAAAGUUCACAG | [1245-1263 |
| 150 | CGGCUUCAGAUUUUUCCAA | UUGGAAAAAUCUGAAGCCG | [2515-2533 |
| 151 | GGGUUCUUGGUCUCACUGA | UCAGUGAGACCAAGAACCC | [250-268] |
| 152 | GUGGGUUCUUGGUCUCACU | AGUGAGACCAAGAACCCAC | [248-266] |
| 153 | GUGGCCACUUUGAGGUGUU | AACACCUCAAAGUGGCCAC | [1422-1440 |
| 154 | CCAGAACAUCCAGUUCCAC | GUGGAACUGGAUGUUCUGG | [1171-1189 |
| 155 | UCAACUUCGACUGCAGCUU | AAGCUGCAGUCGAAGUUGA | [1077-1095 |
| 156 | CCUUCUAGUUGCGCUUUUG | CAAAAGCGCAACUAGAAGG | [144-162] |
| 157 | CAAGAAUGAAGCCGCAGAC | GUCUGCGGCUUCAUUCUUG | [272-290] |
| 158 | AGGAGAAGAAAGACUCCAU | AUGGAGUCUUUCUUCUCCU | [2346-2364 |
| 159 | UGAGCCUGCUGACUAAACU | AGUUUAGUCAGCAGGCUCA | [2196-2214 |
| 160 | GGUCUUUCGAGUGGUUUGU | ACAAACCACUCGAAAGACC | [2178-2196 |
| 161 | CGAAGGUGUCCAAGACAAC | GUUGUCUUGGACACCUUCG | [2113-2131 |
| 162 | UGGAGAAACACAAAUUCUG | CAGAAUUUGUGUUUCUCCA | [1911-1929 |
| 163 | CAGGCUGGUAUGCAGUCAU | AUGACUGCAUACCAGCCUG | [213-231] |
| 164 | UCAUGUUCAUCUGCUCCAG | CUGGAGCAGAUGAACAUGA | [1386-1404 |
| 165 | CUCCUCAUGUUCAUCUGCU | AGCAGAUGAACAUGAGGAG | [1382-1400 |
| 166 | UCACACUGUGAACUUUGUA | UACAAAGUUCACAGUGUGA | [1240-1258 |
| 167 | GCGCUUUUGCUAUGGCCUU | AAGGCCAUAGCAAAAGCGC | [154-172] |
| 168 | UCCAGUUCCACCAGCUUAU | AUAAGCUGGUGGAACUGGA | [1179-1197 |
| 169 | ACAUCCAGUUCCACCAGCU | AGCUGGUGGAACUGGAUGU | [1176-1194 |
| 170 | UCAAGAAUGAAGCCGCAGA | UCUGCGGCUUCAUUCUUGA | [271-289] |
| 171 | UCAGAUUUUUCCAAGAGAA | UUCUCUUGGAAAAAUCUGA | [2520-2538 |
| 172 | CUGGAAUUGGUGGGUUCUU | AAGAACCCACCAAUUCCAG | [239-257] |
| 173 | AGCUGCAUAUGUACAUGAC | GUCAUGUACAUAUGCAGCU | [2259-2277 |
| 174 | CGGUCUUUCGAGUGGUUUG | CAAACCACUCGAAAGACCG | [2177-2195 |
| 175 | AAGGUGUCCAAGACAACAU | AUGUUGUCUUGGACACCUU | [2115-2133 |
| 176 | GGCUUAUCCGAGGUCUCAA | UUGAGACCUCGGAUAAGCC | [183-201] |
| 177 | CUCAUGUUCAUCUGCUCCA | UGGAGCAGAUGAACAUGAG | [1385-1403 |
| 178 | UCCUCAUGUUCAUCUGCUC | GAGCAGAUGAACAUGAGGA | [1383-1401 |
| 179 | CACACUGUGAACUUUGUAC | GUACAAAGUUCACAGUGUG | [1241-1259 |
| 180 | CUCACACUGUGAACUUUGU | ACAAAGUUCACAGUGUGAG | [1239-1257 |
| 181 | CGCCUAUGAAGCCCUUAGU | ACUAAGGGCUUCAUAGGCG | [125-143] |
| 182 | UGCCUCAACUUCGACUGCA | UGCAGUCGAAGUUGAGGCA | [1073-1091 |
| 183 | CCUUCUUUGCAGAGCGAUU | AAUCGCUCUGCAAAGAAGG | [423-441 |
| 184 | GCAUGUGAAAGAGUCCUUC | GAAGGACUCUUUCACAUGC | [409-427 |
| 185 | AGAAGAAAGACUCCAUCAC | GUGAUGGAGUCUUUCUUCU | [2349-2367 |
| 186 | AGCUCCAUAAGGUGGACUU | AAGUCCACCUUAUGGAGCU | [2136-2154 |
| 187 | AGGUGUCCAAGACAACAUG | CAUGUUGUCUUGGACACCU | [2116-2134 |
| 188 | GUAACAUCAAGUGCUACAU | AUGUAGCACUUGAUGUUAC | [1929-1947 |
| 189 | ACAGGCUGUAUGAGUCCUU | AAGGACUCAUACAGCCUGU | [1794-1812 |
| 190 | CAGUGCUCCUGAGCAGAAA | UUUCUGCUCAGGAGCACUG | [1732-1750 |
| 191 | CCAUUGCUCGCUAUGAGUG | CACUCAUAGCGAGCAAUGG | [1695-1713 |
| 192 | GCAUCAUGGAAGUCAACCU | AGGUUGACUUCCAUGAUGC | [1587-1605 |
| 193 | ACCAGCUUAUGGGCUACGU | ACGUAGCCCAUAAGCUGGU | [1188-1206 |
| 194 | CCAGUUCCACCAGCUUAUG | CAUAAGCUGGUGGAACUGG | [1180-1198 |
| 195 | UCCUACCACUGGACCAGAA | UUCUGGUCCAGUGGUAGGA | [1158-1176 |
| 196 | CUAGUUGCGCUUUUGCUAU | AUAGCAAAAGCGCAACUAG | [148-166] |
| 197 | ACGCCUAUGAAGCCCUUAG | CUAAGGGCUUCAUAGGCGU | [124-142] |
| 198 | CUGCAAGAAUUCAAAGCAG | CUGCUUUGAAUUCUUGCAG | [386-404 |
| 199 | CCUGCAAGAAUUCAAAGCA | UGCUUUGAAUUCUUGCAGG | [385-403 |
| 200 | GGCUUCAGAUUUUUCCAAG | CUUGGAAAAAUCUGAAGCC | [2516-2534 |
| 201 | GUGAGAAGUUCGGCUUCAG | CUGAAGCCGAACUUCUCAC | [2505-2523 |
| 202 | CUGAGAAGAAGGGCAAGGU | ACCUUGCCCUUCUUCUCAG | [2433-2451 |
| 203 | ACAAGGAGAAGAAAGACUC | GAGUCUUUCUUCUCCUUGU | [2343-2361 |
| 204 | GCAUAUGUACAUGACAUCU | AGAUGUCAUGUACAUAUGC | [2263-2281 |
| 205 | CUGCAUAUGUACAUGACAU | AUGUCAUGUACAUAUGCAG | [2261-2279 |
| 206 | GCUUCCUGGAGCUGCAUAU | AUAUGCAGCUCCAGGAAGC | [2250-2268 |
| 207 | CUAAACUGGAGAUGGACCA | UGGUCCAUCUCCAGUUUAG | [2208-2226 |
| 208 | UCGAAGGUGUCCAAGACAA | UUGUCUUGGACACCUUCGA | [2112-2130 |
| 209 | CUGGAUCGAAGGUGUCCAA | UUGGACACCUUCGAUCCAG | [2107-2125 |
| 210 | CCACUUUGAGGUGUUCUAU | AUAGAACACCUCAAAGUGG | [1426-1444 |
| 211 | GGCCACUUUGAGGUGUUCU | AGAACACCUCAAAGUGGCC | [1424-1442 |
| 212 | GCUCCAUAAGGUGGACUUU | AAAGUCCACCUUAUGGAGC | [2137-2155 |
| 213 | AGACAACAUGAAGCUCCAU | AUGGAGCUUCAUGUUGUCU | [2125-2143 |
| 214 | GUGUCCAAGACAACAUGAA | UUCAUGUUGUCUUGGACAC | [2118-2136 |
| 215 | CCCUUUGCUUCCAUUCUGC | GCAGAAUGGAAGCAAAGGG | [2030-2048 |
| 216 | AUGUUCAUCUGCUCCAGUU | AACUGGAGCAGAUGAACAU | [1388-1406 |
| 217 | UCCACCAGCUUAUGGGCUA | UAGCCCAUAAGCUGGUGGA | [1185-1203 |
| 218 | ACCAGAACAUCCAGUUCCA | UGGAACUGGAUGUUCUGGU | [1170-1188 |
| 219 | UGGACCAGAACAUCCAGUU | AACUGGAUGUUCUGGUCCA | [1167-1185 |
| 220 | UGGCUCAAGUCCUACCACU | AGUGGUAGGACUUGAGCCA | [1149-1167 |
| 221 | UCAUGGAGAACCUGACCAU | AUGGUCAGGUUCUCCAUGA | [846-864 |
| 222 | CGAUAGAAGUGGCACCAUC | GAUGGUGCCACUUCUAUCG | [460-478 |
| 223 | CCGAUAGAAGUGGCACCAU | AUGGUGCCACUUCUAUCGG | [459-477 |
| 224 | CAAGAGAAUUUCUAGCCUC | GAGGCUAGAAAUUCUCUUG | [2531-2549 |
| 225 | GAGAAGUUCGGCUUCAGAU | AUCUGAAGCCGAACUUCUC | [2507-2525 |
| 226 | GUGCAGGUCUUCUUCUGUG | CACAGAAGAAGACCUGCAC | [2450-2468 |
| 227 | UGGAGCUGCAUAUGUACAU | AUGUACAUAUGCAGCUCCA | [2256-2274 |
| 228 | UCCAUAAGGUGGACUUUAU | AUAAAGUCCACCUUAUGGA | [2139-2157 |
| 229 | ACUACUUGUAUCUGAACAU | AUGUUCAGAUACAAGUAGU | [1671-1689 |
| 230 | CCUGGUGACUACUUGUAUC | GAUACAAGUAGUCACCAGG | [1664-1682 |
| 231 | UCACUAUAGACCUGGUGAC | GUCACCAGGUCUAUAGUGA | [1654-1672 |
| 232 | CUGUGGCUCACACUGUGAA | UUCACAGUGUGAGCCACAG | [1233-1251 |
| 233 | AGAACAUCCAGUUCCACCA | UGGUGGAACUGGAUGUUCU | [1173-1191 |
| 234 | UCAAGUCCUACCACUGGAC | GUCCAGUGGUAGGACUUGA | [1153-1171 |
| 235 | CUCAAGUCCUACCACUGGA | UCCAGUGGUAGGACUUGAG | [1152-1170 |
| 236 | AGAGCGAUUCUUUGCCCUA | UAGGGCAAAGAAUCGCUCU | [433-451 |
| 237 | GUCCUUCUUUGCAGAGCGA | UCGCUCUGCAAAGAAGGAC | [421-439 |
| 238 | AAGCAGCUCUGCAUGUGAA | UUCACAUGCAGAGCUGCUU | [399-417 |
| 239 | CAAAGCAGCUCUGCAUGUG | CACAUGCAGAGCUGCUUUG | [397-415 |
| 240 | AGAAUUCAAAGCAGCUCUG | CAGAGCUGCUUUGAAUUCU | [391-409 |
| 241 | GCCUGCAAGAAUUCAAAGC | GCUUUGAAUUCUUGCAGGC | [384-402 |
| 242 | GAAGCCCUUAGUCCUUCUA | UAGAAGGACUAAGGGCUUC | [132-150] |
| 243 | GCCUGCUGACUAAACUGGA | UCCAGUUUAGUCAGCAGGC | [2199-2217 |
| 244 | UCAUGUACAGGCACCAGAA | UUCUGGUGCCUGUACAUGA | [2055-2073 |
| 245 | GUAUCAUGUACAGGCACCA | UGGUGCCUGUACAUGAUAC | [2052-2070 |
| 246 | CUGGUGACUACUUGUAUCU | AGAUACAAGUAGUCACCAG | [1665-1683 |
| 247 | CAAGGUCACUCAUCUCCUC | GAGGAGAUGAGUGACCUUG | [1615-1633 |
| 248 | GGCUUCUGCUCAUCUUUCA | UGAAAGAUGAGCAGAAGCC | [1473-1491 |
| 249 | UGUGGCUUCUGCUCAUCUU | AAGAUGAGCAGAAGCCACA | [1470-1488 |
| 250 | GGUGUUCUAUUGGACUCAC | GUGAGUCCAAUAGAACACC | [1435-1453 |
| 251 | CGCUUUUGCUAUGGCCUUC | GAAGGCCAUAGCAAAAGCG | [155-173] |
| 252 | GGACCAGAACAUCCAGUUC | GAACUGGAUGUUCUGGUCC | [1168-1186 |
| 253 | UGGAGAACCUGACCAUCAG | CUGAUGGUCAGGUUCUCCA | [849-867 |
| 254 | CUCUGCAUGUGAAAGAGUC | GACUCUUUCACAUGCAGAG | [405-423 |
| 255 | CAGAUUUUUCCAAGAGAAU | AUUCUCUUGGAAAAAUCUG | [2521-2539 |
| 256 | UCCUGGCCAACAAGGAGAA | UUCUCCUUGUUGGCCAGGA | [2334-2352 |
| 257 | UGGUUUGUGAGCCUGCUGA | UCAGCAGGCUCACAAACCA | [2189-2207 |
| 258 | UCGAGUGGUUUGUGAGCCU | AGGCUCACAAACCACUCGA | [2184-2202 |
| 259 | GCCUAUGAAGCCCUUAGUC | GACUAAGGGCUUCAUAGGC | [126-144] |
| 260 | GGAGUCAUGGAGAACCUGA | UCAGGUUCUCCAUGACUCC | [842-860 |
| 261 | GGACAAACUCAAAUUCCUC | GAGGAAUUUGAGUUUGUCC | [532-550 |
| 262 | UGGACAAACUCAAAUUCCU | AGGAAUUUGAGUUUGUCCA | [531-549 |
| 263 | GUGAAAGAGUCCUUCUUUG | CAAAGAAGGACUCUUUCAC | [413-431 |
| 264 | AUGUGAAAGAGUCCUUCUU | AAGAAGGACUCUUUCACAU | [411-429 |
| 265 | AGCUCUGCAUGUGAAAGAG | CUCUUUCACAUGCAGAGCU | [403-421 |
| 266 | GAAGUUCGGCUUCAGAUUU | AAAUCUGAAGCCGAACUUC | [2509-2527 |
| 267 | UCCAGAAAGUGGCUGCUGA | UCAGCAGCCACUUUCUGGA | [2418-2436 |
| 268 | UGCAUAUGUACAUGACAUC | GAUGUCAUGUACAUAUGCA | [2262-2280 |
| 269 | GCUGCAUAUGUACAUGACA | UGUCAUGUACAUAUGCAGC | [2260-2278 |
| 270 | CCAUAAGGUGGACUUUAUC | GAUAAAGUCCACCUUAUGG | [2140-2158 |
| 271 | CCAAGACAACAUGAAGCUC | GAGCUUCAUGUUGUCUUGG | [2122-2140 |
| 272 | UGCUUCCAUUCUGCAGAGU | ACUCUGCAGAAUGGAAGCA | [2035-2053 |
| 273 | CAGGCUGUAUGAGUCCUUC | GAAGGACUCAUACAGCCUG | [1795-1813 |
| 274 | UCAUGGAAGUCAACCUCCU | AGGAGGUUGACUUCCAUGA | [1590-1608 |
| 275 | CUGGAAUCUUGUUUUUCCU | AGGAAAAACAAGAUUCCAG | [1524-1542 |
| 276 | CCAACUUCUGGAAGUGGCU | AGCCACUUCCAGAAGUUGG | [1497-1515 |
| 277 | CACUUUGAGGUGUUCUAUU | AAUAGAACACCUCAAAGUG | [1427-1445 |
| 278 | UGGCCACUUUGAGGUGUUC | GAACACCUCAAAGUGGCCA | [1423-1441 |
| 279 | UGUGAAAGAGUCCUUCUUU | AAAGAAGGACUCUUUCACA | [412-430 |
| 280 | GCAGCUCUGCAUGUGAAAG | CUUUCACAUGCAGAGCUGC | [401-419 |
| 281 | AGAAGUUCGGCUUCAGAUU | AAUCUGAAGCCGAACUUCU | [2508-2526 |
| 282 | UGAAGCCCUUAGUCCUUCU | AGAAGGACUAAGGGCUUCA | [131-149] |
| 283 | CAGGUCUUCUUCUGUGGCU | AGCCACAGAAGAAGACCUG | [2453-2471 |
| 284 | UUGACCUCCUGGCCAACAA | UUGUUGGCCAGGAGGUCAA | [2328-2346 |
| 285 | CUCCAUAAGGUGGACUUUA | UAAAGUCCACCUUAUGGAG | [2138-2156 |
| 286 | CAGGAUCUUUGCCUCUGAG | CUCAGAGGCAAAGAUCCUG | [1975-1993 |
| 287 | GGCUGGUAUGCAGUCAUGU | ACAUGACUGCAUACCAGCC | [215-233] |
| 288 | UGAGCAGAAAGACACUAUC | GAUAGUGUCUUUCUGCUCA | [1741-1759 |
| 289 | GUGCUCCUGAGCAGAAAGA | UCUUUCUGCUCAGGAGCAC | [1734-1752 |
| 290 | UGACUACUUGUAUCUGAAC | GUUCAGAUACAAGUAGUCA | [1669-1687 |
| 291 | GACAAACUCAAAUUCCUCU | AGAGGAAUUUGAGUUUGUC | [533-551 |
| 292 | AGCAGCUCUGCAUGUGAAA | UUUCACAUGCAGAGCUGCU | [400-418 |
| 293 | GCUUCAGAUUUUUCCAAGA | UCUUGGAAAAAUCUGAAGC | [2517-2535 |
| 294 | GUACAUGACAUCUGCACUG | CAGUGCAGAUGUCAUGUAC | [2269-2287 |
| 295 | GGAUCUUUGCCUCUGAGCA | UGCUCAGAGGCAAAGAUCC | [1977-1995 |
| 296 | GUGACAAUGAGAAAGAGUC | GACUCUUUCUCAUUGUCAC | [1862-1880 |
| 297 | CUGUCGAGGAGUGUGACAA | UUGUCACACUCCUCGACAG | [1850-1868 |
| 298 | CCUGGAAUCUUGUUUUUCC | GGAAAAACAAGAUUCCAGG | [1523-1541 |
| 299 | UCGUGUGGCUUCUGCUCAU | AUGAGCAGAAGCCACACGA | [1467-1485 |
| 300 | UCCUCUUCCAGGUGUAUGA | UCAUACACCUGGAAGAGGA | [546-564 |
| 301 | AGGUGCAGGUCUUCUUCUG | CAGAAGAAGACCUGCACCU | [2448-2466 |
| 302 | UGACAUCUGCACUGGGCAA | UUGCCCAGUGCAGAUGUCA | [2274-2292 |
| 303 | GAAGCUCCAUAAGGUGGAC | GUCCACCUUAUGGAGCUUC | [2134-2152 |
| 304 | UGAAGCUCCAUAAGGUGGA | UCCACCUUAUGGAGCUUCA | [2133-2151 |
| 305 | UGGUCUCACUGACUUCAAG | CUUGAAGUCAGUGAGACCA | [257-275] |
| 306 | GUGGCUUCUGCUCAUCUUU | AAAGAUGAGCAGAAGCCAC | [1471-1489 |
| 307 | GUCUCACUGACUUCAAGAA | UUCUUGAAGUCAGUGAGAC | [259-277] |
| 308 | UUCUUGGUCUCACUGACUU | AAGUCAGUGAGACCAAGAA | [253-271] |
| 309 | CUUCAGAUUUUUCCAAGAG | CUCUUGGAAAAAUCUGAAG | [2518-2536 |
| 310 | GCCAACAAGGAGAAGAAAG | CUUUCUUCUCCUUGUUGGC | [2339-2357 |
| 311 | GGCACCAGAAAAGAAAGCA | UGCUUUCUUUUCUGGUGCC | [2064-2082 |
| 312 | CUCACUGACUUCAAGAAUG | CAUUCUUGAAGUCAGUGAG | [261-279] |
| 313 | AGAAUGACAUGAAGGCCAU | AUGGCCUUCAUGUCAUUCU | [2292-2310 |
| 314 | CACUGACUUCAAGAAUGAA | UUCAUUCUUGAAGUCAGUG | [263-281] |
| 315 | UUCAGAUUUUUCCAAGAGA | UCUCUUGGAAAAAUCUGAA | [2519-2537 |
| 316 | GGUUCUUGGUCUCACUGAC | GUCAGUGAGACCAAGAACC | [251-269] |
| 317 | GAAUGACAUGAAGGCCAUU | AAUGGCCUUCAUGUCAUUC | [2293-2311 |
| 318 | UCAAAUUCCUCUUCCAGGU | ACCUGGAAGAGGAAUUUGA | [540-558 |
| 319 | CUGCUGAGAAGAAGGGCAA | UUGCCCUUCUUCUCAGCAG | [2430-2448 |
| 320 | AGCAGAAAGACACUAUCUG | CAGAUAGUGUCUUUCUGCU | [1743-1761 |

TABLE A8
NOX5 - 19-mer oligomer pairs NADPH oxidase 5

| | | | | |
|---|---|---|---|---|
| | | | Other | Human-20127623 |
| No. | Sense siRNA | AntiSense siRNA | Sp | ORF: 302-2545 |

| | | | |
|---|---|---|---|
| 1 | GGGUGACUCAGCAGUUUAA | UUAAACUGCUGAGUCACCC | [336-354] |
| 2 | GGAGCAAGGUGUUCCAGAA | UUCUGGAACACCUUGCUCC | [2406-2424] |
| 3 | CCAGGUGUAUGACAUCGAU | AUCGAUGUCAUACACCUGG | [553-571] |
| 4 | CACAAAUUCUGUAACAUCA | UGAUGUUACAGAAUUUGUG | [1919-1937] |
| 5 | ACAAAUUCUGUAACAUCAA | UUGAUGUUACAGAAUUUGU | [1920-1938] |
| 6 | GGAGUGUGACAAUGAGAAA | UUUCUCAUUGUCACACUCC | [1857-1875] |
| 7 | UGACUAAACUGGAGAUGGA | UCCAUCUCCAGUUUAGUCA | [2205-2223] |
| 8 | GAUUCUUUGCCCUAUUUGA | UCAAAUAGGGCAAAGAAUC | [438-456] |
| 9 | GUGACUACUUGUAUCUGAA | UUCAGAUACAAGUAGUCAC | [1668-1686] |
| 10 | CGAGGAGUGUGACAAUGAG | CUCAUUGUCACACUCCUCG | [1854-1872] |
| 11 | CCAACAAGGAGAAGAAAGA | UCUUUCUUCUCCUUGUUGG | [2340-2358] |
| 12 | UUGUGAGCCUGCUGACUAA | UUAGUCAGCAGGCUCACAA | [2193-2211] |
| 13 | UACGGACGACGCCUAUGAA | UUCAUAGGCGUCGUCCGUA | [116-134] |
| 14 | GUGACUCAGCAGUUUAAGA | UCUUAAACUGCUGAGUCAC | [338-356] |
| 15 | CAUGUACAGGCACCAGAAA | UUUCUGGUGCCUGUACAUG | [2056-2074] |
| 16 | GGUAUGCAGUCAUGUUGUA | UACAACAUGACUGCAUACC | [219-237] |
| 17 | GACUUUAUCUGGAUCAACA | UGUUGAUCCAGAUAAAGUC | [2150-2168] |
| 18 | GAAGGUGUCCAAGACAACA | UGUUGUCUUGGACACCUUC | [2114-2132] |
| 19 | GCUCCUGAGCAGAAAGACA | UGUCUUUCUGCUCAGGAGC | [1736-1754] |
| 20 | UCCUGGAGCUGCAUAUGUA | UACAUAUGCAGCUCCAGGA | [2253-2271] |
| 21 | ACAACAUGAAGCUCCAUAA | UUAUGGAGCUUCAUGUUGU | [2127-2145] |
| 22 | GAGCAAGGUGUUCCAGAAA | UUUCUGGAACACCUUGCUC | [2407-2425] |
| 23 | GCUCUGAGAUACUUUUGGA | UCCAAAAGUAUCUCAGAGC | [1896-1914] |
| 24 | GGAUCGAAGGUGUCCAAGA | UCUUGGACACCUUCGAUCC | [2109-2127] |
| 25 | UCUGUAACAUCAAGUGCUA | UAGCACUUGAUGUUACAGA | [1926-1944] |
| 26 | GGGCAAGAAUGACAUGAAG | CUUCAUGUCAUUCUUGCCC | [2287-2305] |
| 27 | GGAGAUCAGCCUGCAAGAA | UUCUUGCAGGCUGAUCUCC | [376-394] |
| 28 | UGAGAUACUUUUGGAGAAA | UUUCUCCAAAAGUAUCUCA | [1900-1918] |
| 29 | GCAGGAUCUUUGCCUCUGA | UCAGAGGCAAAGAUCCUGC | [1974-1992] |
| 30 | AGAAGAAGGGCAAGGUGCA | UGCACCUUGCCCUUCUUCU | [2436-2454] |
| 31 | GAGGAGUGUGACAAUGAGA | UCUCAUUGUCACACUCCUC | [1855-1873] |
| 32 | AAGACAACAUGAAGCUCCA | UGGAGCUUCAUGUUGUCUU | [2124-2142] |
| 33 | AGAUCAGCCUGCAAGAAUU | AAUUCUUGCAGGCUGAUCU | [378-396] |
| 34 | GACCAUUGCAGGAGAAGAU | AUCUUCUCCUGCAAUGGUC | [355-373] |
| 35 | UUAUCUGGAUCAACAGAGA | UCUCUGUUGAUCCAGAUAA | [2154-2172] |
| 36 | AGCCGUGUGCAUCAUGGAA | UUCCAUGAUGCACACGGCU | [1579-1597] |
| 37 | CAUCUGCACUGGGCAAGAA | UUCUUGCCCAGUGCAGAUG | [2277-2295] |
| 38 | GUCCAAGGGCUCUGAGAUA | UAUCUCAGAGCCCUUGGAC | [1888-1906] |
| 39 | GGUGACUACUUGUAUCUGA | UCAGAUACAAGUAGUCACC | [1667-1685] |
| 40 | CAGGCACCAGAAAAGAAAG | CUUUCUUUUCUGGUGCCUG | [2062-2080] |
| 41 | AGUCAUGUUGUAUCUGGAA | UUCCAGAUACAACAUGACU | [226-244] |
| 42 | CACCAUUGCUCGCUAUGAG | CUCAUAGCGAGCAAUGGUG | [1693-1711] |
| 43 | UACAGGCACCAGAAAAGAA | UUCUUUUCUGGUGCCUGUA | [2060-2078] |
| 44 | CACUGGACCAGAACAUCCA | UGGAUGUUCUGGUCCAGUG | [1164-1182] |
| 45 | GCAAGGUGUUCCAGAAAGU | ACUUUCUGGAACACCUUGC | [2409-2427] |
| 46 | GGUGUCCAAGACAACAUGA | UCAUGUUGUCUUGGACACC | [2117-2135] |
| 47 | CUGCACUGGGCAAGAAUGA | UCAUUCUUGCCCAGUGCAG | [2280-2298] |
| 48 | GUUUAAGACCAUUGCAGGA | UCCUGCAAUGGUCUUAAAC | [349-367] |
| 49 | GUACAGGCACCAGAAAAGA | UCUUUUCUGGUGCCUGUAC | [2059-2077] |
| 50 | GGUCUCACUGACUUCAAGA | UCUUGAAGUCAGUGAGACC | [258-276] |
| 51 | UGAGAAGUUCGGCUUCAGA | UCUGAAGCCGAACUUCUCA | [2506-2524] |
| 52 | GAGAAGAAAGACUCCAUCA | UGAUGGAGUCUUUCUUCUC | [2348-2366] |
| 53 | AACUCAAAUUCCUCUUCCA | UGGAAGAGGAAUUUGAGUU | [537-555] |
| 54 | CUUCAAGAAUGAAGCCGCA | UGCGGCUUCAUUCUUGAAG | [269-287] |
| 55 | UGUUGUAUCUGGAAUUGGU | ACCAAUUCCAGAUACAACA | [231-249] |
| 56 | CCUGGAGCUGCAUAUGUAC | GUACAUAUGCAGCUCCAGG | [2254-2272] |
| 57 | CAAAUUCUGUAACAUCAAG | CUUGAUGUUACAGAAUUUG | [1921-1939] |
| 58 | CAUCAAGUGCUACAUCGAU | AUCGAUGUAGCACUUGAUG | [1933-1951] |
| 59 | UCACUCAUCUCCUCAUCAA | UUGAUGAGGAGAUGAGUGA | [1620-1638] |
| 60 | GCAAGGUGCAGGUCUUCUU | AAGAAGACCUGCACCUUGC | [2445-2463] |
| 61 | GUGGGUGACUCAGCAGUUU | AAACUGCUGAGUCACCCAC | [334-352] |
| 62 | GCUGGUAUGCAGUCAUGUU | AACAUGACUGCAUACCAGC | [216-234] |
| 63 | UAAGACCAUUGCAGGAGAA | UUCUCCUGCAAUGGUCUUA | [352-370] |
| 64 | AGACCAUUGCAGGAGAAGA | UCUUCUCCUGCAAUGGUCU | [354-372] |
| 65 | GAUCGAAGGUGUCCAAGAC | GUCUUGGACACCUUCGAUC | [2110-2128] |
| 66 | GGUGACUCAGCAGUUUAAG | CUUAAACUGCUGAGUCACC | [337-355] |
| 67 | CCUCCAAGGUCACUCAUCU | AGAUGAGUGACCUUGGAGG | [1611-1629] |
| 68 | UGUCGAGGAGUGUGACAAU | AUUGUCACACUCCUCGACA | [1851-1869] |
| 69 | AGGCUGUAUGAGUCCUUCA | UGAAGGACUCAUACAGCCU | [1796-1814] |
| 70 | CUUCCAUUCUGCAGAGUAU | AUACUCUGCAGAAUGGAAG | [2037-2055] |
| 71 | GAAAGAGUCCUUCUUUGCA | UGCAAAGAAGGACUCUUUC | [415-433] |
| 72 | CUUUAUCUGGAUCAACAGA | UCUGUUGAUCCAGAUAAAG | [2152-2170] |
| 73 | GCACUGGGCAAGAAUGACA | UGUCAUUCUUGCCCAGUGC | [2282-2300] |
| 74 | ACAUCAAGUGCUACAUCGA | UCGAUGUAGCACUUGAUGU | [1932-1950] |
| 75 | GAGCGAUUCUUUGCCCUAU | AUAGGGCAAAGAAUCGCUC | [434-452] |
| 76 | UCACUGACUUCAAGAAUGA | UCAUUCUUGAAGUCAGUGA | [262-280] |
| 77 | CAAGGGCUCUGAGAUACUU | AAGUAUCUCAGAGCCCUUG | [1891-1909] |
| 78 | AAGAGAAUUUCUAGCCUCA | UGAGGCUAGAAAUUCUCUU | [2532-2550]+ |
| 79 | UGUCCAAGACAACAUGAAG | CUUCAUGUUGUCUUGGACA | [2119-2137] |
| 80 | GCGAUUCUUUGCCCUAUUU | AAAUAGGGCAAAGAAUCGC | [436-454] |
| 81 | ACAUGAAGCUCCAUAAGGU | ACCUUAUGGAGCUUCAUGU | [2130-2148] |
| 82 | UGACAAUGAGAAAGAGUCA | UGACUCUUUCUCAUUGUCA | [1863-1881] |
| 83 | CUACCACUGGACCAGAACA | UGUUCUGGUCCAGUGGUAG | [1160-1178] |
| 84 | CCAUGGACAAACUCAAAUU | AAUUUGAGUUUGUCCAUGG | [528-546] |
| 85 | UUGGUCUCACUGACUUCAA | UUGAAGUCAGUGAGACCAA | [256-274] |
| 86 | AUGUACAGGCACCAGAAAA | UUUUCUGGUGCCUGUACAU | [2057-2075] |
| 87 | GACCUGGUGACUACUUGUA | UACAAGUAGUCACCAGGUC | [1662-1680] |
| 88 | CAACAUGAAGCUCCAUAAG | CUUAUGGAGCUUCAUGUUG | [2128-2146] |
| 89 | CAUCCAGUUCCACCAGCUU | AAGCUGGUGGAACUGGAUG | [1177-1195] |
| 90 | UGUGAGCCUGCUGACUAAA | UUUAGUCAGCAGGCUCACA | [2194-2212] |
| 91 | ACUUUGUACUCCAGGCUCA | UGAGCCUGGAGUACAAAGU | [1251-1269] |
| 92 | ACAAUGAGAAAGAGUCAAA | UUUGACUCUUUCUCAUUGU | [1865-1883] |
| 93 | UCGGCUUCAGAUUUUUCCA | UGGAAAAAUCUGAAGCCGA | [2514-2532] |
| 94 | CUGACUGGAGCAAGGUGUU | AACACCUUGCUCCAGUCAG | [2400-2418] |
| 95 | ACUGGAGCAAGGUGUUCCA | UGGAACACCUUGCUCCAGU | [2403-2421] |
| 96 | GAGUCAUGGAGAACCUGAC | GUCAGGUUCUCCAUGACUC | [843-861] |
| 97 | CAGCUCUGCAUGUGAAAGA | UCUUUCACAUGCAGAGCUG | [402-420] |
| 98 | CUGGUGCCUGGAAUCUUGU | ACAAGAUUCCAGGCACCAG | [1517-1535] |
| 99 | CUGGAGCUGCAUAUGUACA | UGUACAUAUGCAGCUCCAG | [2255-2273] |
| 100 | AACUUCGACUGCAGCUUCA | UGAAGCUGCAGUCGAAGUU | [1079-1097] |
| 101 | CUUCAAGGCAUCAGACCCA | UGGGUCUGAUGCCUUGAAG | [1810-1828] |
| 102 | CUGGAUCAACAGAGACCAG | CUGGUCUCUGUUGAUCCAG | [2158-2176] |
| 103 | AAGAGUCCUUCUUUGCAGA | UCUGCAAAGAAGGACUCUU | [417-435] |
| 104 | GCUUAUGGGCUACGUGGUA | UACCACGUAGCCCAUAAGC | [1192-1210] |
| 105 | CACUCAUCUCCUCAUCAAG | CUUGAUGAGGAGAUGAGUG | [1621-1639] |
| 106 | AAGGUGGACUUUAUCUGGA | UCCAGAUAAAGUCCACCUU | [2144-2162] |
| 107 | GAGCAGAAAGACACUAUCU | AGAUAGUGUCUUUCUGCUC | [1742-1760] |
| 108 | UGGUGCCUGGAAUCUUGUU | AACAAGAUUCCAGGCACCA | [1518-1536] |
| 109 | GAGAUCAGCCUGCAAGAAU | AUUCUUGCAGGCUGAUCUC | [377-395] |
| 110 | CUAUAGACCUGGUGACUAC | GUAGUCACCAGGUCUAUAG | [1657-1675] |
| 111 | UCUAGUUGCGCUUUUGCUA | UAGCAAAAGCGCAACUAGA | [147-165] |
| 112 | AGACCUGGUGACUACUUGU | ACAAGUAGUCACCAGGUCU | [1661-1679] |
| 113 | CUACAUCGAUGGGCCUUAU | AUAAGGCCCAUCGAUGUAG | [1942-1960] |
| 114 | ACUCAGCAGUUUAAGACCA | UGGUCUUAAACUGCUGAGU | [341-359] |
| 115 | GACGCCUAUGAAGCCCUUA | UAAGGGCUUCAUAGGCGUC | [123-141] |
| 116 | ACUUUAUCUGGAUCAACAG | CUGUUGAUCCAGAUAAAGU | [2151-2169] |
| 117 | UCUGGAUCAACAGAGACCA | UGGUCUCUGUUGAUCCAGA | [2157-2175] |
| 118 | AUCGAAGGUGUCCAAGACA | UGUCUUGGACACCUUCGAU | [2111-2129] |
| 119 | AUGGAGAACCUGACCAUCA | UGAUGGUCAGGUUCUCCAU | [848-866] |
| 120 | CUAUGAAGCCCUUAGUCCU | AGGACUAAGGGCUUCAUAG | [128-146] |
| 121 | ACCAGAAAAGAAAGCAUAC | GUAUGCUUUCUUUUCUGGU | [2067-2085] |
| 122 | GCCCUUAGUCCUUCUAGUU | AACUAGAAGGACUAAGGGC | [135-153] |
| 123 | CCUUUGCUUCCAUUCUGCA | UGCAGAAUGGAAGCAAAGG | [2031-2049] |
| 124 | UCGAGGAGUGUGACAAUGA | UCAUUGUCACACUCCUCGA | [1853-1871] |
| 125 | CAACAAGGAGAAGAAAGAC | GUCUUUCUUCUCCUUGUUG | [2341-2359] |
| 126 | GGUGCAGGUCUUCUUCUGU | ACAGAAGAAGACCUGCACC | [2449-2467] |
| 127 | UGUAACAUCAAGUGCUACA | UGUAGCACUUGAUGUUACA | [1928-1946] |
| 128 | AAUUCCUCUUCCAGGUGUA | UACACCUGGAAGAGGAAUU | [543-561] |
| 129 | UCCUGAGCAGAAAGACACU | AGUGUCUUUCUGCUCAGGA | [1738-1756] |
| 130 | GUGCAUCAUGGAAGUCAAC | GUUGACUUCCAUGAUGCAC | [1585-1603] |
| 131 | GCAGAAAGACACUAUCUGG | CCAGAUAGUGUCUUUCUGC | [1744-1762] |
| 132 | AAAGCAGCUCUGCAUGUGA | UCACAUGCAGAGCUGCUUU | [398-416] |
| 133 | GAUACUUUUGGAGAAACAC | GUGUUUCUCCAAAAGUAUC | [1903-1921] |
| 134 | UGGUAUGCAGUCAUGUUGU | ACAACAUGACUGCAUACCA | [218-236] |
| 135 | AAGAGUCAAAGGUCGUCCA | UGGACGACCUUUGACUCUU | [1874-1892] |
| 136 | CAGUGGACAAACAGGCUGU | ACAGCCUGUUUGUCCACUG | [1784-1802] |
| 137 | CAUGUGAAAGAGUCCUUCU | AGAAGGACUCUUUCACAUG | [410-428] |
| 138 | AUCCGAGGUCUCAAUCCAU | AUGGAUUGAGACCUCGGAU | [188-206] |
| 139 | GAUUUUUCCAAGAGAAUUU | AAAUUCUCUUGGAAAAAUC | [2523-2541] |
| 140 | GAGCUGCAUAUGUACAUGA | UCAUGUACAUAUGCAGCUC | [2258-2276] |
| 141 | AGUCAAAGGUCGUCCAAGG | CCUUGGACGACCUUUGACU | [1877-1895] |
| 142 | UAUCCGAGGUCUCAAUCCA | UGGAUUGAGACCUCGGAUA | [187-205] |
| 143 | UUAAGACCAUUGCAGGAGA | UCUCCUGCAAUGGUCUUAA | [351-369] |
| 144 | GUUCUAAGAGGCUGUCGAG | CUCGACAGCCUCUUAGAAC | [1839-1857] |
| 145 | AAGGGCUCUGAGAUACUUU | AAAGUAUCUCAGAGCCCUU | [1892-1910] |
| 146 | GACAACAUGAAGCUCCAUA | UAUGGAGCUUCAUGUUGUC | [2126-2144] |
| 147 | AUUUGACUCCGAUAGAAGU | ACUUCUAUCGGAGUCAAAU | [451-469] |
| 148 | CUUUGUACUCCAGGCUCAG | CUGAGCCUGGAGUACAAAG | [1252-1270] |
| 149 | UGUGAACUUUGUACUCCAG | CUGGAGUACAAAGUUCACA | [1246-1264] |
| 150 | ACCAUUGCUCGCUAUGAGU | ACUCAUAGCGAGCAAUGGU | [1694-1712] |
| 151 | UUGCCCUAUUUGACUCCGA | UCGGAGUCAAAUAGGGCAA | [444-462] |
| 152 | GAAGAAAGACUCCAUCACG | CGUGAUGGAGUCUUUCUUC | [2350-2368] |
| 153 | UGUACAGGCACCAGAAAAG | CUUUUCUGGUGCCUGUACA | [2058-2076] |
| 154 | ACUUCGACUGCAGCUUCAU | AUGAAGCUGCAGUCGAAGU | [1080-1098] |
| 155 | AUCUGCACUGGGCAAGAAU | AUUCUUGCCCAGUGCAGAU | [2278-2296] |
| 156 | ACAUCUGCACUGGGCAAGA | UCUUGCCCAGUGCAGAUGU | [2276-2294] |
| 157 | GAUCUUUGCCUCUGAGCAU | AUGCUCAGAGGCAAAGAUC | [1978-1996] |
| 158 | GGUGUAUGACAUCGAUGUG | CACAUCGAUGUCAUACACC | [556-574] |
| 159 | UUUUCCAAGAGAAUUUCUA | UAGAAAUUCUCUUGGAAAA | [2526-2544] |
| 160 | AAAUUCUGUAACAUCAAGU | ACUUGAUGUUACAGAAUUU | [1922-1940] |
| 161 | UGGAGCAAGGUGUUCCAGA | UCUGGAACACCUUGCUCCA | [2405-2423] |
| 162 | AAUUCAAAGCAGCUCUGCA | UGCAGAGCUGCUUUGAAUU | [393-411] |
| 163 | CAAGGUGUUCCAGAAAGUG | CACUUUCUGGAACACCUUG | [2410-2428] |
| 164 | GACUAAACUGGAGAUGGAC | GUCCAUCUCCAGUUUAGUC | [2206-2224] |
| 165 | GAGCCUGCUGACUAAACUG | CAGUUUAGUCAGCAGGCUC | [2197-2215] |
| 166 | CACUAUAGACCUGGUGACU | AGUCACCAGGUCUAUAGUG | [1655-1673] |
| 167 | AUGGGCCCAACUUCUGGAA | UUCCAGAAGUUGGGCCCAU | [1491-1509] |
| 168 | UCCGAGGUCUCAAUCCAUU | AAUGGAUUGAGACCUCGGA | [189-207] |
| 169 | GGAAUUGGUGGGUUCUUGG | CCAAGAACCCACCAAUUCC | [241-259] |
| 170 | CUUGGUCUCACUGACUUCA | UGAAGUCAGUGAGACCAAG | [255-273] |
| 171 | UGCUGGUGCCUGGAAUCUU | AAGAUUCCAGGCACCAGCA | [1515-1533] |
| 172 | UGUGAGAAGUUCGGCUUCA | UGAAGCCGAACUUCUCACA | [2504-2522] |
| 173 | CACUGUGAACUUUGUACUC | GAGUACAAAGUUCACAGUG | [1243-1261] |
| 174 | GAAUUGGUGGGUUCUUGGU | ACCAAGAACCCACCAAUUC | [242-260] |
| 175 | CAAGGUGCAGGUCUUCUUC | GAAGAAGACCUGCACCUUG | [2446-2464] |
| 176 | CUGGGCAAGAAUGACAUGA | UCAUGUCAUUCUUGCCCAG | [2285-2303] |
| 177 | AUCCAGUUCCACCAGCUUA | UAAGCUGGUGGAACUGGAU | [1178-1196] |
| 178 | CAUGAAGCUCCAUAAGGUG | CACCUUAUGGAGCUUCAUG | [2131-2149] |
| 179 | CAGGUGUAUGACAUCGAUG | CAUCGAUGUCAUACACCUG | [554-572] |
| 180 | GAGUCAAAGGUCGUCCAAG | CUUGGACGACCUUUGACUC | [1876-1894] |
| 181 | AUGCAGUCAUGUUGUAUCU | AGAUACAACAUGACUGCAU | [222-240] |
| 182 | UUUGAGGUGUUCUAUUGGA | UCCAAUAGAACACCUCAAA | [1430-1448] |
| 183 | GACAAACAGGCUGUAUGAG | CUCAUACAGCCUGUUUGUC | [1789-1807] |
| 184 | AACAGAGACCAGCGGUCUU | AAGACCGCUGGUCUCUGUU | [2165-2183] |
| 185 | UCUGAGAUACUUUUGGAGA | UCUCCAAAAGUAUCUCAGA | [1898-1916] |
| 186 | GUCACUCAUCUCCUCAUCA | UGAUGAGGAGAUGAGUGAC | [1619-1637] |
| 187 | AAGUCCUACCACUGGACCA | UGGUCCAGUGGUAGGACUU | [1155-1173] |
| 188 | GAAAAGAAAGCAUACUUGC | GCAAGUAUGCUUUCUUUUC | [2071-2089] |
| 189 | CAAGGAGAAGAAAGACUCC | GGAGUCUUUCUUCUCCUUG | [2344-2362] |
| 190 | GACUCAGCAGUUUAAGACC | GGUCUUAAACUGCUGAGUC | [340-358] |
| 191 | CAUCUUUCAUGGGCCCAAC | GUUGGGCCCAUGAAAGAUG | [1483-1501] |
| 192 | AGUGGUUUGUGAGCCUGCU | AGCAGGCUCACAAACCACU | [2187-2205] |
| 193 | CUCUUCCAGGUGUAUGACA | UGUCAUACACCUGGAAGAG | [548-566] |
| 194 | UCUUUCGAGUGGUUUGUGA | UCACAAACCACUCGAAAGA | [2180-2198] |
| 195 | UCUAGCCUCACCUCUCCAA | UUGGAGAGGUGAGGCUAGA | [2541-2559]+ |
| 196 | GAACAUCCAGUUCCACCAG | CUGGUGGAACUGGAUGUUC | [1174-1192] |
| 197 | ACUGGACCAGAACAUCCAG | CUGGAUGUUCUGGUCCAGU | [1165-1183] |
| 198 | GAGAAAGAGUCAAAGGUCG | CGACCUUUGACUCUUUCUC | [1870-1888] |
| 199 | CAUGGAAGUCAACCUCCUC | GAGGAGGUUGACUUCCAUG | [1591-1609] |
| 200 | AGAUUUUUCCAAGAGAAUU | AAUUCUCUUGGAAAAAUCU | [2522-2540] |
| 201 | AGCAGUUUAAGACCAUUGC | GCAAUGGUCUUAAACUGCU | [345-363] |
| 202 | AAUUCUGUAACAUCAAGUG | CACUUGAUGUUACAGAAUU | [1923-1941] |
| 203 | AUCGAUGGGCCUUAUGGGA | UCCCAUAAGGCCCAUCGAU | [1946-1964] |
| 204 | AUUGGACUCACCUGUCCUA | UAGGACAGGUGAGUCCAAU | [1443-1461] |
| 205 | ACUAUAGACCUGGUGACUA | UAGUCACCAGGUCUAUAGU | [1656-1674] |
| 206 | AGUUUAAGACCAUUGCAGG | CCUGCAAUGGUCUUAAACU | [348-366] |
| 207 | ACUCCUGGAUCGAAGGUGU | ACACCUUCGAUCCAGGAGU | [2103-2121] |
| 208 | CAUUGUGAGAAGUUCGGCU | AGCCGAACUUCUCACAAUG | [2501-2519] |
| 209 | ACAAACAGGCUGUAUGAGU | ACUCAUACAGCCUGUUUGU | [1790-1808] |
| 210 | CUUUGCAGAGCGAUUCUUU | AAAGAAUCGCUCUGCAAAG | [427-445] |
| 211 | AGUGCUCCUGAGCAGAAAG | CUUUCUGCUCAGGAGCACU | [1733-1751] |
| 212 | GUUGUAUCUGGAAUUGGUG | CACCAAUUCCAGAUACAAC | [232-250] |
| 213 | GGAGCUGCAUAUGUACAUG | CAUGUACAUAUGCAGCUCC | [2257-2275] |
| 214 | UGAGAAGAAGGGCAAGGUG | CACCUUGCCCUUCUUCUCA | [2434-2452] |
| 215 | GUUCUUGGUCUCACUGACU | AGUCAGUGAGACCAAGAAC | [252-270] |
| 216 | AGGCUGGUAUGCAGUCAUG | CAUGACUGCAUACCAGCCU | [214-232] |
| 217 | UCUCACUGACUUCAAGAAU | AUUCUUGAAGUCAGUGAGA | [260-278] |
| 218 | CAUAAGGUGGACUUUAUCU | AGAUAAAGUCCACCUUAUG | [2141-2159] |
| 219 | AAGGAGAAGAAAGACUCCA | UGGAGUCUUUCUUCUCCUU | [2345-2363] |
| 220 | AGCCUGCAAGAAUUCAAAG | CUUUGAAUUCUUGCAGGCU | [383-401] |
| 221 | UUUCAUGGGCCCAACUUCU | AGAAGUUGGGCCCAUGAAA | [1487-1505] |
| 222 | AGCUUAUGGGCUACGUGGU | ACCACGUAGCCCAUAAGCU | [1191-1209] |
| 223 | UGGUGGGUUCUUGGUCUCA | UGAGACCAAGAACCCACCA | [246-264] |
| 224 | UUCUGCAGAGUAUCAUGUA | UACAUGAUACUCUGCAGAA | [2043-2061] |
| 225 | AAGAAAGACUCCAUCACGG | CCGUGAUGGAGUCUUUCUU | [2351-2369] |
| 226 | ACUUGUAUCUGAACAUCCC | GGGAUGUUCAGAUACAAGU | [1674-1692] |
| 227 | CAUGGAGAACCUGACCAUC | GAUGGUCAGGUUCUCCAUG | [847-865] |
| 228 | GCUCUGCAUGUGAAAGAGU | ACUCUUUCACAUGCAGAGC | [404-422] |
| 229 | CAGUGCCUCAACUUCGACU | AGUCGAAGUUGAGGCACUG | [1070-1088] |
| 230 | CAUUCUGCAGAGUAUCAUG | CAUGAUACUCUGCAGAAUG | [2041-2059] |
| 231 | CUGUAACAUCAAGUGCUAC | GUAGCACUUGAUGUUACAG | [1927-1945] |
| 232 | CUUUCAUGGGCCCAACUUC | GAAGUUGGGCCCAUGAAAG | [1486-1504] |
| 233 | UUUCCAAGAGAAUUUCUAG | CUAGAAAUUCUCUUGGAAA | [2527-2545] |
| 234 | UUUUCACUAUAGACCUGGU | ACCAGGUCUAUAGUGAAAA | [1651-1669] |
| 235 | UGAGGUGUUCUAUUGGACU | AGUCCAAUAGAACACCUCA | [1432-1450] |
| 236 | CUUCCAGGUGUAUGACAUC | GAUGUCAUACACCUGGAAG | [550-568] |
| 237 | AUCUUGUUUUUCCUGGAGA | UCUCCAGGAAAAACAAGAU | [1529-1547] |
| 238 | CAUGUUCAUCUGCUCCAGU | ACUGGAGCAGAUGAACAUG | [1387-1405] |
| 239 | AUUCAAAGCAGCUCUGCAU | AUGCAGAGCUGCUUUGAAU | [394-412] |
| 240 | AAAGAGUCCUUCUUUGCAG | CUGCAAAGAAGGACUCUUU | [416-434] |
| 241 | UUCUGUAACAUCAAGUGCU | AGCACUUGAUGUUACAGAA | [1925-1943] |
| 242 | GGUCACUCAUCUCCUCAUC | GAUGAGGAGAUGAGUGACC | [1618-1636] |
| 243 | UGACUCAGCAGUUUAAGAC | GUCUUAAACUGCUGAGUCA | [339-357] |
| 244 | UUCACUAUAGACCUGGUGA | UCACCAGGUCUAUAGUGAA | [1653-1671] |
| 245 | AUGAGAAAGAGUCAAAGGU | ACCUUUGACUCUUUCUCAU | [1868-1886] |
| 246 | CUCCUGAGCAGAAAGACAC | GUGUCUUUCUGCUCAGGAG | [1737-1755] |
| 247 | UGGAAUUGGUGGGUUCUUG | CAAGAACCCACCAAUUCCA | [240-258] |
| 248 | UCUAAGAGGCUGUCGAGGA | UCCUCGACAGCCUCUUAGA | [1841-1859] |
| 249 | UUCGUCUGUGCCGGCUUAU | AUAAGCCGGCACAGACGAA | [171-189] |
| 250 | AGAAAGAGUCAAAGGUCGU | ACGACCUUUGACUCUUUCU | [1871-1889] |
| 251 | CAGAGCGAUUCUUUGCCCU | AGGGCAAAGAAUCGCUCUG | [432-450] |
| 252 | CUGCUCCUCCUCAUGUUCA | UGAACAUGAGGAGGAGCAG | [1376-1394] |
| 253 | GUUUGUGAGCCUGCUGACU | AGUCAGCAGGCUCACAAAC | [2191-2209] |
| 254 | UUUUUUUCACUAUAGACCU | AGGUCUAUAGUGAAAAAAA | [1648-1666] |
| 255 | AUCAUGUACAGGCACCAGA | UCUGGUGCCUGUACAUGAU | [2054-2072] |
| 256 | CUUCCUGGAGCUGCAUAUG | CAUAUGCAGCUCCAGGAAG | [2251-2269] |
| 257 | GAUCAGCCUGCAAGAAUUC | GAAUUCUUGCAGGCUGAUC | [379-397] |
| 258 | UUUGUGAGCCUGCUGACUA | UAGUCAGCAGGCUCACAAA | [2192-2210] |
| 259 | AUUCUUUGCCCUAUUUGAC | GUCAAAUAGGGCAAAGAAU | [439-457] |
| 260 | ACUUUGAGGUGUUCUAUUG | CAAUAGAACACCUCAAAGU | [1428-1446] |
| 261 | GAGAAUUUCUAGCCUCACC | GGUGAGGCUAGAAAUUCUC | [2534-2552]+ |
| 262 | AUGACAUCUGCACUGGGCA | UGCCCAGUGCAGAUGUCAU | [2273-2291] |
| 263 | CUCAACUUCGACUGCAGCU | AGCUGCAGUCGAAGUUGAG | [1076-1094] |
| 264 | UAUUUGACUCCGAUAGAAG | CUUCUAUCGGAGUCAAAUA | [450-468] |
| 265 | CUUCGACUGCAGCUUCAUC | GAUGAAGCUGCAGUCGAAG | [1081-1099] |
| 266 | CAGUUCCACCAGCUUAUGG | CCAUAAGCUGGUGGAACUG | [1181-1199] |
| 267 | UAUGAAGCCCUUAGUCCUU | AAGGACUAAGGGCUUCAUA | [129-147] |
| 268 | UCUGCACUGGGCAAGAAUG | CAUUCUUGCCCAGUGCAGA | [2279-2297] |
| 269 | GUGAGCCUGCUGACUAAAC | GUUUAGUCAGCAGGCUCAC | [2195-2213] |
| 270 | GUCCAAGACAACAUGAAGC | GCUUCAUGUUGUCUUGGAC | [2120-2138] |
| 271 | GCUCACACUGUGAACUUUG | CAAAGUUCACAGUGUGAGC | [1238-1256] |
| 272 | CAUGUUGUAUCUGGAAUUG | CAAUUCCAGAUACAACAUG | [229-247] |
| 273 | GAGUGUGACAAUGAGAAAG | CUUUCUCAUUGUCACACUC | [1858-1876] |
| 274 | ACUCAAAUUCCUCUUCCAG | CUGGAAGAGGAAUUUGAGU | [538-556] |
| 275 | CAUUGCUCGCUAUGAGUGG | CCACUCAUAGCGAGCAAUG | [1696-1714] |
| 276 | UCCAUUCUGCAGAGUAUCA | UGAUACUCUGCAGAAUGGA | [2039-2057] |
| 277 | CUUCACCAUCAGCAGUGCU | AGCACUGCUGAUGGUGAAG | [1720-1738] |
| 278 | UAUGUACAUGACAUCUGCA | UGCAGAUGUCAUGUACAUA | [2266-2284] |
| 279 | AAGGUGCAGGUCUUCUUCU | AGAAGAAGACCUGCACCUU | [2447-2465] |
| 280 | ACUGGGCAAGAAUGACAUG | CAUGUCAUUCUUGCCCAGU | [2284-2302] |
| 281 | UGCUGAGAAGAAGGGCAAG | CUUGCCCUUCUUCUCAGCA | [2431-2449] |
| 282 | UUCUUUGCCCUAUUUGACU | AGUCAAAUAGGGCAAAGAA | [440-458] |
| 283 | GUCAUGGAGAACCUGACCA | UGGUCAGGUUCUCCAUGAC | [845-863] |
| 284 | GGCAAGAAUGACAUGAAGG | CCUUCAUGUCAUUCUUGCC | [2288-2306] |
| 285 | ACUGACCCUGCUCAUCCAU | AUGGAUGAGCAGGGUCAGU | [502-520] |
| 286 | AAGGUCACUCAUCUCCUCA | UGAGGAGAUGAGUGACCUU | [1616-1634] |
| 287 | UGUGACAAUGAGAAAGAGU | ACUCUUUCUCAUUGUCACA | [1861-1879] |
| 288 | CUGCAUGUGAAAGAGUCCU | AGGACUCUUUCACAUGCAG | [407-425] |
| 289 | UGUUCUAUUGGACUCACCU | AGGUGAGUCCAAUAGAACA | [1437-1455] |
| 290 | UGCUCCUGAGCAGAAAGAC | GUCUUUCUGCUCAGGAGCA | [1735-1753] |
| 291 | CAACUUCGACUGCAGCUUC | GAAGCUGCAGUCGAAGUUG | [1078-1096] |
| 292 | CAUUGCAGGAGAAGAUGGG | CCCAUCUUCUCCUGCAAUG | [358-376] |
| 293 | AGAAAGACUCCAUCACGGG | CCCGUGAUGGAGUCUUUCU | [2352-2370] |
| 294 | UGCACUGGGCAAGAAUGAC | GUCAUUCUUGCCCAGUGCA | [2281-2299] |
| 295 | AGGUCUCAAUCCAUUGCGC | GCGCAAUGGAUUGAGACCU | [193-211] |
| 296 | CUGGACCAGAACAUCCAGU | ACUGGAUGUUCUGGUCCAG | [1166-1184] |
| 297 | UGAGAAAGAGUCAAAGGUC | GACCUUUGACUCUUUCUCA | [1869-1887] |
| 298 | AGAGAAUUUCUAGCCUCAC | GUGAGGCUAGAAAUUCUCU | [2533-2551]+ |
| 299 | CUCCAAGGUCACUCAUCUC | GAGAUGAGUGACCUUGGAG | [1612-1630] |
| 300 | CUUUCGAGUGGUUUGUGAG | CUCACAAACCACUCGAAAG | [2181-2199] |
| 301 | AUUGGUGGGUUCUUGGUCU | AGACCAAGAACCCACCAAU | [244-262] |
| 302 | AUUCCUCUUCCAGGUGUAU | AUACACCUGGAAGAGGAAU | [544-562] |
| 303 | CCUCUUCCAGGUGUAUGAC | GUCAUACACCUGGAAGAGG | [547-565] |
| 304 | UGAACUUUGUACUCCAGGC | GCCUGGAGUACAAAGUUCA | [1248-1266] |
| 305 | UUCCUGGAGCUGCAUAUGU | ACAUAUGCAGCUCCAGGAA | [2252-2270] |
| 306 | CAUGGACAAACUCAAAUUC | GAAUUUGAGUUUGUCCAUG | [529-547] |
| 307 | UCAAGGCAUCAGACCCACU | AGUGGGUCUGAUGCCUUGA | [1812-1830] |
| 308 | UUCUAGUUGCGCUUUUGCU | AGCAAAAGCGCAACUAGAA | [146-164] |
| 309 | UGUACAUGACAUCUGCACU | AGUGCAGAUGUCAUGUACA | [2268-2286] |
| 310 | AGUUCCACCAGCUUAUGGG | CCCAUAAGCUGGUGGAACU | [1182-1200] |
| 311 | AACAAGGAGAAGAAAGACU | AGUCUUUCUUCUCCUUGUU | [2342-2360] |
| 312 | GAGUAUCAUGUACAGGCAC | GUGCCUGUACAUGAUACUC | [2050-2068] |
| 313 | UCUUUCAUGGGCCCAACUU | AAGUUGGGCCCAUGAAAGA | [1485-1503] |
| 314 | CCUUAGUCCUUCUAGUUGC | GCAACUAGAAGGACUAAGG | [137-155] |
| 315 | UGUUUUUCCUGGAGAAGGC | GCCUUCUCCAGGAAAAACA | [1533-1551] |
| 316 | UAAGGUGGACUUUAUCUGG | CCAGAUAAAGUCCACCUUA | [2143-2161] |
| 317 | CUUGUUUUUCCUGGAGAAG | CUUCUCCAGGAAAAACAAG | [1531-1549] |
| 318 | AGGCACCAGAAAAGAAAGC | GCUUUCUUUUCUGGUGCCU | [2063-2081] |
| 319 | AAGCCCUUAGUCCUUCUAG | CUAGAAGGACUAAGGGCUU | [133-151] |
| 320 | UUCUAGCCUCACCUCUCCA | UGGAGAGGUGAGGCUAGAA | [2540-2558]+ |
| 321 | CUCAAAUUCCUCUUCCAGG | CCUGGAAGAGGAAUUUGAG | [539-557] |
| 322 | CAAGUGCUACAUCGAUGGG | CCCAUCGAUGUAGCACUUG | [1936-1954] |
| 323 | AAUCUUGUUUUUCCUGGAG | CUCCAGGAAAAACAAGAUU | [1528-1546] |
| 324 | CCAUUGCAGGAGAAGAUGG | CCAUCUUCUCCUGCAAUGG | [357-375] |
| 325 | UAUAGACCUGGUGACUACU | AGUAGUCACCAGGUCUAUA | [1658-1676] |
| 326 | CUACUUGUAUCUGAACAUC | GAUGUUCAGAUACAAGUAG | [1672-1690] |
| 327 | CUUUGAGGUGUUCUAUUGG | CCAAUAGAACACCUCAAAG | [1429-1447] |
| 328 | UAUCUGGAUCAACAGAGAC | GUCUCUGUUGAUCCAGAUA | [2155-2173] |
| 329 | GAAUUUCUAGCCUCACCUC | GAGGUGAGGCUAGAAAUUC | [2536-2554]+ |
| 330 | UCUGCUCCAGUUCCUGCAU | AUGCAGGAACUGGAGCAGA | [1395-1413] |
| 331 | GUUCGGCUUCAGAUUUUUC | GAAAAAUCUGAAGCCGAAC | [2512-2530] |
| 332 | UUUGCUUCCAUUCUGCAGA | UCUGCAGAAUGGAAGCAAA | [2033-2051] |
| 333 | AUCUUUCAUGGGCCCAACU | AGUUGGGCCCAUGAAAGAU | [1484-1502] |
| 334 | AUCUGCUCCAGUUCCUGCA | UGCAGGAACUGGAGCAGAU | [1394-1412] |
| 335 | UCUGGAAUUGGUGGGUUCU | AGAACCCACCAAUUCCAGA | [238-256] |
| 336 | CUGACUAAACUGGAGAUGG | CCAUCUCCAGUUUAGUCAG | [2204-2222] |
| 337 | CUGACUUCAAGAAUGAAGC | GCUUCAUUCUUGAAGUCAG | [265-283] |
| 338 | AAUGAGAAAGAGUCAAAGG | CCUUUGACUCUUUCUCAUU | [1867-1885] |
| 339 | AUCAGCCUGCAAGAAUUCA | UGAAUUCUUGCAGGCUGAU | [380-398] |
| 340 | UUGCUUCCAUUCUGCAGAG | CUCUGCAGAAUGGAAGCAA | [2034-2052] |
| 341 | AAGAAUUCAAAGCAGCUCU | AGAGCUGCUUUGAAUUCUU | [390-408] |
| 342 | UAGACCUGGUGACUACUUG | CAAGUAGUCACCAGGUCUA | [1660-1678] |
| 343 | UUAUGGGCUACGUGGUAGU | ACUACCACGUAGCCCAUAA | [1194-1212] |
| 344 | UGCAGGUCUUCUUCUGUGG | CCACAGAAGAAGACCUGCA | [2451-2469] |
| 345 | UUGAGGUGUUCUAUUGGAC | GUCCAAUAGAACACCUCAA | [1431-1449] |
| 346 | UCUGCAGAGUAUCAUGUAC | GUACAUGAUACUCUGCAGA | [2044-2062] |
| 347 | CUUAGUCCUUCUAGUUGCG | CGCAACUAGAAGGACUAAG | [138-156] |
| 348 | UCUCAAUCCAUUGCGCCCA | UGGGCGCAAUGGAUUGAGA | [196-214] |
| 349 | UUUGCAGAGCGAUUCUUUG | CAAAGAAUCGCUCUGCAAA | [428-446] |
| 350 | UAGUUGCGCUUUUGCUAUG | CAUAGCAAAAGCGCAACUA | [149-167] |
| 351 | CUUCUAGUUGCGCUUUUGC | GCAAAAGCGCAACUAGAAG | [145-163] |
| 352 | UGGGUUCUUGGUCUCACUG | CAGUGAGACCAAGAACCCA | [249-267] |
| 353 | AAGGUGUUCCAGAAAGUGG | CCACUUUCUGGAACACCUU | [2411-2429] |
| 354 | AGUCAUGGAGAACCUGACC | GGUCAGGUUCUCCAUGACU | [844-862] |
| 355 | UCAAGUGCUACAUCGAUGG | CCAUCGAUGUAGCACUUGA | [1935-1953] |
| 356 | CAUCAUGGAAGUCAACCUC | GAGGUUGACUUCCAUGAUG | [1588-1606] |
| 357 | AACAGGCUGUAUGAGUCCU | AGGACUCAUACAGCCUGUU | [1793-1811] |
| 358 | CUCAUCUCCUCAUCAAGCG | CGCUUGAUGAGGAGAUGAG | [1623-1641] |
| 359 | GUGAACUUUGUACUCCAGG | CCUGGAGUACAAAGUUCAC | [1247-1265] |
| 360 | AAAAGAAAGCAUACUUGCC | GGCAAGUAUGCUUUCUUUU | [2072-2090] |
| 361 | AUAUGUACAUGACAUCUGC | GCAGAUGUCAUGUACAUAU | [2265-2283] |
| 362 | CUUUGCUUCCAUUCUGCAG | CUGCAGAAUGGAAGCAAAG | [2032-2050] |
| 363 | UGCAAGAAUUCAAAGCAGC | GCUGCUUUGAAUUCUUGCA | [387-405] |
| 364 | GAGGUCUCAAUCCAUUGCG | CGCAAUGGAUUGAGACCUC | [192-210] |
| 365 | AAGACCAUUGCAGGAGAAG | CUUCUCCUGCAAUGGUCUU | [353-371] |
| 366 | UAGUCCUUCUAGUUGCGCU | AGCGCAACUAGAAGGACUA | [140-158] |
| 367 | ACUGACUUCAAGAAUGAAG | CUUCAUUCUUGAAGUCAGU | [264-282] |
| 368 | CUUUUUUUCACUAUAGACC | GGUCUAUAGUGAAAAAAAG | [1647-1665] |
| 369 | GUGUUCUAUUGGACUCACC | GGUGAGUCCAAUAGAACAC | [1436-1454] |
| 370 | AUAGACCUGGUGACUACUU | AAGUAGUCACCAGGUCUAU | [1659-1677] |
| 371 | UAACAUCAAGUGCUACAUC | GAUGUAGCACUUGAUGUUA | [1930-1948] |
| 372 | AGUCCUUCUUUGCAGAGCG | CGCUCUGCAAAGAAGGACU | [420-438] |
| 373 | UCUUGGUCUCACUGACUUC | GAAGUCAGUGAGACCAAGA | [254-272] |
| 374 | UUCUUUGCAGAGCGAUUCU | AGAAUCGCUCUGCAAAGAA | [425-443] |
| 375 | CAGAACAUCCAGUUCCACC | GGUGGAACUGGAUGUUCUG | [1172-1190] |
| 376 | CAGAGUAUCAUGUACAGGC | GCCUGUACAUGAUACUCUG | [2048-2066] |
| 377 | AACAUCAAGUGCUACAUCG | CGAUGUAGCACUUGAUGUU | [1931-1949] |
| 378 | ACCACUGGACCAGAACAUC | GAUGUUCUGGUCCAGUGGU | [1162-1180] |
| 379 | AGUGCCUCAACUUCGACUG | CAGUCGAAGUUGAGGCACU | [1071-1089] |
| 380 | UGGAAUCUUGUUUUUCCUG | CAGGAAAAACAAGAUUCCA | [1525-1543] |
| 381 | GAAAGAGUCAAAGGUCGUC | GACGACCUUUGACUCUUUC | [1872-1890] |
| 382 | CUUUCCAGUUCUGGGAGCU | AGCUCCCAGAACUGGAAAG | [1284-1302] |
| 383 | CAAGAAUGACAUGAAGGCC | GGCCUUCAUGUCAUUCUUG | [2290-2308] |
| 384 | UGAAAGAGUCCUUCUUUGC | GCAAAGAAGGACUCUUUCA | [414-432] |
| 385 | ACCAUUGCAGGAGAAGAUG | CAUCUUCUCCUGCAAUGGU | [356-374] |
| 386 | UCAAAGCAGCUCUGCAUGU | ACAUGCAGAGCUGCUUUGA | [396-414] |
| 387 | ACAUGACAUCUGCACUGGG | CCCAGUGCAGAUGUCAUGU | [2271-2289] |
| 388 | UGGUGACUACUUGUAUCUG | CAGAUACAAGUAGUCACCA | [1666-1684] |
| 389 | CCAUUGUGAGAAGUUCGGC | GCCGAACUUCUCACAAUGG | [2500-2518] |
| 390 | GUUCUAUUGGACUCACCUG | CAGGUGAGUCCAAUAGAAC | [1438-1456] |
| 391 | UCUGCAUGUGAAAGAGUCC | GGACUCUUUCACAUGCAGA | [406-424] |
| 392 | AUCAAGUGCUACAUCGAUG | CAUCGAUGUAGCACUUGAU | [1934-1952] |
| 393 | CGUGUGCAUCAUGGAAGUC | GACUUCCAUGAUGCACACG | [1582-1600] |
| 394 | UUUUUUCACUAUAGACCUG | CAGGUCUAUAGUGAAAAAA | [1649-1667] |
| 395 | UUUUUCCAAGAGAAUUUCU | AGAAAUUCUCUUGGAAAAA | [2525-2543] |
| 396 | ACAUCGAUGGGCCUUAUGG | CCAUAAGGCCCAUCGAUGU | [1944-1962] |
| 397 | CCUAUGAAGCCCUUAGUCC | GGACUAAGGGCUUCAUAGG | [127-145] |
| 398 | AGAGUCCUUCUUUGCAGAG | CUCUGCAAAGAAGGACUCU | [418-436] |
| 399 | GCUCCUCCUCAUGUUCAUC | GAUGAACAUGAGGAGGAGC | [1378-1396] |
| 400 | UGGAUCGAAGGUGUCCAAG | CUUGGACACCUUCGAUCCA | [2108-2126] |
| 401 | UAUUGGACUCACCUGUCCU | AGGACAGGUGAGUCCAAUA | [1442-1460] |
| 402 | UCCUUCUUUGCAGAGCGAU | AUCGCUCUGCAAAGAAGGA | [422-440] |
| 403 | UCCAAGGGCUCUGAGAUAC | GUAUCUCAGAGCCCUUGGA | [1889-1907] |
| 404 | AACAUGAAGCUCCAUAAGG | CCUUAUGGAGCUUCAUGUU | [2129-2147] |
| 405 | UAUCUGGAAUUGGUGGGUU | AACCCACCAAUUCCAGAUA | [236-254] |
| 406 | ACUCAUCUCCUCAUCAAGC | GCUUGAUGAGGAGAUGAGU | [1622-1640] |
| 407 | AAUUUCUAGCCUCACCUCU | AGAGGUGAGGCUAGAAAUU | [2537-2555]+ |
| 408 | AAACAGGCUGUAUGAGUCC | GGACUCAUACAGCCUGUUU | [1792-1810] |
| 409 | AUCUGGAAUUGGUGGGUUC | GAACCCACCAAUUCCAGAU | [237-255] |
| 410 | UAUGCAGUCAUGUUGUAUC | GAUACAACAUGACUGCAUA | [221-239] |
| 411 | CAUAUGUACAUGACAUCUG | CAGAUGUCAUGUACAUAUG | [2264-2282] |
| 412 | UUCAUCUGCUCCAGUUCCU | AGGAACUGGAGCAGAUGAA | [1391-1409] |
| 413 | AUCAACAGAGACCAGCGGU | ACCGCUGGUCUCUGUUGAU | [2162-2180] |
| 414 | UAAACUGGAGAUGGACCAG | CUGGUCCAUCUCCAGUUUA | [2209-2227] |
| 415 | AUAAGGUGGACUUUAUCUG | CAGAUAAAGUCCACCUUAU | [2142-2160] |
| 416 | CAAGACAACAUGAAGCUCC | GGAGCUUCAUGUUGUCUUG | [2123-2141] |
| 417 | UGUUCAUCUGCUCCAGUUC | GAACUGGAGCAGAUGAACA | [1389-1407] |
| 418 | UUCAUGGGCCCAACUUCUG | CAGAAGUUGGGCCCAUGAA | [1488-1506] |
| 419 | AAAUUCCUCUUCCAGGUGU | ACACCUGGAAGAGGAAUUU | [542-560] |
| 420 | CAAAUUCCUCUUCCAGGUG | CACCUGGAAGAGGAAUUUG | [541-559] |
| 421 | CCUCCUCAUGUUCAUCUGC | GCAGAUGAACAUGAGGAGG | [1381-1399] |
| 422 | UAUCAUGUACAGGCACCAG | CUGGUGCCUGUACAUGAUA | [2053-2071] |
| 423 | CAAACUCAAAUUCCUCUUC | GAAGAGGAAUUUGAGUUUG | [535-553] |
| 424 | AACUUUGUACUCCAGGCUC | GAGCCUGGAGUACAAAGUU | [1250-1268] |
| 425 | GCAGAGUAUCAUGUACAGG | CCUGUACAUGAUACUCUGC | [2047-2065] |
| 426 | UAAGAGGCUGUCGAGGAGU | ACUCCUCGACAGCCUCUUA | [1843-1861] |
| 427 | AUUGUGAGAAGUUCGGCUU | AAGCCGAACUUCUCACAAU | [2502-2520] |
| 428 | UUUAUCUGGAUCAACAGAG | CUCUGUUGAUCCAGAUAAA | [2153-2171] |
| 429 | UGGAUCAACAGAGACCAGC | GCUGGUCUCUGUUGAUCCA | [2159-2177] |
| 430 | AUUCUGUAACAUCAAGUGC | GCACUUGAUGUUACAGAAU | [1924-1942] |
| 431 | UUCAAGGCAUCAGACCCAC | GUGGGUCUGAUGCCUUGAA | [1811-1829] |
| 432 | UGCUCAUCUUUCAUGGGCC | GGCCCAUGAAAGAUGAGCA | [1479-1497] |
| 433 | UUCUGCUCAUCUUUCAUGG | CCAUGAAAGAUGAGCAGAA | [1476-1494] |
| 434 | UGACUUCAAGAAUGAAGCC | GGCUUCAUUCUUGAAGUCA | [266-284] |
| 435 | UGCAGUCAUGUUGUAUCUG | CAGAUACAACAUGACUGCA | [223-241] |
| 436 | CUAUUGGACUCACCUGUCC | GGACAGGUGAGUCCAAUAG | [1441-1459] |
| 437 | GUCUUUCGAGUGGUUUGUG | CACAAACCACUCGAAAGAC | [2179-2197] |
| 438 | UUGGUGGGUUCUUGGUCUC | GAGACCAAGAACCCACCAA | [245-263] |
| 439 | CUCAUCUUUCAUGGGCCCA | UGGGCCCAUGAAAGAUGAG | [1481-1499] |
| 440 | UCUUUGCCCUAUUUGACUC | GAGUCAAAUAGGGCAAAGA | [441-459] |
| 441 | UUCUAUUGGACUCACCUGU | ACAGGUGAGUCCAAUAGAA | [1439-1457] |
| 442 | UUUGACUCCGAUAGAAGUG | CACUUCUAUCGGAGUCAAA | [452-470] |
| 443 | UCUGCUCAUCUUUCAUGGG | CCCAUGAAAGAUGAGCAGA | [1477-1495] |
| 444 | AAAGAAAGCAUACUUGCCC | GGGCAAGUAUGCUUUCUUU | [2073-2091] |
| 445 | AGCCUGCUGACUAAACUGG | CCAGUUUAGUCAGCAGGCU | [2198-2216] |
| 446 | AAACUCAAAUUCCUCUUCC | GGAAGAGGAAUUUGAGUUU | [536-554] |
| 447 | AUCUGGAUCAACAGAGACC | GGUCUCUGUUGAUCCAGAU | [2156-2174] |
| 448 | CUUAUCCGAGGUCUCAAUC | GAUUGAGACCUCGGAUAAG | [185-203] |
| 449 | AUGUUGUAUCUGGAAUUGG | CCAAUUCCAGAUACAACAU | [230-248] |
| 450 | AUUUCUAGCCUCACCUCUC | GAGAGGUGAGGCUAGAAAU | [2538-2556]+ |
| 451 | CUUAUGGGCUACGUGGUAG | CUACCACGUAGCCCAUAAG | [1193-1211] |
| 452 | UUUCUAGCCUCACCUCUCC | GGAGAGGUGAGGCUAGAAA | [2539-2557]+ |
| 453 | GACCAGAACAUCCAGUUCC | GGAACUGGAUGUUCUGGUC | [1169-1187] |
| 454 | UUGUAUCUGGAAUUGGUGG | CCACCAAUUCCAGAUACAA | [233-251] |
| 455 | UUCGGCUUCAGAUUUUUCC | GGAAAAAUCUGAAGCCGAA | [2513-2531] |
| 456 | UACUUGUAUCUGAACAUCC | GGAUGUUCAGAUACAAGUA | [1673-1691] |
| 457 | CUUCUGCUCAUCUUUCAUG | CAUGAAAGAUGAGCAGAAG | [1475-1493] |
| 458 | AAUUGGUGGGUUCUUGGUC | GACCAAGAACCCACCAAUU | [243-261] |
| 459 | UUCCAAGAGAAUUUCUAGC | GCUAGAAAUUCUCUUGGAA | [2528-2546]+ |
| 460 | CUUCUUUGCAGAGCGAUUC | GAAUCGCUCUGCAAAGAAG | [424-442] |
| 461 | UUGUGAGAAGUUCGGCUUC | GAAGCCGAACUUCUCACAA | [2503-2521] |
| 462 | ACUAAACUGGAGAUGGACC | GGUCCAUCUCCAGUUUAGU | [2207-2225] |
| 463 | UACAUCGAUGGGCCUUAUG | CAUAAGGCCCAUCGAUGUA | [1943-1961] |
| 464 | GAGUCCUUCUUUGCAGAGC | GCUCUGCAAAGAAGGACUC | [419-437] |
| 465 | UUUGUACUCCAGGCUCAGG | CCUGAGCCUGGAGUACAAA | [1253-1271] |
| 466 | AUGGACAAACUCAAAUUCC | GGAAUUUGAGUUUGUCCAU | [530-548] |
| 467 | AUUCUGCAGAGUAUCAUGU | ACAUGAUACUCUGCAGAAU | [2042-2060] |
| 468 | UUUCACUAUAGACCUGGUG | CACCAGGUCUAUAGUGAAA | [1652-1670] |
| 469 | UGACUGGAGCAAGGUGUUC | GAACACCUUGCUCCAGUCA | [2401-2419] |
| 470 | CUGCUCAUCUUUCAUGGGC | GCCCAUGAAAGAUGAGCAG | [1478-1496] |
| 471 | UGCAGAGCGAUUCUUUGCC | GGCAAAGAAUCGCUCUGCA | [430-448] |
| 472 | GUUCAUCUGCUCCAGUUCC | GGAACUGGAGCAGAUGAAC | [1390-1408] |
| 473 | CUUUGCCCUAUUUGACUCC | GGAGUCAAAUAGGGCAAAG | [442-460] |
| 474 | UUCGACUGCAGCUUCAUCG | CGAUGAAGCUGCAGUCGAA | [1082-1100] |
| 475 | AGUUGCGCUUUUGCUAUGG | CCAUAGCAAAAGCGCAACU | [150-168] |
| 476 | UCCUUCAAGGCAUCAGACC | GGUCUGAUGCCUUGAAGGA | [1808-1826] |
| 477 | UCAUCUGCUCCAGUUCCUG | CAGGAACUGGAGCAGAUGA | [1392-1410] |
| 478 | UUGCAGAGCGAUUCUUUGC | GCAAAGAAUCGCUCUGCAA | [429-447] |
| 479 | UGCUACAUCGAUGGGCCUU | AAGGCCCAUCGAUGUAGCA | [1940-1958] |
| 480 | AACAUCCAGUUCCACCAGC | GCUGGUGGAACUGGAUGUU | [1175-1193] |
| 481 | UCAUCUCCUCAUCAAGCGG | CCGCUUGAUGAGGAGAUGA | [1624-1642] |
| 482 | GAAUUCAAAGCAGCUCUGC | GCAGAGCUGCUUUGAAUUC | [392-410] |
| 483 | UGGUUCUAAGAGGCUGUCG | CGACAGCCUCUUAGAACCA | [1837-1855] |
| 484 | AAGAAUGAAGCCGCAGACC | GGUCUGCGGCUUCAUUCUU | [273-291] |
| 485 | AUGGAAGUCAACCUCCUCC | GGAGGAGGUUGACUUCCAU | [1592-1610] |
| 486 | UCUAUUGGACUCACCUGUC | GACAGGUGAGUCCAAUAGA | [1440-1458] |
| 487 | UUCAAAGCAGCUCUGCAUG | CAUGCAGAGCUGCUUUGAA | [395-413] |
| 488 | UAUGGGCUACGUGGUAGUG | CACUACCACGUAGCCCAUA | [1195-1213] |
| 489 | GUUUUUCCUGGAGAAGGCC | GGCCUUCUCCAGGAAAAAC | [1534-1552] |
| 490 | ACUGUGAACUUUGUACUCC | GGAGUACAAAGUUCACAGU | [1244-1262] |
| 491 | UUUCGAGUGGUUUGUGAGC | GCUCACAAACCACUCGAAA | [2182-2200] |
| 492 | UUGGACUCACCUGUCCUAC | GUAGGACAGGUGAGUCCAA | [1444-1462] |
| 493 | AUUUUUCCAAGAGAAUUUC | GAAAUUCUCUUGGAAAAAU | [2524-2542] |
| 494 | CCUCAUGUUCAUCUGCUCC | GGAGCAGAUGAACAUGAGG | [1384-1402] |
| 495 | UUGUUUUUCCUGGAGAAGG | CCUUCUCCAGGAAAAACAA | [1532-1550] |
| 496 | UUCCAUUCUGCAGAGUAUC | GAUACUCUGCAGAAUGGAA | [2038-2056] |
| 497 | AUGUACAUGACAUCUGCAC | GUGCAGAUGUCAUGUACAU | [2267-2285] |
| 498 | UGUAUCUGGAAUUGGUGGG | CCCACCAAUUCCAGAUACA | [234-252] |
| 499 | AGUAUCAUGUACAGGCACC | GGUGCCUGUACAUGAUACU | [2051-2069] |
| 500 | AAACUGGAGAUGGACCAGG | CCUGGUCCAUCUCCAGUUU | [2210-2228] |

TABLE A9
DUOX2 19-mer oligomer pairs

| | | | | |
|---|---|---|---|---|
| | | | Other | Human-132566531 |
| No. | Sense siRNA | AntiSense siRNA | Sp | ORF: 204-4850 |

| | | | | |
|---|---|---|---|---|
| 1 | CCCAGACAAUUAUACAAAU | AUUUGUAUAAUUGUCUGGG | | [5002-5020] |
| 2 | ACCCAGACAAUUAUACAAA | UUUGUAUAAUUGUCUGGGU | | [5001-5019] |
| 3 | CUAAUUGACUUCCACAAAA | UUUUGUGGAAGUCAAUUAG | | [5299-5317] |
| 4 | AGAAUAUUGACCCAGACAA | UUGUCUGGGUCAAUAUUCU | | [4992-5010] |
| 5 | CAGUACUCGAUCUCAAUUC | GAAUUGAGAUCGAGUACUG | | [5699-5717] |
| 6 | UCAGUACUCGAUCUCAAUU | AAUUGAGAUCGAGUACUGA | | [5698-5716] |
| 7 | GAAUAUUGACCCAGACAAU | AUUGUCUGGGUCAAUAUUC | | [4993-5011] |
| 8 | CCACUUUCCACAUCUACUU | AAGUAGAUGUGGAAAGUGG | | [3934-3952 |
| 9 | GGGAGGAUUUUCACUUCAU | AUGAAGUGAAAAUCCUCCC | | [2965-2983 |
| 10 | GGAGCUAUUUAGGAAGGCU | AGCCUUCCUAAAUAGCUCC | | [2459-2477 |
| 11 | UGGUCCUACUAAAUAUACU | AGUAUAUUUAGUAGGACCA | | [6121-6139] |
| 12 | CUCUAAUUGACUUCCACAA | UUGUGGAAGUCAAUUAGAG | | [5297-5315] |
| 13 | GCCACGCAGUCAAUGUCUA | UAGACAUUGACUGCGUGGC | | [3634-3652 |
| 14 | CCAACACCACCCUAAACCA | UGGUUUAGGGUGGUGUUGG | | [168-186] |
| 15 | GGAGGACAACAUAGUGGUU | AACCACUAUGUUGUCCUCC | | [1406-1424 |
| 16 | CCUUUUUCAUCGGGCUCUU | AAGAGCCCGAUGAAAAAGG | | [5903-5921] |
| 17 | GGAGGUGAAAAGGUACAAU | AUUGUACCUUUUCACCUCC | | [5250-5268] |
| 18 | GUCUAAUGUUUACCAUGUA | UACAUGGUAAACAUUAGAC | | [2785-2803 |
| 19 | CCCGUCUAAUGUUUACCAU | AUGGUAAACAUUAGACGGG | | [2782-2800 |
| 20 | ACCUCAUCCUGUCCAACAA | UUGUUGGACAGGAUGAGGU | | [2284-2302 |
| 21 | UCAACCUCAUCCUGUCCAA | UUGGACAGGAUGAGGUUGA | | [2281-2299 |
| 22 | AGACAUCUGAACCCAACAC | GUGUUGGGUUCAGAUGUCU | | [156-174] |
| 23 | CAGUUUUGGUCCUACUAAA | UUUAGUAGGACCAAAACUG | | [6115-6133] |
| 24 | CCAGAUAUUCAGUACUCGA | UCGAGUACUGAAUAUCUGG | | [5690-5708] |
| 25 | CCCAAAGUGUCAGCAACUU | AAGUUGCUGACACUUUGGG | | [5518-5536] |
| 26 | UGACCAAGAAUGUAGAGAA | UUCUCUACAUUCUUGGUCA | | [4768-4786 |
| 27 | CUGUUGUCCUGGCCAUUUU | AAAAUGGCCAGGACAACAG | | [3604-3622 |
| 28 | GCCGCAACCUCAUAACCUU | AAGGUUAUGAGGUUGCGGC | | [3508-3526 |
| 29 | CCUUCAUGUUCUCUUAUAU | AUAUAAGAGAACAUGAAGG | | [3475-3493 |
| 30 | GGAGGAUUUUCACUUCAUG | CAUGAAGUGAAAAUCCUCC | | [2966-2984 |
| 31 | ACGAAUUCUUCACCAUGAU | AUCAUGGUGAAGAAUUCGU | | [2836-2854 |
| 32 | UGCCAGAUAUUCAGUACUC | GAGUACUGAAUAUCUGGCA | | [5688-5706] |
| 33 | GGCACCAGGAAACAAAGAU | AUCUUUGUUUCCUGGUGCC | | [5544-5562] |
| 34 | GAGGUGAAAAGGUACAAUA | UAUUGUACCUUUUCACCUC | | [5251-5269] |
| 35 | GGUCCCGGCAAUCAUCUAU | AUAGAUGAUUGCCGGGACC | | [3956-3974 |
| 36 | UCCUUCAUGUUCUCUUAUA | UAUAAGAGAACAUGAAGGA | | [3474-3492 |
| 37 | GAAGACAUCUGAACCCAAC | GUUGGGUUCAGAUGUCUUC | | [154-172] |
| 38 | GCAGUCCCAUCAUCAUCCA | UGGAUGAUGAUGGGACUGC | | [2179-2197 |
| 39 | CAAGAAGCUACAAAAGAAA | UUUCUUUUGUAGCUUCUUG | | [2084-2102 |
| 40 | GCCAGAUAUUCAGUACUCG | CGAGUACUGAAUAUCUGGC | | [5689-5707] |
| 41 | CAAAAUCGAUGCGUUGCUU | AAGCAACGCAUCGAUUUUG | | [5313-5331] |
| 42 | GGAGACUAUGUUCUACAAU | AUUGUAGAACAUAGUCUCC | | [5032-5050] |
| 43 | GGCAUAAAUUUGAGGUGUC | GACACCUCAAAUUUAUGCC | | [4324-4342 |
| 44 | CCGGCAAUCAUCUAUGGAG | CUCCAUAGAUGAUUGCCGG | | [3960-3978 |
| 45 | UGCCCACUUUCCACAUCUA | UAGAUGUGGAAAGUGGGCA | | [3931-3949 |
| 46 | CCAACGUCUUUGUGAAUGA | UCAUUCACAAAGACGUUGG | | [3697-3715 |
| 47 | CCAUCUGUGUUGGCGUGUU | AACACGCCAACACAGAUGG | | [3352-3370 |
| 48 | ACACCACCCUAAACCACAG | CUGUGGUUUAGGGUGGUGU | | [171-189] |
| 49 | CUAUUUAGGAAGGCUGUGA | UCACAGCCUUCCUAAAUAG | | [2463-2481 |
| 50 | GAGCUAUUUAGGAAGGCUG | CAGCCUUCCUAAAUAGCUC | | [2460-2478 |
| 51 | GAAGGAGCUAUUUAGGAAG | CUUCCUAAAUAGCUCCUUC | | [2456-2474 |
| 52 | GCGAGAAGGAGCUAUUUAG | CUAAAUAGCUCCUUCUCGC | | [2452-2470 |
| 53 | CCCUGACUGUGCUUGACUU | AAGUCAAGCACAGUCAGGG | | [1954-1972 |
| 54 | GCUACUGGUUUGAGAACAC | GUGUUCUCAAACCAGUAGC | Rat, Ms | [1750-1768 |
| 55 | CCAUUGUCCUCGACCAGUU | AACUGGUCGAGGACAAUGG | | [1708-1726 |
| 56 | GGGUCUGCAACAACUACUG | CAGUAGUUGUUGCAGACCC | Rat | [1306-1324 |
| 57 | CUGGUGUCUACAUGAGAAA | UUUCUCAUGUAGACACCAG | | [1228-1246 |
| 58 | CCUGGUGUCUACAUGAGAA | UUCUCAUGUAGACACCAGG | | [1227-1245 |
| 59 | CUGCCAGAUAUUCAGUACU | AGUACUGAAUAUCUGGCAG | | [5687-5705] |
| 60 | UCUAAUUGACUUCCACAAA | UUUGUGGAAGUCAAUUAGA | | [5298-5316] |
| 61 | CAUCUCUAAUUGACUUCCA | UGGAAGUCAAUUAGAGAUG | | [5294-5312] |
| 62 | CCAAAGAAGAUAAAGACCA | UGGUCUUUAUCUUCUUUGG | | [5154-5172] |
| 63 | CAGUGCAUGAUGAUUAUAA | UUAUAAUCAUCAUGCACUG | | [5053-5071] |
| 64 | GCAGUGCAUGAUGAUUAUA | UAUAAUCAUCAUGCACUGC | | [5052-5070] |
| 65 | CCAAGAAUGUAGAGAAGGC | GCCUUCUCUACAUUCUUGG | | [4771-4789 |
| 66 | GCAAUGGCUGUGCUGGAUA | UAUCCAGCACAGCCAUUGC | | [4258-4276 |
| 67 | CCAAGGCUUUGAGUACAAG | CUUGUACUCAAAGCCUUGG | | [4079-4097 |
| 68 | GCAAUCAUCUAUGGAGGUG | CACCUCCAUAGAUGAUUGC | | [3963-3981 |
| 69 | GUCUACAUCUUCUCAGUCA | UGACUGAGAAGAUGUAGAC | | [3648-3666 |
| 70 | AGACUUUCCUCAACCGCUA | UAGCGGUUGAGGAAAGUCU | | [3535-3553 |
| 71 | GCAACCUCAUAACCUUCCU | AGGAAGGUUAUGAGGUUGC | | [3511-3529 |
| 72 | CUAAUGUUUACCAUGUAUG | CAUACAUGGUAAACAUUAG | Rat | [2787-2805 |
| 73 | CCAUCAUCAUCCAGCUGCU | AGCAGCUGGAUGAUGAUGG | | [2185-2203 |
| 74 | AGAAGACAUCUGAACCCAA | UUGGGUUCAGAUGUCUUCU | | [153-171] |
| 75 | CUACAAAAGAAACUCAAAG | CUUUGAGUUUCUUUUGUAG | | [2091-2109 |
| 76 | GCUACAAAAGAAACUCAAA | UUUGAGUUUCUUUUGUAGC | | [2090-2108 |
| 77 | GCAACAACUACUGGAUUCG | CGAAUCCAGUAGUUGUUGC | Rat | [1312-1330 |
| 78 | UGCAACAACUACUGGAUUC | GAAUCCAGUAGUUGUUGCA | Rat | [1311-1329 |
| 79 | GGUGUCUACAUGAGAAAUG | CAUUUCUCAUGUAGACACC | | [1230-1248 |
| 80 | ACAAAAUCGAUGCGUUGCU | AGCAACGCAUCGAUUUUGU | | [5312-5330] |
| 81 | CCCACAUCUCUAAUUGACU | AGUCAAUUAGAGAUGUGGG | | [5290-5308] |
| 82 | UGCAGUGCAUGAUGAUUAU | AUAAUCAUCAUGCACUGCA | | [5051-5069] |
| 83 | CCAUCAGAAUCCACCUUAG | CUAAGGUGGAUUCUGAUGG | | [4933-4951] |
| 84 | CCCACUUCAUGCACCACUA | UAGUGGUGCAUGAAGUGGG | | [4819-4837 |
| 85 | GGCUUUGAGUACAAGUCAG | CUGACUUGUACUCAAAGCC | | [4083-4101 |
| 86 | GUCCCGGCAAUCAUCUAUG | CAUAGAUGAUUGCCGGGAC | | [3957-3975 |
| 87 | UGGCCAUCAUGUAUGUCUU | AAGACAUACAUGAUGGCCA | | [3799-3817 |
| 88 | CAACGUCUUUGUGAAUGAU | AUCAUUCACAAAGACGUUG | | [3698-3716 |
| 89 | GCUGUUGUCCUGGCCAUUU | AAAUGGCCAGGACAACAGC | | [3603-3621 |
| 90 | AGAUCGUGCUUACUACUAU | AUAGUAGUAAGCACGAUCU | | [3374-3392 |
| 91 | AGAAGAGGUUUGGCAAAAA | UUUUUGCCAAACCUCUUCU | | [3190-3208 |
| 92 | UGGAAAUGGUAUUAGAGAU | AUCUCUAAUACCAUUUCCA | | [3047-3065 |
| 93 | UGGAGGUGGAAAUGGUAUU | AAUACCAUUUCCACCUCCA | | [3041-3059 |
| 94 | GGAUUUUCACUUCAUGCUG | CAGCAUGAAGUGAAAAUCC | | [2969-2987 |
| 95 | UGACAUGGGAGGAUUUUCA | UGAAAAUCCUCCCAUGUCA | | [2959-2977 |
| 96 | UGAAGAAGGAAGCAGCCAA | UUGGCUGCUUCCUUCUUCA | | [2116-2134 |
| 97 | ACAAAAGAAACUCAAAGAG | CUCUUUGAGUUUCUUUUGU | | [2093-2111 |
| 98 | CCCUUAGUGAGUCUGCUUC | GAAGCAGACUCACUAAGGG | | [2028-2046 |
| 99 | AGCAAAGAUUUUAAGAGGA | UCCUCUUAAAAUCUUUGCU | | [133-151] |
| 100 | UCAGUGCCAUUGUCCUCGA | UCGAGGACAAUGGCACUGA | | [1702-1720 |
| 101 | CUGCAACAACUACUGGAUU | AAUCCAGUAGUUGUUGCAG | Rat | [1310-1328 |
| 102 | UCAGGGUCUGCAACAACUA | UAGUUGUUGCAGACCCUGA | Rat | [1303-1321 |
| 103 | CUCUCAGGGUCUGCAACAA | UUGUUGCAGACCCUGAGAG | Rat | [1300-1318 |
| 104 | CCAGGUCAAGACAUAGAAU | AUUCUAUGUCUUGACCUGG | | [5995-6013] |
| 105 | CCCUGAUAUUCUUGAUGUC | GACAUCAAGAAUAUCAGGG | | [5573-5591] |
| 106 | CACAUCUCUAAUUGACUUC | GAAGUCAAUUAGAGAUGUG | | [5292-5310] |
| 107 | UGGAGGUGAAAAGGUACAA | UUGUACCUUUUCACCUCCA | | [5249-5267] |
| 108 | UCCCAAAGAAGAUAAAGAC | GUCUUUAUCUUCUUUGGGA | | [5152-5170] |
| 109 | AGGAGACUAUGUUCUACAA | UUGUAGAACAUAGUCUCCU | | [5031-5049] |
| 110 | GACCCAGACAAUUAUACAA | UUGUAUAAUUGUCUGGGUC | | [5000-5018] |
| 111 | CCCGGCAAUCAUCUAUGGA | UCCAUAGAUGAUUGCCGGG | | [3959-3977 |
| 112 | GCCCACUUUCCACAUCUAC | GUAGAUGUGGAAAGUGGGC | | [3932-3950 |
| 113 | UCAUCAUCCAUGGCAGCUA | UAGCUGCCAUGGAUGAUGA | Rat, Ms | [3898-3916 |
| 114 | UCCUGGCCAUCAUGUAUGU | ACAUACAUGAUGGCCAGGA | | [3796-3814 |
| 115 | AGAAGUUCUAUUGGUGGUU | AACCACCAAUAGAACUUCU | | [3733-3751 |
| 116 | CCCAACGUCUUUGUGAAUG | CAUUCACAAAGACGUUGGG | | [3696-3714 |
| 117 | CUUAUAUCUUGCUCACCAU | AUGGUGAGCAAGAUAUAAG | | [3487-3505 |
| 118 | GUGCUUACUACUAUGGCUU | AAGCCAUAGUAGUAAGCAC | | [3379-3397 |
| 119 | AGGAUUUUCACUUCAUGCU | AGCAUGAAGUGAAAAUCCU | | [2968-2986 |
| 120 | UGGGAGGAUUUUCACUUCA | UGAAGUGAAAAUCCUCCCA | | [2964-2982 |
| 121 | CCAGAGAGAAAGGUGAGAG | CUCUCACCUUUCUCUCUGG | | [45-63] |
| 122 | GCUGUUUAGUUCUGAAGAG | CUCUUCAGAACUAAACAGC | | [2357-2375 |
| 123 | GUCAACCUCAUCCUGUCCA | UGGACAGGAUGAGGUUGAC | Rat | [2280-2298 |
| 124 | CGAGAACACAAGAAGCUAC | GUAGCUUCUUGUGUUCUCG | | [2076-2094 |
| 125 | CCAAUGUCUUUGUCUGGCA | UGCCAGACAAAGACAUUGG | | [1873-1891 |
| 126 | ACAUCCGAAAUACCACCCU | AGGGUGGUAUUUCGGAUGU | | [1804-1822 |
| 127 | GAAGCAAAGAUUUUAAGAG | CUCUUAAAAUCUUUGCUUC | | [131-149] |
| 128 | CACAGAAGCAAAGAUUUUA | UAAAAUCUUUGCUUCUGUG | | [127-145] |
| 129 | GUGAUCUCAACCCUAAUGU | ACAUUAGGGUUGAGAUCAC | | [1573-1591 |
| 130 | GGCAAAUUCUCCCGUACAG | CUGUACGGGAGAAUUUGCC | | [1455-1473 |
| 131 | ACUACUGGAUUCGGGAGAA | UUCUCCCGAAUCCAGUAGU | Rat | [1318-1336 |
| 132 | UCUGCAACAACUACUGGAU | AUCCAGUAGUUGUUGCAGA | Rat | [1309-1327 |
| 133 | AGGGUCUGCAACAACUACU | AGUAGUUGUUGCAGACCCU | Rat | [1305-1323 |
| 134 | CUCAGGGUCUGCAACAACU | AGUUGUUGCAGACCCUGAG | Rat | [1302-1320 |
| 135 | CCCUGGUGUCUACAUGAGA | UCUCAUGUAGACACCAGGG | | [1226-1244 |
| 136 | GCUGAGCUGUAAAAUAUUU | AAAUAUUUUACAGCUCAGC | | [5931-5949] |
| 137 | UCCAUACUCAGCUCUUUAA | UUAAAGAGCUGAGUAUGGA | | [5874-5892] |
| 138 | UCGAUGCGUUGCUUUGGUA | UACCAAAGCAACGCAUCGA | | [5318-5336] |
| 139 | GUGAAAAGGUACAAUAGUG | CACUAUUGUACCUUUUCAC | | [5254-5272] |
| 140 | GGUGAAAAGGUACAAUAGU | ACUAUUGUACCUUUUCACC | | [5253-5271] |
| 141 | UCCAUCAGAAUCCACCUUA | UAAGGUGGAUUCUGAUGGA | | [4932-4950] |
| 142 | CCACUUCAUGCACCACUAU | AUAGUGGUGCAUGAAGUGG | | [4820-4838 |
| 143 | GAAUGACCAAGAAUGUAGA | UCUACAUUCUUGGUCAUUC | | [4765-4783 |
| 144 | CCAAAUGCUGUGUAAGAAG | CUUCUUACACAGCAUUUGG | | [4424-4442 |
| 145 | CAAUGGCUGUGCUGGAUAC | GUAUCCAGCACAGCCAUUG | | [4259-4277 |
| 146 | CAAUCAUCUAUGGAGGUGA | UCACCUCCAUAGAUGAUUG | | [3964-3982 |
| 147 | GGCAAUCAUCUAUGGAGGU | ACCUCCAUAGAUGAUUGCC | | [3962-3980 |
| 148 | CGGCAAUCAUCUAUGGAGG | CCUCCAUAGAUGAUUGCCG | | [3961-3979 |
| 149 | CCCACUUUCCACAUCUACU | AGUAGAUGUGGAAAGUGGG | | [3933-3951 |
| 150 | UCAUAACCUUCCUGCGAGA | UCUCGCAGGAAGGUUAUGA | | [3517-3535 |
| 151 | GCUGACAUGGGAGGAUUUU | AAAAUCCUCCCAUGUCAGC | | [2957-2975 |
| 152 | CCAAGGACGAAUUCUUCAC | GUGAAGAAUUCGUCCUUGG | | [2830-2848 |
| 153 | CCGUCUAAUGUUUACCAUG | CAUGGUAAACAUUAGACGG | | [2783-2801 |
| 154 | GUUUAGUUCUGAAGAGGAA | UUCCUCUUCAGAACUAAAC | | [2360-2378 |
| 155 | GCUGCUGUUUAGUUCUGAA | UUCAGAACUAAACAGCAGC | | [2354-2372 |
| 156 | UGCUGCUCAAGAUCCCUAA | UUAGGGAUCUUGAGCAGCA | | [2320-2338 |
| 157 | UUAAGAGGAAAGAAGACAU | AUGUCUUCUUUCCUCUUAA | | [143-161] |
| 158 | GCAGCCCAAUGUCUUUGUC | GACAAAGACAUUGGGCUGC | | [1868-1886 |
| 159 | CAGAAGCAAAGAUUUUAAG | CUUAAAAUCUUUGCUUCUG | | [129-147] |
| 160 | CCUCCAUACUCAGCUCUUU | AAAGAGCUGAGUAUGGAGG | | [5872-5890] |
| 161 | CCCUCCAUACUCAGCUCUU | AAGAGCUGAGUAUGGAGGG | | [5871-5889] |
| 162 | CAGAUAUUCAGUACUCGAU | AUCGAGUACUGAAUAUCUG | | [5691-5709] |
| 163 | CAGCCCUGAUAUUCUUGAU | AUCAAGAAUAUCAGGGCUG | | [5570-5588] |
| 164 | CCAGCCCUGAUAUUCUUGA | UCAAGAAUAUCAGGGCUGG | | [5569-5587] |
| 165 | GAGGGCACCAGGAAACAAA | UUUGUUUCCUGGUGCCCUC | | [5541-5559] |
| 166 | CGAUGCGUUGCUUUGGUAU | AUACCAAAGCAACGCAUCG | | [5319-5337] |
| 167 | GUGUGGAGGUGAAAAGGUA | UACCUUUUCACCUCCACAC | | [5246-5264] |
| 168 | CAAAGAAGAUAAAGACCAC | GUGGUCUUUAUCUUCUUUG | | [5155-5173] |
| 169 | GCAUGAUGAUUAUAAGUCC | GGACUUAUAAUCAUCAUGC | | [5057-5075] |
| 170 | UGCACCACUAUGAGAACUU | AAGUUCUCAUAGUGGUGCA | | [4828-4846 |
| 171 | UGGCAUAAAUUUGAGGUGU | ACACCUCAAAUUUAUGCCA | | [4323-4341 |
| 172 | UCGCCACCUACCAGAACAU | AUGUUCUGGUAGGUGGCGA | | [1072-1090 |
| 173 | GGAGUGGCAUAAAUUUGAG | CUCAAAUUUAUGCCACUCC | | [4319-4337 |
| 174 | CUGCCCACUUUCCACAUCU | AGAUGUGGAAAGUGGGCAG | | [3930-3948 |
| 175 | UCUAUGCCCUGCUCAUCAU | AUGAUGAGCAGGGCAUAGA | | [3886-3904 |
| 176 | ACCUCUACAUCCUGCUCUA | UAGAGCAGGAUGUAGAGGU | | [3871-3889 |
| 177 | CCAUCAUGUAUGUCUUCGC | GCGAAGACAUACAUGAUGG | | [3802-3820 |
| 178 | GGCCAUCAUGUAUGUCUUC | GAAGACAUACAUGAUGGCC | | [3800-3818 |
| 179 | CUGGCCAUCAUGUAUGUCU | AGACAUACAUGAUGGCCAG | | [3798-3816 |
| 180 | GUCCUGGCCAUCAUGUAUG | CAUACAUGAUGGCCAGGAC | | [3795-3813 |
| 181 | GGUCCUGGCCAUCAUGUAU | AUACAUGAUGGCCAGGACC | | [3794-3812 |
| 182 | GAAGUUCUAUUGGUGGUUC | GAACCACCAAUAGAACUUC | | [3734-3752 |
| 183 | CCUUCCUGCGAGAGACUUU | AAAGUCUCUCGCAGGAAGG | | [3523-3541 |
| 184 | CUCAUAACCUUCCUGCGAG | CUCGCAGGAAGGUUAUGAG | | [3516-3534 |
| 185 | CGCAACCUCAUAACCUUCC | GGAAGGUUAUGAGGUUGCG | | [3510-3528 |
| 186 | CCGCAACCUCAUAACCUUC | GAAGGUUAUGAGGUUGCGG | | [3509-3527 |
| 187 | CUCCUUCAUGUUCUCUUAU | AUAAGAGAACAUGAAGGAG | | [3473-3491 |
| 188 | GCUUACUACUAUGGCUUUG | CAAAGCCAUAGUAGUAAGC | | [3381-3399 |
| 189 | UGCUUACUACUAUGGCUUU | AAAGCCAUAGUAGUAAGCA | | [3380-3398 |
| 190 | CGUGCUUACUACUAUGGCU | AGCCAUAGUAGUAAGCACG | | [3378-3396 |
| 191 | GAAGAGGUUUGGCAAAAAG | CUUUUUGCCAAACCUCUUC | | [3191-3209 |
| 192 | AGGUGGAAAUGGUAUUAGA | UCUAAUACCAUUUCCACCU | | [3044-3062 |
| 193 | GAGGUGGAAAUGGUAUUAG | CUAAUACCAUUUCCACCUC | | [3043-3061 |
| 194 | GUAUGACCUGGAUGAGAAU | AUUCUCAUCCAGGUCAUAC | | [2801-2819 |
| 195 | UCCCGUCUAAUGUUUACCA | UGGUAAACAUUAGACGGGA | | [2781-2799 |
| 196 | UGGCUGACAAGGAUGGCAA | UUGCCAUCCUUGUCAGCCA | Ms | [2692-2710 |
| 197 | AACACAAGAAGCUACAAAA | UUUUGUAGCUUCUUGUGUU | | [2080-2098 |
| 198 | AGAACACAAGAAGCUACAA | UUGUAGCUUCUUGUGUUCU | | [2078-2096 |
| 199 | GCCGAGAACACAAGAAGCU | AGCUUCUUGUGUUCUCGGC | | [2074-2092 |
| 200 | AUUGAAGACAUCCGAAAUA | UAUUUCGGAUGUCUUCAAU | | [1797-1815 |
| 201 | CCUGUUCAGUGCCAUUGUC | GACAAUGGCACUGAACAGG | | [1697-1715 |
| 202 | GGACAACAUAGUGGUUGAA | UUCAACCACUAUGUUGUCC | | [1409-1427 |
| 203 | GCAAGAAGUAGAGCACAGA | UCUGUGCUCUACUUCUUGC | | [114-132] |
| 204 | GGCAAGAAGUAGAGCACAG | CUGUGCUCUACUUCUUGCC | | [113-131] |
| 205 | CCAAUCUGAACAGUACCCA | UGGGUACUGUUCAGAUUGG | | [1339-1357 |
| 206 | GGUUUUCAAAGCUCCCAAG | CUUGGGAGCUUUGAAAACC | | [1281-1299 |
| 207 | ACAAGGGUUUUCAAAGCUC | GAGCUUUGAAAACCCUUGU | | [1276-1294 |
| 208 | AGAAAUGCCAGCUGUCAUU | AAUGACAGCUGGCAUUUCU | | [1242-1260 |
| 209 | UGGUGUCUACAUGAGAAAU | AUUUCUCAUGUAGACACCA | | [1229-1247 |
| 210 | GUCAAGACAUAGAAUGUUU | AAACAUUCUAUGUCUUGAC | | [5999-6017] |
| 211 | GGUCAAGACAUAGAAUGUU | AACAUUCUAUGUCUUGACC | | [5998-6016] |
| 212 | CCAUACUCAGCUCUUUAAC | GUUAAAGAGCUGAGUAUGG | | [5875-5893] |
| 213 | UGAGGGUGAAGGCAAGAAG | CUUCUUGCCUUCACCCUCA | | [103-121] |
| 214 | GGGCACCAGGAAACAAAGA | UCUUUGUUUCCUGGUGCCC | | [5543-5561] |
| 215 | GUGAGGGUGAAGGCAAGAA | UUCUUGCCUUCACCCUCAC | | [102-120] |
| 216 | GGACUGACAUUUGAGGGAG | CUCCCUCAAAUGUCAGUCC | | [5344-5362] |
| 217 | CAAGUGUGGAGGUGAAAAG | CUUUUCACCUCCACACUUG | | [5243-5261] |
| 218 | GACAAGUGUGGAGGUGAAA | UUUCACCUCCACACUUGUC | | [5241-5259] |
| 219 | AGAAAAGGCAGGAGACUAU | AUAGUCUCCUGCCUUUUCU | | [5022-5040] |
| 220 | CUCCAUCAGAAUCCACCUU | AAGGUGGAUUCUGAUGGAG | | [4931-4949] |
| 221 | ACAUUUAUGUCACCCAGCU | AGCUGGGUGACAUAAAUGU | | [4546-4564 |
| 222 | UGGUCUUCAAGUCAUCCUU | AAGGAUGACUUGAAGACCA | | [4399-4417 |
| 223 | CUGGAAGAGUGAGGGUGAA | UUCACCCUCACUCUUCCAG | | [94-112] |
| 224 | UCAUCUAUGGAGGUGACAA | UUGUCACCUCCAUAGAUGA | | [3967-3985 |
| 225 | UGACCCACCACCUCUACAU | AUGUAGAGGUGGUGGGUCA | | [3862-3880 |
| 226 | CCAUGUUCUUUCCGACGUG | CACGUCGGAAAGAACAUGG | | [533-551 |
| 227 | CAACCGCUAUGUGCCUUUU | AAAAGGCACAUAGCGGUUG | | [3545-3563 |
| 228 | GACUUUCCUCAACCGCUAU | AUAGCGGUUGAGGAAAGUC | | [3536-3554 |
| 229 | CAACCUCAUAACCUUCCUG | CAGGAAGGUUAUGAGGUUG | | [3512-3530 |
| 230 | UCUCCUUCAUGUUCUCUUA | UAAGAGAACAUGAAGGAGA | | [3472-3490 |
| 231 | GUCUCCUUCAUGUUCUCUU | AAGAGAACAUGAAGGAGAC | | [3471-3489 |
| 232 | CCAGCGUCUCCUUCAUGUU | AACAUGAAGGAGACGCUGG | | [3466-3484 |
| 233 | CAUGGGAGGAUUUUCACUU | AAGUGAAAAUCCUCCCAUG | | [2962-2980 |
| 234 | AGCUGACAUGGGAGGAUUU | AAAUCCUCCCAUGUCAGCU | | [2956-2974 |
| 235 | GCUAUGACGGCUGGUUUAA | UUAAACCAGCCGUCAUAGC | | [313-331 |
| 236 | GUCCCAUCAUCAUCCAGCU | AGCUGGAUGAUGAUGGGAC | | [2182-2200 |
| 237 | CAAAAGAAACUCAAAGAGA | UCUCUUUGAGUUUCUUUUG | | [2094-2112 |
| 238 | ACACAAGAAGCUACAAAAG | CUUUUGUAGCUUCUUGUGU | | [2081-2099 |
| 239 | GAGAACACAAGAAGCUACA | UGUAGCUUCUUGUGUUCUC | | [2077-2095 |
| 240 | CCGAGAACACAAGAAGCUA | UAGCUUCUUGUGUUCUCGG | | [2075-2093 |
| 241 | GACUGUGCUUGACUUCUUU | AAAGAAGUCAAGCACAGUC | | [1958-1976 |
| 242 | CAAUGUCUUUGUCUGGCAU | AUGCCAGACAAAGACAUUG | | [1874-1892 |
| 243 | CCCUGUUCAGUGCCAUUGU | ACAAUGGCACUGAACAGGG | | [1696-1714 |
| 244 | CUAAAAAGCUGAGCUGUAA | UUACAGCUCAGCUUUUUAG | Rat | [5924-5942] |
| 245 | UGCAUCUACUGGAGUGGUC | GACCACUCCAGUAGAUGCA | | [5635-5653] |
| 246 | CCUCUCUGCAUCUACUGGA | UCCAGUAGAUGCAGAGAGG | | [5629-5647] |
| 247 | UGCGUUGCUUUGGUAUUUG | CAAAUACCAAAGCAACGCA | | [5322-5340] |
| 248 | GUGGAGGUGAAAAGGUACA | UGUACCUUUUCACCUCCAC | | [5248-5266] |
| 249 | ACAAGUGUGGAGGUGAAAA | UUUUCACCUCCACACUUGU | | [5242-5260] |
| 250 | UGCAUGAUGAUUAUAAGUC | GACUUAUAAUCAUCAUGCA | | [5056-5074] |
| 251 | AGUGCAUGAUGAUUAUAAG | CUUAUAAUCAUCAUGCACU | | [5054-5072] |
| 252 | CAAAUGAGAAAAGGCAGGA | UCCUGCCUUUUCUCAUUUG | | [5016-5034] |
| 253 | UGCCUUCUCUUCUGUGCAC | GUGCACAGAAGAGAAGGCA | | [4884-4902] |
| 254 | CCACUAUGAGAACUUCUGA | UCAGAAGUUCUCAUAGUGG | | [4832-4850 |
| 255 | AGAAUGUAGAGAAGGCCUG | CAGGCCUUCUCUACAUUCU | | [4774-4792 |
| 256 | ACAUCGCUGUGUAUGAGUG | CACUCAUACACAGCGAUGU | | [1087-1105 |
| 257 | GUGGCAUAAAUUUGAGGUG | CACCUCAAAUUUAUGCCAC | | [4322-4340 |
| 258 | GAGUGACCUACCUGCAAUU | AAUUGCAGGUAGGUCACUC | | [4051-4069 |
| 259 | CCUCUACAUCCUGCUCUAU | AUAGAGCAGGAUGUAGAGG | | [3872-3890 |
| 260 | GCCAUCAUGUAUGUCUUCG | CGAAGACAUACAUGAUGGC | | [3801-3819 |
| 261 | AGGUAUGACAGGUGUGCUU | AAGCACACCUGUCAUACCU | | [3767-3785 |
| 262 | CAGAAGUUCUAUUGGUGGU | ACCACCAAUAGAACUUCUG | | [3732-3750 |
| 263 | UCUUAUAUCUUGCUCACCA | UGGUGAGCAAGAUAUAAGA | | [3486-3504 |
| 264 | CAGAUCGUGCUUACUACUA | UAGUAGUAAGCACGAUCUG | | [3373-3391 |
| 265 | GCAAUCUUCUCGGCCAUCU | AGAUGGCCGAGAAGAUUGC | | [3339-3357 |
| 266 | AGGCGCUGCAAGAGAAGAU | AUCUUCUCUUGCAGCGCCU | | [3241-3259 |
| 267 | CAGAGAGAAAGGUGAGAGU | ACUCUCACCUUUCUCUCUG | | [46-64] |
| 268 | UGUUCUCUCUGGCUGACAA | UUGUCAGCCAGAGAGAACA | | [2683-2701 |
| 269 | ACAUGUUUGUGGAGUCCAU | AUGGACUCCACAAACAUGU | Ms | [2665-2683 |
| 270 | CUGCUGUUUAGUUCUGAAG | CUUCAGAACUAAACAGCAG | | [2355-2373 |
| 271 | GAAGGCAAGAAGUAGAGCA | UGCUCUACUUCUUGCCUUC | | [110-128] |
| 272 | AGGGUGAAGGCAAGAAGUA | UACUUCUUGCCUUCACCCU | | [105-123] |
| 273 | CCUAGAAGCAACCACUGAU | AUCAGUGGUUGCUUCUAGG | | [6079-6097] |
| 274 | AAGCUGAGCUGUAAAAUAU | AUAUUUUACAGCUCAGCUU | | [5929-5947] |
| 275 | CUGAUAUUCUUGAUGUCAC | GUGACAUCAAGAAUAUCAG | | [5575-5593] |
| 276 | AGCCCUGAUAUUCUUGAUG | CAUCAAGAAUAUCAGGGCU | | [5571-5589] |
| 277 | CUGUGAUGCUUAGAACCUG | CAGGUUCUAAGCAUCACAG | | [5415-5433] |
| 278 | AUGCGUUGCUUUGGUAUUU | AAAUACCAAAGCAACGCAU | | [5321-5339] |
| 279 | CAGGAGACUAUGUUCUACA | UGUAGAACAUAGUCUCCUG | | [5030-5048] |
| 280 | UCGCUGUGUAUGAGUGGCU | AGCCACUCAUACACAGCGA | | [1090-1108 |
| 281 | UCAUGUAUGUCUUCGCCUC | GAGGCGAAGACAUACAUGA | | [3805-3823 |
| 282 | CAGUCAAUGUCUACAUCUU | AAGAUGUAGACAUUGACUG | | [3640-3658 |
| 283 | ACGGUGUGUAUCAGGCUCU | AGAGCCUGAUACACACCGU | | [403-421 |
| 284 | ACAAGCGCUUCGUGGAGAA | UUCUCCACGAAGCGCUUGU | | [3295-3313 |
| 285 | CAAGAGAAGAUGCAGCGAG | CUCGCUGCAUCUUCUCUUG | | [3249-3267 |
| 286 | GGACUGAAGAAGAGGUUUG | CAAACCUCUUCUUCAGUCC | | [3183-3201 |
| 287 | ACCUGGUGCUGCUGUUUAG | CUAAACAGCAGCACCAGGU | | [2347-2365 |
| 288 | UGACCUGGUGCUGCUGUUU | AAACAGCAGCACCAGGUCA | | [2345-2363 |
| 289 | UCACCAUCAUUGCUCUCUG | CAGAGAGCAAUGAUGGUGA | | [2002-2020 |
| 290 | GCCAUCACCAUCAUUGCUC | GAGCAAUGAUGGUGAUGGC | | [1998-2016 |
| 291 | GUCUUUGUCUGGCAUAAAG | CUUUAUGCCAGACAAAGAC | | [1878-1896 |
| 292 | AGCCCAAUGUCUUUGUCUG | CAGACAAAGACAUUGGGCU | | [1870-1888 |
| 293 | GCAAAUUCUCCCGUACAGA | UCUGUACGGGAGAAUUUGC | | [1456-1474 |
| 294 | CAAGAAGUAGAGCACAGAA | UUCUGUGCUCUACUUCUUG | | [115-133] |
| 295 | CAGGUCAAGACAUAGAAUG | CAUUCUAUGUCUUGACCUG | | [5996-6014] |
| 296 | AGCUGAGCUGUAAAAUAUU | AAUAUUUUACAGCUCAGCU | | [5930-5948] |
| 297 | CCUAAAAAGCUGAGCUGUA | UACAGCUCAGCUUUUUAGG | | [5923-5941] |
| 298 | CUCCAUACUCAGCUCUUUA | UAAAGAGCUGAGUAUGGAG | | [5873-5891] |
| 299 | UGCUUGGACUGACAUUUGA | UCAAAUGUCAGUCCAAGCA | | [5339-5357] |
| 300 | GCUUUGGUAUUUGCUUGGA | UCCAAGCAAAUACCAAAGC | | [5328-5346] |
| 301 | AAAAGGUACAAUAGUGCUU | AAGCACUAUUGUACCUUUU | | [5257-5275] |
| 302 | ACCACUAUGAGAACUUCUG | CAGAAGUUCUCAUAGUGGU | | [4831-4849 |
| 303 | CCUUCUUCAACUCCCUGCA | UGCAGGGAGUUGAAGAAGG | | [4693-4711 |
| 304 | CUGGUCUUCAAGUCAUCCU | AGGAUGACUUGAAGACCAG | | [4398-4416 |
| 305 | UGACCUACCUGCAAUUCCA | UGGAAUUGCAGGUAGGUCA | | [4054-4072 |
| 306 | UCUCUUAUAUCUUGCUCAC | GUGAGCAAGAUAUAAGAGA | | [3484-3502 |
| 307 | UCGUGUGUGUGGCAAUCUU | AAGAUUGCCACACACACGA | | [3328-3346 |
| 308 | AAGAAGAGGUUUGGCAAAA | UUUUGCCAAACCUCUUCUU | | [3189-3207 |
| 309 | GAAGAAGAGGUUUGGCAAA | UUUGCCAAACCUCUUCUUC | | [3188-3206 |
| 310 | CUGUGUCAAAGGUGGAGGU | ACCUCCACCUUUGACACAG | | [3023-3041 |
| 311 | CUGGUGGUCUUCAUGAAAG | CUUUCAUGAAGACCACCAG | Ms | [2745-2763 |
| 312 | CUGGUGCUGCUGUUUAGUU | AACUAAACAGCAGCACCAG | | [2349-2367 |
| 313 | GUUUUGCCAUCACCAUCAU | AUGAUGGUGAUGGCAAAAC | | [1993-2011 |
| 314 | UGCAGCCCAAUGUCUUUGU | ACAAAGACAUUGGGCUGCA | | [1867-1885 |
| 315 | AGAUUUCGGAGUUGGAGGA | UCCUCCAACUCCGAAAUCU | | [1393-1411 |
| 316 | CCCAAUCUGAACAGUACCC | GGGUACUGUUCAGAUUGGG | | [1338-1356 |
| 317 | CUAGAAGCAACCACUGAUG | CAUCAGUGGUUGCUUCUAG | | [6080-6098] |
| 318 | UCAAGACAUAGAAUGUUUC | GAAACAUUCUAUGUCUUGA | | [6000-6018] |
| 319 | GUGAUGCUUAGAACCUGGA | UCCAGGUUCUAAGCAUCAC | | [5417-5435] |
| 320 | CACUAUGAGAACUUCUGAG | CUCAGAAGUUCUCAUAGUG | | [4833-4851 |
| 321 | CUAUGGAGGUGACAAGCUG | CAGCUUGUCACCUCCAUAG | | [3971-3989 |
| 322 | CACCUCUACAUCCUGCUCU | AGAGCAGGAUGUAGAGGUG | | [3870-3888 |
| 323 | ACCAUGUUCUUUCCGACGU | ACGUCGGAAAGAACAUGGU | | [532-550 |
| 324 | AGAGAAAGGUGAGAGUGCA | UGCACUCUCACCUUUCUCU | | [49-67] |
| 325 | ACAUCGUGUGUGUGGCAAU | AUUGCCACACACACGAUGU | | [3325-3343 |
| 326 | GAGUCUAUGUUCCGGGAGU | ACUCCCGGAACAUAGACUC | Ms | [2916-2934 |
| 327 | GUGGUCUUCAUGAAAGGCU | AGCCUUUCAUGAAGACCAC | Ms | [2748-2766 |
| 328 | UGUUUGUGGAGUCCAUGUU | AACAUGGACUCCACAAACA | Rat, Ms | [2668-2686 |
| 329 | CAGACACCUUUUUGCUCAG | CUGAGCAAAAAGGUGUCUG | | [2519-2537 |
| 330 | UCAGACACCUUUUUGCUCA | UGAGCAAAAAGGUGUCUGA | | [2518-2536 |
| 331 | GCCUUCCCUUAGUGAGUCU | AGACUCACUAAGGGAAGGC | | [2023-2041 |
| 332 | CUGUGCUUGACUUCUUUGA | UCAAAGAAGUCAAGCACAG | | [1960-1978 |
| 333 | CUCCCGUACAGACUAUGUG | CACAUAGUCUGUACGGGAG | | [1463-1481 |
| 334 | CCAGAUUUCGGAGUUGGAG | CUCCAACUCCGAAAUCUGG | | [1391-1409 |
| 335 | GAGAAAUGCCAGCUGUCAU | AUGACAGCUGGCAUUUCUC | | [1241-1259 |
| 336 | AAAAAGCUGAGCUGUAAAA | UUUUACAGCUCAGCUUUUU | | [5926-5944] |
| 337 | CUUGAUGUCACCAGUGAUA | UAUCACUGGUGACAUCAAG | | [5583-5601] |
| 338 | CCUGAUAUUCUUGAUGUCA | UGACAUCAAGAAUAUCAGG | | [5574-5592] |
| 339 | UGGACUGACAUUUGAGGGA | UCCCUCAAAUGUCAGUCCA | | [5343-5361] |
| 340 | GUAUUUGCUUGGACUGACA | UGUCAGUCCAAGCAAAUAC | | [5334-5352] |
| 341 | AAGUCCACCUGUUUAUCAA | UUGAUAAACAGGUGGACUU | | [5070-5088] |
| 342 | AGAGUGAGGGUGAAGGCAA | UUGCCUUCACCCUCACUCU | | [99-117] |
| 343 | UGAUUAUAAGUCCACCUGU | ACAGGUGGACUUAUAAUCA | | [5063-5081] |
| 344 | CUUCUCUUCUGUGCACCUA | UAGGUGCACAGAAGAGAAG | | [4887-4905] |
| 345 | AGCCCUUCUUCAACUCCCU | AGGGAGUUGAAGAAGGGCU | | [4690-4708 |
| 346 | AGAAAGUGCUGAACCGGAG | CUCCGGUUCAGCACUUUCU | | [4621-4639 |
| 347 | CCUUUGCCUCCAUCCUCAA | UUGAGGAUGGAGGCAAAGG | Rat, Ms | [4375-4393 |
| 348 | CCUUGAUGGACCGUUUGGA | UCCAAACGGUCCAUCAAGG | | [4289-4307 |
| 349 | CUACCAUGUUCUUUCCGAC | GUCGGAAAGAACAUGGUAG | | [530-548 |
| 350 | GCUACCAUGUUCUUUCCGA | UCGGAAAGAACAUGGUAGC | | [529-547 |
| 351 | UUGUGAAUGAUGGGUCCAA | UUGGACCCAUCAUUCACAA | Rat | [3706-3724 |
| 352 | GUGUGUAUCAGGCUCUGGA | UCCAGAGCCUGAUACACAC | | [406-424 |
| 353 | GCUGUCGAGUCUCGUUCAU | AUGAACGAGACUCGACAGC | | [3085-3103 |
| 354 | UGGUCUUCAUGAAAGGCUC | GAGCCUUUCAUGAAGACCA | Ms | [2749-2767 |
| 355 | CCAGGACAUGUUUGUGGAG | CUCCACAAACAUGUCCUGG | Ms | [2660-2678 |
| 356 | UGGUGCUGCUGUUUAGUUC | GAACUAAACAGCAGCACCA | | [2350-2368 |
| 357 | UCAUUGCUCUCUGCUGCCU | AGGCAGCAGAGAGCAAUGA | | [2008-2026 |
| 358 | UGUCUUUGUCUGGCAUAAA | UUUAUGCCAGACAAAGACA | | [1877-1895 |
| 359 | AUGUCUUUGUCUGGCAUAA | UUAUGCCAGACAAAGACAU | | [1876-1894 |
| 360 | CCUGCAGCCCAAUGUCUUU | AAAGACAUUGGGCUGCAGG | | [1865-1883 |
| 361 | AGGAGGUGAAUGAGCUGCU | AGCAGCUCAUUCACCUCCU | | [1357-1375 |
| 362 | CAGCUGUCAUUUCCGGAAG | CUUCCGGAAAUGACAGCUG | | [1250-1268 |
| 363 | UCGGGCUCUUUCCUAAAAA | UUUUUAGGAAAGAGCCCGA | | [5912-5930] |
| 364 | GGUAUUUGCUUGGACUGAC | GUCAGUCCAAGCAAAUACC | | [5333-5351] |
| 365 | AAAGGCAGGAGACUAUGUU | AACAUAGUCUCCUGCCUUU | | [5025-5043] |
| 366 | GGAGAAUAUUGACCCAGAC | GUCUGGGUCAAUAUUCUCC | | [4990-5008] |
| 367 | UGAAGAAGAGGUUUGGCAA | UUGCCAAACCUCUUCUUCA | | [3187-3205 |
| 368 | CUGAAGAAGAGGUUUGGCA | UGCCAAACCUCUUCUUCAG | | [3186-3204 |
| 369 | GGAGCUCUUCUGACUGGAU | AUCCAGUCAGAAGAGCUCC | | [240-258 |
| 370 | CAGGACAUGUUUGUGGAGU | ACUCCACAAACAUGUCCUG | Ms | [2661-2679 |
| 371 | GGAAUUUGUGGUGGCCUCU | AGAGGCCACCACAAAUUCC | | [1181-1199 |
| 372 | AGGCAGGAGACUAUGUUCU | AGAACAUAGUCUCCUGCCU | | [5027-5045] |
| 373 | GAGAACUUCUGAGCCUGUC | GACAGGCUCAGAAGUUCUC | | [4839-4857 |
| 374 | UGGAGAUCAGCGUGGUGAA | UUCACCACGCUGAUCUCCA | | [4012-4030 |
| 375 | ACAUUGCACAGACCACCCU | AGGGUGGUCUGUGCAAUGU | | [3415-3433 |
| 376 | UGGAGGUGGAGGUGGAAAU | AUUUCCACCUCCACCUCCA | | [3035-3053 |
| 377 | CGGAGUUGGAGGACAACAU | AUGUUGUCCUCCAACUCCG | | [1399-1417 |
| 378 | UCCACAAAAUCGAUGCGUU | AACGCAUCGAUUUUGUGGA | | [5309-5327] |
| 379 | GGGAGAAUAUUGACCCAGA | UCUGGGUCAAUAUUCUCCC | | [4989-5007] |
| 380 | CCAGGAAUGACCAAGAAUG | CAUUCUUGGUCAUUCCUGG | | [4761-4779 |
| 381 | UCGUUCAUCACUCGGACAC | GUGUCCGAGUGAUGAACGA | | [3096-3114 |
| 382 | GGUGGAGGUGGAAAUGGUA | UACCAUUUCCACCUCCACC | | [3039-3057 |
| 383 | GCAAUGGCUACCUGUCCUU | AAGGACAGGUAGCCAUUGC | | [2707-2725 |
| 384 | AGGAAAGAAGACAUCUGAA | UUCAGAUGUCUUCUUUCCU | | [148-166] |
| 385 | CUGGAGUGGUGGCCUAUUU | AAAUAGGCCACCACUCCAG | | [2050-2068 |
| 386 | AGAGGAAAGAAGACAUCUG | CAGAUGUCUUCUUUCCUCU | | [146-164] |
| 387 | GGAACUGGAGUGAUCUCAA | UUGAGAUCACUCCAGUUCC | | [1564-1582 |
| 388 | GGAGUUGGAGGACAACAUA | UAUGUUGUCCUCCAACUCC | | [1400-1418 |
| 389 | CCAGUGCAGAAGCUGUGAU | AUCACAGCUUCUGCACUGG | | [5403-5421] |
| 390 | CCAGUCAGGAUCUCCCAAA | UUUGGGAGAUCCUGACUGG | | [5140-5158] |
| 391 | GCACAUUUAUGUCACCCAG | CUGGGUGACAUAAAUGUGC | | [4544-4562 |
| 392 | GGCAGCCAAAUGCUGUGUA | UACACAGCAUUUGGCUGCC | | [4419-4437 |
| 393 | GAGUACAAGUCAGGACAGU | ACUGUCCUGACUUGUACUC | | [4089-4107 |
| 394 | CCCAAGGCUUUGAGUACAA | UUGUACUCAAAGCCUUGGG | | [4078-4096 |
| 395 | CGCAGUCAAUGUCUACAUC | GAUGUAGACAUUGACUGCG | | [3638-3656 |
| 396 | ACGCAGUCAAUGUCUACAU | AUGUAGACAUUGACUGCGU | | [3637-3655 |
| 397 | AGGUGGAGGUGGAAAUGGU | ACCAUUUCCACCUCCACCU | | [3038-3056 |
| 398 | UGCCUUCCCUUAGUGAGUC | GACUCACUAAGGGAAGGCA | | [2022-2040 |
| 399 | CCAGUUUUGGUCCUACUAA | UUAGUAGGACCAAAACUGG | | [6114-6132] |
| 400 | AUCGGGCUCUUUCCUAAAA | UUUUAGGAAAGAGCCCGAU | | [5911-5929] |
| 401 | CUCUGCCAGAUAUUCAGUA | UACUGAAUAUCUGGCAGAG | | [5685-5703] |
| 402 | AAAAGGAGCAGCCCUACUU | AAGUAGGGCUGCUCCUUUU | | [5484-5502] |
| 403 | GGAGUAUACAGGAUACCGU | ACGGUAUCCUGUAUACUCC | | [1136-1154 |
| 404 | GCAGUCAAUGUCUACAUCU | AGAUGUAGACAUUGACUGC | | [3639-3657 |
| 405 | GCAGCUCUGUGUCAAAGGU | ACCUUUGACACAGAGCUGC | | [3017-3035 |
| 406 | CUUCUUCAGACACCUUUUU | AAAAAGGUGUCUGAAGAAG | | [2513-2531 |
| 407 | CUGCUGCUCAAGAUCCCUA | UAGGGAUCUUGAGCAGCAG | | [2319-2337 |
| 408 | GGUCGCUGUUAUCAACAUU | AAUGUUGAUAACAGCGACC | | [1835-1853 |
| 409 | UCCGGAAGGUCCUGAACAA | UUGUUCAGGACCUUCCGGA | | [1261-1279 |
| 410 | GGUGAAGGCAAGAAGUAGA | UCUACUUCUUGCCUUCACC | | [107-125] |
| 411 | CAAAUCCAGUUUUGGUCCU | AGGACCAAAACUGGAUUUG | | [6109-6127] |
| 412 | UGAUGUGAUUUCUACCAAA | UUUGGUAGAAAUCACAUCA | | [6094-6112] |
| 413 | GUACAUGUUUUACCACCAC | GUGGUGGUAAAACAUGUAC | | [5976-5994] |
| 414 | UCAGCUCUUUAACUUUUCU | AGAAAAGUUAAAGAGCUGA | | [5881-5899] |
| 415 | GGAUCUCCCAAAGAAGAUA | UAUCUUCUUUGGGAGAUCC | | [5147-5165] |
| 416 | CCCGGAGUAUACAGGAUAC | GUAUCCUGUAUACUCCGGG | | [1133-1151 |
| 417 | CAAUUGCAGUGCAUGAUGA | UCAUCAUGCACUGCAAUUG | | [5047-5065] |
| 418 | UACAAUUGCAGUGCAUGAU | AUCAUGCACUGCAAUUGUA | | [5045-5063] |
| 419 | UUCUACAAUUGCAGUGCAU | AUGCACUGCAAUUGUAGAA | | [5042-5060] |
| 420 | AGAAAACACUCCCGGAGUA | UACUCCGGGAGUGUUUUCU | | [1123-1141 |
| 421 | ACCAGAACAUCGCUGUGUA | UACACAGCGAUGUUCUGGU | | [1081-1099 |
| 422 | CCGCUAUGUGCCUUUUGAU | AUCAAAAGGCACAUAGCGG | | [3548-3566 |
| 423 | CCAAAAGCUGCAGCAGUAC | GUACUGCUGCAGCUUUUGG | | [3278-3296 |
| 424 | GAGCUCUUCUGACUGGAUC | GAUCCAGUCAGAAGAGCUC | | [241-259 |
| 425 | CUCAGGUGCUGGACAUCAA | UUGAUGUCCAGCACCUGAG | Rat, Ms | [2533-2551 |
| 426 | UGAGCGAGAAGGAGCUAUU | AAUAGCUCCUUCUCGCUCA | | [2449-2467 |
| 427 | CCAUCACCAUCAUUGCUCU | AGAGCAAUGAUGGUGAUGG | | [1999-2017 |
| 428 | ACGUGCUGGUCGCUGUUAU | AUAACAGCGACCAGCACGU | | [1828-1846 |
| 429 | CGCUACUGGUUUGAGAACA | UGUUCUCAAACCAGUAGCG | Rat, Ms | [1749-1767 |
| 430 | AGGACAACAUAGUGGUUGA | UCAACCACUAUGUUGUCCU | | [1408-1426 |
| 431 | GUGAAGGCAAGAAGUAGAG | CUCUACUUCUUGCCUUCAC | | [108-126] |
| 432 | AGGUCCUGAACAAGGGUUU | AAACCCUUGUUCAGGACCU | | [1267-1285 |
| 433 | AAAUCCAGUUUUGGUCCUA | UAGGACCAAAACUGGAUUU | | [6110-6128] |
| 434 | CGGGCUCUUUCCUAAAAAG | CUUUUUAGGAAAGAGCCCG | | [5913-5931] |
| 435 | CAGUCAGGAUCUCCCAAAG | CUUUGGGAGAUCCUGACUG | | [5141-5159] |
| 436 | CCAAUAUUGGGAGAAUAUU | AAUAUUCUCCCAAUAUUGG | | [4981-4999] |
| 437 | CCCAAUAUUGGGAGAAUAU | AUAUUCUCCCAAUAUUGGG | | [4980-4998] |
| 438 | GCUUCCAGUAUCCUGCCUU | AAGGCAGGAUACUGGAAGC | | [4871-4889] |
| 439 | CCACCAUGCUAUACAUCUG | CAGAUGUAUAGCAUGGUGG | | [4588-4606 |
| 440 | GCAGCCAAAUGCUGUGUAA | UUACACAGCAUUUGGCUGC | | [4420-4438 |
| 441 | UCAACCGCUAUGUGCCUUU | AAAGGCACAUAGCGGUUGA | | [3544-3562 |
| 442 | GCGUCUCCUUCAUGUUCUC | GAGAACAUGAAGGAGACGC | | [3469-3487 |
| 443 | CUGGACUGAAGAAGAGGUU | AACCUCUUCUUCAGUCCAG | | [3181-3199 |
| 444 | AGGUGGUGGAGUCUAUGUU | AACAUAGACUCCACCACCU | | [2908-2926 |
| 445 | GGAUGAGAAUGGCUUCCUC | GAGGAAGCCAUUCUCAUCC | | [2810-2828 |
| 446 | UACCAUGUAUGACCUGGAU | AUCCAGGUCAUACAUGGUA | Rat, Ms | [2795-2813 |
| 447 | UGCAGCAGGUCAACCUCAU | AUGAGGUUGACCUGCUGCA | | [2272-2290 |
| 448 | AGCUACAAAAGAAACUCAA | UUGAGUUUCUUUUGUAGCU | | [2089-2107 |
| 449 | GAGUCUGCUUCUCUCUGGA | UCCAGAGAGAAGCAGACUC | | [2036-2054 |
| 450 | CCUCAACCUAAGCAGCUCA | UGAGCUGCUUAGGUUGAGG | | [1908-1926 |
| 451 | GGUUUGAGAACACCAGGAA | UUCCUGGUGUUCUCAAACC | | [1756-1774 |
| 452 | CCUGGCAAAUUCUCCCGUA | UACGGGAGAAUUUGCCAGG | | [1452-1470 |
| 453 | GGGUUUUCAAAGCUCCCAA | UUGGGAGCUUUGAAAACCC | | [1280-1298 |
| 454 | GAUGUGAUUUCUACCAAAU | AUUUGGUAGAAAUCACAUC | | [6095-6113] |
| 455 | CCCAGGUCAAGACAUAGAA | UUCUAUGUCUUGACCUGGG | | [5994-6012] |
| 456 | CAGCUCUUUAACUUUUCUU | AAGAAAAGUUAAAGAGCUG | | [5882-5900] |
| 457 | CUCAGCUCUUUAACUUUUC | GAAAAGUUAAAGAGCUGAG | | [5880-5898] |
| 458 | ACUCAGCUCUUUAACUUUU | AAAAGUUAAAGAGCUGAGU | | [5879-5897] |
| 459 | GAAGCUGUGAUGCUUAGAA | UUCUAAGCAUCACAGCUUC | | [5411-5429] |
| 460 | CCCAGCUUCCUGCAGAAAA | UUUUCUGCAGGAAGCUGGG | Rat, Ms | [1110-1128 |
| 461 | CUCAGGACCACCAUGCUAU | AUAGCAUGGUGGUCCUGAG | | [4581-4599 |
| 462 | UGGUGUCUGUGCACAUUUA | UAAAUGUGCACAGACACCA | | [4534-4552 |
| 463 | CCAGAACAUCGCUGUGUAU | AUACACAGCGAUGUUCUGG | | [1082-1100 |
| 464 | UCAGGAGUGGCAUAAAUUU | AAAUUUAUGCCACUCCUGA | | [4316-4334 |
| 465 | CCACAUCUACUUCCUGGUC | GACCAGGAAGUAGAUGUGG | Rat, Ms | [3941-3959 |
| 466 | GCAGCUAUGCUCUGAUCCA | UGGAUCAGAGCAUAGCUGC | | [3910-3928 |
| 467 | ACCGCUAUGUGCCUUUUGA | UCAAAAGGCACAUAGCGGU | | [3547-3565 |
| 468 | GAGGCUUCCUAGCCCAAAA | UUUUGGGCUAGGAAGCCUC | | [3265-3283 |
| 469 | ACAAGGAGGAGCUGACAUG | CAUGUCAGCUCCUCCUUGU | | [2947-2965 |
| 470 | CCAACAACUGCCUGUCCAA | UUGGACAGGCAGUUGUUGG | Rat, Ms | [2875-2893 |
| 471 | AGAAUGGCUUCCUCUCCAA | UUGGAGAGGAAGCCAUUCU | | [2815-2833 |
| 472 | CCUGGUGGUCUUCAUGAAA | UUUCAUGAAGACCACCAGG | Ms | [2744-2762 |
| 473 | UGCUCAAGAUCCCUAAGGA | UCCUUAGGGAUCUUGAGCA | | [2323-2341 |
| 474 | CUGUCCAACAACCGAGGAU | AUCCUCGGUUGUUGGACAG | | [2292-2310 |
| 475 | CAACCUAAGCAGCUCACAA | UUGUGAGCUGCUUAGGUUG | | [1911-1929 |
| 476 | CUCAACCUAAGCAGCUCAC | GUGAGCUGCUUAGGUUGAG | | [1909-1927 |
| 477 | AGAGCACAGAAGCAAAGAU | AUCUUUGCUUCUGUGCUCU | | [123-141] |
| 478 | ACAACAUAGUGGUUGAAGA | UCUUCAACCACUAUGUUGU | | [1411-1429 |
| 479 | GAGGACAACAUAGUGGUUG | CAACCACUAUGUUGUCCUC | | [1407-1425 |
| 480 | GUCCUGAACAAGGGUUUUC | GAAAACCCUUGUUCAGGAC | | [1269-1287 |
| 481 | GGUCCUGAACAAGGGUUUU | AAAACCCUUGUUCAGGACC | | [1268-1286 |
| 482 | GUCUACAUGAGAAAUGCCA | UGGCAUUUCUCAUGUAGAC | | [1233-1251 |
| 483 | GCACCAGGAAACAAAGAUG | CAUCUUUGUUUCCUGGUGC | | [5545-5563] |
| 484 | CAGAAGCUGUGAUGCUUAG | CUAAGCAUCACAGCUUCUG | | [5409-5427] |
| 485 | GCAGAAGCUGUGAUGCUUA | UAAGCAUCACAGCUUCUGC | | [5408-5426] |
| 486 | CCGGAGUAUACAGGAUACC | GGUAUCCUGUAUACUCCGG | | [1134-1152 |
| 487 | UCCCGGAGUAUACAGGAUA | UAUCCUGUAUACUCCGGGA | | [1132-1150 |
| 488 | GUUCUACAAUUGCAGUGCA | UGCACUGCAAUUGUAGAAC | | [5041-5059] |
| 489 | UCCCAAUAUUGGGAGAAUA | UAUUCUCCCAAUAUUGGGA | | [4979-4997] |
| 490 | CUCCAGGAAUGACCAAGAA | UUCUUGGUCAUUCCUGGAG | | [4759-4777 |
| 491 | UGCACAUUUAUGUCACCCA | UGGGUGACAUAAAUGUGCA | | [4543-4561 |
| 492 | AGGAGUGGCAUAAAUUUGA | UCAAAUUUAUGCCACUCCU | | [4318-4336 |
| 493 | CCACGCAGUCAAUGUCUAC | GUAGACAUUGACUGCGUGG | | [3635-3653 |
| 494 | GCCAUUUUGCACAGUGCUG | CAGCACUGUGCAAAAUGGC | | [3615-3633 |
| 495 | UGCGAGAGACUUUCCUCAA | UUGAGGAAAGUCUCUCGCA | | [3529-3547 |
| 496 | CCCAAAAGCUGCAGCAGUA | UACUGCUGCAGCUUUUGGG | | [3277-3295 |
| 497 | GCUGGUUUAACAACCUGAG | CUCAGGUUGUUAAACCAGC | | [322-340 |
| 498 | UGCGAUCCUUCAUCGAGAU | AUCUCGAUGAAGGAUCGCA | | [2854-2872 |
| 499 | AGGACGAAUUCUUCACCAU | AUGGUGAAGAAUUCGUCCU | | [2833-2851 |
| 500 | AGAGGAUAAGUCCCGUCUA | UAGACGGGACUUAUCCUCU | | [2771-2789 |

TABLE A10
DUOX2 - 19-mer oligomer pairs

| | | | | |
|---|---|---|---|---|
| | | | Other | Human-132566531 |
| No. | Sense siRNA | AntiSense siRNA | Sp | ORF: 204-4850 |

| | | | | |
|---|---|---|---|---|
| 1 | GAGAUAUCUUUAAACAAAA | UUUUGUUUAAAGAUAUCUC | | [3061-3079] |
| 2 | GGAGUGAUCUCAACCCUAA | UUAGGGUUGAGAUCACUCC | | [1570-1588] |
| 3 | CGCUAUGACGGCUGGUUUA | UAAACCAGCCGUCAUAGCG | | [312-330] |
| 4 | GAGGAUAAGUCCCGUCUAA | UUAGACGGGACUUAUCCUC | | [2772-2790] |
| 5 | CAGGAUCUCCCAAAGAAGA | UCUUCUUUGGGAGAUCCUG | | [5145-5163] |
| 6 | GAGGUAUAAUAAAUAAUCA | UGAUUAUUUAUUAUACCUC | | [5956-5974] |
| 7 | ACAAGAAGCUACAAAAGAA | UUCUUUUGUAGCUUCUUGU | | [2083-2101] |
| 8 | CAAUUAUACAAAUGAGAAA | UUUCUCAUUUGUAUAAUUG | | [5008-5026] |
| 9 | AACCCAACACCACCCUAAA | UUUAGGGUGGUGUUGGGUU | | [165-183] |
| 10 | CCUGAACAAGGGUUUUCAA | UUGAAAACCCUUGUUCAGG | | [1271-1289] |
| 11 | GGACCACCAUGCUAUACAU | AUGUAUAGCAUGGUGGUCC | | [4585-4603] |
| 12 | CAUCGGGCUCUUUCCUAAA | UUUAGGAAAGAGCCCGAUG | | [5910-5928] |
| 13 | CCAAGGACCCAGAGAGAAA | UUUCUCUCUGGGUCCUUGG | | [37-55] |
| 14 | GAGUGAUCUCAACCCUAAU | AUUAGGGUUGAGAUCACUC | | [1571-1589] |
| 15 | UGACAAGUGUGGAGGUGAA | UUCACCUCCACACUUGUCA | | [5240-5258] |
| 16 | GUAAGAAGAUCUACUUCAU | AUGAAGUAGAUCUUCUUAC | Rat, Ms | [4435-4453] |
| 17 | GCAAAGAUUUUAAGAGGAA | UUCCUCUUAAAAUCUUUGC | | [134-152] |
| 18 | GGCAAUCUCUCCAUCAGAA | UUCUGAUGGAGAGAUUGCC | | [4923-4941] |
| 19 | CCUUCAUCGAGAUCUCCAA | UUGGAGAUCUCGAUGAAGG | Rat | [2860-2878] |
| 20 | CAAAGAUUUUAAGAGGAAA | UUUCCUCUUAAAAUCUUUG | | [135-153] |
| 21 | CCACCCAGGUCAAGACAUA | UAUGUCUUGACCUGGGUGG | | [5991-6009] |
| 22 | CAUCGAGGUAUAAUAAAUA | UAUUUAUUAUACCUCGAUG | | [5952-5970] |
| 23 | AGAGAUAUCUUUAAACAAA | UUUGUUUAAAGAUAUCUCU | | [3060-3078] |
| 24 | AGAAGGAGCUAUUUAGGAA | UUCCUAAAUAGCUCCUUCU | | [2455-2473] |
| 25 | CCAUGAUGCGAUCCUUCAU | AUGAAGGAUCGCAUCAUGG | | [2848-2866] |
| 26 | GGAGAUUGAAGACAUCCGA | UCGGAUGUCUUCAAUCUCC | | [1793-1811] |
| 27 | ACAGAAGCAAAGAUUUUAA | UUAAAAUCUUUGCUUCUGU | | [128-146] |
| 28 | CUCCAAGAAGGAGAUUGAA | UUCAAUCUCCUUCUUGGAG | | [1784-1802] |
| 29 | GAGAUUGAAGACAUCCGAA | UUCGGAUGUCUUCAAUCUC | | [1794-1812] |
| 30 | GGAGCAGUCCCAUCAUCAU | AUGAUGAUGGGACUGCUCC | | [2176-2194] |
| 31 | GGCAGGAGACUAUGUUCUA | UAGAACAUAGUCUCCUGCC | | [5028-5046] |
| 32 | GGCUGUUCUCCAAGAAGGA | UCCUUCUUGGAGAACAGCC | | [1777-1795] |
| 33 | GGAAUGGGCUGUUCUCCAA | UUGGAGAACAGCCCAUUCC | Ms | [1771-1789] |
| 34 | GUCAGGAUCUCCCAAAGAA | UUCUUUGGGAGAUCCUGAC | | [5143-5161] |
| 35 | AAGAGAGCGUGAAGAAGGA | UCCUUCUUCACGCUCUCUU | | [2107-2125] |
| 36 | CAACAUAGUGGUUGAAGAU | AUCUUCAACCACUAUGUUG | | [1412-1430] |
| 37 | CAGGAAUGACCAAGAAUGU | ACAUUCUUGGUCAUUCCUG | | [4762-4780] |
| 38 | AGCGCUUCGUGGAGAACUA | UAGUUCUCCACGAAGCGCU | | [3298-3316] |
| 39 | CUCCCAAAGAAGAUAAAGA | UCUUUAUCUUCUUUGGGAG | | [5151-5169] |
| 40 | GAACCCAACACCACCCUAA | UUAGGGUGGUGUUGGGUUC | | [164-182] |
| 41 | GGCUGAGAAUCUCCUCAGA | UCUGAGGAGAUUCUCAGCC | | [5382-5400] |
| 42 | CCAAGAAGGAGAUUGAAGA | UCUUCAAUCUCCUUCUUGG | | [1786-1804] |
| 43 | GACCGCUACUGGUUUGAGA | UCUCAAACCAGUAGCGGUC | | [1746-1764] |
| 44 | AGUCGGGAUUCCAGGACAA | UUGUCCUGGAAUCCCGACU | | [2932-2950] |
| 45 | UCAGGACCACCAUGCUAUA | UAUAGCAUGGUGGUCCUGA | | [4582-4600] |
| 46 | GGAAGGCUGUGACAAAGCA | UGCUUUGUCACAGCCUUCC | | [2470-2488] |
| 47 | GGAAGAAGGUGGAGAUCAG | CUGAUCUCCACCUUCUUCC | Rat, Ms | [4003-4021] |
| 48 | UGCUGGUCGCUGUUAUCAA | UUGAUAACAGCGACCAGCA | | [1831-1849] |
| 49 | CUGGAUACCCAAAGCUGUA | UACAGCUUUGGGUAUCCAG | | [4270-4288] |
| 50 | GGAGGUGGAAAUGGUAUUA | UAAUACCAUUUCCACCUCC | | [3042-3060] |
| 51 | AUCGAGGUAUAAUAAAUAA | UUAUUUAUUAUACCUCGAU | | [5953-5971] |
| 52 | CCUUCGAGCCCUUCUUCAA | UUGAAGAAGGGCUCGAAGG | | [4684-4702] |
| 53 | AGUAGAGCACAGAAGCAAA | UUUGCUUCUGUGCUCUACU | | [120-138] |
| 54 | AUUCAGUACUCGAUCUCAA | UUGAGAUCGAGUACUGAAU | | [5696-5714] |
| 55 | CUGAGAUGAGCGAGAAGGA | UCCUUCUCGCUCAUCUCAG | | [2443-2461] |
| 56 | GACCCAGAGAGAAAGGUGA | UCACCUUUCUCUCUGGGUC | | [42-60] |
| 57 | UUAGGAAGGCUGUGACAAA | UUUGUCACAGCCUUCCUAA | | [2467-2485] |
| 58 | CCCAGAUUUCGGAGUUGGA | UCCAACUCCGAAAUCUGGG | | [1390-1408] |
| 59 | GACAAUUAUACAAAUGAGA | UCUCAUUUGUAUAAUUGUC | | [5006-5024] |
| 60 | GAUUGAAGACAUCCGAAAU | AUUUCGGAUGUCUUCAAUC | | [1796-1814] |
| 61 | UCAUCGGGCUCUUUCCUAA | UUAGGAAAGAGCCCGAUGA | | [5909-5927] |
| 62 | GAGAAGGAGCUAUUUAGGA | UCCUAAAUAGCUCCUUCUC | | [2454-2472] |
| 63 | GAGGAAAGAAGACAUCUGA | UCAGAUGUCUUCUUUCCUC | | [147-165] |
| 64 | GUAUUAGAGAUAUCUUUAA | UUAAAGAUAUCUCUAAUAC | | [3055-3073] |
| 65 | GGAAAUGGUAUUAGAGAUA | UAUCUCUAAUACCAUUUCC | | [3048-3066] |
| 66 | GUGGAAAUGGUAUUAGAGA | UCUCUAAUACCAUUUCCAC | | [3046-3064] |
| 67 | CAGACAAUUAUACAAAUGA | UCAUUUGUAUAAUUGUCUG | | [5004-5022] |
| 68 | CCAGCUUCCUGCAGAAAAC | GUUUUCUGCAGGAAGCUGG | Rat, Ms | [1111-1129] |
| 69 | UGACUUCCACAAAAUCGAU | AUCGAUUUUGUGGAAGUCA | | [5304-5322] |
| 70 | GACGAAUUCUUCACCAUGA | UCAUGGUGAAGAAUUCGUC | | [2835-2853] |
| 71 | GCAUAAAUUUGAGGUGUCA | UGACACCUCAAAUUUAUGC | | [4325-4343] |
| 72 | AGAUAAAGACCACUCCUCA | UGAGGAGUGGUCUUUAUCU | | [5161-5179] |
| 73 | GAAGACAUCCGAAAUACCA | UGGUAUUUCGGAUGUCUUC | | [1800-1818] |
| 74 | UCAAAGACCUGGUCUUCAA | UUGAAGACCAGGUCUUUGA | Rat, Ms | [4390-4408] |
| 75 | AGAUUUUAAGAGGAAAGAA | UUCUUUCCUCUUAAAAUCU | | [138-156] |
| 76 | AGAUUGAAGACAUCCGAAA | UUUCGGAUGUCUUCAAUCU | | [1795-1813] |
| 77 | GGUUGAAGAUCUGAGGGAU | AUCCCUCAGAUCUUCAACC | | [1421-1439] |
| 78 | CAAUCAGGACGCACUCUCA | UGAGAGUGCGUCCUGAUUG | | [275-293] |
| 79 | UGUGCUUGACUUCUUUGAA | UUCAAAGAAGUCAAGCACA | | [1961-1979] |
| 80 | UGACCCAGACAAUUAUACA | UGUAUAAUUGUCUGGGUCA | | [4999-5017] |
| 81 | UAGAGAUAUCUUUAAACAA | UUGUUUAAAGAUAUCUCUA | | [3059-3077] |
| 82 | GAGACUAUGUUCUACAAUU | AAUUGUAGAACAUAGUCUC | | [5033-5051] |
| 83 | UCCUGGUGGUCUUCAUGAA | UUCAUGAAGACCACCAGGA | Ms | [2743-2761] |
| 84 | GGUGGAAAUGGUAUUAGAG | CUCUAAUACCAUUUCCACC | | [3045-3063] |
| 85 | GAGGGUGAAGGCAAGAAGU | ACUUCUUGCCUUCACCCUC | | [104-122] |
| 86 | CGCUGCAAGAGAAGAUGCA | UGCAUCUUCUCUUGCAGCG | | [3244-3262] |
| 87 | GAUCUCCCAAAGAAGAUAA | UUAUCUUCUUUGGGAGAUC | | [5148-5166] |
| 88 | GGUAUUAGAGAUAUCUUUA | UAAAGAUAUCUCUAAUACC | | [3054-3072] |
| 89 | CGAGAAGGAGCUAUUUAGG | CCUAAAUAGCUCCUUCUCG | | [2453-2471] |
| 90 | GAGCAGUUCUUCUCUACCA | UGGUAGAGAAGAACUGCUC | | [1200-1218] |
| 91 | ACAAUUAUACAAAUGAGAA | UUCUCAUUUGUAUAAUUGU | | [5007-5025] |
| 92 | CUACAAUUGCAGUGCAUGA | UCAUGCACUGCAAUUGUAG | | [5044-5062] |
| 93 | AGGAAUGACCAAGAAUGUA | UACAUUCUUGGUCAUUCCU | | [4763-4781] |
| 94 | GGUGUCUGUGCACAUUUAU | AUAAAUGUGCACAGACACC | | [4535-4553] |
| 95 | ACCGCUACUGGUUUGAGAA | UUCUCAAACCAGUAGCGGU | | [1747-1765] |
| 96 | CCAGUAUCCUGCCUUCUCU | AGAGAAGGCAGGAUACUGG | | [4875-4893] |
| 97 | AGACAAUUAUACAAAUGAG | CUCAUUUGUAUAAUUGUCU | | [5005-5023] |
| 98 | CUGAACAAGGGUUUUCAAA | UUUGAAAACCCUUGUUCAG | | [1272-1290] |
| 99 | UAAUGUUUACCAUGUAUGA | UCAUACAUGGUAAACAUUA | Rat | [2788-2806] |
| 100 | UGUCAAAGGUGGAGGUGGA | UCCACCUCCACCUUUGACA | | [3026-3044] |
| 101 | UCUCCAAGAAGGAGAUUGA | UCAAUCUCCUUCUUGGAGA | | [1783-1801] |
| 102 | UAAUUGACUUCCACAAAAU | AUUUUGUGGAAGUCAAUUA | | [5300-5318] |
| 103 | GGCUGGUUUAACAACCUGA | UCAGGUUGUUAAACCAGCC | | [321-339] |
| 104 | AUCUCCCAAAGAAGAUAAA | UUUAUCUUCUUUGGGAGAU | | [5149-5167] |
| 105 | CAGCUUCCUGCAGAAAACA | UGUUUUCUGCAGGAAGCUG | Rat | [1112-1130] |
| 106 | AGGAGUGACCUACCUGCAA | UUGCAGGUAGGUCACUCCU | | [4049-4067] |
| 107 | CCCAGGACAUGUUUGUGGA | UCCACAAACAUGUCCUGGG | Ms | [2659-2677] |
| 108 | GAGCGUGAAGAAGGAAGCA | UGCUUCCUUCUUCACGCUC | | [2111-2129] |
| 109 | GAAGUAGAGCACAGAAGCA | UGCUUCUGUGCUCUACUUC | | [118-136] |
| 110 | AGGGCACCAGGAAACAAAG | CUUUGUUUCCUGGUGCCCU | | [5542-5560] |
| 111 | CCCAGAGAGAAAGGUGAGA | UCUCACCUUUCUCUCUGGG | | [44-62] |
| 112 | CACAAGAAGCUACAAAAGA | UCUUUUGUAGCUUCUUGUG | | [2082-2100] |
| 113 | GACCAAGAAUGUAGAGAAG | CUUCUCUACAUUCUUGGUC | | [4769-4787] |
| 114 | ACAUCGAGGUAUAAUAAAU | AUUUAUUAUACCUCGAUGU | | [5951-5969] |
| 115 | GCUGUGCUGGAUACCCAAA | UUUGGGUAUCCAGCACAGC | | [4264-4282] |
| 116 | GCUGGAUACCCAAAGCUGU | ACAGCUUUGGGUAUCCAGC | | [4269-4287] |
| 117 | UUACCACCACCCAGGUCAA | UUGACCUGGGUGGUGGUAA | | [5985-6003] |
| 118 | GAGCGAGAAGGAGCUAUUU | AAAUAGCUCCUUCUCGCUC | | [2450-2468] |
| 119 | ACAGUACCCAGGAGGUGAA | UUCACCUCCUGGGUACUGU | | [1348-1366] |
| 120 | ACCCAAAGCUGUACCUUGA | UCAAGGUACAGCUUUGGGU | | [4276-4294] |
| 121 | UGGAGUGAUCUCAACCCUA | UAGGGUUGAGAUCACUCCA | | [1569-1587] |
| 122 | ACAUCUGAACCCAACACCA | UGGUGUUGGGUUCAGAUGU | | [158-176] |
| 123 | AGCGAGAAGGAGCUAUUUA | UAAAUAGCUCCUUCUCGCU | | [2451-2469] |
| 124 | UGGAGAUCUUCUUCAGACA | UGUCUGAAGAAGAUCUCCA | Rat, Ms | [2506-2524] |
| 125 | CAUGAUGAUUAUAAGUCCA | UGGACUUAUAAUCAUCAUG | | [5058-5076] |
| 126 | CCUCCAGGAAUGACCAAGA | UCUUGGUCAUUCCUGGAGG | | [4758-4776] |
| 127 | UUGACUUCCACAAAAUCGA | UCGAUUUUGUGGAAGUCAA | | [5303-5321] |
| 128 | UCCAAGAGGUGGAGGAGAA | UUCUCCUCCACCUCUUGGA | | [4501-4519] |
| 129 | CCUGGAGAUCUUCUUCAGA | UCUGAAGAAGAUCUCCAGG | | [2504-2522] |
| 130 | GGUUUAACAACCUGAGGCA | UGCCUCAGGUUGUUAAACC | | [325-343] |
| 131 | UAUUGACCCAGACAAUUAU | AUAAUUGUCUGGGUCAAUA | | [4996-5014] |
| 132 | UGUAUGACCUGGAUGAGAA | UUCUCAUCCAGGUCAUACA | | [2800-2818] |
| 133 | UAAUCAUGUACAUGUUUUA | UAAAACAUGUACAUGAUUA | | [5969-5987] |
| 134 | AAGCUCUCAGGGUCUGCAA | UUGCAGACCCUGAGAGCUU | | [1297-1315] |
| 135 | GAACUGGAGUGAUCUCAAC | GUUGAGAUCACUCCAGUUC | | [1565-1583] |
| 136 | CCAUGUAUGACCUGGAUGA | UCAUCCAGGUCAUACAUGG | | [2797-2815] |
| 137 | UGGUCCCGGCAAUCAUCUA | UAGAUGAUUGCCGGGACCA | | [3955-3973] |
| 138 | AUGCGAUCCUUCAUCGAGA | UCUCGAUGAAGGAUCGCAU | | [2853-2871] |
| 139 | UUACAUCGAGGUAUAAUAA | UUAUUAUACCUCGAUGUAA | | [5949-5967] |
| 140 | UCAUGUACAUGUUUUACCA | UGGUAAAACAUGUACAUGA | | [5972-5990] |
| 141 | AAAAGCUGCAGCAGUACAA | UUGUACUGCUGCAGCUUUU | | [3280-3298] |
| 142 | UCAGGAUCUCCCAAAGAAG | CUUCUUUGGGAGAUCCUGA | | [5144-5162] |
| 143 | CGAGGUAUAAUAAAUAAUC | GAUUAUUUAUUAUACCUCG | | [5955-5973] |
| 144 | GCUGUAAAAUAUUUUACAU | AUGUAAAAUAUUUUACAGC | | [5936-5954] |
| 145 | UGUCCUCGACCAGUUUGUA | UACAAACUGGUCGAGGACA | | [1712-1730] |
| 146 | CUAAGCAGCUCACAACUGA | UCAGUUGUGAGCUGCUUAG | | [1915-1933] |
| 147 | AAGACAUCUGAACCCAACA | UGUUGGGUUCAGAUGUCUU | | [155-173] |
| 148 | GGAGUGACCUACCUGCAAU | AUUGCAGGUAGGUCACUCC | | [4050-4068] |
| 149 | UCUGGUUCCGCUACCACAA | UUGUGGUAGCGGAACCAGA | | [973-991] |
| 150 | GAGAGUUCCUGGACAUCCU | AGGAUGUCCAGGAACUCUC | | [2728-2746] |
| 151 | AGGAGCAGCCCUACUUCUA | UAGAAGUAGGGCUGCUCCU | | [5487-5505] |
| 152 | AGAAGGAGAUUGAAGACAU | AUGUCUUCAAUCUCCUUCU | | [1789-1807] |
| 153 | AGGAUACCGUCCUUUCCUA | UAGGAAAGGACGGUAUCCU | | [1145-1163] |
| 154 | CAUAGUGGUUGAAGAUCUG | CAGAUCUUCAACCACUAUG | | [1415-1433] |
| 155 | CAUCCUGUCCAACAACCGA | UCGGUUGUUGGACAGGAUG | | [2288-2306] |
| 156 | CCCAAAGCUGUACCUUGAU | AUCAAGGUACAGCUUUGGG | | [4277-4295] |
| 157 | CGCUGUUAUCAACAUUGAC | GUCAAUGUUGAUAACAGCG | | [1838-1856] |
| 158 | AGUUUUGGUCCUACUAAAU | AUUUAGUAGGACCAAAACU | | [6116-6134] |
| 159 | CAUUGUCCUCGACCAGUUU | AAACUGGUCGAGGACAAUG | | [1709-1727] |
| 160 | GCACAGAAGCAAAGAUUUU | AAAAUCUUUGCUUCUGUGC | | [126-144] |
| 161 | AGGCUUUGAGUACAAGUCA | UGACUUGUACUCAAAGCCU | | [4082-4100] |
| 162 | CAGAAAGUGCUGAACCGGA | UCCGGUUCAGCACUUUCUG | | [4620-4638] |
| 163 | CUGAUGUGAUUUCUACCAA | UUGGUAGAAAUCACAUCAG | | [6093-6111] |
| 164 | AGAAGCAAAGAUUUUAAGA | UCUUAAAAUCUUUGCUUCU | | [130-148] |
| 165 | CCACAUCUCUAAUUGACUU | AAGUCAAUUAGAGAUGUGG | | [5291-5309] |
| 166 | UAUUUUACAUCGAGGUAUA | UAUACCUCGAUGUAAAAUA | | [5945-5963] |
| 167 | GAGAAAAGGCAGGAGACUA | UAGUCUCCUGCCUUUUCUC | | [5021-5039] |
| 168 | AAAGCUGAGCUGUAAAAUA | UAUUUUACAGCUCAGCUUU | | [5928-5946] |
| 169 | AAAACACUCCCGGAGUAUA | UAUACUCCGGGAGUGUUUU | | [1125-1143] |
| 170 | GAAGGAGAUUGAAGACAUC | GAUGUCUUCAAUCUCCUUC | | [1790-1808] |
| 171 | UCAAGAUCCCUAAGGAGUA | UACUCCUUAGGGAUCUUGA | | [2326-2344] |
| 172 | CAGUAUCCUGCCUUCUCUU | AAGAGAAGGCAGGAUACUG | | [4876-4894] |
| 173 | UGUCGAGUCUCGUUCAUCA | UGAUGAACGAGACUCGACA | Ms | [3087-3105] |
| 174 | GGCUCUUUCCUAAAAAGCU | AGCUUUUUAGGAAAGAGCC | | [5915-5933] |
| 175 | GAGAAUAUUGACCCAGACA | UGUCUGGGUCAAUAUUCUC | | [4991-5009] |
| 176 | CAAUGUCUACAUCUUCUCA | UGAGAAGAUGUAGACAUUG | | [3644-3662] |
| 177 | AGGAUCUCCCAAAGAAGAU | AUCUUCUUUGGGAGAUCCU | | [5146-5164] |
| 178 | CAAUAGUGCUUGUCUCCGA | UCGGAGACAAGCACUAUUG | | [5265-5283] |
| 179 | UUUUGGUCCUACUAAAUAU | AUAUUUAGUAGGACCAAAA | | [6118-6136] |
| 180 | AUGACGGCUGGUUUAACAA | UUGUUAAACCAGCCGUCAU | | [316-334] |
| 181 | UUCAGUACUCGAUCUCAAU | AUUGAGAUCGAGUACUGAA | | [5697-5715] |
| 182 | UCAAAGAGAGCGUGAAGAA | UUCUUCACGCUCUCUUUGA | | [2104-2122] |
| 183 | GUUUUGGUCCUACUAAAUA | UAUUUAGUAGGACCAAAAC | | [6117-6135] |
| 184 | GUACCUUGAUGGACCGUUU | AAACGGUCCAUCAAGGUAC | | [4286-4304] |
| 185 | GUGGAGGUGGAAAUGGUAU | AUACCAUUUCCACCUCCAC | | [3040-3058] |
| 186 | CGUGUUUGCAGAUCGUGCU | AGCACGAUCUGCAAACACG | | [3365-3383] |
| 187 | GACAUUUGAGGGAGGAGGA | UCCUCCUCCCUCAAAUGUC | | [5349-5367] |
| 188 | CAAGAUCCCUAAGGAGUAU | AUACUCCUUAGGGAUCUUG | | [2327-2345] |
| 189 | AACGCAUCCUGGAGAUCUU | AAGAUCUCCAGGAUGCGUU | | [2497-2515] |
| 190 | AGGUGAAAAGGUACAAUAG | CUAUUGUACCUUUUCACCU | | [5252-5270] |
| 191 | CAUGUUUUACCACCACCCA | UGGGUGGUGGUAAAACAUG | | [5979-5997] |
| 192 | AGCAGUUCUUCUCUACCAU | AUGGUAGAGAAGAACUGCU | | [1201-1219] |
| 193 | UCGCUGUUAUCAACAUUGA | UCAAUGUUGAUAACAGCGA | | [1837-1855] |
| 194 | CAGGGUCUGCAACAACUAC | GUAGUUGUUGCAGACCCUG | Rat | [1304-1322] |
| 195 | UCAUCGAGAUCUCCAACAA | UUGUUGGAGAUCUCGAUGA | Rat | [2863-2881] |
| 196 | GGGUGAAGGCAAGAAGUAG | CUACUUCUUGCCUUCACCC | | [106-124] |
| 197 | UUUGGUCCUACUAAAUAUA | UAUAUUUAGUAGGACCAAA | | [6119-6137] |
| 198 | UGAGCUGUAAAAUAUUUUA | UAAAAUAUUUUACAGCUCA | | [5933-5951] |
| 199 | GUUUGAGAACACCAGGAAU | AUUCCUGGUGUUCUCAAAC | | [1757-1775] |
| 200 | UCGAGGUAUAAUAAAUAAU | AUUAUUUAUUAUACCUCGA | | [5954-5972] |
| 201 | AGGACCUAUCCCAGCUAGA | UCUAGCUGGGAUAGGUCCU | | [1633-1651] |
| 202 | GAUCGUGCUUACUACUAUG | CAUAGUAGUAAGCACGAUC | | [3375-3393] |
| 203 | UUUCGGAGUUGGAGGACAA | UUGUCCUCCAACUCCGAAA | | [1396-1414] |
| 204 | GAUUAUAAGUCCACCUGUU | AACAGGUGGACUUAUAAUC | | [5064-5082] |
| 205 | AAAUAAUCAUGUACAUGUU | AACAUGUACAUGAUUAUUU | | [5966-5984] |
| 206 | CAAGGCUUUGAGUACAAGU | ACUUGUACUCAAAGCCUUG | | [4080-4098] |
| 207 | AACUCUGUCUCCAGGUCUA | UAGACCUGGAGACAGAGUU | | [5451-5469] |
| 208 | UGCUCUAUGCCCUGCUCAU | AUGAGCAGGGCAUAGAGCA | | [3883-3901] |
| 209 | AAAGCUGUACCUUGAUGGA | UCCAUCAAGGUACAGCUUU | | [4280-4298] |
| 210 | UGCAGAAAACACUCCCGGA | UCCGGGAGUGUUUUCUGCA | | [1120-1138] |
| 211 | AGAGGAGCAGUCCCAUCAU | AUGAUGGGACUGCUCCUCU | | [2173-2191] |
| 212 | CAUCUAUGGAGGUGACAAG | CUUGUCACCUCCAUAGAUG | | [3968-3986] |
| 213 | AGAACUACCGGAGGCACAU | AUGUGCCUCCGGUAGUUCU | | [3310-3328] |
| 214 | UAUGACGGCUGGUUUAACA | UGUUAAACCAGCCGUCAUA | | [315-333] |
| 215 | ACAUCAUCCAAGAGGUGGA | UCCACCUCUUGGAUGAUGU | | [4495-4513] |
| 216 | GUAAAAUAUUUUACAUCGA | UCGAUGUAAAAUAUUUUAC | | [5939-5957] |
| 217 | AGAGAGCGUGAAGAAGGAA | UUCCUUCUUCACGCUCUCU | | [2108-2126] |
| 218 | GCUGGUCGCUGUUAUCAAC | GUUGAUAACAGCGACCAGC | | [1832-1850] |
| 219 | GAGCACAGAAGCAAAGAUU | AAUCUUUGCUUCUGUGCUC | | [124-142] |
| 220 | CGUCUAAUGUUUACCAUGU | ACAUGGUAAACAUUAGACG | | [2784-2802] |
| 221 | ACCAGUCAGGAUCUCCCAA | UUGGGAGAUCCUGACUGGU | | [5139-5157] |
| 222 | CUUUGAGUACAAGUCAGGA | UCCUGACUUGUACUCAAAG | | [4085-4103] |
| 223 | AGUCAGGAUCUCCCAAAGA | UCUUUGGGAGAUCCUGACU | | [5142-5160] |
| 224 | UACAUCGAGGUAUAAUAAA | UUUAUUAUACCUCGAUGUA | | [5950-5968] |
| 225 | UGAUGCGAUCCUUCAUCGA | UCGAUGAAGGAUCGCAUCA | | [2851-2869] |
| 226 | GUCUGCAACAACUACUGGA | UCCAGUAGUUGUUGCAGAC | Rat | [1308-1326] |
| 227 | GAAGAUAAAGACCACUCCU | AGGAGUGGUCUUUAUCUUC | | [5159-5177] |
| 228 | UUUACAUCGAGGUAUAAUA | UAUUAUACCUCGAUGUAAA | | [5948-5966] |
| 229 | CCAGCUGUCAUUUCCGGAA | UUCCGGAAAUGACAGCUGG | Ms | [1249-1267] |
| 230 | AUGGGCUGUUCUCCAAGAA | UUCUUGGAGAACAGCCCAU | | [1774-1792] |
| 231 | AAAGUGUCAGCAACUUUGA | UCAAAGUUGCUGACACUUU | | [5521-5539] |
| 232 | GCAGAUCGUGCUUACUACU | AGUAGUAAGCACGAUCUGC | | [3372-3390] |
| 233 | AACCAGUCAGGAUCUCCCA | UGGGAGAUCCUGACUGGUU | | [5138-5156] |
| 234 | AGCUGUAAAAUAUUUUACA | UGUAAAAUAUUUUACAGCU | | [5935-5953] |
| 235 | AUUGACCCAGACAAUUAUA | UAUAAUUGUCUGGGUCAAU | | [4997-5015] |
| 236 | UACAAAAGAAACUCAAAGA | UCUUUGAGUUUCUUUUGUA | | [2092-2110] |
| 237 | CUGCCUUCCCUUAGUGAGU | ACUCACUAAGGGAAGGCAG | | [2021-2039] |
| 238 | CUCUAUGCCCUGCUCAUCA | UGAUGAGCAGGGCAUAGAG | | [3885-3903] |
| 239 | UAAAAAGCUGAGCUGUAAA | UUUACAGCUCAGCUUUUUA | | [5925-5943] |
| 240 | CAUGUGCCGCAACCUCAUA | UAUGAGGUUGCGGCACAUG | | [3503-3521] |
| 241 | CCUGUACAACCAGGACCUA | UAGGUCCUGGUUGUACAGG | | [1622-1640] |
| 242 | UCACCAUGAUGCGAUCCUU | AAGGAUCGCAUCAUGGUGA | | [2845-2863] |
| 243 | GACCUGGUCUUCAAGUCAU | AUGACUUGAAGACCAGGUC | | [4395-4413] |
| 244 | UCUCUAAUUGACUUCCACA | UGUGGAAGUCAAUUAGAGA | | [5296-5314] |
| 245 | CUGCGAGAGACUUUCCUCA | UGAGGAAAGUCUCUCGCAG | | [3528-3546] |
| 246 | GUGCAUGAUGAUUAUAAGU | ACUUAUAAUCAUCAUGCAC | | [5055-5073] |
| 247 | CAAGGAACUGGAGUGAUCU | AGAUCACUCCAGUUCCUUG | | [1561-1579] |
| 248 | GGAUAAGUCCCGUCUAAUG | CAUUAGACGGGACUUAUCC | | [2774-2792] |
| 249 | CUUUUCUUUUCCUUUUUCA | UGAAAAAGGAAAAGAAAAG | | [5893-5911] |
| 250 | GAAUGAUGGGUCCAAGCUU | AAGCUUGGACCCAUCAUUC | Rat | [3710-3728] |
| 251 | CAAAAGCUGCAGCAGUACA | UGUACUGCUGCAGCUUUUG | | [3279-3297] |
| 252 | AGCUGGUCACCUUACGCAA | UUGCGUAAGGUGACCAGCU | | [5834-5852] |
| 253 | UGUGCCUUUUGAUGCCGCA | UGCGGCAUCAAAAGGCACA | | [3554-3572] |
| 254 | GCUCUUUAACUUUUCUUUU | AAAAGAAAAGUUAAAGAGC | | [5884-5902] |
| 255 | GUGCAGAAGCUGUGAUGCU | AGCAUCACAGCUUCUGCAC | | [5406-5424] |
| 256 | GCAAUCUCUCCAUCAGAAU | AUUCUGAUGGAGAGAUUGC | | [4924-4942] |
| 257 | UGGUAUUAGAGAUAUCUUU | AAAGAUAUCUCUAAUACCA | | [3053-3071] |
| 258 | GACUUCCUGCCCUUAGCAA | UUGCUAAGGGCAGGAAGUC | | [5113-5131] |
| 259 | CGGAAGAAGGUGGAGAUCA | UGAUCUCCACCUUCUUCCG | Rat, Ms | [4002-4020] |
| 260 | CAAUCUGAACAGUACCCAG | CUGGGUACUGUUCAGAUUG | | [1340-1358] |
| 261 | CCUGAACAGGCAUCUCACU | AGUGAGAUGCCUGUUCAGG | | [2225-2243] |
| 262 | AUUUUAAGAGGAAAGAAGA | UCUUCUUUCCUCUUAAAAU | | [140-158] |
| 263 | GACCUGGUGCUGCUGUUUA | UAAACAGCAGCACCAGGUC | | [2346-2364] |
| 264 | GCUUGGACUGACAUUUGAG | CUCAAAUGUCAGUCCAAGC | | [5340-5358] |
| 265 | AUGCCCUGCUCAUCAUCCA | UGGAUGAUGAGCAGGGCAU | | [3889-3907] |
| 266 | AUAUUGACCCAGACAAUUA | UAAUUGUCUGGGUCAAUAU | | [4995-5013] |
| 267 | AGAAGCUGUGAUGCUUAGA | UCUAAGCAUCACAGCUUCU | | [5410-5428] |
| 268 | CCUCAGGGAGAUCUACUCA | UGAGUAGAUCUCCCUGAGG | Rat | [4229-4247] |
| 269 | AGAUCUACUUCAUCUGGGU | ACCCAGAUGAAGUAGAUCU | Rat, Ms | [4441-4459] |
| 270 | CUUCCUCUCCAAGGACGAA | UUCGUCCUUGGAGAGGAAG | | [2822-2840] |
| 271 | CUCCCGGAGUAUACAGGAU | AUCCUGUAUACUCCGGGAG | | [1131-1149] |
| 272 | ACCAUGAUGCGAUCCUUCA | UGAAGGAUCGCAUCAUGGU | | [2847-2865] |
| 273 | CCUCCAUCCUCAAAGACCU | AGGUCUUUGAGGAUGGAGG | Rat, Ms | [4381-4399] |
| 274 | UCAUCCAGCUGCUGUCAGA | UCUGACAGCAGCUGGAUGA | | [2191-2209] |
| 275 | GAGAAAGGUGAGAGUGCAG | CUGCACUCUCACCUUUCUC | | [50-68] |
| 276 | GAGAAGUUCGACCUCAGGA | UCCUGAGGUCGAACUUCUC | Ms | [4569-4587] |
| 277 | GUACCCAGGAGGUGAAUGA | UCAUUCACCUCCUGGGUAC | | [1351-1369] |
| 278 | UCUGCUGCCUUCCCUUAGU | ACUAAGGGAAGGCAGCAGA | | [2017-2035] |
| 279 | UGGUCGCUGUUAUCAACAU | AUGUUGAUAACAGCGACCA | | [1834-1852] |
| 280 | AACUCAAAGAGAGCGUGAA | UUCACGCUCUCUUUGAGUU | | [2101-2119] |
| 281 | CACGCAGUCAAUGUCUACA | UGUAGACAUUGACUGCGUG | | [3636-3654] |
| 282 | UGCUGCCUUCCCUUAGUGA | UCACUAAGGGAAGGCAGCA | | [2019-2037] |
| 283 | GUAUGACAGGUGUGCUUCU | AGAAGCACACCUGUCAUAC | | [3769-3787] |
| 284 | AGGCUGUGACAAAGCAGCA | UGCUGCUUUGUCACAGCCU | | [2473-2491] |
| 285 | UGUUCUCCAAGAAGGAGAU | AUCUCCUUCUUGGAGAACA | | [1780-1798] |
| 286 | ACAUCCUGGUGGUCUUCAU | AUGAAGACCACCAGGAUGU | Ms | [2740-2758] |
| 287 | AGCACAGAAGCAAAGAUUU | AAAUCUUUGCUUCUGUGCU | | [125-143] |
| 288 | GCUCAAGAUCCCUAAGGAG | CUCCUUAGGGAUCUUGAGC | | [2324-2342] |
| 289 | AAGCUGUGAUGCUUAGAAC | GUUCUAAGCAUCACAGCUU | | [5412-5430] |
| 290 | ACCACUGAUGUGAUUUCUA | UAGAAAUCACAUCAGUGGU | | [6089-6107] |
| 291 | GAAUCCACCUUAGGCCUCA | UGAGGCCUAAGGUGGAUUC | | [4939-4957] |
| 292 | UCUUCAACUCCCUGCAGGA | UCCUGCAGGGAGUUGAAGA | | [4696-4714] |
| 293 | AAAAGAAACUCAAAGAGAG | CUCUCUUUGAGUUUCUUUU | | [2095-2113] |
| 294 | GAUGCUUAGAACCUGGACA | UGUCCAGGUUCUAAGCAUC | | [5419-5437] |
| 295 | AAGCAACCACUGAUGUGAU | AUCACAUCAGUGGUUGCUU | | [6084-6102] |
| 296 | UUGCCUCCAUCCUCAAAGA | UCUUUGAGGAUGGAGGCAA | Rat, Ms | [4378-4396] |
| 297 | GCUUCCUGCAGAAAACACU | AGUGUUUUCUGCAGGAAGC | | [1114-1132] |
| 298 | UGCAGAUCGUGCUUACUAC | GUAGUAAGCACGAUCUGCA | | [3371-3389] |
| 299 | UUGGGAGAAUAUUGACCCA | UGGGUCAAUAUUCUCCCAA | | [4987-5005] |
| 300 | AAUUGCAGUGCAUGAUGAU | AUCAUCAUGCACUGCAAUU | | [5048-5066] |
| 301 | CAGAAAACACUCCCGGAGU | ACUCCGGGAGUGUUUUCUG | | [1122-1140] |
| 302 | ACUUCAUGCACCACUAUGA | UCAUAGUGGUGCAUGAAGU | | [4822-4840] |
| 303 | AGCUGUCGAGUCUCGUUCA | UGAACGAGACUCGACAGCU | | [3084-3102] |
| 304 | AGGAUAAGUCCCGUCUAAU | AUUAGACGGGACUUAUCCU | | [2773-2791] |
| 305 | UGCUGUUUAGUUCUGAAGA | UCUUCAGAACUAAACAGCA | | [2356-2374] |
| 306 | AGGAAUGGGCUGUUCUCCA | UGGAGAACAGCCCAUUCCU | Ms | [1770-1788] |
| 307 | GAUUUUAAGAGGAAAGAAG | CUUCUUUCCUCUUAAAAUC | | [139-157] |
| 308 | CCACAAAAUCGAUGCGUUG | CAACGCAUCGAUUUUGUGG | | [5310-5328] |
| 309 | CCAUGCUAUACAUCUGCGA | UCGCAGAUGUAUAGCAUGG | | [4591-4609] |
| 310 | GAAGCAACCACUGAUGUGA | UCACAUCAGUGGUUGCUUC | | [6083-6101] |
| 311 | AGUUGGAGGACAACAUAGU | ACUAUGUUGUCCUCCAACU | | [1402-1420] |
| 312 | ACAACUACUGGAUUCGGGA | UCCCGAAUCCAGUAGUUGU | Rat | [1315-1333] |
| 313 | AAGAGGUGGAGGAGAACGA | UCGUUCUCCUCCACCUCUU | | [4504-4522] |
| 314 | GAUGCGUUGCUUUGGUAUU | AAUACCAAAGCAACGCAUC | | [5320-5338] |
| 315 | AACACUCCCGGAGUAUACA | UGUAUACUCCGGGAGUGUU | | [1127-1145] |
| 316 | CCACUGAUGUGAUUUCUAC | GUAGAAAUCACAUCAGUGG | | [6090-6108] |
| 317 | CAAGACCAGAGGCACUGAU | AUCAGUGCCUCUGGUCUUG | | [214-232] |
| 318 | GCAAGAGAAGAUGCAGCGA | UCGCUGCAUCUUCUCUUGC | | [3248-3266] |
| 319 | CAGUACCCAGGAGGUGAAU | AUUCACCUCCUGGGUACUG | | [1349-1367] |
| 320 | AGACAGUCCCUGCUUGUGA | UCACAAGCAGGGACUGUCU | | [5224-5242] |
| 321 | AGAUCCCUAAGGAGUAUGA | UCAUACUCCUUAGGGAUCU | | [2329-2347] |
| 322 | CUCAGGGAGAUCUACUCAU | AUGAGUAGAUCUCCCUGAG | | [4230-4248] |
| 323 | CCCUGCUUGUGACAAGUGU | ACACUUGUCACAAGCAGGG | | [5231-5249] |
| 324 | GUGUCAGCAACUUUGAGGA | UCCUCAAAGUUGCUGACAC | | [5524-5542] |
| 325 | UCCAGUUUUGGUCCUACUA | UAGUAGGACCAAAACUGGA | | [6113-6131] |
| 326 | CUGACAUCAUCCAAGAGGU | ACCUCUUGGAUGAUGUCAG | | [4492-4510] |
| 327 | UCAUGCACCACUAUGAGAA | UUCUCAUAGUGGUGCAUGA | | [4825-4843] |
| 328 | AUUUUACAUCGAGGUAUAA | UUAUACCUCGAUGUAAAAU | | [5946-5964] |
| 329 | CGCUAUGUGCCUUUUGAUG | CAUCAAAAGGCACAUAGCG | | [3549-3567] |
| 330 | CUGAGAAGUUCGACCUCAG | CUGAGGUCGAACUUCUCAG | Ms | [4567-4585] |
| 331 | ACCCAGGUCAAGACAUAGA | UCUAUGUCUUGACCUGGGU | | [5993-6011] |
| 332 | CCUGGUGCUGCUGUUUAGU | ACUAAACAGCAGCACCAGG | | [2348-2366] |
| 333 | GAAAUGGUAUUAGAGAUAU | AUAUCUCUAAUACCAUUUC | | [3049-3067] |
| 334 | UGGACAUCCUGGUGGUCUU | AAGACCACCAGGAUGUCCA | Ms | [2737-2755] |
| 335 | CCCUAGCUCCUAGAAGCAA | UUGCUUCUAGGAGCUAGGG | | [6071-6089] |
| 336 | ACUAUGUUCUACAAUUGCA | UGCAAUUGUAGAACAUAGU | | [5036-5054] |
| 337 | CCAAGGAACUGGAGUGAUC | GAUCACUCCAGUUCCUUGG | | [1560-1578] |
| 338 | AAUUCUCCCGUACAGACUA | UAGUCUGUACGGGAGAAUU | | [1459-1477] |
| 339 | AGGUGCUGGACAUCAACCA | UGGUUGAUGUCCAGCACCU | Ms | [2536-2554] |
| 340 | UGACAGGUGUGCUUCUGCU | AGCAGAAGCACACCUGUCA | | [3772-3790] |
| 341 | GAAAACACUCCCGGAGUAU | AUACUCCGGGAGUGUUUUC | | [1124-1142] |
| 342 | GUGAUUUCUACCAAAUCCA | UGGAUUUGGUAGAAAUCAC | | [6098-6116] |
| 343 | UGUACAUGUUUUACCACCA | UGGUGGUAAAACAUGUACA | | [5975-5993] |
| 344 | UGCCCUGCUCAUCAUCCAU | AUGGAUGAUGAGCAGGGCA | | [3890-3908] |
| 345 | ACCAAGGACCCAGAGAGAA | UUCUCUCUGGGUCCUUGGU | | [36-54] |
| 346 | ACGGCUGGUUUAACAACCU | AGGUUGUUAAACCAGCCGU | | [319-337] |
| 347 | AGGAGCAGUCCCAUCAUCA | UGAUGAUGGGACUGCUCCU | | [2175-2193] |
| 348 | UGACUGUGCUUGACUUCUU | AAGAAGUCAAGCACAGUCA | | [1957-1975] |
| 349 | AGGUCAAGACAUAGAAUGU | ACAUUCUAUGUCUUGACCU | | [5997-6015] |
| 350 | GGAAUGACCAAGAAUGUAG | CUACAUUCUUGGUCAUUCC | | [4764-4782] |
| 351 | AAUAUUGGGAGAAUAUUGA | UCAAUAUUCUCCCAAUAUU | | [4983-5001] |
| 352 | AGACCUGGUCUUCAAGUCA | UGACUUGAAGACCAGGUCU | | [4394-4412] |
| 353 | CUGGAGUGAUCUCAACCCU | AGGGUUGAGAUCACUCCAG | | [1568-1586] |
| 354 | AGUUCUUCUCUACCAUGGU | ACCAUGGUAGAGAAGAACU | | [1204-1222] |
| 355 | CUGCCUUCUCUUCUGUGCA | UGCACAGAAGAGAAGGCAG | | [4883-4901] |
| 356 | GGACGAAUUCUUCACCAUG | CAUGGUGAAGAAUUCGUCC | | [2834-2852] |
| 357 | CGUUGCUUUGGUAUUUGCU | AGCAAAUACCAAAGCAACG | | [5324-5342] |
| 358 | GAAGGUCCUGAACAAGGGU | ACCCUUGUUCAGGACCUUC | | [1265-1283] |
| 359 | GUUGAAGAUCUGAGGGAUU | AAUCCCUCAGAUCUUCAAC | | [1422-1440] |
| 360 | GCCCUGAUAUUCUUGAUGU | ACAUCAAGAAUAUCAGGGC | | [5572-5590] |
| 361 | CGGCUGGUUUAACAACCUG | CAGGUUGUUAAACCAGCCG | | [320-338] |
| 362 | AGAUAUCUUUAAACAAAAC | GUUUUGUUUAAAGAUAUCU | | [3062-3080] |
| 363 | GCGAGAGACUUUCCUCAAC | GUUGAGGAAAGUCUCUCGC | | [3530-3548] |
| 364 | UCUUGAUGUCACCAGUGAU | AUCACUGGUGACAUCAAGA | | [5582-5600] |
| 365 | AAUGGGCUGUUCUCCAAGA | UCUUGGAGAACAGCCCAUU | | [1773-1791] |
| 366 | GCUCCUAGAAGCAACCACU | AGUGGUUGCUUCUAGGAGC | | [6076-6094] |
| 367 | CAGGAUACCGUCCUUUCCU | AGGAAAGGACGGUAUCCUG | | [1144-1162] |
| 368 | AAGAUUUUAAGAGGAAAGA | UCUUUCCUCUUAAAAUCUU | | [137-155] |
| 369 | AGUACAAGCGCUUCGUGGA | UCCACGAAGCGCUUGUACU | | [3292-3310] |
| 370 | GCAUCCUGGAGAUCUUCUU | AAGAAGAUCUCCAGGAUGC | | [2500-2518] |
| 371 | GACAUGGGAGGAUUUUCAC | GUGAAAAUCCUCCCAUGUC | | [2960-2978] |
| 372 | GAAGAUCUGAGGGAUUACU | AGUAAUCCCUCAGAUCUUC | | [1425-1443] |
| 373 | CAGUGCAGAAGCUGUGAUG | CAUCACAGCUUCUGCACUG | | [5404-5422] |
| 374 | CAAGAAGGAGAUUGAAGAC | GUCUUCAAUCUCCUUCUUG | | [1787-1805] |
| 375 | CAGUCCCUGCUUGUGACAA | UUGUCACAAGCAGGGACUG | | [5227-5245] |
| 376 | UUCACUUCAUGCUGCGGGA | UCCCGCAGCAUGAAGUGAA | | [2974-2992] |
| 377 | UGCAGAAGCUGUGAUGCUU | AAGCAUCACAGCUUCUGCA | | [5407-5425] |
| 378 | UGAACCCAACACCACCCUA | UAGGGUGGUGUUGGGUUCA | | [163-181] |
| 379 | GAUAAAGACCACUCCUCAC | GUGAGGAGUGGUCUUUAUC | | [5162-5180] |
| 380 | AGAUGAGCGAGAAGGAGCU | AGCUCCUUCUCGCUCAUCU | | [2446-2464] |
| 381 | ACUCCCGGAGUAUACAGGA | UCCUGUAUACUCCGGGAGU | | [1130-1148] |
| 382 | AAGUAGAGCACAGAAGCAA | UUGCUUCUGUGCUCUACUU | | [119-137] |
| 383 | GAUAUCUUUAAACAAAACA | UGUUUUGUUUAAAGAUAUC | | [3063-3081] |
| 384 | GGUGCUGCUGUUUAGUUCU | AGAACUAAACAGCAGCACC | | [2351-2369] |
| 385 | CCUCAUAACCUUCCUGCGA | UCGCAGGAAGGUUAUGAGG | | [3515-3533] |
| 386 | CUAUGUUCUACAAUUGCAG | CUGCAAUUGUAGAACAUAG | | [5037-5055] |
| 387 | CAAAGACCUGGUCUUCAAG | CUUGAAGACCAGGUCUUUG | | [4391-4409] |
| 388 | CUUUUGAUGCCGCAGUGGA | UCCACUGCGGCAUCAAAAG | | [3559-3577] |
| 389 | GUCCUGAACAGGCAUCUCA | UGAGAUGCCUGUUCAGGAC | | [2223-2241] |
| 390 | GUUUGCAGAUCGUGCUUAC | GUAAGCACGAUCUGCAAAC | | [3368-3386] |
| 391 | AUACAAAUGAGAAAAGGCA | UGCCUUUUCUCAUUUGUAU | | [5013-5031] |
| 392 | CAAGGACCCAGAGAGAAAG | CUUUCUCUCUGGGUCCUUG | | [38-56] |
| 393 | CCUGGUGUCUGUGCACAUU | AAUGUGCACAGACACCAGG | | [4532-4550] |
| 394 | CUGUUCUCCAAGAAGGAGA | UCUCCUUCUUGGAGAACAG | | [1779-1797] |
| 395 | ACAUAGUGGUUGAAGAUCU | AGAUCUUCAACCACUAUGU | | [1414-1432] |
| 396 | AGACUUCCUGCCCUUAGCA | UGCUAAGGGCAGGAAGUCU | | [5112-5130] |
| 397 | UCCGAGAGUUCCUGGACAU | AUGUCCAGGAACUCUCGGA | | [2725-2743] |
| 398 | GAUGAGCGAGAAGGAGCUA | UAGCUCCUUCUCGCUCAUC | | [2447-2465] |
| 399 | GCCUUUGUGCAGCAGCUAU | AUAGCUGCUGCACAAAGGC | | [2385-2403] |
| 400 | GACAUCCCAAGGAACUGGA | UCCAGUUCCUUGGGAUGUC | | [1554-1572] |
| 401 | UUAGAGAUAUCUUUAAACA | UGUUUAAAGAUAUCUCUAA | | [3058-3076] |
| 402 | CCAAAGUGUCAGCAACUUU | AAAGUUGCUGACACUUUGG | | [5519-5537] |
| 403 | UGGUUGAAGAUCUGAGGGA | UCCCUCAGAUCUUCAACCA | | [1420-1438] |
| 404 | CCUUAGUGAGUCUGCUUCU | AGAAGCAGACUCACUAAGG | | [2029-2047] |
| 405 | CACCCAGGUCAAGACAUAG | CUAUGUCUUGACCUGGGUG | | [5992-6010] |
| 406 | AGGCAAGAAGUAGAGCACA | UGUGCUCUACUUCUUGCCU | | [112-130] |
| 407 | AAGCUACAAAAGAAACUCA | UGAGUUUCUUUUGUAGCUU | | [2088-2106] |
| 408 | UCUGAGCAGUUCUUCUCUA | UAGAGAAGAACUGCUCAGA | | [1197-1215] |
| 409 | CUGGUCACCUUACGCAAGA | UCUUGCGUAAGGUGACCAG | | [5836-5854] |
| 410 | ACUUCCAGAAAGUGCUGAA | UUCAGCACUUUCUGGAAGU | | [4615-4633] |
| 411 | GGCUGACAUCAUCCAAGAG | CUCUUGGAUGAUGUCAGCC | | [4490-4508] |
| 412 | AUUUCCGGAAGGUCCUGAA | UUCAGGACCUUCCGGAAAU | | [1258-1276] |
| 413 | GCCUCUGAGCAGUUCUUCU | AGAAGAACUGCUCAGAGGC | | [1194-1212] |
| 414 | AGUGGUUGAAGAUCUGAGG | CCUCAGAUCUUCAACCACU | | [1418-1436] |
| 415 | AAGGACGAAUUCUUCACCA | UGGUGAAGAAUUCGUCCUU | | [2832-2850] |
| 416 | AUGAGCUGCUGCUGGGAAU | AUUCCCAGCAGCAGCUCAU | | [1366-1384] |
| 417 | GAGCUGACAUGGGAGGAUU | AAUCCUCCCAUGUCAGCUC | | [2955-2973] |
| 418 | GUCAAUGUCUACAUCUUCU | AGAAGAUGUAGACAUUGAC | | [3642-3660] |
| 419 | AGCGGCACUUCCAGAAAGU | ACUUUCUGGAAGUGCCGCU | | [4609-4627] |
| 420 | GAGUUGGAGGACAACAUAG | CUAUGUUGUCCUCCAACUC | | [1401-1419] |
| 421 | CAUGCACCACUAUGAGAAC | GUUCUCAUAGUGGUGCAUG | | [4826-4844] |
| 422 | AAGUCCCGUCUAAUGUUUA | UAAACAUUAGACGGGACUU | | [2778-2796] |
| 423 | UCUAAUGUUUACCAUGUAU | AUACAUGGUAAACAUUAGA | | [2786-2804] |
| 424 | AUCUUUAAACAAAACAUCA | UGAUGUUUUGUUUAAAGAU | | [3066-3084] |
| 425 | UUCUCUUCUGUGCACCUAA | UUAGGUGCACAGAAGAGAA | | [4888-4906] |
| 426 | GAUUCCAGGACAAGGAGGA | UCCUCCUUGUCCUGGAAUC | | [2938-2956] |
| 427 | UGGAGGACAACAUAGUGGU | ACCACUAUGUUGUCCUCCA | | [1405-1423] |
| 428 | AGCUAUUUAGGAAGGCUGU | ACAGCCUUCCUAAAUAGCU | | [2461-2479] |
| 429 | AUCUGAACAGUACCCAGGA | UCCUGGGUACUGUUCAGAU | | [1342-1360] |
| 430 | AAGGUACAAUAGUGCUUGU | ACAAGCACUAUUGUACCUU | | [5259-5277] |
| 431 | CACCUACCAGAACAUCGCU | AGCGAUGUUCUGGUAGGUG | | [1076-1094] |
| 432 | UGGUUUGAGAACACCAGGA | UCCUGGUGUUCUCAAACCA | | [1755-1773] |
| 433 | GUUUAUCAACGGCACCAUU | AAUGGUGCCGUUGAUAAAC | | [5080-5098] |
| 434 | UGUCCUUCCGAGAGUUCCU | AGGAACUCUCGGAAGGACA | | [2719-2737] |
| 435 | CUUUAACUUUUCUUUUCCU | AGGAAAAGAAAAGUUAAAG | | [5887-5905] |
| 436 | GAAUGUAGAGAAGGCCUGU | ACAGGCCUUCUCUACAUUC | | [4775-4793] |
| 437 | AAUAGUGCUUGUCUCCGAU | AUCGGAGACAAGCACUAUU | | [5266-5284] |
| 438 | AGAUCUUCUUCAGACACCU | AGGUGUCUGAAGAAGAUCU | | [2509-2527] |
| 439 | CUUUGCCUCCAUCCUCAAA | UUUGAGGAUGGAGGCAAAG | Rat, Ms | [4376-4394] |
| 440 | GCAGGAGACUAUGUUCUAC | GUAGAACAUAGUCUCCUGC | | [5029-5047] |
| 441 | CGUCUUUGUGAAUGAUGGG | CCCAUCAUUCACAAAGACG | | [3701-3719] |
| 442 | AGUGAGGGUGAAGGCAAGA | UCUUGCCUUCACCCUCACU | | [101-119] |
| 443 | UGCUGAACCGGAGUCUGUU | AACAGACUCCGGUUCAGCA | | [4627-4645] |
| 444 | CAGGUAUGACAGGUGUGCU | AGCACACCUGUCAUACCUG | | [3766-3784] |
| 445 | CGGAGUAUACAGGAUACCG | CGGUAUCCUGUAUACUCCG | | [1135-1153] |
| 446 | CAUCGAGAUCUCCAACAAC | GUUGUUGGAGAUCUCGAUG | Rat | [2864-2882] |
| 447 | CAAUAUUGGGAGAAUAUUG | CAAUAUUCUCCCAAUAUUG | | [4982-5000] |
| 448 | GAUCCUUCAUCGAGAUCUC | GAGAUCUCGAUGAAGGAUC | | [2857-2875] |
| 449 | GUGCUUGACUUCUUUGAAG | CUUCAAAGAAGUCAAGCAC | | [1962-1980] |
| 450 | UCCUGAACAAGGGUUUUCA | UGAAAACCCUUGUUCAGGA | | [1270-1288] |
| 451 | CCCAAGGAACUGGAGUGAU | AUCACUCCAGUUCCUUGGG | | [1559-1577] |
| 452 | UGUUUAGUUCUGAAGAGGA | UCCUCUUCAGAACUAAACA | | [2359-2377] |
| 453 | AGGUGAAUGAGCUGCUGCU | AGCAGCAGCUCAUUCACCU | | [1360-1378] |
| 454 | CAUACUCAGCUCUUUAACU | AGUUAAAGAGCUGAGUAUG | | [5876-5894] |
| 455 | CAAAAGGAGCAGCCCUACU | AGUAGGGCUGCUCCUUUUG | | [5483-5501] |
| 456 | GCUGCUCAAGAUCCCUAAG | CUUAGGGAUCUUGAGCAGC | | [2321-2339] |
| 457 | CCAGACAAUUAUACAAAUG | CAUUUGUAUAAUUGUCUGG | | [5003-5021] |
| 458 | GCUCUUUCCUAAAAAGCUG | CAGCUUUUUAGGAAAGAGC | | [5916-5934] |
| 459 | UUGAGUACAAGUCAGGACA | UGUCCUGACUUGUACUCAA | | [4087-4105] |
| 460 | AUUUAGGAAGGCUGUGACA | UGUCACAGCCUUCCUAAAU | | [2465-2483] |
| 461 | AACACCACCCUAAACCACA | UGUGGUUUAGGGUGGUGUU | | [170-188] |
| 462 | CUCUUUCCUAAAAAGCUGA | UCAGCUUUUUAGGAAAGAG | | [5917-5935] |
| 463 | GUUGGAGGACAACAUAGUG | CACUAUGUUGUCCUCCAAC | | [1403-1421] |
| 464 | AACUUUUCUUUUCCUUUUU | AAAAAGGAAAAGAAAAGUU | | [5891-5909] |
| 465 | CAAAGAGAGCGUGAAGAAG | CUUCUUCACGCUCUCUUUG | | [2105-2123] |
| 466 | CUUCAUGCACCACUAUGAG | CUCAUAGUGGUGCAUGAAG | | [4823-4841] |
| 467 | AUGGUAUUAGAGAUAUCUU | AAGAUAUCUCUAAUACCAU | | [3052-3070] |
| 468 | AGGUCAACCUCAUCCUGUC | GACAGGAUGAGGUUGACCU | Rat | [2278-2296] |
| 469 | AUCUCAACCCUAAUGUGGA | UCCACAUUAGGGUUGAGAU | | [1576-1594] |
| 470 | CCAGGAAACAAAGAUGCCU | AGGCAUCUUUGUUUCCUGG | | [5548-5566] |
| 471 | CGAAUUCUUCACCAUGAUG | CAUCAUGGUGAAGAAUUCG | | [2837-2855] |
| 472 | UGGAGUCUAUGUUCCGGGA | UCCCGGAACAUAGACUCCA | | [2914-2932] |
| 473 | AGCAACCACUGAUGUGAUU | AAUCACAUCAGUGGUUGCU | | [6085-6103] |
| 474 | GUUGCUUUGGUAUUUGCUU | AAGCAAAUACCAAAGCAAC | | [5325-5343] |
| 475 | ACCCAGAGAGAAAGGUGAG | CUCACCUUUCUCUCUGGGU | | [43-61] |
| 476 | AGGACCACCAUGCUAUACA | UGUAUAGCAUGGUGGUCCU | | [4584-4602] |
| 477 | UGUAAGAAGAUCUACUUCA | UGAAGUAGAUCUUCUUACA | Rat, Ms | [4434-4452] |
| 478 | AGAAGCUACAAAAGAAACU | AGUUUCUUUUGUAGCUUCU | | [2086-2104] |
| 479 | CUCUCUGCAUCUACUGGAG | CUCCAGUAGAUGCAGAGAG | | [5630-5648] |
| 480 | GAUAUUCAGUACUCGAUCU | AGAUCGAGUACUGAAUAUC | | [5693-5711] |
| 481 | CAUCUGAACCCAACACCAC | GUGGUGUUGGGUUCAGAUG | | [159-177] |
| 482 | UGGUGGUCUUCAUGAAAGG | CCUUUCAUGAAGACCACCA | Ms | [2746-2764] |
| 483 | GAUACCGUCCUUUCCUAGA | UCUAGGAAAGGACGGUAUC | | [1147-1165] |
| 484 | AGCUCUUUAACUUUUCUUU | AAAGAAAAGUUAAAGAGCU | | [5883-5901] |
| 485 | UUUUCUUUUCCUUUUUCAU | AUGAAAAAGGAAAAGAAAA | | [5894-5912] |
| 486 | UCCAAAAGGAGCAGCCCUA | UAGGGCUGCUCCUUUUGGA | | [5481-5499] |
| 487 | GUGUUUGCAGAUCGUGCUU | AAGCACGAUCUGCAAACAC | | [3366-3384] |
| 488 | CAGAAUCCACCUUAGGCCU | AGGCCUAAGGUGGAUUCUG | | [4937-4955] |
| 489 | GAUCUUCUUCAGACACCUU | AAGGUGUCUGAAGAAGAUC | | [2510-2528] |
| 490 | CACCACUAUGAGAACUUCU | AGAAGUUCUCAUAGUGGUG | | [4830-4848] |
| 491 | GAGUAUACAGGAUACCGUC | GACGGUAUCCUGUAUACUC | | [1137-1155] |
| 492 | CCCUAAGGAGUAUGACCUG | CAGGUCAUACUCCUUAGGG | | [2333-2351] |
| 493 | UCAUGUUCUCUUAUAUCUU | AAGAUAUAAGAGAACAUGA | | [3478-3496] |
| 494 | GUGACAAGUGUGGAGGUGA | UCACCUCCACACUUGUCAC | | [5239-5257] |
| 495 | AUCUCUCCAUCAGAAUCCA | UGGAUUCUGAUGGAGAGAU | | [4927-4945] |
| 496 | UCCUAGAAGCAACCACUGA | UCAGUGGUUGCUUCUAGGA | | [6078-6096] |
| 497 | GGAAAGAAGACAUCUGAAC | GUUCAGAUGUCUUCUUUCC | | [149-167] |
| 498 | GAGGUGGUGGAGUCUAUGU | ACAUAGACUCCACCACCUC | | [2907-2925] |
| 499 | GGCACUUCCAGAAAGUGCU | AGCACUUUCUGGAAGUGCC | | [4612-4630] |
| 500 | GAAGGCUGUGACAAAGCAG | CUGCUUUGUCACAGCCUUC | | [2471-2489] |

TABLE A11
NOXO1 19-mer oligomer pairs (NADPH oxidase organizer 1)

| | | | | Human- | Human- | Human- |
|---|---|---|---|---|---|---|
| | | | | 34222190 | 41281827 | 41281810 |
| | | | Other | ORF: | ORF: | ORF: |
| No. | Sense siRNA | AntiSense siRNA | Sp | 261-1373 | 5-1135 | 5-1120 |
| 1 | CGACGAUCACUGGCUUCUU | AAGAAGCCAGUGAUCGUCG | | [595-613 | [357-375 | [342-360 |
| 2 | GCGUGUUGGAAACGUCAGA | UCUGACGUUUCCAACACGC | | [1036-1054 | [798-816 | [783-801 |
| 3 | CCAAACGUUUGCCUUCUCU | AGAGAAGGCAAACGUUUGG | | [323-341 | [67-85 | [67-85 |
| 4 | CAGAUCAAGAGGCUCCAAA | UUUGGAGCCUCUUGAUCUG | | [309-327 | [53-71 | [53-71 |
| 5 | GCAGAUCAAGAGGCUCCAA | UUGGAGCCUCUUGAUCUGC | | [308-326 | [52-70 | [52-70 |
| 6 | UGCUGUUCCUCUGAGUAAA | UUUACUCAGAGGAACAGCA | | [1475-1493] | — | — |
| 7 | GCUGUUGGAAACCUAUUCU | AGAAUAGGUUUCCAACAGC | | [536-554 | [298-316 | [283-301 |
| 8 | GGAGUUGGGACGAAUUCAG | CUGAAUUCGUCCCAACUCC | | [379-397 | [123-141 | [123-141 |
| 9 | UCCAAACGUUUGCCUUCUC | GAGAAGGCAAACGUUUGGA | | [322-340 | [66-84 | [66-84 |
| 10 | CUCCAAACGUUUGCCUUCU | AGAAGGCAAACGUUUGGAG | | [321-339 | [65-83 | [65-83 |
| 11 | AGCUGUUGGAAACCUAUUC | GAAUAGGUUUCCAACAGCU | | [535-553 | [297-315 | [282-300 |
| 12 | CGAAUUCAGGCAGCUCAAG | CUUGAGCUGCCUGAAUUCG | | [389-407 | [133-151 | [133-151 |
| 13 | ACGAAUUCAGGCAGCUCAA | UUGAGCUGCCUGAAUUCGU | | [388-406 | [132-150 | [132-150 |
| 14 | CAAGAAAGCUGCAAAGGAC | GUCCUUUGCAGCUUUCUUG | | [87-105] | — | — |
| 15 | CGUGUUGGAAACGUCAGAC | GUCUGACGUUUCCAACACG | | [1037-1055 | [799-817 | [784-802 |
| 16 | CUGUUGGAAACCUAUUCUC | GAGAAUAGGUUUCCAACAG | | [537-555 | [299-317 | [284-302 |
| 17 | GACGAAUUCAGGCAGCUCA | UGAGCUGCCUGAAUUCGUC | | [387-405 | [131-149 | [131-149 |
| 18 | GCUGUUCCUCUGAGUAAAG | CUUUACUCAGAGGAACAGC | | [1476-1494] | — | — |
| 19 | UGGUGCAGAUCAAGAGGCU | AGCCUCUUGAUCUGCACCA | | [304-322 | [48-66 | [48-66 |
| 20 | UUGAGGUGUUGCCAGGAUU | AAUCCUGGCAACACCUCAA | | [140-158] | — | — |
| 21 | GCAGCUGUUGGAAACCUAU | AUAGGUUUCCAACAGCUGC | | [533-551 | [295-313 | [280-298 |
| 22 | CCUCGCCCAUUUCAGGAAU | AUUCCUGAAAUGGGCGAGG | | [220-238] | — | — |
| 23 | GCCAUUUGCUGUUCCUCUG | CAGAGGAACAGCAAAUGGC | | [1469-1487] | — | — |
| 24 | UCAAGACCCUCAAGGAGAC | GUCUCCUUGAGGGUCUUGA | | [403-421 | [152-168] | [152-168] |
| | | | | | (17/17) | (17/17) |
| 25 | CCAUUUGCUGUUCCUCUGA | UCAGAGGAACAGCAAAUGG | | [1470-1488] | — | — |
| 26 | UCGCCCAUUUCAGGAAUCU | AGAUUCCUGAAAUGGGCGA | | [222-240] | — | — |
| 27 | CUCGCCCAUUUCAGGAAUC | GAUUCCUGAAAUGGGCGAG | | [221-239] | — | — |
| 28 | AGCUUCUCGAUGCACCACU | AGUGGUGCAUCGAGAAGCU | | [472-490 | [242-252] | [219-237 |
| | | | | | (11/11) | |
| | | | | | ORF | |
| 29 | AUACCCAGUUUCAGUGCAA | UUGCACUGAAACUGGGUAU | | [275-293 | [19-37 | [19-37 |
| 30 | CCGAUACCCAGUUUCAGUG | CACUGAAACUGGGUAUCGG | | [272-290 | [16-34 | [16-34 |
| 31 | AGGAAUCUGCAGCCUGGAA | UUCCAGGCUGCAGAUUCCU | | [233-251] | — | — |
| 32 | CGCCCAUUUCAGGAAUCUG | CAGAUUCCUGAAAUGGGCG | | [223-241] | — | — |
| 33 | AGACCCUCAAGGAGACCUU | AAGGUCUCCUUGAGGGUCU | | [406-424 | [153-171 | [153-171 |
| 34 | CCAUUUCAGGAAUCUGCAG | CUGCAGAUUCCUGAAAUGG | | [226-244] | — | — |
| 35 | CCCAUUUCAGGAAUCUGCA | UGCAGAUUCCUGAAAUGGG | | [225-243] | — | — |
| 36 | ACAGCAAGAAAGCUGCAAA | UUUGCAGCUUUCUUGCUGU | | [83-101] | — | — |
| 37 | CCCGAUACCCAGUUUCAGU | ACUGAAACUGGGUAUCGGG | | [271-289 | [15-33 | [15-33 |
| 38 | UGGAAACCUAUUCUCGGAG | CUCCGAGAAUAGGUUUCCA | | [541-559 | [303-321 | [288-306 |
| 39 | UCCUCGCCCAUUUCAGGAA | UUCCUGAAAUGGGCGAGGA | | [219-237] | — | — |
| 40 | CUUGAGGUGUUGCCAGGAU | AUCCUGGCAACACCUCAAG | | [139-157] | — | — |
| 41 | GCCCAUUUCAGGAAUCUGC | GCAGAUUCCUGAAAUGGGC | | [224-242] | — | — |
| 42 | CAGCAAGAAAGCUGCAAAG | CUUUGCAGCUUUCUUGCUG | | [84-102] | — | — |
| 43 | GGCUCCAAACGUUUGCCUU | AAGGCAAACGUUUGGAGCC | | [319-337 | [63-81 | [63-81 |
| 44 | UGCCAGGAUUCUAUCCCAG | CUGGGAUAGAAUCCUGGCA | | [149-167] | — | — |
| 45 | GGAAACCUAUUCUCGGAGG | CCUCCGAGAAUAGGUUUCC | | [542-560 | [304-322 | [289-307 |
| 46 | CAGCUGUUGGAAACCUAUU | AAUAGGUUUCCAACAGCUG | | [534-552 | [296-314 | [281-299 |
| 47 | GACAGCAAGAAAGCUGCAA | UUGCAGCUUUCUUGCUGUC | | [82-100] | — | — |
| 48 | UGCAGCUGUUGGAAACCUA | UAGGUUUCCAACAGCUGCA | | [532-550 | [294-312 | [279-297 |
| 49 | AGGCUCCAAACGUUUGCCU | AGGCAAACGUUUGGAGCCU | | [318-336 | [62-80 | [62-80 |
| 50 | GGACAGCAAGAAAGCUGCA | UGCAGCUUUCUUGCUGUCC | | [81-99] | — | — |
| 51 | CUGCAGCUGUUGGAAACCU | AGGUUUCCAACAGCUGCAG | | [531-549 | [293-311 | [278-296 |
| 52 | GGCCAUUUGCUGUUCCUCU | AGAGGAACAGCAAAUGGCC | | [1468-1486] | — | — |

TABLE A12
NOXO1 - 19-mer oligomer pairs NADPH oxidase organizer 1

| | | | | Human- | Human- | Human- |
|---|---|---|---|---|---|---|
| | | | Other | 34222190 | 41281827 | 41281810 |
| No. | Sense siRNA | AntiSense siRNA | Sp | ORF: 261-1373 | ORF: 5-1135 | ORF: 5-1120 |
| 1 | GCAGGAGUUGGGACGAAUU | AAUUCGUCCCAACUCCUGC | | [376-394] | [120-138] | [120-138] |
| 2 | CAAGAGGCUCCAAACGUUU | AAACGUUUGGAGCCUCUUG | | [314-332] | [58-76] | [58-76] |
| 3 | UCAAGAGGCUCCAAACGUU | AACGUUUGGAGCCUCUUGA | | [313-331] | [57-75] | [57-75] |
| 4 | AGAGGAGCAGCCUCUUUCU | AGAAAGAGGCUGCUCCUCU | | [680-698] | [442-460] | [427-445] |
| 5 | AGGAGUUGGGACGAAUUCA | UGAAUUCGUCCCAACUCCU | | [378-396] | [122-140] | [122-140] |
| 6 | UUGGAAACCUAUUCUCGGA | UCCGAGAAUAGGUUUCCAA | | [540-558] | [302-320] | [287-305] |
| 7 | GAAUUCAGGCAGCUCAAGA | UCUUGAGCUGCCUGAAUUC | | [390-408] | [134-152] | [134-152] |
| 8 | AGAUCAAGAGGCUCCAAAC | GUUUGGAGCCUCUUGAUCU | | [310-328] | [54-72] | [54-72] |
| 9 | GCGUUCUCCCAAAGCUUCU | AGAAGCUUUGGGAGAACGC | | [460-478] | [207-225] | [207-225] |
| 10 | GAUACCCAGUUUCAGUGCA | UGCACUGAAACUGGGUAUC | | [274-292] | [18-36] | [18-36] |
| 11 | UGCAGAUCAAGAGGCUCCA | UGGAGCCUCUUGAUCUGCA | | [307-325] | [51-69] | [51-69] |
| 12 | GUUGGAAACCUAUUCUCGG | CCGAGAAUAGGUUUCCAAC | | [539-557] | [301-319] | [286-304] |
| 13 | AAACGUUUGCCUUCUCUGU | ACAGAGAAGGCAAACGUUU | | [325-343] | [69-87] | [69-87] |
| 14 | GAGUUGGGACGAAUUCAGG | CCUGAAUUCGUCCCAACUC | | [380-398] | [124-142] | [124-142] |
| 15 | CAGGAGUUGGGACGAAUUC | GAAUUCGUCCCAACUCCUG | | [377-395] | [121-139] | [121-139] |
| 16 | GAUCAAGAGGCUCCAAACG | CGUUUGGAGCCUCUUGAUC | | [311-329] | [55-73] | [55-73] |
| 17 | GUUGGGACGAAUUCAGGCA | UGCCUGAAUUCGUCCCAAC | | [382-400] | [126-144] | [126-144] |
| 18 | UCUCCAUCCACAGUCUGGA | UCCAGACUGUGGAUGGAGA | | [715-733] | [477-495] | [462-480] |
| 19 | UACCCAGUUUCAGUGCAAG | CUUGCACUGAAACUGGGUA | | [276-294] | [20-38] | [20-38] |
| 20 | CAAACGUUUGCCUUCUCUG | CAGAGAAGGCAAACGUUUG | | [324-342] | [68-86] | [68-86] |
| 21 | ACCCAGUUUCAGUGCAAGG | CCUUGCACUGAAACUGGGU | | [277-295] | [21-39] | [21-39] |
| 22 | AUAGGCCUUUUCAGGCGCA | UGCGCCUGAAAAGGCCUAU | | [784-802] | [546-564] | [531-549] |
| 23 | CGUUCUCCCAAAGCUUCUC | GAGAAGCUUUGGGAGAACG | | [461-479] | [208-226] | [208-226] |
| 24 | AAGAGGCUCCAAACGUUUG | CAAACGUUUGGAGCCUCUU | | [315-333] | [59-77] | [59-77] |
| 25 | UGUUGGAAACCUAUUCUCG | CGAGAAUAGGUUUCCAACA | | [538-556] | [300-318] | [285-303] |
| 26 | CGAUACCCAGUUUCAGUGC | GCACUGAAACUGGGUAUCG | | [273-291] | [17-35] | [17-35] |
| 27 | AGAGGCUCCAAACGUUUGC | GCAAACGUUUGGAGCCUCU | | [316-334] | [60-78] | [60-78] |
| 28 | AUCAAGAGGCUCCAAACGU | ACGUUUGGAGCCUCUUGAU | | [312-330] | [56-74] | [56-74] |
| 29 | AAACCUAUUCUCGGAGGCU | AGCCUCCGAGAAUAGGUUU | | [544-562] | [306-324] | [291-309] |
| 30 | GCUCCAAACGUUUGCCUUC | GAAGGCAAACGUUUGGAGC | | [320-338] | [64-82] | [64-82] |
| 31 | UGUUGGAAACGUCAGACCG | CGGUCUGACGUUUCCAACA | | [1039-1057] | [801-819] | [786-804] |
| 32 | GAAACCUAUUCUCGGAGGC | GCCUCCGAGAAUAGGUUUC | | [543-561] | [305-323] | [290-308] |
| 33 | AACCUAUUCUCGGAGGCUG | CAGCCUCCGAGAAUAGGUU | | [545-563] | [307-325] | [292-310] |
| 34 | GUGUUGGAAACGUCAGACC | GGUCUGACGUUUCCAACAC | | [1038-1056] | [800-818] | [785-803] |
| 35 | AGUUGGGACGAAUUCAGGC | GCCUGAAUUCGUCCCAACU | | [381-399] | [125-143] | [125-143] |
| 36 | AACGUUUGCCUUCUCUGUG | CACAGAGAAGGCAAACGUU | | [326-344] | [70-88] | [70-88] |
| 37 | ACGUUUGCCUUCUCUGUGC | GCACAGAGAAGGCAAACGU | | [327-345] | [71-89] | [71-89] |
| 38 | AAGACCCUCAAGGAGACCU | AGGUCUCCUUGAGGGUCUU | | [405-423] | [152-170] | [152-170] |
| 39 | UUGGGACGAAUUCAGGCAG | CUGCCUGAAUUCGUCCCAA | | [383-401] | [127-145] | [127-145] |
| 40 | GUUCUCCCAAAGCUUCUCG | CGAGAAGCUUUGGGAGAAC | | [462-480] | [209-227] | [209-227] |
| 41 | UUUGCCUUCUCUGUGCGCU | AGCGCACAGAGAAGGCAAA | | [330-348] | [74-92] | [74-92] |

TABLE A13
NOXO2 19-mer oligomer pairs (NADPH oxidase organizer 2, NCF1)

| | | | | Human- |
|---|---|---|---|---|
| | | | Other | 115298671 |
| No. | Sense siRNA | AntiSense siRNA | Sp | ORF: 71-1243 |
| 1 | CCUGUACAUACGUGUUCUA | UAGAACACGUAUGUACAGG | | [1292-1310] |
| 2 | GGGCGAUCAAUCCAGAGAA | UUCUCUGGAUUGAUCGCCC | | [258-276 |
| 3 | GUACAUACGUGUUCUAUAG | CUAUAGAACACGUAUGUAC | | [1295-1313] |
| 4 | CCAUUGCCAACUACGAGAA | UUCUCGUAGUUGGCAAUGG | | [558-576 |
| 5 | ACAUACGUGUUCUAUAGAG | CUCUAUAGAACACGUAUGU | | [1297-1315] |
| 6 | CAAAAAAGCCAGAGACAUA | UAUGUCUCUGGCUUUUUUG | | [468-486 |
| 7 | ACAAAAAAGCCAGAGACAU | AUGUCUCUGGCUUUUUUGU | | [467-485 |
| 8 | GCCUGUACAUACGUGUUCU | AGAACACGUAUGUACAGGC | | [1291-1309] |
| 9 | CCGUCCAUGUACCUGCAAA | UUUGCAGGUACAUGGACGG | | [896-914 |
| 10 | CUGUACAUACGUGUUCUAU | AUAGAACACGUAUGUACAG | | [1293-1311] |
| 11 | UCAGAUGAAAGCAAAGCGA | UCGCUUUGCUUUCAUCUGA | | [658-676 |
| 12 | CGAUCAAUCCAGAGAACAG | CUGUUCUCUGGAUUGAUCG | | [261-279 |
| 13 | CGUCCAUGUACCUGCAAAA | UUUUGCAGGUACAUGGACG | | [897-915 |
| 14 | GUGGUUCUGUCAGAUGAAA | UUUCAUCUGACAGAACCAC | | [649-667 |
| 15 | GCCAACUACGAGAAGACCU | AGGUCUUCUCGUAGUUGGC | | [563-581 |
| 16 | ACAUACUUGAUGCCCAAAG | CUUUGGGCAUCAAGUAUGU | | [482-500 |
| 17 | CCAGAGACAUACUUGAUGC | GCAUCAAGUAUGUCUCUGG | | [476-494 |
| 18 | GGACAACCAGACAAAAAAG | CUUUUUUGUCUGGUUGUCC | | [457-475 |
| 19 | GCGAUCAAUCCAGAGAACA | UGUUCUCUGGAUUGAUCGC | | [260-278 |
| 20 | UGCCUGUACAUACGUGUUC | GAACACGUAUGUACAGGCA | | [1290-1308] |
| 21 | GCCAUUGCCAACUACGAGA | UCUCGUAGUUGGCAAUGGC | | [557-575 |
| 22 | AGCCAGAGACAUACUUGAU | AUCAAGUAUGUCUCUGGCU | | [474-492 |
| 23 | AAAAGCCAGAGACAUACUU | AAGUAUGUCUCUGGCUUUU | | [471-489 |
| 24 | GGUGGUUCUGUCAGAUGAA | UUCAUCUGACAGAACCACC | | [648-666 |
| 25 | UGUACAUGUUCCUGGUGAA | UUCACCAGGAACAUGUACA | GP | [144-162 |
| 26 | GUGCCUGUACAUACGUGUU | AACACGUAUGUACAGGCAC | | [1289-1307] |
| 27 | GCUACUUCCCGUCCAUGUA | UACAUGGACGGGAAGUAGC | | [888-906 |
| 28 | GUGUACAUGUUCCUGGUGA | UCACCAGGAACAUGUACAC | GP | [143-161 |
| 29 | CGUGCCUGUACAUACGUGU | ACACGUAUGUACAGGCACG | | [1288-1306] |
| 30 | UGGUGGGUCAUCAGGAAAG | CUUUCCUGAUGACCCACCA | | [857-875 |
| 31 | ACACCUUCAUCCGUCACAU | AUGUGACGGAUGAAGGUGU | | [78-96 |
| 32 | UGGUGGUUCUGUCAGAUGA | UCAUCUGACAGAACCACCA | | [647-665 |
| 33 | UGGUGGAGGUCGUAGAGAA | UUCUCUACGACCUCCACCA | | [615-633 |
| 34 | GUCGUAGAGAAGAGCGAGA | UCUCGCUCUUCUCUACGAC | | [623-641 |
| 35 | AGAGUACCGCGACAGACAU | AUGUCUGUCGCGGUACUCU | | [507-525 |
| 36 | ACGAGUUCCAUAAAACCUU | AAGGUUUUAUGGAACUCGU | | [213-231 |
| 37 | GGUUGGUGGUUCUGUCAGA | UCUGACAGAACCACCAACC | | [644-662 |
| 38 | GCAACAGCGUCCGUUUUCU | AGAAAACGGACGCUGUUGC | | [1047-1065 |
| 39 | GUUGGUGGUUCUGUCAGAU | AUCUGACAGAACCACCAAC | | [645-663 |
| 40 | UGGAGGUCGUAGAGAAGAG | CUCUUCUCUACGACCUCCA | | [618-636 |
| 41 | CCAGACAAAAAAGCCAGAG | CUCUGGCUUUUUUGUCUGG | | [463-481 |
| 42 | CCACGGACAACCAGACAAA | UUUGUCUGGUUGUCCGUGG | | [453-471 |
| 43 | AUCUACGAGUUCCAUAAAA | UUUUAUGGAACUCGUAGAU | Rat, Ms | [209-227 |
| 44 | UGUCGGAGAAGGUGGUCUA | UAGACCACCUUCUCCGACA | Rat, Ms | [174-192 |
| 45 | CUUCCUCUUUCCAGUGCAU | AUGCACUGGAAAGAGGAAG | | [4-22] |
| 46 | AGGUCAUUCACAAGCUCCU | AGGAGCUUGUGAAUGACCU | | [831-849 |
| 47 | CAGACAAAAAAGCCAGAGA | UCUCUGGCUUUUUUGUCUG | | [464-482 |
| 48 | CAGCUCCCAAGUGGUUUGA | UCAAACCACUUGGGAGCUG | | [297-315 |
| 49 | GCCAGCACUAUGUGUACAU | AUGUACACAUAGUGCUGGC | Ms | [132-150 |
| 50 | CGGACAACCAGACAAAAAA | UUUUUUGUCUGGUUGUCCG | | [456-474 |
| 51 | GAGUUCCAUAAAACCUUAA | UUAAGGUUUUAUGGAACUC | | [215-233 |
| 52 | AGACAAAAAAGCCAGAGAC | GUCUCUGGCUUUUUUGUCU | | [465-483 |
| 53 | ACCAGACAAAAAAGCCAGA | UCUGGCUUUUUUGUCUGGU | | [462-480 |
| 54 | ACGGACAACCAGACAAAAA | UUUUUGUCUGGUUGUCCGU | | [455-473 |
| 55 | UCAGGAAAGACGACGUCAC | GUGACGUCGUCUUUCCUGA | | [867-885 |
| 56 | CCAACUACGAGAAGACCUC | GAGGUCUUCUCGUAGUUGG | | [564-582 |
| 57 | AGACAUACUUGAUGCCCAA | UUGGGCAUCAAGUAUGUCU | | [480-498 |
| 58 | GGCACACUUACCGAGUACU | AGUACUCGGUAAGUGUGCC | | [344-362 |
| 59 | CCUCUUUCCAGUGCAUUUA | UAAAUGCACUGGAAAGAGG | | [7-25] |
| 60 | UUCUGUCAGAUGAAAGCAA | UUGCUUUCAUCUGACAGAA | | [653-671 |
| 61 | CACGGACAACCAGACAAAA | UUUUGUCUGGUUGUCCGUG | | [454-472 |
| 62 | CGACUUCCUCUUUCCAGUG | CACUGGAAAGAGGAAGUCG | | [1-19] |
| 63 | UCAAUCCAGAGAACAGGAU | AUCCUGUUCUCUGGAUUGA | | [264-282 |
| 64 | ACCUCCUCGACUUCUUCAA | UUGAAGAAGUCGAGGAGGU | | [408-426 |
| 65 | CUCUUUCCAGUGCAUUUAA | UUAAAUGCACUGGAAAGAG | | [8-26] |
| 66 | UCUGUCAGAUGAAAGCAAA | UUUGCUUUCAUCUGACAGA | | [654-672 |
| 67 | CCCAAAGAUGGCAAGAGUA | UACUCUUGCCAUCUUUGGG | | [494-512 |
| 68 | UGAAAUGGCAGGACCUGUC | GACAGGUCCUGCCAUUUCA | | [159-177 |
| 69 | AGCACUAUGUGUACAUGUU | AACAUGUACACAUAGUGCU | Ms | [135-153 |
| 70 | CCAGCACUAUGUGUACAUG | CAUGUACACAUAGUGCUGG | Ms | [133-151 |
| 71 | UGGGCUUUGAGAAGCGCUU | AAGCGCUUCUCAAAGCCCA | | [105-123 |
| 72 | UGAUGCCCAAAGAUGGCAA | UUGCCAUCUUUGGGCAUCA | | [489-507 |
| 73 | CAACCAGACAAAAAAGCCA | UGGCUUUUUUGUCUGGUUG | | [460-478 |
| 74 | CCAGAGAACAGGAUCAUCC | GGAUGAUCCUGUUCUCUGG | | [269-287 |
| 75 | GCAAAAGUCAGGGCAAGAC | GUCUUGCCCUGACUUUUGC | | [910-928 |
| 76 | GCUUUGAGAAGCGCUUCGU | ACGAAGCGCUUCUCAAAGC | | [108-126 |
| 77 | AGCCCAACUAUGCAGGUGA | UCACCUGCAUAGUUGGGCU | | [738-756 |
| 78 | GAGACAUACUUGAUGCCCA | UGGGCAUCAAGUAUGUCUC | | [479-497 |
| 79 | UCCUCGACUUCUUCAAGGU | ACCUUGAAGAAGUCGAGGA | | [411-429 |
| 80 | UCCUCUUUCCAGUGCAUUU | AAAUGCACUGGAAAGAGGA | | [6-24] |
| 81 | GCACUAUGUGUACAUGUUC | GAACAUGUACACAUAGUGC | Ms | [136-154 |
| 82 | UCAUCAGGAAAGACGACGU | ACGUCGUCUUUCCUGAUGA | | [864-882 |
| 83 | CAACUAUGCAGGUGAGCCA | UGGCUCACCUGCAUAGUUG | | [742-760 |
| 84 | GACAUACUUGAUGCCCAAA | UUUGGGCAUCAAGUAUGUC | | [481-499 |
| 85 | AUCCAGAGAACAGGAUCAU | AUGAUCCUGUUCUCUGGAU | | [267-285 |
| 86 | UGCCCAAAGAUGGCAAGAG | CUCUUGCCAUCUUUGGGCA | | [492-510 |
| 87 | CCAGUGCAUUUAAGGCGCA | UGCGCCUUAAAUGCACUGG | | [14-32] |
| 88 | CCUGCAAAAGUCAGGGCAA | UUGCCCUGACUUUUGCAGG | | [907-925 |
| 89 | GGGUCAUCAGGAAAGACGA | UCGUCUUUCCUGAUGACCC | | [861-879 |
| 90 | CUGCAAAAGUCAGGGCAAG | CUUGCCCUGACUUUUGCAG | | [908-926 |
| 91 | AGACCCUGAGCCCAACUAU | AUAGUUGGGCUCAGGGUCU | | [730-748 |
| 92 | AGCCAGCACUAUGUGUACA | UGUACACAUAGUGCUGGCU | Ms | [131-149 |
| 93 | CUAUGCAGGUGAGCCAUAC | GUAUGGCUCACCUGCAUAG | | [745-763 |
| 94 | UCAUUCACAAGCUCCUGGA | UCCAGGAGCUUGUGAAUGA | | [834-852 |
| 95 | UGAGGUCAUUCACAAGCUC | GAGCUUGUGAAUGACCUCA | | [829-847 |
| 96 | GACACCUUCAUCCGUCACA | UGUGACGGAUGAAGGUGUC | | [77-95 |

TABLE A14
NOXO2 19-mer oligomer pairs (NADPH oxidase organizer 2, NCF1)

| | | | | Human-115298671 |
|---|---|---|---|---|
| No. | Sense siRNA | AntiSense siRNA | Other Sp | ORF: 71-1243 |
| 1 | GAUCUACGAGUUCCAUAAA | UUUAUGGAACUCGUAGAUC | Rat, Ms | [208-226] |
| 2 | CCGAGAUCUACGAGUUCCA | UGGAACUCGUAGAUCUCGG | Rat, Ms | [204-222] |
| 3 | CCAUCAUCCUGCAGACGUA | UACGUCUGCAGGAUGAUGG | | [534-552] |
| 4 | AGAUCUACGAGUUCCAUAA | UUAUGGAACUCGUAGAUCU | Rat, Ms | [207-225] |
| 5 | CAGGAAAGACGACGUCACA | UGUGACGUCGUCUUUCCUG | | [868-886] |
| 6 | CAUAAAACCUUAAAAGAAA | UUUCUUUUAAGGUUUUAUG | | [221-239] |
| 7 | CGAGUUCCAUAAAACCUUA | UAAGGUUUUAUGGAACUCG | | [214-232] |
| 8 | CCAUAAAACCUUAAAAGAA | UUCUUUUAAGGUUUUAUGG | | [220-238] |
| 9 | CGAGAUCUACGAGUUCCAU | AUGGAACUCGUAGAUCUCG | Rat, Ms | [205-223] |
| 10 | GGUGGGUCAUCAGGAAAGA | UCUUUCCUGAUGACCCACC | | [858-876] |
| 11 | CAUACUUGAUGCCCAAAGA | UCUUUGGGCAUCAAGUAUG | | [483-501] |
| 12 | GUUCCAUAAAACCUUAAAA | UUUUAAGGUUUUAUGGAAC | | [217-235] |
| 13 | GCUUCACCGAGAUCUACGA | UCGUAGAUCUCGGUGAAGC | | [198-216] |
| 14 | GAGAUCUACGAGUUCCAUA | UAUGGAACUCGUAGAUCUC | Rat, Ms | [206-224] |
| 15 | CUGUUGAGGUCAUUCACAA | UUGUGAAUGACCUCAACAG | | [825-843] |
| 16 | AAGAAAUGUUCCCUAUUGA | UCAAUAGGGAACAUUUCUU | | [234-252] |
| 17 | CUUUGAGAAGCGCUUCGUA | UACGAAGCGCUUCUCAAAG | | [109-127] |
| 18 | AGGGCACACUUACCGAGUA | UACUCGGUAAGUGUGCCCU | | [342-360] |
| 19 | UGUACAUACGUGUUCUAUA | UAUAGAACACGUAUGUACA | | [1294-1312] |
| 20 | CUGGUGGGUCAUCAGGAAA | UUUCCUGAUGACCCACCAG | | [856-874] |
| 21 | CAUGUACCUGCAAAAGUCA | UGACUUUUGCAGGUACAUG | | [901-919] |
| 22 | AGUUCCAUAAAACCUUAAA | UUUAAGGUUUUAUGGAACU | | [216-234] |
| 23 | CCAUGUACCUGCAAAAGUC | GACUUUUGCAGGUACAUGG | | [900-918] |
| 24 | GGCGAUCAAUCCAGAGAAC | GUUCUCUGGAUUGAUCGCC | | [259-277] |
| 25 | CUGUCAGAUGAAAGCAAAG | CUUUGCUUUCAUCUGACAG | | [655-673] |
| 26 | GUACAUGUUCCUGGUGAAA | UUUCACCAGGAACAUGUAC | | [145-163] |
| 27 | AAAGCAAAGCGAGGCUGGA | UCCAGCCUCGCUUUGCUUU | | [665-683] |
| 28 | AAGAGUACCGCGACAGACA | UGUCUGUCGCGGUACUCUU | | [506-524] |
| 29 | AGGUCGUAGAGAAGAGCGA | UCGCUCUUCUCUACGACCU | | [621-639] |
| 30 | AAGACGACGUCACAGGCUA | UAGCCUGUGACGUCGUCUU | | [873-891] |
| 31 | GGUCAUCAGGAAAGACGAC | GUCGUCUUUCCUGAUGACC | | [862-880] |
| 32 | UCCAUAAAACCUUAAAAGA | UCUUUUAAGGUUUUAUGGA | | [219-237] |
| 33 | GCUGUUGAGGUCAUUCACA | UGUGAAUGACCUCAACAGC | | [824-842] |
| 34 | ACAUGUUCCUGGUGAAAUG | CAUUUCACCAGGAACAUGU | | [147-165] |
| 35 | GUGGAGGUCGUAGAGAAGA | UCUUCUCUACGACCUCCAC | | [617-635] |
| 36 | UGCAAAAGUCAGGGCAAGA | UCUUGCCCUGACUUUUGCA | | [909-927] |
| 37 | UCACCGAGAUCUACGAGUU | AACUCGUAGAUCUCGGUGA | Rat, Ms | [201-219] |
| 38 | UAAAAGAAAUGUUCCCUAU | AUAGGGAACAUUUCUUUUA | | [231-249] |
| 39 | CAGAGAACAGGAUCAUCCC | GGGAUGAUCCUGUUCUCUG | | [270-288] |
| 40 | AGAAAUGUUCCCUAUUGAG | CUCAAUAGGGAACAUUUCU | | [235-253] |
| 41 | AAACCUUAAAAGAAAUGUU | AACAUUUCUUUUAAGGUUU | | [225-243] |
| 42 | AGAUGAAAGCAAAGCGAGG | CCUCGCUUUGCUUUCAUCU | | [660-678] |
| 43 | CACCGAGAUCUACGAGUUC | GAACUCGUAGAUCUCGGUG | Rat, Ms | [202-220] |
| 44 | CAGAUGAAAGCAAAGCGAG | CUCGCUUUGCUUUCAUCUG | | [659-677] |
| 45 | CAUCAAGGCCUACACUGCU | AGCAGUGUAGGCCUUGAUG | | [769-787] |
| 46 | CUACGAGUUCCAUAAAACC | GGUUUUAUGGAACUCGUAG | | [211-229] |
| 47 | GGUUCUGUCAGAUGAAAGC | GCUUUCAUCUGACAGAACC | | [651-669] |
| 48 | AAGCAAAGCGAGGCUGGAU | AUCCAGCCUCGCUUUGCUU | | [666-684] |
| 49 | AAUCCAGAGAACAGGAUCA | UGAUCCUGUUCUCUGGAUU | | [266-284] |
| 50 | AAAAGAAAUGUUCCCUAUU | AAUAGGGAACAUUUCUUUU | | [232-250] |
| 51 | CACCUCCUCGACUUCUUCA | UGAAGAAGUCGAGGAGGUG | | [407-425] |
| 52 | AAGCUGUUGAGGUCAUUCA | UGAAUGACCUCAACAGCUU | | [822-840] |
| 53 | AUACUUGAUGCCCAAAGAU | AUCUUUGGGCAUCAAGUAU | | [484-502] |
| 54 | GUUCUGUCAGAUGAAAGCA | UGCUUUCAUCUGACAGAAC | | [652-670] |
| 55 | UUUAAGGCGCAGCCUGGAA | UUCCAGGCUGCGCCUUAAA | | [22-40] |
| 56 | AAUGUUCCCUAUUGAGGCA | UGCCUCAAUAGGGAACAUU | | [238-256] |
| 57 | AGCUGUUGAGGUCAUUCAC | GUGAAUGACCUCAACAGCU | | [823-841] |
| 58 | CCUCCUCGACUUCUUCAAG | CUUGAAGAAGUCGAGGAGG | | [409-427] |
| 59 | ACAGCGUCCGUUUUCUGCA | UGCAGAAAACGGACGCUGU | | [1050-1068] |
| 60 | AUCAAUCCAGAGAACAGGA | UCCUGUUCUCUGGAUUGAU | | [263-281] |
| 61 | UACAUACGUGUUCUAUAGA | UCUAUAGAACACGUAUGUA | | [1296-1314] |
| 62 | GUGAAGCUGUUGAGGUCAU | AUGACCUCAACAGCUUCAC | | [819-837] |
| 63 | UCUACGAGUUCCAUAAAAC | GUUUUAUGGAACUCGUAGA | | [210-228] |
| 64 | GCACACUUACCGAGUACUG | CAGUACUCGGUAAGUGUGC | | [345-363] |
| 65 | CGUGUUCUAUAGAGCCUGG | CCAGGCUCUAUAGAACACG | | [1302-1320] |
| 66 | AUUUAAGGCGCAGCCUGGA | UCCAGGCUGCGCCUUAAAU | | [21-39] |
| 67 | UGGUUCUGUCAGAUGAAAG | CUUUCAUCUGACAGAACCA | | [650-668] |
| 68 | UCGACUUCUUCAAGGUGCG | CGCACCUUGAAGAAGUCGA | | [414-432] |
| 69 | UUAAAAGAAAUGUUCCCUA | UAGGGAACAUUUCUUUUAA | | [230-248] |
| 70 | GGUGAAGCUGUUGAGGUCA | UGACCUCAACAGCUUCACC | | [818-836] |
| 71 | AAAAGUCAGGGCAAGACGU | ACGUCUUGCCCUGACUUUU | | [912-930] |
| 72 | UCGAGGGUGAAGCUGUUGA | UCAACAGCUUCACCCUCGA | | [813-831] |
| 73 | CCUCGACUUCUUCAAGGUG | CACCUUGAAGAAGUCGAGG | | [412-430] |
| 74 | UGAAGCUGUUGAGGUCAUU | AAUGACCUCAACAGCUUCA | | [820-838] |
| 75 | ACGACGUCACAGGCUACUU | AAGUAGCCUGUGACGUCGU | | [876-894] |
| 76 | AAGACCCUGAGCCCAACUA | UAGUUGGGCUCAGGGUCUU | | [729-747] |
| 77 | UGUUGAGGUCAUUCACAAG | CUUGUGAAUGACCUCAACA | | [826-844] |
| 78 | AAAGAAAUGUUCCCUAUUG | CAAUAGGGAACAUUUCUUU | | [233-251] |
| 79 | AAGUCAGGGCAAGACGUGU | ACACGUCUUGCCCUGACUU | | [914-932] |
| 80 | GUGGGUCAUCAGGAAAGAC | GUCUUUCCUGAUGACCCAC | | [859-877] |
| 81 | CACACUUACCGAGUACUGC | GCAGUACUCGGUAAGUGUG | | [346-364] |
| 82 | CAAAAGUCAGGGCAAGACG | CGUCUUGCCCUGACUUUUG | | [911-929] |
| 83 | AGGAAAGACGACGUCACAG | CUGUGACGUCGUCUUUCCU | | [869-887] |
| 84 | ACUUCCUCUUUCCAGUGCA | UGCACUGGAAAGAGGAAGU | | [3-21] |
| 85 | AGGGUGAAGCUGUUGAGGU | ACCUCAACAGCUUCACCCU | | [816-834] |
| 86 | GUCCAUGUACCUGCAAAAG | CUUUUGCAGGUACAUGGAC | | [898-916] |
| 87 | GACAACCAGACAAAAAAGC | GCUUUUUUGUCUGGUUGUC | | [458-476] |
| 88 | CAACAGCGUCCGUUUUCUG | CAGAAAACGGACGCUGUUG | | [1048-1066] |
| 89 | GAUCAAUCCAGAGAACAGG | CCUGUUCUCUGGAUUGAUC | | [262-280] |
| 90 | UCCAUGUACCUGCAAAAGU | ACUUUUGCAGGUACAUGGA | | [899-917] |
| 91 | ACUUGAUGCCCAAAGAUGG | CCAUCUUUGGGCAUCAAGU | | [486-504] |
| 92 | CUACUUCCCGUCCAUGUAC | GUACAUGGACGGGAAGUAG | | [889-907] |
| 93 | GUCAGAUGAAAGCAAAGCG | CGCUUUGCUUUCAUCUGAC | | [657-675] |
| 94 | UGAGCCCAACUAUGCAGGU | ACCUGCAUAGUUGGGCUCA | | [736-754] |
| 95 | CAUCAGGAAAGACGACGUC | GACGUCGUCUUUCCUGAUG | | [865-883] |
| 96 | UACGAGUUCCAUAAAACCU | AGGUUUUAUGGAACUCGUA | | [212-230] |
| 97 | CCUUAAAAGAAAUGUUCCC | GGGAACAUUUCUUUUAAGG | | [228-246] |
| 98 | AUCAGGAAAGACGACGUCA | UGACGUCGUCUUUCCUGAU | | [866-884] |
| 99 | CAGUGCAUUUAAGGCGCAG | CUGCGCCUUAAAUGCACUG | | [15-33] |
| 100 | UUCCAUAAAACCUUAAAAG | CUUUUAAGGUUUUAUGGAA | | [218-236] |
| 101 | UCUUUCCAGUGCAUUUAAG | CUUAAAUGCACUGGAAAGA | | [9-27] |
| 102 | CUUCACCGAGAUCUACGAG | CUCGUAGAUCUCGGUGAAG | | [199-217] |
| 103 | CAUCAUCCUGCAGACGUAC | GUACGUCUGCAGGAUGAUG | | [535-553] |
| 104 | ACAACCAGACAAAAAAGCC | GGCUUUUUUGUCUGGUUGU | | [459-477] |
| 105 | ACCUGCAAAAGUCAGGGCA | UGCCCUGACUUUUGCAGGU | | [906-924] |
| 106 | CACCUUCAUCCGUCACAUC | GAUGUGACGGAUGAAGGUG | | [79-97] |
| 107 | CAUACGUGUUCUAUAGAGC | GCUCUAUAGAACACGUAUG | | [1298-1316] |
| 108 | AAAGACGACGUCACAGGCU | AGCCUGUGACGUCGUCUUU | | [872-890] |
| 109 | ACUUCCCGUCCAUGUACCU | AGGUACAUGGACGGGAAGU | | [891-909] |
| 110 | AUGAAAGCAAAGCGAGGCU | AGCCUCGCUUUGCUUUCAU | | [662-680] |
| 111 | CAUUCACAAGCUCCUGGAC | GUCCAGGAGCUUGUGAAUG | | [835-853] |
| 112 | GAAAUGUUCCCUAUUGAGG | CCUCAAUAGGGAACAUUUC | | [236-254] |
| 113 | ACACUUACCGAGUACUGCG | CGCAGUACUCGGUAAGUGU | | [347-365] |
| 114 | CAGAGACAUACUUGAUGCC | GGCAUCAAGUAUGUCUCUG | | [477-495] |
| 115 | CAAUCCAGAGAACAGGAUC | GAUCCUGUUCUCUGGAUUG | | [265-283] |
| 116 | AGUACCGCGACAGACAUCA | UGAUGUCUGUCGCGGUACU | | [509-527] |
| 117 | CAUGUUCCUGGUGAAAUGG | CCAUUUCACCAGGAACAUG | | [148-166] |
| 118 | UACGUGUUCUAUAGAGCCU | AGGCUCUAUAGAACACGUA | | [1300-1318] |
| 119 | UUGAGGUCAUUCACAAGCU | AGCUUGUGAAUGACCUCAA | | [828-846] |
| 120 | CUCCUCGACUUCUUCAAGG | CCUUGAAGAAGUCGAGGAG | | [410-428] |
| 121 | AAAUGUUCCCUAUUGAGGC | GCCUCAAUAGGGAACAUUU | | [237-255] |
| 122 | CUUUCCAGUGCAUUUAAGG | CCUUAAAUGCACUGGAAAG | | [10-28] |
| 123 | UACAUGUUCCUGGUGAAAU | AUUUCACCAGGAACAUGUA | | [146-164] |
| 124 | CUCGACUUCUUCAAGGUGC | GCACCUUGAAGAAGUCGAG | | [413-431] |
| 125 | UUUGAGAAGCGCUUCGUAC | GUACGAAGCGCUUCUCAAA | | [110-128] |
| 126 | AACCUUAAAAGAAAUGUUC | GAACAUUUCUUUUAAGGUU | | [226-244] |
| 127 | AAAGUCAGGGCAAGACGUG | CACGUCUUGCCCUGACUUU | | [913-931] |
| 128 | GAUGAAAGCAAAGCGAGGC | GCCUCGCUUUGCUUUCAUC | | [661-679] |
| 129 | GAAGCUGUUGAGGUCAUUC | GAAUGACCUCAACAGCUUC | | [821-839] |
| 130 | CAACUACGAGAAGACCUCG | CGAGGUCUUCUCGUAGUUG | | [565-583] |
| 131 | UGCAUUUAAGGCGCAGCCU | AGGCUGCGCCUUAAAUGCA | | [18-36] |
| 132 | AUGUACCUGCAAAAGUCAG | CUGACUUUUGCAGGUACAU | | [902-920] |
| 133 | ACCGAGAUCUACGAGUUCC | GGAACUCGUAGAUCUCGGU | Rat, Ms | [203-221] |
| 134 | GGUCAUUCACAAGCUCCUG | CAGGAGCUUGUGAAUGACC | | [832-850] |
| 135 | CUUAAAAGAAAUGUUCCCU | AGGGAACAUUUCUUUUAAG | | [229-247] |
| 136 | UUCACCGAGAUCUACGAGU | ACUCGUAGAUCUCGGUGAA | Rat, Ms | [200-218] |
| 137 | ACCUUAAAAGAAAUGUUCC | GGAACAUUUCUUUUAAGGU | | [227-245] |
| 138 | UCCAGAGAACAGGAUCAUC | GAUGAUCCUGUUCUCUGGA | | [268-286] |
| 139 | UACUUGAUGCCCAAAGAUG | CAUCUUUGGGCAUCAAGUA | | [485-503] |
| 140 | UCGUAGAGAAGAGCGAGAG | CUCUCGCUCUUCUCUACGA | | [624-642] |
| 141 | UGGGUCAUCAGGAAAGACG | CGUCUUUCCUGAUGACCCA | | [860-878] |
| 142 | AAAACCUUAAAAGAAAUGU | ACAUUUCUUUUAAGGUUUU | | [224-242] |
| 143 | UCAAGGCCUACACUGCUGU | ACAGCAGUGUAGGCCUUGA | | [771-789] |
| 144 | GUACCUGCAAAAGUCAGGG | CCCUGACUUUUGCAGGUAC | | [904-922] |
| 145 | UUGAGAAGCGCUUCGUACC | GGUACGAAGCGCUUCUCAA | | [111-129] |
| 146 | ACGUGUUCUAUAGAGCCUG | CAGGCUCUAUAGAACACGU | | [1301-1319] |
| 147 | AGCUCCCAAGUGGUUUGAC | GUCAAACCACUUGGGAGCU | | [298-316] |
| 148 | UGUACCUGCAAAAGUCAGG | CCUGACUUUUGCAGGUACA | | [903-921] |
| 149 | AUACGUGUUCUAUAGAGCC | GGCUCUAUAGAACACGUAU | | [1299-1317] |
| 150 | UGUCAGAUGAAAGCAAAGC | GCUUUGCUUUCAUCUGACA | | [656-674] |
| 151 | AUCAAGGCCUACACUGCUG | CAGCAGUGUAGGCCUUGAU | | [770-788] |
| 152 | UGUUCCCUAUUGAGGCAGG | CCUGCCUCAAUAGGGAACA | | [240-258] |
| 153 | UACUUCCCGUCCAUGUACC | GGUACAUGGACGGGAAGUA | | [890-908] |
| 154 | UAAAACCUUAAAAGAAAUG | CAUUUCUUUUAAGGUUUUA | | [223-241] |
| 155 | GUCAUCAGGAAAGACGACG | CGUCGUCUUUCCUGAUGAC | | [863-881] |
| 156 | UGAAAGCAAAGCGAGGCUG | CAGCCUCGCUUUGCUUUCA | | [663-681] |
| 157 | AGUGCAUUUAAGGCGCAGC | GCUGCGCCUUAAAUGCACU | | [16-34] |
| 158 | AACAGCGUCCGUUUUCUGC | GCAGAAAACGGACGCUGUU | | [1049-1067] |
| 159 | UUGGUGGUUCUGUCAGAUG | CAUCUGACAGAACCACCAA | | [646-664] |
| 160 | AACUACGAGAAGACCUCGG | CCGAGGUCUUCUCGUAGUU | | [566-584] |
| 161 | ACCUUCAUCCGUCACAUCG | CGAUGUGACGGAUGAAGGU | | [80-98] |
| 162 | GUUGAGGUCAUUCACAAGC | GCUUGUGAAUGACCUCAAC | | [827-845] |
| 163 | UUCCUCUUUCCAGUGCAUU | AAUGCACUGGAAAGAGGAA | | [5-23] |
| 164 | UUUCCAGUGCAUUUAAGGC | GCCUUAAAUGCACUGGAAA | | [11-29] |
| 165 | UCCAGUGCAUUUAAGGCGC | GCGCCUUAAAUGCACUGGA | | [13-31] |
| 166 | GAGGUCAUUCACAAGCUCC | GGAGCUUGUGAAUGACCUC | | [830-848] |
| 167 | GACUUCCUCUUUCCAGUGC | GCACUGGAAAGAGGAAGUC | | [2-20] |
| 168 | UACCUGCAAAAGUCAGGGC | GCCCUGACUUUUGCAGGUA | | [905-923] |
| 169 | AGAGACAUACUUGAUGCCC | GGGCAUCAAGUAUGUCUCU | | [478-496] |
| 170 | GUCAUUCACAAGCUCCUGG | CCAGGAGCUUGUGAAUGAC | | [833-851] |
| 171 | AUCAUCCUGCAGACGUACC | GGUACGUCUGCAGGAUGAU | | [536-554] |
| 172 | UUCCAGUGCAUUUAAGGCG | CGCCUUAAAUGCACUGGAA | | [12-30] |
| 173 | AUUCACAAGCUCCUGGACG | CGUCCAGGAGCUUGUGAAU | | [836-854] |
| 174 | AUGUUCCCUAUUGAGGCAG | CUGCCUCAAUAGGGAACAU | | [239-257] |

TABLE A15
NOXA1 19-mer oligomer pairs

| | | | | Human- |
|---|---|---|---|---|
| | | | | 41393186 |
| No. | Sense siRNA | AntiSense siRNA | Other Sp | ORF: 136-1587 |
| 1 | GCCCUAAUGAUGCUGUGUC | GACACAGCAUCAUUAGGGC | | [1581-1599 |
| 2 | GGAGAUCAGCCCUAAUGAU | AUCAUUAGGGCUGAUCUCC | | [1573-1591 |
| 3 | GGGAGGUGCUACACAAUGU | ACAUUGUGUAGCACCUCCC | Chmp | [500-518 |
| 4 | AGGAGGCUCUGUCUGACUU | AAGUCAGACAGAGCCUCCU | | [401-419 |
| 5 | CUAAUGAUGCUGUGUCCAU | AUGGACACAGCAUCAUUAG | | [1584-1602 |
| 6 | CCCUAAUGAUGCUGUGUCC | GGACACAGCAUCAUUAGGG | | [1582-1600 |
| 7 | GGAGCAAGUUGGCAAACAG | CUGUUUGCCAACUUGCUCC | Chmp | [951-969 |
| 8 | GGAGGUGCUACACAAUGUG | CACAUUGUGUAGCACCUCC | Chmp | [501-519 |
| 9 | AUGAUGCUGUGUCCAUGAU | AUCAUGGACACAGCAUCAU | | [1587-1605] |
| 10 | GAGGCUCUGUCUGACUUCU | AGAAGUCAGACAGAGCCUC | | [403-421 |
| 11 | CUGGGAGGUGCUACACAAU | AUUGUGUAGCACCUCCCAG | | [498-516 |
| 12 | UGGAGCAAGUUGGCAAACA | UGUUUGCCAACUUGCUCCA | Chmp | [950-968 |
| 13 | GGUGGAGCAAGUUGGCAAA | UUUGCCAACUUGCUCCACC | Chmp | [948-966 |
| 14 | GUGUCCAUGAUGCUUUUAA | UUAAAAGCAUCAUGGACAC | Chmp | [1595-1613] |
| 15 | UGUCCAUGAUGCUUUUAAU | AUUAAAAGCAUCAUGGACA | Chmp | [1596-1614] |
| 16 | GUCCAUGAUGCUUUUAAUA | UAUUAAAAGCAUCAUGGAC | Chmp | [1597-1615] |
| 17 | AGGUGGAGCAAGUUGGCAA | UUGCCAACUUGCUCCACCU | Chmp | [947-965 |
| 18 | CUGUGUCCAUGAUGCUUUU | AAAAGCAUCAUGGACACAG | Chmp | [1593-1611] |
| 19 | GCUGUGUCCAUGAUGCUUU | AAAGCAUCAUGGACACAGC | Chmp | [1592-1610] |
| 20 | UGACCAAGGACACCUGCAU | AUGCAGGUGUCCUUGGUCA | Rat | [329-347 |
| 21 | GCAUUUGACCAAGCCGUGA | UCACGGCUUGGUCAAAUGC | | [313-331 |
| 22 | CAGCCCUAAUGAUGCUGUG | CACAGCAUCAUUAGGGCUG | | [1579-1597 |
| 23 | UCAGCCCUAAUGAUGCUGU | ACAGCAUCAUUAGGGCUGA | | [1578-1596 |
| 24 | GGGAGAUCAGCCCUAAUGA | UCAUUAGGGCUGAUCUCCC | | [1572-1590 |
| 25 | ACUUCCAGCUGGCAAGGUU | AACCUUGCCAGCUGGAAGU | | [380-398 |
| 26 | AGGGAGAUCAGCCCUAAUG | CAUUAGGGCUGAUCUCCCU | | [1571-1589 |
| 27 | UGGGCAACUCAGUUACCUA | UAGGUAACUGAGUUGCCCA | Chmp | [1188-1206 |
| 28 | GGGCAACUCAGUUACCUAG | CUAGGUAACUGAGUUGCCC | Chmp | [1189-1207 |
| 29 | AGCUUGGGCAACUCAGUUA | UAACUGAGUUGCCCAAGCU | Chmp | [1184-1202 |
| 30 | CCAGGUCCCUAAUCAUGGA | UCCAUGAUUAGGGACCUGG | Chmp | [830-848 |
| 31 | CAGGGAGAUCAGCCCUAAU | AUUAGGGCUGAUCUCCCUG | | [1570-1588 |
| 32 | GCAACUCAGUUACCUAGCC | GGCUAGGUAACUGAGUUGC | Chmp | [1191-1209 |
| 33 | CAUGAUGCCAGGUCCCUAA | UUAGGGACCUGGCAUCAUG | Chmp | [823-841 |
| 34 | UGCUACACAAUGUGGCGUC | GACGCCACAUUGUGUAGCA | Chmp | [506-524 |
| 35 | GCUUGGGCAACUCAGUUAC | GUAACUGAGUUGCCCAAGC | Chmp | [1185-1203 |
| 36 | GCAAGUUGGCAAACAGGCU | AGCCUGUUUGCCAACUUGC | Chmp | [954-972 |
| 37 | GGUCCCUAAUCAUGGACUC | GAGUCCAUGAUUAGGGACC | Chmp | [833-851 |
| 38 | AGGUCCCUAAUCAUGGACU | AGUCCAUGAUUAGGGACCU | Chmp | [832-850 |

TABLE A16
NOXA1 - 19-mer oligomer pairs NADPH oxidase activator 1

| | | | Other | Human-41393186 |
|---|---|---|---|---|
| No. | Sense siRNA | AntiSense siRNA | Sp | ORF: 136-1587 |
| 1 | CCAUGAUGCUUUUAAUAAA | UUUAUUAAAAGCAUCAUGG | Chmp | [1599-1617](19/19) |
| 2 | CAUGAUGCUUUUAAUAAAA | UUUUAUUAAAAGCAUCAUG | Chmp | [1600-1618](19/19) |
| 3 | GAUGCUUUUAAUAAAAACA | UGUUUUUAUUAAAAGCAUC | Chmp | [1603-1621](19/19) |
| 4 | UGAUGCUUUUAAUAAAAAC | GUUUUUAUUAAAAGCAUCA | Chmp | [1602-1620](19/19) |
| 5 | UGCUUUUAAUAAAAACAAC | GUUGUUUUUAUUAAAAGCA | Chmp | [1605-1623](19/19) |
| 6 | UCCAUGAUGCUUUUAAUAA | UUAUUAAAAGCAUCAUGGA | Chmp | [1598-1616](19/19) |
| 7 | ACCAGGAGCGAACCAUGAU | AUCAUGGUUCGCUCCUGGU | Chmp | [810-828](19/19 |
| 8 | UUGACCAAGCCGUGACCAA | UUGGUCACGGCUUGGUCAA | | [317-335](19/19 |
| 9 | CAGCUUGGGCAACUCAGUU | AACUGAGUUGCCCAAGCUG | Chmp | [1183-1201](19/19 |
| 10 | GAUCAGCCCUAAUGAUGCU | AGCAUCAUUAGGGCUGAUC | | [1576-1594](19/19 |
| 11 | ACUUGGAGCCCGUGGAUUU | AAAUCCACGGGCUCCAAGU | | [713-731](19/19 |
| 12 | GAGAUCAGCCCUAAUGAUG | CAUCAUUAGGGCUGAUCUC | | [1574-1592](19/19 |
| 13 | GCUUUUAAUAAAAACAACC | GGUUGUUUUUAUUAAAAGC | Chmp | [1606-1624](19/19) |
| 14 | AGGCUCUGUCUGACUUCUG | CAGAAGUCAGACAGAGCCU | | [404-422](19/19 |
| 15 | AGAUCAGCCCUAAUGAUGC | GCAUCAUUAGGGCUGAUCU | | [1575-1593](19/19 |
| 16 | GGCAACUCAGUUACCUAGC | GCUAGGUAACUGAGUUGCC | Chmp | [1190-1208](19/19 |
| 17 | UUGGGCAACUCAGUUACCU | AGGUAACUGAGUUGCCCAA | Chmp | [1187-1205](19/19 |
| 18 | CUUGGGCAACUCAGUUACC | GGUAACUGAGUUGCCCAAG | Chmp | [1186-1204](19/19 |
| 19 | CAUUUGACCAAGCCGUGAC | GUCACGGCUUGGUCAAAUG | | [314-332](19/19 |
| 20 | CUUUUAAUAAAAACAACCC | GGGUUGUUUUUAUUAAAAG | Chmp | [1607-1625](19/19) |
| 21 | UCGAUGCAGAGACAGAGGU | ACCUCUGUCUCUGCAUCGA | | [881-899](19/19 |
| 22 | UUUGACCAAGCCGUGACCA | UGGUCACGGCUUGGUCAAA | | [316-334](19/19 |
| 23 | CAACUCAGUUACCUAGCCC | GGGCUAGGUAACUGAGUUG | Chmp | [1192-1210](19/19 |
| 24 | AUUUGACCAAGCCGUGACC | GGUCACGGCUUGGUCAAAU | | [315-333](19/19 |
| 25 | CAGGUCCCUAAUCAUGGAC | GUCCAUGAUUAGGGACCUG | Chmp | [831-849](19/19 |
| 26 | GUCCCUAAUCAUGGACUCC | GGAGUCCAUGAUUAGGGAC | Chmp | [834-852](19/19 |
| 27 | UCCCUAAUCAUGGACUCCC | GGGAGUCCAUGAUUAGGGA | Chmp | [835-853](19/19 |
| 28 | AUCAGCCCUAAUGAUGCUG | CAGCAUCAUUAGGGCUGAU | | [1577-1595](19/19 |

TABLE A17

NOXA2 19-mer oligomer pairs (NCF2, neutrophil
cytosolic factor 2, p67phox

| | | | | |
|---|---|---|---|---|
| | | | | Human-67189969 |
| No. | Sense siRNA | AntiSense siRNA | Other Sp | ORF: 253-1833 |

| | | | | |
|---|---|---|---|---|
| 1 | CCCUGCAACUACCUUGAAC | GUUCAAGGUAGUUGCAGGG | GP | [1120-1138 |
| 2 | GGAAAGUGAAAAAGCUGAU | AUCAGCUUUUUCACUUUCC | | [1572-1590 |
| 3 | GUGAAAAACUACUGCCUGA | UCAGGCAGUAGUUUUUCAC | Rat, Ms | [1501-1519 |
| 4 | GCAUUUGCAACACUGAGAA | UUCUCAGUGUUGCAAAUGC | | [79-97] |
| 5 | CCUUAUAGGUUACUCAUAA | UUAUGAGUAACCUAUAAGG | | [2334-2352] |
| 6 | CCAAGGAGUAAGUACAAAU | AUUUGUACUUACUCCUUGG | | [2265-2283] |
| 7 | UCAAAGGUGAAUGAAGAAU | AUUCUUCAUUCACCUUUGA | | [1714-1732 |
| 8 | ACCCAAGGAAAGUGAAAAA | UUUUUCACUUUCCUUGGGU | GP | [1566-1584 |
| 9 | GAAAAACUACUGCCUGACU | AGUCAGGCAGUAGUUUUUC | Ms | [1503-1521 |
| 10 | CCUUAAAGAAGCCUUGAUU | AAUCAAGGCUUCUUUAAGG | | [531-549 |
| 11 | CGCAACUACAGAUUUGGAA | UUCCAAAUCUGUAGUUGCG | | [1794-1812 |
| 12 | CCAAAGUUUUUGUUGAAGA | UCUUCAACAAAAACUUUGG | | [1772-1790 |
| 13 | GCUUUCCAGAUGAACCCAA | UUGGGUUCAUCUGGAAAGC | | [1553-1571 |
| 14 | AGGUGAAAAACUACUGCCU | AGGCAGUAGUUUUUCACCU | | [1499-1517 |
| 15 | UCCCUGCAACUACCUUGAA | UUCAAGGUAGUUGCAGGGA | GP | [1119-1137 |
| 16 | UCAUGUUCAACGGGCAGAA | UUCUGCCCGUUGAACAUGA | | [1091-1109 |
| 17 | ACCUUAAAGAAGCCUUGAU | AUCAAGGCUUCUUUAAGGU | | [530-548 |
| 18 | CCAGACAGAGAAAUAUGAU | AUCAUAUUUCUCUGUCUGG | | [498-516 |
| 19 | UGUACACUAUCCUGAAGAA | UUCUUCAGGAUAGUGUACA | | [389-407 |
| 20 | GGUGUUAUCAAAGGUGAAU | AUUCACCUUUGAUAACACC | | [1707-1725 |
| 21 | UGAUGCUAAUAACCAGACA | UGUCUGGUUAUUAGCAUCA | | [1587-1605 |
| 22 | CCCAAGGAAAGUGAAAAAG | CUUUUUCACUUUCCUUGGG | | [1567-1585 |
| 23 | GGCCAGGUGAAAAACUACU | AGUAGUUUUUCACCUGGCC | | [1495-1513 |
| 24 | ACACUGAGAAGUUAUCUUA | UAAGAUAACUUCUCAGUGU | | [88-106] |
| 25 | ACAUUGUCUUUGUCUUGAA | UUCAAGACAAAGACAAUGU | | [1046-1064 |
| 26 | UCGACCAAAUGAGAGACAA | UUGUCUCUCAUUUGGUCGA | | [801-819 |
| 27 | GGCUGCAUGUACACUAUCC | GGAUAGUGUACAUGCAGCC | | [382-400 |
| 28 | CGGACAAGAAGGACUGGAA | UUCCAGUCCUUCUUGUCCG | | [302-320 |
| 29 | GGUUACUCAUAAGGCAUAU | AUAUGCCUUAUGAGUAACC | | [2341-2359] |
| 30 | UCACACUGUAAACAUUCAU | AUGAAUGUUUACAGUGUGA | | [2157-2175] |
| 31 | CUAGACAAUGAUGUGAGUA | UACUCACAUCAUUGUCUAG | | [1975-1993] |
| 32 | AGAAAAUGAAGCCCUAUUA | UAAUAGGGCUUCAUUUUCU | | [1859-1877] |
| 33 | CCCAAAGUUUUUGUUGAAG | CUUCAACAAAAACUUUGGG | | [1771-1789 |
| 34 | GGAGGCACUCUUCAGUUAU | AUAACUGAAGAGUGCCUCC | | [1638-1656 |
| 35 | GAAGACAGCAUGAAGGAUG | CAUCCUUCAUGCUGUCUUC | | [1471-1489 |
| 36 | CACUCAAGGUGCACUACAA | UUGUAGUGCACCUUGAGUG | GP | [1310-1328 |
| 37 | AGACAAAAGAAGAGCUCCA | UGGAGCUCUUCUUUUGUCU | | [1013-1031 |
| 38 | CGACCAAAUGAGAGACAAG | CUUGUCUCUCAUUUGGUCG | | [802-820 |
| 39 | UGAUUCAGCUUCGAGGGAA | UUCCCUCGAAGCUGAAUCA | | [545-563 |
| 40 | CAGACAGAGAAAUAUGAUU | AAUCAUAUUUCUCUGUCUG | | [499-517 |
| 41 | GAAGCAUUAACCGAGACAA | UUGUCUCGGUUAAUGCUUC | | [437-455 |
| 42 | GCUGCAUGUACACUAUCCU | AGGAUAGUGUACAUGCAGC | | [383-401 |
| 43 | AGGUUACUCAUAAGGCAUA | UAUGCCUUAUGAGUAACCU | | [2340-2358] |
| 44 | UGAUGUGAGUACCCAGGAU | AUCCUGGGUACUCACAUCA | | [1983-2001] |
| 45 | GUAUACUGUACUGAGACAU | AUGUCUCAGUACAGUAUAC | | [1908-1926] |
| 46 | GAUGCUAAUAACCAGACAA | UUGUCUGGUUAUUAGCAUC | | [1588-1606 |
| 47 | GCCUGAGACAAAAGAAGAG | CUCUUCUUUUGUCUCAGGC | | [1008-1026 |
| 48 | AGAGAAAUAUGAUUUGGCU | AGCCAAAUCAUAUUUCUCU | | [504-522 |
| 49 | CCAGAAGCAUUAACCGAGA | UCUCGGUUAAUGCUUCUGG | | [434-452 |
| 50 | GGCCUCCUAGUUUCUACCU | AGGUAGAAACUAGGAGGCC | | [230-248] |
| 51 | CAUUCAUCAAGCUGUACAU | AUGUACAGCUUGAUGAAUG | | [2169-2187] |
| 52 | ACACUGUAAACAUUCAUCA | UGAUGAAUGUUUACAGUGU | | [2159-2177] |
| 53 | ACAAUGAUGUGAGUACCCA | UGGGUACUCACAUCAUUGU | | [1979-1997] |
| 54 | UAACCUACUAGACAAUGAU | AUCAUUGUCUAGUAGGUUA | | [1968-1986] |
| 55 | GGAUGUUUCACAAACUACA | UGUAGUUUGUGAAACAUCC | | [1833-1851] |
| 56 | UCGGAGAGAAGUCUAGGAU | AUCCUAGACUUCUCUCCGA | | [1818-1836 |
| 57 | AGGCACUCUUCAGUUAUGA | UCAUAACUGAAGAGUGCCU | | [1640-1658 |
| 58 | CAAGGAAAGUGAAAAAGCU | AGCUUUUUCACUUUCCUUG | | [1569-1587 |
| 59 | UGAACCCAAGGAAAGUGAA | UUCACUUUCCUUGGGUUCA | | [1563-1581 |
| 60 | ACAAAAAGAAGAGCCUAAG | CUUAGGCUCUUCUUUUUGU | | [1260-1278 |
| 61 | AACAAAAAGAAGAGCCUAA | UUAGGCUCUUCUUUUUGUU | | [1259-1277 |
| 62 | AGGCCAGAAACAAAAAGAA | UUCUUUUUGUUUCUGGCCU | | [1251-1269 |
| 63 | AGCUCCUCCUAGUUCCAAA | UUUGGAACUAGGAGGAGCU | | [1206-1224 |
| 64 | CAAAAGAAGAGCUCCAGGU | ACCUGGAGCUCUUCUUUUG | | [1016-1034 |
| 65 | CCGUGUGCUAUUUGGGUUU | AAACCCAAAUAGCACACGG | | [987-1005 |
| 66 | UGGUGGAUCAAGACAGUUU | AAACUGUCUUGAUCCACCA | | [875-893 |
| 67 | GGAAUGGAAAAAAGCUGAA | UUCAGCUUUUUUCCAUUCC | | [657-675 |
| 68 | CUCUCUGCUUCUUUCCUUU | AAAGGAAAGAAGCAGAGAG | | [4-22] |
| 69 | GACAGAGAAAUAUGAUUUG | CAAAUCAUAUUUCUCUGUC | | [501-519 |
| 70 | CUACCAGACAGAGAAAUAU | AUAUUUCUCUGUCUGGUAG | | [495-513 |
| 71 | GCAUUAACCGAGACAAGCA | UGCUUGUCUCGGUUAAUGC | | [440-458 |
| 72 | UGCAUGUACACUAUCCUGA | UCAGGAUAGUGUACAUGCA | | [385-403 |
| 73 | ACAAAAACAAGACACCCAA | UUGGGUGUCUUGUUUUUGU | | [2238-2256] |
| 74 | ACAUUCAUCAAGCUGUACA | UGUACAGCUUGAUGAAUGU | | [2168-2186] |
| 75 | CACUGUAAACAUUCAUCAA | UUGAUGAAUGUUUACAGUG | | [2160-2178] |
| 76 | CUACUAGACAAUGAUGUGA | UCACAUCAUUGUCUAGUAG | | [1972-1990] |
| 77 | ACAAAGCUGAAGAAAAUGA | UCAUUUUCUUCAGCUUUGU | | [1849-1867] |
| 78 | CAAAGUUUUUGUUGAAGAC | GUCUUCAACAAAAACUUUG | | [1773-1791 |
| 79 | GUGUUAUCAAAGGUGAAUG | CAUUCACCUUUGAUAACAC | | [1708-1726 |
| 80 | CUCUUCAGUUAUGAGGCUA | UAGCCUCAUAACUGAAGAG | | [1645-1663 |
| 81 | GGCUGGAACACACUAAGCU | AGCUUAGUGUGUUCCAGCC | | [1409-1427 |
| 82 | CACUGAGAAGUUAUCUUAA | UUAAGAUAACUUCUCAGUG | | [89-107] |
| 83 | GCCUAAGGAAGUGAAGCUC | GAGCUUCACUUCCUUAGGC | | [1272-1290 |
| 84 | GAAGAGCCUAAGGAAGUGA | UCACUUCCUUAGGCUCUUC | Rat | [1267-1285 |
| 85 | AGAAGAGCCUAAGGAAGUG | CACUUCCUUAGGCUCUUCU | Rat | [1266-1284 |
| 86 | CCAGGCCAGAAACAAAAAG | CUUUUUGUUUCUGGCCUGG | | [1249-1267 |
| 87 | GACAAAAGAAGAGCUCCAG | CUGGAGCUCUUCUUUUGUC | | [1014-1032 |
| 88 | GGCAUCUGUGGUGGAUCAA | UUGAUCCACCACAGAUGCC | GP | [867-885 |
| 89 | GACCAAAUGAGAGACAAGU | ACUUGUCUCUCAUUUGGUC | | [803-821 |
| 90 | GCUGUUUCGACCAAAUGAG | CUCAUUUGGUCGAAACAGC | | [795-813 |
| 91 | GACAUUCCAAAAUCGACAA | UUGUCGAUUUUGGAAUGUC | | [716-734 |
| 92 | UCUCUCUGCUUCUUUCCUU | AAGGAAAGAAGCAGAGAGA | | [3-21] |
| 93 | CUCAUAAGGCAUAUACAAA | UUUGUAUAUGCCUUAUGAG | | [2346-2364] |
| 94 | GUUACUCAUAAGGCAUAUA | UAUAUGCCUUAUGAGUAAC | | [2342-2360] |
| 95 | CACACUGUAAACAUUCAUC | GAUGAAUGUUUACAGUGUG | | [2158-2176] |
| 96 | ACCUACUAGACAAUGAUGU | ACAUCAUUGUCUAGUAGGU | | [1970-1988] |
| 97 | GUCUAGGAUGUUUCACAAA | UUUGUGAAACAUCCUAGAC | | [1828-1846 |
| 98 | AGUCUAGGAUGUUUCACAA | UUGUGAAACAUCCUAGACU | | [1827-1845 |
| 99 | CAACUACAGAUUUGGAAAG | CUUUCCAAAUCUGUAGUUG | | [1796-1814 |
| 100 | UGAAUGAAGAAUGGCUGGA | UCCAGCCAUUCUUCAUUCA | Rat, Ms | [1721-1739 |
| 101 | GGUGAAUGAAGAAUGGCUG | CAGCCAUUCUUCAUUCACC | | [1719-1737 |
| 102 | AGGUGAAUGAAGAAUGGCU | AGCCAUUCUUCAUUCACCU | | [1718-1736 |
| 103 | CCAGACAACAGAACCUCAG | CUGAGGUUCUGUUGUCUGG | | [1599-1617 |
| 104 | GAAAGUGAAAAAGCUGAUG | CAUCAGCUUUUUCACUUUC | | [1573-1591 |
| 105 | GGGCCAGGUGAAAAACUAC | GUAGUUUUUCACCUGGCCC | | [1494-1512 |
| 106 | GGCCAGAAACAAAAAGAAG | CUUCUUUUUGUUUCUGGCC | | [1252-1270 |
| 107 | GCAAUGAUAACUGGGCCAC | GUGGCCCAGUUAUCAUUGC | | [1070-1088 |
| 108 | ACAUUCCAAAAUCGACAAG | CUUGUCGAUUUUGGAAUGU | | [717-735 |
| 109 | AGCUGAUAGACUAUAAGAU | AUCUUAUAGUCUAUCAGCU | | [566-584 |
| 110 | CUAUCAAAGACCUUAAAGA | UCUUUAAGGUCUUUGAUAG | Ms | [521-539 |
| 111 | GAGAAAUAUGAUUUGGCUA | UAGCCAAAUCAUAUUUCUC | | [505-523 |
| 112 | ACCAGACAGAGAAAUAUGA | UCAUAUUUCUCUGUCUGGU | | [497-515 |
| 113 | AGAAGCAUUAACCGAGACA | UGUCUCGGUUAAUGCUUCU | | [436-454 |
| 114 | ACAUGACUGAAGCAGAGAA | UUCUCUGCUUCAGUCAUGU | | [407-425 |
| 115 | CCUUUUCUCUCUCAUGGUA | UACCAUGAGAGAGAAAAGG | | [18-36] |
| 116 | ACCUAAUCAUGUCCCUGGU | ACCAGGGACAUGAUUAGGU | | [245-263] |
| 117 | ACUGUAAACAUUCAUCAAG | CUUGAUGAAUGUUUACAGU | | [2161-2179] |
| 118 | GCCCUAUUACUUGUUUGUA | UACAAACAAGUAAUAGGGC | | [1869-1887] |
| 119 | GCGCAACUACAGAUUUGGA | UCCAAAUCUGUAGUUGCGC | | [1793-1811 |
| 120 | UGGUGUUAUCAAAGGUGAA | UUCACCUUUGAUAACACCA | | [1706-1724 |
| 121 | CUGGUGUUAUCAAAGGUGA | UCACCUUUGAUAACACCAG | | [1705-1723 |
| 122 | CCUGGUGUUAUCAAAGGUG | CACCUUUGAUAACACCAGG | | [1704-1722 |
| 123 | UAAUCCUGGUGUUAUCAAA | UUUGAUAACACCAGGAUUA | | [1700-1718 |
| 124 | AGGAAAGUGAAAAAGCUGA | UCAGCUUUUUCACUUUCCU | | [1571-1589 |
| 125 | CCAAGGAAAGUGAAAAAGC | GCUUUUUCACUUUCCUUGG | | [1568-1586 |
| 126 | GAACACACUAAGCUGAGCU | AGCUCAGCUUAGUGUGUUC | | [1414-1432 |
| 127 | GGAACACACUAAGCUGAGC | GCUCAGCUUAGUGUGUUCC | | [1413-1431 |
| 128 | ACUGAGAAGUUAUCUUAAG | CUUAAGAUAACUUCUCAGU | | [90-108] |
| 129 | AACACUGAGAAGUUAUCUU | AAGAUAACUUCUCAGUGUU | | [87-105] |
| 130 | UUGUCUUUGUCUUGAAGAA | UUCUUCAAGACAAAGACAA | | [1049-1067 |
| 131 | CUGAGACAAAAGAAGAGCU | AGCUCUUCUUUUGUCUCAG | | [1010-1028 |
| 132 | GGUGGAUCAAGACAGUUUC | GAAACUGUCUUGAUCCACC | | [876-894 |
| 133 | GCAUCUGUGGUGGAUCAAG | CUUGAUCCACCACAGAUGC | GP | [868-886 |
| 134 | CGAUGGAGUGUGUCUGGAA | UUCCAGACACACUCCAUCG | | [737-755 |
| 135 | GGGAACCAGCUGAUAGACU | AGUCUAUCAGCUGGUUCCC | Ms | [559-577 |
| 136 | ACAGAGAAAUAUGAUUUGG | CCAAAUCAUAUUUCUCUGU | | [502-520 |
| 137 | CUACUACCAGACAGAGAAA | UUUCUCUGUCUGGUAGUAG | | [492-510 |
| 138 | CUGAAGAACAUGACUGAAG | CUUCAGUCAUGUUCUUCAG | | [400-418 |
| 139 | UCCUGAAGAACAUGACUGA | UCAGUCAUGUUCUUCAGGA | | [398-416 |
| 140 | GGACAAGAAGGACUGGAAG | CUUCCAGUCCUUCUUGUCC | | [303-321 |
| 141 | UUACUCAUAAGGCAUAUAC | GUAUAUGCCUUAUGAGUAA | | [2343-2361] |
| 142 | GCUUGAAGUAACCUUAUAG | CUAUAAGGUUACUUCAAGC | | [2323-2341] |
| 143 | UACUGUAAUUGGCUCUUAA | UUAAGAGCCAAUUACAGUA | | [2303-2321] |
| 144 | UUACUGUAAUUGGCUCUUA | UAAGAGCCAAUUACAGUAA | | [2302-2320] |
| 145 | UCCUGUUUCUGAACCAUUA | UAAUGGUUCAGAAACAGGA | | [2286-2304] |
| 146 | GUAAGUACAAAUAUUCCUG | CAGGAAUAUUUGUACUUAC | | [2272-2290] |
| 147 | AAACCUAGCAUCUUACAAA | UUUGUAAGAUGCUAGGUUU | | [2224-2242] |
| 148 | UCAAGCUGUACAUUUGGUG | CACCAAAUGUACAGCUUGA | | [2175-2193] |
| 149 | CUGUAAACAUUCAUCAAGC | GCUUGAUGAAUGUUUACAG | | [2162-2180] |
| 150 | CCUGUUUCUUGCUCUGAGU | ACUCAGAGCAAGAAACAGG | | [2119-2137] |
| 151 | AGAGAGUCUUCCAGGUACU | AGUACCUGGAAGACUCUCU | | [2097-2115] |
| 152 | GAAAAGUGGAUGGAAGUGU | ACACUUCCAUCCACUUUUC | | [2064-2082] |
| 153 | UGAGACAUUACAGUUUGGA | UCCAAACUGUAAUGUCUCA | | [1919-1937] |
| 154 | CUGCUGUAUACUGUACUGA | UCAGUACAGUAUACAGCAG | | [1903-1921] |
| 155 | CCCUUCUGCUGUAUACUGU | ACAGUAUACAGCAGAAGGG | | [1898-1916] |
| 156 | AAGAAAAUGAAGCCCUAUU | AAUAGGGCUUCAUUUUCUU | | [1858-1876] |
| 157 | CGGAGAGAAGUCUAGGAUG | CAUCCUAGACUUCUCUCCG | | [1819-1837 |
| 158 | CUACAGAUUUGGAAAGCAC | GUGCUUUCCAAAUCUGUAG | | [1799-1817 |
| 159 | GUUGAAGACUGCGCAACUA | UAGUUGCGCAGUCUUCAAC | | [1783-1801 |
| 160 | GACAACAGAACCUCAGCUU | AAGCUGAGGUUCUGUUGUC | | [1602-1620 |
| 161 | ACACACUAAGCUGAGCUAU | AUAGCUCAGCUUAGUGUGU | | [1416-1434 |
| 162 | AACACACUAAGCUGAGCUA | UAGCUCAGCUUAGUGUGUU | | [1415-1433 |
| 163 | GAGAAGUUAUCUUAAGGGA | UCCCUUAAGAUAACUUCUC | | [93-111] |
| 164 | AGGAAGUGAAGCUCAGUGU | ACACUGAGCUUCACUUCCU | | [1277-1295 |
| 165 | CACCAGGCCAGAAACAAAA | UUUUGUUUCUGGCCUGGUG | | [1247-1265 |
| 166 | GGGAACAUUGUCUUUGUCU | AGACAAAGACAAUGUUCCC | | [1042-1060 |
| 167 | CCAGGGAACAUUGUCUUUG | CAAAGACAAUGUUCCCUGG | | [1039-1057 |
| 168 | GUGUGCUAUUUGGGUUUGU | ACAAACCCAAAUAGCACAC | | [989-1007 |
| 169 | ACCGUGUGCUAUUUGGGUU | AACCCAAAUAGCACACGGU | | [986-1004 |
| 170 | GUAGGGUUAUGAGUCAGUU | AACUGACUCAUAACCCUAC | | [34-52] |
| 171 | ACUUGGCAGUGGCUUACUU | AAGUAAGCCACUGCCAAGU | Rat | [458-476 |
| 172 | CAGAAGCAUUAACCGAGAC | GUCUCGGUUAAUGCUUCUG | | [435-453 |
| 173 | GAACAUGACUGAAGCAGAG | CUCUGCUUCAGUCAUGUUC | | [405-423 |
| 174 | CCUGAAGAACAUGACUGAA | UUCAGUCAUGUUCUUCAGG | | [399-417 |
| 175 | GGCUCUUAAGGCUUGAAGU | ACUUCAAGCCUUAAGAGCC | | [2313-2331] |
| 176 | UGGCUCUUAAGGCUUGAAG | CUUCAAGCCUUAAGAGCCA | | [2312-2330] |
| 177 | AACCUAGCAUCUUACAAAA | UUUUGUAAGAUGCUAGGUU | | [2225-2243] |
| 178 | UGUAAACAUUCAUCAAGCU | AGCUUGAUGAAUGUUUACA | | [2163-2181] |
| 179 | GAGAGAGUCUUCCAGGUAC | GUACCUGGAAGACUCUCUC | | [2096-2114] |
| 180 | ACGAGAGAGUCUUCCAGGU | ACCUGGAAGACUCUCUCGU | | [2094-2112] |
| 181 | UGGAUGGAAGUGUCUGGAA | UUCCAGACACUUCCAUCCA | | [2070-2088] |
| 182 | GGAAAAGUGGAUGGAAGUG | CACUUCCAUCCACUUUUCC | | [2063-2081] |
| 183 | GAGGAAAAGUGGAUGGAAG | CUUCCAUCCACUUUUCCUC | | [2061-2079] |
| 184 | AGAGGAAAAGUGGAUGGAA | UUCCAUCCACUUUUCCUCU | | [2060-2078] |
| 185 | ACAUUACAGUUUGGAAGUG | CACUUCCAAACUGUAAUGU | | [1923-1941] |
| 186 | CAACCUGUCUUCUCUCUGU | ACAGAGAGAAGACAGGUUG | | [194-212] |
| 187 | GAGAAGUCUAGGAUGUUUC | GAAACAUCCUAGACUUCUC | | [1823-1841 |
| 188 | CUCGGAGAGAAGUCUAGGA | UCCUAGACUUCUCUCCGAG | | [1817-1835 |
| 189 | AAGGGAAGGUGGGCAUUUU | AAAAUGCCCACCUUCCCUU | | [1751-1769 |
| 190 | GUGGAGGCACUCUUCAGUU | AACUGAAGAGUGCCUCCAC | | [1636-1654 |
| 191 | CUGGAACACACUAAGCUGA | UCAGCUUAGUGUGUUCCAG | | [1411-1429 |
| 192 | CCAGAAACAAAAAGAAGAG | CUCUUCUUUUUGUUUCUGG | | [1254-1272 |
| 193 | CAGGCCAGAAACAAAAAGA | UCUUUUUGUUUCUGGCCUG | | [1250-1268 |
| 194 | GUCUUGAAGAAGGGCAAUG | CAUUGCCCUUCUUCAAGAC | | [1057-1075 |
| 195 | AGGGAACAUUGUCUUUGUC | GACAAAGACAAUGUUCCCU | | [1041-1059 |
| 196 | GCCAGGGAACAUUGUCUUU | AAAGACAAUGUUCCCUGGC | | [1038-1056 |
| 197 | UGCCAGGGAACAUUGUCUU | AAGACAAUGUUCCCUGGCA | | [1037-1055 |
| 198 | CGUGUGCUAUUUGGGUUUG | CAAACCCAAAUAGCACACG | | [988-1006 |
| 199 | GGAAAAAAGCUGAAGAACA | UGUUCUUCAGCUUUUUUCC | | [662-680 |
| 200 | GCUAUCAAAGACCUUAAAG | CUUUAAGGUCUUUGAUAGC | Ms | [520-538 |
| 201 | CUCUUAAGGCUUGAAGUAA | UUACUUCAAGCCUUAAGAG | | [2315-2333] |
| 202 | GUAAUUGGCUCUUAAGGCU | AGCCUUAAGAGCCAAUUAC | | [2307-2325] |
| 203 | CUGAACCAUUACUGUAAUU | AAUUACAGUAAUGGUUCAG | | [2294-2312] |
| 204 | CCCAAGGAGUAAGUACAAA | UUUGUACUUACUCCUUGGG | | [2264-2282] |
| 205 | UCCUGUUUCUUGCUCUGAG | CUCAGAGCAAGAAACAGGA | | [2118-2136] |
| 206 | GGAGAGGAAAAGUGGAUGG | CCAUCCACUUUUCCUCUCC | | [2058-2076] |
| 207 | GGGAGAGGAAAAGUGGAUG | CAUCCACUUUUCCUCUCCC | | [2057-2075] |
| 208 | ACAGUUUGGAAGUGUUAAC | GUUAACACUUCCAAACUGU | | [1928-1946] |
| 209 | AGACAUUACAGUUUGGAAG | CUUCCAAACUGUAAUGUCU | | [1921-1939] |
| 210 | GAGACAUUACAGUUUGGAA | UUCCAAACUGUAAUGUCUC | | [1920-1938] |
| 211 | GAAAAUGAAGCCCUAUUAC | GUAAUAGGGCUUCAUUUUC | | [1860-1878] |
| 212 | GCUCCAACCUGUCUUCUCU | AGAGAAGACAGGUUGGAGC | | [190-208] |
| 213 | CCCUUUCAGAAGACAGCAU | AUGCUGUCUUCUGAAAGGG | | [1463-1481 |
| 214 | GAAGUUAUCUUAAGGGAGG | CCUCCCUUAAGAUAACUUC | | [95-113] |
| 215 | ACAAGUACACGGUAGUCAU | AUGACUACCGUGUACUUGU | | [1325-1343 |
| 216 | UGAGAAGUUAUCUUAAGGG | CCCUUAAGAUAACUUCUCA | | [92-110] |
| 217 | ACCAGGCCAGAAACAAAAA | UUUUUGUUUCUGGCCUGGU | | [1248-1266 |
| 218 | AUGGAAAAAAGCUGAAGAA | UUCUUCAGCUUUUUUCCAU | | [660-678 |
| 219 | GGAGGAAUGGAAAAAAGCU | AGCUUUUUUCCAUUCCUCC | | [654-672 |
| 220 | UCCCGGAUUUGCUUCAACA | UGUUGAAGCAAAUCCGGGA | | [361-379 |
| 221 | CUCCCGGAUUUGCUUCAAC | GUUGAAGCAAAUCCGGGAG | | [360-378 |
| 222 | ACUCCCGGAUUUGCUUCAA | UUGAAGCAAAUCCGGGAGU | | [359-377 |
| 223 | UUGGCUCUUAAGGCUUGAA | UUCAAGCCUUAAGAGCCAA | | [2311-2329] |
| 224 | UGAUCCUGUUUCUUGCUCU | AGAGCAAGAAACAGGAUCA | | [2115-2133] |
| 225 | GGUACUGAUCCUGUUUCUU | AAGAAACAGGAUCAGUACC | | [2110-2128] |
| 226 | GAGAGGAAAAGUGGAUGGA | UCCAUCCACUUUUCCUCUC | | [2059-2077] |
| 227 | CCUUCUGCUGUAUACUGUA | UACAGUAUACAGCAGAAGG | | [1899-1917] |
| 228 | CCAACCUGUCUUCUCUCUG | CAGAGAGAAGACAGGUUGG | | [193-211] |
| 229 | UCCAACCUGUCUUCUCUCU | AGAGAGAAGACAGGUUGGA | | [192-210] |
| 230 | AGCCCUAUUACUUGUUUGU | ACAAACAAGUAAUAGGGCU | | [1868-1886] |
| 231 | AUAUAAUCCUGGUGUUAUC | GAUAACACCAGGAUUAUAU | | [1697-1715 |
| 232 | AGACAACAGAACCUCAGCU | AGCUGAGGUUCUGUUGUCU | | [1601-1619 |
| 233 | UGAAAAAGCUGAUGCUAAU | AUUAGCAUCAGCUUUUUCA | | [1578-1596 |
| 234 | CCAUGCCCUACACACUCAA | UUGAGUGUGUAGGGCAUGG | | [1298-1316 |
| 235 | UGGAGUGUGUCUGGAAGCA | UGCUUCCAGACACACUCCA | | [740-758 |
| 236 | UGAGUCAGUUGCCAAAAGG | CCUUUUGGCAACUGACUCA | | [43-61] |
| 237 | GCUGAUAGACUAUAAGAUC | GAUCUUAUAGUCUAUCAGC | | [567-585 |
| 238 | CUGUUUCUGAACCAUUACU | AGUAAUGGUUCAGAAACAG | | [2288-2306] |
| 239 | CUGAUCCUGUUUCUUGCUC | GAGCAAGAAACAGGAUCAG | | [2114-2132] |
| 240 | CAGUUUGGAAGUGUUAACU | AGUUAACACUUCCAAACUG | | [1929-1947] |
| 241 | GGGACAUGGUGUCUAAGAA | UUCUUAGACACCAUGUCCC | | [1379-1397 |
| 242 | GCCAGAAACAAAAAGAAGA | UCUUCUUUUUGUUUCUGGC | | [1253-1271 |
| 243 | AGAAGGGCAAUGAUAACUG | CAGUUAUCAUUGCCCUUCU | | [1064-1082 |
| 244 | CUAUUUGGGUUUGUGCCUG | CAGGCACAAACCCAAAUAG | | [994-1012 |
| 245 | GAAUGGAAAAAAGCUGAAG | CUUCAGCUUUUUUCCAUUC | | [658-676 |
| 246 | GGUAGGGUUAUGAGUCAGU | ACUGACUCAUAACCCUACC | | [33-51] |
| 247 | CUCUCAUGGUAGGGUUAUG | CAUAACCCUACCAUGAGAG | | [26-44] |
| 248 | UCUCUCUCAUGGUAGGGUU | AACCCUACCAUGAGAGAGA | | [23-41] |
| 249 | UUGGCUGCAUGUACACUAU | AUAGUGUACAUGCAGCCAA | | [380-398 |
| 250 | GCCCAAGGAGUAAGUACAA | UUGUACUUACUCCUUGGGC | | [2263-2281] |
| 251 | CAGGUGAAUGGAGGAGUUA | UAACUCCUCCAUUCACCUG | | [2037-2055] |
| 252 | CAAAGCUGAAGAAAAUGAA | UUCAUUUUCUUCAGCUUUG | | [1850-1868] |
| 253 | CUUCUUUCCUUUUCUCUCU | AGAGAGAAAAGGAAAGAAG | | [11-29] |
| 254 | GAAACAAAAAGAAGAGCCU | AGGCUCUUCUUUUUGUUUC | | [1257-1275 |
| 255 | CUACCUUGAACCAGUUGAG | CUCAACUGGUUCAAGGUAG | GP | [1128-1146 |
| 256 | AGGAAUGGAAAAAAGCUGA | UCAGCUUUUUUCCAUUCCU | | [656-674 |
| 257 | GAGGAAUGGAAAAAAGCUG | CAGCUUUUUUCCAUUCCUC | | [655-673 |
| 258 | CUCUCUCAUGGUAGGGUUA | UAACCCUACCAUGAGAGAG | | [24-42] |
| 259 | CCUGUUUCUGAACCAUUAC | GUAAUGGUUCAGAAACAGG | | [2287-2305] |
| 260 | GGUGUUAUAUAACAUUGCU | AGCAAUGUUAUAUAACACC | | [618-636 |
| 261 | UGAACCAUUACUGUAAUUG | CAAUUACAGUAAUGGUUCA | | [2295-2313] |
| 262 | GCCUCCUAGUUUCUACCUA | UAGGUAGAAACUAGGAGGC | | [231-249] |
| 263 | GAAAAAGCUGAUGCUAAUA | UAUUAGCAUCAGCUUUUUC | | [1579-1597 |
| 264 | GCAGUGGCUUACUUCCAAC | GUUGGAAGUAAGCCACUGC | | [463-481 |
| 265 | GGCCCAAGGAGUAAGUACA | UGUACUUACUCCUUGGGCC | | [2262-2280] |
| 266 | UGAAGAAAAUGAAGCCCUA | UAGGGCUUCAUUUUCUUCA | | [1856-1874] |
| 267 | CGGUAGUCAUGAAGACUCA | UGAGUCUUCAUGACUACCG | | [1334-1352 |
| 268 | GAAGGAGGAAUGGAAAAAA | UUUUUUCCAUUCCUCCUUC | | [651-669 |
| 269 | GAGGUGUUAUAUAACAUUG | CAAUGUUAUAUAACACCUC | | [616-634 |
| 270 | ACCAGCUGAUAGACUAUAA | UUAUAGUCUAUCAGCUGGU | | [563-581 |
| 271 | CUCCUAGUUUCUACCUAAU | AUUAGGUAGAAACUAGGAG | | [233-251] |
| 272 | CUGUACAUUUGGUGCACUU | AAGUGCACCAAAUGUACAG | | [2180-2198] |
| 273 | GUGAAAAAGCUGAUGCUAA | UUAGCAUCAGCUUUUUCAC | | [1577-1595 |
| 274 | UGAGAACACAGUGGGUGAC | GUCACCCACUGUGUUCUCA | | [1530-1548 |
| 275 | UGAAAAACUACUGCCUGAC | GUCAGGCAGUAGUUUUUCA | Rat, Ms | [1502-1520 |
| 276 | CUCUGCUUCUUUCCUUUUC | GAAAAGGAAAGAAGCAGAG | | [6-24] |
| 277 | AGAAGGAGGAAUGGAAAAA | UUUUUCCAUUCCUCCUUCU | GP | [650-668 |
| 278 | GUUUGCCUGUGAGGUGUUA | UAACACCUCACAGGCAAAC | | [606-624 |
| 279 | GGCUAUCAAAGACCUUAAA | UUUAAGGUCUUUGAUAGCC | | [519-537 |
| 280 | CAAACUACAAAGCUGAAGA | UCUUCAGCUUUGUAGUUUG | | [1843-1861] |
| 281 | GGACCUGGAGUUUCAGGAA | UUCCUGAAACUCCAGGUCC | | [1674-1692 |
| 282 | GGACAUGGUGUCUAAGAAA | UUUCUUAGACACCAUGUCC | | [1380-1398 |
| 283 | UCCGGGACAUGGUGUCUAA | UUAGACACCAUGUCCCGGA | | [1376-1394 |
| 284 | ACACACUCAAGGUGCACUA | UAGUGCACCUUGAGUGUGU | GP | [1307-1325 |
| 285 | GCAACUACCUUGAACCAGU | ACUGGUUCAAGGUAGUUGC | GP | [1124-1142 |
| 286 | UGGAAGCAGAAGCUAUAUG | CAUAUAGCUUCUGCUUCCA | | [751-769 |
| 287 | CUGGAAGCAGAAGCUAUAU | AUAUAGCUUCUGCUUCCAG | | [750-768 |
| 288 | CCAAAAUCGACAAGGCGAU | AUCGCCUUGUCGAUUUUGG | | [722-740 |
| 289 | AGCCCAGACAUUCCAAAAU | AUUUUGGAAUGUCUGGGCU | | [710-728 |
| 290 | GCUUCAACAUUGGCUGCAU | AUGCAGCCAAUGUUGAAGC | | [371-389 |
| 291 | CUAGUUUCUACCUAAUCAU | AUGAUUAGGUAGAAACUAG | | [236-254] |
| 292 | UCCUAGUUUCUACCUAAUC | GAUUAGGUAGAAACUAGGA | | [234-252] |
| 293 | CCUAGCAUCUUACAAAAAC | GUUUUUGUAAGAUGCUAGG | | [2227-2245] |
| 294 | ACCUAGCAUCUUACAAAAA | UUUUUGUAAGAUGCUAGGU | | [2226-2244] |
| 295 | CUGUGUCAUACCACAAUAA | UUAUUGUGGUAUGACACAG | | [2201-2219] |
| 296 | GAAGAAAAUGAAGCCCUAU | AUAGGGCUUCAUUUUCUUC | | [1857-1875] |
| 297 | UCACAAACUACAAAGCUGA | UCAGCUUUGUAGUUUGUGA | | [1840-1858] |
| 298 | GGGAUAUAAUCCUGGUGUU | AACACCAGGAUUAUAUCCC | | [1694-1712 |
| 299 | UCCAGAUGAACCCAAGGAA | UUCCUUGGGUUCAUCUGGA | | [1557-1575 |
| 300 | GCCAGGUGAAAAACUACUG | CAGUAGUUUUUCACCUGGC | | [1496-1514 |
| 301 | CGGGACAUGGUGUCUAAGA | UCUUAGACACCAUGUCCCG | | [1378-1396 |
| 302 | CUGCUUCUUUCCUUUUCUC | GAGAAAAGGAAAGAAGCAG | | [8-26] |
| 303 | UCUGGAAGCAGAAGCUAUA | UAUAGCUUCUGCUUCCAGA | | [749-767 |
| 304 | AGGUGUUAUAUAACAUUGC | GCAAUGUUAUAUAACACCU | | [617-635 |
| 305 | CUAGCAUCUUACAAAAACA | UGUUUUUGUAAGAUGCUAG | | [2228-2246] |
| 306 | CUUUCCUUUUCUCUCUCAU | AUGAGAGAGAAAAGGAAAG | Rat | [14-32] |
| 307 | GCACUUUUCUGUGUCAUAC | GUAUGACACAGAAAAGUGC | | [2193-2211] |
| 308 | GCUGUGUUCACACUGUAAA | UUUACAGUGUGAACACAGC | | [2150-2168] |
| 309 | CCUGUCUUCUCUCUGUCUC | GAGACAGAGAGAAGACAGG | | [197-215] |
| 310 | CUGAAGAAAAUGAAGCCCU | AGGGCUUCAUUUUCUUCAG | | [1855-1873] |
| 311 | ACAAACUACAAAGCUGAAG | CUUCAGCUUUGUAGUUUGU | | [1842-1860] |
| 312 | CACAAACUACAAAGCUGAA | UUCAGCUUUGUAGUUUGUG | | [1841-1859] |
| 313 | GCACUCGGAGAGAAGUCUA | UAGACUUCUCUCCGAGUGC | | [1814-1832 |
| 314 | GACUGCGCAACUACAGAUU | AAUCUGUAGUUGCGCAGUC | | [1789-1807 |
| 315 | AGACUGCGCAACUACAGAU | AUCUGUAGUUGCGCAGUCU | | [1788-1806 |
| 316 | CCAGGUGAAAAACUACUGC | GCAGUAGUUUUUCACCUGG | | [1497-1515 |
| 317 | GCAACACUGAGAAGUUAUC | GAUAACUUCUCAGUGUUGC | | [85-103] |
| 318 | UCUGCUUCUUUCCUUUUCU | AGAAAAGGAAAGAAGCAGA | | [7-25] |
| 319 | AGAAGGAUUACCUAGGCAA | UUGCCUAGGUAAUCCUUCU | | [836-854 |
| 320 | CAAGAAGGAUUACCUAGGC | GCCUAGGUAAUCCUUCUUG | | [834-852 |
| 321 | GAAGCUAUAUGAGCCAGUG | CACUGGCUCAUAUAGCUUC | | [759-777 |
| 322 | AGAAGCUAUAUGAGCCAGU | ACUGGCUCAUAUAGCUUCU | | [758-776 |
| 323 | GCAGAAGCUAUAUGAGCCA | UGGCUCAUAUAGCUUCUGC | | [756-774 |
| 324 | GUGAGGUGUUAUAUAACAU | AUGUUAUAUAACACCUCAC | | [614-632 |
| 325 | CCGGAUUUGCUUCAACAUU | AAUGUUGAAGCAAAUCCGG | | [363-381 |
| 326 | CAGCUGUGUUCACACUGUA | UACAGUGUGAACACAGCUG | | [2148-2166] |
| 327 | CCCUGUUAAAAUUUAACCU | AGGUUAAAUUUUAACAGGG | | [1955-1973] |
| 328 | CCCUAUUACUUGUUUGUAA | UUACAAACAAGUAAUAGGG | | [1870-1888] |
| 329 | ACAGCAUGAAGGAUGCCUG | CAGGCAUCCUUCAUGCUGU | | [1475-1493 |
| 330 | GUACACGGUAGUCAUGAAG | CUUCAUGACUACCGUGUAC | | [1329-1347 |
| 331 | AGUACACGGUAGUCAUGAA | UUCAUGACUACCGUGUACU | | [1328-1346 |
| 332 | AGACAGUUUCUCUGGGUUU | AAACCCAGAGAAACUGUCU | | [885-903 |
| 333 | AGCUGGCCAAGAAGGAUUA | UAAUCCUUCUUGGCCAGCU | | [827-845 |
| 334 | UUGCUUUCAUGUAUGCCAA | UUGGCAUACAUGAAAGCAA | | [632-650 |
| 335 | CCAGCUGAUAGACUAUAAG | CUUAUAGUCUAUCAGCUGG | | [564-582 |
| 336 | AACCAGCUGAUAGACUAUA | UAUAGUCUAUCAGCUGGUU | | [562-580 |
| 337 | UCUGUGUCAUACCACAAUA | UAUUGUGGUAUGACACAGA | | [2200-2218] |
| 338 | GUGCACUUUUCUGUGUCAU | AUGACACAGAAAAGUGCAC | | [2191-2209] |
| 339 | GUACAUUUGGUGCACUUUU | AAAAGUGCACCAAAUGUAC | | [2182-2200] |
| 340 | CUCUUGGCCUCCUAGUUUC | GAAACUAGGAGGCCAAGAG | | [225-243] |
| 341 | UCCAGGUACUGAUCCUGUU | AACAGGAUCAGUACCUGGA | | [2106-2124] |
| 342 | UCUUUCCUUUUCUCUCUCA | UGAGAGAGAAAAGGAAAGA | Rat | [13-31] |
| 343 | GACCUGGAGUUUCAGGAAG | CUUCCUGAAACUCCAGGUC | | [1675-1693 |
| 344 | AGAACCUCAGCUUAAGAAA | UUUCUUAAGCUGAGGUUCU | | [1608-1626 |
| 345 | AGAACACAGUGGGUGACCA | UGGUCACCCACUGUGUUCU | | [1532-1550 |
| 346 | UGGUGUCUAAGAAACUGGA | UCCAGUUUCUUAGACACCA | | [1385-1403 |
| 347 | GGUUUGUGCCUGAGACAAA | UUUGUCUCAGGCACAAACC | | [1001-1019 |
| 348 | CUGAUGCAUUUGCAACACU | AGUGUUGCAAAUGCAUCAG | | [74-92] |
| 349 | GGCUCACCGUGUGCUAUUU | AAAUAGCACACGGUGAGCC | | [981-999 |
| 350 | CCUGAUGCAUUUGCAACAC | GUGUUGCAAAUGCAUCAGG | | [73-91] |
| 351 | GGCCAAGAAGGAUUACCUA | UAGGUAAUCCUUCUUGGCC | | [831-849 |
| 352 | UGAGAGACAAGUGGCUCAG | CUGAGCCACUUGUCUCUCA | | [810-828 |
| 353 | GACAUUUCCUGAUGCAUUU | AAAUGCAUCAGGAAAUGUC | | [66-84] |
| 354 | GGACAUUUCCUGAUGCAUU | AAUGCAUCAGGAAAUGUCC | | [65-83] |
| 355 | GCCCAGACAUUCCAAAAUC | GAUUUUGGAAUGUCUGGGC | | [711-729 |
| 356 | GAAGUCUGAGCCCAGACAU | AUGUCUGGGCUCAGACUUC | | [702-720 |
| 357 | CAGUUAGCAUUGGCCACGA | UCGUGGCCAAUGCUAACUG | | [679-697 |
| 358 | GCCUGUGAGGUGUUAUAUA | UAUAUAACACCUCACAGGC | | [610-628 |
| 359 | GAAAUAUGAUUUGGCUAUC | GAUAGCCAAAUCAUAUUUC | | [507-525 |
| 360 | CAACGAGGGAUGCUCUACU | AGUAGAGCAUCCCUCGUUG | | [478-496 |
| 361 | GAAGUAACCUUAUAGGUUA | UAACCUAUAAGGUUACUUC | | [2327-2345] |
| 362 | UCUGAACCAUUACUGUAAU | AUUACAGUAAUGGUUCAGA | | [2293-2311] |
| 363 | GUGUCAUACCACAAUAAAA | UUUUAUUGUGGUAUGACAC | | [2203-2221] |
| 364 | CUCUCUUGGCCUCCUAGUU | AACUAGGAGGCCAAGAGAG | | [223-241] |
| 365 | UGAAGCCCUAUUACUUGUU | AACAAGUAAUAGGGCUUCA | | [1865-1883] |
| 366 | GCACUCUUCAGUUAUGAGG | CCUCAUAACUGAAGAGUGC | | [1642-1660 |
| 367 | CUGAUGCUAAUAACCAGAC | GUCUGGUUAUUAGCAUCAG | | [1586-1604 |
| 368 | GCUGAUGCUAAUAACCAGA | UCUGGUUAUUAGCAUCAGC | | [1585-1603 |
| 369 | CCUUUCAGAAGACAGCAUG | CAUGCUGUCUUCUGAAAGG | | [1464-1482 |
| 370 | UUGCAACACUGAGAAGUUA | UAACUUCUCAGUGUUGCAA | | [83-101] |
| 371 | UGAGACAAAAGAAGAGCUC | GAGCUCUUCUUUUGUCUCA | | [1011-1029 |
| 372 | UGAUGCAUUUGCAACACUG | CAGUGUUGCAAAUGCAUCA | | [75-93] |
| 373 | GUGUCUGGAAGCAGAAGCU | AGCUUCUGCUUCCAGACAC | | [746-764 |
| 374 | CCAGACAUUCCAAAAUCGA | UCGAUUUUGGAAUGUCUGG | | [713-731 |
| 375 | UGCCUGUGAGGUGUUAUAU | AUAUAACACCUCACAGGCA | | [609-627 |
| 376 | GGCUCCAGUUCAAGCUGUU | AACAGCUUGAACUGGAGCC | | [590-608 |
| 377 | AGCCUUGAUUCAGCUUCGA | UCGAAGCUGAAUCAAGGCU | | [540-558 |
| 378 | AGACCUUAAAGAAGCCUUG | CAAGGCUUCUUUAAGGUCU | | [528-546 |
| 379 | UGCUCUACUACCAGACAGA | UCUGUCUGGUAGUAGAGCA | | [488-506 |
| 380 | CCUUUACCAGAAGCAUUAA | UUAAUGCUUCUGGUAAAGG | | [428-446 |
| 381 | CUAUCCUGAAGAACAUGAC | GUCAUGUUCUUCAGGAUAG | | [395-413 |
| 382 | ACCUUAUAGGUUACUCAUA | UAUGAGUAACCUAUAAGGU | | [2333-2351] |
| 383 | UUCUGUGUCAUACCACAAU | AUUGUGGUAUGACACAGAA | | [2199-2217] |
| 384 | UGCACUUUUCUGUGUCAUA | UAUGACACAGAAAAGUGCA | | [2192-2210] |
| 385 | GGUGCACUUUUCUGUGUCA | UGACACAGAAAAGUGCACC | | [2190-2208] |
| 386 | CCAGCUGUGUUCACACUGU | ACAGUGUGAACACAGCUGG | | [2147-2165] |
| 387 | CUAGGAUGUUUCACAAACU | AGUUUGUGAAACAUCCUAG | | [1830-1848 |
| 388 | CCCAGAAAGUGAACACCUU | AAGGUGUUCACUUUCUGGG | | [138-156] |
| 389 | UGUUAUCAAAGGUGAAUGA | UCAUUCACCUUUGAUAACA | | [1709-1727 |
| 390 | GGAUAUAAUCCUGGUGUUA | UAACACCAGGAUUAUAUCC | | [1695-1713 |
| 391 | GGCACUCUUCAGUUAUGAG | CUCAUAACUGAAGAGUGCC | | [1641-1659 |
| 392 | AGCUGAUGCUAAUAACCAG | CUGGUUAUUAGCAUCAGCU | | [1584-1602 |
| 393 | ACCAAGGCUUUCCAGAUGA | UCAUCUGGAAAGCCUUGGU | | [1547-1565 |
| 394 | GACAUGGUGUCUAAGAAAC | GUUUCUUAGACACCAUGUC | | [1381-1399 |
| 395 | GCACUACAAGUACACGGUA | UACCGUGUACUUGUAGUGC | | [1320-1338 |
| 396 | CCUACACACUCAAGGUGCA | UGCACCUUGAGUGUGUAGG | | [1304-1322 |
| 397 | GCUCCUCCUAGUUCCAAAG | CUUUGGAACUAGGAGGAGC | | [1207-1225 |
| 398 | UGCAACACUGAGAAGUUAU | AUAACUUCUCAGUGUUGCA | | [84-102] |
| 399 | AAGACAGUUUCUCUGGGUU | AACCCAGAGAAACUGUCUU | | [884-902 |
| 400 | CCAAGAAGGAUUACCUAGG | CCUAGGUAAUCCUUCUUGG | | [833-851 |
| 401 | CCAAAUGAGAGACAAGUGG | CCACUUGUCUCUCAUUUGG | | [805-823 |
| 402 | AAAAGCUGAAGAACAGUUA | UAACUGUUCUUCAGCUUUU | | [666-684 |
| 403 | UUAUGAGUCAGUUGCCAAA | UUUGGCAACUGACUCAUAA | | [40-58] |
| 404 | UUGCCUGUGAGGUGUUAUA | UAUAACACCUCACAGGCAA | | [608-626 |
| 405 | GCCUUGAUUCAGCUUCGAG | CUCGAAGCUGAAUCAAGGC | | [541-559 |
| 406 | UGUGUCAUACCACAAUAAA | UUUAUUGUGGUAUGACACA | | [2202-2220] |
| 407 | AGCUGUGUUCACACUGUAA | UUACAGUGUGAACACAGCU | | [2149-2167] |
| 408 | CCAGGUACUGAUCCUGUUU | AAACAGGAUCAGUACCUGG | | [2107-2125] |
| 409 | AGACGCUCCAACCUGUCUU | AAGACAGGUUGGAGCGUCU | | [186-204] |
| 410 | UCAGUUAUGAGGCUACCCA | UGGGUAGCCUCAUAACUGA | | [1649-1667 |
| 411 | UGACCAAGGCUUUCCAGAU | AUCUGGAAAGCCUUGGUCA | | [1545-1563 |
| 412 | UCCGGCUGGAACACACUAA | UUAGUGUGUUCCAGCCGGA | | [1406-1424 |
| 413 | AGCCUAAGGAAGUGAAGCU | AGCUUCACUUCCUUAGGCU | | [1271-1289 |
| 414 | CCUUGAACCAGUUGAGCUG | CAGCUCAACUGGUUCAAGG | | [1131-1149 |
| 415 | CAAGACAGUUUCUCUGGGU | ACCCAGAGAAACUGUCUUG | | [883-901 |
| 416 | UCCUGAUGCAUUUGCAACA | UGUUGCAAAUGCAUCAGGA | | [72-90] |
| 417 | GGAUCAAGACAGUUUCUCU | AGAGAAACUGUCUUGAUCC | | [879-897 |
| 418 | AGAGACAAGUGGCUCAGCU | AGCUGAGCCACUUGUCUCU | GP | [812-830 |
| 419 | CUGAAGAACAGUUAGCAUU | AAUGCUAACUGUUCUUCAG | | [671-689 |
| 420 | AAAAAGCUGAAGAACAGUU | AACUGUUCUUCAGCUUUUU | | [665-683 |
| 421 | CUUUCAUGUAUGCCAAGAA | UUCUUGGCAUACAUGAAAG | | [635-653 |
| 422 | ACAUUGCUUUCAUGUAUGC | GCAUACAUGAAAGCAAUGU | | [629-647 |
| 423 | UGUGAGGUGUUAUAUAACA | UGUUAUAUAACACCUCACA | | [613-631 |
| 424 | CUCCAGUUCAAGCUGUUUG | CAAACAGCUUGAACUGGAG | | [592-610 |
| 425 | GAACCAGCUGAUAGACUAU | AUAGUCUAUCAGCUGGUUC | | [561-579 |
| 426 | GAAGCCUUGAUUCAGCUUC | GAAGCUGAAUCAAGGCUUC | | [538-556 |
| 427 | AGAAGCCUUGAUUCAGCUU | AAGCUGAAUCAAGGCUUCU | | [537-555 |
| 428 | GGAUGCUCUACUACCAGAC | GUCUGGUAGUAGAGCAUCC | | [485-503 |
| 429 | GGGAUGCUCUACUACCAGA | UCUGGUAGUAGAGCAUCCC | | [484-502 |
| 430 | GUGGCUUACUUCCAACGAG | CUCGUUGGAAGUAAGCCAC | GP | [466-484 |
| 431 | UGCUUCAACAUUGGCUGCA | UGCAGCCAAUGUUGAAGCA | | [370-388 |
| 432 | CUUAUAGGUUACUCAUAAG | CUUAUGAGUAACCUAUAAG | | [2335-2353] |
| 433 | AGGCUUGAAGUAACCUUAU | AUAAGGUUACUUCAAGCCU | | [2321-2339] |
| 434 | UUCUGAACCAUUACUGUAA | UUACAGUAAUGGUUCAGAA | | [2292-2310] |
| 435 | GCAUCUUACAAAAACAAGA | UCUUGUUUUUGUAAGAUGC | | [2231-2249] |
| 436 | GCUGUACAUUUGGUGCACU | AGUGCACCAAAUGUACAGC | | [2179-2197] |
| 437 | UACUGAGACAUUACAGUUU | AAACUGUAAUGUCUCAGUA | | [1916-1934] |
| 438 | GUAAGAUUUAGCACCCUUC | GAAGGGUGCUAAAUCUUAC | | [1885-1903] |
| 439 | UAGGAUGUUUCACAAACUA | UAGUUUGUGAAACAUCCUA | | [1831-1849 |
| 440 | CAGUUAUGAGGCUACCCAA | UUGGGUAGCCUCAUAACUG | | [1650-1668 |
| 441 | CUACUCAUCUGGCCCAGAA | UUCUGGGCCAGAUGAGUAG | | [126-144] |
| 442 | ACGGUAGUCAUGAAGACUC | GAGUCUUCAUGACUACCGU | | [1333-1351 |
| 443 | ACACGGUAGUCAUGAAGAC | GUCUUCAUGACUACCGUGU | | [1331-1349 |
| 444 | GGCAAUGAUAACUGGGCCA | UGGCCCAGUUAUCAUUGCC | | [1069-1087 |
| 445 | UGCAUUUGCAACACUGAGA | UCUCAGUGUUGCAAAUGCA | | [78-96] |
| 446 | GUGCCUGAGACAAAAGAAG | CUUCUUUUGUCUCAGGCAC | | [1006-1024 |
| 447 | AGCUAUAUGAGCCAGUGGU | ACCACUGGCUCAUAUAGCU | | [761-779 |
| 448 | GGGACAUUUCCUGAUGCAU | AUGCAUCAGGAAAUGUCCC | | [64-82] |
| 449 | UGAAGUCUGAGCCCAGACA | UGUCUGGGCUCAGACUUCA | | [701-719 |
| 450 | AGCUGAAGAACAGUUAGCA | UGCUAACUGUUCUUCAGCU | | [669-687 |
| 451 | GCUUUCAUGUAUGCCAAGA | UCUUGGCAUACAUGAAAGC | | [634-652 |
| 452 | UCAACAUUGGCUGCAUGUA | UACAUGCAGCCAAUGUUGA | | [374-392 |
| 453 | CCCGGAUUUGCUUCAACAU | AUGUUGAAGCAAAUCCGGG | | [362-380 |
| 454 | GUACCCAGGAUGAUUUCCU | AGGAAAUCAUCCUGGGUAC | | [1991-2009] |
| 455 | ACUGAGACAUUACAGUUUG | CAAACUGUAAUGUCUCAGU | | [1917-1935] |
| 456 | GUACUGAGACAUUACAGUU | AACUGUAAUGUCUCAGUAC | | [1915-1933] |
| 457 | CUGCGCAACUACAGAUUUG | CAAAUCUGUAGUUGCGCAG | | [1791-1809 |
| 458 | UCCUGGUGUUAUCAAAGGU | ACCUUUGAUAACACCAGGA | | [1703-1721 |
| 459 | CCUCAGCUUAAGAAAGGCA | UGCCUUUCUUAAGCUGAGG | | [1612-1630 |
| 460 | GAAGCUCAGUGUUCCCAUG | CAUGGGAACACUGAGCUUC | | [1284-1302 |
| 461 | GGGUUUGUGCCUGAGACAA | UUGUCUCAGGCACAAACCC | | [1000-1018 |
| 462 | UGGAUCAAGACAGUUUCUC | GAGAAACUGUCUUGAUCCA | | [878-896 |
| 463 | GCCAAGAAGGAUUACCUAG | CUAGGUAAUCCUUCUUGGC | | [832-850 |
| 464 | UGGCCAAGAAGGAUUACCU | AGGUAAUCCUUCUUGGCCA | | [830-848 |
| 465 | UGAGCCCAGACAUUCCAAA | UUUGGAAUGUCUGGGCUCA | | [708-726 |
| 466 | GGCCUUUACCAGAAGCAUU | AAUGCUUCUGGUAAAGGCC | | [426-444 |
| 467 | GUAACCUUAUAGGUUACUC | GAGUAACCUAUAAGGUUAC | | [2330-2348] |
| 468 | UGAAGUAACCUUAUAGGUU | AACCUAUAAGGUUACUUCA | | [2326-2344] |
| 469 | UGGUGCACUUUUCUGUGUC | GACACAGAAAAGUGCACCA | | [2189-2207] |
| 470 | UGUUCACACUGUAAACAUU | AAUGUUUACAGUGUGAACA | | [2154-2172] |
| 471 | AGGUACUGAUCCUGUUUCU | AGAAACAGGAUCAGUACCU | | [2109-2127] |
| 472 | UUAGCACCCUUCUGCUGUA | UACAGCAGAAGGGUGCUAA | | [1892-1910] |
| 473 | CCAUUCUACUCAUCUGGCC | GGCCAGAUGAGUAGAAUGG | | [121-139] |
| 474 | UGAAGCUCAGUGUUCCCAU | AUGGGAACACUGAGCUUCA | | [1283-1301 |
| 475 | CUAAGGAAGUGAAGCUCAG | CUGAGCUUCACUUCCUUAG | | [1274-1292 |
| 476 | GGCUUGUUCCCUGCAACUA | UAGUUGCAGGGAACAAGCC | GP | [1112-1130 |
| 477 | AGGCUCACCGUGUGCUAUU | AAUAGCACACGGUGAGCCU | | [980-998 |
| 478 | AGACAUUCCAAAAUCGACA | UGUCGAUUUUGGAAUGUCU | | [715-733 |
| 479 | CCCAGACAUUCCAAAAUCG | CGAUUUUGGAAUGUCUGGG | | [712-730 |
| 480 | GCUGAAGAACAGUUAGCAU | AUGCUAACUGUUCUUCAGC | | [670-688 |
| 481 | UGAUAGACUAUAAGAUCCU | AGGAUCUUAUAGUCUAUCA | GP | [569-587 |
| 482 | AAGGCUUGAAGUAACCUUA | UAAGGUUACUUCAAGCCUU | | [2320-2338] |
| 483 | UAAGGCUUGAAGUAACCUU | AAGGUUACUUCAAGCCUUA | | [2319-2337] |
| 484 | CCAUUACUGUAAUUGGCUC | GAGCCAAUUACAGUAAUGG | | [2299-2317] |
| 485 | AGCUGUACAUUUGGUGCAC | GUGCACCAAAUGUACAGCU | | [2178-2196] |
| 486 | GUGUUCACACUGUAAACAU | AUGUUUACAGUGUGAACAC | | [2153-2171] |
| 487 | CAGGUACUGAUCCUGUUUC | GAAACAGGAUCAGUACCUG | | [2108-2126] |
| 488 | GAGUCUUCCAGGUACUGAU | AUCAGUACCUGGAAGACUC | | [2100-2118] |
| 489 | CCUAUUACUUGUUUGUAAG | CUUACAAACAAGUAAUAGG | | [1871-1889] |
| 490 | GUCUAAGAAACUGGAGCUC | GAGCUCCAGUUUCUUAGAC | | [1389-1407 |
| 491 | CACUACAAGUACACGGUAG | CUACCGUGUACUUGUAGUG | | [1321-1339 |
| 492 | UGCACUACAAGUACACGGU | ACCGUGUACUUGUAGUGCA | | [1319-1337 |
| 493 | AGGUGCACUACAAGUACAC | GUGUACUUGUAGUGCACCU | GP | [1316-1334 |
| 494 | UCAGUGUUCCCAUGCCCUA | UAGGGCAUGGGAACACUGA | | [1289-1307 |
| 495 | CAACUACCUUGAACCAGUU | AACUGGUUCAAGGUAGUUG | GP | [1125-1143 |
| 496 | GUUUGUGCCUGAGACAAAA | UUUUGUCUCAGGCACAAAC | | [1002-1020 |
| 497 | GAGCCCAGACAUUCCAAAA | UUUUGGAAUGUCUGGGCUC | | [709-727 |
| 498 | GAAAAAAGCUGAAGAACAG | CUGUUCUUCAGCUUUUUUC | | [663-681 |
| 499 | CAAGCUGUUUGCCUGUGAG | CUCACAGGCAAACAGCUUG | Ms | [600-618 |
| 500 | UCUACUACCAGACAGAGAA | UUCUCUGUCUGGUAGUAGA | | [491-509 |
| 501 | GAAGCAGAGAAGGCCUUUA | UAAAGGCCUUCUCUGCUUC | | [415-433 |
| 502 | AGCCAGCUGUGUUCACACU | AGUGUGAACACAGCUGGCU | | [2145-2163] |
| 503 | CUAGCUAGCCAGCUGUGUU | AACACAGCUGGCUAGCUAG | | [2139-2157] |
| 504 | UGACUCUGUGGUGUGAGAA | UUCUCACACCACAGAGUCA | | [1517-1535 |
| 505 | GAGUGUGUCUGGAAGCAGA | UCUGCUUCCAGACACACUC | | [742-760 |
| 506 | GGUUAUGAGUCAGUUGCCA | UGGCAACUGACUCAUAACC | | [38-56] |
| 507 | GCUCCAGUUCAAGCUGUUU | AAACAGCUUGAACUGGAGC | | [591-609 |
| 508 | CUGAAGCAGAGAAGGCCUU | AAGGCCUUCUCUGCUUCAG | | [413-431 |
| 509 | UGUAAGAUUUAGCACCCUU | AAGGGUGCUAAAUCUUACA | | [1884-1902] |
| 510 | CCAGAAAGUGAACACCUUG | CAAGGUGUUCACUUUCUGG | | [139-157] |
| 511 | GCCCAGAAAGUGAACACCU | AGGUGUUCACUUUCUGGGC | | [137-155] |
| 512 | UGGCCCAGAAAGUGAACAC | GUGUUCACUUUCUGGGCCA | | [135-153] |
| 513 | GCCAAGAAGGAGGAAUGGA | UCCAUUCCUCCUUCUUGGC | GP | [646-664 |
| 514 | AGCACCCUUCUGCUGUAUA | UAUACAGCAGAAGGGUGCU | | [1894-1912] |
| 515 | CAGCUGGCCAAGAAGGAUU | AAUCCUUCUUGGCCAGCUG | | [826-844 |
| 516 | AGGCCUUUACCAGAAGCAU | AUGCUUCUGGUAAAGGCCU | | [425-443 |
| 517 | CUAGCCAGCUGUGUUCACA | UGUGAACACAGCUGGCUAG | | [2143-2161] |
| 518 | UGCUCUGAGUGCUAGCUAG | CUAGCUAGCACUCAGAGCA | | [2128-2146] |
| 519 | UGGCUAUCAAAGACCUUAA | UUAAGGUCUUUGAUAGCCA | | [518-536 |
| 520 | UAGCACCCUUCUGCUGUAU | AUACAGCAGAAGGGUGCUA | | [1893-1911] |
| 521 | GCUUAAGAAAGGCAGCCAA | UUGGCUGCCUUUCUUAAGC | | [1617-1635 |
| 522 | CUGACUCUGUGGUGUGAGA | UCUCACACCACAGAGUCAG | | [1516-1534 |
| 523 | UGAUUUGGCUAUCAAAGAC | GUCUUUGAUAGCCAAAUCA | | [513-531 |
| 524 | AGAAGGCCUUUACCAGAAG | CUUCUGGUAAAGGCCUUCU | | [422-440 |
| 525 | GGUCAUGCCAGGGAACAUU | AAUGUUCCCUGGCAUGACC | | [1032-1050 |
| 526 | AGCUUAAGAAAGGCAGCCA | UGGCUGCCUUUCUUAAGCU | | [1616-1634 |

TABLE A18

NOXA2 19-mer oligomer pairs (NCF2, neutrophil
cytosolic factor 2, p67phox)

| | | | | |
|---|---|---|---|---|
| | | | | Human-67189969 |
| No. | Sense siRNA | AntiSense siRNA | Other Sp | ORF: 253-1833 |

| | | | | |
|---|---|---|---|---|
| 1 | CCACGAGCAUGAAGUCUGA | UCAGACUUCAUGCUCGUGG | | [692-710] |
| 2 | GCAUGUACACUAUCCUGAA | UUCAGGAUAGUGUACAUGC | | [386-404] |
| 3 | CCUCCUAGUUUCUACCUAA | UUAGGUAGAAACUAGGAGG | | [232-250] |
| 4 | CUACAAAGCUGAAGAAAAU | AUUUUCUUCAGCUUUGUAG | | [1847-1865] |
| 5 | GAGGGAACCAGCUGAUAGA | UCUAUCAGCUGGUUCCCUC | | [557-575] |
| 6 | CCAGAUGAACCCAAGGAAA | UUUCCUUGGGUUCAUCUGG | | [1558-1576] |
| 7 | GAUGUUUCACAAACUACAA | UUGUAGUUUGUGAAACAUC | | [1834-1852] |
| 8 | GGAUGGAAGUGUCUGGAAA | UUUCCAGACACUUCCAUCC | | [2071-2089] |
| 9 | GAGGGAUGCUCUACUACCA | UGGUAGUAGAGCAUCCCUC | | [482-500] |
| 10 | GCAACUACAGAUUUGGAAA | UUUCCAAAUCUGUAGUUGC | | [1795-1813] |
| 11 | CAAGAAGGAGGAAUGGAAA | UUUCCAUUCCUCCUUCUUG | GP | [648-666] |
| 12 | AAAAGAAGAGCCUAAGGAA | UUCCUUAGGCUCUUCUUUU | Rat | [1263-1281] |
| 13 | GGCUUGAAGUAACCUUAUA | UAUAAGGUUACUUCAAGCC | | [2322-2340] |
| 14 | CCAAGGCUUUCCAGAUGAA | UUCAUCUGGAAAGCCUUGG | | [1548-1566] |
| 15 | CCUGUGAGGUGUUAUAUAA | UUAUAUAACACCUCACAGG | | [611-629] |
| 16 | CCAAGAAGGAGGAAUGGAA | UUCCAUUCCUCCUUCUUGG | GP | [647-665] |
| 17 | CAGCUGAUAGACUAUAAGA | UCUUAUAGUCUAUCAGCUG | | [565-583] |
| 18 | ACACUAUCCUGAAGAACAU | AUGUUCUUCAGGAUAGUGU | | [392-410] |
| 19 | UAAGGCAUAUACAAAUAAA | UUUAUUUGUAUAUGCCUUA | | [2350-2368] |
| 20 | GGAACCAGCUGAUAGACUA | UAGUCUAUCAGCUGGUUCC | Ms | [560-578] |
| 21 | GUCAUACCACAAUAAAAAA | UUUUUUAUUGUGGUAUGAC | | [2205-2223] |
| 22 | CAAGGAGUAAGUACAAAUA | UAUUUGUACUUACUCCUUG | | [2266-2284] |
| 23 | CAAGCUGUUUCGACCAAAU | AUUUGGUCGAAACAGCUUG | | [792-810] |
| 24 | CCUAGUUUCUACCUAAUCA | UGAUUAGGUAGAAACUAGG | | [235-253] |
| 25 | UGAAGAAGGGCAAUGAUAA | UUAUCAUUGCCCUUCUUCA | | [1061-1079] |
| 26 | GAACCCAAGGAAAGUGAAA | UUUCACUUUCCUUGGGUUC | GP | [1564-1582] |
| 27 | GCUGUAUACUGUACUGAGA | UCUCAGUACAGUAUACAGC | | [1905-1923] |
| 28 | UGUCAUACCACAAUAAAAA | UUUUUAUUGUGGUAUGACA | | [2204-2222] |
| 29 | CAUACCACAAUAAAAAAAA | UUUUUUUUAUUGUGGUAUG | | [2207-2225] |
| 30 | CAGAGGACCUGGAGUUUCA | UGAAACUCCAGGUCCUCUG | | [1670-1688] |
| 31 | CUAUUUAUUCCCUGUUAAA | UUUAACAGGGAAUAAAUAG | | [1946-1964] |
| 32 | CAUCUGUGGUGGAUCAAGA | UCUUGAUCCACCACAGAUG | GP | [869-887] |
| 33 | ACUCAUAAGGCAUAUACAA | UUGUAUAUGCCUUAUGAGU | | [2345-2363] |
| 34 | AAACAUUCAUCAAGCUGUA | UACAGCUUGAUGAAUGUUU | | [2166-2184] |
| 35 | AAAUAUUCCUGUUUCUGAA | UUCAGAAACAGGAAUAUUU | | [2280-2298] |
| 36 | ACUACAAAGCUGAAGAAAA | UUUUCUUCAGCUUUGUAGU | | [1846-1864] |
| 37 | UGAAGACUGCGCAACUACA | UGUAGUUGCGCAGUCUUCA | | [1785-1803] |
| 38 | CCAUCAGCCUCUGGAAUGA | UCAUUCCAGAGGCUGAUGG | | [269-287] |
| 39 | CUGUUUCGACCAAAUGAGA | UCUCAUUUGGUCGAAACAG | | [796-814] |
| 40 | CAUAAGGCAUAUACAAAUA | UAUUUGUAUAUGCCUUAUG | | [2348-2366] |
| 41 | UAAUAACCAGACAACAGAA | UUCUGUUGUCUGGUUAUUA | | [1593-1611] |
| 42 | CAGAAGACAGCAUGAAGGA | UCCUUCAUGCUGUCUUCUG | | [1469-1487] |
| 43 | UGUGCCUGAGACAAAAGAA | UUCUUUUGUCUCAGGCACA | | [1005-1023] |
| 44 | UAUCAAAGGUGAAUGAAGA | UCUUCAUUCACCUUUGAUA | | [1712-1730] |
| 45 | GGAAGCAGAAGCUAUAUGA | UCAUAUAGCUUCUGCUUCC | | [752-770] |
| 46 | GGAAGUGUUAACUAUUUAU | AUAAAUAGUUAACACUUCC | | [1935-1953] |
| 47 | AAACUACAAAGCUGAAGAA | UUCUUCAGCUUUGUAGUUU | | [1844-1862] |
| 48 | CAUGAAGUCUGAGCCCAGA | UCUGGGCUCAGACUUCAUG | | [699-717] |
| 49 | AAUUUAACCUACUAGACAA | UUGUCUAGUAGGUUAAAUU | | [1964-1982] |
| 50 | GGAAAGCACUCGGAGAGAA | UUCUCUCCGAGUGCUUUCC | | [1809-1827] |
| 51 | GAUCUUCAGGGCUCUGGAA | UUCCAGAGCCCUGAAGAUC | Rat | [957-975] |
| 52 | CAUCAGCCUCUGGAAUGAA | UUCAUUCCAGAGGCUGAUG | | [270-288] |
| 53 | AGGAGUAAGUACAAAUAUU | AAUAUUUGUACUUACUCCU | | [2268-2286] |
| 54 | CAGGGAACAUUGUCUUUGU | ACAAAGACAAUGUUCCCUG | | [1040-1058] |
| 55 | CUUGAAGAAGGGCAAUGAU | AUCAUUGCCCUUCUUCAAG | | [1059-1077] |
| 56 | UAUCAAAGACCUUAAAGAA | UUCUUUAAGGUCUUUGAUA | | [522-540] |
| 57 | GCAAGCUGUUUCGACCAAA | UUUGGUCGAAACAGCUUGC | | [791-809] |
| 58 | CAACAGAACCUCAGCUUAA | UUAAGCUGAGGUUCUGUUG | | [1604-1622] |
| 59 | AUCAAAGGUGAAUGAAGAA | UUCUUCAUUCACCUUUGAU | | [1713-1731] |
| 60 | GAUGCAUUUGCAACACUGA | UCAGUGUUGCAAAUGCAUC | | [76-94] |
| 61 | AGAAGUCUAGGAUGUUUCA | UGAAACAUCCUAGACUUCU | | [1824-1842] |
| 62 | AACGAGGGAUGCUCUACUA | UAGUAGAGCAUCCCUCGUU | | [479-497] |
| 63 | CGAGAGAGUCUUCCAGGUA | UACCUGGAAGACUCUCUCG | | [2095-2113] |
| 64 | CAAGUGGAGGCACUCUUCA | UGAAGAGUGCCUCCACUUG | | [1633-1651] |
| 65 | AGCUGUUUCGACCAAAUGA | UCAUUUGGUCGAAACAGCU | | [794-812] |
| 66 | GAGAAGGCCUUUACCAGAA | UUCUGGUAAAGGCCUUCUC | | [421-439] |
| 67 | GGAACAUUGUCUUUGUCUU | AAGACAAAGACAAUGUUCC | | [1043-1061] |
| 68 | AAGAGCCUAAGGAAGUGAA | UUCACUUCCUUAGGCUCUU | Rat | [1268-1286] |
| 69 | CACAAUAAAAAAAAACCUA | UAGGUUUUUUUUUAUUGUG | | [2212-2230] |
| 70 | AGAUCUUCAGGGCUCUGGA | UCCAGAGCCCUGAAGAUCU | Rat | [956-974] |
| 71 | CUAAUAACCAGACAACAGA | UCUGUUGUCUGGUUAUUAG | | [1592-1610] |
| 72 | UGCUAAUAACCAGACAACA | UGUUGUCUGGUUAUUAGCA | | [1590-1608] |
| 73 | UGGAAGUGUUAACUAUUUA | UAAAUAGUUAACACUUCCA | | [1934-1952] |
| 74 | AGAACAUGACUGAAGCAGA | UCUGCUUCAGUCAUGUUCU | | [404-422] |
| 75 | GCUCUUAAGGCUUGAAGUA | UACUUCAAGCCUUAAGAGC | | [2314-2332] |
| 76 | GAAGAACAUGACUGAAGCA | UGCUUCAGUCAUGUUCUUC | | [402-420] |
| 77 | GGCAAGCUGUUUCGACCAA | UUGGUCGAAACAGCUUGCC | | [790-808] |
| 78 | CUGCAACUACCUUGAACCA | UGGUUCAAGGUAGUUGCAG | GP | [1122-1140] |
| 79 | UACUCAUAAGGCAUAUACA | UGUAUAUGCCUUAUGAGUA | | [2344-2362] |
| 80 | GGAAGUGAAGCUCAGUGUU | AACACUGAGCUUCACUUCC | | [1278-1296] |
| 81 | AUUCCCUGUUAAAAUUUAA | UUAAAUUUUAACAGGGAAU | | [1952-1970] |
| 82 | GUUUGGAAGUGUUAACUAU | AUAGUUAACACUUCCAAAC | | [1931-1949] |
| 83 | UGGGUUUGUGCCUGAGACA | UGUCUCAGGCACAAACCCA | | [999-1017] |
| 84 | CUUUCAGAAGACAGCAUGA | UCAUGCUGUCUUCUGAAAG | | [1465-1483] |
| 85 | GUUAAAAUUUAACCUACUA | UAGUAGGUUAAAUUUUAAC | | [1959-1977] |
| 86 | AAGAAGGAGGAAUGGAAAA | UUUUCCAUUCCUCCUUCUU | GP | [649-667] |
| 87 | UAACAUUGCUUUCAUGUAU | AUACAUGAAAGCAAUGUUA | | [627-645] |
| 88 | AAAAAAACCUAGCAUCUUA | UAAGAUGCUAGGUUUUUUU | | [2220-2238] |
| 89 | UGCCUGAGACAAAAGAAGA | UCUUCUUUUGUCUCAGGCA | | [1007-1025] |
| 90 | ACUAGACAAUGAUGUGAGU | ACUCACAUCAUUGUCUAGU | | [1974-1992] |
| 91 | CAAGAAGGACUGGAAGGGA | UCCCUUCCAGUCCUUCUUG | | [306-324] |
| 92 | UUAUGAGGCUACCCAACCA | UGGUUGGGUAGCCUCAUAA | | [1653-1671] |
| 93 | UUGUCUUGAAGAAGGGCAA | UUGCCCUUCUUCAAGACAA | | [1055-1073] |
| 94 | GUUUCGACCAAAUGAGAGA | UCUCUCAUUUGGUCGAAAC | | [798-816] |
| 95 | UGUGGUGGAUCAAGACAGU | ACUGUCUUGAUCCACCACA | | [873-891] |
| 96 | CUGAGCCCAGACAUUCCAA | UUGGAAUGUCUGGGCUCAG | | [707-725] |
| 97 | AUAGGUUACUCAUAAGGCA | UGCCUUAUGAGUAACCUAU | | [2338-2356] |
| 98 | CCACAAUAAAAAAAAACCU | AGGUUUUUUUUUAUUGUGG | | [2211-2229] |
| 99 | CAAAUAUUCCUGUUUCUGA | UCAGAAACAGGAAUAUUUG | | [2279-2297] |
| 100 | AAGACUGCGCAACUACAGA | UCUGUAGUUGCGCAGUCUU | | [1787-1805] |
| 101 | AAGAAGAGCUCCAGGUCAU | AUGACCUGGAGCUCUUCUU | | [1019-1037] |
| 102 | GAAGUGUCUGGAAAGGGCA | UGCCCUUUCCAGACACUUC | | [2076-2094] |
| 103 | ACUAUUUAUUCCCUGUUAA | UUAACAGGGAAUAAAUAGU | | [1945-1963] |
| 104 | GAAGAAGGGCAAUGAUAAC | GUUAUCAUUGCCCUUCUUC | | [1062-1080] |
| 105 | GGAGAGAAGUCUAGGAUGU | ACAUCCUAGACUUCUCUCC | | [1820-1838] |
| 106 | UAGCAUCUUACAAAAACAA | UUGUUUUUGUAAGAUGCUA | | [2229-2247] |
| 107 | AAGGAGUAAGUACAAAUAU | AUAUUUGUACUUACUCCUU | | [2267-2285] |
| 108 | UGGAGGCACUCUUCAGUUA | UAACUGAAGAGUGCCUCCA | | [1637-1655] |
| 109 | AAAGGUGAAUGAAGAAUGG | CCAUUCUUCAUUCACCUUU | | [1716-1734] |
| 110 | AACCCAAGGAAAGUGAAAA | UUUUCACUUUCCUUGGGUU | GP | [1565-1583] |
| 111 | GCCUUUACCAGAAGCAUUA | UAAUGCUUCUGGUAAAGGC | | [427-445] |
| 112 | GAAGGAUUACCUAGGCAAG | CUUGCCUAGGUAAUCCUUC | | [837-855] |
| 113 | UCAUAAGGCAUAUACAAAU | AUUUGUAUAUGCCUUAUGA | | [2347-2365] |
| 114 | AAGUCUAGGAUGUUUCACA | UGUGAAACAUCCUAGACUU | | [1826-1844] |
| 115 | ACCAGACAACAGAACCUCA | UGAGGUUCUGUUGUCUGGU | | [1598-1616] |
| 116 | GAGGCACUCUUCAGUUAUG | CAUAACUGAAGAGUGCCUC | | [1639-1657] |
| 117 | UAAAAUUUAACCUACUAGA | UCUAGUAGGUUAAAUUUUA | | [1961-1979] |
| 118 | CAGCUCCUCCUAGUUCCAA | UUGGAACUAGGAGGAGCUG | | [1205-1223] |
| 119 | GAUGCUCUACUACCAGACA | UGUCUGGUAGUAGAGCAUC | | [486-504] |
| 120 | UCAUACCACAAUAAAAAAA | UUUUUUUAUUGUGGUAUGA | | [2206-2224] |
| 121 | GCAGAGAAGGCCUUUACCA | UGGUAAAGGCCUUCUCUGC | | [418-436] |
| 122 | AUAACAUUGCUUUCAUGUA | UACAUGAAAGCAAUGUUAU | | [626-644] |
| 123 | GAUUUGGAAAGCACUCGGA | UCCGAGUGCUUUCCAAAUC | | [1804-1822] |
| 124 | AGGAAAAGUGGAUGGAAGU | ACUUCCAUCCACUUUUCCU | | [2062-2080] |
| 125 | AAGGUGCACUACAAGUACA | UGUACUUGUAGUGCACCUU | GP | [1315-1333] |
| 126 | CAGAACCUCAGCUUAAGAA | UUCUUAAGCUGAGGUUCUG | | [1607-1625] |
| 127 | AAGCUGAUGCUAAUAACCA | UGGUUAUUAGCAUCAGCUU | | [1583-1601] |
| 128 | GAAGACUGCGCAACUACAG | CUGUAGUUGCGCAGUCUUC | | [1786-1804] |
| 129 | GAAGCAGAAGCUAUAUGAG | CUCAUAUAGCUUCUGCUUC | | [753-771] |
| 130 | AGAGAAGGCCUUUACCAGA | UCUGGUAAAGGCCUUCUCU | | [420-438] |
| 131 | UGAGGUGUUAUAUAACAUU | AAUGUUAUAUAACACCUCA | | [615-633] |
| 132 | AUGUUUCACAAACUACAAA | UUUGUAGUUUGUGAAACAU | | [1835-1853] |
| 133 | GUUAUCAAAGGUGAAUGAA | UUCAUUCACCUUUGAUAAC | | [1710-1728] |
| 134 | ACUGUACUGAGACAUUACA | UGUAAUGUCUCAGUACAGU | | [1912-1930] |
| 135 | UAUAUAACAUUGCUUUCAU | AUGAAAGCAAUGUUAUAUA | | [623-641] |
| 136 | AUGAGGCUACCCAACCAGA | UCUGGUUGGGUAGCCUCAU | | [1655-1673] |
| 137 | UUUCCUGAUGCAUUUGCAA | UUGCAAAUGCAUCAGGAAA | | [70-88] |
| 138 | GAUGGAAGUGUCUGGAAAG | CUUUCCAGACACUUCCAUC | | [2072-2090] |
| 139 | UACACUAUCCUGAAGAACA | UGUUCUUCAGGAUAGUGUA | | [391-409] |
| 140 | AUACUGUACUGAGACAUUA | UAAUGUCUCAGUACAGUAU | | [1910-1928] |
| 141 | CCUAAGGAAGUGAAGCUCA | UGAGCUUCACUUCCUUAGG | | [1273-1291] |
| 142 | CAAUGAUGUGAGUACCCAG | CUGGGUACUCACAUCAUUG | | [1980-1998] |
| 143 | GGUGAAUGGAGGAGUUAGG | CCUAACUCCUCCAUUCACC | | [2039-2057] |
| 144 | AGAGCCUAAGGAAGUGAAG | CUUCACUUCCUUAGGCUCU | Rat | [1269-1287] |
| 145 | ACUCUGUGGUGUGAGAACA | UGUUCUCACACCACAGAGU | | [1519-1537] |
| 146 | ACAGGUGAAUGGAGGAGUU | AACUCCUCCAUUCACCUGU | | [2036-2054] |
| 147 | GCUAAUAACCAGACAACAG | CUGUUGUCUGGUUAUUAGC | | [1591-1609] |
| 148 | AUAAGGCAUAUACAAAUAA | UUAUUUGUAUAUGCCUUAU | | [2349-2367] |
| 149 | UCGAGGGAACCAGCUGAUA | UAUCAGCUGGUUCCCUCGA | | [555-573] |
| 150 | GAGAGAAGUCUAGGAUGUU | AACAUCCUAGACUUCUCUC | | [1821-1839] |
| 151 | AAAGCUGAAGAAAAUGAAG | CUUCAUUUUCUUCAGCUUU | | [1851-1869] |
| 152 | AAGGAGGAAUGGAAAAAAG | CUUUUUUCCAUUCCUCCUU | | [652-670] |
| 153 | UUGAAGAAGGGCAAUGAUA | UAUCAUUGCCCUUCUUCAA | | [1060-1078] |
| 154 | GCUUGUUCCCUGCAACUAC | GUAGUUGCAGGGAACAAGC | GP | [1113-1131] |
| 155 | ACUACCAGACAGAGAAAUA | UAUUUCUCUGUCUGGUAGU | | [494-512] |
| 156 | UAAUCAUGUCCCUGGUGGA | UCCACCAGGGACAUGAUUA | | [248-266] ORF |
| 157 | GACCUUAAAGAAGCCUUGA | UCAAGGCUUCUUUAAGGUC | | [529-547] |
| 158 | CACCGUGUGCUAUUUGGGU | ACCCAAAUAGCACACGGUG | | [985-1003] |
| 159 | ACAUGGUGUCUAAGAAACU | AGUUUCUUAGACACCAUGU | | [1382-1400] |
| 160 | AGAUGAACCCAAGGAAAGU | ACUUUCCUUGGGUUCAUCU | | [1560-1578] |
| 161 | CUCUGUGGUGUGAGAACAC | GUGUUCUCACACCACAGAG | | [1520-1538] |
| 162 | AAGCAUUAACCGAGACAAG | CUUGUCUCGGUUAAUGCUU | | [438-456] |
| 163 | CAAGGUGCACUACAAGUAC | GUACUUGUAGUGCACCUUG | GP | [1314-1332] |
| 164 | GACUCUGUGGUGUGAGAAC | GUUCUCACACCACAGAGUC | | [1518-1536] |
| 165 | AAAUCGACAAGGCGAUGGA | UCCAUCGCCUUGUCGAUUU | | [725-743] |
| 166 | GUCUGGAAGCAGAAGCUAU | AUAGCUUCUGCUUCCAGAC | | [748-766] |
| 167 | AACUACAAAGCUGAAGAAA | UUUCUUCAGCUUUGUAGUU | | [1845-1863] |
| 168 | AAAUGAAGCCCUAUUACUU | AAGUAAUAGGGCUUCAUUU | | [1862-1880] |
| 169 | CAGAUGAACCCAAGGAAAG | CUUUCCUUGGGUUCAUCUG | | [1559-1577] |
| 170 | GUGGAUCAAGACAGUUUCU | AGAAACUGUCUUGAUCCAC | | [877-895] |
| 171 | AUGUGAGUACCCAGGAUGA | UCAUCCUGGGUACUCACAU | | [1985-2003] |
| 172 | GAACCAUUACUGUAAUUGG | CCAAUUACAGUAAUGGUUC | | [2296-2314] |
| 173 | GCUUACUUCCAACGAGGGA | UCCCUCGUUGGAAGUAAGC | GP | [469-487] |
| 174 | GCACCCUUCUGCUGUAUAC | GUAUACAGCAGAAGGGUGC | | [1895-1913] |
| 175 | ACUACAGAUUUGGAAAGCA | UGCUUUCCAAAUCUGUAGU | | [1798-1816] |
| 176 | AGUUUGGAAGUGUUAACUA | UAGUUAACACUUCCAAACU | | [1930-1948] |
| 177 | AAAUUUAACCUACUAGACA | UGUCUAGUAGGUUAAAUUU | | [1963-1981] |
| 178 | UGUUGAAGACUGCGCAACU | AGUUGCGCAGUCUUCAACA | | [1782-1800] |
| 179 | UGUAUACUGUACUGAGACA | UGUCUCAGUACAGUAUACA | | [1907-1925] |
| 180 | CAAAGGUGAAUGAAGAAUG | CAUUCUUCAUUCACCUUUG | | [1715-1733] |
| 181 | ACAGAACCUCAGCUUAAGA | UCUUAAGCUGAGGUUCUGU | | [1606-1624] |
| 182 | CAUGUACACUAUCCUGAAG | CUUCAGGAUAGUGUACAUG | | [387-405] |
| 183 | GUUUCUGAACCAUUACUGU | ACAGUAAUGGUUCAGAAAC | | [2290-2308] |
| 184 | AAAGAAGAGCUCCAGGUCA | UGACCUGGAGCUCUUCUUU | | [1018-1036] |
| 185 | UUUGUUGAAGACUGCGCAA | UUGCGCAGUCUUCAACAAA | | [1780-1798] |
| 186 | UCCAACGAGGGAUGCUCUA | UAGAGCAUCCCUCGUUGGA | GP | [476-494] |
| 187 | GGAUUUGCUUCAACAUUGG | CCAAUGUUGAAGCAAAUCC | | [365-383] |
| 188 | UACAGUUUGGAAGUGUUAA | UUAACACUUCCAAACUGUA | | [1927-1945] |
| 189 | CCUGUUAAAAUUUAACCUA | UAGGUUAAAUUUUAACAGG | | [1956-1974] |
| 190 | AAAAGCUGAUGCUAAUAAC | GUUAUUAGCAUCAGCUUUU | | [1581-1599] |
| 191 | AAACAAAAAGAAGAGCCUA | UAGGCUCUUCUUUUUGUUU | | [1258-1276] |
| 192 | CAGGCCCAAGGAGUAAGUA | UACUUACUCCUUGGGCCUG | | [2260-2278] |
| 193 | AAGUCUGAGCCCAGACAUU | AAUGUCUGGGCUCAGACUU | | [703-721] |
| 194 | GAAAGCACUCGGAGAGAAG | CUUCUCUCCGAGUGCUUUC | | [1810-1828] |
| 195 | UAUUUAUUCCCUGUUAAAA | UUUUAACAGGGAAUAAAUA | | [1947-1965] |
| 196 | AAAACCUAGCAUCUUACAA | UUGUAAGAUGCUAGGUUUU | | [2223-2241] |
| 197 | GUGGAUGGAAGUGUCUGGA | UCCAGACACUUCCAUCCAC | | [2069-2087] |
| 198 | AAAAAGAAGAGCCUAAGGA | UCCUUAGGCUCUUCUUUUU | Rat | [1262-1280] |
| 199 | CAUUGUCUUUGUCUUGAAG | CUUCAAGACAAAGACAAUG | | [1047-1065] |
| 200 | AUUUCCUGAUGCAUUUGCA | UGCAAAUGCAUCAGGAAAU | | [69-87] |
| 201 | CUAUUACUUGUUUGUAAGA | UCUUACAAACAAGUAAUAG | | [1872-1890] |
| 202 | UGCUGUAUACUGUACUGAG | CUCAGUACAGUAUACAGCA | | [1904-1922] |
| 203 | UGUUAAAAUUUAACCUACU | AGUAGGUUAAAUUUUAACA | | [1958-1976] |
| 204 | CAGACAUUCCAAAAUCGAC | GUCGAUUUUGGAAUGUCUG | | [714-732] |
| 205 | AGUGAAAAAGCUGAUGCUA | UAGCAUCAGCUUUUUCACU | | [1576-1594] |
| 206 | GAUUCAGCUUCGAGGGAAC | GUUCCCUCGAAGCUGAAUC | | [546-564] |
| 207 | GGCUUUCCAGAUGAACCCA | UGGGUUCAUCUGGAAAGCC | | [1552-1570] |
| 208 | UGGAAAGCACUCGGAGAGA | UCUCUCCGAGUGCUUUCCA | | [1808-1826] |
| 209 | UCUUGAAGAAGGGCAAUGA | UCAUUGCCCUUCUUCAAGA | | [1058-1076] |
| 210 | CAAAAACAAGACACCCAAG | CUUGGGUGUCUUGUUUUUG | | [2239-2257] |
| 211 | UUUGGAAAGCACUCGGAGA | UCUCCGAGUGCUUUCCAAA | | [1806-1824] |
| 212 | AUGGUAGGGUUAUGAGUCA | UGACUCAUAACCCUACCAU | | [31-49] |
| 213 | CGGAUUUGCUUCAACAUUG | CAAUGUUGAAGCAAAUCCG | | [364-382] |
| 214 | UUCCCUGCAACUACCUUGA | UCAAGGUAGUUGCAGGGAA | GP | [1118-1136] |
| 215 | CCUACUAGACAAUGAUGUG | CACAUCAUUGUCUAGUAGG | | [1971-1989] |
| 216 | AGAAGACAGCAUGAAGGAU | AUCCUUCAUGCUGUCUUCU | | [1470-1488] |
| 217 | UUAACCUACUAGACAAUGA | UCAUUGUCUAGUAGGUUAA | | [1967-1985] |
| 218 | AAAAAGCUGAUGCUAAUAA | UUAUUAGCAUCAGCUUUUU | | [1580-1598] |
| 219 | CUUUCCAGAUGAACCCAAG | CUUGGGUUCAUCUGGAAAG | | [1554-1572] |
| 220 | AGUGGAGGCACUCUUCAGU | ACUGAAGAGUGCCUCCACU | | [1635-1653] |
| 221 | CUGUGAGGUGUUAUAUAAC | GUUAUAUAACACCUCACAG | | [612-630] |
| 222 | CAUGACUGAAGCAGAGAAG | CUUCUCUGCUUCAGUCAUG | | [408-426] |
| 223 | GGUGAAAAACUACUGCCUG | CAGGCAGUAGUUUUUCACC | | [1500-1518] |
| 224 | UUCACACUGUAAACAUUCA | UGAAUGUUUACAGUGUGAA | | [2156-2174] |
| 225 | AAUGGAAAAAAGCUGAAGA | UCUUCAGCUUUUUUCCAUU | | [659-677] |
| 226 | UUACAGUUUGGAAGUGUUA | UAACACUUCCAAACUGUAA | | [1926-1944] |
| 227 | CUCUACUACCAGACAGAGA | UCUCUGUCUGGUAGUAGAG | | [490-508] |
| 228 | GUGACCAAGGCUUUCCAGA | UCUGGAAAGCCUUGGUCAC | | [1544-1562] |
| 229 | AGGACCUGGAGUUUCAGGA | UCCUGAAACUCCAGGUCCU | | [1673-1691] |
| 230 | GGAGUAAGUACAAAUAUUC | GAAUAUUUGUACUUACUCC | | [2269-2287] |
| 231 | AGUGGGUGACCAAGGCUUU | AAAGCCUUGGUCACCCACU | | [1539-1557] |
| 232 | AACAAGACACCCAAGUCCA | UGGACUUGGGUGUCUUGUU | | [2243-2261] |
| 233 | AGUGUUCCCAUGCCCUACA | UGUAGGGCAUGGGAACACU | | [1291-1309] |
| 234 | CAGAGAUCUUCAGGGCUCU | AGAGCCCUGAAGAUCUCUG | Rat | [953-971] |
| 235 | UUGUGCCUGAGACAAAAGA | UCUUUUGUCUCAGGCACAA | | [1004-1022] |
| 236 | GAUUUAGCACCCUUCUGCU | AGCAGAAGGGUGCUAAAUC | | [1889-1907] |
| 237 | AAGUGAAAAAGCUGAUGCU | AGCAUCAGCUUUUUCACUU | | [1575-1593] |
| 238 | AACCUUAUAGGUUACUCAU | AUGAGUAACCUAUAAGGUU | | [2332-2350] |
| 239 | UAUCCUGAAGAACAUGACU | AGUCAUGUUCUUCAGGAUA | | [396-414] |
| 240 | UACAGAUUUGGAAAGCACU | AGUGCUUUCCAAAUCUGUA | | [1800-1818] |
| 241 | UCAAGGUGCACUACAAGUA | UACUUGUAGUGCACCUUGA | GP | [1313-1331] |
| 242 | GUUUCUACCUAAUCAUGUC | GACAUGAUUAGGUAGAAAC | | [239-257] ORF |
| 243 | GUGUUAUAUAACAUUGCUU | AAGCAAUGUUAUAUAACAC | | [619-637] |
| 244 | AGAGAAGUCUAGGAUGUUU | AAACAUCCUAGACUUCUCU | | [1822-1840] |
| 245 | AACUAUUUAUUCCCUGUUA | UAACAGGGAAUAAAUAGUU | | [1944-1962] |
| 246 | UAUUCCCUGUUAAAAUUUA | UAAAUUUUAACAGGGAAUA | | [1951-1969] |
| 247 | CAAGUACACGGUAGUCAUG | CAUGACUACCGUGUACUUG | | [1326-1344] |
| 248 | CAAAAAGAAGAGCCUAAGG | CCUUAGGCUCUUCUUUUUG | Rat | [1261-1279] |
| 249 | AAAGAAGAGCCUAAGGAAG | CUUCCUUAGGCUCUUCUUU | Rat | [1264-1282] |
| 250 | UUGGAAGUGUUAACUAUUU | AAAUAGUUAACACUUCCAA | | [1933-1951] |
| 251 | AGUUAUGAGGCUACCCAAC | GUUGGGUAGCCUCAUAACU | | [1651-1669] |
| 252 | AAGUGGAGGCACUCUUCAG | CUGAAGAGUGCCUCCACUU | | [1634-1652] |
| 253 | CUGAGACAUUACAGUUUGG | CCAAACUGUAAUGUCUCAG | | [1918-1936] |
| 254 | CACCCUUCUGCUGUAUACU | AGUAUACAGCAGAAGGGUG | | [1896-1914] |
| 255 | CUGCAUGUACACUAUCCUG | CAGGAUAGUGUACAUGCAG | | [384-402] |
| 256 | AGGGAUGCUCUACUACCAG | CUGGUAGUAGAGCAUCCCU | | [483-501] |
| 257 | AAGAAGGAUUACCUAGGCA | UGCCUAGGUAAUCCUUCUU | | [835-853] |
| 258 | CACGGUAGUCAUGAAGACU | AGUCUUCAUGACUACCGUG | | [1332-1350] |
| 259 | UGUGAGUACCCAGGAUGAU | AUCAUCCUGGGUACUCACA | | [1986-2004] |
| 260 | AAUAAAAAAAAACCUAGCA | UGCUAGGUUUUUUUUUAUU | | [2215-2233] |
| 261 | GAAGUGUUAACUAUUUAUU | AAUAAAUAGUUAACACUUC | | [1936-1954] |
| 262 | GGUAGUCAUGAAGACUCAG | CUGAGUCUUCAUGACUACC | | [1335-1353] |
| 263 | UACUUGUUUGUAAGAUUUA | UAAAUCUUACAAACAAGUA | | [1876-1894] |
| 264 | AUUUAUUCCCUGUUAAAAU | AUUUUAACAGGGAAUAAAU | | [1948-1966] |
| 265 | UAUUUGGGUUUGUGCCUGA | UCAGGCACAAACCCAAAUA | | [995-1013] |
| 266 | CAGAGAAGGCCUUUACCAG | CUGGUAAAGGCCUUCUCUG | | [419-437] |
| 267 | CUGAGAAGUUAUCUUAAGG | CCUUAAGAUAACUUCUCAG | | [91-109] |
| 268 | UCAAGCUGUUUGCCUGUGA | UCACAGGCAAACAGCUUGA | Ms | [599-617] |
| 269 | AAGAAGAGCCUAAGGAAGU | ACUUCCUUAGGCUCUUCUU | Rat | [1265-1283] |
| 270 | CACGAGCAUGAAGUCUGAG | CUCAGACUUCAUGCUCGUG | | [693-711] |
| 271 | ACACUCAAGGUGCACUACA | UGUAGUGCACCUUGAGUGU | GP | [1309-1327] |
| 272 | UAACCUUAUAGGUUACUCA | UGAGUAACCUAUAAGGUUA | | [2331-2349] |
| 273 | UGUCUUGAAGAAGGGCAAU | AUUGCCCUUCUUCAAGACA | | [1056-1074] |
| 274 | AGGGAAGGUGGGCAUUUUC | GAAAAUGCCCACCUUCCCU | | [1752-1770] |
| 275 | CAAAGGGAAGGUGGGCAUU | AAUGCCCACCUUCCCUUUG | | [1749-1767] |
| 276 | CAUGGUGUCUAAGAAACUG | CAGUUUCUUAGACACCAUG | | [1383-1401] |
| 277 | ACAUUUGGUGCACUUUUCU | AGAAAAGUGCACCAAAUGU | | [2184-2202] |
| 278 | AAAAACCUAGCAUCUUACA | UGUAAGAUGCUAGGUUUUU | | [2222-2240] |
| 279 | AAGACAGCAUGAAGGAUGC | GCAUCCUUCAUGCUGUCUU | | [1472-1490] |
| 280 | UUUCAGAAGACAGCAUGAA | UUCAUGCUGUCUUCUGAAA | | [1466-1484] |
| 281 | GUGAGUACCCAGGAUGAUU | AAUCAUCCUGGGUACUCAC | | [1987-2005] |
| 282 | AAAGCUGAAGAACAGUUAG | CUAACUGUUCUUCAGCUUU | | [667-685] |
| 283 | AGAGGACCUGGAGUUUCAG | CUGAAACUCCAGGUCCUCU | | [1671-1689] |
| 284 | GGGUUAUGAGUCAGUUGCC | GGCAACUGACUCAUAACCC | | [37-55] |
| 285 | CAUGUUCAACGGGCAGAAG | CUUCUGCCCGUUGAACAUG | | [1092-1110] |
| 286 | UCAUCAAGCUGUACAUUUG | CAAAUGUACAGCUUGAUGA | | [2172-2190] |
| 287 | AAAAUGAAGCCCUAUUACU | AGUAAUAGGGCUUCAUUUU | | [1861-1879] |
| 288 | UGUGGGCAAGCUGUUUCGA | UCGAAACAGCUUGCCCACA | | [786-804] |
| 289 | UACAAAUAUUCCUGUUUCU | AGAAACAGGAAUAUUUGUA | | [2277-2295] |
| 290 | GGUGUCUAAGAAACUGGAG | CUCCAGUUUCUUAGACACC | | [1386-1404] |
| 291 | UACACGGUAGUCAUGAAGA | UCUUCAUGACUACCGUGUA | | [1330-1348] |
| 292 | UAUUCCUGUUUCUGAACCA | UGGUUCAGAAACAGGAAUA | | [2283-2301] |
| 293 | GAUUACCUAGGCAAGGCGA | UCGCCUUGCCUAGGUAAUC | | [841-859] |
| 294 | CCUUGAUUCAGCUUCGAGG | CCUCGAAGCUGAAUCAAGG | | [542-560] |
| 295 | UAUACUGUACUGAGACAUU | AAUGUCUCAGUACAGUAUA | | [1909-1927] |
| 296 | UUAAAGAAGCCUUGAUUCA | UGAAUCAAGGCUUCUUUAA | | [533-551] |
| 297 | ACAACAGAACCUCAGCUUA | UAAGCUGAGGUUCUGUUGU | | [1603-1621] |
| 298 | ACUCAAGGUGCACUACAAG | CUUGUAGUGCACCUUGAGU | GP | [1311-1329] |
| 299 | CAUCAAGCUGUACAUUUGG | CCAAAUGUACAGCUUGAUG | | [2173-2191] |
| 300 | UAACCAGACAACAGAACCU | AGGUUCUGUUGUCUGGUUA | | [1596-1614] |
| 301 | CUUGUUCCCUGCAACUACC | GGUAGUUGCAGGGAACAAG | GP | [1114-1132] |
| 302 | AAAACUACUGCCUGACUCU | AGAGUCAGGCAGUAGUUUU | Ms | [1505-1523] |
| 303 | CUGUACUGAGACAUUACAG | CUGUAAUGUCUCAGUACAG | | [1913-1931] |
| 304 | GAUCAAGACAGUUUCUCUG | CAGAGAAACUGUCUUGAUC | | [880-898] |
| 305 | GAAGGGCAAUGAUAACUGG | CCAGUUAUCAUUGCCCUUC | | [1065-1083] |
| 306 | UCAUGGUAGGGUUAUGAGU | ACUCAUAACCCUACCAUGA | | [29-47] |
| 307 | UGAAGAACAUGACUGAAGC | GCUUCAGUCAUGUUCUUCA | | [401-419] |
| 308 | UUCGAGGGAACCAGCUGAU | AUCAGCUGGUUCCCUCGAA | | [554-572] |
| 309 | AAGAAGGACUGGAAGGGAG | CUCCCUUCCAGUCCUUCUU | | [307-325] |
| 310 | AAGUACAAAUAUUCCUGUU | AACAGGAAUAUUUGUACUU | | [2274-2292] |
| 311 | UUUGGAAGUGUUAACUAUU | AAUAGUUAACACUUCCAAA | | [1932-1950] |
| 312 | AAAGGGCACGAGAGAGUCU | AGACUCUCUCGUGCCCUUU | | [2087-2105] |
| 313 | UAAGGAAGUGAAGCUCAGU | ACUGAGCUUCACUUCCUUA | | [1275-1293] |
| 314 | GAACAUUGUCUUUGUCUUG | CAAGACAAAGACAAUGUUC | | [1044-1062] |
| 315 | CACUCGGAGAGAAGUCUAG | CUAGACUUCUCUCCGAGUG | | [1815-1833] |
| 316 | CAAAGACCUUAAAGAAGCC | GGCUUCUUUAAGGUCUUUG | | [525-543] |
| 317 | AGUUUCUACCUAAUCAUGU | ACAUGAUUAGGUAGAAACU | | [238-256] ORF |
| 318 | CUCAAGGUGCACUACAAGU | ACUUGUAGUGCACCUUGAG | GP | [1312-1330] |
| 319 | AAAGCACUCGGAGAGAAGU | ACUUCUCUCCGAGUGCUUU | | [1811-1829] |
| 320 | CAAUAAAAAAAAACCUAGC | GCUAGGUUUUUUUUUAUUG | | [2214-2232] |
| 321 | AAAAGUGGAUGGAAGUGUC | GACACUUCCAUCCACUUUU | | [2065-2083] |
| 322 | AUAUAACAUUGCUUUCAUG | CAUGAAAGCAAUGUUAUAU | | [624-642] |
| 323 | UGUUAUAUAACAUUGCUUU | AAAGCAAUGUUAUAUAACA | | [620-638] |
| 324 | AAGUACACGGUAGUCAUGA | UCAUGACUACCGUGUACUU | | [1327-1345] |
| 325 | AUUUAACCUACUAGACAAU | AUUGUCUAGUAGGUUAAAU | | [1965-1983] |
| 326 | AGGGAACCAGCUGAUAGAC | GUCUAUCAGCUGGUUCCCU | | [558-576] |
| 327 | AGGUGAAUGGAGGAGUUAG | CUAACUCCUCCAUUCACCU | | [2038-2056] |
| 328 | UUAUCAAAGGUGAAUGAAG | CUUCAUUCACCUUUGAUAA | | [1711-1729] |
| 329 | CACUCCCGGAUUUGCUUCA | UGAAGCAAAUCCGGGAGUG | | [358-376] |
| 330 | UUUUGUUGAAGACUGCGCA | UGCGCAGUCUUCAACAAAA | | [1779-1797] |
| 331 | UACUGUACUGAGACAUUAC | GUAAUGUCUCAGUACAGUA | | [1911-1929] |
| 332 | UGUCUGGAAGCAGAAGCUA | UAGCUUCUGCUUCCAGACA | | [747-765] |
| 333 | UAGGUUACUCAUAAGGCAU | AUGCCUUAUGAGUAACCUA | | [2339-2357] |
| 334 | AAAAAAAAACCUAGCAUCU | AGAUGCUAGGUUUUUUUUU | | [2218-2236] |
| 335 | GAGUAAGUACAAAUAUUCC | GGAAUAUUUGUACUUACUC | | [2270-2288] |
| 336 | CAUUAACCGAGACAAGCAC | GUGCUUGUCUCGGUUAAUG | | [441-459] |
| 337 | ACAAGACACCCAAGUCCAG | CUGGACUUGGGUGUCUUGU | | [2244-2262] |
| 338 | CAUUUGCAACACUGAGAAG | CUUCUCAGUGUUGCAAAUG | | [80-98] |
| 339 | AUUACAGUUUGGAAGUGUU | AACACUUCCAAACUGUAAU | | [1925-1943] |
| 340 | AGUUUUUGUUGAAGACUGC | GCAGUCUUCAACAAAAACU | | [1776-1794] |
| 341 | AAGGGCACGAGAGAGUCUU | AAGACUCUCUCGUGCCCUU | | [2088-2106] |
| 342 | AUAAUCCUGGUGUUAUCAA | UUGAUAACACCAGGAUUAU | | [1699-1717] |
| 343 | AUUACUUGUUUGUAAGAUU | AAUCUUACAAACAAGUAAU | | [1874-1892] |
| 344 | UCUUAAGGCUUGAAGUAAC | GUUACUUCAAGCCUUAAGA | | [2316-2334] |
| 345 | AUAAAAAAAAACCUAGCAU | AUGCUAGGUUUUUUUUUAU | | [2216-2234] |
| 346 | AGAAGAGCUCCAGGUCAUG | CAUGACCUGGAGCUCUUCU | | [1020-1038] |
| 347 | GAAGAACAGUUAGCAUUGG | CCAAUGCUAACUGUUCUUC | | [673-691] |
| 348 | UCUGAGCCCAGACAUUCCA | UGGAAUGUCUGGGCUCAGA | | [706-724] |
| 349 | AGAGUCUUCCAGGUACUGA | UCAGUACCUGGAAGACUCU | | [2099-2117] |
| 350 | UGAGUACCCAGGAUGAUUU | AAAUCAUCCUGGGUACUCA | | [1988-2006] |
| 351 | UCCAAAAUCGACAAGGCGA | UCGCCUUGUCGAUUUUGGA | | [721-739] |
| 352 | UGAAGAACAGUUAGCAUUG | CAAUGCUAACUGUUCUUCA | | [672-690] |
| 353 | CAGACAACAGAACCUCAGC | GCUGAGGUUCUGUUGUCUG | | [1600-1618] |
| 354 | AUGUACACUAUCCUGAAGA | UCUUCAGGAUAGUGUACAU | | [388-406] |
| 355 | UUUGCAACACUGAGAAGUU | AACUUCUCAGUGUUGCAAA | | [82-100] |
| 356 | AUCCCAGCUCCUCCUAGUU | AACUAGGAGGAGCUGGGAU | | [1201-1219] |
| 357 | UGUACUGAGACAUUACAGU | ACUGUAAUGUCUCAGUACA | | [1914-1932] |
| 358 | AACCAGUUGAGCUGCGGAU | AUCCGCAGCUCAACUGGUU | | [1136-1154] |
| 359 | CUAAGAAACUGGAGCUCCG | CGGAGCUCCAGUUUCUUAG | | [1391-1409] |
| 360 | ACUUGUUUGUAAGAUUUAG | CUAAAUCUUACAAACAAGU | | [1877-1895] |
| 361 | CUGUGGUGGAUCAAGACAG | CUGUCUUGAUCCACCACAG | GP | [872-890] |
| 362 | GAAGCCCUAUUACUUGUUU | AAACAAGUAAUAGGGCUUC | | [1866-1884] |
| 363 | GACAUUACAGUUUGGAAGU | ACUUCCAAACUGUAAUGUC | | [1922-1940] |
| 364 | GAACCUCAGCUUAAGAAAG | CUUUCUUAAGCUGAGGUUC | | [1609-1627] |
| 365 | GAUCCUGUUUCUUGCUCUG | CAGAGCAAGAAACAGGAUC | | [2116-2134] |
| 366 | CACUAUCCUGAAGAACAUG | CAUGUUCUUCAGGAUAGUG | | [393-411] |
| 367 | AUGCUAAUAACCAGACAAC | GUUGUCUGGUUAUUAGCAU | | [1589-1607] |
| 368 | UACAAAAACAAGACACCCA | UGGGUGUCUUGUUUUUGUA | | [2237-2255] |
| 369 | AAAGUGGAUGGAAGUGUCU | AGACACUUCCAUCCACUUU | | [2066-2084] |
| 370 | CAUCUUACAAAAACAAGAC | GUCUUGUUUUUGUAAGAUG | | [2232-2250] |
| 371 | GUGGUGGAUCAAGACAGUU | AACUGUCUUGAUCCACCAC | | [874-892] |
| 372 | AGCAUGAAGUCUGAGCCCA | UGGGCUCAGACUUCAUGCU | | [697-715] |
| 373 | ACUACUGCCUGACUCUGUG | CACAGAGUCAGGCAGUAGU | Ms | [1508-1526] |
| 374 | AACCAGAGGACCUGGAGUU | AACUCCAGGUCCUCUGGUU | | [1667-1685] |
| 375 | GCUCUACUACCAGACAGAG | CUCUGUCUGGUAGUAGAGC | | [489-507] |
| 376 | GAUAUAAUCCUGGUGUUAU | AUAACACCAGGAUUAUAUC | | [1696-1714] |
| 377 | AGGAGGAAUGGAAAAAAGC | GCUUUUUUCCAUUCCUCCU | | [653-671] |
| 378 | AAAGCUGAUGCUAAUAACC | GGUUAUUAGCAUCAGCUUU | | [1582-1600] |
| 379 | AGGAUGUUUCACAAACUAC | GUAGUUUGUGAAACAUCCU | | [1832-1850] |
| 380 | ACCAGAGGACCUGGAGUUU | AAACUCCAGGUCCUCUGGU | | [1668-1686] |
| 381 | AACAUUGCUUUCAUGUAUG | CAUACAUGAAAGCAAUGUU | | [628-646] |
| 382 | UUUCUGAACCAUUACUGUA | UACAGUAAUGGUUCAGAAA | | [2291-2309] |
| 383 | ACUGCGCAACUACAGAUUU | AAAUCUGUAGUUGCGCAGU | | [1790-1808] |
| 384 | AAGAAGCCUUGAUUCAGCU | AGCUGAAUCAAGGCUUCUU | | [536-554] |
| 385 | ACUAUCCUGAAGAACAUGA | UCAUGUUCUUCAGGAUAGU | | [394-412] |
| 386 | UCUACCUAAUCAUGUCCCU | AGGGACAUGAUUAGGUAGA | | [242-260] ORF |
| 387 | UAAGAUUUAGCACCCUUCU | AGAAGGGUGCUAAAUCUUA | | [1886-1904] |
| 388 | UCUCAUGGUAGGGUUAUGA | UCAUAACCCUACCAUGAGA | | [27-45] |
| 389 | GACCAAGGCUUUCCAGAUG | CAUCUGGAAAGCCUUGGUC | | [1546-1564] |
| 390 | AGCUGAAGAAAAUGAAGCC | GGCUUCAUUUUCUUCAGCU | | [1853-1871] |
| 391 | UUGUUUGUAAGAUUUAGCA | UGCUAAAUCUUACAAACAA | | [1879-1897] |
| 392 | AUCUUACAAAAACAAGACA | UGUCUUGUUUUUGUAAGAU | | [2233-2251] |
| 393 | GAUAGACUAUAAGAUCCUG | CAGGAUCUUAUAGUCUAUC | GP | [570-588] |
| 394 | AACAGAACCUCAGCUUAAG | CUUAAGCUGAGGUUCUGUU | | [1605-1623] |
| 395 | ACAAUAAAAAAAAACCUAG | CUAGGUUUUUUUUUAUUGU | | [2213-2231] |
| 396 | CUGUAUACUGUACUGAGAC | GUCUCAGUACAGUAUACAG | | [1906-1924] |
| 397 | CCUGCAACUACCUUGAACC | GGUUCAAGGUAGUUGCAGG | GP | [1121-1139] |
| 398 | CUGUUAAAAUUUAACCUAC | GUAGGUUAAAUUUUAACAG | | [1957-1975] |
| 399 | CAAGGCUUUCCAGAUGAAC | GUUCAUCUGGAAAGCCUUG | | [1549-1567] |
| 400 | GUCAUGUUCAACGGGCAGA | UCUGCCCGUUGAACAUGAC | | [1090-1108] |
| 401 | AUGAACCCAAGGAAAGUGA | UCACUUUCCUUGGGUUCAU | | [1562-1580] |
| 402 | ACUACAAGUACACGGUAGU | ACUACCGUGUACUUGUAGU | | [1322-1340] |
| 403 | AACAUGACUGAAGCAGAGA | UCUCUGCUUCAGUCAUGUU | | [406-424] |
| 404 | UUCAGAAGACAGCAUGAAG | CUUCAUGCUGUCUUCUGAA | | [1467-1485] |
| 405 | AUCUGUGGUGGAUCAAGAC | GUCUUGAUCCACCACAGAU | GP | [870-888] |
| 406 | GAGCCUAAGGAAGUGAAGC | GCUUCACUUCCUUAGGCUC | Rat | [1270-1288] |
| 407 | ACCAAAUGAGAGACAAGUG | CACUUGUCUCUCAUUUGGU | | [804-822] |
| 408 | AGUAAGUACAAAUAUUCCU | AGGAAUAUUUGUACUUACU | | [2271-2289] |
| 409 | CAACACUGAGAAGUUAUCU | AGAUAACUUCUCAGUGUUG | | [86-104] |
| 410 | AUCAGCCUCUGGAAUGAAG | CUUCAUUCCAGAGGCUGAU | | [271-289] |
| 411 | AAUCCUGGUGUUAUCAAAG | CUUUGAUAACACCAGGAUU | | [1701-1719] |
| 412 | AAGCUGUACAUUUGGUGCA | UGCACCAAAUGUACAGCUU | | [2177-2195] |
| 413 | AGUGAAGCUCAGUGUUCCC | GGGAACACUGAGCUUCACU | | [1281-1299] |
| 414 | CUUACUUCCAACGAGGGAU | AUCCCUCGUUGGAAGUAAG | GP | [470-488] |
| 415 | CACACUAAGCUGAGCUAUC | GAUAGCUCAGCUUAGUGUG | | [1417-1435] |
| 416 | AAAAAAAACCUAGCAUCUU | AAGAUGCUAGGUUUUUUUU | | [2219-2237] |
| 417 | UUUCUUGCUCUGAGUGCUA | UAGCACUCAGAGCAAGAAA | | [2123-2141] |
| 418 | GUUCAAGCUGUUUGCCUGU | ACAGGCAAACAGCUUGAAC | Ms | [597-615] |
| 419 | UAGGGUUAUGAGUCAGUUG | CAACUGACUCAUAACCCUA | | [35-53] |
| 420 | UUUGGGUUUGUGCCUGAGA | UCUCAGGCACAAACCCAAA | | [997-1015] |
| 421 | AAGUUUUUGUUGAAGACUG | CAGUCUUCAACAAAAACUU | | [1775-1793] |
| 422 | UUACUUGUUUGUAAGAUUU | AAAUCUUACAAACAAGUAA | | [1875-1893] |
| 423 | ACUACCUUGAACCAGUUGA | UCAACUGGUUCAAGGUAGU | GP | [1127-1145] |
| 424 | AGAAGUUAUCUUAAGGGAG | CUCCCUUAAGAUAACUUCU | | [94-112] |
| 425 | AUUCCUGUUUCUGAACCAU | AUGGUUCAGAAACAGGAAU | | [2284-2302] |
| 426 | AAGCUGUUUCGACCAAAUG | CAUUUGGUCGAAACAGCUU | | [793-811] |
| 427 | GUGAAGCUCAGUGUUCCCA | UGGGAACACUGAGCUUCAC | | [1282-1300] |
| 428 | AGACAGAGAAAUAUGAUUU | AAAUCAUAUUUCUCUGUCU | | [500-518] |
| 429 | CAUUUGGUGCACUUUUCUG | CAGAAAAGUGCACCAAAUG | | [2185-2203] |
| 430 | AGUUCAAGCUGUUUGCCUG | CAGGCAAACAGCUUGAACU | Ms | [596-614] |
| 431 | AAGGCCUUUACCAGAAGCA | UGCUUCUGGUAAAGGCCUU | | [424-442] |
| 432 | GUCUUUGUCUUGAAGAAGG | CCUUCUUCAAGACAAAGAC | Rat, Ms, GP | [1051-1069] |
| 433 | AAAAUUUAACCUACUAGAC | GUCUAGUAGGUUAAAUUUU | | [1962-1980] |
| 434 | UCUGUGGUGGAUCAAGACA | UGUCUUGAUCCACCACAGA | GP | [871-889] |
| 435 | UACCAGAAGCAUUAACCGA | UCGGUUAAUGCUUCUGGUA | | [432-450] |
| 436 | GAGUACCCAGGAUGAUUUC | GAAAUCAUCCUGGGUACUC | | [1989-2007] |
| 437 | UGUUCCCUGCAACUACCUU | AAGGUAGUUGCAGGGAACA | GP | [1116-1134] |
| 438 | AGACAAUGAUGUGAGUACC | GGUACUCACAUCAUUGUCU | | [1977-1995] |
| 439 | AAGCCUUGAUUCAGCUUCG | CGAAGCUGAAUCAAGGCUU | | [539-557] |
| 440 | GAAGUGAAGCUCAGUGUUC | GAACACUGAGCUUCACUUC | | [1279-1297] |
| 441 | AAUCGACAAGGCGAUGGAG | CUCCAUCGCCUUGUCGAUU | | [726-744] |
| 442 | GCUAUUUGGGUUUGUGCCU | AGGCACAAACCCAAAUAGC | | [993-1011] |
| 443 | AACAUUGUCUUUGUCUUGA | UCAAGACAAAGACAAUGUU | | [1045-1063] |
| 444 | AAAAAAGCUGAAGAACAGU | ACUGUUCUUCAGCUUUUUU | | [664-682] |
| 445 | ACUCUUCAGUUAUGAGGCU | AGCCUCAUAACUGAAGAGU | | [1644-1662] |
| 446 | CAGUUCAAGCUGUUUGCCU | AGGCAAACAGCUUGAACUG | Ms | [595-613] |
| 447 | AACUACUGCCUGACUCUGU | ACAGAGUCAGGCAGUAGUU | Ms | [1507-1525] |
| 448 | AUUGUCUUUGUCUUGAAGA | UCUUCAAGACAAAGACAAU | | [1048-1066] |
| 449 | AAAGGGAAGGUGGGCAUUU | AAAUGCCCACCUUCCCUUU | | [1750-1768] |
| 450 | CUCAUGGUAGGGUUAUGAG | CUCAUAACCCUACCAUGAG | | [28-46] |
| 451 | AUGCAUUUGCAACACUGAG | CUCAGUGUUGCAAAUGCAU | | [77-95] |
| 452 | AAGGAAAGUGAAAAAGCUG | CAGCUUUUUCACUUUCCUU | | [1570-1588] |
| 453 | CAGGUGAAAAACUACUGCC | GGCAGUAGUUUUUCACCUG | | [1498-1516] |
| 454 | AUGAUGUGAGUACCCAGGA | UCCUGGGUACUCACAUCAU | | [1982-2000] |
| 455 | AAAGAAGCCUUGAUUCAGC | GCUGAAUCAAGGCUUCUUU | | [535-553] |
| 456 | GUUUCUUGCUCUGAGUGCU | AGCACUCAGAGCAAGAAAC | | [2122-2140] |
| 457 | UAGACAAUGAUGUGAGUAC | GUACUCACAUCAUUGUCUA | | [1976-1994] |
| 458 | UGUUUCGACCAAAUGAGAG | CUCUCAUUUGGUCGAAACA | | [797-815] |
| 459 | CUUAAGGCUUGAAGUAACC | GGUUACUUCAAGCCUUAAG | | [2317-2335] |
| 460 | CAAAAUCGACAAGGCGAUG | CAUCGCCUUGUCGAUUUUG | | [723-741] |
| 461 | CUGAUAGACUAUAAGAUCC | GGAUCUUAUAGUCUAUCAG | GP | [568-586] |
| 462 | ACAGAUUUGGAAAGCACUC | GAGUGCUUUCCAAAUCUGU | | [1801-1819] |
| 463 | AAGUGUUAACUAUUUAUUC | GAAUAAAUAGUUAACACUU | | [1937-1955] |
| 464 | UUUAUUCCCUGUUAAAAUU | AAUUUUAACAGGGAAUAAA | | [1949-1967] |
| 465 | AAGUGAAGCUCAGUGUUCC | GGAACACUGAGCUUCACUU | | [1280-1298] |
| 466 | ACGAGGGAUGCUCUACUAC | GUAGUAGAGCAUCCCUCGU | | [480-498] |
| 467 | UCUGCUGUAUACUGUACUG | CAGUACAGUAUACAGCAGA | | [1902-1920] |
| 468 | AGUGGAUGGAAGUGUCUGG | CCAGACACUUCCAUCCACU | | [2068-2086] |
| 469 | AAAAACAAGACACCCAAGU | ACUUGGGUGUCUUGUUUUU | | [2240-2258] |
| 470 | UUGGGUUUGUGCCUGAGAC | GUCUCAGGCACAAACCCAA | | [998-1016] |
| 471 | CUCACCGUGUGCUAUUUGG | CCAAAUAGCACACGGUGAG | | [983-1001] |
| 472 | GUACAAAUAUUCCUGUUUC | GAAACAGGAAUAUUUGUAC | | [2276-2294] |
| 473 | CUCUCUCUGCUUCUUUCCU | AGGAAAGAAGCAGAGAGAG | | [2-20] |
| 474 | CAGAAAGUGAACACCUUGG | CCAAGGUGUUCACUUUCUG | | [140-158] |
| 475 | GACAAGAAGGACUGGAAGG | CCUUCCAGUCCUUCUUGUC | Rat, Ms | [304-322] |
| 476 | UGUUUCACAAACUACAAAG | CUUUGUAGUUUGUGAAACA | | [1836-1854] |
| 477 | AGUACAAAUAUUCCUGUUU | AAACAGGAAUAUUUGUACU | | [2275-2293] |
| 478 | AGGCUUUCCAGAUGAACCC | GGGUUCAUCUGGAAAGCCU | | [1551-1569] |
| 479 | UUCCAGAUGAACCCAAGGA | UCCUUGGGUUCAUCUGGAA | | [1556-1574] |
| 480 | UACUGAUCCUGUUUCUUGC | GCAAGAAACAGGAUCAGUA | | [2112-2130] |
| 481 | GUACACUAUCCUGAAGAAC | GUUCUUCAGGAUAGUGUAC | | [390-408] |
| 482 | GAGAGUCUUCCAGGUACUG | CAGUACCUGGAAGACUCUC | | [2098-2116] |
| 483 | UAAAGAAGCCUUGAUUCAG | CUGAAUCAAGGCUUCUUUA | | [534-552] |
| 484 | GAGACAAAAGAAGAGCUCC | GGAGCUCUUCUUUUGUCUC | | [1012-1030] |
| 485 | UGUGCUAUUUGGGUUUGUG | CACAAACCCAAAUAGCACA | | [990-1008] |
| 486 | CAUGGUAGGGUUAUGAGUC | GACUCAUAACCCUACCAUG | | [30-48] |
| 487 | UCUUUGUCUUGAAGAAGGG | CCCUUCUUCAAGACAAAGA | Rat, Ms, GP | [1052-1070] |
| 488 | ACUGAAGCAGAGAAGGCCU | AGGCCUUCUCUGCUUCAGU | | [412-430] |
| 489 | AGGCCCAAGGAGUAAGUAC | GUACUUACUCCUUGGGCCU | | [2261-2279] |
| 490 | UUAUAUAACAUUGCUUUCA | UGAAAGCAAUGUUAUAUAA | | [622-640] |
| 491 | AUCAAGCUGUACAUUUGGU | ACCAAAUGUACAGCUUGAU | | [2174-2192] |
| 492 | ACCUGUCUUCUCUCUGUCU | AGACAGAGAGAAGACAGGU | | [196-214] |
| 493 | UACCACAAUAAAAAAAAAC | GUUUUUUUUUAUUGUGGUA | | [2209-2227] |
| 494 | AGCAUCUUACAAAAACAAG | CUUGUUUUUGUAAGAUGCU | | [2230-2248] |
| 495 | UUCGACCAAAUGAGAGACA | UGUCUCUCAUUUGGUCGAA | | [800-818] |
| 496 | AUUCCAAAAUCGACAAGGC | GCCUUGUCGAUUUUGGAAU | | [719-737] |
| 497 | UAGUUUCUACCUAAUCAUG | CAUGAUUAGGUAGAAACUA | | [237-255] ORF |
| 498 | CAUUACAGUUUGGAAGUGU | ACACUUCCAAACUGUAAUG | | [1924-1942] |
| 499 | UACAUUUGGUGCACUUUUC | GAAAAGUGCACCAAAUGUA | | [2183-2201] |
| 500 | GGUGCACUACAAGUACACG | CGUGUACUUGUAGUGCACC | | [1317-1335] |

TABLE B1
P53 19-mer oligomer pairs P53 - tumor protein p53

| | | | | Human-8400737: |
|---|---|---|---|---|
| No. | Sense | AntiSense | Other Sp | 252-1433 |

| | | | | |
|---|---|---|---|---|
| 1 | GAGAAUAUUUCACCCUUCA | UGAAGGGUGAAAUAUUCUC | MK, Dog | [1221-1240] |
| 2 | CCAUUUUUAUAUCGAUCUC | GAGAUCGAUAUAAAAAUGG | | [2584-2602] |
| 3 | CCCUUUUUAUAUCCCAUUU | AAAUGGGAUAUAAAAAGGG | | [2571-2589] |
| 4 | GCCCUCAACAAGAUGUUUU | AAAACAUCUUGUUGAGGGC | | [636-654] |
| 5 | CCCAUUUUUAUAUCGAUCU | AGAUCGAUAUAAAAAUGGG | | [2583-2601] |
| 6 | CAGCUUAGAUUUUAAGGUU | AACCUUAAAAUCUAAGCUG | | [1646-1664] |
| 7 | CCAGCUUAGAUUUUAAGGU | ACCUUAAAAUCUAAGCUGG | | [1645-1663] |
| 8 | GGAAACAUUUUCAGACCUA | UAGGUCUGAAAAUGUUUCC | MK | [299-317] |
| 9 | GGAUGACAGAAACACUUUU | AAAAGUGUUUCUGUCAUCC | MK, Pig | [869-887] |
| 10 | GCCACCUGAAGUCCAAAAA | UUUUUGGACUUCAGGUGGC | | [1351-1369] |
| 11 | GGGUCAACAUCUUUUACAU | AUGUAAAAGAUGUUGACCC | | [2507-2525] |
| 12 | CCCUCAACAAGAUGUUUUG | CAAAACAUCUUGUUGAGGG | | [637-655] |
| 13 | ACAUACCAGCUUAGAUUUU | AAAAUCUAAGCUGGUAUGU | | [1640-1658] |
| 14 | UCCCAUUUUUAUAUCGAUC | GAUCGAUAUAAAAAUGGGA | | [2582-2600] |
| 15 | UCCCUUUUUAUAUCCCAUU | AAUGGGAUAUAAAAAGGGA | | [2570-2588] |
| 16 | GUGAGGGUUAAUGAAAUAA | UUAUUUCAUUAACCCUCAC | | [1865-1883] |
| 17 | CCAUAUCUGUGAAAUGCUG | CAGCAUUUCACAGAUAUGG | | [1817-1835] |
| 18 | CCCAUCCUCACCAUCAUCA | UGAUGAUGGUGAGGAUGGG | Pig, GP, RB | [999-1017] |
| 19 | CCGGACGAUAUUGAACAAU | AUUGUUCAAUAUCGUCCGG | | [390-408] |
| 20 | CCCGGACGAUAUUGAACAA | UUGUUCAAUAUCGUCCGGG | | [389-407] |
| 21 | CUCUUGUAUAUGAUGAUCU | AGAUCAUCAUAUACAAGAG | | [2131-2149] |
| 22 | CCCUCAUGUUGAAUUUUCU | AGAAAAUUCAACAUGAGGG | | [1785-1803] |
| 23 | CCACCUGAAGUCCAAAAAG | CUUUUUGGACUUCAGGUGG | | [1352-1370] |
| 24 | CCACCAAGACUUGUUUUAU | AUAAAACAAGUCUUGGUGG | | [2154-2172] |
| 25 | GCAUUGUGAGGGUUAAUGA | UCAUUAACCCUCACAAUGC | | [1860-1878] |
| 26 | CUAACUUCAAGGCCCAUAU | AUAUGGGCCUUGAAGUUAG | | [1804-1822] |
| 27 | AGUUUACAAUCAGCCACAU | AUGUGGCUGAUUGUAAACU | | [1719-1737] |
| 28 | AGGGUUAGUUUACAAUCAG | CUGAUUGUAAACUAACCCU | | [1713-1731] |
| 29 | GACUUCCAUUUGCUUUGUC | GACAAAGCAAAUGGAAGUC | | [1554-1572] |
| 30 | GAAACAUUUUCAGACCUAU | AUAGGUCUGAAAAUGUUUC | MK | [300-318] |
| 31 | GAAACACUUUUCGACAUAG | CUAUGUCGAAAAGUGUUUC | MK | [877-895] |
| 32 | UGCCCUCAACAAGAUGUUU | AAACAUCUUGUUGAGGGCA | | [635-653] |
| 33 | CGGACGAUAUUGAACAAUG | CAUUGUUCAAUAUCGUCCG | | [391-409] |
| 34 | CUCCCUUUUUAUAUCCCAU | AUGGGAUAUAAAAAGGGAG | | [2569-2587] |
| 35 | GGUCAACAUCUUUUACAUU | AAUGUAAAAGAUGUUGACC | | [2508-2526] |
| 36 | UCUUGUAUAUGAUGAUCUG | CAGAUCAUCAUAUACAAGA | | [2132-2150] |
| 37 | GCUGGUGGGUUGGUAGUUU | AAACUACCAACCCACCAGC | | [1975-1993] |
| 38 | UUGUGAGGGUUAAUGAAAU | AUUUCAUUAACCCUCACAA | | [1863-1881] |
| 39 | GGGAGAUGUAAGAAAUGUU | AACAUUUCUUACAUCUCCC | | [1684-1702] |
| 40 | CUGACAUUCUCCACUUCUU | AAGAAGUGGAGAAUGUCAG | | [1430-1448] |
| 41 | CCAAAAAGGGUCAGUCUAC | GUAGACUGACCCUUUUUGG | | [1363-1381] |
| 42 | GUAAUCUACUGGGACGGAA | UUCCGUCCCAGUAGAUUAC | MK | [1036-1054] |
| 43 | CCAUCCACUACAACUACAU | AUGUAGUUGUAGUGGAUGG | MK, Dog, GP | [943-961] |
| 44 | CCGAGUGGAAGGAAAUUUG | CAAAUUUCCUUCCACUCGG | MK, Dog | [836-854] |
| 45 | CUGUCAUCUUCUGUCCCUU | AAGGGACAGAAGAUGACAG | | [528-546] |
| 46 | CCCUCCUUCUCCCUUUUUA | UAAAAAGGGAGAAGGAGGG | | [2561-2579] |
| 47 | GGAAGGGUCAACAUCUUUU | AAAAGAUGUUGACCCUUCC | | [2503-2521] |
| 48 | CAAGACUUGUUUUAUGCUC | GAGCAUAAAACAAGUCUUG | | [2158-2176] |
| 49 | UCCACCAAGACUUGUUUUA | UAAAACAAGUCUUGGUGGA | | [2153-2171] |
| 50 | GGAGUUGUCAAGUCUUGCU | AGCAAGACUUGACAACUCC | | [2022-2040] |
| 51 | CCCAUAUCUGUGAAAUGCU | AGCAUUUCACAGAUAUGGG | | [1816-1834] |
| 52 | GGGUUAGUUUACAAUCAGC | GCUGAUUGUAAACUAACCC | | [1714-1732] |
| 53 | ACAUUCUCCACUUCUUGUU | AACAAGAAGUGGAGAAUGU | | [1433-1451] |
| 54 | CCAUCCUCACCAUCAUCAC | GUGAUGAUGGUGAGGAUGG | Pig, GP, RB | [1000-1018] |
| 55 | AAACACUUUUCGACAUAGU | ACUAUGUCGAAAAGUGUUU | MK | [878-896] |
| 56 | CCUGUCAUCUUCUGUCCCU | AGGGACAGAAGAUGACAGG | | [527-545] |
| 57 | ACGAUAUUGAACAAUGGUU | AACCAUUGUUCAAUAUCGU | | [394-412] |
| 58 | GGACGAUAUUGAACAAUGG | CCAUUGUUCAAUAUCGUCC | | [392-410] |
| 59 | ACAUCUUUUACAUUCUGCA | UGCAGAAUGUAAAAGAUGU | | [2513-2531] |
| 60 | CCAAGACUUGUUUUAUGCU | AGCAUAAAACAAGUCUUGG | | [2157-2175] |
| 61 | CACCAAGACUUGUUUUAUG | CAUAAAACAAGUCUUGGUG | | [2155-2173] |
| 62 | CGACCUUAGUACCUAAAAG | CUUUUAGGUACUAAGGUCG | | [2075-2093] |
| 63 | GGUGGGUUGGUAGUUUCUA | UAGAAACUACCAACCCACC | | [1978-1996] |
| 64 | UGCAUUGUGAGGGUUAAUG | CAUUAACCCUCACAAUGCA | | [1859-1877] |
| 65 | GUGCAUUGUGAGGGUUAAU | AUUAACCCUCACAAUGCAC | | [1858-1876] |
| 66 | GCAUUUGCACCUACCUCAC | GUGAGGUAGGUGCAAAUGC | | [1836-1854] |
| 67 | GGCCCAUAUCUGUGAAAUG | CAUUUCACAGAUAUGGGCC | | [1814-1832] |
| 68 | AGGCCCAUAUCUGUGAAAU | AUUUCACAGAUAUGGGCCU | | [1813-1831] |
| 69 | CUCAUGUUGAAUUUUCUCU | AGAGAAAAUUCAACAUGAG | | [1787-1805] |
| 70 | UCCCUCAUGUUGAAUUUUC | GAAAAUUCAACAUGAGGGA | | [1784-1802] |
| 71 | CUGUCCCUCAUGUUGAAUU | AAUUCAACAUGAGGGACAG | | [1781-1799] |
| 72 | AGCUGUCCCUCAUGUUGAA | UUCAACAUGAGGGACAGCU | | [1779-1797] |
| 73 | AGACCUAUGGAAACUACUU | AAGUAGUUUCCAUAGGUCU | MK | [311-329] |
| 74 | GUGAGCGCUUCGAGAUGUU | AACAUCUCGAAGCGCUCAC | MK, Rat | [1255-1273] |
| 75 | UGGAUGACAGAAACACUUU | AAAGUGUUUCUGUCAUCCA | Pig | [868-886] |
| 76 | GGAAGGAAAUUUGCGUGUG | CACACGCAAAUUUCCUUCC | MK | [842-860] |
| 77 | GCUAAAAGUUUUGAGCUUC | GAAGCUCAAAACUUUUAGC | | [92-110] |
| 78 | GACUGGCGCUAAAAGUUUU | AAAACUUUUAGCGCCAGUC | GP | [85-103] |
| 79 | AGGGUCAACAUCUUUUACA | UGUAAAAGAUGUUGACCCU | | [2506-2524] |
| 80 | GCCUUGAAACCACCUUUUA | UAAAAGGUGGUUUCAAGGC | | [1894-1912] |
| 81 | AGUGCAUUGUGAGGGUUAA | UUAACCCUCACAAUGCACU | | [1857-1875] |
| 82 | AGAGUGCAUUGUGAGGGUU | AACCCUCACAAUGCACUCU | | [1855-1873] |
| 83 | UGUCCCUCAUGUUGAAUUU | AAAUUCAACAUGAGGGACA | | [1782-1800] |
| 84 | GACCUAUGGAAACUACUUC | GAAGUAGUUUCCAUAGGUC | MK | [312-330] |
| 85 | GGAUGUUUGGGAGAUGUAA | UUACAUCUCCCAAACAUCC | | [1676-1694] |
| 86 | GGGAUGUUUGGGAGAUGUA | UACAUCUCCCAAACAUCCC | | [1675-1693] |
| 87 | AGGAAACAUUUUCAGACCU | AGGUCUGAAAAUGUUUCCU | MK | [298-316] |
| 88 | UGGAUGGAGAAUAUUUCAC | GUGAAAUAUUCUCCAUCCA | MK | [1219-1237] |
| 89 | AGUAUUUGGAUGACAGAAA | UUUCUGUCAUCCAAAUACU | RB | [862-880] |
| 90 | GGAGUAUUUGGAUGACAGA | UCUGUCAUCCAAAUACUCC | RB | [860-878] |
| 91 | CCUGAAAACAACGUUCUGU | ACAGAACGUUGUUUUCAGG | GP | [330-348] |
| 92 | CUGGUGGGUUGGUAGUUUC | GAAACUACCAACCCACCAG | | [1976-1994] |
| 93 | ACUUCCUGAAAACAACGUU | AACGUUGUUUUCAGGAAGU | GP | [326-344] |
| 94 | CUCAAGACUGGCGCUAAAA | UUUUAGCGCCAGUCUUGAG | | [80-98] |
| 95 | AUCUGUGAAAUGCUGGCAU | AUGCCAGCAUUUCACAGAU | | [1821-1839] |
| 96 | UCUAACUUCAAGGCCCAUA | UAUGGGCCUUGAAGUUAGA | | [1803-1821] |
| 97 | GUCCCUCAUGUUGAAUUUU | AAAAUUCAACAUGAGGGAC | | [1783-1801] |
| 98 | AGAAAUGUUCUUGCAGUUA | UAACUGCAAGAACAUUUCU | | [1694-1712] |
| 99 | CCAUUUUGGGUUUUGGGUC | GACCCAAAACCCAAAAUGG | | [1492-1510] |
| 100 | GACUCAGACUGACAUUCUC | GAGAAUGUCAGUCUGAGUC | | [1422-1440] |
| 101 | CCUGACUCAGACUGACAUU | AAUGUCAGUCUGAGUCAGG | | [1419-1437] |
| 102 | UUGGAUGACAGAAACACUU | AAGUGUUUCUGUCAUCCAA | Pig | [867-885] |
| 103 | GUGGAGUAUUUGGAUGACA | UGUCAUCCAAAUACUCCAC | | [858-876] |
| 104 | UGGCGCUAAAAGUUUUGAG | CUCAAAACUUUUAGCGCCA | GP | [88-106] |
| 105 | AGACUGGCGCUAAAAGUUU | AAACUUUUAGCGCCAGUCU | GP | [84-102] |
| 106 | GUCGACCUUAGUACCUAAA | UUUAGGUACUAAGGUCGAC | | [2073-2091] |
| 107 | CUUGAAACCACCUUUUAUU | AAUAAAAGGUGGUUUCAAG | | [1896-1914] |
| 108 | UGCAGUUAAGGGUUAGUUU | AAACUAACCCUUAACUGCA | | [1705-1723] |
| 109 | UUCAGACCUAUGGAAACUA | UAGUUUCCAUAGGUCUGAA | MK | [308-326] |
| 110 | CCUGCACUGGUGUUUUGUU | AACAAAACACCAGUGCAGG | | [1597-1615] |
| 111 | CAUUUUCAGACCUAUGGAA | UUCCAUAGGUCUGAAAAUG | MK | [304-322] |
| 112 | GACUGACAUUCUCCACUUC | GAAGUGGAGAAUGUCAGUC | | [1428-1446] |
| 113 | UGACUCAGACUGACAUUCU | AGAAUGUCAGUCUGAGUCA | | [1421-1439] |
| 114 | CACUGGAUGGAGAAUAUUU | AAAUAUUCUCCAUCCAGUG | MK | [1216-1234] |
| 115 | AAAGAAGAAACCACUGGAU | AUCCAGUGGUUUCUUCUUU | MK, GP | [1205-1223] |
| 116 | UCAUCACACUGGAAGACUC | GAGUCUUCCAGUGUGAUGA | RB, Ms | [1012-1030] |
| 117 | UGGAGUAUUUGGAUGACAG | CUGUCAUCCAAAUACUCCA | | [859-877] |
| 118 | GCGUGUGGAGUAUUUGGAU | AUCCAAAUACUCCACACGC | | [854-872] |
| 119 | CUGGCGCUAAAAGUUUUGA | UCAAAACUUUUAGCGCCAG | GP | [87-105] |
| 120 | CCUUCUCCCUUUUUAUAUC | GAUAUAAAAAGGGAGAAGG | | [2565-2583] |
| 121 | AAGCAAUGGAUGAUUUGAU | AUCAAAUCAUCCAUUGCUU | | [364-382] |
| 122 | AGGGAGUUGUCAAGUCUUG | CAAGACUUGACAACUCCCU | | [2020-2038] |
| 123 | CCUUGAAACCACCUUUUAU | AUAAAAGGUGGUUUCAAGG | | [1895-1913] |
| 124 | GCUGUCCCUCAUGUUGAAU | AUUCAACAUGAGGGACAGC | | [1780-1798] |
| 125 | AAAUGUUCUUGCAGUUAAG | CUUAACUGCAAGAACAUUU | | [1696-1714] |
| 126 | AAGAAAUGUUCUUGCAGUU | AACUGCAAGAACAUUUCUU | | [1693-1711] |
| 127 | GUUUGGGAGAUGUAAGAAA | UUUCUUACAUCUCCCAAAC | | [1680-1698] |
| 128 | CUGCACUGGUGUUUUGUUG | CAACAAAACACCAGUGCAG | | [1598-1616] |
| 129 | CAGACUGACAUUCUCCACU | AGUGGAGAAUGUCAGUCUG | | [1426-1444] |
| 130 | UCAGGAAACAUUUUCAGAC | GUCUGAAAAUGUUUCCUGA | MK | [296-314] |
| 131 | GCUGAAUGAGGCCUUGGAA | UUCCAAGGCCUCAUUCAGC | MK, Rat | [1280-1298] |
| 132 | CAAAGAAGAAACCACUGGA | UCCAGUGGUUUCUUCUUUG | MK, GP | [1204-1222] |
| 133 | GCCAAAGAAGAAACCACUG | CAGUGGUUUCUUCUUUGGC | MK, GP | [1202-1220] |
| 134 | AGCCAAAGAAGAAACCACU | AGUGGUUUCUUCUUUGGCU | MK, GP | [1201-1219] |
| 135 | GCUCUGACUGUACCACCAU | AUGGUGGUACAGUCAGAGC | MK, HM, Pig, RB | [928-946] |
| 136 | GAGUAUUUGGAUGACAGAA | UUCUGUCAUCCAAAUACUC | RB | [861-879] |
| 137 | GUGUGGAGUAUUUGGAUGA | UCAUCCAAAUACUCCACAC | | [856-874] |
| 138 | UGGAAGGAAAUUUGCGUGU | ACACGCAAAUUUCCUUCCA | MK | [841-859] |
| 139 | CCCUCCUCAGCAUCUUAUC | GAUAAGAUGCUGAGGAGGG | | [818-836] |
| 140 | ACAGCACAUGACGGAGGUU | AACCUCCGUCAUGUGCUGU | | [749-767] |
| 141 | UCGACCUUAGUACCUAAAA | UUUUAGGUACUAAGGUCGA | | [2074-2092] |
| 142 | GAGUUGUCAAGUCUUGCUG | CAGCAAGACUUGACAACUC | | [2023-2041] |
| 143 | CAGAGUGCAUUGUGAGGGU | ACCCUCACAAUGCACUCUG | | [1854-1872] |
| 144 | AAGGCCCAUAUCUGUGAAA | UUUCACAGAUAUGGGCCUU | | [1812-1830] |
| 145 | UUGCAGUUAAGGGUUAGUU | AACUAACCCUUAACUGCAA | | [1704-1722] |
| 146 | UUCUUGCAGUUAAGGGUUA | UAACCCUUAACUGCAAGAA | | [1701-1719] |
| 147 | AGGGAUGUUUGGGAGAUGU | ACAUCUCCCAAACAUCCCU | | [1674-1692] |
| 148 | GAGGGAUGUUUGGGAGAUG | CAUCUCCCAAACAUCCCUC | | [1673-1691] |
| 149 | CAGGAAACAUUUUCAGACC | GGUCUGAAAAUGUUUCCUG | MK | [297-315] |
| 150 | GCCAUAAAAAACUCAUGUU | AACAUGAGUUUUUUAUGGC | | [1387-1405] |
| 151 | CGUGUGGAGUAUUUGGAUG | CAUCCAAAUACUCCACACG | | [855-873] |
| 152 | UGGAUGAUUUGAUGCUGUC | GACAGCAUCAAAUCAUCCA | MK | [370-388] |
| 153 | CAAUAAAACUUUGCUGCCA | UGGCAGCAAAGUUUUAUUG | | [2611-2629] |
| 154 | CAAUGGAUGAUUUGAUGCU | AGCAUCAAAUCAUCCAUUG | | [367-385] |
| 155 | GAGGGAGUUGUCAAGUCUU | AAGACUUGACAACUCCCUC | | [2019-2037] |
| 156 | UGGUUAGGUAGAGGGAGUU | AACUCCCUCUACCUAACCA | | [2009-2027] |
| 157 | AUGUACAUCUGGCCUUGAA | UUCAAGGCCAGAUGUACAU | | [1883-1901] |
| 158 | UGGGUUUUGGGUCUUUGAA | UUCAAAGACCCAAAACCCA | | [1498-1516] |
| 159 | CCCGCCAUAAAAAACUCAU | AUGAGUUUUUUAUGGCGGG | | [1384-1402] |
| 160 | GAUGUUCCGAGAGCUGAAU | AUUCAGCUCUCGGAACAUC | MK, Pig, Rat | [1268-1286] |
| 161 | AGAUGUUCCGAGAGCUGAA | UUCAGCUCUCGGAACAUCU | MK, Pig, Rat, RB | [1267-1285] |
| 162 | ACAUGUGUAACAGUUCCUG | CAGGAACUGUUACACAUGU | MK, Dog | [958-976] |
| 163 | ACCAUCCACUACAACUACA | UGUAGUUGUAGUGGAUGGU | MK, Dog, GP | [942-960] |
| 164 | GAGCUUCUCAAAAGUCUAG | CUAGACUUUUGAGAAGCUC | | [104-122] |
| 165 | UCGACAUAGUGUGGUGGUG | CACCACCACACUAUGUCGA | MK | [887-905] |
| 166 | GAAGGAAAUUUGCGUGUGG | CCACACGCAAAUUUCCUUC | MK | [843-861] |
| 167 | AUAAUGUACAUCUGGCCUU | AAGGCCAGAUGUACAUUAU | | [1880-1898] |
| 168 | GGGUUUUGGGUCUUUGAAC | GUUCAAAGACCCAAAACCC | | [1499-1517] |
| 169 | GAAGUCCAAAAAGGGUCAG | CUGACCCUUUUUGGACUUC | | [1358-1376] |
| 170 | AGCUUCUCAAAAGUCUAGA | UCUAGACUUUUGAGAAGCU | | [105-123] |
| 171 | GGAAAUUUGCGUGUGGAGU | ACUCCACACGCAAAUUUCC | MK | [846-864] |
| 172 | CUGGUUAGGUAGAGGGAGU | ACUCCCUCUACCUAACCAG | | [2008-2026] |
| 173 | AGCCACCUGAAGUCCAAAA | UUUUGGACUUCAGGUGGCU | | [1350-1368] |
| 174 | CAGAAACACUUUUCGACAU | AUGUCGAAAAGUGUUUCUG | MK | [875-893] |
| 175 | UGCGUGUGGAGUAUUUGGA | UCCAAAUACUCCACACGCA | | [853-871] |
| 176 | GGUAGAGGGAGUUGUCAAG | CUUGACAACUCCCUCUACC | | [2015-2033] |
| 177 | GCCCACUUCACCGUACUAA | UUAGUACGGUGAAGUGGGC | | [1753-1771] |
| 178 | UGGGACGGAACAGCUUUGA | UCAAAGCUGUUCCGUCCCA | MK, HM, Pig, RB | [1045-1063] |
| 179 | GCUUCUUGCAUUCUGGGAC | GUCCCAGAAUGCAAGAAGC | | [586-604] |
| 180 | AUGCUGGCAUUUGCACCUA | UAGGUGCAAAUGCCAGCAU | | [1830-1848] |
| 181 | GGAAACUACUUCCUGAAAA | UUUUCAGGAAGUAGUUUCC | MK, GP | [319-337] |
| 182 | GGAGAAUAUUUCACCCUUC | GAAGGGUGAAAUAUUCUCC | MK, Dog | [1224-1242] |
| 183 | AGAAACACUUUUCGACAUA | UAUGUCGAAAAGUGUUUCU | MK | [876-894] |
| 184 | CAAGAUGUUUUGCCAACUG | CAGUUGGCAAAACAUCUUG | | [644-662] |
| 185 | CUGCCCUCAACAAGAUGUU | AACAUCUUGUUGAGGGCAG | | [634-652] |
| 186 | CGCUAAAAGUUUUGAGCUU | AAGCUCAAAACUUUUAGCG | | [91-109] |
| 187 | UCAGCCACAUUCUAGGUAG | CUACCUAGAAUGUGGCUGA | | [1728-1746] |
| 188 | CCAGGACUUCCAUUUGCUU | AAGCAAAUGGAAGUCCUGG | | [1550-1568] |
| 189 | CCAUAAAAAACUCAUGUUC | GAACAUGAGUUUUUUAUGG | | [1388-1406] |
| 190 | UCCUCACCAUCAUCACACU | AGUGUGAUGAUGGUGAGGA | Pig, RB | [1003-1021] |
| 191 | CCAUCUACAAGCAGUCACA | UGUGACUGCUUGUAGAUGG | MK | [733-751] |
| 192 | CUCUUGGUCGACCUUAGUA | UACUAAGGUCGACCAAGAG | | [2067-2085] |
| 193 | GCCACAUUCUAGGUAGGUA | UACCUACCUAGAAUGUGGC | | [1731-1749] |
| 194 | GGUUUUUACUGUGAGGGAU | AUCCCUCACAGUAAAAACC | | [1661-1679] |
| 195 | CCCAGGACUUCCAUUUGCU | AGCAAAUGGAAGUCCUGGG | | [1549-1567] |
| 196 | CGCCAUAAAAAACUCAUGU | ACAUGAGUUUUUUAUGGCG | | [1386-1404] |
| 197 | CCGCCAUAAAAAACUCAUG | CAUGAGUUUUUUAUGGCGG | | [1385-1403] |
| 198 | GACAGAAACACUUUUCGAC | GUCGAAAAGUGUUUCUGUC | MK, Dog, Pig | [873-891] |
| 199 | CUGGAGGAUUUCAUCUCUU | AAGAGAUGAAAUCCUCCAG | | [2117-2135] |
| 200 | CCCUGUCUGACAACCUCUU | AAGAGGUUGUCAGACAGGG | | [2053-2071] |
| 201 | GUUGGUAGUUUCUACAGUU | AACUGUAGAAACUACCAAC | | [1983-2001] |
| 202 | GGUUGGUAGUUUCUACAGU | ACUGUAGAAACUACCAACC | | [1982-2000] |
| 203 | GGGUUGGUAGUUUCUACAG | CUGUAGAAACUACCAACCC | | [1981-1999] |
| 204 | CCACAUUCUAGGUAGGUAG | CUACCUACCUAGAAUGUGG | | [1732-1750] |
| 205 | GUAGGACAUACCAGCUUAG | CUAAGCUGGUAUGUCCUAC | | [1635-1653] |
| 206 | CCCUGCCAUUUUGGGUUUU | AAAACCCAAAAUGGCAGGG | | [1487-1505] |
| 207 | UCCCGCCAUAAAAAACUCA | UGAGUUUUUUAUGGCGGGA | | [1383-1401] |
| 208 | CUCCCGCCAUAAAAAACUC | GAGUUUUUUAUGGCGGGAG | | [1382-1400] |
| 209 | GGCCUUGGAACUCAAGGAU | AUCCUUGAGUUCCAAGGCC | MK | [1289-1307] |
| 210 | CUCUGAGUCAGGAAACAUU | AAUGUUUCCUGACUCAGAG | MK | [289-307] |
| 211 | UGGAGAAUAUUUCACCCUU | AAGGGUGAAAUAUUCUCCA | MK, Dog, Rat | [1223-1241] |
| 212 | CCUGCCCUCAACAAGAUGU | ACAUCUUGUUGAGGGCAGG | | [633-651] |
| 213 | GAACAAUGGUUCACUGAAG | CUUCAGUGAACCAUUGUUC | | [402-420] |
| 214 | GGCAUUUGCACCUACCUCA | UGAGGUAGGUGCAAAUGCC | | [1835-1853] |
| 215 | UGCUGGCAUUUGCACCUAC | GUAGGUGCAAAUGCCAGCA | | [1831-1849] |
| 216 | CCUGCCAUUUUGGGUUUUG | CAAAACCCAAAAUGGCAGG | | [1488-1506] |
| 217 | GUCUACCUCCCGCCAUAAA | UUUAUGGCGGGAGGUAGAC | RB | [1376-1394] |
| 218 | GGAAGAGAAUCUCCGCAAG | CUUGCGGAGAUUCUCUUCC | | [1106-1124] |
| 219 | ACAACUACAUGUGUAACAG | CUGUUACACAUGUAGUUGU | MK, Dog | [952-970] |
| 220 | GCCAUCUACAAGCAGUCAC | GUGACUGCUUGUAGAUGGC | MK | [732-750] |
| 221 | UCCUUCUCCCUUUUUAUAU | AUAUAAAAAGGGAGAAGGA | | [2564-2582] |
| 222 | CCUCCUUCUCCCUUUUUAU | AUAAAAAGGGAGAAGGAGG | | [2562-2580] |
| 223 | GCCAAACCCUGUCUGACAA | UUGUCAGACAGGGUUUGGC | | [2047-2065] |
| 224 | CAGGACUUCCAUUUGCUUU | AAAGCAAAUGGAAGUCCUG | | [1551-1569] |
| 225 | UGAAGUCCAAAAAGGGUCA | UGACCCUUUUUGGACUUCA | | [1357-1375] |
| 226 | UGAGUCAGGAAACAUUUUC | GAAAAUGUUUCCUGACUCA | MK | [292-310] |
| 227 | GAGAGCUGAAUGAGGCCUU | AAGGCCUCAUUCAGCUCUC | MK, Rat | [1276-1294] |
| 228 | AGAGAAUCUCCGCAAGAAA | UUUCUUGCGGAGAUUCUCU | | [1109-1127] |
| 229 | CACCAUCAUCACACUGGAA | UUCCAGUGUGAUGAUGGUG | Pig, RB | [1007-1025] |
| 230 | CUGCUCAGAUAGCGAUGGU | ACCAUCGCUAUCUGAGCAG | | [794-812] |
| 231 | CUCCUUCUCCCUUUUUAUA | UAUAAAAAGGGAGAAGGAG | | [2563-2581] |
| 232 | UGAUCUGGAUCCACCAAGA | UCUUGGUGGAUCCAGAUCA | | [2144-2162] |
| 233 | CCCACUUCACCGUACUAAC | GUUAGUACGGUGAAGUGGG | | [1754-1772] |
| 234 | GCCUGACUCAGACUGACAU | AUGUCAGUCUGAGUCAGGC | | [1418-1436] |
| 235 | CUGAGUCAGGAAACAUUUU | AAAAUGUUUCCUGACUCAG | MK | [291-309] |
| 236 | AGGAAGAGAAUCUCCGCAA | UUGCGGAGAUUCUCUUCCU | | [1105-1123] |
| 237 | GUGUAACAGUUCCUGCAUG | CAUGCAGGAACUGUUACAC | MK, Dog | [962-980] |
| 238 | AACUACAUGUGUAACAGUU | AACUGUUACACAUGUAGUU | MK, Dog | [954-972] |
| 239 | CAACUACAUGUGUAACAGU | ACUGUUACACAUGUAGUUG | MK, Dog | [953-971] |
| 240 | ACAAGAUGUUUUGCCAACU | AGUUGGCAAAACAUCUUGU | | [643-661] |
| 241 | CGAUAUUGAACAAUGGUUC | GAACCAUUGUUCAAUAUCG | | [395-413] |
| 242 | GUACCUAAAAGGAAAUCUC | GAGAUUUCCUUUUAGGUAC | | [2083-2101] |
| 243 | GUCCCAAGCAAUGGAUGAU | AUCAUCCAUUGCUUGGGAC | | [359-377] |
| 244 | CCACCUUUUAUUACAUGGG | CCCAUGUAAUAAAAGGUGG | | [1903-1921] |
| 245 | GGCCUUGAAACCACCUUUU | AAAAGGUGGUUUCAAGGCC | | [1893-1911] |
| 246 | UCUGUGAAAUGCUGGCAUU | AAUGCCAGCAUUUCACAGA | | [1822-1840] |
| 247 | AUGGAAACUACUUCCUGAA | UUCAGGAAGUAGUUUCCAU | MK, GP | [317-335] |
| 248 | CACCGUACUAACCAGGGAA | UUCCCUGGUUAGUACGGUG | | [1761-1779] |
| 249 | AGGACAUACCAGCUUAGAU | AUCUAAGCUGGUAUGUCCU | | [1637-1655] |
| 250 | UGGCCUGCACUGGUGUUUU | AAAACACCAGUGCAGGCCA | | [1594-1612] |
| 251 | GCUUGCAAUAGGUGUGCGU | ACGCACACCUAUUGCAAGC | | [1522-1540] |
| 252 | CCUCCCGCCAUAAAAAACU | AGUUUUUUAUGGCGGGAGG | | [1381-1399] |
| 253 | CUACCUCCCGCCAUAAAAA | UUUUUAUGGCGGGAGGUAG | MK, RB | [1378-1396] |
| 254 | GAGUCAGGAAACAUUUUCA | UGAAAAUGUUUCCUGACUC | MK | [293-311] |
| 255 | AGAGCUGAAUGAGGCCUUG | CAAGGCCUCAUUCAGCUCU | MK, Rat | [1277-1295] |
| 256 | GGAUGGAGAAUAUUUCACC | GGUGAAAUAUUCUCCAUCC | MK | [1220-1238] |
| 257 | CCACUGGAUGGAGAAUAUU | AAUAUUCUCCAUCCAGUGG | MK | [1215-1233] |
| 258 | AAGAGAAUCUCCGCAAGAA | UUCUUGCGGAGAUUCUCUU | | [1108-1126] |
| 259 | UCCGAGUGGAAGGAAAUUU | AAAUUUCCUUCCACUCGGA | MK, Dog | [835-853] |
| 260 | CAUGAGCGCUGCUCAGAUA | UAUCUGAGCAGCGCUCAUG | | [786-804] |
| 261 | ACAAGCAGUCACAGCACAU | AUGUGCUGUGACUGCUUGU | MK | [739-757] |
| 262 | CUAAAAGUUUUGAGCUUCU | AGAAGCUCAAAACUUUUAG | | [93-111] |
| 263 | CAACAAGAUGUUUUGCCAA | UUGGCAAAACAUCUUGUUG | | [641-659] |
| 264 | UCAACAAGAUGUUUUGCCA | UGGCAAAACAUCUUGUUGA | MK | [640-658] |
| 265 | GCCAAGUCUGUGACUUGCA | UGCAAGUCACAGACUUGGC | MK | [606-624] |
| 266 | GUUUCCGUCUGGGCUUCUU | AAGAAGCCCAGACGGAAAC | | [574-592] |
| 267 | ACACCCUGGAGGAUUUCAU | AUGAAAUCCUCCAGGGUGU | | [2112-2130] |
| 268 | CUGUGAAAUGCUGGCAUUU | AAAUGCCAGCAUUUCACAG | | [1823-1841] |
| 269 | AGGACUUCCAUUUGCUUUG | CAAAGCAAAUGGAAGUCCU | | [1552-1570] |
| 270 | UCAGAAGCACCCAGGACUU | AAGUCCUGGGUGCUUCUGA | | [1540-1558] |
| 271 | AGAAUAUUUCACCCUUCAG | CUGAAGGGUGAAAUAUUCU | MK, Dog | [1226-1244] |
| 272 | AACCACUGGAUGGAGAAUA | UAUUCUCCAUCCAGUGGUU | MK | [1213-1231] |
| 273 | CCAGUGGUAAUCUACUGGG | CCCAGUAGAUUACCACUGG | MK | [1030-1048] |
| 274 | CUCCAGUGGUAAUCUACUG | CAGUAGAUUACCACUGGAG | MK | [1028-1046] |
| 275 | CUGGAAGACUCCAGUGGUA | UACCACUGGAGUCUUCCAG | MK | [1020-1038] |
| 276 | CCAUCAUCACACUGGAAGA | UCUUCCAGUGUGAUGAUGG | Pig, RB, Ms | [1009-1027] |
| 277 | UUAUCCGAGUGGAAGGAAA | UUUCCUUCCACUCGGAUAA | MK, HM | [832-850] |
| 278 | GCAUCUUAUCCGAGUGGAA | UUCCACUCGGAUAAGAUGC | HM | [827-845] |
| 279 | CAAGCAGUCACAGCACAUG | CAUGUGCUGUGACUGCUUG | MK | [740-758] |
| 280 | GUCUGUGACUUGCACGUAC | GUACGUGCAAGUCACAGAC | MK | [611-629] |
| 281 | CCAAGUCUGUGACUUGCAC | GUGCAAGUCACAGACUUGG | MK | [607-625] |
| 282 | GCGCUAAAAGUUUUGAGCU | AGCUCAAAACUUUUAGCGC | GP | [90-108] |
| 283 | UCUGUCCCUUCCCAGAAAA | UUUUCUGGGAAGGGACAGA | MK | [537-555] |
| 284 | UGAAGACCCAGGUCCAGAU | AUCUGGACCUGGGUCUUCA | MK | [416-434] |
| 285 | ACAUUCUGCAAGCACAUCU | AGAUGUGCUUGCAGAAUGU | | [2522-2540] |
| 286 | UCCCAAGCAAUGGAUGAUU | AAUCAUCCAUUGCUUGGGA | | [360-378] |
| 287 | UGGGUUGGUAGUUUCUACA | UGUAGAAACUACCAACCCA | | [1980-1998] |
| 288 | GUGGGUUGGUAGUUUCUAC | GUAGAAACUACCAACCCAC | | [1979-1997] |
| 289 | UCCAAAAAGGGUCAGUCUA | UAGACUGACCCUUUUUGGA | | [1362-1380] |
| 290 | GCUUCGAGAUGUUCCGAGA | UCUCGGAACAUCUCGAAGC | MK, Pig, Rat | [1261-1279] |
| 291 | AGAAACCACUGGAUGGAGA | UCUCCAUCCAGUGGUUUCU | MK | [1210-1228] |
| 292 | GAAGAGAAUCUCCGCAAGA | UCUUGCGGAGAUUCUCUUC | | [1107-1125] |
| 293 | GAACAGCUUUGAGGUGCGU | ACGCACCUCAAAGCUGUUC | Pig | [1052-1070] |
| 294 | CAGUGGUAAUCUACUGGGA | UCCCAGUAGAUUACCACUG | MK | [1031-1049] |
| 295 | GAAGACUCCAGUGGUAAUC | GAUUACCACUGGAGUCUUC | MK | [1023-1041] |
| 296 | CACUUUUCGACAUAGUGUG | CACACUAUGUCGAAAAGUG | MK | [881-899] |
| 297 | UGGCCAUCUACAAGCAGUC | GACUGCUUGUAGAUGGCCA | MK | [730-748] |
| 298 | GGCGCUAAAAGUUUUGAGC | GCUCAAAACUUUUAGCGCC | GP | [89-107] |
| 299 | AGACCCAGGUCCAGAUGAA | UUCAUCUGGACCUGGGUCU | MK | [419-437] |
| 300 | GGAUCCACCAAGACUUGUU | AACAAGUCUUGGUGGAUCC | | [2150-2168] |
| 301 | GGAGGAUUUCAUCUCUUGU | ACAAGAGAUGAAAUCCUCC | | [2119-2137] |
| 302 | UGGAAACUACUUCCUGAAA | UUUCAGGAAGUAGUUUCCA | MK, GP | [318-336] |
| 303 | CCUAUGGAAACUACUUCCU | AGGAAGUAGUUUCCAUAGG | MK | [314-332] |
| 304 | CCACUGAACAAGUUGGCCU | AGGCCAACUUGUUCAGUGG | | [1581-1599] |
| 305 | UGAACCCUUGCUUGCAAUA | UAUUGCAAGCAAGGGUUCA | | [1513-1531] |
| 306 | GGUCUUUGAACCCUUGCUU | AAGCAAGGGUUCAAAGACC | | [1507-1525] |
| 307 | CAGCUUUGAGGUGCGUGUU | AACACGCACCUCAAAGCUG | Pig | [1055-1073] |
| 308 | ACCAUCAUCACACUGGAAG | CUUCCAGUGUGAUGAUGGU | Pig, RB, Ms | [1008-1026] |
| 309 | UCACCAUCAUCACACUGGA | UCCAGUGUGAUGAUGGUGA | Pig, RB | [1006-1024] |
| 310 | CACUACAACUACAUGUGUA | UACACAUGUAGUUGUAGUG | MK, Dog | [948-966] |
| 311 | AUAGUGUGGUGGUGCCCUA | UAGGGCACCACCACACUAU | MK | [892-910] |
| 312 | ACAGCCAAGUCUGUGACUU | AAGUCACAGACUUGGCUGU | MK | [603-621] |
| 313 | UUCUGUCCCUUCCCAGAAA | UUUCUGGGAAGGGACAGAA | | [536-554] |
| 314 | UCUGGAUCCACCAAGACUU | AAGUCUUGGUGGAUCCAGA | | [2147-2165] |
| 315 | CCCUGGAGGAUUUCAUCUC | GAGAUGAAAUCCUCCAGGG | | [2115-2133] |
| 316 | CUUAGUACCUAAAAGGAAA | UUUCCUUUUAGGUACUAAG | | [2079-2097] |
| 317 | GGUCGACCUUAGUACCUAA | UUAGGUACUAAGGUCGACC | | [2072-2090] |
| 318 | CCAAACCCUGUCUGACAAC | GUUGUCAGACAGGGUUUGG | | [2048-2066] |
| 319 | CUGAAAACAACGUUCUGUC | GACAGAACGUUGUUUUCAG | GP | [331-349] |
| 320 | GGAGUAGGACAUACCAGCU | AGCUGGUAUGUCCUACUCC | | [1632-1650] |
| 321 | UGCAAUAGGUGUGCGUCAG | CUGACGCACACCUAUUGCA | | [1525-1543] |
| 322 | UGCUCAAGACUGGCGCUAA | UUAGCGCCAGUCUUGAGCA | | [78-96] |
| 323 | GCCAUUUUGGGUUUUGGGU | ACCCAAAACCCAAAAUGGC | | [1491-1509] |
| 324 | CCCUCUGAGUCAGGAAACA | UGUUUCCUGACUCAGAGGG | MK | [287-305] |
| 325 | CCAAAGAAGAAACCACUGG | CCAGUGGUUUCUUCUUUGG | MK, GP | [1203-1221] |
| 326 | AGAAAACCUACCAGGGCAG | CUGCCCUGGUAGGUUUUCU | | [550-568] |
| 327 | UGAACAAUGGUUCACUGAA | UUCAGUGAACCAUUGUUCA | | [401-419] |
| 328 | GAGCUGGAAGGGUCAACAU | AUGUUGACCCUUCCAGCUC | | [2498-2516] |
| 329 | GAUCCACCAAGACUUGUUU | AAACAAGUCUUGGUGGAUC | | [2151-2169] |
| 330 | ACCUCUUGGUCGACCUUAG | CUAAGGUCGACCAAGAGGU | | [2065-2083] |
| 331 | ACCUCACAGAGUGCAUUGU | ACAAUGCACUCUGUGAGGU | | [1848-1866] |
| 332 | CUACCUCACAGAGUGCAUU | AAUGCACUCUGUGAGGUAG | | [1846-1864] |
| 333 | GUACUAACCAGGGAAGCUG | CAGCUUCCCUGGUUAGUAC | | [1765-1783] |
| 334 | GGGUCUUUGAACCCUUGCU | AGCAAGGGUUCAAAGACCC | | [1506-1524] |
| 335 | CUCAUGUUCAAGACAGAAG | CUUCUGUCUUGAACAUGAG | | [1398-1416] |
| 336 | AGCUGAAUGAGGCCUUGGA | UCCAAGGCCUCAUUCAGCU | MK, Rat | [1279-1297] |
| 337 | ACUACAACUACAUGUGUAA | UUACACAUGUAGUUGUAGU | MK, Dog | [949-967] |
| 338 | UGGUCGACCUUAGUACCUA | UAGGUACUAAGGUCGACCA | | [2071-2089] |
| 339 | UGGCCUUGAAACCACCUUU | AAAGGUGGUUUCAAGGCCA | | [1892-1910] |
| 340 | CUGGCCUUGAAACCACCUU | AAGGUGGUUUCAAGGCCAG | | [1891-1909] |
| 341 | GCCUGCACUGGUGUUUUGU | ACAAAACACCAGUGCAGGC | | [1596-1614] |
| 342 | UGAACAAGUUGGCCUGCAC | GUGCAGGCCAACUUGUUCA | | [1585-1603] |
| 343 | ACCCUUGCUUGCAAUAGGU | ACCUAUUGCAAGCAAGGGU | | [1516-1534] |
| 344 | CCAGCCAAAGAAGAAACCA | UGGUUUCUUCUUUGGCUGG | MK | [1199-1217] |
| 345 | CCCAGCCAAAGAAGAAACC | GGUUUCUUCUUUGGCUGGG | MK | [1198-1216] |
| 346 | AGCUUUGAGGUGCGUGUUU | AAACACGCACCUCAAAGCU | Pig | [1056-1074] |
| 347 | UCACACUGGAAGACUCCAG | CUGGAGUCUUCCAGUGUGA | MK, RB, Ms | [1015-1033] |
| 348 | GCUUCUCAAAAGUCUAGAG | CUCUAGACUUUUGAGAAGC | | [106-124] |
| 349 | CUCUGACUGUACCACCAUC | GAUGGUGGUACAGUCAGAG | MK, HM, Pig, RB | [929-947] |
| 350 | AGCAUCUUAUCCGAGUGGA | UCCACUCGGAUAAGAUGCU | HM | [826-844] |
| 351 | UCAGCAUCUUAUCCGAGUG | CACUCGGAUAAGAUGCUGA | HM | [824-842] |
| 352 | AAAGUUUUGAGCUUCUCAA | UUGAGAAGCUCAAAACUUU | | [96-114] |
| 353 | AGCAGUCACAGCACAUGAC | GUCAUGUGCUGUGACUGCU | MK | [742-760] |
| 354 | GGCCAUCUACAAGCAGUCA | UGACUGCUUGUAGAUGGCC | MK | [731-749] |
| 355 | GCUGUGGGUUGAUUCCACA | UGUGGAAUCAACCCACAGC | | [683-701] |
| 356 | AGCUGUGGGUUGAUUCCAC | GUGGAAUCAACCCACAGCU | | [682-700] |
| 357 | UCCCUUCCCAGAAAACCUA | UAGGUUUUCUGGGAAGGGA | MK | [541-559] |
| 358 | CCUACCUCACAGAGUGCAU | AUGCACUCUGUGAGGUAGG | | [1845-1863] |
| 359 | ACCGUACUAACCAGGGAAG | CUUCCCUGGUUAGUACGGU | | [1762-1780] |
| 360 | UCACCGUACUAACCAGGGA | UCCCUGGUUAGUACGGUGA | | [1760-1778] |
| 361 | CUGAACAAGUUGGCCUGCA | UGCAGGCCAACUUGUUCAG | | [1584-1602] |
| 362 | GCCUUGGAACUCAAGGAUG | CAUCCUUGAGUUCCAAGGC | MK | [1290-1308] |
| 363 | CAGCCAAAGAAGAAACCAC | GUGGUUUCUUCUUUGGCUG | MK, GP | [1200-1218] |
| 364 | ACAGCUUUGAGGUGCGUGU | ACACGCACCUCAAAGCUGU | Pig | [1054-1072] |
| 365 | UCCACUACAACUACAUGUG | CACAUGUAGUUGUAGUGGA | MK, Dog, GP | [946-964] |
| 366 | UGAGCUUCUCAAAAGUCUA | UAGACUUUUGAGAAGCUCA | | [103-121] |
| 367 | CUCAGCAUCUUAUCCGAGU | ACUCGGAUAAGAUGCUGAG | HM | [823-841] |
| 368 | CAAGCACAUCUGCAUUUUC | GAAAAUGCAGAUGUGCUUG | | [2530-2548] |
| 369 | UGCAAGCACAUCUGCAUUU | AAAUGCAGAUGUGCUUGCA | | [2528-2546] |
| 370 | CCUUAGUACCUAAAAGGAA | UUCCUUUUAGGUACUAAGG | | [2078-2096] |
| 371 | UAAGAAAUGUUCUUGCAGU | ACUGCAAGAACAUUUCUUA | | [1692-1710] |
| 372 | CCCUUGCUUGCAAUAGGUG | CACCUAUUGCAAGCAAGGG | | [1517-1535] |
| 373 | GUUUUGAGCUUCUCAAAAG | CUUUUGAGAAGCUCAAAAC | | [99-117] |
| 374 | UCCUCAGCAUCUUAUCCGA | UCGGAUAAGAUGCUGAGGA | HM | [821-839] |
| 375 | CUCACAGAGUGCAUUGUGA | UCACAAUGCACUCUGUGAG | | [1850-1868] |
| 376 | UGUAAGAAAUGUUCUUGCA | UGCAAGAACAUUUCUUACA | | [1690-1708] |
| 377 | GGCUCCACUGAACAAGUUG | CAACUUGUUCAGUGGAGCC | | [1577-1595] |
| 378 | UCGAGAUGUUCCGAGAGCU | AGCUCUCGGAACAUCUCGA | MK, Pig, Rat, RB | [1264-1282] |
| 379 | CAACCUCUUGGUCGACCUU | AAGGUCGACCAAGAGGUUG | | [2063-2081] |
| 380 | UUGAACCCUUGCUUGCAAU | AUUGCAAGCAAGGGUUCAA | | [1512-1530] |
| 381 | UCCAGAUGAAGCUCCCAGA | UCUGGGAGCUUCAUCUGGA | | [428-446] |
| 382 | ACAACCUCUUGGUCGACCU | AGGUCGACCAAGAGGUUGU | | [2062-2080] |
| 383 | GGCUUCUUGCAUUCUGGGA | UCCCAGAAUGCAAGAAGCC | | [585-603] |
| 384 | UCUGCAAGCACAUCUGCAU | AUGCAGAUGUGCUUGCAGA | | [2526-2544] |
| 385 | CUGACAACCUCUUGGUCGA | UCGACCAAGAGGUUGUCAG | | [2059-2077] |
| 386 | CUGCAAGCACAUCUGCAUU | AAUGCAGAUGUGCUUGCAG | | [2527-2545] |
| 387 | CUGGGCUUCUUGCAUUCUG | CAGAAUGCAAGAAGCCCAG | | [582-600] |
| 388 | CAGAAAACCUACCAGGGCA | UGCCCUGGUAGGUUUUCUG | | [549-567] |
| 389 | GUCUGGGCUUCUUGCAUUC | GAAUGCAAGAAGCCCAGAC | | [580-598] |
| 390 | CCUCUGAGUCAGGAAACAU | AUGUUUCCUGACUCAGAGG | MK | [288-306] |
| 391 | AGGCCUUGGAACUCAAGGA | UCCUUGAGUUCCAAGGCCU | MK | [1288-1306] |

TABLE B2
P53 19-mer oligomer pairs - tumor protein p53

| | | | | Human- |
|---|---|---|---|---|
| | | | | 8400737: |
| No. | Sense | AntiSense | Other Sp | 252-1433 |

| | | | | |
|---|---|---|---|---|
| 1 | CAUUGUGAGGGUUAAUGAA | UUCAUUAACCCUCACAAUG | | [1861-1879] |
| 2 | GCUCAAGACUGGCGCUAAA | UUUAGCGCCAGUCUUGAGC | | [79-97] |
| 3 | GUUAAGGGUUAGUUUACAA | UUGUAAACUAACCCUUAAC | | [1709-1727] |
| 4 | GCAGUUAAGGGUUAGUUUA | UAAACUAACCCUUAACUGC | | [1706-1724] |
| 5 | GAAUUUUCUCUAACUUCAA | UUGAAGUUAGAGAAAAUUC | | [1795-1813] |
| 6 | GAAAUGUUCUUGCAGUUAA | UUAACUGCAAGAACAUUUC | | [1695-1713] |
| 7 | GGGUUAAUGAAAUAAUGUA | UACAUUAUUUCAUUAACCC | | [1869-1887] |
| 8 | AUACCAGCUUAGAUUUUAA | UUAAAAUCUAAGCUGGUAU | | [1642-1660] |
| 9 | CAAUAGGUGUGCGUCAGAA | UUCUGACGCACACCUAUUG | | [1527-1545] |
| 10 | GGAUUUCAUCUCUUGUAUA | UAUACAAGAGAUGAAAUCC | | [2122-2140] |
| 11 | CAUGUUGAAUUUUCUCUAA | UUAGAGAAAAUUCAACAUG | | [1789-1807] |
| 12 | GUACCACCAUCCACUACAA | UUGUAGUGGAUGGUGGUAC | Pig, Mnk | [937-955] |
| 13 | CGAUCUCUUAUUUUACAAU | AUUGUAAAAUAAGAGAUCG | | [2596-2614] |
| 14 | GGAAGACUCCAGUGGUAAU | AUUACCACUGGAGUCUUCC | Mnk | [1022-1040] |
| 15 | UGUGAGGGUUAAUGAAAUA | UAUUUCAUUAACCCUCACA | | [1864-1882] |
| 16 | GGACAUACCAGCUUAGAUU | AAUCUAAGCUGGUAUGUCC | | [1638-1656] |
| 17 | AUAAAAAACUCAUGUUCAA | UUGAACAUGAGUUUUUUAU | | [1390-1408] |
| 18 | GAGGGUUAAUGAAAUAAUG | CAUUAUUUCAUUAACCCUC | | [1867-1885] |
| 19 | GAUCUCUUAUUUUACAAUA | UAUUGUAAAAUAAGAGAUC | | [2597-2615] |
| 20 | GAAACCACUGGAUGGAGAA | UUCUCCAUCCAGUGGUUUC | Mnk | [1211-1229] |
| 21 | AGUUAAGGGUUAGUUUACA | UGUAAACUAACCCUUAACU | | [1708-1726] |
| 22 | AACUCAUGUUCAAGACAGA | UCUGUCUUGAACAUGAGUU | | [1396-1414] |
| 23 | GAAUAUUUCACCCUUCAGA | UCUGAAGGGUGAAAUAUUC | Dog, Mnk | [1227-1245] |
| 24 | AUAUCGAUCUCUUAUUUUA | UAAAAUAAGAGAUCGAUAU | | [2592-2610] |
| 25 | CUGGAUGGAGAAUAUUUCA | UGAAAUAUUCUCCAUCCAG | Rb, Mnk | [1218-1236] |
| 26 | UGUACAUCUGGCCUUGAAA | UUUCAAGGCCAGAUGUACA | | [1884-1902] |
| 27 | GAAAUUUGCGUGUGGAGUA | UACUCCACACGCAAAUUUC | Mnk | [847-865] |
| 28 | UCUACCUCCCGCCAUAAAA | UUUUAUGGCGGGAGGUAGA | Rb, Mnk | [1377-1395] |
| 29 | UGUAUAUGAUGAUCUGGAU | AUCCAGAUCAUCAUAUACA | | [2135-2153] |
| 30 | AGGUAGAGGGAGUUGUCAA | UUGACAACUCCCUCUACCU | | [2014-2032] |
| 31 | CCACCAUCCACUACAACUA | UAGUUGUAGUGGAUGGUGG | GP, Dog, Mnk | [940-958] |
| 32 | GAAGGGUCAACAUCUUUUA | UAAAAGAUGUUGACCCUUC | | [2504-2522] |
| 33 | GCGCACAGAGGAAGAGAAU | AUUCUCUUCCUCUGUGCGC | Mnk | [1097-1115] |
| 34 | CCAGAUGAAGCUCCCAGAA | UUCUGGGAGCUUCAUCUGG | | [429-447] |
| 35 | UGAGGGUUAAUGAAAUAAU | AUUAUUUCAUUAACCCUCA | | [1866-1884] |
| 36 | UACCUCCCGCCAUAAAAAA | UUUUUUAUGGCGGGAGGUA | Rb, Mnk | [1379-1397] |
| 37 | UCGAUCUCUUAUUUUACAA | UUGUAAAAUAAGAGAUCGA | | [2595-2613] |
| 38 | CAAGGCCCAUAUCUGUGAA | UUCACAGAUAUGGGCCUUG | | [1811-1829] |
| 39 | GAGGUUGGCUCUGACUGUA | UACAGUCAGAGCCAACCUC | Hamster, Rb, Mnk | [921-939] |
| 40 | CAGACCUAUGGAAACUACU | AGUAGUUUCCAUAGGUCUG | Mnk | [310-328] |
| 41 | GAAACCACCUUUUAUUACA | UGUAAUAAAAGGUGGUUUC | | [1899-1917] |
| 42 | GCUUAGAUUUUAAGGUUUU | AAAACCUUAAAAUCUAAGC | | [1648-1666] |
| 43 | CAUACCAGCUUAGAUUUUA | UAAAAUCUAAGCUGGUAUG | | [1641-1659] |
| 44 | AAGGGUUAGUUUACAAUCA | UGAUUGUAAACUAACCCUU | | [1712-1730] |
| 45 | CAAGCAAUGGAUGAUUUGA | UCAAAUCAUCCAUUGCUUG | | [363-381] |
| 46 | CAGCCACCUGAAGUCCAAA | UUUGGACUUCAGGUGGCUG | | [1349-1367] |
| 47 | GUUAGUUUACAAUCAGCCA | UGGCUGAUUGUAAACUAAC | | [1716-1734] |
| 48 | CUGUGAGGGAUGUUUGGGA | UCCCAAACAUCCCUCACAG | | [1669-1687] |
| 49 | UGAAUUUUCUCUAACUUCA | UGAAGUUAGAGAAAAUUCA | | [1794-1812] |
| 50 | UUUUUAUAUCGAUCUCUUA | UAAGAGAUCGAUAUAAAAA | | [2587-2605] |
| 51 | CGUCCCAAGCAAUGGAUGA | UCAUCCAUUGCUUGGGACG | | [358-376] |
| 52 | GAAACUACUUCCUGAAAAC | GUUUUCAGGAAGUAGUUUC | GP, Mnk | [320-338] |
| 53 | CAUCCUCACCAUCAUCACA | UGUGAUGAUGGUGAGGAUG | Rb, Pig | [1001-1019] |
| 54 | CAAGACUGGCGCUAAAAGU | ACUUUUAGCGCCAGUCUUG | | [82-100] |
| 55 | GUCAGGAAACAUUUUCAGA | UCUGAAAAUGUUUCCUGAC | Mnk | [295-313] |
| 56 | GAGUGCAUUGUGAGGGUUA | UAACCCUCACAAUGCACUC | | [1856-1874] |
| 57 | AGUCUACCUCCCGCCAUAA | UUAUGGCGGGAGGUAGACU | Rb | [1375-1393] |
| 58 | AUUGUGAGGGUUAAUGAAA | UUUCAUUAACCCUCACAAU | | [1862-1880] |
| 59 | CAUAAAAAACUCAUGUUCA | UGAACAUGAGUUUUUUAUG | | [1389-1407] |
| 60 | CAUCUUUUACAUUCUGCAA | UUGCAGAAUGUAAAAGAUG | | [2514-2532] |
| 61 | GAUUUCAUCUCUUGUAUAU | AUAUACAAGAGAUGAAAUC | | [2123-2141] |
| 62 | UAUGGAAACUACUUCCUGA | UCAGGAAGUAGUUUCCAUA | GP, Mnk | [316-334] |
| 63 | CAUCUUCUGUCCCUUCCCA | UGGGAAGGGACAGAAGAUG | | [532-550] |
| 64 | CUGGAAGGGUCAACAUCUU | AAGAUGUUGACCCUUCCAG | | [2501-2519] |
| 65 | AUGUUUGGGAGAUGUAAGA | UCUUACAUCUCCCAAACAU | | [1678-1696] |
| 66 | CUUUGAGGUGCGUGUUUGU | ACAAACACGCACCUCAAAG | Pig | [1058-1076] |
| 67 | CUUUUUAUAUCCCAUUUUU | AAAAAUGGGAUAUAAAAAG | | [2573-2591] |
| 68 | AACUACUUCCUGAAAACAA | UUGUUUUCAGGAAGUAGUU | GP | [322-340] |
| 69 | AGGAUUUCAUCUCUUGUAU | AUACAAGAGAUGAAAUCCU | | [2121-2139] |
| 70 | ACUACUUCCUGAAAACAAC | GUUGUUUUCAGGAAGUAGU | GP | [323-341] |
| 71 | GUAUUUGGAUGACAGAAAC | GUUUCUGUCAUCCAAAUAC | Rb | [863-881] |
| 72 | UUUGGGAGAUGUAAGAAAU | AUUUCUUACAUCUCCCAAA | | [1681-1699] |
| 73 | CUCAGACUGACAUUCUCCA | UGGAGAAUGUCAGUCUGAG | | [1424-1442] |
| 74 | UGACAGAAACACUUUUCGA | UCGAAAAGUGUUUCUGUCA | Pig, Mnk | [872-890] |
| 75 | AGUAGGACAUACCAGCUUA | UAAGCUGGUAUGUCCUACU | | [1634-1652] |
| 76 | UCAUGUUGAAUUUUCUCUA | UAGAGAAAAUUCAACAUGA | | [1788-1806] |
| 77 | AAUAUUUCACCCUUCAGAU | AUCUGAAGGGUGAAAUAUU | Dog, Mnk | [1228-1246] |
| 78 | AUCGAUCUCUUAUUUUACA | UGUAAAAUAAGAGAUCGAU | | [2594-2612] |
| 79 | GAUGUUUGGGAGAUGUAAG | CUUACAUCUCCCAAACAUC | | [1677-1695] |
| 80 | AGCUGGUUAGGUAGAGGGA | UCCCUCUACCUAACCAGCU | | [2006-2024] |
| 81 | ACAGAAACACUUUUCGACA | UGUCGAAAAGUGUUUCUGU | Pig, Dog, Mnk | [874-892] |
| 82 | CAGUUAAGGGUUAGUUUAC | GUAAACUAACCCUUAACUG | | [1707-1725] |
| 83 | UGAUGAUCUGGAUCCACCA | UGGUGGAUCCAGAUCAUCA | | [2141-2159] |
| 84 | ACAUUUUCAGACCUAUGGA | UCCAUAGGUCUGAAAAUGU | Mnk | [303-321] |
| 85 | CAUUUGCACCUACCUCACA | UGUGAGGUAGGUGCAAAUG | | [1837-1855] |
| 86 | CUUAGAUUUUAAGGUUUUU | AAAAACCUUAAAAUCUAAG | | [1649-1667] |
| 87 | AGAUUUUAAGGUUUUUACU | AGUAAAAACCUUAAAAUCU | | [1652-1670] |
| 88 | CGUCUGGGCUUCUUGCAUU | AAUGCAAGAAGCCCAGACG | | [579-597] |
| 89 | GCAAUAGGUGUGCGUCAGA | UCUGACGCACACCUAUUGC | | [1526-1544] |
| 90 | UACAAUCAGCCACAUUCUA | UAGAAUGUGGCUGAUUGUA | | [1723-1741] |
| 91 | AGGUUUUUACUGUGAGGGA | UCCCUCACAGUAAAAACCU | | [1660-1678] |
| 92 | CCUGAAGUCCAAAAAGGGU | ACCCUUUUUGGACUUCAGG | | [1355-1373] |
| 93 | GUGAGGGAUGUUUGGGAGA | UCUCCCAAACAUCCCUCAC | | [1671-1689] |
| 94 | AUCCCAUUUUUAUAUCGAU | AUCGAUAUAAAAAUGGGAU | | [2581-2599] |
| 95 | UUGGGUUUUGGGUCUUUGA | UCAAAGACCCAAAACCCAA | | [1497-1515] |
| 96 | GACAUACCAGCUUAGAUUU | AAAUCUAAGCUGGUAUGUC | | [1639-1657] |
| 97 | UGUUUUGCCAACUGGCCAA | UUGGCCAGUUGGCAAAACA | | [649-667] |
| 98 | GGUAAUCUACUGGGACGGA | UCCGUCCCAGUAGAUUACC | Mnk | [1035-1053] |
| 99 | GUUAAUGAAAUAAUGUACA | UGUACAUUAUUUCAUUAAC | | [1871-1889] |
| 100 | UCUCUAACUUCAAGGCCCA | UGGGCCUUGAAGUUAGAGA | | [1801-1819] |
| 101 | AUGAGGCCUUGGAACUCAA | UUGAGUUCCAAGGCCUCAU | Mnk | [1285-1303] |
| 102 | UGUUUGGGAGAUGUAAGAA | UUCUUACAUCUCCCAAACA | | [1679-1697] |
| 103 | UGGUGGGUUGGUAGUUUCU | AGAAACUACCAACCCACCA | | [1977-1995] |
| 104 | AAAUUUGCGUGUGGAGUAU | AUACUCCACACGCAAAUUU | Mnk | [848-866] |
| 105 | UAGUUUACAAUCAGCCACA | UGUGGCUGAUUGUAAACUA | | [1718-1736] |
| 106 | AGAGGGAGUUGUCAAGUCU | AGACUUGACAACUCCCUCU | | [2018-2036] |
| 107 | AGCACAUGACGGAGGUUGU | ACAACCUCCGUCAUGUGCU | | [751-769] |
| 108 | GAGGAAGAGAAUCUCCGCA | UGCGGAGAUUCUCUUCCUC | | [1104-1122] |
| 109 | AAGGAAAUUUGCGUGUGGA | UCCACACGCAAAUUUCCUU | Mnk | [844-862] |
| 110 | ACUGUACCACCAUCCACUA | UAGUGGAUGGUGGUACAGU | Hamster, Rb, Pig, Mnk | [934-952] |
| 111 | UCUGAGUCAGGAAACAUUU | AAAUGUUUCCUGACUCAGA | Mnk | [290-308] |
| 112 | GGUUAAUGAAAUAAUGUAC | GUACAUUAUUUCAUUAACC | | [1870-1888] |
| 113 | GAGAUGUUCCGAGAGCUGA | UCAGCUCUCGGAACAUCUC | Rat, Rb, Pig, Mnk | [1266-1284] |
| 114 | AGCUUAGAUUUUAAGGUUU | AAACCUUAAAAUCUAAGCU | | [1647-1665] |
| 115 | AACAAUGGUUCACUGAAGA | UCUUCAGUGAACCAUUGUU | | [403-421] |
| 116 | UACCUAAAAGGAAAUCUCA | UGAGAUUUCCUUUUAGGUA | | [2084-2102] |
| 117 | AAACCACCUUUUAUUACAU | AUGUAAUAAAAGGUGGUUU | | [1900-1918] |
| 118 | UUGUCAUGGCGACUGUCCA | UGGACAGUCGCCAUGACAA | | [3-21] |
| 119 | CCAUGGCCAUCUACAAGCA | UGCUUGUAGAUGGCCAUGG | Mnk | [727-745] |
| 120 | GAGGAUUUCAUCUCUUGUA | UACAAGAGAUGAAAUCCUC | | [2120-2138] |
| 121 | UUGGGCAGCUGGUUAGGUA | UACCUAACCAGCUGCCCAA | | [2000-2018] |
| 122 | GACUGUACCACCAUCCACU | AGUGGAUGGUGGUACAGUC | Hamster, Rb, Pig, Mnk | [933-951] |
| 123 | GUUUACAAUCAGCCACAUU | AAUGUGGCUGAUUGUAAAC | | [1720-1738] |
| 124 | UGAAAUGCUGGCAUUUGCA | UGCAAAUGCCAGCAUUUCA | | [1826-1844] |
| 125 | ACCACUGGAUGGAGAAUAU | AUAUUCUCCAUCCAGUGGU | Mnk | [1214-1232] |
| 126 | GAUGAUCUGGAUCCACCAA | UUGGUGGAUCCAGAUCAUC | | [2142-2160] |
| 127 | AUUUUCAGACCUAUGGAAA | UUUCCAUAGGUCUGAAAAU | Mnk | [305-323] |
| 128 | AAGUUUUGAGCUUCUCAAA | UUUGAGAAGCUCAAAACUU | | [97-115] |
| 129 | AGGGUUAAUGAAAUAAUGU | ACAUUAUUUCAUUAACCCU | | [1868-1886] |
| 130 | AAUCUACUGGGACGGAACA | UGUUCCGUCCCAGUAGAUU | Mnk | [1038-1056] |
| 131 | AGACUCCAGUGGUAAUCUA | UAGAUUACCACUGGAGUCU | Mnk | [1025-1043] |
| 132 | GAGAAUCUCCGCAAGAAAG | CUUUCUUGCGGAGAUUCUC | | [1110-1128] |
| 133 | CAUUUUGGGUUUUGGGUCU | AGACCCAAAACCCAAAAUG | | [1493-1511] |
| 134 | UAUUUGGAUGACAGAAACA | UGUUUCUGUCAUCCAAAUA | Rb | [864-882] |
| 135 | UAUCCGAGUGGAAGGAAAU | AUUUCCUUCCACUCGGAUA | Hamster, Mnk | [833-851] |
| 136 | CUUCUUGCAUUCUGGGACA | UGUCCCAGAAUGCAAGAAG | | [587-605] |
| 137 | AAAAAACUCAUGUUCAAGA | UCUUGAACAUGAGUUUUUU | | [1392-1410] |
| 138 | AUUUUUAUAUCGAUCUCUU | AAGAGAUCGAUAUAAAAAU | | [2586-2604] |
| 139 | UUUACAUUCUGCAAGCACA | UGUGCUUGCAGAAUGUAAA | | [2519-2537] |
| 140 | GUUGAAUUUUCUCUAACUU | AAGUUAGAGAAAAUUCAAC | | [1792-1810] |
| 141 | GCACAGAGGAAGAGAAUCU | AGAUUCUCUUCCUCUGUGC | | [1099-1117] |
| 142 | GGAGAUGUAAGAAAUGUUC | GAACAUUUCUUACAUCUCC | | [1685-1703] |
| 143 | UGUGCAGCUGUGGGUUGAU | AUCAACCCACAGCUGCACA | | [677-695] |
| 144 | AGUGGAAGGAAAUUUGCGU | ACGCAAAUUUCCUUCCACU | Mnk | [839-857] |
| 145 | CCUUUUUAUAUCCCAUUUU | AAAAUGGGAUAUAAAAAGG | | [2572-2590] |
| 146 | UAUCGAUCUCUUAUUUUAC | GUAAAAUAAGAGAUCGAUA | | [2593-2611] |
| 147 | CGAGUGGAAGGAAAUUUGC | GCAAAUUUCCUUCCACUCG | Dog, Mnk | [837-855] |
| 148 | UUUGGAUGACAGAAACACU | AGUGUUUCUGUCAUCCAAA | | [866-884] |
| 149 | CUUCAAGGCCCAUAUCUGU | ACAGAUAUGGGCCUUGAAG | | [1808-1826] |
| 150 | AUAUGAUGAUCUGGAUCCA | UGGAUCCAGAUCAUCAUAU | | [2138-2156] |
| 151 | UGUUCCGAGAGCUGAAUGA | UCAUUCAGCUCUCGGAACA | Rat, Pig, Mnk | [1270-1288] |
| 152 | GAACAAGUUGGCCUGCACU | AGUGCAGGCCAACUUGUUC | | [1586-1604] |
| 153 | GAGAUGUAAGAAAUGUUCU | AGAACAUUUCUUACAUCUC | | [1686-1704] |
| 154 | CUUCCCAGAAAACCUACCA | UGGUAGGUUUUCUGGGAAG | Mnk | [544-562] |
| 155 | GAUAUUGAACAAUGGUUCA | UGAACCAUUGUUCAAUAUC | | [396-414] |
| 156 | AGACUGACAUUCUCCACUU | AAGUGGAGAAUGUCAGUCU | | [1427-1445] |
| 157 | ACUCAUGUUCAAGACAGAA | UUCUGUCUUGAACAUGAGU | | [1397-1415] |
| 158 | UCAACAUCUUUUACAUUCU | AGAAUGUAAAAGAUGUUGA | | [2510-2528] |
| 159 | AGUUUUGAGCUUCUCAAAA | UUUUGAGAAGCUCAAAACU | | [98-116] |
| 160 | UUAAGGGUUAGUUUACAAU | AUUGUAAACUAACCCUUAA | | [1710-1728] |
| 161 | AGCCAAACCCUGUCUGACA | UGUCAGACAGGGUUUGGCU | | [2046-2064] |
| 162 | UCAUGUUCAAGACAGAAGG | CCUUCUGUCUUGAACAUGA | | [1399-1417] |
| 163 | ACAUGACGGAGGUUGUGAG | CUCACAACCUCCGUCAUGU | | [754-772] |
| 164 | UUGUAUAUGAUGAUCUGGA | UCCAGAUCAUCAUAUACAA | | [2134-2152] |
| 165 | AAGACUGGCGCUAAAAGUU | AACUUUUAGCGCCAGUCUU | | [83-101] |
| 166 | CUUUUACAUUCUGCAAGCA | UGCUUGCAGAAUGUAAAAG | | [2517-2535] |
| 167 | AGCAAUGGAUGAUUUGAUG | CAUCAAAUCAUCCAUUGCU | | [365-383] |
| 168 | CACUUCACCGUACUAACCA | UGGUUAGUACGGUGAAGUG | | [1756-1774] |
| 169 | GGACUUCCAUUUGCUUUGU | ACAAAGCAAAUGGAAGUCC | | [1553-1571] |
| 170 | AAUAGGUGUGCGUCAGAAG | CUUCUGACGCACACCUAUU | | [1528-1546] |
| 171 | AGGAAAUUUGCGUGUGGAG | CUCCACACGCAAAUUUCCU | Mnk | [845-863] |
| 172 | CAUUCUGCAAGCACAUCUG | CAGAUGUGCUUGCAGAAUG | | [2523-2541] |
| 173 | UUUUAUAUCGAUCUCUUAU | AUAAGAGAUCGAUAUAAAA | | [2588-2606] |
| 174 | CAACAUCUUUUACAUUCUG | CAGAAUGUAAAAGAUGUUG | | [2511-2529] |
| 175 | AAGCACAUCUGCAUUUUCA | UGAAAAUGCAGAUGUGCUU | | [2531-2549] |
| 176 | GACGGAACAGCUUUGAGGU | ACCUCAAAGCUGUUCCGUC | Hamster, Rb, Pig, Mnk | [1048-1066] |
| 177 | GACGAUAUUGAACAAUGGU | ACCAUUGUUCAAUAUCGUC | | [393-411] |
| 178 | GGGCUCCACUGAACAAGUU | AACUUGUUCAGUGGAGCCC | | [1576-1594] |
| 179 | GGGAGUUGUCAAGUCUUGC | GCAAGACUUGACAACUCCC | | [2021-2039] |
| 180 | AUUUGCGUGUGGAGUAUUU | AAAUACUCCACACGCAAAU | | [850-868] |
| 181 | UUACAUUCUGCAAGCACAU | AUGUGCUUGCAGAAUGUAA | | [2520-2538] |
| 182 | UAUCCCAUUUUUAUAUCGA | UCGAUAUAAAAAUGGGAUA | | [2580-2598] |
| 183 | CCUGGAGGAUUUCAUCUCU | AGAGAUGAAAUCCUCCAGG | | [2116-2134] |
| 184 | CUCUAACUUCAAGGCCCAU | AUGGGCCUUGAAGUUAGAG | | [1802-1820] |
| 185 | UUGAAACCACCUUUUAUUA | UAAUAAAAGGUGGUUUCAA | | [1897-1915] |
| 186 | ACUCCAGUGGUAAUCUACU | AGUAGAUUACCACUGGAGU | Mnk | [1027-1045] |
| 187 | GUGCAGCUGUGGGUUGAUU | AAUCAACCCACAGCUGCAC | | [678-696] |
| 188 | GUCCAAAAAGGGUCAGUCU | AGACUGACCCUUUUUGGAC | | [1361-1379] |
| 189 | AAACCUACCAGGGCAGCUA | UAGCUGCCCUGGUAGGUUU | | [553-571] |
| 190 | GACAUUCUCCACUUCUUGU | ACAAGAAGUGGAGAAUGUC | | [1432-1450] |
| 191 | UUACAAUCAGCCACAUUCU | AGAAUGUGGCUGAUUGUAA | | [1722-1740] |
| 192 | UCAAGACUGGCGCUAAAAG | CUUUUAGCGCCAGUCUUGA | | [81-99] |
| 193 | UUAUAUCGAUCUCUUAUUU | AAAUAAGAGAUCGAUAUAA | | [2590-2608] |
| 194 | UCUUCUGUCCCUUCCCAGA | UCUGGGAAGGGACAGAAGA | | [534-552] |
| 195 | UGUGUAACAGUUCCUGCAU | AUGCAGGAACUGUUACACA | Dog, Mnk | [961-979] |
| 196 | CCCUUCCCAGAAAACCUAC | GUAGGUUUUCUGGGAAGGG | Mnk | [542-560] |
| 197 | AGAUGUAAGAAAUGUUCUU | AAGAACAUUUCUUACAUCU | | [1687-1705] |
| 198 | UACAAGCAGUCACAGCACA | UGUGCUGUGACUGCUUGUA | Mnk | [738-756] |
| 199 | CCCAAGCAAUGGAUGAUUU | AAAUCAUCCAUUGCUUGGG | | [361-379] |
| 200 | GGAAGCUGUCCCUCAUGUU | AACAUGAGGGACAGCUUCC | | [1776-1794] |
| 201 | AAGCUGUCCCUCAUGUUGA | UCAACAUGAGGGACAGCUU | | [1778-1796] |
| 202 | UAGUUUCUACAGUUGGGCA | UGCCCAACUGUAGAAACUA | | [1988-2006] |
| 203 | UGACACGCUUCCCUGGAUU | AAUCCAGGGAAGCGUGUCA | | [203-221] |
| 204 | UGUUCUUGCAGUUAAGGGU | ACCCUUAACUGCAAGAACA | | [1699-1717] |
| 205 | GCACUGGUGUUUUGUUGUG | CACAACAAAACACCAGUGC | | [1600-1618] |
| 206 | CUGACUGUACCACCAUCCA | UGGAUGGUGGUACAGUCAG | Hamster, Rb, Pig, Mnk | [931-949] |
| 207 | AAACUACUUCCUGAAAACA | UGUUUUCAGGAAGUAGUUU | GP | [321-339] |
| 208 | CAUCCACUACAACUACAUG | CAUGUAGUUGUAGUGGAUG | GP, Dog, Mnk | [944-962] |
| 209 | GCUGGAAGGGUCAACAUCU | AGAUGUUGACCCUUCCAGC | | [2500-2518] |
| 210 | CUUCUGUCCCUUCCCAGAA | UUCUGGGAAGGGACAGAAG | | [535-553] |
| 211 | UUUGCACCUACCUCACAGA | UCUGUGAGGUAGGUGCAAA | | [1839-1857] |
| 212 | UGAGGGAUGUUUGGGAGAU | AUCUCCCAAACAUCCCUCA | | [1672-1690] |
| 213 | UAGGACAUACCAGCUUAGA | UCUAAGCUGGUAUGUCCUA | | [1636-1654] |
| 214 | AAGCAGUCACAGCACAUGA | UCAUGUGCUGUGACUGCUU | Mnk | [741-759] |
| 215 | CCACUACAACUACAUGUGU | ACACAUGUAGUUGUAGUGG | Dog, Mnk | [947-965] |
| 216 | GAGUGGAAGGAAAUUUGCG | CGCAAAUUUCCUUCCACUC | Dog, Mnk | [838-856] |
| 217 | ACUGGAUGGAGAAUAUUUC | GAAAUAUUCUCCAUCCAGU | Mnk | [1217-1235] |
| 218 | UGCAUUCUGGGACAGCCAA | UUGGCUGUCCCAGAAUGCA | | [592-610] |
| 219 | AUCUCUUGUAUAUGAUGAU | AUCAUCAUAUACAAGAGAU | | [2129-2147] |
| 220 | CCUCUUGGUCGACCUUAGU | ACUAAGGUCGACCAAGAGG | | [2066-2084] |
| 221 | GCUUUGAGGUGCGUGUUUG | CAAACACGCACCUCAAAGC | Pig | [1057-1075] |
| 222 | UAAUCUACUGGGACGGAAC | GUUCCGUCCCAGUAGAUUA | Mnk | [1037-1055] |
| 223 | AAACAUUUUCAGACCUAUG | CAUAGGUCUGAAAAUGUUU | Mnk | [301-319] |
| 224 | CUACAAGCAGUCACAGCAC | GUGCUGUGACUGCUUGUAG | Mnk | [737-755] |
| 225 | UGUGAGGGAUGUUUGGGAG | CUCCCAAACAUCCCUCACA | | [1670-1688] |
| 226 | ACAGUUGGGCAGCUGGUUA | UAACCAGCUGCCCAACUGU | | [1996-2014] |
| 227 | CAAUCAGCCACAUUCUAGG | CCUAGAAUGUGGCUGAUUG | | [1725-1743] |
| 228 | GGUAGUUUCUACAGUUGGG | CCCAACUGUAGAAACUACC | | [1986-2004] |
| 229 | UCUCCCUUUUUAUAUCCCA | UGGGAUAUAAAAAGGGAGA | | [2568-2586] |
| 230 | GCACCCAGGACUUCCAUUU | AAAUGGAAGUCCUGGGUGC | | [1546-1564] |
| 231 | UGGAAGGGUCAACAUCUUU | AAAGAUGUUGACCCUUCCA | | [2502-2520] |
| 232 | UGGGAGAUGUAAGAAAUGU | ACAUUUCUUACAUCUCCCA | | [1683-1701] |
| 233 | AGUCACAGCACAUGACGGA | UCCGUCAUGUGCUGUGACU | Ms, GP, Mnk | [745-763] |
| 234 | AGUCAGGAAACAUUUUCAG | CUGAAAAUGUUUCCUGACU | Mnk | [294-312] |
| 235 | GUAAGAAAUGUUCUUGCAG | CUGCAAGAACAUUUCUUAC | | [1691-1709] |
| 236 | UAUAUCGAUCUCUUAUUUU | AAAAUAAGAGAUCGAUAUA | | [2591-2609] |
| 237 | UGAGGUUGGCUCUGACUGU | ACAGUCAGAGCCAACCUCA | Hamster, Mnk | [920-938] |
| 238 | GUUCUUGCAGUUAAGGGUU | AACCCUUAACUGCAAGAAC | | [1700-1718] |
| 239 | AUGGUUCACUGAAGACCCA | UGGGUCUUCAGUGAACCAU | | [407-425] |
| 240 | CUUGCAGUUAAGGGUUAGU | ACUAACCCUUAACUGCAAG | | [1703-1721] |
| 241 | UGUUGAAUUUUCUCUAACU | AGUUAGAGAAAAUUCAACA | | [1791-1809] |
| 242 | UUGCAAUAGGUGUGCGUCA | UGACGCACACCUAUUGCAA | | [1524-1542] |
| 243 | CUGGCAUUUGCACCUACCU | AGGUAGGUGCAAAUGCCAG | | [1833-1851] |
| 244 | CUUUGAACCCUUGCUUGCA | UGCAAGCAAGGGUUCAAAG | | [1510-1528] |
| 245 | UCUCAAAAGUCUAGAGCCA | UGGCUCUAGACUUUUGAGA | | [109-127] |
| 246 | UAGGUAGAGGGAGUUGUCA | UGACAACUCCCUCUACCUA | | [2013-2031] |
| 247 | CAUCUCUUGUAUAUGAUGA | UCAUCAUAUACAAGAGAUG | | [2128-2146] |
| 248 | GAAAUAAUGUACAUCUGGC | GCCAGAUGUACAUUAUUUC | | [1877-1895] |
| 249 | UGACAUUCUCCACUUCUUG | CAAGAAGUGGAGAAUGUCA | | [1431-1449] |
| 250 | AAUUUUCUCUAACUUCAAG | CUUGAAGUUAGAGAAAAUU | | [1796-1814] |
| 251 | GAAGAAACCACUGGAUGGA | UCCAUCCAGUGGUUUCUUC | Mnk | [1208-1226] |
| 252 | UAGUGUGGUGGUGCCCUAU | AUAGGGCACCACCACACUA | Mnk | [893-911] |
| 253 | CAACAACACCAGCUCCUCU | AGAGGAGCUGGUGUUGUUG | Mnk | [1178-1196] |
| 254 | GCAAGCACAUCUGCAUUUU | AAAAUGCAGAUGUGCUUGC | | [2529-2547] |
| 255 | CAUUUUUAUAUCGAUCUCU | AGAGAUCGAUAUAAAAAUG | | [2585-2603] |
| 256 | CACCAUCCACUACAACUAC | GUAGUUGUAGUGGAUGGUG | GP, Dog, Mnk | [941-959] |
| 257 | AGUCAGAUCCUAGCGUCGA | UCGACGCUAGGAUCUGACU | | [265-283] |
| 258 | UCUACAAGCAGUCACAGCA | UGCUGUGACUGCUUGUAGA | Mnk | [736-754] |
| 259 | CUGAAUGAGGCCUUGGAAC | GUUCCAAGGCCUCAUUCAG | Mnk | [1281-1299] |
| 260 | AGUGGUAAUCUACUGGGAC | GUCCCAGUAGAUUACCACU | Mnk | [1032-1050] |
| 261 | UGUGGAGUAUUUGGAUGAC | GUCAUCCAAAUACUCCACA | | [857-875] |
| 262 | CUUAUCCGAGUGGAAGGAA | UUCCUUCCACUCGGAUAAG | Hamster, Mnk | [831-849] |
| 263 | AUUUUAAGGUUUUUACUGU | ACAGUAAAAACCUUAAAAU | | [1654-1672] |
| 264 | GAGUAGGACAUACCAGCUU | AAGCUGGUAUGUCCUACUC | | [1633-1651] |
| 265 | CGCACAGAGGAAGAGAAUC | GAUUCUCUUCCUCUGUGCG | | [1098-1116] |
| 266 | AGAGGAAGAGAAUCUCCGC | GCGGAGAUUCUCUUCCUCU | | [1103-1121] |
| 267 | AAAAGUCUAGAGCCACCGU | ACGGUGGCUCUAGACUUUU | | [113-131] |
| 268 | AUGGAUGAUUUGAUGCUGU | ACAGCAUCAAAUCAUCCAU | | [369-387] |
| 269 | UUUAUAUCGAUCUCUUAUU | AAUAAGAGAUCGAUAUAAA | | [2589-2607] |
| 270 | AUGAAAUAAUGUACAUCUG | CAGAUGUACAUUAUUUCAU | | [1875-1893] |
| 271 | UCAGACCUAUGGAAACUAC | GUAGUUUCCAUAGGUCUGA | Mnk | [309-327] |
| 272 | AAGACAGAAGGGCCUGACU | AGUCAGGCCCUUCUGUCUU | | [1407-1425] |
| 273 | UGGAAGACUCCAGUGGUAA | UUACCACUGGAGUCUUCCA | Mnk | [1021-1039] |
| 274 | UCAAGGCCCAUAUCUGUGA | UCACAGAUAUGGGCCUUGA | | [1810-1828] |
| 275 | UUAGUACCUAAAAGGAAAU | AUUUCCUUUUAGGUACUAA | | [2080-2098] |
| 276 | ACAAUCAGCCACAUUCUAG | CUAGAAUGUGGCUGAUUGU | | [1724-1742] |
| 277 | AAGCACCCAGGACUUCCAU | AUGGAAGUCCUGGGUGCUU | | [1544-1562] |
| 278 | CAUUCUGGGACAGCCAAGU | ACUUGGCUGUCCCAGAAUG | | [594-612] |
| 279 | UGAAUGAGGCCUUGGAACU | AGUUCCAAGGCCUCAUUCA | Hamster, Mnk | [1282-1300] |
| 280 | CUACUUCCUGAAAACAACG | CGUUGUUUUCAGGAAGUAG | GP | [324-342] |
| 281 | GAUUUUAAGGUUUUUACUG | CAGUAAAAACCUUAAAAUC | | [1653-1671] |
| 282 | GUCCCUUCCCAGAAAACCU | AGGUUUUCUGGGAAGGGAC | Mnk | [540-558] |
| 283 | ACUGGUGUUUUGUUGUGGG | CCCACAACAAAACACCAGU | | [1602-1620] |
| 284 | GUGGUAAUCUACUGGGACG | CGUCCCAGUAGAUUACCAC | Mnk | [1033-1051] |
| 285 | UACUGUGAGGGAUGUUUGG | CCAAACAUCCCUCACAGUA | | [1667-1685] |
| 286 | GUAGAGGGAGUUGUCAAGU | ACUUGACAACUCCCUCUAC | | [2016-2034] |
| 287 | AUGUUUUGCCAACUGGCCA | UGGCCAGUUGGCAAAACAU | | [648-666] |
| 288 | AUGUGUAACAGUUCCUGCA | UGCAGGAACUGUUACACAU | Dog, Mnk | [960-978] |
| 289 | CCAAGCAAUGGAUGAUUUG | CAAAUCAUCCAUUGCUUGG | | [362-380] |
| 290 | ACCUUAGUACCUAAAAGGA | UCCUUUUAGGUACUAAGGU | | [2077-2095] |
| 291 | GUACAUCUGGCCUUGAAAC | GUUUCAAGGCCAGAUGUAC | | [1885-1903] |
| 292 | UCUGUGACUUGCACGUACU | AGUACGUGCAAGUCACAGA | Mnk | [612-630] |
| 293 | CACACCCUGGAGGAUUUCA | UGAAAUCCUCCAGGGUGUG | | [2111-2129] |
| 294 | AGUCUGUGACUUGCACGUA | UACGUGCAAGUCACAGACU | Mnk | [610-628] |
| 295 | AAACCACUGGAUGGAGAAU | AUUCUCCAUCCAGUGGUUU | Mnk | [1212-1230] |
| 296 | UGAAGCUCCCAGAAUGCCA | UGGCAUUCUGGGAGCUUCA | | [434-452] |
| 297 | UCAAGACAGAAGGGCCUGA | UCAGGCCCUUCUGUCUUGA | | [1405-1423] |
| 298 | UUUCAUCUCUUGUAUAUGA | UCAUAUACAAGAGAUGAAA | | [2125-2143] |
| 299 | UUUAAGGUUUUUACUGUGA | UCACAGUAAAAACCUUAAA | | [1656-1674] |
| 300 | AGCACCCAGGACUUCCAUU | AAUGGAAGUCCUGGGUGCU | | [1545-1563] |
| 301 | CAGAUGAAGCUCCCAGAAU | AUUCUGGGAGCUUCAUCUG | | [430-448] |
| 302 | CAUGUUCAAGACAGAAGGG | CCCUUCUGUCUUGAACAUG | | [1400-1418] |
| 303 | GUUAGGUAGAGGGAGUUGU | ACAACUCCCUCUACCUAAC | | [2011-2029] |
| 304 | ACUGGGACGGAACAGCUUU | AAAGCUGUUCCGUCCCAGU | Mnk | [1043-1061] |
| 305 | CACCCUGGAGGAUUUCAUC | GAUGAAAUCCUCCAGGGUG | | [2113-2131] |
| 306 | CACCUGAAGUCCAAAAAGG | CCUUUUUGGACUUCAGGUG | | [1353-1371] |
| 307 | CUGUCCCUUCCCAGAAAAC | GUUUUCUGGGAAGGGACAG | Mnk | [538-556] |
| 308 | AAUGAAAUAAUGUACAUCU | AGAUGUACAUUAUUUCAUU | | [1874-1892] |
| 309 | AGAAUCUCCGCAAGAAAGG | CCUUUCUUGCGGAGAUUCU | | [1111-1129] |
| 310 | CCUCAUGUUGAAUUUUCUC | GAGAAAAUUCAACAUGAGG | | [1786-1804] |
| 311 | UAGAUUUUAAGGUUUUUAC | GUAAAAACCUUAAAAUCUA | | [1651-1669] |
| 312 | UUUGAACCCUUGCUUGCAA | UUGCAAGCAAGGGUUCAAA | | [1511-1529] |
| 313 | GAAUCUCCGCAAGAAAGGG | CCCUUUCUUGCGGAGAUUC | | [1112-1130] |
| 314 | GGAUGAUUUGAUGCUGUCC | GGACAGCAUCAAAUCAUCC | | [371-389] |
| 315 | CUCAGAUAGCGAUGGUCUG | CAGACCAUCGCUAUCUGAG | | [797-815] |
| 316 | GCUCAGAUAGCGAUGGUCU | AGACCAUCGCUAUCUGAGC | | [796-814] |
| 317 | UGCACUGGUGUUUUGUUGU | ACAACAAAACACCAGUGCA | | [1599-1617] |
| 318 | AGAUGAAGCUCCCAGAAUG | CAUUCUGGGAGCUUCAUCU | | [431-449] |
| 319 | CCUUCCCAGAAAACCUACC | GGUAGGUUUUCUGGGAAGG | Mnk | [543-561] |
| 320 | UGGAGGAUUUCAUCUCUUG | CAAGAGAUGAAAUCCUCCA | | [2118-2136] |
| 321 | CACCCAGGACUUCCAUUUG | CAAAUGGAAGUCCUGGGUG | | [1547-1565] |
| 322 | UAAGGUUUUUACUGUGAGG | CCUCACAGUAAAAACCUUA | | [1658-1676] |
| 323 | ACUUCAAGGCCCAUAUCUG | CAGAUAUGGGCCUUGAAGU | | [1807-1825] |
| 324 | GGUUAGUUUACAAUCAGCC | GGCUGAUUGUAAACUAACC | | [1715-1733] |
| 325 | CUAUGGAAACUACUUCCUG | CAGGAAGUAGUUUCCAUAG | Mnk | [315-333] |
| 326 | UUGGGAGAUGUAAGAAAUG | CAUUUCUUACAUCUCCCAA | | [1682-1700] |
| 327 | AAUUUGCGUGUGGAGUAUU | AAUACUCCACACGCAAAUU | Mnk | [849-867] |
| 328 | CUGGAUCCACCAAGACUUG | CAAGUCUUGGUGGAUCCAG | | [2148-2166] |
| 329 | GUUGGCUCUGACUGUACCA | UGGUACAGUCAGAGCCAAC | Hamster, Rb, Mnk | [924-942] |
| 330 | UGAAAUAAUGUACAUCUGG | CCAGAUGUACAUUAUUUCA | | [1876-1894] |
| 331 | UACCAGCUUAGAUUUUAAG | CUUAAAAUCUAAGCUGGUA | | [1643-1661] |
| 332 | AAAACUCAUGUUCAAGACA | UGUCUUGAACAUGAGUUUU | | [1394-1412] |
| 333 | GUGAAAUGCUGGCAUUUGC | GCAAAUGCCAGCAUUUCAC | | [1825-1843] |
| 334 | UACAACUACAUGUGUAACA | UGUUACACAUGUAGUUGUA | Dog, Mnk | [951-969] |
| 335 | CACAUGACGGAGGUUGUGA | UCACAACCUCCGUCAUGUG | | [753-771] |
| 336 | ACCUGAAGUCCAAAAAGGG | CCCUUUUUGGACUUCAGGU | | [1354-1372] |
| 337 | GGUUAGGUAGAGGGAGUUG | CAACUCCCUCUACCUAACC | | [2010-2028] |
| 338 | UAAGGGUUAGUUUACAAUC | GAUUGUAAACUAACCCUUA | | [1711-1729] |
| 339 | AAAAGUUUUGAGCUUCUCA | UGAGAAGCUCAAAACUUUU | | [95-113] |
| 340 | AUGGCCAUCUACAAGCAGU | ACUGCUUGUAGAUGGCCAU | Mnk | [729-747] |
| 341 | CACUGGUGUUUUGUUGUGG | CCACAACAAAACACCAGUG | | [1601-1619] |
| 342 | CAGCCAAGUCUGUGACUUG | CAAGUCACAGACUUGGCUG | Mnk | [604-622] |
| 343 | CACAUUCUAGGUAGGUAGG | CCUACCUACCUAGAAUGUG | | [1733-1751] |
| 344 | UACUGGGACGGAACAGCUU | AAGCUGUUCCGUCCCAGUA | Mnk | [1042-1060] |
| 345 | GAUGGAGAAUAUUUCACCC | GGGUGAAAUAUUCUCCAUC | Rat, Dog, Mnk | [1221-1239] |
| 346 | UUUUCAGACCUAUGGAAAC | GUUUCCAUAGGUCUGAAAA | Mnk | [306-324] |
| 347 | GUUCAAGACAGAAGGGCCU | AGGCCCUUCUGUCUUGAAC | | [1403-1421] |
| 348 | AGGUUGGCUCUGACUGUAC | GUACAGUCAGAGCCAACCU | Hamster, Rb, Mnk | [922-940] |
| 349 | ACUUCACCGUACUAACCAG | CUGGUUAGUACGGUGAAGU | | [1757-1775] |
| 350 | CACACUGGAAGACUCCAGU | ACUGGAGUCUUCCAGUGUG | Ms, Rb, Mnk | [1016-1034] |
| 351 | GUUUUUACUGUGAGGGAUG | CAUCCCUCACAGUAAAAAC | | [1662-1680] |
| 352 | ACCCUGUCUGACAACCUCU | AGAGGUUGUCAGACAGGGU | | [2052-2070] |
| 353 | CAUCUUAUCCGAGUGGAAG | CUUCCACUCGGAUAAGAUG | Hamster | [828-846] |
| 354 | ACACUUUUCGACAUAGUGU | ACACUAUGUCGAAAAGUGU | Mnk | [880-898] |
| 355 | AAUGUACAUCUGGCCUUGA | UCAAGGCCAGAUGUACAUU | | [1882-1900] |
| 356 | UUUGGGUCUUUGAACCCUU | AAGGGUUCAAAGACCCAAA | | [1503-1521] |
| 357 | ACCACCAUCCACUACAACU | AGUUGUAGUGGAUGGUGGU | Pig, GP, Dog, Mnk | [939-957] |
| 358 | AUUUGCACCUACCUCACAG | CUGUGAGGUAGGUGCAAAU | | [1838-1856] |
| 359 | CAGCUGUGGGUUGAUUCCA | UGGAAUCAACCCACAGCUG | | [681-699] |
| 360 | AGCACAUCUGCAUUUUCAC | GUGAAAAUGCAGAUGUGCU | | [2532-2550] |
| 361 | UAGAGGGAGUUGUCAAGUC | GACUUGACAACUCCCUCUA | | [2017-2035] |
| 362 | CAUGGCCAUCUACAAGCAG | CUGCUUGUAGAUGGCCAUG | Mnk | [728-746] |
| 363 | AGUUGUCAAGUCUUGCUGG | CCAGCAAGACUUGACAACU | | [2024-2042] |
| 364 | CCUUGCUUGCAAUAGGUGU | ACACCUAUUGCAAGCAAGG | | [1518-1536] |
| 365 | AACCCUGUCUGACAACCUC | GAGGUUGUCAGACAGGGUU | | [2051-2069] |
| 366 | GGUUUUGGGUCUUUGAACC | GGUUCAAAGACCCAAAACC | | [1500-1518] |
| 367 | CAGCCACAUUCUAGGUAGG | CCUACCUAGAAUGUGGCUG | | [1729-1747] |
| 368 | AAACUCAUGUUCAAGACAG | CUGUCUUGAACAUGAGUUU | | [1395-1413] |
| 369 | CCUGUCUGACAACCUCUUG | CAAGAGGUUGUCAGACAGG | | [2054-2072] |
| 370 | GCCCAUAUCUGUGAAAUGC | GCAUUUCACAGAUAUGGGC | | [1815-1833] |
| 371 | GAAAUGCUGGCAUUUGCAC | GUGCAAAUGCCAGCAUUUC | | [1827-1845] |
| 372 | AAAAACUCAUGUUCAAGAC | GUCUUGAACAUGAGUUUUU | | [1393-1411] |
| 373 | CAUUCUCCACUUCUUGUUC | GAACAAGAAGUGGAGAAUG | | [1434-1452] |
| 374 | CUGUGACUUGCACGUACUC | GAGUACGUGCAAGUCACAG | Mnk | [613-631] |
| 375 | CAGAGGAAGAGAAUCUCCG | CGGAGAUUCUCUUCCUCUG | | [1102-1120] |
| 376 | UCUUUUACAUUCUGCAAGC | GCUUGCAGAAUGUAAAAGA | | [2516-2534] |
| 377 | UUUUGGGUUUUGGGUCUUU | AAAGACCCAAAACCCAAAA | | [1495-1513] |
| 378 | UGGGCUUCUUGCAUUCUGG | CCAGAAUGCAAGAAGCCCA | | [583-601] |
| 379 | UACAGUUGGGCAGCUGGUU | AACCAGCUGCCCAACUGUA | | [1995-2013] |
| 380 | AAACCCUGUCUGACAACCU | AGGUUGUCAGACAGGGUUU | | [2050-2068] |
| 381 | UGGAACUCAAGGAUGCCCA | UGGGCAUCCUUGAGUUCCA | Mnk | [1294-1312] |
| 382 | CUUCGAGAUGUUCCGAGAG | CUCUCGGAACAUCUCGAAG | Rat, Pig, Mnk | [1262-1280] |
| 383 | CCUUGGAACUCAAGGAUGC | GCAUCCUUGAGUUCCAAGG | Mnk | [1291-1309] |
| 384 | AAGGGUCAACAUCUUUUAC | GUAAAAGAUGUUGACCCUU | | [2505-2523] |
| 385 | UACUAACCAGGGAAGCUGU | ACAGCUUCCCUGGUUAGUA | | [1766-1784] |
| 386 | CUGCCAUUUUGGGUUUUGG | CCAAAACCCAAAAUGGCAG | | [1489-1507] |
| 387 | UCUUGCAGUUAAGGGUUAG | CUAACCCUUAACUGCAAGA | | [1702-1720] |
| 388 | UUCUGCAAGCACAUCUGCA | UGCAGAUGUGCUUGCAGAA | | [2525-2543] |
| 389 | UAAAAAACUCAUGUUCAAG | CUUGAACAUGAGUUUUUUA | | [1391-1409] |
| 390 | UUGCGUGUGGAGUAUUUGG | CCAAAUACUCCACACGCAA | | [852-870] |
| 391 | CAAAAAGGGUCAGUCUACC | GGUAGACUGACCCUUUUUG | | [1364-1382] |
| 392 | AAGACCCAGGUCCAGAUGA | UCAUCUGGACCUGGGUCUU | Mnk | [418-436] |
| 393 | UUAAGGUUUUUACUGUGAG | CUCACAGUAAAAACCUUAA | | [1657-1675] |
| 394 | UAGGUGUGCGUCAGAAGCA | UGCUUCUGACGCACACCUA | | [1530-1548] |
| 395 | GUUCCGAGAGCUGAAUGAG | CUCAUUCAGCUCUCGGAAC | Rat, Mnk | [1271-1289] |
| 396 | CGUACUAACCAGGGAAGCU | AGCUUCCCUGGUUAGUACG | | [1764-1782] |
| 397 | CUUCCUGAAAACAACGUUC | GAACGUUGUUUUCAGGAAG | GP | [327-345] |
| 398 | GACUCCAGUGGUAAUCUAC | GUAGAUUACCACUGGAGUC | Mnk | [1026-1044] |
| 399 | AGAUGUUUUGCCAACUGGC | GCCAGUUGGCAAAACAUCU | | [646-664] |
| 400 | UUUUAAGGUUUUUACUGUG | CACAGUAAAAACCUUAAAA | | [1655-1673] |
| 401 | CAUCUACAAGCAGUCACAG | CUGUGACUGCUUGUAGAUG | Mnk | [734-752] |
| 402 | UGCAGCUGUGGGUUGAUUC | GAAUCAACCCACAGCUGCA | | [679-697] |
| 403 | AAGCUCCCAGAAUGCCAGA | UCUGGCAUUCUGGGAGCUU | | [436-454] |
| 404 | AAGAAGAAACCACUGGAUG | CAUCCAGUGGUUUCUUCUU | GP, Mnk | [1206-1224] |
| 405 | ACCAAGACUUGUUUUAUGC | GCAUAAAACAAGUCUUGGU | | [2156-2174] |
| 406 | UCCUGAAAACAACGUUCUG | CAGAACGUUGUUUUCAGGA | GP | [329-347] |
| 407 | AAUGGAUGAUUUGAUGCUG | CAGCAUCAAAUCAUCCAUU | | [368-386] |
| 408 | UCAAAAGUCUAGAGCCACC | GGUGGCUCUAGACUUUUGA | | [111-129] |
| 409 | UCAGACUGACAUUCUCCAC | GUGGAGAAUGUCAGUCUGA | | [1425-1443] |
| 410 | GUGGAAGGAAAUUUGCGUG | CACGCAAAUUUCCUUCCAC | Mnk | [840-858] |
| 411 | UGUCAUCUUCUGUCCCUUC | GAAGGGACAGAAGAUGACA | | [529-547] |
| 412 | GAUCUGGAUCCACCAAGAC | GUCUUGGUGGAUCCAGAUC | | [2145-2163] |
| 413 | CUUCCAUUUGCUUUGUCCC | GGGACAAAGCAAAUGGAAG | | [1556-1574] |
| 414 | UUUUUACUGUGAGGGAUGU | ACAUCCCUCACAGUAAAAA | | [1663-1681] |
| 415 | UCUUAUCCGAGUGGAAGGA | UCCUUCCACUCGGAUAAGA | Hamster | [830-848] |
| 416 | CCUCCUCAGCAUCUUAUCC | GGAUAAGAUGCUGAGGAGG | Hamster | [819-837] |
| 417 | AGAAGAAACCACUGGAUGG | CCAUCCAGUGGUUUCUUCU | Mnk | [1207-1225] |
| 418 | CUUGUAUAUGAUGAUCUGG | CCAGAUCAUCAUAUACAAG | | [2133-2151] |
| 419 | CUGUCUGACAACCUCUUGG | CCAAGAGGUUGUCAGACAG | | [2055-2073] |
| 420 | CCUCAGCAUCUUAUCCGAG | CUCGGAUAAGAUGCUGAGG | Hamster | [822-840] |
| 421 | UUCAUCUCUUGUAUAUGAU | AUCAUAUACAAGAGAUGAA | | [2126-2144] |
| 422 | UUAGGUAGAGGGAGUUGUC | GACAACUCCCUCUACCUAA | | [2012-2030] |
| 423 | CAUAUCUGUGAAAUGCUGG | CCAGCAUUUCACAGAUAUG | | [1818-1836] |
| 424 | UUUACAAUCAGCCACAUUC | GAAUGUGGCUGAUUGUAAA | | [1721-1739] |
| 425 | UGUACCACCAUCCACUACA | UGUAGUGGAUGGUGGUACA | Pig, Mnk | [936-954] |
| 426 | GUCUUUGAACCCUUGCUUG | CAAGCAAGGGUUCAAAGAC | | [1508-1526] |
| 427 | UGGAUCCACCAAGACUUGU | ACAAGUCUUGGUGGAUCCA | | [2149-2167] |
| 428 | AUGGCGACUGUCCAGCUUU | AAAGCUGGACAGUCGCCAU | GP | [8-26] |
| 429 | AUUUCACCCUUCAGAUCCG | CGGAUCUGAAGGGUGAAAU | Dog, Mnk | [1231-1249] |
| 430 | UGCCAUUUUGGGUUUUGGG | CCCAAAACCCAAAAUGGCA | | [1490-1508] |
| 431 | ACAUCUGGCCUUGAAACCA | UGGUUUCAAGGCCAGAUGU | | [1887-1905] |
| 432 | UUUUGCCAACUGGCCAAGA | UCUUGGCCAGUUGGCAAAA | | [651-669] |
| 433 | ACCUAAAAGGAAAUCUCAC | GUGAGAUUUCCUUUUAGGU | | [2085-2103] |
| 434 | UGAGGCCUUGGAACUCAAG | CUUGAGUUCCAAGGCCUCA | Mnk | [1286-1304] |
| 435 | AAUGAGGCCUUGGAACUCA | UGAGUUCCAAGGCCUCAUU | Mnk | [1284-1302] |
| 436 | UUACUGUGAGGGAUGUUUG | CAAACAUCCCUCACAGUAA | | [1666-1684] |
| 437 | ACUGGCGCUAAAAGUUUUG | CAAAACUUUUAGCGCCAGU | GP | [86-104] |
| 438 | UGUAACAGUUCCUGCAUGG | CCAUGCAGGAACUGUUACA | Dog, Mnk | [963-981] |
| 439 | UUUUGAGCUUCUCAAAAGU | ACUUUUGAGAAGCUCAAAA | | [100-118] |
| 440 | UUGCAUUCUGGGACAGCCA | UGGCUGUCCCAGAAUGCAA | | [591-609] |
| 441 | CAUCUGGCCUUGAAACCAC | GUGGUUUCAAGGCCAGAUG | | [1888-1906] |
| 442 | ACUGGAAGACUCCAGUGGU | ACCACUGGAGUCUUCCAGU | Mnk | [1019-1037] |
| 443 | GUCAACAUCUUUUACAUUC | GAAUGUAAAAGAUGUUGAC | | [2509-2527] |
| 444 | GACAGCCAAGUCUGUGACU | AGUCACAGACUUGGCUGUC | | [602-620] |
| 445 | UAAUGUACAUCUGGCCUUG | CAAGGCCAGAUGUACAUUA | | [1881-1899] |
| 446 | AAGUCUGUGACUUGCACGU | ACGUGCAAGUCACAGACUU | Mnk | [609-627] |
| 447 | GAUGAUUUGAUGCUGUCCC | GGGACAGCAUCAAAUCAUC | | [372-390] |
| 448 | ACUGACAUUCUCCACUUCU | AGAAGUGGAGAAUGUCAGU | | [1429-1447] |
| 449 | CACUGAACAAGUUGGCCUG | CAGGCCAACUUGUUCAGUG | | [1582-1600] |
| 450 | UGGUAGUUUCUACAGUUGG | CCAACUGUAGAAACUACCA | | [1985-2003] |
| 451 | ACCUCCCGCCAUAAAAAAC | GUUUUUUAUGGCGGGAGGU | Rb | [1380-1398] |
| 452 | GCAAUGGAUGAUUUGAUGC | GCAUCAAAUCAUCCAUUGC | | [366-384] |
| 453 | CACAGAGGAAGAGAAUCUC | GAGAUUCUCUUCCUCUGUG | | [1100-1118] |
| 454 | UAUUGAACAAUGGUUCACU | AGUGAACCAUUGUUCAAUA | | [398-416] |
| 455 | UUGGGUCUUUGAACCCUUG | CAAGGGUUCAAAGACCCAA | | [1504-1522] |
| 456 | ACUUCCAUUUGCUUUGUCC | GGACAAAGCAAAUGGAAGU | | [1555-1573] |
| 457 | AUUGAACAAUGGUUCACUG | CAGUGAACCAUUGUUCAAU | | [399-417] |
| 458 | AAGAUGUUUUGCCAACUGG | CCAGUUGGCAAAACAUCUU | | [645-663] |
| 459 | UCAUCUUCUGUCCCUUCCC | GGGAAGGGACAGAAGAUGA | | [531-549] |
| 460 | UGAAACCACCUUUUAUUAC | GUAAUAAAAGGUGGUUUCA | | [1898-1916] |
| 461 | ACCAGCUUAGAUUUUAAGG | CCUUAAAAUCUAAGCUGGU | | [1644-1662] |
| 462 | AACACUUUUCGACAUAGUG | CACUAUGUCGAAAAGUGUU | Mnk | [879-897] |
| 463 | UUUACUGUGAGGGAUGUUU | AAACAUCCCUCACAGUAAA | | [1665-1683] |
| 464 | CUACAUGUGUAACAGUUCC | GGAACUGUUACACAUGUAG | Dog, Mnk | [956-974] |
| 465 | AUUUUGGGUUUUGGGUCUU | AAGACCCAAAACCCAAAAU | | [1494-1512] |
| 466 | AUAUUUCACCCUUCAGAUC | GAUCUGAAGGGUGAAAUAU | Dog, Mnk | [1229-1247] |
| 467 | AACUUCAAGGCCCAUAUCU | AGAUAUGGGCCUUGAAGUU | | [1806-1824] |
| 468 | UUCCGAGAGCUGAAUGAGG | CCUCAUUCAGCUCUCGGAA | Rat, Mnk | [1272-1290] |
| 469 | UCUUGGUCGACCUUAGUAC | GUACUAAGGUCGACCAAGA | | [2068-2086] |
| 470 | CCACUUCACCGUACUAACC | GGUUAGUACGGUGAAGUGG | | [1755-1773] |
| 471 | AUCUGGAUCCACCAAGACU | AGUCUUGGUGGAUCCAGAU | | [2146-2164] |
| 472 | UAACUUCAAGGCCCAUAUC | GAUAUGGGCCUUGAAGUUA | | [1805-1823] |
| 473 | CUGAAGUCCAAAAAGGGUC | GACCCUUUUUGGACUUCAG | | [1356-1374] |
| 474 | ACUGUCCAGCUUUGUGCCA | UGGCACAAAGCUGGACAGU | GP | [14-32] |
| 475 | CAAAAGUCUAGAGCCACCG | CGGUGGCUCUAGACUUUUG | | [112-130] |
| 476 | UUUGGGUUUUGGGUCUUUG | CAAAGACCCAAAACCCAAA | | [1496-1514] |
| 477 | AUUUCAUCUCUUGUAUAUG | CAUAUACAAGAGAUGAAAU | | [2124-2142] |
| 478 | AACAUUUUCAGACCUAUGG | CCAUAGGUCUGAAAAUGUU | Mnk | [302-320] |
| 479 | GAAGCUGUCCCUCAUGUUG | CAACAUGAGGGACAGCUUC | | [1777-1795] |
| 480 | GUCAUCUUCUGUCCCUUCC | GGAAGGGACAGAAGAUGAC | | [530-548] |
| 481 | AAGAAACCACUGGAUGGAG | CUCCAUCCAGUGGUUUCUU | Mnk | [1209-1227] |
| 482 | ACUUUUCGACAUAGUGUGG | CCACACUAUGUCGAAAAGU | Mnk | [882-900] |
| 483 | AUCCGAGUGGAAGGAAAUU | AAUUUCCUUCCACUCGGAU | Dog, Mnk | [834-852] |
| 484 | UUUCCGUCUGGGCUUCUUG | CAAGAAGCCCAGACGGAAA | | [575-593] |
| 485 | UUGAACAAUGGUUCACUGA | UCAGUGAACCAUUGUUCAA | | [400-418] |
| 486 | UUACAAUAAAACUUUGCUG | CAGCAAAGUUUUAUUGUAA | | [2608-2626] |
| 487 | GUUCACUGAAGACCCAGGU | ACCUGGGUCUUCAGUGAAC | | [410-428] |
| 488 | GACCUUAGUACCUAAAAGG | CCUUUUAGGUACUAAGGUC | | [2076-2094] |
| 489 | CUCCCAUGUGCUCAAGACU | AGUCUUGAGCACAUGGGAG | | [70-88] |
| 490 | ACUACAUGUGUAACAGUUC | GAACUGUUACACAUGUAGU | Dog, Mnk | [955-973] |
| 491 | CCUCACCAUCAUCACACUG | CAGUGUGAUGAUGGUGAGG | Rb, Pig | [1004-1022] |
| 492 | GUAUAUGAUGAUCUGGAUC | GAUCCAGAUCAUCAUAUAC | | [2136-2154] |
| 493 | UUAGUUUACAAUCAGCCAC | GUGGCUGAUUGUAAACUAA | | [1717-1735] |
| 494 | UUUUACUGUGAGGGAUGUU | AACAUCCCUCACAGUAAAA | | [1664-1682] |
| 495 | AAAAAGGGUCAGUCUACCU | AGGUAGACUGACCCUUUUU | | [1365-1383] |
| 496 | GUUGUCAAGUCUUGCUGGC | GCCAGCAAGACUUGACAAC | | [2025-2043] |
| 497 | ACUUGUCAUGGCGACUGUC | GACAGUCGCCAUGACAAGU | | [1-19] |
| 498 | AAUAAUGUACAUCUGGCCU | AGGCCAGAUGUACAUUAUU | | [1879-1897] |
| 499 | AUUUGGAUGACAGAAACAC | GUGUUUCUGUCAUCCAAAU | Rb | [865-883] |
| 500 | AAGUCCAAAAAGGGUCAGU | ACUGACCCUUUUUGGACUU | | [1359-1377] |

TABLE B3
HTRA2 19-mer oligomer pairs - HtrA serine peptidase 2

| | | | | Human- | |
|---|---|---|---|---|---|
| | | | Other | 73747817: | Human-73747818: |
| No. | Sense | AntiSense | Sp | 603-1979 | 603-1688 |

| | | | | | |
|---|---|---|---|---|---|
| 1 | CCGAGACAGAGGGUUAAAU | AUUUAACCCUCUGUCUCGG | | [2051-2069] | [1760-1778] |
| 2 | GAAUCACAGAAACACUUUU | AAAAGUGUUUCUGUGAUUC | | [2124-2142] | [1833-1851] |
| 3 | GGCCUGGUGAUGUGAUUUU | AAAAUCACAUCACCAGGCC | | [1825-1843] | [1534-1552] |
| 4 | GUGAUGUGAUUUUGGCCAU | AUGGCCAAAAUCACAUCAC | | [1831-1849] | [1540-1558] |
| 5 | CCGUGGUCUAUAUCGAGAU | AUCUCGAUAUAGACCACGG | | [1081-1099] | [1081-1099] |
| 6 | UGACAUGGGUUUCUUGGUA | UACCAAGAAACCCAUGUCA | | [2508-2526] | [2217-2235] |
| 7 | AGGGUGAAAACUUCUGCUU | AAGCAGAAGUUUUCACCCU | | [2445-2463] | [2154-2172] |
| 8 | UGAAGAAUCACAGAAACAC | GUGUUUCUGUGAUUCUUCA | | [2120-2138] | [1829-1847] |
| 9 | UGAAGCUGUUCGAACCCAA | UUGGGUUCGAACAGCUUCA | Ms | [1886-1904] | [1595-1613] |
| 10 | GACAUGGGUUUCUUGGUAA | UUACCAAGAAACCCAUGUC | | [2509-2527] | [2218-2236] |
| 11 | CGGUUGCUGACAUGGGUUU | AAACCCAUGUCAGCAACCG | | [2501-2519] | [2210-2228] |
| 12 | GGUGAAAACUUCUGCUUGA | UCAAGCAGAAGUUUUCACC | | [2447-2465] | [2156-2174] |
| 13 | CCUAGCAACAUAUUAUAGU | ACUAUAAUAUGUUGCUAGG | | [2162-2180] | [1871-1889] |
| 14 | ACCGAGACAGAGGGUUAAA | UUUAACCCUCUGUCUCGGU | | [2050-2068] | [1759-1777] |
| 15 | GCCUGGUGAUGUGAUUUUG | CAAAAUCACAUCACCAGGC | | [1826-1844] | [1535-1553] |
| 16 | GGUAAGCUCCUGAGGUAAU | AUUACCUCAGGAGCUUACC | Rat | [2523-2541] | [2232-2250] |
| 17 | GGGUGAAAACUUCUGCUUG | CAAGCAGAAGUUUUCACCC | | [2446-2464] | [2155-2173] |
| 18 | CUGCUCUGAUUUCCUCCUU | AAGGAGGAAAUCAGAGCAG | | [2005-2023] | [1714-1732] |
| 19 | GGUGAUGUGAUUUUGGCCA | UGGCCAAAAUCACAUCACC | | [1830-1848] | [1539-1557] |
| 20 | GCCGUGGUCUAUAUCGAGA | UCUCGAUAUAGACCACGGC | | [1080-1098] | [1080-1098] |
| 21 | GUGAAAACUUCUGCUUGAC | GUCAAGCAGAAGUUUUCAC | | [2448-2466] | [2157-2175] |
| 22 | AGAUGUUUAUGAAGCUGUU | AACAGCUUCAUAAACAUCU | Ms | [1877-1895] | [1586-1604] |
| 23 | GGAGCAGAUGGUACAAAAU | AUUUUGUACCAUCUGCUCC | | [1853-1871] | [1562-1580] |
| 24 | UGAAGGUCACAGCUGGAAU | AUUCCAGCUGUGACCUUCA | | [1570-1588] | [1375-1393] |
| 25 | CGUGGUCUAUAUCGAGAUC | GAUCUCGAUAUAGACCACG | | [1082-1100] | [1082-1100] |
| 26 | GUAAGCUCCUGAGGUAAUG | CAUUACCUCAGGAGCUUAC | Rat | [2524-2542] | [2233-2251] |
| 27 | UGGGUUUCUUGGUAAGCUC | GAGCUUACCAAGAAACCCA | | [2513-2531] | [2222-2240] |
| 28 | ACAUGGGUUUCUUGGUAAG | CUUACCAAGAAACCCAUGU | | [2510-2528] | [2219-2237] |
| 29 | CCAUCUUUUGUGGGCAGUU | AACUGCCCACAAAAGAUGG | | [2311-2329] | [2020-2038] |
| 30 | CUGAUUUCCUCCUUGCCUU | AAGGCAAGGAGGAAAUCAG | | [2010-2028] | [1719-1737] |
| 31 | CACUGACCUUAUAUGUGAC | GUCACAUAUAAGGUCAGUG | | [1942-1960] | [1651-1669] |
| 32 | GCAGAUGGUACAAAAUGCU | AGCAUUUUGUACCAUCUGC | | [1856-1874] | [1565-1583] |
| 33 | CGGCCUGGUGAUGUGAUUU | AAAUCACAUCACCAGGCCG | | [1824-1842] | [1533-1551] |
| 34 | UGAAAACUUCUGCUUGACA | UGUCAAGCAGAAGUUUUCA | | [2449-2467] | [2158-2176] |
| 35 | GAGGGUGAAAACUUCUGCU | AGCAGAAGUUUUCACCCUC | | [2444-2462] | [2153-2171] |
| 36 | GGAGGGUGAAAACUUCUGC | GCAGAAGUUUUCACCCUCC | | [2443-2461] | [2152-2170] |
| 37 | ACCAUCCUGACCUCCUAUU | AAUAGGAGGUCAGGAUGGU | | [2274-2292] | [1983-2001] |
| 38 | GAAGGAGGGUGAAAACUUC | GAAGUUUUCACCCUCCUUC | | [2440-2458] | [2149-2167] |
| 39 | UGAAGGAGGGUGAAAACUU | AAGUUUUCACCCUCCUUCA | | [2439-2457] | [2148-2166] |
| 40 | CAAAAGGCUAGAGGUAAAG | CUUUACCUCUAGCCUUUUG | | [2218-2236] | [1927-1945] |
| 41 | UGCUCUGAUUUCCUCCUUG | CAAGGAGGAAAUCAGAGCA | Rat | [2006-2024] | [1715-1733] |
| 42 | UGAUGUGAUUUUGGCCAUU | AAUGGCCAAAAUCACAUCA | | [1832-1850] | [1541-1559] |
| 43 | UCCUUUGCCAUCCCUUCUG | CAGAAGGGAUGGCAAAGGA | Rat, Ms | [1590-1608] | [1395-1413] |
| 44 | CUGCCGUGGUCUAUAUCGA | UCGAUAUAGACCACGGCAG | | [1078-1096] | [1078-1096] |
| 45 | UGAGUGCGGUUGCUGACAU | AUGUCAGCAACCGCACUCA | | [2495-2513] | [2204-2222] |
| 46 | CAUCUUUUGUGGGCAGUUA | UAACUGCCCACAAAAGAUG | | [2312-2330] | [2021-2039] |
| 47 | GCUGCUGCCAUCUUUUGUG | CACAAAAGAUGGCAGCAGC | | [2304-2322] | [2013-2031] |
| 48 | UGAUUUCCUCCUUGCCUUU | AAAGGCAAGGAGGAAAUCA | | [2011-2029] | [1720-1738] |
| 49 | CCUGCUCUGAUUUCCUCCU | AGGAGGAAAUCAGAGCAGG | | [2004-2022] | [1713-1731] |
| 50 | ACAUCGCAACGCUGAGGAU | AUCCUCAGCGUUGCGAUGU | | [1285-1303] | [1285-1303] |
| 51 | UGCUCUUUGUGGUGUGGUG | CACCACACCACAAAGAGCA | | [2340-2358] | [2049-2067] |
| 52 | UGCUGCUCUUUGUGGUGUG | CACACCACAAAGAGCAGCA | | [2337-2355] | [2046-2064] |
| 53 | GUCAGGUGCUGCUCUUUGU | ACAAAGAGCAGCACCUGAC | | [2331-2349] | [2040-2058] |
| 54 | CGAGAGUUUCUGCAUCGUG | CACGAUGCAGAAACUCUCG | | [1617-1635] | [1422-1440] |
| 55 | GUGCUGCUCUUUGUGGUGU | ACACCACAAAGAGCAGCAC | | [2336-2354] | [2045-2063] |
| 56 | GGCAGUGCUGUUGUUGUUG | CAACAACAACAGCACUGCC | | [947-965] | [947-965] |
| 57 | CUCCUGCUCUGAUUUCCUC | GAGGAAAUCAGAGCAGGAG | | [2002-2020] | [1711-1729] |
| 58 | CAAAAUGCUGAAGAUGUUU | AAACAUCUUCAGCAUUUUG | Rat, Ms | [1866-1884] | [1575-1593] |
| 59 | GAUGGUACAAAAUGCUGAA | UUCAGCAUUUUGUACCAUC | | [1859-1877] | [1568-1586] |
| 60 | AGAUGGUACAAAAUGCUGA | UCAGCAUUUUGUACCAUCU | | [1858-1876] | [1567-1585] |
| 61 | AGACCACAAUUCCCGGCAU | AUGCCGGGAAUUGUGGUCU | | [423-441] | [423-441] |
| 62 | CCCGGAGUCAGUACAACUU | AAGUUGUACUGACUCCGGG | | [1030-1048] | [1030-1048] |
| 63 | AGAAUGAAUAGAUCACCAA | UUGGUGAUCUAUUCAUUCU | | [1973-1991] | [1682-1700] |
| 64 | GGACGAGAAACACUGACCU | AGGUCAGUGUUUCUCGUCC | | [1932-1950] | [1641-1659] |
| 65 | GCCUCAGAGAACUCUGGAA | UUCCAGAGUUCUCUGAGGC | | [885-903] | [885-903] |
| 66 | CUGCUGACGUCAGGAACUU | AAGUUCCUGACGUCAGCAG | | [714-732] | [714-732] |
| 67 | UGAACACCAUGAAGGUCAC | GUGACCUUCAUGGUGUUCA | | [1561-1579] | [1366-1384] |
| 68 | CUCUGAAGAAUCACAGAAA | UUUCUGUGAUUCUUCAGAG | | [2117-2135] | [1826-1844] |
| 69 | CAGUGCUGUUGUUGUUGUG | CACAACAACAACAGCACUG | | [949-967] | [949-967] |
| 70 | CGCUGAGGAUUCAGACUAA | UUAGUCUGAAUCCUCAGCG | | [1294-1312] | [1294-1312] |
| 71 | ACGCUGAGGAUUCAGACUA | UAGUCUGAAUCCUCAGCGU | | [1293-1311] | [1293-1311] |
| 72 | UUGCUGACAUGGGUUUCUU | AAGAAACCCAUGUCAGCAA | | [2504-2522] | [2213-2231] |
| 73 | GCUCUGAAGAAUCACAGAA | UUCUGUGAUUCUUCAGAGC | | [2116-2134] | [1825-1843] |
| 74 | CCAAGAGUAUGAGGCUCCU | AGGAGCCUCAUACUCUUGG | | [1988-2006] | [1697-1715] |
| 75 | AGGUCACAGAAUGAAUAGA | UCUAUUCAUUCUGUGACCU | | [1966-1984] | [1675-1693] |
| 76 | UGGUACAAAAUGCUGAAGA | UCUUCAGCAUUUUGUACCA | | [1861-1879] | [1570-1588] |
| 77 | UGAUGAUGCUGACCCUGAG | CUCAGGGUCAGCAUCAUCA | | [1693-1711] | [1498-1516] |
| 78 | GUGCACUUCUGAAGGACUU | AAGUCCUUCAGAAGUGCAC | | [487-505] | [487-505] |
| 79 | GGGAAAAGAAGAAUUCCUC | GAGGAAUUCUUCUUUUCCC | | [1636-1654] | [1441-1459] |
| 80 | UCCCAUGCUUGGCUACAGA | UCUGUAGCCAAGCAUGGGA | | [2403-2421] | [2112-2130] |
| 81 | CCGGAGUCAGUACAACUUC | GAAGUUGUACUGACUCCGG | | [1031-1049] | [1031-1049] |
| 82 | AGGGUUAAAUGAACCAGUG | CACUGGUUCAUUUAACCCU | | [2060-2078] | [1769-1787] |
| 83 | GAGGGUUAAAUGAACCAGU | ACUGGUUCAUUUAACCCUC | | [2059-2077] | [1768-1786] |
| 84 | CACCGAGACAGAGGGUUAA | UUAACCCUCUGUCUCGGUG | | [2049-2067] | [1758-1776] |
| 85 | CCUCAGAGAACUCUGGAAC | GUUCCAGAGUUCUCUGAGG | | [886-904] | [886-904] |
| 86 | UGAUUGGAGUGAACACCAU | AUGGUGUUCACUCCAAUCA | Rat, Ms | [1552-1570] | [1357-1375] |
| 87 | UUGGUAAGCUCCUGAGGUA | UACCUCAGGAGCUUACCAA | | [2521-2539] | [2230-2248] |
| 88 | CCAUAGUGCAUGGUCUGAU | AUCAGACCAUGCACUAUGG | | [2477-2495] | [2186-2204] |
| 89 | GGGCUCUGAAGAAUCACAG | CUGUGAUUCUUCAGAGCCC | | [2114-2132] | [1823-1841] |
| 90 | CUCCUGGGCUCUGAAGAAU | AUUCUUCAGAGCCCAGGAG | | [2109-2127] | [1818-1836] |
| 91 | AGAGGGUUAAAUGAACCAG | CUGGUUCAUUUAACCCUCU | | [2058-2076] | [1767-1785] |
| 92 | GAAGAUGUUUAUGAAGCUG | CAGCUUCAUAAACAUCUUC | Ms | [1875-1893] | [1584-1602] |
| 93 | GAAAAGAAGAAUUCCUCCU | AGGAGGAAUUCUUCUUUUC | | [1638-1656] | [1443-1461] |
| 94 | UGAUCGUCUUCGAGAGUUU | AAACUCUCGAAGACGAUCA | | [1607-1625] | [1412-1430] |
| 95 | CUGCUUGACAGUUCCACAU | AUGUGGAACUGUCAAGCAG | | [2458-2476] | [2167-2185] |
| 96 | UGAGCUGCUGCCAUCUUUU | AAAAGAUGGCAGCAGCUCA | | [2301-2319] | [2010-2028] |
| 97 | CCACCAAAAGGCUAGAGGU | ACCUCUAGCCUUUUGGUGG | | [2214-2232] | [1923-1941] |
| 98 | AGAUCACCAAGAGUAUGAG | CUCAUACUCUUGGUGAUCU | | [1982-2000] | [1691-1709] |
| 99 | CUGAUCGUCUUCGAGAGUU | AACUCUCGAAGACGAUCAG | | [1606-1624] | [1411-1429] |
| 100 | CCCUUCUGAUCGUCUUCGA | UCGAAGACGAUCAGAAGGG | | [1601-1619] | [1406-1424] |
| 101 | UUGGAGUGAACACCAUGAA | UUCAUGGUGUUCACUCCAA | Rat, Ms | [1555-1573] | [1360-1378] |
| 102 | GUCCGUGUGAGACUGCUAA | UUAGCAGUCUCACACGGAC | | [1218-1236] | [1218-1236] |
| 103 | ACAACUUCAUCGCAGAUGU | ACAUCUGCGAUGAAGUUGU | | [1042-1060] | [1042-1060] |
| 104 | CAGUACAACUUCAUCGCAG | CUGCGAUGAAGUUGUACUG | | [1038-1056] | [1038-1056] |
| 105 | CUCUGAAGGAGGGUGAAAA | UUUUCACCCUCCUUCAGAG | | [2436-2454] | [2145-2163] |
| 106 | CCAUGCUUGGCUACAGAUA | UAUCUGUAGCCAAGCAUGG | | [2405-2423] | [2114-2132] |
| 107 | AGCAAAGAUUCCCAUGCUU | AAGCAUGGGAAUCUUUGCU | | [2394-2412] | [2103-2121] |
| 108 | UGACCUCCUAUUAAAGAAA | UUUCUUUAAUAGGAGGUCA | | [2281-2299] | [1990-2008] |
| 109 | UCUGAAGAAUCACAGAAAC | GUUUCUGUGAUUCUUCAGA | | [2118-2136] | [1827-1845] |
| 110 | UCCUUGCCUUUCUGGCUGA | UCAGCCAGAAAGGCAAGGA | | [2019-2037] | [1728-1746] |
| 111 | CAGAAUGAAUAGAUCACCA | UGGUGAUCUAUUCAUUCUG | | [1972-1990] | [1681-1699] |
| 112 | GCUGACGUCAGGAACUUCU | AGAAGUUCCUGACGUCAGC | | [716-734] | [716-734] |
| 113 | GCUGAAGAUGUUUAUGAAG | CUUCAUAAACAUCUUCAGC | Ms | [1872-1890] | [1581-1599] |
| 114 | GGAAGCUCCAUAACUGCUG | CAGCAGUUAUGGAGCUUCC | | [215-233] | [215-233] |
| 115 | UGGUCUAUAUCGAGAUCCU | AGGAUCUCGAUAUAGACCA | Rat, Ms | [1084-1102] | [1084-1102] |
| 116 | GAAAACUUCUGCUUGACAG | CUGUCAAGCAGAAGUUUUC | | [2450-2468] | [2159-2177] |
| 117 | CCCAUGCUUGGCUACAGAU | AUCUGUAGCCAAGCAUGGG | | [2404-2422] | [2113-2131] |
| 118 | GGCUCUGAAGAAUCACAGA | UCUGUGAUUCUUCAGAGCC | | [2115-2133] | [1824-1842] |
| 119 | AGAGAACUCUGGAACCCGU | ACGGGUUCCAGAGUUCUCU | | [890-908] | [890-908] |
| 120 | GCACUUCUGAAGGACUUCA | UGAAGUCCUUCAGAAGUGC | | [489-507] | [489-507] |
| 121 | CCUCUGAAGGAGGGUGAAA | UUUCACCCUCCUUCAGAGG | | [2435-2453] | [2144-2162] |
| 122 | GAAAAUGAGCUGCUGCCAU | AUGGCAGCAGCUCAUUUUC | | [2296-2314] | [2005-2023] |
| 123 | CCUCCUAUUAAAGAAAAUG | CAUUUUCUUUAAUAGGAGG | | [2284-2302] | [1993-2011] |
| 124 | UGGGCUCUGAAGAAUCACA | UGUGAUUCUUCAGAGCCCA | | [2113-2131] | [1822-1840] |
| 125 | CAGAGGGUUAAAUGAACCA | UGGUUCAUUUAACCCUCUG | | [2057-2075] | [1766-1784] |
| 126 | AGAAUUCCUCCUCCGGAAU | AUUCCGGAGGAGGAAUUCU | | [1645-1663] | [1450-1468] |
| 127 | AAGAAUUCCUCCUCCGGAA | UUCCGGAGGAGGAAUUCUU | | [1644-1662] | [1449-1467] |
| 128 | CUGGAAUCUCCUUUGCCAU | AUGGCAAAGGAGAUUCCAG | Rat, Ms | [1582-1600] | [1387-1405] |
| 129 | CCACAUCCAUAGUGCAUGG | CCAUGCACUAUGGAUGUGG | | [2471-2489] | [2180-2198] |
| 130 | GCAAAGAUUCCCAUGCUUG | CAAGCAUGGGAAUCUUUGC | | [2395-2413] | [2104-2122] |
| 131 | GAGCAAAGAUUCCCAUGCU | AGCAUGGGAAUCUUUGCUC | | [2393-2411] | [2102-2120] |
| 132 | GCCAUCUUUUGUGGGCAGU | ACUGCCCACAAAAGAUGGC | | [2310-2328] | [2019-2037] |
| 133 | CUGACCUCCUAUUAAAGAA | UUCUUUAAUAGGAGGUCAG | | [2280-2298] | [1989-2007] |
| 134 | CACAGAAUGAAUAGAUCAC | GUGAUCUAUUCAUUCUGUG | | [1970-1988] | [1679-1697] |
| 135 | CCCUGAGGUCACAGAAUGA | UCAUUCUGUGACCUCAGGG | | [1961-1979] | [1670-1688] |
| 136 | UGCCAUCCCUUCUGAUCGU | ACGAUCAGAAGGGAUGGCA | | [1595-1613] | [1400-1418] |
| 137 | GGCUACAGAUACUGACAGC | GCUGUCAGUAUCUGUAGCC | | [2413-2431] | [2122-2140] |
| 138 | UGGCUACAGAUACUGACAG | CUGUCAGUAUCUGUAGCCA | | [2412-2430] | [2121-2139] |
| 139 | GGAGCAAAGAUUCCCAUGC | GCAUGGGAAUCUUUGCUCC | | [2392-2410] | [2101-2119] |
| 140 | AGAUACUGGAGCUGACCAU | AUGGUCAGCUCCAGUAUCU | | [2260-2278] | [1969-1987] |
| 141 | AGCUCCAUAACUGCUGCUU | AAGCAGCAGUUAUGGAGCU | | [218-236] | [218-236] |
| 142 | GCUGAGGAUUCAGACUAAG | CUUAGUCUGAAUCCUCAGC | | [1295-1313] | [1295-1313] |
| 143 | CAGUUCCACAUCCAUAGUG | CACUAUGGAUGUGGAACUG | | [2466-2484] | [2175-2193] |
| 144 | UGACAGUUCCACAUCCAUA | UAUGGAUGUGGAACUGUCA | | [2463-2481] | [2172-2190] |
| 145 | UGGGAGCAAAGAUUCCCAU | AUGGGAAUCUUUGCUCCCA | | [2390-2408] | [2099-2117] |
| 146 | UGCCAUCUUUUGUGGGCAG | CUGCCCACAAAAGAUGGCA | | [2309-2327] | [2018-2036] |
| 147 | AUGAGCUGCUGCCAUCUUU | AAAGAUGGCAGCAGCUCAU | | [2300-2318] | [2009-2027] |
| 148 | GCUAGAGGUAAAGCUGUAU | AUACAGCUUUACCUCUAGC | | [2224-2242] | [1933-1951] |
| 149 | CACCAAAAGGCUAGAGGUA | UACCUCUAGCCUUUUGGUG | | [2215-2233] | [1924-1942] |
| 150 | CACUUCUGAAGGACUUCAG | CUGAAGUCCUUCAGAAGUG | | [490-508] | [490-508] |
| 151 | CAUCCCUUCUGAUCGUCUU | AAGACGAUCAGAAGGGAUG | | [1598-1616] | [1403-1421] |
| 152 | CCAUCCCUUCUGAUCGUCU | AGACGAUCAGAAGGGAUGG | | [1597-1615] | [1402-1420] |
| 153 | GGAAUCUCCUUUGCCAUCC | GGAUGGCAAAGGAGAUUCC | Rat, Ms | [1584-1602] | [1389-1407] |
| 154 | GUGAACACCAUGAAGGUCA | UGACCUUCAUGGUGUUCAC | | [1560-1578] | [1365-1383] |
| 155 | UGGGCUCAUUGUCACCAAC | GUUGGUGACAAUGAGCCCA | | [1172-1190] | [1172-1190] |
| 156 | AGAUUCCCAUGCUUGGCUA | UAGCCAAGCAUGGGAAUCU | | [2399-2417] | [2108-2126] |
| 157 | CUGCCAUCUUUUGUGGGCA | UGCCCACAAAAGAUGGCAG | | [2308-2326] | [2017-2035] |
| 158 | ACCAAAAGGCUAGAGGUAA | UUACCUCUAGCCUUUUGGU | | [2216-2234] | [1925-1943] |
| 159 | UGCCUUUCUGGCUGAGGUU | AACCUCAGCCAGAAAGGCA | | [2023-2041] | [1732-1750] |
| 160 | GCUCUGAUUUCCUCCUUGC | GCAAGGAGGAAAUCAGAGC | Rat | [2007-2025] | [1716-1734] |
| 161 | AUGGGCUCAUUGUCACCAA | UUGGUGACAAUGAGCCCAU | | [1171-1189] | [1171-1189] |
| 162 | UCAUCGCAGAUGUGGUGGA | UCCACCACAUCUGCGAUGA | Ms | [1048-1066] | [1048-1066] |
| 163 | GACAGUUCCACAUCCAUAG | CUAUGGAUGUGGAACUGUC | | [2464-2482] | [2173-2191] |
| 164 | GCUACAGAUACUGACAGCU | AGCUGUCAGUAUCUGUAGC | | [2414-2432] | [2123-2141] |
| 165 | CAGUUAGUCAGGUGCUGCU | AGCAGCACCUGACUAACUG | | [2325-2343] | [2034-2052] |
| 166 | GAGGCUCCUGCUCUGAUUU | AAAUCAGAGCAGGAGCCUC | | [1998-2016] | [1707-1725] |
| 167 | ACAGCUGGAAUCUCCUUUG | CAAAGGAGAUUCCAGCUGU | Rat, Ms | [1578-1596] | [1383-1401] |
| 168 | CACAGCUGGAAUCUCCUUU | AAAGGAGAUUCCAGCUGUG | | [1577-1595] | [1382-1400] |
| 169 | GGGAGCAAAGAUUCCCAUG | CAUGGGAAUCUUUGCUCCC | | [2391-2409] | [2100-2118] |
| 170 | GACCAUCCUGACCUCCUAU | AUAGGAGGUCAGGAUGGUC | | [2273-2291] | [1982-2000] |
| 171 | UCGAGAGUUUCUGCAUCGU | ACGAUGCAGAAACUCUCGA | | [1616-1634] | [1421-1439] |
| 172 | GGAGUGAACACCAUGAAGG | CCUUCAUGGUGUUCACUCC | Rat, Ms | [1557-1575] | [1362-1380] |
| 173 | CCUGAGGUCACAGAAUGAA | UUCAUUCUGUGACCUCAGG | | [1962-1980] | [1671-1689] |
| 174 | UCACAGCUGGAAUCUCCUU | AAGGAGAUUCCAGCUGUGA | | [1576-1594] | [1381-1399] |
| 175 | GCUGGAAUCUCCUUUGCCA | UGGCAAAGGAGAUUCCAGC | Rat, Ms | [1581-1599] | [1386-1404] |
| 176 | GCAACGCUGAGGAUUCAGA | UCUGAAUCCUCAGCGUUGC | | [1290-1308] | [1290-1308] |
| 177 | CUGAGGUCACAGAAUGAAU | AUUCAUUCUGUGACCUCAG | | [1963-1981] | [1672-1690] |
| 178 | CACAUCCAUAGUGCAUGGU | ACCAUGCACUAUGGAUGUG | | [2472-2490] | [2181-2199] |
| 179 | CAGCUAUUGAUUUUGGAAA | UUUCCAAAAUCAAUAGCUG | | | |
| 180 | GCUAUUGAUUUUGGAAACU | AGUUUCCAAAAUCAAUAGC | | | |
| 181 | AGCUAUUGAUUUUGGAAAC | GUUUCCAAAAUCAAUAGCU | | | |

TABLE B4
HTRA2 - 19-mer oligomer pairs HtrA serine peptidase 2

| | | | | Human- | Human- |
|---|---|---|---|---|---|
| | | | | 73747817: | 73747818: |
| No. | Sense | AntiSense | Other Sp | 603-1979 | 603-1688 |

| | | | | | |
|---|---|---|---|---|---|
| 1 | GCAACAUAUUAUAGUAAAA | UUUUACUAUAAUAUGUUGC | | [2166-2184] | [1875-1893] |
| 2 | CCAAAAGGCUAGAGGUAAA | UUUACCUCUAGCCUUUUGG | | [2217-2235] | [1926-1944] |
| 3 | GGGAGCAGAUGGUACAAAA | UUUUGUACCAUCUGCUCCC | | [1852-1870] | [1561-1579] |
| 4 | GAGAAACACUGACCUUAUA | UAUAAGGUCAGUGUUUCUC | | [1936-1954] | [1645-1663] |
| 5 | GGGAGGUGAUUGGAGUGAA | UUCACUCCAAUCACCUCCC | Rat, Ms, GP | [1546-1564] | [1351-1369] |
| 6 | CGAGAAACACUGACCUUAU | AUAAGGUCAGUGUUUCUCG | | [1935-1953] | [1644-1662] |
| 7 | GAAGCUGUUCGAACCCAAU | AUUGGGUUCGAACAGCUUC | Ms | [1887-1905] | [1596-1614] |
| 8 | CCUGAGGGAAGCUCCAUAA | UUAUGGAGCUUCCCUCAGG | | [209-227] | [209-227] |
| 9 | UGCUGAAGAUGUUUAUGAA | UUCAUAAACAUCUUCAGCA | Ms | [1871-1889] | [1580-1598] |
| 10 | GAGACAGAGGGUUAAAUGA | UCAUUUAACCCUCUGUCUC | | [2053-2071] | [1762-1780] |
| 11 | CUUACCGGUGCGAGUCAAA | UUUGACUCGCACCGGUAAG | | [171-189] | [171-189] |
| 12 | GGAGGUGAUUGGAGUGAAC | GUUCACUCCAAUCACCUCC | Rat, Ms, GP | [1547-1565] | [1352-1370] |
| 13 | GAAUAGAUCACCAAGAGUA | UACUCUUGGUGAUCUAUUC | | [1978-1996] | [1687-1705] |
| 14 | AAUAGAUCACCAAGAGUAU | AUACUCUUGGUGAUCUAUU | | [1979-1997] | [1688-1706] |
| 15 | GGUACAAAAUGCUGAAGAU | AUCUUCAGCAUUUUGUACC | | [1862-1880] | [1571-1589] |
| 16 | GCUUGGCUACAGAUACUGA | UCAGUAUCUGUAGCCAAGC | | [2409-2427] | [2118-2136] |
| 17 | AGACAGAGGGUUAAAUGAA | UUCAUUUAACCCUCUGUCU | | [2054-2072] | [1763-1781] |
| 18 | CAGAAACACUUUUUAUAUA | UAUAUAAAAAGUGUUUCUG | | [2130-2148] | [1839-1857] |
| 19 | AAUUAUACCUAGCAACAUA | UAUGUUGCUAGGUAUAAUU | | [2155-2173] | [1864-1882] |
| 20 | AGCAACAUAUUAUAGUAAA | UUUACUAUAAUAUGUUGCU | | [2165-2183] | [1874-1892] |
| 21 | CUAGCAACAUAUUAUAGUA | UACUAUAAUAUGUUGCUAG | | [2163-2181] | [1872-1890] |
| 22 | CACAGAAACACUUUUUAUA | UAUAAAAAGUGUUUCUGUG | | [2128-2146] | [1837-1855] |
| 23 | UGAUGAGUGCGGUUGCUGA | UCAGCAACCGCACUCAUCA | | [2492-2510] | [2201-2219] |
| 24 | CAUCCUGACCUCCUAUUAA | UUAAUAGGAGGUCAGGAUG | | [2276-2294] | [1985-2003] |
| 25 | CGGAGUCAGUACAACUUCA | UGAAGUUGUACUGACUCCG | | [1032-1050] | [1032-1050] |
| 26 | GAAGAAUCACAGAAACACU | AGUGUUUCUGUGAUUCUUC | | [2121-2139] | [1830-1848] |
| 27 | AGUACAACUUCAUCGCAGA | UCUGCGAUGAAGUUGUACU | | [1039-1057] | [1039-1057] |
| 28 | UGAGGUCACAGAAUGAAUA | UAUUCAUUCUGUGACCUCA | | [1964-1982] | [1673-1691] |
| 29 | AUAAAAUUAUACCUAGCAA | UUGCUAGGUAUAAUUUUAU | Rat, Ms | [2151-2169] | [1860-1878] |
| 30 | CAUGAAGGUCACAGCUGGA | UCCAGCUGUGACCUUCAUG | | [1568-1586] | [1373-1391] |
| 31 | UACCUAGCAACAUAUUAUA | UAUAAUAUGUUGCUAGGUA | | [2160-2178] | [1869-1887] |
| 32 | GGCUAGAGGUAAAGCUGUA | UACAGCUUUACCUCUAGCC | | [2223-2241] | [1932-1950] |
| 33 | CCUGGGCUCUGAAGAAUCA | UGAUUCUUCAGAGCCCAGG | | [2111-2129] | [1820-1838] |
| 34 | CCUUUGCCAUCCCUUCUGA | UCAGAAGGGAUGGCAAAGG | Rat, Ms | [1591-1609] | [1396-1414] |
| 35 | UCGCAGAUGUGGUGGAGAA | UUCUCCACCACAUCUGCGA | Ms | [1051-1069] | [1051-1069] |
| 36 | GUUCGAACCCAAUCCCAGU | ACUGGGAUUGGGUUCGAAC | | [1893-1911] | [1602-1620] |
| 37 | GACAGAGGGUUAAAUGAAC | GUUCAUUUAACCCUCUGUC | | [2055-2073] | [1764-1782] |
| 38 | AGAUGUGGUGGAGAAGACA | UGUCUUCUCCACCACAUCU | Ms | [1055-1073] | [1055-1073] |
| 39 | CAUAGUGCAUGGUCUGAUG | CAUCAGACCAUGCACUAUG | | [2478-2496] | [2187-2205] |
| 40 | AUCCUGACCUCCUAUUAAA | UUUAAUAGGAGGUCAGGAU | | [2277-2295] | [1986-2004] |
| 41 | CCAUCCUGACCUCCUAUUA | UAAUAGGAGGUCAGGAUGG | | [2275-2293] | [1984-2002] |
| 42 | GGUCACAGAAUGAAUAGAU | AUCUAUUCAUUCUGUGACC | | [1967-1985] | [1676-1694] |
| 43 | GAAUGAAUAGAUCACCAAG | CUUGGUGAUCUAUUCAUUC | | [1974-1992] | [1683-1701] |
| 44 | UACCGGUGCGAGUCAAAGA | UCUUUGACUCGCACCGGUA | | [173-191] | [173-191] |
| 45 | CGAGACAGAGGGUUAAAUG | CAUUUAACCCUCUGUCUCG | | [2052-2070] | [1761-1779] |
| 46 | ACAAAAUGCUGAAGAUGUU | AACAUCUUCAGCAUUUUGU | Rat, Ms | [1865-1883] | [1574-1592] |
| 47 | GGGCAGUGCUGUUGUUGUU | AACAACAACAGCACUGCCC | | [946-964] | [946-964] |
| 48 | CUCCAUAACUGCUGCUUCA | UGAAGCAGCAGUUAUGGAG | | [220-238] | [220-238] |
| 49 | UGUUUAUGAAGCUGUUCGA | UCGAACAGCUUCAUAAACA | Ms | [1880-1898] | [1589-1607] |
| 50 | GUUUAUGAAGCUGUUCGAA | UUCGAACAGCUUCAUAAAC | Ms | [1881-1899] | [1590-1608] |
| 51 | GAGGGAAGCUCCAUAACUG | CAGUUAUGGAGCUUCCCUC | | [212-230] | [212-230] |
| 52 | AGUAAAAAAUGAGGUGGGA | UCCCACCUCAUUUUUUACU | | [2178-2196] | [1887-1905] |
| 53 | ACUCCUGGGCUCUGAAGAA | UUCUUCAGAGCCCAGGAGU | | [2108-2126] | [1817-1835] |
| 54 | GCAGAUGUGGUGGAGAAGA | UCUUCUCCACCACAUCUGC | Ms, GP | [1053-1071] | [1053-1071] |
| 55 | AAAUGCUGAAGAUGUUUAU | AUAAACAUCUUCAGCAUUU | Rat, Ms | [1868-1886] | [1577-1595] |
| 56 | CAUAACUGCUGCUUCAGGA | UCCUGAAGCAGCAGUUAUG | | [223-241] | [223-241] |
| 57 | UGACCAUCCUGACCUCCUA | UAGGAGGUCAGGAUGGUCA | | [2272-2290] | [1981-1999] |
| 58 | ACACUGACCUUAUAUGUGA | UCACAUAUAAGGUCAGUGU | | [1941-1959] | [1650-1668] |
| 59 | ACGAGAAACACUGACCUUA | UAAGGUCAGUGUUUCUCGU | | [1934-1952] | [1643-1661] |
| 60 | CAUCCAUAGUGCAUGGUCU | AGACCAUGCACUAUGGAUG | | [2474-2492] | [2183-2201] |
| 61 | GACCUCCUAUUAAAGAAAA | UUUUCUUUAAUAGGAGGUC | | [2282-2300] | [1991-2009] |
| 62 | GGAGUCAGUACAACUUCAU | AUGAAGUUGUACUGACUCC | | [1033-1051] | [1033-1051] |
| 63 | AAAAUUAUACCUAGCAACA | UGUUGCUAGGUAUAAUUUU | Rat | [2153-2171] | [1862-1880] |
| 64 | UGAAUAGAUCACCAAGAGU | ACUCUUGGUGAUCUAUUCA | | [1977-1995] | [1686-1704] |
| 65 | UGGUCUGAUGAGUGCGGUU | AACCGCACUCAUCAGACCA | | [2487-2505] | [2196-2214] |
| 66 | GACGAGAAACACUGACCUU | AAGGUCAGUGUUUCUCGUC | | [1933-1951] | [1642-1660] |
| 67 | GAGUGAACACCAUGAAGGU | ACCUUCAUGGUGUUCACUC | Rat, Ms | [1558-1576] | [1363-1381] |
| 68 | UAUACCUAGCAACAUAUUA | UAAUAUGUUGCUAGGUAUA | | [2158-2176] | [1867-1885] |
| 69 | GAGGUGAUUGGAGUGAACA | UGUUCACUCCAAUCACCUC | Rat, Ms, GP | [1548-1566] | [1353-1371] |
| 70 | UGGGAGGGCUGGAUCUUUU | AAAAGAUCCAGCCCUCCCA | | [2192-2210] | [1901-1919] |
| 71 | AGAAACACUGACCUUAUAU | AUAUAAGGUCAGUGUUUCU | | [1937-1955] | [1646-1664] |
| 72 | ACAGAAACACUUUUUAUAU | AUAUAAAAAGUGUUUCUGU | | [2129-2147] | [1838-1856] |
| 73 | CUGUUCGAACCCAAUCCCA | UGGGAUUGGGUUCGAACAG | | [1891-1909] | [1600-1618] |
| 74 | GUUCCACAUCCAUAGUGCA | UGCACUAUGGAUGUGGAAC | | [2468-2486] | [2177-2195] |
| 75 | GAAGAAUUCCUCCUCCGGA | UCCGGAGGAGGAAUUCUUC | | [1643-1661] | [1448-1466] |
| 76 | AUACCUAGCAACAUAUUAU | AUAAUAUGUUGCUAGGUAU | | [2159-2177] | [1868-1886] |
| 77 | AAUGAAUAGAUCACCAAGA | UCUUGGUGAUCUAUUCAUU | | [1975-1993] | [1684-1702] |
| 78 | GUGAUGAUGCUGACCCUGA | UCAGGGUCAGCAUCAUCAC | Ms | [1692-1710] | [1497-1515] |
| 79 | UCACAGAAACACUUUUUAU | AUAAAAAGUGUUUCUGUGA | | [2127-2145] | [1836-1854] |
| 80 | AGUGCAUGGUCUGAUGAGU | ACUCAUCAGACCAUGCACU | | [2481-2499] | [2190-2208] |
| 81 | GAUGAUGCUGACCCUGAGU | ACUCAGGGUCAGCAUCAUC | | [1694-1712] | [1499-1517] |
| 82 | CUUUGCCAUCCCUUCUGAU | AUCAGAAGGGAUGGCAAAG | Rat, Ms | [1592-1610] | [1397-1415] |
| 83 | UCUAUAUCGAGAUCCUGGA | UCCAGGAUCUCGAUAUAGA | | [1087-1105] | [1087-1105] |
| 84 | UAGCAACAUAUUAUAGUAA | UUACUAUAAUAUGUUGCUA | | [2164-2182] | [1873-1891] |
| 85 | CUUGACAGUUCCACAUCCA | UGGAUGUGGAACUGUCAAG | | [2461-2479] | [2170-2188] |
| 86 | GAGAACUCUGGAACCCGUU | AACGGGUUCCAGAGUUCUC | | [891-909] | [891-909] |
| 87 | CUUCUGAUCGUCUUCGAGA | UCUCGAAGACGAUCAGAAG | | [1603-1621] | [1408-1426] |
| 88 | AGGUGAUUGGAGUGAACAC | GUGUUCACUCCAAUCACCU | Rat, Ms, GP | [1549-1567] | [1354-1372] |
| 89 | CAUUGUCACCAACGCCCAU | AUGGGCGUUGGUGACAAUG | | [1178-1196] | [1178-1196] |
| 90 | GAGAGUUUCUGCAUCGUGG | CCACGAUGCAGAAACUCUC | | [1618-1636] | [1423-1441] |
| 91 | GAGCAGUAGGAAGCAGUCA | UGACUGCUUCCUACUGCUC | | [68-86] | [68-86] |
| 92 | UCUGCUUGACAGUUCCACA | UGUGGAACUGUCAAGCAGA | | [2457-2475] | [2166-2184] |
| 93 | GAGGUCACAGAAUGAAUAG | CUAUUCAUUCUGUGACCUC | | [1965-1983] | [1674-1692] |
| 94 | CAUGCUUGGCUACAGAUAC | GUAUCUGUAGCCAAGCAUG | | [2406-2424] | [2115-2133] |
| 95 | UGAAGAUGUUUAUGAAGCU | AGCUUCAUAAACAUCUUCA | Ms | [1874-1892] | [1583-1601] |
| 96 | AGCUCCUGAGGUAAUGGCA | UGCCAUUACCUCAGGAGCU | Rat | [2527-2545] | [2236-2254] |
| 97 | UUUUGUGGGCAGUUAGUCA | UGACUAACUGCCCACAAAA | | [2316-2334] | [2025-2043] |
| 98 | GUGAUUGGAGUGAACACCA | UGGUGUUCACUCCAAUCAC | Rat, Ms | [1551-1569] | [1356-1374] |
| 99 | UGGUAAGCUCCUGAGGUAA | UUACCUCAGGAGCUUACCA | Rat | [2522-2540] | [2231-2249] |
| 100 | CAGAUGUGGUGGAGAAGAC | GUCUUCUCCACCACAUCUG | Ms, GP | [1054-1072] | [1054-1072] |
| 101 | UUGGGAAGGCGGAGUCUUU | AAAGACUCCGCCUUCCCAA | | [293-311] | [293-311] |
| 102 | AAAUUAUACCUAGCAACAU | AUGUUGCUAGGUAUAAUUU | Rat | [2154-2172] | [1863-1881] |
| 103 | AUUGGAGUGAACACCAUGA | UCAUGGUGUUCACUCCAAU | Rat, Ms | [1554-1572] | [1359-1377] |
| 104 | GAUUGGAGUGAACACCAUG | CAUGGUGUUCACUCCAAUC | Rat, Ms | [1553-1571] | [1358-1376] |
| 105 | AUCACAGAAACACUUUUUA | UAAAAAGUGUUUCUGUGAU | | [2126-2144] | [1835-1853] |
| 106 | GAAACACUGACCUUAUAUG | CAUAUAAGGUCAGUGUUUC | | [1938-1956] | [1647-1665] |
| 107 | UGUUCGAACCCAAUCCCAG | CUGGGAUUGGGUUCGAACA | | [1892-1910] | [1601-1619] |
| 108 | UCUUACCGGUGCGAGUCAA | UUGACUCGCACCGGUAAGA | | [170-188] | [170-188] |
| 109 | AUUAUACCUAGCAACAUAU | AUAUGUUGCUAGGUAUAAU | | [2156-2174] | [1865-1883] |
| 110 | CACCUGCCGUGGUCUAUAU | AUAUAGACCACGGCAGGUG | | [1075-1093] | [1075-1093] |
| 111 | UCUGAAGGAGGGUGAAAAC | GUUUUCACCCUCCUUCAGA | | [2437-2455] | [2146-2164] |
| 112 | UUGGCUACAGAUACUGACA | UGUCAGUAUCUGUAGCCAA | | [2411-2429] | [2120-2138] |
| 113 | GAAGGUCACAGCUGGAAUC | GAUUCCAGCUGUGACCUUC | GP | [1571-1589] | [1376-1394] |
| 114 | CUGAAGAAUCACAGAAACA | UGUUUCUGUGAUUCUUCAG | | [2119-2137] | [1828-1846] |
| 115 | UCGCAACGCUGAGGAUUCA | UGAAUCCUCAGCGUUGCGA | | [1288-1306] | [1288-1306] |
| 116 | AAGAAUCACAGAAACACUU | AAGUGUUUCUGUGAUUCUU | | [2122-2140] | [1831-1849] |
| 117 | GUCACAGAAUGAAUAGAUC | GAUCUAUUCAUUCUGUGAC | | [1968-1986] | [1677-1695] |
| 118 | UCUUUUGUGGGCAGUUAGU | ACUAACUGCCCACAAAAGA | | [2314-2332] | [2023-2041] |
| 119 | UUGACAGUUCCACAUCCAU | AUGGAUGUGGAACUGUCAA | | [2462-2480] | [2171-2189] |
| 120 | UGACGUCAGGAACUUCUGA | UCAGAAGUUCCUGACGUCA | | [718-736] | [718-736] |
| 121 | CUUCUGCUUGACAGUUCCA | UGGAACUGUCAAGCAGAAG | | [2455-2473] | [2164-2182] |
| 122 | CUUGGCUACAGAUACUGAC | GUCAGUAUCUGUAGCCAAG | | [2410-2428] | [2119-2137] |
| 123 | UAAGCGGCGACACGUAUGA | UCAUACGUGUCGCCGCUUA | | [1234-1252] | [1234-1252] |
| 124 | AUGAAGGUCACAGCUGGAA | UUCCAGCUGUGACCUUCAU | GP | [1569-1587] | [1374-1392] |
| 125 | UGGAGUGAACACCAUGAAG | CUUCAUGGUGUUCACUCCA | Rat, Ms | [1556-1574] | [1361-1379] |
| 126 | AGUCCGUGUGAGACUGCUA | UAGCAGUCUCACACGGACU | | [1217-1235] | [1217-1235] |
| 127 | AGAAUCACAGAAACACUUU | AAAGUGUUUCUGUGAUUCU | | [2123-2141] | [1832-1850] |
| 128 | AUGCUUGGCUACAGAUACU | AGUAUCUGUAGCCAAGCAU | | [2407-2425] | [2116-2134] |
| 129 | CCUGACCUCCUAUUAAAGA | UCUUUAAUAGGAGGUCAGG | | [2279-2297] | [1988-2006] |
| 130 | ACCUCCUAUUAAAGAAAAU | AUUUUCUUUAAUAGGAGGU | | [2283-2301] | [1992-2010] |
| 131 | AGGUGCUGCUCUUUGUGGU | ACCACAAAGAGCAGCACCU | | [2334-2352] | [2043-2061] |
| 132 | UGCCGUGGUCUAUAUCGAG | CUCGAUAUAGACCACGGCA | | [1079-1097] | [1079-1097] |
| 133 | CUGAGGGAAGCUCCAUAAC | GUUAUGGAGCUUCCCUCAG | | [210-228] | [210-228] |
| 134 | AGAGUAUGAGGCUCCUGCU | AGCAGGAGCCUCAUACUCU | | [1991-2009] | [1700-1718] |
| 135 | GAACACCAUGAAGGUCACA | UGUGACCUUCAUGGUGUUC | | [1562-1580] | [1367-1385] |
| 136 | UCUCGAACGGCUCAGGAUU | AAUCCUGAGCCGUUCGAGA | | [1138-1156] | [1138-1156] |
| 137 | CACAAUUCCCGGCAUUCGU | ACGAAUGCCGGGAAUUGUG | | [427-445] | [427-445] |
| 138 | AUAGUGCAUGGUCUGAUGA | UCAUCAGACCAUGCACUAU | | [2479-2497] | [2188-2206] |
| 139 | UGUGGUGGAGAAGACAGCA | UGCUGUCUUCUCCACCACA | | [1058-1076] | [1058-1076] |
| 140 | AAGGAGGGUGAAAACUUCU | AGAAGUUUUCACCCUCCUU | | [2441-2459] | [2150-2168] |
| 141 | CUCCUAUUAAAGAAAAUGA | UCAUUUUCUUUAAUAGGAG | | [2285-2303] | [1994-2012] |
| 142 | UGAGGCUCCUGCUCUGAUU | AAUCAGAGCAGGAGCCUCA | | [1997-2015] | [1706-1724] |
| 143 | AUGUGAUUUUGGCCAUUGG | CCAAUGGCCAAAAUCACAU | | [1834-1852] | [1543-1561] |
| 144 | AAUAAAAUUAUACCUAGCA | UGCUAGGUAUAAUUUUAUU | Rat, Ms | [2150-2168] | [1859-1877] |
| 145 | AGGCUAGAGGUAAAGCUGU | ACAGCUUUACCUCUAGCCU | | [2222-2240] | [1931-1949] |
| 146 | AAUCCCAGUUGGCAGUGCA | UGCACUGCCAACUGGGAUU | | [1903-1921] | [1612-1630] |
| 147 | UAGAUCACCAAGAGUAUGA | UCAUACUCUUGGUGAUCUA | | [1981-1999] | [1690-1708] |
| 148 | AUGAGUGCGGUUGCUGACA | UGUCAGCAACCGCACUCAU | | [2494-2512] | [2203-2221] |
| 149 | AAACACUGACCUUAUAUGU | ACAUAUAAGGUCAGUGUUU | | [1939-1957] | [1648-1666] |
| 150 | CUGACAUGGGUUUCUUGGU | ACCAAGAAACCCAUGUCAG | | [2507-2525] | [2216-2234] |
| 151 | CUAUUAAAGAAAAUGAGCU | AGCUCAUUUUCUUUAAUAG | | [2288-2306] | [1997-2015] |
| 152 | CUGGGAGCAAAGAUUCCCA | UGGGAAUCUUUGCUCCCAG | | [2389-2407] | [2098-2116] |
| 153 | GAUCACCAAGAGUAUGAGG | CCUCAUACUCUUGGUGAUC | | [1983-2001] | [1692-1710] |
| 154 | CCUUCUGAUCGUCUUCGAG | CUCGAAGACGAUCAGAAGG | | [1602-1620] | [1407-1425] |
| 155 | GCAGUGCUGUUGUUGUUGU | ACAACAACAACAGCACUGC | | [948-966] | [948-966] |
| 156 | ACGAGCAGUAGGAAGCAGU | ACUGCUUCCUACUGCUCGU | | [66-84] | [66-84] |
| 157 | UUAUACCUAGCAACAUAUU | AAUAUGUUGCUAGGUAUAA | | [2157-2175] | [1866-1884] |
| 158 | CUGAAGGAGGGUGAAAACU | AGUUUUCACCCUCCUUCAG | | [2438-2456] | [2147-2165] |
| 159 | CCUUUCUGGCUGAGGUUCU | AGAACCUCAGCCAGAAAGG | | [2025-2043] | [1734-1752] |
| 160 | UCACAGAAUGAAUAGAUCA | UGAUCUAUUCAUUCUGUGA | | [1969-1987] | [1678-1696] |
| 161 | UCCUAUUAAAGAAAAUGAG | CUCAUUUUCUUUAAUAGGA | | [2286-2304] | [1995-2013] |
| 162 | AGGGAAGCUCCAUAACUGC | GCAGUUAUGGAGCUUCCCU | | [213-231] | [213-231] |
| 163 | UCCGUGUGAGACUGCUAAG | CUUAGCAGUCUCACACGGA | | [1219-1237] | [1219-1237] |
| 164 | AAAAUGCUGAAGAUGUUUA | UAAACAUCUUCAGCAUUUU | Rat, Ms | [1867-1885] | [1576-1594] |
| 165 | UGAGGGAAGCUCCAUAACU | AGUUAUGGAGCUUCCCUCA | | [211-229] | [211-229] |
| 166 | GGGAAGCUCCAUAACUGCU | AGCAGUUAUGGAGCUUCCC | | [214-232] | [214-232] |
| 167 | CUUUCUGGCUGAGGUUCUG | CAGAACCUCAGCCAGAAAG | | [2026-2044] | [1735-1753] |
| 168 | UACAGAUACUGACAGCUGG | CCAGCUGUCAGUAUCUGUA | | [2416-2434] | [2125-2143] |
| 169 | CAAAGAUUCCCAUGCUUGG | CCAAGCAUGGGAAUCUUUG | | [2396-2414] | [2105-2123] |
| 170 | CCUAUUAAAGAAAAUGAGC | GCUCAUUUUCUUUAAUAGG | | [2287-2305] | [1996-2014] |
| 171 | CGUGCACUUCUGAAGGACU | AGUCCUUCAGAAGUGCACG | | [486-504] | [486-504] |
| 172 | AUAGAUCACCAAGAGUAUG | CAUACUCUUGGUGAUCUAU | | [1980-1998] | [1689-1707] |
| 173 | AAAUAAAAUUAUACCUAGC | GCUAGGUAUAAUUUUAUUU | Rat, Ms | [2149-2167] | [1858-1876] |
| 174 | UAUCUCGAACGGCUCAGGA | UCCUGAGCCGUUCGAGAUA | | [1136-1154] | [1136-1154] |
| 175 | GACCACAAUUCCCGGCAUU | AAUGCCGGGAAUUGUGGUC | | [424-442] | [424-442] |
| 176 | ACUUCAUCGCAGAUGUGGU | ACCACAUCUGCGAUGAAGU | | [1045-1063] | [1045-1063] |
| 177 | UCUUCGAGAGUUUCUGCAU | AUGCAGAAACUCUCGAAGA | | [1613-1631] | [1418-1436] |
| 178 | AGAAAAUGAGCUGCUGCCA | UGGCAGCAGCUCAUUUUCU | | [2295-2313] | [2004-2022] |
| 179 | UAAAAUUAUACCUAGCAAC | GUUGCUAGGUAUAAUUUUA | Rat | [2152-2170] | [1861-1879] |
| 180 | CCUGGUGAUGUGAUUUUGG | CCAAAAUCACAUCACCAGG | | [1827-1845] | [1536-1554] |
| 181 | GCUCCUGCUCUGAUUUCCU | AGGAAAUCAGAGCAGGAGC | | [2001-2019] | [1710-1728] |
| 182 | UAGUGCAUGGUCUGAUGAG | CUCAUCAGACCAUGCACUA | | [2480-2498] | [2189-2207] |
| 183 | UUCUGAAGGACUUCAGGUA | UACCUGAAGUCCUUCAGAA | | [493-511] | [493-511] |
| 184 | CAACGCUGAGGAUUCAGAC | GUCUGAAUCCUCAGCGUUG | | [1291-1309] | [1291-1309] |
| 185 | AUGAAUAGAUCACCAAGAG | CUCUUGGUGAUCUAUUCAU | | [1976-1994] | [1685-1703] |
| 186 | CAUCGCAACGCUGAGGAUU | AAUCCUCAGCGUUGCGAUG | | [1286-1304] | [1286-1304] |
| 187 | AACCCAAUCCCAGUUGGCA | UGCCAACUGGGAUUGGGUU | | [1898-1916] | [1607-1625] |
| 188 | CAGCUGGAAUCUCCUUUGC | GCAAAGGAGAUUCCAGCUG | Rat, Ms, GP | [1579-1597] | [1384-1402] |
| 189 | GUCACAGCUGGAAUCUCCU | AGGAGAUUCCAGCUGUGAC | GP | [1575-1593] | [1380-1398] |
| 190 | ACCUAGCAACAUAUUAUAG | CUAUAAUAUGUUGCUAGGU | | [2161-2179] | [1870-1888] |
| 191 | UAAAGAAAAUGAGCUGCUG | CAGCAGCUCAUUUUCUUUA | | [2292-2310] | [2001-2019] |
| 192 | UGCUGACAUGGGUUUCUUG | CAAGAAACCCAUGUCAGCA | | [2505-2523] | [2214-2232] |
| 193 | GUACAACUUCAUCGCAGAU | AUCUGCGAUGAAGUUGUAC | | [1040-1058] | [1040-1058] |
| 194 | AAAACUUCUGCUUGACAGU | ACUGUCAAGCAGAAGUUUU | | [2451-2469] | [2160-2178] |
| 195 | UGUGAUUUUGGCCAUUGGG | CCCAAUGGCCAAAAUCACA | | [1835-1853] | [1544-1562] |
| 196 | GUCUUCGAGAGUUUCUGCA | UGCAGAAACUCUCGAAGAC | | [1612-1630] | [1417-1435] |
| 197 | GUGCAUGGUCUGAUGAGUG | CACUCAUCAGACCAUGCAC | | [2482-2500] | [2191-2209] |
| 198 | ACUUCUGCUUGACAGUUCC | GGAACUGUCAAGCAGAAGU | | [2454-2472] | [2163-2181] |
| 199 | CUCCUUUGCCAUCCCUUCU | AGAAGGGAUGGCAAAGGAG | Rat, Ms | [1589-1607] | [1394-1412] |
| 200 | UUACCGGUGCGAGUCAAAG | CUUUGACUCGCACCGGUAA | | [172-190] | [172-190] |
| 201 | UUCUGAUCGUCUUCGAGAG | CUCUCGAAGACGAUCAGAA | | [1604-1622] | [1409-1427] |
| 202 | GAUGUGGUGGAGAAGACAG | CUGUCUUCUCCACCACAUC | Ms | [1056-1074] | [1056-1074] |
| 203 | CAACUUCAUCGCAGAUGUG | CACAUCUGCGAUGAAGUUG | | [1043-1061] | [1043-1061] |
| 204 | CACCAUGAAGGUCACAGCU | AGCUGUGACCUUCAUGGUG | | [1565-1583] | [1370-1388] |
| 205 | GAGAUACUGGAGCUGACCA | UGGUCAGCUCCAGUAUCUC | | [2259-2277] | [1968-1986] |
| 206 | AUGCUGAAGAUGUUUAUGA | UCAUAAACAUCUUCAGCAU | Rat, Ms | [1870-1888] | [1579-1597] |
| 207 | CUUGGUAAGCUCCUGAGGU | ACCUCAGGAGCUUACCAAG | | [2520-2538] | [2229-2247] |
| 208 | AGGAGGGUGAAAACUUCUG | CAGAAGUUUUCACCCUCCU | | [2442-2460] | [2151-2169] |
| 209 | UCAUUGUCACCAACGCCCA | UGGGCGUUGGUGACAAUGA | | [1177-1195] | [1177-1195] |
| 210 | GAGCAGAUGGUACAAAAUG | CAUUUUGUACCAUCUGCUC | | [1854-1872] | [1563-1581] |
| 211 | UGUGGGCAGUUAGUCAGGU | ACCUGACUAACUGCCCACA | | [2319-2337] | [2028-2046] |
| 212 | GUAAAAAAUGAGGUGGGAG | CUCCCACCUCAUUUUUUAC | | [2179-2197] | [1888-1906] |
| 213 | CGUCUUCGAGAGUUUCUGC | GCAGAAACUCUCGAAGACG | | [1611-1629] | [1416-1434] |
| 214 | AAUCACAGAAACACUUUUU | AAAAAGUGUUUCUGUGAUU | | [2125-2143] | [1834-1852] |
| 215 | AUCUUUUGUGGGCAGUUAG | CUAACUGCCCACAAAAGAU | | [2313-2331] | [2022-2040] |
| 216 | UCAGGUGCUGCUCUUUGUG | CACAAAGAGCAGCACCUGA | | [2332-2350] | [2041-2059] |
| 217 | UCCUGGGCUCUGAAGAAUC | GAUUCUUCAGAGCCCAGGA | | [2110-2128] | [1819-1837] |
| 218 | GGAAAAGAAGAAUUCCUCC | GGAGGAAUUCUUCUUUUCC | | [1637-1655] | [1442-1460] |
| 219 | AUCGCAGAUGUGGUGGAGA | UCUCCACCACAUCUGCGAU | Ms | [1050-1068] | [1050-1068] |
| 220 | UUUCUUGGUAAGCUCCUGA | UCAGGAGCUUACCAAGAAA | | [2517-2535] | [2226-2244] |
| 221 | AAUUCCUCCUCCGGAAUCA | UGAUUCCGGAGGAGGAAUU | | [1647-1665] | [1452-1470] |
| 222 | CUUCUGAAGGACUUCAGGU | ACCUGAAGUCCUUCAGAAG | | [492-510] | [492-510] |
| 223 | ACAGAUACUGACAGCUGGC | GCCAGCUGUCAGUAUCUGU | | [2417-2435] | [2126-2144] |
| 224 | GAGUCAGUACAACUUCAUC | GAUGAAGUUGUACUGACUC | | [1034-1052] | [1034-1052] |
| 225 | UCACCAAGAGUAUGAGGCU | AGCCUCAUACUCUUGGUGA | | [1985-2003] | [1694-1712] |
| 226 | CUAUAUCGAGAUCCUGGAC | GUCCAGGAUCUCGAUAUAG | | [1088-1106] | [1088-1106] |
| 227 | AUGAGGCUCCUGCUCUGAU | AUCAGAGCAGGAGCCUCAU | | [1996-2014] | [1705-1723] |
| 228 | GAUGUGAUUUUGGCCAUUG | CAAUGGCCAAAAUCACAUC | | [1833-1851] | [1542-1560] |
| 229 | CUUCGAGAGUUUCUGCAUC | GAUGCAGAAACUCUCGAAG | | [1614-1632] | [1419-1437] |
| 230 | UACAAAAUGCUGAAGAUGU | ACAUCUUCAGCAUUUUGUA | Rat | [1864-1882] | [1573-1591] |
| 231 | AGAGUUUCUGCAUCGUGGG | CCCACGAUGCAGAAACUCU | | [1619-1637] | [1424-1442] |
| 232 | CAGAUGGUACAAAAUGCUG | CAGCAUUUUGUACCAUCUG | | [1857-1875] | [1566-1584] |
| 233 | UUAUAGUAAAAAAUGAGGU | ACCUCAUUUUUUACUAUAA | | [2174-2192] | [1883-1901] |
| 234 | AGGUCACAGCUGGAAUCUC | GAGAUUCCAGCUGUGACCU | GP | [1573-1591] | [1378-1396] |
| 235 | GCUGACAUGGGUUUCUUGG | CCAAGAAACCCAUGUCAGC | | [2506-2524] | [2215-2233] |
| 236 | AUGGUCUGAUGAGUGCGGU | ACCGCACUCAUCAGACCAU | | [2486-2504] | [2195-2213] |
| 237 | CUGGUGAUGUGAUUUUGGC | GCCAAAAUCACAUCACCAG | | [1828-1846] | [1537-1555] |
| 238 | GCUUGACAGUUCCACAUCC | GGAUGUGGAACUGUCAAGC | | [2460-2478] | [2169-2187] |
| 239 | GGUCUAUAUCGAGAUCCUG | CAGGAUCUCGAUAUAGACC | | [1085-1103] | [1085-1103] |
| 240 | GUACAAAAUGCUGAAGAUG | CAUCUUCAGCAUUUUGUAC | | [1863-1881] | [1572-1590] |
| 241 | GAAUCUCCUUUGCCAUCCC | GGGAUGGCAAAGGAGAUUC | Rat, Ms, GP | [1585-1603] | [1390-1408] |
| 242 | GUCUAUAUCGAGAUCCUGG | CCAGGAUCUCGAUAUAGAC | | [1086-1104] | [1086-1104] |
| 243 | AAAAUGAGGUGGGAGGGCU | AGCCCUCCCACCUCAUUUU | | [2183-2201] | [1892-1910] |
| 244 | GUGCUGUUGUUGUUGUGGG | CCCACAACAACAACAGCAC | | [951-969] | [951-969] |
| 245 | UCAGUACAACUUCAUCGCA | UGCGAUGAAGUUGUACUGA | | [1037-1055] | [1037-1055] |
| 246 | AAAAUGAGCUGCUGCCAUC | GAUGGCAGCAGCUCAUUUU | | [2297-2315] | [2006-2024] |
| 247 | AAGGCUAGAGGUAAAGCUG | CAGCUUUACCUCUAGCCUU | | [2221-2239] | [1930-1948] |
| 248 | AUCUCGAACGGCUCAGGAU | AUCCUGAGCCGUUCGAGAU | | [1137-1155] | [1137-1155] |
| 249 | AGCUGCUGCCAUCUUUUGU | ACAAAAGAUGGCAGCAGCU | | [2303-2321] | [2012-2030] |
| 250 | AGAUACUGACAGCUGGCCU | AGGCCAGCUGUCAGUAUCU | | [2419-2437] | [2128-2146] |
| 251 | GGUUGCUGACAUGGGUUUC | GAAACCCAUGUCAGCAACC | | [2502-2520] | [2211-2229] |
| 252 | UAUUAAAGAAAAUGAGCUG | CAGCUCAUUUUCUUUAAUA | | [2289-2307] | [1998-2016] |
| 253 | UUGCCUUUCUGGCUGAGGU | ACCUCAGCCAGAAAGGCAA | | [2022-2040] | [1731-1749] |
| 254 | CUGACGUCAGGAACUUCUG | CAGAAGUUCCUGACGUCAG | | [717-735] | [717-735] |
| 255 | GGUUUCUUGGUAAGCUCCU | AGGAGCUUACCAAGAAACC | | [2515-2533] | [2224-2242] |
| 256 | GUUAGUCAGGUGCUGCUCU | AGAGCAGCACCUGACUAAC | | [2327-2345] | [2036-2054] |
| 257 | UGGUGAUGUGAUUUUGGCC | GGCCAAAAUCACAUCACCA | | [1829-1847] | [1538-1556] |
| 258 | ACAGUUCCACAUCCAUAGU | ACUAUGGAUGUGGAACUGU | | [2465-2483] | [2174-2192] |
| 259 | UCUGAUGAGUGCGGUUGCU | AGCAACCGCACUCAUCAGA | | [2490-2508] | [2199-2217] |
| 260 | GAGCUGCUGCCAUCUUUUG | CAAAAGAUGGCAGCAGCUC | | [2302-2320] | [2011-2029] |
| 261 | GAUUCCCAUGCUUGGCUAC | GUAGCCAAGCAUGGGAAUC | | [2400-2418] | [2109-2127] |
| 262 | UUAGUCAGGUGCUGCUCUU | AAGAGCAGCACCUGACUAA | | [2328-2346] | [2037-2055] |
| 263 | GCUCCAUAACUGCUGCUUC | GAAGCAGCAGUUAUGGAGC | | [219-237] | [219-237] |
| 264 | UAUGAGGCUCCUGCUCUGA | UCAGAGCAGGAGCCUCAUA | | [1995-2013] | [1704-1722] |
| 265 | GAAGCUCCAUAACUGCUGC | GCAGCAGUUAUGGAGCUUC | | [216-234] | [216-234] |
| 266 | GAUACUGGAGCUGACCAUC | GAUGGUCAGCUCCAGUAUC | | [2261-2279] | [1970-1988] |
| 267 | AUGAAGCUGUUCGAACCCA | UGGGUUCGAACAGCUUCAU | Ms | [1885-1903] | [1594-1612] |
| 268 | GUUUCUUGGUAAGCUCCUG | CAGGAGCUUACCAAGAAAC | | [2516-2534] | [2225-2243] |
| 269 | UACUGGAGCUGACCAUCCU | AGGAUGGUCAGCUCCAGUA | | [2263-2281] | [1972-1990] |
| 270 | AGCUGUUCGAACCCAAUCC | GGAUUGGGUUCGAACAGCU | | [1889-1907] | [1598-1616] |
| 271 | AAAGGCUAGAGGUAAAGCU | AGCUUUACCUCUAGCCUUU | | [2220-2238] | [1929-1947] |
| 272 | AAAUGAGCUGCUGCCAUCU | AGAUGGCAGCAGCUCAUUU | | [2298-2316] | [2007-2025] |
| 273 | UAUAGUAAAAAAUGAGGUG | CACCUCAUUUUUUACUAUA | | [2175-2193] | [1884-1902] |
| 274 | CUGGGCUCUGAAGAAUCAC | GUGAUUCUUCAGAGCCCAG | | [2112-2130] | [1821-1839] |
| 275 | AAGCUGUUCGAACCCAAUC | GAUUGGGUUCGAACAGCUU | Ms | [1888-1906] | [1597-1615] |
| 276 | GUUGCUGACAUGGGUUUCU | AGAAACCCAUGUCAGCAAC | | [2503-2521] | [2212-2230] |
| 277 | UUAUGAAGCUGUUCGAACC | GGUUCGAACAGCUUCAUAA | Ms | [1883-1901] | [1592-1610] |
| 278 | ACACCAUGAAGGUCACAGC | GCUGUGACCUUCAUGGUGU | | [1564-1582] | [1369-1387] |
| 279 | UCCUGACCUCCUAUUAAAG | CUUUAAUAGGAGGUCAGGA | | [2278-2296] | [1987-2005] |
| 280 | ACAAUUCCCGGCAUUCGUG | CACGAAUGCCGGGAAUUGU | | [428-446] | [428-446] |
| 281 | CUCAGAGAACUCUGGAACC | GGUUCCAGAGUUCUCUGAG | | [887-905] | [887-905] |
| 282 | UUAAAGAAAAUGAGCUGCU | AGCAGCUCAUUUUCUUUAA | | [2291-2309] | [2000-2018] |
| 283 | UCUCCUUUGCCAUCCCUUC | GAAGGGAUGGCAAAGGAGA | Rat, Ms | [1588-1606] | [1393-1411] |
| 284 | UAAAAAAUGAGGUGGGAGG | CCUCCCACCUCAUUUUUUA | | [2180-2198] | [1889-1907] |
| 285 | AGCAGUAGGAAGCAGUCAC | GUGACUGCUUCCUACUGCU | | [69-87] | [69-87] |
| 286 | UUUCUGGCUGAGGUUCUGA | UCAGAACCUCAGCCAGAAA | | [2027-2045] | [1736-1754] |
| 287 | CCAUAACUGCUGCUUCAGG | CCUGAAGCAGCAGUUAUGG | | [222-240] | [222-240] |
| 288 | GGGUUAAAUGAACCAGUGG | CCACUGGUUCAUUUAACCC | | [2061-2079] | [1770-1788] |
| 289 | UCUGAUUUCCUCCUUGCCU | AGGCAAGGAGGAAAUCAGA | | [2009-2027] | [1718-1736] |
| 290 | UUCGAACCCAAUCCCAGUU | AACUGGGAUUGGGUUCGAA | | [1894-1912] | [1603-1621] |
| 291 | GAUCGUCUUCGAGAGUUUC | GAAACUCUCGAAGACGAUC | | [1608-1626] | [1413-1431] |
| 292 | ACUUCUGAAGGACUUCAGG | CCUGAAGUCCUUCAGAAGU | | [491-509] | [491-509] |
| 293 | AACACUGACCUUAUAUGUG | CACAUAUAAGGUCAGUGUU | | [1940-1958] | [1649-1667] |
| 294 | AUGGGUUUCUUGGUAAGCU | AGCUUACCAAGAAACCCAU | | [2512-2530] | [2221-2239] |
| 295 | AUCUCCUUUGCCAUCCCUU | AAGGGAUGGCAAAGGAGAU | Rat, Ms | [1587-1605] | [1392-1410] |
| 296 | GAUGUUUAUGAAGCUGUUC | GAACAGCUUCAUAAACAUC | Ms | [1878-1896] | [1587-1605] |
| 297 | UCCAUAGUGCAUGGUCUGA | UCAGACCAUGCACUAUGGA | | [2476-2494] | [2185-2203] |
| 298 | UCGUCUUCGAGAGUUUCUG | CAGAAACUCUCGAAGACGA | | [1610-1628] | [1415-1433] |
| 299 | AGAAGAAUUCCUCCUCCGG | CCGGAGGAGGAAUUCUUCU | | [1642-1660] | [1447-1465] |
| 300 | AGCAGAUGGUACAAAAUGC | GCAUUUUGUACCAUCUGCU | | [1855-1873] | [1564-1582] |
| 301 | CUACAGAUACUGACAGCUG | CAGCUGUCAGUAUCUGUAG | | [2415-2433] | [2124-2142] |
| 302 | AAUCUCCUUUGCCAUCCCU | AGGGAUGGCAAAGGAGAUU | Rat, Ms | [1586-1604] | [1391-1409] |
| 303 | AUUAUAGUAAAAAAUGAGG | CCUCAUUUUUUACUAUAAU | | [2173-2191] | [1882-1900] |
| 304 | AAGAUGUUUAUGAAGCUGU | ACAGCUUCAUAAACAUCUU | Ms | [1876-1894] | [1585-1603] |
| 305 | UAGUAAAAAAUGAGGUGGG | CCCACCUCAUUUUUUACUA | | [2177-2195] | [1886-1904] |
| 306 | UUCUGGCUGAGGUUCUGAG | CUCAGAACCUCAGCCAGAA | | [2028-2046] | [1737-1755] |
| 307 | AAACUUCUGCUUGACAGUU | AACUGUCAAGCAGAAGUUU | | [2452-2470] | [2161-2179] |
| 308 | UUGUGGGCAGUUAGUCAGG | CCUGACUAACUGCCCACAA | | [2318-2336] | [2027-2045] |
| 309 | UUUGUGGGCAGUUAGUCAG | CUGACUAACUGCCCACAAA | | [2317-2335] | [2026-2044] |
| 310 | AAUGCUGAAGAUGUUUAUG | CAUAAACAUCUUCAGCAUU | Rat, Ms | [1869-1887] | [1578-1596] |
| 311 | UGCUGACGUCAGGAACUUC | GAAGUUCCUGACGUCAGCA | | [715-733] | [715-733] |
| 312 | GGUGAUUGGAGUGAACACC | GGUGUUCACUCCAAUCACC | Rat, Ms | [1550-1568] | [1355-1373] |
| 313 | AUUUCCUCCUUGCCUUUCU | AGAAAGGCAAGGAGGAAAU | | [2013-2031] | [1722-1740] |
| 314 | CUUUUGUGGGCAGUUAGUC | GACUAACUGCCCACAAAAG | | [2315-2333] | [2024-2042] |
| 315 | CUCUGAUUUCCUCCUUGCC | GGCAAGGAGGAAAUCAGAG | | [2008-2026] | [1717-1735] |
| 316 | CUUCAUCGCAGAUGUGGUG | CACCACAUCUGCGAUGAAG | | [1046-1064] | [1046-1064] |
| 317 | CAUGGGUUUCUUGGUAAGC | GCUUACCAAGAAACCCAUG | | [2511-2529] | [2220-2238] |
| 318 | AAGGUCACAGCUGGAAUCU | AGAUUCCAGCUGUGACCUU | GP | [1572-1590] | [1377-1395] |
| 319 | AUGUGGUGGAGAAGACAGC | GCUGUCUUCUCCACCACAU | Ms | [1057-1075] | [1057-1075] |
| 320 | AACGCUGAGGAUUCAGACU | AGUCUGAAUCCUCAGCGUU | | [1292-1310] | [1292-1310] |
| 321 | AUCCAUAGUGCAUGGUCUG | CAGACCAUGCACUAUGGAU | | [2475-2493] | [2184-2202] |
| 322 | UCUUGGUAAGCUCCUGAGG | CCUCAGGAGCUUACCAAGA | | [2519-2537] | [2228-2246] |
| 323 | AUUCCCAUGCUUGGCUACA | UGUAGCCAAGCAUGGGAAU | | [2401-2419] | [2110-2128] |
| 324 | GAUGGGCUCAUUGUCACCA | UGGUGACAAUGAGCCCAUC | | [1170-1188] | [1170-1188] |
| 325 | CUGAAGAUGUUUAUGAAGC | GCUUCAUAAACAUCUUCAG | Ms | [1873-1891] | [1582-1600] |
| 326 | UUCCCAUGCUUGGCUACAG | CUGUAGCCAAGCAUGGGAA | | [2402-2420] | [2111-2129] |
| 327 | UCUGAUCGUCUUCGAGAGU | ACUCUCGAAGACGAUCAGA | | [1605-1623] | [1410-1428] |
| 328 | AAUGAGCUGCUGCCAUCUU | AAGAUGGCAGCAGCUCAUU | | [2299-2317] | [2008-2026] |
| 329 | AUAACUGCUGCUUCAGGAG | CUCCUGAAGCAGCAGUUAU | | [224-242] | [224-242] |
| 330 | CUAGAGGUAAAGCUGUAUC | GAUACAGCUUUACCUCUAG | | [2225-2243] | [1934-1952] |
| 331 | AAAAAAUGAGGUGGGAGGG | CCCUCCCACCUCAUUUUUU | | [2181-2199] | [1890-1908] |
| 332 | AGUUCCACAUCCAUAGUGC | GCACUAUGGAUGUGGAACU | | [2467-2485] | [2176-2194] |
| 333 | AGAACUCUGGAACCCGUUC | GAACGGGUUCCAGAGUUCU | | [892-910] | [892-910] |
| 334 | UGCUUGGCUACAGAUACUG | CAGUAUCUGUAGCCAAGCA | | [2408-2426] | [2117-2135] |
| 335 | AGUAUGAGGCUCCUGCUCU | AGAGCAGGAGCCUCAUACU | | [1993-2011] | [1702-1720] |
| 336 | CAAGAGUAUGAGGCUCCUG | CAGGAGCCUCAUACUCUUG | | [1989-2007] | [1698-1716] |
| 337 | AAGAAGAAUUCCUCCUCCG | CGGAGGAGGAAUUCUUCUU | | [1641-1659] | [1446-1464] |
| 338 | AAAGAAGAAUUCCUCCUCC | GGAGGAGGAAUUCUUCUUU | | [1640-1658] | [1445-1463] |
| 339 | GGUUAAAUGAACCAGUGGG | CCCACUGGUUCAUUUAACC | | [2062-2080] | [1771-1789] |
| 340 | AGUCAGGUGCUGCUCUUUG | CAAAGAGCAGCACCUGACU | | [2330-2348] | [2039-2057] |
| 341 | UUUCCUCCUUGCCUUUCUG | CAGAAAGGCAAGGAGGAAA | | [2014-2032] | [1723-1741] |
| 342 | UAGUCAGGUGCUGCUCUUU | AAAGAGCAGCACCUGACUA | | [2329-2347] | [2038-2056] |
| 343 | UGCAUGGUCUGAUGAGUGC | GCACUCAUCAGACCAUGCA | | [2483-2501] | [2192-2210] |
| 344 | ACAGAGGGUUAAAUGAACC | GGUUCAUUUAACCCUCUGU | | [2056-2074] | [1765-1783] |
| 345 | CUGCUCUUUGUGGUGUGGU | ACCACACCACAAAGAGCAG | | [2339-2357] | [2048-2066] |
| 346 | CACCAAGAGUAUGAGGCUC | GAGCCUCAUACUCUUGGUG | | [1986-2004] | [1695-1713] |
| 347 | GGGUUUCUUGGUAAGCUCC | GGAGCUUACCAAGAAACCC | | [2514-2532] | [2223-2241] |
| 348 | GACGUCAGGAACUUCUGAC | GUCAGAAGUUCCUGACGUC | | [719-737] | [719-737] |
| 349 | CUGCUGCCAUCUUUUGUGG | CCACAAAAGAUGGCAGCAG | | [2305-2323] | [2014-2032] |
| 350 | AACUUCUGCUUGACAGUUC | GAACUGUCAAGCAGAAGUU | | [2453-2471] | [2162-2180] |
| 351 | UUCUUGGUAAGCUCCUGAG | CUCAGGAGCUUACCAAGAA | | [2518-2536] | [2227-2245] |
| 352 | ACAUCCAUAGUGCAUGGUC | GACCAUGCACUAUGGAUGU | | [2473-2491] | [2182-2200] |
| 353 | UUCCACAUCCAUAGUGCAU | AUGCACUAUGGAUGUGGAA | | [2469-2487] | [2178-2196] |
| 354 | UCCACAUCCAUAGUGCAUG | CAUGCACUAUGGAUGUGGA | | [2470-2488] | [2179-2197] |
| 355 | UUUAUGAAGCUGUUCGAAC | GUUCGAACAGCUUCAUAAA | Ms | [1882-1900] | [1591-1609] |
| 356 | AGUGCUGUUGUUGUUGUGG | CCACAACAACAACAGCACU | | [950-968] | [950-968] |
| 357 | ACAGAAUGAAUAGAUCACC | GGUGAUCUAUUCAUUCUGU | | [1971-1989] | [1680-1698] |
| 358 | AUACUGACAGCUGGCCUCU | AGAGGCCAGCUGUCAGUAU | | [2421-2439] | [2130-2148] |
| 359 | UAGAGGUAAAGCUGUAUCC | GGAUACAGCUUUACCUCUA | | [2226-2244] | [1935-1953] |
| 360 | UCGAACCCAAUCCCAGUUG | CAACUGGGAUUGGGUUCGA | | [1895-1913] | [1604-1622] |
| 361 | CUGAAGGACUUCAGGUACC | GGUACCUGAAGUCCUUCAG | | [495-513] | [495-513] |
| 362 | AAGAGUAUGAGGCUCCUGC | GCAGGAGCCUCAUACUCUU | | [1990-2008] | [1699-1717] |
| 363 | ACGUCAGGAACUUCUGACC | GGUCAGAAGUUCCUGACGU | | [720-738] | [720-738] |
| 364 | UAAGCUCCUGAGGUAAUGG | CCAUUACCUCAGGAGCUUA | Rat | [2525-2543] | [2234-2252] |
| 365 | UUGUCACCAACGCCCAUGU | ACAUGGGCGUUGGUGACAA | | [1180-1198] | [1180-1198] |
| 366 | UCUGAAGGACUUCAGGUAC | GUACCUGAAGUCCUUCAGA | | [494-512] | [494-512] |
| 367 | AUCGCAACGCUGAGGAUUC | GAAUCCUCAGCGUUGCGAU | | [1287-1305] | [1287-1305] |
| 368 | UGAAGGACUUCAGGUACCG | CGGUACCUGAAGUCCUUCA | | [496-514] | [496-514] |
| 369 | AAAAGAAGAAUUCCUCCUC | GAGGAGGAAUUCUUCUUUU | | [1639-1657] | [1444-1462] |
| 370 | UUCCUCCUCCGGAAUCAGU | ACUGAUUCCGGAGGAGGAA | | [1649-1667] | [1454-1472] |
| 371 | AAGAUUCCCAUGCUUGGCU | AGCCAAGCAUGGGAAUCUU | | [2398-2416] | [2107-2125] |
| 372 | AUCCCUUCUGAUCGUCUUC | GAAGACGAUCAGAAGGGAU | | [1599-1617] | [1404-1422] |
| 373 | GAAUUCCUCCUCCGGAAUC | GAUUCCGGAGGAGGAAUUC | | [1646-1664] | [1451-1469] |
| 374 | AAAGAAAAUGAGCUGCUGC | GCAGCAGCUCAUUUUCUUU | | [2293-2311] | [2002-2020] |
| 375 | AGCUGGAAUCUCCUUUGCC | GGCAAAGGAGAUUCCAGCU | Rat, Ms, GP | [1580-1598] | [1385-1403] |
| 376 | AAGAAAAUGAGCUGCUGCC | GGCAGCAGCUCAUUUUCUU | | [2294-2312] | [2003-2021] |
| 377 | AUUCCUCCUCCGGAAUCAG | CUGAUUCCGGAGGAGGAAU | | [1648-1666] | [1453-1471] |
| 378 | UGGAAUCUCCUUUGCCAUC | GAUGGCAAAGGAGAUUCCA | Rat, Ms, GP | [1583-1601] | [1388-1406] |
| 379 | UUUGGAAACUCUGGAGGUC | GACCUCCAGAGUUUCCAAA | GP, Chn | [1509-1527] | [1314-1332] |
| 380 | GUCAGUACAACUUCAUCGC | GCGAUGAAGUUGUACUGAC | | [1036-1054] | [1036-1054] |
| 381 | UGCUUGACAGUUCCACAUC | GAUGUGGAACUGUCAAGCA | | [2459-2477] | [2168-2186] |
| 382 | ACCACAAUUCCCGGCAUUC | GAAUGCCGGGAAUUGUGGU | | [425-443] | [425-443] |
| 383 | AACACCAUGAAGGUCACAG | CUGUGACCUUCAUGGUGUU | | [1563-1581] | [1368-1386] |
| 384 | ACCUGCCGUGGUCUAUAUC | GAUAUAGACCACGGCAGGU | | [1076-1094] | [1076-1094] |
| 385 | UUCUGCUUGACAGUUCCAC | GUGGAACUGUCAAGCAGAA | | [2456-2474] | [2165-2183] |
| 386 | AAAAAUGAGGUGGGAGGGC | GCCCUCCCACCUCAUUUUU | | [2182-2200] | [1891-1909] |
| 387 | AUAUCGAGAUCCUGGACCG | CGGUCCAGGAUCUCGAUAU | Chn | [1090-1108] | [1090-1108] |
| 388 | AUGUUUAUGAAGCUGUUCG | CGAACAGCUUCAUAAACAU | Ms | [1879-1897] | [1588-1606] |
| 389 | AAGCUCCUGAGGUAAUGGC | GCCAUUACCUCAGGAGCUU | Rat | [2526-2544] | [2235-2253] |
| 390 | AAGCUCCAUAACUGCUGCU | AGCAGCAGUUAUGGAGCUU | | [217-235] | [217-235] |
| 391 | AGUCAGUACAACUUCAUCG | CGAUGAAGUUGUACUGACU | | [1035-1053] | [1035-1053] |
| 392 | UAUGAAGCUGUUCGAACCC | GGGUUCGAACAGCUUCAUA | Ms | [1884-1902] | [1593-1611] |
| 393 | ACCAUGAAGGUCACAGCUG | CAGCUGUGACCUUCAUGGU | | [1566-1584] | [1371-1389] |
| 394 | AGUGAACACCAUGAAGGUC | GACCUUCAUGGUGUUCACU | | [1559-1577] | [1364-1382] |
| 395 | UCCAUAACUGCUGCUUCAG | CUGAAGCAGCAGUUAUGGA | | [221-239] | [221-239] |
| 396 | UUCGAGAGUUUCUGCAUCG | CGAUGCAGAAACUCUCGAA | | [1615-1633] | [1420-1438] |
| 397 | AGAGGUAAAGCUGUAUCCC | GGGAUACAGCUUUACCUCU | | [2227-2245] | [1936-1954] |
| 398 | AUGGUACAAAAUGCUGAAG | CUUCAGCAUUUUGUACCAU | | [1860-1878] | [1569-1587] |
| 399 | AGUUAGUCAGGUGCUGCUC | GAGCAGCACCUGACUAACU | | [2326-2344] | [2035-2053] |
| 400 | UCCUGCUCUGAUUUCCUCC | GGAGGAAAUCAGAGCAGGA | | [2003-2021] | [1712-1730] |
| 401 | UGCACUUCUGAAGGACUUC | GAAGUCCUUCAGAAGUGCA | | [488-506] | [488-506] |
| 402 | AUUAAAGAAAAUGAGCUGC | GCAGCUCAUUUUCUUUAAU | | [2290-2308] | [1999-2017] |
| 403 | AUAGUAAAAAAUGAGGUGG | CCACCUCAUUUUUUACUAU | | [2176-2194] | [1885-1903] |
| 404 | GAUUUCCUCCUUGCCUUUC | GAAAGGCAAGGAGGAAAUC | | [2012-2030] | [1721-1739] |
| 405 | AUCGUCUUCGAGAGUUUCU | AGAAACUCUCGAAGACGAU | | [1609-1627] | [1414-1432] |
| 406 | AAAAGGCUAGAGGUAAAGC | GCUUUACCUCUAGCCUUUU | | [2219-2237] | [1928-1946] |
| 407 | UGCUGCCAUCUUUUGUGGG | CCCACAAAAGAUGGCAGCA | | [2306-2324] | [2015-2033] |
| 408 | UUGCCAUCCCUUCUGAUCG | CGAUCAGAAGGGAUGGCAA | Rat, Ms | [1594-1612] | [1399-1417] |
| 409 | AACUUCAUCGCAGAUGUGG | CCACAUCUGCGAUGAAGUU | | [1044-1062] | [1044-1062] |
| 410 | UCCCUUCUGAUCGUCUUCG | CGAAGACGAUCAGAAGGGA | | [1600-1618] | [1405-1423] |
| 411 | UCAGAGAACUCUGGAACCC | GGGUUCCAGAGUUCUCUGA | | [888-906] | [888-906] |
| 412 | AAAGAUUCCCAUGCUUGGC | GCCAAGCAUGGGAAUCUUU | | [2397-2415] | [2106-2124] |
| 413 | ACCAAGAGUAUGAGGCUCC | GGAGCCUCAUACUCUUGGU | | [1987-2005] | [1696-1714] |
| 414 | UUUGCCAUCCCUUCUGAUC | GAUCAGAAGGGAUGGCAAA | Rat, Ms | [1593-1611] | [1398-1416] |
| 415 | AGGCUCCUGCUCUGAUUUC | GAAAUCAGAGCAGGAGCCU | | [1999-2017] | [1708-1726] |
| 416 | CUGACCUUAUAUGUGACCC | GGGUCACAUAUAAGGUCAG | | [1944-1962] | [1653-1671] |
| 417 | UUCCUCCUUGCCUUUCUGG | CCAGAAAGGCAAGGAGGAA | | [2015-2033] | [1724-1742] |
| 418 | AUACUGGAGCUGACCAUCC | GGAUGGUCAGCUCCAGUAU | | [2262-2280] | [1971-1989] |
| 419 | AUCACCAAGAGUAUGAGGC | GCCUCAUACUCUUGGUGAU | | [1984-2002] | [1693-1711] |
| 420 | AUGAUGCUGACCCUGAGUC | GACUCAGGGUCAGCAUCAU | | [1695-1713] | [1500-1518] |
| 421 | ACUGACCUUAUAUGUGACC | GGUCACAUAUAAGGUCAGU | | [1943-1961] | [1652-1670] |
| 422 | UUGGAAACUCUGGAGGUCC | GGACCUCCAGAGUUUCCAA | GP, Chn | [1510-1528] | [1315-1333] |
| 423 | UAACUGCUGCUUCAGGAGC | GCUCCUGAAGCAGCAGUUA | | [225-243] | [225-243] |
| 424 | GUGGUCUAUAUCGAGAUCC | GGAUCUCGAUAUAGACCAC | Rat, Ms | [1083-1101] | [1083-1101] |
| 425 | UACAACUUCAUCGCAGAUG | CAUCUGCGAUGAAGUUGUA | | [1041-1059] | [1041-1059] |
| 426 | AUUGUCACCAACGCCCAUG | CAUGGGCGUUGGUGACAAU | | [1179-1197] | [1179-1197] |
| 427 | UAUAUCGAGAUCCUGGACC | GGUCCAGGAUCUCGAUAUA | Chn | [1089-1107] | [1089-1107] |
| 428 | UUCAUCGCAGAUGUGGUGG | CCACCACAUCUGCGAUGAA | Ms | [1047-1065] | [1047-1065] |

TABLE B5
KEAP1 19-mer oligomer pairs kelch-like ECH-associated protein 1

| | | | | Human | Human |
|---|---|---|---|---|---|
| | | | | 45269144: | 45269143: |
| No. | Sense | AntiSense | Other Sp | 186-2060 | 157-2031 |

| | | | | | |
|---|---|---|---|---|---|
| 1 | GGAACGAGUGGCGAAUGAU | AUCAUUCGCCACUCGUUCC | CHMP | [1666-1684] | [1637-1655] |
| 2 | GGGCAAAAAUACAGUCCAA | UUGGACUGUAUUUUUGCCC | | [2077-2095] | [2048-2066] |
| 3 | AGAGGAACGAGUGGCGAAU | AUUCGCCACUCGUUCCUCU | CHMP | [1663-1681] | [1634-1652] |
| 4 | GGAGUAUCAUUGUUUUUGU | ACAAAAACAAUGAUACUCC | CHMP | [2099-2117] | [2070-2088] |
| 5 | GCCUCAUUGAAUUCGCCUA | UAGGCGAAUUCAAUGAGGC | | [589-607] | [560-578] |
| 6 | GGCAAAAAUACAGUCCAAU | AUUGGACUGUAUUUUUGCC | | [2078-2096] | [2049-2067] |
| 7 | GGAUGCCUCAGUGUUAAAA | UUUUAACACUGAGGCAUCC | CHMP | [2183-2201] | [2154-2172] |
| 8 | CGGGACUAAAAGAAAAGAC | GUCUUUUCUUUUAGUCCCG | CHMP | [2126-2144] | [2097-2115] |
| 9 | UCAUUGAAUUCGCCUACAC | GUGUAGGCGAAUUCAAUGA | | [592-610] | [563-581] |
| 10 | GCACUGCAAAUAACCCAUC | GAUGGGUUAUUUGCAGUGC | CHMP | [2146-2164] | [2117-2135] |
| 11 | GGGACUAAAAGAAAAGACA | UGUCUUUUCUUUUAGUCCC | CHMP | [2127-2145] | [2098-2116] |
| 12 | CCGGGACUAAAAGAAAAGA | UCUUUUCUUUUAGUCCCGG | CHMP | [2125-2143] | [2096-2114] |
| 13 | AGAAAAGACAGCACUGCAA | UUGCAGUGCUGUCUUUUCU | CHMP | [2136-2154] | [2107-2125] |
| 14 | CUCAUUGAAUUCGCCUACA | UGUAGGCGAAUUCAAUGAG | | [591-609] | [562-580] |
| 15 | UGAUAAGUAACCCUGUAAU | AUUACAGGGUUACUUAUCA | CHMP | [2528-2546] | [2499-2517] |
| 16 | UGGUGGUGUUGCUUAUCUU | AAGAUAAGCAACACCACCA | | [157-175] | [128-146] |
| 17 | GGGAGUAUCAUUGUUUUUG | CAAAAACAAUGAUACUCCC | CHMP | [2098-2116] | [2069-2087] |
| 18 | UGUUGCUUAUCUUCUGGAA | UUCCAGAAGAUAAGCAACA | CHMP | [163-181] | [134-152] |
| 19 | CCUCAUUGAAUUCGCCUAC | GUAGGCGAAUUCAAUGAGG | | [590-608] | [561-579] |
| 20 | CACCAUGUGAUUUAUUCUU | AAGAAUAAAUCACAUGGUG | | [2381-2399] | [2352-2370] |
| 21 | ACUGCAAAUAACCCAUCUU | AAGAUGGGUUAUUUGCAGU | CHMP | [2148-2166] | [2119-2137] |
| 22 | CUAAAAGAAAAGACAGCAC | GUGCUGUCUUUUCUUUUAG | CHMP | [2131-2149] | [2102-2120] |
| 23 | GCAAAAAUACAGUCCAAUG | CAUUGGACUGUAUUUUUGC | | [2079-2097] | [2050-2068] |
| 24 | UCCUGCACAACUGUAUCUA | UAGAUACAGUUGUGCAGGA | CHMP | [1726-1744] | [1697-1715] |
| 25 | CCCGGGAGUACAUCUACAU | AUGUAGAUGUACUCCCGGG | CHMP | [793-811] | [764-782] |
| 26 | CUGUCUUCAAGGCCAUGUU | AACAUGGCCUUGAAGACAG | CHMP | [499-517] | [470-488] |
| 27 | AGAACAGACUAACUAGUGU | ACACUAGUUAGUCUGUUCU | CHMP | [2563-2581] | [2534-2552] |
| 28 | CACUGCAAAUAACCCAUCU | AGAUGGGUUAUUUGCAGUG | CHMP | [2147-2165] | [2118-2136] |
| 29 | GGACUAAAAGAAAAGACAG | CUGUCUUUUCUUUUAGUCC | CHMP | [2128-2146] | [2099-2117] |
| 30 | ACCGGGACUAAAAGAAAAG | CUUUUCUUUUAGUCCCGGU | CHMP | [2124-2142] | [2095-2113] |
| 31 | CCUGCACAACUGUAUCUAU | AUAGAUACAGUUGUGCAGG | CHMP | [1727-1745] | [1698-1716] |
| 32 | CCUCAAUCGUCUCCUUUAU | AUAAAGGAGACGAUUGAGG | | [1586-1604] | [1557-1575] |
| 33 | UCAUGUACCAGAUCGACAG | CUGUCGAUCUGGUACAUGA | CHMP | [664-682] | [635-653] |
| 34 | GUGUUGCUUAUCUUCUGGA | UCCAGAAGAUAAGCAACAC | CHMP | [162-180] | [133-151] |
| 35 | UGGUGUUGCUUAUCUUCUG | CAGAAGAUAAGCAACACCA | CHMP | [160-178] | [131-149] |
| 36 | CCAUGUGAUUUAUUCUUGG | CCAAGAAUAAAUCACAUGG | | [2383-2401] | [2354-2372] |
| 37 | GCAGCUGUCACCAUGUGAU | AUCACAUGGUGACAGCUGC | | [2373-2391] | [2344-2362] |
| 38 | CAUCUCAAAAGAAGUCCAA | UUGGACUUCUUUUGAGAUG | CHMP | [2205-2223] | [2176-2194] |
| 39 | AGCACUGCAAAUAACCCAU | AUGGGUUAUUUGCAGUGCU | CHMP | [2145-2163] | [2116-2134] |
| 40 | AACCGGGACUAAAAGAAAA | UUUUCUUUUAGUCCCGGUU | CHMP | [2123-2141] | [2094-2112] |
| 41 | ACAAAAACCGGGACUAAAA | UUUUAGUCCCGGUUUUUGU | CHMP | [2118-2136] | [2089-2107] |
| 42 | GUACAAAAACCGGGACUAA | UUAGUCCCGGUUUUUGUAC | CHMP | [2116-2134] | [2087-2105] |
| 43 | UGAGGCACUUUUGUUUCUU | AAGAAACAAAAGUGCCUCA | CHMP | [2058-2076] | [2029-2047] |
| 44 | CCUUAAUUCAGCUGAGUGU | ACACUCAGCUGAAUUAAGG | CHMP | [1634-1652] | [1605-1623] |
| 45 | ACAGUGUGGAGAGGUAUGA | UCAUACCUCUCCACACUGU | CHMP | [1498-1516] | [1469-1487] |
| 46 | AGGUGGUGGUGUUGCUUAU | AUAAGCAACACCACCACCU | | [154-172] | [125-143] |
| 47 | CGCCUCAUUGAAUUCGCCU | AGGCGAAUUCAAUGAGGCG | | [588-606] | [559-577] |
| 48 | GUGUUAAAAUGACAUCUCA | UGAGAUGUCAUUUUAACAC | CHMP | [2193-2211] | [2164-2182] |
| 49 | AGGAUGCCUCAGUGUUAAA | UUUAACACUGAGGCAUCCU | CHMP | [2182-2200] | [2153-2171] |
| 50 | ACGUCACACUGCAGGUCAA | UUGACCUGCAGUGUGACGU | CHMP | [418-436] | [389-407] |
| 51 | CGAUGUGGAAACAGAGACG | CGUCUCUGUUUCCACAUCG | CHMP | [1796-1814] | [1767-1785] |
| 52 | CGCUACGAUGUGGAAACAG | CUGUUUCCACAUCGUAGCG | CHMP | [1791-1809] | [1762-1780] |
| 53 | AGCGCUACGAUGUGGAAAC | GUUUCCACAUCGUAGCGCU | CHMP | [1789-1807] | [1760-1778] |
| 54 | GUCCUGCACAACUGUAUCU | AGAUACAGUUGUGCAGGAC | CHMP | [1725-1743] | [1696-1714] |
| 55 | CAACAGUGUGGAGAGGUAU | AUACCUCUCCACACUGUUG | CHMP | [1496-1514] | [1467-1485] |
| 56 | UGCAUCAACUGGGUCAAGU | ACUUGACCCAGUUGAUGCA | CHMP | [930-948] | [901-919] |
| 57 | GAACGGUGCUGUCAUGUAC | GUACAUGACAGCACCGUUC | | [653-671] | [624-642] |
| 58 | UCCAAGGAAAAUAAAGAAC | GUUCUUUAUUUUCCUUGGA | CHMP | [2549-2567] | [2520-2538] |
| 59 | UUGAUAAGUAACCCUGUAA | UUACAGGGUUACUUAUCAA | CHMP | [2527-2545] | [2498-2516] |
| 60 | UGGACAGUUAUUUUGUUGA | UCAACAAAAUAACUGUCCA | CHMP | [2512-2530] | [2483-2501] |
| 61 | GUACAUAGAAGCCACCGGA | UCCGGUGGCUUCUAUGUAC | CHMP | [2475-2493] | [2446-2464] |
| 62 | UCAGUGUUAAAAUGACAUC | GAUGUCAUUUUAACACUGA | CHMP | [2190-2208] | [2161-2179] |
| 63 | CUCAGUGUUAAAAUGACAU | AUGUCAUUUUAACACUGAG | CHMP | [2189-2207] | [2160-2178] |
| 64 | CAAAAAUACAGUCCAAUGG | CCAUUGGACUGUAUUUUUG | | [2080-2098] | [2051-2069] |
| 65 | UCAAGUACGACUGCGAACA | UGUUCGCAGUCGUACUUGA | CHMP | [943-961] | [914-932] |
| 66 | AGAUUGGCUGUGUGGAGUU | AACUCCACACAGCCAAUCU | | [763-781] | [734-752] |
| 67 | UGAACGGUGCUGUCAUGUA | UACAUGACAGCACCGUUCA | | [652-670] | [623-641] |
| 68 | GGAGCGCCUCAUUGAAUUC | GAAUUCAAUGAGGCGCUCC | | [584-602] | [555-573] |
| 69 | GGUGUCCAUUGAGGGUAUC | GAUACCCUCAAUGGACACC | CHMP | [551-569] | [522-540] |
| 70 | AGUGUUAAAAUGACAUCUC | GAGAUGUCAUUUUAACACU | CHMP | [2192-2210] | [2163-2181] |
| 71 | CAGUGUUAAAAUGACAUCU | AGAUGUCAUUUUAACACUG | CHMP | [2191-2209] | [2162-2180] |
| 72 | CCUCAGUGUUAAAAUGACA | UGUCAUUUUAACACUGAGG | CHMP | [2188-2206] | [2159-2177] |
| 73 | UGUACAAAAACCGGGACUA | UAGUCCCGGUUUUUGUACA | CHMP | [2115-2133] | [2086-2104] |
| 74 | GCACUUUUGUUUCUUGGGC | GCCCAAGAAACAAAAGUGC | CHMP | [2062-2080] | [2033-2051] |
| 75 | GAGGCACUUUUGUUUCUUG | CAAGAAACAAAAGUGCCUC | CHMP | [2059-2077] | [2030-2048] |
| 76 | ACAGUGUGGAGUGUUACGA | UCGUAACACUCCACACUGU | CHMP | [1921-1939] | [1892-1910] |
| 77 | CCUUUGGCAUCAUGAACGA | UCGUUCAUGAUGCCAAAGG | CHMP | [373-391] | [344-362] |
| 78 | ACUUUUGUUUCUUGGGCAA | UUGCCCAAGAAACAAAAGU | CHMP | [2064-2082] | [2035-2053] |
| 79 | GCAGAUUGACCAGCAGAAC | GUUCUGCUGGUCAAUCUGC | CHMP | [2030-2048] | [2001-2019] |
| 80 | GGACAGUGUGGAGUGUUAC | GUAACACUCCACACUGUCC | CHMP | [1919-1937] | [1890-1908] |
| 81 | GGAAACAGAGACGUGGACU | AGUCCACGUCUCUGUUUCC | CHMP | [1802-1820] | [1773-1791] |
| 82 | UGGAAACAGAGACGUGGAC | GUCCACGUCUCUGUUUCCA | CHMP | [1801-1819] | [1772-1790] |
| 83 | GAUUUAUUCUUGGAUACCU | AGGUAUCCAAGAAUAAAUC | CHMP | [2389-2407] | [2360-2378] |
| 84 | UUUGUUUCUUGGGCAAAAA | UUUUUGCCCAAGAAACAAA | CHMP | [2067-2085] | [2038-2056] |
| 85 | CACUUUUGUUUCUUGGGCA | UGCCCAAGAAACAAAAGUG | CHMP | [2063-2081] | [2034-2052] |
| 86 | CUGGACAGUGUGGAGUGUU | AACACUCCACACUGUCCAG | CHMP | [1917-1935] | [1888-1906] |
| 87 | CCGGGAGUACAUCUACAUG | CAUGUAGAUGUACUCCCGG | CHMP | [794-812] | [765-783] |
| 88 | CCAAGGAAAAUAAAGAACA | UGUUCUUUAUUUUCCUUGG | CHMP | [2550-2568] | [2521-2539] |
| 89 | GGAAAAUAAAGAACAGACU | AGUCUGUUCUUUAUUUUCC | CHMP | [2554-2572] | [2525-2543] |
| 90 | UGGCGAAUGAUCACAGCAA | UUGCUGUGAUCAUUCGCCA | CHMP | [1674-1692] | [1645-1663] |
| 91 | CCGGAUGGACAGUUAUUUU | AAAAUAACUGUCCAUCCGG | CHMP | [2507-2525] | [2478-2496] |
| 92 | AGCAGGCCUUUGGCAUCAU | AUGAUGCCAAAGGCCUGCU | CHMP | [367-385] | [338-356] |
| 93 | GUGCUGUCAUGUACCAGAU | AUCUGGUACAUGACAGCAC | | [658-676] | [629-647] |
| 94 | CAAGGAAAAUAAAGAACAG | CUGUUCUUUAUUUUCCUUG | CHMP | [2551-2569] | [2522-2540] |
| 95 | GCUGUCACCAUGUGAUUUA | UAAAUCACAUGGUGACAGC | | [2376-2394] | [2347-2365] |
| 96 | CCGCCUUAAUUCAGCUGAG | CUCAGCUGAAUUAAGGCGG | CHMP | [1631-1649] | [1602-1620] |
| 97 | GGAGGAUCAUACCAAGCAG | CUGCUUGGUAUGAUCCUCC | CHMP | [353-371] | [324-342] |
| 98 | UGGUGUCCAUUGAGGGUAU | AUACCCUCAAUGGACACCA | CHMP | [550-568] | [521-539] |
| 99 | CGGAUGGACAGUUAUUUUG | CAAAAUAACUGUCCAUCCG | CHMP | [2508-2526] | [2479-2497] |
| 100 | GCCUCAGUGUUAAAAUGAC | GUCAUUUUAACACUGAGGC | CHMP | [2187-2205] | [2158-2176] |
| 101 | GCGUCCUGCACAACUGUAU | AUACAGUUGUGCAGGACGC | CHMP | [1723-1741] | [1694-1712] |
| 102 | CGAGUGGCGAAUGAUCACA | UGUGAUCAUUCGCCACUCG | CHMP | [1670-1688] | [1641-1659] |
| 103 | CCCUGGAGGAUCAUACCAA | UUGGUAUGAUCCUCCAGGG | CHMP | [349-367] | [320-338] |
| 104 | GGAUGGACAGUUAUUUUGU | ACAAAAUAACUGUCCAUCC | CHMP | [2509-2527] | [2480-2498] |
| 105 | GCAAUGAACACCAUCCGAA | UUCGGAUGGUGUUCAUUGC | CHMP | [1689-1707] | [1660-1678] |
| 106 | AGGAAAAUAAAGAACAGAC | GUCUGUUCUUUAUUUUCCU | CHMP | [2553-2571] | [2524-2542] |
| 107 | CCUGUAAUUUUCCAAGGAA | UUCCUUGGAAAAUUACAGG | CHMP | [2539-2557] | [2510-2528] |
| 108 | CCACCGGAUGGACAGUUAU | AUAACUGUCCAUCCGGUGG | CHMP | [2504-2522] | [2475-2493] |
| 109 | AGAAGUCCAAAGCGGGAAU | AUUCCCGCUUUGGACUUCU | CHMP | [2214-2232] | [2185-2203] |
| 110 | CGGGACAAACCGCCUUAAU | AUUAAGGCGGUUUGUCCCG | CHMP | [1622-1640] | [1593-1611] |
| 111 | ACACCCUGGAGGAUCAUAC | GUAUGAUCCUCCAGGGUGU | CHMP | [346-364] | [317-335] |
| 112 | CUACACCCUGGAGGAUCAU | AUGAUCCUCCAGGGUGUAG | CHMP | [344-362] | [315-333] |
| 113 | UGAGCAGAUUGGCUGUGUG | CACACAGCCAAUCUGCUCA | | [758-776] | [729-747] |
| 114 | GUACCAGAUCGACAGCGUU | AACGCUGUCGAUCUGGUAC | CHMP | [668-686] | [639-657] |
| 115 | GUGGUGUCCAUUGAGGGUA | UACCCUCAAUGGACACCAC | CHMP | [549-567] | [520-538] |
| 116 | CCCUGUAAUUUUCCAAGGA | UCCUUGGAAAAUUACAGGG | CHMP | [2538-2556] | [2509-2527] |
| 117 | UAACCCUGUAAUUUUCCAA | UUGGAAAAUUACAGGGUUA | CHMP | [2535-2553] | [2506-2524] |
| 118 | GUAACCCUGUAAUUUUCCA | UGGAAAAUUACAGGGUUAC | CHMP | [2534-2552] | [2505-2523] |
| 119 | UCAUACCAAGCAGGCCUUU | AAAGGCCUGCUUGGUAUGA | CHMP | [359-377] | [330-348] |
| 120 | CGCCUUAAUUCAGCUGAGU | ACUCAGCUGAAUUAAGGCG | CHMP | [1632-1650] | [1603-1621] |
| 121 | ACCGCCUUAAUUCAGCUGA | UCAGCUGAAUUAAGGCGGU | CHMP | [1630-1648] | [1601-1619] |
| 122 | UCGUCUCCUUUAUGCCGUG | CACGGCAUAAAGGAGACGA | | [1592-1610] | [1563-1581] |
| 123 | UGGAGGAUCAUACCAAGCA | UGCUUGGUAUGAUCCUCCA | CHMP | [352-370] | [323-341] |
| 124 | UCAUCGAUGGCCACAUCUA | UAGAUGUGGCCAUCGAUGA | CHMP | [1444-1462] | [1415-1433] |
| 125 | GCUACCUGGAGGCUUACAA | UUGUAAGCCUCCAGGUAGC | CHMP | [1204-1222] | [1175-1193] |
| 126 | AGCAAGAGGAGUUCUUCAA | UUGAAGAACUCCUCUUGCU | CHMP | [832-850] | [803-821] |
| 127 | AGUACAUCUACAUGCAUUU | AAAUGCAUGUAGAUGUACU | CHMP | [799-817] | [770-788] |
| 128 | CUGAGCAGAUUGGCUGUGU | ACACAGCCAAUCUGCUCAG | | [757-775] | [728-746] |
| 129 | CAGACUAACUAGUGUCUUU | AAAGACACUAGUUAGUCUG | CHMP | [2567-2585] | [2538-2556] |
| 130 | GGAGUGUUACGACCCAGAU | AUCUGGGUCGUAACACUCC | CHMP | [1928-1946] | [1899-1917] |
| 131 | UGGAGAGGUAUGAGCCAGA | UCUGGCUCAUACCUCUCCA | CHMP | [1504-1522] | [1475-1493] |
| 132 | CCAUGACCAAUCAGUGGUC | GACCACUGAUUGGUCAUGG | CHMP | [1378-1396] | [1349-1367] |
| 133 | AGCUGCAGAAGUGCGAGAU | AUCUCGCACUUCUGCAGCU | CHMP | [1036-1054] | [1007-1025] |
| 134 | AGAUGCAGCUGCAGAAGUG | CACUUCUGCAGCUGCAUCU | CHMP | [1030-1048] | [1001-1019] |
| 135 | CUGUAAUUUUCCAAGGAAA | UUUCCUUGGAAAAUUACAG | CHMP | [2540-2558] | [2511-2529] |
| 136 | CUGUCACCAUGUGAUUUAU | AUAAAUCACAUGGUGACAG | | [2377-2395] | [2348-2366] |
| 137 | CAGCUGUCACCAUGUGAUU | AAUCACAUGGUGACAGCUG | | [2374-2392] | [2345-2363] |
| 138 | GACCAGCAGAACUGUACCU | AGGUACAGUUCUGCUGGUC | CHMP | [2037-2055] | [2008-2026] |
| 139 | GGGAGAAUCUACGUCCUUG | CAAGGACGUAGAUUCUCCC | CHMP | [1875-1893] | [1846-1864] |
| 140 | ACGGGACAAACCGCCUUAA | UUAAGGCGGUUUGUCCCGU | CHMP | [1621-1639] | [1592-1610] |
| 141 | CCCAUGACCAAUCAGUGGU | ACCACUGAUUGGUCAUGGG | CHMP | [1377-1395] | [1348-1366] |
| 142 | AGGAGUUCUUCAACCUGUC | GACAGGUUGAAGAACUCCU | CHMP, Rat, Ms | [838-856] | [809-827] |
| 143 | GCAAGAGGAGUUCUUCAAC | GUUGAAGAACUCCUCUUGC | CHMP | [833-851] | [804-822] |
| 144 | CCAAGCAAGAGGAGUUCUU | AAGAACUCCUCUUGCUUGG | CHMP | [829-847] | [800-818] |
| 145 | GAAGUCCAAAGCGGGAAUC | GAUUCCCGCUUUGGACUUC | CHMP | [2215-2233] | [2186-2204] |
| 146 | GGCUAUGAUGGUCACACGU | ACGUGUGACCAUCAUAGCC | CHMP | [1896-1914] | [1867-1885] |
| 147 | GGAGAAUCUACGUCCUUGG | CCAAGGACGUAGAUUCUCC | CHMP | [1876-1894] | [1847-1865] |
| 148 | CGAACUUCCUGCAGAUGCA | UGCAUCUGCAGGAAGUUCG | CHMP | [1018-1036] | [989-1007] |
| 149 | CCUGCAUCAACUGGGUCAA | UUGACCCAGUUGAUGCAGG | CHMP | [928-946] | [899-917] |
| 150 | UGGCCAAGCAAGAGGAGUU | AACUCCUCUUGCUUGGCCA | CHMP | [826-844] | [797-815] |
| 151 | CUGUCAUGUACCAGAUCGA | UCGAUCUGGUACAUGACAG | CHMP | [661-679] | [632-650] |
| 152 | GGUGCUGUCAUGUACCAGA | UCUGGUACAUGACAGCACC | | [657-675] | [628-646] |
| 153 | ACCGGAUGGACAGUUAUUU | AAAUAACUGUCCAUCCGGU | CHMP | [2506-2524] | [2477-2495] |
| 154 | GCCUGUACAUAGAAGCCAC | GUGGCUUCUAUGUACAGGC | CHMP | [2471-2489] | [2442-2460] |
| 155 | UGGGCAAAAAUACAGUCCA | UGGACUGUAUUUUUGCCCA | | [2076-2094] | [2047-2065] |
| 156 | AGGCCUUUGGCAUCAUGAA | UUCAUGAUGCCAAAGGCCU | CHMP | [370-388] | [341-359] |
| 157 | UCCUCAAUCGUCUCCUUUA | UAAAGGAGACGAUUGAGGA | | [1585-1603] | [1556-1574] |
| 158 | CCUGGAGGAUCAUACCAAG | CUUGGUAUGAUCCUCCAGG | CHMP | [350-368] | [321-339] |
| 159 | GUACAUCUACAUGCAUUUU | AAAAUGCAUGUAGAUGUAC | CHMP | [800-818] | [771-789] |
| 160 | ACAGACUAACUAGUGUCUU | AAGACACUAGUUAGUCUGU | CHMP | [2566-2584] | [2537-2555] |
| 161 | GGCCUGUACAUAGAAGCCA | UGGCUUCUAUGUACAGGCC | CHMP | [2470-2488] | [2441-2459] |
| 162 | CUGUACCUGUUGAGGCACU | AGUGCCUCAACAGGUACAG | CHMP | [2048-2066] | [2019-2037] |
| 163 | CCAGAUACAGACACCUGGA | UCCAGGUGUCUGUAUCUGG | CHMP | [1941-1959] | [1912-1930] |
| 164 | CGUCCUUGGAGGCUAUGAU | AUCAUAGCCUCCAAGGACG | CHMP | [1886-1904] | [1857-1875] |
| 165 | CACAACUGUAUCUAUGCUG | CAGCAUAGAUACAGUUGUG | CHMP | [1731-1749] | [1702-1720] |
| 166 | CCAACUUCGCUGAGCAGAU | AUCUGCUCAGCGAAGUUGG | CHMP | [748-766] | [719-737] |
| 167 | ACGGUGCUGUCAUGUACCA | UGGUACAUGACAGCACCGU | | [655-673] | [626-644] |
| 168 | AGUGUGUCCUCCACGUCAU | AUGACGUGGAGGACACACU | CHMP | [634-652] | [605-623] |
| 169 | AGAAGUGUGUCCUCCACGU | ACGUGGAGGACACACUUCU | CHMP | [631-649] | [602-620] |
| 170 | UGGAGGUGGUGUCCAUUGA | UCAAUGGACACCACCUCCA | CHMP, Rat | [544-562] | [515-533] |
| 171 | AGACUAACUAGUGUCUUUC | GAAAGACACUAGUUAGUCU | CHMP | [2568-2586] | [2539-2557] |
| 172 | GAACAGACUAACUAGUGUC | GACACUAGUUAGUCUGUUC | CHMP | [2564-2582] | [2535-2553] |
| 173 | CAGGUCAAGUACCAGGAUG | CAUCCUGGUACUUGACCUG | CHMP | [429-447] | [400-418] |
| 174 | CAGAACUGUACCUGUUGAG | CUCAACAGGUACAGUUCUG | CHMP | [2043-2061] | [2014-2032] |
| 175 | CCAGCAGAACUGUACCUGU | ACAGGUACAGUUCUGCUGG | CHMP | [2039-2057] | [2010-2028] |
| 176 | GCCUUAAUUCAGCUGAGUG | CACUCAGCUGAAUUAAGGC | CHMP | [1633-1651] | [1604-1622] |
| 177 | GUCCUCAAUCGUCUCCUUU | AAAGGAGACGAUUGAGGAC | | [1584-1602] | [1555-1573] |
| 178 | UGUCCUCAAUCGUCUCCUU | AAGGAGACGAUUGAGGACA | | [1583-1601] | [1554-1572] |
| 179 | GAGGAGUUCUUCAACCUGU | ACAGGUUGAAGAACUCCUC | CHMP, Rat, Ms | [837-855] | [808-826] |
| 180 | GACUAACUAGUGUCUUUCA | UGAAAGACACUAGUUAGUC | CHMP | [2569-2587] | [2540-2558] |
| 181 | CACCGGAUGGACAGUUAUU | AAUAACUGUCCAUCCGGUG | CHMP | [2505-2523] | [2476-2494] |
| 182 | GUCACCAUGUGAUUUAUUC | GAAUAAAUCACAUGGUGAC | | [2379-2397] | [2350-2368] |
| 183 | ACAUCUCAAAAGAAGUCCA | UGGACUUCUUUUGAGAUGU | CHMP | [2204-2222] | [2175-2193] |
| 184 | UGACAUCUCAAAAGAAGUC | GACUUCUUUUGAGAUGUCA | CHMP | [2202-2220] | [2173-2191] |
| 185 | CUGUUGAGGCACUUUUGUU | AACAAAAGUGCCUCAACAG | CHMP | [2054-2072] | [2025-2043] |
| 186 | GUACCUGUUGAGGCACUUU | AAAGUGCCUCAACAGGUAC | CHMP | [2050-2068] | [2021-2039] |
| 187 | UGUACCUGUUGAGGCACUU | AAGUGCCUCAACAGGUACA | CHMP | [2049-2067] | [2020-2038] |
| 188 | GAAGCAGAUUGACCAGCAG | CUGCUGGUCAAUCUGCUUC | CHMP | [2027-2045] | [1998-2016] |
| 189 | CAGAUACAGACACCUGGAG | CUCCAGGUGUCUGUAUCUG | CHMP | [1942-1960] | [1913-1931] |
| 190 | UGGAGUGUUACGACCCAGA | UCUGGGUCGUAACACUCCA | CHMP | [1927-1945] | [1898-1916] |
| 191 | ACACGUUCCUGGACAGUGU | ACACUGUCCAGGAACGUGU | CHMP | [1909-1927] | [1880-1898] |
| 192 | GGAGGCUAUGAUGGUCACA | UGUGACCAUCAUAGCCUCC | CHMP | [1893-1911] | [1864-1882] |
| 193 | CUGAGUGUUACUACCCAGA | UCUGGGUAGUAACACUCAG | CHMP | [1645-1663] | [1616-1634] |
| 194 | GCUGAGUGUUACUACCCAG | CUGGGUAGUAACACUCAGC | CHMP | [1644-1662] | [1615-1633] |
| 195 | CCUGUCUUCAAGGCCAUGU | ACAUGGCCUUGAAGACAGG | CHMP | [498-516] | [469-487] |
| 196 | ACCCUGUAAUUUUCCAAGG | CCUUGGAAAAUUACAGGGU | CHMP | [2537-2555] | [2508-2526] |
| 197 | UGUCACCAUGUGAUUUAUU | AAUAAAUCACAUGGUGACA | | [2378-2396] | [2349-2367] |
| 198 | UACCUGUUGAGGCACUUUU | AAAAGUGCCUCAACAGGUA | CHMP | [2051-2069] | [2022-2040] |
| 199 | AGAUUGACCAGCAGAACUG | CAGUUCUGCUGGUCAAUCU | CHMP | [2032-2050] | [2003-2021] |
| 200 | AGCAGAUUGACCAGCAGAA | UUCUGCUGGUCAAUCUGCU | CHMP | [2029-2047] | [2000-2018] |
| 201 | GGAAGCAGAUUGACCAGCA | UGCUGGUCAAUCUGCUUCC | CHMP | [2026-2044] | [1997-2015] |
| 202 | GAGGCUAUGAUGGUCACAC | GUGUGACCAUCAUAGCCUC | CHMP | [1894-1912] | [1865-1883] |
| 203 | AGCUGAGUGUUACUACCCA | UGGGUAGUAACACUCAGCU | CHMP | [1643-1661] | [1614-1632] |
| 204 | GGUCAAGUACGACUGCGAA | UUCGCAGUCGUACUUGACC | CHMP | [941-959] | [912-930] |
| 205 | ACAUCUACAUGCAUUUUGG | CCAAAAUGCAUGUAGAUGU | CHMP | [802-820] | [773-791] |
| 206 | GUGUCCUCCACGUCAUGAA | UUCAUGACGUGGAGGACAC | CHMP | [637-655] | [608-626] |
| 207 | GCCUUUGGCAUCAUGAACG | CGUUCAUGAUGCCAAAGGC | CHMP | [372-390] | [343-361] |
| 208 | UGGAGGCUAUGAUGGUCAC | GUGACCAUCAUAGCCUCCA | CHMP | [1892-1910] | [1863-1881] |
| 209 | GGCCUUUGGCAUCAUGAAC | GUUCAUGAUGCCAAAGGCC | CHMP | [371-389] | [342-360] |
| 210 | UGCAAGGACUACCUGGUCA | UGACCAGGUAGUCCUUGCA | CHMP | [1074-1092] | [1045-1063] |
| 211 | CGGGAGUACAUCUACAUGC | GCAUGUAGAUGUACUCCCG | CHMP | [795-813] | [766-784] |
| 212 | UCAUGAACGGUGCUGUCAU | AUGACAGCACCGUUCAUGA | | [649-667] | [620-638] |
| 213 | CCCUCUGGAAAUGUGGUUC | GAACCACAUUUCCAGAGGG | CHMP | [2442-2460] | [2413-2431] |
| 214 | AGCUGUGUGACGUCACACU | AGUGUGACGUCACACAGCU | CHMP | [409-427] | [380-398] |
| 215 | CUAUGAUGGUCACACGUUC | GAACGUGUGACCAUCAUAG | CHMP | [1898-1916] | [1869-1887] |
| 216 | GAAAUGUGGUUCCCAGGGA | UCCCUGGGAACCACAUUUC | CHMP | [2449-2467] | [2420-2438] |
| 217 | CUGGAAAUGUGGUUCCCAG | CUGGGAACCACAUUUCCAG | CHMP | [2446-2464] | [2417-2435] |
| 218 | CUAUGAUGGUCAGGACCAG | CUGGUCCUGACCAUCAUAG | CHMP | [1757-1775] | [1728-1746] |
| 219 | CACUGCAGGUCAAGUACCA | UGGUACUUGACCUGCAGUG | CHMP | [424-442] | [395-413] |
| 220 | UGUUGAGGCACUUUUGUUU | AAACAAAAGUGCCUCAACA | CHMP | [2055-2073] | [2026-2044] |
| 221 | AGAGACGUGGACUUUCGUA | UACGAAAGUCCACGUCUCU | CHMP | [1808-1826] | [1779-1797] |
| 222 | GCCAAGCAAGAGGAGUUCU | AGAACUCCUCUUGCUUGGC | CHMP | [828-846] | [799-817] |
| 223 | AAAUGUGGUUCCCAGGGAU | AUCCCUGGGAACCACAUUU | CHMP | [2450-2468] | [2421-2439] |
| 224 | UGGCUGUCCUCAAUCGUCU | AGACGAUUGAGGACAGCCA | CHMP | [1579-1597] | [1550-1568] |
| 225 | UGCAGAUGCAGCUGCAGAA | UUCUGCAGCUGCAUCUGCA | CHMP | [1027-1045] | [998-1016] |

TABLE B6
KEAP1 - 19-mer oligomer pairs kelch-like ECH-associated

| | | | | Human- | |
|---|---|---|---|---|---|
| | | | | 45269144: | Human- |
| No. | Sense | AntiSense | Other Sp | 186-2060 | 45269143: 157-2031 |

| | | | | | |
|---|---|---|---|---|---|
| 1 | GGAUGGGCCUGUACAUAGA | UCUAUGUACAGGCCCAUCC | Chmp | [2465-2483] | [2436-2454] |
| 2 | CAUGGAGCGCCUCAUUGAA | UUCAAUGAGGCGCUCCAUG | | [581-599] | [552-570] |
| 3 | CAUUGUUUUUGUACAAAAA | UUUUUGUACAAAAACAAUG | Chmp | [2106-2124] | [2077-2095] |
| 4 | GCUACGAUGUGGAAACAGA | UCUGUUUCCACAUCGUAGC | Chmp | [1792-1810] | [1763-1781] |
| 5 | GAAUGAUCACAGCAAUGAA | UUCAUUGCUGUGAUCAUUC | Chmp | [1678-1696] | [1649-1667] |
| 6 | GCAUCAACUGGGUCAAGUA | UACUUGACCCAGUUGAUGC | GP, Chn, Chmp | [931-949] | [902-920] |
| 7 | AAAUGACAUCUCAAAAGAA | UUCUUUUGAGAUGUCAUUU | Chmp | [2199-2217] | [2170-2188] |
| 8 | CAUCCAGCCCUGUCUUCAA | UUGAAGACAGGGCUGGAUG | Chmp | [490-508] | [461-479] |
| 9 | GGCGAAUGAUCACAGCAAU | AUUGCUGUGAUCAUUCGCC | Chmp | [1675-1693] | [1646-1664] |
| 10 | GAAAAGACAGCACUGCAAA | UUUGCAGUGCUGUCUUUUC | Chmp | [2137-2155] | [2108-2126] |
| 11 | CCAGGAUGCCUCAGUGUUA | UAACACUGAGGCAUCCUGG | Chmp | [2180-2198] | [2151-2169] |
| 12 | UGUUAAAAUGACAUCUCAA | UUGAGAUGUCAUUUUAACA | Chmp | [2194-2212] | [2165-2183] |
| 13 | UGGACAGUGUGGAGUGUUA | UAACACUCCACACUGUCCA | Chmp | [1918-1936] | [1889-1907] |
| 14 | GAGUAUCAUUGUUUUUGUA | UACAAAAACAAUGAUACUC | Chmp | [2100-2118] | [2071-2089] |
| 15 | GAUGGGCCUGUACAUAGAA | UUCUAUGUACAGGCCCAUC | Chmp | [2466-2484] | [2437-2455] |
| 16 | AAACCGGGACUAAAAGAAA | UUUCUUUUAGUCCCGGUUU | Chmp | [2122-2140] | [2093-2111] |
| 17 | GUGUUACGACCCAGAUACA | UGUAUCUGGGUCGUAACAC | Chmp | [1931-1949] | [1902-1920] |
| 18 | GCAAGGACUACCUGGUCAA | UUGACCAGGUAGUCCUUGC | Chmp | [1075-1093] | [1046-1064] |
| 19 | CAUCGAUGGCCACAUCUAU | AUAGAUGUGGCCAUCGAUG | Chmp | [1445-1463] | [1416-1434] |
| 20 | ACAGUUAUUUUGUUGAUAA | UUAUCAACAAAAUAACUGU | Chmp | [2515-2533] | [2486-2504] |
| 21 | ACAACAGUGUGGAGAGGUA | UACCUCUCCACACUGUUGU | Chmp | [1495-1513] | [1466-1484] |
| 22 | GAGUGUUACGACCCAGAUA | UAUCUGGGUCGUAACACUC | Chmp | [1929-1947] | [1900-1918] |
| 23 | GUUACGACCCAGAUACAGA | UCUGUAUCUGGGUCGUAAC | Chmp | [1933-1951] | [1904-1922] |
| 24 | GGACAGUUAUUUUGUUGAU | AUCAACAAAAUAACUGUCC | Chmp | [2513-2531] | [2484-2502] |
| 25 | GAAAAUAAAGAACAGACUA | UAGUCUGUUCUUUAUUUUC | Chmp | [2555-2573] | [2526-2544] |
| 26 | GGGACAAACCGCCUUAAUU | AAUUAAGGCGGUUUGUCCC | Chmp | [1623-1641] | [1594-1612] |
| 27 | AGGAACGAGUGGCGAAUGA | UCAUUCGCCACUCGUUCCU | Chmp | [1665-1683] | [1636-1654] |
| 28 | UCAAGGCCAUGUUCACCAA | UUGGUGAACAUGGCCUUGA | GP, Chn, Chmp | [505-523] | [476-494] |
| 29 | AAGACAGCACUGCAAAUAA | UUAUUUGCAGUGCUGUCUU | Chmp | [2140-2158] | [2111-2129] |
| 30 | GAGUGUUACUACCCAGAGA | UCUCUGGGUAGUAACACUC | Chmp | [1647-1665] | [1618-1636] |
| 31 | GUAUCAUUGUUUUUGUACA | UGUACAAAAACAAUGAUAC | Chmp | [2102-2120] | [2073-2091] |
| 32 | UUAAAAUGACAUCUCAAAA | UUUUGAGAUGUCAUUUUAA | Chmp | [2196-2214] | [2167-2185] |
| 33 | CUACGAUGUGGAAACAGAG | CUCUGUUUCCACAUCGUAG | Chmp | [1793-1811] | [1764-1782] |
| 34 | UCAACUGGGUCAAGUACGA | UCGUACUUGACCCAGUUGA | GP, Chn, Chmp | [934-952] | [905-923] |
| 35 | GUGGAAACAGAGACGUGGA | UCCACGUCUCUGUUUCCAC | Chmp | [1800-1818] | [1771-1789] |
| 36 | GGGAGUACAUCUACAUGCA | UGCAUGUAGAUGUACUCCC | Chmp | [796-814] | [767-785] |
| 37 | CAGGAUGCCUCAGUGUUAA | UUAACACUGAGGCAUCCUG | Chmp | [2181-2199] | [2152-2170] |
| 38 | UCAUUGUUUUUGUACAAAA | UUUUGUACAAAAACAAUGA | Chmp | [2105-2123] | [2076-2094] |
| 39 | UACAAAAACCGGGACUAAA | UUUAGUCCCGGUUUUUGUA | Chmp | [2117-2135] | [2088-2106] |
| 40 | CAGUUAUUUUGUUGAUAAG | CUUAUCAACAAAAUAACUG | Chmp | [2516-2534] | [2487-2505] |
| 41 | GUUAAAAUGACAUCUCAAA | UUUGAGAUGUCAUUUUAAC | Chmp | [2195-2213] | [2166-2184] |
| 42 | GAUGCCUCAGUGUUAAAAU | AUUUUAACACUGAGGCAUC | Chmp | [2184-2202] | [2155-2173] |
| 43 | GAGCGCUACGAUGUGGAAA | UUUCCACAUCGUAGCGCUC | Chmp | [1788-1806] | [1759-1777] |
| 44 | CUACGUCCUUGGAGGCUAU | AUAGCCUCCAAGGACGUAG | Chmp | [1883-1901] | [1854-1872] |
| 45 | UGGUCAAGAUCUUCGAGGA | UCCUCGAAGAUCUUGACCA | Chmp | [1087-1105] | [1058-1076] |
| 46 | GUUGAUAAGUAACCCUGUA | UACAGGGUUACUUAUCAAC | Chmp | [2526-2544] | [2497-2515] |
| 47 | GCGCUACGAUGUGGAAACA | UGUUUCCACAUCGUAGCGC | Chmp | [1790-1808] | [1761-1779] |
| 48 | UCAUGGAGCGCCUCAUUGA | UCAAUGAGGCGCUCCAUGA | | [580-598] | [551-569] |
| 49 | AAAAUGACAUCUCAAAAGA | UCUUUUGAGAUGUCAUUUU | Chmp | [2198-2216] | [2169-2187] |
| 50 | CAGUGUGGAGUGUUACGAC | GUCGUAACACUCCACACUG | Chmp | [1922-1940] | [1893-1911] |
| 51 | ACCUGGUCAAGAUCUUCGA | UCGAAGAUCUUGACCAGGU | Chmp | [1084-1102] | [1055-1073] |
| 52 | GAGAAUCUACGUCCUUGGA | UCCAAGGACGUAGAUUCUC | Chmp | [1877-1895] | [1848-1866] |
| 53 | AACGAGUGGCGAAUGAUCA | UGAUCAUUCGCCACUCGUU | Chmp | [1668-1686] | [1639-1657] |
| 54 | GACAGUUAUUUUGUUGAUA | UAUCAACAAAAUAACUGUC | Chmp | [2514-2532] | [2485-2503] |
| 55 | AAAAUAAAGAACAGACUAA | UUAGUCUGUUCUUUAUUUU | Chmp | [2556-2574] | [2527-2545] |
| 56 | UGUAAUUUUCCAAGGAAAA | UUUUCCUUGGAAAAUUACA | Chmp | [2541-2559] | [2512-2530] |
| 57 | GAACGAGUGGCGAAUGAUC | GAUCAUUCGCCACUCGUUC | Chmp | [1667-1685] | [1638-1656] |
| 58 | UCAGCUACCUGGAGGCUUA | UAAGCCUCCAGGUAGCUGA | Chmp | [1201-1219] | [1172-1190] |
| 59 | GAUGGACAGUUAUUUUGUU | AACAAAAUAACUGUCCAUC | Chmp | [2510-2528] | [2481-2499] |
| 60 | UGUGAUUUAUUCUUGGAUA | UAUCCAAGAAUAAAUCACA | Chmp | [2386-2404] | [2357-2375] |
| 61 | CAGGCCUUUGGCAUCAUGA | UCAUGAUGCCAAAGGCCUG | Chmp | [369-387] | [340-358] |
| 62 | GUUAUUUUGUUGAUAAGUA | UACUUAUCAACAAAAUAAC | Chmp | [2518-2536] | [2489-2507] |
| 63 | AAAAGACAGCACUGCAAAU | AUUUGCAGUGCUGUCUUUU | Chmp | [2138-2156] | [2109-2127] |
| 64 | CAAAAACCGGGACUAAAAG | CUUUUAGUCCCGGUUUUUG | Chmp | [2119-2137] | [2090-2108] |
| 65 | AUCUCAAAAGAAGUCCAAA | UUUGGACUUCUUUUGAGAU | Chmp | [2206-2224] | [2177-2195] |
| 66 | GAGGUGGUGGUGUUGCUUA | UAAGCAACACCACCACCUC | | [153-171] | [124-142] |
| 67 | GCAGGUCAAGUACCAGGAU | AUCCUGGUACUUGACCUGC | Chmp | [428-446] | [399-417] |
| 68 | GAUAAGUAACCCUGUAAUU | AAUUACAGGGUUACUUAUC | Chmp | [2529-2547] | [2500-2518] |
| 69 | UGUUUCUUGGGCAAAAAUA | UAUUUUUGCCCAAGAAACA | Chmp | [2069-2087] | [2040-2058] |
| 70 | GUUACUACCCAGAGAGGAA | UUCCUCUCUGGGUAGUAAC | Chmp | [1651-1669] | [1622-1640] |
| 71 | CAAUGAACACCAUCCGAAG | CUUCGGAUGGUGUUCAUUG | Chmp | [1690-1708] | [1661-1679] |
| 72 | GAAACAGAGACGUGGACUU | AAGUCCACGUCUCUGUUUC | Chmp | [1803-1821] | [1774-1792] |
| 73 | UACGAUGUGGAAACAGAGA | UCUCUGUUUCCACAUCGUA | Chmp | [1794-1812] | [1765-1783] |
| 74 | CAAUGCUGACACGAAGGAU | AUCCUUCGUGUCAGCAUUG | Chmp | [1549-1567] | [1520-1538] |
| 75 | CCUUGGAGGCUAUGAUGGU | ACCAUCAUAGCCUCCAAGG | Chmp | [1889-1907] | [1860-1878] |
| 76 | CAGUGUGGAGAGGUAUGAG | CUCAUACCUCUCCACACUG | Chmp | [1499-1517] | [1470-1488] |
| 77 | UGUGGAGUGUUACGACCCA | UGGGUCGUAACACUCCACA | Chmp | [1925-1943] | [1896-1914] |
| 78 | UUUUGUUUCUUGGGCAAAA | UUUUGCCCAAGAAACAAAA | Chmp | [2066-2084] | [2037-2055] |
| 79 | GCAGAACUGUACCUGUUGA | UCAACAGGUACAGUUCUGC | Chmp | [2042-2060] | [2013-2031] |
| 80 | AAAACCGGGACUAAAAGAA | UUCUUUUAGUCCCGGUUUU | Chmp | [2121-2139] | [2092-2110] |
| 81 | GACAAACCGCCUUAAUUCA | UGAAUUAAGGCGGUUUGUC | Chmp | [1625-1643] | [1596-1614] |
| 82 | GAGGUGACCCGAAUGACAU | AUGUCAUUCGGGUCACCUC | Chmp | [1962-1980] | [1933-1951] |
| 83 | GGAGUACAUCUACAUGCAU | AUGCAUGUAGAUGUACUCC | Chmp | [797-815] | [768-786] |
| 84 | AAGCAAGAGGAGUUCUUCA | UGAAGAACUCCUCUUGCUU | Chmp | [831-849] | [802-820] |
| 85 | AGGACUACCUGGUCAAGAU | AUCUUGACCAGGUAGUCCU | Chmp | [1078-1096] | [1049-1067] |
| 86 | AAGUGUGUCCUCCACGUCA | UGACGUGGAGGACACACUU | Chmp | [633-651] | [604-622] |
| 87 | CAUGUGAUUUAUUCUUGGA | UCCAAGAAUAAAUCACAUG | | [2384-2402] | [2355-2373] |
| 88 | GGUCAAGUACCAGGAUGCA | UGCAUCCUGGUACUUGACC | Chmp | [431-449] | [402-420] |
| 89 | GAGUACAUCUACAUGCAUU | AAUGCAUGUAGAUGUACUC | Chmp | [798-816] | [769-787] |
| 90 | CAGCAGAACUGUACCUGUU | AACAGGUACAGUUCUGCUG | Chmp | [2040-2058] | [2011-2029] |
| 91 | AAGAAAAGACAGCACUGCA | UGCAGUGCUGUCUUUUCUU | Chmp | [2135-2153] | [2106-2124] |
| 92 | GUCAUGUACCAGAUCGACA | UGUCGAUCUGGUACAUGAC | Chn, Chmp | [663-681] | [634-652] |
| 93 | CAGAUUGACCAGCAGAACU | AGUUCUGCUGGUCAAUCUG | Chmp | [2031-2049] | [2002-2020] |
| 94 | AAUUUUCCAAGGAAAAUAA | UUAUUUUCCUUGGAAAAUU | Chmp | [2544-2562] | [2515-2533] |
| 95 | CCUGUUGAGGCACUUUUGU | ACAAAAGUGCCUCAACAGG | Chmp | [2053-2071] | [2024-2042] |
| 96 | CAACUUCGCUGAGCAGAUU | AAUCUGCUCAGCGAAGUUG | Chmp | [749-767] | [720-738] |
| 97 | CAACUGGUGACCCUCAUCA | UGAUGAGGGUCACCAGUUG | Chmp | [864-882] | [835-853] |
| 98 | UGAUGUACGCCUCCACUGA | UCAGUGGAGGCGUACAUCA | Chmp | [277-295] | [248-266] |
| 99 | UCAAGAUCUUCGAGGAGCU | AGCUCCUCGAAGAUCUUGA | Chmp | [1090-1108] | [1061-1079] |
| 100 | AAAAACCGGGACUAAAAGA | UCUUUUAGUCCCGGUUUUU | Chmp | [2120-2138] | [2091-2109] |
| 101 | UGUUGAUAAGUAACCCUGU | ACAGGGUUACUUAUCAACA | Chmp | [2525-2543] | [2496-2514] |
| 102 | UUGGCUGUGUGGAGUUGCA | UGCAACUCCACACAGCCAA | | [766-784] | [737-755] |
| 103 | UAAAGAACAGACUAACUAG | CUAGUUAGUCUGUUCUUUA | Chmp | [2560-2578] | [2531-2549] |
| 104 | AGCAAUGAACACCAUCCGA | UCGGAUGGUGUUCAUUGCU | Chmp | [1688-1706] | [1659-1677] |
| 105 | GUGUGGAAAGAGCAGGCUU | AAGCCUGCUCUUUCCACAC | Chmp | [2290-2308] | [2261-2279] |
| 106 | GUGGCGAAUGAUCACAGCA | UGCUGUGAUCAUUCGCCAC | Chmp | [1673-1691] | [1644-1662] |
| 107 | AGACAGCACUGCAAAUAAC | GUUAUUUGCAGUGCUGUCU | Chmp | [2141-2159] | [2112-2130] |
| 108 | AGAAGUGCGAGAUCCUGCA | UGCAGGAUCUCGCACUUCU | GP, Chn, Chmp | [1042-1060] | [1013-1031] |
| 109 | AAAGAGCAGGCUUCCAGGA | UCCUGGAAGCCUGCUCUUU | Chmp | [2296-2314] | [2267-2285] |
| 110 | UAUCAUUGUUUUUGUACAA | UUGUACAAAAACAAUGAUA | Chmp | [2103-2121] | [2074-2092] |
| 111 | CAGCACUGCAAAUAACCCA | UGGGUUAUUUGCAGUGCUG | Chmp | [2144-2162] | [2115-2133] |
| 112 | AGGGAUGGGCCUGUACAUA | UAUGUACAGGCCCAUCCCU | Chmp | [2463-2481] | [2434-2452] |
| 113 | AAUGACAUCUCAAAAGAAG | CUUCUUUUGAGAUGUCAUU | Chmp | [2200-2218] | [2171-2189] |
| 114 | CUACCUGGAGGCUUACAAC | GUUGUAAGCCUCCAGGUAG | Chmp | [1205-1223] | [1176-1194] |
| 115 | AACUGUACCUGUUGAGGCA | UGCCUCAACAGGUACAGUU | Chmp | [2046-2064] | [2017-2035] |
| 116 | GUUUCUUGGGCAAAAAUAC | GUAUUUUUGCCCAAGAAAC | | [2070-2088] | [2041-2059] |
| 117 | AAGGAAAAUAAAGAACAGA | UCUGUUCUUUAUUUUCCUU | Chmp | [2552-2570] | [2523-2541] |
| 118 | CUUUUGUUUCUUGGGCAAA | UUUGCCCAAGAAACAAAAG | Chmp | [2065-2083] | [2036-2054] |
| 119 | AAAGAACAGACUAACUAGU | ACUAGUUAGUCUGUUCUUU | Chmp | [2561-2579] | [2532-2550] |
| 120 | GAGUGGCGAAUGAUCACAG | CUGUGAUCAUUCGCCACUC | Chmp | [1671-1689] | [1642-1660] |
| 121 | AAUUCAGCUGAGUGUUACU | AGUAACACUCAGCUGAAUU | Chmp | [1638-1656] | [1609-1627] |
| 122 | UGUGGAGAGGUAUGAGCCA | UGGCUCAUACCUCUCCACA | Chmp | [1502-1520] | [1473-1491] |
| 123 | AUUUUCCAAGGAAAAUAAA | UUUAUUUUCCUUGGAAAAU | Chmp | [2545-2563] | [2516-2534] |
| 124 | GGUGGUGUUGCUUAUCUUC | GAAGAUAAGCAACACCACC | | [158-176] | [129-147] |
| 125 | AGUCCAAAGCGGGAAUCAU | AUGAUUCCCGCUUUGGACU | Chmp | [2217-2235] | [2188-2206] |
| 126 | AUAAAGAACAGACUAACUA | UAGUUAGUCUGUUCUUUAU | Chmp | [2559-2577] | [2530-2548] |
| 127 | ACUACCUGGUCAAGAUCUU | AAGAUCUUGACCAGGUAGU | Chmp | [1081-1099] | [1052-1070] |
| 128 | UUUUGUACAAAAACCGGGA | UCCCGGUUUUUGUACAAAA | Chmp | [2112-2130] | [2083-2101] |
| 129 | UACAUAGAAGCCACCGGAU | AUCCGGUGGCUUCUAUGUA | Chmp | [2476-2494] | [2447-2465] |
| 130 | CAGAUUGGCUGUGUGGAGU | ACUCCACACAGCCAAUCUG | | [762-780] | [733-751] |
| 131 | UAUUCUUGGAUACCUGGGA | UCCCAGGUAUCCAAGAAUA | Chmp | [2393-2411] | [2364-2382] |
| 132 | CAUGGAGGUGGUGUCCAUU | AAUGGACACCACCUCCAUG | Rat, Chmp | [542-560] | [513-531] |
| 133 | CAGAGACGUGGACUUUCGU | ACGAAAGUCCACGUCUCUG | Chmp | [1807-1825] | [1778-1796] |
| 134 | GAUUGACCAGCAGAACUGU | ACAGUUCUGCUGGUCAAUC | Chmp | [2033-2051] | [2004-2022] |
| 135 | UUUCUUGGGCAAAAAUACA | UGUAUUUUUGCCCAAGAAA | | [2071-2089] | [2042-2060] |
| 136 | GACAGUGUGGAGUGUUACG | CGUAACACUCCACACUGUC | Chmp | [1920-1938] | [1891-1909] |
| 137 | CAGAUGCAGCUGCAGAAGU | ACUUCUGCAGCUGCAUCUG | GP, Chn, Chmp | [1029-1047] | [1000-1018] |
| 138 | AAGCAGAUUGACCAGCAGA | UCUGCUGGUCAAUCUGCUU | Chmp | [2028-2046] | [1999-2017] |
| 139 | AGGCUAUGAUGGUCACACG | CGUGUGACCAUCAUAGCCU | Chmp | [1895-1913] | [1866-1884] |
| 140 | UUCCAAGGAAAAUAAAGAA | UUCUUUAUUUUCCUUGGAA | Chmp | [2548-2566] | [2519-2537] |
| 141 | AACCGCACCUUCAGCUACA | UGUAGCUGAAGGUGCGGUU | GP, Chmp | [330-348] | [301-319] |
| 142 | GUCUUCAAGGCCAUGUUCA | UGAACAUGGCCUUGAAGAC | Chmp | [501-519] | [472-490] |
| 143 | CGAAUGAUCACAGCAAUGA | UCAUUGCUGUGAUCAUUCG | Chmp | [1677-1695] | [1648-1666] |
| 144 | UGUCCAUUGAGGGUAUCCA | UGGAUACCCUCAAUGGACA | Chmp | [553-571] | [524-542] |
| 145 | UGGAGCGCCUCAUUGAAUU | AAUUCAAUGAGGCGCUCCA | | [583-601] | [554-572] |
| 146 | AAUAAAGAACAGACUAACU | AGUUAGUCUGUUCUUUAUU | Chmp | [2558-2576] | [2529-2547] |
| 147 | AUUGACCAGCAGAACUGUA | UACAGUUCUGCUGGUCAAU | Chmp | [2034-2052] | [2005-2023] |
| 148 | AAAGAAGUCCAAAGCGGGA | UCCCGCUUUGGACUUCUUU | Chmp | [2212-2230] | [2183-2201] |
| 149 | UUACGACCCAGAUACAGAC | GUCUGUAUCUGGGUCGUAA | Chmp | [1934-1952] | [1905-1923] |
| 150 | AGUUCUUCAACCUGUCCCA | UGGGACAGGUUGAAGAACU | GP, Chmp | [841-859] | [812-830] |
| 151 | UUAAUUCAGCUGAGUGUUA | UAACACUCAGCUGAAUUAA | Chmp | [1636-1654] | [1607-1625] |
| 152 | CAUUGAAUUCGCCUACACG | CGUGUAGGCGAAUUCAAUG | | [593-611] | [564-582] |
| 153 | AGAGGUGGUGGUGUUGCUU | AAGCAACACCACCACCUCU | | [152-170] | [123-141] |
| 154 | UAAGUAACCCUGUAAUUUU | AAAAUUACAGGGUUACUUA | Chmp | [2531-2549] | [2502-2520] |
| 155 | CAUCAACUGGGUCAAGUAC | GUACUUGACCCAGUUGAUG | GP, Chn, Chmp | [932-950] | [903-921] |
| 156 | GGUCAAGAUCUUCGAGGAG | CUCCUCGAAGAUCUUGACC | Chmp | [1088-1106] | [1059-1077] |
| 157 | UGCCUCAGUGUUAAAAUGA | UCAUUUUAACACUGAGGCA | Chmp | [2186-2204] | [2157-2175] |
| 158 | UCACAGCAAUGAACACCAU | AUGGUGUUCAUUGCUGUGA | Chmp | [1684-1702] | [1655-1673] |
| 159 | CAAGGACUACCUGGUCAAG | CUUGACCAGGUAGUCCUUG | Chmp | [1076-1094] | [1047-1065] |
| 160 | AGUUCAUGGCCCACAAGGU | ACCUUGUGGGCCAUGAACU | Chmp | [460-478] | [431-449] |
| 161 | UCUUCAAGGCCAUGUUCAC | GUGAACAUGGCCUUGAAGA | Chmp | [502-520] | [473-491] |
| 162 | UGCAGGUCAAGUACCAGGA | UCCUGGUACUUGACCUGCA | Chmp | [427-445] | [398-416] |
| 163 | GGUGUUGCUUAUCUUCUGG | CCAGAAGAUAAGCAACACC | Chmp | [161-179] | [132-150] |
| 164 | GAAUCUACGUCCUUGGAGG | CCUCCAAGGACGUAGAUUC | Chmp | [1879-1897] | [1850-1868] |
| 165 | CAAAAGAAGUCCAAAGCGG | CCGCUUUGGACUUCUUUUG | Chmp | [2210-2228] | [2181-2199] |
| 166 | UUGUUUCUUGGGCAAAAAU | AUUUUUGCCCAAGAAACAA | Chmp | [2068-2086] | [2039-2057] |
| 167 | UACGACCCAGAUACAGACA | UGUCUGUAUCUGGGUCGUA | Chmp | [1935-1953] | [1906-1924] |
| 168 | AGUGUUACGACCCAGAUAC | GUAUCUGGGUCGUAACACU | Chmp | [1930-1948] | [1901-1919] |
| 169 | GCGAAUGAUCACAGCAAUG | CAUUGCUGUGAUCAUUCGC | Chmp | [1676-1694] | [1647-1665] |
| 170 | ACGAGUGGCGAAUGAUCAC | GUGAUCAUUCGCCACUCGU | Chmp | [1669-1687] | [1640-1658] |
| 171 | AGUGGCGAAUGAUCACAGC | GCUGUGAUCAUUCGCCACU | Chmp | [1672-1690] | [1643-1661] |
| 172 | CUUAAUUCAGCUGAGUGUU | AACACUCAGCUGAAUUAAG | Chmp | [1635-1653] | [1606-1624] |
| 173 | AUGGAGCGCCUCAUUGAAU | AUUCAAUGAGGCGCUCCAU | | [582-600] | [553-571] |
| 174 | GCUAUGAUGGUCACACGUU | AACGUGUGACCAUCAUAGC | Chmp | [1897-1915] | [1868-1886] |
| 175 | AAAUAAAGAACAGACUAAC | GUUAGUCUGUUCUUUAUUU | Chmp | [2557-2575] | [2528-2546] |
| 176 | UAAAAUGACAUCUCAAAAG | CUUUUGAGAUGUCAUUUUA | Chmp | [2197-2215] | [2168-2186] |
| 177 | GUAAUUUUCCAAGGAAAAU | AUUUUCCUUGGAAAAUUAC | Chmp | [2542-2560] | [2513-2531] |
| 178 | GUUGCUUAUCUUCUGGAAC | GUUCCAGAAGAUAAGCAAC | Chmp | [164-182] | [135-153] |
| 179 | GUGGUGGUGUUGCUUAUCU | AGAUAAGCAACACCACCAC | | [156-174] | [127-145] |
| 180 | AACAGUGUGGAGAGGUAUG | CAUACCUCUCCACACUGUU | Chmp | [1497-1515] | [1468-1486] |
| 181 | AGUGUGGAGUGUUACGACC | GGUCGUAACACUCCACACU | Chmp | [1923-1941] | [1894-1912] |
| 182 | GGUGGUGGUGUUGCUUAUC | GAUAAGCAACACCACCACC | | [155-173] | [126-144] |
| 183 | AUGGUCAGGACCAGCUGAA | UUCAGCUGGUCCUGACCAU | Chmp | [1762-1780] | [1733-1751] |
| 184 | CAAGGCCAUGUUCACCAAC | GUUGGUGAACAUGGCCUUG | GP, Chn, Chmp | [506-524] | [477-495] |
| 185 | UCUACGUCCUUGGAGGCUA | UAGCCUCCAAGGACGUAGA | Chmp | [1882-1900] | [1853-1871] |
| 186 | AUGACAUCUCAAAAGAAGU | ACUUCUUUUGAGAUGUCAU | Chmp | [2201-2219] | [2172-2190] |
| 187 | AAAAGAAAAGACAGCACUG | CAGUGCUGUCUUUUCUUUU | Chmp | [2133-2151] | [2104-2122] |
| 188 | ACUUCCUGCAGAUGCAGCU | AGCUGCAUCUGCAGGAAGU | GP, Chn, Chmp | [1021-1039] | [992-1010] |
| 189 | GAGACGUGGACUUUCGUAG | CUACGAAAGUCCACGUCUC | Chmp | [1809-1827] | [1780-1798] |
| 190 | ACUCGUUGACGCCGAACUU | AAGUUCGGCGUCAACGAGU | Chmp | [1006-1024] | [977-995] |
| 191 | UCUUGGGCAAAAAUACAGU | ACUGUAUUUUUGCCCAAGA | | [2073-2091] | [2044-2062] |
| 192 | UGUUACGACCCAGAUACAG | CUGUAUCUGGGUCGUAACA | Chmp | [1932-1950] | [1903-1921] |
| 193 | CAUGAACGGUGCUGUCAUG | CAUGACAGCACCGUUCAUG | | [650-668] | [621-639] |
| 194 | CCAAUGCUGACACGAAGGA | UCCUUCGUGUCAGCAUUGG | Chmp | [1548-1566] | [1519-1537] |
| 195 | AGUUAUUUUGUUGAUAAGU | ACUUAUCAACAAAAUAACU | Chmp | [2517-2535] | [2488-2506] |
| 196 | UCAUCCAGCCCUGUCUUCA | UGAAGACAGGGCUGGAUGA | Chmp | [489-507] | [460-478] |
| 197 | AUGGUCACACGUUCCUGGA | UCCAGGAACGUGUGACCAU | Chmp | [1903-1921] | [1874-1892] |
| 198 | GGACAAACCGCCUUAAUUC | GAAUUAAGGCGGUUUGUCC | Chmp | [1624-1642] | [1595-1613] |
| 199 | GAUCAUACCAAGCAGGCCU | AGGCCUGCUUGGUAUGAUC | Chmp | [357-375] | [328-346] |
| 200 | UACCCAGAGAGGAACGAGU | ACUCGUUCCUCUCUGGGUA | Chmp | [1656-1674] | [1627-1645] |
| 201 | GUGGUGUUGCUUAUCUUCU | AGAAGAUAAGCAACACCAC | Chmp | [159-177] | [130-148] |
| 202 | AUGCCUCAGUGUUAAAAUG | CAUUUUAACACUGAGGCAU | Chmp | [2185-2203] | [2156-2174] |
| 203 | CAUCUACAUGCAUUUUGGG | CCCAAAAUGCAUGUAGAUG | Chmp | [803-821] | [774-792] |
| 204 | ACUAAAAGAAAAGACAGCA | UGCUGUCUUUUCUUUUAGU | Chmp | [2130-2148] | [2101-2119] |
| 205 | UGUGUGACGUCACACUGCA | UGCAGUGUGACGUCACACA | Chmp | [412-430] | [383-401] |
| 206 | UGUACCAGAUCGACAGCGU | ACGCUGUCGAUCUGGUACA | Chn, Chmp | [667-685] | [638-656] |
| 207 | ACGUCCUUGGAGGCUAUGA | UCAUAGCCUCCAAGGACGU | Chmp | [1885-1903] | [1856-1874] |
| 208 | AAACAGAGACGUGGACUUU | AAAGUCCACGUCUCUGUUU | Chmp | [1804-1822] | [1775-1793] |
| 209 | CCAAAGCGGGAAUCAUGUG | CACAUGAUUCCCGCUUUGG | Chmp | [2220-2238] | [2191-2209] |
| 210 | AACAGCGACGGUUCUACGU | ACGUAGAACCGUCGCUGUU | Chmp | [958-976] | [929-947] |
| 211 | GUGAUUUAUUCUUGGAUAC | GUAUCCAAGAAUAAAUCAC | Chmp | [2387-2405] | [2358-2376] |
| 212 | AUGUGAUUUAUUCUUGGAU | AUCCAAGAAUAAAUCACAU | | [2385-2403] | [2356-2374] |
| 213 | CCUGGUCAAGAUCUUCGAG | CUCGAAGAUCUUGACCAGG | Chmp | [1085-1103] | [1056-1074] |
| 214 | AAGUAACCCUGUAAUUUUC | GAAAAUUACAGGGUUACUU | Chmp | [2532-2550] | [2503-2521] |
| 215 | UCUUCCACGCCUGCAUCAA | UUGAUGCAGGCGUGGAAGA | Chmp | [919-937] | [890-908] |
| 216 | GUCCAUUGAGGGUAUCCAC | GUGGAUACCCUCAAUGGAC | Chmp | [554-572] | [525-543] |
| 217 | GUCCUUGGAGGCUAUGAUG | CAUCAUAGCCUCCAAGGAC | Chmp | [1887-1905] | [1858-1876] |
| 218 | GCUAUGAUGGUCAGGACCA | UGGUCCUGACCAUCAUAGC | Chmp | [1756-1774] | [1727-1745] |
| 219 | CACCACAACAGUGUGGAGA | UCUCCACACUGUUGUGGUG | Chmp | [1491-1509] | [1462-1480] |
| 220 | CAAGUACGACUGCGAACAG | CUGUUCGCAGUCGUACUUG | Chmp | [944-962] | [915-933] |
| 221 | UUUCCAAGGAAAAUAAAGA | UCUUUAUUUUCCUUGGAAA | Chmp | [2547-2565] | [2518-2536] |
| 222 | UGGAAAGAGCAGGCUUCCA | UGGAAGCCUGCUCUUUCCA | Chmp | [2293-2311] | [2264-2282] |
| 223 | AAAGACAGCACUGCAAAUA | UAUUUGCAGUGCUGUCUUU | Chmp | [2139-2157] | [2110-2128] |
| 224 | GAUGUGGAAACAGAGACGU | ACGUCUCUGUUUCCACAUC | Chmp | [1797-1815] | [1768-1786] |
| 225 | UAAAAGAAAAGACAGCACU | AGUGCUGUCUUUUCUUUUA | Chmp | [2132-2150] | [2103-2121] |
| 226 | AUGGGCCUGUACAUAGAAG | CUUCUAUGUACAGGCCCAU | Chmp | [2467-2485] | [2438-2456] |
| 227 | CUGUAUCUAUGCUGCUGGG | CCCAGCAGCAUAGAUACAG | Chmp | [1736-1754] | [1707-1725] |
| 228 | AGCAGAUUGGCUGUGUGGA | UCCACACAGCCAAUCUGCU | | [760-778] | [731-749] |
| 229 | CAACUGUAUCUAUGCUGCU | AGCAGCAUAGAUACAGUUG | Chmp | [1733-1751] | [1704-1722] |
| 230 | AGUGUUACUACCCAGAGAG | CUCUCUGGGUAGUAACACU | Chmp | [1648-1666] | [1619-1637] |
| 231 | UAAUUUUCCAAGGAAAAUA | UAUUUUCCUUGGAAAAUUA | Chmp | [2543-2561] | [2514-2532] |
| 232 | GGCACUUUUGUUUCUUGGG | CCCAAGAAACAAAAGUGCC | Chmp | [2061-2079] | [2032-2050] |
| 233 | UGUGGAAAGAGCAGGCUUC | GAAGCCUGCUCUUUCCACA | Chmp | [2291-2309] | [2262-2280] |
| 234 | UGCAGAAGUGCGAGAUCCU | AGGAUCUCGCACUUCUGCA | GP, Chn, Chmp | [1039-1057] | [1010-1028] |
| 235 | ACAUAGAAGCCACCGGAUG | CAUCCGGUGGCUUCUAUGU | Chmp | [2477-2495] | [2448-2466] |
| 236 | GCACAACUGUAUCUAUGCU | AGCAUAGAUACAGUUGUGC | Chmp | [1730-1748] | [1701-1719] |
| 237 | AACUGGUGACCCUCAUCAG | CUGAUGAGGGUCACCAGUU | Chmp | [865-883] | [836-854] |
| 238 | AGGCACUUUUGUUUCUUGG | CCAAGAAACAAAAGUGCCU | Chmp | [2060-2078] | [2031-2049] |
| 239 | ACCUGUUGAGGCACUUUUG | CAAAAGUGCCUCAACAGGU | Chmp | [2052-2070] | [2023-2041] |
| 240 | UGAUCACAGCAAUGAACAC | GUGUUCAUUGCUGUGAUCA | Chmp | [1681-1699] | [1652-1670] |
| 241 | CAUCCACCACAACAGUGUG | CACACUGUUGUGGUGGAUG | Chmp | [1487-1505] | [1458-1476] |
| 242 | CUGCAUCCACCACAACAGU | ACUGUUGUGGUGGAUGCAG | Chmp | [1484-1502] | [1455-1473] |
| 243 | CUUGGAGGCUAUGAUGGUC | GACCAUCAUAGCCUCCAAG | Chmp | [1890-1908] | [1861-1879] |
| 244 | CGUCCUGCACAACUGUAUC | GAUACAGUUGUGCAGGACG | Chmp | [1724-1742] | [1695-1713] |
| 245 | GAGGAUCAUACCAAGCAGG | CCUGCUUGGUAUGAUCCUC | Chmp | [354-372] | [325-343] |
| 246 | AUGAUCACAGCAAUGAACA | UGUUCAUUGCUGUGAUCAU | Chmp | [1680-1698] | [1651-1669] |
| 247 | AAUGCUGACACGAAGGAUC | GAUCCUUCGUGUCAGCAUU | Chmp | [1550-1568] | [1521-1539] |
| 248 | GCAUCCACCACAACAGUGU | ACACUGUUGUGGUGGAUGC | Chmp | [1486-1504] | [1457-1475] |
| 249 | GUCACACUGCAGGUCAAGU | ACUUGACCUGCAGUGUGAC | Chmp | [420-438] | [391-409] |
| 250 | UGUGGAAACAGAGACGUGG | CCACGUCUCUGUUUCCACA | Chmp | [1799-1817] | [1770-1788] |
| 251 | ACCAGAUCGACAGCGUUGU | ACAACGCUGUCGAUCUGGU | Chmp | [670-688] | [641-659] |
| 252 | ACUAGUGUCUUUCACCCUG | CAGGGUGAAAGACACUAGU | Chmp | [2574-2592] | [2545-2563] |
| 253 | AUUUAUUCUUGGAUACCUG | CAGGUAUCCAAGAAUAAAU | Chmp | [2390-2408] | [2361-2379] |
| 254 | UCUUCAACCUGUCCCACUG | CAGUGGGACAGGUUGAAGA | GP, Chmp | [844-862] | [815-833] |
| 255 | UGACCAGCAGAACUGUACC | GGUACAGUUCUGCUGGUCA | Chmp | [2036-2054] | [2007-2025] |
| 256 | GGACUACCUGGUCAAGAUC | GAUCUUGACCAGGUAGUCC | Chmp | [1079-1097] | [1050-1068] |
| 257 | CUGCAUCAACUGGGUCAAG | CUUGACCCAGUUGAUGCAG | GP, Chmp | [929-947] | [900-918] |
| 258 | CAAUCGUCUCCUUUAUGCC | GGCAUAAAGGAGACGAUUG | | [1589-1607] | [1560-1578] |
| 259 | UUGGAGGCUAUGAUGGUCA | UGACCAUCAUAGCCUCCAA | Chmp | [1891-1909] | [1862-1880] |
| 260 | UCACACUGCAGGUCAAGUA | UACUUGACCUGCAGUGUGA | Chmp | [421-439] | [392-410] |
| 261 | UACACCCUGGAGGAUCAUA | UAUGAUCCUCCAGGGUGUA | Chmp | [345-363] | [316-334] |
| 262 | AGAAUCUACGUCCUUGGAG | CUCCAAGGACGUAGAUUCU | Chmp | [1878-1896] | [1849-1867] |
| 263 | AGAUCUUCGAGGAGCUCAC | GUGAGCUCCUCGAAGAUCU | Chmp | [1093-1111] | [1064-1082] |
| 264 | AAGCAGGCCUUUGGCAUCA | UGAUGCCAAAGGCCUGCUU | Chmp | [366-384] | [337-355] |
| 265 | UGAUGGUCACACGUUCCUG | CAGGAACGUGUGACCAUCA | Chmp | [1901-1919] | [1872-1890] |
| 266 | CAGCAAUGAACACCAUCCG | CGGAUGGUGUUCAUUGCUG | Chmp | [1687-1705] | [1658-1676] |
| 267 | GACUAAAAGAAAAGACAGC | GCUGUCUUUUCUUUUAGUC | Chmp | [2129-2147] | [2100-2118] |
| 268 | CUGCAAAUAACCCAUCUUC | GAAGAUGGGUUAUUUGCAG | Chmp | [2149-2167] | [2120-2138] |
| 269 | GUCAUGAACGGUGCUGUCA | UGACAGCACCGUUCAUGAC | | [648-666] | [619-637] |
| 270 | AUAAGUAACCCUGUAAUUU | AAAUUACAGGGUUACUUAU | Chmp | [2530-2548] | [2501-2519] |
| 271 | AAACCGCCUUAAUUCAGCU | AGCUGAAUUAAGGCGGUUU | Chmp | [1628-1646] | [1599-1617] |
| 272 | AGUGUGGAGAGGUAUGAGC | GCUCAUACCUCUCCACACU | Chmp | [1500-1518] | [1471-1489] |
| 273 | GAACUUCCUGCAGAUGCAG | CUGCAUCUGCAGGAAGUUC | Chmp | [1019-1037] | [990-1008] |
| 274 | ACUACCCAGAGAGGAACGA | UCGUUCCUCUCUGGGUAGU | Chmp | [1654-1672] | [1625-1643] |
| 275 | UGCGUCCUGCACAACUGUA | UACAGUUGUGCAGGACGCA | Chmp | [1722-1740] | [1693-1711] |
| 276 | UGUUACUACCCAGAGAGGA | UCCUCUCUGGGUAGUAACA | Chmp | [1650-1668] | [1621-1639] |
| 277 | CUACCUGGUCAAGAUCUUC | GAAGAUCUUGACCAGGUAG | Chmp | [1082-1100] | [1053-1071] |
| 278 | ACGAUGUGGAAACAGAGAC | GUCUCUGUUUCCACAUCGU | Chmp | [1795-1813] | [1766-1784] |
| 279 | CAUGUACCAGAUCGACAGC | GCUGUCGAUCUGGUACAUG | Chn, Chmp | [665-683] | [636-654] |
| 280 | GUCAAGUACGACUGCGAAC | GUUCGCAGUCGUACUUGAC | Chmp | [942-960] | [913-931] |
| 281 | ACAAACCGCCUUAAUUCAG | CUGAAUUAAGGCGGUUUGU | Chmp | [1626-1644] | [1597-1615] |
| 282 | AACUAGUGUCUUUCACCCU | AGGGUGAAAGACACUAGUU | Chmp | [2573-2591] | [2544-2562] |
| 283 | GAUUGGCUGUGUGGAGUUG | CAACUCCACACAGCCAAUC | | [764-782] | [735-753] |
| 284 | AUUCUUGGAUACCUGGGAG | CUCCCAGGUAUCCAAGAAU | Chmp | [2394-2412] | [2365-2383] |
| 285 | UGUCCUCCACGUCAUGAAC | GUUCAUGACGUGGAGGACA | Chmp | [638-656] | [609-627] |
| 286 | UCUCAAAAGAAGUCCAAAG | CUUUGGACUUCUUUUGAGA | Chmp | [2207-2225] | [2178-2196] |
| 287 | AUGUGGAAACAGAGACGUG | CACGUCUCUGUUUCCACAU | Chmp | [1798-1816] | [1769-1787] |
| 288 | AAGAAGUCCAAAGCGGGAA | UUCCCGCUUUGGACUUCUU | Chmp | [2213-2231] | [2184-2202] |
| 289 | AUCAUUGUUUUUGUACAAA | UUUGUACAAAAACAAUGAU | Chmp | [2104-2122] | [2075-2093] |
| 290 | UUGGCAUCAUGAACGAGCU | AGCUCGUUCAUGAUGCCAA | Rat, Chmp | [376-394] | [347-365] |
| 291 | CAAACCGCCUUAAUUCAGC | GCUGAAUUAAGGCGGUUUG | Chmp | [1627-1645] | [1598-1616] |
| 292 | CUCAAUCGUCUCCUUUAUG | CAUAAAGGAGACGAUUGAG | | [1587-1605] | [1558-1576] |
| 293 | AAGUCCAAAGCGGGAAUCA | UGAUUCCCGCUUUGGACUU | Chmp | [2216-2234] | [2187-2205] |
| 294 | AGCUACCUGGAGGCUUACA | UGUAAGCCUCCAGGUAGCU | Chmp | [1203-1221] | [1174-1192] |
| 295 | AUAACCCAUCUUCCGGGAA | UUCCCGGAAGAUGGGUUAU | Chmp | [2155-2173] | [2126-2144] |
| 296 | CUCAAAAGAAGUCCAAAGC | GCUUUGGACUUCUUUUGAG | Chmp | [2208-2226] | [2179-2197] |
| 297 | GACAGCACUGCAAAUAACC | GGUUAUUUGCAGUGCUGUC | Chmp | [2142-2160] | [2113-2131] |
| 298 | AGCUGUCACCAUGUGAUUU | AAAUCACAUGGUGACAGCU | | [2375-2393] | [2346-2364] |
| 299 | AAGGACUACCUGGUCAAGA | UCUUGACCAGGUAGUCCUU | Chmp | [1077-1095] | [1048-1066] |
| 300 | GACCCAGAUACAGACACCU | AGGUGUCUGUAUCUGGGUC | Chmp | [1938-1956] | [1909-1927] |
| 301 | CAAGCAAGAGGAGUUCUUC | GAAGAACUCCUCUUGCUUG | Chmp | [830-848] | [801-819] |
| 302 | CAAGAGGAGUUCUUCAACC | GGUUGAAGAACUCCUCUUG | Chmp | [834-852] | [805-823] |
| 303 | AUCACAGCAAUGAACACCA | UGGUGUUCAUUGCUGUGAU | Chmp | [1683-1701] | [1654-1672] |
| 304 | UCACCAUGUGAUUUAUUCU | AGAAUAAAUCACAUGGUGA | | [2380-2398] | [2351-2369] |
| 305 | AGCAGAACUGUACCUGUUG | CAACAGGUACAGUUCUGCU | Chmp | [2041-2059] | [2012-2030] |
| 306 | AAAAAUACAGUCCAAUGGG | CCCAUUGGACUGUAUUUUU | | [2081-2099] | [2052-2070] |
| 307 | AAUGAUCACAGCAAUGAAC | GUUCAUUGCUGUGAUCAUU | Chmp | [1679-1697] | [1650-1668] |
| 308 | UAUUUUGUUGAUAAGUAAC | GUUACUUAUCAACAAAAUA | Chmp | [2520-2538] | [2491-2509] |
| 309 | UCCAAAGCGGGAAUCAUGU | ACAUGAUUCCCGCUUUGGA | Chmp | [2219-2237] | [2190-2208] |
| 310 | ACCCUGGAGGAUCAUACCA | UGGUAUGAUCCUCCAGGGU | Chmp | [348-366] | [319-337] |
| 311 | AGACGUGGACUUUCGUAGC | GCUACGAAAGUCCACGUCU | Chmp | [1810-1828] | [1781-1799] |
| 312 | GUCCAAAGCGGGAAUCAUG | CAUGAUUCCCGCUUUGGAC | Chmp | [2218-2236] | [2189-2207] |
| 313 | UGCAAAUAACCCAUCUUCC | GGAAGAUGGGUUAUUUGCA | Chmp | [2150-2168] | [2121-2139] |
| 314 | UAAUUCAGCUGAGUGUUAC | GUAACACUCAGCUGAAUUA | Chmp | [1637-1655] | [1608-1626] |
| 315 | AAGAGGAGUUCUUCAACCU | AGGUUGAAGAACUCCUCUU | Chmp | [835-853] | [806-824] |
| 316 | UCUGGAAAUGUGGUUCCCA | UGGGAACCACAUUUCCAGA | Chmp | [2445-2463] | [2416-2434] |
| 317 | GCAAAUAACCCAUCUUCCG | CGGAAGAUGGGUUAUUUGC | Chmp | [2151-2169] | [2122-2140] |
| 318 | UUGAGGCACUUUUGUUUCU | AGAAACAAAAGUGCCUCAA | Chmp | [2057-2075] | [2028-2046] |
| 319 | UCACACGUUCCUGGACAGU | ACUGUCCAGGAACGUGUGA | GP, Chn, Chmp | [1907-1925] | [1878-1896] |
| 320 | CUUUGGCAUCAUGAACGAG | CUCGUUCAUGAUGCCAAAG | Chmp | [374-392] | [345-363] |
| 321 | AUCAUACCAAGCAGGCCUU | AAGGCCUGCUUGGUAUGAU | Chmp | [358-376] | [329-347] |
| 322 | AGGUGACCCGAAUGACAUC | GAUGUCAUUCGGGUCACCU | Chmp | [1963-1981] | [1934-1952] |
| 323 | AAUAACCCAUCUUCCGGGA | UCCCGGAAGAUGGGUUAUU | Chmp | [2154-2172] | [2125-2143] |
| 324 | ACCACAACAGUGUGGAGAG | CUCUCCACACUGUUGUGGU | Chmp | [1492-1510] | [1463-1481] |
| 325 | AAGAACAGACUAACUAGUG | CACUAGUUAGUCUGUUCUU | Chmp | [2562-2580] | [2533-2551] |
| 326 | GUUUUUGUACAAAAACCGG | CCGGUUUUUGUACAAAAAC | Chmp | [2110-2128] | [2081-2099] |
| 327 | UCAAAAGAAGUCCAAAGCG | CGCUUUGGACUUCUUUUGA | Chmp | [2209-2227] | [2180-2198] |
| 328 | UGUGUCCUCCACGUCAUGA | UCAUGACGUGGAGGACACA | Chmp | [636-654] | [607-625] |
| 329 | UCAGCUGAGUGUUACUACC | GGUAGUAACACUCAGCUGA | Chmp | [1641-1659] | [1612-1630] |
| 330 | UGUCUUCAAGGCCAUGUUC | GAACAUGGCCUUGAAGACA | Chmp | [500-518] | [471-489] |
| 331 | CACACUGCAGGUCAAGUAC | GUACUUGACCUGCAGUGUG | Chmp | [422-440] | [393-411] |
| 332 | UGGAAAUGUGGUUCCCAGG | CCUGGGAACCACAUUUCCA | Chmp | [2447-2465] | [2418-2436] |
| 333 | ACGACCCAGAUACAGACAC | GUGUCUGUAUCUGGGUCGU | Chmp | [1936-1954] | [1907-1925] |
| 334 | AUCGAUGGCCACAUCUAUG | CAUAGAUGUGGCCAUCGAU | Chmp | [1446-1464] | [1417-1435] |
| 335 | GUGUUACUACCCAGAGAGG | CCUCUCUGGGUAGUAACAC | Chmp | [1649-1667] | [1620-1638] |
| 336 | GACUACCUGGUCAAGAUCU | AGAUCUUGACCAGGUAGUC | Chmp | [1080-1098] | [1051-1069] |
| 337 | ACUGCAGGUCAAGUACCAG | CUGGUACUUGACCUGCAGU | Chmp | [425-443] | [396-414] |
| 338 | AAAAGAAGUCCAAAGCGGG | CCCGCUUUGGACUUCUUUU | Chmp | [2211-2229] | [2182-2200] |
| 339 | UGCUGUCAUGUACCAGAUC | GAUCUGGUACAUGACAGCA | | [659-677] | [630-648] |
| 340 | AAGGCCAUGUUCACCAACG | CGUUGGUGAACAUGGCCUU | GP, Chn, Chmp | [507-525] | [478-496] |
| 341 | ACCAUGUGAUUUAUUCUUG | CAAGAAUAAAUCACAUGGU | | [2382-2400] | [2353-2371] |
| 342 | AUACAGACACCUGGAGCGA | UCGCUCCAGGUGUCUGUAU | Chmp | [1945-1963] | [1916-1934] |
| 343 | AUGAUGGUCACACGUUCCU | AGGAACGUGUGACCAUCAU | Chmp | [1900-1918] | [1871-1889] |
| 344 | UAACCCAUCUUCCGGGAAG | CUUCCCGGAAGAUGGGUUA | Chmp | [2156-2174] | [2127-2145] |
| 345 | ACAGAGACGUGGACUUUCG | CGAAAGUCCACGUCUCUGU | Chmp | [1806-1824] | [1777-1795] |
| 346 | CCUGUACAUAGAAGCCACC | GGUGGCUUCUAUGUACAGG | Chmp | [2472-2490] | [2443-2461] |
| 347 | AAGUGCGAGAUCCUGCAGU | ACUGCAGGAUCUCGCACUU | Chmp | [1044-1062] | [1015-1033] |
| 348 | UGAGUGUUACUACCCAGAG | CUCUGGGUAGUAACACUCA | Chmp | [1646-1664] | [1617-1635] |
| 349 | AGAGGAGUUCUUCAACCUG | CAGGUUGAAGAACUCCUCU | Chmp | [836-854] | [807-825] |
| 350 | AACUGGGUCAAGUACGACU | AGUCGUACUUGACCCAGUU | GP, Chn, Chmp | [936-954] | [907-925] |
| 351 | GUUGAGGCACUUUUGUUUC | GAAACAAAAGUGCCUCAAC | Chmp | [2056-2074] | [2027-2045] |
| 352 | AUGGCCACAUCUAUGCCGU | ACGGCAUAGAUGUGGCCAU | Chmp | [1450-1468] | [1421-1439] |
| 353 | ACUUCGCUGAGCAGAUUGG | CCAAUCUGCUCAGCGAAGU | Chmp | [751-769] | [722-740] |
| 354 | CUAACUAGUGUCUUUCACC | GGUGAAAGACACUAGUUAG | Chmp | [2571-2589] | [2542-2560] |
| 355 | CUGCACAACUGUAUCUAUG | CAUAGAUACAGUUGUGCAG | Ms, Chmp | [1728-1746] | [1699-1717] |
| 356 | ACGUCAUGAACGGUGCUGU | ACAGCACCGUUCAUGACGU | | [646-664] | [617-635] |
| 357 | AGAUACAGACACCUGGAGC | GCUCCAGGUGUCUGUAUCU | Chmp | [1943-1961] | [1914-1932] |
| 358 | ACUGGGUCAAGUACGACUG | CAGUCGUACUUGACCCAGU | GP, Chn, Chmp | [937-955] | [908-926] |
| 359 | ACUAACUAGUGUCUUUCAC | GUGAAAGACACUAGUUAGU | Chmp | [2570-2588] | [2541-2559] |
| 360 | AACAGAGACGUGGACUUUC | GAAAGUCCACGUCUCUGUU | Chmp | [1805-1823] | [1776-1794] |
| 361 | CUUGGGCAAAAAUACAGUC | GACUGUAUUUUUGCCCAAG | | [2074-2092] | [2045-2063] |
| 362 | GUUCUUCAACCUGUCCCAC | GUGGGACAGGUUGAAGAAC | GP, Chmp | [842-860] | [813-831] |
| 363 | AGGUCAAGUACCAGGAUGC | GCAUCCUGGUACUUGACCU | Chmp | [430-448] | [401-419] |
| 364 | UCAAGUACCAGGAUGCACC | GGUGCAUCCUGGUACUUGA | Chmp | [433-451] | [404-422] |
| 365 | AGCGCCUCAUUGAAUUCGC | GCGAAUUCAAUGAGGCGCU | | [586-604] | [557-575] |
| 366 | CAACUGGGUCAAGUACGAC | GUCGUACUUGACCCAGUUG | GP, Chn, Chmp | [935-953] | [906-924] |
| 367 | UGUCAUGUACCAGAUCGAC | GUCGAUCUGGUACAUGACA | Chmp | [662-680] | [633-651] |
| 368 | UGCUUAUCUUCUGGAACCC | GGGUUCCAGAAGAUAAGCA | Chmp | [166-184] | [137-155] |
| 369 | UUGCUUAUCUUCUGGAACC | GGUUCCAGAAGAUAAGCAA | Chmp | [165-183] | [136-154] |
| 370 | CAUACCAAGCAGGCCUUUG | CAAAGGCCUGCUUGGUAUG | Chmp | [360-378] | [331-349] |
| 371 | GAACUGUACCUGUUGAGGC | GCCUCAACAGGUACAGUUC | Chmp | [2045-2063] | [2016-2034] |
| 372 | AGUAUCAUUGUUUUUGUAC | GUACAAAAACAAUGAUACU | Chmp | [2101-2119] | [2072-2090] |
| 373 | UUGACCAGCAGAACUGUAC | GUACAGUUCUGCUGGUCAA | Chmp | [2035-2053] | [2006-2024] |
| 374 | UGGCAUCAUGAACGAGCUG | CAGCUCGUUCAUGAUGCCA | Chmp | [377-395] | [348-366] |
| 375 | CACAGCAAUGAACACCAUC | GAUGGUGUUCAUUGCUGUG | Chmp | [1685-1703] | [1656-1674] |
| 376 | AUUGAAUUCGCCUACACGG | CCGUGUAGGCGAAUUCAAU | | [594-612] | [565-583] |
| 377 | UUUGUUGAUAAGUAACCCU | AGGGUUACUUAUCAACAAA | Chmp | [2523-2541] | [2494-2512] |
| 378 | AUCCAGCCCUGUCUUCAAG | CUUGAAGACAGGGCUGGAU | Chmp | [491-509] | [462-480] |
| 379 | GGAGUUCUUCAACCUGUCC | GGACAGGUUGAAGAACUCC | GP, Chmp | [839-857] | [810-828] |
| 380 | UUCUUGGGCAAAAAUACAG | CUGUAUUUUUGCCCAAGAA | | [2072-2090] | [2043-2061] |
| 381 | UUCAAGGCCAUGUUCACCA | UGGUGAACAUGGCCUUGAA | GP, Chn, Chmp | [504-522] | [475-493] |
| 382 | CAAAGCGGGAAUCAUGUGC | GCACAUGAUUCCCGCUUUG | Chmp | [2221-2239] | [2192-2210] |
| 383 | UUUUCCAAGGAAAAUAAAG | CUUUAUUUUCCUUGGAAAA | Chmp | [2546-2564] | [2517-2535] |
| 384 | CUGGUCAAGAUCUUCGAGG | CCUCGAAGAUCUUGACCAG | Chmp | [1086-1104] | [1057-1075] |
| 385 | UUCCACGCCUGCAUCAACU | AGUUGAUGCAGGCGUGGAA | GP, Chmp | [921-939] | [892-910] |
| 386 | ACAACUGUAUCUAUGCUGC | GCAGCAUAGAUACAGUUGU | Chmp | [1732-1750] | [1703-1721] |
| 387 | AACAGACUAACUAGUGUCU | AGACACUAGUUAGUCUGUU | Chmp | [2565-2583] | [2536-2554] |
| 388 | AUACCAAGCAGGCCUUUGG | CCAAAGGCCUGCUUGGUAU | Chmp | [361-379] | [332-350] |
| 389 | UUCUUCAACCUGUCCCACU | AGUGGGACAGGUUGAAGAA | GP, Chmp | [843-861] | [814-832] |
| 390 | AACUGUAUCUAUGCUGCUG | CAGCAGCAUAGAUACAGUU | Chmp | [1734-1752] | [1705-1723] |
| 391 | UUGUACAAAAACCGGGACU | AGUCCCGGUUUUUGUACAA | Chmp | [2114-2132] | [2085-2103] |
| 392 | AACCCUGUAAUUUUCCAAG | CUUGGAAAAUUACAGGGUU | Chmp | [2536-2554] | [2507-2525] |
| 393 | UGGGCCUGUACAUAGAAGC | GCUUCUAUGUACAGGCCCA | Chmp | [2468-2486] | [2439-2457] |
| 394 | UUUAUUCUUGGAUACCUGG | CCAGGUAUCCAAGAAUAAA | Chmp | [2391-2409] | [2362-2380] |
| 395 | AUCGUCUCCUUUAUGCCGU | ACGGCAUAAAGGAGACGAU | | [1591-1609] | [1562-1580] |
| 396 | AAUGUGGUUCCCAGGGAUG | CAUCCCUGGGAACCACAUU | Chmp | [2451-2469] | [2422-2440] |
| 397 | UAACUAGUGUCUUUCACCC | GGGUGAAAGACACUAGUUA | Chmp | [2572-2590] | [2543-2561] |
| 398 | ACAGCACUGCAAAUAACCC | GGGUUAUUUGCAGUGCUGU | Chmp | [2143-2161] | [2114-2132] |
| 399 | CACAACAGUGUGGAGAGGU | ACCUCUCCACACUGUUGUG | Chmp | [1494-1512] | [1465-1483] |
| 400 | AUGUACGCCUCCACUGAGU | ACUCAGUGGAGGCGUACAU | Chmp | [279-297] | [250-268] |
| 401 | UACUUCCGACAGUCGCUCA | UGAGCGACUGUCGGAAGUA | Rat, Ms, Chmp | [1185-1203] | [1156-1174] |
| 402 | GCUGUCAUGUACCAGAUCG | CGAUCUGGUACAUGACAGC | Chmp | [660-678] | [631-649] |
| 403 | UGUUUUUGUACAAAAACCG | CGGUUUUUGUACAAAAACA | Chmp | [2109-2127] | [2080-2098] |
| 404 | UGUACAUAGAAGCCACCGG | CCGGUGGCUUCUAUGUACA | Chmp | [2474-2492] | [2445-2463] |
| 405 | CAAAUAACCCAUCUUCCGG | CCGGAAGAUGGGUUAUUUG | Chmp | [2152-2170] | [2123-2141] |
| 406 | AGAACUGUACCUGUUGAGG | CCUCAACAGGUACAGUUCU | Chmp | [2044-2062] | [2015-2033] |
| 407 | GUCAAGUACCAGGAUGCAC | GUGCAUCCUGGUACUUGAC | Chmp | [432-450] | [403-421] |
| 408 | GUCAUCGAUGGCCACAUCU | AGAUGUGGCCAUCGAUGAC | Chn, Chmp | [1443-1461] | [1414-1432] |
| 409 | UUUUUGUACAAAAACCGGG | CCCGGUUUUUGUACAAAAA | Chmp | [2111-2129] | [2082-2100] |
| 410 | UCAAUCGUCUCCUUUAUGC | GCAUAAAGGAGACGAUUGA | | [1588-1606] | [1559-1577] |
| 411 | CAAGAUCUUCGAGGAGCUC | GAGCUCCUCGAAGAUCUUG | Chmp | [1091-1109] | [1062-1080] |
| 412 | AAGAUCUUCGAGGAGCUCA | UGAGCUCCUCGAAGAUCUU | Chmp | [1092-1110] | [1063-1081] |
| 413 | AUGGACAGUUAUUUUGUUG | CAACAAAAUAACUGUCCAU | Chmp | [2511-2529] | [2482-2500] |
| 414 | UUACUACCCAGAGAGGAAC | GUUCCUCUCUGGGUAGUAA | Chmp | [1652-1670] | [1623-1641] |
| 415 | AUCAACUGGGUCAAGUACG | CGUACUUGACCCAGUUGAU | GP, Chn, Chmp | [933-951] | [904-922] |
| 416 | AACUUCGCUGAGCAGAUUG | CAAUCUGCUCAGCGAAGUU | Chmp | [750-768] | [721-739] |
| 417 | AUUCAGCUGAGUGUUACUA | UAGUAACACUCAGCUGAAU | Chmp | [1639-1657] | [1610-1628] |
| 418 | ACUGUAUCUAUGCUGCUGG | CCAGCAGCAUAGAUACAGU | Chmp | [1735-1753] | [1706-1724] |
| 419 | AAUCGUCUCCUUUAUGCCG | CGGCAUAAAGGAGACGAUU | | [1590-1608] | [1561-1579] |
| 420 | UUUUGUUGAUAAGUAACCC | GGGUUACUUAUCAACAAAA | Chmp | [2522-2540] | [2493-2511] |
| 421 | GAGCGCCUCAUUGAAUUCG | CGAAUUCAAUGAGGCGCUC | | [585-603] | [556-574] |
| 422 | AUUGUUUUUGUACAAAAAC | GUUUUUGUACAAAAACAAU | Chmp | [2107-2125] | [2078-2096] |
| 423 | AAAGAAAAGACAGCACUGC | GCAGUGCUGUCUUUUCUUU | Chmp | [2134-2152] | [2105-2123] |
| 424 | UUGUUGAUAAGUAACCCUG | CAGGGUUACUUAUCAACAA | Chmp | [2524-2542] | [2495-2513] |
| 425 | CUGUACAUAGAAGCCACCG | CGGUGGCUUCUAUGUACAG | Chmp | [2473-2491] | [2444-2462] |
| 426 | UUCGCUGAGCAGAUUGGCU | AGCCAAUCUGCUCAGCGAA | Chmp | [753-771] | [724-742] |
| 427 | ACCCAGAUACAGACACCUG | CAGGUGUCUGUAUCUGGGU | Chmp | [1939-1957] | [1910-1928] |
| 428 | CUGGAGGAUCAUACCAAGC | GCUUGGUAUGAUCCUCCAG | Chmp | [351-369] | [322-340] |
| 429 | UUUGUACAAAAACCGGGAC | GUCCCGGUUUUUGUACAAA | Chmp | [2113-2131] | [2084-2102] |
| 430 | AUGAACGGUGCUGUCAUGU | ACAUGACAGCACCGUUCAU | | [651-669] | [622-640] |
| 431 | UCCACCACAACAGUGUGGA | UCCACACUGUUGUGGUGGA | Chmp | [1489-1507] | [1460-1478] |
| 432 | AAGUACGACUGCGAACAGC | GCUGUUCGCAGUCGUACUU | Chmp | [945-963] | [916-934] |
| 433 | GUGUCCAUUGAGGGUAUCC | GGAUACCCUCAAUGGACAC | Chmp | [552-570] | [523-541] |
| 434 | UUAUUCUUGGAUACCUGGG | CCCAGGUAUCCAAGAAUAA | Chmp | [2392-2410] | [2363-2381] |
| 435 | AGUAACCCUGUAAUUUUCC | GGAAAAUUACAGGGUUACU | Chmp | [2533-2551] | [2504-2522] |
| 436 | AUGCUGACACGAAGGAUCG | CGAUCCUUCGUGUCAGCAU | Chmp | [1551-1569] | [1522-1540] |
| 437 | AUGGAGGUGGUGUCCAUUG | CAAUGGACACCACCUCCAU | Rat, Chmp | [543-561] | [514-532] |
| 438 | CAGCUGAGUGUUACUACCC | GGGUAGUAACACUCAGCUG | Chmp | [1642-1660] | [1613-1631] |
| 439 | UUGUUUUUGUACAAAAACC | GGUUUUUGUACAAAAACAA | Chmp | [2108-2126] | [2079-2097] |
| 440 | AGGAUCAUACCAAGCAGGC | GCCUGCUUGGUAUGAUCCU | Chmp | [355-373] | [326-344] |
| 441 | CAUGACCAAUCAGUGGUCG | CGACCACUGAUUGGUCAUG | Chn, Chmp | [1379-1397] | [1350-1368] |
| 442 | AACGGUGCUGUCAUGUACC | GGUACAUGACAGCACCGUU | | [654-672] | [625-643] |
| 443 | UACUACCCAGAGAGGAACG | CGUUCCUCUCUGGGUAGUA | Chmp | [1653-1671] | [1624-1642] |
| 444 | UUCAGCUGAGUGUUACUAC | GUAGUAACACUCAGCUGAA | Chmp | [1640-1658] | [1611-1629] |
| 445 | CUGUCCUCAAUCGUCUCCU | AGGAGACGAUUGAGGACAG | | [1582-1600] | [1553-1571] |
| 446 | AUGAUGGUCAGGACCAGCU | AGCUGGUCCUGACCAUCAU | Chmp | [1759-1777] | [1730-1748] |
| 447 | AAAGCGGGAAUCAUGUGCC | GGCACAUGAUUCCCGCUUU | Chmp | [2222-2240] | [2193-2211] |
| 448 | AUCUCCAUGGGCGAGAAGU | ACUUCUCGCCCAUGGAGAU | GP, Chn, Chmp | [618-636] | [589-607] |
| 449 | UAUGAUGGUCACACGUUCC | GGAACGUGUGACCAUCAUA | Chmp | [1899-1917] | [1870-1888] |
| 450 | UGCACAACUGUAUCUAUGC | GCAUAGAUACAGUUGUGCA | Ms, Chmp | [1729-1747] | [1700-1718] |
| 451 | UCGAUGGCCACAUCUAUGC | GCAUAGAUGUGGCCAUCGA | Chmp | [1447-1465] | [1418-1436] |
| 452 | UGAUUUAUUCUUGGAUACC | GGUAUCCAAGAAUAAAUCA | Chmp | [2388-2406] | [2359-2377] |
| 453 | GAUCACAGCAAUGAACACC | GGUGUUCAUUGCUGUGAUC | Chmp | [1682-1700] | [1653-1671] |
| 454 | UUCUUGGAUACCUGGGAGG | CCUCCCAGGUAUCCAAGAA | Chmp | [2395-2413] | [2366-2384] |
| 455 | AAAUAACCCAUCUUCCGGG | CCCGGAAGAUGGGUUAUUU | Chmp | [2153-2171] | [2124-2142] |
| 456 | AUGACCAAUCAGUGGUCGC | GCGACCACUGAUUGGUCAU | Chn, Chmp | [1380-1398] | [1351-1369] |
| 457 | UACCAGAUCGACAGCGUUG | CAACGCUGUCGAUCUGGUA | Chmp | [669-687] | [640-658] |
| 458 | UCCAUUGAGGGUAUCCACC | GGUGGAUACCCUCAAUGGA | Chmp | [555-573] | [526-544] |
| 459 | AACCGCCUUAAUUCAGCUG | CAGCUGAAUUAAGGCGGUU | Chmp | [1629-1647] | [1600-1618] |
| 460 | AUUUUGUUGAUAAGUAACC | GGUUACUUAUCAACAAAAU | Chmp | [2521-2539] | [2492-2510] |
| 461 | ACUGUACCUGUUGAGGCAC | GUGCCUCAACAGGUACAGU | Chmp | [2047-2065] | [2018-2036] |
| 462 | UUGAAUUCGCCUACACGGC | GCCGUGUAGGCGAAUUCAA | | [595-613] | [566-584] |
| 463 | AAUGAACACCAUCCGAAGC | GCUUCGGAUGGUGUUCAUU | Chmp | [1691-1709] | [1662-1680] |
| 464 | CUUCAAGGCCAUGUUCACC | GGUGAACAUGGCCUUGAAG | Chmp | [503-521] | [474-492] |
| 465 | CUCUGGAAAUGUGGUUCCC | GGGAACCACAUUUCCAGAG | Chmp | [2444-2462] | [2415-2433] |
| 466 | ACCAGCAGAACUGUACCUG | CAGGUACAGUUCUGCUGGU | Chmp | [2038-2056] | [2009-2027] |
| 467 | CCUCUGGAAAUGUGGUUCC | GGAACCACAUUUCCAGAGG | Chmp | [2443-2461] | [2414-2432] |
| 468 | GUCAAGAUCUUCGAGGAGC | GCUCCUCGAAGAUCUUGAC | Chmp | [1089-1107] | [1060-1078] |
| 469 | ACAGCAAUGAACACCAUCC | GGAUGGUGUUCAUUGCUGU | Chmp | [1686-1704] | [1657-1675] |
| 470 | AAUCUACGUCCUUGGAGGC | GCCUCCAAGGACGUAGAUU | Chmp | [1880-1898] | [1851-1869] |
| 471 | UAUGAUGGUCAGGACCAGC | GCUGGUCCUGACCAUCAUA | Chmp | [1758-1776] | [1729-1747] |
| 472 | UCCUUGGAGGCUAUGAUGG | CCAUCAUAGCCUCCAAGGA | Chmp | [1888-1906] | [1859-1877] |
| 473 | UGCAUCCACCACAACAGUG | CACUGUUGUGGUGGAUGCA | Chmp | [1485-1503] | [1456-1474] |
| 474 | UACAUCUACAUGCAUUUUG | CAAAAUGCAUGUAGAUGUA | Chmp | [801-819] | [772-790] |
| 475 | AACUUCCUGCAGAUGCAGC | GCUGCAUCUGCAGGAAGUU | Chmp | [1020-1038] | [991-1009] |
| 476 | AUUGGCUGUGUGGAGUUGC | GCAACUCCACACAGCCAAU | | [765-783] | [736-754] |
| 477 | UACCUGGAGGCUUACAACC | GGUUGUAAGCCUCCAGGUA | Chmp | [1206-1224] | [1177-1195] |
| 478 | ACACUGCAGGUCAAGUACC | GGUACUUGACCUGCAGUGU | Chmp | [423-441] | [394-412] |
| 479 | UACCUGGUCAAGAUCUUCG | CGAAGAUCUUGACCAGGUA | Chmp | [1083-1101] | [1054-1072] |
| 480 | GAGUUCUUCAACCUGUCCC | GGGACAGGUUGAAGAACUC | GP, Chmp | [840-858] | [811-829] |
| 481 | UACGUCCUUGGAGGCUAUG | CAUAGCCUCCAAGGACGUA | Chmp | [1884-1902] | [1855-1873] |
| 482 | UUCCUGGACAGUGUGGAGU | ACUCCACACUGUCCAGGAA | GP, Chmp | [1914-1932] | [1885-1903] |
| 483 | UUUGGCAUCAUGAACGAGC | GCUCGUUCAUGAUGCCAAA | Rat, Chmp | [375-393] | [346-364] |
| 484 | GACAUCUCAAAAGAAGUCC | GGACUUCUUUUGAGAUGUC | Chmp | [2203-2221] | [2174-2192] |
| 485 | AUCUACGUCCUUGGAGGCU | AGCCUCCAAGGACGUAGAU | Chmp | [1881-1899] | [1852-1870] |
| 486 | UUGGGCAAAAAUACAGUCC | GGACUGUAUUUUUGCCCAA | | [2075-2093] | [2046-2064] |
| 487 | AUGAACACCAUCCGAAGCG | CGCUUCGGAUGGUGUUCAU | Chmp | [1692-1710] | [1663-1681] |
| 488 | AUCCACCACAACAGUGUGG | CCACACUGUUGUGGUGGAU | Chmp | [1488-1506] | [1459-1477] |
| 489 | AUGUACCAGAUCGACAGCG | CGCUGUCGAUCUGGUACAU | Chn, Chmp | [666-684] | [637-655] |

TABLE B7
SHC1 19-mer oligomer pairs - SHC transforming protein 1

| | | | | Human- | |
|---|---|---|---|---|---|
| | | | Other | 52693920: | Human-34147725: |
| No. | Sense | AntiSense | Sp | 1-1752 | 121-1545 |

| | | | | | |
|---|---|---|---|---|---|
| 1 | ACCUGAAAUUUGCUGGAAU | AUUCCAGCAAAUUUCAGGU | | [671-689] | [461-479] |
| 2 | CGAGUAUGUCGCCUAUGUU | AACAUAGGCGACAUACUCG | | [813-831] | [603-621] |
| 3 | CAGAGAGCUUUUUGAUGAU | AUCAUCAAAAAGCUCUCUG | | [1254-1272] | [1047-1065] |
| 4 | GCAGAGAGCUUUUUGAUGA | UCAUCAAAAAGCUCUCUGC | | [1253-1271] | [1046-1064] |
| 5 | CCGCUUUGAAAGUGUCAGU | ACUGACACUUUCAAAGCGG | | [1641-1659] | [1434-1452] |
| 6 | AGCUUUUUGAUGAUCCCUC | GAGGGAUCAUCAAAAAGCU | | [1259-1277] | [1052-1070] |
| 7 | UGACCAUCAGUACUAUAAU | AUUAUAGUACUGAUGGUCA | | [1035-1053] | [825-843] |
| 8 | CACAUGCAAUCUAUCUCAU | AUGAGAUAGAUUGCAUGUG | Rat | [766-784] | [556-574] |
| 9 | CCUACUUGGUUCGGUACAU | AUGUACCGAACCAAGUAGG | Rat, Ms | [482-500] | [272-290] |
| 10 | CCUAUGUCAACGUCCAGAA | UUCUGGACGUUGACAUAGG | | [1277-1295] | [1070-1088] |
| 11 | AGAGAGCUUUUUGAUGAUC | GAUCAUCAAAAAGCUCUCU | | [1255-1273] | [1048-1066] |
| 12 | AGAGCUUUUUGAUGAUCCC | GGGAUCAUCAAAAAGCUCU | | [1257-1275] | [1050-1068] |
| 13 | UCAAACAAUACCUCAGGAA | UUCCUGAGGUAUUGUUUGA | | [935-953] | [725-743] |
| 14 | ACAUGCAAUCUAUCUCAUU | AAUGAGAUAGAUUGCAUGU | Rat | [767-785] | [557-575] |
| 15 | AACCUGAAAUUUGCUGGAA | UUCCAGCAAAUUUCAGGUU | | [670-688] | [460-478] |
| 16 | CGCUUUGAAAGUGUCAGUC | GACUGACACUUUCAAAGCG | | [1642-1660] | [1435-1453] |
| 17 | GGGACCUGUUUGACAUGAA | UUCAUGUCAAACAGGUCCC | | [1367-1385] | [1160-1178] |
| 18 | CCUCCUAUGUCAACGUCCA | UGGACGUUGACAUAGGAGG | | [1274-1292] | [1067-1085] |
| 19 | UCCCUCCUAUGUCAACGUC | GACGUUGACAUAGGAGGGA | | [1272-1290] | [1065-1083] |
| 20 | GUACUAUAAUGACUUCCCG | CGGGAAGUCAUUAUAGUAC | | [1044-1062] | [834-852] |
| 21 | AGGGUGUGGUUCGGACUAA | UUAGUCCGAACCACACCCU | | [1616-1634] | [1409-1427] |
| 22 | AGACAUGAGGCUUCGGGAA | UUCCCGAAGCCUCAUGUCU | | [1092-1110] | [882-900] |
| 23 | GCGCUUCAAACAAUACCUC | GAGGUAUUGUUUGAAGCGC | | [930-948] | [720-738] |
| 24 | CCAAUCACUCUCACCGUCU | AGACGGUGAGAGUGAUUGG | | [691-709] | [481-499] |
| 25 | GCAUUUGCUACUGGUGGAC | GUCCACCAGUAGCAAAUGC | | [1593-1611] | [1386-1404] |
| 26 | GUGGUAGACAUGAGGCUUC | GAAGCCUCAUGUCUACCAC | | [1087-1105] | [877-895] |
| 27 | CAAUCACUCUCACCGUCUC | GAGACGGUGAGAGUGAUUG | | [692-710] | [482-500] |
| 28 | CGGGAGCUUUGUCAAUAAG | CUUAUUGACAAAGCUCCCG | Rat, Ms | [411-429] | [201-219] |
| 29 | GGACAUGAACAAGCUGAGU | ACUCAGCUUGUUCAUGUCC | Rat, Ms | [327-345] | [117-135] |
| 30 | CCCAAUCCUGCUAUCAAUG | CAUUGAUAGCAGGAUUGGG | | [1336-1354] | [1129-1147] |
| 31 | CGAGUUGCGCUUCAAACAA | UUGUUUGAAGCGCAACUCG | | [924-942] | [714-732] |
| 32 | GCUUUGAAAGUGUCAGUCA | UGACUGACACUUUCAAAGC | | [1643-1661] | [1436-1454] |
| 33 | UGAUGGCUCAGCAUGGGAU | AUCCCAUGCUGAGCCAUCA | | [996-1014] | [786-804] |
| 34 | UGCGCUUCAAACAAUACCU | AGGUAUUGUUUGAAGCGCA | | [929-947] | [719-737] |
| 35 | AUGCAAUCUAUCUCAUUUG | CAAAUGAGAUAGAUUGCAU | | [769-787] | [559-577] |
| 36 | ACCACAUGCAAUCUAUCUC | GAGAUAGAUUGCAUGUGGU | | [764-782] | [554-572] |
| 37 | CCACCACAUGCAAUCUAUC | GAUAGAUUGCAUGUGGUGG | | [762-780] | [552-570] |
| 38 | GUACAUGGGUUGUGUGGAG | CUCCACACAACCCAUGUAC | | [495-513] | [285-303] |
| 39 | GGAUCACCGCUUUGAAAGU | ACUUUCAAAGCGGUGAUCC | | [1635-1653] | [1428-1446] |
| 40 | GGUUCGGACUAAGGAUCAC | GUGAUCCUUAGUCCGAACC | | [1623-1641] | [1416-1434] |
| 41 | CGGGACCUGUUUGACAUGA | UCAUGUCAAACAGGUCCCG | | [1366-1384] | [1159-1177] |
| 42 | CGCUUCAAACAAUACCUCA | UGAGGUAUUGUUUGAAGCG | | [931-949] | [721-739] |
| 43 | GACAUGAACAAGCUGAGUG | CACUCAGCUUGUUCAUGUC | Rat, Ms | [328-346] | [118-136] |
| 44 | GCUUCAAACAAUACCUCAG | CUGAGGUAUUGUUUGAAGC | | [932-950] | [722-740] |
| 45 | AGUUGCGCUUCAAACAAUA | UAUUGUUUGAAGCGCAACU | | [926-944] | [716-734] |
| 46 | AGCUACCACAUGGACAAUC | GAUUGUCCAUGUGGUAGCU | Rat, Ms | [1669-1687] | [1462-1480] |
| 47 | CAGCUACCACAUGGACAAU | AUUGUCCAUGUGGUAGCUG | Rat, Ms | [1668-1686] | [1461-1479] |
| 48 | ACCUUAUCAGCUACCACAU | AUGUGGUAGCUGAUAAGGU | | [1661-1679] | [1454-1472] |
| 49 | GGACUAAGGAUCACCGCUU | AAGCGGUGAUCCUUAGUCC | | [1628-1646] | [1421-1439] |
| 50 | UGGGCAGCCUAAGCAUUUG | CAAAUGCUUAGGCUGCCCA | | [1581-1599] | [1374-1392] |
| 51 | CGAACUGUGUCUACAGCAA | UUGCUGUAGACACAGUUCG | | [1713-1731] | [1506-1524] |
| 52 | GUGUCAGUCACCUUAUCAG | CUGAUAAGGUGACUGACAC | | [1652-1670] | [1445-1463] |
| 53 | GGGAGGAGUAACCUGAAAU | AUUUCAGGUUACUCCUCCC | | [661-679] | [451-469] |
| 54 | GCCUAAGCAUUUGCUACUG | CAGUAGCAAAUGCUUAGGC | | [1587-1605] | [1380-1398] |
| 55 | ACAAUCACUUGCCCAUCAU | AUGAUGGGCAAGUGAUUGU | Ms | [1682-1700] | [1475-1493] |
| 56 | AGAUCCAGAAGUCCGCAAA | UUUGCGGACUUCUGGAUCU | | [1206-1224] | [996-1014] |
| 57 | CCAUCAGUACUAUAAUGAC | GUCAUUAUAGUACUGAUGG | | [1038-1056] | [828-846] |
| 58 | AGCCACCUGACCAUCAGUA | UACUGAUGGUCAGGUGGCU | | [1028-1046] | [818-836] |
| 59 | AGCCGAGUAUGUCGCCUAU | AUAGGCGACAUACUCGGCU | | [810-828] | [600-618] |
| 60 | AGGAGGAGAAAGCCCUGUA | UACAGGGCUUUCUCCUCCU | | [619-637] | [409-427] |
| 61 | UCAGCUACCACAUGGACAA | UUGUCCAUGUGGUAGCUGA | Rat, Ms | [1667-1685] | [1460-1478] |
| 62 | GGGAGCUACAUUGCCUGUA | UACAGGCAAUGUAGCUCCC | | [1170-1188] | [960-978] |
| 63 | CUGACCAUCAGUACUAUAA | UUAUAGUACUGAUGGUCAG | | [1034-1052] | [824-842] |
| 64 | GAAAUUUGCUGGAAUGCCA | UGGCAUUCCAGCAAAUUUC | | [675-693] | [465-483] |
| 65 | ACGUCCAGAACCUAGACAA | UUGUCUAGGUUCUGGACGU | | [1286-1304] | [1079-1097] |
| 66 | ACCAUCAGUACUAUAAUGA | UCAUUAUAGUACUGAUGGU | | [1037-1055] | [827-845] |
| 67 | GCAAACAGAUCAUCGCCAA | UUGGCGAUGAUCUGUUUGC | | [743-761] | [533-551] |
| 68 | CAGACUGCAAACAGAUCAU | AUGAUCUGUUUGCAGUCUG | Rat | [737-755] | [527-545] |
| 69 | ACCACAUGGACAAUCACUU | AAGUGAUUGUCCAUGUGGU | Rat, Ms | [1673-1691] | [1466-1484] |
| 70 | CUAAGCAUUUGCUACUGGU | ACCAGUAGCAAAUGCUUAG | | [1589-1607] | [1382-1400] |
| 71 | GAGAUCCAGAAGUCCGCAA | UUGCGGACUUCUGGAUCUC | | [1205-1223] | [995-1013] |
| 72 | CGCCUAUGUUGCCAAAGAC | GUCUUUGGCAACAUAGGCG | | [822-840] | [612-630] |
| 73 | UGGACAAUCACUUGCCCAU | AUGGGCAAGUGAUUGUCCA | Ms | [1679-1697] | [1472-1490] |
| 74 | AGGCAGAGAGCUUUUUGAU | AUCAAAAAGCUCUCUGCCU | | [1251-1269] | [1044-1062] |
| 75 | CCUGACCAUCAGUACUAUA | UAUAGUACUGAUGGUCAGG | | [1033-1051] | [823-841] |
| 76 | CCGCAGACUGCAAACAGAU | AUCUGUUUGCAGUCUGCGG | | [734-752] | [524-542] |
| 77 | GGGUUUCCUACUUGGUUCG | CGAACCAAGUAGGAAACCC | Rat, Ms | [476-494] | [266-284] |
| 78 | GGACAAUCACUUGCCCAUC | GAUGGGCAAGUGAUUGUCC | Ms | [1680-1698] | [1473-1491] |
| 79 | GCAGCCUAAGCAUUUGCUA | UAGCAAAUGCUUAGGCUGC | | [1584-1602] | [1377-1395] |
| 80 | CAGGCAGAGAGCUUUUUGA | UCAAAAAGCUCUCUGCCUG | | [1250-1268] | [1043-1061] |
| 81 | GGAGCUACAUUGCCUGUAG | CUACAGGCAAUGUAGCUCC | | [1171-1189] | [961-979] |
| 82 | GCAAUCUAUCUCAUUUGCA | UGCAAAUGAGAUAGAUUGC | | [771-789] | [561-579] |
| 83 | UGCAUCCCAACGACAAAGU | ACUUUGUCGUUGGGAUGCA | Rat, Ms | [446-464] | [236-254] |
| 84 | GAAUGCCAAUCACUCUCAC | GUGAGAGUGAUUGGCAUUC | Ms | [686-704] | [476-494] |
| 85 | CAACGACAAAGUCAUGGGA | UCCCAUGACUUUGUCGUUG | Rat, Ms | [453-471] | [243-261] |
| 86 | AGCCUAAGCAUUUGCUACU | AGUAGCAAAUGCUUAGGCU | | [1586-1604] | [1379-1397] |
| 87 | GGCAGCCUAAGCAUUUGCU | AGCAAAUGCUUAGGCUGCC | | [1583-1601] | [1376-1394] |
| 88 | ACCUGACCAUCAGUACUAU | AUAGUACUGAUGGUCAGGU | | [1032-1050] | [822-840] |
| 89 | CACCUGACCAUCAGUACUA | UAGUACUGAUGGUCAGGUG | | [1031-1049] | [821-839] |
| 90 | GGCUUUGAUGGCUCAGCAU | AUGCUGAGCCAUCAAAGCC | | [991-1009] | [781-799] |
| 91 | ACCACCACAUGCAAUCUAU | AUAGAUUGCAUGUGGUGGU | | [761-779] | [551-569] |
| 92 | GCAGACUGCAAACAGAUCA | UGAUCUGUUUGCAGUCUGC | Rat | [736-754] | [526-544] |
| 93 | UGAAAGUGUCAGUCACCUU | AAGGUGACUGACACUUUCA | | [1647-1665] | [1440-1458] |
| 94 | GGCAGAGAGCUUUUUGAUG | CAUCAAAAAGCUCUCUGCC | | [1252-1270] | [1045-1063] |
| 95 | GCCACUUGGGAGCUACAUU | AAUGUAGCUCCCAAGUGGC | | [1163-1181] | [953-971] |
| 96 | UGUCGCCUAUGUUGCCAAA | UUUGGCAACAUAGGCGACA | | [819-837] | [609-627] |
| 97 | UGGAGGUCCUCCAGUCAAU | AUUGACUGGAGGACCUCCA | | [509-527] | [299-317] |
| 98 | GUCACCUUAUCAGCUACCA | UGGUAGCUGAUAAGGUGAC | | [1658-1676] | [1451-1469] |
| 99 | UCACCGCUUUGAAAGUGUC | GACACUUUCAAAGCGGUGA | | [1638-1656] | [1431-1449] |
| 100 | CCUAAGCAUUUGCUACUGG | CCAGUAGCAAAUGCUUAGG | | [1588-1606] | [1381-1399] |
| 101 | GCCCUUCGAAGAUGCUCUU | AAGAGCAUCUUCGAAGGGC | | [1386-1404] | [1179-1197] |
| 102 | UGCUAUCAAUGGCAGUGCA | UGCACUGCCAUUGAUAGCA | | [1344-1362] | [1137-1155] |
| 103 | UGACAGGAUGGCUGGCUUU | AAAGCCAGCCAUCCUGUCA | Rat, Ms | [978-996] | [768-786] |
| 104 | CCUUCGAGUUGCGCUUCAA | UUGAAGCGCAACUCGAAGG | | [920-938] | [710-728] |
| 105 | UUGCCAAAGACCCUGUGAA | UUCACAGGGUCUUUGGCAA | Rat, Ms | [830-848] | [620-638] |
| 106 | UGCAAUCUAUCUCAUUUGC | GCAAAUGAGAUAGAUUGCA | | [770-788] | [560-578] |
| 107 | GCGAACUGUGUCUACAGCA | UGCUGUAGACACAGUUCGC | | [1712-1730] | [1505-1523] |
| 108 | AGUAUGUGCUCACUGGCUU | AAGCCAGUGAGCACAUACU | | [1556-1574] | [1349-1367] |
| 109 | UGGCUUUGAUGGCUCAGCA | UGCUGAGCCAUCAAAGCCA | | [990-1008] | [780-798] |
| 110 | AGACUGCAAACAGAUCAUC | GAUGAUCUGUUUGCAGUCU | | [738-756] | [528-546] |
| 111 | GCAUCCCAACGACAAAGUC | GACUUUGUCGUUGGGAUGC | Rat, Ms | [447-465] | [237-255] |
| 112 | GCUGCAUCCCAACGACAAA | UUUGUCGUUGGGAUGCAGC | Rat, Ms | [444-462] | [234-252] |
| 113 | AGCAUUUGCUACUGGUGGA | UCCACCAGUAGCAAAUGCU | | [1592-1610] | [1385-1403] |
| 114 | UCAACGUCCAGAACCUAGA | UCUAGGUUCUGGACGUUGA | | [1283-1301] | [1076-1094] |
| 115 | UGCCAAAGACCCUGUGAAU | AUUCACAGGGUCUUUGGCA | Rat, Ms | [831-849] | [621-639] |
| 116 | CCAACCACCACAUGCAAUC | GAUUGCAUGUGGUGGUUGG | | [758-776] | [548-566] |
| 117 | UGCAAACAGAUCAUCGCCA | UGGCGAUGAUCUGUUUGCA | | [742-760] | [532-550] |
| 118 | CCAACGACAAAGUCAUGGG | CCCAUGACUUUGUCGUUGG | Rat, Ms | [452-470] | [242-260] |
| 119 | GGAGCUUUGUCAAUAAGCC | GGCUUAUUGACAAAGCUCC | Rat, Ms | [413-431] | [203-221] |
| 120 | CCUGCUAUCAAUGGCAGUG | CACUGCCAUUGAUAGCAGG | | [1342-1360] | [1135-1153] |
| 121 | AGCCACUUGGGAGCUACAU | AUGUAGCUCCCAAGUGGCU | | [1162-1180] | [952-970] |
| 122 | CCACCUGACCAUCAGUACU | AGUACUGAUGGUCAGGUGG | | [1030-1048] | [820-838] |
| 123 | GCCAAAGACCCUGUGAAUC | GAUUCACAGGGUCUUUGGC | Rat, Ms | [832-850] | [622-640] |
| 124 | AACCACCACAUGCAAUCUA | UAGAUUGCAUGUGGUGGUU | | [760-778] | [550-568] |
| 125 | GCUUUGUCAAUAAGCCCAC | GUGGGCUUAUUGACAAAGC | Rat, Ms | [416-434] | [206-224] |
| 126 | CAGUCACCUUAUCAGCUAC | GUAGCUGAUAAGGUGACUG | | [1656-1674] | [1449-1467] |
| 127 | UGACAUGAAGCCCUUCGAA | UUCGAAGGGCUUCAUGUCA | Rat | [1377-1395] | [1170-1188] |
| 128 | CUGCCACAUUCUGGAGUGU | ACACUCCAGAAUGUGGCAG | | [858-876] | [648-666] |
| 129 | GCCAACCACCACAUGCAAU | AUUGCAUGUGGUGGUUGGC | | [757-775] | [547-565] |
| 130 | CGCAGACUGCAAACAGAUC | GAUCUGUUUGCAGUCUGCG | | [735-753] | [525-543] |
| 131 | CACCUUAUCAGCUACCACA | UGUGGUAGCUGAUAAGGUG | | [1660-1678] | [1453-1471] |
| 132 | CAGGAUGUCAUCAGCACCA | UGGUGCUGAUGACAUCCUG | Ms | [892-910] | [682-700] |
| 133 | UGGCCAGUAUGUGCUCACU | AGUGAGCACAUACUGGCCA | Ms | [1551-1569] | [1344-1362] |
| 134 | AGGAUGUCAUCAGCACCAU | AUGGUGCUGAUGACAUCCU | Ms | [893-911] | [683-701] |
| 135 | CCCUUCGAAGAUGCUCUUC | GAAGAGCAUCUUCGAAGGG | | [1387-1405] | [1180-1198] |
| 136 | UGUUUGACAUGAAGCCCUU | AAGGGCUUCAUGUCAAACA | | [1373-1391] | [1166-1184] |
| 137 | CUGUUUGACAUGAAGCCCU | AGGGCUUCAUGUCAAACAG | | [1372-1390] | [1165-1183] |
| 138 | GGAUGUCAUCAGCACCAUU | AAUGGUGCUGAUGACAUCC | | [894-912] | [684-702] |
| 139 | UCAUCGCCAACCACCACAU | AUGUGGUGGUUGGCGAUGA | | [752-770] | [542-560] |
| 140 | GGGUUCUUAUAAUGGAAAA | UUUUCCAUUAUAAGAACCC | | | |
| 141 | CCCAAGCCCAAGUACAAUC | GAUUGUACUUGGGCUUGGG | | | |
| 142 | AGGAAGGGCAGCUGAUGAU | AUCAUCAGCUGCCCUUCCU | | | |

TABLE B8
SHC1 - 19-mer oligomer pairs SHC transforming protein 1

| | | | | Human- | Human- |
|---|---|---|---|---|---|
| | | | | 52693920: | 34147725: |
| No. | Sense | AntiSense | Other Sp | 1-1752 | 121-1545 |

| | | | | | |
|---|---|---|---|---|---|
| 1 | ACGGGAGCUUUGUCAAUAA | UUAUUGACAAAGCUCCCGU | Rat, Ms, GP, | [410-428] | [200-218] |
| | | | Chn | | |
| 2 | CAGGAUGGCUGGCUUUGAU | AUCAAAGCCAGCCAUCCUG | Rat, Ms | [981-999] | [771-789] |
| 3 | CCAGAAGUCCGCAAACAGA | UCUGUUUGCGGACUUCUGG | | [1210-1228] | [1000-1018] |
| 4 | CAAUCUAUCUCAUUUGCAU | AUGCAAAUGAGAUAGAUUG | | [772-790] | [562-580] |
| 5 | GAUGAUCCCUCCUAUGUCA | UGACAUAGGAGGGAUCAUC | | [1267-1285] | [1060-1078] |
| 6 | GGAGGAGUAACCUGAAAUU | AAUUUCAGGUUACUCCUCC | GP, Chn | [662-680] | [452-470] |
| 7 | UAAGGAUCACCGCUUUGAA | UUCAAAGCGGUGAUCCUUA | | [1632-1650] | [1425-1443] |
| 8 | GAGUUGCGCUUCAAACAAU | AUUGUUUGAAGCGCAACUC | | [925-943] | [715-733] |
| 9 | AAAUUUGCUGGAAUGCCAA | UUGGCAUUCCAGCAAAUUU | | [676-694] | [466-484] |
| 10 | GUGUGGUUCGGACUAAGGA | UCCUUAGUCCGAACCACAC | | [1619-1637] | [1412-1430] |
| 11 | AAGGAUCACCGCUUUGAAA | UUUCAAAGCGGUGAUCCUU | | [1633-1651] | [1426-1444] |
| 12 | UUUUGAUGAUCCCUCCUAU | AUAGGAGGGAUCAUCAAAA | | [1263-1281] | [1056-1074] |
| 13 | UGUGGUUCGGACUAAGGAU | AUCCUUAGUCCGAACCACA | | [1620-1638] | [1413-1431] |
| 14 | UGUGGAGCGGAAACUGUGA | UCACAGUUUCCGCUCCACA | | [1734-1752] | [1527-1545] |
| 15 | CUUCGAGUUGCGCUUCAAA | UUUGAAGCGCAACUCGAAG | | [921-939] | [711-729] |
| 16 | GGACCUGUUUGACAUGAAG | CUUCAUGUCAAACAGGUCC | | [1368-1386] | [1161-1179] |
| 17 | GGAGUAACCUGAAAUUUGC | GCAAAUUUCAGGUUACUCC | GP | [665-683] | [455-473] |
| 18 | GCUACCACAUGGACAAUCA | UGAUUGUCCAUGUGGUAGC | Rat, Ms | [1670-1688] | [1463-1481] |
| 19 | AUGGGAUGAGGAGGAGGAA | UUCCUCCUCCUCAUCCCAU | | [1008-1026] | [798-816] |
| 20 | CCACGGGAGCUUUGUCAAU | AUUGACAAAGCUCCCGUGG | | [408-426] | [198-216] |
| 21 | CAUUCUGGAGUGUCCCGAA | UUCGGGACACUCCAGAAUG | | [864-882] | [654-672] |
| 22 | GACUAAGGAUCACCGCUUU | AAAGCGGUGAUCCUUAGUC | | [1629-1647] | [1422-1440] |
| 23 | ACAUGAAGCCCUUCGAAGA | UCUUCGAAGGGCUUCAUGU | Rat | [1379-1397] | [1172-1190] |
| 24 | CACGGGAGCUUUGUCAAUA | UAUUGACAAAGCUCCCGUG | Rat, Ms, GP, | [409-427] | [199-217] |
| | | | Chn | | |
| 25 | CCAUCAGUCUGGUGUGUGA | UCACACACCAGACUGAUGG | GP, Chn | [572-590] | [362-380] |
| 26 | UAGACAUGAGGCUUCGGGA | UCCCGAAGCCUCAUGUCUA | Chn | [1091-1109] | [881-899] |
| 27 | CCACAUGCAAUCUAUCUCA | UGAGAUAGAUUGCAUGUGG | | [765-783] | [555-573] |
| 28 | CAUGAACAAGCUGAGUGGA | UCCACUCAGCUUGUUCAUG | Rat, Ms, GP, Chn | [330-348] | [120-138] |
| 29 | GGUACAUGGGUUGUGUGGA | UCCACACAACCCAUGUACC | | [494-512] | [284-302] |
| 30 | CCUGAAAUUUGCUGGAAUG | CAUUCCAGCAAAUUUCAGG | | [672-690] | [462-480] |
| 31 | GAGUAACCUGAAAUUUGCU | AGCAAAUUUCAGGUUACUC | | [666-684] | [456-474] |
| 32 | GAAAGUGUCAGUCACCUUA | UAAGGUGACUGACACUUUC | | [1648-1666] | [1441-1459] |
| 33 | CAGAAGUCCGCAAACAGAU | AUCUGUUUGCGGACUUCUG | | [1211-1229] | [1001-1019] |
| 34 | CCGAGUAUGUCGCCUAUGU | ACAUAGGCGACAUACUCGG | Chn | [812-830] | [602-620] |
| 35 | AGAUCAUCGCCAACCACCA | UGGUGGUUGGCGAUGAUCU | | [749-767] | [539-557] |
| 36 | GAGUAUGUCGCCUAUGUUG | CAACAUAGGCGACAUACUC | Chn | [814-832] | [604-622] |
| 37 | UCGAGUUGCGCUUCAAACA | UGUUUGAAGCGCAACUCGA | | [923-941] | [713-731] |
| 38 | UUUCCUACUUGGUUCGGUA | UACCGAACCAAGUAGGAAA | Rat, Ms, GP, Chn | [479-497] | [269-287] |
| 39 | AAUCAGAGAGCCUGCCACA | UGUGGCAGGCUCUCUGAUU | Chn | [847-865] | [637-655] |
| 40 | CAUGCAAUCUAUCUCAUUU | AAAUGAGAUAGAUUGCAUG | | [768-786] | [558-576] |
| 41 | CUUGGUUCGGUACAUGGGU | ACCCAUGUACCGAACCAAG | Rat | [486-504] | [276-294] |
| 42 | CAAACAGAUGCCACCUCCA | UGGAGGUGGCAUCUGUUUG | | [1221-1239] | [1011-1029] |
| 43 | CGUCCAGAACCUAGACAAG | CUUGUCUAGGUUCUGGACG | GP | [1287-1305] | [1080-1098] |
| 44 | CAAACAAUACCUCAGGAAC | GUUCCUGAGGUAUUGUUUG | | [936-954] | [726-744] |
| 45 | UGUCAACGUCCAGAACCUA | UAGGUUCUGGACGUUGACA | GP | [1281-1299] | [1074-1092] |
| 46 | UCGCCUAUGUUGCCAAAGA | UCUUUGGCAACAUAGGCGA | Chn | [821-839] | [611-629] |
| 47 | CAAACAGAUCAUCGCCAAC | GUUGGCGAUGAUCUGUUUG | | [744-762] | [534-552] |
| 48 | CCAAAGACCCUGUGAAUCA | UGAUUCACAGGGUCUUUGG | Rat, Ms, GP, Chn | [833-851] | [623-641] |
| 49 | CAUGAAGCCCUUCGAAGAU | AUCUUCGAAGGGCUUCAUG | Rat | [1380-1398] | [1173-1191] |
| 50 | GCUUUUUGAUGAUCCCUCC | GGAGGGAUCAUCAAAAAGC | | [1260-1278] | [1053-1071] |
| 51 | AACAGAUCAUCGCCAACCA | UGGUUGGCGAUGAUCUGUU | | [746-764] | [536-554] |
| 52 | UAACCUGAAAUUUGCUGGA | UCCAGCAAAUUUCAGGUUA | | [669-687] | [459-477] |
| 53 | GCAGCGAACUGUGUCUACA | UGUAGACACAGUUCGCUGC | | [1709-1727] | [1502-1520] |
| 54 | UCAGUCACCUUAUCAGCUA | UAGCUGAUAAGGUGACUGA | | [1655-1673] | [1448-1466] |
| 55 | UGGUUCGGACUAAGGAUCA | UGAUCCUUAGUCCGAACCA | | [1622-1640] | [1415-1433] |
| 56 | CUAUGUUGCCAAAGACCCU | AGGGUCUUUGGCAACAUAG | Rat, Ms, GP, Chn | [825-843] | [615-633] |
| 57 | AGACCCUGUGAAUCAGAGA | UCUCUGAUUCACAGGGUCU | Rat, Ms, GP, Chn | [837-855] | [627-645] |
| 58 | CAAAGACCCUGUGAAUCAG | CUGAUUCACAGGGUCUUUG | Rat, Ms, GP, Chn | [834-852] | [624-642] |
| 59 | CUAUGUCAACGUCCAGAAC | GUUCUGGACGUUGACAUAG | GP | [1278-1296] | [1071-1089] |
| 60 | CUACCACAUGGACAAUCAC | GUGAUUGUCCAUGUGGUAG | Rat, Ms | [1671-1689] | [1464-1482] |
| 61 | ACUUCAACACCCGGACUCA | UGAGUCCGGGUGUUGAAGU | | [539-557] | [329-347] |
| 62 | GGUGGUAGACAUGAGGCUU | AAGCCUCAUGUCUACCACC | GP | [1086-1104] | [876-894] |
| 63 | AUGAUCCCUCCUAUGUCAA | UUGACAUAGGAGGGAUCAU | | [1268-1286] | [1061-1079] |
| 64 | GGUUCGGUACAUGGGUUGU | ACAACCCAUGUACCGAACC | | [489-507] | [279-297] |
| 65 | CUACUUGGUUCGGUACAUG | CAUGUACCGAACCAAGUAG | Rat, Ms, GP, Chn | [483-501] | [273-291] |
| 66 | CUACAUUGCCUGUAGGACA | UGUCCUACAGGCAAUGUAG | | [1175-1193] | [965-983] |
| 67 | GAUCCAGAAGUCCGCAAAC | GUUUGCGGACUUCUGGAUC | | [1207-1225] | [997-1015] |
| 68 | ACAGGAUGGCUGGCUUUGA | UCAAAGCCAGCCAUCCUGU | Rat, Ms | [980-998] | [770-788] |
| 69 | GGAAUGCCAAUCACUCUCA | UGAGAGUGAUUGGCAUUCC | Ms, Chn | [685-703] | [475-493] |
| 70 | CAUCAGUACUAUAAUGACU | AGUCAUUAUAGUACUGAUG | GP, Chn | [1039-1057] | [829-847] |
| 71 | CUUUGAAAGUGUCAGUCAC | GUGACUGACACUUUCAAAG | | [1644-1662] | [1437-1455] |
| 72 | CUGGAAUGCCAAUCACUCU | AGAGUGAUUGGCAUUCCAG | Ms, Chn | [683-701] | [473-491] |
| 73 | GUGGGCAGCCUAAGCAUUU | AAAUGCUUAGGCUGCCCAC | | [1580-1598] | [1373-1391] |
| 74 | AUGUCAACGUCCAGAACCU | AGGUUCUGGACGUUGACAU | GP | [1280-1298] | [1073-1091] |
| 75 | ACAAUACCUCAGGAACCCA | UGGGUUCCUGAGGUAUUGU | GP | [939-957] | [729-747] |
| 76 | CUAAGGAUCACCGCUUUGA | UCAAAGCGGUGAUCCUUAG | | [1631-1649] | [1424-1442] |
| 77 | AGUGGGCAGCCUAAGCAUU | AAUGCUUAGGCUGCCCACU | | [1579-1597] | [1372-1390] |
| 78 | AGUGUCAGUCACCUUAUCA | UGAUAAGGUGACUGACACU | | [1651-1669] | [1444-1462] |
| 79 | UUGACAUGAAGCCCUUCGA | UCGAAGGGCUUCAUGUCAA | Rat | [1376-1394] | [1169-1187] |
| 80 | AUGUCGCCUAUGUUGCCAA | UUGGCAACAUAGGCGACAU | Chn | [818-836] | [608-626] |
| 81 | CACCGCUUUGAAAGUGUCA | UGACACUUUCAAAGCGGUG | | [1639-1657] | [1432-1450] |
| 82 | UGAUGAUCCCUCCUAUGUC | GACAUAGGAGGGAUCAUCA | | [1266-1284] | [1059-1077] |
| 83 | ACAUGAACAAGCUGAGUGG | CCACUCAGCUUGUUCAUGU | Rat, Ms, GP, Chn | [329-347] | [119-137] |
| 84 | CAAUACCUCAGGAACCCAC | GUGGGUUCCUGAGGUAUUG | GP | [940-958] | [730-748] |
| 85 | CCACUUGGGAGCUACAUUG | CAAUGUAGCUCCCAAGUGG | | [1164-1182] | [954-972] |
| 86 | UUCAAACAAUACCUCAGGA | UCCUGAGGUAUUGUUUGAA | | [934-952] | [724-742] |
| 87 | AAAGUGUCAGUCACCUUAU | AUAAGGUGACUGACACUUU | | [1649-1667] | [1442-1460] |
| 88 | GACAAUCACUUGCCCAUCA | UGAUGGGCAAGUGAUUGUC | Ms | [1681-1699] | [1474-1492] |
| 89 | AAAGACCCUGUGAAUCAGA | UCUGAUUCACAGGGUCUUU | Rat, Ms, GP, Chn | [835-853] | [625-643] |
| 90 | CUCCUAUGUCAACGUCCAG | CUGGACGUUGACAUAGGAG | GP | [1275-1293] | [1068-1086] |
| 91 | AUGACAGGAUGGCUGGCUU | AAGCCAGCCAUCCUGUCAU | Rat, Ms | [977-995] | [767-785] |
| 92 | UGAACAAGCUGAGUGGAGG | CCUCCACUCAGCUUGUUCA | Rat, Ms, GP, Chn | [332-350] | [122-140] |
| 93 | CUUUUUGAUGAUCCCUCCU | AGGAGGGAUCAUCAAAAAG | | [1261-1279] | [1054-1072] |
| 94 | UCCUAUGUCAACGUCCAGA | UCUGGACGUUGACAUAGGA | GP | [1276-1294] | [1069-1087] |
| 95 | GAGCUUUUUGAUGAUCCCU | AGGGAUCAUCAAAAAGCUC | | [1258-1276] | [1051-1069] |
| 96 | GAGGAGUAACCUGAAAUUU | AAAUUUCAGGUUACUCCUC | GP | [663-681] | [453-471] |
| 97 | GAACUGUGUCUACAGCAAC | GUUGCUGUAGACACAGUUC | | [1714-1732] | [1507-1525] |
| 98 | UGAUCCCUCCUAUGUCAAC | GUUGACAUAGGAGGGAUCA | | [1269-1287] | [1062-1080] |
| 99 | UCCAGAAGUCCGCAAACAG | CUGUUUGCGGACUUCUGGA | | [1209-1227] | [999-1017] |
| 100 | CAUCCCAACGACAAAGUCA | UGACUUUGUCGUUGGGAUG | Rat, Ms, GP, Chn | [448-466] | [238-256] |
| 101 | AGCUACAUUGCCUGUAGGA | UCCUACAGGCAAUGUAGCU | | [1173-1191] | [963-981] |
| 102 | GUUGCGCUUCAAACAAUAC | GUAUUGUUUGAAGCGCAAC | | [927-945] | [717-735] |
| 103 | AAGAGCCACCUGACCAUCA | UGAUGGUCAGGUGGCUCUU | GP | [1025-1043] | [815-833] |
| 104 | AGAAGUCCGCAAACAGAUG | CAUCUGUUUGCGGACUUCU | | [1212-1230] | [1002-1020] |
| 105 | CAGCCUAAGCAUUUGCUAC | GUAGCAAAUGCUUAGGCUG | | [1585-1603] | [1378-1396] |
| 106 | CAGCGAACUGUGUCUACAG | CUGUAGACACAGUUCGCUG | | [1710-1728] | [1503-1521] |
| 107 | UUGGUUCGGUACAUGGGUU | AACCCAUGUACCGAACCAA | Rat | [487-505] | [277-295] |
| 108 | CCACAUGGACAAUCACUUG | CAAGUGAUUGUCCAUGUGG | Ms | [1674-1692] | [1467-1485] |
| 109 | GACAUGAAGCCCUUCGAAG | CUUCGAAGGGCUUCAUGUC | Rat | [1378-1396] | [1171-1189] |
| 110 | AAGUGUCAGUCACCUUAUC | GAUAAGGUGACUGACACUU | | [1650-1668] | [1443-1461] |
| 111 | AGGAUGGCUGGCUUUGAUG | CAUCAAAGCCAGCCAUCCU | Rat, Ms | [982-1000] | [772-790] |
| 112 | GUUGCCAAAGACCCUGUGA | UCACAGGGUCUUUGGCAAC | Rat, Ms, GP, Chn | [829-847] | [619-637] |
| 113 | GCUGGAAUGCCAAUCACUC | GAGUGAUUGGCAUUCCAGC | Ms, Chn | [682-700] | [472-490] |
| 114 | UGCUGGAAUGCCAAUCACU | AGUGAUUGGCAUUCCAGCA | Ms | [681-699] | [471-489] |
| 115 | AGGAGUAACCUGAAAUUUG | CAAAUUUCAGGUUACUCCU | GP | [664-682] | [454-472] |
| 116 | CCUUAUCAGCUACCACAUG | CAUGUGGUAGCUGAUAAGG | | [1662-1680] | [1455-1473] |
| 117 | GCUAUCAAUGGCAGUGCAC | GUGCACUGCCAUUGAUAGC | | [1345-1363] | [1138-1156] |
| 118 | CUAUCUCAUUUGCAUCCGG | CCGGAUGCAAAUGAGAUAG | | [776-794] | [566-584] |
| 119 | UGGUUCCAUGGGAAGCUGA | UCAGCUUCCCAUGGAACCA | | [1462-1480] | [1255-1273] |
| 120 | UUUUUGAUGAUCCCUCCUA | UAGGAGGGAUCAUCAAAAA | | [1262-1280] | [1055-1073] |
| 121 | AUCAGAGAGCCUGCCACAU | AUGUGGCAGGCUCUCUGAU | Chn | [848-866] | [638-656] |
| 122 | UCAGGAACCCACCCAAACU | AGUUUGGGUGGGUUCCUGA | | [947-965] | [737-755] |
| 123 | AAUUUGCUGGAAUGCCAAU | AUUGGCAUUCCAGCAAAUU | | [677-695] | [467-485] |
| 124 | ACAUGGGUUGUGUGGAGGU | ACCUCCACACAACCCAUGU | | [497-515] | [287-305] |
| 125 | AUCAGCUACCACAUGGACA | UGUCCAUGUGGUAGCUGAU | Rat, Ms | [1666-1684] | [1459-1477] |
| 126 | CUUUGAUGGCUCAGCAUGG | CCAUGCUGAGCCAUCAAAG | | [993-1011] | [783-801] |
| 127 | UGAAUCAGAGAGCCUGCCA | UGGCAGGCUCUCUGAUUCA | Rat, Ms, Chn | [845-863] | [635-653] |
| 128 | CACCACAUGCAAUCUAUCU | AGAUAGAUUGCAUGUGGUG | | [763-781] | [553-571] |
| 129 | ACAGAUCAUCGCCAACCAC | GUGGUUGGCGAUGAUCUGU | | [747-765] | [537-555] |
| 130 | ACUUGGUUCGGUACAUGGG | CCCAUGUACCGAACCAAGU | Rat, Ms, GP, Chn | [485-503] | [275-293] |
| 131 | UUUGAUGAUCCCUCCUAUG | CAUAGGAGGGAUCAUCAAA | | [1264-1282] | [1057-1075] |
| 132 | UUAUCAGCUACCACAUGGA | UCCAUGUGGUAGCUGAUAA | | [1664-1682] | [1457-1475] |
| 133 | ACAAGGAGGAGAAAGCCCU | AGGGCUUUCUCCUCCUUGU | | [616-634] | [406-424] |
| 134 | GUCAGUCACCUUAUCAGCU | AGCUGAUAAGGUGACUGAC | | [1654-1672] | [1447-1465] |
| 135 | UGCCAAUCACUCUCACCGU | ACGGUGAGAGUGAUUGGCA | | [689-707] | [479-497] |
| 136 | AUCCAGAAGUCCGCAAACA | UGUUUGCGGACUUCUGGAU | | [1208-1226] | [998-1016] |
| 137 | UCAUCAGCACCAUUGGCCA | UGGCCAAUGGUGCUGAUGA | GP, Chn | [899-917] | [689-707] |
| 138 | AUCAGUACUAUAAUGACUU | AAGUCAUUAUAGUACUGAU | GP, Chn | [1040-1058] | [830-848] |
| 139 | GUAUGUGCUCACUGGCUUG | CAAGCCAGUGAGCACAUAC | GP | [1557-1575] | [1350-1368] |
| 140 | GAGAGCUUUUUGAUGAUCC | GGAUCAUCAAAAAGCUCUC | | [1256-1274] | [1049-1067] |
| 141 | GUUUCCUACUUGGUUCGGU | ACCGAACCAAGUAGGAAAC | Rat, Ms, GP, Chn | [478-496] | [268-286] |
| 142 | CAACGUCCAGAACCUAGAC | GUCUAGGUUCUGGACGUUG | GP | [1284-1302] | [1077-1095] |
| 143 | GCCUAUGUUGCCAAAGACC | GGUCUUUGGCAACAUAGGC | Rat, Ms, GP, Chn | [823-841] | [613-631] |
| 144 | CAAUCACUUGCCCAUCAUC | GAUGAUGGGCAAGUGAUUG | Ms | [1683-1701] | [1476-1494] |
| 145 | UCAGAGAGCCUGCCACAUU | AAUGUGGCAGGCUCUCUGA | | [849-867] | [639-657] |
| 146 | UUCGGUACAUGGGUUGUGU | ACACAACCCAUGUACCGAA | | [491-509] | [281-299] |
| 147 | UCAGUACUAUAAUGACUUC | GAAGUCAUUAUAGUACUGA | GP, Chn | [1041-1059] | [831-849] |
| 148 | AUCCCAACGACAAAGUCAU | AUGACUUUGUCGUUGGGAU | Rat, Ms, GP, Chn | [449-467] | [239-257] |
| 149 | GACCAUCAGUACUAUAAUG | CAUUAUAGUACUGAUGGUC | GP, Chn | [1036-1054] | [826-844] |
| 150 | GUAUGUCGCCUAUGUUGCC | GGCAACAUAGGCGACAUAC | Chn | [816-834] | [606-624] |
| 151 | AAACAAUACCUCAGGAACC | GGUUCCUGAGGUAUUGUUU | GP | [937-955] | [727-745] |
| 152 | GACCCUGUGAAUCAGAGAG | CUCUCUGAUUCACAGGGUC | Rat, Ms, GP, Chn | [838-856] | [628-646] |
| 153 | AGUCCGCAAACAGAUGCCA | UGGCAUCUGUUUGCGGACU | | [1215-1233] | [1005-1023] |
| 154 | CUUUGUCAAUAAGCCCACG | CGUGGGCUUAUUGACAAAG | GP, Chn | [417-435] | [207-225] |
| 155 | AAUCACUUGCCCAUCAUCU | AGAUGAUGGGCAAGUGAUU | Ms | [1684-1702] | [1477-1495] |
| 156 | GUGGUUCGGACUAAGGAUC | GAUCCUUAGUCCGAACCAC | | [1621-1639] | [1414-1432] |
| 157 | UCCUACUUGGUUCGGUACA | UGUACCGAACCAAGUAGGA | Rat, Ms, GPChn | [481-499] | [271-289] |
| 158 | UCGGUACAUGGGUUGUGUG | CACACAACCCAUGUACCGA | | [492-510] | [282-300] |
| 159 | UACUUGGUUCGGUACAUGG | CCAUGUACCGAACCAAGUA | Rat, Ms, GPChn | [484-502] | [274-292] |
| 160 | CAGUAUGUGCUCACUGGCU | AGCCAGUGAGCACAUACUG | GP | [1555-1573] | [1348-1366] |
| 161 | CUUCAAACAAUACCUCAGG | CCUGAGGUAUUGUUUGAAG | | [933-951] | [723-741] |
| 162 | AGAGAGCCUGCCACAUUCU | AGAAUGUGGCAGGCUCUCU | | [851-869] | [641-659] |
| 163 | CUGCAUCCCAACGACAAAG | CUUUGUCGUUGGGAUGCAG | Rat, Ms | [445-463] | [235-253] |
| 164 | CUUGGGAGCUACAUUGCCU | AGGCAAUGUAGCUCCCAAG | | [1167-1185] | [957-975] |
| 165 | UGGUAGACAUGAGGCUUCG | CGAAGCCUCAUGUCUACCA | GP | [1088-1106] | [878-896] |
| 166 | UCACUUGCCCAUCAUCUCU | AGAGAUGAUGGGCAAGUGA | Ms | [1686-1704] | [1479-1497] |
| 167 | AUGGCUCAGCAUGGGAUGA | UCAUCCCAUGCUGAGCCAU | | [998-1016] | [788-806] |
| 168 | AGCUUUGUCAAUAAGCCCA | UGGGCUUAUUGACAAAGCU | Rat, Ms, GP, Chn | [415-433] | [205-223] |
| 169 | GCUUUGAUGGCUCAGCAUG | CAUGCUGAGCCAUCAAAGC | | [992-1010] | [782-800] |
| 170 | AACCCACCCAAACUGGUCA | UGACCAGUUUGGGUGGGUU | | [952-970] | [742-760] |
| 171 | UGUCAGUCACCUUAUCAGC | GCUGAUAAGGUGACUGACA | | [1653-1671] | [1446-1464] |
| 172 | GUGUCUACAGCAACCUGUG | CACAGGUUGCUGUAGACAC | Rat | [1719-1737] | [1512-1530] |
| 173 | CUUGCCCAGGAUGUCAUCA | UGAUGACAUCCUGGGCAAG | GP, Chn | [886-904] | [676-694] |
| 174 | AAUCUAUCUCAUUUGCAUC | GAUGCAAAUGAGAUAGAUU | | [773-791] | [563-581] |
| 175 | GGGAGCUUUGUCAAUAAGC | GCUUAUUGACAAAGCUCCC | Rat, Ms, GP, Chn | [412-430] | [202-220] |
| 176 | CAUGGACAAUCACUUGCCC | GGGCAAGUGAUUGUCCAUG | Ms | [1677-1695] | [1470-1488] |
| 177 | GAUCCCUCCUAUGUCAACG | CGUUGACAUAGGAGGGAUC | GP | [1270-1288] | [1063-1081] |
| 178 | UGGGAGCUACAUUGCCUGU | ACAGGCAAUGUAGCUCCCA | | [1169-1187] | [959-977] |
| 179 | GAGCUACAUUGCCUGUAGG | CCUACAGGCAAUGUAGCUC | | [1172-1190] | [962-980] |
| 180 | UGGUUCGGUACAUGGGUUG | CAACCCAUGUACCGAACCA | Rat | [488-506] | [278-296] |
| 181 | ACUAAGGAUCACCGCUUUG | CAAAGCGGUGAUCCUUAGU | | [1630-1648] | [1423-1441] |
| 182 | UUGAUGAUCCCUCCUAUGU | ACAUAGGAGGGAUCAUCAA | | [1265-1283] | [1058-1076] |
| 183 | CCUGUGAAUCAGAGAGCCU | AGGCUCUCUGAUUCACAGG | Rat, Ms, GP, Chn | [841-859] | [631-649] |
| 184 | GUAACCUGAAAUUUGCUGG | CCAGCAAAUUUCAGGUUAC | | [668-686] | [458-476] |
| 185 | UUGAUGGCUCAGCAUGGGA | UCCCAUGCUGAGCCAUCAA | | [995-1013] | [785-803] |
| 186 | AUGAACAAGCUGAGUGGAG | CUCCACUCAGCUUGUUCAU | Rat, Ms, GP, Chn | [331-349] | [121-139] |
| 187 | UACCACAUGGACAAUCACU | AGUGAUUGUCCAUGUGGUA | Rat, Ms | [1672-1690] | [1465-1483] |
| 188 | GACUGCAAACAGAUCAUCG | CGAUGAUCUGUUUGCAGUC | | [739-757] | [529-547] |
| 189 | CAUCAGUCUGGUGUGUGAG | CUCACACACCAGACUGAUG | GP, Chn | [573-591] | [363-381] |
| 190 | GUUCGGUACAUGGGUUGUG | CACAACCCAUGUACCGAAC | | [490-508] | [280-298] |
| 191 | GUUUGACAUGAAGCCCUUC | GAAGGGCUUCAUGUCAAAC | | [1374-1392] | [1167-1185] |
| 192 | AAUCCUGCUAUCAAUGGCA | UGCCAUUGAUAGCAGGAUU | | [1339-1357] | [1132-1150] |
| 193 | AAGGAGGAGAAAGCCCUGU | ACAGGGCUUUCUCCUCCUU | | [618-636] | [408-426] |
| 194 | ACCGCUUUGAAAGUGUCAG | CUGACACUUUCAAAGCGGU | | [1640-1658] | [1433-1451] |
| 195 | AUGUGCUCACUGGCUUGCA | UGCAAGCCAGUGAGCACAU | GP | [1559-1577] | [1352-1370] |
| 196 | CCAAUCCUGCUAUCAAUGG | CCAUUGAUAGCAGGAUUGG | | [1337-1355] | [1130-1148] |
| 197 | UUUGCUGGAAUGCCAAUCA | UGAUUGGCAUUCCAGCAAA | Ms | [679-697] | [469-487] |
| 198 | GUCAACGUCCAGAACCUAG | CUAGGUUCUGGACGUUGAC | GP | [1282-1300] | [1075-1093] |
| 199 | AUGUCAUCAGCACCAUUGG | CCAAUGGUGCUGAUGACAU | GP, Chn | [896-914] | [686-704] |
| 200 | AAGACCCUGUGAAUCAGAG | CUCUGAUUCACAGGGUCUU | Rat, Ms, GP, Chn | [836-854] | [626-644] |
| 201 | CCUAUGUUGCCAAAGACCC | GGGUCUUUGGCAACAUAGG | Rat, Ms, GP, Chn | [824-842] | [614-632] |
| 202 | UAUGUCGCCUAUGUUGCCA | UGGCAACAUAGGCGACAUA | Chn | [817-835] | [607-625] |
| 203 | AGGAUCACCGCUUUGAAAG | CUUUCAAAGCGGUGAUCCU | | [1634-1652] | [1427-1445] |
| 204 | CUGUGUCUACAGCAACCUG | CAGGUUGCUGUAGACACAG | Rat | [1717-1735] | [1510-1528] |
| 205 | GAGCUUUGUCAAUAAGCCC | GGGCUUAUUGACAAAGCUC | Rat, Ms, GP, Chn | [414-432] | [204-222] |
| 206 | GAAGCCCUUCGAAGAUGCU | AGCAUCUUCGAAGGGCUUC | | [1383-1401] | [1176-1194] |
| 207 | UAUCAGCUACCACAUGGAC | GUCCAUGUGGUAGCUGAUA | | [1665-1683] | [1458-1476] |
| 208 | CAACCACCACAUGCAAUCU | AGAUUGCAUGUGGUGGUUG | | [759-777] | [549-567] |
| 209 | UCCUGCUAUCAAUGGCAGU | ACUGCCAUUGAUAGCAGGA | | [1341-1359] | [1134-1152] |
| 210 | UCACCUUAUCAGCUACCAC | GUGGUAGCUGAUAAGGUGA | | [1659-1677] | [1452-1470] |
| 211 | AUCCCUCCUAUGUCAACGU | ACGUUGACAUAGGAGGGAU | GP | [1271-1289] | [1064-1082] |
| 212 | AGUAACCUGAAAUUUGCUG | CAGCAAAUUUCAGGUUACU | | [667-685] | [457-475] |
| 213 | UGUGUCUACAGCAACCUGU | ACAGGUUGCUGUAGACACA | Rat | [1718-1736] | [1511-1529] |
| 214 | AUCACUUGCCCAUCAUCUC | GAGAUGAUGGGCAAGUGAU | Ms | [1685-1703] | [1478-1496] |
| 215 | GUCUACAGCAACCUGUGGA | UCCACAGGUUGCUGUAGAC | Rat | [1721-1739] | [1514-1532] |
| 216 | AGUAUGUCGCCUAUGUUGC | GCAACAUAGGCGACAUACU | Chn | [815-833] | [605-623] |
| 217 | AUGGACAAUCACUUGCCCA | UGGGCAAGUGAUUGUCCAU | Ms | [1678-1696] | [1471-1489] |
| 218 | CACUUGCCCAUCAUCUCUG | CAGAGAUGAUGGGCAAGUG | Ms | [1687-1705] | [1480-1498] |
| 219 | UACAUUGCCUGUAGGACAG | CUGUCCUACAGGCAAUGUA | | [1176-1194] | [966-984] |
| 220 | GACCUGUUUGACAUGAAGC | GCUUCAUGUCAAACAGGUC | | [1369-1387] | [1162-1180] |
| 221 | ACAUUCUGGAGUGUCCCGA | UCGGGACACUCCAGAAUGU | | [863-881] | [653-671] |
| 222 | GGUUUCCUACUUGGUUCGG | CCGAACCAAGUAGGAAACC | Rat, Ms, GP, Chn | [477-495] | [267-285] |
| 223 | UUGCUGGAAUGCCAAUCAC | GUGAUUGGCAUUCCAGCAA | Ms | [680-698] | [470-488] |
| 224 | UGUGAAUCAGAGAGCCUGC | GCAGGCUCUCUGAUUCACA | Rat, Ms, Chn | [843-861] | [633-651] |
| 225 | AUGGCUGGCUUUGAUGGCU | AGCCAUCAAAGCCAGCCAU | Rat, Ms | [985-1003] | [775-793] |
| 226 | CAAUCCUGCUAUCAAUGGC | GCCAUUGAUAGCAGGAUUG | | [1338-1356] | [1131-1149] |
| 227 | AACCUGUGGAGCGGAAACU | AGUUUCCGCUCCACAGGUU | | [1730-1748] | [1523-1541] |
| 228 | AACUGUGUCUACAGCAACC | GGUUGCUGUAGACACAGUU | | [1715-1733] | [1508-1526] |
| 229 | GCUACAUUGCCUGUAGGAC | GUCCUACAGGCAAUGUAGC | | [1174-1192] | [964-982] |
| 230 | UCCCAACGACAAAGUCAUG | CAUGACUUUGUCGUUGGGA | Rat, Ms, GP, Chn | [450-468] | [240-258] |
| 231 | GUCGCCUAUGUUGCCAAAG | CUUUGGCAACAUAGGCGAC | Chn | [820-838] | [610-628] |
| 232 | UCUACAGCAACCUGUGGAG | CUCCACAGGUUGCUGUAGA | | [1722-1740] | [1515-1533] |
| 233 | AAACAGAUGCCACCUCCAC | GUGGAGGUGGCAUCUGUUU | | [1222-1240] | [1012-1030] |
| 234 | CUGUGAAUCAGAGAGCCUG | CAGGCUCUCUGAUUCACAG | Rat, Ms, GP, Chn | [842-860] | [632-650] |
| 235 | AGUACUAUAAUGACUUCCC | GGGAAGUCAUUAUAGUACU | GP, Chn | [1043-1061] | [833-851] |
| 236 | AGCGAACUGUGUCUACAGC | GCUGUAGACACAGUUCGCU | | [1711-1729] | [1504-1522] |
| 237 | AUCACUCUCACCGUCUCCA | UGGAGACGGUGAGAGUGAU | | [694-712] | [484-502] |
| 238 | ACGACAAAGUCAUGGGACC | GGUCCCAUGACUUUGUCGU | Rat, Ms, GP, Chn | [455-473] | [245-263] |
| 239 | UUGAAAGUGUCAGUCACCU | AGGUGACUGACACUUUCAA | | [1646-1664] | [1439-1457] |
| 240 | UACUAUAAUGACUUCCCGG | CCGGGAAGUCAUUAUAGUA | | [1045-1063] | [835-853] |
| 241 | UGUCUACAGCAACCUGUGG | CCACAGGUUGCUGUAGACA | Rat | [1720-1738] | [1513-1531] |
| 242 | AACGUCCAGAACCUAGACA | UGUCUAGGUUCUGGACGUU | GP | [1285-1303] | [1078-1096] |
| 243 | AACAAUACCUCAGGAACCC | GGGUUCCUGAGGUAUUGUU | GP | [938-956] | [728-746] |
| 244 | AAUACCUCAGGAACCCACC | GGUGGGUUCCUGAGGUAUU | GP | [941-959] | [731-749] |
| 245 | UCCAGAACCUAGACAAGGC | GCCUUGUCUAGGUUCUGGA | GP, Chn | [1289-1307] | [1082-1100] |
| 246 | AUUCUGGAGUGUCCCGAAG | CUUCGGGACACUCCAGAAU | | [865-883] | [655-673] |
| 247 | CUAUCAAUGGCAGUGCACC | GGUGCACUGCCAUUGAUAG | | [1346-1364] | [1139-1157] |
| 248 | UUGGGAGCUACAUUGCCUG | CAGGCAAUGUAGCUCCCAA | | [1168-1186] | [958-976] |
| 249 | UUCCUACUUGGUUCGGUAC | GUACCGAACCAAGUAGGAA | Rat, Ms, GP, Chn | [480-498] | [270-288] |
| 250 | UAAGCAUUUGCUACUGGUG | CACCAGUAGCAAAUGCUUA | | [1590-1608] | [1383-1401] |
| 251 | ACUGCAAACAGAUCAUCGC | GCGAUGAUCUGUUUGCAGU | | [740-758] | [530-548] |
| 252 | AGCCCUUCGAAGAUGCUCU | AGAGCAUCUUCGAAGGGCU | | [1385-1403] | [1178-1196] |
| 253 | UUCGAGUUGCGCUUCAAAC | GUUUGAAGCGCAACUCGAA | | [922-940] | [712-730] |
| 254 | CUGCAAACAGAUCAUCGCC | GGCGAUGAUCUGUUUGCAG | | [741-759] | [531-549] |
| 255 | UGUUGCCAAAGACCCUGUG | CACAGGGUCUUUGGCAACA | Rat, Ms, GP, Chn | [828-846] | [618-636] |
| 256 | CAGUACUAUAAUGACUUCC | GGAAGUCAUUAUAGUACUG | GP, Chn | [1042-1060] | [832-850] |
| 257 | AUGUUGCCAAAGACCCUGU | ACAGGGUCUUUGGCAACAU | Rat, Ms, GP, Chn | [827-845] | [617-635] |
| 258 | UGGAAUGCCAAUCACUCUC | GAGAGUGAUUGGCAUUCCA | Ms, Chn | [684-702] | [474-492] |
| 259 | AUCAUCGCCAACCACCACA | UGUGGUGGUUGGCGAUGAU | | [751-769] | [541-559] |
| 260 | UUGCCCAGGAUGUCAUCAG | CUGAUGACAUCCUGGGCAA | GP, Chn | [887-905] | [677-695] |
| 261 | UUGCGCUUCAAACAAUACC | GGUAUUGUUUGAAGCGCAA | | [928-946] | [718-736] |
| 262 | AUCACCGCUUUGAAAGUGU | ACACUUUCAAAGCGGUGAU | | [1637-1655] | [1430-1448] |
| 263 | UACAUGGGUUGUGUGGAGG | CCUCCACACAACCCAUGUA | | [496-514] | [286-304] |
| 264 | UUUGAUGGCUCAGCAUGGG | CCCAUGCUGAGCCAUCAAA | | [994-1012] | [784-802] |
| 265 | CUGAAAUUUGCUGGAAUGC | GCAUUCCAGCAAAUUUCAG | | [673-691] | [463-481] |
| 266 | CCUUCGAAGAUGCUCUUCG | CGAAGAGCAUCUUCGAAGG | | [1388-1406] | [1181-1199] |
| 267 | CUUAUCAGCUACCACAUGG | CCAUGUGGUAGCUGAUAAG | | [1663-1681] | [1456-1474] |
| 268 | UAUGUUGCCAAAGACCCUG | CAGGGUCUUUGGCAACAUA | Rat, Ms, GP, Chn | [826-844] | [616-634] |
| 269 | CACUUGGGAGCUACAUUGC | GCAAUGUAGCUCCCAAGUG | | [1165-1183] | [955-973] |
| 270 | GUCCAGAACCUAGACAAGG | CCUUGUCUAGGUUCUGGAC | GP, Chn | [1288-1306] | [1081-1099] |
| 271 | AUCUCAUUUGCAUCCGGCG | CGCCGGAUGCAAAUGAGAU | | [778-796] | [568-586] |
| 272 | ACUAUAAUGACUUCCCGGG | CCCGGGAAGUCAUUAUAGU | | [1046-1064] | [836-854] |
| 273 | UAUCAAUGGCAGUGCACCC | GGGUGCACUGCCAUUGAUA | | [1347-1365] | [1140-1158] |
| 274 | GAUGUCAUCAGCACCAUUG | CAAUGGUGCUGAUGACAUC | GP, Chn | [895-913] | [685-703] |
| 275 | UGAAGCCCUUCGAAGAUGC | GCAUCUUCGAAGGGCUUCA | Rat | [1382-1400] | [1175-1193] |
| 276 | ACAUGGACAAUCACUUGCC | GGCAAGUGAUUGUCCAUGU | Ms | [1676-1694] | [1469-1487] |
| 277 | ACUUGCCCAUCAUCUCUGC | GCAGAGAUGAUGGGCAAGU | Ms | [1688-1706] | [1481-1499] |
| 278 | AAUGCCAAUCACUCUCACC | GGUGAGAGUGAUUGGCAUU | | [687-705] | [477-495] |
| 279 | ACCUGUUUGACAUGAAGCC | GGCUUCAUGUCAAACAGGU | | [1370-1388] | [1163-1181] |
| 280 | AUCAGUCUGGUGUGUGAGG | CCUCACACACCAGACUGAU | GP, Chn | [574-592] | [364-382] |
| 281 | CCUGUUUGACAUGAAGCCC | GGGCUUCAUGUCAAACAGG | | [1371-1389] | [1164-1182] |
| 282 | UAUGUCAACGUCCAGAACC | GGUUCUGGACGUUGACAUA | GP | [1279-1297] | [1072-1090] |
| 283 | UUUGAAAGUGUCAGUCACC | GGUGACUGACACUUUCAAA | | [1645-1663] | [1438-1456] |
| 284 | UGAAAUUUGCUGGAAUGCC | GGCAUUCCAGCAAAUUUCA | | [674-692] | [464-482] |
| 285 | CACAUGGACAAUCACUUGC | GCAAGUGAUUGUCCAUGUG | Ms | [1675-1693] | [1468-1486] |
| 286 | AUUUGCUACUGGUGGACCC | GGGUCCACCAGUAGCAAAU | | [1595-1613] | [1388-1406] |
| 287 | AAGCAUUUGCUACUGGUGG | CCACCAGUAGCAAAUGCUU | | [1591-1609] | [1384-1402] |
| 288 | GUUCGGACUAAGGAUCACC | GGUGAUCCUUAGUCCGAAC | | [1624-1642] | [1417-1435] |
| 289 | UAUCUCAUUUGCAUCCGGC | GCCGGAUGCAAAUGAGAUA | | [777-795] | [567-585] |
| 290 | AACGACAAAGUCAUGGGAC | GUCCCAUGACUUUGUCGUU | Rat, Ms, GP, Chn | [454-472] | [244-262] |
| 291 | AUUGCCUGUAGGACAGCCU | AGGCUGUCCUACAGGCAAU | | [1179-1197] | [969-987] |
| 292 | ACUGUGUCUACAGCAACCU | AGGUUGCUGUAGACACAGU | | [1716-1734] | [1509-1527] |
| 293 | UUGUCAAUAAGCCCACGCG | CGCGUGGGCUUAUUGACAA | | [419-437] | [209-227] |
| 294 | GAAGUCCGCAAACAGAUGC | GCAUCUGUUUGCGGACUUC | | [1213-1231] | [1003-1021] |
| 295 | UCUAUCUCAUUUGCAUCCG | CGGAUGCAAAUGAGAUAGA | | [775-793] | [565-583] |
| 296 | ACUUGGGAGCUACAUUGCC | GGCAAUGUAGCUCCCAAGU | | [1166-1184] | [956-974] |
| 297 | AUCCUGCUAUCAAUGGCAG | CUGCCAUUGAUAGCAGGAU | | [1340-1358] | [1133-1151] |
| 298 | AUGAAGCCCUUCGAAGAUG | CAUCUUCGAAGGGCUUCAU | Rat | [1381-1399] | [1174-1192] |
| 299 | UUUGCUACUGGUGGACCCU | AGGGUCCACCAGUAGCAAA | | [1596-1614] | [1389-1407] |
| 300 | GAUCACCGCUUUGAAAGUG | CACUUUCAAAGCGGUGAUC | | [1636-1654] | [1429-1447] |
| 301 | AUGCCAAUCACUCUCACCG | CGGUGAGAGUGAUUGGCAU | | [688-706] | [478-496] |
| 302 | UUCGGACUAAGGAUCACCG | CGGUGAUCCUUAGUCCGAA | | [1625-1643] | [1418-1436] |
| 303 | UGUCAUCAGCACCAUUGGC | GCCAAUGGUGCUGAUGACA | GP, Chn | [897-915] | [687-705] |
| 304 | AAUCACUCUCACCGUCUCC | GGAGACGGUGAGAGUGAUU | | [693-711] | [483-501] |
| 305 | ACCCUGUGAAUCAGAGAGC | GCUCUCUGAUUCACAGGGU | Rat, Ms, GP, Chn | [839-857] | [629-647] |
| 306 | CCCAACGACAAAGUCAUGG | CCAUGACUUUGUCGUUGGG | Rat, Ms, GP, Chn | [451-469] | [241-259] |
| 307 | AUCUAUCUCAUUUGCAUCC | GGAUGCAAAUGAGAUAGAU | | [774-792] | [564-582] |
| 308 | CAUUUGCUACUGGUGGACC | GGUCCACCAGUAGCAAAUG | | [1594-1612] | [1387-1405] |
| 309 | AAGUCCGCAAACAGAUGCC | GGCAUCUGUUUGCGGACUU | | [1214-1232] | [1004-1022] |
| 310 | AGUCACCUUAUCAGCUACC | GGUAGCUGAUAAGGUGACU | | [1657-1675] | [1450-1468] |
| 311 | ACAUUGCCUGUAGGACAGC | GCUGUCCUACAGGCAAUGU | | [1177-1195] | [967-985] |
| 312 | UUUGACAUGAAGCCCUUCG | CGAAGGGCUUCAUGUCAAA | Rat | [1375-1393] | [1168-1186] |
| 313 | UGCCACAUUCUGGAGUGUC | GACACUCCAGAAUGUGGCA | | [859-877] | [649-667] |
| 314 | CUGCUAUCAAUGGCAGUGC | GCACUGCCAUUGAUAGCAG | | [1343-1361] | [1136-1154] |
| 315 | AUUUGCUGGAAUGCCAAUC | GAUUGGCAUUCCAGCAAAU | | [678-696] | [468-486] |
| 316 | AAACAGAUCAUCGCCAACC | GGUUGGCGAUGAUCUGUUU | | [745-763] | [535-553] |
| 317 | AAGCCCUUCGAAGAUGCUC | GAGCAUCUUCGAAGGGCUU | | [1384-1402] | [1177-1195] |
| 318 | UAUGUGCUCACUGGCUUGC | GCAAGCCAGUGAGCACAUA | GP | [1558-1576] | [1351-1369] |
| 319 | UUUGUCAAUAAGCCCACGC | GCGUGGGCUUAUUGACAAA | | [418-436] | [208-226] |

TABLE B9
ZNHIT1 19-mer oligomer pairs zinc finger, HIT type 1

| | | | | |
|---|---|---|---|---|
| No. | Sense | AntiSense | Other Sp | Human-37594439: 493-957 |

| | | | | |
|---|---|---|---|---|
| 1 | CCGAGGUGAUCAUUUUAAA | UUUAAAAUGAUCACCUCGG | | [705-723] |
| 2 | CCCGAGGUGAUCAUUUUAA | UUAAAAUGAUCACCUCGGG | | [704-722] |
| 3 | CGUGACCACAUCUUUAAAA | UUUUAAAGAUGUGGUCACG | | [240-258] |
| 4 | CCCUAUAAAACAUGGCGAA | UUCGCCAUGUUUUAUAGGG | | [321-339] |
| 5 | GUGACCACAUCUUUAAAAU | AUUUUAAAGAUGUGGUCAC | | [241-259] |
| 6 | GAAAAAACUUUCAGGCCCU | AGGGCCUGAAAGUUUUUUC | | [734-752] |
| 7 | CCCUGGAGAAUGACAACUU | AAGUUGUCAUUCUCCAGGG | | [593-611] |
| 8 | CUAUAAAACAUGGCGAAAA | UUUUCGCCAUGUUUUAUAG | | [323-341] |
| 9 | CCGUGACCACAUCUUUAAA | UUUAAAGAUGUGGUCACGG | | [239-257] |
| 10 | ACCGUGACCACAUCUUUAA | UUAAAGAUGUGGUCACGGU | | [238-256] |
| 11 | CAGAAAGACAGAAUUUCAU | AUGAAAUUCUGUCUUUCUG | | [1006-1024] |
| 12 | CGGACACUGGAAAGAAAAA | UUUUUCUUUCCAGUGUCCG | CHL | [677-695] |
| 13 | CAGUGCUGUUAGAAUAAAA | UUUUAUUCUAACAGCACUG | | [1156-1174] |
| 14 | GCUCAUUCACCCAACAAAA | UUUUGUUGGGUGAAUGAGC | | [1068-1086] |
| 15 | UCAUUUUAAACUUCGCUUC | GAAGCGAAGUUUAAAAUGA | | [714-732] |
| 16 | GAGGUGAUCAUUUUAAACU | AGUUUAAAAUGAUCACCUC | | [707-725] |
| 17 | CGAGGUGAUCAUUUUAAAC | GUUUAAAAUGAUCACCUCG | | [706-724] |
| 18 | GCGGACACUGGAAAGAAAA | UUUUCUUUCCAGUGUCCGC | CHL | [676-694] |
| 19 | CGCCACGUAAUGAGUCAAA | UUUGACUCAUUACGUGGCG | | [363-381] |
| 20 | CCUUCAGAAAGACAGAAUU | AAUUCUGUCUUUCUGAAGG | | [1002-1020] |
| 21 | CCUAUAAAACAUGGCGAAA | UUUCGCCAUGUUUUAUAGG | | [322-340] |
| 22 | ACAGCAUCUUCACAAGGAC | GUCCUUGUGAAGAUGCUGU | | [190-208] |
| 23 | CACAGCAUCUUCACAAGGA | UCCUUGUGAAGAUGCUGUG | | [189-207] |
| 24 | CCCAGUGCUGUUAGAAUAA | UUAUUCUAACAGCACUGGG | | [1154-1172] |
| 25 | ACCCGAGGUGAUCAUUUUA | UAAAAUGAUCACCUCGGGU | | [703-721] |
| 26 | AACCCGAGGUGAUCAUUUU | AAAAUGAUCACCUCGGGUU | | [702-720] |
| 27 | GCCCUGGAGAAUGACAACU | AGUUGUCAUUCUCCAGGGC | | [592-610] |
| 28 | ACACCGUGACCACAUCUUU | AAAGAUGUGGUCACGGUGU | | [236-254] |
| 29 | GCAUCUUCACAAGGACCAA | UUGGUCCUUGUGAAGAUGC | | [193-211] |
| 30 | GAUCACAGCAUCUUCACAA | UUGUGAAGAUGCUGUGAUC | | [186-204] |
| 31 | GGAGCAGAACUUGAGUGUG | CACACUCAAGUUCUGCUCC | | [759-777] |
| 32 | UGAUCAUUUUAAACUUCGC | GCGAAGUUUAAAAUGAUCA | | [711-729] |
| 33 | GUGAUCAUUUUAAACUUCG | CGAAGUUUAAAAUGAUCAC | | [710-728] |
| 34 | CUGGAAAGAAAAAGAAGAA | UUCUUCUUUUUCUUUCCAG | CHL | [683-701] |
| 35 | AGGCCCUGGAGAAUGACAA | UUGUCAUUCUCCAGGGCCU | | [590-608] |
| 36 | GUACAAGCUACCGGAAGUG | CACUUCCGGUAGCUUGUAC | | [402-420] |
| 37 | CACCGUGACCACAUCUUUA | UAAAGAUGUGGUCACGGUG | | [237-255] |
| 38 | GACCAAAGGAAAAUAAGAU | AUCUUAUUUUCCUUUGGUC | | [206-224] |
| 39 | CUGUUAGAAUAAAAAGCCU | AGGCUUUUUAUUCUAACAG | | [1161-1179] |
| 40 | UCAGAAAGACAGAAUUUCA | UGAAAUUCUGUCUUUCUGA | | [1005-1023] |
| 41 | AGGAGCAGAACUUGAGUGU | ACACUCAAGUUCUGCUCCU | | [758-776] |
| 42 | CCACUUUCUUUGACAGUCC | GGACUGUCAAAGAAAGUGG | | [120-138] |
| 43 | GGAGGAGCAGAACUUGAGU | ACUCAAGUUCUGCUCCUCC | | [756-774] |
| 44 | ACAAGCUACCGGAAGUGAU | AUCACUUCCGGUAGCUUGU | | [404-422] |
| 45 | AGAACACCGUGACCACAUC | GAUGUGGUCACGGUGUUCU | | [233-251] |
| 46 | CAAGGACCAAAGGAAAAUA | UAUUUUCCUUUGGUCCUUG | | [202-220] |
| 47 | AGCAUCUUCACAAGGACCA | UGGUCCUUGUGAAGAUGCU | | [192-210] |
| 48 | UGUCUUAUCUGCCAGGAAA | UUUCCUGGCAGAUAAGACA | | [1090-1108] |
| 49 | CUUCAGAAAGACAGAAUUU | AAAUUCUGUCUUUCUGAAG | | [1003-1021] |
| 50 | ACACUGGAAAGAAAAAGAA | UUCUUUUUCUUUCCAGUGU | CHL | [680-698] |
| 51 | GCCACGUAAUGAGUCAAAG | CUUUGACUCAUUACGUGGC | | [364-382] |
| 52 | GGAAACGCCACGUAAUGAG | CUCAUUACGUGGCGUUUCC | | [358-376] |
| 53 | CAAGGAAACGCCACGUAAU | AUUACGUGGCGUUUCCUUG | | [355-373] |
| 54 | GGACCAAAGGAAAAUAAGA | UCUUAUUUUCCUUUGGUCC | | [205-223] |
| 55 | ACAAGGACCAAAGGAAAAU | AUUUUCCUUUGGUCCUUGU | | [201-219] |
| 56 | GUGUCUUAUCUGCCAGGAA | UUCCUGGCAGAUAAGACAC | | [1089-1107] |
| 57 | CACUUUCUUUGACAGUCCA | UGGACUGUCAAAGAAAGUG | | [121-139] |
| 58 | ACGAUGCGGACACUGGAAA | UUUCCAGUGUCCGCAUCGU | | [671-689] |
| 59 | AUGGUGGAGAAGAAAACUU | AAGUUUUCUUCUCCACCAU | | [493-511] |
| 60 | GCAGUUUCUUCCGACAGUU | AACUGUCGGAAGAAACUGC | | [463-481] |
| 61 | CAUCUUCACAAGGACCAAA | UUUGGUCCUUGUGAAGAUG | | [194-212] |
| 62 | UGUUGGAGGAGCAGAACUU | AAGUUCUGCUCCUCCAACA | | [752-770] |
| 63 | GGACACUGGAAAGAAAAAG | CUUUUUCUUUCCAGUGUCC | CHL | [678-696] |
| 64 | ACGCCACGUAAUGAGUCAA | UUGACUCAUUACGUGGCGU | | [362-380] |
| 65 | AAGGACCAAAGGAAAAUAA | UUAUUUUCCUUUGGUCCUU | | [203-221] |
| 66 | UCAGUUUGAUGACGAUGCG | CGCAUCGUCAUCAAACUGA | | [660-678] |
| 67 | CGUAAUGAGUCAAAGCUGU | ACAGCUUUGACUCAUUACG | | [368-386] |
| 68 | CACGUAAUGAGUCAAAGCU | AGCUUUGACUCAUUACGUG | | [366-384] |
| 69 | UCACAAGGACCAAAGGAAA | UUUCCUUUGGUCCUUGUGA | | [199-217] |
| 70 | GCCUUUGUGAUCACAGCAU | AUGCUGUGAUCACAAAGGC | | [178-196] |
| 71 | GCAAGAGACUGCCUCAGUU | AACUGAGGCAGUCUCUUGC | | [647-665] |
| 72 | CACAAGGACCAAAGGAAAA | UUUUCCUUUGGUCCUUGUG | | [200-218] |
| 73 | CCACGUAAUGAGUCAAAGC | GCUUUGACUCAUUACGUGG | | [365-383] |
| 74 | ACAGAAUUUCAUCACCCAA | UUGGGUGAUGAAAUUCUGU | | [1013-1031] |
| 75 | GACACUGGAAAGAAAAAGA | UCUUUUUCUUUCCAGUGUC | CHL | [679-697] |
| 76 | GGAGAAGAAAACUUCGGUU | AACCGAAGUUUUCUUCUCC | | [498-516] |
| 77 | CCAACAAAACUGUGUCUUA | UAAGACACAGUUUUGUUGG | | [1078-1096] |
| 78 | UCGCUUCCGAAAAAACUUU | AAAGUUUUUUCGGAAGCGA | | [726-744] |
| 79 | AAACUUCGCUUCCGAAAAA | UUUUUCGGAAGCGAAGUUU | GP | [721-739] |
| 80 | CGCGCAGAAGUACAAGCUA | UAGCUUGUACUUCUGCGCG | | [393-411] |
| 81 | ACAUCUUUAAAAUGACCCA | UGGGUCAUUUUAAAGAUGU | | [247-265] |
| 82 | ACCACAUCUUUAAAAUGAC | GUCAUUUUAAAGAUGUGGU | | [244-262] |
| 83 | CCCAACAAAACUGUGUCUU | AAGACACAGUUUUGUUGGG | | [1077-1095] |
| 84 | CGCUCAUUCACCCAACAAA | UUUGUUGGGUGAAUGAGCG | | [1067-1085] |
| 85 | AAAACUUUCAGGCCCUGUU | AACAGGGCCUGAAAGUUUU | | [737-755] |
| 86 | CGAAAAAACUUUCAGGCCC | GGGCCUGAAAGUUUUUUCG | | [733-751] |
| 87 | GAAGUACAAGCUACCGGAA | UUCCGGUAGCUUGUACUUC | | [399-417] |
| 88 | AACUUCGCUUCCGAAAAAA | UUUUUUCGGAAGCGAAGUU | GP | [722-740] |
| 89 | AGAAGUACAAGCUACCGGA | UCCGGUAGCUUGUACUUCU | | [398-416] |
| 90 | CCACUAGGAACCUCGGAUU | AAUCCGAGGUUCCUAGUGG | | [86-104] |
| 91 | ACAAGAUUUACACCUCCAC | GUGGAGGUGUAAAUCUUGU | | [279-297] |
| 92 | CACAAGAUUUACACCUCCA | UGGAGGUGUAAAUCUUGUG | | [278-296] |
| 93 | GGCUCCCACAAGAUUUACA | UGUAAAUCUUGUGGGAGCC | | [272-290] |
| 94 | CCACAUCUUUAAAAUGACC | GGUCAUUUUAAAGAUGUGG | | [245-263] |
| 95 | CGCUUCCGAAAAAACUUUC | GAAAGUUUUUUCGGAAGCG | | [727-745] |
| 96 | GAGACUGCCUCAGUUUGAU | AUCAAACUGAGGCAGUCUC | | [651-669] |
| 97 | CAAGAGACUGCCUCAGUUU | AAACUGAGGCAGUCUCUUG | | [648-666] |
| 98 | UCCAAGGAAACGCCACGUA | UACGUGGCGUUUCCUUGGA | | [353-371] |
| 99 | GACCACAUCUUUAAAAUGA | UCAUUUUAAAGAUGUGGUC | | [243-261] |
| 100 | CCGCUCAUUCACCCAACAA | UUGUUGGGUGAAUGAGCGG | | [1066-1084] |
| 101 | GACAGAAUUUCAUCACCCA | UGGGUGAUGAAAUUCUGUC | | [1012-1030] |
| 102 | GCCUUCAGAAAGACAGAAU | AUUCUGUCUUUCUGAAGGC | | [1001-1019] |
| 103 | GAAAACCCGAGGUGAUCAU | AUGAUCACCUCGGGUUUUC | | [699-717] |
| 104 | GGAGAAUGACAACUUCCAG | CUGGAAGUUGUCAUUCUCC | CHL, Ms | [597-615] |
| 105 | CAAUGGUGGAGAAGAAAAC | GUUUUCUUCUCCACCAUUG | | [491-509] |
| 106 | GCGCAGAAGUACAAGCUAC | GUAGCUUGUACUUCUGCGC | | [394-412] |
| 107 | CAACAAAACUGUGUCUUAU | AUAAGACACAGUUUUGUUG | | [1079-1097] |
| 108 | GCUUCCGAAAAAACUUUCA | UGAAAGUUUUUUCGGAAGC | | [728-746] |
| 109 | CCCACAAGAUUUACACCUC | GAGGUGUAAAUCUUGUGGG | | [276-294] |
| 110 | GCUCCCACAAGAUUUACAC | GUGUAAAUCUUGUGGGAGC | | [273-291] |
| 111 | GAAAGACAGAAUUUCAUCA | UGAUGAAAUUCUGUCUUUC | | [1008-1026] |
| 112 | GCCUCAGUUUGAUGACGAU | AUCGUCAUCAAACUGAGGC | | [657-675] |
| 113 | GAGAAGAAAACUUCGGUUC | GAACCGAAGUUUUCUUCUC | | [499-517] |
| 114 | CAGUUGUGUUGUGCCAAUG | CAUUGGCACAACACAACUG | | [477-495] |
| 115 | CGACAGUUGUGUUGUGCCA | UGGCACAACACAACUGUCG | | [474-492] |
| 116 | GCAGCAGUUUCUUCCGACA | UGUCGGAAGAAACUGCUGC | | [460-478] |
| 117 | GCUUUCUUGUCUCCAAGGA | UCCUUGGAGACAAGAAAGC | | [342-360] |
| 118 | CCACAAGAUUUACACCUCC | GGAGGUGUAAAUCUUGUGG | | [277-295] |
| 119 | CAUCUUUAAAAUGACCCAU | AUGGGUCAUUUUAAAGAUG | | [248-266] |
| 120 | UGACCACAUCUUUAAAAUG | CAUUUUAAAGAUGUGGUCA | | [242-260] |
| 121 | CCUUUGUGAUCACAGCAUC | GAUGCUGUGAUCACAAAGG | | [179-197] |
| 122 | AGACAGAAUUUCAUCACCC | GGGUGAUGAAAUUCUGUCU | | [1011-1029] |
| 123 | GGCCUUCAGAAAGACAGAA | UUCUGUCUUUCUGAAGGCC | | [1000-1018] |
| 124 | UGAUGACGAUGCGGACACU | AGUGUCCGCAUCGUCAUCA | | [666-684] |
| 125 | UGGAGAAGAAAACUUCGGU | ACCGAAGUUUUCUUCUCCA | | [497-515] |
| 126 | UUGUGCCAAUGGUGGAGAA | UUCUCCACCAUUGGCACAA | | [485-503] |
| 127 | CCAAGGAAACGCCACGUAA | UUACGUGGCGUUUCCUUGG | | [354-372] |
| 128 | UGAGGCCGGAAGUGGUUUU | AAAACCACUUCCGGCCUCA | | [300-318] |
| 129 | ACAAAACUGUGUCUUAUCU | AGAUAAGACACAGUUUUGU | | [1081-1099] |
| 130 | CGCAGAAGUACAAGCUACC | GGUAGCUUGUACUUCUGCG | | [395-413] |
| 131 | AGAUUUCUUGUAAGAACAC | GUGUUCUUACAAGAAAUCU | | [221-239] |
| 132 | UCACCCAACAAAACUGUGU | ACACAGUUUUGUUGGGUGA | | [1074-1092] |
| 133 | CGGCCUUCAGAAAGACAGA | UCUGUCUUUCUGAAGGCCG | | [999-1017] |
| 134 | GCCACUUUCUUUGACAGUC | GACUGUCAAAGAAAGUGGC | | [119-137] |
| 135 | AGAAUGACAACUUCCAGGA | UCCUGGAAGUUGUCAUUCU | CHL, Ms | [599-617] |
| 136 | AGCAGUUUCUUCCGACAGU | ACUGUCGGAAGAAACUGCU | | [462-480] |
| 137 | ACGCGCAGAAGUACAAGCU | AGCUUGUACUUCUGCGCGU | | [392-410] |
| 138 | GGAAGCCAGCCACUUUCUU | AAGAAAGUGGCUGGCUUCC | | [111-129] |
| 139 | GUGGCUCCCACAAGAUUUA | UAAAUCUUGUGGGAGCCAC | | [270-288] |
| 140 | GCUGUUAGAAUAAAAAGCC | GGCUUUUUAUUCUAACAGC | | [1160-1178] |
| 141 | ACCCAACAAAACUGUGUCU | AGACACAGUUUUGUUGGGU | | [1076-1094] |
| 142 | GGUGUCUGAAGUGGACUGU | ACAGUCCACUUCAGACACC | | [935-953] |
| 143 | GGCUGCCUUUGUGAUCACA | UGUGAUCACAAAGGCAGCC | | [174-192] |
| 144 | UGGAGAAUGACAACUUCCA | UGGAAGUUGUCAUUCUCCA | CHL, Ms | [596-614] |
| 145 | CAGCCACUUUCUUUGACAG | CUGUCAAAGAAAGUGGCUG | | [117-135] |
| 146 | CCAGCCACUUUCUUUGACA | UGUCAAAGAAAGUGGCUGG | | [116-134] |
| 147 | UCCCACAAGAUUUACACCU | AGGUGUAAAUCUUGUGGGA | | [275-293] |
| 148 | GGAGUUCAGCUUUCUGCAG | CUGCAGAAAGCUGAACUCC | | [63-81] |
| 149 | CACCCAACAAAACUGUGUC | GACACAGUUUUGUUGGGUG | | [1075-1093] |
| 150 | UGGUGGAGAAGAAAACUUC | GAAGUUUUCUUCUCCACCA | | [494-512] |
| 151 | GCCAAUGGUGGAGAAGAAA | UUUCUUCUCCACCAUUGGC | | [489-507] |
| 152 | GGAACUGGGAGUUCAGCUU | AAGCUGAACUCCCAGUUCC | | [56-74] |
| 153 | GAAGAAAACUUCGGUUCGC | GCGAACCGAAGUUUUCUUC | | [501-519] |
| 154 | GGGAGUUCAGCUUUCUGCA | UGCAGAAAGCUGAACUCCC | | [62-80] |
| 155 | UGCCUCAGUUUGAUGACGA | UCGUCAUCAAACUGAGGCA | | [656-674] |
| 156 | GCCAGCCACUUUCUUUGAC | GUCAAAGAAAGUGGCUGGC | | [115-133] |
| 157 | GAGACCAGGUGUCUGAAGU | ACUUCAGACACCUGGUCUC | Ms | [928-946] |
| 158 | CGUGGCUCCCACAAGAUUU | AAAUCUUGUGGGAGCCACG | | [269-287] |
| 159 | GAGUUCAGCUUUCUGCAGA | UCUGCAGAAAGCUGAACUC | | [64-82] |
| 160 | GAACUGGGAGUUCAGCUUU | AAAGCUGAACUCCCAGUUC | | [57-75] |
| 161 | GAAGCCAGCCACUUUCUUU | AAAGAAAGUGGCUGGCUUC | | [112-130] |
| 162 | CCAAUGGUGGAGAAGAAAA | UUUUCUUCUCCACCAUUGG | | [490-508] |

TABLE B10
ZNHIT1-19-mer oligomer pairs zinc finger, HIT type 1

| | | | | Human- |
|---|---|---|---|---|
| No. | Sense | AntiSense | Other Sp | 37594439: 493-957 |

| | | | | |
|---|---|---|---|---|
| 1 | GGAAAGAAAAAGAAGAAAA | UUUUCUUCUUUUUCUUUCC | Rat, Ms, GP, Chn | [685-703] |
| 2 | UGCGGACACUGGAAAGAAA | UUUCUUUCCAGUGUCCGCA | Chn | [675-693] |
| 3 | GAAAAAGAAGAAAACCCGA | UCGGGUUUUCUUCUUUUUC | | [690-708] |
| 4 | UGCCAAUGGUGGAGAAGAA | UUCUUCUCCACCAUUGGCA | | [488-506] |
| 5 | AGUGCUGUUAGAAUAAAAA | UUUUUAUUCUAACAGCACU | | [1157-1175] |
| 6 | GAAGAAAACCCGAGGUGAU | AUCACCUCGGGUUUUCUUC | | [696-714] |
| 7 | UGGAAAGAAAAAGAAGAAA | UUUCUUCUUUUUCUUUCCA | Chn | [684-702] |
| 8 | AGGAGACCAGGUGUCUGAA | UUCAGACACCUGGUCUCCU | Ms | [926-944] |
| 9 | GAAAGAAAAAGAAGAAAAC | GUUUUCUUCUUUUUCUUUC | Rat, Ms, GP, Chn | [686-704] |
| 10 | ACUGGAAAGAAAAAGAAGA | UCUUCUUUUUCUUUCCAGU | Chn | [682-700] |
| 11 | CCAGUGCUGUUAGAAUAAA | UUUAUUCUAACAGCACUGG | | [1155-1173] |
| 12 | CUUUCUUGUCUCCAAGGAA | UUCCUUGGAGACAAGAAAG | | [343-361] |
| 13 | AGAACUUGAGUGUGGCCGA | UCGGCCACACUCAAGUUCU | | [764-782] |
| 14 | GACAGUUGUGUUGUGCCAA | UUGGCACAACACAACUGUC | | [475-493] |
| 15 | AGGUGAUCAUUUUAAACUU | AAGUUUAAAAUGAUCACCU | | [708-726] |
| 16 | CAAGCUACCGGAAGUGAUG | CAUCACUUCCGGUAGCUUG | | [405-423] |
| 17 | CAGAAUUUCAUCACCCAAU | AUUGGGUGAUGAAAUUCUG | | [1014-1032] |
| 18 | CACUGGAAAGAAAAAGAAG | CUUCUUUUUCUUUCCAGUG | Chn | [681-699] |
| 19 | AGAAGAAAACCCGAGGUGA | UCACCUCGGGUUUUCUUCU | | [695-713] |
| 20 | UUUCUUGUCUCCAAGGAAA | UUUCCUUGGAGACAAGAAA | | [344-362] |
| 21 | GAAUGACAACUUCCAGGAU | AUCCUGGAAGUUGUCAUUC | Ms | [600-618] |
| 22 | AAAGCUUUCUUGUCUCCAA | UUGGAGACAAGAAAGCUUU | | [339-357] |
| 23 | AGUACAAGCUACCGGAAGU | ACUUCCGGUAGCUUGUACU | | [401-419] |
| 24 | CAAGAUUUACACCUCCACA | UGUGGAGGUGUAAAUCUUG | | [280-298] |
| 25 | GUAAGAACACCGUGACCAC | GUGGUCACGGUGUUCUUAC | | [230-248] |
| 26 | AUGACAACUUCCAGGAUGA | UCAUCCUGGAAGUUGUCAU | Ms | [602-620] |
| 27 | CCUGGAGAAUGACAACUUC | GAAGUUGUCAUUCUCCAGG | | [594-612] |
| 28 | GUGUUGUGCCAAUGGUGGA | UCCACCAUUGGCACAACAC | | [482-500] |
| 29 | GGUGGAGAAGAAAACUUCG | CGAAGUUUUCUUCUCCACC | | [495-513] |
| 30 | GUGCUGUUAGAAUAAAAAG | CUUUUUAUUCUAACAGCAC | | [1158-1176] |
| 31 | UCUUUAAAAUGACCCAUUU | AAAUGGGUCAUUUUAAAGA | | [250-268] |
| 32 | UUGGAGGAGCAGAACUUGA | UCAAGUUCUGCUCCUCCAA | | [754-772] |
| 33 | UCUGAAGUGGACUGUGUGA | UCACACAGUCCACUUCAGA | | [939-957] |
| 34 | AACUGUGUCUUAUCUGCCA | UGGCAGAUAAGACACAGUU | | [1085-1103] |
| 35 | UAAGAACACCGUGACCACA | UGUGGUCACGGUGUUCUUA | | [231-249] |
| 36 | AAGAUUUCUUGUAAGAACA | UGUUCUUACAAGAAAUCUU | | [220-238] |
| 37 | AGGACCAAAGGAAAAUAAG | CUUAUUUUCCUUUGGUCCU | | [204-222] |
| 38 | GUGCCAAUGGUGGAGAAGA | UCUUCUCCACCAUUGGCAC | | [487-505] |
| 39 | UUUCGUGGCUCCCACAAGA | UCUUGUGGGAGCCACGAAA | | [266-284] |
| 40 | ACAGUUGUGUUGUGCCAAU | AUUGGCACAACACAACUGU | | [476-494] |
| 41 | UUCACAAGGACCAAAGGAA | UUCCUUUGGUCCUUGUGAA | | [198-216] |
| 42 | AAUAAGAUUUCUUGUAAGA | UCUUACAAGAAAUCUUAUU | | [217-235] |
| 43 | CCAAAGGAAAAUAAGAUUU | AAAUCUUAUUUUCCUUUGG | | [208-226] |
| 44 | AUUUACACCUCCACACUGA | UCAGUGUGGAGGUGUAAAU | | [284-302] |
| 45 | AAAACAUGGCGAAAAGCUU | AAGCUUUUCGCCAUGUUUU | | [327-345] |
| 46 | GUUUGAUGACGAUGCGGAC | GUCCGCAUCGUCAUCAAAC | | [663-681] |
| 47 | ACCAAAGGAAAAUAAGAUU | AAUCUUAUUUUCCUUUGGU | | [207-225] |
| 48 | AAGAACACCGUGACCACAU | AUGUGGUCACGGUGUUCUU | | [232-250] |
| 49 | GAAACGCCACGUAAUGAGU | ACUCAUUACGUGGCGUUUC | | [359-377] |
| 50 | UGGAGGAGCAGAACUUGAG | CUCAAGUUCUGCUCCUCCA | | [755-773] |
| 51 | GAACACCGUGACCACAUCU | AGAUGUGGUCACGGUGUUC | | [234-252] |
| 52 | UAAACUUCGCUUCCGAAAA | UUUUCGGAAGCGAAGUUUA | GP | [720-738] |
| 53 | UGGCGAAAAGCUUUCUUGU | ACAAGAAAGCUUUUCGCCA | | [333-351] |
| 54 | UAUAAAACAUGGCGAAAAG | CUUUUCGCCAUGUUUUAUA | | [324-342] |
| 55 | GGAAAAUAAGAUUUCUUGU | ACAAGAAAUCUUAUUUUCC | | [213-231] |
| 56 | AGGAAACGCCACGUAAUGA | UCAUUACGUGGCGUUUCCU | | [357-375] |
| 57 | UCUUGUAAGAACACCGUGA | UCACGGUGUUCUUACAAGA | | [226-244] |
| 58 | GUCUUAUCUGCCAGGAAAG | CUUUCCUGGCAGAUAAGAC | | [1091-1109] |
| 59 | UGUGAUCACAGCAUCUUCA | UGAAGAUGCUGUGAUCACA | | [183-201] |
| 60 | AGAGACUGCCUCAGUUUGA | UCAAACUGAGGCAGUCUCU | | [650-668] |
| 61 | AAAUAAGAUUUCUUGUAAG | CUUACAAGAAAUCUUAUUU | | [216-234] |
| 62 | CUUCACAAGGACCAAAGGA | UCCUUUGGUCCUUGUGAAG | | [197-215] |
| 63 | AGCCAGCCACUUUCUUUGA | UCAAAGAAAGUGGCUGGCU | | [114-132] |
| 64 | CAUUUCGUGGCUCCCACAA | UUGUGGGAGCCACGAAAUG | | [264-282] |
| 65 | UCUUAUCUGCCAGGAAAGA | UCUUUCCUGGCAGAUAAGA | | [1092-1110] |
| 66 | AUGCGGACACUGGAAAGAA | UUCUUUCCAGUGUCCGCAU | Chn | [674-692] |
| 67 | GAAAAUAAGAUUUCUUGUA | UACAAGAAAUCUUAUUUUC | | [214-232] |
| 68 | CUGUUGGAGGAGCAGAACU | AGUUCUGCUCCUCCAACAG | | [751-769] |
| 69 | AGAAAAAGAAGAAAACCCG | CGGGUUUUCUUCUUUUUCU | | [689-707] |
| 70 | AUUUCAUCACCCAAUGCAG | CUGCAUUGGGUGAUGAAAU | | [1018-1036] |
| 71 | GAGCAGAACUUGAGUGUGG | CCACACUCAAGUUCUGCUC | | [760-778] |
| 72 | UGAUCACAGCAUCUUCACA | UGUGAAGAUGCUGUGAUCA | | [185-203] |
| 73 | ACCAGGUGUCUGAAGUGGA | UCCACUUCAGACACCUGGU | Ms | [931-949] |
| 74 | UUUAAACUUCGCUUCCGAA | UUCGGAAGCGAAGUUUAAA | GP, Chn | [718-736] |
| 75 | CAUUCACCCAACAAAACUG | CAGUUUUGUUGGGUGAAUG | | [1071-1089] |
| 76 | GUUGGAGGAGCAGAACUUG | CAAGUUCUGCUCCUCCAAC | | [753-771] |
| 77 | AGUUUGAUGACGAUGCGGA | UCCGCAUCGUCAUCAAACU | | [662-680] |
| 78 | GAUGCGGACACUGGAAAGA | UCUUUCCAGUGUCCGCAUC | Chn | [673-691] |
| 79 | GUCUGAAGUGGACUGUGUG | CACACAGUCCACUUCAGAC | | [938-956] |
| 80 | CUCAUUCACCCAACAAAAC | GUUUUGUUGGGUGAAUGAG | | [1069-1087] |
| 81 | GGUGAUCAUUUUAAACUUC | GAAGUUUAAAAUGAUCACC | | [709-727] |
| 82 | AAACAUGGCGAAAAGCUUU | AAAGCUUUUCGCCAUGUUU | | [328-346] |
| 83 | AGAAUUUCAUCACCCAAUG | CAUUGGGUGAUGAAAUUCU | | [1015-1033] |
| 84 | GAUUUACACCUCCACACUG | CAGUGUGGAGGUGUAAAUC | | [283-301] |
| 85 | UAUCUGCCAGGAAAGACCA | UGGUCUUUCCUGGCAGAUA | | [1095-1113] |
| 86 | ACUUUCAGGCCCUGUUGGA | UCCAACAGGGCCUGAAAGU | | [740-758] |
| 87 | AAUGGUGGAGAAGAAAACU | AGUUUUCUUCUCCACCAUU | | [492-510] |
| 88 | UACAAGCUACCGGAAGUGA | UCACUUCCGGUAGCUUGUA | | [403-421] |
| 89 | AUCACAGCAUCUUCACAAG | CUUGUGAAGAUGCUGUGAU | | [187-205] |
| 90 | GAUCAUUUUAAACUUCGCU | AGCGAAGUUUAAAAUGAUC | | [712-730] |
| 91 | AAUUUCAUCACCCAAUGCA | UGCAUUGGGUGAUGAAAUU | | [1017-1035] |
| 92 | CUUCGCUUCCGAAAAAACU | AGUUUUUUCGGAAGCGAAG | GP | [724-742] |
| 93 | UUUUAAACUUCGCUUCCGA | UCGGAAGCGAAGUUUAAAA | | [717-735] |
| 94 | GUUGUGUUGUGCCAAUGGU | ACCAUUGGCACAACACAAC | | [479-497] |
| 95 | UGUCUCCAAGGAAACGCCA | UGGCGUUUCCUUGGAGACA | | [349-367] |
| 96 | AAGGAAACGCCACGUAAUG | CAUUACGUGGCGUUUCCUU | | [356-374] |
| 97 | AAACCCGAGGUGAUCAUUU | AAAUGAUCACCUCGGGUUU | | [701-719] |
| 98 | UGAAGUGGACUGUGUGAGC | GCUCACACAGUCCACUUCA | | [941-959] |
| 99 | AAGCUUUCUUGUCUCCAAG | CUUGGAGACAAGAAAGCUU | | [340-358] |
| 100 | AACACCGUGACCACAUCUU | AAGAUGUGGUCACGGUGUU | | [235-253] |
| 101 | CUUUGUGAUCACAGCAUCU | AGAUGCUGUGAUCACAAAG | | [180-198] |
| 102 | UUAAACUUCGCUUCCGAAA | UUUCGGAAGCGAAGUUUAA | GP, Chn | [719-737] |
| 103 | UUGUGUUGUGCCAAUGGUG | CACCAUUGGCACAACACAA | | [480-498] |
| 104 | AAAGAAGAAAACCCGAGGU | ACCUCGGGUUUUCUUCUUU | | [693-711] |
| 105 | GACUGCCUCAGUUUGAUGA | UCAUCAAACUGAGGCAGUC | | [653-671] |
| 106 | UCGUGGCUCCCACAAGAUU | AAUCUUGUGGGAGCCACGA | | [268-286] |
| 107 | UCAUUCACCCAACAAAACU | AGUUUUGUUGGGUGAAUGA | | [1070-1088] |
| 108 | AGGAAAGACCAGCCUCACU | AGUGAGGCUGGUCUUUCCU | | [1103-1121] |
| 109 | AAAAAGAAGAAAACCCGAG | CUCGGGUUUUCUUCUUUUU | | [691-709] |
| 110 | AGAUUUACACCUCCACACU | AGUGUGGAGGUGUAAAUCU | | [282-300] |
| 111 | CACUAGGAACCUCGGAUUG | CAAUCCGAGGUUCCUAGUG | | [87-105] |
| 112 | GUUAGAAUAAAAAGCCUCG | CGAGGCUUUUUAUUCUAAC | | [1163-1181] |
| 113 | UGUGUCUUAUCUGCCAGGA | UCCUGGCAGAUAAGACACA | | [1088-1106] |
| 114 | UCUUUGACAGUCCAGCCCA | UGGGCUGGACUGUCAAAGA | | [126-144] |
| 115 | GUUGUGCCAAUGGUGGAGA | UCUCCACCAUUGGCACAAC | | [484-502] |
| 116 | CAUGGCGAAAAGCUUUCUU | AAGAAAGCUUUUCGCCAUG | | [331-349] |
| 117 | AAAAGAAGAAAACCCGAGG | CCUCGGGUUUUCUUCUUUU | | [692-710] |
| 118 | AAGGAAAAUAAGAUUUCUU | AAGAAAUCUUAUUUUCCUU | | [211-229] |
| 119 | AUAAGAUUUCUUGUAAGAA | UUCUUACAAGAAAUCUUAU | | [218-236] |
| 120 | CAGCAUCUUCACAAGGACC | GGUCCUUGUGAAGAUGCUG | | [191-209] |
| 121 | AAACUUCGGUUCGCUCCCA | UGGGAGCGAACCGAAGUUU | | [506-524] |
| 122 | GAGGAGCAGAACUUGAGUG | CACUCAAGUUCUGCUCCUC | | [757-775] |
| 123 | AGUUUCUUCCGACAGUUGU | ACAACUGUCGGAAGAAACU | | [465-483] |
| 124 | GUUUCUUCCGACAGUUGUG | CACAACUGUCGGAAGAAAC | | [466-484] |
| 125 | UUAAAAUGACCCAUUUCGU | ACGAAAUGGGUCAUUUUAA | | [253-271] |
| 126 | AUCUUUAAAAUGACCCAUU | AAUGGGUCAUUUUAAAGAU | | [249-267] |
| 127 | AGAAAACCCGAGGUGAUCA | UGAUCACCUCGGGUUUUCU | | [698-716] |
| 128 | GCGAAAAGCUUUCUUGUCU | AGACAAGAAAGCUUUUCGC | | [335-353] |
| 129 | CGAAAAGCUUUCUUGUCUC | GAGACAAGAAAGCUUUUCG | | [336-354] |
| 130 | UCUUCACAAGGACCAAAGG | CCUUUGGUCCUUGUGAAGA | | [196-214] |
| 131 | AGGAAAAUAAGAUUUCUUG | CAAGAAAUCUUAUUUUCCU | | [212-230] |
| 132 | AAACUUUCAGGCCCUGUUG | CAACAGGGCCUGAAAGUUU | | [738-756] |
| 133 | AAAACCCGAGGUGAUCAUU | AAUGAUCACCUCGGGUUUU | | [700-718] |
| 134 | AGUUGUGUUGUGCCAAUGG | CCAUUGGCACAACACAACU | | [478-496] |
| 135 | GCAGAAGUACAAGCUACCG | CGGUAGCUUGUACUUCUGC | | [396-414] |
| 136 | CAGUUUCUUCCGACAGUUG | CAACUGUCGGAAGAAACUG | | [464-482] |
| 137 | GUGGAGAAGAAAACUUCGG | CCGAAGUUUUCUUCUCCAC | | [496-514] |
| 138 | AAAGGAAAAUAAGAUUUCU | AGAAAUCUUAUUUUCCUUU | | [210-228] |
| 139 | AAAAAACUUUCAGGCCCUG | CAGGGCCUGAAAGUUUUUU | | [735-753] |
| 140 | AAAGAAAAAGAAGAAAACC | GGUUUUCUUCUUUUUCUUU | | [687-705] |
| 141 | AAGAGACUGCCUCAGUUUG | CAAACUGAGGCAGUCUCUU | | [649-667] |
| 142 | CUUCCGACAGUUGUGUUGU | ACAACACAACUGUCGGAAG | | [470-488] |
| 143 | UGUUGUGCCAAUGGUGGAG | CUCCACCAUUGGCACAACA | | [483-501] |
| 144 | AGUUCAGCUUUCUGCAGAG | CUCUGCAGAAAGCUGAACU | | [65-83] |
| 145 | UGUCUGAAGUGGACUGUGU | ACACAGUCCACUUCAGACA | | [937-955] |
| 146 | UGCCUUUGUGAUCACAGCA | UGCUGUGAUCACAAAGGCA | | [177-195] |
| 147 | AAGCCAGCCACUUUCUUUG | CAAAGAAAGUGGCUGGCUU | | [113-131] |
| 148 | AACGCCACGUAAUGAGUCA | UGACUCAUUACGUGGCGUU | | [361-379] |
| 149 | ACUUUCUUUGACAGUCCAG | CUGGACUGUCAAAGAAAGU | | [122-140] |
| 150 | UGACAACUUCCAGGAUGAC | GUCAUCCUGGAAGUUGUCA | Ms | [603-621] |
| 151 | GUGAUCACAGCAUCUUCAC | GUGAAGAUGCUGUGAUCAC | | [184-202] |
| 152 | UUCCGACAGUUGUGUUGUG | CACAACACAACUGUCGGAA | | [471-489] |
| 153 | AAAACUGUGUCUUAUCUGC | GCAGAUAAGACACAGUUUU | | [1083-1101] |
| 154 | ACGUAAUGAGUCAAAGCUG | CAGCUUUGACUCAUUACGU | | [367-385] |
| 155 | GUAAUGAGUCAAAGCUGUG | CACAGCUUUGACUCAUUAC | | [369-387] |
| 156 | UAAGAUUUCUUGUAAGAAC | GUUCUUACAAGAAAUCUUA | | [219-237] |
| 157 | CAAAGGAAAAUAAGAUUUC | GAAAUCUUAUUUUCCUUUG | | [209-227] |
| 158 | AUUCACCCAACAAAACUGU | ACAGUUUUGUUGGGUGAAU | | [1072-1090] |
| 159 | AAGAAAAAGAAGAAAACCC | GGGUUUUCUUCUUUUUCUU | | [688-706] |
| 160 | CUUGUAAGAACACCGUGAC | GUCACGGUGUUCUUACAAG | | [227-245] |
| 161 | AAGUGGACUGUGUGAGCCU | AGGCUCACACAGUCCACUU | | [943-961] |
| 162 | UUCUUGUCUCCAAGGAAAC | GUUUCCUUGGAGACAAGAA | | [345-363] |
| 163 | UGUUAGAAUAAAAAGCCUC | GAGGCUUUUUAUUCUAACA | | [1162-1180] |
| 164 | AGGUGUCUGAAGUGGACUG | CAGUCCACUUCAGACACCU | | [934-952] |
| 165 | AGACCAGGUGUCUGAAGUG | CACUUCAGACACCUGGUCU | Ms | [929-947] |
| 166 | UUAGAAUAAAAAGCCUCGU | ACGAGGCUUUUUAUUCUAA | | [1164-1182] |
| 167 | UUCGCUUCCGAAAAAACUU | AAGUUUUUUCGGAAGCGAA | GP | [725-743] |
| 168 | ACUUCGCUUCCGAAAAAAC | GUUUUUUCGGAAGCGAAGU | GP | [723-741] |
| 169 | AGACUGCCUCAGUUUGAUG | CAUCAAACUGAGGCAGUCU | | [652-670] |
| 170 | UGUGCCAAUGGUGGAGAAG | CUUCUCCACCAUUGGCACA | | [486-504] |
| 171 | UUGUGAUCACAGCAUCUUC | GAAGAUGCUGUGAUCACAA | | [182-200] |
| 172 | CUGCCUUUGUGAUCACAGC | GCUGUGAUCACAAAGGCAG | | [176-194] |
| 173 | CAGGUGUCUGAAGUGGACU | AGUCCACUUCAGACACCUG | | [933-951] |
| 174 | CAUUUUAAACUUCGCUUCC | GGAAGCGAAGUUUAAAAUG | | [715-733] |
| 175 | UGUAAGAACACCGUGACCA | UGGUCACGGUGUUCUUACA | | [229-247] |
| 176 | GAAUUUCAUCACCCAAUGC | GCAUUGGGUGAUGAAAUUC | | [1016-1034] |
| 177 | AAGUACAAGCUACCGGAAG | CUUCCGGUAGCUUGUACUU | | [400-418] |
| 178 | AGAAAGACAGAAUUUCAUC | GAUGAAAUUCUGUCUUUCU | | [1007-1025] |
| 179 | CAGUUUGAUGACGAUGCGG | CCGCAUCGUCAUCAAACUG | | [661-679] |
| 180 | UAACUACCUGACGGCCUGU | ACAGGCCGUCAGGUAGUUA | | [789-807] |
| 181 | CAGCAGUUUCUUCCGACAG | CUGUCGGAAGAAACUGCUG | | [461-479] |
| 182 | AUCAUUUUAAACUUCGCUU | AAGCGAAGUUUAAAAUGAU | | [713-731] |
| 183 | AUCUUCACAAGGACCAAAG | CUUUGGUCCUUGUGAAGAU | | [195-213] |
| 184 | AGAAGAAAACUUCGGUUCG | CGAACCGAAGUUUUCUUCU | | [500-518] |
| 185 | GUGUCUGAAGUGGACUGUG | CACAGUCCACUUCAGACAC | | [936-954] |
| 186 | UUCGUGGCUCCCACAAGAU | AUCUUGUGGGAGCCACGAA | | [267-285] |
| 187 | ACAUGGCGAAAAGCUUUCU | AGAAAGCUUUUCGCCAUGU | | [330-348] |
| 188 | GGCGAAAAGCUUUCUUGUC | GACAAGAAAGCUUUUCGCC | | [334-352] |
| 189 | CUUUCUUUGACAGUCCAGC | GCUGGACUGUCAAAGAAAG | | [123-141] |
| 190 | AAGAAAACUUCGGUUCGCU | AGCGAACCGAAGUUUUCUU | | [502-520] |
| 191 | CUGAAGUGGACUGUGUGAG | CUCACACAGUCCACUUCAG | | [940-958] |
| 192 | AAGACAGAAUUUCAUCACC | GGUGAUGAAAUUCUGUCUU | | [1010-1028] |
| 193 | UUUACACCUCCACACUGAG | CUCAGUGUGGAGGUGUAAA | | [285-303] |
| 194 | GAGAAUGACAACUUCCAGG | CCUGGAAGUUGUCAUUCUC | Ms, Chn | [598-616] |
| 195 | CUUCCGAAAAAACUUUCAG | CUGAAAGUUUUUUCGGAAG | | [729-747] |
| 196 | UGCUGUUAGAAUAAAAAGC | GCUUUUUAUUCUAACAGCA | | [1159-1177] |
| 197 | AGCCACUUUCUUUGACAGU | ACUGUCAAAGAAAGUGGCU | | [118-136] |
| 198 | AAUGACAACUUCCAGGAUG | CAUCCUGGAAGUUGUCAUU | Ms | [601-619] |
| 199 | CCGAAAAAACUUUCAGGCC | GGCCUGAAAGUUUUUUCGG | | [732-750] |
| 200 | CAGAAGUACAAGCUACCGG | CCGGUAGCUUGUACUUCUG | | [397-415] |
| 201 | AAAGACCAGCCUCACUCCU | AGGAGUGAGGCUGGUCUUU | | [1106-1124] |
| 202 | CAAAACUGUGUCUUAUCUG | CAGAUAAGACACAGUUUUG | | [1082-1100] |
| 203 | AGAAAACUUCGGUUCGCUC | GAGCGAACCGAAGUUUUCU | | [503-521] |
| 204 | UGUGUUGUGCCAAUGGUGG | CCACCAUUGGCACAACACA | | [481-499] |
| 205 | UGGCUCCCACAAGAUUUAC | GUAAAUCUUGUGGGAGCCA | | [271-289] |
| 206 | UUUCUGCAGAGGGCCACUA | UAGUGGCCCUCUGCAGAAA | | [73-91] |
| 207 | UAGAAUAAAAAGCCUCGUG | CACGAGGCUUUUUAUUCUA | | [1165-1183] |
| 208 | GCUGCCUUUGUGAUCACAG | CUGUGAUCACAAAGGCAGC | | [175-193] |
| 209 | CUUUAAAAUGACCCAUUUC | GAAAUGGGUCAUUUUAAAG | | [251-269] |
| 210 | AAGAUUUACACCUCCACAC | GUGUGGAGGUGUAAAUCUU | | [281-299] |
| 211 | AAAAGCUUUCUUGUCUCCA | UGGAGACAAGAAAGCUUUU | | [338-356] |
| 212 | GAUUUCUUGUAAGAACACC | GGUGUUCUUACAAGAAAUC | | [222-240] |
| 213 | AAGCUACCGGAAGUGAUGG | CCAUCACUUCCGGUAGCUU | | [406-424] |
| 214 | AGCAGAACUUGAGUGUGGC | GCCACACUCAAGUUCUGCU | | [761-779] |
| 215 | AAGAAGAAAACCCGAGGUG | CACCUCGGGUUUUCUUCUU | | [694-712] |
| 216 | CUGUGUCUUAUCUGCCAGG | CCUGGCAGAUAAGACACAG | | [1087-1105] |
| 217 | AUCUGCCAGGAAAGACCAG | CUGGUCUUUCCUGGCAGAU | | [1096-1114] |
| 218 | UCACAGCAUCUUCACAAGG | CCUUGUGAAGAUGCUGUGA | | [188-206] |
| 219 | AUGGCGAAAAGCUUUCUUG | CAAGAAAGCUUUUCGCCAU | | [332-350] |
| 220 | CUCCCACAAGAUUUACACC | GGUGUAAAUCUUGUGGGAG | | [274-292] |
| 221 | AACAAAACUGUGUCUUAUC | GAUAAGACACAGUUUUGUU | | [1080-1098] |
| 222 | ACUGUGUCUUAUCUGCCAG | CUGGCAGAUAAGACACAGU | | [1086-1104] |
| 223 | AGAAUAAAAAGCCUCGUGC | GCACGAGGCUUUUUAUUCU | | [1166-1184] |
| 224 | AAAAACUUUCAGGCCCUGU | ACAGGGCCUGAAAGUUUUU | | [736-754] |
| 225 | CUCAGUUUGAUGACGAUGC | GCAUCGUCAUCAAACUGAG | | [659-677] |
| 226 | UUGUAAGAACACCGUGACC | GGUCACGGUGUUCUUACAA | | [228-246] |
| 227 | AGCUUUCUUGUCUCCAAGG | CCUUGGAGACAAGAAAGCU | | [341-359] |
| 228 | UUUGAUGACGAUGCGGACA | UGUCCGCAUCGUCAUCAAA | | [664-682] |
| 229 | AAGAAAACCCGAGGUGAUC | GAUCACCUCGGGUUUUCUU | | [697-715] |
| 230 | ACUGGGAGUUCAGCUUUCU | AGAAAGCUGAACUCCCAGU | | [59-77] |
| 231 | AUUUCGUGGCUCCCACAAG | CUUGUGGGAGCCACGAAAU | | [265-283] |
| 232 | CUGGGAGUUCAGCUUUCUG | CAGAAAGCUGAACUCCCAG | | [60-78] |
| 233 | UUUCUUGUAAGAACACCGU | ACGGUGUUCUUACAAGAAA | | [224-242] |
| 234 | UAAAACAUGGCGAAAAGCU | AGCUUUUCGCCAUGUUUUA | | [326-344] |
| 235 | UUGUCUCCAAGGAAACGCC | GGCGUUUCCUUGGAGACAA | | [348-366] |
| 236 | UCUUGUCUCCAAGGAAACG | CGUUUCCUUGGAGACAAGA | | [346-364] |
| 237 | AAAGACAGAAUUUCAUCAC | GUGAUGAAAUUCUGUCUUU | | [1009-1027] |
| 238 | GAAAAGCUUUCUUGUCUCC | GGAGACAAGAAAGCUUUUC | | [337-355] |
| 239 | AUUUCUUGUAAGAACACCG | CGGUGUUCUUACAAGAAAU | | [223-241] |
| 240 | GAAAACUUCGGUUCGCUCC | GGAGCGAACCGAAGUUUUC | | [504-522] |
| 241 | AUAAAACAUGGCGAAAAGC | GCUUUUCGCCAUGUUUUAU | | [325-343] |
| 242 | UUCUGUGCUGUCUGUGGCU | AGCCACAGACAGCACAGAA | | [838-856] |
| 243 | UAAAAUGACCCAUUUCGUG | CACGAAAUGGGUCAUUUUA | | [254-272] |
| 244 | UCACUCCUGGGAACUGUCU | AGACAGUUCCCAGGAGUGA | | [1117-1135] |
| 245 | UUUCAUCACCCAAUGCAGG | CCUGCAUUGGGUGAUGAAA | | [1019-1037] |
| 246 | UCUGUGCUGUCUGUGGCUU | AAGCCACAGACAGCACAGA | | [839-857] |
| 247 | CACAUCUUUAAAAUGACCC | GGGUCAUUUUAAAGAUGUG | | [246-264] |
| 248 | ACUGCCUCAGUUUGAUGAC | GUCAUCAAACUGAGGCAGU | | [654-672] |
| 249 | CCUCAGUUUGAUGACGAUG | CAUCGUCAUCAAACUGAGG | | [658-676] |
| 250 | CUGGAGAAUGACAACUUCC | GGAAGUUGUCAUUCUCCAG | | [595-613] |
| 251 | UUCUUGUAAGAACACCGUG | CACGGUGUUCUUACAAGAA | | [225-243] |
| 252 | UUCCGAAAAAACUUUCAGG | CCUGAAAGUUUUUUCGGAA | | [730-748] |
| 253 | AAACUGUGUCUUAUCUGCC | GGCAGAUAAGACACAGUUU | | [1084-1102] |
| 254 | UUAUCUGCCAGGAAAGACC | GGUCUUUCCUGGCAGAUAA | | [1094-1112] |
| 255 | AACUUUCAGGCCCUGUUGG | CCAACAGGGCCUGAAAGUU | | [739-757] |
| 256 | UUUGUGAUCACAGCAUCUU | AAGAUGCUGUGAUCACAAA | | [181-199] |
| 257 | AAAACUUCGGUUCGCUCCC | GGGAGCGAACCGAAGUUUU | | [505-523] |
| 258 | UAAUGAGUCAAAGCUGUGG | CCACAGCUUUGACUCAUUA | | [370-388] |
| 259 | ACUAGGAACCUCGGAUUGC | GCAAUCCGAGGUUCCUAGU | | [88-106] |
| 260 | UCCGACAGUUGUGUUGUGC | GCACAACACAACUGUCGGA | | [472-490] |
| 261 | AACUGGGAGUUCAGCUUUC | GAAAGCUGAACUCCCAGUU | | [58-76] |
| 262 | UUCAGAAAGACAGAAUUUC | GAAAUUCUGUCUUUCUGAA | | [1004-1022] |
| 263 | CUGCCUCAGUUUGAUGACG | CGUCAUCAAACUGAGGCAG | | [655-673] |
| 264 | UCCGAAAAAACUUUCAGGC | GCCUGAAAGUUUUUUCGGA | | [731-749] |
| 265 | CUUAUCUGCCAGGAAAGAC | GUCUUUCCUGGCAGAUAAG | | [1093-1111] |
| 266 | UUCUUCCGACAGUUGUGUU | AACACAACUGUCGGAAGAA | | [468-486] |
| 267 | CUUGUCUCCAAGGAAACGC | GCGUUUCCUUGGAGACAAG | | [347-365] |
| 268 | ACAACUUCCAGGAUGACCC | GGGUCAUCCUGGAAGUUGU | Rat, Ms | [605-623] |
| 269 | UCUUCCGACAGUUGUGUUG | CAACACAACUGUCGGAAGA | | [469-487] |
| 270 | UUUCUUCCGACAGUUGUGU | ACACAACUGUCGGAAGAAA | | [467-485] |
| 271 | AACAUGGCGAAAAGCUUUC | GAAAGCUUUUCGCCAUGUU | | [329-347] |
| 272 | UGGGAGUUCAGCUUUCUGC | GCAGAAAGCUGAACUCCCA | | [61-79] |
| 273 | AAUGAGUCAAAGCUGUGGC | GCCACAGCUUUGACUCAUU | | [371-389] |
| 274 | UUCACCCAACAAAACUGUG | CACAGUUUUGUUGGGUGAA | | [1073-1091] |
| 275 | GUUCAGCUUUCUGCAGAGG | CCUCUGCAGAAAGCUGAAC | | [66-84] |
| 276 | GACAACUUCCAGGAUGACC | GGUCAUCCUGGAAGUUGUC | Rat, Ms | [604-622] |
| 277 | AAUGACCCAUUUCGUGGCU | AGCCACGAAAUGGGUCAUU | | [257-275] |
| 278 | AAAUGACCCAUUUCGUGGC | GCCACGAAAUGGGUCAUUU | | [256-274] |
| 279 | AAACGCCACGUAAUGAGUC | GACUCAUUACGUGGCGUUU | | [360-378] |
| 280 | UUCAUCACCCAAUGCAGGG | CCCUGCAUUGGGUGAUGAA | | [1020-1038] |
| 281 | UUGAUGACGAUGCGGACAC | GUGUCCGCAUCGUCAUCAA | | [665-683] |
| 282 | UUUAAAAUGACCCAUUUCG | CGAAAUGGGUCAUUUUAAA | | [252-270] |
| 283 | AAAAUGACCCAUUUCGUGG | CCACGAAAUGGGUCAUUUU | | [255-273] |
| 284 | UUUCUUUGACAGUCCAGCC | GGCUGGACUGUCAAAGAAA | | [124-142] |
| 285 | AUUUUAAACUUCGCUUCCG | CGGAAGCGAAGUUUAAAAU | | [716-734] |
| 286 | UUACACCUCCACACUGAGG | CCUCAGUGUGGAGGUGUAA | | [286-304] |
| 287 | AUGAGUCAAAGCUGUGGCG | CGCCACAGCUUUGACUCAU | | [372-390] |
| 288 | UUCUUUGACAGUCCAGCCC | GGGCUGGACUGUCAAAGAA | | [125-143] |
| 289 | UUCAGCUUUCUGCAGAGGG | CCCUCUGCAGAAAGCUGAA | | [67-85] |
| 290 | AUGACCCAUUUCGUGGCUC | GAGCCACGAAAUGGGUCAU | | [258-276] |

TABLE B11
LGALS3 19-mer oligomer pairs lectin, galactoside-binding, soluble, 3

| | | | | Human- | |
|---|---|---|---|---|---|
| | | | Other | 115430222: | Human- |
| No. | Sense | AntiSense | Sp | 152-904 | 115430224 |

| | | | | | |
|---|---|---|---|---|---|
| 1 | UGCCUUAUAACCUGCCUUU | AAAGGCAGGUUAUAAGGCA | | [498-516] | [1186-1204] |
| 2 | CAAUACAAAGCUGGAUAAU | AUUAUCCAGCUUUGUAUUG | | [670-688] | [1358-1376] |
| 3 | GUGCCUUAUAACCUGCCUU | AAGGCAGGUUAUAAGGCAC | | [497-515] | [1185-1203] |
| 4 | GGGAAUUUCUGGUGACAUA | UAUGUCACCAGAAAUUCCC | | [853-871] | [1541-1559] |
| 5 | ACAUUCAUCAAUAUCCCUC | GAGGGAUAUUGAUGAAUGU | | [990-1008] | [1678-1696] |
| 6 | CAAAAUACAAGUACUGGUU | AACCAGUACUUGUAUUUUG | | [745-763] | [1433-1451] |
| 7 | CCAUUCAAAAUACAAGUAC | GUACUUGUAUUUUGAAUGG | | [740-758] | [1428-1446] |
| 8 | GGAAGAAAGACAGUCGGUU | AACCGACUGUCUUUCUUCC | | [700-718] | [1388-1406] |
| 9 | GGAAAAUGGCAGACAAUUU | AAAUUGUCUGCCAUUUUCC | | [147-165] | [182-200] |
| 10 | CCAUGAUAUAAUCUGAAAG | CUUUCAGAUUAUAUCAUGG | | [894-912] | [1582-1600] |
| 11 | GCAGUACAAUCAUCGGGUU | AACCCGAUGAUUGUACUGC | | [808-826] | [1496-1514] |
| 12 | GAGAGUCAUUGUUUGCAAU | AUUGCAAACAAUGACUCUC | | [655-673] | [1343-1361] |
| 13 | GAAAAUGGCAGACAAUUUU | AAAAUUGUCUGCCAUUUUC | | [148-166] | [183-201] |
| 14 | GCGUUAUCUGGGUCUGGAA | UUCCAGACCCAGAUAACGC | | [179-197] | [867-885] |
| 15 | GGGUUAAAAAACUCAAUGA | UCAUUGAGUUUUUUAACCC | | [822-840] | [1510-1528] |
| 16 | CGGGUUAAAAAACUCAAUG | CAUUGAGUUUUUUAACCCG | | [821-839] | [1509-1527] |
| 17 | UCAAAAUACAAGUACUGGU | ACCAGUACUUGUAUUUUGA | | [744-762] | [1432-1450] |
| 18 | CAAGGUUGCAGUGAAUGAU | AUCAUUCACUGCAACCUUG | | [778-796] | [1466-1484] |
| 19 | UCUAAACCUUACAUGUGUA | UACACAUGUAAGGUUUAGA | | [938-956] | [1626-1644] |
| 20 | CCAGUGCUUCAUAUACCAU | AUGGUAUAUGAAGCACUGG | | [879-897] | [1567-1585] |
| 21 | GACCUCACCAGUGCUUCAU | AUGAAGCACUGGUGAGGUC | | [872-890] | [1560-1578] |
| 22 | CUUUAACCCACGCUUCAAU | AUUGAAGCGUGGGUUAAAG | | [625-643] | [1313-1331] |
| 23 | UCCACUUUAACCCACGCUU | AAGCGUGGGUUAAAGUGGA | | [621-639] | [1309-1327] |
| 24 | GCCUUCCACUUUAACCCAC | GUGGGUUAAAGUGGAAGGC | | [617-635] | [1305-1323] |
| 25 | CGUUAUCUGGGUCUGGAAA | UUUCCAGACCCAGAUAACG | | [180-198] | [868-886] |
| 26 | ACCUCACCAGUGCUUCAUA | UAUGAAGCACUGGUGAGGU | | [873-891] | [1561-1579] |
| 27 | AAGAAAGACAGUCGGUUUU | AAAACCGACUGUCUUUCUU | | [702-720] | [1390-1408] |
| 28 | GGGAAGAAAGACAGUCGGU | ACCGACUGUCUUUCUUCCC | | [699-717] | [1387-1405] |
| 29 | CCACUUUAACCCACGCUUC | GAAGCGUGGGUUAAAGUGG | | [622-640] | [1310-1328] |
| 30 | CCUCGCAUGCUGAUAACAA | UUGUUAUCAGCAUGCGAGG | | [533-551] | [1221-1239] |
| 31 | ACAUGUGUAAAGGUUUCAU | AUGAAACCUUUACACAUGU | | [948-966] | [1636-1654] |
| 32 | CUCACCAGUGCUUCAUAUA | UAUAUGAAGCACUGGUGAG | | [875-893] | [1563-1581] |
| 33 | GGAAUUUCUGGUGACAUAG | CUAUGUCACCAGAAAUUCC | | [854-872] | [1542-1560] |
| 34 | UGGGAAUUUCUGGUGACAU | AUGUCACCAGAAAUUCCCA | | [852-870] | [1540-1558] |
| 35 | ACAAUCAUCGGGUUAAAAA | UUUUUAACCCGAUGAUUGU | | [813-831] | [1501-1519] |
| 36 | GCCUUAUAACCUGCCUUUG | CAAAGGCAGGUUAUAAGGC | | [499-517] | [1187-1205] |
| 37 | UGCGUUAUCUGGGUCUGGA | UCCAGACCCAGAUAACGCA | | [178-196] | [866-884] |
| 38 | CCCUCUUGUAAGUCAUCUA | UAGAUGACUUACAAGAGGG | | [1004-1022] | [1692-1710] |
| 39 | ACCAGUGCUUCAUAUACCA | UGGUAUAUGAAGCACUGGU | | [878-896] | [1566-1584] |
| 40 | CUGGGAAUUUCUGGUGACA | UGUCACCAGAAAUUCCCAG | | [851-869] | [1539-1557] |
| 41 | CAAUCAUCGGGUUAAAAAA | UUUUUUAACCCGAUGAUUG | | [814-832] | [1502-1520] |
| 42 | UGAUAACAAUUCUGGGCAC | GUGCCCAGAAUUGUUAUCA | | [543-561] | [1231-1249] |
| 43 | UCGCAUGCUGAUAACAAUU | AAUUGUUAUCAGCAUGCGA | | [535-553] | [1223-1241] |
| 44 | GCCUCGCAUGCUGAUAACA | UGUUAUCAGCAUGCGAGGC | | [532-550] | [1220-1238] |
| 45 | GAAUUUCUGGUGACAUAGA | UCUAUGUCACCAGAAAUUC | | [855-873] | [1543-1561] |
| 46 | UCAUCGGGUUAAAAAACUC | GAGUUUUUUAACCCGAUGA | | [817-835] | [1505-1523] |
| 47 | AGUACAAUCAUCGGGUUAA | UUAACCCGAUGAUUGUACU | | [810-828] | [1498-1516] |
| 48 | AGGAGAGUCAUUGUUUGCA | UGCAAACAAUGACUCUCCU | | [653-671] | [1341-1359] |
| 49 | CAGUGCUUCAUAUACCAUG | CAUGGUAUAUGAAGCACUG | | [880-898] | [1568-1586] |
| 50 | CAGUACAAUCAUCGGGUUA | UAACCCGAUGAUUGUACUG | | [809-827] | [1497-1515] |
| 51 | CAAUUCUGGGCACGGUGAA | UUCACCGUGCCCAGAAUUG | | [549-567] | [1237-1255] |
| 52 | GUAAAGGUUUCAUGUUCAC | GUGAACAUGAAACCUUUAC | | [954-972] | [1642-1660] |
| 53 | GUCAUUGUUUGCAAUACAA | UUGUAUUGCAAACAAUGAC | | [659-677] | [1347-1365] |
| 54 | CUGAUAACAAUUCUGGGCA | UGCCCAGAAUUGUUAUCAG | | [542-560] | [1230-1248] |
| 55 | GGUUUCAUGUUCACUGUGA | UCACAGUGAACAUGAAACC | | [959-977] | [1647-1665] |
| 56 | UGCAGUACAAUCAUCGGGU | ACCCGAUGAUUGUACUGCA | | [807-825] | [1495-1513] |
| 57 | UGCAAUACAAAGCUGGAUA | UAUCCAGCUUUGUAUUGCA | | [668-686] | [1356-1374] |
| 58 | CACGCUUCAAUGAGAACAA | UUGUUCUCAUUGAAGCGUG | | [633-651] | [1321-1339] |
| 59 | UGUAAAGGUUUCAUGUUCA | UGAACAUGAAACCUUUACA | | [953-971] | [1641-1659] |
| 60 | UGUGUAAAGGUUUCAUGUU | AACAUGAAACCUUUACACA | | [951-969] | [1639-1657] |
| 61 | GGGAAGGGAAGAAAGACAG | CUGUCUUUCUUCCCUUCCC | Rat | [694-712] | [1382-1400] |
| 62 | UUGCAAUACAAAGCUGGAU | AUCCAGCUUUGUAUUGCAA | | [667-685] | [1355-1373] |
| 63 | AGAAUUGCUUUAGAUUUCC | GGAAAUCUAAAGCAAUUCU | | [581-599] | [1269-1287] |
| 64 | GCUUCAUAUACCAUGAUAU | AUAUCAUGGUAUAUGAAGC | | [884-902] | [1572-1590] |
| 65 | UGCUUCAUAUACCAUGAUA | UAUCAUGGUAUAUGAAGCA | | [883-901] | [1571-1589] |
| 66 | CUUCAAGGUUGCAGUGAAU | AUUCACUGCAACCUUGAAG | | [775-793] | [1463-1481] |
| 67 | UCAAUGAGAACAACAGGAG | CUCCUGUUGUUCUCAUUGA | Ms | [639-657] | [1327-1345] |
| 68 | CCACGCUUCAAUGAGAACA | UGUUCUCAUUGAAGCGUGG | | [632-650] | [1320-1338] |
| 69 | UCCCUCUUGUAAGUCAUCU | AGAUGACUUACAAGAGGGA | | [1003-1021] | [1691-1709] |
| 70 | ACUUCAAGGUUGCAGUGAA | UUCACUGCAACCUUGAAGU | | [774-792] | [1462-1480] |
| 71 | ACAGUCGGUUUUCCCAUUU | AAAUGGGAAAACCGACUGU | | [709-727] | [1397-1415] |
| 72 | CGCUUCAAUGAGAACAACA | UGUUGUUCUCAUUGAAGCG | Rat, Ms | [635-653] | [1323-1341] |
| 73 | ACGCUUCAAUGAGAACAAC | GUUGUUCUCAUUGAAGCGU | | [634-652] | [1322-1340] |
| 74 | GGAAUGAUGUUGCCUUCCA | UGGAAGGCAACAUCAUUCC | Ms | [606-624] | [1294-1312] |
| 75 | UCUUGUAAGUCAUCUACUU | AAGUAGAUGACUUACAAGA | | [1007-1025] | [1695-1713] |
| 76 | AGUCAUUGUUUGCAAUACA | UGUAUUGCAAACAAUGACU | | [658-676] | [1346-1364] |
| 77 | GCUUCAAUGAGAACAACAG | CUGUUGUUCUCAUUGAAGC | Rat, Ms | [636-654] | [1324-1342] |
| 78 | ACCCACGCUUCAAUGAGAA | UUCUCAUUGAAGCGUGGGU | | [630-648] | [1318-1336] |
| 79 | GAGGGAAUGAUGUUGCCUU | AAGGCAACAUCAUUCCCUC | Ms | [603-621] | [1291-1309] |
| 80 | UGAAGCCCAAUGCAAACAG | CUGUUUGCAUUGGGCUUCA | | [564-582] | [1252-1270] |
| 81 | CUCAAUGAAAUCAGCAAAC | GUUUGCUGAUUUCAUUGAG | | [833-851] | [1521-1539] |
| 82 | CCCAUUUGAAAGUGGGAAA | UUUCCCACUUUCAAAUGGG | | [721-739] | [1409-1427] |
| 83 | ACGGUGAAGCCCAAUGCAA | UUGCAUUGGGCUUCACCGU | | [560-578] | [1248-1266] |
| 84 | GCCACUGAUUGUGCCUUAU | AUAAGGCACAAUCAGUGGC | | [487-505] | [1175-1193] |
| 85 | CCUCUUGUAAGUCAUCUAC | GUAGAUGACUUACAAGAGG | | [1005-1023] | [1693-1711] |
| 86 | CUAAACCUUACAUGUGUAA | UUACACAUGUAAGGUUUAG | | [939-957] | [1627-1645] |
| 87 | GUGCUUCAUAUACCAUGAU | AUCAUGGUAUAUGAAGCAC | | [882-900] | [1570-1588] |
| 88 | CAGUCGGUUUUCCCAUUUG | CAAAUGGGAAAACCGACUG | | [710-728] | [1398-1416] |
| 89 | GGAAACCCAAACCCUCAAG | CUUGAGGGUUUGGGUUUCC | Ms | [194-212] | [882-900] |
| 90 | CUCACUUGUUGCAGUACAA | UUGUACUGCAACAAGUGAG | | [798-816] | [1486-1504] |
| 91 | AGAGUCAUUGUUUGCAAUA | UAUUGCAAACAAUGACUCU | | [656-674] | [1344-1362] |
| 92 | AUGUUGCCUUCCACUUUAA | UUAAAGUGGAAGGCAACAU | Ms | [612-630] | [1300-1318] |
| 93 | UCGGGUUAAAAAACUCAAU | AUUGAGUUUUUUAACCCGA | | [820-838] | [1508-1526] |
| 94 | CCACUUCAAGGUUGCAGUG | CACUGCAACCUUGAAGUGG | | [772-790] | [1460-1478] |
| 95 | CCAUUUGAAAGUGGGAAAC | GUUUCCCACUUUCAAAUGG | | [722-740] | [1410-1428] |
| 96 | GGUUUUCCCAUUUGAAAGU | ACUUUCAAAUGGGAAAACC | | [715-733] | [1403-1421] |
| 97 | GUCGGUUUUCCCAUUUGAA | UUCAAAUGGGAAAACCGAC | | [712-730] | [1400-1418] |
| 98 | GAGUCAUUGUUUGCAAUAC | GUAUUGCAAACAAUGACUC | | [657-675] | [1345-1363] |
| 99 | GAAUGAUGUUGCCUUCCAC | GUGGAAGGCAACAUCAUUC | Ms | [607-625] | [1295-1313] |
| 100 | GCUUUAGAUUUCCAAAGAG | CUCUUUGGAAAUCUAAAGC | | [587-605] | [1275-1293] |
| 101 | UGCUUUAGAUUUCCAAAGA | UCUUUGGAAAUCUAAAGCA | | [586-604] | [1274-1292] |
| 102 | CUCGCAUGCUGAUAACAAU | AUUGUUAUCAGCAUGCGAG | | [534-552] | [1222-1240] |
| 103 | CCAUCUUCUGGACAGCCAA | UUGGCUGUCCAGAAGAUGG | | [419-437] | [1107-1125] |
| 104 | UGGAAACCCAAACCCUCAA | UUGAGGGUUUGGGUUUCCA | Ms | [193-211] | [881-899] |
| 105 | GAAAUCAGCAAACUGGGAA | UUCCCAGUUUGCUGAUUUC | | [839-857] | [1527-1545] |
| 106 | GCUCACUUGUUGCAGUACA | UGUACUGCAACAAGUGAGC | | [797-815] | [1485-1503] |
| 107 | CAGUGAAUGAUGCUCACUU | AAGUGAGCAUCAUUCACUG | | [786-804] | [1474-1492] |
| 108 | CCCACGCUUCAAUGAGAAC | GUUCUCAUUGAAGCGUGGG | | [631-649] | [1319-1337] |
| 109 | AGAUUUCCAAAGAGGGAAU | AUUCCCUCUUUGGAAAUCU | | [592-610] | [1280-1298] |
| 110 | GCAAACAGAAUUGCUUUAG | CUAAAGCAAUUCUGUUUGC | | [575-593] | [1263-1281] |
| 111 | CCCAAUGCAAACAGAAUUG | CAAUUCUGUUUGCAUUGGG | | [569-587] | [1257-1275] |
| 112 | CCUUACAUGUGUAAAGGUU | AACCUUUACACAUGUAAGG | | [944-962] | [1632-1650] |
| 113 | AGUCGGUUUUCCCAUUUGA | UCAAAUGGGAAAACCGACU | | [711-729] | [1399-1417] |
| 114 | CGCAUGCUGAUAACAAUUC | GAAUUGUUAUCAGCAUGCG | | [536-554] | [1224-1242] |
| 115 | UGCCUCGCAUGCUGAUAAC | GUUAUCAGCAUGCGAGGCA | | [531-549] | [1219-1237] |
| 116 | CUACCCAUCUUCUGGACAG | CUGUCCAGAAGAUGGGUAG | | [415-433] | [1103-1121] |
| 117 | CUGGUGACAUAGACCUCAC | GUGAGGUCUAUGUCACCAG | | [861-879] | [1549-1567] |
| 118 | GCAGUGAAUGAUGCUCACU | AGUGAGCAUCAUUCACUGC | | [785-803] | [1473-1491] |
| 119 | ACCACUUCAAGGUUGCAGU | ACUGCAACCUUGAAGUGGU | | [771-789] | [1459-1477] |
| 120 | UGCAAACAGAAUUGCUUUA | UAAAGCAAUUCUGUUUGCA | | [574-592] | [1262-1280] |
| 121 | AAAUCAGCAAACUGGGAAU | AUUCCCAGUUUGCUGAUUU | | [840-858] | [1528-1546] |
| 122 | UGCAGUGAAUGAUGCUCAC | GUGAGCAUCAUUCACUGCA | | [784-802] | [1472-1490] |
| 123 | CCUGACCACUUCAAGGUUG | CAACCUUGAAGUGGUCAGG | | [767-785] | [1455-1473] |
| 124 | UCCCAUUUGAAAGUGGGAA | UUCCCACUUUCAAAUGGGA | | [720-738] | [1408-1426] |
| 125 | AGACAGUCGGUUUUCCCAU | AUGGGAAAACCGACUGUCU | | [707-725] | [1395-1413] |
| 126 | CAACAGGAGAGUCAUUGUU | AACAAUGACUCUCCUGUUG | | [649-667] | [1337-1355] |
| 127 | AGGGAAUGAUGUUGCCUUC | GAAGGCAACAUCAUUCCCU | Ms | [604-622] | [1292-1310] |
| 128 | CCAAUGCAAACAGAAUUGC | GCAAUUCUGUUUGCAUUGG | | [570-588] | [1258-1276] |
| 129 | AGCCCAAUGCAAACAGAAU | AUUCUGUUUGCAUUGGGCU | | [567-585] | [1255-1273] |
| 130 | UGUUCACUGUGAGUGAAAA | UUUUCACUCACAGUGAACA | | [966-984] | [1654-1672] |
| 131 | UGAUGCGUUAUCUGGGUCU | AGACCCAGAUAACGCAUCA | | [175-193] | [863-881] |
| 132 | AAACCUUACAUGUGUAAAG | CUUUACACAUGUAAGGUUU | | [941-959] | [1629-1647] |
| 133 | GUGACAUAGACCUCACCAG | CUGGUGAGGUCUAUGUCAC | | [864-882] | [1552-1570] |
| 134 | UCAGCAAACUGGGAAUUUC | GAAAUUCCCAGUUUGCUGA | | [843-861] | [1531-1549] |
| 135 | GGUUGAACCUGACCACUUC | GAAGUGGUCAGGUUCAACC | | [760-778] | [1448-1466] |
| 136 | UGGUUGAACCUGACCACUU | AAGUGGUCAGGUUCAACCA | | [759-777] | [1447-1465] |
| 137 | GUGGGAAACCAUUCAAAAU | AUUUUGAAUGGUUUCCCAC | | [732-750] | [1420-1438] |
| 138 | UCGGUUUUCCCAUUUGAAA | UUUCAAAUGGGAAAACCGA | | [713-731] | [1401-1419] |
| 139 | UGGGUCUGGAAACCCAAAC | GUUUGGGUUUCCAGACCCA | | [187-205] | [875-893] |
| 140 | CAGUGAAUUACCUGUCUCA | UGAGACAGGUAAUUCACUG | | [1037-1055] | [1725-1743] |
| 141 | ACAGUGAAUUACCUGUCUC | GAGACAGGUAAUUCACUGU | | [1036-1054] | [1724-1742] |
| 142 | AUCGGGUUAAAAAACUCAA | UUGAGUUUUUUAACCCGAU | | [819-837] | [1507-1525] |
| 143 | AUAGACCUCACCAGUGCUU | AAGCACUGGUGAGGUCUAU | | [869-887] | [1557-1575] |
| 144 | AGUGAAUGAUGCUCACUUG | CAAGUGAGCAUCAUUCACU | | [787-805] | [1475-1493] |
| 145 | ACCUGACCACUUCAAGGUU | AACCUUGAAGUGGUCAGGU | | [766-784] | [1454-1472] |
| 146 | UUGAACCUGACCACUUCAA | UUGAAGUGGUCAGGUUCAA | | [762-780] | [1450-1468] |
| 147 | CGGUUUUCCCAUUUGAAAG | CUUUCAAAUGGGAAAACCG | | [714-732] | [1402-1420] |
| 148 | AGAACAACAGGAGAGUCAU | AUGACUCUCCUGUUGUUCU | Ms | [645-663] | [1333-1351] |
| 149 | UCACUUGUUGCAGUACAAU | AUUGUACUGCAACAAGUGA | | [799-817] | [1487-1505] |
| 150 | AACUCAAUGAAAUCAGCAA | UUGCUGAUUUCAUUGAGUU | | [831-849] | [1519-1537] |
| 151 | AUGCUCACUUGUUGCAGUA | UACUGCAACAAGUGAGCAU | | [795-813] | [1483-1501] |
| 152 | AAAGUGGGAAACCAUUCAA | UUGAAUGGUUUCCCACUUU | | [729-747] | [1417-1435] |
| 153 | CAUGUUCACUGUGAGUGAA | UUCACUCACAGUGAACAUG | | [964-982] | [1652-1670] |
| 154 | AAGUGGGAAACCAUUCAAA | UUUGAAUGGUUUCCCACUU | | [730-748] | [1418-1436] |
| 155 | CACUGUGAGUGAAAAUUUU | AAAAUUUUCACUCACAGUG | | [970-988] | [1658-1676] |
| 156 | UCACUGUGAGUGAAAAUUU | AAAUUUUCACUCACAGUGA | | [969-987] | [1657-1675] |
| 157 | ACUCAAUGAAAUCAGCAAA | UUUGCUGAUUUCAUUGAGU | | [832-850] | [1520-1538] |
| 158 | UUCACUGUGAGUGAAAAUU | AAUUUUCACUCACAGUGAA | | [968-986] | [1656-1674] |
| 159 | GCAGACGGCUUCUCACUUA | UAAGUGAGAAGCCGUCUGC | | | |
| 160 | AGCGGAAAAUGGCAGACAA | UUGUCUGCCAUUUUCCGCU | | | |

TABLE B12
LGALS3-19-mer oligomer pairs lectin, galactoside-binding

| | | | | Human- | |
|---|---|---|---|---|---|
| | | | Other | 115430222: | Human- |
| No. | Sense | AntiSense | Sp | 152-904 | 115430224: — |

| | | | | | |
|---|---|---|---|---|---|
| 1 | CGGUGAAGCCCAAUGCAAA | UUUGCAUUGGGCUUCACCG | | [561-579] | [1249-1267] |
| 2 | GGAGAGUCAUUGUUUGCAA | UUGCAAACAAUGACUCUCC | | [654-672] | [1342-1360] |
| 3 | GCAAUACAAAGCUGGAUAA | UUAUCCAGCUUUGUAUUGC | | [669-687] | [1357-1375] |
| 4 | AUACAAAGCUGGAUAAUAA | UUAUUAUCCAGCUUUGUAU | | [672-690] | [1360-1378] |
| 5 | CAAUGAGAACAACAGGAGA | UCUCCUGUUGUUCUCAUUG | Ms | [640-658] | [1328-1346] |
| 6 | AGUGGGAAACCAUUCAAAA | UUUUGAAUGGUUUCCCACU | | [731-749] | [1419-1437] |
| 7 | GGAAACCAUUCAAAAUACA | UGUAUUUUGAAUGGUUUCC | | [735-753] | [1423-1441] |
| 8 | CAUCAAUAUCCCUCUUGUA | UACAAGAGGGAUAUUGAUG | | [995-1013] | [1683-1701] |
| 9 | GGUUAAAAAACUCAAUGAA | UUCAUUGAGUUUUUUAACC | | [823-841] | [1511-1529] |
| 10 | GUACAAUCAUCGGGUUAAA | UUUAACCCGAUGAUUGUAC | | [811-829] | [1499-1517] |
| 11 | GAAACCAUUCAAAAUACAA | UUGUAUUUUGAAUGGUUUC | | [736-754] | [1424-1442] |
| 12 | AAGUCAUCUACUUAAUAAA | UUUAUUAAGUAGAUGACUU | | [1013-1031] | [1701-1719] |
| 13 | CACUGAUUGUGCCUUAUAA | UUAUAAGGCACAAUCAGUG | | [489-507] | [1177-1195] |
| 14 | CAUUCAAAAUACAAGUACU | AGUACUUGUAUUUUGAAUG | | [741-759] | [1429-1447] |
| 15 | GUUAAAAAACUCAAUGAAA | UUUCAUUGAGUUUUUUAAC | | [824-842] | [1512-1530] |
| 16 | GAAGCCCAAUGCAAACAGA | UCUGUUUGCAUUGGGCUUC | | [565-583] | [1253-1271] |
| 17 | GGAAGGGAAGAAAGACAGU | ACUGUCUUUCUUCCCUUCC | Rat | [695-713] | [1383-1401] |
| 18 | GAAUCUAAACCUUACAUGU | ACAUGUAAGGUUUAGAUUC | | [935-953] | [1623-1641] |
| 19 | GAGUGAAAAUUUUUACAUU | AAUGUAAAAAUUUUCACUC | | [976-994] | [1664-1682] |
| 20 | GAUGUUGCCUUCCACUUUA | UAAAGUGGAAGGCAACAUC | Ms | [611-629] | [1299-1317] |
| 21 | ACCAUGAUAUAAUCUGAAA | UUUCAGAUUAUAUCAUGGU | | [893-911] | [1581-1599] |
| 22 | CCUCACCAGUGCUUCAUAU | AUAUGAAGCACUGGUGAGG | | [874-892] | [1562-1580] |
| 23 | CUGUGAGUGAAAAUUUUUA | UAAAAAUUUUCACUCACAG | | [972-990] | [1660-1678] |
| 24 | GUGCCUCGCAUGCUGAUAA | UUAUCAGCAUGCGAGGCAC | | [530-548] | [1218-1236] |
| 25 | CUGGGUCUGGAAACCCAAA | UUUGGGUUUCCAGACCCAG | | [186-204] | [874-892] |
| 26 | GAAGAAAGACAGUCGGUUU | AAACCGACUGUCUUUCUUC | | [701-719] | [1389-1407] |
| 27 | CUUCAUAUACCAUGAUAUA | UAUAUCAUGGUAUAUGAAG | | [885-903] | [1573-1591] |
| 28 | AAAUACAAGUACUGGUUGA | UCAACCAGUACUUGUAUUU | | [747-765] | [1435-1453] |
| 29 | UCAUUGUUUGCAAUACAAA | UUUGUAUUGCAAACAAUGA | | [660-678] | [1348-1366] |
| 30 | GGUGAAGCCCAAUGCAAAC | GUUUGCAUUGGGCUUCACC | | [562-580] | [1250-1268] |
| 31 | AUACCAUGAUAUAAUCUGA | UCAGAUUAUAUCAUGGUAU | | [891-909] | [1579-1597] |
| 32 | CAAACAGAAUUGCUUUAGA | UCUAAAGCAAUUCUGUUUG | | [576-594] | [1264-1282] |
| 33 | GAAAGUGGGAAACCAUUCA | UGAAUGGUUUCCCACUUUC | | [728-746] | [1416-1434] |
| 34 | AAUACAAAGCUGGAUAAUA | UAUUAUCCAGCUUUGUAUU | | [671-689] | [1359-1377] |
| 35 | GCAUGCUGAUAACAAUUCU | AGAAUUGUUAUCAGCAUGC | | [537-555] | [1225-1243] |
| 36 | AAGCCCAAUGCAAACAGAA | UUCUGUUUGCAUUGGGCUU | | [566-584] | [1254-1272] |
| 37 | CACUUUAACCCACGCUUCA | UGAAGCGUGGGUUAAAGUG | | [623-641] | [1311-1329] |
| 38 | CCAAAGAGGGAAUGAUGUU | AACAUCAUUCCCUCUUUGG | | [598-616] | [1286-1304] |
| 39 | UCUGGGUCUGGAAACCCAA | UUGGGUUUCCAGACCCAGA | | [185-203] | [873-891] |
| 40 | CAUUGUUUGCAAUACAAAG | CUUUGUAUUGCAAACAAUG | | [661-679] | [1349-1367] |
| 41 | AGUGAAUUACCUGUCUCAA | UUGAGACAGGUAAUUCACU | | [1038-1056] | [1726-1744] |
| 42 | UCAAGGUUGCAGUGAAUGA | UCAUUCACUGCAACCUUGA | | [777-795] | [1465-1483] |
| 43 | GGGAAACCAUUCAAAAUAC | GUAUUUUGAAUGGUUUCCC | | [734-752] | [1422-1440] |
| 44 | AAGUACUGGUUGAACCUGA | UCAGGUUCAACCAGUACUU | | [753-771] | [1441-1459] |
| 45 | UGGAGCACCUGGAGCUUAU | AUAAGCUCCAGGUGCUCCA | | [343-361] | [1031-1049] |
| 46 | CAUUCAUCAAUAUCCCUCU | AGAGGGAUAUUGAUGAAUG | | [991-1009] | [1679-1697] |
| 47 | AGUGCUUCAUAUACCAUGA | UCAUGGUAUAUGAAGCACU | | [881-899] | [1569-1587] |
| 48 | AAUACAAGUACUGGUUGAA | UUCAACCAGUACUUGUAUU | | [748-766] | [1436-1454] |
| 49 | GUGAAAAUUUUUACAUUCA | UGAAUGUAAAAAUUUUCAC | | [978-996] | [1666-1684] |
| 50 | UACCAUGAUAUAAUCUGAA | UUCAGAUUAUAUCAUGGUA | | [892-910] | [1580-1598] |
| 51 | CUGGAAACCCAAACCCUCA | UGAGGGUUUGGGUUUCCAG | Ms | [192-210] | [880-898] |
| 52 | UGUAAGUCAUCUACUUAAU | AUUAAGUAGAUGACUUACA | | [1010-1028] | [1698-1716] |
| 53 | GUGAGUGAAAAUUUUUACA | UGUAAAAAUUUUCACUCAC | | [974-992] | [1662-1680] |
| 54 | UCAUAUACCAUGAUAUAAU | AUUAUAUCAUGGUAUAUGA | | [887-905] | [1575-1593] |
| 55 | ACUUUAACCCACGCUUCAA | UUGAAGCGUGGGUUAAAGU | | [624-642] | [1312-1330] |
| 56 | CAGCAAACUGGGAAUUUCU | AGAAAUUCCCAGUUUGCUG | | [844-862] | [1532-1550] |
| 57 | GAAUUGCUUUAGAUUUCCA | UGGAAAUCUAAAGCAAUUC | | [582-600] | [1270-1288] |
| 58 | GCCCAAUGCAAACAGAAUU | AAUUCUGUUUGCAUUGGGC | | [568-586] | [1256-1274] |
| 59 | AGUCAUCUACUUAAUAAAU | AUUUAUUAAGUAGAUGACU | | [1014-1032] | [1702-1720] |
| 60 | CAUCGGGUUAAAAAACUCA | UGAGUUUUUUAACCCGAUG | | [818-836] | [1506-1524] |
| 61 | UUUGCAAUACAAAGCUGGA | UCCAGCUUUGUAUUGCAAA | | [666-684] | [1354-1372] |
| 62 | GAUUGUGCCUUAUAACCUG | CAGGUUAUAAGGCACAAUC | | [493-511] | [1181-1199] |
| 63 | CAAUAUCCCUCUUGUAAGU | ACUUACAAGAGGGAUAUUG | | [998-1016] | [1686-1704] |
| 64 | UGACAUAGACCUCACCAGU | ACUGGUGAGGUCUAUGUCA | | [865-883] | [1553-1571] |
| 65 | CAUGAUGCGUUAUCUGGGU | ACCCAGAUAACGCAUCAUG | | [173-191] | [861-879] |
| 66 | AGUACUGGUUGAACCUGAC | GUCAGGUUCAACCAGUACU | | [754-772] | [1442-1460] |
| 67 | GUAAGUCAUCUACUUAAUA | UAUUAAGUAGAUGACUUAC | | [1011-1029] | [1699-1717] |
| 68 | CAAACUGGGAAUUUCUGGU | ACCAGAAAUUCCCAGUUUG | | [847-865] | [1535-1553] |
| 69 | GACAGUCGGUUUUCCCAUU | AAUGGGAAAACCGACUGUC | | [708-726] | [1396-1414] |
| 70 | AGACCUCACCAGUGCUUCA | UGAAGCACUGGUGAGGUCU | | [871-889] | [1559-1577] |
| 71 | UGAAAUCAGCAAACUGGGA | UCCCAGUUUGCUGAUUUCA | | [838-856] | [1526-1544] |
| 72 | AAAGCUGGAUAAUAACUGG | CCAGUUAUUAUCCAGCUUU | | [676-694] | [1364-1382] |
| 73 | AUCAAUAUCCCUCUUGUAA | UUACAAGAGGGAUAUUGAU | | [996-1014] | [1684-1702] |
| 74 | GGCCACUGAUUGUGCCUUA | UAAGGCACAAUCAGUGGCC | | [486-504] | [1174-1192] |
| 75 | AACCCACGCUUCAAUGAGA | UCUCAUUGAAGCGUGGGUU | | [629-647] | [1317-1335] |
| 76 | CAUAUACCAUGAUAUAAUC | GAUUAUAUCAUGGUAUAUG | | [888-906] | [1576-1594] |
| 77 | UACAAAGCUGGAUAAUAAC | GUUAUUAUCCAGCUUUGUA | | [673-691] | [1361-1379] |
| 78 | GAAAAUUUUUACAUUCAUC | GAUGAAUGUAAAAAUUUUC | | [980-998] | [1668-1686] |
| 79 | AACUGGGAAUUUCUGGUGA | UCACCAGAAAUUCCCAGUU | | [849-867] | [1537-1555] |
| 80 | GGUGACAUAGACCUCACCA | UGGUGAGGUCUAUGUCACC | | [863-881] | [1551-1569] |
| 81 | ACAGGAGAGUCAUUGUUUG | CAAACAAUGACUCUCCUGU | | [651-669] | [1339-1357] |
| 82 | UAUCCCUCUUGUAAGUCAU | AUGACUUACAAGAGGGAUA | | [1001-1019] | [1689-1707] |
| 83 | UCAUCAAUAUCCCUCUUGU | ACAAGAGGGAUAUUGAUGA | | [994-1012] | [1682-1700] |
| 84 | AUUGCUUUAGAUUUCCAAA | UUUGGAAAUCUAAAGCAAU | | [584-602] | [1272-1290] |
| 85 | ACAAUUCUGGGCACGGUGA | UCACCGUGCCCAGAAUUGU | | [548-566] | [1236-1254] |
| 86 | GAACAACAGGAGAGUCAUU | AAUGACUCUCCUGUUGUUC | Ms | [646-664] | [1334-1352] |
| 87 | GUCAUCUACUUAAUAAAUA | UAUUUAUUAAGUAGAUGAC | | [1015-1033] | [1703-1721] |
| 88 | CUUACAUGUGUAAAGGUUU | AAACCUUUACACAUGUAAG | | [945-963] | [1633-1651] |
| 89 | AUCUAAACCUUACAUGUGU | ACACAUGUAAGGUUUAGAU | | [937-955] | [1625-1643] |
| 90 | UACAAUCAUCGGGUUAAAA | UUUUAACCCGAUGAUUGUA | | [812-830] | [1500-1518] |
| 91 | GAUGCUCACUUGUUGCAGU | ACUGCAACAAGUGAGCAUC | | [794-812] | [1482-1500] |
| 92 | UUGAAAGUGGGAAACCAUU | AAUGGUUUCCCACUUUCAA | | [726-744] | [1414-1432] |
| 93 | CAUGUGUAAAGGUUUCAUG | CAUGAAACCUUUACACAUG | | [949-967] | [1637-1655] |
| 94 | AAAAUGGCAGACAAUUUUU | AAAAAUUGUCUGCCAUUUU | | [149-167] | [184-202] |
| 95 | AAACCAUUCAAAAUACAAG | CUUGUAUUUUGAAUGGUUU | Ms | [737-755] | [1425-1443] |
| 96 | UUGUAAGUCAUCUACUUAA | UUAAGUAGAUGACUUACAA | | [1009-1027] | [1697-1715] |
| 97 | AAUUGCUUUAGAUUUCCAA | UUGGAAAUCUAAAGCAAUU | | [583-601] | [1271-1289] |
| 98 | UCUGGUGACAUAGACCUCA | UGAGGUCUAUGUCACCAGA | | [860-878] | [1548-1566] |
| 99 | AACCAUUCAAAAUACAAGU | ACUUGUAUUUUGAAUGGUU | Ms | [738-756] | [1426-1444] |
| 100 | UAAGUCAUCUACUUAAUAA | UUAUUAAGUAGAUGACUUA | | [1012-1030] | [1700-1718] |
| 101 | AAUUUCUGGUGACAUAGAC | GUCUAUGUCACCAGAAAUU | | [856-874] | [1544-1562] |
| 102 | CCACUGAUUGUGCCUUAUA | UAUAAGGCACAAUCAGUGG | | [488-506] | [1176-1194] |
| 103 | ACUUGUUGCAGUACAAUCA | UGAUUGUACUGCAACAAGU | | [801-819] | [1489-1507] |
| 104 | UGACCACUUCAAGGUUGCA | UGCAACCUUGAAGUGGUCA | | [769-787] | [1457-1475] |
| 105 | UGGGAAACCAUUCAAAAUA | UAUUUUGAAUGGUUUCCCA | | [733-751] | [1421-1439] |
| 106 | GAAUGAUGCUCACUUGUUG | CAACAAGUGAGCAUCAUUC | | [790-808] | [1478-1496] |
| 107 | GCUCCAUGAUGCGUUAUCU | AGAUAACGCAUCAUGGAGC | | [169-187] | [857-875] |
| 108 | CUUGUAAGUCAUCUACUUA | UAAGUAGAUGACUUACAAG | | [1008-1026] | [1696-1714] |
| 109 | AAACAGAAUUGCUUUAGAU | AUCUAAAGCAAUUCUGUUU | | [577-595] | [1265-1283] |
| 110 | GGUUGCAGUGAAUGAUGCU | AGCAUCAUUCACUGCAACC | | [781-799] | [1469-1487] |
| 111 | GUUGAACCUGACCACUUCA | UGAAGUGGUCAGGUUCAAC | | [761-779] | [1449-1467] |
| 112 | AUGUGUAAAGGUUUCAUGU | ACAUGAAACCUUUACACAU | | [950-968] | [1638-1656] |
| 113 | ACUGAUUGUGCCUUAUAAC | GUUAUAAGGCACAAUCAGU | | [490-508] | [1178-1196] |
| 114 | AACAGAAUUGCUUUAGAUU | AAUCUAAAGCAAUUCUGUU | | [578-596] | [1266-1284] |
| 115 | CAAAGCUGGAUAAUAACUG | CAGUUAUUAUCCAGCUUUG | | [675-693] | [1363-1381] |
| 116 | GUUUCAUGUUCACUGUGAG | CUCACAGUGAACAUGAAAC | | [960-978] | [1648-1666] |
| 117 | ACAGAAUUGCUUUAGAUUU | AAAUCUAAAGCAAUUCUGU | | [579-597] | [1267-1285] |
| 118 | UUCAAUGAGAACAACAGGA | UCCUGUUGUUCUCAUUGAA | Ms | [638-656] | [1326-1344] |
| 119 | AAUGCAAACAGAAUUGCUU | AAGCAAUUCUGUUUGCAUU | | [572-590] | [1260-1278] |
| 120 | AAGACAGUCGGUUUUCCCA | UGGGAAAACCGACUGUCUU | | [706-724] | [1394-1412] |
| 121 | ACAAAGCUGGAUAAUAACU | AGUUAUUAUCCAGCUUUGU | | [674-692] | [1362-1380] |
| 122 | AUUCAUCAAUAUCCCUCUU | AAGAGGGAUAUUGAUGAAU | | [992-1010] | [1680-1698] |
| 123 | UAAACCUUACAUGUGUAAA | UUUACACAUGUAAGGUUUA | | [940-958] | [1628-1646] |
| 124 | UGCCUUCCACUUUAACCCA | UGGGUUAAAGUGGAAGGCA | | [616-634] | [1304-1322] |
| 125 | UGCUGAUAACAAUUCUGGG | CCCAGAAUUGUUAUCAGCA | | [540-558] | [1228-1246] |
| 126 | CAAUGCAAACAGAAUUGCU | AGCAAUUCUGUUUGCAUUG | | [571-589] | [1259-1277] |
| 127 | ACCAUUCAAAAUACAAGUA | UACUUGUAUUUUGAAUGGU | | [739-757] | [1427-1445] |
| 128 | UGAGUGAAAAUUUUUACAU | AUGUAAAAAUUUUCACUCA | | [975-993] | [1663-1681] |
| 129 | CAUGCUGAUAACAAUUCUG | CAGAAUUGUUAUCAGCAUG | | [538-556] | [1226-1244] |
| 130 | AUAUCCCUCUUGUAAGUCA | UGACUUACAAGAGGGAUAU | | [1000-1018] | [1688-1706] |
| 131 | CAUCUUCUGGACAGCCAAG | CUUGGCUGUCCAGAAGAUG | | [420-438] | [1108-1126] |
| 132 | GACAUAGACCUCACCAGUG | CACUGGUGAGGUCUAUGUC | | [866-884] | [1554-1572] |
| 133 | ACUGGGAAUUUCUGGUGAC | GUCACCAGAAAUUCCCAGU | | [850-868] | [1538-1556] |
| 134 | GCAAACUGGGAAUUUCUGG | CCAGAAAUUCCCAGUUUGC | | [846-864] | [1534-1552] |
| 135 | GAGAACAACAGGAGAGUCA | UGACUCUCCUGUUGUUCUC | Ms | [644-662] | [1332-1350] |
| 136 | AAGGUUUCAUGUUCACUGU | ACAGUGAACAUGAAACCUU | | [957-975] | [1645-1663] |
| 137 | ACUGUGAGUGAAAAUUUUU | AAAAAUUUUCACUCACAGU | | [971-989] | [1659-1677] |
| 138 | UGAUGUUGCCUUCCACUUU | AAAGUGGAAGGCAACAUCA | Ms | [610-628] | [1298-1316] |
| 139 | AUUUGAAAGUGGGAAACCA | UGGUUUCCCACUUUCAAAU | | [724-742] | [1412-1430] |
| 140 | ACAAGUACUGGUUGAACCU | AGGUUCAACCAGUACUUGU | | [751-769] | [1439-1457] |
| 141 | CAAAGAGGGAAUGAUGUUG | CAACAUCAUUCCCUCUUUG | | [599-617] | [1287-1305] |
| 142 | AGGGAAGAAAGACAGUCGG | CCGACUGUCUUUCUUCCCU | | [698-716] | [1386-1404] |
| 143 | CAUGAUAUAAUCUGAAAGG | CCUUUCAGAUUAUAUCAUG | | [895-913] | [1583-1601] |
| 144 | UUUGAAAGUGGGAAACCAU | AUGGUUUCCCACUUUCAAA | | [725-743] | [1413-1431] |
| 145 | AGCAAACUGGGAAUUUCUG | CAGAAAUUCCCAGUUUGCU | | [845-863] | [1533-1551] |
| 146 | CAUAGACCUCACCAGUGCU | AGCACUGGUGAGGUCUAUG | | [868-886] | [1556-1574] |
| 147 | UCAUGUUCACUGUGAGUGA | UCACUCACAGUGAACAUGA | | [963-981] | [1651-1669] |
| 148 | AUCUGGGUCUGGAAACCCA | UGGGUUUCCAGACCCAGAU | | [184-202] | [872-890] |
| 149 | AACAGGAGAGUCAUUGUUU | AAACAAUGACUCUCCUGUU | | [650-668] | [1338-1356] |
| 150 | UGUGCCUUAUAACCUGCCU | AGGCAGGUUAUAAGGCACA | | [496-514] | [1184-1202] |
| 151 | GUGAAGCCCAAUGCAAACA | UGUUUGCAUUGGGCUUCAC | | [563-581] | [1251-1269] |
| 152 | CCAUGAUGCGUUAUCUGGG | CCCAGAUAACGCAUCAUGG | | [172-190] | [860-878] |
| 153 | AUGCAAACAGAAUUGCUUU | AAAGCAAUUCUGUUUGCAU | | [573-591] | [1261-1279] |
| 154 | AAUGAUGUUGCCUUCCACU | AGUGGAAGGCAACAUCAUU | Ms | [608-626] | [1296-1314] |
| 155 | CCUUCCACUUUAACCCACG | CGUGGGUUAAAGUGGAAGG | | [618-636] | [1306-1324] |
| 156 | UUCAUAUACCAUGAUAUAA | UUAUAUCAUGGUAUAUGAA | | [886-904] | [1574-1592] |
| 157 | AGUGAAAAUUUUUACAUUC | GAAUGUAAAAAUUUUCACU | | [977-995] | [1665-1683] |
| 158 | CUUGUUGCAGUACAAUCAU | AUGAUUGUACUGCAACAAG | | [802-820] | [1490-1508] |
| 159 | CAGAAUUGCUUUAGAUUUC | GAAAUCUAAAGCAAUUCUG | | [580-598] | [1268-1286] |
| 160 | CAAUGAAAUCAGCAAACUG | CAGUUUGCUGAUUUCAUUG | | [835-853] | [1523-1541] |
| 161 | AAGGUUGCAGUGAAUGAUG | CAUCAUUCACUGCAACCUU | | [779-797] | [1467-1485] |
| 162 | AAACCCAAACCCUCAAGGA | UCCUUGAGGGUUUGGGUUU | Ms | [196-214] | [884-902] |
| 163 | AUAUUACAGUGAAUUACCU | AGGUAAUUCACUGUAAUAU | | [1031-1049] | [1719-1737] |
| 164 | UUAACCCACGCUUCAAUGA | UCAUUGAAGCGUGGGUUAA | | [627-645] | [1315-1333] |
| 165 | UAACAAUUCUGGGCACGGU | ACCGUGCCCAGAAUUGUUA | | [546-564] | [1234-1252] |
| 166 | GUUCACUGUGAGUGAAAAU | AUUUUCACUCACAGUGAAC | | [967-985] | [1655-1673] |
| 167 | CCUACCCAUCUUCUGGACA | UGUCCAGAAGAUGGGUAGG | | [414-432] | [1102-1120] |
| 168 | AACCCAAACCCUCAAGGAU | AUCCUUGAGGGUUUGGGUU | Ms | [197-215] | [885-903] |
| 169 | UGAUUGUGCCUUAUAACCU | AGGUUAUAAGGCACAAUCA | | [492-510] | [1180-1198] |
| 170 | UCACCAGUGCUUCAUAUAC | GUAUAUGAAGCACUGGUGA | | [876-894] | [1564-1582] |
| 171 | UGUUUGCAAUACAAAGCUG | CAGCUUUGUAUUGCAAACA | | [664-682] | [1352-1370] |
| 172 | ACAACAGGAGAGUCAUUGU | ACAAUGACUCUCCUGUUGU | Ms | [648-666] | [1336-1354] |
| 173 | AAUUCUGGGCACGGUGAAG | CUUCACCGUGCCCAGAAUU | | [550-568] | [1238-1256] |
| 174 | AUGAGAACAACAGGAGAGU | ACUCUCCUGUUGUUCUCAU | Ms | [642-660] | [1330-1348] |
| 175 | UCAAUAUCCCUCUUGUAAG | CUUACAAGAGGGAUAUUGA | | [997-1015] | [1685-1703] |
| 176 | GUGUAAAGGUUUCAUGUUC | GAACAUGAAACCUUUACAC | | [952-970] | [1640-1658] |
| 177 | GUUUGCAAUACAAAGCUGG | CCAGCUUUGUAUUGCAAAC | | [665-683] | [1353-1371] |
| 178 | CACCAGUGCUUCAUAUACC | GGUAUAUGAAGCACUGGUG | | [877-895] | [1565-1583] |
| 179 | UUAGAUUUCCAAAGAGGGA | UCCCUCUUUGGAAAUCUAA | | [590-608] | [1278-1296] |
| 180 | GAACCUGACCACUUCAAGG | CCUUGAAGUGGUCAGGUUC | | [764-782] | [1452-1470] |
| 181 | UGAAUGAUGCUCACUUGUU | AACAAGUGAGCAUCAUUCA | | [789-807] | [1477-1495] |
| 182 | CAGGAGAGUCAUUGUUUGC | GCAAACAAUGACUCUCCUG | | [652-670] | [1340-1358] |
| 183 | GUGAAUGAUGCUCACUUGU | ACAAGUGAGCAUCAUUCAC | | [788-806] | [1476-1494] |
| 184 | ACUGGUUGAACCUGACCAC | GUGGUCAGGUUCAACCAGU | | [757-775] | [1445-1463] |
| 185 | ACCUUACAUGUGUAAAGGU | ACCUUUACACAUGUAAGGU | | [943-961] | [1631-1649] |
| 186 | UACAUGUGUAAAGGUUUCA | UGAAACCUUUACACAUGUA | | [947-965] | [1635-1653] |
| 187 | UUAUAACCUGCCUUUGCCU | AGGCAAAGGCAGGUUAUAA | | [502-520] | [1190-1208] |
| 188 | UGAACCUGACCACUUCAAG | CUUGAAGUGGUCAGGUUCA | | [763-781] | [1451-1469] |
| 189 | UGUGAGUGAAAAUUUUUAC | GUAAAAAUUUUCACUCACA | | [973-991] | [1661-1679] |
| 190 | CUGGUUGAACCUGACCACU | AGUGGUCAGGUUCAACCAG | | [758-776] | [1446-1464] |
| 191 | AAUCUAAACCUUACAUGUG | CACAUGUAAGGUUUAGAUU | | [936-954] | [1624-1642] |
| 192 | UUGCAGUGAAUGAUGCUCA | UGAGCAUCAUUCACUGCAA | | [783-801] | [1471-1489] |
| 193 | CUUAAUAAAUAUUACAGUG | CACUGUAAUAUUUAUUAAG | | [1023-1041] | [1711-1729] |
| 194 | AAAAAACUCAAUGAAAUCA | UGAUUUCAUUGAGUUUUUU | | [827-845] | [1515-1533] |
| 195 | UAAAAAACUCAAUGAAAUC | GAUUUCAUUGAGUUUUUUA | | [826-844] | [1514-1532] |
| 196 | AUUCAAAAUACAAGUACUG | CAGUACUUGUAUUUUGAAU | | [742-760] | [1430-1448] |
| 197 | UCCAAAGAGGGAAUGAUGU | ACAUCAUUCCCUCUUUGGA | | [597-615] | [1285-1303] |
| 198 | UCAAUGAAAUCAGCAAACU | AGUUUGCUGAUUUCAUUGA | | [834-852] | [1522-1540] |
| 199 | AUGUUCACUGUGAGUGAAA | UUUCACUCACAGUGAACAU | | [965-983] | [1653-1671] |
| 200 | CUCCAUGAUGCGUUAUCUG | CAGAUAACGCAUCAUGGAG | | [170-188] | [858-876] |
| 201 | CCUUAUAACCUGCCUUUGC | GCAAAGGCAGGUUAUAAGG | | [500-518] | [1188-1206] |
| 202 | CUCUUGUAAGUCAUCUACU | AGUAGAUGACUUACAAGAG | | [1006-1024] | [1694-1712] |
| 203 | GAAGGGAAGAAAGACAGUC | GACUGUCUUUCUUCCCUUC | Rat | [696-714] | [1384-1402] |
| 204 | GUCUGGAAACCCAAACCCU | AGGGUUUGGGUUUCCAGAC | | [190-208] | [878-896] |
| 205 | AAAUGGCAGACAAUUUUUC | GAAAAAUUGUCUGCCAUUU | | [150-168] | [185-203] |
| 206 | AUUUCCAAAGAGGGAAUGA | UCAUUCCCUCUUUGGAAAU | | [594-612] | [1282-1300] |
| 207 | UCUUCUGGACAGCCAAGUG | CACUUGGCUGUCCAGAAGA | | [422-440] | [1110-1128] |
| 208 | UAGAUUUCCAAAGAGGGAA | UUCCCUCUUUGGAAAUCUA | | [591-609] | [1279-1297] |
| 209 | GUUAUCUGGGUCUGGAAAC | GUUUCCAGACCCAGAUAAC | | [181-199] | [869-887] |
| 210 | UACUGGUUGAACCUGACCA | UGGUCAGGUUCAACCAGUA | | [756-774] | [1444-1462] |
| 211 | AAAAUACAAGUACUGGUUG | CAACCAGUACUUGUAUUUU | | [746-764] | [1434-1452] |
| 212 | AAGGGAAGAAAGACAGUCG | CGACUGUCUUUCUUCCCUU | | [697-715] | [1385-1403] |
| 213 | CUUCAAUGAGAACAACAGG | CCUGUUGUUCUCAUUGAAG | Ms | [637-655] | [1325-1343] |
| 214 | AUACAAGUACUGGUUGAAC | GUUCAACCAGUACUUGUAU | | [749-767] | [1437-1455] |
| 215 | AAACUCAAUGAAAUCAGCA | UGCUGAUUUCAUUGAGUUU | | [830-848] | [1518-1536] |
| 216 | CUGACCACUUCAAGGUUGC | GCAACCUUGAAGUGGUCAG | Ms | [768-786] | [1456-1474] |
| 217 | AAUCAUCGGGUUAAAAAAC | GUUUUUUAACCCGAUGAUU | | [815-833] | [1503-1521] |
| 218 | GAUGCGUUAUCUGGGUCUG | CAGACCCAGAUAACGCAUC | | [176-194] | [864-882] |
| 219 | AAAACUCAAUGAAAUCAGC | GCUGAUUUCAUUGAGUUUU | | [829-847] | [1517-1535] |
| 220 | GUUGCAGUACAAUCAUCGG | CCGAUGAUUGUACUGCAAC | | [805-823] | [1493-1511] |
| 221 | AAAUAUUACAGUGAAUUAC | GUAAUUCACUGUAAUAUUU | | [1029-1047] | [1717-1735] |
| 222 | CUUUAGAUUUCCAAAGAGG | CCUCUUUGGAAAUCUAAAG | | [588-606] | [1276-1294] |
| 223 | UUUCCAAAGAGGGAAUGAU | AUCAUUCCCUCUUUGGAAA | | [595-613] | [1283-1301] |
| 224 | CACUUCAAGGUUGCAGUGA | UCACUGCAACCUUGAAGUG | | [773-791] | [1461-1479] |
| 225 | AAAAACUCAAUGAAAUCAG | CUGAUUUCAUUGAGUUUUU | | [828-846] | [1516-1534] |
| 226 | AAUGAGAACAACAGGAGAG | CUCUCCUGUUGUUCUCAUU | Ms | [641-659] | [1329-1347] |
| 227 | CUGAUUGUGCCUUAUAACC | GGUUAUAAGGCACAAUCAG | | [491-509] | [1179-1197] |
| 228 | AACAAUUCUGGGCACGGUG | CACCGUGCCCAGAAUUGUU | | [547-565] | [1235-1253] |
| 229 | AUGAUGUUGCCUUCCACUU | AAGUGGAAGGCAACAUCAU | Ms | [609-627] | [1297-1315] |
| 230 | GAAAGACAGUCGGUUUUCC | GGAAAACCGACUGUCUUUC | | [704-722] | [1392-1410] |
| 231 | AAGCUGGAUAAUAACUGGG | CCCAGUUAUUAUCCAGCUU | | [677-695] | [1365-1383] |
| 232 | UUACAUUCAUCAAUAUCCC | GGGAUAUUGAUGAAUGUAA | | [988-1006] | [1676-1694] |
| 233 | AAUGGCAGACAAUUUUUCG | CGAAAAAUUGUCUGCCAUU | | [151-169] | [186-204] |
| 234 | AUGAAAUCAGCAAACUGGG | CCCAGUUUGCUGAUUUCAU | | [837-855] | [1525-1543] |
| 235 | UUCCCAUUUGAAAGUGGGA | UCCCACUUUCAAAUGGGAA | | [719-737] | [1407-1425] |
| 236 | UGUUGCCUUCCACUUUAAC | GUUAAAGUGGAAGGCAACA | Ms | [613-631] | [1301-1319] |
| 237 | CUUAUAACCUGCCUUUGCC | GGCAAAGGCAGGUUAUAAG | | [501-519] | [1189-1207] |
| 238 | UGGUGACAUAGACCUCACC | GGUGAGGUCUAUGUCACCA | | [862-880] | [1550-1568] |
| 239 | CUUCCACUUUAACCCACGC | GCGUGGGUUAAAGUGGAAG | | [619-637] | [1307-1325] |
| 240 | AAGAGGGAAUGAUGUUGCC | GGCAACAUCAUUCCCUCUU | | [601-619] | [1289-1307] |
| 241 | AUCAUCGGGUUAAAAAACU | AGUUUUUUAACCCGAUGAU | | [816-834] | [1504-1522] |
| 242 | AGGUUGCAGUGAAUGAUGC | GCAUCAUUCACUGCAACCU | | [780-798] | [1468-1486] |
| 243 | UCUGGAAACCCAAACCCUC | GAGGGUUUGGGUUUCCAGA | Rat, Ms | [191-209] | [879-897] |
| 244 | AAAGGUUUCAUGUUCACUG | CAGUGAACAUGAAACCUUU | | [956-974] | [1644-1662] |
| 245 | AAACCCUCAAGGAUGGCCU | AGGCCAUCCUUGAGGGUUU | | [202-220] | [890-908] |
| 246 | AUGAUAUAAUCUGAAAGGG | CCCUUUCAGAUUAUAUCAU | | [896-914] | [1584-1602] |
| 247 | UUCCAAAGAGGGAAUGAUG | CAUCAUUCCCUCUUUGGAA | | [596-614] | [1284-1302] |
| 248 | AGAGGGAAUGAUGUUGCCU | AGGCAACAUCAUUCCCUCU | Ms | [602-620] | [1290-1308] |
| 249 | UACAUUCAUCAAUAUCCCU | AGGGAUAUUGAUGAAUGUA | | [989-1007] | [1677-1695] |
| 250 | AAUCAGCAAACUGGGAAUU | AAUUCCCAGUUUGCUGAUU | | [841-859] | [1529-1547] |
| 251 | GUUGCCUUCCACUUUAACC | GGUUAAAGUGGAAGGCAAC | Ms | [614-632] | [1302-1320] |
| 252 | UGAAAGUGGGAAACCAUUC | GAAUGGUUUCCCACUUUCA | | [727-745] | [1415-1433] |
| 253 | AAAGAGGGAAUGAUGUUGC | GCAACAUCAUUCCCUCUUU | | [600-618] | [1288-1306] |
| 254 | GCUGAUAACAAUUCUGGGC | GCCCAGAAUUGUUAUCAGC | | [541-559] | [1229-1247] |
| 255 | UUUCAUGUUCACUGUGAGU | ACUCACAGUGAACAUGAAA | | [961-979] | [1649-1667] |
| 256 | AGGUUUCAUGUUCACUGUG | CACAGUGAACAUGAAACCU | | [958-976] | [1646-1664] |
| 257 | AAUAUUACAGUGAAUUACC | GGUAAUUCACUGUAAUAUU | | [1030-1048] | [1718-1736] |
| 258 | AUCAGCAAACUGGGAAUUU | AAAUUCCCAGUUUGCUGAU | | [842-860] | [1530-1548] |
| 259 | UUGUUUGCAAUACAAAGCU | AGCUUUGUAUUGCAAACAA | | [663-681] | [1351-1369] |
| 260 | UACCCAUCUUCUGGACAGC | GCUGUCCAGAAGAUGGGUA | | [416-434] | [1104-1122] |
| 261 | UUCUGGUGACAUAGACCUC | GAGGUCUAUGUCACCAGAA | | [859-877] | [1547-1565] |
| 262 | UUACAUGUGUAAAGGUUUC | GAAACCUUUACACAUGUAA | | [946-964] | [1634-1652] |
| 263 | ACAUAGACCUCACCAGUGC | GCACUGGUGAGGUCUAUGU | | [867-885] | [1555-1573] |
| 264 | ACCCAAACCCUCAAGGAUG | CAUCCUUGAGGGUUUGGGU | | [198-216] | [886-904] |
| 265 | UAAAGGUUUCAUGUUCACU | AGUGAACAUGAAACCUUUA | | [955-973] | [1643-1661] |
| 266 | UUUAACCCACGCUUCAAUG | CAUUGAAGCGUGGGUUAAA | | [626-644] | [1314-1332] |
| 267 | AACCUUACAUGUGUAAAGG | CCUUUACACAUGUAAGGUU | | [942-960] | [1630-1648] |
| 268 | CACUUGUUGCAGUACAAUC | GAUUGUACUGCAACAAGUG | | [800-818] | [1488-1506] |
| 269 | GAAACCCAAACCCUCAAGG | CCUUGAGGGUUUGGGUUUC | Ms | [195-213] | [883-901] |
| 270 | AUCUUCUGGACAGCCAAGU | ACUUGGCUGUCCAGAAGAU | | [421-439] | [1109-1127] |
| 271 | UAACCCACGCUUCAAUGAG | CUCAUUGAAGCGUGGGUUA | | [628-646] | [1316-1334] |
| 272 | GAUAACAAUUCUGGGCACG | CGUGCCCAGAAUUGUUAUC | | [544-562] | [1232-1250] |
| 273 | CAAGUACUGGUUGAACCUG | CAGGUUCAACCAGUACUUG | | [752-770] | [1440-1458] |
| 274 | UACAGUGAAUUACCUGUCU | AGACAGGUAAUUCACUGUA | | [1035-1053] | [1723-1741] |
| 275 | UUCAAAAUACAAGUACUGG | CCAGUACUUGUAUUUUGAA | | [743-761] | [1431-1449] |
| 276 | UGUUGCAGUACAAUCAUCG | CGAUGAUUGUACUGCAACA | | [804-822] | [1492-1510] |
| 277 | AAUGAAAUCAGCAAACUGG | CCAGUUUGCUGAUUUCAUU | | [836-854] | [1524-1542] |
| 278 | AACCUGACCACUUCAAGGU | ACCUUGAAGUGGUCAGGUU | | [765-783] | [1453-1471] |
| 279 | AUCCCUCUUGUAAGUCAUC | GAUGACUUACAAGAGGGAU | | [1002-1020] | [1690-1708] |
| 280 | GAUUUCCAAAGAGGGAAUG | CAUUCCCUCUUUGGAAAUC | | [593-611] | [1281-1299] |
| 281 | UACAAGUACUGGUUGAACC | GGUUCAACCAGUACUUGUA | | [750-768] | [1438-1456] |
| 282 | AUGCUGAUAACAAUUCUGG | CCAGAAUUGUUAUCAGCAU | | [539-557] | [1227-1245] |
| 283 | AAACUGGGAAUUUCUGGUG | CACCAGAAAUUCCCAGUUU | | [848-866] | [1536-1554] |
| 284 | GGGAAUGAUGUUGCCUUCC | GGAAGGCAACAUCAUUCCC | Ms | [605-623] | [1293-1311] |
| 285 | AUGCGUUAUCUGGGUCUGG | CCAGACCCAGAUAACGCAU | | [177-195] | [865-883] |
| 286 | UUUCUGGUGACAUAGACCU | AGGUCUAUGUCACCAGAAA | | [858-876] | [1546-1564] |
| 287 | UUUAGAUUUCCAAAGAGGG | CCCUCUUUGGAAAUCUAAA | | [589-607] | [1277-1295] |
| 288 | AGAAAGACAGUCGGUUUUC | GAAAACCGACUGUCUUUCU | | [703-721] | [1391-1409] |
| 289 | UGAUGCUCACUUGUUGCAG | CUGCAACAAGUGAGCAUCA | | [793-811] | [1481-1499] |
| 290 | AUUACAGUGAAUUACCUGU | ACAGGUAAUUCACUGUAAU | | [1033-1051] | [1721-1739] |
| 291 | AUUGUGCCUUAUAACCUGC | GCAGGUUAUAAGGCACAAU | | [494-512] | [1182-1200] |
| 292 | GUACUGGUUGAACCUGACC | GGUCAGGUUCAACCAGUAC | | [755-773] | [1443-1461] |
| 293 | AUUUCUGGUGACAUAGACC | GGUCUAUGUCACCAGAAAU | | [857-875] | [1545-1563] |
| 294 | AUGAUGCUCACUUGUUGCA | UGCAACAAGUGAGCAUCAU | | [792-810] | [1480-1498] |
| 295 | UUGCUUUAGAUUUCCAAAG | CUUUGGAAAUCUAAAGCAA | | [585-603] | [1273-1291] |
| 296 | GACCACUUCAAGGUUGCAG | CUGCAACCUUGAAGUGGUC | | [770-788] | [1458-1476] |
| 297 | AUAUACCAUGAUAUAAUCU | AGAUUAUAUCAUGGUAUAU | | [889-907] | [1577-1595] |
| 298 | UUAUCCUGGACAGGCACCU | AGGUGCCUGUCCAGGAUAA | | [310-328] | [998-1016] |
| 299 | GUUGCAGUGAAUGAUGCUC | GAGCAUCAUUCACUGCAAC | | [782-800] | [1470-1488] |
| 300 | AUAACAAUUCUGGGCACGG | CCGUGCCCAGAAUUGUUAU | | [545-563] | [1233-1251] |
| 301 | UGAGAACAACAGGAGAGUC | GACUCUCCUGUUGUUCUCA | Ms | [643-661] | [1331-1349] |
| 302 | AAAGACAGUCGGUUUUCCC | GGGAAAACCGACUGUCUUU | | [705-723] | [1393-1411] |
| 303 | UUCAAGGUUGCAGUGAAUG | CAUUCACUGCAACCUUGAA | | [776-794] | [1464-1482] |
| 304 | UUUACAUUCAUCAAUAUCC | GGAUAUUGAUGAAUGUAAA | | [987-1005] | [1675-1693] |
| 305 | UAUAACCUGCCUUUGCCUG | CAGGCAAAGGCAGGUUAUA | | [503-521] | [1191-1209] |
| 306 | AAUGAUGCUCACUUGUUGC | GCAACAAGUGAGCAUCAUU | | [791-809] | [1479-1497] |
| 307 | UCCAUGAUGCGUUAUCUGG | CCAGAUAACGCAUCAUGGA | | [171-189] | [859-877] |
| 308 | AUUGUUUGCAAUACAAAGC | GCUUUGUAUUGCAAACAAU | | [662-680] | [1350-1368] |
| 309 | CAUUUGAAAGUGGGAAACC | GGUUUCCCACUUUCAAAUG | | [723-741] | [1411-1429] |
| 310 | UUGCCUUCCACUUUAACCC | GGGUUAAAGUGGAAGGCAA | Ms | [615-633] | [1303-1321] |
| 311 | UUCAUCAAUAUCCCUCUUG | CAAGAGGGAUAUUGAUGAA | | [993-1011] | [1681-1699] |
| 312 | UAUACCAUGAUAUAAUCUG | CAGAUUAUAUCAUGGUAUA | | [890-908] | [1578-1596] |
| 313 | UAUUACAGUGAAUUACCUG | CAGGUAAUUCACUGUAAUA | | [1032-1050] | [1720-1738] |
| 314 | AUGAUGCGUUAUCUGGGUC | GACCCAGAUAACGCAUCAU | | [174-192] | [862-880] |
| 315 | UUCCACUUUAACCCACGCU | AGCGUGGGUUAAAGUGGAA | | [620-638] | [1308-1326] |
| 316 | UAGACCUCACCAGUGCUUC | GAAGCACUGGUGAGGUCUA | | [870-888] | [1558-1576] |
| 317 | UUGUGCCUUAUAACCUGCC | GGCAGGUUAUAAGGCACAA | | [495-513] | [1183-1201] |
| 318 | UUGUUGCAGUACAAUCAUC | GAUGAUUGUACUGCAACAA | | [803-821] | [1491-1509] |
| 319 | GUUUUCCCAUUUGAAAGUG | CACUUUCAAAUGGGAAAAC | | [716-734] | [1404-1422] |
| 320 | AUAACCUGCCUUUGCCUGG | CCAGGCAAAGGCAGGUUAU | | [504-522] | [1192-1210] |
| 321 | UUUUACAUUCAUCAAUAUC | GAUAUUGAUGAAUGUAAAA | | [986-1004] | [1674-1692] |
| 322 | UUUCCCAUUUGAAAGUGGG | CCCACUUUCAAAUGGGAAA | | [718-736] | [1406-1424] |
| 323 | UUAUCUGGGUCUGGAAACC | GGUUUCCAGACCCAGAUAA | | [182-200] | [870-888] |
| 324 | UGCUCACUUGUUGCAGUAC | GUACUGCAACAAGUGAGCA | | [796-814] | [1484-1502] |
| 325 | UUGCAGUACAAUCAUCGGG | CCCGAUGAUUGUACUGCAA | | [806-824] | [1494-1512] |
| 326 | AACAACAGGAGAGUCAUUG | CAAUGACUCUCCUGUUGUU | Ms | [647-665] | [1335-1353] |
| 327 | UUUUCCCAUUUGAAAGUGG | CCACUUUCAAAUGGGAAAA | | [717-735] | [1405-1423] |
| 328 | AAUAUCCCUCUUGUAAGUC | GACUUACAAGAGGGAUAUU | | [999-1017] | [1687-1705] |
| 329 | UUACAGUGAAUUACCUGUC | GACAGGUAAUUCACUGUAA | | [1034-1052] | [1722-1740] |
| 330 | UAUCUGGGUCUGGAAACCC | GGGUUUCCAGACCCAGAUA | | [183-201] | [871-889] |
| 331 | UUCAUGUUCACUGUGAGUG | CACUCACAGUGAACAUGAA | | [962-980] | [1650-1668] |

TABLE B13
Hi95 19-mer oligomer pairs Sestrin2 (SESN2, Hi95)

| | | | | Human-32454742: |
|---|---|---|---|---|
| No. | Sense | AntiSense | Other Sp | 354-1796 |

| | | | | |
|---|---|---|---|---|
| 1 | CGGAAUUAAUGUGCCACAA | UUGUGGCACAUUAAUUCCG | | [2103-2121] |
| 2 | GACUUCCUUUGCCCUUUUU | AAAAAGGGCAAAGGAAGUC | MK | [2373-2391] |
| 3 | CCAGUGUGCCACAUUAAAU | AUUUAAUGUGGCACACUGG | MK | [3224-3242] |
| 4 | AGAUUUCAUUACCUCCUAC | GUAGGAGGUAAUGAAAUCU | MK | [2235-2253] |
| 5 | GCCACUACAUUGCCAUCAU | AUGAUGGCAAUGUAGUGGC | MK, Ms | [688-706] |
| 6 | CAGUGUGCCACAUUAAAUA | UAUUUAAUGUGGCACACUG | MK | [3225-3243] |
| 7 | UCAGUUUUUUGACUUCCUU | AAGGAAGUCAAAAAACUGA | MK | [2363-2381] |
| 8 | GUCAUUUCCAGAUUUCAUU | AAUGAAAUCUGGAAAUGAC | MK | [2226-2244] |
| 9 | ACAUUAAAUACCCGUGCAG | CUGCACGGGUAUUUAAUGU | MK | [3234-3252] |
| 10 | GCCAGUGUGCCACAUUAAA | UUUAAUGUGGCACACUGGC | MK | [3223-3241] |
| 11 | CCAACAGCAAGCGGAUUUU | AAAAUCCGCUUGCUGUUGG | MK | [2912-2930] |
| 12 | CUACUUGCCAUUCACCCAU | AUGGGUGAAUGGCAAGUAG | MK | [2250-2268] |
| 13 | GGGCCAUCUGGAACUAUAU | AUAUAGUUCCAGAUGGCCC | MK | [1525-1543] |
| 14 | GCAGAUGUCUCCCAAAAAG | CUUUUUGGGAGACAUCUGC | | [2683-2701] |
| 15 | UUGCCAUUCACCCAUCAAU | AUUGAUGGGUGAAUGGCAA | MK | [2254-2272] |
| 16 | CCUCCUACUUGCCAUUCAC | GUGAAUGGCAAGUAGGAGG | MK | [2246-2264] |
| 17 | ACCUCCUACUUGCCAUUCA | UGAAUGGCAAGUAGGAGGU | MK | [2245-2263] |
| 18 | GAAUUAAUGUGCCACAAGU | ACUUGUGGCACAUUAAUUC | | [2105-2123] |
| 19 | GGAAUUAAUGUGCCACAAG | CUUGUGGCACAUUAAUUCC | | [2104-2122] |
| 20 | UGCUACCAGUUCCAUAUGA | UCAUAUGGAACUGGUAGCA | MK | [3432-3450] |
| 21 | CCAGUGUUCAAGUGCAGAA | UUCUGCACUUGAACACUGG | MK | [3402-3420] |
| 22 | GCAUGUGAUGACUGUAAAU | AUUUACAGUCAUCACAUGC | | [3356-3374] |
| 23 | CGGAUUUUCUUGCAAGAUC | GAUCUUGCAAGAAAAUCCG | MK | [2923-2941] |
| 24 | CCUCUUUAUUUUGGUCCUU | AAGGACCAAAAUAAAGAGG | MK | [2535-2553] |
| 25 | GAAUCCUAGUUCAGUUUUU | AAAAACUGAACUAGGAUUC | MK | [2353-2371] |
| 26 | CCAUCAAUGUGAAAGUCAG | CUGACUUUCACAUUGAUGG | MK | [2265-2283] |
| 27 | GGCCAAGCUCGGAAUUAAU | AUUAAUUCCGAGCUUGGCC | | [2094-2112] |
| 28 | CAGUUCCAUAUGAUGAGAA | UUCUCAUCAUAUGGAACUG | MK | [3438-3456] |
| 29 | UCAUCACCAAGGAACACAU | AUGUGUUCCUUGGUGAUGA | MK | [868-886] |
| 30 | UGACUGUGAAUUACGACUU | AAGUCGUAAUUCACAGUCA | | [3097-3115] |
| 31 | GGAUUUUCUUGCAAGAUCA | UGAUCUUGCAAGAAAAUCC | MK | [2924-2942] |
| 32 | GCGGAUUUUCUUGCAAGAU | AUCUUGCAAGAAAAUCCGC | MK | [2922-2940] |
| 33 | CGCAGAUGUCUCCCAAAAA | UUUUUGGGAGACAUCUGCG | | [2682-2700] |
| 34 | CUCUUUAUUUUGGUCCUUU | AAAGGACCAAAAUAAAGAG | MK | [2536-2554] |
| 35 | AGAGGAGGGAGUAUUAGAU | AUCUAAUACUCCCUCCUCU | MK | [2509-2527] |
| 36 | CCUUUGCCCUUUUUCCCUU | AAGGGAAAAAGGGCAAAGG | | [2378-2396] |
| 37 | CGAAUCCUAGUUCAGUUUU | AAAACUGAACUAGGAUUCG | MK | [2352-2370] |
| 38 | CUGGAAUGGACAGUUCAUU | AAUGAACUGUCCAUUCCAG | MK | [1954-1972] |
| 39 | AGUUCCAUAUGAUGAGAAA | UUUCUCAUCAUAUGGAACU | MK | [3439-3457] |
| 40 | CCAGGGUUCUUGUUUGGAC | GUCCAAACAAGAACCCUGG | MK | [2760-2778] |
| 41 | UUACCUCCUACUUGCCAUU | AAUGGCAAGUAGGAGGUAA | MK | [2243-2261] |
| 42 | UCGGAAUUAAUGUGCCACA | UGUGGCACAUUAAUUCCGA | | [2102-2120] |
| 43 | GGCCAUCUGGAACUAUAUC | GAUAUAGUUCCAGAUGGCC | MK | [1526-1544] |
| 44 | GCCUCACCUACAAUACCAU | AUGGUAUUGUAGGUGAGGC | MK | [1468-1486] |
| 45 | AGAAAUCUUUGGCUUUGCU | AGCAAAGCCAAAGAUUUCU | MK | [3417-3435] |
| 46 | CUGUAGCAAAUGACUGUGA | UCACAGUCAUUUGCUACAG | MK | [3087-3105] |
| 47 | GCUCGGAAUUAAUGUGCCA | UGGCACAUUAAUUCCGAGC | | [2100-2118] |
| 48 | CCAAGCUCGGAAUUAAUGU | ACAUUAAUUCCGAGCUUGG | | [2096-2114] |
| 49 | GAAGAGUCCAGCACCAAAG | CUUUGGUGCUGGACUCUUC | | [172-190] |
| 50 | GGAUUAUACCUGGGAAGAC | GUCUUCCCAGGUAUAAUCC | MK, Rat, Ms | [1373-1391] |
| 51 | CUCUCCUCCUUCGUGUUUG | CAAACACGAAGGAGGAGAG | MK | [972-990] |
| 52 | GCUUUGCUACCAGUUCCAU | AUGGAACUGGUAGCAAAGC | MK | [3428-3446] |
| 53 | GACUUCUCUUGCCCUUCUU | AAGAAGGGCAAGAGAAGUC | | [3111-3129] |
| 54 | GUAGCAAAUGACUGUGAAU | AUUCACAGUCAUUUGCUAC | MK | [3089-3107] |
| 55 | CCAUCCCAGUAUCUCAUCU | AGAUGAGAUACUGGGAUGG | MK | [2998-3016] |
| 56 | AGCGGAUUUUCUUGCAAGA | UCUUGCAAGAAAAUCCGCU | MK | [2921-2939] |
| 57 | GGCACCAGGGUUCUUGUUU | AAACAAGAACCCUGGUGCC | MK | [2756-2774] |
| 58 | CUGAAGAGGAGGGAGUAUU | AAUACUCCCUCCUCUUCAG | MK | [2505-2523] |
| 59 | CUUUUUCCCUUUUCUCCAU | AUGGAGAAAAGGGAAAAAG | | [2386-2404] |
| 60 | CUUUGCCCUUUUUCCCUUU | AAAGGGAAAAAGGGCAAAG | | [2379-2397] |
| 61 | CAGUUUUUUGACUUCCUUU | AAAGGAAGUCAAAAAACUG | MK | [2364-2382] |
| 62 | CAAGCUCGGAAUUAAUGUG | CACAUUAAUUCCGAGCUUG | | [2097-2115] |
| 63 | ACUAUAUCCACUGCGUCUU | AAGACGCAGUGGAUAUAGU | MK | [1537-1555] |
| 64 | UGCACCCUGACUACUUUAC | GUAAAGUAGUCAGGGUGCA | MK | [607-625] |
| 65 | CAGACAUGCUGUGCUUUGU | ACAAAGCACAGCAUGUCUG | MK | [1282-1300] |
| 66 | CUGCACCCUGACUACUUUA | UAAAGUAGUCAGGGUGCAG | MK | [606-624] |
| 67 | ACCAGUUCCAUAUGAUGAG | CUCAUCAUAUGGAACUGGU | MK | [3436-3454] |
| 68 | CUAGAGGGCAUGUGAUGAC | GUCAUCACAUGCCCUCUAG | | [3349-3367] |
| 69 | CCCUUCUUCUAGCAGUCUG | CAGACUGCUAGAAGAAGGG | | [3122-3140] |
| 70 | UCCUCUUUAUUUUGGUCCU | AGGACCAAAAUAAAGAGGA | MK | [2534-2552] |
| 71 | GGAAUGGACAGUUCAUUGC | GCAAUGAACUGUCCAUUCC | MK | [1956-1974] |
| 72 | CACCCUGACUACUUUACCA | UGGUAAAGUAGUCAGGGUG | MK | [609-627] |
| 73 | UGCUGUGCUUUGUGGAAGA | UCUUCCACAAAGCACAGCA | MK | [1288-1306] |
| 74 | UGAUGAGAAAUAAACGUUC | GAACGUUUAUUUCUCAUCA | MK | [3448-3466] |
| 75 | UGAUGACUGUAAAUGUUCA | UGAACAUUUACAGUCAUCA | | [3361-3379] |
| 76 | CCGAUUCCAGGCACUUUCU | AGAAAGUGCCUGGAAUCGG | MK | [3070-3088] |
| 77 | ACAGCAAGCGGAUUUUCUU | AAGAAAAUCCGCUUGCUGU | MK | [2915-2933] |
| 78 | CCCACAAUGUCUGAAGCUG | CAGCUUCAGACAUUGUGGG | MK | [2868-2886] |
| 79 | CUAGAUGGCUUAGGUGGCA | UGCCACCUAAGCCAUCUAG | | [2712-2730] |
| 80 | UUGCCCUUUUUCCCUUUUC | GAAAAGGGAAAAAGGGCAA | | [2381-2399] |
| 81 | UCCUAGUUCAGUUUUUUGA | UCAAAAAACUGAACUAGGA | MK | [2356-2374] |
| 82 | CGAGUUUCUGCAGACUGGU | ACCAGUCUGCAGAAACUCG | MK | [755-773] |
| 83 | CCAGAUUUCAUUACCUCCU | AGGAGGUAAUGAAAUCUGG | MK | [2233-2251] |
| 84 | CGCCAUCAGUGUUCUUACC | GGUAAGAACACUGAUGGCG | MK | [717-735] |
| 85 | UGAGAAAUAAACGUUCGCU | AGCGAACGUUUAUUUCUCA | MK | [3451-3469] |
| 86 | UUCAAGUGCAGAAAUCUUU | AAAGAUUUCUGCACUUGAA | MK | [3408-3426] |
| 87 | GUGGUAUCCAGUGUUCAAG | CUUGAACACUGGAUACCAC | MK | [3395-3413] |
| 88 | UCUGGGUUCUAGAGGGCAU | AUGCCCUCUAGAACCCAGA | | [3341-3359] |
| 89 | GAGUAGACAACCUGGCAGU | ACUGCCAGGUUGUCUACUC | MK | [577-595] |
| 90 | CUCAGCGAGAUCAACAAGU | ACUUGUUGAUCUCGCUGAG | MK | [828-846] |
| 91 | CACAUUGCCUUCUGAAGAG | CUCUUCAGAAGGCAAUGUG | MK | [2494-2512] |
| 92 | CCUUUUCUCCAUGCUUAAU | AUUAAGCAUGGAGAAAAGG | MK | [2393-2411] |
| 93 | GCUUGUGUGUGAUGUGCAG | CUGCACAUCACACACAAGC | MK | [1906-1924] |
| 94 | GGCUUGUGUGUGAUGUGCA | UGCACAUCACACACAAGCC | MK | [1905-1923] |
| 95 | CCGCCAUCAGUGUUCUUAC | GUAAGAACACUGAUGGCGG | MK | [716-734] |
| 96 | CAGUGGGCUUGUGUGUGAU | AUCACACACAAGCCCACUG | | [1900-1918] |
| 97 | CUUUCGGAUAUGAGGACUU | AAGUCCUCAUAUCCGAAAG | MK | [1312-1330] |
| 98 | GAGAAAUAAACGUUCGCUG | CAGCGAACGUUUAUUUCUC | MK | [3452-3470] |
| 99 | CAGAAAUCUUUGGCUUUGC | GCAAAGCCAAAGAUUUCUG | MK | [3416-3434] |
| 100 | CCUUCUUCUAGCAGUCUGU | ACAGACUGCUAGAAGAAGG | | [3123-3141] |
| 101 | CCUUUAUGCUUGAGGUUCC | GGAACCUCAAGCAUAAAGG | MK | [2550-2568] |
| 102 | GGUCACAUUGCCUUCUGAA | UUCAGAAGGCAAUGUGACC | MK | [2491-2509] |
| 103 | UCUAGAGAGUUUGAGCCUU | AAGGCUCAAACUCUCUAGA | MK | [2468-2486] |
| 104 | GCAAACUCAGCGAGAUCAA | UUGAUCUCGCUGAGUUUGC | MK | [823-841] |
| 105 | UCAAUGUGAAAGUCAGGGU | ACCCUGACUUUCACAUUGA | MK | [2268-2286] |
| 106 | GCCAUCAGUGUUCUUACCU | AGGUAAGAACACUGAUGGC | MK | [718-736] |
| 107 | AGCUGCUGGAUGAGAAGUU | AACUUCUCAUCCAGCAGCU | MK, Rat, Ms | [1435-1453] |
| 108 | CGUUCGCUGAGGUUUUGUU | AACAAAACCUCAGCGAACG | MK | [3462-3480] |
| 109 | CCCAUCCCAGUAUCUCAUC | GAUGAGAUACUGGGAUGGG | MK | [2997-3015] |
| 110 | AGGCACCAGGGUUCUUGUU | AACAAGAACCCUGGUGCCU | MK | [2755-2773] |
| 111 | AGAGGGCACAGGAAAGAAG | CUUCUUUCCUGUGCCCUCU | MK | [2072-2090] |
| 112 | GUGGGCUUGUGUGUGAUGU | ACAUCACACACAAGCCCAC | MK | [1902-1920] |
| 113 | AGCCUCACCUACAAUACCA | UGGUAUUGUAGGUGAGGCU | MK | [1467-1485] |
| 114 | AGAGGGAGAAUUCUGUUCU | AGAACAGAAUUCUCCCUCU | | [2601-2619] |
| 115 | CAAUGUGAAAGUCAGGGUC | GACCCUGACUUUCACAUUG | MK | [2269-2287] |
| 116 | GGCUUAAGUGGGUUGCUUC | GAAGCAACCCACUUAAGCC | MK | [3031-3049] |
| 117 | GGAGGAGAGGGAGAAUUCU | AGAAUUCUCCCUCUCCUCC | | [2596-2614] |
| 118 | GCUGCUGGAUGAGAAGUUC | GAACUUCUCAUCCAGCAGC | MK, Ms | [1436-1454] |
| 119 | CGCUGAGGUUUUGUUUCAU | AUGAAACAAAACCUCAGCG | MK | [3466-3484] |
| 120 | GGGCACUGAAGAAAGGCAA | UUGCCUUUCUUCAGUGCCC | MK | [3165-3183] |
| 121 | CCCAAAAAGUUGAGCCUUU | AAAGGCUCAACUUUUUGGG | | [2693-2711] |
| 122 | GCUUAAUGGUGUGAGGCGU | ACGCCUCACACCAUUAAGC | MK | [2405-2423] |
| 123 | CCCUUUUCUCCAUGCUUAA | UUAAGCAUGGAGAAAAGGG | | [2392-2410] |
| 124 | UCCCUUUUCUCCAUGCUUA | UAAGCAUGGAGAAAAGGGA | | [2391-2409] |
| 125 | UGCCCUUUUUCCCUUUUCU | AGAAAAGGGAAAAAGGGCA | | [2382-2400] |
| 126 | UGACUUCCUUUGCCCUUUU | AAAAGGGCAAAGGAAGUCA | MK | [2372-2390] |
| 127 | ACCCUCCCUUUUCCUCACU | AGUGAGGAAAAGGGAGGGU | MK | [1937-1955] |
| 128 | GGAACCUCAAGGUCUAUAU | AUAUAGACCUUGAGGUUCC | MK | [1609-1627] |
| 129 | GCACUGAAGAAAGGCAAGG | CCUUGCCUUUCUUCAGUGC | MK | [3167-3185] |
| 130 | GCCCUUUUUCCCUUUUCUC | GAGAAAAGGGAAAAAGGGC | | [2383-2401] |
| 131 | CCCUGUCAUUUCCAGAUUU | AAAUCUGGAAAUGACAGGG | MK | [2222-2240] |
| 132 | GACAGUUCAUUGCACUGAC | GUCAGUGCAAUGAACUGUC | MK | [1962-1980] |
| 133 | CAGUGUUCAAGUGCAGAAA | UUUCUGCACUUGAACACUG | MK | [3403-3421] |
| 134 | UGCGCAAACUCAGCGAGAU | AUCUCGCUGAGUUUGCGCA | MK | [820-838] |
| 135 | AGAAGGUCCACGUGAACUU | AAGUUCACGUGGACCUUCU | | [1705-1723] |
| 136 | GUGUUCAAGUGCAGAAAUC | GAUUUCUGCACUUGAACAC | MK | [3405-3423] |
| 137 | GGGAGUGGUAUCCAGUGUU | AACACUGGAUACCACUCCC | MK | [3391-3409] |
| 138 | CCAAAAAGUUGAGCCUUUC | GAAAGGCUCAACUUUUUGG | MK | [2694-2712] |
| 139 | ACCCAUCAAUGUGAAAGUC | GACUUUCACAUUGAUGGGU | MK | [2263-2281] |
| 140 | ACAGUUCAUUGCACUGACU | AGUCAGUGCAAUGAACUGU | MK | [1963-1981] |
| 141 | GGACAGUUCAUUGCACUGA | UCAGUGCAAUGAACUGUCC | MK | [1961-1979] |
| 142 | CCCUUUUCCUCACUGGAAU | AUUCCAGUGAGGAAAAGGG | MK | [1942-1960] |
| 143 | CCCGAAGAAUGUACAACCU | AGGUUGUACAUUCUUCGGG | MK | [1660-1678] |
| 144 | AGGUCUAUAUCAAGACAGU | ACUGUCUUGAUAUAGACCU | MK | [1618-1636] |
| 145 | CUGACUACUUUACCAGCUU | AAGCUGGUAAAGUAGUCAG | MK | [613-631] |
| 146 | CCAGGAUUAUACCUGGGAA | UUCCCAGGUAUAAUCCUGG | MK, Ms | [1370-1388] |
| 147 | CCCAGACAUGCUGUGCUUU | AAAGCACAGCAUGUCUGGG | MK | [1280-1298] |
| 148 | GGCCAGUGUGCCACAUUAA | UUAAUGUGGCACACUGGCC | MK | [3222-3240] |
| 149 | CAGGCACUUUCUGUAGCAA | UUGCUACAGAAAGUGCCUG | MK | [3077-3095] |
| 150 | AGGUGACCAUGGCUACAUU | AAUGUAGCCAUGGUCACCU | MK | [2799-2817] |
| 151 | UUGACUUCCUUUGCCCUUU | AAAGGGCAAAGGAAGUCAA | MK | [2371-2389] |
| 152 | UGACACUCCAGGCAGCUUU | AAAGCUGCCUGGAGUGUCA | MK | [2193-2211] |
| 153 | CGAAGAAUGUACAACCUCU | AGAGGUUGUACAUUCUUCG | MK | [1662-1680] |
| 154 | CGGAACCUCAAGGUCUAUA | UAUAGACCUUGAGGUUCCG | MK | [1608-1626] |
| 155 | GCGUCUUUGGCAUCAGAUA | UAUCUGAUGCCAAAGACGC | MK, Ms | [1549-1567] |
| 156 | CCUACAAUACCAUCGCCAU | AUGGCGAUGGUAUUGUAGG | MK | [1474-1492] |
| 157 | GUGCAGAAAUCUUUGGCUU | AAGCCAAAGAUUUCUGCAC | MK | [3413-3431] |
| 158 | AGGGAGUGGUAUCCAGUGU | ACACUGGAUACCACUCCCU | MK | [3390-3408] |
| 159 | CACAUUAAAUACCCGUGCA | UGCACGGGUAUUUAAUGUG | MK | [3233-3251] |
| 160 | CCACAUUAAAUACCCGUGC | GCACGGGUAUUUAAUGUGG | MK | [3232-3250] |
| 161 | AGGCACUUUCUGUAGCAAA | UUUGCUACAGAAAGUGCCU | MK | [3078-3096] |
| 162 | CCGAAUCCUAGUUCAGUUU | AAACUGAACUAGGAUUCGG | MK | [2351-2369] |
| 163 | CCCGAAUCCUAGUUCAGUU | AACUGAACUAGGAUUCGGG | MK | [2350-2368] |
| 164 | CCUAAAAGCCUGUUCUGUU | AACAGAACAGGCUUUUAGG | MK | [2312-2330] |
| 165 | CCCUAAAAGCCUGUUCUGU | ACAGAACAGGCUUUUAGGG | MK | [2311-2329] |
| 166 | ACGUGAACUUGCUGCUCCU | AGGAGCAGCAAGUUCACGU | | [1714-1732] |
| 167 | GAAGAAUGUACAACCUCUU | AAGAGGUUGUACAUUCUUC | MK | [1663-1681] |
| 168 | GGAACUAUAUCCACUGCGU | ACGCAGUGGAUAUAGUUCC | MK | [1534-1552] |
| 169 | CCAUCUGGAACUAUAUCCA | UGGAUAUAGUUCCAGAUGG | MK | [1528-1546] |
| 170 | ACCUACAAUACCAUCGCCA | UGGCGAUGGUAUUGUAGGU | MK | [1473-1491] |
| 171 | UUGUGGAAGACCCUACUUU | AAAGUAGGGUCUUCCACAA | MK | [1297-1315] |
| 172 | UCGCUGAGGUUUUGUUUCA | UGAAACAAAACCUCAGCGA | MK | [3465-3483] |
| 173 | GGCUUUGCUACCAGUUCCA | UGGAACUGGUAGCAAAGCC | MK | [3427-3445] |
| 174 | AGUGUUCAAGUGCAGAAAU | AUUUCUGCACUUGAACACU | MK | [3404-3422] |
| 175 | GCCACAUUAAAUACCCGUG | CACGGGUAUUUAAUGUGGC | MK | [3231-3249] |
| 176 | UGGCCAGUGUGCCACAUUA | UAAUGUGGCACACUGGCCA | MK | [3221-3239] |
| 177 | GCACUUUCUGUAGCAAAUG | CAUUUGCUACAGAAAGUGC | MK | [3080-3098] |
| 178 | CAGGUGACCAUGGCUACAU | AUGUAGCCAUGGUCACCUG | MK | [2798-2816] |
| 179 | GCGAGAUCAACAAGUUGCU | AGCAACUUGUUGAUCUCGC | MK | [832-850] |
| 180 | GCCUUUGCUGGUCACAUUG | CAAUGUGACCAGCAAAGGC | MK | [2482-2500] |
| 181 | CACCCAUCAAUGUGAAAGU | ACUUUCACAUUGAUGGGUG | MK, Ms | [2262-2280] |
| 182 | GCCAUUCACCCAUCAAUGU | ACAUUGAUGGGUGAAUGGC | MK | [2256-2274] |
| 183 | CCUGUCAUUUCCAGAUUUC | GAAAUCUGGAAAUGACAGG | MK | [2223-2241] |
| 184 | CCACAAGUGUUGUGGCCUU | AAGGCCACAACACUUGUGG | MK | [2116-2134] |
| 185 | CCACCCGAAGAAUGUACAA | UUGUACAUUCUUCGGGUGG | MK | [1657-1675] |
| 186 | GCAUCAGAUAUGAUGACUA | UAGUCAUCAUAUCUGAUGC | MK | [1558-1576] |
| 187 | GGAAGACCCUACUUUCGGA | UCCGAAAGUAGGGUCUUCC | MK | [1301-1319] |
| 188 | GGAAGAGUCCAGCACCAAA | UUUGGUGCUGGACUCUUCC | | [171-189] |
| 189 | UGACUGUAAAUGUUCACUG | CAGUGAACAUUUACAGUCA | | [3364-3382] |
| 190 | CAAGCGGAUUUUCUUGCAA | UUGCAAGAAAAUCCGCUUG | MK | [2919-2937] |
| 191 | GCAAGCGGAUUUUCUUGCA | UGCAAGAAAAUCCGCUUGC | MK | [2918-2936] |
| 192 | UGGCUACAUUGCCAAACCU | AGGUUUGGCAAUGUAGCCA | MK | [2808-2826] |
| 193 | AGCCUUUCUAGAUGGCUUA | UAAGCCAUCUAGAAAGGCU | | [2705-2723] |
| 194 | CUCCCAAAAAGUUGAGCCU | AGGCUCAACUUUUUGGGAG | | [2691-2709] |
| 195 | AGAUGUCUCCCAAAAAGUU | AACUUUUUGGGAGACAUCU | | [2685-2703] |
| 196 | GUCCUUUAUGCUUGAGGUU | AACCUCAAGCAUAAAGGAC | MK | [2548-2566] |
| 197 | GAUUAUCUCUAGAGAGUUU | AAACUCUCUAGAGAUAAUC | MK | [2461-2479] |
| 198 | CCAUUCACCCAUCAAUGUG | CACAUUGAUGGGUGAAUGG | MK | [2257-2275] |
| 199 | CACUGACUCUGGGAUCUCA | UGAGAUCCCAGAGUCAGUG | MK | [1974-1992] |
| 200 | ACAAGGACUUCUCUGUCUG | CAGACAGAGAAGUCCUUGU | MK | [1832-1850] |
| 201 | AGGUCCACGUGAACUUGCU | AGCAAGUUCACGUGGACCU | | [1708-1726] |
| 202 | ACCUCAAGGUCUAUAUCAA | UUGAUAUAGACCUUGAGGU | MK | [1612-1630] |
| 203 | GACUACUUUACCAGCUUCU | AGAAGCUGGUAAAGUAGUC | MK | [615-633] |
| 204 | GAAGACCCUACUUUCGGAU | AUCCGAAAGUAGGGUCUUC | MK | [1302-1320] |
| 205 | ACCCAGACAUGCUGUGCUU | AAGCACAGCAUGUCUGGGU | MK | [1279-1297] |
| 206 | CACCAAGGAACACAUCCAG | CUGGAUGUGUUCCUUGGUG | MK | [872-890] |
| 207 | GAGCCUUUCUAGAUGGCUU | AAGCCAUCUAGAAAGGCUC | | [2704-2722] |
| 208 | AAAAAGUUGAGCCUUUCUA | UAGAAAGGCUCAACUUUUU | MK | [2696-2714] |
| 209 | GAGGAGGAGAGGGAGAAUU | AAUUCUCCCUCUCCUCCUC | | [2594-2612] |
| 210 | CUGGUCACAUUGCCUUCUG | CAGAAGGCAAUGUGACCAG | MK | [2489-2507] |
| 211 | AGAUUAUCUCUAGAGAGUU | AACUCUCUAGAGAUAAUCU | MK | [2460-2478] |
| 212 | AGUUCAGUUUUUUGACUUC | GAAGUCAAAAAACUGAACU | MK | [2360-2378] |
| 213 | GUGUCCAGUUCCCUAAAAG | CUUUUAGGGAACUGGACAC | MK | [2301-2319] |
| 214 | CCCAUCAAUGUGAAAGUCA | UGACUUUCACAUUGAUGGG | MK | [2264-2282] |
| 215 | UCACCCAUCAAUGUGAAAG | CUUUCACAUUGAUGGGUGA | MK | [2261-2279] |
| 216 | UCAGUGUUCUUACCUGGUA | UACCAGGUAAGAACACUGA | MK | [722-740] |
| 217 | GAGCACUUGGAGAUCCUAA | UUAGGAUCUCCAAGUGCUC | | [2015-2033] |
| 218 | AGAGCACUUGGAGAUCCUA | UAGGAUCUCCAAGUGCUCU | | [2014-2032] |
| 219 | CCCGCCAUCAGUGUUCUUA | UAAGAACACUGAUGGCGGG | MK | [715-733] |
| 220 | GGACUUCUCUGUCUGGAGA | UCUCCAGACAGAGAAGUCC | MK | [1836-1854] |
| 221 | CCCACAAGGACUUCUCUGU | ACAGAGAAGUCCUUGUGGG | MK | [1829-1847] |
| 222 | AGAAUGUACAACCUCUUCU | AGAAGAGGUUGUACAUUCU | MK | [1665-1683] |
| 223 | CCGAAGAAUGUACAACCUC | GAGGUUGUACAUUCUUCGG | MK | [1661-1679] |
| 224 | CAAGGUCUAUAUCAAGACA | UGUCUUGAUAUAGACCUUG | MK | [1616-1634] |
| 225 | GCGGAACCUCAAGGUCUAU | AUAGACCUUGAGGUUCCGC | MK | [1607-1625] |
| 226 | AGCGGAACCUCAAGGUCUA | UAGACCUUGAGGUUCCGCU | MK | [1606-1624] |
| 227 | CGUCUUUGGCAUCAGAUAU | AUAUCUGAUGCCAAAGACG | MK | [1550-1568] |
| 228 | GACCCUACUUUCGGAUAUG | CAUAUCCGAAAGUAGGGUC | MK | [1305-1323] |
| 229 | CUGUAAAUGUUCACUGGGU | ACCCAGUGAACAUUUACAG | | [3367-3385] |
| 230 | CUGUGAAUUACGACUUCUC | GAGAAGUCGUAAUUCACAG | | [3100-3118] |
| 231 | CCCAGUAUCUCAUCUGUCC | GGACAGAUGAGAUACUGGG | MK | [3002-3020] |
| 232 | GGCUACAUUGCCAAACCUC | GAGGUUUGGCAAUGUAGCC | MK | [2809-2827] |
| 233 | UCAAGGUCUAUAUCAAGAC | GUCUUGAUAUAGACCUUGA | MK | [1615-1633] |
| 234 | CGCCACUACAUUGCCAUCA | UGAUGGCAAUGUAGUGGCG | MK, Ms | [687-705] |
| 235 | CCCAGGAUUAUACCUGGGA | UCCCAGGUAUAAUCCUGGG | MK, Ms | [1369-1387] |
| 236 | ACCCUACUUUCGGAUAUGA | UCAUAUCCGAAAGUAGGGU | MK | [1306-1324] |
| 237 | GAGCUGGAGAAGUCAGAGA | UCUCUGACUUCUCCAGCUC | | [1215-1233] |
| 238 | AGGAACACAUCCAGGCCUU | AAGGCCUGGAUGUGUUCCU | MK | [877-895] |
| 239 | UGCCACAUUAAAUACCCGU | ACGGGUAUUUAAUGUGGCA | MK | [3230-3248] |
| 240 | GUGAAUUACGACUUCUCUU | AAGAGAAGUCGUAAUUCAC | | [3102-3120] |
| 241 | CCAUUUCUGCAGCCAGUGU | ACACUGGCUGCAGAAAUGG | | [2949-2967] |
| 242 | GGGUUCUUGUUUGGACCCU | AGGGUCCAAACAAGAACCC | MK | [2763-2781] |
| 243 | CAAAAAGUUGAGCCUUUCU | AGAAAGGCUCAACUUUUUG | MK | [2695-2713] |
| 244 | GGAGAAUUCUGUUCUCCCA | UGGGAGAACAGAAUUCUCC | | [2605-2623] |
| 245 | GCUGGUCACAUUGCCUUCU | AGAAGGCAAUGUGACCAGC | MK | [2488-2506] |
| 246 | UCAAGGACUACCUGCGGUU | AACCGCAGGUAGUCCUUGA | | [388-406] |
| 247 | CUAGUUCAGUUUUUUGACU | AGUCAAAAAACUGAACUAG | MK | [2358-2376] |
| 248 | UGGUCUGUGUGUCCAGUUC | GAACUGGACACACAGACCA | MK | [2293-2311] |
| 249 | CCAUCAGUGUUCUUACCUG | CAGGUAAGAACACUGAUGG | MK | [719-737] |
| 250 | AGACCCUUUUGUGUCCCAU | AUGGGACACAAAAGGGUCU | | [1862-1880] |
| 251 | AGAAGACCACCCGAAGAAU | AUUCUUCGGGUGGUCUUCU | MK | [1651-1669] |
| 252 | GCCAUCUGGAACUAUAUCC | GGAUAUAGUUCCAGAUGGC | MK | [1527-1545] |
| 253 | AGGGACCCGUUGAACAACU | AGUUGUUCAACGGGUCCCU | MK | [1080-1098] |
| 254 | UACGACUUCUCUUGCCCUU | AAGGGCAAGAGAAGUCGUA | | [3108-3126] |
| 255 | GGCUCAUCACCAAGGAACA | UGUUCCUUGGUGAUGAGCC | MK | [865-883] |
| 256 | ACAUUGCCAAACCUCUGAC | GUCAGAGGUUUGGCAAUGU | MK | [2813-2831] |
| 257 | ACCAUGGCUACAUUGCCAA | UUGGCAAUGUAGCCAUGGU | MK | [2804-2822] |
| 258 | GCCUUUCUAGAUGGCUUAG | CUAAGCCAUCUAGAAAGGC | | [2706-2724] |
| 259 | UCCCAAAAAGUUGAGCCUU | AAGGCUCAACUUUUUGGGA | | [2692-2710] |
| 260 | GGUCCUUUAUGCUUGAGGU | ACCUCAAGCAUAAAGGACC | MK | [2547-2565] |
| 261 | GAGAGUUUGAGCCUUUGCU | AGCAAAGGCUCAAACUCUC | MK | [2472-2490] |
| 262 | UUCAGUUUUUUGACUUCCU | AGGAAGUCAAAAAACUGAA | MK | [2362-2380] |
| 263 | CCAGUUCCCUAAAAGCCUG | CAGGCUUUUAGGGAACUGG | MK | [2305-2323] |
| 264 | UGUGUCCAGUUCCCUAAAA | UUUUAGGGAACUGGACACA | MK | [2300-2318] |
| 265 | AGCUGGAAGAGCACUUGGA | UCCAAGUGCUCUUCCAGCU | | [2007-2025] |
| 266 | UCCCUUUUCCUCACUGGAA | UUCCAGUGAGGAAAAGGGA | MK | [1941-1959] |
| 267 | CCACAAGGACUUCUCUGUC | GACAGAGAAGUCCUUGUGG | MK | [1830-1848] |
| 268 | ACAACCUCUUCUGGAGGCA | UGCCUCCAGAAGAGGUUGU | MK | [1672-1690] |
| 269 | CAUCAGAUAUGAUGACUAU | AUAGUCAUCAUAUCUGAUG | MK | [1559-1577] |
| 270 | GGCAUCAGAUAUGAUGACU | AGUCAUCAUAUCUGAUGCC | MK | [1557-1575] |
| 271 | CACUGCGUCUUUGGCAUCA | UGAUGCCAAAGACGCAGUG | MK, Ms | [1545-1563] |
| 272 | CAGGGCCAUCUGGAACUAU | AUAGUUCCAGAUGGCCCUG | MK | [1523-1541] |
| 273 | UGACUACUUUACCAGCUUC | GAAGCUGGUAAAGUAGUCA | MK | [614-632] |
| 274 | CCUGACUACUUUACCAGCU | AGCUGGUAAAGUAGUCAGG | MK | [612-630] |
| 275 | ACCAUGGCUACUCGCUGAU | AUCAGCGAGUAGCCAUGGU | MK, Rat, Ms | [1390-1408] |
| 276 | CAGGAUUAUACCUGGGAAG | CUUCCCAGGUAUAAUCCUG | MK, Rat, Ms | [1371-1389] |
| 277 | CCCUACUUUCGGAUAUGAG | CUCAUAUCCGAAAGUAGGG | MK | [1307-1325] |
| 278 | UCACCAAGGAACACAUCCA | UGGAUGUGUUCCUUGGUGA | MK | [871-889] |
| 279 | AGAAUUCUGUUCUCCCAGA | UCUGGGAGAACAGAAUUCU | | [2607-2625] |
| 280 | CUCCAUGCUUAAUGGUGUG | CACACCAUUAAGCAUGGAG | MK | [2399-2417] |
| 281 | UGCACUGACUCUGGGAUCU | AGAUCCCAGAGUCAGUGCA | MK | [1972-1990] |
| 282 | UGAACUUGCUGCUCCUGGA | UCCAGGAGCAGCAAGUUCA | MK | [1717-1735] |
| 283 | CGGAUAUGAGGACUUCACU | AGUGAAGUCCUCAUAUCCG | MK | [1316-1334] |
| 284 | UCGGAUAUGAGGACUUCAC | GUGAAGUCCUCAUAUCCGA | MK | [1315-1333] |
| 285 | GCUUUGUGGAAGACCCUAC | GUAGGGUCUUCCACAAAGC | MK | [1294-1312] |
| 286 | GGACCCGUUGAACAACUCU | AGAGUUGUUCAACGGGUCC | MK | [1082-1100] |
| 287 | UCCUUCGUGUUUGGCUGUG | CACAGCCAAACACGAAGGA | MK | [978-996] |
| 288 | CAGUUUGGAGGGCACUGAA | UUCAGUGCCCUCCAAACUG | MK | [3156-3174] |
| 289 | UGGCUCAUCACCAAGGAAC | GUUCCUUGGUGAUGAGCCA | MK | [864-882] |
| 290 | ACCGAUUCCAGGCACUUUC | GAAAGUGCCUGGAAUCGGU | MK | [3069-3087] |
| 291 | CAACAAGUUGCUGGCGCAU | AUGCGCCAGCAACUUGUUG | MK | [839-857] |
| 292 | UCAACAAGUUGCUGGCGCA | UGCGCCAGCAACUUGUUGA | MK | [838-856] |
| 293 | CCAUGGCUACAUUGCCAAA | UUUGGCAAUGUAGCCAUGG | MK | [2805-2823] |
| 294 | GAAUUCUGUUCUCCCAGAG | CUCUGGGAGAACAGAAUUC | | [2608-2626] |
| 295 | UGCUUGAGGUUCCAACCUG | CAGGUUGGAACCUCAAGCA | MK | [2556-2574] |
| 296 | GAGCCUUUGCUGGUCACAU | AUGUGACCAGCAAAGGCUC | MK | [2480-2498] |
| 297 | CAGAUUAUCUCUAGAGAGU | ACUCUCUAGAGAUAAUCUG | MK | [2459-2477] |
| 298 | GCAGAUUAUCUCUAGAGAG | CUCUCUAGAGAUAAUCUGC | MK | [2458-2476] |
| 299 | CCAUGCUUAAUGGUGUGAG | CUCACACCAUUAAGCAUGG | MK | [2401-2419] |
| 300 | GCCCGAAUCCUAGUUCAGU | ACUGAACUAGGAUUCGGGC | MK | [2349-2367] |
| 301 | CAAGUGUUGUGGCCUUCCU | AGGAAGGCCACAACACUUG | MK | [2119-2137] |
| 302 | UCACUGGAAUGGACAGUUC | GAACUGUCCAUUCCAGUGA | MK | [1951-1969] |
| 303 | GUCUUUGGCAUCAGAUAUG | CAUAUCUGAUGCCAAAGAC | MK | [1551-1569] |
| 304 | UGCGUCUUUGGCAUCAGAU | AUCUGAUGCCAAAGACGCA | MK, Ms | [1548-1566] |
| 305 | CUGCGUCUUUGGCAUCAGA | UCUGAUGCCAAAGACGCAG | MK, Ms | [1547-1565] |
| 306 | GCCUAUAGCCUCACCUACA | UGUAGGUGAGGCUAUAGGC | MK | [1461-1479] |
| 307 | ACCCUGACUACUUUACCAG | CUGGUAAAGUAGUCAGGGU | MK | [610-628] |
| 308 | GGAUAUGAGGACUUCACUC | GAGUGAAGUCCUCAUAUCC | MK | [1317-1335] |
| 309 | CGCUUUGAGCUGGAGAAGU | ACUUCUCCAGCUCAAAGCG | MK | [1209-1227] |
| 310 | UGCAGAAAUCUUUGGCUUU | AAAGCCAAAGAUUUCUGCA | MK | [3414-3432] |
| 311 | GCCCUUCUUCUAGCAGUCU | AGACUGCUAGAAGAAGGGC | MK | [3121-3139] |
| 312 | CGAUUCCAGGCACUUUCUG | CAGAAAGUGCCUGGAAUCG | MK | [3071-3089] |
| 313 | GACCAUGGCUACAUUGCCA | UGGCAAUGUAGCCAUGGUC | MK | [2803-2821] |
| 314 | GGUUCUUGUUUGGACCCUG | CAGGGUCCAAACAAGAACC | MK | [2764-2782] |
| 315 | UGGUCACAUUGCCUUCUGA | UCAGAAGGCAAUGUGACCA | MK | [2490-2508] |
| 316 | GUGUGUCCAGUUCCCUAAA | UUUAGGGAACUGGACACAC | MK | [2299-2317] |
| 317 | UGUGUGUCCAGUUCCCUAA | UUAGGGAACUGGACACACA | MK | [2298-2316] |
| 318 | CAGUGUUCUUACCUGGUAG | CUACCAGGUAAGAACACUG | MK | [723-741] |
| 319 | CAGAGCUCAAGGACUACCU | AGGUAGUCCUUGAGCUCUG | | [382-400] |
| 320 | CAGACCCUUUUGUGUCCCA | UGGGACACAAAAGGGUCUG | | [1861-1879] |
| 321 | UGGCAUCAGAUAUGAUGAC | GUCAUCAUAUCUGAUGCCA | MK | [1556-1574] |
| 322 | UCCACUGCGUCUUUGGCAU | AUGCCAAAGACGCAGUGGA | MK, Ms | [1543-1561] |
| 323 | CUAUAGCCUCACCUACAAU | AUUGUAGGUGAGGCUAUAG | MK | [1463-1481] |
| 324 | AGAAGUUCCAGGCAGCCUA | UAGGCUGCCUGGAACUUCU | MK | [1447-1465] |
| 325 | GACCGAUUCCAGGCACUUU | AAAGUGCCUGGAAUCGGUC | MK | [3068-3086] |
| 326 | CGAGAUCAACAAGUUGCUG | CAGCAACUUGUUGAUCUCG | MK | [833-851] |
| 327 | GAGGGAGAAUUCUGUUCUC | GAGAACAGAAUUCUCCCUC | | [2602-2620] |
| 328 | CCUUCCUGAACUGGGAAGU | ACUUCCCAGUUCAGGAAGG | MK | [2131-2149] |
| 329 | CAGCCUAUAGCCUCACCUA | UAGGUGAGGCUAUAGGCUG | MK | [1459-1477] |
| 330 | GAAGUUCCAGGCAGCCUAU | AUAGGCUGCCUGGAACUUC | MK | [1448-1466] |
| 331 | GGAUGAGAAGUUCCAGGCA | UGCCUGGAACUUCUCAUCC | MK | [1442-1460] |
| 332 | AGCUCAUUCAGGCUCUGGU | ACCAGAGCCUGAAUGAGCU | MK | [931-949] |
| 333 | UGCCCUUCUUCUAGCAGUC | GACUGCUAGAAGAAGGGCA | MK | [3120-3138] |
| 334 | CGCAAACUCAGCGAGAUCA | UGAUCUCGCUGAGUUUGCG | MK | [822-840] |
| 335 | CUGGUCUGUGUGUCCAGUU | AACUGGACACACAGACCAG | MK | [2292-2310] |
| 336 | AGGCAGCUUUGCCUUCUCU | AGAGAAGGCAAAGCUGCCU | MK | [2202-2220] |
| 337 | CACAAGUGUUGUGGCCUUC | GAAGGCCACAACACUUGUG | MK | [2117-2135] |
| 338 | UCCAUGCUUAAUGGUGUGA | UCACACCAUUAAGCAUGGA | MK | [2400-2418] |
| 339 | UGCUGGAUGAGAAGUUCCA | UGGAACUUCUCAUCCAGCA | MK, Ms | [1438-1456] |
| 340 | AGCACUUGGAGAUCCUAAG | CUUAGGAUCUCCAAGUGCU | | [2016-2034] |
| 341 | CUCACUGGAAUGGACAGUU | AACUGUCCAUUCCAGUGAG | MK | [1950-1968] |
| 342 | GCUGUGCUUUGUGGAAGAC | GUCUUCCACAAAGCACAGC | MK | [1289-1307] |
| 343 | GGCACUGAAGAAAGGCAAG | CUUGCCUUUCUUCAGUGCC | MK | [3166-3184] |
| 344 | CCUCACUGGAAUGGACAGU | ACUGUCCAUUCCAGUGAGG | MK | [1949-1967] |

TABLE B14
Hi95 19-mer oligomer pairs SESN2 - Sestrin 2

| | | | | Human-32454742: |
|---|---|---|---|---|
| No. | Sense | AntiSense | Other Sp | 354-1796 |

| | | | | |
|---|---|---|---|---|
| 1 | GGGAGUAUUAGAUUAUAAA | UUUAUAAUCUAAUACUCCC | Mnk | [2515-2533] |
| 2 | CCAUAUGAUGAGAAAUAAA | UUUAUUUCUCAUCAUAUGG | Mnk | [3443-3461] |
| 3 | CAGAGAAGGUCCACGUGAA | UUCACGUGGACCUUCUCUG | | [1702-1720] |
| 4 | GGCAUGUGAUGACUGUAAA | UUUACAGUCAUCACAUGCC | | [3355-3373] |
| 5 | GGGCCAAGCUCGGAAUUAA | UUAAUUCCGAGCUUGGCCC | | [2093-2111] |
| 6 | GGUUCUAGAGGGCAUGUGA | UCACAUGCCCUCUAGAACC | | [3345-3363] |
| 7 | GAUUAUAAAUCCUCUUUAU | AUAAAGAGGAUUUAUAAUC | Mnk | [2525-2543] |
| 8 | GGAGUAUUAGAUUAUAAAU | AUUUAUAAUCUAAUACUCC | Mnk | [2516-2534] |
| 9 | GAGGGAGUAUUAGAUUAUA | UAUAAUCUAAUACUCCCUC | Mnk | [2513-2531] |
| 10 | CCGCAGAUGUCUCCCAAAA | UUUUGGGAGACAUCUGCGG | | [2681-2699] |
| 11 | AGGGAGUAUUAGAUUAUAA | UUAUAAUCUAAUACUCCCU | Mnk | [2514-2532] |
| 12 | GGGCAUGUGAUGACUGUAA | UUACAGUCAUCACAUGCCC | | [3354-3372] |
| 13 | UGAAGAGGAGGGAGUAUUA | UAAUACUCCCUCCUCUUCA | Mnk | [2506-2524] |
| 14 | UGUAGCAAAUGACUGUGAA | UUCACAGUCAUUUGCUACA | Mnk | [3088-3106] |
| 15 | AAAUGACUGUGAAUUACGA | UCGUAAUUCACAGUCAUUU | Mnk | [3094-3112] |
| 16 | CAGAUAUGAUGACUAUGAU | AUCAUAGUCAUCAUAUCUG | Mnk | [1562-1580] |
| 17 | UGUGAUGUGCAGUCCCGAA | UUCGGGACUGCACAUCACA | Mnk | [1913-1931] |
| 18 | CAGAGGGCACAGGAAAGAA | UUCUUUCCUGUGCCCUCUG | Mnk | [2071-2089] |
| 19 | GGCACUUUCUGUAGCAAAU | AUUUGCUACAGAAAGUGCC | Mnk | [3079-3097] |
| 20 | AGUGGUAUCCAGUGUUCAA | UUGAACACUGGAUACCACU | Mnk | [3394-3412] |
| 21 | AGGUGUGCAGGAGAGAAGA | UCUUCUCUCCUGCACACCU | | [3306-3324] |
| 22 | CCUGCACCCUGACUACUUU | AAAGUAGUCAGGGUGCAGG | Mnk | [605-623] |
| 23 | AACUCAGCGAGAUCAACAA | UUGUUGAUCUCGCUGAGUU | Mnk | [826-844] |
| 24 | GCUACCAGUUCCAUAUGAU | AUCAUAUGGAACUGGUAGC | Mnk | [3433-3451] |
| 25 | CAUGGCUCAUCACCAAGGA | UCCUUGGUGAUGAGCCAUG | Mnk | [862-880] |
| 26 | GAAGGUGUGCAGGAGAGAA | UUCUCUCCUGCACACCUUC | | [3304-3322] |
| 27 | UCCAUAUGAUGAGAAAUAA | UUAUUUCUCAUCAUAUGGA | Mnk | [3442-3460] |
| 28 | CAUGCUGUGCUUUGUGGAA | UUCCACAAAGCACAGCAUG | Mnk | [1286-1304] |
| 29 | AGCAAAUGACUGUGAAUUA | UAAUUCACAGUCAUUUGCU | Mnk | [3091-3109] |
| 30 | CUUUGCUACCAGUUCCAUA | UAUGGAACUGGUAGCAAAG | Mnk | [3429-3447] |
| 31 | CCUACUUGCCAUUCACCCA | UGGGUGAAUGGCAAGUAGG | Mnk | [2249-2267] |
| 32 | CAGAUUUCAUUACCUCCUA | UAGGAGGUAAUGAAAUCUG | Mnk | [2234-2252] |
| 33 | CUGGAAGAGCACUUGGAGA | UCUCCAAGUGCUCUUCCAG | | [2009-2027] |
| 34 | AGGAGGGAGUAUUAGAUUA | UAAUCUAAUACUCCCUCCU | Mnk | [2511-2529] |
| 35 | GGAGGGAGUAUUAGAUUAU | AUAAUCUAAUACUCCCUCC | Mnk | [2512-2530] |
| 36 | CAAGAAGGUGUGCAGGAGA | UCUCCUGCACACCUUCUUG | | [3301-3319] |
| 37 | UCUUUAUUUUGGUCCUUUA | UAAAGGACCAAAAUAAAGA | Mnk | [2537-2555] |
| 38 | AAGAGGAGGGAGUAUUAGA | UCUAAUACUCCCUCCUCUU | Mnk | [2508-2526] |
| 39 | CCUAUAGCCUCACCUACAA | UUGUAGGUGAGGCUAUAGG | Mnk | [1462-1480] |
| 40 | GAAUGGACAGUUCAUUGCA | UGCAAUGAACUGUCCAUUC | Mnk | [1957-1975] |
| 41 | GUUCUAGAGGGCAUGUGAU | AUCACAUGCCCUCUAGAAC | | [3346-3364] |
| 42 | CUGUGUGUCCAGUUCCCUA | UAGGGAACUGGACACACAG | Mnk | [2297-2315] |
| 43 | GUUUGGAGGGCACUGAAGA | UCUUCAGUGCCCUCCAAAC | Mnk | [3158-3176] |
| 44 | AUAUGAUGACUAUGAUUAU | AUAAUCAUAGUCAUCAUAU | Mnk | [1565-1583] |
| 45 | CUUUAUUUUGGUCCUUUAU | AUAAAGGACCAAAAUAAAG | Mnk | [2538-2556] |
| 46 | CCUUUUUCCCUUUUCUCCA | UGGAGAAAAGGGAAAAAGG | | [2385-2403] |
| 47 | GCUACAUUGCCAAACCUCU | AGAGGUUUGGCAAUGUAGC | Mnk | [2810-2828] |
| 48 | UUUGGAGGGCACUGAAGAA | UUCUUCAGUGCCCUCCAAA | Mnk | [3159-3177] |
| 49 | CCAGUUCCAUAUGAUGAGA | UCUCAUCAUAUGGAACUGG | Mnk | [3437-3455] |
| 50 | GAAAUCUUUGGCUUUGCUA | UAGCAAAGCCAAAGAUUUC | Mnk | [3418-3436] |
| 51 | CUUUCUGUAGCAAAUGACU | AGUCAUUUGCUACAGAAAG | Mnk | [3083-3101] |
| 52 | UGUCAUUUCCAGAUUUCAU | AUGAAAUCUGGAAAUGACA | Mnk | [2225-2243] |
| 53 | CAUUGCACUGACUCUGGGA | UCCCAGAGUCAGUGCAAUG | Mnk | [1969-1987] |
| 54 | CUUUGAGCUGGAGAAGUCA | UGACUUCUCCAGCUCAAAG | | [1211-1229] |
| 55 | CCUCCUCUCUGACCAGUUU | AAACUGGUCAGAGAGGAGG | Mnk | [3143-3161] |
| 56 | UCAAGACAGUGGCCUGCUA | UAGCAGGCCACUGUCUUGA | Mnk | [1627-1645] |
| 57 | CUUGCCAUUCACCCAUCAA | UUGAUGGGUGAAUGGCAAG | Mnk | [2253-2271] |
| 58 | GAGGGCAUGUGAUGACUGU | ACAGUCAUCACAUGCCCUC | | [3352-3370] |
| 59 | AGGGCAUGUGAUGACUGUA | UACAGUCAUCACAUGCCCU | | [3353-3371] |
| 60 | CAAACCUCUGACUGCCACA | UGUGGCAGUCAGAGGUUUG | Mnk | [2820-2838] |
| 61 | AGGGCCAUCUGGAACUAUA | UAUAGUUCCAGAUGGCCCU | Mnk | [1524-1542] |
| 62 | GAGGAGGGAGUAUUAGAUU | AAUCUAAUACUCCCUCCUC | Mnk | [2510-2528] |
| 63 | CUAGAGAGUUUGAGCCUUU | AAAGGCUCAAACUCUCUAG | Mnk | [2469-2487] |
| 64 | UCAUUUCCAGAUUUCAUUA | UAAUGAAAUCUGGAAAUGA | Mnk | [2227-2245] |
| 65 | AGAUAUGAUGACUAUGAUU | AAUCAUAGUCAUCAUAUCU | Mnk | [1563-1581] |
| 66 | GGAGAGGGAGAAUUCUGUU | AACAGAAUUCUCCCUCUCC | | [2599-2617] |
| 67 | CCAGGCACUUUCUGUAGCA | UGCUACAGAAAGUGCCUGG | Mnk | [3076-3094] |
| 68 | AGAUUAUAAAUCCUCUUUA | UAAAGAGGAUUUAUAAUCU | Mnk | [2524-2542] |
| 69 | GUGUUGUGGCCUUCCUGAA | UUCAGGAAGGCCACAACAC | Mnk | [2122-2140] |
| 70 | AGAAAUAAACGUUCGCUGA | UCAGCGAACGUUUAUUUCU | Mnk | [3453-3471] |
| 71 | CACUGGAAUGGACAGUUCA | UGAACUGUCCAUUCCAGUG | Mnk | [1952-1970] |
| 72 | UUUGGUCCUUUAUGCUUGA | UCAAGCAUAAAGGACCAAA | Mnk | [2544-2562] |
| 73 | GAGUGGUAUCCAGUGUUCA | UGAACACUGGAUACCACUC | Mnk | [3393-3411] |
| 74 | AGAAGGUGUGCAGGAGAGA | UCUCUCCUGCACACCUUCU | | [3303-3321] |
| 75 | UGUGAUGACUGUAAAUGUU | AACAUUUACAGUCAUCACA | | [3359-3377] |
| 76 | CUUUCUAGAUGGCUUAGGU | ACCUAAGCCAUCUAGAAAG | | [2708-2726] |
| 77 | GCUACAUGACCUGACUCCU | AGGAGUCAGGUCAUGUAGC | Mnk | [1783-1801] |
| 78 | CAGAUGUCUCCCAAAAAGU | ACUUUUUGGGAGACAUCUG | | [2684-2702] |
| 79 | CUUUAUGCUUGAGGUUCCA | UGGAACCUCAAGCAUAAAG | Mnk | [2551-2569] |
| 80 | UACAUGACCUGACUCCUGA | UCAGGAGUCAGGUCAUGUA | Mnk | [1785-1803] |
| 81 | CACUUUCUGUAGCAAAUGA | UCAUUUGCUACAGAAAGUG | Mnk | [3081-3099] |
| 82 | AGAUGGAGAGCCGCUUUGA | UCAAAGCGGCUCUCCAUCU | Mnk | [1198-1216] |
| 83 | CUCAAGGUCUAUAUCAAGA | UCUUGAUAUAGACCUUGAG | Mnk | [1614-1632] |
| 84 | AGACCACCCGAAGAAUGUA | UACAUUCUUCGGGUGGUCU | Mnk | [1654-1672] |
| 85 | CCACUACAUUGCCAUCAUG | CAUGAUGGCAAUGUAGUGG | Ms, Mnk | [689-707] |
| 86 | CUUUGGCUUUGCUACCAGU | ACUGGUAGCAAAGCCAAAG | Mnk | [3423-3441] |
| 87 | GUUCCAUAUGAUGAGAAAU | AUUUCUCAUCAUAUGGAAC | Mnk | [3440-3458] |
| 88 | GCAAAUGACUGUGAAUUAC | GUAAUUCACAGUCAUUUGC | Mnk | [3092-3110] |
| 89 | GUUCAAGUGCAGAAAUCUU | AAGAUUUCUGCACUUGAAC | Mnk | [3407-3425] |
| 90 | AGUUCAUUGCACUGACUCU | AGAGUCAGUGCAAUGAACU | Mnk | [1965-1983] |
| 91 | CAUAUGAUGAGAAAUAAAC | GUUUAUUUCUCAUCAUAUG | Mnk | [3444-3462] |
| 92 | UUAUCUCUAGAGAGUUUGA | UCAAACUCUCUAGAGAUAA | Mnk | [2463-2481] |
| 93 | ACAGUGUGUGAGAGGAGGA | UCCUCCUCUCACACACUGU | Mnk | [2580-2598] |
| 94 | ACAUGCUGUGCUUUGUGGA | UCCACAAAGCACAGCAUGU | Mnk | [1285-1303] |
| 95 | GAGAAGACCACCCGAAGAA | UUCUUCGGGUGGUCUUCUC | Mnk | [1650-1668] |
| 96 | CAAACUCAGCGAGAUCAAC | GUUGAUCUCGCUGAGUUUG | Mnk | [824-842] |
| 97 | UGGGCUUGUGUGUGAUGUG | CACAUCACACACAAGCCCA | Mnk | [1903-1921] |
| 98 | GAUAUGAUGACUAUGAUUA | UAAUCAUAGUCAUCAUAUC | Mnk | [1564-1582] |
| 99 | ACUUGCCAUUCACCCAUCA | UGAUGGGUGAAUGGCAAGU | Mnk | [2252-2270] |
| 100 | CAUUACCUCCUACUUGCCA | UGGCAAGUAGGAGGUAAUG | Mnk | [2241-2259] |
| 101 | CAUUCACCCAUCAAUGUGA | UCACAUUGAUGGGUGAAUG | Mnk | [2258-2276] |
| 102 | GUAGGGAGUGGUAUCCAGU | ACUGGAUACCACUCCCUAC | Mnk | [3388-3406] |
| 103 | GAUUUUCUUGCAAGAUCAG | CUGAUCUUGCAAGAAAAUC | Mnk | [2925-2943] |
| 104 | AAGCGGAUUUUCUUGCAAG | CUUGCAAGAAAAUCCGCUU | Mnk | [2920-2938] |
| 105 | AAACUCAGCGAGAUCAACA | UGUUGAUCUCGCUGAGUUU | Mnk | [825-843] |
| 106 | GAUUUCAUUACCUCCUACU | AGUAGGAGGUAAUGAAAUC | Mnk | [2236-2254] |
| 107 | CUACUUUCGGAUAUGAGGA | UCCUCAUAUCCGAAAGUAG | Mnk | [1309-1327] |
| 108 | CAUGCUUAAUGGUGUGAGG | CCUCACACCAUUAAGCAUG | Mnk | [2402-2420] |
| 109 | UCAGCGAGAUCAACAAGUU | AACUUGUUGAUCUCGCUGA | Mnk | [829-847] |
| 110 | GUAUUAGAUUAUAAAUCCU | AGGAUUUAUAAUCUAAUAC | Mnk | [2519-2537] |
| 111 | GAGAAGCUGCGCAAACUCA | UGAGUUUGCGCAGCUUCUC | Mnk | [813-831] |
| 112 | AAAUCCUCUUUAUUUUGGU | ACCAAAAUAAAGAGGAUUU | Mnk | [2531-2549] |
| 113 | ACAUGACCUGACUCCUGAG | CUCAGGAGUCAGGUCAUGU | Mnk | [1786-1804] |
| 114 | AUUAGAUUAUAAAUCCUCU | AGAGGAUUUAUAAUCUAAU | Mnk | [2521-2539] |
| 115 | ACAUCCAGGCCUUGCUGAA | UUCAGCAAGGCCUGGAUGU | Mnk | [883-901] |
| 116 | UGGAGAAGUCAGAGAGCCU | AGGCUCUCUGACUUCUCCA | | [1219-1237] |
| 117 | AUGUGAUGACUGUAAAUGU | ACAUUUACAGUCAUCACAU | Mnk | [3358-3376] |
| 118 | CAGCGAGAUCAACAAGUUG | CAACUUGUUGAUCUCGCUG | Mnk | [830-848] |
| 119 | ACAAUACCAUCGCCAUGCA | UGCAUGGCGAUGGUAUUGU | Mnk | [1477-1495] |
| 120 | UGAGGACUUCACUCGGAGA | UCUCCGAGUGAAGUCCUCA | Mnk | [1322-1340] |
| 121 | UCACAUUGCCUUCUGAAGA | UCUUCAGAAGGCAAUGUGA | Mnk | [2493-2511] |
| 122 | CUGUCAUUUCCAGAUUUCA | UGAAAUCUGGAAAUGACAG | Mnk | [2224-2242] |
| 123 | AGCCUUUGCUGGUCACAUU | AAUGUGACCAGCAAAGGCU | Mnk | [2481-2499] |
| 124 | ACUGGAAUGGACAGUUCAU | AUGAACUGUCCAUUCCAGU | Mnk | [1953-1971] |
| 125 | ACUUGGAGAUCCUAAGGGA | UCCCUUAGGAUCUCCAAGU | | [2019-2037] |
| 126 | AGGAGAGGGAGAAUUCUGU | ACAGAAUUCUCCCUCUCCU | | [2598-2616] |
| 127 | GAAUGUACAACCUCUUCUG | CAGAAGAGGUUGUACAUUC | Mnk | [1666-1684] |
| 128 | GGGCUUAAGUGGGUUGCUU | AAGCAACCCACUUAAGCCC | Mnk | [3030-3048] |
| 129 | GAAAGUCAGGGUCACAGCU | AGCUGUGACCCUGACUUUC | Mnk | [2275-2293] |
| 130 | UCUAGAGGGCAUGUGAUGA | UCAUCACAUGCCCUCUAGA | | [3348-3366] |
| 131 | GAAGAGGAGGGAGUAUUAG | CUAAUACUCCCUCCUCUUC | Mnk | [2507-2525] |
| 132 | AAUACCAUCGCCAUGCACA | UGUGCAUGGCGAUGGUAUU | Mnk | [1479-1497] |
| 133 | CUAUAUCCACUGCGUCUUU | AAAGACGCAGUGGAUAUAG | Mnk | [1538-1556] |
| 134 | AUGGCUCAUCACCAAGGAA | UUCCUUGGUGAUGAGCCAU | Mnk | [863-881] |
| 135 | UCAGAGAAGGUCCACGUGA | UCACGUGGACCUUCUCUGA | | [1701-1719] |
| 136 | UGGAAGAGCACUUGGAGAU | AUCUCCAAGUGCUCUUCCA | | [2010-2028] |
| 137 | AGACCCUACUUUCGGAUAU | AUAUCCGAAAGUAGGGUCU | Mnk | [1304-1322] |
| 138 | AUUUCAUUACCUCCUACUU | AAGUAGGAGGUAAUGAAAU | Mnk | [2237-2255] |
| 139 | CUUUGUGGAAGACCCUACU | AGUAGGGUCUUCCACAAAG | Mnk | [1295-1313] |
| 140 | UGCUUUGUGGAAGACCCUA | UAGGGUCUUCCACAAAGCA | Mnk | [1293-1311] |
| 141 | AUUACCUCCUACUUGCCAU | AUGGCAAGUAGGAGGUAAU | Mnk | [2242-2260] |
| 142 | CUUUUGUGUCCCAUGCCCA | UGGGCAUGGGACACAAAAG | | [1867-1885] |
| 143 | GUGCUUUGUGGAAGACCCU | AGGGUCUUCCACAAAGCAC | Mnk | [1292-1310] |
| 144 | AAAGUUGAGCCUUUCUAGA | UCUAGAAAGGCUCAACUUU | | [2698-2716] |
| 145 | AAACGUUCGCUGAGGUUUU | AAAACCUCAGCGAACGUUU | Mnk | [3459-3477] |
| 146 | CCUACUUUCGGAUAUGAGG | CCUCAUAUCCGAAAGUAGG | Mnk | [1308-1326] |
| 147 | AUACCAUCGCCAUGCACAG | CUGUGCAUGGCGAUGGUAU | Mnk | [1480-1498] |
| 148 | AGAGAAGACCACCCGAAGA | UCUUCGGGUGGUCUUCUCU | Mnk | [1649-1667] |
| 149 | CCUCAAGGUCUAUAUCAAG | CUUGAUAUAGACCUUGAGG | Mnk | [1613-1631] |
| 150 | AUUCACCCAUCAAUGUGAA | UUCACAUUGAUGGGUGAAU | Mnk | [2259-2277] |
| 151 | CAAUACCAUCGCCAUGCAC | GUGCAUGGCGAUGGUAUUG | Mnk | [1478-1496] |
| 152 | AUUCCAGGCACUUUCUGUA | UACAGAAAGUGCCUGGAAU | Mnk | [3073-3091] |
| 153 | CAUCAAUGUGAAAGUCAGG | CCUGACUUUCACAUUGAUG | Mnk | [2266-2284] |
| 154 | AAUCCUAGUUCAGUUUUUU | AAAAAACUGAACUAGGAUU | Mnk | [2354-2372] |
| 155 | AAGCCACACCCUCCCUUUU | AAAAGGGAGGGUGUGGCUU | Mnk | [1930-1948] |
| 156 | UAUCCAGUGUUCAAGUGCA | UGCACUUGAACACUGGAUA | Mnk | [3399-3417] |
| 157 | ACUUCCGCCACUCAGAGAA | UUCUCUGAGUGGCGGAAGU | Ms, Mnk | [1690-1708] |
| 158 | GUUUCUGCAGACUGGUGGU | ACCACCAGUCUGCAGAAAC | Mnk | [758-776] |
| 159 | AGUGUUGUGGCCUUCCUGA | UCAGGAAGGCCACAACACU | Mnk | [2121-2139] |
| 160 | UUCUGAAGAGGAGGGAGUA | UACUCCCUCCUCUUCAGAA | Mnk | [2503-2521] |
| 161 | GAUGAGAAGUUCCAGGCAG | CUGCCUGGAACUUCUCAUC | Mnk | [1443-1461] |
| 162 | CUACAUUGCCAAACCUCUG | CAGAGGUUUGGCAAUGUAG | Mnk | [2811-2829] |
| 163 | GCUUUGAGCUGGAGAAGUC | GACUUCUCCAGCUCAAAGC | Mnk | [1210-1228] |
| 164 | UUCCAUAUGAUGAGAAAUA | UAUUUCUCAUCAUAUGGAA | Mnk | [3441-3459] |
| 165 | UGGUAUCCAGUGUUCAAGU | ACUUGAACACUGGAUACCA | Mnk | [3396-3414] |
| 166 | GCCAAGCUCGGAAUUAAUG | CAUUAAUUCCGAGCUUGGC | | [2095-2113] |
| 167 | ACACCCUCCCUUUUCCUCA | UGAGGAAAAGGGAGGGUGU | Mnk | [1935-1953] |
| 168 | CUACAAUACCAUCGCCAUG | CAUGGCGAUGGUAUUGUAG | Mnk | [1475-1493] |
| 169 | UCAGAUAUGAUGACUAUGA | UCAUAGUCAUCAUAUCUGA | Mnk | [1561-1579] |
| 170 | AGUUUGAGCCUUUGCUGGU | ACCAGCAAAGGCUCAAACU | Mnk | [2475-2493] |
| 171 | AUGGCUACUCGCUGAUCCA | UGGAUCAGCGAGUAGCCAU | Rat, Ms, Mnk | [1393-1411] |
| 172 | ACAACCUGGCAGUGGUGAU | AUCACCACUGCCAGGUUGU | Mnk | [583-601] |
| 173 | AUAUGAUGAGAAAUAAACG | CGUUUAUUUCUCAUCAUAU | Mnk | [3445-3463] |
| 174 | AGUGGGCUUGUGUGUGAUG | CAUCACACACAAGCCCACU | Mnk | [1901-1919] |
| 175 | UGAUGACUAUGAUUAUGGG | CCCAUAAUCAUAGUCAUCA | Mnk | [1568-1586] |
| 176 | UAUGAGGACUUCACUCGGA | UCCGAGUGAAGUCCUCAUA | Mnk | [1320-1338] |
| 177 | GCUCAUCACCAAGGAACAC | GUGUUCCUUGGUGAUGAGC | Mnk | [866-884] |
| 178 | AGUUGAGCCUUUCUAGAUG | CAUCUAGAAAGGCUCAACU | | [2700-2718] |
| 179 | GAGUAUUAGAUUAUAAAUC | GAUUUAUAAUCUAAUACUC | Mnk | [2517-2535] |
| 180 | UGGAGGGCACUGAAGAAAG | CUUUCUUCAGUGCCCUCCA | Mnk | [3161-3179] |
| 181 | GCACCAGGGUUCUUGUUUG | CAAACAAGAACCCUGGUGC | Mnk | [2757-2775] |
| 182 | CUAAAAGCCUGUUCUGUUG | CAACAGAACAGGCUUUUAG | Mnk | [2313-2331] |
| 183 | AGUUUGGAGGGCACUGAAG | CUUCAGUGCCCUCCAAACU | Mnk | [3157-3175] |
| 184 | AAGUUGAGCCUUUCUAGAU | AUCUAGAAAGGCUCAACUU | | [2699-2717] |
| 185 | UUCGGAUAUGAGGACUUCA | UGAAGUCCUCAUAUCCGAA | Mnk | [1314-1332] |
| 186 | CUACAUGACCUGACUCCUG | CAGGAGUCAGGUCAUGUAG | Mnk | [1784-1802] |
| 187 | UGGAAUGGACAGUUCAUUG | CAAUGAACUGUCCAUUCCA | Mnk | [1955-1973] |
| 188 | UUUGCUACCAGUUCCAUAU | AUAUGGAACUGGUAGCAAA | Mnk | [3430-3448] |
| 189 | GGAAGAGCACUUGGAGAUC | GAUCUCCAAGUGCUCUUCC | | [2011-2029] |
| 190 | AAGUUCCAGGCAGCCUAUA | UAUAGGCUGCCUGGAACUU | Mnk | [1449-1467] |
| 191 | AAAUCUUUGGCUUUGCUAC | GUAGCAAAGCCAAAGAUUU | Mnk | [3419-3437] |
| 192 | UCUGAAGAGGAGGGAGUAU | AUACUCCCUCCUCUUCAGA | Mnk | [2504-2522] |
| 193 | GAAAUAAACGUUCGCUGAG | CUCAGCGAACGUUUAUUUC | Mnk | [3454-3472] |
| 194 | AACAGCAAGCGGAUUUUCU | AGAAAAUCCGCUUGCUGUU | Mnk | [2914-2932] |
| 195 | UUUCUUGCAAGAUCAGGGA | UCCCUGAUCUUGCAAGAAA | Mnk | [2928-2946] |
| 196 | UAUGAUGAGAAAUAAACGU | ACGUUUAUUUCUCAUCAUA | Mnk | [3446-3464] |
| 197 | CUCUCUGACCAGUUUGGAG | CUCCAAACUGGUCAGAGAG | Mnk | [3147-3165] |
| 198 | UCAAGUGCAGAAAUCUUUG | CAAAGAUUUCUGCACUUGA | Mnk | [3409-3427] |
| 199 | ACAUGGCCGAGUUUCUGCA | UGCAGAAACUCGGCCAUGU | Mnk | [748-766] |
| 200 | GUCACAUUGCCUUCUGAAG | CUUCAGAAGGCAAUGUGAC | Mnk | [2492-2510] |
| 201 | GAUGAGAAAUAAACGUUCG | CGAACGUUUAUUUCUCAUC | Mnk | [3449-3467] |
| 202 | CUACCAGUUCCAUAUGAUG | CAUCAUAUGGAACUGGUAG | Mnk | [3434-3452] |
| 203 | UUGGAGGGCACUGAAGAAA | UUUCUUCAGUGCCCUCCAA | Mnk | [3160-3178] |
| 204 | UUCUGUAGCAAAUGACUGU | ACAGUCAUUUGCUACAGAA | Mnk | [3085-3103] |
| 205 | UUAGAUUAUAAAUCCUCUU | AAGAGGAUUUAUAAUCUAA | Mnk | [2522-2540] |
| 206 | CACAAUGUCUGAAGCUGCC | GGCAGCUUCAGACAUUGUG | Mnk | [2870-2888] |
| 207 | GAGUUUGAGCCUUUGCUGG | CCAGCAAAGGCUCAAACUC | Mnk | [2474-2492] |
| 208 | AAUGUUCACUGGGUGGGUA | UACCCACCCAGUGAACAUU | | [3372-3390] |
| 209 | CAUUGCCUUCUGAAGAGGA | UCCUCUUCAGAAGGCAAUG | Mnk | [2496-2514] |
| 210 | CAAAUGACUGUGAAUUACG | CGUAAUUCACAGUCAUUUG | Mnk | [3093-3111] |
| 211 | CCUAGUUCAGUUUUUUGAC | GUCAAAAAACUGAACUAGG | Mnk | [2357-2375] |
| 212 | CCUCUCUGACCAGUUUGGA | UCCAAACUGGUCAGAGAGG | Mnk | [3146-3164] |
| 213 | UACAUUGCCAAACCUCUGA | UCAGAGGUUUGGCAAUGUA | Mnk | [2812-2830] |
| 214 | CUGUUGCCCGAAUCCUAGU | ACUAGGAUUCGGGCAACAG | Mnk | [2344-2362] |
| 215 | ACUUCCGAGGCCGUGAAAA | UUUUCACGGCCUCGGAAGU | | [89-107] |
| 216 | AAGCAGCCAAGGACCGAUU | AAUCGGUCCUUGGCUGCUU | Mnk | [3057-3075] |
| 217 | AUGUCUCCCAAAAAGUUGA | UCAACUUUUUGGGAGACAU | | [2687-2705] |
| 218 | CUUGUGUGUGAUGUGCAGU | ACUGCACAUCACACACAAG | Mnk | [1907-1925] |
| 219 | CUUUGGCAUCAGAUAUGAU | AUCAUAUCUGAUGCCAAAG | Mnk | [1553-1571] |
| 220 | UGUUCAAGUGCAGAAAUCU | AGAUUUCUGCACUUGAACA | Mnk | [3406-3424] |
| 221 | CUCCCUUUUCCUCACUGGA | UCCAGUGAGGAAAAGGGAG | Mnk | [1940-1958] |
| 222 | UCUCCAUGCUUAAUGGUGU | ACACCAUUAAGCAUGGAGA | Mnk | [2398-2416] |
| 223 | UAGAGAGUUUGAGCCUUUG | CAAAGGCUCAAACUCUCUA | Mnk | [2470-2488] |
| 224 | GAGGAGAGGGAGAAUUCUG | CAGAAUUCUCCCUCUCCUC | | [2597-2615] |
| 225 | ACCACCCGAAGAAUGUACA | UGUACAUUCUUCGGGUGGU | Mnk | [1656-1674] |
| 226 | UGGAGAUCCUAAGGGACCA | UGGUCCCUUAGGAUCUCCA | | [2022-2040] |
| 227 | GCACCCUGACUACUUUACC | GGUAAAGUAGUCAGGGUGC | Mnk | [608-626] |
| 228 | CUCAUCACCAAGGAACACA | UGUGUUCCUUGGUGAUGAG | Mnk | [867-885] |
| 229 | CCACAAUGUCUGAAGCUGC | GCAGCUUCAGACAUUGUGG | Mnk | [2869-2887] |
| 230 | GAAGGUCCACGUGAACUUG | CAAGUUCACGUGGACCUUC | | [1706-1724] |
| 231 | CAAGGACUUCUCUGUCUGG | CCAGACAGAGAAGUCCUUG | Mnk | [1833-1851] |
| 232 | UAGAGGGCAUGUGAUGACU | AGUCAUCACAUGCCCUCUA | | [3350-3368] |
| 233 | AGGACUUCUCUGUCUGGAG | CUCCAGACAGAGAAGUCCU | Mnk | [1835-1853] |
| 234 | UUGAGCUGGAGAAGUCAGA | UCUGACUUCUCCAGCUCAA | Ms | [1213-1231] |
| 235 | GAACUAUAUCCACUGCGUC | GACGCAGUGGAUAUAGUUC | Mnk | [1535-1553] |
| 236 | AGCUGGAGAAGUCAGAGAG | CUCUCUGACUUCUCCAGCU | | [1216-1234] |
| 237 | CCUUUUCCUCACUGGAAUG | CAUUCCAGUGAGGAAAAGG | Mnk | [1943-1961] |
| 238 | AUGGCCGAGUUUCUGCAGA | UCUGCAGAAACUCGGCCAU | Mnk | [750-768] |
| 239 | AAAAGUUGAGCCUUUCUAG | CUAGAAAGGCUCAACUUUU | Mnk | [2697-2715] |
| 240 | AGAAGCUGCGCAAACUCAG | CUGAGUUUGCGCAGCUUCU | Mnk | [814-832] |
| 241 | GAUUCCAGGCACUUUCUGU | ACAGAAAGUGCCUGGAAUC | Mnk | [3072-3090] |
| 242 | GACUGUAAAUGUUCACUGG | CCAGUGAACAUUUACAGUC | | [3365-3383] |
| 243 | UCCAGUGUUCAAGUGCAGA | UCUGCACUUGAACACUGGA | Mnk | [3401-3419] |
| 244 | CUUCUGAAGAGGAGGGAGU | ACUCCCUCCUCUUCAGAAG | Mnk | [2502-2520] |
| 245 | ACUUUCUGUAGCAAAUGAC | GUCAUUUGCUACAGAAAGU | Mnk | [3082-3100] |
| 246 | AAGGUGUGCAGGAGAGAAG | CUUCUCUCCUGCACACCUU | | [3305-3323] |
| 247 | AAGAAGGUGUGCAGGAGAG | CUCUCCUGCACACCUUCUU | | [3302-3320] |
| 248 | CAUCACCAAGGAACACAUC | GAUGUGUUCCUUGGUGAUG | Mnk | [869-887] |
| 249 | GCAGAAAUCUUUGGCUUUG | CAAAGCCAAAGAUUUCUGC | Mnk | [3415-3433] |
| 250 | UUCUCUUGCCCUUCUUCUA | UAGAAGAAGGGCAAGAGAA | | [3114-3132] |
| 251 | CUUGAGGUUCCAACCUGGA | UCCAGGUUGGAACCUCAAG | Mnk | [2558-2576] |
| 252 | GCUCUCCUCCUUCGUGUUU | AAACACGAAGGAGGAGAGC | Mnk | [971-989] |
| 253 | UAUUUUGGUCCUUUAUGCU | AGCAUAAAGGACCAAAAUA | Mnk | [2541-2559] |
| 254 | UUCACCCAUCAAUGUGAAA | UUUCACAUUGAUGGGUGAA | Mnk | [2260-2278] |
| 255 | GAGUUUCUGCAGACUGGUG | CACCAGUCUGCAGAAACUC | Mnk | [756-774] |
| 256 | UGUCCAGUUCCCUAAAAGC | GCUUUUAGGGAACUGGACA | Mnk | [2302-2320] |
| 257 | GUUCGCUGAGGUUUUGUUU | AAACAAAACCUCAGCGAAC | Mnk | [3463-3481] |
| 258 | AAUAAACGUUCGCUGAGGU | ACCUCAGCGAACGUUUAUU | Mnk | [3456-3474] |
| 259 | UGUGAAUUACGACUUCUCU | AGAGAAGUCGUAAUUCACA | | [3101-3119] |
| 260 | AACUAUAUCCACUGCGUCU | AGACGCAGUGGAUAUAGUU | Mnk | [1536-1554] |
| 261 | ACUCAGCGAGAUCAACAAG | CUUGUUGAUCUCGCUGAGU | Mnk | [827-845] |
| 262 | AAGGACUUCUCUGUCUGGA | UCCAGACAGAGAAGUCCUU | Mnk | [1834-1852] |
| 263 | AUCUGGAACUAUAUCCACU | AGUGGAUAUAGUUCCAGAU | Mnk | [1530-1548] |
| 264 | AAAUGUUCACUGGGUGGGU | ACCCACCCAGUGAACAUUU | | [3371-3389] |
| 265 | AGUGUGCCACAUUAAAUAC | GUAUUUAAUGUGGCACACU | Mnk | [3226-3244] |
| 266 | UAGACAACCUGGCAGUGGU | ACCACUGCCAGGUUGUCUA | Mnk | [580-598] |
| 267 | AGUUCCAGGCAGCCUAUAG | CUAUAGGCUGCCUGGAACU | Mnk | [1450-1468] |
| 268 | AGAAGUCAGAGAGCCUGCU | AGCAGGCUCUCUGACUUCU | | [1222-1240] |
| 269 | UCGUGUUUGGCUGUGGCAU | AUGCCACAGCCAAACACGA | Mnk | [982-1000] |
| 270 | UCUCCUCCUUCGUGUUUGG | CCAAACACGAAGGAGGAGA | Mnk | [973-991] |
| 271 | ACUCAGAGAAGGUCCACGU | ACGUGGACCUUCUCUGAGU | | [1699-1717] |
| 272 | UUAAUGGUGUGAGGCGUCA | UGACGCCUCACACCAUUAA | Mnk | [2407-2425] |
| 273 | GCUGGAUGAGAAGUUCCAG | CUGGAACUUCUCAUCCAGC | Ms, Mnk | [1439-1457] |
| 274 | AGGGCACUGAAGAAAGGCA | UGCCUUUCUUCAGUGCCCU | Mnk | [3164-3182] |
| 275 | UUCCGGGCCCAGGAUUAUA | UAUAAUCCUGGGCCCGGAA | Mnk | [1362-1380] |
| 276 | AGAGUUUGAGCCUUUGCUG | CAGCAAAGGCUCAAACUCU | Mnk | [2473-2491] |
| 277 | UGGGUUCUAGAGGGCAUGU | ACAUGCCCUCUAGAACCCA | | [3343-3361] |
| 278 | AUGAGAAGUUCCAGGCAGC | GCUGCCUGGAACUUCUCAU | Mnk | [1444-1462] |
| 279 | UGAGCUGGAGAAGUCAGAG | CUCUGACUUCUCCAGCUCA | | [1214-1232] |
| 280 | GAGAUCCUAAGGGACCACA | UGUGGUCCCUUAGGAUCUC | Mnk | [2024-2042] |
| 281 | CAGUUCCCUAAAAGCCUGU | ACAGGCUUUUAGGGAACUG | Mnk | [2306-2324] |
| 282 | AGAGAAGGUCCACGUGAAC | GUUCACGUGGACCUUCUCU | | [1703-1721] |
| 283 | UGUGAAAGUCAGGGUCACA | UGUGACCCUGACUUUCACA | Mnk | [2272-2290] |
| 284 | UGUGGAAGACCCUACUUUC | GAAAGUAGGGUCUUCCACA | Mnk | [1298-1316] |
| 285 | AGUAUUAGAUUAUAAAUCC | GGAUUUAUAAUCUAAUACU | Mnk | [2518-2536] |
| 286 | AAUUAAUGUGCCACAAGUG | CACUUGUGGCACAUUAAUU | | [2106-2124] |
| 287 | CAGCAAGCGGAUUUUCUUG | CAAGAAAAUCCGCUUGCUG | Mnk | [2916-2934] |
| 288 | UCCCUAAAAGCCUGUUCUG | CAGAACAGGCUUUUAGGGA | Mnk | [2310-2328] |
| 289 | AGACAUGCUGUGCUUUGUG | CACAAAGCACAGCAUGUCU | Mnk | [1283-1301] |
| 290 | CUACAUUGCCAUCAUGGCU | AGCCAUGAUGGCAAUGUAG | Ms, Mnk | [692-710] |
| 291 | UGUACAACCUCUUCUGGAG | CUCCAGAAGAGGUUGUACA | Mnk | [1669-1687] |
| 292 | AUGAGGACUUCACUCGGAG | CUCCGAGUGAAGUCCUCAU | Mnk | [1321-1339] |
| 293 | CAACAGCAAGCGGAUUUUC | GAAAAUCCGCUUGCUGUUG | Mnk | [2913-2931] |
| 294 | AUUAAUGUGCCACAAGUGU | ACACUUGUGGCACAUUAAU | | [2107-2125] |
| 295 | AUGACCUGACUCCUGAGCA | UGCUCAGGAGUCAGGUCAU | Mnk | [1788-1806] |
| 296 | GACUGUGAAUUACGACUUC | GAAGUCGUAAUUCACAGUC | | [3098-3116] |
| 297 | AUGACUGUGAAUUACGACU | AGUCGUAAUUCACAGUCAU | Mnk | [3096-3114] |
| 298 | CCAGACAUGCUGUGCUUUG | CAAAGCACAGCAUGUCUGG | Mnk | [1281-1299] |
| 299 | GGUAUCCAGUGUUCAAGUG | CACUUGAACACUGGAUACC | Mnk | [3397-3415] |
| 300 | AAUGACUGUGAAUUACGAC | GUCGUAAUUCACAGUCAUU | Mnk | [3095-3113] |
| 301 | AAUGUGAAAGUCAGGGUCA | UGACCCUGACUUUCACAUU | Mnk | [2270-2288] |
| 302 | CACAAGGACUUCUCUGUCU | AGACAGAGAAGUCCUUGUG | Mnk | [1831-1849] |
| 303 | UAAUGUGCCACAAGUGUUG | CAACACUUGUGGCACAUUA | Mnk | [2109-2127] |
| 304 | UAUAGCCUCACCUACAAUA | UAUUGUAGGUGAGGCUAUA | Mnk | [1464-1482] |
| 305 | UUAAUGUGCCACAAGUGUU | AACACUUGUGGCACAUUAA | Mnk | [2108-2126] |
| 306 | CCUCACCUACAAUACCAUC | GAUGGUAUUGUAGGUGAGG | Mnk | [1469-1487] |
| 307 | UACCAGUUCCAUAUGAUGA | UCAUCAUAUGGAACUGGUA | Mnk | [3435-3453] |
| 308 | UCAUUGCACUGACUCUGGG | CCCAGAGUCAGUGCAAUGA | Mnk | [1968-1986] |
| 309 | AACACAUCCAGGCCUUGCU | AGCAAGGCCUGGAUGUGUU | Mnk | [880-898] |
| 310 | UGAAAGUCAGGGUCACAGC | GCUGUGACCCUGACUUUCA | Mnk | [2274-2292] |
| 311 | GGAGUGGUAUCCAGUGUUC | GAACACUGGAUACCACUCC | Mnk | [3392-3410] |
| 312 | AGGAGGAGAGGGAGAAUUC | GAAUUCUCCCUCUCCUCCU | | [2595-2613] |
| 313 | UCCAGUUCCCUAAAAGCCU | AGGCUUUUAGGGAACUGGA | Mnk | [2304-2322] |
| 314 | AAGAGCACUUGGAGAUCCU | AGGAUCUCCAAGUGCUCUU | | [2013-2031] |
| 315 | UGCUACCCAGAGAAGACCA | UGGUCUUCUCUGGGUAGCA | Mnk | [1641-1659] |
| 316 | CAUUUCCAGAUUUCAUUAC | GUAAUGAAAUCUGGAAAUG | Mnk | [2228-2246] |
| 317 | CGACUUCUCUUGCCCUUCU | AGAAGGGCAAGAGAAGUCG | | [3110-3128] |
| 318 | AGAGGGCAUGUGAUGACUG | CAGUCAUCACAUGCCCUCU | | [3351-3369] |
| 319 | UAGCAAAUGACUGUGAAUU | AAUUCACAGUCAUUUGCUA | Mnk | [3090-3108] |
| 320 | GACAUGCUGUGCUUUGUGG | CCACAAAGCACAGCAUGUC | Mnk | [1284-1302] |
| 321 | GUUCUUACCUGGUAGGCUC | GAGCCUACCAGGUAAGAAC | Mnk | [727-745] |
| 322 | AGGAUUAUACCUGGGAAGA | UCUUCCCAGGUAUAAUCCU | Rat, Ms, Mnk | [1372-1390] |
| 323 | CACUACAUUGCCAUCAUGG | CCAUGAUGGCAAUGUAGUG | Ms, Mnk | [690-708] |
| 324 | UUGCUUCCAGGCAGAAGCA | UGCUUCUGCCUGGAAGCAA | Mnk | [3043-3061] |
| 325 | AUUGCACUGACUCUGGGAU | AUCCCAGAGUCAGUGCAAU | Mnk | [1970-1988] |
| 326 | AAUGGACAGUUCAUUGCAC | GUGCAAUGAACUGUCCAUU | Mnk | [1958-1976] |
| 327 | AUGAUGAGAAAUAAACGUU | AACGUUUAUUUCUCAUCAU | Mnk | [3447-3465] |
| 328 | UCUUUGGCAUCAGAUAUGA | UCAUAUCUGAUGCCAAAGA | Mnk | [1552-1570] |
| 329 | UAAGUGGGUUGCUUCCAGG | CCUGGAAGCAACCCACUUA | Mnk | [3035-3053] |
| 330 | GUUGUGGCCUUCCUGAACU | AGUUCAGGAAGGCCACAAC | Mnk | [2124-2142] |
| 331 | UUGGCAUCAGAUAUGAUGA | UCAUCAUAUCUGAUGCCAA | Mnk | [1555-1573] |
| 332 | AUAAAUCCUCUUUAUUUUG | CAAAAUAAAGAGGAUUUAU | Mnk | [2529-2547] |
| 333 | GAUGUCUCCCAAAAAGUUG | CAACUUUUUGGGAGACAUC | | [2686-2704] |
| 334 | CAAGUGCAGAAAUCUUUGG | CCAAAGAUUUCUGCACUUG | Mnk | [3410-3428] |
| 335 | CUCCUACUUGCCAUUCACC | GGUGAAUGGCAAGUAGGAG | Mnk | [2247-2265] |
| 336 | GACCCUUUUGUGUCCCAUG | CAUGGGACACAAAAGGGUC | | [1863-1881] |
| 337 | CACCAGGGUUCUUGUUUGG | CCAAACAAGAACCCUGGUG | Mnk | [2758-2776] |
| 338 | UGCAAGAAGGUGUGCAGGA | UCCUGCACACCUUCUUGCA | | [3299-3317] |
| 339 | ACUUCUCUGUCUGGAGACA | UGUCUCCAGACAGAGAAGU | Mnk | [1838-1856] |
| 340 | AAGACCCUACUUUCGGAUA | UAUCCGAAAGUAGGGUCUU | Mnk | [1303-1321] |
| 341 | UUUCAUUACCUCCUACUUG | CAAGUAGGAGGUAAUGAAA | Mnk | [2238-2256] |
| 342 | AUGGACAGUUCAUUGCACU | AGUGCAAUGAACUGUCCAU | Mnk | [1959-1977] |
| 343 | AUGUACAACCUCUUCUGGA | UCCAGAAGAGGUUGUACAU | Mnk | [1668-1686] |
| 344 | UUCUAGAGGGCAUGUGAUG | CAUCACAUGCCCUCUAGAA | | [3347-3365] |
| 345 | UUAUUUUGGUCCUUUAUGC | GCAUAAAGGACCAAAAUAA | Mnk | [2540-2558] |
| 346 | CUUCCUUUGCCCUUUUUCC | GGAAAAAGGGCAAAGGAAG | | [2375-2393] |
| 347 | AUUAUACCUGGGAAGACCA | UGGUCUUCCCAGGUAUAAU | Rat, Ms, Mnk | [1375-1393] |
| 348 | CAUCUGGAACUAUAUCCAC | GUGGAUAUAGUUCCAGAUG | Mnk | [1529-1547] |
| 349 | CUUAAGUGGGUUGCUUCCA | UGGAAGCAACCCACUUAAG | Mnk | [3033-3051] |
| 350 | UUUAUGCUUGAGGUUCCAA | UUGGAACCUCAAGCAUAAA | Mnk | [2552-2570] |
| 351 | CAUCAGUGUUCUUACCUGG | CCAGGUAAGAACACUGAUG | Mnk | [720-738] |
| 352 | CCCUUUUUCCCUUUUCUCC | GGAGAAAAGGGAAAAAGGG | | [2384-2402] |
| 353 | UUGCCCGAAUCCUAGUUCA | UGAACUAGGAUUCGGGCAA | Mnk | [2347-2365] |
| 354 | AUCUGGGUUCUAGAGGGCA | UGCCCUCUAGAACCCAGAU | | [3340-3358] |
| 355 | AGAUCAACAAGUUGCUGGC | GCCAGCAACUUGUUGAUCU | Mnk | [835-853] |
| 356 | AUCCAGGCCUUGCUGAAGA | UCUUCAGCAAGGCCUGGAU | Ms, Mnk | [885-903] |
| 357 | AAGGAACACAUCCAGGCCU | AGGCCUGGAUGUGUUCCUU | Mnk | [876-894] |
| 358 | GCACUUGGAGAUCCUAAGG | CCUUAGGAUCUCCAAGUGC | | [2017-2035] |
| 359 | GUGCCACAUUAAAUACCCG | CGGGUAUUUAAUGUGGCAC | Mnk | [3229-3247] |
| 360 | UGCCAUUCACCCAUCAAUG | CAUUGAUGGGUGAAUGGCA | Mnk | [2255-2273] |
| 361 | AUUUUGGUCCUUUAUGCUU | AAGCAUAAAGGACCAAAAU | Mnk | [2542-2560] |
| 362 | UUCAUUACCUCCUACUUGC | GCAAGUAGGAGGUAAUGAA | Mnk | [2239-2257] |
| 363 | AAGACCACCCGAAGAAUGU | ACAUUCUUCGGGUGGUCUU | Mnk | [1653-1671] |
| 364 | ACCUCUUCUGGAGGCACUU | AAGUGCCUCCAGAAGAGGU | Mnk | [1675-1693] |
| 365 | UCUAGAUGGCUUAGGUGGC | GCCACCUAAGCCAUCUAGA | | [2711-2729] |
| 366 | AGUUUUUUGACUUCCUUUG | CAAAGGAAGUCAAAAAACU | Mnk | [2365-2383] |
| 367 | CAUUGCCAAACCUCUGACU | AGUCAGAGGUUUGGCAAUG | Mnk | [2814-2832] |
| 368 | GCUUAAGUGGGUUGCUUCC | GGAAGCAACCCACUUAAGC | Mnk | [3032-3050] |
| 369 | ACCAGGGUUCUUGUUUGGA | UCCAAACAAGAACCCUGGU | Mnk | [2759-2777] |
| 370 | AGCUCGGAAUUAAUGUGCC | GGCACAUUAAUUCCGAGCU | | [2099-2117] |
| 371 | AAGCCUGUUCUGUUGGGCA | UGCCCAACAGAACAGGCUU | Mnk | [2317-2335] |
| 372 | UGAGCCUUUGCUGGUCACA | UGUGACCAGCAAAGGCUCA | Mnk | [2479-2497] |
| 373 | AGUGCAGAAAUCUUUGGCU | AGCCAAAGAUUUCUGCACU | Mnk | [3412-3430] |
| 374 | UCCUUUGCCCUUUUUCCCU | AGGGAAAAAGGGCAAAGGA | | [2377-2395] |
| 375 | UUAAGUGGGUUGCUUCCAG | CUGGAAGCAACCCACUUAA | Mnk | [3034-3052] |
| 376 | AUUUCUGCAGCCAGUGUCU | AGACACUGGCUGCAGAAAU | | [2951-2969] |
| 377 | UUUCCAGAUUUCAUUACCU | AGGUAAUGAAAUCUGGAAA | Mnk | [2230-2248] |
| 378 | GACCACCCGAAGAAUGUAC | GUACAUUCUUCGGGUGGUC | Mnk | [1655-1673] |
| 379 | AUAAACGUUCGCUGAGGUU | AACCUCAGCGAACGUUUAU | Mnk | [3457-3475] |
| 380 | UUCGUGUUUGGCUGUGGCA | UGCCACAGCCAAACACGAA | Mnk | [981-999] |
| 381 | CCCUGACUACUUUACCAGC | GCUGGUAAAGUAGUCAGGG | Mnk | [611-629] |
| 382 | UUUUGGUCCUUUAUGCUUG | CAAGCAUAAAGGACCAAAA | Mnk | [2543-2561] |
| 383 | GUGAUGACUGUAAAUGUUC | GAACAUUUACAGUCAUCAC | | [3360-3378] |
| 384 | UACUUGCCAUUCACCCAUC | GAUGGGUGAAUGGCAAGUA | Mnk | [2251-2269] |
| 385 | UAGGGAGUGGUAUCCAGUG | CACUGGAUACCACUCCCUA | Mnk | [3389-3407] |
| 386 | GUUCUUGUUUGGACCCUGC | GCAGGGUCCAAACAAGAAC | Mnk | [2765-2783] |
| 387 | UCUGGAACUAUAUCCACUG | CAGUGGAUAUAGUUCCAGA | Mnk | [1531-1549] |
| 388 | UUCUGCAGACUGGUGGUGA | UCACCACCAGUCUGCAGAA | Mnk | [760-778] |
| 389 | AAGUGUUGUGGCCUUCCUG | CAGGAAGGCCACAACACUU | Mnk | [2120-2138] |
| 390 | GUUCAUUGCACUGACUCUG | CAGAGUCAGUGCAAUGAAC | Mnk | [1966-1984] |
| 391 | GACCCGUUGAACAACUCUG | CAGAGUUGUUCAACGGGUC | Mnk | [1083-1101] |
| 392 | CUCUAGAGAGUUUGAGCCU | AGGCUCAAACUCUCUAGAG | Mnk | [2467-2485] |
| 393 | UAUGAUGACUAUGAUUAUG | CAUAAUCAUAGUCAUCAUA | Mnk | [1566-1584] |
| 394 | AUCCAGUGUUCAAGUGCAG | CUGCACUUGAACACUGGAU | Mnk | [3400-3418] |
| 395 | UGGACAGUUCAUUGCACUG | CAGUGCAAUGAACUGUCCA | Mnk | [1960-1978] |
| 396 | CUCCUUCGUGUUUGGCUGU | ACAGCCAAACACGAAGGAG | Mnk | [977-995] |
| 397 | CUUGGAGAUCCUAAGGGAC | GUCCCUUAGGAUCUCCAAG | | [2020-2038] |
| 398 | AAUCCUCUUUAUUUUGGUC | GACCAAAAUAAAGAGGAUU | Mnk | [2532-2550] |
| 399 | GAAGACCACCCGAAGAAUG | CAUUCUUCGGGUGGUCUUC | Mnk | [1652-1670] |
| 400 | AUAUGAGGACUUCACUCGG | CCGAGUGAAGUCCUCAUAU | Mnk | [1319-1337] |
| 401 | CACUGAAGAAAGGCAAGGG | CCCUUGCCUUUCUUCAGUG | Mnk | [3168-3186] |
| 402 | CUCCUCUCUGACCAGUUUG | CAAACUGGUCAGAGAGGAG | Mnk | [3144-3162] |
| 403 | UUGUGUGUGAUGUGCAGUC | GACUGCACAUCACACACAA | Mnk | [1908-1926] |
| 404 | CAUUAAAUACCCGUGCAGG | CCUGCACGGGUAUUUAAUG | Mnk | [3235-3253] |
| 405 | UUAUACCUGGGAAGACCAU | AUGGUCUUCCCAGGUAUAA | Rat, Ms, Mnk | [1376-1394] |
| 406 | GUUGAGCCUUUCUAGAUGG | CCAUCUAGAAAGGCUCAAC | | [2701-2719] |
| 407 | UUUUGACUUCCUUUGCCCU | AGGGCAAAGGAAGUCAAAA | Mnk | [2369-2387] |
| 408 | AUUGCCUUCUGAAGAGGAG | CUCCUCUUCAGAAGGCAAU | Mnk | [2497-2515] |
| 409 | ACUACUUUACCAGCUUCUG | CAGAAGCUGGUAAAGUAGU | Mnk | [616-634] |
| 410 | UGUGCUUUGUGGAAGACCC | GGGUCUUCCACAAAGCACA | Mnk | [1291-1309] |
| 411 | ACCCGUUGAACAACUCUGG | CCAGAGUUGUUCAACGGGU | Mnk | [1084-1102] |
| 412 | AUCUCUAGAGAGUUUGAGC | GCUCAAACUCUCUAGAGAU | Mnk | [2465-2483] |
| 413 | AGUGUUCUUACCUGGUAGG | CCUACCAGGUAAGAACACU | Mnk | [724-742] |
| 414 | GAACCUCAAGGUCUAUAUC | GAUAUAGACCUUGAGGUUC | Mnk | [1610-1628] |
| 415 | GUUCCCUAAAAGCCUGUUC | GAACAGGCUUUUAGGGAAC | Mnk | [2308-2326] |
| 416 | UUUGGCUUUGCUACCAGUU | AACUGGUAGCAAAGCCAAA | Mnk | [3424-3442] |
| 417 | ACAUUGCCAUCAUGGCUGC | GCAGCCAUGAUGGCAAUGU | Ms, Mnk | [694-712] |
| 418 | AAAUAAACGUUCGCUGAGG | CCUCAGCGAACGUUUAUUU | Mnk | [3455-3473] |
| 419 | GGUGACCAUGGCUACAUUG | CAAUGUAGCCAUGGUCACC | Mnk | [2800-2818] |
| 420 | CAGCUGCUGGAUGAGAAGU | ACUUCUCAUCCAGCAGCUG | Rat, Ms, Mnk | [1434-1452] |
| 421 | UUCCCUAAAAGCCUGUUCU | AGAACAGGCUUUUAGGGAA | Mnk | [2309-2327] |
| 422 | AGAGCUCAAGGACUACCUG | CAGGUAGUCCUUGAGCUCU | | [383-401] |
| 423 | UUGCUACCAGUUCCAUAUG | CAUAUGGAACUGGUAGCAA | Mnk | [3431-3449] |
| 424 | UCAUUACCUCCUACUUGCC | GGCAAGUAGGAGGUAAUGA | Mnk | [2240-2258] |
| 425 | GAUUAUACCUGGGAAGACC | GGUCUUCCCAGGUAUAAUC | Rat, Ms, Mnk | [1374-1392] |
| 426 | CAGGGUUCUUGUUUGGACC | GGUCCAAACAAGAACCCUG | Mnk | [2761-2779] |
| 427 | GUAAAUGUUCACUGGGUGG | CCACCCAGUGAACAUUUAC | | [3369-3387] |
| 428 | GCCAACAGCAAGCGGAUUU | AAAUCCGCUUGCUGUUGGC | Mnk | [2911-2929] |
| 429 | UGCCAACAGCAAGCGGAUU | AAUCCGCUUGCUGUUGGCA | Mnk | [2910-2928] |
| 430 | ACUGCGUCUUUGGCAUCAG | CUGAUGCCAAAGACGCAGU | Ms, Mnk | [1546-1564] |
| 431 | AGUAGACAACCUGGCAGUG | CACUGCCAGGUUGUCUACU | Mnk | [578-596] |
| 432 | CUUCUCUUGCCCUUCUUCU | AGAAGAAGGGCAAGAGAAG | | [3113-3131] |
| 433 | AUCCUAGUUCAGUUUUUUG | CAAAAAACUGAACUAGGAU | Mnk | [2355-2373] |
| 434 | UAAUGGUGUGAGGCGUCAG | CUGACGCCUCACACCAUUA | Mnk | [2408-2426] |
| 435 | GGUCUAUAUCAAGACAGUG | CACUGUCUUGAUAUAGACC | Mnk | [1619-1637] |
| 436 | CUACUUUACCAGCUUCUGG | CCAGAAGCUGGUAAAGUAG | Mnk | [617-635] |
| 437 | UUUUCCUCACUGGAAUGGA | UCCAUUCCAGUGAGGAAAA | Mnk | [1945-1963] |
| 438 | UGGGAAGACCAUGGCUACU | AGUAGCCAUGGUCUUCCCA | Rat, Ms, Mnk | [1383-1401] |
| 439 | UAGAUUAUAAAUCCUCUUU | AAAGAGGAUUUAUAAUCUA | Mnk | [2523-2541] |
| 440 | CUUAAUGGUGUGAGGCGUC | GACGCCUCACACCAUUAAG | Mnk | [2406-2424] |
| 441 | CACCCGAAGAAUGUACAAC | GUUGUACAUUCUUCGGGUG | Mnk | [1658-1676] |
| 442 | AACCUCUUCUGGAGGCACU | AGUGCCUCCAGAAGAGGUU | Mnk | [1674-1692] |
| 443 | CAGUUCAUUGCACUGACUC | GAGUCAGUGCAAUGAACUG | Mnk | [1964-1982] |
| 444 | ACCCUUUUGUGUCCCAUGC | GCAUGGGACACAAAAGGGU | | [1864-1882] |
| 445 | UAAACGUUCGCUGAGGUUU | AAACCUCAGCGAACGUUUA | Mnk | [3458-3476] |
| 446 | UUCCCUUUUCUCCAUGCUU | AAGCAUGGAGAAAAGGGAA | | [2390-2408] |
| 447 | AUGUUCACUGGGUGGGUAG | CUACCCACCCAGUGAACAU | | [3373-3391] |
| 448 | UGCUGGUCACAUUGCCUUC | GAAGGCAAUGUGACCAGCA | Mnk | [2487-2505] |
| 449 | AACCUCAAGGUCUAUAUCA | UGAUAUAGACCUUGAGGUU | Mnk | [1611-1629] |
| 450 | UUUAUUUUGGUCCUUUAUG | CAUAAAGGACCAAAAUAAA | Mnk | [2539-2557] |
| 451 | ACUGACUCUGGGAUCUCAG | CUGAGAUCCCAGAGUCAGU | Mnk | [1975-1993] |
| 452 | GUUUGAGCCUUUGCUGGUC | GACCAGCAAAGGCUCAAAC | Mnk | [2476-2494] |
| 453 | AGCCUAUAGCCUCACCUAC | GUAGGUGAGGCUAUAGGCU | Mnk | [1460-1478] |
| 454 | AGAUCCUAAGGGACCACAC | GUGUGGUCCCUUAGGAUCU | Mnk | [2025-2043] |
| 455 | GAGAGGGAGAAUUCUGUUC | GAACAGAAUUCUCCCUCUC | | [2600-2618] |
| 456 | AUGGCUUAGGUGGCACCAU | AUGGUGCCACCUAAGCCAU | | [2716-2734] |
| 457 | CUUUGCUGGUCACAUUGCC | GGCAAUGUGACCAGCAAAG | Mnk | [2484-2502] |
| 458 | ACUUCCUUUGCCCUUUUUC | GAAAAAGGGCAAAGGAAGU | | [2374-2392] |
| 459 | UCCACGUGAACUUGCUGCU | AGCAGCAAGUUCACGUGGA | | [1711-1729] |
| 460 | GAGAAGGUCCACGUGAACU | AGUUCACGUGGACCUUCUC | | [1704-1722] |
| 461 | CUCGGAAUUAAUGUGCCAC | GUGGCACAUUAAUUCCGAG | | [2101-2119] |
| 462 | AUCCCAGUAUCUCAUCUGU | ACAGAUGAGAUACUGGGAU | Mnk | [3000-3018] |
| 463 | UUUCUGUAGCAAAUGACUG | CAGUCAUUUGCUACAGAAA | Mnk | [3084-3102] |
| 464 | UCCUCACUGGAAUGGACAG | CUGUCCAUUCCAGUGAGGA | Mnk | [1948-1966] |
| 465 | GAUGACUGUAAAUGUUCAC | GUGAACAUUUACAGUCAUC | | [3362-3380] |
| 466 | UAUUAGAUUAUAAAUCCUC | GAGGAUUUAUAAUCUAAUA | Mnk | [2520-2538] |
| 467 | CAUGUGAUGACUGUAAAUG | CAUUUACAGUCAUCACAUG | | [3357-3375] |
| 468 | UAUCUCUAGAGAGUUUGAG | CUCAAACUCUCUAGAGAUA | Mnk | [2464-2482] |
| 469 | GUGGAAGACCCUACUUUCG | CGAAAGUAGGGUCUUCCAC | Mnk | [1299-1317] |
| 470 | UUUCUAGAUGGCUUAGGUG | CACCUAAGCCAUCUAGAAA | | [2709-2727] |
| 471 | UUUGUGGAAGACCCUACUU | AAGUAGGGUCUUCCACAAA | Mnk | [1296-1314] |
| 472 | CCUUUGCUGGUCACAUUGC | GCAAUGUGACCAGCAAAGG | Mnk | [2483-2501] |
| 473 | AGUUCCCUAAAAGCCUGUU | AACAGGCUUUUAGGGAACU | Mnk | [2307-2325] |
| 474 | UCUGUAGCAAAUGACUGUG | CACAGUCAUUUGCUACAGA | Mnk | [3086-3104] |
| 475 | AAAGCCCUCCCUGCAAGAA | UUCUUGCAGGGAGGGCUUU | Mnk | [3288-3306] |
| 476 | ACUGAAGAAAGGCAAGGGC | GCCCUUGCCUUUCUUCAGU | Mnk | [3169-3187] |
| 477 | GUUUUUUGACUUCCUUUGC | GCAAAGGAAGUCAAAAAAC | Mnk | [2366-2384] |
| 478 | AUCAGUGUUCUUACCUGGU | ACCAGGUAAGAACACUGAU | Mnk | [721-739] |
| 479 | UAGUUCAGUUUUUUGACUU | AAGUCAAAAAACUGAACUA | Mnk | [2359-2377] |
| 480 | GAGAAUUCUGUUCUCCCAG | CUGGGAGAACAGAAUUCUC | | [2606-2624] |
| 481 | AAUGUACAACCUCUUCUGG | CCAGAAGAGGUUGUACAUU | Mnk | [1667-1685] |
| 482 | GAAUUACGACUUCUCUUGC | GCAAGAGAAGUCGUAAUUC | | [3104-3122] |
| 483 | UCCUACUUGCCAUUCACCC | GGGUGAAUGGCAAGUAGGA | Mnk | [2248-2266] |
| 484 | UAAAUCCUCUUUAUUUUGG | CCAAAAUAAAGAGGAUUUA | Mnk | [2530-2548] |
| 485 | UGCCCGAAUCCUAGUUCAG | CUGAACUAGGAUUCGGGCA | Mnk | [2348-2366] |
| 486 | AGAGAGUUUGAGCCUUUGC | GCAAAGGCUCAAACUCUCU | Mnk | [2471-2489] |
| 487 | CACCUACAAUACCAUCGCC | GGCGAUGGUAUUGUAGGUG | Mnk | [1472-1490] |
| 488 | AUUUCCAGAUUUCAUUACC | GGUAAUGAAAUCUGGAAAU | Mnk | [2229-2247] |
| 489 | UCCUCCUUCGUGUUUGGCU | AGCCAAACACGAAGGAGGA | Mnk | [975-993] |
| 490 | UCCAGAUUUCAUUACCUCC | GGAGGUAAUGAAAUCUGGA | Mnk | [2232-2250] |
| 491 | AUGCACAGUGGUGUGGACA | UGUCCACACCACUGUGCAU | Mnk | [1491-1509] |
| 492 | CUUCUAGCAGUCUGUGCCU | AGGCACAGACUGCUAGAAG | | [3127-3145] |
| 493 | UAGCCUCACCUACAAUACC | GGUAUUGUAGGUGAGGCUA | Mnk | [1466-1484] |
| 494 | UUUGAGCCUUUGCUGGUCA | UGACCAGCAAAGGCUCAAA | Mnk | [2477-2495] |
| 495 | ACUACAUUGCCAUCAUGGC | GCCAUGAUGGCAAUGUAGU | Ms, Mnk | [691-709] |
| 496 | ACGUUCGCUGAGGUUUUGU | ACAAAACCUCAGCGAACGU | Mnk | [3461-3479] |
| 497 | UGUUGUGGCCUUCCUGAAC | GUUCAGGAAGGCCACAACA | Mnk | [2123-2141] |
| 498 | CUUUUCUCCAUGCUUAAUG | CAUUAAGCAUGGAGAAAAG | Mnk | [2394-2412] |
| 499 | UGGCUUUGCUACCAGUUCC | GGAACUGGUAGCAAAGCCA | Mnk | [3426-3444] |
| 500 | UUUGACUUCCUUUGCCCUU | AAGGGCAAAGGAAGUCAAA | Mnk | [2370-2388] |

TABLE B15

| | Sense | Antisense |
|---|---|---|
| 1 | GAAUCACAGAAACACUUUU | AAAAGUGUUUCUGUGAUUC |
| 2 | CCGUGGUCUAUAUCGAGAU | AUCUCGAUAUAGACCACGG |
| 3 | GACAUGGGUUUCUUGGUAA | UUACCAAGAAACCCAUGUC |
| 4 | CCGAGACAGAGGGUUAAAU | AUUUAACCCUCUGUCUCGG |
| 5 | GAUGGUACAAAAUGCUGAA | UUCAGCAUUUUGUACCAUC |
| 6 | CGUGGUCUAUAUCGAGAUC | GAUCUCGAUAUAGACCACG |
| 7 | GCCGUGGUCUAUAUCGAGA | UCUCGAUAUAGACCACGGC |
| 8 | GUGCUGCUCUUUGUGGUGU | ACACCACAAAGAGCAGCAC |
| 9 | AGGAUUCAGACUAAGUUUG | CAAACUUAGUCUGAAUCCU |
| 10 | GGUGAAAACUUCUGCUUGA | UCAAGCAGAAGUUUUCACC |
| 11 | CCUGCUCUGAUUUCCUCCU | AGGAGGAAAUCAGAGCAGG |
| 12 | UGAGUGCGGUUGCUGACAU | AUGUCAGCAACCGCACUCA |
| 13 | AGGGUGAAAACUUCUGCUU | AAGCAGAAGUUUUCACCCU |
| 14 | GUCAGGUGCUGCUCUUUGU | ACAAAGAGCAGCACCUGAC |
| 15 | GUGAUGUGAUUUUGGCCAU | AUGGCCAAAAUCACAUCAC |
| 16 | GCCUGGUGAUGUGAUUUUG | CAAAAUCACAUCACCAGGC |
| 17 | CUGCCGUGGUCUAUAUCGA | UCGAUAUAGACCACGGCAG |
| 18 | CAUCUUUUGUGGGCAGUUA | UAACUGCCCACAAAAGAUG |
| 19 | GGUGAUGUGAUUUUGGCCA | UGGCCAAAAUCACAUCACC |
| 20 | GCUGCUGCCAUCUUUUGUG | CACAAAAGAUGGCAGCAGC |
| 21 | ACCAUCCUGACCUCCUAUU | AAUAGGAGGUCAGGAUGGU |
| 22 | UGGUACAAAAUGCUGAAGA | UCUUCAGCAUUUUGUACCA |
| 23 | GAGGGUGAAAACUUCUGCU | AGCAGAAGUUUUCACCCUC |
| 24 | GCCUCAGAGAACUCUGGAA | UUCCAGAGUUCUCUGAGGC |
| 25 | AGGUCACAGAAUGAAUAGA | UCUAUUCAUUCUGUGACCU |
| 26 | UUGCUGACAUGGGUUUCUU | AAGAAACCCAUGUCAGCAA |
| 27 | CCAUAGUGCAUGGUCUGAU | AUCAGACCAUGCACUAUGG |
| 28 | CUGCUGACGUCAGGAACUU | AAGUUCCUGACGUCAGCAG |
| 29 | CUCUGAAGAAUCACAGAAA | UUUCUGUGAUUCUUCAGAG |
| 30 | CGCUGAGGAUUCAGACUAA | UUAGUCUGAAUCCUCAGCG |
| 31 | CCCGGAGUCAGUACAACUU | AAGUUGUACUGACUCCGGG |
| 32 | ACGCUGAGGAUUCAGACUA | UAGUCUGAAUCCUCAGCGU |
| 33 | GCUCUGAAGAAUCACAGAA | UUCUGUGAUUCUUCAGAGC |
| 34 | AGGGUUAAAUGAACCAGUG | CACUGGUUCAUUUAACCCU |
| 35 | GUGCACUUCUGAAGGACUU | AAGUCCUUCAGAAGUGCAC |
| 36 | CCUCAGAGAACUCUGGAAC | GUUCCAGAGUUCUCUGAGG |
| 37 | GAGGGUUAAAUGAACCAGU | ACUGGUUCAUUUAACCCUC |
| 38 | CCAAGAGUAUGAGGCUCCU | AGGAGCCUCAUACUCUUGG |
| 39 | CAGAAUGAAUAGAUCACCA | UGGUGAUCUAUUCAUUCUG |
| 40 | UCCCAUGCUUGGCUACAGA | UCUGUAGCCAAGCAUGGGA |
| 41 | GGGCUCUGAAGAAUCACAG | CUGUGAUUCUUCAGAGCCC |
| 42 | CUCCUGGGCUCUGAAGAAU | AUUCUUCAGAGCCCAGGAG |
| 43 | GACUAAGUUUGGAAACUCU | AGAGUUUCCAAACUUAGUC |
| 44 | GCACUGCAAAUAACCCAUC | GAUGGGUUAUUUGCAGUGC |
| 45 | ACUGCAAAUAACCCAUCUU | AAGAUGGGUUAUUUGCAGU |
| 46 | GGAUGCCUCAGUGUUAAAA | UUUUAACACUGAGGCAUCC |
| 47 | CACUGCAAAUAACCCAUCU | AGAUGGGUUAUUUGCAGUG |
| 48 | GGGCAAAAAUACAGUCCAA | UUGGACUGUAUUUUUGCCC |
| 49 | UGAUAAGUAACCCUGUAAU | AUUACAGGGUUACUUAUCA |
| 50 | GGAGUAUCAUUGUUUUUGU | ACAAAAACAAUGAUACUCC |
| 51 | GCCUCAUUGAAUUCGCCUA | UAGGCGAAUUCAAUGAGGC |
| 52 | GCAGCUGUCACCAUGUGAU | AUCACAUGGUGACAGCUGC |
| 53 | GGCAAAAAUACAGUCCAAU | AUUGGACUGUAUUUUUGCC |
| 54 | CACCAUGUGAUUUAUUCUU | AAGAAUAAAUCACAUGGUG |
| 55 | CGGGACUAAAAGAAAAGAC | GUCUUUUCUUUUAGUCCCG |
| 56 | GGGACUAAAAGAAAAGACA | UGUCUUUUCUUUUAGUCCC |
| 57 | CCGGGACUAAAAGAAAAGA | UCUUUUCUUUUAGUCCCGG |
| 58 | GGGAGUAUCAUUGUUUUUG | CAAAAACAAUGAUACUCCC |
| 59 | CUCAUUGAAUUCGCCUACA | UGUAGGCGAAUUCAAUGAG |
| 60 | CAUCUCAAAAGAAGUCCAA | UUGGACUUCUUUUGAGAUG |
| 61 | GUGUUAAAAUGACAUCUCA | UGAGAUGUCAUUUUAACAC |
| 62 | CUCAGUGUUAAAAUGACAU | AUGUCAUUUUAACACUGAG |
| 63 | CCUCAGUGUUAAAAUGACA | UGUCAUUUUAACACUGAGG |
| 64 | CCUUAAUUCAGCUGAGUGU | ACACUCAGCUGAAUUAAGG |
| 65 | CCCGGGAGUACAUCUACAU | AUGUAGAUGUACUCCCGGG |
| 66 | CCUCAUUGAAUUCGCCUAC | GUAGGCGAAUUCAAUGAGG |
| 67 | ACCGGGACUAAAAGAAAAG | CUUUUCUUUUAGUCCCGGU |
| 68 | CCUCAAUCGUCUCCUUUAU | AUAAAGGAGACGAUUGAGG |
| 69 | CUGUCUUCAAGGCCAUGUU | AACAUGGCCUUGAAGACAG |
| 70 | ACGUCACACUGCAGGUCAA | UUGACCUGCAGUGUGACGU |
| 71 | AACCGGGACUAAAAGAAAA | UUUUCUUUUAGUCCCGGUU |
| 72 | UGAGGCACUUUUGUUUCUU | AAGAAACAAAAGUGCCUCA |
| 73 | AGAGGAACGAGUGGCGAAU | AUUCGCCACUCGUUCCUCU |
| 74 | CAGUGUUAAAAUGACAUCU | AGAUGUCAUUUUAACACUG |
| 75 | AGCGCUACGAUGUGGAAAC | GUUUCCACAUCGUAGCGCU |
| 76 | ACAGUGUGGAGAGGUAUGA | UCAUACCUCUCCACACUGU |
| 77 | GGUGUCCAUUGAGGGUAUC | GAUACCCUCAAUGGACACC |
| 78 | GAGGCACUUUUGUUUCUUG | CAAGAAACAAAAGUGCCUC |
| 79 | CCUUUGGCAUCAUGAACGA | UCGUUCAUGAUGCCAAAGG |
| 80 | UCCUGCACAACUGUAUCUA | UAGAUACAGUUGUGCAGGA |
| 81 | AGGUGGUGGUGUUGCUUAU | AUAAGCAACACCACCACCU |
| 82 | GCUGUCACCAUGUGAUUUA | UAAAUCACAUGGUGACAGC |
| 83 | GCCUCAGUGUUAAAAUGAC | GUCAUUUUAACACUGAGGC |
| 84 | UGCAUCAACUGGGUCAAGU | ACUUGACCCAGUUGAUGCA |
| 85 | UGGUGGUGUUGCUUAUCUU | AAGAUAAGCAACACCACCA |
| 86 | UGGACAGUUAUUUUGUUGA | UCAACAAAAUAACUGUCCA |
| 87 | UUUGUUUCUUGGGCAAAAA | UUUUUGCCCAAGAAACAAA |
| 88 | GCAAUGAACACCAUCCGAA | UUCGGAUGGUGUUCAUUGC |
| 89 | CCAAGGAAAAUAAAGAACA | UGUUCUUUAUUUUCCUUGG |
| 90 | GUCCUGCACAACUGUAUCU | AGAUACAGUUGUGCAGGAC |
| 91 | UGCCUUAUAACCUGCCUUU | AAAGGCAGGUUAUAAGGCA |
| 92 | GUGCCUUAUAACCUGCCUU | AAGGCAGGUUAUAAGGCAC |
| 93 | GGGAAUUUCUGGUGACAUA | UAUGUCACCAGAAAUUCCC |
| 94 | CCAUGAUAUAAUCUGAAAG | CUUUCAGAUUAUAUCAUGG |
| 95 | GAGAGUCAUUGUUUGCAAU | AUUGCAAACAAUGACUCUC |
| 96 | GAAAAUGGCAGACAAUUUU | AAAAUUGUCUGCCAUUUUC |
| 97 | AGCGGAAAAUGGCAGACAA | UUGUCUGCCAUUUUCCGCU |
| 98 | GGGUUAAAAAACUCAAUGA | UCAUUGAGUUUUUUAACCC |
| 99 | CGGGUUAAAAAACUCAAUG | CAUUGAGUUUUUUAACCCG |
| 100 | CAAGGUUGCAGUGAAUGAU | AUCAUUCACUGCAACCUUG |
| 101 | GACCUCACCAGUGCUUCAU | AUGAAGCACUGGUGAGGUC |
| 102 | CUUUAACCCACGCUUCAAU | AUUGAAGCGUGGGUUAAAG |
| 103 | AAGAAAGACAGUCGGUUUU | AAAACCGACUGUCUUUCUU |
| 104 | GAGCGGAAAAUGGCAGACA | UGUCUGCCAUUUUCCGCUC |
| 105 | UGCGUUAUCUGGGUCUGGA | UCCAGACCCAGAUAACGCA |
| 106 | CCCUCUUGUAAGUCAUCUA | UAGAUGACUUACAAGAGGG |
| 107 | CUGGGAAUUUCUGGUGACA | UGUCACCAGAAAUUCCCAG |
| 108 | AGUACAAUCAUCGGGUUAA | UUAACCCGAUGAUUGUACU |
| 109 | GUCAUUGUUUGCAAUACAA | UUGUAUUGCAAACAAUGAC |
| 110 | GGUUUCAUGUUCACUGUGA | UCACAGUGAACAUGAAACC |
| 111 | UGCAAUACAAAGCUGGAUA | UAUCCAGCUUUGUAUUGCA |
| 112 | CACGCUUCAAUGAGAACAA | UUGUUCUCAUUGAAGCGUG |
| 113 | GGGAAGGGAAGAAAGACAG | CUGUCUUUCUUCCCUUCCC |
| 114 | GCUUCAUAUACCAUGAUAU | AUAUCAUGGUAUAUGAAGC |
| 115 | CUUCAAGGUUGCAGUGAAU | AUUCACUGCAACCUUGAAG |
| 116 | CCACGCUUCAAUGAGAACA | UGUUCUCAUUGAAGCGUGG |
| 117 | UCCCUCUUGUAAGUCAUCU | AGAUGACUUACAAGAGGGA |
| 118 | ACAGUCGGUUUUCCCAUUU | AAAUGGGAAAACCGACUGU |
| 119 | ACGCUUCAAUGAGAACAAC | GUUGUUCUCAUUGAAGCGU |
| 120 | AGUCAUUGUUUGCAAUACA | UGUAUUGCAAACAAUGACU |
| 121 | ACCCACGCUUCAAUGAGAA | UUCUCAUUGAAGCGUGGGU |
| 122 | GAGGGAAUGAUGUUGCCUU | AAGGCAACAUCAUUCCCUC |
| 123 | CUCAAUGAAAUCAGCAAAC | GUUUGCUGAUUUCAUUGAG |
| 124 | CCCAUUUGAAAGUGGGAAA | UUUCCCACUUUCAAAUGGG |
| 125 | GCCACUGAUUGUGCCUUAU | AUAAGGCACAAUCAGUGGC |
| 126 | CCUCUUGUAAGUCAUCUAC | GUAGAUGACUUACAAGAGG |
| 127 | CUAAACCUUACAUGUGUAA | UUACACAUGUAAGGUUUAG |
| 128 | GUGCUUCAUAUACCAUGAU | AUCAUGGUAUAUGAAGCAC |
| 129 | CAGUCGGUUUUCCCAUUUG | CAAAUGGGAAAACCGACUG |
| 130 | GGAAACCCAAACCCUCAAG | CUUGAGGGUUUGGGUUUCC |
| 131 | CUCACUUGUUGCAGUACAA | UUGUACUGCAACAAGUGAG |
| 132 | AUGUUGCCUUCCACUUUAA | UUAAAGUGGAAGGCAACAU |
| 133 | CAGCCAACGAGCGGAAAAU | AUUUUCCGCUCGUUGGCUG |
| 134 | CGCUCCAUGAUGCGUUAUC | GAUAACGCAUCAUGGAGCG |
| 135 | UCGGGUUAAAAAACUCAAU | AUUGAGUUUUUUAACCCGA |
| 136 | CCAUUUGAAAGUGGGAAAC | GUUUCCCACUUUCAAAUGG |
| 137 | GGUUUUCCCAUUUGAAAGU | ACUUUCAAAUGGGAAAACC |
| 138 | GAGUCAUUGUUUGCAAUAC | GUAUUGCAAACAAUGACUC |
| 139 | GAGAAUAUUUCACCCUUCA | UGAAGGGUGAAAUAUUCUC |
| 140 | CCGAGUGGAAGGAAAUUUG | CAAAUUUCCUUCCACUCGG |
| 141 | GACAGAAACACUUUUCGAC | GUCGAAAAGUGUUUCUGUC |
| 142 | ACCUGAAAUUUGCUGGAAU | AUUCCAGCAAAUUUCAGGU |
| 143 | CAGAGAGCUUUUUGAUGAU | AUCAUCAAAAAGCUCUCUG |
| 144 | CACAUGCAAUCUAUCUCAU | AUGAGAUAGAUUGCAUGUG |
| 145 | CCGAGGUGAUCAUUUUAAA | UUUAAAAUGAUCACCUCGG |
| 146 | GUGACCACAUCUUUAAAAU | AUUUUAAAGAUGUGGUCAC |

1. A compound having the following structure:

| | |
|---|---|
| 5′ (N)ₓ-Z 3′ | (antisense strand) |
| 3′ Z′-(N′)_{y}-z″ 5′ | (sense strand) |

wherein each of N and N′ is a ribonucleotide, which may be unmodified or modified, or an unconventional moiety;
wherein in each of (N)x and (N′)y each consecutive N or N′ is joined to the next N or N′ by a covalent bond;
wherein Z and Z′ may be present or absent, but if present is independently 1-5 consecutive nucleotides covalently attached at the 3′ terminus of the strand in which it is present;
wherein z″ may be present or absent, but if present is a capping moiety covalently attached at the 5′ terminus of (N′)y;
each of x and y is independently an integer between 18 and 40;
wherein (N)x comprises 2′OMe sugar modified and unmodified ribonucleotides, wherein N at the 3′ terminus of (N)x is a 2′OMe sugar modified ribonucleotide, (N)x comprises at least five alternating modified ribonucleotides beginning at the 3′ terminus and at least nine 2′OMe sugar modified ribonucleotides in total and each remaining N is an unmodified ribonucleotide;
wherein in (N′)y comprises at least one unconventional moiety, which unconventional moiety is selected from an abasic ribose moiety, an abasic deoxyribose moiety, a modified or unmodified deoxyribonucleotide, a mirror nucleotide, and a nucleotide joined to an adjacent nucleotide by a 2′-5′ internucleotide phosphate bond;
wherein the sequence of (N′)_{y} is a sequence having complementarity to (N)x; and wherein the sequence of (N)ₓ comprises an antisense sequence having complementarity to about 18 to about 40 consecutive ribonucleotides in an mRNA the sequence of which is set forth in SEQ ID NO:4.

2. The compound according to claim 1, wherein x=y=19.

3. The compound according to claim 2, wherein (N)x comprises a 2′-OMe sugar modified ribonucleotide in the first, third, fifth, seventh, ninth, eleventh, thirteenth, fifteenth, seventeenth and nineteenth positions.

4. The compound according to claim 2, wherein (N)x comprises a 2′-OMe sugar modified ribonucleotide in the second, fourth, sixth, eighth, eleventh, thirteenth, fifteenth, seventeenth and nineteenth positions.

5. The compound according to claim 3, wherein (N′)y comprises at least one 2′OMe sugar modified ribonucleotide.

6. The compound according to claim 3, wherein (N′)y comprises at least one DNA nucleotide.

7. The compound according to claim 1, wherein (N′)y comprises at least one unconventional moiety.

8. The compound according to claim 7, wherein the unconventional moiety is an L-DNA moiety.

9. The compound according to claim 8, wherein (N′)y comprises an L-DNA moiety in the 3′ penultimate position.

10. The compound according to claim 9, wherein (N′)y further comprises an L-DNA moiety in the position 5′ and adjacent to the 3′ penultimate L-DNA.

11. The compound according to claim 7, wherein the unconventional moiety is a 2′-5′ linked ribonucleotide.

12. The compound according to claim 11, wherein (N′)y comprises two adjacent 2′-5′ linked ribonucleotides in the 3′ penultimate and 3′ terminal positions.

13. The compound according to claim 12, wherein (N′)y further comprises a 2′-5′ ribonucleotide in the position 5′ and adjacent to the 3′ penultimate 2′-5′ linked ribonucleotide.

14. The compound according to claim 1, wherein (N)x and (N′)y are unphosphorylated or phosphorylated at the 5′ and 3′ termini.

15. The compound according to claim 14, wherein (N)x is unphosphorylated at the 3′ termini.

16. The compound according to claim 1, wherein z″ is present.

17. The compound according to claim 1, wherein (N)x comprises any one of the antisense sequences set forth in any one of SEQ ID Nos: 5571-6391 or 6892-7391.

18. The compound according to claim 17, wherein x=y=19; wherein (N)x comprises a 2′-OMe sugar modified ribonucleotide in the second, fourth, sixth, eighth, eleventh, thirteenth, fifteenth, seventeenth and nineteenth positions; wherein (N′)y comprises unmodified ribonucleotides and an L-DNA at position 17 or 18 or both 17 and 18; and wherein z″ is present and is an abasic moiety.

19. The compound according to claim 17, wherein x=y=19; wherein (N)x comprises a 2′-OMe sugar modified ribonucleotide in the second, fourth, sixth, eighth, eleventh, thirteenth, fifteenth, seventeenth and nineteenth positions; wherein (N′)y comprises unmodified ribonucleotides and at least one 2′-5′ linked ribonucleotide at position 17, 18 or 19.

20. A pharmaceutical composition comprising the compound according to claim 1 and a pharmaceutically acceptable carrier.

21. (canceled)

22. A method for treating a subject suffering from a disease or condition selected from a neurodegenerative disease, a respiratory disorder, an eye disease, a microvascular disorder, a hearing disorder, ischemia reperfusion injury or spinal cord injury or disease or in need of neuroprotection of the optic nerve which comprises administering to the subject the compound of claim 1 in an amount effective to treat the subject.

23-37. (canceled)

38. The composition according to claim 20 formulated for intranasal administration, for systemic administration, for intratracheal administration, or for topical non-invasive administration as an eye drop.

39. A compound having the following structure:

| | |
|---|---|
| 5′ (N)ₓ-Z 3′ | (antisense strand) |
| 3′ Z′-(N′)_{y}-z″ 5′ | (sense strand) |

wherein each of N and N′ is a ribonucleotide which may be unmodified or modified, or an unconventional moiety;
wherein each of (N)x and (N′)y is an oligonucleotide in which each consecutive N or N′ is joined to the next N or N′ by a covalent bond;
wherein Z and Z′ may be present or absent, but if present is independently 1-5 consecutive nucleotides covalently attached at the 3′ terminus of the strand in which it is present;
wherein z″ may be present or absent, but if present is a capping moiety covalently attached at the 5′ terminus of (N′)y;
each of x and y is independently an integer between 18 and 40;
wherein (N)x comprises 2′OMe sugar modified and unmodified ribonucleotides, wherein N at the 3′ terminus of (N)x is a 2′OMe sugar modified ribonucleotide, (N)x comprises at least five alternating modified ribonucleotides beginning at the 3′ terminus and at least nine 2′OMe sugar modified ribonucleotides in total and each remaining N is an unmodified ribonucleotide;
wherein in (N′)y comprises at least one unconventional moiety, which unconventional moiety is selected from an abasic ribose moiety, an abasic deoxyribose moiety, a modified or unmodified deoxyribonucleotide, a mirror nucleotide, and a nucleotide joined to an adjacent nucleotide by a 2′-5′ internucleotide phosphate bond;
wherein the sequence of (N′)_{y} is a sequence having complementarity to (N)x; and wherein the sequence of (N)ₓ comprises an antisense sequence having complementarity to about 18 to about 40 consecutive ribonucleotides in an mRNA the sequence of which is set forth in any one of SEQ ID NO:1-3 or 5-23.

40-41. (canceled)

The application's sequence listing, which the Patent Office published only in electronic form, follows.

SEQUENCE LISTING (23157 sequences)

SEQ ID NO: 1 - RNA, 2416 nt, Homo sapiens
ugagugggcagagcugacccggugcgggugggagucagggcgcccggaaaacccggcucuggguagcagaccccgcccgggcuggcucggcgccgggccuucgggcuuccacucagucuuugacccucgguccucgcucagcggcccggcaggccgcacaacuguaaccgcugccccggccgccgcccgcuccuucucgggccggcgggcacagagcgcagcgcggcggggccggcggcauggcuguguccuggaggagcuggcucgccaacgaagggguuaaacaccucugccuguucaucuggcucuccaugaauguccugcuuuucuggaaaaccuucuugcuguauaaccaagggccagaguaucacuaccuccaccagauguuggggcuaggauugugucuaagcagagccucagcaucuguucuuaaccucaacugcagccuuauccuuuuacccaugugccgaacacucuuggcuuaccuccgaggaucacagaagguuccaagcaggagaaccaggagauuguuggauaaaagcagaacauuccauauuaccugugguguuacuaucuguauuuucucaggcgugcauguggcugcccaucuggugaaugcccucaacuucucagugaauuacagugaagacuuuguugaacugaaugcagcaagauaccgagaugaggauccuagaaaacuucucuucacaacuguuccuggccugacaggggucugcauggugguggugcuauuccucaugaucacagccucuacauaugcaauaagaguuucuaacuaugauaucuucugguauacucauaaccucuucuuugucuucuacaugcugcugacguugcauguuucaggagggcugcugaaguaucaaacuaauuuagauacccacccucccggcugcaucagucuuaaccgaaccagcucucagaauauuuccuuaccagaguauuucucagaacauuuucaugaaccuuucccugaaggauuuucaaaaccggcagaguuuacccagcacaaauuugugaagauuuguauggaagagcccagauuccaagcuaauuuuccacagacuuggcuuuggauuucuggaccuuugugccuguacugugccgaaagacuuuacagguauauccggagcaauaagccagucaccaucauuucggucauaagucaucccucagaugucauggaaauccgaauggucaaagaaaauuuuaaagcaagaccuggucaguauauuacucuacauugucccaguguaucugcauuagaaaaucauccauuuacccucacaauguguccaacugaaaccaaagcaacauuugggguucaucuuaaaauaguaggagacuggacagaacgauuucgagauuuacuacugccuccaucuagucaagacuccgaaauucugcccuucauucaaucuagaaauuaucccaagcuguauauugaugguccuuuuggaaguccauuugaggaaucacugaacuaugaggucagccucugcguggcuggaggcauuggaguaacuccauuugcaucaauacucaacacccuguuggaugacuggaaaccauacaagcuuagaagacuauacuuuauuuggguaugcagagauauccaguccuuccguugguuugcagauuuacucuguauguugcauaacaaguuuuggcaagagaacagaccugacuaugucaacauccagcuguaccucagucaaacagaugggauacagaagauaauuggagaaaaauaucaugcacugaauucaagacuguuuauaggacguccucgguggaaacuuuuguuugaugaaauagcaaaauauaacagaggaaaaacaguugguguuuucuguuguggacccaauucacuauccaagacucuucauaaacugaguaaccagaacaacucauaugggacaagauuugaauacaauaaagagucuuucagcugaaaacuuuugccaugaagcaggacucuaaagaaggaaugagugcaauuucuaagacuuugaaacucagcggaaucaaucagcuguguuaugccaaagaauaguaagguuuucuuauuuaugauuauuuaaaauggaaaugugagaauguggcaagaugaccgucacauuacauguuuaaucuggaaaccaaagagacccugaagaauauuugaugugaugauucacuuuucaguucucaaauuaaaagaaaacuguuagaugcacacuguugauuuucaugguggauucaagaacucccuagugaggagcugaacuugcucaaucuaaggcugauugucguguuccucuuuaaauuguuuuugguugaacaaaugcaagauugaacaaaauuaaaaauucauugaagcugaaaaaaaaaaaaaaaaaaaaaaaaaaaaaaa

SEQ ID NO: 2 - RNA, 2529 nt, Homo sapiens
gcugauagcacaguucuguccagagaaggaaggcagaauaaacuuauucauucccaggaacucuugggguagguguguguuuuucacaucuuaaaggcucacagacccugcgcuggacaaauguuccauuccugaaggaccucuccagaauccggauugcugaaucuucccuguugccuagaagggcuccaaaccaccucuugacaaugggaaacugggugguuaaccacugguuuucaguuuuguuucugguuguuugguuagggcugaauguuuuccuguuuguggaugccuuccugaaauaugagaaggccgacaaauacuacuacacaagaaaaauccuugggucaacauuggccugugcccgagcgucugcucucugcuugaauuuuaacagcacgcugauccugcuuccugugugucgcaaucugcuguccuuccugaggggcaccugcucauuuugcagccgcacacugagaaagcaauuggaucacaaccucaccuuccacaagcugguggccuauaugaucugccuacauacagcuauucacaucauugcacaccuguuuaacuuugacugcuauagcagaagccgacaggccacagauggcucccuugccuccauucucuccagccuaucucaugaugagaaaaagggggguucuuggcuaaaucccauccagucccgaaacacgacaguggaguaugugacauucaccagcauugcuggucucacuggagugaucaugacaauagccuugauucucaugguaacuucagcuacugaguucauccggaggaguuauuuugaagucuucugguauacucaccaccuuuuuaucuucuauauccuuggcuuagggauucacggcauugguggaauuguccggggucaaacagaggagagcaugaaugagagucauccucgcaagugugcagagucuuuugagaugugggaugaucgugacucccacuguaggcgcccuaaguuugaagggcaucccccugagucuuggaaguggauccuugcaccggucauucuuuauaucugugaaaggauccuccgguuuuaccgcucccagcagaagguugugauuaccaagguuguuaugcacccauccaaaguuuuggaauugcagaugaacaagcguggcuucagcauggaaguggggcaguauaucuuuguuaauugccccucaaucucucuccuggaauggcauccuuuuacuuugaccucugcuccagaggaagauuucuucuccauucauauccgagcagcaggggacuggacagaaaaucucauaagggcuuucgaacaacaauauucaccaauucccaggauugaaguggauggucccuuuggcacagccagugaggauguuuuccaguaugaaguggcugugcugguuggagcaggaauuggggucacccccuuugcuucuaucuugaaauccaucugguacaaauuccagugugcagaccacaaccucaaaacaaaaaagaucuauuucuacuggaucugcagggagacaggugccuuuuccugguucaacaaccuguugacuucccuggaacaggagauggaggaauuaggcaaaguggguuuucuaaacuaccgucucuuccucaccggaugggacagcaauauuguuggucaugcagcauuaaacuuugacaaggccacugacaucgugacaggucugaaacagaaaaccuccuuugggagaccaaugugggacaaugaguuuucuacaauagcuaccucccaccccaagucuguagugggaguuuucuuauguggcccucggacuuuggcaaagagccugcgcaaaugcugucaccgauauuccagucuggauccuagaaagguucaauucuacuucaacaaagaaaauuuuugaguuauaggaauaaggacgguaaucugcauuuugucucuuuguaucuucaguaauuuacuuggucucgucagguuugagcagucacuuuaggauaagaaugugccucucaagccuugacucccugguauucuuuuuuugauugcauucaacuucguuacuugagcuucagcaacuuaagaacuucugaaguucuuaaaguucugaaguucuuaaagcccauggauccuuucucagaaaaauaacuguaaaucuuucuggacagccaugacuguagcaaggcuugauagcagagguuuggugguucagaguuauacaacuaaucccaggugauuuuaucaauuccaguguuaccaucuccugaguuuugguuuguaaucuuuugucccucccacccccacagaagauuucuaaguagggugacuuuuuaaauaaaaauuuauugaauaauuaaugauaaaacauaauaauaaacauaaauaauaaacaaaauuaccgagaaccccauccccauauaacaccaacaguguacauguuuacugucacuuuugauauggucuuauccagugugaacagcaauuuauucuuauuuuugcucaucaaaaaauaaaggauuuucuucuucacuuga

SEQ ID NO: 3 - RNA, 2382 nt, Homo sapiens
gcugauagcacaguucuguccagagaaggaaggcagaauaaacuuauucauucccaggaacucuugggguagguguguguuuuucacaucuuaaaggcucacagacccugcgcuggacaaauguuccauuccugaaggaccucuccagaauccggauugcugaaucuucccuguugccuagaagggcuccaaaccaccucuugacaaugggaaacugggugguuaaccacugguuuucaguuuuguuucugguuguuugguuagggcugaauguuuuccuguuuguggaugccuuccugaaauaugagaaggccgacaaauacuacuacacaagaaaaauccuugggucaacauuggccugugcccgagcgucugcucucugcuugaauuuuaacagcacgcugauccugcuuccugugugucgcaaucugcuguccuuccugaggggcaccugcucauuuugcagccgcacacugagaaagcaauuggaucacaaccucaccuuccacaagcugguggccuauaugaucugccuacauacagcuauucacaucauugcacaccuguuuaacuuugacugcuauagcagaagccgacaggccacagauggcucccuugccuccauucucuccagccuaucucaugaugagaaaaagggggguucuuggcuaaaucccauccagucccgaaacacgacaguggaguaugugacauucaccagcauugcuggucucacuggagugaucaugacaauagccuugauucucaugguaacuucagcuacugaguucauccggaggaguuauuuugaagucuucugguauacucaccaccuuuuuaucuucuauauccuuggcuuagggauucacggcauugguggaauuguccggggucaaacagaggagagcaugaaugagagucauccucgcaagugugcagagucuuuugagaugugggaugaucgugacucccacuguaggcgcccuaaguuugaagggcaucccccugagucuuggaaguggauccuugcaccggucauucuuuauaucugugaaaggauccuccgguuuuaccgcucccagcagaagguugugauuaccaagguuguuaugcacccauccaaaguuuuggaauugcagaugaacaagcguggcuucagcauggaaguggggcaguauaucuuuguuaauugccccucaaucucucuccuggaauggcauccuuuuacuuugaccucugcuccagaggaagauuucuucuccauucauauccgagcagcaggggacuggacagaaaaucucauaagggcuuucgaacaacaauauucaccaauucccaggauugaaguggauggucccuuuggcacagccagugaggauguuuuccaguaugaaguggcugugcugguuggagcaggaauuggggucacccccuuugcuucuaucuugaaauccaucugguacaaauuccagugugcagaccacaaccucaaaacaaaaaagguuggucaugcagcauuaaacuuugacaaggccacugacaucgugacaggucugaaacagaaaaccuccuuugggagaccaaugugggacaaugaguuuucuacaauagcuaccucccaccccaagucuguagugggaguuuucuuauguggcccucggacuuuggcaaagagccugcgcaaaugcugucaccgauauuccagucuggauccuagaaagguucaauucuacuucaacaaagaaaauuuuugaguuauaggaauaaggacgguaaucugcauuuugucucuuuguaucuucaguaauuuacuuggucucgucagguuugagcagucacuuuaggauaagaaugugccucucaagccuugacucccugguauucuuuuuuugauugcauucaacuucguuacuugagcuucagcaacuuaagaacuucugaaguucuuaaaguucugaaguucuuaaagcccauggauccuuucucagaaaaauaacuguaaaucuuucuggacagccaugacuguagcaaggcuugauagcagagguuuggugguucagaguuauacaacuaaucccaggugauuuuaucaauuccaguguuaccaucuccugaguuuugguuuguaaucuuuugucccucccacccccacagaagauuucuaaguagggugacuuuuuaaauaaaaauuuauugaauaauuaaugauaaaacauaauaauaaacauaaauaauaaacaaaauuaccgagaaccccauccccauauaacaccaacaguguacauguuuacugucacuuuugauauggucuuauccagugugaacagcaauuuauucuuauuuuugcucaucaaaaaauaaaggauuuucuucuucacuuga

SEQ ID NO: 4 - RNA, 4266 nt, Homo sapiens
cuuccucugccaccauggggaacugggcugugaaugaggggcucuccauuuuugucauucugguuuggcugggguugaacgucuuccucuuugucugguauuaccggguuuaugauauuccaccuaaguucuuuuacacaagaaaacuucuugggucagcacuggcacuggccagggccccugcagccugccugaauuucaacugcaugcugauucucuugccagucugucgaaaucugcuguccuuccucagggguuccagugcgugcugcucaacaagaguucgaagacaacuggacaggaaucucaccuuucauaaaaugguggcauggaugauugcacuucacucugcgauucacaccauugcacaucuauuuaauguggaauggugugugaaugcccgagucaauaauucugauccuuauucaguagcacucucugaacuuggagacaggcaaaaugaaaguuaucucaauuuugcucgaaagagaauaaagaacccugaaggaggccuguaccuggcugugacccuguuggcaggcaucacuggaguugucaucacgcugugccucauauuaauuaucacuuccuccaccaaaaccauccggaggucuuacuuugaagucuuuugguacacacaucaucucuuugugaucuucuucauuggccuugccauccauggagcugaacgaauuguacgugggcagaccgcagagaguuuggcugugcauaauauaacaguuugugaacaaaaaaucucagaauggggaaaaauaaaggaaugcccaaucccucaguuugcuggaaacccuccuaugacuuggaaauggauagugggucccauguuucuguaucucugugagagguuggugcgguuuuggcgaucucaacagaagguggucaucaccaagguggucacucacccuuucaaaaccaucgagcuacagaugaagaagaagggguucaaaauggaagugggacaauacauuuuugucaagugcccaaagguguccaagcuggaguggcacccuuuuacacugacauccgccccugaggaagacuucuuuaguauccauauccgcaucguuggggacuggacagaggggcuguucaaugcuuguggcugugauaagcaggaguuucaagaugcguggaaacuaccuaagauagcgguugaugggcccuuuggcacugccagugaagauguguucagcuaugagguggugauguuagugggagcagggauuggggucacacccuucgcauccauucucaagucagucugguacaaauauugcaauaacgccaccaaucugaagcucaaaaagaucuacuucuacuggcugugccgggacacacaugccuuugagugguuugcagaucugcugcaacugcuggagagccagaugcaggaaaggaacaaugccggcuuccucagcuacaacaucuaccucacuggcugggaugagucucaggccaaucacuuugcugugcaccaugaugaggagaaagaugugaucacaggccugaaacaaaagacuuuguauggacggcccaacugggauaaugaauucaagacaauugcaagucaacacccuaauaccagaauaggaguuuuccucuguggaccugaagccuuggcugaaacccugaguaaacaaagcaucuccaacucugagucuggcccucggggagugcauuucauuuucaacaaggaaaacuucuaacuugucucuuccaugaggaaauaaauguggguugugcugccaaaugcucaaauaaugcuaauugauaauauaaauacccccugcuuaaaaauggacaaaaagaaacuauaauguaaugguuuucccuuaaaggaaugucaaagauuguuugauagugauaaguuacauuuauguggagcucuaugguuuugagagcacuuuuacaaacauuauuucauuuuuuuccucucaguaaugucaguggaaguuagggaaaagauucuuggacucaauuuuagaaucaaaagggaaaggaucaaaagguucaguaacuucccuaagauuaugaaacugugaccagaucuagcccaucuuacuccagguuugauacucuuuccacaauacugagcugccucagaauccucaaaaucaguuuuuauauuccccaaaagaagaaggaaaccaaggaguagcuauauauuucuacuuugugucauuuuugccaucauuauuaucauacugaaggaaauuuuccagaucauuaggacauaauacauguugagagugucucaacacuuauuagugacaguauugacaucugagcauacuccaguuuacuaauacagcaggguaacugggccagauguucuuucuacagaagaauauuggauugauuggaguuaauguaauacucaucauuuaccacugugcuuggcagagagcggauacucaaguaaguuuuguuaaaugaaugaaugaauuuagaaccacacaaugccaagauagaauuaauuuaaagccuuaaacaaaauuuaucuaaagaaauaacuucuauuacugucauagaccaaaggaaucugauucucccuagggucaagaacaggcuaaggauacuaaccaauaggauugccugaaggguucugcacauucuuauuugaagcaugaaaaaagaggguuggagguggagaauuaaccuccugccaugacucuggcucaucuaguccugcuccuugugcuauaaaauaaaugcagacuaauuuccugcccaaaguggucuucuccagcuagcccuuaugaauauugaacuuaggaauugugacaaauauguaucugauauggucauuuguuuuaaauaacacccaccccuuauuuuccguaaauacacacacaaaauggaucgcaucugugugacuaaugguuuauuuguauuauaucaucaucaucauccuaaaauuaacaacccagaaacaaaaaucucuauacagagaucaaauucacacucaauaguauguucugaauauauguucaagagagagucucuaaaucacuguuaguguggccaagagcaggguuuucuuuuuguucuuagaacugcucccauuucugggaacuaaaaccaguuuuauuugccccaccccuuggagccacaaauguuuagaacucuucaacuucgguaaugaggaagaaggagaaagagcugggggaagggcagaagacugguuuaggaggaaaaggaaauaaggagaaaagagaaugggagagugagagaaaauaaaaaaggcaaaagggagagagaggggaagggggucucauauuggucauucccugccccagauuucuuaaaguuugauauguauagaauauaauugaaggagguauacacauacugauguuguuuugauuaucuaugguauugaaucuuuuaaaaucuggucacaaauuuugaugcugagggggauuauucaagggacuaggaugaacuaaauaagaacucaguuguucuuugucauacuacuauuccuuucgucucccagaauccucagggcacugaggguaggucugacaaauaaggccugcugugcgaauauagccuuucugaaauguaccaggaugguuucugcuuagagacacuuagguccagccuguucacacugcaccucagguaucaauucaucuauucaacagauauuuauuguguuauuacuaugagucaggcucuguuuauuguuucaauucuuuacaccaaaguaugaacuggagaggguaccucaguuauaaggagucugagaauauuggcccuuucuaaccuaugugcauaauuaaaaccagcuucauuuguugcuccgagaguguuucuccaagguuuucuaucuucaaaaccaacuaaguuaugaaaguagagagaucugcccuguguuauccaguuaugagauaaaaaaugaauauaagagugcuugucauuauaaaaguuuccuuuuuaucucucaagccaccagcugccagccaccacgagccagcugccagccuagcuuuuuuuuuuuuuuuuuuuuuagcacuuaguauuuagcauuuauuaacagguacucuaagaaugaugaagcauuguuuuuaaucuuaagacuaugaagguuuuucuuaguucuucugcuuuugcaauuguguuugugaaauuugaauacuugcaggcuuuguaugugaauaauucuagcgggggaccugggagauaauucuacggggaauucuuaaaacugugcucaacuauuaaaaugaaugagcuuuc

SEQ ID NO: 5 - RNA, 2582 nt, Homo sapiens
guugcugggugucccagggccugaggcaggacgguacuccgcugacaccuucccuuucggccuugagguucccagccugguggccccaggacguuccggucgcauggcagagugcuacggacgacgccuaugaagcccuuaguccuucuaguugcgcuuuugcuauggccuucgucugugccggcuuauccgaggucucaauccauugcgcccaggcugguaugcagucauguuguaucuggaauugguggguucuuggucucacugacuucaagaaugaagccgcagacccucgugcaccaugagugccgaggaggaugccagguggcuccggugggugacucagcaguuuaagaccauugcaggagaagauggggagaucagccugcaagaauucaaagcagcucugcaugugaaagaguccuucuuugcagagcgauucuuugcccuauuugacuccgauagaaguggcaccaucacccuccaggagcugcaggaggcacugacccugcucauccauggcagccccauggacaaacucaaauuccucuuccagguguaugacaucgaugugugugcacggcagggggcgucugcagguacagaguggggugcuggggcaggcccgcacugggcuucauccccacucgggacaggcaguggcuccauugacccggaugagcugcgcacugugcugcagucgugucugcgcgagagcgccaucucgcugccugacgagaagcuggaccagcugacgcuggcgcucuucgaaucggccgacgcggacggcaacggggccaucaccuucgaggagcuccgggacgagcugcagcgcuuccccggagucauggagaaccugaccaucagcgcugcccacuggcugacggcccccgccccccgcccacgcccgcgccggccgcgccagcugacccgcgccuacuggcacaaccaccgcagccagcuguucugccuggccaccuaugcaggccuccacgugcugcucuucgggcuggcggccagcgcgcaccgggaccucggcgccagcgucaugguggccaagggcuguggccagugccucaacuucgacugcagcuucaucgcggugcugaugcucagacgcugccucaccuggcugcgggccacguggcuggcucaaguccuaccacuggaccagaacauccaguuccaccagcuuaugggcuacgugguaguggggcugucccucgugcacacuguggcucacacugugaacuuuguacuccaggcucaggcggaggccagcccuuuccaguucugggagcugcugcucaccacgaggccuggcauuggcuggguacacgguucggccuccccgacaggugucgcucugcugcugcugcuccuccucauguucaucugcuccaguuccugcauccgcaggaguggccacuuugagguguucuauuggacucaccuguccuaccuccucguguggcuucugcucaucuuucaugggcccaacuucuggaaguggcugcuggugccuggaaucuuguuuuuccuggagaaggccaucggacuggcagugucccgcauggcagccgugugcaucauggaagucaaccuccuccccuccaaggucacucaucuccucaucaagcggcccccuuuuuuucacuauagaccuggugacuacuuguaucugaacauccccaccauugcucgcuaugaguggcaccccuucaccaucagcagugcuccugagcagaaagacacuaucuggcugcacauucggucccaaggccaguggacaaacaggcuguaugaguccuucaaggcaucagacccacugggccgugguucuaagaggcugucgaggagugugacaaugagaaagagucaaaggucguccaagggcucugagauacuuuuggagaaacacaaauucuguaacaucaagugcuacaucgaugggccuuaugggacccccacccgcaggaucuuugccucugagcaugccgugcucaucggggcaggcaucggcaucacccccuuugcuuccauucugcagaguaucauguacaggcaccagaaaagaaagcauacuugccccagcugccagcacuccuggaucgaagguguccaagacaacaugaagcuccauaagguggacuuuaucuggaucaacagagaccagcggucuuucgagugguuugugagccugcugacuaaacuggagauggaccaggccgaggaggcucaauacggccgcuuccuggagcugcauauguacaugacaucugcacugggcaagaaugacaugaaggccauuggccugcagauggcccuugaccuccuggccaacaaggagaagaaagacuccaucacggggcugcagacgcgcacccagccugggcggccugacuggagcaagguguuccagaaaguggcugcugagaagaagggcaaggugcaggucuucuucuguggcuccccagcucuggccaaggugcugaagggccauugugagaaguucggcuucagauuuuuccaagagaauuucuagccucaccucuccaagcucugccccaaguccacaccau

SEQ ID NO: 6 - RNA, 6428 nt, Homo sapiens
ggucuguccugagccgacaccugcacaguggcgagaccaaggacccagagagaaaggugagagugcagccggggaggcugaggaucggcggagcuggaagagugagggugaaggcaagaaguagagcacagaagcaaagauuuuaagaggaaagaagacaucugaacccaacaccacccuaaaccacaggcugcaggguuggcaugcuccgugcaagaccagaggcacugaugcuccugggagcucuucugacuggaucccuggguccaucgggcaaucaggacgcacucucacugcccugggaagugcagcgcuaugacggcugguuuaacaaccugaggcaccacgagcguggugcuguuggcugccgguugcagcgccgcguaccagccaauuacgccgacgguguguaucaggcucuggaggagccgcagcugcccaacccgcgccggcucagcaacgcagccacgcggggcauagccggccugccgucgcuccacaaccgcaccguacugggggucuucuuuggcuaccauguucuuuccgacguggugagcguggaaacgcccgguugccccgccgaguuccucaacauccgcaucccaccuggagaccccguguucgaccccgaccagcgcggggacguggugcugcccuuccagaggagccgcugggaccccgagaccggacggagucccagcaacccccgggaccuggccaaccaggugacgggcuggcuggacggcagcgccaucuauggcuccucgcacuccuggagcgacgcgcugcggagcuucucggggggacagcuggcgucggggcccgaccccgcuuucccccgagacucgcagaacccccugcucaugugggcggcgcccgaccccgccaccgggcagaacgggccccgggggcuguacgccuucggggcagagagagggaaccgggaacccuuccugcaggcgcugggccugcucugguuccgcuaccacaaccugugggcgcagaggcuggcccgccagcacccagacugggaggacgaggagcuguuccagcacgcacgcaagagggucaucgccaccuaccagaacaucgcuguguaugaguggcugcccagcuuccugcagaaaacacucccggaguauacaggauaccguccuuuccuagaccccagcaucuccccggaauuugugguggccucugagcaguucuucucuaccauggugcccccuggugucuacaugagaaaugccagcugucauuuccggaagguccugaacaaggguuuucaaagcucccaagcucucagggucugcaacaacuacuggauucgggagaaccccaaucugaacaguacccaggaggugaaugagcugcugcugggaauggccucccagauuucggaguuggaggacaacauagugguugaagaucugagggauuacuggccuggcccuggcaaauucucccguacagacuauguggccagcagcauccaacguggccgagauauggggcugcccagcuauagccaggcccugcuggccuuugggcuggacaucccaaggaacuggagugaucucaacccuaauguggacccccaggugcuggaggccacagcugcccuguacaaccaggaccuaucccagcuagagcugcuccuuggggggcuccuggagagccauggggacccuggaccccuguucagugccauuguccucgaccaguuuguacggcugcgggauggugaccgcuacugguuugagaacaccaggaaugggcuguucuccaagaaggagauugaagacauccgaaauaccacccugcgggacgugcuggucgcuguuaucaacauugaccccagugcccugcagcccaaugucuuugucuggcauaaaggugcacccugcccucaaccuaagcagcucacaacugacggccugccccagugugcaccccugacugugcuugacuucuuugaaggcagcagcccugguuuugccaucaccaucauugcucucugcugccuucccuuagugagucugcuucucucuggagugguggccuauuuccggggccgagaacacaagaagcuacaaaagaaacucaaagagagcgugaagaaggaagcagccaaagauggagugccagcgauggaguggccaggccccaaggagaggagcagucccaucaucauccagcugcugucagacaggugucugcagguccugaacaggcaucucacugugcuccgugugguccagcugcagccucugcagcaggucaaccucauccuguccaacaaccgaggaugccgcacccugcugcucaagaucccuaaggaguaugaccuggugcugcuguuuaguucugaagaggaacggggcgccuuugugcagcagcuaugggacuucugcgugcgcugggcucugggccuccauguggcugagaugagcgagaaggagcuauuuaggaaggcugugacaaagcagcagcgggaacgcauccuggagaucuucuucagacaccuuuuugcucaggugcuggacaucaaccaggccgacgcagggacccugccccuggacuccucccagaaggugcgggaggcccugaccugcgagcugagcagggccgaguuugccgagucccugggccucaagccccaggacauguuuguggaguccauguucucucuggcugacaaggauggcaauggcuaccuguccuuccgagaguuccuggacauccugguggucuucaugaaaggcuccccagaggauaagucccgucuaauguuuaccauguaugaccuggaugagaauggcuuccucuccaaggacgaauucuucaccaugaugcgauccuucaucgagaucuccaacaacugccuguccaaggcccagcuggccgaggugguggagucuauguuccgggagucgggauuccaggacaaggaggagcugacaugggaggauuuucacuucaugcugcgggaccaugacagcgagcuccgcuucacgcagcucugugucaaagguggagguggagguggaaaugguauuagagauaucuuuaaacaaaacaucagcugucgagucucguucaucacucggacaccuggggagcgcucccacccccagggacuggggcccccugccccagaagccccagagcugggaggcccuggacugaagaagagguuuggcaaaaaggcagcagugcccacuccccggcuguacacagaggcgcugcaagagaagaugcagcgaggcuuccuagcccaaaagcugcagcaguacaagcgcuucguggagaacuaccggaggcacaucguguguguggcaaucuucucggccaucuguguuggcguguuugcagaucgugcuuacuacuauggcuuugccucgccacccucggacauugcacagaccacccucgugggcaucauccugucacgaggcacggcggccagcgucuccuucauguucucuuauaucuugcucaccaugugccgcaaccucauaaccuuccugcgagagacuuuccucaaccgcuaugugccuuuugaugccgcaguggacuuccaccgcuggaucgccauggcugcuguuguccuggccauuuugcacagugcuggccacgcagucaaugucuacaucuucucagucagcccacucagccugcuggccugcauauuccccaacgucuuugugaaugauggguccaagcuuccccagaaguucuauuggugguucuuccagaccgucccagguaugacaggugugcuucugcuccugguccuggccaucauguaugucuucgccucccaccacuuccgccgccgcagcuuccggggcuucuggcugacccaccaccucuacauccugcucuaugcccugcucaucauccauggcagcuaugcucugauccagcugcccacuuuccacaucuacuuccuggucccggcaaucaucuauggaggugacaagcuggugagccugagccggaagaagguggagaucagcguggugaaggcggagcugcugcccucaggagugaccuaccugcaauuccagaggccccaaggcuuugaguacaagucaggacagugggugcggaucgccugccuggcucuggggaccaccgaguaccaccccuucacacugaccuccgcgccccaugaggacacacucagccugcacauccgggcaguggggcccuggaccacucgccucagggagaucuacucauccccaaagggcaauggcugugcuggauacccaaagcuguaccuugauggaccguuuggagagggccaucaggaguggcauaaauuugaggugucaguguuggugggagggggcauuggggucacccccuuugccuccauccucaaagaccuggucuucaagucauccuugggcagccaaaugcuguguaagaagaucuacuucaucugggugacacggacccagcgucaguuugaguggcuggcugacaucauccaagagguggaggagaacgaccaccaggaccuggugucugugcacauuuaugucacccagcuggcugagaaguucgaccucaggaccaccaugcuauacaucugcgagcggcacuuccagaaagugcugaaccggagucuguucacgggccugcgcuccaucacccacuuuggccguccccccuucgagcccuucuucaacucccugcaggagguccacccacaggugcgcaagaucgggguguucagcugcggcccuccaggaaugaccaagaauguagagaaggccugucagcucgucaacaggcaggaccgagcccacuucaugcaccacuaugagaacuucugagccuguccucccuggcugcugcuuccaguauccugccuucucuucugugcaccuaaguugcccagcccugcuggcaaucucuccaucagaauccaccuuaggccucagcuggagggcugcagagccccucccaauauugggagaauauugacccagacaauuauacaaaugagaaaaggcaggagacuauguucuacaauugcagugcaugaugauuauaaguccaccuguuuaucaacggcaccauuccugcagcccuccagacuuccugcccuuagcaagugcgcaaccagucaggaucucccaaagaagauaaagaccacuccucaccccagcucaagccauggcaggcguggcaagcaaaguggggaggagacagucccugcuugugacaaguguggaggugaaaagguacaauagugcuugucuccgauagcuccccacaucucuaauugacuuccacaaaaucgaugcguugcuuugguauuugcuuggacugacauuugagggaggaggaggcugggauccucuggcugagaaucuccucagagcccagugcagaagcugugaugcuuagaaccuggacagcccgacugccucaacucugucuccaggucuauucccuccagcuccaaaaggagcagcccuacuucuaccccuucccguccccaaagugucagcaacuuugaggagggcaccaggaaacaaagaugccuccccagcccugauauucuugaugucaccagugauacccacugcccugaccccugggcaggccccucucugcaucuacuggaguggucccugggcucuggggcugaaggauuccagccucucugccagauauucaguacucgaucucaauuccccucuuccacaagaguugggugaccagcuguccuaguuugcccaggacucucccuguuuuagcacugaaagucucuugccccaggaaaccccaucagucccaggcagauugggacagcuggucaccuuacgcaagagccaggcugaaacauccccuccauacucagcucuuuaacuuuucuuuuccuuuuucaucgggcucuuuccuaaaaagcugagcuguaaaauauuuuacaucgagguauaauaaauaaucauguacauguuuuaccaccacccaggucaagacauagaauguuucaacauuuccaucaccccagaaacuccccuuguacccccuuccacuucgucuccccuagcuccuagaagcaaccacugaugugauuucuaccaaauccaguuuugguccuacuaaauauacucuuuugagacuggccucuuuuacucaccauaaugccuuuguaauucauccaugcuguuguguguaucagcaguuuguuccuuuucauugcugaguaguauucuauuguagagauguaccacaguuuguuuauucuucuguugauggacguuuggguuguuucuaauuuugaaugauuauaaauaaaaauucugugaguguucuuguaaaaaaaaaaaaaaaaaaaaaaaaaaaaaaaaaaaaaaaaaaaaaaaaaaaaaaaaaaaaaaaaaaaaaaaaaaaaaaaaaaa

SEQ ID NO: 7 - RNA, 1587 nt, Homo sapiens
cauucuucuucuuccucccagcagcucugccuggaagucccccaaucccugugcuccugcccccagaucgugggcuugggggacagcaagaaagcugcaaaggacucagcuggggcggcuccacaaggaccccacaggcuugagguguugccaggauucuaucccaggggguuuucugggucccccagagcccucucaagcacggggaggcagaaggguccucgcccauuucaggaaucugcagccuggaagccacagccauggcaggcccccgauacccaguuucagugcaaggggcagcccuggugcagaucaagaggcuccaaacguuugccuucucugugcgcuggucagacggcagcgacaccuucgugcgcaggaguugggacgaauucaggcagcucaagacccucaaggagaccuucccgguggaggcgggccugcugcggagaucugaccgcguucucccaaagcuucucgaugcaccacuguugggacgcguggggcgcacgagccgcggccuggcgcgccugcagcuguuggaaaccuauucucggaggcugcuggcgacugcagagcgcguggcacggagcccgacgaucacuggcuucuucgcaccgcaaccccuggaccuggagcccgcgcugccacccggcagccgggugauccugcccaccccagaggagcagccucuuucucgcgcugcgggccgccucuccauccacagucuggaggcucagagccugcgcugccugcagcccuucuguacccaggacacgcgggauaggccuuuucaggcgcaggcccaggagagccuggacgugcugcugcggcaccccucaggcugguggcugguggagaacgaagaccggcagaccgccugguuuccagcgcccuaccuggaggaggcggccccgggccaaggccgggagggaggcccgucccuagggagcagcgguccccaguucugugcuucccgcgccuacgagagcagccgcgcagaugagcuguccgugcccgcgggggcgcgcgugcgcguguuggaaacgucagaccgcggcugguggcuaugcagguacggcgaccgggcgggccuacuccccgcggugcugcugcggccggaagggcugggcgcucuccugagcgggacgggguuccguggaggagacgacccggcgggugaggcccggggcuucccugaacccucccaggccaccgccccuccccccaccgugcccacccgaccuucgccgggcgccauccagagccgcugcugcaccgucacacgcagggcccuggagcggcgcccacggcgccagggccgcccucgagggugcguggacucugugccgcaccccacgacggagcagugagcgcgaggaucccgaugaggggauggaccgcgccaucccagggcuggggaggagcggggagggcggaucucccuggccagcagggaugggagggggccauuugcuguuccucugaguaaagcuuguucugcaugaaaaaaaaaaaaaaaaaaaaaaaaaaaaaaaaaaaaaaaaaaaaaaaaaaaaaaaaaaaaaaaaaaaaaaaaaaaaaaaa

SEQ ID NO: 8 - RNA, 1132 nt, Homo sapiens
agccauggcaggcccccgauacccaguuucagugcaaggggcagcccuggugcagaucaagaggcuccaaacguuugccuucucugugcgcuggucagacggcagcgacaccuucgugcgcaggaguugggacgaauucaggcagcucaagaagacccucaaggagaccuucccgguggaggcgggccugcugcggagaucugaccgcguucucccaaagcuucucgaugcaccacuguugggacgcguggggcgcacgagccgcggccuggcgcgccugcagcuguuggaaaccuauucucggaggcugcuggcgacugcagagcgcguggcacggagcccgacgaucacuggcuucuucgcaccgcaaccccuggaccuggagcccgcgcugccacccggcagccgggugauccugcccaccccagaggagcagccucuuucucgcgcugcgggccgccucuccauccacagucuggaggcucagagccugcgcugccugcagcccuucuguacccaggacacgcgggauaggccuuuucaggcgcaggcccaggagagccuggacgugcugcugcggcaccccucaggcugguggcugguggagaacgaagaccggcagaccgccugguuuccagcgcccuaccuggaggaggcggccccgggccaaggccgggagggaggcccgucccuagggagcagcgguccccaguucugugcuucccgcgccuacgagagcagccgcgcagaugagcuguccgugcccgcgggggcgcgcgugcgcguguuggaaacgucagaccgcggcugguggcuaugcagguacggcgaccgggcgggccuacuccccgcggugcugcugcggccggaagggcugggcgcucuccugagcgggacgggguuccguggaggagacgacccggcgggugaggcccggggcuucccugaacccucccaggccaccgccccuccccccaccgugcccacccgaccuucgccgggcgccauccagagccgcugcugcaccgucacacgcagggcccuggagcggcgcccacggcgccagggccgcccucgagggugcguggacucugugccgcaccccacgacggagcagugagcgcgaggaucc

SEQ ID NO: 9 - RNA, 1147 nt, Homo sapiens
agccauggcaggcccccgauacccaguuucagugcaaggggcagcccuggugcagaucaagaggcuccaaacguuugccuucucugugcgcuggucagacggcagcgacaccuucgugcgcaggaguugggacgaauucaggcagcucaagaagacccucaaggagaccuucccgguggaggcgggccugcugcggagaucugaccgcguucucccaaagcuucucggucaggccagccuggaugcaccacuguugggacgcguggggcgcacgagccgcggccuggcgcgccugcagcuguuggaaaccuauucucggaggcugcuggcgacugcagagcgcguggcacggagcccgacgaucacuggcuucuucgcaccgcaaccccuggaccuggagcccgcgcugccacccggcagccgggugauccugcccaccccagaggagcagccucuuucucgcgcugcgggccgccucuccauccacagucuggaggcucagagccugcgcugccugcagcccuucuguacccaggacacgcgggauaggccuuuucaggcgcaggcccaggagagccuggacgugcugcugcggcaccccucaggcugguggcugguggagaacgaagaccggcagaccgccugguuuccagcgcccuaccuggaggaggcggccccgggccaaggccgggagggaggcccgucccuagggagcagcgguccccaguucugugcuucccgcgccuacgagagcagccgcgcagaugagcuguccgugcccgcgggggcgcgcgugcgcguguuggaaacgucagaccgcggcugguggcuaugcagguacggcgaccgggcgggccuacuccccgcggugcugcugcggccggaagggcugggcgcucuccugagcgggacgggguuccguggaggagacgacccggcgggugaggcccggggcuucccugaacccucccaggccaccgccccuccccccaccgugcccacccgaccuucgccgggcgccauccagagccgcugcugcaccgucacacgcagggcccuggagcggcgcccacggcgccagggccgcccucgagggugcguggacucugugccgcaccccacgacggagcagugagcgcgaggaucc

SEQ ID NO: 10 - RNA, 1409 nt, Homo sapiens
cgacuuccucuuuccagugcauuuaaggcgcagccuggaagugccagggagcacuggaggccacccagucaugggggacaccuucauccgucacaucgcccugcugggcuuugagaagcgcuucguacccagccagcacuauguguacauguuccuggugaaauggcaggaccugucggagaagguggucuaccggcgcuucaccgagaucuacgaguuccauaaaaccuuaaaagaaauguucccuauugaggcaggggcgaucaauccagagaacaggaucaucccccaccucccagcucccaagugguuugacgggcagcgggccgccgagaaccgccagggcacacuuaccgaguacugcggcacgcucaugagccugcccaccaagaucucccgcuguccccaccuccucgacuucuucaaggugcgcccugaugaccucaagcuccccacggacaaccagacaaaaaagccagagacauacuugaugcccaaagauggcaagaguaccgcgacagacaucaccggccccaucauccugcagacguaccgcgccauugccaacuacgagaagaccucgggcuccgagauggcucuguccacgggggacgugguggaggucguagagaagagcgagagcgguuggugguucugucagaugaaagcaaagcgaggcuggaucccagcguccuuccucgagccccuggacaguccugacgagacggaagacccugagcccaacuaugcaggugagccauacgucgccaucaaggccuacacugcuguggagggggacgaggugucccugcucgagggugaagcuguugaggucauucacaagcuccuggacggcuggugggucaucaggaaagacgacgucacaggcuacuucccguccauguaccugcaaaagucagggcaagacgugucccaggcccaacgccagaucaagcggggggcgccgccccgcaggucguccauccgcaacgcgcacagcauccaccagcggucgcggaagcgccucagccaggacgccuaucgccgcaacagcguccguuuucugcagcagcgacgccgccaggcgcggccgggaccgcagagccccgggagcccgcucgaggaggagcggcagacgcagcgcucuaaaccgcagccggcggugcccccgcggccgagcgccgaccucauccugaaccgcugcagcgagagcaccaagcggaagcuggcgucugccgucugaggcuggagcgcaguccccagcuagcgucucggcccuugccgccccgugccuguacauacguguucuauagagccuggcgucuggacgccgagggcagccccgaccccuguccagcgcggcucccgccacccucaauaaauguugcuuggaguggaaaaaaaaaaaa

SEQ ID NO: 11 - RNA, 1650 nt, Homo sapiens
cgggguugcaccuggcgcuuggcgcccgcaccucugcccgccucggagaccccgcagccccgcgccgccgccuggccccggccccggccccuccgcgggauccuggccccuccucgagcgccgccaccggccgccauggccucucugggggaccuggugcgcgccuggcaccugggcgcgcaggcuguggaucguggggacugggcccgcgccuugcaccucuucucgggcgucccggcgccgcccgccaggcugugcuucaacgcgggcugcgugcaccugcuggccggggaccccgaggccgcgcugcgggcauuugaccaagccgugaccaaggacaccugcauggcgguuggcuucuuccagcgaggaguggccaacuuccagcuggcaagguuccaggaggcucugucugacuucuggcuggcccuggagcagcugaggggccacgcugccaucgacuacacgcagcugggccugcgguucaagcugcaagccugggaggugcuacacaauguggcgucggcacagugccagcuggggcucuggacagaggcggccagcagccuaagggaggccauguccaaguggccggaggggucccugaauggccuggacucagcccuggaccaagugcagagacggggcucacugccgccacggcagguccccaggggcgaggucuuccggccccaccgguggcaccugaagcacuuggagcccguggauuuccugggcaaggccaaggugguggccucugccauccccgacgaccagggcuggggcguccgcccucagcagccacagggaccaggagcgaaccaugaugccaggucccuaaucauggacuccccaagagcuggcacccaccagggcccccucgaugcagagacagaggucggugcugaccgcugcacgucgacugccuaccaggagcagaggccccagguggagcaaguuggcaaacaggcuccucucuccccagggcugccggcaaugggggggccuggccccggccccugugaggaccccgcgggugcugggggagcaggugcagggggcuccgagccccuggugacugucaccgugcagugcgccuucacaguggcccugagggcacgaagaggagccgaccuguccagccugcgggcacugcugggccaagcccucccucaccaggcccagcuugggcaacucaguuaccuagccccaggugaggacgggcacuggguccccauccccgaggaggagucgcugcagagggccuggcaggacgcagcugccugccccagggggcugcagcugcagugcaggggagccgggggucggccgguccucuaccaggugguggcccagcacagcuacuccgcccaggggccagaggaccugggcuuccgacagggggacacgguggacguccugugugaagagcccgaugucccccuugcaguggaccaggcauggcuggagggccacugugacggccgcaucggcaucuuccccaagugcuucgugguccccgccggcccucggaugucaggagcccccggccgccugccccgaucccagcagggagaucagcccuaaugaugcuguguccaugaugcuuuuaauaaaaacaacccccacugcaaaaaaaaaaaaaaaaaa

SEQ ID NO: 12 - RNA, 2406 nt, Homo sapiens
ucucucucugcuucuuuccuuuucucucucaugguaggguuaugagucaguugccaaaagguggggacauuuccugaugcauuugcaacacugagaaguuaucuuaagggaggcugggccccauucuacucaucuggcccagaaagugaacaccuugggggccacuaaggcagcccugcuaggggagacgcuccaaccugucuucucucugucuccuggcagcucucuuggccuccuaguuucuaccuaaucaugucccugguggaggccaucagccucuggaaugaaggggugcuggcagcggacaagaaggacuggaagggagcccuggaugccuucagugccguccaggacccccacucccggauuugcuucaacauuggcugcauguacacuauccugaagaacaugacugaagcagagaaggccuuuaccagaagcauuaaccgagacaagcacuuggcaguggcuuacuuccaacgagggaugcucuacuaccagacagagaaauaugauuuggcuaucaaagaccuuaaagaagccuugauucagcuucgagggaaccagcugauagacuauaagauccuggggcuccaguucaagcuguuugccugugagguguuauauaacauugcuuucauguaugccaagaaggaggaauggaaaaaagcugaagaacaguuagcauuggccacgagcaugaagucugagcccagacauuccaaaaucgacaaggcgauggagugugucuggaagcagaagcuauaugagccaguggugaucccugugggcaagcuguuucgaccaaaugagagacaaguggcucagcuggccaagaaggauuaccuaggcaaggcgacggucguggcaucugugguggaucaagacaguuucucuggguuugccccucugcaaccacaggcagcugagccuccacccagaccgaaaaccccagagaucuucagggcucuggaaggggaggcucaccgugugcuauuuggguuugugccugagacaaaagaagagcuccaggucaugccagggaacauugucuuugucuugaagaagggcaaugauaacugggccacggucauguucaacgggcagaaggggcuuguucccugcaacuaccuugaaccaguugagcugcggauccacccucagcagcagccccaggaggaaagcucuccgcaguccgacaucccagcuccuccuaguuccaaagccccuggaagaccccagcugucaccaggccagaaacaaaaagaagagccuaaggaagugaagcucaguguucccaugcccuacacacucaaggugcacuacaaguacacgguagucaugaagacucagcccgggcuccccuacagccagguccgggacauggugucuaagaaacuggagcuccggcuggaacacacuaagcugagcuaucggccucgggacagcaaugagcuggugccccuuucagaagacagcaugaaggaugccuggggccaggugaaaaacuacugccugacucuguggugugagaacacagugggugaccaaggcuuuccagaugaacccaaggaaagugaaaaagcugaugcuaauaaccagacaacagaaccucagcuuaagaaaggcagccaaguggaggcacucuucaguuaugaggcuacccaaccagaggaccuggaguuucaggaaggggauauaauccugguguuaucaaaggugaaugaagaauggcuggaaggggagugcaaagggaaggugggcauuuuccccaaaguuuuuguugaagacugcgcaacuacagauuuggaaagcacucggagagaagucuaggauguuucacaaacuacaaagcugaagaaaaugaagcccuauuacuuguuuguaagauuuagcacccuucugcuguauacuguacugagacauuacaguuuggaaguguuaacuauuuauucccuguuaaaauuuaaccuacuagacaaugaugugaguacccaggaugauuuccuggggcacagugggugaggagauggggacaggugaauggaggaguuaggggagaggaaaaguggauggaagugucuggaaagggcacgagagagucuuccagguacugauccuguuucuugcucugagugcuagcuagccagcuguguucacacuguaaacauucaucaagcuguacauuuggugcacuuuucugugucauaccacaauaaaaaaaaaccuagcaucuuacaaaaacaagacacccaaguccaggcccaaggaguaaguacaaauauuccuguuucugaaccauuacuguaauuggcucuuaaggcuugaaguaaccuuauagguuacucauaaggcauauacaaauaaacuuguuuguuuucuuuuuucaaaaaaaaaaaaaaaaaa

SEQ ID NO: 13 - RNA, 2629 nt, Homo sapiens
acuugucauggcgacuguccagcuuugugccaggagccucgcagggguugaugggauugggguuuuccccucccaugugcucaagacuggcgcuaaaaguuuugagcuucucaaaagucuagagccaccguccagggagcagguagcugcugggcuccggggacacuuugcguucgggcugggagcgugcuuuccacgacggugacacgcuucccuggauuggcagccagacugccuuccgggucacugccauggaggagccgcagucagauccuagcgucgagcccccucugagucaggaaacauuuucagaccuauggaaacuacuuccugaaaacaacguucugucccccuugccgucccaagcaauggaugauuugaugcuguccccggacgauauugaacaaugguucacugaagacccagguccagaugaagcucccagaaugccagaggcugcuccccgcguggccccugcaccagcagcuccuacaccggcggccccugcaccagcccccuccuggccccugucaucuucugucccuucccagaaaaccuaccagggcagcuacgguuuccgucugggcuucuugcauucugggacagccaagucugugacuugcacguacuccccugcccucaacaagauguuuugccaacuggccaagaccugcccugugcagcuguggguugauuccacacccccgcccggcacccgcguccgcgccauggccaucuacaagcagucacagcacaugacggagguugugaggcgcugcccccaccaugagcgcugcucagauagcgauggucuggccccuccucagcaucuuauccgaguggaaggaaauuugcguguggaguauuuggaugacagaaacacuuuucgacauagugugguggugcccuaugagccgccugagguuggcucugacuguaccaccauccacuacaacuacauguguaacaguuccugcaugggcggcaugaaccggaggcccauccucaccaucaucacacuggaagacuccagugguaaucuacugggacggaacagcuuugaggugcguguuugugccuguccugggagagaccggcgcacagaggaagagaaucuccgcaagaaaggggagccucaccacgagcugcccccagggagcacuaagcgagcacugcccaacaacaccagcuccucuccccagccaaagaagaaaccacuggauggagaauauuucacccuucagauccgugggcgugagcgcuucgagauguuccgagagcugaaugaggccuuggaacucaaggaugcccaggcugggaaggagccaggggggagcagggcucacuccagccaccugaaguccaaaaagggucagucuaccucccgccauaaaaaacucauguucaagacagaagggccugacucagacugacauucuccacuucuuguuccccacugacagccucccacccccaucucucccuccccugccauuuuggguuuugggucuuugaacccuugcuugcaauaggugugcgucagaagcacccaggacuuccauuugcuuugucccggggcuccacugaacaaguuggccugcacugguguuuuguuguggggaggaggauggggaguaggacauaccagcuuagauuuuaagguuuuuacugugagggauguuugggagauguaagaaauguucuugcaguuaaggguuaguuuacaaucagccacauucuagguagguaggggcccacuucaccguacuaaccagggaagcugucccucauguugaauuuucucuaacuucaaggcccauaucugugaaaugcuggcauuugcaccuaccucacagagugcauugugaggguuaaugaaauaauguacaucuggccuugaaaccaccuuuuauuacauggggucuaaaacuugacccccuugagggugccuguucccucucccucucccuguuggcugguggguugguaguuucuacaguugggcagcugguuagguagagggaguugucaagucuugcuggcccagccaaacccugucugacaaccucuuggucgaccuuaguaccuaaaaggaaaucucaccccaucccacacccuggaggauuucaucucuuguauaugaugaucuggauccaccaagacuuguuuuaugcucagggucaauuucuuuuuucuuuuuuuuuuuuuuuuuucuuuuucuuugagacugggucucgcuuuguugcccaggcuggaguggaguggcgugaucuuggcuuacugcagccuuugccuccccggcucgagcaguccugccucagccuccggaguagcugggaccacagguucaugccaccauggccagccaacuuuugcauguuuuguagagauggggucucacaguguugcccaggcuggucucaaacuccugggcucaggcgauccaccugucucagccucccagagugcugggauuacaauugugagccaccacguggagcuggaagggucaacaucuuuuacauucugcaagcacaucugcauuuucaccccacccuuccccuccuucucccuuuuuauaucccauuuuuauaucgaucucuuauuuuacaauaaaacuuugcugcca

SEQ ID NO: 14 - RNA, 2550 nt, Homo sapiens
cguggaucccgagaaagaggcgcaggacgaggaggcagaacccgacuggcgcguagagcagcagcacgagcaguaggaagcagucacccggaagccugggggcgagaggcgaaguggucaggcgccgaaggccgagagcacgcggggaucggucucuucccgccgggucucuuaccggugcgagucaaagagccgcuccggccccggcccugagggaagcuccauaacugcugcuucaggagcgcccggccgucgccgccgccgccauuuucgcgcccggccgcaggggcucuugggaaggcggagucuuugggcauccgcccggggugaggggacccgaaguccugaggcgcgccggaagggcuagcggucccagcauaccccgcggccccuugggccgucucacaacucgcguccggcggagaccacaauucccggcauucguggggcagggaggagucggccucccggaauccuggucccggcgugcacuucugaaggacuucagguaccggcgugccccgcguccuacuguccgccugcucgcguccugggugccgccucugaguagggcgggcgaggaggcagccaaggcggagcugauggcugcgccgagggcggggcggggugcaggcuggagccuucgggcauggcgggcuuuggggggcauucgcugggggaggagaccccguuugaccccugaccuccgggcccugcugacgucaggaacuucugacccccgggcccgagugacuuaugggacccccagucucugggcccgguugucuguuggggucacugaaccccgagcaugccugacgucugggaccccggguccccgggcacaacugacugcggugaccccagauaccaggacccgggaggccucagagaacucuggaacccguucgcgcgcguggcuggcgguggcgcugggcgcugggggggcagugcuguuguuguuguggggcgggggucgggguccuccggccguccucgccgccgucccuagcccgccgcccgcuucuccccggagucaguacaacuucaucgcagaugugguggagaagacagcaccugccguggucuauaucgagauccuggaccggcacccuuucuugggccgcgaggucccuaucucgaacggcucaggauucgugguggcugccgaugggcucauugucaccaacgcccaugugguggcugaucggcgcagaguccgugugagacugcuaagcggcgacacguaugaggccguggucacagcuguggaucccguggcagacaucgcaacgcugaggauucagacuaaggagccucuccccacgcugccucugggacgcucagcugauguccggcaaggggaguuuguuguugccaugggaagucccuuugcacugcagaacacgaucacauccggcauuguuagcucugcucagcguccagccagagaccugggacucccccaaaccaauguggaauacauucaaacugaugcagcuauugauuuuggaaacucuggagguccccugguuaaccuggauggggaggugauuggagugaacaccaugaaggucacagcuggaaucuccuuugccaucccuucugaucgucuucgagaguuucugcaucguggggaaaagaagaauuccuccuccggaaucagugggucccagcggcgcuacauuggggugaugaugcugacccugagucccagcauccuugcugaacuacagcuucgagaaccaagcuuucccgauguucagcaugguguacucauccauaaagucauccugggcuccccugcacaccgggcuggucugcggccuggugaugugauuuuggccauuggggagcagaugguacaaaaugcugaagauguuuaugaagcuguucgaacccaaucccaguuggcagugcagauccggcggggacgagaaacacugaccuuauaugugaccccugaggucacagaaugaauagaucaccaagaguaugaggcuccugcucugauuuccuccuugccuuucuggcugagguucugagggcaccgagacagaggguuaaaugaaccagugggggcaggucccuccaaccaccagcacugacuccugggcucugaagaaucacagaaacacuuuuuauauaaaauaaaauuauaccuagcaacauauuauaguaaaaaaugaggugggagggcuggaucuuuucccccaccaaaaggcuagagguaaagcuguaucccccuaaacuuaggggagauacuggagcugaccauccugaccuccuauuaaagaaaaugagcugcugccaucuuuugugggcaguuagucaggugcugcucuuugugguguggugggcucuggucuguucugcucggugcugggccugggagcaaagauucccaugcuuggcuacagauacugacagcuggccucugaaggagggugaaaacuucugcuugacaguuccacauccauagugcauggucugaugagugcgguugcugacauggguuucuugguaagcuccugagguaauggcagccuc

SEQ ID NO: 15 - RNA, 2259 nt, Homo sapiens
cguggaucccgagaaagaggcgcaggacgaggaggcagaacccgacuggcgcguagagcagcagcacgagcaguaggaagcagucacccggaagccugggggcgagaggcgaaguggucaggcgccgaaggccgagagcacgcggggaucggucucuucccgccgggucucuuaccggugcgagucaaagagccgcuccggccccggcccugagggaagcuccauaacugcugcuucaggagcgcccggccgucgccgccgccgccauuuucgcgcccggccgcaggggcucuugggaaggcggagucuuugggcauccgcccggggugaggggacccgaaguccugaggcgcgccggaagggcuagcggucccagcauaccccgcggccccuugggccgucucacaacucgcguccggcggagaccacaauucccggcauucguggggcagggaggagucggccucccggaauccuggucccggcgugcacuucugaaggacuucagguaccggcgugccccgcguccuacuguccgccugcucgcguccugggugccgccucugaguagggcgggcgaggaggcagccaaggcggagcugauggcugcgccgagggcggggcggggugcaggcuggagccuucgggcauggcgggcuuuggggggcauucgcugggggaggagaccccguuugaccccugaccuccgggcccugcugacgucaggaacuucugacccccgggcccgagugacuuaugggacccccagucucugggcccgguugucuguuggggucacugaaccccgagcaugccugacgucugggaccccggguccccgggcacaacugacugcggugaccccagauaccaggacccgggaggccucagagaacucuggaacccguucgcgcgcguggcuggcgguggcgcugggcgcugggggggcagugcuguuguuguuguggggcgggggucgggguccuccggccguccucgccgccgucccuagcccgccgcccgcuucuccccggagucaguacaacuucaucgcagaugugguggagaagacagcaccugccguggucuauaucgagauccuggaccggcacccuuucuugggccgcgaggucccuaucucgaacggcucaggauucgugguggcugccgaugggcucauugucaccaacgcccaugugguggcugaucggcgcagaguccgugugagacugcuaagcggcgacacguaugaggccguggucacagcuguggaucccguggcagacaucgcaacgcugaggauucagacuaaguuuggaaacucuggagguccccugguuaaccuggauggggaggugauuggagugaacaccaugaaggucacagcuggaaucuccuuugccaucccuucugaucgucuucgagaguuucugcaucguggggaaaagaagaauuccuccuccggaaucagugggucccagcggcgcuacauuggggugaugaugcugacccugagucccagggcuggucugcggccuggugaugugauuuuggccauuggggagcagaugguacaaaaugcugaagauguuuaugaagcuguucgaacccaaucccaguuggcagugcagauccggcggggacgagaaacacugaccuuauaugugaccccugaggucacagaaugaauagaucaccaagaguaugaggcuccugcucugauuuccuccuugccuuucuggcugagguucugagggcaccgagacagaggguuaaaugaaccagugggggcaggucccuccaaccaccagcacugacuccugggcucugaagaaucacagaaacacuuuuuauauaaaauaaaauuauaccuagcaacauauuauaguaaaaaaugaggugggagggcuggaucuuuucccccaccaaaaggcuagagguaaagcuguaucccccuaaacuuaggggagauacuggagcugaccauccugaccuccuauuaaagaaaaugagcugcugccaucuuuugugggcaguuagucaggugcugcucuuugugguguggugggcucuggucuguucugcucggugcugggccugggagcaaagauucccaugcuuggcuacagauacugacagcuggccucugaaggagggugaaaacuucugcuugacaguuccacauccauagugcauggucugaugagugcgguugcugacauggguuucuugguaagcuccugagguaauggcagccuc

SEQ ID NO: 16 - RNA, 2606 nt, Homo sapiens
cuuuccgcccucuccccgccuccuuuucgggcgucccgaggccgcuccccaaccgacaaccaagaccccgcaggccacgcagcccuggagccgaggccccccgacggcggaggcgcccgcggguccccuacagccaaggucccugagugccagagguggugguguugcuuaucuucuggaaccccaugcagccagaucccaggccuagcggggcuggggccugcugccgauuccugccccugcagucacagugcccugagggggcaggggacgcggugauguacgccuccacugagugcaaggcggaggugacgcccucccagcauggcaaccgcaccuucagcuacacccuggaggaucauaccaagcaggccuuuggcaucaugaacgagcugcggcucagccagcagcugugugacgucacacugcaggucaaguaccaggaugcaccggccgcccaguucauggcccacaagguggugcuggccucauccagcccugucuucaaggccauguucaccaacgggcugcgggagcagggcauggaggugguguccauugaggguauccaccccaaggucauggagcgccucauugaauucgccuacacggccuccaucuccaugggcgagaaguguguccuccacgucaugaacggugcugucauguaccagaucgacagcguuguccgugccugcagugacuuccuggugcagcagcuggaccccagcaaugccaucggcaucgccaacuucgcugagcagauuggcuguguggaguugcaccagcgugcccgggaguacaucuacaugcauuuuggggagguggccaagcaagaggaguucuucaaccugucccacugccaacuggugacccucaucagccgggacgaccugaacgugcgcugcgaguccgaggucuuccacgccugcaucaacugggucaaguacgacugcgaacagcgacgguucuacguccaggcgcugcugcgggccgugcgcugccacucguugacgccgaacuuccugcagaugcagcugcagaagugcgagauccugcaguccgacucccgcugcaaggacuaccuggucaagaucuucgaggagcucacccugcacaagcccacgcaggugaugcccugccgggcgcccaaggugggccgccugaucuacaccgcgggcggcuacuuccgacagucgcucagcuaccuggaggcuuacaaccccagugacggcaccuggcuccgguuggcggaccugcaggugccgcggagcggccuggccggcugcguggugggcgggcuguuguacgccgugggcggcaggaacaacucgcccgacggcaacaccgacuccagcgcccuggacuguuacaaccccaugaccaaucaguggucgcccugcgcccccaugagcgugccccguaaccgcaucggggugggggucaucgauggccacaucuaugccgucggcggcucccacggcugcauccaccacaacaguguggagagguaugagccagagcgggaugaguggcacuugguggccccaaugcugacacgaaggaucggggugggcguggcuguccucaaucgucuccuuuaugccguggggggcuuugacgggacaaaccgccuuaauucagcugaguguuacuacccagagaggaacgaguggcgaaugaucacagcaaugaacaccauccgaagcggggcaggcgucugcguccugcacaacuguaucuaugcugcugggggcuaugauggucaggaccagcugaacagcguggagcgcuacgauguggaaacagagacguggacuuucguagcccccaugaagcaccggcgaagugcccuggggaucacuguccaccaggggagaaucuacguccuuggaggcuaugauggucacacguuccuggacaguguggaguguuacgacccagauacagacaccuggagcgaggugacccgaaugacaucgggccggaguggggugggcguggcugucaccauggagcccugccggaagcagauugaccagcagaacuguaccuguugaggcacuuuuguuucuugggcaaaaauacaguccaauggggaguaucauuguuuuuguacaaaaaccgggacuaaaagaaaagacagcacugcaaauaacccaucuuccgggaagggaggccaggaugccucaguguuaaaaugacaucucaaaagaaguccaaagcgggaaucaugugccccucagcggagccccgggaguguccaagacagccuggcugggaaaggggguguggaaagagcaggcuuccaggagagaggcccccaaacccucuggccggguaauaggccugggucccacucacccaugccggcagcugucaccaugugauuuauucuuggauaccugggagggggccaaugggggccucagggggaggcccccucuggaaaugugguucccagggaugggccuguacauagaagccaccggauggcacuuccccaccggauggacaguuauuuuguugauaaguaacccuguaauuuuccaaggaaaauaaagaacagacuaacuagugucuuucacccugaaaaaaaaaaaaaa

SEQ ID NO: 17 - RNA, 2577 nt, Homo sapiens
ucugcuuagucauggugaccugcgcgcgcuccgcgccucccccacgcgcagcgauggaggcgccggggcucgggcgguggaggcggagccggagcgcggccauggcggggucccugagugccagagguggugguguugcuuaucuucuggaaccccaugcagccagaucccaggccuagcggggcuggggccugcugccgauuccugccccugcagucacagugcccugagggggcaggggacgcggugauguacgccuccacugagugcaaggcggaggugacgcccucccagcauggcaaccgcaccuucagcuacacccuggaggaucauaccaagcaggccuuuggcaucaugaacgagcugcggcucagccagcagcugugugacgucacacugcaggucaaguaccaggaugcaccggccgcccaguucauggcccacaagguggugcuggccucauccagcccugucuucaaggccauguucaccaacgggcugcgggagcagggcauggaggugguguccauugaggguauccaccccaaggucauggagcgccucauugaauucgccuacacggccuccaucuccaugggcgagaaguguguccuccacgucaugaacggugcugucauguaccagaucgacagcguuguccgugccugcagugacuuccuggugcagcagcuggaccccagcaaugccaucggcaucgccaacuucgcugagcagauuggcuguguggaguugcaccagcgugcccgggaguacaucuacaugcauuuuggggagguggccaagcaagaggaguucuucaaccugucccacugccaacuggugacccucaucagccgggacgaccugaacgugcgcugcgaguccgaggucuuccacgccugcaucaacugggucaaguacgacugcgaacagcgacgguucuacguccaggcgcugcugcgggccgugcgcugccacucguugacgccgaacuuccugcagaugcagcugcagaagugcgagauccugcaguccgacucccgcugcaaggacuaccuggucaagaucuucgaggagcucacccugcacaagcccacgcaggugaugcccugccgggcgcccaaggugggccgccugaucuacaccgcgggcggcuacuuccgacagucgcucagcuaccuggaggcuuacaaccccagugacggcaccuggcuccgguuggcggaccugcaggugccgcggagcggccuggccggcugcguggugggcgggcuguuguacgccgugggcggcaggaacaacucgcccgacggcaacaccgacuccagcgcccuggacuguuacaaccccaugaccaaucaguggucgcccugcgcccccaugagcgugccccguaaccgcaucggggugggggucaucgauggccacaucuaugccgucggcggcucccacggcugcauccaccacaacaguguggagagguaugagccagagcgggaugaguggcacuugguggccccaaugcugacacgaaggaucggggugggcguggcuguccucaaucgucuccuuuaugccguggggggcuuugacgggacaaaccgccuuaauucagcugaguguuacuacccagagaggaacgaguggcgaaugaucacagcaaugaacaccauccgaagcggggcaggcgucugcguccugcacaacuguaucuaugcugcugggggcuaugauggucaggaccagcugaacagcguggagcgcuacgauguggaaacagagacguggacuuucguagcccccaugaagcaccggcgaagugcccuggggaucacuguccaccaggggagaaucuacguccuuggaggcuaugauggucacacguuccuggacaguguggaguguuacgacccagauacagacaccuggagcgaggugacccgaaugacaucgggccggaguggggugggcguggcugucaccauggagcccugccggaagcagauugaccagcagaacuguaccuguugaggcacuuuuguuucuugggcaaaaauacaguccaauggggaguaucauuguuuuuguacaaaaaccgggacuaaaagaaaagacagcacugcaaauaacccaucuuccgggaagggaggccaggaugccucaguguuaaaaugacaucucaaaagaaguccaaagcgggaaucaugugccccucagcggagccccgggaguguccaagacagccuggcugggaaaggggguguggaaagagcaggcuuccaggagagaggcccccaaacccucuggccggguaauaggccugggucccacucacccaugccggcagcugucaccaugugauuuauucuuggauaccugggagggggccaaugggggccucagggggaggcccccucuggaaaugugguucccagggaugggccuguacauagaagccaccggauggcacuuccccaccggauggacaguuauuuuguugauaaguaacccuguaauuuuccaaggaaaauaaagaacagacuaacuagugucuuucacccugaaaaaaaaaaaaaa

SEQ ID NO: 18 - RNA, 1752 nt, Homo sapiens
augaaucuccugccccccaagcccaaguacaauccacuccggaaugagucucugucaucgauggaggaaggggcuucuggguccacccccccggaggagcugccuuccccaccagcuucaucccuggggcccauccugccuccucugccuggggacgauagucccacuacccugugcuccuucuucccccggaugagcaaccugaggcuggccaacccggcuggggggcgcccagggucuaagggggagccaggaagggcagcugaugauggggaggggaucguaggggcagccaugccagacucaggcccccuaccccuccuccaggacaugaacaagcugaguggaggcggcgggcgcaggacucggguggaagggggccagcuugggggcgaggaguggacccgccacgggagcuuugucaauaagcccacgcggggcuggcugcaucccaacgacaaagucaugggacccgggguuuccuacuugguucgguacauggguuguguggagguccuccagucaaugcgugcccuggacuucaacacccggacucaggucaccagggaggccaucagucuggugugugaggcugugccgggugcuaagggggcgacaaggaggagaaagcccuguagccgcccgcucagcucuauccuggggaggaguaaccugaaauuugcuggaaugccaaucacucucaccgucuccaccagcagccucaaccucauggccgcagacugcaaacagaucaucgccaaccaccacaugcaaucuaucucauuugcauccggcggggauccggacacagccgaguaugucgccuauguugccaaagacccugugaaucagagagccugccacauucuggagugucccgaagggcuugcccaggaugucaucagcaccauuggccaggccuucgaguugcgcuucaaacaauaccucaggaacccacccaaacuggucaccccucaugacaggauggcuggcuuugauggcucagcaugggaugaggaggaggaagagccaccugaccaucaguacuauaaugacuucccggggaaggaaccccccuuggggggggugguagacaugaggcuucgggaaggagccgcuccaggggcugcucgacccacugcacccaaugcccagacccccagccacuugggagcuacauugccuguaggacagccuguugggggagauccagaaguccgcaaacagaugccaccuccaccacccuguccaggcagagagcuuuuugaugaucccuccuaugucaacguccagaaccuagacaaggcccggcaagcaguggguggugcugggccccccaauccugcuaucaauggcagugcaccccgggaccuguuugacaugaagcccuucgaagaugcucuucgggugccuccaccuccccagucgguguccauggcugagcagcuccgaggggagcccugguuccaugggaagcugagccggcgggaggcugaggcacugcugcagcucaauggggacuucuugguacgggagagcacgaccacaccuggccaguaugugcucacuggcuugcagagugggcagccuaagcauuugcuacugguggacccugagggugugguucggacuaaggaucaccgcuuugaaagugucagucaccuuaucagcuaccacauggacaaucacuugcccaucaucucugcgggcagcgaacugugucuacagcaaccuguggagcggaaacuguga

SEQ ID NO: 19 - RNA, 3076 nt, Homo sapiens
guuucuccagggaggcagggcccggggagaaaguuggagcgguaaccuaagcuggcaguggcgugauccggcaccaaaucggcccgcggugcggugcggagacuccaugaggcccuggacaugaacaagcugaguggaggcggcgggcgcaggacucggguggaagggggccagcuugggggcgaggaguggacccgccacgggagcuuugucaauaagcccacgcggggcuggcugcaucccaacgacaaagucaugggacccgggguuuccuacuugguucgguacauggguuguguggagguccuccagucaaugcgugcccuggacuucaacacccggacucaggucaccagggaggccaucagucuggugugugaggcugugccgggugcuaagggggcgacaaggaggagaaagcccuguagccgcccgcucagcucuauccuggggaggaguaaccugaaauuugcuggaaugccaaucacucucaccgucuccaccagcagccucaaccucauggccgcagacugcaaacagaucaucgccaaccaccacaugcaaucuaucucauuugcauccggcggggauccggacacagccgaguaugucgccuauguugccaaagacccugugaaucagagagccugccacauucuggagugucccgaagggcuugcccaggaugucaucagcaccauuggccaggccuucgaguugcgcuucaaacaauaccucaggaacccacccaaacuggucaccccucaugacaggauggcuggcuuugauggcucagcaugggaugaggaggaggaagagccaccugaccaucaguacuauaaugacuucccggggaaggaaccccccuuggggggggugguagacaugaggcuucgggaaggagccgcuccaggggcugcucgacccacugcacccaaugcccagacccccagccacuugggagcuacauugccuguaggacagccuguugggggagauccagaaguccgcaaacagaugccaccuccaccacccuguccagcaggcagagagcuuuuugaugaucccuccuaugucaacguccagaaccuagacaaggcccggcaagcaguggguggugcugggccccccaauccugcuaucaauggcagugcaccccgggaccuguuugacaugaagcccuucgaagaugcucuucgcgugccuccaccuccccagucgguguccauggcugagcagcuccgaggggagcccugguuccaugggaagcugagccggcgggaggcugaggcacugcugcagcucaauggggacuuccugguacgggagagcacgaccacaccuggccaguaugugcucacuggcuugcagagugggcagccuaagcauuugcuacugguggacccugagggugugguucggacuaaggaucaccgcuuugaaagugucagucaccuuaucagcuaccacauggacaaucacuugcccaucaucucugcgggcagcgaacugugucuacagcaaccuguggagcggaaacugugaucugcccuagcgcucucuuccagaagaugcccuccaauccuuuccacccuauucccuaacucucgggaccucguuugggaguguucugugggcuuggccuugugucagagcugggaguagcauggacucuggguuucauauccagcugagugagaggguuugagucaaaagccugggugagaauccugccucuccccaaacauuaaucaccaaaguauuaauguacagaguggccccucaccugggccuuuccugugccaaccugaugccccuuccccaagaaggugagugcuugucauggaaaauguccuguggugacaggcccaguggaacagucacccuucugggcaagggggaacaaaucacaccucugggcuucaggguaucccagaccccucucaacacccgccccccccauguuuaaacuuugugccuuugaccaucucuuaggucuaaugauauuuuaugcaaacaguucuuggaccccugaauucaaugacagggaugccaacaccuucuuggcuucugggaccuguguucuugcugagcacccucuccgguuuggguugggauaacagaggcaggaguggcagcuguccccucucccuggggauaugcaacccuuagagauugccccagagccccacucccggccaggcgggagauggaccccucccuugcucagugccuccuggccggggccccucaccccaaggggucuguauauacauuucauaaggccugcccucccauguugcaugccuauguacucuacgccaaagugcagcccuuccuccugaagccucugcccugccucccuuucugggagggcggggugggggugacugaauuugggccucuuguacaguuaacucucccagguggauuuuguggaggugagaaaaggggcauugagacuauaaagcaguagacaauccccacauaccaucuguagaguuggaacugcauucuuuuaaaguuuuauaugcauauauuuuagggcuguagacuuacuuuccuauuuucuuuuccauugcuuauucuugagcacaaaaugauaaucaauuauuacauuuauacaucaccuuuuugacuuuuccaagcccuuuuacagcucuuggcauuuuccucgccuaggccugugagguaacugggaucgcaccuuuuauaccagagaccugaggcagaugaaauuuauuuccaucuaggacuagaaaaacuugggucucuuaccgcgagacugagaggcagaagucagcccgaaugccugucaguuucauggaggggaaacgcaaaaccugcaguuccugaguaccuucuacaggcccggcccagccuaggcccgggguggccacaccacagcaagccggcccccccucuuuuggccuuguggauaagggagaguugaccguuuucauccuggccuccuuuugcuguuuggauguuuccacgggucucacuuauaccaaagggaaaacucuucauuaaaguccguauuucuucuaaaaaaaaaaaaaaaaaaaaaaaaaaa

SEQ ID NO: 20 - RNA, 1208 nt, Homo sapiens
ggcggcgacagggagggaggaagccuaggaguccgccgcgggacggaggccugggggaacugggaguucagcuuucugcagagggccacuaggaaccucggauugcccacggaagccagccacuuucuuugacaguccagcccaccuccucuucugcccggagaagcuccaggggcugccuuugugaucacagcaucuucacaaggaccaaaggaaaauaagauuucuuguaagaacaccgugaccacaucuuuaaaaugacccauuucguggcucccacaagauuuacaccuccacacugaggccggaagugguuuugccccuauaaaacauggcgaaaagcuuucuugucuccaaggaaacgccacguaaugagucaaagcuguggcgcacgcgcagaaguacaagcuaccggaagugauggcgccccuacuaaagccuugggguuaguacgcgugcgcagcaguuucuuccgacaguuguguugugccaaugguggagaagaaaacuucgguucgcucccaggaccccgggcagcggcgggugcuggaccgggcugcccggcagcgucgcaucaaccggcagcuggaggcccuggagaaugacaacuuccaggaugacccccacgcgggacucccucagcucggcaagagacugccucaguuugaugacgaugcggacacuggaaagaaaaagaagaaaacccgaggugaucauuuuaaacuucgcuuccgaaaaaacuuucaggcccuguuggaggagcagaacuugaguguggccgagggcccuaacuaccugacggccugugcgggacccccaucgcggccccagcgccccuucugugcugucuguggcuucccaucccccuacaccugugucagcugcggugcccgguacugcacugugcgcugucuggggacccaccaggagaccaggugucugaaguggacugugugagccugggcauucccagagaggaagggccgcugugcacugcccggccuucagaaagacagaauuucaucacccaaugcagggggagcucuuccuggaccaagggaggagccgcucauucacccaacaaaacugugucuuaucugccaggaaagaccagccucacuccugggaacugucuggcagguaggcugggccccccagugcuguuagaauaaaaagccucgugccggaaaaaaaaaaaaaaaaaaaaa

SEQ ID NO: 21 - RNA, 1080 nt, Homo sapiens
ggagaggacuggcugggcaggggcgccgccccgccucgggagaggcgggccgggcggggcugggaguauuugaggcucggagccaccgccccgccggcgcccgcagcaccuccucgccagcagccguccggagccagccaacgagcggaaaauggcagacaauuuuucgcuccaugaugcguuaucugggucuggaaacccaaacccucaaggauggccuggcgcaugggggaaccagccugcuggggcagggggcuacccaggggcuuccuauccuggggccuaccccgggcaggcacccccaggggcuuauccuggacaggcaccuccaggcgccuacccuggagcaccuggagcuuaucccggagcaccugcaccuggagucuacccagggccacccagcggcccuggggccuacccaucuucuggacagccaagugccaccggagccuacccugccacuggccccuauggcgccccugcugggccacugauugugccuuauaaccugccuuugccugggggaguggugccucgcaugcugauaacaauucugggcacggugaagcccaaugcaaacagaauugcuuuagauuuccaaagagggaaugauguugccuuccacuuuaacccacgcuucaaugagaacaacaggagagucauuguuugcaauacaaagcuggauaauaacuggggaagggaagaaagacagucgguuuucccauuugaaagugggaaaccauucaaaauacaaguacugguugaaccugaccacuucaagguugcagugaaugaugcucacuuguugcaguacaaucaucggguuaaaaaacucaaugaaaucagcaaacugggaauuucuggugacauagaccucaccagugcuucauauaccaugauauaaucugaaaggggcagauuaaaaaaaaaaaaagaaucuaaaccuuacauguguaaagguuucauguucacugugagugaaaauuuuuacauucaucaauaucccucuuguaagucaucuacuuaauaaauauuacagugaauuaccugucucaauaugucaaaaaaaaaaaaaaaaaa

SEQ ID NO: 22 - RNA, 1768 nt, Homo sapiens
uggcaaucuagcuggauagcaucccugccccuugaagagauguuuuuguggcgccacacuacugacuuaggcauaaugccuagagauggauuagaacugcacaaugaacuaguggugagguucaguuuaauggaaauuggugaaagcuuuuaggauaaaaugauaaucuuuguuucuuucaggaaaauggcagacaauuuuucgguaaguguuuuaugccuguuucuuccccuugaucagcuccacaugguugaggguuggggguuuuguuuuuaccaugacuuucccuuuucacucucccacugcguggcuuccccuggacucauuuguccaaugagggcuugcaagcuggagccuuguuuuuccagcagcagauuugggaagaaagccaggcagagcgaggccugggacucacucacaguaacccuuucaccaaaaggcccagggcggaagggaguggacucugccggcaggagcugagaaauccucugaguagcgggaagugcgguacagucugggcauucugauguuugugauuguuuuucucacggugaugaaaaaguaugugcuauaaguagaggagcgcuaacuccugacuugagcuaauuaugaaaaugcagcccucccugaucugagacguugggaggcaagaauaaagugaaaaaguauauguaaucccaacaucuaauuuuagucuuagaaacucaaacuauuaauaaguggaaaaaguuuaaugauaugcauguaaugccuuugccauauuccucuccuucuuagaucacauauuccuauuuuccugaaaauucugcuuuugagaaugcuuucugucccguaauuguguaugucuuucuuuccagcuccaugaugcguuaucugggucuggaaacccaaacccucaaggauggccuggcgcaugggggaaccagccugcuggggcagggggcuacccaggggcuuccuauccuggggccuaccccgggcaggcacccccaggggcuuauccuggacaggcaccuccaggcgccuacccuggagcaccuggagcuuaucccggagcaccugcaccuggagucuacccagggccacccagcggcccuggggccuacccaucuucuggacagccaagugccaccggagccuacccugccacuggccccuauggcgccccugcugggccacugauugugccuuauaaccugccuuugccugggggaguggugccucgcaugcugauaacaauucugggcacggugaagcccaaugcaaacagaauugcuuuagauuuccaaagagggaaugauguugccuuccacuuuaacccacgcuucaaugagaacaacaggagagucauuguuugcaauacaaagcuggauaauaacuggggaagggaagaaagacagucgguuuucccauuugaaagugggaaaccauucaaaauacaaguacugguugaaccugaccacuucaagguugcagugaaugaugcucacuuguugcaguacaaucaucggguuaaaaaacucaaugaaaucagcaaacugggaauuucuggugacauagaccucaccagugcuucauauaccaugauauaaucugaaaggggcagauuaaaaaaaaaaaaagaaucuaaaccuuacauguguaaagguuucauguucacugugagugaaaauuuuuacauucaucaauaucccucuuguaagucaucuacuuaauaaauauuacagugaauuaccugucucaauaugucaaaaaaaaaaaaaaaaaa

SEQ ID NO: 23 - RNA, 3503 nt, Homo sapiens
gcuggugucagagcccggcgagcgcuggcaguuccgcggcggggaugcugaggagcgcuggguccgggagcagcccuggccccugcggacuuccgaggccgugaaaaccccugcgcugcggcccuucccaggcccccgaggccguucgccguucccgaagcccgacugggggaagaguccagcaccaaagcggccguucucggauuccggagcguucuggagccccgagagacgccccgggguucuagaagcuccccggcggcgcccagucccggcuucauucgggcgucccuccgaaacccacucgggugcacgggucgucggcgagccgcgaccggguccuggcgcgcaccaugaucguggcggacuccgagugccgcgcagagcucaaggacuaccugcgguucgccccgggcggcgucggcgacucgggccccggagaggagcagagggagagccgggcucggcgaggcccucgagggcccagcgccuucauccccguggaggagguccuucgggagggggcugagagccucgagcagcaccuggggcuggaggcacugauguccucugggcgaguagacaaccuggcaguggugaugggccugcacccugacuacuuuaccagcuucuggcgccugcacuaccugcugcugcacacggauggucccuuggccagcuccuggcgccacuacauugccaucauggcugccgcccgccaucaguguucuuaccugguaggcucccacauggccgaguuucugcagacugguggugacccugaguggcugcugggccuccaccgggcccccgagaagcugcgcaaacucagcgagaucaacaaguugcuggcgcaucggccauggcucaucaccaaggaacacauccaggccuugcugaagaccggcgagcacacuuggucccuggccgagcucauucaggcucugguccugcucacccacugccacucgcucuccuccuucguguuuggcuguggcauccucccugagggggaugcagauggcagcccugccccccaggcaccuacacccccuagugaacagagcagccccccaagcagggacccguugaacaacucugggggcuuugagucugcccgcgacguggaggcgcugauggagcgcaugcagcagcugcaggagagccugcugcgggaugaggggacgucccaggaggagauggagagccgcuuugagcuggagaagucagagagccugcuggugacccccucagcugacauccuggagcccucuccacacccagacaugcugugcuuuguggaagacccuacuuucggauaugaggacuucacucggagaggggcucaggcacccccuaccuuccgggcccaggauuauaccugggaagaccauggcuacucgcugauccagcggcuuuacccugagggugggcagcugcuggaugagaaguuccaggcagccuauagccucaccuacaauaccaucgccaugcacagugguguggacaccuccgugcuccgcagggccaucuggaacuauauccacugcgucuuuggcaucagauaugaugacuaugauuauggggaggugaaccagcuccuggagcggaaccucaaggucuauaucaagacaguggccugcuacccagagaagaccacccgaagaauguacaaccucuucuggaggcacuuccgccacucagagaagguccacgugaacuugcugcuccuggaggcgcgcaugcaagccgcucugcuguacgcccuccgugccaucacccgcuacaugaccugacuccugagcaggaccugggcccgguucagcuccccacaaggacuucucugucuggagacagccccagacccuuuugugucccaugcccacccuccccacgcugcagugggcuugugugugaugugcagucccgaagccacacccucccuuuuccucacuggaauggacaguucauugcacugacucugggaucucagcccugcuccugggagcuggaagagcacuuggagauccuaagggaccacacccuuccuccuuccccugcccacagaggcagagggcacaggaaagaagccgggccaagcucggaauuaaugugccacaaguguuguggccuuccugaacugggaagucccuggcuggcccccgggggagaggggcaaaugccuccgggacugacacuccaggcagcuuugccuucucuccccugucauuuccagauuucauuaccuccuacuugccauucacccaucaaugugaaagucagggucacagcuggucuguguguccaguucccuaaaagccuguucuguugggcagccugaggcuguugcccgaauccuaguucaguuuuuugacuuccuuugcccuuuuucccuuuucuccaugcuuaauggugugaggcgucaggagagaggccaaguacauaaaaaaaaaaaaagcagauuaucucuagagaguuugagccuuugcuggucacauugccuucugaagaggagggaguauuagauuauaaauccucuuuauuuugguccuuuaugcuugagguuccaaccuggagccacagugugugagaggaggaggagagggagaauucuguucucccagagcugcaccugccucgcagaggccagcaccccacucuccugccuccaguggcccugccgcagaugucucccaaaaaguugagccuuucuagauggcuuagguggcaccauggcucagcaggaggggcgggaggcaccaggguucuuguuuggacccugccccugggccauggccaggugaccauggcuacauugccaaaccucugacugccacagcugcagacugagagggugggucugaguccccacaaugucugaagcugccccugggauucucaggccaaccugccaacagcaagcggauuuucuugcaagaucagggaccccauuucugcagccagugucuccugggugccuucugaggacucccacccccaucccaguaucucaucuguccccucuccuggggcuuaaguggguugcuuccaggcagaagcagccaaggaccgauuccaggcacuuucuguagcaaaugacugugaauuacgacuucucuugcccuucuucuagcagucugugccuccucucugaccaguuuggagggcacugaagaaaggcaagggccgugcugcugcugggcggggcaggagaggagccuggccagugugccacauuaaauacccgugcaggcgcggagaagcaaccggcacccccuuccggccugaaagcccucccugcaagaaggugugcaggagagaagaggccccggcauggggaucuggguucuagagggcaugugaugacuguaaauguucacuggguggguagggagugguauccaguguucaagugcagaaaucuuuggcuuugcuaccaguuccauaugaugagaaauaaacguucgcugagguuuuguuucauaaaaaaaaaaaaaaaaaaa

SEQ ID NO: 24 - RNA, 19 nt, artificial
  Chemically synthesized
gcccuucauucaaucuaga

SEQ ID NO: 25 - RNA, 19 nt, artificial
  Chemically synthesized
cauccauuuacccucacaa

SEQ ID NO: 26 - RNA, 19 nt, artificial
  Chemically synthesized
ucauccauuuacccucaca

SEQ ID NO: 27 - RNA, 19 nt, artificial
  Chemically synthesized
gccuuauccuuuuacccau

SEQ ID NO: 28 - RNA, 19 nt, artificial
  Chemically synthesized
caauacucaacacccuguu

SEQ ID NO: 29 - RNA, 19 nt, artificial
  Chemically synthesized
cccuucauucaaucuagaa

SEQ ID NO: 30 - RNA, 19 nt, artificial
  Chemically synthesized
ggacucuaaagaaggaaug

SEQ ID NO: 31 - RNA, 19 nt, artificial
  Chemically synthesized
ggaaacuuuuguuugauga

SEQ ID NO: 32 - RNA, 19 nt, artificial
  Chemically synthesized
ccguugguuugcagauuua

SEQ ID NO: 33 - RNA, 19 nt, artificial
  Chemically synthesized
cugcccuucauucaaucua

SEQ ID NO: 34 - RNA, 19 nt, artificial
  Chemically synthesized
gaguauuucucagaacauu

SEQ ID NO: 35 - RNA, 19 nt, artificial
  Chemically synthesized
ccaugaauguccugcuuuu

SEQ ID NO: 36 - RNA, 19 nt, artificial
  Chemically synthesized
cugccuccaucuagucaag

SEQ ID NO: 37 - RNA, 19 nt, artificial
  Chemically synthesized
ggguucaucuuaaaauagu

SEQ ID NO: 38 - RNA, 19 nt, artificial
  Chemically synthesized
ccaacugaaaccaaagcaa

SEQ ID NO: 39 - RNA, 19 nt, artificial
  Chemically synthesized
cgaaagacuuuacagguau

SEQ ID NO: 40 - RNA, 19 nt, artificial
  Chemically synthesized
ccgaaagacuuuacaggua

SEQ ID NO: 41 - RNA, 19 nt, artificial
  Chemically synthesized
ggauuuucaaaaccggcag

SEQ ID NO: 42 - RNA, 19 nt, artificial
  Chemically synthesized
ggagauuguuggauaaaag

SEQ ID NO: 43 - RNA, 19 nt, artificial
  Chemically synthesized
gcacacuguugauuuucau

SEQ ID NO: 44 - RNA, 19 nt, artificial
  Chemically synthesized
ggagaaaaauaucaugcac

SEQ ID NO: 45 - RNA, 19 nt, artificial
  Chemically synthesized
ugcccuucauucaaucuag

SEQ ID NO: 46 - RNA, 19 nt, artificial
  Chemically synthesized
ugcuauuccucaugaucac

SEQ ID NO: 47 - RNA, 19 nt, artificial
  Chemically synthesized
guggaaacuuuuguuugau

SEQ ID NO: 48 - RNA, 19 nt, artificial
  Chemically synthesized
ucaauacucaacacccugu

SEQ ID NO: 49 - RNA, 19 nt, artificial
  Chemically synthesized
guauauugaugguccuuuu

SEQ ID NO: 50 - RNA, 19 nt, artificial
  Chemically synthesized
acugccuccaucuagucaa

SEQ ID NO: 51 - RNA, 19 nt, artificial
  Chemically synthesized
ggagacuggacagaacgau

SEQ ID NO: 52 - RNA, 19 nt, artificial
  Chemically synthesized
cacaauguguccaacugaa

SEQ ID NO: 53 - RNA, 19 nt, artificial
  Chemically synthesized
ccggcugcaucagucuuaa

SEQ ID NO: 54 - RNA, 19 nt, artificial
  Chemically synthesized
cuauuccucaugaucacag

SEQ ID NO: 55 - RNA, 19 nt, artificial
  Chemically synthesized
ucacaacuguuccuggccu

SEQ ID NO: 56 - RNA, 19 nt, artificial
  Chemically synthesized
ugaggauccuagaaaacuu

SEQ ID NO: 57 - RNA, 19 nt, artificial
  Chemically synthesized
caacuucucagugaauuac

SEQ ID NO: 58 - RNA, 19 nt, artificial
  Chemically synthesized
aggagauuguuggauaaaa

SEQ ID NO: 59 - RNA, 19 nt, artificial
  Chemically synthesized
ccuuauccuuuuacccaug

SEQ ID NO: 60 - RNA, 19 nt, artificial
  Chemically synthesized
aggacucuaaagaaggaau

SEQ ID NO: 61 - RNA, 19 nt, artificial
  Chemically synthesized
cccaauucacuauccaaga

SEQ ID NO: 62 - RNA, 19 nt, artificial
  Chemically synthesized
gacccaauucacuauccaa

SEQ ID NO: 63 - RNA, 19 nt, artificial
  Chemically synthesized
gcauaacaaguuuuggcaa

SEQ ID NO: 64 - RNA, 19 nt, artificial
  Chemically synthesized
ggcuaggauugugucuaag

SEQ ID NO: 65 - RNA, 19 nt, artificial
  Chemically synthesized
cagaacgauuucgagauuu

SEQ ID NO: 66 - RNA, 19 nt, artificial
  Chemically synthesized
cgaauggucaaagaaaauu

SEQ ID NO: 67 - RNA, 19 nt, artificial
  Chemically synthesized
cucaugaucacagccucua

SEQ ID NO: 68 - RNA, 19 nt, artificial
  Chemically synthesized
ugguguuacuaucuguauu

SEQ ID NO: 69 - RNA, 19 nt, artificial
  Chemically synthesized
gguugaacaaaugcaagau

SEQ ID NO: 70 - RNA, 19 nt, artificial
  Chemically synthesized
cuagugaggagcugaacuu

SEQ ID NO: 71 - RNA, 19 nt, artificial
  Chemically synthesized
ggaaucaaucagcuguguu

SEQ ID NO: 72 - RNA, 19 nt, artificial
  Chemically synthesized
cggaaucaaucagcugugu

SEQ ID NO: 73 - RNA, 19 nt, artificial
  Chemically synthesized
gcaauuucuaagacuuuga

SEQ ID NO: 74 - RNA, 19 nt, artificial
  Chemically synthesized
acccaauucacuauccaag

SEQ ID NO: 75 - RNA, 19 nt, artificial
  Chemically synthesized
aggaaaaacaguugguguu

SEQ ID NO: 76 - RNA, 19 nt, artificial
  Chemically synthesized
uggaaacuuuuguuugaug

SEQ ID NO: 77 - RNA, 19 nt, artificial
  Chemically synthesized
cugaauucaagacuguuua

SEQ ID NO: 78 - RNA, 19 nt, artificial
  Chemically synthesized
cagaagauaauuggagaaa

SEQ ID NO: 79 - RNA, 19 nt, artificial
  Chemically synthesized
guaacuccauuugcaucaa

SEQ ID NO: 80 - RNA, 19 nt, artificial
  Chemically synthesized
agaaaaucauccauuuacc

SEQ ID NO: 81 - RNA, 19 nt, artificial
  Chemically synthesized
gaaagacuuuacagguaua

SEQ ID NO: 82 - RNA, 19 nt, artificial
  Chemically synthesized
gaaaacuucucuucacaac

SEQ ID NO: 83 - RNA, 19 nt, artificial
  Chemically synthesized
ggauccuagaaaacuucuc

SEQ ID NO: 84 - RNA, 19 nt, artificial
  Chemically synthesized
agacuuuguugaacugaau

SEQ ID NO: 85 - RNA, 19 nt, artificial
  Chemically synthesized
guugaacaaaugcaagauu

SEQ ID NO: 86 - RNA, 19 nt, artificial
  Chemically synthesized
cuuauccuuuuacccaugu

SEQ ID NO: 87 - RNA, 19 nt, artificial
  Chemically synthesized
cugcagccuuauccuuuua

SEQ ID NO: 88 - RNA, 19 nt, artificial
  Chemically synthesized
ugccaaagaauaguaaggu

SEQ ID NO: 89 - RNA, 19 nt, artificial
  Chemically synthesized
agaaggaaugagugcaauu

SEQ ID NO: 90 - RNA, 19 nt, artificial
  Chemically synthesized
aaagaaggaaugagugcaa

SEQ ID NO: 91 - RNA, 19 nt, artificial
  Chemically synthesized
cucuaaagaaggaaugagu

SEQ ID NO: 92 - RNA, 19 nt, artificial
  Chemically synthesized
caggacucuaaagaaggaa

SEQ ID NO: 93 - RNA, 19 nt, artificial
  Chemically synthesized
ccaagacucuucauaaacu

SEQ ID NO: 94 - RNA, 19 nt, artificial
  Chemically synthesized
cuguucuuaaccucaacug

SEQ ID NO: 95 - RNA, 19 nt, artificial
  Chemically synthesized
caauucacuauccaagacu

SEQ ID NO: 96 - RNA, 19 nt, artificial
  Chemically synthesized
caucuguucuuaaccucaa

SEQ ID NO: 97 - RNA, 19 nt, artificial
  Chemically synthesized
gcaaaauauaacagaggaa

SEQ ID NO: 98 - RNA, 19 nt, artificial
  Chemically synthesized
gguggaaacuuuuguuuga

SEQ ID NO: 99 - RNA, 19 nt, artificial
  Chemically synthesized
ucgguggaaacuuuuguuu

SEQ ID NO: 100 - RNA, 19 nt, artificial
  Chemically synthesized
agaaaaauaucaugcacug

SEQ ID NO: 101 - RNA, 19 nt, artificial
  Chemically synthesized
acagaagauaauuggagaa

SEQ ID NO: 102 - RNA, 19 nt, artificial
  Chemically synthesized
cuaggauugugucuaagca

SEQ ID NO: 103 - RNA, 19 nt, artificial
  Chemically synthesized
cccaagcuguauauugaug

SEQ ID NO: 104 - RNA, 19 nt, artificial
  Chemically synthesized
acgauuucgagauuuacua

SEQ ID NO: 105 - RNA, 19 nt, artificial
  Chemically synthesized
gacagaacgauuucgagau

SEQ ID NO: 106 - RNA, 19 nt, artificial
  Chemically synthesized
acaauguguccaacugaaa

SEQ ID NO: 107 - RNA, 19 nt, artificial
  Chemically synthesized
acccucacaauguguccaa

SEQ ID NO: 108 - RNA, 19 nt, artificial
  Chemically synthesized
ccuguacugugccgaaaga

SEQ ID NO: 109 - RNA, 19 nt, artificial
  Chemically synthesized
cagauuccaagcuaauuuu

SEQ ID NO: 110 - RNA, 19 nt, artificial
  Chemically synthesized
caaacuaauuuagauaccc

SEQ ID NO: 111 - RNA, 19 nt, artificial
  Chemically synthesized
agaugaggauccuagaaaa

SEQ ID NO: 112 - RNA, 19 nt, artificial
  Chemically synthesized
cgagaugaggauccuagaa

SEQ ID NO: 113 - RNA, 19 nt, artificial
  Chemically synthesized
ugaauuacagugaagacuu

SEQ ID NO: 114 - RNA, 19 nt, artificial
  Chemically synthesized
ucguguuccucuuuaaauu

SEQ ID NO: 115 - RNA, 19 nt, artificial
  Chemically synthesized
gagacccugaagaauauuu

SEQ ID NO: 116 - RNA, 19 nt, artificial
  Chemically synthesized
acauguuuaaucuggaaac

SEQ ID NO: 117 - RNA, 19 nt, artificial
  Chemically synthesized
gcagccuuauccuuuuacc

SEQ ID NO: 118 - RNA, 19 nt, artificial
  Chemically synthesized
guuaugccaaagaauagua

SEQ ID NO: 119 - RNA, 19 nt, artificial
  Chemically synthesized
ugagugcaauuucuaagac

SEQ ID NO: 120 - RNA, 19 nt, artificial
  Chemically synthesized
acaauaaagagucuuucag

SEQ ID NO: 121 - RNA, 19 nt, artificial
  Chemically synthesized
acaacucauaugggacaag

SEQ ID NO: 122 - RNA, 19 nt, artificial
  Chemically synthesized
guggacccaauucacuauc

SEQ ID NO: 123 - RNA, 19 nt, artificial
  Chemically synthesized
cucgguggaaacuuuuguu

SEQ ID NO: 124 - RNA, 19 nt, artificial
  Chemically synthesized
gagaaaaauaucaugcacu

SEQ ID NO: 125 - RNA, 19 nt, artificial
  Chemically synthesized
uggagaaaaauaucaugca

SEQ ID NO: 126 - RNA, 19 nt, artificial
  Chemically synthesized
acaaguuuuggcaagagaa

SEQ ID NO: 127 - RNA, 19 nt, artificial
  Chemically synthesized
ugaggaaucacugaacuau

SEQ ID NO: 128 - RNA, 19 nt, artificial
  Chemically synthesized
gcuguauauugaugguccu

SEQ ID NO: 129 - RNA, 19 nt, artificial
  Chemically synthesized
caagcuguauauugauggu

SEQ ID NO: 130 - RNA, 19 nt, artificial
  Chemically synthesized
uggucaguauauuacucua

SEQ ID NO: 131 - RNA, 19 nt, artificial
  Chemically synthesized
ccgaauggucaaagaaaau

SEQ ID NO: 132 - RNA, 19 nt, artificial
  Chemically synthesized
aguuuacccagcacaaauu

SEQ ID NO: 133 - RNA, 19 nt, artificial
  Chemically synthesized
gaguuuacccagcacaaau

SEQ ID NO: 134 - RNA, 19 nt, artificial
  Chemically synthesized
uccucaugaucacagccuc

SEQ ID NO: 135 - RNA, 19 nt, artificial
  Chemically synthesized
cuccaugaauguccugcuu

SEQ ID NO: 136 - RNA, 19 nt, artificial
  Chemically synthesized
gugaauuacagugaagacu

SEQ ID NO: 137 - RNA, 19 nt, artificial
  Chemically synthesized
cagugaauuacagugaaga

SEQ ID NO: 138 - RNA, 19 nt, artificial
  Chemically synthesized
ccgaggaucacagaagguu

SEQ ID NO: 139 - RNA, 19 nt, artificial
  Chemically synthesized
ccgaacacucuuggcuuac

SEQ ID NO: 140 - RNA, 19 nt, artificial
  Chemically synthesized
cuuuuacccaugugccgaa

SEQ ID NO: 141 - RNA, 19 nt, artificial
  Chemically synthesized
ugauuuucaugguggauuc

SEQ ID NO: 142 - RNA, 19 nt, artificial
  Chemically synthesized
aggaaugagugcaauuucu

SEQ ID NO: 143 - RNA, 19 nt, artificial
  Chemically synthesized
aagaaggaaugagugcaau

SEQ ID NO: 144 - RNA, 19 nt, artificial
  Chemically synthesized
ugggacaagauuugaauac

SEQ ID NO: 145 - RNA, 19 nt, artificial
  Chemically synthesized
gcaucuguucuuaaccuca

SEQ ID NO: 146 - RNA, 19 nt, artificial
  Chemically synthesized
acugaauucaagacuguuu

SEQ ID NO: 147 - RNA, 19 nt, artificial
  Chemically synthesized
gggauacagaagauaauug

SEQ ID NO: 148 - RNA, 19 nt, artificial
  Chemically synthesized
cucuguauguugcauaaca

SEQ ID NO: 149 - RNA, 19 nt, artificial
  Chemically synthesized
ugcagagauauccaguccu

SEQ ID NO: 150 - RNA, 19 nt, artificial
  Chemically synthesized
gacuauacuuuauuugggu

SEQ ID NO: 151 - RNA, 19 nt, artificial
  Chemically synthesized
ccuguuggaugacuggaaa

SEQ ID NO: 152 - RNA, 19 nt, artificial
  Chemically synthesized
ggauugugucuaagcagag

SEQ ID NO: 153 - RNA, 19 nt, artificial
  Chemically synthesized
aggauugugucuaagcaga

SEQ ID NO: 154 - RNA, 19 nt, artificial
  Chemically synthesized
aacuccauuugcaucaaua

SEQ ID NO: 155 - RNA, 19 nt, artificial
  Chemically synthesized
ccaagcuguauauugaugg

SEQ ID NO: 156 - RNA, 19 nt, artificial
  Chemically synthesized
acuccgaaauucugcccuu

SEQ ID NO: 157 - RNA, 19 nt, artificial
  Chemically synthesized
cuggacagaacgauuucga

SEQ ID NO: 158 - RNA, 19 nt, artificial
  Chemically synthesized
gccgaaagacuuuacaggu

SEQ ID NO: 159 - RNA, 19 nt, artificial
  Chemically synthesized
cggcugcaucagucuuaac

SEQ ID NO: 160 - RNA, 19 nt, artificial
  Chemically synthesized
ucuacaugcugcugacguu

SEQ ID NO: 161 - RNA, 19 nt, artificial
  Chemically synthesized
ucuucugguauacucauaa

SEQ ID NO: 162 - RNA, 19 nt, artificial
  Chemically synthesized
gugguguuacuaucuguau

SEQ ID NO: 163 - RNA, 19 nt, artificial
  Chemically synthesized
ccugugguguuacuaucug

SEQ ID NO: 164 - RNA, 19 nt, artificial
  Chemically synthesized
caggagauuguuggauaaa

SEQ ID NO: 165 - RNA, 19 nt, artificial
  Chemically synthesized
ugguugaacaaaugcaaga

SEQ ID NO: 166 - RNA, 19 nt, artificial
  Chemically synthesized
cccugaagaauauuugaug

SEQ ID NO: 167 - RNA, 19 nt, artificial
  Chemically synthesized
acccugaagaauauuugau

SEQ ID NO: 168 - RNA, 19 nt, artificial
  Chemically synthesized
agagacccugaagaauauu

SEQ ID NO: 169 - RNA, 19 nt, artificial
  Chemically synthesized
cuguguuaugccaaagaau

SEQ ID NO: 170 - RNA, 19 nt, artificial
  Chemically synthesized
gagugcaauuucuaagacu

SEQ ID NO: 171 - RNA, 19 nt, artificial
  Chemically synthesized
ugaaaacuuuugccaugaa

SEQ ID NO: 172 - RNA, 19 nt, artificial
  Chemically synthesized
gaacaacucauaugggaca

SEQ ID NO: 173 - RNA, 19 nt, artificial
  Chemically synthesized
agaggaaaaacaguuggug

SEQ ID NO: 174 - RNA, 19 nt, artificial
  Chemically synthesized
cgguggaaacuuuuguuug

SEQ ID NO: 175 - RNA, 19 nt, artificial
  Chemically synthesized
cagcaucuguucuuaaccu

SEQ ID NO: 176 - RNA, 19 nt, artificial
  Chemically synthesized
uaacaaguuuuggcaagag

SEQ ID NO: 177 - RNA, 19 nt, artificial
  Chemically synthesized
ugcauaacaaguuuuggca

SEQ ID NO: 178 - RNA, 19 nt, artificial
  Chemically synthesized
uuacucuguauguugcaua

SEQ ID NO: 179 - RNA, 19 nt, artificial
  Chemically synthesized
uguauauugaugguccuuu

SEQ ID NO: 180 - RNA, 19 nt, artificial
  Chemically synthesized
cgauuucgagauuuacuac

SEQ ID NO: 181 - RNA, 19 nt, artificial
  Chemically synthesized
ggacagaacgauuucgaga

SEQ ID NO: 182 - RNA, 19 nt, artificial
  Chemically synthesized
cccucagaugucauggaaa

SEQ ID NO: 183 - RNA, 19 nt, artificial
  Chemically synthesized
ccuucuugcuguauaacca

SEQ ID NO: 184 - RNA, 19 nt, artificial
  Chemically synthesized
caugaaccuuucccugaag

SEQ ID NO: 185 - RNA, 19 nt, artificial
  Chemically synthesized
ccagaguauuucucagaac

SEQ ID NO: 186 - RNA, 19 nt, artificial
  Chemically synthesized
ccagcucucagaauauuuc

SEQ ID NO: 187 - RNA, 19 nt, artificial
  Chemically synthesized
gacguugcauguuucagga

SEQ ID NO: 188 - RNA, 19 nt, artificial
  Chemically synthesized
cuaugauaucuucugguau

SEQ ID NO: 189 - RNA, 19 nt, artificial
  Chemically synthesized
ugaauguccugcuuuucug

SEQ ID NO: 190 - RNA, 19 nt, artificial
  Chemically synthesized
cuaacuaugauaucuucug

SEQ ID NO: 191 - RNA, 19 nt, artificial
  Chemically synthesized
gcaauaagaguuucuaacu

SEQ ID NO: 192 - RNA, 19 nt, artificial
  Chemically synthesized
ugaucacagccucuacaua

SEQ ID NO: 193 - RNA, 19 nt, artificial
  Chemically synthesized
gaggauccuagaaaacuuc

SEQ ID NO: 194 - RNA, 19 nt, artificial
  Chemically synthesized
uuacagugaagacuuuguu

SEQ ID NO: 195 - RNA, 19 nt, artificial
  Chemically synthesized
acauuccauauuaccugug

SEQ ID NO: 196 - RNA, 19 nt, artificial
  Chemically synthesized
gaacauuccauauuaccug

SEQ ID NO: 197 - RNA, 19 nt, artificial
  Chemically synthesized
guguuccucuuuaaauugu

SEQ ID NO: 198 - RNA, 19 nt, artificial
  Chemically synthesized
gucguguuccucuuuaaau

SEQ ID NO: 199 - RNA, 19 nt, artificial
  Chemically synthesized
ggcugauugucguguuccu

SEQ ID NO: 200 - RNA, 19 nt, artificial
  Chemically synthesized
cacuguugauuuucauggu

SEQ ID NO: 201 - RNA, 19 nt, artificial
  Chemically synthesized
ugcacacuguugauuuuca

SEQ ID NO: 202 - RNA, 19 nt, artificial
  Chemically synthesized
agacccugaagaauauuug

SEQ ID NO: 203 - RNA, 19 nt, artificial
  Chemically synthesized
gcaagaugaccgucacauu

SEQ ID NO: 204 - RNA, 19 nt, artificial
  Chemically synthesized
ugcagccuuauccuuuuac

SEQ ID NO: 205 - RNA, 19 nt, artificial
  Chemically synthesized
acugcagccuuauccuuuu

SEQ ID NO: 206 - RNA, 19 nt, artificial
  Chemically synthesized
gugcaauuucuaagacuuu

SEQ ID NO: 207 - RNA, 19 nt, artificial
  Chemically synthesized
agugcaauuucuaagacuu

SEQ ID NO: 208 - RNA, 19 nt, artificial
  Chemically synthesized
ugaagcaggacucuaaaga

SEQ ID NO: 209 - RNA, 19 nt, artificial
  Chemically synthesized
aaagagucuuucagcugaa

SEQ ID NO: 210 - RNA, 19 nt, artificial
  Chemically synthesized
ucauaugggacaagauuug

SEQ ID NO: 211 - RNA, 19 nt, artificial
  Chemically synthesized
aacaacucauaugggacaa

SEQ ID NO: 212 - RNA, 19 nt, artificial
  Chemically synthesized
cuauccaagacucuucaua

SEQ ID NO: 213 - RNA, 19 nt, artificial
  Chemically synthesized
ucacuauccaagacucuuc

SEQ ID NO: 214 - RNA, 19 nt, artificial
  Chemically synthesized
cagaggaaaaacaguuggu

SEQ ID NO: 215 - RNA, 19 nt, artificial
  Chemically synthesized
agcaucuguucuuaaccuc

SEQ ID NO: 216 - RNA, 19 nt, artificial
  Chemically synthesized
ccucgguggaaacuuuugu

SEQ ID NO: 217 - RNA, 19 nt, artificial
  Chemically synthesized
agaugggauacagaagaua

SEQ ID NO: 218 - RNA, 19 nt, artificial
  Chemically synthesized
uacucuguauguugcauaa

SEQ ID NO: 219 - RNA, 19 nt, artificial
  Chemically synthesized
agacuauacuuuauuuggg

SEQ ID NO: 220 - RNA, 19 nt, artificial
  Chemically synthesized
gcuggaggcauuggaguaa

SEQ ID NO: 221 - RNA, 19 nt, artificial
  Chemically synthesized
ucccaagcuguauauugau

SEQ ID NO: 222 - RNA, 19 nt, artificial
  Chemically synthesized
uccaacugaaaccaaagca

SEQ ID NO: 223 - RNA, 19 nt, artificial
  Chemically synthesized
cuggucaguauauuacucu

SEQ ID NO: 224 - RNA, 19 nt, artificial
  Chemically synthesized
ccaucauuucggucauaag

SEQ ID NO: 225 - RNA, 19 nt, artificial
  Chemically synthesized
gguauauccggagcaauaa

SEQ ID NO: 226 - RNA, 19 nt, artificial
  Chemically synthesized
ggauuucuggaccuuugug

SEQ ID NO: 227 - RNA, 19 nt, artificial
  Chemically synthesized
aaaaccuucuugcuguaua

SEQ ID NO: 228 - RNA, 19 nt, artificial
  Chemically synthesized
auacucauaaccucuucuu

SEQ ID NO: 229 - RNA, 19 nt, artificial
  Chemically synthesized
guauacucauaaccucuuc

SEQ ID NO: 230 - RNA, 19 nt, artificial
  Chemically synthesized
cuucugguauacucauaac

SEQ ID NO: 231 - RNA, 19 nt, artificial
  Chemically synthesized
aucuucugguauacucaua

SEQ ID NO: 232 - RNA, 19 nt, artificial
  Chemically synthesized
uccaugaauguccugcuuu

SEQ ID NO: 233 - RNA, 19 nt, artificial
  Chemically synthesized
gugaagacuuuguugaacu

SEQ ID NO: 234 - RNA, 19 nt, artificial
  Chemically synthesized
acagugaagacuuuguuga

SEQ ID NO: 235 - RNA, 19 nt, artificial
  Chemically synthesized
acaaaugcaagauugaaca

SEQ ID NO: 236 - RNA, 19 nt, artificial
  Chemically synthesized
uugauuuucaugguggauu

SEQ ID NO: 237 - RNA, 19 nt, artificial
  Chemically synthesized
agaugcacacuguugauuu

SEQ ID NO: 238 - RNA, 19 nt, artificial
  Chemically synthesized
accucaacugcagccuuau

SEQ ID NO: 239 - RNA, 19 nt, artificial
  Chemically synthesized
cucauaugggacaagauuu

SEQ ID NO: 240 - RNA, 19 nt, artificial
  Chemically synthesized
cagaacaacucauauggga

SEQ ID NO: 241 - RNA, 19 nt, artificial
  Chemically synthesized
ccagaacaacucauauggg

SEQ ID NO: 242 - RNA, 19 nt, artificial
  Chemically synthesized
caagacucuucauaaacug

SEQ ID NO: 243 - RNA, 19 nt, artificial
  Chemically synthesized
gguguuuucuguuguggac

SEQ ID NO: 244 - RNA, 19 nt, artificial
  Chemically synthesized
caguugguguuuucuguug

SEQ ID NO: 245 - RNA, 19 nt, artificial
  Chemically synthesized
ucaagacuguuuauaggac

SEQ ID NO: 246 - RNA, 19 nt, artificial
  Chemically synthesized
cacugaauucaagacuguu

SEQ ID NO: 247 - RNA, 19 nt, artificial
  Chemically synthesized
ggauacagaagauaauugg

SEQ ID NO: 248 - RNA, 19 nt, artificial
  Chemically synthesized
augggauacagaagauaau

SEQ ID NO: 249 - RNA, 19 nt, artificial
  Chemically synthesized
agauuuacucuguauguug

SEQ ID NO: 250 - RNA, 19 nt, artificial
  Chemically synthesized
cuguauauugaugguccuu

SEQ ID NO: 251 - RNA, 19 nt, artificial
  Chemically synthesized
ucgagauuuacuacugccu

SEQ ID NO: 252 - RNA, 19 nt, artificial
  Chemically synthesized
guaucugcauuagaaaauc

SEQ ID NO: 253 - RNA, 19 nt, artificial
  Chemically synthesized
ccuggucaguauauuacuc

SEQ ID NO: 254 - RNA, 19 nt, artificial
  Chemically synthesized
gacuuggcuuuggauuucu

SEQ ID NO: 255 - RNA, 19 nt, artificial
  Chemically synthesized
ugauaucuucugguauacu

SEQ ID NO: 256 - RNA, 19 nt, artificial
  Chemically synthesized
aagacuuuguugaacugaa

SEQ ID NO: 257 - RNA, 19 nt, artificial
  Chemically synthesized
ugaagacuuuguugaacug

SEQ ID NO: 258 - RNA, 19 nt, artificial
  Chemically synthesized
cagugaagacuuuguugaa

SEQ ID NO: 259 - RNA, 19 nt, artificial
  Chemically synthesized
ugugguguuacuaucugua

SEQ ID NO: 260 - RNA, 19 nt, artificial
  Chemically synthesized
cugugguguuacuaucugu

SEQ ID NO: 261 - RNA, 19 nt, artificial
  Chemically synthesized
ugaacaaaugcaagauuga

SEQ ID NO: 262 - RNA, 19 nt, artificial
  Chemically synthesized
uugucguguuccucuuuaa

SEQ ID NO: 263 - RNA, 19 nt, artificial
  Chemically synthesized
ugauugucguguuccucuu

SEQ ID NO: 264 - RNA, 19 nt, artificial
  Chemically synthesized
acuguugauuuucauggug

SEQ ID NO: 265 - RNA, 19 nt, artificial
  Chemically synthesized
ccugaagaauauuugaugu

SEQ ID NO: 266 - RNA, 19 nt, artificial
  Chemically synthesized
ggaaaugugagaauguggc

SEQ ID NO: 267 - RNA, 19 nt, artificial
  Chemically synthesized
caacugcagccuuauccuu

SEQ ID NO: 268 - RNA, 19 nt, artificial
  Chemically synthesized
ugcaauuucuaagacuuug

SEQ ID NO: 269 - RNA, 19 nt, artificial
  Chemically synthesized
gcugaaaacuuuugccaug

SEQ ID NO: 270 - RNA, 19 nt, artificial
  Chemically synthesized
auaugggacaagauuugaa

SEQ ID NO: 271 - RNA, 19 nt, artificial
  Chemically synthesized
auccaagacucuucauaaa

SEQ ID NO: 272 - RNA, 19 nt, artificial
  Chemically synthesized
cacuauccaagacucuuca

SEQ ID NO: 273 - RNA, 19 nt, artificial
  Chemically synthesized
uaacagaggaaaaacaguu

SEQ ID NO: 274 - RNA, 19 nt, artificial
  Chemically synthesized
ugggauacagaagauaauu

SEQ ID NO: 275 - RNA, 19 nt, artificial
  Chemically synthesized
cagucaaacagaugggaua

SEQ ID NO: 276 - RNA, 19 nt, artificial
  Chemically synthesized
ggguaugcagagauaucca

SEQ ID NO: 277 - RNA, 19 nt, artificial
  Chemically synthesized
uggaggcauuggaguaacu

SEQ ID NO: 278 - RNA, 19 nt, artificial
  Chemically synthesized
ccauuugaggaaucacuga

SEQ ID NO: 279 - RNA, 19 nt, artificial
  Chemically synthesized
gaccuggucaguauauuac

SEQ ID NO: 280 - RNA, 19 nt, artificial
  Chemically synthesized
ggaaauccgaauggucaaa

SEQ ID NO: 281 - RNA, 19 nt, artificial
  Chemically synthesized
ucaccaucauuucggucau

SEQ ID NO: 282 - RNA, 19 nt, artificial
  Chemically synthesized
cagacuuggcuuuggauuu

SEQ ID NO: 283 - RNA, 19 nt, artificial
  Chemically synthesized
acagacuuggcuuuggauu

SEQ ID NO: 284 - RNA, 19 nt, artificial
  Chemically synthesized
gcuaauuuuccacagacuu

SEQ ID NO: 285 - RNA, 19 nt, artificial
  Chemically synthesized
ugugaagauuuguauggaa

SEQ ID NO: 286 - RNA, 19 nt, artificial
  Chemically synthesized
gaaaaccuucuugcuguau

SEQ ID NO: 287 - RNA, 19 nt, artificial
  Chemically synthesized
cucauaaccucuucuuugu

SEQ ID NO: 288 - RNA, 19 nt, artificial
  Chemically synthesized
ugcaauaagaguuucuaac

SEQ ID NO: 289 - RNA, 19 nt, artificial
  Chemically synthesized
aaaagcagaacauuccaua

SEQ ID NO: 290 - RNA, 19 nt, artificial
  Chemically synthesized
uaaaagcagaacauuccau

SEQ ID NO: 291 - RNA, 19 nt, artificial
  Chemically synthesized
cguguuccucuuuaaauug

SEQ ID NO: 292 - RNA, 19 nt, artificial
  Chemically synthesized
uaaggcugauugucguguu

SEQ ID NO: 293 - RNA, 19 nt, artificial
  Chemically synthesized
ucaugguggauucaagaac

SEQ ID NO: 294 - RNA, 19 nt, artificial
  Chemically synthesized
cugaagaauauuugaugug

SEQ ID NO: 295 - RNA, 19 nt, artificial
  Chemically synthesized
cuuugaaacucagcggaau

SEQ ID NO: 296 - RNA, 19 nt, artificial
  Chemically synthesized
aguaaccagaacaacucau

SEQ ID NO: 297 - RNA, 19 nt, artificial
  Chemically synthesized
gguaugcagagauauccag

SEQ ID NO: 298 - RNA, 19 nt, artificial
  Chemically synthesized
ggaggcauuggaguaacuc

SEQ ID NO: 299 - RNA, 19 nt, artificial
  Chemically synthesized
cuggaggcauuggaguaac

SEQ ID NO: 300 - RNA, 19 nt, artificial
  Chemically synthesized
cauuugaggaaucacugaa

SEQ ID NO: 301 - RNA, 19 nt, artificial
  Chemically synthesized
guguaucugcauuagaaaa

SEQ ID NO: 302 - RNA, 19 nt, artificial
  Chemically synthesized
agcaagaccuggucaguau

SEQ ID NO: 303 - RNA, 19 nt, artificial
  Chemically synthesized
cacagacuuggcuuuggau

SEQ ID NO: 304 - RNA, 19 nt, artificial
  Chemically synthesized
accagcucucagaauauuu

SEQ ID NO: 305 - RNA, 19 nt, artificial
  Chemically synthesized
agaugaccgucacauuaca

SEQ ID NO: 306 - RNA, 19 nt, artificial
  Chemically synthesized
caagaugaccgucacauua

SEQ ID NO: 307 - RNA, 19 nt, artificial
  Chemically synthesized
gacuuugaaacucagcgga

SEQ ID NO: 308 - RNA, 19 nt, artificial
  Chemically synthesized
cugaaaacuuuugccauga

SEQ ID NO: 309 - RNA, 19 nt, artificial
  Chemically synthesized
guugguguuuucuguugug

SEQ ID NO: 310 - RNA, 19 nt, artificial
  Chemically synthesized
acagaugggauacagaaga

SEQ ID NO: 311 - RNA, 19 nt, artificial
  Chemically synthesized
gucaaacagaugggauaca

SEQ ID NO: 312 - RNA, 19 nt, artificial
  Chemically synthesized
ggcuuccacucagucuuug

SEQ ID NO: 313 - RNA, 19 nt, artificial
  Chemically synthesized
cuagucaagacuccgaaau

SEQ ID NO: 314 - RNA, 19 nt, artificial
  Chemically synthesized
agcucucagaauauuuccu

SEQ ID NO: 315 - RNA, 19 nt, artificial
  Chemically synthesized
aaccagcucucagaauauu

SEQ ID NO: 316 - RNA, 19 nt, artificial
  Chemically synthesized
auaaccucuucuuugucuu

SEQ ID NO: 317 - RNA, 19 nt, artificial
  Chemically synthesized
cacagaagguuccaagcag

SEQ ID NO: 318 - RNA, 19 nt, artificial
  Chemically synthesized
gaaaacuuuugccaugaag

SEQ ID NO: 319 - RNA, 19 nt, artificial
  Chemically synthesized
agcaaaauauaacagagga

SEQ ID NO: 320 - RNA, 19 nt, artificial
  Chemically synthesized
ucaaacagaugggauacag

SEQ ID NO: 321 - RNA, 19 nt, artificial
  Chemically synthesized
ucagucaaacagaugggau

SEQ ID NO: 322 - RNA, 19 nt, artificial
  Chemically synthesized
cccucacaauguguccaac

SEQ ID NO: 323 - RNA, 19 nt, artificial
  Chemically synthesized
ccauuuacccucacaaugu

SEQ ID NO: 324 - RNA, 19 nt, artificial
  Chemically synthesized
agacuuuacagguauaucc

SEQ ID NO: 325 - RNA, 19 nt, artificial
  Chemically synthesized
cagaguauuucucagaaca

SEQ ID NO: 326 - RNA, 19 nt, artificial
  Chemically synthesized
agaaaacuguuagaugcac

SEQ ID NO: 327 - RNA, 19 nt, artificial
  Chemically synthesized
gccuccaucuagucaagac

SEQ ID NO: 328 - RNA, 19 nt, artificial
  Chemically synthesized
auaagccagucaccaucau

SEQ ID NO: 329 - RNA, 19 nt, artificial
  Chemically synthesized
ggagcaauaagccagucac

SEQ ID NO: 330 - RNA, 19 nt, artificial
  Chemically synthesized
accuuucccugaaggauuu

SEQ ID NO: 331 - RNA, 19 nt, artificial
  Chemically synthesized
accucuucuuugucuucua

SEQ ID NO: 332 - RNA, 19 nt, artificial
  Chemically synthesized
ccgaaauucugcccuucau

SEQ ID NO: 333 - RNA, 19 nt, artificial
  Chemically synthesized
aagccagucaccaucauuu

SEQ ID NO: 334 - RNA, 19 nt, artificial
  Chemically synthesized
cggagcaauaagccaguca

SEQ ID NO: 335 - RNA, 19 nt, artificial
  Chemically synthesized
guauggaagagcccagauu

SEQ ID NO: 336 - RNA, 19 nt, artificial
  Chemically synthesized
cccugaaggauuuucaaaa

SEQ ID NO: 337 - RNA, 19 nt, artificial
  Chemically synthesized
cccucaacuucucagugaa

SEQ ID NO: 338 - RNA, 19 nt, artificial
  Chemically synthesized
ccaugugccgaacacucuu

SEQ ID NO: 339 - RNA, 19 nt, artificial
  Chemically synthesized
ggacccaauucacuaucca

SEQ ID NO: 340 - RNA, 19 nt, artificial
  Chemically synthesized
gcauuggaguaacuccauu

SEQ ID NO: 341 - RNA, 19 nt, artificial
  Chemically synthesized
ccuucauucaaucuagaaa

SEQ ID NO: 342 - RNA, 19 nt, artificial
  Chemically synthesized
ggccagaguaucacuaccu

SEQ ID NO: 343 - RNA, 19 nt, artificial
  Chemically synthesized
cucacaauguguccaacug

SEQ ID NO: 344 - RNA, 19 nt, artificial
  Chemically synthesized
ccagucaccaucauuucgg

SEQ ID NO: 345 - RNA, 19 nt, artificial
  Chemically synthesized
ccaagcuaauuuuccacag

SEQ ID NO: 346 - RNA, 19 nt, artificial
  Chemically synthesized
accagaguauuucucagaa

SEQ ID NO: 347 - RNA, 19 nt, artificial
  Chemically synthesized
gccucuacauaugcaauaa

SEQ ID NO: 348 - RNA, 19 nt, artificial
  Chemically synthesized
ugguggugcuauuccucau

SEQ ID NO: 349 - RNA, 19 nt, artificial
  Chemically synthesized
ggauaaaagcagaacauuc

SEQ ID NO: 350 - RNA, 19 nt, artificial
  Chemically synthesized
uggauaaaagcagaacauu

SEQ ID NO: 351 - RNA, 19 nt, artificial
  Chemically synthesized
uuggauaaaagcagaacau

SEQ ID NO: 352 - RNA, 19 nt, artificial
  Chemically synthesized
gccucagcaucuguucuua

SEQ ID NO: 353 - RNA, 19 nt, artificial
  Chemically synthesized
guauguugcauaacaaguu

SEQ ID NO: 354 - RNA, 19 nt, artificial
  Chemically synthesized
uccuuuuggaaguccauuu

SEQ ID NO: 355 - RNA, 19 nt, artificial
  Chemically synthesized
ccuccaucuagucaagacu

SEQ ID NO: 356 - RNA, 19 nt, artificial
  Chemically synthesized
gccagaguaucacuaccuc

SEQ ID NO: 357 - RNA, 19 nt, artificial
  Chemically synthesized
ccucacaauguguccaacu

SEQ ID NO: 358 - RNA, 19 nt, artificial
  Chemically synthesized
gcauuagaaaaucauccau

SEQ ID NO: 359 - RNA, 19 nt, artificial
  Chemically synthesized
gaaauccgaauggucaaag

SEQ ID NO: 360 - RNA, 19 nt, artificial
  Chemically synthesized
cauaagucaucccucagau

SEQ ID NO: 361 - RNA, 19 nt, artificial
  Chemically synthesized
ucauaagucaucccucaga

SEQ ID NO: 362 - RNA, 19 nt, artificial
  Chemically synthesized
gucaccaucauuucgguca

SEQ ID NO: 363 - RNA, 19 nt, artificial
  Chemically synthesized
caauaagccagucaccauc

SEQ ID NO: 364 - RNA, 19 nt, artificial
  Chemically synthesized
agaguauuucucagaacau

SEQ ID NO: 365 - RNA, 19 nt, artificial
  Chemically synthesized
gcaucagucuuaaccgaac

SEQ ID NO: 366 - RNA, 19 nt, artificial
  Chemically synthesized
ugcugaaguaucaaacuaa

SEQ ID NO: 367 - RNA, 19 nt, artificial
  Chemically synthesized
uggugcuauuccucaugau

SEQ ID NO: 368 - RNA, 19 nt, artificial
  Chemically synthesized
gguggugcuauuccucaug

SEQ ID NO: 369 - RNA, 19 nt, artificial
  Chemically synthesized
cuagaaaacuucucuucac

SEQ ID NO: 370 - RNA, 19 nt, artificial
  Chemically synthesized
cucaacuucucagugaauu

SEQ ID NO: 371 - RNA, 19 nt, artificial
  Chemically synthesized
ccauauuaccugugguguu

SEQ ID NO: 372 - RNA, 19 nt, artificial
  Chemically synthesized
ccgucacauuacauguuua

SEQ ID NO: 373 - RNA, 19 nt, artificial
  Chemically synthesized
gcaagaccuggucaguaua

SEQ ID NO: 374 - RNA, 19 nt, artificial
  Chemically synthesized
agcuaauuuuccacagacu

SEQ ID NO: 375 - RNA, 19 nt, artificial
  Chemically synthesized
caagcuaauuuuccacaga

SEQ ID NO: 376 - RNA, 19 nt, artificial
  Chemically synthesized
gaagauuuguauggaagag

SEQ ID NO: 377 - RNA, 19 nt, artificial
  Chemically synthesized
gggcugcugaaguaucaaa

SEQ ID NO: 378 - RNA, 19 nt, artificial
  Chemically synthesized
ccucuucuuugucuucuac

SEQ ID NO: 379 - RNA, 19 nt, artificial
  Chemically synthesized
ucaacuucucagugaauua

SEQ ID NO: 380 - RNA, 19 nt, artificial
  Chemically synthesized
uuguuggauaaaagcagaa

SEQ ID NO: 381 - RNA, 19 nt, artificial
  Chemically synthesized
accucugccuguucaucug

SEQ ID NO: 382 - RNA, 19 nt, artificial
  Chemically synthesized
agcugaacuugcucaaucu

SEQ ID NO: 383 - RNA, 19 nt, artificial
  Chemically synthesized
aggagcugaacuugcucaa

SEQ ID NO: 384 - RNA, 19 nt, artificial
  Chemically synthesized
ggaaaccaaagagacccug

SEQ ID NO: 385 - RNA, 19 nt, artificial
  Chemically synthesized
cuguuguggacccaauuca

SEQ ID NO: 386 - RNA, 19 nt, artificial
  Chemically synthesized
gaccugacuaugucaacau

SEQ ID NO: 387 - RNA, 19 nt, artificial
  Chemically synthesized
uccauuugcaucaauacuc

SEQ ID NO: 388 - RNA, 19 nt, artificial
  Chemically synthesized
ccuuuuggaaguccauuug

SEQ ID NO: 389 - RNA, 19 nt, artificial
  Chemically synthesized
cgaaauucugcccuucauu

SEQ ID NO: 390 - RNA, 19 nt, artificial
  Chemically synthesized
cccaguguaucugcauuag

SEQ ID NO: 391 - RNA, 19 nt, artificial
  Chemically synthesized
cagaguuuacccagcacaa

SEQ ID NO: 392 - RNA, 19 nt, artificial
  Chemically synthesized
gcagaguuuacccagcaca

SEQ ID NO: 393 - RNA, 19 nt, artificial
  Chemically synthesized
ucaaaaccggcagaguuua

SEQ ID NO: 394 - RNA, 19 nt, artificial
  Chemically synthesized
ccugaaggauuuucaaaac

SEQ ID NO: 395 - RNA, 19 nt, artificial
  Chemically synthesized
cucagaacauuuucaugaa

SEQ ID NO: 396 - RNA, 19 nt, artificial
  Chemically synthesized
ucuucuuugucuucuacau

SEQ ID NO: 397 - RNA, 19 nt, artificial
  Chemically synthesized
agccucuacauaugcaaua

SEQ ID NO: 398 - RNA, 19 nt, artificial
  Chemically synthesized
ccucaacuucucagugaau

SEQ ID NO: 399 - RNA, 19 nt, artificial
  Chemically synthesized
ggagaaccaggagauuguu

SEQ ID NO: 400 - RNA, 19 nt, artificial
  Chemically synthesized
aaaccaaagagacccugaa

SEQ ID NO: 401 - RNA, 19 nt, artificial
  Chemically synthesized
cgucacauuacauguuuaa

SEQ ID NO: 402 - RNA, 19 nt, artificial
  Chemically synthesized
ggaaaaacaguugguguuu

SEQ ID NO: 403 - RNA, 19 nt, artificial
  Chemically synthesized
ugcagauuuacucuguaug

SEQ ID NO: 404 - RNA, 19 nt, artificial
  Chemically synthesized
uugcagauuuacucuguau

SEQ ID NO: 405 - RNA, 19 nt, artificial
  Chemically synthesized
gucccaguguaucugcauu

SEQ ID NO: 406 - RNA, 19 nt, artificial
  Chemically synthesized
caagaccuggucaguauau

SEQ ID NO: 407 - RNA, 19 nt, artificial
  Chemically synthesized
guauaaccaagggccagag

SEQ ID NO: 408 - RNA, 19 nt, artificial
  Chemically synthesized
cugugccgaaagacuuuac

SEQ ID NO: 409 - RNA, 19 nt, artificial
  Chemically synthesized
uggcuuuggauuucuggac

SEQ ID NO: 410 - RNA, 19 nt, artificial
  Chemically synthesized
gcccagauuccaagcuaau

SEQ ID NO: 411 - RNA, 19 nt, artificial
  Chemically synthesized
agcccagauuccaagcuaa

SEQ ID NO: 412 - RNA, 19 nt, artificial
  Chemically synthesized
agcacaaauuugugaagau

SEQ ID NO: 413 - RNA, 19 nt, artificial
  Chemically synthesized
cccagcacaaauuugugaa

SEQ ID NO: 414 - RNA, 19 nt, artificial
  Chemically synthesized
cucagugaauuacagugaa

SEQ ID NO: 415 - RNA, 19 nt, artificial
  Chemically synthesized
gcaggagaaccaggagauu

SEQ ID NO: 416 - RNA, 19 nt, artificial
  Chemically synthesized
gaacacucuuggcuuaccu

SEQ ID NO: 417 - RNA, 19 nt, artificial
  Chemically synthesized
ggagcugaacuugcucaau

SEQ ID NO: 418 - RNA, 19 nt, artificial
  Chemically synthesized
uggaaaccaaagagacccu

SEQ ID NO: 419 - RNA, 19 nt, artificial
  Chemically synthesized
ccucagcaucuguucuuaa

SEQ ID NO: 420 - RNA, 19 nt, artificial
  Chemically synthesized
ccagcuguaccucagucaa

SEQ ID NO: 421 - RNA, 19 nt, artificial
  Chemically synthesized
gcagauuuacucuguaugu

SEQ ID NO: 422 - RNA, 19 nt, artificial
  Chemically synthesized
uccguugguuugcagauuu

SEQ ID NO: 423 - RNA, 19 nt, artificial
  Chemically synthesized
ugaugguccuuuuggaagu

SEQ ID NO: 424 - RNA, 19 nt, artificial
  Chemically synthesized
cugaaaccaaagcaacauu

SEQ ID NO: 425 - RNA, 19 nt, artificial
  Chemically synthesized
guguccaacugaaaccaaa

SEQ ID NO: 426 - RNA, 19 nt, artificial
  Chemically synthesized
cuuuggauuucuggaccuu

SEQ ID NO: 427 - RNA, 19 nt, artificial
  Chemically synthesized
gugaagauuuguauggaag

SEQ ID NO: 428 - RNA, 19 nt, artificial
  Chemically synthesized
gcacaaauuugugaagauu

SEQ ID NO: 429 - RNA, 19 nt, artificial
  Chemically synthesized
ucagaacauuuucaugaac

SEQ ID NO: 430 - RNA, 19 nt, artificial
  Chemically synthesized
cucucagaauauuuccuua

SEQ ID NO: 431 - RNA, 19 nt, artificial
  Chemically synthesized
cugcuuuucuggaaaaccu

SEQ ID NO: 432 - RNA, 19 nt, artificial
  Chemically synthesized
ggcugcugaaguaucaaac

SEQ ID NO: 433 - RNA, 19 nt, artificial
  Chemically synthesized
guccugcuuuucuggaaaa

SEQ ID NO: 434 - RNA, 19 nt, artificial
  Chemically synthesized
ccucuacauaugcaauaag

SEQ ID NO: 435 - RNA, 19 nt, artificial
  Chemically synthesized
aucuggugaaugcccucaa

SEQ ID NO: 436 - RNA, 19 nt, artificial
  Chemically synthesized
cgaggaucacagaagguuc

SEQ ID NO: 437 - RNA, 19 nt, artificial
  Chemically synthesized
cgaacacucuuggcuuacc

SEQ ID NO: 438 - RNA, 19 nt, artificial
  Chemically synthesized
guuuuugguugaacaaaug

SEQ ID NO: 439 - RNA, 19 nt, artificial
  Chemically synthesized
ugaacuugcucaaucuaag

SEQ ID NO: 440 - RNA, 19 nt, artificial
  Chemically synthesized
ucacuuuucaguucucaaa

SEQ ID NO: 441 - RNA, 19 nt, artificial
  Chemically synthesized
accaaagagacccugaaga

SEQ ID NO: 442 - RNA, 19 nt, artificial
  Chemically synthesized
accgucacauuacauguuu

SEQ ID NO: 443 - RNA, 19 nt, artificial
  Chemically synthesized
gcggaaucaaucagcugug

SEQ ID NO: 444 - RNA, 19 nt, artificial
  Chemically synthesized
ugaaacucagcggaaucaa

SEQ ID NO: 445 - RNA, 19 nt, artificial
  Chemically synthesized
uuaaacaccucugccuguu

SEQ ID NO: 446 - RNA, 19 nt, artificial
  Chemically synthesized
cucagcaucuguucuuaac

SEQ ID NO: 447 - RNA, 19 nt, artificial
  Chemically synthesized
agagaacagaccugacuau

SEQ ID NO: 448 - RNA, 19 nt, artificial
  Chemically synthesized
cagauuuacucuguauguu

SEQ ID NO: 449 - RNA, 19 nt, artificial
  Chemically synthesized
guccuuccguugguuugca

SEQ ID NO: 450 - RNA, 19 nt, artificial
  Chemically synthesized
agcuuagaagacuauacuu

SEQ ID NO: 451 - RNA, 19 nt, artificial
  Chemically synthesized
cccuguuggaugacuggaa

SEQ ID NO: 452 - RNA, 19 nt, artificial
  Chemically synthesized
guccuuuuggaaguccauu

SEQ ID NO: 453 - RNA, 19 nt, artificial
  Chemically synthesized
acuaccuccaccagauguu

SEQ ID NO: 454 - RNA, 19 nt, artificial
  Chemically synthesized
cagaguaucacuaccucca

SEQ ID NO: 455 - RNA, 19 nt, artificial
  Chemically synthesized
ggaccuuugugccuguacu

SEQ ID NO: 456 - RNA, 19 nt, artificial
  Chemically synthesized
cuggaccuuugugccugua

SEQ ID NO: 457 - RNA, 19 nt, artificial
  Chemically synthesized
aagcuaauuuuccacagac

SEQ ID NO: 458 - RNA, 19 nt, artificial
  Chemically synthesized
uccaagcuaauuuuccaca

SEQ ID NO: 459 - RNA, 19 nt, artificial
  Chemically synthesized
cccagauuccaagcuaauu

SEQ ID NO: 460 - RNA, 19 nt, artificial
  Chemically synthesized
ggaagagcccagauuccaa

SEQ ID NO: 461 - RNA, 19 nt, artificial
  Chemically synthesized
ugaagauuuguauggaaga

SEQ ID NO: 462 - RNA, 19 nt, artificial
  Chemically synthesized
agaguuuacccagcacaaa

SEQ ID NO: 463 - RNA, 19 nt, artificial
  Chemically synthesized
auauuuccuuaccagagua

SEQ ID NO: 464 - RNA, 19 nt, artificial
  Chemically synthesized
gcugcugacguugcauguu

SEQ ID NO: 465 - RNA, 19 nt, artificial
  Chemically synthesized
cugguauacucauaaccuc

SEQ ID NO: 466 - RNA, 19 nt, artificial
  Chemically synthesized
cucuacauaugcaauaaga

SEQ ID NO: 467 - RNA, 19 nt, artificial
  Chemically synthesized
ugcagcaagauaccgagau

SEQ ID NO: 468 - RNA, 19 nt, artificial
  Chemically synthesized
ucagugaauuacagugaag

SEQ ID NO: 469 - RNA, 19 nt, artificial
  Chemically synthesized
cugaacuugcucaaucuaa

SEQ ID NO: 470 - RNA, 19 nt, artificial
  Chemically synthesized
gcugaacuugcucaaucua

SEQ ID NO: 471 - RNA, 19 nt, artificial
  Chemically synthesized
uguuuaaucuggaaaccaa

SEQ ID NO: 472 - RNA, 19 nt, artificial
  Chemically synthesized
aacugaguaaccagaacaa

SEQ ID NO: 473 - RNA, 19 nt, artificial
  Chemically synthesized
cucuucauaaacugaguaa

SEQ ID NO: 474 - RNA, 19 nt, artificial
  Chemically synthesized
accugacuaugucaacauc

SEQ ID NO: 475 - RNA, 19 nt, artificial
  Chemically synthesized
uccuuccguugguuugcag

SEQ ID NO: 476 - RNA, 19 nt, artificial
  Chemically synthesized
gauauccaguccuuccguu

SEQ ID NO: 477 - RNA, 19 nt, artificial
  Chemically synthesized
ugacuggaaaccauacaag

SEQ ID NO: 478 - RNA, 19 nt, artificial
  Chemically synthesized
cuagaaauuaucccaagcu

SEQ ID NO: 479 - RNA, 19 nt, artificial
  Chemically synthesized
ucccaguguaucugcauua

SEQ ID NO: 480 - RNA, 19 nt, artificial
  Chemically synthesized
aagaccuggucaguauauu

SEQ ID NO: 481 - RNA, 19 nt, artificial
  Chemically synthesized
ggucauaagucaucccuca

SEQ ID NO: 482 - RNA, 19 nt, artificial
  Chemically synthesized
ucggucauaagucaucccu

SEQ ID NO: 483 - RNA, 19 nt, artificial
  Chemically synthesized
cagucaccaucauuucggu

SEQ ID NO: 484 - RNA, 19 nt, artificial
  Chemically synthesized
ugccuguacugugccgaaa

SEQ ID NO: 485 - RNA, 19 nt, artificial
  Chemically synthesized
agagcccagauuccaagcu

SEQ ID NO: 486 - RNA, 19 nt, artificial
  Chemically synthesized
aggauuuucaaaaccggca

SEQ ID NO: 487 - RNA, 19 nt, artificial
  Chemically synthesized
agaaaacuucucuucacaa

SEQ ID NO: 488 - RNA, 19 nt, artificial
  Chemically synthesized
ugaaugcccucaacuucuc

SEQ ID NO: 489 - RNA, 19 nt, artificial
  Chemically synthesized
uggugaaugcccucaacuu

SEQ ID NO: 490 - RNA, 19 nt, artificial
  Chemically synthesized
ucaucuggcucuccaugaa

SEQ ID NO: 491 - RNA, 19 nt, artificial
  Chemically synthesized
agcaggagaaccaggagau

SEQ ID NO: 492 - RNA, 19 nt, artificial
  Chemically synthesized
gagcugaacuugcucaauc

SEQ ID NO: 493 - RNA, 19 nt, artificial
  Chemically synthesized
ggauucaagaacucccuag

SEQ ID NO: 494 - RNA, 19 nt, artificial
  Chemically synthesized
guggauucaagaacucccu

SEQ ID NO: 495 - RNA, 19 nt, artificial
  Chemically synthesized
ugauucacuuuucaguucu

SEQ ID NO: 496 - RNA, 19 nt, artificial
  Chemically synthesized
gaccgucacauuacauguu

SEQ ID NO: 497 - RNA, 19 nt, artificial
  Chemically synthesized
ucagcuguguuaugccaaa

SEQ ID NO: 498 - RNA, 19 nt, artificial
  Chemically synthesized
gucuuucagcugaaaacuu

SEQ ID NO: 499 - RNA, 19 nt, artificial
  Chemically synthesized
cagcuguaccucagucaaa

SEQ ID NO: 500 - RNA, 19 nt, artificial
  Chemically synthesized
augucaacauccagcugua

SEQ ID NO: 501 - RNA, 19 nt, artificial
  Chemically synthesized
agaccugacuaugucaaca

SEQ ID NO: 502 - RNA, 19 nt, artificial
  Chemically synthesized
ccaguccuuccguugguuu

SEQ ID NO: 503 - RNA, 19 nt, artificial
  Chemically synthesized
ucaacacccuguuggauga

SEQ ID NO: 504 - RNA, 19 nt, artificial
  Chemically synthesized
ggaguaacuccauuugcau

SEQ ID NO: 505 - RNA, 19 nt, artificial
  Chemically synthesized
cauuggaguaacuccauuu

SEQ ID NO: 506 - RNA, 19 nt, artificial
  Chemically synthesized
ggguuaaacaccucugccu

SEQ ID NO: 507 - RNA, 19 nt, artificial
  Chemically synthesized
uggaaguccauuugaggaa

SEQ ID NO: 508 - RNA, 19 nt, artificial
  Chemically synthesized
aucacuaccuccaccagau

SEQ ID NO: 509 - RNA, 19 nt, artificial
  Chemically synthesized
acugaaaccaaagcaacau

SEQ ID NO: 510 - RNA, 19 nt, artificial
  Chemically synthesized
ucacaauguguccaacuga

SEQ ID NO: 511 - RNA, 19 nt, artificial
  Chemically synthesized
gucaguauauuacucuaca

SEQ ID NO: 512 - RNA, 19 nt, artificial
  Chemically synthesized
uccgaauggucaaagaaaa

SEQ ID NO: 513 - RNA, 19 nt, artificial
  Chemically synthesized
cggucauaagucaucccuc

SEQ ID NO: 514 - RNA, 19 nt, artificial
  Chemically synthesized
cagcacaaauuugugaaga

SEQ ID NO: 515 - RNA, 19 nt, artificial
  Chemically synthesized
ugaaggauuuucaaaaccg

SEQ ID NO: 516 - RNA, 19 nt, artificial
  Chemically synthesized
cugaaggauuuucaaaacc

SEQ ID NO: 517 - RNA, 19 nt, artificial
  Chemically synthesized
ccuuaccagaguauuucuc

SEQ ID NO: 518 - RNA, 19 nt, artificial
  Chemically synthesized
cucagaauauuuccuuacc

SEQ ID NO: 519 - RNA, 19 nt, artificial
  Chemically synthesized
gcugcugaaguaucaaacu

SEQ ID NO: 520 - RNA, 19 nt, artificial
  Chemically synthesized
gguauacucauaaccucuu

SEQ ID NO: 521 - RNA, 19 nt, artificial
  Chemically synthesized
gcucaaucuaaggcugauu

SEQ ID NO: 522 - RNA, 19 nt, artificial
  Chemically synthesized
gaugugaugauucacuuuu

SEQ ID NO: 523 - RNA, 19 nt, artificial
  Chemically synthesized
uguggacccaauucacuau

SEQ ID NO: 524 - RNA, 19 nt, artificial
  Chemically synthesized
ucuguauguugcauaacaa

SEQ ID NO: 525 - RNA, 19 nt, artificial
  Chemically synthesized
ggcauuggaguaacuccau

SEQ ID NO: 526 - RNA, 19 nt, artificial
  Chemically synthesized
gguccuuuuggaaguccau

SEQ ID NO: 527 - RNA, 19 nt, artificial
  Chemically synthesized
ugcauuagaaaaucaucca

SEQ ID NO: 528 - RNA, 19 nt, artificial
  Chemically synthesized
ccaguguaucugcauuaga

SEQ ID NO: 529 - RNA, 19 nt, artificial
  Chemically synthesized
cuacauugucccaguguau

SEQ ID NO: 530 - RNA, 19 nt, artificial
  Chemically synthesized
ggucaguauauuacucuac

SEQ ID NO: 531 - RNA, 19 nt, artificial
  Chemically synthesized
cagguauauccggagcaau

SEQ ID NO: 532 - RNA, 19 nt, artificial
  Chemically synthesized
gcuuuggauuucuggaccu

SEQ ID NO: 533 - RNA, 19 nt, artificial
  Chemically synthesized
ccagcacaaauuugugaag

SEQ ID NO: 534 - RNA, 19 nt, artificial
  Chemically synthesized
gcucucagaauauuuccuu

SEQ ID NO: 535 - RNA, 19 nt, artificial
  Chemically synthesized
ugcugacguugcauguuuc

SEQ ID NO: 536 - RNA, 19 nt, artificial
  Chemically synthesized
acagccucuacauaugcaa

SEQ ID NO: 537 - RNA, 19 nt, artificial
  Chemically synthesized
uccuagaaaacuucucuuc

SEQ ID NO: 538 - RNA, 19 nt, artificial
  Chemically synthesized
gaacugaaugcagcaagau

SEQ ID NO: 539 - RNA, 19 nt, artificial
  Chemically synthesized
cuaucuguauuuucucagg

SEQ ID NO: 540 - RNA, 19 nt, artificial
  Chemically synthesized
ugcucaaucuaaggcugau

SEQ ID NO: 541 - RNA, 19 nt, artificial
  Chemically synthesized
ucccuagugaggagcugaa

SEQ ID NO: 542 - RNA, 19 nt, artificial
  Chemically synthesized
ugaugugaugauucacuuu

SEQ ID NO: 543 - RNA, 19 nt, artificial
  Chemically synthesized
ggcaagaugaccgucacau

SEQ ID NO: 544 - RNA, 19 nt, artificial
  Chemically synthesized
agcuguguuaugccaaaga

SEQ ID NO: 545 - RNA, 19 nt, artificial
  Chemically synthesized
ugcacugaauucaagacug

SEQ ID NO: 546 - RNA, 19 nt, artificial
  Chemically synthesized
agccucagcaucuguucuu

SEQ ID NO: 547 - RNA, 19 nt, artificial
  Chemically synthesized
agcuguaccucagucaaac

SEQ ID NO: 548 - RNA, 19 nt, artificial
  Chemically synthesized
acagaccugacuaugucaa

SEQ ID NO: 549 - RNA, 19 nt, artificial
  Chemically synthesized
uccaguccuuccguugguu

SEQ ID NO: 550 - RNA, 19 nt, artificial
  Chemically synthesized
caaucuagaaauuauccca

SEQ ID NO: 551 - RNA, 19 nt, artificial
  Chemically synthesized
uccgaaauucugcccuuca

SEQ ID NO: 552 - RNA, 19 nt, artificial
  Chemically synthesized
cuccgaaauucugcccuuc

SEQ ID NO: 553 - RNA, 19 nt, artificial
  Chemically synthesized
agauuuacuacugccucca

SEQ ID NO: 554 - RNA, 19 nt, artificial
  Chemically synthesized
cgagauuuacuacugccuc

SEQ ID NO: 555 - RNA, 19 nt, artificial
  Chemically synthesized
ucuacauugucccagugua

SEQ ID NO: 556 - RNA, 19 nt, artificial
  Chemically synthesized
ucauggaaauccgaauggu

SEQ ID NO: 557 - RNA, 19 nt, artificial
  Chemically synthesized
ucccucagaugucauggaa

SEQ ID NO: 558 - RNA, 19 nt, artificial
  Chemically synthesized
accaucauuucggucauaa

SEQ ID NO: 559 - RNA, 19 nt, artificial
  Chemically synthesized
uccggagcaauaagccagu

SEQ ID NO: 560 - RNA, 19 nt, artificial
  Chemically synthesized
acagguauauccggagcaa

SEQ ID NO: 561 - RNA, 19 nt, artificial
  Chemically synthesized
ccacucagucuuugacccu

SEQ ID NO: 562 - RNA, 19 nt, artificial
  Chemically synthesized
gaaccuuucccugaaggau

SEQ ID NO: 563 - RNA, 19 nt, artificial
  Chemically synthesized
cagaacauuuucaugaacc

SEQ ID NO: 564 - RNA, 19 nt, artificial
  Chemically synthesized
ucucagaauauuuccuuac

SEQ ID NO: 565 - RNA, 19 nt, artificial
  Chemically synthesized
auccuagaaaacuucucuu

SEQ ID NO: 566 - RNA, 19 nt, artificial
  Chemically synthesized
ggcucuccaugaauguccu

SEQ ID NO: 567 - RNA, 19 nt, artificial
  Chemically synthesized
ugccgaacacucuuggcuu

SEQ ID NO: 568 - RNA, 19 nt, artificial
  Chemically synthesized
caaaugcaagauugaacaa

SEQ ID NO: 569 - RNA, 19 nt, artificial
  Chemically synthesized
uugaugugaugauucacuu

SEQ ID NO: 570 - RNA, 19 nt, artificial
  Chemically synthesized
ucagcggaaucaaucagcu

SEQ ID NO: 571 - RNA, 19 nt, artificial
  Chemically synthesized
ugaguaaccagaacaacuc

SEQ ID NO: 572 - RNA, 19 nt, artificial
  Chemically synthesized
uccagcuguaccucaguca

SEQ ID NO: 573 - RNA, 19 nt, artificial
  Chemically synthesized
ggcaagagaacagaccuga

SEQ ID NO: 574 - RNA, 19 nt, artificial
  Chemically synthesized
uuccguugguuugcagauu

SEQ ID NO: 575 - RNA, 19 nt, artificial
  Chemically synthesized
ggaugacuggaaaccauac

SEQ ID NO: 576 - RNA, 19 nt, artificial
  Chemically synthesized
acacccuguuggaugacug

SEQ ID NO: 577 - RNA, 19 nt, artificial
  Chemically synthesized
guccauuugaggaaucacu

SEQ ID NO: 578 - RNA, 19 nt, artificial
  Chemically synthesized
ugguccuuuuggaagucca

SEQ ID NO: 579 - RNA, 19 nt, artificial
  Chemically synthesized
agaccuggucaguauauua

SEQ ID NO: 580 - RNA, 19 nt, artificial
  Chemically synthesized
ccgaaccagcucucagaau

SEQ ID NO: 581 - RNA, 19 nt, artificial
  Chemically synthesized
ucagucuuaaccgaaccag

SEQ ID NO: 582 - RNA, 19 nt, artificial
  Chemically synthesized
ggcugcaucagucuuaacc

SEQ ID NO: 583 - RNA, 19 nt, artificial
  Chemically synthesized
uccugcuuuucuggaaaac

SEQ ID NO: 584 - RNA, 19 nt, artificial
  Chemically synthesized
uggugguggugcuauuccu

SEQ ID NO: 585 - RNA, 19 nt, artificial
  Chemically synthesized
ccuagaaaacuucucuuca

SEQ ID NO: 586 - RNA, 19 nt, artificial
  Chemically synthesized
ccgagaugaggauccuaga

SEQ ID NO: 587 - RNA, 19 nt, artificial
  Chemically synthesized
augugaugauucacuuuuc

SEQ ID NO: 588 - RNA, 19 nt, artificial
  Chemically synthesized
agcggaaucaaucagcugu

SEQ ID NO: 589 - RNA, 19 nt, artificial
  Chemically synthesized
agagucuuucagcugaaaa

SEQ ID NO: 590 - RNA, 19 nt, artificial
  Chemically synthesized
acaguugguguuuucuguu

SEQ ID NO: 591 - RNA, 19 nt, artificial
  Chemically synthesized
guccucgguggaaacuuuu

SEQ ID NO: 592 - RNA, 19 nt, artificial
  Chemically synthesized
caagagaacagaccugacu

SEQ ID NO: 593 - RNA, 19 nt, artificial
  Chemically synthesized
gguuugcagauuuacucug

SEQ ID NO: 594 - RNA, 19 nt, artificial
  Chemically synthesized
uggaugacuggaaaccaua

SEQ ID NO: 595 - RNA, 19 nt, artificial
  Chemically synthesized
uggaguaacuccauuugca

SEQ ID NO: 596 - RNA, 19 nt, artificial
  Chemically synthesized
ggaaucacugaacuaugag

SEQ ID NO: 597 - RNA, 19 nt, artificial
  Chemically synthesized
agguauauccggagcaaua

SEQ ID NO: 598 - RNA, 19 nt, artificial
  Chemically synthesized
ccuuucccugaaggauuuu

SEQ ID NO: 599 - RNA, 19 nt, artificial
  Chemically synthesized
ucagaauauuuccuuacca

SEQ ID NO: 600 - RNA, 19 nt, artificial
  Chemically synthesized
ugcuuuucuggaaaaccuu

SEQ ID NO: 601 - RNA, 19 nt, artificial
  Chemically synthesized
ugcaucagucuuaaccgaa

SEQ ID NO: 602 - RNA, 19 nt, artificial
  Chemically synthesized
cugcaucagucuuaaccga

SEQ ID NO: 603 - RNA, 19 nt, artificial
  Chemically synthesized
acaugcugcugacguugca

SEQ ID NO: 604 - RNA, 19 nt, artificial
  Chemically synthesized
accgagaugaggauccuag

SEQ ID NO: 605 - RNA, 19 nt, artificial
  Chemically synthesized
cuguucaucuggcucucca

SEQ ID NO: 606 - RNA, 19 nt, artificial
  Chemically synthesized
aagguuccaagcaggagaa

SEQ ID NO: 607 - RNA, 19 nt, artificial
  Chemically synthesized
cucaaucuaaggcugauug

SEQ ID NO: 608 - RNA, 19 nt, artificial
  Chemically synthesized
uggauucaagaacucccua

SEQ ID NO: 609 - RNA, 19 nt, artificial
  Chemically synthesized
acuguuagaugcacacugu

SEQ ID NO: 610 - RNA, 19 nt, artificial
  Chemically synthesized
cagcuguguuaugccaaag

SEQ ID NO: 611 - RNA, 19 nt, artificial
  Chemically synthesized
gccaugaagcaggacucua

SEQ ID NO: 612 - RNA, 19 nt, artificial
  Chemically synthesized
ucuuucagcugaaaacuuu

SEQ ID NO: 613 - RNA, 19 nt, artificial
  Chemically synthesized
gagucuuucagcugaaaac

SEQ ID NO: 614 - RNA, 19 nt, artificial
  Chemically synthesized
agacuguuuauaggacguc

SEQ ID NO: 615 - RNA, 19 nt, artificial
  Chemically synthesized
cugacuaugucaacaucca

SEQ ID NO: 616 - RNA, 19 nt, artificial
  Chemically synthesized
uggcaagagaacagaccug

SEQ ID NO: 617 - RNA, 19 nt, artificial
  Chemically synthesized
ucaucccucagaugucaug

SEQ ID NO: 618 - RNA, 19 nt, artificial
  Chemically synthesized
gaacauuuucaugaaccuu

SEQ ID NO: 619 - RNA, 19 nt, artificial
  Chemically synthesized
cagccucuacauaugcaau

SEQ ID NO: 620 - RNA, 19 nt, artificial
  Chemically synthesized
cacagccucuacauaugca

SEQ ID NO: 621 - RNA, 19 nt, artificial
  Chemically synthesized
aggagaaccaggagauugu

SEQ ID NO: 622 - RNA, 19 nt, artificial
  Chemically synthesized
gaagguuccaagcaggaga

SEQ ID NO: 623 - RNA, 19 nt, artificial
  Chemically synthesized
cuaagacuuugaaacucag

SEQ ID NO: 624 - RNA, 19 nt, artificial
  Chemically synthesized
aagagucuuucagcugaaa

SEQ ID NO: 625 - RNA, 19 nt, artificial
  Chemically synthesized
gaaaaacaguugguguuuu

SEQ ID NO: 626 - RNA, 19 nt, artificial
  Chemically synthesized
gcaagagaacagaccugac

SEQ ID NO: 627 - RNA, 19 nt, artificial
  Chemically synthesized
ugaacuaugaggucagccu

SEQ ID NO: 628 - RNA, 19 nt, artificial
  Chemically synthesized
cacugaacuaugaggucag

SEQ ID NO: 629 - RNA, 19 nt, artificial
  Chemically synthesized
ucacugaacuaugagguca

SEQ ID NO: 630 - RNA, 19 nt, artificial
  Chemically synthesized
uggaaaaccuucuugcugu

SEQ ID NO: 631 - RNA, 19 nt, artificial
  Chemically synthesized
cagcaagauaccgagauga

SEQ ID NO: 632 - RNA, 19 nt, artificial
  Chemically synthesized
ucaaucuaaggcugauugu

SEQ ID NO: 633 - RNA, 19 nt, artificial
  Chemically synthesized
agaacucccuagugaggag

SEQ ID NO: 634 - RNA, 19 nt, artificial
  Chemically synthesized
cacuuuucaguucucaaau

SEQ ID NO: 635 - RNA, 19 nt, artificial
  Chemically synthesized
ugaugauucacuuuucagu

SEQ ID NO: 636 - RNA, 19 nt, artificial
  Chemically synthesized
agcugaaaacuuuugccau

SEQ ID NO: 637 - RNA, 19 nt, artificial
  Chemically synthesized
cagcugaaaacuuuugcca

SEQ ID NO: 638 - RNA, 19 nt, artificial
  Chemically synthesized
agacucuucauaaacugag

SEQ ID NO: 639 - RNA, 19 nt, artificial
  Chemically synthesized
cuguaccucagucaaacag

SEQ ID NO: 640 - RNA, 19 nt, artificial
  Chemically synthesized
acauccagcuguaccucag

SEQ ID NO: 641 - RNA, 19 nt, artificial
  Chemically synthesized
ucaacauccagcuguaccu

SEQ ID NO: 642 - RNA, 19 nt, artificial
  Chemically synthesized
augacuggaaaccauacaa

SEQ ID NO: 643 - RNA, 19 nt, artificial
  Chemically synthesized
aggcauuggaguaacucca

SEQ ID NO: 644 - RNA, 19 nt, artificial
  Chemically synthesized
acccagcacaaauuuguga

SEQ ID NO: 645 - RNA, 19 nt, artificial
  Chemically synthesized
accgaaccagcucucagaa

SEQ ID NO: 646 - RNA, 19 nt, artificial
  Chemically synthesized
uguccugcuuuucuggaaa

SEQ ID NO: 647 - RNA, 19 nt, artificial
  Chemically synthesized
cuguuagaugcacacuguu

SEQ ID NO: 648 - RNA, 19 nt, artificial
  Chemically synthesized
gaaaacuguuagaugcaca

SEQ ID NO: 649 - RNA, 19 nt, artificial
  Chemically synthesized
ugugaugauucacuuuuca

SEQ ID NO: 650 - RNA, 19 nt, artificial
  Chemically synthesized
acucuucauaaacugagua

SEQ ID NO: 651 - RNA, 19 nt, artificial
  Chemically synthesized
gacucuucauaaacugagu

SEQ ID NO: 652 - RNA, 19 nt, artificial
  Chemically synthesized
cagagccucagcaucuguu

SEQ ID NO: 653 - RNA, 19 nt, artificial
  Chemically synthesized
cuaagcagagccucagcau

SEQ ID NO: 654 - RNA, 19 nt, artificial
  Chemically synthesized
uuggaugacuggaaaccau

SEQ ID NO: 655 - RNA, 19 nt, artificial
  Chemically synthesized
acauuuucaugaaccuuuc

SEQ ID NO: 656 - RNA, 19 nt, artificial
  Chemically synthesized
agaacauuuucaugaaccu

SEQ ID NO: 657 - RNA, 19 nt, artificial
  Chemically synthesized
gauucacuuuucaguucuc

SEQ ID NO: 658 - RNA, 19 nt, artificial
  Chemically synthesized
uggaaauccgaauggucaa

SEQ ID NO: 659 - RNA, 19 nt, artificial
  Chemically synthesized
ucccugaaggauuuucaaa

SEQ ID NO: 660 - RNA, 19 nt, artificial
  Chemically synthesized
ggaucacagaagguuccaa

SEQ ID NO: 661 - RNA, 19 nt, artificial
  Chemically synthesized
cagaauauuuccuuaccag

SEQ ID NO: 662 - RNA, 19 nt, artificial
  Chemically synthesized
aaaaacaguugguguuuuc

SEQ ID NO: 663 - RNA, 19 nt, artificial
  Chemically synthesized
ggcuuuggauuucuggacc

SEQ ID NO: 664 - RNA, 19 nt, artificial
  Chemically synthesized
gucuucuacaugcugcuga

SEQ ID NO: 665 - RNA, 19 nt, artificial
  Chemically synthesized
guugaacugaaugcagcaa

SEQ ID NO: 666 - RNA, 19 nt, artificial
  Chemically synthesized
auguccugcuuuucuggaa

SEQ ID NO: 667 - RNA, 19 nt, artificial
  Chemically synthesized
ugccuguucaucuggcucu

SEQ ID NO: 668 - RNA, 19 nt, artificial
  Chemically synthesized
ucuagauugaaugaagggc

SEQ ID NO: 669 - RNA, 19 nt, artificial
  Chemically synthesized
uugugaggguaaauggaug

SEQ ID NO: 670 - RNA, 19 nt, artificial
  Chemically synthesized
ugugaggguaaauggauga

SEQ ID NO: 671 - RNA, 19 nt, artificial
  Chemically synthesized
auggguaaaaggauaaggc

SEQ ID NO: 672 - RNA, 19 nt, artificial
  Chemically synthesized
aacaggguguugaguauug

SEQ ID NO: 673 - RNA, 19 nt, artificial
  Chemically synthesized
uucuagauugaaugaaggg

SEQ ID NO: 674 - RNA, 19 nt, artificial
  Chemically synthesized
cauuccuucuuuagagucc

SEQ ID NO: 675 - RNA, 19 nt, artificial
  Chemically synthesized
ucaucaaacaaaaguuucc

SEQ ID NO: 676 - RNA, 19 nt, artificial
  Chemically synthesized
uaaaucugcaaaccaacgg

SEQ ID NO: 677 - RNA, 19 nt, artificial
  Chemically synthesized
uagauugaaugaagggcag

SEQ ID NO: 678 - RNA, 19 nt, artificial
  Chemically synthesized
aauguucugagaaauacuc

SEQ ID NO: 679 - RNA, 19 nt, artificial
  Chemically synthesized
aaaagcaggacauucaugg

SEQ ID NO: 680 - RNA, 19 nt, artificial
  Chemically synthesized
cuugacuagauggaggcag

SEQ ID NO: 681 - RNA, 19 nt, artificial
  Chemically synthesized
acuauuuuaagaugaaccc

SEQ ID NO: 682 - RNA, 19 nt, artificial
  Chemically synthesized
uugcuuugguuucaguugg

SEQ ID NO: 683 - RNA, 19 nt, artificial
  Chemically synthesized
auaccuguaaagucuuucg

SEQ ID NO: 684 - RNA, 19 nt, artificial
  Chemically synthesized
uaccuguaaagucuuucgg

SEQ ID NO: 685 - RNA, 19 nt, artificial
  Chemically synthesized
cugccgguuuugaaaaucc

SEQ ID NO: 686 - RNA, 19 nt, artificial
  Chemically synthesized
cuuuuauccaacaaucucc

SEQ ID NO: 687 - RNA, 19 nt, artificial
  Chemically synthesized
augaaaaucaacagugugc

SEQ ID NO: 688 - RNA, 19 nt, artificial
  Chemically synthesized
gugcaugauauuuuucucc

SEQ ID NO: 689 - RNA, 19 nt, artificial
  Chemically synthesized
cuagauugaaugaagggca

SEQ ID NO: 690 - RNA, 19 nt, artificial
  Chemically synthesized
gugaucaugaggaauagca

SEQ ID NO: 691 - RNA, 19 nt, artificial
  Chemically synthesized
aucaaacaaaaguuuccac

SEQ ID NO: 692 - RNA, 19 nt, artificial
  Chemically synthesized
acaggguguugaguauuga

SEQ ID NO: 693 - RNA, 19 nt, artificial
  Chemically synthesized
aaaaggaccaucaauauac

SEQ ID NO: 694 - RNA, 19 nt, artificial
  Chemically synthesized
uugacuagauggaggcagu

SEQ ID NO: 695 - RNA, 19 nt, artificial
  Chemically synthesized
aucguucuguccagucucc

SEQ ID NO: 696 - RNA, 19 nt, artificial
  Chemically synthesized
uucaguuggacacauugug

SEQ ID NO: 697 - RNA, 19 nt, artificial
  Chemically synthesized
uuaagacugaugcagccgg

SEQ ID NO: 698 - RNA, 19 nt, artificial
  Chemically synthesized
cugugaucaugaggaauag

SEQ ID NO: 699 - RNA, 19 nt, artificial
  Chemically synthesized
aggccaggaacaguuguga

SEQ ID NO: 700 - RNA, 19 nt, artificial
  Chemically synthesized
aaguuuucuaggauccuca

SEQ ID NO: 701 - RNA, 19 nt, artificial
  Chemically synthesized
guaauucacugagaaguug

SEQ ID NO: 702 - RNA, 19 nt, artificial
  Chemically synthesized
uuuuauccaacaaucuccu

SEQ ID NO: 703 - RNA, 19 nt, artificial
  Chemically synthesized
cauggguaaaaggauaagg

SEQ ID NO: 704 - RNA, 19 nt, artificial
  Chemically synthesized
auuccuucuuuagaguccu

SEQ ID NO: 705 - RNA, 19 nt, artificial
  Chemically synthesized
ucuuggauagugaauuggg

SEQ ID NO: 706 - RNA, 19 nt, artificial
  Chemically synthesized
uuggauagugaauuggguc

SEQ ID NO: 707 - RNA, 19 nt, artificial
  Chemically synthesized
uugccaaaacuuguuaugc

SEQ ID NO: 708 - RNA, 19 nt, artificial
  Chemically synthesized
cuuagacacaauccuagcc

SEQ ID NO: 709 - RNA, 19 nt, artificial
  Chemically synthesized
aaaucucgaaaucguucug

SEQ ID NO: 710 - RNA, 19 nt, artificial
  Chemically synthesized
aauuuucuuugaccauucg

SEQ ID NO: 711 - RNA, 19 nt, artificial
  Chemically synthesized
uagaggcugugaucaugag

SEQ ID NO: 712 - RNA, 19 nt, artificial
  Chemically synthesized
aauacagauaguaacacca

SEQ ID NO: 713 - RNA, 19 nt, artificial
  Chemically synthesized
aucuugcauuuguucaacc

SEQ ID NO: 714 - RNA, 19 nt, artificial
  Chemically synthesized
aaguucagcuccucacuag

SEQ ID NO: 715 - RNA, 19 nt, artificial
  Chemically synthesized
aacacagcugauugauucc

SEQ ID NO: 716 - RNA, 19 nt, artificial
  Chemically synthesized
acacagcugauugauuccg

SEQ ID NO: 717 - RNA, 19 nt, artificial
  Chemically synthesized
ucaaagucuuagaaauugc

SEQ ID NO: 718 - RNA, 19 nt, artificial
  Chemically synthesized
cuuggauagugaauugggu

SEQ ID NO: 719 - RNA, 19 nt, artificial
  Chemically synthesized
aacaccaacuguuuuuccu

SEQ ID NO: 720 - RNA, 19 nt, artificial
  Chemically synthesized
caucaaacaaaaguuucca

SEQ ID NO: 721 - RNA, 19 nt, artificial
  Chemically synthesized
uaaacagucuugaauucag

SEQ ID NO: 722 - RNA, 19 nt, artificial
  Chemically synthesized
uuucuccaauuaucuucug

SEQ ID NO: 723 - RNA, 19 nt, artificial
  Chemically synthesized
uugaugcaaauggaguuac

SEQ ID NO: 724 - RNA, 19 nt, artificial
  Chemically synthesized
gguaaauggaugauuuucu

SEQ ID NO: 725 - RNA, 19 nt, artificial
  Chemically synthesized
uauaccuguaaagucuuuc

SEQ ID NO: 726 - RNA, 19 nt, artificial
  Chemically synthesized
guugugaagagaaguuuuc

SEQ ID NO: 727 - RNA, 19 nt, artificial
  Chemically synthesized
gagaaguuuucuaggaucc

SEQ ID NO: 728 - RNA, 19 nt, artificial
  Chemically synthesized
auucaguucaacaaagucu

SEQ ID NO: 729 - RNA, 19 nt, artificial
  Chemically synthesized
aaucuugcauuuguucaac

SEQ ID NO: 730 - RNA, 19 nt, artificial
  Chemically synthesized
acauggguaaaaggauaag

SEQ ID NO: 731 - RNA, 19 nt, artificial
  Chemically synthesized
uaaaaggauaaggcugcag

SEQ ID NO: 732 - RNA, 19 nt, artificial
  Chemically synthesized
accuuacuauucuuuggca

SEQ ID NO: 733 - RNA, 19 nt, artificial
  Chemically synthesized
aauugcacucauuccuucu

SEQ ID NO: 734 - RNA, 19 nt, artificial
  Chemically synthesized
uugcacucauuccuucuuu

SEQ ID NO: 735 - RNA, 19 nt, artificial
  Chemically synthesized
acucauuccuucuuuagag

SEQ ID NO: 736 - RNA, 19 nt, artificial
  Chemically synthesized
uuccuucuuuagaguccug

SEQ ID NO: 737 - RNA, 19 nt, artificial
  Chemically synthesized
aguuuaugaagagucuugg

SEQ ID NO: 738 - RNA, 19 nt, artificial
  Chemically synthesized
caguugagguuaagaacag

SEQ ID NO: 739 - RNA, 19 nt, artificial
  Chemically synthesized
agucuuggauagugaauug

SEQ ID NO: 740 - RNA, 19 nt, artificial
  Chemically synthesized
uugagguuaagaacagaug

SEQ ID NO: 741 - RNA, 19 nt, artificial
  Chemically synthesized
uuccucuguuauauuuugc

SEQ ID NO: 742 - RNA, 19 nt, artificial
  Chemically synthesized
ucaaacaaaaguuuccacc

SEQ ID NO: 743 - RNA, 19 nt, artificial
  Chemically synthesized
aaacaaaaguuuccaccga

SEQ ID NO: 744 - RNA, 19 nt, artificial
  Chemically synthesized
cagugcaugauauuuuucu

SEQ ID NO: 745 - RNA, 19 nt, artificial
  Chemically synthesized
uucuccaauuaucuucugu

SEQ ID NO: 746 - RNA, 19 nt, artificial
  Chemically synthesized
ugcuuagacacaauccuag

SEQ ID NO: 747 - RNA, 19 nt, artificial
  Chemically synthesized
caucaauauacagcuuggg

SEQ ID NO: 748 - RNA, 19 nt, artificial
  Chemically synthesized
uaguaaaucucgaaaucgu

SEQ ID NO: 749 - RNA, 19 nt, artificial
  Chemically synthesized
aucucgaaaucguucuguc

SEQ ID NO: 750 - RNA, 19 nt, artificial
  Chemically synthesized
uuucaguuggacacauugu

SEQ ID NO: 751 - RNA, 19 nt, artificial
  Chemically synthesized
uuggacacauugugagggu

SEQ ID NO: 752 - RNA, 19 nt, artificial
  Chemically synthesized
ucuuucggcacaguacagg

SEQ ID NO: 753 - RNA, 19 nt, artificial
  Chemically synthesized
aaaauuagcuuggaaucug

SEQ ID NO: 754 - RNA, 19 nt, artificial
  Chemically synthesized
ggguaucuaaauuaguuug

SEQ ID NO: 755 - RNA, 19 nt, artificial
  Chemically synthesized
uuuucuaggauccucaucu

SEQ ID NO: 756 - RNA, 19 nt, artificial
  Chemically synthesized
uucuaggauccucaucucg

SEQ ID NO: 757 - RNA, 19 nt, artificial
  Chemically synthesized
aagucuucacuguaauuca

SEQ ID NO: 758 - RNA, 19 nt, artificial
  Chemically synthesized
aauuuaaagaggaacacga

SEQ ID NO: 759 - RNA, 19 nt, artificial
  Chemically synthesized
aaauauucuucagggucuc

SEQ ID NO: 760 - RNA, 19 nt, artificial
  Chemically synthesized
guuuccagauuaaacaugu

SEQ ID NO: 761 - RNA, 19 nt, artificial
  Chemically synthesized
gguaaaaggauaaggcugc

SEQ ID NO: 762 - RNA, 19 nt, artificial
  Chemically synthesized
uacuauucuuuggcauaac

SEQ ID NO: 763 - RNA, 19 nt, artificial
  Chemically synthesized
gucuuagaaauugcacuca

SEQ ID NO: 764 - RNA, 19 nt, artificial
  Chemically synthesized
cugaaagacucuuuauugu

SEQ ID NO: 765 - RNA, 19 nt, artificial
  Chemically synthesized
cuugucccauaugaguugu

SEQ ID NO: 766 - RNA, 19 nt, artificial
  Chemically synthesized
gauagugaauuggguccac

SEQ ID NO: 767 - RNA, 19 nt, artificial
  Chemically synthesized
aacaaaaguuuccaccgag

SEQ ID NO: 768 - RNA, 19 nt, artificial
  Chemically synthesized
agugcaugauauuuuucuc

SEQ ID NO: 769 - RNA, 19 nt, artificial
  Chemically synthesized
ugcaugauauuuuucucca

SEQ ID NO: 770 - RNA, 19 nt, artificial
  Chemically synthesized
uucucuugccaaaacuugu

SEQ ID NO: 771 - RNA, 19 nt, artificial
  Chemically synthesized
auaguucagugauuccuca

SEQ ID NO: 772 - RNA, 19 nt, artificial
  Chemically synthesized
aggaccaucaauauacagc

SEQ ID NO: 773 - RNA, 19 nt, artificial
  Chemically synthesized
accaucaauauacagcuug

SEQ ID NO: 774 - RNA, 19 nt, artificial
  Chemically synthesized
uagaguaauauacugacca

SEQ ID NO: 775 - RNA, 19 nt, artificial
  Chemically synthesized
auuuucuuugaccauucgg

SEQ ID NO: 776 - RNA, 19 nt, artificial
  Chemically synthesized
aauuugugcuggguaaacu

SEQ ID NO: 777 - RNA, 19 nt, artificial
  Chemically synthesized
auuugugcuggguaaacuc

SEQ ID NO: 778 - RNA, 19 nt, artificial
  Chemically synthesized
gaggcugugaucaugagga

SEQ ID NO: 779 - RNA, 19 nt, artificial
  Chemically synthesized
aagcaggacauucauggag

SEQ ID NO: 780 - RNA, 19 nt, artificial
  Chemically synthesized
agucuucacuguaauucac

SEQ ID NO: 781 - RNA, 19 nt, artificial
  Chemically synthesized
ucuucacuguaauucacug

SEQ ID NO: 782 - RNA, 19 nt, artificial
  Chemically synthesized
aaccuucugugauccucgg

SEQ ID NO: 783 - RNA, 19 nt, artificial
  Chemically synthesized
guaagccaagaguguucgg

SEQ ID NO: 784 - RNA, 19 nt, artificial
  Chemically synthesized
uucggcacauggguaaaag

SEQ ID NO: 785 - RNA, 19 nt, artificial
  Chemically synthesized
gaauccaccaugaaaauca

SEQ ID NO: 786 - RNA, 19 nt, artificial
  Chemically synthesized
agaaauugcacucauuccu

SEQ ID NO: 787 - RNA, 19 nt, artificial
  Chemically synthesized
auugcacucauuccuucuu

SEQ ID NO: 788 - RNA, 19 nt, artificial
  Chemically synthesized
guauucaaaucuuguccca

SEQ ID NO: 789 - RNA, 19 nt, artificial
  Chemically synthesized
ugagguuaagaacagaugc

SEQ ID NO: 790 - RNA, 19 nt, artificial
  Chemically synthesized
aaacagucuugaauucagu

SEQ ID NO: 791 - RNA, 19 nt, artificial
  Chemically synthesized
caauuaucuucuguauccc

SEQ ID NO: 792 - RNA, 19 nt, artificial
  Chemically synthesized
uguuaugcaacauacagag

SEQ ID NO: 793 - RNA, 19 nt, artificial
  Chemically synthesized
aggacuggauaucucugca

SEQ ID NO: 794 - RNA, 19 nt, artificial
  Chemically synthesized
acccaaauaaaguauaguc

SEQ ID NO: 795 - RNA, 19 nt, artificial
  Chemically synthesized
uuuccagucauccaacagg

SEQ ID NO: 796 - RNA, 19 nt, artificial
  Chemically synthesized
cucugcuuagacacaaucc

SEQ ID NO: 797 - RNA, 19 nt, artificial
  Chemically synthesized
ucugcuuagacacaauccu

SEQ ID NO: 798 - RNA, 19 nt, artificial
  Chemically synthesized
uauugaugcaaauggaguu

SEQ ID NO: 799 - RNA, 19 nt, artificial
  Chemically synthesized
ccaucaauauacagcuugg

SEQ ID NO: 800 - RNA, 19 nt, artificial
  Chemically synthesized
aagggcagaauuucggagu

SEQ ID NO: 801 - RNA, 19 nt, artificial
  Chemically synthesized
ucgaaaucguucuguccag

SEQ ID NO: 802 - RNA, 19 nt, artificial
  Chemically synthesized
accuguaaagucuuucggc

SEQ ID NO: 803 - RNA, 19 nt, artificial
  Chemically synthesized
guuaagacugaugcagccg

SEQ ID NO: 804 - RNA, 19 nt, artificial
  Chemically synthesized
aacgucagcagcauguaga

SEQ ID NO: 805 - RNA, 19 nt, artificial
  Chemically synthesized
uuaugaguauaccagaaga

SEQ ID NO: 806 - RNA, 19 nt, artificial
  Chemically synthesized
auacagauaguaacaccac

SEQ ID NO: 807 - RNA, 19 nt, artificial
  Chemically synthesized
cagauaguaacaccacagg

SEQ ID NO: 808 - RNA, 19 nt, artificial
  Chemically synthesized
uuuauccaacaaucuccug

SEQ ID NO: 809 - RNA, 19 nt, artificial
  Chemically synthesized
ucuugcauuuguucaacca

SEQ ID NO: 810 - RNA, 19 nt, artificial
  Chemically synthesized
caucaaauauucuucaggg

SEQ ID NO: 811 - RNA, 19 nt, artificial
  Chemically synthesized
aucaaauauucuucagggu

SEQ ID NO: 812 - RNA, 19 nt, artificial
  Chemically synthesized
aauauucuucagggucucu

SEQ ID NO: 813 - RNA, 19 nt, artificial
  Chemically synthesized
auucuuuggcauaacacag

SEQ ID NO: 814 - RNA, 19 nt, artificial
  Chemically synthesized
agucuuagaaauugcacuc

SEQ ID NO: 815 - RNA, 19 nt, artificial
  Chemically synthesized
uucauggcaaaaguuuuca

SEQ ID NO: 816 - RNA, 19 nt, artificial
  Chemically synthesized
ugucccauaugaguuguuc

SEQ ID NO: 817 - RNA, 19 nt, artificial
  Chemically synthesized
caccaacuguuuuuccucu

SEQ ID NO: 818 - RNA, 19 nt, artificial
  Chemically synthesized
caaacaaaaguuuccaccg

SEQ ID NO: 819 - RNA, 19 nt, artificial
  Chemically synthesized
agguuaagaacagaugcug

SEQ ID NO: 820 - RNA, 19 nt, artificial
  Chemically synthesized
cucuugccaaaacuuguua

SEQ ID NO: 821 - RNA, 19 nt, artificial
  Chemically synthesized
ugccaaaacuuguuaugca

SEQ ID NO: 822 - RNA, 19 nt, artificial
  Chemically synthesized
uaugcaacauacagaguaa

SEQ ID NO: 823 - RNA, 19 nt, artificial
  Chemically synthesized
aaaggaccaucaauauaca

SEQ ID NO: 824 - RNA, 19 nt, artificial
  Chemically synthesized
guaguaaaucucgaaaucg

SEQ ID NO: 825 - RNA, 19 nt, artificial
  Chemically synthesized
ucucgaaaucguucugucc

SEQ ID NO: 826 - RNA, 19 nt, artificial
  Chemically synthesized
uuuccaugacaucugaggg

SEQ ID NO: 827 - RNA, 19 nt, artificial
  Chemically synthesized
ugguuauacagcaagaagg

SEQ ID NO: 828 - RNA, 19 nt, artificial
  Chemically synthesized
cuucagggaaagguucaug

SEQ ID NO: 829 - RNA, 19 nt, artificial
  Chemically synthesized
guucugagaaauacucugg

SEQ ID NO: 830 - RNA, 19 nt, artificial
  Chemically synthesized
gaaauauucugagagcugg

SEQ ID NO: 831 - RNA, 19 nt, artificial
  Chemically synthesized
uccugaaacaugcaacguc

SEQ ID NO: 832 - RNA, 19 nt, artificial
  Chemically synthesized
auaccagaagauaucauag

SEQ ID NO: 833 - RNA, 19 nt, artificial
  Chemically synthesized
cagaaaagcaggacauuca

SEQ ID NO: 834 - RNA, 19 nt, artificial
  Chemically synthesized
cagaagauaucauaguuag

SEQ ID NO: 835 - RNA, 19 nt, artificial
  Chemically synthesized
aguuagaaacucuuauugc

SEQ ID NO: 836 - RNA, 19 nt, artificial
  Chemically synthesized
uauguagaggcugugauca

SEQ ID NO: 837 - RNA, 19 nt, artificial
  Chemically synthesized
gaaguuuucuaggauccuc

SEQ ID NO: 838 - RNA, 19 nt, artificial
  Chemically synthesized
aacaaagucuucacuguaa

SEQ ID NO: 839 - RNA, 19 nt, artificial
  Chemically synthesized
cacagguaauauggaaugu

SEQ ID NO: 840 - RNA, 19 nt, artificial
  Chemically synthesized
cagguaauauggaauguuc

SEQ ID NO: 841 - RNA, 19 nt, artificial
  Chemically synthesized
acaauuuaaagaggaacac

SEQ ID NO: 842 - RNA, 19 nt, artificial
  Chemically synthesized
auuuaaagaggaacacgac

SEQ ID NO: 843 - RNA, 19 nt, artificial
  Chemically synthesized
aggaacacgacaaucagcc

SEQ ID NO: 844 - RNA, 19 nt, artificial
  Chemically synthesized
accaugaaaaucaacagug

SEQ ID NO: 845 - RNA, 19 nt, artificial
  Chemically synthesized
ugaaaaucaacagugugca

SEQ ID NO: 846 - RNA, 19 nt, artificial
  Chemically synthesized
caaauauucuucagggucu

SEQ ID NO: 847 - RNA, 19 nt, artificial
  Chemically synthesized
aaugugacggucaucuugc

SEQ ID NO: 848 - RNA, 19 nt, artificial
  Chemically synthesized
guaaaaggauaaggcugca

SEQ ID NO: 849 - RNA, 19 nt, artificial
  Chemically synthesized
aaaaggauaaggcugcagu

SEQ ID NO: 850 - RNA, 19 nt, artificial
  Chemically synthesized
aaagucuuagaaauugcac

SEQ ID NO: 851 - RNA, 19 nt, artificial
  Chemically synthesized
aagucuuagaaauugcacu

SEQ ID NO: 852 - RNA, 19 nt, artificial
  Chemically synthesized
ucuuuagaguccugcuuca

SEQ ID NO: 853 - RNA, 19 nt, artificial
  Chemically synthesized
uucagcugaaagacucuuu

SEQ ID NO: 854 - RNA, 19 nt, artificial
  Chemically synthesized
caaaucuugucccauauga

SEQ ID NO: 855 - RNA, 19 nt, artificial
  Chemically synthesized
uugucccauaugaguuguu

SEQ ID NO: 856 - RNA, 19 nt, artificial
  Chemically synthesized
uaugaagagucuuggauag

SEQ ID NO: 857 - RNA, 19 nt, artificial
  Chemically synthesized
gaagagucuuggauaguga

SEQ ID NO: 858 - RNA, 19 nt, artificial
  Chemically synthesized
accaacuguuuuuccucug

SEQ ID NO: 859 - RNA, 19 nt, artificial
  Chemically synthesized
gagguuaagaacagaugcu

SEQ ID NO: 860 - RNA, 19 nt, artificial
  Chemically synthesized
acaaaaguuuccaccgagg

SEQ ID NO: 861 - RNA, 19 nt, artificial
  Chemically synthesized
uaucuucuguaucccaucu

SEQ ID NO: 862 - RNA, 19 nt, artificial
  Chemically synthesized
uuaugcaacauacagagua

SEQ ID NO: 863 - RNA, 19 nt, artificial
  Chemically synthesized
cccaaauaaaguauagucu

SEQ ID NO: 864 - RNA, 19 nt, artificial
  Chemically synthesized
uuacuccaaugccuccagc

SEQ ID NO: 865 - RNA, 19 nt, artificial
  Chemically synthesized
aucaauauacagcuuggga

SEQ ID NO: 866 - RNA, 19 nt, artificial
  Chemically synthesized
ugcuuugguuucaguugga

SEQ ID NO: 867 - RNA, 19 nt, artificial
  Chemically synthesized
agaguaauauacugaccag

SEQ ID NO: 868 - RNA, 19 nt, artificial
  Chemically synthesized
cuuaugaccgaaaugaugg

SEQ ID NO: 869 - RNA, 19 nt, artificial
  Chemically synthesized
uuauugcuccggauauacc

SEQ ID NO: 870 - RNA, 19 nt, artificial
  Chemically synthesized
cacaaagguccagaaaucc

SEQ ID NO: 871 - RNA, 19 nt, artificial
  Chemically synthesized
uauacagcaagaagguuuu

SEQ ID NO: 872 - RNA, 19 nt, artificial
  Chemically synthesized
aagaagagguuaugaguau

SEQ ID NO: 873 - RNA, 19 nt, artificial
  Chemically synthesized
gaagagguuaugaguauac

SEQ ID NO: 874 - RNA, 19 nt, artificial
  Chemically synthesized
guuaugaguauaccagaag

SEQ ID NO: 875 - RNA, 19 nt, artificial
  Chemically synthesized
uaugaguauaccagaagau

SEQ ID NO: 876 - RNA, 19 nt, artificial
  Chemically synthesized
aaagcaggacauucaugga

SEQ ID NO: 877 - RNA, 19 nt, artificial
  Chemically synthesized
aguucaacaaagucuucac

SEQ ID NO: 878 - RNA, 19 nt, artificial
  Chemically synthesized
ucaacaaagucuucacugu

SEQ ID NO: 879 - RNA, 19 nt, artificial
  Chemically synthesized
uguucaaucuugcauuugu

SEQ ID NO: 880 - RNA, 19 nt, artificial
  Chemically synthesized
aauccaccaugaaaaucaa

SEQ ID NO: 881 - RNA, 19 nt, artificial
  Chemically synthesized
aaaucaacagugugcaucu

SEQ ID NO: 882 - RNA, 19 nt, artificial
  Chemically synthesized
auaaggcugcaguugaggu

SEQ ID NO: 883 - RNA, 19 nt, artificial
  Chemically synthesized
aaaucuugucccauaugag

SEQ ID NO: 884 - RNA, 19 nt, artificial
  Chemically synthesized
ucccauaugaguuguucug

SEQ ID NO: 885 - RNA, 19 nt, artificial
  Chemically synthesized
cccauaugaguuguucugg

SEQ ID NO: 886 - RNA, 19 nt, artificial
  Chemically synthesized
caguuuaugaagagucuug

SEQ ID NO: 887 - RNA, 19 nt, artificial
  Chemically synthesized
guccacaacagaaaacacc

SEQ ID NO: 888 - RNA, 19 nt, artificial
  Chemically synthesized
caacagaaaacaccaacug

SEQ ID NO: 889 - RNA, 19 nt, artificial
  Chemically synthesized
guccuauaaacagucuuga

SEQ ID NO: 890 - RNA, 19 nt, artificial
  Chemically synthesized
aacagucuugaauucagug

SEQ ID NO: 891 - RNA, 19 nt, artificial
  Chemically synthesized
ccaauuaucuucuguaucc

SEQ ID NO: 892 - RNA, 19 nt, artificial
  Chemically synthesized
auuaucuucuguaucccau

SEQ ID NO: 893 - RNA, 19 nt, artificial
  Chemically synthesized
caacauacagaguaaaucu

SEQ ID NO: 894 - RNA, 19 nt, artificial
  Chemically synthesized
aaggaccaucaauauacag

SEQ ID NO: 895 - RNA, 19 nt, artificial
  Chemically synthesized
aggcaguaguaaaucucga

SEQ ID NO: 896 - RNA, 19 nt, artificial
  Chemically synthesized
gauuuucuaaugcagauac

SEQ ID NO: 897 - RNA, 19 nt, artificial
  Chemically synthesized
gaguaauauacugaccagg

SEQ ID NO: 898 - RNA, 19 nt, artificial
  Chemically synthesized
agaaauccaaagccaaguc

SEQ ID NO: 899 - RNA, 19 nt, artificial
  Chemically synthesized
aguauaccagaagauauca

SEQ ID NO: 900 - RNA, 19 nt, artificial
  Chemically synthesized
uucaguucaacaaagucuu

SEQ ID NO: 901 - RNA, 19 nt, artificial
  Chemically synthesized
caguucaacaaagucuuca

SEQ ID NO: 902 - RNA, 19 nt, artificial
  Chemically synthesized
uucaacaaagucuucacug

SEQ ID NO: 903 - RNA, 19 nt, artificial
  Chemically synthesized
uacagauaguaacaccaca

SEQ ID NO: 904 - RNA, 19 nt, artificial
  Chemically synthesized
acagauaguaacaccacag

SEQ ID NO: 905 - RNA, 19 nt, artificial
  Chemically synthesized
ucaaucuugcauuuguuca

SEQ ID NO: 906 - RNA, 19 nt, artificial
  Chemically synthesized
uuaaagaggaacacgacaa

SEQ ID NO: 907 - RNA, 19 nt, artificial
  Chemically synthesized
aagaggaacacgacaauca

SEQ ID NO: 908 - RNA, 19 nt, artificial
  Chemically synthesized
caccaugaaaaucaacagu

SEQ ID NO: 909 - RNA, 19 nt, artificial
  Chemically synthesized
acaucaaauauucuucagg

SEQ ID NO: 910 - RNA, 19 nt, artificial
  Chemically synthesized
gccacauucucacauuucc

SEQ ID NO: 911 - RNA, 19 nt, artificial
  Chemically synthesized
aaggauaaggcugcaguug

SEQ ID NO: 912 - RNA, 19 nt, artificial
  Chemically synthesized
caaagucuuagaaauugca

SEQ ID NO: 913 - RNA, 19 nt, artificial
  Chemically synthesized
cauggcaaaaguuuucagc

SEQ ID NO: 914 - RNA, 19 nt, artificial
  Chemically synthesized
uucaaaucuugucccauau

SEQ ID NO: 915 - RNA, 19 nt, artificial
  Chemically synthesized
uuuaugaagagucuuggau

SEQ ID NO: 916 - RNA, 19 nt, artificial
  Chemically synthesized
ugaagagucuuggauagug

SEQ ID NO: 917 - RNA, 19 nt, artificial
  Chemically synthesized
aacuguuuuuccucuguua

SEQ ID NO: 918 - RNA, 19 nt, artificial
  Chemically synthesized
aauuaucuucuguauccca

SEQ ID NO: 919 - RNA, 19 nt, artificial
  Chemically synthesized
uaucccaucuguuugacug

SEQ ID NO: 920 - RNA, 19 nt, artificial
  Chemically synthesized
uggauaucucugcauaccc

SEQ ID NO: 921 - RNA, 19 nt, artificial
  Chemically synthesized
aguuacuccaaugccucca

SEQ ID NO: 922 - RNA, 19 nt, artificial
  Chemically synthesized
ucagugauuccucaaaugg

SEQ ID NO: 923 - RNA, 19 nt, artificial
  Chemically synthesized
guaauauacugaccagguc

SEQ ID NO: 924 - RNA, 19 nt, artificial
  Chemically synthesized
uuugaccauucggauuucc

SEQ ID NO: 925 - RNA, 19 nt, artificial
  Chemically synthesized
augaccgaaaugaugguga

SEQ ID NO: 926 - RNA, 19 nt, artificial
  Chemically synthesized
aaauccaaagccaagucug

SEQ ID NO: 927 - RNA, 19 nt, artificial
  Chemically synthesized
aauccaaagccaagucugu

SEQ ID NO: 928 - RNA, 19 nt, artificial
  Chemically synthesized
aagucuguggaaaauuagc

SEQ ID NO: 929 - RNA, 19 nt, artificial
  Chemically synthesized
uuccauacaaaucuucaca

SEQ ID NO: 930 - RNA, 19 nt, artificial
  Chemically synthesized
auacagcaagaagguuuuc

SEQ ID NO: 931 - RNA, 19 nt, artificial
  Chemically synthesized
acaaagaagagguuaugag

SEQ ID NO: 932 - RNA, 19 nt, artificial
  Chemically synthesized
guuagaaacucuuauugca

SEQ ID NO: 933 - RNA, 19 nt, artificial
  Chemically synthesized
uauggaauguucugcuuuu

SEQ ID NO: 934 - RNA, 19 nt, artificial
  Chemically synthesized
auggaauguucugcuuuua

SEQ ID NO: 935 - RNA, 19 nt, artificial
  Chemically synthesized
caauuuaaagaggaacacg

SEQ ID NO: 936 - RNA, 19 nt, artificial
  Chemically synthesized
aacacgacaaucagccuua

SEQ ID NO: 937 - RNA, 19 nt, artificial
  Chemically synthesized
guucuugaauccaccauga

SEQ ID NO: 938 - RNA, 19 nt, artificial
  Chemically synthesized
cacaucaaauauucuucag

SEQ ID NO: 939 - RNA, 19 nt, artificial
  Chemically synthesized
auuccgcugaguuucaaag

SEQ ID NO: 940 - RNA, 19 nt, artificial
  Chemically synthesized
augaguuguucugguuacu

SEQ ID NO: 941 - RNA, 19 nt, artificial
  Chemically synthesized
cuggauaucucugcauacc

SEQ ID NO: 942 - RNA, 19 nt, artificial
  Chemically synthesized
gaguuacuccaaugccucc

SEQ ID NO: 943 - RNA, 19 nt, artificial
  Chemically synthesized
guuacuccaaugccuccag

SEQ ID NO: 944 - RNA, 19 nt, artificial
  Chemically synthesized
uucagugauuccucaaaug

SEQ ID NO: 945 - RNA, 19 nt, artificial
  Chemically synthesized
uuuucuaaugcagauacac

SEQ ID NO: 946 - RNA, 19 nt, artificial
  Chemically synthesized
auacugaccaggucuugcu

SEQ ID NO: 947 - RNA, 19 nt, artificial
  Chemically synthesized
auccaaagccaagucugug

SEQ ID NO: 948 - RNA, 19 nt, artificial
  Chemically synthesized
aaauauucugagagcuggu

SEQ ID NO: 949 - RNA, 19 nt, artificial
  Chemically synthesized
uguaaugugacggucaucu

SEQ ID NO: 950 - RNA, 19 nt, artificial
  Chemically synthesized
uaaugugacggucaucuug

SEQ ID NO: 951 - RNA, 19 nt, artificial
  Chemically synthesized
uccgcugaguuucaaaguc

SEQ ID NO: 952 - RNA, 19 nt, artificial
  Chemically synthesized
ucauggcaaaaguuuucag

SEQ ID NO: 953 - RNA, 19 nt, artificial
  Chemically synthesized
cacaacagaaaacaccaac

SEQ ID NO: 954 - RNA, 19 nt, artificial
  Chemically synthesized
ucuucuguaucccaucugu

SEQ ID NO: 955 - RNA, 19 nt, artificial
  Chemically synthesized
uguaucccaucuguuugac

SEQ ID NO: 956 - RNA, 19 nt, artificial
  Chemically synthesized
caaagacugaguggaagcc

SEQ ID NO: 957 - RNA, 19 nt, artificial
  Chemically synthesized
auuucggagucuugacuag

SEQ ID NO: 958 - RNA, 19 nt, artificial
  Chemically synthesized
aggaaauauucugagagcu

SEQ ID NO: 959 - RNA, 19 nt, artificial
  Chemically synthesized
aauauucugagagcugguu

SEQ ID NO: 960 - RNA, 19 nt, artificial
  Chemically synthesized
aagacaaagaagagguuau

SEQ ID NO: 961 - RNA, 19 nt, artificial
  Chemically synthesized
cugcuuggaaccuucugug

SEQ ID NO: 962 - RNA, 19 nt, artificial
  Chemically synthesized
cuucauggcaaaaguuuuc

SEQ ID NO: 963 - RNA, 19 nt, artificial
  Chemically synthesized
uccucuguuauauuuugcu

SEQ ID NO: 964 - RNA, 19 nt, artificial
  Chemically synthesized
cuguaucccaucuguuuga

SEQ ID NO: 965 - RNA, 19 nt, artificial
  Chemically synthesized
aucccaucuguuugacuga

SEQ ID NO: 966 - RNA, 19 nt, artificial
  Chemically synthesized
guuggacacauugugaggg

SEQ ID NO: 967 - RNA, 19 nt, artificial
  Chemically synthesized
acauugugaggguaaaugg

SEQ ID NO: 968 - RNA, 19 nt, artificial
  Chemically synthesized
ggauauaccuguaaagucu

SEQ ID NO: 969 - RNA, 19 nt, artificial
  Chemically synthesized
uguucugagaaauacucug

SEQ ID NO: 970 - RNA, 19 nt, artificial
  Chemically synthesized
gugcaucuaacaguuuucu

SEQ ID NO: 971 - RNA, 19 nt, artificial
  Chemically synthesized
gucuugacuagauggaggc

SEQ ID NO: 972 - RNA, 19 nt, artificial
  Chemically synthesized
augauggugacuggcuuau

SEQ ID NO: 973 - RNA, 19 nt, artificial
  Chemically synthesized
gugacuggcuuauugcucc

SEQ ID NO: 974 - RNA, 19 nt, artificial
  Chemically synthesized
aaauccuucagggaaaggu

SEQ ID NO: 975 - RNA, 19 nt, artificial
  Chemically synthesized
uagaagacaaagaagaggu

SEQ ID NO: 976 - RNA, 19 nt, artificial
  Chemically synthesized
augaagggcagaauuucgg

SEQ ID NO: 977 - RNA, 19 nt, artificial
  Chemically synthesized
aaaugauggugacuggcuu

SEQ ID NO: 978 - RNA, 19 nt, artificial
  Chemically synthesized
ugacuggcuuauugcuccg

SEQ ID NO: 979 - RNA, 19 nt, artificial
  Chemically synthesized
aaucugggcucuuccauac

SEQ ID NO: 980 - RNA, 19 nt, artificial
  Chemically synthesized
uuuugaaaauccuucaggg

SEQ ID NO: 981 - RNA, 19 nt, artificial
  Chemically synthesized
uucacugagaaguugaggg

SEQ ID NO: 982 - RNA, 19 nt, artificial
  Chemically synthesized
aagaguguucggcacaugg

SEQ ID NO: 983 - RNA, 19 nt, artificial
  Chemically synthesized
uggauagugaauugggucc

SEQ ID NO: 984 - RNA, 19 nt, artificial
  Chemically synthesized
aauggaguuacuccaaugc

SEQ ID NO: 985 - RNA, 19 nt, artificial
  Chemically synthesized
uuucuagauugaaugaagg

SEQ ID NO: 986 - RNA, 19 nt, artificial
  Chemically synthesized
agguagugauacucuggcc

SEQ ID NO: 987 - RNA, 19 nt, artificial
  Chemically synthesized
caguuggacacauugugag

SEQ ID NO: 988 - RNA, 19 nt, artificial
  Chemically synthesized
ccgaaaugauggugacugg

SEQ ID NO: 989 - RNA, 19 nt, artificial
  Chemically synthesized
cuguggaaaauuagcuugg

SEQ ID NO: 990 - RNA, 19 nt, artificial
  Chemically synthesized
uucugagaaauacucuggu

SEQ ID NO: 991 - RNA, 19 nt, artificial
  Chemically synthesized
uuauugcauauguagaggc

SEQ ID NO: 992 - RNA, 19 nt, artificial
  Chemically synthesized
augaggaauagcaccacca

SEQ ID NO: 993 - RNA, 19 nt, artificial
  Chemically synthesized
gaauguucugcuuuuaucc

SEQ ID NO: 994 - RNA, 19 nt, artificial
  Chemically synthesized
aauguucugcuuuuaucca

SEQ ID NO: 995 - RNA, 19 nt, artificial
  Chemically synthesized
auguucugcuuuuauccaa

SEQ ID NO: 996 - RNA, 19 nt, artificial
  Chemically synthesized
uaagaacagaugcugaggc

SEQ ID NO: 997 - RNA, 19 nt, artificial
  Chemically synthesized
aacuuguuaugcaacauac

SEQ ID NO: 998 - RNA, 19 nt, artificial
  Chemically synthesized
aaauggacuuccaaaagga

SEQ ID NO: 999 - RNA, 19 nt, artificial
  Chemically synthesized
agucuugacuagauggagg

SEQ ID NO: 1000 - RNA, 19 nt, artificial
  Chemically synthesized
gagguagugauacucuggc

SEQ ID NO: 1001 - RNA, 19 nt, artificial
  Chemically synthesized
aguuggacacauugugagg

SEQ ID NO: 1002 - RNA, 19 nt, artificial
  Chemically synthesized
auggaugauuuucuaaugc

SEQ ID NO: 1003 - RNA, 19 nt, artificial
  Chemically synthesized
cuuugaccauucggauuuc

SEQ ID NO: 1004 - RNA, 19 nt, artificial
  Chemically synthesized
aucugagggaugacuuaug

SEQ ID NO: 1005 - RNA, 19 nt, artificial
  Chemically synthesized
ucugagggaugacuuauga

SEQ ID NO: 1006 - RNA, 19 nt, artificial
  Chemically synthesized
ugaccgaaaugauggugac

SEQ ID NO: 1007 - RNA, 19 nt, artificial
  Chemically synthesized
gauggugacuggcuuauug

SEQ ID NO: 1008 - RNA, 19 nt, artificial
  Chemically synthesized
auguucugagaaauacucu

SEQ ID NO: 1009 - RNA, 19 nt, artificial
  Chemically synthesized
guucgguuaagacugaugc

SEQ ID NO: 1010 - RNA, 19 nt, artificial
  Chemically synthesized
uuaguuugauacuucagca

SEQ ID NO: 1011 - RNA, 19 nt, artificial
  Chemically synthesized
aucaugaggaauagcacca

SEQ ID NO: 1012 - RNA, 19 nt, artificial
  Chemically synthesized
caugaggaauagcaccacc

SEQ ID NO: 1013 - RNA, 19 nt, artificial
  Chemically synthesized
gugaagagaaguuuucuag

SEQ ID NO: 1014 - RNA, 19 nt, artificial
  Chemically synthesized
aauucacugagaaguugag

SEQ ID NO: 1015 - RNA, 19 nt, artificial
  Chemically synthesized
aacaccacagguaauaugg

SEQ ID NO: 1016 - RNA, 19 nt, artificial
  Chemically synthesized
uaaacauguaaugugacgg

SEQ ID NO: 1017 - RNA, 19 nt, artificial
  Chemically synthesized
uauacugaccaggucuugc

SEQ ID NO: 1018 - RNA, 19 nt, artificial
  Chemically synthesized
agucuguggaaaauuagcu

SEQ ID NO: 1019 - RNA, 19 nt, artificial
  Chemically synthesized
ucuguggaaaauuagcuug

SEQ ID NO: 1020 - RNA, 19 nt, artificial
  Chemically synthesized
cucuuccauacaaaucuuc

SEQ ID NO: 1021 - RNA, 19 nt, artificial
  Chemically synthesized
uuugauacuucagcagccc

SEQ ID NO: 1022 - RNA, 19 nt, artificial
  Chemically synthesized
guagaagacaaagaagagg

SEQ ID NO: 1023 - RNA, 19 nt, artificial
  Chemically synthesized
uaauucacugagaaguuga

SEQ ID NO: 1024 - RNA, 19 nt, artificial
  Chemically synthesized
uucugcuuuuauccaacaa

SEQ ID NO: 1025 - RNA, 19 nt, artificial
  Chemically synthesized
cagaugaacaggcagaggu

SEQ ID NO: 1026 - RNA, 19 nt, artificial
  Chemically synthesized
agauugagcaaguucagcu

SEQ ID NO: 1027 - RNA, 19 nt, artificial
  Chemically synthesized
uugagcaaguucagcuccu

SEQ ID NO: 1028 - RNA, 19 nt, artificial
  Chemically synthesized
cagggucucuuugguuucc

SEQ ID NO: 1029 - RNA, 19 nt, artificial
  Chemically synthesized
ugaauuggguccacaacag

SEQ ID NO: 1030 - RNA, 19 nt, artificial
  Chemically synthesized
auguugacauagucagguc

SEQ ID NO: 1031 - RNA, 19 nt, artificial
  Chemically synthesized
gaguauugaugcaaaugga

SEQ ID NO: 1032 - RNA, 19 nt, artificial
  Chemically synthesized
caaauggacuuccaaaagg

SEQ ID NO: 1033 - RNA, 19 nt, artificial
  Chemically synthesized
aaugaagggcagaauuucg

SEQ ID NO: 1034 - RNA, 19 nt, artificial
  Chemically synthesized
cuaaugcagauacacuggg

SEQ ID NO: 1035 - RNA, 19 nt, artificial
  Chemically synthesized
uugugcuggguaaacucug

SEQ ID NO: 1036 - RNA, 19 nt, artificial
  Chemically synthesized
ugugcuggguaaacucugc

SEQ ID NO: 1037 - RNA, 19 nt, artificial
  Chemically synthesized
uaaacucugccgguuuuga

SEQ ID NO: 1038 - RNA, 19 nt, artificial
  Chemically synthesized
guuuugaaaauccuucagg

SEQ ID NO: 1039 - RNA, 19 nt, artificial
  Chemically synthesized
uucaugaaaauguucugag

SEQ ID NO: 1040 - RNA, 19 nt, artificial
  Chemically synthesized
auguagaagacaaagaaga

SEQ ID NO: 1041 - RNA, 19 nt, artificial
  Chemically synthesized
uauugcauauguagaggcu

SEQ ID NO: 1042 - RNA, 19 nt, artificial
  Chemically synthesized
auucacugagaaguugagg

SEQ ID NO: 1043 - RNA, 19 nt, artificial
  Chemically synthesized
aacaaucuccugguucucc

SEQ ID NO: 1044 - RNA, 19 nt, artificial
  Chemically synthesized
uucagggucucuuugguuu

SEQ ID NO: 1045 - RNA, 19 nt, artificial
  Chemically synthesized
uuaaacauguaaugugacg

SEQ ID NO: 1046 - RNA, 19 nt, artificial
  Chemically synthesized
aaacaccaacuguuuuucc

SEQ ID NO: 1047 - RNA, 19 nt, artificial
  Chemically synthesized
cauacagaguaaaucugca

SEQ ID NO: 1048 - RNA, 19 nt, artificial
  Chemically synthesized
auacagaguaaaucugcaa

SEQ ID NO: 1049 - RNA, 19 nt, artificial
  Chemically synthesized
aaugcagauacacugggac

SEQ ID NO: 1050 - RNA, 19 nt, artificial
  Chemically synthesized
auauacugaccaggucuug

SEQ ID NO: 1051 - RNA, 19 nt, artificial
  Chemically synthesized
cucuggcccuugguuauac

SEQ ID NO: 1052 - RNA, 19 nt, artificial
  Chemically synthesized
guaaagucuuucggcacag

SEQ ID NO: 1053 - RNA, 19 nt, artificial
  Chemically synthesized
guccagaaauccaaagcca

SEQ ID NO: 1054 - RNA, 19 nt, artificial
  Chemically synthesized
auuagcuuggaaucugggc

SEQ ID NO: 1055 - RNA, 19 nt, artificial
  Chemically synthesized
uuagcuuggaaucugggcu

SEQ ID NO: 1056 - RNA, 19 nt, artificial
  Chemically synthesized
aucuucacaaauuugugcu

SEQ ID NO: 1057 - RNA, 19 nt, artificial
  Chemically synthesized
uucacaaauuugugcuggg

SEQ ID NO: 1058 - RNA, 19 nt, artificial
  Chemically synthesized
uucacuguaauucacugag

SEQ ID NO: 1059 - RNA, 19 nt, artificial
  Chemically synthesized
aaucuccugguucuccugc

SEQ ID NO: 1060 - RNA, 19 nt, artificial
  Chemically synthesized
agguaagccaagaguguuc

SEQ ID NO: 1061 - RNA, 19 nt, artificial
  Chemically synthesized
auugagcaaguucagcucc

SEQ ID NO: 1062 - RNA, 19 nt, artificial
  Chemically synthesized
agggucucuuugguuucca

SEQ ID NO: 1063 - RNA, 19 nt, artificial
  Chemically synthesized
uuaagaacagaugcugagg

SEQ ID NO: 1064 - RNA, 19 nt, artificial
  Chemically synthesized
uugacugagguacagcugg

SEQ ID NO: 1065 - RNA, 19 nt, artificial
  Chemically synthesized
acauacagaguaaaucugc

SEQ ID NO: 1066 - RNA, 19 nt, artificial
  Chemically synthesized
aaaucugcaaaccaacgga

SEQ ID NO: 1067 - RNA, 19 nt, artificial
  Chemically synthesized
acuuccaaaaggaccauca

SEQ ID NO: 1068 - RNA, 19 nt, artificial
  Chemically synthesized
aauguugcuuugguuucag

SEQ ID NO: 1069 - RNA, 19 nt, artificial
  Chemically synthesized
uuugguuucaguuggacac

SEQ ID NO: 1070 - RNA, 19 nt, artificial
  Chemically synthesized
aagguccagaaauccaaag

SEQ ID NO: 1071 - RNA, 19 nt, artificial
  Chemically synthesized
cuuccauacaaaucuucac

SEQ ID NO: 1072 - RNA, 19 nt, artificial
  Chemically synthesized
aaucuucacaaauuugugc

SEQ ID NO: 1073 - RNA, 19 nt, artificial
  Chemically synthesized
guucaugaaaauguucuga

SEQ ID NO: 1074 - RNA, 19 nt, artificial
  Chemically synthesized
uaaggaaauauucugagag

SEQ ID NO: 1075 - RNA, 19 nt, artificial
  Chemically synthesized
agguuuuccagaaaagcag

SEQ ID NO: 1076 - RNA, 19 nt, artificial
  Chemically synthesized
guuugauacuucagcagcc

SEQ ID NO: 1077 - RNA, 19 nt, artificial
  Chemically synthesized
uuuuccagaaaagcaggac

SEQ ID NO: 1078 - RNA, 19 nt, artificial
  Chemically synthesized
cuuauugcauauguagagg

SEQ ID NO: 1079 - RNA, 19 nt, artificial
  Chemically synthesized
uugagggcauucaccagau

SEQ ID NO: 1080 - RNA, 19 nt, artificial
  Chemically synthesized
gaaccuucugugauccucg

SEQ ID NO: 1081 - RNA, 19 nt, artificial
  Chemically synthesized
gguaagccaagaguguucg

SEQ ID NO: 1082 - RNA, 19 nt, artificial
  Chemically synthesized
cauuuguucaaccaaaaac

SEQ ID NO: 1083 - RNA, 19 nt, artificial
  Chemically synthesized
cuuagauugagcaaguuca

SEQ ID NO: 1084 - RNA, 19 nt, artificial
  Chemically synthesized
uuugagaacugaaaaguga

SEQ ID NO: 1085 - RNA, 19 nt, artificial
  Chemically synthesized
ucuucagggucucuuuggu

SEQ ID NO: 1086 - RNA, 19 nt, artificial
  Chemically synthesized
aaacauguaaugugacggu

SEQ ID NO: 1087 - RNA, 19 nt, artificial
  Chemically synthesized
cacagcugauugauuccgc

SEQ ID NO: 1088 - RNA, 19 nt, artificial
  Chemically synthesized
uugauuccgcugaguuuca

SEQ ID NO: 1089 - RNA, 19 nt, artificial
  Chemically synthesized
aacaggcagagguguuuaa

SEQ ID NO: 1090 - RNA, 19 nt, artificial
  Chemically synthesized
guuaagaacagaugcugag

SEQ ID NO: 1091 - RNA, 19 nt, artificial
  Chemically synthesized
auagucaggucuguucucu

SEQ ID NO: 1092 - RNA, 19 nt, artificial
  Chemically synthesized
aacauacagaguaaaucug

SEQ ID NO: 1093 - RNA, 19 nt, artificial
  Chemically synthesized
ugcaaaccaacggaaggac

SEQ ID NO: 1094 - RNA, 19 nt, artificial
  Chemically synthesized
aaguauagucuucuaagcu

SEQ ID NO: 1095 - RNA, 19 nt, artificial
  Chemically synthesized
uuccagucauccaacaggg

SEQ ID NO: 1096 - RNA, 19 nt, artificial
  Chemically synthesized
aauggacuuccaaaaggac

SEQ ID NO: 1097 - RNA, 19 nt, artificial
  Chemically synthesized
aacaucugguggagguagu

SEQ ID NO: 1098 - RNA, 19 nt, artificial
  Chemically synthesized
uggagguagugauacucug

SEQ ID NO: 1099 - RNA, 19 nt, artificial
  Chemically synthesized
aguacaggcacaaaggucc

SEQ ID NO: 1100 - RNA, 19 nt, artificial
  Chemically synthesized
uacaggcacaaagguccag

SEQ ID NO: 1101 - RNA, 19 nt, artificial
  Chemically synthesized
gucuguggaaaauuagcuu

SEQ ID NO: 1102 - RNA, 19 nt, artificial
  Chemically synthesized
uguggaaaauuagcuugga

SEQ ID NO: 1103 - RNA, 19 nt, artificial
  Chemically synthesized
aauuagcuuggaaucuggg

SEQ ID NO: 1104 - RNA, 19 nt, artificial
  Chemically synthesized
uuggaaucugggcucuucc

SEQ ID NO: 1105 - RNA, 19 nt, artificial
  Chemically synthesized
ucuuccauacaaaucuuca

SEQ ID NO: 1106 - RNA, 19 nt, artificial
  Chemically synthesized
uuugugcuggguaaacucu

SEQ ID NO: 1107 - RNA, 19 nt, artificial
  Chemically synthesized
uacucugguaaggaaauau

SEQ ID NO: 1108 - RNA, 19 nt, artificial
  Chemically synthesized
aacaugcaacgucagcagc

SEQ ID NO: 1109 - RNA, 19 nt, artificial
  Chemically synthesized
gagguuaugaguauaccag

SEQ ID NO: 1110 - RNA, 19 nt, artificial
  Chemically synthesized
ucuuauugcauauguagag

SEQ ID NO: 1111 - RNA, 19 nt, artificial
  Chemically synthesized
aucucgguaucuugcugca

SEQ ID NO: 1112 - RNA, 19 nt, artificial
  Chemically synthesized
cuucacuguaauucacuga

SEQ ID NO: 1113 - RNA, 19 nt, artificial
  Chemically synthesized
uuagauugagcaaguucag

SEQ ID NO: 1114 - RNA, 19 nt, artificial
  Chemically synthesized
uagauugagcaaguucagc

SEQ ID NO: 1115 - RNA, 19 nt, artificial
  Chemically synthesized
uugguuuccagauuaaaca

SEQ ID NO: 1116 - RNA, 19 nt, artificial
  Chemically synthesized
uuguucugguuacucaguu

SEQ ID NO: 1117 - RNA, 19 nt, artificial
  Chemically synthesized
uuacucaguuuaugaagag

SEQ ID NO: 1118 - RNA, 19 nt, artificial
  Chemically synthesized
gauguugacauagucaggu

SEQ ID NO: 1119 - RNA, 19 nt, artificial
  Chemically synthesized
cugcaaaccaacggaagga

SEQ ID NO: 1120 - RNA, 19 nt, artificial
  Chemically synthesized
aacggaaggacuggauauc

SEQ ID NO: 1121 - RNA, 19 nt, artificial
  Chemically synthesized
cuuguaugguuuccaguca

SEQ ID NO: 1122 - RNA, 19 nt, artificial
  Chemically synthesized
agcuugggauaauuucuag

SEQ ID NO: 1123 - RNA, 19 nt, artificial
  Chemically synthesized
uaaugcagauacacuggga

SEQ ID NO: 1124 - RNA, 19 nt, artificial
  Chemically synthesized
aauauacugaccaggucuu

SEQ ID NO: 1125 - RNA, 19 nt, artificial
  Chemically synthesized
ugagggaugacuuaugacc

SEQ ID NO: 1126 - RNA, 19 nt, artificial
  Chemically synthesized
agggaugacuuaugaccga

SEQ ID NO: 1127 - RNA, 19 nt, artificial
  Chemically synthesized
accgaaaugauggugacug

SEQ ID NO: 1128 - RNA, 19 nt, artificial
  Chemically synthesized
uuucggcacaguacaggca

SEQ ID NO: 1129 - RNA, 19 nt, artificial
  Chemically synthesized
agcuuggaaucugggcucu

SEQ ID NO: 1130 - RNA, 19 nt, artificial
  Chemically synthesized
ugccgguuuugaaaauccu

SEQ ID NO: 1131 - RNA, 19 nt, artificial
  Chemically synthesized
uugugaagagaaguuuucu

SEQ ID NO: 1132 - RNA, 19 nt, artificial
  Chemically synthesized
gagaaguugagggcauuca

SEQ ID NO: 1133 - RNA, 19 nt, artificial
  Chemically synthesized
aaguugagggcauucacca

SEQ ID NO: 1134 - RNA, 19 nt, artificial
  Chemically synthesized
uucauggagagccagauga

SEQ ID NO: 1135 - RNA, 19 nt, artificial
  Chemically synthesized
aucuccugguucuccugcu

SEQ ID NO: 1136 - RNA, 19 nt, artificial
  Chemically synthesized
gauugagcaaguucagcuc

SEQ ID NO: 1137 - RNA, 19 nt, artificial
  Chemically synthesized
cuagggaguucuugaaucc

SEQ ID NO: 1138 - RNA, 19 nt, artificial
  Chemically synthesized
agggaguucuugaauccac

SEQ ID NO: 1139 - RNA, 19 nt, artificial
  Chemically synthesized
agaacugaaaagugaauca

SEQ ID NO: 1140 - RNA, 19 nt, artificial
  Chemically synthesized
aacauguaaugugacgguc

SEQ ID NO: 1141 - RNA, 19 nt, artificial
  Chemically synthesized
uuuggcauaacacagcuga

SEQ ID NO: 1142 - RNA, 19 nt, artificial
  Chemically synthesized
aaguuuucagcugaaagac

SEQ ID NO: 1143 - RNA, 19 nt, artificial
  Chemically synthesized
uuugacugagguacagcug

SEQ ID NO: 1144 - RNA, 19 nt, artificial
  Chemically synthesized
uacagcuggauguugacau

SEQ ID NO: 1145 - RNA, 19 nt, artificial
  Chemically synthesized
uguugacauagucaggucu

SEQ ID NO: 1146 - RNA, 19 nt, artificial
  Chemically synthesized
aaaccaacggaaggacugg

SEQ ID NO: 1147 - RNA, 19 nt, artificial
  Chemically synthesized
ucauccaacaggguguuga

SEQ ID NO: 1148 - RNA, 19 nt, artificial
  Chemically synthesized
augcaaauggaguuacucc

SEQ ID NO: 1149 - RNA, 19 nt, artificial
  Chemically synthesized
aaauggaguuacuccaaug

SEQ ID NO: 1150 - RNA, 19 nt, artificial
  Chemically synthesized
aggcagagguguuuaaccc

SEQ ID NO: 1151 - RNA, 19 nt, artificial
  Chemically synthesized
uuccucaaauggacuucca

SEQ ID NO: 1152 - RNA, 19 nt, artificial
  Chemically synthesized
aucugguggagguagugau

SEQ ID NO: 1153 - RNA, 19 nt, artificial
  Chemically synthesized
auguugcuuugguuucagu

SEQ ID NO: 1154 - RNA, 19 nt, artificial
  Chemically synthesized
ucaguuggacacauuguga

SEQ ID NO: 1155 - RNA, 19 nt, artificial
  Chemically synthesized
uguagaguaauauacugac

SEQ ID NO: 1156 - RNA, 19 nt, artificial
  Chemically synthesized
uuuucuuugaccauucgga

SEQ ID NO: 1157 - RNA, 19 nt, artificial
  Chemically synthesized
gagggaugacuuaugaccg

SEQ ID NO: 1158 - RNA, 19 nt, artificial
  Chemically synthesized
ucuucacaaauuugugcug

SEQ ID NO: 1159 - RNA, 19 nt, artificial
  Chemically synthesized
cgguuuugaaaauccuuca

SEQ ID NO: 1160 - RNA, 19 nt, artificial
  Chemically synthesized
gguuuugaaaauccuucag

SEQ ID NO: 1161 - RNA, 19 nt, artificial
  Chemically synthesized
gagaaauacucugguaagg

SEQ ID NO: 1162 - RNA, 19 nt, artificial
  Chemically synthesized
gguaaggaaauauucugag

SEQ ID NO: 1163 - RNA, 19 nt, artificial
  Chemically synthesized
aguuugauacuucagcagc

SEQ ID NO: 1164 - RNA, 19 nt, artificial
  Chemically synthesized
aagagguuaugaguauacc

SEQ ID NO: 1165 - RNA, 19 nt, artificial
  Chemically synthesized
aaucagccuuagauugagc

SEQ ID NO: 1166 - RNA, 19 nt, artificial
  Chemically synthesized
aaaagugaaucaucacauc

SEQ ID NO: 1167 - RNA, 19 nt, artificial
  Chemically synthesized
auagugaauuggguccaca

SEQ ID NO: 1168 - RNA, 19 nt, artificial
  Chemically synthesized
uuguuaugcaacauacaga

SEQ ID NO: 1169 - RNA, 19 nt, artificial
  Chemically synthesized
auggaguuacuccaaugcc

SEQ ID NO: 1170 - RNA, 19 nt, artificial
  Chemically synthesized
auggacuuccaaaaggacc

SEQ ID NO: 1171 - RNA, 19 nt, artificial
  Chemically synthesized
uggaugauuuucuaaugca

SEQ ID NO: 1172 - RNA, 19 nt, artificial
  Chemically synthesized
ucuaaugcagauacacugg

SEQ ID NO: 1173 - RNA, 19 nt, artificial
  Chemically synthesized
auacacugggacaauguag

SEQ ID NO: 1174 - RNA, 19 nt, artificial
  Chemically synthesized
guagaguaauauacugacc

SEQ ID NO: 1175 - RNA, 19 nt, artificial
  Chemically synthesized
auugcuccggauauaccug

SEQ ID NO: 1176 - RNA, 19 nt, artificial
  Chemically synthesized
agguccagaaauccaaagc

SEQ ID NO: 1177 - RNA, 19 nt, artificial
  Chemically synthesized
cuucacaaauuugugcugg

SEQ ID NO: 1178 - RNA, 19 nt, artificial
  Chemically synthesized
aaggaaauauucugagagc

SEQ ID NO: 1179 - RNA, 19 nt, artificial
  Chemically synthesized
gaaacaugcaacgucagca

SEQ ID NO: 1180 - RNA, 19 nt, artificial
  Chemically synthesized
uugcauauguagaggcugu

SEQ ID NO: 1181 - RNA, 19 nt, artificial
  Chemically synthesized
gaagagaaguuuucuagga

SEQ ID NO: 1182 - RNA, 19 nt, artificial
  Chemically synthesized
aucuugcugcauucaguuc

SEQ ID NO: 1183 - RNA, 19 nt, artificial
  Chemically synthesized
ccugagaaaauacagauag

SEQ ID NO: 1184 - RNA, 19 nt, artificial
  Chemically synthesized
aucagccuuagauugagca

SEQ ID NO: 1185 - RNA, 19 nt, artificial
  Chemically synthesized
uucagcuccucacuaggga

SEQ ID NO: 1186 - RNA, 19 nt, artificial
  Chemically synthesized
aaagugaaucaucacauca

SEQ ID NO: 1187 - RNA, 19 nt, artificial
  Chemically synthesized
augugacggucaucuugcc

SEQ ID NO: 1188 - RNA, 19 nt, artificial
  Chemically synthesized
ucuuuggcauaacacagcu

SEQ ID NO: 1189 - RNA, 19 nt, artificial
  Chemically synthesized
cagucuugaauucagugca

SEQ ID NO: 1190 - RNA, 19 nt, artificial
  Chemically synthesized
aagaacagaugcugaggcu

SEQ ID NO: 1191 - RNA, 19 nt, artificial
  Chemically synthesized
guuugacugagguacagcu

SEQ ID NO: 1192 - RNA, 19 nt, artificial
  Chemically synthesized
uugacauagucaggucugu

SEQ ID NO: 1193 - RNA, 19 nt, artificial
  Chemically synthesized
aaccaacggaaggacugga

SEQ ID NO: 1194 - RNA, 19 nt, artificial
  Chemically synthesized
ugggauaauuucuagauug

SEQ ID NO: 1195 - RNA, 19 nt, artificial
  Chemically synthesized
ugaagggcagaauuucgga

SEQ ID NO: 1196 - RNA, 19 nt, artificial
  Chemically synthesized
gaagggcagaauuucggag

SEQ ID NO: 1197 - RNA, 19 nt, artificial
  Chemically synthesized
uggaggcaguaguaaaucu

SEQ ID NO: 1198 - RNA, 19 nt, artificial
  Chemically synthesized
gaggcaguaguaaaucucg

SEQ ID NO: 1199 - RNA, 19 nt, artificial
  Chemically synthesized
uacacugggacaauguaga

SEQ ID NO: 1200 - RNA, 19 nt, artificial
  Chemically synthesized
accauucggauuuccauga

SEQ ID NO: 1201 - RNA, 19 nt, artificial
  Chemically synthesized
uuccaugacaucugaggga

SEQ ID NO: 1202 - RNA, 19 nt, artificial
  Chemically synthesized
uuaugaccgaaaugauggu

SEQ ID NO: 1203 - RNA, 19 nt, artificial
  Chemically synthesized
acuggcuuauugcuccgga

SEQ ID NO: 1204 - RNA, 19 nt, artificial
  Chemically synthesized
uugcuccggauauaccugu

SEQ ID NO: 1205 - RNA, 19 nt, artificial
  Chemically synthesized
agggucaaagacugagugg

SEQ ID NO: 1206 - RNA, 19 nt, artificial
  Chemically synthesized
auccuucagggaaagguuc

SEQ ID NO: 1207 - RNA, 19 nt, artificial
  Chemically synthesized
gguucaugaaaauguucug

SEQ ID NO: 1208 - RNA, 19 nt, artificial
  Chemically synthesized
guaaggaaauauucugaga

SEQ ID NO: 1209 - RNA, 19 nt, artificial
  Chemically synthesized
aagagaaguuuucuaggau

SEQ ID NO: 1210 - RNA, 19 nt, artificial
  Chemically synthesized
aggacauucauggagagcc

SEQ ID NO: 1211 - RNA, 19 nt, artificial
  Chemically synthesized
aagccaagaguguucggca

SEQ ID NO: 1212 - RNA, 19 nt, artificial
  Chemically synthesized
uuguucaaucuugcauuug

SEQ ID NO: 1213 - RNA, 19 nt, artificial
  Chemically synthesized
aagugaaucaucacaucaa

SEQ ID NO: 1214 - RNA, 19 nt, artificial
  Chemically synthesized
agcugauugauuccgcuga

SEQ ID NO: 1215 - RNA, 19 nt, artificial
  Chemically synthesized
gaguuguucugguuacuca

SEQ ID NO: 1216 - RNA, 19 nt, artificial
  Chemically synthesized
ugacugagguacagcugga

SEQ ID NO: 1217 - RNA, 19 nt, artificial
  Chemically synthesized
ucaggucuguucucuugcc

SEQ ID NO: 1218 - RNA, 19 nt, artificial
  Chemically synthesized
aaucugcaaaccaacggaa

SEQ ID NO: 1219 - RNA, 19 nt, artificial
  Chemically synthesized
guaugguuuccagucaucc

SEQ ID NO: 1220 - RNA, 19 nt, artificial
  Chemically synthesized
cagucauccaacagggugu

SEQ ID NO: 1221 - RNA, 19 nt, artificial
  Chemically synthesized
agugauuccucaaauggac

SEQ ID NO: 1222 - RNA, 19 nt, artificial
  Chemically synthesized
uggacuuccaaaaggacca

SEQ ID NO: 1223 - RNA, 19 nt, artificial
  Chemically synthesized
uaauauacugaccaggucu

SEQ ID NO: 1224 - RNA, 19 nt, artificial
  Chemically synthesized
auucugagagcugguucgg

SEQ ID NO: 1225 - RNA, 19 nt, artificial
  Chemically synthesized
cugguucgguuaagacuga

SEQ ID NO: 1226 - RNA, 19 nt, artificial
  Chemically synthesized
gguuaagacugaugcagcc

SEQ ID NO: 1227 - RNA, 19 nt, artificial
  Chemically synthesized
guuuuccagaaaagcagga

SEQ ID NO: 1228 - RNA, 19 nt, artificial
  Chemically synthesized
aggaauagcaccaccacca

SEQ ID NO: 1229 - RNA, 19 nt, artificial
  Chemically synthesized
ugaagagaaguuuucuagg

SEQ ID NO: 1230 - RNA, 19 nt, artificial
  Chemically synthesized
ucuaggauccucaucucgg

SEQ ID NO: 1231 - RNA, 19 nt, artificial
  Chemically synthesized
gaaaagugaaucaucacau

SEQ ID NO: 1232 - RNA, 19 nt, artificial
  Chemically synthesized
acagcugauugauuccgcu

SEQ ID NO: 1233 - RNA, 19 nt, artificial
  Chemically synthesized
uuuucagcugaaagacucu

SEQ ID NO: 1234 - RNA, 19 nt, artificial
  Chemically synthesized
aacagaaaacaccaacugu

SEQ ID NO: 1235 - RNA, 19 nt, artificial
  Chemically synthesized
aaaaguuuccaccgaggac

SEQ ID NO: 1236 - RNA, 19 nt, artificial
  Chemically synthesized
agucaggucuguucucuug

SEQ ID NO: 1237 - RNA, 19 nt, artificial
  Chemically synthesized
cagaguaaaucugcaaacc

SEQ ID NO: 1238 - RNA, 19 nt, artificial
  Chemically synthesized
uaugguuuccagucaucca

SEQ ID NO: 1239 - RNA, 19 nt, artificial
  Chemically synthesized
ugcaaauggaguuacucca

SEQ ID NO: 1240 - RNA, 19 nt, artificial
  Chemically synthesized
cucauaguucagugauucc

SEQ ID NO: 1241 - RNA, 19 nt, artificial
  Chemically synthesized
uauugcuccggauauaccu

SEQ ID NO: 1242 - RNA, 19 nt, artificial
  Chemically synthesized
aaaauccuucagggaaagg

SEQ ID NO: 1243 - RNA, 19 nt, artificial
  Chemically synthesized
ugguaaggaaauauucuga

SEQ ID NO: 1244 - RNA, 19 nt, artificial
  Chemically synthesized
aagguuuuccagaaaagca

SEQ ID NO: 1245 - RNA, 19 nt, artificial
  Chemically synthesized
uucgguuaagacugaugca

SEQ ID NO: 1246 - RNA, 19 nt, artificial
  Chemically synthesized
ucgguuaagacugaugcag

SEQ ID NO: 1247 - RNA, 19 nt, artificial
  Chemically synthesized
ugcaacgucagcagcaugu

SEQ ID NO: 1248 - RNA, 19 nt, artificial
  Chemically synthesized
cuaggauccucaucucggu

SEQ ID NO: 1249 - RNA, 19 nt, artificial
  Chemically synthesized
uggagagccagaugaacag

SEQ ID NO: 1250 - RNA, 19 nt, artificial
  Chemically synthesized
uucuccugcuuggaaccuu

SEQ ID NO: 1251 - RNA, 19 nt, artificial
  Chemically synthesized
caaucagccuuagauugag

SEQ ID NO: 1252 - RNA, 19 nt, artificial
  Chemically synthesized
uagggaguucuugaaucca

SEQ ID NO: 1253 - RNA, 19 nt, artificial
  Chemically synthesized
acagugugcaucuaacagu

SEQ ID NO: 1254 - RNA, 19 nt, artificial
  Chemically synthesized
cuuuggcauaacacagcug

SEQ ID NO: 1255 - RNA, 19 nt, artificial
  Chemically synthesized
uagaguccugcuucauggc

SEQ ID NO: 1256 - RNA, 19 nt, artificial
  Chemically synthesized
aaaguuuucagcugaaaga

SEQ ID NO: 1257 - RNA, 19 nt, artificial
  Chemically synthesized
guuuucagcugaaagacuc

SEQ ID NO: 1258 - RNA, 19 nt, artificial
  Chemically synthesized
gacguccuauaaacagucu

SEQ ID NO: 1259 - RNA, 19 nt, artificial
  Chemically synthesized
uggauguugacauagucag

SEQ ID NO: 1260 - RNA, 19 nt, artificial
  Chemically synthesized
caggucuguucucuugcca

SEQ ID NO: 1261 - RNA, 19 nt, artificial
  Chemically synthesized
caugacaucugagggauga

SEQ ID NO: 1262 - RNA, 19 nt, artificial
  Chemically synthesized
aagguucaugaaaauguuc

SEQ ID NO: 1263 - RNA, 19 nt, artificial
  Chemically synthesized
auugcauauguagaggcug

SEQ ID NO: 1264 - RNA, 19 nt, artificial
  Chemically synthesized
ugcauauguagaggcugug

SEQ ID NO: 1265 - RNA, 19 nt, artificial
  Chemically synthesized
acaaucuccugguucuccu

SEQ ID NO: 1266 - RNA, 19 nt, artificial
  Chemically synthesized
ucuccugcuuggaaccuuc

SEQ ID NO: 1267 - RNA, 19 nt, artificial
  Chemically synthesized
cugaguuucaaagucuuag

SEQ ID NO: 1268 - RNA, 19 nt, artificial
  Chemically synthesized
uuucagcugaaagacucuu

SEQ ID NO: 1269 - RNA, 19 nt, artificial
  Chemically synthesized
aaaacaccaacuguuuuuc

SEQ ID NO: 1270 - RNA, 19 nt, artificial
  Chemically synthesized
gucaggucuguucucuugc

SEQ ID NO: 1271 - RNA, 19 nt, artificial
  Chemically synthesized
aggcugaccucauaguuca

SEQ ID NO: 1272 - RNA, 19 nt, artificial
  Chemically synthesized
cugaccucauaguucagug

SEQ ID NO: 1273 - RNA, 19 nt, artificial
  Chemically synthesized
ugaccucauaguucaguga

SEQ ID NO: 1274 - RNA, 19 nt, artificial
  Chemically synthesized
acagcaagaagguuuucca

SEQ ID NO: 1275 - RNA, 19 nt, artificial
  Chemically synthesized
ucaucucgguaucuugcug

SEQ ID NO: 1276 - RNA, 19 nt, artificial
  Chemically synthesized
acaaucagccuuagauuga

SEQ ID NO: 1277 - RNA, 19 nt, artificial
  Chemically synthesized
cuccucacuagggaguucu

SEQ ID NO: 1278 - RNA, 19 nt, artificial
  Chemically synthesized
auuugagaacugaaaagug

SEQ ID NO: 1279 - RNA, 19 nt, artificial
  Chemically synthesized
acugaaaagugaaucauca

SEQ ID NO: 1280 - RNA, 19 nt, artificial
  Chemically synthesized
auggcaaaaguuuucagcu

SEQ ID NO: 1281 - RNA, 19 nt, artificial
  Chemically synthesized
uggcaaaaguuuucagcug

SEQ ID NO: 1282 - RNA, 19 nt, artificial
  Chemically synthesized
cucaguuuaugaagagucu

SEQ ID NO: 1283 - RNA, 19 nt, artificial
  Chemically synthesized
cuguuugacugagguacag

SEQ ID NO: 1284 - RNA, 19 nt, artificial
  Chemically synthesized
cugagguacagcuggaugu

SEQ ID NO: 1285 - RNA, 19 nt, artificial
  Chemically synthesized
agguacagcuggauguuga

SEQ ID NO: 1286 - RNA, 19 nt, artificial
  Chemically synthesized
uuguaugguuuccagucau

SEQ ID NO: 1287 - RNA, 19 nt, artificial
  Chemically synthesized
uggaguuacuccaaugccu

SEQ ID NO: 1288 - RNA, 19 nt, artificial
  Chemically synthesized
ucacaaauuugugcugggu

SEQ ID NO: 1289 - RNA, 19 nt, artificial
  Chemically synthesized
uucugagagcugguucggu

SEQ ID NO: 1290 - RNA, 19 nt, artificial
  Chemically synthesized
uuuccagaaaagcaggaca

SEQ ID NO: 1291 - RNA, 19 nt, artificial
  Chemically synthesized
aacagugugcaucuaacag

SEQ ID NO: 1292 - RNA, 19 nt, artificial
  Chemically synthesized
ugugcaucuaacaguuuuc

SEQ ID NO: 1293 - RNA, 19 nt, artificial
  Chemically synthesized
ugaaaagugaaucaucaca

SEQ ID NO: 1294 - RNA, 19 nt, artificial
  Chemically synthesized
uacucaguuuaugaagagu

SEQ ID NO: 1295 - RNA, 19 nt, artificial
  Chemically synthesized
acucaguuuaugaagaguc

SEQ ID NO: 1296 - RNA, 19 nt, artificial
  Chemically synthesized
aacagaugcugaggcucug

SEQ ID NO: 1297 - RNA, 19 nt, artificial
  Chemically synthesized
augcugaggcucugcuuag

SEQ ID NO: 1298 - RNA, 19 nt, artificial
  Chemically synthesized
augguuuccagucauccaa

SEQ ID NO: 1299 - RNA, 19 nt, artificial
  Chemically synthesized
gaaagguucaugaaaaugu

SEQ ID NO: 1300 - RNA, 19 nt, artificial
  Chemically synthesized
agguucaugaaaauguucu

SEQ ID NO: 1301 - RNA, 19 nt, artificial
  Chemically synthesized
gagaacugaaaagugaauc

SEQ ID NO: 1302 - RNA, 19 nt, artificial
  Chemically synthesized
uugaccauucggauuucca

SEQ ID NO: 1303 - RNA, 19 nt, artificial
  Chemically synthesized
uuugaaaauccuucaggga

SEQ ID NO: 1304 - RNA, 19 nt, artificial
  Chemically synthesized
uuggaaccuucugugaucc

SEQ ID NO: 1305 - RNA, 19 nt, artificial
  Chemically synthesized
cugguaaggaaauauucug

SEQ ID NO: 1306 - RNA, 19 nt, artificial
  Chemically synthesized
gaaaacaccaacuguuuuu

SEQ ID NO: 1307 - RNA, 19 nt, artificial
  Chemically synthesized
gguccagaaauccaaagcc

SEQ ID NO: 1308 - RNA, 19 nt, artificial
  Chemically synthesized
ucagcagcauguagaagac

SEQ ID NO: 1309 - RNA, 19 nt, artificial
  Chemically synthesized
uugcugcauucaguucaac

SEQ ID NO: 1310 - RNA, 19 nt, artificial
  Chemically synthesized
uuccagaaaagcaggacau

SEQ ID NO: 1311 - RNA, 19 nt, Artificial
  Chemically synthesized
agagccagaugaacaggca

SEQ ID NO: 1312 - RNA, 19 nt, artificial
  Chemically synthesized
ggacaagauuugaauacaa

SEQ ID NO: 1313 - RNA, 19 nt, artificial
  Chemically synthesized
gaagauaauuggagaaaaa

SEQ ID NO: 1314 - RNA, 19 nt, artificial
  Chemically synthesized
ccaggagauuguuggauaa

SEQ ID NO: 1315 - RNA, 19 nt, artificial
  Chemically synthesized
gaagcaggacucuaaagaa

SEQ ID NO: 1316 - RNA, 19 nt, artificial
  Chemically synthesized
caugaagcaggacucuaaa

SEQ ID NO: 1317 - RNA, 19 nt, artificial
  Chemically synthesized
caguguaucugcauuagaa

SEQ ID NO: 1318 - RNA, 19 nt, artificial
  Chemically synthesized
gcugaaguaucaaacuaau

SEQ ID NO: 1319 - RNA, 19 nt, artificial
  Chemically synthesized
gguucaucuuaaaauagua

SEQ ID NO: 1320 - RNA, 19 nt, artificial
  Chemically synthesized
ccaugaagcaggacucuaa

SEQ ID NO: 1321 - RNA, 19 nt, artificial
  Chemically synthesized
ggucaaagaaaauuuuaaa

SEQ ID NO: 1322 - RNA, 19 nt, artificial
  Chemically synthesized
ccaaagagacccugaagaa

SEQ ID NO: 1323 - RNA, 19 nt, artificial
  Chemically synthesized
guuuaaucuggaaaccaaa

SEQ ID NO: 1324 - RNA, 19 nt, artificial
  Chemically synthesized
gaaugagugcaauuucuaa

SEQ ID NO: 1325 - RNA, 19 nt, artificial
  Chemically synthesized
gaugaaauagcaaaauaua

SEQ ID NO: 1326 - RNA, 19 nt, artificial
  Chemically synthesized
aaugcaagauugaacaaaa

SEQ ID NO: 1327 - RNA, 19 nt, artificial
  Chemically synthesized
cguccucgguggaaacuuu

SEQ ID NO: 1328 - RNA, 19 nt, artificial
  Chemically synthesized
aaaccuucuugcuguauaa

SEQ ID NO: 1329 - RNA, 19 nt, artificial
  Chemically synthesized
gaaacuuuuguuugaugaa

SEQ ID NO: 1330 - RNA, 19 nt, artificial
  Chemically synthesized
gcaggacucuaaagaagga

SEQ ID NO: 1331 - RNA, 19 nt, artificial
  Chemically synthesized
caagauuugaauacaauaa

SEQ ID NO: 1332 - RNA, 19 nt, artificial
  Chemically synthesized
caauuucuaagacuuugaa

SEQ ID NO: 1333 - RNA, 19 nt, artificial
  Chemically synthesized
gagggcugcugaaguauca

SEQ ID NO: 1334 - RNA, 19 nt, artificial
  Chemically synthesized
gaacaaaugcaagauugaa

SEQ ID NO: 1335 - RNA, 19 nt, artificial
  Chemically synthesized
acaagauuugaauacaaua

SEQ ID NO: 1336 - RNA, 19 nt, artificial
  Chemically synthesized
agauaauuggagaaaaaua

SEQ ID NO: 1337 - RNA, 19 nt, artificial
  Chemically synthesized
gacccugaagaauauuuga

SEQ ID NO: 1338 - RNA, 19 nt, artificial
  Chemically synthesized
gcaagauugaacaaaauua

SEQ ID NO: 1339 - RNA, 19 nt, artificial
  Chemically synthesized
gaugggauacagaagauaa

SEQ ID NO: 1340 - RNA, 19 nt, artificial
  Chemically synthesized
ugucguguuccucuuuaaa

SEQ ID NO: 1341 - RNA, 19 nt, artificial
  Chemically synthesized
gggacaagauuugaauaca

SEQ ID NO: 1342 - RNA, 19 nt, artificial
  Chemically synthesized
uggucaaagaaaauuuuaa

SEQ ID NO: 1343 - RNA, 19 nt, artificial
  Chemically synthesized
cauucaaucuagaaauuau

SEQ ID NO: 1344 - RNA, 19 nt, artificial
  Chemically synthesized
aagagacccugaagaauau

SEQ ID NO: 1345 - RNA, 19 nt, artificial
  Chemically synthesized
gaaguaucaaacuaauuua

SEQ ID NO: 1346 - RNA, 19 nt, artificial
  Chemically synthesized
guuugaugaaauagcaaaa

SEQ ID NO: 1347 - RNA, 19 nt, artificial
  Chemically synthesized
gaaccaggagauuguugga

SEQ ID NO: 1348 - RNA, 19 nt, artificial
  Chemically synthesized
gacaagauuugaauacaau

SEQ ID NO: 1349 - RNA, 19 nt, artificial
  Chemically synthesized
guaccucagucaaacagau

SEQ ID NO: 1350 - RNA, 19 nt, artificial
  Chemically synthesized
uuucaguucucaaauuaaa

SEQ ID NO: 1351 - RNA, 19 nt, artificial
  Chemically synthesized
caaagaaaauuuuaaagca

SEQ ID NO: 1352 - RNA, 19 nt, artificial
  Chemically synthesized
gcauggugguggugcuauu

SEQ ID NO: 1353 - RNA, 19 nt, artificial
  Chemically synthesized
gaaacucagcggaaucaau

SEQ ID NO: 1354 - RNA, 19 nt, artificial
  Chemically synthesized
ggaaaaccuucuugcugua

SEQ ID NO: 1355 - RNA, 19 nt, artificial
  Chemically synthesized
agaagauaauuggagaaaa

SEQ ID NO: 1356 - RNA, 19 nt, artificial
  Chemically synthesized
caagauaccgagaugagga

SEQ ID NO: 1357 - RNA, 19 nt, artificial
  Chemically synthesized
agaaaauuuuaaagcaaga

SEQ ID NO: 1358 - RNA, 19 nt, artificial
  Chemically synthesized
agggcugcugaaguaucaa

SEQ ID NO: 1359 - RNA, 19 nt, artificial
  Chemically synthesized
caaacagaugggauacaga

SEQ ID NO: 1360 - RNA, 19 nt, artificial
  Chemically synthesized
augcaagauugaacaaaau

SEQ ID NO: 1361 - RNA, 19 nt, artificial
  Chemically synthesized
gauaauuggagaaaaauau

SEQ ID NO: 1362 - RNA, 19 nt, artificial
  Chemically synthesized
cuuagaagacuauacuuua

SEQ ID NO: 1363 - RNA, 19 nt, artificial
  Chemically synthesized
aaaccauacaagcuuagaa

SEQ ID NO: 1364 - RNA, 19 nt, artificial
  Chemically synthesized
aguguaucugcauuagaaa

SEQ ID NO: 1365 - RNA, 19 nt, artificial
  Chemically synthesized
agcagaacauuccauauua

SEQ ID NO: 1366 - RNA, 19 nt, artificial
  Chemically synthesized
ccauuugcaucaauacuca

SEQ ID NO: 1367 - RNA, 19 nt, artificial
  Chemically synthesized
acuuuuguuugaugaaaua

SEQ ID NO: 1368 - RNA, 19 nt, artificial
  Chemically synthesized
cgaaccagcucucagaaua

SEQ ID NO: 1369 - RNA, 19 nt, artificial
  Chemically synthesized
cuucuugcuguauaaccaa

SEQ ID NO: 1370 - RNA, 19 nt, artificial
  Chemically synthesized
uucaguucucaaauuaaaa

SEQ ID NO: 1371 - RNA, 19 nt, artificial
  Chemically synthesized
guaucaaacuaauuuagau

SEQ ID NO: 1372 - RNA, 19 nt, artificial
  Chemically synthesized
caauaagaguuucuaacua

SEQ ID NO: 1373 - RNA, 19 nt, artificial
  Chemically synthesized
gcuguaccucagucaaaca

SEQ ID NO: 1374 - RNA, 19 nt, artificial
  Chemically synthesized
auacaagcuuagaagacua

SEQ ID NO: 1375 - RNA, 19 nt, artificial
  Chemically synthesized
ucaugaaccuuucccugaa

SEQ ID NO: 1376 - RNA, 19 nt, artificial
  Chemically synthesized
uguugauuuucauggugga

SEQ ID NO: 1377 - RNA, 19 nt, artificial
  Chemically synthesized
cauuugcaucaauacucaa

SEQ ID NO: 1378 - RNA, 19 nt, artificial
  Chemically synthesized
ggaaugagugcaauuucua

SEQ ID NO: 1379 - RNA, 19 nt, artificial
  Chemically synthesized
ugaugaaauagcaaaauau

SEQ ID NO: 1380 - RNA, 19 nt, artificial
  Chemically synthesized
aaacagaugggauacagaa

SEQ ID NO: 1381 - RNA, 19 nt, artificial
  Chemically synthesized
gaauuacagugaagacuuu

SEQ ID NO: 1382 - RNA, 19 nt, artificial
  Chemically synthesized
uggaaaccauacaagcuua

SEQ ID NO: 1383 - RNA, 19 nt, artificial
  Chemically synthesized
guucucaaauuaaaagaaa

SEQ ID NO: 1384 - RNA, 19 nt, artificial
  Chemically synthesized
gaauaguaagguuuucuua

SEQ ID NO: 1385 - RNA, 19 nt, artificial
  Chemically synthesized
aacugaaaccaaagcaaca

SEQ ID NO: 1386 - RNA, 19 nt, artificial
  Chemically synthesized
uuugguugaacaaaugcaa

SEQ ID NO: 1387 - RNA, 19 nt, artificial
  Chemically synthesized
aauucugcccuucauucaa

SEQ ID NO: 1388 - RNA, 19 nt, artificial
  Chemically synthesized
augcaauaagaguuucuaa

SEQ ID NO: 1389 - RNA, 19 nt, artificial
  Chemically synthesized
uucccugaaggauuuucaa

SEQ ID NO: 1390 - RNA, 19 nt, artificial
  Chemically synthesized
cugcugaaguaucaaacua

SEQ ID NO: 1391 - RNA, 19 nt, artificial
  Chemically synthesized
gaagaauauuugaugugau

SEQ ID NO: 1392 - RNA, 19 nt, artificial
  Chemically synthesized
gagcccagauuccaagcua

SEQ ID NO: 1393 - RNA, 19 nt, artificial
  Chemically synthesized
agaugucauggaaauccga

SEQ ID NO: 1394 - RNA, 19 nt, artificial
  Chemically synthesized
aagaguuucuaacuaugau

SEQ ID NO: 1395 - RNA, 19 nt, artificial
  Chemically synthesized
gaguaaccagaacaacuca

SEQ ID NO: 1396 - RNA, 19 nt, artificial
  Chemically synthesized
agaacgauuucgagauuua

SEQ ID NO: 1397 - RNA, 19 nt, artificial
  Chemically synthesized
caaagagacccugaagaau

SEQ ID NO: 1398 - RNA, 19 nt, artificial
  Chemically synthesized
gaugcacacuguugauuuu

SEQ ID NO: 1399 - RNA, 19 nt, artificial
  Chemically synthesized
uauccaagacucuucauaa

SEQ ID NO: 1400 - RNA, 19 nt, artificial
  Chemically synthesized
guaagguuuucuuauuuau

SEQ ID NO: 1401 - RNA, 19 nt, artificial
  Chemically synthesized
auccgaauggucaaagaaa

SEQ ID NO: 1402 - RNA, 19 nt, artificial
  Chemically synthesized
uaucaugcacugaauucaa

SEQ ID NO: 1403 - RNA, 19 nt, artificial
  Chemically synthesized
gauacagaagauaauugga

SEQ ID NO: 1404 - RNA, 19 nt, artificial
  Chemically synthesized
ccucagaugucauggaaau

SEQ ID NO: 1405 - RNA, 19 nt, artificial
  Chemically synthesized
uauugaugguccuuuugga

SEQ ID NO: 1406 - RNA, 19 nt, artificial
  Chemically synthesized
guuggauaaaagcagaaca

SEQ ID NO: 1407 - RNA, 19 nt, artificial
  Chemically synthesized
gaugucauggaaauccgaa

SEQ ID NO: 1408 - RNA, 19 nt, artificial
  Chemically synthesized
gagaugaggauccuagaaa

SEQ ID NO: 1409 - RNA, 19 nt, artificial
  Chemically synthesized
ugaacugaaugcagcaaga

SEQ ID NO: 1410 - RNA, 19 nt, artificial
  Chemically synthesized
aggaaucacugaacuauga

SEQ ID NO: 1411 - RNA, 19 nt, artificial
  Chemically synthesized
gaaauuaucccaagcugua

SEQ ID NO: 1412 - RNA, 19 nt, artificial
  Chemically synthesized
agguuuucuuauuuaugau

SEQ ID NO: 1413 - RNA, 19 nt, artificial
  Chemically synthesized
aaagagacccugaagaaua

SEQ ID NO: 1414 - RNA, 19 nt, artificial
  Chemically synthesized
gauuugaauacaauaaaga

SEQ ID NO: 1415 - RNA, 19 nt, artificial
  Chemically synthesized
caugguggauucaagaacu

SEQ ID NO: 1416 - RNA, 19 nt, artificial
  Chemically synthesized
guucuuaaccucaacugca

SEQ ID NO: 1417 - RNA, 19 nt, artificial
  Chemically synthesized
aaaauauaacagaggaaaa

SEQ ID NO: 1418 - RNA, 19 nt, artificial
  Chemically synthesized
cagaugggauacagaagau

SEQ ID NO: 1419 - RNA, 19 nt, artificial
  Chemically synthesized
aagguuuucuuauuuauga

SEQ ID NO: 1420 - RNA, 19 nt, artificial
  Chemically synthesized
agaauauuuccuuaccaga

SEQ ID NO: 1421 - RNA, 19 nt, artificial
  Chemically synthesized
caucaauacucaacacccu

SEQ ID NO: 1422 - RNA, 19 nt, artificial
  Chemically synthesized
ucuagucaagacuccgaaa

SEQ ID NO: 1423 - RNA, 19 nt, artificial
  Chemically synthesized
gaugacuggaaaccauaca

SEQ ID NO: 1424 - RNA, 19 nt, artificial
  Chemically synthesized
caugaucacagccucuaca

SEQ ID NO: 1425 - RNA, 19 nt, artificial
  Chemically synthesized
guauauuacucuacauugu

SEQ ID NO: 1426 - RNA, 19 nt, artificial
  Chemically synthesized
uuacauguuuaaucuggaa

SEQ ID NO: 1427 - RNA, 19 nt, artificial
  Chemically synthesized
uuguggacccaauucacua

SEQ ID NO: 1428 - RNA, 19 nt, artificial
  Chemically synthesized
aacucauaugggacaagau

SEQ ID NO: 1429 - RNA, 19 nt, artificial
  Chemically synthesized
aauuucuaagacuuugaaa

SEQ ID NO: 1430 - RNA, 19 nt, artificial
  Chemically synthesized
aauccgaauggucaaagaa

SEQ ID NO: 1431 - RNA, 19 nt, artificial
  Chemically synthesized
caucauuucggucauaagu

SEQ ID NO: 1432 - RNA, 19 nt, artificial
  Chemically synthesized
gaaccagcucucagaauau

SEQ ID NO: 1433 - RNA, 19 nt, artificial
  Chemically synthesized
aguucucaaauuaaaagaa

SEQ ID NO: 1434 - RNA, 19 nt, artificial
  Chemically synthesized
gaaauagcaaaauauaaca

SEQ ID NO: 1435 - RNA, 19 nt, artificial
  Chemically synthesized
gacucuaaagaaggaauga

SEQ ID NO: 1436 - RNA, 19 nt, artificial
  Chemically synthesized
caagcuuagaagacuauac

SEQ ID NO: 1437 - RNA, 19 nt, artificial
  Chemically synthesized
aaaauaucaugcacugaau

SEQ ID NO: 1438 - RNA, 19 nt, artificial
  Chemically synthesized
gugcuauuccucaugauca

SEQ ID NO: 1439 - RNA, 19 nt, artificial
  Chemically synthesized
guacugugccgaaagacuu

SEQ ID NO: 1440 - RNA, 19 nt, artificial
  Chemically synthesized
caacucauaugggacaaga

SEQ ID NO: 1441 - RNA, 19 nt, artificial
  Chemically synthesized
agauuugaauacaauaaag

SEQ ID NO: 1442 - RNA, 19 nt, artificial
  Chemically synthesized
aauuguuuuugguugaaca

SEQ ID NO: 1443 - RNA, 19 nt, artificial
  Chemically synthesized
uguuuuugguugaacaaau

SEQ ID NO: 1444 - RNA, 19 nt, artificial
  Chemically synthesized
aacugaaugcagcaagaua

SEQ ID NO: 1445 - RNA, 19 nt, artificial
  Chemically synthesized
ugugccgaaagacuuuaca

SEQ ID NO: 1446 - RNA, 19 nt, artificial
  Chemically synthesized
aaccgaaccagcucucaga

SEQ ID NO: 1447 - RNA, 19 nt, artificial
  Chemically synthesized
augggacaagauuugaaua

SEQ ID NO: 1448 - RNA, 19 nt, artificial
  Chemically synthesized
guuagaugcacacuguuga

SEQ ID NO: 1449 - RNA, 19 nt, artificial
  Chemically synthesized
gcagagauauccaguccuu

SEQ ID NO: 1450 - RNA, 19 nt, artificial
  Chemically synthesized
ucaguauauuacucuacau

SEQ ID NO: 1451 - RNA, 19 nt, artificial
  Chemically synthesized
aaauccgaauggucaaaga

SEQ ID NO: 1452 - RNA, 19 nt, artificial
  Chemically synthesized
guugguuugcagauuuacu

SEQ ID NO: 1453 - RNA, 19 nt, artificial
  Chemically synthesized
cauaaacugaguaaccaga

SEQ ID NO: 1454 - RNA, 19 nt, artificial
  Chemically synthesized
caccaucauuucggucaua

SEQ ID NO: 1455 - RNA, 19 nt, artificial
  Chemically synthesized
uacagaagauaauuggaga

SEQ ID NO: 1456 - RNA, 19 nt, artificial
  Chemically synthesized
aaacuuuuguuugaugaaa

SEQ ID NO: 1457 - RNA, 19 nt, artificial
  Chemically synthesized
accuccgaggaucacagaa

SEQ ID NO: 1458 - RNA, 19 nt, artificial
  Chemically synthesized
acaagcuuagaagacuaua

SEQ ID NO: 1459 - RNA, 19 nt, artificial
  Chemically synthesized
ccuuccguugguuugcaga

SEQ ID NO: 1460 - RNA, 19 nt, artificial
  Chemically synthesized
gcagaacauuccauauuac

SEQ ID NO: 1461 - RNA, 19 nt, artificial
  Chemically synthesized
gagacuggacagaacgauu

SEQ ID NO: 1462 - RNA, 19 nt, artificial
  Chemically synthesized
uacucaacacccuguugga

SEQ ID NO: 1463 - RNA, 19 nt, artificial
  Chemically synthesized
uagaaaacuucucuucaca

SEQ ID NO: 1464 - RNA, 19 nt, artificial
  Chemically synthesized
aggagacuggacagaacga

SEQ ID NO: 1465 - RNA, 19 nt, artificial
  Chemically synthesized
uuuucaguucucaaauuaa

SEQ ID NO: 1466 - RNA, 19 nt, artificial
  Chemically synthesized
agaguuucuaacuaugaua

SEQ ID NO: 1467 - RNA, 19 nt, artificial
  Chemically synthesized
ucauuucggucauaaguca

SEQ ID NO: 1468 - RNA, 19 nt, artificial
  Chemically synthesized
gcugacguugcauguuuca

SEQ ID NO: 1469 - RNA, 19 nt, artificial
  Chemically synthesized
cguugguuugcagauuuac

SEQ ID NO: 1470 - RNA, 19 nt, artificial
  Chemically synthesized
caguucucaaauuaaaaga

SEQ ID NO: 1471 - RNA, 19 nt, artificial
  Chemically synthesized
uuucaggagggcugcugaa

SEQ ID NO: 1472 - RNA, 19 nt, artificial
  Chemically synthesized
uguuguggacccaauucac

SEQ ID NO: 1473 - RNA, 19 nt, artificial
  Chemically synthesized
gaaaccauacaagcuuaga

SEQ ID NO: 1474 - RNA, 19 nt, artificial
  Chemically synthesized
auuuggguaugcagagaua

SEQ ID NO: 1475 - RNA, 19 nt, artificial
  Chemically synthesized
auccauuuacccucacaau

SEQ ID NO: 1476 - RNA, 19 nt, artificial
  Chemically synthesized
aaauauaacagaggaaaaa

SEQ ID NO: 1477 - RNA, 19 nt, artificial
  Chemically synthesized
aguaggagacuggacagaa

SEQ ID NO: 1478 - RNA, 19 nt, artificial
  Chemically synthesized
gaaaccaaagagacccuga

SEQ ID NO: 1479 - RNA, 19 nt, artificial
  Chemically synthesized
gaauauuugaugugaugau

SEQ ID NO: 1480 - RNA, 19 nt, artificial
  Chemically synthesized
aagcaagaccuggucagua

SEQ ID NO: 1481 - RNA, 19 nt, artificial
  Chemically synthesized
cuucauucaaucuagaaau

SEQ ID NO: 1482 - RNA, 19 nt, artificial
  Chemically synthesized
aucccaagcuguauauuga

SEQ ID NO: 1483 - RNA, 19 nt, artificial
  Chemically synthesized
accaggagauuguuggaua

SEQ ID NO: 1484 - RNA, 19 nt, artificial
  Chemically synthesized
gaacgauuucgagauuuac

SEQ ID NO: 1485 - RNA, 19 nt, artificial
  Chemically synthesized
aaacuaauuuagauaccca

SEQ ID NO: 1486 - RNA, 19 nt, artificial
  Chemically synthesized
caaagaauaguaagguuuu

SEQ ID NO: 1487 - RNA, 19 nt, artificial
  Chemically synthesized
guaggagacuggacagaac

SEQ ID NO: 1488 - RNA, 19 nt, artificial
  Chemically synthesized
aguaagguuuucuuauuua

SEQ ID NO: 1489 - RNA, 19 nt, artificial
  Chemically synthesized
gaucacagccucuacauau

SEQ ID NO: 1490 - RNA, 19 nt, artificial
  Chemically synthesized
ugguguuuucuguugugga

SEQ ID NO: 1491 - RNA, 19 nt, artificial
  Chemically synthesized
aaccucaacugcagccuua

SEQ ID NO: 1492 - RNA, 19 nt, artificial
  Chemically synthesized
cugaguaaccagaacaacu

SEQ ID NO: 1493 - RNA, 19 nt, artificial
  Chemically synthesized
uuuguuugaugaaauagca

SEQ ID NO: 1494 - RNA, 19 nt, artificial
  Chemically synthesized
cagaagguuccaagcagga

SEQ ID NO: 1495 - RNA, 19 nt, artificial
  Chemically synthesized
uaugggacaagauuugaau

SEQ ID NO: 1496 - RNA, 19 nt, artificial
  Chemically synthesized
caucuagucaagacuccga

SEQ ID NO: 1497 - RNA, 19 nt, artificial
  Chemically synthesized
cugaaguaucaaacuaauu

SEQ ID NO: 1498 - RNA, 19 nt, artificial
  Chemically synthesized
uaugauaucuucugguaua

SEQ ID NO: 1499 - RNA, 19 nt, artificial
  Chemically synthesized
gaggaaaaacaguuggugu

SEQ ID NO: 1500 - RNA, 19 nt, artificial
  Chemically synthesized
aacuuuuguuugaugaaau

SEQ ID NO: 1501 - RNA, 19 nt, artificial
  Chemically synthesized
cauacaagcuuagaagacu

SEQ ID NO: 1502 - RNA, 19 nt, artificial
  Chemically synthesized
guuccaagcaggagaacca

SEQ ID NO: 1503 - RNA, 19 nt, artificial
  Chemically synthesized
gugucuaagcagagccuca

SEQ ID NO: 1504 - RNA, 19 nt, artificial
  Chemically synthesized
uacugugccgaaagacuuu

SEQ ID NO: 1505 - RNA, 19 nt, artificial
  Chemically synthesized
uuagaagacuauacuuuau

SEQ ID NO: 1506 - RNA, 19 nt, artificial
  Chemically synthesized
ggaaguccauuugaggaau

SEQ ID NO: 1507 - RNA, 19 nt, artificial
  Chemically synthesized
cauccagcuguaccucagu

SEQ ID NO: 1508 - RNA, 19 nt, artificial
  Chemically synthesized
cuacauaugcaauaagagu

SEQ ID NO: 1509 - RNA, 19 nt, artificial
  Chemically synthesized
aacucagcggaaucaauca

SEQ ID NO: 1510 - RNA, 19 nt, artificial
  Chemically synthesized
agaagacuauacuuuauuu

SEQ ID NO: 1511 - RNA, 19 nt, artificial
  Chemically synthesized
ugaauucaagacuguuuau

SEQ ID NO: 1512 - RNA, 19 nt, artificial
  Chemically synthesized
aagagaacagaccugacua

SEQ ID NO: 1513 - RNA, 19 nt, artificial
  Chemically synthesized
aaagcagaacauuccauau

SEQ ID NO: 1514 - RNA, 19 nt, artificial
  Chemically synthesized
accauacaagcuuagaaga

SEQ ID NO: 1515 - RNA, 19 nt, artificial
  Chemically synthesized
guggugcuauuccucauga

SEQ ID NO: 1516 - RNA, 19 nt, artificial
  Chemically synthesized
gcccucaacuucucaguga

SEQ ID NO: 1517 - RNA, 19 nt, artificial
  Chemically synthesized
uuguuugaugaaauagcaa

SEQ ID NO: 1518 - RNA, 19 nt, artificial
  Chemically synthesized
uugaugaaauagcaaaaua

SEQ ID NO: 1519 - RNA, 19 nt, artificial
  Chemically synthesized
uaaccagaacaacucauau

SEQ ID NO: 1520 - RNA, 19 nt, artificial
  Chemically synthesized
auuguuggauaaaagcaga

SEQ ID NO: 1521 - RNA, 19 nt, artificial
  Chemically synthesized
uguuugaugaaauagcaaa

SEQ ID NO: 1522 - RNA, 19 nt, artificial
  Chemically synthesized
uguaccucagucaaacaga

SEQ ID NO: 1523 - RNA, 19 nt, artificial
  Chemically synthesized
uacaauaaagagucuuuca

SEQ ID NO: 1524 - RNA, 19 nt, artificial
  Chemically synthesized
aauuggagaaaaauaucau

SEQ ID NO: 1525 - RNA, 19 nt, artificial
  Chemically synthesized
cuguauguugcauaacaag

SEQ ID NO: 1526 - RNA, 19 nt, artificial
  Chemically synthesized
guaaccagaacaacucaua

SEQ ID NO: 1527 - RNA, 19 nt, artificial
  Chemically synthesized
uuucaugguggauucaaga

SEQ ID NO: 1528 - RNA, 19 nt, artificial
  Chemically synthesized
caaaauauaacagaggaaa

SEQ ID NO: 1529 - RNA, 19 nt, artificial
  Chemically synthesized
aaaaauaucaugcacugaa

SEQ ID NO: 1530 - RNA, 19 nt, artificial
  Chemically synthesized
gacuggaaaccauacaagc

SEQ ID NO: 1531 - RNA, 19 nt, artificial
  Chemically synthesized
caaauuaaaagaaaacugu

SEQ ID NO: 1532 - RNA, 19 nt, artificial
  Chemically synthesized
aucuagucaagacuccgaa

SEQ ID NO: 1533 - RNA, 19 nt, artificial
  Chemically synthesized
agugaauuacagugaagac

SEQ ID NO: 1534 - RNA, 19 nt, artificial
  Chemically synthesized
auuccaagcuaauuuucca

SEQ ID NO: 1535 - RNA, 19 nt, artificial
  Chemically synthesized
ccagauuccaagcuaauuu

SEQ ID NO: 1536 - RNA, 19 nt, artificial
  Chemically synthesized
cuuuauuuggguaugcaga

SEQ ID NO: 1537 - RNA, 19 nt, artificial
  Chemically synthesized
auuguuuuugguugaacaa

SEQ ID NO: 1538 - RNA, 19 nt, artificial
  Chemically synthesized
guuggaugacuggaaacca

SEQ ID NO: 1539 - RNA, 19 nt, artificial
  Chemically synthesized
aagauaauuggagaaaaau

SEQ ID NO: 1540 - RNA, 19 nt, artificial
  Chemically synthesized
aaauucugcccuucauuca

SEQ ID NO: 1541 - RNA, 19 nt, artificial
  Chemically synthesized
gaaugcccucaacuucuca

SEQ ID NO: 1542 - RNA, 19 nt, artificial
  Chemically synthesized
cuuucagcugaaaacuuuu

SEQ ID NO: 1543 - RNA, 19 nt, artificial
  Chemically synthesized
gauuuucaaaaccggcaga

SEQ ID NO: 1544 - RNA, 19 nt, artificial
  Chemically synthesized
gguguuacuaucuguauuu

SEQ ID NO: 1545 - RNA, 19 nt, artificial
  Chemically synthesized
cuuccguugguuugcagau

SEQ ID NO: 1546 - RNA, 19 nt, artificial
  Chemically synthesized
uaagaguuucuaacuauga

SEQ ID NO: 1547 - RNA, 19 nt, artificial
  Chemically synthesized
uguugaacugaaugcagca

SEQ ID NO: 1548 - RNA, 19 nt, artificial
  Chemically synthesized
uuagaugcacacuguugau

SEQ ID NO: 1549 - RNA, 19 nt, artificial
  Chemically synthesized
gaaugcagcaagauaccga

SEQ ID NO: 1550 - RNA, 19 nt, artificial
  Chemically synthesized
gcacugaauucaagacugu

SEQ ID NO: 1551 - RNA, 19 nt, artificial
  Chemically synthesized
cauauuaccugugguguua

SEQ ID NO: 1552 - RNA, 19 nt, artificial
  Chemically synthesized
auuuaaaauggaaauguga

SEQ ID NO: 1553 - RNA, 19 nt, artificial
  Chemically synthesized
gugaggagcugaacuugcu

SEQ ID NO: 1554 - RNA, 19 nt, artificial
  Chemically synthesized
gaggaaucacugaacuaug

SEQ ID NO: 1555 - RNA, 19 nt, artificial
  Chemically synthesized
cuggaaaccauacaagcuu

SEQ ID NO: 1556 - RNA, 19 nt, artificial
  Chemically synthesized
acuacugccuccaucuagu

SEQ ID NO: 1557 - RNA, 19 nt, artificial
  Chemically synthesized
cuuuuggaaguccauuuga

SEQ ID NO: 1558 - RNA, 19 nt, artificial
  Chemically synthesized
aagcaggacucuaaagaag

SEQ ID NO: 1559 - RNA, 19 nt, artificial
  Chemically synthesized
auuacauguuuaaucugga

SEQ ID NO: 1560 - RNA, 19 nt, artificial
  Chemically synthesized
gauucaagaacucccuagu

SEQ ID NO: 1561 - RNA, 19 nt, artificial
  Chemically synthesized
auaaacugaguaaccagaa

SEQ ID NO: 1562 - RNA, 19 nt, artificial
  Chemically synthesized
augucauggaaauccgaau

SEQ ID NO: 1563 - RNA, 19 nt, artificial
  Chemically synthesized
aguaucaaacuaauuuaga

SEQ ID NO: 1564 - RNA, 19 nt, artificial
  Chemically synthesized
cuuuucaguucucaaauua

SEQ ID NO: 1565 - RNA, 19 nt, artificial
  Chemically synthesized
gugccgaaagacuuuacag

SEQ ID NO: 1566 - RNA, 19 nt, artificial
  Chemically synthesized
aaucuggaaaccaaagaga

SEQ ID NO: 1567 - RNA, 19 nt, artificial
  Chemically synthesized
auugaugguccuuuuggaa

SEQ ID NO: 1568 - RNA, 19 nt, artificial
  Chemically synthesized
uucacuuuucaguucucaa

SEQ ID NO: 1569 - RNA, 19 nt, artificial
  Chemically synthesized
cauaugggacaagauuuga

SEQ ID NO: 1570 - RNA, 19 nt, artificial
  Chemically synthesized
auaucuucugguauacuca

SEQ ID NO: 1571 - RNA, 19 nt, artificial
  Chemically synthesized
uaccgagaugaggauccua

SEQ ID NO: 1572 - RNA, 19 nt, artificial
  Chemically synthesized
aacuucucagugaauuaca

SEQ ID NO: 1573 - RNA, 19 nt, artificial
  Chemically synthesized
gugguggugcuauuccuca

SEQ ID NO: 1574 - RNA, 19 nt, artificial
  Chemically synthesized
ucaugcacugaauucaaga

SEQ ID NO: 1575 - RNA, 19 nt, artificial
  Chemically synthesized
aagacucuucauaaacuga

SEQ ID NO: 1576 - RNA, 19 nt, artificial
  Chemically synthesized
guuguggacccaauucacu

SEQ ID NO: 1577 - RNA, 19 nt, artificial
  Chemically synthesized
uaccuccgaggaucacaga

SEQ ID NO: 1578 - RNA, 19 nt, artificial
  Chemically synthesized
caguauauuacucuacauu

SEQ ID NO: 1579 - RNA, 19 nt, artificial
  Chemically synthesized
uggacagaacgauuucgag

SEQ ID NO: 1580 - RNA, 19 nt, artificial
  Chemically synthesized
uacuaucuguauuuucuca

SEQ ID NO: 1581 - RNA, 19 nt, artificial
  Chemically synthesized
cauuucggucauaagucau

SEQ ID NO: 1582 - RNA, 19 nt, artificial
  Chemically synthesized
cacauuacauguuuaaucu

SEQ ID NO: 1583 - RNA, 19 nt, artificial
  Chemically synthesized
guauauccggagcaauaag

SEQ ID NO: 1584 - RNA, 19 nt, artificial
  Chemically synthesized
agucaucccucagauguca

SEQ ID NO: 1585 - RNA, 19 nt, artificial
  Chemically synthesized
gcagcaagauaccgagaug

SEQ ID NO: 1586 - RNA, 19 nt, artificial
  Chemically synthesized
cauuuacccucacaaugug

SEQ ID NO: 1587 - RNA, 19 nt, artificial
  Chemically synthesized
aaauuugugaagauuugua

SEQ ID NO: 1588 - RNA, 19 nt, artificial
  Chemically synthesized
uagucaagacuccgaaauu

SEQ ID NO: 1589 - RNA, 19 nt, artificial
  Chemically synthesized
acuuugaaacucagcggaa

SEQ ID NO: 1590 - RNA, 19 nt, artificial
  Chemically synthesized
gaauucaagacuguuuaua

SEQ ID NO: 1591 - RNA, 19 nt, artificial
  Chemically synthesized
uuagaaaaucauccauuua

SEQ ID NO: 1592 - RNA, 19 nt, artificial
  Chemically synthesized
gaauggucaaagaaaauuu

SEQ ID NO: 1593 - RNA, 19 nt, artificial
  Chemically synthesized
ccucaugaucacagccucu

SEQ ID NO: 1594 - RNA, 19 nt, artificial
  Chemically synthesized
aauaguaagguuuucuuau

SEQ ID NO: 1595 - RNA, 19 nt, artificial
  Chemically synthesized
aagaaaacuguuagaugca

SEQ ID NO: 1596 - RNA, 19 nt, artificial
  Chemically synthesized
uguacugugccgaaagacu

SEQ ID NO: 1597 - RNA, 19 nt, artificial
  Chemically synthesized
cuuaccagaguauuucuca

SEQ ID NO: 1598 - RNA, 19 nt, artificial
  Chemically synthesized
augagugcaauuucuaaga

SEQ ID NO: 1599 - RNA, 19 nt, artificial
  Chemically synthesized
aagcuuagaagacuauacu

SEQ ID NO: 1600 - RNA, 19 nt, artificial
  Chemically synthesized
gaugaccgucacauuacau

SEQ ID NO: 1601 - RNA, 19 nt, artificial
  Chemically synthesized
gaugauucacuuuucaguu

SEQ ID NO: 1602 - RNA, 19 nt, artificial
  Chemically synthesized
ggaaaccauacaagcuuag

SEQ ID NO: 1603 - RNA, 19 nt, artificial
  Chemically synthesized
aaccggcagaguuuaccca

SEQ ID NO: 1604 - RNA, 19 nt, artificial
  Chemically synthesized
caacugaaaccaaagcaac

SEQ ID NO: 1605 - RNA, 19 nt, artificial
  Chemically synthesized
uuaccugugguguuacuau

SEQ ID NO: 1606 - RNA, 19 nt, artificial
  Chemically synthesized
acuucucagugaauuacag

SEQ ID NO: 1607 - RNA, 19 nt, artificial
  Chemically synthesized
uuugcagauuuacucugua

SEQ ID NO: 1608 - RNA, 19 nt, artificial
  Chemically synthesized
uugaggaaucacugaacua

SEQ ID NO: 1609 - RNA, 19 nt, artificial
  Chemically synthesized
auggucaaagaaaauuuua

SEQ ID NO: 1610 - RNA, 19 nt, artificial
  Chemically synthesized
cacaaauuugugaagauuu

SEQ ID NO: 1611 - RNA, 19 nt, artificial
  Chemically synthesized
aauaagaguuucuaacuau

SEQ ID NO: 1612 - RNA, 19 nt, artificial
  Chemically synthesized
aaaauaguaggagacugga

SEQ ID NO: 1613 - RNA, 19 nt, artificial
  Chemically synthesized
gaacuugcucaaucuaagg

SEQ ID NO: 1614 - RNA, 19 nt, artificial
  Chemically synthesized
uggauuucuggaccuuugu

SEQ ID NO: 1615 - RNA, 19 nt, artificial
  Chemically synthesized
ugaaccuuucccugaagga

SEQ ID NO: 1616 - RNA, 19 nt, artificial
  Chemically synthesized
guuacuaucuguauuuucu

SEQ ID NO: 1617 - RNA, 19 nt, artificial
  Chemically synthesized
aaacaccucugccuguuca

SEQ ID NO: 1618 - RNA, 19 nt, artificial
  Chemically synthesized
uuaaaagaaaacuguuaga

SEQ ID NO: 1619 - RNA, 19 nt, artificial
  Chemically synthesized
auauaacagaggaaaaaca

SEQ ID NO: 1620 - RNA, 19 nt, artificial
  Chemically synthesized
aacaccucugccuguucau

SEQ ID NO: 1621 - RNA, 19 nt, artificial
  Chemically synthesized
gaugaggauccuagaaaac

SEQ ID NO: 1622 - RNA, 19 nt, artificial
  Chemically synthesized
gauuuucaugguggauuca

SEQ ID NO: 1623 - RNA, 19 nt, artificial
  Chemically synthesized
gaaggauuuucaaaaccgg

SEQ ID NO: 1624 - RNA, 19 nt, artificial
  Chemically synthesized
auuagaaaaucauccauuu

SEQ ID NO: 1625 - RNA, 19 nt, artificial
  Chemically synthesized
accuggucaguauauuacu

SEQ ID NO: 1626 - RNA, 19 nt, artificial
  Chemically synthesized
acucauaugggacaagauu

SEQ ID NO: 1627 - RNA, 19 nt, artificial
  Chemically synthesized
aagauaccgagaugaggau

SEQ ID NO: 1628 - RNA, 19 nt, artificial
  Chemically synthesized
agaauaguaagguuuucuu

SEQ ID NO: 1629 - RNA, 19 nt, artificial
  Chemically synthesized
acuggaaaccauacaagcu

SEQ ID NO: 1630 - RNA, 19 nt, artificial
  Chemically synthesized
ucuggugaaugcccucaac

SEQ ID NO: 1631 - RNA, 19 nt, artificial
  Chemically synthesized
aucuuaaaauaguaggaga

SEQ ID NO: 1632 - RNA, 19 nt, artificial
  Chemically synthesized
gaauauuuccuuaccagag

SEQ ID NO: 1633 - RNA, 19 nt, artificial
  Chemically synthesized
gcaagauaccgagaugagg

SEQ ID NO: 1634 - RNA, 19 nt, artificial
  Chemically synthesized
ggugaaugcccucaacuuc

SEQ ID NO: 1635 - RNA, 19 nt, artificial
  Chemically synthesized
gauuuacuacugccuccau

SEQ ID NO: 1636 - RNA, 19 nt, artificial
  Chemically synthesized
agauuguuggauaaaagca

SEQ ID NO: 1637 - RNA, 19 nt, artificial
  Chemically synthesized
acuucucuucacaacuguu

SEQ ID NO: 1638 - RNA, 19 nt, artificial
  Chemically synthesized
uaugcaauaagaguuucua

SEQ ID NO: 1639 - RNA, 19 nt, artificial
  Chemically synthesized
gauccuagaaaacuucucu

SEQ ID NO: 1640 - RNA, 19 nt, artificial
  Chemically synthesized
acugugccgaaagacuuua

SEQ ID NO: 1641 - RNA, 19 nt, artificial
  Chemically synthesized
ccaauucacuauccaagac

SEQ ID NO: 1642 - RNA, 19 nt, artificial
  Chemically synthesized
aaucauccauuuacccuca

SEQ ID NO: 1643 - RNA, 19 nt, artificial
  Chemically synthesized
auggaaauccgaaugguca

SEQ ID NO: 1644 - RNA, 19 nt, artificial
  Chemically synthesized
cuuaccuccgaggaucaca

SEQ ID NO: 1645 - RNA, 19 nt, artificial
  Chemically synthesized
gcuauuccucaugaucaca

SEQ ID NO: 1646 - RNA, 19 nt, artificial
  Chemically synthesized
cagaugucauggaaauccg

SEQ ID NO: 1647 - RNA, 19 nt, artificial
  Chemically synthesized
aaaugcaagauugaacaaa

SEQ ID NO: 1648 - RNA, 19 nt, artificial
  Chemically synthesized
uauuugaugugaugauuca

SEQ ID NO: 1649 - RNA, 19 nt, artificial
  Chemically synthesized
cuggugaaugcccucaacu

SEQ ID NO: 1650 - RNA, 19 nt, artificial
  Chemically synthesized
aauggaaaugugagaaugu

SEQ ID NO: 1651 - RNA, 19 nt, artificial
  Chemically synthesized
gggcuuccacucagucuuu

SEQ ID NO: 1652 - RNA, 19 nt, artificial
  Chemically synthesized
ugcaagauugaacaaaauu

SEQ ID NO: 1653 - RNA, 19 nt, artificial
  Chemically synthesized
aaccaaagagacccugaag

SEQ ID NO: 1654 - RNA, 19 nt, artificial
  Chemically synthesized
aauggucaaagaaaauuuu

SEQ ID NO: 1655 - RNA, 19 nt, artificial
  Chemically synthesized
uaauuggagaaaaauauca

SEQ ID NO: 1656 - RNA, 19 nt, artificial
  Chemically synthesized
gaaaaauaucaugcacuga

SEQ ID NO: 1657 - RNA, 19 nt, artificial
  Chemically synthesized
aacuucucuucacaacugu

SEQ ID NO: 1658 - RNA, 19 nt, artificial
  Chemically synthesized
auaaaagcagaacauucca

SEQ ID NO: 1659 - RNA, 19 nt, artificial
  Chemically synthesized
gaguuucuaacuaugauau

SEQ ID NO: 1660 - RNA, 19 nt, artificial
  Chemically synthesized
auaguaagguuuucuuauu

SEQ ID NO: 1661 - RNA, 19 nt, artificial
  Chemically synthesized
gaaggaaugagugcaauuu

SEQ ID NO: 1662 - RNA, 19 nt, artificial
  Chemically synthesized
uuaaauuguuuuugguuga

SEQ ID NO: 1663 - RNA, 19 nt, artificial
  Chemically synthesized
uggaagagcccagauucca

SEQ ID NO: 1664 - RNA, 19 nt, artificial
  Chemically synthesized
ugaagaauauuugauguga

SEQ ID NO: 1665 - RNA, 19 nt, artificial
  Chemically synthesized
uaaauuguuuuugguugaa

SEQ ID NO: 1666 - RNA, 19 nt, artificial
  Chemically synthesized
ucuaagacuuugaaacuca

SEQ ID NO: 1667 - RNA, 19 nt, artificial
  Chemically synthesized
aaucuagaaauuaucccaa

SEQ ID NO: 1668 - RNA, 19 nt, artificial
  Chemically synthesized
aaagcaagaccuggucagu

SEQ ID NO: 1669 - RNA, 19 nt, artificial
  Chemically synthesized
caaaaccggcagaguuuac

SEQ ID NO: 1670 - RNA, 19 nt, artificial
  Chemically synthesized
agaacagaccugacuaugu

SEQ ID NO: 1671 - RNA, 19 nt, artificial
  Chemically synthesized
uuucaaaaccggcagaguu

SEQ ID NO: 1672 - RNA, 19 nt, artificial
  Chemically synthesized
aacgauuucgagauuuacu

SEQ ID NO: 1673 - RNA, 19 nt, artificial
  Chemically synthesized
uuugcaucaauacucaaca

SEQ ID NO: 1674 - RNA, 19 nt, artificial
  Chemically synthesized
uaaagagucuuucagcuga

SEQ ID NO: 1675 - RNA, 19 nt, artificial
  Chemically synthesized
uuuucaugguggauucaag

SEQ ID NO: 1676 - RNA, 19 nt, artificial
  Chemically synthesized
aagaaaauuuuaaagcaag

SEQ ID NO: 1677 - RNA, 19 nt, artificial
  Chemically synthesized
cugcugacguugcauguuu

SEQ ID NO: 1678 - RNA, 19 nt, artificial
  Chemically synthesized
gaagagcccagauuccaag

SEQ ID NO: 1679 - RNA, 19 nt, artificial
  Chemically synthesized
aauucaagacuguuuauag

SEQ ID NO: 1680 - RNA, 19 nt, artificial
  Chemically synthesized
aacaguugguguuuucugu

SEQ ID NO: 1681 - RNA, 19 nt, artificial
  Chemically synthesized
guauuucucagaacauuuu

SEQ ID NO: 1682 - RNA, 19 nt, artificial
  Chemically synthesized
gucacauuacauguuuaau

SEQ ID NO: 1683 - RNA, 19 nt, artificial
  Chemically synthesized
uuuugguugaacaaaugca

SEQ ID NO: 1684 - RNA, 19 nt, artificial
  Chemically synthesized
guauuuucucaggcgugca

SEQ ID NO: 1685 - RNA, 19 nt, artificial
  Chemically synthesized
guuccucuuuaaauuguuu

SEQ ID NO: 1686 - RNA, 19 nt, artificial
  Chemically synthesized
ugaaguaucaaacuaauuu

SEQ ID NO: 1687 - RNA, 19 nt, artificial
  Chemically synthesized
cuugcuguauaaccaaggg

SEQ ID NO: 1688 - RNA, 19 nt, artificial
  Chemically synthesized
auucugcccuucauucaau

SEQ ID NO: 1689 - RNA, 19 nt, artificial
  Chemically synthesized
uauguugcauaacaaguuu

SEQ ID NO: 1690 - RNA, 19 nt, artificial
  Chemically synthesized
uuuccuuaccagaguauuu

SEQ ID NO: 1691 - RNA, 19 nt, artificial
  Chemically synthesized
gcuuccacucagucuuuga

SEQ ID NO: 1692 - RNA, 19 nt, artificial
  Chemically synthesized
aauaguaggagacuggaca

SEQ ID NO: 1693 - RNA, 19 nt, artificial
  Chemically synthesized
uguuccucuuuaaauuguu

SEQ ID NO: 1694 - RNA, 19 nt, artificial
  Chemically synthesized
caugcugcugacguugcau

SEQ ID NO: 1695 - RNA, 19 nt, artificial
  Chemically synthesized
uccuuaccagaguauuucu

SEQ ID NO: 1696 - RNA, 19 nt, artificial
  Chemically synthesized
ugaauacaauaaagagucu

SEQ ID NO: 1697 - RNA, 19 nt, artificial
  Chemically synthesized
ccauacaagcuuagaagac

SEQ ID NO: 1698 - RNA, 19 nt, artificial
  Chemically synthesized
uaccagaguauuucucaga

SEQ ID NO: 1699 - RNA, 19 nt, artificial
  Chemically synthesized
agaacauuccauauuaccu

SEQ ID NO: 1700 - RNA, 19 nt, artificial
  Chemically synthesized
aaaacuucucuucacaacu

SEQ ID NO: 1701 - RNA, 19 nt, artificial
  Chemically synthesized
uacaagcuuagaagacuau

SEQ ID NO: 1702 - RNA, 19 nt, artificial
  Chemically synthesized
aguauuucucagaacauuu

SEQ ID NO: 1703 - RNA, 19 nt, artificial
  Chemically synthesized
aauuaucccaagcuguaua

SEQ ID NO: 1704 - RNA, 19 nt, artificial
  Chemically synthesized
gauuguuggauaaaagcag

SEQ ID NO: 1705 - RNA, 19 nt, artificial
  Chemically synthesized
aaauuuuaaagcaagaccu

SEQ ID NO: 1706 - RNA, 19 nt, artificial
  Chemically synthesized
uucaaaaccggcagaguuu

SEQ ID NO: 1707 - RNA, 19 nt, artificial
  Chemically synthesized
aaguccauuugaggaauca

SEQ ID NO: 1708 - RNA, 19 nt, artificial
  Chemically synthesized
gcuuagaagacuauacuuu

SEQ ID NO: 1709 - RNA, 19 nt, artificial
  Chemically synthesized
aaccauacaagcuuagaag

SEQ ID NO: 1710 - RNA, 19 nt, artificial
  Chemically synthesized
cuuuguugaacugaaugca

SEQ ID NO: 1711 - RNA, 19 nt, artificial
  Chemically synthesized
ucaucuuaaaauaguagga

SEQ ID NO: 1712 - RNA, 19 nt, artificial
  Chemically synthesized
aauuugugaagauuuguau

SEQ ID NO: 1713 - RNA, 19 nt, artificial
  Chemically synthesized
aggagggcugcugaaguau

SEQ ID NO: 1714 - RNA, 19 nt, artificial
  Chemically synthesized
guguuacuaucuguauuuu

SEQ ID NO: 1715 - RNA, 19 nt, artificial
  Chemically synthesized
cauuagaaaaucauccauu

SEQ ID NO: 1716 - RNA, 19 nt, artificial
  Chemically synthesized
uucuguuguggacccaauu

SEQ ID NO: 1717 - RNA, 19 nt, artificial
  Chemically synthesized
acuauccaagacucuucau

SEQ ID NO: 1718 - RNA, 19 nt, artificial
  Chemically synthesized
ucuuuaaauuguuuuuggu

SEQ ID NO: 1719 - RNA, 19 nt, artificial
  Chemically synthesized
acuaugauaucuucuggua

SEQ ID NO: 1720 - RNA, 19 nt, artificial
  Chemically synthesized
aucuaaggcugauugucgu

SEQ ID NO: 1721 - RNA, 19 nt, artificial
  Chemically synthesized
uuacuacugccuccaucua

SEQ ID NO: 1722 - RNA, 19 nt, artificial
  Chemically synthesized
uuaccagaguauuucucag

SEQ ID NO: 1723 - RNA, 19 nt, artificial
  Chemically synthesized
ggugcuauuccucaugauc

SEQ ID NO: 1724 - RNA, 19 nt, artificial
  Chemically synthesized
aacagaccugacuauguca

SEQ ID NO: 1725 - RNA, 19 nt, artificial
  Chemically synthesized
caaauuugugaagauuugu

SEQ ID NO: 1726 - RNA, 19 nt, artificial
  Chemically synthesized
agccuuauccuuuuaccca

SEQ ID NO: 1727 - RNA, 19 nt, artificial
  Chemically synthesized
cuccauuugcaucaauacu

SEQ ID NO: 1728 - RNA, 19 nt, artificial
  Chemically synthesized
ccuagugaggagcugaacu

SEQ ID NO: 1729 - RNA, 19 nt, artificial
  Chemically synthesized
uuaaaauggaaaugugaga

SEQ ID NO: 1730 - RNA, 19 nt, artificial
  Chemically synthesized
acguccucgguggaaacuu

SEQ ID NO: 1731 - RNA, 19 nt, artificial
  Chemically synthesized
aaacugaguaaccagaaca

SEQ ID NO: 1732 - RNA, 19 nt, artificial
  Chemically synthesized
uguccaacugaaaccaaag

SEQ ID NO: 1733 - RNA, 19 nt, artificial
  Chemically synthesized
gugaaugcccucaacuucu

SEQ ID NO: 1734 - RNA, 19 nt, artificial
  Chemically synthesized
uaguaagguuuucuuauuu

SEQ ID NO: 1735 - RNA, 19 nt, artificial
  Chemically synthesized
aaccuuucccugaaggauu

SEQ ID NO: 1736 - RNA, 19 nt, artificial
  Chemically synthesized
cagucuuaaccgaaccagc

SEQ ID NO: 1737 - RNA, 19 nt, artificial
  Chemically synthesized
gcugcaucagucuuaaccg

SEQ ID NO: 1738 - RNA, 19 nt, artificial
  Chemically synthesized
uaucugcauuagaaaauca

SEQ ID NO: 1739 - RNA, 19 nt, artificial
  Chemically synthesized
gguuuucuuauuuaugauu

SEQ ID NO: 1740 - RNA, 19 nt, artificial
  Chemically synthesized
uaucuucugguauacucau

SEQ ID NO: 1741 - RNA, 19 nt, artificial
  Chemically synthesized
gucaagacuccgaaauucu

SEQ ID NO: 1742 - RNA, 19 nt, artificial
  Chemically synthesized
uuguuuuugguugaacaaa

SEQ ID NO: 1743 - RNA, 19 nt, artificial
  Chemically synthesized
uucaugguggauucaagaa

SEQ ID NO: 1744 - RNA, 19 nt, artificial
  Chemically synthesized
uuucuguuguggacccaau

SEQ ID NO: 1745 - RNA, 19 nt, artificial
  Chemically synthesized
cauggaaauccgaaugguc

SEQ ID NO: 1746 - RNA, 19 nt, artificial
  Chemically synthesized
ucaagacuccgaaauucug

SEQ ID NO: 1747 - RNA, 19 nt, artificial
  Chemically synthesized
uguauggaagagcccagau

SEQ ID NO: 1748 - RNA, 19 nt, artificial
  Chemically synthesized
agacuggacagaacgauuu

SEQ ID NO: 1749 - RNA, 19 nt, artificial
  Chemically synthesized
caccucugccuguucaucu

SEQ ID NO: 1750 - RNA, 19 nt, artificial
  Chemically synthesized
agucuuaaccgaaccagcu

SEQ ID NO: 1751 - RNA, 19 nt, artificial
  Chemically synthesized
auuugaauacaauaaagag

SEQ ID NO: 1752 - RNA, 19 nt, artificial
  Chemically synthesized
accugugguguuacuaucu

SEQ ID NO: 1753 - RNA, 19 nt, artificial
  Chemically synthesized
acagaacgauuucgagauu

SEQ ID NO: 1754 - RNA, 19 nt, artificial
  Chemically synthesized
ucugguauacucauaaccu

SEQ ID NO: 1755 - RNA, 19 nt, artificial
  Chemically synthesized
uucuuaaccucaacugcag

SEQ ID NO: 1756 - RNA, 19 nt, artificial
  Chemically synthesized
ccaaagaauaguaagguuu

SEQ ID NO: 1757 - RNA, 19 nt, artificial
  Chemically synthesized
uuguauggaagagcccaga

SEQ ID NO: 1758 - RNA, 19 nt, artificial
  Chemically synthesized
ugguauacucauaaccucu

SEQ ID NO: 1759 - RNA, 19 nt, artificial
  Chemically synthesized
aaguaucaaacuaauuuag

SEQ ID NO: 1760 - RNA, 19 nt, artificial
  Chemically synthesized
uugugaagauuuguaugga

SEQ ID NO: 1761 - RNA, 19 nt, artificial
  Chemically synthesized
aucugcauuagaaaaucau

SEQ ID NO: 1762 - RNA, 19 nt, artificial
  Chemically synthesized
caauaaagagucuuucagc

SEQ ID NO: 1763 - RNA, 19 nt, artificial
  Chemically synthesized
gauugucguguuccucuuu

SEQ ID NO: 1764 - RNA, 19 nt, artificial
  Chemically synthesized
acuuuucaguucucaaauu

SEQ ID NO: 1765 - RNA, 19 nt, artificial
  Chemically synthesized
guugauuuucaugguggau

SEQ ID NO: 1766 - RNA, 19 nt, artificial
  Chemically synthesized
uacucauaaccucuucuuu

SEQ ID NO: 1767 - RNA, 19 nt, artificial
  Chemically synthesized
agaguaucacuaccuccac

SEQ ID NO: 1768 - RNA, 19 nt, artificial
  Chemically synthesized
gacuggacagaacgauuuc

SEQ ID NO: 1769 - RNA, 19 nt, artificial
  Chemically synthesized
ccucaacugcagccuuauc

SEQ ID NO: 1770 - RNA, 19 nt, artificial
  Chemically synthesized
uaaucuggaaaccaaagag

SEQ ID NO: 1771 - RNA, 19 nt, artificial
  Chemically synthesized
aauauuuccuuaccagagu

SEQ ID NO: 1772 - RNA, 19 nt, artificial
  Chemically synthesized
agaaauuaucccaagcugu

SEQ ID NO: 1773 - RNA, 19 nt, artificial
  Chemically synthesized
cuucucagugaauuacagu

SEQ ID NO: 1774 - RNA, 19 nt, artificial
  Chemically synthesized
acauaugcaauaagaguuu

SEQ ID NO: 1775 - RNA, 19 nt, artificial
  Chemically synthesized
cagaccugacuaugucaac

SEQ ID NO: 1776 - RNA, 19 nt, artificial
  Chemically synthesized
gguuaaacaccucugccug

SEQ ID NO: 1777 - RNA, 19 nt, artificial
  Chemically synthesized
aaugcagcaagauaccgag

SEQ ID NO: 1778 - RNA, 19 nt, artificial
  Chemically synthesized
gaacagaccugacuauguc

SEQ ID NO: 1779 - RNA, 19 nt, artificial
  Chemically synthesized
guuuacccagcacaaauuu

SEQ ID NO: 1780 - RNA, 19 nt, artificial
  Chemically synthesized
ucaugaucacagccucuac

SEQ ID NO: 1781 - RNA, 19 nt, artificial
  Chemically synthesized
aaauaucaugcacugaauu

SEQ ID NO: 1782 - RNA, 19 nt, artificial
  Chemically synthesized
gaagacuuuguugaacuga

SEQ ID NO: 1783 - RNA, 19 nt, artificial
  Chemically synthesized
aacagaugggauacagaag

SEQ ID NO: 1784 - RNA, 19 nt, artificial
  Chemically synthesized
aagcaggagaaccaggaga

SEQ ID NO: 1785 - RNA, 19 nt, artificial
  Chemically synthesized
auuucucagaacauuuuca

SEQ ID NO: 1786 - RNA, 19 nt, artificial
  Chemically synthesized
augaucacagccucuacau

SEQ ID NO: 1787 - RNA, 19 nt, artificial
  Chemically synthesized
guuaaacaccucugccugu

SEQ ID NO: 1788 - RNA, 19 nt, artificial
  Chemically synthesized
gaccuuugugccuguacug

SEQ ID NO: 1789 - RNA, 19 nt, artificial
  Chemically synthesized
aaauuaucccaagcuguau

SEQ ID NO: 1790 - RNA, 19 nt, artificial
  Chemically synthesized
cuuuaaauuguuuuugguu

SEQ ID NO: 1791 - RNA, 19 nt, artificial
  Chemically synthesized
ucuacauaugcaauaagag

SEQ ID NO: 1792 - RNA, 19 nt, artificial
  Chemically synthesized
agcaagauaccgagaugag

SEQ ID NO: 1793 - RNA, 19 nt, artificial
  Chemically synthesized
uuucccugaaggauuuuca

SEQ ID NO: 1794 - RNA, 19 nt, artificial
  Chemically synthesized
acaaauuugugaagauuug

SEQ ID NO: 1795 - RNA, 19 nt, artificial
  Chemically synthesized
gguggauucaagaacuccc

SEQ ID NO: 1796 - RNA, 19 nt, artificial
  Chemically synthesized
uacucuacauugucccagu

SEQ ID NO: 1797 - RNA, 19 nt, artificial
  Chemically synthesized
caguccuuccguugguuug

SEQ ID NO: 1798 - RNA, 19 nt, artificial
  Chemically synthesized
aucuguucuuaaccucaac

SEQ ID NO: 1799 - RNA, 19 nt, artificial
  Chemically synthesized
uauuuaaaauggaaaugug

SEQ ID NO: 1800 - RNA, 19 nt, artificial
  Chemically synthesized
agauauccaguccuuccgu

SEQ ID NO: 1801 - RNA, 19 nt, artificial
  Chemically synthesized
aauacaauaaagagucuuu

SEQ ID NO: 1802 - RNA, 19 nt, artificial
  Chemically synthesized
auaacagaggaaaaacagu

SEQ ID NO: 1803 - RNA, 19 nt, artificial
  Chemically synthesized
uacuuuauuuggguaugca

SEQ ID NO: 1804 - RNA, 19 nt, artificial
  Chemically synthesized
gaggagcugaacuugcuca

SEQ ID NO: 1805 - RNA, 19 nt, artificial
  Chemically synthesized
uuaaucuggaaaccaaaga

SEQ ID NO: 1806 - RNA, 19 nt, artificial
  Chemically synthesized
uaucacuaccuccaccaga

SEQ ID NO: 1807 - RNA, 19 nt, artificial
  Chemically synthesized
ucuggaaaaccuucuugcu

SEQ ID NO: 1808 - RNA, 19 nt, artificial
  Chemically synthesized
ucaagaacucccuagugag

SEQ ID NO: 1809 - RNA, 19 nt, artificial
  Chemically synthesized
uuggaaguccauuugagga

SEQ ID NO: 1810 - RNA, 19 nt, artificial
  Chemically synthesized
ccuuuuacccaugugccga

SEQ ID NO: 1811 - RNA, 19 nt, artificial
  Chemically synthesized
guaugcagagauauccagu

SEQ ID NO: 1812 - RNA, 19 nt, artificial
  Chemically synthesized
uuguauucaaaucuugucc

SEQ ID NO: 1813 - RNA, 19 nt, artificial
  Chemically synthesized
uuuuucuccaauuaucuuc

SEQ ID NO: 1814 - RNA, 19 nt, artificial
  Chemically synthesized
uuauccaacaaucuccugg

SEQ ID NO: 1815 - RNA, 19 nt, artificial
  Chemically synthesized
uucuuuagaguccugcuuc

SEQ ID NO: 1816 - RNA, 19 nt, artificial
  Chemically synthesized
uuuagaguccugcuucaug

SEQ ID NO: 1817 - RNA, 19 nt, artificial
  Chemically synthesized
uucuaaugcagauacacug

SEQ ID NO: 1818 - RNA, 19 nt, artificial
  Chemically synthesized
auuaguuugauacuucagc

SEQ ID NO: 1819 - RNA, 19 nt, artificial
  Chemically synthesized
uacuauuuuaagaugaacc

SEQ ID NO: 1820 - RNA, 19 nt, artificial
  Chemically synthesized
uuagaguccugcuucaugg

SEQ ID NO: 1821 - RNA, 19 nt, artificial
  Chemically synthesized
uuuaaaauuuucuuugacc

SEQ ID NO: 1822 - RNA, 19 nt, artificial
  Chemically synthesized
uucuucagggucucuuugg

SEQ ID NO: 1823 - RNA, 19 nt, artificial
  Chemically synthesized
uuugguuuccagauuaaac

SEQ ID NO: 1824 - RNA, 19 nt, artificial
  Chemically synthesized
uuagaaauugcacucauuc

SEQ ID NO: 1825 - RNA, 19 nt, artificial
  Chemically synthesized
uauauuuugcuauuucauc

SEQ ID NO: 1826 - RNA, 19 nt, artificial
  Chemically synthesized
uuuuguucaaucuugcauu

SEQ ID NO: 1827 - RNA, 19 nt, artificial
  Chemically synthesized
aaaguuuccaccgaggacg

SEQ ID NO: 1828 - RNA, 19 nt, artificial
  Chemically synthesized
uuauacagcaagaagguuu

SEQ ID NO: 1829 - RNA, 19 nt, artificial
  Chemically synthesized
uucaucaaacaaaaguuuc

SEQ ID NO: 1830 - RNA, 19 nt, artificial
  Chemically synthesized
uccuucuuuagaguccugc

SEQ ID NO: 1831 - RNA, 19 nt, artificial
  Chemically synthesized
uuauuguauucaaaucuug

SEQ ID NO: 1832 - RNA, 19 nt, artificial
  Chemically synthesized
uucaaagucuuagaaauug

SEQ ID NO: 1833 - RNA, 19 nt, artificial
  Chemically synthesized
ugauacuucagcagcccuc

SEQ ID NO: 1834 - RNA, 19 nt, artificial
  Chemically synthesized
uucaaucuugcauuuguuc

SEQ ID NO: 1835 - RNA, 19 nt, artificial
  Chemically synthesized
uauuguauucaaaucuugu

SEQ ID NO: 1836 - RNA, 19 nt, artificial
  Chemically synthesized
uauuuuucuccaauuaucu

SEQ ID NO: 1837 - RNA, 19 nt, artificial
  Chemically synthesized
ucaaauauucuucaggguc

SEQ ID NO: 1838 - RNA, 19 nt, artificial
  Chemically synthesized
uaauuuuguucaaucuugc

SEQ ID NO: 1839 - RNA, 19 nt, artificial
  Chemically synthesized
uuaucuucuguaucccauc

SEQ ID NO: 1840 - RNA, 19 nt, artificial
  Chemically synthesized
uuuaaagaggaacacgaca

SEQ ID NO: 1841 - RNA, 19 nt, artificial
  Chemically synthesized
uguauucaaaucuuguccc

SEQ ID NO: 1842 - RNA, 19 nt, artificial
  Chemically synthesized
uuaaaauuuucuuugacca

SEQ ID NO: 1843 - RNA, 19 nt, artificial
  Chemically synthesized
auaauuucuagauugaaug

SEQ ID NO: 1844 - RNA, 19 nt, artificial
  Chemically synthesized
auauucuucagggucucuu

SEQ ID NO: 1845 - RNA, 19 nt, artificial
  Chemically synthesized
uaaauuaguuugauacuuc

SEQ ID NO: 1846 - RNA, 19 nt, artificial
  Chemically synthesized
uuuugcuauuucaucaaac

SEQ ID NO: 1847 - RNA, 19 nt, artificial
  Chemically synthesized
uccaacaaucuccugguuc

SEQ ID NO: 1848 - RNA, 19 nt, artificial
  Chemically synthesized
auuguauucaaaucuuguc

SEQ ID NO: 1849 - RNA, 19 nt, artificial
  Chemically synthesized
aucuguuugacugagguac

SEQ ID NO: 1850 - RNA, 19 nt, artificial
  Chemically synthesized
uuuaauuugagaacugaaa

SEQ ID NO: 1851 - RNA, 19 nt, artificial
  Chemically synthesized
ugcuuuaaaauuuucuuug

SEQ ID NO: 1852 - RNA, 19 nt, artificial
  Chemically synthesized
aauagcaccaccaccaugc

SEQ ID NO: 1853 - RNA, 19 nt, artificial
  Chemically synthesized
auugauuccgcugaguuuc

SEQ ID NO: 1854 - RNA, 19 nt, artificial
  Chemically synthesized
uacagcaagaagguuuucc

SEQ ID NO: 1855 - RNA, 19 nt, artificial
  Chemically synthesized
uuuucuccaauuaucuucu

SEQ ID NO: 1856 - RNA, 19 nt, artificial
  Chemically synthesized
uccucaucucgguaucuug

SEQ ID NO: 1857 - RNA, 19 nt, artificial
  Chemically synthesized
ucuugcuuuaaaauuuucu

SEQ ID NO: 1858 - RNA, 19 nt, artificial
  Chemically synthesized
uugauacuucagcagcccu

SEQ ID NO: 1859 - RNA, 19 nt, artificial
  Chemically synthesized
ucuguaucccaucuguuug

SEQ ID NO: 1860 - RNA, 19 nt, artificial
  Chemically synthesized
auuuuguucaaucuugcau

SEQ ID NO: 1861 - RNA, 19 nt, artificial
  Chemically synthesized
auauuuuucuccaauuauc

SEQ ID NO: 1862 - RNA, 19 nt, artificial
  Chemically synthesized
uaaaguauagucuucuaag

SEQ ID NO: 1863 - RNA, 19 nt, artificial
  Chemically synthesized
uucuaagcuuguaugguuu

SEQ ID NO: 1864 - RNA, 19 nt, artificial
  Chemically synthesized
uuucuaaugcagauacacu

SEQ ID NO: 1865 - RNA, 19 nt, artificial
  Chemically synthesized
uaauauggaauguucugcu

SEQ ID NO: 1866 - RNA, 19 nt, artificial
  Chemically synthesized
ugaguauugaugcaaaugg

SEQ ID NO: 1867 - RNA, 19 nt, artificial
  Chemically synthesized
uauuucaucaaacaaaagu

SEQ ID NO: 1868 - RNA, 19 nt, artificial
  Chemically synthesized
uauucugagagcugguucg

SEQ ID NO: 1869 - RNA, 19 nt, artificial
  Chemically synthesized
uugguuauacagcaagaag

SEQ ID NO: 1870 - RNA, 19 nt, artificial
  Chemically synthesized
uuuuaauuugagaacugaa

SEQ ID NO: 1871 - RNA, 19 nt, artificial
  Chemically synthesized
aucuaaauuaguuugauac

SEQ ID NO: 1872 - RNA, 19 nt, artificial
  Chemically synthesized
uaguuagaaacucuuauug

SEQ ID NO: 1873 - RNA, 19 nt, artificial
  Chemically synthesized
uguuugacugagguacagc

SEQ ID NO: 1874 - RNA, 19 nt, artificial
  Chemically synthesized
uagucuucuaagcuuguau

SEQ ID NO: 1875 - RNA, 19 nt, artificial
  Chemically synthesized
uucagggaaagguucauga

SEQ ID NO: 1876 - RNA, 19 nt, artificial
  Chemically synthesized
uccaccaugaaaaucaaca

SEQ ID NO: 1877 - RNA, 19 nt, artificial
  Chemically synthesized
uugaguauugaugcaaaug

SEQ ID NO: 1878 - RNA, 19 nt, artificial
  Chemically synthesized
uagaaauugcacucauucc

SEQ ID NO: 1879 - RNA, 19 nt, artificial
  Chemically synthesized
auauuuugcuauuucauca

SEQ ID NO: 1880 - RNA, 19 nt, artificial
  Chemically synthesized
uucuguaucccaucuguuu

SEQ ID NO: 1881 - RNA, 19 nt, artificial
  Chemically synthesized
aaagucuucacuguaauuc

SEQ ID NO: 1882 - RNA, 19 nt, artificial
  Chemically synthesized
uaagcuuguaugguuucca

SEQ ID NO: 1883 - RNA, 19 nt, artificial
  Chemically synthesized
uuucuuuuaauuugagaac

SEQ ID NO: 1884 - RNA, 19 nt, artificial
  Chemically synthesized
uaagaaaaccuuacuauuc

SEQ ID NO: 1885 - RNA, 19 nt, artificial
  Chemically synthesized
uguugcuuugguuucaguu

SEQ ID NO: 1886 - RNA, 19 nt, artificial
  Chemically synthesized
uugcauuuguucaaccaaa

SEQ ID NO: 1887 - RNA, 19 nt, artificial
  Chemically synthesized
uugaaugaagggcagaauu

SEQ ID NO: 1888 - RNA, 19 nt, artificial
  Chemically synthesized
uuagaaacucuuauugcau

SEQ ID NO: 1889 - RNA, 19 nt, artificial
  Chemically synthesized
uugaaaauccuucagggaa

SEQ ID NO: 1890 - RNA, 19 nt, artificial
  Chemically synthesized
uaguuugauacuucagcag

SEQ ID NO: 1891 - RNA, 19 nt, artificial
  Chemically synthesized
aucacaucaaauauucuuc

SEQ ID NO: 1892 - RNA, 19 nt, artificial
  Chemically synthesized
uagcuuggaaucugggcuc

SEQ ID NO: 1893 - RNA, 19 nt, artificial
  Chemically synthesized
ucggauuuccaugacaucu

SEQ ID NO: 1894 - RNA, 19 nt, artificial
  Chemically synthesized
aucauaguuagaaacucuu

SEQ ID NO: 1895 - RNA, 19 nt, artificial
  Chemically synthesized
ugaguuguucugguuacuc

SEQ ID NO: 1896 - RNA, 19 nt, artificial
  Chemically synthesized
uaaaucucgaaaucguucu

SEQ ID NO: 1897 - RNA, 19 nt, artificial
  Chemically synthesized
auucuucagggucucuuug

SEQ ID NO: 1898 - RNA, 19 nt, artificial
  Chemically synthesized
aaaaucaacagugugcauc

SEQ ID NO: 1899 - RNA, 19 nt, artificial
  Chemically synthesized
uuaugaagagucuuggaua

SEQ ID NO: 1900 - RNA, 19 nt, artificial
  Chemically synthesized
auaaauaagaaaaccuuac

SEQ ID NO: 1901 - RNA, 19 nt, artificial
  Chemically synthesized
uuucuuugaccauucggau

SEQ ID NO: 1902 - RNA, 19 nt, artificial
  Chemically synthesized
uugaauucagugcaugaua

SEQ ID NO: 1903 - RNA, 19 nt, artificial
  Chemically synthesized
uccaauuaucuucuguauc

SEQ ID NO: 1904 - RNA, 19 nt, artificial
  Chemically synthesized
auuuccaugacaucugagg

SEQ ID NO: 1905 - RNA, 19 nt, artificial
  Chemically synthesized
uccaaaaggaccaucaaua

SEQ ID NO: 1906 - RNA, 19 nt, artificial
  Chemically synthesized
uguucugcuuuuauccaac

SEQ ID NO: 1907 - RNA, 19 nt, artificial
  Chemically synthesized
uucggauuuccaugacauc

SEQ ID NO: 1908 - RNA, 19 nt, artificial
  Chemically synthesized
uuucuaggauccucaucuc

SEQ ID NO: 1909 - RNA, 19 nt, artificial
  Chemically synthesized
ucuugcugcauucaguuca

SEQ ID NO: 1910 - RNA, 19 nt, artificial
  Chemically synthesized
ucauaguucagugauuccu

SEQ ID NO: 1911 - RNA, 19 nt, artificial
  Chemically synthesized
uacagcuugggauaauuuc

SEQ ID NO: 1912 - RNA, 19 nt, artificial
  Chemically synthesized
aucauaaauaagaaaaccu

SEQ ID NO: 1913 - RNA, 19 nt, artificial
  Chemically synthesized
uauucuucagggucucuuu

SEQ ID NO: 1914 - RNA, 19 nt, artificial
  Chemically synthesized
ucuuuauuguauucaaauc

SEQ ID NO: 1915 - RNA, 19 nt, artificial
  Chemically synthesized
aguucuugaauccaccaug

SEQ ID NO: 1916 - RNA, 19 nt, artificial
  Chemically synthesized
ugcaguugagguuaagaac

SEQ ID NO: 1917 - RNA, 19 nt, artificial
  Chemically synthesized
uuuuccucuguuauauuuu

SEQ ID NO: 1918 - RNA, 19 nt, artificial
  Chemically synthesized
aucuucuguaucccaucug

SEQ ID NO: 1919 - RNA, 19 nt, artificial
  Chemically synthesized
ucauaaauaagaaaaccuu

SEQ ID NO: 1920 - RNA, 19 nt, artificial
  Chemically synthesized
ucugguaaggaaauauucu

SEQ ID NO: 1921 - RNA, 19 nt, artificial
  Chemically synthesized
aggguguugaguauugaug

SEQ ID NO: 1922 - RNA, 19 nt, artificial
  Chemically synthesized
uuucggagucuugacuaga

SEQ ID NO: 1923 - RNA, 19 nt, artificial
  Chemically synthesized
uguaugguuuccagucauc

SEQ ID NO: 1924 - RNA, 19 nt, artificial
  Chemically synthesized
uguagaggcugugaucaug

SEQ ID NO: 1925 - RNA, 19 nt, artificial
  Chemically synthesized
acaauguagaguaauauac

SEQ ID NO: 1926 - RNA, 19 nt, artificial
  Chemically synthesized
uuccagauuaaacauguaa

SEQ ID NO: 1927 - RNA, 19 nt, artificial
  Chemically synthesized
uagugaauuggguccacaa

SEQ ID NO: 1928 - RNA, 19 nt, artificial
  Chemically synthesized
aucuugucccauaugaguu

SEQ ID NO: 1929 - RNA, 19 nt, artificial
  Chemically synthesized
uuucaaagucuuagaaauu

SEQ ID NO: 1930 - RNA, 19 nt, artificial
  Chemically synthesized
uucuuugaccauucggauu

SEQ ID NO: 1931 - RNA, 19 nt, artificial
  Chemically synthesized
acuuaugaccgaaaugaug

SEQ ID NO: 1932 - RNA, 19 nt, artificial
  Chemically synthesized
auauucugagagcugguuc

SEQ ID NO: 1933 - RNA, 19 nt, artificial
  Chemically synthesized
uucuuuuaauuugagaacu

SEQ ID NO: 1934 - RNA, 19 nt, artificial
  Chemically synthesized
uguuauauuuugcuauuuc

SEQ ID NO: 1935 - RNA, 19 nt, artificial
  Chemically synthesized
ucauuccuucuuuagaguc

SEQ ID NO: 1936 - RNA, 19 nt, artificial
  Chemically synthesized
guauagucuucuaagcuug

SEQ ID NO: 1937 - RNA, 19 nt, artificial
  Chemically synthesized
auucagugcaugauauuuu

SEQ ID NO: 1938 - RNA, 19 nt, artificial
  Chemically synthesized
ugaucaugaggaauagcac

SEQ ID NO: 1939 - RNA, 19 nt, artificial
  Chemically synthesized
aagucuuucggcacaguac

SEQ ID NO: 1940 - RNA, 19 nt, artificial
  Chemically synthesized
ucuugucccauaugaguug

SEQ ID NO: 1941 - RNA, 19 nt, artificial
  Chemically synthesized
cuuuauuguauucaaaucu

SEQ ID NO: 1942 - RNA, 19 nt, artificial
  Chemically synthesized
uguucaaccaaaaacaauu

SEQ ID NO: 1943 - RNA, 19 nt, artificial
  Chemically synthesized
auuuguucaaccaaaaaca

SEQ ID NO: 1944 - RNA, 19 nt, artificial
  Chemically synthesized
uaucuugcugcauucaguu

SEQ ID NO: 1945 - RNA, 19 nt, artificial
  Chemically synthesized
uguaaagucuuucggcaca

SEQ ID NO: 1946 - RNA, 19 nt, artificial
  Chemically synthesized
ucugagagcugguucgguu

SEQ ID NO: 1947 - RNA, 19 nt, artificial
  Chemically synthesized
uauucaaaucuugucccau

SEQ ID NO: 1948 - RNA, 19 nt, artificial
  Chemically synthesized
ucaacagugugcaucuaac

SEQ ID NO: 1949 - RNA, 19 nt, artificial
  Chemically synthesized
aaggacuggauaucucugc

SEQ ID NO: 1950 - RNA, 19 nt, artificial
  Chemically synthesized
auguagaguaauauacuga

SEQ ID NO: 1951 - RNA, 19 nt, artificial
  Chemically synthesized
ucuuugaccauucggauuu

SEQ ID NO: 1952 - RNA, 19 nt, artificial
  Chemically synthesized
aguaaaucugcaaaccaac

SEQ ID NO: 1953 - RNA, 19 nt, artificial
  Chemically synthesized
ucugguuacucaguuuaug

SEQ ID NO: 1954 - RNA, 19 nt, artificial
  Chemically synthesized
uaugaccgaaaugauggug

SEQ ID NO: 1955 - RNA, 19 nt, artificial
  Chemically synthesized
ucuccaauuaucuucugua

SEQ ID NO: 1956 - RNA, 19 nt, artificial
  Chemically synthesized
uuucaucaaacaaaaguuu

SEQ ID NO: 1957 - RNA, 19 nt, artificial
  Chemically synthesized
uucugugauccucggaggu

SEQ ID NO: 1958 - RNA, 19 nt, artificial
  Chemically synthesized
uauagucuucuaagcuugu

SEQ ID NO: 1959 - RNA, 19 nt, artificial
  Chemically synthesized
ucugcaaaccaacggaagg

SEQ ID NO: 1960 - RNA, 19 nt, artificial
  Chemically synthesized
guaauauggaauguucugc

SEQ ID NO: 1961 - RNA, 19 nt, artificial
  Chemically synthesized
aaucguucuguccagucuc

SEQ ID NO: 1962 - RNA, 19 nt, artificial
  Chemically synthesized
uccaacaggguguugagua

SEQ ID NO: 1963 - RNA, 19 nt, artificial
  Chemically synthesized
ugugaagagaaguuuucua

SEQ ID NO: 1964 - RNA, 19 nt, artificial
  Chemically synthesized
ucguucuguccagucuccu

SEQ ID NO: 1965 - RNA, 19 nt, artificial
  Chemically synthesized
uuaauuugagaacugaaaa

SEQ ID NO: 1966 - RNA, 19 nt, artificial
  Chemically synthesized
uaucauaguuagaaacucu

SEQ ID NO: 1967 - RNA, 19 nt, artificial
  Chemically synthesized
ugacuuaugaccgaaauga

SEQ ID NO: 1968 - RNA, 19 nt, artificial
  Chemically synthesized
ugaaacaugcaacgucagc

SEQ ID NO: 1969 - RNA, 19 nt, artificial
  Chemically synthesized
guaaaucugcaaaccaacg

SEQ ID NO: 1970 - RNA, 19 nt, artificial
  Chemically synthesized
ucuuuuaauuugagaacug

SEQ ID NO: 1971 - RNA, 19 nt, artificial
  Chemically synthesized
uucagcagcccuccugaaa

SEQ ID NO: 1972 - RNA, 19 nt, artificial
  Chemically synthesized
gugaauuggguccacaaca

SEQ ID NO: 1973 - RNA, 19 nt, artificial
  Chemically synthesized
ucuaagcuuguaugguuuc

SEQ ID NO: 1974 - RNA, 19 nt, artificial
  Chemically synthesized
uaucucugcauacccaaau

SEQ ID NO: 1975 - RNA, 19 nt, artificial
  Chemically synthesized
auugugaggguaaauggau

SEQ ID NO: 1976 - RNA, 19 nt, artificial
  Chemically synthesized
uuuuuccucuguuauauuu

SEQ ID NO: 1977 - RNA, 19 nt, artificial
  Chemically synthesized
uucuguccagucuccuacu

SEQ ID NO: 1978 - RNA, 19 nt, artificial
  Chemically synthesized
ucagggucucuuugguuuc

SEQ ID NO: 1979 - RNA, 19 nt, artificial
  Chemically synthesized
aucaucacaucaaauauuc

SEQ ID NO: 1980 - RNA, 19 nt, artificial
  Chemically synthesized
uacugaccaggucuugcuu

SEQ ID NO: 1981 - RNA, 19 nt, artificial
  Chemically synthesized
auuucuagauugaaugaag

SEQ ID NO: 1982 - RNA, 19 nt, artificial
  Chemically synthesized
ucaauauacagcuugggau

SEQ ID NO: 1983 - RNA, 19 nt, artificial
  Chemically synthesized
uauccaacaaucuccuggu

SEQ ID NO: 1984 - RNA, 19 nt, artificial
  Chemically synthesized
guaaaucucgaaaucguuc

SEQ ID NO: 1985 - RNA, 19 nt, artificial
  Chemically synthesized
uggguaucuaaauuaguuu

SEQ ID NO: 1986 - RNA, 19 nt, artificial
  Chemically synthesized
aaaaccuuacuauucuuug

SEQ ID NO: 1987 - RNA, 19 nt, artificial
  Chemically synthesized
guucuguccagucuccuac

SEQ ID NO: 1988 - RNA, 19 nt, artificial
  Chemically synthesized
uaaauaagaaaaccuuacu

SEQ ID NO: 1989 - RNA, 19 nt, artificial
  Chemically synthesized
auauguagaggcugugauc

SEQ ID NO: 1990 - RNA, 19 nt, artificial
  Chemically synthesized
uccacaacagaaaacacca

SEQ ID NO: 1991 - RNA, 19 nt, artificial
  Chemically synthesized
uaaggcugcaguugagguu

SEQ ID NO: 1992 - RNA, 19 nt, artificial
  Chemically synthesized
aguuguucugguuacucag

SEQ ID NO: 1993 - RNA, 19 nt, artificial
  Chemically synthesized
ugcuauuucaucaaacaaa

SEQ ID NO: 1994 - RNA, 19 nt, artificial
  Chemically synthesized
uccugcuuggaaccuucug

SEQ ID NO: 1995 - RNA, 19 nt, artificial
  Chemically synthesized
auucaaaucuugucccaua

SEQ ID NO: 1996 - RNA, 19 nt, artificial
  Chemically synthesized
ucggagucuugacuagaug

SEQ ID NO: 1997 - RNA, 19 nt, artificial
  Chemically synthesized
aauuaguuugauacuucag

SEQ ID NO: 1998 - RNA, 19 nt, artificial
  Chemically synthesized
uauaccagaagauaucaua

SEQ ID NO: 1999 - RNA, 19 nt, artificial
  Chemically synthesized
acaccaacuguuuuuccuc

SEQ ID NO: 2000 - RNA, 19 nt, artificial
  Chemically synthesized
auuucaucaaacaaaaguu

SEQ ID NO: 2001 - RNA, 19 nt, artificial
  Chemically synthesized
agucuucuaagcuuguaug

SEQ ID NO: 2002 - RNA, 19 nt, artificial
  Chemically synthesized
ugguucuccugcuuggaac

SEQ ID NO: 2003 - RNA, 19 nt, artificial
  Chemically synthesized
ugaggcucugcuuagacac

SEQ ID NO: 2004 - RNA, 19 nt, artificial
  Chemically synthesized
aaagucuuucggcacagua

SEQ ID NO: 2005 - RNA, 19 nt, artificial
  Chemically synthesized
auaaaguauagucuucuaa

SEQ ID NO: 2006 - RNA, 19 nt, artificial
  Chemically synthesized
auuccucaaauggacuucc

SEQ ID NO: 2007 - RNA, 19 nt, artificial
  Chemically synthesized
acugagguacagcuggaug

SEQ ID NO: 2008 - RNA, 19 nt, artificial
  Chemically synthesized
acucuuauugcauauguag

SEQ ID NO: 2009 - RNA, 19 nt, artificial
  Chemically synthesized
ugauugauuccgcugaguu

SEQ ID NO: 2010 - RNA, 19 nt, artificial
  Chemically synthesized
aaauaaaguauagucuucu

SEQ ID NO: 2011 - RNA, 19 nt, artificial
  Chemically synthesized
auaaacagucuugaauuca

SEQ ID NO: 2012 - RNA, 19 nt, artificial
  Chemically synthesized
uagucaggucuguucucuu

SEQ ID NO: 2013 - RNA, 19 nt, artificial
  Chemically synthesized
auauggaauguucugcuuu

SEQ ID NO: 2014 - RNA, 19 nt, artificial
  Chemically synthesized
ucuucuaagcuuguauggu

SEQ ID NO: 2015 - RNA, 19 nt, artificial
  Chemically synthesized
ucaugaggaauagcaccac

SEQ ID NO: 2016 - RNA, 19 nt, artificial
  Chemically synthesized
ucacugagaaguugagggc

SEQ ID NO: 2017 - RNA, 19 nt, artificial
  Chemically synthesized
uugcuauuucaucaaacaa

SEQ ID NO: 2018 - RNA, 19 nt, artificial
  Chemically synthesized
uauuuugcuauuucaucaa

SEQ ID NO: 2019 - RNA, 19 nt, artificial
  Chemically synthesized
auaugaguuguucugguua

SEQ ID NO: 2020 - RNA, 19 nt, artificial
  Chemically synthesized
ucugcuuuuauccaacaau

SEQ ID NO: 2021 - RNA, 19 nt, artificial
  Chemically synthesized
uuugcuauuucaucaaaca

SEQ ID NO: 2022 - RNA, 19 nt, artificial
  Chemically synthesized
ucuguuugacugagguaca

SEQ ID NO: 2023 - RNA, 19 nt, artificial
  Chemically synthesized
ugaaagacucuuuauugua

SEQ ID NO: 2024 - RNA, 19 nt, artificial
  Chemically synthesized
augauauuuuucuccaauu

SEQ ID NO: 2025 - RNA, 19 nt, artificial
  Chemically synthesized
cuuguuaugcaacauacag

SEQ ID NO: 2026 - RNA, 19 nt, artificial
  Chemically synthesized
uaugaguuguucugguuac

SEQ ID NO: 2027 - RNA, 19 nt, artificial
  Chemically synthesized
ucuugaauccaccaugaaa

SEQ ID NO: 2028 - RNA, 19 nt, artificial
  Chemically synthesized
uuuccucuguuauauuuug

SEQ ID NO: 2029 - RNA, 19 nt, artificial
  Chemically synthesized
uucagugcaugauauuuuu

SEQ ID NO: 2030 - RNA, 19 nt, artificial
  Chemically synthesized
gcuuguaugguuuccaguc

SEQ ID NO: 2031 - RNA, 19 nt, artificial
  Chemically synthesized
acaguuuucuuuuaauuug

SEQ ID NO: 2032 - RNA, 19 nt, artificial
  Chemically synthesized
uucggagucuugacuagau

SEQ ID NO: 2033 - RNA, 19 nt, artificial
  Chemically synthesized
gucuucacuguaauucacu

SEQ ID NO: 2034 - RNA, 19 nt, artificial
  Chemically synthesized
uggaaaauuagcuuggaau

SEQ ID NO: 2035 - RNA, 19 nt, artificial
  Chemically synthesized
aaauuagcuuggaaucugg

SEQ ID NO: 2036 - RNA, 19 nt, artificial
  Chemically synthesized
ucugcauacccaaauaaag

SEQ ID NO: 2037 - RNA, 19 nt, artificial
  Chemically synthesized
uuguucaaccaaaaacaau

SEQ ID NO: 2038 - RNA, 19 nt, artificial
  Chemically synthesized
ugguuuccagucauccaac

SEQ ID NO: 2039 - RNA, 19 nt, artificial
  Chemically synthesized
auuuuucuccaauuaucuu

SEQ ID NO: 2040 - RNA, 19 nt, artificial
  Chemically synthesized
ugaaugaagggcagaauuu

SEQ ID NO: 2041 - RNA, 19 nt, artificial
  Chemically synthesized
ugagaaguugagggcauuc

SEQ ID NO: 2042 - RNA, 19 nt, artificial
  Chemically synthesized
aaaaguuuucagcugaaag

SEQ ID NO: 2043 - RNA, 19 nt, artificial
  Chemically synthesized
ucugccgguuuugaaaauc

SEQ ID NO: 2044 - RNA, 19 nt, artificial
  Chemically synthesized
aaauacagauaguaacacc

SEQ ID NO: 2045 - RNA, 19 nt, artificial
  Chemically synthesized
aucugcaaaccaacggaag

SEQ ID NO: 2046 - RNA, 19 nt, artificial
  Chemically synthesized
ucauaguuagaaacucuua

SEQ ID NO: 2047 - RNA, 19 nt, artificial
  Chemically synthesized
ugcugcauucaguucaaca

SEQ ID NO: 2048 - RNA, 19 nt, artificial
  Chemically synthesized
aucaacagugugcaucuaa

SEQ ID NO: 2049 - RNA, 19 nt, artificial
  Chemically synthesized
ucgguaucuugcugcauuc

SEQ ID NO: 2050 - RNA, 19 nt, artificial
  Chemically synthesized
acagucuugaauucagugc

SEQ ID NO: 2051 - RNA, 19 nt, artificial
  Chemically synthesized
uaacaccacagguaauaug

SEQ ID NO: 2052 - RNA, 19 nt, artificial
  Chemically synthesized
ucacauuuccauuuuaaau

SEQ ID NO: 2053 - RNA, 19 nt, artificial
  Chemically synthesized
agcaaguucagcuccucac

SEQ ID NO: 2054 - RNA, 19 nt, artificial
  Chemically synthesized
cauaguucagugauuccuc

SEQ ID NO: 2055 - RNA, 19 nt, artificial
  Chemically synthesized
aagcuuguaugguuuccag

SEQ ID NO: 2056 - RNA, 19 nt, artificial
  Chemically synthesized
acuagauggaggcaguagu

SEQ ID NO: 2057 - RNA, 19 nt, artificial
  Chemically synthesized
ucaaauggacuuccaaaag

SEQ ID NO: 2058 - RNA, 19 nt, artificial
  Chemically synthesized
cuucuuuagaguccugcuu

SEQ ID NO: 2059 - RNA, 19 nt, artificial
  Chemically synthesized
uccagauuaaacauguaau

SEQ ID NO: 2060 - RNA, 19 nt, artificial
  Chemically synthesized
acuagggaguucuugaauc

SEQ ID NO: 2061 - RNA, 19 nt, artificial
  Chemically synthesized
uucugguuacucaguuuau

SEQ ID NO: 2062 - RNA, 19 nt, artificial
  Chemically synthesized
auucggauuuccaugacau

SEQ ID NO: 2063 - RNA, 19 nt, artificial
  Chemically synthesized
ucuaaauuaguuugauacu

SEQ ID NO: 2064 - RNA, 19 nt, artificial
  Chemically synthesized
uaauuugagaacugaaaag

SEQ ID NO: 2065 - RNA, 19 nt, artificial
  Chemically synthesized
cuguaaagucuuucggcac

SEQ ID NO: 2066 - RNA, 19 nt, artificial
  Chemically synthesized
ucucuuugguuuccagauu

SEQ ID NO: 2067 - RNA, 19 nt, artificial
  Chemically synthesized
uuccaaaaggaccaucaau

SEQ ID NO: 2068 - RNA, 19 nt, artificial
  Chemically synthesized
uugagaacugaaaagugaa

SEQ ID NO: 2069 - RNA, 19 nt, artificial
  Chemically synthesized
ucaaaucuugucccauaug

SEQ ID NO: 2070 - RNA, 19 nt, artificial
  Chemically synthesized
ugaguauaccagaagauau

SEQ ID NO: 2071 - RNA, 19 nt, artificial
  Chemically synthesized
uaggauccucaucucggua

SEQ ID NO: 2072 - RNA, 19 nt, artificial
  Chemically synthesized
uguaauucacugagaaguu

SEQ ID NO: 2073 - RNA, 19 nt, artificial
  Chemically synthesized
ugaggaauagcaccaccac

SEQ ID NO: 2074 - RNA, 19 nt, artificial
  Chemically synthesized
ucuugaauucagugcauga

SEQ ID NO: 2075 - RNA, 19 nt, artificial
  Chemically synthesized
ucaguuuaugaagagucuu

SEQ ID NO: 2076 - RNA, 19 nt, artificial
  Chemically synthesized
agugaauuggguccacaac

SEQ ID NO: 2077 - RNA, 19 nt, artificial
  Chemically synthesized
ucugugauccucggaggua

SEQ ID NO: 2078 - RNA, 19 nt, artificial
  Chemically synthesized
aauguagaguaauauacug

SEQ ID NO: 2079 - RNA, 19 nt, artificial
  Chemically synthesized
cucgaaaucguucugucca

SEQ ID NO: 2080 - RNA, 19 nt, artificial
  Chemically synthesized
ugagaaaauacagauagua

SEQ ID NO: 2081 - RNA, 19 nt, artificial
  Chemically synthesized
augacuuaugaccgaaaug

SEQ ID NO: 2082 - RNA, 19 nt, artificial
  Chemically synthesized
agauuaaacauguaaugug

SEQ ID NO: 2083 - RNA, 19 nt, artificial
  Chemically synthesized
cuuauugcuccggauauac

SEQ ID NO: 2084 - RNA, 19 nt, artificial
  Chemically synthesized
ugacaucugagggaugacu

SEQ ID NO: 2085 - RNA, 19 nt, artificial
  Chemically synthesized
caucucgguaucuugcugc

SEQ ID NO: 2086 - RNA, 19 nt, artificial
  Chemically synthesized
cacauugugaggguaaaug

SEQ ID NO: 2087 - RNA, 19 nt, artificial
  Chemically synthesized
uacaaaucuucacaaauuu

SEQ ID NO: 2088 - RNA, 19 nt, artificial
  Chemically synthesized
aauuucggagucuugacua

SEQ ID NO: 2089 - RNA, 19 nt, artificial
  Chemically synthesized
uuccgcugaguuucaaagu

SEQ ID NO: 2090 - RNA, 19 nt, artificial
  Chemically synthesized
uauaaacagucuugaauuc

SEQ ID NO: 2091 - RNA, 19 nt, artificial
  Chemically synthesized
uaaauggaugauuuucuaa

SEQ ID NO: 2092 - RNA, 19 nt, artificial
  Chemically synthesized
aaauuuucuuugaccauuc

SEQ ID NO: 2093 - RNA, 19 nt, artificial
  Chemically synthesized
agaggcugugaucaugagg

SEQ ID NO: 2094 - RNA, 19 nt, artificial
  Chemically synthesized
auaagaaaaccuuacuauu

SEQ ID NO: 2095 - RNA, 19 nt, artificial
  Chemically synthesized
ugcaucuaacaguuuucuu

SEQ ID NO: 2096 - RNA, 19 nt, artificial
  Chemically synthesized
agucuuucggcacaguaca

SEQ ID NO: 2097 - RNA, 19 nt, artificial
  Chemically synthesized
ugagaaauacucugguaag

SEQ ID NO: 2098 - RNA, 19 nt, artificial
  Chemically synthesized
ucuuagaaauugcacucau

SEQ ID NO: 2099 - RNA, 19 nt, artificial
  Chemically synthesized
aguauagucuucuaagcuu

SEQ ID NO: 2100 - RNA, 19 nt, artificial
  Chemically synthesized
auguaaugugacggucauc

SEQ ID NO: 2101 - RNA, 19 nt, artificial
  Chemically synthesized
aacugaaaagugaaucauc

SEQ ID NO: 2102 - RNA, 19 nt, artificial
  Chemically synthesized
cuaagcuuguaugguuucc

SEQ ID NO: 2103 - RNA, 19 nt, artificial
  Chemically synthesized
uggguaaacucugccgguu

SEQ ID NO: 2104 - RNA, 19 nt, artificial
  Chemically synthesized
guugcuuugguuucaguug

SEQ ID NO: 2105 - RNA, 19 nt, artificial
  Chemically synthesized
auaguaacaccacagguaa

SEQ ID NO: 2106 - RNA, 19 nt, artificial
  Chemically synthesized
cuguaauucacugagaagu

SEQ ID NO: 2107 - RNA, 19 nt, artificial
  Chemically synthesized
uacagaguaaaucugcaaa

SEQ ID NO: 2108 - RNA, 19 nt, artificial
  Chemically synthesized
uaguucagugauuccucaa

SEQ ID NO: 2109 - RNA, 19 nt, artificial
  Chemically synthesized
uaaaauuuucuuugaccau

SEQ ID NO: 2110 - RNA, 19 nt, artificial
  Chemically synthesized
aaaucuucacaaauuugug

SEQ ID NO: 2111 - RNA, 19 nt, artificial
  Chemically synthesized
auaguuagaaacucuuauu

SEQ ID NO: 2112 - RNA, 19 nt, artificial
  Chemically synthesized
uccagucuccuacuauuuu

SEQ ID NO: 2113 - RNA, 19 nt, artificial
  Chemically synthesized
ccuuagauugagcaaguuc

SEQ ID NO: 2114 - RNA, 19 nt, artificial
  Chemically synthesized
acaaagguccagaaaucca

SEQ ID NO: 2115 - RNA, 19 nt, artificial
  Chemically synthesized
uccuucagggaaagguuca

SEQ ID NO: 2116 - RNA, 19 nt, artificial
  Chemically synthesized
agaaaauacagauaguaac

SEQ ID NO: 2117 - RNA, 19 nt, artificial
  Chemically synthesized
ugaacaggcagagguguuu

SEQ ID NO: 2118 - RNA, 19 nt, artificial
  Chemically synthesized
ucuaacaguuuucuuuuaa

SEQ ID NO: 2119 - RNA, 19 nt, artificial
  Chemically synthesized
uguuuuuccucuguuauau

SEQ ID NO: 2120 - RNA, 19 nt, artificial
  Chemically synthesized
augaacaggcagagguguu

SEQ ID NO: 2121 - RNA, 19 nt, artificial
  Chemically synthesized
guuuucuaggauccucauc

SEQ ID NO: 2122 - RNA, 19 nt, artificial
  Chemically synthesized
ugaauccaccaugaaaauc

SEQ ID NO: 2123 - RNA, 19 nt, artificial
  Chemically synthesized
ccgguuuugaaaauccuuc

SEQ ID NO: 2124 - RNA, 19 nt, artificial
  Chemically synthesized
aaauggaugauuuucuaau

SEQ ID NO: 2125 - RNA, 19 nt, artificial
  Chemically synthesized
aguaauauacugaccaggu

SEQ ID NO: 2126 - RNA, 19 nt, artificial
  Chemically synthesized
aaucuugucccauaugagu

SEQ ID NO: 2127 - RNA, 19 nt, artificial
  Chemically synthesized
auccucaucucgguaucuu

SEQ ID NO: 2128 - RNA, 19 nt, artificial
  Chemically synthesized
aagaaaaccuuacuauucu

SEQ ID NO: 2129 - RNA, 19 nt, artificial
  Chemically synthesized
agcuuguaugguuuccagu

SEQ ID NO: 2130 - RNA, 19 nt, artificial
  Chemically synthesized
guugagggcauucaccaga

SEQ ID NO: 2131 - RNA, 19 nt, artificial
  Chemically synthesized
ucuccuacuauuuuaagau

SEQ ID NO: 2132 - RNA, 19 nt, artificial
  Chemically synthesized
cucugguaaggaaauauuc

SEQ ID NO: 2133 - RNA, 19 nt, artificial
  Chemically synthesized
ccucaucucgguaucuugc

SEQ ID NO: 2134 - RNA, 19 nt, artificial
  Chemically synthesized
gaaguugagggcauucacc

SEQ ID NO: 2135 - RNA, 19 nt, artificial
  Chemically synthesized
auggaggcaguaguaaauc

SEQ ID NO: 2136 - RNA, 19 nt, artificial
  Chemically synthesized
ugcuuuuauccaacaaucu

SEQ ID NO: 2137 - RNA, 19 nt, artificial
  Chemically synthesized
aacaguugugaagagaagu

SEQ ID NO: 2138 - RNA, 19 nt, artificial
  Chemically synthesized
uagaaacucuuauugcaua

SEQ ID NO: 2139 - RNA, 19 nt, artificial
  Chemically synthesized
agagaaguuuucuaggauc

SEQ ID NO: 2140 - RNA, 19 nt, artificial
  Chemically synthesized
uaaagucuuucggcacagu

SEQ ID NO: 2141 - RNA, 19 nt, artificial
  Chemically synthesized
gucuuggauagugaauugg

SEQ ID NO: 2142 - RNA, 19 nt, artificial
  Chemically synthesized
ugaggguaaauggaugauu

SEQ ID NO: 2143 - RNA, 19 nt, artificial
  Chemically synthesized
ugaccauucggauuuccau

SEQ ID NO: 2144 - RNA, 19 nt, artificial
  Chemically synthesized
ugugauccucggagguaag

SEQ ID NO: 2145 - RNA, 19 nt, artificial
  Chemically synthesized
ugugaucaugaggaauagc

SEQ ID NO: 2146 - RNA, 19 nt, artificial
  Chemically synthesized
cggauuuccaugacaucug

SEQ ID NO: 2147 - RNA, 19 nt, artificial
  Chemically synthesized
uuuguucaaucuugcauuu

SEQ ID NO: 2148 - RNA, 19 nt, artificial
  Chemically synthesized
ugaaucaucacaucaaaua

SEQ ID NO: 2149 - RNA, 19 nt, artificial
  Chemically synthesized
aguugagggcauucaccag

SEQ ID NO: 2150 - RNA, 19 nt, artificial
  Chemically synthesized
acauucucacauuuccauu

SEQ ID NO: 2151 - RNA, 19 nt, artificial
  Chemically synthesized
aaagacugaguggaagccc

SEQ ID NO: 2152 - RNA, 19 nt, artificial
  Chemically synthesized
aauuuuguucaaucuugca

SEQ ID NO: 2153 - RNA, 19 nt, artificial
  Chemically synthesized
cuucagggucucuuugguu

SEQ ID NO: 2154 - RNA, 19 nt, artificial
  Chemically synthesized
aaaauuuucuuugaccauu

SEQ ID NO: 2155 - RNA, 19 nt, artificial
  Chemically synthesized
ugauauuuuucuccaauua

SEQ ID NO: 2156 - RNA, 19 nt, artificial
  Chemically synthesized
ucagugcaugauauuuuuc

SEQ ID NO: 2157 - RNA, 19 nt, artificial
  Chemically synthesized
acaguugugaagagaaguu

SEQ ID NO: 2158 - RNA, 19 nt, artificial
  Chemically synthesized
uggaauguucugcuuuuau

SEQ ID NO: 2159 - RNA, 19 nt, artificial
  Chemically synthesized
auaucauaguuagaaacuc

SEQ ID NO: 2160 - RNA, 19 nt, artificial
  Chemically synthesized
aauaagaaaaccuuacuau

SEQ ID NO: 2161 - RNA, 19 nt, artificial
  Chemically synthesized
aaauugcacucauuccuuc

SEQ ID NO: 2162 - RNA, 19 nt, artificial
  Chemically synthesized
ucaaccaaaaacaauuuaa

SEQ ID NO: 2163 - RNA, 19 nt, artificial
  Chemically synthesized
uggaaucugggcucuucca

SEQ ID NO: 2164 - RNA, 19 nt, artificial
  Chemically synthesized
ucacaucaaauauucuuca

SEQ ID NO: 2165 - RNA, 19 nt, artificial
  Chemically synthesized
uucaaccaaaaacaauuua

SEQ ID NO: 2166 - RNA, 19 nt, artificial
  Chemically synthesized
ugaguuucaaagucuuaga

SEQ ID NO: 2167 - RNA, 19 nt, artificial
  Chemically synthesized
uugggauaauuucuagauu

SEQ ID NO: 2168 - RNA, 19 nt, artificial
  Chemically synthesized
acugaccaggucuugcuuu

SEQ ID NO: 2169 - RNA, 19 nt, artificial
  Chemically synthesized
guaaacucugccgguuuug

SEQ ID NO: 2170 - RNA, 19 nt, artificial
  Chemically synthesized
acauagucaggucuguucu

SEQ ID NO: 2171 - RNA, 19 nt, artificial
  Chemically synthesized
aacucugccgguuuugaaa

SEQ ID NO: 2172 - RNA, 19 nt, artificial
  Chemically synthesized
aguaaaucucgaaaucguu

SEQ ID NO: 2173 - RNA, 19 nt, artificial
  Chemically synthesized
uguugaguauugaugcaaa

SEQ ID NO: 2174 - RNA, 19 nt, artificial
  Chemically synthesized
ucagcugaaagacucuuua

SEQ ID NO: 2175 - RNA, 19 nt, artificial
  Chemically synthesized
cuugaauccaccaugaaaa

SEQ ID NO: 2176 - RNA, 19 nt, artificial
  Chemically synthesized
cuugcuuuaaaauuuucuu

SEQ ID NO: 2177 - RNA, 19 nt, artificial
  Chemically synthesized
aaacaugcaacgucagcag

SEQ ID NO: 2178 - RNA, 19 nt, artificial
  Chemically synthesized
cuuggaaucugggcucuuc

SEQ ID NO: 2179 - RNA, 19 nt, artificial
  Chemically synthesized
cuauaaacagucuugaauu

SEQ ID NO: 2180 - RNA, 19 nt, artificial
  Chemically synthesized
acagaaaacaccaacuguu

SEQ ID NO: 2181 - RNA, 19 nt, artificial
  Chemically synthesized
aaaauguucugagaaauac

SEQ ID NO: 2182 - RNA, 19 nt, artificial
  Chemically synthesized
auuaaacauguaaugugac

SEQ ID NO: 2183 - RNA, 19 nt, artificial
  Chemically synthesized
ugcauuuguucaaccaaaa

SEQ ID NO: 2184 - RNA, 19 nt, artificial
  Chemically synthesized
ugcacgccugagaaaauac

SEQ ID NO: 2185 - RNA, 19 nt, artificial
  Chemically synthesized
aaacaauuuaaagaggaac

SEQ ID NO: 2186 - RNA, 19 nt, artificial
  Chemically synthesized
aaauuaguuugauacuuca

SEQ ID NO: 2187 - RNA, 19 nt, artificial
  Chemically synthesized
cccuugguuauacagcaag

SEQ ID NO: 2188 - RNA, 19 nt, artificial
  Chemically synthesized
auugaaugaagggcagaau

SEQ ID NO: 2189 - RNA, 19 nt, artificial
  Chemically synthesized
aaacuuguuaugcaacaua

SEQ ID NO: 2190 - RNA, 19 nt, artificial
  Chemically synthesized
aaauacucugguaaggaaa

SEQ ID NO: 2191 - RNA, 19 nt, artificial
  Chemically synthesized
ucaaagacugaguggaagc

SEQ ID NO: 2192 - RNA, 19 nt, artificial
  Chemically synthesized
uguccagucuccuacuauu

SEQ ID NO: 2193 - RNA, 19 nt, artificial
  Chemically synthesized
aacaauuuaaagaggaaca

SEQ ID NO: 2194 - RNA, 19 nt, artificial
  Chemically synthesized
augcaacgucagcagcaug

SEQ ID NO: 2195 - RNA, 19 nt, artificial
  Chemically synthesized
agaaauacucugguaagga

SEQ ID NO: 2196 - RNA, 19 nt, artificial
  Chemically synthesized
agacucuuuauuguauuca

SEQ ID NO: 2197 - RNA, 19 nt, artificial
  Chemically synthesized
gucuucuaagcuuguaugg

SEQ ID NO: 2198 - RNA, 19 nt, artificial
  Chemically synthesized
ucugagaaauacucuggua

SEQ ID NO: 2199 - RNA, 19 nt, artificial
  Chemically synthesized
agguaauauggaauguucu

SEQ ID NO: 2200 - RNA, 19 nt, artificial
  Chemically synthesized
aguugugaagagaaguuuu

SEQ ID NO: 2201 - RNA, 19 nt, artificial
  Chemically synthesized
auagucuucuaagcuugua

SEQ ID NO: 2202 - RNA, 19 nt, artificial
  Chemically synthesized
aaauguucugagaaauacu

SEQ ID NO: 2203 - RNA, 19 nt, artificial
  Chemically synthesized
uauacagcuugggauaauu

SEQ ID NO: 2204 - RNA, 19 nt, artificial
  Chemically synthesized
cugcuuuuauccaacaauc

SEQ ID NO: 2205 - RNA, 19 nt, artificial
  Chemically synthesized
aggucuugcuuuaaaauuu

SEQ ID NO: 2206 - RNA, 19 nt, artificial
  Chemically synthesized
aaacucugccgguuuugaa

SEQ ID NO: 2207 - RNA, 19 nt, artificial
  Chemically synthesized
ugauuccucaaauggacuu

SEQ ID NO: 2208 - RNA, 19 nt, artificial
  Chemically synthesized
aaaguauagucuucuaagc

SEQ ID NO: 2209 - RNA, 19 nt, artificial
  Chemically synthesized
cuucuaagcuuguaugguu

SEQ ID NO: 2210 - RNA, 19 nt, artificial
  Chemically synthesized
ugcauucaguucaacaaag

SEQ ID NO: 2211 - RNA, 19 nt, artificial
  Chemically synthesized
uccuacuauuuuaagauga

SEQ ID NO: 2212 - RNA, 19 nt, artificial
  Chemically synthesized
auacaaaucuucacaaauu

SEQ ID NO: 2213 - RNA, 19 nt, artificial
  Chemically synthesized
auacuucagcagcccuccu

SEQ ID NO: 2214 - RNA, 19 nt, artificial
  Chemically synthesized
aaaauacagauaguaacac

SEQ ID NO: 2215 - RNA, 19 nt, artificial
  Chemically synthesized
aauggaugauuuucuaaug

SEQ ID NO: 2216 - RNA, 19 nt, artificial
  Chemically synthesized
aauuggguccacaacagaa

SEQ ID NO: 2217 - RNA, 19 nt, artificial
  Chemically synthesized
augaagagucuuggauagu

SEQ ID NO: 2218 - RNA, 19 nt, artificial
  Chemically synthesized
accaaaaacaauuuaaaga

SEQ ID NO: 2219 - RNA, 19 nt, artificial
  Chemically synthesized
uaccagaagauaucauagu

SEQ ID NO: 2220 - RNA, 19 nt, artificial
  Chemically synthesized
acgacaaucagccuuagau

SEQ ID NO: 2221 - RNA, 19 nt, artificial
  Chemically synthesized
uagauggaggcaguaguaa

SEQ ID NO: 2222 - RNA, 19 nt, artificial
  Chemically synthesized
cugagaaauacucugguaa

SEQ ID NO: 2223 - RNA, 19 nt, artificial
  Chemically synthesized
gaucaugaggaauagcacc

SEQ ID NO: 2224 - RNA, 19 nt, artificial
  Chemically synthesized
ugacauagucaggucuguu

SEQ ID NO: 2225 - RNA, 19 nt, artificial
  Chemically synthesized
acaaaucuucacaaauuug

SEQ ID NO: 2226 - RNA, 19 nt, artificial
  Chemically synthesized
uggguaaaaggauaaggcu

SEQ ID NO: 2227 - RNA, 19 nt, artificial
  Chemically synthesized
aguauugaugcaaauggag

SEQ ID NO: 2228 - RNA, 19 nt, artificial
  Chemically synthesized
aguucagcuccucacuagg

SEQ ID NO: 2229 - RNA, 19 nt, artificial
  Chemically synthesized
ucucacauuuccauuuuaa

SEQ ID NO: 2230 - RNA, 19 nt, artificial
  Chemically synthesized
aaguuuccaccgaggacgu

SEQ ID NO: 2231 - RNA, 19 nt, artificial
  Chemically synthesized
uguucugguuacucaguuu

SEQ ID NO: 2232 - RNA, 19 nt, artificial
  Chemically synthesized
cuuugguuucaguuggaca

SEQ ID NO: 2233 - RNA, 19 nt, artificial
  Chemically synthesized
agaaguugagggcauucac

SEQ ID NO: 2234 - RNA, 19 nt, artificial
  Chemically synthesized
aaauaagaaaaccuuacua

SEQ ID NO: 2235 - RNA, 19 nt, artificial
  Chemically synthesized
aauccuucagggaaagguu

SEQ ID NO: 2236 - RNA, 19 nt, artificial
  Chemically synthesized
gcugguucgguuaagacug

SEQ ID NO: 2237 - RNA, 19 nt, artificial
  Chemically synthesized
cgguuaagacugaugcagc

SEQ ID NO: 2238 - RNA, 19 nt, artificial
  Chemically synthesized
ugauuuucuaaugcagaua

SEQ ID NO: 2239 - RNA, 19 nt, artificial
  Chemically synthesized
aaucauaaauaagaaaacc

SEQ ID NO: 2240 - RNA, 19 nt, artificial
  Chemically synthesized
augaguauaccagaagaua

SEQ ID NO: 2241 - RNA, 19 nt, artificial
  Chemically synthesized
agaauuucggagucuugac

SEQ ID NO: 2242 - RNA, 19 nt, artificial
  Chemically synthesized
uuuguucaaccaaaaacaa

SEQ ID NO: 2243 - RNA, 19 nt, artificial
  Chemically synthesized
uucuugaauccaccaugaa

SEQ ID NO: 2244 - RNA, 19 nt, artificial
  Chemically synthesized
auuggguccacaacagaaa

SEQ ID NO: 2245 - RNA, 19 nt, artificial
  Chemically synthesized
gaccauucggauuuccaug

SEQ ID NO: 2246 - RNA, 19 nt, artificial
  Chemically synthesized
cagaauuucggagucuuga

SEQ ID NO: 2247 - RNA, 19 nt, artificial
  Chemically synthesized
aucugggcucuuccauaca

SEQ ID NO: 2248 - RNA, 19 nt, artificial
  Chemically synthesized
aaaucguucuguccagucu

SEQ ID NO: 2249 - RNA, 19 nt, artificial
  Chemically synthesized
agaugaacaggcagaggug

SEQ ID NO: 2250 - RNA, 19 nt, artificial
  Chemically synthesized
agcugguucgguuaagacu

SEQ ID NO: 2251 - RNA, 19 nt, artificial
  Chemically synthesized
cucuuuauuguauucaaau

SEQ ID NO: 2252 - RNA, 19 nt, artificial
  Chemically synthesized
agauaguaacaccacaggu

SEQ ID NO: 2253 - RNA, 19 nt, artificial
  Chemically synthesized
aaucucgaaaucguucugu

SEQ ID NO: 2254 - RNA, 19 nt, artificial
  Chemically synthesized
agguuaugaguauaccaga

SEQ ID NO: 2255 - RNA, 19 nt, artificial
  Chemically synthesized
cugcaguugagguuaagaa

SEQ ID NO: 2256 - RNA, 19 nt, artificial
  Chemically synthesized
aaaccuuacuauucuuugg

SEQ ID NO: 2257 - RNA, 19 nt, artificial
  Chemically synthesized
ucugggcucuuccauacaa

SEQ ID NO: 2258 - RNA, 19 nt, artificial
  Chemically synthesized
agagguuaugaguauacca

SEQ ID NO: 2259 - RNA, 19 nt, artificial
  Chemically synthesized
cuaaauuaguuugauacuu

SEQ ID NO: 2260 - RNA, 19 nt, artificial
  Chemically synthesized
uccauacaaaucuucacaa

SEQ ID NO: 2261 - RNA, 19 nt, artificial
  Chemically synthesized
augauuuucuaaugcagau

SEQ ID NO: 2262 - RNA, 19 nt, artificial
  Chemically synthesized
gcugaaagacucuuuauug

SEQ ID NO: 2263 - RNA, 19 nt, artificial
  Chemically synthesized
aaagaggaacacgacaauc

SEQ ID NO: 2264 - RNA, 19 nt, artificial
  Chemically synthesized
aauuugagaacugaaaagu

SEQ ID NO: 2265 - RNA, 19 nt, artificial
  Chemically synthesized
auccaccaugaaaaucaac

SEQ ID NO: 2266 - RNA, 19 nt, artificial
  Chemically synthesized
aaagaagagguuaugagua

SEQ ID NO: 2267 - RNA, 19 nt, artificial
  Chemically synthesized
guggagguagugauacucu

SEQ ID NO: 2268 - RNA, 19 nt, artificial
  Chemically synthesized
gaaaucguucuguccaguc

SEQ ID NO: 2269 - RNA, 19 nt, artificial
  Chemically synthesized
gauaaggcugcaguugagg

SEQ ID NO: 2270 - RNA, 19 nt, artificial
  Chemically synthesized
cucuuugguuuccagauua

SEQ ID NO: 2271 - RNA, 19 nt, artificial
  Chemically synthesized
acucugguaaggaaauauu

SEQ ID NO: 2272 - RNA, 19 nt, artificial
  Chemically synthesized
acagcuugggauaauuucu

SEQ ID NO: 2273 - RNA, 19 nt, artificial
  Chemically synthesized
acuguaauucacugagaag

SEQ ID NO: 2274 - RNA, 19 nt, artificial
  Chemically synthesized
aaacucuuauugcauaugu

SEQ ID NO: 2275 - RNA, 19 nt, artificial
  Chemically synthesized
guugacauagucaggucug

SEQ ID NO: 2276 - RNA, 19 nt, artificial
  Chemically synthesized
caggcagagguguuuaacc

SEQ ID NO: 2277 - RNA, 19 nt, artificial
  Chemically synthesized
cucgguaucuugcugcauu

SEQ ID NO: 2278 - RNA, 19 nt, artificial
  Chemically synthesized
gacauagucaggucuguuc

SEQ ID NO: 2279 - RNA, 19 nt, artificial
  Chemically synthesized
aaauuugugcuggguaaac

SEQ ID NO: 2280 - RNA, 19 nt, artificial
  Chemically synthesized
guagaggcugugaucauga

SEQ ID NO: 2281 - RNA, 19 nt, artificial
  Chemically synthesized
aauucagugcaugauauuu

SEQ ID NO: 2282 - RNA, 19 nt, artificial
  Chemically synthesized
ucaguucaacaaagucuuc

SEQ ID NO: 2283 - RNA, 19 nt, artificial
  Chemically synthesized
cuucuguaucccaucuguu

SEQ ID NO: 2284 - RNA, 19 nt, artificial
  Chemically synthesized
ucuccugguucuccugcuu

SEQ ID NO: 2285 - RNA, 19 nt, artificial
  Chemically synthesized
ugaaaauguucugagaaau

SEQ ID NO: 2286 - RNA, 19 nt, artificial
  Chemically synthesized
auguagaggcugugaucau

SEQ ID NO: 2287 - RNA, 19 nt, artificial
  Chemically synthesized
acaggcagagguguuuaac

SEQ ID NO: 2288 - RNA, 19 nt, artificial
  Chemically synthesized
caguacaggcacaaagguc

SEQ ID NO: 2289 - RNA, 19 nt, artificial
  Chemically synthesized
auacagcuugggauaauuu

SEQ ID NO: 2290 - RNA, 19 nt, artificial
  Chemically synthesized
aaccaaaaacaauuuaaag

SEQ ID NO: 2291 - RNA, 19 nt, artificial
  Chemically synthesized
cucuuauugcauauguaga

SEQ ID NO: 2292 - RNA, 19 nt, artificial
  Chemically synthesized
cucaucucgguaucuugcu

SEQ ID NO: 2293 - RNA, 19 nt, artificial
  Chemically synthesized
ugaaaauccuucagggaaa

SEQ ID NO: 2294 - RNA, 19 nt, artificial
  Chemically synthesized
caaaucuucacaaauuugu

SEQ ID NO: 2295 - RNA, 19 nt, artificial
  Chemically synthesized
gggaguucuugaauccacc

SEQ ID NO: 2296 - RNA, 19 nt, artificial
  Chemically synthesized
acugggacaauguagagua

SEQ ID NO: 2297 - RNA, 19 nt, artificial
  Chemically synthesized
caaaccaacggaaggacug

SEQ ID NO: 2298 - RNA, 19 nt, artificial
  Chemically synthesized
guugagguuaagaacagau

SEQ ID NO: 2299 - RNA, 19 nt, artificial
  Chemically synthesized
cacauuuccauuuuaaaua

SEQ ID NO: 2300 - RNA, 19 nt, artificial
  Chemically synthesized
acggaaggacuggauaucu

SEQ ID NO: 2301 - RNA, 19 nt, artificial
  Chemically synthesized
aaagacucuuuauuguauu

SEQ ID NO: 2302 - RNA, 19 nt, artificial
  Chemically synthesized
acuguuuuuccucuguuau

SEQ ID NO: 2303 - RNA, 19 nt, artificial
  Chemically synthesized
ugcauacccaaauaaagua

SEQ ID NO: 2304 - RNA, 19 nt, artificial
  Chemically synthesized
ugagcaaguucagcuccuc

SEQ ID NO: 2305 - RNA, 19 nt, artificial
  Chemically synthesized
ucuuugguuuccagauuaa

SEQ ID NO: 2306 - RNA, 19 nt, artificial
  Chemically synthesized
ucugguggagguagugaua

SEQ ID NO: 2307 - RNA, 19 nt, artificial
  Chemically synthesized
agcaagaagguuuuccaga

SEQ ID NO: 2308 - RNA, 19 nt, artificial
  Chemically synthesized
cucacuagggaguucuuga

SEQ ID NO: 2309 - RNA, 19 nt, artificial
  Chemically synthesized
uccucaaauggacuuccaa

SEQ ID NO: 2310 - RNA, 19 nt, artificial
  Chemically synthesized
ucggcacauggguaaaagg

SEQ ID NO: 2311 - RNA, 19 nt, artificial
  Chemically synthesized
acuggauaucucugcauac

SEQ ID NO: 2312 - RNA, 19 nt, artificial
  Chemically synthesized
cucucugcuugaauuuuaa

SEQ ID NO: 2313 - RNA, 19 nt, artificial
  Chemically synthesized
ggaguuauuuugaagucuu

SEQ ID NO: 2314 - RNA, 19 nt, artificial
  Chemically synthesized
ggcugaauguuuuccuguu

SEQ ID NO: 2315 - RNA, 19 nt, artificial
  Chemically synthesized
gcaaaguggguuuucuaaa

SEQ ID NO: 2316 - RNA, 19 nt, artificial
  Chemically synthesized
gcagaccacaaccucaaaa

SEQ ID NO: 2317 - RNA, 19 nt, artificial
  Chemically synthesized
ggacagaaaaucucauaag

SEQ ID NO: 2318 - RNA, 19 nt, artificial
  Chemically synthesized
ccggaggaguuauuuugaa

SEQ ID NO: 2319 - RNA, 19 nt, artificial
  Chemically synthesized
acauguuuacugucacuuu

SEQ ID NO: 2320 - RNA, 19 nt, artificial
  Chemically synthesized
guagggugacuuuuuaaau

SEQ ID NO: 2321 - RNA, 19 nt, artificial
  Chemically synthesized
ccaggugauuuuaucaauu

SEQ ID NO: 2322 - RNA, 19 nt, artificial
  Chemically synthesized
cacuuuaggauaagaaugu

SEQ ID NO: 2323 - RNA, 19 nt, artificial
  Chemically synthesized
gucacuuuaggauaagaau

SEQ ID NO: 2324 - RNA, 19 nt, artificial
  Chemically synthesized
agucacuuuaggauaagaa

SEQ ID NO: 2325 - RNA, 19 nt, artificial
  Chemically synthesized
agguucaauucuacuucaa

SEQ ID NO: 2326 - RNA, 19 nt, artificial
  Chemically synthesized
ggcauccuuuuacuuugac

SEQ ID NO: 2327 - RNA, 19 nt, artificial
  Chemically synthesized
gcagagucuuuugagaugu

SEQ ID NO: 2328 - RNA, 19 nt, artificial
  Chemically synthesized
cuccagccuaucucaugau

SEQ ID NO: 2329 - RNA, 19 nt, artificial
  Chemically synthesized
cagucacuuuaggauaaga

SEQ ID NO: 2330 - RNA, 19 nt, artificial
  Chemically synthesized
caaaguggguuuucuaaac

SEQ ID NO: 2331 - RNA, 19 nt, artificial
  Chemically synthesized
cggucauucuuuauaucug

SEQ ID NO: 2332 - RNA, 19 nt, artificial
  Chemically synthesized
cggcauugguggaauuguc

SEQ ID NO: 2333 - RNA, 19 nt, artificial
  Chemically synthesized
ccaccuuuuuaucuucuau

SEQ ID NO: 2334 - RNA, 19 nt, artificial
  Chemically synthesized
ggaggaguuauuuugaagu

SEQ ID NO: 2335 - RNA, 19 nt, artificial
  Chemically synthesized
caguggaguaugugacauu

SEQ ID NO: 2336 - RNA, 19 nt, artificial
  Chemically synthesized
acaccuguuuaacuuugac

SEQ ID NO: 2337 - RNA, 19 nt, artificial
  Chemically synthesized
cacaccuguuuaacuuuga

SEQ ID NO: 2338 - RNA, 19 nt, artificial
  Chemically synthesized
gcuauucacaucauugcac

SEQ ID NO: 2339 - RNA, 19 nt, artificial
  Chemically synthesized
ggaucacaaccucaccuuc

SEQ ID NO: 2340 - RNA, 19 nt, artificial
  Chemically synthesized
ucacuuuugauauggucuu

SEQ ID NO: 2341 - RNA, 19 nt, artificial
  Chemically synthesized
aguagggugacuuuuuaaa

SEQ ID NO: 2342 - RNA, 19 nt, artificial
  Chemically synthesized
cccaggugauuuuaucaau

SEQ ID NO: 2343 - RNA, 19 nt, artificial
  Chemically synthesized
gcauuaaacuuugacaagg

SEQ ID NO: 2344 - RNA, 19 nt, artificial
  Chemically synthesized
aaguggguuuucuaaacua

SEQ ID NO: 2345 - RNA, 19 nt, artificial
  Chemically synthesized
cuccauucauauccgagca

SEQ ID NO: 2346 - RNA, 19 nt, artificial
  Chemically synthesized
agauuucuucuccauucau

SEQ ID NO: 2347 - RNA, 19 nt, artificial
  Chemically synthesized
uggcauccuuuuacuuuga

SEQ ID NO: 2348 - RNA, 19 nt, artificial
  Chemically synthesized
ucaaucucucuccuggaau

SEQ ID NO: 2349 - RNA, 19 nt, artificial
  Chemically synthesized
caagugugcagagucuuuu

SEQ ID NO: 2350 - RNA, 19 nt, artificial
  Chemically synthesized
acaguggaguaugugacau

SEQ ID NO: 2351 - RNA, 19 nt, artificial
  Chemically synthesized
ccagccuaucucaugauga

SEQ ID NO: 2352 - RNA, 19 nt, artificial
  Chemically synthesized
cuauucacaucauugcaca

SEQ ID NO: 2353 - RNA, 19 nt, artificial
  Chemically synthesized
uacagcuauucacaucauu

SEQ ID NO: 2354 - RNA, 19 nt, artificial
  Chemically synthesized
cacuuuugauauggucuua

SEQ ID NO: 2355 - RNA, 19 nt, artificial
  Chemically synthesized
ccugaguuuugguuuguaa

SEQ ID NO: 2356 - RNA, 19 nt, artificial
  Chemically synthesized
aggauaagaaugugccucu

SEQ ID NO: 2357 - RNA, 19 nt, artificial
  Chemically synthesized
ugagcagucacuuuaggau

SEQ ID NO: 2358 - RNA, 19 nt, artificial
  Chemically synthesized
ggaguuuucuuauguggcc

SEQ ID NO: 2359 - RNA, 19 nt, artificial
  Chemically synthesized
ccacaaccucaaaacaaaa

SEQ ID NO: 2360 - RNA, 19 nt, artificial
  Chemically synthesized
accacaaccucaaaacaaa

SEQ ID NO: 2361 - RNA, 19 nt, artificial
  Chemically synthesized
agaauccggauugcugaau

SEQ ID NO: 2362 - RNA, 19 nt, artificial
  Chemically synthesized
ccuuuuacuuugaccucug

SEQ ID NO: 2363 - RNA, 19 nt, artificial
  Chemically synthesized
ugauuaccaagguuguuau

SEQ ID NO: 2364 - RNA, 19 nt, artificial
  Chemically synthesized
ccggucauucuuuauaucu

SEQ ID NO: 2365 - RNA, 19 nt, artificial
  Chemically synthesized
accggucauucuuuauauc

SEQ ID NO: 2366 - RNA, 19 nt, artificial
  Chemically synthesized
cggaggaguuauuuugaag

SEQ ID NO: 2367 - RNA, 19 nt, artificial
  Chemically synthesized
caauagccuugauucucau

SEQ ID NO: 2368 - RNA, 19 nt, artificial
  Chemically synthesized
cuguuuaacuuugacugcu

SEQ ID NO: 2369 - RNA, 19 nt, artificial
  Chemically synthesized
caccuguuuaacuuugacu

SEQ ID NO: 2370 - RNA, 19 nt, artificial
  Chemically synthesized
ugaauuuuaacagcacgcu

SEQ ID NO: 2371 - RNA, 19 nt, artificial
  Chemically synthesized
ccgacaaauacuacuacac

SEQ ID NO: 2372 - RNA, 19 nt, artificial
  Chemically synthesized
ccuuccugaaauaugagaa

SEQ ID NO: 2373 - RNA, 19 nt, artificial
  Chemically synthesized
gccuuccugaaauaugaga

SEQ ID NO: 2374 - RNA, 19 nt, artificial
  Chemically synthesized
cuguaaaucuuucuggaca

SEQ ID NO: 2375 - RNA, 19 nt, artificial
  Chemically synthesized
ugcauucaacuucguuacu

SEQ ID NO: 2376 - RNA, 19 nt, artificial
  Chemically synthesized
gcauuuugucucuuuguau

SEQ ID NO: 2377 - RNA, 19 nt, artificial
  Chemically synthesized
guagugggaguuuucuuau

SEQ ID NO: 2378 - RNA, 19 nt, artificial
  Chemically synthesized
ccaagucuguagugggagu

SEQ ID NO: 2379 - RNA, 19 nt, artificial
  Chemically synthesized
ccggaugggacagcaauau

SEQ ID NO: 2380 - RNA, 19 nt, artificial
  Chemically synthesized
aaaguggguuuucuaaacu

SEQ ID NO: 2381 - RNA, 19 nt, artificial
  Chemically synthesized
acaaauuccagugugcaga

SEQ ID NO: 2382 - RNA, 19 nt, artificial
  Chemically synthesized
gguacaaauuccagugugc

SEQ ID NO: 2383 - RNA, 19 nt, artificial
  Chemically synthesized
cuucuaucuugaaauccau

SEQ ID NO: 2384 - RNA, 19 nt, artificial
  Chemically synthesized
gcauccuuuuacuuugacc

SEQ ID NO: 2385 - RNA, 19 nt, artificial
  Chemically synthesized
cagagucuuuugagaugug

SEQ ID NO: 2386 - RNA, 19 nt, artificial
  Chemically synthesized
gaguuauuuugaagucuuc

SEQ ID NO: 2387 - RNA, 19 nt, artificial
  Chemically synthesized
gaggaguuauuuugaaguc

SEQ ID NO: 2388 - RNA, 19 nt, artificial
  Chemically synthesized
cgacaguggaguaugugac

SEQ ID NO: 2389 - RNA, 19 nt, artificial
  Chemically synthesized
uccagccuaucucaugaug

SEQ ID NO: 2390 - RNA, 19 nt, artificial
  Chemically synthesized
accuguuuaacuuugacug

SEQ ID NO: 2391 - RNA, 19 nt, artificial
  Chemically synthesized
ugcacaccuguuuaacuuu

SEQ ID NO: 2392 - RNA, 19 nt, artificial
  Chemically synthesized
acaucauugcacaccuguu

SEQ ID NO: 2393 - RNA, 19 nt, artificial
  Chemically synthesized
gccuauaugaucugccuac

SEQ ID NO: 2394 - RNA, 19 nt, artificial
  Chemically synthesized
ggccgacaaauacuacuac

SEQ ID NO: 2395 - RNA, 19 nt, artificial
  Chemically synthesized
ugaauguuuuccuguuugu

SEQ ID NO: 2396 - RNA, 19 nt, artificial
  Chemically synthesized
cugaauguuuuccuguuug

SEQ ID NO: 2397 - RNA, 19 nt, artificial
  Chemically synthesized
caguuuuguuucugguugu

SEQ ID NO: 2398 - RNA, 19 nt, artificial
  Chemically synthesized
uguuuacugucacuuuuga

SEQ ID NO: 2399 - RNA, 19 nt, artificial
  Chemically synthesized
caacuuaagaacuucugaa

SEQ ID NO: 2400 - RNA, 19 nt, artificial
  Chemically synthesized
caacuucguuacuugagcu

SEQ ID NO: 2401 - RNA, 19 nt, artificial
  Chemically synthesized
ugauugcauucaacuucgu

SEQ ID NO: 2402 - RNA, 19 nt, artificial
  Chemically synthesized
ucccugguauucuuuuuuu

SEQ ID NO: 2403 - RNA, 19 nt, artificial
  Chemically synthesized
ugcauuuugucucuuugua

SEQ ID NO: 2404 - RNA, 19 nt, artificial
  Chemically synthesized
gugggaguuuucuuaugug

SEQ ID NO: 2405 - RNA, 19 nt, artificial
  Chemically synthesized
agucuguagugggaguuuu

SEQ ID NO: 2406 - RNA, 19 nt, artificial
  Chemically synthesized
caagucuguagugggaguu

SEQ ID NO: 2407 - RNA, 19 nt, artificial
  Chemically synthesized
ggacaaugaguuuucuaca

SEQ ID NO: 2408 - RNA, 19 nt, artificial
  Chemically synthesized
cagcaauauuguuggucau

SEQ ID NO: 2409 - RNA, 19 nt, artificial
  Chemically synthesized
cacaaccucaaaacaaaaa

SEQ ID NO: 2410 - RNA, 19 nt, artificial
  Chemically synthesized
gaccacaaccucaaaacaa

SEQ ID NO: 2411 - RNA, 19 nt, artificial
  Chemically synthesized
cuaucuugaaauccaucug

SEQ ID NO: 2412 - RNA, 19 nt, artificial
  Chemically synthesized
cccuuugcuucuaucuuga

SEQ ID NO: 2413 - RNA, 19 nt, artificial
  Chemically synthesized
uccuuuuacuuugaccucu

SEQ ID NO: 2414 - RNA, 19 nt, artificial
  Chemically synthesized
gucauucuuuauaucugug

SEQ ID NO: 2415 - RNA, 19 nt, artificial
  Chemically synthesized
agagcaugaaugagaguca

SEQ ID NO: 2416 - RNA, 19 nt, artificial
  Chemically synthesized
gcuuagggauucacggcau

SEQ ID NO: 2417 - RNA, 19 nt, artificial
  Chemically synthesized
accaccuuuuuaucuucua

SEQ ID NO: 2418 - RNA, 19 nt, artificial
  Chemically synthesized
aggaguuauuuugaagucu

SEQ ID NO: 2419 - RNA, 19 nt, artificial
  Chemically synthesized
ugauucucaugguaacuuc

SEQ ID NO: 2420 - RNA, 19 nt, artificial
  Chemically synthesized
cuggagugaucaugacaau

SEQ ID NO: 2421 - RNA, 19 nt, artificial
  Chemically synthesized
ggguagguguguguuuuuc

SEQ ID NO: 2422 - RNA, 19 nt, artificial
  Chemically synthesized
ccuacauacagcuauucac

SEQ ID NO: 2423 - RNA, 19 nt, artificial
  Chemically synthesized
ugaaauaugagaaggccga

SEQ ID NO: 2424 - RNA, 19 nt, artificial
  Chemically synthesized
gaaggcggaauaaacuuau

SEQ ID NO: 2425 - RNA, 19 nt, artificial
  Chemically synthesized
aguuuuguuucugguuguu

SEQ ID NO: 2426 - RNA, 19 nt, artificial
  Chemically synthesized
cugucacuuuugauauggu

SEQ ID NO: 2427 - RNA, 19 nt, artificial
  Chemically synthesized
cccauauaacaccaacagu

SEQ ID NO: 2428 - RNA, 19 nt, artificial
  Chemically synthesized
acaacuaaucccaggugau

SEQ ID NO: 2429 - RNA, 19 nt, artificial
  Chemically synthesized
cagaguuauacaacuaauc

SEQ ID NO: 2430 - RNA, 19 nt, artificial
  Chemically synthesized
guucagaguuauacaacua

SEQ ID NO: 2431 - RNA, 19 nt, artificial
  Chemically synthesized
gguucagaguuauacaacu

SEQ ID NO: 2432 - RNA, 19 nt, artificial
  Chemically synthesized
gugguucagaguuauacaa

SEQ ID NO: 2433 - RNA, 19 nt, artificial
  Chemically synthesized
ugggaaacugggugguuaa

SEQ ID NO: 2434 - RNA, 19 nt, artificial
  Chemically synthesized
guaauuuacuuggucucgu

SEQ ID NO: 2435 - RNA, 19 nt, artificial
  Chemically synthesized
ucaguaauuuacuuggucu

SEQ ID NO: 2436 - RNA, 19 nt, artificial
  Chemically synthesized
aggacgguaaucugcauuu

SEQ ID NO: 2437 - RNA, 19 nt, artificial
  Chemically synthesized
agcauuaaacuuugacaag

SEQ ID NO: 2438 - RNA, 19 nt, artificial
  Chemically synthesized
gccuuuuccugguucaaca

SEQ ID NO: 2439 - RNA, 19 nt, artificial
  Chemically synthesized
ccucaaaacaaaaaagauc

SEQ ID NO: 2440 - RNA, 19 nt, artificial
  Chemically synthesized
cagaccacaaccucaaaac

SEQ ID NO: 2441 - RNA, 19 nt, artificial
  Chemically synthesized
agcagaagguugugauuac

SEQ ID NO: 2442 - RNA, 19 nt, artificial
  Chemically synthesized
ugcagagucuuuugagaug

SEQ ID NO: 2443 - RNA, 19 nt, artificial
  Chemically synthesized
ggagagcaugaaugagagu

SEQ ID NO: 2444 - RNA, 19 nt, artificial
  Chemically synthesized
acaucuuaaaggcucacag

SEQ ID NO: 2445 - RNA, 19 nt, artificial
  Chemically synthesized
cuauaugaucugccuacau

SEQ ID NO: 2446 - RNA, 19 nt, artificial
  Chemically synthesized
gaaaaauccuugggucaac

SEQ ID NO: 2447 - RNA, 19 nt, artificial
  Chemically synthesized
aggccgacaaauacuacua

SEQ ID NO: 2448 - RNA, 19 nt, artificial
  Chemically synthesized
gggcugaauguuuuccugu

SEQ ID NO: 2449 - RNA, 19 nt, artificial
  Chemically synthesized
ucccaggugauuuuaucaa

SEQ ID NO: 2450 - RNA, 19 nt, artificial
  Chemically synthesized
uguaaaucuuucuggacag

SEQ ID NO: 2451 - RNA, 19 nt, artificial
  Chemically synthesized
cccugguauucuuuuuuug

SEQ ID NO: 2452 - RNA, 19 nt, artificial
  Chemically synthesized
cucccugguauucuuuuuu

SEQ ID NO: 2453 - RNA, 19 nt, artificial
  Chemically synthesized
gccuugacucccugguauu

SEQ ID NO: 2454 - RNA, 19 nt, artificial
  Chemically synthesized
caguaauuuacuuggucuc

SEQ ID NO: 2455 - RNA, 19 nt, artificial
  Chemically synthesized
cucuuuguaucuucaguaa

SEQ ID NO: 2456 - RNA, 19 nt, artificial
  Chemically synthesized
caccucuugacaaugggaa

SEQ ID NO: 2457 - RNA, 19 nt, artificial
  Chemically synthesized
aagguucaauucuacuuca

SEQ ID NO: 2458 - RNA, 19 nt, artificial
  Chemically synthesized
agugggaguuuucuuaugu

SEQ ID NO: 2459 - RNA, 19 nt, artificial
  Chemically synthesized
uguagugggaguuuucuua

SEQ ID NO: 2460 - RNA, 19 nt, artificial
  Chemically synthesized
cuguagugggaguuuucuu

SEQ ID NO: 2461 - RNA, 19 nt, artificial
  Chemically synthesized
uggucaugcagcauuaaac

SEQ ID NO: 2462 - RNA, 19 nt, artificial
  Chemically synthesized
gguuuucuaaacuaccguc

SEQ ID NO: 2463 - RNA, 19 nt, artificial
  Chemically synthesized
uggaggaauuaggcaaagu

SEQ ID NO: 2464 - RNA, 19 nt, artificial
  Chemically synthesized
ggauugcugaaucuucccu

SEQ ID NO: 2465 - RNA, 19 nt, artificial
  Chemically synthesized
cuuugcuucuaucuugaaa

SEQ ID NO: 2466 - RNA, 19 nt, artificial
  Chemically synthesized
ccuuugcuucuaucuugaa

SEQ ID NO: 2467 - RNA, 19 nt, artificial
  Chemically synthesized
ugcaccggucauucuuuau

SEQ ID NO: 2468 - RNA, 19 nt, artificial
  Chemically synthesized
gugcagagucuuuugagau

SEQ ID NO: 2469 - RNA, 19 nt, artificial
  Chemically synthesized
aggagagcaugaaugagag

SEQ ID NO: 2470 - RNA, 19 nt, artificial
  Chemically synthesized
cucaccaccuuuuuaucuu

SEQ ID NO: 2471 - RNA, 19 nt, artificial
  Chemically synthesized
guauacucaccaccuuuuu

SEQ ID NO: 2472 - RNA, 19 nt, artificial
  Chemically synthesized
cacaucuuaaaggcucaca

SEQ ID NO: 2473 - RNA, 19 nt, artificial
  Chemically synthesized
ucacaucuuaaaggcucac

SEQ ID NO: 2474 - RNA, 19 nt, artificial
  Chemically synthesized
guggaguaugugacauuca

SEQ ID NO: 2475 - RNA, 19 nt, artificial
  Chemically synthesized
ccauucucuccagccuauc

SEQ ID NO: 2476 - RNA, 19 nt, artificial
  Chemically synthesized
ccuauaugaucugccuaca

SEQ ID NO: 2477 - RNA, 19 nt, artificial
  Chemically synthesized
uccugugugucgcaaucug

SEQ ID NO: 2478 - RNA, 19 nt, artificial
  Chemically synthesized
agaaaaauccuugggucaa

SEQ ID NO: 2479 - RNA, 19 nt, artificial
  Chemically synthesized
agggcugaauguuuuccug

SEQ ID NO: 2480 - RNA, 19 nt, artificial
  Chemically synthesized
aaacaaaauuaccgagaac

SEQ ID NO: 2481 - RNA, 19 nt, artificial
  Chemically synthesized
ugguuuguaaucuuuuguc

SEQ ID NO: 2482 - RNA, 19 nt, artificial
  Chemically synthesized
gaguuuugguuuguaaucu

SEQ ID NO: 2483 - RNA, 19 nt, artificial
  Chemically synthesized
caggugauuuuaucaauuc

SEQ ID NO: 2484 - RNA, 19 nt, artificial
  Chemically synthesized
ugaaguucuuaaagcccau

SEQ ID NO: 2485 - RNA, 19 nt, artificial
  Chemically synthesized
gggaaacugggugguuaac

SEQ ID NO: 2486 - RNA, 19 nt, artificial
  Chemically synthesized
gcaacuuaagaacuucuga

SEQ ID NO: 2487 - RNA, 19 nt, artificial
  Chemically synthesized
aacuucguuacuugagcuu

SEQ ID NO: 2488 - RNA, 19 nt, artificial
  Chemically synthesized
cucuugacaaugggaaacu

SEQ ID NO: 2489 - RNA, 19 nt, artificial
  Chemically synthesized
acgguaaucugcauuuugu

SEQ ID NO: 2490 - RNA, 19 nt, artificial
  Chemically synthesized
cucggacuuuggcaaagag

SEQ ID NO: 2491 - RNA, 19 nt, artificial
  Chemically synthesized
caauauuguuggucaugca

SEQ ID NO: 2492 - RNA, 19 nt, artificial
  Chemically synthesized
gcaauauuguuggucaugc

SEQ ID NO: 2493 - RNA, 19 nt, artificial
  Chemically synthesized
acagcaauauuguugguca

SEQ ID NO: 2494 - RNA, 19 nt, artificial
  Chemically synthesized
gaauuaggcaaaguggguu

SEQ ID NO: 2495 - RNA, 19 nt, artificial
  Chemically synthesized
agauggaggaauuaggcaa

SEQ ID NO: 2496 - RNA, 19 nt, artificial
  Chemically synthesized
acaggagauggaggaauua

SEQ ID NO: 2497 - RNA, 19 nt, artificial
  Chemically synthesized
caaccucaaaacaaaaaag

SEQ ID NO: 2498 - RNA, 19 nt, artificial
  Chemically synthesized
ccaggauugaaguggaugg

SEQ ID NO: 2499 - RNA, 19 nt, artificial
  Chemically synthesized
gacagaaaaucucauaagg

SEQ ID NO: 2500 - RNA, 19 nt, artificial
  Chemically synthesized
gaauggcauccuuuuacuu

SEQ ID NO: 2501 - RNA, 19 nt, artificial
  Chemically synthesized
guuuuggaauugcagauga

SEQ ID NO: 2502 - RNA, 19 nt, artificial
  Chemically synthesized
aaguuuuggaauugcagau

SEQ ID NO: 2503 - RNA, 19 nt, artificial
  Chemically synthesized
gucaaacagaggagagcau

SEQ ID NO: 2504 - RNA, 19 nt, artificial
  Chemically synthesized
cuuagggauucacggcauu

SEQ ID NO: 2505 - RNA, 19 nt, artificial
  Chemically synthesized
gaagucuucugguauacuc

SEQ ID NO: 2506 - RNA, 19 nt, artificial
  Chemically synthesized
uuugaagucuucugguaua

SEQ ID NO: 2507 - RNA, 19 nt, artificial
  Chemically synthesized
uugauucucaugguaacuu

SEQ ID NO: 2508 - RNA, 19 nt, artificial
  Chemically synthesized
ucccuugccuccauucucu

SEQ ID NO: 2509 - RNA, 19 nt, artificial
  Chemically synthesized
gagaaagcaauuggaucac

SEQ ID NO: 2510 - RNA, 19 nt, artificial
  Chemically synthesized
aaggcggaauaaacuuauu

SEQ ID NO: 2511 - RNA, 19 nt, artificial
  Chemically synthesized
cugaguuuugguuuguaau

SEQ ID NO: 2512 - RNA, 19 nt, artificial
  Chemically synthesized
ggugauuuuaucaauucca

SEQ ID NO: 2513 - RNA, 19 nt, artificial
  Chemically synthesized
cugaaguucuuaaaguucu

SEQ ID NO: 2514 - RNA, 19 nt, artificial
  Chemically synthesized
aucugcauuuugucucuuu

SEQ ID NO: 2515 - RNA, 19 nt, artificial
  Chemically synthesized
gaaacagaaaaccuccuuu

SEQ ID NO: 2516 - RNA, 19 nt, artificial
  Chemically synthesized
uguuggucaugcagcauua

SEQ ID NO: 2517 - RNA, 19 nt, artificial
  Chemically synthesized
gcugaaucuucccuguugc

SEQ ID NO: 2518 - RNA, 19 nt, artificial
  Chemically synthesized
acaaccuguugacuucccu

SEQ ID NO: 2519 - RNA, 19 nt, artificial
  Chemically synthesized
ccuuuuccugguucaacaa

SEQ ID NO: 2520 - RNA, 19 nt, artificial
  Chemically synthesized
ggugccuuuuccugguuca

SEQ ID NO: 2521 - RNA, 19 nt, artificial
  Chemically synthesized
ugcagaccacaaccucaaa

SEQ ID NO: 2522 - RNA, 19 nt, artificial
  Chemically synthesized
ggcuuucgaacaacaauau

SEQ ID NO: 2523 - RNA, 19 nt, artificial
  Chemically synthesized
gggacuggacagaaaaucu

SEQ ID NO: 2524 - RNA, 19 nt, artificial
  Chemically synthesized
ggacaaauguuccauuccu

SEQ ID NO: 2525 - RNA, 19 nt, artificial
  Chemically synthesized
caccaccuuuuuaucuucu

SEQ ID NO: 2526 - RNA, 19 nt, artificial
  Chemically synthesized
ucaccaccuuuuuaucuuc

SEQ ID NO: 2527 - RNA, 19 nt, artificial
  Chemically synthesized
auacucaccaccuuuuuau

SEQ ID NO: 2528 - RNA, 19 nt, artificial
  Chemically synthesized
cuccauucucuccagccua

SEQ ID NO: 2529 - RNA, 19 nt, artificial
  Chemically synthesized
cacugagaaagcaauugga

SEQ ID NO: 2530 - RNA, 19 nt, artificial
  Chemically synthesized
ugguuagggcugaauguuu

SEQ ID NO: 2531 - RNA, 19 nt, artificial
  Chemically synthesized
gguuuguaaucuuuugucc

SEQ ID NO: 2532 - RNA, 19 nt, artificial
  Chemically synthesized
ugaguuuugguuuguaauc

SEQ ID NO: 2533 - RNA, 19 nt, artificial
  Chemically synthesized
ucaauuccaguguuaccau

SEQ ID NO: 2534 - RNA, 19 nt, artificial
  Chemically synthesized
cuucugaaguucuuaaagu

SEQ ID NO: 2535 - RNA, 19 nt, artificial
  Chemically synthesized
agcaacuuaagaacuucug

SEQ ID NO: 2536 - RNA, 19 nt, artificial
  Chemically synthesized
cuucguuacuugagcuuca

SEQ ID NO: 2537 - RNA, 19 nt, artificial
  Chemically synthesized
cuucaguaauuuacuuggu

SEQ ID NO: 2538 - RNA, 19 nt, artificial
  Chemically synthesized
caguaauugaguuauagga

SEQ ID NO: 2539 - RNA, 19 nt, artificial
  Chemically synthesized
ccucuugacaaugggaaac

SEQ ID NO: 2540 - RNA, 19 nt, artificial
  Chemically synthesized
cgguaaucugcauuuuguc

SEQ ID NO: 2541 - RNA, 19 nt, artificial
  Chemically synthesized
auaggaauaaggacgguaa

SEQ ID NO: 2542 - RNA, 19 nt, artificial
  Chemically synthesized
ugaguuauaggaauaagga

SEQ ID NO: 2543 - RNA, 19 nt, artificial
  Chemically synthesized
ggaauuaggcaaagugggu

SEQ ID NO: 2544 - RNA, 19 nt, artificial
  Chemically synthesized
caggauugaaguggauggu

SEQ ID NO: 2545 - RNA, 19 nt, artificial
  Chemically synthesized
gggcuuucgaacaacaaua

SEQ ID NO: 2546 - RNA, 19 nt, artificial
  Chemically synthesized
cagaugaacaagcguggcu

SEQ ID NO: 2547 - RNA, 19 nt, artificial
  Chemically synthesized
acagaggagagcaugaaug

SEQ ID NO: 2548 - RNA, 19 nt, artificial
  Chemically synthesized
ucuucuauauccuuggcuu

SEQ ID NO: 2549 - RNA, 19 nt, artificial
  Chemically synthesized
uggagugaucaugacaaua

SEQ ID NO: 2550 - RNA, 19 nt, artificial
  Chemically synthesized
acuggagugaucaugacaa

SEQ ID NO: 2551 - RNA, 19 nt, artificial
  Chemically synthesized
cacacugagaaagcaauug

SEQ ID NO: 2552 - RNA, 19 nt, artificial
  Chemically synthesized
gcuuccugugugucgcaau

SEQ ID NO: 2553 - RNA, 19 nt, artificial
  Chemically synthesized
uguuugguuagggcugaau

SEQ ID NO: 2554 - RNA, 19 nt, artificial
  Chemically synthesized
guguuaccaucuccugagu

SEQ ID NO: 2555 - RNA, 19 nt, artificial
  Chemically synthesized
caauuccaguguuaccauc

SEQ ID NO: 2556 - RNA, 19 nt, artificial
  Chemically synthesized
gugauuuuaucaauuccag

SEQ ID NO: 2557 - RNA, 19 nt, artificial
  Chemically synthesized
cagcaacuuaagaacuucu

SEQ ID NO: 2558 - RNA, 19 nt, artificial
  Chemically synthesized
acucccugguauucuuuuu

SEQ ID NO: 2559 - RNA, 19 nt, artificial
  Chemically synthesized
agguuugagcagucacuuu

SEQ ID NO: 2560 - RNA, 19 nt, artificial
  Chemically synthesized
cugcauuuugucucuuugu

SEQ ID NO: 2561 - RNA, 19 nt, artificial
  Chemically synthesized
guaaucugcauuuugucuc

SEQ ID NO: 2562 - RNA, 19 nt, artificial
  Chemically synthesized
accucuugacaaugggaaa

SEQ ID NO: 2563 - RNA, 19 nt, artificial
  Chemically synthesized
uuguuggucaugcagcauu

SEQ ID NO: 2564 - RNA, 19 nt, artificial
  Chemically synthesized
ggcaaaguggguuuucuaa

SEQ ID NO: 2565 - RNA, 19 nt, artificial
  Chemically synthesized
gugccuuuuccugguucaa

SEQ ID NO: 2566 - RNA, 19 nt, artificial
  Chemically synthesized
ccugagucuuggaagugga

SEQ ID NO: 2567 - RNA, 19 nt, artificial
  Chemically synthesized
cuacugaguucauccggag

SEQ ID NO: 2568 - RNA, 19 nt, artificial
  Chemically synthesized
gcuacugaguucauccgga

SEQ ID NO: 2569 - RNA, 19 nt, artificial
  Chemically synthesized
ccuaucucaugaugagaaa

SEQ ID NO: 2570 - RNA, 19 nt, artificial
  Chemically synthesized
ugguggccuauaugaucug

SEQ ID NO: 2571 - RNA, 19 nt, artificial
  Chemically synthesized
cugguggccuauaugaucu

SEQ ID NO: 2572 - RNA, 19 nt, artificial
  Chemically synthesized
acaaccucaccuuccacaa

SEQ ID NO: 2573 - RNA, 19 nt, artificial
  Chemically synthesized
uuguuugguuagggcugaa

SEQ ID NO: 2574 - RNA, 19 nt, artificial
  Chemically synthesized
agaaggaaggcggaauaaa

SEQ ID NO: 2575 - RNA, 19 nt, artificial
  Chemically synthesized
uggugguucagaguuauac

SEQ ID NO: 2576 - RNA, 19 nt, artificial
  Chemically synthesized
gguuuggugguucagaguu

SEQ ID NO: 2577 - RNA, 19 nt, artificial
  Chemically synthesized
gagguuuggugguucagag

SEQ ID NO: 2578 - RNA, 19 nt, artificial
  Chemically synthesized
cagagaaggaaggcggaau

SEQ ID NO: 2579 - RNA, 19 nt, artificial
  Chemically synthesized
agcccauggauccuuucuc

SEQ ID NO: 2580 - RNA, 19 nt, artificial
  Chemically synthesized
gaaguucuuaaagcccaug

SEQ ID NO: 2581 - RNA, 19 nt, artificial
  Chemically synthesized
ucagcaacuuaagaacuuc

SEQ ID NO: 2582 - RNA, 19 nt, artificial
  Chemically synthesized
ugacucccugguauucuuu

SEQ ID NO: 2583 - RNA, 19 nt, artificial
  Chemically synthesized
uugacucccugguauucuu

SEQ ID NO: 2584 - RNA, 19 nt, artificial
  Chemically synthesized
ucagguuugagcagucacu

SEQ ID NO: 2585 - RNA, 19 nt, artificial
  Chemically synthesized
cgucagguuugagcaguca

SEQ ID NO: 2586 - RNA, 19 nt, artificial
  Chemically synthesized
ucgucagguuugagcaguc

SEQ ID NO: 2587 - RNA, 19 nt, artificial
  Chemically synthesized
cucgucagguuugagcagu

SEQ ID NO: 2588 - RNA, 19 nt, artificial
  Chemically synthesized
uacuuggucucgucagguu

SEQ ID NO: 2589 - RNA, 19 nt, artificial
  Chemically synthesized
ucucuuuguaucuucagua

SEQ ID NO: 2590 - RNA, 19 nt, artificial
  Chemically synthesized
ucugcauuuugucucuuug

SEQ ID NO: 2591 - RNA, 19 nt, artificial
  Chemically synthesized
gacgguaaucugcauuuug

SEQ ID NO: 2592 - RNA, 19 nt, artificial
  Chemically synthesized
gggacagcaauauuguugg

SEQ ID NO: 2593 - RNA, 19 nt, artificial
  Chemically synthesized
gaaaaucucauaagggcuu

SEQ ID NO: 2594 - RNA, 19 nt, artificial
  Chemically synthesized
uuguuaugcacccauccaa

SEQ ID NO: 2595 - RNA, 19 nt, artificial
  Chemically synthesized
ccagcagaagguugugauu

SEQ ID NO: 2596 - RNA, 19 nt, artificial
  Chemically synthesized
cugagucuuggaaguggau

SEQ ID NO: 2597 - RNA, 19 nt, artificial
  Chemically synthesized
cugcucucugcuugaauuu

SEQ ID NO: 2598 - RNA, 19 nt, artificial
  Chemically synthesized
gcggaauaaacuuauucau

SEQ ID NO: 2599 - RNA, 19 nt, artificial
  Chemically synthesized
agcagagguuuggugguuc

SEQ ID NO: 2600 - RNA, 19 nt, artificial
  Chemically synthesized
ugauagcagagguuuggug

SEQ ID NO: 2601 - RNA, 19 nt, artificial
  Chemically synthesized
cccauggauccuuucucag

SEQ ID NO: 2602 - RNA, 19 nt, artificial
  Chemically synthesized
cugaaguucuuaaagccca

SEQ ID NO: 2603 - RNA, 19 nt, artificial
  Chemically synthesized
uucagcaacuuaagaacuu

SEQ ID NO: 2604 - RNA, 19 nt, artificial
  Chemically synthesized
gacucccugguauucuuuu

SEQ ID NO: 2605 - RNA, 19 nt, artificial
  Chemically synthesized
cagguuugagcagucacuu

SEQ ID NO: 2606 - RNA, 19 nt, artificial
  Chemically synthesized
gucucuuuguaucuucagu

SEQ ID NO: 2607 - RNA, 19 nt, artificial
  Chemically synthesized
gacagcaauauuguugguc

SEQ ID NO: 2608 - RNA, 19 nt, artificial
  Chemically synthesized
ugggacagcaauauuguug

SEQ ID NO: 2609 - RNA, 19 nt, artificial
  Chemically synthesized
agaugugggaugaucguga

SEQ ID NO: 2610 - RNA, 19 nt, artificial
  Chemically synthesized
gcaauuggaucacaaccuc

SEQ ID NO: 2611 - RNA, 19 nt, artificial
  Chemically synthesized
cuacuacacaagaaaaauc

SEQ ID NO: 2612 - RNA, 19 nt, artificial
  Chemically synthesized
uccagugugaacagcaauu

SEQ ID NO: 2613 - RNA, 19 nt, artificial
  Chemically synthesized
gguuuucaguuuuguuucu

SEQ ID NO: 2614 - RNA, 19 nt, artificial
  Chemically synthesized
cuaaguagggugacuuuuu

SEQ ID NO: 2615 - RNA, 19 nt, artificial
  Chemically synthesized
uccaguguuaccaucuccu

SEQ ID NO: 2616 - RNA, 19 nt, artificial
  Chemically synthesized
ccugguauucuuuuuuuga

SEQ ID NO: 2617 - RNA, 19 nt, artificial
  Chemically synthesized
gcagcauuaaacuuugaca

SEQ ID NO: 2618 - RNA, 19 nt, artificial
  Chemically synthesized
gcuggacaaauguuccauu

SEQ ID NO: 2619 - RNA, 19 nt, artificial
  Chemically synthesized
ugauccugcuuccugugug

SEQ ID NO: 2620 - RNA, 19 nt, artificial
  Chemically synthesized
ccacagaagauuuccuaag

SEQ ID NO: 2621 - RNA, 19 nt, artificial
  Chemically synthesized
gggugguuaaccacugguu

SEQ ID NO: 2622 - RNA, 19 nt, artificial
  Chemically synthesized
gcuucagcaacuuaagaac

SEQ ID NO: 2623 - RNA, 19 nt, artificial
  Chemically synthesized
gaguuuucuacaauagcua

SEQ ID NO: 2624 - RNA, 19 nt, artificial
  Chemically synthesized
ugaguuuucuacaauagcu

SEQ ID NO: 2625 - RNA, 19 nt, artificial
  Chemically synthesized
gggacaaugaguuuucuac

SEQ ID NO: 2626 - RNA, 19 nt, artificial
  Chemically synthesized
aggcaaaguggguuuucua

SEQ ID NO: 2627 - RNA, 19 nt, artificial
  Chemically synthesized
gaacaggagauggaggaau

SEQ ID NO: 2628 - RNA, 19 nt, artificial
  Chemically synthesized
ccauuccugaaggaccucu

SEQ ID NO: 2629 - RNA, 19 nt, artificial
  Chemically synthesized
gacaaauguuccauuccug

SEQ ID NO: 2630 - RNA, 19 nt, artificial
  Chemically synthesized
gccuaucucaugaugagaa

SEQ ID NO: 2631 - RNA, 19 nt, artificial
  Chemically synthesized
gucugcucucugcuugaau

SEQ ID NO: 2632 - RNA, 19 nt, artificial
  Chemically synthesized
ccacugguuuucaguuuug

SEQ ID NO: 2633 - RNA, 19 nt, artificial
  Chemically synthesized
acuguagcaaggcuugaua

SEQ ID NO: 2634 - RNA, 19 nt, artificial
  Chemically synthesized
ucaugcagcauuaaacuuu

SEQ ID NO: 2635 - RNA, 19 nt, artificial
  Chemically synthesized
aaaaucucauaagggcuuu

SEQ ID NO: 2636 - RNA, 19 nt, artificial
  Chemically synthesized
ccauccaaaguuuuggaau

SEQ ID NO: 2637 - RNA, 19 nt, artificial
  Chemically synthesized
cccuaaguuugaagggcau

SEQ ID NO: 2638 - RNA, 19 nt, artificial
  Chemically synthesized
agccuugauucucauggua

SEQ ID NO: 2639 - RNA, 19 nt, artificial
  Chemically synthesized
caccaacaguguacauguu

SEQ ID NO: 2640 - RNA, 19 nt, artificial
  Chemically synthesized
cggaugggacagcaauauu

SEQ ID NO: 2641 - RNA, 19 nt, artificial
  Chemically synthesized
ggaacaggagauggaggaa

SEQ ID NO: 2642 - RNA, 19 nt, artificial
  Chemically synthesized
ccaucugguacaaauucca

SEQ ID NO: 2643 - RNA, 19 nt, artificial
  Chemically synthesized
cuaucucaugaugagaaaa

SEQ ID NO: 2644 - RNA, 19 nt, artificial
  Chemically synthesized
cugccuacauacagcuauu

SEQ ID NO: 2645 - RNA, 19 nt, artificial
  Chemically synthesized
uggaucacaaccucaccuu

SEQ ID NO: 2646 - RNA, 19 nt, artificial
  Chemically synthesized
ugcucucugcuugaauuuu

SEQ ID NO: 2647 - RNA, 19 nt, artificial
  Chemically synthesized
uuccuaaguagggugacuu

SEQ ID NO: 2648 - RNA, 19 nt, artificial
  Chemically synthesized
accacugguuuucaguuuu

SEQ ID NO: 2649 - RNA, 19 nt, artificial
  Chemically synthesized
ggauccuuucucagaaaaa

SEQ ID NO: 2650 - RNA, 19 nt, artificial
  Chemically synthesized
ugggacaaugaguuuucua

SEQ ID NO: 2651 - RNA, 19 nt, artificial
  Chemically synthesized
gugggacaaugaguuuucu

SEQ ID NO: 2652 - RNA, 19 nt, artificial
  Chemically synthesized
ccugguucaacaaccuguu

SEQ ID NO: 2653 - RNA, 19 nt, artificial
  Chemically synthesized
ccucuccagaauccggauu

SEQ ID NO: 2654 - RNA, 19 nt, artificial
  Chemically synthesized
cauccaaaguuuuggaauu

SEQ ID NO: 2655 - RNA, 19 nt, artificial
  Chemically synthesized
cugguauacucaccaccuu

SEQ ID NO: 2656 - RNA, 19 nt, artificial
  Chemically synthesized
uaaguagggugacuuuuua

SEQ ID NO: 2657 - RNA, 19 nt, artificial
  Chemically synthesized
ggauaagaaugugccucuc

SEQ ID NO: 2658 - RNA, 19 nt, artificial
  Chemically synthesized
ccagucuggauccuagaaa

SEQ ID NO: 2659 - RNA, 19 nt, artificial
  Chemically synthesized
cgauauuccagucuggauc

SEQ ID NO: 2660 - RNA, 19 nt, artificial
  Chemically synthesized
gagaccaaugugggacaau

SEQ ID NO: 2661 - RNA, 19 nt, artificial
  Chemically synthesized
cagcauuaaacuuugacaa

SEQ ID NO: 2662 - RNA, 19 nt, artificial
  Chemically synthesized
ggaagauuucuucuccauu

SEQ ID NO: 2663 - RNA, 19 nt, artificial
  Chemically synthesized
aggaagauuucuucuccau

SEQ ID NO: 2664 - RNA, 19 nt, artificial
  Chemically synthesized
ccaaaguuuuggaauugca

SEQ ID NO: 2665 - RNA, 19 nt, artificial
  Chemically synthesized
caaauguuccauuccugaa

SEQ ID NO: 2666 - RNA, 19 nt, artificial
  Chemically synthesized
cgcuggacaaauguuccau

SEQ ID NO: 2667 - RNA, 19 nt, artificial
  Chemically synthesized
uguguguuuuucacaucuu

SEQ ID NO: 2668 - RNA, 19 nt, artificial
  Chemically synthesized
ggaugccuuccugaaauau

SEQ ID NO: 2669 - RNA, 19 nt, artificial
  Chemically synthesized
uguuucugguuguuugguu

SEQ ID NO: 2670 - RNA, 19 nt, artificial
  Chemically synthesized
ccaacaguguacauguuua

SEQ ID NO: 2671 - RNA, 19 nt, artificial
  Chemically synthesized
uccuaaguagggugacuuu

SEQ ID NO: 2672 - RNA, 19 nt, artificial
  Chemically synthesized
uggauccuuucucagaaaa

SEQ ID NO: 2673 - RNA, 19 nt, artificial
  Chemically synthesized
ugaaguucuuaaaguucug

SEQ ID NO: 2674 - RNA, 19 nt, artificial
  Chemically synthesized
ucaccgauauuccagucug

SEQ ID NO: 2675 - RNA, 19 nt, artificial
  Chemically synthesized
ugcagcauuaaacuuugac

SEQ ID NO: 2676 - RNA, 19 nt, artificial
  Chemically synthesized
ugguacaaauuccagugug

SEQ ID NO: 2677 - RNA, 19 nt, artificial
  Chemically synthesized
cugguacaaauuccagugu

SEQ ID NO: 2678 - RNA, 19 nt, artificial
  Chemically synthesized
cgaacaacaauauucacca

SEQ ID NO: 2679 - RNA, 19 nt, artificial
  Chemically synthesized
acaguucuguccagagaag

SEQ ID NO: 2680 - RNA, 19 nt, artificial
  Chemically synthesized
cccauccaaaguuuuggaa

SEQ ID NO: 2681 - RNA, 19 nt, artificial
  Chemically synthesized
gcccuaaguuugaagggca

SEQ ID NO: 2682 - RNA, 19 nt, artificial
  Chemically synthesized
cgaaacacgacaguggagu

SEQ ID NO: 2683 - RNA, 19 nt, artificial
  Chemically synthesized
ggcuaaaucccauccaguc

SEQ ID NO: 2684 - RNA, 19 nt, artificial
  Chemically synthesized
guguguguuuuucacaucu

SEQ ID NO: 2685 - RNA, 19 nt, artificial
  Chemically synthesized
gguguguguuuuucacauc

SEQ ID NO: 2686 - RNA, 19 nt, artificial
  Chemically synthesized
ucacaucauugcacaccug

SEQ ID NO: 2687 - RNA, 19 nt, artificial
  Chemically synthesized
ucauuuugcagccgcacac

SEQ ID NO: 2688 - RNA, 19 nt, artificial
  Chemically synthesized
ggcaccugcucauuuugca

SEQ ID NO: 2689 - RNA, 19 nt, artificial
  Chemically synthesized
ccuaaguagggugacuuuu

SEQ ID NO: 2690 - RNA, 19 nt, artificial
  Chemically synthesized
aaccacugguuuucaguuu

SEQ ID NO: 2691 - RNA, 19 nt, artificial
  Chemically synthesized
aggcuugauagcagagguu

SEQ ID NO: 2692 - RNA, 19 nt, artificial
  Chemically synthesized
cuagaaagguucaauucua

SEQ ID NO: 2693 - RNA, 19 nt, artificial
  Chemically synthesized
acaggucugaaacagaaaa

SEQ ID NO: 2694 - RNA, 19 nt, artificial
  Chemically synthesized
uucuaaacuaccgucucuu

SEQ ID NO: 2695 - RNA, 19 nt, artificial
  Chemically synthesized
ggguuuucuaaacuaccgu

SEQ ID NO: 2696 - RNA, 19 nt, artificial
  Chemically synthesized
ccuguugacuucccuggaa

SEQ ID NO: 2697 - RNA, 19 nt, artificial
  Chemically synthesized
ugaggauguuuuccaguau

SEQ ID NO: 2698 - RNA, 19 nt, artificial
  Chemically synthesized
cucuccagaauccggauug

SEQ ID NO: 2699 - RNA, 19 nt, artificial
  Chemically synthesized
gcuuucgaacaacaauauu

SEQ ID NO: 2700 - RNA, 19 nt, artificial
  Chemically synthesized
uggacagaaaaucucauaa

SEQ ID NO: 2701 - RNA, 19 nt, artificial
  Chemically synthesized
cuggacagaaaaucucaua

SEQ ID NO: 2702 - RNA, 19 nt, artificial
  Chemically synthesized
uccauucauauccgagcag

SEQ ID NO: 2703 - RNA, 19 nt, artificial
  Chemically synthesized
cuccuggaauggcauccuu

SEQ ID NO: 2704 - RNA, 19 nt, artificial
  Chemically synthesized
gcacaguucuguccagaga

SEQ ID NO: 2705 - RNA, 19 nt, artificial
  Chemically synthesized
gcgcuggacaaauguucca

SEQ ID NO: 2706 - RNA, 19 nt, artificial
  Chemically synthesized
ucauccggaggaguuauuu

SEQ ID NO: 2707 - RNA, 19 nt, artificial
  Chemically synthesized
aaacacgacaguggaguau

SEQ ID NO: 2708 - RNA, 19 nt, artificial
  Chemically synthesized
accucaccuuccacaagcu

SEQ ID NO: 2709 - RNA, 19 nt, artificial
  Chemically synthesized
cuacacaagaaaaauccuu

SEQ ID NO: 2710 - RNA, 19 nt, artificial
  Chemically synthesized
agauuuccuaaguagggug

SEQ ID NO: 2711 - RNA, 19 nt, artificial
  Chemically synthesized
cuccugaguuuugguuugu

SEQ ID NO: 2712 - RNA, 19 nt, artificial
  Chemically synthesized
ugggugguuaaccacuggu

SEQ ID NO: 2713 - RNA, 19 nt, artificial
  Chemically synthesized
gauccuuucucagaaaaau

SEQ ID NO: 2714 - RNA, 19 nt, artificial
  Chemically synthesized
gaaguucuuaaaguucuga

SEQ ID NO: 2715 - RNA, 19 nt, artificial
  Chemically synthesized
ggauccuagaaagguucaa

SEQ ID NO: 2716 - RNA, 19 nt, artificial
  Chemically synthesized
ucuggauccuagaaagguu

SEQ ID NO: 2717 - RNA, 19 nt, artificial
  Chemically synthesized
gucaccgauauuccagucu

SEQ ID NO: 2718 - RNA, 19 nt, artificial
  Chemically synthesized
cgcaaaugcugucaccgau

SEQ ID NO: 2719 - RNA, 19 nt, artificial
  Chemically synthesized
agggcuuucgaacaacaau

SEQ ID NO: 2720 - RNA, 19 nt, artificial
  Chemically synthesized
ccauucauauccgagcagc

SEQ ID NO: 2721 - RNA, 19 nt, artificial
  Chemically synthesized
gaagauuucuucuccauuc

SEQ ID NO: 2722 - RNA, 19 nt, artificial
  Chemically synthesized
cuccagaggaagauuucuu

SEQ ID NO: 2723 - RNA, 19 nt, artificial
  Chemically synthesized
ggaauggcauccuuuuacu

SEQ ID NO: 2724 - RNA, 19 nt, artificial
  Chemically synthesized
uggaauugcagaugaacaa

SEQ ID NO: 2725 - RNA, 19 nt, artificial
  Chemically synthesized
cacaguucuguccagagaa

SEQ ID NO: 2726 - RNA, 19 nt, artificial
  Chemically synthesized
gcacccauccaaaguuuug

SEQ ID NO: 2727 - RNA, 19 nt, artificial
  Chemically synthesized
augcacccauccaaaguuu

SEQ ID NO: 2728 - RNA, 19 nt, artificial
  Chemically synthesized
gguugugauuaccaagguu

SEQ ID NO: 2729 - RNA, 19 nt, artificial
  Chemically synthesized
gugaaaggauccuccgguu

SEQ ID NO: 2730 - RNA, 19 nt, artificial
  Chemically synthesized
cuggacaaauguuccauuc

SEQ ID NO: 2731 - RNA, 19 nt, artificial
  Chemically synthesized
uucauccggaggaguuauu

SEQ ID NO: 2732 - RNA, 19 nt, artificial
  Chemically synthesized
gccuugauucucaugguaa

SEQ ID NO: 2733 - RNA, 19 nt, artificial
  Chemically synthesized
uggucucacuggagugauc

SEQ ID NO: 2734 - RNA, 19 nt, artificial
  Chemically synthesized
guguguuuuucacaucuua

SEQ ID NO: 2735 - RNA, 19 nt, artificial
  Chemically synthesized
cgcacacugagaaagcaau

SEQ ID NO: 2736 - RNA, 19 nt, artificial
  Chemically synthesized
ggcggaauaaacuuauuca

SEQ ID NO: 2737 - RNA, 19 nt, artificial
  Chemically synthesized
uacauguuuacugucacuu

SEQ ID NO: 2738 - RNA, 19 nt, artificial
  Chemically synthesized
ccauauaacaccaacagug

SEQ ID NO: 2739 - RNA, 19 nt, artificial
  Chemically synthesized
cccacagaagauuuccuaa

SEQ ID NO: 2740 - RNA, 19 nt, artificial
  Chemically synthesized
acuaaucccaggugauuuu

SEQ ID NO: 2741 - RNA, 19 nt, artificial
  Chemically synthesized
gacuguagcaaggcuugau

SEQ ID NO: 2742 - RNA, 19 nt, artificial
  Chemically synthesized
auccuagaaagguucaauu

SEQ ID NO: 2743 - RNA, 19 nt, artificial
  Chemically synthesized
cagucuggauccuagaaag

SEQ ID NO: 2744 - RNA, 19 nt, artificial
  Chemically synthesized
gaaucuucccuguugccua

SEQ ID NO: 2745 - RNA, 19 nt, artificial
  Chemically synthesized
ucccaggauugaaguggau

SEQ ID NO: 2746 - RNA, 19 nt, artificial
  Chemically synthesized
ccaauucccaggauugaag

SEQ ID NO: 2747 - RNA, 19 nt, artificial
  Chemically synthesized
ggacuggacagaaaaucuc

SEQ ID NO: 2748 - RNA, 19 nt, artificial
  Chemically synthesized
gaggaagauuucuucucca

SEQ ID NO: 2749 - RNA, 19 nt, artificial
  Chemically synthesized
ccagaggaagauuucuucu

SEQ ID NO: 2750 - RNA, 19 nt, artificial
  Chemically synthesized
cgcaagugugcagagucuu

SEQ ID NO: 2751 - RNA, 19 nt, artificial
  Chemically synthesized
gagcaugaaugagagucau

SEQ ID NO: 2752 - RNA, 19 nt, artificial
  Chemically synthesized
gguauacucaccaccuuuu

SEQ ID NO: 2753 - RNA, 19 nt, artificial
  Chemically synthesized
caugacaauagccuugauu

SEQ ID NO: 2754 - RNA, 19 nt, artificial
  Chemically synthesized
ucaugacaauagccuugau

SEQ ID NO: 2755 - RNA, 19 nt, artificial
  Chemically synthesized
ugaucaugacaauagccuu

SEQ ID NO: 2756 - RNA, 19 nt, artificial
  Chemically synthesized
gucucacuggagugaucau

SEQ ID NO: 2757 - RNA, 19 nt, artificial
  Chemically synthesized
gaguaugugacauucacca

SEQ ID NO: 2758 - RNA, 19 nt, artificial
  Chemically synthesized
cagccuaucucaugaugag

SEQ ID NO: 2759 - RNA, 19 nt, artificial
  Chemically synthesized
agcaauuggaucacaaccu

SEQ ID NO: 2760 - RNA, 19 nt, artificial
  Chemically synthesized
acuuauucauucccaggaa

SEQ ID NO: 2761 - RNA, 19 nt, artificial
  Chemically synthesized
ucaguuuuguuucugguug

SEQ ID NO: 2762 - RNA, 19 nt, artificial
  Chemically synthesized
uccugaguuuugguuugua

SEQ ID NO: 2763 - RNA, 19 nt, artificial
  Chemically synthesized
gaacuucugaaguucuuaa

SEQ ID NO: 2764 - RNA, 19 nt, artificial
  Chemically synthesized
gauccuagaaagguucaau

SEQ ID NO: 2765 - RNA, 19 nt, artificial
  Chemically synthesized
ccgauauuccagucuggau

SEQ ID NO: 2766 - RNA, 19 nt, artificial
  Chemically synthesized
agaccaaugugggacaaug

SEQ ID NO: 2767 - RNA, 19 nt, artificial
  Chemically synthesized
gaauccggauugcugaauc

SEQ ID NO: 2768 - RNA, 19 nt, artificial
  Chemically synthesized
ccaguaugaaguggcugug

SEQ ID NO: 2769 - RNA, 19 nt, artificial
  Chemically synthesized
uucaccaauucccaggauu

SEQ ID NO: 2770 - RNA, 19 nt, artificial
  Chemically synthesized
cagaggaagauuucuucuc

SEQ ID NO: 2771 - RNA, 19 nt, artificial
  Chemically synthesized
cuggaauggcauccuuuua

SEQ ID NO: 2772 - RNA, 19 nt, artificial
  Chemically synthesized
ccuggaauggcauccuuuu

SEQ ID NO: 2773 - RNA, 19 nt, artificial
  Chemically synthesized
ugcacccauccaaaguuuu

SEQ ID NO: 2774 - RNA, 19 nt, artificial
  Chemically synthesized
ugagagucauccucgcaag

SEQ ID NO: 2775 - RNA, 19 nt, artificial
  Chemically synthesized
cucaugguaacuucagcua

SEQ ID NO: 2776 - RNA, 19 nt, artificial
  Chemically synthesized
agguguguguuuuucacau

SEQ ID NO: 2777 - RNA, 19 nt, artificial
  Chemically synthesized
gccuacauacagcuauuca

SEQ ID NO: 2778 - RNA, 19 nt, artificial
  Chemically synthesized
ggccuauaugaucugccua

SEQ ID NO: 2779 - RNA, 19 nt, artificial
  Chemically synthesized
ucaccuuccacaagcuggu

SEQ ID NO: 2780 - RNA, 19 nt, artificial
  Chemically synthesized
ugcucauuuugcagccgca

SEQ ID NO: 2781 - RNA, 19 nt, artificial
  Chemically synthesized
gcaccugcucauuuugcag

SEQ ID NO: 2782 - RNA, 19 nt, artificial
  Chemically synthesized
ugggucaacauuggccugu

SEQ ID NO: 2783 - RNA, 19 nt, artificial
  Chemically synthesized
acaguguacauguuuacug

SEQ ID NO: 2784 - RNA, 19 nt, artificial
  Chemically synthesized
caucuccugaguuuugguu

SEQ ID NO: 2785 - RNA, 19 nt, artificial
  Chemically synthesized
cuaaucccaggugauuuua

SEQ ID NO: 2786 - RNA, 19 nt, artificial
  Chemically synthesized
ccaugacuguagcaaggcu

SEQ ID NO: 2787 - RNA, 19 nt, artificial
  Chemically synthesized
uggacagccaugacuguag

SEQ ID NO: 2788 - RNA, 19 nt, artificial
  Chemically synthesized
gaaugugccucucaagccu

SEQ ID NO: 2789 - RNA, 19 nt, artificial
  Chemically synthesized
ccucggacuuuggcaaaga

SEQ ID NO: 2790 - RNA, 19 nt, artificial
  Chemically synthesized
caggucugaaacagaaaac

SEQ ID NO: 2791 - RNA, 19 nt, artificial
  Chemically synthesized
gguucaacaaccuguugac

SEQ ID NO: 2792 - RNA, 19 nt, artificial
  Chemically synthesized
gcugguuggagcaggaauu

SEQ ID NO: 2793 - RNA, 19 nt, artificial
  Chemically synthesized
cugaaggaccucuccagaa

SEQ ID NO: 2794 - RNA, 19 nt, artificial
  Chemically synthesized
agaugaacaagcguggcuu

SEQ ID NO: 2795 - RNA, 19 nt, artificial
  Chemically synthesized
agguugugauuaccaaggu

SEQ ID NO: 2796 - RNA, 19 nt, artificial
  Chemically synthesized
gcagaagguugugauuacc

SEQ ID NO: 2797 - RNA, 19 nt, artificial
  Chemically synthesized
aaaggauccuccgguuuua

SEQ ID NO: 2798 - RNA, 19 nt, artificial
  Chemically synthesized
ucgcaagugugcagagucu

SEQ ID NO: 2799 - RNA, 19 nt, artificial
  Chemically synthesized
ccugcgcuggacaaauguu

SEQ ID NO: 2800 - RNA, 19 nt, artificial
  Chemically synthesized
ccuugauucucaugguaac

SEQ ID NO: 2801 - RNA, 19 nt, artificial
  Chemically synthesized
uggaguaugugacauucac

SEQ ID NO: 2802 - RNA, 19 nt, artificial
  Chemically synthesized
cuauagcagaagccgacag

SEQ ID NO: 2803 - RNA, 19 nt, artificial
  Chemically synthesized
caagaaaaauccuuggguc

SEQ ID NO: 2804 - RNA, 19 nt, artificial
  Chemically synthesized
acaagaaaaauccuugggu

SEQ ID NO: 2805 - RNA, 19 nt, artificial
  Chemically synthesized
uccuguuuguggaugccuu

SEQ ID NO: 2806 - RNA, 19 nt, artificial
  Chemically synthesized
caguguacauguuuacugu

SEQ ID NO: 2807 - RNA, 19 nt, artificial
  Chemically synthesized
caacuaaucccaggugauu

SEQ ID NO: 2808 - RNA, 19 nt, artificial
  Chemically synthesized
ggcuugauagcagagguuu

SEQ ID NO: 2809 - RNA, 19 nt, artificial
  Chemically synthesized
agcaaggcuugauagcaga

SEQ ID NO: 2810 - RNA, 19 nt, artificial
  Chemically synthesized
agccuugacucccugguau

SEQ ID NO: 2811 - RNA, 19 nt, artificial
  Chemically synthesized
gacaggucugaaacagaaa

SEQ ID NO: 2812 - RNA, 19 nt, artificial
  Chemically synthesized
ugacaggucugaaacagaa

SEQ ID NO: 2813 - RNA, 19 nt, artificial
  Chemically synthesized
ucuucccuguugccuagaa

SEQ ID NO: 2814 - RNA, 19 nt, artificial
  Chemically synthesized
gucaugcagcauuaaacuu

SEQ ID NO: 2815 - RNA, 19 nt, artificial
  Chemically synthesized
caggugccuuuuccugguu

SEQ ID NO: 2816 - RNA, 19 nt, artificial
  Chemically synthesized
ccggauugcugaaucuucc

SEQ ID NO: 2817 - RNA, 19 nt, artificial
  Chemically synthesized
gugcagaccacaaccucaa

SEQ ID NO: 2818 - RNA, 19 nt, artificial
  Chemically synthesized
uugcuucuaucuugaaauc

SEQ ID NO: 2819 - RNA, 19 nt, artificial
  Chemically synthesized
ccagaauccggauugcuga

SEQ ID NO: 2820 - RNA, 19 nt, artificial
  Chemically synthesized
gaggauguuuuccaguaug

SEQ ID NO: 2821 - RNA, 19 nt, artificial
  Chemically synthesized
acuggacagaaaaucucau

SEQ ID NO: 2822 - RNA, 19 nt, artificial
  Chemically synthesized
aagauuucuucuccauuca

SEQ ID NO: 2823 - RNA, 19 nt, artificial
  Chemically synthesized
agaggaagauuucuucucc

SEQ ID NO: 2824 - RNA, 19 nt, artificial
  Chemically synthesized
uccagaggaagauuucuuc

SEQ ID NO: 2825 - RNA, 19 nt, artificial
  Chemically synthesized
cucugcuccagaggaagau

SEQ ID NO: 2826 - RNA, 19 nt, artificial
  Chemically synthesized
uccuggaauggcauccuuu

SEQ ID NO: 2827 - RNA, 19 nt, artificial
  Chemically synthesized
ggaauugcagaugaacaag

SEQ ID NO: 2828 - RNA, 19 nt, artificial
  Chemically synthesized
auccaaaguuuuggaauug

SEQ ID NO: 2829 - RNA, 19 nt, artificial
  Chemically synthesized
gauccuugcaccggucauu

SEQ ID NO: 2830 - RNA, 19 nt, artificial
  Chemically synthesized
gagucauccucgcaagugu

SEQ ID NO: 2831 - RNA, 19 nt, artificial
  Chemically synthesized
ucacuggagugaucaugac

SEQ ID NO: 2832 - RNA, 19 nt, artificial
  Chemically synthesized
guagguguguguuuuucac

SEQ ID NO: 2833 - RNA, 19 nt, artificial
  Chemically synthesized
ugccuacauacagcuauuc

SEQ ID NO: 2834 - RNA, 19 nt, artificial
  Chemically synthesized
ccgcacacugagaaagcaa

SEQ ID NO: 2835 - RNA, 19 nt, artificial
  Chemically synthesized
gugguuaaccacugguuuu

SEQ ID NO: 2836 - RNA, 19 nt, artificial
  Chemically synthesized
ggugguuaaccacugguuu

SEQ ID NO: 2837 - RNA, 19 nt, artificial
  Chemically synthesized
gcaaggcuugauagcagag

SEQ ID NO: 2838 - RNA, 19 nt, artificial
  Chemically synthesized
cuuaagaacuucugaaguu

SEQ ID NO: 2839 - RNA, 19 nt, artificial
  Chemically synthesized
cguuacuugagcuucagca

SEQ ID NO: 2840 - RNA, 19 nt, artificial
  Chemically synthesized
gguucaauucuacuucaac

SEQ ID NO: 2841 - RNA, 19 nt, artificial
  Chemically synthesized
ccaaugugggacaaugagu

SEQ ID NO: 2842 - RNA, 19 nt, artificial
  Chemically synthesized
ucaacaaccuguugacuuc

SEQ ID NO: 2843 - RNA, 19 nt, artificial
  Chemically synthesized
ugguucaacaaccuguuga

SEQ ID NO: 2844 - RNA, 19 nt, artificial
  Chemically synthesized
gcugauagcacaguucugu

SEQ ID NO: 2845 - RNA, 19 nt, artificial
  Chemically synthesized
cugcuccagaggaagauuu

SEQ ID NO: 2846 - RNA, 19 nt, artificial
  Chemically synthesized
uccaaaguuuuggaauugc

SEQ ID NO: 2847 - RNA, 19 nt, artificial
  Chemically synthesized
ccaagguuguuaugcaccc

SEQ ID NO: 2848 - RNA, 19 nt, artificial
  Chemically synthesized
gcaugaaugagagucaucc

SEQ ID NO: 2849 - RNA, 19 nt, artificial
  Chemically synthesized
uggccuauaugaucugccu

SEQ ID NO: 2850 - RNA, 19 nt, artificial
  Chemically synthesized
gcuugaauuuuaacagcac

SEQ ID NO: 2851 - RNA, 19 nt, artificial
  Chemically synthesized
ugcuugaauuuuaacagca

SEQ ID NO: 2852 - RNA, 19 nt, artificial
  Chemically synthesized
cucugcuugaauuuuaaca

SEQ ID NO: 2853 - RNA, 19 nt, artificial
  Chemically synthesized
aggcggaauaaacuuauuc

SEQ ID NO: 2854 - RNA, 19 nt, artificial
  Chemically synthesized
cacugguuuucaguuuugu

SEQ ID NO: 2855 - RNA, 19 nt, artificial
  Chemically synthesized
auggauccuuucucagaaa

SEQ ID NO: 2856 - RNA, 19 nt, artificial
  Chemically synthesized
gaaacugggugguuaacca

SEQ ID NO: 2857 - RNA, 19 nt, artificial
  Chemically synthesized
uugagcuucagcaacuuaa

SEQ ID NO: 2858 - RNA, 19 nt, artificial
  Chemically synthesized
ccaccucuugacaauggga

SEQ ID NO: 2859 - RNA, 19 nt, artificial
  Chemically synthesized
cuggauccuagaaagguuc

SEQ ID NO: 2860 - RNA, 19 nt, artificial
  Chemically synthesized
ggacuuuggcaaagagccu

SEQ ID NO: 2861 - RNA, 19 nt, artificial
  Chemically synthesized
ugaaacagaaaaccuccuu

SEQ ID NO: 2862 - RNA, 19 nt, artificial
  Chemically synthesized
cugaaacagaaaaccuccu

SEQ ID NO: 2863 - RNA, 19 nt, artificial
  Chemically synthesized
cuguugacuucccuggaac

SEQ ID NO: 2864 - RNA, 19 nt, artificial
  Chemically synthesized
ccagugaggauguuuucca

SEQ ID NO: 2865 - RNA, 19 nt, artificial
  Chemically synthesized
cagccagugaggauguuuu

SEQ ID NO: 2866 - RNA, 19 nt, artificial
  Chemically synthesized
cacagccagugaggauguu

SEQ ID NO: 2867 - RNA, 19 nt, artificial
  Chemically synthesized
accaauucccaggauugaa

SEQ ID NO: 2868 - RNA, 19 nt, artificial
  Chemically synthesized
uggaauggcauccuuuuac

SEQ ID NO: 2869 - RNA, 19 nt, artificial
  Chemically synthesized
acccauccaaaguuuugga

SEQ ID NO: 2870 - RNA, 19 nt, artificial
  Chemically synthesized
caagguuguuaugcaccca

SEQ ID NO: 2871 - RNA, 19 nt, artificial
  Chemically synthesized
ugguauacucaccaccuuu

SEQ ID NO: 2872 - RNA, 19 nt, artificial
  Chemically synthesized
gugacauucaccagcguug

SEQ ID NO: 2873 - RNA, 19 nt, artificial
  Chemically synthesized
ucugccuacauacagcuau

SEQ ID NO: 2874 - RNA, 19 nt, artificial
  Chemically synthesized
cuuuugauauggucuuauc

SEQ ID NO: 2875 - RNA, 19 nt, artificial
  Chemically synthesized
ugguuaaccacugguuuuc

SEQ ID NO: 2876 - RNA, 19 nt, artificial
  Chemically synthesized
cauggauccuuucucagaa

SEQ ID NO: 2877 - RNA, 19 nt, artificial
  Chemically synthesized
agaacuucugaaguucuua

SEQ ID NO: 2878 - RNA, 19 nt, artificial
  Chemically synthesized
aagaacuucugaaguucuu

SEQ ID NO: 2879 - RNA, 19 nt, artificial
  Chemically synthesized
cuccaaaccaccucuugac

SEQ ID NO: 2880 - RNA, 19 nt, artificial
  Chemically synthesized
ugccuagaagggcuccaaa

SEQ ID NO: 2881 - RNA, 19 nt, artificial
  Chemically synthesized
cgugacaggucugaaacag

SEQ ID NO: 2882 - RNA, 19 nt, artificial
  Chemically synthesized
cugacaucgugacaggucu

SEQ ID NO: 2883 - RNA, 19 nt, artificial
  Chemically synthesized
ugacuucccuggaacagga

SEQ ID NO: 2884 - RNA, 19 nt, artificial
  Chemically synthesized
uccaguaugaaguggcugu

SEQ ID NO: 2885 - RNA, 19 nt, artificial
  Chemically synthesized
cagugaggauguuuuccag

SEQ ID NO: 2886 - RNA, 19 nt, artificial
  Chemically synthesized
agguuguuaugcacccauc

SEQ ID NO: 2887 - RNA, 19 nt, artificial
  Chemically synthesized
aagguuguuaugcacccau

SEQ ID NO: 2888 - RNA, 19 nt, artificial
  Chemically synthesized
cccagcagaagguugugau

SEQ ID NO: 2889 - RNA, 19 nt, artificial
  Chemically synthesized
ccuugcaccggucauucuu

SEQ ID NO: 2890 - RNA, 19 nt, artificial
  Chemically synthesized
gugaucaugacaauagccu

SEQ ID NO: 2891 - RNA, 19 nt, artificial
  Chemically synthesized
cuggucucacuggagugau

SEQ ID NO: 2892 - RNA, 19 nt, artificial
  Chemically synthesized
ugcuuccugugugucgcaa

SEQ ID NO: 2893 - RNA, 19 nt, artificial
  Chemically synthesized
cugcuugaauuuuaacagc

SEQ ID NO: 2894 - RNA, 19 nt, artificial
  Chemically synthesized
ccaucuccugaguuuuggu

SEQ ID NO: 2895 - RNA, 19 nt, artificial
  Chemically synthesized
caugacuguagcaaggcuu

SEQ ID NO: 2896 - RNA, 19 nt, artificial
  Chemically synthesized
acuugagcuucagcaacuu

SEQ ID NO: 2897 - RNA, 19 nt, artificial
  Chemically synthesized
ccuagaaagguucaauucu

SEQ ID NO: 2898 - RNA, 19 nt, artificial
  Chemically synthesized
uccagucuggauccuagaa

SEQ ID NO: 2899 - RNA, 19 nt, artificial
  Chemically synthesized
aggugccuuuuccugguuc

SEQ ID NO: 2900 - RNA, 19 nt, artificial
  Chemically synthesized
acaggugccuuuuccuggu

SEQ ID NO: 2901 - RNA, 19 nt, artificial
  Chemically synthesized
ggauugaaguggauggucc

SEQ ID NO: 2902 - RNA, 19 nt, artificial
  Chemically synthesized
uggaaguggauccuugcac

SEQ ID NO: 2903 - RNA, 19 nt, artificial
  Chemically synthesized
ugacaauagccuugauucu

SEQ ID NO: 2904 - RNA, 19 nt, artificial
  Chemically synthesized
guucuuggcuaaaucccau

SEQ ID NO: 2905 - RNA, 19 nt, artificial
  Chemically synthesized
gucuuauccagugugaaca

SEQ ID NO: 2906 - RNA, 19 nt, artificial
  Chemically synthesized
uggucuuauccagugugaa

SEQ ID NO: 2907 - RNA, 19 nt, artificial
  Chemically synthesized
ccaguguuaccaucuccug

SEQ ID NO: 2908 - RNA, 19 nt, artificial
  Chemically synthesized
agcuucagcaacuuaagaa

SEQ ID NO: 2909 - RNA, 19 nt, artificial
  Chemically synthesized
ccuccuuugggagaccaau

SEQ ID NO: 2910 - RNA, 19 nt, artificial
  Chemically synthesized
acagccagugaggauguuu

SEQ ID NO: 2911 - RNA, 19 nt, artificial
  Chemically synthesized
uccuuggcuuagggauuca

SEQ ID NO: 2912 - RNA, 19 nt, artificial
  Chemically synthesized
cacaagcugguggccuaua

SEQ ID NO: 2913 - RNA, 19 nt, artificial
  Chemically synthesized
accaacaguguacauguuu

SEQ ID NO: 2914 - RNA, 19 nt, artificial
  Chemically synthesized
ugccucucaagccuugacu

SEQ ID NO: 2915 - RNA, 19 nt, artificial
  Chemically synthesized
accuccuuugggagaccaa

SEQ ID NO: 2916 - RNA, 19 nt, artificial
  Chemically synthesized
cagaaaaccuccuuuggga

SEQ ID NO: 2917 - RNA, 19 nt, artificial
  Chemically synthesized
accggaugggacagcaaua

SEQ ID NO: 2918 - RNA, 19 nt, artificial
  Chemically synthesized
ccuuggcuuagggauucac

SEQ ID NO: 2919 - RNA, 19 nt, artificial
  Chemically synthesized
cugguuuucaguuuuguuu

SEQ ID NO: 2920 - RNA, 19 nt, artificial
  Chemically synthesized
caacaguguacauguuuac

SEQ ID NO: 2921 - RNA, 19 nt, artificial
  Chemically synthesized
aggugauuuuaucaauucc

SEQ ID NO: 2922 - RNA, 19 nt, artificial
  Chemically synthesized
uaaagcccauggauccuuu

SEQ ID NO: 2923 - RNA, 19 nt, artificial
  Chemically synthesized
gucugaaacagaaaaccuc

SEQ ID NO: 2924 - RNA, 19 nt, artificial
  Chemically synthesized
gucuuggaaguggauccuu

SEQ ID NO: 2925 - RNA, 19 nt, artificial
  Chemically synthesized
ggauguuuuccaguaugaa

SEQ ID NO: 2926 - RNA, 19 nt, artificial
  Chemically synthesized
uccuuugggagaccaaugu

SEQ ID NO: 2927 - RNA, 19 nt, artificial
  Chemically synthesized
acagccaugacuguagcaa

SEQ ID NO: 2928 - RNA, 19 nt, artificial
  Chemically synthesized
agggagacaggugccuuuu

SEQ ID NO: 2929 - RNA, 19 nt, artificial
  Chemically synthesized
aggauguuuuccaguauga

SEQ ID NO: 2930 - RNA, 19 nt, artificial
  Chemically synthesized
gguaacuucagcuacugag

SEQ ID NO: 2931 - RNA, 19 nt, artificial
  Chemically synthesized
uuaaaauucaagcagagag

SEQ ID NO: 2932 - RNA, 19 nt, artificial
  Chemically synthesized
aagacuucaaaauaacucc

SEQ ID NO: 2933 - RNA, 19 nt, artificial
  Chemically synthesized
aacaggaaaacauucagcc

SEQ ID NO: 2934 - RNA, 19 nt, artificial
  Chemically synthesized
uuuagaaaacccacuuugc

SEQ ID NO: 2935 - RNA, 19 nt, artificial
  Chemically synthesized
uuuugagguuguggucugc

SEQ ID NO: 2936 - RNA, 19 nt, artificial
  Chemically synthesized
cuuaugagauuuucugucc

SEQ ID NO: 2937 - RNA, 19 nt, artificial
  Chemically synthesized
uucaaaauaacuccuccgg

SEQ ID NO: 2938 - RNA, 19 nt, artificial
  Chemically synthesized
aaagugacaguaaacaugu

SEQ ID NO: 2939 - RNA, 19 nt, artificial
  Chemically synthesized
auuuaaaaagucacccuac

SEQ ID NO: 2940 - RNA, 19 nt, artificial
  Chemically synthesized
aauugauaaaaucaccugg

SEQ ID NO: 2941 - RNA, 19 nt, artificial
  Chemically synthesized
acauucuuauccuaaagug

SEQ ID NO: 2942 - RNA, 19 nt, artificial
  Chemically synthesized
auucuuauccuaaagugac

SEQ ID NO: 2943 - RNA, 19 nt, artificial
  Chemically synthesized
uucuuauccuaaagugacu

SEQ ID NO: 2944 - RNA, 19 nt, artificial
  Chemically synthesized
uugaaguagaauugaaccu

SEQ ID NO: 2945 - RNA, 19 nt, artificial
  Chemically synthesized
gucaaaguaaaaggaugcc

SEQ ID NO: 2946 - RNA, 19 nt, artificial
  Chemically synthesized
acaucucaaaagacucugc

SEQ ID NO: 2947 - RNA, 19 nt, artificial
  Chemically synthesized
aucaugagauaggcuggag

SEQ ID NO: 2948 - RNA, 19 nt, artificial
  Chemically synthesized
ucuuauccuaaagugacug

SEQ ID NO: 2949 - RNA, 19 nt, artificial
  Chemically synthesized
guuuagaaaacccacuuug

SEQ ID NO: 2950 - RNA, 19 nt, artificial
  Chemically synthesized
cagauauaaagaaugaccg

SEQ ID NO: 2951 - RNA, 19 nt, artificial
  Chemically synthesized
gacaauuccaccaaugccg

SEQ ID NO: 2952 - RNA, 19 nt, artificial
  Chemically synthesized
auagaagauaaaaaggugg

SEQ ID NO: 2953 - RNA, 19 nt, artificial
  Chemically synthesized
acuucaaaauaacuccucc

SEQ ID NO: 2954 - RNA, 19 nt, artificial
  Chemically synthesized
aaugucacauacuccacug

SEQ ID NO: 2955 - RNA, 19 nt, artificial
  Chemically synthesized
gucaaaguuaaacaggugu

SEQ ID NO: 2956 - RNA, 19 nt, artificial
  Chemically synthesized
ucaaaguuaaacaggugug

SEQ ID NO: 2957 - RNA, 19 nt, artificial
  Chemically synthesized
gugcaaugaugugaauagc

SEQ ID NO: 2958 - RNA, 19 nt, artificial
  Chemically synthesized
gaaggugagguugugaucc

SEQ ID NO: 2959 - RNA, 19 nt, artificial
  Chemically synthesized
aagaccauaucaaaaguga

SEQ ID NO: 2960 - RNA, 19 nt, artificial
  Chemically synthesized
uuuaaaaagucacccuacu

SEQ ID NO: 2961 - RNA, 19 nt, artificial
  Chemically synthesized
auugauaaaaucaccuggg

SEQ ID NO: 2962 - RNA, 19 nt, artificial
  Chemically synthesized
ccuugucaaaguuuaaugc

SEQ ID NO: 2963 - RNA, 19 nt, artificial
  Chemically synthesized
uaguuuagaaaacccacuu

SEQ ID NO: 2964 - RNA, 19 nt, artificial
  Chemically synthesized
ugcucggauaugaauggag

SEQ ID NO: 2965 - RNA, 19 nt, artificial
  Chemically synthesized
augaauggagaagaaaucu

SEQ ID NO: 2966 - RNA, 19 nt, artificial
  Chemically synthesized
ucaaaguaaaaggaugcca

SEQ ID NO: 2967 - RNA, 19 nt, artificial
  Chemically synthesized
auuccaggagagagauuga

SEQ ID NO: 2968 - RNA, 19 nt, artificial
  Chemically synthesized
aaaagacucugcacacuug

SEQ ID NO: 2969 - RNA, 19 nt, artificial
  Chemically synthesized
augucacauacuccacugu

SEQ ID NO: 2970 - RNA, 19 nt, artificial
  Chemically synthesized
ucaucaugagauaggcugg

SEQ ID NO: 2971 - RNA, 19 nt, artificial
  Chemically synthesized
ugugcaaugaugugaauag

SEQ ID NO: 2972 - RNA, 19 nt, artificial
  Chemically synthesized
aaugaugugaauagcugua

SEQ ID NO: 2973 - RNA, 19 nt, artificial
  Chemically synthesized
uaagaccauaucaaaagug

SEQ ID NO: 2974 - RNA, 19 nt, artificial
  Chemically synthesized
uuacaaaccaaaacucagg

SEQ ID NO: 2975 - RNA, 19 nt, artificial
  Chemically synthesized
agaggcacauucuuauccu

SEQ ID NO: 2976 - RNA, 19 nt, artificial
  Chemically synthesized
auccuaaagugacugcuca

SEQ ID NO: 2977 - RNA, 19 nt, artificial
  Chemically synthesized
ggccacauaagaaaacucc

SEQ ID NO: 2978 - RNA, 19 nt, artificial
  Chemically synthesized
uuuuguuuugagguugugg

SEQ ID NO: 2979 - RNA, 19 nt, artificial
  Chemically synthesized
uuuguuuugagguuguggu

SEQ ID NO: 2980 - RNA, 19 nt, artificial
  Chemically synthesized
auucagcaauccggauucu

SEQ ID NO: 2981 - RNA, 19 nt, artificial
  Chemically synthesized
cagaggucaaaguaaaagg

SEQ ID NO: 2982 - RNA, 19 nt, artificial
  Chemically synthesized
auaacaaccuugguaauca

SEQ ID NO: 2983 - RNA, 19 nt, artificial
  Chemically synthesized
agauauaaagaaugaccgg

SEQ ID NO: 2984 - RNA, 19 nt, artificial
  Chemically synthesized
gauauaaagaaugaccggu

SEQ ID NO: 2985 - RNA, 19 nt, artificial
  Chemically synthesized
cuucaaaauaacuccuccg

SEQ ID NO: 2986 - RNA, 19 nt, artificial
  Chemically synthesized
augagaaucaaggcuauug

SEQ ID NO: 2987 - RNA, 19 nt, artificial
  Chemically synthesized
agcagucaaaguuaaacag

SEQ ID NO: 2988 - RNA, 19 nt, artificial
  Chemically synthesized
agucaaaguuaaacaggug

SEQ ID NO: 2989 - RNA, 19 nt, artificial
  Chemically synthesized
agcgugcuguuaaaauuca

SEQ ID NO: 2990 - RNA, 19 nt, artificial
  Chemically synthesized
guguaguaguauuugucgg

SEQ ID NO: 2991 - RNA, 19 nt, artificial
  Chemically synthesized
uucucauauuucaggaagg

SEQ ID NO: 2992 - RNA, 19 nt, artificial
  Chemically synthesized
ucucauauuucaggaaggc

SEQ ID NO: 2993 - RNA, 19 nt, artificial
  Chemically synthesized
uguccagaaagauuuacag

SEQ ID NO: 2994 - RNA, 19 nt, artificial
  Chemically synthesized
aguaacgaaguugaaugca

SEQ ID NO: 2995 - RNA, 19 nt, artificial
  Chemically synthesized
auacaaagagacaaaaugc

SEQ ID NO: 2996 - RNA, 19 nt, artificial
  Chemically synthesized
auaagaaaacucccacuac

SEQ ID NO: 2997 - RNA, 19 nt, artificial
  Chemically synthesized
acucccacuacagacuugg

SEQ ID NO: 2998 - RNA, 19 nt, artificial
  Chemically synthesized
auauugcugucccauccgg

SEQ ID NO: 2999 - RNA, 19 nt, artificial
  Chemically synthesized
aguuuagaaaacccacuuu

SEQ ID NO: 3000 - RNA, 19 nt, artificial
  Chemically synthesized
ucugcacacuggaauuugu

SEQ ID NO: 3001 - RNA, 19 nt, artificial
  Chemically synthesized
gcacacuggaauuuguacc

SEQ ID NO: 3002 - RNA, 19 nt, artificial
  Chemically synthesized
auggauuucaagauagaag

SEQ ID NO: 3003 - RNA, 19 nt, artificial
  Chemically synthesized
ggucaaaguaaaaggaugc

SEQ ID NO: 3004 - RNA, 19 nt, artificial
  Chemically synthesized
cacaucucaaaagacucug

SEQ ID NO: 3005 - RNA, 19 nt, artificial
  Chemically synthesized
gaagacuucaaaauaacuc

SEQ ID NO: 3006 - RNA, 19 nt, artificial
  Chemically synthesized
gacuucaaaauaacuccuc

SEQ ID NO: 3007 - RNA, 19 nt, artificial
  Chemically synthesized
gucacauacuccacugucg

SEQ ID NO: 3008 - RNA, 19 nt, artificial
  Chemically synthesized
caucaugagauaggcugga

SEQ ID NO: 3009 - RNA, 19 nt, artificial
  Chemically synthesized
cagucaaaguuaaacaggu

SEQ ID NO: 3010 - RNA, 19 nt, artificial
  Chemically synthesized
aaaguuaaacaggugugca

SEQ ID NO: 3011 - RNA, 19 nt, artificial
  Chemically synthesized
aacaggugugcaaugaugu

SEQ ID NO: 3012 - RNA, 19 nt, artificial
  Chemically synthesized
guaggcagaucauauaggc

SEQ ID NO: 3013 - RNA, 19 nt, artificial
  Chemically synthesized
guaguaguauuugucggcc

SEQ ID NO: 3014 - RNA, 19 nt, artificial
  Chemically synthesized
acaaacaggaaaacauuca

SEQ ID NO: 3015 - RNA, 19 nt, artificial
  Chemically synthesized
caaacaggaaaacauucag

SEQ ID NO: 3016 - RNA, 19 nt, artificial
  Chemically synthesized
acaaccagaaacaaaacug

SEQ ID NO: 3017 - RNA, 19 nt, artificial
  Chemically synthesized
ucaaaagugacaguaaaca

SEQ ID NO: 3018 - RNA, 19 nt, artificial
  Chemically synthesized
uucagaaguucuuaaguug

SEQ ID NO: 3019 - RNA, 19 nt, artificial
  Chemically synthesized
agcucaaguaacgaaguug

SEQ ID NO: 3020 - RNA, 19 nt, artificial
  Chemically synthesized
acgaaguugaaugcaauca

SEQ ID NO: 3021 - RNA, 19 nt, artificial
  Chemically synthesized
aaaaaaagaauaccaggga

SEQ ID NO: 3022 - RNA, 19 nt, artificial
  Chemically synthesized
uacaaagagacaaaaugca

SEQ ID NO: 3023 - RNA, 19 nt, artificial
  Chemically synthesized
cacauaagaaaacucccac

SEQ ID NO: 3024 - RNA, 19 nt, artificial
  Chemically synthesized
aaaacucccacuacagacu

SEQ ID NO: 3025 - RNA, 19 nt, artificial
  Chemically synthesized
aacucccacuacagacuug

SEQ ID NO: 3026 - RNA, 19 nt, artificial
  Chemically synthesized
uguagaaaacucauugucc

SEQ ID NO: 3027 - RNA, 19 nt, artificial
  Chemically synthesized
augaccaacaauauugcug

SEQ ID NO: 3028 - RNA, 19 nt, artificial
  Chemically synthesized
uuuuuguuuugagguugug

SEQ ID NO: 3029 - RNA, 19 nt, artificial
  Chemically synthesized
uuguuuugagguugugguc

SEQ ID NO: 3030 - RNA, 19 nt, artificial
  Chemically synthesized
cagauggauuucaagauag

SEQ ID NO: 3031 - RNA, 19 nt, artificial
  Chemically synthesized
ucaagauagaagcaaaggg

SEQ ID NO: 3032 - RNA, 19 nt, artificial
  Chemically synthesized
agaggucaaaguaaaagga

SEQ ID NO: 3033 - RNA, 19 nt, artificial
  Chemically synthesized
cacagauauaaagaaugac

SEQ ID NO: 3034 - RNA, 19 nt, artificial
  Chemically synthesized
ugacucucauucaugcucu

SEQ ID NO: 3035 - RNA, 19 nt, artificial
  Chemically synthesized
augccgugaaucccuaagc

SEQ ID NO: 3036 - RNA, 19 nt, artificial
  Chemically synthesized
uagaagauaaaaagguggu

SEQ ID NO: 3037 - RNA, 19 nt, artificial
  Chemically synthesized
agacuucaaaauaacuccu

SEQ ID NO: 3038 - RNA, 19 nt, artificial
  Chemically synthesized
gaaguuaccaugagaauca

SEQ ID NO: 3039 - RNA, 19 nt, artificial
  Chemically synthesized
auugucaugaucacuccag

SEQ ID NO: 3040 - RNA, 19 nt, artificial
  Chemically synthesized
gaaaaacacacaccuaccc

SEQ ID NO: 3041 - RNA, 19 nt, artificial
  Chemically synthesized
gugaauagcuguauguagg

SEQ ID NO: 3042 - RNA, 19 nt, artificial
  Chemically synthesized
ucggccuucucauauuuca

SEQ ID NO: 3043 - RNA, 19 nt, artificial
  Chemically synthesized
auaaguuuauuccgccuuc

SEQ ID NO: 3044 - RNA, 19 nt, artificial
  Chemically synthesized
aacaaccagaaacaaaacu

SEQ ID NO: 3045 - RNA, 19 nt, artificial
  Chemically synthesized
accauaucaaaagugacag

SEQ ID NO: 3046 - RNA, 19 nt, artificial
  Chemically synthesized
acuguugguguuauauggg

SEQ ID NO: 3047 - RNA, 19 nt, artificial
  Chemically synthesized
aucaccugggauuaguugu

SEQ ID NO: 3048 - RNA, 19 nt, artificial
  Chemically synthesized
gauuaguuguauaacucug

SEQ ID NO: 3049 - RNA, 19 nt, artificial
  Chemically synthesized
uaguuguauaacucugaac

SEQ ID NO: 3050 - RNA, 19 nt, artificial
  Chemically synthesized
aguuguauaacucugaacc

SEQ ID NO: 3051 - RNA, 19 nt, artificial
  Chemically synthesized
uuguauaacucugaaccac

SEQ ID NO: 3052 - RNA, 19 nt, artificial
  Chemically synthesized
uuaaccacccaguuuccca

SEQ ID NO: 3053 - RNA, 19 nt, artificial
  Chemically synthesized
acgagaccaaguaaauuac

SEQ ID NO: 3054 - RNA, 19 nt, artificial
  Chemically synthesized
agaccaaguaaauuacuga

SEQ ID NO: 3055 - RNA, 19 nt, artificial
  Chemically synthesized
aaaugcagauuaccguccu

SEQ ID NO: 3056 - RNA, 19 nt, artificial
  Chemically synthesized
cuugucaaaguuuaaugcu

SEQ ID NO: 3057 - RNA, 19 nt, artificial
  Chemically synthesized
uguugaaccaggaaaaggc

SEQ ID NO: 3058 - RNA, 19 nt, artificial
  Chemically synthesized
gaucuuuuuuguuuugagg

SEQ ID NO: 3059 - RNA, 19 nt, artificial
  Chemically synthesized
guuuugagguuguggucug

SEQ ID NO: 3060 - RNA, 19 nt, artificial
  Chemically synthesized
guaaucacaaccuucugcu

SEQ ID NO: 3061 - RNA, 19 nt, artificial
  Chemically synthesized
caucucaaaagacucugca

SEQ ID NO: 3062 - RNA, 19 nt, artificial
  Chemically synthesized
acucucauucaugcucucc

SEQ ID NO: 3063 - RNA, 19 nt, artificial
  Chemically synthesized
cugugagccuuuaagaugu

SEQ ID NO: 3064 - RNA, 19 nt, artificial
  Chemically synthesized
auguaggcagaucauauag

SEQ ID NO: 3065 - RNA, 19 nt, artificial
  Chemically synthesized
guugacccaaggauuuuuc

SEQ ID NO: 3066 - RNA, 19 nt, artificial
  Chemically synthesized
uaguaguauuugucggccu

SEQ ID NO: 3067 - RNA, 19 nt, artificial
  Chemically synthesized
acaggaaaacauucagccc

SEQ ID NO: 3068 - RNA, 19 nt, artificial
  Chemically synthesized
uugauaaaaucaccuggga

SEQ ID NO: 3069 - RNA, 19 nt, artificial
  Chemically synthesized
cuguccagaaagauuuaca

SEQ ID NO: 3070 - RNA, 19 nt, artificial
  Chemically synthesized
caaaaaaagaauaccaggg

SEQ ID NO: 3071 - RNA, 19 nt, artificial
  Chemically synthesized
aaaaaagaauaccagggag

SEQ ID NO: 3072 - RNA, 19 nt, artificial
  Chemically synthesized
aauaccagggagucaaggc

SEQ ID NO: 3073 - RNA, 19 nt, artificial
  Chemically synthesized
gagaccaaguaaauuacug

SEQ ID NO: 3074 - RNA, 19 nt, artificial
  Chemically synthesized
uuacugaagauacaaagag

SEQ ID NO: 3075 - RNA, 19 nt, artificial
  Chemically synthesized
uucccauugucaagaggug

SEQ ID NO: 3076 - RNA, 19 nt, artificial
  Chemically synthesized
ugaaguagaauugaaccuu

SEQ ID NO: 3077 - RNA, 19 nt, artificial
  Chemically synthesized
acauaagaaaacucccacu

SEQ ID NO: 3078 - RNA, 19 nt, artificial
  Chemically synthesized
uaagaaaacucccacuaca

SEQ ID NO: 3079 - RNA, 19 nt, artificial
  Chemically synthesized
aagaaaacucccacuacag

SEQ ID NO: 3080 - RNA, 19 nt, artificial
  Chemically synthesized
guuuaaugcugcaugacca

SEQ ID NO: 3081 - RNA, 19 nt, artificial
  Chemically synthesized
gacgguaguuuagaaaacc

SEQ ID NO: 3082 - RNA, 19 nt, artificial
  Chemically synthesized
acuuugccuaauuccucca

SEQ ID NO: 3083 - RNA, 19 nt, artificial
  Chemically synthesized
agggaagauucagcaaucc

SEQ ID NO: 3084 - RNA, 19 nt, artificial
  Chemically synthesized
uuucaagauagaagcaaag

SEQ ID NO: 3085 - RNA, 19 nt, artificial
  Chemically synthesized
uucaagauagaagcaaagg

SEQ ID NO: 3086 - RNA, 19 nt, artificial
  Chemically synthesized
auaaagaaugaccggugca

SEQ ID NO: 3087 - RNA, 19 nt, artificial
  Chemically synthesized
aucucaaaagacucugcac

SEQ ID NO: 3088 - RNA, 19 nt, artificial
  Chemically synthesized
cucucauucaugcucuccu

SEQ ID NO: 3089 - RNA, 19 nt, artificial
  Chemically synthesized
aagauaaaaagguggugag

SEQ ID NO: 3090 - RNA, 19 nt, artificial
  Chemically synthesized
aaaaagguggugaguauac

SEQ ID NO: 3091 - RNA, 19 nt, artificial
  Chemically synthesized
ugugagccuuuaagaugug

SEQ ID NO: 3092 - RNA, 19 nt, artificial
  Chemically synthesized
gugagccuuuaagauguga

SEQ ID NO: 3093 - RNA, 19 nt, artificial
  Chemically synthesized
ugaaugucacauacuccac

SEQ ID NO: 3094 - RNA, 19 nt, artificial
  Chemically synthesized
gauaggcuggagagaaugg

SEQ ID NO: 3095 - RNA, 19 nt, artificial
  Chemically synthesized
uguaggcagaucauauagg

SEQ ID NO: 3096 - RNA, 19 nt, artificial
  Chemically synthesized
cagauugcgacacacagga

SEQ ID NO: 3097 - RNA, 19 nt, artificial
  Chemically synthesized
uugacccaaggauuuuucu

SEQ ID NO: 3098 - RNA, 19 nt, artificial
  Chemically synthesized
caggaaaacauucagcccu

SEQ ID NO: 3099 - RNA, 19 nt, artificial
  Chemically synthesized
guucucgguaauuuuguuu

SEQ ID NO: 3100 - RNA, 19 nt, artificial
  Chemically synthesized
gacaaaagauuacaaacca

SEQ ID NO: 3101 - RNA, 19 nt, artificial
  Chemically synthesized
agauuacaaaccaaaacuc

SEQ ID NO: 3102 - RNA, 19 nt, artificial
  Chemically synthesized
gaauugauaaaaucaccug

SEQ ID NO: 3103 - RNA, 19 nt, artificial
  Chemically synthesized
augggcuuuaagaacuuca

SEQ ID NO: 3104 - RNA, 19 nt, artificial
  Chemically synthesized
guuaaccacccaguuuccc

SEQ ID NO: 3105 - RNA, 19 nt, artificial
  Chemically synthesized
ucagaaguucuuaaguugc

SEQ ID NO: 3106 - RNA, 19 nt, artificial
  Chemically synthesized
aagcucaaguaacgaaguu

SEQ ID NO: 3107 - RNA, 19 nt, artificial
  Chemically synthesized
aguuucccauugucaagag

SEQ ID NO: 3108 - RNA, 19 nt, artificial
  Chemically synthesized
acaaaaugcagauuaccgu

SEQ ID NO: 3109 - RNA, 19 nt, artificial
  Chemically synthesized
cucuuugccaaaguccgag

SEQ ID NO: 3110 - RNA, 19 nt, artificial
  Chemically synthesized
ugcaugaccaacaauauug

SEQ ID NO: 3111 - RNA, 19 nt, artificial
  Chemically synthesized
gcaugaccaacaauauugc

SEQ ID NO: 3112 - RNA, 19 nt, artificial
  Chemically synthesized
ugaccaacaauauugcugu

SEQ ID NO: 3113 - RNA, 19 nt, artificial
  Chemically synthesized
aacccacuuugccuaauuc

SEQ ID NO: 3114 - RNA, 19 nt, artificial
  Chemically synthesized
uugccuaauuccuccaucu

SEQ ID NO: 3115 - RNA, 19 nt, artificial
  Chemically synthesized
uaauuccuccaucuccugu

SEQ ID NO: 3116 - RNA, 19 nt, artificial
  Chemically synthesized
cuuuuuuguuuugagguug

SEQ ID NO: 3117 - RNA, 19 nt, artificial
  Chemically synthesized
ccauccacuucaauccugg

SEQ ID NO: 3118 - RNA, 19 nt, artificial
  Chemically synthesized
ccuuaugagauuuucuguc

SEQ ID NO: 3119 - RNA, 19 nt, artificial
  Chemically synthesized
aaguaaaaggaugccauuc

SEQ ID NO: 3120 - RNA, 19 nt, artificial
  Chemically synthesized
ucaucugcaauuccaaaac

SEQ ID NO: 3121 - RNA, 19 nt, artificial
  Chemically synthesized
aucugcaauuccaaaacuu

SEQ ID NO: 3122 - RNA, 19 nt, artificial
  Chemically synthesized
augcucuccucuguuugac

SEQ ID NO: 3123 - RNA, 19 nt, artificial
  Chemically synthesized
aaugccgugaaucccuaag

SEQ ID NO: 3124 - RNA, 19 nt, artificial
  Chemically synthesized
gaguauaccagaagacuuc

SEQ ID NO: 3125 - RNA, 19 nt, artificial
  Chemically synthesized
uauaccagaagacuucaaa

SEQ ID NO: 3126 - RNA, 19 nt, artificial
  Chemically synthesized
aaguuaccaugagaaucaa

SEQ ID NO: 3127 - RNA, 19 nt, artificial
  Chemically synthesized
agagaauggaggcaaggga

SEQ ID NO: 3128 - RNA, 19 nt, artificial
  Chemically synthesized
gugauccaauugcuuucuc

SEQ ID NO: 3129 - RNA, 19 nt, artificial
  Chemically synthesized
aauaaguuuauuccgccuu

SEQ ID NO: 3130 - RNA, 19 nt, artificial
  Chemically synthesized
auuacaaaccaaaacucag

SEQ ID NO: 3131 - RNA, 19 nt, artificial
  Chemically synthesized
uggaauugauaaaaucacc

SEQ ID NO: 3132 - RNA, 19 nt, artificial
  Chemically synthesized
agaacuuuaagaacuucag

SEQ ID NO: 3133 - RNA, 19 nt, artificial
  Chemically synthesized
aaagagacaaaaugcagau

SEQ ID NO: 3134 - RNA, 19 nt, artificial
  Chemically synthesized
aaaggagguuuucuguuuc

SEQ ID NO: 3135 - RNA, 19 nt, artificial
  Chemically synthesized
uaaugcugcaugaccaaca

SEQ ID NO: 3136 - RNA, 19 nt, artificial
  Chemically synthesized
gcaacagggaagauucagc

SEQ ID NO: 3137 - RNA, 19 nt, artificial
  Chemically synthesized
agggaagucaacagguugu

SEQ ID NO: 3138 - RNA, 19 nt, artificial
  Chemically synthesized
uuguugaaccaggaaaagg

SEQ ID NO: 3139 - RNA, 19 nt, artificial
  Chemically synthesized
ugaaccaggaaaaggcacc

SEQ ID NO: 3140 - RNA, 19 nt, artificial
  Chemically synthesized
uuugagguuguggucugca

SEQ ID NO: 3141 - RNA, 19 nt, artificial
  Chemically synthesized
auauuguuguucgaaagcc

SEQ ID NO: 3142 - RNA, 19 nt, artificial
  Chemically synthesized
agauuuucuguccaguccc

SEQ ID NO: 3143 - RNA, 19 nt, artificial
  Chemically synthesized
aggaauggaacauuugucc

SEQ ID NO: 3144 - RNA, 19 nt, artificial
  Chemically synthesized
agaagauaaaaagguggug

SEQ ID NO: 3145 - RNA, 19 nt, artificial
  Chemically synthesized
gaagauaaaaaggugguga

SEQ ID NO: 3146 - RNA, 19 nt, artificial
  Chemically synthesized
auaaaaagguggugaguau

SEQ ID NO: 3147 - RNA, 19 nt, artificial
  Chemically synthesized
uaggcuggagagaauggag

SEQ ID NO: 3148 - RNA, 19 nt, artificial
  Chemically synthesized
uccaauugcuuucucagug

SEQ ID NO: 3149 - RNA, 19 nt, artificial
  Chemically synthesized
aaacauucagcccuaacca

SEQ ID NO: 3150 - RNA, 19 nt, artificial
  Chemically synthesized
ggacaaaagauuacaaacc

SEQ ID NO: 3151 - RNA, 19 nt, artificial
  Chemically synthesized
gauuacaaaccaaaacuca

SEQ ID NO: 3152 - RNA, 19 nt, artificial
  Chemically synthesized
augguaacacuggaauuga

SEQ ID NO: 3153 - RNA, 19 nt, artificial
  Chemically synthesized
acuuuaagaacuucagaag

SEQ ID NO: 3154 - RNA, 19 nt, artificial
  Chemically synthesized
cagaaguucuuaaguugcu

SEQ ID NO: 3155 - RNA, 19 nt, artificial
  Chemically synthesized
ugaagcucaaguaacgaag

SEQ ID NO: 3156 - RNA, 19 nt, artificial
  Chemically synthesized
accaaguaaauuacugaag

SEQ ID NO: 3157 - RNA, 19 nt, artificial
  Chemically synthesized
uccuauaacucaauuacug

SEQ ID NO: 3158 - RNA, 19 nt, artificial
  Chemically synthesized
guuucccauugucaagagg

SEQ ID NO: 3159 - RNA, 19 nt, artificial
  Chemically synthesized
gacaaaaugcagauuaccg

SEQ ID NO: 3160 - RNA, 19 nt, artificial
  Chemically synthesized
uuaccguccuuauuccuau

SEQ ID NO: 3161 - RNA, 19 nt, artificial
  Chemically synthesized
uccuuauuccuauaacuca

SEQ ID NO: 3162 - RNA, 19 nt, artificial
  Chemically synthesized
acccacuuugccuaauucc

SEQ ID NO: 3163 - RNA, 19 nt, artificial
  Chemically synthesized
accauccacuucaauccug

SEQ ID NO: 3164 - RNA, 19 nt, artificial
  Chemically synthesized
uauuguuguucgaaagccc

SEQ ID NO: 3165 - RNA, 19 nt, artificial
  Chemically synthesized
agccacgcuuguucaucug

SEQ ID NO: 3166 - RNA, 19 nt, artificial
  Chemically synthesized
cauucaugcucuccucugu

SEQ ID NO: 3167 - RNA, 19 nt, artificial
  Chemically synthesized
aagccaaggauauagaaga

SEQ ID NO: 3168 - RNA, 19 nt, artificial
  Chemically synthesized
uauugucaugaucacucca

SEQ ID NO: 3169 - RNA, 19 nt, artificial
  Chemically synthesized
uugucaugaucacuccagu

SEQ ID NO: 3170 - RNA, 19 nt, artificial
  Chemically synthesized
caauugcuuucucagugug

SEQ ID NO: 3171 - RNA, 19 nt, artificial
  Chemically synthesized
auugcgacacacaggaagc

SEQ ID NO: 3172 - RNA, 19 nt, artificial
  Chemically synthesized
auucagcccuaaccaaaca

SEQ ID NO: 3173 - RNA, 19 nt, artificial
  Chemically synthesized
acucaggagaugguaacac

SEQ ID NO: 3174 - RNA, 19 nt, artificial
  Chemically synthesized
gaugguaacacuggaauug

SEQ ID NO: 3175 - RNA, 19 nt, artificial
  Chemically synthesized
cuggaauugauaaaaucac

SEQ ID NO: 3176 - RNA, 19 nt, artificial
  Chemically synthesized
agaaguucuuaaguugcug

SEQ ID NO: 3177 - RNA, 19 nt, artificial
  Chemically synthesized
aaaaagaauaccagggagu

SEQ ID NO: 3178 - RNA, 19 nt, artificial
  Chemically synthesized
aaagugacugcucaaaccu

SEQ ID NO: 3179 - RNA, 19 nt, artificial
  Chemically synthesized
acaaagagacaaaaugcag

SEQ ID NO: 3180 - RNA, 19 nt, artificial
  Chemically synthesized
gagacaaaaugcagauuac

SEQ ID NO: 3181 - RNA, 19 nt, artificial
  Chemically synthesized
uuucccauugucaagaggu

SEQ ID NO: 3182 - RNA, 19 nt, artificial
  Chemically synthesized
aaugcugcaugaccaacaa

SEQ ID NO: 3183 - RNA, 19 nt, artificial
  Chemically synthesized
uuagaaaacccacuuugcc

SEQ ID NO: 3184 - RNA, 19 nt, artificial
  Chemically synthesized
uugaaccaggaaaaggcac

SEQ ID NO: 3185 - RNA, 19 nt, artificial
  Chemically synthesized
uccacuuccaagacucagg

SEQ ID NO: 3186 - RNA, 19 nt, artificial
  Chemically synthesized
cuccggaugaacucaguag

SEQ ID NO: 3187 - RNA, 19 nt, artificial
  Chemically synthesized
uccggaugaacucaguagc

SEQ ID NO: 3188 - RNA, 19 nt, artificial
  Chemically synthesized
uuucucaucaugagauagg

SEQ ID NO: 3189 - RNA, 19 nt, artificial
  Chemically synthesized
cagaucauauaggccacca

SEQ ID NO: 3190 - RNA, 19 nt, artificial
  Chemically synthesized
agaucauauaggccaccag

SEQ ID NO: 3191 - RNA, 19 nt, artificial
  Chemically synthesized
uuguggaaggugagguugu

SEQ ID NO: 3192 - RNA, 19 nt, artificial
  Chemically synthesized
uucagcccuaaccaaacaa

SEQ ID NO: 3193 - RNA, 19 nt, artificial
  Chemically synthesized
uuuauuccgccuuccuucu

SEQ ID NO: 3194 - RNA, 19 nt, artificial
  Chemically synthesized
guauaacucugaaccacca

SEQ ID NO: 3195 - RNA, 19 nt, artificial
  Chemically synthesized
aacucugaaccaccaaacc

SEQ ID NO: 3196 - RNA, 19 nt, artificial
  Chemically synthesized
cucugaaccaccaaaccuc

SEQ ID NO: 3197 - RNA, 19 nt, artificial
  Chemically synthesized
auuccgccuuccuucucug

SEQ ID NO: 3198 - RNA, 19 nt, artificial
  Chemically synthesized
gagaaaggauccaugggcu

SEQ ID NO: 3199 - RNA, 19 nt, artificial
  Chemically synthesized
caugggcuuuaagaacuuc

SEQ ID NO: 3200 - RNA, 19 nt, artificial
  Chemically synthesized
gaaguucuuaaguugcuga

SEQ ID NO: 3201 - RNA, 19 nt, artificial
  Chemically synthesized
aaagaauaccagggaguca

SEQ ID NO: 3202 - RNA, 19 nt, artificial
  Chemically synthesized
aagaauaccagggagucaa

SEQ ID NO: 3203 - RNA, 19 nt, artificial
  Chemically synthesized
agugacugcucaaaccuga

SEQ ID NO: 3204 - RNA, 19 nt, artificial
  Chemically synthesized
ugacugcucaaaccugacg

SEQ ID NO: 3205 - RNA, 19 nt, artificial
  Chemically synthesized
gacugcucaaaccugacga

SEQ ID NO: 3206 - RNA, 19 nt, artificial
  Chemically synthesized
acugcucaaaccugacgag

SEQ ID NO: 3207 - RNA, 19 nt, artificial
  Chemically synthesized
aaccugacgagaccaagua

SEQ ID NO: 3208 - RNA, 19 nt, artificial
  Chemically synthesized
uacugaagauacaaagaga

SEQ ID NO: 3209 - RNA, 19 nt, artificial
  Chemically synthesized
caaagagacaaaaugcaga

SEQ ID NO: 3210 - RNA, 19 nt, artificial
  Chemically synthesized
caaaaugcagauuaccguc

SEQ ID NO: 3211 - RNA, 19 nt, artificial
  Chemically synthesized
ccaacaauauugcuguccc

SEQ ID NO: 3212 - RNA, 19 nt, artificial
  Chemically synthesized
aagcccuuaugagauuuuc

SEQ ID NO: 3213 - RNA, 19 nt, artificial
  Chemically synthesized
uuggaugggugcauaacaa

SEQ ID NO: 3214 - RNA, 19 nt, artificial
  Chemically synthesized
aaucacaaccuucugcugg

SEQ ID NO: 3215 - RNA, 19 nt, artificial
  Chemically synthesized
auccacuuccaagacucag

SEQ ID NO: 3216 - RNA, 19 nt, artificial
  Chemically synthesized
aaauucaagcagagagcag

SEQ ID NO: 3217 - RNA, 19 nt, artificial
  Chemically synthesized
augaauaaguuuauuccgc

SEQ ID NO: 3218 - RNA, 19 nt, artificial
  Chemically synthesized
gaaccaccaaaccucugcu

SEQ ID NO: 3219 - RNA, 19 nt, artificial
  Chemically synthesized
caccaaaccucugcuauca

SEQ ID NO: 3220 - RNA, 19 nt, artificial
  Chemically synthesized
cugagaaaggauccauggg

SEQ ID NO: 3221 - RNA, 19 nt, artificial
  Chemically synthesized
ugggcuuuaagaacuucag

SEQ ID NO: 3222 - RNA, 19 nt, artificial
  Chemically synthesized
aaguucuuaaguugcugaa

SEQ ID NO: 3223 - RNA, 19 nt, artificial
  Chemically synthesized
aaaagaauaccagggaguc

SEQ ID NO: 3224 - RNA, 19 nt, artificial
  Chemically synthesized
aagugacugcucaaaccug

SEQ ID NO: 3225 - RNA, 19 nt, artificial
  Chemically synthesized
acugaagauacaaagagac

SEQ ID NO: 3226 - RNA, 19 nt, artificial
  Chemically synthesized
gaccaacaauauugcuguc

SEQ ID NO: 3227 - RNA, 19 nt, artificial
  Chemically synthesized
caacaauauugcuguccca

SEQ ID NO: 3228 - RNA, 19 nt, artificial
  Chemically synthesized
ucacgaucaucccacaucu

SEQ ID NO: 3229 - RNA, 19 nt, artificial
  Chemically synthesized
gagguugugauccaauugc

SEQ ID NO: 3230 - RNA, 19 nt, artificial
  Chemically synthesized
gauuuuucuuguguaguag

SEQ ID NO: 3231 - RNA, 19 nt, artificial
  Chemically synthesized
aauugcuguucacacugga

SEQ ID NO: 3232 - RNA, 19 nt, artificial
  Chemically synthesized
agaaacaaaacugaaaacc

SEQ ID NO: 3233 - RNA, 19 nt, artificial
  Chemically synthesized
aaaaagucacccuacuuag

SEQ ID NO: 3234 - RNA, 19 nt, artificial
  Chemically synthesized
aggagaugguaacacugga

SEQ ID NO: 3235 - RNA, 19 nt, artificial
  Chemically synthesized
ucaaaaaaagaauaccagg

SEQ ID NO: 3236 - RNA, 19 nt, artificial
  Chemically synthesized
ugucaaaguuuaaugcugc

SEQ ID NO: 3237 - RNA, 19 nt, artificial
  Chemically synthesized
aauggaacauuuguccagc

SEQ ID NO: 3238 - RNA, 19 nt, artificial
  Chemically synthesized
cacacaggaagcaggauca

SEQ ID NO: 3239 - RNA, 19 nt, artificial
  Chemically synthesized
cuuaggaaaucuucugugg

SEQ ID NO: 3240 - RNA, 19 nt, artificial
  Chemically synthesized
aaccagugguuaaccaccc

SEQ ID NO: 3241 - RNA, 19 nt, artificial
  Chemically synthesized
guucuuaaguugcugaagc

SEQ ID NO: 3242 - RNA, 19 nt, artificial
  Chemically synthesized
uagcuauuguagaaaacuc

SEQ ID NO: 3243 - RNA, 19 nt, artificial
  Chemically synthesized
agcuauuguagaaaacuca

SEQ ID NO: 3244 - RNA, 19 nt, artificial
  Chemically synthesized
guagaaaacucauuguccc

SEQ ID NO: 3245 - RNA, 19 nt, artificial
  Chemically synthesized
uagaaaacccacuuugccu

SEQ ID NO: 3246 - RNA, 19 nt, artificial
  Chemically synthesized
auuccuccaucuccuguuc

SEQ ID NO: 3247 - RNA, 19 nt, artificial
  Chemically synthesized
agagguccuucaggaaugg

SEQ ID NO: 3248 - RNA, 19 nt, artificial
  Chemically synthesized
caggaauggaacauuuguc

SEQ ID NO: 3249 - RNA, 19 nt, artificial
  Chemically synthesized
uucucaucaugagauaggc

SEQ ID NO: 3250 - RNA, 19 nt, artificial
  Chemically synthesized
auucaagcagagagcagac

SEQ ID NO: 3251 - RNA, 19 nt, artificial
  Chemically synthesized
caaaacugaaaaccagugg

SEQ ID NO: 3252 - RNA, 19 nt, artificial
  Chemically synthesized
uaucaagccuugcuacagu

SEQ ID NO: 3253 - RNA, 19 nt, artificial
  Chemically synthesized
aaaguuuaaugcugcauga

SEQ ID NO: 3254 - RNA, 19 nt, artificial
  Chemically synthesized
aaagcccuuaugagauuuu

SEQ ID NO: 3255 - RNA, 19 nt, artificial
  Chemically synthesized
auuccaaaacuuuggaugg

SEQ ID NO: 3256 - RNA, 19 nt, artificial
  Chemically synthesized
augcccuucaaacuuaggg

SEQ ID NO: 3257 - RNA, 19 nt, artificial
  Chemically synthesized
uaccaugagaaucaaggcu

SEQ ID NO: 3258 - RNA, 19 nt, artificial
  Chemically synthesized
aacauguacacuguuggug

SEQ ID NO: 3259 - RNA, 19 nt, artificial
  Chemically synthesized
aauauugcugucccauccg

SEQ ID NO: 3260 - RNA, 19 nt, artificial
  Chemically synthesized
uuccuccaucuccuguucc

SEQ ID NO: 3261 - RNA, 19 nt, artificial
  Chemically synthesized
uggaauuuguaccagaugg

SEQ ID NO: 3262 - RNA, 19 nt, artificial
  Chemically synthesized
uuuucucaucaugagauag

SEQ ID NO: 3263 - RNA, 19 nt, artificial
  Chemically synthesized
aauagcuguauguaggcag

SEQ ID NO: 3264 - RNA, 19 nt, artificial
  Chemically synthesized
aaggugagguugugaucca

SEQ ID NO: 3265 - RNA, 19 nt, artificial
  Chemically synthesized
aaaauucaagcagagagca

SEQ ID NO: 3266 - RNA, 19 nt, artificial
  Chemically synthesized
aagucacccuacuuaggaa

SEQ ID NO: 3267 - RNA, 19 nt, artificial
  Chemically synthesized
aaaacugaaaaccaguggu

SEQ ID NO: 3268 - RNA, 19 nt, artificial
  Chemically synthesized
uuuuucugagaaaggaucc

SEQ ID NO: 3269 - RNA, 19 nt, artificial
  Chemically synthesized
uagaaaacucauuguccca

SEQ ID NO: 3270 - RNA, 19 nt, artificial
  Chemically synthesized
agaaaacucauugucccac

SEQ ID NO: 3271 - RNA, 19 nt, artificial
  Chemically synthesized
aacagguuguugaaccagg

SEQ ID NO: 3272 - RNA, 19 nt, artificial
  Chemically synthesized
aauccggauucuggagagg

SEQ ID NO: 3273 - RNA, 19 nt, artificial
  Chemically synthesized
aauuccaaaacuuuggaug

SEQ ID NO: 3274 - RNA, 19 nt, artificial
  Chemically synthesized
aagguggugaguauaccag

SEQ ID NO: 3275 - RNA, 19 nt, artificial
  Chemically synthesized
uaaaaagucacccuacuua

SEQ ID NO: 3276 - RNA, 19 nt, artificial
  Chemically synthesized
gagaggcacauucuuaucc

SEQ ID NO: 3277 - RNA, 19 nt, artificial
  Chemically synthesized
uuucuaggauccagacugg

SEQ ID NO: 3278 - RNA, 19 nt, artificial
  Chemically synthesized
gauccagacuggaauaucg

SEQ ID NO: 3279 - RNA, 19 nt, artificial
  Chemically synthesized
auugucccacauuggucuc

SEQ ID NO: 3280 - RNA, 19 nt, artificial
  Chemically synthesized
uugucaaaguuuaaugcug

SEQ ID NO: 3281 - RNA, 19 nt, artificial
  Chemically synthesized
aauggagaagaaaucuucc

SEQ ID NO: 3282 - RNA, 19 nt, artificial
  Chemically synthesized
auggagaagaaaucuuccu

SEQ ID NO: 3283 - RNA, 19 nt, artificial
  Chemically synthesized
ugcaauuccaaaacuuugg

SEQ ID NO: 3284 - RNA, 19 nt, artificial
  Chemically synthesized
uucaggaauggaacauuug

SEQ ID NO: 3285 - RNA, 19 nt, artificial
  Chemically synthesized
auggaacauuuguccagcg

SEQ ID NO: 3286 - RNA, 19 nt, artificial
  Chemically synthesized
aagaugugaaaaacacaca

SEQ ID NO: 3287 - RNA, 19 nt, artificial
  Chemically synthesized
auauuucaggaaggcaucc

SEQ ID NO: 3288 - RNA, 19 nt, artificial
  Chemically synthesized
aaccaaacaaccagaaaca

SEQ ID NO: 3289 - RNA, 19 nt, artificial
  Chemically synthesized
uaaacauguacacuguugg

SEQ ID NO: 3290 - RNA, 19 nt, artificial
  Chemically synthesized
aaagucacccuacuuagga

SEQ ID NO: 3291 - RNA, 19 nt, artificial
  Chemically synthesized
uuuucugagaaaggaucca

SEQ ID NO: 3292 - RNA, 19 nt, artificial
  Chemically synthesized
cagaacuuuaagaacuuca

SEQ ID NO: 3293 - RNA, 19 nt, artificial
  Chemically synthesized
cagacuggaauaucgguga

SEQ ID NO: 3294 - RNA, 19 nt, artificial
  Chemically synthesized
gucaaaguuuaaugcugca

SEQ ID NO: 3295 - RNA, 19 nt, artificial
  Chemically synthesized
cacacuggaauuuguacca

SEQ ID NO: 3296 - RNA, 19 nt, artificial
  Chemically synthesized
acacuggaauuuguaccag

SEQ ID NO: 3297 - RNA, 19 nt, artificial
  Chemically synthesized
uggugaauauuguuguucg

SEQ ID NO: 3298 - RNA, 19 nt, artificial
  Chemically synthesized
cuucucuggacagaacugu

SEQ ID NO: 3299 - RNA, 19 nt, artificial
  Chemically synthesized
uuccaaaacuuuggauggg

SEQ ID NO: 3300 - RNA, 19 nt, artificial
  Chemically synthesized
ugcccuucaaacuuagggc

SEQ ID NO: 3301 - RNA, 19 nt, artificial
  Chemically synthesized
acuccacugucguguuucg

SEQ ID NO: 3302 - RNA, 19 nt, artificial
  Chemically synthesized
gacuggaugggauuuagcc

SEQ ID NO: 3303 - RNA, 19 nt, artificial
  Chemically synthesized
agaugugaaaaacacacac

SEQ ID NO: 3304 - RNA, 19 nt, artificial
  Chemically synthesized
gaugugaaaaacacacacc

SEQ ID NO: 3305 - RNA, 19 nt, artificial
  Chemically synthesized
caggugugcaaugauguga

SEQ ID NO: 3306 - RNA, 19 nt, artificial
  Chemically synthesized
gugugcggcugcaaaauga

SEQ ID NO: 3307 - RNA, 19 nt, artificial
  Chemically synthesized
ugcaaaaugagcaggugcc

SEQ ID NO: 3308 - RNA, 19 nt, artificial
  Chemically synthesized
aaaagucacccuacuuagg

SEQ ID NO: 3309 - RNA, 19 nt, artificial
  Chemically synthesized
aaacugaaaaccagugguu

SEQ ID NO: 3310 - RNA, 19 nt, artificial
  Chemically synthesized
aaccucugcuaucaagccu

SEQ ID NO: 3311 - RNA, 19 nt, artificial
  Chemically synthesized
uagaauugaaccuuucuag

SEQ ID NO: 3312 - RNA, 19 nt, artificial
  Chemically synthesized
uuuucuguuucagaccugu

SEQ ID NO: 3313 - RNA, 19 nt, artificial
  Chemically synthesized
aagagacgguaguuuagaa

SEQ ID NO: 3314 - RNA, 19 nt, artificial
  Chemically synthesized
acgguaguuuagaaaaccc

SEQ ID NO: 3315 - RNA, 19 nt, artificial
  Chemically synthesized
uuccagggaagucaacagg

SEQ ID NO: 3316 - RNA, 19 nt, artificial
  Chemically synthesized
auacuggaaaacauccuca

SEQ ID NO: 3317 - RNA, 19 nt, artificial
  Chemically synthesized
caauccggauucuggagag

SEQ ID NO: 3318 - RNA, 19 nt, artificial
  Chemically synthesized
aauauuguuguucgaaagc

SEQ ID NO: 3319 - RNA, 19 nt, artificial
  Chemically synthesized
uuaugagauuuucugucca

SEQ ID NO: 3320 - RNA, 19 nt, artificial
  Chemically synthesized
uaugagauuuucuguccag

SEQ ID NO: 3321 - RNA, 19 nt, artificial
  Chemically synthesized
cugcucggauaugaaugga

SEQ ID NO: 3322 - RNA, 19 nt, artificial
  Chemically synthesized
aaggaugccauuccaggag

SEQ ID NO: 3323 - RNA, 19 nt, artificial
  Chemically synthesized
ucucuggacagaacugugc

SEQ ID NO: 3324 - RNA, 19 nt, artificial
  Chemically synthesized
uggaacauuuguccagcgc

SEQ ID NO: 3325 - RNA, 19 nt, artificial
  Chemically synthesized
aaauaacuccuccggauga

SEQ ID NO: 3326 - RNA, 19 nt, artificial
  Chemically synthesized
auacuccacugucguguuu

SEQ ID NO: 3327 - RNA, 19 nt, artificial
  Chemically synthesized
agcuuguggaaggugaggu

SEQ ID NO: 3328 - RNA, 19 nt, artificial
  Chemically synthesized
aaggauuuuucuuguguag

SEQ ID NO: 3329 - RNA, 19 nt, artificial
  Chemically synthesized
cacccuacuuaggaaaucu

SEQ ID NO: 3330 - RNA, 19 nt, artificial
  Chemically synthesized
acaaaccaaaacucaggag

SEQ ID NO: 3331 - RNA, 19 nt, artificial
  Chemically synthesized
accagugguuaaccaccca

SEQ ID NO: 3332 - RNA, 19 nt, artificial
  Chemically synthesized
auuuuucugagaaaggauc

SEQ ID NO: 3333 - RNA, 19 nt, artificial
  Chemically synthesized
ucagaacuuuaagaacuuc

SEQ ID NO: 3334 - RNA, 19 nt, artificial
  Chemically synthesized
uugaaccuuucuaggaucc

SEQ ID NO: 3335 - RNA, 19 nt, artificial
  Chemically synthesized
aaccuuucuaggauccaga

SEQ ID NO: 3336 - RNA, 19 nt, artificial
  Chemically synthesized
agacuggaauaucggugac

SEQ ID NO: 3337 - RNA, 19 nt, artificial
  Chemically synthesized
aucggugacagcauuugcg

SEQ ID NO: 3338 - RNA, 19 nt, artificial
  Chemically synthesized
auuguuguucgaaagcccu

SEQ ID NO: 3339 - RNA, 19 nt, artificial
  Chemically synthesized
gcugcucggauaugaaugg

SEQ ID NO: 3340 - RNA, 19 nt, artificial
  Chemically synthesized
gaauggagaagaaaucuuc

SEQ ID NO: 3341 - RNA, 19 nt, artificial
  Chemically synthesized
aagaaaucuuccucuggag

SEQ ID NO: 3342 - RNA, 19 nt, artificial
  Chemically synthesized
aguaaaaggaugccauucc

SEQ ID NO: 3343 - RNA, 19 nt, artificial
  Chemically synthesized
uuguucaucugcaauucca

SEQ ID NO: 3344 - RNA, 19 nt, artificial
  Chemically synthesized
uucucuggacagaacugug

SEQ ID NO: 3345 - RNA, 19 nt, artificial
  Chemically synthesized
caaaacuuuggaugggugc

SEQ ID NO: 3346 - RNA, 19 nt, artificial
  Chemically synthesized
aaacuuuggaugggugcau

SEQ ID NO: 3347 - RNA, 19 nt, artificial
  Chemically synthesized
aaccuugguaaucacaacc

SEQ ID NO: 3348 - RNA, 19 nt, artificial
  Chemically synthesized
aaccggaggauccuuucac

SEQ ID NO: 3349 - RNA, 19 nt, artificial
  Chemically synthesized
gaauggaacauuuguccag

SEQ ID NO: 3350 - RNA, 19 nt, artificial
  Chemically synthesized
aauaacuccuccggaugaa

SEQ ID NO: 3351 - RNA, 19 nt, artificial
  Chemically synthesized
uuaccaugagaaucaaggc

SEQ ID NO: 3352 - RNA, 19 nt, artificial
  Chemically synthesized
gaucacuccagugagacca

SEQ ID NO: 3353 - RNA, 19 nt, artificial
  Chemically synthesized
uaagaugugaaaaacacac

SEQ ID NO: 3354 - RNA, 19 nt, artificial
  Chemically synthesized
auugcuuucucagugugcg

SEQ ID NO: 3355 - RNA, 19 nt, artificial
  Chemically synthesized
ugaauaaguuuauuccgcc

SEQ ID NO: 3356 - RNA, 19 nt, artificial
  Chemically synthesized
aagugacaguaaacaugua

SEQ ID NO: 3357 - RNA, 19 nt, artificial
  Chemically synthesized
cacuguugguguuauaugg

SEQ ID NO: 3358 - RNA, 19 nt, artificial
  Chemically synthesized
uuaggaaaucuucuguggg

SEQ ID NO: 3359 - RNA, 19 nt, artificial
  Chemically synthesized
aaaaucaccugggauuagu

SEQ ID NO: 3360 - RNA, 19 nt, artificial
  Chemically synthesized
aucaagccuugcuacaguc

SEQ ID NO: 3361 - RNA, 19 nt, artificial
  Chemically synthesized
aauugaaccuuucuaggau

SEQ ID NO: 3362 - RNA, 19 nt, artificial
  Chemically synthesized
cuuucuaggauccagacug

SEQ ID NO: 3363 - RNA, 19 nt, artificial
  Chemically synthesized
uaggcaacagggaagauuc

SEQ ID NO: 3364 - RNA, 19 nt, artificial
  Chemically synthesized
auccacuucaauccuggga

SEQ ID NO: 3365 - RNA, 19 nt, artificial
  Chemically synthesized
cuucaauccugggaauugg

SEQ ID NO: 3366 - RNA, 19 nt, artificial
  Chemically synthesized
gagauuuucuguccagucc

SEQ ID NO: 3367 - RNA, 19 nt, artificial
  Chemically synthesized
uggagaagaaaucuuccuc

SEQ ID NO: 3368 - RNA, 19 nt, artificial
  Chemically synthesized
agaagaaaucuuccucugg

SEQ ID NO: 3369 - RNA, 19 nt, artificial
  Chemically synthesized
aagacucugcacacuugcg

SEQ ID NO: 3370 - RNA, 19 nt, artificial
  Chemically synthesized
augacucucauucaugcuc

SEQ ID NO: 3371 - RNA, 19 nt, artificial
  Chemically synthesized
aaaagguggugaguauacc

SEQ ID NO: 3372 - RNA, 19 nt, artificial
  Chemically synthesized
aaucaaggcuauugucaug

SEQ ID NO: 3373 - RNA, 19 nt, artificial
  Chemically synthesized
aucaaggcuauugucauga

SEQ ID NO: 3374 - RNA, 19 nt, artificial
  Chemically synthesized
aaggcuauugucaugauca

SEQ ID NO: 3375 - RNA, 19 nt, artificial
  Chemically synthesized
augaucacuccagugagac

SEQ ID NO: 3376 - RNA, 19 nt, artificial
  Chemically synthesized
uggugaaugucacauacuc

SEQ ID NO: 3377 - RNA, 19 nt, artificial
  Chemically synthesized
cucaucaugagauaggcug

SEQ ID NO: 3378 - RNA, 19 nt, artificial
  Chemically synthesized
agguugugauccaauugcu

SEQ ID NO: 3379 - RNA, 19 nt, artificial
  Chemically synthesized
uuccugggaaugaauaagu

SEQ ID NO: 3380 - RNA, 19 nt, artificial
  Chemically synthesized
caaccagaaacaaaacuga

SEQ ID NO: 3381 - RNA, 19 nt, artificial
  Chemically synthesized
uacaaaccaaaacucagga

SEQ ID NO: 3382 - RNA, 19 nt, artificial
  Chemically synthesized
uuaagaacuucagaaguuc

SEQ ID NO: 3383 - RNA, 19 nt, artificial
  Chemically synthesized
auugaaccuuucuaggauc

SEQ ID NO: 3384 - RNA, 19 nt, artificial
  Chemically synthesized
auccagacuggaauaucgg

SEQ ID NO: 3385 - RNA, 19 nt, artificial
  Chemically synthesized
cauugucccacauuggucu

SEQ ID NO: 3386 - RNA, 19 nt, artificial
  Chemically synthesized
gauucagcaauccggauuc

SEQ ID NO: 3387 - RNA, 19 nt, artificial
  Chemically synthesized
cacagccacuucauacugg

SEQ ID NO: 3388 - RNA, 19 nt, artificial
  Chemically synthesized
aauccugggaauuggugaa

SEQ ID NO: 3389 - RNA, 19 nt, artificial
  Chemically synthesized
gagaagaaaucuuccucug

SEQ ID NO: 3390 - RNA, 19 nt, artificial
  Chemically synthesized
uaaaaggaugccauuccag

SEQ ID NO: 3391 - RNA, 19 nt, artificial
  Chemically synthesized
aaaaggaugccauuccagg

SEQ ID NO: 3392 - RNA, 19 nt, artificial
  Chemically synthesized
aaaacuuuggaugggugca

SEQ ID NO: 3393 - RNA, 19 nt, artificial
  Chemically synthesized
cuugcgaggaugacucuca

SEQ ID NO: 3394 - RNA, 19 nt, artificial
  Chemically synthesized
uagcugaaguuaccaugag

SEQ ID NO: 3395 - RNA, 19 nt, artificial
  Chemically synthesized
augugaaaaacacacaccu

SEQ ID NO: 3396 - RNA, 19 nt, artificial
  Chemically synthesized
ugaauagcuguauguaggc

SEQ ID NO: 3397 - RNA, 19 nt, artificial
  Chemically synthesized
uaggcagaucauauaggcc

SEQ ID NO: 3398 - RNA, 19 nt, artificial
  Chemically synthesized
accagcuuguggaagguga

SEQ ID NO: 3399 - RNA, 19 nt, artificial
  Chemically synthesized
ugcggcugcaaaaugagca

SEQ ID NO: 3400 - RNA, 19 nt, artificial
  Chemically synthesized
cugcaaaaugagcaggugc

SEQ ID NO: 3401 - RNA, 19 nt, artificial
  Chemically synthesized
acaggccaauguugaccca

SEQ ID NO: 3402 - RNA, 19 nt, artificial
  Chemically synthesized
caguaaacauguacacugu

SEQ ID NO: 3403 - RNA, 19 nt, artificial
  Chemically synthesized
aaccaaaacucaggagaug

SEQ ID NO: 3404 - RNA, 19 nt, artificial
  Chemically synthesized
uaaaaucaccugggauuag

SEQ ID NO: 3405 - RNA, 19 nt, artificial
  Chemically synthesized
agccuugcuacagucaugg

SEQ ID NO: 3406 - RNA, 19 nt, artificial
  Chemically synthesized
cuacagucauggcugucca

SEQ ID NO: 3407 - RNA, 19 nt, artificial
  Chemically synthesized
aggcuugagaggcacauuc

SEQ ID NO: 3408 - RNA, 19 nt, artificial
  Chemically synthesized
ucuuugccaaaguccgagg

SEQ ID NO: 3409 - RNA, 19 nt, artificial
  Chemically synthesized
guuuucuguuucagaccug

SEQ ID NO: 3410 - RNA, 19 nt, artificial
  Chemically synthesized
gucaacagguuguugaacc

SEQ ID NO: 3411 - RNA, 19 nt, artificial
  Chemically synthesized
aauuccugcuccaaccagc

SEQ ID NO: 3412 - RNA, 19 nt, artificial
  Chemically synthesized
uucuggagagguccuucag

SEQ ID NO: 3413 - RNA, 19 nt, artificial
  Chemically synthesized
aagccacgcuuguucaucu

SEQ ID NO: 3414 - RNA, 19 nt, artificial
  Chemically synthesized
accuugguaaucacaaccu

SEQ ID NO: 3415 - RNA, 19 nt, artificial
  Chemically synthesized
gguaaucacaaccuucugc

SEQ ID NO: 3416 - RNA, 19 nt, artificial
  Chemically synthesized
uaaaaccggaggauccuuu

SEQ ID NO: 3417 - RNA, 19 nt, artificial
  Chemically synthesized
agacucugcacacuugcga

SEQ ID NO: 3418 - RNA, 19 nt, artificial
  Chemically synthesized
aacauuuguccagcgcagg

SEQ ID NO: 3419 - RNA, 19 nt, artificial
  Chemically synthesized
guuaccaugagaaucaagg

SEQ ID NO: 3420 - RNA, 19 nt, artificial
  Chemically synthesized
gugaaugucacauacucca

SEQ ID NO: 3421 - RNA, 19 nt, artificial
  Chemically synthesized
cugucggcuucugcuauag

SEQ ID NO: 3422 - RNA, 19 nt, artificial
  Chemically synthesized
gacccaaggauuuuucuug

SEQ ID NO: 3423 - RNA, 19 nt, artificial
  Chemically synthesized
acccaaggauuuuucuugu

SEQ ID NO: 3424 - RNA, 19 nt, artificial
  Chemically synthesized
aaggcauccacaaacagga

SEQ ID NO: 3425 - RNA, 19 nt, artificial
  Chemically synthesized
acaguaaacauguacacug

SEQ ID NO: 3426 - RNA, 19 nt, artificial
  Chemically synthesized
aaucaccugggauuaguug

SEQ ID NO: 3427 - RNA, 19 nt, artificial
  Chemically synthesized
aaaccucugcuaucaagcc

SEQ ID NO: 3428 - RNA, 19 nt, artificial
  Chemically synthesized
ucugcuaucaagccuugcu

SEQ ID NO: 3429 - RNA, 19 nt, artificial
  Chemically synthesized
auaccagggagucaaggcu

SEQ ID NO: 3430 - RNA, 19 nt, artificial
  Chemically synthesized
uuucuguuucagaccuguc

SEQ ID NO: 3431 - RNA, 19 nt, artificial
  Chemically synthesized
uucuguuucagaccuguca

SEQ ID NO: 3432 - RNA, 19 nt, artificial
  Chemically synthesized
uucuaggcaacagggaaga

SEQ ID NO: 3433 - RNA, 19 nt, artificial
  Chemically synthesized
aaguuuaaugcugcaugac

SEQ ID NO: 3434 - RNA, 19 nt, artificial
  Chemically synthesized
aaccaggaaaaggcaccug

SEQ ID NO: 3435 - RNA, 19 nt, artificial
  Chemically synthesized
ggaagauucagcaauccgg

SEQ ID NO: 3436 - RNA, 19 nt, artificial
  Chemically synthesized
uugagguuguggucugcac

SEQ ID NO: 3437 - RNA, 19 nt, artificial
  Chemically synthesized
gauuucaagauagaagcaa

SEQ ID NO: 3438 - RNA, 19 nt, artificial
  Chemically synthesized
ucagcaauccggauucugg

SEQ ID NO: 3439 - RNA, 19 nt, artificial
  Chemically synthesized
cauacuggaaaacauccuc

SEQ ID NO: 3440 - RNA, 19 nt, artificial
  Chemically synthesized
augagauuuucuguccagu

SEQ ID NO: 3441 - RNA, 19 nt, artificial
  Chemically synthesized
ugaauggagaagaaaucuu

SEQ ID NO: 3442 - RNA, 19 nt, artificial
  Chemically synthesized
ggagaagaaaucuuccucu

SEQ ID NO: 3443 - RNA, 19 nt, artificial
  Chemically synthesized
gaagaaaucuuccucugga

SEQ ID NO: 3444 - RNA, 19 nt, artificial
  Chemically synthesized
aucuuccucuggagcagag

SEQ ID NO: 3445 - RNA, 19 nt, artificial
  Chemically synthesized
aaaggaugccauuccagga

SEQ ID NO: 3446 - RNA, 19 nt, artificial
  Chemically synthesized
cuuguucaucugcaauucc

SEQ ID NO: 3447 - RNA, 19 nt, artificial
  Chemically synthesized
caauuccaaaacuuuggau

SEQ ID NO: 3448 - RNA, 19 nt, artificial
  Chemically synthesized
aaugaccggugcaaggauc

SEQ ID NO: 3449 - RNA, 19 nt, artificial
  Chemically synthesized
acacuugcgaggaugacuc

SEQ ID NO: 3450 - RNA, 19 nt, artificial
  Chemically synthesized
gucaugaucacuccaguga

SEQ ID NO: 3451 - RNA, 19 nt, artificial
  Chemically synthesized
gugaaaaacacacaccuac

SEQ ID NO: 3452 - RNA, 19 nt, artificial
  Chemically synthesized
gaauagcuguauguaggca

SEQ ID NO: 3453 - RNA, 19 nt, artificial
  Chemically synthesized
uugcuuucucagugugcgg

SEQ ID NO: 3454 - RNA, 19 nt, artificial
  Chemically synthesized
aaaaccagugguuaaccac

SEQ ID NO: 3455 - RNA, 19 nt, artificial
  Chemically synthesized
aaaccagugguuaaccacc

SEQ ID NO: 3456 - RNA, 19 nt, artificial
  Chemically synthesized
cucugcuaucaagccuugc

SEQ ID NO: 3457 - RNA, 19 nt, artificial
  Chemically synthesized
aacuucagaaguucuuaag

SEQ ID NO: 3458 - RNA, 19 nt, artificial
  Chemically synthesized
ugcugaagcucaaguaacg

SEQ ID NO: 3459 - RNA, 19 nt, artificial
  Chemically synthesized
guugaaguagaauugaacc

SEQ ID NO: 3460 - RNA, 19 nt, artificial
  Chemically synthesized
acucauugucccacauugg

SEQ ID NO: 3461 - RNA, 19 nt, artificial
  Chemically synthesized
gaagucaacagguuguuga

SEQ ID NO: 3462 - RNA, 19 nt, artificial
  Chemically synthesized
ucaacagguuguugaacca

SEQ ID NO: 3463 - RNA, 19 nt, artificial
  Chemically synthesized
acagaacugugcuaucagc

SEQ ID NO: 3464 - RNA, 19 nt, artificial
  Chemically synthesized
aaaucuuccucuggagcag

SEQ ID NO: 3465 - RNA, 19 nt, artificial
  Chemically synthesized
gcaauuccaaaacuuugga

SEQ ID NO: 3466 - RNA, 19 nt, artificial
  Chemically synthesized
gggugcauaacaaccuugg

SEQ ID NO: 3467 - RNA, 19 nt, artificial
  Chemically synthesized
ggaugacucucauucaugc

SEQ ID NO: 3468 - RNA, 19 nt, artificial
  Chemically synthesized
aggcagaucauauaggcca

SEQ ID NO: 3469 - RNA, 19 nt, artificial
  Chemically synthesized
gugcuguuaaaauucaagc

SEQ ID NO: 3470 - RNA, 19 nt, artificial
  Chemically synthesized
ugcuguuaaaauucaagca

SEQ ID NO: 3471 - RNA, 19 nt, artificial
  Chemically synthesized
uguuaaaauucaagcagag

SEQ ID NO: 3472 - RNA, 19 nt, artificial
  Chemically synthesized
gaauaaguuuauuccgccu

SEQ ID NO: 3473 - RNA, 19 nt, artificial
  Chemically synthesized
acaaaacugaaaaccagug

SEQ ID NO: 3474 - RNA, 19 nt, artificial
  Chemically synthesized
uuucugagaaaggauccau

SEQ ID NO: 3475 - RNA, 19 nt, artificial
  Chemically synthesized
ugguuaaccacccaguuuc

SEQ ID NO: 3476 - RNA, 19 nt, artificial
  Chemically synthesized
uuaaguugcugaagcucaa

SEQ ID NO: 3477 - RNA, 19 nt, artificial
  Chemically synthesized
ucccauugucaagaggugg

SEQ ID NO: 3478 - RNA, 19 nt, artificial
  Chemically synthesized
gaaccuuucuaggauccag

SEQ ID NO: 3479 - RNA, 19 nt, artificial
  Chemically synthesized
aggcucuuugccaaagucc

SEQ ID NO: 3480 - RNA, 19 nt, artificial
  Chemically synthesized
aaggagguuuucuguuuca

SEQ ID NO: 3481 - RNA, 19 nt, artificial
  Chemically synthesized
aggagguuuucuguuucag

SEQ ID NO: 3482 - RNA, 19 nt, artificial
  Chemically synthesized
guuccagggaagucaacag

SEQ ID NO: 3483 - RNA, 19 nt, artificial
  Chemically synthesized
uggaaaacauccucacugg

SEQ ID NO: 3484 - RNA, 19 nt, artificial
  Chemically synthesized
aaaacauccucacuggcug

SEQ ID NO: 3485 - RNA, 19 nt, artificial
  Chemically synthesized
aacauccucacuggcugug

SEQ ID NO: 3486 - RNA, 19 nt, artificial
  Chemically synthesized
uucaauccugggaauuggu

SEQ ID NO: 3487 - RNA, 19 nt, artificial
  Chemically synthesized
guaaaaggaugccauucca

SEQ ID NO: 3488 - RNA, 19 nt, artificial
  Chemically synthesized
uccaaaacuuuggaugggu

SEQ ID NO: 3489 - RNA, 19 nt, artificial
  Chemically synthesized
ugggugcauaacaaccuug

SEQ ID NO: 3490 - RNA, 19 nt, artificial
  Chemically synthesized
aaagguggugaguauacca

SEQ ID NO: 3491 - RNA, 19 nt, artificial
  Chemically synthesized
caacgcuggugaaugucac

SEQ ID NO: 3492 - RNA, 19 nt, artificial
  Chemically synthesized
auagcuguauguaggcaga

SEQ ID NO: 3493 - RNA, 19 nt, artificial
  Chemically synthesized
gauaagaccauaucaaaag

SEQ ID NO: 3494 - RNA, 19 nt, artificial
  Chemically synthesized
gaaaaccagugguuaacca

SEQ ID NO: 3495 - RNA, 19 nt, artificial
  Chemically synthesized
uucugagaaaggauccaug

SEQ ID NO: 3496 - RNA, 19 nt, artificial
  Chemically synthesized
uaagaacuucagaaguucu

SEQ ID NO: 3497 - RNA, 19 nt, artificial
  Chemically synthesized
aagaacuucagaaguucuu

SEQ ID NO: 3498 - RNA, 19 nt, artificial
  Chemically synthesized
gucaagaggugguuuggag

SEQ ID NO: 3499 - RNA, 19 nt, artificial
  Chemically synthesized
uuuggagcccuucuaggca

SEQ ID NO: 3500 - RNA, 19 nt, artificial
  Chemically synthesized
cuguuucagaccugucacg

SEQ ID NO: 3501 - RNA, 19 nt, artificial
  Chemically synthesized
agaccugucacgaugucag

SEQ ID NO: 3502 - RNA, 19 nt, artificial
  Chemically synthesized
uccuguuccagggaaguca

SEQ ID NO: 3503 - RNA, 19 nt, artificial
  Chemically synthesized
acagccacuucauacugga

SEQ ID NO: 3504 - RNA, 19 nt, artificial
  Chemically synthesized
cuggaaaacauccucacug

SEQ ID NO: 3505 - RNA, 19 nt, artificial
  Chemically synthesized
gaugggugcauaacaaccu

SEQ ID NO: 3506 - RNA, 19 nt, artificial
  Chemically synthesized
augggugcauaacaaccuu

SEQ ID NO: 3507 - RNA, 19 nt, artificial
  Chemically synthesized
aucacaaccuucugcuggg

SEQ ID NO: 3508 - RNA, 19 nt, artificial
  Chemically synthesized
aagaaugaccggugcaagg

SEQ ID NO: 3509 - RNA, 19 nt, artificial
  Chemically synthesized
aggcuauugucaugaucac

SEQ ID NO: 3510 - RNA, 19 nt, artificial
  Chemically synthesized
aucacuccagugagaccag

SEQ ID NO: 3511 - RNA, 19 nt, artificial
  Chemically synthesized
uugcgacacacaggaagca

SEQ ID NO: 3512 - RNA, 19 nt, artificial
  Chemically synthesized
gcuguuaaaauucaagcag

SEQ ID NO: 3513 - RNA, 19 nt, artificial
  Chemically synthesized
accaaaacucaggagaugg

SEQ ID NO: 3514 - RNA, 19 nt, artificial
  Chemically synthesized
aagccuugcuacagucaug

SEQ ID NO: 3515 - RNA, 19 nt, artificial
  Chemically synthesized
aaguugcugaagcucaagu

SEQ ID NO: 3516 - RNA, 19 nt, artificial
  Chemically synthesized
agaauugaaccuuucuagg

SEQ ID NO: 3517 - RNA, 19 nt, artificial
  Chemically synthesized
uucuaggauccagacugga

SEQ ID NO: 3518 - RNA, 19 nt, artificial
  Chemically synthesized
gaaccaggaaaaggcaccu

SEQ ID NO: 3519 - RNA, 19 nt, artificial
  Chemically synthesized
accaggaaaaggcaccugu

SEQ ID NO: 3520 - RNA, 19 nt, artificial
  Chemically synthesized
ggaccauccacuucaaucc

SEQ ID NO: 3521 - RNA, 19 nt, artificial
  Chemically synthesized
gugcaaggauccacuucca

SEQ ID NO: 3522 - RNA, 19 nt, artificial
  Chemically synthesized
agaaucaaggcuauuguca

SEQ ID NO: 3523 - RNA, 19 nt, artificial
  Chemically synthesized
augggauuuagccaagaac

SEQ ID NO: 3524 - RNA, 19 nt, artificial
  Chemically synthesized
uguucacacuggauaagac

SEQ ID NO: 3525 - RNA, 19 nt, artificial
  Chemically synthesized
uucacacuggauaagacca

SEQ ID NO: 3526 - RNA, 19 nt, artificial
  Chemically synthesized
caggagaugguaacacugg

SEQ ID NO: 3527 - RNA, 19 nt, artificial
  Chemically synthesized
uucuuaaguugcugaagcu

SEQ ID NO: 3528 - RNA, 19 nt, artificial
  Chemically synthesized
auuggucucccaaaggagg

SEQ ID NO: 3529 - RNA, 19 nt, artificial
  Chemically synthesized
aaacauccucacuggcugu

SEQ ID NO: 3530 - RNA, 19 nt, artificial
  Chemically synthesized
ugaaucccuaagccaagga

SEQ ID NO: 3531 - RNA, 19 nt, artificial
  Chemically synthesized
uauaggccaccagcuugug

SEQ ID NO: 3532 - RNA, 19 nt, artificial
  Chemically synthesized
aaacauguacacuguuggu

SEQ ID NO: 3533 - RNA, 19 nt, artificial
  Chemically synthesized
agucaaggcuugagaggca

SEQ ID NO: 3534 - RNA, 19 nt, artificial
  Chemically synthesized
uuggucucccaaaggaggu

SEQ ID NO: 3535 - RNA, 19 nt, artificial
  Chemically synthesized
ucccaaaggagguuuucug

SEQ ID NO: 3536 - RNA, 19 nt, artificial
  Chemically synthesized
uauugcugucccauccggu

SEQ ID NO: 3537 - RNA, 19 nt, artificial
  Chemically synthesized
gugaaucccuaagccaagg

SEQ ID NO: 3538 - RNA, 19 nt, artificial
  Chemically synthesized
aaacaaaacugaaaaccag

SEQ ID NO: 3539 - RNA, 19 nt, artificial
  Chemically synthesized
guaaacauguacacuguug

SEQ ID NO: 3540 - RNA, 19 nt, artificial
  Chemically synthesized
ggaauugauaaaaucaccu

SEQ ID NO: 3541 - RNA, 19 nt, artificial
  Chemically synthesized
aaaggauccaugggcuuua

SEQ ID NO: 3542 - RNA, 19 nt, artificial
  Chemically synthesized
gagguuuucuguuucagac

SEQ ID NO: 3543 - RNA, 19 nt, artificial
  Chemically synthesized
aaggauccacuuccaagac

SEQ ID NO: 3544 - RNA, 19 nt, artificial
  Chemically synthesized
uucauacuggaaaacaucc

SEQ ID NO: 3545 - RNA, 19 nt, artificial
  Chemically synthesized
acauuggucucccaaagga

SEQ ID NO: 3546 - RNA, 19 nt, artificial
  Chemically synthesized
uugcuacagucauggcugu

SEQ ID NO: 3547 - RNA, 19 nt, artificial
  Chemically synthesized
aaaaggcaccugucucccu

SEQ ID NO: 3548 - RNA, 19 nt, artificial
  Chemically synthesized
ucauacuggaaaacauccu

SEQ ID NO: 3549 - RNA, 19 nt, artificial
  Chemically synthesized
cucaguagcugaaguuacc

SEQ ID NO: 3550 - RNA, 19 nt, artificial
  Chemically synthesized
gggugacuuuuuaaauaaa

SEQ ID NO: 3551 - RNA, 19 nt, artificial
  Chemically synthesized
ggcaguauaucuuuguuaa

SEQ ID NO: 3552 - RNA, 19 nt, artificial
  Chemically synthesized
ggugacuuuuuaaauaaaa

SEQ ID NO: 3553 - RNA, 19 nt, artificial
  Chemically synthesized
caaugaguuuucuacaaua

SEQ ID NO: 3554 - RNA, 19 nt, artificial
  Chemically synthesized
cagugugaacagcaauuua

SEQ ID NO: 3555 - RNA, 19 nt, artificial
  Chemically synthesized
agaagguugugauuaccaa

SEQ ID NO: 3556 - RNA, 19 nt, artificial
  Chemically synthesized
ggugguucagaguuauaca

SEQ ID NO: 3557 - RNA, 19 nt, artificial
  Chemically synthesized
caucgugacaggucugaaa

SEQ ID NO: 3558 - RNA, 19 nt, artificial
  Chemically synthesized
agggugacuuuuuaaauaa

SEQ ID NO: 3559 - RNA, 19 nt, artificial
  Chemically synthesized
gagaaggaaggcagaauaa

SEQ ID NO: 3560 - RNA, 19 nt, artificial
  Chemically synthesized
gaccaaugugggacaauga

SEQ ID NO: 3561 - RNA, 19 nt, artificial
  Chemically synthesized
caccggucauucuuuauau

SEQ ID NO: 3562 - RNA, 19 nt, artificial
  Chemically synthesized
gaaagcaauuggaucacaa

SEQ ID NO: 3563 - RNA, 19 nt, artificial
  Chemically synthesized
cauucuuuauaucugugaa

SEQ ID NO: 3564 - RNA, 19 nt, artificial
  Chemically synthesized
guguuuuucacaucuuaaa

SEQ ID NO: 3565 - RNA, 19 nt, artificial
  Chemically synthesized
gaacaacaauauucaccaa

SEQ ID NO: 3566 - RNA, 19 nt, artificial
  Chemically synthesized
aaguagggugacuuuuuaa

SEQ ID NO: 3567 - RNA, 19 nt, artificial
  Chemically synthesized
uauuuuugcucaucaaaaa

SEQ ID NO: 3568 - RNA, 19 nt, artificial
  Chemically synthesized
gcucucugcuugaauuuua

SEQ ID NO: 3569 - RNA, 19 nt, artificial
  Chemically synthesized
cagaggagagcaugaauga

SEQ ID NO: 3570 - RNA, 19 nt, artificial
  Chemically synthesized
aagggcuuucgaacaacaa

SEQ ID NO: 3571 - RNA, 19 nt, artificial
  Chemically synthesized
caacaaagaaaauuuuuga

SEQ ID NO: 3572 - RNA, 19 nt, artificial
  Chemically synthesized
uagggugacuuuuuaaaua

SEQ ID NO: 3573 - RNA, 19 nt, artificial
  Chemically synthesized
ucagaaaaauaacuguaaa

SEQ ID NO: 3574 - RNA, 19 nt, artificial
  Chemically synthesized
gugugaacagcaauuuauu

SEQ ID NO: 3575 - RNA, 19 nt, artificial
  Chemically synthesized
gaucgugacucccacugua

SEQ ID NO: 3576 - RNA, 19 nt, artificial
  Chemically synthesized
ucuuauuuuugcucaucaa

SEQ ID NO: 3577 - RNA, 19 nt, artificial
  Chemically synthesized
gacaguggaguaugugaca

SEQ ID NO: 3578 - RNA, 19 nt, artificial
  Chemically synthesized
gacaaugaguuuucuacaa

SEQ ID NO: 3579 - RNA, 19 nt, artificial
  Chemically synthesized
gcaguauaucuuuguuaau

SEQ ID NO: 3580 - RNA, 19 nt, artificial
  Chemically synthesized
agaaggaaggcagaauaaa

SEQ ID NO: 3581 - RNA, 19 nt, artificial
  Chemically synthesized
cagaauccggauugcugaa

SEQ ID NO: 3582 - RNA, 19 nt, artificial
  Chemically synthesized
gcuucuaucuugaaaucca

SEQ ID NO: 3583 - RNA, 19 nt, artificial
  Chemically synthesized
cgucugcucucugcuugaa

SEQ ID NO: 3584 - RNA, 19 nt, artificial
  Chemically synthesized
uauccagugugaacagcaa

SEQ ID NO: 3585 - RNA, 19 nt, artificial
  Chemically synthesized
gcagaauaaacuuauucau

SEQ ID NO: 3586 - RNA, 19 nt, artificial
  Chemically synthesized
aauucuacuucaacaaaga

SEQ ID NO: 3587 - RNA, 19 nt, artificial
  Chemically synthesized
uguuaugcacccauccaaa

SEQ ID NO: 3588 - RNA, 19 nt, artificial
  Chemically synthesized
agcagucacuuuaggauaa

SEQ ID NO: 3589 - RNA, 19 nt, artificial
  Chemically synthesized
cauaagggcuuucgaacaa

SEQ ID NO: 3590 - RNA, 19 nt, artificial
  Chemically synthesized
auaugagaaggccgacaaa

SEQ ID NO: 3591 - RNA, 19 nt, artificial
  Chemically synthesized
uguggaugccuuccugaaa

SEQ ID NO: 3592 - RNA, 19 nt, artificial
  Chemically synthesized
augccuuccugaaauauga

SEQ ID NO: 3593 - RNA, 19 nt, artificial
  Chemically synthesized
cauucauauccgagcagca

SEQ ID NO: 3594 - RNA, 19 nt, artificial
  Chemically synthesized
gcagagguuuggugguuca

SEQ ID NO: 3595 - RNA, 19 nt, artificial
  Chemically synthesized
aaggcagaauaaacuuauu

SEQ ID NO: 3596 - RNA, 19 nt, artificial
  Chemically synthesized
cacagaagauuucuaagua

SEQ ID NO: 3597 - RNA, 19 nt, artificial
  Chemically synthesized
uccagugugcagaccacaa

SEQ ID NO: 3598 - RNA, 19 nt, artificial
  Chemically synthesized
guucaauucuacuucaaca

SEQ ID NO: 3599 - RNA, 19 nt, artificial
  Chemically synthesized
caaacagaggagagcauga

SEQ ID NO: 3600 - RNA, 19 nt, artificial
  Chemically synthesized
ggcagaauaaacuuauuca

SEQ ID NO: 3601 - RNA, 19 nt, artificial
  Chemically synthesized
auaagaaugugccucucaa

SEQ ID NO: 3602 - RNA, 19 nt, artificial
  Chemically synthesized
caauauucaccaauuccca

SEQ ID NO: 3603 - RNA, 19 nt, artificial
  Chemically synthesized
gaggagagcaugaaugaga

SEQ ID NO: 3604 - RNA, 19 nt, artificial
  Chemically synthesized
guuggucaugcagcauuaa

SEQ ID NO: 3605 - RNA, 19 nt, artificial
  Chemically synthesized
cugguauucuuuuuuugau

SEQ ID NO: 3606 - RNA, 19 nt, artificial
  Chemically synthesized
gaaacacgacaguggagua

SEQ ID NO: 3607 - RNA, 19 nt, artificial
  Chemically synthesized
caucuuaaaggcucacaga

SEQ ID NO: 3608 - RNA, 19 nt, artificial
  Chemically synthesized
ucucauaagggcuuucgaa

SEQ ID NO: 3609 - RNA, 19 nt, artificial
  Chemically synthesized
gccgacaaauacuacuaca

SEQ ID NO: 3610 - RNA, 19 nt, artificial
  Chemically synthesized
uuuuggaauugcagaugaa

SEQ ID NO: 3611 - RNA, 19 nt, artificial
  Chemically synthesized
ggucauucuuuauaucugu

SEQ ID NO: 3612 - RNA, 19 nt, artificial
  Chemically synthesized
gugacaggucugaaacaga

SEQ ID NO: 3613 - RNA, 19 nt, artificial
  Chemically synthesized
ggagaccaaugugggacaa

SEQ ID NO: 3614 - RNA, 19 nt, artificial
  Chemically synthesized
ggacgguaaucugcauuuu

SEQ ID NO: 3615 - RNA, 19 nt, artificial
  Chemically synthesized
gcaccggucauucuuuaua

SEQ ID NO: 3616 - RNA, 19 nt, artificial
  Chemically synthesized
gaaggaaggcagaauaaac

SEQ ID NO: 3617 - RNA, 19 nt, artificial
  Chemically synthesized
gagugaucaugacaauagc

SEQ ID NO: 3618 - RNA, 19 nt, artificial
  Chemically synthesized
ucuacuucaacaaagaaaa

SEQ ID NO: 3619 - RNA, 19 nt, artificial
  Chemically synthesized
gagcagucacuuuaggaua

SEQ ID NO: 3620 - RNA, 19 nt, artificial
  Chemically synthesized
agagaaggaaggcagaaua

SEQ ID NO: 3621 - RNA, 19 nt, artificial
  Chemically synthesized
gacuggacagaaaaucuca

SEQ ID NO: 3622 - RNA, 19 nt, artificial
  Chemically synthesized
ccagagaaggaaggcagaa

SEQ ID NO: 3623 - RNA, 19 nt, artificial
  Chemically synthesized
ggucaugcagcauuaaacu

SEQ ID NO: 3624 - RNA, 19 nt, artificial
  Chemically synthesized
uggaugccuuccugaaaua

SEQ ID NO: 3625 - RNA, 19 nt, artificial
  Chemically synthesized
cuuauuuuugcucaucaaa

SEQ ID NO: 3626 - RNA, 19 nt, artificial
  Chemically synthesized
uuugcucaucaaaaaauaa

SEQ ID NO: 3627 - RNA, 19 nt, artificial
  Chemically synthesized
ucagaguuauacaacuaau

SEQ ID NO: 3628 - RNA, 19 nt, artificial
  Chemically synthesized
cagaaaaauaacuguaaau

SEQ ID NO: 3629 - RNA, 19 nt, artificial
  Chemically synthesized
gguuagggcugaauguuuu

SEQ ID NO: 3630 - RNA, 19 nt, artificial
  Chemically synthesized
cucagaaaaauaacuguaa

SEQ ID NO: 3631 - RNA, 19 nt, artificial
  Chemically synthesized
cuacuucaacaaagaaaau

SEQ ID NO: 3632 - RNA, 19 nt, artificial
  Chemically synthesized
gauuucuucuccauucaua

SEQ ID NO: 3633 - RNA, 19 nt, artificial
  Chemically synthesized
ugaaauccaucugguacaa

SEQ ID NO: 3634 - RNA, 19 nt, artificial
  Chemically synthesized
aacuguaaaucuuucugga

SEQ ID NO: 3635 - RNA, 19 nt, artificial
  Chemically synthesized
aaauccaucugguacaaau

SEQ ID NO: 3636 - RNA, 19 nt, artificial
  Chemically synthesized
uuuuuuugauugcauucaa

SEQ ID NO: 3637 - RNA, 19 nt, artificial
  Chemically synthesized
caccaauucccaggauuga

SEQ ID NO: 3638 - RNA, 19 nt, artificial
  Chemically synthesized
guggaugccuuccugaaau

SEQ ID NO: 3639 - RNA, 19 nt, artificial
  Chemically synthesized
gauucucaugguaacuuca

SEQ ID NO: 3640 - RNA, 19 nt, artificial
  Chemically synthesized
augagaaggccgacaaaua

SEQ ID NO: 3641 - RNA, 19 nt, artificial
  Chemically synthesized
gaaggcagaauaaacuuau

SEQ ID NO: 3642 - RNA, 19 nt, artificial
  Chemically synthesized
gcaaagagccugcgcaaau

SEQ ID NO: 3643 - RNA, 19 nt, artificial
  Chemically synthesized
caguguuaccaucuccuga

SEQ ID NO: 3644 - RNA, 19 nt, artificial
  Chemically synthesized
uaggaauaaggacgguaau

SEQ ID NO: 3645 - RNA, 19 nt, artificial
  Chemically synthesized
ugcugucaccgauauucca

SEQ ID NO: 3646 - RNA, 19 nt, artificial
  Chemically synthesized
ucuugaaauccaucuggua

SEQ ID NO: 3647 - RNA, 19 nt, artificial
  Chemically synthesized
acacgacaguggaguaugu

SEQ ID NO: 3648 - RNA, 19 nt, artificial
  Chemically synthesized
ucgugacaggucugaaaca

SEQ ID NO: 3649 - RNA, 19 nt, artificial
  Chemically synthesized
guaggcgcccuaaguuuga

SEQ ID NO: 3650 - RNA, 19 nt, artificial
  Chemically synthesized
ggaaggcagaauaaacuua

SEQ ID NO: 3651 - RNA, 19 nt, artificial
  Chemically synthesized
agaccacaaccucaaaaca

SEQ ID NO: 3652 - RNA, 19 nt, artificial
  Chemically synthesized
ucauugcacaccuguuuaa

SEQ ID NO: 3653 - RNA, 19 nt, artificial
  Chemically synthesized
uuuugcucaucaaaaaaua

SEQ ID NO: 3654 - RNA, 19 nt, artificial
  Chemically synthesized
caugguaacuucagcuacu

SEQ ID NO: 3655 - RNA, 19 nt, artificial
  Chemically synthesized
ccucaaucucucuccugga

SEQ ID NO: 3656 - RNA, 19 nt, artificial
  Chemically synthesized
gggcaguauaucuuuguua

SEQ ID NO: 3657 - RNA, 19 nt, artificial
  Chemically synthesized
gcccauggauccuuucuca

SEQ ID NO: 3658 - RNA, 19 nt, artificial
  Chemically synthesized
agugugaacagcaauuuau

SEQ ID NO: 3659 - RNA, 19 nt, artificial
  Chemically synthesized
cuacauacagcuauucaca

SEQ ID NO: 3660 - RNA, 19 nt, artificial
  Chemically synthesized
acaucgugacaggucugaa

SEQ ID NO: 3661 - RNA, 19 nt, artificial
  Chemically synthesized
cagaagguugugauuacca

SEQ ID NO: 3662 - RNA, 19 nt, artificial
  Chemically synthesized
ugugcagagucuuuugaga

SEQ ID NO: 3663 - RNA, 19 nt, artificial
  Chemically synthesized
uaaggacgguaaucugcau

SEQ ID NO: 3664 - RNA, 19 nt, artificial
  Chemically synthesized
gugaggauguuuuccagua

SEQ ID NO: 3665 - RNA, 19 nt, artificial
  Chemically synthesized
uaggcgcccuaaguuugaa

SEQ ID NO: 3666 - RNA, 19 nt, artificial
  Chemically synthesized
guuuggugguucagaguua

SEQ ID NO: 3667 - RNA, 19 nt, artificial
  Chemically synthesized
uaagggcuuucgaacaaca

SEQ ID NO: 3668 - RNA, 19 nt, artificial
  Chemically synthesized
aucacaaccucaccuucca

SEQ ID NO: 3669 - RNA, 19 nt, artificial
  Chemically synthesized
gaacagcaauuuauucuua

SEQ ID NO: 3670 - RNA, 19 nt, artificial
  Chemically synthesized
uguuuaacuuugacugcua

SEQ ID NO: 3671 - RNA, 19 nt, artificial
  Chemically synthesized
gaagguugugauuaccaag

SEQ ID NO: 3672 - RNA, 19 nt, artificial
  Chemically synthesized
agggauucacggcauuggu

SEQ ID NO: 3673 - RNA, 19 nt, artificial
  Chemically synthesized
uaaacaaaauuaccgagaa

SEQ ID NO: 3674 - RNA, 19 nt, artificial
  Chemically synthesized
guuuaacuuugacugcuau

SEQ ID NO: 3675 - RNA, 19 nt, artificial
  Chemically synthesized
guuacuugagcuucagcaa

SEQ ID NO: 3676 - RNA, 19 nt, artificial
  Chemically synthesized
cacuggagugaucaugaca

SEQ ID NO: 3677 - RNA, 19 nt, artificial
  Chemically synthesized
uuauuuuugcucaucaaaa

SEQ ID NO: 3678 - RNA, 19 nt, artificial
  Chemically synthesized
gagcuucagcaacuuaaga

SEQ ID NO: 3679 - RNA, 19 nt, artificial
  Chemically synthesized
caccuuuuuaucuucuaua

SEQ ID NO: 3680 - RNA, 19 nt, artificial
  Chemically synthesized
cucaaucucucuccuggaa

SEQ ID NO: 3681 - RNA, 19 nt, artificial
  Chemically synthesized
agcuauucacaucauugca

SEQ ID NO: 3682 - RNA, 19 nt, artificial
  Chemically synthesized
cauguuuacugucacuuuu

SEQ ID NO: 3683 - RNA, 19 nt, artificial
  Chemically synthesized
gauucacggcauuggugga

SEQ ID NO: 3684 - RNA, 19 nt, artificial
  Chemically synthesized
aguucuguccagagaagga

SEQ ID NO: 3685 - RNA, 19 nt, artificial
  Chemically synthesized
caaugugggacaaugaguu

SEQ ID NO: 3686 - RNA, 19 nt, artificial
  Chemically synthesized
acgacaguggaguauguga

SEQ ID NO: 3687 - RNA, 19 nt, artificial
  Chemically synthesized
gcaaaugcugucaccgaua

SEQ ID NO: 3688 - RNA, 19 nt, artificial
  Chemically synthesized
cuucaacaaagaaaauuuu

SEQ ID NO: 3689 - RNA, 19 nt, artificial
  Chemically synthesized
auucuacuucaacaaagaa

SEQ ID NO: 3690 - RNA, 19 nt, artificial
  Chemically synthesized
agagguuuggugguucaga

SEQ ID NO: 3691 - RNA, 19 nt, artificial
  Chemically synthesized
caaagaaaauuuuugaguu

SEQ ID NO: 3692 - RNA, 19 nt, artificial
  Chemically synthesized
gcuccaaaccaccucuuga

SEQ ID NO: 3693 - RNA, 19 nt, artificial
  Chemically synthesized
aaguucugaaguucuuaaa

SEQ ID NO: 3694 - RNA, 19 nt, artificial
  Chemically synthesized
uugcucaucaaaaaauaaa

SEQ ID NO: 3695 - RNA, 19 nt, artificial
  Chemically synthesized
aauccaucugguacaaauu

SEQ ID NO: 3696 - RNA, 19 nt, artificial
  Chemically synthesized
uuggucaugcagcauuaaa

SEQ ID NO: 3697 - RNA, 19 nt, artificial
  Chemically synthesized
gguuugagcagucacuuua

SEQ ID NO: 3698 - RNA, 19 nt, artificial
  Chemically synthesized
uccagagaaggaaggcaga

SEQ ID NO: 3699 - RNA, 19 nt, artificial
  Chemically synthesized
caaaccaccucuugacaau

SEQ ID NO: 3700 - RNA, 19 nt, artificial
  Chemically synthesized
acaauagccuugauucuca

SEQ ID NO: 3701 - RNA, 19 nt, artificial
  Chemically synthesized
aacuuugacugcuauagca

SEQ ID NO: 3702 - RNA, 19 nt, artificial
  Chemically synthesized
gucgcaaucugcuguccuu

SEQ ID NO: 3703 - RNA, 19 nt, artificial
  Chemically synthesized
cagaauaaacuuauucauu

SEQ ID NO: 3704 - RNA, 19 nt, artificial
  Chemically synthesized
agaaggccgacaaauacua

SEQ ID NO: 3705 - RNA, 19 nt, artificial
  Chemically synthesized
cucacuggagugaucauga

SEQ ID NO: 3706 - RNA, 19 nt, artificial
  Chemically synthesized
uuguggaugccuuccugaa

SEQ ID NO: 3707 - RNA, 19 nt, artificial
  Chemically synthesized
aauuuuugaguuauaggaa

SEQ ID NO: 3708 - RNA, 19 nt, artificial
  Chemically synthesized
ugguauucuuuuuuugauu

SEQ ID NO: 3709 - RNA, 19 nt, artificial
  Chemically synthesized
acaaauguuccauuccuga

SEQ ID NO: 3710 - RNA, 19 nt, artificial
  Chemically synthesized
aacagaggagagcaugaau

SEQ ID NO: 3711 - RNA, 19 nt, artificial
  Chemically synthesized
uccggaggaguuauuuuga

SEQ ID NO: 3712 - RNA, 19 nt, artificial
  Chemically synthesized
aaacagaggagagcaugaa

SEQ ID NO: 3713 - RNA, 19 nt, artificial
  Chemically synthesized
gguuaaccacugguuuuca

SEQ ID NO: 3714 - RNA, 19 nt, artificial
  Chemically synthesized
cagcauugcuggucucacu

SEQ ID NO: 3715 - RNA, 19 nt, artificial
  Chemically synthesized
caugaaugagagucauccu

SEQ ID NO: 3716 - RNA, 19 nt, artificial
  Chemically synthesized
ggucaaacagaggagagca

SEQ ID NO: 3717 - RNA, 19 nt, artificial
  Chemically synthesized
auguuuuccuguuugugga

SEQ ID NO: 3718 - RNA, 19 nt, artificial
  Chemically synthesized
caugcagcauuaaacuuug

SEQ ID NO: 3719 - RNA, 19 nt, artificial
  Chemically synthesized
caguauaucuuuguuaauu

SEQ ID NO: 3720 - RNA, 19 nt, artificial
  Chemically synthesized
guacaaauuccagugugca

SEQ ID NO: 3721 - RNA, 19 nt, artificial
  Chemically synthesized
guuucugguuguuugguua

SEQ ID NO: 3722 - RNA, 19 nt, artificial
  Chemically synthesized
acaaccucaaaacaaaaaa

SEQ ID NO: 3723 - RNA, 19 nt, artificial
  Chemically synthesized
cuuugacugcuauagcaga

SEQ ID NO: 3724 - RNA, 19 nt, artificial
  Chemically synthesized
auuuuugcucaucaaaaaa

SEQ ID NO: 3725 - RNA, 19 nt, artificial
  Chemically synthesized
caauuggaucacaaccuca

SEQ ID NO: 3726 - RNA, 19 nt, artificial
  Chemically synthesized
caaagagccugcgcaaaug

SEQ ID NO: 3727 - RNA, 19 nt, artificial
  Chemically synthesized
ugaaggaccucuccagaau

SEQ ID NO: 3728 - RNA, 19 nt, artificial
  Chemically synthesized
cuuugaccucugcuccaga

SEQ ID NO: 3729 - RNA, 19 nt, artificial
  Chemically synthesized
aaggaaggcagaauaaacu

SEQ ID NO: 3730 - RNA, 19 nt, artificial
  Chemically synthesized
augcagcauuaaacuuuga

SEQ ID NO: 3731 - RNA, 19 nt, artificial
  Chemically synthesized
augggaaacugggugguua

SEQ ID NO: 3732 - RNA, 19 nt, artificial
  Chemically synthesized
gaaauccaucugguacaaa

SEQ ID NO: 3733 - RNA, 19 nt, artificial
  Chemically synthesized
caucauugcacaccuguuu

SEQ ID NO: 3734 - RNA, 19 nt, artificial
  Chemically synthesized
gcacacugagaaagcaauu

SEQ ID NO: 3735 - RNA, 19 nt, artificial
  Chemically synthesized
uccuuucucagaaaaauaa

SEQ ID NO: 3736 - RNA, 19 nt, artificial
  Chemically synthesized
aacuucugaaguucuuaaa

SEQ ID NO: 3737 - RNA, 19 nt, artificial
  Chemically synthesized
auccagucccgaaacacga

SEQ ID NO: 3738 - RNA, 19 nt, artificial
  Chemically synthesized
aaaguucugaaguucuuaa

SEQ ID NO: 3739 - RNA, 19 nt, artificial
  Chemically synthesized
cagcagaagguugugauua

SEQ ID NO: 3740 - RNA, 19 nt, artificial
  Chemically synthesized
aggaaggcagaauaaacuu

SEQ ID NO: 3741 - RNA, 19 nt, artificial
  Chemically synthesized
ugaaguggauggucccuuu

SEQ ID NO: 3742 - RNA, 19 nt, artificial
  Chemically synthesized
aucucauaagggcuuucga

SEQ ID NO: 3743 - RNA, 19 nt, artificial
  Chemically synthesized
caaccucaccuuccacaag

SEQ ID NO: 3744 - RNA, 19 nt, artificial
  Chemically synthesized
auucuuuauaucugugaaa

SEQ ID NO: 3745 - RNA, 19 nt, artificial
  Chemically synthesized
aguucauccggaggaguua

SEQ ID NO: 3746 - RNA, 19 nt, artificial
  Chemically synthesized
ugcucaucaaaaaauaaag

SEQ ID NO: 3747 - RNA, 19 nt, artificial
  Chemically synthesized
ucaauucuacuucaacaaa

SEQ ID NO: 3748 - RNA, 19 nt, artificial
  Chemically synthesized
caauucuacuucaacaaag

SEQ ID NO: 3749 - RNA, 19 nt, artificial
  Chemically synthesized
uucagaguuauacaacuaa

SEQ ID NO: 3750 - RNA, 19 nt, artificial
  Chemically synthesized
ccaaaccaccucuugacaa

SEQ ID NO: 3751 - RNA, 19 nt, artificial
  Chemically synthesized
gaaaaauaacuguaaaucu

SEQ ID NO: 3752 - RNA, 19 nt, artificial
  Chemically synthesized
uugcaccggucauucuuua

SEQ ID NO: 3753 - RNA, 19 nt, artificial
  Chemically synthesized
guucuguccagagaaggaa

SEQ ID NO: 3754 - RNA, 19 nt, artificial
  Chemically synthesized
gaauaaggacgguaaucug

SEQ ID NO: 3755 - RNA, 19 nt, artificial
  Chemically synthesized
aguucuuaaagcccaugga

SEQ ID NO: 3756 - RNA, 19 nt, artificial
  Chemically synthesized
uucccaggauugaagugga

SEQ ID NO: 3757 - RNA, 19 nt, artificial
  Chemically synthesized
ggucuuauccagugugaac

SEQ ID NO: 3758 - RNA, 19 nt, artificial
  Chemically synthesized
aucccauccagucccgaaa

SEQ ID NO: 3759 - RNA, 19 nt, artificial
  Chemically synthesized
cuagaagggcuccaaacca

SEQ ID NO: 3760 - RNA, 19 nt, artificial
  Chemically synthesized
cauugcuggucucacugga

SEQ ID NO: 3761 - RNA, 19 nt, artificial
  Chemically synthesized
caucugguacaaauuccag

SEQ ID NO: 3762 - RNA, 19 nt, artificial
  Chemically synthesized
guuuacugucacuuuugau

SEQ ID NO: 3763 - RNA, 19 nt, artificial
  Chemically synthesized
cagagaaggaaggcagaau

SEQ ID NO: 3764 - RNA, 19 nt, artificial
  Chemically synthesized
uuggugguucagaguuaua

SEQ ID NO: 3765 - RNA, 19 nt, artificial
  Chemically synthesized
gauuuucuucuucacuuga

SEQ ID NO: 3766 - RNA, 19 nt, artificial
  Chemically synthesized
cuuuguaucuucaguaauu

SEQ ID NO: 3767 - RNA, 19 nt, artificial
  Chemically synthesized
guagcaaggcuugauagca

SEQ ID NO: 3768 - RNA, 19 nt, artificial
  Chemically synthesized
gcaagugugcagagucuuu

SEQ ID NO: 3769 - RNA, 19 nt, artificial
  Chemically synthesized
acagcaauuuauucuuauu

SEQ ID NO: 3770 - RNA, 19 nt, artificial
  Chemically synthesized
gcuugauagcagagguuug

SEQ ID NO: 3771 - RNA, 19 nt, artificial
  Chemically synthesized
ucugcucucugcuugaauu

SEQ ID NO: 3772 - RNA, 19 nt, artificial
  Chemically synthesized
uugggagaccaauguggga

SEQ ID NO: 3773 - RNA, 19 nt, artificial
  Chemically synthesized
gcuccagaggaagauuucu

SEQ ID NO: 3774 - RNA, 19 nt, artificial
  Chemically synthesized
cauccggaggaguuauuuu

SEQ ID NO: 3775 - RNA, 19 nt, artificial
  Chemically synthesized
gagaaggccgacaaauacu

SEQ ID NO: 3776 - RNA, 19 nt, artificial
  Chemically synthesized
aaucccauccagucccgaa

SEQ ID NO: 3777 - RNA, 19 nt, artificial
  Chemically synthesized
ccauggauccuuucucaga

SEQ ID NO: 3778 - RNA, 19 nt, artificial
  Chemically synthesized
uuaccaagguuguuaugca

SEQ ID NO: 3779 - RNA, 19 nt, artificial
  Chemically synthesized
gaaaauuuuugaguuauag

SEQ ID NO: 3780 - RNA, 19 nt, artificial
  Chemically synthesized
aguuauacaacuaauccca

SEQ ID NO: 3781 - RNA, 19 nt, artificial
  Chemically synthesized
ucuccagccuaucucauga

SEQ ID NO: 3782 - RNA, 19 nt, artificial
  Chemically synthesized
ugugcagaccacaaccuca

SEQ ID NO: 3783 - RNA, 19 nt, artificial
  Chemically synthesized
caccgauauuccagucugg

SEQ ID NO: 3784 - RNA, 19 nt, artificial
  Chemically synthesized
uaucucaugaugagaaaaa

SEQ ID NO: 3785 - RNA, 19 nt, artificial
  Chemically synthesized
gauagcacaguucugucca

SEQ ID NO: 3786 - RNA, 19 nt, artificial
  Chemically synthesized
ggucugaaacagaaaaccu

SEQ ID NO: 3787 - RNA, 19 nt, artificial
  Chemically synthesized
agccuaucucaugaugaga

SEQ ID NO: 3788 - RNA, 19 nt, artificial
  Chemically synthesized
uagccuugauucucauggu

SEQ ID NO: 3789 - RNA, 19 nt, artificial
  Chemically synthesized
aaauuuuugaguuauagga

SEQ ID NO: 3790 - RNA, 19 nt, artificial
  Chemically synthesized
aaaggauuuucuucuucac

SEQ ID NO: 3791 - RNA, 19 nt, artificial
  Chemically synthesized
uuggaauugcagaugaaca

SEQ ID NO: 3792 - RNA, 19 nt, artificial
  Chemically synthesized
ucauaagggcuuucgaaca

SEQ ID NO: 3793 - RNA, 19 nt, artificial
  Chemically synthesized
caucaaaaaauaaaggauu

SEQ ID NO: 3794 - RNA, 19 nt, artificial
  Chemically synthesized
aagccuugacucccuggua

SEQ ID NO: 3795 - RNA, 19 nt, artificial
  Chemically synthesized
cuucagcuacugaguucau

SEQ ID NO: 3796 - RNA, 19 nt, artificial
  Chemically synthesized
accuuuuuaucuucuauau

SEQ ID NO: 3797 - RNA, 19 nt, artificial
  Chemically synthesized
gcugaauguuuuccuguuu

SEQ ID NO: 3798 - RNA, 19 nt, artificial
  Chemically synthesized
uuccagucuggauccuaga

SEQ ID NO: 3799 - RNA, 19 nt, artificial
  Chemically synthesized
auuucuucuccauucauau

SEQ ID NO: 3800 - RNA, 19 nt, artificial
  Chemically synthesized
cugcuauagcagaagccga

SEQ ID NO: 3801 - RNA, 19 nt, artificial
  Chemically synthesized
uaaaggauuuucuucuuca

SEQ ID NO: 3802 - RNA, 19 nt, artificial
  Chemically synthesized
cuguaggcgcccuaaguuu

SEQ ID NO: 3803 - RNA, 19 nt, artificial
  Chemically synthesized
agucuuuugagauguggga

SEQ ID NO: 3804 - RNA, 19 nt, artificial
  Chemically synthesized
gaguuauaggaauaaggac

SEQ ID NO: 3805 - RNA, 19 nt, artificial
  Chemically synthesized
ugguaacuucagcuacuga

SEQ ID NO: 3806 - RNA, 19 nt, artificial
  Chemically synthesized
cccacagaagauuucuaag

SEQ ID NO: 3807 - RNA, 19 nt, artificial
  Chemically synthesized
ugagcuucagcaacuuaag

SEQ ID NO: 3808 - RNA, 19 nt, artificial
  Chemically synthesized
uucaauucuacuucaacaa

SEQ ID NO: 3809 - RNA, 19 nt, artificial
  Chemically synthesized
cacaaccucaccuuccaca

SEQ ID NO: 3810 - RNA, 19 nt, artificial
  Chemically synthesized
guacauguuuacugucacu

SEQ ID NO: 3811 - RNA, 19 nt, artificial
  Chemically synthesized
caaaugcugucaccgauau

SEQ ID NO: 3812 - RNA, 19 nt, artificial
  Chemically synthesized
ugagaaggccgacaaauac

SEQ ID NO: 3813 - RNA, 19 nt, artificial
  Chemically synthesized
auauaacaccaacagugua

SEQ ID NO: 3814 - RNA, 19 nt, artificial
  Chemically synthesized
augugacauucaccagcau

SEQ ID NO: 3815 - RNA, 19 nt, artificial
  Chemically synthesized
ggauuuucuucuucacuug

SEQ ID NO: 3816 - RNA, 19 nt, artificial
  Chemically synthesized
uagaaagguucaauucuac

SEQ ID NO: 3817 - RNA, 19 nt, artificial
  Chemically synthesized
aagucuucugguauacuca

SEQ ID NO: 3818 - RNA, 19 nt, artificial
  Chemically synthesized
agaaagguucaauucuacu

SEQ ID NO: 3819 - RNA, 19 nt, artificial
  Chemically synthesized
acugagaaagcaauuggau

SEQ ID NO: 3820 - RNA, 19 nt, artificial
  Chemically synthesized
ugagaaagcaauuggauca

SEQ ID NO: 3821 - RNA, 19 nt, artificial
  Chemically synthesized
aggauuuucuucuucacuu

SEQ ID NO: 3822 - RNA, 19 nt, artificial
  Chemically synthesized
uuucgaacaacaauauuca

SEQ ID NO: 3823 - RNA, 19 nt, artificial
  Chemically synthesized
acagaagauuucuaaguag

SEQ ID NO: 3824 - RNA, 19 nt, artificial
  Chemically synthesized
ugagaugugggaugaucgu

SEQ ID NO: 3825 - RNA, 19 nt, artificial
  Chemically synthesized
aucucaugaugagaaaaag

SEQ ID NO: 3826 - RNA, 19 nt, artificial
  Chemically synthesized
guaucuucaguaauuuacu

SEQ ID NO: 3827 - RNA, 19 nt, artificial
  Chemically synthesized
auccuuucucagaaaaaua

SEQ ID NO: 3828 - RNA, 19 nt, artificial
  Chemically synthesized
cauauaacaccaacagugu

SEQ ID NO: 3829 - RNA, 19 nt, artificial
  Chemically synthesized
uauaugaucugccuacaua

SEQ ID NO: 3830 - RNA, 19 nt, artificial
  Chemically synthesized
gucucgucagguuugagca

SEQ ID NO: 3831 - RNA, 19 nt, artificial
  Chemically synthesized
acaacaauauucaccaauu

SEQ ID NO: 3832 - RNA, 19 nt, artificial
  Chemically synthesized
acugguuuucaguuuuguu

SEQ ID NO: 3833 - RNA, 19 nt, artificial
  Chemically synthesized
cauucaacuucguuacuug

SEQ ID NO: 3834 - RNA, 19 nt, artificial
  Chemically synthesized
ggagugaucaugacaauag

SEQ ID NO: 3835 - RNA, 19 nt, artificial
  Chemically synthesized
guuugagcagucacuuuag

SEQ ID NO: 3836 - RNA, 19 nt, artificial
  Chemically synthesized
guuguuaugcacccaucca

SEQ ID NO: 3837 - RNA, 19 nt, artificial
  Chemically synthesized
caaucucucuccuggaaug

SEQ ID NO: 3838 - RNA, 19 nt, artificial
  Chemically synthesized
uugugauuaccaagguugu

SEQ ID NO: 3839 - RNA, 19 nt, artificial
  Chemically synthesized
aauccggauugcugaaucu

SEQ ID NO: 3840 - RNA, 19 nt, artificial
  Chemically synthesized
acaccaacaguguacaugu

SEQ ID NO: 3841 - RNA, 19 nt, artificial
  Chemically synthesized
gagagucauccucgcaagu

SEQ ID NO: 3842 - RNA, 19 nt, artificial
  Chemically synthesized
guucuuaaagcccauggau

SEQ ID NO: 3843 - RNA, 19 nt, artificial
  Chemically synthesized
caaaguuuuggaauugcag

SEQ ID NO: 3844 - RNA, 19 nt, artificial
  Chemically synthesized
cuucuccauucauauccga

SEQ ID NO: 3845 - RNA, 19 nt, artificial
  Chemically synthesized
ugcugguuggagcaggaau

SEQ ID NO: 3846 - RNA, 19 nt, artificial
  Chemically synthesized
aacagcaauuuauucuuau

SEQ ID NO: 3847 - RNA, 19 nt, artificial
  Chemically synthesized
cuacaauagcuaccuccca

SEQ ID NO: 3848 - RNA, 19 nt, artificial
  Chemically synthesized
aaaugcugucaccgauauu

SEQ ID NO: 3849 - RNA, 19 nt, artificial
  Chemically synthesized
cuugcaccggucauucuuu

SEQ ID NO: 3850 - RNA, 19 nt, artificial
  Chemically synthesized
ccagugugaacagcaauuu

SEQ ID NO: 3851 - RNA, 19 nt, artificial
  Chemically synthesized
uaauaaacaaaauuaccga

SEQ ID NO: 3852 - RNA, 19 nt, artificial
  Chemically synthesized
uuuugaguuauaggaauaa

SEQ ID NO: 3853 - RNA, 19 nt, artificial
  Chemically synthesized
uugaaauccaucugguaca

SEQ ID NO: 3854 - RNA, 19 nt, artificial
  Chemically synthesized
ugacaaugggaaacugggu

SEQ ID NO: 3855 - RNA, 19 nt, artificial
  Chemically synthesized
cagaaaaucucauaagggc

SEQ ID NO: 3856 - RNA, 19 nt, artificial
  Chemically synthesized
ucacggcauugguggaauu

SEQ ID NO: 3857 - RNA, 19 nt, artificial
  Chemically synthesized
caacaauauucaccaauuc

SEQ ID NO: 3858 - RNA, 19 nt, artificial
  Chemically synthesized
aaggcuugauagcagaggu

SEQ ID NO: 3859 - RNA, 19 nt, artificial
  Chemically synthesized
auucaacuucguuacuuga

SEQ ID NO: 3860 - RNA, 19 nt, artificial
  Chemically synthesized
acuucaacaaagaaaauuu

SEQ ID NO: 3861 - RNA, 19 nt, artificial
  Chemically synthesized
aaaguuuuggaauugcaga

SEQ ID NO: 3862 - RNA, 19 nt, artificial
  Chemically synthesized
agaggagagcaugaaugag

SEQ ID NO: 3863 - RNA, 19 nt, artificial
  Chemically synthesized
gaagauuucuaaguagggu

SEQ ID NO: 3864 - RNA, 19 nt, artificial
  Chemically synthesized
cuuuauaucugugaaagga

SEQ ID NO: 3865 - RNA, 19 nt, artificial
  Chemically synthesized
auggucuuauccaguguga

SEQ ID NO: 3866 - RNA, 19 nt, artificial
  Chemically synthesized
uauucuuauuuuugcucau

SEQ ID NO: 3867 - RNA, 19 nt, artificial
  Chemically synthesized
gcagucacuuuaggauaag

SEQ ID NO: 3868 - RNA, 19 nt, artificial
  Chemically synthesized
uuugacugcuauagcagaa

SEQ ID NO: 3869 - RNA, 19 nt, artificial
  Chemically synthesized
auucuuuuuuugauugcau

SEQ ID NO: 3870 - RNA, 19 nt, artificial
  Chemically synthesized
gaaagguucaauucuacuu

SEQ ID NO: 3871 - RNA, 19 nt, artificial
  Chemically synthesized
accaaugugggacaaugag

SEQ ID NO: 3872 - RNA, 19 nt, artificial
  Chemically synthesized
aguuuugguuuguaaucuu

SEQ ID NO: 3873 - RNA, 19 nt, artificial
  Chemically synthesized
gauaagaaugugccucuca

SEQ ID NO: 3874 - RNA, 19 nt, artificial
  Chemically synthesized
aauaugagaaggccgacaa

SEQ ID NO: 3875 - RNA, 19 nt, artificial
  Chemically synthesized
cauacagcuauucacauca

SEQ ID NO: 3876 - RNA, 19 nt, artificial
  Chemically synthesized
aucccaggugauuuuauca

SEQ ID NO: 3877 - RNA, 19 nt, artificial
  Chemically synthesized
auaaggacgguaaucugca

SEQ ID NO: 3878 - RNA, 19 nt, artificial
  Chemically synthesized
gauguuuuccaguaugaag

SEQ ID NO: 3879 - RNA, 19 nt, artificial
  Chemically synthesized
uaugaucugccuacauaca

SEQ ID NO: 3880 - RNA, 19 nt, artificial
  Chemically synthesized
caauucccaggauugaagu

SEQ ID NO: 3881 - RNA, 19 nt, artificial
  Chemically synthesized
uucuacuucaacaaagaaa

SEQ ID NO: 3882 - RNA, 19 nt, artificial
  Chemically synthesized
ugauauggucuuauccagu

SEQ ID NO: 3883 - RNA, 19 nt, artificial
  Chemically synthesized
ucaucaaaaaauaaaggau

SEQ ID NO: 3884 - RNA, 19 nt, artificial
  Chemically synthesized
uuuggugguucagaguuau

SEQ ID NO: 3885 - RNA, 19 nt, artificial
  Chemically synthesized
accgauauuccagucugga

SEQ ID NO: 3886 - RNA, 19 nt, artificial
  Chemically synthesized
uuguaucuucaguaauuua

SEQ ID NO: 3887 - RNA, 19 nt, artificial
  Chemically synthesized
cucauuuugcagccgcaca

SEQ ID NO: 3888 - RNA, 19 nt, artificial
  Chemically synthesized
cuugagcuucagcaacuua

SEQ ID NO: 3889 - RNA, 19 nt, artificial
  Chemically synthesized
aucauugcacaccuguuua

SEQ ID NO: 3890 - RNA, 19 nt, artificial
  Chemically synthesized
gugauuaccaagguuguua

SEQ ID NO: 3891 - RNA, 19 nt, artificial
  Chemically synthesized
cucaucaaaaaauaaagga

SEQ ID NO: 3892 - RNA, 19 nt, artificial
  Chemically synthesized
aaguucuuaaaguucugaa

SEQ ID NO: 3893 - RNA, 19 nt, artificial
  Chemically synthesized
uucuuuuuuugauugcauu

SEQ ID NO: 3894 - RNA, 19 nt, artificial
  Chemically synthesized
aagaaaaauccuuggguca

SEQ ID NO: 3895 - RNA, 19 nt, artificial
  Chemically synthesized
gaaugagagucauccucgc

SEQ ID NO: 3896 - RNA, 19 nt, artificial
  Chemically synthesized
auuuuugaguuauaggaau

SEQ ID NO: 3897 - RNA, 19 nt, artificial
  Chemically synthesized
agugugcagagucuuuuga

SEQ ID NO: 3898 - RNA, 19 nt, artificial
  Chemically synthesized
uucucuccagccuaucuca

SEQ ID NO: 3899 - RNA, 19 nt, artificial
  Chemically synthesized
cagcaauuuauucuuauuu

SEQ ID NO: 3900 - RNA, 19 nt, artificial
  Chemically synthesized
agaaagcaauuggaucaca

SEQ ID NO: 3901 - RNA, 19 nt, artificial
  Chemically synthesized
uucuaaguagggugacuuu

SEQ ID NO: 3902 - RNA, 19 nt, artificial
  Chemically synthesized
uuuaccgcucccagcagaa

SEQ ID NO: 3903 - RNA, 19 nt, artificial
  Chemically synthesized
uuuaacuuugacugcuaua

SEQ ID NO: 3904 - RNA, 19 nt, artificial
  Chemically synthesized
ugugauuaccaagguuguu

SEQ ID NO: 3905 - RNA, 19 nt, artificial
  Chemically synthesized
agguuuggugguucagagu

SEQ ID NO: 3906 - RNA, 19 nt, artificial
  Chemically synthesized
cagagguuuggugguucag

SEQ ID NO: 3907 - RNA, 19 nt, artificial
  Chemically synthesized
acaaugaguuuucuacaau

SEQ ID NO: 3908 - RNA, 19 nt, artificial
  Chemically synthesized
gaugugggaugaucgugac

SEQ ID NO: 3909 - RNA, 19 nt, artificial
  Chemically synthesized
uucacaucuuaaaggcuca

SEQ ID NO: 3910 - RNA, 19 nt, artificial
  Chemically synthesized
aauuccagugugcagacca

SEQ ID NO: 3911 - RNA, 19 nt, artificial
  Chemically synthesized
aauaaaggauuuucuucuu

SEQ ID NO: 3912 - RNA, 19 nt, artificial
  Chemically synthesized
uaacaccaacaguguacau

SEQ ID NO: 3913 - RNA, 19 nt, artificial
  Chemically synthesized
augagagucauccucgcaa

SEQ ID NO: 3914 - RNA, 19 nt, artificial
  Chemically synthesized
uaaucccaggugauuuuau

SEQ ID NO: 3915 - RNA, 19 nt, artificial
  Chemically synthesized
uagcaaggcuugauagcag

SEQ ID NO: 3916 - RNA, 19 nt, artificial
  Chemically synthesized
gcaaucugcuguccuuccu

SEQ ID NO: 3917 - RNA, 19 nt, artificial
  Chemically synthesized
ccacagaagauuucuaagu

SEQ ID NO: 3918 - RNA, 19 nt, artificial
  Chemically synthesized
agauuucuaaguaggguga

SEQ ID NO: 3919 - RNA, 19 nt, artificial
  Chemically synthesized
guguacauguuuacuguca

SEQ ID NO: 3920 - RNA, 19 nt, artificial
  Chemically synthesized
auuccagugugcagaccac

SEQ ID NO: 3921 - RNA, 19 nt, artificial
  Chemically synthesized
uuuuugaguuauaggaaua

SEQ ID NO: 3922 - RNA, 19 nt, artificial
  Chemically synthesized
acuguaggcgcccuaaguu

SEQ ID NO: 3923 - RNA, 19 nt, artificial
  Chemically synthesized
uucugaaguucuuaaaguu

SEQ ID NO: 3924 - RNA, 19 nt, artificial
  Chemically synthesized
gauugcauucaacuucguu

SEQ ID NO: 3925 - RNA, 19 nt, artificial
  Chemically synthesized
aaagcaauuggaucacaac

SEQ ID NO: 3926 - RNA, 19 nt, artificial
  Chemically synthesized
auccagugugaacagcaau

SEQ ID NO: 3927 - RNA, 19 nt, artificial
  Chemically synthesized
uugauauggucuuauccag

SEQ ID NO: 3928 - RNA, 19 nt, artificial
  Chemically synthesized
aggcgcccuaaguuugaag

SEQ ID NO: 3929 - RNA, 19 nt, artificial
  Chemically synthesized
caaauuccagugugcagac

SEQ ID NO: 3930 - RNA, 19 nt, artificial
  Chemically synthesized
cacugacaucgugacaggu

SEQ ID NO: 3931 - RNA, 19 nt, artificial
  Chemically synthesized
uuuugcagccgcacacuga

SEQ ID NO: 3932 - RNA, 19 nt, artificial
  Chemically synthesized
uaagaaugugccucucaag

SEQ ID NO: 3933 - RNA, 19 nt, artificial
  Chemically synthesized
ggucucacuggagugauca

SEQ ID NO: 3934 - RNA, 19 nt, artificial
  Chemically synthesized
uauacucaccaccuuuuua

SEQ ID NO: 3935 - RNA, 19 nt, artificial
  Chemically synthesized
gugugcagagucuuuugag

SEQ ID NO: 3936 - RNA, 19 nt, artificial
  Chemically synthesized
auugcauucaacuucguua

SEQ ID NO: 3937 - RNA, 19 nt, artificial
  Chemically synthesized
aaucugcuguccuuccuga

SEQ ID NO: 3938 - RNA, 19 nt, artificial
  Chemically synthesized
uauucuuuuuuugauugca

SEQ ID NO: 3939 - RNA, 19 nt, artificial
  Chemically synthesized
aaaaauccuugggucaaca

SEQ ID NO: 3940 - RNA, 19 nt, artificial
  Chemically synthesized
gcuauagcagaagccgaca

SEQ ID NO: 3941 - RNA, 19 nt, artificial
  Chemically synthesized
auacagcuauucacaucau

SEQ ID NO: 3942 - RNA, 19 nt, artificial
  Chemically synthesized
uugcacaccuguuuaacuu

SEQ ID NO: 3943 - RNA, 19 nt, artificial
  Chemically synthesized
guaacuucagcuacugagu

SEQ ID NO: 3944 - RNA, 19 nt, artificial
  Chemically synthesized
uaaaguucugaaguucuua

SEQ ID NO: 3945 - RNA, 19 nt, artificial
  Chemically synthesized
uuaggauaagaaugugccu

SEQ ID NO: 3946 - RNA, 19 nt, artificial
  Chemically synthesized
uuugauauggucuuaucca

SEQ ID NO: 3947 - RNA, 19 nt, artificial
  Chemically synthesized
cauucucuccagccuaucu

SEQ ID NO: 3948 - RNA, 19 nt, artificial
  Chemically synthesized
uccauucucuccagccuau

SEQ ID NO: 3949 - RNA, 19 nt, artificial
  Chemically synthesized
accucuccagaauccggau

SEQ ID NO: 3950 - RNA, 19 nt, artificial
  Chemically synthesized
uagcacaguucuguccaga

SEQ ID NO: 3951 - RNA, 19 nt, artificial
  Chemically synthesized
gaugccuuccugaaauaug

SEQ ID NO: 3952 - RNA, 19 nt, artificial
  Chemically synthesized
uuuugauugcauucaacuu

SEQ ID NO: 3953 - RNA, 19 nt, artificial
  Chemically synthesized
guucauccggaggaguuau

SEQ ID NO: 3954 - RNA, 19 nt, artificial
  Chemically synthesized
uugagcagucacuuuagga

SEQ ID NO: 3955 - RNA, 19 nt, artificial
  Chemically synthesized
uguuuuccuguuuguggau

SEQ ID NO: 3956 - RNA, 19 nt, artificial
  Chemically synthesized
uuccagugugcagaccaca

SEQ ID NO: 3957 - RNA, 19 nt, artificial
  Chemically synthesized
cauugcacaccuguuuaac

SEQ ID NO: 3958 - RNA, 19 nt, artificial
  Chemically synthesized
auguuccauuccugaagga

SEQ ID NO: 3959 - RNA, 19 nt, artificial
  Chemically synthesized
cuucccuguugccuagaag

SEQ ID NO: 3960 - RNA, 19 nt, artificial
  Chemically synthesized
uugucucuuuguaucuuca

SEQ ID NO: 3961 - RNA, 19 nt, artificial
  Chemically synthesized
uguccagagaaggaaggca

SEQ ID NO: 3962 - RNA, 19 nt, artificial
  Chemically synthesized
ugacuguagcaaggcuuga

SEQ ID NO: 3963 - RNA, 19 nt, artificial
  Chemically synthesized
uacaacuaaucccagguga

SEQ ID NO: 3964 - RNA, 19 nt, artificial
  Chemically synthesized
gcauucaacuucguuacuu

SEQ ID NO: 3965 - RNA, 19 nt, artificial
  Chemically synthesized
ugauuuuaucaauuccagu

SEQ ID NO: 3966 - RNA, 19 nt, artificial
  Chemically synthesized
ggaguaugugacauucacc

SEQ ID NO: 3967 - RNA, 19 nt, artificial
  Chemically synthesized
ugaacagcaauuuauucuu

SEQ ID NO: 3968 - RNA, 19 nt, artificial
  Chemically synthesized
cuuccugaaauaugagaag

SEQ ID NO: 3969 - RNA, 19 nt, artificial
  Chemically synthesized
uacuuugaccucugcucca

SEQ ID NO: 3970 - RNA, 19 nt, artificial
  Chemically synthesized
agucccgaaacacgacagu

SEQ ID NO: 3971 - RNA, 19 nt, artificial
  Chemically synthesized
aaugugggacaaugaguuu

SEQ ID NO: 3972 - RNA, 19 nt, artificial
  Chemically synthesized
guuaccaucuccugaguuu

SEQ ID NO: 3973 - RNA, 19 nt, artificial
  Chemically synthesized
ggaauaaggacgguaaucu

SEQ ID NO: 3974 - RNA, 19 nt, artificial
  Chemically synthesized
gaaggccgacaaauacuac

SEQ ID NO: 3975 - RNA, 19 nt, artificial
  Chemically synthesized
auugcacaccuguuuaacu

SEQ ID NO: 3976 - RNA, 19 nt, artificial
  Chemically synthesized
auaugaucugccuacauac

SEQ ID NO: 3977 - RNA, 19 nt, artificial
  Chemically synthesized
uucuuauuuuugcucauca

SEQ ID NO: 3978 - RNA, 19 nt, artificial
  Chemically synthesized
cagaagauuucuaaguagg

SEQ ID NO: 3979 - RNA, 19 nt, artificial
  Chemically synthesized
gaguucauccggaggaguu

SEQ ID NO: 3980 - RNA, 19 nt, artificial
  Chemically synthesized
ucucagaaaaauaacugua

SEQ ID NO: 3981 - RNA, 19 nt, artificial
  Chemically synthesized
aagugugcagagucuuuug

SEQ ID NO: 3982 - RNA, 19 nt, artificial
  Chemically synthesized
aagagccugcgcaaaugcu

SEQ ID NO: 3983 - RNA, 19 nt, artificial
  Chemically synthesized
cugauagcacaguucuguc

SEQ ID NO: 3984 - RNA, 19 nt, artificial
  Chemically synthesized
gaaggaccucuccagaauc

SEQ ID NO: 3985 - RNA, 19 nt, artificial
  Chemically synthesized
auagcacaguucuguccag

SEQ ID NO: 3986 - RNA, 19 nt, artificial
  Chemically synthesized
uuugguuagggcugaaugu

SEQ ID NO: 3987 - RNA, 19 nt, artificial
  Chemically synthesized
agcacaguucuguccagag

SEQ ID NO: 3988 - RNA, 19 nt, artificial
  Chemically synthesized
ccuuucucagaaaaauaac

SEQ ID NO: 3989 - RNA, 19 nt, artificial
  Chemically synthesized
gucuguagugggaguuuuc

SEQ ID NO: 3990 - RNA, 19 nt, artificial
  Chemically synthesized
cuuuugagaugugggauga

SEQ ID NO: 3991 - RNA, 19 nt, artificial
  Chemically synthesized
aaggauuuucuucuucacu

SEQ ID NO: 3992 - RNA, 19 nt, artificial
  Chemically synthesized
cacaucauugcacaccugu

SEQ ID NO: 3993 - RNA, 19 nt, artificial
  Chemically synthesized
gcucaucaaaaaauaaagg

SEQ ID NO: 3994 - RNA, 19 nt, artificial
  Chemically synthesized
guuuguggaugccuuccug

SEQ ID NO: 3995 - RNA, 19 nt, artificial
  Chemically synthesized
uugccuagaagggcuccaa

SEQ ID NO: 3996 - RNA, 19 nt, artificial
  Chemically synthesized
aguauaucuuuguuaauug

SEQ ID NO: 3997 - RNA, 19 nt, artificial
  Chemically synthesized
auuuuaacagcacgcugau

SEQ ID NO: 3998 - RNA, 19 nt, artificial
  Chemically synthesized
ugccuuccugaaauaugag

SEQ ID NO: 3999 - RNA, 19 nt, artificial
  Chemically synthesized
acggcauugguggaauugu

SEQ ID NO: 4000 - RNA, 19 nt, artificial
  Chemically synthesized
cagcuauucacaucauugc

SEQ ID NO: 4001 - RNA, 19 nt, artificial
  Chemically synthesized
guuguuugguuagggcuga

SEQ ID NO: 4002 - RNA, 19 nt, artificial
  Chemically synthesized
aaugaguuuucuacaauag

SEQ ID NO: 4003 - RNA, 19 nt, artificial
  Chemically synthesized
cauuaaacuuugacaaggc

SEQ ID NO: 4004 - RNA, 19 nt, artificial
  Chemically synthesized
gguaaucugcauuuugucu

SEQ ID NO: 4005 - RNA, 19 nt, artificial
  Chemically synthesized
cuguagcaaggcuugauag

SEQ ID NO: 4006 - RNA, 19 nt, artificial
  Chemically synthesized
uaugugacauucaccagca

SEQ ID NO: 4007 - RNA, 19 nt, artificial
  Chemically synthesized
uuuugagaugugggaugau

SEQ ID NO: 4008 - RNA, 19 nt, artificial
  Chemically synthesized
aaucccaggugauuuuauc

SEQ ID NO: 4009 - RNA, 19 nt, artificial
  Chemically synthesized
uacauacagcuauucacau

SEQ ID NO: 4010 - RNA, 19 nt, artificial
  Chemically synthesized
cggauugcugaaucuuccc

SEQ ID NO: 4011 - RNA, 19 nt, artificial
  Chemically synthesized
aaugagagucauccucgca

SEQ ID NO: 4012 - RNA, 19 nt, artificial
  Chemically synthesized
uuuuuugauugcauucaac

SEQ ID NO: 4013 - RNA, 19 nt, artificial
  Chemically synthesized
agaagauuucuaaguaggg

SEQ ID NO: 4014 - RNA, 19 nt, artificial
  Chemically synthesized
uaugagaaggccgacaaau

SEQ ID NO: 4015 - RNA, 19 nt, artificial
  Chemically synthesized
uuaaaguucugaaguucuu

SEQ ID NO: 4016 - RNA, 19 nt, artificial
  Chemically synthesized
gacaucgugacaggucuga

SEQ ID NO: 4017 - RNA, 19 nt, artificial
  Chemically synthesized
gaaaaccuccuuugggaga

SEQ ID NO: 4018 - RNA, 19 nt, artificial
  Chemically synthesized
uuugcuucuaucuugaaau

SEQ ID NO: 4019 - RNA, 19 nt, artificial
  Chemically synthesized
uuuacugucacuuuugaua

SEQ ID NO: 4020 - RNA, 19 nt, artificial
  Chemically synthesized
gcacaccuguuuaacuuug

SEQ ID NO: 4021 - RNA, 19 nt, artificial
  Chemically synthesized
caaucugcuguccuuccug

SEQ ID NO: 4022 - RNA, 19 nt, artificial
  Chemically synthesized
cauuuugcagccgcacacu

SEQ ID NO: 4023 - RNA, 19 nt, artificial
  Chemically synthesized
auugcugaaucuucccugu

SEQ ID NO: 4024 - RNA, 19 nt, artificial
  Chemically synthesized
uuggucucgucagguuuga

SEQ ID NO: 4025 - RNA, 19 nt, artificial
  Chemically synthesized
uuccauuccugaaggaccu

SEQ ID NO: 4026 - RNA, 19 nt, artificial
  Chemically synthesized
gauugaaguggaugguccc

SEQ ID NO: 4027 - RNA, 19 nt, artificial
  Chemically synthesized
aucuugaaauccaucuggu

SEQ ID NO: 4028 - RNA, 19 nt, artificial
  Chemically synthesized
ccuuugggagaccaaugug

SEQ ID NO: 4029 - RNA, 19 nt, artificial
  Chemically synthesized
guuuugguuuguaaucuuu

SEQ ID NO: 4030 - RNA, 19 nt, artificial
  Chemically synthesized
guuaaccacugguuuucag

SEQ ID NO: 4031 - RNA, 19 nt, artificial
  Chemically synthesized
cugucaccgauauuccagu

SEQ ID NO: 4032 - RNA, 19 nt, artificial
  Chemically synthesized
aacuaaucccaggugauuu

SEQ ID NO: 4033 - RNA, 19 nt, artificial
  Chemically synthesized
auuccagucuggauccuag

SEQ ID NO: 4034 - RNA, 19 nt, artificial
  Chemically synthesized
gaugaucgugacucccacu

SEQ ID NO: 4035 - RNA, 19 nt, artificial
  Chemically synthesized
cuccuuugggagaccaaug

SEQ ID NO: 4036 - RNA, 19 nt, artificial
  Chemically synthesized
uagugggaguuuucuuaug

SEQ ID NO: 4037 - RNA, 19 nt, artificial
  Chemically synthesized
aauuuuaacagcacgcuga

SEQ ID NO: 4038 - RNA, 19 nt, artificial
  Chemically synthesized
uguuuuucacaucuuaaag

SEQ ID NO: 4039 - RNA, 19 nt, artificial
  Chemically synthesized
cuuucucagaaaaauaacu

SEQ ID NO: 4040 - RNA, 19 nt, artificial
  Chemically synthesized
aucugguacaaauuccagu

SEQ ID NO: 4041 - RNA, 19 nt, artificial
  Chemically synthesized
gacauucaccagcauugcu

SEQ ID NO: 4042 - RNA, 19 nt, artificial
  Chemically synthesized
auuuugaagucuucuggua

SEQ ID NO: 4043 - RNA, 19 nt, artificial
  Chemically synthesized
uaaucuuuugucccuccca

SEQ ID NO: 4044 - RNA, 19 nt, artificial
  Chemically synthesized
cuugauucucaugguaacu

SEQ ID NO: 4045 - RNA, 19 nt, artificial
  Chemically synthesized
agugaggauguuuuccagu

SEQ ID NO: 4046 - RNA, 19 nt, artificial
  Chemically synthesized
gguuguuaugcacccaucc

SEQ ID NO: 4047 - RNA, 19 nt, artificial
  Chemically synthesized
acugggugguuaaccacug

SEQ ID NO: 4048 - RNA, 19 nt, artificial
  Chemically synthesized
ucacaaccucaccuuccac

SEQ ID NO: 4049 - RNA, 19 nt, artificial
  Chemically synthesized
gagucuuuugagauguggg

SEQ ID NO: 4050 - RNA, 19 nt, artificial
  Chemically synthesized
uuuauuuaaaaagucaccc

SEQ ID NO: 4051 - RNA, 19 nt, artificial
  Chemically synthesized
uuaacaaagauauacugcc

SEQ ID NO: 4052 - RNA, 19 nt, artificial
  Chemically synthesized
uuuuauuuaaaaagucacc

SEQ ID NO: 4053 - RNA, 19 nt, artificial
  Chemically synthesized
uauuguagaaaacucauug

SEQ ID NO: 4054 - RNA, 19 nt, artificial
  Chemically synthesized
uaaauugcuguucacacug

SEQ ID NO: 4055 - RNA, 19 nt, artificial
  Chemically synthesized
uugguaaucacaaccuucu

SEQ ID NO: 4056 - RNA, 19 nt, artificial
  Chemically synthesized
uguauaacucugaaccacc

SEQ ID NO: 4057 - RNA, 19 nt, artificial
  Chemically synthesized
uuucagaccugucacgaug

SEQ ID NO: 4058 - RNA, 19 nt, artificial
  Chemically synthesized
uuauuuaaaaagucacccu

SEQ ID NO: 4059 - RNA, 19 nt, artificial
  Chemically synthesized
uuauucugccuuccuucuc

SEQ ID NO: 4060 - RNA, 19 nt, artificial
  Chemically synthesized
ucauugucccacauugguc

SEQ ID NO: 4061 - RNA, 19 nt, artificial
  Chemically synthesized
auauaaagaaugaccggug

SEQ ID NO: 4062 - RNA, 19 nt, artificial
  Chemically synthesized
uugugauccaauugcuuuc

SEQ ID NO: 4063 - RNA, 19 nt, artificial
  Chemically synthesized
uucacagauauaaagaaug

SEQ ID NO: 4064 - RNA, 19 nt, artificial
  Chemically synthesized
uuuaagaugugaaaaacac

SEQ ID NO: 4065 - RNA, 19 nt, artificial
  Chemically synthesized
uuggugaauauuguuguuc

SEQ ID NO: 4066 - RNA, 19 nt, artificial
  Chemically synthesized
uuaaaaagucacccuacuu

SEQ ID NO: 4067 - RNA, 19 nt, artificial
  Chemically synthesized
uuuuugaugagcaaaaaua

SEQ ID NO: 4068 - RNA, 19 nt, artificial
  Chemically synthesized
uaaaauucaagcagagagc

SEQ ID NO: 4069 - RNA, 19 nt, artificial
  Chemically synthesized
ucauucaugcucuccucug

SEQ ID NO: 4070 - RNA, 19 nt, artificial
  Chemically synthesized
uuguuguucgaaagcccuu

SEQ ID NO: 4071 - RNA, 19 nt, artificial
  Chemically synthesized
ucaaaaauuuucuuuguug

SEQ ID NO: 4072 - RNA, 19 nt, artificial
  Chemically synthesized
uauuuaaaaagucacccua

SEQ ID NO: 4073 - RNA, 19 nt, artificial
  Chemically synthesized
uuuacaguuauuuuucuga

SEQ ID NO: 4074 - RNA, 19 nt, artificial
  Chemically synthesized
aauaaauugcuguucacac

SEQ ID NO: 4075 - RNA, 19 nt, artificial
  Chemically synthesized
uacagugggagucacgauc

SEQ ID NO: 4076 - RNA, 19 nt, artificial
  Chemically synthesized
uugaugagcaaaaauaaga

SEQ ID NO: 4077 - RNA, 19 nt, artificial
  Chemically synthesized
ugucacauacuccacuguc

SEQ ID NO: 4078 - RNA, 19 nt, artificial
  Chemically synthesized
uuguagaaaacucauuguc

SEQ ID NO: 4079 - RNA, 19 nt, artificial
  Chemically synthesized
auuaacaaagauauacugc

SEQ ID NO: 4080 - RNA, 19 nt, artificial
  Chemically synthesized
uuuauucugccuuccuucu

SEQ ID NO: 4081 - RNA, 19 nt, artificial
  Chemically synthesized
uucagcaauccggauucug

SEQ ID NO: 4082 - RNA, 19 nt, artificial
  Chemically synthesized
uggauuucaagauagaagc

SEQ ID NO: 4083 - RNA, 19 nt, artificial
  Chemically synthesized
uucaagcagagagcagacg

SEQ ID NO: 4084 - RNA, 19 nt, artificial
  Chemically synthesized
uugcuguucacacuggaua

SEQ ID NO: 4085 - RNA, 19 nt, artificial
  Chemically synthesized
augaauaaguuuauucugc

SEQ ID NO: 4086 - RNA, 19 nt, artificial
  Chemically synthesized
ucuuuguugaaguagaauu

SEQ ID NO: 4087 - RNA, 19 nt, artificial
  Chemically synthesized
uuuggaugggugcauaaca

SEQ ID NO: 4088 - RNA, 19 nt, artificial
  Chemically synthesized
uuauccuaaagugacugcu

SEQ ID NO: 4089 - RNA, 19 nt, artificial
  Chemically synthesized
uuguucgaaagcccuuaug

SEQ ID NO: 4090 - RNA, 19 nt, artificial
  Chemically synthesized
uuugucggccuucucauau

SEQ ID NO: 4091 - RNA, 19 nt, artificial
  Chemically synthesized
uuucaggaaggcauccaca

SEQ ID NO: 4092 - RNA, 19 nt, artificial
  Chemically synthesized
ucauauuucaggaaggcau

SEQ ID NO: 4093 - RNA, 19 nt, artificial
  Chemically synthesized
ugcugcucggauaugaaug

SEQ ID NO: 4094 - RNA, 19 nt, artificial
  Chemically synthesized
ugaaccaccaaaccucugc

SEQ ID NO: 4095 - RNA, 19 nt, artificial
  Chemically synthesized
aauaaguuuauucugccuu

SEQ ID NO: 4096 - RNA, 19 nt, artificial
  Chemically synthesized
uacuuagaaaucuucugug

SEQ ID NO: 4097 - RNA, 19 nt, artificial
  Chemically synthesized
uuguggucugcacacugga

SEQ ID NO: 4098 - RNA, 19 nt, artificial
  Chemically synthesized
uguugaaguagaauugaac

SEQ ID NO: 4099 - RNA, 19 nt, artificial
  Chemically synthesized
ucaugcucuccucuguuug

SEQ ID NO: 4100 - RNA, 19 nt, artificial
  Chemically synthesized
ugaauaaguuuauucugcc

SEQ ID NO: 4101 - RNA, 19 nt, artificial
  Chemically synthesized
uugagaggcacauucuuau

SEQ ID NO: 4102 - RNA, 19 nt, artificial
  Chemically synthesized
ugggaauuggugaauauug

SEQ ID NO: 4103 - RNA, 19 nt, artificial
  Chemically synthesized
ucucauucaugcucuccuc

SEQ ID NO: 4104 - RNA, 19 nt, artificial
  Chemically synthesized
uuaaugcugcaugaccaac

SEQ ID NO: 4105 - RNA, 19 nt, artificial
  Chemically synthesized
aucaaaaaaagaauaccag

SEQ ID NO: 4106 - RNA, 19 nt, artificial
  Chemically synthesized
uacuccacugucguguuuc

SEQ ID NO: 4107 - RNA, 19 nt, artificial
  Chemically synthesized
ucugugagccuuuaagaug

SEQ ID NO: 4108 - RNA, 19 nt, artificial
  Chemically synthesized
uucgaaagcccuuaugaga

SEQ ID NO: 4109 - RNA, 19 nt, artificial
  Chemically synthesized
uguaguaguauuugucggc

SEQ ID NO: 4110 - RNA, 19 nt, artificial
  Chemically synthesized
uucaucugcaauuccaaaa

SEQ ID NO: 4111 - RNA, 19 nt, artificial
  Chemically synthesized
acagauauaaagaaugacc

SEQ ID NO: 4112 - RNA, 19 nt, artificial
  Chemically synthesized
ucuguuucagaccugucac

SEQ ID NO: 4113 - RNA, 19 nt, artificial
  Chemically synthesized
uugucccacauuggucucc

SEQ ID NO: 4114 - RNA, 19 nt, artificial
  Chemically synthesized
aaaaugcagauuaccgucc

SEQ ID NO: 4115 - RNA, 19 nt, artificial
  Chemically synthesized
uauaaagaaugaccggugc

SEQ ID NO: 4116 - RNA, 19 nt, artificial
  Chemically synthesized
guuuauucugccuuccuuc

SEQ ID NO: 4117 - RNA, 19 nt, artificial
  Chemically synthesized
gcuauugucaugaucacuc

SEQ ID NO: 4118 - RNA, 19 nt, artificial
  Chemically synthesized
uuuucuuuguugaaguaga

SEQ ID NO: 4119 - RNA, 19 nt, artificial
  Chemically synthesized
uauccuaaagugacugcuc

SEQ ID NO: 4120 - RNA, 19 nt, artificial
  Chemically synthesized
uauucugccuuccuucucu

SEQ ID NO: 4121 - RNA, 19 nt, artificial
  Chemically synthesized
ugagauuuucuguccaguc

SEQ ID NO: 4122 - RNA, 19 nt, artificial
  Chemically synthesized
uucugccuuccuucucugg

SEQ ID NO: 4123 - RNA, 19 nt, artificial
  Chemically synthesized
aguuuaaugcugcaugacc

SEQ ID NO: 4124 - RNA, 19 nt, artificial
  Chemically synthesized
uauuucaggaaggcaucca

SEQ ID NO: 4125 - RNA, 19 nt, artificial
  Chemically synthesized
uuugaugagcaaaaauaag

SEQ ID NO: 4126 - RNA, 19 nt, artificial
  Chemically synthesized
uuauuuuuugaugagcaaa

SEQ ID NO: 4127 - RNA, 19 nt, artificial
  Chemically synthesized
auuaguuguauaacucuga

SEQ ID NO: 4128 - RNA, 19 nt, artificial
  Chemically synthesized
auuuacaguuauuuuucug

SEQ ID NO: 4129 - RNA, 19 nt, artificial
  Chemically synthesized
aaaacauucagcccuaacc

SEQ ID NO: 4130 - RNA, 19 nt, artificial
  Chemically synthesized
uuacaguuauuuuucugag

SEQ ID NO: 4131 - RNA, 19 nt, artificial
  Chemically synthesized
auuuucuuuguugaaguag

SEQ ID NO: 4132 - RNA, 19 nt, artificial
  Chemically synthesized
uaugaauggagaagaaauc

SEQ ID NO: 4133 - RNA, 19 nt, artificial
  Chemically synthesized
uuguaccagauggauuuca

SEQ ID NO: 4134 - RNA, 19 nt, artificial
  Chemically synthesized
uccagaaagauuuacaguu

SEQ ID NO: 4135 - RNA, 19 nt, artificial
  Chemically synthesized
auuuguaccagauggauuu

SEQ ID NO: 4136 - RNA, 19 nt, artificial
  Chemically synthesized
uugaaugcaaucaaaaaaa

SEQ ID NO: 4137 - RNA, 19 nt, artificial
  Chemically synthesized
ucaauccugggaauuggug

SEQ ID NO: 4138 - RNA, 19 nt, artificial
  Chemically synthesized
auuucaggaaggcauccac

SEQ ID NO: 4139 - RNA, 19 nt, artificial
  Chemically synthesized
ugaaguuaccaugagaauc

SEQ ID NO: 4140 - RNA, 19 nt, artificial
  Chemically synthesized
uauuugucggccuucucau

SEQ ID NO: 4141 - RNA, 19 nt, artificial
  Chemically synthesized
auaaguuuauucugccuuc

SEQ ID NO: 4142 - RNA, 19 nt, artificial
  Chemically synthesized
auuugcgcaggcucuuugc

SEQ ID NO: 4143 - RNA, 19 nt, artificial
  Chemically synthesized
ucaggagaugguaacacug

SEQ ID NO: 4144 - RNA, 19 nt, artificial
  Chemically synthesized
auuaccguccuuauuccua

SEQ ID NO: 4145 - RNA, 19 nt, artificial
  Chemically synthesized
uggaauaucggugacagca

SEQ ID NO: 4146 - RNA, 19 nt, artificial
  Chemically synthesized
uaccagauggauuucaaga

SEQ ID NO: 4147 - RNA, 19 nt, artificial
  Chemically synthesized
acauacuccacugucgugu

SEQ ID NO: 4148 - RNA, 19 nt, artificial
  Chemically synthesized
uguuucagaccugucacga

SEQ ID NO: 4149 - RNA, 19 nt, artificial
  Chemically synthesized
ucaaacuuagggcgccuac

SEQ ID NO: 4150 - RNA, 19 nt, artificial
  Chemically synthesized
uaaguuuauucugccuucc

SEQ ID NO: 4151 - RNA, 19 nt, artificial
  Chemically synthesized
uguuuugagguuguggucu

SEQ ID NO: 4152 - RNA, 19 nt, artificial
  Chemically synthesized
uuaaacaggugugcaauga

SEQ ID NO: 4153 - RNA, 19 nt, artificial
  Chemically synthesized
uauuuuuugaugagcaaaa

SEQ ID NO: 4154 - RNA, 19 nt, artificial
  Chemically synthesized
aguagcugaaguuaccaug

SEQ ID NO: 4155 - RNA, 19 nt, artificial
  Chemically synthesized
uccaggagagagauugagg

SEQ ID NO: 4156 - RNA, 19 nt, artificial
  Chemically synthesized
uaacaaagauauacugccc

SEQ ID NO: 4157 - RNA, 19 nt, artificial
  Chemically synthesized
ugagaaaggauccaugggc

SEQ ID NO: 4158 - RNA, 19 nt, artificial
  Chemically synthesized
auaaauugcuguucacacu

SEQ ID NO: 4159 - RNA, 19 nt, artificial
  Chemically synthesized
ugugaauagcuguauguag

SEQ ID NO: 4160 - RNA, 19 nt, artificial
  Chemically synthesized
uucagaccugucacgaugu

SEQ ID NO: 4161 - RNA, 19 nt, artificial
  Chemically synthesized
ugguaaucacaaccuucug

SEQ ID NO: 4162 - RNA, 19 nt, artificial
  Chemically synthesized
ucucaaaagacucugcaca

SEQ ID NO: 4163 - RNA, 19 nt, artificial
  Chemically synthesized
augcagauuaccguccuua

SEQ ID NO: 4164 - RNA, 19 nt, artificial
  Chemically synthesized
uacuggaaaacauccucac

SEQ ID NO: 4165 - RNA, 19 nt, artificial
  Chemically synthesized
uucaaacuuagggcgccua

SEQ ID NO: 4166 - RNA, 19 nt, artificial
  Chemically synthesized
uaacucugaaccaccaaac

SEQ ID NO: 4167 - RNA, 19 nt, artificial
  Chemically synthesized
uguuguucgaaagcccuua

SEQ ID NO: 4168 - RNA, 19 nt, artificial
  Chemically synthesized
uggaaggugagguugugau

SEQ ID NO: 4169 - RNA, 19 nt, artificial
  Chemically synthesized
uaagaauaaauugcuguuc

SEQ ID NO: 4170 - RNA, 19 nt, artificial
  Chemically synthesized
uagcagucaaaguuaaaca

SEQ ID NO: 4171 - RNA, 19 nt, artificial
  Chemically synthesized
cuugguaaucacaaccuuc

SEQ ID NO: 4172 - RNA, 19 nt, artificial
  Chemically synthesized
accaaugccgugaaucccu

SEQ ID NO: 4173 - RNA, 19 nt, artificial
  Chemically synthesized
uucucgguaauuuuguuua

SEQ ID NO: 4174 - RNA, 19 nt, artificial
  Chemically synthesized
auagcagucaaaguuaaac

SEQ ID NO: 4175 - RNA, 19 nt, artificial
  Chemically synthesized
uugcugaagcucaaguaac

SEQ ID NO: 4176 - RNA, 19 nt, artificial
  Chemically synthesized
ugucaugaucacuccagug

SEQ ID NO: 4177 - RNA, 19 nt, artificial
  Chemically synthesized
uuuugaugagcaaaaauaa

SEQ ID NO: 4178 - RNA, 19 nt, artificial
  Chemically synthesized
ucuuaaguugcugaagcuc

SEQ ID NO: 4179 - RNA, 19 nt, artificial
  Chemically synthesized
uauagaagauaaaaaggug

SEQ ID NO: 4180 - RNA, 19 nt, artificial
  Chemically synthesized
uuccaggagagagauugag

SEQ ID NO: 4181 - RNA, 19 nt, artificial
  Chemically synthesized
ugcaaugaugugaauagcu

SEQ ID NO: 4182 - RNA, 19 nt, artificial
  Chemically synthesized
aaaagugacaguaaacaug

SEQ ID NO: 4183 - RNA, 19 nt, artificial
  Chemically synthesized
uccaccaaugccgugaauc

SEQ ID NO: 4184 - RNA, 19 nt, artificial
  Chemically synthesized
uccuucucuggacagaacu

SEQ ID NO: 4185 - RNA, 19 nt, artificial
  Chemically synthesized
aacucauugucccacauug

SEQ ID NO: 4186 - RNA, 19 nt, artificial
  Chemically synthesized
ucacauacuccacugucgu

SEQ ID NO: 4187 - RNA, 19 nt, artificial
  Chemically synthesized
uaucggugacagcauuugc

SEQ ID NO: 4188 - RNA, 19 nt, artificial
  Chemically synthesized
aaaauuuucuuuguugaag

SEQ ID NO: 4189 - RNA, 19 nt, artificial
  Chemically synthesized
uucuuuguugaaguagaau

SEQ ID NO: 4190 - RNA, 19 nt, artificial
  Chemically synthesized
ucugaaccaccaaaccucu

SEQ ID NO: 4191 - RNA, 19 nt, artificial
  Chemically synthesized
aacucaaaaauuuucuuug

SEQ ID NO: 4192 - RNA, 19 nt, artificial
  Chemically synthesized
ucaagaggugguuuggagc

SEQ ID NO: 4193 - RNA, 19 nt, artificial
  Chemically synthesized
uuuaagaacuucagaacuu

SEQ ID NO: 4194 - RNA, 19 nt, artificial
  Chemically synthesized
uuuauuuuuugaugagcaa

SEQ ID NO: 4195 - RNA, 19 nt, artificial
  Chemically synthesized
aauuuguaccagauggauu

SEQ ID NO: 4196 - RNA, 19 nt, artificial
  Chemically synthesized
uuuaaugcugcaugaccaa

SEQ ID NO: 4197 - RNA, 19 nt, artificial
  Chemically synthesized
uaaagugacugcucaaacc

SEQ ID NO: 4198 - RNA, 19 nt, artificial
  Chemically synthesized
ucugccuuccuucucugga

SEQ ID NO: 4199 - RNA, 19 nt, artificial
  Chemically synthesized
auugucaagaggugguuug

SEQ ID NO: 4200 - RNA, 19 nt, artificial
  Chemically synthesized
ugagaaucaaggcuauugu

SEQ ID NO: 4201 - RNA, 19 nt, artificial
  Chemically synthesized
ugcuauagcagucaaaguu

SEQ ID NO: 4202 - RNA, 19 nt, artificial
  Chemically synthesized
aaggacagcagauugcgac

SEQ ID NO: 4203 - RNA, 19 nt, artificial
  Chemically synthesized
aaugaauaaguuuauucug

SEQ ID NO: 4204 - RNA, 19 nt, artificial
  Chemically synthesized
uaguauuugucggccuucu

SEQ ID NO: 4205 - RNA, 19 nt, artificial
  Chemically synthesized
ucaugaucacuccagugag

SEQ ID NO: 4206 - RNA, 19 nt, artificial
  Chemically synthesized
uucaggaaggcauccacaa

SEQ ID NO: 4207 - RNA, 19 nt, artificial
  Chemically synthesized
uuccuauaacucaaaaauu

SEQ ID NO: 4208 - RNA, 19 nt, artificial
  Chemically synthesized
aaucaaaaaaagaauacca

SEQ ID NO: 4209 - RNA, 19 nt, artificial
  Chemically synthesized
ucaggaauggaacauuugu

SEQ ID NO: 4210 - RNA, 19 nt, artificial
  Chemically synthesized
auucaugcucuccucuguu

SEQ ID NO: 4211 - RNA, 19 nt, artificial
  Chemically synthesized
ucaaaauaacuccuccgga

SEQ ID NO: 4212 - RNA, 19 nt, artificial
  Chemically synthesized
uucaugcucuccucuguuu

SEQ ID NO: 4213 - RNA, 19 nt, artificial
  Chemically synthesized
ugaaaaccagugguuaacc

SEQ ID NO: 4214 - RNA, 19 nt, artificial
  Chemically synthesized
agugagaccagcaaugcug

SEQ ID NO: 4215 - RNA, 19 nt, artificial
  Chemically synthesized
aggaugacucucauucaug

SEQ ID NO: 4216 - RNA, 19 nt, artificial
  Chemically synthesized
ugcucuccucuguuugacc

SEQ ID NO: 4217 - RNA, 19 nt, artificial
  Chemically synthesized
uccacaaacaggaaaacau

SEQ ID NO: 4218 - RNA, 19 nt, artificial
  Chemically synthesized
caaaguuuaaugcugcaug

SEQ ID NO: 4219 - RNA, 19 nt, artificial
  Chemically synthesized
aauuaacaaagauauacug

SEQ ID NO: 4220 - RNA, 19 nt, artificial
  Chemically synthesized
ugcacacuggaauuuguac

SEQ ID NO: 4221 - RNA, 19 nt, artificial
  Chemically synthesized
uaaccaaacaaccagaaac

SEQ ID NO: 4222 - RNA, 19 nt, artificial
  Chemically synthesized
uuuuuuguuuugagguugu

SEQ ID NO: 4223 - RNA, 19 nt, artificial
  Chemically synthesized
ucugcuauagcagucaaag

SEQ ID NO: 4224 - RNA, 19 nt, artificial
  Chemically synthesized
uuuuuugaugagcaaaaau

SEQ ID NO: 4225 - RNA, 19 nt, artificial
  Chemically synthesized
ugagguugugauccaauug

SEQ ID NO: 4226 - RNA, 19 nt, artificial
  Chemically synthesized
cauuugcgcaggcucuuug

SEQ ID NO: 4227 - RNA, 19 nt, artificial
  Chemically synthesized
auucuggagagguccuuca

SEQ ID NO: 4228 - RNA, 19 nt, artificial
  Chemically synthesized
ucuggagcagaggucaaag

SEQ ID NO: 4229 - RNA, 19 nt, artificial
  Chemically synthesized
aguuuauucugccuuccuu

SEQ ID NO: 4230 - RNA, 19 nt, artificial
  Chemically synthesized
ucaaaguuuaaugcugcau

SEQ ID NO: 4231 - RNA, 19 nt, artificial
  Chemically synthesized
uaaccacccaguuucccau

SEQ ID NO: 4232 - RNA, 19 nt, artificial
  Chemically synthesized
uuuguaccagauggauuuc

SEQ ID NO: 4233 - RNA, 19 nt, artificial
  Chemically synthesized
aaacaggugugcaaugaug

SEQ ID NO: 4234 - RNA, 19 nt, artificial
  Chemically synthesized
aauugcuuucucagugugc

SEQ ID NO: 4235 - RNA, 19 nt, artificial
  Chemically synthesized
uuauuuuucugagaaagga

SEQ ID NO: 4236 - RNA, 19 nt, artificial
  Chemically synthesized
uuuaagaacuucagaaguu

SEQ ID NO: 4237 - RNA, 19 nt, artificial
  Chemically synthesized
ucguguuucgggacuggau

SEQ ID NO: 4238 - RNA, 19 nt, artificial
  Chemically synthesized
uuaagaacuucagaacuuu

SEQ ID NO: 4239 - RNA, 19 nt, artificial
  Chemically synthesized
uaaucacaaccuucugcug

SEQ ID NO: 4240 - RNA, 19 nt, artificial
  Chemically synthesized
aaguuuauucugccuuccu

SEQ ID NO: 4241 - RNA, 19 nt, artificial
  Chemically synthesized
aaagggaccauccacuuca

SEQ ID NO: 4242 - RNA, 19 nt, artificial
  Chemically synthesized
ucgaaagcccuuaugagau

SEQ ID NO: 4243 - RNA, 19 nt, artificial
  Chemically synthesized
cuuguggaaggugagguug

SEQ ID NO: 4244 - RNA, 19 nt, artificial
  Chemically synthesized
uuucacagauauaaagaau

SEQ ID NO: 4245 - RNA, 19 nt, artificial
  Chemically synthesized
uaacuccuccggaugaacu

SEQ ID NO: 4246 - RNA, 19 nt, artificial
  Chemically synthesized
cuuuauuuuuugaugagca

SEQ ID NO: 4247 - RNA, 19 nt, artificial
  Chemically synthesized
uuuguugaaguagaauuga

SEQ ID NO: 4248 - RNA, 19 nt, artificial
  Chemically synthesized
cuuuguugaaguagaauug

SEQ ID NO: 4249 - RNA, 19 nt, artificial
  Chemically synthesized
uuaguuguauaacucugaa

SEQ ID NO: 4250 - RNA, 19 nt, artificial
  Chemically synthesized
uugucaagaggugguuugg

SEQ ID NO: 4251 - RNA, 19 nt, artificial
  Chemically synthesized
agauuuacaguuauuuuuc

SEQ ID NO: 4252 - RNA, 19 nt, artificial
  Chemically synthesized
uaaagaaugaccggugcaa

SEQ ID NO: 4253 - RNA, 19 nt, artificial
  Chemically synthesized
uuccuucucuggacagaac

SEQ ID NO: 4254 - RNA, 19 nt, artificial
  Chemically synthesized
cagauuaccguccuuauuc

SEQ ID NO: 4255 - RNA, 19 nt, artificial
  Chemically synthesized
uccaugggcuuuaagaacu

SEQ ID NO: 4256 - RNA, 19 nt, artificial
  Chemically synthesized
uccacuucaauccugggaa

SEQ ID NO: 4257 - RNA, 19 nt, artificial
  Chemically synthesized
guucacacuggauaagacc

SEQ ID NO: 4258 - RNA, 19 nt, artificial
  Chemically synthesized
uuucgggacuggaugggau

SEQ ID NO: 4259 - RNA, 19 nt, artificial
  Chemically synthesized
ugguuuggagcccuucuag

SEQ ID NO: 4260 - RNA, 19 nt, artificial
  Chemically synthesized
uccagugagaccagcaaug

SEQ ID NO: 4261 - RNA, 19 nt, artificial
  Chemically synthesized
cuggaauuuguaccagaug

SEQ ID NO: 4262 - RNA, 19 nt, artificial
  Chemically synthesized
aucaaaagugacaguaaac

SEQ ID NO: 4263 - RNA, 19 nt, artificial
  Chemically synthesized
auucugccuuccuucucug

SEQ ID NO: 4264 - RNA, 19 nt, artificial
  Chemically synthesized
uauaacucugaaccaccaa

SEQ ID NO: 4265 - RNA, 19 nt, artificial
  Chemically synthesized
ucaagugaagaagaaaauc

SEQ ID NO: 4266 - RNA, 19 nt, artificial
  Chemically synthesized
aauuacugaagauacaaag

SEQ ID NO: 4267 - RNA, 19 nt, artificial
  Chemically synthesized
ugcuaucaagccuugcuac

SEQ ID NO: 4268 - RNA, 19 nt, artificial
  Chemically synthesized
aaagacucugcacacuugc

SEQ ID NO: 4269 - RNA, 19 nt, artificial
  Chemically synthesized
aauaagaauaaauugcugu

SEQ ID NO: 4270 - RNA, 19 nt, artificial
  Chemically synthesized
caaaccucugcuaucaagc

SEQ ID NO: 4271 - RNA, 19 nt, artificial
  Chemically synthesized
aauucaagcagagagcaga

SEQ ID NO: 4272 - RNA, 19 nt, artificial
  Chemically synthesized
ucccacauuggucucccaa

SEQ ID NO: 4273 - RNA, 19 nt, artificial
  Chemically synthesized
agaaaucuuccucuggagc

SEQ ID NO: 4274 - RNA, 19 nt, artificial
  Chemically synthesized
aaaauaacuccuccggaug

SEQ ID NO: 4275 - RNA, 19 nt, artificial
  Chemically synthesized
aguauuugucggccuucuc

SEQ ID NO: 4276 - RNA, 19 nt, artificial
  Chemically synthesized
uucgggacuggaugggauu

SEQ ID NO: 4277 - RNA, 19 nt, artificial
  Chemically synthesized
ucugagaaaggauccaugg

SEQ ID NO: 4278 - RNA, 19 nt, artificial
  Chemically synthesized
ugcauaacaaccuugguaa

SEQ ID NO: 4279 - RNA, 19 nt, artificial
  Chemically synthesized
cuauaacucaaaaauuuuc

SEQ ID NO: 4280 - RNA, 19 nt, artificial
  Chemically synthesized
ugggauuaguuguauaacu

SEQ ID NO: 4281 - RNA, 19 nt, artificial
  Chemically synthesized
ucaugagauaggcuggaga

SEQ ID NO: 4282 - RNA, 19 nt, artificial
  Chemically synthesized
ugagguuguggucugcaca

SEQ ID NO: 4283 - RNA, 19 nt, artificial
  Chemically synthesized
ccagacuggaauaucggug

SEQ ID NO: 4284 - RNA, 19 nt, artificial
  Chemically synthesized
uuuuucucaucaugagaua

SEQ ID NO: 4285 - RNA, 19 nt, artificial
  Chemically synthesized
uggacagaacugugcuauc

SEQ ID NO: 4286 - RNA, 19 nt, artificial
  Chemically synthesized
agguuuucuguuucagacc

SEQ ID NO: 4287 - RNA, 19 nt, artificial
  Chemically synthesized
ucucaucaugagauaggcu

SEQ ID NO: 4288 - RNA, 19 nt, artificial
  Chemically synthesized
accaugagaaucaaggcua

SEQ ID NO: 4289 - RNA, 19 nt, artificial
  Chemically synthesized
uccuauaacucaaaaauuu

SEQ ID NO: 4290 - RNA, 19 nt, artificial
  Chemically synthesized
gugaagaagaaaauccuuu

SEQ ID NO: 4291 - RNA, 19 nt, artificial
  Chemically synthesized
uguucaucugcaauuccaa

SEQ ID NO: 4292 - RNA, 19 nt, artificial
  Chemically synthesized
uguucgaaagcccuuauga

SEQ ID NO: 4293 - RNA, 19 nt, artificial
  Chemically synthesized
aauccuuuauuuuuugaug

SEQ ID NO: 4294 - RNA, 19 nt, artificial
  Chemically synthesized
uaccagggagucaaggcuu

SEQ ID NO: 4295 - RNA, 19 nt, artificial
  Chemically synthesized
augaacucaguagcugaag

SEQ ID NO: 4296 - RNA, 19 nt, artificial
  Chemically synthesized
auauagaagauaaaaaggu

SEQ ID NO: 4297 - RNA, 19 nt, artificial
  Chemically synthesized
aaacaggaaaacauucagc

SEQ ID NO: 4298 - RNA, 19 nt, artificial
  Chemically synthesized
ucuaggauccagacuggaa

SEQ ID NO: 4299 - RNA, 19 nt, artificial
  Chemically synthesized
auaugaauggagaagaaau

SEQ ID NO: 4300 - RNA, 19 nt, artificial
  Chemically synthesized
ucggcuucugcuauagcag

SEQ ID NO: 4301 - RNA, 19 nt, artificial
  Chemically synthesized
ugaagaagaaaauccuuua

SEQ ID NO: 4302 - RNA, 19 nt, artificial
  Chemically synthesized
aaacuuagggcgccuacag

SEQ ID NO: 4303 - RNA, 19 nt, artificial
  Chemically synthesized
ucccacaucucaaaagacu

SEQ ID NO: 4304 - RNA, 19 nt, artificial
  Chemically synthesized
guccuuauuccuauaacuc

SEQ ID NO: 4305 - RNA, 19 nt, artificial
  Chemically synthesized
ucaguagcugaaguuacca

SEQ ID NO: 4306 - RNA, 19 nt, artificial
  Chemically synthesized
cuuagaaaucuucuguggg

SEQ ID NO: 4307 - RNA, 19 nt, artificial
  Chemically synthesized
cuuaaguugcugaagcuca

SEQ ID NO: 4308 - RNA, 19 nt, artificial
  Chemically synthesized
uuguugaaguagaauugaa

SEQ ID NO: 4309 - RNA, 19 nt, artificial
  Chemically synthesized
uguggaaggugagguugug

SEQ ID NO: 4310 - RNA, 19 nt, artificial
  Chemically synthesized
agugacaguaaacauguac

SEQ ID NO: 4311 - RNA, 19 nt, artificial
  Chemically synthesized
auaucggugacagcauuug

SEQ ID NO: 4312 - RNA, 19 nt, artificial
  Chemically synthesized
guauuugucggccuucuca

SEQ ID NO: 4313 - RNA, 19 nt, artificial
  Chemically synthesized
uacacuguugguguuauau

SEQ ID NO: 4314 - RNA, 19 nt, artificial
  Chemically synthesized
augcuggugaaugucacau

SEQ ID NO: 4315 - RNA, 19 nt, artificial
  Chemically synthesized
caagugaagaagaaaaucc

SEQ ID NO: 4316 - RNA, 19 nt, artificial
  Chemically synthesized
guagaauugaaccuuucua

SEQ ID NO: 4317 - RNA, 19 nt, artificial
  Chemically synthesized
ugaguauaccagaagacuu

SEQ ID NO: 4318 - RNA, 19 nt, artificial
  Chemically synthesized
aguagaauugaaccuuucu

SEQ ID NO: 4319 - RNA, 19 nt, artificial
  Chemically synthesized
auccaauugcuuucucagu

SEQ ID NO: 4320 - RNA, 19 nt, artificial
  Chemically synthesized
ugauccaauugcuuucuca

SEQ ID NO: 4321 - RNA, 19 nt, artificial
  Chemically synthesized
aagugaagaagaaaauccu

SEQ ID NO: 4322 - RNA, 19 nt, artificial
  Chemically synthesized
ugaauauuguuguucgaaa

SEQ ID NO: 4323 - RNA, 19 nt, artificial
  Chemically synthesized
cuacuuagaaaucuucugu

SEQ ID NO: 4324 - RNA, 19 nt, artificial
  Chemically synthesized
acgaucaucccacaucuca

SEQ ID NO: 4325 - RNA, 19 nt, artificial
  Chemically synthesized
cuuuuucucaucaugagau

SEQ ID NO: 4326 - RNA, 19 nt, artificial
  Chemically synthesized
aguaaauuacugaagauac

SEQ ID NO: 4327 - RNA, 19 nt, artificial
  Chemically synthesized
uauuuuucugagaaaggau

SEQ ID NO: 4328 - RNA, 19 nt, artificial
  Chemically synthesized
acacuguugguguuauaug

SEQ ID NO: 4329 - RNA, 19 nt, artificial
  Chemically synthesized
uauguaggcagaucauaua

SEQ ID NO: 4330 - RNA, 19 nt, artificial
  Chemically synthesized
ugcucaaaccugacgagac

SEQ ID NO: 4331 - RNA, 19 nt, artificial
  Chemically synthesized
aauuggugaauauuguugu

SEQ ID NO: 4332 - RNA, 19 nt, artificial
  Chemically synthesized
aacaaaacugaaaaccagu

SEQ ID NO: 4333 - RNA, 19 nt, artificial
  Chemically synthesized
caaguaacgaaguugaaug

SEQ ID NO: 4334 - RNA, 19 nt, artificial
  Chemically synthesized
cuauugucaugaucacucc

SEQ ID NO: 4335 - RNA, 19 nt, artificial
  Chemically synthesized
cuaaagugacugcucaaac

SEQ ID NO: 4336 - RNA, 19 nt, artificial
  Chemically synthesized
uggaugggugcauaacaac

SEQ ID NO: 4337 - RNA, 19 nt, artificial
  Chemically synthesized
cauuccaggagagagauug

SEQ ID NO: 4338 - RNA, 19 nt, artificial
  Chemically synthesized
acaaccuugguaaucacaa

SEQ ID NO: 4339 - RNA, 19 nt, artificial
  Chemically synthesized
agauucagcaauccggauu

SEQ ID NO: 4340 - RNA, 19 nt, artificial
  Chemically synthesized
acauguacacuguuggugu

SEQ ID NO: 4341 - RNA, 19 nt, artificial
  Chemically synthesized
acuugcgaggaugacucuc

SEQ ID NO: 4342 - RNA, 19 nt, artificial
  Chemically synthesized
auccaugggcuuuaagaac

SEQ ID NO: 4343 - RNA, 19 nt, artificial
  Chemically synthesized
cugcaauuccaaaacuuug

SEQ ID NO: 4344 - RNA, 19 nt, artificial
  Chemically synthesized
ucggauaugaauggagaag

SEQ ID NO: 4345 - RNA, 19 nt, artificial
  Chemically synthesized
auuccugcuccaaccagca

SEQ ID NO: 4346 - RNA, 19 nt, artificial
  Chemically synthesized
auaagaauaaauugcuguu

SEQ ID NO: 4347 - RNA, 19 nt, artificial
  Chemically synthesized
ugggagguagcuauuguag

SEQ ID NO: 4348 - RNA, 19 nt, artificial
  Chemically synthesized
aauaucggugacagcauuu

SEQ ID NO: 4349 - RNA, 19 nt, artificial
  Chemically synthesized
aaagaaugaccggugcaag

SEQ ID NO: 4350 - RNA, 19 nt, artificial
  Chemically synthesized
aaauugcuguucacacugg

SEQ ID NO: 4351 - RNA, 19 nt, artificial
  Chemically synthesized
ucgguaauuuuguuuauua

SEQ ID NO: 4352 - RNA, 19 nt, artificial
  Chemically synthesized
uuauuccuauaacucaaaa

SEQ ID NO: 4353 - RNA, 19 nt, artificial
  Chemically synthesized
uguaccagauggauuucaa

SEQ ID NO: 4354 - RNA, 19 nt, artificial
  Chemically synthesized
acccaguuucccauuguca

SEQ ID NO: 4355 - RNA, 19 nt, artificial
  Chemically synthesized
gcccuuaugagauuuucug

SEQ ID NO: 4356 - RNA, 19 nt, artificial
  Chemically synthesized
aauuccaccaaugccguga

SEQ ID NO: 4357 - RNA, 19 nt, artificial
  Chemically synthesized
gaauuggugaauauuguug

SEQ ID NO: 4358 - RNA, 19 nt, artificial
  Chemically synthesized
accucugcuaucaagccuu

SEQ ID NO: 4359 - RNA, 19 nt, artificial
  Chemically synthesized
ucaaguaacgaaguugaau

SEQ ID NO: 4360 - RNA, 19 nt, artificial
  Chemically synthesized
aaauuuucuuuguugaagu

SEQ ID NO: 4361 - RNA, 19 nt, artificial
  Chemically synthesized
ucugcaauuccaaaacuuu

SEQ ID NO: 4362 - RNA, 19 nt, artificial
  Chemically synthesized
cucauucaugcucuccucu

SEQ ID NO: 4363 - RNA, 19 nt, artificial
  Chemically synthesized
acccuacuuagaaaucuuc

SEQ ID NO: 4364 - RNA, 19 nt, artificial
  Chemically synthesized
uccuuucacagauauaaag

SEQ ID NO: 4365 - RNA, 19 nt, artificial
  Chemically synthesized
ucacacuggauaagaccau

SEQ ID NO: 4366 - RNA, 19 nt, artificial
  Chemically synthesized
augagcaaaaauaagaaua

SEQ ID NO: 4367 - RNA, 19 nt, artificial
  Chemically synthesized
cuuauccuaaagugacugc

SEQ ID NO: 4368 - RNA, 19 nt, artificial
  Chemically synthesized
uucugcuauagcagucaaa

SEQ ID NO: 4369 - RNA, 19 nt, artificial
  Chemically synthesized
augcaaucaaaaaaagaau

SEQ ID NO: 4370 - RNA, 19 nt, artificial
  Chemically synthesized
aaguagaauugaaccuuuc

SEQ ID NO: 4371 - RNA, 19 nt, artificial
  Chemically synthesized
cucauugucccacauuggu

SEQ ID NO: 4372 - RNA, 19 nt, artificial
  Chemically synthesized
aagauuacaaaccaaaacu

SEQ ID NO: 4373 - RNA, 19 nt, artificial
  Chemically synthesized
ugagaggcacauucuuauc

SEQ ID NO: 4374 - RNA, 19 nt, artificial
  Chemically synthesized
uugucggccuucucauauu

SEQ ID NO: 4375 - RNA, 19 nt, artificial
  Chemically synthesized
ugaugugaauagcuguaug

SEQ ID NO: 4376 - RNA, 19 nt, artificial
  Chemically synthesized
ugauaaaaucaccugggau

SEQ ID NO: 4377 - RNA, 19 nt, artificial
  Chemically synthesized
ugcagauuaccguccuuau

SEQ ID NO: 4378 - RNA, 19 nt, artificial
  Chemically synthesized
cuucauacuggaaaacauc

SEQ ID NO: 4379 - RNA, 19 nt, artificial
  Chemically synthesized
uguauguaggcagaucaua

SEQ ID NO: 4380 - RNA, 19 nt, artificial
  Chemically synthesized
acuucaauccugggaauug

SEQ ID NO: 4381 - RNA, 19 nt, artificial
  Chemically synthesized
uuucuuuguugaaguagaa

SEQ ID NO: 4382 - RNA, 19 nt, artificial
  Chemically synthesized
acuggauaagaccauauca

SEQ ID NO: 4383 - RNA, 19 nt, artificial
  Chemically synthesized
auccuuuauuuuuugauga

SEQ ID NO: 4384 - RNA, 19 nt, artificial
  Chemically synthesized
auaacucugaaccaccaaa

SEQ ID NO: 4385 - RNA, 19 nt, artificial
  Chemically synthesized
uccagacuggaauaucggu

SEQ ID NO: 4386 - RNA, 19 nt, artificial
  Chemically synthesized
uaaauuacugaagauacaa

SEQ ID NO: 4387 - RNA, 19 nt, artificial
  Chemically synthesized
ugugcggcugcaaaaugag

SEQ ID NO: 4388 - RNA, 19 nt, artificial
  Chemically synthesized
uaaguugcugaagcucaag

SEQ ID NO: 4389 - RNA, 19 nt, artificial
  Chemically synthesized
uaaacaggugugcaaugau

SEQ ID NO: 4390 - RNA, 19 nt, artificial
  Chemically synthesized
uaacaaccuugguaaucac

SEQ ID NO: 4391 - RNA, 19 nt, artificial
  Chemically synthesized
uccuuuauuuuuugaugag

SEQ ID NO: 4392 - RNA, 19 nt, artificial
  Chemically synthesized
uucagaacuuuaagaacuu

SEQ ID NO: 4393 - RNA, 19 nt, artificial
  Chemically synthesized
aaugcaaucaaaaaaagaa

SEQ ID NO: 4394 - RNA, 19 nt, artificial
  Chemically synthesized
ugacccaaggauuuuucuu

SEQ ID NO: 4395 - RNA, 19 nt, artificial
  Chemically synthesized
gcgaggaugacucucauuc

SEQ ID NO: 4396 - RNA, 19 nt, artificial
  Chemically synthesized
auuccuauaacucaaaaau

SEQ ID NO: 4397 - RNA, 19 nt, artificial
  Chemically synthesized
ucaaaagacucugcacacu

SEQ ID NO: 4398 - RNA, 19 nt, artificial
  Chemically synthesized
ugagauaggcuggagagaa

SEQ ID NO: 4399 - RNA, 19 nt, artificial
  Chemically synthesized
aaauaagaauaaauugcug

SEQ ID NO: 4400 - RNA, 19 nt, artificial
  Chemically synthesized
ugugauccaauugcuuucu

SEQ ID NO: 4401 - RNA, 19 nt, artificial
  Chemically synthesized
aaagucacccuacuuagaa

SEQ ID NO: 4402 - RNA, 19 nt, artificial
  Chemically synthesized
uucugcugggagcgguaaa

SEQ ID NO: 4403 - RNA, 19 nt, artificial
  Chemically synthesized
uauagcagucaaaguuaaa

SEQ ID NO: 4404 - RNA, 19 nt, artificial
  Chemically synthesized
aacaaccuugguaaucaca

SEQ ID NO: 4405 - RNA, 19 nt, artificial
  Chemically synthesized
acucugaaccaccaaaccu

SEQ ID NO: 4406 - RNA, 19 nt, artificial
  Chemically synthesized
cugaaccaccaaaccucug

SEQ ID NO: 4407 - RNA, 19 nt, artificial
  Chemically synthesized
auuguagaaaacucauugu

SEQ ID NO: 4408 - RNA, 19 nt, artificial
  Chemically synthesized
gucacgaucaucccacauc

SEQ ID NO: 4409 - RNA, 19 nt, artificial
  Chemically synthesized
ugagccuuuaagaugugaa

SEQ ID NO: 4410 - RNA, 19 nt, artificial
  Chemically synthesized
uggucugcacacuggaauu

SEQ ID NO: 4411 - RNA, 19 nt, artificial
  Chemically synthesized
aagaagaaaauccuuuauu

SEQ ID NO: 4412 - RNA, 19 nt, artificial
  Chemically synthesized
auguacacuguugguguua

SEQ ID NO: 4413 - RNA, 19 nt, artificial
  Chemically synthesized
uugcgaggaugacucucau

SEQ ID NO: 4414 - RNA, 19 nt, artificial
  Chemically synthesized
auaaaaucaccugggauua

SEQ ID NO: 4415 - RNA, 19 nt, artificial
  Chemically synthesized
cugcuaucaagccuugcua

SEQ ID NO: 4416 - RNA, 19 nt, artificial
  Chemically synthesized
aggaaggacagcagauugc

SEQ ID NO: 4417 - RNA, 19 nt, artificial
  Chemically synthesized
acuuagaaaucuucugugg

SEQ ID NO: 4418 - RNA, 19 nt, artificial
  Chemically synthesized
ucacccuacuuagaaaucu

SEQ ID NO: 4419 - RNA, 19 nt, artificial
  Chemically synthesized
ugacaguaaacauguacac

SEQ ID NO: 4420 - RNA, 19 nt, artificial
  Chemically synthesized
guggucugcacacuggaau

SEQ ID NO: 4421 - RNA, 19 nt, artificial
  Chemically synthesized
uauuccuauaacucaaaaa

SEQ ID NO: 4422 - RNA, 19 nt, artificial
  Chemically synthesized
aacuuagggcgccuacagu

SEQ ID NO: 4423 - RNA, 19 nt, artificial
  Chemically synthesized
aacuuuaagaacuucagaa

SEQ ID NO: 4424 - RNA, 19 nt, artificial
  Chemically synthesized
aacgaaguugaaugcaauc

SEQ ID NO: 4425 - RNA, 19 nt, artificial
  Chemically synthesized
guugugauccaauugcuuu

SEQ ID NO: 4426 - RNA, 19 nt, artificial
  Chemically synthesized
auugcuguucacacuggau

SEQ ID NO: 4427 - RNA, 19 nt, artificial
  Chemically synthesized
cuggauaagaccauaucaa

SEQ ID NO: 4428 - RNA, 19 nt, artificial
  Chemically synthesized
cuucaaacuuagggcgccu

SEQ ID NO: 4429 - RNA, 19 nt, artificial
  Chemically synthesized
gucugcacacuggaauuug

SEQ ID NO: 4430 - RNA, 19 nt, artificial
  Chemically synthesized
accugucacgaugucagug

SEQ ID NO: 4431 - RNA, 19 nt, artificial
  Chemically synthesized
ucagugugcggcugcaaaa

SEQ ID NO: 4432 - RNA, 19 nt, artificial
  Chemically synthesized
cuugagaggcacauucuua

SEQ ID NO: 4433 - RNA, 19 nt, artificial
  Chemically synthesized
ugaucacuccagugagacc

SEQ ID NO: 4434 - RNA, 19 nt, artificial
  Chemically synthesized
uaaaaagguggugaguaua

SEQ ID NO: 4435 - RNA, 19 nt, artificial
  Chemically synthesized
cucaaaagacucugcacac

SEQ ID NO: 4436 - RNA, 19 nt, artificial
  Chemically synthesized
uaacgaaguugaaugcaau

SEQ ID NO: 4437 - RNA, 19 nt, artificial
  Chemically synthesized
ucaggaaggacagcagauu

SEQ ID NO: 4438 - RNA, 19 nt, artificial
  Chemically synthesized
ugcaaucaaaaaaagaaua

SEQ ID NO: 4439 - RNA, 19 nt, artificial
  Chemically synthesized
uguugacccaaggauuuuu

SEQ ID NO: 4440 - RNA, 19 nt, artificial
  Chemically synthesized
ugucggcuucugcuauagc

SEQ ID NO: 4441 - RNA, 19 nt, artificial
  Chemically synthesized
augaugugaauagcuguau

SEQ ID NO: 4442 - RNA, 19 nt, artificial
  Chemically synthesized
aaguuaaacaggugugcaa

SEQ ID NO: 4443 - RNA, 19 nt, artificial
  Chemically synthesized
acucaguagcugaaguuac

SEQ ID NO: 4444 - RNA, 19 nt, artificial
  Chemically synthesized
uaagaacuucagaacuuua

SEQ ID NO: 4445 - RNA, 19 nt, artificial
  Chemically synthesized
aggcacauucuuauccuaa

SEQ ID NO: 4446 - RNA, 19 nt, artificial
  Chemically synthesized
uggauaagaccauaucaaa

SEQ ID NO: 4447 - RNA, 19 nt, artificial
  Chemically synthesized
agauaggcuggagagaaug

SEQ ID NO: 4448 - RNA, 19 nt, artificial
  Chemically synthesized
auaggcuggagagaaugga

SEQ ID NO: 4449 - RNA, 19 nt, artificial
  Chemically synthesized
auccggauucuggagaggu

SEQ ID NO: 4450 - RNA, 19 nt, artificial
  Chemically synthesized
ucuggacagaacugugcua

SEQ ID NO: 4451 - RNA, 19 nt, artificial
  Chemically synthesized
cauauuucaggaaggcauc

SEQ ID NO: 4452 - RNA, 19 nt, artificial
  Chemically synthesized
aaguugaaugcaaucaaaa

SEQ ID NO: 4453 - RNA, 19 nt, artificial
  Chemically synthesized
auaacuccuccggaugaac

SEQ ID NO: 4454 - RNA, 19 nt, artificial
  Chemically synthesized
uccuaaagugacugcucaa

SEQ ID NO: 4455 - RNA, 19 nt, artificial
  Chemically synthesized
auccacaaacaggaaaaca

SEQ ID NO: 4456 - RNA, 19 nt, artificial
  Chemically synthesized
uguggucugcacacuggaa

SEQ ID NO: 4457 - RNA, 19 nt, artificial
  Chemically synthesized
guuaaacaggugugcaaug

SEQ ID NO: 4458 - RNA, 19 nt, artificial
  Chemically synthesized
uccuucaggaauggaacau

SEQ ID NO: 4459 - RNA, 19 nt, artificial
  Chemically synthesized
cuucuaggcaacagggaag

SEQ ID NO: 4460 - RNA, 19 nt, artificial
  Chemically synthesized
ugaagauacaaagagacaa

SEQ ID NO: 4461 - RNA, 19 nt, artificial
  Chemically synthesized
ugccuuccuucucuggaca

SEQ ID NO: 4462 - RNA, 19 nt, artificial
  Chemically synthesized
ucaagccuugcuacaguca

SEQ ID NO: 4463 - RNA, 19 nt, artificial
  Chemically synthesized
ucaccugggauuaguugua

SEQ ID NO: 4464 - RNA, 19 nt, artificial
  Chemically synthesized
aaguaacgaaguugaaugc

SEQ ID NO: 4465 - RNA, 19 nt, artificial
  Chemically synthesized
acuggaauugauaaaauca

SEQ ID NO: 4466 - RNA, 19 nt, artificial
  Chemically synthesized
ggugaaugucacauacucc

SEQ ID NO: 4467 - RNA, 19 nt, artificial
  Chemically synthesized
aagaauaaauugcuguuca

SEQ ID NO: 4468 - RNA, 19 nt, artificial
  Chemically synthesized
cuucucauauuucaggaag

SEQ ID NO: 4469 - RNA, 19 nt, artificial
  Chemically synthesized
uggagcagaggucaaagua

SEQ ID NO: 4470 - RNA, 19 nt, artificial
  Chemically synthesized
acugucguguuucgggacu

SEQ ID NO: 4471 - RNA, 19 nt, artificial
  Chemically synthesized
aaacucauugucccacauu

SEQ ID NO: 4472 - RNA, 19 nt, artificial
  Chemically synthesized
aaacucaggagaugguaac

SEQ ID NO: 4473 - RNA, 19 nt, artificial
  Chemically synthesized
agauuaccguccuuauucc

SEQ ID NO: 4474 - RNA, 19 nt, artificial
  Chemically synthesized
guaguauuugucggccuuc

SEQ ID NO: 4475 - RNA, 19 nt, artificial
  Chemically synthesized
aguuaaacaggugugcaau

SEQ ID NO: 4476 - RNA, 19 nt, artificial
  Chemically synthesized
guauguaggcagaucauau

SEQ ID NO: 4477 - RNA, 19 nt, artificial
  Chemically synthesized
ugaugagcaaaaauaagaa

SEQ ID NO: 4478 - RNA, 19 nt, artificial
  Chemically synthesized
ccuacuuagaaaucuucug

SEQ ID NO: 4479 - RNA, 19 nt, artificial
  Chemically synthesized
aacuccuccggaugaacuc

SEQ ID NO: 4480 - RNA, 19 nt, artificial
  Chemically synthesized
uacaguuauuuuucugaga

SEQ ID NO: 4481 - RNA, 19 nt, artificial
  Chemically synthesized
caaaagacucugcacacuu

SEQ ID NO: 4482 - RNA, 19 nt, artificial
  Chemically synthesized
agcauuugcgcaggcucuu

SEQ ID NO: 4483 - RNA, 19 nt, artificial
  Chemically synthesized
gacagaacugugcuaucag

SEQ ID NO: 4484 - RNA, 19 nt, artificial
  Chemically synthesized
gauucuggagagguccuuc

SEQ ID NO: 4485 - RNA, 19 nt, artificial
  Chemically synthesized
cuggacagaacugugcuau

SEQ ID NO: 4486 - RNA, 19 nt, artificial
  Chemically synthesized
acauucagcccuaaccaaa

SEQ ID NO: 4487 - RNA, 19 nt, artificial
  Chemically synthesized
cucuggacagaacugugcu

SEQ ID NO: 4488 - RNA, 19 nt, artificial
  Chemically synthesized
guuauuuuucugagaaagg

SEQ ID NO: 4489 - RNA, 19 nt, artificial
  Chemically synthesized
gaaaacucccacuacagac

SEQ ID NO: 4490 - RNA, 19 nt, artificial
  Chemically synthesized
ucaucccacaucucaaaag

SEQ ID NO: 4491 - RNA, 19 nt, artificial
  Chemically synthesized
agugaagaagaaaauccuu

SEQ ID NO: 4492 - RNA, 19 nt, artificial
  Chemically synthesized
acaggugugcaaugaugug

SEQ ID NO: 4493 - RNA, 19 nt, artificial
  Chemically synthesized
ccuuuauuuuuugaugagc

SEQ ID NO: 4494 - RNA, 19 nt, artificial
  Chemically synthesized
caggaaggcauccacaaac

SEQ ID NO: 4495 - RNA, 19 nt, artificial
  Chemically synthesized
uuggagcccuucuaggcaa

SEQ ID NO: 4496 - RNA, 19 nt, artificial
  Chemically synthesized
caauuaacaaagauauacu

SEQ ID NO: 4497 - RNA, 19 nt, artificial
  Chemically synthesized
aucagcgugcuguuaaaau

SEQ ID NO: 4498 - RNA, 19 nt, artificial
  Chemically synthesized
cucauauuucaggaaggca

SEQ ID NO: 4499 - RNA, 19 nt, artificial
  Chemically synthesized
acaauuccaccaaugccgu

SEQ ID NO: 4500 - RNA, 19 nt, artificial
  Chemically synthesized
gcaaugaugugaauagcug

SEQ ID NO: 4501 - RNA, 19 nt, artificial
  Chemically synthesized
ucagcccuaaccaaacaac

SEQ ID NO: 4502 - RNA, 19 nt, artificial
  Chemically synthesized
cuauuguagaaaacucauu

SEQ ID NO: 4503 - RNA, 19 nt, artificial
  Chemically synthesized
gccuugucaaaguuuaaug

SEQ ID NO: 4504 - RNA, 19 nt, artificial
  Chemically synthesized
agacaaaaugcagauuacc

SEQ ID NO: 4505 - RNA, 19 nt, artificial
  Chemically synthesized
cuaucaagccuugcuacag

SEQ ID NO: 4506 - RNA, 19 nt, artificial
  Chemically synthesized
ugcuggugaaugucacaua

SEQ ID NO: 4507 - RNA, 19 nt, artificial
  Chemically synthesized
aucaucccacaucucaaaa

SEQ ID NO: 4508 - RNA, 19 nt, artificial
  Chemically synthesized
gauaaaaucaccugggauu

SEQ ID NO: 4509 - RNA, 19 nt, artificial
  Chemically synthesized
augugaauagcuguaugua

SEQ ID NO: 4510 - RNA, 19 nt, artificial
  Chemically synthesized
gggaagauucagcaauccg

SEQ ID NO: 4511 - RNA, 19 nt, artificial
  Chemically synthesized
ugcgaggaugacucucauu

SEQ ID NO: 4512 - RNA, 19 nt, artificial
  Chemically synthesized
guugaaugcaaucaaaaaa

SEQ ID NO: 4513 - RNA, 19 nt, artificial
  Chemically synthesized
cccuacuuagaaaucuucu

SEQ ID NO: 4514 - RNA, 19 nt, artificial
  Chemically synthesized
auuugucggccuucucaua

SEQ ID NO: 4515 - RNA, 19 nt, artificial
  Chemically synthesized
aagaacuucagaacuuuaa

SEQ ID NO: 4516 - RNA, 19 nt, artificial
  Chemically synthesized
ucagaccugucacgauguc

SEQ ID NO: 4517 - RNA, 19 nt, artificial
  Chemically synthesized
ucucccaaaggagguuuuc

SEQ ID NO: 4518 - RNA, 19 nt, artificial
  Chemically synthesized
auuucaagauagaagcaaa

SEQ ID NO: 4519 - RNA, 19 nt, artificial
  Chemically synthesized
uaucaaaagugacaguaaa

SEQ ID NO: 4520 - RNA, 19 nt, artificial
  Chemically synthesized
caaaguuaaacaggugugc

SEQ ID NO: 4521 - RNA, 19 nt, artificial
  Chemically synthesized
caggaaggacagcagauug

SEQ ID NO: 4522 - RNA, 19 nt, artificial
  Chemically synthesized
agugugcggcugcaaaaug

SEQ ID NO: 4523 - RNA, 19 nt, artificial
  Chemically synthesized
acagggaagauucagcaau

SEQ ID NO: 4524 - RNA, 19 nt, artificial
  Chemically synthesized
ucaaaccugacgagaccaa

SEQ ID NO: 4525 - RNA, 19 nt, artificial
  Chemically synthesized
agguccuucaggaauggaa

SEQ ID NO: 4526 - RNA, 19 nt, artificial
  Chemically synthesized
gggaccauccacuucaauc

SEQ ID NO: 4527 - RNA, 19 nt, artificial
  Chemically synthesized
accagauggauuucaagau

SEQ ID NO: 4528 - RNA, 19 nt, artificial
  Chemically synthesized
cacauuggucucccaaagg

SEQ ID NO: 4529 - RNA, 19 nt, artificial
  Chemically synthesized
aaagauuacaaaccaaaac

SEQ ID NO: 4530 - RNA, 19 nt, artificial
  Chemically synthesized
cugaaaaccagugguuaac

SEQ ID NO: 4531 - RNA, 19 nt, artificial
  Chemically synthesized
acuggaauaucggugacag

SEQ ID NO: 4532 - RNA, 19 nt, artificial
  Chemically synthesized
aaaucaccugggauuaguu

SEQ ID NO: 4533 - RNA, 19 nt, artificial
  Chemically synthesized
cuaggauccagacuggaau

SEQ ID NO: 4534 - RNA, 19 nt, artificial
  Chemically synthesized
agugggagucacgaucauc

SEQ ID NO: 4535 - RNA, 19 nt, artificial
  Chemically synthesized
cauuggucucccaaaggag

SEQ ID NO: 4536 - RNA, 19 nt, artificial
  Chemically synthesized
cauaagaaaacucccacua

SEQ ID NO: 4537 - RNA, 19 nt, artificial
  Chemically synthesized
ucagcgugcuguuaaaauu

SEQ ID NO: 4538 - RNA, 19 nt, artificial
  Chemically synthesized
cuuuaagaugugaaaaaca

SEQ ID NO: 4539 - RNA, 19 nt, artificial
  Chemically synthesized
aguuauuuuucugagaaag

SEQ ID NO: 4540 - RNA, 19 nt, artificial
  Chemically synthesized
acuggaauuuguaccagau

SEQ ID NO: 4541 - RNA, 19 nt, artificial
  Chemically synthesized
agcaaugcuggugaauguc

SEQ ID NO: 4542 - RNA, 19 nt, artificial
  Chemically synthesized
uaccagaagacuucaaaau

SEQ ID NO: 4543 - RNA, 19 nt, artificial
  Chemically synthesized
ugggagggacaaaagauua

SEQ ID NO: 4544 - RNA, 19 nt, artificial
  Chemically synthesized
aguuaccaugagaaucaag

SEQ ID NO: 4545 - RNA, 19 nt, artificial
  Chemically synthesized
acuggaaaacauccucacu

SEQ ID NO: 4546 - RNA, 19 nt, artificial
  Chemically synthesized
ggaugggugcauaacaacc

SEQ ID NO: 4547 - RNA, 19 nt, artificial
  Chemically synthesized
cagugguuaaccacccagu

SEQ ID NO: 4548 - RNA, 19 nt, artificial
  Chemically synthesized
guggaaggugagguuguga

SEQ ID NO: 4549 - RNA, 19 nt, artificial
  Chemically synthesized
cccacaucucaaaagacuc

SEQ ID NO: 4550 - RNA, 19 nt, artificial
  Chemically synthesized
ggguuuucuuuuuguucuu

SEQ ID NO: 4551 - RNA, 19 nt, artificial
  Chemically synthesized
ccagaucauuaggacauaa

SEQ ID NO: 4552 - RNA, 19 nt, artificial
  Chemically synthesized
gccucauauuaauuaucac

SEQ ID NO: 4553 - RNA, 19 nt, artificial
  Chemically synthesized
gcauaauuaaaaccagcuu

SEQ ID NO: 4554 - RNA, 19 nt, artificial
  Chemically synthesized
gcaggguuuucuuuuuguu

SEQ ID NO: 4555 - RNA, 19 nt, artificial
  Chemically synthesized
ccaacugggauaaugaauu

SEQ ID NO: 4556 - RNA, 19 nt, artificial
  Chemically synthesized
gggucucauauuggucauu

SEQ ID NO: 4557 - RNA, 19 nt, artificial
  Chemically synthesized
ggauaaugaauucaagaca

SEQ ID NO: 4558 - RNA, 19 nt, artificial
  Chemically synthesized
gccugaauuucaacugcau

SEQ ID NO: 4559 - RNA, 19 nt, artificial
  Chemically synthesized
cgcugugccucauauuaau

SEQ ID NO: 4560 - RNA, 19 nt, artificial
  Chemically synthesized
cuaaccuaugugcauaauu

SEQ ID NO: 4561 - RNA, 19 nt, artificial
  Chemically synthesized
caauucaucuauucaacag

SEQ ID NO: 4562 - RNA, 19 nt, artificial
  Chemically synthesized
gugugacuaaugguuuauu

SEQ ID NO: 4563 - RNA, 19 nt, artificial
  Chemically synthesized
accacacaaugccaagaua

SEQ ID NO: 4564 - RNA, 19 nt, artificial
  Chemically synthesized
gccucagaauccucaaaau

SEQ ID NO: 4565 - RNA, 19 nt, artificial
  Chemically synthesized
gaaacccugaguaaacaaa

SEQ ID NO: 4566 - RNA, 19 nt, artificial
  Chemically synthesized
ccaacuaaguuaugaaagu

SEQ ID NO: 4567 - RNA, 19 nt, artificial
  Chemically synthesized
ccauugcacaucuauuuaa

SEQ ID NO: 4568 - RNA, 19 nt, artificial
  Chemically synthesized
cagguaucaauucaucuau

SEQ ID NO: 4569 - RNA, 19 nt, artificial
  Chemically synthesized
cgaauauagccuuucugaa

SEQ ID NO: 4570 - RNA, 19 nt, artificial
  Chemically synthesized
ggccugcugugcgaauaua

SEQ ID NO: 4571 - RNA, 19 nt, artificial
  Chemically synthesized
aggguuuucuuuuuguucu

SEQ ID NO: 4572 - RNA, 19 nt, artificial
  Chemically synthesized
cccuuaugaauauugaacu

SEQ ID NO: 4573 - RNA, 19 nt, artificial
  Chemically synthesized
cuaauuuccugcccaaagu

SEQ ID NO: 4574 - RNA, 19 nt, artificial
  Chemically synthesized
caacacccuaauaccagaa

SEQ ID NO: 4575 - RNA, 19 nt, artificial
  Chemically synthesized
gggauaaugaauucaagac

SEQ ID NO: 4576 - RNA, 19 nt, artificial
  Chemically synthesized
acugggauaaugaauucaa

SEQ ID NO: 4577 - RNA, 19 nt, artificial
  Chemically synthesized
ccauccggaggucuuacuu

SEQ ID NO: 4578 - RNA, 19 nt, artificial
  Chemically synthesized
gugccucauauuaauuauc

SEQ ID NO: 4579 - RNA, 19 nt, artificial
  Chemically synthesized
cugugccucauauuaauua

SEQ ID NO: 4580 - RNA, 19 nt, artificial
  Chemically synthesized
ccgagucaauaauucugau

SEQ ID NO: 4581 - RNA, 19 nt, artificial
  Chemically synthesized
ggcuuuguaugugaauaau

SEQ ID NO: 4582 - RNA, 19 nt, artificial
  Chemically synthesized
ucuaaccuaugugcauaau

SEQ ID NO: 4583 - RNA, 19 nt, artificial
  Chemically synthesized
ucagguaucaauucaucua

SEQ ID NO: 4584 - RNA, 19 nt, artificial
  Chemically synthesized
cccagauuucuuaaaguuu

SEQ ID NO: 4585 - RNA, 19 nt, artificial
  Chemically synthesized
gagccacaaauguuuagaa

SEQ ID NO: 4586 - RNA, 19 nt, artificial
  Chemically synthesized
agagcaggguuuucuuuuu

SEQ ID NO: 4587 - RNA, 19 nt, artificial
  Chemically synthesized
ucaucaucaucauccuaaa

SEQ ID NO: 4588 - RNA, 19 nt, artificial
  Chemically synthesized
cugugugacuaaugguuua

SEQ ID NO: 4589 - RNA, 19 nt, artificial
  Chemically synthesized
cugggauaaugaauucaag

SEQ ID NO: 4590 - RNA, 19 nt, artificial
  Chemically synthesized
ucgagcuacagaugaagaa

SEQ ID NO: 4591 - RNA, 19 nt, artificial
  Chemically synthesized
ggucuuacuuugaagucuu

SEQ ID NO: 4592 - RNA, 19 nt, artificial
  Chemically synthesized
gggaauucuuaaaacugug

SEQ ID NO: 4593 - RNA, 19 nt, artificial
  Chemically synthesized
gagugcuugucauuauaaa

SEQ ID NO: 4594 - RNA, 19 nt, artificial
  Chemically synthesized
gggacuaggaugaacuaaa

SEQ ID NO: 4595 - RNA, 19 nt, artificial
  Chemically synthesized
ggagaaaagagaaugggag

SEQ ID NO: 4596 - RNA, 19 nt, artificial
  Chemically synthesized
ggagccacaaauguuuaga

SEQ ID NO: 4597 - RNA, 19 nt, artificial
  Chemically synthesized
cccuuauuuuccguaaaua

SEQ ID NO: 4598 - RNA, 19 nt, artificial
  Chemically synthesized
gcccuuaugaauauugaac

SEQ ID NO: 4599 - RNA, 19 nt, artificial
  Chemically synthesized
aaccacacaaugccaagau

SEQ ID NO: 4600 - RNA, 19 nt, artificial
  Chemically synthesized
ugaauuuagaaccacacaa

SEQ ID NO: 4601 - RNA, 19 nt, artificial
  Chemically synthesized
acauuuauguggagcucua

SEQ ID NO: 4602 - RNA, 19 nt, artificial
  Chemically synthesized
ugaaacccugaguaaacaa

SEQ ID NO: 4603 - RNA, 19 nt, artificial
  Chemically synthesized
cugaaacccugaguaaaca

SEQ ID NO: 4604 - RNA, 19 nt, artificial
  Chemically synthesized
ggcugugcauaauauaaca

SEQ ID NO: 4605 - RNA, 19 nt, artificial
  Chemically synthesized
gucuuacuuugaagucuuu

SEQ ID NO: 4606 - RNA, 19 nt, artificial
  Chemically synthesized
uuaaaacugugcucaacua

SEQ ID NO: 4607 - RNA, 19 nt, artificial
  Chemically synthesized
aggcuuuguaugugaauaa

SEQ ID NO: 4608 - RNA, 19 nt, artificial
  Chemically synthesized
gcauuuauuaacagguacu

SEQ ID NO: 4609 - RNA, 19 nt, artificial
  Chemically synthesized
ugugcauaauuaaaaccag

SEQ ID NO: 4610 - RNA, 19 nt, artificial
  Chemically synthesized
uucuaaccuaugugcauaa

SEQ ID NO: 4611 - RNA, 19 nt, artificial
  Chemically synthesized
ucaauucuuuacaccaaag

SEQ ID NO: 4612 - RNA, 19 nt, artificial
  Chemically synthesized
gaauauagccuuucugaaa

SEQ ID NO: 4613 - RNA, 19 nt, artificial
  Chemically synthesized
ggucucauauuggucauuc

SEQ ID NO: 4614 - RNA, 19 nt, artificial
  Chemically synthesized
ccaagagcaggguuuucuu

SEQ ID NO: 4615 - RNA, 19 nt, artificial
  Chemically synthesized
ccacacaaugccaagauag

SEQ ID NO: 4616 - RNA, 19 nt, artificial
  Chemically synthesized
uggauugauuggaguuaau

SEQ ID NO: 4617 - RNA, 19 nt, artificial
  Chemically synthesized
ccagguuugauacucuuuc

SEQ ID NO: 4618 - RNA, 19 nt, artificial
  Chemically synthesized
cuccagguuugauacucuu

SEQ ID NO: 4619 - RNA, 19 nt, artificial
  Chemically synthesized
ucaaaagguucaguaacuu

SEQ ID NO: 4620 - RNA, 19 nt, artificial
  Chemically synthesized
ggaucaaaagguucaguaa

SEQ ID NO: 4621 - RNA, 19 nt, artificial
  Chemically synthesized
gcauuucauuuucaacaag

SEQ ID NO: 4622 - RNA, 19 nt, artificial
  Chemically synthesized
gaauucaagacaauugcaa

SEQ ID NO: 4623 - RNA, 19 nt, artificial
  Chemically synthesized
ggaugagucucaggccaau

SEQ ID NO: 4624 - RNA, 19 nt, artificial
  Chemically synthesized
gccagaugcaggaaaggaa

SEQ ID NO: 4625 - RNA, 19 nt, artificial
  Chemically synthesized
gagcuacagaugaagaaga

SEQ ID NO: 4626 - RNA, 19 nt, artificial
  Chemically synthesized
gcgguuuuggcgaucucaa

SEQ ID NO: 4627 - RNA, 19 nt, artificial
  Chemically synthesized
ggaggucuuacuuugaagu

SEQ ID NO: 4628 - RNA, 19 nt, artificial
  Chemically synthesized
cggaggucuuacuuugaag

SEQ ID NO: 4629 - RNA, 19 nt, artificial
  Chemically synthesized
aucacuuccuccaccaaaa

SEQ ID NO: 4630 - RNA, 19 nt, artificial
  Chemically synthesized
gcaggcuuuguaugugaau

SEQ ID NO: 4631 - RNA, 19 nt, artificial
  Chemically synthesized
agagugcuugucauuauaa

SEQ ID NO: 4632 - RNA, 19 nt, artificial
  Chemically synthesized
cuaucuucaaaaccaacua

SEQ ID NO: 4633 - RNA, 19 nt, artificial
  Chemically synthesized
gcccuuucuaaccuaugug

SEQ ID NO: 4634 - RNA, 19 nt, artificial
  Chemically synthesized
accucagguaucaauucau

SEQ ID NO: 4635 - RNA, 19 nt, artificial
  Chemically synthesized
agcaggguuuucuuuuugu

SEQ ID NO: 4636 - RNA, 19 nt, artificial
  Chemically synthesized
auaaaaugguggcauggau

SEQ ID NO: 4637 - RNA, 19 nt, artificial
  Chemically synthesized
ugugugacuaaugguuuau

SEQ ID NO: 4638 - RNA, 19 nt, artificial
  Chemically synthesized
agcuagcccuuaugaauau

SEQ ID NO: 4639 - RNA, 19 nt, artificial
  Chemically synthesized
gacuaauuuccugcccaaa

SEQ ID NO: 4640 - RNA, 19 nt, artificial
  Chemically synthesized
gcaugaaaaaagaggguug

SEQ ID NO: 4641 - RNA, 19 nt, artificial
  Chemically synthesized
acaaugccaagauagaauu

SEQ ID NO: 4642 - RNA, 19 nt, artificial
  Chemically synthesized
cacaaugccaagauagaau

SEQ ID NO: 4643 - RNA, 19 nt, artificial
  Chemically synthesized
gaaccacacaaugccaaga

SEQ ID NO: 4644 - RNA, 19 nt, artificial
  Chemically synthesized
acauaauacauguugagag

SEQ ID NO: 4645 - RNA, 19 nt, artificial
  Chemically synthesized
ggaguagcuauauauuucu

SEQ ID NO: 4646 - RNA, 19 nt, artificial
  Chemically synthesized
ugccucagaauccucaaaa

SEQ ID NO: 4647 - RNA, 19 nt, artificial
  Chemically synthesized
ggagcucuaugguuuugag

SEQ ID NO: 4648 - RNA, 19 nt, artificial
  Chemically synthesized
gcugaaacccugaguaaac

SEQ ID NO: 4649 - RNA, 19 nt, artificial
  Chemically synthesized
ucaacacccuaauaccaga

SEQ ID NO: 4650 - RNA, 19 nt, artificial
  Chemically synthesized
ccaccuaaguucuuuuaca

SEQ ID NO: 4651 - RNA, 19 nt, artificial
  Chemically synthesized
cgagcuacagaugaagaag

SEQ ID NO: 4652 - RNA, 19 nt, artificial
  Chemically synthesized
gcugugccucauauuaauu

SEQ ID NO: 4653 - RNA, 19 nt, artificial
  Chemically synthesized
ggcaaaaugaaaguuaucu

SEQ ID NO: 4654 - RNA, 19 nt, artificial
  Chemically synthesized
caggcaaaaugaaaguuau

SEQ ID NO: 4655 - RNA, 19 nt, artificial
  Chemically synthesized
acaggcaaaaugaaaguua

SEQ ID NO: 4656 - RNA, 19 nt, artificial
  Chemically synthesized
gucaauaauucugauccuu

SEQ ID NO: 4657 - RNA, 19 nt, artificial
  Chemically synthesized
cccgagucaauaauucuga

SEQ ID NO: 4658 - RNA, 19 nt, artificial
  Chemically synthesized
cugugcucaacuauuaaaa

SEQ ID NO: 4659 - RNA, 19 nt, artificial
  Chemically synthesized
gaauucuuaaaacugugcu

SEQ ID NO: 4660 - RNA, 19 nt, artificial
  Chemically synthesized
ggaauucuuaaaacugugc

SEQ ID NO: 4661 - RNA, 19 nt, artificial
  Chemically synthesized
ucuuaguucuucugcuuuu

SEQ ID NO: 4662 - RNA, 19 nt, artificial
  Chemically synthesized
gugcuugucauuauaaaag

SEQ ID NO: 4663 - RNA, 19 nt, artificial
  Chemically synthesized
guuauaaggagucugagaa

SEQ ID NO: 4664 - RNA, 19 nt, artificial
  Chemically synthesized
gcucuguuuauuguuucaa

SEQ ID NO: 4665 - RNA, 19 nt, artificial
  Chemically synthesized
ccucagguaucaauucauc

SEQ ID NO: 4666 - RNA, 19 nt, artificial
  Chemically synthesized
gccuuucugaaauguacca

SEQ ID NO: 4667 - RNA, 19 nt, artificial
  Chemically synthesized
ggaugaacuaaauaagaac

SEQ ID NO: 4668 - RNA, 19 nt, artificial
  Chemically synthesized
cacaaauguuuagaacucu

SEQ ID NO: 4669 - RNA, 19 nt, artificial
  Chemically synthesized
gccacaaauguuuagaacu

SEQ ID NO: 4670 - RNA, 19 nt, artificial
  Chemically synthesized
agccacaaauguuuagaac

SEQ ID NO: 4671 - RNA, 19 nt, artificial
  Chemically synthesized
gagcaggguuuucuuuuug

SEQ ID NO: 4672 - RNA, 19 nt, artificial
  Chemically synthesized
cucaauaguauguucugaa

SEQ ID NO: 4673 - RNA, 19 nt, artificial
  Chemically synthesized
acaacccagaaacaaaaau

SEQ ID NO: 4674 - RNA, 19 nt, artificial
  Chemically synthesized
ggaauugugacaaauaugu

SEQ ID NO: 4675 - RNA, 19 nt, artificial
  Chemically synthesized
gcuagcccuuaugaauauu

SEQ ID NO: 4676 - RNA, 19 nt, artificial
  Chemically synthesized
cuccuugugcuauaaaaua

SEQ ID NO: 4677 - RNA, 19 nt, artificial
  Chemically synthesized
gcuccuugugcuauaaaau

SEQ ID NO: 4678 - RNA, 19 nt, artificial
  Chemically synthesized
gccaucauuauuaucauac

SEQ ID NO: 4679 - RNA, 19 nt, artificial
  Chemically synthesized
ccaucuuacuccagguuug

SEQ ID NO: 4680 - RNA, 19 nt, artificial
  Chemically synthesized
aggaucaaaagguucagua

SEQ ID NO: 4681 - RNA, 19 nt, artificial
  Chemically synthesized
gucgaaaucugcuguccuu

SEQ ID NO: 4682 - RNA, 19 nt, artificial
  Chemically synthesized
gggaaaggaucaaaagguu

SEQ ID NO: 4683 - RNA, 19 nt, artificial
  Chemically synthesized
ggaaaagauucuuggacuc

SEQ ID NO: 4684 - RNA, 19 nt, artificial
  Chemically synthesized
gggaaaagauucuuggacu

SEQ ID NO: 4685 - RNA, 19 nt, artificial
  Chemically synthesized
ccugaguaaacaaagcauc

SEQ ID NO: 4686 - RNA, 19 nt, artificial
  Chemically synthesized
ucagucugguacaaauauu

SEQ ID NO: 4687 - RNA, 19 nt, artificial
  Chemically synthesized
ugggacaauacauuuuugu

SEQ ID NO: 4688 - RNA, 19 nt, artificial
  Chemically synthesized
gugggacaauacauuuuug

SEQ ID NO: 4689 - RNA, 19 nt, artificial
  Chemically synthesized
agugggacaauacauuuuu

SEQ ID NO: 4690 - RNA, 19 nt, artificial
  Chemically synthesized
ccggguuuaugauauucca

SEQ ID NO: 4691 - RNA, 19 nt, artificial
  Chemically synthesized
ggaaaaauaaaggaaugcc

SEQ ID NO: 4692 - RNA, 19 nt, artificial
  Chemically synthesized
ggcucuccauuuuugucau

SEQ ID NO: 4693 - RNA, 19 nt, artificial
  Chemically synthesized
acgcugugccucauauuaa

SEQ ID NO: 4694 - RNA, 19 nt, artificial
  Chemically synthesized
cgaaagagaauaaagaacc

SEQ ID NO: 4695 - RNA, 19 nt, artificial
  Chemically synthesized
gaaugcccgagucaauaau

SEQ ID NO: 4696 - RNA, 19 nt, artificial
  Chemically synthesized
caggcuuuguaugugaaua

SEQ ID NO: 4697 - RNA, 19 nt, artificial
  Chemically synthesized
ggcucuguuuauuguuuca

SEQ ID NO: 4698 - RNA, 19 nt, artificial
  Chemically synthesized
guuguucuuugucauacua

SEQ ID NO: 4699 - RNA, 19 nt, artificial
  Chemically synthesized
ucaguuguucuuugucaua

SEQ ID NO: 4700 - RNA, 19 nt, artificial
  Chemically synthesized
cucaguuguucuuugucau

SEQ ID NO: 4701 - RNA, 19 nt, artificial
  Chemically synthesized
gaaaagagaaugggagagu

SEQ ID NO: 4702 - RNA, 19 nt, artificial
  Chemically synthesized
gaaaaggaaauaaggagaa

SEQ ID NO: 4703 - RNA, 19 nt, artificial
  Chemically synthesized
caaauguuuagaacucuuc

SEQ ID NO: 4704 - RNA, 19 nt, artificial
  Chemically synthesized
gagucucuaaaucacuguu

SEQ ID NO: 4705 - RNA, 19 nt, artificial
  Chemically synthesized
guaucugauauggucauuu

SEQ ID NO: 4706 - RNA, 19 nt, artificial
  Chemically synthesized
agcaugaaaaaagaggguu

SEQ ID NO: 4707 - RNA, 19 nt, artificial
  Chemically synthesized
acacaaugccaagauagaa

SEQ ID NO: 4708 - RNA, 19 nt, artificial
  Chemically synthesized
cuacagaagaauauuggau

SEQ ID NO: 4709 - RNA, 19 nt, artificial
  Chemically synthesized
accaaggaguagcuauaua

SEQ ID NO: 4710 - RNA, 19 nt, artificial
  Chemically synthesized
cugccucagaauccucaaa

SEQ ID NO: 4711 - RNA, 19 nt, artificial
  Chemically synthesized
ccacaauacugagcugccu

SEQ ID NO: 4712 - RNA, 19 nt, artificial
  Chemically synthesized
uugauacucuuuccacaau

SEQ ID NO: 4713 - RNA, 19 nt, artificial
  Chemically synthesized
guaaugguuuucccuuaaa

SEQ ID NO: 4714 - RNA, 19 nt, artificial
  Chemically synthesized
ccaugaggaaauaaaugug

SEQ ID NO: 4715 - RNA, 19 nt, artificial
  Chemically synthesized
ggagugcauuucauuuuca

SEQ ID NO: 4716 - RNA, 19 nt, artificial
  Chemically synthesized
guaaacaaagcaucuccaa

SEQ ID NO: 4717 - RNA, 19 nt, artificial
  Chemically synthesized
ggagaaagaugugaucaca

SEQ ID NO: 4718 - RNA, 19 nt, artificial
  Chemically synthesized
ccauucucaagucagucug

SEQ ID NO: 4719 - RNA, 19 nt, artificial
  Chemically synthesized
ucaagaugcguggaaacua

SEQ ID NO: 4720 - RNA, 19 nt, artificial
  Chemically synthesized
aguuucaagaugcguggaa

SEQ ID NO: 4721 - RNA, 19 nt, artificial
  Chemically synthesized
ggaguuucaagaugcgugg

SEQ ID NO: 4722 - RNA, 19 nt, artificial
  Chemically synthesized
agacuucuuuaguauccau

SEQ ID NO: 4723 - RNA, 19 nt, artificial
  Chemically synthesized
gaggaagacuucuuuagua

SEQ ID NO: 4724 - RNA, 19 nt, artificial
  Chemically synthesized
aaaccaucgagcuacagau

SEQ ID NO: 4725 - RNA, 19 nt, artificial
  Chemically synthesized
agagguuggugcgguuuug

SEQ ID NO: 4726 - RNA, 19 nt, artificial
  Chemically synthesized
gagagguuggugcgguuuu

SEQ ID NO: 4727 - RNA, 19 nt, artificial
  Chemically synthesized
gcucuccauuuuugucauu

SEQ ID NO: 4728 - RNA, 19 nt, artificial
  Chemically synthesized
gugaacaaaaaaucucaga

SEQ ID NO: 4729 - RNA, 19 nt, artificial
  Chemically synthesized
cacgcugugccucauauua

SEQ ID NO: 4730 - RNA, 19 nt, artificial
  Chemically synthesized
gcccgagucaauaauucug

SEQ ID NO: 4731 - RNA, 19 nt, artificial
  Chemically synthesized
gugcucaacuauuaaaaug

SEQ ID NO: 4732 - RNA, 19 nt, artificial
  Chemically synthesized
acugugcucaacuauuaaa

SEQ ID NO: 4733 - RNA, 19 nt, artificial
  Chemically synthesized
ugcaggcuuuguaugugaa

SEQ ID NO: 4734 - RNA, 19 nt, artificial
  Chemically synthesized
gguuuuucuuaguucuucu

SEQ ID NO: 4735 - RNA, 19 nt, artificial
  Chemically synthesized
agguuuuucuuaguucuuc

SEQ ID NO: 4736 - RNA, 19 nt, artificial
  Chemically synthesized
gaagguuuuucuuaguucu

SEQ ID NO: 4737 - RNA, 19 nt, artificial
  Chemically synthesized
gaaugaugaagcauuguuu

SEQ ID NO: 4738 - RNA, 19 nt, artificial
  Chemically synthesized
agaaugaugaagcauuguu

SEQ ID NO: 4739 - RNA, 19 nt, artificial
  Chemically synthesized
cuaagaaugaugaagcauu

SEQ ID NO: 4740 - RNA, 19 nt, artificial
  Chemically synthesized
auauaagagugcuugucau

SEQ ID NO: 4741 - RNA, 19 nt, artificial
  Chemically synthesized
gaauauaagagugcuuguc

SEQ ID NO: 4742 - RNA, 19 nt, artificial
  Chemically synthesized
cccuuucuaaccuaugugc

SEQ ID NO: 4743 - RNA, 19 nt, artificial
  Chemically synthesized
auauagccuuucugaaaug

SEQ ID NO: 4744 - RNA, 19 nt, artificial
  Chemically synthesized
aggccugcugugcgaauau

SEQ ID NO: 4745 - RNA, 19 nt, artificial
  Chemically synthesized
cuaggaugaacuaaauaag

SEQ ID NO: 4746 - RNA, 19 nt, artificial
  Chemically synthesized
ggauuauucaagggacuag

SEQ ID NO: 4747 - RNA, 19 nt, artificial
  Chemically synthesized
ggagagugagagaaaauaa

SEQ ID NO: 4748 - RNA, 19 nt, artificial
  Chemically synthesized
gggagagugagagaaaaua

SEQ ID NO: 4749 - RNA, 19 nt, artificial
  Chemically synthesized
agaaaagagaaugggagag

SEQ ID NO: 4750 - RNA, 19 nt, artificial
  Chemically synthesized
ggaaauaaggagaaaagag

SEQ ID NO: 4751 - RNA, 19 nt, artificial
  Chemically synthesized
ggaaaaggaaauaaggaga

SEQ ID NO: 4752 - RNA, 19 nt, artificial
  Chemically synthesized
gaacucuucaacuucggua

SEQ ID NO: 4753 - RNA, 19 nt, artificial
  Chemically synthesized
uggagccacaaauguuuag

SEQ ID NO: 4754 - RNA, 19 nt, artificial
  Chemically synthesized
gguugaacgucuuccucuu

SEQ ID NO: 4755 - RNA, 19 nt, artificial
  Chemically synthesized
caagagcaggguuuucuuu

SEQ ID NO: 4756 - RNA, 19 nt, artificial
  Chemically synthesized
agucucuaaaucacuguua

SEQ ID NO: 4757 - RNA, 19 nt, artificial
  Chemically synthesized
agagucucuaaaucacugu

SEQ ID NO: 4758 - RNA, 19 nt, artificial
  Chemically synthesized
uaacaacccagaaacaaaa

SEQ ID NO: 4759 - RNA, 19 nt, artificial
  Chemically synthesized
cuaaaauuaacaacccaga

SEQ ID NO: 4760 - RNA, 19 nt, artificial
  Chemically synthesized
uccuaaaauuaacaaccca

SEQ ID NO: 4761 - RNA, 19 nt, artificial
  Chemically synthesized
agcccuuaugaauauugaa

SEQ ID NO: 4762 - RNA, 19 nt, artificial
  Chemically synthesized
ccagcuagcccuuaugaau

SEQ ID NO: 4763 - RNA, 19 nt, artificial
  Chemically synthesized
caaugccaagauagaauua

SEQ ID NO: 4764 - RNA, 19 nt, artificial
  Chemically synthesized
ggauugauuggaguuaaug

SEQ ID NO: 4765 - RNA, 19 nt, artificial
  Chemically synthesized
gaauccucaaaaucaguuu

SEQ ID NO: 4766 - RNA, 19 nt, artificial
  Chemically synthesized
caguggaaguuagggaaaa

SEQ ID NO: 4767 - RNA, 19 nt, artificial
  Chemically synthesized
agagcacuuuuacaaacau

SEQ ID NO: 4768 - RNA, 19 nt, artificial
  Chemically synthesized
gguuuugagagcacuuuua

SEQ ID NO: 4769 - RNA, 19 nt, artificial
  Chemically synthesized
acugcaugcugauucucuu

SEQ ID NO: 4770 - RNA, 19 nt, artificial
  Chemically synthesized
ugugaucacaggccugaaa

SEQ ID NO: 4771 - RNA, 19 nt, artificial
  Chemically synthesized
ccaugaugaggagaaagau

SEQ ID NO: 4772 - RNA, 19 nt, artificial
  Chemically synthesized
ugaauuucaacugcaugcu

SEQ ID NO: 4773 - RNA, 19 nt, artificial
  Chemically synthesized
cgcauccauucucaaguca

SEQ ID NO: 4774 - RNA, 19 nt, artificial
  Chemically synthesized
cccuucgcauccauucuca

SEQ ID NO: 4775 - RNA, 19 nt, artificial
  Chemically synthesized
guuucaagaugcguggaaa

SEQ ID NO: 4776 - RNA, 19 nt, artificial
  Chemically synthesized
gcaggaguuucaagaugcg

SEQ ID NO: 4777 - RNA, 19 nt, artificial
  Chemically synthesized
aggaagacuucuuuaguau

SEQ ID NO: 4778 - RNA, 19 nt, artificial
  Chemically synthesized
ccauguuucuguaucucug

SEQ ID NO: 4779 - RNA, 19 nt, artificial
  Chemically synthesized
uggcugugcauaauauaac

SEQ ID NO: 4780 - RNA, 19 nt, artificial
  Chemically synthesized
gguacacacaucaucucuu

SEQ ID NO: 4781 - RNA, 19 nt, artificial
  Chemically synthesized
aggucuuacuuugaagucu

SEQ ID NO: 4782 - RNA, 19 nt, artificial
  Chemically synthesized
ggaguugucaucacgcugu

SEQ ID NO: 4783 - RNA, 19 nt, artificial
  Chemically synthesized
ucgaaagagaauaaagaac

SEQ ID NO: 4784 - RNA, 19 nt, artificial
  Chemically synthesized
ggagacaggcaaaaugaaa

SEQ ID NO: 4785 - RNA, 19 nt, artificial
  Chemically synthesized
agucaauaauucugauccu

SEQ ID NO: 4786 - RNA, 19 nt, artificial
  Chemically synthesized
ugaaugcccgagucaauaa

SEQ ID NO: 4787 - RNA, 19 nt, artificial
  Chemically synthesized
gcuuuugcaauuguguuug

SEQ ID NO: 4788 - RNA, 19 nt, artificial
  Chemically synthesized
ugaauauaagagugcuugu

SEQ ID NO: 4789 - RNA, 19 nt, artificial
  Chemically synthesized
cucaguuauaaggagucug

SEQ ID NO: 4790 - RNA, 19 nt, artificial
  Chemically synthesized
ucacaccauugcacaucua

SEQ ID NO: 4791 - RNA, 19 nt, artificial
  Chemically synthesized
gccugcugugcgaauauag

SEQ ID NO: 4792 - RNA, 19 nt, artificial
  Chemically synthesized
aggguaggucugacaaaua

SEQ ID NO: 4793 - RNA, 19 nt, artificial
  Chemically synthesized
caguuguucuuugucauac

SEQ ID NO: 4794 - RNA, 19 nt, artificial
  Chemically synthesized
gacuaggaugaacuaaaua

SEQ ID NO: 4795 - RNA, 19 nt, artificial
  Chemically synthesized
gggauuauucaagggacua

SEQ ID NO: 4796 - RNA, 19 nt, artificial
  Chemically synthesized
acauacugauguuguuuug

SEQ ID NO: 4797 - RNA, 19 nt, artificial
  Chemically synthesized
gagagugagagaaaauaaa

SEQ ID NO: 4798 - RNA, 19 nt, artificial
  Chemically synthesized
ugaggaagaaggagaaaga

SEQ ID NO: 4799 - RNA, 19 nt, artificial
  Chemically synthesized
gaauauauguucaagagag

SEQ ID NO: 4800 - RNA, 19 nt, artificial
  Chemically synthesized
caucaucaucauccuaaaa

SEQ ID NO: 4801 - RNA, 19 nt, artificial
  Chemically synthesized
acuuaggaauugugacaaa

SEQ ID NO: 4802 - RNA, 19 nt, artificial
  Chemically synthesized
cuagcccuuaugaauauug

SEQ ID NO: 4803 - RNA, 19 nt, artificial
  Chemically synthesized
ugaaaaaagaggguuggag

SEQ ID NO: 4804 - RNA, 19 nt, artificial
  Chemically synthesized
ggguucugcacauucuuau

SEQ ID NO: 4805 - RNA, 19 nt, artificial
  Chemically synthesized
uuggauugauuggaguuaa

SEQ ID NO: 4806 - RNA, 19 nt, artificial
  Chemically synthesized
gugucauuuuugccaucau

SEQ ID NO: 4807 - RNA, 19 nt, artificial
  Chemically synthesized
agaauccucaaaaucaguu

SEQ ID NO: 4808 - RNA, 19 nt, artificial
  Chemically synthesized
agguuugauacucuuucca

SEQ ID NO: 4809 - RNA, 19 nt, artificial
  Chemically synthesized
uccagguuugauacucuuu

SEQ ID NO: 4810 - RNA, 19 nt, artificial
  Chemically synthesized
guaacuucccuaagauuau

SEQ ID NO: 4811 - RNA, 19 nt, artificial
  Chemically synthesized
caaaagggaaaggaucaaa

SEQ ID NO: 4812 - RNA, 19 nt, artificial
  Chemically synthesized
aaagauucuuggacucaau

SEQ ID NO: 4813 - RNA, 19 nt, artificial
  Chemically synthesized
ggaaguuagggaaaagauu

SEQ ID NO: 4814 - RNA, 19 nt, artificial
  Chemically synthesized
gagcacuuuuacaaacauu

SEQ ID NO: 4815 - RNA, 19 nt, artificial
  Chemically synthesized
ggaaugucaaagauuguuu

SEQ ID NO: 4816 - RNA, 19 nt, artificial
  Chemically synthesized
gagugcauuucauuuucaa

SEQ ID NO: 4817 - RNA, 19 nt, artificial
  Chemically synthesized
gggagugcauuucauuuuc

SEQ ID NO: 4818 - RNA, 19 nt, artificial
  Chemically synthesized
gacuucuuuaguauccaua

SEQ ID NO: 4819 - RNA, 19 nt, artificial
  Chemically synthesized
gcacccuuuuacacugaca

SEQ ID NO: 4820 - RNA, 19 nt, artificial
  Chemically synthesized
ccuaaguucuuuuacacaa

SEQ ID NO: 4821 - RNA, 19 nt, artificial
  Chemically synthesized
aagugggacaauacauuuu

SEQ ID NO: 4822 - RNA, 19 nt, artificial
  Chemically synthesized
caaaauggaagugggacaa

SEQ ID NO: 4823 - RNA, 19 nt, artificial
  Chemically synthesized
cucacccuuucaaaaccau

SEQ ID NO: 4824 - RNA, 19 nt, artificial
  Chemically synthesized
cgguuuuggcgaucucaac

SEQ ID NO: 4825 - RNA, 19 nt, artificial
  Chemically synthesized
ugagagguuggugcgguuu

SEQ ID NO: 4826 - RNA, 19 nt, artificial
  Chemically synthesized
agagaguuuggcugugcau

SEQ ID NO: 4827 - RNA, 19 nt, artificial
  Chemically synthesized
cagagaguuuggcugugca

SEQ ID NO: 4828 - RNA, 19 nt, artificial
  Chemically synthesized
acacacaucaucucuuugu

SEQ ID NO: 4829 - RNA, 19 nt, artificial
  Chemically synthesized
acuuugaagucuuuuggua

SEQ ID NO: 4830 - RNA, 19 nt, artificial
  Chemically synthesized
ucacuggaguugucaucac

SEQ ID NO: 4831 - RNA, 19 nt, artificial
  Chemically synthesized
uccucuuugucugguauua

SEQ ID NO: 4832 - RNA, 19 nt, artificial
  Chemically synthesized
gacaggcaaaaugaaaguu

SEQ ID NO: 4833 - RNA, 19 nt, artificial
  Chemically synthesized
ugcaauuguguuugugaaa

SEQ ID NO: 4834 - RNA, 19 nt, artificial
  Chemically synthesized
uugcaauuguguuugugaa

SEQ ID NO: 4835 - RNA, 19 nt, artificial
  Chemically synthesized
cuuuugcaauuguguuugu

SEQ ID NO: 4836 - RNA, 19 nt, artificial
  Chemically synthesized
cuuaagacuaugaagguuu

SEQ ID NO: 4837 - RNA, 19 nt, artificial
  Chemically synthesized
agcauuuauuaacagguac

SEQ ID NO: 4838 - RNA, 19 nt, artificial
  Chemically synthesized
agcacuuaguauuuagcau

SEQ ID NO: 4839 - RNA, 19 nt, artificial
  Chemically synthesized
ccaagguuuucuaucuuca

SEQ ID NO: 4840 - RNA, 19 nt, artificial
  Chemically synthesized
cuccaagguuuucuaucuu

SEQ ID NO: 4841 - RNA, 19 nt, artificial
  Chemically synthesized
agaauauuggcccuuucua

SEQ ID NO: 4842 - RNA, 19 nt, artificial
  Chemically synthesized
accauugcacaucuauuua

SEQ ID NO: 4843 - RNA, 19 nt, artificial
  Chemically synthesized
aguuguucuuugucauacu

SEQ ID NO: 4844 - RNA, 19 nt, artificial
  Chemically synthesized
gaauauaauugaaggaggu

SEQ ID NO: 4845 - RNA, 19 nt, artificial
  Chemically synthesized
gaaugggagagugagagaa

SEQ ID NO: 4846 - RNA, 19 nt, artificial
  Chemically synthesized
cuuggagccacaaauguuu

SEQ ID NO: 4847 - RNA, 19 nt, artificial
  Chemically synthesized
gucucuaaaucacuguuag

SEQ ID NO: 4848 - RNA, 19 nt, artificial
  Chemically synthesized
gagagucucuaaaucacug

SEQ ID NO: 4849 - RNA, 19 nt, artificial
  Chemically synthesized
caacccagaaacaaaaauc

SEQ ID NO: 4850 - RNA, 19 nt, artificial
  Chemically synthesized
uguaucugauauggucauu

SEQ ID NO: 4851 - RNA, 19 nt, artificial
  Chemically synthesized
cucaucuaguccugcuccu

SEQ ID NO: 4852 - RNA, 19 nt, artificial
  Chemically synthesized
ugcacauucuuauuugaag

SEQ ID NO: 4853 - RNA, 19 nt, artificial
  Chemically synthesized
cugcacauucuuauuugaa

SEQ ID NO: 4854 - RNA, 19 nt, artificial
  Chemically synthesized
ccugaaggguucugcacau

SEQ ID NO: 4855 - RNA, 19 nt, artificial
  Chemically synthesized
uacuaauacagcaggguaa

SEQ ID NO: 4856 - RNA, 19 nt, artificial
  Chemically synthesized
caaggaguagcuauauauu

SEQ ID NO: 4857 - RNA, 19 nt, artificial
  Chemically synthesized
ucagaauccucaaaaucag

SEQ ID NO: 4858 - RNA, 19 nt, artificial
  Chemically synthesized
cccuaagauuaugaaacug

SEQ ID NO: 4859 - RNA, 19 nt, artificial
  Chemically synthesized
caguaacuucccuaagauu

SEQ ID NO: 4860 - RNA, 19 nt, artificial
  Chemically synthesized
aucaaaagguucaguaacu

SEQ ID NO: 4861 - RNA, 19 nt, artificial
  Chemically synthesized
ucaaaagggaaaggaucaa

SEQ ID NO: 4862 - RNA, 19 nt, artificial
  Chemically synthesized
aaaagauucuuggacucaa

SEQ ID NO: 4863 - RNA, 19 nt, artificial
  Chemically synthesized
cugcuuaaaaauggacaaa

SEQ ID NO: 4864 - RNA, 19 nt, artificial
  Chemically synthesized
ccugcuuaaaaauggacaa

SEQ ID NO: 4865 - RNA, 19 nt, artificial
  Chemically synthesized
gaggaaauaaauguggguu

SEQ ID NO: 4866 - RNA, 19 nt, artificial
  Chemically synthesized
caacaaggaaaacuucuaa

SEQ ID NO: 4867 - RNA, 19 nt, artificial
  Chemically synthesized
gugcauuucauuuucaaca

SEQ ID NO: 4868 - RNA, 19 nt, artificial
  Chemically synthesized
acaggccugaaacaaaaga

SEQ ID NO: 4869 - RNA, 19 nt, artificial
  Chemically synthesized
uccucagcuacaacaucua

SEQ ID NO: 4870 - RNA, 19 nt, artificial
  Chemically synthesized
agaugcaggaaaggaacaa

SEQ ID NO: 4871 - RNA, 19 nt, artificial
  Chemically synthesized
ccagaugcaggaaaggaac

SEQ ID NO: 4872 - RNA, 19 nt, artificial
  Chemically synthesized
ucgcauccauucucaaguc

SEQ ID NO: 4873 - RNA, 19 nt, artificial
  Chemically synthesized
ucagcuaugagguggugau

SEQ ID NO: 4874 - RNA, 19 nt, artificial
  Chemically synthesized
cuccauuuuugucauucug

SEQ ID NO: 4875 - RNA, 19 nt, artificial
  Chemically synthesized
cacccuuuuacacugacau

SEQ ID NO: 4876 - RNA, 19 nt, artificial
  Chemically synthesized
uuccaccuaaguucuuuua

SEQ ID NO: 4877 - RNA, 19 nt, artificial
  Chemically synthesized
gucccauguuucuguaucu

SEQ ID NO: 4878 - RNA, 19 nt, artificial
  Chemically synthesized
gggucccauguuucuguau

SEQ ID NO: 4879 - RNA, 19 nt, artificial
  Chemically synthesized
guuuaugauauuccaccua

SEQ ID NO: 4880 - RNA, 19 nt, artificial
  Chemically synthesized
cggguuuaugauauuccac

SEQ ID NO: 4881 - RNA, 19 nt, artificial
  Chemically synthesized
agaguuuggcugugcauaa

SEQ ID NO: 4882 - RNA, 19 nt, artificial
  Chemically synthesized
ugaagucuuuugguacaca

SEQ ID NO: 4883 - RNA, 19 nt, artificial
  Chemically synthesized
gcaucacuggaguugucau

SEQ ID NO: 4884 - RNA, 19 nt, artificial
  Chemically synthesized
agacaggcaaaaugaaagu

SEQ ID NO: 4885 - RNA, 19 nt, artificial
  Chemically synthesized
ugaacuuggagacaggcaa

SEQ ID NO: 4886 - RNA, 19 nt, artificial
  Chemically synthesized
ugauccuuauucaguagca

SEQ ID NO: 4887 - RNA, 19 nt, artificial
  Chemically synthesized
ggaccugggagauaauucu

SEQ ID NO: 4888 - RNA, 19 nt, artificial
  Chemically synthesized
ucuuaagacuaugaagguu

SEQ ID NO: 4889 - RNA, 19 nt, artificial
  Chemically synthesized
cucuaagaaugaugaagca

SEQ ID NO: 4890 - RNA, 19 nt, artificial
  Chemically synthesized
guacucuaagaaugaugaa

SEQ ID NO: 4891 - RNA, 19 nt, artificial
  Chemically synthesized
cagguacucuaagaaugau

SEQ ID NO: 4892 - RNA, 19 nt, artificial
  Chemically synthesized
aaaaccagcuucauuuguu

SEQ ID NO: 4893 - RNA, 19 nt, artificial
  Chemically synthesized
guguuauuacuaugaguca

SEQ ID NO: 4894 - RNA, 19 nt, artificial
  Chemically synthesized
ugcuuagagacacuuaggu

SEQ ID NO: 4895 - RNA, 19 nt, artificial
  Chemically synthesized
ggaugguuucugcuuagag

SEQ ID NO: 4896 - RNA, 19 nt, artificial
  Chemically synthesized
ucauacuacuauuccuuuc

SEQ ID NO: 4897 - RNA, 19 nt, artificial
  Chemically synthesized
ugucauacuacuauuccuu

SEQ ID NO: 4898 - RNA, 19 nt, artificial
  Chemically synthesized
gaaggagguauacacauac

SEQ ID NO: 4899 - RNA, 19 nt, artificial
  Chemically synthesized
aaggaaauaaggagaaaag

SEQ ID NO: 4900 - RNA, 19 nt, artificial
  Chemically synthesized
gacugguuuaggaggaaaa

SEQ ID NO: 4901 - RNA, 19 nt, artificial
  Chemically synthesized
cgguaaugaggaagaagga

SEQ ID NO: 4902 - RNA, 19 nt, artificial
  Chemically synthesized
cucuucaacuucgguaaug

SEQ ID NO: 4903 - RNA, 19 nt, artificial
  Chemically synthesized
cauggaugauugcacuuca

SEQ ID NO: 4904 - RNA, 19 nt, artificial
  Chemically synthesized
ccuuggagccacaaauguu

SEQ ID NO: 4905 - RNA, 19 nt, artificial
  Chemically synthesized
cccuuggagccacaaaugu

SEQ ID NO: 4906 - RNA, 19 nt, artificial
  Chemically synthesized
caaauucacacucaauagu

SEQ ID NO: 4907 - RNA, 19 nt, artificial
  Chemically synthesized
auguaucugauauggucau

SEQ ID NO: 4908 - RNA, 19 nt, artificial
  Chemically synthesized
cuuaggaauugugacaaau

SEQ ID NO: 4909 - RNA, 19 nt, artificial
  Chemically synthesized
ucaucuaguccugcuccuu

SEQ ID NO: 4910 - RNA, 19 nt, artificial
  Chemically synthesized
ggguuggagguggagaauu

SEQ ID NO: 4911 - RNA, 19 nt, artificial
  Chemically synthesized
cauucuuauuugaagcaug

SEQ ID NO: 4912 - RNA, 19 nt, artificial
  Chemically synthesized
guaauacucaucauuuacc

SEQ ID NO: 4913 - RNA, 19 nt, artificial
  Chemically synthesized
aaaagaagaaggaaaccaa

SEQ ID NO: 4914 - RNA, 19 nt, artificial
  Chemically synthesized
caaaagaagaaggaaacca

SEQ ID NO: 4915 - RNA, 19 nt, artificial
  Chemically synthesized
gcugccucagaauccucaa

SEQ ID NO: 4916 - RNA, 19 nt, artificial
  Chemically synthesized
cagguuugauacucuuucc

SEQ ID NO: 4917 - RNA, 19 nt, artificial
  Chemically synthesized
ucuuacuccagguuugaua

SEQ ID NO: 4918 - RNA, 19 nt, artificial
  Chemically synthesized
ccuaagauuaugaaacugu

SEQ ID NO: 4919 - RNA, 19 nt, artificial
  Chemically synthesized
ucccuaagauuaugaaacu

SEQ ID NO: 4920 - RNA, 19 nt, artificial
  Chemically synthesized
aaaagggaaaggaucaaaa

SEQ ID NO: 4921 - RNA, 19 nt, artificial
  Chemically synthesized
agggaaaagauucuuggac

SEQ ID NO: 4922 - RNA, 19 nt, artificial
  Chemically synthesized
ucaguggaaguuagggaaa

SEQ ID NO: 4923 - RNA, 19 nt, artificial
  Chemically synthesized
cuaugguuuugagagcacu

SEQ ID NO: 4924 - RNA, 19 nt, artificial
  Chemically synthesized
uggagcucuaugguuuuga

SEQ ID NO: 4925 - RNA, 19 nt, artificial
  Chemically synthesized
guggagcucuaugguuuug

SEQ ID NO: 4926 - RNA, 19 nt, artificial
  Chemically synthesized
cucuugccagucugucgaa

SEQ ID NO: 4927 - RNA, 19 nt, artificial
  Chemically synthesized
aggaaauaaauguggguug

SEQ ID NO: 4928 - RNA, 19 nt, artificial
  Chemically synthesized
ugauucucuugccagucug

SEQ ID NO: 4929 - RNA, 19 nt, artificial
  Chemically synthesized
aaaggaacaaugccggcuu

SEQ ID NO: 4930 - RNA, 19 nt, artificial
  Chemically synthesized
gucagucugguacaaauau

SEQ ID NO: 4931 - RNA, 19 nt, artificial
  Chemically synthesized
caagucagucugguacaaa

SEQ ID NO: 4932 - RNA, 19 nt, artificial
  Chemically synthesized
ggaagacuucuuuaguauc

SEQ ID NO: 4933 - RNA, 19 nt, artificial
  Chemically synthesized
ccugaggaagacuucuuua

SEQ ID NO: 4934 - RNA, 19 nt, artificial
  Chemically synthesized
ggcacccuuuuacacugac

SEQ ID NO: 4935 - RNA, 19 nt, artificial
  Chemically synthesized
caccuaaguucuuuuacac

SEQ ID NO: 4936 - RNA, 19 nt, artificial
  Chemically synthesized
agcuacagaugaagaagaa

SEQ ID NO: 4937 - RNA, 19 nt, artificial
  Chemically synthesized
cucaacagaagguggucau

SEQ ID NO: 4938 - RNA, 19 nt, artificial
  Chemically synthesized
ggcgaucucaacagaaggu

SEQ ID NO: 4939 - RNA, 19 nt, artificial
  Chemically synthesized
ugauauuccaccuaaguuc

SEQ ID NO: 4940 - RNA, 19 nt, artificial
  Chemically synthesized
cccauguuucuguaucucu

SEQ ID NO: 4941 - RNA, 19 nt, artificial
  Chemically synthesized
ggucccauguuucuguauc

SEQ ID NO: 4942 - RNA, 19 nt, artificial
  Chemically synthesized
guuuggcugugcauaauau

SEQ ID NO: 4943 - RNA, 19 nt, artificial
  Chemically synthesized
ucuuugugaucuucuucau

SEQ ID NO: 4944 - RNA, 19 nt, artificial
  Chemically synthesized
aucucuuugugaucuucuu

SEQ ID NO: 4945 - RNA, 19 nt, artificial
  Chemically synthesized
ucaucucuuugugaucuuc

SEQ ID NO: 4946 - RNA, 19 nt, artificial
  Chemically synthesized
gaagucuuuugguacacac

SEQ ID NO: 4947 - RNA, 19 nt, artificial
  Chemically synthesized
aggcaaaaugaaaguuauc

SEQ ID NO: 4948 - RNA, 19 nt, artificial
  Chemically synthesized
gggcucuccauuuuuguca

SEQ ID NO: 4949 - RNA, 19 nt, artificial
  Chemically synthesized
gguacucuaagaaugauga

SEQ ID NO: 4950 - RNA, 19 nt, artificial
  Chemically synthesized
caagguuuucuaucuucaa

SEQ ID NO: 4951 - RNA, 19 nt, artificial
  Chemically synthesized
cuauuuaauguggaauggu

SEQ ID NO: 4952 - RNA, 19 nt, artificial
  Chemically synthesized
aggcucuguuuauuguuuc

SEQ ID NO: 4953 - RNA, 19 nt, artificial
  Chemically synthesized
acaccauugcacaucuauu

SEQ ID NO: 4954 - RNA, 19 nt, artificial
  Chemically synthesized
aggaugguuucugcuuaga

SEQ ID NO: 4955 - RNA, 19 nt, artificial
  Chemically synthesized
ugaggguaggucugacaaa

SEQ ID NO: 4956 - RNA, 19 nt, artificial
  Chemically synthesized
gucauacuacuauuccuuu

SEQ ID NO: 4957 - RNA, 19 nt, artificial
  Chemically synthesized
acucaguuguucuuuguca

SEQ ID NO: 4958 - RNA, 19 nt, artificial
  Chemically synthesized
cuggucacaaauuuugaug

SEQ ID NO: 4959 - RNA, 19 nt, artificial
  Chemically synthesized
ucuggucacaaauuuugau

SEQ ID NO: 4960 - RNA, 19 nt, artificial
  Chemically synthesized
agacugguuuaggaggaaa

SEQ ID NO: 4961 - RNA, 19 nt, artificial
  Chemically synthesized
uaaugaggaagaaggagaa

SEQ ID NO: 4962 - RNA, 19 nt, artificial
  Chemically synthesized
guaaugaggaagaaggaga

SEQ ID NO: 4963 - RNA, 19 nt, artificial
  Chemically synthesized
cuucgguaaugaggaagaa

SEQ ID NO: 4964 - RNA, 19 nt, artificial
  Chemically synthesized
aacucuucaacuucgguaa

SEQ ID NO: 4965 - RNA, 19 nt, artificial
  Chemically synthesized
acagagaucaaauucacac

SEQ ID NO: 4966 - RNA, 19 nt, artificial
  Chemically synthesized
cugaaggguucugcacauu

SEQ ID NO: 4967 - RNA, 19 nt, artificial
  Chemically synthesized
agggucaagaacaggcuaa

SEQ ID NO: 4968 - RNA, 19 nt, artificial
  Chemically synthesized
ucauuuaccacugugcuug

SEQ ID NO: 4969 - RNA, 19 nt, artificial
  Chemically synthesized
cucaucauuuaccacugug

SEQ ID NO: 4970 - RNA, 19 nt, artificial
  Chemically synthesized
cagaagaauauuggauuga

SEQ ID NO: 4971 - RNA, 19 nt, artificial
  Chemically synthesized
ccucagaauccucaaaauc

SEQ ID NO: 4972 - RNA, 19 nt, artificial
  Chemically synthesized
cuaagauuaugaaacugug

SEQ ID NO: 4973 - RNA, 19 nt, artificial
  Chemically synthesized
agauucuuggacucaauuu

SEQ ID NO: 4974 - RNA, 19 nt, artificial
  Chemically synthesized
gucaguggaaguuagggaa

SEQ ID NO: 4975 - RNA, 19 nt, artificial
  Chemically synthesized
cccugcuuaaaaauggaca

SEQ ID NO: 4976 - RNA, 19 nt, artificial
  Chemically synthesized
ugaggaaauaaaugugggu

SEQ ID NO: 4977 - RNA, 19 nt, artificial
  Chemically synthesized
ucuaacuugucucuuccau

SEQ ID NO: 4978 - RNA, 19 nt, artificial
  Chemically synthesized
caaggaaaacuucuaacuu

SEQ ID NO: 4979 - RNA, 19 nt, artificial
  Chemically synthesized
acaaggaaaacuucuaacu

SEQ ID NO: 4980 - RNA, 19 nt, artificial
  Chemically synthesized
ucaacaaggaaaacuucua

SEQ ID NO: 4981 - RNA, 19 nt, artificial
  Chemically synthesized
ugaggagaaagaugugauc

SEQ ID NO: 4982 - RNA, 19 nt, artificial
  Chemically synthesized
ucagcuacaacaucuaccu

SEQ ID NO: 4983 - RNA, 19 nt, artificial
  Chemically synthesized
gccuuugagugguuugcag

SEQ ID NO: 4984 - RNA, 19 nt, artificial
  Chemically synthesized
acaugccuuugagugguuu

SEQ ID NO: 4985 - RNA, 19 nt, artificial
  Chemically synthesized
aagucagucugguacaaau

SEQ ID NO: 4986 - RNA, 19 nt, artificial
  Chemically synthesized
uccauucucaagucagucu

SEQ ID NO: 4987 - RNA, 19 nt, artificial
  Chemically synthesized
acccuucgcauccauucuc

SEQ ID NO: 4988 - RNA, 19 nt, artificial
  Chemically synthesized
cugccagugaagauguguu

SEQ ID NO: 4989 - RNA, 19 nt, artificial
  Chemically synthesized
uggaagugggacaauacau

SEQ ID NO: 4990 - RNA, 19 nt, artificial
  Chemically synthesized
ucaaaauggaagugggaca

SEQ ID NO: 4991 - RNA, 19 nt, artificial
  Chemically synthesized
ggguucaaaauggaagugg

SEQ ID NO: 4992 - RNA, 19 nt, artificial
  Chemically synthesized
gucacucacccuuucaaaa

SEQ ID NO: 4993 - RNA, 19 nt, artificial
  Chemically synthesized
ucccauguuucuguaucuc

SEQ ID NO: 4994 - RNA, 19 nt, artificial
  Chemically synthesized
ugggucccauguuucugua

SEQ ID NO: 4995 - RNA, 19 nt, artificial
  Chemically synthesized
ccuaugacuuggaaaugga

SEQ ID NO: 4996 - RNA, 19 nt, artificial
  Chemically synthesized
cucuuugugaucuucuuca

SEQ ID NO: 4997 - RNA, 19 nt, artificial
  Chemically synthesized
gucuuuugguacacacauc

SEQ ID NO: 4998 - RNA, 19 nt, artificial
  Chemically synthesized
cuggaguugucaucacgcu

SEQ ID NO: 4999 - RNA, 19 nt, artificial
  Chemically synthesized
agcacucucugaacuugga

SEQ ID NO: 5000 - RNA, 19 nt, artificial
  Chemically synthesized
uuaacagguacucuaagaa

SEQ ID NO: 5001 - RNA, 19 nt, artificial
  Chemically synthesized
guguuauccaguuaugaga

SEQ ID NO: 5002 - RNA, 19 nt, artificial
  Chemically synthesized
gagaauauuggcccuuucu

SEQ ID NO: 5003 - RNA, 19 nt, artificial
  Chemically synthesized
caaaguaugaacuggagag

SEQ ID NO: 5004 - RNA, 19 nt, artificial
  Chemically synthesized
agggacuaggaugaacuaa

SEQ ID NO: 5005 - RNA, 19 nt, artificial
  Chemically synthesized
caagggacuaggaugaacu

SEQ ID NO: 5006 - RNA, 19 nt, artificial
  Chemically synthesized
cuuuuaaaaucuggucaca

SEQ ID NO: 5007 - RNA, 19 nt, artificial
  Chemically synthesized
ucuuuuaaaaucuggucac

SEQ ID NO: 5008 - RNA, 19 nt, artificial
  Chemically synthesized
agaauauaauugaaggagg

SEQ ID NO: 5009 - RNA, 19 nt, artificial
  Chemically synthesized
ugggagagugagagaaaau

SEQ ID NO: 5010 - RNA, 19 nt, artificial
  Chemically synthesized
acucuucaacuucgguaau

SEQ ID NO: 5011 - RNA, 19 nt, artificial
  Chemically synthesized
ggaacuaaaaccaguuuua

SEQ ID NO: 5012 - RNA, 19 nt, artificial
  Chemically synthesized
cagagaucaaauucacacu

SEQ ID NO: 5013 - RNA, 19 nt, artificial
  Chemically synthesized
ucugauauggucauuuguu

SEQ ID NO: 5014 - RNA, 19 nt, artificial
  Chemically synthesized
aacuuaggaauugugacaa

SEQ ID NO: 5015 - RNA, 19 nt, artificial
  Chemically synthesized
gggucaagaacaggcuaag

SEQ ID NO: 5016 - RNA, 19 nt, artificial
  Chemically synthesized
acucaucauuuaccacugu

SEQ ID NO: 5017 - RNA, 19 nt, artificial
  Chemically synthesized
gaauauuggauugauugga

SEQ ID NO: 5018 - RNA, 19 nt, artificial
  Chemically synthesized
ugggccagauguucuuucu

SEQ ID NO: 5019 - RNA, 19 nt, artificial
  Chemically synthesized
aacaagaguucgaagacaa

SEQ ID NO: 5020 - RNA, 19 nt, artificial
  Chemically synthesized
aguauugacaucugagcau

SEQ ID NO: 5021 - RNA, 19 nt, artificial
  Chemically synthesized
ugaaggaaauuuuccagau

SEQ ID NO: 5022 - RNA, 19 nt, artificial
  Chemically synthesized
ugucauuuuugccaucauu

SEQ ID NO: 5023 - RNA, 19 nt, artificial
  Chemically synthesized
gaaaggaucaaaagguuca

SEQ ID NO: 5024 - RNA, 19 nt, artificial
  Chemically synthesized
agggaaaggaucaaaaggu

SEQ ID NO: 5025 - RNA, 19 nt, artificial
  Chemically synthesized
gaaucaaaagggaaaggau

SEQ ID NO: 5026 - RNA, 19 nt, artificial
  Chemically synthesized
agaaucaaaagggaaagga

SEQ ID NO: 5027 - RNA, 19 nt, artificial
  Chemically synthesized
cuuggacucaauuuuagaa

SEQ ID NO: 5028 - RNA, 19 nt, artificial
  Chemically synthesized
gauucuuggacucaauuuu

SEQ ID NO: 5029 - RNA, 19 nt, artificial
  Chemically synthesized
aguuagggaaaagauucuu

SEQ ID NO: 5030 - RNA, 19 nt, artificial
  Chemically synthesized
uggaaguuagggaaaagau

SEQ ID NO: 5031 - RNA, 19 nt, artificial
  Chemically synthesized
guggaaguuagggaaaaga

SEQ ID NO: 5032 - RNA, 19 nt, artificial
  Chemically synthesized
cucaguaaugucaguggaa

SEQ ID NO: 5033 - RNA, 19 nt, artificial
  Chemically synthesized
gagagcacuuuuacaaaca

SEQ ID NO: 5034 - RNA, 19 nt, artificial
  Chemically synthesized
ugagagcacuuuuacaaac

SEQ ID NO: 5035 - RNA, 19 nt, artificial
  Chemically synthesized
ugguuuugagagcacuuuu

SEQ ID NO: 5036 - RNA, 19 nt, artificial
  Chemically synthesized
augguuuugagagcacuuu

SEQ ID NO: 5037 - RNA, 19 nt, artificial
  Chemically synthesized
ggaaaacuucuaacuuguc

SEQ ID NO: 5038 - RNA, 19 nt, artificial
  Chemically synthesized
aggagaaagaugugaucac

SEQ ID NO: 5039 - RNA, 19 nt, artificial
  Chemically synthesized
ccaaucugaagcucaaaaa

SEQ ID NO: 5040 - RNA, 19 nt, artificial
  Chemically synthesized
cagucugguacaaauauug

SEQ ID NO: 5041 - RNA, 19 nt, artificial
  Chemically synthesized
gcauccauucucaagucag

SEQ ID NO: 5042 - RNA, 19 nt, artificial
  Chemically synthesized
ugaagauguguucagcuau

SEQ ID NO: 5043 - RNA, 19 nt, artificial
  Chemically synthesized
cugaggaagacuucuuuag

SEQ ID NO: 5044 - RNA, 19 nt, artificial
  Chemically synthesized
ucuccauuuuugucauucu

SEQ ID NO: 5045 - RNA, 19 nt, artificial
  Chemically synthesized
cucuccauuuuugucauuc

SEQ ID NO: 5046 - RNA, 19 nt, artificial
  Chemically synthesized
gcgaucucaacagaaggug

SEQ ID NO: 5047 - RNA, 19 nt, artificial
  Chemically synthesized
uuaugauauuccaccuaag

SEQ ID NO: 5048 - RNA, 19 nt, artificial
  Chemically synthesized
ugaucuucuucauuggccu

SEQ ID NO: 5049 - RNA, 19 nt, artificial
  Chemically synthesized
gaguugucaucacgcugug

SEQ ID NO: 5050 - RNA, 19 nt, artificial
  Chemically synthesized
aggcaucacuggaguuguc

SEQ ID NO: 5051 - RNA, 19 nt, artificial
  Chemically synthesized
uccuuauucaguagcacuc

SEQ ID NO: 5052 - RNA, 19 nt, artificial
  Chemically synthesized
uaagaaugaugaagcauug

SEQ ID NO: 5053 - RNA, 19 nt, artificial
  Chemically synthesized
agguacucuaagaaugaug

SEQ ID NO: 5054 - RNA, 19 nt, artificial
  Chemically synthesized
uccaagguuuucuaucuuc

SEQ ID NO: 5055 - RNA, 19 nt, artificial
  Chemically synthesized
cacaccauugcacaucuau

SEQ ID NO: 5056 - RNA, 19 nt, artificial
  Chemically synthesized
ccuuucgucucccagaauc

SEQ ID NO: 5057 - RNA, 19 nt, artificial
  Chemically synthesized
ucaagggacuaggaugaac

SEQ ID NO: 5058 - RNA, 19 nt, artificial
  Chemically synthesized
augggagagugagagaaaa

SEQ ID NO: 5059 - RNA, 19 nt, artificial
  Chemically synthesized
aggaaaaggaaauaaggag

SEQ ID NO: 5060 - RNA, 19 nt, artificial
  Chemically synthesized
aggaggaaaaggaaauaag

SEQ ID NO: 5061 - RNA, 19 nt, artificial
  Chemically synthesized
cuguuaguguggccaagag

SEQ ID NO: 5062 - RNA, 19 nt, artificial
  Chemically synthesized
uccagcuagcccuuaugaa

SEQ ID NO: 5063 - RNA, 19 nt, artificial
  Chemically synthesized
ucugcacauucuuauuuga

SEQ ID NO: 5064 - RNA, 19 nt, artificial
  Chemically synthesized
gaacaggcuaaggauacua

SEQ ID NO: 5065 - RNA, 19 nt, artificial
  Chemically synthesized
aggaaauuuuccagaucau

SEQ ID NO: 5066 - RNA, 19 nt, artificial
  Chemically synthesized
gaaggaaauuuuccagauc

SEQ ID NO: 5067 - RNA, 19 nt, artificial
  Chemically synthesized
agaagaaggaaaccaagga

SEQ ID NO: 5068 - RNA, 19 nt, artificial
  Chemically synthesized
acuucccuaagauuaugaa

SEQ ID NO: 5069 - RNA, 19 nt, artificial
  Chemically synthesized
ggaaaggaucaaaagguuc

SEQ ID NO: 5070 - RNA, 19 nt, artificial
  Chemically synthesized
guaaugucaguggaaguua

SEQ ID NO: 5071 - RNA, 19 nt, artificial
  Chemically synthesized
ucaguaaugucaguggaag

SEQ ID NO: 5072 - RNA, 19 nt, artificial
  Chemically synthesized
caaagauuguuugauagug

SEQ ID NO: 5073 - RNA, 19 nt, artificial
  Chemically synthesized
aggaaugucaaagauuguu

SEQ ID NO: 5074 - RNA, 19 nt, artificial
  Chemically synthesized
gaaauaaauguggguugug

SEQ ID NO: 5075 - RNA, 19 nt, artificial
  Chemically synthesized
gaaaacuucuaacuugucu

SEQ ID NO: 5076 - RNA, 19 nt, artificial
  Chemically synthesized
cugaaacaaaagacuuugu

SEQ ID NO: 5077 - RNA, 19 nt, artificial
  Chemically synthesized
ccugaaacaaaagacuuug

SEQ ID NO: 5078 - RNA, 19 nt, artificial
  Chemically synthesized
gcuacaacaucuaccucac

SEQ ID NO: 5079 - RNA, 19 nt, artificial
  Chemically synthesized
gaugcaggaaaggaacaau

SEQ ID NO: 5080 - RNA, 19 nt, artificial
  Chemically synthesized
ccuucgcauccauucucaa

SEQ ID NO: 5081 - RNA, 19 nt, artificial
  Chemically synthesized
ugauaagcaggaguuucaa

SEQ ID NO: 5082 - RNA, 19 nt, artificial
  Chemically synthesized
guauccauauccgcaucgu

SEQ ID NO: 5083 - RNA, 19 nt, artificial
  Chemically synthesized
ugaggaagacuucuuuagu

SEQ ID NO: 5084 - RNA, 19 nt, artificial
  Chemically synthesized
cccugaggaagacuucuuu

SEQ ID NO: 5085 - RNA, 19 nt, artificial
  Chemically synthesized
uggcacccuuuuacacuga

SEQ ID NO: 5086 - RNA, 19 nt, artificial
  Chemically synthesized
ugacuuggaaauggauagu

SEQ ID NO: 5087 - RNA, 19 nt, artificial
  Chemically synthesized
cuaugacuuggaaauggau

SEQ ID NO: 5088 - RNA, 19 nt, artificial
  Chemically synthesized
uggagacaggcaaaaugaa

SEQ ID NO: 5089 - RNA, 19 nt, artificial
  Chemically synthesized
cuuccucuuugucugguau

SEQ ID NO: 5090 - RNA, 19 nt, artificial
  Chemically synthesized
ucuuccucuuugucuggua

SEQ ID NO: 5091 - RNA, 19 nt, artificial
  Chemically synthesized
guagcacucucugaacuug

SEQ ID NO: 5092 - RNA, 19 nt, artificial
  Chemically synthesized
acgucuuccucuuugucug

SEQ ID NO: 5093 - RNA, 19 nt, artificial
  Chemically synthesized
gaccugggagauaauucua

SEQ ID NO: 5094 - RNA, 19 nt, artificial
  Chemically synthesized
gaaauuugaauacuugcag

SEQ ID NO: 5095 - RNA, 19 nt, artificial
  Chemically synthesized
ggaauggugugugaaugcc

SEQ ID NO: 5096 - RNA, 19 nt, artificial
  Chemically synthesized
guggaauggugugugaaug

SEQ ID NO: 5097 - RNA, 19 nt, artificial
  Chemically synthesized
guuucuccaagguuuucua

SEQ ID NO: 5098 - RNA, 19 nt, artificial
  Chemically synthesized
gugcgaauauagccuuucu

SEQ ID NO: 5099 - RNA, 19 nt, artificial
  Chemically synthesized
uaggaggaaaaggaaauaa

SEQ ID NO: 5100 - RNA, 19 nt, artificial
  Chemically synthesized
uuaggaggaaaaggaaaua

SEQ ID NO: 5101 - RNA, 19 nt, artificial
  Chemically synthesized
gguuuaggaggaaaaggaa

SEQ ID NO: 5102 - RNA, 19 nt, artificial
  Chemically synthesized
ugguuuaggaggaaaagga

SEQ ID NO: 5103 - RNA, 19 nt, artificial
  Chemically synthesized
ccuuauuuuccguaaauac

SEQ ID NO: 5104 - RNA, 19 nt, artificial
  Chemically synthesized
gguucugcacauucuuauu

SEQ ID NO: 5105 - RNA, 19 nt, artificial
  Chemically synthesized
gguaacugggccagauguu

SEQ ID NO: 5106 - RNA, 19 nt, artificial
  Chemically synthesized
gcauacuccaguuuacuaa

SEQ ID NO: 5107 - RNA, 19 nt, artificial
  Chemically synthesized
gucauuuuugccaucauua

SEQ ID NO: 5108 - RNA, 19 nt, artificial
  Chemically synthesized
gaagaaggaaaccaaggag

SEQ ID NO: 5109 - RNA, 19 nt, artificial
  Chemically synthesized
aggaaaacuucuaacuugu

SEQ ID NO: 5110 - RNA, 19 nt, artificial
  Chemically synthesized
acaaaagacuuuguaugga

SEQ ID NO: 5111 - RNA, 19 nt, artificial
  Chemically synthesized
agcuacaacaucuaccuca

SEQ ID NO: 5112 - RNA, 19 nt, artificial
  Chemically synthesized
ggugauguuagugggagca

SEQ ID NO: 5113 - RNA, 19 nt, artificial
  Chemically synthesized
cuaugagguggugauguua

SEQ ID NO: 5114 - RNA, 19 nt, artificial
  Chemically synthesized
ugccagugaagauguguuc

SEQ ID NO: 5115 - RNA, 19 nt, artificial
  Chemically synthesized
uuaguauccauauccgcau

SEQ ID NO: 5116 - RNA, 19 nt, artificial
  Chemically synthesized
cuucuuuaguauccauauc

SEQ ID NO: 5117 - RNA, 19 nt, artificial
  Chemically synthesized
cccuuuuacacugacaucc

SEQ ID NO: 5118 - RNA, 19 nt, artificial
  Chemically synthesized
guggcacccuuuuacacug

SEQ ID NO: 5119 - RNA, 19 nt, artificial
  Chemically synthesized
gacuuggaaauggauagug

SEQ ID NO: 5120 - RNA, 19 nt, artificial
  Chemically synthesized
guauuaccggguuuaugau

SEQ ID NO: 5121 - RNA, 19 nt, artificial
  Chemically synthesized
ggcaucacuggaguuguca

SEQ ID NO: 5122 - RNA, 19 nt, artificial
  Chemically synthesized
ccucuuugucugguauuac

SEQ ID NO: 5123 - RNA, 19 nt, artificial
  Chemically synthesized
gucuuccucuuugucuggu

SEQ ID NO: 5124 - RNA, 19 nt, artificial
  Chemically synthesized
accugggagauaauucuac

SEQ ID NO: 5125 - RNA, 19 nt, artificial
  Chemically synthesized
gggaccugggagauaauuc

SEQ ID NO: 5126 - RNA, 19 nt, artificial
  Chemically synthesized
uugaauacuugcaggcuuu

SEQ ID NO: 5127 - RNA, 19 nt, artificial
  Chemically synthesized
acagguacucuaagaauga

SEQ ID NO: 5128 - RNA, 19 nt, artificial
  Chemically synthesized
uccuuuuuaucucucaagc

SEQ ID NO: 5129 - RNA, 19 nt, artificial
  Chemically synthesized
uuccuuuuuaucucucaag

SEQ ID NO: 5130 - RNA, 19 nt, artificial
  Chemically synthesized
guuuccuuuuuaucucuca

SEQ ID NO: 5131 - RNA, 19 nt, artificial
  Chemically synthesized
cugugcgaauauagccuuu

SEQ ID NO: 5132 - RNA, 19 nt, artificial
  Chemically synthesized
ggaggaaaaggaaauaagg

SEQ ID NO: 5133 - RNA, 19 nt, artificial
  Chemically synthesized
gggaacuaaaaccaguuuu

SEQ ID NO: 5134 - RNA, 19 nt, artificial
  Chemically synthesized
aggguuggagguggagaau

SEQ ID NO: 5135 - RNA, 19 nt, artificial
  Chemically synthesized
aggguucugcacauucuua

SEQ ID NO: 5136 - RNA, 19 nt, artificial
  Chemically synthesized
ggauugccugaaggguucu

SEQ ID NO: 5137 - RNA, 19 nt, artificial
  Chemically synthesized
ucaagaacaggcuaaggau

SEQ ID NO: 5138 - RNA, 19 nt, artificial
  Chemically synthesized
gucaagaacaggcuaagga

SEQ ID NO: 5139 - RNA, 19 nt, artificial
  Chemically synthesized
cuagggucaagaacaggcu

SEQ ID NO: 5140 - RNA, 19 nt, artificial
  Chemically synthesized
cugggccagauguucuuuc

SEQ ID NO: 5141 - RNA, 19 nt, artificial
  Chemically synthesized
cuccaguuuacuaauacag

SEQ ID NO: 5142 - RNA, 19 nt, artificial
  Chemically synthesized
ggacauaauacauguugag

SEQ ID NO: 5143 - RNA, 19 nt, artificial
  Chemically synthesized
ggaaauuuuccagaucauu

SEQ ID NO: 5144 - RNA, 19 nt, artificial
  Chemically synthesized
cuacuuugugucauuuuug

SEQ ID NO: 5145 - RNA, 19 nt, artificial
  Chemically synthesized
aguaaugucaguggaaguu

SEQ ID NO: 5146 - RNA, 19 nt, artificial
  Chemically synthesized
cuuaaaggaaugucaaaga

SEQ ID NO: 5147 - RNA, 19 nt, artificial
  Chemically synthesized
ccugaagccuuggcugaaa

SEQ ID NO: 5148 - RNA, 19 nt, artificial
  Chemically synthesized
ugcaagucaacacccuaau

SEQ ID NO: 5149 - RNA, 19 nt, artificial
  Chemically synthesized
caaaagacuuuguauggac

SEQ ID NO: 5150 - RNA, 19 nt, artificial
  Chemically synthesized
cuacaacaucuaccucacu

SEQ ID NO: 5151 - RNA, 19 nt, artificial
  Chemically synthesized
gggaaaaauaaaggaaugc

SEQ ID NO: 5152 - RNA, 19 nt, artificial
  Chemically synthesized
uggagcugaacgaauugua

SEQ ID NO: 5153 - RNA, 19 nt, artificial
  Chemically synthesized
ucuccaagguuuucuaucu

SEQ ID NO: 5154 - RNA, 19 nt, artificial
  Chemically synthesized
gcugugcgaauauagccuu

SEQ ID NO: 5155 - RNA, 19 nt, artificial
  Chemically synthesized
gaagacugguuuaggagga

SEQ ID NO: 5156 - RNA, 19 nt, artificial
  Chemically synthesized
uucuccagcuagcccuuau

SEQ ID NO: 5157 - RNA, 19 nt, artificial
  Chemically synthesized
ccugcuccuugugcuauaa

SEQ ID NO: 5158 - RNA, 19 nt, artificial
  Chemically synthesized
ccaauaggauugccugaag

SEQ ID NO: 5159 - RNA, 19 nt, artificial
  Chemically synthesized
agaacaggcuaaggauacu

SEQ ID NO: 5160 - RNA, 19 nt, artificial
  Chemically synthesized
acuccaguuuacuaauaca

SEQ ID NO: 5161 - RNA, 19 nt, artificial
  Chemically synthesized
cagaucauuaggacauaau

SEQ ID NO: 5162 - RNA, 19 nt, artificial
  Chemically synthesized
aaggaaauuuuccagauca

SEQ ID NO: 5163 - RNA, 19 nt, artificial
  Chemically synthesized
gaaugucaaagauuguuug

SEQ ID NO: 5164 - RNA, 19 nt, artificial
  Chemically synthesized
acuucuaacuugucucuuc

SEQ ID NO: 5165 - RNA, 19 nt, artificial
  Chemically synthesized
aaggaaaacuucuaacuug

SEQ ID NO: 5166 - RNA, 19 nt, artificial
  Chemically synthesized
ccaaucacuuugcugugca

SEQ ID NO: 5167 - RNA, 19 nt, artificial
  Chemically synthesized
guggugauguuagugggag

SEQ ID NO: 5168 - RNA, 19 nt, artificial
  Chemically synthesized
gugggucccauguuucugu

SEQ ID NO: 5169 - RNA, 19 nt, artificial
  Chemically synthesized
ugucugguauuaccggguu

SEQ ID NO: 5170 - RNA, 19 nt, artificial
  Chemically synthesized
cccuguguuauccaguuau

SEQ ID NO: 5171 - RNA, 19 nt, artificial
  Chemically synthesized
gcccuguguuauccaguua

SEQ ID NO: 5172 - RNA, 19 nt, artificial
  Chemically synthesized
aagacugguuuaggaggaa

SEQ ID NO: 5173 - RNA, 19 nt, artificial
  Chemically synthesized
ggaagaaggagaaagagcu

SEQ ID NO: 5174 - RNA, 19 nt, artificial
  Chemically synthesized
aucaucaucaucauccuaa

SEQ ID NO: 5175 - RNA, 19 nt, artificial
  Chemically synthesized
aacaggcuaaggauacuaa

SEQ ID NO: 5176 - RNA, 19 nt, artificial
  Chemically synthesized
ccaguuuacuaauacagca

SEQ ID NO: 5177 - RNA, 19 nt, artificial
  Chemically synthesized
uccagaucauuaggacaua

SEQ ID NO: 5178 - RNA, 19 nt, artificial
  Chemically synthesized
ugugucauuuuugccauca

SEQ ID NO: 5179 - RNA, 19 nt, artificial
  Chemically synthesized
ucauuuuuuuccucucagu

SEQ ID NO: 5180 - RNA, 19 nt, artificial
  Chemically synthesized
cccugaguaaacaaagcau

SEQ ID NO: 5181 - RNA, 19 nt, artificial
  Chemically synthesized
gggacacacaugccuuuga

SEQ ID NO: 5182 - RNA, 19 nt, artificial
  Chemically synthesized
ucaagucagucugguacaa

SEQ ID NO: 5183 - RNA, 19 nt, artificial
  Chemically synthesized
cguggaaacuaccuaagau

SEQ ID NO: 5184 - RNA, 19 nt, artificial
  Chemically synthesized
caaugcuuguggcugugau

SEQ ID NO: 5185 - RNA, 19 nt, artificial
  Chemically synthesized
ccaucgagcuacagaugaa

SEQ ID NO: 5186 - RNA, 19 nt, artificial
  Chemically synthesized
ggagcugaacgaauuguac

SEQ ID NO: 5187 - RNA, 19 nt, artificial
  Chemically synthesized
uucuucugcuuuugcaauu

SEQ ID NO: 5188 - RNA, 19 nt, artificial
  Chemically synthesized
ucgcaucugugugacuaau

SEQ ID NO: 5189 - RNA, 19 nt, artificial
  Chemically synthesized
uccugcccaaaguggucuu

SEQ ID NO: 5190 - RNA, 19 nt, artificial
  Chemically synthesized
agacuaauuuccugcccaa

SEQ ID NO: 5191 - RNA, 19 nt, artificial
  Chemically synthesized
cugcuccuugugcuauaaa

SEQ ID NO: 5192 - RNA, 19 nt, artificial
  Chemically synthesized
uccugcuccuugugcuaua

SEQ ID NO: 5193 - RNA, 19 nt, artificial
  Chemically synthesized
acacccuaauaccagaaua

SEQ ID NO: 5194 - RNA, 19 nt, artificial
  Chemically synthesized
guaccucaguuauaaggag

SEQ ID NO: 5195 - RNA, 19 nt, artificial
  Chemically synthesized
ggagaggguaccucaguua

SEQ ID NO: 5196 - RNA, 19 nt, artificial
  Chemically synthesized
ugaacgucuuccucuuugu

SEQ ID NO: 5197 - RNA, 19 nt, artificial
  Chemically synthesized
gagguauacacauacugau

SEQ ID NO: 5198 - RNA, 19 nt, artificial
  Chemically synthesized
caagagagagucucuaaau

SEQ ID NO: 5199 - RNA, 19 nt, artificial
  Chemically synthesized
ucaagagagagucucuaaa

SEQ ID NO: 5200 - RNA, 19 nt, artificial
  Chemically synthesized
cugagcauacuccaguuua

SEQ ID NO: 5201 - RNA, 19 nt, artificial
  Chemically synthesized
ggcugaaacccugaguaaa

SEQ ID NO: 5202 - RNA, 19 nt, artificial
  Chemically synthesized
uuggcugaaacccugagua

SEQ ID NO: 5203 - RNA, 19 nt, artificial
  Chemically synthesized
ggcccaacugggauaauga

SEQ ID NO: 5204 - RNA, 19 nt, artificial
  Chemically synthesized
ucacacccuucgcauccau

SEQ ID NO: 5205 - RNA, 19 nt, artificial
  Chemically synthesized
guggaaacuaccuaagaua

SEQ ID NO: 5206 - RNA, 19 nt, artificial
  Chemically synthesized
ggacaauacauuuuuguca

SEQ ID NO: 5207 - RNA, 19 nt, artificial
  Chemically synthesized
aucaucucuuugugaucuu

SEQ ID NO: 5208 - RNA, 19 nt, artificial
  Chemically synthesized
cugagaauauuggcccuuu

SEQ ID NO: 5209 - RNA, 19 nt, artificial
  Chemically synthesized
cgcaucugugugacuaaug

SEQ ID NO: 5210 - RNA, 19 nt, artificial
  Chemically synthesized
cgaagacaacuggacagga

SEQ ID NO: 5211 - RNA, 19 nt, artificial
  Chemically synthesized
aggacauaauacauguuga

SEQ ID NO: 5212 - RNA, 19 nt, artificial
  Chemically synthesized
ugauacucuuuccacaaua

SEQ ID NO: 5213 - RNA, 19 nt, artificial
  Chemically synthesized
cugaagccuuggcugaaac

SEQ ID NO: 5214 - RNA, 19 nt, artificial
  Chemically synthesized
gcccaacugggauaaugaa

SEQ ID NO: 5215 - RNA, 19 nt, artificial
  Chemically synthesized
ccugccugaauuucaacug

SEQ ID NO: 5216 - RNA, 19 nt, artificial
  Chemically synthesized
cugguacaaauauugcaau

SEQ ID NO: 5217 - RNA, 19 nt, artificial
  Chemically synthesized
gcguggaaacuaccuaaga

SEQ ID NO: 5218 - RNA, 19 nt, artificial
  Chemically synthesized
agaagguggucaucaccaa

SEQ ID NO: 5219 - RNA, 19 nt, artificial
  Chemically synthesized
cgaauuguacgugggcaga

SEQ ID NO: 5220 - RNA, 19 nt, artificial
  Chemically synthesized
acgaauuguacgugggcag

SEQ ID NO: 5221 - RNA, 19 nt, artificial
  Chemically synthesized
agcugaacgaauuguacgu

SEQ ID NO: 5222 - RNA, 19 nt, artificial
  Chemically synthesized
cgagucaauaauucugauc

SEQ ID NO: 5223 - RNA, 19 nt, artificial
  Chemically synthesized
cuucugcuuuugcaauugu

SEQ ID NO: 5224 - RNA, 19 nt, artificial
  Chemically synthesized
cuaugagucaggcucuguu

SEQ ID NO: 5225 - RNA, 19 nt, artificial
  Chemically synthesized
ugcgaauauagccuuucug

SEQ ID NO: 5226 - RNA, 19 nt, artificial
  Chemically synthesized
ggagguauacacauacuga

SEQ ID NO: 5227 - RNA, 19 nt, artificial
  Chemically synthesized
ccauuucugggaacuaaaa

SEQ ID NO: 5228 - RNA, 19 nt, artificial
  Chemically synthesized
ugcccaaaguggucuucuc

SEQ ID NO: 5229 - RNA, 19 nt, artificial
  Chemically synthesized
ugcuccuugugcuauaaaa

SEQ ID NO: 5230 - RNA, 19 nt, artificial
  Chemically synthesized
ccaugacucuggcucaucu

SEQ ID NO: 5231 - RNA, 19 nt, artificial
  Chemically synthesized
accaauaggauugccugaa

SEQ ID NO: 5232 - RNA, 19 nt, artificial
  Chemically synthesized
gccagauguucuuucuaca

SEQ ID NO: 5233 - RNA, 19 nt, artificial
  Chemically synthesized
aucugagcauacuccaguu

SEQ ID NO: 5234 - RNA, 19 nt, artificial
  Chemically synthesized
gaaaucugcuguccuuccu

SEQ ID NO: 5235 - RNA, 19 nt, artificial
  Chemically synthesized
uguaaugguuuucccuuaa

SEQ ID NO: 5236 - RNA, 19 nt, artificial
  Chemically synthesized
uggcugaaacccugaguaa

SEQ ID NO: 5237 - RNA, 19 nt, artificial
  Chemically synthesized
caagucaacacccuaauac

SEQ ID NO: 5238 - RNA, 19 nt, artificial
  Chemically synthesized
cccaacugggauaaugaau

SEQ ID NO: 5239 - RNA, 19 nt, artificial
  Chemically synthesized
acggcccaacugggauaau

SEQ ID NO: 5240 - RNA, 19 nt, artificial
  Chemically synthesized
caaucacuuugcugugcac

SEQ ID NO: 5241 - RNA, 19 nt, artificial
  Chemically synthesized
cugcagccugccugaauuu

SEQ ID NO: 5242 - RNA, 19 nt, artificial
  Chemically synthesized
ugcguggaaacuaccuaag

SEQ ID NO: 5243 - RNA, 19 nt, artificial
  Chemically synthesized
ucaaaaccaucgagcuaca

SEQ ID NO: 5244 - RNA, 19 nt, artificial
  Chemically synthesized
ucaguuugcuggaaacccu

SEQ ID NO: 5245 - RNA, 19 nt, artificial
  Chemically synthesized
uugcucgaaagagaauaaa

SEQ ID NO: 5246 - RNA, 19 nt, artificial
  Chemically synthesized
ugcccuguguuauccaguu

SEQ ID NO: 5247 - RNA, 19 nt, artificial
  Chemically synthesized
ugcauaauuaaaaccagcu

SEQ ID NO: 5248 - RNA, 19 nt, artificial
  Chemically synthesized
ggcccuuucuaaccuaugu

SEQ ID NO: 5249 - RNA, 19 nt, artificial
  Chemically synthesized
caauucuuuacaccaaagu

SEQ ID NO: 5250 - RNA, 19 nt, artificial
  Chemically synthesized
ucacaaauuuugaugcuga

SEQ ID NO: 5251 - RNA, 19 nt, artificial
  Chemically synthesized
ucauauuggucauucccug

SEQ ID NO: 5252 - RNA, 19 nt, artificial
  Chemically synthesized
cccauuucugggaacuaaa

SEQ ID NO: 5253 - RNA, 19 nt, artificial
  Chemically synthesized
ucuuagaacugcucccauu

SEQ ID NO: 5254 - RNA, 19 nt, artificial
  Chemically synthesized
ccagaaacaaaaaucucua

SEQ ID NO: 5255 - RNA, 19 nt, artificial
  Chemically synthesized
gugacaaauauguaucuga

SEQ ID NO: 5256 - RNA, 19 nt, artificial
  Chemically synthesized
ucaccuuucauaaaauggu

SEQ ID NO: 5257 - RNA, 19 nt, artificial
  Chemically synthesized
aggaaucucaccuuucaua

SEQ ID NO: 5258 - RNA, 19 nt, artificial
  Chemically synthesized
ggauacuaaccaauaggau

SEQ ID NO: 5259 - RNA, 19 nt, artificial
  Chemically synthesized
ggauacucaaguaaguuuu

SEQ ID NO: 5260 - RNA, 19 nt, artificial
  Chemically synthesized
ugagcauacuccaguuuac

SEQ ID NO: 5261 - RNA, 19 nt, artificial
  Chemically synthesized
gagagugucucaacacuua

SEQ ID NO: 5262 - RNA, 19 nt, artificial
  Chemically synthesized
uuccagaucauuaggacau

SEQ ID NO: 5263 - RNA, 19 nt, artificial
  Chemically synthesized
ucaguaacuucccuaagau

SEQ ID NO: 5264 - RNA, 19 nt, artificial
  Chemically synthesized
uucauuuuuuuccucucag

SEQ ID NO: 5265 - RNA, 19 nt, artificial
  Chemically synthesized
gcaucuccaacucugaguc

SEQ ID NO: 5266 - RNA, 19 nt, artificial
  Chemically synthesized
auaccagaauaggaguuuu

SEQ ID NO: 5267 - RNA, 19 nt, artificial
  Chemically synthesized
uaauaccagaauaggaguu

SEQ ID NO: 5268 - RNA, 19 nt, artificial
  Chemically synthesized
ugcaccaugaugaggagaa

SEQ ID NO: 5269 - RNA, 19 nt, artificial
  Chemically synthesized
aggccaaucacuuugcugu

SEQ ID NO: 5270 - RNA, 19 nt, artificial
  Chemically synthesized
accuaagauagcgguugau

SEQ ID NO: 5271 - RNA, 19 nt, artificial
  Chemically synthesized
cuaccuaagauagcgguug

SEQ ID NO: 5272 - RNA, 19 nt, artificial
  Chemically synthesized
gugauaagcaggaguuuca

SEQ ID NO: 5273 - RNA, 19 nt, artificial
  Chemically synthesized
cugugauaagcaggaguuu

SEQ ID NO: 5274 - RNA, 19 nt, artificial
  Chemically synthesized
cuggaguggcacccuuuua

SEQ ID NO: 5275 - RNA, 19 nt, artificial
  Chemically synthesized
ucccucaguuugcuggaaa

SEQ ID NO: 5276 - RNA, 19 nt, artificial
  Chemically synthesized
accaaaaccauccggaggu

SEQ ID NO: 5277 - RNA, 19 nt, artificial
  Chemically synthesized
gcaaaaugaaaguuaucuc

SEQ ID NO: 5278 - RNA, 19 nt, artificial
  Chemically synthesized
ucaguuauaaggagucuga

SEQ ID NO: 5279 - RNA, 19 nt, artificial
  Chemically synthesized
ccucaguuauaaggagucu

SEQ ID NO: 5280 - RNA, 19 nt, artificial
  Chemically synthesized
cuuuacaccaaaguaugaa

SEQ ID NO: 5281 - RNA, 19 nt, artificial
  Chemically synthesized
cuaaauaagaacucaguug

SEQ ID NO: 5282 - RNA, 19 nt, artificial
  Chemically synthesized
acacauacugauguuguuu

SEQ ID NO: 5283 - RNA, 19 nt, artificial
  Chemically synthesized
guauacacauacugauguu

SEQ ID NO: 5284 - RNA, 19 nt, artificial
  Chemically synthesized
ucccauuucugggaacuaa

SEQ ID NO: 5285 - RNA, 19 nt, artificial
  Chemically synthesized
gcagacuaauuuccugccc

SEQ ID NO: 5286 - RNA, 19 nt, artificial
  Chemically synthesized
ugccaugacucuggcucau

SEQ ID NO: 5287 - RNA, 19 nt, artificial
  Chemically synthesized
gaauuaaccuccugccaug

SEQ ID NO: 5288 - RNA, 19 nt, artificial
  Chemically synthesized
uggacaggaaucucaccuu

SEQ ID NO: 5289 - RNA, 19 nt, artificial
  Chemically synthesized
cugucauagaccaaaggaa

SEQ ID NO: 5290 - RNA, 19 nt, artificial
  Chemically synthesized
cggauacucaaguaaguuu

SEQ ID NO: 5291 - RNA, 19 nt, artificial
  Chemically synthesized
ggaguuaauguaauacuca

SEQ ID NO: 5292 - RNA, 19 nt, artificial
  Chemically synthesized
agcauacuccaguuuacua

SEQ ID NO: 5293 - RNA, 19 nt, artificial
  Chemically synthesized
cugaaggaaauuuuccaga

SEQ ID NO: 5294 - RNA, 19 nt, artificial
  Chemically synthesized
cccaaaagaagaaggaaac

SEQ ID NO: 5295 - RNA, 19 nt, artificial
  Chemically synthesized
auacugagcugccucagaa

SEQ ID NO: 5296 - RNA, 19 nt, artificial
  Chemically synthesized
gcccaucuuacuccagguu

SEQ ID NO: 5297 - RNA, 19 nt, artificial
  Chemically synthesized
ggacucaauuuuagaauca

SEQ ID NO: 5298 - RNA, 19 nt, artificial
  Chemically synthesized
auguaaugguuuucccuua

SEQ ID NO: 5299 - RNA, 19 nt, artificial
  Chemically synthesized
cacccuaauaccagaauag

SEQ ID NO: 5300 - RNA, 19 nt, artificial
  Chemically synthesized
aacacccuaauaccagaau

SEQ ID NO: 5301 - RNA, 19 nt, artificial
  Chemically synthesized
ucacuuugcugugcaccau

SEQ ID NO: 5302 - RNA, 19 nt, artificial
  Chemically synthesized
agagccagaugcaggaaag

SEQ ID NO: 5303 - RNA, 19 nt, artificial
  Chemically synthesized
gagagccagaugcaggaaa

SEQ ID NO: 5304 - RNA, 19 nt, artificial
  Chemically synthesized
uugcuggaaacccuccuau

SEQ ID NO: 5305 - RNA, 19 nt, artificial
  Chemically synthesized
cccucaguuugcuggaaac

SEQ ID NO: 5306 - RNA, 19 nt, artificial
  Chemically synthesized
aaauaaaggaaugcccaau

SEQ ID NO: 5307 - RNA, 19 nt, artificial
  Chemically synthesized
gucugguauuaccggguuu

SEQ ID NO: 5308 - RNA, 19 nt, artificial
  Chemically synthesized
accauccggaggucuuacu

SEQ ID NO: 5309 - RNA, 19 nt, artificial
  Chemically synthesized
ugcuuuugcaauuguguuu

SEQ ID NO: 5310 - RNA, 19 nt, artificial
  Chemically synthesized
ccgagaguguuucuccaag

SEQ ID NO: 5311 - RNA, 19 nt, artificial
  Chemically synthesized
uuggcccuuucuaaccuau

SEQ ID NO: 5312 - RNA, 19 nt, artificial
  Chemically synthesized
ucugagaauauuggcccuu

SEQ ID NO: 5313 - RNA, 19 nt, artificial
  Chemically synthesized
accucaguuauaaggaguc

SEQ ID NO: 5314 - RNA, 19 nt, artificial
  Chemically synthesized
gcacaucuauuuaaugugg

SEQ ID NO: 5315 - RNA, 19 nt, artificial
  Chemically synthesized
cugacaaauaaggccugcu

SEQ ID NO: 5316 - RNA, 19 nt, artificial
  Chemically synthesized
gaacuaaauaagaacucag

SEQ ID NO: 5317 - RNA, 19 nt, artificial
  Chemically synthesized
cacauacugauguuguuuu

SEQ ID NO: 5318 - RNA, 19 nt, artificial
  Chemically synthesized
aggagguauacacauacug

SEQ ID NO: 5319 - RNA, 19 nt, artificial
  Chemically synthesized
gccaagagcaggguuuucu

SEQ ID NO: 5320 - RNA, 19 nt, artificial
  Chemically synthesized
caccuuucauaaaauggug

SEQ ID NO: 5321 - RNA, 19 nt, artificial
  Chemically synthesized
ucucaccuuucauaaaaug

SEQ ID NO: 5322 - RNA, 19 nt, artificial
  Chemically synthesized
cagacuaauuuccugccca

SEQ ID NO: 5323 - RNA, 19 nt, artificial
  Chemically synthesized
guggagaauuaaccuccug

SEQ ID NO: 5324 - RNA, 19 nt, artificial
  Chemically synthesized
gcuaaggauacuaaccaau

SEQ ID NO: 5325 - RNA, 19 nt, artificial
  Chemically synthesized
uggaguuaauguaauacuc

SEQ ID NO: 5326 - RNA, 19 nt, artificial
  Chemically synthesized
caguuuacuaauacagcag

SEQ ID NO: 5327 - RNA, 19 nt, artificial
  Chemically synthesized
ucugagcauacuccaguuu

SEQ ID NO: 5328 - RNA, 19 nt, artificial
  Chemically synthesized
acccugaguaaacaaagca

SEQ ID NO: 5329 - RNA, 19 nt, artificial
  Chemically synthesized
gccugaaacaaaagacuuu

SEQ ID NO: 5330 - RNA, 19 nt, artificial
  Chemically synthesized
gccugccugaauuucaacu

SEQ ID NO: 5331 - RNA, 19 nt, artificial
  Chemically synthesized
accaaucugaagcucaaaa

SEQ ID NO: 5332 - RNA, 19 nt, artificial
  Chemically synthesized
gggcuguucaaugcuugug

SEQ ID NO: 5333 - RNA, 19 nt, artificial
  Chemically synthesized
cccuuucaaaaccaucgag

SEQ ID NO: 5334 - RNA, 19 nt, artificial
  Chemically synthesized
ggauagugggucccauguu

SEQ ID NO: 5335 - RNA, 19 nt, artificial
  Chemically synthesized
gcugugcauaauauaacag

SEQ ID NO: 5336 - RNA, 19 nt, artificial
  Chemically synthesized
ucacgcugugccucauauu

SEQ ID NO: 5337 - RNA, 19 nt, artificial
  Chemically synthesized
gaggguaccucaguuauaa

SEQ ID NO: 5338 - RNA, 19 nt, artificial
  Chemically synthesized
acacuuagguccagccugu

SEQ ID NO: 5339 - RNA, 19 nt, artificial
  Chemically synthesized
ugacaaauaaggccugcug

SEQ ID NO: 5340 - RNA, 19 nt, artificial
  Chemically synthesized
gucugacaaauaaggccug

SEQ ID NO: 5341 - RNA, 19 nt, artificial
  Chemically synthesized
gucacaaauuuugaugcug

SEQ ID NO: 5342 - RNA, 19 nt, artificial
  Chemically synthesized
ggaugauugcacuucacuc

SEQ ID NO: 5343 - RNA, 19 nt, artificial
  Chemically synthesized
gcauggaugauugcacuuc

SEQ ID NO: 5344 - RNA, 19 nt, artificial
  Chemically synthesized
ugggaacuaaaaccaguuu

SEQ ID NO: 5345 - RNA, 19 nt, artificial
  Chemically synthesized
uggccaagagcaggguuuu

SEQ ID NO: 5346 - RNA, 19 nt, artificial
  Chemically synthesized
agaucaaauucacacucaa

SEQ ID NO: 5347 - RNA, 19 nt, artificial
  Chemically synthesized
gcaucugugugacuaaugg

SEQ ID NO: 5348 - RNA, 19 nt, artificial
  Chemically synthesized
cguaaauacacacacaaaa

SEQ ID NO: 5349 - RNA, 19 nt, artificial
  Chemically synthesized
ccguaaauacacacacaaa

SEQ ID NO: 5350 - RNA, 19 nt, artificial
  Chemically synthesized
ccaaaguggucuucuccag

SEQ ID NO: 5351 - RNA, 19 nt, artificial
  Chemically synthesized
caggaaucucaccuuucau

SEQ ID NO: 5352 - RNA, 19 nt, artificial
  Chemically synthesized
aggauugccugaaggguuc

SEQ ID NO: 5353 - RNA, 19 nt, artificial
  Chemically synthesized
ggcuaaggauacuaaccaa

SEQ ID NO: 5354 - RNA, 19 nt, artificial
  Chemically synthesized
cuauuacugucauagacca

SEQ ID NO: 5355 - RNA, 19 nt, artificial
  Chemically synthesized
uguucuuucuacagaagaa

SEQ ID NO: 5356 - RNA, 19 nt, artificial
  Chemically synthesized
agauguucuuucuacagaa

SEQ ID NO: 5357 - RNA, 19 nt, artificial
  Chemically synthesized
agagugucucaacacuuau

SEQ ID NO: 5358 - RNA, 19 nt, artificial
  Chemically synthesized
ugcucaacaagaguucgaa

SEQ ID NO: 5359 - RNA, 19 nt, artificial
  Chemically synthesized
gguucaguaacuucccuaa

SEQ ID NO: 5360 - RNA, 19 nt, artificial
  Chemically synthesized
cugccaaaugcucaaauaa

SEQ ID NO: 5361 - RNA, 19 nt, artificial
  Chemically synthesized
gugcugccaaaugcucaaa

SEQ ID NO: 5362 - RNA, 19 nt, artificial
  Chemically synthesized
ucucuuccaugaggaaaua

SEQ ID NO: 5363 - RNA, 19 nt, artificial
  Chemically synthesized
ugaguaaacaaagcaucuc

SEQ ID NO: 5364 - RNA, 19 nt, artificial
  Chemically synthesized
gaauaggaguuuuccucug

SEQ ID NO: 5365 - RNA, 19 nt, artificial
  Chemically synthesized
cccuaauaccagaauagga

SEQ ID NO: 5366 - RNA, 19 nt, artificial
  Chemically synthesized
ucaacugcaugcugauucu

SEQ ID NO: 5367 - RNA, 19 nt, artificial
  Chemically synthesized
ccauuuuugucauucuggu

SEQ ID NO: 5368 - RNA, 19 nt, artificial
  Chemically synthesized
ggccaaucacuuugcugug

SEQ ID NO: 5369 - RNA, 19 nt, artificial
  Chemically synthesized
ugccugaauuucaacugca

SEQ ID NO: 5370 - RNA, 19 nt, artificial
  Chemically synthesized
cagccugccugaauuucaa

SEQ ID NO: 5371 - RNA, 19 nt, artificial
  Chemically synthesized
gcugugauaagcaggaguu

SEQ ID NO: 5372 - RNA, 19 nt, artificial
  Chemically synthesized
uggcugugauaagcaggag

SEQ ID NO: 5373 - RNA, 19 nt, artificial
  Chemically synthesized
guggcugugauaagcagga

SEQ ID NO: 5374 - RNA, 19 nt, artificial
  Chemically synthesized
gggacaauacauuuuuguc

SEQ ID NO: 5375 - RNA, 19 nt, artificial
  Chemically synthesized
ggaaacccuccuaugacuu

SEQ ID NO: 5376 - RNA, 19 nt, artificial
  Chemically synthesized
cugugcauaauauaacagu

SEQ ID NO: 5377 - RNA, 19 nt, artificial
  Chemically synthesized
cugguauuaccggguuuau

SEQ ID NO: 5378 - RNA, 19 nt, artificial
  Chemically synthesized
ucaucacgcugugccucau

SEQ ID NO: 5379 - RNA, 19 nt, artificial
  Chemically synthesized
cucgaaagagaauaaagaa

SEQ ID NO: 5380 - RNA, 19 nt, artificial
  Chemically synthesized
gacuaugaagguuuuucuu

SEQ ID NO: 5381 - RNA, 19 nt, artificial
  Chemically synthesized
ugagaauauuggcccuuuc

SEQ ID NO: 5382 - RNA, 19 nt, artificial
  Chemically synthesized
uggagaggguaccucaguu

SEQ ID NO: 5383 - RNA, 19 nt, artificial
  Chemically synthesized
gucaggcucuguuuauugu

SEQ ID NO: 5384 - RNA, 19 nt, artificial
  Chemically synthesized
cugcaccucagguaucaau

SEQ ID NO: 5385 - RNA, 19 nt, artificial
  Chemically synthesized
cucugcgauucacaccauu

SEQ ID NO: 5386 - RNA, 19 nt, artificial
  Chemically synthesized
gaacucaguuguucuuugu

SEQ ID NO: 5387 - RNA, 19 nt, artificial
  Chemically synthesized
gucucauauuggucauucc

SEQ ID NO: 5388 - RNA, 19 nt, artificial
  Chemically synthesized
cuaaaucacuguuagugug

SEQ ID NO: 5389 - RNA, 19 nt, artificial
  Chemically synthesized
ucacacucaauaguauguu

SEQ ID NO: 5390 - RNA, 19 nt, artificial
  Chemically synthesized
cacacaaaauggaucgcau

SEQ ID NO: 5391 - RNA, 19 nt, artificial
  Chemically synthesized
ggaaucugauucucccuag

SEQ ID NO: 5392 - RNA, 19 nt, artificial
  Chemically synthesized
ccaaaggaaucugauucuc

SEQ ID NO: 5393 - RNA, 19 nt, artificial
  Chemically synthesized
caacacuuauuagugacag

SEQ ID NO: 5394 - RNA, 19 nt, artificial
  Chemically synthesized
ucaacacuuauuagugaca

SEQ ID NO: 5395 - RNA, 19 nt, artificial
  Chemically synthesized
gugcugcucaacaagaguu

SEQ ID NO: 5396 - RNA, 19 nt, artificial
  Chemically synthesized
cccaucuuacuccagguuu

SEQ ID NO: 5397 - RNA, 19 nt, artificial
  Chemically synthesized
uaaugguuuucccuuaaag

SEQ ID NO: 5398 - RNA, 19 nt, artificial
  Chemically synthesized
ccuaauaccagaauaggag

SEQ ID NO: 5399 - RNA, 19 nt, artificial
  Chemically synthesized
uugcaagucaacacccuaa

SEQ ID NO: 5400 - RNA, 19 nt, artificial
  Chemically synthesized
gccaaucacuuugcugugc

SEQ ID NO: 5401 - RNA, 19 nt, artificial
  Chemically synthesized
ucaggccaaucacuuugcu

SEQ ID NO: 5402 - RNA, 19 nt, artificial
  Chemically synthesized
ggcugugauaagcaggagu

SEQ ID NO: 5403 - RNA, 19 nt, artificial
  Chemically synthesized
agugcccaaagguguccaa

SEQ ID NO: 5404 - RNA, 19 nt, artificial
  Chemically synthesized
ccuccuaugacuuggaaau

SEQ ID NO: 5405 - RNA, 19 nt, artificial
  Chemically synthesized
acccuccuaugacuuggaa

SEQ ID NO: 5406 - RNA, 19 nt, artificial
  Chemically synthesized
ucugguauuaccggguuua

SEQ ID NO: 5407 - RNA, 19 nt, artificial
  Chemically synthesized
aucacgcugugccucauau

SEQ ID NO: 5408 - RNA, 19 nt, artificial
  Chemically synthesized
aucucaauuuugcucgaaa

SEQ ID NO: 5409 - RNA, 19 nt, artificial
  Chemically synthesized
uucugauccuuauucagua

SEQ ID NO: 5410 - RNA, 19 nt, artificial
  Chemically synthesized
cugcuuuugcaauuguguu

SEQ ID NO: 5411 - RNA, 19 nt, artificial
  Chemically synthesized
ugaagguuuuucuuaguuc

SEQ ID NO: 5412 - RNA, 19 nt, artificial
  Chemically synthesized
ccuguguuauccaguuaug

SEQ ID NO: 5413 - RNA, 19 nt, artificial
  Chemically synthesized
ccagcuucauuuguugcuc

SEQ ID NO: 5414 - RNA, 19 nt, artificial
  Chemically synthesized
cacaucuauuuaaugugga

SEQ ID NO: 5415 - RNA, 19 nt, artificial
  Chemically synthesized
ggguaccucaguuauaagg

SEQ ID NO: 5416 - RNA, 19 nt, artificial
  Chemically synthesized
gagaggguaccucaguuau

SEQ ID NO: 5417 - RNA, 19 nt, artificial
  Chemically synthesized
caccucagguaucaauuca

SEQ ID NO: 5418 - RNA, 19 nt, artificial
  Chemically synthesized
gcaccucagguaucaauuc

SEQ ID NO: 5419 - RNA, 19 nt, artificial
  Chemically synthesized
ucacacugcaccucaggua

SEQ ID NO: 5420 - RNA, 19 nt, artificial
  Chemically synthesized
acucugcgauucacaccau

SEQ ID NO: 5421 - RNA, 19 nt, artificial
  Chemically synthesized
agaacucaguuguucuuug

SEQ ID NO: 5422 - RNA, 19 nt, artificial
  Chemically synthesized
ggucacaaauuuugaugcu

SEQ ID NO: 5423 - RNA, 19 nt, artificial
  Chemically synthesized
cugggaacuaaaaccaguu

SEQ ID NO: 5424 - RNA, 19 nt, artificial
  Chemically synthesized
ggcauggaugauugcacuu

SEQ ID NO: 5425 - RNA, 19 nt, artificial
  Chemically synthesized
gagagagucucuaaaucac

SEQ ID NO: 5426 - RNA, 19 nt, artificial
  Chemically synthesized
cugaauauauguucaagag

SEQ ID NO: 5427 - RNA, 19 nt, artificial
  Chemically synthesized
acacucaauaguauguucu

SEQ ID NO: 5428 - RNA, 19 nt, artificial
  Chemically synthesized
cucuauacagagaucaaau

SEQ ID NO: 5429 - RNA, 19 nt, artificial
  Chemically synthesized
ccuaaaauuaacaacccag

SEQ ID NO: 5430 - RNA, 19 nt, artificial
  Chemically synthesized
ggaucgcaucugugugacu

SEQ ID NO: 5431 - RNA, 19 nt, artificial
  Chemically synthesized
uccguaaauacacacacaa

SEQ ID NO: 5432 - RNA, 19 nt, artificial
  Chemically synthesized
gguggagaauuaaccuccu

SEQ ID NO: 5433 - RNA, 19 nt, artificial
  Chemically synthesized
gcacauucuuauuugaagc

SEQ ID NO: 5434 - RNA, 19 nt, artificial
  Chemically synthesized
gacaacuggacaggaaucu

SEQ ID NO: 5435 - RNA, 19 nt, artificial
  Chemically synthesized
gaaugaauuuagaaccaca

SEQ ID NO: 5436 - RNA, 19 nt, artificial
  Chemically synthesized
gagagcggauacucaagua

SEQ ID NO: 5437 - RNA, 19 nt, artificial
  Chemically synthesized
gggccagauguucuuucua

SEQ ID NO: 5438 - RNA, 19 nt, artificial
  Chemically synthesized
gugacaguauugacaucug

SEQ ID NO: 5439 - RNA, 19 nt, artificial
  Chemically synthesized
gagugucucaacacuuauu

SEQ ID NO: 5440 - RNA, 19 nt, artificial
  Chemically synthesized
cugcucaacaagaguucga

SEQ ID NO: 5441 - RNA, 19 nt, artificial
  Chemically synthesized
gaaaccaaggaguagcuau

SEQ ID NO: 5442 - RNA, 19 nt, artificial
  Chemically synthesized
agguucaguaacuucccua

SEQ ID NO: 5443 - RNA, 19 nt, artificial
  Chemically synthesized
cucuaugguuuugagagca

SEQ ID NO: 5444 - RNA, 19 nt, artificial
  Chemically synthesized
cccuuaaaggaaugucaaa

SEQ ID NO: 5445 - RNA, 19 nt, artificial
  Chemically synthesized
guggguugugcugccaaau

SEQ ID NO: 5446 - RNA, 19 nt, artificial
  Chemically synthesized
cucuuccaugaggaaauaa

SEQ ID NO: 5447 - RNA, 19 nt, artificial
  Chemically synthesized
ggccugaaacaaaagacuu

SEQ ID NO: 5448 - RNA, 19 nt, artificial
  Chemically synthesized
gcagccugccugaauuuca

SEQ ID NO: 5449 - RNA, 19 nt, artificial
  Chemically synthesized
ucaccaagguggucacuca

SEQ ID NO: 5450 - RNA, 19 nt, artificial
  Chemically synthesized
guaucucugugagagguug

SEQ ID NO: 5451 - RNA, 19 nt, artificial
  Chemically synthesized
cuguaucucugugagaggu

SEQ ID NO: 5452 - RNA, 19 nt, artificial
  Chemically synthesized
uggaaacccuccuaugacu

SEQ ID NO: 5453 - RNA, 19 nt, artificial
  Chemically synthesized
cccaaucccucaguuugcu

SEQ ID NO: 5454 - RNA, 19 nt, artificial
  Chemically synthesized
ucauuggccuugccaucca

SEQ ID NO: 5455 - RNA, 19 nt, artificial
  Chemically synthesized
agaggguaccucaguuaua

SEQ ID NO: 5456 - RNA, 19 nt, artificial
  Chemically synthesized
ugcacaucuauuuaaugug

SEQ ID NO: 5457 - RNA, 19 nt, artificial
  Chemically synthesized
accaggaugguuucugcuu

SEQ ID NO: 5458 - RNA, 19 nt, artificial
  Chemically synthesized
gcgauucacaccauugcac

SEQ ID NO: 5459 - RNA, 19 nt, artificial
  Chemically synthesized
cuauuccuuucgucuccca

SEQ ID NO: 5460 - RNA, 19 nt, artificial
  Chemically synthesized
uacacauacugauguuguu

SEQ ID NO: 5461 - RNA, 19 nt, artificial
  Chemically synthesized
gguauacacauacugaugu

SEQ ID NO: 5462 - RNA, 19 nt, artificial
  Chemically synthesized
gggcagaagacugguuuag

SEQ ID NO: 5463 - RNA, 19 nt, artificial
  Chemically synthesized
gaagggcagaagacugguu

SEQ ID NO: 5464 - RNA, 19 nt, artificial
  Chemically synthesized
cucccauuucugggaacua

SEQ ID NO: 5465 - RNA, 19 nt, artificial
  Chemically synthesized
agagagagucucuaaauca

SEQ ID NO: 5466 - RNA, 19 nt, artificial
  Chemically synthesized
ucucuauacagagaucaaa

SEQ ID NO: 5467 - RNA, 19 nt, artificial
  Chemically synthesized
cccagaaacaaaaaucucu

SEQ ID NO: 5468 - RNA, 19 nt, artificial
  Chemically synthesized
acaaaauggaucgcaucug

SEQ ID NO: 5469 - RNA, 19 nt, artificial
  Chemically synthesized
gacucuggcucaucuaguc

SEQ ID NO: 5470 - RNA, 19 nt, artificial
  Chemically synthesized
cacauucuuauuugaagca

SEQ ID NO: 5471 - RNA, 19 nt, artificial
  Chemically synthesized
aagaacaaaaagaaaaccc

SEQ ID NO: 5472 - RNA, 19 nt, artificial
  Chemically synthesized
uuauguccuaaugaucugg

SEQ ID NO: 5473 - RNA, 19 nt, artificial
  Chemically synthesized
gugauaauuaauaugaggc

SEQ ID NO: 5474 - RNA, 19 nt, artificial
  Chemically synthesized
aagcugguuuuaauuaugc

SEQ ID NO: 5475 - RNA, 19 nt, artificial
  Chemically synthesized
aacaaaaagaaaacccugc

SEQ ID NO: 5476 - RNA, 19 nt, artificial
  Chemically synthesized
aauucauuaucccaguugg

SEQ ID NO: 5477 - RNA, 19 nt, artificial
  Chemically synthesized
aaugaccaauaugagaccc

SEQ ID NO: 5478 - RNA, 19 nt, artificial
  Chemically synthesized
ugucuugaauucauuaucc

SEQ ID NO: 5479 - RNA, 19 nt, artificial
  Chemically synthesized
augcaguugaaauucaggc

SEQ ID NO: 5480 - RNA, 19 nt, artificial
  Chemically synthesized
auuaauaugaggcacagcg

SEQ ID NO: 5481 - RNA, 19 nt, artificial
  Chemically synthesized
aauuaugcacauagguuag

SEQ ID NO: 5482 - RNA, 19 nt, artificial
  Chemically synthesized
cuguugaauagaugaauug

SEQ ID NO: 5483 - RNA, 19 nt, artificial
  Chemically synthesized
aauaaaccauuagucacac

SEQ ID NO: 5484 - RNA, 19 nt, artificial
  Chemically synthesized
uaucuuggcauuguguggu

SEQ ID NO: 5485 - RNA, 19 nt, artificial
  Chemically synthesized
auuuugaggauucugaggc

SEQ ID NO: 5486 - RNA, 19 nt, artificial
  Chemically synthesized
uuuguuuacucaggguuuc

SEQ ID NO: 5487 - RNA, 19 nt, artificial
  Chemically synthesized
acuuucauaacuuaguugg

SEQ ID NO: 5488 - RNA, 19 nt, artificial
  Chemically synthesized
uuaaauagaugugcaaugg

SEQ ID NO: 5489 - RNA, 19 nt, artificial
  Chemically synthesized
auagaugaauugauaccug

SEQ ID NO: 5490 - RNA, 19 nt, artificial
  Chemically synthesized
uucagaaaggcuauauucg

SEQ ID NO: 5491 - RNA, 19 nt, artificial
  Chemically synthesized
uauauucgcacagcaggcc

SEQ ID NO: 5492 - RNA, 19 nt, artificial
  Chemically synthesized
agaacaaaaagaaaacccu

SEQ ID NO: 5493 - RNA, 19 nt, artificial
  Chemically synthesized
aguucaauauucauaaggg

SEQ ID NO: 5494 - RNA, 19 nt, artificial
  Chemically synthesized
acuuugggcaggaaauuag

SEQ ID NO: 5495 - RNA, 19 nt, artificial
  Chemically synthesized
uucugguauuaggguguug

SEQ ID NO: 5496 - RNA, 19 nt, artificial
  Chemically synthesized
gucuugaauucauuauccc

SEQ ID NO: 5497 - RNA, 19 nt, artificial
  Chemically synthesized
uugaauucauuaucccagu

SEQ ID NO: 5498 - RNA, 19 nt, artificial
  Chemically synthesized
aaguaagaccuccggaugg

SEQ ID NO: 5499 - RNA, 19 nt, artificial
  Chemically synthesized
gauaauuaauaugaggcac

SEQ ID NO: 5500 - RNA, 19 nt, artificial
  Chemically synthesized
uaauuaauaugaggcacag

SEQ ID NO: 5501 - RNA, 19 nt, artificial
  Chemically synthesized
aucagaauuauugacucgg

SEQ ID NO: 5502 - RNA, 19 nt, artificial
  Chemically synthesized
auuauucacauacaaagcc

SEQ ID NO: 5503 - RNA, 19 nt, artificial
  Chemically synthesized
auuaugcacauagguuaga

SEQ ID NO: 5504 - RNA, 19 nt, artificial
  Chemically synthesized
uagaugaauugauaccuga

SEQ ID NO: 5505 - RNA, 19 nt, artificial
  Chemically synthesized
aaacuuuaagaaaucuggg

SEQ ID NO: 5506 - RNA, 19 nt, artificial
  Chemically synthesized
uucuaaacauuuguggcuc

SEQ ID NO: 5507 - RNA, 19 nt, artificial
  Chemically synthesized
aaaaagaaaacccugcucu

SEQ ID NO: 5508 - RNA, 19 nt, artificial
  Chemically synthesized
uuuaggaugaugaugauga

SEQ ID NO: 5509 - RNA, 19 nt, artificial
  Chemically synthesized
uaaaccauuagucacacag

SEQ ID NO: 5510 - RNA, 19 nt, artificial
  Chemically synthesized
cuugaauucauuaucccag

SEQ ID NO: 5511 - RNA, 19 nt, artificial
  Chemically synthesized
uucuucaucuguagcucga

SEQ ID NO: 5512 - RNA, 19 nt, artificial
  Chemically synthesized
aagacuucaaaguaagacc

SEQ ID NO: 5513 - RNA, 19 nt, artificial
  Chemically synthesized
cacaguuuuaagaauuccc

SEQ ID NO: 5514 - RNA, 19 nt, artificial
  Chemically synthesized
uuuauaaugacaagcacuc

SEQ ID NO: 5515 - RNA, 19 nt, artificial
  Chemically synthesized
uuuaguucauccuaguccc

SEQ ID NO: 5516 - RNA, 19 nt, artificial
  Chemically synthesized
cucccauucucuuuucucc

SEQ ID NO: 5517 - RNA, 19 nt, artificial
  Chemically synthesized
ucuaaacauuuguggcucc

SEQ ID NO: 5518 - RNA, 19 nt, artificial
  Chemically synthesized
uauuuacggaaaauaaggg

SEQ ID NO: 5519 - RNA, 19 nt, artificial
  Chemically synthesized
guucaauauucauaagggc

SEQ ID NO: 5520 - RNA, 19 nt, artificial
  Chemically synthesized
aucuuggcauugugugguu

SEQ ID NO: 5521 - RNA, 19 nt, artificial
  Chemically synthesized
uugugugguucuaaauuca

SEQ ID NO: 5522 - RNA, 19 nt, artificial
  Chemically synthesized
uagagcuccacauaaaugu

SEQ ID NO: 5523 - RNA, 19 nt, artificial
  Chemically synthesized
uuguuuacucaggguuuca

SEQ ID NO: 5524 - RNA, 19 nt, artificial
  Chemically synthesized
uguuuacucaggguuucag

SEQ ID NO: 5525 - RNA, 19 nt, artificial
  Chemically synthesized
uguuauauuaugcacagcc

SEQ ID NO: 5526 - RNA, 19 nt, artificial
  Chemically synthesized
aaagacuucaaaguaagac

SEQ ID NO: 5527 - RNA, 19 nt, artificial
  Chemically synthesized
uaguugagcacaguuuuaa

SEQ ID NO: 5528 - RNA, 19 nt, artificial
  Chemically synthesized
uuauucacauacaaagccu

SEQ ID NO: 5529 - RNA, 19 nt, artificial
  Chemically synthesized
aguaccuguuaauaaaugc

SEQ ID NO: 5530 - RNA, 19 nt, artificial
  Chemically synthesized
cugguuuuaauuaugcaca

SEQ ID NO: 5531 - RNA, 19 nt, artificial
  Chemically synthesized
uuaugcacauagguuagaa

SEQ ID NO: 5532 - RNA, 19 nt, artificial
  Chemically synthesized
cuuugguguaaagaauuga

SEQ ID NO: 5533 - RNA, 19 nt, artificial
  Chemically synthesized
uuucagaaaggcuauauuc

SEQ ID NO: 5534 - RNA, 19 nt, artificial
  Chemically synthesized
gaaugaccaauaugagacc

SEQ ID NO: 5535 - RNA, 19 nt, artificial
  Chemically synthesized
aagaaaacccugcucuugg

SEQ ID NO: 5536 - RNA, 19 nt, artificial
  Chemically synthesized
cuaucuuggcauugugugg

SEQ ID NO: 5537 - RNA, 19 nt, artificial
  Chemically synthesized
auuaacuccaaucaaucca

SEQ ID NO: 5538 - RNA, 19 nt, artificial
  Chemically synthesized
gaaagaguaucaaaccugg

SEQ ID NO: 5539 - RNA, 19 nt, artificial
  Chemically synthesized
aagaguaucaaaccuggag

SEQ ID NO: 5540 - RNA, 19 nt, artificial
  Chemically synthesized
aaguuacugaaccuuuuga

SEQ ID NO: 5541 - RNA, 19 nt, artificial
  Chemically synthesized
uuacugaaccuuuugaucc

SEQ ID NO: 5542 - RNA, 19 nt, artificial
  Chemically synthesized
cuuguugaaaaugaaaugc

SEQ ID NO: 5543 - RNA, 19 nt, artificial
  Chemically synthesized
uugcaauugucuugaauuc

SEQ ID NO: 5544 - RNA, 19 nt, artificial
  Chemically synthesized
auuggccugagacucaucc

SEQ ID NO: 5545 - RNA, 19 nt, artificial
  Chemically synthesized
uuccuuuccugcaucuggc

SEQ ID NO: 5546 - RNA, 19 nt, artificial
  Chemically synthesized
ucuucuucaucuguagcuc

SEQ ID NO: 5547 - RNA, 19 nt, artificial
  Chemically synthesized
uugagaucgccaaaaccgc

SEQ ID NO: 5548 - RNA, 19 nt, artificial
  Chemically synthesized
acuucaaaguaagaccucc

SEQ ID NO: 5549 - RNA, 19 nt, artificial
  Chemically synthesized
cuucaaaguaagaccuccg

SEQ ID NO: 5550 - RNA, 19 nt, artificial
  Chemically synthesized
uuuugguggaggaagugau

SEQ ID NO: 5551 - RNA, 19 nt, artificial
  Chemically synthesized
auucacauacaaagccugc

SEQ ID NO: 5552 - RNA, 19 nt, artificial
  Chemically synthesized
uuauaaugacaagcacucu

SEQ ID NO: 5553 - RNA, 19 nt, artificial
  Chemically synthesized
uaguugguuuugaagauag

SEQ ID NO: 5554 - RNA, 19 nt, artificial
  Chemically synthesized
cacauagguuagaaagggc

SEQ ID NO: 5555 - RNA, 19 nt, artificial
  Chemically synthesized
augaauugauaccugaggu

SEQ ID NO: 5556 - RNA, 19 nt, artificial
  Chemically synthesized
acaaaaagaaaacccugcu

SEQ ID NO: 5557 - RNA, 19 nt, artificial
  Chemically synthesized
auccaugccaccauuuuau

SEQ ID NO: 5558 - RNA, 19 nt, artificial
  Chemically synthesized
auaaaccauuagucacaca

SEQ ID NO: 5559 - RNA, 19 nt, artificial
  Chemically synthesized
auauucauaagggcuagcu

SEQ ID NO: 5560 - RNA, 19 nt, artificial
  Chemically synthesized
uuugggcaggaaauuaguc

SEQ ID NO: 5561 - RNA, 19 nt, artificial
  Chemically synthesized
caacccucuuuuuucaugc

SEQ ID NO: 5562 - RNA, 19 nt, artificial
  Chemically synthesized
aauucuaucuuggcauugu

SEQ ID NO: 5563 - RNA, 19 nt, artificial
  Chemically synthesized
auucuaucuuggcauugug

SEQ ID NO: 5564 - RNA, 19 nt, artificial
  Chemically synthesized
ucuuggcauugugugguuc

SEQ ID NO: 5565 - RNA, 19 nt, artificial
  Chemically synthesized
cucucaacauguauuaugu

SEQ ID NO: 5566 - RNA, 19 nt, artificial
  Chemically synthesized
agaaauauauagcuacucc

SEQ ID NO: 5567 - RNA, 19 nt, artificial
  Chemically synthesized
uuuugaggauucugaggca

SEQ ID NO: 5568 - RNA, 19 nt, artificial
  Chemically synthesized
cucaaaaccauagagcucc

SEQ ID NO: 5569 - RNA, 19 nt, artificial
  Chemically synthesized
guuuacucaggguuucagc

SEQ ID NO: 5570 - RNA, 19 nt, artificial
  Chemically synthesized
ucugguauuaggguguuga

SEQ ID NO: 5571 - RNA, 19 nt, artificial
  Chemically synthesized
uguaaaagaacuuaggugg

SEQ ID NO: 5572 - RNA, 19 nt, artificial
  Chemically synthesized
cuucuucaucuguagcucg

SEQ ID NO: 5573 - RNA, 19 nt, artificial
  Chemically synthesized
aauuaauaugaggcacagc

SEQ ID NO: 5574 - RNA, 19 nt, artificial
  Chemically synthesized
agauaacuuucauuuugcc

SEQ ID NO: 5575 - RNA, 19 nt, artificial
  Chemically synthesized
auaacuuucauuuugccug

SEQ ID NO: 5576 - RNA, 19 nt, artificial
  Chemically synthesized
uaacuuucauuuugccugu

SEQ ID NO: 5577 - RNA, 19 nt, artificial
  Chemically synthesized
aaggaucagaauuauugac

SEQ ID NO: 5578 - RNA, 19 nt, artificial
  Chemically synthesized
ucagaauuauugacucggg

SEQ ID NO: 5579 - RNA, 19 nt, artificial
  Chemically synthesized
uuuuaauaguugagcacag

SEQ ID NO: 5580 - RNA, 19 nt, artificial
  Chemically synthesized
agcacaguuuuaagaauuc

SEQ ID NO: 5581 - RNA, 19 nt, artificial
  Chemically synthesized
gcacaguuuuaagaauucc

SEQ ID NO: 5582 - RNA, 19 nt, artificial
  Chemically synthesized
aaaagcagaagaacuaaga

SEQ ID NO: 5583 - RNA, 19 nt, artificial
  Chemically synthesized
cuuuuauaaugacaagcac

SEQ ID NO: 5584 - RNA, 19 nt, artificial
  Chemically synthesized
uucucagacuccuuauaac

SEQ ID NO: 5585 - RNA, 19 nt, artificial
  Chemically synthesized
uugaaacaauaaacagagc

SEQ ID NO: 5586 - RNA, 19 nt, artificial
  Chemically synthesized
gaugaauugauaccugagg

SEQ ID NO: 5587 - RNA, 19 nt, artificial
  Chemically synthesized
ugguacauuucagaaaggc

SEQ ID NO: 5588 - RNA, 19 nt, artificial
  Chemically synthesized
guucuuauuuaguucaucc

SEQ ID NO: 5589 - RNA, 19 nt, artificial
  Chemically synthesized
agaguucuaaacauuugug

SEQ ID NO: 5590 - RNA, 19 nt, artificial
  Chemically synthesized
aguucuaaacauuuguggc

SEQ ID NO: 5591 - RNA, 19 nt, artificial
  Chemically synthesized
guucuaaacauuuguggcu

SEQ ID NO: 5592 - RNA, 19 nt, artificial
  Chemically synthesized
caaaaagaaaacccugcuc

SEQ ID NO: 5593 - RNA, 19 nt, artificial
  Chemically synthesized
uucagaacauacuauugag

SEQ ID NO: 5594 - RNA, 19 nt, artificial
  Chemically synthesized
auuuuuguuucuggguugu

SEQ ID NO: 5595 - RNA, 19 nt, artificial
  Chemically synthesized
acauauuugucacaauucc

SEQ ID NO: 5596 - RNA, 19 nt, artificial
  Chemically synthesized
aauauucauaagggcuagc

SEQ ID NO: 5597 - RNA, 19 nt, artificial
  Chemically synthesized
uauuuuauagcacaaggag

SEQ ID NO: 5598 - RNA, 19 nt, artificial
  Chemically synthesized
auuuuauagcacaaggagc

SEQ ID NO: 5599 - RNA, 19 nt, artificial
  Chemically synthesized
guaugauaauaaugauggc

SEQ ID NO: 5600 - RNA, 19 nt, artificial
  Chemically synthesized
caaaccuggaguaagaugg

SEQ ID NO: 5601 - RNA, 19 nt, artificial
  Chemically synthesized
uacugaaccuuuugauccu

SEQ ID NO: 5602 - RNA, 19 nt, artificial
  Chemically synthesized
aaggacagcagauuucgac

SEQ ID NO: 5603 - RNA, 19 nt, artificial
  Chemically synthesized
aaccuuuugauccuuuccc

SEQ ID NO: 5604 - RNA, 19 nt, artificial
  Chemically synthesized
gaguccaagaaucuuuucc

SEQ ID NO: 5605 - RNA, 19 nt, artificial
  Chemically synthesized
aguccaagaaucuuuuccc

SEQ ID NO: 5606 - RNA, 19 nt, artificial
  Chemically synthesized
gaugcuuuguuuacucagg

SEQ ID NO: 5607 - RNA, 19 nt, artificial
  Chemically synthesized
aauauuuguaccagacuga

SEQ ID NO: 5608 - RNA, 19 nt, artificial
  Chemically synthesized
acaaaaauguauuguccca

SEQ ID NO: 5609 - RNA, 19 nt, artificial
  Chemically synthesized
caaaaauguauugucccac

SEQ ID NO: 5610 - RNA, 19 nt, artificial
  Chemically synthesized
aaaaauguauugucccacu

SEQ ID NO: 5611 - RNA, 19 nt, artificial
  Chemically synthesized
uggaauaucauaaacccgg

SEQ ID NO: 5612 - RNA, 19 nt, artificial
  Chemically synthesized
ggcauuccuuuauuuuucc

SEQ ID NO: 5613 - RNA, 19 nt, artificial
  Chemically synthesized
augacaaaaauggagagcc

SEQ ID NO: 5614 - RNA, 19 nt, artificial
  Chemically synthesized
uuaauaugaggcacagcgu

SEQ ID NO: 5615 - RNA, 19 nt, artificial
  Chemically synthesized
gguucuuuauucucuuucg

SEQ ID NO: 5616 - RNA, 19 nt, artificial
  Chemically synthesized
auuauugacucgggcauuc

SEQ ID NO: 5617 - RNA, 19 nt, artificial
  Chemically synthesized
uauucacauacaaagccug

SEQ ID NO: 5618 - RNA, 19 nt, artificial
  Chemically synthesized
ugaaacaauaaacagagcc

SEQ ID NO: 5619 - RNA, 19 nt, artificial
  Chemically synthesized
uaguaugacaaagaacaac

SEQ ID NO: 5620 - RNA, 19 nt, artificial
  Chemically synthesized
uaugacaaagaacaacuga

SEQ ID NO: 5621 - RNA, 19 nt, artificial
  Chemically synthesized
augacaaagaacaacugag

SEQ ID NO: 5622 - RNA, 19 nt, artificial
  Chemically synthesized
acucucccauucucuuuuc

SEQ ID NO: 5623 - RNA, 19 nt, artificial
  Chemically synthesized
uucuccuuauuuccuuuuc

SEQ ID NO: 5624 - RNA, 19 nt, artificial
  Chemically synthesized
gaagaguucuaaacauuug

SEQ ID NO: 5625 - RNA, 19 nt, artificial
  Chemically synthesized
aacagugauuuagagacuc

SEQ ID NO: 5626 - RNA, 19 nt, artificial
  Chemically synthesized
aaaugaccauaucagauac

SEQ ID NO: 5627 - RNA, 19 nt, artificial
  Chemically synthesized
aacccucuuuuuucaugcu

SEQ ID NO: 5628 - RNA, 19 nt, artificial
  Chemically synthesized
uucuaucuuggcauugugu

SEQ ID NO: 5629 - RNA, 19 nt, artificial
  Chemically synthesized
auccaauauucuucuguag

SEQ ID NO: 5630 - RNA, 19 nt, artificial
  Chemically synthesized
uauauagcuacuccuuggu

SEQ ID NO: 5631 - RNA, 19 nt, artificial
  Chemically synthesized
uuugaggauucugaggcag

SEQ ID NO: 5632 - RNA, 19 nt, artificial
  Chemically synthesized
aggcagcucaguauugugg

SEQ ID NO: 5633 - RNA, 19 nt, artificial
  Chemically synthesized
auuguggaaagaguaucaa

SEQ ID NO: 5634 - RNA, 19 nt, artificial
  Chemically synthesized
uuuaagggaaaaccauuac

SEQ ID NO: 5635 - RNA, 19 nt, artificial
  Chemically synthesized
cacauuuauuuccucaugg

SEQ ID NO: 5636 - RNA, 19 nt, artificial
  Chemically synthesized
ugaaaaugaaaugcacucc

SEQ ID NO: 5637 - RNA, 19 nt, artificial
  Chemically synthesized
uuggagaugcuuuguuuac

SEQ ID NO: 5638 - RNA, 19 nt, artificial
  Chemically synthesized
ugugaucacaucuuucucc

SEQ ID NO: 5639 - RNA, 19 nt, artificial
  Chemically synthesized
cagacugacuugagaaugg

SEQ ID NO: 5640 - RNA, 19 nt, artificial
  Chemically synthesized
uaguuuccacgcaucuuga

SEQ ID NO: 5641 - RNA, 19 nt, artificial
  Chemically synthesized
uuccacgcaucuugaaacu

SEQ ID NO: 5642 - RNA, 19 nt, artificial
  Chemically synthesized
ccacgcaucuugaaacucc

SEQ ID NO: 5643 - RNA, 19 nt, artificial
  Chemically synthesized
auggauacuaaagaagucu

SEQ ID NO: 5644 - RNA, 19 nt, artificial
  Chemically synthesized
uacuaaagaagucuuccuc

SEQ ID NO: 5645 - RNA, 19 nt, artificial
  Chemically synthesized
aucuguagcucgaugguuu

SEQ ID NO: 5646 - RNA, 19 nt, artificial
  Chemically synthesized
caaaaccgcaccaaccucu

SEQ ID NO: 5647 - RNA, 19 nt, artificial
  Chemically synthesized
aaaaccgcaccaaccucuc

SEQ ID NO: 5648 - RNA, 19 nt, artificial
  Chemically synthesized
aaugacaaaaauggagagc

SEQ ID NO: 5649 - RNA, 19 nt, artificial
  Chemically synthesized
ucugagauuuuuuguucac

SEQ ID NO: 5650 - RNA, 19 nt, artificial
  Chemically synthesized
uaauaugaggcacagcgug

SEQ ID NO: 5651 - RNA, 19 nt, artificial
  Chemically synthesized
cagaauuauugacucgggc

SEQ ID NO: 5652 - RNA, 19 nt, artificial
  Chemically synthesized
cauuuuaauaguugagcac

SEQ ID NO: 5653 - RNA, 19 nt, artificial
  Chemically synthesized
uuuaauaguugagcacagu

SEQ ID NO: 5654 - RNA, 19 nt, artificial
  Chemically synthesized
uucacauacaaagccugca

SEQ ID NO: 5655 - RNA, 19 nt, artificial
  Chemically synthesized
agaagaacuaagaaaaacc

SEQ ID NO: 5656 - RNA, 19 nt, artificial
  Chemically synthesized
gaagaacuaagaaaaaccu

SEQ ID NO: 5657 - RNA, 19 nt, artificial
  Chemically synthesized
agaacuaagaaaaaccuuc

SEQ ID NO: 5658 - RNA, 19 nt, artificial
  Chemically synthesized
aaacaaugcuucaucauuc

SEQ ID NO: 5659 - RNA, 19 nt, artificial
  Chemically synthesized
aacaaugcuucaucauucu

SEQ ID NO: 5660 - RNA, 19 nt, artificial
  Chemically synthesized
aaugcuucaucauucuuag

SEQ ID NO: 5661 - RNA, 19 nt, artificial
  Chemically synthesized
augacaagcacucuuauau

SEQ ID NO: 5662 - RNA, 19 nt, artificial
  Chemically synthesized
gacaagcacucuuauauuc

SEQ ID NO: 5663 - RNA, 19 nt, artificial
  Chemically synthesized
gcacauagguuagaaaggg

SEQ ID NO: 5664 - RNA, 19 nt, artificial
  Chemically synthesized
cauuucagaaaggcuauau

SEQ ID NO: 5665 - RNA, 19 nt, artificial
  Chemically synthesized
auauucgcacagcaggccu

SEQ ID NO: 5666 - RNA, 19 nt, artificial
  Chemically synthesized
cuuauuuaguucauccuag

SEQ ID NO: 5667 - RNA, 19 nt, artificial
  Chemically synthesized
cuagucccuugaauaaucc

SEQ ID NO: 5668 - RNA, 19 nt, artificial
  Chemically synthesized
uuauuuucucucacucucc

SEQ ID NO: 5669 - RNA, 19 nt, artificial
  Chemically synthesized
uauuuucucucacucuccc

SEQ ID NO: 5670 - RNA, 19 nt, artificial
  Chemically synthesized
cucucccauucucuuuucu

SEQ ID NO: 5671 - RNA, 19 nt, artificial
  Chemically synthesized
cucuuuucuccuuauuucc

SEQ ID NO: 5672 - RNA, 19 nt, artificial
  Chemically synthesized
ucuccuuauuuccuuuucc

SEQ ID NO: 5673 - RNA, 19 nt, artificial
  Chemically synthesized
uaccgaaguugaagaguuc

SEQ ID NO: 5674 - RNA, 19 nt, artificial
  Chemically synthesized
cuaaacauuuguggcucca

SEQ ID NO: 5675 - RNA, 19 nt, artificial
  Chemically synthesized
aagaggaagacguucaacc

SEQ ID NO: 5676 - RNA, 19 nt, artificial
  Chemically synthesized
aaagaaaacccugcucuug

SEQ ID NO: 5677 - RNA, 19 nt, artificial
  Chemically synthesized
uaacagugauuuagagacu

SEQ ID NO: 5678 - RNA, 19 nt, artificial
  Chemically synthesized
acagugauuuagagacucu

SEQ ID NO: 5679 - RNA, 19 nt, artificial
  Chemically synthesized
uuuuguuucuggguuguua

SEQ ID NO: 5680 - RNA, 19 nt, artificial
  Chemically synthesized
ucuggguuguuaauuuuag

SEQ ID NO: 5681 - RNA, 19 nt, artificial
  Chemically synthesized
uggguuguuaauuuuagga

SEQ ID NO: 5682 - RNA, 19 nt, artificial
  Chemically synthesized
uucaauauucauaagggcu

SEQ ID NO: 5683 - RNA, 19 nt, artificial
  Chemically synthesized
auucauaagggcuagcugg

SEQ ID NO: 5684 - RNA, 19 nt, artificial
  Chemically synthesized
uaauucuaucuuggcauug

SEQ ID NO: 5685 - RNA, 19 nt, artificial
  Chemically synthesized
cauuaacuccaaucaaucc

SEQ ID NO: 5686 - RNA, 19 nt, artificial
  Chemically synthesized
aaacugauuuugaggauuc

SEQ ID NO: 5687 - RNA, 19 nt, artificial
  Chemically synthesized
uuuucccuaacuuccacug

SEQ ID NO: 5688 - RNA, 19 nt, artificial
  Chemically synthesized
auguuuguaaaagugcucu

SEQ ID NO: 5689 - RNA, 19 nt, artificial
  Chemically synthesized
uaaaagugcucucaaaacc

SEQ ID NO: 5690 - RNA, 19 nt, artificial
  Chemically synthesized
aagagaaucagcaugcagu

SEQ ID NO: 5691 - RNA, 19 nt, artificial
  Chemically synthesized
uuucaggccugugaucaca

SEQ ID NO: 5692 - RNA, 19 nt, artificial
  Chemically synthesized
aucuuucuccucaucaugg

SEQ ID NO: 5693 - RNA, 19 nt, artificial
  Chemically synthesized
agcaugcaguugaaauuca

SEQ ID NO: 5694 - RNA, 19 nt, artificial
  Chemically synthesized
ugacuugagaauggaugcg

SEQ ID NO: 5695 - RNA, 19 nt, artificial
  Chemically synthesized
ugagaauggaugcgaaggg

SEQ ID NO: 5696 - RNA, 19 nt, artificial
  Chemically synthesized
uuuccacgcaucuugaaac

SEQ ID NO: 5697 - RNA, 19 nt, artificial
  Chemically synthesized
cgcaucuugaaacuccugc

SEQ ID NO: 5698 - RNA, 19 nt, artificial
  Chemically synthesized
auacuaaagaagucuuccu

SEQ ID NO: 5699 - RNA, 19 nt, artificial
  Chemically synthesized
cagagauacagaaacaugg

SEQ ID NO: 5700 - RNA, 19 nt, artificial
  Chemically synthesized
guuauauuaugcacagcca

SEQ ID NO: 5701 - RNA, 19 nt, artificial
  Chemically synthesized
aagagaugauguguguacc

SEQ ID NO: 5702 - RNA, 19 nt, artificial
  Chemically synthesized
agacuucaaaguaagaccu

SEQ ID NO: 5703 - RNA, 19 nt, artificial
  Chemically synthesized
acagcgugaugacaacucc

SEQ ID NO: 5704 - RNA, 19 nt, artificial
  Chemically synthesized
guucuuuauucucuuucga

SEQ ID NO: 5705 - RNA, 19 nt, artificial
  Chemically synthesized
uuucauuuugccugucucc

SEQ ID NO: 5706 - RNA, 19 nt, artificial
  Chemically synthesized
aggaucagaauuauugacu

SEQ ID NO: 5707 - RNA, 19 nt, artificial
  Chemically synthesized
uuauugacucgggcauuca

SEQ ID NO: 5708 - RNA, 19 nt, artificial
  Chemically synthesized
caaacacaauugcaaaagc

SEQ ID NO: 5709 - RNA, 19 nt, artificial
  Chemically synthesized
acaagcacucuuauauuca

SEQ ID NO: 5710 - RNA, 19 nt, artificial
  Chemically synthesized
cagacuccuuauaacugag

SEQ ID NO: 5711 - RNA, 19 nt, artificial
  Chemically synthesized
uagaugugcaaugguguga

SEQ ID NO: 5712 - RNA, 19 nt, artificial
  Chemically synthesized
cuauauucgcacagcaggc

SEQ ID NO: 5713 - RNA, 19 nt, artificial
  Chemically synthesized
uauuugucagaccuacccu

SEQ ID NO: 5714 - RNA, 19 nt, artificial
  Chemically synthesized
guaugacaaagaacaacug

SEQ ID NO: 5715 - RNA, 19 nt, artificial
  Chemically synthesized
uauuuaguucauccuaguc

SEQ ID NO: 5716 - RNA, 19 nt, artificial
  Chemically synthesized
uagucccuugaauaauccc

SEQ ID NO: 5717 - RNA, 19 nt, artificial
  Chemically synthesized
caaaacaacaucaguaugu

SEQ ID NO: 5718 - RNA, 19 nt, artificial
  Chemically synthesized
uuuauuuucucucacucuc

SEQ ID NO: 5719 - RNA, 19 nt, artificial
  Chemically synthesized
ucuuucuccuucuuccuca

SEQ ID NO: 5720 - RNA, 19 nt, artificial
  Chemically synthesized
cucucuugaacauauauuc

SEQ ID NO: 5721 - RNA, 19 nt, artificial
  Chemically synthesized
uuuuaggaugaugaugaug

SEQ ID NO: 5722 - RNA, 19 nt, artificial
  Chemically synthesized
uuugucacaauuccuaagu

SEQ ID NO: 5723 - RNA, 19 nt, artificial
  Chemically synthesized
caauauucauaagggcuag

SEQ ID NO: 5724 - RNA, 19 nt, artificial
  Chemically synthesized
cuccaacccucuuuuuuca

SEQ ID NO: 5725 - RNA, 19 nt, artificial
  Chemically synthesized
auaagaaugugcagaaccc

SEQ ID NO: 5726 - RNA, 19 nt, artificial
  Chemically synthesized
uuaacuccaaucaauccaa

SEQ ID NO: 5727 - RNA, 19 nt, artificial
  Chemically synthesized
augauggcaaaaaugacac

SEQ ID NO: 5728 - RNA, 19 nt, artificial
  Chemically synthesized
aacugauuuugaggauucu

SEQ ID NO: 5729 - RNA, 19 nt, artificial
  Chemically synthesized
uggaaagaguaucaaaccu

SEQ ID NO: 5730 - RNA, 19 nt, artificial
  Chemically synthesized
aaagaguaucaaaccugga

SEQ ID NO: 5731 - RNA, 19 nt, artificial
  Chemically synthesized
auaaucuuagggaaguuac

SEQ ID NO: 5732 - RNA, 19 nt, artificial
  Chemically synthesized
uuugauccuuucccuuuug

SEQ ID NO: 5733 - RNA, 19 nt, artificial
  Chemically synthesized
auugaguccaagaaucuuu

SEQ ID NO: 5734 - RNA, 19 nt, artificial
  Chemically synthesized
aaucuuuucccuaacuucc

SEQ ID NO: 5735 - RNA, 19 nt, artificial
  Chemically synthesized
aauguuuguaaaagugcuc

SEQ ID NO: 5736 - RNA, 19 nt, artificial
  Chemically synthesized
aaacaaucuuugacauucc

SEQ ID NO: 5737 - RNA, 19 nt, artificial
  Chemically synthesized
uugaaaaugaaaugcacuc

SEQ ID NO: 5738 - RNA, 19 nt, artificial
  Chemically synthesized
gaaaaugaaaugcacuccc

SEQ ID NO: 5739 - RNA, 19 nt, artificial
  Chemically synthesized
uauggauacuaaagaaguc

SEQ ID NO: 5740 - RNA, 19 nt, artificial
  Chemically synthesized
ugucaguguaaaagggugc

SEQ ID NO: 5741 - RNA, 19 nt, artificial
  Chemically synthesized
uuguguaaaagaacuuagg

SEQ ID NO: 5742 - RNA, 19 nt, artificial
  Chemically synthesized
aaaauguauugucccacuu

SEQ ID NO: 5743 - RNA, 19 nt, artificial
  Chemically synthesized
uugucccacuuccauuuug

SEQ ID NO: 5744 - RNA, 19 nt, artificial
  Chemically synthesized
augguuuugaaagggugag

SEQ ID NO: 5745 - RNA, 19 nt, artificial
  Chemically synthesized
guugagaucgccaaaaccg

SEQ ID NO: 5746 - RNA, 19 nt, artificial
  Chemically synthesized
aaaccgcaccaaccucuca

SEQ ID NO: 5747 - RNA, 19 nt, artificial
  Chemically synthesized
augcacagccaaacucucu

SEQ ID NO: 5748 - RNA, 19 nt, artificial
  Chemically synthesized
ugcacagccaaacucucug

SEQ ID NO: 5749 - RNA, 19 nt, artificial
  Chemically synthesized
acaaagagaugaugugugu

SEQ ID NO: 5750 - RNA, 19 nt, artificial
  Chemically synthesized
uaccaaaagacuucaaagu

SEQ ID NO: 5751 - RNA, 19 nt, artificial
  Chemically synthesized
gugaugacaacuccaguga

SEQ ID NO: 5752 - RNA, 19 nt, artificial
  Chemically synthesized
uaauaccagacaaagagga

SEQ ID NO: 5753 - RNA, 19 nt, artificial
  Chemically synthesized
aacuuucauuuugccuguc

SEQ ID NO: 5754 - RNA, 19 nt, artificial
  Chemically synthesized
uuucacaaacacaauugca

SEQ ID NO: 5755 - RNA, 19 nt, artificial
  Chemically synthesized
uucacaaacacaauugcaa

SEQ ID NO: 5756 - RNA, 19 nt, artificial
  Chemically synthesized
acaaacacaauugcaaaag

SEQ ID NO: 5757 - RNA, 19 nt, artificial
  Chemically synthesized
aaaccuucauagucuuaag

SEQ ID NO: 5758 - RNA, 19 nt, artificial
  Chemically synthesized
guaccuguuaauaaaugcu

SEQ ID NO: 5759 - RNA, 19 nt, artificial
  Chemically synthesized
augcuaaauacuaagugcu

SEQ ID NO: 5760 - RNA, 19 nt, artificial
  Chemically synthesized
ugaagauagaaaaccuugg

SEQ ID NO: 5761 - RNA, 19 nt, artificial
  Chemically synthesized
aagauagaaaaccuuggag

SEQ ID NO: 5762 - RNA, 19 nt, artificial
  Chemically synthesized
uagaaagggccaauauucu

SEQ ID NO: 5763 - RNA, 19 nt, artificial
  Chemically synthesized
uaaauagaugugcaauggu

SEQ ID NO: 5764 - RNA, 19 nt, artificial
  Chemically synthesized
aguaugacaaagaacaacu

SEQ ID NO: 5765 - RNA, 19 nt, artificial
  Chemically synthesized
accuccuucaauuauauuc

SEQ ID NO: 5766 - RNA, 19 nt, artificial
  Chemically synthesized
uucucucacucucccauuc

SEQ ID NO: 5767 - RNA, 19 nt, artificial
  Chemically synthesized
aaacauuuguggcuccaag

SEQ ID NO: 5768 - RNA, 19 nt, artificial
  Chemically synthesized
cuaacagugauuuagagac

SEQ ID NO: 5769 - RNA, 19 nt, artificial
  Chemically synthesized
cagugauuuagagacucuc

SEQ ID NO: 5770 - RNA, 19 nt, artificial
  Chemically synthesized
gauuuuuguuucuggguug

SEQ ID NO: 5771 - RNA, 19 nt, artificial
  Chemically synthesized
aaugaccauaucagauaca

SEQ ID NO: 5772 - RNA, 19 nt, artificial
  Chemically synthesized
aggagcaggacuagaugag

SEQ ID NO: 5773 - RNA, 19 nt, artificial
  Chemically synthesized
cuucaaauaagaaugugca

SEQ ID NO: 5774 - RNA, 19 nt, artificial
  Chemically synthesized
uucaaauaagaaugugcag

SEQ ID NO: 5775 - RNA, 19 nt, artificial
  Chemically synthesized
augugcagaacccuucagg

SEQ ID NO: 5776 - RNA, 19 nt, artificial
  Chemically synthesized
uuacccugcuguauuagua

SEQ ID NO: 5777 - RNA, 19 nt, artificial
  Chemically synthesized
aauauauagcuacuccuug

SEQ ID NO: 5778 - RNA, 19 nt, artificial
  Chemically synthesized
cugauuuugaggauucuga

SEQ ID NO: 5779 - RNA, 19 nt, artificial
  Chemically synthesized
caguuucauaaucuuaggg

SEQ ID NO: 5780 - RNA, 19 nt, artificial
  Chemically synthesized
aaucuuagggaaguuacug

SEQ ID NO: 5781 - RNA, 19 nt, artificial
  Chemically synthesized
aguuacugaaccuuuugau

SEQ ID NO: 5782 - RNA, 19 nt, artificial
  Chemically synthesized
uugauccuuucccuuuuga

SEQ ID NO: 5783 - RNA, 19 nt, artificial
  Chemically synthesized
uugaguccaagaaucuuuu

SEQ ID NO: 5784 - RNA, 19 nt, artificial
  Chemically synthesized
uuuguccauuuuuaagcag

SEQ ID NO: 5785 - RNA, 19 nt, artificial
  Chemically synthesized
uuguccauuuuuaagcagg

SEQ ID NO: 5786 - RNA, 19 nt, artificial
  Chemically synthesized
aacccacauuuauuuccuc

SEQ ID NO: 5787 - RNA, 19 nt, artificial
  Chemically synthesized
uuagaaguuuuccuuguug

SEQ ID NO: 5788 - RNA, 19 nt, artificial
  Chemically synthesized
uguugaaaaugaaaugcac

SEQ ID NO: 5789 - RNA, 19 nt, artificial
  Chemically synthesized
ucuuuuguuucaggccugu

SEQ ID NO: 5790 - RNA, 19 nt, artificial
  Chemically synthesized
uagauguuguagcugagga

SEQ ID NO: 5791 - RNA, 19 nt, artificial
  Chemically synthesized
uuguuccuuuccugcaucu

SEQ ID NO: 5792 - RNA, 19 nt, artificial
  Chemically synthesized
guuccuuuccugcaucugg

SEQ ID NO: 5793 - RNA, 19 nt, artificial
  Chemically synthesized
gacuugagaauggaugcga

SEQ ID NO: 5794 - RNA, 19 nt, artificial
  Chemically synthesized
aucaccaccucauagcuga

SEQ ID NO: 5795 - RNA, 19 nt, artificial
  Chemically synthesized
cagaaugacaaaaauggag

SEQ ID NO: 5796 - RNA, 19 nt, artificial
  Chemically synthesized
augucaguguaaaagggug

SEQ ID NO: 5797 - RNA, 19 nt, artificial
  Chemically synthesized
uaaaagaacuuagguggaa

SEQ ID NO: 5798 - RNA, 19 nt, artificial
  Chemically synthesized
agauacagaaacaugggac

SEQ ID NO: 5799 - RNA, 19 nt, artificial
  Chemically synthesized
auacagaaacaugggaccc

SEQ ID NO: 5800 - RNA, 19 nt, artificial
  Chemically synthesized
uagguggaauaucauaaac

SEQ ID NO: 5801 - RNA, 19 nt, artificial
  Chemically synthesized
guggaauaucauaaacccg

SEQ ID NO: 5802 - RNA, 19 nt, artificial
  Chemically synthesized
uuaugcacagccaaacucu

SEQ ID NO: 5803 - RNA, 19 nt, artificial
  Chemically synthesized
uguguaccaaaagacuuca

SEQ ID NO: 5804 - RNA, 19 nt, artificial
  Chemically synthesized
augacaacuccagugaugc

SEQ ID NO: 5805 - RNA, 19 nt, artificial
  Chemically synthesized
acuuucauuuugccugucu

SEQ ID NO: 5806 - RNA, 19 nt, artificial
  Chemically synthesized
uugccugucuccaaguuca

SEQ ID NO: 5807 - RNA, 19 nt, artificial
  Chemically synthesized
ugcuacugaauaaggauca

SEQ ID NO: 5808 - RNA, 19 nt, artificial
  Chemically synthesized
agaauuaucucccaggucc

SEQ ID NO: 5809 - RNA, 19 nt, artificial
  Chemically synthesized
aaccuucauagucuuaaga

SEQ ID NO: 5810 - RNA, 19 nt, artificial
  Chemically synthesized
ugcuucaucauucuuagag

SEQ ID NO: 5811 - RNA, 19 nt, artificial
  Chemically synthesized
uucaucauucuuagaguac

SEQ ID NO: 5812 - RNA, 19 nt, artificial
  Chemically synthesized
aucauucuuagaguaccug

SEQ ID NO: 5813 - RNA, 19 nt, artificial
  Chemically synthesized
aacaaaugaagcugguuuu

SEQ ID NO: 5814 - RNA, 19 nt, artificial
  Chemically synthesized
ugacucauaguaauaacac

SEQ ID NO: 5815 - RNA, 19 nt, artificial
  Chemically synthesized
accuaagugucucuaagca

SEQ ID NO: 5816 - RNA, 19 nt, artificial
  Chemically synthesized
cucuaagcagaaaccaucc

SEQ ID NO: 5817 - RNA, 19 nt, artificial
  Chemically synthesized
gaaaggaauaguaguauga

SEQ ID NO: 5818 - RNA, 19 nt, artificial
  Chemically synthesized
aaggaauaguaguaugaca

SEQ ID NO: 5819 - RNA, 19 nt, artificial
  Chemically synthesized
guauguguauaccuccuuc

SEQ ID NO: 5820 - RNA, 19 nt, artificial
  Chemically synthesized
cuuuucuccuuauuuccuu

SEQ ID NO: 5821 - RNA, 19 nt, artificial
  Chemically synthesized
uuuuccuccuaaaccaguc

SEQ ID NO: 5822 - RNA, 19 nt, artificial
  Chemically synthesized
uccuucuuccucauuaccg

SEQ ID NO: 5823 - RNA, 19 nt, artificial
  Chemically synthesized
cauuaccgaaguugaagag

SEQ ID NO: 5824 - RNA, 19 nt, artificial
  Chemically synthesized
ugaagugcaaucauccaug

SEQ ID NO: 5825 - RNA, 19 nt, artificial
  Chemically synthesized
aacauuuguggcuccaagg

SEQ ID NO: 5826 - RNA, 19 nt, artificial
  Chemically synthesized
acauuuguggcuccaaggg

SEQ ID NO: 5827 - RNA, 19 nt, artificial
  Chemically synthesized
acuauugagugugaauuug

SEQ ID NO: 5828 - RNA, 19 nt, artificial
  Chemically synthesized
augaccauaucagauacau

SEQ ID NO: 5829 - RNA, 19 nt, artificial
  Chemically synthesized
auuugucacaauuccuaag

SEQ ID NO: 5830 - RNA, 19 nt, artificial
  Chemically synthesized
aaggagcaggacuagauga

SEQ ID NO: 5831 - RNA, 19 nt, artificial
  Chemically synthesized
aauucuccaccuccaaccc

SEQ ID NO: 5832 - RNA, 19 nt, artificial
  Chemically synthesized
caugcuucaaauaagaaug

SEQ ID NO: 5833 - RNA, 19 nt, artificial
  Chemically synthesized
gguaaaugaugaguauuac

SEQ ID NO: 5834 - RNA, 19 nt, artificial
  Chemically synthesized
uugguuuccuucuucuuuu

SEQ ID NO: 5835 - RNA, 19 nt, artificial
  Chemically synthesized
ugguuuccuucuucuuuug

SEQ ID NO: 5836 - RNA, 19 nt, artificial
  Chemically synthesized
uugaggauucugaggcagc

SEQ ID NO: 5837 - RNA, 19 nt, artificial
  Chemically synthesized
ggaaagaguaucaaaccug

SEQ ID NO: 5838 - RNA, 19 nt, artificial
  Chemically synthesized
uaucaaaccuggaguaaga

SEQ ID NO: 5839 - RNA, 19 nt, artificial
  Chemically synthesized
acaguuucauaaucuuagg

SEQ ID NO: 5840 - RNA, 19 nt, artificial
  Chemically synthesized
aguuucauaaucuuaggga

SEQ ID NO: 5841 - RNA, 19 nt, artificial
  Chemically synthesized
uuuugauccuuucccuuuu

SEQ ID NO: 5842 - RNA, 19 nt, artificial
  Chemically synthesized
guccaagaaucuuuucccu

SEQ ID NO: 5843 - RNA, 19 nt, artificial
  Chemically synthesized
uuucccuaacuuccacuga

SEQ ID NO: 5844 - RNA, 19 nt, artificial
  Chemically synthesized
agugcucucaaaaccauag

SEQ ID NO: 5845 - RNA, 19 nt, artificial
  Chemically synthesized
ucaaaaccauagagcucca

SEQ ID NO: 5846 - RNA, 19 nt, artificial
  Chemically synthesized
caaaaccauagagcuccac

SEQ ID NO: 5847 - RNA, 19 nt, artificial
  Chemically synthesized
uucgacagacuggcaagag

SEQ ID NO: 5848 - RNA, 19 nt, artificial
  Chemically synthesized
caacccacauuuauuuccu

SEQ ID NO: 5849 - RNA, 19 nt, artificial
  Chemically synthesized
cagacuggcaagagaauca

SEQ ID NO: 5850 - RNA, 19 nt, artificial
  Chemically synthesized
aagccggcauuguuccuuu

SEQ ID NO: 5851 - RNA, 19 nt, artificial
  Chemically synthesized
auauuuguaccagacugac

SEQ ID NO: 5852 - RNA, 19 nt, artificial
  Chemically synthesized
uuuguaccagacugacuug

SEQ ID NO: 5853 - RNA, 19 nt, artificial
  Chemically synthesized
gauacuaaagaagucuucc

SEQ ID NO: 5854 - RNA, 19 nt, artificial
  Chemically synthesized
uaaagaagucuuccucagg

SEQ ID NO: 5855 - RNA, 19 nt, artificial
  Chemically synthesized
gucaguguaaaagggugcc

SEQ ID NO: 5856 - RNA, 19 nt, artificial
  Chemically synthesized
guguaaaagaacuuaggug

SEQ ID NO: 5857 - RNA, 19 nt, artificial
  Chemically synthesized
uucuucuucaucuguagcu

SEQ ID NO: 5858 - RNA, 19 nt, artificial
  Chemically synthesized
augaccaccuucuguugag

SEQ ID NO: 5859 - RNA, 19 nt, artificial
  Chemically synthesized
accuucuguugagaucgcc

SEQ ID NO: 5860 - RNA, 19 nt, artificial
  Chemically synthesized
gaacuuagguggaauauca

SEQ ID NO: 5861 - RNA, 19 nt, artificial
  Chemically synthesized
agagauacagaaacauggg

SEQ ID NO: 5862 - RNA, 19 nt, artificial
  Chemically synthesized
gauacagaaacaugggacc

SEQ ID NO: 5863 - RNA, 19 nt, artificial
  Chemically synthesized
auauuaugcacagccaaac

SEQ ID NO: 5864 - RNA, 19 nt, artificial
  Chemically synthesized
augaagaagaucacaaaga

SEQ ID NO: 5865 - RNA, 19 nt, artificial
  Chemically synthesized
aagaagaucacaaagagau

SEQ ID NO: 5866 - RNA, 19 nt, artificial
  Chemically synthesized
gaagaucacaaagagauga

SEQ ID NO: 5867 - RNA, 19 nt, artificial
  Chemically synthesized
guguguaccaaaagacuuc

SEQ ID NO: 5868 - RNA, 19 nt, artificial
  Chemically synthesized
gauaacuuucauuuugccu

SEQ ID NO: 5869 - RNA, 19 nt, artificial
  Chemically synthesized
ugacaaaaauggagagccc

SEQ ID NO: 5870 - RNA, 19 nt, artificial
  Chemically synthesized
ucaucauucuuagaguacc

SEQ ID NO: 5871 - RNA, 19 nt, artificial
  Chemically synthesized
uugaagauagaaaaccuug

SEQ ID NO: 5872 - RNA, 19 nt, artificial
  Chemically synthesized
accauuccacauuaaauag

SEQ ID NO: 5873 - RNA, 19 nt, artificial
  Chemically synthesized
gaaacaauaaacagagccu

SEQ ID NO: 5874 - RNA, 19 nt, artificial
  Chemically synthesized
aauagaugugcaauggugu

SEQ ID NO: 5875 - RNA, 19 nt, artificial
  Chemically synthesized
ucuaagcagaaaccauccu

SEQ ID NO: 5876 - RNA, 19 nt, artificial
  Chemically synthesized
uuugucagaccuacccuca

SEQ ID NO: 5877 - RNA, 19 nt, artificial
  Chemically synthesized
aaaggaauaguaguaugac

SEQ ID NO: 5878 - RNA, 19 nt, artificial
  Chemically synthesized
ugacaaagaacaacugagu

SEQ ID NO: 5879 - RNA, 19 nt, artificial
  Chemically synthesized
caucaaaauuugugaccag

SEQ ID NO: 5880 - RNA, 19 nt, artificial
  Chemically synthesized
aucaaaauuugugaccaga

SEQ ID NO: 5881 - RNA, 19 nt, artificial
  Chemically synthesized
uuuccuccuaaaccagucu

SEQ ID NO: 5882 - RNA, 19 nt, artificial
  Chemically synthesized
uucuccuucuuccucauua

SEQ ID NO: 5883 - RNA, 19 nt, artificial
  Chemically synthesized
ucuccuucuuccucauuac

SEQ ID NO: 5884 - RNA, 19 nt, artificial
  Chemically synthesized
uucuuccucauuaccgaag

SEQ ID NO: 5885 - RNA, 19 nt, artificial
  Chemically synthesized
uuaccgaaguugaagaguu

SEQ ID NO: 5886 - RNA, 19 nt, artificial
  Chemically synthesized
gugugaauuugaucucugu

SEQ ID NO: 5887 - RNA, 19 nt, artificial
  Chemically synthesized
aaugugcagaacccuucag

SEQ ID NO: 5888 - RNA, 19 nt, artificial
  Chemically synthesized
uuagccuguucuugacccu

SEQ ID NO: 5889 - RNA, 19 nt, artificial
  Chemically synthesized
caagcacagugguaaauga

SEQ ID NO: 5890 - RNA, 19 nt, artificial
  Chemically synthesized
cacagugguaaaugaugag

SEQ ID NO: 5891 - RNA, 19 nt, artificial
  Chemically synthesized
ucaauccaauauucuucug

SEQ ID NO: 5892 - RNA, 19 nt, artificial
  Chemically synthesized
gauuuugaggauucugagg

SEQ ID NO: 5893 - RNA, 19 nt, artificial
  Chemically synthesized
cacaguuucauaaucuuag

SEQ ID NO: 5894 - RNA, 19 nt, artificial
  Chemically synthesized
aaauugaguccaagaaucu

SEQ ID NO: 5895 - RNA, 19 nt, artificial
  Chemically synthesized
uucccuaacuuccacugac

SEQ ID NO: 5896 - RNA, 19 nt, artificial
  Chemically synthesized
uguccauuuuuaagcaggg

SEQ ID NO: 5897 - RNA, 19 nt, artificial
  Chemically synthesized
acccacauuuauuuccuca

SEQ ID NO: 5898 - RNA, 19 nt, artificial
  Chemically synthesized
auggaagagacaaguuaga

SEQ ID NO: 5899 - RNA, 19 nt, artificial
  Chemically synthesized
aaguuagaaguuuuccuug

SEQ ID NO: 5900 - RNA, 19 nt, artificial
  Chemically synthesized
aguuagaaguuuuccuugu

SEQ ID NO: 5901 - RNA, 19 nt, artificial
  Chemically synthesized
uagaaguuuuccuuguuga

SEQ ID NO: 5902 - RNA, 19 nt, artificial
  Chemically synthesized
gaucacaucuuucuccuca

SEQ ID NO: 5903 - RNA, 19 nt, artificial
  Chemically synthesized
agguagauguuguagcuga

SEQ ID NO: 5904 - RNA, 19 nt, artificial
  Chemically synthesized
cugcaaaccacucaaaggc

SEQ ID NO: 5905 - RNA, 19 nt, artificial
  Chemically synthesized
aaaccacucaaaggcaugu

SEQ ID NO: 5906 - RNA, 19 nt, artificial
  Chemically synthesized
auuuguaccagacugacuu

SEQ ID NO: 5907 - RNA, 19 nt, artificial
  Chemically synthesized
agacugacuugagaaugga

SEQ ID NO: 5908 - RNA, 19 nt, artificial
  Chemically synthesized
gagaauggaugcgaagggu

SEQ ID NO: 5909 - RNA, 19 nt, artificial
  Chemically synthesized
aacacaucuucacuggcag

SEQ ID NO: 5910 - RNA, 19 nt, artificial
  Chemically synthesized
auguauugucccacuucca

SEQ ID NO: 5911 - RNA, 19 nt, artificial
  Chemically synthesized
ugucccacuuccauuuuga

SEQ ID NO: 5912 - RNA, 19 nt, artificial
  Chemically synthesized
ccacuuccauuuugaaccc

SEQ ID NO: 5913 - RNA, 19 nt, artificial
  Chemically synthesized
uuuugaaagggugagugac

SEQ ID NO: 5914 - RNA, 19 nt, artificial
  Chemically synthesized
gagauacagaaacauggga

SEQ ID NO: 5915 - RNA, 19 nt, artificial
  Chemically synthesized
uacagaaacaugggaccca

SEQ ID NO: 5916 - RNA, 19 nt, artificial
  Chemically synthesized
uccauuuccaagucauagg

SEQ ID NO: 5917 - RNA, 19 nt, artificial
  Chemically synthesized
ugaagaagaucacaaagag

SEQ ID NO: 5918 - RNA, 19 nt, artificial
  Chemically synthesized
gauguguguaccaaaagac

SEQ ID NO: 5919 - RNA, 19 nt, artificial
  Chemically synthesized
agcgugaugacaacuccag

SEQ ID NO: 5920 - RNA, 19 nt, artificial
  Chemically synthesized
uccaaguucagagagugcu

SEQ ID NO: 5921 - RNA, 19 nt, artificial
  Chemically synthesized
uucuuagaguaccuguuaa

SEQ ID NO: 5922 - RNA, 19 nt, artificial
  Chemically synthesized
ucucauaacuggauaacac

SEQ ID NO: 5923 - RNA, 19 nt, artificial
  Chemically synthesized
agaaagggccaauauucuc

SEQ ID NO: 5924 - RNA, 19 nt, artificial
  Chemically synthesized
cucuccaguucauacuuug

SEQ ID NO: 5925 - RNA, 19 nt, artificial
  Chemically synthesized
uuaguucauccuagucccu

SEQ ID NO: 5926 - RNA, 19 nt, artificial
  Chemically synthesized
aguucauccuagucccuug

SEQ ID NO: 5927 - RNA, 19 nt, artificial
  Chemically synthesized
ugugaccagauuuuaaaag

SEQ ID NO: 5928 - RNA, 19 nt, artificial
  Chemically synthesized
gugaccagauuuuaaaaga

SEQ ID NO: 5929 - RNA, 19 nt, artificial
  Chemically synthesized
ccuccuucaauuauauucu

SEQ ID NO: 5930 - RNA, 19 nt, artificial
  Chemically synthesized
auuuucucucacucuccca

SEQ ID NO: 5931 - RNA, 19 nt, artificial
  Chemically synthesized
auuaccgaaguugaagagu

SEQ ID NO: 5932 - RNA, 19 nt, artificial
  Chemically synthesized
uaaaacugguuuuaguucc

SEQ ID NO: 5933 - RNA, 19 nt, artificial
  Chemically synthesized
agugugaauuugaucucug

SEQ ID NO: 5934 - RNA, 19 nt, artificial
  Chemically synthesized
aacaaaugaccauaucaga

SEQ ID NO: 5935 - RNA, 19 nt, artificial
  Chemically synthesized
uugucacaauuccuaaguu

SEQ ID NO: 5936 - RNA, 19 nt, artificial
  Chemically synthesized
cuuagccuguucuugaccc

SEQ ID NO: 5937 - RNA, 19 nt, artificial
  Chemically synthesized
acagugguaaaugaugagu

SEQ ID NO: 5938 - RNA, 19 nt, artificial
  Chemically synthesized
uccaaucaauccaauauuc

SEQ ID NO: 5939 - RNA, 19 nt, artificial
  Chemically synthesized
agaaagaacaucuggccca

SEQ ID NO: 5940 - RNA, 19 nt, artificial
  Chemically synthesized
uugucuucgaacucuuguu

SEQ ID NO: 5941 - RNA, 19 nt, artificial
  Chemically synthesized
augcucagaugucaauacu

SEQ ID NO: 5942 - RNA, 19 nt, artificial
  Chemically synthesized
aucuggaaaauuuccuuca

SEQ ID NO: 5943 - RNA, 19 nt, artificial
  Chemically synthesized
aaugauggcaaaaaugaca

SEQ ID NO: 5944 - RNA, 19 nt, artificial
  Chemically synthesized
ugaaccuuuugauccuuuc

SEQ ID NO: 5945 - RNA, 19 nt, artificial
  Chemically synthesized
accuuuugauccuuucccu

SEQ ID NO: 5946 - RNA, 19 nt, artificial
  Chemically synthesized
auccuuucccuuuugauuc

SEQ ID NO: 5947 - RNA, 19 nt, artificial
  Chemically synthesized
uccuuucccuuuugauucu

SEQ ID NO: 5948 - RNA, 19 nt, artificial
  Chemically synthesized
uucuaaaauugaguccaag

SEQ ID NO: 5949 - RNA, 19 nt, artificial
  Chemically synthesized
aaaauugaguccaagaauc

SEQ ID NO: 5950 - RNA, 19 nt, artificial
  Chemically synthesized
aagaaucuuuucccuaacu

SEQ ID NO: 5951 - RNA, 19 nt, artificial
  Chemically synthesized
aucuuuucccuaacuucca

SEQ ID NO: 5952 - RNA, 19 nt, artificial
  Chemically synthesized
ucuuuucccuaacuuccac

SEQ ID NO: 5953 - RNA, 19 nt, artificial
  Chemically synthesized
uuccacugacauuacugag

SEQ ID NO: 5954 - RNA, 19 nt, artificial
  Chemically synthesized
uguuuguaaaagugcucuc

SEQ ID NO: 5955 - RNA, 19 nt, artificial
  Chemically synthesized
guuuguaaaagugcucuca

SEQ ID NO: 5956 - RNA, 19 nt, artificial
  Chemically synthesized
aaaagugcucucaaaacca

SEQ ID NO: 5957 - RNA, 19 nt, artificial
  Chemically synthesized
aaagugcucucaaaaccau

SEQ ID NO: 5958 - RNA, 19 nt, artificial
  Chemically synthesized
gacaaguuagaaguuuucc

SEQ ID NO: 5959 - RNA, 19 nt, artificial
  Chemically synthesized
gugaucacaucuuucuccu

SEQ ID NO: 5960 - RNA, 19 nt, artificial
  Chemically synthesized
uuuuugagcuucagauugg

SEQ ID NO: 5961 - RNA, 19 nt, artificial
  Chemically synthesized
caauauuuguaccagacug

SEQ ID NO: 5962 - RNA, 19 nt, artificial
  Chemically synthesized
cugacuugagaauggaugc

SEQ ID NO: 5963 - RNA, 19 nt, artificial
  Chemically synthesized
auagcugaacacaucuuca

SEQ ID NO: 5964 - RNA, 19 nt, artificial
  Chemically synthesized
cuaaagaagucuuccucag

SEQ ID NO: 5965 - RNA, 19 nt, artificial
  Chemically synthesized
agaaugacaaaaauggaga

SEQ ID NO: 5966 - RNA, 19 nt, artificial
  Chemically synthesized
gaaugacaaaaauggagag

SEQ ID NO: 5967 - RNA, 19 nt, artificial
  Chemically synthesized
caccuucuguugagaucgc

SEQ ID NO: 5968 - RNA, 19 nt, artificial
  Chemically synthesized
cuuagguggaauaucauaa

SEQ ID NO: 5969 - RNA, 19 nt, artificial
  Chemically synthesized
aggccaaugaagaagauca

SEQ ID NO: 5970 - RNA, 19 nt, artificial
  Chemically synthesized
cacagcgugaugacaacuc

SEQ ID NO: 5971 - RNA, 19 nt, artificial
  Chemically synthesized
gacaacuccagugaugccu

SEQ ID NO: 5972 - RNA, 19 nt, artificial
  Chemically synthesized
gagugcuacugaauaagga

SEQ ID NO: 5973 - RNA, 19 nt, artificial
  Chemically synthesized
caaugcuucaucauucuua

SEQ ID NO: 5974 - RNA, 19 nt, artificial
  Chemically synthesized
caucauucuuagaguaccu

SEQ ID NO: 5975 - RNA, 19 nt, artificial
  Chemically synthesized
gaagauagaaaaccuugga

SEQ ID NO: 5976 - RNA, 19 nt, artificial
  Chemically synthesized
auagaugugcaauggugug

SEQ ID NO: 5977 - RNA, 19 nt, artificial
  Chemically synthesized
gauucugggagacgaaagg

SEQ ID NO: 5978 - RNA, 19 nt, artificial
  Chemically synthesized
guucauccuagucccuuga

SEQ ID NO: 5979 - RNA, 19 nt, artificial
  Chemically synthesized
uuuucucucacucucccau

SEQ ID NO: 5980 - RNA, 19 nt, artificial
  Chemically synthesized
cuccuuauuuccuuuuccu

SEQ ID NO: 5981 - RNA, 19 nt, artificial
  Chemically synthesized
cuuauuuccuuuuccuccu

SEQ ID NO: 5982 - RNA, 19 nt, artificial
  Chemically synthesized
cucuuggccacacuaacag

SEQ ID NO: 5983 - RNA, 19 nt, artificial
  Chemically synthesized
uucauaagggcuagcugga

SEQ ID NO: 5984 - RNA, 19 nt, artificial
  Chemically synthesized
ucaaauaagaaugugcaga

SEQ ID NO: 5985 - RNA, 19 nt, artificial
  Chemically synthesized
uaguauccuuagccuguuc

SEQ ID NO: 5986 - RNA, 19 nt, artificial
  Chemically synthesized
augaucuggaaaauuuccu

SEQ ID NO: 5987 - RNA, 19 nt, artificial
  Chemically synthesized
gaucuggaaaauuuccuuc

SEQ ID NO: 5988 - RNA, 19 nt, artificial
  Chemically synthesized
uccuugguuuccuucuucu

SEQ ID NO: 5989 - RNA, 19 nt, artificial
  Chemically synthesized
uucauaaucuuagggaagu

SEQ ID NO: 5990 - RNA, 19 nt, artificial
  Chemically synthesized
gaaccuuuugauccuuucc

SEQ ID NO: 5991 - RNA, 19 nt, artificial
  Chemically synthesized
uaacuuccacugacauuac

SEQ ID NO: 5992 - RNA, 19 nt, artificial
  Chemically synthesized
cuuccacugacauuacuga

SEQ ID NO: 5993 - RNA, 19 nt, artificial
  Chemically synthesized
cacuaucaaacaaucuuug

SEQ ID NO: 5994 - RNA, 19 nt, artificial
  Chemically synthesized
aacaaucuuugacauuccu

SEQ ID NO: 5995 - RNA, 19 nt, artificial
  Chemically synthesized
cacaacccacauuuauuuc

SEQ ID NO: 5996 - RNA, 19 nt, artificial
  Chemically synthesized
agacaaguuagaaguuuuc

SEQ ID NO: 5997 - RNA, 19 nt, artificial
  Chemically synthesized
acaaagucuuuuguuucag

SEQ ID NO: 5998 - RNA, 19 nt, artificial
  Chemically synthesized
caaagucuuuuguuucagg

SEQ ID NO: 5999 - RNA, 19 nt, artificial
  Chemically synthesized
gugagguagauguuguagc

SEQ ID NO: 6000 - RNA, 19 nt, artificial
  Chemically synthesized
auuguuccuuuccugcauc

SEQ ID NO: 6001 - RNA, 19 nt, artificial
  Chemically synthesized
uugagaauggaugcgaagg

SEQ ID NO: 6002 - RNA, 19 nt, artificial
  Chemically synthesized
uugaaacuccugcuuauca

SEQ ID NO: 6003 - RNA, 19 nt, artificial
  Chemically synthesized
acgaugcggauauggauac

SEQ ID NO: 6004 - RNA, 19 nt, artificial
  Chemically synthesized
acuaaagaagucuuccuca

SEQ ID NO: 6005 - RNA, 19 nt, artificial
  Chemically synthesized
aaagaagucuuccucaggg

SEQ ID NO: 6006 - RNA, 19 nt, artificial
  Chemically synthesized
ucaguguaaaagggugcca

SEQ ID NO: 6007 - RNA, 19 nt, artificial
  Chemically synthesized
acuauccauuuccaaguca

SEQ ID NO: 6008 - RNA, 19 nt, artificial
  Chemically synthesized
auccauuuccaagucauag

SEQ ID NO: 6009 - RNA, 19 nt, artificial
  Chemically synthesized
uucauuuugccugucucca

SEQ ID NO: 6010 - RNA, 19 nt, artificial
  Chemically synthesized
auaccagacaaagaggaag

SEQ ID NO: 6011 - RNA, 19 nt, artificial
  Chemically synthesized
uaccagacaaagaggaaga

SEQ ID NO: 6012 - RNA, 19 nt, artificial
  Chemically synthesized
caaguucagagagugcuac

SEQ ID NO: 6013 - RNA, 19 nt, artificial
  Chemically synthesized
cagacaaagaggaagacgu

SEQ ID NO: 6014 - RNA, 19 nt, artificial
  Chemically synthesized
uagaauuaucucccagguc

SEQ ID NO: 6015 - RNA, 19 nt, artificial
  Chemically synthesized
cugcaaguauucaaauuuc

SEQ ID NO: 6016 - RNA, 19 nt, artificial
  Chemically synthesized
ggcauucacacaccauucc

SEQ ID NO: 6017 - RNA, 19 nt, artificial
  Chemically synthesized
cauucacacaccauuccac

SEQ ID NO: 6018 - RNA, 19 nt, artificial
  Chemically synthesized
uagaaaaccuuggagaaac

SEQ ID NO: 6019 - RNA, 19 nt, artificial
  Chemically synthesized
agaaaggcuauauucgcac

SEQ ID NO: 6020 - RNA, 19 nt, artificial
  Chemically synthesized
uuauuuccuuuuccuccua

SEQ ID NO: 6021 - RNA, 19 nt, artificial
  Chemically synthesized
uauuuccuuuuccuccuaa

SEQ ID NO: 6022 - RNA, 19 nt, artificial
  Chemically synthesized
uuccuuuuccuccuaaacc

SEQ ID NO: 6023 - RNA, 19 nt, artificial
  Chemically synthesized
uccuuuuccuccuaaacca

SEQ ID NO: 6024 - RNA, 19 nt, artificial
  Chemically synthesized
guauuuacggaaaauaagg

SEQ ID NO: 6025 - RNA, 19 nt, artificial
  Chemically synthesized
aauaagaaugugcagaacc

SEQ ID NO: 6026 - RNA, 19 nt, artificial
  Chemically synthesized
aacaucuggcccaguuacc

SEQ ID NO: 6027 - RNA, 19 nt, artificial
  Chemically synthesized
uuaguaaacuggaguaugc

SEQ ID NO: 6028 - RNA, 19 nt, artificial
  Chemically synthesized
uaaugauggcaaaaaugac

SEQ ID NO: 6029 - RNA, 19 nt, artificial
  Chemically synthesized
cuccuugguuuccuucuuc

SEQ ID NO: 6030 - RNA, 19 nt, artificial
  Chemically synthesized
acaaguuagaaguuuuccu

SEQ ID NO: 6031 - RNA, 19 nt, artificial
  Chemically synthesized
uccauacaaagucuuuugu

SEQ ID NO: 6032 - RNA, 19 nt, artificial
  Chemically synthesized
ugagguagauguuguagcu

SEQ ID NO: 6033 - RNA, 19 nt, artificial
  Chemically synthesized
ugcucccacuaacaucacc

SEQ ID NO: 6034 - RNA, 19 nt, artificial
  Chemically synthesized
uaacaucaccaccucauag

SEQ ID NO: 6035 - RNA, 19 nt, artificial
  Chemically synthesized
gaacacaucuucacuggca

SEQ ID NO: 6036 - RNA, 19 nt, artificial
  Chemically synthesized
augcggauauggauacuaa

SEQ ID NO: 6037 - RNA, 19 nt, artificial
  Chemically synthesized
gauauggauacuaaagaag

SEQ ID NO: 6038 - RNA, 19 nt, artificial
  Chemically synthesized
ggaugucaguguaaaaggg

SEQ ID NO: 6039 - RNA, 19 nt, artificial
  Chemically synthesized
caguguaaaagggugccac

SEQ ID NO: 6040 - RNA, 19 nt, artificial
  Chemically synthesized
cacuauccauuuccaaguc

SEQ ID NO: 6041 - RNA, 19 nt, artificial
  Chemically synthesized
aucauaaacccgguaauac

SEQ ID NO: 6042 - RNA, 19 nt, artificial
  Chemically synthesized
ugacaacuccagugaugcc

SEQ ID NO: 6043 - RNA, 19 nt, artificial
  Chemically synthesized
guaauaccagacaaagagg

SEQ ID NO: 6044 - RNA, 19 nt, artificial
  Chemically synthesized
accagacaaagaggaagac

SEQ ID NO: 6045 - RNA, 19 nt, artificial
  Chemically synthesized
guagaauuaucucccaggu

SEQ ID NO: 6046 - RNA, 19 nt, artificial
  Chemically synthesized
gaauuaucucccagguccc

SEQ ID NO: 6047 - RNA, 19 nt, artificial
  Chemically synthesized
aaagccugcaaguauucaa

SEQ ID NO: 6048 - RNA, 19 nt, artificial
  Chemically synthesized
ucauucuuagaguaccugu

SEQ ID NO: 6049 - RNA, 19 nt, artificial
  Chemically synthesized
gcuugagagauaaaaagga

SEQ ID NO: 6050 - RNA, 19 nt, artificial
  Chemically synthesized
cuugagagauaaaaaggaa

SEQ ID NO: 6051 - RNA, 19 nt, artificial
  Chemically synthesized
ugagagauaaaaaggaaac

SEQ ID NO: 6052 - RNA, 19 nt, artificial
  Chemically synthesized
aaaggcuauauucgcacag

SEQ ID NO: 6053 - RNA, 19 nt, artificial
  Chemically synthesized
ccuuauuuccuuuuccucc

SEQ ID NO: 6054 - RNA, 19 nt, artificial
  Chemically synthesized
aaaacugguuuuaguuccc

SEQ ID NO: 6055 - RNA, 19 nt, artificial
  Chemically synthesized
auucuccaccuccaacccu

SEQ ID NO: 6056 - RNA, 19 nt, artificial
  Chemically synthesized
uaagaaugugcagaacccu

SEQ ID NO: 6057 - RNA, 19 nt, artificial
  Chemically synthesized
agaacccuucaggcaaucc

SEQ ID NO: 6058 - RNA, 19 nt, artificial
  Chemically synthesized
auccuuagccuguucuuga

SEQ ID NO: 6059 - RNA, 19 nt, artificial
  Chemically synthesized
uccuuagccuguucuugac

SEQ ID NO: 6060 - RNA, 19 nt, artificial
  Chemically synthesized
agccuguucuugacccuag

SEQ ID NO: 6061 - RNA, 19 nt, artificial
  Chemically synthesized
gaaagaacaucuggcccag

SEQ ID NO: 6062 - RNA, 19 nt, artificial
  Chemically synthesized
cuguauuaguaaacuggag

SEQ ID NO: 6063 - RNA, 19 nt, artificial
  Chemically synthesized
cucaacauguauuaugucc

SEQ ID NO: 6064 - RNA, 19 nt, artificial
  Chemically synthesized
aaugaucuggaaaauuucc

SEQ ID NO: 6065 - RNA, 19 nt, artificial
  Chemically synthesized
caaaaaugacacaaaguag

SEQ ID NO: 6066 - RNA, 19 nt, artificial
  Chemically synthesized
aacuuccacugacauuacu

SEQ ID NO: 6067 - RNA, 19 nt, artificial
  Chemically synthesized
ucuuugacauuccuuuaag

SEQ ID NO: 6068 - RNA, 19 nt, artificial
  Chemically synthesized
uuucagccaaggcuucagg

SEQ ID NO: 6069 - RNA, 19 nt, artificial
  Chemically synthesized
auuaggguguugacuugca

SEQ ID NO: 6070 - RNA, 19 nt, artificial
  Chemically synthesized
guccauacaaagucuuuug

SEQ ID NO: 6071 - RNA, 19 nt, artificial
  Chemically synthesized
agugagguagauguuguag

SEQ ID NO: 6072 - RNA, 19 nt, artificial
  Chemically synthesized
gcauuccuuuauuuuuccc

SEQ ID NO: 6073 - RNA, 19 nt, artificial
  Chemically synthesized
uacaauucguucagcucca

SEQ ID NO: 6074 - RNA, 19 nt, artificial
  Chemically synthesized
agauagaaaaccuuggaga

SEQ ID NO: 6075 - RNA, 19 nt, artificial
  Chemically synthesized
aaggcuauauucgcacagc

SEQ ID NO: 6076 - RNA, 19 nt, artificial
  Chemically synthesized
uccuccuaaaccagucuuc

SEQ ID NO: 6077 - RNA, 19 nt, artificial
  Chemically synthesized
auaagggcuagcuggagaa

SEQ ID NO: 6078 - RNA, 19 nt, artificial
  Chemically synthesized
uuauagcacaaggagcagg

SEQ ID NO: 6079 - RNA, 19 nt, artificial
  Chemically synthesized
cuucaggcaauccuauugg

SEQ ID NO: 6080 - RNA, 19 nt, artificial
  Chemically synthesized
aguauccuuagccuguucu

SEQ ID NO: 6081 - RNA, 19 nt, artificial
  Chemically synthesized
uguauuaguaaacuggagu

SEQ ID NO: 6082 - RNA, 19 nt, artificial
  Chemically synthesized
auuauguccuaaugaucug

SEQ ID NO: 6083 - RNA, 19 nt, artificial
  Chemically synthesized
ugaucuggaaaauuuccuu

SEQ ID NO: 6084 - RNA, 19 nt, artificial
  Chemically synthesized
caaacaaucuuugacauuc

SEQ ID NO: 6085 - RNA, 19 nt, artificial
  Chemically synthesized
gaagagacaaguuagaagu

SEQ ID NO: 6086 - RNA, 19 nt, artificial
  Chemically synthesized
caaguuagaaguuuuccuu

SEQ ID NO: 6087 - RNA, 19 nt, artificial
  Chemically synthesized
ugcacagcaaagugauugg

SEQ ID NO: 6088 - RNA, 19 nt, artificial
  Chemically synthesized
cucccacuaacaucaccac

SEQ ID NO: 6089 - RNA, 19 nt, artificial
  Chemically synthesized
acagaaacaugggacccac

SEQ ID NO: 6090 - RNA, 19 nt, artificial
  Chemically synthesized
aacccgguaauaccagaca

SEQ ID NO: 6091 - RNA, 19 nt, artificial
  Chemically synthesized
auaacuggauaacacaggg

SEQ ID NO: 6092 - RNA, 19 nt, artificial
  Chemically synthesized
uaacuggauaacacagggc

SEQ ID NO: 6093 - RNA, 19 nt, artificial
  Chemically synthesized
uuccuccuaaaccagucuu

SEQ ID NO: 6094 - RNA, 19 nt, artificial
  Chemically synthesized
agcucuuucuccuucuucc

SEQ ID NO: 6095 - RNA, 19 nt, artificial
  Chemically synthesized
uuaggaugaugaugaugau

SEQ ID NO: 6096 - RNA, 19 nt, artificial
  Chemically synthesized
uuaguauccuuagccuguu

SEQ ID NO: 6097 - RNA, 19 nt, artificial
  Chemically synthesized
ugcuguauuaguaaacugg

SEQ ID NO: 6098 - RNA, 19 nt, artificial
  Chemically synthesized
uauguccuaaugaucugga

SEQ ID NO: 6099 - RNA, 19 nt, artificial
  Chemically synthesized
ugauggcaaaaaugacaca

SEQ ID NO: 6100 - RNA, 19 nt, artificial
  Chemically synthesized
acugagaggaaaaaaauga

SEQ ID NO: 6101 - RNA, 19 nt, artificial
  Chemically synthesized
augcuuuguuuacucaggg

SEQ ID NO: 6102 - RNA, 19 nt, artificial
  Chemically synthesized
ucaaaggcauguguguccc

SEQ ID NO: 6103 - RNA, 19 nt, artificial
  Chemically synthesized
uuguaccagacugacuuga

SEQ ID NO: 6104 - RNA, 19 nt, artificial
  Chemically synthesized
aucuuagguaguuuccacg

SEQ ID NO: 6105 - RNA, 19 nt, artificial
  Chemically synthesized
aucacagccacaagcauug

SEQ ID NO: 6106 - RNA, 19 nt, artificial
  Chemically synthesized
uucaucuguagcucgaugg

SEQ ID NO: 6107 - RNA, 19 nt, artificial
  Chemically synthesized
guacaauucguucagcucc

SEQ ID NO: 6108 - RNA, 19 nt, artificial
  Chemically synthesized
aauugcaaaagcagaagaa

SEQ ID NO: 6109 - RNA, 19 nt, artificial
  Chemically synthesized
auuagucacacagaugcga

SEQ ID NO: 6110 - RNA, 19 nt, artificial
  Chemically synthesized
aagaccacuuugggcagga

SEQ ID NO: 6111 - RNA, 19 nt, artificial
  Chemically synthesized
uugggcaggaaauuagucu

SEQ ID NO: 6112 - RNA, 19 nt, artificial
  Chemically synthesized
uuuauagcacaaggagcag

SEQ ID NO: 6113 - RNA, 19 nt, artificial
  Chemically synthesized
uauagcacaaggagcagga

SEQ ID NO: 6114 - RNA, 19 nt, artificial
  Chemically synthesized
uauucugguauuagggugu

SEQ ID NO: 6115 - RNA, 19 nt, artificial
  Chemically synthesized
cuccuuauaacugagguac

SEQ ID NO: 6116 - RNA, 19 nt, artificial
  Chemically synthesized
uaacugagguacccucucc

SEQ ID NO: 6117 - RNA, 19 nt, artificial
  Chemically synthesized
acaaagaggaagacguuca

SEQ ID NO: 6118 - RNA, 19 nt, artificial
  Chemically synthesized
aucaguauguguauaccuc

SEQ ID NO: 6119 - RNA, 19 nt, artificial
  Chemically synthesized
auuuagagacucucucuug

SEQ ID NO: 6120 - RNA, 19 nt, artificial
  Chemically synthesized
uuuagagacucucucuuga

SEQ ID NO: 6121 - RNA, 19 nt, artificial
  Chemically synthesized
uaaacuggaguaugcucag

SEQ ID NO: 6122 - RNA, 19 nt, artificial
  Chemically synthesized
uuuacucaggguuucagcc

SEQ ID NO: 6123 - RNA, 19 nt, artificial
  Chemically synthesized
uacucaggguuucagccaa

SEQ ID NO: 6124 - RNA, 19 nt, artificial
  Chemically synthesized
ucauuaucccaguugggcc

SEQ ID NO: 6125 - RNA, 19 nt, artificial
  Chemically synthesized
auggaugcgaaggguguga

SEQ ID NO: 6126 - RNA, 19 nt, artificial
  Chemically synthesized
uaucuuagguaguuuccac

SEQ ID NO: 6127 - RNA, 19 nt, artificial
  Chemically synthesized
ugacaaaaauguauugucc

SEQ ID NO: 6128 - RNA, 19 nt, artificial
  Chemically synthesized
aagaucacaaagagaugau

SEQ ID NO: 6129 - RNA, 19 nt, artificial
  Chemically synthesized
aaagggccaauauucucag

SEQ ID NO: 6130 - RNA, 19 nt, artificial
  Chemically synthesized
cauuagucacacagaugcg

SEQ ID NO: 6131 - RNA, 19 nt, artificial
  Chemically synthesized
uccuguccaguugucuucg

SEQ ID NO: 6132 - RNA, 19 nt, artificial
  Chemically synthesized
ucaacauguauuauguccu

SEQ ID NO: 6133 - RNA, 19 nt, artificial
  Chemically synthesized
uauuguggaaagaguauca

SEQ ID NO: 6134 - RNA, 19 nt, artificial
  Chemically synthesized
guuucagccaaggcuucag

SEQ ID NO: 6135 - RNA, 19 nt, artificial
  Chemically synthesized
uucauuaucccaguugggc

SEQ ID NO: 6136 - RNA, 19 nt, artificial
  Chemically synthesized
caguugaaauucaggcagg

SEQ ID NO: 6137 - RNA, 19 nt, artificial
  Chemically synthesized
auugcaauauuuguaccag

SEQ ID NO: 6138 - RNA, 19 nt, artificial
  Chemically synthesized
ucuuagguaguuuccacgc

SEQ ID NO: 6139 - RNA, 19 nt, artificial
  Chemically synthesized
uuggugaugaccaccuucu

SEQ ID NO: 6140 - RNA, 19 nt, artificial
  Chemically synthesized
ucugcccacguacaauucg

SEQ ID NO: 6141 - RNA, 19 nt, artificial
  Chemically synthesized
cugcccacguacaauucgu

SEQ ID NO: 6142 - RNA, 19 nt, artificial
  Chemically synthesized
acguacaauucguucagcu

SEQ ID NO: 6143 - RNA, 19 nt, artificial
  Chemically synthesized
gaucagaauuauugacucg

SEQ ID NO: 6144 - RNA, 19 nt, artificial
  Chemically synthesized
acaauugcaaaagcagaag

SEQ ID NO: 6145 - RNA, 19 nt, artificial
  Chemically synthesized
aacagagccugacucauag

SEQ ID NO: 6146 - RNA, 19 nt, artificial
  Chemically synthesized
cagaaaggcuauauucgca

SEQ ID NO: 6147 - RNA, 19 nt, artificial
  Chemically synthesized
ucaguauguguauaccucc

SEQ ID NO: 6148 - RNA, 19 nt, artificial
  Chemically synthesized
uuuuaguucccagaaaugg

SEQ ID NO: 6149 - RNA, 19 nt, artificial
  Chemically synthesized
gagaagaccacuuugggca

SEQ ID NO: 6150 - RNA, 19 nt, artificial
  Chemically synthesized
uuuuauagcacaaggagca

SEQ ID NO: 6151 - RNA, 19 nt, artificial
  Chemically synthesized
agaugagccagagucaugg

SEQ ID NO: 6152 - RNA, 19 nt, artificial
  Chemically synthesized
uucaggcaauccuauuggu

SEQ ID NO: 6153 - RNA, 19 nt, artificial
  Chemically synthesized
uguagaaagaacaucuggc

SEQ ID NO: 6154 - RNA, 19 nt, artificial
  Chemically synthesized
aacuggaguaugcucagau

SEQ ID NO: 6155 - RNA, 19 nt, artificial
  Chemically synthesized
aggaaggacagcagauuuc

SEQ ID NO: 6156 - RNA, 19 nt, artificial
  Chemically synthesized
uuaagggaaaaccauuaca

SEQ ID NO: 6157 - RNA, 19 nt, artificial
  Chemically synthesized
uuacucaggguuucagcca

SEQ ID NO: 6158 - RNA, 19 nt, artificial
  Chemically synthesized
guauuaggguguugacuug

SEQ ID NO: 6159 - RNA, 19 nt, artificial
  Chemically synthesized
auucauuaucccaguuggg

SEQ ID NO: 6160 - RNA, 19 nt, artificial
  Chemically synthesized
auuaucccaguugggccgu

SEQ ID NO: 6161 - RNA, 19 nt, artificial
  Chemically synthesized
gugcacagcaaagugauug

SEQ ID NO: 6162 - RNA, 19 nt, artificial
  Chemically synthesized
aaauucaggcaggcugcag

SEQ ID NO: 6163 - RNA, 19 nt, artificial
  Chemically synthesized
cuuagguaguuuccacgca

SEQ ID NO: 6164 - RNA, 19 nt, artificial
  Chemically synthesized
uguagcucgaugguuuuga

SEQ ID NO: 6165 - RNA, 19 nt, artificial
  Chemically synthesized
aggguuuccagcaaacuga

SEQ ID NO: 6166 - RNA, 19 nt, artificial
  Chemically synthesized
uuuauucucuuucgagcaa

SEQ ID NO: 6167 - RNA, 19 nt, artificial
  Chemically synthesized
aacuggauaacacagggca

SEQ ID NO: 6168 - RNA, 19 nt, artificial
  Chemically synthesized
agcugguuuuaauuaugca

SEQ ID NO: 6169 - RNA, 19 nt, artificial
  Chemically synthesized
acauagguuagaaagggcc

SEQ ID NO: 6170 - RNA, 19 nt, artificial
  Chemically synthesized
acuuugguguaaagaauug

SEQ ID NO: 6171 - RNA, 19 nt, artificial
  Chemically synthesized
ucagcaucaaaauuuguga

SEQ ID NO: 6172 - RNA, 19 nt, artificial
  Chemically synthesized
cagggaaugaccaauauga

SEQ ID NO: 6173 - RNA, 19 nt, artificial
  Chemically synthesized
uuuaguucccagaaauggg

SEQ ID NO: 6174 - RNA, 19 nt, artificial
  Chemically synthesized
aaugggagcaguucuaaga

SEQ ID NO: 6175 - RNA, 19 nt, artificial
  Chemically synthesized
uagagauuuuuguuucugg

SEQ ID NO: 6176 - RNA, 19 nt, artificial
  Chemically synthesized
ucagauacauauuugucac

SEQ ID NO: 6177 - RNA, 19 nt, artificial
  Chemically synthesized
accauuuuaugaaagguga

SEQ ID NO: 6178 - RNA, 19 nt, artificial
  Chemically synthesized
uaugaaaggugagauuccu

SEQ ID NO: 6179 - RNA, 19 nt, artificial
  Chemically synthesized
auccuauugguuaguaucc

SEQ ID NO: 6180 - RNA, 19 nt, artificial
  Chemically synthesized
aaaacuuacuugaguaucc

SEQ ID NO: 6181 - RNA, 19 nt, artificial
  Chemically synthesized
guaaacuggaguaugcuca

SEQ ID NO: 6182 - RNA, 19 nt, artificial
  Chemically synthesized
uaaguguugagacacucuc

SEQ ID NO: 6183 - RNA, 19 nt, artificial
  Chemically synthesized
auguccuaaugaucuggaa

SEQ ID NO: 6184 - RNA, 19 nt, artificial
  Chemically synthesized
aucuuagggaaguuacuga

SEQ ID NO: 6185 - RNA, 19 nt, artificial
  Chemically synthesized
cugagaggaaaaaaaugaa

SEQ ID NO: 6186 - RNA, 19 nt, artificial
  Chemically synthesized
gacucagaguuggagaugc

SEQ ID NO: 6187 - RNA, 19 nt, artificial
  Chemically synthesized
aaaacuccuauucugguau

SEQ ID NO: 6188 - RNA, 19 nt, artificial
  Chemically synthesized
aacuccuauucugguauua

SEQ ID NO: 6189 - RNA, 19 nt, artificial
  Chemically synthesized
uucuccucaucauggugca

SEQ ID NO: 6190 - RNA, 19 nt, artificial
  Chemically synthesized
acagcaaagugauuggccu

SEQ ID NO: 6191 - RNA, 19 nt, artificial
  Chemically synthesized
aucaaccgcuaucuuaggu

SEQ ID NO: 6192 - RNA, 19 nt, artificial
  Chemically synthesized
caaccgcuaucuuagguag

SEQ ID NO: 6193 - RNA, 19 nt, artificial
  Chemically synthesized
ugaaacuccugcuuaucac

SEQ ID NO: 6194 - RNA, 19 nt, artificial
  Chemically synthesized
aaacuccugcuuaucacag

SEQ ID NO: 6195 - RNA, 19 nt, artificial
  Chemically synthesized
uaaaagggugccacuccag

SEQ ID NO: 6196 - RNA, 19 nt, artificial
  Chemically synthesized
uuuccagcaaacugaggga

SEQ ID NO: 6197 - RNA, 19 nt, artificial
  Chemically synthesized
accuccggaugguuuuggu

SEQ ID NO: 6198 - RNA, 19 nt, artificial
  Chemically synthesized
gagauaacuuucauuuugc

SEQ ID NO: 6199 - RNA, 19 nt, artificial
  Chemically synthesized
ucagacuccuuauaacuga

SEQ ID NO: 6200 - RNA, 19 nt, artificial
  Chemically synthesized
agacuccuuauaacugagg

SEQ ID NO: 6201 - RNA, 19 nt, artificial
  Chemically synthesized
uucauacuuugguguaaag

SEQ ID NO: 6202 - RNA, 19 nt, artificial
  Chemically synthesized
caacugaguucuuauuuag

SEQ ID NO: 6203 - RNA, 19 nt, artificial
  Chemically synthesized
aaacaacaucaguaugugu

SEQ ID NO: 6204 - RNA, 19 nt, artificial
  Chemically synthesized
aacaucaguauguguauac

SEQ ID NO: 6205 - RNA, 19 nt, artificial
  Chemically synthesized
uuaguucccagaaauggga

SEQ ID NO: 6206 - RNA, 19 nt, artificial
  Chemically synthesized
gggcaggaaauuagucugc

SEQ ID NO: 6207 - RNA, 19 nt, artificial
  Chemically synthesized
augagccagagucauggca

SEQ ID NO: 6208 - RNA, 19 nt, artificial
  Chemically synthesized
cauggcaggagguuaauuc

SEQ ID NO: 6209 - RNA, 19 nt, artificial
  Chemically synthesized
aaggugagauuccugucca

SEQ ID NO: 6210 - RNA, 19 nt, artificial
  Chemically synthesized
uuccuuuggucuaugacag

SEQ ID NO: 6211 - RNA, 19 nt, artificial
  Chemically synthesized
aaacuuacuugaguauccg

SEQ ID NO: 6212 - RNA, 19 nt, artificial
  Chemically synthesized
ugaguauuacauuaacucc

SEQ ID NO: 6213 - RNA, 19 nt, artificial
  Chemically synthesized
uaguaaacuggaguaugcu

SEQ ID NO: 6214 - RNA, 19 nt, artificial
  Chemically synthesized
ucuggaaaauuuccuucag

SEQ ID NO: 6215 - RNA, 19 nt, artificial
  Chemically synthesized
guuuccuucuucuuuuggg

SEQ ID NO: 6216 - RNA, 19 nt, artificial
  Chemically synthesized
uucugaggcagcucaguau

SEQ ID NO: 6217 - RNA, 19 nt, artificial
  Chemically synthesized
aaccuggaguaagaugggc

SEQ ID NO: 6218 - RNA, 19 nt, artificial
  Chemically synthesized
ugauucuaaaauugagucc

SEQ ID NO: 6219 - RNA, 19 nt, artificial
  Chemically synthesized
uaagggaaaaccauuacau

SEQ ID NO: 6220 - RNA, 19 nt, artificial
  Chemically synthesized
cuauucugguauuagggug

SEQ ID NO: 6221 - RNA, 19 nt, artificial
  Chemically synthesized
auucugguauuaggguguu

SEQ ID NO: 6222 - RNA, 19 nt, artificial
  Chemically synthesized
auggugcacagcaaaguga

SEQ ID NO: 6223 - RNA, 19 nt, artificial
  Chemically synthesized
cuuuccugcaucuggcucu

SEQ ID NO: 6224 - RNA, 19 nt, artificial
  Chemically synthesized
uuuccugcaucuggcucuc

SEQ ID NO: 6225 - RNA, 19 nt, artificial
  Chemically synthesized
auaggaggguuuccagcaa

SEQ ID NO: 6226 - RNA, 19 nt, artificial
  Chemically synthesized
guuuccagcaaacugaggg

SEQ ID NO: 6227 - RNA, 19 nt, artificial
  Chemically synthesized
auugggcauuccuuuauuu

SEQ ID NO: 6228 - RNA, 19 nt, artificial
  Chemically synthesized
aaacccgguaauaccagac

SEQ ID NO: 6229 - RNA, 19 nt, artificial
  Chemically synthesized
aguaagaccuccggauggu

SEQ ID NO: 6230 - RNA, 19 nt, artificial
  Chemically synthesized
aaacacaauugcaaaagca

SEQ ID NO: 6231 - RNA, 19 nt, artificial
  Chemically synthesized
cuuggagaaacacucucgg

SEQ ID NO: 6232 - RNA, 19 nt, artificial
  Chemically synthesized
auagguuagaaagggccaa

SEQ ID NO: 6233 - RNA, 19 nt, artificial
  Chemically synthesized
aagggccaauauucucaga

SEQ ID NO: 6234 - RNA, 19 nt, artificial
  Chemically synthesized
gacuccuuauaacugaggu

SEQ ID NO: 6235 - RNA, 19 nt, artificial
  Chemically synthesized
ccacauuaaauagaugugc

SEQ ID NO: 6236 - RNA, 19 nt, artificial
  Chemically synthesized
agcaggccuuauuugucag

SEQ ID NO: 6237 - RNA, 19 nt, artificial
  Chemically synthesized
cugaguucuuauuuaguuc

SEQ ID NO: 6238 - RNA, 19 nt, artificial
  Chemically synthesized
aaaacaacaucaguaugug

SEQ ID NO: 6239 - RNA, 19 nt, artificial
  Chemically synthesized
caguauguguauaccuccu

SEQ ID NO: 6240 - RNA, 19 nt, artificial
  Chemically synthesized
agaaaacccugcucuuggc

SEQ ID NO: 6241 - RNA, 19 nt, artificial
  Chemically synthesized
caccauuuuaugaaaggug

SEQ ID NO: 6242 - RNA, 19 nt, artificial
  Chemically synthesized
cauuuuaugaaaggugaga

SEQ ID NO: 6243 - RNA, 19 nt, artificial
  Chemically synthesized
ugggcaggaaauuagucug

SEQ ID NO: 6244 - RNA, 19 nt, artificial
  Chemically synthesized
caggagguuaauucuccac

SEQ ID NO: 6245 - RNA, 19 nt, artificial
  Chemically synthesized
auugguuaguauccuuagc

SEQ ID NO: 6246 - RNA, 19 nt, artificial
  Chemically synthesized
gaguauuacauuaacucca

SEQ ID NO: 6247 - RNA, 19 nt, artificial
  Chemically synthesized
cugcuguauuaguaaacug

SEQ ID NO: 6248 - RNA, 19 nt, artificial
  Chemically synthesized
aaacuggaguaugcucaga

SEQ ID NO: 6249 - RNA, 19 nt, artificial
  Chemically synthesized
ugcuuuguuuacucagggu

SEQ ID NO: 6250 - RNA, 19 nt, artificial
  Chemically synthesized
aaagucuuuuguuucaggc

SEQ ID NO: 6251 - RNA, 19 nt, artificial
  Chemically synthesized
aguugaaauucaggcaggc

SEQ ID NO: 6252 - RNA, 19 nt, artificial
  Chemically synthesized
uuuugagcuucagauuggu

SEQ ID NO: 6253 - RNA, 19 nt, artificial
  Chemically synthesized
cacaagcauugaacagccc

SEQ ID NO: 6254 - RNA, 19 nt, artificial
  Chemically synthesized
cucgaugguuuugaaaggg

SEQ ID NO: 6255 - RNA, 19 nt, artificial
  Chemically synthesized
aacaugggacccacuaucc

SEQ ID NO: 6256 - RNA, 19 nt, artificial
  Chemically synthesized
cuguuauauuaugcacagc

SEQ ID NO: 6257 - RNA, 19 nt, artificial
  Chemically synthesized
aauaugaggcacagcguga

SEQ ID NO: 6258 - RNA, 19 nt, artificial
  Chemically synthesized
uuauaacugagguacccuc

SEQ ID NO: 6259 - RNA, 19 nt, artificial
  Chemically synthesized
acaggcuggaccuaagugu

SEQ ID NO: 6260 - RNA, 19 nt, artificial
  Chemically synthesized
cagcaggccuuauuuguca

SEQ ID NO: 6261 - RNA, 19 nt, artificial
  Chemically synthesized
caggccuuauuugucagac

SEQ ID NO: 6262 - RNA, 19 nt, artificial
  Chemically synthesized
cagcaucaaaauuugugac

SEQ ID NO: 6263 - RNA, 19 nt, artificial
  Chemically synthesized
gagugaagugcaaucaucc

SEQ ID NO: 6264 - RNA, 19 nt, artificial
  Chemically synthesized
gaagugcaaucauccaugc

SEQ ID NO: 6265 - RNA, 19 nt, artificial
  Chemically synthesized
aaacugguuuuaguuccca

SEQ ID NO: 6266 - RNA, 19 nt, artificial
  Chemically synthesized
aaaacccugcucuuggcca

SEQ ID NO: 6267 - RNA, 19 nt, artificial
  Chemically synthesized
uugagugugaauuugaucu

SEQ ID NO: 6268 - RNA, 19 nt, artificial
  Chemically synthesized
ccauuagucacacagaugc

SEQ ID NO: 6269 - RNA, 19 nt, artificial
  Chemically synthesized
uuuuguguguguauuuacg

SEQ ID NO: 6270 - RNA, 19 nt, artificial
  Chemically synthesized
uuuguguguguauuuacgg

SEQ ID NO: 6271 - RNA, 19 nt, artificial
  Chemically synthesized
cuggagaagaccacuuugg

SEQ ID NO: 6272 - RNA, 19 nt, artificial
  Chemically synthesized
augaaaggugagauuccug

SEQ ID NO: 6273 - RNA, 19 nt, artificial
  Chemically synthesized
gaacccuucaggcaauccu

SEQ ID NO: 6274 - RNA, 19 nt, artificial
  Chemically synthesized
uugguuaguauccuuagcc

SEQ ID NO: 6275 - RNA, 19 nt, artificial
  Chemically synthesized
uggucuaugacaguaauag

SEQ ID NO: 6276 - RNA, 19 nt, artificial
  Chemically synthesized
uucuucuguagaaagaaca

SEQ ID NO: 6277 - RNA, 19 nt, artificial
  Chemically synthesized
uucuguagaaagaacaucu

SEQ ID NO: 6278 - RNA, 19 nt, artificial
  Chemically synthesized
auaaguguugagacacucu

SEQ ID NO: 6279 - RNA, 19 nt, artificial
  Chemically synthesized
uucgaacucuuguugagca

SEQ ID NO: 6280 - RNA, 19 nt, artificial
  Chemically synthesized
uuagggaaguuacugaacc

SEQ ID NO: 6281 - RNA, 19 nt, artificial
  Chemically synthesized
uuauuugagcauuuggcag

SEQ ID NO: 6282 - RNA, 19 nt, artificial
  Chemically synthesized
uuugagcauuuggcagcac

SEQ ID NO: 6283 - RNA, 19 nt, artificial
  Chemically synthesized
uauuuccucauggaagaga

SEQ ID NO: 6284 - RNA, 19 nt, artificial
  Chemically synthesized
gagaugcuuuguuuacuca

SEQ ID NO: 6285 - RNA, 19 nt, artificial
  Chemically synthesized
cagaggaaaacuccuauuc

SEQ ID NO: 6286 - RNA, 19 nt, artificial
  Chemically synthesized
uccuauucugguauuaggg

SEQ ID NO: 6287 - RNA, 19 nt, artificial
  Chemically synthesized
agaaucagcaugcaguuga

SEQ ID NO: 6288 - RNA, 19 nt, artificial
  Chemically synthesized
accagaaugacaaaaaugg

SEQ ID NO: 6289 - RNA, 19 nt, artificial
  Chemically synthesized
cacagcaaagugauuggcc

SEQ ID NO: 6290 - RNA, 19 nt, artificial
  Chemically synthesized
ugcaguugaaauucaggca

SEQ ID NO: 6291 - RNA, 19 nt, artificial
  Chemically synthesized
uugaaauucaggcaggcug

SEQ ID NO: 6292 - RNA, 19 nt, artificial
  Chemically synthesized
aacuccugcuuaucacagc

SEQ ID NO: 6293 - RNA, 19 nt, artificial
  Chemically synthesized
cuccugcuuaucacagcca

SEQ ID NO: 6294 - RNA, 19 nt, artificial
  Chemically synthesized
uccugcuuaucacagccac

SEQ ID NO: 6295 - RNA, 19 nt, artificial
  Chemically synthesized
gacaaaaauguauuguccc

SEQ ID NO: 6296 - RNA, 19 nt, artificial
  Chemically synthesized
aagucauaggaggguuucc

SEQ ID NO: 6297 - RNA, 19 nt, artificial
  Chemically synthesized
acuguuauauuaugcacag

SEQ ID NO: 6298 - RNA, 19 nt, artificial
  Chemically synthesized
auaaacccgguaauaccag

SEQ ID NO: 6299 - RNA, 19 nt, artificial
  Chemically synthesized
augaggcacagcgugauga

SEQ ID NO: 6300 - RNA, 19 nt, artificial
  Chemically synthesized
uucuuuauucucuuucgag

SEQ ID NO: 6301 - RNA, 19 nt, artificial
  Chemically synthesized
aagaaaaaccuucauaguc

SEQ ID NO: 6302 - RNA, 19 nt, artificial
  Chemically synthesized
gaaagggccaauauucuca

SEQ ID NO: 6303 - RNA, 19 nt, artificial
  Chemically synthesized
aacugagguacccucucca

SEQ ID NO: 6304 - RNA, 19 nt, artificial
  Chemically synthesized
acaauaaacagagccugac

SEQ ID NO: 6305 - RNA, 19 nt, artificial
  Chemically synthesized
auugauaccugaggugcag

SEQ ID NO: 6306 - RNA, 19 nt, artificial
  Chemically synthesized
aauggugugaaucgcagag

SEQ ID NO: 6307 - RNA, 19 nt, artificial
  Chemically synthesized
acaaagaacaacugaguuc

SEQ ID NO: 6308 - RNA, 19 nt, artificial
  Chemically synthesized
ggaaugaccaauaugagac

SEQ ID NO: 6309 - RNA, 19 nt, artificial
  Chemically synthesized
cacacuaacagugauuuag

SEQ ID NO: 6310 - RNA, 19 nt, artificial
  Chemically synthesized
aacauacuauugaguguga

SEQ ID NO: 6311 - RNA, 19 nt, artificial
  Chemically synthesized
augcgauccauuuugugug

SEQ ID NO: 6312 - RNA, 19 nt, artificial
  Chemically synthesized
cuagggagaaucagauucc

SEQ ID NO: 6313 - RNA, 19 nt, artificial
  Chemically synthesized
gagaaucagauuccuuugg

SEQ ID NO: 6314 - RNA, 19 nt, artificial
  Chemically synthesized
cugucacuaauaaguguug

SEQ ID NO: 6315 - RNA, 19 nt, artificial
  Chemically synthesized
ugucacuaauaaguguuga

SEQ ID NO: 6316 - RNA, 19 nt, artificial
  Chemically synthesized
aacucuuguugagcagcac

SEQ ID NO: 6317 - RNA, 19 nt, artificial
  Chemically synthesized
aaaccuggaguaagauggg

SEQ ID NO: 6318 - RNA, 19 nt, artificial
  Chemically synthesized
cuuuaagggaaaaccauua

SEQ ID NO: 6319 - RNA, 19 nt, artificial
  Chemically synthesized
cuccuauucugguauuagg

SEQ ID NO: 6320 - RNA, 19 nt, artificial
  Chemically synthesized
uuaggguguugacuugcaa

SEQ ID NO: 6321 - RNA, 19 nt, artificial
  Chemically synthesized
gcacagcaaagugauuggc

SEQ ID NO: 6322 - RNA, 19 nt, artificial
  Chemically synthesized
agcaaagugauuggccuga

SEQ ID NO: 6323 - RNA, 19 nt, artificial
  Chemically synthesized
acuccugcuuaucacagcc

SEQ ID NO: 6324 - RNA, 19 nt, artificial
  Chemically synthesized
uuggacaccuuugggcacu

SEQ ID NO: 6325 - RNA, 19 nt, artificial
  Chemically synthesized
auuuccaagucauaggagg

SEQ ID NO: 6326 - RNA, 19 nt, artificial
  Chemically synthesized
uuccaagucauaggagggu

SEQ ID NO: 6327 - RNA, 19 nt, artificial
  Chemically synthesized
uaaacccgguaauaccaga

SEQ ID NO: 6328 - RNA, 19 nt, artificial
  Chemically synthesized
auaugaggcacagcgugau

SEQ ID NO: 6329 - RNA, 19 nt, artificial
  Chemically synthesized
uuucgagcaaaauugagau

SEQ ID NO: 6330 - RNA, 19 nt, artificial
  Chemically synthesized
uacugaauaaggaucagaa

SEQ ID NO: 6331 - RNA, 19 nt, artificial
  Chemically synthesized
aacacaauugcaaaagcag

SEQ ID NO: 6332 - RNA, 19 nt, artificial
  Chemically synthesized
gaacuaagaaaaaccuuca

SEQ ID NO: 6333 - RNA, 19 nt, artificial
  Chemically synthesized
cauaacuggauaacacagg

SEQ ID NO: 6334 - RNA, 19 nt, artificial
  Chemically synthesized
gagcaacaaaugaagcugg

SEQ ID NO: 6335 - RNA, 19 nt, artificial
  Chemically synthesized
uccacauuaaauagaugug

SEQ ID NO: 6336 - RNA, 19 nt, artificial
  Chemically synthesized
ccuuauaacugagguaccc

SEQ ID NO: 6337 - RNA, 19 nt, artificial
  Chemically synthesized
auaacugagguacccucuc

SEQ ID NO: 6338 - RNA, 19 nt, artificial
  Chemically synthesized
ugaauugauaccugaggug

SEQ ID NO: 6339 - RNA, 19 nt, artificial
  Chemically synthesized
gaauugauaccugaggugc

SEQ ID NO: 6340 - RNA, 19 nt, artificial
  Chemically synthesized
uaccugaggugcaguguga

SEQ ID NO: 6341 - RNA, 19 nt, artificial
  Chemically synthesized
auggugugaaucgcagagu

SEQ ID NO: 6342 - RNA, 19 nt, artificial
  Chemically synthesized
caaagaacaacugaguucu

SEQ ID NO: 6343 - RNA, 19 nt, artificial
  Chemically synthesized
agcaucaaaauuugugacc

SEQ ID NO: 6344 - RNA, 19 nt, artificial
  Chemically synthesized
aacugguuuuaguucccag

SEQ ID NO: 6345 - RNA, 19 nt, artificial
  Chemically synthesized
aagugcaaucauccaugcc

SEQ ID NO: 6346 - RNA, 19 nt, artificial
  Chemically synthesized
gugauuuagagacucucuc

SEQ ID NO: 6347 - RNA, 19 nt, artificial
  Chemically synthesized
cucuugaacauauauucag

SEQ ID NO: 6348 - RNA, 19 nt, artificial
  Chemically synthesized
agaacauacuauugagugu

SEQ ID NO: 6349 - RNA, 19 nt, artificial
  Chemically synthesized
auuugaucucuguauagag

SEQ ID NO: 6350 - RNA, 19 nt, artificial
  Chemically synthesized
cuggguuguuaauuuuagg

SEQ ID NO: 6351 - RNA, 19 nt, artificial
  Chemically synthesized
agucacacagaugcgaucc

SEQ ID NO: 6352 - RNA, 19 nt, artificial
  Chemically synthesized
uuguguguguauuuacgga

SEQ ID NO: 6353 - RNA, 19 nt, artificial
  Chemically synthesized
aggagguuaauucuccacc

SEQ ID NO: 6354 - RNA, 19 nt, artificial
  Chemically synthesized
gcuucaaauaagaaugugc

SEQ ID NO: 6355 - RNA, 19 nt, artificial
  Chemically synthesized
agauuccuguccaguuguc

SEQ ID NO: 6356 - RNA, 19 nt, artificial
  Chemically synthesized
ugugguucuaaauucauuc

SEQ ID NO: 6357 - RNA, 19 nt, artificial
  Chemically synthesized
uacuugaguauccgcucuc

SEQ ID NO: 6358 - RNA, 19 nt, artificial
  Chemically synthesized
uagaaagaacaucuggccc

SEQ ID NO: 6359 - RNA, 19 nt, artificial
  Chemically synthesized
cagaugucaauacugucac

SEQ ID NO: 6360 - RNA, 19 nt, artificial
  Chemically synthesized
aauaaguguugagacacuc

SEQ ID NO: 6361 - RNA, 19 nt, artificial
  Chemically synthesized
ucgaacucuuguugagcag

SEQ ID NO: 6362 - RNA, 19 nt, artificial
  Chemically synthesized
auagcuacuccuugguuuc

SEQ ID NO: 6363 - RNA, 19 nt, artificial
  Chemically synthesized
uagggaaguuacugaaccu

SEQ ID NO: 6364 - RNA, 19 nt, artificial
  Chemically synthesized
ugcucucaaaaccauagag

SEQ ID NO: 6365 - RNA, 19 nt, artificial
  Chemically synthesized
uuugacauuccuuuaaggg

SEQ ID NO: 6366 - RNA, 19 nt, artificial
  Chemically synthesized
auuuggcagcacaacccac

SEQ ID NO: 6367 - RNA, 19 nt, artificial
  Chemically synthesized
uuauuuccucauggaagag

SEQ ID NO: 6368 - RNA, 19 nt, artificial
  Chemically synthesized
aagucuuuuguuucaggcc

SEQ ID NO: 6369 - RNA, 19 nt, artificial
  Chemically synthesized
ugaaauucaggcaggcugc

SEQ ID NO: 6370 - RNA, 19 nt, artificial
  Chemically synthesized
ugagugaccaccuugguga

SEQ ID NO: 6371 - RNA, 19 nt, artificial
  Chemically synthesized
caaccucucacagagauac

SEQ ID NO: 6372 - RNA, 19 nt, artificial
  Chemically synthesized
accucucacagagauacag

SEQ ID NO: 6373 - RNA, 19 nt, artificial
  Chemically synthesized
agucauaggaggguuucca

SEQ ID NO: 6374 - RNA, 19 nt, artificial
  Chemically synthesized
agcaaacugagggauuggg

SEQ ID NO: 6375 - RNA, 19 nt, artificial
  Chemically synthesized
uggauggcaaggccaauga

SEQ ID NO: 6376 - RNA, 19 nt, artificial
  Chemically synthesized
uauaacugagguacccucu

SEQ ID NO: 6377 - RNA, 19 nt, artificial
  Chemically synthesized
cacauuaaauagaugugca

SEQ ID NO: 6378 - RNA, 19 nt, artificial
  Chemically synthesized
aagcagaaaccauccuggu

SEQ ID NO: 6379 - RNA, 19 nt, artificial
  Chemically synthesized
gugcaauggugugaaucgc

SEQ ID NO: 6380 - RNA, 19 nt, artificial
  Chemically synthesized
ugggagacgaaaggaauag

SEQ ID NO: 6381 - RNA, 19 nt, artificial
  Chemically synthesized
aacaacaucaguaugugua

SEQ ID NO: 6382 - RNA, 19 nt, artificial
  Chemically synthesized
acaucaguauguguauacc

SEQ ID NO: 6383 - RNA, 19 nt, artificial
  Chemically synthesized
cuaaaccagucuucugccc

SEQ ID NO: 6384 - RNA, 19 nt, artificial
  Chemically synthesized
aaccagucuucugcccuuc

SEQ ID NO: 6385 - RNA, 19 nt, artificial
  Chemically synthesized
uaguucccagaaaugggag

SEQ ID NO: 6386 - RNA, 19 nt, artificial
  Chemically synthesized
ugauuuagagacucucucu

SEQ ID NO: 6387 - RNA, 19 nt, artificial
  Chemically synthesized
uuugaucucuguauagaga

SEQ ID NO: 6388 - RNA, 19 nt, artificial
  Chemically synthesized
agagauuuuuguuucuggg

SEQ ID NO: 6389 - RNA, 19 nt, artificial
  Chemically synthesized
cagaugcgauccauuuugu

SEQ ID NO: 6390 - RNA, 19 nt, artificial
  Chemically synthesized
gacuagaugagccagaguc

SEQ ID NO: 6391 - RNA, 19 nt, artificial
  Chemically synthesized
ugcuucaaauaagaaugug

SEQ ID NO: 6392 - RNA, 19 nt, artificial
  Chemically synthesized
ggacaaaaagaaacuauaa

SEQ ID NO: 6393 - RNA, 19 nt, artificial
  Chemically synthesized
ccaccaaucugaagcucaa

SEQ ID NO: 6394 - RNA, 19 nt, artificial
  Chemically synthesized
gcuuaaaaauggacaaaaa

SEQ ID NO: 6395 - RNA, 19 nt, artificial
  Chemically synthesized
ggacuaggaugaacuaaau

SEQ ID NO: 6396 - RNA, 19 nt, artificial
  Chemically synthesized
ccaguuaugagauaaaaaa

SEQ ID NO: 6397 - RNA, 19 nt, artificial
  Chemically synthesized
gagugagagaaaauaaaaa

SEQ ID NO: 6398 - RNA, 19 nt, artificial
  Chemically synthesized
gcucaacuauuaaaaugaa

SEQ ID NO: 6399 - RNA, 19 nt, artificial
  Chemically synthesized
gaugaagcauuguuuuuaa

SEQ ID NO: 6400 - RNA, 19 nt, artificial
  Chemically synthesized
ggguaggucugacaaauaa

SEQ ID NO: 6401 - RNA, 19 nt, artificial
  Chemically synthesized
gcaccaugaugaggagaaa

SEQ ID NO: 6402 - RNA, 19 nt, artificial
  Chemically synthesized
ccuugugcuauaaaauaaa

SEQ ID NO: 6403 - RNA, 19 nt, artificial
  Chemically synthesized
gguauugaaucuuuuaaaa

SEQ ID NO: 6404 - RNA, 19 nt, artificial
  Chemically synthesized
caagacaauugcaagucaa

SEQ ID NO: 6405 - RNA, 19 nt, artificial
  Chemically synthesized
ggucauuuguuuuaaauaa

SEQ ID NO: 6406 - RNA, 19 nt, artificial
  Chemically synthesized
aacugugcucaacuauuaa

SEQ ID NO: 6407 - RNA, 19 nt, artificial
  Chemically synthesized
aaccuaugugcauaauuaa

SEQ ID NO: 6408 - RNA, 19 nt, artificial
  Chemically synthesized
aacaguuugugaacaaaaa

SEQ ID NO: 6409 - RNA, 19 nt, artificial
  Chemically synthesized
caauaauucugauccuuau

SEQ ID NO: 6410 - RNA, 19 nt, artificial
  Chemically synthesized
guuugauagugauaaguua

SEQ ID NO: 6411 - RNA, 19 nt, artificial
  Chemically synthesized
gauuaucuaugguauugaa

SEQ ID NO: 6412 - RNA, 19 nt, artificial
  Chemically synthesized
gguuggagguggagaauua

SEQ ID NO: 6413 - RNA, 19 nt, artificial
  Chemically synthesized
gaagacaacuggacaggaa

SEQ ID NO: 6414 - RNA, 19 nt, artificial
  Chemically synthesized
gcucgaaagagaauaaaga

SEQ ID NO: 6415 - RNA, 19 nt, artificial
  Chemically synthesized
agaucauuaggacauaaua

SEQ ID NO: 6416 - RNA, 19 nt, artificial
  Chemically synthesized
gauuggaguuaauguaaua

SEQ ID NO: 6417 - RNA, 19 nt, artificial
  Chemically synthesized
uggacaaaaagaaacuaua

SEQ ID NO: 6418 - RNA, 19 nt, artificial
  Chemically synthesized
gcaagucaacacccuaaua

SEQ ID NO: 6419 - RNA, 19 nt, artificial
  Chemically synthesized
gcagagagcggauacucaa

SEQ ID NO: 6420 - RNA, 19 nt, artificial
  Chemically synthesized
agugcuugucauuauaaaa

SEQ ID NO: 6421 - RNA, 19 nt, artificial
  Chemically synthesized
acucaauuuuagaaucaaa

SEQ ID NO: 6422 - RNA, 19 nt, artificial
  Chemically synthesized
ccggaggucuuacuuugaa

SEQ ID NO: 6423 - RNA, 19 nt, artificial
  Chemically synthesized
gacuaaugguuuauuugua

SEQ ID NO: 6424 - RNA, 19 nt, artificial
  Chemically synthesized
ucacaggccugaaacaaaa

SEQ ID NO: 6425 - RNA, 19 nt, artificial
  Chemically synthesized
agagugagagaaaauaaaa

SEQ ID NO: 6426 - RNA, 19 nt, artificial
  Chemically synthesized
gauaaugaauucaagacaa

SEQ ID NO: 6427 - RNA, 19 nt, artificial
  Chemically synthesized
gacucaauuuuagaaucaa

SEQ ID NO: 6428 - RNA, 19 nt, artificial
  Chemically synthesized
caguuaugagauaaaaaau

SEQ ID NO: 6429 - RNA, 19 nt, artificial
  Chemically synthesized
aaacugugcucaacuauua

SEQ ID NO: 6430 - RNA, 19 nt, artificial
  Chemically synthesized
ggaacugggcugugaauga

SEQ ID NO: 6431 - RNA, 19 nt, artificial
  Chemically synthesized
gcauuguuuuuaaucuuaa

SEQ ID NO: 6432 - RNA, 19 nt, artificial
  Chemically synthesized
gcgaauauagccuuucuga

SEQ ID NO: 6433 - RNA, 19 nt, artificial
  Chemically synthesized
gaaucucaccuuucauaaa

SEQ ID NO: 6434 - RNA, 19 nt, artificial
  Chemically synthesized
cauccauggagcugaacga

SEQ ID NO: 6435 - RNA, 19 nt, artificial
  Chemically synthesized
caacuucgguaaugaggaa

SEQ ID NO: 6436 - RNA, 19 nt, artificial
  Chemically synthesized
accuaugugcauaauuaaa

SEQ ID NO: 6437 - RNA, 19 nt, artificial
  Chemically synthesized
agugagagaaaauaaaaaa

SEQ ID NO: 6438 - RNA, 19 nt, artificial
  Chemically synthesized
caccaaucugaagcucaaa

SEQ ID NO: 6439 - RNA, 19 nt, artificial
  Chemically synthesized
ccuaugugcauaauuaaaa

SEQ ID NO: 6440 - RNA, 19 nt, artificial
  Chemically synthesized
guuggagguggagaauuaa

SEQ ID NO: 6441 - RNA, 19 nt, artificial
  Chemically synthesized
ccucaaaaucaguuuuuau

SEQ ID NO: 6442 - RNA, 19 nt, artificial
  Chemically synthesized
ugguauugaaucuuuuaaa

SEQ ID NO: 6443 - RNA, 19 nt, artificial
  Chemically synthesized
uccaguuaugagauaaaaa

SEQ ID NO: 6444 - RNA, 19 nt, artificial
  Chemically synthesized
gagaauaaagaacccugaa

SEQ ID NO: 6445 - RNA, 19 nt, artificial
  Chemically synthesized
acaguuugugaacaaaaaa

SEQ ID NO: 6446 - RNA, 19 nt, artificial
  Chemically synthesized
gaggaaaaggaaauaagga

SEQ ID NO: 6447 - RNA, 19 nt, artificial
  Chemically synthesized
aagagugcuugucauuaua

SEQ ID NO: 6448 - RNA, 19 nt, artificial
  Chemically synthesized
agugcgugcugcucaacaa

SEQ ID NO: 6449 - RNA, 19 nt, artificial
  Chemically synthesized
aaaaauggacaaaaagaaa

SEQ ID NO: 6450 - RNA, 19 nt, artificial
  Chemically synthesized
ccauggagcugaacgaauu

SEQ ID NO: 6451 - RNA, 19 nt, artificial
  Chemically synthesized
uuauuugaagcaugaaaaa

SEQ ID NO: 6452 - RNA, 19 nt, artificial
  Chemically synthesized
gcagaagacugguuuagga

SEQ ID NO: 6453 - RNA, 19 nt, artificial
  Chemically synthesized
cuuauuugaagcaugaaaa

SEQ ID NO: 6454 - RNA, 19 nt, artificial
  Chemically synthesized
gaugguuucugcuuagaga

SEQ ID NO: 6455 - RNA, 19 nt, artificial
  Chemically synthesized
cagauuucuuaaaguuuga

SEQ ID NO: 6456 - RNA, 19 nt, artificial
  Chemically synthesized
cuuccaugaggaaauaaau

SEQ ID NO: 6457 - RNA, 19 nt, artificial
  Chemically synthesized
guaaguuuuguuaaaugaa

SEQ ID NO: 6458 - RNA, 19 nt, artificial
  Chemically synthesized
ggucacucacccuuucaaa

SEQ ID NO: 6459 - RNA, 19 nt, artificial
  Chemically synthesized
gugugaaugcccgagucaa

SEQ ID NO: 6460 - RNA, 19 nt, artificial
  Chemically synthesized
uuugaagcaugaaaaaaga

SEQ ID NO: 6461 - RNA, 19 nt, artificial
  Chemically synthesized
caauuuugcucgaaagaga

SEQ ID NO: 6462 - RNA, 19 nt, artificial
  Chemically synthesized
uauggucauuuguuuuaaa

SEQ ID NO: 6463 - RNA, 19 nt, artificial
  Chemically synthesized
ucauuauuaucauacugaa

SEQ ID NO: 6464 - RNA, 19 nt, artificial
  Chemically synthesized
aggaaauaaggagaaaaga

SEQ ID NO: 6465 - RNA, 19 nt, artificial
  Chemically synthesized
caacuauuaaaaugaauga

SEQ ID NO: 6466 - RNA, 19 nt, artificial
  Chemically synthesized
ugggauaaugaauucaaga

SEQ ID NO: 6467 - RNA, 19 nt, artificial
  Chemically synthesized
aggaugaacuaaauaagaa

SEQ ID NO: 6468 - RNA, 19 nt, artificial
  Chemically synthesized
cucaaauaaugcuaauuga

SEQ ID NO: 6469 - RNA, 19 nt, artificial
  Chemically synthesized
ccaagauagaauuaauuua

SEQ ID NO: 6470 - RNA, 19 nt, artificial
  Chemically synthesized
gcuggaaacccuccuauga

SEQ ID NO: 6471 - RNA, 19 nt, artificial
  Chemically synthesized
aagccuuaaacaaaauuua

SEQ ID NO: 6472 - RNA, 19 nt, artificial
  Chemically synthesized
ugucaaagauuguuugaua

SEQ ID NO: 6473 - RNA, 19 nt, artificial
  Chemically synthesized
cucaauuuuagaaucaaaa

SEQ ID NO: 6474 - RNA, 19 nt, artificial
  Chemically synthesized
guuuaggaggaaaaggaaa

SEQ ID NO: 6475 - RNA, 19 nt, artificial
  Chemically synthesized
gaguuaauguaauacucau

SEQ ID NO: 6476 - RNA, 19 nt, artificial
  Chemically synthesized
gaacuuggagacaggcaaa

SEQ ID NO: 6477 - RNA, 19 nt, artificial
  Chemically synthesized
gaauuaauuuaaagccuua

SEQ ID NO: 6478 - RNA, 19 nt, artificial
  Chemically synthesized
caucaucauccuaaaauua

SEQ ID NO: 6479 - RNA, 19 nt, artificial
  Chemically synthesized
aucugaagcucaaaaagau

SEQ ID NO: 6480 - RNA, 19 nt, artificial
  Chemically synthesized
ggaaucucaccuuucauaa

SEQ ID NO: 6481 - RNA, 19 nt, artificial
  Chemically synthesized
guuugauauguauagaaua

SEQ ID NO: 6482 - RNA, 19 nt, artificial
  Chemically synthesized
gaauugugacaaauaugua

SEQ ID NO: 6483 - RNA, 19 nt, artificial
  Chemically synthesized
aaugggagagugagagaaa

SEQ ID NO: 6484 - RNA, 19 nt, artificial
  Chemically synthesized
uaaaaauggacaaaaagaa

SEQ ID NO: 6485 - RNA, 19 nt, artificial
  Chemically synthesized
uaaccuaugugcauaauua

SEQ ID NO: 6486 - RNA, 19 nt, artificial
  Chemically synthesized
aaauaaggagaaaagagaa

SEQ ID NO: 6487 - RNA, 19 nt, artificial
  Chemically synthesized
aagggacuaggaugaacua

SEQ ID NO: 6488 - RNA, 19 nt, artificial
  Chemically synthesized
caacaagaguucgaagaca

SEQ ID NO: 6489 - RNA, 19 nt, artificial
  Chemically synthesized
aggagaaaagagaauggga

SEQ ID NO: 6490 - RNA, 19 nt, artificial
  Chemically synthesized
ugugaaugcccgagucaau

SEQ ID NO: 6491 - RNA, 19 nt, artificial
  Chemically synthesized
agagaaugggagagugaga

SEQ ID NO: 6492 - RNA, 19 nt, artificial
  Chemically synthesized
gacaaaaagaaacuauaau

SEQ ID NO: 6493 - RNA, 19 nt, artificial
  Chemically synthesized
caaagguguccaagcugga

SEQ ID NO: 6494 - RNA, 19 nt, artificial
  Chemically synthesized
aaaugaaaguuaucucaau

SEQ ID NO: 6495 - RNA, 19 nt, artificial
  Chemically synthesized
uaggaauugugacaaauau

SEQ ID NO: 6496 - RNA, 19 nt, artificial
  Chemically synthesized
ccaggaugguuucugcuua

SEQ ID NO: 6497 - RNA, 19 nt, artificial
  Chemically synthesized
ugcauuucauuuucaacaa

SEQ ID NO: 6498 - RNA, 19 nt, artificial
  Chemically synthesized
gaaaauaaaaaaggcaaaa

SEQ ID NO: 6499 - RNA, 19 nt, artificial
  Chemically synthesized
augaaugaaugaauuuaga

SEQ ID NO: 6500 - RNA, 19 nt, artificial
  Chemically synthesized
ucaaguaaguuuuguuaaa

SEQ ID NO: 6501 - RNA, 19 nt, artificial
  Chemically synthesized
agccuuaaacaaaauuuau

SEQ ID NO: 6502 - RNA, 19 nt, artificial
  Chemically synthesized
gagaaaagagaaugggaga

SEQ ID NO: 6503 - RNA, 19 nt, artificial
  Chemically synthesized
agaaaauaaaaaaggcaaa

SEQ ID NO: 6504 - RNA, 19 nt, artificial
  Chemically synthesized
gacaaauauguaucugaua

SEQ ID NO: 6505 - RNA, 19 nt, artificial
  Chemically synthesized
gagaaaauaaaaaaggcaa

SEQ ID NO: 6506 - RNA, 19 nt, artificial
  Chemically synthesized
ucccuuaaaggaaugucaa

SEQ ID NO: 6507 - RNA, 19 nt, artificial
  Chemically synthesized
aaacaaaaaucucuauaca

SEQ ID NO: 6508 - RNA, 19 nt, artificial
  Chemically synthesized
aauuuaaagccuuaaacaa

SEQ ID NO: 6509 - RNA, 19 nt, artificial
  Chemically synthesized
uaaaauaaaugcagacuaa

SEQ ID NO: 6510 - RNA, 19 nt, artificial
  Chemically synthesized
gaguucgaagacaacugga

SEQ ID NO: 6511 - RNA, 19 nt, artificial
  Chemically synthesized
acaggaaucucaccuuuca

SEQ ID NO: 6512 - RNA, 19 nt, artificial
  Chemically synthesized
agucagucugguacaaaua

SEQ ID NO: 6513 - RNA, 19 nt, artificial
  Chemically synthesized
gcuauaaaauaaaugcaga

SEQ ID NO: 6514 - RNA, 19 nt, artificial
  Chemically synthesized
uuaacaacccagaaacaaa

SEQ ID NO: 6515 - RNA, 19 nt, artificial
  Chemically synthesized
auguaauacucaucauuua

SEQ ID NO: 6516 - RNA, 19 nt, artificial
  Chemically synthesized
gaagaauauuggauugauu

SEQ ID NO: 6517 - RNA, 19 nt, artificial
  Chemically synthesized
ugacaguauugacaucuga

SEQ ID NO: 6518 - RNA, 19 nt, artificial
  Chemically synthesized
ucaucaucauccuaaaauu

SEQ ID NO: 6519 - RNA, 19 nt, artificial
  Chemically synthesized
cauugcacaucuauuuaau

SEQ ID NO: 6520 - RNA, 19 nt, artificial
  Chemically synthesized
caacuggacaggaaucuca

SEQ ID NO: 6521 - RNA, 19 nt, artificial
  Chemically synthesized
agggcagaagacugguuua

SEQ ID NO: 6522 - RNA, 19 nt, artificial
  Chemically synthesized
gugaaugcccgagucaaua

SEQ ID NO: 6523 - RNA, 19 nt, artificial
  Chemically synthesized
uccuugugcuauaaaauaa

SEQ ID NO: 6524 - RNA, 19 nt, artificial
  Chemically synthesized
cuaugguauugaaucuuuu

SEQ ID NO: 6525 - RNA, 19 nt, artificial
  Chemically synthesized
gaacaaaaaaucucagaau

SEQ ID NO: 6526 - RNA, 19 nt, artificial
  Chemically synthesized
caguuugugaacaaaaaau

SEQ ID NO: 6527 - RNA, 19 nt, artificial
  Chemically synthesized
uggucauuuguuuuaaaua

SEQ ID NO: 6528 - RNA, 19 nt, artificial
  Chemically synthesized
acaucuauuuaauguggaa

SEQ ID NO: 6529 - RNA, 19 nt, artificial
  Chemically synthesized
aaaggaaauaaggagaaaa

SEQ ID NO: 6530 - RNA, 19 nt, artificial
  Chemically synthesized
uuuaaagccuuaaacaaaa

SEQ ID NO: 6531 - RNA, 19 nt, artificial
  Chemically synthesized
aaaccaacuaaguuaugaa

SEQ ID NO: 6532 - RNA, 19 nt, artificial
  Chemically synthesized
aaguuugauauguauagaa

SEQ ID NO: 6533 - RNA, 19 nt, artificial
  Chemically synthesized
gaaauuuuccagaucauua

SEQ ID NO: 6534 - RNA, 19 nt, artificial
  Chemically synthesized
gguauuaccggguuuauga

SEQ ID NO: 6535 - RNA, 19 nt, artificial
  Chemically synthesized
cucuguuuauuguuucaau

SEQ ID NO: 6536 - RNA, 19 nt, artificial
  Chemically synthesized
guucgaagacaacuggaca

SEQ ID NO: 6537 - RNA, 19 nt, artificial
  Chemically synthesized
cuuauuuuccguaaauaca

SEQ ID NO: 6538 - RNA, 19 nt, artificial
  Chemically synthesized
gaaauaaggagaaaagaga

SEQ ID NO: 6539 - RNA, 19 nt, artificial
  Chemically synthesized
gacaauacauuuuugucaa

SEQ ID NO: 6540 - RNA, 19 nt, artificial
  Chemically synthesized
cucaaaaucaguuuuuaua

SEQ ID NO: 6541 - RNA, 19 nt, artificial
  Chemically synthesized
caaauaaugcuaauugaua

SEQ ID NO: 6542 - RNA, 19 nt, artificial
  Chemically synthesized
agugauaaguuacauuuau

SEQ ID NO: 6543 - RNA, 19 nt, artificial
  Chemically synthesized
gagcucuaugguuuugaga

SEQ ID NO: 6544 - RNA, 19 nt, artificial
  Chemically synthesized
gaguagcuauauauuucua

SEQ ID NO: 6545 - RNA, 19 nt, artificial
  Chemically synthesized
aaggcaaaagggagagaga

SEQ ID NO: 6546 - RNA, 19 nt, artificial
  Chemically synthesized
ccaucauuauuaucauacu

SEQ ID NO: 6547 - RNA, 19 nt, artificial
  Chemically synthesized
caucauccuaaaauuaaca

SEQ ID NO: 6548 - RNA, 19 nt, artificial
  Chemically synthesized
ugacaaauauguaucugau

SEQ ID NO: 6549 - RNA, 19 nt, artificial
  Chemically synthesized
ccagaucuagcccaucuua

SEQ ID NO: 6550 - RNA, 19 nt, artificial
  Chemically synthesized
gcacuuuuacaaacauuau

SEQ ID NO: 6551 - RNA, 19 nt, artificial
  Chemically synthesized
aaaaggaaauaaggagaaa

SEQ ID NO: 6552 - RNA, 19 nt, artificial
  Chemically synthesized
ugaacaaaaaaucucagaa

SEQ ID NO: 6553 - RNA, 19 nt, artificial
  Chemically synthesized
agucaacacccuaauacca

SEQ ID NO: 6554 - RNA, 19 nt, artificial
  Chemically synthesized
uucaauucuuuacaccaaa

SEQ ID NO: 6555 - RNA, 19 nt, artificial
  Chemically synthesized
ugaaugaaugaauuuagaa

SEQ ID NO: 6556 - RNA, 19 nt, artificial
  Chemically synthesized
auccaguuaugagauaaaa

SEQ ID NO: 6557 - RNA, 19 nt, artificial
  Chemically synthesized
cuuaguauuuagcauuuau

SEQ ID NO: 6558 - RNA, 19 nt, artificial
  Chemically synthesized
ccaaggaguagcuauauau

SEQ ID NO: 6559 - RNA, 19 nt, artificial
  Chemically synthesized
gguacaaauauugcaauaa

SEQ ID NO: 6560 - RNA, 19 nt, artificial
  Chemically synthesized
ggagguggagaauuaaccu

SEQ ID NO: 6561 - RNA, 19 nt, artificial
  Chemically synthesized
caagaugcguggaaacuac

SEQ ID NO: 6562 - RNA, 19 nt, artificial
  Chemically synthesized
uccucaaaaucaguuuuua

SEQ ID NO: 6563 - RNA, 19 nt, artificial
  Chemically synthesized
uuuaaaaucuggucacaaa

SEQ ID NO: 6564 - RNA, 19 nt, artificial
  Chemically synthesized
uaggaugaacuaaauaaga

SEQ ID NO: 6565 - RNA, 19 nt, artificial
  Chemically synthesized
guuugauacucuuuccaca

SEQ ID NO: 6566 - RNA, 19 nt, artificial
  Chemically synthesized
aucacaggccugaaacaaa

SEQ ID NO: 6567 - RNA, 19 nt, artificial
  Chemically synthesized
aauuuugcucgaaagagaa

SEQ ID NO: 6568 - RNA, 19 nt, artificial
  Chemically synthesized
guauguucugaauauaugu

SEQ ID NO: 6569 - RNA, 19 nt, artificial
  Chemically synthesized
aagguuuucuaucuucaaa

SEQ ID NO: 6570 - RNA, 19 nt, artificial
  Chemically synthesized
gcuugucauuauaaaaguu

SEQ ID NO: 6571 - RNA, 19 nt, artificial
  Chemically synthesized
uaugguauugaaucuuuua

SEQ ID NO: 6572 - RNA, 19 nt, artificial
  Chemically synthesized
augcguggaaacuaccuaa

SEQ ID NO: 6573 - RNA, 19 nt, artificial
  Chemically synthesized
ucaaaaagaucuacuucua

SEQ ID NO: 6574 - RNA, 19 nt, artificial
  Chemically synthesized
gaaacugugaccagaucua

SEQ ID NO: 6575 - RNA, 19 nt, artificial
  Chemically synthesized
caagaacaggcuaaggaua

SEQ ID NO: 6576 - RNA, 19 nt, artificial
  Chemically synthesized
uuuccucuguggaccugaa

SEQ ID NO: 6577 - RNA, 19 nt, artificial
  Chemically synthesized
uauccaguuaugagauaaa

SEQ ID NO: 6578 - RNA, 19 nt, artificial
  Chemically synthesized
gaauauugaacuuaggaau

SEQ ID NO: 6579 - RNA, 19 nt, artificial
  Chemically synthesized
agcggauacucaaguaagu

SEQ ID NO: 6580 - RNA, 19 nt, artificial
  Chemically synthesized
caacuaaguuaugaaagua

SEQ ID NO: 6581 - RNA, 19 nt, artificial
  Chemically synthesized
acuaggaugaacuaaauaa

SEQ ID NO: 6582 - RNA, 19 nt, artificial
  Chemically synthesized
aagacaacuggacaggaau

SEQ ID NO: 6583 - RNA, 19 nt, artificial
  Chemically synthesized
aauucuuuacaccaaagua

SEQ ID NO: 6584 - RNA, 19 nt, artificial
  Chemically synthesized
uaacaguuugugaacaaaa

SEQ ID NO: 6585 - RNA, 19 nt, artificial
  Chemically synthesized
cauuguuuuuaaucuuaag

SEQ ID NO: 6586 - RNA, 19 nt, artificial
  Chemically synthesized
uucuuaaaacugugcucaa

SEQ ID NO: 6587 - RNA, 19 nt, artificial
  Chemically synthesized
ugguacaaauauugcaaua

SEQ ID NO: 6588 - RNA, 19 nt, artificial
  Chemically synthesized
ugugcucaacuauuaaaau

SEQ ID NO: 6589 - RNA, 19 nt, artificial
  Chemically synthesized
cuaugugcauaauuaaaac

SEQ ID NO: 6590 - RNA, 19 nt, artificial
  Chemically synthesized
caucacgcugugccucaua

SEQ ID NO: 6591 - RNA, 19 nt, artificial
  Chemically synthesized
cucagaauccucaaaauca

SEQ ID NO: 6592 - RNA, 19 nt, artificial
  Chemically synthesized
ugaucacaggccugaaaca

SEQ ID NO: 6593 - RNA, 19 nt, artificial
  Chemically synthesized
cuucccuaagauuaugaaa

SEQ ID NO: 6594 - RNA, 19 nt, artificial
  Chemically synthesized
cuuaaaguuugauauguau

SEQ ID NO: 6595 - RNA, 19 nt, artificial
  Chemically synthesized
auggaagugggacaauaca

SEQ ID NO: 6596 - RNA, 19 nt, artificial
  Chemically synthesized
cuugugcuauaaaauaaau

SEQ ID NO: 6597 - RNA, 19 nt, artificial
  Chemically synthesized
aauguuuagaacucuucaa

SEQ ID NO: 6598 - RNA, 19 nt, artificial
  Chemically synthesized
gauuguuugauagugauaa

SEQ ID NO: 6599 - RNA, 19 nt, artificial
  Chemically synthesized
cuuugcugugcaccaugau

SEQ ID NO: 6600 - RNA, 19 nt, artificial
  Chemically synthesized
aaauggaagugggacaaua

SEQ ID NO: 6601 - RNA, 19 nt, artificial
  Chemically synthesized
ucuuauuugaagcaugaaa

SEQ ID NO: 6602 - RNA, 19 nt, artificial
  Chemically synthesized
ugaauauugaacuuaggaa

SEQ ID NO: 6603 - RNA, 19 nt, artificial
  Chemically synthesized
uaucaauucaucuauucaa

SEQ ID NO: 6604 - RNA, 19 nt, artificial
  Chemically synthesized
gaggaagaaggagaaagag

SEQ ID NO: 6605 - RNA, 19 nt, artificial
  Chemically synthesized
agguuuucuaucuucaaaa

SEQ ID NO: 6606 - RNA, 19 nt, artificial
  Chemically synthesized
gaggguaggucugacaaau

SEQ ID NO: 6607 - RNA, 19 nt, artificial
  Chemically synthesized
cuaaggauacuaaccaaua

SEQ ID NO: 6608 - RNA, 19 nt, artificial
  Chemically synthesized
cagcuagcccuuaugaaua

SEQ ID NO: 6609 - RNA, 19 nt, artificial
  Chemically synthesized
aguucuucugcuuuugcaa

SEQ ID NO: 6610 - RNA, 19 nt, artificial
  Chemically synthesized
acaaaaaucucuauacaga

SEQ ID NO: 6611 - RNA, 19 nt, artificial
  Chemically synthesized
caaucugaagcucaaaaag

SEQ ID NO: 6612 - RNA, 19 nt, artificial
  Chemically synthesized
aaaauuaacaacccagaaa

SEQ ID NO: 6613 - RNA, 19 nt, artificial
  Chemically synthesized
uagugauaaguuacauuua

SEQ ID NO: 6614 - RNA, 19 nt, artificial
  Chemically synthesized
cucccuagggucaagaaca

SEQ ID NO: 6615 - RNA, 19 nt, artificial
  Chemically synthesized
ggaagugggacaauacauu

SEQ ID NO: 6616 - RNA, 19 nt, artificial
  Chemically synthesized
auguuguuuugauuaucua

SEQ ID NO: 6617 - RNA, 19 nt, artificial
  Chemically synthesized
cccuccuaugacuuggaaa

SEQ ID NO: 6618 - RNA, 19 nt, artificial
  Chemically synthesized
gguggugauguuaguggga

SEQ ID NO: 6619 - RNA, 19 nt, artificial
  Chemically synthesized
uuaucauacugaaggaaau

SEQ ID NO: 6620 - RNA, 19 nt, artificial
  Chemically synthesized
ucuuggacucaauuuuaga

SEQ ID NO: 6621 - RNA, 19 nt, artificial
  Chemically synthesized
cauccauucucaagucagu

SEQ ID NO: 6622 - RNA, 19 nt, artificial
  Chemically synthesized
auuuaaagccuuaaacaaa

SEQ ID NO: 6623 - RNA, 19 nt, artificial
  Chemically synthesized
caauaguauguucugaaua

SEQ ID NO: 6624 - RNA, 19 nt, artificial
  Chemically synthesized
ucugguacaaauauugcaa

SEQ ID NO: 6625 - RNA, 19 nt, artificial
  Chemically synthesized
caaaauggaucgcaucugu

SEQ ID NO: 6626 - RNA, 19 nt, artificial
  Chemically synthesized
agagaauaaagaacccuga

SEQ ID NO: 6627 - RNA, 19 nt, artificial
  Chemically synthesized
uuauuaacagguacucuaa

SEQ ID NO: 6628 - RNA, 19 nt, artificial
  Chemically synthesized
cucaacuauuaaaaugaau

SEQ ID NO: 6629 - RNA, 19 nt, artificial
  Chemically synthesized
cuccgagaguguuucucca

SEQ ID NO: 6630 - RNA, 19 nt, artificial
  Chemically synthesized
gguuuucccuuaaaggaau

SEQ ID NO: 6631 - RNA, 19 nt, artificial
  Chemically synthesized
guuugugaacaaaaaaucu

SEQ ID NO: 6632 - RNA, 19 nt, artificial
  Chemically synthesized
cauuuuuuuccucucagua

SEQ ID NO: 6633 - RNA, 19 nt, artificial
  Chemically synthesized
ugguuuucccuuaaaggaa

SEQ ID NO: 6634 - RNA, 19 nt, artificial
  Chemically synthesized
gauugauuggaguuaaugu

SEQ ID NO: 6635 - RNA, 19 nt, artificial
  Chemically synthesized
uguauuauaucaucaucau

SEQ ID NO: 6636 - RNA, 19 nt, artificial
  Chemically synthesized
ugugccucauauuaauuau

SEQ ID NO: 6637 - RNA, 19 nt, artificial
  Chemically synthesized
gagucaggcucuguuuauu

SEQ ID NO: 6638 - RNA, 19 nt, artificial
  Chemically synthesized
aaaauaaaggaaugcccaa

SEQ ID NO: 6639 - RNA, 19 nt, artificial
  Chemically synthesized
agacaauugcaagucaaca

SEQ ID NO: 6640 - RNA, 19 nt, artificial
  Chemically synthesized
ccuuaugaauauugaacuu

SEQ ID NO: 6641 - RNA, 19 nt, artificial
  Chemically synthesized
uaaaauuaacaacccagaa

SEQ ID NO: 6642 - RNA, 19 nt, artificial
  Chemically synthesized
aauuaacaacccagaaaca

SEQ ID NO: 6643 - RNA, 19 nt, artificial
  Chemically synthesized
uuucuaucuucaaaaccaa

SEQ ID NO: 6644 - RNA, 19 nt, artificial
  Chemically synthesized
aaccaacuaaguuaugaaa

SEQ ID NO: 6645 - RNA, 19 nt, artificial
  Chemically synthesized
ucuuaaaguuugauaugua

SEQ ID NO: 6646 - RNA, 19 nt, artificial
  Chemically synthesized
ugcugugcaccaugaugag

SEQ ID NO: 6647 - RNA, 19 nt, artificial
  Chemically synthesized
aguaaguuuuguuaaauga

SEQ ID NO: 6648 - RNA, 19 nt, artificial
  Chemically synthesized
cauacuccaguuuacuaau

SEQ ID NO: 6649 - RNA, 19 nt, artificial
  Chemically synthesized
uugagagcacuuuuacaaa

SEQ ID NO: 6650 - RNA, 19 nt, artificial
  Chemically synthesized
gaucacaggccugaaacaa

SEQ ID NO: 6651 - RNA, 19 nt, artificial
  Chemically synthesized
guucaaaauggaaguggga

SEQ ID NO: 6652 - RNA, 19 nt, artificial
  Chemically synthesized
uuuucuuuuuguucuuaga

SEQ ID NO: 6653 - RNA, 19 nt, artificial
  Chemically synthesized
ucauuuucaacaaggaaaa

SEQ ID NO: 6654 - RNA, 19 nt, artificial
  Chemically synthesized
cagaaacaaaaaucucuau

SEQ ID NO: 6655 - RNA, 19 nt, artificial
  Chemically synthesized
caaguaaguuuuguuaaau

SEQ ID NO: 6656 - RNA, 19 nt, artificial
  Chemically synthesized
guuaaaugaaugaaugaau

SEQ ID NO: 6657 - RNA, 19 nt, artificial
  Chemically synthesized
gaaggguucugcacauucu

SEQ ID NO: 6658 - RNA, 19 nt, artificial
  Chemically synthesized
aaaccaaggaguagcuaua

SEQ ID NO: 6659 - RNA, 19 nt, artificial
  Chemically synthesized
gaacuaaaaccaguuuuau

SEQ ID NO: 6660 - RNA, 19 nt, artificial
  Chemically synthesized
aaagcaucuccaacucuga

SEQ ID NO: 6661 - RNA, 19 nt, artificial
  Chemically synthesized
caccaaaguaugaacugga

SEQ ID NO: 6662 - RNA, 19 nt, artificial
  Chemically synthesized
aacaacccagaaacaaaaa

SEQ ID NO: 6663 - RNA, 19 nt, artificial
  Chemically synthesized
gaguguuucuccaagguuu

SEQ ID NO: 6664 - RNA, 19 nt, artificial
  Chemically synthesized
aagauuguuugauagugau

SEQ ID NO: 6665 - RNA, 19 nt, artificial
  Chemically synthesized
auaguauguucugaauaua

SEQ ID NO: 6666 - RNA, 19 nt, artificial
  Chemically synthesized
cuuccuccaccaaaaccau

SEQ ID NO: 6667 - RNA, 19 nt, artificial
  Chemically synthesized
aauaguauguucugaauau

SEQ ID NO: 6668 - RNA, 19 nt, artificial
  Chemically synthesized
gugcuauaaaauaaaugca

SEQ ID NO: 6669 - RNA, 19 nt, artificial
  Chemically synthesized
uagcauuuauuaacaggua

SEQ ID NO: 6670 - RNA, 19 nt, artificial
  Chemically synthesized
cugauguuguuuugauuau

SEQ ID NO: 6671 - RNA, 19 nt, artificial
  Chemically synthesized
aaauguuuagaacucuuca

SEQ ID NO: 6672 - RNA, 19 nt, artificial
  Chemically synthesized
uagggaaaagauucuugga

SEQ ID NO: 6673 - RNA, 19 nt, artificial
  Chemically synthesized
caaaaugaaaguuaucuca

SEQ ID NO: 6674 - RNA, 19 nt, artificial
  Chemically synthesized
aguuugauauguauagaau

SEQ ID NO: 6675 - RNA, 19 nt, artificial
  Chemically synthesized
ucaucauccuaaaauuaac

SEQ ID NO: 6676 - RNA, 19 nt, artificial
  Chemically synthesized
uuaggaauugugacaaaua

SEQ ID NO: 6677 - RNA, 19 nt, artificial
  Chemically synthesized
aaagauuguuugauaguga

SEQ ID NO: 6678 - RNA, 19 nt, artificial
  Chemically synthesized
auucuuauuugaagcauga

SEQ ID NO: 6679 - RNA, 19 nt, artificial
  Chemically synthesized
aaucucaccuuucauaaaa

SEQ ID NO: 6680 - RNA, 19 nt, artificial
  Chemically synthesized
agguaucaauucaucuauu

SEQ ID NO: 6681 - RNA, 19 nt, artificial
  Chemically synthesized
cacugcaccucagguauca

SEQ ID NO: 6682 - RNA, 19 nt, artificial
  Chemically synthesized
auagccuuucugaaaugua

SEQ ID NO: 6683 - RNA, 19 nt, artificial
  Chemically synthesized
aguuauaaggagucugaga

SEQ ID NO: 6684 - RNA, 19 nt, artificial
  Chemically synthesized
agcucaaaaagaucuacuu

SEQ ID NO: 6685 - RNA, 19 nt, artificial
  Chemically synthesized
uggucacucacccuuucaa

SEQ ID NO: 6686 - RNA, 19 nt, artificial
  Chemically synthesized
aaucugaagcucaaaaaga

SEQ ID NO: 6687 - RNA, 19 nt, artificial
  Chemically synthesized
uguuaaaugaaugaaugaa

SEQ ID NO: 6688 - RNA, 19 nt, artificial
  Chemically synthesized
ugaauucaagacaauugca

SEQ ID NO: 6689 - RNA, 19 nt, artificial
  Chemically synthesized
cacaaauuuugaugcugag

SEQ ID NO: 6690 - RNA, 19 nt, artificial
  Chemically synthesized
uagcccuuaugaauauuga

SEQ ID NO: 6691 - RNA, 19 nt, artificial
  Chemically synthesized
guuuauuguuucaauucuu

SEQ ID NO: 6692 - RNA, 19 nt, artificial
  Chemically synthesized
uaguauguucugaauauau

SEQ ID NO: 6693 - RNA, 19 nt, artificial
  Chemically synthesized
acuaaguuaugaaaguaga

SEQ ID NO: 6694 - RNA, 19 nt, artificial
  Chemically synthesized
gucugguacaaauauugca

SEQ ID NO: 6695 - RNA, 19 nt, artificial
  Chemically synthesized
cuucuauuacugucauaga

SEQ ID NO: 6696 - RNA, 19 nt, artificial
  Chemically synthesized
cgugcugcucaacaagagu

SEQ ID NO: 6697 - RNA, 19 nt, artificial
  Chemically synthesized
gaugcguggaaacuaccua

SEQ ID NO: 6698 - RNA, 19 nt, artificial
  Chemically synthesized
ucaagacaauugcaaguca

SEQ ID NO: 6699 - RNA, 19 nt, artificial
  Chemically synthesized
guguuugugaaauuugaau

SEQ ID NO: 6700 - RNA, 19 nt, artificial
  Chemically synthesized
uaaggagucugagaauauu

SEQ ID NO: 6701 - RNA, 19 nt, artificial
  Chemically synthesized
auuucauuuucaacaagga

SEQ ID NO: 6702 - RNA, 19 nt, artificial
  Chemically synthesized
ggacaggaaucucaccuuu

SEQ ID NO: 6703 - RNA, 19 nt, artificial
  Chemically synthesized
caucuuacuccagguuuga

SEQ ID NO: 6704 - RNA, 19 nt, artificial
  Chemically synthesized
aaagagaaugggagaguga

SEQ ID NO: 6705 - RNA, 19 nt, artificial
  Chemically synthesized
gaucaaauucacacucaau

SEQ ID NO: 6706 - RNA, 19 nt, artificial
  Chemically synthesized
uaagagugcuugucauuau

SEQ ID NO: 6707 - RNA, 19 nt, artificial
  Chemically synthesized
ucaauaguauguucugaau

SEQ ID NO: 6708 - RNA, 19 nt, artificial
  Chemically synthesized
aaaguuugauauguauaga

SEQ ID NO: 6709 - RNA, 19 nt, artificial
  Chemically synthesized
guucugaauauauguucaa

SEQ ID NO: 6710 - RNA, 19 nt, artificial
  Chemically synthesized
guuaugagauaaaaaauga

SEQ ID NO: 6711 - RNA, 19 nt, artificial
  Chemically synthesized
ugaagcucaaaaagaucua

SEQ ID NO: 6712 - RNA, 19 nt, artificial
  Chemically synthesized
agagaaaauaaaaaaggca

SEQ ID NO: 6713 - RNA, 19 nt, artificial
  Chemically synthesized
uguuguuuugauuaucuau

SEQ ID NO: 6714 - RNA, 19 nt, artificial
  Chemically synthesized
caaaaagaaacuauaaugu

SEQ ID NO: 6715 - RNA, 19 nt, artificial
  Chemically synthesized
uagccuuucugaaauguac

SEQ ID NO: 6716 - RNA, 19 nt, artificial
  Chemically synthesized
acugcaccucagguaucaa

SEQ ID NO: 6717 - RNA, 19 nt, artificial
  Chemically synthesized
agaaggaaaccaaggagua

SEQ ID NO: 6718 - RNA, 19 nt, artificial
  Chemically synthesized
cagaauccucaaaaucagu

SEQ ID NO: 6719 - RNA, 19 nt, artificial
  Chemically synthesized
caucuauucaacagauauu

SEQ ID NO: 6720 - RNA, 19 nt, artificial
  Chemically synthesized
augguauugaaucuuuuaa

SEQ ID NO: 6721 - RNA, 19 nt, artificial
  Chemically synthesized
auaacaguuugugaacaaa

SEQ ID NO: 6722 - RNA, 19 nt, artificial
  Chemically synthesized
guaucaauucaucuauuca

SEQ ID NO: 6723 - RNA, 19 nt, artificial
  Chemically synthesized
uuucaauucuuuacaccaa

SEQ ID NO: 6724 - RNA, 19 nt, artificial
  Chemically synthesized
ugauuggaguuaauguaau

SEQ ID NO: 6725 - RNA, 19 nt, artificial
  Chemically synthesized
aaaccauccggaggucuua

SEQ ID NO: 6726 - RNA, 19 nt, artificial
  Chemically synthesized
caggaugguuucugcuuag

SEQ ID NO: 6727 - RNA, 19 nt, artificial
  Chemically synthesized
uacugauguuguuuugauu

SEQ ID NO: 6728 - RNA, 19 nt, artificial
  Chemically synthesized
aguccugcuccuugugcua

SEQ ID NO: 6729 - RNA, 19 nt, artificial
  Chemically synthesized
acuaaugguuuauuuguau

SEQ ID NO: 6730 - RNA, 19 nt, artificial
  Chemically synthesized
aauucacacucaauaguau

SEQ ID NO: 6731 - RNA, 19 nt, artificial
  Chemically synthesized
cagaugcaggaaaggaaca

SEQ ID NO: 6732 - RNA, 19 nt, artificial
  Chemically synthesized
gcuaugagguggugauguu

SEQ ID NO: 6733 - RNA, 19 nt, artificial
  Chemically synthesized
ugcucaacuauuaaaauga

SEQ ID NO: 6734 - RNA, 19 nt, artificial
  Chemically synthesized
uugugaacaaaaaaucuca

SEQ ID NO: 6735 - RNA, 19 nt, artificial
  Chemically synthesized
uaauauaacaguuugugaa

SEQ ID NO: 6736 - RNA, 19 nt, artificial
  Chemically synthesized
aauauauguucaagagaga

SEQ ID NO: 6737 - RNA, 19 nt, artificial
  Chemically synthesized
caguauugacaucugagca

SEQ ID NO: 6738 - RNA, 19 nt, artificial
  Chemically synthesized
cuauauauuucuacuuugu

SEQ ID NO: 6739 - RNA, 19 nt, artificial
  Chemically synthesized
auauggucauuuguuuuaa

SEQ ID NO: 6740 - RNA, 19 nt, artificial
  Chemically synthesized
gaagcauuguuuuuaaucu

SEQ ID NO: 6741 - RNA, 19 nt, artificial
  Chemically synthesized
cuauucaacagauauuuau

SEQ ID NO: 6742 - RNA, 19 nt, artificial
  Chemically synthesized
uauuugaagcaugaaaaaa

SEQ ID NO: 6743 - RNA, 19 nt, artificial
  Chemically synthesized
gguaccucaguuauaagga

SEQ ID NO: 6744 - RNA, 19 nt, artificial
  Chemically synthesized
uaauuuaaagccuuaaaca

SEQ ID NO: 6745 - RNA, 19 nt, artificial
  Chemically synthesized
agcacuuuuacaaacauua

SEQ ID NO: 6746 - RNA, 19 nt, artificial
  Chemically synthesized
cacacugcaccucagguau

SEQ ID NO: 6747 - RNA, 19 nt, artificial
  Chemically synthesized
guagcuauauauuucuacu

SEQ ID NO: 6748 - RNA, 19 nt, artificial
  Chemically synthesized
cauuuauguggagcucuau

SEQ ID NO: 6749 - RNA, 19 nt, artificial
  Chemically synthesized
uuguuaaaugaaugaauga

SEQ ID NO: 6750 - RNA, 19 nt, artificial
  Chemically synthesized
gauagugggucccauguuu

SEQ ID NO: 6751 - RNA, 19 nt, artificial
  Chemically synthesized
aggcuaaggauacuaacca

SEQ ID NO: 6752 - RNA, 19 nt, artificial
  Chemically synthesized
agagcggauacucaaguaa

SEQ ID NO: 6753 - RNA, 19 nt, artificial
  Chemically synthesized
agaagaauauuggauugau

SEQ ID NO: 6754 - RNA, 19 nt, artificial
  Chemically synthesized
gcuuuguaugugaauaauu

SEQ ID NO: 6755 - RNA, 19 nt, artificial
  Chemically synthesized
agaucuagcccaucuuacu

SEQ ID NO: 6756 - RNA, 19 nt, artificial
  Chemically synthesized
agguggucaucaccaaggu

SEQ ID NO: 6757 - RNA, 19 nt, artificial
  Chemically synthesized
uaauucugauccuuauuca

SEQ ID NO: 6758 - RNA, 19 nt, artificial
  Chemically synthesized
ugugacuaaugguuuauuu

SEQ ID NO: 6759 - RNA, 19 nt, artificial
  Chemically synthesized
caguaaugucaguggaagu

SEQ ID NO: 6760 - RNA, 19 nt, artificial
  Chemically synthesized
gguuuucuuuuuguucuua

SEQ ID NO: 6761 - RNA, 19 nt, artificial
  Chemically synthesized
cugauauggucauuuguuu

SEQ ID NO: 6762 - RNA, 19 nt, artificial
  Chemically synthesized
gacaucugagcauacucca

SEQ ID NO: 6763 - RNA, 19 nt, artificial
  Chemically synthesized
auugcaagucaacacccua

SEQ ID NO: 6764 - RNA, 19 nt, artificial
  Chemically synthesized
uguugagagugucucaaca

SEQ ID NO: 6765 - RNA, 19 nt, artificial
  Chemically synthesized
ucuuccaugaggaaauaaa

SEQ ID NO: 6766 - RNA, 19 nt, artificial
  Chemically synthesized
ggaaauaaauguggguugu

SEQ ID NO: 6767 - RNA, 19 nt, artificial
  Chemically synthesized
agauuguuugauagugaua

SEQ ID NO: 6768 - RNA, 19 nt, artificial
  Chemically synthesized
cccaaaguggucuucucca

SEQ ID NO: 6769 - RNA, 19 nt, artificial
  Chemically synthesized
ucuuuacaccaaaguauga

SEQ ID NO: 6770 - RNA, 19 nt, artificial
  Chemically synthesized
gcauaauauaacaguuugu

SEQ ID NO: 6771 - RNA, 19 nt, artificial
  Chemically synthesized
ugugcauaauauaacaguu

SEQ ID NO: 6772 - RNA, 19 nt, artificial
  Chemically synthesized
acuuugcugugcaccauga

SEQ ID NO: 6773 - RNA, 19 nt, artificial
  Chemically synthesized
guuugcagaucugcugcaa

SEQ ID NO: 6774 - RNA, 19 nt, artificial
  Chemically synthesized
ucuacagaagaauauugga

SEQ ID NO: 6775 - RNA, 19 nt, artificial
  Chemically synthesized
aaaaugaaaguuaucucaa

SEQ ID NO: 6776 - RNA, 19 nt, artificial
  Chemically synthesized
uccggaggucuuacuuuga

SEQ ID NO: 6777 - RNA, 19 nt, artificial
  Chemically synthesized
gaaacaaaagacuuuguau

SEQ ID NO: 6778 - RNA, 19 nt, artificial
  Chemically synthesized
guaugugaauaauucuagc

SEQ ID NO: 6779 - RNA, 19 nt, artificial
  Chemically synthesized
uuaaaaauggacaaaaaga

SEQ ID NO: 6780 - RNA, 19 nt, artificial
  Chemically synthesized
aauggacaaaaagaaacua

SEQ ID NO: 6781 - RNA, 19 nt, artificial
  Chemically synthesized
gguaggucugacaaauaag

SEQ ID NO: 6782 - RNA, 19 nt, artificial
  Chemically synthesized
guacaaauauugcaauaac

SEQ ID NO: 6783 - RNA, 19 nt, artificial
  Chemically synthesized
ugcuugucauuauaaaagu

SEQ ID NO: 6784 - RNA, 19 nt, artificial
  Chemically synthesized
cacuuauuagugacaguau

SEQ ID NO: 6785 - RNA, 19 nt, artificial
  Chemically synthesized
uaccuaagauagcgguuga

SEQ ID NO: 6786 - RNA, 19 nt, artificial
  Chemically synthesized
cuauuaaaaugaaugagcu

SEQ ID NO: 6787 - RNA, 19 nt, artificial
  Chemically synthesized
aucuggucacaaauuuuga

SEQ ID NO: 6788 - RNA, 19 nt, artificial
  Chemically synthesized
agaaugggagagugagaga

SEQ ID NO: 6789 - RNA, 19 nt, artificial
  Chemically synthesized
uuucauuuucaacaaggaa

SEQ ID NO: 6790 - RNA, 19 nt, artificial
  Chemically synthesized
uuuugagagcacuuuuaca

SEQ ID NO: 6791 - RNA, 19 nt, artificial
  Chemically synthesized
aaaacugugcucaacuauu

SEQ ID NO: 6792 - RNA, 19 nt, artificial
  Chemically synthesized
acaagaguucgaagacaac

SEQ ID NO: 6793 - RNA, 19 nt, artificial
  Chemically synthesized
augugaucacaggccugaa

SEQ ID NO: 6794 - RNA, 19 nt, artificial
  Chemically synthesized
acauguugagagugucuca

SEQ ID NO: 6795 - RNA, 19 nt, artificial
  Chemically synthesized
cuuaaaaauggacaaaaag

SEQ ID NO: 6796 - RNA, 19 nt, artificial
  Chemically synthesized
agcauuguuuuuaaucuua

SEQ ID NO: 6797 - RNA, 19 nt, artificial
  Chemically synthesized
gugagagaaaauaaaaaag

SEQ ID NO: 6798 - RNA, 19 nt, artificial
  Chemically synthesized
cugaggguaggucugacaa

SEQ ID NO: 6799 - RNA, 19 nt, artificial
  Chemically synthesized
gaacuuaggaauugugaca

SEQ ID NO: 6800 - RNA, 19 nt, artificial
  Chemically synthesized
guucuuugucauacuacua

SEQ ID NO: 6801 - RNA, 19 nt, artificial
  Chemically synthesized
aaugaggaagaaggagaaa

SEQ ID NO: 6802 - RNA, 19 nt, artificial
  Chemically synthesized
uggucaucaccaagguggu

SEQ ID NO: 6803 - RNA, 19 nt, artificial
  Chemically synthesized
uguucugaauauauguuca

SEQ ID NO: 6804 - RNA, 19 nt, artificial
  Chemically synthesized
aaggguucugcacauucuu

SEQ ID NO: 6805 - RNA, 19 nt, artificial
  Chemically synthesized
uuggagacaggcaaaauga

SEQ ID NO: 6806 - RNA, 19 nt, artificial
  Chemically synthesized
ccagaauaggaguuuuccu

SEQ ID NO: 6807 - RNA, 19 nt, artificial
  Chemically synthesized
aucucuauacagagaucaa

SEQ ID NO: 6808 - RNA, 19 nt, artificial
  Chemically synthesized
uguucuuugucauacuacu

SEQ ID NO: 6809 - RNA, 19 nt, artificial
  Chemically synthesized
aauugugacaaauauguau

SEQ ID NO: 6810 - RNA, 19 nt, artificial
  Chemically synthesized
auucuuggacucaauuuua

SEQ ID NO: 6811 - RNA, 19 nt, artificial
  Chemically synthesized
aauauagccuuucugaaau

SEQ ID NO: 6812 - RNA, 19 nt, artificial
  Chemically synthesized
uaagauuaugaaacuguga

SEQ ID NO: 6813 - RNA, 19 nt, artificial
  Chemically synthesized
gagagaaaauaaaaaaggc

SEQ ID NO: 6814 - RNA, 19 nt, artificial
  Chemically synthesized
uacugaaggaaauuuucca

SEQ ID NO: 6815 - RNA, 19 nt, artificial
  Chemically synthesized
aucaucauccuaaaauuaa

SEQ ID NO: 6816 - RNA, 19 nt, artificial
  Chemically synthesized
uuguaugugaauaauucua

SEQ ID NO: 6817 - RNA, 19 nt, artificial
  Chemically synthesized
aguuuuguuaaaugaauga

SEQ ID NO: 6818 - RNA, 19 nt, artificial
  Chemically synthesized
gcuuccucagcuacaacau

SEQ ID NO: 6819 - RNA, 19 nt, artificial
  Chemically synthesized
aaggaaugucaaagauugu

SEQ ID NO: 6820 - RNA, 19 nt, artificial
  Chemically synthesized
gauagugauaaguuacauu

SEQ ID NO: 6821 - RNA, 19 nt, artificial
  Chemically synthesized
ugauagugauaaguuacau

SEQ ID NO: 6822 - RNA, 19 nt, artificial
  Chemically synthesized
ucauuaggacauaauacau

SEQ ID NO: 6823 - RNA, 19 nt, artificial
  Chemically synthesized
gaaacuauaauguaauggu

SEQ ID NO: 6824 - RNA, 19 nt, artificial
  Chemically synthesized
ugcuuaaaaauggacaaaa

SEQ ID NO: 6825 - RNA, 19 nt, artificial
  Chemically synthesized
aaguggucuucuccagcua

SEQ ID NO: 6826 - RNA, 19 nt, artificial
  Chemically synthesized
aagcauuguuuuuaaucuu

SEQ ID NO: 6827 - RNA, 19 nt, artificial
  Chemically synthesized
acuuauuagugacaguauu

SEQ ID NO: 6828 - RNA, 19 nt, artificial
  Chemically synthesized
gaagaaggagaaagagcug

SEQ ID NO: 6829 - RNA, 19 nt, artificial
  Chemically synthesized
ccuuugagugguuugcaga

SEQ ID NO: 6830 - RNA, 19 nt, artificial
  Chemically synthesized
ggcuuccucagcuacaaca

SEQ ID NO: 6831 - RNA, 19 nt, artificial
  Chemically synthesized
cauggagcugaacgaauug

SEQ ID NO: 6832 - RNA, 19 nt, artificial
  Chemically synthesized
cuuugagugguuugcagau

SEQ ID NO: 6833 - RNA, 19 nt, artificial
  Chemically synthesized
ccaaaguaugaacuggaga

SEQ ID NO: 6834 - RNA, 19 nt, artificial
  Chemically synthesized
uauaacaguuugugaacaa

SEQ ID NO: 6835 - RNA, 19 nt, artificial
  Chemically synthesized
cauaauacauguugagagu

SEQ ID NO: 6836 - RNA, 19 nt, artificial
  Chemically synthesized
auaaugaauucaagacaau

SEQ ID NO: 6837 - RNA, 19 nt, artificial
  Chemically synthesized
auccauggagcugaacgaa

SEQ ID NO: 6838 - RNA, 19 nt, artificial
  Chemically synthesized
ugccucauauuaauuauca

SEQ ID NO: 6839 - RNA, 19 nt, artificial
  Chemically synthesized
uagggucaagaacaggcua

SEQ ID NO: 6840 - RNA, 19 nt, artificial
  Chemically synthesized
cacuuaguauuuagcauuu

SEQ ID NO: 6841 - RNA, 19 nt, artificial
  Chemically synthesized
auuauaucaucaucaucau

SEQ ID NO: 6842 - RNA, 19 nt, artificial
  Chemically synthesized
cucaaguaaguuuuguuaa

SEQ ID NO: 6843 - RNA, 19 nt, artificial
  Chemically synthesized
auuuuuuuccucucaguaa

SEQ ID NO: 6844 - RNA, 19 nt, artificial
  Chemically synthesized
cucaauuuugcucgaaaga

SEQ ID NO: 6845 - RNA, 19 nt, artificial
  Chemically synthesized
gauguuguuuugauuaucu

SEQ ID NO: 6846 - RNA, 19 nt, artificial
  Chemically synthesized
aucucaccuuucauaaaau

SEQ ID NO: 6847 - RNA, 19 nt, artificial
  Chemically synthesized
auugauuggaguuaaugua

SEQ ID NO: 6848 - RNA, 19 nt, artificial
  Chemically synthesized
cauguugagagugucucaa

SEQ ID NO: 6849 - RNA, 19 nt, artificial
  Chemically synthesized
gguucaaaauggaaguggg

SEQ ID NO: 6850 - RNA, 19 nt, artificial
  Chemically synthesized
aaagaagaaggaaaccaag

SEQ ID NO: 6851 - RNA, 19 nt, artificial
  Chemically synthesized
agaaauaacuucuauuacu

SEQ ID NO: 6852 - RNA, 19 nt, artificial
  Chemically synthesized
ugagucaggcucuguuuau

SEQ ID NO: 6853 - RNA, 19 nt, artificial
  Chemically synthesized
uugauuggaguuaauguaa

SEQ ID NO: 6854 - RNA, 19 nt, artificial
  Chemically synthesized
uuauuaucauacugaagga

SEQ ID NO: 6855 - RNA, 19 nt, artificial
  Chemically synthesized
aggauacuaaccaauagga

SEQ ID NO: 6856 - RNA, 19 nt, artificial
  Chemically synthesized
uguucacacugcaccucag

SEQ ID NO: 6857 - RNA, 19 nt, artificial
  Chemically synthesized
augaagcauuguuuuuaau

SEQ ID NO: 6858 - RNA, 19 nt, artificial
  Chemically synthesized
gaaucuuuuaaaaucuggu

SEQ ID NO: 6859 - RNA, 19 nt, artificial
  Chemically synthesized
ugaugaagcauuguuuuua

SEQ ID NO: 6860 - RNA, 19 nt, artificial
  Chemically synthesized
aauaaagaacccugaagga

SEQ ID NO: 6861 - RNA, 19 nt, artificial
  Chemically synthesized
guuucaauucuuuacacca

SEQ ID NO: 6862 - RNA, 19 nt, artificial
  Chemically synthesized
gugaccagaucuagcccau

SEQ ID NO: 6863 - RNA, 19 nt, artificial
  Chemically synthesized
agagagucucuaaaucacu

SEQ ID NO: 6864 - RNA, 19 nt, artificial
  Chemically synthesized
aaagggaaaggaucaaaag

SEQ ID NO: 6865 - RNA, 19 nt, artificial
  Chemically synthesized
augagguggugauguuagu

SEQ ID NO: 6866 - RNA, 19 nt, artificial
  Chemically synthesized
gauuucuuaaaguuugaua

SEQ ID NO: 6867 - RNA, 19 nt, artificial
  Chemically synthesized
uucuuauuugaagcaugaa

SEQ ID NO: 6868 - RNA, 19 nt, artificial
  Chemically synthesized
aguuaugaaaguagagaga

SEQ ID NO: 6869 - RNA, 19 nt, artificial
  Chemically synthesized
cugaguaaacaaagcaucu

SEQ ID NO: 6870 - RNA, 19 nt, artificial
  Chemically synthesized
cuuucuaaccuaugugcau

SEQ ID NO: 6871 - RNA, 19 nt, artificial
  Chemically synthesized
uuugcucgaaagagaauaa

SEQ ID NO: 6872 - RNA, 19 nt, artificial
  Chemically synthesized
gagaguguuucuccaaggu

SEQ ID NO: 6873 - RNA, 19 nt, artificial
  Chemically synthesized
aaagaggguuggaggugga

SEQ ID NO: 6874 - RNA, 19 nt, artificial
  Chemically synthesized
gaucauuaggacauaauac

SEQ ID NO: 6875 - RNA, 19 nt, artificial
  Chemically synthesized
uuaugaaacugugaccaga

SEQ ID NO: 6876 - RNA, 19 nt, artificial
  Chemically synthesized
ucaucuauucaacagauau

SEQ ID NO: 6877 - RNA, 19 nt, artificial
  Chemically synthesized
gguuuauuuguauuauauc

SEQ ID NO: 6878 - RNA, 19 nt, artificial
  Chemically synthesized
cuaaagaaauaacuucuau

SEQ ID NO: 6879 - RNA, 19 nt, artificial
  Chemically synthesized
caagaguucgaagacaacu

SEQ ID NO: 6880 - RNA, 19 nt, artificial
  Chemically synthesized
acaaauauguaucugauau

SEQ ID NO: 6881 - RNA, 19 nt, artificial
  Chemically synthesized
aaaucuggucacaaauuuu

SEQ ID NO: 6882 - RNA, 19 nt, artificial
  Chemically synthesized
ugaacuaaauaagaacuca

SEQ ID NO: 6883 - RNA, 19 nt, artificial
  Chemically synthesized
aguaaacaaagcaucucca

SEQ ID NO: 6884 - RNA, 19 nt, artificial
  Chemically synthesized
cuaugaagguuuuucuuag

SEQ ID NO: 6885 - RNA, 19 nt, artificial
  Chemically synthesized
uauaauugaaggagguaua

SEQ ID NO: 6886 - RNA, 19 nt, artificial
  Chemically synthesized
acuuaguauuuagcauuua

SEQ ID NO: 6887 - RNA, 19 nt, artificial
  Chemically synthesized
gagcggauacucaaguaag

SEQ ID NO: 6888 - RNA, 19 nt, artificial
  Chemically synthesized
uguggagcucuaugguuuu

SEQ ID NO: 6889 - RNA, 19 nt, artificial
  Chemically synthesized
cagaucugcugcaacugcu

SEQ ID NO: 6890 - RNA, 19 nt, artificial
  Chemically synthesized
cagauguucuuucuacaga

SEQ ID NO: 6891 - RNA, 19 nt, artificial
  Chemically synthesized
uacugagcugccucagaau

SEQ ID NO: 6892 - RNA, 19 nt, artificial
  Chemically synthesized
uuauaguuucuuuuugucc

SEQ ID NO: 6893 - RNA, 19 nt, artificial
  Chemically synthesized
uugagcuucagauuggugg

SEQ ID NO: 6894 - RNA, 19 nt, artificial
  Chemically synthesized
uuuuuguccauuuuuaagc

SEQ ID NO: 6895 - RNA, 19 nt, artificial
  Chemically synthesized
auuuaguucauccuagucc

SEQ ID NO: 6896 - RNA, 19 nt, artificial
  Chemically synthesized
uuuuuuaucucauaacugg

SEQ ID NO: 6897 - RNA, 19 nt, artificial
  Chemically synthesized
uuuuuauuuucucucacuc

SEQ ID NO: 6898 - RNA, 19 nt, artificial
  Chemically synthesized
uucauuuuaauaguugagc

SEQ ID NO: 6899 - RNA, 19 nt, artificial
  Chemically synthesized
uuaaaaacaaugcuucauc

SEQ ID NO: 6900 - RNA, 19 nt, artificial
  Chemically synthesized
uuauuugucagaccuaccc

SEQ ID NO: 6901 - RNA, 19 nt, artificial
  Chemically synthesized
uuucuccucaucauggugc

SEQ ID NO: 6902 - RNA, 19 nt, artificial
  Chemically synthesized
uuuauuuuauagcacaagg

SEQ ID NO: 6903 - RNA, 19 nt, artificial
  Chemically synthesized
uuuuaaaagauucaauacc

SEQ ID NO: 6904 - RNA, 19 nt, artificial
  Chemically synthesized
uugacuugcaauugucuug

SEQ ID NO: 6905 - RNA, 19 nt, artificial
  Chemically synthesized
uuauuuaaaacaaaugacc

SEQ ID NO: 6906 - RNA, 19 nt, artificial
  Chemically synthesized
uuaauaguugagcacaguu

SEQ ID NO: 6907 - RNA, 19 nt, artificial
  Chemically synthesized
uuaauuaugcacauagguu

SEQ ID NO: 6908 - RNA, 19 nt, artificial
  Chemically synthesized
uuuuuguucacaaacuguu

SEQ ID NO: 6909 - RNA, 19 nt, artificial
  Chemically synthesized
auaaggaucagaauuauug

SEQ ID NO: 6910 - RNA, 19 nt, artificial
  Chemically synthesized
uaacuuaucacuaucaaac

SEQ ID NO: 6911 - RNA, 19 nt, artificial
  Chemically synthesized
uucaauaccauagauaauc

SEQ ID NO: 6912 - RNA, 19 nt, artificial
  Chemically synthesized
uaauucuccaccuccaacc

SEQ ID NO: 6913 - RNA, 19 nt, artificial
  Chemically synthesized
uuccuguccaguugucuuc

SEQ ID NO: 6914 - RNA, 19 nt, artificial
  Chemically synthesized
ucuuuauucucuuucgagc

SEQ ID NO: 6915 - RNA, 19 nt, artificial
  Chemically synthesized
uauuauguccuaaugaucu

SEQ ID NO: 6916 - RNA, 19 nt, artificial
  Chemically synthesized
uauuacauuaacuccaauc

SEQ ID NO: 6917 - RNA, 19 nt, artificial
  Chemically synthesized
uauaguuucuuuuugucca

SEQ ID NO: 6918 - RNA, 19 nt, artificial
  Chemically synthesized
uauuaggguguugacuugc

SEQ ID NO: 6919 - RNA, 19 nt, artificial
  Chemically synthesized
uugaguauccgcucucugc

SEQ ID NO: 6920 - RNA, 19 nt, artificial
  Chemically synthesized
uuuuauaaugacaagcacu

SEQ ID NO: 6921 - RNA, 19 nt, artificial
  Chemically synthesized
uuugauucuaaaauugagu

SEQ ID NO: 6922 - RNA, 19 nt, artificial
  Chemically synthesized
uucaaaguaagaccuccgg

SEQ ID NO: 6923 - RNA, 19 nt, artificial
  Chemically synthesized
uacaaauaaaccauuaguc

SEQ ID NO: 6924 - RNA, 19 nt, artificial
  Chemically synthesized
uuuuguuucaggccuguga

SEQ ID NO: 6925 - RNA, 19 nt, artificial
  Chemically synthesized
uuuuauuuucucucacucu

SEQ ID NO: 6926 - RNA, 19 nt, artificial
  Chemically synthesized
uugucuugaauucauuauc

SEQ ID NO: 6927 - RNA, 19 nt, artificial
  Chemically synthesized
uugauucuaaaauugaguc

SEQ ID NO: 6928 - RNA, 19 nt, artificial
  Chemically synthesized
auuuuuuaucucauaacug

SEQ ID NO: 6929 - RNA, 19 nt, artificial
  Chemically synthesized
uaauaguugagcacaguuu

SEQ ID NO: 6930 - RNA, 19 nt, artificial
  Chemically synthesized
ucauucacagcccaguucc

SEQ ID NO: 6931 - RNA, 19 nt, artificial
  Chemically synthesized
uuaagauuaaaaacaaugc

SEQ ID NO: 6932 - RNA, 19 nt, artificial
  Chemically synthesized
ucagaaaggcuauauucgc

SEQ ID NO: 6933 - RNA, 19 nt, artificial
  Chemically synthesized
uuuaugaaaggugagauuc

SEQ ID NO: 6934 - RNA, 19 nt, artificial
  Chemically synthesized
ucguucagcuccauggaug

SEQ ID NO: 6935 - RNA, 19 nt, artificial
  Chemically synthesized
uuccucauuaccgaaguug

SEQ ID NO: 6936 - RNA, 19 nt, artificial
  Chemically synthesized
uuuaauuaugcacauaggu

SEQ ID NO: 6937 - RNA, 19 nt, artificial
  Chemically synthesized
uuuuuuauuuucucucacu

SEQ ID NO: 6938 - RNA, 19 nt, artificial
  Chemically synthesized
uuugagcuucagauuggug

SEQ ID NO: 6939 - RNA, 19 nt, artificial
  Chemically synthesized
uuuuaauuaugcacauagg

SEQ ID NO: 6940 - RNA, 19 nt, artificial
  Chemically synthesized
uuaauucuccaccuccaac

SEQ ID NO: 6941 - RNA, 19 nt, artificial
  Chemically synthesized
auaaaaacugauuuugagg

SEQ ID NO: 6942 - RNA, 19 nt, artificial
  Chemically synthesized
uuuaaaagauucaauacca

SEQ ID NO: 6943 - RNA, 19 nt, artificial
  Chemically synthesized
uuuuuaucucauaacugga

SEQ ID NO: 6944 - RNA, 19 nt, artificial
  Chemically synthesized
uucaggguucuuuauucuc

SEQ ID NO: 6945 - RNA, 19 nt, artificial
  Chemically synthesized
uuuuuuguucacaaacugu

SEQ ID NO: 6946 - RNA, 19 nt, artificial
  Chemically synthesized
uccuuauuuccuuuuccuc

SEQ ID NO: 6947 - RNA, 19 nt, artificial
  Chemically synthesized
uauaaugacaagcacucuu

SEQ ID NO: 6948 - RNA, 19 nt, artificial
  Chemically synthesized
uuguugagcagcacgcacu

SEQ ID NO: 6949 - RNA, 19 nt, artificial
  Chemically synthesized
uuucuuuuuguccauuuuu

SEQ ID NO: 6950 - RNA, 19 nt, artificial
  Chemically synthesized
aauucguucagcuccaugg

SEQ ID NO: 6951 - RNA, 19 nt, artificial
  Chemically synthesized
uuuuucaugcuucaaauaa

SEQ ID NO: 6952 - RNA, 19 nt, artificial
  Chemically synthesized
uccuaaaccagucuucugc

SEQ ID NO: 6953 - RNA, 19 nt, artificial
  Chemically synthesized
uuuucaugcuucaaauaag

SEQ ID NO: 6954 - RNA, 19 nt, artificial
  Chemically synthesized
ucucuaagcagaaaccauc

SEQ ID NO: 6955 - RNA, 19 nt, artificial
  Chemically synthesized
ucaaacuuuaagaaaucug

SEQ ID NO: 6956 - RNA, 19 nt, artificial
  Chemically synthesized
auuuauuuccucauggaag

SEQ ID NO: 6957 - RNA, 19 nt, artificial
  Chemically synthesized
uucauuuaacaaaacuuac

SEQ ID NO: 6958 - RNA, 19 nt, artificial
  Chemically synthesized
uuugaaagggugagugacc

SEQ ID NO: 6959 - RNA, 19 nt, artificial
  Chemically synthesized
uugacucgggcauucacac

SEQ ID NO: 6960 - RNA, 19 nt, artificial
  Chemically synthesized
ucuuuuuucaugcuucaaa

SEQ ID NO: 6961 - RNA, 19 nt, artificial
  Chemically synthesized
ucucuuucgagcaaaauug

SEQ ID NO: 6962 - RNA, 19 nt, artificial
  Chemically synthesized
uuuaaaacaaaugaccaua

SEQ ID NO: 6963 - RNA, 19 nt, artificial
  Chemically synthesized
uucaguaugauaauaauga

SEQ ID NO: 6964 - RNA, 19 nt, artificial
  Chemically synthesized
ucuuuucuccuuauuuccu

SEQ ID NO: 6965 - RNA, 19 nt, artificial
  Chemically synthesized
ucauucauuuuaauaguug

SEQ ID NO: 6966 - RNA, 19 nt, artificial
  Chemically synthesized
ucuugaauucauuauccca

SEQ ID NO: 6967 - RNA, 19 nt, artificial
  Chemically synthesized
uucuuauuuaguucauccu

SEQ ID NO: 6968 - RNA, 19 nt, artificial
  Chemically synthesized
ucaauuagcauuauuugag

SEQ ID NO: 6969 - RNA, 19 nt, artificial
  Chemically synthesized
uaaauuaauucuaucuugg

SEQ ID NO: 6970 - RNA, 19 nt, artificial
  Chemically synthesized
ucauaggaggguuuccagc

SEQ ID NO: 6971 - RNA, 19 nt, artificial
  Chemically synthesized
uaaauuuuguuuaaggcuu

SEQ ID NO: 6972 - RNA, 19 nt, artificial
  Chemically synthesized
uaucaaacaaucuuugaca

SEQ ID NO: 6973 - RNA, 19 nt, artificial
  Chemically synthesized
uuuugauucuaaaauugag

SEQ ID NO: 6974 - RNA, 19 nt, artificial
  Chemically synthesized
uuuccuuuuccuccuaaac

SEQ ID NO: 6975 - RNA, 19 nt, artificial
  Chemically synthesized
augaguauuacauuaacuc

SEQ ID NO: 6976 - RNA, 19 nt, artificial
  Chemically synthesized
uuugccugucuccaaguuc

SEQ ID NO: 6977 - RNA, 19 nt, artificial
  Chemically synthesized
uaaggcuuuaaauuaauuc

SEQ ID NO: 6978 - RNA, 19 nt, artificial
  Chemically synthesized
uaauuuuaggaugaugaug

SEQ ID NO: 6979 - RNA, 19 nt, artificial
  Chemically synthesized
aucuuuuugagcuucagau

SEQ ID NO: 6980 - RNA, 19 nt, artificial
  Chemically synthesized
uuaugaaaggugagauucc

SEQ ID NO: 6981 - RNA, 19 nt, artificial
  Chemically synthesized
uauucuauacauaucaaac

SEQ ID NO: 6982 - RNA, 19 nt, artificial
  Chemically synthesized
uacauauuugucacaauuc

SEQ ID NO: 6983 - RNA, 19 nt, artificial
  Chemically synthesized
uuucucucacucucccauu

SEQ ID NO: 6984 - RNA, 19 nt, artificial
  Chemically synthesized
uucuuuuuguccauuuuua

SEQ ID NO: 6985 - RNA, 19 nt, artificial
  Chemically synthesized
uaauuaugcacauagguua

SEQ ID NO: 6986 - RNA, 19 nt, artificial
  Chemically synthesized
uucucuuuucuccuuauuu

SEQ ID NO: 6987 - RNA, 19 nt, artificial
  Chemically synthesized
uaguucauccuagucccuu

SEQ ID NO: 6988 - RNA, 19 nt, artificial
  Chemically synthesized
ugucuucgaacucuuguug

SEQ ID NO: 6989 - RNA, 19 nt, artificial
  Chemically synthesized
ucccauucucuuuucuccu

SEQ ID NO: 6990 - RNA, 19 nt, artificial
  Chemically synthesized
auugacucgggcauucaca

SEQ ID NO: 6991 - RNA, 19 nt, artificial
  Chemically synthesized
ucucacucucccauucucu

SEQ ID NO: 6992 - RNA, 19 nt, artificial
  Chemically synthesized
auuauaguuucuuuuuguc

SEQ ID NO: 6993 - RNA, 19 nt, artificial
  Chemically synthesized
uccagcuuggacaccuuug

SEQ ID NO: 6994 - RNA, 19 nt, artificial
  Chemically synthesized
auugagauaacuuucauuu

SEQ ID NO: 6995 - RNA, 19 nt, artificial
  Chemically synthesized
auauuugucacaauuccua

SEQ ID NO: 6996 - RNA, 19 nt, artificial
  Chemically synthesized
uaagcagaaaccauccugg

SEQ ID NO: 6997 - RNA, 19 nt, artificial
  Chemically synthesized
uuguugaaaaugaaaugca

SEQ ID NO: 6998 - RNA, 19 nt, artificial
  Chemically synthesized
uuuugccuuuuuuauuuuc

SEQ ID NO: 6999 - RNA, 19 nt, artificial
  Chemically synthesized
ucuaaauucauucauucau

SEQ ID NO: 7000 - RNA, 19 nt, artificial
  Chemically synthesized
uuuaacaaaacuuacuuga

SEQ ID NO: 7001 - RNA, 19 nt, artificial
  Chemically synthesized
auaaauuuuguuuaaggcu

SEQ ID NO: 7002 - RNA, 19 nt, artificial
  Chemically synthesized
ucucccauucucuuuucuc

SEQ ID NO: 7003 - RNA, 19 nt, artificial
  Chemically synthesized
uuugccuuuuuuauuuucu

SEQ ID NO: 7004 - RNA, 19 nt, artificial
  Chemically synthesized
uaucagauacauauuuguc

SEQ ID NO: 7005 - RNA, 19 nt, artificial
  Chemically synthesized
uugccuuuuuuauuuucuc

SEQ ID NO: 7006 - RNA, 19 nt, artificial
  Chemically synthesized
uugacauuccuuuaaggga

SEQ ID NO: 7007 - RNA, 19 nt, artificial
  Chemically synthesized
uguauagagauuuuuguuu

SEQ ID NO: 7008 - RNA, 19 nt, artificial
  Chemically synthesized
uuguuuaaggcuuuaaauu

SEQ ID NO: 7009 - RNA, 19 nt, artificial
  Chemically synthesized
uuagucugcauuuauuuua

SEQ ID NO: 7010 - RNA, 19 nt, artificial
  Chemically synthesized
uccaguugucuucgaacuc

SEQ ID NO: 7011 - RNA, 19 nt, artificial
  Chemically synthesized
ugaaaggugagauuccugu

SEQ ID NO: 7012 - RNA, 19 nt, artificial
  Chemically synthesized
uauuuguaccagacugacu

SEQ ID NO: 7013 - RNA, 19 nt, artificial
  Chemically synthesized
ucugcauuuauuuuauagc

SEQ ID NO: 7014 - RNA, 19 nt, artificial
  Chemically synthesized
uuuguuucuggguuguuaa

SEQ ID NO: 7015 - RNA, 19 nt, artificial
  Chemically synthesized
uaaaugaugaguauuacau

SEQ ID NO: 7016 - RNA, 19 nt, artificial
  Chemically synthesized
aaucaauccaauauucuuc

SEQ ID NO: 7017 - RNA, 19 nt, artificial
  Chemically synthesized
ucagaugucaauacuguca

SEQ ID NO: 7018 - RNA, 19 nt, artificial
  Chemically synthesized
aauuuuaggaugaugauga

SEQ ID NO: 7019 - RNA, 19 nt, artificial
  Chemically synthesized
auuaaauagaugugcaaug

SEQ ID NO: 7020 - RNA, 19 nt, artificial
  Chemically synthesized
ugagauuccuguccaguug

SEQ ID NO: 7021 - RNA, 19 nt, artificial
  Chemically synthesized
uaaaccagucuucugcccu

SEQ ID NO: 7022 - RNA, 19 nt, artificial
  Chemically synthesized
uauugacucgggcauucac

SEQ ID NO: 7023 - RNA, 19 nt, artificial
  Chemically synthesized
uuauuuuauagcacaagga

SEQ ID NO: 7024 - RNA, 19 nt, artificial
  Chemically synthesized
aaaagauucaauaccauag

SEQ ID NO: 7025 - RNA, 19 nt, artificial
  Chemically synthesized
auucugagauuuuuuguuc

SEQ ID NO: 7026 - RNA, 19 nt, artificial
  Chemically synthesized
auuuuuuguucacaaacug

SEQ ID NO: 7027 - RNA, 19 nt, artificial
  Chemically synthesized
uauuuaaaacaaaugacca

SEQ ID NO: 7028 - RNA, 19 nt, artificial
  Chemically synthesized
uuccacauuaaauagaugu

SEQ ID NO: 7029 - RNA, 19 nt, artificial
  Chemically synthesized
uuuucuccuuauuuccuuu

SEQ ID NO: 7030 - RNA, 19 nt, artificial
  Chemically synthesized
uuuuguuuaaggcuuuaaa

SEQ ID NO: 7031 - RNA, 19 nt, artificial
  Chemically synthesized
uucauaacuuaguugguuu

SEQ ID NO: 7032 - RNA, 19 nt, artificial
  Chemically synthesized
uucuauacauaucaaacuu

SEQ ID NO: 7033 - RNA, 19 nt, artificial
  Chemically synthesized
uaaugaucuggaaaauuuc

SEQ ID NO: 7034 - RNA, 19 nt, artificial
  Chemically synthesized
ucauaaacccgguaauacc

SEQ ID NO: 7035 - RNA, 19 nt, artificial
  Chemically synthesized
auugaaacaauaaacagag

SEQ ID NO: 7036 - RNA, 19 nt, artificial
  Chemically synthesized
uguccaguugucuucgaac

SEQ ID NO: 7037 - RNA, 19 nt, artificial
  Chemically synthesized
uguauuuacggaaaauaag

SEQ ID NO: 7038 - RNA, 19 nt, artificial
  Chemically synthesized
ucucuuuucuccuuauuuc

SEQ ID NO: 7039 - RNA, 19 nt, artificial
  Chemically synthesized
uugacaaaaauguauuguc

SEQ ID NO: 7040 - RNA, 19 nt, artificial
  Chemically synthesized
uauaaaaacugauuuugag

SEQ ID NO: 7041 - RNA, 19 nt, artificial
  Chemically synthesized
uaucaauuagcauuauuug

SEQ ID NO: 7042 - RNA, 19 nt, artificial
  Chemically synthesized
auaaauguaacuuaucacu

SEQ ID NO: 7043 - RNA, 19 nt, artificial
  Chemically synthesized
ucucaaaaccauagagcuc

SEQ ID NO: 7044 - RNA, 19 nt, artificial
  Chemically synthesized
uagaaauauauagcuacuc

SEQ ID NO: 7045 - RNA, 19 nt, artificial
  Chemically synthesized
ucucucucccuuuugccuu

SEQ ID NO: 7046 - RNA, 19 nt, artificial
  Chemically synthesized
aguaugauaauaaugaugg

SEQ ID NO: 7047 - RNA, 19 nt, artificial
  Chemically synthesized
uguuaauuuuaggaugaug

SEQ ID NO: 7048 - RNA, 19 nt, artificial
  Chemically synthesized
aucagauacauauuuguca

SEQ ID NO: 7049 - RNA, 19 nt, artificial
  Chemically synthesized
uaagaugggcuagaucugg

SEQ ID NO: 7050 - RNA, 19 nt, artificial
  Chemically synthesized
auaauguuuguaaaagugc

SEQ ID NO: 7051 - RNA, 19 nt, artificial
  Chemically synthesized
uuucuccuuauuuccuuuu

SEQ ID NO: 7052 - RNA, 19 nt, artificial
  Chemically synthesized
uucugagauuuuuuguuca

SEQ ID NO: 7053 - RNA, 19 nt, artificial
  Chemically synthesized
ugguauuaggguguugacu

SEQ ID NO: 7054 - RNA, 19 nt, artificial
  Chemically synthesized
uuugguguaaagaauugaa

SEQ ID NO: 7055 - RNA, 19 nt, artificial
  Chemically synthesized
uucuaaauucauucauuca

SEQ ID NO: 7056 - RNA, 19 nt, artificial
  Chemically synthesized
uuuuaucucauaacuggau

SEQ ID NO: 7057 - RNA, 19 nt, artificial
  Chemically synthesized
auaaaugcuaaauacuaag

SEQ ID NO: 7058 - RNA, 19 nt, artificial
  Chemically synthesized
auauauagcuacuccuugg

SEQ ID NO: 7059 - RNA, 19 nt, artificial
  Chemically synthesized
uuauugcaauauuuguacc

SEQ ID NO: 7060 - RNA, 19 nt, artificial
  Chemically synthesized
agguuaauucuccaccucc

SEQ ID NO: 7061 - RNA, 19 nt, artificial
  Chemically synthesized
guaguuuccacgcaucuug

SEQ ID NO: 7062 - RNA, 19 nt, artificial
  Chemically synthesized
uaaaaacugauuuugagga

SEQ ID NO: 7063 - RNA, 19 nt, artificial
  Chemically synthesized
uuugugaccagauuuuaaa

SEQ ID NO: 7064 - RNA, 19 nt, artificial
  Chemically synthesized
ucuuauuuaguucauccua

SEQ ID NO: 7065 - RNA, 19 nt, artificial
  Chemically synthesized
uguggaaagaguaucaaac

SEQ ID NO: 7066 - RNA, 19 nt, artificial
  Chemically synthesized
uuuguuucaggccugugau

SEQ ID NO: 7067 - RNA, 19 nt, artificial
  Chemically synthesized
uucucuuucgagcaaaauu

SEQ ID NO: 7068 - RNA, 19 nt, artificial
  Chemically synthesized
acauauauucagaacauac

SEQ ID NO: 7069 - RNA, 19 nt, artificial
  Chemically synthesized
uuugaagauagaaaaccuu

SEQ ID NO: 7070 - RNA, 19 nt, artificial
  Chemically synthesized
aacuuuuauaaugacaagc

SEQ ID NO: 7071 - RNA, 19 nt, artificial
  Chemically synthesized
uaaaagauucaauaccaua

SEQ ID NO: 7072 - RNA, 19 nt, artificial
  Chemically synthesized
uuagguaguuuccacgcau

SEQ ID NO: 7073 - RNA, 19 nt, artificial
  Chemically synthesized
uagaaguagaucuuuuuga

SEQ ID NO: 7074 - RNA, 19 nt, artificial
  Chemically synthesized
uagaucuggucacaguuuc

SEQ ID NO: 7075 - RNA, 19 nt, artificial
  Chemically synthesized
uauccuuagccuguucuug

SEQ ID NO: 7076 - RNA, 19 nt, artificial
  Chemically synthesized
uucagguccacagaggaaa

SEQ ID NO: 7077 - RNA, 19 nt, artificial
  Chemically synthesized
uuuaucucauaacuggaua

SEQ ID NO: 7078 - RNA, 19 nt, artificial
  Chemically synthesized
auuccuaaguucaauauuc

SEQ ID NO: 7079 - RNA, 19 nt, artificial
  Chemically synthesized
acuuacuugaguauccgcu

SEQ ID NO: 7080 - RNA, 19 nt, artificial
  Chemically synthesized
uacuuucauaacuuaguug

SEQ ID NO: 7081 - RNA, 19 nt, artificial
  Chemically synthesized
uuauuuaguucauccuagu

SEQ ID NO: 7082 - RNA, 19 nt, artificial
  Chemically synthesized
auuccuguccaguugucuu

SEQ ID NO: 7083 - RNA, 19 nt, artificial
  Chemically synthesized
uacuuugguguaaagaauu

SEQ ID NO: 7084 - RNA, 19 nt, artificial
  Chemically synthesized
uuuuguucacaaacuguua

SEQ ID NO: 7085 - RNA, 19 nt, artificial
  Chemically synthesized
cuuaagauuaaaaacaaug

SEQ ID NO: 7086 - RNA, 19 nt, artificial
  Chemically synthesized
uugagcacaguuuuaagaa

SEQ ID NO: 7087 - RNA, 19 nt, artificial
  Chemically synthesized
uauugcaauauuuguacca

SEQ ID NO: 7088 - RNA, 19 nt, artificial
  Chemically synthesized
auuuuaauaguugagcaca

SEQ ID NO: 7089 - RNA, 19 nt, artificial
  Chemically synthesized
guuuuaauuaugcacauag

SEQ ID NO: 7090 - RNA, 19 nt, artificial
  Chemically synthesized
uaugaggcacagcgugaug

SEQ ID NO: 7091 - RNA, 19 nt, artificial
  Chemically synthesized
ugauuuugaggauucugag

SEQ ID NO: 7092 - RNA, 19 nt, artificial
  Chemically synthesized
uguuucaggccugugauca

SEQ ID NO: 7093 - RNA, 19 nt, artificial
  Chemically synthesized
uuucauaaucuuagggaag

SEQ ID NO: 7094 - RNA, 19 nt, artificial
  Chemically synthesized
auacauaucaaacuuuaag

SEQ ID NO: 7095 - RNA, 19 nt, artificial
  Chemically synthesized
uguauugucccacuuccau

SEQ ID NO: 7096 - RNA, 19 nt, artificial
  Chemically synthesized
auuuauuuuauagcacaag

SEQ ID NO: 7097 - RNA, 19 nt, artificial
  Chemically synthesized
uugaagaguucuaaacauu

SEQ ID NO: 7098 - RNA, 19 nt, artificial
  Chemically synthesized
uuaucacuaucaaacaauc

SEQ ID NO: 7099 - RNA, 19 nt, artificial
  Chemically synthesized
aucauggugcacagcaaag

SEQ ID NO: 7100 - RNA, 19 nt, artificial
  Chemically synthesized
uauugucccacuuccauuu

SEQ ID NO: 7101 - RNA, 19 nt, artificial
  Chemically synthesized
uuucaugcuucaaauaaga

SEQ ID NO: 7102 - RNA, 19 nt, artificial
  Chemically synthesized
uuccuaaguucaauauuca

SEQ ID NO: 7103 - RNA, 19 nt, artificial
  Chemically synthesized
uugaauagaugaauugaua

SEQ ID NO: 7104 - RNA, 19 nt, artificial
  Chemically synthesized
cucuuucuccuucuuccuc

SEQ ID NO: 7105 - RNA, 19 nt, artificial
  Chemically synthesized
uuuugaagauagaaaaccu

SEQ ID NO: 7106 - RNA, 19 nt, artificial
  Chemically synthesized
auuugucagaccuacccuc

SEQ ID NO: 7107 - RNA, 19 nt, artificial
  Chemically synthesized
uauugguuaguauccuuag

SEQ ID NO: 7108 - RNA, 19 nt, artificial
  Chemically synthesized
uauucauaagggcuagcug

SEQ ID NO: 7109 - RNA, 19 nt, artificial
  Chemically synthesized
uugcaaaagcagaagaacu

SEQ ID NO: 7110 - RNA, 19 nt, artificial
  Chemically synthesized
ucuguauagagauuuuugu

SEQ ID NO: 7111 - RNA, 19 nt, artificial
  Chemically synthesized
cuuuuugagcuucagauug

SEQ ID NO: 7112 - RNA, 19 nt, artificial
  Chemically synthesized
uuucuggguuguuaauuuu

SEQ ID NO: 7113 - RNA, 19 nt, artificial
  Chemically synthesized
uaaauguaacuuaucacua

SEQ ID NO: 7114 - RNA, 19 nt, artificial
  Chemically synthesized
uguucuugacccuagggag

SEQ ID NO: 7115 - RNA, 19 nt, artificial
  Chemically synthesized
aauguauugucccacuucc

SEQ ID NO: 7116 - RNA, 19 nt, artificial
  Chemically synthesized
uagauaaucaaaacaacau

SEQ ID NO: 7117 - RNA, 19 nt, artificial
  Chemically synthesized
uuuccaagucauaggaggg

SEQ ID NO: 7118 - RNA, 19 nt, artificial
  Chemically synthesized
ucccacuaacaucaccacc

SEQ ID NO: 7119 - RNA, 19 nt, artificial
  Chemically synthesized
auuuccuucaguaugauaa

SEQ ID NO: 7120 - RNA, 19 nt, artificial
  Chemically synthesized
ucuaaaauugaguccaaga

SEQ ID NO: 7121 - RNA, 19 nt, artificial
  Chemically synthesized
acugacuugagaauggaug

SEQ ID NO: 7122 - RNA, 19 nt, artificial
  Chemically synthesized
uuuguuuaaggcuuuaaau

SEQ ID NO: 7123 - RNA, 19 nt, artificial
  Chemically synthesized
uauucagaacauacuauug

SEQ ID NO: 7124 - RNA, 19 nt, artificial
  Chemically synthesized
uugcaauauuuguaccaga

SEQ ID NO: 7125 - RNA, 19 nt, artificial
  Chemically synthesized
acagaugcgauccauuuug

SEQ ID NO: 7126 - RNA, 19 nt, artificial
  Chemically synthesized
ucaggguucuuuauucucu

SEQ ID NO: 7127 - RNA, 19 nt, artificial
  Chemically synthesized
uuagaguaccuguuaauaa

SEQ ID NO: 7128 - RNA, 19 nt, artificial
  Chemically synthesized
auucauuuuaauaguugag

SEQ ID NO: 7129 - RNA, 19 nt, artificial
  Chemically synthesized
uggagaaacacucucggag

SEQ ID NO: 7130 - RNA, 19 nt, artificial
  Chemically synthesized
auuccuuuaagggaaaacc

SEQ ID NO: 7131 - RNA, 19 nt, artificial
  Chemically synthesized
agauuuuuuguucacaaac

SEQ ID NO: 7132 - RNA, 19 nt, artificial
  Chemically synthesized
uacugagaggaaaaaaaug

SEQ ID NO: 7133 - RNA, 19 nt, artificial
  Chemically synthesized
uuccuuuaagggaaaacca

SEQ ID NO: 7134 - RNA, 19 nt, artificial
  Chemically synthesized
acauuaacuccaaucaauc

SEQ ID NO: 7135 - RNA, 19 nt, artificial
  Chemically synthesized
augaugaugauauaauaca

SEQ ID NO: 7136 - RNA, 19 nt, artificial
  Chemically synthesized
auaauuaauaugaggcaca

SEQ ID NO: 7137 - RNA, 19 nt, artificial
  Chemically synthesized
aauaaacagagccugacuc

SEQ ID NO: 7138 - RNA, 19 nt, artificial
  Chemically synthesized
uugggcauuccuuuauuuu

SEQ ID NO: 7139 - RNA, 19 nt, artificial
  Chemically synthesized
uguugacuugcaauugucu

SEQ ID NO: 7140 - RNA, 19 nt, artificial
  Chemically synthesized
aaguucaauauucauaagg

SEQ ID NO: 7141 - RNA, 19 nt, artificial
  Chemically synthesized
uucuggguuguuaauuuua

SEQ ID NO: 7142 - RNA, 19 nt, artificial
  Chemically synthesized
uguuucuggguuguuaauu

SEQ ID NO: 7143 - RNA, 19 nt, artificial
  Chemically synthesized
uugguuuugaagauagaaa

SEQ ID NO: 7144 - RNA, 19 nt, artificial
  Chemically synthesized
uuucauaacuuaguugguu

SEQ ID NO: 7145 - RNA, 19 nt, artificial
  Chemically synthesized
uacauaucaaacuuuaaga

SEQ ID NO: 7146 - RNA, 19 nt, artificial
  Chemically synthesized
cucaucauggugcacagca

SEQ ID NO: 7147 - RNA, 19 nt, artificial
  Chemically synthesized
ucauuuaacaaaacuuacu

SEQ ID NO: 7148 - RNA, 19 nt, artificial
  Chemically synthesized
auuaguaaacuggaguaug

SEQ ID NO: 7149 - RNA, 19 nt, artificial
  Chemically synthesized
uuuguaaaagugcucucaa

SEQ ID NO: 7150 - RNA, 19 nt, artificial
  Chemically synthesized
uuguuucaggccugugauc

SEQ ID NO: 7151 - RNA, 19 nt, artificial
  Chemically synthesized
ucccacuuccauuuugaac

SEQ ID NO: 7152 - RNA, 19 nt, artificial
  Chemically synthesized
ucuaagaacaaaaagaaaa

SEQ ID NO: 7153 - RNA, 19 nt, artificial
  Chemically synthesized
uuuuccuuguugaaaauga

SEQ ID NO: 7154 - RNA, 19 nt, artificial
  Chemically synthesized
auagagauuuuuguuucug

SEQ ID NO: 7155 - RNA, 19 nt, artificial
  Chemically synthesized
auuuaacaaaacuuacuug

SEQ ID NO: 7156 - RNA, 19 nt, artificial
  Chemically synthesized
auucauucauucauuuaac

SEQ ID NO: 7157 - RNA, 19 nt, artificial
  Chemically synthesized
agaaugugcagaacccuuc

SEQ ID NO: 7158 - RNA, 19 nt, artificial
  Chemically synthesized
uauagcuacuccuugguuu

SEQ ID NO: 7159 - RNA, 19 nt, artificial
  Chemically synthesized
auaaaacugguuuuaguuc

SEQ ID NO: 7160 - RNA, 19 nt, artificial
  Chemically synthesized
ucagaguuggagaugcuuu

SEQ ID NO: 7161 - RNA, 19 nt, artificial
  Chemically synthesized
uccaguucauacuuuggug

SEQ ID NO: 7162 - RNA, 19 nt, artificial
  Chemically synthesized
uuuuuguuucuggguuguu

SEQ ID NO: 7163 - RNA, 19 nt, artificial
  Chemically synthesized
aaaccuuggagaaacacuc

SEQ ID NO: 7164 - RNA, 19 nt, artificial
  Chemically synthesized
aucacuaucaaacaaucuu

SEQ ID NO: 7165 - RNA, 19 nt, artificial
  Chemically synthesized
uauauucagaacauacuau

SEQ ID NO: 7166 - RNA, 19 nt, artificial
  Chemically synthesized
augguuuugguggaggaag

SEQ ID NO: 7167 - RNA, 19 nt, artificial
  Chemically synthesized
auauucagaacauacuauu

SEQ ID NO: 7168 - RNA, 19 nt, artificial
  Chemically synthesized
ugcauuuauuuuauagcac

SEQ ID NO: 7169 - RNA, 19 nt, artificial
  Chemically synthesized
uaccuguuaauaaaugcua

SEQ ID NO: 7170 - RNA, 19 nt, artificial
  Chemically synthesized
auaaucaaaacaacaucag

SEQ ID NO: 7171 - RNA, 19 nt, artificial
  Chemically synthesized
ugaagaguucuaaacauuu

SEQ ID NO: 7172 - RNA, 19 nt, artificial
  Chemically synthesized
uccaagaaucuuuucccua

SEQ ID NO: 7173 - RNA, 19 nt, artificial
  Chemically synthesized
ugagauaacuuucauuuug

SEQ ID NO: 7174 - RNA, 19 nt, artificial
  Chemically synthesized
auucuauacauaucaaacu

SEQ ID NO: 7175 - RNA, 19 nt, artificial
  Chemically synthesized
guuaauuuuaggaugauga

SEQ ID NO: 7176 - RNA, 19 nt, artificial
  Chemically synthesized
uauuugucacaauuccuaa

SEQ ID NO: 7177 - RNA, 19 nt, artificial
  Chemically synthesized
ucacuaucaaacaaucuuu

SEQ ID NO: 7178 - RNA, 19 nt, artificial
  Chemically synthesized
ucaugcuucaaauaagaau

SEQ ID NO: 7179 - RNA, 19 nt, artificial
  Chemically synthesized
uuuuaugaaaggugagauu

SEQ ID NO: 7180 - RNA, 19 nt, artificial
  Chemically synthesized
aauagaugaauugauaccu

SEQ ID NO: 7181 - RNA, 19 nt, artificial
  Chemically synthesized
ugauaccugaggugcagug

SEQ ID NO: 7182 - RNA, 19 nt, artificial
  Chemically synthesized
uacauuucagaaaggcuau

SEQ ID NO: 7183 - RNA, 19 nt, artificial
  Chemically synthesized
ucucagacuccuuauaacu

SEQ ID NO: 7184 - RNA, 19 nt, artificial
  Chemically synthesized
aaguagaucuuuuugagcu

SEQ ID NO: 7185 - RNA, 19 nt, artificial
  Chemically synthesized
uugaaagggugagugacca

SEQ ID NO: 7186 - RNA, 19 nt, artificial
  Chemically synthesized
ucuuuuugagcuucagauu

SEQ ID NO: 7187 - RNA, 19 nt, artificial
  Chemically synthesized
uucauucauucauuuaaca

SEQ ID NO: 7188 - RNA, 19 nt, artificial
  Chemically synthesized
ugcaauugucuugaauuca

SEQ ID NO: 7189 - RNA, 19 nt, artificial
  Chemically synthesized
cucagcaucaaaauuugug

SEQ ID NO: 7190 - RNA, 19 nt, artificial
  Chemically synthesized
ucaauauucauaagggcua

SEQ ID NO: 7191 - RNA, 19 nt, artificial
  Chemically synthesized
aagaauugaaacaauaaac

SEQ ID NO: 7192 - RNA, 19 nt, artificial
  Chemically synthesized
auauauucagaacauacua

SEQ ID NO: 7193 - RNA, 19 nt, artificial
  Chemically synthesized
ucuacuuucauaacuuagu

SEQ ID NO: 7194 - RNA, 19 nt, artificial
  Chemically synthesized
ugcaauauuuguaccagac

SEQ ID NO: 7195 - RNA, 19 nt, artificial
  Chemically synthesized
ucuaugacaguaauagaag

SEQ ID NO: 7196 - RNA, 19 nt, artificial
  Chemically synthesized
acucuuguugagcagcacg

SEQ ID NO: 7197 - RNA, 19 nt, artificial
  Chemically synthesized
uagguaguuuccacgcauc

SEQ ID NO: 7198 - RNA, 19 nt, artificial
  Chemically synthesized
ugacuugcaauugucuuga

SEQ ID NO: 7199 - RNA, 19 nt, artificial
  Chemically synthesized
auucaaauuucacaaacac

SEQ ID NO: 7200 - RNA, 19 nt, artificial
  Chemically synthesized
aauauucucagacuccuua

SEQ ID NO: 7201 - RNA, 19 nt, artificial
  Chemically synthesized
uccuuguugaaaaugaaau

SEQ ID NO: 7202 - RNA, 19 nt, artificial
  Chemically synthesized
aaaggugagauuccugucc

SEQ ID NO: 7203 - RNA, 19 nt, artificial
  Chemically synthesized
ucaaaccuggaguaagaug

SEQ ID NO: 7204 - RNA, 19 nt, artificial
  Chemically synthesized
ucacucucccauucucuuu

SEQ ID NO: 7205 - RNA, 19 nt, artificial
  Chemically synthesized
auugagugugaauuugauc

SEQ ID NO: 7206 - RNA, 19 nt, artificial
  Chemically synthesized
auaaugacaagcacucuua

SEQ ID NO: 7207 - RNA, 19 nt, artificial
  Chemically synthesized
auucagaacauacuauuga

SEQ ID NO: 7208 - RNA, 19 nt, artificial
  Chemically synthesized
ucuauacauaucaaacuuu

SEQ ID NO: 7209 - RNA, 19 nt, artificial
  Chemically synthesized
uugaacauauauucagaac

SEQ ID NO: 7210 - RNA, 19 nt, artificial
  Chemically synthesized
ucauuuuuuaucucauaac

SEQ ID NO: 7211 - RNA, 19 nt, artificial
  Chemically synthesized
uagaucuuuuugagcuuca

SEQ ID NO: 7212 - RNA, 19 nt, artificial
  Chemically synthesized
ugccuuuuuuauuuucucu

SEQ ID NO: 7213 - RNA, 19 nt, artificial
  Chemically synthesized
auagauaaucaaaacaaca

SEQ ID NO: 7214 - RNA, 19 nt, artificial
  Chemically synthesized
acauuauaguuucuuuuug

SEQ ID NO: 7215 - RNA, 19 nt, artificial
  Chemically synthesized
guacauuucagaaaggcua

SEQ ID NO: 7216 - RNA, 19 nt, artificial
  Chemically synthesized
uugauaccugaggugcagu

SEQ ID NO: 7217 - RNA, 19 nt, artificial
  Chemically synthesized
uacuccuugguuuccuucu

SEQ ID NO: 7218 - RNA, 19 nt, artificial
  Chemically synthesized
acugauuuugaggauucug

SEQ ID NO: 7219 - RNA, 19 nt, artificial
  Chemically synthesized
aauaucuguugaauagaug

SEQ ID NO: 7220 - RNA, 19 nt, artificial
  Chemically synthesized
uuaaaagauucaauaccau

SEQ ID NO: 7221 - RNA, 19 nt, artificial
  Chemically synthesized
uuuguucacaaacuguuau

SEQ ID NO: 7222 - RNA, 19 nt, artificial
  Chemically synthesized
ugaauagaugaauugauac

SEQ ID NO: 7223 - RNA, 19 nt, artificial
  Chemically synthesized
uugguguaaagaauugaaa

SEQ ID NO: 7224 - RNA, 19 nt, artificial
  Chemically synthesized
auuacauuaacuccaauca

SEQ ID NO: 7225 - RNA, 19 nt, artificial
  Chemically synthesized
uaagaccuccggaugguuu

SEQ ID NO: 7226 - RNA, 19 nt, artificial
  Chemically synthesized
cuaagcagaaaccauccug

SEQ ID NO: 7227 - RNA, 19 nt, artificial
  Chemically synthesized
aaucaaaacaacaucagua

SEQ ID NO: 7228 - RNA, 19 nt, artificial
  Chemically synthesized
uagcacaaggagcaggacu

SEQ ID NO: 7229 - RNA, 19 nt, artificial
  Chemically synthesized
auacaaauaaaccauuagu

SEQ ID NO: 7230 - RNA, 19 nt, artificial
  Chemically synthesized
auacuauugagugugaauu

SEQ ID NO: 7231 - RNA, 19 nt, artificial
  Chemically synthesized
uguuccuuuccugcaucug

SEQ ID NO: 7232 - RNA, 19 nt, artificial
  Chemically synthesized
aacaucaccaccucauagc

SEQ ID NO: 7233 - RNA, 19 nt, artificial
  Chemically synthesized
ucauuuuaauaguugagca

SEQ ID NO: 7234 - RNA, 19 nt, artificial
  Chemically synthesized
ugagauuuuuuguucacaa

SEQ ID NO: 7235 - RNA, 19 nt, artificial
  Chemically synthesized
uucacaaacuguuauauua

SEQ ID NO: 7236 - RNA, 19 nt, artificial
  Chemically synthesized
ucucucuugaacauauauu

SEQ ID NO: 7237 - RNA, 19 nt, artificial
  Chemically synthesized
ugcucagaugucaauacug

SEQ ID NO: 7238 - RNA, 19 nt, artificial
  Chemically synthesized
acaaaguagaaauauauag

SEQ ID NO: 7239 - RNA, 19 nt, artificial
  Chemically synthesized
uuaaaacaaaugaccauau

SEQ ID NO: 7240 - RNA, 19 nt, artificial
  Chemically synthesized
agauuaaaaacaaugcuuc

SEQ ID NO: 7241 - RNA, 19 nt, artificial
  Chemically synthesized
auaaauaucuguugaauag

SEQ ID NO: 7242 - RNA, 19 nt, artificial
  Chemically synthesized
uuuuuucaugcuucaaaua

SEQ ID NO: 7243 - RNA, 19 nt, artificial
  Chemically synthesized
uccuuauaacugagguacc

SEQ ID NO: 7244 - RNA, 19 nt, artificial
  Chemically synthesized
uguuuaaggcuuuaaauua

SEQ ID NO: 7245 - RNA, 19 nt, artificial
  Chemically synthesized
uaauguuuguaaaagugcu

SEQ ID NO: 7246 - RNA, 19 nt, artificial
  Chemically synthesized
auaccugaggugcagugug

SEQ ID NO: 7247 - RNA, 19 nt, artificial
  Chemically synthesized
aguagaaauauauagcuac

SEQ ID NO: 7248 - RNA, 19 nt, artificial
  Chemically synthesized
auagagcuccacauaaaug

SEQ ID NO: 7249 - RNA, 19 nt, artificial
  Chemically synthesized
ucauucauucauuuaacaa

SEQ ID NO: 7250 - RNA, 19 nt, artificial
  Chemically synthesized
aaacaugggacccacuauc

SEQ ID NO: 7251 - RNA, 19 nt, artificial
  Chemically synthesized
ugguuaguauccuuagccu

SEQ ID NO: 7252 - RNA, 19 nt, artificial
  Chemically synthesized
uuacuugaguauccgcucu

SEQ ID NO: 7253 - RNA, 19 nt, artificial
  Chemically synthesized
aucaauccaauauucuucu

SEQ ID NO: 7254 - RNA, 19 nt, artificial
  Chemically synthesized
aauuauucacauacaaagc

SEQ ID NO: 7255 - RNA, 19 nt, artificial
  Chemically synthesized
aguaagaugggcuagaucu

SEQ ID NO: 7256 - RNA, 19 nt, artificial
  Chemically synthesized
accuuggugaugaccaccu

SEQ ID NO: 7257 - RNA, 19 nt, artificial
  Chemically synthesized
ugaauaaggaucagaauua

SEQ ID NO: 7258 - RNA, 19 nt, artificial
  Chemically synthesized
aaauaaaccauuagucaca

SEQ ID NO: 7259 - RNA, 19 nt, artificial
  Chemically synthesized
acuuccacugacauuacug

SEQ ID NO: 7260 - RNA, 19 nt, artificial
  Chemically synthesized
uaagaacaaaaagaaaacc

SEQ ID NO: 7261 - RNA, 19 nt, artificial
  Chemically synthesized
aaacaaaugaccauaucag

SEQ ID NO: 7262 - RNA, 19 nt, artificial
  Chemically synthesized
uggaguaugcucagauguc

SEQ ID NO: 7263 - RNA, 19 nt, artificial
  Chemically synthesized
uaggguguugacuugcaau

SEQ ID NO: 7264 - RNA, 19 nt, artificial
  Chemically synthesized
uguugagacacucucaaca

SEQ ID NO: 7265 - RNA, 19 nt, artificial
  Chemically synthesized
uuuauuuccucauggaaga

SEQ ID NO: 7266 - RNA, 19 nt, artificial
  Chemically synthesized
acaacccacauuuauuucc

SEQ ID NO: 7267 - RNA, 19 nt, artificial
  Chemically synthesized
uaucacuaucaaacaaucu

SEQ ID NO: 7268 - RNA, 19 nt, artificial
  Chemically synthesized
uggagaagaccacuuuggg

SEQ ID NO: 7269 - RNA, 19 nt, artificial
  Chemically synthesized
ucauacuuugguguaaaga

SEQ ID NO: 7270 - RNA, 19 nt, artificial
  Chemically synthesized
acaaacuguuauauuaugc

SEQ ID NO: 7271 - RNA, 19 nt, artificial
  Chemically synthesized
aacuguuauauuaugcaca

SEQ ID NO: 7272 - RNA, 19 nt, artificial
  Chemically synthesized
ucauggugcacagcaaagu

SEQ ID NO: 7273 - RNA, 19 nt, artificial
  Chemically synthesized
uugcagcagaucugcaaac

SEQ ID NO: 7274 - RNA, 19 nt, artificial
  Chemically synthesized
uccaauauucuucuguaga

SEQ ID NO: 7275 - RNA, 19 nt, artificial
  Chemically synthesized
uugagauaacuuucauuuu

SEQ ID NO: 7276 - RNA, 19 nt, artificial
  Chemically synthesized
ucaaaguaagaccuccgga

SEQ ID NO: 7277 - RNA, 19 nt, artificial
  Chemically synthesized
auacaaagucuuuuguuuc

SEQ ID NO: 7278 - RNA, 19 nt, artificial
  Chemically synthesized
gcuagaauuauucacauac

SEQ ID NO: 7279 - RNA, 19 nt, artificial
  Chemically synthesized
ucuuuuuguccauuuuuaa

SEQ ID NO: 7280 - RNA, 19 nt, artificial
  Chemically synthesized
uaguuucuuuuuguccauu

SEQ ID NO: 7281 - RNA, 19 nt, artificial
  Chemically synthesized
cuuauuugucagaccuacc

SEQ ID NO: 7282 - RNA, 19 nt, artificial
  Chemically synthesized
guuauugcaauauuuguac

SEQ ID NO: 7283 - RNA, 19 nt, artificial
  Chemically synthesized
acuuuuauaaugacaagca

SEQ ID NO: 7284 - RNA, 19 nt, artificial
  Chemically synthesized
auacugucacuaauaagug

SEQ ID NO: 7285 - RNA, 19 nt, artificial
  Chemically synthesized
ucaaccgcuaucuuaggua

SEQ ID NO: 7286 - RNA, 19 nt, artificial
  Chemically synthesized
agcucauucauuuuaauag

SEQ ID NO: 7287 - RNA, 19 nt, artificial
  Chemically synthesized
ucaaaauuugugaccagau

SEQ ID NO: 7288 - RNA, 19 nt, artificial
  Chemically synthesized
ucucucacucucccauucu

SEQ ID NO: 7289 - RNA, 19 nt, artificial
  Chemically synthesized
uuccuuguugaaaaugaaa

SEQ ID NO: 7290 - RNA, 19 nt, artificial
  Chemically synthesized
uguaaaagugcucucaaaa

SEQ ID NO: 7291 - RNA, 19 nt, artificial
  Chemically synthesized
aauaguugagcacaguuuu

SEQ ID NO: 7292 - RNA, 19 nt, artificial
  Chemically synthesized
guugucuucgaacucuugu

SEQ ID NO: 7293 - RNA, 19 nt, artificial
  Chemically synthesized
uucaggccugugaucacau

SEQ ID NO: 7294 - RNA, 19 nt, artificial
  Chemically synthesized
ugagacacucucaacaugu

SEQ ID NO: 7295 - RNA, 19 nt, artificial
  Chemically synthesized
cuuuuuguccauuuuuaag

SEQ ID NO: 7296 - RNA, 19 nt, artificial
  Chemically synthesized
uaagauuaaaaacaaugcu

SEQ ID NO: 7297 - RNA, 19 nt, artificial
  Chemically synthesized
cuuuuuuauuuucucucac

SEQ ID NO: 7298 - RNA, 19 nt, artificial
  Chemically synthesized
uugucagaccuacccucag

SEQ ID NO: 7299 - RNA, 19 nt, artificial
  Chemically synthesized
ugucacaauuccuaaguuc

SEQ ID NO: 7300 - RNA, 19 nt, artificial
  Chemically synthesized
uaguaguaugacaaagaac

SEQ ID NO: 7301 - RNA, 19 nt, artificial
  Chemically synthesized
uuucuccuucuuccucauu

SEQ ID NO: 7302 - RNA, 19 nt, artificial
  Chemically synthesized
accaccuuggugaugacca

SEQ ID NO: 7303 - RNA, 19 nt, artificial
  Chemically synthesized
ugaacauauauucagaaca

SEQ ID NO: 7304 - RNA, 19 nt, artificial
  Chemically synthesized
aagaaugugcagaacccuu

SEQ ID NO: 7305 - RNA, 19 nt, artificial
  Chemically synthesized
ucauuuugccugucuccaa

SEQ ID NO: 7306 - RNA, 19 nt, artificial
  Chemically synthesized
aggaaaacuccuauucugg

SEQ ID NO: 7307 - RNA, 19 nt, artificial
  Chemically synthesized
uugaucucuguauagagau

SEQ ID NO: 7308 - RNA, 19 nt, artificial
  Chemically synthesized
aguaguaugacaaagaaca

SEQ ID NO: 7309 - RNA, 19 nt, artificial
  Chemically synthesized
auacauauuugucacaauu

SEQ ID NO: 7310 - RNA, 19 nt, artificial
  Chemically synthesized
uaaaauugaguccaagaau

SEQ ID NO: 7311 - RNA, 19 nt, artificial
  Chemically synthesized
auuucagaaaggcuauauu

SEQ ID NO: 7312 - RNA, 19 nt, artificial
  Chemically synthesized
ucacaguuucauaaucuua

SEQ ID NO: 7313 - RNA, 19 nt, artificial
  Chemically synthesized
gccuuuuuuauuuucucuc

SEQ ID NO: 7314 - RNA, 19 nt, artificial
  Chemically synthesized
uggaaaauuuccuucagua

SEQ ID NO: 7315 - RNA, 19 nt, artificial
  Chemically synthesized
uuaauuuuaggaugaugau

SEQ ID NO: 7316 - RNA, 19 nt, artificial
  Chemically synthesized
uagaauuauucacauacaa

SEQ ID NO: 7317 - RNA, 19 nt, artificial
  Chemically synthesized
ucauucauuuaacaaaacu

SEQ ID NO: 7318 - RNA, 19 nt, artificial
  Chemically synthesized
auguuguagcugaggaagc

SEQ ID NO: 7319 - RNA, 19 nt, artificial
  Chemically synthesized
acaaucuuugacauuccuu

SEQ ID NO: 7320 - RNA, 19 nt, artificial
  Chemically synthesized
aauguaacuuaucacuauc

SEQ ID NO: 7321 - RNA, 19 nt, artificial
  Chemically synthesized
auguaacuuaucacuauca

SEQ ID NO: 7322 - RNA, 19 nt, artificial
  Chemically synthesized
auguauuauguccuaauga

SEQ ID NO: 7323 - RNA, 19 nt, artificial
  Chemically synthesized
accauuacauuauaguuuc

SEQ ID NO: 7324 - RNA, 19 nt, artificial
  Chemically synthesized
uuuuguccauuuuuaagca

SEQ ID NO: 7325 - RNA, 19 nt, artificial
  Chemically synthesized
uagcuggagaagaccacuu

SEQ ID NO: 7326 - RNA, 19 nt, artificial
  Chemically synthesized
aagauuaaaaacaaugcuu

SEQ ID NO: 7327 - RNA, 19 nt, artificial
  Chemically synthesized
aauacugucacuaauaagu

SEQ ID NO: 7328 - RNA, 19 nt, artificial
  Chemically synthesized
cagcucuuucuccuucuuc

SEQ ID NO: 7329 - RNA, 19 nt, artificial
  Chemically synthesized
ucugcaaaccacucaaagg

SEQ ID NO: 7330 - RNA, 19 nt, artificial
  Chemically synthesized
uguuguagcugaggaagcc

SEQ ID NO: 7331 - RNA, 19 nt, artificial
  Chemically synthesized
caauucguucagcuccaug

SEQ ID NO: 7332 - RNA, 19 nt, artificial
  Chemically synthesized
aucugcaaaccacucaaag

SEQ ID NO: 7333 - RNA, 19 nt, artificial
  Chemically synthesized
ucuccaguucauacuuugg

SEQ ID NO: 7334 - RNA, 19 nt, artificial
  Chemically synthesized
uuguucacaaacuguuaua

SEQ ID NO: 7335 - RNA, 19 nt, artificial
  Chemically synthesized
acucucaacauguauuaug

SEQ ID NO: 7336 - RNA, 19 nt, artificial
  Chemically synthesized
auugucuugaauucauuau

SEQ ID NO: 7337 - RNA, 19 nt, artificial
  Chemically synthesized
uucguucagcuccauggau

SEQ ID NO: 7338 - RNA, 19 nt, artificial
  Chemically synthesized
ugauaauuaauaugaggca

SEQ ID NO: 7339 - RNA, 19 nt, artificial
  Chemically synthesized
uagccuguucuugacccua

SEQ ID NO: 7340 - RNA, 19 nt, artificial
  Chemically synthesized
aaaugcuaaauacuaagug

SEQ ID NO: 7341 - RNA, 19 nt, artificial
  Chemically synthesized
augaugaugaugauauaau

SEQ ID NO: 7342 - RNA, 19 nt, artificial
  Chemically synthesized
uuaacaaaacuuacuugag

SEQ ID NO: 7343 - RNA, 19 nt, artificial
  Chemically synthesized
uuacugagaggaaaaaaau

SEQ ID NO: 7344 - RNA, 19 nt, artificial
  Chemically synthesized
ucuuucgagcaaaauugag

SEQ ID NO: 7345 - RNA, 19 nt, artificial
  Chemically synthesized
agauaaucaaaacaacauc

SEQ ID NO: 7346 - RNA, 19 nt, artificial
  Chemically synthesized
auuuuaugaaaggugagau

SEQ ID NO: 7347 - RNA, 19 nt, artificial
  Chemically synthesized
uacauuaacuccaaucaau

SEQ ID NO: 7348 - RNA, 19 nt, artificial
  Chemically synthesized
uugagacacucucaacaug

SEQ ID NO: 7349 - RNA, 19 nt, artificial
  Chemically synthesized
cccacuuccauuuugaacc

SEQ ID NO: 7350 - RNA, 19 nt, artificial
  Chemically synthesized
cuugguuuccuucuucuuu

SEQ ID NO: 7351 - RNA, 19 nt, artificial
  Chemically synthesized
aguaauagaaguuauuucu

SEQ ID NO: 7352 - RNA, 19 nt, artificial
  Chemically synthesized
auaaacagagccugacuca

SEQ ID NO: 7353 - RNA, 19 nt, artificial
  Chemically synthesized
uuacauuaacuccaaucaa

SEQ ID NO: 7354 - RNA, 19 nt, artificial
  Chemically synthesized
uccuucaguaugauaauaa

SEQ ID NO: 7355 - RNA, 19 nt, artificial
  Chemically synthesized
uccuauugguuaguauccu

SEQ ID NO: 7356 - RNA, 19 nt, artificial
  Chemically synthesized
cugaggugcagugugaaca

SEQ ID NO: 7357 - RNA, 19 nt, artificial
  Chemically synthesized
auuaaaaacaaugcuucau

SEQ ID NO: 7358 - RNA, 19 nt, artificial
  Chemically synthesized
accagauuuuaaaagauuc

SEQ ID NO: 7359 - RNA, 19 nt, artificial
  Chemically synthesized
uaaaaacaaugcuucauca

SEQ ID NO: 7360 - RNA, 19 nt, artificial
  Chemically synthesized
uccuucaggguucuuuauu

SEQ ID NO: 7361 - RNA, 19 nt, artificial
  Chemically synthesized
ugguguaaagaauugaaac

SEQ ID NO: 7362 - RNA, 19 nt, artificial
  Chemically synthesized
augggcuagaucuggucac

SEQ ID NO: 7363 - RNA, 19 nt, artificial
  Chemically synthesized
agugauuuagagacucucu

SEQ ID NO: 7364 - RNA, 19 nt, artificial
  Chemically synthesized
cuuuugauccuuucccuuu

SEQ ID NO: 7365 - RNA, 19 nt, artificial
  Chemically synthesized
acuaacaucaccaccucau

SEQ ID NO: 7366 - RNA, 19 nt, artificial
  Chemically synthesized
uaucaaacuuuaagaaauc

SEQ ID NO: 7367 - RNA, 19 nt, artificial
  Chemically synthesized
uucaugcuucaaauaagaa

SEQ ID NO: 7368 - RNA, 19 nt, artificial
  Chemically synthesized
ucucucuacuuucauaacu

SEQ ID NO: 7369 - RNA, 19 nt, artificial
  Chemically synthesized
agaugcuuuguuuacucag

SEQ ID NO: 7370 - RNA, 19 nt, artificial
  Chemically synthesized
augcacauagguuagaaag

SEQ ID NO: 7371 - RNA, 19 nt, artificial
  Chemically synthesized
uuauucucuuucgagcaaa

SEQ ID NO: 7372 - RNA, 19 nt, artificial
  Chemically synthesized
accuuggagaaacacucuc

SEQ ID NO: 7373 - RNA, 19 nt, artificial
  Chemically synthesized
uccaccuccaacccucuuu

SEQ ID NO: 7374 - RNA, 19 nt, artificial
  Chemically synthesized
guauuauguccuaaugauc

SEQ ID NO: 7375 - RNA, 19 nt, artificial
  Chemically synthesized
ucuggucacaguuucauaa

SEQ ID NO: 7376 - RNA, 19 nt, artificial
  Chemically synthesized
auaucuguugaauagauga

SEQ ID NO: 7377 - RNA, 19 nt, artificial
  Chemically synthesized
gauauaauacaaauaaacc

SEQ ID NO: 7378 - RNA, 19 nt, artificial
  Chemically synthesized
auagaaguuauuucuuuag

SEQ ID NO: 7379 - RNA, 19 nt, artificial
  Chemically synthesized
aguugucuucgaacucuug

SEQ ID NO: 7380 - RNA, 19 nt, artificial
  Chemically synthesized
auaucagauacauauuugu

SEQ ID NO: 7381 - RNA, 19 nt, artificial
  Chemically synthesized
aaaauuugugaccagauuu

SEQ ID NO: 7382 - RNA, 19 nt, artificial
  Chemically synthesized
ugaguucuuauuuaguuca

SEQ ID NO: 7383 - RNA, 19 nt, artificial
  Chemically synthesized
uggagaugcuuuguuuacu

SEQ ID NO: 7384 - RNA, 19 nt, artificial
  Chemically synthesized
cuaagaaaaaccuucauag

SEQ ID NO: 7385 - RNA, 19 nt, artificial
  Chemically synthesized
uauaccuccuucaauuaua

SEQ ID NO: 7386 - RNA, 19 nt, artificial
  Chemically synthesized
uaaaugcuaaauacuaagu

SEQ ID NO: 7387 - RNA, 19 nt, artificial
  Chemically synthesized
cuuacuugaguauccgcuc

SEQ ID NO: 7388 - RNA, 19 nt, artificial
  Chemically synthesized
aaaaccauagagcuccaca

SEQ ID NO: 7389 - RNA, 19 nt, artificial
  Chemically synthesized
agcaguugcagcagaucug

SEQ ID NO: 7390 - RNA, 19 nt, artificial
  Chemically synthesized
ucuguagaaagaacaucug

SEQ ID NO: 7391 - RNA, 19 nt, artificial
  Chemically synthesized
auucugaggcagcucagua

SEQ ID NO: 7392 - RNA, 19 nt, artificial
  Chemically synthesized
cccuauuugacuccgauag

SEQ ID NO: 7393 - RNA, 19 nt, artificial
  Chemically synthesized
cuauuugacuccgauagaa

SEQ ID NO: 7394 - RNA, 19 nt, artificial
  Chemically synthesized
agauacuuuuggagaaaca

SEQ ID NO: 7395 - RNA, 19 nt, artificial
  Chemically synthesized
cugagauacuuuuggagaa

SEQ ID NO: 7396 - RNA, 19 nt, artificial
  Chemically synthesized
cccuuuuuuucacuauaga

SEQ ID NO: 7397 - RNA, 19 nt, artificial
  Chemically synthesized
gugccuggaaucuuguuuu

SEQ ID NO: 7398 - RNA, 19 nt, artificial
  Chemically synthesized
gaacuuuguacuccaggcu

SEQ ID NO: 7399 - RNA, 19 nt, artificial
  Chemically synthesized
gagauacuuuuggagaaac

SEQ ID NO: 7400 - RNA, 19 nt, artificial
  Chemically synthesized
ggcuguaugaguccuucaa

SEQ ID NO: 7401 - RNA, 19 nt, artificial
  Chemically synthesized
agggcucugagauacuuuu

SEQ ID NO: 7402 - RNA, 19 nt, artificial
  Chemically synthesized
gaaucuuguuuuuccugga

SEQ ID NO: 7403 - RNA, 19 nt, artificial
  Chemically synthesized
ggugccuggaaucuuguuu

SEQ ID NO: 7404 - RNA, 19 nt, artificial
  Chemically synthesized
acacugugaacuuuguacu

SEQ ID NO: 7405 - RNA, 19 nt, artificial
  Chemically synthesized
ugcugacuaaacuggagau

SEQ ID NO: 7406 - RNA, 19 nt, artificial
  Chemically synthesized
ccuauuugacuccgauaga

SEQ ID NO: 7407 - RNA, 19 nt, artificial
  Chemically synthesized
gcaguuuaagaccauugca

SEQ ID NO: 7408 - RNA, 19 nt, artificial
  Chemically synthesized
gcugacuaaacuggagaug

SEQ ID NO: 7409 - RNA, 19 nt, artificial
  Chemically synthesized
agaaaagaaagcauacuug

SEQ ID NO: 7410 - RNA, 19 nt, artificial
  Chemically synthesized
uacuuuuggagaaacacaa

SEQ ID NO: 7411 - RNA, 19 nt, artificial
  Chemically synthesized
ccaagagaauuucuagccu

SEQ ID NO: 7412 - RNA, 19 nt, artificial
  Chemically synthesized
ccauucugcagaguaucau

SEQ ID NO: 7413 - RNA, 19 nt, artificial
  Chemically synthesized
gggcucugagauacuuuug

SEQ ID NO: 7414 - RNA, 19 nt, artificial
  Chemically synthesized
ggacaaacaggcuguauga

SEQ ID NO: 7415 - RNA, 19 nt, artificial
  Chemically synthesized
cccauggacaaacucaaau

SEQ ID NO: 7416 - RNA, 19 nt, artificial
  Chemically synthesized
ugcaugugaaagaguccuu

SEQ ID NO: 7417 - RNA, 19 nt, artificial
  Chemically synthesized
cagcaguuuaagaccauug

SEQ ID NO: 7418 - RNA, 19 nt, artificial
  Chemically synthesized
ucauguuguaucuggaauu

SEQ ID NO: 7419 - RNA, 19 nt, artificial
  Chemically synthesized
acaggcaccagaaaagaaa

SEQ ID NO: 7420 - RNA, 19 nt, artificial
  Chemically synthesized
ggcucugagauacuuuugg

SEQ ID NO: 7421 - RNA, 19 nt, artificial
  Chemically synthesized
ccaagggcucugagauacu

SEQ ID NO: 7422 - RNA, 19 nt, artificial
  Chemically synthesized
ucagccugcaagaauucaa

SEQ ID NO: 7423 - RNA, 19 nt, artificial
  Chemically synthesized
uggacuuuaucuggaucaa

SEQ ID NO: 7424 - RNA, 19 nt, artificial
  Chemically synthesized
aggucacucaucuccucau

SEQ ID NO: 7425 - RNA, 19 nt, artificial
  Chemically synthesized
ccgugugcaucauggaagu

SEQ ID NO: 7426 - RNA, 19 nt, artificial
  Chemically synthesized
cagccugcaagaauucaaa

SEQ ID NO: 7427 - RNA, 19 nt, artificial
  Chemically synthesized
gggccauugugagaaguuc

SEQ ID NO: 7428 - RNA, 19 nt, artificial
  Chemically synthesized
agcaagguguuccagaaag

SEQ ID NO: 7429 - RNA, 19 nt, artificial
  Chemically synthesized
cugcugacuaaacuggaga

SEQ ID NO: 7430 - RNA, 19 nt, artificial
  Chemically synthesized
ccugcugacuaaacuggag

SEQ ID NO: 7431 - RNA, 19 nt, artificial
  Chemically synthesized
ggacuuuaucuggaucaac

SEQ ID NO: 7432 - RNA, 19 nt, artificial
  Chemically synthesized
agguggacuuuaucuggau

SEQ ID NO: 7433 - RNA, 19 nt, artificial
  Chemically synthesized
gucauguuguaucuggaau

SEQ ID NO: 7434 - RNA, 19 nt, artificial
  Chemically synthesized
cucugagauacuuuuggag

SEQ ID NO: 7435 - RNA, 19 nt, artificial
  Chemically synthesized
agagucaaaggucguccaa

SEQ ID NO: 7436 - RNA, 19 nt, artificial
  Chemically synthesized
ugccuggaaucuuguuuuu

SEQ ID NO: 7437 - RNA, 19 nt, artificial
  Chemically synthesized
uaccacuggaccagaacau

SEQ ID NO: 7438 - RNA, 19 nt, artificial
  Chemically synthesized
acaaacucaaauuccucuu

SEQ ID NO: 7439 - RNA, 19 nt, artificial
  Chemically synthesized
ugggcaagaaugacaugaa

SEQ ID NO: 7440 - RNA, 19 nt, artificial
  Chemically synthesized
gcagucauguuguaucugg

SEQ ID NO: 7441 - RNA, 19 nt, artificial
  Chemically synthesized
gacaaugagaaagagucaa

SEQ ID NO: 7442 - RNA, 19 nt, artificial
  Chemically synthesized
gcuguaugaguccuucaag

SEQ ID NO: 7443 - RNA, 19 nt, artificial
  Chemically synthesized
uggacaaacaggcuguaug

SEQ ID NO: 7444 - RNA, 19 nt, artificial
  Chemically synthesized
cgaggucucaauccauugc

SEQ ID NO: 7445 - RNA, 19 nt, artificial
  Chemically synthesized
ccuuuuuuucacuauagac

SEQ ID NO: 7446 - RNA, 19 nt, artificial
  Chemically synthesized
ugugcaucauggaagucaa

SEQ ID NO: 7447 - RNA, 19 nt, artificial
  Chemically synthesized
ucaucuuucaugggcccaa

SEQ ID NO: 7448 - RNA, 19 nt, artificial
  Chemically synthesized
ugcuccuccucauguucau

SEQ ID NO: 7449 - RNA, 19 nt, artificial
  Chemically synthesized
gcaagaauucaaagcagcu

SEQ ID NO: 7450 - RNA, 19 nt, artificial
  Chemically synthesized
agcggucuuucgagugguu

SEQ ID NO: 7451 - RNA, 19 nt, artificial
  Chemically synthesized
ccagaaaagaaagcauacu

SEQ ID NO: 7452 - RNA, 19 nt, artificial
  Chemically synthesized
caaugagaaagagucaaag

SEQ ID NO: 7453 - RNA, 19 nt, artificial
  Chemically synthesized
cugguaugcagucauguug

SEQ ID NO: 7454 - RNA, 19 nt, artificial
  Chemically synthesized
aggagugugacaaugagaa

SEQ ID NO: 7455 - RNA, 19 nt, artificial
  Chemically synthesized
guggacaaacaggcuguau

SEQ ID NO: 7456 - RNA, 19 nt, artificial
  Chemically synthesized
ccaaggucacucaucuccu

SEQ ID NO: 7457 - RNA, 19 nt, artificial
  Chemically synthesized
ugcugcuccuccucauguu

SEQ ID NO: 7458 - RNA, 19 nt, artificial
  Chemically synthesized
caagaauucaaagcagcuc

SEQ ID NO: 7459 - RNA, 19 nt, artificial
  Chemically synthesized
agggccauugugagaaguu

SEQ ID NO: 7460 - RNA, 19 nt, artificial
  Chemically synthesized
ugaagggccauugugagaa

SEQ ID NO: 7461 - RNA, 19 nt, artificial
  Chemically synthesized
guggacuuuaucuggauca

SEQ ID NO: 7462 - RNA, 19 nt, artificial
  Chemically synthesized
uccaagacaacaugaagcu

SEQ ID NO: 7463 - RNA, 19 nt, artificial
  Chemically synthesized
cagaaaagaaagcauacuu

SEQ ID NO: 7464 - RNA, 19 nt, artificial
  Chemically synthesized
gcaccagaaaagaaagcau

SEQ ID NO: 7465 - RNA, 19 nt, artificial
  Chemically synthesized
gcuuccauucugcagagua

SEQ ID NO: 7466 - RNA, 19 nt, artificial
  Chemically synthesized
gcuacaucgaugggccuua

SEQ ID NO: 7467 - RNA, 19 nt, artificial
  Chemically synthesized
caaacaggcuguaugaguc

SEQ ID NO: 7468 - RNA, 19 nt, artificial
  Chemically synthesized
acacuaucuggcugcacau

SEQ ID NO: 7469 - RNA, 19 nt, artificial
  Chemically synthesized
cugagcagaaagacacuau

SEQ ID NO: 7470 - RNA, 19 nt, artificial
  Chemically synthesized
ccugagcagaaagacacua

SEQ ID NO: 7471 - RNA, 19 nt, artificial
  Chemically synthesized
gacuacuuguaucugaaca

SEQ ID NO: 7472 - RNA, 19 nt, artificial
  Chemically synthesized
ccgaggucucaauccauug

SEQ ID NO: 7473 - RNA, 19 nt, artificial
  Chemically synthesized
accuggugacuacuuguau

SEQ ID NO: 7474 - RNA, 19 nt, artificial
  Chemically synthesized
agguguaugacaucgaugu

SEQ ID NO: 7475 - RNA, 19 nt, artificial
  Chemically synthesized
ugggugacucagcaguuua

SEQ ID NO: 7476 - RNA, 19 nt, artificial
  Chemically synthesized
agaauuucuagccucaccu

SEQ ID NO: 7477 - RNA, 19 nt, artificial
  Chemically synthesized
aaguucggcuucagauuuu

SEQ ID NO: 7478 - RNA, 19 nt, artificial
  Chemically synthesized
gccauugugagaaguucgg

SEQ ID NO: 7479 - RNA, 19 nt, artificial
  Chemically synthesized
gcaagaaugacaugaaggc

SEQ ID NO: 7480 - RNA, 19 nt, artificial
  Chemically synthesized
gguggacuuuaucuggauc

SEQ ID NO: 7481 - RNA, 19 nt, artificial
  Chemically synthesized
agaguaucauguacaggca

SEQ ID NO: 7482 - RNA, 19 nt, artificial
  Chemically synthesized
cagucauguuguaucugga

SEQ ID NO: 7483 - RNA, 19 nt, artificial
  Chemically synthesized
guaugcagucauguuguau

SEQ ID NO: 7484 - RNA, 19 nt, artificial
  Chemically synthesized
gugugacaaugagaaagag

SEQ ID NO: 7485 - RNA, 19 nt, artificial
  Chemically synthesized
gguucuaagaggcugucga

SEQ ID NO: 7486 - RNA, 19 nt, artificial
  Chemically synthesized
cgugguucuaagaggcugu

SEQ ID NO: 7487 - RNA, 19 nt, artificial
  Chemically synthesized
aguggacaaacaggcugua

SEQ ID NO: 7488 - RNA, 19 nt, artificial
  Chemically synthesized
gacacuaucuggcugcaca

SEQ ID NO: 7489 - RNA, 19 nt, artificial
  Chemically synthesized
gugugcaucauggaaguca

SEQ ID NO: 7490 - RNA, 19 nt, artificial
  Chemically synthesized
agguguucuauuggacuca

SEQ ID NO: 7491 - RNA, 19 nt, artificial
  Chemically synthesized
gagguguucuauuggacuc

SEQ ID NO: 7492 - RNA, 19 nt, artificial
  Chemically synthesized
cuccuccucauguucaucu

SEQ ID NO: 7493 - RNA, 19 nt, artificial
  Chemically synthesized
uccagguguaugacaucga

SEQ ID NO: 7494 - RNA, 19 nt, artificial
  Chemically synthesized
uccgauagaaguggcacca

SEQ ID NO: 7495 - RNA, 19 nt, artificial
  Chemically synthesized
cgauucuuugcccuauuug

SEQ ID NO: 7496 - RNA, 19 nt, artificial
  Chemically synthesized
ucagcaguuuaagaccauu

SEQ ID NO: 7497 - RNA, 19 nt, artificial
  Chemically synthesized
agcccuuaguccuucuagu

SEQ ID NO: 7498 - RNA, 19 nt, artificial
  Chemically synthesized
aguucggcuucagauuuuu

SEQ ID NO: 7499 - RNA, 19 nt, artificial
  Chemically synthesized
cacugggcaagaaugacau

SEQ ID NO: 7500 - RNA, 19 nt, artificial
  Chemically synthesized
ugcagaguaucauguacag

SEQ ID NO: 7501 - RNA, 19 nt, artificial
  Chemically synthesized
cugcagaguaucauguaca

SEQ ID NO: 7502 - RNA, 19 nt, artificial
  Chemically synthesized
cuuuuggagaaacacaaau

SEQ ID NO: 7503 - RNA, 19 nt, artificial
  Chemically synthesized
agugugacaaugagaaaga

SEQ ID NO: 7504 - RNA, 19 nt, artificial
  Chemically synthesized
gugguucuaagaggcuguc

SEQ ID NO: 7505 - RNA, 19 nt, artificial
  Chemically synthesized
cacuaucuggcugcacauu

SEQ ID NO: 7506 - RNA, 19 nt, artificial
  Chemically synthesized
gccuggaaucuuguuuuuc

SEQ ID NO: 7507 - RNA, 19 nt, artificial
  Chemically synthesized
uccuccucauguucaucug

SEQ ID NO: 7508 - RNA, 19 nt, artificial
  Chemically synthesized
ugacaucgaugugugugca

SEQ ID NO: 7509 - RNA, 19 nt, artificial
  Chemically synthesized
guguaugacaucgaugugu

SEQ ID NO: 7510 - RNA, 19 nt, artificial
  Chemically synthesized
ucuuugcagagcgauucuu

SEQ ID NO: 7511 - RNA, 19 nt, artificial
  Chemically synthesized
cccuuaguccuucuaguug

SEQ ID NO: 7512 - RNA, 19 nt, artificial
  Chemically synthesized
cucagcaguuuaagaccau

SEQ ID NO: 7513 - RNA, 19 nt, artificial
  Chemically synthesized
guaucuggaauuggugggu

SEQ ID NO: 7514 - RNA, 19 nt, artificial
  Chemically synthesized
caccagaaaagaaagcaua

SEQ ID NO: 7515 - RNA, 19 nt, artificial
  Chemically synthesized
gucgaggagugugacaaug

SEQ ID NO: 7516 - RNA, 19 nt, artificial
  Chemically synthesized
gaaagacacuaucuggcug

SEQ ID NO: 7517 - RNA, 19 nt, artificial
  Chemically synthesized
ucuuguuuuuccuggagaa

SEQ ID NO: 7518 - RNA, 19 nt, artificial
  Chemically synthesized
gcuucugcucaucuuucau

SEQ ID NO: 7519 - RNA, 19 nt, artificial
  Chemically synthesized
guccuucuaguugcgcuuu

SEQ ID NO: 7520 - RNA, 19 nt, artificial
  Chemically synthesized
aguccuucuaguugcgcuu

SEQ ID NO: 7521 - RNA, 19 nt, artificial
  Chemically synthesized
ggagaaacacaaauucugu

SEQ ID NO: 7522 - RNA, 19 nt, artificial
  Chemically synthesized
ucuuccagguguaugacau

SEQ ID NO: 7523 - RNA, 19 nt, artificial
  Chemically synthesized
gcccuauuugacuccgaua

SEQ ID NO: 7524 - RNA, 19 nt, artificial
  Chemically synthesized
caguuuaagaccauugcag

SEQ ID NO: 7525 - RNA, 19 nt, artificial
  Chemically synthesized
ugcccuauuugacuccgau

SEQ ID NO: 7526 - RNA, 19 nt, artificial
  Chemically synthesized
ggccaacaaggagaagaaa

SEQ ID NO: 7527 - RNA, 19 nt, artificial
  Chemically synthesized
gccacuuugagguguucua

SEQ ID NO: 7528 - RNA, 19 nt, artificial
  Chemically synthesized
uccuucuaguugcgcuuuu

SEQ ID NO: 7529 - RNA, 19 nt, artificial
  Chemically synthesized
uggccaacaaggagaagaa

SEQ ID NO: 7530 - RNA, 19 nt, artificial
  Chemically synthesized
gagaaacacaaauucugua

SEQ ID NO: 7531 - RNA, 19 nt, artificial
  Chemically synthesized
ccaccauugcucgcuauga

SEQ ID NO: 7532 - RNA, 19 nt, artificial
  Chemically synthesized
ggcucacacugugaacuuu

SEQ ID NO: 7533 - RNA, 19 nt, artificial
  Chemically synthesized
agcgauucuuugcccuauu

SEQ ID NO: 7534 - RNA, 19 nt, artificial
  Chemically synthesized
uggcucacacugugaacuu

SEQ ID NO: 7535 - RNA, 19 nt, artificial
  Chemically synthesized
ggagaagaaagacuccauc

SEQ ID NO: 7536 - RNA, 19 nt, artificial
  Chemically synthesized
gcggucuuucgagugguuu

SEQ ID NO: 7537 - RNA, 19 nt, artificial
  Chemically synthesized
acagagaccagcggucuuu

SEQ ID NO: 7538 - RNA, 19 nt, artificial
  Chemically synthesized
ggaaucuuguuuuuccugg

SEQ ID NO: 7539 - RNA, 19 nt, artificial
  Chemically synthesized
gcuuauccgaggucucaau

SEQ ID NO: 7540 - RNA, 19 nt, artificial
  Chemically synthesized
cugugaacuuuguacucca

SEQ ID NO: 7541 - RNA, 19 nt, artificial
  Chemically synthesized
cggcuucagauuuuuccaa

SEQ ID NO: 7542 - RNA, 19 nt, artificial
  Chemically synthesized
ggguucuuggucucacuga

SEQ ID NO: 7543 - RNA, 19 nt, artificial
  Chemically synthesized
guggguucuuggucucacu

SEQ ID NO: 7544 - RNA, 19 nt, artificial
  Chemically synthesized
guggccacuuugagguguu

SEQ ID NO: 7545 - RNA, 19 nt, artificial
  Chemically synthesized
ccagaacauccaguuccac

SEQ ID NO: 7546 - RNA, 19 nt, artificial
  Chemically synthesized
ucaacuucgacugcagcuu

SEQ ID NO: 7547 - RNA, 19 nt, artificial
  Chemically synthesized
ccuucuaguugcgcuuuug

SEQ ID NO: 7548 - RNA, 19 nt, artificial
  Chemically synthesized
caagaaugaagccgcagac

SEQ ID NO: 7549 - RNA, 19 nt, artificial
  Chemically synthesized
aggagaagaaagacuccau

SEQ ID NO: 7550 - RNA, 19 nt, artificial
  Chemically synthesized
ugagccugcugacuaaacu

SEQ ID NO: 7551 - RNA, 19 nt, artificial
  Chemically synthesized
ggucuuucgagugguuugu

SEQ ID NO: 7552 - RNA, 19 nt, artificial
  Chemically synthesized
cgaagguguccaagacaac

SEQ ID NO: 7553 - RNA, 19 nt, artificial
  Chemically synthesized
uggagaaacacaaauucug

SEQ ID NO: 7554 - RNA, 19 nt, artificial
  Chemically synthesized
caggcugguaugcagucau

SEQ ID NO: 7555 - RNA, 19 nt, artificial
  Chemically synthesized
ucauguucaucugcuccag

SEQ ID NO: 7556 - RNA, 19 nt, artificial
  Chemically synthesized
cuccucauguucaucugcu

SEQ ID NO: 7557 - RNA, 19 nt, artificial
  Chemically synthesized
ucacacugugaacuuugua

SEQ ID NO: 7558 - RNA, 19 nt, artificial
  Chemically synthesized
gcgcuuuugcuauggccuu

SEQ ID NO: 7559 - RNA, 19 nt, artificial
  Chemically synthesized
uccaguuccaccagcuuau

SEQ ID NO: 7560 - RNA, 19 nt, artificial
  Chemically synthesized
acauccaguuccaccagcu

SEQ ID NO: 7561 - RNA, 19 nt, artificial
  Chemically synthesized
ucaagaaugaagccgcaga

SEQ ID NO: 7562 - RNA, 19 nt, artificial
  Chemically synthesized
ucagauuuuuccaagagaa

SEQ ID NO: 7563 - RNA, 19 nt, artificial
  Chemically synthesized
cuggaauugguggguucuu

SEQ ID NO: 7564 - RNA, 19 nt, artificial
  Chemically synthesized
agcugcauauguacaugac

SEQ ID NO: 7565 - RNA, 19 nt, artificial
  Chemically synthesized
cggucuuucgagugguuug

SEQ ID NO: 7566 - RNA, 19 nt, artificial
  Chemically synthesized
aagguguccaagacaacau

SEQ ID NO: 7567 - RNA, 19 nt, artificial
  Chemically synthesized
ggcuuauccgaggucucaa

SEQ ID NO: 7568 - RNA, 19 nt, artificial
  Chemically synthesized
cucauguucaucugcucca

SEQ ID NO: 7569 - RNA, 19 nt, artificial
  Chemically synthesized
uccucauguucaucugcuc

SEQ ID NO: 7570 - RNA, 19 nt, artificial
  Chemically synthesized
cacacugugaacuuuguac

SEQ ID NO: 7571 - RNA, 19 nt, artificial
  Chemically synthesized
cucacacugugaacuuugu

SEQ ID NO: 7572 - RNA, 19 nt, artificial
  Chemically synthesized
cgccuaugaagcccuuagu

SEQ ID NO: 7573 - RNA, 19 nt, artificial
  Chemically synthesized
ugccucaacuucgacugca

SEQ ID NO: 7574 - RNA, 19 nt, artificial
  Chemically synthesized
ccuucuuugcagagcgauu

SEQ ID NO: 7575 - RNA, 19 nt, artificial
  Chemically synthesized
gcaugugaaagaguccuuc

SEQ ID NO: 7576 - RNA, 19 nt, artificial
  Chemically synthesized
agaagaaagacuccaucac

SEQ ID NO: 7577 - RNA, 19 nt, artificial
  Chemically synthesized
agcuccauaagguggacuu

SEQ ID NO: 7578 - RNA, 19 nt, artificial
  Chemically synthesized
agguguccaagacaacaug

SEQ ID NO: 7579 - RNA, 19 nt, artificial
  Chemically synthesized
guaacaucaagugcuacau

SEQ ID NO: 7580 - RNA, 19 nt, artificial
  Chemically synthesized
acaggcuguaugaguccuu

SEQ ID NO: 7581 - RNA, 19 nt, artificial
  Chemically synthesized
cagugcuccugagcagaaa

SEQ ID NO: 7582 - RNA, 19 nt, artificial
  Chemically synthesized
ccauugcucgcuaugagug

SEQ ID NO: 7583 - RNA, 19 nt, artificial
  Chemically synthesized
gcaucauggaagucaaccu

SEQ ID NO: 7584 - RNA, 19 nt, artificial
  Chemically synthesized
accagcuuaugggcuacgu

SEQ ID NO: 7585 - RNA, 19 nt, artificial
  Chemically synthesized
ccaguuccaccagcuuaug

SEQ ID NO: 7586 - RNA, 19 nt, artificial
  Chemically synthesized
uccuaccacuggaccagaa

SEQ ID NO: 7587 - RNA, 19 nt, artificial
  Chemically synthesized
cuaguugcgcuuuugcuau

SEQ ID NO: 7588 - RNA, 19 nt, artificial
  Chemically synthesized
acgccuaugaagcccuuag

SEQ ID NO: 7589 - RNA, 19 nt, artificial
  Chemically synthesized
cugcaagaauucaaagcag

SEQ ID NO: 7590 - RNA, 19 nt, artificial
  Chemically synthesized
ccugcaagaauucaaagca

SEQ ID NO: 7591 - RNA, 19 nt, artificial
  Chemically synthesized
ggcuucagauuuuuccaag

SEQ ID NO: 7592 - RNA, 19 nt, artificial
  Chemically synthesized
gugagaaguucggcuucag

SEQ ID NO: 7593 - RNA, 19 nt, artificial
  Chemically synthesized
cugagaagaagggcaaggu

SEQ ID NO: 7594 - RNA, 19 nt, artificial
  Chemically synthesized
acaaggagaagaaagacuc

SEQ ID NO: 7595 - RNA, 19 nt, artificial
  Chemically synthesized
gcauauguacaugacaucu

SEQ ID NO: 7596 - RNA, 19 nt, artificial
  Chemically synthesized
cugcauauguacaugacau

SEQ ID NO: 7597 - RNA, 19 nt, artificial
  Chemically synthesized
gcuuccuggagcugcauau

SEQ ID NO: 7598 - RNA, 19 nt, artificial
  Chemically synthesized
cuaaacuggagauggacca

SEQ ID NO: 7599 - RNA, 19 nt, artificial
  Chemically synthesized
ucgaagguguccaagacaa

SEQ ID NO: 7600 - RNA, 19 nt, artificial
  Chemically synthesized
cuggaucgaagguguccaa

SEQ ID NO: 7601 - RNA, 19 nt, artificial
  Chemically synthesized
ccacuuugagguguucuau

SEQ ID NO: 7602 - RNA, 19 nt, artificial
  Chemically synthesized
ggccacuuugagguguucu

SEQ ID NO: 7603 - RNA, 19 nt, artificial
  Chemically synthesized
gcuccauaagguggacuuu

SEQ ID NO: 7604 - RNA, 19 nt, artificial
  Chemically synthesized
agacaacaugaagcuccau

SEQ ID NO: 7605 - RNA, 19 nt, artificial
  Chemically synthesized
guguccaagacaacaugaa

SEQ ID NO: 7606 - RNA, 19 nt, artificial
  Chemically synthesized
cccuuugcuuccauucugc

SEQ ID NO: 7607 - RNA, 19 nt, artificial
  Chemically synthesized
auguucaucugcuccaguu

SEQ ID NO: 7608 - RNA, 19 nt, artificial
  Chemically synthesized
uccaccagcuuaugggcua

SEQ ID NO: 7609 - RNA, 19 nt, artificial
  Chemically synthesized
accagaacauccaguucca

SEQ ID NO: 7610 - RNA, 19 nt, artificial
  Chemically synthesized
uggaccagaacauccaguu

SEQ ID NO: 7611 - RNA, 19 nt, artificial
  Chemically synthesized
uggcucaaguccuaccacu

SEQ ID NO: 7612 - RNA, 19 nt, artificial
  Chemically synthesized
ucauggagaaccugaccau

SEQ ID NO: 7613 - RNA, 19 nt, artificial
  Chemically synthesized
cgauagaaguggcaccauc

SEQ ID NO: 7614 - RNA, 19 nt, artificial
  Chemically synthesized
ccgauagaaguggcaccau

SEQ ID NO: 7615 - RNA, 19 nt, artificial
  Chemically synthesized
caagagaauuucuagccuc

SEQ ID NO: 7616 - RNA, 19 nt, artificial
  Chemically synthesized
gagaaguucggcuucagau

SEQ ID NO: 7617 - RNA, 19 nt, artificial
  Chemically synthesized
gugcaggucuucuucugug

SEQ ID NO: 7618 - RNA, 19 nt, artificial
  Chemically synthesized
uggagcugcauauguacau

SEQ ID NO: 7619 - RNA, 19 nt, artificial
  Chemically synthesized
uccauaagguggacuuuau

SEQ ID NO: 7620 - RNA, 19 nt, artificial
  Chemically synthesized
acuacuuguaucugaacau

SEQ ID NO: 7621 - RNA, 19 nt, artificial
  Chemically synthesized
ccuggugacuacuuguauc

SEQ ID NO: 7622 - RNA, 19 nt, artificial
  Chemically synthesized
ucacuauagaccuggugac

SEQ ID NO: 7623 - RNA, 19 nt, artificial
  Chemically synthesized
cuguggcucacacugugaa

SEQ ID NO: 7624 - RNA, 19 nt, artificial
  Chemically synthesized
agaacauccaguuccacca

SEQ ID NO: 7625 - RNA, 19 nt, artificial
  Chemically synthesized
ucaaguccuaccacuggac

SEQ ID NO: 7626 - RNA, 19 nt, artificial
  Chemically synthesized
cucaaguccuaccacugga

SEQ ID NO: 7627 - RNA, 19 nt, artificial
  Chemically synthesized
agagcgauucuuugcccua

SEQ ID NO: 7628 - RNA, 19 nt, artificial
  Chemically synthesized
guccuucuuugcagagcga

SEQ ID NO: 7629 - RNA, 19 nt, artificial
  Chemically synthesized
aagcagcucugcaugugaa

SEQ ID NO: 7630 - RNA, 19 nt, artificial
  Chemically synthesized
caaagcagcucugcaugug

SEQ ID NO: 7631 - RNA, 19 nt, artificial
  Chemically synthesized
agaauucaaagcagcucug

SEQ ID NO: 7632 - RNA, 19 nt, artificial
  Chemically synthesized
gccugcaagaauucaaagc

SEQ ID NO: 7633 - RNA, 19 nt, artificial
  Chemically synthesized
gaagcccuuaguccuucua

SEQ ID NO: 7634 - RNA, 19 nt, artificial
  Chemically synthesized
gccugcugacuaaacugga

SEQ ID NO: 7635 - RNA, 19 nt, artificial
  Chemically synthesized
ucauguacaggcaccagaa

SEQ ID NO: 7636 - RNA, 19 nt, artificial
  Chemically synthesized
guaucauguacaggcacca

SEQ ID NO: 7637 - RNA, 19 nt, artificial
  Chemically synthesized
cuggugacuacuuguaucu

SEQ ID NO: 7638 - RNA, 19 nt, artificial
  Chemically synthesized
caaggucacucaucuccuc

SEQ ID NO: 7639 - RNA, 19 nt, artificial
  Chemically synthesized
ggcuucugcucaucuuuca

SEQ ID NO: 7640 - RNA, 19 nt, artificial
  Chemically synthesized
uguggcuucugcucaucuu

SEQ ID NO: 7641 - RNA, 19 nt, artificial
  Chemically synthesized
gguguucuauuggacucac

SEQ ID NO: 7642 - RNA, 19 nt, artificial
  Chemically synthesized
cgcuuuugcuauggccuuc

SEQ ID NO: 7643 - RNA, 19 nt, artificial
  Chemically synthesized
ggaccagaacauccaguuc

SEQ ID NO: 7644 - RNA, 19 nt, artificial
  Chemically synthesized
uggagaaccugaccaucag

SEQ ID NO: 7645 - RNA, 19 nt, artificial
  Chemically synthesized
cucugcaugugaaagaguc

SEQ ID NO: 7646 - RNA, 19 nt, artificial
  Chemically synthesized
cagauuuuuccaagagaau

SEQ ID NO: 7647 - RNA, 19 nt, artificial
  Chemically synthesized
uccuggccaacaaggagaa

SEQ ID NO: 7648 - RNA, 19 nt, artificial
  Chemically synthesized
ugguuugugagccugcuga

SEQ ID NO: 7649 - RNA, 19 nt, artificial
  Chemically synthesized
ucgagugguuugugagccu

SEQ ID NO: 7650 - RNA, 19 nt, artificial
  Chemically synthesized
gccuaugaagcccuuaguc

SEQ ID NO: 7651 - RNA, 19 nt, artificial
  Chemically synthesized
ggagucauggagaaccuga

SEQ ID NO: 7652 - RNA, 19 nt, artificial
  Chemically synthesized
ggacaaacucaaauuccuc

SEQ ID NO: 7653 - RNA, 19 nt, artificial
  Chemically synthesized
uggacaaacucaaauuccu

SEQ ID NO: 7654 - RNA, 19 nt, artificial
  Chemically synthesized
gugaaagaguccuucuuug

SEQ ID NO: 7655 - RNA, 19 nt, artificial
  Chemically synthesized
augugaaagaguccuucuu

SEQ ID NO: 7656 - RNA, 19 nt, artificial
  Chemically synthesized
agcucugcaugugaaagag

SEQ ID NO: 7657 - RNA, 19 nt, artificial
  Chemically synthesized
gaaguucggcuucagauuu

SEQ ID NO: 7658 - RNA, 19 nt, artificial
  Chemically synthesized
uccagaaaguggcugcuga

SEQ ID NO: 7659 - RNA, 19 nt, artificial
  Chemically synthesized
ugcauauguacaugacauc

SEQ ID NO: 7660 - RNA, 19 nt, artificial
  Chemically synthesized
gcugcauauguacaugaca

SEQ ID NO: 7661 - RNA, 19 nt, artificial
  Chemically synthesized
ccauaagguggacuuuauc

SEQ ID NO: 7662 - RNA, 19 nt, artificial
  Chemically synthesized
ccaagacaacaugaagcuc

SEQ ID NO: 7663 - RNA, 19 nt, artificial
  Chemically synthesized
ugcuuccauucugcagagu

SEQ ID NO: 7664 - RNA, 19 nt, artificial
  Chemically synthesized
caggcuguaugaguccuuc

SEQ ID NO: 7665 - RNA, 19 nt, artificial
  Chemically synthesized
ucauggaagucaaccuccu

SEQ ID NO: 7666 - RNA, 19 nt, artificial
  Chemically synthesized
cuggaaucuuguuuuuccu

SEQ ID NO: 7667 - RNA, 19 nt, artificial
  Chemically synthesized
ccaacuucuggaaguggcu

SEQ ID NO: 7668 - RNA, 19 nt, artificial
  Chemically synthesized
cacuuugagguguucuauu

SEQ ID NO: 7669 - RNA, 19 nt, artificial
  Chemically synthesized
uggccacuuugagguguuc

SEQ ID NO: 7670 - RNA, 19 nt, artificial
  Chemically synthesized
ugugaaagaguccuucuuu

SEQ ID NO: 7671 - RNA, 19 nt, artificial
  Chemically synthesized
gcagcucugcaugugaaag

SEQ ID NO: 7672 - RNA, 19 nt, artificial
  Chemically synthesized
agaaguucggcuucagauu

SEQ ID NO: 7673 - RNA, 19 nt, artificial
  Chemically synthesized
ugaagcccuuaguccuucu

SEQ ID NO: 7674 - RNA, 19 nt, artificial
  Chemically synthesized
caggucuucuucuguggcu

SEQ ID NO: 7675 - RNA, 19 nt, artificial
  Chemically synthesized
uugaccuccuggccaacaa

SEQ ID NO: 7676 - RNA, 19 nt, artificial
  Chemically synthesized
cuccauaagguggacuuua

SEQ ID NO: 7677 - RNA, 19 nt, artificial
  Chemically synthesized
caggaucuuugccucugag

SEQ ID NO: 7678 - RNA, 19 nt, artificial
  Chemically synthesized
ggcugguaugcagucaugu

SEQ ID NO: 7679 - RNA, 19 nt, artificial
  Chemically synthesized
ugagcagaaagacacuauc

SEQ ID NO: 7680 - RNA, 19 nt, artificial
  Chemically synthesized
gugcuccugagcagaaaga

SEQ ID NO: 7681 - RNA, 19 nt, artificial
  Chemically synthesized
ugacuacuuguaucugaac

SEQ ID NO: 7682 - RNA, 19 nt, artificial
  Chemically synthesized
gacaaacucaaauuccucu

SEQ ID NO: 7683 - RNA, 19 nt, artificial
  Chemically synthesized
agcagcucugcaugugaaa

SEQ ID NO: 7684 - RNA, 19 nt, artificial
  Chemically synthesized
gcuucagauuuuuccaaga

SEQ ID NO: 7685 - RNA, 19 nt, artificial
  Chemically synthesized
guacaugacaucugcacug

SEQ ID NO: 7686 - RNA, 19 nt, artificial
  Chemically synthesized
ggaucuuugccucugagca

SEQ ID NO: 7687 - RNA, 19 nt, artificial
  Chemically synthesized
gugacaaugagaaagaguc

SEQ ID NO: 7688 - RNA, 19 nt, artificial
  Chemically synthesized
cugucgaggagugugacaa

SEQ ID NO: 7689 - RNA, 19 nt, artificial
  Chemically synthesized
ccuggaaucuuguuuuucc

SEQ ID NO: 7690 - RNA, 19 nt, artificial
  Chemically synthesized
ucguguggcuucugcucau

SEQ ID NO: 7691 - RNA, 19 nt, artificial
  Chemically synthesized
uccucuuccagguguauga

SEQ ID NO: 7692 - RNA, 19 nt, artificial
  Chemically synthesized
aggugcaggucuucuucug

SEQ ID NO: 7693 - RNA, 19 nt, artificial
  Chemically synthesized
ugacaucugcacugggcaa

SEQ ID NO: 7694 - RNA, 19 nt, artificial
  Chemically synthesized
gaagcuccauaagguggac

SEQ ID NO: 7695 - RNA, 19 nt, artificial
  Chemically synthesized
ugaagcuccauaaggugga

SEQ ID NO: 7696 - RNA, 19 nt, artificial
  Chemically synthesized
uggucucacugacuucaag

SEQ ID NO: 7697 - RNA, 19 nt, artificial
  Chemically synthesized
guggcuucugcucaucuuu

SEQ ID NO: 7698 - RNA, 19 nt, artificial
  Chemically synthesized
gucucacugacuucaagaa

SEQ ID NO: 7699 - RNA, 19 nt, artificial
  Chemically synthesized
uucuuggucucacugacuu

SEQ ID NO: 7700 - RNA, 19 nt, artificial
  Chemically synthesized
cuucagauuuuuccaagag

SEQ ID NO: 7701 - RNA, 19 nt, artificial
  Chemically synthesized
gccaacaaggagaagaaag

SEQ ID NO: 7702 - RNA, 19 nt, artificial
  Chemically synthesized
ggcaccagaaaagaaagca

SEQ ID NO: 7703 - RNA, 19 nt, artificial
  Chemically synthesized
cucacugacuucaagaaug

SEQ ID NO: 7704 - RNA, 19 nt, artificial
  Chemically synthesized
agaaugacaugaaggccau

SEQ ID NO: 7705 - RNA, 19 nt, artificial
  Chemically synthesized
cacugacuucaagaaugaa

SEQ ID NO: 7706 - RNA, 19 nt, artificial
  Chemically synthesized
uucagauuuuuccaagaga

SEQ ID NO: 7707 - RNA, 19 nt, artificial
  Chemically synthesized
gguucuuggucucacugac

SEQ ID NO: 7708 - RNA, 19 nt, artificial
  Chemically synthesized
gaaugacaugaaggccauu

SEQ ID NO: 7709 - RNA, 19 nt, artificial
  Chemically synthesized
ucaaauuccucuuccaggu

SEQ ID NO: 7710 - RNA, 19 nt, artificial
  Chemically synthesized
cugcugagaagaagggcaa

SEQ ID NO: 7711 - RNA, 19 nt, artificial
  Chemically synthesized
agcagaaagacacuaucug

SEQ ID NO: 7712 - RNA, 19 nt, artificial
  Chemically synthesized
cuaucggagucaaauaggg

SEQ ID NO: 7713 - RNA, 19 nt, artificial
  Chemically synthesized
uucuaucggagucaaauag

SEQ ID NO: 7714 - RNA, 19 nt, artificial
  Chemically synthesized
uguuucuccaaaaguaucu

SEQ ID NO: 7715 - RNA, 19 nt, artificial
  Chemically synthesized
uucuccaaaaguaucucag

SEQ ID NO: 7716 - RNA, 19 nt, artificial
  Chemically synthesized
ucuauagugaaaaaaaggg

SEQ ID NO: 7717 - RNA, 19 nt, artificial
  Chemically synthesized
aaaacaagauuccaggcac

SEQ ID NO: 7718 - RNA, 19 nt, artificial
  Chemically synthesized
agccuggaguacaaaguuc

SEQ ID NO: 7719 - RNA, 19 nt, artificial
  Chemically synthesized
guuucuccaaaaguaucuc

SEQ ID NO: 7720 - RNA, 19 nt, artificial
  Chemically synthesized
uugaaggacucauacagcc

SEQ ID NO: 7721 - RNA, 19 nt, artificial
  Chemically synthesized
aaaaguaucucagagcccu

SEQ ID NO: 7722 - RNA, 19 nt, artificial
  Chemically synthesized
uccaggaaaaacaagauuc

SEQ ID NO: 7723 - RNA, 19 nt, artificial
  Chemically synthesized
aaacaagauuccaggcacc

SEQ ID NO: 7724 - RNA, 19 nt, artificial
  Chemically synthesized
aguacaaaguucacagugu

SEQ ID NO: 7725 - RNA, 19 nt, artificial
  Chemically synthesized
aucuccaguuuagucagca

SEQ ID NO: 7726 - RNA, 19 nt, artificial
  Chemically synthesized
ucuaucggagucaaauagg

SEQ ID NO: 7727 - RNA, 19 nt, artificial
  Chemically synthesized
ugcaauggucuuaaacugc

SEQ ID NO: 7728 - RNA, 19 nt, artificial
  Chemically synthesized
caucuccaguuuagucagc

SEQ ID NO: 7729 - RNA, 19 nt, artificial
  Chemically synthesized
caaguaugcuuucuuuucu

SEQ ID NO: 7730 - RNA, 19 nt, artificial
  Chemically synthesized
uuguguuucuccaaaagua

SEQ ID NO: 7731 - RNA, 19 nt, artificial
  Chemically synthesized
aggcuagaaauucucuugg

SEQ ID NO: 7732 - RNA, 19 nt, artificial
  Chemically synthesized
augauacucugcagaaugg

SEQ ID NO: 7733 - RNA, 19 nt, artificial
  Chemically synthesized
caaaaguaucucagagccc

SEQ ID NO: 7734 - RNA, 19 nt, artificial
  Chemically synthesized
ucauacagccuguuugucc

SEQ ID NO: 7735 - RNA, 19 nt, artificial
  Chemically synthesized
auuugaguuuguccauggg

SEQ ID NO: 7736 - RNA, 19 nt, artificial
  Chemically synthesized
aaggacucuuucacaugca

SEQ ID NO: 7737 - RNA, 19 nt, artificial
  Chemically synthesized
caauggucuuaaacugcug

SEQ ID NO: 7738 - RNA, 19 nt, artificial
  Chemically synthesized
aauuccagauacaacauga

SEQ ID NO: 7739 - RNA, 19 nt, artificial
  Chemically synthesized
uuucuuuucuggugccugu

SEQ ID NO: 7740 - RNA, 19 nt, artificial
  Chemically synthesized
ccaaaaguaucucagagcc

SEQ ID NO: 7741 - RNA, 19 nt, artificial
  Chemically synthesized
aguaucucagagcccuugg

SEQ ID NO: 7742 - RNA, 19 nt, artificial
  Chemically synthesized
uugaauucuugcaggcuga

SEQ ID NO: 7743 - RNA, 19 nt, artificial
  Chemically synthesized
uugauccagauaaagucca

SEQ ID NO: 7744 - RNA, 19 nt, artificial
  Chemically synthesized
augaggagaugagugaccu

SEQ ID NO: 7745 - RNA, 19 nt, artificial
  Chemically synthesized
acuuccaugaugcacacgg

SEQ ID NO: 7746 - RNA, 19 nt, artificial
  Chemically synthesized
uuugaauucuugcaggcug

SEQ ID NO: 7747 - RNA, 19 nt, artificial
  Chemically synthesized
gaacuucucacaauggccc

SEQ ID NO: 7748 - RNA, 19 nt, artificial
  Chemically synthesized
cuuucuggaacaccuugcu

SEQ ID NO: 7749 - RNA, 19 nt, artificial
  Chemically synthesized
ucuccaguuuagucagcag

SEQ ID NO: 7750 - RNA, 19 nt, artificial
  Chemically synthesized
cuccaguuuagucagcagg

SEQ ID NO: 7751 - RNA, 19 nt, artificial
  Chemically synthesized
guugauccagauaaagucc

SEQ ID NO: 7752 - RNA, 19 nt, artificial
  Chemically synthesized
auccagauaaaguccaccu

SEQ ID NO: 7753 - RNA, 19 nt, artificial
  Chemically synthesized
auuccagauacaacaugac

SEQ ID NO: 7754 - RNA, 19 nt, artificial
  Chemically synthesized
cuccaaaaguaucucagag

SEQ ID NO: 7755 - RNA, 19 nt, artificial
  Chemically synthesized
uuggacgaccuuugacucu

SEQ ID NO: 7756 - RNA, 19 nt, artificial
  Chemically synthesized
aaaaacaagauuccaggca

SEQ ID NO: 7757 - RNA, 19 nt, artificial
  Chemically synthesized
auguucugguccaguggua

SEQ ID NO: 7758 - RNA, 19 nt, artificial
  Chemically synthesized
aagaggaauuugaguuugu

SEQ ID NO: 7759 - RNA, 19 nt, artificial
  Chemically synthesized
uucaugucauucuugccca

SEQ ID NO: 7760 - RNA, 19 nt, artificial
  Chemically synthesized
ccagauacaacaugacugc

SEQ ID NO: 7761 - RNA, 19 nt, artificial
  Chemically synthesized
uugacucuuucucauuguc

SEQ ID NO: 7762 - RNA, 19 nt, artificial
  Chemically synthesized
cuugaaggacucauacagc

SEQ ID NO: 7763 - RNA, 19 nt, artificial
  Chemically synthesized
cauacagccuguuugucca

SEQ ID NO: 7764 - RNA, 19 nt, artificial
  Chemically synthesized
gcaauggauugagaccucg

SEQ ID NO: 7765 - RNA, 19 nt, artificial
  Chemically synthesized
gucuauagugaaaaaaagg

SEQ ID NO: 7766 - RNA, 19 nt, artificial
  Chemically synthesized
uugacuuccaugaugcaca

SEQ ID NO: 7767 - RNA, 19 nt, artificial
  Chemically synthesized
uugggcccaugaaagauga

SEQ ID NO: 7768 - RNA, 19 nt, artificial
  Chemically synthesized
augaacaugaggaggagca

SEQ ID NO: 7769 - RNA, 19 nt, artificial
  Chemically synthesized
agcugcuuugaauucuugc

SEQ ID NO: 7770 - RNA, 19 nt, artificial
  Chemically synthesized
aaccacucgaaagaccgcu

SEQ ID NO: 7771 - RNA, 19 nt, artificial
  Chemically synthesized
aguaugcuuucuuuucugg

SEQ ID NO: 7772 - RNA, 19 nt, artificial
  Chemically synthesized
cuuugacucuuucucauug

SEQ ID NO: 7773 - RNA, 19 nt, artificial
  Chemically synthesized
caacaugacugcauaccag

SEQ ID NO: 7774 - RNA, 19 nt, artificial
  Chemically synthesized
uucucauugucacacuccu

SEQ ID NO: 7775 - RNA, 19 nt, artificial
  Chemically synthesized
auacagccuguuuguccac

SEQ ID NO: 7776 - RNA, 19 nt, artificial
  Chemically synthesized
aggagaugagugaccuugg

SEQ ID NO: 7777 - RNA, 19 nt, artificial
  Chemically synthesized
aacaugaggaggagcagca

SEQ ID NO: 7778 - RNA, 19 nt, artificial
  Chemically synthesized
gagcugcuuugaauucuug

SEQ ID NO: 7779 - RNA, 19 nt, artificial
  Chemically synthesized
aacuucucacaauggcccu

SEQ ID NO: 7780 - RNA, 19 nt, artificial
  Chemically synthesized
uucucacaauggcccuuca

SEQ ID NO: 7781 - RNA, 19 nt, artificial
  Chemically synthesized
ugauccagauaaaguccac

SEQ ID NO: 7782 - RNA, 19 nt, artificial
  Chemically synthesized
agcuucauguugucuugga

SEQ ID NO: 7783 - RNA, 19 nt, artificial
  Chemically synthesized
aaguaugcuuucuuuucug

SEQ ID NO: 7784 - RNA, 19 nt, artificial
  Chemically synthesized
augcuuucuuuucuggugc

SEQ ID NO: 7785 - RNA, 19 nt, artificial
  Chemically synthesized
uacucugcagaauggaagc

SEQ ID NO: 7786 - RNA, 19 nt, artificial
  Chemically synthesized
uaaggcccaucgauguagc

SEQ ID NO: 7787 - RNA, 19 nt, artificial
  Chemically synthesized
gacucauacagccuguuug

SEQ ID NO: 7788 - RNA, 19 nt, artificial
  Chemically synthesized
augugcagccagauagugu

SEQ ID NO: 7789 - RNA, 19 nt, artificial
  Chemically synthesized
auagugucuuucugcucag

SEQ ID NO: 7790 - RNA, 19 nt, artificial
  Chemically synthesized
uagugucuuucugcucagg

SEQ ID NO: 7791 - RNA, 19 nt, artificial
  Chemically synthesized
uguucagauacaaguaguc

SEQ ID NO: 7792 - RNA, 19 nt, artificial
  Chemically synthesized
caauggauugagaccucgg

SEQ ID NO: 7793 - RNA, 19 nt, artificial
  Chemically synthesized
auacaaguagucaccaggu

SEQ ID NO: 7794 - RNA, 19 nt, artificial
  Chemically synthesized
acaucgaugucauacaccu

SEQ ID NO: 7795 - RNA, 19 nt, artificial
  Chemically synthesized
uaaacugcugagucaccca

SEQ ID NO: 7796 - RNA, 19 nt, artificial
  Chemically synthesized
aggugaggcuagaaauucu

SEQ ID NO: 7797 - RNA, 19 nt, artificial
  Chemically synthesized
aaaaucugaagccgaacuu

SEQ ID NO: 7798 - RNA, 19 nt, artificial
  Chemically synthesized
ccgaacuucucacaauggc

SEQ ID NO: 7799 - RNA, 19 nt, artificial
  Chemically synthesized
gccuucaugucauucuugc

SEQ ID NO: 7800 - RNA, 19 nt, artificial
  Chemically synthesized
gauccagauaaaguccacc

SEQ ID NO: 7801 - RNA, 19 nt, artificial
  Chemically synthesized
ugccuguacaugauacucu

SEQ ID NO: 7802 - RNA, 19 nt, artificial
  Chemically synthesized
uccagauacaacaugacug

SEQ ID NO: 7803 - RNA, 19 nt, artificial
  Chemically synthesized
auacaacaugacugcauac

SEQ ID NO: 7804 - RNA, 19 nt, artificial
  Chemically synthesized
cucuuucucauugucacac

SEQ ID NO: 7805 - RNA, 19 nt, artificial
  Chemically synthesized
ucgacagccucuuagaacc

SEQ ID NO: 7806 - RNA, 19 nt, artificial
  Chemically synthesized
acagccucuuagaaccacg

SEQ ID NO: 7807 - RNA, 19 nt, artificial
  Chemically synthesized
uacagccuguuuguccacu

SEQ ID NO: 7808 - RNA, 19 nt, artificial
  Chemically synthesized
ugugcagccagauaguguc

SEQ ID NO: 7809 - RNA, 19 nt, artificial
  Chemically synthesized
ugacuuccaugaugcacac

SEQ ID NO: 7810 - RNA, 19 nt, artificial
  Chemically synthesized
ugaguccaauagaacaccu

SEQ ID NO: 7811 - RNA, 19 nt, artificial
  Chemically synthesized
gaguccaauagaacaccuc

SEQ ID NO: 7812 - RNA, 19 nt, artificial
  Chemically synthesized
agaugaacaugaggaggag

SEQ ID NO: 7813 - RNA, 19 nt, artificial
  Chemically synthesized
ucgaugucauacaccugga

SEQ ID NO: 7814 - RNA, 19 nt, artificial
  Chemically synthesized
uggugccacuucuaucgga

SEQ ID NO: 7815 - RNA, 19 nt, artificial
  Chemically synthesized
caaauagggcaaagaaucg

SEQ ID NO: 7816 - RNA, 19 nt, artificial
  Chemically synthesized
aauggucuuaaacugcuga

SEQ ID NO: 7817 - RNA, 19 nt, artificial
  Chemically synthesized
acuagaaggacuaagggcu

SEQ ID NO: 7818 - RNA, 19 nt, artificial
  Chemically synthesized
aaaaaucugaagccgaacu

SEQ ID NO: 7819 - RNA, 19 nt, artificial
  Chemically synthesized
augucauucuugcccagug

SEQ ID NO: 7820 - RNA, 19 nt, artificial
  Chemically synthesized
cuguacaugauacucugca

SEQ ID NO: 7821 - RNA, 19 nt, artificial
  Chemically synthesized
uguacaugauacucugcag

SEQ ID NO: 7822 - RNA, 19 nt, artificial
  Chemically synthesized
auuuguguuucuccaaaag

SEQ ID NO: 7823 - RNA, 19 nt, artificial
  Chemically synthesized
ucuuucucauugucacacu

SEQ ID NO: 7824 - RNA, 19 nt, artificial
  Chemically synthesized
gacagccucuuagaaccac

SEQ ID NO: 7825 - RNA, 19 nt, artificial
  Chemically synthesized
aaugugcagccagauagug

SEQ ID NO: 7826 - RNA, 19 nt, artificial
  Chemically synthesized
gaaaaacaagauuccaggc

SEQ ID NO: 7827 - RNA, 19 nt, artificial
  Chemically synthesized
cagaugaacaugaggagga

SEQ ID NO: 7828 - RNA, 19 nt, artificial
  Chemically synthesized
ugcacacacaucgauguca

SEQ ID NO: 7829 - RNA, 19 nt, artificial
  Chemically synthesized
acacaucgaugucauacac

SEQ ID NO: 7830 - RNA, 19 nt, artificial
  Chemically synthesized
aagaaucgcucugcaaaga

SEQ ID NO: 7831 - RNA, 19 nt, artificial
  Chemically synthesized
caacuagaaggacuaaggg

SEQ ID NO: 7832 - RNA, 19 nt, artificial
  Chemically synthesized
auggucuuaaacugcugag

SEQ ID NO: 7833 - RNA, 19 nt, artificial
  Chemically synthesized
acccaccaauuccagauac

SEQ ID NO: 7834 - RNA, 19 nt, artificial
  Chemically synthesized
uaugcuuucuuuucuggug

SEQ ID NO: 7835 - RNA, 19 nt, artificial
  Chemically synthesized
cauugucacacuccucgac

SEQ ID NO: 7836 - RNA, 19 nt, artificial
  Chemically synthesized
cagccagauagugucuuuc

SEQ ID NO: 7837 - RNA, 19 nt, artificial
  Chemically synthesized
uucuccaggaaaaacaaga

SEQ ID NO: 7838 - RNA, 19 nt, artificial
  Chemically synthesized
augaaagaugagcagaagc

SEQ ID NO: 7839 - RNA, 19 nt, artificial
  Chemically synthesized
aaagcgcaacuagaaggac

SEQ ID NO: 7840 - RNA, 19 nt, artificial
  Chemically synthesized
aagcgcaacuagaaggacu

SEQ ID NO: 7841 - RNA, 19 nt, artificial
  Chemically synthesized
acagaauuuguguuucucc

SEQ ID NO: 7842 - RNA, 19 nt, artificial
  Chemically synthesized
augucauacaccuggaaga

SEQ ID NO: 7843 - RNA, 19 nt, artificial
  Chemically synthesized
uaucggagucaaauagggc

SEQ ID NO: 7844 - RNA, 19 nt, artificial
  Chemically synthesized
cugcaauggucuuaaacug

SEQ ID NO: 7845 - RNA, 19 nt, artificial
  Chemically synthesized
aucggagucaaauagggca

SEQ ID NO: 7846 - RNA, 19 nt, artificial
  Chemically synthesized
uuucuucuccuuguuggcc

SEQ ID NO: 7847 - RNA, 19 nt, artificial
  Chemically synthesized
uagaacaccucaaaguggc

SEQ ID NO: 7848 - RNA, 19 nt, artificial
  Chemically synthesized
aaaagcgcaacuagaagga

SEQ ID NO: 7849 - RNA, 19 nt, artificial
  Chemically synthesized
uucuucuccuuguuggcca

SEQ ID NO: 7850 - RNA, 19 nt, artificial
  Chemically synthesized
uacagaauuuguguuucuc

SEQ ID NO: 7851 - RNA, 19 nt, artificial
  Chemically synthesized
ucauagcgagcaauggugg

SEQ ID NO: 7852 - RNA, 19 nt, artificial
  Chemically synthesized
aaaguucacagugugagcc

SEQ ID NO: 7853 - RNA, 19 nt, artificial
  Chemically synthesized
aauagggcaaagaaucgcu

SEQ ID NO: 7854 - RNA, 19 nt, artificial
  Chemically synthesized
aaguucacagugugagcca

SEQ ID NO: 7855 - RNA, 19 nt, artificial
  Chemically synthesized
gauggagucuuucuucucc

SEQ ID NO: 7856 - RNA, 19 nt, artificial
  Chemically synthesized
aaaccacucgaaagaccgc

SEQ ID NO: 7857 - RNA, 19 nt, artificial
  Chemically synthesized
aaagaccgcuggucucugu

SEQ ID NO: 7858 - RNA, 19 nt, artificial
  Chemically synthesized
ccaggaaaaacaagauucc

SEQ ID NO: 7859 - RNA, 19 nt, artificial
  Chemically synthesized
auugagaccucggauaagc

SEQ ID NO: 7860 - RNA, 19 nt, artificial
  Chemically synthesized
uggaguacaaaguucacag

SEQ ID NO: 7861 - RNA, 19 nt, artificial
  Chemically synthesized
uuggaaaaaucugaagccg

SEQ ID NO: 7862 - RNA, 19 nt, artificial
  Chemically synthesized
ucagugagaccaagaaccc

SEQ ID NO: 7863 - RNA, 19 nt, artificial
  Chemically synthesized
agugagaccaagaacccac

SEQ ID NO: 7864 - RNA, 19 nt, artificial
  Chemically synthesized
aacaccucaaaguggccac

SEQ ID NO: 7865 - RNA, 19 nt, artificial
  Chemically synthesized
guggaacuggauguucugg

SEQ ID NO: 7866 - RNA, 19 nt, artificial
  Chemically synthesized
aagcugcagucgaaguuga

SEQ ID NO: 7867 - RNA, 19 nt, artificial
  Chemically synthesized
caaaagcgcaacuagaagg

SEQ ID NO: 7868 - RNA, 19 nt, artificial
  Chemically synthesized
gucugcggcuucauucuug

SEQ ID NO: 7869 - RNA, 19 nt, artificial
  Chemically synthesized
auggagucuuucuucuccu

SEQ ID NO: 7870 - RNA, 19 nt, artificial
  Chemically synthesized
aguuuagucagcaggcuca

SEQ ID NO: 7871 - RNA, 19 nt, artificial
  Chemically synthesized
acaaaccacucgaaagacc

SEQ ID NO: 7872 - RNA, 19 nt, artificial
  Chemically synthesized
guugucuuggacaccuucg

SEQ ID NO: 7873 - RNA, 19 nt, artificial
  Chemically synthesized
cagaauuuguguuucucca

SEQ ID NO: 7874 - RNA, 19 nt, artificial
  Chemically synthesized
augacugcauaccagccug

SEQ ID NO: 7875 - RNA, 19 nt, artificial
  Chemically synthesized
cuggagcagaugaacauga

SEQ ID NO: 7876 - RNA, 19 nt, artificial
  Chemically synthesized
agcagaugaacaugaggag

SEQ ID NO: 7877 - RNA, 19 nt, artificial
  Chemically synthesized
uacaaaguucacaguguga

SEQ ID NO: 7878 - RNA, 19 nt, artificial
  Chemically synthesized
aaggccauagcaaaagcgc

SEQ ID NO: 7879 - RNA, 19 nt, artificial
  Chemically synthesized
auaagcugguggaacugga

SEQ ID NO: 7880 - RNA, 19 nt, artificial
  Chemically synthesized
agcugguggaacuggaugu

SEQ ID NO: 7881 - RNA, 19 nt, artificial
  Chemically synthesized
ucugcggcuucauucuuga

SEQ ID NO: 7882 - RNA, 19 nt, artificial
  Chemically synthesized
uucucuuggaaaaaucuga

SEQ ID NO: 7883 - RNA, 19 nt, artificial
  Chemically synthesized
aagaacccaccaauuccag

SEQ ID NO: 7884 - RNA, 19 nt, artificial
  Chemically synthesized
gucauguacauaugcagcu

SEQ ID NO: 7885 - RNA, 19 nt, artificial
  Chemically synthesized
caaaccacucgaaagaccg

SEQ ID NO: 7886 - RNA, 19 nt, artificial
  Chemically synthesized
auguugucuuggacaccuu

SEQ ID NO: 7887 - RNA, 19 nt, artificial
  Chemically synthesized
uugagaccucggauaagcc

SEQ ID NO: 7888 - RNA, 19 nt, artificial
  Chemically synthesized
uggagcagaugaacaugag

SEQ ID NO: 7889 - RNA, 19 nt, artificial
  Chemically synthesized
gagcagaugaacaugagga

SEQ ID NO: 7890 - RNA, 19 nt, artificial
  Chemically synthesized
guacaaaguucacagugug

SEQ ID NO: 7891 - RNA, 19 nt, artificial
  Chemically synthesized
acaaaguucacagugugag

SEQ ID NO: 7892 - RNA, 19 nt, artificial
  Chemically synthesized
acuaagggcuucauaggcg

SEQ ID NO: 7893 - RNA, 19 nt, artificial
  Chemically synthesized
ugcagucgaaguugaggca

SEQ ID NO: 7894 - RNA, 19 nt, artificial
  Chemically synthesized
aaucgcucugcaaagaagg

SEQ ID NO: 7895 - RNA, 19 nt, artificial
  Chemically synthesized
gaaggacucuuucacaugc

SEQ ID NO: 7896 - RNA, 19 nt, artificial
  Chemically synthesized
gugauggagucuuucuucu

SEQ ID NO: 7897 - RNA, 19 nt, artificial
  Chemically synthesized
aaguccaccuuauggagcu

SEQ ID NO: 7898 - RNA, 19 nt, artificial
  Chemically synthesized
cauguugucuuggacaccu

SEQ ID NO: 7899 - RNA, 19 nt, artificial
  Chemically synthesized
auguagcacuugauguuac

SEQ ID NO: 7900 - RNA, 19 nt, artificial
  Chemically synthesized
aaggacucauacagccugu

SEQ ID NO: 7901 - RNA, 19 nt, artificial
  Chemically synthesized
uuucugcucaggagcacug

SEQ ID NO: 7902 - RNA, 19 nt, artificial
  Chemically synthesized
cacucauagcgagcaaugg

SEQ ID NO: 7903 - RNA, 19 nt, artificial
  Chemically synthesized
agguugacuuccaugaugc

SEQ ID NO: 7904 - RNA, 19 nt, artificial
  Chemically synthesized
acguagcccauaagcuggu

SEQ ID NO: 7905 - RNA, 19 nt, artificial
  Chemically synthesized
cauaagcugguggaacugg

SEQ ID NO: 7906 - RNA, 19 nt, artificial
  Chemically synthesized
uucugguccagugguagga

SEQ ID NO: 7907 - RNA, 19 nt, artificial
  Chemically synthesized
auagcaaaagcgcaacuag

SEQ ID NO: 7908 - RNA, 19 nt, artificial
  Chemically synthesized
cuaagggcuucauaggcgu

SEQ ID NO: 7909 - RNA, 19 nt, artificial
  Chemically synthesized
cugcuuugaauucuugcag

SEQ ID NO: 7910 - RNA, 19 nt, artificial
  Chemically synthesized
ugcuuugaauucuugcagg

SEQ ID NO: 7911 - RNA, 19 nt, artificial
  Chemically synthesized
cuuggaaaaaucugaagcc

SEQ ID NO: 7912 - RNA, 19 nt, artificial
  Chemically synthesized
cugaagccgaacuucucac

SEQ ID NO: 7913 - RNA, 19 nt, artificial
  Chemically synthesized
accuugcccuucuucucag

SEQ ID NO: 7914 - RNA, 19 nt, artificial
  Chemically synthesized
gagucuuucuucuccuugu

SEQ ID NO: 7915 - RNA, 19 nt, artificial
  Chemically synthesized
agaugucauguacauaugc

SEQ ID NO: 7916 - RNA, 19 nt, artificial
  Chemically synthesized
augucauguacauaugcag

SEQ ID NO: 7917 - RNA, 19 nt, artificial
  Chemically synthesized
auaugcagcuccaggaagc

SEQ ID NO: 7918 - RNA, 19 nt, artificial
  Chemically synthesized
ugguccaucuccaguuuag

SEQ ID NO: 7919 - RNA, 19 nt, artificial
  Chemically synthesized
uugucuuggacaccuucga

SEQ ID NO: 7920 - RNA, 19 nt, artificial
  Chemically synthesized
uuggacaccuucgauccag

SEQ ID NO: 7921 - RNA, 19 nt, artificial
  Chemically synthesized
auagaacaccucaaagugg

SEQ ID NO: 7922 - RNA, 19 nt, artificial
  Chemically synthesized
agaacaccucaaaguggcc

SEQ ID NO: 7923 - RNA, 19 nt, artificial
  Chemically synthesized
aaaguccaccuuauggagc

SEQ ID NO: 7924 - RNA, 19 nt, artificial
  Chemically synthesized
auggagcuucauguugucu

SEQ ID NO: 7925 - RNA, 19 nt, artificial
  Chemically synthesized
uucauguugucuuggacac

SEQ ID NO: 7926 - RNA, 19 nt, artificial
  Chemically synthesized
gcagaauggaagcaaaggg

SEQ ID NO: 7927 - RNA, 19 nt, artificial
  Chemically synthesized
aacuggagcagaugaacau

SEQ ID NO: 7928 - RNA, 19 nt, artificial
  Chemically synthesized
uagcccauaagcuggugga

SEQ ID NO: 7929 - RNA, 19 nt, artificial
  Chemically synthesized
uggaacuggauguucuggu

SEQ ID NO: 7930 - RNA, 19 nt, artificial
  Chemically synthesized
aacuggauguucuggucca

SEQ ID NO: 7931 - RNA, 19 nt, artificial
  Chemically synthesized
agugguaggacuugagcca

SEQ ID NO: 7932 - RNA, 19 nt, artificial
  Chemically synthesized
auggucagguucuccauga

SEQ ID NO: 7933 - RNA, 19 nt, artificial
  Chemically synthesized
gauggugccacuucuaucg

SEQ ID NO: 7934 - RNA, 19 nt, artificial
  Chemically synthesized
auggugccacuucuaucgg

SEQ ID NO: 7935 - RNA, 19 nt, artificial
  Chemically synthesized
gaggcuagaaauucucuug

SEQ ID NO: 7936 - RNA, 19 nt, artificial
  Chemically synthesized
aucugaagccgaacuucuc

SEQ ID NO: 7937 - RNA, 19 nt, artificial
  Chemically synthesized
cacagaagaagaccugcac

SEQ ID NO: 7938 - RNA, 19 nt, artificial
  Chemically synthesized
auguacauaugcagcucca

SEQ ID NO: 7939 - RNA, 19 nt, artificial
  Chemically synthesized
auaaaguccaccuuaugga

SEQ ID NO: 7940 - RNA, 19 nt, artificial
  Chemically synthesized
auguucagauacaaguagu

SEQ ID NO: 7941 - RNA, 19 nt, artificial
  Chemically synthesized
gauacaaguagucaccagg

SEQ ID NO: 7942 - RNA, 19 nt, artificial
  Chemically synthesized
gucaccaggucuauaguga

SEQ ID NO: 7943 - RNA, 19 nt, artificial
  Chemically synthesized
uucacagugugagccacag

SEQ ID NO: 7944 - RNA, 19 nt, artificial
  Chemically synthesized
ugguggaacuggauguucu

SEQ ID NO: 7945 - RNA, 19 nt, artificial
  Chemically synthesized
guccagugguaggacuuga

SEQ ID NO: 7946 - RNA, 19 nt, artificial
  Chemically synthesized
uccagugguaggacuugag

SEQ ID NO: 7947 - RNA, 19 nt, artificial
  Chemically synthesized
uagggcaaagaaucgcucu

SEQ ID NO: 7948 - RNA, 19 nt, artificial
  Chemically synthesized
ucgcucugcaaagaaggac

SEQ ID NO: 7949 - RNA, 19 nt, artificial
  Chemically synthesized
uucacaugcagagcugcuu

SEQ ID NO: 7950 - RNA, 19 nt, artificial
  Chemically synthesized
cacaugcagagcugcuuug

SEQ ID NO: 7951 - RNA, 19 nt, artificial
  Chemically synthesized
cagagcugcuuugaauucu

SEQ ID NO: 7952 - RNA, 19 nt, artificial
  Chemically synthesized
gcuuugaauucuugcaggc

SEQ ID NO: 7953 - RNA, 19 nt, artificial
  Chemically synthesized
uagaaggacuaagggcuuc

SEQ ID NO: 7954 - RNA, 19 nt, artificial
  Chemically synthesized
uccaguuuagucagcaggc

SEQ ID NO: 7955 - RNA, 19 nt, artificial
  Chemically synthesized
uucuggugccuguacauga

SEQ ID NO: 7956 - RNA, 19 nt, artificial
  Chemically synthesized
uggugccuguacaugauac

SEQ ID NO: 7957 - RNA, 19 nt, artificial
  Chemically synthesized
agauacaaguagucaccag

SEQ ID NO: 7958 - RNA, 19 nt, artificial
  Chemically synthesized
gaggagaugagugaccuug

SEQ ID NO: 7959 - RNA, 19 nt, artificial
  Chemically synthesized
ugaaagaugagcagaagcc

SEQ ID NO: 7960 - RNA, 19 nt, artificial
  Chemically synthesized
aagaugagcagaagccaca

SEQ ID NO: 7961 - RNA, 19 nt, artificial
  Chemically synthesized
gugaguccaauagaacacc

SEQ ID NO: 7962 - RNA, 19 nt, artificial
  Chemically synthesized
gaaggccauagcaaaagcg

SEQ ID NO: 7963 - RNA, 19 nt, artificial
  Chemically synthesized
gaacuggauguucuggucc

SEQ ID NO: 7964 - RNA, 19 nt, artificial
  Chemically synthesized
cugauggucagguucucca

SEQ ID NO: 7965 - RNA, 19 nt, artificial
  Chemically synthesized
gacucuuucacaugcagag

SEQ ID NO: 7966 - RNA, 19 nt, artificial
  Chemically synthesized
auucucuuggaaaaaucug

SEQ ID NO: 7967 - RNA, 19 nt, artificial
  Chemically synthesized
uucuccuuguuggccagga

SEQ ID NO: 7968 - RNA, 19 nt, artificial
  Chemically synthesized
ucagcaggcucacaaacca

SEQ ID NO: 7969 - RNA, 19 nt, artificial
  Chemically synthesized
aggcucacaaaccacucga

SEQ ID NO: 7970 - RNA, 19 nt, artificial
  Chemically synthesized
gacuaagggcuucauaggc

SEQ ID NO: 7971 - RNA, 19 nt, artificial
  Chemically synthesized
ucagguucuccaugacucc

SEQ ID NO: 7972 - RNA, 19 nt, artificial
  Chemically synthesized
gaggaauuugaguuugucc

SEQ ID NO: 7973 - RNA, 19 nt, artificial
  Chemically synthesized
aggaauuugaguuugucca

SEQ ID NO: 7974 - RNA, 19 nt, artificial
  Chemically synthesized
caaagaaggacucuuucac

SEQ ID NO: 7975 - RNA, 19 nt, artificial
  Chemically synthesized
aagaaggacucuuucacau

SEQ ID NO: 7976 - RNA, 19 nt, artificial
  Chemically synthesized
cucuuucacaugcagagcu

SEQ ID NO: 7977 - RNA, 19 nt, artificial
  Chemically synthesized
aaaucugaagccgaacuuc

SEQ ID NO: 7978 - RNA, 19 nt, artificial
  Chemically synthesized
ucagcagccacuuucugga

SEQ ID NO: 7979 - RNA, 19 nt, artificial
  Chemically synthesized
gaugucauguacauaugca

SEQ ID NO: 7980 - RNA, 19 nt, artificial
  Chemically synthesized
ugucauguacauaugcagc

SEQ ID NO: 7981 - RNA, 19 nt, artificial
  Chemically synthesized
gauaaaguccaccuuaugg

SEQ ID NO: 7982 - RNA, 19 nt, artificial
  Chemically synthesized
gagcuucauguugucuugg

SEQ ID NO: 7983 - RNA, 19 nt, artificial
  Chemically synthesized
acucugcagaauggaagca

SEQ ID NO: 7984 - RNA, 19 nt, artificial
  Chemically synthesized
gaaggacucauacagccug

SEQ ID NO: 7985 - RNA, 19 nt, artificial
  Chemically synthesized
aggagguugacuuccauga

SEQ ID NO: 7986 - RNA, 19 nt, artificial
  Chemically synthesized
aggaaaaacaagauuccag

SEQ ID NO: 7987 - RNA, 19 nt, artificial
  Chemically synthesized
agccacuuccagaaguugg

SEQ ID NO: 7988 - RNA, 19 nt, artificial
  Chemically synthesized
aauagaacaccucaaagug

SEQ ID NO: 7989 - RNA, 19 nt, artificial
  Chemically synthesized
gaacaccucaaaguggcca

SEQ ID NO: 7990 - RNA, 19 nt, artificial
  Chemically synthesized
aaagaaggacucuuucaca

SEQ ID NO: 7991 - RNA, 19 nt, artificial
  Chemically synthesized
cuuucacaugcagagcugc

SEQ ID NO: 7992 - RNA, 19 nt, artificial
  Chemically synthesized
aaucugaagccgaacuucu

SEQ ID NO: 7993 - RNA, 19 nt, artificial
  Chemically synthesized
agaaggacuaagggcuuca

SEQ ID NO: 7994 - RNA, 19 nt, artificial
  Chemically synthesized
agccacagaagaagaccug

SEQ ID NO: 7995 - RNA, 19 nt, artificial
  Chemically synthesized
uuguuggccaggaggucaa

SEQ ID NO: 7996 - RNA, 19 nt, artificial
  Chemically synthesized
uaaaguccaccuuauggag

SEQ ID NO: 7997 - RNA, 19 nt, artificial
  Chemically synthesized
cucagaggcaaagauccug

SEQ ID NO: 7998 - RNA, 19 nt, artificial
  Chemically synthesized
acaugacugcauaccagcc

SEQ ID NO: 7999 - RNA, 19 nt, artificial
  Chemically synthesized
gauagugucuuucugcuca

SEQ ID NO: 8000 - RNA, 19 nt, artificial
  Chemically synthesized
ucuuucugcucaggagcac

SEQ ID NO: 8001 - RNA, 19 nt, artificial
  Chemically synthesized
guucagauacaaguaguca

SEQ ID NO: 8002 - RNA, 19 nt, artificial
  Chemically synthesized
agaggaauuugaguuuguc

SEQ ID NO: 8003 - RNA, 19 nt, artificial
  Chemically synthesized
uuucacaugcagagcugcu

SEQ ID NO: 8004 - RNA, 19 nt, artificial
  Chemically synthesized
ucuuggaaaaaucugaagc

SEQ ID NO: 8005 - RNA, 19 nt, artificial
  Chemically synthesized
cagugcagaugucauguac

SEQ ID NO: 8006 - RNA, 19 nt, artificial
  Chemically synthesized
ugcucagaggcaaagaucc

SEQ ID NO: 8007 - RNA, 19 nt, artificial
  Chemically synthesized
gacucuuucucauugucac

SEQ ID NO: 8008 - RNA, 19 nt, artificial
  Chemically synthesized
uugucacacuccucgacag

SEQ ID NO: 8009 - RNA, 19 nt, artificial
  Chemically synthesized
ggaaaaacaagauuccagg

SEQ ID NO: 8010 - RNA, 19 nt, artificial
  Chemically synthesized
augagcagaagccacacga

SEQ ID NO: 8011 - RNA, 19 nt, artificial
  Chemically synthesized
ucauacaccuggaagagga

SEQ ID NO: 8012 - RNA, 19 nt, artificial
  Chemically synthesized
cagaagaagaccugcaccu

SEQ ID NO: 8013 - RNA, 19 nt, artificial
  Chemically synthesized
uugcccagugcagauguca

SEQ ID NO: 8014 - RNA, 19 nt, artificial
  Chemically synthesized
guccaccuuauggagcuuc

SEQ ID NO: 8015 - RNA, 19 nt, artificial
  Chemically synthesized
uccaccuuauggagcuuca

SEQ ID NO: 8016 - RNA, 19 nt, artificial
  Chemically synthesized
cuugaagucagugagacca

SEQ ID NO: 8017 - RNA, 19 nt, artificial
  Chemically synthesized
aaagaugagcagaagccac

SEQ ID NO: 8018 - RNA, 19 nt, artificial
  Chemically synthesized
uucuugaagucagugagac

SEQ ID NO: 8019 - RNA, 19 nt, artificial
  Chemically synthesized
aagucagugagaccaagaa

SEQ ID NO: 8020 - RNA, 19 nt, artificial
  Chemically synthesized
cucuuggaaaaaucugaag

SEQ ID NO: 8021 - RNA, 19 nt, artificial
  Chemically synthesized
cuuucuucuccuuguuggc

SEQ ID NO: 8022 - RNA, 19 nt, artificial
  Chemically synthesized
ugcuuucuuuucuggugcc

SEQ ID NO: 8023 - RNA, 19 nt, artificial
  Chemically synthesized
cauucuugaagucagugag

SEQ ID NO: 8024 - RNA, 19 nt, artificial
  Chemically synthesized
auggccuucaugucauucu

SEQ ID NO: 8025 - RNA, 19 nt, artificial
  Chemically synthesized
uucauucuugaagucagug

SEQ ID NO: 8026 - RNA, 19 nt, artificial
  Chemically synthesized
ucucuuggaaaaaucugaa

SEQ ID NO: 8027 - RNA, 19 nt, artificial
  Chemically synthesized
gucagugagaccaagaacc

SEQ ID NO: 8028 - RNA, 19 nt, artificial
  Chemically synthesized
aauggccuucaugucauuc

SEQ ID NO: 8029 - RNA, 19 nt, artificial
  Chemically synthesized
accuggaagaggaauuuga

SEQ ID NO: 8030 - RNA, 19 nt, artificial
  Chemically synthesized
uugcccuucuucucagcag

SEQ ID NO: 8031 - RNA, 19 nt, artificial
  Chemically synthesized
cagauagugucuuucugcu

SEQ ID NO: 8032 - RNA, 19 nt, artificial
  Chemically synthesized
gggugacucagcaguuuaa

SEQ ID NO: 8033 - RNA, 19 nt, artificial
  Chemically synthesized
ggagcaagguguuccagaa

SEQ ID NO: 8034 - RNA, 19 nt, artificial
  Chemically synthesized
ccagguguaugacaucgau

SEQ ID NO: 8035 - RNA, 19 nt, artificial
  Chemically synthesized
cacaaauucuguaacauca

SEQ ID NO: 8036 - RNA, 19 nt, artificial
  Chemically synthesized
acaaauucuguaacaucaa

SEQ ID NO: 8037 - RNA, 19 nt, artificial
  Chemically synthesized
ggagugugacaaugagaaa

SEQ ID NO: 8038 - RNA, 19 nt, artificial
  Chemically synthesized
ugacuaaacuggagaugga

SEQ ID NO: 8039 - RNA, 19 nt, artificial
  Chemically synthesized
gauucuuugcccuauuuga

SEQ ID NO: 8040 - RNA, 19 nt, artificial
  Chemically synthesized
gugacuacuuguaucugaa

SEQ ID NO: 8041 - RNA, 19 nt, artificial
  Chemically synthesized
cgaggagugugacaaugag

SEQ ID NO: 8042 - RNA, 19 nt, artificial
  Chemically synthesized
ccaacaaggagaagaaaga

SEQ ID NO: 8043 - RNA, 19 nt, artificial
  Chemically synthesized
uugugagccugcugacuaa

SEQ ID NO: 8044 - RNA, 19 nt, artificial
  Chemically synthesized
uacggacgacgccuaugaa

SEQ ID NO: 8045 - RNA, 19 nt, artificial
  Chemically synthesized
gugacucagcaguuuaaga

SEQ ID NO: 8046 - RNA, 19 nt, artificial
  Chemically synthesized
cauguacaggcaccagaaa

SEQ ID NO: 8047 - RNA, 19 nt, artificial
  Chemically synthesized
gguaugcagucauguugua

SEQ ID NO: 8048 - RNA, 19 nt, artificial
  Chemically synthesized
gacuuuaucuggaucaaca

SEQ ID NO: 8049 - RNA, 19 nt, artificial
  Chemically synthesized
gaagguguccaagacaaca

SEQ ID NO: 8050 - RNA, 19 nt, artificial
  Chemically synthesized
gcuccugagcagaaagaca

SEQ ID NO: 8051 - RNA, 19 nt, artificial
  Chemically synthesized
uccuggagcugcauaugua

SEQ ID NO: 8052 - RNA, 19 nt, artificial
  Chemically synthesized
acaacaugaagcuccauaa

SEQ ID NO: 8053 - RNA, 19 nt, artificial
  Chemically synthesized
gagcaagguguuccagaaa

SEQ ID NO: 8054 - RNA, 19 nt, artificial
  Chemically synthesized
gcucugagauacuuuugga

SEQ ID NO: 8055 - RNA, 19 nt, artificial
  Chemically synthesized
ggaucgaagguguccaaga

SEQ ID NO: 8056 - RNA, 19 nt, artificial
  Chemically synthesized
ucuguaacaucaagugcua

SEQ ID NO: 8057 - RNA, 19 nt, artificial
  Chemically synthesized
gggcaagaaugacaugaag

SEQ ID NO: 8058 - RNA, 19 nt, artificial
  Chemically synthesized
ggagaucagccugcaagaa

SEQ ID NO: 8059 - RNA, 19 nt, artificial
  Chemically synthesized
ugagauacuuuuggagaaa

SEQ ID NO: 8060 - RNA, 19 nt, artificial
  Chemically synthesized
gcaggaucuuugccucuga

SEQ ID NO: 8061 - RNA, 19 nt, artificial
  Chemically synthesized
agaagaagggcaaggugca

SEQ ID NO: 8062 - RNA, 19 nt, artificial
  Chemically synthesized
gaggagugugacaaugaga

SEQ ID NO: 8063 - RNA, 19 nt, artificial
  Chemically synthesized
aagacaacaugaagcucca

SEQ ID NO: 8064 - RNA, 19 nt, artificial
  Chemically synthesized
agaucagccugcaagaauu

SEQ ID NO: 8065 - RNA, 19 nt, artificial
  Chemically synthesized
gaccauugcaggagaagau

SEQ ID NO: 8066 - RNA, 19 nt, artificial
  Chemically synthesized
uuaucuggaucaacagaga

SEQ ID NO: 8067 - RNA, 19 nt, artificial
  Chemically synthesized
agccgugugcaucauggaa

SEQ ID NO: 8068 - RNA, 19 nt, artificial
  Chemically synthesized
caucugcacugggcaagaa

SEQ ID NO: 8069 - RNA, 19 nt, artificial
  Chemically synthesized
guccaagggcucugagaua

SEQ ID NO: 8070 - RNA, 19 nt, artificial
  Chemically synthesized
ggugacuacuuguaucuga

SEQ ID NO: 8071 - RNA, 19 nt, artificial
  Chemically synthesized
caggcaccagaaaagaaag

SEQ ID NO: 8072 - RNA, 19 nt, artificial
  Chemically synthesized
agucauguuguaucuggaa

SEQ ID NO: 8073 - RNA, 19 nt, artificial
  Chemically synthesized
caccauugcucgcuaugag

SEQ ID NO: 8074 - RNA, 19 nt, artificial
  Chemically synthesized
uacaggcaccagaaaagaa

SEQ ID NO: 8075 - RNA, 19 nt, artificial
  Chemically synthesized
cacuggaccagaacaucca

SEQ ID NO: 8076 - RNA, 19 nt, artificial
  Chemically synthesized
gcaagguguuccagaaagu

SEQ ID NO: 8077 - RNA, 19 nt, artificial
  Chemically synthesized
gguguccaagacaacauga

SEQ ID NO: 8078 - RNA, 19 nt, artificial
  Chemically synthesized
cugcacugggcaagaauga

SEQ ID NO: 8079 - RNA, 19 nt, artificial
  Chemically synthesized
guuuaagaccauugcagga

SEQ ID NO: 8080 - RNA, 19 nt, artificial
  Chemically synthesized
guacaggcaccagaaaaga

SEQ ID NO: 8081 - RNA, 19 nt, artificial
  Chemically synthesized
ggucucacugacuucaaga

SEQ ID NO: 8082 - RNA, 19 nt, artificial
  Chemically synthesized
ugagaaguucggcuucaga

SEQ ID NO: 8083 - RNA, 19 nt, artificial
  Chemically synthesized
gagaagaaagacuccauca

SEQ ID NO: 8084 - RNA, 19 nt, artificial
  Chemically synthesized
aacucaaauuccucuucca

SEQ ID NO: 8085 - RNA, 19 nt, artificial
  Chemically synthesized
cuucaagaaugaagccgca

SEQ ID NO: 8086 - RNA, 19 nt, artificial
  Chemically synthesized
uguuguaucuggaauuggu

SEQ ID NO: 8087 - RNA, 19 nt, artificial
  Chemically synthesized
ccuggagcugcauauguac

SEQ ID NO: 8088 - RNA, 19 nt, artificial
  Chemically synthesized
caaauucuguaacaucaag

SEQ ID NO: 8089 - RNA, 19 nt, artificial
  Chemically synthesized
caucaagugcuacaucgau

SEQ ID NO: 8090 - RNA, 19 nt, artificial
  Chemically synthesized
ucacucaucuccucaucaa

SEQ ID NO: 8091 - RNA, 19 nt, artificial
  Chemically synthesized
gcaaggugcaggucuucuu

SEQ ID NO: 8092 - RNA, 19 nt, artificial
  Chemically synthesized
gugggugacucagcaguuu

SEQ ID NO: 8093 - RNA, 19 nt, artificial
  Chemically synthesized
gcugguaugcagucauguu

SEQ ID NO: 8094 - RNA, 19 nt, artificial
  Chemically synthesized
uaagaccauugcaggagaa

SEQ ID NO: 8095 - RNA, 19 nt, artificial
  Chemically synthesized
agaccauugcaggagaaga

SEQ ID NO: 8096 - RNA, 19 nt, artificial
  Chemically synthesized
gaucgaagguguccaagac

SEQ ID NO: 8097 - RNA, 19 nt, artificial
  Chemically synthesized
ggugacucagcaguuuaag

SEQ ID NO: 8098 - RNA, 19 nt, artificial
  Chemically synthesized
ccuccaaggucacucaucu

SEQ ID NO: 8099 - RNA, 19 nt, artificial
  Chemically synthesized
ugucgaggagugugacaau

SEQ ID NO: 8100 - RNA, 19 nt, artificial
  Chemically synthesized
aggcuguaugaguccuuca

SEQ ID NO: 8101 - RNA, 19 nt, artificial
  Chemically synthesized
cuuccauucugcagaguau

SEQ ID NO: 8102 - RNA, 19 nt, artificial
  Chemically synthesized
gaaagaguccuucuuugca

SEQ ID NO: 8103 - RNA, 19 nt, artificial
  Chemically synthesized
cuuuaucuggaucaacaga

SEQ ID NO: 8104 - RNA, 19 nt, artificial
  Chemically synthesized
gcacugggcaagaaugaca

SEQ ID NO: 8105 - RNA, 19 nt, artificial
  Chemically synthesized
acaucaagugcuacaucga

SEQ ID NO: 8106 - RNA, 19 nt, artificial
  Chemically synthesized
gagcgauucuuugcccuau

SEQ ID NO: 8107 - RNA, 19 nt, artificial
  Chemically synthesized
ucacugacuucaagaauga

SEQ ID NO: 8108 - RNA, 19 nt, artificial
  Chemically synthesized
caagggcucugagauacuu

SEQ ID NO: 8109 - RNA, 19 nt, artificial
  Chemically synthesized
aagagaauuucuagccuca

SEQ ID NO: 8110 - RNA, 19 nt, artificial
  Chemically synthesized
uguccaagacaacaugaag

SEQ ID NO: 8111 - RNA, 19 nt, artificial
  Chemically synthesized
gcgauucuuugcccuauuu

SEQ ID NO: 8112 - RNA, 19 nt, artificial
  Chemically synthesized
acaugaagcuccauaaggu

SEQ ID NO: 8113 - RNA, 19 nt, artificial
  Chemically synthesized
ugacaaugagaaagaguca

SEQ ID NO: 8114 - RNA, 19 nt, artificial
  Chemically synthesized
cuaccacuggaccagaaca

SEQ ID NO: 8115 - RNA, 19 nt, artificial
  Chemically synthesized
ccauggacaaacucaaauu

SEQ ID NO: 8116 - RNA, 19 nt, artificial
  Chemically synthesized
uuggucucacugacuucaa

SEQ ID NO: 8117 - RNA, 19 nt, artificial
  Chemically synthesized
auguacaggcaccagaaaa

SEQ ID NO: 8118 - RNA, 19 nt, artificial
  Chemically synthesized
gaccuggugacuacuugua

SEQ ID NO: 8119 - RNA, 19 nt, artificial
  Chemically synthesized
caacaugaagcuccauaag

SEQ ID NO: 8120 - RNA, 19 nt, artificial
  Chemically synthesized
cauccaguuccaccagcuu

SEQ ID NO: 8121 - RNA, 19 nt, artificial
  Chemically synthesized
ugugagccugcugacuaaa

SEQ ID NO: 8122 - RNA, 19 nt, artificial
  Chemically synthesized
acuuuguacuccaggcuca

SEQ ID NO: 8123 - RNA, 19 nt, artificial
  Chemically synthesized
acaaugagaaagagucaaa

SEQ ID NO: 8124 - RNA, 19 nt, artificial
  Chemically synthesized
ucggcuucagauuuuucca

SEQ ID NO: 8125 - RNA, 19 nt, artificial
  Chemically synthesized
cugacuggagcaagguguu

SEQ ID NO: 8126 - RNA, 19 nt, artificial
  Chemically synthesized
acuggagcaagguguucca

SEQ ID NO: 8127 - RNA, 19 nt, artificial
  Chemically synthesized
gagucauggagaaccugac

SEQ ID NO: 8128 - RNA, 19 nt, artificial
  Chemically synthesized
cagcucugcaugugaaaga

SEQ ID NO: 8129 - RNA, 19 nt, artificial
  Chemically synthesized
cuggugccuggaaucuugu

SEQ ID NO: 8130 - RNA, 19 nt, artificial
  Chemically synthesized
cuggagcugcauauguaca

SEQ ID NO: 8131 - RNA, 19 nt, artificial
  Chemically synthesized
aacuucgacugcagcuuca

SEQ ID NO: 8132 - RNA, 19 nt, artificial
  Chemically synthesized
cuucaaggcaucagaccca

SEQ ID NO: 8133 - RNA, 19 nt, artificial
  Chemically synthesized
cuggaucaacagagaccag

SEQ ID NO: 8134 - RNA, 19 nt, artificial
  Chemically synthesized
aagaguccuucuuugcaga

SEQ ID NO: 8135 - RNA, 19 nt, artificial
  Chemically synthesized
gcuuaugggcuacguggua

SEQ ID NO: 8136 - RNA, 19 nt, artificial
  Chemically synthesized
cacucaucuccucaucaag

SEQ ID NO: 8137 - RNA, 19 nt, artificial
  Chemically synthesized
aagguggacuuuaucugga

SEQ ID NO: 8138 - RNA, 19 nt, artificial
  Chemically synthesized
gagcagaaagacacuaucu

SEQ ID NO: 8139 - RNA, 19 nt, artificial
  Chemically synthesized
uggugccuggaaucuuguu

SEQ ID NO: 8140 - RNA, 19 nt, artificial
  Chemically synthesized
gagaucagccugcaagaau

SEQ ID NO: 8141 - RNA, 19 nt, artificial
  Chemically synthesized
cuauagaccuggugacuac

SEQ ID NO: 8142 - RNA, 19 nt, artificial
  Chemically synthesized
ucuaguugcgcuuuugcua

SEQ ID NO: 8143 - RNA, 19 nt, artificial
  Chemically synthesized
agaccuggugacuacuugu

SEQ ID NO: 8144 - RNA, 19 nt, artificial
  Chemically synthesized
cuacaucgaugggccuuau

SEQ ID NO: 8145 - RNA, 19 nt, artificial
  Chemically synthesized
acucagcaguuuaagacca

SEQ ID NO: 8146 - RNA, 19 nt, artificial
  Chemically synthesized
gacgccuaugaagcccuua

SEQ ID NO: 8147 - RNA, 19 nt, artificial
  Chemically synthesized
acuuuaucuggaucaacag

SEQ ID NO: 8148 - RNA, 19 nt, artificial
  Chemically synthesized
ucuggaucaacagagacca

SEQ ID NO: 8149 - RNA, 19 nt, artificial
  Chemically synthesized
aucgaagguguccaagaca

SEQ ID NO: 8150 - RNA, 19 nt, artificial
  Chemically synthesized
auggagaaccugaccauca

SEQ ID NO: 8151 - RNA, 19 nt, artificial
  Chemically synthesized
cuaugaagcccuuaguccu

SEQ ID NO: 8152 - RNA, 19 nt, artificial
  Chemically synthesized
accagaaaagaaagcauac

SEQ ID NO: 8153 - RNA, 19 nt, artificial
  Chemically synthesized
gcccuuaguccuucuaguu

SEQ ID NO: 8154 - RNA, 19 nt, artificial
  Chemically synthesized
ccuuugcuuccauucugca

SEQ ID NO: 8155 - RNA, 19 nt, artificial
  Chemically synthesized
ucgaggagugugacaauga

SEQ ID NO: 8156 - RNA, 19 nt, artificial
  Chemically synthesized
caacaaggagaagaaagac

SEQ ID NO: 8157 - RNA, 19 nt, artificial
  Chemically synthesized
ggugcaggucuucuucugu

SEQ ID NO: 8158 - RNA, 19 nt, artificial
  Chemically synthesized
uguaacaucaagugcuaca

SEQ ID NO: 8159 - RNA, 19 nt, artificial
  Chemically synthesized
aauuccucuuccaggugua

SEQ ID NO: 8160 - RNA, 19 nt, artificial
  Chemically synthesized
uccugagcagaaagacacu

SEQ ID NO: 8161 - RNA, 19 nt, artificial
  Chemically synthesized
gugcaucauggaagucaac

SEQ ID NO: 8162 - RNA, 19 nt, artificial
  Chemically synthesized
gcagaaagacacuaucugg

SEQ ID NO: 8163 - RNA, 19 nt, artificial
  Chemically synthesized
aaagcagcucugcauguga

SEQ ID NO: 8164 - RNA, 19 nt, artificial
  Chemically synthesized
gauacuuuuggagaaacac

SEQ ID NO: 8165 - RNA, 19 nt, artificial
  Chemically synthesized
ugguaugcagucauguugu

SEQ ID NO: 8166 - RNA, 19 nt, artificial
  Chemically synthesized
aagagucaaaggucgucca

SEQ ID NO: 8167 - RNA, 19 nt, artificial
  Chemically synthesized
caguggacaaacaggcugu

SEQ ID NO: 8168 - RNA, 19 nt, artificial
  Chemically synthesized
caugugaaagaguccuucu

SEQ ID NO: 8169 - RNA, 19 nt, artificial
  Chemically synthesized
auccgaggucucaauccau

SEQ ID NO: 8170 - RNA, 19 nt, artificial
  Chemically synthesized
gauuuuuccaagagaauuu

SEQ ID NO: 8171 - RNA, 19 nt, artificial
  Chemically synthesized
gagcugcauauguacauga

SEQ ID NO: 8172 - RNA, 19 nt, artificial
  Chemically synthesized
agucaaaggucguccaagg

SEQ ID NO: 8173 - RNA, 19 nt, artificial
  Chemically synthesized
uauccgaggucucaaucca

SEQ ID NO: 8174 - RNA, 19 nt, artificial
  Chemically synthesized
uuaagaccauugcaggaga

SEQ ID NO: 8175 - RNA, 19 nt, artificial
  Chemically synthesized
guucuaagaggcugucgag

SEQ ID NO: 8176 - RNA, 19 nt, artificial
  Chemically synthesized
aagggcucugagauacuuu

SEQ ID NO: 8177 - RNA, 19 nt, artificial
  Chemically synthesized
gacaacaugaagcuccaua

SEQ ID NO: 8178 - RNA, 19 nt, artificial
  Chemically synthesized
auuugacuccgauagaagu

SEQ ID NO: 8179 - RNA, 19 nt, artificial
  Chemically synthesized
cuuuguacuccaggcucag

SEQ ID NO: 8180 - RNA, 19 nt, artificial
  Chemically synthesized
ugugaacuuuguacuccag

SEQ ID NO: 8181 - RNA, 19 nt, artificial
  Chemically synthesized
accauugcucgcuaugagu

SEQ ID NO: 8182 - RNA, 19 nt, artificial
  Chemically synthesized
uugcccuauuugacuccga

SEQ ID NO: 8183 - RNA, 19 nt, artificial
  Chemically synthesized
gaagaaagacuccaucacg

SEQ ID NO: 8184 - RNA, 19 nt, artificial
  Chemically synthesized
uguacaggcaccagaaaag

SEQ ID NO: 8185 - RNA, 19 nt, artificial
  Chemically synthesized
acuucgacugcagcuucau

SEQ ID NO: 8186 - RNA, 19 nt, artificial
  Chemically synthesized
aucugcacugggcaagaau

SEQ ID NO: 8187 - RNA, 19 nt, artificial
  Chemically synthesized
acaucugcacugggcaaga

SEQ ID NO: 8188 - RNA, 19 nt, artificial
  Chemically synthesized
gaucuuugccucugagcau

SEQ ID NO: 8189 - RNA, 19 nt, artificial
  Chemically synthesized
gguguaugacaucgaugug

SEQ ID NO: 8190 - RNA, 19 nt, artificial
  Chemically synthesized
uuuuccaagagaauuucua

SEQ ID NO: 8191 - RNA, 19 nt, artificial
  Chemically synthesized
aaauucuguaacaucaagu

SEQ ID NO: 8192 - RNA, 19 nt, artificial
  Chemically synthesized
uggagcaagguguuccaga

SEQ ID NO: 8193 - RNA, 19 nt, artificial
  Chemically synthesized
aauucaaagcagcucugca

SEQ ID NO: 8194 - RNA, 19 nt, artificial
  Chemically synthesized
caagguguuccagaaagug

SEQ ID NO: 8195 - RNA, 19 nt, artificial
  Chemically synthesized
gacuaaacuggagauggac

SEQ ID NO: 8196 - RNA, 19 nt, artificial
  Chemically synthesized
gagccugcugacuaaacug

SEQ ID NO: 8197 - RNA, 19 nt, artificial
  Chemically synthesized
cacuauagaccuggugacu

SEQ ID NO: 8198 - RNA, 19 nt, artificial
  Chemically synthesized
augggcccaacuucuggaa

SEQ ID NO: 8199 - RNA, 19 nt, artificial
  Chemically synthesized
uccgaggucucaauccauu

SEQ ID NO: 8200 - RNA, 19 nt, artificial
  Chemically synthesized
ggaauugguggguucuugg

SEQ ID NO: 8201 - RNA, 19 nt, artificial
  Chemically synthesized
cuuggucucacugacuuca

SEQ ID NO: 8202 - RNA, 19 nt, artificial
  Chemically synthesized
ugcuggugccuggaaucuu

SEQ ID NO: 8203 - RNA, 19 nt, artificial
  Chemically synthesized
ugugagaaguucggcuuca

SEQ ID NO: 8204 - RNA, 19 nt, artificial
  Chemically synthesized
cacugugaacuuuguacuc

SEQ ID NO: 8205 - RNA, 19 nt, artificial
  Chemically synthesized
gaauugguggguucuuggu

SEQ ID NO: 8206 - RNA, 19 nt, artificial
  Chemically synthesized
caaggugcaggucuucuuc

SEQ ID NO: 8207 - RNA, 19 nt, artificial
  Chemically synthesized
cugggcaagaaugacauga

SEQ ID NO: 8208 - RNA, 19 nt, artificial
  Chemically synthesized
auccaguuccaccagcuua

SEQ ID NO: 8209 - RNA, 19 nt, artificial
  Chemically synthesized
caugaagcuccauaaggug

SEQ ID NO: 8210 - RNA, 19 nt, artificial
  Chemically synthesized
cagguguaugacaucgaug

SEQ ID NO: 8211 - RNA, 19 nt, artificial
  Chemically synthesized
gagucaaaggucguccaag

SEQ ID NO: 8212 - RNA, 19 nt, artificial
  Chemically synthesized
augcagucauguuguaucu

SEQ ID NO: 8213 - RNA, 19 nt, artificial
  Chemically synthesized
uuugagguguucuauugga

SEQ ID NO: 8214 - RNA, 19 nt, artificial
  Chemically synthesized
gacaaacaggcuguaugag

SEQ ID NO: 8215 - RNA, 19 nt, artificial
  Chemically synthesized
aacagagaccagcggucuu

SEQ ID NO: 8216 - RNA, 19 nt, artificial
  Chemically synthesized
ucugagauacuuuuggaga

SEQ ID NO: 8217 - RNA, 19 nt, artificial
  Chemically synthesized
gucacucaucuccucauca

SEQ ID NO: 8218 - RNA, 19 nt, artificial
  Chemically synthesized
aaguccuaccacuggacca

SEQ ID NO: 8219 - RNA, 19 nt, artificial
  Chemically synthesized
gaaaagaaagcauacuugc

SEQ ID NO: 8220 - RNA, 19 nt, artificial
  Chemically synthesized
caaggagaagaaagacucc

SEQ ID NO: 8221 - RNA, 19 nt, artificial
  Chemically synthesized
gacucagcaguuuaagacc

SEQ ID NO: 8222 - RNA, 19 nt, artificial
  Chemically synthesized
caucuuucaugggcccaac

SEQ ID NO: 8223 - RNA, 19 nt, artificial
  Chemically synthesized
agugguuugugagccugcu

SEQ ID NO: 8224 - RNA, 19 nt, artificial
  Chemically synthesized
cucuuccagguguaugaca

SEQ ID NO: 8225 - RNA, 19 nt, artificial
  Chemically synthesized
ucuuucgagugguuuguga

SEQ ID NO: 8226 - RNA, 19 nt, artificial
  Chemically synthesized
ucuagccucaccucuccaa

SEQ ID NO: 8227 - RNA, 19 nt, artificial
  Chemically synthesized
gaacauccaguuccaccag

SEQ ID NO: 8228 - RNA, 19 nt, artificial
  Chemically synthesized
acuggaccagaacauccag

SEQ ID NO: 8229 - RNA, 19 nt, artificial
  Chemically synthesized
gagaaagagucaaaggucg

SEQ ID NO: 8230 - RNA, 19 nt, artificial
  Chemically synthesized
cauggaagucaaccuccuc

SEQ ID NO: 8231 - RNA, 19 nt, artificial
  Chemically synthesized
agauuuuuccaagagaauu

SEQ ID NO: 8232 - RNA, 19 nt, artificial
  Chemically synthesized
agcaguuuaagaccauugc

SEQ ID NO: 8233 - RNA, 19 nt, artificial
  Chemically synthesized
aauucuguaacaucaagug

SEQ ID NO: 8234 - RNA, 19 nt, artificial
  Chemically synthesized
aucgaugggccuuauggga

SEQ ID NO: 8235 - RNA, 19 nt, artificial
  Chemically synthesized
auuggacucaccuguccua

SEQ ID NO: 8236 - RNA, 19 nt, artificial
  Chemically synthesized
acuauagaccuggugacua

SEQ ID NO: 8237 - RNA, 19 nt, artificial
  Chemically synthesized
aguuuaagaccauugcagg

SEQ ID NO: 8238 - RNA, 19 nt, artificial
  Chemically synthesized
acuccuggaucgaaggugu

SEQ ID NO: 8239 - RNA, 19 nt, artificial
  Chemically synthesized
cauugugagaaguucggcu

SEQ ID NO: 8240 - RNA, 19 nt, artificial
  Chemically synthesized
acaaacaggcuguaugagu

SEQ ID NO: 8241 - RNA, 19 nt, artificial
  Chemically synthesized
cuuugcagagcgauucuuu

SEQ ID NO: 8242 - RNA, 19 nt, artificial
  Chemically synthesized
agugcuccugagcagaaag

SEQ ID NO: 8243 - RNA, 19 nt, artificial
  Chemically synthesized
guuguaucuggaauuggug

SEQ ID NO: 8244 - RNA, 19 nt, artificial
  Chemically synthesized
ggagcugcauauguacaug

SEQ ID NO: 8245 - RNA, 19 nt, artificial
  Chemically synthesized
ugagaagaagggcaaggug

SEQ ID NO: 8246 - RNA, 19 nt, artificial
  Chemically synthesized
guucuuggucucacugacu

SEQ ID NO: 8247 - RNA, 19 nt, artificial
  Chemically synthesized
aggcugguaugcagucaug

SEQ ID NO: 8248 - RNA, 19 nt, artificial
  Chemically synthesized
ucucacugacuucaagaau

SEQ ID NO: 8249 - RNA, 19 nt, artificial
  Chemically synthesized
cauaagguggacuuuaucu

SEQ ID NO: 8250 - RNA, 19 nt, artificial
  Chemically synthesized
aaggagaagaaagacucca

SEQ ID NO: 8251 - RNA, 19 nt, artificial
  Chemically synthesized
agccugcaagaauucaaag

SEQ ID NO: 8252 - RNA, 19 nt, artificial
  Chemically synthesized
uuucaugggcccaacuucu

SEQ ID NO: 8253 - RNA, 19 nt, artificial
  Chemically synthesized
agcuuaugggcuacguggu

SEQ ID NO: 8254 - RNA, 19 nt, artificial
  Chemically synthesized
ugguggguucuuggucuca

SEQ ID NO: 8255 - RNA, 19 nt, artificial
  Chemically synthesized
uucugcagaguaucaugua

SEQ ID NO: 8256 - RNA, 19 nt, artificial
  Chemically synthesized
aagaaagacuccaucacgg

SEQ ID NO: 8257 - RNA, 19 nt, artificial
  Chemically synthesized
acuuguaucugaacauccc

SEQ ID NO: 8258 - RNA, 19 nt, artificial
  Chemically synthesized
cauggagaaccugaccauc

SEQ ID NO: 8259 - RNA, 19 nt, artificial
  Chemically synthesized
gcucugcaugugaaagagu

SEQ ID NO: 8260 - RNA, 19 nt, artificial
  Chemically synthesized
cagugccucaacuucgacu

SEQ ID NO: 8261 - RNA, 19 nt, artificial
  Chemically synthesized
cauucugcagaguaucaug

SEQ ID NO: 8262 - RNA, 19 nt, artificial
  Chemically synthesized
cuguaacaucaagugcuac

SEQ ID NO: 8263 - RNA, 19 nt, artificial
  Chemically synthesized
cuuucaugggcccaacuuc

SEQ ID NO: 8264 - RNA, 19 nt, artificial
  Chemically synthesized
uuuccaagagaauuucuag

SEQ ID NO: 8265 - RNA, 19 nt, artificial
  Chemically synthesized
uuuucacuauagaccuggu

SEQ ID NO: 8266 - RNA, 19 nt, artificial
  Chemically synthesized
ugagguguucuauuggacu

SEQ ID NO: 8267 - RNA, 19 nt, artificial
  Chemically synthesized
cuuccagguguaugacauc

SEQ ID NO: 8268 - RNA, 19 nt, artificial
  Chemically synthesized
aucuuguuuuuccuggaga

SEQ ID NO: 8269 - RNA, 19 nt, artificial
  Chemically synthesized
cauguucaucugcuccagu

SEQ ID NO: 8270 - RNA, 19 nt, artificial
  Chemically synthesized
auucaaagcagcucugcau

SEQ ID NO: 8271 - RNA, 19 nt, artificial
  Chemically synthesized
aaagaguccuucuuugcag

SEQ ID NO: 8272 - RNA, 19 nt, artificial
  Chemically synthesized
uucuguaacaucaagugcu

SEQ ID NO: 8273 - RNA, 19 nt, artificial
  Chemically synthesized
ggucacucaucuccucauc

SEQ ID NO: 8274 - RNA, 19 nt, artificial
  Chemically synthesized
ugacucagcaguuuaagac

SEQ ID NO: 8275 - RNA, 19 nt, artificial
  Chemically synthesized
uucacuauagaccugguga

SEQ ID NO: 8276 - RNA, 19 nt, artificial
  Chemically synthesized
augagaaagagucaaaggu

SEQ ID NO: 8277 - RNA, 19 nt, artificial
  Chemically synthesized
cuccugagcagaaagacac

SEQ ID NO: 8278 - RNA, 19 nt, artificial
  Chemically synthesized
uggaauugguggguucuug

SEQ ID NO: 8279 - RNA, 19 nt, artificial
  Chemically synthesized
ucuaagaggcugucgagga

SEQ ID NO: 8280 - RNA, 19 nt, artificial
  Chemically synthesized
uucgucugugccggcuuau

SEQ ID NO: 8281 - RNA, 19 nt, artificial
  Chemically synthesized
agaaagagucaaaggucgu

SEQ ID NO: 8282 - RNA, 19 nt, artificial
  Chemically synthesized
cagagcgauucuuugcccu

SEQ ID NO: 8283 - RNA, 19 nt, artificial
  Chemically synthesized
cugcuccuccucauguuca

SEQ ID NO: 8284 - RNA, 19 nt, artificial
  Chemically synthesized
guuugugagccugcugacu

SEQ ID NO: 8285 - RNA, 19 nt, artificial
  Chemically synthesized
uuuuuuucacuauagaccu

SEQ ID NO: 8286 - RNA, 19 nt, artificial
  Chemically synthesized
aucauguacaggcaccaga

SEQ ID NO: 8287 - RNA, 19 nt, artificial
  Chemically synthesized
cuuccuggagcugcauaug

SEQ ID NO: 8288 - RNA, 19 nt, artificial
  Chemically synthesized
gaucagccugcaagaauuc

SEQ ID NO: 8289 - RNA, 19 nt, artificial
  Chemically synthesized
uuugugagccugcugacua

SEQ ID NO: 8290 - RNA, 19 nt, artificial
  Chemically synthesized
auucuuugcccuauuugac

SEQ ID NO: 8291 - RNA, 19 nt, artificial
  Chemically synthesized
acuuugagguguucuauug

SEQ ID NO: 8292 - RNA, 19 nt, artificial
  Chemically synthesized
gagaauuucuagccucacc

SEQ ID NO: 8293 - RNA, 19 nt, artificial
  Chemically synthesized
augacaucugcacugggca

SEQ ID NO: 8294 - RNA, 19 nt, artificial
  Chemically synthesized
cucaacuucgacugcagcu

SEQ ID NO: 8295 - RNA, 19 nt, artificial
  Chemically synthesized
uauuugacuccgauagaag

SEQ ID NO: 8296 - RNA, 19 nt, artificial
  Chemically synthesized
cuucgacugcagcuucauc

SEQ ID NO: 8297 - RNA, 19 nt, artificial
  Chemically synthesized
caguuccaccagcuuaugg

SEQ ID NO: 8298 - RNA, 19 nt, artificial
  Chemically synthesized
uaugaagcccuuaguccuu

SEQ ID NO: 8299 - RNA, 19 nt, artificial
  Chemically synthesized
ucugcacugggcaagaaug

SEQ ID NO: 8300 - RNA, 19 nt, artificial
  Chemically synthesized
gugagccugcugacuaaac

SEQ ID NO: 8301 - RNA, 19 nt, artificial
  Chemically synthesized
guccaagacaacaugaagc

SEQ ID NO: 8302 - RNA, 19 nt, artificial
  Chemically synthesized
gcucacacugugaacuuug

SEQ ID NO: 8303 - RNA, 19 nt, artificial
  Chemically synthesized
cauguuguaucuggaauug

SEQ ID NO: 8304 - RNA, 19 nt, artificial
  Chemically synthesized
gagugugacaaugagaaag

SEQ ID NO: 8305 - RNA, 19 nt, artificial
  Chemically synthesized
acucaaauuccucuuccag

SEQ ID NO: 8306 - RNA, 19 nt, artificial
  Chemically synthesized
cauugcucgcuaugagugg

SEQ ID NO: 8307 - RNA, 19 nt, artificial
  Chemically synthesized
uccauucugcagaguauca

SEQ ID NO: 8308 - RNA, 19 nt, artificial
  Chemically synthesized
cuucaccaucagcagugcu

SEQ ID NO: 8309 - RNA, 19 nt, artificial
  Chemically synthesized
uauguacaugacaucugca

SEQ ID NO: 8310 - RNA, 19 nt, artificial
  Chemically synthesized
aaggugcaggucuucuucu

SEQ ID NO: 8311 - RNA, 19 nt, artificial
  Chemically synthesized
acugggcaagaaugacaug

SEQ ID NO: 8312 - RNA, 19 nt, artificial
  Chemically synthesized
ugcugagaagaagggcaag

SEQ ID NO: 8313 - RNA, 19 nt, artificial
  Chemically synthesized
uucuuugcccuauuugacu

SEQ ID NO: 8314 - RNA, 19 nt, artificial
  Chemically synthesized
gucauggagaaccugacca

SEQ ID NO: 8315 - RNA, 19 nt, artificial
  Chemically synthesized
ggcaagaaugacaugaagg

SEQ ID NO: 8316 - RNA, 19 nt, artificial
  Chemically synthesized
acugacccugcucauccau

SEQ ID NO: 8317 - RNA, 19 nt, artificial
  Chemically synthesized
aaggucacucaucuccuca

SEQ ID NO: 8318 - RNA, 19 nt, artificial
  Chemically synthesized
ugugacaaugagaaagagu

SEQ ID NO: 8319 - RNA, 19 nt, artificial
  Chemically synthesized
cugcaugugaaagaguccu

SEQ ID NO: 8320 - RNA, 19 nt, artificial
  Chemically synthesized
uguucuauuggacucaccu

SEQ ID NO: 8321 - RNA, 19 nt, artificial
  Chemically synthesized
ugcuccugagcagaaagac

SEQ ID NO: 8322 - RNA, 19 nt, artificial
  Chemically synthesized
caacuucgacugcagcuuc

SEQ ID NO: 8323 - RNA, 19 nt, artificial
  Chemically synthesized
cauugcaggagaagauggg

SEQ ID NO: 8324 - RNA, 19 nt, artificial
  Chemically synthesized
agaaagacuccaucacggg

SEQ ID NO: 8325 - RNA, 19 nt, artificial
  Chemically synthesized
ugcacugggcaagaaugac

SEQ ID NO: 8326 - RNA, 19 nt, artificial
  Chemically synthesized
aggucucaauccauugcgc

SEQ ID NO: 8327 - RNA, 19 nt, artificial
  Chemically synthesized
cuggaccagaacauccagu

SEQ ID NO: 8328 - RNA, 19 nt, artificial
  Chemically synthesized
ugagaaagagucaaagguc

SEQ ID NO: 8329 - RNA, 19 nt, artificial
  Chemically synthesized
agagaauuucuagccucac

SEQ ID NO: 8330 - RNA, 19 nt, artificial
  Chemically synthesized
cuccaaggucacucaucuc

SEQ ID NO: 8331 - RNA, 19 nt, artificial
  Chemically synthesized
cuuucgagugguuugugag

SEQ ID NO: 8332 - RNA, 19 nt, artificial
  Chemically synthesized
auugguggguucuuggucu

SEQ ID NO: 8333 - RNA, 19 nt, artificial
  Chemically synthesized
auuccucuuccagguguau

SEQ ID NO: 8334 - RNA, 19 nt, artificial
  Chemically synthesized
ccucuuccagguguaugac

SEQ ID NO: 8335 - RNA, 19 nt, artificial
  Chemically synthesized
ugaacuuuguacuccaggc

SEQ ID NO: 8336 - RNA, 19 nt, artificial
  Chemically synthesized
uuccuggagcugcauaugu

SEQ ID NO: 8337 - RNA, 19 nt, artificial
  Chemically synthesized
cauggacaaacucaaauuc

SEQ ID NO: 8338 - RNA, 19 nt, artificial
  Chemically synthesized
ucaaggcaucagacccacu

SEQ ID NO: 8339 - RNA, 19 nt, artificial
  Chemically synthesized
uucuaguugcgcuuuugcu

SEQ ID NO: 8340 - RNA, 19 nt, artificial
  Chemically synthesized
uguacaugacaucugcacu

SEQ ID NO: 8341 - RNA, 19 nt, artificial
  Chemically synthesized
aguuccaccagcuuauggg

SEQ ID NO: 8342 - RNA, 19 nt, artificial
  Chemically synthesized
aacaaggagaagaaagacu

SEQ ID NO: 8343 - RNA, 19 nt, artificial
  Chemically synthesized
gaguaucauguacaggcac

SEQ ID NO: 8344 - RNA, 19 nt, artificial
  Chemically synthesized
ucuuucaugggcccaacuu

SEQ ID NO: 8345 - RNA, 19 nt, artificial
  Chemically synthesized
ccuuaguccuucuaguugc

SEQ ID NO: 8346 - RNA, 19 nt, artificial
  Chemically synthesized
uguuuuuccuggagaaggc

SEQ ID NO: 8347 - RNA, 19 nt, artificial
  Chemically synthesized
uaagguggacuuuaucugg

SEQ ID NO: 8348 - RNA, 19 nt, artificial
  Chemically synthesized
cuuguuuuuccuggagaag

SEQ ID NO: 8349 - RNA, 19 nt, artificial
  Chemically synthesized
aggcaccagaaaagaaagc

SEQ ID NO: 8350 - RNA, 19 nt, artificial
  Chemically synthesized
aagcccuuaguccuucuag

SEQ ID NO: 8351 - RNA, 19 nt, artificial
  Chemically synthesized
uucuagccucaccucucca

SEQ ID NO: 8352 - RNA, 19 nt, artificial
  Chemically synthesized
cucaaauuccucuuccagg

SEQ ID NO: 8353 - RNA, 19 nt, artificial
  Chemically synthesized
caagugcuacaucgauggg

SEQ ID NO: 8354 - RNA, 19 nt, artificial
  Chemically synthesized
aaucuuguuuuuccuggag

SEQ ID NO: 8355 - RNA, 19 nt, artificial
  Chemically synthesized
ccauugcaggagaagaugg

SEQ ID NO: 8356 - RNA, 19 nt, artificial
  Chemically synthesized
uauagaccuggugacuacu

SEQ ID NO: 8357 - RNA, 19 nt, artificial
  Chemically synthesized
cuacuuguaucugaacauc

SEQ ID NO: 8358 - RNA, 19 nt, artificial
  Chemically synthesized
cuuugagguguucuauugg

SEQ ID NO: 8359 - RNA, 19 nt, artificial
  Chemically synthesized
uaucuggaucaacagagac

SEQ ID NO: 8360 - RNA, 19 nt, artificial
  Chemically synthesized
gaauuucuagccucaccuc

SEQ ID NO: 8361 - RNA, 19 nt, artificial
  Chemically synthesized
ucugcuccaguuccugcau

SEQ ID NO: 8362 - RNA, 19 nt, artificial
  Chemically synthesized
guucggcuucagauuuuuc

SEQ ID NO: 8363 - RNA, 19 nt, artificial
  Chemically synthesized
uuugcuuccauucugcaga

SEQ ID NO: 8364 - RNA, 19 nt, artificial
  Chemically synthesized
aucuuucaugggcccaacu

SEQ ID NO: 8365 - RNA, 19 nt, artificial
  Chemically synthesized
aucugcuccaguuccugca

SEQ ID NO: 8366 - RNA, 19 nt, artificial
  Chemically synthesized
ucuggaauugguggguucu

SEQ ID NO: 8367 - RNA, 19 nt, artificial
  Chemically synthesized
cugacuaaacuggagaugg

SEQ ID NO: 8368 - RNA, 19 nt, artificial
  Chemically synthesized
cugacuucaagaaugaagc

SEQ ID NO: 8369 - RNA, 19 nt, artificial
  Chemically synthesized
aaugagaaagagucaaagg

SEQ ID NO: 8370 - RNA, 19 nt, artificial
  Chemically synthesized
aucagccugcaagaauuca

SEQ ID NO: 8371 - RNA, 19 nt, artificial
  Chemically synthesized
uugcuuccauucugcagag

SEQ ID NO: 8372 - RNA, 19 nt, artificial
  Chemically synthesized
aagaauucaaagcagcucu

SEQ ID NO: 8373 - RNA, 19 nt, artificial
  Chemically synthesized
uagaccuggugacuacuug

SEQ ID NO: 8374 - RNA, 19 nt, artificial
  Chemically synthesized
uuaugggcuacgugguagu

SEQ ID NO: 8375 - RNA, 19 nt, artificial
  Chemically synthesized
ugcaggucuucuucugugg

SEQ ID NO: 8376 - RNA, 19 nt, artificial
  Chemically synthesized
uugagguguucuauuggac

SEQ ID NO: 8377 - RNA, 19 nt, artificial
  Chemically synthesized
ucugcagaguaucauguac

SEQ ID NO: 8378 - RNA, 19 nt, artificial
  Chemically synthesized
cuuaguccuucuaguugcg

SEQ ID NO: 8379 - RNA, 19 nt, artificial
  Chemically synthesized
ucucaauccauugcgccca

SEQ ID NO: 8380 - RNA, 19 nt, artificial
  Chemically synthesized
uuugcagagcgauucuuug

SEQ ID NO: 8381 - RNA, 19 nt, artificial
  Chemically synthesized
uaguugcgcuuuugcuaug

SEQ ID NO: 8382 - RNA, 19 nt, artificial
  Chemically synthesized
cuucuaguugcgcuuuugc

SEQ ID NO: 8383 - RNA, 19 nt, artificial
  Chemically synthesized
uggguucuuggucucacug

SEQ ID NO: 8384 - RNA, 19 nt, artificial
  Chemically synthesized
aagguguuccagaaagugg

SEQ ID NO: 8385 - RNA, 19 nt, artificial
  Chemically synthesized
agucauggagaaccugacc

SEQ ID NO: 8386 - RNA, 19 nt, artificial
  Chemically synthesized
ucaagugcuacaucgaugg

SEQ ID NO: 8387 - RNA, 19 nt, artificial
  Chemically synthesized
caucauggaagucaaccuc

SEQ ID NO: 8388 - RNA, 19 nt, artificial
  Chemically synthesized
aacaggcuguaugaguccu

SEQ ID NO: 8389 - RNA, 19 nt, artificial
  Chemically synthesized
cucaucuccucaucaagcg

SEQ ID NO: 8390 - RNA, 19 nt, artificial
  Chemically synthesized
gugaacuuuguacuccagg

SEQ ID NO: 8391 - RNA, 19 nt, artificial
  Chemically synthesized
aaaagaaagcauacuugcc

SEQ ID NO: 8392 - RNA, 19 nt, artificial
  Chemically synthesized
auauguacaugacaucugc

SEQ ID NO: 8393 - RNA, 19 nt, artificial
  Chemically synthesized
cuuugcuuccauucugcag

SEQ ID NO: 8394 - RNA, 19 nt, artificial
  Chemically synthesized
ugcaagaauucaaagcagc

SEQ ID NO: 8395 - RNA, 19 nt, artificial
  Chemically synthesized
gaggucucaauccauugcg

SEQ ID NO: 8396 - RNA, 19 nt, artificial
  Chemically synthesized
aagaccauugcaggagaag

SEQ ID NO: 8397 - RNA, 19 nt, artificial
  Chemically synthesized
uaguccuucuaguugcgcu

SEQ ID NO: 8398 - RNA, 19 nt, artificial
  Chemically synthesized
acugacuucaagaaugaag

SEQ ID NO: 8399 - RNA, 19 nt, artificial
  Chemically synthesized
cuuuuuuucacuauagacc

SEQ ID NO: 8400 - RNA, 19 nt, artificial
  Chemically synthesized
guguucuauuggacucacc

SEQ ID NO: 8401 - RNA, 19 nt, artificial
  Chemically synthesized
auagaccuggugacuacuu

SEQ ID NO: 8402 - RNA, 19 nt, artificial
  Chemically synthesized
uaacaucaagugcuacauc

SEQ ID NO: 8403 - RNA, 19 nt, artificial
  Chemically synthesized
aguccuucuuugcagagcg

SEQ ID NO: 8404 - RNA, 19 nt, artificial
  Chemically synthesized
ucuuggucucacugacuuc

SEQ ID NO: 8405 - RNA, 19 nt, artificial
  Chemically synthesized
uucuuugcagagcgauucu

SEQ ID NO: 8406 - RNA, 19 nt, artificial
  Chemically synthesized
cagaacauccaguuccacc

SEQ ID NO: 8407 - RNA, 19 nt, artificial
  Chemically synthesized
cagaguaucauguacaggc

SEQ ID NO: 8408 - RNA, 19 nt, artificial
  Chemically synthesized
aacaucaagugcuacaucg

SEQ ID NO: 8409 - RNA, 19 nt, artificial
  Chemically synthesized
accacuggaccagaacauc

SEQ ID NO: 8410 - RNA, 19 nt, artificial
  Chemically synthesized
agugccucaacuucgacug

SEQ ID NO: 8411 - RNA, 19 nt, artificial
  Chemically synthesized
uggaaucuuguuuuuccug

SEQ ID NO: 8412 - RNA, 19 nt, artificial
  Chemically synthesized
gaaagagucaaaggucguc

SEQ ID NO: 8413 - RNA, 19 nt, artificial
  Chemically synthesized
cuuuccaguucugggagcu

SEQ ID NO: 8414 - RNA, 19 nt, artificial
  Chemically synthesized
caagaaugacaugaaggcc

SEQ ID NO: 8415 - RNA, 19 nt, artificial
  Chemically synthesized
ugaaagaguccuucuuugc

SEQ ID NO: 8416 - RNA, 19 nt, artificial
  Chemically synthesized
accauugcaggagaagaug

SEQ ID NO: 8417 - RNA, 19 nt, artificial
  Chemically synthesized
ucaaagcagcucugcaugu

SEQ ID NO: 8418 - RNA, 19 nt, artificial
  Chemically synthesized
acaugacaucugcacuggg

SEQ ID NO: 8419 - RNA, 19 nt, artificial
  Chemically synthesized
uggugacuacuuguaucug

SEQ ID NO: 8420 - RNA, 19 nt, artificial
  Chemically synthesized
ccauugugagaaguucggc

SEQ ID NO: 8421 - RNA, 19 nt, artificial
  Chemically synthesized
guucuauuggacucaccug

SEQ ID NO: 8422 - RNA, 19 nt, artificial
  Chemically synthesized
ucugcaugugaaagagucc

SEQ ID NO: 8423 - RNA, 19 nt, artificial
  Chemically synthesized
aucaagugcuacaucgaug

SEQ ID NO: 8424 - RNA, 19 nt, artificial
  Chemically synthesized
cgugugcaucauggaaguc

SEQ ID NO: 8425 - RNA, 19 nt, artificial
  Chemically synthesized
uuuuuucacuauagaccug

SEQ ID NO: 8426 - RNA, 19 nt, artificial
  Chemically synthesized
uuuuuccaagagaauuucu

SEQ ID NO: 8427 - RNA, 19 nt, artificial
  Chemically synthesized
acaucgaugggccuuaugg

SEQ ID NO: 8428 - RNA, 19 nt, artificial
  Chemically synthesized
ccuaugaagcccuuagucc

SEQ ID NO: 8429 - RNA, 19 nt, artificial
  Chemically synthesized
agaguccuucuuugcagag

SEQ ID NO: 8430 - RNA, 19 nt, artificial
  Chemically synthesized
gcuccuccucauguucauc

SEQ ID NO: 8431 - RNA, 19 nt, artificial
  Chemically synthesized
uggaucgaagguguccaag

SEQ ID NO: 8432 - RNA, 19 nt, artificial
  Chemically synthesized
uauuggacucaccuguccu

SEQ ID NO: 8433 - RNA, 19 nt, artificial
  Chemically synthesized
uccuucuuugcagagcgau

SEQ ID NO: 8434 - RNA, 19 nt, artificial
  Chemically synthesized
uccaagggcucugagauac

SEQ ID NO: 8435 - RNA, 19 nt, artificial
  Chemically synthesized
aacaugaagcuccauaagg

SEQ ID NO: 8436 - RNA, 19 nt, artificial
  Chemically synthesized
uaucuggaauugguggguu

SEQ ID NO: 8437 - RNA, 19 nt, artificial
  Chemically synthesized
acucaucuccucaucaagc

SEQ ID NO: 8438 - RNA, 19 nt, artificial
  Chemically synthesized
aauuucuagccucaccucu

SEQ ID NO: 8439 - RNA, 19 nt, artificial
  Chemically synthesized
aaacaggcuguaugagucc

SEQ ID NO: 8440 - RNA, 19 nt, artificial
  Chemically synthesized
aucuggaauugguggguuc

SEQ ID NO: 8441 - RNA, 19 nt, artificial
  Chemically synthesized
uaugcagucauguuguauc

SEQ ID NO: 8442 - RNA, 19 nt, artificial
  Chemically synthesized
cauauguacaugacaucug

SEQ ID NO: 8443 - RNA, 19 nt, artificial
  Chemically synthesized
uucaucugcuccaguuccu

SEQ ID NO: 8444 - RNA, 19 nt, artificial
  Chemically synthesized
aucaacagagaccagcggu

SEQ ID NO: 8445 - RNA, 19 nt, artificial
  Chemically synthesized
uaaacuggagauggaccag

SEQ ID NO: 8446 - RNA, 19 nt, artificial
  Chemically synthesized
auaagguggacuuuaucug

SEQ ID NO: 8447 - RNA, 19 nt, artificial
  Chemically synthesized
caagacaacaugaagcucc

SEQ ID NO: 8448 - RNA, 19 nt, artificial
  Chemically synthesized
uguucaucugcuccaguuc

SEQ ID NO: 8449 - RNA, 19 nt, artificial
  Chemically synthesized
uucaugggcccaacuucug

SEQ ID NO: 8450 - RNA, 19 nt, artificial
  Chemically synthesized
aaauuccucuuccaggugu

SEQ ID NO: 8451 - RNA, 19 nt, artificial
  Chemically synthesized
caaauuccucuuccaggug

SEQ ID NO: 8452 - RNA, 19 nt, artificial
  Chemically synthesized
ccuccucauguucaucugc

SEQ ID NO: 8453 - RNA, 19 nt, artificial
  Chemically synthesized
uaucauguacaggcaccag

SEQ ID NO: 8454 - RNA, 19 nt, artificial
  Chemically synthesized
caaacucaaauuccucuuc

SEQ ID NO: 8455 - RNA, 19 nt, artificial
  Chemically synthesized
aacuuuguacuccaggcuc

SEQ ID NO: 8456 - RNA, 19 nt, artificial
  Chemically synthesized
gcagaguaucauguacagg

SEQ ID NO: 8457 - RNA, 19 nt, artificial
  Chemically synthesized
uaagaggcugucgaggagu

SEQ ID NO: 8458 - RNA, 19 nt, artificial
  Chemically synthesized
auugugagaaguucggcuu

SEQ ID NO: 8459 - RNA, 19 nt, artificial
  Chemically synthesized
uuuaucuggaucaacagag

SEQ ID NO: 8460 - RNA, 19 nt, artificial
  Chemically synthesized
uggaucaacagagaccagc

SEQ ID NO: 8461 - RNA, 19 nt, artificial
  Chemically synthesized
auucuguaacaucaagugc

SEQ ID NO: 8462 - RNA, 19 nt, artificial
  Chemically synthesized
uucaaggcaucagacccac

SEQ ID NO: 8463 - RNA, 19 nt, artificial
  Chemically synthesized
ugcucaucuuucaugggcc

SEQ ID NO: 8464 - RNA, 19 nt, artificial
  Chemically synthesized
uucugcucaucuuucaugg

SEQ ID NO: 8465 - RNA, 19 nt, artificial
  Chemically synthesized
ugacuucaagaaugaagcc

SEQ ID NO: 8466 - RNA, 19 nt, artificial
  Chemically synthesized
ugcagucauguuguaucug

SEQ ID NO: 8467 - RNA, 19 nt, artificial
  Chemically synthesized
cuauuggacucaccugucc

SEQ ID NO: 8468 - RNA, 19 nt, artificial
  Chemically synthesized
gucuuucgagugguuugug

SEQ ID NO: 8469 - RNA, 19 nt, artificial
  Chemically synthesized
uugguggguucuuggucuc

SEQ ID NO: 8470 - RNA, 19 nt, artificial
  Chemically synthesized
cucaucuuucaugggccca

SEQ ID NO: 8471 - RNA, 19 nt, artificial
  Chemically synthesized
ucuuugcccuauuugacuc

SEQ ID NO: 8472 - RNA, 19 nt, artificial
  Chemically synthesized
uucuauuggacucaccugu

SEQ ID NO: 8473 - RNA, 19 nt, artificial
  Chemically synthesized
uuugacuccgauagaagug

SEQ ID NO: 8474 - RNA, 19 nt, artificial
  Chemically synthesized
ucugcucaucuuucauggg

SEQ ID NO: 8475 - RNA, 19 nt, artificial
  Chemically synthesized
aaagaaagcauacuugccc

SEQ ID NO: 8476 - RNA, 19 nt, artificial
  Chemically synthesized
agccugcugacuaaacugg

SEQ ID NO: 8477 - RNA, 19 nt, artificial
  Chemically synthesized
aaacucaaauuccucuucc

SEQ ID NO: 8478 - RNA, 19 nt, artificial
  Chemically synthesized
aucuggaucaacagagacc

SEQ ID NO: 8479 - RNA, 19 nt, artificial
  Chemically synthesized
cuuauccgaggucucaauc

SEQ ID NO: 8480 - RNA, 19 nt, artificial
  Chemically synthesized
auguuguaucuggaauugg

SEQ ID NO: 8481 - RNA, 19 nt, artificial
  Chemically synthesized
auuucuagccucaccucuc

SEQ ID NO: 8482 - RNA, 19 nt, artificial
  Chemically synthesized
cuuaugggcuacgugguag

SEQ ID NO: 8483 - RNA, 19 nt, artificial
  Chemically synthesized
uuucuagccucaccucucc

SEQ ID NO: 8484 - RNA, 19 nt, artificial
  Chemically synthesized
gaccagaacauccaguucc

SEQ ID NO: 8485 - RNA, 19 nt, artificial
  Chemically synthesized
uuguaucuggaauuggugg

SEQ ID NO: 8486 - RNA, 19 nt, artificial
  Chemically synthesized
uucggcuucagauuuuucc

SEQ ID NO: 8487 - RNA, 19 nt, artificial
  Chemically synthesized
uacuuguaucugaacaucc

SEQ ID NO: 8488 - RNA, 19 nt, artificial
  Chemically synthesized
cuucugcucaucuuucaug

SEQ ID NO: 8489 - RNA, 19 nt, artificial
  Chemically synthesized
aauugguggguucuugguc

SEQ ID NO: 8490 - RNA, 19 nt, artificial
  Chemically synthesized
uuccaagagaauuucuagc

SEQ ID NO: 8491 - RNA, 19 nt, artificial
  Chemically synthesized
cuucuuugcagagcgauuc

SEQ ID NO: 8492 - RNA, 19 nt, artificial
  Chemically synthesized
uugugagaaguucggcuuc

SEQ ID NO: 8493 - RNA, 19 nt, artificial
  Chemically synthesized
acuaaacuggagauggacc

SEQ ID NO: 8494 - RNA, 19 nt, artificial
  Chemically synthesized
uacaucgaugggccuuaug

SEQ ID NO: 8495 - RNA, 19 nt, artificial
  Chemically synthesized
gaguccuucuuugcagagc

SEQ ID NO: 8496 - RNA, 19 nt, artificial
  Chemically synthesized
uuuguacuccaggcucagg

SEQ ID NO: 8497 - RNA, 19 nt, artificial
  Chemically synthesized
auggacaaacucaaauucc

SEQ ID NO: 8498 - RNA, 19 nt, artificial
  Chemically synthesized
auucugcagaguaucaugu

SEQ ID NO: 8499 - RNA, 19 nt, artificial
  Chemically synthesized
uuucacuauagaccuggug

SEQ ID NO: 8500 - RNA, 19 nt, artificial
  Chemically synthesized
ugacuggagcaagguguuc

SEQ ID NO: 8501 - RNA, 19 nt, artificial
  Chemically synthesized
cugcucaucuuucaugggc

SEQ ID NO: 8502 - RNA, 19 nt, artificial
  Chemically synthesized
ugcagagcgauucuuugcc

SEQ ID NO: 8503 - RNA, 19 nt, artificial
  Chemically synthesized
guucaucugcuccaguucc

SEQ ID NO: 8504 - RNA, 19 nt, artificial
  Chemically synthesized
cuuugcccuauuugacucc

SEQ ID NO: 8505 - RNA, 19 nt, artificial
  Chemically synthesized
uucgacugcagcuucaucg

SEQ ID NO: 8506 - RNA, 19 nt, artificial
  Chemically synthesized
aguugcgcuuuugcuaugg

SEQ ID NO: 8507 - RNA, 19 nt, artificial
  Chemically synthesized
uccuucaaggcaucagacc

SEQ ID NO: 8508 - RNA, 19 nt, artificial
  Chemically synthesized
ucaucugcuccaguuccug

SEQ ID NO: 8509 - RNA, 19 nt, artificial
  Chemically synthesized
uugcagagcgauucuuugc

SEQ ID NO: 8510 - RNA, 19 nt, artificial
  Chemically synthesized
ugcuacaucgaugggccuu

SEQ ID NO: 8511 - RNA, 19 nt, artificial
  Chemically synthesized
aacauccaguuccaccagc

SEQ ID NO: 8512 - RNA, 19 nt, artificial
  Chemically synthesized
ucaucuccucaucaagcgg

SEQ ID NO: 8513 - RNA, 19 nt, artificial
  Chemically synthesized
gaauucaaagcagcucugc

SEQ ID NO: 8514 - RNA, 19 nt, artificial
  Chemically synthesized
ugguucuaagaggcugucg

SEQ ID NO: 8515 - RNA, 19 nt, artificial
  Chemically synthesized
aagaaugaagccgcagacc

SEQ ID NO: 8516 - RNA, 19 nt, artificial
  Chemically synthesized
auggaagucaaccuccucc

SEQ ID NO: 8517 - RNA, 19 nt, artificial
  Chemically synthesized
ucuauuggacucaccuguc

SEQ ID NO: 8518 - RNA, 19 nt, artificial
  Chemically synthesized
uucaaagcagcucugcaug

SEQ ID NO: 8519 - RNA, 19 nt, artificial
  Chemically synthesized
uaugggcuacgugguagug

SEQ ID NO: 8520 - RNA, 19 nt, artificial
  Chemically synthesized
guuuuuccuggagaaggcc

SEQ ID NO: 8521 - RNA, 19 nt, artificial
  Chemically synthesized
acugugaacuuuguacucc

SEQ ID NO: 8522 - RNA, 19 nt, artificial
  Chemically synthesized
uuucgagugguuugugagc

SEQ ID NO: 8523 - RNA, 19 nt, artificial
  Chemically synthesized
uuggacucaccuguccuac

SEQ ID NO: 8524 - RNA, 19 nt, artificial
  Chemically synthesized
auuuuuccaagagaauuuc

SEQ ID NO: 8525 - RNA, 19 nt, artificial
  Chemically synthesized
ccucauguucaucugcucc

SEQ ID NO: 8526 - RNA, 19 nt, artificial
  Chemically synthesized
uuguuuuuccuggagaagg

SEQ ID NO: 8527 - RNA, 19 nt, artificial
  Chemically synthesized
uuccauucugcagaguauc

SEQ ID NO: 8528 - RNA, 19 nt, artificial
  Chemically synthesized
auguacaugacaucugcac

SEQ ID NO: 8529 - RNA, 19 nt, artificial
  Chemically synthesized
uguaucuggaauugguggg

SEQ ID NO: 8530 - RNA, 19 nt, artificial
  Chemically synthesized
aguaucauguacaggcacc

SEQ ID NO: 8531 - RNA, 19 nt, artificial
  Chemically synthesized
aaacuggagauggaccagg

SEQ ID NO: 8532 - RNA, 19 nt, artificial
  Chemically synthesized
uuaaacugcugagucaccc

SEQ ID NO: 8533 - RNA, 19 nt, artificial
  Chemically synthesized
uucuggaacaccuugcucc

SEQ ID NO: 8534 - RNA, 19 nt, artificial
  Chemically synthesized
aucgaugucauacaccugg

SEQ ID NO: 8535 - RNA, 19 nt, artificial
  Chemically synthesized
ugauguuacagaauuugug

SEQ ID NO: 8536 - RNA, 19 nt, artificial
  Chemically synthesized
uugauguuacagaauuugu

SEQ ID NO: 8537 - RNA, 19 nt, artificial
  Chemically synthesized
uuucucauugucacacucc

SEQ ID NO: 8538 - RNA, 19 nt, artificial
  Chemically synthesized
uccaucuccaguuuaguca

SEQ ID NO: 8539 - RNA, 19 nt, artificial
  Chemically synthesized
ucaaauagggcaaagaauc

SEQ ID NO: 8540 - RNA, 19 nt, artificial
  Chemically synthesized
uucagauacaaguagucac

SEQ ID NO: 8541 - RNA, 19 nt, artificial
  Chemically synthesized
cucauugucacacuccucg

SEQ ID NO: 8542 - RNA, 19 nt, artificial
  Chemically synthesized
ucuuucuucuccuuguugg

SEQ ID NO: 8543 - RNA, 19 nt, artificial
  Chemically synthesized
uuagucagcaggcucacaa

SEQ ID NO: 8544 - RNA, 19 nt, artificial
  Chemically synthesized
uucauaggcgucguccgua

SEQ ID NO: 8545 - RNA, 19 nt, artificial
  Chemically synthesized
ucuuaaacugcugagucac

SEQ ID NO: 8546 - RNA, 19 nt, artificial
  Chemically synthesized
uuucuggugccuguacaug

SEQ ID NO: 8547 - RNA, 19 nt, artificial
  Chemically synthesized
uacaacaugacugcauacc

SEQ ID NO: 8548 - RNA, 19 nt, artificial
  Chemically synthesized
uguugauccagauaaaguc

SEQ ID NO: 8549 - RNA, 19 nt, artificial
  Chemically synthesized
uguugucuuggacaccuuc

SEQ ID NO: 8550 - RNA, 19 nt, artificial
  Chemically synthesized
ugucuuucugcucaggagc

SEQ ID NO: 8551 - RNA, 19 nt, artificial
  Chemically synthesized
uacauaugcagcuccagga

SEQ ID NO: 8552 - RNA, 19 nt, artificial
  Chemically synthesized
uuauggagcuucauguugu

SEQ ID NO: 8553 - RNA, 19 nt, artificial
  Chemically synthesized
uuucuggaacaccuugcuc

SEQ ID NO: 8554 - RNA, 19 nt, artificial
  Chemically synthesized
uccaaaaguaucucagagc

SEQ ID NO: 8555 - RNA, 19 nt, artificial
  Chemically synthesized
ucuuggacaccuucgaucc

SEQ ID NO: 8556 - RNA, 19 nt, artificial
  Chemically synthesized
uagcacuugauguuacaga

SEQ ID NO: 8557 - RNA, 19 nt, artificial
  Chemically synthesized
cuucaugucauucuugccc

SEQ ID NO: 8558 - RNA, 19 nt, artificial
  Chemically synthesized
uucuugcaggcugaucucc

SEQ ID NO: 8559 - RNA, 19 nt, artificial
  Chemically synthesized
uuucuccaaaaguaucuca

SEQ ID NO: 8560 - RNA, 19 nt, artificial
  Chemically synthesized
ucagaggcaaagauccugc

SEQ ID NO: 8561 - RNA, 19 nt, artificial
  Chemically synthesized
ugcaccuugcccuucuucu

SEQ ID NO: 8562 - RNA, 19 nt, artificial
  Chemically synthesized
ucucauugucacacuccuc

SEQ ID NO: 8563 - RNA, 19 nt, artificial
  Chemically synthesized
uggagcuucauguugucuu

SEQ ID NO: 8564 - RNA, 19 nt, artificial
  Chemically synthesized
aauucuugcaggcugaucu

SEQ ID NO: 8565 - RNA, 19 nt, artificial
  Chemically synthesized
aucuucuccugcaaugguc

SEQ ID NO: 8566 - RNA, 19 nt, artificial
  Chemically synthesized
ucucuguugauccagauaa

SEQ ID NO: 8567 - RNA, 19 nt, artificial
  Chemically synthesized
uuccaugaugcacacggcu

SEQ ID NO: 8568 - RNA, 19 nt, artificial
  Chemically synthesized
uucuugcccagugcagaug

SEQ ID NO: 8569 - RNA, 19 nt, artificial
  Chemically synthesized
uaucucagagcccuuggac

SEQ ID NO: 8570 - RNA, 19 nt, artificial
  Chemically synthesized
ucagauacaaguagucacc

SEQ ID NO: 8571 - RNA, 19 nt, artificial
  Chemically synthesized
cuuucuuuucuggugccug

SEQ ID NO: 8572 - RNA, 19 nt, artificial
  Chemically synthesized
uuccagauacaacaugacu

SEQ ID NO: 8573 - RNA, 19 nt, artificial
  Chemically synthesized
cucauagcgagcaauggug

SEQ ID NO: 8574 - RNA, 19 nt, artificial
  Chemically synthesized
uucuuuucuggugccugua

SEQ ID NO: 8575 - RNA, 19 nt, artificial
  Chemically synthesized
uggauguucugguccagug

SEQ ID NO: 8576 - RNA, 19 nt, artificial
  Chemically synthesized
acuuucuggaacaccuugc

SEQ ID NO: 8577 - RNA, 19 nt, artificial
  Chemically synthesized
ucauguugucuuggacacc

SEQ ID NO: 8578 - RNA, 19 nt, artificial
  Chemically synthesized
ucauucuugcccagugcag

SEQ ID NO: 8579 - RNA, 19 nt, artificial
  Chemically synthesized
uccugcaauggucuuaaac

SEQ ID NO: 8580 - RNA, 19 nt, artificial
  Chemically synthesized
ucuuuucuggugccuguac

SEQ ID NO: 8581 - RNA, 19 nt, artificial
  Chemically synthesized
ucuugaagucagugagacc

SEQ ID NO: 8582 - RNA, 19 nt, artificial
  Chemically synthesized
ucugaagccgaacuucuca

SEQ ID NO: 8583 - RNA, 19 nt, artificial
  Chemically synthesized
ugauggagucuuucuucuc

SEQ ID NO: 8584 - RNA, 19 nt, artificial
  Chemically synthesized
uggaagaggaauuugaguu

SEQ ID NO: 8585 - RNA, 19 nt, artificial
  Chemically synthesized
ugcggcuucauucuugaag

SEQ ID NO: 8586 - RNA, 19 nt, artificial
  Chemically synthesized
accaauuccagauacaaca

SEQ ID NO: 8587 - RNA, 19 nt, artificial
  Chemically synthesized
guacauaugcagcuccagg

SEQ ID NO: 8588 - RNA, 19 nt, artificial
  Chemically synthesized
cuugauguuacagaauuug

SEQ ID NO: 8589 - RNA, 19 nt, artificial
  Chemically synthesized
aucgauguagcacuugaug

SEQ ID NO: 8590 - RNA, 19 nt, artificial
  Chemically synthesized
uugaugaggagaugaguga

SEQ ID NO: 8591 - RNA, 19 nt, artificial
  Chemically synthesized
aagaagaccugcaccuugc

SEQ ID NO: 8592 - RNA, 19 nt, artificial
  Chemically synthesized
aaacugcugagucacccac

SEQ ID NO: 8593 - RNA, 19 nt, artificial
  Chemically synthesized
aacaugacugcauaccagc

SEQ ID NO: 8594 - RNA, 19 nt, artificial
  Chemically synthesized
uucuccugcaauggucuua

SEQ ID NO: 8595 - RNA, 19 nt, artificial
  Chemically synthesized
ucuucuccugcaauggucu

SEQ ID NO: 8596 - RNA, 19 nt, artificial
  Chemically synthesized
gucuuggacaccuucgauc

SEQ ID NO: 8597 - RNA, 19 nt, artificial
  Chemically synthesized
cuuaaacugcugagucacc

SEQ ID NO: 8598 - RNA, 19 nt, artificial
  Chemically synthesized
agaugagugaccuuggagg

SEQ ID NO: 8599 - RNA, 19 nt, artificial
  Chemically synthesized
auugucacacuccucgaca

SEQ ID NO: 8600 - RNA, 19 nt, artificial
  Chemically synthesized
ugaaggacucauacagccu

SEQ ID NO: 8601 - RNA, 19 nt, artificial
  Chemically synthesized
auacucugcagaauggaag

SEQ ID NO: 8602 - RNA, 19 nt, artificial
  Chemically synthesized
ugcaaagaaggacucuuuc

SEQ ID NO: 8603 - RNA, 19 nt, artificial
  Chemically synthesized
ucuguugauccagauaaag

SEQ ID NO: 8604 - RNA, 19 nt, artificial
  Chemically synthesized
ugucauucuugcccagugc

SEQ ID NO: 8605 - RNA, 19 nt, artificial
  Chemically synthesized
ucgauguagcacuugaugu

SEQ ID NO: 8606 - RNA, 19 nt, artificial
  Chemically synthesized
auagggcaaagaaucgcuc

SEQ ID NO: 8607 - RNA, 19 nt, artificial
  Chemically synthesized
ucauucuugaagucaguga

SEQ ID NO: 8608 - RNA, 19 nt, artificial
  Chemically synthesized
aaguaucucagagcccuug

SEQ ID NO: 8609 - RNA, 19 nt, artificial
  Chemically synthesized
ugaggcuagaaauucucuu

SEQ ID NO: 8610 - RNA, 19 nt, artificial
  Chemically synthesized
cuucauguugucuuggaca

SEQ ID NO: 8611 - RNA, 19 nt, artificial
  Chemically synthesized
aaauagggcaaagaaucgc

SEQ ID NO: 8612 - RNA, 19 nt, artificial
  Chemically synthesized
accuuauggagcuucaugu

SEQ ID NO: 8613 - RNA, 19 nt, artificial
  Chemically synthesized
ugacucuuucucauuguca

SEQ ID NO: 8614 - RNA, 19 nt, artificial
  Chemically synthesized
uguucugguccagugguag

SEQ ID NO: 8615 - RNA, 19 nt, artificial
  Chemically synthesized
aauuugaguuuguccaugg

SEQ ID NO: 8616 - RNA, 19 nt, artificial
  Chemically synthesized
uugaagucagugagaccaa

SEQ ID NO: 8617 - RNA, 19 nt, artificial
  Chemically synthesized
uuuucuggugccuguacau

SEQ ID NO: 8618 - RNA, 19 nt, artificial
  Chemically synthesized
uacaaguagucaccagguc

SEQ ID NO: 8619 - RNA, 19 nt, artificial
  Chemically synthesized
cuuauggagcuucauguug

SEQ ID NO: 8620 - RNA, 19 nt, artificial
  Chemically synthesized
aagcugguggaacuggaug

SEQ ID NO: 8621 - RNA, 19 nt, artificial
  Chemically synthesized
uuuagucagcaggcucaca

SEQ ID NO: 8622 - RNA, 19 nt, artificial
  Chemically synthesized
ugagccuggaguacaaagu

SEQ ID NO: 8623 - RNA, 19 nt, artificial
  Chemically synthesized
uuugacucuuucucauugu

SEQ ID NO: 8624 - RNA, 19 nt, artificial
  Chemically synthesized
uggaaaaaucugaagccga

SEQ ID NO: 8625 - RNA, 19 nt, artificial
  Chemically synthesized
aacaccuugcuccagucag

SEQ ID NO: 8626 - RNA, 19 nt, artificial
  Chemically synthesized
uggaacaccuugcuccagu

SEQ ID NO: 8627 - RNA, 19 nt, artificial
  Chemically synthesized
gucagguucuccaugacuc

SEQ ID NO: 8628 - RNA, 19 nt, artificial
  Chemically synthesized
ucuuucacaugcagagcug

SEQ ID NO: 8629 - RNA, 19 nt, artificial
  Chemically synthesized
acaagauuccaggcaccag

SEQ ID NO: 8630 - RNA, 19 nt, artificial
  Chemically synthesized
uguacauaugcagcuccag

SEQ ID NO: 8631 - RNA, 19 nt, artificial
  Chemically synthesized
ugaagcugcagucgaaguu

SEQ ID NO: 8632 - RNA, 19 nt, artificial
  Chemically synthesized
ugggucugaugccuugaag

SEQ ID NO: 8633 - RNA, 19 nt, artificial
  Chemically synthesized
cuggucucuguugauccag

SEQ ID NO: 8634 - RNA, 19 nt, artificial
  Chemically synthesized
ucugcaaagaaggacucuu

SEQ ID NO: 8635 - RNA, 19 nt, artificial
  Chemically synthesized
uaccacguagcccauaagc

SEQ ID NO: 8636 - RNA, 19 nt, artificial
  Chemically synthesized
cuugaugaggagaugagug

SEQ ID NO: 8637 - RNA, 19 nt, artificial
  Chemically synthesized
uccagauaaaguccaccuu

SEQ ID NO: 8638 - RNA, 19 nt, artificial
  Chemically synthesized
agauagugucuuucugcuc

SEQ ID NO: 8639 - RNA, 19 nt, artificial
  Chemically synthesized
aacaagauuccaggcacca

SEQ ID NO: 8640 - RNA, 19 nt, artificial
  Chemically synthesized
auucuugcaggcugaucuc

SEQ ID NO: 8641 - RNA, 19 nt, artificial
  Chemically synthesized
guagucaccaggucuauag

SEQ ID NO: 8642 - RNA, 19 nt, artificial
  Chemically synthesized
uagcaaaagcgcaacuaga

SEQ ID NO: 8643 - RNA, 19 nt, artificial
  Chemically synthesized
acaaguagucaccaggucu

SEQ ID NO: 8644 - RNA, 19 nt, artificial
  Chemically synthesized
auaaggcccaucgauguag

SEQ ID NO: 8645 - RNA, 19 nt, artificial
  Chemically synthesized
uggucuuaaacugcugagu

SEQ ID NO: 8646 - RNA, 19 nt, artificial
  Chemically synthesized
uaagggcuucauaggcguc

SEQ ID NO: 8647 - RNA, 19 nt, artificial
  Chemically synthesized
cuguugauccagauaaagu

SEQ ID NO: 8648 - RNA, 19 nt, artificial
  Chemically synthesized
uggucucuguugauccaga

SEQ ID NO: 8649 - RNA, 19 nt, artificial
  Chemically synthesized
ugucuuggacaccuucgau

SEQ ID NO: 8650 - RNA, 19 nt, artificial
  Chemically synthesized
ugauggucagguucuccau

SEQ ID NO: 8651 - RNA, 19 nt, artificial
  Chemically synthesized
aggacuaagggcuucauag

SEQ ID NO: 8652 - RNA, 19 nt, artificial
  Chemically synthesized
guaugcuuucuuuucuggu

SEQ ID NO: 8653 - RNA, 19 nt, artificial
  Chemically synthesized
aacuagaaggacuaagggc

SEQ ID NO: 8654 - RNA, 19 nt, artificial
  Chemically synthesized
ugcagaauggaagcaaagg

SEQ ID NO: 8655 - RNA, 19 nt, artificial
  Chemically synthesized
ucauugucacacuccucga

SEQ ID NO: 8656 - RNA, 19 nt, artificial
  Chemically synthesized
gucuuucuucuccuuguug

SEQ ID NO: 8657 - RNA, 19 nt, artificial
  Chemically synthesized
acagaagaagaccugcacc

SEQ ID NO: 8658 - RNA, 19 nt, artificial
  Chemically synthesized
uguagcacuugauguuaca

SEQ ID NO: 8659 - RNA, 19 nt, artificial
  Chemically synthesized
uacaccuggaagaggaauu

SEQ ID NO: 8660 - RNA, 19 nt, artificial
  Chemically synthesized
agugucuuucugcucagga

SEQ ID NO: 8661 - RNA, 19 nt, artificial
  Chemically synthesized
guugacuuccaugaugcac

SEQ ID NO: 8662 - RNA, 19 nt, artificial
  Chemically synthesized
ccagauagugucuuucugc

SEQ ID NO: 8663 - RNA, 19 nt, artificial
  Chemically synthesized
ucacaugcagagcugcuuu

SEQ ID NO: 8664 - RNA, 19 nt, artificial
  Chemically synthesized
guguuucuccaaaaguauc

SEQ ID NO: 8665 - RNA, 19 nt, artificial
  Chemically synthesized
acaacaugacugcauacca

SEQ ID NO: 8666 - RNA, 19 nt, artificial
  Chemically synthesized
uggacgaccuuugacucuu

SEQ ID NO: 8667 - RNA, 19 nt, artificial
  Chemically synthesized
acagccuguuuguccacug

SEQ ID NO: 8668 - RNA, 19 nt, artificial
  Chemically synthesized
agaaggacucuuucacaug

SEQ ID NO: 8669 - RNA, 19 nt, artificial
  Chemically synthesized
auggauugagaccucggau

SEQ ID NO: 8670 - RNA, 19 nt, artificial
  Chemically synthesized
aaauucucuuggaaaaauc

SEQ ID NO: 8671 - RNA, 19 nt, artificial
  Chemically synthesized
ucauguacauaugcagcuc

SEQ ID NO: 8672 - RNA, 19 nt, artificial
  Chemically synthesized
ccuuggacgaccuuugacu

SEQ ID NO: 8673 - RNA, 19 nt, artificial
  Chemically synthesized
uggauugagaccucggaua

SEQ ID NO: 8674 - RNA, 19 nt, artificial
  Chemically synthesized
ucuccugcaauggucuuaa

SEQ ID NO: 8675 - RNA, 19 nt, artificial
  Chemically synthesized
cucgacagccucuuagaac

SEQ ID NO: 8676 - RNA, 19 nt, artificial
  Chemically synthesized
aaaguaucucagagcccuu

SEQ ID NO: 8677 - RNA, 19 nt, artificial
  Chemically synthesized
uauggagcuucauguuguc

SEQ ID NO: 8678 - RNA, 19 nt, artificial
  Chemically synthesized
acuucuaucggagucaaau

SEQ ID NO: 8679 - RNA, 19 nt, artificial
  Chemically synthesized
cugagccuggaguacaaag

SEQ ID NO: 8680 - RNA, 19 nt, artificial
  Chemically synthesized
cuggaguacaaaguucaca

SEQ ID NO: 8681 - RNA, 19 nt, artificial
  Chemically synthesized
acucauagcgagcaauggu

SEQ ID NO: 8682 - RNA, 19 nt, artificial
  Chemically synthesized
ucggagucaaauagggcaa

SEQ ID NO: 8683 - RNA, 19 nt, artificial
  Chemically synthesized
cgugauggagucuuucuuc

SEQ ID NO: 8684 - RNA, 19 nt, artificial
  Chemically synthesized
cuuuucuggugccuguaca

SEQ ID NO: 8685 - RNA, 19 nt, artificial
  Chemically synthesized
augaagcugcagucgaagu

SEQ ID NO: 8686 - RNA, 19 nt, artificial
  Chemically synthesized
auucuugcccagugcagau

SEQ ID NO: 8687 - RNA, 19 nt, artificial
  Chemically synthesized
ucuugcccagugcagaugu

SEQ ID NO: 8688 - RNA, 19 nt, artificial
  Chemically synthesized
augcucagaggcaaagauc

SEQ ID NO: 8689 - RNA, 19 nt, artificial
  Chemically synthesized
cacaucgaugucauacacc

SEQ ID NO: 8690 - RNA, 19 nt, artificial
  Chemically synthesized
uagaaauucucuuggaaaa

SEQ ID NO: 8691 - RNA, 19 nt, artificial
  Chemically synthesized
acuugauguuacagaauuu

SEQ ID NO: 8692 - RNA, 19 nt, artificial
  Chemically synthesized
ucuggaacaccuugcucca

SEQ ID NO: 8693 - RNA, 19 nt, artificial
  Chemically synthesized
ugcagagcugcuuugaauu

SEQ ID NO: 8694 - RNA, 19 nt, artificial
  Chemically synthesized
cacuuucuggaacaccuug

SEQ ID NO: 8695 - RNA, 19 nt, artificial
  Chemically synthesized
guccaucuccaguuuaguc

SEQ ID NO: 8696 - RNA, 19 nt, artificial
  Chemically synthesized
caguuuagucagcaggcuc

SEQ ID NO: 8697 - RNA, 19 nt, artificial
  Chemically synthesized
agucaccaggucuauagug

SEQ ID NO: 8698 - RNA, 19 nt, artificial
  Chemically synthesized
uuccagaaguugggcccau

SEQ ID NO: 8699 - RNA, 19 nt, artificial
  Chemically synthesized
aauggauugagaccucgga

SEQ ID NO: 8700 - RNA, 19 nt, artificial
  Chemically synthesized
ccaagaacccaccaauucc

SEQ ID NO: 8701 - RNA, 19 nt, artificial
  Chemically synthesized
ugaagucagugagaccaag

SEQ ID NO: 8702 - RNA, 19 nt, artificial
  Chemically synthesized
aagauuccaggcaccagca

SEQ ID NO: 8703 - RNA, 19 nt, artificial
  Chemically synthesized
ugaagccgaacuucucaca

SEQ ID NO: 8704 - RNA, 19 nt, artificial
  Chemically synthesized
gaguacaaaguucacagug

SEQ ID NO: 8705 - RNA, 19 nt, artificial
  Chemically synthesized
accaagaacccaccaauuc

SEQ ID NO: 8706 - RNA, 19 nt, artificial
  Chemically synthesized
gaagaagaccugcaccuug

SEQ ID NO: 8707 - RNA, 19 nt, artificial
  Chemically synthesized
ucaugucauucuugcccag

SEQ ID NO: 8708 - RNA, 19 nt, artificial
  Chemically synthesized
uaagcugguggaacuggau

SEQ ID NO: 8709 - RNA, 19 nt, artificial
  Chemically synthesized
caccuuauggagcuucaug

SEQ ID NO: 8710 - RNA, 19 nt, artificial
  Chemically synthesized
caucgaugucauacaccug

SEQ ID NO: 8711 - RNA, 19 nt, artificial
  Chemically synthesized
cuuggacgaccuuugacuc

SEQ ID NO: 8712 - RNA, 19 nt, artificial
  Chemically synthesized
agauacaacaugacugcau

SEQ ID NO: 8713 - RNA, 19 nt, artificial
  Chemically synthesized
uccaauagaacaccucaaa

SEQ ID NO: 8714 - RNA, 19 nt, artificial
  Chemically synthesized
cucauacagccuguuuguc

SEQ ID NO: 8715 - RNA, 19 nt, artificial
  Chemically synthesized
aagaccgcuggucucuguu

SEQ ID NO: 8716 - RNA, 19 nt, artificial
  Chemically synthesized
ucuccaaaaguaucucaga

SEQ ID NO: 8717 - RNA, 19 nt, artificial
  Chemically synthesized
ugaugaggagaugagugac

SEQ ID NO: 8718 - RNA, 19 nt, artificial
  Chemically synthesized
ugguccagugguaggacuu

SEQ ID NO: 8719 - RNA, 19 nt, artificial
  Chemically synthesized
gcaaguaugcuuucuuuuc

SEQ ID NO: 8720 - RNA, 19 nt, artificial
  Chemically synthesized
ggagucuuucuucuccuug

SEQ ID NO: 8721 - RNA, 19 nt, artificial
  Chemically synthesized
ggucuuaaacugcugaguc

SEQ ID NO: 8722 - RNA, 19 nt, artificial
  Chemically synthesized
guugggcccaugaaagaug

SEQ ID NO: 8723 - RNA, 19 nt, artificial
  Chemically synthesized
agcaggcucacaaaccacu

SEQ ID NO: 8724 - RNA, 19 nt, artificial
  Chemically synthesized
ugucauacaccuggaagag

SEQ ID NO: 8725 - RNA, 19 nt, artificial
  Chemically synthesized
ucacaaaccacucgaaaga

SEQ ID NO: 8726 - RNA, 19 nt, artificial
  Chemically synthesized
uuggagaggugaggcuaga

SEQ ID NO: 8727 - RNA, 19 nt, artificial
  Chemically synthesized
cugguggaacuggauguuc

SEQ ID NO: 8728 - RNA, 19 nt, artificial
  Chemically synthesized
cuggauguucugguccagu

SEQ ID NO: 8729 - RNA, 19 nt, artificial
  Chemically synthesized
cgaccuuugacucuuucuc

SEQ ID NO: 8730 - RNA, 19 nt, artificial
  Chemically synthesized
gaggagguugacuuccaug

SEQ ID NO: 8731 - RNA, 19 nt, artificial
  Chemically synthesized
aauucucuuggaaaaaucu

SEQ ID NO: 8732 - RNA, 19 nt, artificial
  Chemically synthesized
gcaauggucuuaaacugcu

SEQ ID NO: 8733 - RNA, 19 nt, artificial
  Chemically synthesized
cacuugauguuacagaauu

SEQ ID NO: 8734 - RNA, 19 nt, artificial
  Chemically synthesized
ucccauaaggcccaucgau

SEQ ID NO: 8735 - RNA, 19 nt, artificial
  Chemically synthesized
uaggacaggugaguccaau

SEQ ID NO: 8736 - RNA, 19 nt, artificial
  Chemically synthesized
uagucaccaggucuauagu

SEQ ID NO: 8737 - RNA, 19 nt, artificial
  Chemically synthesized
ccugcaauggucuuaaacu

SEQ ID NO: 8738 - RNA, 19 nt, artificial
  Chemically synthesized
acaccuucgauccaggagu

SEQ ID NO: 8739 - RNA, 19 nt, artificial
  Chemically synthesized
agccgaacuucucacaaug

SEQ ID NO: 8740 - RNA, 19 nt, artificial
  Chemically synthesized
acucauacagccuguuugu

SEQ ID NO: 8741 - RNA, 19 nt, artificial
  Chemically synthesized
aaagaaucgcucugcaaag

SEQ ID NO: 8742 - RNA, 19 nt, artificial
  Chemically synthesized
cuuucugcucaggagcacu

SEQ ID NO: 8743 - RNA, 19 nt, artificial
  Chemically synthesized
caccaauuccagauacaac

SEQ ID NO: 8744 - RNA, 19 nt, artificial
  Chemically synthesized
cauguacauaugcagcucc

SEQ ID NO: 8745 - RNA, 19 nt, artificial
  Chemically synthesized
caccuugcccuucuucuca

SEQ ID NO: 8746 - RNA, 19 nt, artificial
  Chemically synthesized
agucagugagaccaagaac

SEQ ID NO: 8747 - RNA, 19 nt, artificial
  Chemically synthesized
caugacugcauaccagccu

SEQ ID NO: 8748 - RNA, 19 nt, artificial
  Chemically synthesized
auucuugaagucagugaga

SEQ ID NO: 8749 - RNA, 19 nt, artificial
  Chemically synthesized
agauaaaguccaccuuaug

SEQ ID NO: 8750 - RNA, 19 nt, artificial
  Chemically synthesized
uggagucuuucuucuccuu

SEQ ID NO: 8751 - RNA, 19 nt, artificial
  Chemically synthesized
cuuugaauucuugcaggcu

SEQ ID NO: 8752 - RNA, 19 nt, artificial
  Chemically synthesized
agaaguugggcccaugaaa

SEQ ID NO: 8753 - RNA, 19 nt, artificial
  Chemically synthesized
accacguagcccauaagcu

SEQ ID NO: 8754 - RNA, 19 nt, artificial
  Chemically synthesized
ugagaccaagaacccacca

SEQ ID NO: 8755 - RNA, 19 nt, artificial
  Chemically synthesized
uacaugauacucugcagaa

SEQ ID NO: 8756 - RNA, 19 nt, artificial
  Chemically synthesized
ccgugauggagucuuucuu

SEQ ID NO: 8757 - RNA, 19 nt, artificial
  Chemically synthesized
gggauguucagauacaagu

SEQ ID NO: 8758 - RNA, 19 nt, artificial
  Chemically synthesized
gauggucagguucuccaug

SEQ ID NO: 8759 - RNA, 19 nt, artificial
  Chemically synthesized
acucuuucacaugcagagc

SEQ ID NO: 8760 - RNA, 19 nt, artificial
  Chemically synthesized
agucgaaguugaggcacug

SEQ ID NO: 8761 - RNA, 19 nt, artificial
  Chemically synthesized
caugauacucugcagaaug

SEQ ID NO: 8762 - RNA, 19 nt, artificial
  Chemically synthesized
guagcacuugauguuacag

SEQ ID NO: 8763 - RNA, 19 nt, artificial
  Chemically synthesized
gaaguugggcccaugaaag

SEQ ID NO: 8764 - RNA, 19 nt, artificial
  Chemically synthesized
cuagaaauucucuuggaaa

SEQ ID NO: 8765 - RNA, 19 nt, artificial
  Chemically synthesized
accaggucuauagugaaaa

SEQ ID NO: 8766 - RNA, 19 nt, artificial
  Chemically synthesized
aguccaauagaacaccuca

SEQ ID NO: 8767 - RNA, 19 nt, artificial
  Chemically synthesized
gaugucauacaccuggaag

SEQ ID NO: 8768 - RNA, 19 nt, artificial
  Chemically synthesized
ucuccaggaaaaacaagau

SEQ ID NO: 8769 - RNA, 19 nt, artificial
  Chemically synthesized
acuggagcagaugaacaug

SEQ ID NO: 8770 - RNA, 19 nt, artificial
  Chemically synthesized
augcagagcugcuuugaau

SEQ ID NO: 8771 - RNA, 19 nt, artificial
  Chemically synthesized
cugcaaagaaggacucuuu

SEQ ID NO: 8772 - RNA, 19 nt, artificial
  Chemically synthesized
agcacuugauguuacagaa

SEQ ID NO: 8773 - RNA, 19 nt, artificial
  Chemically synthesized
gaugaggagaugagugacc

SEQ ID NO: 8774 - RNA, 19 nt, artificial
  Chemically synthesized
gucuuaaacugcugaguca

SEQ ID NO: 8775 - RNA, 19 nt, artificial
  Chemically synthesized
ucaccaggucuauagugaa

SEQ ID NO: 8776 - RNA, 19 nt, artificial
  Chemically synthesized
accuuugacucuuucucau

SEQ ID NO: 8777 - RNA, 19 nt, artificial
  Chemically synthesized
gugucuuucugcucaggag

SEQ ID NO: 8778 - RNA, 19 nt, artificial
  Chemically synthesized
caagaacccaccaauucca

SEQ ID NO: 8779 - RNA, 19 nt, artificial
  Chemically synthesized
uccucgacagccucuuaga

SEQ ID NO: 8780 - RNA, 19 nt, artificial
  Chemically synthesized
auaagccggcacagacgaa

SEQ ID NO: 8781 - RNA, 19 nt, artificial
  Chemically synthesized
acgaccuuugacucuuucu

SEQ ID NO: 8782 - RNA, 19 nt, artificial
  Chemically synthesized
agggcaaagaaucgcucug

SEQ ID NO: 8783 - RNA, 19 nt, artificial
  Chemically synthesized
ugaacaugaggaggagcag

SEQ ID NO: 8784 - RNA, 19 nt, artificial
  Chemically synthesized
agucagcaggcucacaaac

SEQ ID NO: 8785 - RNA, 19 nt, artificial
  Chemically synthesized
aggucuauagugaaaaaaa

SEQ ID NO: 8786 - RNA, 19 nt, artificial
  Chemically synthesized
ucuggugccuguacaugau

SEQ ID NO: 8787 - RNA, 19 nt, artificial
  Chemically synthesized
cauaugcagcuccaggaag

SEQ ID NO: 8788 - RNA, 19 nt, artificial
  Chemically synthesized
gaauucuugcaggcugauc

SEQ ID NO: 8789 - RNA, 19 nt, artificial
  Chemically synthesized
uagucagcaggcucacaaa

SEQ ID NO: 8790 - RNA, 19 nt, artificial
  Chemically synthesized
gucaaauagggcaaagaau

SEQ ID NO: 8791 - RNA, 19 nt, artificial
  Chemically synthesized
caauagaacaccucaaagu

SEQ ID NO: 8792 - RNA, 19 nt, artificial
  Chemically synthesized
ggugaggcuagaaauucuc

SEQ ID NO: 8793 - RNA, 19 nt, artificial
  Chemically synthesized
ugcccagugcagaugucau

SEQ ID NO: 8794 - RNA, 19 nt, artificial
  Chemically synthesized
agcugcagucgaaguugag

SEQ ID NO: 8795 - RNA, 19 nt, artificial
  Chemically synthesized
cuucuaucggagucaaaua

SEQ ID NO: 8796 - RNA, 19 nt, artificial
  Chemically synthesized
gaugaagcugcagucgaag

SEQ ID NO: 8797 - RNA, 19 nt, artificial
  Chemically synthesized
ccauaagcugguggaacug

SEQ ID NO: 8798 - RNA, 19 nt, artificial
  Chemically synthesized
aaggacuaagggcuucaua

SEQ ID NO: 8799 - RNA, 19 nt, artificial
  Chemically synthesized
cauucuugcccagugcaga

SEQ ID NO: 8800 - RNA, 19 nt, artificial
  Chemically synthesized
guuuagucagcaggcucac

SEQ ID NO: 8801 - RNA, 19 nt, artificial
  Chemically synthesized
gcuucauguugucuuggac

SEQ ID NO: 8802 - RNA, 19 nt, artificial
  Chemically synthesized
caaaguucacagugugagc

SEQ ID NO: 8803 - RNA, 19 nt, artificial
  Chemically synthesized
caauuccagauacaacaug

SEQ ID NO: 8804 - RNA, 19 nt, artificial
  Chemically synthesized
cuuucucauugucacacuc

SEQ ID NO: 8805 - RNA, 19 nt, artificial
  Chemically synthesized
cuggaagaggaauuugagu

SEQ ID NO: 8806 - RNA, 19 nt, artificial
  Chemically synthesized
ccacucauagcgagcaaug

SEQ ID NO: 8807 - RNA, 19 nt, artificial
  Chemically synthesized
ugauacucugcagaaugga

SEQ ID NO: 8808 - RNA, 19 nt, artificial
  Chemically synthesized
agcacugcugauggugaag

SEQ ID NO: 8809 - RNA, 19 nt, artificial
  Chemically synthesized
ugcagaugucauguacaua

SEQ ID NO: 8810 - RNA, 19 nt, artificial
  Chemically synthesized
agaagaagaccugcaccuu

SEQ ID NO: 8811 - RNA, 19 nt, artificial
  Chemically synthesized
caugucauucuugcccagu

SEQ ID NO: 8812 - RNA, 19 nt, artificial
  Chemically synthesized
cuugcccuucuucucagca

SEQ ID NO: 8813 - RNA, 19 nt, artificial
  Chemically synthesized
agucaaauagggcaaagaa

SEQ ID NO: 8814 - RNA, 19 nt, artificial
  Chemically synthesized
uggucagguucuccaugac

SEQ ID NO: 8815 - RNA, 19 nt, artificial
  Chemically synthesized
ccuucaugucauucuugcc

SEQ ID NO: 8816 - RNA, 19 nt, artificial
  Chemically synthesized
auggaugagcagggucagu

SEQ ID NO: 8817 - RNA, 19 nt, artificial
  Chemically synthesized
ugaggagaugagugaccuu

SEQ ID NO: 8818 - RNA, 19 nt, artificial
  Chemically synthesized
acucuuucucauugucaca

SEQ ID NO: 8819 - RNA, 19 nt, artificial
  Chemically synthesized
aggacucuuucacaugcag

SEQ ID NO: 8820 - RNA, 19 nt, artificial
  Chemically synthesized
aggugaguccaauagaaca

SEQ ID NO: 8821 - RNA, 19 nt, artificial
  Chemically synthesized
gucuuucugcucaggagca

SEQ ID NO: 8822 - RNA, 19 nt, artificial
  Chemically synthesized
gaagcugcagucgaaguug

SEQ ID NO: 8823 - RNA, 19 nt, artificial
  Chemically synthesized
cccaucuucuccugcaaug

SEQ ID NO: 8824 - RNA, 19 nt, artificial
  Chemically synthesized
cccgugauggagucuuucu

SEQ ID NO: 8825 - RNA, 19 nt, artificial
  Chemically synthesized
gucauucuugcccagugca

SEQ ID NO: 8826 - RNA, 19 nt, artificial
  Chemically synthesized
gcgcaauggauugagaccu

SEQ ID NO: 8827 - RNA, 19 nt, artificial
  Chemically synthesized
acuggauguucugguccag

SEQ ID NO: 8828 - RNA, 19 nt, artificial
  Chemically synthesized
gaccuuugacucuuucuca

SEQ ID NO: 8829 - RNA, 19 nt, artificial
  Chemically synthesized
gugaggcuagaaauucucu

SEQ ID NO: 8830 - RNA, 19 nt, artificial
  Chemically synthesized
gagaugagugaccuuggag

SEQ ID NO: 8831 - RNA, 19 nt, artificial
  Chemically synthesized
cucacaaaccacucgaaag

SEQ ID NO: 8832 - RNA, 19 nt, artificial
  Chemically synthesized
agaccaagaacccaccaau

SEQ ID NO: 8833 - RNA, 19 nt, artificial
  Chemically synthesized
auacaccuggaagaggaau

SEQ ID NO: 8834 - RNA, 19 nt, artificial
  Chemically synthesized
gucauacaccuggaagagg

SEQ ID NO: 8835 - RNA, 19 nt, artificial
  Chemically synthesized
gccuggaguacaaaguuca

SEQ ID NO: 8836 - RNA, 19 nt, artificial
  Chemically synthesized
acauaugcagcuccaggaa

SEQ ID NO: 8837 - RNA, 19 nt, artificial
  Chemically synthesized
gaauuugaguuuguccaug

SEQ ID NO: 8838 - RNA, 19 nt, artificial
  Chemically synthesized
agugggucugaugccuuga

SEQ ID NO: 8839 - RNA, 19 nt, artificial
  Chemically synthesized
agcaaaagcgcaacuagaa

SEQ ID NO: 8840 - RNA, 19 nt, artificial
  Chemically synthesized
agugcagaugucauguaca

SEQ ID NO: 8841 - RNA, 19 nt, artificial
  Chemically synthesized
cccauaagcugguggaacu

SEQ ID NO: 8842 - RNA, 19 nt, artificial
  Chemically synthesized
agucuuucuucuccuuguu

SEQ ID NO: 8843 - RNA, 19 nt, artificial
  Chemically synthesized
gugccuguacaugauacuc

SEQ ID NO: 8844 - RNA, 19 nt, artificial
  Chemically synthesized
aaguugggcccaugaaaga

SEQ ID NO: 8845 - RNA, 19 nt, artificial
  Chemically synthesized
gcaacuagaaggacuaagg

SEQ ID NO: 8846 - RNA, 19 nt, artificial
  Chemically synthesized
gccuucuccaggaaaaaca

SEQ ID NO: 8847 - RNA, 19 nt, artificial
  Chemically synthesized
ccagauaaaguccaccuua

SEQ ID NO: 8848 - RNA, 19 nt, artificial
  Chemically synthesized
cuucuccaggaaaaacaag

SEQ ID NO: 8849 - RNA, 19 nt, artificial
  Chemically synthesized
gcuuucuuuucuggugccu

SEQ ID NO: 8850 - RNA, 19 nt, artificial
  Chemically synthesized
cuagaaggacuaagggcuu

SEQ ID NO: 8851 - RNA, 19 nt, artificial
  Chemically synthesized
uggagaggugaggcuagaa

SEQ ID NO: 8852 - RNA, 19 nt, artificial
  Chemically synthesized
ccuggaagaggaauuugag

SEQ ID NO: 8853 - RNA, 19 nt, artificial
  Chemically synthesized
cccaucgauguagcacuug

SEQ ID NO: 8854 - RNA, 19 nt, artificial
  Chemically synthesized
cuccaggaaaaacaagauu

SEQ ID NO: 8855 - RNA, 19 nt, artificial
  Chemically synthesized
ccaucuucuccugcaaugg

SEQ ID NO: 8856 - RNA, 19 nt, artificial
  Chemically synthesized
aguagucaccaggucuaua

SEQ ID NO: 8857 - RNA, 19 nt, artificial
  Chemically synthesized
gauguucagauacaaguag

SEQ ID NO: 8858 - RNA, 19 nt, artificial
  Chemically synthesized
ccaauagaacaccucaaag

SEQ ID NO: 8859 - RNA, 19 nt, artificial
  Chemically synthesized
gucucuguugauccagaua

SEQ ID NO: 8860 - RNA, 19 nt, artificial
  Chemically synthesized
gaggugaggcuagaaauuc

SEQ ID NO: 8861 - RNA, 19 nt, artificial
  Chemically synthesized
augcaggaacuggagcaga

SEQ ID NO: 8862 - RNA, 19 nt, artificial
  Chemically synthesized
gaaaaaucugaagccgaac

SEQ ID NO: 8863 - RNA, 19 nt, artificial
  Chemically synthesized
ucugcagaauggaagcaaa

SEQ ID NO: 8864 - RNA, 19 nt, artificial
  Chemically synthesized
aguugggcccaugaaagau

SEQ ID NO: 8865 - RNA, 19 nt, artificial
  Chemically synthesized
ugcaggaacuggagcagau

SEQ ID NO: 8866 - RNA, 19 nt, artificial
  Chemically synthesized
agaacccaccaauuccaga

SEQ ID NO: 8867 - RNA, 19 nt, artificial
  Chemically synthesized
ccaucuccaguuuagucag

SEQ ID NO: 8868 - RNA, 19 nt, artificial
  Chemically synthesized
gcuucauucuugaagucag

SEQ ID NO: 8869 - RNA, 19 nt, artificial
  Chemically synthesized
ccuuugacucuuucucauu

SEQ ID NO: 8870 - RNA, 19 nt, artificial
  Chemically synthesized
ugaauucuugcaggcugau

SEQ ID NO: 8871 - RNA, 19 nt, artificial
  Chemically synthesized
cucugcagaauggaagcaa

SEQ ID NO: 8872 - RNA, 19 nt, artificial
  Chemically synthesized
agagcugcuuugaauucuu

SEQ ID NO: 8873 - RNA, 19 nt, artificial
  Chemically synthesized
caaguagucaccaggucua

SEQ ID NO: 8874 - RNA, 19 nt, artificial
  Chemically synthesized
acuaccacguagcccauaa

SEQ ID NO: 8875 - RNA, 19 nt, artificial
  Chemically synthesized
ccacagaagaagaccugca

SEQ ID NO: 8876 - RNA, 19 nt, artificial
  Chemically synthesized
guccaauagaacaccucaa

SEQ ID NO: 8877 - RNA, 19 nt, artificial
  Chemically synthesized
guacaugauacucugcaga

SEQ ID NO: 8878 - RNA, 19 nt, artificial
  Chemically synthesized
cgcaacuagaaggacuaag

SEQ ID NO: 8879 - RNA, 19 nt, artificial
  Chemically synthesized
ugggcgcaauggauugaga

SEQ ID NO: 8880 - RNA, 19 nt, artificial
  Chemically synthesized
caaagaaucgcucugcaaa

SEQ ID NO: 8881 - RNA, 19 nt, artificial
  Chemically synthesized
cauagcaaaagcgcaacua

SEQ ID NO: 8882 - RNA, 19 nt, artificial
  Chemically synthesized
gcaaaagcgcaacuagaag

SEQ ID NO: 8883 - RNA, 19 nt, artificial
  Chemically synthesized
cagugagaccaagaaccca

SEQ ID NO: 8884 - RNA, 19 nt, artificial
  Chemically synthesized
ccacuuucuggaacaccuu

SEQ ID NO: 8885 - RNA, 19 nt, artificial
  Chemically synthesized
ggucagguucuccaugacu

SEQ ID NO: 8886 - RNA, 19 nt, artificial
  Chemically synthesized
ccaucgauguagcacuuga

SEQ ID NO: 8887 - RNA, 19 nt, artificial
  Chemically synthesized
gagguugacuuccaugaug

SEQ ID NO: 8888 - RNA, 19 nt, artificial
  Chemically synthesized
aggacucauacagccuguu

SEQ ID NO: 8889 - RNA, 19 nt, artificial
  Chemically synthesized
cgcuugaugaggagaugag

SEQ ID NO: 8890 - RNA, 19 nt, artificial
  Chemically synthesized
ccuggaguacaaaguucac

SEQ ID NO: 8891 - RNA, 19 nt, artificial
  Chemically synthesized
ggcaaguaugcuuucuuuu

SEQ ID NO: 8892 - RNA, 19 nt, artificial
  Chemically synthesized
gcagaugucauguacauau

SEQ ID NO: 8893 - RNA, 19 nt, artificial
  Chemically synthesized
cugcagaauggaagcaaag

SEQ ID NO: 8894 - RNA, 19 nt, artificial
  Chemically synthesized
gcugcuuugaauucuugca

SEQ ID NO: 8895 - RNA, 19 nt, artificial
  Chemically synthesized
cgcaauggauugagaccuc

SEQ ID NO: 8896 - RNA, 19 nt, artificial
  Chemically synthesized
cuucuccugcaauggucuu

SEQ ID NO: 8897 - RNA, 19 nt, artificial
  Chemically synthesized
agcgcaacuagaaggacua

SEQ ID NO: 8898 - RNA, 19 nt, artificial
  Chemically synthesized
cuucauucuugaagucagu

SEQ ID NO: 8899 - RNA, 19 nt, artificial
  Chemically synthesized
ggucuauagugaaaaaaag

SEQ ID NO: 8900 - RNA, 19 nt, artificial
  Chemically synthesized
ggugaguccaauagaacac

SEQ ID NO: 8901 - RNA, 19 nt, artificial
  Chemically synthesized
aaguagucaccaggucuau

SEQ ID NO: 8902 - RNA, 19 nt, artificial
  Chemically synthesized
gauguagcacuugauguua

SEQ ID NO: 8903 - RNA, 19 nt, artificial
  Chemically synthesized
cgcucugcaaagaaggacu

SEQ ID NO: 8904 - RNA, 19 nt, artificial
  Chemically synthesized
gaagucagugagaccaaga

SEQ ID NO: 8905 - RNA, 19 nt, artificial
  Chemically synthesized
agaaucgcucugcaaagaa

SEQ ID NO: 8906 - RNA, 19 nt, artificial
  Chemically synthesized
gguggaacuggauguucug

SEQ ID NO: 8907 - RNA, 19 nt, artificial
  Chemically synthesized
gccuguacaugauacucug

SEQ ID NO: 8908 - RNA, 19 nt, artificial
  Chemically synthesized
cgauguagcacuugauguu

SEQ ID NO: 8909 - RNA, 19 nt, artificial
  Chemically synthesized
gauguucugguccaguggu

SEQ ID NO: 8910 - RNA, 19 nt, artificial
  Chemically synthesized
cagucgaaguugaggcacu

SEQ ID NO: 8911 - RNA, 19 nt, artificial
  Chemically synthesized
caggaaaaacaagauucca

SEQ ID NO: 8912 - RNA, 19 nt, artificial
  Chemically synthesized
gacgaccuuugacucuuuc

SEQ ID NO: 8913 - RNA, 19 nt, artificial
  Chemically synthesized
agcucccagaacuggaaag

SEQ ID NO: 8914 - RNA, 19 nt, artificial
  Chemically synthesized
ggccuucaugucauucuug

SEQ ID NO: 8915 - RNA, 19 nt, artificial
  Chemically synthesized
gcaaagaaggacucuuuca

SEQ ID NO: 8916 - RNA, 19 nt, artificial
  Chemically synthesized
caucuucuccugcaauggu

SEQ ID NO: 8917 - RNA, 19 nt, artificial
  Chemically synthesized
acaugcagagcugcuuuga

SEQ ID NO: 8918 - RNA, 19 nt, artificial
  Chemically synthesized
cccagugcagaugucaugu

SEQ ID NO: 8919 - RNA, 19 nt, artificial
  Chemically synthesized
cagauacaaguagucacca

SEQ ID NO: 8920 - RNA, 19 nt, artificial
  Chemically synthesized
gccgaacuucucacaaugg

SEQ ID NO: 8921 - RNA, 19 nt, artificial
  Chemically synthesized
caggugaguccaauagaac

SEQ ID NO: 8922 - RNA, 19 nt, artificial
  Chemically synthesized
ggacucuuucacaugcaga

SEQ ID NO: 8923 - RNA, 19 nt, artificial
  Chemically synthesized
caucgauguagcacuugau

SEQ ID NO: 8924 - RNA, 19 nt, artificial
  Chemically synthesized
gacuuccaugaugcacacg

SEQ ID NO: 8925 - RNA, 19 nt, artificial
  Chemically synthesized
caggucuauagugaaaaaa

SEQ ID NO: 8926 - RNA, 19 nt, artificial
  Chemically synthesized
agaaauucucuuggaaaaa

SEQ ID NO: 8927 - RNA, 19 nt, artificial
  Chemically synthesized
ccauaaggcccaucgaugu

SEQ ID NO: 8928 - RNA, 19 nt, artificial
  Chemically synthesized
ggacuaagggcuucauagg

SEQ ID NO: 8929 - RNA, 19 nt, artificial
  Chemically synthesized
cucugcaaagaaggacucu

SEQ ID NO: 8930 - RNA, 19 nt, artificial
  Chemically synthesized
gaugaacaugaggaggagc

SEQ ID NO: 8931 - RNA, 19 nt, artificial
  Chemically synthesized
cuuggacaccuucgaucca

SEQ ID NO: 8932 - RNA, 19 nt, artificial
  Chemically synthesized
aggacaggugaguccaaua

SEQ ID NO: 8933 - RNA, 19 nt, artificial
  Chemically synthesized
aucgcucugcaaagaagga

SEQ ID NO: 8934 - RNA, 19 nt, artificial
  Chemically synthesized
guaucucagagcccuugga

SEQ ID NO: 8935 - RNA, 19 nt, artificial
  Chemically synthesized
ccuuauggagcuucauguu

SEQ ID NO: 8936 - RNA, 19 nt, artificial
  Chemically synthesized
aacccaccaauuccagaua

SEQ ID NO: 8937 - RNA, 19 nt, artificial
  Chemically synthesized
gcuugaugaggagaugagu

SEQ ID NO: 8938 - RNA, 19 nt, artificial
  Chemically synthesized
agaggugaggcuagaaauu

SEQ ID NO: 8939 - RNA, 19 nt, artificial
  Chemically synthesized
ggacucauacagccuguuu

SEQ ID NO: 8940 - RNA, 19 nt, artificial
  Chemically synthesized
gaacccaccaauuccagau

SEQ ID NO: 8941 - RNA, 19 nt, artificial
  Chemically synthesized
gauacaacaugacugcaua

SEQ ID NO: 8942 - RNA, 19 nt, artificial
  Chemically synthesized
cagaugucauguacauaug

SEQ ID NO: 8943 - RNA, 19 nt, artificial
  Chemically synthesized
aggaacuggagcagaugaa

SEQ ID NO: 8944 - RNA, 19 nt, artificial
  Chemically synthesized
accgcuggucucuguugau

SEQ ID NO: 8945 - RNA, 19 nt, artificial
  Chemically synthesized
cugguccaucuccaguuua

SEQ ID NO: 8946 - RNA, 19 nt, artificial
  Chemically synthesized
cagauaaaguccaccuuau

SEQ ID NO: 8947 - RNA, 19 nt, artificial
  Chemically synthesized
ggagcuucauguugucuug

SEQ ID NO: 8948 - RNA, 19 nt, artificial
  Chemically synthesized
gaacuggagcagaugaaca

SEQ ID NO: 8949 - RNA, 19 nt, artificial
  Chemically synthesized
cagaaguugggcccaugaa

SEQ ID NO: 8950 - RNA, 19 nt, artificial
  Chemically synthesized
acaccuggaagaggaauuu

SEQ ID NO: 8951 - RNA, 19 nt, artificial
  Chemically synthesized
caccuggaagaggaauuug

SEQ ID NO: 8952 - RNA, 19 nt, artificial
  Chemically synthesized
gcagaugaacaugaggagg

SEQ ID NO: 8953 - RNA, 19 nt, artificial
  Chemically synthesized
cuggugccuguacaugaua

SEQ ID NO: 8954 - RNA, 19 nt, artificial
  Chemically synthesized
gaagaggaauuugaguuug

SEQ ID NO: 8955 - RNA, 19 nt, artificial
  Chemically synthesized
gagccuggaguacaaaguu

SEQ ID NO: 8956 - RNA, 19 nt, artificial
  Chemically synthesized
ccuguacaugauacucugc

SEQ ID NO: 8957 - RNA, 19 nt, artificial
  Chemically synthesized
acuccucgacagccucuua

SEQ ID NO: 8958 - RNA, 19 nt, artificial
  Chemically synthesized
aagccgaacuucucacaau

SEQ ID NO: 8959 - RNA, 19 nt, artificial
  Chemically synthesized
cucuguugauccagauaaa

SEQ ID NO: 8960 - RNA, 19 nt, artificial
  Chemically synthesized
gcuggucucuguugaucca

SEQ ID NO: 8961 - RNA, 19 nt, artificial
  Chemically synthesized
gcacuugauguuacagaau

SEQ ID NO: 8962 - RNA, 19 nt, artificial
  Chemically synthesized
gugggucugaugccuugaa

SEQ ID NO: 8963 - RNA, 19 nt, artificial
  Chemically synthesized
ggcccaugaaagaugagca

SEQ ID NO: 8964 - RNA, 19 nt, artificial
  Chemically synthesized
ccaugaaagaugagcagaa

SEQ ID NO: 8965 - RNA, 19 nt, artificial
  Chemically synthesized
ggcuucauucuugaaguca

SEQ ID NO: 8966 - RNA, 19 nt, artificial
  Chemically synthesized
cagauacaacaugacugca

SEQ ID NO: 8967 - RNA, 19 nt, artificial
  Chemically synthesized
ggacaggugaguccaauag

SEQ ID NO: 8968 - RNA, 19 nt, artificial
  Chemically synthesized
cacaaaccacucgaaagac

SEQ ID NO: 8969 - RNA, 19 nt, artificial
  Chemically synthesized
gagaccaagaacccaccaa

SEQ ID NO: 8970 - RNA, 19 nt, artificial
  Chemically synthesized
ugggcccaugaaagaugag

SEQ ID NO: 8971 - RNA, 19 nt, artificial
  Chemically synthesized
gagucaaauagggcaaaga

SEQ ID NO: 8972 - RNA, 19 nt, artificial
  Chemically synthesized
acaggugaguccaauagaa

SEQ ID NO: 8973 - RNA, 19 nt, artificial
  Chemically synthesized
cacuucuaucggagucaaa

SEQ ID NO: 8974 - RNA, 19 nt, artificial
  Chemically synthesized
cccaugaaagaugagcaga

SEQ ID NO: 8975 - RNA, 19 nt, artificial
  Chemically synthesized
gggcaaguaugcuuucuuu

SEQ ID NO: 8976 - RNA, 19 nt, artificial
  Chemically synthesized
ccaguuuagucagcaggcu

SEQ ID NO: 8977 - RNA, 19 nt, artificial
  Chemically synthesized
ggaagaggaauuugaguuu

SEQ ID NO: 8978 - RNA, 19 nt, artificial
  Chemically synthesized
ggucucuguugauccagau

SEQ ID NO: 8979 - RNA, 19 nt, artificial
  Chemically synthesized
gauugagaccucggauaag

SEQ ID NO: 8980 - RNA, 19 nt, artificial
  Chemically synthesized
ccaauuccagauacaacau

SEQ ID NO: 8981 - RNA, 19 nt, artificial
  Chemically synthesized
gagaggugaggcuagaaau

SEQ ID NO: 8982 - RNA, 19 nt, artificial
  Chemically synthesized
cuaccacguagcccauaag

SEQ ID NO: 8983 - RNA, 19 nt, artificial
  Chemically synthesized
ggagaggugaggcuagaaa

SEQ ID NO: 8984 - RNA, 19 nt, artificial
  Chemically synthesized
ggaacuggauguucugguc

SEQ ID NO: 8985 - RNA, 19 nt, artificial
  Chemically synthesized
ccaccaauuccagauacaa

SEQ ID NO: 8986 - RNA, 19 nt, artificial
  Chemically synthesized
ggaaaaaucugaagccgaa

SEQ ID NO: 8987 - RNA, 19 nt, artificial
  Chemically synthesized
ggauguucagauacaagua

SEQ ID NO: 8988 - RNA, 19 nt, artificial
  Chemically synthesized
caugaaagaugagcagaag

SEQ ID NO: 8989 - RNA, 19 nt, artificial
  Chemically synthesized
gaccaagaacccaccaauu

SEQ ID NO: 8990 - RNA, 19 nt, artificial
  Chemically synthesized
gcuagaaauucucuuggaa

SEQ ID NO: 8991 - RNA, 19 nt, artificial
  Chemically synthesized
gaaucgcucugcaaagaag

SEQ ID NO: 8992 - RNA, 19 nt, artificial
  Chemically synthesized
gaagccgaacuucucacaa

SEQ ID NO: 8993 - RNA, 19 nt, artificial
  Chemically synthesized
gguccaucuccaguuuagu

SEQ ID NO: 8994 - RNA, 19 nt, artificial
  Chemically synthesized
cauaaggcccaucgaugua

SEQ ID NO: 8995 - RNA, 19 nt, artificial
  Chemically synthesized
gcucugcaaagaaggacuc

SEQ ID NO: 8996 - RNA, 19 nt, artificial
  Chemically synthesized
ccugagccuggaguacaaa

SEQ ID NO: 8997 - RNA, 19 nt, artificial
  Chemically synthesized
ggaauuugaguuuguccau

SEQ ID NO: 8998 - RNA, 19 nt, artificial
  Chemically synthesized
acaugauacucugcagaau

SEQ ID NO: 8999 - RNA, 19 nt, artificial
  Chemically synthesized
caccaggucuauagugaaa

SEQ ID NO: 9000 - RNA, 19 nt, artificial
  Chemically synthesized
gaacaccuugcuccaguca

SEQ ID NO: 9001 - RNA, 19 nt, artificial
  Chemically synthesized
gcccaugaaagaugagcag

SEQ ID NO: 9002 - RNA, 19 nt, artificial
  Chemically synthesized
ggcaaagaaucgcucugca

SEQ ID NO: 9003 - RNA, 19 nt, artificial
  Chemically synthesized
ggaacuggagcagaugaac

SEQ ID NO: 9004 - RNA, 19 nt, artificial
  Chemically synthesized
ggagucaaauagggcaaag

SEQ ID NO: 9005 - RNA, 19 nt, artificial
  Chemically synthesized
cgaugaagcugcagucgaa

SEQ ID NO: 9006 - RNA, 19 nt, artificial
  Chemically synthesized
ccauagcaaaagcgcaacu

SEQ ID NO: 9007 - RNA, 19 nt, artificial
  Chemically synthesized
ggucugaugccuugaagga

SEQ ID NO: 9008 - RNA, 19 nt, artificial
  Chemically synthesized
caggaacuggagcagauga

SEQ ID NO: 9009 - RNA, 19 nt, artificial
  Chemically synthesized
gcaaagaaucgcucugcaa

SEQ ID NO: 9010 - RNA, 19 nt, artificial
  Chemically synthesized
aaggcccaucgauguagca

SEQ ID NO: 9011 - RNA, 19 nt, artificial
  Chemically synthesized
gcugguggaacuggauguu

SEQ ID NO: 9012 - RNA, 19 nt, artificial
  Chemically synthesized
ccgcuugaugaggagauga

SEQ ID NO: 9013 - RNA, 19 nt, artificial
  Chemically synthesized
gcagagcugcuuugaauuc

SEQ ID NO: 9014 - RNA, 19 nt, artificial
  Chemically synthesized
cgacagccucuuagaacca

SEQ ID NO: 9015 - RNA, 19 nt, artificial
  Chemically synthesized
ggucugcggcuucauucuu

SEQ ID NO: 9016 - RNA, 19 nt, artificial
  Chemically synthesized
ggaggagguugacuuccau

SEQ ID NO: 9017 - RNA, 19 nt, artificial
  Chemically synthesized
gacaggugaguccaauaga

SEQ ID NO: 9018 - RNA, 19 nt, artificial
  Chemically synthesized
caugcagagcugcuuugaa

SEQ ID NO: 9019 - RNA, 19 nt, artificial
  Chemically synthesized
cacuaccacguagcccaua

SEQ ID NO: 9020 - RNA, 19 nt, artificial
  Chemically synthesized
ggccuucuccaggaaaaac

SEQ ID NO: 9021 - RNA, 19 nt, artificial
  Chemically synthesized
ggaguacaaaguucacagu

SEQ ID NO: 9022 - RNA, 19 nt, artificial
  Chemically synthesized
gcucacaaaccacucgaaa

SEQ ID NO: 9023 - RNA, 19 nt, artificial
  Chemically synthesized
guaggacaggugaguccaa

SEQ ID NO: 9024 - RNA, 19 nt, artificial
  Chemically synthesized
gaaauucucuuggaaaaau

SEQ ID NO: 9025 - RNA, 19 nt, artificial
  Chemically synthesized
ggagcagaugaacaugagg

SEQ ID NO: 9026 - RNA, 19 nt, artificial
  Chemically synthesized
ccuucuccaggaaaaacaa

SEQ ID NO: 9027 - RNA, 19 nt, artificial
  Chemically synthesized
gauacucugcagaauggaa

SEQ ID NO: 9028 - RNA, 19 nt, artificial
  Chemically synthesized
gugcagaugucauguacau

SEQ ID NO: 9029 - RNA, 19 nt, artificial
  Chemically synthesized
cccaccaauuccagauaca

SEQ ID NO: 9030 - RNA, 19 nt, artificial
  Chemically synthesized
ggugccuguacaugauacu

SEQ ID NO: 9031 - RNA, 19 nt, artificial
  Chemically synthesized
ccugguccaucuccaguuu

SEQ ID NO: 9032 - RNA, 19 nt, artificial
  Chemically synthesized
cccagacaauuauacaaau

SEQ ID NO: 9033 - RNA, 19 nt, artificial
  Chemically synthesized
acccagacaauuauacaaa

SEQ ID NO: 9034 - RNA, 19 nt, artificial
  Chemically synthesized
cuaauugacuuccacaaaa

SEQ ID NO: 9035 - RNA, 19 nt, artificial
  Chemically synthesized
agaauauugacccagacaa

SEQ ID NO: 9036 - RNA, 19 nt, artificial
  Chemically synthesized
caguacucgaucucaauuc

SEQ ID NO: 9037 - RNA, 19 nt, artificial
  Chemically synthesized
ucaguacucgaucucaauu

SEQ ID NO: 9038 - RNA, 19 nt, artificial
  Chemically synthesized
gaauauugacccagacaau

SEQ ID NO: 9039 - RNA, 19 nt, artificial
  Chemically synthesized
ccacuuuccacaucuacuu

SEQ ID NO: 9040 - RNA, 19 nt, artificial
  Chemically synthesized
gggaggauuuucacuucau

SEQ ID NO: 9041 - RNA, 19 nt, artificial
  Chemically synthesized
ggagcuauuuaggaaggcu

SEQ ID NO: 9042 - RNA, 19 nt, artificial
  Chemically synthesized
ugguccuacuaaauauacu

SEQ ID NO: 9043 - RNA, 19 nt, artificial
  Chemically synthesized
cucuaauugacuuccacaa

SEQ ID NO: 9044 - RNA, 19 nt, artificial
  Chemically synthesized
gccacgcagucaaugucua

SEQ ID NO: 9045 - RNA, 19 nt, artificial
  Chemically synthesized
ccaacaccacccuaaacca

SEQ ID NO: 9046 - RNA, 19 nt, artificial
  Chemically synthesized
ggaggacaacauagugguu

SEQ ID NO: 9047 - RNA, 19 nt, artificial
  Chemically synthesized
ccuuuuucaucgggcucuu

SEQ ID NO: 9048 - RNA, 19 nt, artificial
  Chemically synthesized
ggaggugaaaagguacaau

SEQ ID NO: 9049 - RNA, 19 nt, artificial
  Chemically synthesized
gucuaauguuuaccaugua

SEQ ID NO: 9050 - RNA, 19 nt, artificial
  Chemically synthesized
cccgucuaauguuuaccau

SEQ ID NO: 9051 - RNA, 19 nt, artificial
  Chemically synthesized
accucauccuguccaacaa

SEQ ID NO: 9052 - RNA, 19 nt, artificial
  Chemically synthesized
ucaaccucauccuguccaa

SEQ ID NO: 9053 - RNA, 19 nt, artificial
  Chemically synthesized
agacaucugaacccaacac

SEQ ID NO: 9054 - RNA, 19 nt, artificial
  Chemically synthesized
caguuuugguccuacuaaa

SEQ ID NO: 9055 - RNA, 19 nt, artificial
  Chemically synthesized
ccagauauucaguacucga

SEQ ID NO: 9056 - RNA, 19 nt, artificial
  Chemically synthesized
cccaaagugucagcaacuu

SEQ ID NO: 9057 - RNA, 19 nt, artificial
  Chemically synthesized
ugaccaagaauguagagaa

SEQ ID NO: 9058 - RNA, 19 nt, artificial
  Chemically synthesized
cuguuguccuggccauuuu

SEQ ID NO: 9059 - RNA, 19 nt, artificial
  Chemically synthesized
gccgcaaccucauaaccuu

SEQ ID NO: 9060 - RNA, 19 nt, artificial
  Chemically synthesized
ccuucauguucucuuauau

SEQ ID NO: 9061 - RNA, 19 nt, artificial
  Chemically synthesized
ggaggauuuucacuucaug

SEQ ID NO: 9062 - RNA, 19 nt, artificial
  Chemically synthesized
acgaauucuucaccaugau

SEQ ID NO: 9063 - RNA, 19 nt, artificial
  Chemically synthesized
ugccagauauucaguacuc

SEQ ID NO: 9064 - RNA, 19 nt, artificial
  Chemically synthesized
ggcaccaggaaacaaagau

SEQ ID NO: 9065 - RNA, 19 nt, artificial
  Chemically synthesized
gaggugaaaagguacaaua

SEQ ID NO: 9066 - RNA, 19 nt, artificial
  Chemically synthesized
ggucccggcaaucaucuau

SEQ ID NO: 9067 - RNA, 19 nt, artificial
  Chemically synthesized
uccuucauguucucuuaua

SEQ ID NO: 9068 - RNA, 19 nt, artificial
  Chemically synthesized
gaagacaucugaacccaac

SEQ ID NO: 9069 - RNA, 19 nt, artificial
  Chemically synthesized
gcagucccaucaucaucca

SEQ ID NO: 9070 - RNA, 19 nt, artificial
  Chemically synthesized
caagaagcuacaaaagaaa

SEQ ID NO: 9071 - RNA, 19 nt, artificial
  Chemically synthesized
gccagauauucaguacucg

SEQ ID NO: 9072 - RNA, 19 nt, artificial
  Chemically synthesized
caaaaucgaugcguugcuu

SEQ ID NO: 9073 - RNA, 19 nt, artificial
  Chemically synthesized
ggagacuauguucuacaau

SEQ ID NO: 9074 - RNA, 19 nt, artificial
  Chemically synthesized
ggcauaaauuugagguguc

SEQ ID NO: 9075 - RNA, 19 nt, artificial
  Chemically synthesized
ccggcaaucaucuauggag

SEQ ID NO: 9076 - RNA, 19 nt, artificial
  Chemically synthesized
ugcccacuuuccacaucua

SEQ ID NO: 9077 - RNA, 19 nt, artificial
  Chemically synthesized
ccaacgucuuugugaauga

SEQ ID NO: 9078 - RNA, 19 nt, artificial
  Chemically synthesized
ccaucuguguuggcguguu

SEQ ID NO: 9079 - RNA, 19 nt, artificial
  Chemically synthesized
acaccacccuaaaccacag

SEQ ID NO: 9080 - RNA, 19 nt, artificial
  Chemically synthesized
cuauuuaggaaggcuguga

SEQ ID NO: 9081 - RNA, 19 nt, artificial
  Chemically synthesized
gagcuauuuaggaaggcug

SEQ ID NO: 9082 - RNA, 19 nt, artificial
  Chemically synthesized
gaaggagcuauuuaggaag

SEQ ID NO: 9083 - RNA, 19 nt, artificial
  Chemically synthesized
gcgagaaggagcuauuuag

SEQ ID NO: 9084 - RNA, 19 nt, artificial
  Chemically synthesized
cccugacugugcuugacuu

SEQ ID NO: 9085 - RNA, 19 nt, artificial
  Chemically synthesized
gcuacugguuugagaacac

SEQ ID NO: 9086 - RNA, 19 nt, artificial
  Chemically synthesized
ccauuguccucgaccaguu

SEQ ID NO: 9087 - RNA, 19 nt, artificial
  Chemically synthesized
gggucugcaacaacuacug

SEQ ID NO: 9088 - RNA, 19 nt, artificial
  Chemically synthesized
cuggugucuacaugagaaa

SEQ ID NO: 9089 - RNA, 19 nt, artificial
  Chemically synthesized
ccuggugucuacaugagaa

SEQ ID NO: 9090 - RNA, 19 nt, artificial
  Chemically synthesized
cugccagauauucaguacu

SEQ ID NO: 9091 - RNA, 19 nt, artificial
  Chemically synthesized
ucuaauugacuuccacaaa

SEQ ID NO: 9092 - RNA, 19 nt, artificial
  Chemically synthesized
caucucuaauugacuucca

SEQ ID NO: 9093 - RNA, 19 nt, artificial
  Chemically synthesized
ccaaagaagauaaagacca

SEQ ID NO: 9094 - RNA, 19 nt, artificial
  Chemically synthesized
cagugcaugaugauuauaa

SEQ ID NO: 9095 - RNA, 19 nt, artificial
  Chemically synthesized
gcagugcaugaugauuaua

SEQ ID NO: 9096 - RNA, 19 nt, artificial
  Chemically synthesized
ccaagaauguagagaaggc

SEQ ID NO: 9097 - RNA, 19 nt, artificial
  Chemically synthesized
gcaauggcugugcuggaua

SEQ ID NO: 9098 - RNA, 19 nt, artificial
  Chemically synthesized
ccaaggcuuugaguacaag

SEQ ID NO: 9099 - RNA, 19 nt, artificial
  Chemically synthesized
gcaaucaucuauggaggug

SEQ ID NO: 9100 - RNA, 19 nt, artificial
  Chemically synthesized
gucuacaucuucucaguca

SEQ ID NO: 9101 - RNA, 19 nt, artificial
  Chemically synthesized
agacuuuccucaaccgcua

SEQ ID NO: 9102 - RNA, 19 nt, artificial
  Chemically synthesized
gcaaccucauaaccuuccu

SEQ ID NO: 9103 - RNA, 19 nt, artificial
  Chemically synthesized
cuaauguuuaccauguaug

SEQ ID NO: 9104 - RNA, 19 nt, artificial
  Chemically synthesized
ccaucaucauccagcugcu

SEQ ID NO: 9105 - RNA, 19 nt, artificial
  Chemically synthesized
agaagacaucugaacccaa

SEQ ID NO: 9106 - RNA, 19 nt, artificial
  Chemically synthesized
cuacaaaagaaacucaaag

SEQ ID NO: 9107 - RNA, 19 nt, artificial
  Chemically synthesized
gcuacaaaagaaacucaaa

SEQ ID NO: 9108 - RNA, 19 nt, artificial
  Chemically synthesized
gcaacaacuacuggauucg

SEQ ID NO: 9109 - RNA, 19 nt, artificial
  Chemically synthesized
ugcaacaacuacuggauuc

SEQ ID NO: 9110 - RNA, 19 nt, artificial
  Chemically synthesized
ggugucuacaugagaaaug

SEQ ID NO: 9111 - RNA, 19 nt, artificial
  Chemically synthesized
acaaaaucgaugcguugcu

SEQ ID NO: 9112 - RNA, 19 nt, artificial
  Chemically synthesized
cccacaucucuaauugacu

SEQ ID NO: 9113 - RNA, 19 nt, artificial
  Chemically synthesized
ugcagugcaugaugauuau

SEQ ID NO: 9114 - RNA, 19 nt, artificial
  Chemically synthesized
ccaucagaauccaccuuag

SEQ ID NO: 9115 - RNA, 19 nt, artificial
  Chemically synthesized
cccacuucaugcaccacua

SEQ ID NO: 9116 - RNA, 19 nt, artificial
  Chemically synthesized
ggcuuugaguacaagucag

SEQ ID NO: 9117 - RNA, 19 nt, artificial
  Chemically synthesized
gucccggcaaucaucuaug

SEQ ID NO: 9118 - RNA, 19 nt, artificial
  Chemically synthesized
uggccaucauguaugucuu

SEQ ID NO: 9119 - RNA, 19 nt, artificial
  Chemically synthesized
caacgucuuugugaaugau

SEQ ID NO: 9120 - RNA, 19 nt, artificial
  Chemically synthesized
gcuguuguccuggccauuu

SEQ ID NO: 9121 - RNA, 19 nt, artificial
  Chemically synthesized
agaucgugcuuacuacuau

SEQ ID NO: 9122 - RNA, 19 nt, artificial
  Chemically synthesized
agaagagguuuggcaaaaa

SEQ ID NO: 9123 - RNA, 19 nt, artificial
  Chemically synthesized
uggaaaugguauuagagau

SEQ ID NO: 9124 - RNA, 19 nt, artificial
  Chemically synthesized
uggagguggaaaugguauu

SEQ ID NO: 9125 - RNA, 19 nt, artificial
  Chemically synthesized
ggauuuucacuucaugcug

SEQ ID NO: 9126 - RNA, 19 nt, artificial
  Chemically synthesized
ugacaugggaggauuuuca

SEQ ID NO: 9127 - RNA, 19 nt, artificial
  Chemically synthesized
ugaagaaggaagcagccaa

SEQ ID NO: 9128 - RNA, 19 nt, artificial
  Chemically synthesized
acaaaagaaacucaaagag

SEQ ID NO: 9129 - RNA, 19 nt, artificial
  Chemically synthesized
cccuuagugagucugcuuc

SEQ ID NO: 9130 - RNA, 19 nt, artificial
  Chemically synthesized
agcaaagauuuuaagagga

SEQ ID NO: 9131 - RNA, 19 nt, artificial
  Chemically synthesized
ucagugccauuguccucga

SEQ ID NO: 9132 - RNA, 19 nt, artificial
  Chemically synthesized
cugcaacaacuacuggauu

SEQ ID NO: 9133 - RNA, 19 nt, artificial
  Chemically synthesized
ucagggucugcaacaacua

SEQ ID NO: 9134 - RNA, 19 nt, artificial
  Chemically synthesized
cucucagggucugcaacaa

SEQ ID NO: 9135 - RNA, 19 nt, artificial
  Chemically synthesized
ccaggucaagacauagaau

SEQ ID NO: 9136 - RNA, 19 nt, artificial
  Chemically synthesized
cccugauauucuugauguc

SEQ ID NO: 9137 - RNA, 19 nt, artificial
  Chemically synthesized
cacaucucuaauugacuuc

SEQ ID NO: 9138 - RNA, 19 nt, artificial
  Chemically synthesized
uggaggugaaaagguacaa

SEQ ID NO: 9139 - RNA, 19 nt, artificial
  Chemically synthesized
ucccaaagaagauaaagac

SEQ ID NO: 9140 - RNA, 19 nt, artificial
  Chemically synthesized
aggagacuauguucuacaa

SEQ ID NO: 9141 - RNA, 19 nt, artificial
  Chemically synthesized
gacccagacaauuauacaa

SEQ ID NO: 9142 - RNA, 19 nt, artificial
  Chemically synthesized
cccggcaaucaucuaugga

SEQ ID NO: 9143 - RNA, 19 nt, artificial
  Chemically synthesized
gcccacuuuccacaucuac

SEQ ID NO: 9144 - RNA, 19 nt, artificial
  Chemically synthesized
ucaucauccauggcagcua

SEQ ID NO: 9145 - RNA, 19 nt, artificial
  Chemically synthesized
uccuggccaucauguaugu

SEQ ID NO: 9146 - RNA, 19 nt, artificial
  Chemically synthesized
agaaguucuauuggugguu

SEQ ID NO: 9147 - RNA, 19 nt, artificial
  Chemically synthesized
cccaacgucuuugugaaug

SEQ ID NO: 9148 - RNA, 19 nt, artificial
  Chemically synthesized
cuuauaucuugcucaccau

SEQ ID NO: 9149 - RNA, 19 nt, artificial
  Chemically synthesized
gugcuuacuacuauggcuu

SEQ ID NO: 9150 - RNA, 19 nt, artificial
  Chemically synthesized
aggauuuucacuucaugcu

SEQ ID NO: 9151 - RNA, 19 nt, artificial
  Chemically synthesized
ugggaggauuuucacuuca

SEQ ID NO: 9152 - RNA, 19 nt, artificial
  Chemically synthesized
ccagagagaaaggugagag

SEQ ID NO: 9153 - RNA, 19 nt, artificial
  Chemically synthesized
gcuguuuaguucugaagag

SEQ ID NO: 9154 - RNA, 19 nt, artificial
  Chemically synthesized
gucaaccucauccugucca

SEQ ID NO: 9155 - RNA, 19 nt, artificial
  Chemically synthesized
cgagaacacaagaagcuac

SEQ ID NO: 9156 - RNA, 19 nt, artificial
  Chemically synthesized
ccaaugucuuugucuggca

SEQ ID NO: 9157 - RNA, 19 nt, artificial
  Chemically synthesized
acauccgaaauaccacccu

SEQ ID NO: 9158 - RNA, 19 nt, artificial
  Chemically synthesized
gaagcaaagauuuuaagag

SEQ ID NO: 9159 - RNA, 19 nt, artificial
  Chemically synthesized
cacagaagcaaagauuuua

SEQ ID NO: 9160 - RNA, 19 nt, artificial
  Chemically synthesized
gugaucucaacccuaaugu

SEQ ID NO: 9161 - RNA, 19 nt, artificial
  Chemically synthesized
ggcaaauucucccguacag

SEQ ID NO: 9162 - RNA, 19 nt, artificial
  Chemically synthesized
acuacuggauucgggagaa

SEQ ID NO: 9163 - RNA, 19 nt, artificial
  Chemically synthesized
ucugcaacaacuacuggau

SEQ ID NO: 9164 - RNA, 19 nt, artificial
  Chemically synthesized
agggucugcaacaacuacu

SEQ ID NO: 9165 - RNA, 19 nt, artificial
  Chemically synthesized
cucagggucugcaacaacu

SEQ ID NO: 9166 - RNA, 19 nt, artificial
  Chemically synthesized
cccuggugucuacaugaga

SEQ ID NO: 9167 - RNA, 19 nt, artificial
  Chemically synthesized
gcugagcuguaaaauauuu

SEQ ID NO: 9168 - RNA, 19 nt, artificial
  Chemically synthesized
uccauacucagcucuuuaa

SEQ ID NO: 9169 - RNA, 19 nt, artificial
  Chemically synthesized
ucgaugcguugcuuuggua

SEQ ID NO: 9170 - RNA, 19 nt, artificial
  Chemically synthesized
gugaaaagguacaauagug

SEQ ID NO: 9171 - RNA, 19 nt, artificial
  Chemically synthesized
ggugaaaagguacaauagu

SEQ ID NO: 9172 - RNA, 19 nt, artificial
  Chemically synthesized
uccaucagaauccaccuua

SEQ ID NO: 9173 - RNA, 19 nt, artificial
  Chemically synthesized
ccacuucaugcaccacuau

SEQ ID NO: 9174 - RNA, 19 nt, artificial
  Chemically synthesized
gaaugaccaagaauguaga

SEQ ID NO: 9175 - RNA, 19 nt, artificial
  Chemically synthesized
ccaaaugcuguguaagaag

SEQ ID NO: 9176 - RNA, 19 nt, artificial
  Chemically synthesized
caauggcugugcuggauac

SEQ ID NO: 9177 - RNA, 19 nt, artificial
  Chemically synthesized
caaucaucuauggagguga

SEQ ID NO: 9178 - RNA, 19 nt, artificial
  Chemically synthesized
ggcaaucaucuauggaggu

SEQ ID NO: 9179 - RNA, 19 nt, artificial
  Chemically synthesized
cggcaaucaucuauggagg

SEQ ID NO: 9180 - RNA, 19 nt, artificial
  Chemically synthesized
cccacuuuccacaucuacu

SEQ ID NO: 9181 - RNA, 19 nt, artificial
  Chemically synthesized
ucauaaccuuccugcgaga

SEQ ID NO: 9182 - RNA, 19 nt, artificial
  Chemically synthesized
gcugacaugggaggauuuu

SEQ ID NO: 9183 - RNA, 19 nt, artificial
  Chemically synthesized
ccaaggacgaauucuucac

SEQ ID NO: 9184 - RNA, 19 nt, artificial
  Chemically synthesized
ccgucuaauguuuaccaug

SEQ ID NO: 9185 - RNA, 19 nt, artificial
  Chemically synthesized
guuuaguucugaagaggaa

SEQ ID NO: 9186 - RNA, 19 nt, artificial
  Chemically synthesized
gcugcuguuuaguucugaa

SEQ ID NO: 9187 - RNA, 19 nt, artificial
  Chemically synthesized
ugcugcucaagaucccuaa

SEQ ID NO: 9188 - RNA, 19 nt, artificial
  Chemically synthesized
uuaagaggaaagaagacau

SEQ ID NO: 9189 - RNA, 19 nt, artificial
  Chemically synthesized
gcagcccaaugucuuuguc

SEQ ID NO: 9190 - RNA, 19 nt, artificial
  Chemically synthesized
cagaagcaaagauuuuaag

SEQ ID NO: 9191 - RNA, 19 nt, artificial
  Chemically synthesized
ccuccauacucagcucuuu

SEQ ID NO: 9192 - RNA, 19 nt, artificial
  Chemically synthesized
cccuccauacucagcucuu

SEQ ID NO: 9193 - RNA, 19 nt, artificial
  Chemically synthesized
cagauauucaguacucgau

SEQ ID NO: 9194 - RNA, 19 nt, artificial
  Chemically synthesized
cagcccugauauucuugau

SEQ ID NO: 9195 - RNA, 19 nt, artificial
  Chemically synthesized
ccagcccugauauucuuga

SEQ ID NO: 9196 - RNA, 19 nt, artificial
  Chemically synthesized
gagggcaccaggaaacaaa

SEQ ID NO: 9197 - RNA, 19 nt, artificial
  Chemically synthesized
cgaugcguugcuuugguau

SEQ ID NO: 9198 - RNA, 19 nt, artificial
  Chemically synthesized
guguggaggugaaaaggua

SEQ ID NO: 9199 - RNA, 19 nt, artificial
  Chemically synthesized
caaagaagauaaagaccac

SEQ ID NO: 9200 - RNA, 19 nt, artificial
  Chemically synthesized
gcaugaugauuauaagucc

SEQ ID NO: 9201 - RNA, 19 nt, artificial
  Chemically synthesized
ugcaccacuaugagaacuu

SEQ ID NO: 9202 - RNA, 19 nt, artificial
  Chemically synthesized
uggcauaaauuugaggugu

SEQ ID NO: 9203 - RNA, 19 nt, artificial
  Chemically synthesized
ucgccaccuaccagaacau

SEQ ID NO: 9204 - RNA, 19 nt, artificial
  Chemically synthesized
ggaguggcauaaauuugag

SEQ ID NO: 9205 - RNA, 19 nt, artificial
  Chemically synthesized
cugcccacuuuccacaucu

SEQ ID NO: 9206 - RNA, 19 nt, artificial
  Chemically synthesized
ucuaugcccugcucaucau

SEQ ID NO: 9207 - RNA, 19 nt, artificial
  Chemically synthesized
accucuacauccugcucua

SEQ ID NO: 9208 - RNA, 19 nt, artificial
  Chemically synthesized
ccaucauguaugucuucgc

SEQ ID NO: 9209 - RNA, 19 nt, artificial
  Chemically synthesized
ggccaucauguaugucuuc

SEQ ID NO: 9210 - RNA, 19 nt, artificial
  Chemically synthesized
cuggccaucauguaugucu

SEQ ID NO: 9211 - RNA, 19 nt, artificial
  Chemically synthesized
guccuggccaucauguaug

SEQ ID NO: 9212 - RNA, 19 nt, artificial
  Chemically synthesized
gguccuggccaucauguau

SEQ ID NO: 9213 - RNA, 19 nt, artificial
  Chemically synthesized
gaaguucuauuggugguuc

SEQ ID NO: 9214 - RNA, 19 nt, artificial
  Chemically synthesized
ccuuccugcgagagacuuu

SEQ ID NO: 9215 - RNA, 19 nt, artificial
  Chemically synthesized
cucauaaccuuccugcgag

SEQ ID NO: 9216 - RNA, 19 nt, artificial
  Chemically synthesized
cgcaaccucauaaccuucc

SEQ ID NO: 9217 - RNA, 19 nt, artificial
  Chemically synthesized
ccgcaaccucauaaccuuc

SEQ ID NO: 9218 - RNA, 19 nt, artificial
  Chemically synthesized
cuccuucauguucucuuau

SEQ ID NO: 9219 - RNA, 19 nt, artificial
  Chemically synthesized
gcuuacuacuauggcuuug

SEQ ID NO: 9220 - RNA, 19 nt, artificial
  Chemically synthesized
ugcuuacuacuauggcuuu

SEQ ID NO: 9221 - RNA, 19 nt, artificial
  Chemically synthesized
cgugcuuacuacuauggcu

SEQ ID NO: 9222 - RNA, 19 nt, artificial
  Chemically synthesized
gaagagguuuggcaaaaag

SEQ ID NO: 9223 - RNA, 19 nt, artificial
  Chemically synthesized
agguggaaaugguauuaga

SEQ ID NO: 9224 - RNA, 19 nt, artificial
  Chemically synthesized
gagguggaaaugguauuag

SEQ ID NO: 9225 - RNA, 19 nt, artificial
  Chemically synthesized
guaugaccuggaugagaau

SEQ ID NO: 9226 - RNA, 19 nt, artificial
  Chemically synthesized
ucccgucuaauguuuacca

SEQ ID NO: 9227 - RNA, 19 nt, artificial
  Chemically synthesized
uggcugacaaggauggcaa

SEQ ID NO: 9228 - RNA, 19 nt, artificial
  Chemically synthesized
aacacaagaagcuacaaaa

SEQ ID NO: 9229 - RNA, 19 nt, artificial
  Chemically synthesized
agaacacaagaagcuacaa

SEQ ID NO: 9230 - RNA, 19 nt, artificial
  Chemically synthesized
gccgagaacacaagaagcu

SEQ ID NO: 9231 - RNA, 19 nt, artificial
  Chemically synthesized
auugaagacauccgaaaua

SEQ ID NO: 9232 - RNA, 19 nt, artificial
  Chemically synthesized
ccuguucagugccauuguc

SEQ ID NO: 9233 - RNA, 19 nt, artificial
  Chemically synthesized
ggacaacauagugguugaa

SEQ ID NO: 9234 - RNA, 19 nt, artificial
  Chemically synthesized
gcaagaaguagagcacaga

SEQ ID NO: 9235 - RNA, 19 nt, artificial
  Chemically synthesized
ggcaagaaguagagcacag

SEQ ID NO: 9236 - RNA, 19 nt, artificial
  Chemically synthesized
ccaaucugaacaguaccca

SEQ ID NO: 9237 - RNA, 19 nt, artificial
  Chemically synthesized
gguuuucaaagcucccaag

SEQ ID NO: 9238 - RNA, 19 nt, artificial
  Chemically synthesized
acaaggguuuucaaagcuc

SEQ ID NO: 9239 - RNA, 19 nt, artificial
  Chemically synthesized
agaaaugccagcugucauu

SEQ ID NO: 9240 - RNA, 19 nt, artificial
  Chemically synthesized
uggugucuacaugagaaau

SEQ ID NO: 9241 - RNA, 19 nt, artificial
  Chemically synthesized
gucaagacauagaauguuu

SEQ ID NO: 9242 - RNA, 19 nt, artificial
  Chemically synthesized
ggucaagacauagaauguu

SEQ ID NO: 9243 - RNA, 19 nt, artificial
  Chemically synthesized
ccauacucagcucuuuaac

SEQ ID NO: 9244 - RNA, 19 nt, artificial
  Chemically synthesized
ugagggugaaggcaagaag

SEQ ID NO: 9245 - RNA, 19 nt, artificial
  Chemically synthesized
gggcaccaggaaacaaaga

SEQ ID NO: 9246 - RNA, 19 nt, artificial
  Chemically synthesized
gugagggugaaggcaagaa

SEQ ID NO: 9247 - RNA, 19 nt, artificial
  Chemically synthesized
ggacugacauuugagggag

SEQ ID NO: 9248 - RNA, 19 nt, artificial
  Chemically synthesized
caaguguggaggugaaaag

SEQ ID NO: 9249 - RNA, 19 nt, artificial
  Chemically synthesized
gacaaguguggaggugaaa

SEQ ID NO: 9250 - RNA, 19 nt, artificial
  Chemically synthesized
agaaaaggcaggagacuau

SEQ ID NO: 9251 - RNA, 19 nt, artificial
  Chemically synthesized
cuccaucagaauccaccuu

SEQ ID NO: 9252 - RNA, 19 nt, artificial
  Chemically synthesized
acauuuaugucacccagcu

SEQ ID NO: 9253 - RNA, 19 nt, artificial
  Chemically synthesized
uggucuucaagucauccuu

SEQ ID NO: 9254 - RNA, 19 nt, artificial
  Chemically synthesized
cuggaagagugagggugaa

SEQ ID NO: 9255 - RNA, 19 nt, artificial
  Chemically synthesized
ucaucuauggaggugacaa

SEQ ID NO: 9256 - RNA, 19 nt, artificial
  Chemically synthesized
ugacccaccaccucuacau

SEQ ID NO: 9257 - RNA, 19 nt, artificial
  Chemically synthesized
ccauguucuuuccgacgug

SEQ ID NO: 9258 - RNA, 19 nt, artificial
  Chemically synthesized
caaccgcuaugugccuuuu

SEQ ID NO: 9259 - RNA, 19 nt, artificial
  Chemically synthesized
gacuuuccucaaccgcuau

SEQ ID NO: 9260 - RNA, 19 nt, artificial
  Chemically synthesized
caaccucauaaccuuccug

SEQ ID NO: 9261 - RNA, 19 nt, artificial
  Chemically synthesized
ucuccuucauguucucuua

SEQ ID NO: 9262 - RNA, 19 nt, artificial
  Chemically synthesized
gucuccuucauguucucuu

SEQ ID NO: 9263 - RNA, 19 nt, artificial
  Chemically synthesized
ccagcgucuccuucauguu

SEQ ID NO: 9264 - RNA, 19 nt, artificial
  Chemically synthesized
caugggaggauuuucacuu

SEQ ID NO: 9265 - RNA, 19 nt, artificial
  Chemically synthesized
agcugacaugggaggauuu

SEQ ID NO: 9266 - RNA, 19 nt, artificial
  Chemically synthesized
gcuaugacggcugguuuaa

SEQ ID NO: 9267 - RNA, 19 nt, artificial
  Chemically synthesized
gucccaucaucauccagcu

SEQ ID NO: 9268 - RNA, 19 nt, artificial
  Chemically synthesized
caaaagaaacucaaagaga

SEQ ID NO: 9269 - RNA, 19 nt, artificial
  Chemically synthesized
acacaagaagcuacaaaag

SEQ ID NO: 9270 - RNA, 19 nt, artificial
  Chemically synthesized
gagaacacaagaagcuaca

SEQ ID NO: 9271 - RNA, 19 nt, artificial
  Chemically synthesized
ccgagaacacaagaagcua

SEQ ID NO: 9272 - RNA, 19 nt, artificial
  Chemically synthesized
gacugugcuugacuucuuu

SEQ ID NO: 9273 - RNA, 19 nt, artificial
  Chemically synthesized
caaugucuuugucuggcau

SEQ ID NO: 9274 - RNA, 19 nt, artificial
  Chemically synthesized
cccuguucagugccauugu

SEQ ID NO: 9275 - RNA, 19 nt, artificial
  Chemically synthesized
cuaaaaagcugagcuguaa

SEQ ID NO: 9276 - RNA, 19 nt, artificial
  Chemically synthesized
ugcaucuacuggagugguc

SEQ ID NO: 9277 - RNA, 19 nt, artificial
  Chemically synthesized
ccucucugcaucuacugga

SEQ ID NO: 9278 - RNA, 19 nt, artificial
  Chemically synthesized
ugcguugcuuugguauuug

SEQ ID NO: 9279 - RNA, 19 nt, artificial
  Chemically synthesized
guggaggugaaaagguaca

SEQ ID NO: 9280 - RNA, 19 nt, artificial
  Chemically synthesized
acaaguguggaggugaaaa

SEQ ID NO: 9281 - RNA, 19 nt, artificial
  Chemically synthesized
ugcaugaugauuauaaguc

SEQ ID NO: 9282 - RNA, 19 nt, artificial
  Chemically synthesized
agugcaugaugauuauaag

SEQ ID NO: 9283 - RNA, 19 nt, artificial
  Chemically synthesized
caaaugagaaaaggcagga

SEQ ID NO: 9284 - RNA, 19 nt, artificial
  Chemically synthesized
ugccuucucuucugugcac

SEQ ID NO: 9285 - RNA, 19 nt, artificial
  Chemically synthesized
ccacuaugagaacuucuga

SEQ ID NO: 9286 - RNA, 19 nt, artificial
  Chemically synthesized
agaauguagagaaggccug

SEQ ID NO: 9287 - RNA, 19 nt, artificial
  Chemically synthesized
acaucgcuguguaugagug

SEQ ID NO: 9288 - RNA, 19 nt, artificial
  Chemically synthesized
guggcauaaauuugaggug

SEQ ID NO: 9289 - RNA, 19 nt, artificial
  Chemically synthesized
gagugaccuaccugcaauu

SEQ ID NO: 9290 - RNA, 19 nt, artificial
  Chemically synthesized
ccucuacauccugcucuau

SEQ ID NO: 9291 - RNA, 19 nt, artificial
  Chemically synthesized
gccaucauguaugucuucg

SEQ ID NO: 9292 - RNA, 19 nt, artificial
  Chemically synthesized
agguaugacaggugugcuu

SEQ ID NO: 9293 - RNA, 19 nt, artificial
  Chemically synthesized
cagaaguucuauugguggu

SEQ ID NO: 9294 - RNA, 19 nt, artificial
  Chemically synthesized
ucuuauaucuugcucacca

SEQ ID NO: 9295 - RNA, 19 nt, artificial
  Chemically synthesized
cagaucgugcuuacuacua

SEQ ID NO: 9296 - RNA, 19 nt, artificial
  Chemically synthesized
gcaaucuucucggccaucu

SEQ ID NO: 9297 - RNA, 19 nt, artificial
  Chemically synthesized
aggcgcugcaagagaagau

SEQ ID NO: 9298 - RNA, 19 nt, artificial
  Chemically synthesized
cagagagaaaggugagagu

SEQ ID NO: 9299 - RNA, 19 nt, artificial
  Chemically synthesized
uguucucucuggcugacaa

SEQ ID NO: 9300 - RNA, 19 nt, artificial
  Chemically synthesized
acauguuuguggaguccau

SEQ ID NO: 9301 - RNA, 19 nt, artificial
  Chemically synthesized
cugcuguuuaguucugaag

SEQ ID NO: 9302 - RNA, 19 nt, artificial
  Chemically synthesized
gaaggcaagaaguagagca

SEQ ID NO: 9303 - RNA, 19 nt, artificial
  Chemically synthesized
agggugaaggcaagaagua

SEQ ID NO: 9304 - RNA, 19 nt, artificial
  Chemically synthesized
ccuagaagcaaccacugau

SEQ ID NO: 9305 - RNA, 19 nt, artificial
  Chemically synthesized
aagcugagcuguaaaauau

SEQ ID NO: 9306 - RNA, 19 nt, artificial
  Chemically synthesized
cugauauucuugaugucac

SEQ ID NO: 9307 - RNA, 19 nt, artificial
  Chemically synthesized
agcccugauauucuugaug

SEQ ID NO: 9308 - RNA, 19 nt, artificial
  Chemically synthesized
cugugaugcuuagaaccug

SEQ ID NO: 9309 - RNA, 19 nt, artificial
  Chemically synthesized
augcguugcuuugguauuu

SEQ ID NO: 9310 - RNA, 19 nt, artificial
  Chemically synthesized
caggagacuauguucuaca

SEQ ID NO: 9311 - RNA, 19 nt, artificial
  Chemically synthesized
ucgcuguguaugaguggcu

SEQ ID NO: 9312 - RNA, 19 nt, artificial
  Chemically synthesized
ucauguaugucuucgccuc

SEQ ID NO: 9313 - RNA, 19 nt, artificial
  Chemically synthesized
cagucaaugucuacaucuu

SEQ ID NO: 9314 - RNA, 19 nt, artificial
  Chemically synthesized
acgguguguaucaggcucu

SEQ ID NO: 9315 - RNA, 19 nt, artificial
  Chemically synthesized
acaagcgcuucguggagaa

SEQ ID NO: 9316 - RNA, 19 nt, artificial
  Chemically synthesized
caagagaagaugcagcgag

SEQ ID NO: 9317 - RNA, 19 nt, artificial
  Chemically synthesized
ggacugaagaagagguuug

SEQ ID NO: 9318 - RNA, 19 nt, artificial
  Chemically synthesized
accuggugcugcuguuuag

SEQ ID NO: 9319 - RNA, 19 nt, artificial
  Chemically synthesized
ugaccuggugcugcuguuu

SEQ ID NO: 9320 - RNA, 19 nt, artificial
  Chemically synthesized
ucaccaucauugcucucug

SEQ ID NO: 9321 - RNA, 19 nt, artificial
  Chemically synthesized
gccaucaccaucauugcuc

SEQ ID NO: 9322 - RNA, 19 nt, artificial
  Chemically synthesized
gucuuugucuggcauaaag

SEQ ID NO: 9323 - RNA, 19 nt, artificial
  Chemically synthesized
agcccaaugucuuugucug

SEQ ID NO: 9324 - RNA, 19 nt, artificial
  Chemically synthesized
gcaaauucucccguacaga

SEQ ID NO: 9325 - RNA, 19 nt, artificial
  Chemically synthesized
caagaaguagagcacagaa

SEQ ID NO: 9326 - RNA, 19 nt, artificial
  Chemically synthesized
caggucaagacauagaaug

SEQ ID NO: 9327 - RNA, 19 nt, artificial
  Chemically synthesized
agcugagcuguaaaauauu

SEQ ID NO: 9328 - RNA, 19 nt, artificial
  Chemically synthesized
ccuaaaaagcugagcugua

SEQ ID NO: 9329 - RNA, 19 nt, artificial
  Chemically synthesized
cuccauacucagcucuuua

SEQ ID NO: 9330 - RNA, 19 nt, artificial
  Chemically synthesized
ugcuuggacugacauuuga

SEQ ID NO: 9331 - RNA, 19 nt, artificial
  Chemically synthesized
gcuuugguauuugcuugga

SEQ ID NO: 9332 - RNA, 19 nt, artificial
  Chemically synthesized
aaaagguacaauagugcuu

SEQ ID NO: 9333 - RNA, 19 nt, artificial
  Chemically synthesized
accacuaugagaacuucug

SEQ ID NO: 9334 - RNA, 19 nt, artificial
  Chemically synthesized
ccuucuucaacucccugca

SEQ ID NO: 9335 - RNA, 19 nt, artificial
  Chemically synthesized
cuggucuucaagucauccu

SEQ ID NO: 9336 - RNA, 19 nt, artificial
  Chemically synthesized
ugaccuaccugcaauucca

SEQ ID NO: 9337 - RNA, 19 nt, artificial
  Chemically synthesized
ucucuuauaucuugcucac

SEQ ID NO: 9338 - RNA, 19 nt, artificial
  Chemically synthesized
ucguguguguggcaaucuu

SEQ ID NO: 9339 - RNA, 19 nt, artificial
  Chemically synthesized
aagaagagguuuggcaaaa

SEQ ID NO: 9340 - RNA, 19 nt, artificial
  Chemically synthesized
gaagaagagguuuggcaaa

SEQ ID NO: 9341 - RNA, 19 nt, artificial
  Chemically synthesized
cugugucaaagguggaggu

SEQ ID NO: 9342 - RNA, 19 nt, artificial
  Chemically synthesized
cugguggucuucaugaaag

SEQ ID NO: 9343 - RNA, 19 nt, artificial
  Chemically synthesized
cuggugcugcuguuuaguu

SEQ ID NO: 9344 - RNA, 19 nt, artificial
  Chemically synthesized
guuuugccaucaccaucau

SEQ ID NO: 9345 - RNA, 19 nt, artificial
  Chemically synthesized
ugcagcccaaugucuuugu

SEQ ID NO: 9346 - RNA, 19 nt, artificial
  Chemically synthesized
agauuucggaguuggagga

SEQ ID NO: 9347 - RNA, 19 nt, artificial
  Chemically synthesized
cccaaucugaacaguaccc

SEQ ID NO: 9348 - RNA, 19 nt, artificial
  Chemically synthesized
cuagaagcaaccacugaug

SEQ ID NO: 9349 - RNA, 19 nt, artificial
  Chemically synthesized
ucaagacauagaauguuuc

SEQ ID NO: 9350 - RNA, 19 nt, artificial
  Chemically synthesized
gugaugcuuagaaccugga

SEQ ID NO: 9351 - RNA, 19 nt, artificial
  Chemically synthesized
cacuaugagaacuucugag

SEQ ID NO: 9352 - RNA, 19 nt, artificial
  Chemically synthesized
cuauggaggugacaagcug

SEQ ID NO: 9353 - RNA, 19 nt, artificial
  Chemically synthesized
caccucuacauccugcucu

SEQ ID NO: 9354 - RNA, 19 nt, artificial
  Chemically synthesized
accauguucuuuccgacgu

SEQ ID NO: 9355 - RNA, 19 nt, artificial
  Chemically synthesized
agagaaaggugagagugca

SEQ ID NO: 9356 - RNA, 19 nt, artificial
  Chemically synthesized
acaucguguguguggcaau

SEQ ID NO: 9357 - RNA, 19 nt, artificial
  Chemically synthesized
gagucuauguuccgggagu

SEQ ID NO: 9358 - RNA, 19 nt, artificial
  Chemically synthesized
guggucuucaugaaaggcu

SEQ ID NO: 9359 - RNA, 19 nt, artificial
  Chemically synthesized
uguuuguggaguccauguu

SEQ ID NO: 9360 - RNA, 19 nt, artificial
  Chemically synthesized
cagacaccuuuuugcucag

SEQ ID NO: 9361 - RNA, 19 nt, artificial
  Chemically synthesized
ucagacaccuuuuugcuca

SEQ ID NO: 9362 - RNA, 19 nt, artificial
  Chemically synthesized
gccuucccuuagugagucu

SEQ ID NO: 9363 - RNA, 19 nt, artificial
  Chemically synthesized
cugugcuugacuucuuuga

SEQ ID NO: 9364 - RNA, 19 nt, artificial
  Chemically synthesized
cucccguacagacuaugug

SEQ ID NO: 9365 - RNA, 19 nt, artificial
  Chemically synthesized
ccagauuucggaguuggag

SEQ ID NO: 9366 - RNA, 19 nt, artificial
  Chemically synthesized
gagaaaugccagcugucau

SEQ ID NO: 9367 - RNA, 19 nt, artificial
  Chemically synthesized
aaaaagcugagcuguaaaa

SEQ ID NO: 9368 - RNA, 19 nt, artificial
  Chemically synthesized
cuugaugucaccagugaua

SEQ ID NO: 9369 - RNA, 19 nt, artificial
  Chemically synthesized
ccugauauucuugauguca

SEQ ID NO: 9370 - RNA, 19 nt, artificial
  Chemically synthesized
uggacugacauuugaggga

SEQ ID NO: 9371 - RNA, 19 nt, artificial
  Chemically synthesized
guauuugcuuggacugaca

SEQ ID NO: 9372 - RNA, 19 nt, artificial
  Chemically synthesized
aaguccaccuguuuaucaa

SEQ ID NO: 9373 - RNA, 19 nt, artificial
  Chemically synthesized
agagugagggugaaggcaa

SEQ ID NO: 9374 - RNA, 19 nt, artificial
  Chemically synthesized
ugauuauaaguccaccugu

SEQ ID NO: 9375 - RNA, 19 nt, artificial
  Chemically synthesized
cuucucuucugugcaccua

SEQ ID NO: 9376 - RNA, 19 nt, artificial
  Chemically synthesized
agcccuucuucaacucccu

SEQ ID NO: 9377 - RNA, 19 nt, artificial
  Chemically synthesized
agaaagugcugaaccggag

SEQ ID NO: 9378 - RNA, 19 nt, artificial
  Chemically synthesized
ccuuugccuccauccucaa

SEQ ID NO: 9379 - RNA, 19 nt, artificial
  Chemically synthesized
ccuugauggaccguuugga

SEQ ID NO: 9380 - RNA, 19 nt, artificial
  Chemically synthesized
cuaccauguucuuuccgac

SEQ ID NO: 9381 - RNA, 19 nt, artificial
  Chemically synthesized
gcuaccauguucuuuccga

SEQ ID NO: 9382 - RNA, 19 nt, artificial
  Chemically synthesized
uugugaaugauggguccaa

SEQ ID NO: 9383 - RNA, 19 nt, artificial
  Chemically synthesized
guguguaucaggcucugga

SEQ ID NO: 9384 - RNA, 19 nt, artificial
  Chemically synthesized
gcugucgagucucguucau

SEQ ID NO: 9385 - RNA, 19 nt, artificial
  Chemically synthesized
uggucuucaugaaaggcuc

SEQ ID NO: 9386 - RNA, 19 nt, artificial
  Chemically synthesized
ccaggacauguuuguggag

SEQ ID NO: 9387 - RNA, 19 nt, artificial
  Chemically synthesized
uggugcugcuguuuaguuc

SEQ ID NO: 9388 - RNA, 19 nt, artificial
  Chemically synthesized
ucauugcucucugcugccu

SEQ ID NO: 9389 - RNA, 19 nt, artificial
  Chemically synthesized
ugucuuugucuggcauaaa

SEQ ID NO: 9390 - RNA, 19 nt, artificial
  Chemically synthesized
augucuuugucuggcauaa

SEQ ID NO: 9391 - RNA, 19 nt, artificial
  Chemically synthesized
ccugcagcccaaugucuuu

SEQ ID NO: 9392 - RNA, 19 nt, artificial
  Chemically synthesized
aggaggugaaugagcugcu

SEQ ID NO: 9393 - RNA, 19 nt, artificial
  Chemically synthesized
cagcugucauuuccggaag

SEQ ID NO: 9394 - RNA, 19 nt, artificial
  Chemically synthesized
ucgggcucuuuccuaaaaa

SEQ ID NO: 9395 - RNA, 19 nt, artificial
  Chemically synthesized
gguauuugcuuggacugac

SEQ ID NO: 9396 - RNA, 19 nt, artificial
  Chemically synthesized
aaaggcaggagacuauguu

SEQ ID NO: 9397 - RNA, 19 nt, artificial
  Chemically synthesized
ggagaauauugacccagac

SEQ ID NO: 9398 - RNA, 19 nt, artificial
  Chemically synthesized
ugaagaagagguuuggcaa

SEQ ID NO: 9399 - RNA, 19 nt, artificial
  Chemically synthesized
cugaagaagagguuuggca

SEQ ID NO: 9400 - RNA, 19 nt, artificial
  Chemically synthesized
ggagcucuucugacuggau

SEQ ID NO: 9401 - RNA, 19 nt, artificial
  Chemically synthesized
caggacauguuuguggagu

SEQ ID NO: 9402 - RNA, 19 nt, artificial
  Chemically synthesized
ggaauuugugguggccucu

SEQ ID NO: 9403 - RNA, 19 nt, artificial
  Chemically synthesized
aggcaggagacuauguucu

SEQ ID NO: 9404 - RNA, 19 nt, artificial
  Chemically synthesized
gagaacuucugagccuguc

SEQ ID NO: 9405 - RNA, 19 nt, artificial
  Chemically synthesized
uggagaucagcguggugaa

SEQ ID NO: 9406 - RNA, 19 nt, artificial
  Chemically synthesized
acauugcacagaccacccu

SEQ ID NO: 9407 - RNA, 19 nt, artificial
  Chemically synthesized
uggagguggagguggaaau

SEQ ID NO: 9408 - RNA, 19 nt, artificial
  Chemically synthesized
cggaguuggaggacaacau

SEQ ID NO: 9409 - RNA, 19 nt, artificial
  Chemically synthesized
uccacaaaaucgaugcguu

SEQ ID NO: 9410 - RNA, 19 nt, artificial
  Chemically synthesized
gggagaauauugacccaga

SEQ ID NO: 9411 - RNA, 19 nt, artificial
  Chemically synthesized
ccaggaaugaccaagaaug

SEQ ID NO: 9412 - RNA, 19 nt, artificial
  Chemically synthesized
ucguucaucacucggacac

SEQ ID NO: 9413 - RNA, 19 nt, artificial
  Chemically synthesized
gguggagguggaaauggua

SEQ ID NO: 9414 - RNA, 19 nt, artificial
  Chemically synthesized
gcaauggcuaccuguccuu

SEQ ID NO: 9415 - RNA, 19 nt, artificial
  Chemically synthesized
aggaaagaagacaucugaa

SEQ ID NO: 9416 - RNA, 19 nt, artificial
  Chemically synthesized
cuggagugguggccuauuu

SEQ ID NO: 9417 - RNA, 19 nt, artificial
  Chemically synthesized
agaggaaagaagacaucug

SEQ ID NO: 9418 - RNA, 19 nt, artificial
  Chemically synthesized
ggaacuggagugaucucaa

SEQ ID NO: 9419 - RNA, 19 nt, artificial
  Chemically synthesized
ggaguuggaggacaacaua

SEQ ID NO: 9420 - RNA, 19 nt, artificial
  Chemically synthesized
ccagugcagaagcugugau

SEQ ID NO: 9421 - RNA, 19 nt, artificial
  Chemically synthesized
ccagucaggaucucccaaa

SEQ ID NO: 9422 - RNA, 19 nt, artificial
  Chemically synthesized
gcacauuuaugucacccag

SEQ ID NO: 9423 - RNA, 19 nt, artificial
  Chemically synthesized
ggcagccaaaugcugugua

SEQ ID NO: 9424 - RNA, 19 nt, artificial
  Chemically synthesized
gaguacaagucaggacagu

SEQ ID NO: 9425 - RNA, 19 nt, artificial
  Chemically synthesized
cccaaggcuuugaguacaa

SEQ ID NO: 9426 - RNA, 19 nt, artificial
  Chemically synthesized
cgcagucaaugucuacauc

SEQ ID NO: 9427 - RNA, 19 nt, artificial
  Chemically synthesized
acgcagucaaugucuacau

SEQ ID NO: 9428 - RNA, 19 nt, artificial
  Chemically synthesized
agguggagguggaaauggu

SEQ ID NO: 9429 - RNA, 19 nt, artificial
  Chemically synthesized
ugccuucccuuagugaguc

SEQ ID NO: 9430 - RNA, 19 nt, artificial
  Chemically synthesized
ccaguuuugguccuacuaa

SEQ ID NO: 9431 - RNA, 19 nt, artificial
  Chemically synthesized
aucgggcucuuuccuaaaa

SEQ ID NO: 9432 - RNA, 19 nt, artificial
  Chemically synthesized
cucugccagauauucagua

SEQ ID NO: 9433 - RNA, 19 nt, artificial
  Chemically synthesized
aaaaggagcagcccuacuu

SEQ ID NO: 9434 - RNA, 19 nt, artificial
  Chemically synthesized
ggaguauacaggauaccgu

SEQ ID NO: 9435 - RNA, 19 nt, artificial
  Chemically synthesized
gcagucaaugucuacaucu

SEQ ID NO: 9436 - RNA, 19 nt, artificial
  Chemically synthesized
gcagcucugugucaaaggu

SEQ ID NO: 9437 - RNA, 19 nt, artificial
  Chemically synthesized
cuucuucagacaccuuuuu

SEQ ID NO: 9438 - RNA, 19 nt, artificial
  Chemically synthesized
cugcugcucaagaucccua

SEQ ID NO: 9439 - RNA, 19 nt, artificial
  Chemically synthesized
ggucgcuguuaucaacauu

SEQ ID NO: 9440 - RNA, 19 nt, artificial
  Chemically synthesized
uccggaagguccugaacaa

SEQ ID NO: 9441 - RNA, 19 nt, artificial
  Chemically synthesized
ggugaaggcaagaaguaga

SEQ ID NO: 9442 - RNA, 19 nt, artificial
  Chemically synthesized
caaauccaguuuugguccu

SEQ ID NO: 9443 - RNA, 19 nt, artificial
  Chemically synthesized
ugaugugauuucuaccaaa

SEQ ID NO: 9444 - RNA, 19 nt, artificial
  Chemically synthesized
guacauguuuuaccaccac

SEQ ID NO: 9445 - RNA, 19 nt, artificial
  Chemically synthesized
ucagcucuuuaacuuuucu

SEQ ID NO: 9446 - RNA, 19 nt, artificial
  Chemically synthesized
ggaucucccaaagaagaua

SEQ ID NO: 9447 - RNA, 19 nt, artificial
  Chemically synthesized
cccggaguauacaggauac

SEQ ID NO: 9448 - RNA, 19 nt, artificial
  Chemically synthesized
caauugcagugcaugauga

SEQ ID NO: 9449 - RNA, 19 nt, artificial
  Chemically synthesized
uacaauugcagugcaugau

SEQ ID NO: 9450 - RNA, 19 nt, artificial
  Chemically synthesized
uucuacaauugcagugcau

SEQ ID NO: 9451 - RNA, 19 nt, artificial
  Chemically synthesized
agaaaacacucccggagua

SEQ ID NO: 9452 - RNA, 19 nt, artificial
  Chemically synthesized
accagaacaucgcugugua

SEQ ID NO: 9453 - RNA, 19 nt, artificial
  Chemically synthesized
ccgcuaugugccuuuugau

SEQ ID NO: 9454 - RNA, 19 nt, artificial
  Chemically synthesized
ccaaaagcugcagcaguac

SEQ ID NO: 9455 - RNA, 19 nt, artificial
  Chemically synthesized
gagcucuucugacuggauc

SEQ ID NO: 9456 - RNA, 19 nt, artificial
  Chemically synthesized
cucaggugcuggacaucaa

SEQ ID NO: 9457 - RNA, 19 nt, artificial
  Chemically synthesized
ugagcgagaaggagcuauu

SEQ ID NO: 9458 - RNA, 19 nt, artificial
  Chemically synthesized
ccaucaccaucauugcucu

SEQ ID NO: 9459 - RNA, 19 nt, artificial
  Chemically synthesized
acgugcuggucgcuguuau

SEQ ID NO: 9460 - RNA, 19 nt, artificial
  Chemically synthesized
cgcuacugguuugagaaca

SEQ ID NO: 9461 - RNA, 19 nt, artificial
  Chemically synthesized
aggacaacauagugguuga

SEQ ID NO: 9462 - RNA, 19 nt, artificial
  Chemically synthesized
gugaaggcaagaaguagag

SEQ ID NO: 9463 - RNA, 19 nt, artificial
  Chemically synthesized
agguccugaacaaggguuu

SEQ ID NO: 9464 - RNA, 19 nt, artificial
  Chemically synthesized
aaauccaguuuugguccua

SEQ ID NO: 9465 - RNA, 19 nt, artificial
  Chemically synthesized
cgggcucuuuccuaaaaag

SEQ ID NO: 9466 - RNA, 19 nt, artificial
  Chemically synthesized
cagucaggaucucccaaag

SEQ ID NO: 9467 - RNA, 19 nt, artificial
  Chemically synthesized
ccaauauugggagaauauu

SEQ ID NO: 9468 - RNA, 19 nt, artificial
  Chemically synthesized
cccaauauugggagaauau

SEQ ID NO: 9469 - RNA, 19 nt, artificial
  Chemically synthesized
gcuuccaguauccugccuu

SEQ ID NO: 9470 - RNA, 19 nt, artificial
  Chemically synthesized
ccaccaugcuauacaucug

SEQ ID NO: 9471 - RNA, 19 nt, artificial
  Chemically synthesized
gcagccaaaugcuguguaa

SEQ ID NO: 9472 - RNA, 19 nt, artificial
  Chemically synthesized
ucaaccgcuaugugccuuu

SEQ ID NO: 9473 - RNA, 19 nt, artificial
  Chemically synthesized
gcgucuccuucauguucuc

SEQ ID NO: 9474 - RNA, 19 nt, artificial
  Chemically synthesized
cuggacugaagaagagguu

SEQ ID NO: 9475 - RNA, 19 nt, artificial
  Chemically synthesized
aggugguggagucuauguu

SEQ ID NO: 9476 - RNA, 19 nt, artificial
  Chemically synthesized
ggaugagaauggcuuccuc

SEQ ID NO: 9477 - RNA, 19 nt, artificial
  Chemically synthesized
uaccauguaugaccuggau

SEQ ID NO: 9478 - RNA, 19 nt, artificial
  Chemically synthesized
ugcagcaggucaaccucau

SEQ ID NO: 9479 - RNA, 19 nt, artificial
  Chemically synthesized
agcuacaaaagaaacucaa

SEQ ID NO: 9480 - RNA, 19 nt, artificial
  Chemically synthesized
gagucugcuucucucugga

SEQ ID NO: 9481 - RNA, 19 nt, artificial
  Chemically synthesized
ccucaaccuaagcagcuca

SEQ ID NO: 9482 - RNA, 19 nt, artificial
  Chemically synthesized
gguuugagaacaccaggaa

SEQ ID NO: 9483 - RNA, 19 nt, artificial
  Chemically synthesized
ccuggcaaauucucccgua

SEQ ID NO: 9484 - RNA, 19 nt, artificial
  Chemically synthesized
ggguuuucaaagcucccaa

SEQ ID NO: 9485 - RNA, 19 nt, artificial
  Chemically synthesized
gaugugauuucuaccaaau

SEQ ID NO: 9486 - RNA, 19 nt, artificial
  Chemically synthesized
cccaggucaagacauagaa

SEQ ID NO: 9487 - RNA, 19 nt, artificial
  Chemically synthesized
cagcucuuuaacuuuucuu

SEQ ID NO: 9488 - RNA, 19 nt, artificial
  Chemically synthesized
cucagcucuuuaacuuuuc

SEQ ID NO: 9489 - RNA, 19 nt, artificial
  Chemically synthesized
acucagcucuuuaacuuuu

SEQ ID NO: 9490 - RNA, 19 nt, artificial
  Chemically synthesized
gaagcugugaugcuuagaa

SEQ ID NO: 9491 - RNA, 19 nt, artificial
  Chemically synthesized
cccagcuuccugcagaaaa

SEQ ID NO: 9492 - RNA, 19 nt, artificial
  Chemically synthesized
cucaggaccaccaugcuau

SEQ ID NO: 9493 - RNA, 19 nt, artificial
  Chemically synthesized
uggugucugugcacauuua

SEQ ID NO: 9494 - RNA, 19 nt, artificial
  Chemically synthesized
ccagaacaucgcuguguau

SEQ ID NO: 9495 - RNA, 19 nt, artificial
  Chemically synthesized
ucaggaguggcauaaauuu

SEQ ID NO: 9496 - RNA, 19 nt, artificial
  Chemically synthesized
ccacaucuacuuccugguc

SEQ ID NO: 9497 - RNA, 19 nt, artificial
  Chemically synthesized
gcagcuaugcucugaucca

SEQ ID NO: 9498 - RNA, 19 nt, artificial
  Chemically synthesized
accgcuaugugccuuuuga

SEQ ID NO: 9499 - RNA, 19 nt, artificial
  Chemically synthesized
gaggcuuccuagcccaaaa

SEQ ID NO: 9500 - RNA, 19 nt, artificial
  Chemically synthesized
acaaggaggagcugacaug

SEQ ID NO: 9501 - RNA, 19 nt, artificial
  Chemically synthesized
ccaacaacugccuguccaa

SEQ ID NO: 9502 - RNA, 19 nt, artificial
  Chemically synthesized
agaauggcuuccucuccaa

SEQ ID NO: 9503 - RNA, 19 nt, artificial
  Chemically synthesized
ccugguggucuucaugaaa

SEQ ID NO: 9504 - RNA, 19 nt, artificial
  Chemically synthesized
ugcucaagaucccuaagga

SEQ ID NO: 9505 - RNA, 19 nt, artificial
  Chemically synthesized
cuguccaacaaccgaggau

SEQ ID NO: 9506 - RNA, 19 nt, artificial
  Chemically synthesized
caaccuaagcagcucacaa

SEQ ID NO: 9507 - RNA, 19 nt, artificial
  Chemically synthesized
cucaaccuaagcagcucac

SEQ ID NO: 9508 - RNA, 19 nt, artificial
  Chemically synthesized
agagcacagaagcaaagau

SEQ ID NO: 9509 - RNA, 19 nt, artificial
  Chemically synthesized
acaacauagugguugaaga

SEQ ID NO: 9510 - RNA, 19 nt, artificial
  Chemically synthesized
gaggacaacauagugguug

SEQ ID NO: 9511 - RNA, 19 nt, artificial
  Chemically synthesized
guccugaacaaggguuuuc

SEQ ID NO: 9512 - RNA, 19 nt, artificial
  Chemically synthesized
gguccugaacaaggguuuu

SEQ ID NO: 9513 - RNA, 19 nt, artificial
  Chemically synthesized
gucuacaugagaaaugcca

SEQ ID NO: 9514 - RNA, 19 nt, artificial
  Chemically synthesized
gcaccaggaaacaaagaug

SEQ ID NO: 9515 - RNA, 19 nt, artificial
  Chemically synthesized
cagaagcugugaugcuuag

SEQ ID NO: 9516 - RNA, 19 nt, artificial
  Chemically synthesized
gcagaagcugugaugcuua

SEQ ID NO: 9517 - RNA, 19 nt, artificial
  Chemically synthesized
ccggaguauacaggauacc

SEQ ID NO: 9518 - RNA, 19 nt, artificial
  Chemically synthesized
ucccggaguauacaggaua

SEQ ID NO: 9519 - RNA, 19 nt, artificial
  Chemically synthesized
guucuacaauugcagugca

SEQ ID NO: 9520 - RNA, 19 nt, artificial
  Chemically synthesized
ucccaauauugggagaaua

SEQ ID NO: 9521 - RNA, 19 nt, artificial
  Chemically synthesized
cuccaggaaugaccaagaa

SEQ ID NO: 9522 - RNA, 19 nt, artificial
  Chemically synthesized
ugcacauuuaugucaccca

SEQ ID NO: 9523 - RNA, 19 nt, artificial
  Chemically synthesized
aggaguggcauaaauuuga

SEQ ID NO: 9524 - RNA, 19 nt, artificial
  Chemically synthesized
ccacgcagucaaugucuac

SEQ ID NO: 9525 - RNA, 19 nt, artificial
  Chemically synthesized
gccauuuugcacagugcug

SEQ ID NO: 9526 - RNA, 19 nt, artificial
  Chemically synthesized
ugcgagagacuuuccucaa

SEQ ID NO: 9527 - RNA, 19 nt, artificial
  Chemically synthesized
cccaaaagcugcagcagua

SEQ ID NO: 9528 - RNA, 19 nt, artificial
  Chemically synthesized
gcugguuuaacaaccugag

SEQ ID NO: 9529 - RNA, 19 nt, artificial
  Chemically synthesized
ugcgauccuucaucgagau

SEQ ID NO: 9530 - RNA, 19 nt, artificial
  Chemically synthesized
aggacgaauucuucaccau

SEQ ID NO: 9531 - RNA, 19 nt, artificial
  Chemically synthesized
agaggauaagucccgucua

SEQ ID NO: 9532 - RNA, 19 nt, artificial
  Chemically synthesized
auuuguauaauugucuggg

SEQ ID NO: 9533 - RNA, 19 nt, artificial
  Chemically synthesized
uuuguauaauugucugggu

SEQ ID NO: 9534 - RNA, 19 nt, artificial
  Chemically synthesized
uuuuguggaagucaauuag

SEQ ID NO: 9535 - RNA, 19 nt, artificial
  Chemically synthesized
uugucugggucaauauucu

SEQ ID NO: 9536 - RNA, 19 nt, artificial
  Chemically synthesized
gaauugagaucgaguacug

SEQ ID NO: 9537 - RNA, 19 nt, artificial
  Chemically synthesized
aauugagaucgaguacuga

SEQ ID NO: 9538 - RNA, 19 nt, artificial
  Chemically synthesized
auugucugggucaauauuc

SEQ ID NO: 9539 - RNA, 19 nt, artificial
  Chemically synthesized
aaguagauguggaaagugg

SEQ ID NO: 9540 - RNA, 19 nt, artificial
  Chemically synthesized
augaagugaaaauccuccc

SEQ ID NO: 9541 - RNA, 19 nt, artificial
  Chemically synthesized
agccuuccuaaauagcucc

SEQ ID NO: 9542 - RNA, 19 nt, artificial
  Chemically synthesized
aguauauuuaguaggacca

SEQ ID NO: 9543 - RNA, 19 nt, artificial
  Chemically synthesized
uuguggaagucaauuagag

SEQ ID NO: 9544 - RNA, 19 nt, artificial
  Chemically synthesized
uagacauugacugcguggc

SEQ ID NO: 9545 - RNA, 19 nt, artificial
  Chemically synthesized
ugguuuagggugguguugg

SEQ ID NO: 9546 - RNA, 19 nt, artificial
  Chemically synthesized
aaccacuauguuguccucc

SEQ ID NO: 9547 - RNA, 19 nt, artificial
  Chemically synthesized
aagagcccgaugaaaaagg

SEQ ID NO: 9548 - RNA, 19 nt, artificial
  Chemically synthesized
auuguaccuuuucaccucc

SEQ ID NO: 9549 - RNA, 19 nt, artificial
  Chemically synthesized
uacaugguaaacauuagac

SEQ ID NO: 9550 - RNA, 19 nt, artificial
  Chemically synthesized
augguaaacauuagacggg

SEQ ID NO: 9551 - RNA, 19 nt, artificial
  Chemically synthesized
uuguuggacaggaugaggu

SEQ ID NO: 9552 - RNA, 19 nt, artificial
  Chemically synthesized
uuggacaggaugagguuga

SEQ ID NO: 9553 - RNA, 19 nt, artificial
  Chemically synthesized
guguuggguucagaugucu

SEQ ID NO: 9554 - RNA, 19 nt, artificial
  Chemically synthesized
uuuaguaggaccaaaacug

SEQ ID NO: 9555 - RNA, 19 nt, artificial
  Chemically synthesized
ucgaguacugaauaucugg

SEQ ID NO: 9556 - RNA, 19 nt, artificial
  Chemically synthesized
aaguugcugacacuuuggg

SEQ ID NO: 9557 - RNA, 19 nt, artificial
  Chemically synthesized
uucucuacauucuugguca

SEQ ID NO: 9558 - RNA, 19 nt, artificial
  Chemically synthesized
aaaauggccaggacaacag

SEQ ID NO: 9559 - RNA, 19 nt, artificial
  Chemically synthesized
aagguuaugagguugcggc

SEQ ID NO: 9560 - RNA, 19 nt, artificial
  Chemically synthesized
auauaagagaacaugaagg

SEQ ID NO: 9561 - RNA, 19 nt, artificial
  Chemically synthesized
caugaagugaaaauccucc

SEQ ID NO: 9562 - RNA, 19 nt, artificial
  Chemically synthesized
aucauggugaagaauucgu

SEQ ID NO: 9563 - RNA, 19 nt, artificial
  Chemically synthesized
gaguacugaauaucuggca

SEQ ID NO: 9564 - RNA, 19 nt, artificial
  Chemically synthesized
aucuuuguuuccuggugcc

SEQ ID NO: 9565 - RNA, 19 nt, artificial
  Chemically synthesized
uauuguaccuuuucaccuc

SEQ ID NO: 9566 - RNA, 19 nt, artificial
  Chemically synthesized
auagaugauugccgggacc

SEQ ID NO: 9567 - RNA, 19 nt, artificial
  Chemically synthesized
uauaagagaacaugaagga

SEQ ID NO: 9568 - RNA, 19 nt, artificial
  Chemically synthesized
guuggguucagaugucuuc

SEQ ID NO: 9569 - RNA, 19 nt, artificial
  Chemically synthesized
uggaugaugaugggacugc

SEQ ID NO: 9570 - RNA, 19 nt, artificial
  Chemically synthesized
uuucuuuuguagcuucuug

SEQ ID NO: 9571 - RNA, 19 nt, artificial
  Chemically synthesized
cgaguacugaauaucuggc

SEQ ID NO: 9572 - RNA, 19 nt, artificial
  Chemically synthesized
aagcaacgcaucgauuuug

SEQ ID NO: 9573 - RNA, 19 nt, artificial
  Chemically synthesized
auuguagaacauagucucc

SEQ ID NO: 9574 - RNA, 19 nt, artificial
  Chemically synthesized
gacaccucaaauuuaugcc

SEQ ID NO: 9575 - RNA, 19 nt, artificial
  Chemically synthesized
cuccauagaugauugccgg

SEQ ID NO: 9576 - RNA, 19 nt, artificial
  Chemically synthesized
uagauguggaaagugggca

SEQ ID NO: 9577 - RNA, 19 nt, artificial
  Chemically synthesized
ucauucacaaagacguugg

SEQ ID NO: 9578 - RNA, 19 nt, artificial
  Chemically synthesized
aacacgccaacacagaugg

SEQ ID NO: 9579 - RNA, 19 nt, artificial
  Chemically synthesized
cugugguuuaggguggugu

SEQ ID NO: 9580 - RNA, 19 nt, artificial
  Chemically synthesized
ucacagccuuccuaaauag

SEQ ID NO: 9581 - RNA, 19 nt, artificial
  Chemically synthesized
cagccuuccuaaauagcuc

SEQ ID NO: 9582 - RNA, 19 nt, artificial
  Chemically synthesized
cuuccuaaauagcuccuuc

SEQ ID NO: 9583 - RNA, 19 nt, artificial
  Chemically synthesized
cuaaauagcuccuucucgc

SEQ ID NO: 9584 - RNA, 19 nt, artificial
  Chemically synthesized
aagucaagcacagucaggg

SEQ ID NO: 9585 - RNA, 19 nt, artificial
  Chemically synthesized
guguucucaaaccaguagc

SEQ ID NO: 9586 - RNA, 19 nt, artificial
  Chemically synthesized
aacuggucgaggacaaugg

SEQ ID NO: 9587 - RNA, 19 nt, artificial
  Chemically synthesized
caguaguuguugcagaccc

SEQ ID NO: 9588 - RNA, 19 nt, artificial
  Chemically synthesized
uuucucauguagacaccag

SEQ ID NO: 9589 - RNA, 19 nt, artificial
  Chemically synthesized
uucucauguagacaccagg

SEQ ID NO: 9590 - RNA, 19 nt, artificial
  Chemically synthesized
aguacugaauaucuggcag

SEQ ID NO: 9591 - RNA, 19 nt, artificial
  Chemically synthesized
uuuguggaagucaauuaga

SEQ ID NO: 9592 - RNA, 19 nt, artificial
  Chemically synthesized
uggaagucaauuagagaug

SEQ ID NO: 9593 - RNA, 19 nt, artificial
  Chemically synthesized
uggucuuuaucuucuuugg

SEQ ID NO: 9594 - RNA, 19 nt, artificial
  Chemically synthesized
uuauaaucaucaugcacug

SEQ ID NO: 9595 - RNA, 19 nt, artificial
  Chemically synthesized
uauaaucaucaugcacugc

SEQ ID NO: 9596 - RNA, 19 nt, artificial
  Chemically synthesized
gccuucucuacauucuugg

SEQ ID NO: 9597 - RNA, 19 nt, artificial
  Chemically synthesized
uauccagcacagccauugc

SEQ ID NO: 9598 - RNA, 19 nt, artificial
  Chemically synthesized
cuuguacucaaagccuugg

SEQ ID NO: 9599 - RNA, 19 nt, artificial
  Chemically synthesized
caccuccauagaugauugc

SEQ ID NO: 9600 - RNA, 19 nt, artificial
  Chemically synthesized
ugacugagaagauguagac

SEQ ID NO: 9601 - RNA, 19 nt, artificial
  Chemically synthesized
uagcgguugaggaaagucu

SEQ ID NO: 9602 - RNA, 19 nt, artificial
  Chemically synthesized
aggaagguuaugagguugc

SEQ ID NO: 9603 - RNA, 19 nt, artificial
  Chemically synthesized
cauacaugguaaacauuag

SEQ ID NO: 9604 - RNA, 19 nt, artificial
  Chemically synthesized
agcagcuggaugaugaugg

SEQ ID NO: 9605 - RNA, 19 nt, artificial
  Chemically synthesized
uuggguucagaugucuucu

SEQ ID NO: 9606 - RNA, 19 nt, artificial
  Chemically synthesized
cuuugaguuucuuuuguag

SEQ ID NO: 9607 - RNA, 19 nt, artificial
  Chemically synthesized
uuugaguuucuuuuguagc

SEQ ID NO: 9608 - RNA, 19 nt, artificial
  Chemically synthesized
cgaauccaguaguuguugc

SEQ ID NO: 9609 - RNA, 19 nt, artificial
  Chemically synthesized
gaauccaguaguuguugca

SEQ ID NO: 9610 - RNA, 19 nt, artificial
  Chemically synthesized
cauuucucauguagacacc

SEQ ID NO: 9611 - RNA, 19 nt, artificial
  Chemically synthesized
agcaacgcaucgauuuugu

SEQ ID NO: 9612 - RNA, 19 nt, artificial
  Chemically synthesized
agucaauuagagauguggg

SEQ ID NO: 9613 - RNA, 19 nt, artificial
  Chemically synthesized
auaaucaucaugcacugca

SEQ ID NO: 9614 - RNA, 19 nt, artificial
  Chemically synthesized
cuaagguggauucugaugg

SEQ ID NO: 9615 - RNA, 19 nt, artificial
  Chemically synthesized
uaguggugcaugaaguggg

SEQ ID NO: 9616 - RNA, 19 nt, artificial
  Chemically synthesized
cugacuuguacucaaagcc

SEQ ID NO: 9617 - RNA, 19 nt, artificial
  Chemically synthesized
cauagaugauugccgggac

SEQ ID NO: 9618 - RNA, 19 nt, artificial
  Chemically synthesized
aagacauacaugauggcca

SEQ ID NO: 9619 - RNA, 19 nt, artificial
  Chemically synthesized
aucauucacaaagacguug

SEQ ID NO: 9620 - RNA, 19 nt, artificial
  Chemically synthesized
aaauggccaggacaacagc

SEQ ID NO: 9621 - RNA, 19 nt, artificial
  Chemically synthesized
auaguaguaagcacgaucu

SEQ ID NO: 9622 - RNA, 19 nt, artificial
  Chemically synthesized
uuuuugccaaaccucuucu

SEQ ID NO: 9623 - RNA, 19 nt, artificial
  Chemically synthesized
aucucuaauaccauuucca

SEQ ID NO: 9624 - RNA, 19 nt, artificial
  Chemically synthesized
aauaccauuuccaccucca

SEQ ID NO: 9625 - RNA, 19 nt, artificial
  Chemically synthesized
cagcaugaagugaaaaucc

SEQ ID NO: 9626 - RNA, 19 nt, artificial
  Chemically synthesized
ugaaaauccucccauguca

SEQ ID NO: 9627 - RNA, 19 nt, artificial
  Chemically synthesized
uuggcugcuuccuucuuca

SEQ ID NO: 9628 - RNA, 19 nt, artificial
  Chemically synthesized
cucuuugaguuucuuuugu

SEQ ID NO: 9629 - RNA, 19 nt, artificial
  Chemically synthesized
gaagcagacucacuaaggg

SEQ ID NO: 9630 - RNA, 19 nt, artificial
  Chemically synthesized
uccucuuaaaaucuuugcu

SEQ ID NO: 9631 - RNA, 19 nt, artificial
  Chemically synthesized
ucgaggacaauggcacuga

SEQ ID NO: 9632 - RNA, 19 nt, artificial
  Chemically synthesized
aauccaguaguuguugcag

SEQ ID NO: 9633 - RNA, 19 nt, artificial
  Chemically synthesized
uaguuguugcagacccuga

SEQ ID NO: 9634 - RNA, 19 nt, artificial
  Chemically synthesized
uuguugcagacccugagag

SEQ ID NO: 9635 - RNA, 19 nt, artificial
  Chemically synthesized
auucuaugucuugaccugg

SEQ ID NO: 9636 - RNA, 19 nt, artificial
  Chemically synthesized
gacaucaagaauaucaggg

SEQ ID NO: 9637 - RNA, 19 nt, artificial
  Chemically synthesized
gaagucaauuagagaugug

SEQ ID NO: 9638 - RNA, 19 nt, artificial
  Chemically synthesized
uuguaccuuuucaccucca

SEQ ID NO: 9639 - RNA, 19 nt, artificial
  Chemically synthesized
gucuuuaucuucuuuggga

SEQ ID NO: 9640 - RNA, 19 nt, artificial
  Chemically synthesized
uuguagaacauagucuccu

SEQ ID NO: 9641 - RNA, 19 nt, artificial
  Chemically synthesized
uuguauaauugucuggguc

SEQ ID NO: 9642 - RNA, 19 nt, artificial
  Chemically synthesized
uccauagaugauugccggg

SEQ ID NO: 9643 - RNA, 19 nt, artificial
  Chemically synthesized
guagauguggaaagugggc

SEQ ID NO: 9644 - RNA, 19 nt, artificial
  Chemically synthesized
uagcugccauggaugauga

SEQ ID NO: 9645 - RNA, 19 nt, artificial
  Chemically synthesized
acauacaugauggccagga

SEQ ID NO: 9646 - RNA, 19 nt, artificial
  Chemically synthesized
aaccaccaauagaacuucu

SEQ ID NO: 9647 - RNA, 19 nt, artificial
  Chemically synthesized
cauucacaaagacguuggg

SEQ ID NO: 9648 - RNA, 19 nt, artificial
  Chemically synthesized
auggugagcaagauauaag

SEQ ID NO: 9649 - RNA, 19 nt, artificial
  Chemically synthesized
aagccauaguaguaagcac

SEQ ID NO: 9650 - RNA, 19 nt, artificial
  Chemically synthesized
agcaugaagugaaaauccu

SEQ ID NO: 9651 - RNA, 19 nt, artificial
  Chemically synthesized
ugaagugaaaauccuccca

SEQ ID NO: 9652 - RNA, 19 nt, artificial
  Chemically synthesized
cucucaccuuucucucugg

SEQ ID NO: 9653 - RNA, 19 nt, artificial
  Chemically synthesized
cucuucagaacuaaacagc

SEQ ID NO: 9654 - RNA, 19 nt, artificial
  Chemically synthesized
uggacaggaugagguugac

SEQ ID NO: 9655 - RNA, 19 nt, artificial
  Chemically synthesized
guagcuucuuguguucucg

SEQ ID NO: 9656 - RNA, 19 nt, artificial
  Chemically synthesized
ugccagacaaagacauugg

SEQ ID NO: 9657 - RNA, 19 nt, artificial
  Chemically synthesized
agggugguauuucggaugu

SEQ ID NO: 9658 - RNA, 19 nt, artificial
  Chemically synthesized
cucuuaaaaucuuugcuuc

SEQ ID NO: 9659 - RNA, 19 nt, artificial
  Chemically synthesized
uaaaaucuuugcuucugug

SEQ ID NO: 9660 - RNA, 19 nt, artificial
  Chemically synthesized
acauuaggguugagaucac

SEQ ID NO: 9661 - RNA, 19 nt, artificial
  Chemically synthesized
cuguacgggagaauuugcc

SEQ ID NO: 9662 - RNA, 19 nt, artificial
  Chemically synthesized
uucucccgaauccaguagu

SEQ ID NO: 9663 - RNA, 19 nt, artificial
  Chemically synthesized
auccaguaguuguugcaga

SEQ ID NO: 9664 - RNA, 19 nt, artificial
  Chemically synthesized
aguaguuguugcagacccu

SEQ ID NO: 9665 - RNA, 19 nt, artificial
  Chemically synthesized
aguuguugcagacccugag

SEQ ID NO: 9666 - RNA, 19 nt, artificial
  Chemically synthesized
ucucauguagacaccaggg

SEQ ID NO: 9667 - RNA, 19 nt, artificial
  Chemically synthesized
aaauauuuuacagcucagc

SEQ ID NO: 9668 - RNA, 19 nt, artificial
  Chemically synthesized
uuaaagagcugaguaugga

SEQ ID NO: 9669 - RNA, 19 nt, artificial
  Chemically synthesized
uaccaaagcaacgcaucga

SEQ ID NO: 9670 - RNA, 19 nt, artificial
  Chemically synthesized
cacuauuguaccuuuucac

SEQ ID NO: 9671 - RNA, 19 nt, artificial
  Chemically synthesized
acuauuguaccuuuucacc

SEQ ID NO: 9672 - RNA, 19 nt, artificial
  Chemically synthesized
uaagguggauucugaugga

SEQ ID NO: 9673 - RNA, 19 nt, artificial
  Chemically synthesized
auaguggugcaugaagugg

SEQ ID NO: 9674 - RNA, 19 nt, artificial
  Chemically synthesized
ucuacauucuuggucauuc

SEQ ID NO: 9675 - RNA, 19 nt, artificial
  Chemically synthesized
cuucuuacacagcauuugg

SEQ ID NO: 9676 - RNA, 19 nt, artificial
  Chemically synthesized
guauccagcacagccauug

SEQ ID NO: 9677 - RNA, 19 nt, artificial
  Chemically synthesized
ucaccuccauagaugauug

SEQ ID NO: 9678 - RNA, 19 nt, artificial
  Chemically synthesized
accuccauagaugauugcc

SEQ ID NO: 9679 - RNA, 19 nt, artificial
  Chemically synthesized
ccuccauagaugauugccg

SEQ ID NO: 9680 - RNA, 19 nt, artificial
  Chemically synthesized
aguagauguggaaaguggg

SEQ ID NO: 9681 - RNA, 19 nt, artificial
  Chemically synthesized
ucucgcaggaagguuauga

SEQ ID NO: 9682 - RNA, 19 nt, artificial
  Chemically synthesized
aaaauccucccaugucagc

SEQ ID NO: 9683 - RNA, 19 nt, artificial
  Chemically synthesized
gugaagaauucguccuugg

SEQ ID NO: 9684 - RNA, 19 nt, artificial
  Chemically synthesized
caugguaaacauuagacgg

SEQ ID NO: 9685 - RNA, 19 nt, artificial
  Chemically synthesized
uuccucuucagaacuaaac

SEQ ID NO: 9686 - RNA, 19 nt, artificial
  Chemically synthesized
uucagaacuaaacagcagc

SEQ ID NO: 9687 - RNA, 19 nt, artificial
  Chemically synthesized
uuagggaucuugagcagca

SEQ ID NO: 9688 - RNA, 19 nt, artificial
  Chemically synthesized
augucuucuuuccucuuaa

SEQ ID NO: 9689 - RNA, 19 nt, artificial
  Chemically synthesized
gacaaagacauugggcugc

SEQ ID NO: 9690 - RNA, 19 nt, artificial
  Chemically synthesized
cuuaaaaucuuugcuucug

SEQ ID NO: 9691 - RNA, 19 nt, artificial
  Chemically synthesized
aaagagcugaguauggagg

SEQ ID NO: 9692 - RNA, 19 nt, artificial
  Chemically synthesized
aagagcugaguauggaggg

SEQ ID NO: 9693 - RNA, 19 nt, artificial
  Chemically synthesized
aucgaguacugaauaucug

SEQ ID NO: 9694 - RNA, 19 nt, artificial
  Chemically synthesized
aucaagaauaucagggcug

SEQ ID NO: 9695 - RNA, 19 nt, artificial
  Chemically synthesized
ucaagaauaucagggcugg

SEQ ID NO: 9696 - RNA, 19 nt, artificial
  Chemically synthesized
uuuguuuccuggugcccuc

SEQ ID NO: 9697 - RNA, 19 nt, artificial
  Chemically synthesized
auaccaaagcaacgcaucg

SEQ ID NO: 9698 - RNA, 19 nt, artificial
  Chemically synthesized
uaccuuuucaccuccacac

SEQ ID NO: 9699 - RNA, 19 nt, artificial
  Chemically synthesized
guggucuuuaucuucuuug

SEQ ID NO: 9700 - RNA, 19 nt, artificial
  Chemically synthesized
ggacuuauaaucaucaugc

SEQ ID NO: 9701 - RNA, 19 nt, artificial
  Chemically synthesized
aaguucucauaguggugca

SEQ ID NO: 9702 - RNA, 19 nt, artificial
  Chemically synthesized
acaccucaaauuuaugcca

SEQ ID NO: 9703 - RNA, 19 nt, artificial
  Chemically synthesized
auguucugguagguggcga

SEQ ID NO: 9704 - RNA, 19 nt, artificial
  Chemically synthesized
cucaaauuuaugccacucc

SEQ ID NO: 9705 - RNA, 19 nt, artificial
  Chemically synthesized
agauguggaaagugggcag

SEQ ID NO: 9706 - RNA, 19 nt, artificial
  Chemically synthesized
augaugagcagggcauaga

SEQ ID NO: 9707 - RNA, 19 nt, artificial
  Chemically synthesized
uagagcaggauguagaggu

SEQ ID NO: 9708 - RNA, 19 nt, artificial
  Chemically synthesized
gcgaagacauacaugaugg

SEQ ID NO: 9709 - RNA, 19 nt, artificial
  Chemically synthesized
gaagacauacaugauggcc

SEQ ID NO: 9710 - RNA, 19 nt, artificial
  Chemically synthesized
agacauacaugauggccag

SEQ ID NO: 9711 - RNA, 19 nt, artificial
  Chemically synthesized
cauacaugauggccaggac

SEQ ID NO: 9712 - RNA, 19 nt, artificial
  Chemically synthesized
auacaugauggccaggacc

SEQ ID NO: 9713 - RNA, 19 nt, artificial
  Chemically synthesized
gaaccaccaauagaacuuc

SEQ ID NO: 9714 - RNA, 19 nt, artificial
  Chemically synthesized
aaagucucucgcaggaagg

SEQ ID NO: 9715 - RNA, 19 nt, artificial
  Chemically synthesized
cucgcaggaagguuaugag

SEQ ID NO: 9716 - RNA, 19 nt, artificial
  Chemically synthesized
ggaagguuaugagguugcg

SEQ ID NO: 9717 - RNA, 19 nt, artificial
  Chemically synthesized
gaagguuaugagguugcgg

SEQ ID NO: 9718 - RNA, 19 nt, artificial
  Chemically synthesized
auaagagaacaugaaggag

SEQ ID NO: 9719 - RNA, 19 nt, artificial
  Chemically synthesized
caaagccauaguaguaagc

SEQ ID NO: 9720 - RNA, 19 nt, artificial
  Chemically synthesized
aaagccauaguaguaagca

SEQ ID NO: 9721 - RNA, 19 nt, artificial
  Chemically synthesized
agccauaguaguaagcacg

SEQ ID NO: 9722 - RNA, 19 nt, artificial
  Chemically synthesized
cuuuuugccaaaccucuuc

SEQ ID NO: 9723 - RNA, 19 nt, artificial
  Chemically synthesized
ucuaauaccauuuccaccu

SEQ ID NO: 9724 - RNA, 19 nt, artificial
  Chemically synthesized
cuaauaccauuuccaccuc

SEQ ID NO: 9725 - RNA, 19 nt, artificial
  Chemically synthesized
auucucauccaggucauac

SEQ ID NO: 9726 - RNA, 19 nt, artificial
  Chemically synthesized
ugguaaacauuagacggga

SEQ ID NO: 9727 - RNA, 19 nt, artificial
  Chemically synthesized
uugccauccuugucagcca

SEQ ID NO: 9728 - RNA, 19 nt, artificial
  Chemically synthesized
uuuuguagcuucuuguguu

SEQ ID NO: 9729 - RNA, 19 nt, artificial
  Chemically synthesized
uuguagcuucuuguguucu

SEQ ID NO: 9730 - RNA, 19 nt, artificial
  Chemically synthesized
agcuucuuguguucucggc

SEQ ID NO: 9731 - RNA, 19 nt, artificial
  Chemically synthesized
uauuucggaugucuucaau

SEQ ID NO: 9732 - RNA, 19 nt, artificial
  Chemically synthesized
gacaauggcacugaacagg

SEQ ID NO: 9733 - RNA, 19 nt, artificial
  Chemically synthesized
uucaaccacuauguugucc

SEQ ID NO: 9734 - RNA, 19 nt, artificial
  Chemically synthesized
ucugugcucuacuucuugc

SEQ ID NO: 9735 - RNA, 19 nt, artificial
  Chemically synthesized
cugugcucuacuucuugcc

SEQ ID NO: 9736 - RNA, 19 nt, artificial
  Chemically synthesized
uggguacuguucagauugg

SEQ ID NO: 9737 - RNA, 19 nt, artificial
  Chemically synthesized
cuugggagcuuugaaaacc

SEQ ID NO: 9738 - RNA, 19 nt, artificial
  Chemically synthesized
gagcuuugaaaacccuugu

SEQ ID NO: 9739 - RNA, 19 nt, artificial
  Chemically synthesized
aaugacagcuggcauuucu

SEQ ID NO: 9740 - RNA, 19 nt, artificial
  Chemically synthesized
auuucucauguagacacca

SEQ ID NO: 9741 - RNA, 19 nt, artificial
  Chemically synthesized
aaacauucuaugucuugac

SEQ ID NO: 9742 - RNA, 19 nt, artificial
  Chemically synthesized
aacauucuaugucuugacc

SEQ ID NO: 9743 - RNA, 19 nt, artificial
  Chemically synthesized
guuaaagagcugaguaugg

SEQ ID NO: 9744 - RNA, 19 nt, artificial
  Chemically synthesized
cuucuugccuucacccuca

SEQ ID NO: 9745 - RNA, 19 nt, artificial
  Chemically synthesized
ucuuuguuuccuggugccc

SEQ ID NO: 9746 - RNA, 19 nt, artificial
  Chemically synthesized
uucuugccuucacccucac

SEQ ID NO: 9747 - RNA, 19 nt, artificial
  Chemically synthesized
cucccucaaaugucagucc

SEQ ID NO: 9748 - RNA, 19 nt, artificial
  Chemically synthesized
cuuuucaccuccacacuug

SEQ ID NO: 9749 - RNA, 19 nt, artificial
  Chemically synthesized
uuucaccuccacacuuguc

SEQ ID NO: 9750 - RNA, 19 nt, artificial
  Chemically synthesized
auagucuccugccuuuucu

SEQ ID NO: 9751 - RNA, 19 nt, artificial
  Chemically synthesized
aagguggauucugauggag

SEQ ID NO: 9752 - RNA, 19 nt, artificial
  Chemically synthesized
agcugggugacauaaaugu

SEQ ID NO: 9753 - RNA, 19 nt, artificial
  Chemically synthesized
aaggaugacuugaagacca

SEQ ID NO: 9754 - RNA, 19 nt, artificial
  Chemically synthesized
uucacccucacucuuccag

SEQ ID NO: 9755 - RNA, 19 nt, artificial
  Chemically synthesized
uugucaccuccauagauga

SEQ ID NO: 9756 - RNA, 19 nt, artificial
  Chemically synthesized
auguagaggugguggguca

SEQ ID NO: 9757 - RNA, 19 nt, artificial
  Chemically synthesized
cacgucggaaagaacaugg

SEQ ID NO: 9758 - RNA, 19 nt, artificial
  Chemically synthesized
aaaaggcacauagcgguug

SEQ ID NO: 9759 - RNA, 19 nt, artificial
  Chemically synthesized
auagcgguugaggaaaguc

SEQ ID NO: 9760 - RNA, 19 nt, artificial
  Chemically synthesized
caggaagguuaugagguug

SEQ ID NO: 9761 - RNA, 19 nt, artificial
  Chemically synthesized
uaagagaacaugaaggaga

SEQ ID NO: 9762 - RNA, 19 nt, artificial
  Chemically synthesized
aagagaacaugaaggagac

SEQ ID NO: 9763 - RNA, 19 nt, artificial
  Chemically synthesized
aacaugaaggagacgcugg

SEQ ID NO: 9764 - RNA, 19 nt, artificial
  Chemically synthesized
aagugaaaauccucccaug

SEQ ID NO: 9765 - RNA, 19 nt, artificial
  Chemically synthesized
aaauccucccaugucagcu

SEQ ID NO: 9766 - RNA, 19 nt, artificial
  Chemically synthesized
uuaaaccagccgucauagc

SEQ ID NO: 9767 - RNA, 19 nt, artificial
  Chemically synthesized
agcuggaugaugaugggac

SEQ ID NO: 9768 - RNA, 19 nt, artificial
  Chemically synthesized
ucucuuugaguuucuuuug

SEQ ID NO: 9769 - RNA, 19 nt, artificial
  Chemically synthesized
cuuuuguagcuucuugugu

SEQ ID NO: 9770 - RNA, 19 nt, artificial
  Chemically synthesized
uguagcuucuuguguucuc

SEQ ID NO: 9771 - RNA, 19 nt, artificial
  Chemically synthesized
uagcuucuuguguucucgg

SEQ ID NO: 9772 - RNA, 19 nt, artificial
  Chemically synthesized
aaagaagucaagcacaguc

SEQ ID NO: 9773 - RNA, 19 nt, artificial
  Chemically synthesized
augccagacaaagacauug

SEQ ID NO: 9774 - RNA, 19 nt, artificial
  Chemically synthesized
acaauggcacugaacaggg

SEQ ID NO: 9775 - RNA, 19 nt, artificial
  Chemically synthesized
uuacagcucagcuuuuuag

SEQ ID NO: 9776 - RNA, 19 nt, artificial
  Chemically synthesized
gaccacuccaguagaugca

SEQ ID NO: 9777 - RNA, 19 nt, artificial
  Chemically synthesized
uccaguagaugcagagagg

SEQ ID NO: 9778 - RNA, 19 nt, artificial
  Chemically synthesized
caaauaccaaagcaacgca

SEQ ID NO: 9779 - RNA, 19 nt, artificial
  Chemically synthesized
uguaccuuuucaccuccac

SEQ ID NO: 9780 - RNA, 19 nt, artificial
  Chemically synthesized
uuuucaccuccacacuugu

SEQ ID NO: 9781 - RNA, 19 nt, artificial
  Chemically synthesized
gacuuauaaucaucaugca

SEQ ID NO: 9782 - RNA, 19 nt, artificial
  Chemically synthesized
cuuauaaucaucaugcacu

SEQ ID NO: 9783 - RNA, 19 nt, artificial
  Chemically synthesized
uccugccuuuucucauuug

SEQ ID NO: 9784 - RNA, 19 nt, artificial
  Chemically synthesized
gugcacagaagagaaggca

SEQ ID NO: 9785 - RNA, 19 nt, artificial
  Chemically synthesized
ucagaaguucucauagugg

SEQ ID NO: 9786 - RNA, 19 nt, artificial
  Chemically synthesized
caggccuucucuacauucu

SEQ ID NO: 9787 - RNA, 19 nt, artificial
  Chemically synthesized
cacucauacacagcgaugu

SEQ ID NO: 9788 - RNA, 19 nt, artificial
  Chemically synthesized
caccucaaauuuaugccac

SEQ ID NO: 9789 - RNA, 19 nt, artificial
  Chemically synthesized
aauugcagguaggucacuc

SEQ ID NO: 9790 - RNA, 19 nt, artificial
  Chemically synthesized
auagagcaggauguagagg

SEQ ID NO: 9791 - RNA, 19 nt, artificial
  Chemically synthesized
cgaagacauacaugauggc

SEQ ID NO: 9792 - RNA, 19 nt, artificial
  Chemically synthesized
aagcacaccugucauaccu

SEQ ID NO: 9793 - RNA, 19 nt, artificial
  Chemically synthesized
accaccaauagaacuucug

SEQ ID NO: 9794 - RNA, 19 nt, artificial
  Chemically synthesized
uggugagcaagauauaaga

SEQ ID NO: 9795 - RNA, 19 nt, artificial
  Chemically synthesized
uaguaguaagcacgaucug

SEQ ID NO: 9796 - RNA, 19 nt, artificial
  Chemically synthesized
agauggccgagaagauugc

SEQ ID NO: 9797 - RNA, 19 nt, artificial
  Chemically synthesized
aucuucucuugcagcgccu

SEQ ID NO: 9798 - RNA, 19 nt, artificial
  Chemically synthesized
acucucaccuuucucucug

SEQ ID NO: 9799 - RNA, 19 nt, artificial
  Chemically synthesized
uugucagccagagagaaca

SEQ ID NO: 9800 - RNA, 19 nt, artificial
  Chemically synthesized
auggacuccacaaacaugu

SEQ ID NO: 9801 - RNA, 19 nt, artificial
  Chemically synthesized
cuucagaacuaaacagcag

SEQ ID NO: 9802 - RNA, 19 nt, artificial
  Chemically synthesized
ugcucuacuucuugccuuc

SEQ ID NO: 9803 - RNA, 19 nt, artificial
  Chemically synthesized
uacuucuugccuucacccu

SEQ ID NO: 9804 - RNA, 19 nt, artificial
  Chemically synthesized
aucagugguugcuucuagg

SEQ ID NO: 9805 - RNA, 19 nt, artificial
  Chemically synthesized
auauuuuacagcucagcuu

SEQ ID NO: 9806 - RNA, 19 nt, artificial
  Chemically synthesized
gugacaucaagaauaucag

SEQ ID NO: 9807 - RNA, 19 nt, artificial
  Chemically synthesized
caucaagaauaucagggcu

SEQ ID NO: 9808 - RNA, 19 nt, artificial
  Chemically synthesized
cagguucuaagcaucacag

SEQ ID NO: 9809 - RNA, 19 nt, artificial
  Chemically synthesized
aaauaccaaagcaacgcau

SEQ ID NO: 9810 - RNA, 19 nt, artificial
  Chemically synthesized
uguagaacauagucuccug

SEQ ID NO: 9811 - RNA, 19 nt, artificial
  Chemically synthesized
agccacucauacacagcga

SEQ ID NO: 9812 - RNA, 19 nt, artificial
  Chemically synthesized
gaggcgaagacauacauga

SEQ ID NO: 9813 - RNA, 19 nt, artificial
  Chemically synthesized
aagauguagacauugacug

SEQ ID NO: 9814 - RNA, 19 nt, artificial
  Chemically synthesized
agagccugauacacaccgu

SEQ ID NO: 9815 - RNA, 19 nt, artificial
  Chemically synthesized
uucuccacgaagcgcuugu

SEQ ID NO: 9816 - RNA, 19 nt, artificial
  Chemically synthesized
cucgcugcaucuucucuug

SEQ ID NO: 9817 - RNA, 19 nt, artificial
  Chemically synthesized
caaaccucuucuucagucc

SEQ ID NO: 9818 - RNA, 19 nt, artificial
  Chemically synthesized
cuaaacagcagcaccaggu

SEQ ID NO: 9819 - RNA, 19 nt, artificial
  Chemically synthesized
aaacagcagcaccagguca

SEQ ID NO: 9820 - RNA, 19 nt, artificial
  Chemically synthesized
cagagagcaaugaugguga

SEQ ID NO: 9821 - RNA, 19 nt, artificial
  Chemically synthesized
gagcaaugauggugauggc

SEQ ID NO: 9822 - RNA, 19 nt, artificial
  Chemically synthesized
cuuuaugccagacaaagac

SEQ ID NO: 9823 - RNA, 19 nt, artificial
  Chemically synthesized
cagacaaagacauugggcu

SEQ ID NO: 9824 - RNA, 19 nt, artificial
  Chemically synthesized
ucuguacgggagaauuugc

SEQ ID NO: 9825 - RNA, 19 nt, artificial
  Chemically synthesized
uucugugcucuacuucuug

SEQ ID NO: 9826 - RNA, 19 nt, artificial
  Chemically synthesized
cauucuaugucuugaccug

SEQ ID NO: 9827 - RNA, 19 nt, artificial
  Chemically synthesized
aauauuuuacagcucagcu

SEQ ID NO: 9828 - RNA, 19 nt, artificial
  Chemically synthesized
uacagcucagcuuuuuagg

SEQ ID NO: 9829 - RNA, 19 nt, artificial
  Chemically synthesized
uaaagagcugaguauggag

SEQ ID NO: 9830 - RNA, 19 nt, artificial
  Chemically synthesized
ucaaaugucaguccaagca

SEQ ID NO: 9831 - RNA, 19 nt, artificial
  Chemically synthesized
uccaagcaaauaccaaagc

SEQ ID NO: 9832 - RNA, 19 nt, artificial
  Chemically synthesized
aagcacuauuguaccuuuu

SEQ ID NO: 9833 - RNA, 19 nt, artificial
  Chemically synthesized
cagaaguucucauaguggu

SEQ ID NO: 9834 - RNA, 19 nt, artificial
  Chemically synthesized
ugcagggaguugaagaagg

SEQ ID NO: 9835 - RNA, 19 nt, artificial
  Chemically synthesized
aggaugacuugaagaccag

SEQ ID NO: 9836 - RNA, 19 nt, artificial
  Chemically synthesized
uggaauugcagguagguca

SEQ ID NO: 9837 - RNA, 19 nt, artificial
  Chemically synthesized
gugagcaagauauaagaga

SEQ ID NO: 9838 - RNA, 19 nt, artificial
  Chemically synthesized
aagauugccacacacacga

SEQ ID NO: 9839 - RNA, 19 nt, artificial
  Chemically synthesized
uuuugccaaaccucuucuu

SEQ ID NO: 9840 - RNA, 19 nt, artificial
  Chemically synthesized
uuugccaaaccucuucuuc

SEQ ID NO: 9841 - RNA, 19 nt, artificial
  Chemically synthesized
accuccaccuuugacacag

SEQ ID NO: 9842 - RNA, 19 nt, artificial
  Chemically synthesized
cuuucaugaagaccaccag

SEQ ID NO: 9843 - RNA, 19 nt, artificial
  Chemically synthesized
aacuaaacagcagcaccag

SEQ ID NO: 9844 - RNA, 19 nt, artificial
  Chemically synthesized
augauggugauggcaaaac

SEQ ID NO: 9845 - RNA, 19 nt, artificial
  Chemically synthesized
acaaagacauugggcugca

SEQ ID NO: 9846 - RNA, 19 nt, artificial
  Chemically synthesized
uccuccaacuccgaaaucu

SEQ ID NO: 9847 - RNA, 19 nt, artificial
  Chemically synthesized
ggguacuguucagauuggg

SEQ ID NO: 9848 - RNA, 19 nt, artificial
  Chemically synthesized
caucagugguugcuucuag

SEQ ID NO: 9849 - RNA, 19 nt, artificial
  Chemically synthesized
gaaacauucuaugucuuga

SEQ ID NO: 9850 - RNA, 19 nt, artificial
  Chemically synthesized
uccagguucuaagcaucac

SEQ ID NO: 9851 - RNA, 19 nt, artificial
  Chemically synthesized
cucagaaguucucauagug

SEQ ID NO: 9852 - RNA, 19 nt, artificial
  Chemically synthesized
cagcuugucaccuccauag

SEQ ID NO: 9853 - RNA, 19 nt, artificial
  Chemically synthesized
agagcaggauguagaggug

SEQ ID NO: 9854 - RNA, 19 nt, artificial
  Chemically synthesized
acgucggaaagaacauggu

SEQ ID NO: 9855 - RNA, 19 nt, artificial
  Chemically synthesized
ugcacucucaccuuucucu

SEQ ID NO: 9856 - RNA, 19 nt, artificial
  Chemically synthesized
auugccacacacacgaugu

SEQ ID NO: 9857 - RNA, 19 nt, artificial
  Chemically synthesized
acucccggaacauagacuc

SEQ ID NO: 9858 - RNA, 19 nt, artificial
  Chemically synthesized
agccuuucaugaagaccac

SEQ ID NO: 9859 - RNA, 19 nt, artificial
  Chemically synthesized
aacauggacuccacaaaca

SEQ ID NO: 9860 - RNA, 19 nt, artificial
  Chemically synthesized
cugagcaaaaaggugucug

SEQ ID NO: 9861 - RNA, 19 nt, artificial
  Chemically synthesized
ugagcaaaaaggugucuga

SEQ ID NO: 9862 - RNA, 19 nt, artificial
  Chemically synthesized
agacucacuaagggaaggc

SEQ ID NO: 9863 - RNA, 19 nt, artificial
  Chemically synthesized
ucaaagaagucaagcacag

SEQ ID NO: 9864 - RNA, 19 nt, artificial
  Chemically synthesized
cacauagucuguacgggag

SEQ ID NO: 9865 - RNA, 19 nt, artificial
  Chemically synthesized
cuccaacuccgaaaucugg

SEQ ID NO: 9866 - RNA, 19 nt, artificial
  Chemically synthesized
augacagcuggcauuucuc

SEQ ID NO: 9867 - RNA, 19 nt, artificial
  Chemically synthesized
uuuuacagcucagcuuuuu

SEQ ID NO: 9868 - RNA, 19 nt, artificial
  Chemically synthesized
uaucacuggugacaucaag

SEQ ID NO: 9869 - RNA, 19 nt, artificial
  Chemically synthesized
ugacaucaagaauaucagg

SEQ ID NO: 9870 - RNA, 19 nt, artificial
  Chemically synthesized
ucccucaaaugucagucca

SEQ ID NO: 9871 - RNA, 19 nt, artificial
  Chemically synthesized
ugucaguccaagcaaauac

SEQ ID NO: 9872 - RNA, 19 nt, artificial
  Chemically synthesized
uugauaaacagguggacuu

SEQ ID NO: 9873 - RNA, 19 nt, artificial
  Chemically synthesized
uugccuucacccucacucu

SEQ ID NO: 9874 - RNA, 19 nt, artificial
  Chemically synthesized
acagguggacuuauaauca

SEQ ID NO: 9875 - RNA, 19 nt, artificial
  Chemically synthesized
uaggugcacagaagagaag

SEQ ID NO: 9876 - RNA, 19 nt, artificial
  Chemically synthesized
agggaguugaagaagggcu

SEQ ID NO: 9877 - RNA, 19 nt, artificial
  Chemically synthesized
cuccgguucagcacuuucu

SEQ ID NO: 9878 - RNA, 19 nt, artificial
  Chemically synthesized
uugaggauggaggcaaagg

SEQ ID NO: 9879 - RNA, 19 nt, artificial
  Chemically synthesized
uccaaacgguccaucaagg

SEQ ID NO: 9880 - RNA, 19 nt, artificial
  Chemically synthesized
gucggaaagaacaugguag

SEQ ID NO: 9881 - RNA, 19 nt, artificial
  Chemically synthesized
ucggaaagaacaugguagc

SEQ ID NO: 9882 - RNA, 19 nt, artificial
  Chemically synthesized
uuggacccaucauucacaa

SEQ ID NO: 9883 - RNA, 19 nt, artificial
  Chemically synthesized
uccagagccugauacacac

SEQ ID NO: 9884 - RNA, 19 nt, artificial
  Chemically synthesized
augaacgagacucgacagc

SEQ ID NO: 9885 - RNA, 19 nt, artificial
  Chemically synthesized
gagccuuucaugaagacca

SEQ ID NO: 9886 - RNA, 19 nt, artificial
  Chemically synthesized
cuccacaaacauguccugg

SEQ ID NO: 9887 - RNA, 19 nt, artificial
  Chemically synthesized
gaacuaaacagcagcacca

SEQ ID NO: 9888 - RNA, 19 nt, artificial
  Chemically synthesized
aggcagcagagagcaauga

SEQ ID NO: 9889 - RNA, 19 nt, artificial
  Chemically synthesized
uuuaugccagacaaagaca

SEQ ID NO: 9890 - RNA, 19 nt, artificial
  Chemically synthesized
uuaugccagacaaagacau

SEQ ID NO: 9891 - RNA, 19 nt, artificial
  Chemically synthesized
aaagacauugggcugcagg

SEQ ID NO: 9892 - RNA, 19 nt, artificial
  Chemically synthesized
agcagcucauucaccuccu

SEQ ID NO: 9893 - RNA, 19 nt, artificial
  Chemically synthesized
cuuccggaaaugacagcug

SEQ ID NO: 9894 - RNA, 19 nt, artificial
  Chemically synthesized
uuuuuaggaaagagcccga

SEQ ID NO: 9895 - RNA, 19 nt, artificial
  Chemically synthesized
gucaguccaagcaaauacc

SEQ ID NO: 9896 - RNA, 19 nt, artificial
  Chemically synthesized
aacauagucuccugccuuu

SEQ ID NO: 9897 - RNA, 19 nt, artificial
  Chemically synthesized
gucugggucaauauucucc

SEQ ID NO: 9898 - RNA, 19 nt, artificial
  Chemically synthesized
uugccaaaccucuucuuca

SEQ ID NO: 9899 - RNA, 19 nt, artificial
  Chemically synthesized
ugccaaaccucuucuucag

SEQ ID NO: 9900 - RNA, 19 nt, artificial
  Chemically synthesized
auccagucagaagagcucc

SEQ ID NO: 9901 - RNA, 19 nt, artificial
  Chemically synthesized
acuccacaaacauguccug

SEQ ID NO: 9902 - RNA, 19 nt, artificial
  Chemically synthesized
agaggccaccacaaauucc

SEQ ID NO: 9903 - RNA, 19 nt, artificial
  Chemically synthesized
agaacauagucuccugccu

SEQ ID NO: 9904 - RNA, 19 nt, artificial
  Chemically synthesized
gacaggcucagaaguucuc

SEQ ID NO: 9905 - RNA, 19 nt, artificial
  Chemically synthesized
uucaccacgcugaucucca

SEQ ID NO: 9906 - RNA, 19 nt, artificial
  Chemically synthesized
aggguggucugugcaaugu

SEQ ID NO: 9907 - RNA, 19 nt, artificial
  Chemically synthesized
auuuccaccuccaccucca

SEQ ID NO: 9908 - RNA, 19 nt, artificial
  Chemically synthesized
auguuguccuccaacuccg

SEQ ID NO: 9909 - RNA, 19 nt, artificial
  Chemically synthesized
aacgcaucgauuuugugga

SEQ ID NO: 9910 - RNA, 19 nt, artificial
  Chemically synthesized
ucugggucaauauucuccc

SEQ ID NO: 9911 - RNA, 19 nt, artificial
  Chemically synthesized
cauucuuggucauuccugg

SEQ ID NO: 9912 - RNA, 19 nt, artificial
  Chemically synthesized
guguccgagugaugaacga

SEQ ID NO: 9913 - RNA, 19 nt, artificial
  Chemically synthesized
uaccauuuccaccuccacc

SEQ ID NO: 9914 - RNA, 19 nt, artificial
  Chemically synthesized
aaggacagguagccauugc

SEQ ID NO: 9915 - RNA, 19 nt, artificial
  Chemically synthesized
uucagaugucuucuuuccu

SEQ ID NO: 9916 - RNA, 19 nt, artificial
  Chemically synthesized
aaauaggccaccacuccag

SEQ ID NO: 9917 - RNA, 19 nt, artificial
  Chemically synthesized
cagaugucuucuuuccucu

SEQ ID NO: 9918 - RNA, 19 nt, artificial
  Chemically synthesized
uugagaucacuccaguucc

SEQ ID NO: 9919 - RNA, 19 nt, artificial
  Chemically synthesized
uauguuguccuccaacucc

SEQ ID NO: 9920 - RNA, 19 nt, artificial
  Chemically synthesized
aucacagcuucugcacugg

SEQ ID NO: 9921 - RNA, 19 nt, artificial
  Chemically synthesized
uuugggagauccugacugg

SEQ ID NO: 9922 - RNA, 19 nt, artificial
  Chemically synthesized
cugggugacauaaaugugc

SEQ ID NO: 9923 - RNA, 19 nt, artificial
  Chemically synthesized
uacacagcauuuggcugcc

SEQ ID NO: 9924 - RNA, 19 nt, artificial
  Chemically synthesized
acuguccugacuuguacuc

SEQ ID NO: 9925 - RNA, 19 nt, artificial
  Chemically synthesized
uuguacucaaagccuuggg

SEQ ID NO: 9926 - RNA, 19 nt, artificial
  Chemically synthesized
gauguagacauugacugcg

SEQ ID NO: 9927 - RNA, 19 nt, artificial
  Chemically synthesized
auguagacauugacugcgu

SEQ ID NO: 9928 - RNA, 19 nt, artificial
  Chemically synthesized
accauuuccaccuccaccu

SEQ ID NO: 9929 - RNA, 19 nt, artificial
  Chemically synthesized
gacucacuaagggaaggca

SEQ ID NO: 9930 - RNA, 19 nt, artificial
  Chemically synthesized
uuaguaggaccaaaacugg

SEQ ID NO: 9931 - RNA, 19 nt, artificial
  Chemically synthesized
uuuuaggaaagagcccgau

SEQ ID NO: 9932 - RNA, 19 nt, artificial
  Chemically synthesized
uacugaauaucuggcagag

SEQ ID NO: 9933 - RNA, 19 nt, artificial
  Chemically synthesized
aaguagggcugcuccuuuu

SEQ ID NO: 9934 - RNA, 19 nt, artificial
  Chemically synthesized
acgguauccuguauacucc

SEQ ID NO: 9935 - RNA, 19 nt, artificial
  Chemically synthesized
agauguagacauugacugc

SEQ ID NO: 9936 - RNA, 19 nt, artificial
  Chemically synthesized
accuuugacacagagcugc

SEQ ID NO: 9937 - RNA, 19 nt, artificial
  Chemically synthesized
aaaaaggugucugaagaag

SEQ ID NO: 9938 - RNA, 19 nt, artificial
  Chemically synthesized
uagggaucuugagcagcag

SEQ ID NO: 9939 - RNA, 19 nt, artificial
  Chemically synthesized
aauguugauaacagcgacc

SEQ ID NO: 9940 - RNA, 19 nt, artificial
  Chemically synthesized
uuguucaggaccuuccgga

SEQ ID NO: 9941 - RNA, 19 nt, artificial
  Chemically synthesized
ucuacuucuugccuucacc

SEQ ID NO: 9942 - RNA, 19 nt, artificial
  Chemically synthesized
aggaccaaaacuggauuug

SEQ ID NO: 9943 - RNA, 19 nt, artificial
  Chemically synthesized
uuugguagaaaucacauca

SEQ ID NO: 9944 - RNA, 19 nt, artificial
  Chemically synthesized
guggugguaaaacauguac

SEQ ID NO: 9945 - RNA, 19 nt, artificial
  Chemically synthesized
agaaaaguuaaagagcuga

SEQ ID NO: 9946 - RNA, 19 nt, artificial
  Chemically synthesized
uaucuucuuugggagaucc

SEQ ID NO: 9947 - RNA, 19 nt, artificial
  Chemically synthesized
guauccuguauacuccggg

SEQ ID NO: 9948 - RNA, 19 nt, artificial
  Chemically synthesized
ucaucaugcacugcaauug

SEQ ID NO: 9949 - RNA, 19 nt, artificial
  Chemically synthesized
aucaugcacugcaauugua

SEQ ID NO: 9950 - RNA, 19 nt, artificial
  Chemically synthesized
augcacugcaauuguagaa

SEQ ID NO: 9951 - RNA, 19 nt, artificial
  Chemically synthesized
uacuccgggaguguuuucu

SEQ ID NO: 9952 - RNA, 19 nt, artificial
  Chemically synthesized
uacacagcgauguucuggu

SEQ ID NO: 9953 - RNA, 19 nt, artificial
  Chemically synthesized
aucaaaaggcacauagcgg

SEQ ID NO: 9954 - RNA, 19 nt, artificial
  Chemically synthesized
guacugcugcagcuuuugg

SEQ ID NO: 9955 - RNA, 19 nt, artificial
  Chemically synthesized
gauccagucagaagagcuc

SEQ ID NO: 9956 - RNA, 19 nt, artificial
  Chemically synthesized
uugauguccagcaccugag

SEQ ID NO: 9957 - RNA, 19 nt, artificial
  Chemically synthesized
aauagcuccuucucgcuca

SEQ ID NO: 9958 - RNA, 19 nt, artificial
  Chemically synthesized
agagcaaugauggugaugg

SEQ ID NO: 9959 - RNA, 19 nt, artificial
  Chemically synthesized
auaacagcgaccagcacgu

SEQ ID NO: 9960 - RNA, 19 nt, artificial
  Chemically synthesized
uguucucaaaccaguagcg

SEQ ID NO: 9961 - RNA, 19 nt, artificial
  Chemically synthesized
ucaaccacuauguuguccu

SEQ ID NO: 9962 - RNA, 19 nt, artificial
  Chemically synthesized
cucuacuucuugccuucac

SEQ ID NO: 9963 - RNA, 19 nt, artificial
  Chemically synthesized
aaacccuuguucaggaccu

SEQ ID NO: 9964 - RNA, 19 nt, artificial
  Chemically synthesized
uaggaccaaaacuggauuu

SEQ ID NO: 9965 - RNA, 19 nt, artificial
  Chemically synthesized
cuuuuuaggaaagagcccg

SEQ ID NO: 9966 - RNA, 19 nt, artificial
  Chemically synthesized
cuuugggagauccugacug

SEQ ID NO: 9967 - RNA, 19 nt, artificial
  Chemically synthesized
aauauucucccaauauugg

SEQ ID NO: 9968 - RNA, 19 nt, artificial
  Chemically synthesized
auauucucccaauauuggg

SEQ ID NO: 9969 - RNA, 19 nt, artificial
  Chemically synthesized
aaggcaggauacuggaagc

SEQ ID NO: 9970 - RNA, 19 nt, artificial
  Chemically synthesized
cagauguauagcauggugg

SEQ ID NO: 9971 - RNA, 19 nt, artificial
  Chemically synthesized
uuacacagcauuuggcugc

SEQ ID NO: 9972 - RNA, 19 nt, artificial
  Chemically synthesized
aaaggcacauagcgguuga

SEQ ID NO: 9973 - RNA, 19 nt, artificial
  Chemically synthesized
gagaacaugaaggagacgc

SEQ ID NO: 9974 - RNA, 19 nt, artificial
  Chemically synthesized
aaccucuucuucaguccag

SEQ ID NO: 9975 - RNA, 19 nt, artificial
  Chemically synthesized
aacauagacuccaccaccu

SEQ ID NO: 9976 - RNA, 19 nt, artificial
  Chemically synthesized
gaggaagccauucucaucc

SEQ ID NO: 9977 - RNA, 19 nt, artificial
  Chemically synthesized
auccaggucauacauggua

SEQ ID NO: 9978 - RNA, 19 nt, artificial
  Chemically synthesized
augagguugaccugcugca

SEQ ID NO: 9979 - RNA, 19 nt, artificial
  Chemically synthesized
uugaguuucuuuuguagcu

SEQ ID NO: 9980 - RNA, 19 nt, artificial
  Chemically synthesized
uccagagagaagcagacuc

SEQ ID NO: 9981 - RNA, 19 nt, artificial
  Chemically synthesized
ugagcugcuuagguugagg

SEQ ID NO: 9982 - RNA, 19 nt, artificial
  Chemically synthesized
uuccugguguucucaaacc

SEQ ID NO: 9983 - RNA, 19 nt, artificial
  Chemically synthesized
uacgggagaauuugccagg

SEQ ID NO: 9984 - RNA, 19 nt, artificial
  Chemically synthesized
uugggagcuuugaaaaccc

SEQ ID NO: 9985 - RNA, 19 nt, artificial
  Chemically synthesized
auuugguagaaaucacauc

SEQ ID NO: 9986 - RNA, 19 nt, artificial
  Chemically synthesized
uucuaugucuugaccuggg

SEQ ID NO: 9987 - RNA, 19 nt, artificial
  Chemically synthesized
aagaaaaguuaaagagcug

SEQ ID NO: 9988 - RNA, 19 nt, artificial
  Chemically synthesized
gaaaaguuaaagagcugag

SEQ ID NO: 9989 - RNA, 19 nt, artificial
  Chemically synthesized
aaaaguuaaagagcugagu

SEQ ID NO: 9990 - RNA, 19 nt, artificial
  Chemically synthesized
uucuaagcaucacagcuuc

SEQ ID NO: 9991 - RNA, 19 nt, artificial
  Chemically synthesized
uuuucugcaggaagcuggg

SEQ ID NO: 9992 - RNA, 19 nt, artificial
  Chemically synthesized
auagcauggugguccugag

SEQ ID NO: 9993 - RNA, 19 nt, artificial
  Chemically synthesized
uaaaugugcacagacacca

SEQ ID NO: 9994 - RNA, 19 nt, artificial
  Chemically synthesized
auacacagcgauguucugg

SEQ ID NO: 9995 - RNA, 19 nt, artificial
  Chemically synthesized
aaauuuaugccacuccuga

SEQ ID NO: 9996 - RNA, 19 nt, artificial
  Chemically synthesized
gaccaggaaguagaugugg

SEQ ID NO: 9997 - RNA, 19 nt, artificial
  Chemically synthesized
uggaucagagcauagcugc

SEQ ID NO: 9998 - RNA, 19 nt, artificial
  Chemically synthesized
ucaaaaggcacauagcggu

SEQ ID NO: 9999 - RNA, 19 nt, artificial
  Chemically synthesized
uuuugggcuaggaagccuc

SEQ ID NO: 10000 - RNA, 19 nt, artificial
  Chemically synthesized
caugucagcuccuccuugu

SEQ ID NO: 10001 - RNA, 19 nt, artificial
  Chemically synthesized
uuggacaggcaguuguugg

SEQ ID NO: 10002 - RNA, 19 nt, artificial
  Chemically synthesized
uuggagaggaagccauucu

SEQ ID NO: 10003 - RNA, 19 nt, artificial
  Chemically synthesized
uuucaugaagaccaccagg

SEQ ID NO: 10004 - RNA, 19 nt, artificial
  Chemically synthesized
uccuuagggaucuugagca

SEQ ID NO: 10005 - RNA, 19 nt, artificial
  Chemically synthesized
auccucgguuguuggacag

SEQ ID NO: 10006 - RNA, 19 nt, artificial
  Chemically synthesized
uugugagcugcuuagguug

SEQ ID NO: 10007 - RNA, 19 nt, artificial
  Chemically synthesized
gugagcugcuuagguugag

SEQ ID NO: 10008 - RNA, 19 nt, artificial
  Chemically synthesized
aucuuugcuucugugcucu

SEQ ID NO: 10009 - RNA, 19 nt, artificial
  Chemically synthesized
ucuucaaccacuauguugu

SEQ ID NO: 10010 - RNA, 19 nt, artificial
  Chemically synthesized
caaccacuauguuguccuc

SEQ ID NO: 10011 - RNA, 19 nt, artificial
  Chemically synthesized
gaaaacccuuguucaggac

SEQ ID NO: 10012 - RNA, 19 nt, artificial
  Chemically synthesized
aaaacccuuguucaggacc

SEQ ID NO: 10013 - RNA, 19 nt, artificial
  Chemically synthesized
uggcauuucucauguagac

SEQ ID NO: 10014 - RNA, 19 nt, artificial
  Chemically synthesized
caucuuuguuuccuggugc

SEQ ID NO: 10015 - RNA, 19 nt, artificial
  Chemically synthesized
cuaagcaucacagcuucug

SEQ ID NO: 10016 - RNA, 19 nt, artificial
  Chemically synthesized
uaagcaucacagcuucugc

SEQ ID NO: 10017 - RNA, 19 nt, artificial
  Chemically synthesized
gguauccuguauacuccgg

SEQ ID NO: 10018 - RNA, 19 nt, artificial
  Chemically synthesized
uauccuguauacuccggga

SEQ ID NO: 10019 - RNA, 19 nt, artificial
  Chemically synthesized
ugcacugcaauuguagaac

SEQ ID NO: 10020 - RNA, 19 nt, artificial
  Chemically synthesized
uauucucccaauauuggga

SEQ ID NO: 10021 - RNA, 19 nt, artificial
  Chemically synthesized
uucuuggucauuccuggag

SEQ ID NO: 10022 - RNA, 19 nt, artificial
  Chemically synthesized
ugggugacauaaaugugca

SEQ ID NO: 10023 - RNA, 19 nt, artificial
  Chemically synthesized
ucaaauuuaugccacuccu

SEQ ID NO: 10024 - RNA, 19 nt, artificial
  Chemically synthesized
guagacauugacugcgugg

SEQ ID NO: 10025 - RNA, 19 nt, artificial
  Chemically synthesized
cagcacugugcaaaauggc

SEQ ID NO: 10026 - RNA, 19 nt, artificial
  Chemically synthesized
uugaggaaagucucucgca

SEQ ID NO: 10027 - RNA, 19 nt, artificial
  Chemically synthesized
uacugcugcagcuuuuggg

SEQ ID NO: 10028 - RNA, 19 nt, artificial
  Chemically synthesized
cucagguuguuaaaccagc

SEQ ID NO: 10029 - RNA, 19 nt, artificial
  Chemically synthesized
aucucgaugaaggaucgca

SEQ ID NO: 10030 - RNA, 19 nt, artificial
  Chemically synthesized
auggugaagaauucguccu

SEQ ID NO: 10031 - RNA, 19 nt, artificial
  Chemically synthesized
uagacgggacuuauccucu

SEQ ID NO: 10032 - RNA, 19 nt, artificial
  Chemically synthesized
gagauaucuuuaaacaaaa

SEQ ID NO: 10033 - RNA, 19 nt, artificial
  Chemically synthesized
ggagugaucucaacccuaa

SEQ ID NO: 10034 - RNA, 19 nt, artificial
  Chemically synthesized
cgcuaugacggcugguuua

SEQ ID NO: 10035 - RNA, 19 nt, artificial
  Chemically synthesized
gaggauaagucccgucuaa

SEQ ID NO: 10036 - RNA, 19 nt, artificial
  Chemically synthesized
caggaucucccaaagaaga

SEQ ID NO: 10037 - RNA, 19 nt, artificial
  Chemically synthesized
gagguauaauaaauaauca

SEQ ID NO: 10038 - RNA, 19 nt, artificial
  Chemically synthesized
acaagaagcuacaaaagaa

SEQ ID NO: 10039 - RNA, 19 nt, artificial
  Chemically synthesized
caauuauacaaaugagaaa

SEQ ID NO: 10040 - RNA, 19 nt, artificial
  Chemically synthesized
aacccaacaccacccuaaa

SEQ ID NO: 10041 - RNA, 19 nt, artificial
  Chemically synthesized
ccugaacaaggguuuucaa

SEQ ID NO: 10042 - RNA, 19 nt, artificial
  Chemically synthesized
ggaccaccaugcuauacau

SEQ ID NO: 10043 - RNA, 19 nt, artificial
  Chemically synthesized
caucgggcucuuuccuaaa

SEQ ID NO: 10044 - RNA, 19 nt, artificial
  Chemically synthesized
ccaaggacccagagagaaa

SEQ ID NO: 10045 - RNA, 19 nt, artificial
  Chemically synthesized
gagugaucucaacccuaau

SEQ ID NO: 10046 - RNA, 19 nt, artificial
  Chemically synthesized
ugacaaguguggaggugaa

SEQ ID NO: 10047 - RNA, 19 nt, artificial
  Chemically synthesized
guaagaagaucuacuucau

SEQ ID NO: 10048 - RNA, 19 nt, artificial
  Chemically synthesized
gcaaagauuuuaagaggaa

SEQ ID NO: 10049 - RNA, 19 nt, artificial
  Chemically synthesized
ggcaaucucuccaucagaa

SEQ ID NO: 10050 - RNA, 19 nt, artificial
  Chemically synthesized
ccuucaucgagaucuccaa

SEQ ID NO: 10051 - RNA, 19 nt, artificial
  Chemically synthesized
caaagauuuuaagaggaaa

SEQ ID NO: 10052 - RNA, 19 nt, artificial
  Chemically synthesized
ccacccaggucaagacaua

SEQ ID NO: 10053 - RNA, 19 nt, artificial
  Chemically synthesized
caucgagguauaauaaaua

SEQ ID NO: 10054 - RNA, 19 nt, artificial
  Chemically synthesized
agagauaucuuuaaacaaa

SEQ ID NO: 10055 - RNA, 19 nt, artificial
  Chemically synthesized
agaaggagcuauuuaggaa

SEQ ID NO: 10056 - RNA, 19 nt, artificial
  Chemically synthesized
ccaugaugcgauccuucau

SEQ ID NO: 10057 - RNA, 19 nt, artificial
  Chemically synthesized
ggagauugaagacauccga

SEQ ID NO: 10058 - RNA, 19 nt, artificial
  Chemically synthesized
acagaagcaaagauuuuaa

SEQ ID NO: 10059 - RNA, 19 nt, artificial
  Chemically synthesized
cuccaagaaggagauugaa

SEQ ID NO: 10060 - RNA, 19 nt, artificial
  Chemically synthesized
gagauugaagacauccgaa

SEQ ID NO: 10061 - RNA, 19 nt, artificial
  Chemically synthesized
ggagcagucccaucaucau

SEQ ID NO: 10062 - RNA, 19 nt, artificial
  Chemically synthesized
ggcaggagacuauguucua

SEQ ID NO: 10063 - RNA, 19 nt, artificial
  Chemically synthesized
ggcuguucuccaagaagga

SEQ ID NO: 10064 - RNA, 19 nt, artificial
  Chemically synthesized
ggaaugggcuguucuccaa

SEQ ID NO: 10065 - RNA, 19 nt, artificial
  Chemically synthesized
gucaggaucucccaaagaa

SEQ ID NO: 10066 - RNA, 19 nt, artificial
  Chemically synthesized
aagagagcgugaagaagga

SEQ ID NO: 10067 - RNA, 19 nt, artificial
  Chemically synthesized
caacauagugguugaagau

SEQ ID NO: 10068 - RNA, 19 nt, artificial
  Chemically synthesized
caggaaugaccaagaaugu

SEQ ID NO: 10069 - RNA, 19 nt, artificial
  Chemically synthesized
agcgcuucguggagaacua

SEQ ID NO: 10070 - RNA, 19 nt, artificial
  Chemically synthesized
cucccaaagaagauaaaga

SEQ ID NO: 10071 - RNA, 19 nt, artificial
  Chemically synthesized
gaacccaacaccacccuaa

SEQ ID NO: 10072 - RNA, 19 nt, artificial
  Chemically synthesized
ggcugagaaucuccucaga

SEQ ID NO: 10073 - RNA, 19 nt, artificial
  Chemically synthesized
ccaagaaggagauugaaga

SEQ ID NO: 10074 - RNA, 19 nt, artificial
  Chemically synthesized
gaccgcuacugguuugaga

SEQ ID NO: 10075 - RNA, 19 nt, artificial
  Chemically synthesized
agucgggauuccaggacaa

SEQ ID NO: 10076 - RNA, 19 nt, artificial
  Chemically synthesized
ucaggaccaccaugcuaua

SEQ ID NO: 10077 - RNA, 19 nt, artificial
  Chemically synthesized
ggaaggcugugacaaagca

SEQ ID NO: 10078 - RNA, 19 nt, artificial
  Chemically synthesized
ggaagaagguggagaucag

SEQ ID NO: 10079 - RNA, 19 nt, artificial
  Chemically synthesized
ugcuggucgcuguuaucaa

SEQ ID NO: 10080 - RNA, 19 nt, artificial
  Chemically synthesized
cuggauacccaaagcugua

SEQ ID NO: 10081 - RNA, 19 nt, artificial
  Chemically synthesized
ggagguggaaaugguauua

SEQ ID NO: 10082 - RNA, 19 nt, artificial
  Chemically synthesized
aucgagguauaauaaauaa

SEQ ID NO: 10083 - RNA, 19 nt, artificial
  Chemically synthesized
ccuucgagcccuucuucaa

SEQ ID NO: 10084 - RNA, 19 nt, artificial
  Chemically synthesized
aguagagcacagaagcaaa

SEQ ID NO: 10085 - RNA, 19 nt, artificial
  Chemically synthesized
auucaguacucgaucucaa

SEQ ID NO: 10086 - RNA, 19 nt, artificial
  Chemically synthesized
cugagaugagcgagaagga

SEQ ID NO: 10087 - RNA, 19 nt, artificial
  Chemically synthesized
gacccagagagaaagguga

SEQ ID NO: 10088 - RNA, 19 nt, artificial
  Chemically synthesized
uuaggaaggcugugacaaa

SEQ ID NO: 10089 - RNA, 19 nt, artificial
  Chemically synthesized
cccagauuucggaguugga

SEQ ID NO: 10090 - RNA, 19 nt, artificial
  Chemically synthesized
gacaauuauacaaaugaga

SEQ ID NO: 10091 - RNA, 19 nt, artificial
  Chemically synthesized
gauugaagacauccgaaau

SEQ ID NO: 10092 - RNA, 19 nt, artificial
  Chemically synthesized
ucaucgggcucuuuccuaa

SEQ ID NO: 10093 - RNA, 19 nt, artificial
  Chemically synthesized
gagaaggagcuauuuagga

SEQ ID NO: 10094 - RNA, 19 nt, artificial
  Chemically synthesized
gaggaaagaagacaucuga

SEQ ID NO: 10095 - RNA, 19 nt, artificial
  Chemically synthesized
guauuagagauaucuuuaa

SEQ ID NO: 10096 - RNA, 19 nt, artificial
  Chemically synthesized
ggaaaugguauuagagaua

SEQ ID NO: 10097 - RNA, 19 nt, artificial
  Chemically synthesized
guggaaaugguauuagaga

SEQ ID NO: 10098 - RNA, 19 nt, artificial
  Chemically synthesized
cagacaauuauacaaauga

SEQ ID NO: 10099 - RNA, 19 nt, artificial
  Chemically synthesized
ccagcuuccugcagaaaac

SEQ ID NO: 10100 - RNA, 19 nt, artificial
  Chemically synthesized
ugacuuccacaaaaucgau

SEQ ID NO: 10101 - RNA, 19 nt, artificial
  Chemically synthesized
gacgaauucuucaccauga

SEQ ID NO: 10102 - RNA, 19 nt, artificial
  Chemically synthesized
gcauaaauuugagguguca

SEQ ID NO: 10103 - RNA, 19 nt, artificial
  Chemically synthesized
agauaaagaccacuccuca

SEQ ID NO: 10104 - RNA, 19 nt, artificial
  Chemically synthesized
gaagacauccgaaauacca

SEQ ID NO: 10105 - RNA, 19 nt, artificial
  Chemically synthesized
ucaaagaccuggucuucaa

SEQ ID NO: 10106 - RNA, 19 nt, artificial
  Chemically synthesized
agauuuuaagaggaaagaa

SEQ ID NO: 10107 - RNA, 19 nt, artificial
  Chemically synthesized
agauugaagacauccgaaa

SEQ ID NO: 10108 - RNA, 19 nt, artificial
  Chemically synthesized
gguugaagaucugagggau

SEQ ID NO: 10109 - RNA, 19 nt, artificial
  Chemically synthesized
caaucaggacgcacucuca

SEQ ID NO: 10110 - RNA, 19 nt, artificial
  Chemically synthesized
ugugcuugacuucuuugaa

SEQ ID NO: 10111 - RNA, 19 nt, artificial
  Chemically synthesized
ugacccagacaauuauaca

SEQ ID NO: 10112 - RNA, 19 nt, artificial
  Chemically synthesized
uagagauaucuuuaaacaa

SEQ ID NO: 10113 - RNA, 19 nt, artificial
  Chemically synthesized
gagacuauguucuacaauu

SEQ ID NO: 10114 - RNA, 19 nt, artificial
  Chemically synthesized
uccugguggucuucaugaa

SEQ ID NO: 10115 - RNA, 19 nt, artificial
  Chemically synthesized
gguggaaaugguauuagag

SEQ ID NO: 10116 - RNA, 19 nt, artificial
  Chemically synthesized
gagggugaaggcaagaagu

SEQ ID NO: 10117 - RNA, 19 nt, artificial
  Chemically synthesized
cgcugcaagagaagaugca

SEQ ID NO: 10118 - RNA, 19 nt, artificial
  Chemically synthesized
gaucucccaaagaagauaa

SEQ ID NO: 10119 - RNA, 19 nt, artificial
  Chemically synthesized
gguauuagagauaucuuua

SEQ ID NO: 10120 - RNA, 19 nt, artificial
  Chemically synthesized
cgagaaggagcuauuuagg

SEQ ID NO: 10121 - RNA, 19 nt, artificial
  Chemically synthesized
gagcaguucuucucuacca

SEQ ID NO: 10122 - RNA, 19 nt, artificial
  Chemically synthesized
acaauuauacaaaugagaa

SEQ ID NO: 10123 - RNA, 19 nt, artificial
  Chemically synthesized
cuacaauugcagugcauga

SEQ ID NO: 10124 - RNA, 19 nt, artificial
  Chemically synthesized
aggaaugaccaagaaugua

SEQ ID NO: 10125 - RNA, 19 nt, artificial
  Chemically synthesized
ggugucugugcacauuuau

SEQ ID NO: 10126 - RNA, 19 nt, artificial
  Chemically synthesized
accgcuacugguuugagaa

SEQ ID NO: 10127 - RNA, 19 nt, artificial
  Chemically synthesized
ccaguauccugccuucucu

SEQ ID NO: 10128 - RNA, 19 nt, artificial
  Chemically synthesized
agacaauuauacaaaugag

SEQ ID NO: 10129 - RNA, 19 nt, artificial
  Chemically synthesized
cugaacaaggguuuucaaa

SEQ ID NO: 10130 - RNA, 19 nt, artificial
  Chemically synthesized
uaauguuuaccauguauga

SEQ ID NO: 10131 - RNA, 19 nt, artificial
  Chemically synthesized
ugucaaagguggaggugga

SEQ ID NO: 10132 - RNA, 19 nt, artificial
  Chemically synthesized
ucuccaagaaggagauuga

SEQ ID NO: 10133 - RNA, 19 nt, artificial
  Chemically synthesized
uaauugacuuccacaaaau

SEQ ID NO: 10134 - RNA, 19 nt, artificial
  Chemically synthesized
ggcugguuuaacaaccuga

SEQ ID NO: 10135 - RNA, 19 nt, artificial
  Chemically synthesized
aucucccaaagaagauaaa

SEQ ID NO: 10136 - RNA, 19 nt, artificial
  Chemically synthesized
cagcuuccugcagaaaaca

SEQ ID NO: 10137 - RNA, 19 nt, artificial
  Chemically synthesized
aggagugaccuaccugcaa

SEQ ID NO: 10138 - RNA, 19 nt, artificial
  Chemically synthesized
cccaggacauguuugugga

SEQ ID NO: 10139 - RNA, 19 nt, artificial
  Chemically synthesized
gagcgugaagaaggaagca

SEQ ID NO: 10140 - RNA, 19 nt, artificial
  Chemically synthesized
gaaguagagcacagaagca

SEQ ID NO: 10141 - RNA, 19 nt, artificial
  Chemically synthesized
agggcaccaggaaacaaag

SEQ ID NO: 10142 - RNA, 19 nt, artificial
  Chemically synthesized
cccagagagaaaggugaga

SEQ ID NO: 10143 - RNA, 19 nt, artificial
  Chemically synthesized
cacaagaagcuacaaaaga

SEQ ID NO: 10144 - RNA, 19 nt, artificial
  Chemically synthesized
gaccaagaauguagagaag

SEQ ID NO: 10145 - RNA, 19 nt, artificial
  Chemically synthesized
acaucgagguauaauaaau

SEQ ID NO: 10146 - RNA, 19 nt, artificial
  Chemically synthesized
gcugugcuggauacccaaa

SEQ ID NO: 10147 - RNA, 19 nt, artificial
  Chemically synthesized
gcuggauacccaaagcugu

SEQ ID NO: 10148 - RNA, 19 nt, artificial
  Chemically synthesized
uuaccaccacccaggucaa

SEQ ID NO: 10149 - RNA, 19 nt, artificial
  Chemically synthesized
gagcgagaaggagcuauuu

SEQ ID NO: 10150 - RNA, 19 nt, artificial
  Chemically synthesized
acaguacccaggaggugaa

SEQ ID NO: 10151 - RNA, 19 nt, artificial
  Chemically synthesized
acccaaagcuguaccuuga

SEQ ID NO: 10152 - RNA, 19 nt, artificial
  Chemically synthesized
uggagugaucucaacccua

SEQ ID NO: 10153 - RNA, 19 nt, artificial
  Chemically synthesized
acaucugaacccaacacca

SEQ ID NO: 10154 - RNA, 19 nt, artificial
  Chemically synthesized
agcgagaaggagcuauuua

SEQ ID NO: 10155 - RNA, 19 nt, artificial
  Chemically synthesized
uggagaucuucuucagaca

SEQ ID NO: 10156 - RNA, 19 nt, artificial
  Chemically synthesized
caugaugauuauaagucca

SEQ ID NO: 10157 - RNA, 19 nt, artificial
  Chemically synthesized
ccuccaggaaugaccaaga

SEQ ID NO: 10158 - RNA, 19 nt, artificial
  Chemically synthesized
uugacuuccacaaaaucga

SEQ ID NO: 10159 - RNA, 19 nt, artificial
  Chemically synthesized
uccaagagguggaggagaa

SEQ ID NO: 10160 - RNA, 19 nt, artificial
  Chemically synthesized
ccuggagaucuucuucaga

SEQ ID NO: 10161 - RNA, 19 nt, artificial
  Chemically synthesized
gguuuaacaaccugaggca

SEQ ID NO: 10162 - RNA, 19 nt, artificial
  Chemically synthesized
uauugacccagacaauuau

SEQ ID NO: 10163 - RNA, 19 nt, artificial
  Chemically synthesized
uguaugaccuggaugagaa

SEQ ID NO: 10164 - RNA, 19 nt, artificial
  Chemically synthesized
uaaucauguacauguuuua

SEQ ID NO: 10165 - RNA, 19 nt, artificial
  Chemically synthesized
aagcucucagggucugcaa

SEQ ID NO: 10166 - RNA, 19 nt, artificial
  Chemically synthesized
gaacuggagugaucucaac

SEQ ID NO: 10167 - RNA, 19 nt, artificial
  Chemically synthesized
ccauguaugaccuggauga

SEQ ID NO: 10168 - RNA, 19 nt, artificial
  Chemically synthesized
uggucccggcaaucaucua

SEQ ID NO: 10169 - RNA, 19 nt, artificial
  Chemically synthesized
augcgauccuucaucgaga

SEQ ID NO: 10170 - RNA, 19 nt, artificial
  Chemically synthesized
uuacaucgagguauaauaa

SEQ ID NO: 10171 - RNA, 19 nt, artificial
  Chemically synthesized
ucauguacauguuuuacca

SEQ ID NO: 10172 - RNA, 19 nt, artificial
  Chemically synthesized
aaaagcugcagcaguacaa

SEQ ID NO: 10173 - RNA, 19 nt, artificial
  Chemically synthesized
ucaggaucucccaaagaag

SEQ ID NO: 10174 - RNA, 19 nt, artificial
  Chemically synthesized
cgagguauaauaaauaauc

SEQ ID NO: 10175 - RNA, 19 nt, artificial
  Chemically synthesized
gcuguaaaauauuuuacau

SEQ ID NO: 10176 - RNA, 19 nt, artificial
  Chemically synthesized
uguccucgaccaguuugua

SEQ ID NO: 10177 - RNA, 19 nt, artificial
  Chemically synthesized
cuaagcagcucacaacuga

SEQ ID NO: 10178 - RNA, 19 nt, artificial
  Chemically synthesized
aagacaucugaacccaaca

SEQ ID NO: 10179 - RNA, 19 nt, artificial
  Chemically synthesized
ggagugaccuaccugcaau

SEQ ID NO: 10180 - RNA, 19 nt, artificial
  Chemically synthesized
ucugguuccgcuaccacaa

SEQ ID NO: 10181 - RNA, 19 nt, artificial
  Chemically synthesized
gagaguuccuggacauccu

SEQ ID NO: 10182 - RNA, 19 nt, artificial
  Chemically synthesized
aggagcagcccuacuucua

SEQ ID NO: 10183 - RNA, 19 nt, artificial
  Chemically synthesized
agaaggagauugaagacau

SEQ ID NO: 10184 - RNA, 19 nt, artificial
  Chemically synthesized
aggauaccguccuuuccua

SEQ ID NO: 10185 - RNA, 19 nt, artificial
  Chemically synthesized
cauagugguugaagaucug

SEQ ID NO: 10186 - RNA, 19 nt, artificial
  Chemically synthesized
cauccuguccaacaaccga

SEQ ID NO: 10187 - RNA, 19 nt, artificial
  Chemically synthesized
cccaaagcuguaccuugau

SEQ ID NO: 10188 - RNA, 19 nt, artificial
  Chemically synthesized
cgcuguuaucaacauugac

SEQ ID NO: 10189 - RNA, 19 nt, artificial
  Chemically synthesized
aguuuugguccuacuaaau

SEQ ID NO: 10190 - RNA, 19 nt, artificial
  Chemically synthesized
cauuguccucgaccaguuu

SEQ ID NO: 10191 - RNA, 19 nt, artificial
  Chemically synthesized
gcacagaagcaaagauuuu

SEQ ID NO: 10192 - RNA, 19 nt, artificial
  Chemically synthesized
aggcuuugaguacaaguca

SEQ ID NO: 10193 - RNA, 19 nt, artificial
  Chemically synthesized
cagaaagugcugaaccgga

SEQ ID NO: 10194 - RNA, 19 nt, artificial
  Chemically synthesized
cugaugugauuucuaccaa

SEQ ID NO: 10195 - RNA, 19 nt, artificial
  Chemically synthesized
agaagcaaagauuuuaaga

SEQ ID NO: 10196 - RNA, 19 nt, artificial
  Chemically synthesized
ccacaucucuaauugacuu

SEQ ID NO: 10197 - RNA, 19 nt, artificial
  Chemically synthesized
uauuuuacaucgagguaua

SEQ ID NO: 10198 - RNA, 19 nt, artificial
  Chemically synthesized
gagaaaaggcaggagacua

SEQ ID NO: 10199 - RNA, 19 nt, artificial
  Chemically synthesized
aaagcugagcuguaaaaua

SEQ ID NO: 10200 - RNA, 19 nt, artificial
  Chemically synthesized
aaaacacucccggaguaua

SEQ ID NO: 10201 - RNA, 19 nt, artificial
  Chemically synthesized
gaaggagauugaagacauc

SEQ ID NO: 10202 - RNA, 19 nt, artificial
  Chemically synthesized
ucaagaucccuaaggagua

SEQ ID NO: 10203 - RNA, 19 nt, artificial
  Chemically synthesized
caguauccugccuucucuu

SEQ ID NO: 10204 - RNA, 19 nt, artificial
  Chemically synthesized
ugucgagucucguucauca

SEQ ID NO: 10205 - RNA, 19 nt, artificial
  Chemically synthesized
ggcucuuuccuaaaaagcu

SEQ ID NO: 10206 - RNA, 19 nt, artificial
  Chemically synthesized
gagaauauugacccagaca

SEQ ID NO: 10207 - RNA, 19 nt, artificial
  Chemically synthesized
caaugucuacaucuucuca

SEQ ID NO: 10208 - RNA, 19 nt, artificial
  Chemically synthesized
aggaucucccaaagaagau

SEQ ID NO: 10209 - RNA, 19 nt, artificial
  Chemically synthesized
caauagugcuugucuccga

SEQ ID NO: 10210 - RNA, 19 nt, artificial
  Chemically synthesized
uuuugguccuacuaaauau

SEQ ID NO: 10211 - RNA, 19 nt, artificial
  Chemically synthesized
augacggcugguuuaacaa

SEQ ID NO: 10212 - RNA, 19 nt, artificial
  Chemically synthesized
uucaguacucgaucucaau

SEQ ID NO: 10213 - RNA, 19 nt, artificial
  Chemically synthesized
ucaaagagagcgugaagaa

SEQ ID NO: 10214 - RNA, 19 nt, artificial
  Chemically synthesized
guuuugguccuacuaaaua

SEQ ID NO: 10215 - RNA, 19 nt, artificial
  Chemically synthesized
guaccuugauggaccguuu

SEQ ID NO: 10216 - RNA, 19 nt, artificial
  Chemically synthesized
guggagguggaaaugguau

SEQ ID NO: 10217 - RNA, 19 nt, artificial
  Chemically synthesized
cguguuugcagaucgugcu

SEQ ID NO: 10218 - RNA, 19 nt, artificial
  Chemically synthesized
gacauuugagggaggagga

SEQ ID NO: 10219 - RNA, 19 nt, artificial
  Chemically synthesized
caagaucccuaaggaguau

SEQ ID NO: 10220 - RNA, 19 nt, artificial
  Chemically synthesized
aacgcauccuggagaucuu

SEQ ID NO: 10221 - RNA, 19 nt, artificial
  Chemically synthesized
aggugaaaagguacaauag

SEQ ID NO: 10222 - RNA, 19 nt, artificial
  Chemically synthesized
cauguuuuaccaccaccca

SEQ ID NO: 10223 - RNA, 19 nt, artificial
  Chemically synthesized
agcaguucuucucuaccau

SEQ ID NO: 10224 - RNA, 19 nt, artificial
  Chemically synthesized
ucgcuguuaucaacauuga

SEQ ID NO: 10225 - RNA, 19 nt, artificial
  Chemically synthesized
cagggucugcaacaacuac

SEQ ID NO: 10226 - RNA, 19 nt, artificial
  Chemically synthesized
ucaucgagaucuccaacaa

SEQ ID NO: 10227 - RNA, 19 nt, artificial
  Chemically synthesized
gggugaaggcaagaaguag

SEQ ID NO: 10228 - RNA, 19 nt, artificial
  Chemically synthesized
uuugguccuacuaaauaua

SEQ ID NO: 10229 - RNA, 19 nt, artificial
  Chemically synthesized
ugagcuguaaaauauuuua

SEQ ID NO: 10230 - RNA, 19 nt, artificial
  Chemically synthesized
guuugagaacaccaggaau

SEQ ID NO: 10231 - RNA, 19 nt, artificial
  Chemically synthesized
ucgagguauaauaaauaau

SEQ ID NO: 10232 - RNA, 19 nt, artificial
  Chemically synthesized
aggaccuaucccagcuaga

SEQ ID NO: 10233 - RNA, 19 nt, artificial
  Chemically synthesized
gaucgugcuuacuacuaug

SEQ ID NO: 10234 - RNA, 19 nt, artificial
  Chemically synthesized
uuucggaguuggaggacaa

SEQ ID NO: 10235 - RNA, 19 nt, artificial
  Chemically synthesized
gauuauaaguccaccuguu

SEQ ID NO: 10236 - RNA, 19 nt, artificial
  Chemically synthesized
aaauaaucauguacauguu

SEQ ID NO: 10237 - RNA, 19 nt, artificial
  Chemically synthesized
caaggcuuugaguacaagu

SEQ ID NO: 10238 - RNA, 19 nt, artificial
  Chemically synthesized
aacucugucuccaggucua

SEQ ID NO: 10239 - RNA, 19 nt, artificial
  Chemically synthesized
ugcucuaugcccugcucau

SEQ ID NO: 10240 - RNA, 19 nt, artificial
  Chemically synthesized
aaagcuguaccuugaugga

SEQ ID NO: 10241 - RNA, 19 nt, artificial
  Chemically synthesized
ugcagaaaacacucccgga

SEQ ID NO: 10242 - RNA, 19 nt, artificial
  Chemically synthesized
agaggagcagucccaucau

SEQ ID NO: 10243 - RNA, 19 nt, artificial
  Chemically synthesized
caucuauggaggugacaag

SEQ ID NO: 10244 - RNA, 19 nt, artificial
  Chemically synthesized
agaacuaccggaggcacau

SEQ ID NO: 10245 - RNA, 19 nt, artificial
  Chemically synthesized
uaugacggcugguuuaaca

SEQ ID NO: 10246 - RNA, 19 nt, artificial
  Chemically synthesized
acaucauccaagaggugga

SEQ ID NO: 10247 - RNA, 19 nt, artificial
  Chemically synthesized
guaaaauauuuuacaucga

SEQ ID NO: 10248 - RNA, 19 nt, artificial
  Chemically synthesized
agagagcgugaagaaggaa

SEQ ID NO: 10249 - RNA, 19 nt, artificial
  Chemically synthesized
gcuggucgcuguuaucaac

SEQ ID NO: 10250 - RNA, 19 nt, artificial
  Chemically synthesized
gagcacagaagcaaagauu

SEQ ID NO: 10251 - RNA, 19 nt, artificial
  Chemically synthesized
cgucuaauguuuaccaugu

SEQ ID NO: 10252 - RNA, 19 nt, artificial
  Chemically synthesized
accagucaggaucucccaa

SEQ ID NO: 10253 - RNA, 19 nt, artificial
  Chemically synthesized
cuuugaguacaagucagga

SEQ ID NO: 10254 - RNA, 19 nt, artificial
  Chemically synthesized
agucaggaucucccaaaga

SEQ ID NO: 10255 - RNA, 19 nt, artificial
  Chemically synthesized
uacaucgagguauaauaaa

SEQ ID NO: 10256 - RNA, 19 nt, artificial
  Chemically synthesized
ugaugcgauccuucaucga

SEQ ID NO: 10257 - RNA, 19 nt, artificial
  Chemically synthesized
gucugcaacaacuacugga

SEQ ID NO: 10258 - RNA, 19 nt, artificial
  Chemically synthesized
gaagauaaagaccacuccu

SEQ ID NO: 10259 - RNA, 19 nt, artificial
  Chemically synthesized
uuuacaucgagguauaaua

SEQ ID NO: 10260 - RNA, 19 nt, artificial
  Chemically synthesized
ccagcugucauuuccggaa

SEQ ID NO: 10261 - RNA, 19 nt, artificial
  Chemically synthesized
augggcuguucuccaagaa

SEQ ID NO: 10262 - RNA, 19 nt, artificial
  Chemically synthesized
aaagugucagcaacuuuga

SEQ ID NO: 10263 - RNA, 19 nt, artificial
  Chemically synthesized
gcagaucgugcuuacuacu

SEQ ID NO: 10264 - RNA, 19 nt, artificial
  Chemically synthesized
aaccagucaggaucuccca

SEQ ID NO: 10265 - RNA, 19 nt, artificial
  Chemically synthesized
agcuguaaaauauuuuaca

SEQ ID NO: 10266 - RNA, 19 nt, artificial
  Chemically synthesized
auugacccagacaauuaua

SEQ ID NO: 10267 - RNA, 19 nt, artificial
  Chemically synthesized
uacaaaagaaacucaaaga

SEQ ID NO: 10268 - RNA, 19 nt, artificial
  Chemically synthesized
cugccuucccuuagugagu

SEQ ID NO: 10269 - RNA, 19 nt, artificial
  Chemically synthesized
cucuaugcccugcucauca

SEQ ID NO: 10270 - RNA, 19 nt, artificial
  Chemically synthesized
uaaaaagcugagcuguaaa

SEQ ID NO: 10271 - RNA, 19 nt, artificial
  Chemically synthesized
caugugccgcaaccucaua

SEQ ID NO: 10272 - RNA, 19 nt, artificial
  Chemically synthesized
ccuguacaaccaggaccua

SEQ ID NO: 10273 - RNA, 19 nt, artificial
  Chemically synthesized
ucaccaugaugcgauccuu

SEQ ID NO: 10274 - RNA, 19 nt, artificial
  Chemically synthesized
gaccuggucuucaagucau

SEQ ID NO: 10275 - RNA, 19 nt, artificial
  Chemically synthesized
ucucuaauugacuuccaca

SEQ ID NO: 10276 - RNA, 19 nt, artificial
  Chemically synthesized
cugcgagagacuuuccuca

SEQ ID NO: 10277 - RNA, 19 nt, artificial
  Chemically synthesized
gugcaugaugauuauaagu

SEQ ID NO: 10278 - RNA, 19 nt, artificial
  Chemically synthesized
caaggaacuggagugaucu

SEQ ID NO: 10279 - RNA, 19 nt, artificial
  Chemically synthesized
ggauaagucccgucuaaug

SEQ ID NO: 10280 - RNA, 19 nt, artificial
  Chemically synthesized
cuuuucuuuuccuuuuuca

SEQ ID NO: 10281 - RNA, 19 nt, artificial
  Chemically synthesized
gaaugauggguccaagcuu

SEQ ID NO: 10282 - RNA, 19 nt, artificial
  Chemically synthesized
caaaagcugcagcaguaca

SEQ ID NO: 10283 - RNA, 19 nt, artificial
  Chemically synthesized
agcuggucaccuuacgcaa

SEQ ID NO: 10284 - RNA, 19 nt, artificial
  Chemically synthesized
ugugccuuuugaugccgca

SEQ ID NO: 10285 - RNA, 19 nt, artificial
  Chemically synthesized
gcucuuuaacuuuucuuuu

SEQ ID NO: 10286 - RNA, 19 nt, artificial
  Chemically synthesized
gugcagaagcugugaugcu

SEQ ID NO: 10287 - RNA, 19 nt, artificial
  Chemically synthesized
gcaaucucuccaucagaau

SEQ ID NO: 10288 - RNA, 19 nt, artificial
  Chemically synthesized
ugguauuagagauaucuuu

SEQ ID NO: 10289 - RNA, 19 nt, artificial
  Chemically synthesized
gacuuccugcccuuagcaa

SEQ ID NO: 10290 - RNA, 19 nt, artificial
  Chemically synthesized
cggaagaagguggagauca

SEQ ID NO: 10291 - RNA, 19 nt, artificial
  Chemically synthesized
caaucugaacaguacccag

SEQ ID NO: 10292 - RNA, 19 nt, artificial
  Chemically synthesized
ccugaacaggcaucucacu

SEQ ID NO: 10293 - RNA, 19 nt, artificial
  Chemically synthesized
auuuuaagaggaaagaaga

SEQ ID NO: 10294 - RNA, 19 nt, artificial
  Chemically synthesized
gaccuggugcugcuguuua

SEQ ID NO: 10295 - RNA, 19 nt, artificial
  Chemically synthesized
gcuuggacugacauuugag

SEQ ID NO: 10296 - RNA, 19 nt, artificial
  Chemically synthesized
augcccugcucaucaucca

SEQ ID NO: 10297 - RNA, 19 nt, artificial
  Chemically synthesized
auauugacccagacaauua

SEQ ID NO: 10298 - RNA, 19 nt, artificial
  Chemically synthesized
agaagcugugaugcuuaga

SEQ ID NO: 10299 - RNA, 19 nt, artificial
  Chemically synthesized
ccucagggagaucuacuca

SEQ ID NO: 10300 - RNA, 19 nt, artificial
  Chemically synthesized
agaucuacuucaucugggu

SEQ ID NO: 10301 - RNA, 19 nt, artificial
  Chemically synthesized
cuuccucuccaaggacgaa

SEQ ID NO: 10302 - RNA, 19 nt, artificial
  Chemically synthesized
cucccggaguauacaggau

SEQ ID NO: 10303 - RNA, 19 nt, artificial
  Chemically synthesized
accaugaugcgauccuuca

SEQ ID NO: 10304 - RNA, 19 nt, artificial
  Chemically synthesized
ccuccauccucaaagaccu

SEQ ID NO: 10305 - RNA, 19 nt, artificial
  Chemically synthesized
ucauccagcugcugucaga

SEQ ID NO: 10306 - RNA, 19 nt, artificial
  Chemically synthesized
gagaaaggugagagugcag

SEQ ID NO: 10307 - RNA, 19 nt, artificial
  Chemically synthesized
gagaaguucgaccucagga

SEQ ID NO: 10308 - RNA, 19 nt, artificial
  Chemically synthesized
guacccaggaggugaauga

SEQ ID NO: 10309 - RNA, 19 nt, artificial
  Chemically synthesized
ucugcugccuucccuuagu

SEQ ID NO: 10310 - RNA, 19 nt, artificial
  Chemically synthesized
uggucgcuguuaucaacau

SEQ ID NO: 10311 - RNA, 19 nt, artificial
  Chemically synthesized
aacucaaagagagcgugaa

SEQ ID NO: 10312 - RNA, 19 nt, artificial
  Chemically synthesized
cacgcagucaaugucuaca

SEQ ID NO: 10313 - RNA, 19 nt, artificial
  Chemically synthesized
ugcugccuucccuuaguga

SEQ ID NO: 10314 - RNA, 19 nt, artificial
  Chemically synthesized
guaugacaggugugcuucu

SEQ ID NO: 10315 - RNA, 19 nt, artificial
  Chemically synthesized
aggcugugacaaagcagca

SEQ ID NO: 10316 - RNA, 19 nt, artificial
  Chemically synthesized
uguucuccaagaaggagau

SEQ ID NO: 10317 - RNA, 19 nt, artificial
  Chemically synthesized
acauccugguggucuucau

SEQ ID NO: 10318 - RNA, 19 nt, artificial
  Chemically synthesized
agcacagaagcaaagauuu

SEQ ID NO: 10319 - RNA, 19 nt, artificial
  Chemically synthesized
gcucaagaucccuaaggag

SEQ ID NO: 10320 - RNA, 19 nt, artificial
  Chemically synthesized
aagcugugaugcuuagaac

SEQ ID NO: 10321 - RNA, 19 nt, artificial
  Chemically synthesized
accacugaugugauuucua

SEQ ID NO: 10322 - RNA, 19 nt, artificial
  Chemically synthesized
gaauccaccuuaggccuca

SEQ ID NO: 10323 - RNA, 19 nt, artificial
  Chemically synthesized
ucuucaacucccugcagga

SEQ ID NO: 10324 - RNA, 19 nt, artificial
  Chemically synthesized
aaaagaaacucaaagagag

SEQ ID NO: 10325 - RNA, 19 nt, artificial
  Chemically synthesized
gaugcuuagaaccuggaca

SEQ ID NO: 10326 - RNA, 19 nt, artificial
  Chemically synthesized
aagcaaccacugaugugau

SEQ ID NO: 10327 - RNA, 19 nt, artificial
  Chemically synthesized
uugccuccauccucaaaga

SEQ ID NO: 10328 - RNA, 19 nt, artificial
  Chemically synthesized
gcuuccugcagaaaacacu

SEQ ID NO: 10329 - RNA, 19 nt, artificial
  Chemically synthesized
ugcagaucgugcuuacuac

SEQ ID NO: 10330 - RNA, 19 nt, artificial
  Chemically synthesized
uugggagaauauugaccca

SEQ ID NO: 10331 - RNA, 19 nt, artificial
  Chemically synthesized
aauugcagugcaugaugau

SEQ ID NO: 10332 - RNA, 19 nt, artificial
  Chemically synthesized
cagaaaacacucccggagu

SEQ ID NO: 10333 - RNA, 19 nt, artificial
  Chemically synthesized
acuucaugcaccacuauga

SEQ ID NO: 10334 - RNA, 19 nt, artificial
  Chemically synthesized
agcugucgagucucguuca

SEQ ID NO: 10335 - RNA, 19 nt, artificial
  Chemically synthesized
aggauaagucccgucuaau

SEQ ID NO: 10336 - RNA, 19 nt, artificial
  Chemically synthesized
ugcuguuuaguucugaaga

SEQ ID NO: 10337 - RNA, 19 nt, artificial
  Chemically synthesized
aggaaugggcuguucucca

SEQ ID NO: 10338 - RNA, 19 nt, artificial
  Chemically synthesized
gauuuuaagaggaaagaag

SEQ ID NO: 10339 - RNA, 19 nt, artificial
  Chemically synthesized
ccacaaaaucgaugcguug

SEQ ID NO: 10340 - RNA, 19 nt, artificial
  Chemically synthesized
ccaugcuauacaucugcga

SEQ ID NO: 10341 - RNA, 19 nt, artificial
  Chemically synthesized
gaagcaaccacugauguga

SEQ ID NO: 10342 - RNA, 19 nt, artificial
  Chemically synthesized
aguuggaggacaacauagu

SEQ ID NO: 10343 - RNA, 19 nt, artificial
  Chemically synthesized
acaacuacuggauucggga

SEQ ID NO: 10344 - RNA, 19 nt, artificial
  Chemically synthesized
aagagguggaggagaacga

SEQ ID NO: 10345 - RNA, 19 nt, artificial
  Chemically synthesized
gaugcguugcuuugguauu

SEQ ID NO: 10346 - RNA, 19 nt, artificial
  Chemically synthesized
aacacucccggaguauaca

SEQ ID NO: 10347 - RNA, 19 nt, artificial
  Chemically synthesized
ccacugaugugauuucuac

SEQ ID NO: 10348 - RNA, 19 nt, artificial
  Chemically synthesized
caagaccagaggcacugau

SEQ ID NO: 10349 - RNA, 19 nt, artificial
  Chemically synthesized
gcaagagaagaugcagcga

SEQ ID NO: 10350 - RNA, 19 nt, artificial
  Chemically synthesized
caguacccaggaggugaau

SEQ ID NO: 10351 - RNA, 19 nt, artificial
  Chemically synthesized
agacagucccugcuuguga

SEQ ID NO: 10352 - RNA, 19 nt, artificial
  Chemically synthesized
agaucccuaaggaguauga

SEQ ID NO: 10353 - RNA, 19 nt, artificial
  Chemically synthesized
cucagggagaucuacucau

SEQ ID NO: 10354 - RNA, 19 nt, artificial
  Chemically synthesized
cccugcuugugacaagugu

SEQ ID NO: 10355 - RNA, 19 nt, artificial
  Chemically synthesized
gugucagcaacuuugagga

SEQ ID NO: 10356 - RNA, 19 nt, artificial
  Chemically synthesized
uccaguuuugguccuacua

SEQ ID NO: 10357 - RNA, 19 nt, artificial
  Chemically synthesized
cugacaucauccaagaggu

SEQ ID NO: 10358 - RNA, 19 nt, artificial
  Chemically synthesized
ucaugcaccacuaugagaa

SEQ ID NO: 10359 - RNA, 19 nt, artificial
  Chemically synthesized
auuuuacaucgagguauaa

SEQ ID NO: 10360 - RNA, 19 nt, artificial
  Chemically synthesized
cgcuaugugccuuuugaug

SEQ ID NO: 10361 - RNA, 19 nt, artificial
  Chemically synthesized
cugagaaguucgaccucag

SEQ ID NO: 10362 - RNA, 19 nt, artificial
  Chemically synthesized
acccaggucaagacauaga

SEQ ID NO: 10363 - RNA, 19 nt, artificial
  Chemically synthesized
ccuggugcugcuguuuagu

SEQ ID NO: 10364 - RNA, 19 nt, artificial
  Chemically synthesized
gaaaugguauuagagauau

SEQ ID NO: 10365 - RNA, 19 nt, artificial
  Chemically synthesized
uggacauccugguggucuu

SEQ ID NO: 10366 - RNA, 19 nt, artificial
  Chemically synthesized
cccuagcuccuagaagcaa

SEQ ID NO: 10367 - RNA, 19 nt, artificial
  Chemically synthesized
acuauguucuacaauugca

SEQ ID NO: 10368 - RNA, 19 nt, artificial
  Chemically synthesized
ccaaggaacuggagugauc

SEQ ID NO: 10369 - RNA, 19 nt, artificial
  Chemically synthesized
aauucucccguacagacua

SEQ ID NO: 10370 - RNA, 19 nt, artificial
  Chemically synthesized
aggugcuggacaucaacca

SEQ ID NO: 10371 - RNA, 19 nt, artificial
  Chemically synthesized
ugacaggugugcuucugcu

SEQ ID NO: 10372 - RNA, 19 nt, artificial
  Chemically synthesized
gaaaacacucccggaguau

SEQ ID NO: 10373 - RNA, 19 nt, artificial
  Chemically synthesized
gugauuucuaccaaaucca

SEQ ID NO: 10374 - RNA, 19 nt, artificial
  Chemically synthesized
uguacauguuuuaccacca

SEQ ID NO: 10375 - RNA, 19 nt, artificial
  Chemically synthesized
ugcccugcucaucauccau

SEQ ID NO: 10376 - RNA, 19 nt, artificial
  Chemically synthesized
accaaggacccagagagaa

SEQ ID NO: 10377 - RNA, 19 nt, artificial
  Chemically synthesized
acggcugguuuaacaaccu

SEQ ID NO: 10378 - RNA, 19 nt, artificial
  Chemically synthesized
aggagcagucccaucauca

SEQ ID NO: 10379 - RNA, 19 nt, artificial
  Chemically synthesized
ugacugugcuugacuucuu

SEQ ID NO: 10380 - RNA, 19 nt, artificial
  Chemically synthesized
aggucaagacauagaaugu

SEQ ID NO: 10381 - RNA, 19 nt, artificial
  Chemically synthesized
ggaaugaccaagaauguag

SEQ ID NO: 10382 - RNA, 19 nt, artificial
  Chemically synthesized
aauauugggagaauauuga

SEQ ID NO: 10383 - RNA, 19 nt, artificial
  Chemically synthesized
agaccuggucuucaaguca

SEQ ID NO: 10384 - RNA, 19 nt, artificial
  Chemically synthesized
cuggagugaucucaacccu

SEQ ID NO: 10385 - RNA, 19 nt, artificial
  Chemically synthesized
aguucuucucuaccauggu

SEQ ID NO: 10386 - RNA, 19 nt, artificial
  Chemically synthesized
cugccuucucuucugugca

SEQ ID NO: 10387 - RNA, 19 nt, artificial
  Chemically synthesized
ggacgaauucuucaccaug

SEQ ID NO: 10388 - RNA, 19 nt, artificial
  Chemically synthesized
cguugcuuugguauuugcu

SEQ ID NO: 10389 - RNA, 19 nt, artificial
  Chemically synthesized
gaagguccugaacaagggu

SEQ ID NO: 10390 - RNA, 19 nt, artificial
  Chemically synthesized
guugaagaucugagggauu

SEQ ID NO: 10391 - RNA, 19 nt, artificial
  Chemically synthesized
gcccugauauucuugaugu

SEQ ID NO: 10392 - RNA, 19 nt, artificial
  Chemically synthesized
cggcugguuuaacaaccug

SEQ ID NO: 10393 - RNA, 19 nt, artificial
  Chemically synthesized
agauaucuuuaaacaaaac

SEQ ID NO: 10394 - RNA, 19 nt, artificial
  Chemically synthesized
gcgagagacuuuccucaac

SEQ ID NO: 10395 - RNA, 19 nt, artificial
  Chemically synthesized
ucuugaugucaccagugau

SEQ ID NO: 10396 - RNA, 19 nt, artificial
  Chemically synthesized
aaugggcuguucuccaaga

SEQ ID NO: 10397 - RNA, 19 nt, artificial
  Chemically synthesized
gcuccuagaagcaaccacu

SEQ ID NO: 10398 - RNA, 19 nt, artificial
  Chemically synthesized
caggauaccguccuuuccu

SEQ ID NO: 10399 - RNA, 19 nt, artificial
  Chemically synthesized
aagauuuuaagaggaaaga

SEQ ID NO: 10400 - RNA, 19 nt, artificial
  Chemically synthesized
aguacaagcgcuucgugga

SEQ ID NO: 10401 - RNA, 19 nt, artificial
  Chemically synthesized
gcauccuggagaucuucuu

SEQ ID NO: 10402 - RNA, 19 nt, artificial
  Chemically synthesized
gacaugggaggauuuucac

SEQ ID NO: 10403 - RNA, 19 nt, artificial
  Chemically synthesized
gaagaucugagggauuacu

SEQ ID NO: 10404 - RNA, 19 nt, artificial
  Chemically synthesized
cagugcagaagcugugaug

SEQ ID NO: 10405 - RNA, 19 nt, artificial
  Chemically synthesized
caagaaggagauugaagac

SEQ ID NO: 10406 - RNA, 19 nt, artificial
  Chemically synthesized
cagucccugcuugugacaa

SEQ ID NO: 10407 - RNA, 19 nt, artificial
  Chemically synthesized
uucacuucaugcugcggga

SEQ ID NO: 10408 - RNA, 19 nt, artificial
  Chemically synthesized
ugcagaagcugugaugcuu

SEQ ID NO: 10409 - RNA, 19 nt, artificial
  Chemically synthesized
ugaacccaacaccacccua

SEQ ID NO: 10410 - RNA, 19 nt, artificial
  Chemically synthesized
gauaaagaccacuccucac

SEQ ID NO: 10411 - RNA, 19 nt, artificial
  Chemically synthesized
agaugagcgagaaggagcu

SEQ ID NO: 10412 - RNA, 19 nt, artificial
  Chemically synthesized
acucccggaguauacagga

SEQ ID NO: 10413 - RNA, 19 nt, artificial
  Chemically synthesized
aaguagagcacagaagcaa

SEQ ID NO: 10414 - RNA, 19 nt, artificial
  Chemically synthesized
gauaucuuuaaacaaaaca

SEQ ID NO: 10415 - RNA, 19 nt, artificial
  Chemically synthesized
ggugcugcuguuuaguucu

SEQ ID NO: 10416 - RNA, 19 nt, artificial
  Chemically synthesized
ccucauaaccuuccugcga

SEQ ID NO: 10417 - RNA, 19 nt, artificial
  Chemically synthesized
cuauguucuacaauugcag

SEQ ID NO: 10418 - RNA, 19 nt, artificial
  Chemically synthesized
caaagaccuggucuucaag

SEQ ID NO: 10419 - RNA, 19 nt, artificial
  Chemically synthesized
cuuuugaugccgcagugga

SEQ ID NO: 10420 - RNA, 19 nt, artificial
  Chemically synthesized
guccugaacaggcaucuca

SEQ ID NO: 10421 - RNA, 19 nt, artificial
  Chemically synthesized
guuugcagaucgugcuuac

SEQ ID NO: 10422 - RNA, 19 nt, artificial
  Chemically synthesized
auacaaaugagaaaaggca

SEQ ID NO: 10423 - RNA, 19 nt, artificial
  Chemically synthesized
caaggacccagagagaaag

SEQ ID NO: 10424 - RNA, 19 nt, artificial
  Chemically synthesized
ccuggugucugugcacauu

SEQ ID NO: 10425 - RNA, 19 nt, artificial
  Chemically synthesized
cuguucuccaagaaggaga

SEQ ID NO: 10426 - RNA, 19 nt, artificial
  Chemically synthesized
acauagugguugaagaucu

SEQ ID NO: 10427 - RNA, 19 nt, artificial
  Chemically synthesized
agacuuccugcccuuagca

SEQ ID NO: 10428 - RNA, 19 nt, artificial
  Chemically synthesized
uccgagaguuccuggacau

SEQ ID NO: 10429 - RNA, 19 nt, artificial
  Chemically synthesized
gaugagcgagaaggagcua

SEQ ID NO: 10430 - RNA, 19 nt, artificial
  Chemically synthesized
gccuuugugcagcagcuau

SEQ ID NO: 10431 - RNA, 19 nt, artificial
  Chemically synthesized
gacaucccaaggaacugga

SEQ ID NO: 10432 - RNA, 19 nt, artificial
  Chemically synthesized
uuagagauaucuuuaaaca

SEQ ID NO: 10433 - RNA, 19 nt, artificial
  Chemically synthesized
ccaaagugucagcaacuuu

SEQ ID NO: 10434 - RNA, 19 nt, artificial
  Chemically synthesized
ugguugaagaucugaggga

SEQ ID NO: 10435 - RNA, 19 nt, artificial
  Chemically synthesized
ccuuagugagucugcuucu

SEQ ID NO: 10436 - RNA, 19 nt, artificial
  Chemically synthesized
cacccaggucaagacauag

SEQ ID NO: 10437 - RNA, 19 nt, artificial
  Chemically synthesized
aggcaagaaguagagcaca

SEQ ID NO: 10438 - RNA, 19 nt, artificial
  Chemically synthesized
aagcuacaaaagaaacuca

SEQ ID NO: 10439 - RNA, 19 nt, artificial
  Chemically synthesized
ucugagcaguucuucucua

SEQ ID NO: 10440 - RNA, 19 nt, artificial
  Chemically synthesized
cuggucaccuuacgcaaga

SEQ ID NO: 10441 - RNA, 19 nt, artificial
  Chemically synthesized
acuuccagaaagugcugaa

SEQ ID NO: 10442 - RNA, 19 nt, artificial
  Chemically synthesized
ggcugacaucauccaagag

SEQ ID NO: 10443 - RNA, 19 nt, artificial
  Chemically synthesized
auuuccggaagguccugaa

SEQ ID NO: 10444 - RNA, 19 nt, artificial
  Chemically synthesized
gccucugagcaguucuucu

SEQ ID NO: 10445 - RNA, 19 nt, artificial
  Chemically synthesized
agugguugaagaucugagg

SEQ ID NO: 10446 - RNA, 19 nt, artificial
  Chemically synthesized
aaggacgaauucuucacca

SEQ ID NO: 10447 - RNA, 19 nt, artificial
  Chemically synthesized
augagcugcugcugggaau

SEQ ID NO: 10448 - RNA, 19 nt, artificial
  Chemically synthesized
gagcugacaugggaggauu

SEQ ID NO: 10449 - RNA, 19 nt, artificial
  Chemically synthesized
gucaaugucuacaucuucu

SEQ ID NO: 10450 - RNA, 19 nt, artificial
  Chemically synthesized
agcggcacuuccagaaagu

SEQ ID NO: 10451 - RNA, 19 nt, artificial
  Chemically synthesized
gaguuggaggacaacauag

SEQ ID NO: 10452 - RNA, 19 nt, artificial
  Chemically synthesized
caugcaccacuaugagaac

SEQ ID NO: 10453 - RNA, 19 nt, artificial
  Chemically synthesized
aagucccgucuaauguuua

SEQ ID NO: 10454 - RNA, 19 nt, artificial
  Chemically synthesized
ucuaauguuuaccauguau

SEQ ID NO: 10455 - RNA, 19 nt, artificial
  Chemically synthesized
aucuuuaaacaaaacauca

SEQ ID NO: 10456 - RNA, 19 nt, artificial
  Chemically synthesized
uucucuucugugcaccuaa

SEQ ID NO: 10457 - RNA, 19 nt, artificial
  Chemically synthesized
gauuccaggacaaggagga

SEQ ID NO: 10458 - RNA, 19 nt, artificial
  Chemically synthesized
uggaggacaacauaguggu

SEQ ID NO: 10459 - RNA, 19 nt, artificial
  Chemically synthesized
agcuauuuaggaaggcugu

SEQ ID NO: 10460 - RNA, 19 nt, artificial
  Chemically synthesized
aucugaacaguacccagga

SEQ ID NO: 10461 - RNA, 19 nt, artificial
  Chemically synthesized
aagguacaauagugcuugu

SEQ ID NO: 10462 - RNA, 19 nt, artificial
  Chemically synthesized
caccuaccagaacaucgcu

SEQ ID NO: 10463 - RNA, 19 nt, artificial
  Chemically synthesized
ugguuugagaacaccagga

SEQ ID NO: 10464 - RNA, 19 nt, artificial
  Chemically synthesized
guuuaucaacggcaccauu

SEQ ID NO: 10465 - RNA, 19 nt, artificial
  Chemically synthesized
uguccuuccgagaguuccu

SEQ ID NO: 10466 - RNA, 19 nt, artificial
  Chemically synthesized
cuuuaacuuuucuuuuccu

SEQ ID NO: 10467 - RNA, 19 nt, artificial
  Chemically synthesized
gaauguagagaaggccugu

SEQ ID NO: 10468 - RNA, 19 nt, artificial
  Chemically synthesized
aauagugcuugucuccgau

SEQ ID NO: 10469 - RNA, 19 nt, artificial
  Chemically synthesized
agaucuucuucagacaccu

SEQ ID NO: 10470 - RNA, 19 nt, artificial
  Chemically synthesized
cuuugccuccauccucaaa

SEQ ID NO: 10471 - RNA, 19 nt, artificial
  Chemically synthesized
gcaggagacuauguucuac

SEQ ID NO: 10472 - RNA, 19 nt, artificial
  Chemically synthesized
cgucuuugugaaugauggg

SEQ ID NO: 10473 - RNA, 19 nt, artificial
  Chemically synthesized
agugagggugaaggcaaga

SEQ ID NO: 10474 - RNA, 19 nt, artificial
  Chemically synthesized
ugcugaaccggagucuguu

SEQ ID NO: 10475 - RNA, 19 nt, artificial
  Chemically synthesized
cagguaugacaggugugcu

SEQ ID NO: 10476 - RNA, 19 nt, artificial
  Chemically synthesized
cggaguauacaggauaccg

SEQ ID NO: 10477 - RNA, 19 nt, artificial
  Chemically synthesized
caucgagaucuccaacaac

SEQ ID NO: 10478 - RNA, 19 nt, artificial
  Chemically synthesized
caauauugggagaauauug

SEQ ID NO: 10479 - RNA, 19 nt, artificial
  Chemically synthesized
gauccuucaucgagaucuc

SEQ ID NO: 10480 - RNA, 19 nt, artificial
  Chemically synthesized
gugcuugacuucuuugaag

SEQ ID NO: 10481 - RNA, 19 nt, artificial
  Chemically synthesized
uccugaacaaggguuuuca

SEQ ID NO: 10482 - RNA, 19 nt, artificial
  Chemically synthesized
cccaaggaacuggagugau

SEQ ID NO: 10483 - RNA, 19 nt, artificial
  Chemically synthesized
uguuuaguucugaagagga

SEQ ID NO: 10484 - RNA, 19 nt, artificial
  Chemically synthesized
aggugaaugagcugcugcu

SEQ ID NO: 10485 - RNA, 19 nt, artificial
  Chemically synthesized
cauacucagcucuuuaacu

SEQ ID NO: 10486 - RNA, 19 nt, artificial
  Chemically synthesized
caaaaggagcagcccuacu

SEQ ID NO: 10487 - RNA, 19 nt, artificial
  Chemically synthesized
gcugcucaagaucccuaag

SEQ ID NO: 10488 - RNA, 19 nt, artificial
  Chemically synthesized
ccagacaauuauacaaaug

SEQ ID NO: 10489 - RNA, 19 nt, artificial
  Chemically synthesized
gcucuuuccuaaaaagcug

SEQ ID NO: 10490 - RNA, 19 nt, artificial
  Chemically synthesized
uugaguacaagucaggaca

SEQ ID NO: 10491 - RNA, 19 nt, artificial
  Chemically synthesized
auuuaggaaggcugugaca

SEQ ID NO: 10492 - RNA, 19 nt, artificial
  Chemically synthesized
aacaccacccuaaaccaca

SEQ ID NO: 10493 - RNA, 19 nt, artificial
  Chemically synthesized
cucuuuccuaaaaagcuga

SEQ ID NO: 10494 - RNA, 19 nt, artificial
  Chemically synthesized
guuggaggacaacauagug

SEQ ID NO: 10495 - RNA, 19 nt, artificial
  Chemically synthesized
aacuuuucuuuuccuuuuu

SEQ ID NO: 10496 - RNA, 19 nt, artificial
  Chemically synthesized
caaagagagcgugaagaag

SEQ ID NO: 10497 - RNA, 19 nt, artificial
  Chemically synthesized
cuucaugcaccacuaugag

SEQ ID NO: 10498 - RNA, 19 nt, artificial
  Chemically synthesized
augguauuagagauaucuu

SEQ ID NO: 10499 - RNA, 19 nt, artificial
  Chemically synthesized
aggucaaccucauccuguc

SEQ ID NO: 10500 - RNA, 19 nt, artificial
  Chemically synthesized
aucucaacccuaaugugga

SEQ ID NO: 10501 - RNA, 19 nt, artificial
  Chemically synthesized
ccaggaaacaaagaugccu

SEQ ID NO: 10502 - RNA, 19 nt, artificial
  Chemically synthesized
cgaauucuucaccaugaug

SEQ ID NO: 10503 - RNA, 19 nt, artificial
  Chemically synthesized
uggagucuauguuccggga

SEQ ID NO: 10504 - RNA, 19 nt, artificial
  Chemically synthesized
agcaaccacugaugugauu

SEQ ID NO: 10505 - RNA, 19 nt, artificial
  Chemically synthesized
guugcuuugguauuugcuu

SEQ ID NO: 10506 - RNA, 19 nt, artificial
  Chemically synthesized
acccagagagaaaggugag

SEQ ID NO: 10507 - RNA, 19 nt, artificial
  Chemically synthesized
aggaccaccaugcuauaca

SEQ ID NO: 10508 - RNA, 19 nt, artificial
  Chemically synthesized
uguaagaagaucuacuuca

SEQ ID NO: 10509 - RNA, 19 nt, artificial
  Chemically synthesized
agaagcuacaaaagaaacu

SEQ ID NO: 10510 - RNA, 19 nt, artificial
  Chemically synthesized
cucucugcaucuacuggag

SEQ ID NO: 10511 - RNA, 19 nt, artificial
  Chemically synthesized
gauauucaguacucgaucu

SEQ ID NO: 10512 - RNA, 19 nt, artificial
  Chemically synthesized
caucugaacccaacaccac

SEQ ID NO: 10513 - RNA, 19 nt, artificial
  Chemically synthesized
ugguggucuucaugaaagg

SEQ ID NO: 10514 - RNA, 19 nt, artificial
  Chemically synthesized
gauaccguccuuuccuaga

SEQ ID NO: 10515 - RNA, 19 nt, artificial
  Chemically synthesized
agcucuuuaacuuuucuuu

SEQ ID NO: 10516 - RNA, 19 nt, artificial
  Chemically synthesized
uuuucuuuuccuuuuucau

SEQ ID NO: 10517 - RNA, 19 nt, artificial
  Chemically synthesized
uccaaaaggagcagcccua

SEQ ID NO: 10518 - RNA, 19 nt, artificial
  Chemically synthesized
guguuugcagaucgugcuu

SEQ ID NO: 10519 - RNA, 19 nt, artificial
  Chemically synthesized
cagaauccaccuuaggccu

SEQ ID NO: 10520 - RNA, 19 nt, artificial
  Chemically synthesized
gaucuucuucagacaccuu

SEQ ID NO: 10521 - RNA, 19 nt, artificial
  Chemically synthesized
caccacuaugagaacuucu

SEQ ID NO: 10522 - RNA, 19 nt, artificial
  Chemically synthesized
gaguauacaggauaccguc

SEQ ID NO: 10523 - RNA, 19 nt, artificial
  Chemically synthesized
cccuaaggaguaugaccug

SEQ ID NO: 10524 - RNA, 19 nt, artificial
  Chemically synthesized
ucauguucucuuauaucuu

SEQ ID NO: 10525 - RNA, 19 nt, artificial
  Chemically synthesized
gugacaaguguggagguga

SEQ ID NO: 10526 - RNA, 19 nt, artificial
  Chemically synthesized
aucucuccaucagaaucca

SEQ ID NO: 10527 - RNA, 19 nt, artificial
  Chemically synthesized
uccuagaagcaaccacuga

SEQ ID NO: 10528 - RNA, 19 nt, artificial
  Chemically synthesized
ggaaagaagacaucugaac

SEQ ID NO: 10529 - RNA, 19 nt, artificial
  Chemically synthesized
gaggugguggagucuaugu

SEQ ID NO: 10530 - RNA, 19 nt, artificial
  Chemically synthesized
ggcacuuccagaaagugcu

SEQ ID NO: 10531 - RNA, 19 nt, artificial
  Chemically synthesized
gaaggcugugacaaagcag

SEQ ID NO: 10532 - RNA, 19 nt, artificial
  Chemically synthesized
uuuuguuuaaagauaucuc

SEQ ID NO: 10533 - RNA, 19 nt, artificial
  Chemically synthesized
uuaggguugagaucacucc

SEQ ID NO: 10534 - RNA, 19 nt, artificial
  Chemically synthesized
uaaaccagccgucauagcg

SEQ ID NO: 10535 - RNA, 19 nt, artificial
  Chemically synthesized
uuagacgggacuuauccuc

SEQ ID NO: 10536 - RNA, 19 nt, artificial
  Chemically synthesized
ucuucuuugggagauccug

SEQ ID NO: 10537 - RNA, 19 nt, artificial
  Chemically synthesized
ugauuauuuauuauaccuc

SEQ ID NO: 10538 - RNA, 19 nt, artificial
  Chemically synthesized
uucuuuuguagcuucuugu

SEQ ID NO: 10539 - RNA, 19 nt, artificial
  Chemically synthesized
uuucucauuuguauaauug

SEQ ID NO: 10540 - RNA, 19 nt, artificial
  Chemically synthesized
uuuagggugguguuggguu

SEQ ID NO: 10541 - RNA, 19 nt, artificial
  Chemically synthesized
uugaaaacccuuguucagg

SEQ ID NO: 10542 - RNA, 19 nt, artificial
  Chemically synthesized
auguauagcaugguggucc

SEQ ID NO: 10543 - RNA, 19 nt, artificial
  Chemically synthesized
uuuaggaaagagcccgaug

SEQ ID NO: 10544 - RNA, 19 nt, artificial
  Chemically synthesized
uuucucucuggguccuugg

SEQ ID NO: 10545 - RNA, 19 nt, artificial
  Chemically synthesized
auuaggguugagaucacuc

SEQ ID NO: 10546 - RNA, 19 nt, artificial
  Chemically synthesized
uucaccuccacacuuguca

SEQ ID NO: 10547 - RNA, 19 nt, artificial
  Chemically synthesized
augaaguagaucuucuuac

SEQ ID NO: 10548 - RNA, 19 nt, artificial
  Chemically synthesized
uuccucuuaaaaucuuugc

SEQ ID NO: 10549 - RNA, 19 nt, artificial
  Chemically synthesized
uucugauggagagauugcc

SEQ ID NO: 10550 - RNA, 19 nt, artificial
  Chemically synthesized
uuggagaucucgaugaagg

SEQ ID NO: 10551 - RNA, 19 nt, artificial
  Chemically synthesized
uuuccucuuaaaaucuuug

SEQ ID NO: 10552 - RNA, 19 nt, artificial
  Chemically synthesized
uaugucuugaccugggugg

SEQ ID NO: 10553 - RNA, 19 nt, artificial
  Chemically synthesized
uauuuauuauaccucgaug

SEQ ID NO: 10554 - RNA, 19 nt, artificial
  Chemically synthesized
uuuguuuaaagauaucucu

SEQ ID NO: 10555 - RNA, 19 nt, artificial
  Chemically synthesized
uuccuaaauagcuccuucu

SEQ ID NO: 10556 - RNA, 19 nt, artificial
  Chemically synthesized
augaaggaucgcaucaugg

SEQ ID NO: 10557 - RNA, 19 nt, artificial
  Chemically synthesized
ucggaugucuucaaucucc

SEQ ID NO: 10558 - RNA, 19 nt, artificial
  Chemically synthesized
uuaaaaucuuugcuucugu

SEQ ID NO: 10559 - RNA, 19 nt, artificial
  Chemically synthesized
uucaaucuccuucuuggag

SEQ ID NO: 10560 - RNA, 19 nt, artificial
  Chemically synthesized
uucggaugucuucaaucuc

SEQ ID NO: 10561 - RNA, 19 nt, artificial
  Chemically synthesized
augaugaugggacugcucc

SEQ ID NO: 10562 - RNA, 19 nt, artificial
  Chemically synthesized
uagaacauagucuccugcc

SEQ ID NO: 10563 - RNA, 19 nt, artificial
  Chemically synthesized
uccuucuuggagaacagcc

SEQ ID NO: 10564 - RNA, 19 nt, artificial
  Chemically synthesized
uuggagaacagcccauucc

SEQ ID NO: 10565 - RNA, 19 nt, artificial
  Chemically synthesized
uucuuugggagauccugac

SEQ ID NO: 10566 - RNA, 19 nt, artificial
  Chemically synthesized
uccuucuucacgcucucuu

SEQ ID NO: 10567 - RNA, 19 nt, artificial
  Chemically synthesized
aucuucaaccacuauguug

SEQ ID NO: 10568 - RNA, 19 nt, artificial
  Chemically synthesized
acauucuuggucauuccug

SEQ ID NO: 10569 - RNA, 19 nt, artificial
  Chemically synthesized
uaguucuccacgaagcgcu

SEQ ID NO: 10570 - RNA, 19 nt, artificial
  Chemically synthesized
ucuuuaucuucuuugggag

SEQ ID NO: 10571 - RNA, 19 nt, artificial
  Chemically synthesized
uuagggugguguuggguuc

SEQ ID NO: 10572 - RNA, 19 nt, artificial
  Chemically synthesized
ucugaggagauucucagcc

SEQ ID NO: 10573 - RNA, 19 nt, artificial
  Chemically synthesized
ucuucaaucuccuucuugg

SEQ ID NO: 10574 - RNA, 19 nt, artificial
  Chemically synthesized
ucucaaaccaguagcgguc

SEQ ID NO: 10575 - RNA, 19 nt, artificial
  Chemically synthesized
uuguccuggaaucccgacu

SEQ ID NO: 10576 - RNA, 19 nt, artificial
  Chemically synthesized
uauagcauggugguccuga

SEQ ID NO: 10577 - RNA, 19 nt, artificial
  Chemically synthesized
ugcuuugucacagccuucc

SEQ ID NO: 10578 - RNA, 19 nt, artificial
  Chemically synthesized
cugaucuccaccuucuucc

SEQ ID NO: 10579 - RNA, 19 nt, artificial
  Chemically synthesized
uugauaacagcgaccagca

SEQ ID NO: 10580 - RNA, 19 nt, artificial
  Chemically synthesized
uacagcuuuggguauccag

SEQ ID NO: 10581 - RNA, 19 nt, artificial
  Chemically synthesized
uaauaccauuuccaccucc

SEQ ID NO: 10582 - RNA, 19 nt, artificial
  Chemically synthesized
uuauuuauuauaccucgau

SEQ ID NO: 10583 - RNA, 19 nt, artificial
  Chemically synthesized
uugaagaagggcucgaagg

SEQ ID NO: 10584 - RNA, 19 nt, artificial
  Chemically synthesized
uuugcuucugugcucuacu

SEQ ID NO: 10585 - RNA, 19 nt, artificial
  Chemically synthesized
uugagaucgaguacugaau

SEQ ID NO: 10586 - RNA, 19 nt, artificial
  Chemically synthesized
uccuucucgcucaucucag

SEQ ID NO: 10587 - RNA, 19 nt, artificial
  Chemically synthesized
ucaccuuucucucuggguc

SEQ ID NO: 10588 - RNA, 19 nt, artificial
  Chemically synthesized
uuugucacagccuuccuaa

SEQ ID NO: 10589 - RNA, 19 nt, artificial
  Chemically synthesized
uccaacuccgaaaucuggg

SEQ ID NO: 10590 - RNA, 19 nt, artificial
  Chemically synthesized
ucucauuuguauaauuguc

SEQ ID NO: 10591 - RNA, 19 nt, artificial
  Chemically synthesized
auuucggaugucuucaauc

SEQ ID NO: 10592 - RNA, 19 nt, artificial
  Chemically synthesized
uuaggaaagagcccgauga

SEQ ID NO: 10593 - RNA, 19 nt, artificial
  Chemically synthesized
uccuaaauagcuccuucuc

SEQ ID NO: 10594 - RNA, 19 nt, artificial
  Chemically synthesized
ucagaugucuucuuuccuc

SEQ ID NO: 10595 - RNA, 19 nt, artificial
  Chemically synthesized
uuaaagauaucucuaauac

SEQ ID NO: 10596 - RNA, 19 nt, artificial
  Chemically synthesized
uaucucuaauaccauuucc

SEQ ID NO: 10597 - RNA, 19 nt, artificial
  Chemically synthesized
ucucuaauaccauuuccac

SEQ ID NO: 10598 - RNA, 19 nt, artificial
  Chemically synthesized
ucauuuguauaauugucug

SEQ ID NO: 10599 - RNA, 19 nt, artificial
  Chemically synthesized
guuuucugcaggaagcugg

SEQ ID NO: 10600 - RNA, 19 nt, artificial
  Chemically synthesized
aucgauuuuguggaaguca

SEQ ID NO: 10601 - RNA, 19 nt, artificial
  Chemically synthesized
ucauggugaagaauucguc

SEQ ID NO: 10602 - RNA, 19 nt, artificial
  Chemically synthesized
ugacaccucaaauuuaugc

SEQ ID NO: 10603 - RNA, 19 nt, artificial
  Chemically synthesized
ugaggaguggucuuuaucu

SEQ ID NO: 10604 - RNA, 19 nt, artificial
  Chemically synthesized
ugguauuucggaugucuuc

SEQ ID NO: 10605 - RNA, 19 nt, artificial
  Chemically synthesized
uugaagaccaggucuuuga

SEQ ID NO: 10606 - RNA, 19 nt, artificial
  Chemically synthesized
uucuuuccucuuaaaaucu

SEQ ID NO: 10607 - RNA, 19 nt, artificial
  Chemically synthesized
uuucggaugucuucaaucu

SEQ ID NO: 10608 - RNA, 19 nt, artificial
  Chemically synthesized
aucccucagaucuucaacc

SEQ ID NO: 10609 - RNA, 19 nt, artificial
  Chemically synthesized
ugagagugcguccugauug

SEQ ID NO: 10610 - RNA, 19 nt, artificial
  Chemically synthesized
uucaaagaagucaagcaca

SEQ ID NO: 10611 - RNA, 19 nt, artificial
  Chemically synthesized
uguauaauugucuggguca

SEQ ID NO: 10612 - RNA, 19 nt, artificial
  Chemically synthesized
uuguuuaaagauaucucua

SEQ ID NO: 10613 - RNA, 19 nt, artificial
  Chemically synthesized
aauuguagaacauagucuc

SEQ ID NO: 10614 - RNA, 19 nt, artificial
  Chemically synthesized
uucaugaagaccaccagga

SEQ ID NO: 10615 - RNA, 19 nt, artificial
  Chemically synthesized
cucuaauaccauuuccacc

SEQ ID NO: 10616 - RNA, 19 nt, artificial
  Chemically synthesized
acuucuugccuucacccuc

SEQ ID NO: 10617 - RNA, 19 nt, artificial
  Chemically synthesized
ugcaucuucucuugcagcg

SEQ ID NO: 10618 - RNA, 19 nt, artificial
  Chemically synthesized
uuaucuucuuugggagauc

SEQ ID NO: 10619 - RNA, 19 nt, artificial
  Chemically synthesized
uaaagauaucucuaauacc

SEQ ID NO: 10620 - RNA, 19 nt, artificial
  Chemically synthesized
ccuaaauagcuccuucucg

SEQ ID NO: 10621 - RNA, 19 nt, artificial
  Chemically synthesized
ugguagagaagaacugcuc

SEQ ID NO: 10622 - RNA, 19 nt, artificial
  Chemically synthesized
uucucauuuguauaauugu

SEQ ID NO: 10623 - RNA, 19 nt, artificial
  Chemically synthesized
ucaugcacugcaauuguag

SEQ ID NO: 10624 - RNA, 19 nt, artificial
  Chemically synthesized
uacauucuuggucauuccu

SEQ ID NO: 10625 - RNA, 19 nt, artificial
  Chemically synthesized
auaaaugugcacagacacc

SEQ ID NO: 10626 - RNA, 19 nt, artificial
  Chemically synthesized
uucucaaaccaguagcggu

SEQ ID NO: 10627 - RNA, 19 nt, artificial
  Chemically synthesized
agagaaggcaggauacugg

SEQ ID NO: 10628 - RNA, 19 nt, artificial
  Chemically synthesized
cucauuuguauaauugucu

SEQ ID NO: 10629 - RNA, 19 nt, artificial
  Chemically synthesized
uuugaaaacccuuguucag

SEQ ID NO: 10630 - RNA, 19 nt, artificial
  Chemically synthesized
ucauacaugguaaacauua

SEQ ID NO: 10631 - RNA, 19 nt, artificial
  Chemically synthesized
uccaccuccaccuuugaca

SEQ ID NO: 10632 - RNA, 19 nt, artificial
  Chemically synthesized
ucaaucuccuucuuggaga

SEQ ID NO: 10633 - RNA, 19 nt, artificial
  Chemically synthesized
auuuuguggaagucaauua

SEQ ID NO: 10634 - RNA, 19 nt, artificial
  Chemically synthesized
ucagguuguuaaaccagcc

SEQ ID NO: 10635 - RNA, 19 nt, artificial
  Chemically synthesized
uuuaucuucuuugggagau

SEQ ID NO: 10636 - RNA, 19 nt, artificial
  Chemically synthesized
uguuuucugcaggaagcug

SEQ ID NO: 10637 - RNA, 19 nt, artificial
  Chemically synthesized
uugcagguaggucacuccu

SEQ ID NO: 10638 - RNA, 19 nt, artificial
  Chemically synthesized
uccacaaacauguccuggg

SEQ ID NO: 10639 - RNA, 19 nt, artificial
  Chemically synthesized
ugcuuccuucuucacgcuc

SEQ ID NO: 10640 - RNA, 19 nt, artificial
  Chemically synthesized
ugcuucugugcucuacuuc

SEQ ID NO: 10641 - RNA, 19 nt, artificial
  Chemically synthesized
cuuuguuuccuggugcccu

SEQ ID NO: 10642 - RNA, 19 nt, artificial
  Chemically synthesized
ucucaccuuucucucuggg

SEQ ID NO: 10643 - RNA, 19 nt, artificial
  Chemically synthesized
ucuuuuguagcuucuugug

SEQ ID NO: 10644 - RNA, 19 nt, artificial
  Chemically synthesized
cuucucuacauucuugguc

SEQ ID NO: 10645 - RNA, 19 nt, artificial
  Chemically synthesized
auuuauuauaccucgaugu

SEQ ID NO: 10646 - RNA, 19 nt, artificial
  Chemically synthesized
uuuggguauccagcacagc

SEQ ID NO: 10647 - RNA, 19 nt, artificial
  Chemically synthesized
acagcuuuggguauccagc

SEQ ID NO: 10648 - RNA, 19 nt, artificial
  Chemically synthesized
uugaccuggguggugguaa

SEQ ID NO: 10649 - RNA, 19 nt, artificial
  Chemically synthesized
aaauagcuccuucucgcuc

SEQ ID NO: 10650 - RNA, 19 nt, artificial
  Chemically synthesized
uucaccuccuggguacugu

SEQ ID NO: 10651 - RNA, 19 nt, artificial
  Chemically synthesized
ucaagguacagcuuugggu

SEQ ID NO: 10652 - RNA, 19 nt, artificial
  Chemically synthesized
uaggguugagaucacucca

SEQ ID NO: 10653 - RNA, 19 nt, artificial
  Chemically synthesized
ugguguuggguucagaugu

SEQ ID NO: 10654 - RNA, 19 nt, artificial
  Chemically synthesized
uaaauagcuccuucucgcu

SEQ ID NO: 10655 - RNA, 19 nt, artificial
  Chemically synthesized
ugucugaagaagaucucca

SEQ ID NO: 10656 - RNA, 19 nt, artificial
  Chemically synthesized
uggacuuauaaucaucaug

SEQ ID NO: 10657 - RNA, 19 nt, artificial
  Chemically synthesized
ucuuggucauuccuggagg

SEQ ID NO: 10658 - RNA, 19 nt, artificial
  Chemically synthesized
ucgauuuuguggaagucaa

SEQ ID NO: 10659 - RNA, 19 nt, artificial
  Chemically synthesized
uucuccuccaccucuugga

SEQ ID NO: 10660 - RNA, 19 nt, artificial
  Chemically synthesized
ucugaagaagaucuccagg

SEQ ID NO: 10661 - RNA, 19 nt, artificial
  Chemically synthesized
ugccucagguuguuaaacc

SEQ ID NO: 10662 - RNA, 19 nt, artificial
  Chemically synthesized
auaauugucugggucaaua

SEQ ID NO: 10663 - RNA, 19 nt, artificial
  Chemically synthesized
uucucauccaggucauaca

SEQ ID NO: 10664 - RNA, 19 nt, artificial
  Chemically synthesized
uaaaacauguacaugauua

SEQ ID NO: 10665 - RNA, 19 nt, artificial
  Chemically synthesized
uugcagacccugagagcuu

SEQ ID NO: 10666 - RNA, 19 nt, artificial
  Chemically synthesized
guugagaucacuccaguuc

SEQ ID NO: 10667 - RNA, 19 nt, artificial
  Chemically synthesized
ucauccaggucauacaugg

SEQ ID NO: 10668 - RNA, 19 nt, artificial
  Chemically synthesized
uagaugauugccgggacca

SEQ ID NO: 10669 - RNA, 19 nt, artificial
  Chemically synthesized
ucucgaugaaggaucgcau

SEQ ID NO: 10670 - RNA, 19 nt, artificial
  Chemically synthesized
uuauuauaccucgauguaa

SEQ ID NO: 10671 - RNA, 19 nt, artificial
  Chemically synthesized
ugguaaaacauguacauga

SEQ ID NO: 10672 - RNA, 19 nt, artificial
  Chemically synthesized
uuguacugcugcagcuuuu

SEQ ID NO: 10673 - RNA, 19 nt, artificial
  Chemically synthesized
cuucuuugggagauccuga

SEQ ID NO: 10674 - RNA, 19 nt, artificial
  Chemically synthesized
gauuauuuauuauaccucg

SEQ ID NO: 10675 - RNA, 19 nt, artificial
  Chemically synthesized
auguaaaauauuuuacagc

SEQ ID NO: 10676 - RNA, 19 nt, artificial
  Chemically synthesized
uacaaacuggucgaggaca

SEQ ID NO: 10677 - RNA, 19 nt, artificial
  Chemically synthesized
ucaguugugagcugcuuag

SEQ ID NO: 10678 - RNA, 19 nt, artificial
  Chemically synthesized
uguuggguucagaugucuu

SEQ ID NO: 10679 - RNA, 19 nt, artificial
  Chemically synthesized
auugcagguaggucacucc

SEQ ID NO: 10680 - RNA, 19 nt, artificial
  Chemically synthesized
uugugguagcggaaccaga

SEQ ID NO: 10681 - RNA, 19 nt, artificial
  Chemically synthesized
aggauguccaggaacucuc

SEQ ID NO: 10682 - RNA, 19 nt, artificial
  Chemically synthesized
uagaaguagggcugcuccu

SEQ ID NO: 10683 - RNA, 19 nt, artificial
  Chemically synthesized
augucuucaaucuccuucu

SEQ ID NO: 10684 - RNA, 19 nt, artificial
  Chemically synthesized
uaggaaaggacgguauccu

SEQ ID NO: 10685 - RNA, 19 nt, artificial
  Chemically synthesized
cagaucuucaaccacuaug

SEQ ID NO: 10686 - RNA, 19 nt, artificial
  Chemically synthesized
ucgguuguuggacaggaug

SEQ ID NO: 10687 - RNA, 19 nt, artificial
  Chemically synthesized
aucaagguacagcuuuggg

SEQ ID NO: 10688 - RNA, 19 nt, artificial
  Chemically synthesized
gucaauguugauaacagcg

SEQ ID NO: 10689 - RNA, 19 nt, artificial
  Chemically synthesized
auuuaguaggaccaaaacu

SEQ ID NO: 10690 - RNA, 19 nt, artificial
  Chemically synthesized
aaacuggucgaggacaaug

SEQ ID NO: 10691 - RNA, 19 nt, artificial
  Chemically synthesized
aaaaucuuugcuucugugc

SEQ ID NO: 10692 - RNA, 19 nt, artificial
  Chemically synthesized
ugacuuguacucaaagccu

SEQ ID NO: 10693 - RNA, 19 nt, artificial
  Chemically synthesized
uccgguucagcacuuucug

SEQ ID NO: 10694 - RNA, 19 nt, artificial
  Chemically synthesized
uugguagaaaucacaucag

SEQ ID NO: 10695 - RNA, 19 nt, artificial
  Chemically synthesized
ucuuaaaaucuuugcuucu

SEQ ID NO: 10696 - RNA, 19 nt, artificial
  Chemically synthesized
aagucaauuagagaugugg

SEQ ID NO: 10697 - RNA, 19 nt, artificial
  Chemically synthesized
uauaccucgauguaaaaua

SEQ ID NO: 10698 - RNA, 19 nt, artificial
  Chemically synthesized
uagucuccugccuuuucuc

SEQ ID NO: 10699 - RNA, 19 nt, artificial
  Chemically synthesized
uauuuuacagcucagcuuu

SEQ ID NO: 10700 - RNA, 19 nt, artificial
  Chemically synthesized
uauacuccgggaguguuuu

SEQ ID NO: 10701 - RNA, 19 nt, artificial
  Chemically synthesized
gaugucuucaaucuccuuc

SEQ ID NO: 10702 - RNA, 19 nt, artificial
  Chemically synthesized
uacuccuuagggaucuuga

SEQ ID NO: 10703 - RNA, 19 nt, artificial
  Chemically synthesized
aagagaaggcaggauacug

SEQ ID NO: 10704 - RNA, 19 nt, artificial
  Chemically synthesized
ugaugaacgagacucgaca

SEQ ID NO: 10705 - RNA, 19 nt, artificial
  Chemically synthesized
agcuuuuuaggaaagagcc

SEQ ID NO: 10706 - RNA, 19 nt, artificial
  Chemically synthesized
ugucugggucaauauucuc

SEQ ID NO: 10707 - RNA, 19 nt, artificial
  Chemically synthesized
ugagaagauguagacauug

SEQ ID NO: 10708 - RNA, 19 nt, artificial
  Chemically synthesized
aucuucuuugggagauccu

SEQ ID NO: 10709 - RNA, 19 nt, artificial
  Chemically synthesized
ucggagacaagcacuauug

SEQ ID NO: 10710 - RNA, 19 nt, artificial
  Chemically synthesized
auauuuaguaggaccaaaa

SEQ ID NO: 10711 - RNA, 19 nt, artificial
  Chemically synthesized
uuguuaaaccagccgucau

SEQ ID NO: 10712 - RNA, 19 nt, artificial
  Chemically synthesized
auugagaucgaguacugaa

SEQ ID NO: 10713 - RNA, 19 nt, artificial
  Chemically synthesized
uucuucacgcucucuuuga

SEQ ID NO: 10714 - RNA, 19 nt, artificial
  Chemically synthesized
uauuuaguaggaccaaaac

SEQ ID NO: 10715 - RNA, 19 nt, artificial
  Chemically synthesized
aaacgguccaucaagguac

SEQ ID NO: 10716 - RNA, 19 nt, artificial
  Chemically synthesized
auaccauuuccaccuccac

SEQ ID NO: 10717 - RNA, 19 nt, artificial
  Chemically synthesized
agcacgaucugcaaacacg

SEQ ID NO: 10718 - RNA, 19 nt, artificial
  Chemically synthesized
uccuccucccucaaauguc

SEQ ID NO: 10719 - RNA, 19 nt, artificial
  Chemically synthesized
auacuccuuagggaucuug

SEQ ID NO: 10720 - RNA, 19 nt, artificial
  Chemically synthesized
aagaucuccaggaugcguu

SEQ ID NO: 10721 - RNA, 19 nt, artificial
  Chemically synthesized
cuauuguaccuuuucaccu

SEQ ID NO: 10722 - RNA, 19 nt, artificial
  Chemically synthesized
uggguggugguaaaacaug

SEQ ID NO: 10723 - RNA, 19 nt, artificial
  Chemically synthesized
augguagagaagaacugcu

SEQ ID NO: 10724 - RNA, 19 nt, artificial
  Chemically synthesized
ucaauguugauaacagcga

SEQ ID NO: 10725 - RNA, 19 nt, artificial
  Chemically synthesized
guaguuguugcagacccug

SEQ ID NO: 10726 - RNA, 19 nt, artificial
  Chemically synthesized
uuguuggagaucucgauga

SEQ ID NO: 10727 - RNA, 19 nt, artificial
  Chemically synthesized
cuacuucuugccuucaccc

SEQ ID NO: 10728 - RNA, 19 nt, artificial
  Chemically synthesized
uauauuuaguaggaccaaa

SEQ ID NO: 10729 - RNA, 19 nt, artificial
  Chemically synthesized
uaaaauauuuuacagcuca

SEQ ID NO: 10730 - RNA, 19 nt, artificial
  Chemically synthesized
auuccugguguucucaaac

SEQ ID NO: 10731 - RNA, 19 nt, artificial
  Chemically synthesized
auuauuuauuauaccucga

SEQ ID NO: 10732 - RNA, 19 nt, artificial
  Chemically synthesized
ucuagcugggauagguccu

SEQ ID NO: 10733 - RNA, 19 nt, artificial
  Chemically synthesized
cauaguaguaagcacgauc

SEQ ID NO: 10734 - RNA, 19 nt, artificial
  Chemically synthesized
uuguccuccaacuccgaaa

SEQ ID NO: 10735 - RNA, 19 nt, artificial
  Chemically synthesized
aacagguggacuuauaauc

SEQ ID NO: 10736 - RNA, 19 nt, artificial
  Chemically synthesized
aacauguacaugauuauuu

SEQ ID NO: 10737 - RNA, 19 nt, artificial
  Chemically synthesized
acuuguacucaaagccuug

SEQ ID NO: 10738 - RNA, 19 nt, artificial
  Chemically synthesized
uagaccuggagacagaguu

SEQ ID NO: 10739 - RNA, 19 nt, artificial
  Chemically synthesized
augagcagggcauagagca

SEQ ID NO: 10740 - RNA, 19 nt, artificial
  Chemically synthesized
uccaucaagguacagcuuu

SEQ ID NO: 10741 - RNA, 19 nt, artificial
  Chemically synthesized
uccgggaguguuuucugca

SEQ ID NO: 10742 - RNA, 19 nt, artificial
  Chemically synthesized
augaugggacugcuccucu

SEQ ID NO: 10743 - RNA, 19 nt, artificial
  Chemically synthesized
cuugucaccuccauagaug

SEQ ID NO: 10744 - RNA, 19 nt, artificial
  Chemically synthesized
augugccuccgguaguucu

SEQ ID NO: 10745 - RNA, 19 nt, artificial
  Chemically synthesized
uguuaaaccagccgucaua

SEQ ID NO: 10746 - RNA, 19 nt, artificial
  Chemically synthesized
uccaccucuuggaugaugu

SEQ ID NO: 10747 - RNA, 19 nt, artificial
  Chemically synthesized
ucgauguaaaauauuuuac

SEQ ID NO: 10748 - RNA, 19 nt, artificial
  Chemically synthesized
uuccuucuucacgcucucu

SEQ ID NO: 10749 - RNA, 19 nt, artificial
  Chemically synthesized
guugauaacagcgaccagc

SEQ ID NO: 10750 - RNA, 19 nt, artificial
  Chemically synthesized
aaucuuugcuucugugcuc

SEQ ID NO: 10751 - RNA, 19 nt, artificial
  Chemically synthesized
acaugguaaacauuagacg

SEQ ID NO: 10752 - RNA, 19 nt, artificial
  Chemically synthesized
uugggagauccugacuggu

SEQ ID NO: 10753 - RNA, 19 nt, artificial
  Chemically synthesized
uccugacuuguacucaaag

SEQ ID NO: 10754 - RNA, 19 nt, artificial
  Chemically synthesized
ucuuugggagauccugacu

SEQ ID NO: 10755 - RNA, 19 nt, artificial
  Chemically synthesized
uuuauuauaccucgaugua

SEQ ID NO: 10756 - RNA, 19 nt, artificial
  Chemically synthesized
ucgaugaaggaucgcauca

SEQ ID NO: 10757 - RNA, 19 nt, artificial
  Chemically synthesized
uccaguaguuguugcagac

SEQ ID NO: 10758 - RNA, 19 nt, artificial
  Chemically synthesized
aggaguggucuuuaucuuc

SEQ ID NO: 10759 - RNA, 19 nt, artificial
  Chemically synthesized
uauuauaccucgauguaaa

SEQ ID NO: 10760 - RNA, 19 nt, artificial
  Chemically synthesized
uuccggaaaugacagcugg

SEQ ID NO: 10761 - RNA, 19 nt, artificial
  Chemically synthesized
uucuuggagaacagcccau

SEQ ID NO: 10762 - RNA, 19 nt, artificial
  Chemically synthesized
ucaaaguugcugacacuuu

SEQ ID NO: 10763 - RNA, 19 nt, artificial
  Chemically synthesized
aguaguaagcacgaucugc

SEQ ID NO: 10764 - RNA, 19 nt, artificial
  Chemically synthesized
ugggagauccugacugguu

SEQ ID NO: 10765 - RNA, 19 nt, artificial
  Chemically synthesized
uguaaaauauuuuacagcu

SEQ ID NO: 10766 - RNA, 19 nt, artificial
  Chemically synthesized
uauaauugucugggucaau

SEQ ID NO: 10767 - RNA, 19 nt, artificial
  Chemically synthesized
ucuuugaguuucuuuugua

SEQ ID NO: 10768 - RNA, 19 nt, artificial
  Chemically synthesized
acucacuaagggaaggcag

SEQ ID NO: 10769 - RNA, 19 nt, artificial
  Chemically synthesized
ugaugagcagggcauagag

SEQ ID NO: 10770 - RNA, 19 nt, artificial
  Chemically synthesized
uuuacagcucagcuuuuua

SEQ ID NO: 10771 - RNA, 19 nt, artificial
  Chemically synthesized
uaugagguugcggcacaug

SEQ ID NO: 10772 - RNA, 19 nt, artificial
  Chemically synthesized
uagguccugguuguacagg

SEQ ID NO: 10773 - RNA, 19 nt, artificial
  Chemically synthesized
aaggaucgcaucaugguga

SEQ ID NO: 10774 - RNA, 19 nt, artificial
  Chemically synthesized
augacuugaagaccagguc

SEQ ID NO: 10775 - RNA, 19 nt, artificial
  Chemically synthesized
uguggaagucaauuagaga

SEQ ID NO: 10776 - RNA, 19 nt, artificial
  Chemically synthesized
ugaggaaagucucucgcag

SEQ ID NO: 10777 - RNA, 19 nt, artificial
  Chemically synthesized
acuuauaaucaucaugcac

SEQ ID NO: 10778 - RNA, 19 nt, artificial
  Chemically synthesized
agaucacuccaguuccuug

SEQ ID NO: 10779 - RNA, 19 nt, artificial
  Chemically synthesized
cauuagacgggacuuaucc

SEQ ID NO: 10780 - RNA, 19 nt, artificial
  Chemically synthesized
ugaaaaaggaaaagaaaag

SEQ ID NO: 10781 - RNA, 19 nt, artificial
  Chemically synthesized
aagcuuggacccaucauuc

SEQ ID NO: 10782 - RNA, 19 nt, artificial
  Chemically synthesized
uguacugcugcagcuuuug

SEQ ID NO: 10783 - RNA, 19 nt, artificial
  Chemically synthesized
uugcguaaggugaccagcu

SEQ ID NO: 10784 - RNA, 19 nt, artificial
  Chemically synthesized
ugcggcaucaaaaggcaca

SEQ ID NO: 10785 - RNA, 19 nt, artificial
  Chemically synthesized
aaaagaaaaguuaaagagc

SEQ ID NO: 10786 - RNA, 19 nt, artificial
  Chemically synthesized
agcaucacagcuucugcac

SEQ ID NO: 10787 - RNA, 19 nt, artificial
  Chemically synthesized
auucugauggagagauugc

SEQ ID NO: 10788 - RNA, 19 nt, artificial
  Chemically synthesized
aaagauaucucuaauacca

SEQ ID NO: 10789 - RNA, 19 nt, artificial
  Chemically synthesized
uugcuaagggcaggaaguc

SEQ ID NO: 10790 - RNA, 19 nt, artificial
  Chemically synthesized
ugaucuccaccuucuuccg

SEQ ID NO: 10791 - RNA, 19 nt, artificial
  Chemically synthesized
cuggguacuguucagauug

SEQ ID NO: 10792 - RNA, 19 nt, artificial
  Chemically synthesized
agugagaugccuguucagg

SEQ ID NO: 10793 - RNA, 19 nt, artificial
  Chemically synthesized
ucuucuuuccucuuaaaau

SEQ ID NO: 10794 - RNA, 19 nt, artificial
  Chemically synthesized
uaaacagcagcaccagguc

SEQ ID NO: 10795 - RNA, 19 nt, artificial
  Chemically synthesized
cucaaaugucaguccaagc

SEQ ID NO: 10796 - RNA, 19 nt, artificial
  Chemically synthesized
uggaugaugagcagggcau

SEQ ID NO: 10797 - RNA, 19 nt, artificial
  Chemically synthesized
uaauugucugggucaauau

SEQ ID NO: 10798 - RNA, 19 nt, artificial
  Chemically synthesized
ucuaagcaucacagcuucu

SEQ ID NO: 10799 - RNA, 19 nt, artificial
  Chemically synthesized
ugaguagaucucccugagg

SEQ ID NO: 10800 - RNA, 19 nt, artificial
  Chemically synthesized
acccagaugaaguagaucu

SEQ ID NO: 10801 - RNA, 19 nt, artificial
  Chemically synthesized
uucguccuuggagaggaag

SEQ ID NO: 10802 - RNA, 19 nt, artificial
  Chemically synthesized
auccuguauacuccgggag

SEQ ID NO: 10803 - RNA, 19 nt, artificial
  Chemically synthesized
ugaaggaucgcaucauggu

SEQ ID NO: 10804 - RNA, 19 nt, artificial
  Chemically synthesized
aggucuuugaggauggagg

SEQ ID NO: 10805 - RNA, 19 nt, artificial
  Chemically synthesized
ucugacagcagcuggauga

SEQ ID NO: 10806 - RNA, 19 nt, artificial
  Chemically synthesized
cugcacucucaccuuucuc

SEQ ID NO: 10807 - RNA, 19 nt, artificial
  Chemically synthesized
uccugaggucgaacuucuc

SEQ ID NO: 10808 - RNA, 19 nt, artificial
  Chemically synthesized
ucauucaccuccuggguac

SEQ ID NO: 10809 - RNA, 19 nt, artificial
  Chemically synthesized
acuaagggaaggcagcaga

SEQ ID NO: 10810 - RNA, 19 nt, artificial
  Chemically synthesized
auguugauaacagcgacca

SEQ ID NO: 10811 - RNA, 19 nt, artificial
  Chemically synthesized
uucacgcucucuuugaguu

SEQ ID NO: 10812 - RNA, 19 nt, artificial
  Chemically synthesized
uguagacauugacugcgug

SEQ ID NO: 10813 - RNA, 19 nt, artificial
  Chemically synthesized
ucacuaagggaaggcagca

SEQ ID NO: 10814 - RNA, 19 nt, artificial
  Chemically synthesized
agaagcacaccugucauac

SEQ ID NO: 10815 - RNA, 19 nt, artificial
  Chemically synthesized
ugcugcuuugucacagccu

SEQ ID NO: 10816 - RNA, 19 nt, artificial
  Chemically synthesized
aucuccuucuuggagaaca

SEQ ID NO: 10817 - RNA, 19 nt, artificial
  Chemically synthesized
augaagaccaccaggaugu

SEQ ID NO: 10818 - RNA, 19 nt, artificial
  Chemically synthesized
aaaucuuugcuucugugcu

SEQ ID NO: 10819 - RNA, 19 nt, artificial
  Chemically synthesized
cuccuuagggaucuugagc

SEQ ID NO: 10820 - RNA, 19 nt, artificial
  Chemically synthesized
guucuaagcaucacagcuu

SEQ ID NO: 10821 - RNA, 19 nt, artificial
  Chemically synthesized
uagaaaucacaucaguggu

SEQ ID NO: 10822 - RNA, 19 nt, artificial
  Chemically synthesized
ugaggccuaagguggauuc

SEQ ID NO: 10823 - RNA, 19 nt, artificial
  Chemically synthesized
uccugcagggaguugaaga

SEQ ID NO: 10824 - RNA, 19 nt, artificial
  Chemically synthesized
cucucuuugaguuucuuuu

SEQ ID NO: 10825 - RNA, 19 nt, artificial
  Chemically synthesized
uguccagguucuaagcauc

SEQ ID NO: 10826 - RNA, 19 nt, artificial
  Chemically synthesized
aucacaucagugguugcuu

SEQ ID NO: 10827 - RNA, 19 nt, artificial
  Chemically synthesized
ucuuugaggauggaggcaa

SEQ ID NO: 10828 - RNA, 19 nt, artificial
  Chemically synthesized
aguguuuucugcaggaagc

SEQ ID NO: 10829 - RNA, 19 nt, artificial
  Chemically synthesized
guaguaagcacgaucugca

SEQ ID NO: 10830 - RNA, 19 nt, artificial
  Chemically synthesized
ugggucaauauucucccaa

SEQ ID NO: 10831 - RNA, 19 nt, artificial
  Chemically synthesized
aucaucaugcacugcaauu

SEQ ID NO: 10832 - RNA, 19 nt, artificial
  Chemically synthesized
acuccgggaguguuuucug

SEQ ID NO: 10833 - RNA, 19 nt, artificial
  Chemically synthesized
ucauaguggugcaugaagu

SEQ ID NO: 10834 - RNA, 19 nt, artificial
  Chemically synthesized
ugaacgagacucgacagcu

SEQ ID NO: 10835 - RNA, 19 nt, artificial
  Chemically synthesized
auuagacgggacuuauccu

SEQ ID NO: 10836 - RNA, 19 nt, artificial
  Chemically synthesized
ucuucagaacuaaacagca

SEQ ID NO: 10837 - RNA, 19 nt, artificial
  Chemically synthesized
uggagaacagcccauuccu

SEQ ID NO: 10838 - RNA, 19 nt, artificial
  Chemically synthesized
cuucuuuccucuuaaaauc

SEQ ID NO: 10839 - RNA, 19 nt, artificial
  Chemically synthesized
caacgcaucgauuuugugg

SEQ ID NO: 10840 - RNA, 19 nt, artificial
  Chemically synthesized
ucgcagauguauagcaugg

SEQ ID NO: 10841 - RNA, 19 nt, artificial
  Chemically synthesized
ucacaucagugguugcuuc

SEQ ID NO: 10842 - RNA, 19 nt, artificial
  Chemically synthesized
acuauguuguccuccaacu

SEQ ID NO: 10843 - RNA, 19 nt, artificial
  Chemically synthesized
ucccgaauccaguaguugu

SEQ ID NO: 10844 - RNA, 19 nt, artificial
  Chemically synthesized
ucguucuccuccaccucuu

SEQ ID NO: 10845 - RNA, 19 nt, artificial
  Chemically synthesized
aauaccaaagcaacgcauc

SEQ ID NO: 10846 - RNA, 19 nt, artificial
  Chemically synthesized
uguauacuccgggaguguu

SEQ ID NO: 10847 - RNA, 19 nt, artificial
  Chemically synthesized
guagaaaucacaucagugg

SEQ ID NO: 10848 - RNA, 19 nt, artificial
  Chemically synthesized
aucagugccucuggucuug

SEQ ID NO: 10849 - RNA, 19 nt, artificial
  Chemically synthesized
ucgcugcaucuucucuugc

SEQ ID NO: 10850 - RNA, 19 nt, artificial
  Chemically synthesized
auucaccuccuggguacug

SEQ ID NO: 10851 - RNA, 19 nt, artificial
  Chemically synthesized
ucacaagcagggacugucu

SEQ ID NO: 10852 - RNA, 19 nt, artificial
  Chemically synthesized
ucauacuccuuagggaucu

SEQ ID NO: 10853 - RNA, 19 nt, artificial
  Chemically synthesized
augaguagaucucccugag

SEQ ID NO: 10854 - RNA, 19 nt, artificial
  Chemically synthesized
acacuugucacaagcaggg

SEQ ID NO: 10855 - RNA, 19 nt, artificial
  Chemically synthesized
uccucaaaguugcugacac

SEQ ID NO: 10856 - RNA, 19 nt, artificial
  Chemically synthesized
uaguaggaccaaaacugga

SEQ ID NO: 10857 - RNA, 19 nt, artificial
  Chemically synthesized
accucuuggaugaugucag

SEQ ID NO: 10858 - RNA, 19 nt, artificial
  Chemically synthesized
uucucauaguggugcauga

SEQ ID NO: 10859 - RNA, 19 nt, artificial
  Chemically synthesized
uuauaccucgauguaaaau

SEQ ID NO: 10860 - RNA, 19 nt, artificial
  Chemically synthesized
caucaaaaggcacauagcg

SEQ ID NO: 10861 - RNA, 19 nt, artificial
  Chemically synthesized
cugaggucgaacuucucag

SEQ ID NO: 10862 - RNA, 19 nt, artificial
  Chemically synthesized
ucuaugucuugaccugggu

SEQ ID NO: 10863 - RNA, 19 nt, artificial
  Chemically synthesized
acuaaacagcagcaccagg

SEQ ID NO: 10864 - RNA, 19 nt, artificial
  Chemically synthesized
auaucucuaauaccauuuc

SEQ ID NO: 10865 - RNA, 19 nt, artificial
  Chemically synthesized
aagaccaccaggaugucca

SEQ ID NO: 10866 - RNA, 19 nt, artificial
  Chemically synthesized
uugcuucuaggagcuaggg

SEQ ID NO: 10867 - RNA, 19 nt, artificial
  Chemically synthesized
ugcaauuguagaacauagu

SEQ ID NO: 10868 - RNA, 19 nt, artificial
  Chemically synthesized
gaucacuccaguuccuugg

SEQ ID NO: 10869 - RNA, 19 nt, artificial
  Chemically synthesized
uagucuguacgggagaauu

SEQ ID NO: 10870 - RNA, 19 nt, artificial
  Chemically synthesized
ugguugauguccagcaccu

SEQ ID NO: 10871 - RNA, 19 nt, artificial
  Chemically synthesized
agcagaagcacaccuguca

SEQ ID NO: 10872 - RNA, 19 nt, artificial
  Chemically synthesized
auacuccgggaguguuuuc

SEQ ID NO: 10873 - RNA, 19 nt, artificial
  Chemically synthesized
uggauuugguagaaaucac

SEQ ID NO: 10874 - RNA, 19 nt, artificial
  Chemically synthesized
uggugguaaaacauguaca

SEQ ID NO: 10875 - RNA, 19 nt, artificial
  Chemically synthesized
auggaugaugagcagggca

SEQ ID NO: 10876 - RNA, 19 nt, artificial
  Chemically synthesized
uucucucuggguccuuggu

SEQ ID NO: 10877 - RNA, 19 nt, artificial
  Chemically synthesized
agguuguuaaaccagccgu

SEQ ID NO: 10878 - RNA, 19 nt, artificial
  Chemically synthesized
ugaugaugggacugcuccu

SEQ ID NO: 10879 - RNA, 19 nt, artificial
  Chemically synthesized
aagaagucaagcacaguca

SEQ ID NO: 10880 - RNA, 19 nt, artificial
  Chemically synthesized
acauucuaugucuugaccu

SEQ ID NO: 10881 - RNA, 19 nt, artificial
  Chemically synthesized
cuacauucuuggucauucc

SEQ ID NO: 10882 - RNA, 19 nt, artificial
  Chemically synthesized
ucaauauucucccaauauu

SEQ ID NO: 10883 - RNA, 19 nt, artificial
  Chemically synthesized
ugacuugaagaccaggucu

SEQ ID NO: 10884 - RNA, 19 nt, artificial
  Chemically synthesized
aggguugagaucacuccag

SEQ ID NO: 10885 - RNA, 19 nt, artificial
  Chemically synthesized
accaugguagagaagaacu

SEQ ID NO: 10886 - RNA, 19 nt, artificial
  Chemically synthesized
ugcacagaagagaaggcag

SEQ ID NO: 10887 - RNA, 19 nt, artificial
  Chemically synthesized
cauggugaagaauucgucc

SEQ ID NO: 10888 - RNA, 19 nt, artificial
  Chemically synthesized
agcaaauaccaaagcaacg

SEQ ID NO: 10889 - RNA, 19 nt, artificial
  Chemically synthesized
acccuuguucaggaccuuc

SEQ ID NO: 10890 - RNA, 19 nt, artificial
  Chemically synthesized
aaucccucagaucuucaac

SEQ ID NO: 10891 - RNA, 19 nt, artificial
  Chemically synthesized
acaucaagaauaucagggc

SEQ ID NO: 10892 - RNA, 19 nt, artificial
  Chemically synthesized
cagguuguuaaaccagccg

SEQ ID NO: 10893 - RNA, 19 nt, artificial
  Chemically synthesized
guuuuguuuaaagauaucu

SEQ ID NO: 10894 - RNA, 19 nt, artificial
  Chemically synthesized
guugaggaaagucucucgc

SEQ ID NO: 10895 - RNA, 19 nt, artificial
  Chemically synthesized
aucacuggugacaucaaga

SEQ ID NO: 10896 - RNA, 19 nt, artificial
  Chemically synthesized
ucuuggagaacagcccauu

SEQ ID NO: 10897 - RNA, 19 nt, artificial
  Chemically synthesized
agugguugcuucuaggagc

SEQ ID NO: 10898 - RNA, 19 nt, artificial
  Chemically synthesized
aggaaaggacgguauccug

SEQ ID NO: 10899 - RNA, 19 nt, artificial
  Chemically synthesized
ucuuuccucuuaaaaucuu

SEQ ID NO: 10900 - RNA, 19 nt, artificial
  Chemically synthesized
uccacgaagcgcuuguacu

SEQ ID NO: 10901 - RNA, 19 nt, artificial
  Chemically synthesized
aagaagaucuccaggaugc

SEQ ID NO: 10902 - RNA, 19 nt, artificial
  Chemically synthesized
gugaaaauccucccauguc

SEQ ID NO: 10903 - RNA, 19 nt, artificial
  Chemically synthesized
aguaaucccucagaucuuc

SEQ ID NO: 10904 - RNA, 19 nt, artificial
  Chemically synthesized
caucacagcuucugcacug

SEQ ID NO: 10905 - RNA, 19 nt, artificial
  Chemically synthesized
gucuucaaucuccuucuug

SEQ ID NO: 10906 - RNA, 19 nt, artificial
  Chemically synthesized
uugucacaagcagggacug

SEQ ID NO: 10907 - RNA, 19 nt, artificial
  Chemically synthesized
ucccgcagcaugaagugaa

SEQ ID NO: 10908 - RNA, 19 nt, artificial
  Chemically synthesized
aagcaucacagcuucugca

SEQ ID NO: 10909 - RNA, 19 nt, artificial
  Chemically synthesized
uagggugguguuggguuca

SEQ ID NO: 10910 - RNA, 19 nt, artificial
  Chemically synthesized
gugaggaguggucuuuauc

SEQ ID NO: 10911 - RNA, 19 nt, artificial
  Chemically synthesized
agcuccuucucgcucaucu

SEQ ID NO: 10912 - RNA, 19 nt, artificial
  Chemically synthesized
uccuguauacuccgggagu

SEQ ID NO: 10913 - RNA, 19 nt, artificial
  Chemically synthesized
uugcuucugugcucuacuu

SEQ ID NO: 10914 - RNA, 19 nt, artificial
  Chemically synthesized
uguuuuguuuaaagauauc

SEQ ID NO: 10915 - RNA, 19 nt, artificial
  Chemically synthesized
agaacuaaacagcagcacc

SEQ ID NO: 10916 - RNA, 19 nt, artificial
  Chemically synthesized
ucgcaggaagguuaugagg

SEQ ID NO: 10917 - RNA, 19 nt, artificial
  Chemically synthesized
cugcaauuguagaacauag

SEQ ID NO: 10918 - RNA, 19 nt, artificial
  Chemically synthesized
cuugaagaccaggucuuug

SEQ ID NO: 10919 - RNA, 19 nt, artificial
  Chemically synthesized
uccacugcggcaucaaaag

SEQ ID NO: 10920 - RNA, 19 nt, artificial
  Chemically synthesized
ugagaugccuguucaggac

SEQ ID NO: 10921 - RNA, 19 nt, artificial
  Chemically synthesized
guaagcacgaucugcaaac

SEQ ID NO: 10922 - RNA, 19 nt, artificial
  Chemically synthesized
ugccuuuucucauuuguau

SEQ ID NO: 10923 - RNA, 19 nt, artificial
  Chemically synthesized
cuuucucucuggguccuug

SEQ ID NO: 10924 - RNA, 19 nt, artificial
  Chemically synthesized
aaugugcacagacaccagg

SEQ ID NO: 10925 - RNA, 19 nt, artificial
  Chemically synthesized
ucuccuucuuggagaacag

SEQ ID NO: 10926 - RNA, 19 nt, artificial
  Chemically synthesized
agaucuucaaccacuaugu

SEQ ID NO: 10927 - RNA, 19 nt, artificial
  Chemically synthesized
ugcuaagggcaggaagucu

SEQ ID NO: 10928 - RNA, 19 nt, artificial
  Chemically synthesized
auguccaggaacucucgga

SEQ ID NO: 10929 - RNA, 19 nt, artificial
  Chemically synthesized
uagcuccuucucgcucauc

SEQ ID NO: 10930 - RNA, 19 nt, artificial
  Chemically synthesized
auagcugcugcacaaaggc

SEQ ID NO: 10931 - RNA, 19 nt, artificial
  Chemically synthesized
uccaguuccuugggauguc

SEQ ID NO: 10932 - RNA, 19 nt, artificial
  Chemically synthesized
uguuuaaagauaucucuaa

SEQ ID NO: 10933 - RNA, 19 nt, artificial
  Chemically synthesized
aaaguugcugacacuuugg

SEQ ID NO: 10934 - RNA, 19 nt, artificial
  Chemically synthesized
ucccucagaucuucaacca

SEQ ID NO: 10935 - RNA, 19 nt, artificial
  Chemically synthesized
agaagcagacucacuaagg

SEQ ID NO: 10936 - RNA, 19 nt, artificial
  Chemically synthesized
cuaugucuugaccugggug

SEQ ID NO: 10937 - RNA, 19 nt, artificial
  Chemically synthesized
ugugcucuacuucuugccu

SEQ ID NO: 10938 - RNA, 19 nt, artificial
  Chemically synthesized
ugaguuucuuuuguagcuu

SEQ ID NO: 10939 - RNA, 19 nt, artificial
  Chemically synthesized
uagagaagaacugcucaga

SEQ ID NO: 10940 - RNA, 19 nt, artificial
  Chemically synthesized
ucuugcguaaggugaccag

SEQ ID NO: 10941 - RNA, 19 nt, artificial
  Chemically synthesized
uucagcacuuucuggaagu

SEQ ID NO: 10942 - RNA, 19 nt, artificial
  Chemically synthesized
cucuuggaugaugucagcc

SEQ ID NO: 10943 - RNA, 19 nt, artificial
  Chemically synthesized
uucaggaccuuccggaaau

SEQ ID NO: 10944 - RNA, 19 nt, artificial
  Chemically synthesized
agaagaacugcucagaggc

SEQ ID NO: 10945 - RNA, 19 nt, artificial
  Chemically synthesized
ccucagaucuucaaccacu

SEQ ID NO: 10946 - RNA, 19 nt, artificial
  Chemically synthesized
uggugaagaauucguccuu

SEQ ID NO: 10947 - RNA, 19 nt, artificial
  Chemically synthesized
auucccagcagcagcucau

SEQ ID NO: 10948 - RNA, 19 nt, artificial
  Chemically synthesized
aauccucccaugucagcuc

SEQ ID NO: 10949 - RNA, 19 nt, artificial
  Chemically synthesized
agaagauguagacauugac

SEQ ID NO: 10950 - RNA, 19 nt, artificial
  Chemically synthesized
acuuucuggaagugccgcu

SEQ ID NO: 10951 - RNA, 19 nt, artificial
  Chemically synthesized
cuauguuguccuccaacuc

SEQ ID NO: 10952 - RNA, 19 nt, artificial
  Chemically synthesized
guucucauaguggugcaug

SEQ ID NO: 10953 - RNA, 19 nt, artificial
  Chemically synthesized
uaaacauuagacgggacuu

SEQ ID NO: 10954 - RNA, 19 nt, artificial
  Chemically synthesized
auacaugguaaacauuaga

SEQ ID NO: 10955 - RNA, 19 nt, artificial
  Chemically synthesized
ugauguuuuguuuaaagau

SEQ ID NO: 10956 - RNA, 19 nt, artificial
  Chemically synthesized
uuaggugcacagaagagaa

SEQ ID NO: 10957 - RNA, 19 nt, artificial
  Chemically synthesized
uccuccuuguccuggaauc

SEQ ID NO: 10958 - RNA, 19 nt, artificial
  Chemically synthesized
accacuauguuguccucca

SEQ ID NO: 10959 - RNA, 19 nt, artificial
  Chemically synthesized
acagccuuccuaaauagcu

SEQ ID NO: 10960 - RNA, 19 nt, artificial
  Chemically synthesized
uccuggguacuguucagau

SEQ ID NO: 10961 - RNA, 19 nt, artificial
  Chemically synthesized
acaagcacuauuguaccuu

SEQ ID NO: 10962 - RNA, 19 nt, artificial
  Chemically synthesized
agcgauguucugguaggug

SEQ ID NO: 10963 - RNA, 19 nt, artificial
  Chemically synthesized
uccugguguucucaaacca

SEQ ID NO: 10964 - RNA, 19 nt, artificial
  Chemically synthesized
aauggugccguugauaaac

SEQ ID NO: 10965 - RNA, 19 nt, artificial
  Chemically synthesized
aggaacucucggaaggaca

SEQ ID NO: 10966 - RNA, 19 nt, artificial
  Chemically synthesized
aggaaaagaaaaguuaaag

SEQ ID NO: 10967 - RNA, 19 nt, artificial
  Chemically synthesized
acaggccuucucuacauuc

SEQ ID NO: 10968 - RNA, 19 nt, artificial
  Chemically synthesized
aucggagacaagcacuauu

SEQ ID NO: 10969 - RNA, 19 nt, artificial
  Chemically synthesized
aggugucugaagaagaucu

SEQ ID NO: 10970 - RNA, 19 nt, artificial
  Chemically synthesized
uuugaggauggaggcaaag

SEQ ID NO: 10971 - RNA, 19 nt, artificial
  Chemically synthesized
guagaacauagucuccugc

SEQ ID NO: 10972 - RNA, 19 nt, artificial
  Chemically synthesized
cccaucauucacaaagacg

SEQ ID NO: 10973 - RNA, 19 nt, artificial
  Chemically synthesized
ucuugccuucacccucacu

SEQ ID NO: 10974 - RNA, 19 nt, artificial
  Chemically synthesized
aacagacuccgguucagca

SEQ ID NO: 10975 - RNA, 19 nt, artificial
  Chemically synthesized
agcacaccugucauaccug

SEQ ID NO: 10976 - RNA, 19 nt, artificial
  Chemically synthesized
cgguauccuguauacuccg

SEQ ID NO: 10977 - RNA, 19 nt, artificial
  Chemically synthesized
guuguuggagaucucgaug

SEQ ID NO: 10978 - RNA, 19 nt, artificial
  Chemically synthesized
caauauucucccaauauug

SEQ ID NO: 10979 - RNA, 19 nt, artificial
  Chemically synthesized
gagaucucgaugaaggauc

SEQ ID NO: 10980 - RNA, 19 nt, artificial
  Chemically synthesized
cuucaaagaagucaagcac

SEQ ID NO: 10981 - RNA, 19 nt, artificial
  Chemically synthesized
ugaaaacccuuguucagga

SEQ ID NO: 10982 - RNA, 19 nt, artificial
  Chemically synthesized
aucacuccaguuccuuggg

SEQ ID NO: 10983 - RNA, 19 nt, artificial
  Chemically synthesized
uccucuucagaacuaaaca

SEQ ID NO: 10984 - RNA, 19 nt, artificial
  Chemically synthesized
agcagcagcucauucaccu

SEQ ID NO: 10985 - RNA, 19 nt, artificial
  Chemically synthesized
aguuaaagagcugaguaug

SEQ ID NO: 10986 - RNA, 19 nt, artificial
  Chemically synthesized
aguagggcugcuccuuuug

SEQ ID NO: 10987 - RNA, 19 nt, artificial
  Chemically synthesized
cuuagggaucuugagcagc

SEQ ID NO: 10988 - RNA, 19 nt, artificial
  Chemically synthesized
cauuuguauaauugucugg

SEQ ID NO: 10989 - RNA, 19 nt, artificial
  Chemically synthesized
cagcuuuuuaggaaagagc

SEQ ID NO: 10990 - RNA, 19 nt, artificial
  Chemically synthesized
uguccugacuuguacucaa

SEQ ID NO: 10991 - RNA, 19 nt, artificial
  Chemically synthesized
ugucacagccuuccuaaau

SEQ ID NO: 10992 - RNA, 19 nt, artificial
  Chemically synthesized
ugugguuuagggugguguu

SEQ ID NO: 10993 - RNA, 19 nt, artificial
  Chemically synthesized
ucagcuuuuuaggaaagag

SEQ ID NO: 10994 - RNA, 19 nt, artificial
  Chemically synthesized
cacuauguuguccuccaac

SEQ ID NO: 10995 - RNA, 19 nt, artificial
  Chemically synthesized
aaaaaggaaaagaaaaguu

SEQ ID NO: 10996 - RNA, 19 nt, artificial
  Chemically synthesized
cuucuucacgcucucuuug

SEQ ID NO: 10997 - RNA, 19 nt, artificial
  Chemically synthesized
cucauaguggugcaugaag

SEQ ID NO: 10998 - RNA, 19 nt, artificial
  Chemically synthesized
aagauaucucuaauaccau

SEQ ID NO: 10999 - RNA, 19 nt, artificial
  Chemically synthesized
gacaggaugagguugaccu

SEQ ID NO: 11000 - RNA, 19 nt, artificial
  Chemically synthesized
uccacauuaggguugagau

SEQ ID NO: 11001 - RNA, 19 nt, artificial
  Chemically synthesized
aggcaucuuuguuuccugg

SEQ ID NO: 11002 - RNA, 19 nt, artificial
  Chemically synthesized
caucauggugaagaauucg

SEQ ID NO: 11003 - RNA, 19 nt, artificial
  Chemically synthesized
ucccggaacauagacucca

SEQ ID NO: 11004 - RNA, 19 nt, artificial
  Chemically synthesized
aaucacaucagugguugcu

SEQ ID NO: 11005 - RNA, 19 nt, artificial
  Chemically synthesized
aagcaaauaccaaagcaac

SEQ ID NO: 11006 - RNA, 19 nt, artificial
  Chemically synthesized
cucaccuuucucucugggu

SEQ ID NO: 11007 - RNA, 19 nt, artificial
  Chemically synthesized
uguauagcauggugguccu

SEQ ID NO: 11008 - RNA, 19 nt, artificial
  Chemically synthesized
ugaaguagaucuucuuaca

SEQ ID NO: 11009 - RNA, 19 nt, artificial
  Chemically synthesized
aguuucuuuuguagcuucu

SEQ ID NO: 11010 - RNA, 19 nt, artificial
  Chemically synthesized
cuccaguagaugcagagag

SEQ ID NO: 11011 - RNA, 19 nt, artificial
  Chemically synthesized
agaucgaguacugaauauc

SEQ ID NO: 11012 - RNA, 19 nt, artificial
  Chemically synthesized
gugguguuggguucagaug

SEQ ID NO: 11013 - RNA, 19 nt, artificial
  Chemically synthesized
ccuuucaugaagaccacca

SEQ ID NO: 11014 - RNA, 19 nt, artificial
  Chemically synthesized
ucuaggaaaggacgguauc

SEQ ID NO: 11015 - RNA, 19 nt, artificial
  Chemically synthesized
aaagaaaaguuaaagagcu

SEQ ID NO: 11016 - RNA, 19 nt, artificial
  Chemically synthesized
augaaaaaggaaaagaaaa

SEQ ID NO: 11017 - RNA, 19 nt, artificial
  Chemically synthesized
uagggcugcuccuuuugga

SEQ ID NO: 11018 - RNA, 19 nt, artificial
  Chemically synthesized
aagcacgaucugcaaacac

SEQ ID NO: 11019 - RNA, 19 nt, artificial
  Chemically synthesized
aggccuaagguggauucug

SEQ ID NO: 11020 - RNA, 19 nt, artificial
  Chemically synthesized
aaggugucugaagaagauc

SEQ ID NO: 11021 - RNA, 19 nt, artificial
  Chemically synthesized
agaaguucucauaguggug

SEQ ID NO: 11022 - RNA, 19 nt, artificial
  Chemically synthesized
gacgguauccuguauacuc

SEQ ID NO: 11023 - RNA, 19 nt, artificial
  Chemically synthesized
caggucauacuccuuaggg

SEQ ID NO: 11024 - RNA, 19 nt, artificial
  Chemically synthesized
aagauauaagagaacauga

SEQ ID NO: 11025 - RNA, 19 nt, artificial
  Chemically synthesized
ucaccuccacacuugucac

SEQ ID NO: 11026 - RNA, 19 nt, artificial
  Chemically synthesized
uggauucugauggagagau

SEQ ID NO: 11027 - RNA, 19 nt, artificial
  Chemically synthesized
ucagugguugcuucuagga

SEQ ID NO: 11028 - RNA, 19 nt, artificial
  Chemically synthesized
guucagaugucuucuuucc

SEQ ID NO: 11029 - RNA, 19 nt, artificial
  Chemically synthesized
acauagacuccaccaccuc

SEQ ID NO: 11030 - RNA, 19 nt, artificial
  Chemically synthesized
agcacuuucuggaagugcc

SEQ ID NO: 11031 - RNA, 19 nt, artificial
  Chemically synthesized
cugcuuugucacagccuuc

SEQ ID NO: 11032 - RNA, 19 nt, artificial
  Chemically synthesized
cgacgaucacuggcuucuu

SEQ ID NO: 11033 - RNA, 19 nt, artificial
  Chemically synthesized
gcguguuggaaacgucaga

SEQ ID NO: 11034 - RNA, 19 nt, artificial
  Chemically synthesized
ccaaacguuugccuucucu

SEQ ID NO: 11035 - RNA, 19 nt, artificial
  Chemically synthesized
cagaucaagaggcuccaaa

SEQ ID NO: 11036 - RNA, 19 nt, artificial
  Chemically synthesized
gcagaucaagaggcuccaa

SEQ ID NO: 11037 - RNA, 19 nt, artificial
  Chemically synthesized
ugcuguuccucugaguaaa

SEQ ID NO: 11038 - RNA, 19 nt, artificial
  Chemically synthesized
gcuguuggaaaccuauucu

SEQ ID NO: 11039 - RNA, 19 nt, artificial
  Chemically synthesized
ggaguugggacgaauucag

SEQ ID NO: 11040 - RNA, 19 nt, artificial
  Chemically synthesized
uccaaacguuugccuucuc

SEQ ID NO: 11041 - RNA, 19 nt, artificial
  Chemically synthesized
cuccaaacguuugccuucu

SEQ ID NO: 11042 - RNA, 19 nt, artificial
  Chemically synthesized
agcuguuggaaaccuauuc

SEQ ID NO: 11043 - RNA, 19 nt, artificial
  Chemically synthesized
cgaauucaggcagcucaag

SEQ ID NO: 11044 - RNA, 19 nt, artificial
  Chemically synthesized
acgaauucaggcagcucaa

SEQ ID NO: 11045 - RNA, 19 nt, artificial
  Chemically synthesized
caagaaagcugcaaaggac

SEQ ID NO: 11046 - RNA, 19 nt, artificial
  Chemically synthesized
cguguuggaaacgucagac

SEQ ID NO: 11047 - RNA, 19 nt, artificial
  Chemically synthesized
cuguuggaaaccuauucuc

SEQ ID NO: 11048 - RNA, 19 nt, artificial
  Chemically synthesized
gacgaauucaggcagcuca

SEQ ID NO: 11049 - RNA, 19 nt, artificial
  Chemically synthesized
gcuguuccucugaguaaag

SEQ ID NO: 11050 - RNA, 19 nt, artificial
  Chemically synthesized
uggugcagaucaagaggcu

SEQ ID NO: 11051 - RNA, 19 nt, artificial
  Chemically synthesized
uugagguguugccaggauu

SEQ ID NO: 11052 - RNA, 19 nt, artificial
  Chemically synthesized
gcagcuguuggaaaccuau

SEQ ID NO: 11053 - RNA, 19 nt, artificial
  Chemically synthesized
ccucgcccauuucaggaau

SEQ ID NO: 11054 - RNA, 19 nt, artificial
  Chemically synthesized
gccauuugcuguuccucug

SEQ ID NO: 11055 - RNA, 19 nt, artificial
  Chemically synthesized
ucaagacccucaaggagac

SEQ ID NO: 11056 - RNA, 19 nt, artificial
  Chemically synthesized
ccauuugcuguuccucuga

SEQ ID NO: 11057 - RNA, 19 nt, artificial
  Chemically synthesized
ucgcccauuucaggaaucu

SEQ ID NO: 11058 - RNA, 19 nt, artificial
  Chemically synthesized
cucgcccauuucaggaauc

SEQ ID NO: 11059 - RNA, 19 nt, artificial
  Chemically synthesized
agcuucucgaugcaccacu

SEQ ID NO: 11060 - RNA, 19 nt, artificial
  Chemically synthesized
auacccaguuucagugcaa

SEQ ID NO: 11061 - RNA, 19 nt, artificial
  Chemically synthesized
ccgauacccaguuucagug

SEQ ID NO: 11062 - RNA, 19 nt, artificial
  Chemically synthesized
aggaaucugcagccuggaa

SEQ ID NO: 11063 - RNA, 19 nt, artificial
  Chemically synthesized
cgcccauuucaggaaucug

SEQ ID NO: 11064 - RNA, 19 nt, artificial
  Chemically synthesized
agacccucaaggagaccuu

SEQ ID NO: 11065 - RNA, 19 nt, artificial
  Chemically synthesized
ccauuucaggaaucugcag

SEQ ID NO: 11066 - RNA, 19 nt, artificial
  Chemically synthesized
cccauuucaggaaucugca

SEQ ID NO: 11067 - RNA, 19 nt, artificial
  Chemically synthesized
acagcaagaaagcugcaaa

SEQ ID NO: 11068 - RNA, 19 nt, artificial
  Chemically synthesized
cccgauacccaguuucagu

SEQ ID NO: 11069 - RNA, 19 nt, artificial
  Chemically synthesized
uggaaaccuauucucggag

SEQ ID NO: 11070 - RNA, 19 nt, artificial
  Chemically synthesized
uccucgcccauuucaggaa

SEQ ID NO: 11071 - RNA, 19 nt, artificial
  Chemically synthesized
cuugagguguugccaggau

SEQ ID NO: 11072 - RNA, 19 nt, artificial
  Chemically synthesized
gcccauuucaggaaucugc

SEQ ID NO: 11073 - RNA, 19 nt, artificial
  Chemically synthesized
cagcaagaaagcugcaaag

SEQ ID NO: 11074 - RNA, 19 nt, artificial
  Chemically synthesized
ggcuccaaacguuugccuu

SEQ ID NO: 11075 - RNA, 19 nt, artificial
  Chemically synthesized
ugccaggauucuaucccag

SEQ ID NO: 11076 - RNA, 19 nt, artificial
  Chemically synthesized
ggaaaccuauucucggagg

SEQ ID NO: 11077 - RNA, 19 nt, artificial
  Chemically synthesized
cagcuguuggaaaccuauu

SEQ ID NO: 11078 - RNA, 19 nt, artificial
  Chemically synthesized
gacagcaagaaagcugcaa

SEQ ID NO: 11079 - RNA, 19 nt, artificial
  Chemically synthesized
ugcagcuguuggaaaccua

SEQ ID NO: 11080 - RNA, 19 nt, artificial
  Chemically synthesized
aggcuccaaacguuugccu

SEQ ID NO: 11081 - RNA, 19 nt, artificial
  Chemically synthesized
ggacagcaagaaagcugca

SEQ ID NO: 11082 - RNA, 19 nt, artificial
  Chemically synthesized
cugcagcuguuggaaaccu

SEQ ID NO: 11083 - RNA, 19 nt, artificial
  Chemically synthesized
ggccauuugcuguuccucu

SEQ ID NO: 11084 - RNA, 19 nt, artificial
  Chemically synthesized
aagaagccagugaucgucg

SEQ ID NO: 11085 - RNA, 19 nt, artificial
  Chemically synthesized
ucugacguuuccaacacgc

SEQ ID NO: 11086 - RNA, 19 nt, artificial
  Chemically synthesized
agagaaggcaaacguuugg

SEQ ID NO: 11087 - RNA, 19 nt, artificial
  Chemically synthesized
uuuggagccucuugaucug

SEQ ID NO: 11088 - RNA, 19 nt, artificial
  Chemically synthesized
uuggagccucuugaucugc

SEQ ID NO: 11089 - RNA, 19 nt, artificial
  Chemically synthesized
uuuacucagaggaacagca

SEQ ID NO: 11090 - RNA, 19 nt, artificial
  Chemically synthesized
agaauagguuuccaacagc

SEQ ID NO: 11091 - RNA, 19 nt, artificial
  Chemically synthesized
cugaauucgucccaacucc

SEQ ID NO: 11092 - RNA, 19 nt, artificial
  Chemically synthesized
gagaaggcaaacguuugga

SEQ ID NO: 11093 - RNA, 19 nt, artificial
  Chemically synthesized
agaaggcaaacguuuggag

SEQ ID NO: 11094 - RNA, 19 nt, artificial
  Chemically synthesized
gaauagguuuccaacagcu

SEQ ID NO: 11095 - RNA, 19 nt, artificial
  Chemically synthesized
cuugagcugccugaauucg

SEQ ID NO: 11096 - RNA, 19 nt, artificial
  Chemically synthesized
uugagcugccugaauucgu

SEQ ID NO: 11097 - RNA, 19 nt, artificial
  Chemically synthesized
guccuuugcagcuuucuug

SEQ ID NO: 11098 - RNA, 19 nt, artificial
  Chemically synthesized
gucugacguuuccaacacg

SEQ ID NO: 11099 - RNA, 19 nt, artificial
  Chemically synthesized
gagaauagguuuccaacag

SEQ ID NO: 11100 - RNA, 19 nt, artificial
  Chemically synthesized
ugagcugccugaauucguc

SEQ ID NO: 11101 - RNA, 19 nt, artificial
  Chemically synthesized
cuuuacucagaggaacagc

SEQ ID NO: 11102 - RNA, 19 nt, artificial
  Chemically synthesized
agccucuugaucugcacca

SEQ ID NO: 11103 - RNA, 19 nt, artificial
  Chemically synthesized
aauccuggcaacaccucaa

SEQ ID NO: 11104 - RNA, 19 nt, artificial
  Chemically synthesized
auagguuuccaacagcugc

SEQ ID NO: 11105 - RNA, 19 nt, artificial
  Chemically synthesized
auuccugaaaugggcgagg

SEQ ID NO: 11106 - RNA, 19 nt, artificial
  Chemically synthesized
cagaggaacagcaaauggc

SEQ ID NO: 11107 - RNA, 19 nt, artificial
  Chemically synthesized
gucuccuugagggucuuga

SEQ ID NO: 11108 - RNA, 19 nt, artificial
  Chemically synthesized
ucagaggaacagcaaaugg

SEQ ID NO: 11109 - RNA, 19 nt, artificial
  Chemically synthesized
agauuccugaaaugggcga

SEQ ID NO: 11110 - RNA, 19 nt, artificial
  Chemically synthesized
gauuccugaaaugggcgag

SEQ ID NO: 11111 - RNA, 19 nt, artificial
  Chemically synthesized
aguggugcaucgagaagcu

SEQ ID NO: 11112 - RNA, 19 nt, artificial
  Chemically synthesized
uugcacugaaacuggguau

SEQ ID NO: 11113 - RNA, 19 nt, artificial
  Chemically synthesized
cacugaaacuggguaucgg

SEQ ID NO: 11114 - RNA, 19 nt, artificial
  Chemically synthesized
uuccaggcugcagauuccu

SEQ ID NO: 11115 - RNA, 19 nt, artificial
  Chemically synthesized
cagauuccugaaaugggcg

SEQ ID NO: 11116 - RNA, 19 nt, artificial
  Chemically synthesized
aaggucuccuugagggucu

SEQ ID NO: 11117 - RNA, 19 nt, artificial
  Chemically synthesized
cugcagauuccugaaaugg

SEQ ID NO: 11118 - RNA, 19 nt, artificial
  Chemically synthesized
ugcagauuccugaaauggg

SEQ ID NO: 11119 - RNA, 19 nt, artificial
  Chemically synthesized
uuugcagcuuucuugcugu

SEQ ID NO: 11120 - RNA, 19 nt, artificial
  Chemically synthesized
acugaaacuggguaucggg

SEQ ID NO: 11121 - RNA, 19 nt, artificial
  Chemically synthesized
cuccgagaauagguuucca

SEQ ID NO: 11122 - RNA, 19 nt, artificial
  Chemically synthesized
uuccugaaaugggcgagga

SEQ ID NO: 11123 - RNA, 19 nt, artificial
  Chemically synthesized
auccuggcaacaccucaag

SEQ ID NO: 11124 - RNA, 19 nt, artificial
  Chemically synthesized
gcagauuccugaaaugggc

SEQ ID NO: 11125 - RNA, 19 nt, artificial
  Chemically synthesized
cuuugcagcuuucuugcug

SEQ ID NO: 11126 - RNA, 19 nt, artificial
  Chemically synthesized
aaggcaaacguuuggagcc

SEQ ID NO: 11127 - RNA, 19 nt, artificial
  Chemically synthesized
cugggauagaauccuggca

SEQ ID NO: 11128 - RNA, 19 nt, artificial
  Chemically synthesized
ccuccgagaauagguuucc

SEQ ID NO: 11129 - RNA, 19 nt, artificial
  Chemically synthesized
aauagguuuccaacagcug

SEQ ID NO: 11130 - RNA, 19 nt, artificial
  Chemically synthesized
uugcagcuuucuugcuguc

SEQ ID NO: 11131 - RNA, 19 nt, artificial
  Chemically synthesized
uagguuuccaacagcugca

SEQ ID NO: 11132 - RNA, 19 nt, artificial
  Chemically synthesized
aggcaaacguuuggagccu

SEQ ID NO: 11133 - RNA, 19 nt, artificial
  Chemically synthesized
ugcagcuuucuugcugucc

SEQ ID NO: 11134 - RNA, 19 nt, artificial
  Chemically synthesized
agguuuccaacagcugcag

SEQ ID NO: 11135 - RNA, 19 nt, artificial
  Chemically synthesized
agaggaacagcaaauggcc

SEQ ID NO: 11136 - RNA, 19 nt, artificial
  Chemically synthesized
gcaggaguugggacgaauu

SEQ ID NO: 11137 - RNA, 19 nt, artificial
  Chemically synthesized
caagaggcuccaaacguuu

SEQ ID NO: 11138 - RNA, 19 nt, artificial
  Chemically synthesized
ucaagaggcuccaaacguu

SEQ ID NO: 11139 - RNA, 19 nt, artificial
  Chemically synthesized
agaggagcagccucuuucu

SEQ ID NO: 11140 - RNA, 19 nt, artificial
  Chemically synthesized
aggaguugggacgaauuca

SEQ ID NO: 11141 - RNA, 19 nt, artificial
  Chemically synthesized
uuggaaaccuauucucgga

SEQ ID NO: 11142 - RNA, 19 nt, artificial
  Chemically synthesized
gaauucaggcagcucaaga

SEQ ID NO: 11143 - RNA, 19 nt, artificial
  Chemically synthesized
agaucaagaggcuccaaac

SEQ ID NO: 11144 - RNA, 19 nt, artificial
  Chemically synthesized
gcguucucccaaagcuucu

SEQ ID NO: 11145 - RNA, 19 nt, artificial
  Chemically synthesized
gauacccaguuucagugca

SEQ ID NO: 11146 - RNA, 19 nt, artificial
  Chemically synthesized
ugcagaucaagaggcucca

SEQ ID NO: 11147 - RNA, 19 nt, artificial
  Chemically synthesized
guuggaaaccuauucucgg

SEQ ID NO: 11148 - RNA, 19 nt, artificial
  Chemically synthesized
aaacguuugccuucucugu

SEQ ID NO: 11149 - RNA, 19 nt, artificial
  Chemically synthesized
gaguugggacgaauucagg

SEQ ID NO: 11150 - RNA, 19 nt, artificial
  Chemically synthesized
caggaguugggacgaauuc

SEQ ID NO: 11151 - RNA, 19 nt, artificial
  Chemically synthesized
gaucaagaggcuccaaacg

SEQ ID NO: 11152 - RNA, 19 nt, artificial
  Chemically synthesized
guugggacgaauucaggca

SEQ ID NO: 11153 - RNA, 19 nt, artificial
  Chemically synthesized
ucuccauccacagucugga

SEQ ID NO: 11154 - RNA, 19 nt, artificial
  Chemically synthesized
uacccaguuucagugcaag

SEQ ID NO: 11155 - RNA, 19 nt, artificial
  Chemically synthesized
caaacguuugccuucucug

SEQ ID NO: 11156 - RNA, 19 nt, artificial
  Chemically synthesized
acccaguuucagugcaagg

SEQ ID NO: 11157 - RNA, 19 nt, artificial
  Chemically synthesized
auaggccuuuucaggcgca

SEQ ID NO: 11158 - RNA, 19 nt, artificial
  Chemically synthesized
cguucucccaaagcuucuc

SEQ ID NO: 11159 - RNA, 19 nt, artificial
  Chemically synthesized
aagaggcuccaaacguuug

SEQ ID NO: 11160 - RNA, 19 nt, artificial
  Chemically synthesized
uguuggaaaccuauucucg

SEQ ID NO: 11161 - RNA, 19 nt, artificial
  Chemically synthesized
cgauacccaguuucagugc

SEQ ID NO: 11162 - RNA, 19 nt, artificial
  Chemically synthesized
agaggcuccaaacguuugc

SEQ ID NO: 11163 - RNA, 19 nt, artificial
  Chemically synthesized
aucaagaggcuccaaacgu

SEQ ID NO: 11164 - RNA, 19 nt, artificial
  Chemically synthesized
aaaccuauucucggaggcu

SEQ ID NO: 11165 - RNA, 19 nt, artificial
  Chemically synthesized
gcuccaaacguuugccuuc

SEQ ID NO: 11166 - RNA, 19 nt, artificial
  Chemically synthesized
uguuggaaacgucagaccg

SEQ ID NO: 11167 - RNA, 19 nt, artificial
  Chemically synthesized
gaaaccuauucucggaggc

SEQ ID NO: 11168 - RNA, 19 nt, artificial
  Chemically synthesized
aaccuauucucggaggcug

SEQ ID NO: 11169 - RNA, 19 nt, artificial
  Chemically synthesized
guguuggaaacgucagacc

SEQ ID NO: 11170 - RNA, 19 nt, artificial
  Chemically synthesized
aguugggacgaauucaggc

SEQ ID NO: 11171 - RNA, 19 nt, artificial
  Chemically synthesized
aacguuugccuucucugug

SEQ ID NO: 11172 - RNA, 19 nt, artificial
  Chemically synthesized
acguuugccuucucugugc

SEQ ID NO: 11173 - RNA, 19 nt, artificial
  Chemically synthesized
aagacccucaaggagaccu

SEQ ID NO: 11174 - RNA, 19 nt, artificial
  Chemically synthesized
uugggacgaauucaggcag

SEQ ID NO: 11175 - RNA, 19 nt, artificial
  Chemically synthesized
guucucccaaagcuucucg

SEQ ID NO: 11176 - RNA, 19 nt, artificial
  Chemically synthesized
uuugccuucucugugcgcu

SEQ ID NO: 11177 - RNA, 19 nt, artificial
  Chemically synthesized
aauucgucccaacuccugc

SEQ ID NO: 11178 - RNA, 19 nt, artificial
  Chemically synthesized
aaacguuuggagccucuug

SEQ ID NO: 11179 - RNA, 19 nt, artificial
  Chemically synthesized
aacguuuggagccucuuga

SEQ ID NO: 11180 - RNA, 19 nt, artificial
  Chemically synthesized
agaaagaggcugcuccucu

SEQ ID NO: 11181 - RNA, 19 nt, artificial
  Chemically synthesized
ugaauucgucccaacuccu

SEQ ID NO: 11182 - RNA, 19 nt, artificial
  Chemically synthesized
uccgagaauagguuuccaa

SEQ ID NO: 11183 - RNA, 19 nt, artificial
  Chemically synthesized
ucuugagcugccugaauuc

SEQ ID NO: 11184 - RNA, 19 nt, artificial
  Chemically synthesized
guuuggagccucuugaucu

SEQ ID NO: 11185 - RNA, 19 nt, artificial
  Chemically synthesized
agaagcuuugggagaacgc

SEQ ID NO: 11186 - RNA, 19 nt, artificial
  Chemically synthesized
ugcacugaaacuggguauc

SEQ ID NO: 11187 - RNA, 19 nt, artificial
  Chemically synthesized
uggagccucuugaucugca

SEQ ID NO: 11188 - RNA, 19 nt, artificial
  Chemically synthesized
ccgagaauagguuuccaac

SEQ ID NO: 11189 - RNA, 19 nt, artificial
  Chemically synthesized
acagagaaggcaaacguuu

SEQ ID NO: 11190 - RNA, 19 nt, artificial
  Chemically synthesized
ccugaauucgucccaacuc

SEQ ID NO: 11191 - RNA, 19 nt, artificial
  Chemically synthesized
gaauucgucccaacuccug

SEQ ID NO: 11192 - RNA, 19 nt, artificial
  Chemically synthesized
cguuuggagccucuugauc

SEQ ID NO: 11193 - RNA, 19 nt, artificial
  Chemically synthesized
ugccugaauucgucccaac

SEQ ID NO: 11194 - RNA, 19 nt, artificial
  Chemically synthesized
uccagacuguggauggaga

SEQ ID NO: 11195 - RNA, 19 nt, artificial
  Chemically synthesized
cuugcacugaaacugggua

SEQ ID NO: 11196 - RNA, 19 nt, artificial
  Chemically synthesized
cagagaaggcaaacguuug

SEQ ID NO: 11197 - RNA, 19 nt, artificial
  Chemically synthesized
ccuugcacugaaacugggu

SEQ ID NO: 11198 - RNA, 19 nt, artificial
  Chemically synthesized
ugcgccugaaaaggccuau

SEQ ID NO: 11199 - RNA, 19 nt, artificial
  Chemically synthesized
gagaagcuuugggagaacg

SEQ ID NO: 11200 - RNA, 19 nt, artificial
  Chemically synthesized
caaacguuuggagccucuu

SEQ ID NO: 11201 - RNA, 19 nt, artificial
  Chemically synthesized
cgagaauagguuuccaaca

SEQ ID NO: 11202 - RNA, 19 nt, artificial
  Chemically synthesized
gcacugaaacuggguaucg

SEQ ID NO: 11203 - RNA, 19 nt, artificial
  Chemically synthesized
gcaaacguuuggagccucu

SEQ ID NO: 11204 - RNA, 19 nt, artificial
  Chemically synthesized
acguuuggagccucuugau

SEQ ID NO: 11205 - RNA, 19 nt, artificial
  Chemically synthesized
agccuccgagaauagguuu

SEQ ID NO: 11206 - RNA, 19 nt, artificial
  Chemically synthesized
gaaggcaaacguuuggagc

SEQ ID NO: 11207 - RNA, 19 nt, artificial
  Chemically synthesized
cggucugacguuuccaaca

SEQ ID NO: 11208 - RNA, 19 nt, artificial
  Chemically synthesized
gccuccgagaauagguuuc

SEQ ID NO: 11209 - RNA, 19 nt, artificial
  Chemically synthesized
cagccuccgagaauagguu

SEQ ID NO: 11210 - RNA, 19 nt, artificial
  Chemically synthesized
ggucugacguuuccaacac

SEQ ID NO: 11211 - RNA, 19 nt, artificial
  Chemically synthesized
gccugaauucgucccaacu

SEQ ID NO: 11212 - RNA, 19 nt, artificial
  Chemically synthesized
cacagagaaggcaaacguu

SEQ ID NO: 11213 - RNA, 19 nt, artificial
  Chemically synthesized
gcacagagaaggcaaacgu

SEQ ID NO: 11214 - RNA, 19 nt, artificial
  Chemically synthesized
aggucuccuugagggucuu

SEQ ID NO: 11215 - RNA, 19 nt, artificial
  Chemically synthesized
cugccugaauucgucccaa

SEQ ID NO: 11216 - RNA, 19 nt, artificial
  Chemically synthesized
cgagaagcuuugggagaac

SEQ ID NO: 11217 - RNA, 19 nt, artificial
  Chemically synthesized
agcgcacagagaaggcaaa

SEQ ID NO: 11218 - RNA, 19 nt, artificial
  Chemically synthesized
ccuguacauacguguucua

SEQ ID NO: 11219 - RNA, 19 nt, artificial
  Chemically synthesized
gggcgaucaauccagagaa

SEQ ID NO: 11220 - RNA, 19 nt, artificial
  Chemically synthesized
guacauacguguucuauag

SEQ ID NO: 11221 - RNA, 19 nt, artificial
  Chemically synthesized
ccauugccaacuacgagaa

SEQ ID NO: 11222 - RNA, 19 nt, artificial
  Chemically synthesized
acauacguguucuauagag

SEQ ID NO: 11223 - RNA, 19 nt, artificial
  Chemically synthesized
caaaaaagccagagacaua

SEQ ID NO: 11224 - RNA, 19 nt, artificial
  Chemically synthesized
acaaaaaagccagagacau

SEQ ID NO: 11225 - RNA, 19 nt, artificial
  Chemically synthesized
gccuguacauacguguucu

SEQ ID NO: 11226 - RNA, 19 nt, artificial
  Chemically synthesized
ccguccauguaccugcaaa

SEQ ID NO: 11227 - RNA, 19 nt, artificial
  Chemically synthesized
cuguacauacguguucuau

SEQ ID NO: 11228 - RNA, 19 nt, artificial
  Chemically synthesized
ucagaugaaagcaaagcga

SEQ ID NO: 11229 - RNA, 19 nt, artificial
  Chemically synthesized
cgaucaauccagagaacag

SEQ ID NO: 11230 - RNA, 19 nt, artificial
  Chemically synthesized
cguccauguaccugcaaaa

SEQ ID NO: 11231 - RNA, 19 nt, artificial
  Chemically synthesized
gugguucugucagaugaaa

SEQ ID NO: 11232 - RNA, 19 nt, artificial
  Chemically synthesized
gccaacuacgagaagaccu

SEQ ID NO: 11233 - RNA, 19 nt, artificial
  Chemically synthesized
acauacuugaugcccaaag

SEQ ID NO: 11234 - RNA, 19 nt, artificial
  Chemically synthesized
ccagagacauacuugaugc

SEQ ID NO: 11235 - RNA, 19 nt, artificial
  Chemically synthesized
ggacaaccagacaaaaaag

SEQ ID NO: 11236 - RNA, 19 nt, artificial
  Chemically synthesized
gcgaucaauccagagaaca

SEQ ID NO: 11237 - RNA, 19 nt, artificial
  Chemically synthesized
ugccuguacauacguguuc

SEQ ID NO: 11238 - RNA, 19 nt, artificial
  Chemically synthesized
gccauugccaacuacgaga

SEQ ID NO: 11239 - RNA, 19 nt, artificial
  Chemically synthesized
agccagagacauacuugau

SEQ ID NO: 11240 - RNA, 19 nt, artificial
  Chemically synthesized
aaaagccagagacauacuu

SEQ ID NO: 11241 - RNA, 19 nt, artificial
  Chemically synthesized
ggugguucugucagaugaa

SEQ ID NO: 11242 - RNA, 19 nt, artificial
  Chemically synthesized
uguacauguuccuggugaa

SEQ ID NO: 11243 - RNA, 19 nt, artificial
  Chemically synthesized
gugccuguacauacguguu

SEQ ID NO: 11244 - RNA, 19 nt, artificial
  Chemically synthesized
gcuacuucccguccaugua

SEQ ID NO: 11245 - RNA, 19 nt, artificial
  Chemically synthesized
guguacauguuccugguga

SEQ ID NO: 11246 - RNA, 19 nt, artificial
  Chemically synthesized
cgugccuguacauacgugu

SEQ ID NO: 11247 - RNA, 19 nt, artificial
  Chemically synthesized
uggugggucaucaggaaag

SEQ ID NO: 11248 - RNA, 19 nt, artificial
  Chemically synthesized
acaccuucauccgucacau

SEQ ID NO: 11249 - RNA, 19 nt, artificial
  Chemically synthesized
uggugguucugucagauga

SEQ ID NO: 11250 - RNA, 19 nt, artificial
  Chemically synthesized
ugguggaggucguagagaa

SEQ ID NO: 11251 - RNA, 19 nt, artificial
  Chemically synthesized
gucguagagaagagcgaga

SEQ ID NO: 11252 - RNA, 19 nt, artificial
  Chemically synthesized
agaguaccgcgacagacau

SEQ ID NO: 11253 - RNA, 19 nt, artificial
  Chemically synthesized
acgaguuccauaaaaccuu

SEQ ID NO: 11254 - RNA, 19 nt, artificial
  Chemically synthesized
gguuggugguucugucaga

SEQ ID NO: 11255 - RNA, 19 nt, artificial
  Chemically synthesized
gcaacagcguccguuuucu

SEQ ID NO: 11256 - RNA, 19 nt, artificial
  Chemically synthesized
guuggugguucugucagau

SEQ ID NO: 11257 - RNA, 19 nt, artificial
  Chemically synthesized
uggaggucguagagaagag

SEQ ID NO: 11258 - RNA, 19 nt, artificial
  Chemically synthesized
ccagacaaaaaagccagag

SEQ ID NO: 11259 - RNA, 19 nt, artificial
  Chemically synthesized
ccacggacaaccagacaaa

SEQ ID NO: 11260 - RNA, 19 nt, artificial
  Chemically synthesized
aucuacgaguuccauaaaa

SEQ ID NO: 11261 - RNA, 19 nt, artificial
  Chemically synthesized
ugucggagaagguggucua

SEQ ID NO: 11262 - RNA, 19 nt, artificial
  Chemically synthesized
cuuccucuuuccagugcau

SEQ ID NO: 11263 - RNA, 19 nt, artificial
  Chemically synthesized
aggucauucacaagcuccu

SEQ ID NO: 11264 - RNA, 19 nt, artificial
  Chemically synthesized
cagacaaaaaagccagaga

SEQ ID NO: 11265 - RNA, 19 nt, artificial
  Chemically synthesized
cagcucccaagugguuuga

SEQ ID NO: 11266 - RNA, 19 nt, artificial
  Chemically synthesized
gccagcacuauguguacau

SEQ ID NO: 11267 - RNA, 19 nt, artificial
  Chemically synthesized
cggacaaccagacaaaaaa

SEQ ID NO: 11268 - RNA, 19 nt, artificial
  Chemically synthesized
gaguuccauaaaaccuuaa

SEQ ID NO: 11269 - RNA, 19 nt, artificial
  Chemically synthesized
agacaaaaaagccagagac

SEQ ID NO: 11270 - RNA, 19 nt, artificial
  Chemically synthesized
accagacaaaaaagccaga

SEQ ID NO: 11271 - RNA, 19 nt, artificial
  Chemically synthesized
acggacaaccagacaaaaa

SEQ ID NO: 11272 - RNA, 19 nt, artificial
  Chemically synthesized
ucaggaaagacgacgucac

SEQ ID NO: 11273 - RNA, 19 nt, artificial
  Chemically synthesized
ccaacuacgagaagaccuc

SEQ ID NO: 11274 - RNA, 19 nt, artificial
  Chemically synthesized
agacauacuugaugcccaa

SEQ ID NO: 11275 - RNA, 19 nt, artificial
  Chemically synthesized
ggcacacuuaccgaguacu

SEQ ID NO: 11276 - RNA, 19 nt, artificial
  Chemically synthesized
ccucuuuccagugcauuua

SEQ ID NO: 11277 - RNA, 19 nt, artificial
  Chemically synthesized
uucugucagaugaaagcaa

SEQ ID NO: 11278 - RNA, 19 nt, artificial
  Chemically synthesized
cacggacaaccagacaaaa

SEQ ID NO: 11279 - RNA, 19 nt, artificial
  Chemically synthesized
cgacuuccucuuuccagug

SEQ ID NO: 11280 - RNA, 19 nt, artificial
  Chemically synthesized
ucaauccagagaacaggau

SEQ ID NO: 11281 - RNA, 19 nt, artificial
  Chemically synthesized
accuccucgacuucuucaa

SEQ ID NO: 11282 - RNA, 19 nt, artificial
  Chemically synthesized
cucuuuccagugcauuuaa

SEQ ID NO: 11283 - RNA, 19 nt, artificial
  Chemically synthesized
ucugucagaugaaagcaaa

SEQ ID NO: 11284 - RNA, 19 nt, artificial
  Chemically synthesized
cccaaagauggcaagagua

SEQ ID NO: 11285 - RNA, 19 nt, artificial
  Chemically synthesized
ugaaauggcaggaccuguc

SEQ ID NO: 11286 - RNA, 19 nt, artificial
  Chemically synthesized
agcacuauguguacauguu

SEQ ID NO: 11287 - RNA, 19 nt, artificial
  Chemically synthesized
ccagcacuauguguacaug

SEQ ID NO: 11288 - RNA, 19 nt, artificial
  Chemically synthesized
ugggcuuugagaagcgcuu

SEQ ID NO: 11289 - RNA, 19 nt, artificial
  Chemically synthesized
ugaugcccaaagauggcaa

SEQ ID NO: 11290 - RNA, 19 nt, artificial
  Chemically synthesized
caaccagacaaaaaagcca

SEQ ID NO: 11291 - RNA, 19 nt, artificial
  Chemically synthesized
ccagagaacaggaucaucc

SEQ ID NO: 11292 - RNA, 19 nt, artificial
  Chemically synthesized
gcaaaagucagggcaagac

SEQ ID NO: 11293 - RNA, 19 nt, artificial
  Chemically synthesized
gcuuugagaagcgcuucgu

SEQ ID NO: 11294 - RNA, 19 nt, artificial
  Chemically synthesized
agcccaacuaugcagguga

SEQ ID NO: 11295 - RNA, 19 nt, artificial
  Chemically synthesized
gagacauacuugaugccca

SEQ ID NO: 11296 - RNA, 19 nt, artificial
  Chemically synthesized
uccucgacuucuucaaggu

SEQ ID NO: 11297 - RNA, 19 nt, artificial
  Chemically synthesized
uccucuuuccagugcauuu

SEQ ID NO: 11298 - RNA, 19 nt, artificial
  Chemically synthesized
gcacuauguguacauguuc

SEQ ID NO: 11299 - RNA, 19 nt, artificial
  Chemically synthesized
ucaucaggaaagacgacgu

SEQ ID NO: 11300 - RNA, 19 nt, artificial
  Chemically synthesized
caacuaugcaggugagcca

SEQ ID NO: 11301 - RNA, 19 nt, artificial
  Chemically synthesized
gacauacuugaugcccaaa

SEQ ID NO: 11302 - RNA, 19 nt, artificial
  Chemically synthesized
auccagagaacaggaucau

SEQ ID NO: 11303 - RNA, 19 nt, artificial
  Chemically synthesized
ugcccaaagauggcaagag

SEQ ID NO: 11304 - RNA, 19 nt, artificial
  Chemically synthesized
ccagugcauuuaaggcgca

SEQ ID NO: 11305 - RNA, 19 nt, artificial
  Chemically synthesized
ccugcaaaagucagggcaa

SEQ ID NO: 11306 - RNA, 19 nt, artificial
  Chemically synthesized
gggucaucaggaaagacga

SEQ ID NO: 11307 - RNA, 19 nt, artificial
  Chemically synthesized
cugcaaaagucagggcaag

SEQ ID NO: 11308 - RNA, 19 nt, artificial
  Chemically synthesized
agacccugagcccaacuau

SEQ ID NO: 11309 - RNA, 19 nt, artificial
  Chemically synthesized
agccagcacuauguguaca

SEQ ID NO: 11310 - RNA, 19 nt, artificial
  Chemically synthesized
cuaugcaggugagccauac

SEQ ID NO: 11311 - RNA, 19 nt, artificial
  Chemically synthesized
ucauucacaagcuccugga

SEQ ID NO: 11312 - RNA, 19 nt, artificial
  Chemically synthesized
ugaggucauucacaagcuc

SEQ ID NO: 11313 - RNA, 19 nt, artificial
  Chemically synthesized
gacaccuucauccgucaca

SEQ ID NO: 11314 - RNA, 19 nt, artificial
  Chemically synthesized
uagaacacguauguacagg

SEQ ID NO: 11315 - RNA, 19 nt, artificial
  Chemically synthesized
uucucuggauugaucgccc

SEQ ID NO: 11316 - RNA, 19 nt, artificial
  Chemically synthesized
cuauagaacacguauguac

SEQ ID NO: 11317 - RNA, 19 nt, artificial
  Chemically synthesized
uucucguaguuggcaaugg

SEQ ID NO: 11318 - RNA, 19 nt, artificial
  Chemically synthesized
cucuauagaacacguaugu

SEQ ID NO: 11319 - RNA, 19 nt, artificial
  Chemically synthesized
uaugucucuggcuuuuuug

SEQ ID NO: 11320 - RNA, 19 nt, artificial
  Chemically synthesized
augucucuggcuuuuuugu

SEQ ID NO: 11321 - RNA, 19 nt, artificial
  Chemically synthesized
agaacacguauguacaggc

SEQ ID NO: 11322 - RNA, 19 nt, artificial
  Chemically synthesized
uuugcagguacauggacgg

SEQ ID NO: 11323 - RNA, 19 nt, artificial
  Chemically synthesized
auagaacacguauguacag

SEQ ID NO: 11324 - RNA, 19 nt, artificial
  Chemically synthesized
ucgcuuugcuuucaucuga

SEQ ID NO: 11325 - RNA, 19 nt, artificial
  Chemically synthesized
cuguucucuggauugaucg

SEQ ID NO: 11326 - RNA, 19 nt, artificial
  Chemically synthesized
uuuugcagguacauggacg

SEQ ID NO: 11327 - RNA, 19 nt, artificial
  Chemically synthesized
uuucaucugacagaaccac

SEQ ID NO: 11328 - RNA, 19 nt, artificial
  Chemically synthesized
aggucuucucguaguuggc

SEQ ID NO: 11329 - RNA, 19 nt, artificial
  Chemically synthesized
cuuugggcaucaaguaugu

SEQ ID NO: 11330 - RNA, 19 nt, artificial
  Chemically synthesized
gcaucaaguaugucucugg

SEQ ID NO: 11331 - RNA, 19 nt, artificial
  Chemically synthesized
cuuuuuugucugguugucc

SEQ ID NO: 11332 - RNA, 19 nt, artificial
  Chemically synthesized
uguucucuggauugaucgc

SEQ ID NO: 11333 - RNA, 19 nt, artificial
  Chemically synthesized
gaacacguauguacaggca

SEQ ID NO: 11334 - RNA, 19 nt, artificial
  Chemically synthesized
ucucguaguuggcaauggc

SEQ ID NO: 11335 - RNA, 19 nt, artificial
  Chemically synthesized
aucaaguaugucucuggcu

SEQ ID NO: 11336 - RNA, 19 nt, artificial
  Chemically synthesized
aaguaugucucuggcuuuu

SEQ ID NO: 11337 - RNA, 19 nt, artificial
  Chemically synthesized
uucaucugacagaaccacc

SEQ ID NO: 11338 - RNA, 19 nt, artificial
  Chemically synthesized
uucaccaggaacauguaca

SEQ ID NO: 11339 - RNA, 19 nt, artificial
  Chemically synthesized
aacacguauguacaggcac

SEQ ID NO: 11340 - RNA, 19 nt, artificial
  Chemically synthesized
uacauggacgggaaguagc

SEQ ID NO: 11341 - RNA, 19 nt, artificial
  Chemically synthesized
ucaccaggaacauguacac

SEQ ID NO: 11342 - RNA, 19 nt, artificial
  Chemically synthesized
acacguauguacaggcacg

SEQ ID NO: 11343 - RNA, 19 nt, artificial
  Chemically synthesized
cuuuccugaugacccacca

SEQ ID NO: 11344 - RNA, 19 nt, artificial
  Chemically synthesized
augugacggaugaaggugu

SEQ ID NO: 11345 - RNA, 19 nt, artificial
  Chemically synthesized
ucaucugacagaaccacca

SEQ ID NO: 11346 - RNA, 19 nt, artificial
  Chemically synthesized
uucucuacgaccuccacca

SEQ ID NO: 11347 - RNA, 19 nt, artificial
  Chemically synthesized
ucucgcucuucucuacgac

SEQ ID NO: 11348 - RNA, 19 nt, artificial
  Chemically synthesized
augucugucgcgguacucu

SEQ ID NO: 11349 - RNA, 19 nt, artificial
  Chemically synthesized
aagguuuuauggaacucgu

SEQ ID NO: 11350 - RNA, 19 nt, artificial
  Chemically synthesized
ucugacagaaccaccaacc

SEQ ID NO: 11351 - RNA, 19 nt, artificial
  Chemically synthesized
agaaaacggacgcuguugc

SEQ ID NO: 11352 - RNA, 19 nt, artificial
  Chemically synthesized
aucugacagaaccaccaac

SEQ ID NO: 11353 - RNA, 19 nt, artificial
  Chemically synthesized
cucuucucuacgaccucca

SEQ ID NO: 11354 - RNA, 19 nt, artificial
  Chemically synthesized
cucuggcuuuuuugucugg

SEQ ID NO: 11355 - RNA, 19 nt, artificial
  Chemically synthesized
uuugucugguuguccgugg

SEQ ID NO: 11356 - RNA, 19 nt, artificial
  Chemically synthesized
uuuuauggaacucguagau

SEQ ID NO: 11357 - RNA, 19 nt, artificial
  Chemically synthesized
uagaccaccuucuccgaca

SEQ ID NO: 11358 - RNA, 19 nt, artificial
  Chemically synthesized
augcacuggaaagaggaag

SEQ ID NO: 11359 - RNA, 19 nt, artificial
  Chemically synthesized
aggagcuugugaaugaccu

SEQ ID NO: 11360 - RNA, 19 nt, artificial
  Chemically synthesized
ucucuggcuuuuuugucug

SEQ ID NO: 11361 - RNA, 19 nt, artificial
  Chemically synthesized
ucaaaccacuugggagcug

SEQ ID NO: 11362 - RNA, 19 nt, artificial
  Chemically synthesized
auguacacauagugcuggc

SEQ ID NO: 11363 - RNA, 19 nt, artificial
  Chemically synthesized
uuuuuugucugguuguccg

SEQ ID NO: 11364 - RNA, 19 nt, artificial
  Chemically synthesized
uuaagguuuuauggaacuc

SEQ ID NO: 11365 - RNA, 19 nt, artificial
  Chemically synthesized
gucucuggcuuuuuugucu

SEQ ID NO: 11366 - RNA, 19 nt, artificial
  Chemically synthesized
ucuggcuuuuuugucuggu

SEQ ID NO: 11367 - RNA, 19 nt, artificial
  Chemically synthesized
uuuuugucugguuguccgu

SEQ ID NO: 11368 - RNA, 19 nt, artificial
  Chemically synthesized
gugacgucgucuuuccuga

SEQ ID NO: 11369 - RNA, 19 nt, artificial
  Chemically synthesized
gaggucuucucguaguugg

SEQ ID NO: 11370 - RNA, 19 nt, artificial
  Chemically synthesized
uugggcaucaaguaugucu

SEQ ID NO: 11371 - RNA, 19 nt, artificial
  Chemically synthesized
aguacucgguaagugugcc

SEQ ID NO: 11372 - RNA, 19 nt, artificial
  Chemically synthesized
uaaaugcacuggaaagagg

SEQ ID NO: 11373 - RNA, 19 nt, artificial
  Chemically synthesized
uugcuuucaucugacagaa

SEQ ID NO: 11374 - RNA, 19 nt, artificial
  Chemically synthesized
uuuugucugguuguccgug

SEQ ID NO: 11375 - RNA, 19 nt, artificial
  Chemically synthesized
cacuggaaagaggaagucg

SEQ ID NO: 11376 - RNA, 19 nt, artificial
  Chemically synthesized
auccuguucucuggauuga

SEQ ID NO: 11377 - RNA, 19 nt, artificial
  Chemically synthesized
uugaagaagucgaggaggu

SEQ ID NO: 11378 - RNA, 19 nt, artificial
  Chemically synthesized
uuaaaugcacuggaaagag

SEQ ID NO: 11379 - RNA, 19 nt, artificial
  Chemically synthesized
uuugcuuucaucugacaga

SEQ ID NO: 11380 - RNA, 19 nt, artificial
  Chemically synthesized
uacucuugccaucuuuggg

SEQ ID NO: 11381 - RNA, 19 nt, artificial
  Chemically synthesized
gacagguccugccauuuca

SEQ ID NO: 11382 - RNA, 19 nt, artificial
  Chemically synthesized
aacauguacacauagugcu

SEQ ID NO: 11383 - RNA, 19 nt, artificial
  Chemically synthesized
cauguacacauagugcugg

SEQ ID NO: 11384 - RNA, 19 nt, artificial
  Chemically synthesized
aagcgcuucucaaagccca

SEQ ID NO: 11385 - RNA, 19 nt, artificial
  Chemically synthesized
uugccaucuuugggcauca

SEQ ID NO: 11386 - RNA, 19 nt, artificial
  Chemically synthesized
uggcuuuuuugucugguug

SEQ ID NO: 11387 - RNA, 19 nt, artificial
  Chemically synthesized
ggaugauccuguucucugg

SEQ ID NO: 11388 - RNA, 19 nt, artificial
  Chemically synthesized
gucuugcccugacuuuugc

SEQ ID NO: 11389 - RNA, 19 nt, artificial
  Chemically synthesized
acgaagcgcuucucaaagc

SEQ ID NO: 11390 - RNA, 19 nt, artificial
  Chemically synthesized
ucaccugcauaguugggcu

SEQ ID NO: 11391 - RNA, 19 nt, artificial
  Chemically synthesized
ugggcaucaaguaugucuc

SEQ ID NO: 11392 - RNA, 19 nt, artificial
  Chemically synthesized
accuugaagaagucgagga

SEQ ID NO: 11393 - RNA, 19 nt, artificial
  Chemically synthesized
aaaugcacuggaaagagga

SEQ ID NO: 11394 - RNA, 19 nt, artificial
  Chemically synthesized
gaacauguacacauagugc

SEQ ID NO: 11395 - RNA, 19 nt, artificial
  Chemically synthesized
acgucgucuuuccugauga

SEQ ID NO: 11396 - RNA, 19 nt, artificial
  Chemically synthesized
uggcucaccugcauaguug

SEQ ID NO: 11397 - RNA, 19 nt, artificial
  Chemically synthesized
uuugggcaucaaguauguc

SEQ ID NO: 11398 - RNA, 19 nt, artificial
  Chemically synthesized
augauccuguucucuggau

SEQ ID NO: 11399 - RNA, 19 nt, artificial
  Chemically synthesized
cucuugccaucuuugggca

SEQ ID NO: 11400 - RNA, 19 nt, artificial
  Chemically synthesized
ugcgccuuaaaugcacugg

SEQ ID NO: 11401 - RNA, 19 nt, artificial
  Chemically synthesized
uugcccugacuuuugcagg

SEQ ID NO: 11402 - RNA, 19 nt, artificial
  Chemically synthesized
ucgucuuuccugaugaccc

SEQ ID NO: 11403 - RNA, 19 nt, artificial
  Chemically synthesized
cuugcccugacuuuugcag

SEQ ID NO: 11404 - RNA, 19 nt, artificial
  Chemically synthesized
auaguugggcucagggucu

SEQ ID NO: 11405 - RNA, 19 nt, artificial
  Chemically synthesized
uguacacauagugcuggcu

SEQ ID NO: 11406 - RNA, 19 nt, artificial
  Chemically synthesized
guauggcucaccugcauag

SEQ ID NO: 11407 - RNA, 19 nt, artificial
  Chemically synthesized
uccaggagcuugugaauga

SEQ ID NO: 11408 - RNA, 19 nt, artificial
  Chemically synthesized
gagcuugugaaugaccuca

SEQ ID NO: 11409 - RNA, 19 nt, artificial
  Chemically synthesized
ugugacggaugaagguguc

SEQ ID NO: 11410 - RNA, 19 nt, artificial
  Chemically synthesized
gaucuacgaguuccauaaa

SEQ ID NO: 11411 - RNA, 19 nt, artificial
  Chemically synthesized
ccgagaucuacgaguucca

SEQ ID NO: 11412 - RNA, 19 nt, artificial
  Chemically synthesized
ccaucauccugcagacgua

SEQ ID NO: 11413 - RNA, 19 nt, artificial
  Chemically synthesized
agaucuacgaguuccauaa

SEQ ID NO: 11414 - RNA, 19 nt, artificial
  Chemically synthesized
caggaaagacgacgucaca

SEQ ID NO: 11415 - RNA, 19 nt, artificial
  Chemically synthesized
cauaaaaccuuaaaagaaa

SEQ ID NO: 11416 - RNA, 19 nt, artificial
  Chemically synthesized
cgaguuccauaaaaccuua

SEQ ID NO: 11417 - RNA, 19 nt, artificial
  Chemically synthesized
ccauaaaaccuuaaaagaa

SEQ ID NO: 11418 - RNA, 19 nt, artificial
  Chemically synthesized
cgagaucuacgaguuccau

SEQ ID NO: 11419 - RNA, 19 nt, artificial
  Chemically synthesized
ggugggucaucaggaaaga

SEQ ID NO: 11420 - RNA, 19 nt, artificial
  Chemically synthesized
cauacuugaugcccaaaga

SEQ ID NO: 11421 - RNA, 19 nt, artificial
  Chemically synthesized
guuccauaaaaccuuaaaa

SEQ ID NO: 11422 - RNA, 19 nt, artificial
  Chemically synthesized
gcuucaccgagaucuacga

SEQ ID NO: 11423 - RNA, 19 nt, artificial
  Chemically synthesized
gagaucuacgaguuccaua

SEQ ID NO: 11424 - RNA, 19 nt, artificial
  Chemically synthesized
cuguugaggucauucacaa

SEQ ID NO: 11425 - RNA, 19 nt, artificial
  Chemically synthesized
aagaaauguucccuauuga

SEQ ID NO: 11426 - RNA, 19 nt, artificial
  Chemically synthesized
cuuugagaagcgcuucgua

SEQ ID NO: 11427 - RNA, 19 nt, artificial
  Chemically synthesized
agggcacacuuaccgagua

SEQ ID NO: 11428 - RNA, 19 nt, artificial
  Chemically synthesized
uguacauacguguucuaua

SEQ ID NO: 11429 - RNA, 19 nt, artificial
  Chemically synthesized
cuggugggucaucaggaaa

SEQ ID NO: 11430 - RNA, 19 nt, artificial
  Chemically synthesized
cauguaccugcaaaaguca

SEQ ID NO: 11431 - RNA, 19 nt, artificial
  Chemically synthesized
aguuccauaaaaccuuaaa

SEQ ID NO: 11432 - RNA, 19 nt, artificial
  Chemically synthesized
ccauguaccugcaaaaguc

SEQ ID NO: 11433 - RNA, 19 nt, artificial
  Chemically synthesized
ggcgaucaauccagagaac

SEQ ID NO: 11434 - RNA, 19 nt, artificial
  Chemically synthesized
cugucagaugaaagcaaag

SEQ ID NO: 11435 - RNA, 19 nt, artificial
  Chemically synthesized
guacauguuccuggugaaa

SEQ ID NO: 11436 - RNA, 19 nt, artificial
  Chemically synthesized
aaagcaaagcgaggcugga

SEQ ID NO: 11437 - RNA, 19 nt, artificial
  Chemically synthesized
aagaguaccgcgacagaca

SEQ ID NO: 11438 - RNA, 19 nt, artificial
  Chemically synthesized
aggucguagagaagagcga

SEQ ID NO: 11439 - RNA, 19 nt, artificial
  Chemically synthesized
aagacgacgucacaggcua

SEQ ID NO: 11440 - RNA, 19 nt, artificial
  Chemically synthesized
ggucaucaggaaagacgac

SEQ ID NO: 11441 - RNA, 19 nt, artificial
  Chemically synthesized
uccauaaaaccuuaaaaga

SEQ ID NO: 11442 - RNA, 19 nt, artificial
  Chemically synthesized
gcuguugaggucauucaca

SEQ ID NO: 11443 - RNA, 19 nt, artificial
  Chemically synthesized
acauguuccuggugaaaug

SEQ ID NO: 11444 - RNA, 19 nt, artificial
  Chemically synthesized
guggaggucguagagaaga

SEQ ID NO: 11445 - RNA, 19 nt, artificial
  Chemically synthesized
ugcaaaagucagggcaaga

SEQ ID NO: 11446 - RNA, 19 nt, artificial
  Chemically synthesized
ucaccgagaucuacgaguu

SEQ ID NO: 11447 - RNA, 19 nt, artificial
  Chemically synthesized
uaaaagaaauguucccuau

SEQ ID NO: 11448 - RNA, 19 nt, artificial
  Chemically synthesized
cagagaacaggaucauccc

SEQ ID NO: 11449 - RNA, 19 nt, artificial
  Chemically synthesized
agaaauguucccuauugag

SEQ ID NO: 11450 - RNA, 19 nt, artificial
  Chemically synthesized
aaaccuuaaaagaaauguu

SEQ ID NO: 11451 - RNA, 19 nt, artificial
  Chemically synthesized
agaugaaagcaaagcgagg

SEQ ID NO: 11452 - RNA, 19 nt, artificial
  Chemically synthesized
caccgagaucuacgaguuc

SEQ ID NO: 11453 - RNA, 19 nt, artificial
  Chemically synthesized
cagaugaaagcaaagcgag

SEQ ID NO: 11454 - RNA, 19 nt, artificial
  Chemically synthesized
caucaaggccuacacugcu

SEQ ID NO: 11455 - RNA, 19 nt, artificial
  Chemically synthesized
cuacgaguuccauaaaacc

SEQ ID NO: 11456 - RNA, 19 nt, artificial
  Chemically synthesized
gguucugucagaugaaagc

SEQ ID NO: 11457 - RNA, 19 nt, artificial
  Chemically synthesized
aagcaaagcgaggcuggau

SEQ ID NO: 11458 - RNA, 19 nt, artificial
  Chemically synthesized
aauccagagaacaggauca

SEQ ID NO: 11459 - RNA, 19 nt, artificial
  Chemically synthesized
aaaagaaauguucccuauu

SEQ ID NO: 11460 - RNA, 19 nt, artificial
  Chemically synthesized
caccuccucgacuucuuca

SEQ ID NO: 11461 - RNA, 19 nt, artificial
  Chemically synthesized
aagcuguugaggucauuca

SEQ ID NO: 11462 - RNA, 19 nt, artificial
  Chemically synthesized
auacuugaugcccaaagau

SEQ ID NO: 11463 - RNA, 19 nt, artificial
  Chemically synthesized
guucugucagaugaaagca

SEQ ID NO: 11464 - RNA, 19 nt, artificial
  Chemically synthesized
uuuaaggcgcagccuggaa

SEQ ID NO: 11465 - RNA, 19 nt, artificial
  Chemically synthesized
aauguucccuauugaggca

SEQ ID NO: 11466 - RNA, 19 nt, artificial
  Chemically synthesized
agcuguugaggucauucac

SEQ ID NO: 11467 - RNA, 19 nt, artificial
  Chemically synthesized
ccuccucgacuucuucaag

SEQ ID NO: 11468 - RNA, 19 nt, artificial
  Chemically synthesized
acagcguccguuuucugca

SEQ ID NO: 11469 - RNA, 19 nt, artificial
  Chemically synthesized
aucaauccagagaacagga

SEQ ID NO: 11470 - RNA, 19 nt, artificial
  Chemically synthesized
uacauacguguucuauaga

SEQ ID NO: 11471 - RNA, 19 nt, artificial
  Chemically synthesized
gugaagcuguugaggucau

SEQ ID NO: 11472 - RNA, 19 nt, artificial
  Chemically synthesized
ucuacgaguuccauaaaac

SEQ ID NO: 11473 - RNA, 19 nt, artificial
  Chemically synthesized
gcacacuuaccgaguacug

SEQ ID NO: 11474 - RNA, 19 nt, artificial
  Chemically synthesized
cguguucuauagagccugg

SEQ ID NO: 11475 - RNA, 19 nt, artificial
  Chemically synthesized
auuuaaggcgcagccugga

SEQ ID NO: 11476 - RNA, 19 nt, artificial
  Chemically synthesized
ugguucugucagaugaaag

SEQ ID NO: 11477 - RNA, 19 nt, artificial
  Chemically synthesized
ucgacuucuucaaggugcg

SEQ ID NO: 11478 - RNA, 19 nt, artificial
  Chemically synthesized
uuaaaagaaauguucccua

SEQ ID NO: 11479 - RNA, 19 nt, artificial
  Chemically synthesized
ggugaagcuguugagguca

SEQ ID NO: 11480 - RNA, 19 nt, artificial
  Chemically synthesized
aaaagucagggcaagacgu

SEQ ID NO: 11481 - RNA, 19 nt, artificial
  Chemically synthesized
ucgagggugaagcuguuga

SEQ ID NO: 11482 - RNA, 19 nt, artificial
  Chemically synthesized
ccucgacuucuucaaggug

SEQ ID NO: 11483 - RNA, 19 nt, artificial
  Chemically synthesized
ugaagcuguugaggucauu

SEQ ID NO: 11484 - RNA, 19 nt, artificial
  Chemically synthesized
acgacgucacaggcuacuu

SEQ ID NO: 11485 - RNA, 19 nt, artificial
  Chemically synthesized
aagacccugagcccaacua

SEQ ID NO: 11486 - RNA, 19 nt, artificial
  Chemically synthesized
uguugaggucauucacaag

SEQ ID NO: 11487 - RNA, 19 nt, artificial
  Chemically synthesized
aaagaaauguucccuauug

SEQ ID NO: 11488 - RNA, 19 nt, artificial
  Chemically synthesized
aagucagggcaagacgugu

SEQ ID NO: 11489 - RNA, 19 nt, artificial
  Chemically synthesized
gugggucaucaggaaagac

SEQ ID NO: 11490 - RNA, 19 nt, artificial
  Chemically synthesized
cacacuuaccgaguacugc

SEQ ID NO: 11491 - RNA, 19 nt, artificial
  Chemically synthesized
caaaagucagggcaagacg

SEQ ID NO: 11492 - RNA, 19 nt, artificial
  Chemically synthesized
aggaaagacgacgucacag

SEQ ID NO: 11493 - RNA, 19 nt, artificial
  Chemically synthesized
acuuccucuuuccagugca

SEQ ID NO: 11494 - RNA, 19 nt, artificial
  Chemically synthesized
agggugaagcuguugaggu

SEQ ID NO: 11495 - RNA, 19 nt, artificial
  Chemically synthesized
guccauguaccugcaaaag

SEQ ID NO: 11496 - RNA, 19 nt, artificial
  Chemically synthesized
gacaaccagacaaaaaagc

SEQ ID NO: 11497 - RNA, 19 nt, artificial
  Chemically synthesized
caacagcguccguuuucug

SEQ ID NO: 11498 - RNA, 19 nt, artificial
  Chemically synthesized
gaucaauccagagaacagg

SEQ ID NO: 11499 - RNA, 19 nt, artificial
  Chemically synthesized
uccauguaccugcaaaagu

SEQ ID NO: 11500 - RNA, 19 nt, artificial
  Chemically synthesized
acuugaugcccaaagaugg

SEQ ID NO: 11501 - RNA, 19 nt, artificial
  Chemically synthesized
cuacuucccguccauguac

SEQ ID NO: 11502 - RNA, 19 nt, artificial
  Chemically synthesized
gucagaugaaagcaaagcg

SEQ ID NO: 11503 - RNA, 19 nt, artificial
  Chemically synthesized
ugagcccaacuaugcaggu

SEQ ID NO: 11504 - RNA, 19 nt, artificial
  Chemically synthesized
caucaggaaagacgacguc

SEQ ID NO: 11505 - RNA, 19 nt, artificial
  Chemically synthesized
uacgaguuccauaaaaccu

SEQ ID NO: 11506 - RNA, 19 nt, artificial
  Chemically synthesized
ccuuaaaagaaauguuccc

SEQ ID NO: 11507 - RNA, 19 nt, artificial
  Chemically synthesized
aucaggaaagacgacguca

SEQ ID NO: 11508 - RNA, 19 nt, artificial
  Chemically synthesized
cagugcauuuaaggcgcag

SEQ ID NO: 11509 - RNA, 19 nt, artificial
  Chemically synthesized
uuccauaaaaccuuaaaag

SEQ ID NO: 11510 - RNA, 19 nt, artificial
  Chemically synthesized
ucuuuccagugcauuuaag

SEQ ID NO: 11511 - RNA, 19 nt, artificial
  Chemically synthesized
cuucaccgagaucuacgag

SEQ ID NO: 11512 - RNA, 19 nt, artificial
  Chemically synthesized
caucauccugcagacguac

SEQ ID NO: 11513 - RNA, 19 nt, artificial
  Chemically synthesized
acaaccagacaaaaaagcc

SEQ ID NO: 11514 - RNA, 19 nt, artificial
  Chemically synthesized
accugcaaaagucagggca

SEQ ID NO: 11515 - RNA, 19 nt, artificial
  Chemically synthesized
caccuucauccgucacauc

SEQ ID NO: 11516 - RNA, 19 nt, artificial
  Chemically synthesized
cauacguguucuauagagc

SEQ ID NO: 11517 - RNA, 19 nt, artificial
  Chemically synthesized
aaagacgacgucacaggcu

SEQ ID NO: 11518 - RNA, 19 nt, artificial
  Chemically synthesized
acuucccguccauguaccu

SEQ ID NO: 11519 - RNA, 19 nt, artificial
  Chemically synthesized
augaaagcaaagcgaggcu

SEQ ID NO: 11520 - RNA, 19 nt, artificial
  Chemically synthesized
cauucacaagcuccuggac

SEQ ID NO: 11521 - RNA, 19 nt, artificial
  Chemically synthesized
gaaauguucccuauugagg

SEQ ID NO: 11522 - RNA, 19 nt, artificial
  Chemically synthesized
acacuuaccgaguacugcg

SEQ ID NO: 11523 - RNA, 19 nt, artificial
  Chemically synthesized
cagagacauacuugaugcc

SEQ ID NO: 11524 - RNA, 19 nt, artificial
  Chemically synthesized
caauccagagaacaggauc

SEQ ID NO: 11525 - RNA, 19 nt, artificial
  Chemically synthesized
aguaccgcgacagacauca

SEQ ID NO: 11526 - RNA, 19 nt, artificial
  Chemically synthesized
cauguuccuggugaaaugg

SEQ ID NO: 11527 - RNA, 19 nt, artificial
  Chemically synthesized
uacguguucuauagagccu

SEQ ID NO: 11528 - RNA, 19 nt, artificial
  Chemically synthesized
uugaggucauucacaagcu

SEQ ID NO: 11529 - RNA, 19 nt, artificial
  Chemically synthesized
cuccucgacuucuucaagg

SEQ ID NO: 11530 - RNA, 19 nt, artificial
  Chemically synthesized
aaauguucccuauugaggc

SEQ ID NO: 11531 - RNA, 19 nt, artificial
  Chemically synthesized
cuuuccagugcauuuaagg

SEQ ID NO: 11532 - RNA, 19 nt, artificial
  Chemically synthesized
uacauguuccuggugaaau

SEQ ID NO: 11533 - RNA, 19 nt, artificial
  Chemically synthesized
cucgacuucuucaaggugc

SEQ ID NO: 11534 - RNA, 19 nt, artificial
  Chemically synthesized
uuugagaagcgcuucguac

SEQ ID NO: 11535 - RNA, 19 nt, artificial
  Chemically synthesized
aaccuuaaaagaaauguuc

SEQ ID NO: 11536 - RNA, 19 nt, artificial
  Chemically synthesized
aaagucagggcaagacgug

SEQ ID NO: 11537 - RNA, 19 nt, artificial
  Chemically synthesized
gaugaaagcaaagcgaggc

SEQ ID NO: 11538 - RNA, 19 nt, artificial
  Chemically synthesized
gaagcuguugaggucauuc

SEQ ID NO: 11539 - RNA, 19 nt, artificial
  Chemically synthesized
caacuacgagaagaccucg

SEQ ID NO: 11540 - RNA, 19 nt, artificial
  Chemically synthesized
ugcauuuaaggcgcagccu

SEQ ID NO: 11541 - RNA, 19 nt, artificial
  Chemically synthesized
auguaccugcaaaagucag

SEQ ID NO: 11542 - RNA, 19 nt, artificial
  Chemically synthesized
accgagaucuacgaguucc

SEQ ID NO: 11543 - RNA, 19 nt, artificial
  Chemically synthesized
ggucauucacaagcuccug

SEQ ID NO: 11544 - RNA, 19 nt, artificial
  Chemically synthesized
cuuaaaagaaauguucccu

SEQ ID NO: 11545 - RNA, 19 nt, artificial
  Chemically synthesized
uucaccgagaucuacgagu

SEQ ID NO: 11546 - RNA, 19 nt, artificial
  Chemically synthesized
accuuaaaagaaauguucc

SEQ ID NO: 11547 - RNA, 19 nt, artificial
  Chemically synthesized
uccagagaacaggaucauc

SEQ ID NO: 11548 - RNA, 19 nt, artificial
  Chemically synthesized
uacuugaugcccaaagaug

SEQ ID NO: 11549 - RNA, 19 nt, artificial
  Chemically synthesized
ucguagagaagagcgagag

SEQ ID NO: 11550 - RNA, 19 nt, artificial
  Chemically synthesized
ugggucaucaggaaagacg

SEQ ID NO: 11551 - RNA, 19 nt, artificial
  Chemically synthesized
aaaaccuuaaaagaaaugu

SEQ ID NO: 11552 - RNA, 19 nt, artificial
  Chemically synthesized
ucaaggccuacacugcugu

SEQ ID NO: 11553 - RNA, 19 nt, artificial
  Chemically synthesized
guaccugcaaaagucaggg

SEQ ID NO: 11554 - RNA, 19 nt, artificial
  Chemically synthesized
uugagaagcgcuucguacc

SEQ ID NO: 11555 - RNA, 19 nt, artificial
  Chemically synthesized
acguguucuauagagccug

SEQ ID NO: 11556 - RNA, 19 nt, artificial
  Chemically synthesized
agcucccaagugguuugac

SEQ ID NO: 11557 - RNA, 19 nt, artificial
  Chemically synthesized
uguaccugcaaaagucagg

SEQ ID NO: 11558 - RNA, 19 nt, artificial
  Chemically synthesized
auacguguucuauagagcc

SEQ ID NO: 11559 - RNA, 19 nt, artificial
  Chemically synthesized
ugucagaugaaagcaaagc

SEQ ID NO: 11560 - RNA, 19 nt, artificial
  Chemically synthesized
aucaaggccuacacugcug

SEQ ID NO: 11561 - RNA, 19 nt, artificial
  Chemically synthesized
uguucccuauugaggcagg

SEQ ID NO: 11562 - RNA, 19 nt, artificial
  Chemically synthesized
uacuucccguccauguacc

SEQ ID NO: 11563 - RNA, 19 nt, artificial
  Chemically synthesized
uaaaaccuuaaaagaaaug

SEQ ID NO: 11564 - RNA, 19 nt, artificial
  Chemically synthesized
gucaucaggaaagacgacg

SEQ ID NO: 11565 - RNA, 19 nt, artificial
  Chemically synthesized
ugaaagcaaagcgaggcug

SEQ ID NO: 11566 - RNA, 19 nt, artificial
  Chemically synthesized
agugcauuuaaggcgcagc

SEQ ID NO: 11567 - RNA, 19 nt, artificial
  Chemically synthesized
aacagcguccguuuucugc

SEQ ID NO: 11568 - RNA, 19 nt, artificial
  Chemically synthesized
uuggugguucugucagaug

SEQ ID NO: 11569 - RNA, 19 nt, artificial
  Chemically synthesized
aacuacgagaagaccucgg

SEQ ID NO: 11570 - RNA, 19 nt, artificial
  Chemically synthesized
accuucauccgucacaucg

SEQ ID NO: 11571 - RNA, 19 nt, artificial
  Chemically synthesized
guugaggucauucacaagc

SEQ ID NO: 11572 - RNA, 19 nt, artificial
  Chemically synthesized
uuccucuuuccagugcauu

SEQ ID NO: 11573 - RNA, 19 nt, artificial
  Chemically synthesized
uuuccagugcauuuaaggc

SEQ ID NO: 11574 - RNA, 19 nt, artificial
  Chemically synthesized
uccagugcauuuaaggcgc

SEQ ID NO: 11575 - RNA, 19 nt, artificial
  Chemically synthesized
gaggucauucacaagcucc

SEQ ID NO: 11576 - RNA, 19 nt, artificial
  Chemically synthesized
gacuuccucuuuccagugc

SEQ ID NO: 11577 - RNA, 19 nt, artificial
  Chemically synthesized
uaccugcaaaagucagggc

SEQ ID NO: 11578 - RNA, 19 nt, artificial
  Chemically synthesized
agagacauacuugaugccc

SEQ ID NO: 11579 - RNA, 19 nt, artificial
  Chemically synthesized
gucauucacaagcuccugg

SEQ ID NO: 11580 - RNA, 19 nt, artificial
  Chemically synthesized
aucauccugcagacguacc

SEQ ID NO: 11581 - RNA, 19 nt, artificial
  Chemically synthesized
uuccagugcauuuaaggcg

SEQ ID NO: 11582 - RNA, 19 nt, artificial
  Chemically synthesized
auucacaagcuccuggacg

SEQ ID NO: 11583 - RNA, 19 nt, artificial
  Chemically synthesized
auguucccuauugaggcag

SEQ ID NO: 11584 - RNA, 19 nt, artificial
  Chemically synthesized
uuuauggaacucguagauc

SEQ ID NO: 11585 - RNA, 19 nt, artificial
  Chemically synthesized
uggaacucguagaucucgg

SEQ ID NO: 11586 - RNA, 19 nt, artificial
  Chemically synthesized
uacgucugcaggaugaugg

SEQ ID NO: 11587 - RNA, 19 nt, artificial
  Chemically synthesized
uuauggaacucguagaucu

SEQ ID NO: 11588 - RNA, 19 nt, artificial
  Chemically synthesized
ugugacgucgucuuuccug

SEQ ID NO: 11589 - RNA, 19 nt, artificial
  Chemically synthesized
uuucuuuuaagguuuuaug

SEQ ID NO: 11590 - RNA, 19 nt, artificial
  Chemically synthesized
uaagguuuuauggaacucg

SEQ ID NO: 11591 - RNA, 19 nt, artificial
  Chemically synthesized
uucuuuuaagguuuuaugg

SEQ ID NO: 11592 - RNA, 19 nt, artificial
  Chemically synthesized
auggaacucguagaucucg

SEQ ID NO: 11593 - RNA, 19 nt, artificial
  Chemically synthesized
ucuuuccugaugacccacc

SEQ ID NO: 11594 - RNA, 19 nt, artificial
  Chemically synthesized
ucuuugggcaucaaguaug

SEQ ID NO: 11595 - RNA, 19 nt, artificial
  Chemically synthesized
uuuuaagguuuuauggaac

SEQ ID NO: 11596 - RNA, 19 nt, artificial
  Chemically synthesized
ucguagaucucggugaagc

SEQ ID NO: 11597 - RNA, 19 nt, artificial
  Chemically synthesized
uauggaacucguagaucuc

SEQ ID NO: 11598 - RNA, 19 nt, artificial
  Chemically synthesized
uugugaaugaccucaacag

SEQ ID NO: 11599 - RNA, 19 nt, artificial
  Chemically synthesized
ucaauagggaacauuucuu

SEQ ID NO: 11600 - RNA, 19 nt, artificial
  Chemically synthesized
uacgaagcgcuucucaaag

SEQ ID NO: 11601 - RNA, 19 nt, artificial
  Chemically synthesized
uacucgguaagugugcccu

SEQ ID NO: 11602 - RNA, 19 nt, artificial
  Chemically synthesized
uauagaacacguauguaca

SEQ ID NO: 11603 - RNA, 19 nt, artificial
  Chemically synthesized
uuuccugaugacccaccag

SEQ ID NO: 11604 - RNA, 19 nt, artificial
  Chemically synthesized
ugacuuuugcagguacaug

SEQ ID NO: 11605 - RNA, 19 nt, artificial
  Chemically synthesized
uuuaagguuuuauggaacu

SEQ ID NO: 11606 - RNA, 19 nt, artificial
  Chemically synthesized
gacuuuugcagguacaugg

SEQ ID NO: 11607 - RNA, 19 nt, artificial
  Chemically synthesized
guucucuggauugaucgcc

SEQ ID NO: 11608 - RNA, 19 nt, artificial
  Chemically synthesized
cuuugcuuucaucugacag

SEQ ID NO: 11609 - RNA, 19 nt, artificial
  Chemically synthesized
uuucaccaggaacauguac

SEQ ID NO: 11610 - RNA, 19 nt, artificial
  Chemically synthesized
uccagccucgcuuugcuuu

SEQ ID NO: 11611 - RNA, 19 nt, artificial
  Chemically synthesized
ugucugucgcgguacucuu

SEQ ID NO: 11612 - RNA, 19 nt, artificial
  Chemically synthesized
ucgcucuucucuacgaccu

SEQ ID NO: 11613 - RNA, 19 nt, artificial
  Chemically synthesized
uagccugugacgucgucuu

SEQ ID NO: 11614 - RNA, 19 nt, artificial
  Chemically synthesized
gucgucuuuccugaugacc

SEQ ID NO: 11615 - RNA, 19 nt, artificial
  Chemically synthesized
ucuuuuaagguuuuaugga

SEQ ID NO: 11616 - RNA, 19 nt, artificial
  Chemically synthesized
ugugaaugaccucaacagc

SEQ ID NO: 11617 - RNA, 19 nt, artificial
  Chemically synthesized
cauuucaccaggaacaugu

SEQ ID NO: 11618 - RNA, 19 nt, artificial
  Chemically synthesized
ucuucucuacgaccuccac

SEQ ID NO: 11619 - RNA, 19 nt, artificial
  Chemically synthesized
ucuugcccugacuuuugca

SEQ ID NO: 11620 - RNA, 19 nt, artificial
  Chemically synthesized
aacucguagaucucgguga

SEQ ID NO: 11621 - RNA, 19 nt, artificial
  Chemically synthesized
auagggaacauuucuuuua

SEQ ID NO: 11622 - RNA, 19 nt, artificial
  Chemically synthesized
gggaugauccuguucucug

SEQ ID NO: 11623 - RNA, 19 nt, artificial
  Chemically synthesized
cucaauagggaacauuucu

SEQ ID NO: 11624 - RNA, 19 nt, artificial
  Chemically synthesized
aacauuucuuuuaagguuu

SEQ ID NO: 11625 - RNA, 19 nt, artificial
  Chemically synthesized
ccucgcuuugcuuucaucu

SEQ ID NO: 11626 - RNA, 19 nt, artificial
  Chemically synthesized
gaacucguagaucucggug

SEQ ID NO: 11627 - RNA, 19 nt, artificial
  Chemically synthesized
cucgcuuugcuuucaucug

SEQ ID NO: 11628 - RNA, 19 nt, artificial
  Chemically synthesized
agcaguguaggccuugaug

SEQ ID NO: 11629 - RNA, 19 nt, artificial
  Chemically synthesized
gguuuuauggaacucguag

SEQ ID NO: 11630 - RNA, 19 nt, artificial
  Chemically synthesized
gcuuucaucugacagaacc

SEQ ID NO: 11631 - RNA, 19 nt, artificial
  Chemically synthesized
auccagccucgcuuugcuu

SEQ ID NO: 11632 - RNA, 19 nt, artificial
  Chemically synthesized
ugauccuguucucuggauu

SEQ ID NO: 11633 - RNA, 19 nt, artificial
  Chemically synthesized
aauagggaacauuucuuuu

SEQ ID NO: 11634 - RNA, 19 nt, artificial
  Chemically synthesized
ugaagaagucgaggaggug

SEQ ID NO: 11635 - RNA, 19 nt, artificial
  Chemically synthesized
ugaaugaccucaacagcuu

SEQ ID NO: 11636 - RNA, 19 nt, artificial
  Chemically synthesized
aucuuugggcaucaaguau

SEQ ID NO: 11637 - RNA, 19 nt, artificial
  Chemically synthesized
ugcuuucaucugacagaac

SEQ ID NO: 11638 - RNA, 19 nt, artificial
  Chemically synthesized
uuccaggcugcgccuuaaa

SEQ ID NO: 11639 - RNA, 19 nt, artificial
  Chemically synthesized
ugccucaauagggaacauu

SEQ ID NO: 11640 - RNA, 19 nt, artificial
  Chemically synthesized
gugaaugaccucaacagcu

SEQ ID NO: 11641 - RNA, 19 nt, artificial
  Chemically synthesized
cuugaagaagucgaggagg

SEQ ID NO: 11642 - RNA, 19 nt, artificial
  Chemically synthesized
ugcagaaaacggacgcugu

SEQ ID NO: 11643 - RNA, 19 nt, artificial
  Chemically synthesized
uccuguucucuggauugau

SEQ ID NO: 11644 - RNA, 19 nt, artificial
  Chemically synthesized
ucuauagaacacguaugua

SEQ ID NO: 11645 - RNA, 19 nt, artificial
  Chemically synthesized
augaccucaacagcuucac

SEQ ID NO: 11646 - RNA, 19 nt, artificial
  Chemically synthesized
guuuuauggaacucguaga

SEQ ID NO: 11647 - RNA, 19 nt, artificial
  Chemically synthesized
caguacucgguaagugugc

SEQ ID NO: 11648 - RNA, 19 nt, artificial
  Chemically synthesized
ccaggcucuauagaacacg

SEQ ID NO: 11649 - RNA, 19 nt, artificial
  Chemically synthesized
uccaggcugcgccuuaaau

SEQ ID NO: 11650 - RNA, 19 nt, artificial
  Chemically synthesized
cuuucaucugacagaacca

SEQ ID NO: 11651 - RNA, 19 nt, artificial
  Chemically synthesized
cgcaccuugaagaagucga

SEQ ID NO: 11652 - RNA, 19 nt, artificial
  Chemically synthesized
uagggaacauuucuuuuaa

SEQ ID NO: 11653 - RNA, 19 nt, artificial
  Chemically synthesized
ugaccucaacagcuucacc

SEQ ID NO: 11654 - RNA, 19 nt, artificial
  Chemically synthesized
acgucuugcccugacuuuu

SEQ ID NO: 11655 - RNA, 19 nt, artificial
  Chemically synthesized
ucaacagcuucacccucga

SEQ ID NO: 11656 - RNA, 19 nt, artificial
  Chemically synthesized
caccuugaagaagucgagg

SEQ ID NO: 11657 - RNA, 19 nt, artificial
  Chemically synthesized
aaugaccucaacagcuuca

SEQ ID NO: 11658 - RNA, 19 nt, artificial
  Chemically synthesized
aaguagccugugacgucgu

SEQ ID NO: 11659 - RNA, 19 nt, artificial
  Chemically synthesized
uaguugggcucagggucuu

SEQ ID NO: 11660 - RNA, 19 nt, artificial
  Chemically synthesized
cuugugaaugaccucaaca

SEQ ID NO: 11661 - RNA, 19 nt, artificial
  Chemically synthesized
caauagggaacauuucuuu

SEQ ID NO: 11662 - RNA, 19 nt, artificial
  Chemically synthesized
acacgucuugcccugacuu

SEQ ID NO: 11663 - RNA, 19 nt, artificial
  Chemically synthesized
gucuuuccugaugacccac

SEQ ID NO: 11664 - RNA, 19 nt, artificial
  Chemically synthesized
gcaguacucgguaagugug

SEQ ID NO: 11665 - RNA, 19 nt, artificial
  Chemically synthesized
cgucuugcccugacuuuug

SEQ ID NO: 11666 - RNA, 19 nt, artificial
  Chemically synthesized
cugugacgucgucuuuccu

SEQ ID NO: 11667 - RNA, 19 nt, artificial
  Chemically synthesized
ugcacuggaaagaggaagu

SEQ ID NO: 11668 - RNA, 19 nt, artificial
  Chemically synthesized
accucaacagcuucacccu

SEQ ID NO: 11669 - RNA, 19 nt, artificial
  Chemically synthesized
cuuuugcagguacauggac

SEQ ID NO: 11670 - RNA, 19 nt, artificial
  Chemically synthesized
gcuuuuuugucugguuguc

SEQ ID NO: 11671 - RNA, 19 nt, artificial
  Chemically synthesized
cagaaaacggacgcuguug

SEQ ID NO: 11672 - RNA, 19 nt, artificial
  Chemically synthesized
ccuguucucuggauugauc

SEQ ID NO: 11673 - RNA, 19 nt, artificial
  Chemically synthesized
acuuuugcagguacaugga

SEQ ID NO: 11674 - RNA, 19 nt, artificial
  Chemically synthesized
ccaucuuugggcaucaagu

SEQ ID NO: 11675 - RNA, 19 nt, artificial
  Chemically synthesized
guacauggacgggaaguag

SEQ ID NO: 11676 - RNA, 19 nt, artificial
  Chemically synthesized
cgcuuugcuuucaucugac

SEQ ID NO: 11677 - RNA, 19 nt, artificial
  Chemically synthesized
accugcauaguugggcuca

SEQ ID NO: 11678 - RNA, 19 nt, artificial
  Chemically synthesized
gacgucgucuuuccugaug

SEQ ID NO: 11679 - RNA, 19 nt, artificial
  Chemically synthesized
agguuuuauggaacucgua

SEQ ID NO: 11680 - RNA, 19 nt, artificial
  Chemically synthesized
gggaacauuucuuuuaagg

SEQ ID NO: 11681 - RNA, 19 nt, artificial
  Chemically synthesized
ugacgucgucuuuccugau

SEQ ID NO: 11682 - RNA, 19 nt, artificial
  Chemically synthesized
cugcgccuuaaaugcacug

SEQ ID NO: 11683 - RNA, 19 nt, artificial
  Chemically synthesized
cuuuuaagguuuuauggaa

SEQ ID NO: 11684 - RNA, 19 nt, artificial
  Chemically synthesized
cuuaaaugcacuggaaaga

SEQ ID NO: 11685 - RNA, 19 nt, artificial
  Chemically synthesized
cucguagaucucggugaag

SEQ ID NO: 11686 - RNA, 19 nt, artificial
  Chemically synthesized
guacgucugcaggaugaug

SEQ ID NO: 11687 - RNA, 19 nt, artificial
  Chemically synthesized
ggcuuuuuugucugguugu

SEQ ID NO: 11688 - RNA, 19 nt, artificial
  Chemically synthesized
ugcccugacuuuugcaggu

SEQ ID NO: 11689 - RNA, 19 nt, artificial
  Chemically synthesized
gaugugacggaugaaggug

SEQ ID NO: 11690 - RNA, 19 nt, artificial
  Chemically synthesized
gcucuauagaacacguaug

SEQ ID NO: 11691 - RNA, 19 nt, artificial
  Chemically synthesized
agccugugacgucgucuuu

SEQ ID NO: 11692 - RNA, 19 nt, artificial
  Chemically synthesized
agguacauggacgggaagu

SEQ ID NO: 11693 - RNA, 19 nt, artificial
  Chemically synthesized
agccucgcuuugcuuucau

SEQ ID NO: 11694 - RNA, 19 nt, artificial
  Chemically synthesized
guccaggagcuugugaaug

SEQ ID NO: 11695 - RNA, 19 nt, artificial
  Chemically synthesized
ccucaauagggaacauuuc

SEQ ID NO: 11696 - RNA, 19 nt, artificial
  Chemically synthesized
cgcaguacucgguaagugu

SEQ ID NO: 11697 - RNA, 19 nt, artificial
  Chemically synthesized
ggcaucaaguaugucucug

SEQ ID NO: 11698 - RNA, 19 nt, artificial
  Chemically synthesized
gauccuguucucuggauug

SEQ ID NO: 11699 - RNA, 19 nt, artificial
  Chemically synthesized
ugaugucugucgcgguacu

SEQ ID NO: 11700 - RNA, 19 nt, artificial
  Chemically synthesized
ccauuucaccaggaacaug

SEQ ID NO: 11701 - RNA, 19 nt, artificial
  Chemically synthesized
aggcucuauagaacacgua

SEQ ID NO: 11702 - RNA, 19 nt, artificial
  Chemically synthesized
agcuugugaaugaccucaa

SEQ ID NO: 11703 - RNA, 19 nt, artificial
  Chemically synthesized
ccuugaagaagucgaggag

SEQ ID NO: 11704 - RNA, 19 nt, artificial
  Chemically synthesized
gccucaauagggaacauuu

SEQ ID NO: 11705 - RNA, 19 nt, artificial
  Chemically synthesized
ccuuaaaugcacuggaaag

SEQ ID NO: 11706 - RNA, 19 nt, artificial
  Chemically synthesized
auuucaccaggaacaugua

SEQ ID NO: 11707 - RNA, 19 nt, artificial
  Chemically synthesized
gcaccuugaagaagucgag

SEQ ID NO: 11708 - RNA, 19 nt, artificial
  Chemically synthesized
guacgaagcgcuucucaaa

SEQ ID NO: 11709 - RNA, 19 nt, artificial
  Chemically synthesized
gaacauuucuuuuaagguu

SEQ ID NO: 11710 - RNA, 19 nt, artificial
  Chemically synthesized
cacgucuugcccugacuuu

SEQ ID NO: 11711 - RNA, 19 nt, artificial
  Chemically synthesized
gccucgcuuugcuuucauc

SEQ ID NO: 11712 - RNA, 19 nt, artificial
  Chemically synthesized
gaaugaccucaacagcuuc

SEQ ID NO: 11713 - RNA, 19 nt, artificial
  Chemically synthesized
cgaggucuucucguaguug

SEQ ID NO: 11714 - RNA, 19 nt, artificial
  Chemically synthesized
aggcugcgccuuaaaugca

SEQ ID NO: 11715 - RNA, 19 nt, artificial
  Chemically synthesized
cugacuuuugcagguacau

SEQ ID NO: 11716 - RNA, 19 nt, artificial
  Chemically synthesized
ggaacucguagaucucggu

SEQ ID NO: 11717 - RNA, 19 nt, artificial
  Chemically synthesized
caggagcuugugaaugacc

SEQ ID NO: 11718 - RNA, 19 nt, artificial
  Chemically synthesized
agggaacauuucuuuuaag

SEQ ID NO: 11719 - RNA, 19 nt, artificial
  Chemically synthesized
acucguagaucucggugaa

SEQ ID NO: 11720 - RNA, 19 nt, artificial
  Chemically synthesized
ggaacauuucuuuuaaggu

SEQ ID NO: 11721 - RNA, 19 nt, artificial
  Chemically synthesized
gaugauccuguucucugga

SEQ ID NO: 11722 - RNA, 19 nt, artificial
  Chemically synthesized
caucuuugggcaucaagua

SEQ ID NO: 11723 - RNA, 19 nt, artificial
  Chemically synthesized
cucucgcucuucucuacga

SEQ ID NO: 11724 - RNA, 19 nt, artificial
  Chemically synthesized
cgucuuuccugaugaccca

SEQ ID NO: 11725 - RNA, 19 nt, artificial
  Chemically synthesized
acauuucuuuuaagguuuu

SEQ ID NO: 11726 - RNA, 19 nt, artificial
  Chemically synthesized
acagcaguguaggccuuga

SEQ ID NO: 11727 - RNA, 19 nt, artificial
  Chemically synthesized
cccugacuuuugcagguac

SEQ ID NO: 11728 - RNA, 19 nt, artificial
  Chemically synthesized
gguacgaagcgcuucucaa

SEQ ID NO: 11729 - RNA, 19 nt, artificial
  Chemically synthesized
caggcucuauagaacacgu

SEQ ID NO: 11730 - RNA, 19 nt, artificial
  Chemically synthesized
gucaaaccacuugggagcu

SEQ ID NO: 11731 - RNA, 19 nt, artificial
  Chemically synthesized
ccugacuuuugcagguaca

SEQ ID NO: 11732 - RNA, 19 nt, artificial
  Chemically synthesized
ggcucuauagaacacguau

SEQ ID NO: 11733 - RNA, 19 nt, artificial
  Chemically synthesized
gcuuugcuuucaucugaca

SEQ ID NO: 11734 - RNA, 19 nt, artificial
  Chemically synthesized
cagcaguguaggccuugau

SEQ ID NO: 11735 - RNA, 19 nt, artificial
  Chemically synthesized
ccugccucaauagggaaca

SEQ ID NO: 11736 - RNA, 19 nt, artificial
  Chemically synthesized
gguacauggacgggaagua

SEQ ID NO: 11737 - RNA, 19 nt, artificial
  Chemically synthesized
cauuucuuuuaagguuuua

SEQ ID NO: 11738 - RNA, 19 nt, artificial
  Chemically synthesized
cgucgucuuuccugaugac

SEQ ID NO: 11739 - RNA, 19 nt, artificial
  Chemically synthesized
cagccucgcuuugcuuuca

SEQ ID NO: 11740 - RNA, 19 nt, artificial
  Chemically synthesized
gcugcgccuuaaaugcacu

SEQ ID NO: 11741 - RNA, 19 nt, artificial
  Chemically synthesized
gcagaaaacggacgcuguu

SEQ ID NO: 11742 - RNA, 19 nt, artificial
  Chemically synthesized
caucugacagaaccaccaa

SEQ ID NO: 11743 - RNA, 19 nt, artificial
  Chemically synthesized
ccgaggucuucucguaguu

SEQ ID NO: 11744 - RNA, 19 nt, artificial
  Chemically synthesized
cgaugugacggaugaaggu

SEQ ID NO: 11745 - RNA, 19 nt, artificial
  Chemically synthesized
gcuugugaaugaccucaac

SEQ ID NO: 11746 - RNA, 19 nt, artificial
  Chemically synthesized
aaugcacuggaaagaggaa

SEQ ID NO: 11747 - RNA, 19 nt, artificial
  Chemically synthesized
gccuuaaaugcacuggaaa

SEQ ID NO: 11748 - RNA, 19 nt, artificial
  Chemically synthesized
gcgccuuaaaugcacugga

SEQ ID NO: 11749 - RNA, 19 nt, artificial
  Chemically synthesized
ggagcuugugaaugaccuc

SEQ ID NO: 11750 - RNA, 19 nt, artificial
  Chemically synthesized
gcacuggaaagaggaaguc

SEQ ID NO: 11751 - RNA, 19 nt, artificial
  Chemically synthesized
gcccugacuuuugcaggua

SEQ ID NO: 11752 - RNA, 19 nt, artificial
  Chemically synthesized
gggcaucaaguaugucucu

SEQ ID NO: 11753 - RNA, 19 nt, artificial
  Chemically synthesized
ccaggagcuugugaaugac

SEQ ID NO: 11754 - RNA, 19 nt, artificial
  Chemically synthesized
gguacgucugcaggaugau

SEQ ID NO: 11755 - RNA, 19 nt, artificial
  Chemically synthesized
cgccuuaaaugcacuggaa

SEQ ID NO: 11756 - RNA, 19 nt, artificial
  Chemically synthesized
cguccaggagcuugugaau

SEQ ID NO: 11757 - RNA, 19 nt, artificial
  Chemically synthesized
cugccucaauagggaacau

SEQ ID NO: 11758 - RNA, 19 nt, artificial
  Chemically synthesized
gcccuaaugaugcuguguc

SEQ ID NO: 11759 - RNA, 19 nt, artificial
  Chemically synthesized
ggagaucagcccuaaugau

SEQ ID NO: 11760 - RNA, 19 nt, artificial
  Chemically synthesized
gggaggugcuacacaaugu

SEQ ID NO: 11761 - RNA, 19 nt, artificial
  Chemically synthesized
aggaggcucugucugacuu

SEQ ID NO: 11762 - RNA, 19 nt, artificial
  Chemically synthesized
cuaaugaugcuguguccau

SEQ ID NO: 11763 - RNA, 19 nt, artificial
  Chemically synthesized
cccuaaugaugcugugucc

SEQ ID NO: 11764 - RNA, 19 nt, artificial
  Chemically synthesized
ggagcaaguuggcaaacag

SEQ ID NO: 11765 - RNA, 19 nt, artificial
  Chemically synthesized
ggaggugcuacacaaugug

SEQ ID NO: 11766 - RNA, 19 nt, artificial
  Chemically synthesized
augaugcuguguccaugau

SEQ ID NO: 11767 - RNA, 19 nt, artificial
  Chemically synthesized
gaggcucugucugacuucu

SEQ ID NO: 11768 - RNA, 19 nt, artificial
  Chemically synthesized
cugggaggugcuacacaau

SEQ ID NO: 11769 - RNA, 19 nt, artificial
  Chemically synthesized
uggagcaaguuggcaaaca

SEQ ID NO: 11770 - RNA, 19 nt, artificial
  Chemically synthesized
gguggagcaaguuggcaaa

SEQ ID NO: 11771 - RNA, 19 nt, artificial
  Chemically synthesized
guguccaugaugcuuuuaa

SEQ ID NO: 11772 - RNA, 19 nt, artificial
  Chemically synthesized
uguccaugaugcuuuuaau

SEQ ID NO: 11773 - RNA, 19 nt, artificial
  Chemically synthesized
guccaugaugcuuuuaaua

SEQ ID NO: 11774 - RNA, 19 nt, artificial
  Chemically synthesized
agguggagcaaguuggcaa

SEQ ID NO: 11775 - RNA, 19 nt, artificial
  Chemically synthesized
cuguguccaugaugcuuuu

SEQ ID NO: 11776 - RNA, 19 nt, artificial
  Chemically synthesized
gcuguguccaugaugcuuu

SEQ ID NO: 11777 - RNA, 19 nt, artificial
  Chemically synthesized
ugaccaaggacaccugcau

SEQ ID NO: 11778 - RNA, 19 nt, artificial
  Chemically synthesized
gcauuugaccaagccguga

SEQ ID NO: 11779 - RNA, 19 nt, artificial
  Chemically synthesized
cagcccuaaugaugcugug

SEQ ID NO: 11780 - RNA, 19 nt, artificial
  Chemically synthesized
ucagcccuaaugaugcugu

SEQ ID NO: 11781 - RNA, 19 nt, artificial
  Chemically synthesized
gggagaucagcccuaauga

SEQ ID NO: 11782 - RNA, 19 nt, artificial
  Chemically synthesized
acuuccagcuggcaagguu

SEQ ID NO: 11783 - RNA, 19 nt, artificial
  Chemically synthesized
agggagaucagcccuaaug

SEQ ID NO: 11784 - RNA, 19 nt, artificial
  Chemically synthesized
ugggcaacucaguuaccua

SEQ ID NO: 11785 - RNA, 19 nt, artificial
  Chemically synthesized
gggcaacucaguuaccuag

SEQ ID NO: 11786 - RNA, 19 nt, artificial
  Chemically synthesized
agcuugggcaacucaguua

SEQ ID NO: 11787 - RNA, 19 nt, artificial
  Chemically synthesized
ccaggucccuaaucaugga

SEQ ID NO: 11788 - RNA, 19 nt, artificial
  Chemically synthesized
cagggagaucagcccuaau

SEQ ID NO: 11789 - RNA, 19 nt, artificial
  Chemically synthesized
gcaacucaguuaccuagcc

SEQ ID NO: 11790 - RNA, 19 nt, artificial
  Chemically synthesized
caugaugccaggucccuaa

SEQ ID NO: 11791 - RNA, 19 nt, artificial
  Chemically synthesized
ugcuacacaauguggcguc

SEQ ID NO: 11792 - RNA, 19 nt, artificial
  Chemically synthesized
gcuugggcaacucaguuac

SEQ ID NO: 11793 - RNA, 19 nt, artificial
  Chemically synthesized
gcaaguuggcaaacaggcu

SEQ ID NO: 11794 - RNA, 19 nt, artificial
  Chemically synthesized
ggucccuaaucauggacuc

SEQ ID NO: 11795 - RNA, 19 nt, artificial
  Chemically synthesized
aggucccuaaucauggacu

SEQ ID NO: 11796 - RNA, 19 nt, artificial
  Chemically synthesized
gacacagcaucauuagggc

SEQ ID NO: 11797 - RNA, 19 nt, artificial
  Chemically synthesized
aucauuagggcugaucucc

SEQ ID NO: 11798 - RNA, 19 nt, artificial
  Chemically synthesized
acauuguguagcaccuccc

SEQ ID NO: 11799 - RNA, 19 nt, artificial
  Chemically synthesized
aagucagacagagccuccu

SEQ ID NO: 11800 - RNA, 19 nt, artificial
  Chemically synthesized
auggacacagcaucauuag

SEQ ID NO: 11801 - RNA, 19 nt, artificial
  Chemically synthesized
ggacacagcaucauuaggg

SEQ ID NO: 11802 - RNA, 19 nt, artificial
  Chemically synthesized
cuguuugccaacuugcucc

SEQ ID NO: 11803 - RNA, 19 nt, artificial
  Chemically synthesized
cacauuguguagcaccucc

SEQ ID NO: 11804 - RNA, 19 nt, artificial
  Chemically synthesized
aucauggacacagcaucau

SEQ ID NO: 11805 - RNA, 19 nt, artificial
  Chemically synthesized
agaagucagacagagccuc

SEQ ID NO: 11806 - RNA, 19 nt, artificial
  Chemically synthesized
auuguguagcaccucccag

SEQ ID NO: 11807 - RNA, 19 nt, artificial
  Chemically synthesized
uguuugccaacuugcucca

SEQ ID NO: 11808 - RNA, 19 nt, artificial
  Chemically synthesized
uuugccaacuugcuccacc

SEQ ID NO: 11809 - RNA, 19 nt, artificial
  Chemically synthesized
uuaaaagcaucauggacac

SEQ ID NO: 11810 - RNA, 19 nt, artificial
  Chemically synthesized
auuaaaagcaucauggaca

SEQ ID NO: 11811 - RNA, 19 nt, artificial
  Chemically synthesized
uauuaaaagcaucauggac

SEQ ID NO: 11812 - RNA, 19 nt, artificial
  Chemically synthesized
uugccaacuugcuccaccu

SEQ ID NO: 11813 - RNA, 19 nt, artificial
  Chemically synthesized
aaaagcaucauggacacag

SEQ ID NO: 11814 - RNA, 19 nt, artificial
  Chemically synthesized
aaagcaucauggacacagc

SEQ ID NO: 11815 - RNA, 19 nt, artificial
  Chemically synthesized
augcagguguccuugguca

SEQ ID NO: 11816 - RNA, 19 nt, artificial
  Chemically synthesized
ucacggcuuggucaaaugc

SEQ ID NO: 11817 - RNA, 19 nt, artificial
  Chemically synthesized
cacagcaucauuagggcug

SEQ ID NO: 11818 - RNA, 19 nt, artificial
  Chemically synthesized
acagcaucauuagggcuga

SEQ ID NO: 11819 - RNA, 19 nt, artificial
  Chemically synthesized
ucauuagggcugaucuccc

SEQ ID NO: 11820 - RNA, 19 nt, artificial
  Chemically synthesized
aaccuugccagcuggaagu

SEQ ID NO: 11821 - RNA, 19 nt, artificial
  Chemically synthesized
cauuagggcugaucucccu

SEQ ID NO: 11822 - RNA, 19 nt, artificial
  Chemically synthesized
uagguaacugaguugccca

SEQ ID NO: 11823 - RNA, 19 nt, artificial
  Chemically synthesized
cuagguaacugaguugccc

SEQ ID NO: 11824 - RNA, 19 nt, artificial
  Chemically synthesized
uaacugaguugcccaagcu

SEQ ID NO: 11825 - RNA, 19 nt, artificial
  Chemically synthesized
uccaugauuagggaccugg

SEQ ID NO: 11826 - RNA, 19 nt, artificial
  Chemically synthesized
auuagggcugaucucccug

SEQ ID NO: 11827 - RNA, 19 nt, artificial
  Chemically synthesized
ggcuagguaacugaguugc

SEQ ID NO: 11828 - RNA, 19 nt, artificial
  Chemically synthesized
uuagggaccuggcaucaug

SEQ ID NO: 11829 - RNA, 19 nt, artificial
  Chemically synthesized
gacgccacauuguguagca

SEQ ID NO: 11830 - RNA, 19 nt, artificial
  Chemically synthesized
guaacugaguugcccaagc

SEQ ID NO: 11831 - RNA, 19 nt, artificial
  Chemically synthesized
agccuguuugccaacuugc

SEQ ID NO: 11832 - RNA, 19 nt, artificial
  Chemically synthesized
gaguccaugauuagggacc

SEQ ID NO: 11833 - RNA, 19 nt, artificial
  Chemically synthesized
aguccaugauuagggaccu

SEQ ID NO: 11834 - RNA, 19 nt, artificial
  Chemically synthesized
ccaugaugcuuuuaauaaa

SEQ ID NO: 11835 - RNA, 19 nt, artificial
  Chemically synthesized
caugaugcuuuuaauaaaa

SEQ ID NO: 11836 - RNA, 19 nt, artificial
  Chemically synthesized
gaugcuuuuaauaaaaaca

SEQ ID NO: 11837 - RNA, 19 nt, artificial
  Chemically synthesized
ugaugcuuuuaauaaaaac

SEQ ID NO: 11838 - RNA, 19 nt, artificial
  Chemically synthesized
ugcuuuuaauaaaaacaac

SEQ ID NO: 11839 - RNA, 19 nt, artificial
  Chemically synthesized
uccaugaugcuuuuaauaa

SEQ ID NO: 11840 - RNA, 19 nt, artificial
  Chemically synthesized
accaggagcgaaccaugau

SEQ ID NO: 11841 - RNA, 19 nt, artificial
  Chemically synthesized
uugaccaagccgugaccaa

SEQ ID NO: 11842 - RNA, 19 nt, artificial
  Chemically synthesized
cagcuugggcaacucaguu

SEQ ID NO: 11843 - RNA, 19 nt, artificial
  Chemically synthesized
gaucagcccuaaugaugcu

SEQ ID NO: 11844 - RNA, 19 nt, artificial
  Chemically synthesized
acuuggagcccguggauuu

SEQ ID NO: 11845 - RNA, 19 nt, artificial
  Chemically synthesized
gagaucagcccuaaugaug

SEQ ID NO: 11846 - RNA, 19 nt, artificial
  Chemically synthesized
gcuuuuaauaaaaacaacc

SEQ ID NO: 11847 - RNA, 19 nt, artificial
  Chemically synthesized
aggcucugucugacuucug

SEQ ID NO: 11848 - RNA, 19 nt, artificial
  Chemically synthesized
agaucagcccuaaugaugc

SEQ ID NO: 11849 - RNA, 19 nt, artificial
  Chemically synthesized
ggcaacucaguuaccuagc

SEQ ID NO: 11850 - RNA, 19 nt, artificial
  Chemically synthesized
uugggcaacucaguuaccu

SEQ ID NO: 11851 - RNA, 19 nt, artificial
  Chemically synthesized
cuugggcaacucaguuacc

SEQ ID NO: 11852 - RNA, 19 nt, artificial
  Chemically synthesized
cauuugaccaagccgugac

SEQ ID NO: 11853 - RNA, 19 nt, artificial
  Chemically synthesized
cuuuuaauaaaaacaaccc

SEQ ID NO: 11854 - RNA, 19 nt, artificial
  Chemically synthesized
ucgaugcagagacagaggu

SEQ ID NO: 11855 - RNA, 19 nt, artificial
  Chemically synthesized
uuugaccaagccgugacca

SEQ ID NO: 11856 - RNA, 19 nt, artificial
  Chemically synthesized
caacucaguuaccuagccc

SEQ ID NO: 11857 - RNA, 19 nt, artificial
  Chemically synthesized
auuugaccaagccgugacc

SEQ ID NO: 11858 - RNA, 19 nt, artificial
  Chemically synthesized
caggucccuaaucauggac

SEQ ID NO: 11859 - RNA, 19 nt, artificial
  Chemically synthesized
gucccuaaucauggacucc

SEQ ID NO: 11860 - RNA, 19 nt, artificial
  Chemically synthesized
ucccuaaucauggacuccc

SEQ ID NO: 11861 - RNA, 19 nt, artificial
  Chemically synthesized
aucagcccuaaugaugcug

SEQ ID NO: 11862 - RNA, 19 nt, artificial
  Chemically synthesized
uuuauuaaaagcaucaugg

SEQ ID NO: 11863 - RNA, 19 nt, artificial
  Chemically synthesized
uuuuauuaaaagcaucaug

SEQ ID NO: 11864 - RNA, 19 nt, artificial
  Chemically synthesized
uguuuuuauuaaaagcauc

SEQ ID NO: 11865 - RNA, 19 nt, artificial
  Chemically synthesized
guuuuuauuaaaagcauca

SEQ ID NO: 11866 - RNA, 19 nt, artificial
  Chemically synthesized
guuguuuuuauuaaaagca

SEQ ID NO: 11867 - RNA, 19 nt, artificial
  Chemically synthesized
uuauuaaaagcaucaugga

SEQ ID NO: 11868 - RNA, 19 nt, artificial
  Chemically synthesized
aucaugguucgcuccuggu

SEQ ID NO: 11869 - RNA, 19 nt, artificial
  Chemically synthesized
uuggucacggcuuggucaa

SEQ ID NO: 11870 - RNA, 19 nt, artificial
  Chemically synthesized
aacugaguugcccaagcug

SEQ ID NO: 11871 - RNA, 19 nt, artificial
  Chemically synthesized
agcaucauuagggcugauc

SEQ ID NO: 11872 - RNA, 19 nt, artificial
  Chemically synthesized
aaauccacgggcuccaagu

SEQ ID NO: 11873 - RNA, 19 nt, artificial
  Chemically synthesized
caucauuagggcugaucuc

SEQ ID NO: 11874 - RNA, 19 nt, artificial
  Chemically synthesized
gguuguuuuuauuaaaagc

SEQ ID NO: 11875 - RNA, 19 nt, artificial
  Chemically synthesized
cagaagucagacagagccu

SEQ ID NO: 11876 - RNA, 19 nt, artificial
  Chemically synthesized
gcaucauuagggcugaucu

SEQ ID NO: 11877 - RNA, 19 nt, artificial
  Chemically synthesized
gcuagguaacugaguugcc

SEQ ID NO: 11878 - RNA, 19 nt, artificial
  Chemically synthesized
agguaacugaguugcccaa

SEQ ID NO: 11879 - RNA, 19 nt, artificial
  Chemically synthesized
gguaacugaguugcccaag

SEQ ID NO: 11880 - RNA, 19 nt, artificial
  Chemically synthesized
gucacggcuuggucaaaug

SEQ ID NO: 11881 - RNA, 19 nt, artificial
  Chemically synthesized
ggguuguuuuuauuaaaag

SEQ ID NO: 11882 - RNA, 19 nt, artificial
  Chemically synthesized
accucugucucugcaucga

SEQ ID NO: 11883 - RNA, 19 nt, artificial
  Chemically synthesized
uggucacggcuuggucaaa

SEQ ID NO: 11884 - RNA, 19 nt, artificial
  Chemically synthesized
gggcuagguaacugaguug

SEQ ID NO: 11885 - RNA, 19 nt, artificial
  Chemically synthesized
ggucacggcuuggucaaau

SEQ ID NO: 11886 - RNA, 19 nt, artificial
  Chemically synthesized
guccaugauuagggaccug

SEQ ID NO: 11887 - RNA, 19 nt, artificial
  Chemically synthesized
ggaguccaugauuagggac

SEQ ID NO: 11888 - RNA, 19 nt, artificial
  Chemically synthesized
gggaguccaugauuaggga

SEQ ID NO: 11889 - RNA, 19 nt, artificial
  Chemically synthesized
cagcaucauuagggcugau

SEQ ID NO: 11890 - RNA, 19 nt, artificial
  Chemically synthesized
cccugcaacuaccuugaac

SEQ ID NO: 11891 - RNA, 19 nt, artificial
  Chemically synthesized
ggaaagugaaaaagcugau

SEQ ID NO: 11892 - RNA, 19 nt, artificial
  Chemically synthesized
gugaaaaacuacugccuga

SEQ ID NO: 11893 - RNA, 19 nt, artificial
  Chemically synthesized
gcauuugcaacacugagaa

SEQ ID NO: 11894 - RNA, 19 nt, artificial
  Chemically synthesized
ccuuauagguuacucauaa

SEQ ID NO: 11895 - RNA, 19 nt, artificial
  Chemically synthesized
ccaaggaguaaguacaaau

SEQ ID NO: 11896 - RNA, 19 nt, artificial
  Chemically synthesized
ucaaaggugaaugaagaau

SEQ ID NO: 11897 - RNA, 19 nt, artificial
  Chemically synthesized
acccaaggaaagugaaaaa

SEQ ID NO: 11898 - RNA, 19 nt, artificial
  Chemically synthesized
gaaaaacuacugccugacu

SEQ ID NO: 11899 - RNA, 19 nt, artificial
  Chemically synthesized
ccuuaaagaagccuugauu

SEQ ID NO: 11900 - RNA, 19 nt, artificial
  Chemically synthesized
cgcaacuacagauuuggaa

SEQ ID NO: 11901 - RNA, 19 nt, artificial
  Chemically synthesized
ccaaaguuuuuguugaaga

SEQ ID NO: 11902 - RNA, 19 nt, artificial
  Chemically synthesized
gcuuuccagaugaacccaa

SEQ ID NO: 11903 - RNA, 19 nt, artificial
  Chemically synthesized
aggugaaaaacuacugccu

SEQ ID NO: 11904 - RNA, 19 nt, artificial
  Chemically synthesized
ucccugcaacuaccuugaa

SEQ ID NO: 11905 - RNA, 19 nt, artificial
  Chemically synthesized
ucauguucaacgggcagaa

SEQ ID NO: 11906 - RNA, 19 nt, artificial
  Chemically synthesized
accuuaaagaagccuugau

SEQ ID NO: 11907 - RNA, 19 nt, artificial
  Chemically synthesized
ccagacagagaaauaugau

SEQ ID NO: 11908 - RNA, 19 nt, artificial
  Chemically synthesized
uguacacuauccugaagaa

SEQ ID NO: 11909 - RNA, 19 nt, artificial
  Chemically synthesized
gguguuaucaaaggugaau

SEQ ID NO: 11910 - RNA, 19 nt, artificial
  Chemically synthesized
ugaugcuaauaaccagaca

SEQ ID NO: 11911 - RNA, 19 nt, artificial
  Chemically synthesized
cccaaggaaagugaaaaag

SEQ ID NO: 11912 - RNA, 19 nt, artificial
  Chemically synthesized
ggccaggugaaaaacuacu

SEQ ID NO: 11913 - RNA, 19 nt, artificial
  Chemically synthesized
acacugagaaguuaucuua

SEQ ID NO: 11914 - RNA, 19 nt, artificial
  Chemically synthesized
acauugucuuugucuugaa

SEQ ID NO: 11915 - RNA, 19 nt, artificial
  Chemically synthesized
ucgaccaaaugagagacaa

SEQ ID NO: 11916 - RNA, 19 nt, artificial
  Chemically synthesized
ggcugcauguacacuaucc

SEQ ID NO: 11917 - RNA, 19 nt, artificial
  Chemically synthesized
cggacaagaaggacuggaa

SEQ ID NO: 11918 - RNA, 19 nt, artificial
  Chemically synthesized
gguuacucauaaggcauau

SEQ ID NO: 11919 - RNA, 19 nt, artificial
  Chemically synthesized
ucacacuguaaacauucau

SEQ ID NO: 11920 - RNA, 19 nt, artificial
  Chemically synthesized
cuagacaaugaugugagua

SEQ ID NO: 11921 - RNA, 19 nt, artificial
  Chemically synthesized
agaaaaugaagcccuauua

SEQ ID NO: 11922 - RNA, 19 nt, artificial
  Chemically synthesized
cccaaaguuuuuguugaag

SEQ ID NO: 11923 - RNA, 19 nt, artificial
  Chemically synthesized
ggaggcacucuucaguuau

SEQ ID NO: 11924 - RNA, 19 nt, artificial
  Chemically synthesized
gaagacagcaugaaggaug

SEQ ID NO: 11925 - RNA, 19 nt, artificial
  Chemically synthesized
cacucaaggugcacuacaa

SEQ ID NO: 11926 - RNA, 19 nt, artificial
  Chemically synthesized
agacaaaagaagagcucca

SEQ ID NO: 11927 - RNA, 19 nt, artificial
  Chemically synthesized
cgaccaaaugagagacaag

SEQ ID NO: 11928 - RNA, 19 nt, artificial
  Chemically synthesized
ugauucagcuucgagggaa

SEQ ID NO: 11929 - RNA, 19 nt, artificial
  Chemically synthesized
cagacagagaaauaugauu

SEQ ID NO: 11930 - RNA, 19 nt, artificial
  Chemically synthesized
gaagcauuaaccgagacaa

SEQ ID NO: 11931 - RNA, 19 nt, artificial
  Chemically synthesized
gcugcauguacacuauccu

SEQ ID NO: 11932 - RNA, 19 nt, artificial
  Chemically synthesized
agguuacucauaaggcaua

SEQ ID NO: 11933 - RNA, 19 nt, artificial
  Chemically synthesized
ugaugugaguacccaggau

SEQ ID NO: 11934 - RNA, 19 nt, artificial
  Chemically synthesized
guauacuguacugagacau

SEQ ID NO: 11935 - RNA, 19 nt, artificial
  Chemically synthesized
gaugcuaauaaccagacaa

SEQ ID NO: 11936 - RNA, 19 nt, artificial
  Chemically synthesized
gccugagacaaaagaagag

SEQ ID NO: 11937 - RNA, 19 nt, artificial
  Chemically synthesized
agagaaauaugauuuggcu

SEQ ID NO: 11938 - RNA, 19 nt, artificial
  Chemically synthesized
ccagaagcauuaaccgaga

SEQ ID NO: 11939 - RNA, 19 nt, artificial
  Chemically synthesized
ggccuccuaguuucuaccu

SEQ ID NO: 11940 - RNA, 19 nt, artificial
  Chemically synthesized
cauucaucaagcuguacau

SEQ ID NO: 11941 - RNA, 19 nt, artificial
  Chemically synthesized
acacuguaaacauucauca

SEQ ID NO: 11942 - RNA, 19 nt, artificial
  Chemically synthesized
acaaugaugugaguaccca

SEQ ID NO: 11943 - RNA, 19 nt, artificial
  Chemically synthesized
uaaccuacuagacaaugau

SEQ ID NO: 11944 - RNA, 19 nt, artificial
  Chemically synthesized
ggauguuucacaaacuaca

SEQ ID NO: 11945 - RNA, 19 nt, artificial
  Chemically synthesized
ucggagagaagucuaggau

SEQ ID NO: 11946 - RNA, 19 nt, artificial
  Chemically synthesized
aggcacucuucaguuauga

SEQ ID NO: 11947 - RNA, 19 nt, artificial
  Chemically synthesized
caaggaaagugaaaaagcu

SEQ ID NO: 11948 - RNA, 19 nt, artificial
  Chemically synthesized
ugaacccaaggaaagugaa

SEQ ID NO: 11949 - RNA, 19 nt, artificial
  Chemically synthesized
acaaaaagaagagccuaag

SEQ ID NO: 11950 - RNA, 19 nt, artificial
  Chemically synthesized
aacaaaaagaagagccuaa

SEQ ID NO: 11951 - RNA, 19 nt, artificial
  Chemically synthesized
aggccagaaacaaaaagaa

SEQ ID NO: 11952 - RNA, 19 nt, artificial
  Chemically synthesized
agcuccuccuaguuccaaa

SEQ ID NO: 11953 - RNA, 19 nt, artificial
  Chemically synthesized
caaaagaagagcuccaggu

SEQ ID NO: 11954 - RNA, 19 nt, artificial
  Chemically synthesized
ccgugugcuauuuggguuu

SEQ ID NO: 11955 - RNA, 19 nt, artificial
  Chemically synthesized
ugguggaucaagacaguuu

SEQ ID NO: 11956 - RNA, 19 nt, artificial
  Chemically synthesized
ggaauggaaaaaagcugaa

SEQ ID NO: 11957 - RNA, 19 nt, artificial
  Chemically synthesized
cucucugcuucuuuccuuu

SEQ ID NO: 11958 - RNA, 19 nt, artificial
  Chemically synthesized
gacagagaaauaugauuug

SEQ ID NO: 11959 - RNA, 19 nt, artificial
  Chemically synthesized
cuaccagacagagaaauau

SEQ ID NO: 11960 - RNA, 19 nt, artificial
  Chemically synthesized
gcauuaaccgagacaagca

SEQ ID NO: 11961 - RNA, 19 nt, artificial
  Chemically synthesized
ugcauguacacuauccuga

SEQ ID NO: 11962 - RNA, 19 nt, artificial
  Chemically synthesized
acaaaaacaagacacccaa

SEQ ID NO: 11963 - RNA, 19 nt, artificial
  Chemically synthesized
acauucaucaagcuguaca

SEQ ID NO: 11964 - RNA, 19 nt, artificial
  Chemically synthesized
cacuguaaacauucaucaa

SEQ ID NO: 11965 - RNA, 19 nt, artificial
  Chemically synthesized
cuacuagacaaugauguga

SEQ ID NO: 11966 - RNA, 19 nt, artificial
  Chemically synthesized
acaaagcugaagaaaauga

SEQ ID NO: 11967 - RNA, 19 nt, artificial
  Chemically synthesized
caaaguuuuuguugaagac

SEQ ID NO: 11968 - RNA, 19 nt, artificial
  Chemically synthesized
guguuaucaaaggugaaug

SEQ ID NO: 11969 - RNA, 19 nt, artificial
  Chemically synthesized
cucuucaguuaugaggcua

SEQ ID NO: 11970 - RNA, 19 nt, artificial
  Chemically synthesized
ggcuggaacacacuaagcu

SEQ ID NO: 11971 - RNA, 19 nt, artificial
  Chemically synthesized
cacugagaaguuaucuuaa

SEQ ID NO: 11972 - RNA, 19 nt, artificial
  Chemically synthesized
gccuaaggaagugaagcuc

SEQ ID NO: 11973 - RNA, 19 nt, artificial
  Chemically synthesized
gaagagccuaaggaaguga

SEQ ID NO: 11974 - RNA, 19 nt, artificial
  Chemically synthesized
agaagagccuaaggaagug

SEQ ID NO: 11975 - RNA, 19 nt, artificial
  Chemically synthesized
ccaggccagaaacaaaaag

SEQ ID NO: 11976 - RNA, 19 nt, artificial
  Chemically synthesized
gacaaaagaagagcuccag

SEQ ID NO: 11977 - RNA, 19 nt, artificial
  Chemically synthesized
ggcaucugugguggaucaa

SEQ ID NO: 11978 - RNA, 19 nt, artificial
  Chemically synthesized
gaccaaaugagagacaagu

SEQ ID NO: 11979 - RNA, 19 nt, artificial
  Chemically synthesized
gcuguuucgaccaaaugag

SEQ ID NO: 11980 - RNA, 19 nt, artificial
  Chemically synthesized
gacauuccaaaaucgacaa

SEQ ID NO: 11981 - RNA, 19 nt, artificial
  Chemically synthesized
ucucucugcuucuuuccuu

SEQ ID NO: 11982 - RNA, 19 nt, artificial
  Chemically synthesized
cucauaaggcauauacaaa

SEQ ID NO: 11983 - RNA, 19 nt, artificial
  Chemically synthesized
guuacucauaaggcauaua

SEQ ID NO: 11984 - RNA, 19 nt, artificial
  Chemically synthesized
cacacuguaaacauucauc

SEQ ID NO: 11985 - RNA, 19 nt, artificial
  Chemically synthesized
accuacuagacaaugaugu

SEQ ID NO: 11986 - RNA, 19 nt, artificial
  Chemically synthesized
gucuaggauguuucacaaa

SEQ ID NO: 11987 - RNA, 19 nt, artificial
  Chemically synthesized
agucuaggauguuucacaa

SEQ ID NO: 11988 - RNA, 19 nt, artificial
  Chemically synthesized
caacuacagauuuggaaag

SEQ ID NO: 11989 - RNA, 19 nt, artificial
  Chemically synthesized
ugaaugaagaauggcugga

SEQ ID NO: 11990 - RNA, 19 nt, artificial
  Chemically synthesized
ggugaaugaagaauggcug

SEQ ID NO: 11991 - RNA, 19 nt, artificial
  Chemically synthesized
aggugaaugaagaauggcu

SEQ ID NO: 11992 - RNA, 19 nt, artificial
  Chemically synthesized
ccagacaacagaaccucag

SEQ ID NO: 11993 - RNA, 19 nt, artificial
  Chemically synthesized
gaaagugaaaaagcugaug

SEQ ID NO: 11994 - RNA, 19 nt, artificial
  Chemically synthesized
gggccaggugaaaaacuac

SEQ ID NO: 11995 - RNA, 19 nt, artificial
  Chemically synthesized
ggccagaaacaaaaagaag

SEQ ID NO: 11996 - RNA, 19 nt, artificial
  Chemically synthesized
gcaaugauaacugggccac

SEQ ID NO: 11997 - RNA, 19 nt, artificial
  Chemically synthesized
acauuccaaaaucgacaag

SEQ ID NO: 11998 - RNA, 19 nt, artificial
  Chemically synthesized
agcugauagacuauaagau

SEQ ID NO: 11999 - RNA, 19 nt, artificial
  Chemically synthesized
cuaucaaagaccuuaaaga

SEQ ID NO: 12000 - RNA, 19 nt, artificial
  Chemically synthesized
gagaaauaugauuuggcua

SEQ ID NO: 12001 - RNA, 19 nt, artificial
  Chemically synthesized
accagacagagaaauauga

SEQ ID NO: 12002 - RNA, 19 nt, artificial
  Chemically synthesized
agaagcauuaaccgagaca

SEQ ID NO: 12003 - RNA, 19 nt, artificial
  Chemically synthesized
acaugacugaagcagagaa

SEQ ID NO: 12004 - RNA, 19 nt, artificial
  Chemically synthesized
ccuuuucucucucauggua

SEQ ID NO: 12005 - RNA, 19 nt, artificial
  Chemically synthesized
accuaaucaugucccuggu

SEQ ID NO: 12006 - RNA, 19 nt, artificial
  Chemically synthesized
acuguaaacauucaucaag

SEQ ID NO: 12007 - RNA, 19 nt, artificial
  Chemically synthesized
gcccuauuacuuguuugua

SEQ ID NO: 12008 - RNA, 19 nt, artificial
  Chemically synthesized
gcgcaacuacagauuugga

SEQ ID NO: 12009 - RNA, 19 nt, artificial
  Chemically synthesized
ugguguuaucaaaggugaa

SEQ ID NO: 12010 - RNA, 19 nt, artificial
  Chemically synthesized
cugguguuaucaaagguga

SEQ ID NO: 12011 - RNA, 19 nt, artificial
  Chemically synthesized
ccugguguuaucaaaggug

SEQ ID NO: 12012 - RNA, 19 nt, artificial
  Chemically synthesized
uaauccugguguuaucaaa

SEQ ID NO: 12013 - RNA, 19 nt, artificial
  Chemically synthesized
aggaaagugaaaaagcuga

SEQ ID NO: 12014 - RNA, 19 nt, artificial
  Chemically synthesized
ccaaggaaagugaaaaagc

SEQ ID NO: 12015 - RNA, 19 nt, artificial
  Chemically synthesized
gaacacacuaagcugagcu

SEQ ID NO: 12016 - RNA, 19 nt, artificial
  Chemically synthesized
ggaacacacuaagcugagc

SEQ ID NO: 12017 - RNA, 19 nt, artificial
  Chemically synthesized
acugagaaguuaucuuaag

SEQ ID NO: 12018 - RNA, 19 nt, artificial
  Chemically synthesized
aacacugagaaguuaucuu

SEQ ID NO: 12019 - RNA, 19 nt, artificial
  Chemically synthesized
uugucuuugucuugaagaa

SEQ ID NO: 12020 - RNA, 19 nt, artificial
  Chemically synthesized
cugagacaaaagaagagcu

SEQ ID NO: 12021 - RNA, 19 nt, artificial
  Chemically synthesized
gguggaucaagacaguuuc

SEQ ID NO: 12022 - RNA, 19 nt, artificial
  Chemically synthesized
gcaucugugguggaucaag

SEQ ID NO: 12023 - RNA, 19 nt, artificial
  Chemically synthesized
cgauggagugugucuggaa

SEQ ID NO: 12024 - RNA, 19 nt, artificial
  Chemically synthesized
gggaaccagcugauagacu

SEQ ID NO: 12025 - RNA, 19 nt, artificial
  Chemically synthesized
acagagaaauaugauuugg

SEQ ID NO: 12026 - RNA, 19 nt, artificial
  Chemically synthesized
cuacuaccagacagagaaa

SEQ ID NO: 12027 - RNA, 19 nt, artificial
  Chemically synthesized
cugaagaacaugacugaag

SEQ ID NO: 12028 - RNA, 19 nt, artificial
  Chemically synthesized
uccugaagaacaugacuga

SEQ ID NO: 12029 - RNA, 19 nt, artificial
  Chemically synthesized
ggacaagaaggacuggaag

SEQ ID NO: 12030 - RNA, 19 nt, artificial
  Chemically synthesized
uuacucauaaggcauauac

SEQ ID NO: 12031 - RNA, 19 nt, artificial
  Chemically synthesized
gcuugaaguaaccuuauag

SEQ ID NO: 12032 - RNA, 19 nt, artificial
  Chemically synthesized
uacuguaauuggcucuuaa

SEQ ID NO: 12033 - RNA, 19 nt, artificial
  Chemically synthesized
uuacuguaauuggcucuua

SEQ ID NO: 12034 - RNA, 19 nt, artificial
  Chemically synthesized
uccuguuucugaaccauua

SEQ ID NO: 12035 - RNA, 19 nt, artificial
  Chemically synthesized
guaaguacaaauauuccug

SEQ ID NO: 12036 - RNA, 19 nt, artificial
  Chemically synthesized
aaaccuagcaucuuacaaa

SEQ ID NO: 12037 - RNA, 19 nt, artificial
  Chemically synthesized
ucaagcuguacauuuggug

SEQ ID NO: 12038 - RNA, 19 nt, artificial
  Chemically synthesized
cuguaaacauucaucaagc

SEQ ID NO: 12039 - RNA, 19 nt, artificial
  Chemically synthesized
ccuguuucuugcucugagu

SEQ ID NO: 12040 - RNA, 19 nt, artificial
  Chemically synthesized
agagagucuuccagguacu

SEQ ID NO: 12041 - RNA, 19 nt, artificial
  Chemically synthesized
gaaaaguggauggaagugu

SEQ ID NO: 12042 - RNA, 19 nt, artificial
  Chemically synthesized
ugagacauuacaguuugga

SEQ ID NO: 12043 - RNA, 19 nt, artificial
  Chemically synthesized
cugcuguauacuguacuga

SEQ ID NO: 12044 - RNA, 19 nt, artificial
  Chemically synthesized
cccuucugcuguauacugu

SEQ ID NO: 12045 - RNA, 19 nt, artificial
  Chemically synthesized
aagaaaaugaagcccuauu

SEQ ID NO: 12046 - RNA, 19 nt, artificial
  Chemically synthesized
cggagagaagucuaggaug

SEQ ID NO: 12047 - RNA, 19 nt, artificial
  Chemically synthesized
cuacagauuuggaaagcac

SEQ ID NO: 12048 - RNA, 19 nt, artificial
  Chemically synthesized
guugaagacugcgcaacua

SEQ ID NO: 12049 - RNA, 19 nt, artificial
  Chemically synthesized
gacaacagaaccucagcuu

SEQ ID NO: 12050 - RNA, 19 nt, artificial
  Chemically synthesized
acacacuaagcugagcuau

SEQ ID NO: 12051 - RNA, 19 nt, artificial
  Chemically synthesized
aacacacuaagcugagcua

SEQ ID NO: 12052 - RNA, 19 nt, artificial
  Chemically synthesized
gagaaguuaucuuaaggga

SEQ ID NO: 12053 - RNA, 19 nt, artificial
  Chemically synthesized
aggaagugaagcucagugu

SEQ ID NO: 12054 - RNA, 19 nt, artificial
  Chemically synthesized
caccaggccagaaacaaaa

SEQ ID NO: 12055 - RNA, 19 nt, artificial
  Chemically synthesized
gggaacauugucuuugucu

SEQ ID NO: 12056 - RNA, 19 nt, artificial
  Chemically synthesized
ccagggaacauugucuuug

SEQ ID NO: 12057 - RNA, 19 nt, artificial
  Chemically synthesized
gugugcuauuuggguuugu

SEQ ID NO: 12058 - RNA, 19 nt, artificial
  Chemically synthesized
accgugugcuauuuggguu

SEQ ID NO: 12059 - RNA, 19 nt, artificial
  Chemically synthesized
guaggguuaugagucaguu

SEQ ID NO: 12060 - RNA, 19 nt, artificial
  Chemically synthesized
acuuggcaguggcuuacuu

SEQ ID NO: 12061 - RNA, 19 nt, artificial
  Chemically synthesized
cagaagcauuaaccgagac

SEQ ID NO: 12062 - RNA, 19 nt, artificial
  Chemically synthesized
gaacaugacugaagcagag

SEQ ID NO: 12063 - RNA, 19 nt, artificial
  Chemically synthesized
ccugaagaacaugacugaa

SEQ ID NO: 12064 - RNA, 19 nt, artificial
  Chemically synthesized
ggcucuuaaggcuugaagu

SEQ ID NO: 12065 - RNA, 19 nt, artificial
  Chemically synthesized
uggcucuuaaggcuugaag

SEQ ID NO: 12066 - RNA, 19 nt, artificial
  Chemically synthesized
aaccuagcaucuuacaaaa

SEQ ID NO: 12067 - RNA, 19 nt, artificial
  Chemically synthesized
uguaaacauucaucaagcu

SEQ ID NO: 12068 - RNA, 19 nt, artificial
  Chemically synthesized
gagagagucuuccagguac

SEQ ID NO: 12069 - RNA, 19 nt, artificial
  Chemically synthesized
acgagagagucuuccaggu

SEQ ID NO: 12070 - RNA, 19 nt, artificial
  Chemically synthesized
uggauggaagugucuggaa

SEQ ID NO: 12071 - RNA, 19 nt, artificial
  Chemically synthesized
ggaaaaguggauggaagug

SEQ ID NO: 12072 - RNA, 19 nt, artificial
  Chemically synthesized
gaggaaaaguggauggaag

SEQ ID NO: 12073 - RNA, 19 nt, artificial
  Chemically synthesized
agaggaaaaguggauggaa

SEQ ID NO: 12074 - RNA, 19 nt, artificial
  Chemically synthesized
acauuacaguuuggaagug

SEQ ID NO: 12075 - RNA, 19 nt, artificial
  Chemically synthesized
caaccugucuucucucugu

SEQ ID NO: 12076 - RNA, 19 nt, artificial
  Chemically synthesized
gagaagucuaggauguuuc

SEQ ID NO: 12077 - RNA, 19 nt, artificial
  Chemically synthesized
cucggagagaagucuagga

SEQ ID NO: 12078 - RNA, 19 nt, artificial
  Chemically synthesized
aagggaaggugggcauuuu

SEQ ID NO: 12079 - RNA, 19 nt, artificial
  Chemically synthesized
guggaggcacucuucaguu

SEQ ID NO: 12080 - RNA, 19 nt, artificial
  Chemically synthesized
cuggaacacacuaagcuga

SEQ ID NO: 12081 - RNA, 19 nt, artificial
  Chemically synthesized
ccagaaacaaaaagaagag

SEQ ID NO: 12082 - RNA, 19 nt, artificial
  Chemically synthesized
caggccagaaacaaaaaga

SEQ ID NO: 12083 - RNA, 19 nt, artificial
  Chemically synthesized
gucuugaagaagggcaaug

SEQ ID NO: 12084 - RNA, 19 nt, artificial
  Chemically synthesized
agggaacauugucuuuguc

SEQ ID NO: 12085 - RNA, 19 nt, artificial
  Chemically synthesized
gccagggaacauugucuuu

SEQ ID NO: 12086 - RNA, 19 nt, artificial
  Chemically synthesized
ugccagggaacauugucuu

SEQ ID NO: 12087 - RNA, 19 nt, artificial
  Chemically synthesized
cgugugcuauuuggguuug

SEQ ID NO: 12088 - RNA, 19 nt, artificial
  Chemically synthesized
ggaaaaaagcugaagaaca

SEQ ID NO: 12089 - RNA, 19 nt, artificial
  Chemically synthesized
gcuaucaaagaccuuaaag

SEQ ID NO: 12090 - RNA, 19 nt, artificial
  Chemically synthesized
cucuuaaggcuugaaguaa

SEQ ID NO: 12091 - RNA, 19 nt, artificial
  Chemically synthesized
guaauuggcucuuaaggcu

SEQ ID NO: 12092 - RNA, 19 nt, artificial
  Chemically synthesized
cugaaccauuacuguaauu

SEQ ID NO: 12093 - RNA, 19 nt, artificial
  Chemically synthesized
cccaaggaguaaguacaaa

SEQ ID NO: 12094 - RNA, 19 nt, artificial
  Chemically synthesized
uccuguuucuugcucugag

SEQ ID NO: 12095 - RNA, 19 nt, artificial
  Chemically synthesized
ggagaggaaaaguggaugg

SEQ ID NO: 12096 - RNA, 19 nt, artificial
  Chemically synthesized
gggagaggaaaaguggaug

SEQ ID NO: 12097 - RNA, 19 nt, artificial
  Chemically synthesized
acaguuuggaaguguuaac

SEQ ID NO: 12098 - RNA, 19 nt, artificial
  Chemically synthesized
agacauuacaguuuggaag

SEQ ID NO: 12099 - RNA, 19 nt, artificial
  Chemically synthesized
gagacauuacaguuuggaa

SEQ ID NO: 12100 - RNA, 19 nt, artificial
  Chemically synthesized
gaaaaugaagcccuauuac

SEQ ID NO: 12101 - RNA, 19 nt, artificial
  Chemically synthesized
gcuccaaccugucuucucu

SEQ ID NO: 12102 - RNA, 19 nt, artificial
  Chemically synthesized
cccuuucagaagacagcau

SEQ ID NO: 12103 - RNA, 19 nt, artificial
  Chemically synthesized
gaaguuaucuuaagggagg

SEQ ID NO: 12104 - RNA, 19 nt, artificial
  Chemically synthesized
acaaguacacgguagucau

SEQ ID NO: 12105 - RNA, 19 nt, artificial
  Chemically synthesized
ugagaaguuaucuuaaggg

SEQ ID NO: 12106 - RNA, 19 nt, artificial
  Chemically synthesized
accaggccagaaacaaaaa

SEQ ID NO: 12107 - RNA, 19 nt, artificial
  Chemically synthesized
auggaaaaaagcugaagaa

SEQ ID NO: 12108 - RNA, 19 nt, artificial
  Chemically synthesized
ggaggaauggaaaaaagcu

SEQ ID NO: 12109 - RNA, 19 nt, artificial
  Chemically synthesized
ucccggauuugcuucaaca

SEQ ID NO: 12110 - RNA, 19 nt, artificial
  Chemically synthesized
cucccggauuugcuucaac

SEQ ID NO: 12111 - RNA, 19 nt, artificial
  Chemically synthesized
acucccggauuugcuucaa

SEQ ID NO: 12112 - RNA, 19 nt, artificial
  Chemically synthesized
uuggcucuuaaggcuugaa

SEQ ID NO: 12113 - RNA, 19 nt, artificial
  Chemically synthesized
ugauccuguuucuugcucu

SEQ ID NO: 12114 - RNA, 19 nt, artificial
  Chemically synthesized
gguacugauccuguuucuu

SEQ ID NO: 12115 - RNA, 19 nt, artificial
  Chemically synthesized
gagaggaaaaguggaugga

SEQ ID NO: 12116 - RNA, 19 nt, artificial
  Chemically synthesized
ccuucugcuguauacugua

SEQ ID NO: 12117 - RNA, 19 nt, artificial
  Chemically synthesized
ccaaccugucuucucucug

SEQ ID NO: 12118 - RNA, 19 nt, artificial
  Chemically synthesized
uccaaccugucuucucucu

SEQ ID NO: 12119 - RNA, 19 nt, artificial
  Chemically synthesized
agcccuauuacuuguuugu

SEQ ID NO: 12120 - RNA, 19 nt, artificial
  Chemically synthesized
auauaauccugguguuauc

SEQ ID NO: 12121 - RNA, 19 nt, artificial
  Chemically synthesized
agacaacagaaccucagcu

SEQ ID NO: 12122 - RNA, 19 nt, artificial
  Chemically synthesized
ugaaaaagcugaugcuaau

SEQ ID NO: 12123 - RNA, 19 nt, artificial
  Chemically synthesized
ccaugcccuacacacucaa

SEQ ID NO: 12124 - RNA, 19 nt, artificial
  Chemically synthesized
uggagugugucuggaagca

SEQ ID NO: 12125 - RNA, 19 nt, artificial
  Chemically synthesized
ugagucaguugccaaaagg

SEQ ID NO: 12126 - RNA, 19 nt, artificial
  Chemically synthesized
gcugauagacuauaagauc

SEQ ID NO: 12127 - RNA, 19 nt, artificial
  Chemically synthesized
cuguuucugaaccauuacu

SEQ ID NO: 12128 - RNA, 19 nt, artificial
  Chemically synthesized
cugauccuguuucuugcuc

SEQ ID NO: 12129 - RNA, 19 nt, artificial
  Chemically synthesized
caguuuggaaguguuaacu

SEQ ID NO: 12130 - RNA, 19 nt, artificial
  Chemically synthesized
gggacauggugucuaagaa

SEQ ID NO: 12131 - RNA, 19 nt, artificial
  Chemically synthesized
gccagaaacaaaaagaaga

SEQ ID NO: 12132 - RNA, 19 nt, artificial
  Chemically synthesized
agaagggcaaugauaacug

SEQ ID NO: 12133 - RNA, 19 nt, artificial
  Chemically synthesized
cuauuuggguuugugccug

SEQ ID NO: 12134 - RNA, 19 nt, artificial
  Chemically synthesized
gaauggaaaaaagcugaag

SEQ ID NO: 12135 - RNA, 19 nt, artificial
  Chemically synthesized
gguaggguuaugagucagu

SEQ ID NO: 12136 - RNA, 19 nt, artificial
  Chemically synthesized
cucucaugguaggguuaug

SEQ ID NO: 12137 - RNA, 19 nt, artificial
  Chemically synthesized
ucucucucaugguaggguu

SEQ ID NO: 12138 - RNA, 19 nt, artificial
  Chemically synthesized
uuggcugcauguacacuau

SEQ ID NO: 12139 - RNA, 19 nt, artificial
  Chemically synthesized
gcccaaggaguaaguacaa

SEQ ID NO: 12140 - RNA, 19 nt, artificial
  Chemically synthesized
caggugaauggaggaguua

SEQ ID NO: 12141 - RNA, 19 nt, artificial
  Chemically synthesized
caaagcugaagaaaaugaa

SEQ ID NO: 12142 - RNA, 19 nt, artificial
  Chemically synthesized
cuucuuuccuuuucucucu

SEQ ID NO: 12143 - RNA, 19 nt, artificial
  Chemically synthesized
gaaacaaaaagaagagccu

SEQ ID NO: 12144 - RNA, 19 nt, artificial
  Chemically synthesized
cuaccuugaaccaguugag

SEQ ID NO: 12145 - RNA, 19 nt, artificial
  Chemically synthesized
aggaauggaaaaaagcuga

SEQ ID NO: 12146 - RNA, 19 nt, artificial
  Chemically synthesized
gaggaauggaaaaaagcug

SEQ ID NO: 12147 - RNA, 19 nt, artificial
  Chemically synthesized
cucucucaugguaggguua

SEQ ID NO: 12148 - RNA, 19 nt, artificial
  Chemically synthesized
ccuguuucugaaccauuac

SEQ ID NO: 12149 - RNA, 19 nt, artificial
  Chemically synthesized
gguguuauauaacauugcu

SEQ ID NO: 12150 - RNA, 19 nt, artificial
  Chemically synthesized
ugaaccauuacuguaauug

SEQ ID NO: 12151 - RNA, 19 nt, artificial
  Chemically synthesized
gccuccuaguuucuaccua

SEQ ID NO: 12152 - RNA, 19 nt, artificial
  Chemically synthesized
gaaaaagcugaugcuaaua

SEQ ID NO: 12153 - RNA, 19 nt, artificial
  Chemically synthesized
gcaguggcuuacuuccaac

SEQ ID NO: 12154 - RNA, 19 nt, artificial
  Chemically synthesized
ggcccaaggaguaaguaca

SEQ ID NO: 12155 - RNA, 19 nt, artificial
  Chemically synthesized
ugaagaaaaugaagcccua

SEQ ID NO: 12156 - RNA, 19 nt, artificial
  Chemically synthesized
cgguagucaugaagacuca

SEQ ID NO: 12157 - RNA, 19 nt, artificial
  Chemically synthesized
gaaggaggaauggaaaaaa

SEQ ID NO: 12158 - RNA, 19 nt, artificial
  Chemically synthesized
gagguguuauauaacauug

SEQ ID NO: 12159 - RNA, 19 nt, artificial
  Chemically synthesized
accagcugauagacuauaa

SEQ ID NO: 12160 - RNA, 19 nt, artificial
  Chemically synthesized
cuccuaguuucuaccuaau

SEQ ID NO: 12161 - RNA, 19 nt, artificial
  Chemically synthesized
cuguacauuuggugcacuu

SEQ ID NO: 12162 - RNA, 19 nt, artificial
  Chemically synthesized
gugaaaaagcugaugcuaa

SEQ ID NO: 12163 - RNA, 19 nt, artificial
  Chemically synthesized
ugagaacacagugggugac

SEQ ID NO: 12164 - RNA, 19 nt, artificial
  Chemically synthesized
ugaaaaacuacugccugac

SEQ ID NO: 12165 - RNA, 19 nt, artificial
  Chemically synthesized
cucugcuucuuuccuuuuc

SEQ ID NO: 12166 - RNA, 19 nt, artificial
  Chemically synthesized
agaaggaggaauggaaaaa

SEQ ID NO: 12167 - RNA, 19 nt, artificial
  Chemically synthesized
guuugccugugagguguua

SEQ ID NO: 12168 - RNA, 19 nt, artificial
  Chemically synthesized
ggcuaucaaagaccuuaaa

SEQ ID NO: 12169 - RNA, 19 nt, artificial
  Chemically synthesized
caaacuacaaagcugaaga

SEQ ID NO: 12170 - RNA, 19 nt, artificial
  Chemically synthesized
ggaccuggaguuucaggaa

SEQ ID NO: 12171 - RNA, 19 nt, artificial
  Chemically synthesized
ggacauggugucuaagaaa

SEQ ID NO: 12172 - RNA, 19 nt, artificial
  Chemically synthesized
uccgggacauggugucuaa

SEQ ID NO: 12173 - RNA, 19 nt, artificial
  Chemically synthesized
acacacucaaggugcacua

SEQ ID NO: 12174 - RNA, 19 nt, artificial
  Chemically synthesized
gcaacuaccuugaaccagu

SEQ ID NO: 12175 - RNA, 19 nt, artificial
  Chemically synthesized
uggaagcagaagcuauaug

SEQ ID NO: 12176 - RNA, 19 nt, artificial
  Chemically synthesized
cuggaagcagaagcuauau

SEQ ID NO: 12177 - RNA, 19 nt, artificial
  Chemically synthesized
ccaaaaucgacaaggcgau

SEQ ID NO: 12178 - RNA, 19 nt, artificial
  Chemically synthesized
agcccagacauuccaaaau

SEQ ID NO: 12179 - RNA, 19 nt, artificial
  Chemically synthesized
gcuucaacauuggcugcau

SEQ ID NO: 12180 - RNA, 19 nt, artificial
  Chemically synthesized
cuaguuucuaccuaaucau

SEQ ID NO: 12181 - RNA, 19 nt, artificial
  Chemically synthesized
uccuaguuucuaccuaauc

SEQ ID NO: 12182 - RNA, 19 nt, artificial
  Chemically synthesized
ccuagcaucuuacaaaaac

SEQ ID NO: 12183 - RNA, 19 nt, artificial
  Chemically synthesized
accuagcaucuuacaaaaa

SEQ ID NO: 12184 - RNA, 19 nt, artificial
  Chemically synthesized
cugugucauaccacaauaa

SEQ ID NO: 12185 - RNA, 19 nt, artificial
  Chemically synthesized
gaagaaaaugaagcccuau

SEQ ID NO: 12186 - RNA, 19 nt, artificial
  Chemically synthesized
ucacaaacuacaaagcuga

SEQ ID NO: 12187 - RNA, 19 nt, artificial
  Chemically synthesized
gggauauaauccugguguu

SEQ ID NO: 12188 - RNA, 19 nt, artificial
  Chemically synthesized
uccagaugaacccaaggaa

SEQ ID NO: 12189 - RNA, 19 nt, artificial
  Chemically synthesized
gccaggugaaaaacuacug

SEQ ID NO: 12190 - RNA, 19 nt, artificial
  Chemically synthesized
cgggacauggugucuaaga

SEQ ID NO: 12191 - RNA, 19 nt, artificial
  Chemically synthesized
cugcuucuuuccuuuucuc

SEQ ID NO: 12192 - RNA, 19 nt, artificial
  Chemically synthesized
ucuggaagcagaagcuaua

SEQ ID NO: 12193 - RNA, 19 nt, artificial
  Chemically synthesized
agguguuauauaacauugc

SEQ ID NO: 12194 - RNA, 19 nt, artificial
  Chemically synthesized
cuagcaucuuacaaaaaca

SEQ ID NO: 12195 - RNA, 19 nt, artificial
  Chemically synthesized
cuuuccuuuucucucucau

SEQ ID NO: 12196 - RNA, 19 nt, artificial
  Chemically synthesized
gcacuuuucugugucauac

SEQ ID NO: 12197 - RNA, 19 nt, artificial
  Chemically synthesized
gcuguguucacacuguaaa

SEQ ID NO: 12198 - RNA, 19 nt, artificial
  Chemically synthesized
ccugucuucucucugucuc

SEQ ID NO: 12199 - RNA, 19 nt, artificial
  Chemically synthesized
cugaagaaaaugaagcccu

SEQ ID NO: 12200 - RNA, 19 nt, artificial
  Chemically synthesized
acaaacuacaaagcugaag

SEQ ID NO: 12201 - RNA, 19 nt, artificial
  Chemically synthesized
cacaaacuacaaagcugaa

SEQ ID NO: 12202 - RNA, 19 nt, artificial
  Chemically synthesized
gcacucggagagaagucua

SEQ ID NO: 12203 - RNA, 19 nt, artificial
  Chemically synthesized
gacugcgcaacuacagauu

SEQ ID NO: 12204 - RNA, 19 nt, artificial
  Chemically synthesized
agacugcgcaacuacagau

SEQ ID NO: 12205 - RNA, 19 nt, artificial
  Chemically synthesized
ccaggugaaaaacuacugc

SEQ ID NO: 12206 - RNA, 19 nt, artificial
  Chemically synthesized
gcaacacugagaaguuauc

SEQ ID NO: 12207 - RNA, 19 nt, artificial
  Chemically synthesized
ucugcuucuuuccuuuucu

SEQ ID NO: 12208 - RNA, 19 nt, artificial
  Chemically synthesized
agaaggauuaccuaggcaa

SEQ ID NO: 12209 - RNA, 19 nt, artificial
  Chemically synthesized
caagaaggauuaccuaggc

SEQ ID NO: 12210 - RNA, 19 nt, artificial
  Chemically synthesized
gaagcuauaugagccagug

SEQ ID NO: 12211 - RNA, 19 nt, artificial
  Chemically synthesized
agaagcuauaugagccagu

SEQ ID NO: 12212 - RNA, 19 nt, artificial
  Chemically synthesized
gcagaagcuauaugagcca

SEQ ID NO: 12213 - RNA, 19 nt, artificial
  Chemically synthesized
gugagguguuauauaacau

SEQ ID NO: 12214 - RNA, 19 nt, artificial
  Chemically synthesized
ccggauuugcuucaacauu

SEQ ID NO: 12215 - RNA, 19 nt, artificial
  Chemically synthesized
cagcuguguucacacugua

SEQ ID NO: 12216 - RNA, 19 nt, artificial
  Chemically synthesized
cccuguuaaaauuuaaccu

SEQ ID NO: 12217 - RNA, 19 nt, artificial
  Chemically synthesized
cccuauuacuuguuuguaa

SEQ ID NO: 12218 - RNA, 19 nt, artificial
  Chemically synthesized
acagcaugaaggaugccug

SEQ ID NO: 12219 - RNA, 19 nt, artificial
  Chemically synthesized
guacacgguagucaugaag

SEQ ID NO: 12220 - RNA, 19 nt, artificial
  Chemically synthesized
aguacacgguagucaugaa

SEQ ID NO: 12221 - RNA, 19 nt, artificial
  Chemically synthesized
agacaguuucucuggguuu

SEQ ID NO: 12222 - RNA, 19 nt, artificial
  Chemically synthesized
agcuggccaagaaggauua

SEQ ID NO: 12223 - RNA, 19 nt, artificial
  Chemically synthesized
uugcuuucauguaugccaa

SEQ ID NO: 12224 - RNA, 19 nt, artificial
  Chemically synthesized
ccagcugauagacuauaag

SEQ ID NO: 12225 - RNA, 19 nt, artificial
  Chemically synthesized
aaccagcugauagacuaua

SEQ ID NO: 12226 - RNA, 19 nt, artificial
  Chemically synthesized
ucugugucauaccacaaua

SEQ ID NO: 12227 - RNA, 19 nt, artificial
  Chemically synthesized
gugcacuuuucugugucau

SEQ ID NO: 12228 - RNA, 19 nt, artificial
  Chemically synthesized
guacauuuggugcacuuuu

SEQ ID NO: 12229 - RNA, 19 nt, artificial
  Chemically synthesized
cucuuggccuccuaguuuc

SEQ ID NO: 12230 - RNA, 19 nt, artificial
  Chemically synthesized
uccagguacugauccuguu

SEQ ID NO: 12231 - RNA, 19 nt, artificial
  Chemically synthesized
ucuuuccuuuucucucuca

SEQ ID NO: 12232 - RNA, 19 nt, artificial
  Chemically synthesized
gaccuggaguuucaggaag

SEQ ID NO: 12233 - RNA, 19 nt, artificial
  Chemically synthesized
agaaccucagcuuaagaaa

SEQ ID NO: 12234 - RNA, 19 nt, artificial
  Chemically synthesized
agaacacagugggugacca

SEQ ID NO: 12235 - RNA, 19 nt, artificial
  Chemically synthesized
uggugucuaagaaacugga

SEQ ID NO: 12236 - RNA, 19 nt, artificial
  Chemically synthesized
gguuugugccugagacaaa

SEQ ID NO: 12237 - RNA, 19 nt, artificial
  Chemically synthesized
cugaugcauuugcaacacu

SEQ ID NO: 12238 - RNA, 19 nt, artificial
  Chemically synthesized
ggcucaccgugugcuauuu

SEQ ID NO: 12239 - RNA, 19 nt, artificial
  Chemically synthesized
ccugaugcauuugcaacac

SEQ ID NO: 12240 - RNA, 19 nt, artificial
  Chemically synthesized
ggccaagaaggauuaccua

SEQ ID NO: 12241 - RNA, 19 nt, artificial
  Chemically synthesized
ugagagacaaguggcucag

SEQ ID NO: 12242 - RNA, 19 nt, artificial
  Chemically synthesized
gacauuuccugaugcauuu

SEQ ID NO: 12243 - RNA, 19 nt, artificial
  Chemically synthesized
ggacauuuccugaugcauu

SEQ ID NO: 12244 - RNA, 19 nt, artificial
  Chemically synthesized
gcccagacauuccaaaauc

SEQ ID NO: 12245 - RNA, 19 nt, artificial
  Chemically synthesized
gaagucugagcccagacau

SEQ ID NO: 12246 - RNA, 19 nt, artificial
  Chemically synthesized
caguuagcauuggccacga

SEQ ID NO: 12247 - RNA, 19 nt, artificial
  Chemically synthesized
gccugugagguguuauaua

SEQ ID NO: 12248 - RNA, 19 nt, artificial
  Chemically synthesized
gaaauaugauuuggcuauc

SEQ ID NO: 12249 - RNA, 19 nt, artificial
  Chemically synthesized
caacgagggaugcucuacu

SEQ ID NO: 12250 - RNA, 19 nt, artificial
  Chemically synthesized
gaaguaaccuuauagguua

SEQ ID NO: 12251 - RNA, 19 nt, artificial
  Chemically synthesized
ucugaaccauuacuguaau

SEQ ID NO: 12252 - RNA, 19 nt, artificial
  Chemically synthesized
gugucauaccacaauaaaa

SEQ ID NO: 12253 - RNA, 19 nt, artificial
  Chemically synthesized
cucucuuggccuccuaguu

SEQ ID NO: 12254 - RNA, 19 nt, artificial
  Chemically synthesized
ugaagcccuauuacuuguu

SEQ ID NO: 12255 - RNA, 19 nt, artificial
  Chemically synthesized
gcacucuucaguuaugagg

SEQ ID NO: 12256 - RNA, 19 nt, artificial
  Chemically synthesized
cugaugcuaauaaccagac

SEQ ID NO: 12257 - RNA, 19 nt, artificial
  Chemically synthesized
gcugaugcuaauaaccaga

SEQ ID NO: 12258 - RNA, 19 nt, artificial
  Chemically synthesized
ccuuucagaagacagcaug

SEQ ID NO: 12259 - RNA, 19 nt, artificial
  Chemically synthesized
uugcaacacugagaaguua

SEQ ID NO: 12260 - RNA, 19 nt, artificial
  Chemically synthesized
ugagacaaaagaagagcuc

SEQ ID NO: 12261 - RNA, 19 nt, artificial
  Chemically synthesized
ugaugcauuugcaacacug

SEQ ID NO: 12262 - RNA, 19 nt, artificial
  Chemically synthesized
gugucuggaagcagaagcu

SEQ ID NO: 12263 - RNA, 19 nt, artificial
  Chemically synthesized
ccagacauuccaaaaucga

SEQ ID NO: 12264 - RNA, 19 nt, artificial
  Chemically synthesized
ugccugugagguguuauau

SEQ ID NO: 12265 - RNA, 19 nt, artificial
  Chemically synthesized
ggcuccaguucaagcuguu

SEQ ID NO: 12266 - RNA, 19 nt, artificial
  Chemically synthesized
agccuugauucagcuucga

SEQ ID NO: 12267 - RNA, 19 nt, artificial
  Chemically synthesized
agaccuuaaagaagccuug

SEQ ID NO: 12268 - RNA, 19 nt, artificial
  Chemically synthesized
ugcucuacuaccagacaga

SEQ ID NO: 12269 - RNA, 19 nt, artificial
  Chemically synthesized
ccuuuaccagaagcauuaa

SEQ ID NO: 12270 - RNA, 19 nt, artificial
  Chemically synthesized
cuauccugaagaacaugac

SEQ ID NO: 12271 - RNA, 19 nt, artificial
  Chemically synthesized
accuuauagguuacucaua

SEQ ID NO: 12272 - RNA, 19 nt, artificial
  Chemically synthesized
uucugugucauaccacaau

SEQ ID NO: 12273 - RNA, 19 nt, artificial
  Chemically synthesized
ugcacuuuucugugucaua

SEQ ID NO: 12274 - RNA, 19 nt, artificial
  Chemically synthesized
ggugcacuuuucuguguca

SEQ ID NO: 12275 - RNA, 19 nt, artificial
  Chemically synthesized
ccagcuguguucacacugu

SEQ ID NO: 12276 - RNA, 19 nt, artificial
  Chemically synthesized
cuaggauguuucacaaacu

SEQ ID NO: 12277 - RNA, 19 nt, artificial
  Chemically synthesized
cccagaaagugaacaccuu

SEQ ID NO: 12278 - RNA, 19 nt, artificial
  Chemically synthesized
uguuaucaaaggugaauga

SEQ ID NO: 12279 - RNA, 19 nt, artificial
  Chemically synthesized
ggauauaauccugguguua

SEQ ID NO: 12280 - RNA, 19 nt, artificial
  Chemically synthesized
ggcacucuucaguuaugag

SEQ ID NO: 12281 - RNA, 19 nt, artificial
  Chemically synthesized
agcugaugcuaauaaccag

SEQ ID NO: 12282 - RNA, 19 nt, artificial
  Chemically synthesized
accaaggcuuuccagauga

SEQ ID NO: 12283 - RNA, 19 nt, artificial
  Chemically synthesized
gacauggugucuaagaaac

SEQ ID NO: 12284 - RNA, 19 nt, artificial
  Chemically synthesized
gcacuacaaguacacggua

SEQ ID NO: 12285 - RNA, 19 nt, artificial
  Chemically synthesized
ccuacacacucaaggugca

SEQ ID NO: 12286 - RNA, 19 nt, artificial
  Chemically synthesized
gcuccuccuaguuccaaag

SEQ ID NO: 12287 - RNA, 19 nt, artificial
  Chemically synthesized
ugcaacacugagaaguuau

SEQ ID NO: 12288 - RNA, 19 nt, artificial
  Chemically synthesized
aagacaguuucucuggguu

SEQ ID NO: 12289 - RNA, 19 nt, artificial
  Chemically synthesized
ccaagaaggauuaccuagg

SEQ ID NO: 12290 - RNA, 19 nt, artificial
  Chemically synthesized
ccaaaugagagacaagugg

SEQ ID NO: 12291 - RNA, 19 nt, artificial
  Chemically synthesized
aaaagcugaagaacaguua

SEQ ID NO: 12292 - RNA, 19 nt, artificial
  Chemically synthesized
uuaugagucaguugccaaa

SEQ ID NO: 12293 - RNA, 19 nt, artificial
  Chemically synthesized
uugccugugagguguuaua

SEQ ID NO: 12294 - RNA, 19 nt, artificial
  Chemically synthesized
gccuugauucagcuucgag

SEQ ID NO: 12295 - RNA, 19 nt, artificial
  Chemically synthesized
ugugucauaccacaauaaa

SEQ ID NO: 12296 - RNA, 19 nt, artificial
  Chemically synthesized
agcuguguucacacuguaa

SEQ ID NO: 12297 - RNA, 19 nt, artificial
  Chemically synthesized
ccagguacugauccuguuu

SEQ ID NO: 12298 - RNA, 19 nt, artificial
  Chemically synthesized
agacgcuccaaccugucuu

SEQ ID NO: 12299 - RNA, 19 nt, artificial
  Chemically synthesized
ucaguuaugaggcuaccca

SEQ ID NO: 12300 - RNA, 19 nt, artificial
  Chemically synthesized
ugaccaaggcuuuccagau

SEQ ID NO: 12301 - RNA, 19 nt, artificial
  Chemically synthesized
uccggcuggaacacacuaa

SEQ ID NO: 12302 - RNA, 19 nt, artificial
  Chemically synthesized
agccuaaggaagugaagcu

SEQ ID NO: 12303 - RNA, 19 nt, artificial
  Chemically synthesized
ccuugaaccaguugagcug

SEQ ID NO: 12304 - RNA, 19 nt, artificial
  Chemically synthesized
caagacaguuucucugggu

SEQ ID NO: 12305 - RNA, 19 nt, artificial
  Chemically synthesized
uccugaugcauuugcaaca

SEQ ID NO: 12306 - RNA, 19 nt, artificial
  Chemically synthesized
ggaucaagacaguuucucu

SEQ ID NO: 12307 - RNA, 19 nt, artificial
  Chemically synthesized
agagacaaguggcucagcu

SEQ ID NO: 12308 - RNA, 19 nt, artificial
  Chemically synthesized
cugaagaacaguuagcauu

SEQ ID NO: 12309 - RNA, 19 nt, artificial
  Chemically synthesized
aaaaagcugaagaacaguu

SEQ ID NO: 12310 - RNA, 19 nt, artificial
  Chemically synthesized
cuuucauguaugccaagaa

SEQ ID NO: 12311 - RNA, 19 nt, artificial
  Chemically synthesized
acauugcuuucauguaugc

SEQ ID NO: 12312 - RNA, 19 nt, artificial
  Chemically synthesized
ugugagguguuauauaaca

SEQ ID NO: 12313 - RNA, 19 nt, artificial
  Chemically synthesized
cuccaguucaagcuguuug

SEQ ID NO: 12314 - RNA, 19 nt, artificial
  Chemically synthesized
gaaccagcugauagacuau

SEQ ID NO: 12315 - RNA, 19 nt, artificial
  Chemically synthesized
gaagccuugauucagcuuc

SEQ ID NO: 12316 - RNA, 19 nt, artificial
  Chemically synthesized
agaagccuugauucagcuu

SEQ ID NO: 12317 - RNA, 19 nt, artificial
  Chemically synthesized
ggaugcucuacuaccagac

SEQ ID NO: 12318 - RNA, 19 nt, artificial
  Chemically synthesized
gggaugcucuacuaccaga

SEQ ID NO: 12319 - RNA, 19 nt, artificial
  Chemically synthesized
guggcuuacuuccaacgag

SEQ ID NO: 12320 - RNA, 19 nt, artificial
  Chemically synthesized
ugcuucaacauuggcugca

SEQ ID NO: 12321 - RNA, 19 nt, artificial
  Chemically synthesized
cuuauagguuacucauaag

SEQ ID NO: 12322 - RNA, 19 nt, artificial
  Chemically synthesized
aggcuugaaguaaccuuau

SEQ ID NO: 12323 - RNA, 19 nt, artificial
  Chemically synthesized
uucugaaccauuacuguaa

SEQ ID NO: 12324 - RNA, 19 nt, artificial
  Chemically synthesized
gcaucuuacaaaaacaaga

SEQ ID NO: 12325 - RNA, 19 nt, artificial
  Chemically synthesized
gcuguacauuuggugcacu

SEQ ID NO: 12326 - RNA, 19 nt, artificial
  Chemically synthesized
uacugagacauuacaguuu

SEQ ID NO: 12327 - RNA, 19 nt, artificial
  Chemically synthesized
guaagauuuagcacccuuc

SEQ ID NO: 12328 - RNA, 19 nt, artificial
  Chemically synthesized
uaggauguuucacaaacua

SEQ ID NO: 12329 - RNA, 19 nt, artificial
  Chemically synthesized
caguuaugaggcuacccaa

SEQ ID NO: 12330 - RNA, 19 nt, artificial
  Chemically synthesized
cuacucaucuggcccagaa

SEQ ID NO: 12331 - RNA, 19 nt, artificial
  Chemically synthesized
acgguagucaugaagacuc

SEQ ID NO: 12332 - RNA, 19 nt, artificial
  Chemically synthesized
acacgguagucaugaagac

SEQ ID NO: 12333 - RNA, 19 nt, artificial
  Chemically synthesized
ggcaaugauaacugggcca

SEQ ID NO: 12334 - RNA, 19 nt, artificial
  Chemically synthesized
ugcauuugcaacacugaga

SEQ ID NO: 12335 - RNA, 19 nt, artificial
  Chemically synthesized
gugccugagacaaaagaag

SEQ ID NO: 12336 - RNA, 19 nt, artificial
  Chemically synthesized
agcuauaugagccaguggu

SEQ ID NO: 12337 - RNA, 19 nt, artificial
  Chemically synthesized
gggacauuuccugaugcau

SEQ ID NO: 12338 - RNA, 19 nt, artificial
  Chemically synthesized
ugaagucugagcccagaca

SEQ ID NO: 12339 - RNA, 19 nt, artificial
  Chemically synthesized
agcugaagaacaguuagca

SEQ ID NO: 12340 - RNA, 19 nt, artificial
  Chemically synthesized
gcuuucauguaugccaaga

SEQ ID NO: 12341 - RNA, 19 nt, artificial
  Chemically synthesized
ucaacauuggcugcaugua

SEQ ID NO: 12342 - RNA, 19 nt, artificial
  Chemically synthesized
cccggauuugcuucaacau

SEQ ID NO: 12343 - RNA, 19 nt, artificial
  Chemically synthesized
guacccaggaugauuuccu

SEQ ID NO: 12344 - RNA, 19 nt, artificial
  Chemically synthesized
acugagacauuacaguuug

SEQ ID NO: 12345 - RNA, 19 nt, artificial
  Chemically synthesized
guacugagacauuacaguu

SEQ ID NO: 12346 - RNA, 19 nt, artificial
  Chemically synthesized
cugcgcaacuacagauuug

SEQ ID NO: 12347 - RNA, 19 nt, artificial
  Chemically synthesized
uccugguguuaucaaaggu

SEQ ID NO: 12348 - RNA, 19 nt, artificial
  Chemically synthesized
ccucagcuuaagaaaggca

SEQ ID NO: 12349 - RNA, 19 nt, artificial
  Chemically synthesized
gaagcucaguguucccaug

SEQ ID NO: 12350 - RNA, 19 nt, artificial
  Chemically synthesized
ggguuugugccugagacaa

SEQ ID NO: 12351 - RNA, 19 nt, artificial
  Chemically synthesized
uggaucaagacaguuucuc

SEQ ID NO: 12352 - RNA, 19 nt, artificial
  Chemically synthesized
gccaagaaggauuaccuag

SEQ ID NO: 12353 - RNA, 19 nt, artificial
  Chemically synthesized
uggccaagaaggauuaccu

SEQ ID NO: 12354 - RNA, 19 nt, artificial
  Chemically synthesized
ugagcccagacauuccaaa

SEQ ID NO: 12355 - RNA, 19 nt, artificial
  Chemically synthesized
ggccuuuaccagaagcauu

SEQ ID NO: 12356 - RNA, 19 nt, artificial
  Chemically synthesized
guaaccuuauagguuacuc

SEQ ID NO: 12357 - RNA, 19 nt, artificial
  Chemically synthesized
ugaaguaaccuuauagguu

SEQ ID NO: 12358 - RNA, 19 nt, artificial
  Chemically synthesized
uggugcacuuuucuguguc

SEQ ID NO: 12359 - RNA, 19 nt, artificial
  Chemically synthesized
uguucacacuguaaacauu

SEQ ID NO: 12360 - RNA, 19 nt, artificial
  Chemically synthesized
agguacugauccuguuucu

SEQ ID NO: 12361 - RNA, 19 nt, artificial
  Chemically synthesized
uuagcacccuucugcugua

SEQ ID NO: 12362 - RNA, 19 nt, artificial
  Chemically synthesized
ccauucuacucaucuggcc

SEQ ID NO: 12363 - RNA, 19 nt, artificial
  Chemically synthesized
ugaagcucaguguucccau

SEQ ID NO: 12364 - RNA, 19 nt, artificial
  Chemically synthesized
cuaaggaagugaagcucag

SEQ ID NO: 12365 - RNA, 19 nt, artificial
  Chemically synthesized
ggcuuguucccugcaacua

SEQ ID NO: 12366 - RNA, 19 nt, artificial
  Chemically synthesized
aggcucaccgugugcuauu

SEQ ID NO: 12367 - RNA, 19 nt, artificial
  Chemically synthesized
agacauuccaaaaucgaca

SEQ ID NO: 12368 - RNA, 19 nt, artificial
  Chemically synthesized
cccagacauuccaaaaucg

SEQ ID NO: 12369 - RNA, 19 nt, artificial
  Chemically synthesized
gcugaagaacaguuagcau

SEQ ID NO: 12370 - RNA, 19 nt, artificial
  Chemically synthesized
ugauagacuauaagauccu

SEQ ID NO: 12371 - RNA, 19 nt, artificial
  Chemically synthesized
aaggcuugaaguaaccuua

SEQ ID NO: 12372 - RNA, 19 nt, artificial
  Chemically synthesized
uaaggcuugaaguaaccuu

SEQ ID NO: 12373 - RNA, 19 nt, artificial
  Chemically synthesized
ccauuacuguaauuggcuc

SEQ ID NO: 12374 - RNA, 19 nt, artificial
  Chemically synthesized
agcuguacauuuggugcac

SEQ ID NO: 12375 - RNA, 19 nt, artificial
  Chemically synthesized
guguucacacuguaaacau

SEQ ID NO: 12376 - RNA, 19 nt, artificial
  Chemically synthesized
cagguacugauccuguuuc

SEQ ID NO: 12377 - RNA, 19 nt, artificial
  Chemically synthesized
gagucuuccagguacugau

SEQ ID NO: 12378 - RNA, 19 nt, artificial
  Chemically synthesized
ccuauuacuuguuuguaag

SEQ ID NO: 12379 - RNA, 19 nt, artificial
  Chemically synthesized
gucuaagaaacuggagcuc

SEQ ID NO: 12380 - RNA, 19 nt, artificial
  Chemically synthesized
cacuacaaguacacgguag

SEQ ID NO: 12381 - RNA, 19 nt, artificial
  Chemically synthesized
ugcacuacaaguacacggu

SEQ ID NO: 12382 - RNA, 19 nt, artificial
  Chemically synthesized
aggugcacuacaaguacac

SEQ ID NO: 12383 - RNA, 19 nt, artificial
  Chemically synthesized
ucaguguucccaugcccua

SEQ ID NO: 12384 - RNA, 19 nt, artificial
  Chemically synthesized
caacuaccuugaaccaguu

SEQ ID NO: 12385 - RNA, 19 nt, artificial
  Chemically synthesized
guuugugccugagacaaaa

SEQ ID NO: 12386 - RNA, 19 nt, artificial
  Chemically synthesized
gagcccagacauuccaaaa

SEQ ID NO: 12387 - RNA, 19 nt, artificial
  Chemically synthesized
gaaaaaagcugaagaacag

SEQ ID NO: 12388 - RNA, 19 nt, artificial
  Chemically synthesized
caagcuguuugccugugag

SEQ ID NO: 12389 - RNA, 19 nt, artificial
  Chemically synthesized
ucuacuaccagacagagaa

SEQ ID NO: 12390 - RNA, 19 nt, artificial
  Chemically synthesized
gaagcagagaaggccuuua

SEQ ID NO: 12391 - RNA, 19 nt, artificial
  Chemically synthesized
agccagcuguguucacacu

SEQ ID NO: 12392 - RNA, 19 nt, artificial
  Chemically synthesized
cuagcuagccagcuguguu

SEQ ID NO: 12393 - RNA, 19 nt, artificial
  Chemically synthesized
ugacucuguggugugagaa

SEQ ID NO: 12394 - RNA, 19 nt, artificial
  Chemically synthesized
gagugugucuggaagcaga

SEQ ID NO: 12395 - RNA, 19 nt, artificial
  Chemically synthesized
gguuaugagucaguugcca

SEQ ID NO: 12396 - RNA, 19 nt, artificial
  Chemically synthesized
gcuccaguucaagcuguuu

SEQ ID NO: 12397 - RNA, 19 nt, artificial
  Chemically synthesized
cugaagcagagaaggccuu

SEQ ID NO: 12398 - RNA, 19 nt, artificial
  Chemically synthesized
uguaagauuuagcacccuu

SEQ ID NO: 12399 - RNA, 19 nt, artificial
  Chemically synthesized
ccagaaagugaacaccuug

SEQ ID NO: 12400 - RNA, 19 nt, artificial
  Chemically synthesized
gcccagaaagugaacaccu

SEQ ID NO: 12401 - RNA, 19 nt, artificial
  Chemically synthesized
uggcccagaaagugaacac

SEQ ID NO: 12402 - RNA, 19 nt, artificial
  Chemically synthesized
gccaagaaggaggaaugga

SEQ ID NO: 12403 - RNA, 19 nt, artificial
  Chemically synthesized
agcacccuucugcuguaua

SEQ ID NO: 12404 - RNA, 19 nt, artificial
  Chemically synthesized
cagcuggccaagaaggauu

SEQ ID NO: 12405 - RNA, 19 nt, artificial
  Chemically synthesized
aggccuuuaccagaagcau

SEQ ID NO: 12406 - RNA, 19 nt, artificial
  Chemically synthesized
cuagccagcuguguucaca

SEQ ID NO: 12407 - RNA, 19 nt, artificial
  Chemically synthesized
ugcucugagugcuagcuag

SEQ ID NO: 12408 - RNA, 19 nt, artificial
  Chemically synthesized
uggcuaucaaagaccuuaa

SEQ ID NO: 12409 - RNA, 19 nt, artificial
  Chemically synthesized
uagcacccuucugcuguau

SEQ ID NO: 12410 - RNA, 19 nt, artificial
  Chemically synthesized
gcuuaagaaaggcagccaa

SEQ ID NO: 12411 - RNA, 19 nt, artificial
  Chemically synthesized
cugacucuguggugugaga

SEQ ID NO: 12412 - RNA, 19 nt, artificial
  Chemically synthesized
ugauuuggcuaucaaagac

SEQ ID NO: 12413 - RNA, 19 nt, artificial
  Chemically synthesized
agaaggccuuuaccagaag

SEQ ID NO: 12414 - RNA, 19 nt, artificial
  Chemically synthesized
ggucaugccagggaacauu

SEQ ID NO: 12415 - RNA, 19 nt, artificial
  Chemically synthesized
agcuuaagaaaggcagcca

SEQ ID NO: 12416 - RNA, 19 nt, artificial
  Chemically synthesized
guucaagguaguugcaggg

SEQ ID NO: 12417 - RNA, 19 nt, artificial
  Chemically synthesized
aucagcuuuuucacuuucc

SEQ ID NO: 12418 - RNA, 19 nt, artificial
  Chemically synthesized
ucaggcaguaguuuuucac

SEQ ID NO: 12419 - RNA, 19 nt, artificial
  Chemically synthesized
uucucaguguugcaaaugc

SEQ ID NO: 12420 - RNA, 19 nt, artificial
  Chemically synthesized
uuaugaguaaccuauaagg

SEQ ID NO: 12421 - RNA, 19 nt, artificial
  Chemically synthesized
auuuguacuuacuccuugg

SEQ ID NO: 12422 - RNA, 19 nt, artificial
  Chemically synthesized
auucuucauucaccuuuga

SEQ ID NO: 12423 - RNA, 19 nt, artificial
  Chemically synthesized
uuuuucacuuuccuugggu

SEQ ID NO: 12424 - RNA, 19 nt, artificial
  Chemically synthesized
agucaggcaguaguuuuuc

SEQ ID NO: 12425 - RNA, 19 nt, artificial
  Chemically synthesized
aaucaaggcuucuuuaagg

SEQ ID NO: 12426 - RNA, 19 nt, artificial
  Chemically synthesized
uuccaaaucuguaguugcg

SEQ ID NO: 12427 - RNA, 19 nt, artificial
  Chemically synthesized
ucuucaacaaaaacuuugg

SEQ ID NO: 12428 - RNA, 19 nt, artificial
  Chemically synthesized
uuggguucaucuggaaagc

SEQ ID NO: 12429 - RNA, 19 nt, artificial
  Chemically synthesized
aggcaguaguuuuucaccu

SEQ ID NO: 12430 - RNA, 19 nt, artificial
  Chemically synthesized
uucaagguaguugcaggga

SEQ ID NO: 12431 - RNA, 19 nt, artificial
  Chemically synthesized
uucugcccguugaacauga

SEQ ID NO: 12432 - RNA, 19 nt, artificial
  Chemically synthesized
aucaaggcuucuuuaaggu

SEQ ID NO: 12433 - RNA, 19 nt, artificial
  Chemically synthesized
aucauauuucucugucugg

SEQ ID NO: 12434 - RNA, 19 nt, artificial
  Chemically synthesized
uucuucaggauaguguaca

SEQ ID NO: 12435 - RNA, 19 nt, artificial
  Chemically synthesized
auucaccuuugauaacacc

SEQ ID NO: 12436 - RNA, 19 nt, artificial
  Chemically synthesized
ugucugguuauuagcauca

SEQ ID NO: 12437 - RNA, 19 nt, artificial
  Chemically synthesized
cuuuuucacuuuccuuggg

SEQ ID NO: 12438 - RNA, 19 nt, artificial
  Chemically synthesized
aguaguuuuucaccuggcc

SEQ ID NO: 12439 - RNA, 19 nt, artificial
  Chemically synthesized
uaagauaacuucucagugu

SEQ ID NO: 12440 - RNA, 19 nt, artificial
  Chemically synthesized
uucaagacaaagacaaugu

SEQ ID NO: 12441 - RNA, 19 nt, artificial
  Chemically synthesized
uugucucucauuuggucga

SEQ ID NO: 12442 - RNA, 19 nt, artificial
  Chemically synthesized
ggauaguguacaugcagcc

SEQ ID NO: 12443 - RNA, 19 nt, artificial
  Chemically synthesized
uuccaguccuucuuguccg

SEQ ID NO: 12444 - RNA, 19 nt, artificial
  Chemically synthesized
auaugccuuaugaguaacc

SEQ ID NO: 12445 - RNA, 19 nt, artificial
  Chemically synthesized
augaauguuuacaguguga

SEQ ID NO: 12446 - RNA, 19 nt, artificial
  Chemically synthesized
uacucacaucauugucuag

SEQ ID NO: 12447 - RNA, 19 nt, artificial
  Chemically synthesized
uaauagggcuucauuuucu

SEQ ID NO: 12448 - RNA, 19 nt, artificial
  Chemically synthesized
cuucaacaaaaacuuuggg

SEQ ID NO: 12449 - RNA, 19 nt, artificial
  Chemically synthesized
auaacugaagagugccucc

SEQ ID NO: 12450 - RNA, 19 nt, artificial
  Chemically synthesized
cauccuucaugcugucuuc

SEQ ID NO: 12451 - RNA, 19 nt, artificial
  Chemically synthesized
uuguagugcaccuugagug

SEQ ID NO: 12452 - RNA, 19 nt, artificial
  Chemically synthesized
uggagcucuucuuuugucu

SEQ ID NO: 12453 - RNA, 19 nt, artificial
  Chemically synthesized
cuugucucucauuuggucg

SEQ ID NO: 12454 - RNA, 19 nt, artificial
  Chemically synthesized
uucccucgaagcugaauca

SEQ ID NO: 12455 - RNA, 19 nt, artificial
  Chemically synthesized
aaucauauuucucugucug

SEQ ID NO: 12456 - RNA, 19 nt, artificial
  Chemically synthesized
uugucucgguuaaugcuuc

SEQ ID NO: 12457 - RNA, 19 nt, artificial
  Chemically synthesized
aggauaguguacaugcagc

SEQ ID NO: 12458 - RNA, 19 nt, artificial
  Chemically synthesized
uaugccuuaugaguaaccu

SEQ ID NO: 12459 - RNA, 19 nt, artificial
  Chemically synthesized
auccuggguacucacauca

SEQ ID NO: 12460 - RNA, 19 nt, artificial
  Chemically synthesized
augucucaguacaguauac

SEQ ID NO: 12461 - RNA, 19 nt, artificial
  Chemically synthesized
uugucugguuauuagcauc

SEQ ID NO: 12462 - RNA, 19 nt, artificial
  Chemically synthesized
cucuucuuuugucucaggc

SEQ ID NO: 12463 - RNA, 19 nt, artificial
  Chemically synthesized
agccaaaucauauuucucu

SEQ ID NO: 12464 - RNA, 19 nt, artificial
  Chemically synthesized
ucucgguuaaugcuucugg

SEQ ID NO: 12465 - RNA, 19 nt, artificial
  Chemically synthesized
agguagaaacuaggaggcc

SEQ ID NO: 12466 - RNA, 19 nt, artificial
  Chemically synthesized
auguacagcuugaugaaug

SEQ ID NO: 12467 - RNA, 19 nt, artificial
  Chemically synthesized
ugaugaauguuuacagugu

SEQ ID NO: 12468 - RNA, 19 nt, artificial
  Chemically synthesized
uggguacucacaucauugu

SEQ ID NO: 12469 - RNA, 19 nt, artificial
  Chemically synthesized
aucauugucuaguagguua

SEQ ID NO: 12470 - RNA, 19 nt, artificial
  Chemically synthesized
uguaguuugugaaacaucc

SEQ ID NO: 12471 - RNA, 19 nt, artificial
  Chemically synthesized
auccuagacuucucuccga

SEQ ID NO: 12472 - RNA, 19 nt, artificial
  Chemically synthesized
ucauaacugaagagugccu

SEQ ID NO: 12473 - RNA, 19 nt, artificial
  Chemically synthesized
agcuuuuucacuuuccuug

SEQ ID NO: 12474 - RNA, 19 nt, artificial
  Chemically synthesized
uucacuuuccuuggguuca

SEQ ID NO: 12475 - RNA, 19 nt, artificial
  Chemically synthesized
cuuaggcucuucuuuuugu

SEQ ID NO: 12476 - RNA, 19 nt, artificial
  Chemically synthesized
uuaggcucuucuuuuuguu

SEQ ID NO: 12477 - RNA, 19 nt, artificial
  Chemically synthesized
uucuuuuuguuucuggccu

SEQ ID NO: 12478 - RNA, 19 nt, artificial
  Chemically synthesized
uuuggaacuaggaggagcu

SEQ ID NO: 12479 - RNA, 19 nt, artificial
  Chemically synthesized
accuggagcucuucuuuug

SEQ ID NO: 12480 - RNA, 19 nt, artificial
  Chemically synthesized
aaacccaaauagcacacgg

SEQ ID NO: 12481 - RNA, 19 nt, artificial
  Chemically synthesized
aaacugucuugauccacca

SEQ ID NO: 12482 - RNA, 19 nt, artificial
  Chemically synthesized
uucagcuuuuuuccauucc

SEQ ID NO: 12483 - RNA, 19 nt, artificial
  Chemically synthesized
aaaggaaagaagcagagag

SEQ ID NO: 12484 - RNA, 19 nt, artificial
  Chemically synthesized
caaaucauauuucucuguc

SEQ ID NO: 12485 - RNA, 19 nt, artificial
  Chemically synthesized
auauuucucugucugguag

SEQ ID NO: 12486 - RNA, 19 nt, artificial
  Chemically synthesized
ugcuugucucgguuaaugc

SEQ ID NO: 12487 - RNA, 19 nt, artificial
  Chemically synthesized
ucaggauaguguacaugca

SEQ ID NO: 12488 - RNA, 19 nt, artificial
  Chemically synthesized
uugggugucuuguuuuugu

SEQ ID NO: 12489 - RNA, 19 nt, artificial
  Chemically synthesized
uguacagcuugaugaaugu

SEQ ID NO: 12490 - RNA, 19 nt, artificial
  Chemically synthesized
uugaugaauguuuacagug

SEQ ID NO: 12491 - RNA, 19 nt, artificial
  Chemically synthesized
ucacaucauugucuaguag

SEQ ID NO: 12492 - RNA, 19 nt, artificial
  Chemically synthesized
ucauuuucuucagcuuugu

SEQ ID NO: 12493 - RNA, 19 nt, artificial
  Chemically synthesized
gucuucaacaaaaacuuug

SEQ ID NO: 12494 - RNA, 19 nt, artificial
  Chemically synthesized
cauucaccuuugauaacac

SEQ ID NO: 12495 - RNA, 19 nt, artificial
  Chemically synthesized
uagccucauaacugaagag

SEQ ID NO: 12496 - RNA, 19 nt, artificial
  Chemically synthesized
agcuuaguguguuccagcc

SEQ ID NO: 12497 - RNA, 19 nt, artificial
  Chemically synthesized
uuaagauaacuucucagug

SEQ ID NO: 12498 - RNA, 19 nt, artificial
  Chemically synthesized
gagcuucacuuccuuaggc

SEQ ID NO: 12499 - RNA, 19 nt, artificial
  Chemically synthesized
ucacuuccuuaggcucuuc

SEQ ID NO: 12500 - RNA, 19 nt, artificial
  Chemically synthesized
cacuuccuuaggcucuucu

SEQ ID NO: 12501 - RNA, 19 nt, artificial
  Chemically synthesized
cuuuuuguuucuggccugg

SEQ ID NO: 12502 - RNA, 19 nt, artificial
  Chemically synthesized
cuggagcucuucuuuuguc

SEQ ID NO: 12503 - RNA, 19 nt, artificial
  Chemically synthesized
uugauccaccacagaugcc

SEQ ID NO: 12504 - RNA, 19 nt, artificial
  Chemically synthesized
acuugucucucauuugguc

SEQ ID NO: 12505 - RNA, 19 nt, artificial
  Chemically synthesized
cucauuuggucgaaacagc

SEQ ID NO: 12506 - RNA, 19 nt, artificial
  Chemically synthesized
uugucgauuuuggaauguc

SEQ ID NO: 12507 - RNA, 19 nt, artificial
  Chemically synthesized
aaggaaagaagcagagaga

SEQ ID NO: 12508 - RNA, 19 nt, artificial
  Chemically synthesized
uuuguauaugccuuaugag

SEQ ID NO: 12509 - RNA, 19 nt, artificial
  Chemically synthesized
uauaugccuuaugaguaac

SEQ ID NO: 12510 - RNA, 19 nt, artificial
  Chemically synthesized
gaugaauguuuacagugug

SEQ ID NO: 12511 - RNA, 19 nt, artificial
  Chemically synthesized
acaucauugucuaguaggu

SEQ ID NO: 12512 - RNA, 19 nt, artificial
  Chemically synthesized
uuugugaaacauccuagac

SEQ ID NO: 12513 - RNA, 19 nt, artificial
  Chemically synthesized
uugugaaacauccuagacu

SEQ ID NO: 12514 - RNA, 19 nt, artificial
  Chemically synthesized
cuuuccaaaucuguaguug

SEQ ID NO: 12515 - RNA, 19 nt, artificial
  Chemically synthesized
uccagccauucuucauuca

SEQ ID NO: 12516 - RNA, 19 nt, artificial
  Chemically synthesized
cagccauucuucauucacc

SEQ ID NO: 12517 - RNA, 19 nt, artificial
  Chemically synthesized
agccauucuucauucaccu

SEQ ID NO: 12518 - RNA, 19 nt, artificial
  Chemically synthesized
cugagguucuguugucugg

SEQ ID NO: 12519 - RNA, 19 nt, artificial
  Chemically synthesized
caucagcuuuuucacuuuc

SEQ ID NO: 12520 - RNA, 19 nt, artificial
  Chemically synthesized
guaguuuuucaccuggccc

SEQ ID NO: 12521 - RNA, 19 nt, artificial
  Chemically synthesized
cuucuuuuuguuucuggcc

SEQ ID NO: 12522 - RNA, 19 nt, artificial
  Chemically synthesized
guggcccaguuaucauugc

SEQ ID NO: 12523 - RNA, 19 nt, artificial
  Chemically synthesized
cuugucgauuuuggaaugu

SEQ ID NO: 12524 - RNA, 19 nt, artificial
  Chemically synthesized
aucuuauagucuaucagcu

SEQ ID NO: 12525 - RNA, 19 nt, artificial
  Chemically synthesized
ucuuuaaggucuuugauag

SEQ ID NO: 12526 - RNA, 19 nt, artificial
  Chemically synthesized
uagccaaaucauauuucuc

SEQ ID NO: 12527 - RNA, 19 nt, artificial
  Chemically synthesized
ucauauuucucugucuggu

SEQ ID NO: 12528 - RNA, 19 nt, artificial
  Chemically synthesized
ugucucgguuaaugcuucu

SEQ ID NO: 12529 - RNA, 19 nt, artificial
  Chemically synthesized
uucucugcuucagucaugu

SEQ ID NO: 12530 - RNA, 19 nt, artificial
  Chemically synthesized
uaccaugagagagaaaagg

SEQ ID NO: 12531 - RNA, 19 nt, artificial
  Chemically synthesized
accagggacaugauuaggu

SEQ ID NO: 12532 - RNA, 19 nt, artificial
  Chemically synthesized
cuugaugaauguuuacagu

SEQ ID NO: 12533 - RNA, 19 nt, artificial
  Chemically synthesized
uacaaacaaguaauagggc

SEQ ID NO: 12534 - RNA, 19 nt, artificial
  Chemically synthesized
uccaaaucuguaguugcgc

SEQ ID NO: 12535 - RNA, 19 nt, artificial
  Chemically synthesized
uucaccuuugauaacacca

SEQ ID NO: 12536 - RNA, 19 nt, artificial
  Chemically synthesized
ucaccuuugauaacaccag

SEQ ID NO: 12537 - RNA, 19 nt, artificial
  Chemically synthesized
caccuuugauaacaccagg

SEQ ID NO: 12538 - RNA, 19 nt, artificial
  Chemically synthesized
uuugauaacaccaggauua

SEQ ID NO: 12539 - RNA, 19 nt, artificial
  Chemically synthesized
ucagcuuuuucacuuuccu

SEQ ID NO: 12540 - RNA, 19 nt, artificial
  Chemically synthesized
gcuuuuucacuuuccuugg

SEQ ID NO: 12541 - RNA, 19 nt, artificial
  Chemically synthesized
agcucagcuuaguguguuc

SEQ ID NO: 12542 - RNA, 19 nt, artificial
  Chemically synthesized
gcucagcuuaguguguucc

SEQ ID NO: 12543 - RNA, 19 nt, artificial
  Chemically synthesized
cuuaagauaacuucucagu

SEQ ID NO: 12544 - RNA, 19 nt, artificial
  Chemically synthesized
aagauaacuucucaguguu

SEQ ID NO: 12545 - RNA, 19 nt, artificial
  Chemically synthesized
uucuucaagacaaagacaa

SEQ ID NO: 12546 - RNA, 19 nt, artificial
  Chemically synthesized
agcucuucuuuugucucag

SEQ ID NO: 12547 - RNA, 19 nt, artificial
  Chemically synthesized
gaaacugucuugauccacc

SEQ ID NO: 12548 - RNA, 19 nt, artificial
  Chemically synthesized
cuugauccaccacagaugc

SEQ ID NO: 12549 - RNA, 19 nt, artificial
  Chemically synthesized
uuccagacacacuccaucg

SEQ ID NO: 12550 - RNA, 19 nt, artificial
  Chemically synthesized
agucuaucagcugguuccc

SEQ ID NO: 12551 - RNA, 19 nt, artificial
  Chemically synthesized
ccaaaucauauuucucugu

SEQ ID NO: 12552 - RNA, 19 nt, artificial
  Chemically synthesized
uuucucugucugguaguag

SEQ ID NO: 12553 - RNA, 19 nt, artificial
  Chemically synthesized
cuucagucauguucuucag

SEQ ID NO: 12554 - RNA, 19 nt, artificial
  Chemically synthesized
ucagucauguucuucagga

SEQ ID NO: 12555 - RNA, 19 nt, artificial
  Chemically synthesized
cuuccaguccuucuugucc

SEQ ID NO: 12556 - RNA, 19 nt, artificial
  Chemically synthesized
guauaugccuuaugaguaa

SEQ ID NO: 12557 - RNA, 19 nt, artificial
  Chemically synthesized
cuauaagguuacuucaagc

SEQ ID NO: 12558 - RNA, 19 nt, artificial
  Chemically synthesized
uuaagagccaauuacagua

SEQ ID NO: 12559 - RNA, 19 nt, artificial
  Chemically synthesized
uaagagccaauuacaguaa

SEQ ID NO: 12560 - RNA, 19 nt, artificial
  Chemically synthesized
uaaugguucagaaacagga

SEQ ID NO: 12561 - RNA, 19 nt, artificial
  Chemically synthesized
caggaauauuuguacuuac

SEQ ID NO: 12562 - RNA, 19 nt, artificial
  Chemically synthesized
uuuguaagaugcuagguuu

SEQ ID NO: 12563 - RNA, 19 nt, artificial
  Chemically synthesized
caccaaauguacagcuuga

SEQ ID NO: 12564 - RNA, 19 nt, artificial
  Chemically synthesized
gcuugaugaauguuuacag

SEQ ID NO: 12565 - RNA, 19 nt, artificial
  Chemically synthesized
acucagagcaagaaacagg

SEQ ID NO: 12566 - RNA, 19 nt, artificial
  Chemically synthesized
aguaccuggaagacucucu

SEQ ID NO: 12567 - RNA, 19 nt, artificial
  Chemically synthesized
acacuuccauccacuuuuc

SEQ ID NO: 12568 - RNA, 19 nt, artificial
  Chemically synthesized
uccaaacuguaaugucuca

SEQ ID NO: 12569 - RNA, 19 nt, artificial
  Chemically synthesized
ucaguacaguauacagcag

SEQ ID NO: 12570 - RNA, 19 nt, artificial
  Chemically synthesized
acaguauacagcagaaggg

SEQ ID NO: 12571 - RNA, 19 nt, artificial
  Chemically synthesized
aauagggcuucauuuucuu

SEQ ID NO: 12572 - RNA, 19 nt, artificial
  Chemically synthesized
cauccuagacuucucuccg

SEQ ID NO: 12573 - RNA, 19 nt, artificial
  Chemically synthesized
gugcuuuccaaaucuguag

SEQ ID NO: 12574 - RNA, 19 nt, artificial
  Chemically synthesized
uaguugcgcagucuucaac

SEQ ID NO: 12575 - RNA, 19 nt, artificial
  Chemically synthesized
aagcugagguucuguuguc

SEQ ID NO: 12576 - RNA, 19 nt, artificial
  Chemically synthesized
auagcucagcuuagugugu

SEQ ID NO: 12577 - RNA, 19 nt, artificial
  Chemically synthesized
uagcucagcuuaguguguu

SEQ ID NO: 12578 - RNA, 19 nt, artificial
  Chemically synthesized
ucccuuaagauaacuucuc

SEQ ID NO: 12579 - RNA, 19 nt, artificial
  Chemically synthesized
acacugagcuucacuuccu

SEQ ID NO: 12580 - RNA, 19 nt, artificial
  Chemically synthesized
uuuuguuucuggccuggug

SEQ ID NO: 12581 - RNA, 19 nt, artificial
  Chemically synthesized
agacaaagacaauguuccc

SEQ ID NO: 12582 - RNA, 19 nt, artificial
  Chemically synthesized
caaagacaauguucccugg

SEQ ID NO: 12583 - RNA, 19 nt, artificial
  Chemically synthesized
acaaacccaaauagcacac

SEQ ID NO: 12584 - RNA, 19 nt, artificial
  Chemically synthesized
aacccaaauagcacacggu

SEQ ID NO: 12585 - RNA, 19 nt, artificial
  Chemically synthesized
aacugacucauaacccuac

SEQ ID NO: 12586 - RNA, 19 nt, artificial
  Chemically synthesized
aaguaagccacugccaagu

SEQ ID NO: 12587 - RNA, 19 nt, artificial
  Chemically synthesized
gucucgguuaaugcuucug

SEQ ID NO: 12588 - RNA, 19 nt, artificial
  Chemically synthesized
cucugcuucagucauguuc

SEQ ID NO: 12589 - RNA, 19 nt, artificial
  Chemically synthesized
uucagucauguucuucagg

SEQ ID NO: 12590 - RNA, 19 nt, artificial
  Chemically synthesized
acuucaagccuuaagagcc

SEQ ID NO: 12591 - RNA, 19 nt, artificial
  Chemically synthesized
cuucaagccuuaagagcca

SEQ ID NO: 12592 - RNA, 19 nt, artificial
  Chemically synthesized
uuuuguaagaugcuagguu

SEQ ID NO: 12593 - RNA, 19 nt, artificial
  Chemically synthesized
agcuugaugaauguuuaca

SEQ ID NO: 12594 - RNA, 19 nt, artificial
  Chemically synthesized
guaccuggaagacucucuc

SEQ ID NO: 12595 - RNA, 19 nt, artificial
  Chemically synthesized
accuggaagacucucucgu

SEQ ID NO: 12596 - RNA, 19 nt, artificial
  Chemically synthesized
uuccagacacuuccaucca

SEQ ID NO: 12597 - RNA, 19 nt, artificial
  Chemically synthesized
cacuuccauccacuuuucc

SEQ ID NO: 12598 - RNA, 19 nt, artificial
  Chemically synthesized
cuuccauccacuuuuccuc

SEQ ID NO: 12599 - RNA, 19 nt, artificial
  Chemically synthesized
uuccauccacuuuuccucu

SEQ ID NO: 12600 - RNA, 19 nt, artificial
  Chemically synthesized
cacuuccaaacuguaaugu

SEQ ID NO: 12601 - RNA, 19 nt, artificial
  Chemically synthesized
acagagagaagacagguug

SEQ ID NO: 12602 - RNA, 19 nt, artificial
  Chemically synthesized
gaaacauccuagacuucuc

SEQ ID NO: 12603 - RNA, 19 nt, artificial
  Chemically synthesized
uccuagacuucucuccgag

SEQ ID NO: 12604 - RNA, 19 nt, artificial
  Chemically synthesized
aaaaugcccaccuucccuu

SEQ ID NO: 12605 - RNA, 19 nt, artificial
  Chemically synthesized
aacugaagagugccuccac

SEQ ID NO: 12606 - RNA, 19 nt, artificial
  Chemically synthesized
ucagcuuaguguguuccag

SEQ ID NO: 12607 - RNA, 19 nt, artificial
  Chemically synthesized
cucuucuuuuuguuucugg

SEQ ID NO: 12608 - RNA, 19 nt, artificial
  Chemically synthesized
ucuuuuuguuucuggccug

SEQ ID NO: 12609 - RNA, 19 nt, artificial
  Chemically synthesized
cauugcccuucuucaagac

SEQ ID NO: 12610 - RNA, 19 nt, artificial
  Chemically synthesized
gacaaagacaauguucccu

SEQ ID NO: 12611 - RNA, 19 nt, artificial
  Chemically synthesized
aaagacaauguucccuggc

SEQ ID NO: 12612 - RNA, 19 nt, artificial
  Chemically synthesized
aagacaauguucccuggca

SEQ ID NO: 12613 - RNA, 19 nt, artificial
  Chemically synthesized
caaacccaaauagcacacg

SEQ ID NO: 12614 - RNA, 19 nt, artificial
  Chemically synthesized
uguucuucagcuuuuuucc

SEQ ID NO: 12615 - RNA, 19 nt, artificial
  Chemically synthesized
cuuuaaggucuuugauagc

SEQ ID NO: 12616 - RNA, 19 nt, artificial
  Chemically synthesized
uuacuucaagccuuaagag

SEQ ID NO: 12617 - RNA, 19 nt, artificial
  Chemically synthesized
agccuuaagagccaauuac

SEQ ID NO: 12618 - RNA, 19 nt, artificial
  Chemically synthesized
aauuacaguaaugguucag

SEQ ID NO: 12619 - RNA, 19 nt, artificial
  Chemically synthesized
uuuguacuuacuccuuggg

SEQ ID NO: 12620 - RNA, 19 nt, artificial
  Chemically synthesized
cucagagcaagaaacagga

SEQ ID NO: 12621 - RNA, 19 nt, artificial
  Chemically synthesized
ccauccacuuuuccucucc

SEQ ID NO: 12622 - RNA, 19 nt, artificial
  Chemically synthesized
cauccacuuuuccucuccc

SEQ ID NO: 12623 - RNA, 19 nt, artificial
  Chemically synthesized
guuaacacuuccaaacugu

SEQ ID NO: 12624 - RNA, 19 nt, artificial
  Chemically synthesized
cuuccaaacuguaaugucu

SEQ ID NO: 12625 - RNA, 19 nt, artificial
  Chemically synthesized
uuccaaacuguaaugucuc

SEQ ID NO: 12626 - RNA, 19 nt, artificial
  Chemically synthesized
guaauagggcuucauuuuc

SEQ ID NO: 12627 - RNA, 19 nt, artificial
  Chemically synthesized
agagaagacagguuggagc

SEQ ID NO: 12628 - RNA, 19 nt, artificial
  Chemically synthesized
augcugucuucugaaaggg

SEQ ID NO: 12629 - RNA, 19 nt, artificial
  Chemically synthesized
ccucccuuaagauaacuuc

SEQ ID NO: 12630 - RNA, 19 nt, artificial
  Chemically synthesized
augacuaccguguacuugu

SEQ ID NO: 12631 - RNA, 19 nt, artificial
  Chemically synthesized
cccuuaagauaacuucuca

SEQ ID NO: 12632 - RNA, 19 nt, artificial
  Chemically synthesized
uuuuuguuucuggccuggu

SEQ ID NO: 12633 - RNA, 19 nt, artificial
  Chemically synthesized
uucuucagcuuuuuuccau

SEQ ID NO: 12634 - RNA, 19 nt, artificial
  Chemically synthesized
agcuuuuuuccauuccucc

SEQ ID NO: 12635 - RNA, 19 nt, artificial
  Chemically synthesized
uguugaagcaaauccggga

SEQ ID NO: 12636 - RNA, 19 nt, artificial
  Chemically synthesized
guugaagcaaauccgggag

SEQ ID NO: 12637 - RNA, 19 nt, artificial
  Chemically synthesized
uugaagcaaauccgggagu

SEQ ID NO: 12638 - RNA, 19 nt, artificial
  Chemically synthesized
uucaagccuuaagagccaa

SEQ ID NO: 12639 - RNA, 19 nt, artificial
  Chemically synthesized
agagcaagaaacaggauca

SEQ ID NO: 12640 - RNA, 19 nt, artificial
  Chemically synthesized
aagaaacaggaucaguacc

SEQ ID NO: 12641 - RNA, 19 nt, artificial
  Chemically synthesized
uccauccacuuuuccucuc

SEQ ID NO: 12642 - RNA, 19 nt, artificial
  Chemically synthesized
uacaguauacagcagaagg

SEQ ID NO: 12643 - RNA, 19 nt, artificial
  Chemically synthesized
cagagagaagacagguugg

SEQ ID NO: 12644 - RNA, 19 nt, artificial
  Chemically synthesized
agagagaagacagguugga

SEQ ID NO: 12645 - RNA, 19 nt, artificial
  Chemically synthesized
acaaacaaguaauagggcu

SEQ ID NO: 12646 - RNA, 19 nt, artificial
  Chemically synthesized
gauaacaccaggauuauau

SEQ ID NO: 12647 - RNA, 19 nt, artificial
  Chemically synthesized
agcugagguucuguugucu

SEQ ID NO: 12648 - RNA, 19 nt, artificial
  Chemically synthesized
auuagcaucagcuuuuuca

SEQ ID NO: 12649 - RNA, 19 nt, artificial
  Chemically synthesized
uugaguguguagggcaugg

SEQ ID NO: 12650 - RNA, 19 nt, artificial
  Chemically synthesized
ugcuuccagacacacucca

SEQ ID NO: 12651 - RNA, 19 nt, artificial
  Chemically synthesized
ccuuuuggcaacugacuca

SEQ ID NO: 12652 - RNA, 19 nt, artificial
  Chemically synthesized
gaucuuauagucuaucagc

SEQ ID NO: 12653 - RNA, 19 nt, artificial
  Chemically synthesized
aguaaugguucagaaacag

SEQ ID NO: 12654 - RNA, 19 nt, artificial
  Chemically synthesized
gagcaagaaacaggaucag

SEQ ID NO: 12655 - RNA, 19 nt, artificial
  Chemically synthesized
aguuaacacuuccaaacug

SEQ ID NO: 12656 - RNA, 19 nt, artificial
  Chemically synthesized
uucuuagacaccauguccc

SEQ ID NO: 12657 - RNA, 19 nt, artificial
  Chemically synthesized
ucuucuuuuuguuucuggc

SEQ ID NO: 12658 - RNA, 19 nt, artificial
  Chemically synthesized
caguuaucauugcccuucu

SEQ ID NO: 12659 - RNA, 19 nt, artificial
  Chemically synthesized
caggcacaaacccaaauag

SEQ ID NO: 12660 - RNA, 19 nt, artificial
  Chemically synthesized
cuucagcuuuuuuccauuc

SEQ ID NO: 12661 - RNA, 19 nt, artificial
  Chemically synthesized
acugacucauaacccuacc

SEQ ID NO: 12662 - RNA, 19 nt, artificial
  Chemically synthesized
cauaacccuaccaugagag

SEQ ID NO: 12663 - RNA, 19 nt, artificial
  Chemically synthesized
aacccuaccaugagagaga

SEQ ID NO: 12664 - RNA, 19 nt, artificial
  Chemically synthesized
auaguguacaugcagccaa

SEQ ID NO: 12665 - RNA, 19 nt, artificial
  Chemically synthesized
uuguacuuacuccuugggc

SEQ ID NO: 12666 - RNA, 19 nt, artificial
  Chemically synthesized
uaacuccuccauucaccug

SEQ ID NO: 12667 - RNA, 19 nt, artificial
  Chemically synthesized
uucauuuucuucagcuuug

SEQ ID NO: 12668 - RNA, 19 nt, artificial
  Chemically synthesized
agagagaaaaggaaagaag

SEQ ID NO: 12669 - RNA, 19 nt, artificial
  Chemically synthesized
aggcucuucuuuuuguuuc

SEQ ID NO: 12670 - RNA, 19 nt, artificial
  Chemically synthesized
cucaacugguucaagguag

SEQ ID NO: 12671 - RNA, 19 nt, artificial
  Chemically synthesized
ucagcuuuuuuccauuccu

SEQ ID NO: 12672 - RNA, 19 nt, artificial
  Chemically synthesized
cagcuuuuuuccauuccuc

SEQ ID NO: 12673 - RNA, 19 nt, artificial
  Chemically synthesized
uaacccuaccaugagagag

SEQ ID NO: 12674 - RNA, 19 nt, artificial
  Chemically synthesized
guaaugguucagaaacagg

SEQ ID NO: 12675 - RNA, 19 nt, artificial
  Chemically synthesized
agcaauguuauauaacacc

SEQ ID NO: 12676 - RNA, 19 nt, artificial
  Chemically synthesized
caauuacaguaaugguuca

SEQ ID NO: 12677 - RNA, 19 nt, artificial
  Chemically synthesized
uagguagaaacuaggaggc

SEQ ID NO: 12678 - RNA, 19 nt, artificial
  Chemically synthesized
uauuagcaucagcuuuuuc

SEQ ID NO: 12679 - RNA, 19 nt, artificial
  Chemically synthesized
guuggaaguaagccacugc

SEQ ID NO: 12680 - RNA, 19 nt, artificial
  Chemically synthesized
uguacuuacuccuugggcc

SEQ ID NO: 12681 - RNA, 19 nt, artificial
  Chemically synthesized
uagggcuucauuuucuuca

SEQ ID NO: 12682 - RNA, 19 nt, artificial
  Chemically synthesized
ugagucuucaugacuaccg

SEQ ID NO: 12683 - RNA, 19 nt, artificial
  Chemically synthesized
uuuuuuccauuccuccuuc

SEQ ID NO: 12684 - RNA, 19 nt, artificial
  Chemically synthesized
caauguuauauaacaccuc

SEQ ID NO: 12685 - RNA, 19 nt, artificial
  Chemically synthesized
uuauagucuaucagcuggu

SEQ ID NO: 12686 - RNA, 19 nt, artificial
  Chemically synthesized
auuagguagaaacuaggag

SEQ ID NO: 12687 - RNA, 19 nt, artificial
  Chemically synthesized
aagugcaccaaauguacag

SEQ ID NO: 12688 - RNA, 19 nt, artificial
  Chemically synthesized
uuagcaucagcuuuuucac

SEQ ID NO: 12689 - RNA, 19 nt, artificial
  Chemically synthesized
gucacccacuguguucuca

SEQ ID NO: 12690 - RNA, 19 nt, artificial
  Chemically synthesized
gucaggcaguaguuuuuca

SEQ ID NO: 12691 - RNA, 19 nt, artificial
  Chemically synthesized
gaaaaggaaagaagcagag

SEQ ID NO: 12692 - RNA, 19 nt, artificial
  Chemically synthesized
uuuuuccauuccuccuucu

SEQ ID NO: 12693 - RNA, 19 nt, artificial
  Chemically synthesized
uaacaccucacaggcaaac

SEQ ID NO: 12694 - RNA, 19 nt, artificial
  Chemically synthesized
uuuaaggucuuugauagcc

SEQ ID NO: 12695 - RNA, 19 nt, artificial
  Chemically synthesized
ucuucagcuuuguaguuug

SEQ ID NO: 12696 - RNA, 19 nt, artificial
  Chemically synthesized
uuccugaaacuccaggucc

SEQ ID NO: 12697 - RNA, 19 nt, artificial
  Chemically synthesized
uuucuuagacaccaugucc

SEQ ID NO: 12698 - RNA, 19 nt, artificial
  Chemically synthesized
uuagacaccaugucccgga

SEQ ID NO: 12699 - RNA, 19 nt, artificial
  Chemically synthesized
uagugcaccuugagugugu

SEQ ID NO: 12700 - RNA, 19 nt, artificial
  Chemically synthesized
acugguucaagguaguugc

SEQ ID NO: 12701 - RNA, 19 nt, artificial
  Chemically synthesized
cauauagcuucugcuucca

SEQ ID NO: 12702 - RNA, 19 nt, artificial
  Chemically synthesized
auauagcuucugcuuccag

SEQ ID NO: 12703 - RNA, 19 nt, artificial
  Chemically synthesized
aucgccuugucgauuuugg

SEQ ID NO: 12704 - RNA, 19 nt, artificial
  Chemically synthesized
auuuuggaaugucugggcu

SEQ ID NO: 12705 - RNA, 19 nt, artificial
  Chemically synthesized
augcagccaauguugaagc

SEQ ID NO: 12706 - RNA, 19 nt, artificial
  Chemically synthesized
augauuagguagaaacuag

SEQ ID NO: 12707 - RNA, 19 nt, artificial
  Chemically synthesized
gauuagguagaaacuagga

SEQ ID NO: 12708 - RNA, 19 nt, artificial
  Chemically synthesized
guuuuuguaagaugcuagg

SEQ ID NO: 12709 - RNA, 19 nt, artificial
  Chemically synthesized
uuuuuguaagaugcuaggu

SEQ ID NO: 12710 - RNA, 19 nt, artificial
  Chemically synthesized
uuauugugguaugacacag

SEQ ID NO: 12711 - RNA, 19 nt, artificial
  Chemically synthesized
auagggcuucauuuucuuc

SEQ ID NO: 12712 - RNA, 19 nt, artificial
  Chemically synthesized
ucagcuuuguaguuuguga

SEQ ID NO: 12713 - RNA, 19 nt, artificial
  Chemically synthesized
aacaccaggauuauauccc

SEQ ID NO: 12714 - RNA, 19 nt, artificial
  Chemically synthesized
uuccuuggguucaucugga

SEQ ID NO: 12715 - RNA, 19 nt, artificial
  Chemically synthesized
caguaguuuuucaccuggc

SEQ ID NO: 12716 - RNA, 19 nt, artificial
  Chemically synthesized
ucuuagacaccaugucccg

SEQ ID NO: 12717 - RNA, 19 nt, artificial
  Chemically synthesized
gagaaaaggaaagaagcag

SEQ ID NO: 12718 - RNA, 19 nt, artificial
  Chemically synthesized
uauagcuucugcuuccaga

SEQ ID NO: 12719 - RNA, 19 nt, artificial
  Chemically synthesized
gcaauguuauauaacaccu

SEQ ID NO: 12720 - RNA, 19 nt, artificial
  Chemically synthesized
uguuuuuguaagaugcuag

SEQ ID NO: 12721 - RNA, 19 nt, artificial
  Chemically synthesized
augagagagaaaaggaaag

SEQ ID NO: 12722 - RNA, 19 nt, artificial
  Chemically synthesized
guaugacacagaaaagugc

SEQ ID NO: 12723 - RNA, 19 nt, artificial
  Chemically synthesized
uuuacagugugaacacagc

SEQ ID NO: 12724 - RNA, 19 nt, artificial
  Chemically synthesized
gagacagagagaagacagg

SEQ ID NO: 12725 - RNA, 19 nt, artificial
  Chemically synthesized
agggcuucauuuucuucag

SEQ ID NO: 12726 - RNA, 19 nt, artificial
  Chemically synthesized
cuucagcuuuguaguuugu

SEQ ID NO: 12727 - RNA, 19 nt, artificial
  Chemically synthesized
uucagcuuuguaguuugug

SEQ ID NO: 12728 - RNA, 19 nt, artificial
  Chemically synthesized
uagacuucucuccgagugc

SEQ ID NO: 12729 - RNA, 19 nt, artificial
  Chemically synthesized
aaucuguaguugcgcaguc

SEQ ID NO: 12730 - RNA, 19 nt, artificial
  Chemically synthesized
aucuguaguugcgcagucu

SEQ ID NO: 12731 - RNA, 19 nt, artificial
  Chemically synthesized
gcaguaguuuuucaccugg

SEQ ID NO: 12732 - RNA, 19 nt, artificial
  Chemically synthesized
gauaacuucucaguguugc

SEQ ID NO: 12733 - RNA, 19 nt, artificial
  Chemically synthesized
agaaaaggaaagaagcaga

SEQ ID NO: 12734 - RNA, 19 nt, artificial
  Chemically synthesized
uugccuagguaauccuucu

SEQ ID NO: 12735 - RNA, 19 nt, artificial
  Chemically synthesized
gccuagguaauccuucuug

SEQ ID NO: 12736 - RNA, 19 nt, artificial
  Chemically synthesized
cacuggcucauauagcuuc

SEQ ID NO: 12737 - RNA, 19 nt, artificial
  Chemically synthesized
acuggcucauauagcuucu

SEQ ID NO: 12738 - RNA, 19 nt, artificial
  Chemically synthesized
uggcucauauagcuucugc

SEQ ID NO: 12739 - RNA, 19 nt, artificial
  Chemically synthesized
auguuauauaacaccucac

SEQ ID NO: 12740 - RNA, 19 nt, artificial
  Chemically synthesized
aauguugaagcaaauccgg

SEQ ID NO: 12741 - RNA, 19 nt, artificial
  Chemically synthesized
uacagugugaacacagcug

SEQ ID NO: 12742 - RNA, 19 nt, artificial
  Chemically synthesized
agguuaaauuuuaacaggg

SEQ ID NO: 12743 - RNA, 19 nt, artificial
  Chemically synthesized
uuacaaacaaguaauaggg

SEQ ID NO: 12744 - RNA, 19 nt, artificial
  Chemically synthesized
caggcauccuucaugcugu

SEQ ID NO: 12745 - RNA, 19 nt, artificial
  Chemically synthesized
cuucaugacuaccguguac

SEQ ID NO: 12746 - RNA, 19 nt, artificial
  Chemically synthesized
uucaugacuaccguguacu

SEQ ID NO: 12747 - RNA, 19 nt, artificial
  Chemically synthesized
aaacccagagaaacugucu

SEQ ID NO: 12748 - RNA, 19 nt, artificial
  Chemically synthesized
uaauccuucuuggccagcu

SEQ ID NO: 12749 - RNA, 19 nt, artificial
  Chemically synthesized
uuggcauacaugaaagcaa

SEQ ID NO: 12750 - RNA, 19 nt, artificial
  Chemically synthesized
cuuauagucuaucagcugg

SEQ ID NO: 12751 - RNA, 19 nt, artificial
  Chemically synthesized
uauagucuaucagcugguu

SEQ ID NO: 12752 - RNA, 19 nt, artificial
  Chemically synthesized
uauugugguaugacacaga

SEQ ID NO: 12753 - RNA, 19 nt, artificial
  Chemically synthesized
augacacagaaaagugcac

SEQ ID NO: 12754 - RNA, 19 nt, artificial
  Chemically synthesized
aaaagugcaccaaauguac

SEQ ID NO: 12755 - RNA, 19 nt, artificial
  Chemically synthesized
gaaacuaggaggccaagag

SEQ ID NO: 12756 - RNA, 19 nt, artificial
  Chemically synthesized
aacaggaucaguaccugga

SEQ ID NO: 12757 - RNA, 19 nt, artificial
  Chemically synthesized
ugagagagaaaaggaaaga

SEQ ID NO: 12758 - RNA, 19 nt, artificial
  Chemically synthesized
cuuccugaaacuccagguc

SEQ ID NO: 12759 - RNA, 19 nt, artificial
  Chemically synthesized
uuucuuaagcugagguucu

SEQ ID NO: 12760 - RNA, 19 nt, artificial
  Chemically synthesized
uggucacccacuguguucu

SEQ ID NO: 12761 - RNA, 19 nt, artificial
  Chemically synthesized
uccaguuucuuagacacca

SEQ ID NO: 12762 - RNA, 19 nt, artificial
  Chemically synthesized
uuugucucaggcacaaacc

SEQ ID NO: 12763 - RNA, 19 nt, artificial
  Chemically synthesized
aguguugcaaaugcaucag

SEQ ID NO: 12764 - RNA, 19 nt, artificial
  Chemically synthesized
aaauagcacacggugagcc

SEQ ID NO: 12765 - RNA, 19 nt, artificial
  Chemically synthesized
guguugcaaaugcaucagg

SEQ ID NO: 12766 - RNA, 19 nt, artificial
  Chemically synthesized
uagguaauccuucuuggcc

SEQ ID NO: 12767 - RNA, 19 nt, artificial
  Chemically synthesized
cugagccacuugucucuca

SEQ ID NO: 12768 - RNA, 19 nt, artificial
  Chemically synthesized
aaaugcaucaggaaauguc

SEQ ID NO: 12769 - RNA, 19 nt, artificial
  Chemically synthesized
aaugcaucaggaaaugucc

SEQ ID NO: 12770 - RNA, 19 nt, artificial
  Chemically synthesized
gauuuuggaaugucugggc

SEQ ID NO: 12771 - RNA, 19 nt, artificial
  Chemically synthesized
augucugggcucagacuuc

SEQ ID NO: 12772 - RNA, 19 nt, artificial
  Chemically synthesized
ucguggccaaugcuaacug

SEQ ID NO: 12773 - RNA, 19 nt, artificial
  Chemically synthesized
uauauaacaccucacaggc

SEQ ID NO: 12774 - RNA, 19 nt, artificial
  Chemically synthesized
gauagccaaaucauauuuc

SEQ ID NO: 12775 - RNA, 19 nt, artificial
  Chemically synthesized
aguagagcaucccucguug

SEQ ID NO: 12776 - RNA, 19 nt, artificial
  Chemically synthesized
uaaccuauaagguuacuuc

SEQ ID NO: 12777 - RNA, 19 nt, artificial
  Chemically synthesized
auuacaguaaugguucaga

SEQ ID NO: 12778 - RNA, 19 nt, artificial
  Chemically synthesized
uuuuauugugguaugacac

SEQ ID NO: 12779 - RNA, 19 nt, artificial
  Chemically synthesized
aacuaggaggccaagagag

SEQ ID NO: 12780 - RNA, 19 nt, artificial
  Chemically synthesized
aacaaguaauagggcuuca

SEQ ID NO: 12781 - RNA, 19 nt, artificial
  Chemically synthesized
ccucauaacugaagagugc

SEQ ID NO: 12782 - RNA, 19 nt, artificial
  Chemically synthesized
gucugguuauuagcaucag

SEQ ID NO: 12783 - RNA, 19 nt, artificial
  Chemically synthesized
ucugguuauuagcaucagc

SEQ ID NO: 12784 - RNA, 19 nt, artificial
  Chemically synthesized
caugcugucuucugaaagg

SEQ ID NO: 12785 - RNA, 19 nt, artificial
  Chemically synthesized
uaacuucucaguguugcaa

SEQ ID NO: 12786 - RNA, 19 nt, artificial
  Chemically synthesized
gagcucuucuuuugucuca

SEQ ID NO: 12787 - RNA, 19 nt, artificial
  Chemically synthesized
caguguugcaaaugcauca

SEQ ID NO: 12788 - RNA, 19 nt, artificial
  Chemically synthesized
agcuucugcuuccagacac

SEQ ID NO: 12789 - RNA, 19 nt, artificial
  Chemically synthesized
ucgauuuuggaaugucugg

SEQ ID NO: 12790 - RNA, 19 nt, artificial
  Chemically synthesized
auauaacaccucacaggca

SEQ ID NO: 12791 - RNA, 19 nt, artificial
  Chemically synthesized
aacagcuugaacuggagcc

SEQ ID NO: 12792 - RNA, 19 nt, artificial
  Chemically synthesized
ucgaagcugaaucaaggcu

SEQ ID NO: 12793 - RNA, 19 nt, artificial
  Chemically synthesized
caaggcuucuuuaaggucu

SEQ ID NO: 12794 - RNA, 19 nt, artificial
  Chemically synthesized
ucugucugguaguagagca

SEQ ID NO: 12795 - RNA, 19 nt, artificial
  Chemically synthesized
uuaaugcuucugguaaagg

SEQ ID NO: 12796 - RNA, 19 nt, artificial
  Chemically synthesized
gucauguucuucaggauag

SEQ ID NO: 12797 - RNA, 19 nt, artificial
  Chemically synthesized
uaugaguaaccuauaaggu

SEQ ID NO: 12798 - RNA, 19 nt, artificial
  Chemically synthesized
auugugguaugacacagaa

SEQ ID NO: 12799 - RNA, 19 nt, artificial
  Chemically synthesized
uaugacacagaaaagugca

SEQ ID NO: 12800 - RNA, 19 nt, artificial
  Chemically synthesized
ugacacagaaaagugcacc

SEQ ID NO: 12801 - RNA, 19 nt, artificial
  Chemically synthesized
acagugugaacacagcugg

SEQ ID NO: 12802 - RNA, 19 nt, artificial
  Chemically synthesized
aguuugugaaacauccuag

SEQ ID NO: 12803 - RNA, 19 nt, artificial
  Chemically synthesized
aagguguucacuuucuggg

SEQ ID NO: 12804 - RNA, 19 nt, artificial
  Chemically synthesized
ucauucaccuuugauaaca

SEQ ID NO: 12805 - RNA, 19 nt, artificial
  Chemically synthesized
uaacaccaggauuauaucc

SEQ ID NO: 12806 - RNA, 19 nt, artificial
  Chemically synthesized
cucauaacugaagagugcc

SEQ ID NO: 12807 - RNA, 19 nt, artificial
  Chemically synthesized
cugguuauuagcaucagcu

SEQ ID NO: 12808 - RNA, 19 nt, artificial
  Chemically synthesized
ucaucuggaaagccuuggu

SEQ ID NO: 12809 - RNA, 19 nt, artificial
  Chemically synthesized
guuucuuagacaccauguc

SEQ ID NO: 12810 - RNA, 19 nt, artificial
  Chemically synthesized
uaccguguacuuguagugc

SEQ ID NO: 12811 - RNA, 19 nt, artificial
  Chemically synthesized
ugcaccuugaguguguagg

SEQ ID NO: 12812 - RNA, 19 nt, artificial
  Chemically synthesized
cuuuggaacuaggaggagc

SEQ ID NO: 12813 - RNA, 19 nt, artificial
  Chemically synthesized
auaacuucucaguguugca

SEQ ID NO: 12814 - RNA, 19 nt, artificial
  Chemically synthesized
aacccagagaaacugucuu

SEQ ID NO: 12815 - RNA, 19 nt, artificial
  Chemically synthesized
ccuagguaauccuucuugg

SEQ ID NO: 12816 - RNA, 19 nt, artificial
  Chemically synthesized
ccacuugucucucauuugg

SEQ ID NO: 12817 - RNA, 19 nt, artificial
  Chemically synthesized
uaacuguucuucagcuuuu

SEQ ID NO: 12818 - RNA, 19 nt, artificial
  Chemically synthesized
uuuggcaacugacucauaa

SEQ ID NO: 12819 - RNA, 19 nt, artificial
  Chemically synthesized
uauaacaccucacaggcaa

SEQ ID NO: 12820 - RNA, 19 nt, artificial
  Chemically synthesized
cucgaagcugaaucaaggc

SEQ ID NO: 12821 - RNA, 19 nt, artificial
  Chemically synthesized
uuuauugugguaugacaca

SEQ ID NO: 12822 - RNA, 19 nt, artificial
  Chemically synthesized
uuacagugugaacacagcu

SEQ ID NO: 12823 - RNA, 19 nt, artificial
  Chemically synthesized
aaacaggaucaguaccugg

SEQ ID NO: 12824 - RNA, 19 nt, artificial
  Chemically synthesized
aagacagguuggagcgucu

SEQ ID NO: 12825 - RNA, 19 nt, artificial
  Chemically synthesized
uggguagccucauaacuga

SEQ ID NO: 12826 - RNA, 19 nt, artificial
  Chemically synthesized
aucuggaaagccuugguca

SEQ ID NO: 12827 - RNA, 19 nt, artificial
  Chemically synthesized
uuaguguguuccagccgga

SEQ ID NO: 12828 - RNA, 19 nt, artificial
  Chemically synthesized
agcuucacuuccuuaggcu

SEQ ID NO: 12829 - RNA, 19 nt, artificial
  Chemically synthesized
cagcucaacugguucaagg

SEQ ID NO: 12830 - RNA, 19 nt, artificial
  Chemically synthesized
acccagagaaacugucuug

SEQ ID NO: 12831 - RNA, 19 nt, artificial
  Chemically synthesized
uguugcaaaugcaucagga

SEQ ID NO: 12832 - RNA, 19 nt, artificial
  Chemically synthesized
agagaaacugucuugaucc

SEQ ID NO: 12833 - RNA, 19 nt, artificial
  Chemically synthesized
agcugagccacuugucucu

SEQ ID NO: 12834 - RNA, 19 nt, artificial
  Chemically synthesized
aaugcuaacuguucuucag

SEQ ID NO: 12835 - RNA, 19 nt, artificial
  Chemically synthesized
aacuguucuucagcuuuuu

SEQ ID NO: 12836 - RNA, 19 nt, artificial
  Chemically synthesized
uucuuggcauacaugaaag

SEQ ID NO: 12837 - RNA, 19 nt, artificial
  Chemically synthesized
gcauacaugaaagcaaugu

SEQ ID NO: 12838 - RNA, 19 nt, artificial
  Chemically synthesized
uguuauauaacaccucaca

SEQ ID NO: 12839 - RNA, 19 nt, artificial
  Chemically synthesized
caaacagcuugaacuggag

SEQ ID NO: 12840 - RNA, 19 nt, artificial
  Chemically synthesized
auagucuaucagcugguuc

SEQ ID NO: 12841 - RNA, 19 nt, artificial
  Chemically synthesized
gaagcugaaucaaggcuuc

SEQ ID NO: 12842 - RNA, 19 nt, artificial
  Chemically synthesized
aagcugaaucaaggcuucu

SEQ ID NO: 12843 - RNA, 19 nt, artificial
  Chemically synthesized
gucugguaguagagcaucc

SEQ ID NO: 12844 - RNA, 19 nt, artificial
  Chemically synthesized
ucugguaguagagcauccc

SEQ ID NO: 12845 - RNA, 19 nt, artificial
  Chemically synthesized
cucguuggaaguaagccac

SEQ ID NO: 12846 - RNA, 19 nt, artificial
  Chemically synthesized
ugcagccaauguugaagca

SEQ ID NO: 12847 - RNA, 19 nt, artificial
  Chemically synthesized
cuuaugaguaaccuauaag

SEQ ID NO: 12848 - RNA, 19 nt, artificial
  Chemically synthesized
auaagguuacuucaagccu

SEQ ID NO: 12849 - RNA, 19 nt, artificial
  Chemically synthesized
uuacaguaaugguucagaa

SEQ ID NO: 12850 - RNA, 19 nt, artificial
  Chemically synthesized
ucuuguuuuuguaagaugc

SEQ ID NO: 12851 - RNA, 19 nt, artificial
  Chemically synthesized
agugcaccaaauguacagc

SEQ ID NO: 12852 - RNA, 19 nt, artificial
  Chemically synthesized
aaacuguaaugucucagua

SEQ ID NO: 12853 - RNA, 19 nt, artificial
  Chemically synthesized
gaagggugcuaaaucuuac

SEQ ID NO: 12854 - RNA, 19 nt, artificial
  Chemically synthesized
uaguuugugaaacauccua

SEQ ID NO: 12855 - RNA, 19 nt, artificial
  Chemically synthesized
uuggguagccucauaacug

SEQ ID NO: 12856 - RNA, 19 nt, artificial
  Chemically synthesized
uucugggccagaugaguag

SEQ ID NO: 12857 - RNA, 19 nt, artificial
  Chemically synthesized
gagucuucaugacuaccgu

SEQ ID NO: 12858 - RNA, 19 nt, artificial
  Chemically synthesized
gucuucaugacuaccgugu

SEQ ID NO: 12859 - RNA, 19 nt, artificial
  Chemically synthesized
uggcccaguuaucauugcc

SEQ ID NO: 12860 - RNA, 19 nt, artificial
  Chemically synthesized
ucucaguguugcaaaugca

SEQ ID NO: 12861 - RNA, 19 nt, artificial
  Chemically synthesized
cuucuuuugucucaggcac

SEQ ID NO: 12862 - RNA, 19 nt, artificial
  Chemically synthesized
accacuggcucauauagcu

SEQ ID NO: 12863 - RNA, 19 nt, artificial
  Chemically synthesized
augcaucaggaaauguccc

SEQ ID NO: 12864 - RNA, 19 nt, artificial
  Chemically synthesized
ugucugggcucagacuuca

SEQ ID NO: 12865 - RNA, 19 nt, artificial
  Chemically synthesized
ugcuaacuguucuucagcu

SEQ ID NO: 12866 - RNA, 19 nt, artificial
  Chemically synthesized
ucuuggcauacaugaaagc

SEQ ID NO: 12867 - RNA, 19 nt, artificial
  Chemically synthesized
uacaugcagccaauguuga

SEQ ID NO: 12868 - RNA, 19 nt, artificial
  Chemically synthesized
auguugaagcaaauccggg

SEQ ID NO: 12869 - RNA, 19 nt, artificial
  Chemically synthesized
aggaaaucauccuggguac

SEQ ID NO: 12870 - RNA, 19 nt, artificial
  Chemically synthesized
caaacuguaaugucucagu

SEQ ID NO: 12871 - RNA, 19 nt, artificial
  Chemically synthesized
aacuguaaugucucaguac

SEQ ID NO: 12872 - RNA, 19 nt, artificial
  Chemically synthesized
caaaucuguaguugcgcag

SEQ ID NO: 12873 - RNA, 19 nt, artificial
  Chemically synthesized
accuuugauaacaccagga

SEQ ID NO: 12874 - RNA, 19 nt, artificial
  Chemically synthesized
ugccuuucuuaagcugagg

SEQ ID NO: 12875 - RNA, 19 nt, artificial
  Chemically synthesized
caugggaacacugagcuuc

SEQ ID NO: 12876 - RNA, 19 nt, artificial
  Chemically synthesized
uugucucaggcacaaaccc

SEQ ID NO: 12877 - RNA, 19 nt, artificial
  Chemically synthesized
gagaaacugucuugaucca

SEQ ID NO: 12878 - RNA, 19 nt, artificial
  Chemically synthesized
cuagguaauccuucuuggc

SEQ ID NO: 12879 - RNA, 19 nt, artificial
  Chemically synthesized
agguaauccuucuuggcca

SEQ ID NO: 12880 - RNA, 19 nt, artificial
  Chemically synthesized
uuuggaaugucugggcuca

SEQ ID NO: 12881 - RNA, 19 nt, artificial
  Chemically synthesized
aaugcuucugguaaaggcc

SEQ ID NO: 12882 - RNA, 19 nt, artificial
  Chemically synthesized
gaguaaccuauaagguuac

SEQ ID NO: 12883 - RNA, 19 nt, artificial
  Chemically synthesized
aaccuauaagguuacuuca

SEQ ID NO: 12884 - RNA, 19 nt, artificial
  Chemically synthesized
gacacagaaaagugcacca

SEQ ID NO: 12885 - RNA, 19 nt, artificial
  Chemically synthesized
aauguuuacagugugaaca

SEQ ID NO: 12886 - RNA, 19 nt, artificial
  Chemically synthesized
agaaacaggaucaguaccu

SEQ ID NO: 12887 - RNA, 19 nt, artificial
  Chemically synthesized
uacagcagaagggugcuaa

SEQ ID NO: 12888 - RNA, 19 nt, artificial
  Chemically synthesized
ggccagaugaguagaaugg

SEQ ID NO: 12889 - RNA, 19 nt, artificial
  Chemically synthesized
augggaacacugagcuuca

SEQ ID NO: 12890 - RNA, 19 nt, artificial
  Chemically synthesized
cugagcuucacuuccuuag

SEQ ID NO: 12891 - RNA, 19 nt, artificial
  Chemically synthesized
uaguugcagggaacaagcc

SEQ ID NO: 12892 - RNA, 19 nt, artificial
  Chemically synthesized
aauagcacacggugagccu

SEQ ID NO: 12893 - RNA, 19 nt, artificial
  Chemically synthesized
ugucgauuuuggaaugucu

SEQ ID NO: 12894 - RNA, 19 nt, artificial
  Chemically synthesized
cgauuuuggaaugucuggg

SEQ ID NO: 12895 - RNA, 19 nt, artificial
  Chemically synthesized
augcuaacuguucuucagc

SEQ ID NO: 12896 - RNA, 19 nt, artificial
  Chemically synthesized
aggaucuuauagucuauca

SEQ ID NO: 12897 - RNA, 19 nt, artificial
  Chemically synthesized
uaagguuacuucaagccuu

SEQ ID NO: 12898 - RNA, 19 nt, artificial
  Chemically synthesized
aagguuacuucaagccuua

SEQ ID NO: 12899 - RNA, 19 nt, artificial
  Chemically synthesized
gagccaauuacaguaaugg

SEQ ID NO: 12900 - RNA, 19 nt, artificial
  Chemically synthesized
gugcaccaaauguacagcu

SEQ ID NO: 12901 - RNA, 19 nt, artificial
  Chemically synthesized
auguuuacagugugaacac

SEQ ID NO: 12902 - RNA, 19 nt, artificial
  Chemically synthesized
gaaacaggaucaguaccug

SEQ ID NO: 12903 - RNA, 19 nt, artificial
  Chemically synthesized
aucaguaccuggaagacuc

SEQ ID NO: 12904 - RNA, 19 nt, artificial
  Chemically synthesized
cuuacaaacaaguaauagg

SEQ ID NO: 12905 - RNA, 19 nt, artificial
  Chemically synthesized
gagcuccaguuucuuagac

SEQ ID NO: 12906 - RNA, 19 nt, artificial
  Chemically synthesized
cuaccguguacuuguagug

SEQ ID NO: 12907 - RNA, 19 nt, artificial
  Chemically synthesized
accguguacuuguagugca

SEQ ID NO: 12908 - RNA, 19 nt, artificial
  Chemically synthesized
guguacuuguagugcaccu

SEQ ID NO: 12909 - RNA, 19 nt, artificial
  Chemically synthesized
uagggcaugggaacacuga

SEQ ID NO: 12910 - RNA, 19 nt, artificial
  Chemically synthesized
aacugguucaagguaguug

SEQ ID NO: 12911 - RNA, 19 nt, artificial
  Chemically synthesized
uuuugucucaggcacaaac

SEQ ID NO: 12912 - RNA, 19 nt, artificial
  Chemically synthesized
uuuuggaaugucugggcuc

SEQ ID NO: 12913 - RNA, 19 nt, artificial
  Chemically synthesized
cuguucuucagcuuuuuuc

SEQ ID NO: 12914 - RNA, 19 nt, artificial
  Chemically synthesized
cucacaggcaaacagcuug

SEQ ID NO: 12915 - RNA, 19 nt, artificial
  Chemically synthesized
uucucugucugguaguaga

SEQ ID NO: 12916 - RNA, 19 nt, artificial
  Chemically synthesized
uaaaggccuucucugcuuc

SEQ ID NO: 12917 - RNA, 19 nt, artificial
  Chemically synthesized
agugugaacacagcuggcu

SEQ ID NO: 12918 - RNA, 19 nt, artificial
  Chemically synthesized
aacacagcuggcuagcuag

SEQ ID NO: 12919 - RNA, 19 nt, artificial
  Chemically synthesized
uucucacaccacagaguca

SEQ ID NO: 12920 - RNA, 19 nt, artificial
  Chemically synthesized
ucugcuuccagacacacuc

SEQ ID NO: 12921 - RNA, 19 nt, artificial
  Chemically synthesized
uggcaacugacucauaacc

SEQ ID NO: 12922 - RNA, 19 nt, artificial
  Chemically synthesized
aaacagcuugaacuggagc

SEQ ID NO: 12923 - RNA, 19 nt, artificial
  Chemically synthesized
aaggccuucucugcuucag

SEQ ID NO: 12924 - RNA, 19 nt, artificial
  Chemically synthesized
aagggugcuaaaucuuaca

SEQ ID NO: 12925 - RNA, 19 nt, artificial
  Chemically synthesized
caagguguucacuuucugg

SEQ ID NO: 12926 - RNA, 19 nt, artificial
  Chemically synthesized
agguguucacuuucugggc

SEQ ID NO: 12927 - RNA, 19 nt, artificial
  Chemically synthesized
guguucacuuucugggcca

SEQ ID NO: 12928 - RNA, 19 nt, artificial
  Chemically synthesized
uccauuccuccuucuuggc

SEQ ID NO: 12929 - RNA, 19 nt, artificial
  Chemically synthesized
uauacagcagaagggugcu

SEQ ID NO: 12930 - RNA, 19 nt, artificial
  Chemically synthesized
aauccuucuuggccagcug

SEQ ID NO: 12931 - RNA, 19 nt, artificial
  Chemically synthesized
augcuucugguaaaggccu

SEQ ID NO: 12932 - RNA, 19 nt, artificial
  Chemically synthesized
ugugaacacagcuggcuag

SEQ ID NO: 12933 - RNA, 19 nt, artificial
  Chemically synthesized
cuagcuagcacucagagca

SEQ ID NO: 12934 - RNA, 19 nt, artificial
  Chemically synthesized
uuaaggucuuugauagcca

SEQ ID NO: 12935 - RNA, 19 nt, artificial
  Chemically synthesized
auacagcagaagggugcua

SEQ ID NO: 12936 - RNA, 19 nt, artificial
  Chemically synthesized
uuggcugccuuucuuaagc

SEQ ID NO: 12937 - RNA, 19 nt, artificial
  Chemically synthesized
ucucacaccacagagucag

SEQ ID NO: 12938 - RNA, 19 nt, artificial
  Chemically synthesized
gucuuugauagccaaauca

SEQ ID NO: 12939 - RNA, 19 nt, artificial
  Chemically synthesized
cuucugguaaaggccuucu

SEQ ID NO: 12940 - RNA, 19 nt, artificial
  Chemically synthesized
aauguucccuggcaugacc

SEQ ID NO: 12941 - RNA, 19 nt, artificial
  Chemically synthesized
uggcugccuuucuuaagcu

SEQ ID NO: 12942 - RNA, 19 nt, artificial
  Chemically synthesized
ccacgagcaugaagucuga

SEQ ID NO: 12943 - RNA, 19 nt, artificial
  Chemically synthesized
gcauguacacuauccugaa

SEQ ID NO: 12944 - RNA, 19 nt, artificial
  Chemically synthesized
ccuccuaguuucuaccuaa

SEQ ID NO: 12945 - RNA, 19 nt, artificial
  Chemically synthesized
cuacaaagcugaagaaaau

SEQ ID NO: 12946 - RNA, 19 nt, artificial
  Chemically synthesized
gagggaaccagcugauaga

SEQ ID NO: 12947 - RNA, 19 nt, artificial
  Chemically synthesized
ccagaugaacccaaggaaa

SEQ ID NO: 12948 - RNA, 19 nt, artificial
  Chemically synthesized
gauguuucacaaacuacaa

SEQ ID NO: 12949 - RNA, 19 nt, artificial
  Chemically synthesized
ggauggaagugucuggaaa

SEQ ID NO: 12950 - RNA, 19 nt, artificial
  Chemically synthesized
gagggaugcucuacuacca

SEQ ID NO: 12951 - RNA, 19 nt, artificial
  Chemically synthesized
gcaacuacagauuuggaaa

SEQ ID NO: 12952 - RNA, 19 nt, artificial
  Chemically synthesized
caagaaggaggaauggaaa

SEQ ID NO: 12953 - RNA, 19 nt, artificial
  Chemically synthesized
aaaagaagagccuaaggaa

SEQ ID NO: 12954 - RNA, 19 nt, artificial
  Chemically synthesized
ggcuugaaguaaccuuaua

SEQ ID NO: 12955 - RNA, 19 nt, artificial
  Chemically synthesized
ccaaggcuuuccagaugaa

SEQ ID NO: 12956 - RNA, 19 nt, artificial
  Chemically synthesized
ccugugagguguuauauaa

SEQ ID NO: 12957 - RNA, 19 nt, artificial
  Chemically synthesized
ccaagaaggaggaauggaa

SEQ ID NO: 12958 - RNA, 19 nt, artificial
  Chemically synthesized
cagcugauagacuauaaga

SEQ ID NO: 12959 - RNA, 19 nt, artificial
  Chemically synthesized
acacuauccugaagaacau

SEQ ID NO: 12960 - RNA, 19 nt, artificial
  Chemically synthesized
uaaggcauauacaaauaaa

SEQ ID NO: 12961 - RNA, 19 nt, artificial
  Chemically synthesized
ggaaccagcugauagacua

SEQ ID NO: 12962 - RNA, 19 nt, artificial
  Chemically synthesized
gucauaccacaauaaaaaa

SEQ ID NO: 12963 - RNA, 19 nt, artificial
  Chemically synthesized
caaggaguaaguacaaaua

SEQ ID NO: 12964 - RNA, 19 nt, artificial
  Chemically synthesized
caagcuguuucgaccaaau

SEQ ID NO: 12965 - RNA, 19 nt, artificial
  Chemically synthesized
ccuaguuucuaccuaauca

SEQ ID NO: 12966 - RNA, 19 nt, artificial
  Chemically synthesized
ugaagaagggcaaugauaa

SEQ ID NO: 12967 - RNA, 19 nt, artificial
  Chemically synthesized
gaacccaaggaaagugaaa

SEQ ID NO: 12968 - RNA, 19 nt, artificial
  Chemically synthesized
gcuguauacuguacugaga

SEQ ID NO: 12969 - RNA, 19 nt, artificial
  Chemically synthesized
ugucauaccacaauaaaaa

SEQ ID NO: 12970 - RNA, 19 nt, artificial
  Chemically synthesized
cauaccacaauaaaaaaaa

SEQ ID NO: 12971 - RNA, 19 nt, artificial
  Chemically synthesized
cagaggaccuggaguuuca

SEQ ID NO: 12972 - RNA, 19 nt, artificial
  Chemically synthesized
cuauuuauucccuguuaaa

SEQ ID NO: 12973 - RNA, 19 nt, artificial
  Chemically synthesized
caucugugguggaucaaga

SEQ ID NO: 12974 - RNA, 19 nt, artificial
  Chemically synthesized
acucauaaggcauauacaa

SEQ ID NO: 12975 - RNA, 19 nt, artificial
  Chemically synthesized
aaacauucaucaagcugua

SEQ ID NO: 12976 - RNA, 19 nt, artificial
  Chemically synthesized
aaauauuccuguuucugaa

SEQ ID NO: 12977 - RNA, 19 nt, artificial
  Chemically synthesized
acuacaaagcugaagaaaa

SEQ ID NO: 12978 - RNA, 19 nt, artificial
  Chemically synthesized
ugaagacugcgcaacuaca

SEQ ID NO: 12979 - RNA, 19 nt, artificial
  Chemically synthesized
ccaucagccucuggaauga

SEQ ID NO: 12980 - RNA, 19 nt, artificial
  Chemically synthesized
cuguuucgaccaaaugaga

SEQ ID NO: 12981 - RNA, 19 nt, artificial
  Chemically synthesized
cauaaggcauauacaaaua

SEQ ID NO: 12982 - RNA, 19 nt, artificial
  Chemically synthesized
uaauaaccagacaacagaa

SEQ ID NO: 12983 - RNA, 19 nt, artificial
  Chemically synthesized
cagaagacagcaugaagga

SEQ ID NO: 12984 - RNA, 19 nt, artificial
  Chemically synthesized
ugugccugagacaaaagaa

SEQ ID NO: 12985 - RNA, 19 nt, artificial
  Chemically synthesized
uaucaaaggugaaugaaga

SEQ ID NO: 12986 - RNA, 19 nt, artificial
  Chemically synthesized
ggaagcagaagcuauauga

SEQ ID NO: 12987 - RNA, 19 nt, artificial
  Chemically synthesized
ggaaguguuaacuauuuau

SEQ ID NO: 12988 - RNA, 19 nt, artificial
  Chemically synthesized
aaacuacaaagcugaagaa

SEQ ID NO: 12989 - RNA, 19 nt, artificial
  Chemically synthesized
caugaagucugagcccaga

SEQ ID NO: 12990 - RNA, 19 nt, artificial
  Chemically synthesized
aauuuaaccuacuagacaa

SEQ ID NO: 12991 - RNA, 19 nt, artificial
  Chemically synthesized
ggaaagcacucggagagaa

SEQ ID NO: 12992 - RNA, 19 nt, artificial
  Chemically synthesized
gaucuucagggcucuggaa

SEQ ID NO: 12993 - RNA, 19 nt, artificial
  Chemically synthesized
caucagccucuggaaugaa

SEQ ID NO: 12994 - RNA, 19 nt, artificial
  Chemically synthesized
aggaguaaguacaaauauu

SEQ ID NO: 12995 - RNA, 19 nt, artificial
  Chemically synthesized
cagggaacauugucuuugu

SEQ ID NO: 12996 - RNA, 19 nt, artificial
  Chemically synthesized
cuugaagaagggcaaugau

SEQ ID NO: 12997 - RNA, 19 nt, artificial
  Chemically synthesized
uaucaaagaccuuaaagaa

SEQ ID NO: 12998 - RNA, 19 nt, artificial
  Chemically synthesized
gcaagcuguuucgaccaaa

SEQ ID NO: 12999 - RNA, 19 nt, artificial
  Chemically synthesized
caacagaaccucagcuuaa

SEQ ID NO: 13000 - RNA, 19 nt, artificial
  Chemically synthesized
aucaaaggugaaugaagaa

SEQ ID NO: 13001 - RNA, 19 nt, artificial
  Chemically synthesized
gaugcauuugcaacacuga

SEQ ID NO: 13002 - RNA, 19 nt, artificial
  Chemically synthesized
agaagucuaggauguuuca

SEQ ID NO: 13003 - RNA, 19 nt, artificial
  Chemically synthesized
aacgagggaugcucuacua

SEQ ID NO: 13004 - RNA, 19 nt, artificial
  Chemically synthesized
cgagagagucuuccaggua

SEQ ID NO: 13005 - RNA, 19 nt, artificial
  Chemically synthesized
caaguggaggcacucuuca

SEQ ID NO: 13006 - RNA, 19 nt, artificial
  Chemically synthesized
agcuguuucgaccaaauga

SEQ ID NO: 13007 - RNA, 19 nt, artificial
  Chemically synthesized
gagaaggccuuuaccagaa

SEQ ID NO: 13008 - RNA, 19 nt, artificial
  Chemically synthesized
ggaacauugucuuugucuu

SEQ ID NO: 13009 - RNA, 19 nt, artificial
  Chemically synthesized
aagagccuaaggaagugaa

SEQ ID NO: 13010 - RNA, 19 nt, artificial
  Chemically synthesized
cacaauaaaaaaaaaccua

SEQ ID NO: 13011 - RNA, 19 nt, artificial
  Chemically synthesized
agaucuucagggcucugga

SEQ ID NO: 13012 - RNA, 19 nt, artificial
  Chemically synthesized
cuaauaaccagacaacaga

SEQ ID NO: 13013 - RNA, 19 nt, artificial
  Chemically synthesized
ugcuaauaaccagacaaca

SEQ ID NO: 13014 - RNA, 19 nt, artificial
  Chemically synthesized
uggaaguguuaacuauuua

SEQ ID NO: 13015 - RNA, 19 nt, artificial
  Chemically synthesized
agaacaugacugaagcaga

SEQ ID NO: 13016 - RNA, 19 nt, artificial
  Chemically synthesized
gcucuuaaggcuugaagua

SEQ ID NO: 13017 - RNA, 19 nt, artificial
  Chemically synthesized
gaagaacaugacugaagca

SEQ ID NO: 13018 - RNA, 19 nt, artificial
  Chemically synthesized
ggcaagcuguuucgaccaa

SEQ ID NO: 13019 - RNA, 19 nt, artificial
  Chemically synthesized
cugcaacuaccuugaacca

SEQ ID NO: 13020 - RNA, 19 nt, artificial
  Chemically synthesized
uacucauaaggcauauaca

SEQ ID NO: 13021 - RNA, 19 nt, artificial
  Chemically synthesized
ggaagugaagcucaguguu

SEQ ID NO: 13022 - RNA, 19 nt, artificial
  Chemically synthesized
auucccuguuaaaauuuaa

SEQ ID NO: 13023 - RNA, 19 nt, artificial
  Chemically synthesized
guuuggaaguguuaacuau

SEQ ID NO: 13024 - RNA, 19 nt, artificial
  Chemically synthesized
uggguuugugccugagaca

SEQ ID NO: 13025 - RNA, 19 nt, artificial
  Chemically synthesized
cuuucagaagacagcauga

SEQ ID NO: 13026 - RNA, 19 nt, artificial
  Chemically synthesized
guuaaaauuuaaccuacua

SEQ ID NO: 13027 - RNA, 19 nt, artificial
  Chemically synthesized
aagaaggaggaauggaaaa

SEQ ID NO: 13028 - RNA, 19 nt, artificial
  Chemically synthesized
uaacauugcuuucauguau

SEQ ID NO: 13029 - RNA, 19 nt, artificial
  Chemically synthesized
aaaaaaaccuagcaucuua

SEQ ID NO: 13030 - RNA, 19 nt, artificial
  Chemically synthesized
ugccugagacaaaagaaga

SEQ ID NO: 13031 - RNA, 19 nt, artificial
  Chemically synthesized
acuagacaaugaugugagu

SEQ ID NO: 13032 - RNA, 19 nt, artificial
  Chemically synthesized
caagaaggacuggaaggga

SEQ ID NO: 13033 - RNA, 19 nt, artificial
  Chemically synthesized
uuaugaggcuacccaacca

SEQ ID NO: 13034 - RNA, 19 nt, artificial
  Chemically synthesized
uugucuugaagaagggcaa

SEQ ID NO: 13035 - RNA, 19 nt, artificial
  Chemically synthesized
guuucgaccaaaugagaga

SEQ ID NO: 13036 - RNA, 19 nt, artificial
  Chemically synthesized
ugugguggaucaagacagu

SEQ ID NO: 13037 - RNA, 19 nt, artificial
  Chemically synthesized
cugagcccagacauuccaa

SEQ ID NO: 13038 - RNA, 19 nt, artificial
  Chemically synthesized
auagguuacucauaaggca

SEQ ID NO: 13039 - RNA, 19 nt, artificial
  Chemically synthesized
ccacaauaaaaaaaaaccu

SEQ ID NO: 13040 - RNA, 19 nt, artificial
  Chemically synthesized
caaauauuccuguuucuga

SEQ ID NO: 13041 - RNA, 19 nt, artificial
  Chemically synthesized
aagacugcgcaacuacaga

SEQ ID NO: 13042 - RNA, 19 nt, artificial
  Chemically synthesized
aagaagagcuccaggucau

SEQ ID NO: 13043 - RNA, 19 nt, artificial
  Chemically synthesized
gaagugucuggaaagggca

SEQ ID NO: 13044 - RNA, 19 nt, artificial
  Chemically synthesized
acuauuuauucccuguuaa

SEQ ID NO: 13045 - RNA, 19 nt, artificial
  Chemically synthesized
gaagaagggcaaugauaac

SEQ ID NO: 13046 - RNA, 19 nt, artificial
  Chemically synthesized
ggagagaagucuaggaugu

SEQ ID NO: 13047 - RNA, 19 nt, artificial
  Chemically synthesized
uagcaucuuacaaaaacaa

SEQ ID NO: 13048 - RNA, 19 nt, artificial
  Chemically synthesized
aaggaguaaguacaaauau

SEQ ID NO: 13049 - RNA, 19 nt, artificial
  Chemically synthesized
uggaggcacucuucaguua

SEQ ID NO: 13050 - RNA, 19 nt, artificial
  Chemically synthesized
aaaggugaaugaagaaugg

SEQ ID NO: 13051 - RNA, 19 nt, artificial
  Chemically synthesized
aacccaaggaaagugaaaa

SEQ ID NO: 13052 - RNA, 19 nt, artificial
  Chemically synthesized
gccuuuaccagaagcauua

SEQ ID NO: 13053 - RNA, 19 nt, artificial
  Chemically synthesized
gaaggauuaccuaggcaag

SEQ ID NO: 13054 - RNA, 19 nt, artificial
  Chemically synthesized
ucauaaggcauauacaaau

SEQ ID NO: 13055 - RNA, 19 nt, artificial
  Chemically synthesized
aagucuaggauguuucaca

SEQ ID NO: 13056 - RNA, 19 nt, artificial
  Chemically synthesized
accagacaacagaaccuca

SEQ ID NO: 13057 - RNA, 19 nt, artificial
  Chemically synthesized
gaggcacucuucaguuaug

SEQ ID NO: 13058 - RNA, 19 nt, artificial
  Chemically synthesized
uaaaauuuaaccuacuaga

SEQ ID NO: 13059 - RNA, 19 nt, artificial
  Chemically synthesized
cagcuccuccuaguuccaa

SEQ ID NO: 13060 - RNA, 19 nt, artificial
  Chemically synthesized
gaugcucuacuaccagaca

SEQ ID NO: 13061 - RNA, 19 nt, artificial
  Chemically synthesized
ucauaccacaauaaaaaaa

SEQ ID NO: 13062 - RNA, 19 nt, artificial
  Chemically synthesized
gcagagaaggccuuuacca

SEQ ID NO: 13063 - RNA, 19 nt, artificial
  Chemically synthesized
auaacauugcuuucaugua

SEQ ID NO: 13064 - RNA, 19 nt, artificial
  Chemically synthesized
gauuuggaaagcacucgga

SEQ ID NO: 13065 - RNA, 19 nt, artificial
  Chemically synthesized
aggaaaaguggauggaagu

SEQ ID NO: 13066 - RNA, 19 nt, artificial
  Chemically synthesized
aaggugcacuacaaguaca

SEQ ID NO: 13067 - RNA, 19 nt, artificial
  Chemically synthesized
cagaaccucagcuuaagaa

SEQ ID NO: 13068 - RNA, 19 nt, artificial
  Chemically synthesized
aagcugaugcuaauaacca

SEQ ID NO: 13069 - RNA, 19 nt, artificial
  Chemically synthesized
gaagacugcgcaacuacag

SEQ ID NO: 13070 - RNA, 19 nt, artificial
  Chemically synthesized
gaagcagaagcuauaugag

SEQ ID NO: 13071 - RNA, 19 nt, artificial
  Chemically synthesized
agagaaggccuuuaccaga

SEQ ID NO: 13072 - RNA, 19 nt, artificial
  Chemically synthesized
ugagguguuauauaacauu

SEQ ID NO: 13073 - RNA, 19 nt, artificial
  Chemically synthesized
auguuucacaaacuacaaa

SEQ ID NO: 13074 - RNA, 19 nt, artificial
  Chemically synthesized
guuaucaaaggugaaugaa

SEQ ID NO: 13075 - RNA, 19 nt, artificial
  Chemically synthesized
acuguacugagacauuaca

SEQ ID NO: 13076 - RNA, 19 nt, artificial
  Chemically synthesized
uauauaacauugcuuucau

SEQ ID NO: 13077 - RNA, 19 nt, artificial
  Chemically synthesized
augaggcuacccaaccaga

SEQ ID NO: 13078 - RNA, 19 nt, artificial
  Chemically synthesized
uuuccugaugcauuugcaa

SEQ ID NO: 13079 - RNA, 19 nt, artificial
  Chemically synthesized
gauggaagugucuggaaag

SEQ ID NO: 13080 - RNA, 19 nt, artificial
  Chemically synthesized
uacacuauccugaagaaca

SEQ ID NO: 13081 - RNA, 19 nt, artificial
  Chemically synthesized
auacuguacugagacauua

SEQ ID NO: 13082 - RNA, 19 nt, artificial
  Chemically synthesized
ccuaaggaagugaagcuca

SEQ ID NO: 13083 - RNA, 19 nt, artificial
  Chemically synthesized
caaugaugugaguacccag

SEQ ID NO: 13084 - RNA, 19 nt, artificial
  Chemically synthesized
ggugaauggaggaguuagg

SEQ ID NO: 13085 - RNA, 19 nt, artificial
  Chemically synthesized
agagccuaaggaagugaag

SEQ ID NO: 13086 - RNA, 19 nt, artificial
  Chemically synthesized
acucuguggugugagaaca

SEQ ID NO: 13087 - RNA, 19 nt, artificial
  Chemically synthesized
acaggugaauggaggaguu

SEQ ID NO: 13088 - RNA, 19 nt, artificial
  Chemically synthesized
gcuaauaaccagacaacag

SEQ ID NO: 13089 - RNA, 19 nt, artificial
  Chemically synthesized
auaaggcauauacaaauaa

SEQ ID NO: 13090 - RNA, 19 nt, artificial
  Chemically synthesized
ucgagggaaccagcugaua

SEQ ID NO: 13091 - RNA, 19 nt, artificial
  Chemically synthesized
gagagaagucuaggauguu

SEQ ID NO: 13092 - RNA, 19 nt, artificial
  Chemically synthesized
aaagcugaagaaaaugaag

SEQ ID NO: 13093 - RNA, 19 nt, artificial
  Chemically synthesized
aaggaggaauggaaaaaag

SEQ ID NO: 13094 - RNA, 19 nt, artificial
  Chemically synthesized
uugaagaagggcaaugaua

SEQ ID NO: 13095 - RNA, 19 nt, artificial
  Chemically synthesized
gcuuguucccugcaacuac

SEQ ID NO: 13096 - RNA, 19 nt, artificial
  Chemically synthesized
acuaccagacagagaaaua

SEQ ID NO: 13097 - RNA, 19 nt, artificial
  Chemically synthesized
uaaucaugucccuggugga

SEQ ID NO: 13098 - RNA, 19 nt, artificial
  Chemically synthesized
gaccuuaaagaagccuuga

SEQ ID NO: 13099 - RNA, 19 nt, artificial
  Chemically synthesized
caccgugugcuauuugggu

SEQ ID NO: 13100 - RNA, 19 nt, artificial
  Chemically synthesized
acauggugucuaagaaacu

SEQ ID NO: 13101 - RNA, 19 nt, artificial
  Chemically synthesized
agaugaacccaaggaaagu

SEQ ID NO: 13102 - RNA, 19 nt, artificial
  Chemically synthesized
cucuguggugugagaacac

SEQ ID NO: 13103 - RNA, 19 nt, artificial
  Chemically synthesized
aagcauuaaccgagacaag

SEQ ID NO: 13104 - RNA, 19 nt, artificial
  Chemically synthesized
caaggugcacuacaaguac

SEQ ID NO: 13105 - RNA, 19 nt, artificial
  Chemically synthesized
gacucuguggugugagaac

SEQ ID NO: 13106 - RNA, 19 nt, artificial
  Chemically synthesized
aaaucgacaaggcgaugga

SEQ ID NO: 13107 - RNA, 19 nt, artificial
  Chemically synthesized
gucuggaagcagaagcuau

SEQ ID NO: 13108 - RNA, 19 nt, artificial
  Chemically synthesized
aacuacaaagcugaagaaa

SEQ ID NO: 13109 - RNA, 19 nt, artificial
  Chemically synthesized
aaaugaagcccuauuacuu

SEQ ID NO: 13110 - RNA, 19 nt, artificial
  Chemically synthesized
cagaugaacccaaggaaag

SEQ ID NO: 13111 - RNA, 19 nt, artificial
  Chemically synthesized
guggaucaagacaguuucu

SEQ ID NO: 13112 - RNA, 19 nt, artificial
  Chemically synthesized
augugaguacccaggauga

SEQ ID NO: 13113 - RNA, 19 nt, artificial
  Chemically synthesized
gaaccauuacuguaauugg

SEQ ID NO: 13114 - RNA, 19 nt, artificial
  Chemically synthesized
gcuuacuuccaacgaggga

SEQ ID NO: 13115 - RNA, 19 nt, artificial
  Chemically synthesized
gcacccuucugcuguauac

SEQ ID NO: 13116 - RNA, 19 nt, artificial
  Chemically synthesized
acuacagauuuggaaagca

SEQ ID NO: 13117 - RNA, 19 nt, artificial
  Chemically synthesized
aguuuggaaguguuaacua

SEQ ID NO: 13118 - RNA, 19 nt, artificial
  Chemically synthesized
aaauuuaaccuacuagaca

SEQ ID NO: 13119 - RNA, 19 nt, artificial
  Chemically synthesized
uguugaagacugcgcaacu

SEQ ID NO: 13120 - RNA, 19 nt, artificial
  Chemically synthesized
uguauacuguacugagaca

SEQ ID NO: 13121 - RNA, 19 nt, artificial
  Chemically synthesized
caaaggugaaugaagaaug

SEQ ID NO: 13122 - RNA, 19 nt, artificial
  Chemically synthesized
acagaaccucagcuuaaga

SEQ ID NO: 13123 - RNA, 19 nt, artificial
  Chemically synthesized
cauguacacuauccugaag

SEQ ID NO: 13124 - RNA, 19 nt, artificial
  Chemically synthesized
guuucugaaccauuacugu

SEQ ID NO: 13125 - RNA, 19 nt, artificial
  Chemically synthesized
aaagaagagcuccagguca

SEQ ID NO: 13126 - RNA, 19 nt, artificial
  Chemically synthesized
uuuguugaagacugcgcaa

SEQ ID NO: 13127 - RNA, 19 nt, artificial
  Chemically synthesized
uccaacgagggaugcucua

SEQ ID NO: 13128 - RNA, 19 nt, artificial
  Chemically synthesized
ggauuugcuucaacauugg

SEQ ID NO: 13129 - RNA, 19 nt, artificial
  Chemically synthesized
uacaguuuggaaguguuaa

SEQ ID NO: 13130 - RNA, 19 nt, artificial
  Chemically synthesized
ccuguuaaaauuuaaccua

SEQ ID NO: 13131 - RNA, 19 nt, artificial
  Chemically synthesized
aaaagcugaugcuaauaac

SEQ ID NO: 13132 - RNA, 19 nt, artificial
  Chemically synthesized
aaacaaaaagaagagccua

SEQ ID NO: 13133 - RNA, 19 nt, artificial
  Chemically synthesized
caggcccaaggaguaagua

SEQ ID NO: 13134 - RNA, 19 nt, artificial
  Chemically synthesized
aagucugagcccagacauu

SEQ ID NO: 13135 - RNA, 19 nt, artificial
  Chemically synthesized
gaaagcacucggagagaag

SEQ ID NO: 13136 - RNA, 19 nt, artificial
  Chemically synthesized
uauuuauucccuguuaaaa

SEQ ID NO: 13137 - RNA, 19 nt, artificial
  Chemically synthesized
aaaaccuagcaucuuacaa

SEQ ID NO: 13138 - RNA, 19 nt, artificial
  Chemically synthesized
guggauggaagugucugga

SEQ ID NO: 13139 - RNA, 19 nt, artificial
  Chemically synthesized
aaaaagaagagccuaagga

SEQ ID NO: 13140 - RNA, 19 nt, artificial
  Chemically synthesized
cauugucuuugucuugaag

SEQ ID NO: 13141 - RNA, 19 nt, artificial
  Chemically synthesized
auuuccugaugcauuugca

SEQ ID NO: 13142 - RNA, 19 nt, artificial
  Chemically synthesized
cuauuacuuguuuguaaga

SEQ ID NO: 13143 - RNA, 19 nt, artificial
  Chemically synthesized
ugcuguauacuguacugag

SEQ ID NO: 13144 - RNA, 19 nt, artificial
  Chemically synthesized
uguuaaaauuuaaccuacu

SEQ ID NO: 13145 - RNA, 19 nt, artificial
  Chemically synthesized
cagacauuccaaaaucgac

SEQ ID NO: 13146 - RNA, 19 nt, artificial
  Chemically synthesized
agugaaaaagcugaugcua

SEQ ID NO: 13147 - RNA, 19 nt, artificial
  Chemically synthesized
gauucagcuucgagggaac

SEQ ID NO: 13148 - RNA, 19 nt, artificial
  Chemically synthesized
ggcuuuccagaugaaccca

SEQ ID NO: 13149 - RNA, 19 nt, artificial
  Chemically synthesized
uggaaagcacucggagaga

SEQ ID NO: 13150 - RNA, 19 nt, artificial
  Chemically synthesized
ucuugaagaagggcaauga

SEQ ID NO: 13151 - RNA, 19 nt, artificial
  Chemically synthesized
caaaaacaagacacccaag

SEQ ID NO: 13152 - RNA, 19 nt, artificial
  Chemically synthesized
uuuggaaagcacucggaga

SEQ ID NO: 13153 - RNA, 19 nt, artificial
  Chemically synthesized
augguaggguuaugaguca

SEQ ID NO: 13154 - RNA, 19 nt, artificial
  Chemically synthesized
cggauuugcuucaacauug

SEQ ID NO: 13155 - RNA, 19 nt, artificial
  Chemically synthesized
uucccugcaacuaccuuga

SEQ ID NO: 13156 - RNA, 19 nt, artificial
  Chemically synthesized
ccuacuagacaaugaugug

SEQ ID NO: 13157 - RNA, 19 nt, artificial
  Chemically synthesized
agaagacagcaugaaggau

SEQ ID NO: 13158 - RNA, 19 nt, artificial
  Chemically synthesized
uuaaccuacuagacaauga

SEQ ID NO: 13159 - RNA, 19 nt, artificial
  Chemically synthesized
aaaaagcugaugcuaauaa

SEQ ID NO: 13160 - RNA, 19 nt, artificial
  Chemically synthesized
cuuuccagaugaacccaag

SEQ ID NO: 13161 - RNA, 19 nt, artificial
  Chemically synthesized
aguggaggcacucuucagu

SEQ ID NO: 13162 - RNA, 19 nt, artificial
  Chemically synthesized
cugugagguguuauauaac

SEQ ID NO: 13163 - RNA, 19 nt, artificial
  Chemically synthesized
caugacugaagcagagaag

SEQ ID NO: 13164 - RNA, 19 nt, artificial
  Chemically synthesized
ggugaaaaacuacugccug

SEQ ID NO: 13165 - RNA, 19 nt, artificial
  Chemically synthesized
uucacacuguaaacauuca

SEQ ID NO: 13166 - RNA, 19 nt, artificial
  Chemically synthesized
aauggaaaaaagcugaaga

SEQ ID NO: 13167 - RNA, 19 nt, artificial
  Chemically synthesized
uuacaguuuggaaguguua

SEQ ID NO: 13168 - RNA, 19 nt, artificial
  Chemically synthesized
cucuacuaccagacagaga

SEQ ID NO: 13169 - RNA, 19 nt, artificial
  Chemically synthesized
gugaccaaggcuuuccaga

SEQ ID NO: 13170 - RNA, 19 nt, artificial
  Chemically synthesized
aggaccuggaguuucagga

SEQ ID NO: 13171 - RNA, 19 nt, artificial
  Chemically synthesized
ggaguaaguacaaauauuc

SEQ ID NO: 13172 - RNA, 19 nt, artificial
  Chemically synthesized
agugggugaccaaggcuuu

SEQ ID NO: 13173 - RNA, 19 nt, artificial
  Chemically synthesized
aacaagacacccaagucca

SEQ ID NO: 13174 - RNA, 19 nt, artificial
  Chemically synthesized
aguguucccaugcccuaca

SEQ ID NO: 13175 - RNA, 19 nt, artificial
  Chemically synthesized
cagagaucuucagggcucu

SEQ ID NO: 13176 - RNA, 19 nt, artificial
  Chemically synthesized
uugugccugagacaaaaga

SEQ ID NO: 13177 - RNA, 19 nt, artificial
  Chemically synthesized
gauuuagcacccuucugcu

SEQ ID NO: 13178 - RNA, 19 nt, artificial
  Chemically synthesized
aagugaaaaagcugaugcu

SEQ ID NO: 13179 - RNA, 19 nt, artificial
  Chemically synthesized
aaccuuauagguuacucau

SEQ ID NO: 13180 - RNA, 19 nt, artificial
  Chemically synthesized
uauccugaagaacaugacu

SEQ ID NO: 13181 - RNA, 19 nt, artificial
  Chemically synthesized
uacagauuuggaaagcacu

SEQ ID NO: 13182 - RNA, 19 nt, artificial
  Chemically synthesized
ucaaggugcacuacaagua

SEQ ID NO: 13183 - RNA, 19 nt, artificial
  Chemically synthesized
guuucuaccuaaucauguc

SEQ ID NO: 13184 - RNA, 19 nt, artificial
  Chemically synthesized
guguuauauaacauugcuu

SEQ ID NO: 13185 - RNA, 19 nt, artificial
  Chemically synthesized
agagaagucuaggauguuu

SEQ ID NO: 13186 - RNA, 19 nt, artificial
  Chemically synthesized
aacuauuuauucccuguua

SEQ ID NO: 13187 - RNA, 19 nt, artificial
  Chemically synthesized
uauucccuguuaaaauuua

SEQ ID NO: 13188 - RNA, 19 nt, artificial
  Chemically synthesized
caaguacacgguagucaug

SEQ ID NO: 13189 - RNA, 19 nt, artificial
  Chemically synthesized
caaaaagaagagccuaagg

SEQ ID NO: 13190 - RNA, 19 nt, artificial
  Chemically synthesized
aaagaagagccuaaggaag

SEQ ID NO: 13191 - RNA, 19 nt, artificial
  Chemically synthesized
uuggaaguguuaacuauuu

SEQ ID NO: 13192 - RNA, 19 nt, artificial
  Chemically synthesized
aguuaugaggcuacccaac

SEQ ID NO: 13193 - RNA, 19 nt, artificial
  Chemically synthesized
aaguggaggcacucuucag

SEQ ID NO: 13194 - RNA, 19 nt, artificial
  Chemically synthesized
cugagacauuacaguuugg

SEQ ID NO: 13195 - RNA, 19 nt, artificial
  Chemically synthesized
cacccuucugcuguauacu

SEQ ID NO: 13196 - RNA, 19 nt, artificial
  Chemically synthesized
cugcauguacacuauccug

SEQ ID NO: 13197 - RNA, 19 nt, artificial
  Chemically synthesized
agggaugcucuacuaccag

SEQ ID NO: 13198 - RNA, 19 nt, artificial
  Chemically synthesized
aagaaggauuaccuaggca

SEQ ID NO: 13199 - RNA, 19 nt, artificial
  Chemically synthesized
cacgguagucaugaagacu

SEQ ID NO: 13200 - RNA, 19 nt, artificial
  Chemically synthesized
ugugaguacccaggaugau

SEQ ID NO: 13201 - RNA, 19 nt, artificial
  Chemically synthesized
aauaaaaaaaaaccuagca

SEQ ID NO: 13202 - RNA, 19 nt, artificial
  Chemically synthesized
gaaguguuaacuauuuauu

SEQ ID NO: 13203 - RNA, 19 nt, artificial
  Chemically synthesized
gguagucaugaagacucag

SEQ ID NO: 13204 - RNA, 19 nt, artificial
  Chemically synthesized
uacuuguuuguaagauuua

SEQ ID NO: 13205 - RNA, 19 nt, artificial
  Chemically synthesized
auuuauucccuguuaaaau

SEQ ID NO: 13206 - RNA, 19 nt, artificial
  Chemically synthesized
uauuuggguuugugccuga

SEQ ID NO: 13207 - RNA, 19 nt, artificial
  Chemically synthesized
cagagaaggccuuuaccag

SEQ ID NO: 13208 - RNA, 19 nt, artificial
  Chemically synthesized
cugagaaguuaucuuaagg

SEQ ID NO: 13209 - RNA, 19 nt, artificial
  Chemically synthesized
ucaagcuguuugccuguga

SEQ ID NO: 13210 - RNA, 19 nt, artificial
  Chemically synthesized
aagaagagccuaaggaagu

SEQ ID NO: 13211 - RNA, 19 nt, artificial
  Chemically synthesized
cacgagcaugaagucugag

SEQ ID NO: 13212 - RNA, 19 nt, artificial
  Chemically synthesized
acacucaaggugcacuaca

SEQ ID NO: 13213 - RNA, 19 nt, artificial
  Chemically synthesized
uaaccuuauagguuacuca

SEQ ID NO: 13214 - RNA, 19 nt, artificial
  Chemically synthesized
ugucuugaagaagggcaau

SEQ ID NO: 13215 - RNA, 19 nt, artificial
  Chemically synthesized
agggaaggugggcauuuuc

SEQ ID NO: 13216 - RNA, 19 nt, artificial
  Chemically synthesized
caaagggaaggugggcauu

SEQ ID NO: 13217 - RNA, 19 nt, artificial
  Chemically synthesized
cauggugucuaagaaacug

SEQ ID NO: 13218 - RNA, 19 nt, artificial
  Chemically synthesized
acauuuggugcacuuuucu

SEQ ID NO: 13219 - RNA, 19 nt, artificial
  Chemically synthesized
aaaaaccuagcaucuuaca

SEQ ID NO: 13220 - RNA, 19 nt, artificial
  Chemically synthesized
aagacagcaugaaggaugc

SEQ ID NO: 13221 - RNA, 19 nt, artificial
  Chemically synthesized
uuucagaagacagcaugaa

SEQ ID NO: 13222 - RNA, 19 nt, artificial
  Chemically synthesized
gugaguacccaggaugauu

SEQ ID NO: 13223 - RNA, 19 nt, artificial
  Chemically synthesized
aaagcugaagaacaguuag

SEQ ID NO: 13224 - RNA, 19 nt, artificial
  Chemically synthesized
agaggaccuggaguuucag

SEQ ID NO: 13225 - RNA, 19 nt, artificial
  Chemically synthesized
ggguuaugagucaguugcc

SEQ ID NO: 13226 - RNA, 19 nt, artificial
  Chemically synthesized
cauguucaacgggcagaag

SEQ ID NO: 13227 - RNA, 19 nt, artificial
  Chemically synthesized
ucaucaagcuguacauuug

SEQ ID NO: 13228 - RNA, 19 nt, artificial
  Chemically synthesized
aaaaugaagcccuauuacu

SEQ ID NO: 13229 - RNA, 19 nt, artificial
  Chemically synthesized
ugugggcaagcuguuucga

SEQ ID NO: 13230 - RNA, 19 nt, artificial
  Chemically synthesized
uacaaauauuccuguuucu

SEQ ID NO: 13231 - RNA, 19 nt, artificial
  Chemically synthesized
ggugucuaagaaacuggag

SEQ ID NO: 13232 - RNA, 19 nt, artificial
  Chemically synthesized
uacacgguagucaugaaga

SEQ ID NO: 13233 - RNA, 19 nt, artificial
  Chemically synthesized
uauuccuguuucugaacca

SEQ ID NO: 13234 - RNA, 19 nt, artificial
  Chemically synthesized
gauuaccuaggcaaggcga

SEQ ID NO: 13235 - RNA, 19 nt, artificial
  Chemically synthesized
ccuugauucagcuucgagg

SEQ ID NO: 13236 - RNA, 19 nt, artificial
  Chemically synthesized
uauacuguacugagacauu

SEQ ID NO: 13237 - RNA, 19 nt, artificial
  Chemically synthesized
uuaaagaagccuugauuca

SEQ ID NO: 13238 - RNA, 19 nt, artificial
  Chemically synthesized
acaacagaaccucagcuua

SEQ ID NO: 13239 - RNA, 19 nt, artificial
  Chemically synthesized
acucaaggugcacuacaag

SEQ ID NO: 13240 - RNA, 19 nt, artificial
  Chemically synthesized
caucaagcuguacauuugg

SEQ ID NO: 13241 - RNA, 19 nt, artificial
  Chemically synthesized
uaaccagacaacagaaccu

SEQ ID NO: 13242 - RNA, 19 nt, artificial
  Chemically synthesized
cuuguucccugcaacuacc

SEQ ID NO: 13243 - RNA, 19 nt, artificial
  Chemically synthesized
aaaacuacugccugacucu

SEQ ID NO: 13244 - RNA, 19 nt, artificial
  Chemically synthesized
cuguacugagacauuacag

SEQ ID NO: 13245 - RNA, 19 nt, artificial
  Chemically synthesized
gaucaagacaguuucucug

SEQ ID NO: 13246 - RNA, 19 nt, artificial
  Chemically synthesized
gaagggcaaugauaacugg

SEQ ID NO: 13247 - RNA, 19 nt, artificial
  Chemically synthesized
ucaugguaggguuaugagu

SEQ ID NO: 13248 - RNA, 19 nt, artificial
  Chemically synthesized
ugaagaacaugacugaagc

SEQ ID NO: 13249 - RNA, 19 nt, artificial
  Chemically synthesized
uucgagggaaccagcugau

SEQ ID NO: 13250 - RNA, 19 nt, artificial
  Chemically synthesized
aagaaggacuggaagggag

SEQ ID NO: 13251 - RNA, 19 nt, artificial
  Chemically synthesized
aaguacaaauauuccuguu

SEQ ID NO: 13252 - RNA, 19 nt, artificial
  Chemically synthesized
uuuggaaguguuaacuauu

SEQ ID NO: 13253 - RNA, 19 nt, artificial
  Chemically synthesized
aaagggcacgagagagucu

SEQ ID NO: 13254 - RNA, 19 nt, artificial
  Chemically synthesized
uaaggaagugaagcucagu

SEQ ID NO: 13255 - RNA, 19 nt, artificial
  Chemically synthesized
gaacauugucuuugucuug

SEQ ID NO: 13256 - RNA, 19 nt, artificial
  Chemically synthesized
cacucggagagaagucuag

SEQ ID NO: 13257 - RNA, 19 nt, artificial
  Chemically synthesized
caaagaccuuaaagaagcc

SEQ ID NO: 13258 - RNA, 19 nt, artificial
  Chemically synthesized
aguuucuaccuaaucaugu

SEQ ID NO: 13259 - RNA, 19 nt, artificial
  Chemically synthesized
cucaaggugcacuacaagu

SEQ ID NO: 13260 - RNA, 19 nt, artificial
  Chemically synthesized
aaagcacucggagagaagu

SEQ ID NO: 13261 - RNA, 19 nt, artificial
  Chemically synthesized
caauaaaaaaaaaccuagc

SEQ ID NO: 13262 - RNA, 19 nt, artificial
  Chemically synthesized
aaaaguggauggaaguguc

SEQ ID NO: 13263 - RNA, 19 nt, artificial
  Chemically synthesized
auauaacauugcuuucaug

SEQ ID NO: 13264 - RNA, 19 nt, artificial
  Chemically synthesized
uguuauauaacauugcuuu

SEQ ID NO: 13265 - RNA, 19 nt, artificial
  Chemically synthesized
aaguacacgguagucauga

SEQ ID NO: 13266 - RNA, 19 nt, artificial
  Chemically synthesized
auuuaaccuacuagacaau

SEQ ID NO: 13267 - RNA, 19 nt, artificial
  Chemically synthesized
agggaaccagcugauagac

SEQ ID NO: 13268 - RNA, 19 nt, artificial
  Chemically synthesized
aggugaauggaggaguuag

SEQ ID NO: 13269 - RNA, 19 nt, artificial
  Chemically synthesized
uuaucaaaggugaaugaag

SEQ ID NO: 13270 - RNA, 19 nt, artificial
  Chemically synthesized
cacucccggauuugcuuca

SEQ ID NO: 13271 - RNA, 19 nt, artificial
  Chemically synthesized
uuuuguugaagacugcgca

SEQ ID NO: 13272 - RNA, 19 nt, artificial
  Chemically synthesized
uacuguacugagacauuac

SEQ ID NO: 13273 - RNA, 19 nt, artificial
  Chemically synthesized
ugucuggaagcagaagcua

SEQ ID NO: 13274 - RNA, 19 nt, artificial
  Chemically synthesized
uagguuacucauaaggcau

SEQ ID NO: 13275 - RNA, 19 nt, artificial
  Chemically synthesized
aaaaaaaaaccuagcaucu

SEQ ID NO: 13276 - RNA, 19 nt, artificial
  Chemically synthesized
gaguaaguacaaauauucc

SEQ ID NO: 13277 - RNA, 19 nt, artificial
  Chemically synthesized
cauuaaccgagacaagcac

SEQ ID NO: 13278 - RNA, 19 nt, artificial
  Chemically synthesized
acaagacacccaaguccag

SEQ ID NO: 13279 - RNA, 19 nt, artificial
  Chemically synthesized
cauuugcaacacugagaag

SEQ ID NO: 13280 - RNA, 19 nt, artificial
  Chemically synthesized
auuacaguuuggaaguguu

SEQ ID NO: 13281 - RNA, 19 nt, artificial
  Chemically synthesized
aguuuuuguugaagacugc

SEQ ID NO: 13282 - RNA, 19 nt, artificial
  Chemically synthesized
aagggcacgagagagucuu

SEQ ID NO: 13283 - RNA, 19 nt, artificial
  Chemically synthesized
auaauccugguguuaucaa

SEQ ID NO: 13284 - RNA, 19 nt, artificial
  Chemically synthesized
auuacuuguuuguaagauu

SEQ ID NO: 13285 - RNA, 19 nt, artificial
  Chemically synthesized
ucuuaaggcuugaaguaac

SEQ ID NO: 13286 - RNA, 19 nt, artificial
  Chemically synthesized
auaaaaaaaaaccuagcau

SEQ ID NO: 13287 - RNA, 19 nt, artificial
  Chemically synthesized
agaagagcuccaggucaug

SEQ ID NO: 13288 - RNA, 19 nt, artificial
  Chemically synthesized
gaagaacaguuagcauugg

SEQ ID NO: 13289 - RNA, 19 nt, artificial
  Chemically synthesized
ucugagcccagacauucca

SEQ ID NO: 13290 - RNA, 19 nt, artificial
  Chemically synthesized
agagucuuccagguacuga

SEQ ID NO: 13291 - RNA, 19 nt, artificial
  Chemically synthesized
ugaguacccaggaugauuu

SEQ ID NO: 13292 - RNA, 19 nt, artificial
  Chemically synthesized
uccaaaaucgacaaggcga

SEQ ID NO: 13293 - RNA, 19 nt, artificial
  Chemically synthesized
ugaagaacaguuagcauug

SEQ ID NO: 13294 - RNA, 19 nt, artificial
  Chemically synthesized
cagacaacagaaccucagc

SEQ ID NO: 13295 - RNA, 19 nt, artificial
  Chemically synthesized
auguacacuauccugaaga

SEQ ID NO: 13296 - RNA, 19 nt, artificial
  Chemically synthesized
uuugcaacacugagaaguu

SEQ ID NO: 13297 - RNA, 19 nt, artificial
  Chemically synthesized
aucccagcuccuccuaguu

SEQ ID NO: 13298 - RNA, 19 nt, artificial
  Chemically synthesized
uguacugagacauuacagu

SEQ ID NO: 13299 - RNA, 19 nt, artificial
  Chemically synthesized
aaccaguugagcugcggau

SEQ ID NO: 13300 - RNA, 19 nt, artificial
  Chemically synthesized
cuaagaaacuggagcuccg

SEQ ID NO: 13301 - RNA, 19 nt, artificial
  Chemically synthesized
acuuguuuguaagauuuag

SEQ ID NO: 13302 - RNA, 19 nt, artificial
  Chemically synthesized
cugugguggaucaagacag

SEQ ID NO: 13303 - RNA, 19 nt, artificial
  Chemically synthesized
gaagcccuauuacuuguuu

SEQ ID NO: 13304 - RNA, 19 nt, artificial
  Chemically synthesized
gacauuacaguuuggaagu

SEQ ID NO: 13305 - RNA, 19 nt, artificial
  Chemically synthesized
gaaccucagcuuaagaaag

SEQ ID NO: 13306 - RNA, 19 nt, artificial
  Chemically synthesized
gauccuguuucuugcucug

SEQ ID NO: 13307 - RNA, 19 nt, artificial
  Chemically synthesized
cacuauccugaagaacaug

SEQ ID NO: 13308 - RNA, 19 nt, artificial
  Chemically synthesized
augcuaauaaccagacaac

SEQ ID NO: 13309 - RNA, 19 nt, artificial
  Chemically synthesized
uacaaaaacaagacaccca

SEQ ID NO: 13310 - RNA, 19 nt, artificial
  Chemically synthesized
aaaguggauggaagugucu

SEQ ID NO: 13311 - RNA, 19 nt, artificial
  Chemically synthesized
caucuuacaaaaacaagac

SEQ ID NO: 13312 - RNA, 19 nt, artificial
  Chemically synthesized
gugguggaucaagacaguu

SEQ ID NO: 13313 - RNA, 19 nt, artificial
  Chemically synthesized
agcaugaagucugagccca

SEQ ID NO: 13314 - RNA, 19 nt, artificial
  Chemically synthesized
acuacugccugacucugug

SEQ ID NO: 13315 - RNA, 19 nt, artificial
  Chemically synthesized
aaccagaggaccuggaguu

SEQ ID NO: 13316 - RNA, 19 nt, artificial
  Chemically synthesized
gcucuacuaccagacagag

SEQ ID NO: 13317 - RNA, 19 nt, artificial
  Chemically synthesized
gauauaauccugguguuau

SEQ ID NO: 13318 - RNA, 19 nt, artificial
  Chemically synthesized
aggaggaauggaaaaaagc

SEQ ID NO: 13319 - RNA, 19 nt, artificial
  Chemically synthesized
aaagcugaugcuaauaacc

SEQ ID NO: 13320 - RNA, 19 nt, artificial
  Chemically synthesized
aggauguuucacaaacuac

SEQ ID NO: 13321 - RNA, 19 nt, artificial
  Chemically synthesized
accagaggaccuggaguuu

SEQ ID NO: 13322 - RNA, 19 nt, artificial
  Chemically synthesized
aacauugcuuucauguaug

SEQ ID NO: 13323 - RNA, 19 nt, artificial
  Chemically synthesized
uuucugaaccauuacugua

SEQ ID NO: 13324 - RNA, 19 nt, artificial
  Chemically synthesized
acugcgcaacuacagauuu

SEQ ID NO: 13325 - RNA, 19 nt, artificial
  Chemically synthesized
aagaagccuugauucagcu

SEQ ID NO: 13326 - RNA, 19 nt, artificial
  Chemically synthesized
acuauccugaagaacauga

SEQ ID NO: 13327 - RNA, 19 nt, artificial
  Chemically synthesized
ucuaccuaaucaugucccu

SEQ ID NO: 13328 - RNA, 19 nt, artificial
  Chemically synthesized
uaagauuuagcacccuucu

SEQ ID NO: 13329 - RNA, 19 nt, artificial
  Chemically synthesized
ucucaugguaggguuauga

SEQ ID NO: 13330 - RNA, 19 nt, artificial
  Chemically synthesized
gaccaaggcuuuccagaug

SEQ ID NO: 13331 - RNA, 19 nt, artificial
  Chemically synthesized
agcugaagaaaaugaagcc

SEQ ID NO: 13332 - RNA, 19 nt, artificial
  Chemically synthesized
uuguuuguaagauuuagca

SEQ ID NO: 13333 - RNA, 19 nt, artificial
  Chemically synthesized
aucuuacaaaaacaagaca

SEQ ID NO: 13334 - RNA, 19 nt, artificial
  Chemically synthesized
gauagacuauaagauccug

SEQ ID NO: 13335 - RNA, 19 nt, artificial
  Chemically synthesized
aacagaaccucagcuuaag

SEQ ID NO: 13336 - RNA, 19 nt, artificial
  Chemically synthesized
acaauaaaaaaaaaccuag

SEQ ID NO: 13337 - RNA, 19 nt, artificial
  Chemically synthesized
cuguauacuguacugagac

SEQ ID NO: 13338 - RNA, 19 nt, artificial
  Chemically synthesized
ccugcaacuaccuugaacc

SEQ ID NO: 13339 - RNA, 19 nt, artificial
  Chemically synthesized
cuguuaaaauuuaaccuac

SEQ ID NO: 13340 - RNA, 19 nt, artificial
  Chemically synthesized
caaggcuuuccagaugaac

SEQ ID NO: 13341 - RNA, 19 nt, artificial
  Chemically synthesized
gucauguucaacgggcaga

SEQ ID NO: 13342 - RNA, 19 nt, artificial
  Chemically synthesized
augaacccaaggaaaguga

SEQ ID NO: 13343 - RNA, 19 nt, artificial
  Chemically synthesized
acuacaaguacacgguagu

SEQ ID NO: 13344 - RNA, 19 nt, artificial
  Chemically synthesized
aacaugacugaagcagaga

SEQ ID NO: 13345 - RNA, 19 nt, artificial
  Chemically synthesized
uucagaagacagcaugaag

SEQ ID NO: 13346 - RNA, 19 nt, artificial
  Chemically synthesized
aucugugguggaucaagac

SEQ ID NO: 13347 - RNA, 19 nt, artificial
  Chemically synthesized
gagccuaaggaagugaagc

SEQ ID NO: 13348 - RNA, 19 nt, artificial
  Chemically synthesized
accaaaugagagacaagug

SEQ ID NO: 13349 - RNA, 19 nt, artificial
  Chemically synthesized
aguaaguacaaauauuccu

SEQ ID NO: 13350 - RNA, 19 nt, artificial
  Chemically synthesized
caacacugagaaguuaucu

SEQ ID NO: 13351 - RNA, 19 nt, artificial
  Chemically synthesized
aucagccucuggaaugaag

SEQ ID NO: 13352 - RNA, 19 nt, artificial
  Chemically synthesized
aauccugguguuaucaaag

SEQ ID NO: 13353 - RNA, 19 nt, artificial
  Chemically synthesized
aagcuguacauuuggugca

SEQ ID NO: 13354 - RNA, 19 nt, artificial
  Chemically synthesized
agugaagcucaguguuccc

SEQ ID NO: 13355 - RNA, 19 nt, artificial
  Chemically synthesized
cuuacuuccaacgagggau

SEQ ID NO: 13356 - RNA, 19 nt, artificial
  Chemically synthesized
cacacuaagcugagcuauc

SEQ ID NO: 13357 - RNA, 19 nt, artificial
  Chemically synthesized
aaaaaaaaccuagcaucuu

SEQ ID NO: 13358 - RNA, 19 nt, artificial
  Chemically synthesized
uuucuugcucugagugcua

SEQ ID NO: 13359 - RNA, 19 nt, artificial
  Chemically synthesized
guucaagcuguuugccugu

SEQ ID NO: 13360 - RNA, 19 nt, artificial
  Chemically synthesized
uaggguuaugagucaguug

SEQ ID NO: 13361 - RNA, 19 nt, artificial
  Chemically synthesized
uuuggguuugugccugaga

SEQ ID NO: 13362 - RNA, 19 nt, artificial
  Chemically synthesized
aaguuuuuguugaagacug

SEQ ID NO: 13363 - RNA, 19 nt, artificial
  Chemically synthesized
uuacuuguuuguaagauuu

SEQ ID NO: 13364 - RNA, 19 nt, artificial
  Chemically synthesized
acuaccuugaaccaguuga

SEQ ID NO: 13365 - RNA, 19 nt, artificial
  Chemically synthesized
agaaguuaucuuaagggag

SEQ ID NO: 13366 - RNA, 19 nt, artificial
  Chemically synthesized
auuccuguuucugaaccau

SEQ ID NO: 13367 - RNA, 19 nt, artificial
  Chemically synthesized
aagcuguuucgaccaaaug

SEQ ID NO: 13368 - RNA, 19 nt, artificial
  Chemically synthesized
gugaagcucaguguuccca

SEQ ID NO: 13369 - RNA, 19 nt, artificial
  Chemically synthesized
agacagagaaauaugauuu

SEQ ID NO: 13370 - RNA, 19 nt, artificial
  Chemically synthesized
cauuuggugcacuuuucug

SEQ ID NO: 13371 - RNA, 19 nt, artificial
  Chemically synthesized
aguucaagcuguuugccug

SEQ ID NO: 13372 - RNA, 19 nt, artificial
  Chemically synthesized
aaggccuuuaccagaagca

SEQ ID NO: 13373 - RNA, 19 nt, artificial
  Chemically synthesized
gucuuugucuugaagaagg

SEQ ID NO: 13374 - RNA, 19 nt, artificial
  Chemically synthesized
aaaauuuaaccuacuagac

SEQ ID NO: 13375 - RNA, 19 nt, artificial
  Chemically synthesized
ucugugguggaucaagaca

SEQ ID NO: 13376 - RNA, 19 nt, artificial
  Chemically synthesized
uaccagaagcauuaaccga

SEQ ID NO: 13377 - RNA, 19 nt, artificial
  Chemically synthesized
gaguacccaggaugauuuc

SEQ ID NO: 13378 - RNA, 19 nt, artificial
  Chemically synthesized
uguucccugcaacuaccuu

SEQ ID NO: 13379 - RNA, 19 nt, artificial
  Chemically synthesized
agacaaugaugugaguacc

SEQ ID NO: 13380 - RNA, 19 nt, artificial
  Chemically synthesized
aagccuugauucagcuucg

SEQ ID NO: 13381 - RNA, 19 nt, artificial
  Chemically synthesized
gaagugaagcucaguguuc

SEQ ID NO: 13382 - RNA, 19 nt, artificial
  Chemically synthesized
aaucgacaaggcgauggag

SEQ ID NO: 13383 - RNA, 19 nt, artificial
  Chemically synthesized
gcuauuuggguuugugccu

SEQ ID NO: 13384 - RNA, 19 nt, artificial
  Chemically synthesized
aacauugucuuugucuuga

SEQ ID NO: 13385 - RNA, 19 nt, artificial
  Chemically synthesized
aaaaaagcugaagaacagu

SEQ ID NO: 13386 - RNA, 19 nt, artificial
  Chemically synthesized
acucuucaguuaugaggcu

SEQ ID NO: 13387 - RNA, 19 nt, artificial
  Chemically synthesized
caguucaagcuguuugccu

SEQ ID NO: 13388 - RNA, 19 nt, artificial
  Chemically synthesized
aacuacugccugacucugu

SEQ ID NO: 13389 - RNA, 19 nt, artificial
  Chemically synthesized
auugucuuugucuugaaga

SEQ ID NO: 13390 - RNA, 19 nt, artificial
  Chemically synthesized
aaagggaaggugggcauuu

SEQ ID NO: 13391 - RNA, 19 nt, artificial
  Chemically synthesized
cucaugguaggguuaugag

SEQ ID NO: 13392 - RNA, 19 nt, artificial
  Chemically synthesized
augcauuugcaacacugag

SEQ ID NO: 13393 - RNA, 19 nt, artificial
  Chemically synthesized
aaggaaagugaaaaagcug

SEQ ID NO: 13394 - RNA, 19 nt, artificial
  Chemically synthesized
caggugaaaaacuacugcc

SEQ ID NO: 13395 - RNA, 19 nt, artificial
  Chemically synthesized
augaugugaguacccagga

SEQ ID NO: 13396 - RNA, 19 nt, artificial
  Chemically synthesized
aaagaagccuugauucagc

SEQ ID NO: 13397 - RNA, 19 nt, artificial
  Chemically synthesized
guuucuugcucugagugcu

SEQ ID NO: 13398 - RNA, 19 nt, artificial
  Chemically synthesized
uagacaaugaugugaguac

SEQ ID NO: 13399 - RNA, 19 nt, artificial
  Chemically synthesized
uguuucgaccaaaugagag

SEQ ID NO: 13400 - RNA, 19 nt, artificial
  Chemically synthesized
cuuaaggcuugaaguaacc

SEQ ID NO: 13401 - RNA, 19 nt, artificial
  Chemically synthesized
caaaaucgacaaggcgaug

SEQ ID NO: 13402 - RNA, 19 nt, artificial
  Chemically synthesized
cugauagacuauaagaucc

SEQ ID NO: 13403 - RNA, 19 nt, artificial
  Chemically synthesized
acagauuuggaaagcacuc

SEQ ID NO: 13404 - RNA, 19 nt, artificial
  Chemically synthesized
aaguguuaacuauuuauuc

SEQ ID NO: 13405 - RNA, 19 nt, artificial
  Chemically synthesized
uuuauucccuguuaaaauu

SEQ ID NO: 13406 - RNA, 19 nt, artificial
  Chemically synthesized
aagugaagcucaguguucc

SEQ ID NO: 13407 - RNA, 19 nt, artificial
  Chemically synthesized
acgagggaugcucuacuac

SEQ ID NO: 13408 - RNA, 19 nt, artificial
  Chemically synthesized
ucugcuguauacuguacug

SEQ ID NO: 13409 - RNA, 19 nt, artificial
  Chemically synthesized
aguggauggaagugucugg

SEQ ID NO: 13410 - RNA, 19 nt, artificial
  Chemically synthesized
aaaaacaagacacccaagu

SEQ ID NO: 13411 - RNA, 19 nt, artificial
  Chemically synthesized
uuggguuugugccugagac

SEQ ID NO: 13412 - RNA, 19 nt, artificial
  Chemically synthesized
cucaccgugugcuauuugg

SEQ ID NO: 13413 - RNA, 19 nt, artificial
  Chemically synthesized
guacaaauauuccuguuuc

SEQ ID NO: 13414 - RNA, 19 nt, artificial
  Chemically synthesized
cucucucugcuucuuuccu

SEQ ID NO: 13415 - RNA, 19 nt, artificial
  Chemically synthesized
cagaaagugaacaccuugg

SEQ ID NO: 13416 - RNA, 19 nt, artificial
  Chemically synthesized
gacaagaaggacuggaagg

SEQ ID NO: 13417 - RNA, 19 nt, artificial
  Chemically synthesized
uguuucacaaacuacaaag

SEQ ID NO: 13418 - RNA, 19 nt, artificial
  Chemically synthesized
aguacaaauauuccuguuu

SEQ ID NO: 13419 - RNA, 19 nt, artificial
  Chemically synthesized
aggcuuuccagaugaaccc

SEQ ID NO: 13420 - RNA, 19 nt, artificial
  Chemically synthesized
uuccagaugaacccaagga

SEQ ID NO: 13421 - RNA, 19 nt, artificial
  Chemically synthesized
uacugauccuguuucuugc

SEQ ID NO: 13422 - RNA, 19 nt, artificial
  Chemically synthesized
guacacuauccugaagaac

SEQ ID NO: 13423 - RNA, 19 nt, artificial
  Chemically synthesized
gagagucuuccagguacug

SEQ ID NO: 13424 - RNA, 19 nt, artificial
  Chemically synthesized
uaaagaagccuugauucag

SEQ ID NO: 13425 - RNA, 19 nt, artificial
  Chemically synthesized
gagacaaaagaagagcucc

SEQ ID NO: 13426 - RNA, 19 nt, artificial
  Chemically synthesized
ugugcuauuuggguuugug

SEQ ID NO: 13427 - RNA, 19 nt, artificial
  Chemically synthesized
caugguaggguuaugaguc

SEQ ID NO: 13428 - RNA, 19 nt, artificial
  Chemically synthesized
ucuuugucuugaagaaggg

SEQ ID NO: 13429 - RNA, 19 nt, artificial
  Chemically synthesized
acugaagcagagaaggccu

SEQ ID NO: 13430 - RNA, 19 nt, artificial
  Chemically synthesized
aggcccaaggaguaaguac

SEQ ID NO: 13431 - RNA, 19 nt, artificial
  Chemically synthesized
uuauauaacauugcuuuca

SEQ ID NO: 13432 - RNA, 19 nt, artificial
  Chemically synthesized
aucaagcuguacauuuggu

SEQ ID NO: 13433 - RNA, 19 nt, artificial
  Chemically synthesized
accugucuucucucugucu

SEQ ID NO: 13434 - RNA, 19 nt, artificial
  Chemically synthesized
uaccacaauaaaaaaaaac

SEQ ID NO: 13435 - RNA, 19 nt, artificial
  Chemically synthesized
agcaucuuacaaaaacaag

SEQ ID NO: 13436 - RNA, 19 nt, artificial
  Chemically synthesized
uucgaccaaaugagagaca

SEQ ID NO: 13437 - RNA, 19 nt, artificial
  Chemically synthesized
auuccaaaaucgacaaggc

SEQ ID NO: 13438 - RNA, 19 nt, artificial
  Chemically synthesized
uaguuucuaccuaaucaug

SEQ ID NO: 13439 - RNA, 19 nt, artificial
  Chemically synthesized
cauuacaguuuggaagugu

SEQ ID NO: 13440 - RNA, 19 nt, artificial
  Chemically synthesized
uacauuuggugcacuuuuc

SEQ ID NO: 13441 - RNA, 19 nt, artificial
  Chemically synthesized
ggugcacuacaaguacacg

SEQ ID NO: 13442 - RNA, 19 nt, artificial
  Chemically synthesized
ucagacuucaugcucgugg

SEQ ID NO: 13443 - RNA, 19 nt, artificial
  Chemically synthesized
uucaggauaguguacaugc

SEQ ID NO: 13444 - RNA, 19 nt, artificial
  Chemically synthesized
uuagguagaaacuaggagg

SEQ ID NO: 13445 - RNA, 19 nt, artificial
  Chemically synthesized
auuuucuucagcuuuguag

SEQ ID NO: 13446 - RNA, 19 nt, artificial
  Chemically synthesized
ucuaucagcugguucccuc

SEQ ID NO: 13447 - RNA, 19 nt, artificial
  Chemically synthesized
uuuccuuggguucaucugg

SEQ ID NO: 13448 - RNA, 19 nt, artificial
  Chemically synthesized
uuguaguuugugaaacauc

SEQ ID NO: 13449 - RNA, 19 nt, artificial
  Chemically synthesized
uuuccagacacuuccaucc

SEQ ID NO: 13450 - RNA, 19 nt, artificial
  Chemically synthesized
ugguaguagagcaucccuc

SEQ ID NO: 13451 - RNA, 19 nt, artificial
  Chemically synthesized
uuuccaaaucuguaguugc

SEQ ID NO: 13452 - RNA, 19 nt, artificial
  Chemically synthesized
uuuccauuccuccuucuug

SEQ ID NO: 13453 - RNA, 19 nt, artificial
  Chemically synthesized
uuccuuaggcucuucuuuu

SEQ ID NO: 13454 - RNA, 19 nt, artificial
  Chemically synthesized
uauaagguuacuucaagcc

SEQ ID NO: 13455 - RNA, 19 nt, artificial
  Chemically synthesized
uucaucuggaaagccuugg

SEQ ID NO: 13456 - RNA, 19 nt, artificial
  Chemically synthesized
uuauauaacaccucacagg

SEQ ID NO: 13457 - RNA, 19 nt, artificial
  Chemically synthesized
uuccauuccuccuucuugg

SEQ ID NO: 13458 - RNA, 19 nt, artificial
  Chemically synthesized
ucuuauagucuaucagcug

SEQ ID NO: 13459 - RNA, 19 nt, artificial
  Chemically synthesized
auguucuucaggauagugu

SEQ ID NO: 13460 - RNA, 19 nt, artificial
  Chemically synthesized
uuuauuuguauaugccuua

SEQ ID NO: 13461 - RNA, 19 nt, artificial
  Chemically synthesized
uagucuaucagcugguucc

SEQ ID NO: 13462 - RNA, 19 nt, artificial
  Chemically synthesized
uuuuuuauugugguaugac

SEQ ID NO: 13463 - RNA, 19 nt, artificial
  Chemically synthesized
uauuuguacuuacuccuug

SEQ ID NO: 13464 - RNA, 19 nt, artificial
  Chemically synthesized
auuuggucgaaacagcuug

SEQ ID NO: 13465 - RNA, 19 nt, artificial
  Chemically synthesized
ugauuagguagaaacuagg

SEQ ID NO: 13466 - RNA, 19 nt, artificial
  Chemically synthesized
uuaucauugcccuucuuca

SEQ ID NO: 13467 - RNA, 19 nt, artificial
  Chemically synthesized
uuucacuuuccuuggguuc

SEQ ID NO: 13468 - RNA, 19 nt, artificial
  Chemically synthesized
ucucaguacaguauacagc

SEQ ID NO: 13469 - RNA, 19 nt, artificial
  Chemically synthesized
uuuuuauugugguaugaca

SEQ ID NO: 13470 - RNA, 19 nt, artificial
  Chemically synthesized
uuuuuuuuauugugguaug

SEQ ID NO: 13471 - RNA, 19 nt, artificial
  Chemically synthesized
ugaaacuccagguccucug

SEQ ID NO: 13472 - RNA, 19 nt, artificial
  Chemically synthesized
uuuaacagggaauaaauag

SEQ ID NO: 13473 - RNA, 19 nt, artificial
  Chemically synthesized
ucuugauccaccacagaug

SEQ ID NO: 13474 - RNA, 19 nt, artificial
  Chemically synthesized
uuguauaugccuuaugagu

SEQ ID NO: 13475 - RNA, 19 nt, artificial
  Chemically synthesized
uacagcuugaugaauguuu

SEQ ID NO: 13476 - RNA, 19 nt, artificial
  Chemically synthesized
uucagaaacaggaauauuu

SEQ ID NO: 13477 - RNA, 19 nt, artificial
  Chemically synthesized
uuuucuucagcuuuguagu

SEQ ID NO: 13478 - RNA, 19 nt, artificial
  Chemically synthesized
uguaguugcgcagucuuca

SEQ ID NO: 13479 - RNA, 19 nt, artificial
  Chemically synthesized
ucauuccagaggcugaugg

SEQ ID NO: 13480 - RNA, 19 nt, artificial
  Chemically synthesized
ucucauuuggucgaaacag

SEQ ID NO: 13481 - RNA, 19 nt, artificial
  Chemically synthesized
uauuuguauaugccuuaug

SEQ ID NO: 13482 - RNA, 19 nt, artificial
  Chemically synthesized
uucuguugucugguuauua

SEQ ID NO: 13483 - RNA, 19 nt, artificial
  Chemically synthesized
uccuucaugcugucuucug

SEQ ID NO: 13484 - RNA, 19 nt, artificial
  Chemically synthesized
uucuuuugucucaggcaca

SEQ ID NO: 13485 - RNA, 19 nt, artificial
  Chemically synthesized
ucuucauucaccuuugaua

SEQ ID NO: 13486 - RNA, 19 nt, artificial
  Chemically synthesized
ucauauagcuucugcuucc

SEQ ID NO: 13487 - RNA, 19 nt, artificial
  Chemically synthesized
auaaauaguuaacacuucc

SEQ ID NO: 13488 - RNA, 19 nt, artificial
  Chemically synthesized
uucuucagcuuuguaguuu

SEQ ID NO: 13489 - RNA, 19 nt, artificial
  Chemically synthesized
ucugggcucagacuucaug

SEQ ID NO: 13490 - RNA, 19 nt, artificial
  Chemically synthesized
uugucuaguagguuaaauu

SEQ ID NO: 13491 - RNA, 19 nt, artificial
  Chemically synthesized
uucucuccgagugcuuucc

SEQ ID NO: 13492 - RNA, 19 nt, artificial
  Chemically synthesized
uuccagagcccugaagauc

SEQ ID NO: 13493 - RNA, 19 nt, artificial
  Chemically synthesized
uucauuccagaggcugaug

SEQ ID NO: 13494 - RNA, 19 nt, artificial
  Chemically synthesized
aauauuuguacuuacuccu

SEQ ID NO: 13495 - RNA, 19 nt, artificial
  Chemically synthesized
acaaagacaauguucccug

SEQ ID NO: 13496 - RNA, 19 nt, artificial
  Chemically synthesized
aucauugcccuucuucaag

SEQ ID NO: 13497 - RNA, 19 nt, artificial
  Chemically synthesized
uucuuuaaggucuuugaua

SEQ ID NO: 13498 - RNA, 19 nt, artificial
  Chemically synthesized
uuuggucgaaacagcuugc

SEQ ID NO: 13499 - RNA, 19 nt, artificial
  Chemically synthesized
uuaagcugagguucuguug

SEQ ID NO: 13500 - RNA, 19 nt, artificial
  Chemically synthesized
uucuucauucaccuuugau

SEQ ID NO: 13501 - RNA, 19 nt, artificial
  Chemically synthesized
ucaguguugcaaaugcauc

SEQ ID NO: 13502 - RNA, 19 nt, artificial
  Chemically synthesized
ugaaacauccuagacuucu

SEQ ID NO: 13503 - RNA, 19 nt, artificial
  Chemically synthesized
uaguagagcaucccucguu

SEQ ID NO: 13504 - RNA, 19 nt, artificial
  Chemically synthesized
uaccuggaagacucucucg

SEQ ID NO: 13505 - RNA, 19 nt, artificial
  Chemically synthesized
ugaagagugccuccacuug

SEQ ID NO: 13506 - RNA, 19 nt, artificial
  Chemically synthesized
ucauuuggucgaaacagcu

SEQ ID NO: 13507 - RNA, 19 nt, artificial
  Chemically synthesized
uucugguaaaggccuucuc

SEQ ID NO: 13508 - RNA, 19 nt, artificial
  Chemically synthesized
aagacaaagacaauguucc

SEQ ID NO: 13509 - RNA, 19 nt, artificial
  Chemically synthesized
uucacuuccuuaggcucuu

SEQ ID NO: 13510 - RNA, 19 nt, artificial
  Chemically synthesized
uagguuuuuuuuuauugug

SEQ ID NO: 13511 - RNA, 19 nt, artificial
  Chemically synthesized
uccagagcccugaagaucu

SEQ ID NO: 13512 - RNA, 19 nt, artificial
  Chemically synthesized
ucuguugucugguuauuag

SEQ ID NO: 13513 - RNA, 19 nt, artificial
  Chemically synthesized
uguugucugguuauuagca

SEQ ID NO: 13514 - RNA, 19 nt, artificial
  Chemically synthesized
uaaauaguuaacacuucca

SEQ ID NO: 13515 - RNA, 19 nt, artificial
  Chemically synthesized
ucugcuucagucauguucu

SEQ ID NO: 13516 - RNA, 19 nt, artificial
  Chemically synthesized
uacuucaagccuuaagagc

SEQ ID NO: 13517 - RNA, 19 nt, artificial
  Chemically synthesized
ugcuucagucauguucuuc

SEQ ID NO: 13518 - RNA, 19 nt, artificial
  Chemically synthesized
uuggucgaaacagcuugcc

SEQ ID NO: 13519 - RNA, 19 nt, artificial
  Chemically synthesized
ugguucaagguaguugcag

SEQ ID NO: 13520 - RNA, 19 nt, artificial
  Chemically synthesized
uguauaugccuuaugagua

SEQ ID NO: 13521 - RNA, 19 nt, artificial
  Chemically synthesized
aacacugagcuucacuucc

SEQ ID NO: 13522 - RNA, 19 nt, artificial
  Chemically synthesized
uuaaauuuuaacagggaau

SEQ ID NO: 13523 - RNA, 19 nt, artificial
  Chemically synthesized
auaguuaacacuuccaaac

SEQ ID NO: 13524 - RNA, 19 nt, artificial
  Chemically synthesized
ugucucaggcacaaaccca

SEQ ID NO: 13525 - RNA, 19 nt, artificial
  Chemically synthesized
ucaugcugucuucugaaag

SEQ ID NO: 13526 - RNA, 19 nt, artificial
  Chemically synthesized
uaguagguuaaauuuuaac

SEQ ID NO: 13527 - RNA, 19 nt, artificial
  Chemically synthesized
uuuuccauuccuccuucuu

SEQ ID NO: 13528 - RNA, 19 nt, artificial
  Chemically synthesized
auacaugaaagcaauguua

SEQ ID NO: 13529 - RNA, 19 nt, artificial
  Chemically synthesized
uaagaugcuagguuuuuuu

SEQ ID NO: 13530 - RNA, 19 nt, artificial
  Chemically synthesized
ucuucuuuugucucaggca

SEQ ID NO: 13531 - RNA, 19 nt, artificial
  Chemically synthesized
acucacaucauugucuagu

SEQ ID NO: 13532 - RNA, 19 nt, artificial
  Chemically synthesized
ucccuuccaguccuucuug

SEQ ID NO: 13533 - RNA, 19 nt, artificial
  Chemically synthesized
ugguuggguagccucauaa

SEQ ID NO: 13534 - RNA, 19 nt, artificial
  Chemically synthesized
uugcccuucuucaagacaa

SEQ ID NO: 13535 - RNA, 19 nt, artificial
  Chemically synthesized
ucucucauuuggucgaaac

SEQ ID NO: 13536 - RNA, 19 nt, artificial
  Chemically synthesized
acugucuugauccaccaca

SEQ ID NO: 13537 - RNA, 19 nt, artificial
  Chemically synthesized
uuggaaugucugggcucag

SEQ ID NO: 13538 - RNA, 19 nt, artificial
  Chemically synthesized
ugccuuaugaguaaccuau

SEQ ID NO: 13539 - RNA, 19 nt, artificial
  Chemically synthesized
agguuuuuuuuuauugugg

SEQ ID NO: 13540 - RNA, 19 nt, artificial
  Chemically synthesized
ucagaaacaggaauauuug

SEQ ID NO: 13541 - RNA, 19 nt, artificial
  Chemically synthesized
ucuguaguugcgcagucuu

SEQ ID NO: 13542 - RNA, 19 nt, artificial
  Chemically synthesized
augaccuggagcucuucuu

SEQ ID NO: 13543 - RNA, 19 nt, artificial
  Chemically synthesized
ugcccuuuccagacacuuc

SEQ ID NO: 13544 - RNA, 19 nt, artificial
  Chemically synthesized
uuaacagggaauaaauagu

SEQ ID NO: 13545 - RNA, 19 nt, artificial
  Chemically synthesized
guuaucauugcccuucuuc

SEQ ID NO: 13546 - RNA, 19 nt, artificial
  Chemically synthesized
acauccuagacuucucucc

SEQ ID NO: 13547 - RNA, 19 nt, artificial
  Chemically synthesized
uuguuuuuguaagaugcua

SEQ ID NO: 13548 - RNA, 19 nt, artificial
  Chemically synthesized
auauuuguacuuacuccuu

SEQ ID NO: 13549 - RNA, 19 nt, artificial
  Chemically synthesized
uaacugaagagugccucca

SEQ ID NO: 13550 - RNA, 19 nt, artificial
  Chemically synthesized
ccauucuucauucaccuuu

SEQ ID NO: 13551 - RNA, 19 nt, artificial
  Chemically synthesized
uuuucacuuuccuuggguu

SEQ ID NO: 13552 - RNA, 19 nt, artificial
  Chemically synthesized
uaaugcuucugguaaaggc

SEQ ID NO: 13553 - RNA, 19 nt, artificial
  Chemically synthesized
cuugccuagguaauccuuc

SEQ ID NO: 13554 - RNA, 19 nt, artificial
  Chemically synthesized
auuuguauaugccuuauga

SEQ ID NO: 13555 - RNA, 19 nt, artificial
  Chemically synthesized
ugugaaacauccuagacuu

SEQ ID NO: 13556 - RNA, 19 nt, artificial
  Chemically synthesized
ugagguucuguugucuggu

SEQ ID NO: 13557 - RNA, 19 nt, artificial
  Chemically synthesized
cauaacugaagagugccuc

SEQ ID NO: 13558 - RNA, 19 nt, artificial
  Chemically synthesized
ucuaguagguuaaauuuua

SEQ ID NO: 13559 - RNA, 19 nt, artificial
  Chemically synthesized
uuggaacuaggaggagcug

SEQ ID NO: 13560 - RNA, 19 nt, artificial
  Chemically synthesized
ugucugguaguagagcauc

SEQ ID NO: 13561 - RNA, 19 nt, artificial
  Chemically synthesized
uuuuuuuauugugguauga

SEQ ID NO: 13562 - RNA, 19 nt, artificial
  Chemically synthesized
ugguaaaggccuucucugc

SEQ ID NO: 13563 - RNA, 19 nt, artificial
  Chemically synthesized
uacaugaaagcaauguuau

SEQ ID NO: 13564 - RNA, 19 nt, artificial
  Chemically synthesized
uccgagugcuuuccaaauc

SEQ ID NO: 13565 - RNA, 19 nt, artificial
  Chemically synthesized
acuuccauccacuuuuccu

SEQ ID NO: 13566 - RNA, 19 nt, artificial
  Chemically synthesized
uguacuuguagugcaccuu

SEQ ID NO: 13567 - RNA, 19 nt, artificial
  Chemically synthesized
uucuuaagcugagguucug

SEQ ID NO: 13568 - RNA, 19 nt, artificial
  Chemically synthesized
ugguuauuagcaucagcuu

SEQ ID NO: 13569 - RNA, 19 nt, artificial
  Chemically synthesized
cuguaguugcgcagucuuc

SEQ ID NO: 13570 - RNA, 19 nt, artificial
  Chemically synthesized
cucauauagcuucugcuuc

SEQ ID NO: 13571 - RNA, 19 nt, artificial
  Chemically synthesized
ucugguaaaggccuucucu

SEQ ID NO: 13572 - RNA, 19 nt, artificial
  Chemically synthesized
aauguuauauaacaccuca

SEQ ID NO: 13573 - RNA, 19 nt, artificial
  Chemically synthesized
uuuguaguuugugaaacau

SEQ ID NO: 13574 - RNA, 19 nt, artificial
  Chemically synthesized
uucauucaccuuugauaac

SEQ ID NO: 13575 - RNA, 19 nt, artificial
  Chemically synthesized
uguaaugucucaguacagu

SEQ ID NO: 13576 - RNA, 19 nt, artificial
  Chemically synthesized
augaaagcaauguuauaua

SEQ ID NO: 13577 - RNA, 19 nt, artificial
  Chemically synthesized
ucugguuggguagccucau

SEQ ID NO: 13578 - RNA, 19 nt, artificial
  Chemically synthesized
uugcaaaugcaucaggaaa

SEQ ID NO: 13579 - RNA, 19 nt, artificial
  Chemically synthesized
cuuuccagacacuuccauc

SEQ ID NO: 13580 - RNA, 19 nt, artificial
  Chemically synthesized
uguucuucaggauagugua

SEQ ID NO: 13581 - RNA, 19 nt, artificial
  Chemically synthesized
uaaugucucaguacaguau

SEQ ID NO: 13582 - RNA, 19 nt, artificial
  Chemically synthesized
ugagcuucacuuccuuagg

SEQ ID NO: 13583 - RNA, 19 nt, artificial
  Chemically synthesized
cuggguacucacaucauug

SEQ ID NO: 13584 - RNA, 19 nt, artificial
  Chemically synthesized
ccuaacuccuccauucacc

SEQ ID NO: 13585 - RNA, 19 nt, artificial
  Chemically synthesized
cuucacuuccuuaggcucu

SEQ ID NO: 13586 - RNA, 19 nt, artificial
  Chemically synthesized
uguucucacaccacagagu

SEQ ID NO: 13587 - RNA, 19 nt, artificial
  Chemically synthesized
aacuccuccauucaccugu

SEQ ID NO: 13588 - RNA, 19 nt, artificial
  Chemically synthesized
cuguugucugguuauuagc

SEQ ID NO: 13589 - RNA, 19 nt, artificial
  Chemically synthesized
uuauuuguauaugccuuau

SEQ ID NO: 13590 - RNA, 19 nt, artificial
  Chemically synthesized
uaucagcugguucccucga

SEQ ID NO: 13591 - RNA, 19 nt, artificial
  Chemically synthesized
aacauccuagacuucucuc

SEQ ID NO: 13592 - RNA, 19 nt, artificial
  Chemically synthesized
cuucauuuucuucagcuuu

SEQ ID NO: 13593 - RNA, 19 nt, artificial
  Chemically synthesized
cuuuuuuccauuccuccuu

SEQ ID NO: 13594 - RNA, 19 nt, artificial
  Chemically synthesized
uaucauugcccuucuucaa

SEQ ID NO: 13595 - RNA, 19 nt, artificial
  Chemically synthesized
guaguugcagggaacaagc

SEQ ID NO: 13596 - RNA, 19 nt, artificial
  Chemically synthesized
uauuucucugucugguagu

SEQ ID NO: 13597 - RNA, 19 nt, artificial
  Chemically synthesized
uccaccagggacaugauua

SEQ ID NO: 13598 - RNA, 19 nt, artificial
  Chemically synthesized
ucaaggcuucuuuaagguc

SEQ ID NO: 13599 - RNA, 19 nt, artificial
  Chemically synthesized
acccaaauagcacacggug

SEQ ID NO: 13600 - RNA, 19 nt, artificial
  Chemically synthesized
aguuucuuagacaccaugu

SEQ ID NO: 13601 - RNA, 19 nt, artificial
  Chemically synthesized
acuuuccuuggguucaucu

SEQ ID NO: 13602 - RNA, 19 nt, artificial
  Chemically synthesized
guguucucacaccacagag

SEQ ID NO: 13603 - RNA, 19 nt, artificial
  Chemically synthesized
cuugucucgguuaaugcuu

SEQ ID NO: 13604 - RNA, 19 nt, artificial
  Chemically synthesized
guacuuguagugcaccuug

SEQ ID NO: 13605 - RNA, 19 nt, artificial
  Chemically synthesized
guucucacaccacagaguc

SEQ ID NO: 13606 - RNA, 19 nt, artificial
  Chemically synthesized
uccaucgccuugucgauuu

SEQ ID NO: 13607 - RNA, 19 nt, artificial
  Chemically synthesized
auagcuucugcuuccagac

SEQ ID NO: 13608 - RNA, 19 nt, artificial
  Chemically synthesized
uuucuucagcuuuguaguu

SEQ ID NO: 13609 - RNA, 19 nt, artificial
  Chemically synthesized
aaguaauagggcuucauuu

SEQ ID NO: 13610 - RNA, 19 nt, artificial
  Chemically synthesized
cuuuccuuggguucaucug

SEQ ID NO: 13611 - RNA, 19 nt, artificial
  Chemically synthesized
agaaacugucuugauccac

SEQ ID NO: 13612 - RNA, 19 nt, artificial
  Chemically synthesized
ucauccuggguacucacau

SEQ ID NO: 13613 - RNA, 19 nt, artificial
  Chemically synthesized
ccaauuacaguaaugguuc

SEQ ID NO: 13614 - RNA, 19 nt, artificial
  Chemically synthesized
ucccucguuggaaguaagc

SEQ ID NO: 13615 - RNA, 19 nt, artificial
  Chemically synthesized
guauacagcagaagggugc

SEQ ID NO: 13616 - RNA, 19 nt, artificial
  Chemically synthesized
ugcuuuccaaaucuguagu

SEQ ID NO: 13617 - RNA, 19 nt, artificial
  Chemically synthesized
uaguuaacacuuccaaacu

SEQ ID NO: 13618 - RNA, 19 nt, artificial
  Chemically synthesized
ugucuaguagguuaaauuu

SEQ ID NO: 13619 - RNA, 19 nt, artificial
  Chemically synthesized
aguugcgcagucuucaaca

SEQ ID NO: 13620 - RNA, 19 nt, artificial
  Chemically synthesized
ugucucaguacaguauaca

SEQ ID NO: 13621 - RNA, 19 nt, artificial
  Chemically synthesized
cauucuucauucaccuuug

SEQ ID NO: 13622 - RNA, 19 nt, artificial
  Chemically synthesized
ucuuaagcugagguucugu

SEQ ID NO: 13623 - RNA, 19 nt, artificial
  Chemically synthesized
cuucaggauaguguacaug

SEQ ID NO: 13624 - RNA, 19 nt, artificial
  Chemically synthesized
acaguaaugguucagaaac

SEQ ID NO: 13625 - RNA, 19 nt, artificial
  Chemically synthesized
ugaccuggagcucuucuuu

SEQ ID NO: 13626 - RNA, 19 nt, artificial
  Chemically synthesized
uugcgcagucuucaacaaa

SEQ ID NO: 13627 - RNA, 19 nt, artificial
  Chemically synthesized
uagagcaucccucguugga

SEQ ID NO: 13628 - RNA, 19 nt, artificial
  Chemically synthesized
ccaauguugaagcaaaucc

SEQ ID NO: 13629 - RNA, 19 nt, artificial
  Chemically synthesized
uuaacacuuccaaacugua

SEQ ID NO: 13630 - RNA, 19 nt, artificial
  Chemically synthesized
uagguuaaauuuuaacagg

SEQ ID NO: 13631 - RNA, 19 nt, artificial
  Chemically synthesized
guuauuagcaucagcuuuu

SEQ ID NO: 13632 - RNA, 19 nt, artificial
  Chemically synthesized
uaggcucuucuuuuuguuu

SEQ ID NO: 13633 - RNA, 19 nt, artificial
  Chemically synthesized
uacuuacuccuugggccug

SEQ ID NO: 13634 - RNA, 19 nt, artificial
  Chemically synthesized
aaugucugggcucagacuu

SEQ ID NO: 13635 - RNA, 19 nt, artificial
  Chemically synthesized
cuucucuccgagugcuuuc

SEQ ID NO: 13636 - RNA, 19 nt, artificial
  Chemically synthesized
uuuuaacagggaauaaaua

SEQ ID NO: 13637 - RNA, 19 nt, artificial
  Chemically synthesized
uuguaagaugcuagguuuu

SEQ ID NO: 13638 - RNA, 19 nt, artificial
  Chemically synthesized
uccagacacuuccauccac

SEQ ID NO: 13639 - RNA, 19 nt, artificial
  Chemically synthesized
uccuuaggcucuucuuuuu

SEQ ID NO: 13640 - RNA, 19 nt, artificial
  Chemically synthesized
cuucaagacaaagacaaug

SEQ ID NO: 13641 - RNA, 19 nt, artificial
  Chemically synthesized
ugcaaaugcaucaggaaau

SEQ ID NO: 13642 - RNA, 19 nt, artificial
  Chemically synthesized
ucuuacaaacaaguaauag

SEQ ID NO: 13643 - RNA, 19 nt, artificial
  Chemically synthesized
cucaguacaguauacagca

SEQ ID NO: 13644 - RNA, 19 nt, artificial
  Chemically synthesized
aguagguuaaauuuuaaca

SEQ ID NO: 13645 - RNA, 19 nt, artificial
  Chemically synthesized
gucgauuuuggaaugucug

SEQ ID NO: 13646 - RNA, 19 nt, artificial
  Chemically synthesized
uagcaucagcuuuuucacu

SEQ ID NO: 13647 - RNA, 19 nt, artificial
  Chemically synthesized
guucccucgaagcugaauc

SEQ ID NO: 13648 - RNA, 19 nt, artificial
  Chemically synthesized
uggguucaucuggaaagcc

SEQ ID NO: 13649 - RNA, 19 nt, artificial
  Chemically synthesized
ucucuccgagugcuuucca

SEQ ID NO: 13650 - RNA, 19 nt, artificial
  Chemically synthesized
ucauugcccuucuucaaga

SEQ ID NO: 13651 - RNA, 19 nt, artificial
  Chemically synthesized
cuugggugucuuguuuuug

SEQ ID NO: 13652 - RNA, 19 nt, artificial
  Chemically synthesized
ucuccgagugcuuuccaaa

SEQ ID NO: 13653 - RNA, 19 nt, artificial
  Chemically synthesized
ugacucauaacccuaccau

SEQ ID NO: 13654 - RNA, 19 nt, artificial
  Chemically synthesized
caauguugaagcaaauccg

SEQ ID NO: 13655 - RNA, 19 nt, artificial
  Chemically synthesized
ucaagguaguugcagggaa

SEQ ID NO: 13656 - RNA, 19 nt, artificial
  Chemically synthesized
cacaucauugucuaguagg

SEQ ID NO: 13657 - RNA, 19 nt, artificial
  Chemically synthesized
auccuucaugcugucuucu

SEQ ID NO: 13658 - RNA, 19 nt, artificial
  Chemically synthesized
ucauugucuaguagguuaa

SEQ ID NO: 13659 - RNA, 19 nt, artificial
  Chemically synthesized
uuauuagcaucagcuuuuu

SEQ ID NO: 13660 - RNA, 19 nt, artificial
  Chemically synthesized
cuuggguucaucuggaaag

SEQ ID NO: 13661 - RNA, 19 nt, artificial
  Chemically synthesized
acugaagagugccuccacu

SEQ ID NO: 13662 - RNA, 19 nt, artificial
  Chemically synthesized
guuauauaacaccucacag

SEQ ID NO: 13663 - RNA, 19 nt, artificial
  Chemically synthesized
cuucucugcuucagucaug

SEQ ID NO: 13664 - RNA, 19 nt, artificial
  Chemically synthesized
caggcaguaguuuuucacc

SEQ ID NO: 13665 - RNA, 19 nt, artificial
  Chemically synthesized
ugaauguuuacagugugaa

SEQ ID NO: 13666 - RNA, 19 nt, artificial
  Chemically synthesized
ucuucagcuuuuuuccauu

SEQ ID NO: 13667 - RNA, 19 nt, artificial
  Chemically synthesized
uaacacuuccaaacuguaa

SEQ ID NO: 13668 - RNA, 19 nt, artificial
  Chemically synthesized
ucucugucugguaguagag

SEQ ID NO: 13669 - RNA, 19 nt, artificial
  Chemically synthesized
ucuggaaagccuuggucac

SEQ ID NO: 13670 - RNA, 19 nt, artificial
  Chemically synthesized
uccugaaacuccagguccu

SEQ ID NO: 13671 - RNA, 19 nt, artificial
  Chemically synthesized
gaauauuuguacuuacucc

SEQ ID NO: 13672 - RNA, 19 nt, artificial
  Chemically synthesized
aaagccuuggucacccacu

SEQ ID NO: 13673 - RNA, 19 nt, artificial
  Chemically synthesized
uggacuugggugucuuguu

SEQ ID NO: 13674 - RNA, 19 nt, artificial
  Chemically synthesized
uguagggcaugggaacacu

SEQ ID NO: 13675 - RNA, 19 nt, artificial
  Chemically synthesized
agagcccugaagaucucug

SEQ ID NO: 13676 - RNA, 19 nt, artificial
  Chemically synthesized
ucuuuugucucaggcacaa

SEQ ID NO: 13677 - RNA, 19 nt, artificial
  Chemically synthesized
agcagaagggugcuaaauc

SEQ ID NO: 13678 - RNA, 19 nt, artificial
  Chemically synthesized
agcaucagcuuuuucacuu

SEQ ID NO: 13679 - RNA, 19 nt, artificial
  Chemically synthesized
augaguaaccuauaagguu

SEQ ID NO: 13680 - RNA, 19 nt, artificial
  Chemically synthesized
agucauguucuucaggaua

SEQ ID NO: 13681 - RNA, 19 nt, artificial
  Chemically synthesized
agugcuuuccaaaucugua

SEQ ID NO: 13682 - RNA, 19 nt, artificial
  Chemically synthesized
uacuuguagugcaccuuga

SEQ ID NO: 13683 - RNA, 19 nt, artificial
  Chemically synthesized
gacaugauuagguagaaac

SEQ ID NO: 13684 - RNA, 19 nt, artificial
  Chemically synthesized
aagcaauguuauauaacac

SEQ ID NO: 13685 - RNA, 19 nt, artificial
  Chemically synthesized
aaacauccuagacuucucu

SEQ ID NO: 13686 - RNA, 19 nt, artificial
  Chemically synthesized
uaacagggaauaaauaguu

SEQ ID NO: 13687 - RNA, 19 nt, artificial
  Chemically synthesized
uaaauuuuaacagggaaua

SEQ ID NO: 13688 - RNA, 19 nt, artificial
  Chemically synthesized
caugacuaccguguacuug

SEQ ID NO: 13689 - RNA, 19 nt, artificial
  Chemically synthesized
ccuuaggcucuucuuuuug

SEQ ID NO: 13690 - RNA, 19 nt, artificial
  Chemically synthesized
cuuccuuaggcucuucuuu

SEQ ID NO: 13691 - RNA, 19 nt, artificial
  Chemically synthesized
aaauaguuaacacuuccaa

SEQ ID NO: 13692 - RNA, 19 nt, artificial
  Chemically synthesized
guuggguagccucauaacu

SEQ ID NO: 13693 - RNA, 19 nt, artificial
  Chemically synthesized
cugaagagugccuccacuu

SEQ ID NO: 13694 - RNA, 19 nt, artificial
  Chemically synthesized
ccaaacuguaaugucucag

SEQ ID NO: 13695 - RNA, 19 nt, artificial
  Chemically synthesized
aguauacagcagaagggug

SEQ ID NO: 13696 - RNA, 19 nt, artificial
  Chemically synthesized
caggauaguguacaugcag

SEQ ID NO: 13697 - RNA, 19 nt, artificial
  Chemically synthesized
cugguaguagagcaucccu

SEQ ID NO: 13698 - RNA, 19 nt, artificial
  Chemically synthesized
ugccuagguaauccuucuu

SEQ ID NO: 13699 - RNA, 19 nt, artificial
  Chemically synthesized
agucuucaugacuaccgug

SEQ ID NO: 13700 - RNA, 19 nt, artificial
  Chemically synthesized
aucauccuggguacucaca

SEQ ID NO: 13701 - RNA, 19 nt, artificial
  Chemically synthesized
ugcuagguuuuuuuuuauu

SEQ ID NO: 13702 - RNA, 19 nt, artificial
  Chemically synthesized
aauaaauaguuaacacuuc

SEQ ID NO: 13703 - RNA, 19 nt, artificial
  Chemically synthesized
cugagucuucaugacuacc

SEQ ID NO: 13704 - RNA, 19 nt, artificial
  Chemically synthesized
uaaaucuuacaaacaagua

SEQ ID NO: 13705 - RNA, 19 nt, artificial
  Chemically synthesized
auuuuaacagggaauaaau

SEQ ID NO: 13706 - RNA, 19 nt, artificial
  Chemically synthesized
ucaggcacaaacccaaaua

SEQ ID NO: 13707 - RNA, 19 nt, artificial
  Chemically synthesized
cugguaaaggccuucucug

SEQ ID NO: 13708 - RNA, 19 nt, artificial
  Chemically synthesized
ccuuaagauaacuucucag

SEQ ID NO: 13709 - RNA, 19 nt, artificial
  Chemically synthesized
ucacaggcaaacagcuuga

SEQ ID NO: 13710 - RNA, 19 nt, artificial
  Chemically synthesized
acuuccuuaggcucuucuu

SEQ ID NO: 13711 - RNA, 19 nt, artificial
  Chemically synthesized
cucagacuucaugcucgug

SEQ ID NO: 13712 - RNA, 19 nt, artificial
  Chemically synthesized
uguagugcaccuugagugu

SEQ ID NO: 13713 - RNA, 19 nt, artificial
  Chemically synthesized
ugaguaaccuauaagguua

SEQ ID NO: 13714 - RNA, 19 nt, artificial
  Chemically synthesized
auugcccuucuucaagaca

SEQ ID NO: 13715 - RNA, 19 nt, artificial
  Chemically synthesized
gaaaaugcccaccuucccu

SEQ ID NO: 13716 - RNA, 19 nt, artificial
  Chemically synthesized
aaugcccaccuucccuuug

SEQ ID NO: 13717 - RNA, 19 nt, artificial
  Chemically synthesized
caguuucuuagacaccaug

SEQ ID NO: 13718 - RNA, 19 nt, artificial
  Chemically synthesized
agaaaagugcaccaaaugu

SEQ ID NO: 13719 - RNA, 19 nt, artificial
  Chemically synthesized
uguaagaugcuagguuuuu

SEQ ID NO: 13720 - RNA, 19 nt, artificial
  Chemically synthesized
gcauccuucaugcugucuu

SEQ ID NO: 13721 - RNA, 19 nt, artificial
  Chemically synthesized
uucaugcugucuucugaaa

SEQ ID NO: 13722 - RNA, 19 nt, artificial
  Chemically synthesized
aaucauccuggguacucac

SEQ ID NO: 13723 - RNA, 19 nt, artificial
  Chemically synthesized
cuaacuguucuucagcuuu

SEQ ID NO: 13724 - RNA, 19 nt, artificial
  Chemically synthesized
cugaaacuccagguccucu

SEQ ID NO: 13725 - RNA, 19 nt, artificial
  Chemically synthesized
ggcaacugacucauaaccc

SEQ ID NO: 13726 - RNA, 19 nt, artificial
  Chemically synthesized
cuucugcccguugaacaug

SEQ ID NO: 13727 - RNA, 19 nt, artificial
  Chemically synthesized
caaauguacagcuugauga

SEQ ID NO: 13728 - RNA, 19 nt, artificial
  Chemically synthesized
aguaauagggcuucauuuu

SEQ ID NO: 13729 - RNA, 19 nt, artificial
  Chemically synthesized
ucgaaacagcuugcccaca

SEQ ID NO: 13730 - RNA, 19 nt, artificial
  Chemically synthesized
agaaacaggaauauuugua

SEQ ID NO: 13731 - RNA, 19 nt, artificial
  Chemically synthesized
cuccaguuucuuagacacc

SEQ ID NO: 13732 - RNA, 19 nt, artificial
  Chemically synthesized
ucuucaugacuaccgugua

SEQ ID NO: 13733 - RNA, 19 nt, artificial
  Chemically synthesized
ugguucagaaacaggaaua

SEQ ID NO: 13734 - RNA, 19 nt, artificial
  Chemically synthesized
ucgccuugccuagguaauc

SEQ ID NO: 13735 - RNA, 19 nt, artificial
  Chemically synthesized
ccucgaagcugaaucaagg

SEQ ID NO: 13736 - RNA, 19 nt, artificial
  Chemically synthesized
aaugucucaguacaguaua

SEQ ID NO: 13737 - RNA, 19 nt, artificial
  Chemically synthesized
ugaaucaaggcuucuuuaa

SEQ ID NO: 13738 - RNA, 19 nt, artificial
  Chemically synthesized
uaagcugagguucuguugu

SEQ ID NO: 13739 - RNA, 19 nt, artificial
  Chemically synthesized
cuuguagugcaccuugagu

SEQ ID NO: 13740 - RNA, 19 nt, artificial
  Chemically synthesized
ccaaauguacagcuugaug

SEQ ID NO: 13741 - RNA, 19 nt, artificial
  Chemically synthesized
agguucuguugucugguua

SEQ ID NO: 13742 - RNA, 19 nt, artificial
  Chemically synthesized
gguaguugcagggaacaag

SEQ ID NO: 13743 - RNA, 19 nt, artificial
  Chemically synthesized
agagucaggcaguaguuuu

SEQ ID NO: 13744 - RNA, 19 nt, artificial
  Chemically synthesized
cuguaaugucucaguacag

SEQ ID NO: 13745 - RNA, 19 nt, artificial
  Chemically synthesized
cagagaaacugucuugauc

SEQ ID NO: 13746 - RNA, 19 nt, artificial
  Chemically synthesized
ccaguuaucauugcccuuc

SEQ ID NO: 13747 - RNA, 19 nt, artificial
  Chemically synthesized
acucauaacccuaccauga

SEQ ID NO: 13748 - RNA, 19 nt, artificial
  Chemically synthesized
gcuucagucauguucuuca

SEQ ID NO: 13749 - RNA, 19 nt, artificial
  Chemically synthesized
aucagcugguucccucgaa

SEQ ID NO: 13750 - RNA, 19 nt, artificial
  Chemically synthesized
cucccuuccaguccuucuu

SEQ ID NO: 13751 - RNA, 19 nt, artificial
  Chemically synthesized
aacaggaauauuuguacuu

SEQ ID NO: 13752 - RNA, 19 nt, artificial
  Chemically synthesized
aauaguuaacacuuccaaa

SEQ ID NO: 13753 - RNA, 19 nt, artificial
  Chemically synthesized
agacucucucgugcccuuu

SEQ ID NO: 13754 - RNA, 19 nt, artificial
  Chemically synthesized
acugagcuucacuuccuua

SEQ ID NO: 13755 - RNA, 19 nt, artificial
  Chemically synthesized
caagacaaagacaauguuc

SEQ ID NO: 13756 - RNA, 19 nt, artificial
  Chemically synthesized
cuagacuucucuccgagug

SEQ ID NO: 13757 - RNA, 19 nt, artificial
  Chemically synthesized
ggcuucuuuaaggucuuug

SEQ ID NO: 13758 - RNA, 19 nt, artificial
  Chemically synthesized
acaugauuagguagaaacu

SEQ ID NO: 13759 - RNA, 19 nt, artificial
  Chemically synthesized
acuuguagugcaccuugag

SEQ ID NO: 13760 - RNA, 19 nt, artificial
  Chemically synthesized
acuucucuccgagugcuuu

SEQ ID NO: 13761 - RNA, 19 nt, artificial
  Chemically synthesized
gcuagguuuuuuuuuauug

SEQ ID NO: 13762 - RNA, 19 nt, artificial
  Chemically synthesized
gacacuuccauccacuuuu

SEQ ID NO: 13763 - RNA, 19 nt, artificial
  Chemically synthesized
caugaaagcaauguuauau

SEQ ID NO: 13764 - RNA, 19 nt, artificial
  Chemically synthesized
aaagcaauguuauauaaca

SEQ ID NO: 13765 - RNA, 19 nt, artificial
  Chemically synthesized
ucaugacuaccguguacuu

SEQ ID NO: 13766 - RNA, 19 nt, artificial
  Chemically synthesized
auugucuaguagguuaaau

SEQ ID NO: 13767 - RNA, 19 nt, artificial
  Chemically synthesized
gucuaucagcugguucccu

SEQ ID NO: 13768 - RNA, 19 nt, artificial
  Chemically synthesized
cuaacuccuccauucaccu

SEQ ID NO: 13769 - RNA, 19 nt, artificial
  Chemically synthesized
cuucauucaccuuugauaa

SEQ ID NO: 13770 - RNA, 19 nt, artificial
  Chemically synthesized
ugaagcaaauccgggagug

SEQ ID NO: 13771 - RNA, 19 nt, artificial
  Chemically synthesized
ugcgcagucuucaacaaaa

SEQ ID NO: 13772 - RNA, 19 nt, artificial
  Chemically synthesized
guaaugucucaguacagua

SEQ ID NO: 13773 - RNA, 19 nt, artificial
  Chemically synthesized
uagcuucugcuuccagaca

SEQ ID NO: 13774 - RNA, 19 nt, artificial
  Chemically synthesized
augccuuaugaguaaccua

SEQ ID NO: 13775 - RNA, 19 nt, artificial
  Chemically synthesized
agaugcuagguuuuuuuuu

SEQ ID NO: 13776 - RNA, 19 nt, artificial
  Chemically synthesized
ggaauauuuguacuuacuc

SEQ ID NO: 13777 - RNA, 19 nt, artificial
  Chemically synthesized
gugcuugucucgguuaaug

SEQ ID NO: 13778 - RNA, 19 nt, artificial
  Chemically synthesized
cuggacuugggugucuugu

SEQ ID NO: 13779 - RNA, 19 nt, artificial
  Chemically synthesized
cuucucaguguugcaaaug

SEQ ID NO: 13780 - RNA, 19 nt, artificial
  Chemically synthesized
aacacuuccaaacuguaau

SEQ ID NO: 13781 - RNA, 19 nt, artificial
  Chemically synthesized
gcagucuucaacaaaaacu

SEQ ID NO: 13782 - RNA, 19 nt, artificial
  Chemically synthesized
aagacucucucgugcccuu

SEQ ID NO: 13783 - RNA, 19 nt, artificial
  Chemically synthesized
uugauaacaccaggauuau

SEQ ID NO: 13784 - RNA, 19 nt, artificial
  Chemically synthesized
aaucuuacaaacaaguaau

SEQ ID NO: 13785 - RNA, 19 nt, artificial
  Chemically synthesized
guuacuucaagccuuaaga

SEQ ID NO: 13786 - RNA, 19 nt, artificial
  Chemically synthesized
augcuagguuuuuuuuuau

SEQ ID NO: 13787 - RNA, 19 nt, artificial
  Chemically synthesized
caugaccuggagcucuucu

SEQ ID NO: 13788 - RNA, 19 nt, artificial
  Chemically synthesized
ccaaugcuaacuguucuuc

SEQ ID NO: 13789 - RNA, 19 nt, artificial
  Chemically synthesized
uggaaugucugggcucaga

SEQ ID NO: 13790 - RNA, 19 nt, artificial
  Chemically synthesized
ucaguaccuggaagacucu

SEQ ID NO: 13791 - RNA, 19 nt, artificial
  Chemically synthesized
aaaucauccuggguacuca

SEQ ID NO: 13792 - RNA, 19 nt, artificial
  Chemically synthesized
ucgccuugucgauuuugga

SEQ ID NO: 13793 - RNA, 19 nt, artificial
  Chemically synthesized
caaugcuaacuguucuuca

SEQ ID NO: 13794 - RNA, 19 nt, artificial
  Chemically synthesized
gcugagguucuguugucug

SEQ ID NO: 13795 - RNA, 19 nt, artificial
  Chemically synthesized
ucuucaggauaguguacau

SEQ ID NO: 13796 - RNA, 19 nt, artificial
  Chemically synthesized
aacuucucaguguugcaaa

SEQ ID NO: 13797 - RNA, 19 nt, artificial
  Chemically synthesized
aacuaggaggagcugggau

SEQ ID NO: 13798 - RNA, 19 nt, artificial
  Chemically synthesized
acuguaaugucucaguaca

SEQ ID NO: 13799 - RNA, 19 nt, artificial
  Chemically synthesized
auccgcagcucaacugguu

SEQ ID NO: 13800 - RNA, 19 nt, artificial
  Chemically synthesized
cggagcuccaguuucuuag

SEQ ID NO: 13801 - RNA, 19 nt, artificial
  Chemically synthesized
cuaaaucuuacaaacaagu

SEQ ID NO: 13802 - RNA, 19 nt, artificial
  Chemically synthesized
cugucuugauccaccacag

SEQ ID NO: 13803 - RNA, 19 nt, artificial
  Chemically synthesized
aaacaaguaauagggcuuc

SEQ ID NO: 13804 - RNA, 19 nt, artificial
  Chemically synthesized
acuuccaaacuguaauguc

SEQ ID NO: 13805 - RNA, 19 nt, artificial
  Chemically synthesized
cuuucuuaagcugagguuc

SEQ ID NO: 13806 - RNA, 19 nt, artificial
  Chemically synthesized
cagagcaagaaacaggauc

SEQ ID NO: 13807 - RNA, 19 nt, artificial
  Chemically synthesized
cauguucuucaggauagug

SEQ ID NO: 13808 - RNA, 19 nt, artificial
  Chemically synthesized
guugucugguuauuagcau

SEQ ID NO: 13809 - RNA, 19 nt, artificial
  Chemically synthesized
ugggugucuuguuuuugua

SEQ ID NO: 13810 - RNA, 19 nt, artificial
  Chemically synthesized
agacacuuccauccacuuu

SEQ ID NO: 13811 - RNA, 19 nt, artificial
  Chemically synthesized
gucuuguuuuuguaagaug

SEQ ID NO: 13812 - RNA, 19 nt, artificial
  Chemically synthesized
aacugucuugauccaccac

SEQ ID NO: 13813 - RNA, 19 nt, artificial
  Chemically synthesized
ugggcucagacuucaugcu

SEQ ID NO: 13814 - RNA, 19 nt, artificial
  Chemically synthesized
cacagagucaggcaguagu

SEQ ID NO: 13815 - RNA, 19 nt, artificial
  Chemically synthesized
aacuccagguccucugguu

SEQ ID NO: 13816 - RNA, 19 nt, artificial
  Chemically synthesized
cucugucugguaguagagc

SEQ ID NO: 13817 - RNA, 19 nt, artificial
  Chemically synthesized
auaacaccaggauuauauc

SEQ ID NO: 13818 - RNA, 19 nt, artificial
  Chemically synthesized
gcuuuuuuccauuccuccu

SEQ ID NO: 13819 - RNA, 19 nt, artificial
  Chemically synthesized
gguuauuagcaucagcuuu

SEQ ID NO: 13820 - RNA, 19 nt, artificial
  Chemically synthesized
guaguuugugaaacauccu

SEQ ID NO: 13821 - RNA, 19 nt, artificial
  Chemically synthesized
aaacuccagguccucuggu

SEQ ID NO: 13822 - RNA, 19 nt, artificial
  Chemically synthesized
cauacaugaaagcaauguu

SEQ ID NO: 13823 - RNA, 19 nt, artificial
  Chemically synthesized
uacaguaaugguucagaaa

SEQ ID NO: 13824 - RNA, 19 nt, artificial
  Chemically synthesized
aaaucuguaguugcgcagu

SEQ ID NO: 13825 - RNA, 19 nt, artificial
  Chemically synthesized
agcugaaucaaggcuucuu

SEQ ID NO: 13826 - RNA, 19 nt, artificial
  Chemically synthesized
ucauguucuucaggauagu

SEQ ID NO: 13827 - RNA, 19 nt, artificial
  Chemically synthesized
agggacaugauuagguaga

SEQ ID NO: 13828 - RNA, 19 nt, artificial
  Chemically synthesized
agaagggugcuaaaucuua

SEQ ID NO: 13829 - RNA, 19 nt, artificial
  Chemically synthesized
ucauaacccuaccaugaga

SEQ ID NO: 13830 - RNA, 19 nt, artificial
  Chemically synthesized
caucuggaaagccuugguc

SEQ ID NO: 13831 - RNA, 19 nt, artificial
  Chemically synthesized
ggcuucauuuucuucagcu

SEQ ID NO: 13832 - RNA, 19 nt, artificial
  Chemically synthesized
ugcuaaaucuuacaaacaa

SEQ ID NO: 13833 - RNA, 19 nt, artificial
  Chemically synthesized
ugucuuguuuuuguaagau

SEQ ID NO: 13834 - RNA, 19 nt, artificial
  Chemically synthesized
caggaucuuauagucuauc

SEQ ID NO: 13835 - RNA, 19 nt, artificial
  Chemically synthesized
cuuaagcugagguucuguu

SEQ ID NO: 13836 - RNA, 19 nt, artificial
  Chemically synthesized
cuagguuuuuuuuuauugu

SEQ ID NO: 13837 - RNA, 19 nt, artificial
  Chemically synthesized
gucucaguacaguauacag

SEQ ID NO: 13838 - RNA, 19 nt, artificial
  Chemically synthesized
gguucaagguaguugcagg

SEQ ID NO: 13839 - RNA, 19 nt, artificial
  Chemically synthesized
guagguuaaauuuuaacag

SEQ ID NO: 13840 - RNA, 19 nt, artificial
  Chemically synthesized
guucaucuggaaagccuug

SEQ ID NO: 13841 - RNA, 19 nt, artificial
  Chemically synthesized
ucugcccguugaacaugac

SEQ ID NO: 13842 - RNA, 19 nt, artificial
  Chemically synthesized
ucacuuuccuuggguucau

SEQ ID NO: 13843 - RNA, 19 nt, artificial
  Chemically synthesized
acuaccguguacuuguagu

SEQ ID NO: 13844 - RNA, 19 nt, artificial
  Chemically synthesized
ucucugcuucagucauguu

SEQ ID NO: 13845 - RNA, 19 nt, artificial
  Chemically synthesized
cuucaugcugucuucugaa

SEQ ID NO: 13846 - RNA, 19 nt, artificial
  Chemically synthesized
gucuugauccaccacagau

SEQ ID NO: 13847 - RNA, 19 nt, artificial
  Chemically synthesized
gcuucacuuccuuaggcuc

SEQ ID NO: 13848 - RNA, 19 nt, artificial
  Chemically synthesized
cacuugucucucauuuggu

SEQ ID NO: 13849 - RNA, 19 nt, artificial
  Chemically synthesized
aggaauauuuguacuuacu

SEQ ID NO: 13850 - RNA, 19 nt, artificial
  Chemically synthesized
agauaacuucucaguguug

SEQ ID NO: 13851 - RNA, 19 nt, artificial
  Chemically synthesized
cuucauuccagaggcugau

SEQ ID NO: 13852 - RNA, 19 nt, artificial
  Chemically synthesized
cuuugauaacaccaggauu

SEQ ID NO: 13853 - RNA, 19 nt, artificial
  Chemically synthesized
ugcaccaaauguacagcuu

SEQ ID NO: 13854 - RNA, 19 nt, artificial
  Chemically synthesized
gggaacacugagcuucacu

SEQ ID NO: 13855 - RNA, 19 nt, artificial
  Chemically synthesized
aucccucguuggaaguaag

SEQ ID NO: 13856 - RNA, 19 nt, artificial
  Chemically synthesized
gauagcucagcuuagugug

SEQ ID NO: 13857 - RNA, 19 nt, artificial
  Chemically synthesized
aagaugcuagguuuuuuuu

SEQ ID NO: 13858 - RNA, 19 nt, artificial
  Chemically synthesized
uagcacucagagcaagaaa

SEQ ID NO: 13859 - RNA, 19 nt, artificial
  Chemically synthesized
acaggcaaacagcuugaac

SEQ ID NO: 13860 - RNA, 19 nt, artificial
  Chemically synthesized
caacugacucauaacccua

SEQ ID NO: 13861 - RNA, 19 nt, artificial
  Chemically synthesized
ucucaggcacaaacccaaa

SEQ ID NO: 13862 - RNA, 19 nt, artificial
  Chemically synthesized
cagucuucaacaaaaacuu

SEQ ID NO: 13863 - RNA, 19 nt, artificial
  Chemically synthesized
aaaucuuacaaacaaguaa

SEQ ID NO: 13864 - RNA, 19 nt, artificial
  Chemically synthesized
ucaacugguucaagguagu

SEQ ID NO: 13865 - RNA, 19 nt, artificial
  Chemically synthesized
cucccuuaagauaacuucu

SEQ ID NO: 13866 - RNA, 19 nt, artificial
  Chemically synthesized
augguucagaaacaggaau

SEQ ID NO: 13867 - RNA, 19 nt, artificial
  Chemically synthesized
cauuuggucgaaacagcuu

SEQ ID NO: 13868 - RNA, 19 nt, artificial
  Chemically synthesized
ugggaacacugagcuucac

SEQ ID NO: 13869 - RNA, 19 nt, artificial
  Chemically synthesized
aaaucauauuucucugucu

SEQ ID NO: 13870 - RNA, 19 nt, artificial
  Chemically synthesized
cagaaaagugcaccaaaug

SEQ ID NO: 13871 - RNA, 19 nt, artificial
  Chemically synthesized
caggcaaacagcuugaacu

SEQ ID NO: 13872 - RNA, 19 nt, artificial
  Chemically synthesized
ugcuucugguaaaggccuu

SEQ ID NO: 13873 - RNA, 19 nt, artificial
  Chemically synthesized
ccuucuucaagacaaagac

SEQ ID NO: 13874 - RNA, 19 nt, artificial
  Chemically synthesized
gucuaguagguuaaauuuu

SEQ ID NO: 13875 - RNA, 19 nt, artificial
  Chemically synthesized
ugucuugauccaccacaga

SEQ ID NO: 13876 - RNA, 19 nt, artificial
  Chemically synthesized
ucgguuaaugcuucuggua

SEQ ID NO: 13877 - RNA, 19 nt, artificial
  Chemically synthesized
gaaaucauccuggguacuc

SEQ ID NO: 13878 - RNA, 19 nt, artificial
  Chemically synthesized
aagguaguugcagggaaca

SEQ ID NO: 13879 - RNA, 19 nt, artificial
  Chemically synthesized
gguacucacaucauugucu

SEQ ID NO: 13880 - RNA, 19 nt, artificial
  Chemically synthesized
cgaagcugaaucaaggcuu

SEQ ID NO: 13881 - RNA, 19 nt, artificial
  Chemically synthesized
gaacacugagcuucacuuc

SEQ ID NO: 13882 - RNA, 19 nt, artificial
  Chemically synthesized
cuccaucgccuugucgauu

SEQ ID NO: 13883 - RNA, 19 nt, artificial
  Chemically synthesized
aggcacaaacccaaauagc

SEQ ID NO: 13884 - RNA, 19 nt, artificial
  Chemically synthesized
ucaagacaaagacaauguu

SEQ ID NO: 13885 - RNA, 19 nt, artificial
  Chemically synthesized
acuguucuucagcuuuuuu

SEQ ID NO: 13886 - RNA, 19 nt, artificial
  Chemically synthesized
agccucauaacugaagagu

SEQ ID NO: 13887 - RNA, 19 nt, artificial
  Chemically synthesized
aggcaaacagcuugaacug

SEQ ID NO: 13888 - RNA, 19 nt, artificial
  Chemically synthesized
acagagucaggcaguaguu

SEQ ID NO: 13889 - RNA, 19 nt, artificial
  Chemically synthesized
ucuucaagacaaagacaau

SEQ ID NO: 13890 - RNA, 19 nt, artificial
  Chemically synthesized
aaaugcccaccuucccuuu

SEQ ID NO: 13891 - RNA, 19 nt, artificial
  Chemically synthesized
cucauaacccuaccaugag

SEQ ID NO: 13892 - RNA, 19 nt, artificial
  Chemically synthesized
cucaguguugcaaaugcau

SEQ ID NO: 13893 - RNA, 19 nt, artificial
  Chemically synthesized
cagcuuuuucacuuuccuu

SEQ ID NO: 13894 - RNA, 19 nt, artificial
  Chemically synthesized
ggcaguaguuuuucaccug

SEQ ID NO: 13895 - RNA, 19 nt, artificial
  Chemically synthesized
uccuggguacucacaucau

SEQ ID NO: 13896 - RNA, 19 nt, artificial
  Chemically synthesized
gcugaaucaaggcuucuuu

SEQ ID NO: 13897 - RNA, 19 nt, artificial
  Chemically synthesized
agcacucagagcaagaaac

SEQ ID NO: 13898 - RNA, 19 nt, artificial
  Chemically synthesized
guacucacaucauugucua

SEQ ID NO: 13899 - RNA, 19 nt, artificial
  Chemically synthesized
cucucauuuggucgaaaca

SEQ ID NO: 13900 - RNA, 19 nt, artificial
  Chemically synthesized
gguuacuucaagccuuaag

SEQ ID NO: 13901 - RNA, 19 nt, artificial
  Chemically synthesized
caucgccuugucgauuuug

SEQ ID NO: 13902 - RNA, 19 nt, artificial
  Chemically synthesized
ggaucuuauagucuaucag

SEQ ID NO: 13903 - RNA, 19 nt, artificial
  Chemically synthesized
gagugcuuuccaaaucugu

SEQ ID NO: 13904 - RNA, 19 nt, artificial
  Chemically synthesized
gaauaaauaguuaacacuu

SEQ ID NO: 13905 - RNA, 19 nt, artificial
  Chemically synthesized
aauuuuaacagggaauaaa

SEQ ID NO: 13906 - RNA, 19 nt, artificial
  Chemically synthesized
ggaacacugagcuucacuu

SEQ ID NO: 13907 - RNA, 19 nt, artificial
  Chemically synthesized
guaguagagcaucccucgu

SEQ ID NO: 13908 - RNA, 19 nt, artificial
  Chemically synthesized
caguacaguauacagcaga

SEQ ID NO: 13909 - RNA, 19 nt, artificial
  Chemically synthesized
ccagacacuuccauccacu

SEQ ID NO: 13910 - RNA, 19 nt, artificial
  Chemically synthesized
acuugggugucuuguuuuu

SEQ ID NO: 13911 - RNA, 19 nt, artificial
  Chemically synthesized
gucucaggcacaaacccaa

SEQ ID NO: 13912 - RNA, 19 nt, artificial
  Chemically synthesized
ccaaauagcacacggugag

SEQ ID NO: 13913 - RNA, 19 nt, artificial
  Chemically synthesized
gaaacaggaauauuuguac

SEQ ID NO: 13914 - RNA, 19 nt, artificial
  Chemically synthesized
aggaaagaagcagagagag

SEQ ID NO: 13915 - RNA, 19 nt, artificial
  Chemically synthesized
ccaagguguucacuuucug

SEQ ID NO: 13916 - RNA, 19 nt, artificial
  Chemically synthesized
ccuuccaguccuucuuguc

SEQ ID NO: 13917 - RNA, 19 nt, artificial
  Chemically synthesized
cuuuguaguuugugaaaca

SEQ ID NO: 13918 - RNA, 19 nt, artificial
  Chemically synthesized
aaacaggaauauuuguacu

SEQ ID NO: 13919 - RNA, 19 nt, artificial
  Chemically synthesized
ggguucaucuggaaagccu

SEQ ID NO: 13920 - RNA, 19 nt, artificial
  Chemically synthesized
uccuuggguucaucuggaa

SEQ ID NO: 13921 - RNA, 19 nt, artificial
  Chemically synthesized
gcaagaaacaggaucagua

SEQ ID NO: 13922 - RNA, 19 nt, artificial
  Chemically synthesized
guucuucaggauaguguac

SEQ ID NO: 13923 - RNA, 19 nt, artificial
  Chemically synthesized
caguaccuggaagacucuc

SEQ ID NO: 13924 - RNA, 19 nt, artificial
  Chemically synthesized
cugaaucaaggcuucuuua

SEQ ID NO: 13925 - RNA, 19 nt, artificial
  Chemically synthesized
ggagcucuucuuuugucuc

SEQ ID NO: 13926 - RNA, 19 nt, artificial
  Chemically synthesized
cacaaacccaaauagcaca

SEQ ID NO: 13927 - RNA, 19 nt, artificial
  Chemically synthesized
gacucauaacccuaccaug

SEQ ID NO: 13928 - RNA, 19 nt, artificial
  Chemically synthesized
cccuucuucaagacaaaga

SEQ ID NO: 13929 - RNA, 19 nt, artificial
  Chemically synthesized
aggccuucucugcuucagu

SEQ ID NO: 13930 - RNA, 19 nt, artificial
  Chemically synthesized
guacuuacuccuugggccu

SEQ ID NO: 13931 - RNA, 19 nt, artificial
  Chemically synthesized
ugaaagcaauguuauauaa

SEQ ID NO: 13932 - RNA, 19 nt, artificial
  Chemically synthesized
accaaauguacagcuugau

SEQ ID NO: 13933 - RNA, 19 nt, artificial
  Chemically synthesized
agacagagagaagacaggu

SEQ ID NO: 13934 - RNA, 19 nt, artificial
  Chemically synthesized
guuuuuuuuuauuguggua

SEQ ID NO: 13935 - RNA, 19 nt, artificial
  Chemically synthesized
cuuguuuuuguaagaugcu

SEQ ID NO: 13936 - RNA, 19 nt, artificial
  Chemically synthesized
ugucucucauuuggucgaa

SEQ ID NO: 13937 - RNA, 19 nt, artificial
  Chemically synthesized
gccuugucgauuuuggaau

SEQ ID NO: 13938 - RNA, 19 nt, artificial
  Chemically synthesized
caugauuagguagaaacua

SEQ ID NO: 13939 - RNA, 19 nt, artificial
  Chemically synthesized
acacuuccaaacuguaaug

SEQ ID NO: 13940 - RNA, 19 nt, artificial
  Chemically synthesized
gaaaagugcaccaaaugua

SEQ ID NO: 13941 - RNA, 19 nt, Artificial
  Chemically synthesized
cguguacuuguagugcacc

SEQ ID NO: 13942 - RNA, 19 nt, artificial
  Chemically synthesized
gagaauauuucacccuuca

SEQ ID NO: 13943 - RNA, 19 nt, artificial
  Chemically synthesized
ccauuuuuauaucgaucuc

SEQ ID NO: 13944 - RNA, 19 nt, artificial
  Chemically synthesized
cccuuuuuauaucccauuu

SEQ ID NO: 13945 - RNA, 19 nt, artificial
  Chemically synthesized
gcccucaacaagauguuuu

SEQ ID NO: 13946 - RNA, 19 nt, artificial
  Chemically synthesized
cccauuuuuauaucgaucu

SEQ ID NO: 13947 - RNA, 19 nt, artificial
  Chemically synthesized
cagcuuagauuuuaagguu

SEQ ID NO: 13948 - RNA, 19 nt, artificial
  Chemically synthesized
ccagcuuagauuuuaaggu

SEQ ID NO: 13949 - RNA, 19 nt, artificial
  Chemically synthesized
ggaaacauuuucagaccua

SEQ ID NO: 13950 - RNA, 19 nt, artificial
  Chemically synthesized
ggaugacagaaacacuuuu

SEQ ID NO: 13951 - RNA, 19 nt, artificial
  Chemically synthesized
gccaccugaaguccaaaaa

SEQ ID NO: 13952 - RNA, 19 nt, artificial
  Chemically synthesized
gggucaacaucuuuuacau

SEQ ID NO: 13953 - RNA, 19 nt, artificial
  Chemically synthesized
cccucaacaagauguuuug

SEQ ID NO: 13954 - RNA, 19 nt, artificial
  Chemically synthesized
acauaccagcuuagauuuu

SEQ ID NO: 13955 - RNA, 19 nt, artificial
  Chemically synthesized
ucccauuuuuauaucgauc

SEQ ID NO: 13956 - RNA, 19 nt, artificial
  Chemically synthesized
ucccuuuuuauaucccauu

SEQ ID NO: 13957 - RNA, 19 nt, artificial
  Chemically synthesized
gugaggguuaaugaaauaa

SEQ ID NO: 13958 - RNA, 19 nt, artificial
  Chemically synthesized
ccauaucugugaaaugcug

SEQ ID NO: 13959 - RNA, 19 nt, artificial
  Chemically synthesized
cccauccucaccaucauca

SEQ ID NO: 13960 - RNA, 19 nt, artificial
  Chemically synthesized
ccggacgauauugaacaau

SEQ ID NO: 13961 - RNA, 19 nt, artificial
  Chemically synthesized
cccggacgauauugaacaa

SEQ ID NO: 13962 - RNA, 19 nt, artificial
  Chemically synthesized
cucuuguauaugaugaucu

SEQ ID NO: 13963 - RNA, 19 nt, artificial
  Chemically synthesized
cccucauguugaauuuucu

SEQ ID NO: 13964 - RNA, 19 nt, artificial
  Chemically synthesized
ccaccugaaguccaaaaag

SEQ ID NO: 13965 - RNA, 19 nt, artificial
  Chemically synthesized
ccaccaagacuuguuuuau

SEQ ID NO: 13966 - RNA, 19 nt, artificial
  Chemically synthesized
gcauugugaggguuaauga

SEQ ID NO: 13967 - RNA, 19 nt, artificial
  Chemically synthesized
cuaacuucaaggcccauau

SEQ ID NO: 13968 - RNA, 19 nt, artificial
  Chemically synthesized
aguuuacaaucagccacau

SEQ ID NO: 13969 - RNA, 19 nt, artificial
  Chemically synthesized
aggguuaguuuacaaucag

SEQ ID NO: 13970 - RNA, 19 nt, artificial
  Chemically synthesized
gacuuccauuugcuuuguc

SEQ ID NO: 13971 - RNA, 19 nt, artificial
  Chemically synthesized
gaaacauuuucagaccuau

SEQ ID NO: 13972 - RNA, 19 nt, artificial
  Chemically synthesized
gaaacacuuuucgacauag

SEQ ID NO: 13973 - RNA, 19 nt, artificial
  Chemically synthesized
ugcccucaacaagauguuu

SEQ ID NO: 13974 - RNA, 19 nt, artificial
  Chemically synthesized
cggacgauauugaacaaug

SEQ ID NO: 13975 - RNA, 19 nt, artificial
  Chemically synthesized
cucccuuuuuauaucccau

SEQ ID NO: 13976 - RNA, 19 nt, artificial
  Chemically synthesized
ggucaacaucuuuuacauu

SEQ ID NO: 13977 - RNA, 19 nt, artificial
  Chemically synthesized
ucuuguauaugaugaucug

SEQ ID NO: 13978 - RNA, 19 nt, artificial
  Chemically synthesized
gcugguggguugguaguuu

SEQ ID NO: 13979 - RNA, 19 nt, artificial
  Chemically synthesized
uugugaggguuaaugaaau

SEQ ID NO: 13980 - RNA, 19 nt, artificial
  Chemically synthesized
gggagauguaagaaauguu

SEQ ID NO: 13981 - RNA, 19 nt, artificial
  Chemically synthesized
cugacauucuccacuucuu

SEQ ID NO: 13982 - RNA, 19 nt, artificial
  Chemically synthesized
ccaaaaagggucagucuac

SEQ ID NO: 13983 - RNA, 19 nt, artificial
  Chemically synthesized
guaaucuacugggacggaa

SEQ ID NO: 13984 - RNA, 19 nt, artificial
  Chemically synthesized
ccauccacuacaacuacau

SEQ ID NO: 13985 - RNA, 19 nt, artificial
  Chemically synthesized
ccgaguggaaggaaauuug

SEQ ID NO: 13986 - RNA, 19 nt, artificial
  Chemically synthesized
cugucaucuucugucccuu

SEQ ID NO: 13987 - RNA, 19 nt, artificial
  Chemically synthesized
cccuccuucucccuuuuua

SEQ ID NO: 13988 - RNA, 19 nt, artificial
  Chemically synthesized
ggaagggucaacaucuuuu

SEQ ID NO: 13989 - RNA, 19 nt, artificial
  Chemically synthesized
caagacuuguuuuaugcuc

SEQ ID NO: 13990 - RNA, 19 nt, artificial
  Chemically synthesized
uccaccaagacuuguuuua

SEQ ID NO: 13991 - RNA, 19 nt, artificial
  Chemically synthesized
ggaguugucaagucuugcu

SEQ ID NO: 13992 - RNA, 19 nt, artificial
  Chemically synthesized
cccauaucugugaaaugcu

SEQ ID NO: 13993 - RNA, 19 nt, artificial
  Chemically synthesized
ggguuaguuuacaaucagc

SEQ ID NO: 13994 - RNA, 19 nt, artificial
  Chemically synthesized
acauucuccacuucuuguu

SEQ ID NO: 13995 - RNA, 19 nt, artificial
  Chemically synthesized
ccauccucaccaucaucac

SEQ ID NO: 13996 - RNA, 19 nt, artificial
  Chemically synthesized
aaacacuuuucgacauagu

SEQ ID NO: 13997 - RNA, 19 nt, artificial
  Chemically synthesized
ccugucaucuucugucccu

SEQ ID NO: 13998 - RNA, 19 nt, artificial
  Chemically synthesized
acgauauugaacaaugguu

SEQ ID NO: 13999 - RNA, 19 nt, artificial
  Chemically synthesized
ggacgauauugaacaaugg

SEQ ID NO: 14000 - RNA, 19 nt, artificial
  Chemically synthesized
acaucuuuuacauucugca

SEQ ID NO: 14001 - RNA, 19 nt, artificial
  Chemically synthesized
ccaagacuuguuuuaugcu

SEQ ID NO: 14002 - RNA, 19 nt, artificial
  Chemically synthesized
caccaagacuuguuuuaug

SEQ ID NO: 14003 - RNA, 19 nt, artificial
  Chemically synthesized
cgaccuuaguaccuaaaag

SEQ ID NO: 14004 - RNA, 19 nt, artificial
  Chemically synthesized
gguggguugguaguuucua

SEQ ID NO: 14005 - RNA, 19 nt, artificial
  Chemically synthesized
ugcauugugaggguuaaug

SEQ ID NO: 14006 - RNA, 19 nt, artificial
  Chemically synthesized
gugcauugugaggguuaau

SEQ ID NO: 14007 - RNA, 19 nt, artificial
  Chemically synthesized
gcauuugcaccuaccucac

SEQ ID NO: 14008 - RNA, 19 nt, artificial
  Chemically synthesized
ggcccauaucugugaaaug

SEQ ID NO: 14009 - RNA, 19 nt, artificial
  Chemically synthesized
aggcccauaucugugaaau

SEQ ID NO: 14010 - RNA, 19 nt, artificial
  Chemically synthesized
cucauguugaauuuucucu

SEQ ID NO: 14011 - RNA, 19 nt, artificial
  Chemically synthesized
ucccucauguugaauuuuc

SEQ ID NO: 14012 - RNA, 19 nt, artificial
  Chemically synthesized
cugucccucauguugaauu

SEQ ID NO: 14013 - RNA, 19 nt, artificial
  Chemically synthesized
agcugucccucauguugaa

SEQ ID NO: 14014 - RNA, 19 nt, artificial
  Chemically synthesized
agaccuauggaaacuacuu

SEQ ID NO: 14015 - RNA, 19 nt, artificial
  Chemically synthesized
gugagcgcuucgagauguu

SEQ ID NO: 14016 - RNA, 19 nt, artificial
  Chemically synthesized
uggaugacagaaacacuuu

SEQ ID NO: 14017 - RNA, 19 nt, artificial
  Chemically synthesized
ggaaggaaauuugcgugug

SEQ ID NO: 14018 - RNA, 19 nt, artificial
  Chemically synthesized
gcuaaaaguuuugagcuuc

SEQ ID NO: 14019 - RNA, 19 nt, artificial
  Chemically synthesized
gacuggcgcuaaaaguuuu

SEQ ID NO: 14020 - RNA, 19 nt, artificial
  Chemically synthesized
agggucaacaucuuuuaca

SEQ ID NO: 14021 - RNA, 19 nt, artificial
  Chemically synthesized
gccuugaaaccaccuuuua

SEQ ID NO: 14022 - RNA, 19 nt, artificial
  Chemically synthesized
agugcauugugaggguuaa

SEQ ID NO: 14023 - RNA, 19 nt, artificial
  Chemically synthesized
agagugcauugugaggguu

SEQ ID NO: 14024 - RNA, 19 nt, artificial
  Chemically synthesized
ugucccucauguugaauuu

SEQ ID NO: 14025 - RNA, 19 nt, artificial
  Chemically synthesized
gaccuauggaaacuacuuc

SEQ ID NO: 14026 - RNA, 19 nt, artificial
  Chemically synthesized
ggauguuugggagauguaa

SEQ ID NO: 14027 - RNA, 19 nt, artificial
  Chemically synthesized
gggauguuugggagaugua

SEQ ID NO: 14028 - RNA, 19 nt, artificial
  Chemically synthesized
aggaaacauuuucagaccu

SEQ ID NO: 14029 - RNA, 19 nt, artificial
  Chemically synthesized
uggauggagaauauuucac

SEQ ID NO: 14030 - RNA, 19 nt, artificial
  Chemically synthesized
aguauuuggaugacagaaa

SEQ ID NO: 14031 - RNA, 19 nt, artificial
  Chemically synthesized
ggaguauuuggaugacaga

SEQ ID NO: 14032 - RNA, 19 nt, artificial
  Chemically synthesized
ccugaaaacaacguucugu

SEQ ID NO: 14033 - RNA, 19 nt, artificial
  Chemically synthesized
cugguggguugguaguuuc

SEQ ID NO: 14034 - RNA, 19 nt, artificial
  Chemically synthesized
acuuccugaaaacaacguu

SEQ ID NO: 14035 - RNA, 19 nt, artificial
  Chemically synthesized
cucaagacuggcgcuaaaa

SEQ ID NO: 14036 - RNA, 19 nt, artificial
  Chemically synthesized
aucugugaaaugcuggcau

SEQ ID NO: 14037 - RNA, 19 nt, artificial
  Chemically synthesized
ucuaacuucaaggcccaua

SEQ ID NO: 14038 - RNA, 19 nt, artificial
  Chemically synthesized
gucccucauguugaauuuu

SEQ ID NO: 14039 - RNA, 19 nt, artificial
  Chemically synthesized
agaaauguucuugcaguua

SEQ ID NO: 14040 - RNA, 19 nt, artificial
  Chemically synthesized
ccauuuuggguuuuggguc

SEQ ID NO: 14041 - RNA, 19 nt, artificial
  Chemically synthesized
gacucagacugacauucuc

SEQ ID NO: 14042 - RNA, 19 nt, artificial
  Chemically synthesized
ccugacucagacugacauu

SEQ ID NO: 14043 - RNA, 19 nt, artificial
  Chemically synthesized
uuggaugacagaaacacuu

SEQ ID NO: 14044 - RNA, 19 nt, artificial
  Chemically synthesized
guggaguauuuggaugaca

SEQ ID NO: 14045 - RNA, 19 nt, artificial
  Chemically synthesized
uggcgcuaaaaguuuugag

SEQ ID NO: 14046 - RNA, 19 nt, artificial
  Chemically synthesized
agacuggcgcuaaaaguuu

SEQ ID NO: 14047 - RNA, 19 nt, artificial
  Chemically synthesized
gucgaccuuaguaccuaaa

SEQ ID NO: 14048 - RNA, 19 nt, artificial
  Chemically synthesized
cuugaaaccaccuuuuauu

SEQ ID NO: 14049 - RNA, 19 nt, artificial
  Chemically synthesized
ugcaguuaaggguuaguuu

SEQ ID NO: 14050 - RNA, 19 nt, artificial
  Chemically synthesized
uucagaccuauggaaacua

SEQ ID NO: 14051 - RNA, 19 nt, artificial
  Chemically synthesized
ccugcacugguguuuuguu

SEQ ID NO: 14052 - RNA, 19 nt, artificial
  Chemically synthesized
cauuuucagaccuauggaa

SEQ ID NO: 14053 - RNA, 19 nt, artificial
  Chemically synthesized
gacugacauucuccacuuc

SEQ ID NO: 14054 - RNA, 19 nt, artificial
  Chemically synthesized
ugacucagacugacauucu

SEQ ID NO: 14055 - RNA, 19 nt, artificial
  Chemically synthesized
cacuggauggagaauauuu

SEQ ID NO: 14056 - RNA, 19 nt, artificial
  Chemically synthesized
aaagaagaaaccacuggau

SEQ ID NO: 14057 - RNA, 19 nt, artificial
  Chemically synthesized
ucaucacacuggaagacuc

SEQ ID NO: 14058 - RNA, 19 nt, artificial
  Chemically synthesized
uggaguauuuggaugacag

SEQ ID NO: 14059 - RNA, 19 nt, artificial
  Chemically synthesized
gcguguggaguauuuggau

SEQ ID NO: 14060 - RNA, 19 nt, artificial
  Chemically synthesized
cuggcgcuaaaaguuuuga

SEQ ID NO: 14061 - RNA, 19 nt, artificial
  Chemically synthesized
ccuucucccuuuuuauauc

SEQ ID NO: 14062 - RNA, 19 nt, artificial
  Chemically synthesized
aagcaauggaugauuugau

SEQ ID NO: 14063 - RNA, 19 nt, artificial
  Chemically synthesized
agggaguugucaagucuug

SEQ ID NO: 14064 - RNA, 19 nt, artificial
  Chemically synthesized
ccuugaaaccaccuuuuau

SEQ ID NO: 14065 - RNA, 19 nt, artificial
  Chemically synthesized
gcugucccucauguugaau

SEQ ID NO: 14066 - RNA, 19 nt, artificial
  Chemically synthesized
aaauguucuugcaguuaag

SEQ ID NO: 14067 - RNA, 19 nt, artificial
  Chemically synthesized
aagaaauguucuugcaguu

SEQ ID NO: 14068 - RNA, 19 nt, artificial
  Chemically synthesized
guuugggagauguaagaaa

SEQ ID NO: 14069 - RNA, 19 nt, artificial
  Chemically synthesized
cugcacugguguuuuguug

SEQ ID NO: 14070 - RNA, 19 nt, artificial
  Chemically synthesized
cagacugacauucuccacu

SEQ ID NO: 14071 - RNA, 19 nt, artificial
  Chemically synthesized
ucaggaaacauuuucagac

SEQ ID NO: 14072 - RNA, 19 nt, artificial
  Chemically synthesized
gcugaaugaggccuuggaa

SEQ ID NO: 14073 - RNA, 19 nt, artificial
  Chemically synthesized
caaagaagaaaccacugga

SEQ ID NO: 14074 - RNA, 19 nt, artificial
  Chemically synthesized
gccaaagaagaaaccacug

SEQ ID NO: 14075 - RNA, 19 nt, artificial
  Chemically synthesized
agccaaagaagaaaccacu

SEQ ID NO: 14076 - RNA, 19 nt, artificial
  Chemically synthesized
gcucugacuguaccaccau

SEQ ID NO: 14077 - RNA, 19 nt, artificial
  Chemically synthesized
gaguauuuggaugacagaa

SEQ ID NO: 14078 - RNA, 19 nt, artificial
  Chemically synthesized
guguggaguauuuggauga

SEQ ID NO: 14079 - RNA, 19 nt, artificial
  Chemically synthesized
uggaaggaaauuugcgugu

SEQ ID NO: 14080 - RNA, 19 nt, artificial
  Chemically synthesized
cccuccucagcaucuuauc

SEQ ID NO: 14081 - RNA, 19 nt, artificial
  Chemically synthesized
acagcacaugacggagguu

SEQ ID NO: 14082 - RNA, 19 nt, artificial
  Chemically synthesized
ucgaccuuaguaccuaaaa

SEQ ID NO: 14083 - RNA, 19 nt, artificial
  Chemically synthesized
gaguugucaagucuugcug

SEQ ID NO: 14084 - RNA, 19 nt, artificial
  Chemically synthesized
cagagugcauugugagggu

SEQ ID NO: 14085 - RNA, 19 nt, artificial
  Chemically synthesized
aaggcccauaucugugaaa

SEQ ID NO: 14086 - RNA, 19 nt, artificial
  Chemically synthesized
uugcaguuaaggguuaguu

SEQ ID NO: 14087 - RNA, 19 nt, artificial
  Chemically synthesized
uucuugcaguuaaggguua

SEQ ID NO: 14088 - RNA, 19 nt, artificial
  Chemically synthesized
agggauguuugggagaugu

SEQ ID NO: 14089 - RNA, 19 nt, artificial
  Chemically synthesized
gagggauguuugggagaug

SEQ ID NO: 14090 - RNA, 19 nt, artificial
  Chemically synthesized
caggaaacauuuucagacc

SEQ ID NO: 14091 - RNA, 19 nt, artificial
  Chemically synthesized
gccauaaaaaacucauguu

SEQ ID NO: 14092 - RNA, 19 nt, artificial
  Chemically synthesized
cguguggaguauuuggaug

SEQ ID NO: 14093 - RNA, 19 nt, artificial
  Chemically synthesized
uggaugauuugaugcuguc

SEQ ID NO: 14094 - RNA, 19 nt, artificial
  Chemically synthesized
caauaaaacuuugcugcca

SEQ ID NO: 14095 - RNA, 19 nt, artificial
  Chemically synthesized
caauggaugauuugaugcu

SEQ ID NO: 14096 - RNA, 19 nt, artificial
  Chemically synthesized
gagggaguugucaagucuu

SEQ ID NO: 14097 - RNA, 19 nt, artificial
  Chemically synthesized
ugguuagguagagggaguu

SEQ ID NO: 14098 - RNA, 19 nt, artificial
  Chemically synthesized
auguacaucuggccuugaa

SEQ ID NO: 14099 - RNA, 19 nt, artificial
  Chemically synthesized
uggguuuugggucuuugaa

SEQ ID NO: 14100 - RNA, 19 nt, artificial
  Chemically synthesized
cccgccauaaaaaacucau

SEQ ID NO: 14101 - RNA, 19 nt, artificial
  Chemically synthesized
gauguuccgagagcugaau

SEQ ID NO: 14102 - RNA, 19 nt, artificial
  Chemically synthesized
agauguuccgagagcugaa

SEQ ID NO: 14103 - RNA, 19 nt, artificial
  Chemically synthesized
acauguguaacaguuccug

SEQ ID NO: 14104 - RNA, 19 nt, artificial
  Chemically synthesized
accauccacuacaacuaca

SEQ ID NO: 14105 - RNA, 19 nt, artificial
  Chemically synthesized
gagcuucucaaaagucuag

SEQ ID NO: 14106 - RNA, 19 nt, artificial
  Chemically synthesized
ucgacauagugugguggug

SEQ ID NO: 14107 - RNA, 19 nt, artificial
  Chemically synthesized
gaaggaaauuugcgugugg

SEQ ID NO: 14108 - RNA, 19 nt, artificial
  Chemically synthesized
auaauguacaucuggccuu

SEQ ID NO: 14109 - RNA, 19 nt, artificial
  Chemically synthesized
ggguuuugggucuuugaac

SEQ ID NO: 14110 - RNA, 19 nt, artificial
  Chemically synthesized
gaaguccaaaaagggucag

SEQ ID NO: 14111 - RNA, 19 nt, artificial
  Chemically synthesized
agcuucucaaaagucuaga

SEQ ID NO: 14112 - RNA, 19 nt, artificial
  Chemically synthesized
ggaaauuugcguguggagu

SEQ ID NO: 14113 - RNA, 19 nt, artificial
  Chemically synthesized
cugguuagguagagggagu

SEQ ID NO: 14114 - RNA, 19 nt, artificial
  Chemically synthesized
agccaccugaaguccaaaa

SEQ ID NO: 14115 - RNA, 19 nt, artificial
  Chemically synthesized
cagaaacacuuuucgacau

SEQ ID NO: 14116 - RNA, 19 nt, artificial
  Chemically synthesized
ugcguguggaguauuugga

SEQ ID NO: 14117 - RNA, 19 nt, artificial
  Chemically synthesized
gguagagggaguugucaag

SEQ ID NO: 14118 - RNA, 19 nt, artificial
  Chemically synthesized
gcccacuucaccguacuaa

SEQ ID NO: 14119 - RNA, 19 nt, artificial
  Chemically synthesized
ugggacggaacagcuuuga

SEQ ID NO: 14120 - RNA, 19 nt, artificial
  Chemically synthesized
gcuucuugcauucugggac

SEQ ID NO: 14121 - RNA, 19 nt, artificial
  Chemically synthesized
augcuggcauuugcaccua

SEQ ID NO: 14122 - RNA, 19 nt, artificial
  Chemically synthesized
ggaaacuacuuccugaaaa

SEQ ID NO: 14123 - RNA, 19 nt, artificial
  Chemically synthesized
ggagaauauuucacccuuc

SEQ ID NO: 14124 - RNA, 19 nt, artificial
  Chemically synthesized
agaaacacuuuucgacaua

SEQ ID NO: 14125 - RNA, 19 nt, artificial
  Chemically synthesized
caagauguuuugccaacug

SEQ ID NO: 14126 - RNA, 19 nt, artificial
  Chemically synthesized
cugcccucaacaagauguu

SEQ ID NO: 14127 - RNA, 19 nt, artificial
  Chemically synthesized
cgcuaaaaguuuugagcuu

SEQ ID NO: 14128 - RNA, 19 nt, artificial
  Chemically synthesized
ucagccacauucuagguag

SEQ ID NO: 14129 - RNA, 19 nt, artificial
  Chemically synthesized
ccaggacuuccauuugcuu

SEQ ID NO: 14130 - RNA, 19 nt, artificial
  Chemically synthesized
ccauaaaaaacucauguuc

SEQ ID NO: 14131 - RNA, 19 nt, artificial
  Chemically synthesized
uccucaccaucaucacacu

SEQ ID NO: 14132 - RNA, 19 nt, artificial
  Chemically synthesized
ccaucuacaagcagucaca

SEQ ID NO: 14133 - RNA, 19 nt, artificial
  Chemically synthesized
cucuuggucgaccuuagua

SEQ ID NO: 14134 - RNA, 19 nt, artificial
  Chemically synthesized
gccacauucuagguaggua

SEQ ID NO: 14135 - RNA, 19 nt, artificial
  Chemically synthesized
gguuuuuacugugagggau

SEQ ID NO: 14136 - RNA, 19 nt, artificial
  Chemically synthesized
cccaggacuuccauuugcu

SEQ ID NO: 14137 - RNA, 19 nt, artificial
  Chemically synthesized
cgccauaaaaaacucaugu

SEQ ID NO: 14138 - RNA, 19 nt, artificial
  Chemically synthesized
ccgccauaaaaaacucaug

SEQ ID NO: 14139 - RNA, 19 nt, artificial
  Chemically synthesized
gacagaaacacuuuucgac

SEQ ID NO: 14140 - RNA, 19 nt, artificial
  Chemically synthesized
cuggaggauuucaucucuu

SEQ ID NO: 14141 - RNA, 19 nt, artificial
  Chemically synthesized
cccugucugacaaccucuu

SEQ ID NO: 14142 - RNA, 19 nt, artificial
  Chemically synthesized
guugguaguuucuacaguu

SEQ ID NO: 14143 - RNA, 19 nt, artificial
  Chemically synthesized
gguugguaguuucuacagu

SEQ ID NO: 14144 - RNA, 19 nt, artificial
  Chemically synthesized
ggguugguaguuucuacag

SEQ ID NO: 14145 - RNA, 19 nt, artificial
  Chemically synthesized
ccacauucuagguagguag

SEQ ID NO: 14146 - RNA, 19 nt, artificial
  Chemically synthesized
guaggacauaccagcuuag

SEQ ID NO: 14147 - RNA, 19 nt, artificial
  Chemically synthesized
cccugccauuuuggguuuu

SEQ ID NO: 14148 - RNA, 19 nt, artificial
  Chemically synthesized
ucccgccauaaaaaacuca

SEQ ID NO: 14149 - RNA, 19 nt, artificial
  Chemically synthesized
cucccgccauaaaaaacuc

SEQ ID NO: 14150 - RNA, 19 nt, artificial
  Chemically synthesized
ggccuuggaacucaaggau

SEQ ID NO: 14151 - RNA, 19 nt, artificial
  Chemically synthesized
cucugagucaggaaacauu

SEQ ID NO: 14152 - RNA, 19 nt, artificial
  Chemically synthesized
uggagaauauuucacccuu

SEQ ID NO: 14153 - RNA, 19 nt, artificial
  Chemically synthesized
ccugcccucaacaagaugu

SEQ ID NO: 14154 - RNA, 19 nt, artificial
  Chemically synthesized
gaacaaugguucacugaag

SEQ ID NO: 14155 - RNA, 19 nt, artificial
  Chemically synthesized
ggcauuugcaccuaccuca

SEQ ID NO: 14156 - RNA, 19 nt, artificial
  Chemically synthesized
ugcuggcauuugcaccuac

SEQ ID NO: 14157 - RNA, 19 nt, artificial
  Chemically synthesized
ccugccauuuuggguuuug

SEQ ID NO: 14158 - RNA, 19 nt, artificial
  Chemically synthesized
gucuaccucccgccauaaa

SEQ ID NO: 14159 - RNA, 19 nt, artificial
  Chemically synthesized
ggaagagaaucuccgcaag

SEQ ID NO: 14160 - RNA, 19 nt, artificial
  Chemically synthesized
acaacuacauguguaacag

SEQ ID NO: 14161 - RNA, 19 nt, artificial
  Chemically synthesized
gccaucuacaagcagucac

SEQ ID NO: 14162 - RNA, 19 nt, artificial
  Chemically synthesized
uccuucucccuuuuuauau

SEQ ID NO: 14163 - RNA, 19 nt, artificial
  Chemically synthesized
ccuccuucucccuuuuuau

SEQ ID NO: 14164 - RNA, 19 nt, artificial
  Chemically synthesized
gccaaacccugucugacaa

SEQ ID NO: 14165 - RNA, 19 nt, artificial
  Chemically synthesized
caggacuuccauuugcuuu

SEQ ID NO: 14166 - RNA, 19 nt, artificial
  Chemically synthesized
ugaaguccaaaaaggguca

SEQ ID NO: 14167 - RNA, 19 nt, artificial
  Chemically synthesized
ugagucaggaaacauuuuc

SEQ ID NO: 14168 - RNA, 19 nt, artificial
  Chemically synthesized
gagagcugaaugaggccuu

SEQ ID NO: 14169 - RNA, 19 nt, artificial
  Chemically synthesized
agagaaucuccgcaagaaa

SEQ ID NO: 14170 - RNA, 19 nt, artificial
  Chemically synthesized
caccaucaucacacuggaa

SEQ ID NO: 14171 - RNA, 19 nt, artificial
  Chemically synthesized
cugcucagauagcgauggu

SEQ ID NO: 14172 - RNA, 19 nt, artificial
  Chemically synthesized
cuccuucucccuuuuuaua

SEQ ID NO: 14173 - RNA, 19 nt, artificial
  Chemically synthesized
ugaucuggauccaccaaga

SEQ ID NO: 14174 - RNA, 19 nt, artificial
  Chemically synthesized
cccacuucaccguacuaac

SEQ ID NO: 14175 - RNA, 19 nt, artificial
  Chemically synthesized
gccugacucagacugacau

SEQ ID NO: 14176 - RNA, 19 nt, artificial
  Chemically synthesized
cugagucaggaaacauuuu

SEQ ID NO: 14177 - RNA, 19 nt, artificial
  Chemically synthesized
aggaagagaaucuccgcaa

SEQ ID NO: 14178 - RNA, 19 nt, artificial
  Chemically synthesized
guguaacaguuccugcaug

SEQ ID NO: 14179 - RNA, 19 nt, artificial
  Chemically synthesized
aacuacauguguaacaguu

SEQ ID NO: 14180 - RNA, 19 nt, artificial
  Chemically synthesized
caacuacauguguaacagu

SEQ ID NO: 14181 - RNA, 19 nt, artificial
  Chemically synthesized
acaagauguuuugccaacu

SEQ ID NO: 14182 - RNA, 19 nt, artificial
  Chemically synthesized
cgauauugaacaaugguuc

SEQ ID NO: 14183 - RNA, 19 nt, artificial
  Chemically synthesized
guaccuaaaaggaaaucuc

SEQ ID NO: 14184 - RNA, 19 nt, artificial
  Chemically synthesized
gucccaagcaauggaugau

SEQ ID NO: 14185 - RNA, 19 nt, artificial
  Chemically synthesized
ccaccuuuuauuacauggg

SEQ ID NO: 14186 - RNA, 19 nt, artificial
  Chemically synthesized
ggccuugaaaccaccuuuu

SEQ ID NO: 14187 - RNA, 19 nt, artificial
  Chemically synthesized
ucugugaaaugcuggcauu

SEQ ID NO: 14188 - RNA, 19 nt, artificial
  Chemically synthesized
auggaaacuacuuccugaa

SEQ ID NO: 14189 - RNA, 19 nt, artificial
  Chemically synthesized
caccguacuaaccagggaa

SEQ ID NO: 14190 - RNA, 19 nt, artificial
  Chemically synthesized
aggacauaccagcuuagau

SEQ ID NO: 14191 - RNA, 19 nt, artificial
  Chemically synthesized
uggccugcacugguguuuu

SEQ ID NO: 14192 - RNA, 19 nt, artificial
  Chemically synthesized
gcuugcaauaggugugcgu

SEQ ID NO: 14193 - RNA, 19 nt, artificial
  Chemically synthesized
ccucccgccauaaaaaacu

SEQ ID NO: 14194 - RNA, 19 nt, artificial
  Chemically synthesized
cuaccucccgccauaaaaa

SEQ ID NO: 14195 - RNA, 19 nt, artificial
  Chemically synthesized
gagucaggaaacauuuuca

SEQ ID NO: 14196 - RNA, 19 nt, artificial
  Chemically synthesized
agagcugaaugaggccuug

SEQ ID NO: 14197 - RNA, 19 nt, artificial
  Chemically synthesized
ggauggagaauauuucacc

SEQ ID NO: 14198 - RNA, 19 nt, artificial
  Chemically synthesized
ccacuggauggagaauauu

SEQ ID NO: 14199 - RNA, 19 nt, artificial
  Chemically synthesized
aagagaaucuccgcaagaa

SEQ ID NO: 14200 - RNA, 19 nt, artificial
  Chemically synthesized
uccgaguggaaggaaauuu

SEQ ID NO: 14201 - RNA, 19 nt, artificial
  Chemically synthesized
caugagcgcugcucagaua

SEQ ID NO: 14202 - RNA, 19 nt, artificial
  Chemically synthesized
acaagcagucacagcacau

SEQ ID NO: 14203 - RNA, 19 nt, artificial
  Chemically synthesized
cuaaaaguuuugagcuucu

SEQ ID NO: 14204 - RNA, 19 nt, artificial
  Chemically synthesized
caacaagauguuuugccaa

SEQ ID NO: 14205 - RNA, 19 nt, artificial
  Chemically synthesized
ucaacaagauguuuugcca

SEQ ID NO: 14206 - RNA, 19 nt, artificial
  Chemically synthesized
gccaagucugugacuugca

SEQ ID NO: 14207 - RNA, 19 nt, artificial
  Chemically synthesized
guuuccgucugggcuucuu

SEQ ID NO: 14208 - RNA, 19 nt, artificial
  Chemically synthesized
acacccuggaggauuucau

SEQ ID NO: 14209 - RNA, 19 nt, artificial
  Chemically synthesized
cugugaaaugcuggcauuu

SEQ ID NO: 14210 - RNA, 19 nt, artificial
  Chemically synthesized
aggacuuccauuugcuuug

SEQ ID NO: 14211 - RNA, 19 nt, artificial
  Chemically synthesized
ucagaagcacccaggacuu

SEQ ID NO: 14212 - RNA, 19 nt, artificial
  Chemically synthesized
agaauauuucacccuucag

SEQ ID NO: 14213 - RNA, 19 nt, artificial
  Chemically synthesized
aaccacuggauggagaaua

SEQ ID NO: 14214 - RNA, 19 nt, artificial
  Chemically synthesized
ccagugguaaucuacuggg

SEQ ID NO: 14215 - RNA, 19 nt, artificial
  Chemically synthesized
cuccagugguaaucuacug

SEQ ID NO: 14216 - RNA, 19 nt, artificial
  Chemically synthesized
cuggaagacuccaguggua

SEQ ID NO: 14217 - RNA, 19 nt, artificial
  Chemically synthesized
ccaucaucacacuggaaga

SEQ ID NO: 14218 - RNA, 19 nt, artificial
  Chemically synthesized
uuauccgaguggaaggaaa

SEQ ID NO: 14219 - RNA, 19 nt, artificial
  Chemically synthesized
gcaucuuauccgaguggaa

SEQ ID NO: 14220 - RNA, 19 nt, artificial
  Chemically synthesized
caagcagucacagcacaug

SEQ ID NO: 14221 - RNA, 19 nt, artificial
  Chemically synthesized
gucugugacuugcacguac

SEQ ID NO: 14222 - RNA, 19 nt, artificial
  Chemically synthesized
ccaagucugugacuugcac

SEQ ID NO: 14223 - RNA, 19 nt, artificial
  Chemically synthesized
gcgcuaaaaguuuugagcu

SEQ ID NO: 14224 - RNA, 19 nt, artificial
  Chemically synthesized
ucugucccuucccagaaaa

SEQ ID NO: 14225 - RNA, 19 nt, artificial
  Chemically synthesized
ugaagacccagguccagau

SEQ ID NO: 14226 - RNA, 19 nt, artificial
  Chemically synthesized
acauucugcaagcacaucu

SEQ ID NO: 14227 - RNA, 19 nt, artificial
  Chemically synthesized
ucccaagcaauggaugauu

SEQ ID NO: 14228 - RNA, 19 nt, artificial
  Chemically synthesized
uggguugguaguuucuaca

SEQ ID NO: 14229 - RNA, 19 nt, artificial
  Chemically synthesized
guggguugguaguuucuac

SEQ ID NO: 14230 - RNA, 19 nt, artificial
  Chemically synthesized
uccaaaaagggucagucua

SEQ ID NO: 14231 - RNA, 19 nt, artificial
  Chemically synthesized
gcuucgagauguuccgaga

SEQ ID NO: 14232 - RNA, 19 nt, artificial
  Chemically synthesized
agaaaccacuggauggaga

SEQ ID NO: 14233 - RNA, 19 nt, artificial
  Chemically synthesized
gaagagaaucuccgcaaga

SEQ ID NO: 14234 - RNA, 19 nt, artificial
  Chemically synthesized
gaacagcuuugaggugcgu

SEQ ID NO: 14235 - RNA, 19 nt, artificial
  Chemically synthesized
cagugguaaucuacuggga

SEQ ID NO: 14236 - RNA, 19 nt, artificial
  Chemically synthesized
gaagacuccagugguaauc

SEQ ID NO: 14237 - RNA, 19 nt, artificial
  Chemically synthesized
cacuuuucgacauagugug

SEQ ID NO: 14238 - RNA, 19 nt, artificial
  Chemically synthesized
uggccaucuacaagcaguc

SEQ ID NO: 14239 - RNA, 19 nt, artificial
  Chemically synthesized
ggcgcuaaaaguuuugagc

SEQ ID NO: 14240 - RNA, 19 nt, artificial
  Chemically synthesized
agacccagguccagaugaa

SEQ ID NO: 14241 - RNA, 19 nt, artificial
  Chemically synthesized
ggauccaccaagacuuguu

SEQ ID NO: 14242 - RNA, 19 nt, artificial
  Chemically synthesized
ggaggauuucaucucuugu

SEQ ID NO: 14243 - RNA, 19 nt, artificial
  Chemically synthesized
uggaaacuacuuccugaaa

SEQ ID NO: 14244 - RNA, 19 nt, artificial
  Chemically synthesized
ccuauggaaacuacuuccu

SEQ ID NO: 14245 - RNA, 19 nt, artificial
  Chemically synthesized
ccacugaacaaguuggccu

SEQ ID NO: 14246 - RNA, 19 nt, artificial
  Chemically synthesized
ugaacccuugcuugcaaua

SEQ ID NO: 14247 - RNA, 19 nt, artificial
  Chemically synthesized
ggucuuugaacccuugcuu

SEQ ID NO: 14248 - RNA, 19 nt, artificial
  Chemically synthesized
cagcuuugaggugcguguu

SEQ ID NO: 14249 - RNA, 19 nt, artificial
  Chemically synthesized
accaucaucacacuggaag

SEQ ID NO: 14250 - RNA, 19 nt, artificial
  Chemically synthesized
ucaccaucaucacacugga

SEQ ID NO: 14251 - RNA, 19 nt, artificial
  Chemically synthesized
cacuacaacuacaugugua

SEQ ID NO: 14252 - RNA, 19 nt, artificial
  Chemically synthesized
auagugugguggugcccua

SEQ ID NO: 14253 - RNA, 19 nt, artificial
  Chemically synthesized
acagccaagucugugacuu

SEQ ID NO: 14254 - RNA, 19 nt, artificial
  Chemically synthesized
uucugucccuucccagaaa

SEQ ID NO: 14255 - RNA, 19 nt, artificial
  Chemically synthesized
ucuggauccaccaagacuu

SEQ ID NO: 14256 - RNA, 19 nt, artificial
  Chemically synthesized
cccuggaggauuucaucuc

SEQ ID NO: 14257 - RNA, 19 nt, artificial
  Chemically synthesized
cuuaguaccuaaaaggaaa

SEQ ID NO: 14258 - RNA, 19 nt, artificial
  Chemically synthesized
ggucgaccuuaguaccuaa

SEQ ID NO: 14259 - RNA, 19 nt, artificial
  Chemically synthesized
ccaaacccugucugacaac

SEQ ID NO: 14260 - RNA, 19 nt, artificial
  Chemically synthesized
cugaaaacaacguucuguc

SEQ ID NO: 14261 - RNA, 19 nt, artificial
  Chemically synthesized
ggaguaggacauaccagcu

SEQ ID NO: 14262 - RNA, 19 nt, artificial
  Chemically synthesized
ugcaauaggugugcgucag

SEQ ID NO: 14263 - RNA, 19 nt, artificial
  Chemically synthesized
ugcucaagacuggcgcuaa

SEQ ID NO: 14264 - RNA, 19 nt, artificial
  Chemically synthesized
gccauuuuggguuuugggu

SEQ ID NO: 14265 - RNA, 19 nt, artificial
  Chemically synthesized
cccucugagucaggaaaca

SEQ ID NO: 14266 - RNA, 19 nt, artificial
  Chemically synthesized
ccaaagaagaaaccacugg

SEQ ID NO: 14267 - RNA, 19 nt, artificial
  Chemically synthesized
agaaaaccuaccagggcag

SEQ ID NO: 14268 - RNA, 19 nt, artificial
  Chemically synthesized
ugaacaaugguucacugaa

SEQ ID NO: 14269 - RNA, 19 nt, artificial
  Chemically synthesized
gagcuggaagggucaacau

SEQ ID NO: 14270 - RNA, 19 nt, artificial
  Chemically synthesized
gauccaccaagacuuguuu

SEQ ID NO: 14271 - RNA, 19 nt, artificial
  Chemically synthesized
accucuuggucgaccuuag

SEQ ID NO: 14272 - RNA, 19 nt, artificial
  Chemically synthesized
accucacagagugcauugu

SEQ ID NO: 14273 - RNA, 19 nt, artificial
  Chemically synthesized
cuaccucacagagugcauu

SEQ ID NO: 14274 - RNA, 19 nt, artificial
  Chemically synthesized
guacuaaccagggaagcug

SEQ ID NO: 14275 - RNA, 19 nt, artificial
  Chemically synthesized
gggucuuugaacccuugcu

SEQ ID NO: 14276 - RNA, 19 nt, artificial
  Chemically synthesized
cucauguucaagacagaag

SEQ ID NO: 14277 - RNA, 19 nt, artificial
  Chemically synthesized
agcugaaugaggccuugga

SEQ ID NO: 14278 - RNA, 19 nt, artificial
  Chemically synthesized
acuacaacuacauguguaa

SEQ ID NO: 14279 - RNA, 19 nt, artificial
  Chemically synthesized
uggucgaccuuaguaccua

SEQ ID NO: 14280 - RNA, 19 nt, artificial
  Chemically synthesized
uggccuugaaaccaccuuu

SEQ ID NO: 14281 - RNA, 19 nt, artificial
  Chemically synthesized
cuggccuugaaaccaccuu

SEQ ID NO: 14282 - RNA, 19 nt, artificial
  Chemically synthesized
gccugcacugguguuuugu

SEQ ID NO: 14283 - RNA, 19 nt, artificial
  Chemically synthesized
ugaacaaguuggccugcac

SEQ ID NO: 14284 - RNA, 19 nt, artificial
  Chemically synthesized
acccuugcuugcaauaggu

SEQ ID NO: 14285 - RNA, 19 nt, artificial
  Chemically synthesized
ccagccaaagaagaaacca

SEQ ID NO: 14286 - RNA, 19 nt, artificial
  Chemically synthesized
cccagccaaagaagaaacc

SEQ ID NO: 14287 - RNA, 19 nt, artificial
  Chemically synthesized
agcuuugaggugcguguuu

SEQ ID NO: 14288 - RNA, 19 nt, artificial
  Chemically synthesized
ucacacuggaagacuccag

SEQ ID NO: 14289 - RNA, 19 nt, artificial
  Chemically synthesized
gcuucucaaaagucuagag

SEQ ID NO: 14290 - RNA, 19 nt, artificial
  Chemically synthesized
cucugacuguaccaccauc

SEQ ID NO: 14291 - RNA, 19 nt, artificial
  Chemically synthesized
agcaucuuauccgagugga

SEQ ID NO: 14292 - RNA, 19 nt, artificial
  Chemically synthesized
ucagcaucuuauccgagug

SEQ ID NO: 14293 - RNA, 19 nt, artificial
  Chemically synthesized
aaaguuuugagcuucucaa

SEQ ID NO: 14294 - RNA, 19 nt, artificial
  Chemically synthesized
agcagucacagcacaugac

SEQ ID NO: 14295 - RNA, 19 nt, artificial
  Chemically synthesized
ggccaucuacaagcaguca

SEQ ID NO: 14296 - RNA, 19 nt, artificial
  Chemically synthesized
gcuguggguugauuccaca

SEQ ID NO: 14297 - RNA, 19 nt, artificial
  Chemically synthesized
agcuguggguugauuccac

SEQ ID NO: 14298 - RNA, 19 nt, artificial
  Chemically synthesized
ucccuucccagaaaaccua

SEQ ID NO: 14299 - RNA, 19 nt, artificial
  Chemically synthesized
ccuaccucacagagugcau

SEQ ID NO: 14300 - RNA, 19 nt, artificial
  Chemically synthesized
accguacuaaccagggaag

SEQ ID NO: 14301 - RNA, 19 nt, artificial
  Chemically synthesized
ucaccguacuaaccaggga

SEQ ID NO: 14302 - RNA, 19 nt, artificial
  Chemically synthesized
cugaacaaguuggccugca

SEQ ID NO: 14303 - RNA, 19 nt, artificial
  Chemically synthesized
gccuuggaacucaaggaug

SEQ ID NO: 14304 - RNA, 19 nt, artificial
  Chemically synthesized
cagccaaagaagaaaccac

SEQ ID NO: 14305 - RNA, 19 nt, artificial
  Chemically synthesized
acagcuuugaggugcgugu

SEQ ID NO: 14306 - RNA, 19 nt, artificial
  Chemically synthesized
uccacuacaacuacaugug

SEQ ID NO: 14307 - RNA, 19 nt, artificial
  Chemically synthesized
ugagcuucucaaaagucua

SEQ ID NO: 14308 - RNA, 19 nt, artificial
  Chemically synthesized
cucagcaucuuauccgagu

SEQ ID NO: 14309 - RNA, 19 nt, artificial
  Chemically synthesized
caagcacaucugcauuuuc

SEQ ID NO: 14310 - RNA, 19 nt, artificial
  Chemically synthesized
ugcaagcacaucugcauuu

SEQ ID NO: 14311 - RNA, 19 nt, artificial
  Chemically synthesized
ccuuaguaccuaaaaggaa

SEQ ID NO: 14312 - RNA, 19 nt, artificial
  Chemically synthesized
uaagaaauguucuugcagu

SEQ ID NO: 14313 - RNA, 19 nt, artificial
  Chemically synthesized
cccuugcuugcaauaggug

SEQ ID NO: 14314 - RNA, 19 nt, artificial
  Chemically synthesized
guuuugagcuucucaaaag

SEQ ID NO: 14315 - RNA, 19 nt, artificial
  Chemically synthesized
uccucagcaucuuauccga

SEQ ID NO: 14316 - RNA, 19 nt, artificial
  Chemically synthesized
cucacagagugcauuguga

SEQ ID NO: 14317 - RNA, 19 nt, artificial
  Chemically synthesized
uguaagaaauguucuugca

SEQ ID NO: 14318 - RNA, 19 nt, artificial
  Chemically synthesized
ggcuccacugaacaaguug

SEQ ID NO: 14319 - RNA, 19 nt, artificial
  Chemically synthesized
ucgagauguuccgagagcu

SEQ ID NO: 14320 - RNA, 19 nt, artificial
  Chemically synthesized
caaccucuuggucgaccuu

SEQ ID NO: 14321 - RNA, 19 nt, artificial
  Chemically synthesized
uugaacccuugcuugcaau

SEQ ID NO: 14322 - RNA, 19 nt, artificial
  Chemically synthesized
uccagaugaagcucccaga

SEQ ID NO: 14323 - RNA, 19 nt, artificial
  Chemically synthesized
acaaccucuuggucgaccu

SEQ ID NO: 14324 - RNA, 19 nt, artificial
  Chemically synthesized
ggcuucuugcauucuggga

SEQ ID NO: 14325 - RNA, 19 nt, artificial
  Chemically synthesized
ucugcaagcacaucugcau

SEQ ID NO: 14326 - RNA, 19 nt, artificial
  Chemically synthesized
cugacaaccucuuggucga

SEQ ID NO: 14327 - RNA, 19 nt, artificial
  Chemically synthesized
cugcaagcacaucugcauu

SEQ ID NO: 14328 - RNA, 19 nt, artificial
  Chemically synthesized
cugggcuucuugcauucug

SEQ ID NO: 14329 - RNA, 19 nt, artificial
  Chemically synthesized
cagaaaaccuaccagggca

SEQ ID NO: 14330 - RNA, 19 nt, artificial
  Chemically synthesized
gucugggcuucuugcauuc

SEQ ID NO: 14331 - RNA, 19 nt, artificial
  Chemically synthesized
ccucugagucaggaaacau

SEQ ID NO: 14332 - RNA, 19 nt, artificial
  Chemically synthesized
aggccuuggaacucaagga

SEQ ID NO: 14333 - RNA, 19 nt, artificial
  Chemically synthesized
ugaagggugaaauauucuc

SEQ ID NO: 14334 - RNA, 19 nt, artificial
  Chemically synthesized
gagaucgauauaaaaaugg

SEQ ID NO: 14335 - RNA, 19 nt, artificial
  Chemically synthesized
aaaugggauauaaaaaggg

SEQ ID NO: 14336 - RNA, 19 nt, artificial
  Chemically synthesized
aaaacaucuuguugagggc

SEQ ID NO: 14337 - RNA, 19 nt, artificial
  Chemically synthesized
agaucgauauaaaaauggg

SEQ ID NO: 14338 - RNA, 19 nt, artificial
  Chemically synthesized
aaccuuaaaaucuaagcug

SEQ ID NO: 14339 - RNA, 19 nt, artificial
  Chemically synthesized
accuuaaaaucuaagcugg

SEQ ID NO: 14340 - RNA, 19 nt, artificial
  Chemically synthesized
uaggucugaaaauguuucc

SEQ ID NO: 14341 - RNA, 19 nt, artificial
  Chemically synthesized
aaaaguguuucugucaucc

SEQ ID NO: 14342 - RNA, 19 nt, artificial
  Chemically synthesized
uuuuuggacuucagguggc

SEQ ID NO: 14343 - RNA, 19 nt, artificial
  Chemically synthesized
auguaaaagauguugaccc

SEQ ID NO: 14344 - RNA, 19 nt, artificial
  Chemically synthesized
caaaacaucuuguugaggg

SEQ ID NO: 14345 - RNA, 19 nt, artificial
  Chemically synthesized
aaaaucuaagcugguaugu

SEQ ID NO: 14346 - RNA, 19 nt, artificial
  Chemically synthesized
gaucgauauaaaaauggga

SEQ ID NO: 14347 - RNA, 19 nt, artificial
  Chemically synthesized
aaugggauauaaaaaggga

SEQ ID NO: 14348 - RNA, 19 nt, artificial
  Chemically synthesized
uuauuucauuaacccucac

SEQ ID NO: 14349 - RNA, 19 nt, artificial
  Chemically synthesized
cagcauuucacagauaugg

SEQ ID NO: 14350 - RNA, 19 nt, artificial
  Chemically synthesized
ugaugauggugaggauggg

SEQ ID NO: 14351 - RNA, 19 nt, artificial
  Chemically synthesized
auuguucaauaucguccgg

SEQ ID NO: 14352 - RNA, 19 nt, artificial
  Chemically synthesized
uuguucaauaucguccggg

SEQ ID NO: 14353 - RNA, 19 nt, artificial
  Chemically synthesized
agaucaucauauacaagag

SEQ ID NO: 14354 - RNA, 19 nt, artificial
  Chemically synthesized
agaaaauucaacaugaggg

SEQ ID NO: 14355 - RNA, 19 nt, artificial
  Chemically synthesized
cuuuuuggacuucaggugg

SEQ ID NO: 14356 - RNA, 19 nt, artificial
  Chemically synthesized
auaaaacaagucuuggugg

SEQ ID NO: 14357 - RNA, 19 nt, artificial
  Chemically synthesized
ucauuaacccucacaaugc

SEQ ID NO: 14358 - RNA, 19 nt, artificial
  Chemically synthesized
auaugggccuugaaguuag

SEQ ID NO: 14359 - RNA, 19 nt, artificial
  Chemically synthesized
auguggcugauuguaaacu

SEQ ID NO: 14360 - RNA, 19 nt, artificial
  Chemically synthesized
cugauuguaaacuaacccu

SEQ ID NO: 14361 - RNA, 19 nt, artificial
  Chemically synthesized
gacaaagcaaauggaaguc

SEQ ID NO: 14362 - RNA, 19 nt, artificial
  Chemically synthesized
auaggucugaaaauguuuc

SEQ ID NO: 14363 - RNA, 19 nt, artificial
  Chemically synthesized
cuaugucgaaaaguguuuc

SEQ ID NO: 14364 - RNA, 19 nt, artificial
  Chemically synthesized
aaacaucuuguugagggca

SEQ ID NO: 14365 - RNA, 19 nt, artificial
  Chemically synthesized
cauuguucaauaucguccg

SEQ ID NO: 14366 - RNA, 19 nt, artificial
  Chemically synthesized
augggauauaaaaagggag

SEQ ID NO: 14367 - RNA, 19 nt, artificial
  Chemically synthesized
aauguaaaagauguugacc

SEQ ID NO: 14368 - RNA, 19 nt, artificial
  Chemically synthesized
cagaucaucauauacaaga

SEQ ID NO: 14369 - RNA, 19 nt, artificial
  Chemically synthesized
aaacuaccaacccaccagc

SEQ ID NO: 14370 - RNA, 19 nt, artificial
  Chemically synthesized
auuucauuaacccucacaa

SEQ ID NO: 14371 - RNA, 19 nt, artificial
  Chemically synthesized
aacauuucuuacaucuccc

SEQ ID NO: 14372 - RNA, 19 nt, artificial
  Chemically synthesized
aagaaguggagaaugucag

SEQ ID NO: 14373 - RNA, 19 nt, artificial
  Chemically synthesized
guagacugacccuuuuugg

SEQ ID NO: 14374 - RNA, 19 nt, artificial
  Chemically synthesized
uuccgucccaguagauuac

SEQ ID NO: 14375 - RNA, 19 nt, artificial
  Chemically synthesized
auguaguuguaguggaugg

SEQ ID NO: 14376 - RNA, 19 nt, artificial
  Chemically synthesized
caaauuuccuuccacucgg

SEQ ID NO: 14377 - RNA, 19 nt, artificial
  Chemically synthesized
aagggacagaagaugacag

SEQ ID NO: 14378 - RNA, 19 nt, artificial
  Chemically synthesized
uaaaaagggagaaggaggg

SEQ ID NO: 14379 - RNA, 19 nt, artificial
  Chemically synthesized
aaaagauguugacccuucc

SEQ ID NO: 14380 - RNA, 19 nt, artificial
  Chemically synthesized
gagcauaaaacaagucuug

SEQ ID NO: 14381 - RNA, 19 nt, artificial
  Chemically synthesized
uaaaacaagucuuggugga

SEQ ID NO: 14382 - RNA, 19 nt, artificial
  Chemically synthesized
agcaagacuugacaacucc

SEQ ID NO: 14383 - RNA, 19 nt, artificial
  Chemically synthesized
agcauuucacagauauggg

SEQ ID NO: 14384 - RNA, 19 nt, artificial
  Chemically synthesized
gcugauuguaaacuaaccc

SEQ ID NO: 14385 - RNA, 19 nt, artificial
  Chemically synthesized
aacaagaaguggagaaugu

SEQ ID NO: 14386 - RNA, 19 nt, artificial
  Chemically synthesized
gugaugauggugaggaugg

SEQ ID NO: 14387 - RNA, 19 nt, artificial
  Chemically synthesized
acuaugucgaaaaguguuu

SEQ ID NO: 14388 - RNA, 19 nt, artificial
  Chemically synthesized
agggacagaagaugacagg

SEQ ID NO: 14389 - RNA, 19 nt, artificial
  Chemically synthesized
aaccauuguucaauaucgu

SEQ ID NO: 14390 - RNA, 19 nt, artificial
  Chemically synthesized
ccauuguucaauaucgucc

SEQ ID NO: 14391 - RNA, 19 nt, artificial
  Chemically synthesized
ugcagaauguaaaagaugu

SEQ ID NO: 14392 - RNA, 19 nt, artificial
  Chemically synthesized
agcauaaaacaagucuugg

SEQ ID NO: 14393 - RNA, 19 nt, artificial
  Chemically synthesized
cauaaaacaagucuuggug

SEQ ID NO: 14394 - RNA, 19 nt, artificial
  Chemically synthesized
cuuuuagguacuaaggucg

SEQ ID NO: 14395 - RNA, 19 nt, artificial
  Chemically synthesized
uagaaacuaccaacccacc

SEQ ID NO: 14396 - RNA, 19 nt, artificial
  Chemically synthesized
cauuaacccucacaaugca

SEQ ID NO: 14397 - RNA, 19 nt, artificial
  Chemically synthesized
auuaacccucacaaugcac

SEQ ID NO: 14398 - RNA, 19 nt, artificial
  Chemically synthesized
gugagguaggugcaaaugc

SEQ ID NO: 14399 - RNA, 19 nt, artificial
  Chemically synthesized
cauuucacagauaugggcc

SEQ ID NO: 14400 - RNA, 19 nt, artificial
  Chemically synthesized
auuucacagauaugggccu

SEQ ID NO: 14401 - RNA, 19 nt, artificial
  Chemically synthesized
agagaaaauucaacaugag

SEQ ID NO: 14402 - RNA, 19 nt, artificial
  Chemically synthesized
gaaaauucaacaugaggga

SEQ ID NO: 14403 - RNA, 19 nt, artificial
  Chemically synthesized
aauucaacaugagggacag

SEQ ID NO: 14404 - RNA, 19 nt, artificial
  Chemically synthesized
uucaacaugagggacagcu

SEQ ID NO: 14405 - RNA, 19 nt, artificial
  Chemically synthesized
aaguaguuuccauaggucu

SEQ ID NO: 14406 - RNA, 19 nt, artificial
  Chemically synthesized
aacaucucgaagcgcucac

SEQ ID NO: 14407 - RNA, 19 nt, artificial
  Chemically synthesized
aaaguguuucugucaucca

SEQ ID NO: 14408 - RNA, 19 nt, artificial
  Chemically synthesized
cacacgcaaauuuccuucc

SEQ ID NO: 14409 - RNA, 19 nt, artificial
  Chemically synthesized
gaagcucaaaacuuuuagc

SEQ ID NO: 14410 - RNA, 19 nt, artificial
  Chemically synthesized
aaaacuuuuagcgccaguc

SEQ ID NO: 14411 - RNA, 19 nt, artificial
  Chemically synthesized
uguaaaagauguugacccu

SEQ ID NO: 14412 - RNA, 19 nt, artificial
  Chemically synthesized
uaaaaggugguuucaaggc

SEQ ID NO: 14413 - RNA, 19 nt, artificial
  Chemically synthesized
uuaacccucacaaugcacu

SEQ ID NO: 14414 - RNA, 19 nt, artificial
  Chemically synthesized
aacccucacaaugcacucu

SEQ ID NO: 14415 - RNA, 19 nt, artificial
  Chemically synthesized
aaauucaacaugagggaca

SEQ ID NO: 14416 - RNA, 19 nt, artificial
  Chemically synthesized
gaaguaguuuccauagguc

SEQ ID NO: 14417 - RNA, 19 nt, artificial
  Chemically synthesized
uuacaucucccaaacaucc

SEQ ID NO: 14418 - RNA, 19 nt, artificial
  Chemically synthesized
uacaucucccaaacauccc

SEQ ID NO: 14419 - RNA, 19 nt, artificial
  Chemically synthesized
aggucugaaaauguuuccu

SEQ ID NO: 14420 - RNA, 19 nt, artificial
  Chemically synthesized
gugaaauauucuccaucca

SEQ ID NO: 14421 - RNA, 19 nt, artificial
  Chemically synthesized
uuucugucauccaaauacu

SEQ ID NO: 14422 - RNA, 19 nt, artificial
  Chemically synthesized
ucugucauccaaauacucc

SEQ ID NO: 14423 - RNA, 19 nt, artificial
  Chemically synthesized
acagaacguuguuuucagg

SEQ ID NO: 14424 - RNA, 19 nt, artificial
  Chemically synthesized
gaaacuaccaacccaccag

SEQ ID NO: 14425 - RNA, 19 nt, artificial
  Chemically synthesized
aacguuguuuucaggaagu

SEQ ID NO: 14426 - RNA, 19 nt, artificial
  Chemically synthesized
uuuuagcgccagucuugag

SEQ ID NO: 14427 - RNA, 19 nt, artificial
  Chemically synthesized
augccagcauuucacagau

SEQ ID NO: 14428 - RNA, 19 nt, artificial
  Chemically synthesized
uaugggccuugaaguuaga

SEQ ID NO: 14429 - RNA, 19 nt, artificial
  Chemically synthesized
aaaauucaacaugagggac

SEQ ID NO: 14430 - RNA, 19 nt, artificial
  Chemically synthesized
uaacugcaagaacauuucu

SEQ ID NO: 14431 - RNA, 19 nt, artificial
  Chemically synthesized
gacccaaaacccaaaaugg

SEQ ID NO: 14432 - RNA, 19 nt, artificial
  Chemically synthesized
gagaaugucagucugaguc

SEQ ID NO: 14433 - RNA, 19 nt, artificial
  Chemically synthesized
aaugucagucugagucagg

SEQ ID NO: 14434 - RNA, 19 nt, artificial
  Chemically synthesized
aaguguuucugucauccaa

SEQ ID NO: 14435 - RNA, 19 nt, artificial
  Chemically synthesized
ugucauccaaauacuccac

SEQ ID NO: 14436 - RNA, 19 nt, artificial
  Chemically synthesized
cucaaaacuuuuagcgcca

SEQ ID NO: 14437 - RNA, 19 nt, artificial
  Chemically synthesized
aaacuuuuagcgccagucu

SEQ ID NO: 14438 - RNA, 19 nt, artificial
  Chemically synthesized
uuuagguacuaaggucgac

SEQ ID NO: 14439 - RNA, 19 nt, artificial
  Chemically synthesized
aauaaaaggugguuucaag

SEQ ID NO: 14440 - RNA, 19 nt, artificial
  Chemically synthesized
aaacuaacccuuaacugca

SEQ ID NO: 14441 - RNA, 19 nt, artificial
  Chemically synthesized
uaguuuccauaggucugaa

SEQ ID NO: 14442 - RNA, 19 nt, artificial
  Chemically synthesized
aacaaaacaccagugcagg

SEQ ID NO: 14443 - RNA, 19 nt, artificial
  Chemically synthesized
uuccauaggucugaaaaug

SEQ ID NO: 14444 - RNA, 19 nt, artificial
  Chemically synthesized
gaaguggagaaugucaguc

SEQ ID NO: 14445 - RNA, 19 nt, artificial
  Chemically synthesized
agaaugucagucugaguca

SEQ ID NO: 14446 - RNA, 19 nt, artificial
  Chemically synthesized
aaauauucuccauccagug

SEQ ID NO: 14447 - RNA, 19 nt, artificial
  Chemically synthesized
auccagugguuucuucuuu

SEQ ID NO: 14448 - RNA, 19 nt, artificial
  Chemically synthesized
gagucuuccagugugauga

SEQ ID NO: 14449 - RNA, 19 nt, artificial
  Chemically synthesized
cugucauccaaauacucca

SEQ ID NO: 14450 - RNA, 19 nt, artificial
  Chemically synthesized
auccaaauacuccacacgc

SEQ ID NO: 14451 - RNA, 19 nt, artificial
  Chemically synthesized
ucaaaacuuuuagcgccag

SEQ ID NO: 14452 - RNA, 19 nt, artificial
  Chemically synthesized
gauauaaaaagggagaagg

SEQ ID NO: 14453 - RNA, 19 nt, artificial
  Chemically synthesized
aucaaaucauccauugcuu

SEQ ID NO: 14454 - RNA, 19 nt, artificial
  Chemically synthesized
caagacuugacaacucccu

SEQ ID NO: 14455 - RNA, 19 nt, artificial
  Chemically synthesized
auaaaaggugguuucaagg

SEQ ID NO: 14456 - RNA, 19 nt, artificial
  Chemically synthesized
auucaacaugagggacagc

SEQ ID NO: 14457 - RNA, 19 nt, artificial
  Chemically synthesized
cuuaacugcaagaacauuu

SEQ ID NO: 14458 - RNA, 19 nt, artificial
  Chemically synthesized
aacugcaagaacauuucuu

SEQ ID NO: 14459 - RNA, 19 nt, artificial
  Chemically synthesized
uuucuuacaucucccaaac

SEQ ID NO: 14460 - RNA, 19 nt, artificial
  Chemically synthesized
caacaaaacaccagugcag

SEQ ID NO: 14461 - RNA, 19 nt, artificial
  Chemically synthesized
aguggagaaugucagucug

SEQ ID NO: 14462 - RNA, 19 nt, artificial
  Chemically synthesized
gucugaaaauguuuccuga

SEQ ID NO: 14463 - RNA, 19 nt, artificial
  Chemically synthesized
uuccaaggccucauucagc

SEQ ID NO: 14464 - RNA, 19 nt, artificial
  Chemically synthesized
uccagugguuucuucuuug

SEQ ID NO: 14465 - RNA, 19 nt, artificial
  Chemically synthesized
cagugguuucuucuuuggc

SEQ ID NO: 14466 - RNA, 19 nt, artificial
  Chemically synthesized
agugguuucuucuuuggcu

SEQ ID NO: 14467 - RNA, 19 nt, artificial
  Chemically synthesized
auggugguacagucagagc

SEQ ID NO: 14468 - RNA, 19 nt, artificial
  Chemically synthesized
uucugucauccaaauacuc

SEQ ID NO: 14469 - RNA, 19 nt, artificial
  Chemically synthesized
ucauccaaauacuccacac

SEQ ID NO: 14470 - RNA, 19 nt, artificial
  Chemically synthesized
acacgcaaauuuccuucca

SEQ ID NO: 14471 - RNA, 19 nt, artificial
  Chemically synthesized
gauaagaugcugaggaggg

SEQ ID NO: 14472 - RNA, 19 nt, artificial
  Chemically synthesized
aaccuccgucaugugcugu

SEQ ID NO: 14473 - RNA, 19 nt, artificial
  Chemically synthesized
uuuuagguacuaaggucga

SEQ ID NO: 14474 - RNA, 19 nt, artificial
  Chemically synthesized
cagcaagacuugacaacuc

SEQ ID NO: 14475 - RNA, 19 nt, artificial
  Chemically synthesized
acccucacaaugcacucug

SEQ ID NO: 14476 - RNA, 19 nt, artificial
  Chemically synthesized
uuucacagauaugggccuu

SEQ ID NO: 14477 - RNA, 19 nt, artificial
  Chemically synthesized
aacuaacccuuaacugcaa

SEQ ID NO: 14478 - RNA, 19 nt, artificial
  Chemically synthesized
uaacccuuaacugcaagaa

SEQ ID NO: 14479 - RNA, 19 nt, artificial
  Chemically synthesized
acaucucccaaacaucccu

SEQ ID NO: 14480 - RNA, 19 nt, artificial
  Chemically synthesized
caucucccaaacaucccuc

SEQ ID NO: 14481 - RNA, 19 nt, artificial
  Chemically synthesized
ggucugaaaauguuuccug

SEQ ID NO: 14482 - RNA, 19 nt, artificial
  Chemically synthesized
aacaugaguuuuuuauggc

SEQ ID NO: 14483 - RNA, 19 nt, artificial
  Chemically synthesized
cauccaaauacuccacacg

SEQ ID NO: 14484 - RNA, 19 nt, artificial
  Chemically synthesized
gacagcaucaaaucaucca

SEQ ID NO: 14485 - RNA, 19 nt, artificial
  Chemically synthesized
uggcagcaaaguuuuauug

SEQ ID NO: 14486 - RNA, 19 nt, artificial
  Chemically synthesized
agcaucaaaucauccauug

SEQ ID NO: 14487 - RNA, 19 nt, artificial
  Chemically synthesized
aagacuugacaacucccuc

SEQ ID NO: 14488 - RNA, 19 nt, artificial
  Chemically synthesized
aacucccucuaccuaacca

SEQ ID NO: 14489 - RNA, 19 nt, artificial
  Chemically synthesized
uucaaggccagauguacau

SEQ ID NO: 14490 - RNA, 19 nt, artificial
  Chemically synthesized
uucaaagacccaaaaccca

SEQ ID NO: 14491 - RNA, 19 nt, artificial
  Chemically synthesized
augaguuuuuuauggcggg

SEQ ID NO: 14492 - RNA, 19 nt, artificial
  Chemically synthesized
auucagcucucggaacauc

SEQ ID NO: 14493 - RNA, 19 nt, artificial
  Chemically synthesized
uucagcucucggaacaucu

SEQ ID NO: 14494 - RNA, 19 nt, artificial
  Chemically synthesized
caggaacuguuacacaugu

SEQ ID NO: 14495 - RNA, 19 nt, artificial
  Chemically synthesized
uguaguuguaguggauggu

SEQ ID NO: 14496 - RNA, 19 nt, artificial
  Chemically synthesized
cuagacuuuugagaagcuc

SEQ ID NO: 14497 - RNA, 19 nt, artificial
  Chemically synthesized
caccaccacacuaugucga

SEQ ID NO: 14498 - RNA, 19 nt, artificial
  Chemically synthesized
ccacacgcaaauuuccuuc

SEQ ID NO: 14499 - RNA, 19 nt, artificial
  Chemically synthesized
aaggccagauguacauuau

SEQ ID NO: 14500 - RNA, 19 nt, artificial
  Chemically synthesized
guucaaagacccaaaaccc

SEQ ID NO: 14501 - RNA, 19 nt, artificial
  Chemically synthesized
cugacccuuuuuggacuuc

SEQ ID NO: 14502 - RNA, 19 nt, artificial
  Chemically synthesized
ucuagacuuuugagaagcu

SEQ ID NO: 14503 - RNA, 19 nt, artificial
  Chemically synthesized
acuccacacgcaaauuucc

SEQ ID NO: 14504 - RNA, 19 nt, artificial
  Chemically synthesized
acucccucuaccuaaccag

SEQ ID NO: 14505 - RNA, 19 nt, artificial
  Chemically synthesized
uuuuggacuucagguggcu

SEQ ID NO: 14506 - RNA, 19 nt, artificial
  Chemically synthesized
augucgaaaaguguuucug

SEQ ID NO: 14507 - RNA, 19 nt, artificial
  Chemically synthesized
uccaaauacuccacacgca

SEQ ID NO: 14508 - RNA, 19 nt, artificial
  Chemically synthesized
cuugacaacucccucuacc

SEQ ID NO: 14509 - RNA, 19 nt, artificial
  Chemically synthesized
uuaguacggugaagugggc

SEQ ID NO: 14510 - RNA, 19 nt, artificial
  Chemically synthesized
ucaaagcuguuccguccca

SEQ ID NO: 14511 - RNA, 19 nt, artificial
  Chemically synthesized
gucccagaaugcaagaagc

SEQ ID NO: 14512 - RNA, 19 nt, artificial
  Chemically synthesized
uaggugcaaaugccagcau

SEQ ID NO: 14513 - RNA, 19 nt, artificial
  Chemically synthesized
uuuucaggaaguaguuucc

SEQ ID NO: 14514 - RNA, 19 nt, artificial
  Chemically synthesized
gaagggugaaauauucucc

SEQ ID NO: 14515 - RNA, 19 nt, artificial
  Chemically synthesized
uaugucgaaaaguguuucu

SEQ ID NO: 14516 - RNA, 19 nt, artificial
  Chemically synthesized
caguuggcaaaacaucuug

SEQ ID NO: 14517 - RNA, 19 nt, artificial
  Chemically synthesized
aacaucuuguugagggcag

SEQ ID NO: 14518 - RNA, 19 nt, artificial
  Chemically synthesized
aagcucaaaacuuuuagcg

SEQ ID NO: 14519 - RNA, 19 nt, artificial
  Chemically synthesized
cuaccuagaauguggcuga

SEQ ID NO: 14520 - RNA, 19 nt, artificial
  Chemically synthesized
aagcaaauggaaguccugg

SEQ ID NO: 14521 - RNA, 19 nt, artificial
  Chemically synthesized
gaacaugaguuuuuuaugg

SEQ ID NO: 14522 - RNA, 19 nt, artificial
  Chemically synthesized
agugugaugauggugagga

SEQ ID NO: 14523 - RNA, 19 nt, artificial
  Chemically synthesized
ugugacugcuuguagaugg

SEQ ID NO: 14524 - RNA, 19 nt, artificial
  Chemically synthesized
uacuaaggucgaccaagag

SEQ ID NO: 14525 - RNA, 19 nt, artificial
  Chemically synthesized
uaccuaccuagaauguggc

SEQ ID NO: 14526 - RNA, 19 nt, artificial
  Chemically synthesized
aucccucacaguaaaaacc

SEQ ID NO: 14527 - RNA, 19 nt, artificial
  Chemically synthesized
agcaaauggaaguccuggg

SEQ ID NO: 14528 - RNA, 19 nt, artificial
  Chemically synthesized
acaugaguuuuuuauggcg

SEQ ID NO: 14529 - RNA, 19 nt, artificial
  Chemically synthesized
caugaguuuuuuauggcgg

SEQ ID NO: 14530 - RNA, 19 nt, artificial
  Chemically synthesized
gucgaaaaguguuucuguc

SEQ ID NO: 14531 - RNA, 19 nt, artificial
  Chemically synthesized
aagagaugaaauccuccag

SEQ ID NO: 14532 - RNA, 19 nt, artificial
  Chemically synthesized
aagagguugucagacaggg

SEQ ID NO: 14533 - RNA, 19 nt, artificial
  Chemically synthesized
aacuguagaaacuaccaac

SEQ ID NO: 14534 - RNA, 19 nt, artificial
  Chemically synthesized
acuguagaaacuaccaacc

SEQ ID NO: 14535 - RNA, 19 nt, artificial
  Chemically synthesized
cuguagaaacuaccaaccc

SEQ ID NO: 14536 - RNA, 19 nt, artificial
  Chemically synthesized
cuaccuaccuagaaugugg

SEQ ID NO: 14537 - RNA, 19 nt, artificial
  Chemically synthesized
cuaagcugguauguccuac

SEQ ID NO: 14538 - RNA, 19 nt, artificial
  Chemically synthesized
aaaacccaaaauggcaggg

SEQ ID NO: 14539 - RNA, 19 nt, artificial
  Chemically synthesized
ugaguuuuuuauggcggga

SEQ ID NO: 14540 - RNA, 19 nt, artificial
  Chemically synthesized
gaguuuuuuauggcgggag

SEQ ID NO: 14541 - RNA, 19 nt, artificial
  Chemically synthesized
auccuugaguuccaaggcc

SEQ ID NO: 14542 - RNA, 19 nt, artificial
  Chemically synthesized
aauguuuccugacucagag

SEQ ID NO: 14543 - RNA, 19 nt, artificial
  Chemically synthesized
aagggugaaauauucucca

SEQ ID NO: 14544 - RNA, 19 nt, artificial
  Chemically synthesized
acaucuuguugagggcagg

SEQ ID NO: 14545 - RNA, 19 nt, artificial
  Chemically synthesized
cuucagugaaccauuguuc

SEQ ID NO: 14546 - RNA, 19 nt, artificial
  Chemically synthesized
ugagguaggugcaaaugcc

SEQ ID NO: 14547 - RNA, 19 nt, artificial
  Chemically synthesized
guaggugcaaaugccagca

SEQ ID NO: 14548 - RNA, 19 nt, artificial
  Chemically synthesized
caaaacccaaaauggcagg

SEQ ID NO: 14549 - RNA, 19 nt, artificial
  Chemically synthesized
uuuauggcgggagguagac

SEQ ID NO: 14550 - RNA, 19 nt, artificial
  Chemically synthesized
cuugcggagauucucuucc

SEQ ID NO: 14551 - RNA, 19 nt, artificial
  Chemically synthesized
cuguuacacauguaguugu

SEQ ID NO: 14552 - RNA, 19 nt, artificial
  Chemically synthesized
gugacugcuuguagauggc

SEQ ID NO: 14553 - RNA, 19 nt, artificial
  Chemically synthesized
auauaaaaagggagaagga

SEQ ID NO: 14554 - RNA, 19 nt, artificial
  Chemically synthesized
auaaaaagggagaaggagg

SEQ ID NO: 14555 - RNA, 19 nt, artificial
  Chemically synthesized
uugucagacaggguuuggc

SEQ ID NO: 14556 - RNA, 19 nt, artificial
  Chemically synthesized
aaagcaaauggaaguccug

SEQ ID NO: 14557 - RNA, 19 nt, artificial
  Chemically synthesized
ugacccuuuuuggacuuca

SEQ ID NO: 14558 - RNA, 19 nt, artificial
  Chemically synthesized
gaaaauguuuccugacuca

SEQ ID NO: 14559 - RNA, 19 nt, artificial
  Chemically synthesized
aaggccucauucagcucuc

SEQ ID NO: 14560 - RNA, 19 nt, artificial
  Chemically synthesized
uuucuugcggagauucucu

SEQ ID NO: 14561 - RNA, 19 nt, artificial
  Chemically synthesized
uuccagugugaugauggug

SEQ ID NO: 14562 - RNA, 19 nt, artificial
  Chemically synthesized
accaucgcuaucugagcag

SEQ ID NO: 14563 - RNA, 19 nt, artificial
  Chemically synthesized
uauaaaaagggagaaggag

SEQ ID NO: 14564 - RNA, 19 nt, artificial
  Chemically synthesized
ucuugguggauccagauca

SEQ ID NO: 14565 - RNA, 19 nt, artificial
  Chemically synthesized
guuaguacggugaaguggg

SEQ ID NO: 14566 - RNA, 19 nt, artificial
  Chemically synthesized
augucagucugagucaggc

SEQ ID NO: 14567 - RNA, 19 nt, artificial
  Chemically synthesized
aaaauguuuccugacucag

SEQ ID NO: 14568 - RNA, 19 nt, artificial
  Chemically synthesized
uugcggagauucucuuccu

SEQ ID NO: 14569 - RNA, 19 nt, artificial
  Chemically synthesized
caugcaggaacuguuacac

SEQ ID NO: 14570 - RNA, 19 nt, artificial
  Chemically synthesized
aacuguuacacauguaguu

SEQ ID NO: 14571 - RNA, 19 nt, artificial
  Chemically synthesized
acuguuacacauguaguug

SEQ ID NO: 14572 - RNA, 19 nt, artificial
  Chemically synthesized
aguuggcaaaacaucuugu

SEQ ID NO: 14573 - RNA, 19 nt, artificial
  Chemically synthesized
gaaccauuguucaauaucg

SEQ ID NO: 14574 - RNA, 19 nt, artificial
  Chemically synthesized
gagauuuccuuuuagguac

SEQ ID NO: 14575 - RNA, 19 nt, artificial
  Chemically synthesized
aucauccauugcuugggac

SEQ ID NO: 14576 - RNA, 19 nt, artificial
  Chemically synthesized
cccauguaauaaaaggugg

SEQ ID NO: 14577 - RNA, 19 nt, artificial
  Chemically synthesized
aaaaggugguuucaaggcc

SEQ ID NO: 14578 - RNA, 19 nt, artificial
  Chemically synthesized
aaugccagcauuucacaga

SEQ ID NO: 14579 - RNA, 19 nt, artificial
  Chemically synthesized
uucaggaaguaguuuccau

SEQ ID NO: 14580 - RNA, 19 nt, artificial
  Chemically synthesized
uucccugguuaguacggug

SEQ ID NO: 14581 - RNA, 19 nt, artificial
  Chemically synthesized
aucuaagcugguauguccu

SEQ ID NO: 14582 - RNA, 19 nt, artificial
  Chemically synthesized
aaaacaccagugcaggcca

SEQ ID NO: 14583 - RNA, 19 nt, artificial
  Chemically synthesized
acgcacaccuauugcaagc

SEQ ID NO: 14584 - RNA, 19 nt, artificial
  Chemically synthesized
aguuuuuuauggcgggagg

SEQ ID NO: 14585 - RNA, 19 nt, artificial
  Chemically synthesized
uuuuuauggcgggagguag

SEQ ID NO: 14586 - RNA, 19 nt, artificial
  Chemically synthesized
ugaaaauguuuccugacuc

SEQ ID NO: 14587 - RNA, 19 nt, artificial
  Chemically synthesized
caaggccucauucagcucu

SEQ ID NO: 14588 - RNA, 19 nt, artificial
  Chemically synthesized
ggugaaauauucuccaucc

SEQ ID NO: 14589 - RNA, 19 nt, artificial
  Chemically synthesized
aauauucuccauccagugg

SEQ ID NO: 14590 - RNA, 19 nt, artificial
  Chemically synthesized
uucuugcggagauucucuu

SEQ ID NO: 14591 - RNA, 19 nt, artificial
  Chemically synthesized
aaauuuccuuccacucgga

SEQ ID NO: 14592 - RNA, 19 nt, artificial
  Chemically synthesized
uaucugagcagcgcucaug

SEQ ID NO: 14593 - RNA, 19 nt, artificial
  Chemically synthesized
augugcugugacugcuugu

SEQ ID NO: 14594 - RNA, 19 nt, artificial
  Chemically synthesized
agaagcucaaaacuuuuag

SEQ ID NO: 14595 - RNA, 19 nt, artificial
  Chemically synthesized
uuggcaaaacaucuuguug

SEQ ID NO: 14596 - RNA, 19 nt, artificial
  Chemically synthesized
uggcaaaacaucuuguuga

SEQ ID NO: 14597 - RNA, 19 nt, artificial
  Chemically synthesized
ugcaagucacagacuuggc

SEQ ID NO: 14598 - RNA, 19 nt, artificial
  Chemically synthesized
aagaagcccagacggaaac

SEQ ID NO: 14599 - RNA, 19 nt, artificial
  Chemically synthesized
augaaauccuccagggugu

SEQ ID NO: 14600 - RNA, 19 nt, artificial
  Chemically synthesized
aaaugccagcauuucacag

SEQ ID NO: 14601 - RNA, 19 nt, artificial
  Chemically synthesized
caaagcaaauggaaguccu

SEQ ID NO: 14602 - RNA, 19 nt, artificial
  Chemically synthesized
aaguccugggugcuucuga

SEQ ID NO: 14603 - RNA, 19 nt, artificial
  Chemically synthesized
cugaagggugaaauauucu

SEQ ID NO: 14604 - RNA, 19 nt, artificial
  Chemically synthesized
uauucuccauccagugguu

SEQ ID NO: 14605 - RNA, 19 nt, artificial
  Chemically synthesized
cccaguagauuaccacugg

SEQ ID NO: 14606 - RNA, 19 nt, artificial
  Chemically synthesized
caguagauuaccacuggag

SEQ ID NO: 14607 - RNA, 19 nt, artificial
  Chemically synthesized
uaccacuggagucuuccag

SEQ ID NO: 14608 - RNA, 19 nt, artificial
  Chemically synthesized
ucuuccagugugaugaugg

SEQ ID NO: 14609 - RNA, 19 nt, artificial
  Chemically synthesized
uuuccuuccacucggauaa

SEQ ID NO: 14610 - RNA, 19 nt, artificial
  Chemically synthesized
uuccacucggauaagaugc

SEQ ID NO: 14611 - RNA, 19 nt, artificial
  Chemically synthesized
caugugcugugacugcuug

SEQ ID NO: 14612 - RNA, 19 nt, artificial
  Chemically synthesized
guacgugcaagucacagac

SEQ ID NO: 14613 - RNA, 19 nt, artificial
  Chemically synthesized
gugcaagucacagacuugg

SEQ ID NO: 14614 - RNA, 19 nt, artificial
  Chemically synthesized
agcucaaaacuuuuagcgc

SEQ ID NO: 14615 - RNA, 19 nt, artificial
  Chemically synthesized
uuuucugggaagggacaga

SEQ ID NO: 14616 - RNA, 19 nt, artificial
  Chemically synthesized
aucuggaccugggucuuca

SEQ ID NO: 14617 - RNA, 19 nt, artificial
  Chemically synthesized
agaugugcuugcagaaugu

SEQ ID NO: 14618 - RNA, 19 nt, artificial
  Chemically synthesized
aaucauccauugcuuggga

SEQ ID NO: 14619 - RNA, 19 nt, artificial
  Chemically synthesized
uguagaaacuaccaaccca

SEQ ID NO: 14620 - RNA, 19 nt, artificial
  Chemically synthesized
guagaaacuaccaacccac

SEQ ID NO: 14621 - RNA, 19 nt, artificial
  Chemically synthesized
uagacugacccuuuuugga

SEQ ID NO: 14622 - RNA, 19 nt, artificial
  Chemically synthesized
ucucggaacaucucgaagc

SEQ ID NO: 14623 - RNA, 19 nt, artificial
  Chemically synthesized
ucuccauccagugguuucu

SEQ ID NO: 14624 - RNA, 19 nt, artificial
  Chemically synthesized
ucuugcggagauucucuuc

SEQ ID NO: 14625 - RNA, 19 nt, artificial
  Chemically synthesized
acgcaccucaaagcuguuc

SEQ ID NO: 14626 - RNA, 19 nt, artificial
  Chemically synthesized
ucccaguagauuaccacug

SEQ ID NO: 14627 - RNA, 19 nt, artificial
  Chemically synthesized
gauuaccacuggagucuuc

SEQ ID NO: 14628 - RNA, 19 nt, artificial
  Chemically synthesized
cacacuaugucgaaaagug

SEQ ID NO: 14629 - RNA, 19 nt, artificial
  Chemically synthesized
gacugcuuguagauggcca

SEQ ID NO: 14630 - RNA, 19 nt, artificial
  Chemically synthesized
gcucaaaacuuuuagcgcc

SEQ ID NO: 14631 - RNA, 19 nt, artificial
  Chemically synthesized
uucaucuggaccugggucu

SEQ ID NO: 14632 - RNA, 19 nt, artificial
  Chemically synthesized
aacaagucuugguggaucc

SEQ ID NO: 14633 - RNA, 19 nt, artificial
  Chemically synthesized
acaagagaugaaauccucc

SEQ ID NO: 14634 - RNA, 19 nt, artificial
  Chemically synthesized
uuucaggaaguaguuucca

SEQ ID NO: 14635 - RNA, 19 nt, artificial
  Chemically synthesized
aggaaguaguuuccauagg

SEQ ID NO: 14636 - RNA, 19 nt, artificial
  Chemically synthesized
aggccaacuuguucagugg

SEQ ID NO: 14637 - RNA, 19 nt, artificial
  Chemically synthesized
uauugcaagcaaggguuca

SEQ ID NO: 14638 - RNA, 19 nt, artificial
  Chemically synthesized
aagcaaggguucaaagacc

SEQ ID NO: 14639 - RNA, 19 nt, artificial
  Chemically synthesized
aacacgcaccucaaagcug

SEQ ID NO: 14640 - RNA, 19 nt, artificial
  Chemically synthesized
cuuccagugugaugauggu

SEQ ID NO: 14641 - RNA, 19 nt, artificial
  Chemically synthesized
uccagugugaugaugguga

SEQ ID NO: 14642 - RNA, 19 nt, artificial
  Chemically synthesized
uacacauguaguuguagug

SEQ ID NO: 14643 - RNA, 19 nt, artificial
  Chemically synthesized
uagggcaccaccacacuau

SEQ ID NO: 14644 - RNA, 19 nt, artificial
  Chemically synthesized
aagucacagacuuggcugu

SEQ ID NO: 14645 - RNA, 19 nt, artificial
  Chemically synthesized
uuucugggaagggacagaa

SEQ ID NO: 14646 - RNA, 19 nt, artificial
  Chemically synthesized
aagucuugguggauccaga

SEQ ID NO: 14647 - RNA, 19 nt, artificial
  Chemically synthesized
gagaugaaauccuccaggg

SEQ ID NO: 14648 - RNA, 19 nt, artificial
  Chemically synthesized
uuuccuuuuagguacuaag

SEQ ID NO: 14649 - RNA, 19 nt, artificial
  Chemically synthesized
uuagguacuaaggucgacc

SEQ ID NO: 14650 - RNA, 19 nt, artificial
  Chemically synthesized
guugucagacaggguuugg

SEQ ID NO: 14651 - RNA, 19 nt, artificial
  Chemically synthesized
gacagaacguuguuuucag

SEQ ID NO: 14652 - RNA, 19 nt, artificial
  Chemically synthesized
agcugguauguccuacucc

SEQ ID NO: 14653 - RNA, 19 nt, artificial
  Chemically synthesized
cugacgcacaccuauugca

SEQ ID NO: 14654 - RNA, 19 nt, artificial
  Chemically synthesized
uuagcgccagucuugagca

SEQ ID NO: 14655 - RNA, 19 nt, artificial
  Chemically synthesized
acccaaaacccaaaauggc

SEQ ID NO: 14656 - RNA, 19 nt, artificial
  Chemically synthesized
uguuuccugacucagaggg

SEQ ID NO: 14657 - RNA, 19 nt, artificial
  Chemically synthesized
ccagugguuucuucuuugg

SEQ ID NO: 14658 - RNA, 19 nt, artificial
  Chemically synthesized
cugcccugguagguuuucu

SEQ ID NO: 14659 - RNA, 19 nt, artificial
  Chemically synthesized
uucagugaaccauuguuca

SEQ ID NO: 14660 - RNA, 19 nt, artificial
  Chemically synthesized
auguugacccuuccagcuc

SEQ ID NO: 14661 - RNA, 19 nt, artificial
  Chemically synthesized
aaacaagucuugguggauc

SEQ ID NO: 14662 - RNA, 19 nt, artificial
  Chemically synthesized
cuaaggucgaccaagaggu

SEQ ID NO: 14663 - RNA, 19 nt, artificial
  Chemically synthesized
acaaugcacucugugaggu

SEQ ID NO: 14664 - RNA, 19 nt, artificial
  Chemically synthesized
aaugcacucugugagguag

SEQ ID NO: 14665 - RNA, 19 nt, artificial
  Chemically synthesized
cagcuucccugguuaguac

SEQ ID NO: 14666 - RNA, 19 nt, artificial
  Chemically synthesized
agcaaggguucaaagaccc

SEQ ID NO: 14667 - RNA, 19 nt, artificial
  Chemically synthesized
cuucugucuugaacaugag

SEQ ID NO: 14668 - RNA, 19 nt, artificial
  Chemically synthesized
uccaaggccucauucagcu

SEQ ID NO: 14669 - RNA, 19 nt, artificial
  Chemically synthesized
uuacacauguaguuguagu

SEQ ID NO: 14670 - RNA, 19 nt, artificial
  Chemically synthesized
uagguacuaaggucgacca

SEQ ID NO: 14671 - RNA, 19 nt, artificial
  Chemically synthesized
aaaggugguuucaaggcca

SEQ ID NO: 14672 - RNA, 19 nt, artificial
  Chemically synthesized
aaggugguuucaaggccag

SEQ ID NO: 14673 - RNA, 19 nt, artificial
  Chemically synthesized
acaaaacaccagugcaggc

SEQ ID NO: 14674 - RNA, 19 nt, artificial
  Chemically synthesized
gugcaggccaacuuguuca

SEQ ID NO: 14675 - RNA, 19 nt, artificial
  Chemically synthesized
accuauugcaagcaagggu

SEQ ID NO: 14676 - RNA, 19 nt, artificial
  Chemically synthesized
ugguuucuucuuuggcugg

SEQ ID NO: 14677 - RNA, 19 nt, artificial
  Chemically synthesized
gguuucuucuuuggcuggg

SEQ ID NO: 14678 - RNA, 19 nt, artificial
  Chemically synthesized
aaacacgcaccucaaagcu

SEQ ID NO: 14679 - RNA, 19 nt, artificial
  Chemically synthesized
cuggagucuuccaguguga

SEQ ID NO: 14680 - RNA, 19 nt, artificial
  Chemically synthesized
cucuagacuuuugagaagc

SEQ ID NO: 14681 - RNA, 19 nt, artificial
  Chemically synthesized
gauggugguacagucagag

SEQ ID NO: 14682 - RNA, 19 nt, artificial
  Chemically synthesized
uccacucggauaagaugcu

SEQ ID NO: 14683 - RNA, 19 nt, artificial
  Chemically synthesized
cacucggauaagaugcuga

SEQ ID NO: 14684 - RNA, 19 nt, artificial
  Chemically synthesized
uugagaagcucaaaacuuu

SEQ ID NO: 14685 - RNA, 19 nt, artificial
  Chemically synthesized
gucaugugcugugacugcu

SEQ ID NO: 14686 - RNA, 19 nt, artificial
  Chemically synthesized
ugacugcuuguagauggcc

SEQ ID NO: 14687 - RNA, 19 nt, artificial
  Chemically synthesized
uguggaaucaacccacagc

SEQ ID NO: 14688 - RNA, 19 nt, artificial
  Chemically synthesized
guggaaucaacccacagcu

SEQ ID NO: 14689 - RNA, 19 nt, artificial
  Chemically synthesized
uagguuuucugggaaggga

SEQ ID NO: 14690 - RNA, 19 nt, artificial
  Chemically synthesized
augcacucugugagguagg

SEQ ID NO: 14691 - RNA, 19 nt, artificial
  Chemically synthesized
cuucccugguuaguacggu

SEQ ID NO: 14692 - RNA, 19 nt, artificial
  Chemically synthesized
ucccugguuaguacgguga

SEQ ID NO: 14693 - RNA, 19 nt, artificial
  Chemically synthesized
ugcaggccaacuuguucag

SEQ ID NO: 14694 - RNA, 19 nt, artificial
  Chemically synthesized
cauccuugaguuccaaggc

SEQ ID NO: 14695 - RNA, 19 nt, artificial
  Chemically synthesized
gugguuucuucuuuggcug

SEQ ID NO: 14696 - RNA, 19 nt, artificial
  Chemically synthesized
acacgcaccucaaagcugu

SEQ ID NO: 14697 - RNA, 19 nt, artificial
  Chemically synthesized
cacauguaguuguagugga

SEQ ID NO: 14698 - RNA, 19 nt, artificial
  Chemically synthesized
uagacuuuugagaagcuca

SEQ ID NO: 14699 - RNA, 19 nt, artificial
  Chemically synthesized
acucggauaagaugcugag

SEQ ID NO: 14700 - RNA, 19 nt, artificial
  Chemically synthesized
gaaaaugcagaugugcuug

SEQ ID NO: 14701 - RNA, 19 nt, artificial
  Chemically synthesized
aaaugcagaugugcuugca

SEQ ID NO: 14702 - RNA, 19 nt, artificial
  Chemically synthesized
uuccuuuuagguacuaagg

SEQ ID NO: 14703 - RNA, 19 nt, artificial
  Chemically synthesized
acugcaagaacauuucuua

SEQ ID NO: 14704 - RNA, 19 nt, artificial
  Chemically synthesized
caccuauugcaagcaaggg

SEQ ID NO: 14705 - RNA, 19 nt, artificial
  Chemically synthesized
cuuuugagaagcucaaaac

SEQ ID NO: 14706 - RNA, 19 nt, artificial
  Chemically synthesized
ucggauaagaugcugagga

SEQ ID NO: 14707 - RNA, 19 nt, artificial
  Chemically synthesized
ucacaaugcacucugugag

SEQ ID NO: 14708 - RNA, 19 nt, artificial
  Chemically synthesized
ugcaagaacauuucuuaca

SEQ ID NO: 14709 - RNA, 19 nt, artificial
  Chemically synthesized
caacuuguucaguggagcc

SEQ ID NO: 14710 - RNA, 19 nt, artificial
  Chemically synthesized
agcucucggaacaucucga

SEQ ID NO: 14711 - RNA, 19 nt, artificial
  Chemically synthesized
aaggucgaccaagagguug

SEQ ID NO: 14712 - RNA, 19 nt, artificial
  Chemically synthesized
auugcaagcaaggguucaa

SEQ ID NO: 14713 - RNA, 19 nt, artificial
  Chemically synthesized
ucugggagcuucaucugga

SEQ ID NO: 14714 - RNA, 19 nt, artificial
  Chemically synthesized
aggucgaccaagagguugu

SEQ ID NO: 14715 - RNA, 19 nt, artificial
  Chemically synthesized
ucccagaaugcaagaagcc

SEQ ID NO: 14716 - RNA, 19 nt, artificial
  Chemically synthesized
augcagaugugcuugcaga

SEQ ID NO: 14717 - RNA, 19 nt, artificial
  Chemically synthesized
ucgaccaagagguugucag

SEQ ID NO: 14718 - RNA, 19 nt, artificial
  Chemically synthesized
aaugcagaugugcuugcag

SEQ ID NO: 14719 - RNA, 19 nt, artificial
  Chemically synthesized
cagaaugcaagaagcccag

SEQ ID NO: 14720 - RNA, 19 nt, artificial
  Chemically synthesized
ugcccugguagguuuucug

SEQ ID NO: 14721 - RNA, 19 nt, artificial
  Chemically synthesized
gaaugcaagaagcccagac

SEQ ID NO: 14722 - RNA, 19 nt, artificial
  Chemically synthesized
auguuuccugacucagagg

SEQ ID NO: 14723 - RNA, 19 nt, artificial
  Chemically synthesized
uccuugaguuccaaggccu

SEQ ID NO: 14724 - RNA, 19 nt, artificial
  Chemically synthesized
cauugugaggguuaaugaa

SEQ ID NO: 14725 - RNA, 19 nt, artificial
  Chemically synthesized
gcucaagacuggcgcuaaa

SEQ ID NO: 14726 - RNA, 19 nt, artificial
  Chemically synthesized
guuaaggguuaguuuacaa

SEQ ID NO: 14727 - RNA, 19 nt, artificial
  Chemically synthesized
gcaguuaaggguuaguuua

SEQ ID NO: 14728 - RNA, 19 nt, artificial
  Chemically synthesized
gaauuuucucuaacuucaa

SEQ ID NO: 14729 - RNA, 19 nt, artificial
  Chemically synthesized
gaaauguucuugcaguuaa

SEQ ID NO: 14730 - RNA, 19 nt, artificial
  Chemically synthesized
ggguuaaugaaauaaugua

SEQ ID NO: 14731 - RNA, 19 nt, artificial
  Chemically synthesized
auaccagcuuagauuuuaa

SEQ ID NO: 14732 - RNA, 19 nt, artificial
  Chemically synthesized
caauaggugugcgucagaa

SEQ ID NO: 14733 - RNA, 19 nt, artificial
  Chemically synthesized
ggauuucaucucuuguaua

SEQ ID NO: 14734 - RNA, 19 nt, artificial
  Chemically synthesized
cauguugaauuuucucuaa

SEQ ID NO: 14735 - RNA, 19 nt, artificial
  Chemically synthesized
guaccaccauccacuacaa

SEQ ID NO: 14736 - RNA, 19 nt, artificial
  Chemically synthesized
cgaucucuuauuuuacaau

SEQ ID NO: 14737 - RNA, 19 nt, artificial
  Chemically synthesized
ggaagacuccagugguaau

SEQ ID NO: 14738 - RNA, 19 nt, artificial
  Chemically synthesized
ugugaggguuaaugaaaua

SEQ ID NO: 14739 - RNA, 19 nt, artificial
  Chemically synthesized
ggacauaccagcuuagauu

SEQ ID NO: 14740 - RNA, 19 nt, artificial
  Chemically synthesized
auaaaaaacucauguucaa

SEQ ID NO: 14741 - RNA, 19 nt, artificial
  Chemically synthesized
gaggguuaaugaaauaaug

SEQ ID NO: 14742 - RNA, 19 nt, artificial
  Chemically synthesized
gaucucuuauuuuacaaua

SEQ ID NO: 14743 - RNA, 19 nt, artificial
  Chemically synthesized
gaaaccacuggauggagaa

SEQ ID NO: 14744 - RNA, 19 nt, artificial
  Chemically synthesized
aguuaaggguuaguuuaca

SEQ ID NO: 14745 - RNA, 19 nt, artificial
  Chemically synthesized
aacucauguucaagacaga

SEQ ID NO: 14746 - RNA, 19 nt, artificial
  Chemically synthesized
gaauauuucacccuucaga

SEQ ID NO: 14747 - RNA, 19 nt, artificial
  Chemically synthesized
auaucgaucucuuauuuua

SEQ ID NO: 14748 - RNA, 19 nt, artificial
  Chemically synthesized
cuggauggagaauauuuca

SEQ ID NO: 14749 - RNA, 19 nt, artificial
  Chemically synthesized
uguacaucuggccuugaaa

SEQ ID NO: 14750 - RNA, 19 nt, artificial
  Chemically synthesized
gaaauuugcguguggagua

SEQ ID NO: 14751 - RNA, 19 nt, artificial
  Chemically synthesized
ucuaccucccgccauaaaa

SEQ ID NO: 14752 - RNA, 19 nt, artificial
  Chemically synthesized
uguauaugaugaucuggau

SEQ ID NO: 14753 - RNA, 19 nt, artificial
  Chemically synthesized
agguagagggaguugucaa

SEQ ID NO: 14754 - RNA, 19 nt, artificial
  Chemically synthesized
ccaccauccacuacaacua

SEQ ID NO: 14755 - RNA, 19 nt, artificial
  Chemically synthesized
gaagggucaacaucuuuua

SEQ ID NO: 14756 - RNA, 19 nt, artificial
  Chemically synthesized
gcgcacagaggaagagaau

SEQ ID NO: 14757 - RNA, 19 nt, artificial
  Chemically synthesized
ccagaugaagcucccagaa

SEQ ID NO: 14758 - RNA, 19 nt, artificial
  Chemically synthesized
ugaggguuaaugaaauaau

SEQ ID NO: 14759 - RNA, 19 nt, artificial
  Chemically synthesized
uaccucccgccauaaaaaa

SEQ ID NO: 14760 - RNA, 19 nt, artificial
  Chemically synthesized
ucgaucucuuauuuuacaa

SEQ ID NO: 14761 - RNA, 19 nt, artificial
  Chemically synthesized
caaggcccauaucugugaa

SEQ ID NO: 14762 - RNA, 19 nt, artificial
  Chemically synthesized
gagguuggcucugacugua

SEQ ID NO: 14763 - RNA, 19 nt, artificial
  Chemically synthesized
cagaccuauggaaacuacu

SEQ ID NO: 14764 - RNA, 19 nt, artificial
  Chemically synthesized
gaaaccaccuuuuauuaca

SEQ ID NO: 14765 - RNA, 19 nt, artificial
  Chemically synthesized
gcuuagauuuuaagguuuu

SEQ ID NO: 14766 - RNA, 19 nt, artificial
  Chemically synthesized
cauaccagcuuagauuuua

SEQ ID NO: 14767 - RNA, 19 nt, artificial
  Chemically synthesized
aaggguuaguuuacaauca

SEQ ID NO: 14768 - RNA, 19 nt, artificial
  Chemically synthesized
caagcaauggaugauuuga

SEQ ID NO: 14769 - RNA, 19 nt, artificial
  Chemically synthesized
cagccaccugaaguccaaa

SEQ ID NO: 14770 - RNA, 19 nt, artificial
  Chemically synthesized
guuaguuuacaaucagcca

SEQ ID NO: 14771 - RNA, 19 nt, artificial
  Chemically synthesized
cugugagggauguuuggga

SEQ ID NO: 14772 - RNA, 19 nt, artificial
  Chemically synthesized
ugaauuuucucuaacuuca

SEQ ID NO: 14773 - RNA, 19 nt, artificial
  Chemically synthesized
uuuuuauaucgaucucuua

SEQ ID NO: 14774 - RNA, 19 nt, artificial
  Chemically synthesized
cgucccaagcaauggauga

SEQ ID NO: 14775 - RNA, 19 nt, artificial
  Chemically synthesized
gaaacuacuuccugaaaac

SEQ ID NO: 14776 - RNA, 19 nt, artificial
  Chemically synthesized
cauccucaccaucaucaca

SEQ ID NO: 14777 - RNA, 19 nt, artificial
  Chemically synthesized
caagacuggcgcuaaaagu

SEQ ID NO: 14778 - RNA, 19 nt, artificial
  Chemically synthesized
gucaggaaacauuuucaga

SEQ ID NO: 14779 - RNA, 19 nt, artificial
  Chemically synthesized
gagugcauugugaggguua

SEQ ID NO: 14780 - RNA, 19 nt, artificial
  Chemically synthesized
agucuaccucccgccauaa

SEQ ID NO: 14781 - RNA, 19 nt, artificial
  Chemically synthesized
auugugaggguuaaugaaa

SEQ ID NO: 14782 - RNA, 19 nt, artificial
  Chemically synthesized
cauaaaaaacucauguuca

SEQ ID NO: 14783 - RNA, 19 nt, artificial
  Chemically synthesized
caucuuuuacauucugcaa

SEQ ID NO: 14784 - RNA, 19 nt, artificial
  Chemically synthesized
gauuucaucucuuguauau

SEQ ID NO: 14785 - RNA, 19 nt, artificial
  Chemically synthesized
uauggaaacuacuuccuga

SEQ ID NO: 14786 - RNA, 19 nt, artificial
  Chemically synthesized
caucuucugucccuuccca

SEQ ID NO: 14787 - RNA, 19 nt, artificial
  Chemically synthesized
cuggaagggucaacaucuu

SEQ ID NO: 14788 - RNA, 19 nt, artificial
  Chemically synthesized
auguuugggagauguaaga

SEQ ID NO: 14789 - RNA, 19 nt, artificial
  Chemically synthesized
cuuugaggugcguguuugu

SEQ ID NO: 14790 - RNA, 19 nt, artificial
  Chemically synthesized
cuuuuuauaucccauuuuu

SEQ ID NO: 14791 - RNA, 19 nt, artificial
  Chemically synthesized
aacuacuuccugaaaacaa

SEQ ID NO: 14792 - RNA, 19 nt, artificial
  Chemically synthesized
aggauuucaucucuuguau

SEQ ID NO: 14793 - RNA, 19 nt, artificial
  Chemically synthesized
acuacuuccugaaaacaac

SEQ ID NO: 14794 - RNA, 19 nt, artificial
  Chemically synthesized
guauuuggaugacagaaac

SEQ ID NO: 14795 - RNA, 19 nt, artificial
  Chemically synthesized
uuugggagauguaagaaau

SEQ ID NO: 14796 - RNA, 19 nt, artificial
  Chemically synthesized
cucagacugacauucucca

SEQ ID NO: 14797 - RNA, 19 nt, artificial
  Chemically synthesized
ugacagaaacacuuuucga

SEQ ID NO: 14798 - RNA, 19 nt, artificial
  Chemically synthesized
aguaggacauaccagcuua

SEQ ID NO: 14799 - RNA, 19 nt, artificial
  Chemically synthesized
ucauguugaauuuucucua

SEQ ID NO: 14800 - RNA, 19 nt, artificial
  Chemically synthesized
aauauuucacccuucagau

SEQ ID NO: 14801 - RNA, 19 nt, artificial
  Chemically synthesized
aucgaucucuuauuuuaca

SEQ ID NO: 14802 - RNA, 19 nt, artificial
  Chemically synthesized
gauguuugggagauguaag

SEQ ID NO: 14803 - RNA, 19 nt, artificial
  Chemically synthesized
agcugguuagguagaggga

SEQ ID NO: 14804 - RNA, 19 nt, artificial
  Chemically synthesized
acagaaacacuuuucgaca

SEQ ID NO: 14805 - RNA, 19 nt, artificial
  Chemically synthesized
caguuaaggguuaguuuac

SEQ ID NO: 14806 - RNA, 19 nt, artificial
  Chemically synthesized
ugaugaucuggauccacca

SEQ ID NO: 14807 - RNA, 19 nt, artificial
  Chemically synthesized
acauuuucagaccuaugga

SEQ ID NO: 14808 - RNA, 19 nt, artificial
  Chemically synthesized
cauuugcaccuaccucaca

SEQ ID NO: 14809 - RNA, 19 nt, artificial
  Chemically synthesized
cuuagauuuuaagguuuuu

SEQ ID NO: 14810 - RNA, 19 nt, artificial
  Chemically synthesized
agauuuuaagguuuuuacu

SEQ ID NO: 14811 - RNA, 19 nt, artificial
  Chemically synthesized
cgucugggcuucuugcauu

SEQ ID NO: 14812 - RNA, 19 nt, artificial
  Chemically synthesized
gcaauaggugugcgucaga

SEQ ID NO: 14813 - RNA, 19 nt, artificial
  Chemically synthesized
uacaaucagccacauucua

SEQ ID NO: 14814 - RNA, 19 nt, artificial
  Chemically synthesized
agguuuuuacugugaggga

SEQ ID NO: 14815 - RNA, 19 nt, artificial
  Chemically synthesized
ccugaaguccaaaaagggu

SEQ ID NO: 14816 - RNA, 19 nt, artificial
  Chemically synthesized
gugagggauguuugggaga

SEQ ID NO: 14817 - RNA, 19 nt, artificial
  Chemically synthesized
aucccauuuuuauaucgau

SEQ ID NO: 14818 - RNA, 19 nt, artificial
  Chemically synthesized
uuggguuuugggucuuuga

SEQ ID NO: 14819 - RNA, 19 nt, artificial
  Chemically synthesized
gacauaccagcuuagauuu

SEQ ID NO: 14820 - RNA, 19 nt, artificial
  Chemically synthesized
uguuuugccaacuggccaa

SEQ ID NO: 14821 - RNA, 19 nt, artificial
  Chemically synthesized
gguaaucuacugggacgga

SEQ ID NO: 14822 - RNA, 19 nt, artificial
  Chemically synthesized
guuaaugaaauaauguaca

SEQ ID NO: 14823 - RNA, 19 nt, artificial
  Chemically synthesized
ucucuaacuucaaggccca

SEQ ID NO: 14824 - RNA, 19 nt, artificial
  Chemically synthesized
augaggccuuggaacucaa

SEQ ID NO: 14825 - RNA, 19 nt, artificial
  Chemically synthesized
uguuugggagauguaagaa

SEQ ID NO: 14826 - RNA, 19 nt, artificial
  Chemically synthesized
ugguggguugguaguuucu

SEQ ID NO: 14827 - RNA, 19 nt, artificial
  Chemically synthesized
aaauuugcguguggaguau

SEQ ID NO: 14828 - RNA, 19 nt, artificial
  Chemically synthesized
uaguuuacaaucagccaca

SEQ ID NO: 14829 - RNA, 19 nt, artificial
  Chemically synthesized
agagggaguugucaagucu

SEQ ID NO: 14830 - RNA, 19 nt, artificial
  Chemically synthesized
agcacaugacggagguugu

SEQ ID NO: 14831 - RNA, 19 nt, artificial
  Chemically synthesized
gaggaagagaaucuccgca

SEQ ID NO: 14832 - RNA, 19 nt, artificial
  Chemically synthesized
aaggaaauuugcgugugga

SEQ ID NO: 14833 - RNA, 19 nt, artificial
  Chemically synthesized
acuguaccaccauccacua

SEQ ID NO: 14834 - RNA, 19 nt, artificial
  Chemically synthesized
ucugagucaggaaacauuu

SEQ ID NO: 14835 - RNA, 19 nt, artificial
  Chemically synthesized
gguuaaugaaauaauguac

SEQ ID NO: 14836 - RNA, 19 nt, artificial
  Chemically synthesized
gagauguuccgagagcuga

SEQ ID NO: 14837 - RNA, 19 nt, artificial
  Chemically synthesized
agcuuagauuuuaagguuu

SEQ ID NO: 14838 - RNA, 19 nt, artificial
  Chemically synthesized
aacaaugguucacugaaga

SEQ ID NO: 14839 - RNA, 19 nt, artificial
  Chemically synthesized
uaccuaaaaggaaaucuca

SEQ ID NO: 14840 - RNA, 19 nt, artificial
  Chemically synthesized
aaaccaccuuuuauuacau

SEQ ID NO: 14841 - RNA, 19 nt, artificial
  Chemically synthesized
uugucauggcgacugucca

SEQ ID NO: 14842 - RNA, 19 nt, artificial
  Chemically synthesized
ccauggccaucuacaagca

SEQ ID NO: 14843 - RNA, 19 nt, artificial
  Chemically synthesized
gaggauuucaucucuugua

SEQ ID NO: 14844 - RNA, 19 nt, artificial
  Chemically synthesized
uugggcagcugguuaggua

SEQ ID NO: 14845 - RNA, 19 nt, artificial
  Chemically synthesized
gacuguaccaccauccacu

SEQ ID NO: 14846 - RNA, 19 nt, artificial
  Chemically synthesized
guuuacaaucagccacauu

SEQ ID NO: 14847 - RNA, 19 nt, artificial
  Chemically synthesized
ugaaaugcuggcauuugca

SEQ ID NO: 14848 - RNA, 19 nt, artificial
  Chemically synthesized
accacuggauggagaauau

SEQ ID NO: 14849 - RNA, 19 nt, artificial
  Chemically synthesized
gaugaucuggauccaccaa

SEQ ID NO: 14850 - RNA, 19 nt, artificial
  Chemically synthesized
auuuucagaccuauggaaa

SEQ ID NO: 14851 - RNA, 19 nt, artificial
  Chemically synthesized
aaguuuugagcuucucaaa

SEQ ID NO: 14852 - RNA, 19 nt, artificial
  Chemically synthesized
aggguuaaugaaauaaugu

SEQ ID NO: 14853 - RNA, 19 nt, artificial
  Chemically synthesized
aaucuacugggacggaaca

SEQ ID NO: 14854 - RNA, 19 nt, artificial
  Chemically synthesized
agacuccagugguaaucua

SEQ ID NO: 14855 - RNA, 19 nt, artificial
  Chemically synthesized
gagaaucuccgcaagaaag

SEQ ID NO: 14856 - RNA, 19 nt, artificial
  Chemically synthesized
cauuuuggguuuugggucu

SEQ ID NO: 14857 - RNA, 19 nt, artificial
  Chemically synthesized
uauuuggaugacagaaaca

SEQ ID NO: 14858 - RNA, 19 nt, artificial
  Chemically synthesized
uauccgaguggaaggaaau

SEQ ID NO: 14859 - RNA, 19 nt, artificial
  Chemically synthesized
cuucuugcauucugggaca

SEQ ID NO: 14860 - RNA, 19 nt, artificial
  Chemically synthesized
aaaaaacucauguucaaga

SEQ ID NO: 14861 - RNA, 19 nt, artificial
  Chemically synthesized
auuuuuauaucgaucucuu

SEQ ID NO: 14862 - RNA, 19 nt, artificial
  Chemically synthesized
uuuacauucugcaagcaca

SEQ ID NO: 14863 - RNA, 19 nt, artificial
  Chemically synthesized
guugaauuuucucuaacuu

SEQ ID NO: 14864 - RNA, 19 nt, artificial
  Chemically synthesized
gcacagaggaagagaaucu

SEQ ID NO: 14865 - RNA, 19 nt, artificial
  Chemically synthesized
ggagauguaagaaauguuc

SEQ ID NO: 14866 - RNA, 19 nt, artificial
  Chemically synthesized
ugugcagcuguggguugau

SEQ ID NO: 14867 - RNA, 19 nt, artificial
  Chemically synthesized
aguggaaggaaauuugcgu

SEQ ID NO: 14868 - RNA, 19 nt, artificial
  Chemically synthesized
ccuuuuuauaucccauuuu

SEQ ID NO: 14869 - RNA, 19 nt, artificial
  Chemically synthesized
uaucgaucucuuauuuuac

SEQ ID NO: 14870 - RNA, 19 nt, artificial
  Chemically synthesized
cgaguggaaggaaauuugc

SEQ ID NO: 14871 - RNA, 19 nt, artificial
  Chemically synthesized
uuuggaugacagaaacacu

SEQ ID NO: 14872 - RNA, 19 nt, artificial
  Chemically synthesized
cuucaaggcccauaucugu

SEQ ID NO: 14873 - RNA, 19 nt, artificial
  Chemically synthesized
auaugaugaucuggaucca

SEQ ID NO: 14874 - RNA, 19 nt, artificial
  Chemically synthesized
uguuccgagagcugaauga

SEQ ID NO: 14875 - RNA, 19 nt, artificial
  Chemically synthesized
gaacaaguuggccugcacu

SEQ ID NO: 14876 - RNA, 19 nt, artificial
  Chemically synthesized
gagauguaagaaauguucu

SEQ ID NO: 14877 - RNA, 19 nt, artificial
  Chemically synthesized
cuucccagaaaaccuacca

SEQ ID NO: 14878 - RNA, 19 nt, artificial
  Chemically synthesized
gauauugaacaaugguuca

SEQ ID NO: 14879 - RNA, 19 nt, artificial
  Chemically synthesized
agacugacauucuccacuu

SEQ ID NO: 14880 - RNA, 19 nt, artificial
  Chemically synthesized
acucauguucaagacagaa

SEQ ID NO: 14881 - RNA, 19 nt, artificial
  Chemically synthesized
ucaacaucuuuuacauucu

SEQ ID NO: 14882 - RNA, 19 nt, artificial
  Chemically synthesized
aguuuugagcuucucaaaa

SEQ ID NO: 14883 - RNA, 19 nt, artificial
  Chemically synthesized
uuaaggguuaguuuacaau

SEQ ID NO: 14884 - RNA, 19 nt, artificial
  Chemically synthesized
agccaaacccugucugaca

SEQ ID NO: 14885 - RNA, 19 nt, artificial
  Chemically synthesized
ucauguucaagacagaagg

SEQ ID NO: 14886 - RNA, 19 nt, artificial
  Chemically synthesized
acaugacggagguugugag

SEQ ID NO: 14887 - RNA, 19 nt, artificial
  Chemically synthesized
uuguauaugaugaucugga

SEQ ID NO: 14888 - RNA, 19 nt, artificial
  Chemically synthesized
aagacuggcgcuaaaaguu

SEQ ID NO: 14889 - RNA, 19 nt, artificial
  Chemically synthesized
cuuuuacauucugcaagca

SEQ ID NO: 14890 - RNA, 19 nt, artificial
  Chemically synthesized
agcaauggaugauuugaug

SEQ ID NO: 14891 - RNA, 19 nt, artificial
  Chemically synthesized
cacuucaccguacuaacca

SEQ ID NO: 14892 - RNA, 19 nt, artificial
  Chemically synthesized
ggacuuccauuugcuuugu

SEQ ID NO: 14893 - RNA, 19 nt, artificial
  Chemically synthesized
aauaggugugcgucagaag

SEQ ID NO: 14894 - RNA, 19 nt, artificial
  Chemically synthesized
aggaaauuugcguguggag

SEQ ID NO: 14895 - RNA, 19 nt, artificial
  Chemically synthesized
cauucugcaagcacaucug

SEQ ID NO: 14896 - RNA, 19 nt, artificial
  Chemically synthesized
uuuuauaucgaucucuuau

SEQ ID NO: 14897 - RNA, 19 nt, artificial
  Chemically synthesized
caacaucuuuuacauucug

SEQ ID NO: 14898 - RNA, 19 nt, artificial
  Chemically synthesized
aagcacaucugcauuuuca

SEQ ID NO: 14899 - RNA, 19 nt, artificial
  Chemically synthesized
gacggaacagcuuugaggu

SEQ ID NO: 14900 - RNA, 19 nt, artificial
  Chemically synthesized
gacgauauugaacaauggu

SEQ ID NO: 14901 - RNA, 19 nt, artificial
  Chemically synthesized
gggcuccacugaacaaguu

SEQ ID NO: 14902 - RNA, 19 nt, artificial
  Chemically synthesized
gggaguugucaagucuugc

SEQ ID NO: 14903 - RNA, 19 nt, artificial
  Chemically synthesized
auuugcguguggaguauuu

SEQ ID NO: 14904 - RNA, 19 nt, artificial
  Chemically synthesized
uuacauucugcaagcacau

SEQ ID NO: 14905 - RNA, 19 nt, artificial
  Chemically synthesized
uaucccauuuuuauaucga

SEQ ID NO: 14906 - RNA, 19 nt, artificial
  Chemically synthesized
ccuggaggauuucaucucu

SEQ ID NO: 14907 - RNA, 19 nt, artificial
  Chemically synthesized
cucuaacuucaaggcccau

SEQ ID NO: 14908 - RNA, 19 nt, artificial
  Chemically synthesized
uugaaaccaccuuuuauua

SEQ ID NO: 14909 - RNA, 19 nt, artificial
  Chemically synthesized
acuccagugguaaucuacu

SEQ ID NO: 14910 - RNA, 19 nt, artificial
  Chemically synthesized
gugcagcuguggguugauu

SEQ ID NO: 14911 - RNA, 19 nt, artificial
  Chemically synthesized
guccaaaaagggucagucu

SEQ ID NO: 14912 - RNA, 19 nt, artificial
  Chemically synthesized
aaaccuaccagggcagcua

SEQ ID NO: 14913 - RNA, 19 nt, artificial
  Chemically synthesized
gacauucuccacuucuugu

SEQ ID NO: 14914 - RNA, 19 nt, artificial
  Chemically synthesized
uuacaaucagccacauucu

SEQ ID NO: 14915 - RNA, 19 nt, artificial
  Chemically synthesized
ucaagacuggcgcuaaaag

SEQ ID NO: 14916 - RNA, 19 nt, artificial
  Chemically synthesized
uuauaucgaucucuuauuu

SEQ ID NO: 14917 - RNA, 19 nt, artificial
  Chemically synthesized
ucuucugucccuucccaga

SEQ ID NO: 14918 - RNA, 19 nt, artificial
  Chemically synthesized
uguguaacaguuccugcau

SEQ ID NO: 14919 - RNA, 19 nt, artificial
  Chemically synthesized
cccuucccagaaaaccuac

SEQ ID NO: 14920 - RNA, 19 nt, artificial
  Chemically synthesized
agauguaagaaauguucuu

SEQ ID NO: 14921 - RNA, 19 nt, artificial
  Chemically synthesized
uacaagcagucacagcaca

SEQ ID NO: 14922 - RNA, 19 nt, artificial
  Chemically synthesized
cccaagcaauggaugauuu

SEQ ID NO: 14923 - RNA, 19 nt, artificial
  Chemically synthesized
ggaagcugucccucauguu

SEQ ID NO: 14924 - RNA, 19 nt, artificial
  Chemically synthesized
aagcugucccucauguuga

SEQ ID NO: 14925 - RNA, 19 nt, artificial
  Chemically synthesized
uaguuucuacaguugggca

SEQ ID NO: 14926 - RNA, 19 nt, artificial
  Chemically synthesized
ugacacgcuucccuggauu

SEQ ID NO: 14927 - RNA, 19 nt, artificial
  Chemically synthesized
uguucuugcaguuaagggu

SEQ ID NO: 14928 - RNA, 19 nt, artificial
  Chemically synthesized
gcacugguguuuuguugug

SEQ ID NO: 14929 - RNA, 19 nt, artificial
  Chemically synthesized
cugacuguaccaccaucca

SEQ ID NO: 14930 - RNA, 19 nt, artificial
  Chemically synthesized
aaacuacuuccugaaaaca

SEQ ID NO: 14931 - RNA, 19 nt, artificial
  Chemically synthesized
cauccacuacaacuacaug

SEQ ID NO: 14932 - RNA, 19 nt, artificial
  Chemically synthesized
gcuggaagggucaacaucu

SEQ ID NO: 14933 - RNA, 19 nt, artificial
  Chemically synthesized
cuucugucccuucccagaa

SEQ ID NO: 14934 - RNA, 19 nt, artificial
  Chemically synthesized
uuugcaccuaccucacaga

SEQ ID NO: 14935 - RNA, 19 nt, artificial
  Chemically synthesized
ugagggauguuugggagau

SEQ ID NO: 14936 - RNA, 19 nt, artificial
  Chemically synthesized
uaggacauaccagcuuaga

SEQ ID NO: 14937 - RNA, 19 nt, artificial
  Chemically synthesized
aagcagucacagcacauga

SEQ ID NO: 14938 - RNA, 19 nt, artificial
  Chemically synthesized
ccacuacaacuacaugugu

SEQ ID NO: 14939 - RNA, 19 nt, artificial
  Chemically synthesized
gaguggaaggaaauuugcg

SEQ ID NO: 14940 - RNA, 19 nt, artificial
  Chemically synthesized
acuggauggagaauauuuc

SEQ ID NO: 14941 - RNA, 19 nt, artificial
  Chemically synthesized
ugcauucugggacagccaa

SEQ ID NO: 14942 - RNA, 19 nt, artificial
  Chemically synthesized
aucucuuguauaugaugau

SEQ ID NO: 14943 - RNA, 19 nt, artificial
  Chemically synthesized
ccucuuggucgaccuuagu

SEQ ID NO: 14944 - RNA, 19 nt, artificial
  Chemically synthesized
gcuuugaggugcguguuug

SEQ ID NO: 14945 - RNA, 19 nt, artificial
  Chemically synthesized
uaaucuacugggacggaac

SEQ ID NO: 14946 - RNA, 19 nt, artificial
  Chemically synthesized
aaacauuuucagaccuaug

SEQ ID NO: 14947 - RNA, 19 nt, artificial
  Chemically synthesized
cuacaagcagucacagcac

SEQ ID NO: 14948 - RNA, 19 nt, artificial
  Chemically synthesized
ugugagggauguuugggag

SEQ ID NO: 14949 - RNA, 19 nt, artificial
  Chemically synthesized
acaguugggcagcugguua

SEQ ID NO: 14950 - RNA, 19 nt, artificial
  Chemically synthesized
caaucagccacauucuagg

SEQ ID NO: 14951 - RNA, 19 nt, artificial
  Chemically synthesized
gguaguuucuacaguuggg

SEQ ID NO: 14952 - RNA, 19 nt, artificial
  Chemically synthesized
ucucccuuuuuauauccca

SEQ ID NO: 14953 - RNA, 19 nt, artificial
  Chemically synthesized
gcacccaggacuuccauuu

SEQ ID NO: 14954 - RNA, 19 nt, artificial
  Chemically synthesized
uggaagggucaacaucuuu

SEQ ID NO: 14955 - RNA, 19 nt, artificial
  Chemically synthesized
ugggagauguaagaaaugu

SEQ ID NO: 14956 - RNA, 19 nt, artificial
  Chemically synthesized
agucacagcacaugacgga

SEQ ID NO: 14957 - RNA, 19 nt, artificial
  Chemically synthesized
agucaggaaacauuuucag

SEQ ID NO: 14958 - RNA, 19 nt, artificial
  Chemically synthesized
guaagaaauguucuugcag

SEQ ID NO: 14959 - RNA, 19 nt, artificial
  Chemically synthesized
uauaucgaucucuuauuuu

SEQ ID NO: 14960 - RNA, 19 nt, artificial
  Chemically synthesized
ugagguuggcucugacugu

SEQ ID NO: 14961 - RNA, 19 nt, artificial
  Chemically synthesized
guucuugcaguuaaggguu

SEQ ID NO: 14962 - RNA, 19 nt, artificial
  Chemically synthesized
augguucacugaagaccca

SEQ ID NO: 14963 - RNA, 19 nt, artificial
  Chemically synthesized
cuugcaguuaaggguuagu

SEQ ID NO: 14964 - RNA, 19 nt, artificial
  Chemically synthesized
uguugaauuuucucuaacu

SEQ ID NO: 14965 - RNA, 19 nt, artificial
  Chemically synthesized
uugcaauaggugugcguca

SEQ ID NO: 14966 - RNA, 19 nt, artificial
  Chemically synthesized
cuggcauuugcaccuaccu

SEQ ID NO: 14967 - RNA, 19 nt, artificial
  Chemically synthesized
cuuugaacccuugcuugca

SEQ ID NO: 14968 - RNA, 19 nt, artificial
  Chemically synthesized
ucucaaaagucuagagcca

SEQ ID NO: 14969 - RNA, 19 nt, artificial
  Chemically synthesized
uagguagagggaguuguca

SEQ ID NO: 14970 - RNA, 19 nt, artificial
  Chemically synthesized
caucucuuguauaugauga

SEQ ID NO: 14971 - RNA, 19 nt, artificial
  Chemically synthesized
gaaauaauguacaucuggc

SEQ ID NO: 14972 - RNA, 19 nt, artificial
  Chemically synthesized
ugacauucuccacuucuug

SEQ ID NO: 14973 - RNA, 19 nt, artificial
  Chemically synthesized
aauuuucucuaacuucaag

SEQ ID NO: 14974 - RNA, 19 nt, artificial
  Chemically synthesized
gaagaaaccacuggaugga

SEQ ID NO: 14975 - RNA, 19 nt, artificial
  Chemically synthesized
uagugugguggugcccuau

SEQ ID NO: 14976 - RNA, 19 nt, artificial
  Chemically synthesized
caacaacaccagcuccucu

SEQ ID NO: 14977 - RNA, 19 nt, artificial
  Chemically synthesized
gcaagcacaucugcauuuu

SEQ ID NO: 14978 - RNA, 19 nt, artificial
  Chemically synthesized
cauuuuuauaucgaucucu

SEQ ID NO: 14979 - RNA, 19 nt, artificial
  Chemically synthesized
caccauccacuacaacuac

SEQ ID NO: 14980 - RNA, 19 nt, artificial
  Chemically synthesized
agucagauccuagcgucga

SEQ ID NO: 14981 - RNA, 19 nt, artificial
  Chemically synthesized
ucuacaagcagucacagca

SEQ ID NO: 14982 - RNA, 19 nt, artificial
  Chemically synthesized
cugaaugaggccuuggaac

SEQ ID NO: 14983 - RNA, 19 nt, artificial
  Chemically synthesized
agugguaaucuacugggac

SEQ ID NO: 14984 - RNA, 19 nt, artificial
  Chemically synthesized
uguggaguauuuggaugac

SEQ ID NO: 14985 - RNA, 19 nt, artificial
  Chemically synthesized
cuuauccgaguggaaggaa

SEQ ID NO: 14986 - RNA, 19 nt, artificial
  Chemically synthesized
auuuuaagguuuuuacugu

SEQ ID NO: 14987 - RNA, 19 nt, artificial
  Chemically synthesized
gaguaggacauaccagcuu

SEQ ID NO: 14988 - RNA, 19 nt, artificial
  Chemically synthesized
cgcacagaggaagagaauc

SEQ ID NO: 14989 - RNA, 19 nt, artificial
  Chemically synthesized
agaggaagagaaucuccgc

SEQ ID NO: 14990 - RNA, 19 nt, artificial
  Chemically synthesized
aaaagucuagagccaccgu

SEQ ID NO: 14991 - RNA, 19 nt, artificial
  Chemically synthesized
auggaugauuugaugcugu

SEQ ID NO: 14992 - RNA, 19 nt, artificial
  Chemically synthesized
uuuauaucgaucucuuauu

SEQ ID NO: 14993 - RNA, 19 nt, artificial
  Chemically synthesized
augaaauaauguacaucug

SEQ ID NO: 14994 - RNA, 19 nt, artificial
  Chemically synthesized
ucagaccuauggaaacuac

SEQ ID NO: 14995 - RNA, 19 nt, artificial
  Chemically synthesized
aagacagaagggccugacu

SEQ ID NO: 14996 - RNA, 19 nt, artificial
  Chemically synthesized
uggaagacuccagugguaa

SEQ ID NO: 14997 - RNA, 19 nt, artificial
  Chemically synthesized
ucaaggcccauaucuguga

SEQ ID NO: 14998 - RNA, 19 nt, artificial
  Chemically synthesized
uuaguaccuaaaaggaaau

SEQ ID NO: 14999 - RNA, 19 nt, artificial
  Chemically synthesized
acaaucagccacauucuag

SEQ ID NO: 15000 - RNA, 19 nt, artificial
  Chemically synthesized
aagcacccaggacuuccau

SEQ ID NO: 15001 - RNA, 19 nt, artificial
  Chemically synthesized
cauucugggacagccaagu

SEQ ID NO: 15002 - RNA, 19 nt, artificial
  Chemically synthesized
ugaaugaggccuuggaacu

SEQ ID NO: 15003 - RNA, 19 nt, artificial
  Chemically synthesized
cuacuuccugaaaacaacg

SEQ ID NO: 15004 - RNA, 19 nt, artificial
  Chemically synthesized
gauuuuaagguuuuuacug

SEQ ID NO: 15005 - RNA, 19 nt, artificial
  Chemically synthesized
gucccuucccagaaaaccu

SEQ ID NO: 15006 - RNA, 19 nt, artificial
  Chemically synthesized
acugguguuuuguuguggg

SEQ ID NO: 15007 - RNA, 19 nt, artificial
  Chemically synthesized
gugguaaucuacugggacg

SEQ ID NO: 15008 - RNA, 19 nt, artificial
  Chemically synthesized
uacugugagggauguuugg

SEQ ID NO: 15009 - RNA, 19 nt, artificial
  Chemically synthesized
guagagggaguugucaagu

SEQ ID NO: 15010 - RNA, 19 nt, artificial
  Chemically synthesized
auguuuugccaacuggcca

SEQ ID NO: 15011 - RNA, 19 nt, artificial
  Chemically synthesized
auguguaacaguuccugca

SEQ ID NO: 15012 - RNA, 19 nt, artificial
  Chemically synthesized
ccaagcaauggaugauuug

SEQ ID NO: 15013 - RNA, 19 nt, artificial
  Chemically synthesized
accuuaguaccuaaaagga

SEQ ID NO: 15014 - RNA, 19 nt, artificial
  Chemically synthesized
guacaucuggccuugaaac

SEQ ID NO: 15015 - RNA, 19 nt, artificial
  Chemically synthesized
ucugugacuugcacguacu

SEQ ID NO: 15016 - RNA, 19 nt, artificial
  Chemically synthesized
cacacccuggaggauuuca

SEQ ID NO: 15017 - RNA, 19 nt, artificial
  Chemically synthesized
agucugugacuugcacgua

SEQ ID NO: 15018 - RNA, 19 nt, artificial
  Chemically synthesized
aaaccacuggauggagaau

SEQ ID NO: 15019 - RNA, 19 nt, artificial
  Chemically synthesized
ugaagcucccagaaugcca

SEQ ID NO: 15020 - RNA, 19 nt, artificial
  Chemically synthesized
ucaagacagaagggccuga

SEQ ID NO: 15021 - RNA, 19 nt, artificial
  Chemically synthesized
uuucaucucuuguauauga

SEQ ID NO: 15022 - RNA, 19 nt, artificial
  Chemically synthesized
uuuaagguuuuuacuguga

SEQ ID NO: 15023 - RNA, 19 nt, artificial
  Chemically synthesized
agcacccaggacuuccauu

SEQ ID NO: 15024 - RNA, 19 nt, artificial
  Chemically synthesized
cagaugaagcucccagaau

SEQ ID NO: 15025 - RNA, 19 nt, artificial
  Chemically synthesized
cauguucaagacagaaggg

SEQ ID NO: 15026 - RNA, 19 nt, artificial
  Chemically synthesized
guuagguagagggaguugu

SEQ ID NO: 15027 - RNA, 19 nt, artificial
  Chemically synthesized
acugggacggaacagcuuu

SEQ ID NO: 15028 - RNA, 19 nt, artificial
  Chemically synthesized
cacccuggaggauuucauc

SEQ ID NO: 15029 - RNA, 19 nt, artificial
  Chemically synthesized
caccugaaguccaaaaagg

SEQ ID NO: 15030 - RNA, 19 nt, artificial
  Chemically synthesized
cugucccuucccagaaaac

SEQ ID NO: 15031 - RNA, 19 nt, artificial
  Chemically synthesized
aaugaaauaauguacaucu

SEQ ID NO: 15032 - RNA, 19 nt, artificial
  Chemically synthesized
agaaucuccgcaagaaagg

SEQ ID NO: 15033 - RNA, 19 nt, artificial
  Chemically synthesized
ccucauguugaauuuucuc

SEQ ID NO: 15034 - RNA, 19 nt, artificial
  Chemically synthesized
uagauuuuaagguuuuuac

SEQ ID NO: 15035 - RNA, 19 nt, artificial
  Chemically synthesized
uuugaacccuugcuugcaa

SEQ ID NO: 15036 - RNA, 19 nt, artificial
  Chemically synthesized
gaaucuccgcaagaaaggg

SEQ ID NO: 15037 - RNA, 19 nt, artificial
  Chemically synthesized
ggaugauuugaugcugucc

SEQ ID NO: 15038 - RNA, 19 nt, artificial
  Chemically synthesized
cucagauagcgauggucug

SEQ ID NO: 15039 - RNA, 19 nt, artificial
  Chemically synthesized
gcucagauagcgauggucu

SEQ ID NO: 15040 - RNA, 19 nt, artificial
  Chemically synthesized
ugcacugguguuuuguugu

SEQ ID NO: 15041 - RNA, 19 nt, artificial
  Chemically synthesized
agaugaagcucccagaaug

SEQ ID NO: 15042 - RNA, 19 nt, artificial
  Chemically synthesized
ccuucccagaaaaccuacc

SEQ ID NO: 15043 - RNA, 19 nt, artificial
  Chemically synthesized
uggaggauuucaucucuug

SEQ ID NO: 15044 - RNA, 19 nt, artificial
  Chemically synthesized
cacccaggacuuccauuug

SEQ ID NO: 15045 - RNA, 19 nt, artificial
  Chemically synthesized
uaagguuuuuacugugagg

SEQ ID NO: 15046 - RNA, 19 nt, artificial
  Chemically synthesized
acuucaaggcccauaucug

SEQ ID NO: 15047 - RNA, 19 nt, artificial
  Chemically synthesized
gguuaguuuacaaucagcc

SEQ ID NO: 15048 - RNA, 19 nt, artificial
  Chemically synthesized
cuauggaaacuacuuccug

SEQ ID NO: 15049 - RNA, 19 nt, artificial
  Chemically synthesized
uugggagauguaagaaaug

SEQ ID NO: 15050 - RNA, 19 nt, artificial
  Chemically synthesized
aauuugcguguggaguauu

SEQ ID NO: 15051 - RNA, 19 nt, artificial
  Chemically synthesized
cuggauccaccaagacuug

SEQ ID NO: 15052 - RNA, 19 nt, artificial
  Chemically synthesized
guuggcucugacuguacca

SEQ ID NO: 15053 - RNA, 19 nt, artificial
  Chemically synthesized
ugaaauaauguacaucugg

SEQ ID NO: 15054 - RNA, 19 nt, artificial
  Chemically synthesized
uaccagcuuagauuuuaag

SEQ ID NO: 15055 - RNA, 19 nt, artificial
  Chemically synthesized
aaaacucauguucaagaca

SEQ ID NO: 15056 - RNA, 19 nt, artificial
  Chemically synthesized
gugaaaugcuggcauuugc

SEQ ID NO: 15057 - RNA, 19 nt, artificial
  Chemically synthesized
uacaacuacauguguaaca

SEQ ID NO: 15058 - RNA, 19 nt, artificial
  Chemically synthesized
cacaugacggagguuguga

SEQ ID NO: 15059 - RNA, 19 nt, artificial
  Chemically synthesized
accugaaguccaaaaaggg

SEQ ID NO: 15060 - RNA, 19 nt, artificial
  Chemically synthesized
gguuagguagagggaguug

SEQ ID NO: 15061 - RNA, 19 nt, artificial
  Chemically synthesized
uaaggguuaguuuacaauc

SEQ ID NO: 15062 - RNA, 19 nt, artificial
  Chemically synthesized
aaaaguuuugagcuucuca

SEQ ID NO: 15063 - RNA, 19 nt, artificial
  Chemically synthesized
auggccaucuacaagcagu

SEQ ID NO: 15064 - RNA, 19 nt, artificial
  Chemically synthesized
cacugguguuuuguugugg

SEQ ID NO: 15065 - RNA, 19 nt, artificial
  Chemically synthesized
cagccaagucugugacuug

SEQ ID NO: 15066 - RNA, 19 nt, artificial
  Chemically synthesized
cacauucuagguagguagg

SEQ ID NO: 15067 - RNA, 19 nt, artificial
  Chemically synthesized
uacugggacggaacagcuu

SEQ ID NO: 15068 - RNA, 19 nt, artificial
  Chemically synthesized
gauggagaauauuucaccc

SEQ ID NO: 15069 - RNA, 19 nt, artificial
  Chemically synthesized
uuuucagaccuauggaaac

SEQ ID NO: 15070 - RNA, 19 nt, artificial
  Chemically synthesized
guucaagacagaagggccu

SEQ ID NO: 15071 - RNA, 19 nt, artificial
  Chemically synthesized
agguuggcucugacuguac

SEQ ID NO: 15072 - RNA, 19 nt, artificial
  Chemically synthesized
acuucaccguacuaaccag

SEQ ID NO: 15073 - RNA, 19 nt, artificial
  Chemically synthesized
cacacuggaagacuccagu

SEQ ID NO: 15074 - RNA, 19 nt, artificial
  Chemically synthesized
guuuuuacugugagggaug

SEQ ID NO: 15075 - RNA, 19 nt, artificial
  Chemically synthesized
acccugucugacaaccucu

SEQ ID NO: 15076 - RNA, 19 nt, artificial
  Chemically synthesized
caucuuauccgaguggaag

SEQ ID NO: 15077 - RNA, 19 nt, artificial
  Chemically synthesized
acacuuuucgacauagugu

SEQ ID NO: 15078 - RNA, 19 nt, artificial
  Chemically synthesized
aauguacaucuggccuuga

SEQ ID NO: 15079 - RNA, 19 nt, artificial
  Chemically synthesized
uuugggucuuugaacccuu

SEQ ID NO: 15080 - RNA, 19 nt, artificial
  Chemically synthesized
accaccauccacuacaacu

SEQ ID NO: 15081 - RNA, 19 nt, artificial
  Chemically synthesized
auuugcaccuaccucacag

SEQ ID NO: 15082 - RNA, 19 nt, artificial
  Chemically synthesized
cagcuguggguugauucca

SEQ ID NO: 15083 - RNA, 19 nt, artificial
  Chemically synthesized
agcacaucugcauuuucac

SEQ ID NO: 15084 - RNA, 19 nt, artificial
  Chemically synthesized
uagagggaguugucaaguc

SEQ ID NO: 15085 - RNA, 19 nt, artificial
  Chemically synthesized
cauggccaucuacaagcag

SEQ ID NO: 15086 - RNA, 19 nt, artificial
  Chemically synthesized
aguugucaagucuugcugg

SEQ ID NO: 15087 - RNA, 19 nt, artificial
  Chemically synthesized
ccuugcuugcaauaggugu

SEQ ID NO: 15088 - RNA, 19 nt, artificial
  Chemically synthesized
aacccugucugacaaccuc

SEQ ID NO: 15089 - RNA, 19 nt, artificial
  Chemically synthesized
gguuuugggucuuugaacc

SEQ ID NO: 15090 - RNA, 19 nt, artificial
  Chemically synthesized
cagccacauucuagguagg

SEQ ID NO: 15091 - RNA, 19 nt, artificial
  Chemically synthesized
aaacucauguucaagacag

SEQ ID NO: 15092 - RNA, 19 nt, artificial
  Chemically synthesized
ccugucugacaaccucuug

SEQ ID NO: 15093 - RNA, 19 nt, artificial
  Chemically synthesized
gcccauaucugugaaaugc

SEQ ID NO: 15094 - RNA, 19 nt, artificial
  Chemically synthesized
gaaaugcuggcauuugcac

SEQ ID NO: 15095 - RNA, 19 nt, artificial
  Chemically synthesized
aaaaacucauguucaagac

SEQ ID NO: 15096 - RNA, 19 nt, artificial
  Chemically synthesized
cauucuccacuucuuguuc

SEQ ID NO: 15097 - RNA, 19 nt, artificial
  Chemically synthesized
cugugacuugcacguacuc

SEQ ID NO: 15098 - RNA, 19 nt, artificial
  Chemically synthesized
cagaggaagagaaucuccg

SEQ ID NO: 15099 - RNA, 19 nt, artificial
  Chemically synthesized
ucuuuuacauucugcaagc

SEQ ID NO: 15100 - RNA, 19 nt, artificial
  Chemically synthesized
uuuuggguuuugggucuuu

SEQ ID NO: 15101 - RNA, 19 nt, artificial
  Chemically synthesized
ugggcuucuugcauucugg

SEQ ID NO: 15102 - RNA, 19 nt, artificial
  Chemically synthesized
uacaguugggcagcugguu

SEQ ID NO: 15103 - RNA, 19 nt, artificial
  Chemically synthesized
aaacccugucugacaaccu

SEQ ID NO: 15104 - RNA, 19 nt, artificial
  Chemically synthesized
uggaacucaaggaugccca

SEQ ID NO: 15105 - RNA, 19 nt, artificial
  Chemically synthesized
cuucgagauguuccgagag

SEQ ID NO: 15106 - RNA, 19 nt, artificial
  Chemically synthesized
ccuuggaacucaaggaugc

SEQ ID NO: 15107 - RNA, 19 nt, artificial
  Chemically synthesized
aagggucaacaucuuuuac

SEQ ID NO: 15108 - RNA, 19 nt, artificial
  Chemically synthesized
uacuaaccagggaagcugu

SEQ ID NO: 15109 - RNA, 19 nt, artificial
  Chemically synthesized
cugccauuuuggguuuugg

SEQ ID NO: 15110 - RNA, 19 nt, artificial
  Chemically synthesized
ucuugcaguuaaggguuag

SEQ ID NO: 15111 - RNA, 19 nt, artificial
  Chemically synthesized
uucugcaagcacaucugca

SEQ ID NO: 15112 - RNA, 19 nt, artificial
  Chemically synthesized
uaaaaaacucauguucaag

SEQ ID NO: 15113 - RNA, 19 nt, artificial
  Chemically synthesized
uugcguguggaguauuugg

SEQ ID NO: 15114 - RNA, 19 nt, artificial
  Chemically synthesized
caaaaagggucagucuacc

SEQ ID NO: 15115 - RNA, 19 nt, artificial
  Chemically synthesized
aagacccagguccagauga

SEQ ID NO: 15116 - RNA, 19 nt, artificial
  Chemically synthesized
uuaagguuuuuacugugag

SEQ ID NO: 15117 - RNA, 19 nt, artificial
  Chemically synthesized
uaggugugcgucagaagca

SEQ ID NO: 15118 - RNA, 19 nt, artificial
  Chemically synthesized
guuccgagagcugaaugag

SEQ ID NO: 15119 - RNA, 19 nt, artificial
  Chemically synthesized
cguacuaaccagggaagcu

SEQ ID NO: 15120 - RNA, 19 nt, artificial
  Chemically synthesized
cuuccugaaaacaacguuc

SEQ ID NO: 15121 - RNA, 19 nt, artificial
  Chemically synthesized
gacuccagugguaaucuac

SEQ ID NO: 15122 - RNA, 19 nt, artificial
  Chemically synthesized
agauguuuugccaacuggc

SEQ ID NO: 15123 - RNA, 19 nt, artificial
  Chemically synthesized
uuuuaagguuuuuacugug

SEQ ID NO: 15124 - RNA, 19 nt, artificial
  Chemically synthesized
caucuacaagcagucacag

SEQ ID NO: 15125 - RNA, 19 nt, artificial
  Chemically synthesized
ugcagcuguggguugauuc

SEQ ID NO: 15126 - RNA, 19 nt, artificial
  Chemically synthesized
aagcucccagaaugccaga

SEQ ID NO: 15127 - RNA, 19 nt, artificial
  Chemically synthesized
aagaagaaaccacuggaug

SEQ ID NO: 15128 - RNA, 19 nt, artificial
  Chemically synthesized
accaagacuuguuuuaugc

SEQ ID NO: 15129 - RNA, 19 nt, artificial
  Chemically synthesized
uccugaaaacaacguucug

SEQ ID NO: 15130 - RNA, 19 nt, artificial
  Chemically synthesized
aauggaugauuugaugcug

SEQ ID NO: 15131 - RNA, 19 nt, artificial
  Chemically synthesized
ucaaaagucuagagccacc

SEQ ID NO: 15132 - RNA, 19 nt, artificial
  Chemically synthesized
ucagacugacauucuccac

SEQ ID NO: 15133 - RNA, 19 nt, artificial
  Chemically synthesized
guggaaggaaauuugcgug

SEQ ID NO: 15134 - RNA, 19 nt, artificial
  Chemically synthesized
ugucaucuucugucccuuc

SEQ ID NO: 15135 - RNA, 19 nt, artificial
  Chemically synthesized
gaucuggauccaccaagac

SEQ ID NO: 15136 - RNA, 19 nt, artificial
  Chemically synthesized
cuuccauuugcuuuguccc

SEQ ID NO: 15137 - RNA, 19 nt, artificial
  Chemically synthesized
uuuuuacugugagggaugu

SEQ ID NO: 15138 - RNA, 19 nt, artificial
  Chemically synthesized
ucuuauccgaguggaagga

SEQ ID NO: 15139 - RNA, 19 nt, artificial
  Chemically synthesized
ccuccucagcaucuuaucc

SEQ ID NO: 15140 - RNA, 19 nt, artificial
  Chemically synthesized
agaagaaaccacuggaugg

SEQ ID NO: 15141 - RNA, 19 nt, artificial
  Chemically synthesized
cuuguauaugaugaucugg

SEQ ID NO: 15142 - RNA, 19 nt, artificial
  Chemically synthesized
cugucugacaaccucuugg

SEQ ID NO: 15143 - RNA, 19 nt, artificial
  Chemically synthesized
ccucagcaucuuauccgag

SEQ ID NO: 15144 - RNA, 19 nt, artificial
  Chemically synthesized
uucaucucuuguauaugau

SEQ ID NO: 15145 - RNA, 19 nt, artificial
  Chemically synthesized
uuagguagagggaguuguc

SEQ ID NO: 15146 - RNA, 19 nt, artificial
  Chemically synthesized
cauaucugugaaaugcugg

SEQ ID NO: 15147 - RNA, 19 nt, artificial
  Chemically synthesized
uuuacaaucagccacauuc

SEQ ID NO: 15148 - RNA, 19 nt, artificial
  Chemically synthesized
uguaccaccauccacuaca

SEQ ID NO: 15149 - RNA, 19 nt, artificial
  Chemically synthesized
gucuuugaacccuugcuug

SEQ ID NO: 15150 - RNA, 19 nt, artificial
  Chemically synthesized
uggauccaccaagacuugu

SEQ ID NO: 15151 - RNA, 19 nt, artificial
  Chemically synthesized
auggcgacuguccagcuuu

SEQ ID NO: 15152 - RNA, 19 nt, artificial
  Chemically synthesized
auuucacccuucagauccg

SEQ ID NO: 15153 - RNA, 19 nt, artificial
  Chemically synthesized
ugccauuuuggguuuuggg

SEQ ID NO: 15154 - RNA, 19 nt, artificial
  Chemically synthesized
acaucuggccuugaaacca

SEQ ID NO: 15155 - RNA, 19 nt, artificial
  Chemically synthesized
uuuugccaacuggccaaga

SEQ ID NO: 15156 - RNA, 19 nt, artificial
  Chemically synthesized
accuaaaaggaaaucucac

SEQ ID NO: 15157 - RNA, 19 nt, artificial
  Chemically synthesized
ugaggccuuggaacucaag

SEQ ID NO: 15158 - RNA, 19 nt, artificial
  Chemically synthesized
aaugaggccuuggaacuca

SEQ ID NO: 15159 - RNA, 19 nt, artificial
  Chemically synthesized
uuacugugagggauguuug

SEQ ID NO: 15160 - RNA, 19 nt, artificial
  Chemically synthesized
acuggcgcuaaaaguuuug

SEQ ID NO: 15161 - RNA, 19 nt, artificial
  Chemically synthesized
uguaacaguuccugcaugg

SEQ ID NO: 15162 - RNA, 19 nt, artificial
  Chemically synthesized
uuuugagcuucucaaaagu

SEQ ID NO: 15163 - RNA, 19 nt, artificial
  Chemically synthesized
uugcauucugggacagcca

SEQ ID NO: 15164 - RNA, 19 nt, artificial
  Chemically synthesized
caucuggccuugaaaccac

SEQ ID NO: 15165 - RNA, 19 nt, artificial
  Chemically synthesized
acuggaagacuccaguggu

SEQ ID NO: 15166 - RNA, 19 nt, artificial
  Chemically synthesized
gucaacaucuuuuacauuc

SEQ ID NO: 15167 - RNA, 19 nt, artificial
  Chemically synthesized
gacagccaagucugugacu

SEQ ID NO: 15168 - RNA, 19 nt, artificial
  Chemically synthesized
uaauguacaucuggccuug

SEQ ID NO: 15169 - RNA, 19 nt, artificial
  Chemically synthesized
aagucugugacuugcacgu

SEQ ID NO: 15170 - RNA, 19 nt, artificial
  Chemically synthesized
gaugauuugaugcuguccc

SEQ ID NO: 15171 - RNA, 19 nt, artificial
  Chemically synthesized
acugacauucuccacuucu

SEQ ID NO: 15172 - RNA, 19 nt, artificial
  Chemically synthesized
cacugaacaaguuggccug

SEQ ID NO: 15173 - RNA, 19 nt, artificial
  Chemically synthesized
ugguaguuucuacaguugg

SEQ ID NO: 15174 - RNA, 19 nt, artificial
  Chemically synthesized
accucccgccauaaaaaac

SEQ ID NO: 15175 - RNA, 19 nt, artificial
  Chemically synthesized
gcaauggaugauuugaugc

SEQ ID NO: 15176 - RNA, 19 nt, artificial
  Chemically synthesized
cacagaggaagagaaucuc

SEQ ID NO: 15177 - RNA, 19 nt, artificial
  Chemically synthesized
uauugaacaaugguucacu

SEQ ID NO: 15178 - RNA, 19 nt, artificial
  Chemically synthesized
uugggucuuugaacccuug

SEQ ID NO: 15179 - RNA, 19 nt, artificial
  Chemically synthesized
acuuccauuugcuuugucc

SEQ ID NO: 15180 - RNA, 19 nt, artificial
  Chemically synthesized
auugaacaaugguucacug

SEQ ID NO: 15181 - RNA, 19 nt, artificial
  Chemically synthesized
aagauguuuugccaacugg

SEQ ID NO: 15182 - RNA, 19 nt, artificial
  Chemically synthesized
ucaucuucugucccuuccc

SEQ ID NO: 15183 - RNA, 19 nt, artificial
  Chemically synthesized
ugaaaccaccuuuuauuac

SEQ ID NO: 15184 - RNA, 19 nt, artificial
  Chemically synthesized
accagcuuagauuuuaagg

SEQ ID NO: 15185 - RNA, 19 nt, artificial
  Chemically synthesized
aacacuuuucgacauagug

SEQ ID NO: 15186 - RNA, 19 nt, artificial
  Chemically synthesized
uuuacugugagggauguuu

SEQ ID NO: 15187 - RNA, 19 nt, artificial
  Chemically synthesized
cuacauguguaacaguucc

SEQ ID NO: 15188 - RNA, 19 nt, artificial
  Chemically synthesized
auuuuggguuuugggucuu

SEQ ID NO: 15189 - RNA, 19 nt, artificial
  Chemically synthesized
auauuucacccuucagauc

SEQ ID NO: 15190 - RNA, 19 nt, artificial
  Chemically synthesized
aacuucaaggcccauaucu

SEQ ID NO: 15191 - RNA, 19 nt, artificial
  Chemically synthesized
uuccgagagcugaaugagg

SEQ ID NO: 15192 - RNA, 19 nt, artificial
  Chemically synthesized
ucuuggucgaccuuaguac

SEQ ID NO: 15193 - RNA, 19 nt, artificial
  Chemically synthesized
ccacuucaccguacuaacc

SEQ ID NO: 15194 - RNA, 19 nt, artificial
  Chemically synthesized
aucuggauccaccaagacu

SEQ ID NO: 15195 - RNA, 19 nt, artificial
  Chemically synthesized
uaacuucaaggcccauauc

SEQ ID NO: 15196 - RNA, 19 nt, artificial
  Chemically synthesized
cugaaguccaaaaaggguc

SEQ ID NO: 15197 - RNA, 19 nt, artificial
  Chemically synthesized
acuguccagcuuugugcca

SEQ ID NO: 15198 - RNA, 19 nt, artificial
  Chemically synthesized
caaaagucuagagccaccg

SEQ ID NO: 15199 - RNA, 19 nt, artificial
  Chemically synthesized
uuuggguuuugggucuuug

SEQ ID NO: 15200 - RNA, 19 nt, artificial
  Chemically synthesized
auuucaucucuuguauaug

SEQ ID NO: 15201 - RNA, 19 nt, artificial
  Chemically synthesized
aacauuuucagaccuaugg

SEQ ID NO: 15202 - RNA, 19 nt, artificial
  Chemically synthesized
gaagcugucccucauguug

SEQ ID NO: 15203 - RNA, 19 nt, artificial
  Chemically synthesized
gucaucuucugucccuucc

SEQ ID NO: 15204 - RNA, 19 nt, artificial
  Chemically synthesized
aagaaaccacuggauggag

SEQ ID NO: 15205 - RNA, 19 nt, artificial
  Chemically synthesized
acuuuucgacauagugugg

SEQ ID NO: 15206 - RNA, 19 nt, artificial
  Chemically synthesized
auccgaguggaaggaaauu

SEQ ID NO: 15207 - RNA, 19 nt, artificial
  Chemically synthesized
uuuccgucugggcuucuug

SEQ ID NO: 15208 - RNA, 19 nt, artificial
  Chemically synthesized
uugaacaaugguucacuga

SEQ ID NO: 15209 - RNA, 19 nt, artificial
  Chemically synthesized
uuacaauaaaacuuugcug

SEQ ID NO: 15210 - RNA, 19 nt, artificial
  Chemically synthesized
guucacugaagacccaggu

SEQ ID NO: 15211 - RNA, 19 nt, artificial
  Chemically synthesized
gaccuuaguaccuaaaagg

SEQ ID NO: 15212 - RNA, 19 nt, artificial
  Chemically synthesized
cucccaugugcucaagacu

SEQ ID NO: 15213 - RNA, 19 nt, artificial
  Chemically synthesized
acuacauguguaacaguuc

SEQ ID NO: 15214 - RNA, 19 nt, artificial
  Chemically synthesized
ccucaccaucaucacacug

SEQ ID NO: 15215 - RNA, 19 nt, artificial
  Chemically synthesized
guauaugaugaucuggauc

SEQ ID NO: 15216 - RNA, 19 nt, artificial
  Chemically synthesized
uuaguuuacaaucagccac

SEQ ID NO: 15217 - RNA, 19 nt, artificial
  Chemically synthesized
uuuuacugugagggauguu

SEQ ID NO: 15218 - RNA, 19 nt, artificial
  Chemically synthesized
aaaaagggucagucuaccu

SEQ ID NO: 15219 - RNA, 19 nt, artificial
  Chemically synthesized
guugucaagucuugcuggc

SEQ ID NO: 15220 - RNA, 19 nt, artificial
  Chemically synthesized
acuugucauggcgacuguc

SEQ ID NO: 15221 - RNA, 19 nt, artificial
  Chemically synthesized
aauaauguacaucuggccu

SEQ ID NO: 15222 - RNA, 19 nt, artificial
  Chemically synthesized
auuuggaugacagaaacac

SEQ ID NO: 15223 - RNA, 19 nt, artificial
  Chemically synthesized
aaguccaaaaagggucagu

SEQ ID NO: 15224 - RNA, 19 nt, artificial
  Chemically synthesized
uucauuaacccucacaaug

SEQ ID NO: 15225 - RNA, 19 nt, artificial
  Chemically synthesized
uuuagcgccagucuugagc

SEQ ID NO: 15226 - RNA, 19 nt, artificial
  Chemically synthesized
uuguaaacuaacccuuaac

SEQ ID NO: 15227 - RNA, 19 nt, artificial
  Chemically synthesized
uaaacuaacccuuaacugc

SEQ ID NO: 15228 - RNA, 19 nt, artificial
  Chemically synthesized
uugaaguuagagaaaauuc

SEQ ID NO: 15229 - RNA, 19 nt, artificial
  Chemically synthesized
uuaacugcaagaacauuuc

SEQ ID NO: 15230 - RNA, 19 nt, artificial
  Chemically synthesized
uacauuauuucauuaaccc

SEQ ID NO: 15231 - RNA, 19 nt, artificial
  Chemically synthesized
uuaaaaucuaagcugguau

SEQ ID NO: 15232 - RNA, 19 nt, artificial
  Chemically synthesized
uucugacgcacaccuauug

SEQ ID NO: 15233 - RNA, 19 nt, artificial
  Chemically synthesized
uauacaagagaugaaaucc

SEQ ID NO: 15234 - RNA, 19 nt, artificial
  Chemically synthesized
uuagagaaaauucaacaug

SEQ ID NO: 15235 - RNA, 19 nt, artificial
  Chemically synthesized
uuguaguggauggugguac

SEQ ID NO: 15236 - RNA, 19 nt, artificial
  Chemically synthesized
auuguaaaauaagagaucg

SEQ ID NO: 15237 - RNA, 19 nt, artificial
  Chemically synthesized
auuaccacuggagucuucc

SEQ ID NO: 15238 - RNA, 19 nt, artificial
  Chemically synthesized
uauuucauuaacccucaca

SEQ ID NO: 15239 - RNA, 19 nt, artificial
  Chemically synthesized
aaucuaagcugguaugucc

SEQ ID NO: 15240 - RNA, 19 nt, artificial
  Chemically synthesized
uugaacaugaguuuuuuau

SEQ ID NO: 15241 - RNA, 19 nt, artificial
  Chemically synthesized
cauuauuucauuaacccuc

SEQ ID NO: 15242 - RNA, 19 nt, artificial
  Chemically synthesized
uauuguaaaauaagagauc

SEQ ID NO: 15243 - RNA, 19 nt, artificial
  Chemically synthesized
uucuccauccagugguuuc

SEQ ID NO: 15244 - RNA, 19 nt, artificial
  Chemically synthesized
uguaaacuaacccuuaacu

SEQ ID NO: 15245 - RNA, 19 nt, artificial
  Chemically synthesized
ucugucuugaacaugaguu

SEQ ID NO: 15246 - RNA, 19 nt, artificial
  Chemically synthesized
ucugaagggugaaauauuc

SEQ ID NO: 15247 - RNA, 19 nt, artificial
  Chemically synthesized
uaaaauaagagaucgauau

SEQ ID NO: 15248 - RNA, 19 nt, artificial
  Chemically synthesized
ugaaauauucuccauccag

SEQ ID NO: 15249 - RNA, 19 nt, artificial
  Chemically synthesized
uuucaaggccagauguaca

SEQ ID NO: 15250 - RNA, 19 nt, artificial
  Chemically synthesized
uacuccacacgcaaauuuc

SEQ ID NO: 15251 - RNA, 19 nt, artificial
  Chemically synthesized
uuuuauggcgggagguaga

SEQ ID NO: 15252 - RNA, 19 nt, artificial
  Chemically synthesized
auccagaucaucauauaca

SEQ ID NO: 15253 - RNA, 19 nt, artificial
  Chemically synthesized
uugacaacucccucuaccu

SEQ ID NO: 15254 - RNA, 19 nt, artificial
  Chemically synthesized
uaguuguaguggauggugg

SEQ ID NO: 15255 - RNA, 19 nt, artificial
  Chemically synthesized
uaaaagauguugacccuuc

SEQ ID NO: 15256 - RNA, 19 nt, artificial
  Chemically synthesized
auucucuuccucugugcgc

SEQ ID NO: 15257 - RNA, 19 nt, artificial
  Chemically synthesized
uucugggagcuucaucugg

SEQ ID NO: 15258 - RNA, 19 nt, artificial
  Chemically synthesized
auuauuucauuaacccuca

SEQ ID NO: 15259 - RNA, 19 nt, artificial
  Chemically synthesized
uuuuuuauggcgggaggua

SEQ ID NO: 15260 - RNA, 19 nt, artificial
  Chemically synthesized
uuguaaaauaagagaucga

SEQ ID NO: 15261 - RNA, 19 nt, artificial
  Chemically synthesized
uucacagauaugggccuug

SEQ ID NO: 15262 - RNA, 19 nt, artificial
  Chemically synthesized
uacagucagagccaaccuc

SEQ ID NO: 15263 - RNA, 19 nt, artificial
  Chemically synthesized
aguaguuuccauaggucug

SEQ ID NO: 15264 - RNA, 19 nt, artificial
  Chemically synthesized
uguaauaaaaggugguuuc

SEQ ID NO: 15265 - RNA, 19 nt, artificial
  Chemically synthesized
aaaaccuuaaaaucuaagc

SEQ ID NO: 15266 - RNA, 19 nt, artificial
  Chemically synthesized
uaaaaucuaagcugguaug

SEQ ID NO: 15267 - RNA, 19 nt, artificial
  Chemically synthesized
ugauuguaaacuaacccuu

SEQ ID NO: 15268 - RNA, 19 nt, artificial
  Chemically synthesized
ucaaaucauccauugcuug

SEQ ID NO: 15269 - RNA, 19 nt, artificial
  Chemically synthesized
uuuggacuucagguggcug

SEQ ID NO: 15270 - RNA, 19 nt, artificial
  Chemically synthesized
uggcugauuguaaacuaac

SEQ ID NO: 15271 - RNA, 19 nt, artificial
  Chemically synthesized
ucccaaacaucccucacag

SEQ ID NO: 15272 - RNA, 19 nt, artificial
  Chemically synthesized
ugaaguuagagaaaauuca

SEQ ID NO: 15273 - RNA, 19 nt, artificial
  Chemically synthesized
uaagagaucgauauaaaaa

SEQ ID NO: 15274 - RNA, 19 nt, artificial
  Chemically synthesized
ucauccauugcuugggacg

SEQ ID NO: 15275 - RNA, 19 nt, artificial
  Chemically synthesized
guuuucaggaaguaguuuc

SEQ ID NO: 15276 - RNA, 19 nt, artificial
  Chemically synthesized
ugugaugauggugaggaug

SEQ ID NO: 15277 - RNA, 19 nt, artificial
  Chemically synthesized
acuuuuagcgccagucuug

SEQ ID NO: 15278 - RNA, 19 nt, artificial
  Chemically synthesized
ucugaaaauguuuccugac

SEQ ID NO: 15279 - RNA, 19 nt, artificial
  Chemically synthesized
uaacccucacaaugcacuc

SEQ ID NO: 15280 - RNA, 19 nt, artificial
  Chemically synthesized
uuauggcgggagguagacu

SEQ ID NO: 15281 - RNA, 19 nt, artificial
  Chemically synthesized
uuucauuaacccucacaau

SEQ ID NO: 15282 - RNA, 19 nt, artificial
  Chemically synthesized
ugaacaugaguuuuuuaug

SEQ ID NO: 15283 - RNA, 19 nt, artificial
  Chemically synthesized
uugcagaauguaaaagaug

SEQ ID NO: 15284 - RNA, 19 nt, artificial
  Chemically synthesized
auauacaagagaugaaauc

SEQ ID NO: 15285 - RNA, 19 nt, artificial
  Chemically synthesized
ucaggaaguaguuuccaua

SEQ ID NO: 15286 - RNA, 19 nt, artificial
  Chemically synthesized
ugggaagggacagaagaug

SEQ ID NO: 15287 - RNA, 19 nt, artificial
  Chemically synthesized
aagauguugacccuuccag

SEQ ID NO: 15288 - RNA, 19 nt, artificial
  Chemically synthesized
ucuuacaucucccaaacau

SEQ ID NO: 15289 - RNA, 19 nt, artificial
  Chemically synthesized
acaaacacgcaccucaaag

SEQ ID NO: 15290 - RNA, 19 nt, artificial
  Chemically synthesized
aaaaaugggauauaaaaag

SEQ ID NO: 15291 - RNA, 19 nt, artificial
  Chemically synthesized
uuguuuucaggaaguaguu

SEQ ID NO: 15292 - RNA, 19 nt, artificial
  Chemically synthesized
auacaagagaugaaauccu

SEQ ID NO: 15293 - RNA, 19 nt, artificial
  Chemically synthesized
guuguuuucaggaaguagu

SEQ ID NO: 15294 - RNA, 19 nt, artificial
  Chemically synthesized
guuucugucauccaaauac

SEQ ID NO: 15295 - RNA, 19 nt, artificial
  Chemically synthesized
auuucuuacaucucccaaa

SEQ ID NO: 15296 - RNA, 19 nt, artificial
  Chemically synthesized
uggagaaugucagucugag

SEQ ID NO: 15297 - RNA, 19 nt, artificial
  Chemically synthesized
ucgaaaaguguuucuguca

SEQ ID NO: 15298 - RNA, 19 nt, artificial
  Chemically synthesized
uaagcugguauguccuacu

SEQ ID NO: 15299 - RNA, 19 nt, artificial
  Chemically synthesized
uagagaaaauucaacauga

SEQ ID NO: 15300 - RNA, 19 nt, artificial
  Chemically synthesized
aucugaagggugaaauauu

SEQ ID NO: 15301 - RNA, 19 nt, artificial
  Chemically synthesized
uguaaaauaagagaucgau

SEQ ID NO: 15302 - RNA, 19 nt, artificial
  Chemically synthesized
cuuacaucucccaaacauc

SEQ ID NO: 15303 - RNA, 19 nt, artificial
  Chemically synthesized
ucccucuaccuaaccagcu

SEQ ID NO: 15304 - RNA, 19 nt, artificial
  Chemically synthesized
ugucgaaaaguguuucugu

SEQ ID NO: 15305 - RNA, 19 nt, artificial
  Chemically synthesized
guaaacuaacccuuaacug

SEQ ID NO: 15306 - RNA, 19 nt, artificial
  Chemically synthesized
ugguggauccagaucauca

SEQ ID NO: 15307 - RNA, 19 nt, artificial
  Chemically synthesized
uccauaggucugaaaaugu

SEQ ID NO: 15308 - RNA, 19 nt, artificial
  Chemically synthesized
ugugagguaggugcaaaug

SEQ ID NO: 15309 - RNA, 19 nt, artificial
  Chemically synthesized
aaaaaccuuaaaaucuaag

SEQ ID NO: 15310 - RNA, 19 nt, artificial
  Chemically synthesized
aguaaaaaccuuaaaaucu

SEQ ID NO: 15311 - RNA, 19 nt, artificial
  Chemically synthesized
aaugcaagaagcccagacg

SEQ ID NO: 15312 - RNA, 19 nt, artificial
  Chemically synthesized
ucugacgcacaccuauugc

SEQ ID NO: 15313 - RNA, 19 nt, artificial
  Chemically synthesized
uagaauguggcugauugua

SEQ ID NO: 15314 - RNA, 19 nt, artificial
  Chemically synthesized
ucccucacaguaaaaaccu

SEQ ID NO: 15315 - RNA, 19 nt, artificial
  Chemically synthesized
acccuuuuuggacuucagg

SEQ ID NO: 15316 - RNA, 19 nt, artificial
  Chemically synthesized
ucucccaaacaucccucac

SEQ ID NO: 15317 - RNA, 19 nt, artificial
  Chemically synthesized
aucgauauaaaaaugggau

SEQ ID NO: 15318 - RNA, 19 nt, artificial
  Chemically synthesized
ucaaagacccaaaacccaa

SEQ ID NO: 15319 - RNA, 19 nt, artificial
  Chemically synthesized
aaaucuaagcugguauguc

SEQ ID NO: 15320 - RNA, 19 nt, artificial
  Chemically synthesized
uuggccaguuggcaaaaca

SEQ ID NO: 15321 - RNA, 19 nt, artificial
  Chemically synthesized
uccgucccaguagauuacc

SEQ ID NO: 15322 - RNA, 19 nt, artificial
  Chemically synthesized
uguacauuauuucauuaac

SEQ ID NO: 15323 - RNA, 19 nt, artificial
  Chemically synthesized
ugggccuugaaguuagaga

SEQ ID NO: 15324 - RNA, 19 nt, artificial
  Chemically synthesized
uugaguuccaaggccucau

SEQ ID NO: 15325 - RNA, 19 nt, artificial
  Chemically synthesized
uucuuacaucucccaaaca

SEQ ID NO: 15326 - RNA, 19 nt, artificial
  Chemically synthesized
agaaacuaccaacccacca

SEQ ID NO: 15327 - RNA, 19 nt, artificial
  Chemically synthesized
auacuccacacgcaaauuu

SEQ ID NO: 15328 - RNA, 19 nt, artificial
  Chemically synthesized
uguggcugauuguaaacua

SEQ ID NO: 15329 - RNA, 19 nt, artificial
  Chemically synthesized
agacuugacaacucccucu

SEQ ID NO: 15330 - RNA, 19 nt, artificial
  Chemically synthesized
acaaccuccgucaugugcu

SEQ ID NO: 15331 - RNA, 19 nt, artificial
  Chemically synthesized
ugcggagauucucuuccuc

SEQ ID NO: 15332 - RNA, 19 nt, artificial
  Chemically synthesized
uccacacgcaaauuuccuu

SEQ ID NO: 15333 - RNA, 19 nt, artificial
  Chemically synthesized
uaguggauggugguacagu

SEQ ID NO: 15334 - RNA, 19 nt, artificial
  Chemically synthesized
aaauguuuccugacucaga

SEQ ID NO: 15335 - RNA, 19 nt, artificial
  Chemically synthesized
guacauuauuucauuaacc

SEQ ID NO: 15336 - RNA, 19 nt, artificial
  Chemically synthesized
ucagcucucggaacaucuc

SEQ ID NO: 15337 - RNA, 19 nt, artificial
  Chemically synthesized
aaaccuuaaaaucuaagcu

SEQ ID NO: 15338 - RNA, 19 nt, artificial
  Chemically synthesized
ucuucagugaaccauuguu

SEQ ID NO: 15339 - RNA, 19 nt, artificial
  Chemically synthesized
ugagauuuccuuuuaggua

SEQ ID NO: 15340 - RNA, 19 nt, artificial
  Chemically synthesized
auguaauaaaaggugguuu

SEQ ID NO: 15341 - RNA, 19 nt, artificial
  Chemically synthesized
uggacagucgccaugacaa

SEQ ID NO: 15342 - RNA, 19 nt, artificial
  Chemically synthesized
ugcuuguagauggccaugg

SEQ ID NO: 15343 - RNA, 19 nt, artificial
  Chemically synthesized
uacaagagaugaaauccuc

SEQ ID NO: 15344 - RNA, 19 nt, artificial
  Chemically synthesized
uaccuaaccagcugcccaa

SEQ ID NO: 15345 - RNA, 19 nt, artificial
  Chemically synthesized
aguggauggugguacaguc

SEQ ID NO: 15346 - RNA, 19 nt, artificial
  Chemically synthesized
aauguggcugauuguaaac

SEQ ID NO: 15347 - RNA, 19 nt, artificial
  Chemically synthesized
ugcaaaugccagcauuuca

SEQ ID NO: 15348 - RNA, 19 nt, artificial
  Chemically synthesized
auauucuccauccaguggu

SEQ ID NO: 15349 - RNA, 19 nt, artificial
  Chemically synthesized
uugguggauccagaucauc

SEQ ID NO: 15350 - RNA, 19 nt, artificial
  Chemically synthesized
uuuccauaggucugaaaau

SEQ ID NO: 15351 - RNA, 19 nt, artificial
  Chemically synthesized
uuugagaagcucaaaacuu

SEQ ID NO: 15352 - RNA, 19 nt, artificial
  Chemically synthesized
acauuauuucauuaacccu

SEQ ID NO: 15353 - RNA, 19 nt, artificial
  Chemically synthesized
uguuccgucccaguagauu

SEQ ID NO: 15354 - RNA, 19 nt, artificial
  Chemically synthesized
uagauuaccacuggagucu

SEQ ID NO: 15355 - RNA, 19 nt, artificial
  Chemically synthesized
cuuucuugcggagauucuc

SEQ ID NO: 15356 - RNA, 19 nt, artificial
  Chemically synthesized
agacccaaaacccaaaaug

SEQ ID NO: 15357 - RNA, 19 nt, artificial
  Chemically synthesized
uguuucugucauccaaaua

SEQ ID NO: 15358 - RNA, 19 nt, artificial
  Chemically synthesized
auuuccuuccacucggaua

SEQ ID NO: 15359 - RNA, 19 nt, artificial
  Chemically synthesized
ugucccagaaugcaagaag

SEQ ID NO: 15360 - RNA, 19 nt, artificial
  Chemically synthesized
ucuugaacaugaguuuuuu

SEQ ID NO: 15361 - RNA, 19 nt, artificial
  Chemically synthesized
aagagaucgauauaaaaau

SEQ ID NO: 15362 - RNA, 19 nt, artificial
  Chemically synthesized
ugugcuugcagaauguaaa

SEQ ID NO: 15363 - RNA, 19 nt, artificial
  Chemically synthesized
aaguuagagaaaauucaac

SEQ ID NO: 15364 - RNA, 19 nt, artificial
  Chemically synthesized
agauucucuuccucugugc

SEQ ID NO: 15365 - RNA, 19 nt, artificial
  Chemically synthesized
gaacauuucuuacaucucc

SEQ ID NO: 15366 - RNA, 19 nt, artificial
  Chemically synthesized
aucaacccacagcugcaca

SEQ ID NO: 15367 - RNA, 19 nt, artificial
  Chemically synthesized
acgcaaauuuccuuccacu

SEQ ID NO: 15368 - RNA, 19 nt, artificial
  Chemically synthesized
aaaaugggauauaaaaagg

SEQ ID NO: 15369 - RNA, 19 nt, artificial
  Chemically synthesized
guaaaauaagagaucgaua

SEQ ID NO: 15370 - RNA, 19 nt, artificial
  Chemically synthesized
gcaaauuuccuuccacucg

SEQ ID NO: 15371 - RNA, 19 nt, artificial
  Chemically synthesized
aguguuucugucauccaaa

SEQ ID NO: 15372 - RNA, 19 nt, artificial
  Chemically synthesized
acagauaugggccuugaag

SEQ ID NO: 15373 - RNA, 19 nt, artificial
  Chemically synthesized
uggauccagaucaucauau

SEQ ID NO: 15374 - RNA, 19 nt, artificial
  Chemically synthesized
ucauucagcucucggaaca

SEQ ID NO: 15375 - RNA, 19 nt, artificial
  Chemically synthesized
agugcaggccaacuuguuc

SEQ ID NO: 15376 - RNA, 19 nt, artificial
  Chemically synthesized
agaacauuucuuacaucuc

SEQ ID NO: 15377 - RNA, 19 nt, artificial
  Chemically synthesized
ugguagguuuucugggaag

SEQ ID NO: 15378 - RNA, 19 nt, artificial
  Chemically synthesized
ugaaccauuguucaauauc

SEQ ID NO: 15379 - RNA, 19 nt, artificial
  Chemically synthesized
aaguggagaaugucagucu

SEQ ID NO: 15380 - RNA, 19 nt, artificial
  Chemically synthesized
uucugucuugaacaugagu

SEQ ID NO: 15381 - RNA, 19 nt, artificial
  Chemically synthesized
agaauguaaaagauguuga

SEQ ID NO: 15382 - RNA, 19 nt, artificial
  Chemically synthesized
uuuugagaagcucaaaacu

SEQ ID NO: 15383 - RNA, 19 nt, artificial
  Chemically synthesized
auuguaaacuaacccuuaa

SEQ ID NO: 15384 - RNA, 19 nt, artificial
  Chemically synthesized
ugucagacaggguuuggcu

SEQ ID NO: 15385 - RNA, 19 nt, artificial
  Chemically synthesized
ccuucugucuugaacauga

SEQ ID NO: 15386 - RNA, 19 nt, artificial
  Chemically synthesized
cucacaaccuccgucaugu

SEQ ID NO: 15387 - RNA, 19 nt, artificial
  Chemically synthesized
uccagaucaucauauacaa

SEQ ID NO: 15388 - RNA, 19 nt, artificial
  Chemically synthesized
aacuuuuagcgccagucuu

SEQ ID NO: 15389 - RNA, 19 nt, artificial
  Chemically synthesized
ugcuugcagaauguaaaag

SEQ ID NO: 15390 - RNA, 19 nt, artificial
  Chemically synthesized
caucaaaucauccauugcu

SEQ ID NO: 15391 - RNA, 19 nt, artificial
  Chemically synthesized
ugguuaguacggugaagug

SEQ ID NO: 15392 - RNA, 19 nt, artificial
  Chemically synthesized
acaaagcaaauggaagucc

SEQ ID NO: 15393 - RNA, 19 nt, artificial
  Chemically synthesized
cuucugacgcacaccuauu

SEQ ID NO: 15394 - RNA, 19 nt, artificial
  Chemically synthesized
cuccacacgcaaauuuccu

SEQ ID NO: 15395 - RNA, 19 nt, artificial
  Chemically synthesized
cagaugugcuugcagaaug

SEQ ID NO: 15396 - RNA, 19 nt, artificial
  Chemically synthesized
auaagagaucgauauaaaa

SEQ ID NO: 15397 - RNA, 19 nt, artificial
  Chemically synthesized
cagaauguaaaagauguug

SEQ ID NO: 15398 - RNA, 19 nt, artificial
  Chemically synthesized
ugaaaaugcagaugugcuu

SEQ ID NO: 15399 - RNA, 19 nt, artificial
  Chemically synthesized
accucaaagcuguuccguc

SEQ ID NO: 15400 - RNA, 19 nt, artificial
  Chemically synthesized
accauuguucaauaucguc

SEQ ID NO: 15401 - RNA, 19 nt, artificial
  Chemically synthesized
aacuuguucaguggagccc

SEQ ID NO: 15402 - RNA, 19 nt, artificial
  Chemically synthesized
gcaagacuugacaacuccc

SEQ ID NO: 15403 - RNA, 19 nt, artificial
  Chemically synthesized
aaauacuccacacgcaaau

SEQ ID NO: 15404 - RNA, 19 nt, artificial
  Chemically synthesized
augugcuugcagaauguaa

SEQ ID NO: 15405 - RNA, 19 nt, artificial
  Chemically synthesized
ucgauauaaaaaugggaua

SEQ ID NO: 15406 - RNA, 19 nt, artificial
  Chemically synthesized
agagaugaaauccuccagg

SEQ ID NO: 15407 - RNA, 19 nt, artificial
  Chemically synthesized
augggccuugaaguuagag

SEQ ID NO: 15408 - RNA, 19 nt, artificial
  Chemically synthesized
uaauaaaaggugguuucaa

SEQ ID NO: 15409 - RNA, 19 nt, artificial
  Chemically synthesized
aguagauuaccacuggagu

SEQ ID NO: 15410 - RNA, 19 nt, artificial
  Chemically synthesized
aaucaacccacagcugcac

SEQ ID NO: 15411 - RNA, 19 nt, artificial
  Chemically synthesized
agacugacccuuuuuggac

SEQ ID NO: 15412 - RNA, 19 nt, artificial
  Chemically synthesized
uagcugcccugguagguuu

SEQ ID NO: 15413 - RNA, 19 nt, artificial
  Chemically synthesized
acaagaaguggagaauguc

SEQ ID NO: 15414 - RNA, 19 nt, artificial
  Chemically synthesized
agaauguggcugauuguaa

SEQ ID NO: 15415 - RNA, 19 nt, artificial
  Chemically synthesized
cuuuuagcgccagucuuga

SEQ ID NO: 15416 - RNA, 19 nt, artificial
  Chemically synthesized
aaauaagagaucgauauaa

SEQ ID NO: 15417 - RNA, 19 nt, artificial
  Chemically synthesized
ucugggaagggacagaaga

SEQ ID NO: 15418 - RNA, 19 nt, artificial
  Chemically synthesized
augcaggaacuguuacaca

SEQ ID NO: 15419 - RNA, 19 nt, artificial
  Chemically synthesized
guagguuuucugggaaggg

SEQ ID NO: 15420 - RNA, 19 nt, artificial
  Chemically synthesized
aagaacauuucuuacaucu

SEQ ID NO: 15421 - RNA, 19 nt, artificial
  Chemically synthesized
ugugcugugacugcuugua

SEQ ID NO: 15422 - RNA, 19 nt, artificial
  Chemically synthesized
aaaucauccauugcuuggg

SEQ ID NO: 15423 - RNA, 19 nt, artificial
  Chemically synthesized
aacaugagggacagcuucc

SEQ ID NO: 15424 - RNA, 19 nt, artificial
  Chemically synthesized
ucaacaugagggacagcuu

SEQ ID NO: 15425 - RNA, 19 nt, artificial
  Chemically synthesized
ugcccaacuguagaaacua

SEQ ID NO: 15426 - RNA, 19 nt, artificial
  Chemically synthesized
aauccagggaagcguguca

SEQ ID NO: 15427 - RNA, 19 nt, artificial
  Chemically synthesized
acccuuaacugcaagaaca

SEQ ID NO: 15428 - RNA, 19 nt, artificial
  Chemically synthesized
cacaacaaaacaccagugc

SEQ ID NO: 15429 - RNA, 19 nt, artificial
  Chemically synthesized
uggauggugguacagucag

SEQ ID NO: 15430 - RNA, 19 nt, artificial
  Chemically synthesized
uguuuucaggaaguaguuu

SEQ ID NO: 15431 - RNA, 19 nt, artificial
  Chemically synthesized
cauguaguuguaguggaug

SEQ ID NO: 15432 - RNA, 19 nt, artificial
  Chemically synthesized
agauguugacccuuccagc

SEQ ID NO: 15433 - RNA, 19 nt, artificial
  Chemically synthesized
uucugggaagggacagaag

SEQ ID NO: 15434 - RNA, 19 nt, artificial
  Chemically synthesized
ucugugagguaggugcaaa

SEQ ID NO: 15435 - RNA, 19 nt, artificial
  Chemically synthesized
aucucccaaacaucccuca

SEQ ID NO: 15436 - RNA, 19 nt, artificial
  Chemically synthesized
ucuaagcugguauguccua

SEQ ID NO: 15437 - RNA, 19 nt, artificial
  Chemically synthesized
ucaugugcugugacugcuu

SEQ ID NO: 15438 - RNA, 19 nt, artificial
  Chemically synthesized
acacauguaguuguagugg

SEQ ID NO: 15439 - RNA, 19 nt, artificial
  Chemically synthesized
cgcaaauuuccuuccacuc

SEQ ID NO: 15440 - RNA, 19 nt, artificial
  Chemically synthesized
gaaauauucuccauccagu

SEQ ID NO: 15441 - RNA, 19 nt, artificial
  Chemically synthesized
uuggcugucccagaaugca

SEQ ID NO: 15442 - RNA, 19 nt, artificial
  Chemically synthesized
aucaucauauacaagagau

SEQ ID NO: 15443 - RNA, 19 nt, artificial
  Chemically synthesized
acuaaggucgaccaagagg

SEQ ID NO: 15444 - RNA, 19 nt, artificial
  Chemically synthesized
caaacacgcaccucaaagc

SEQ ID NO: 15445 - RNA, 19 nt, artificial
  Chemically synthesized
guuccgucccaguagauua

SEQ ID NO: 15446 - RNA, 19 nt, artificial
  Chemically synthesized
cauaggucugaaaauguuu

SEQ ID NO: 15447 - RNA, 19 nt, artificial
  Chemically synthesized
gugcugugacugcuuguag

SEQ ID NO: 15448 - RNA, 19 nt, artificial
  Chemically synthesized
cucccaaacaucccucaca

SEQ ID NO: 15449 - RNA, 19 nt, artificial
  Chemically synthesized
uaaccagcugcccaacugu

SEQ ID NO: 15450 - RNA, 19 nt, artificial
  Chemically synthesized
ccuagaauguggcugauug

SEQ ID NO: 15451 - RNA, 19 nt, artificial
  Chemically synthesized
cccaacuguagaaacuacc

SEQ ID NO: 15452 - RNA, 19 nt, artificial
  Chemically synthesized
ugggauauaaaaagggaga

SEQ ID NO: 15453 - RNA, 19 nt, artificial
  Chemically synthesized
aaauggaaguccugggugc

SEQ ID NO: 15454 - RNA, 19 nt, artificial
  Chemically synthesized
aaagauguugacccuucca

SEQ ID NO: 15455 - RNA, 19 nt, artificial
  Chemically synthesized
acauuucuuacaucuccca

SEQ ID NO: 15456 - RNA, 19 nt, artificial
  Chemically synthesized
uccgucaugugcugugacu

SEQ ID NO: 15457 - RNA, 19 nt, artificial
  Chemically synthesized
cugaaaauguuuccugacu

SEQ ID NO: 15458 - RNA, 19 nt, artificial
  Chemically synthesized
cugcaagaacauuucuuac

SEQ ID NO: 15459 - RNA, 19 nt, artificial
  Chemically synthesized
aaaauaagagaucgauaua

SEQ ID NO: 15460 - RNA, 19 nt, artificial
  Chemically synthesized
acagucagagccaaccuca

SEQ ID NO: 15461 - RNA, 19 nt, artificial
  Chemically synthesized
aacccuuaacugcaagaac

SEQ ID NO: 15462 - RNA, 19 nt, artificial
  Chemically synthesized
ugggucuucagugaaccau

SEQ ID NO: 15463 - RNA, 19 nt, artificial
  Chemically synthesized
acuaacccuuaacugcaag

SEQ ID NO: 15464 - RNA, 19 nt, artificial
  Chemically synthesized
aguuagagaaaauucaaca

SEQ ID NO: 15465 - RNA, 19 nt, artificial
  Chemically synthesized
ugacgcacaccuauugcaa

SEQ ID NO: 15466 - RNA, 19 nt, artificial
  Chemically synthesized
agguaggugcaaaugccag

SEQ ID NO: 15467 - RNA, 19 nt, artificial
  Chemically synthesized
ugcaagcaaggguucaaag

SEQ ID NO: 15468 - RNA, 19 nt, artificial
  Chemically synthesized
uggcucuagacuuuugaga

SEQ ID NO: 15469 - RNA, 19 nt, artificial
  Chemically synthesized
ugacaacucccucuaccua

SEQ ID NO: 15470 - RNA, 19 nt, artificial
  Chemically synthesized
ucaucauauacaagagaug

SEQ ID NO: 15471 - RNA, 19 nt, artificial
  Chemically synthesized
gccagauguacauuauuuc

SEQ ID NO: 15472 - RNA, 19 nt, artificial
  Chemically synthesized
caagaaguggagaauguca

SEQ ID NO: 15473 - RNA, 19 nt, artificial
  Chemically synthesized
cuugaaguuagagaaaauu

SEQ ID NO: 15474 - RNA, 19 nt, artificial
  Chemically synthesized
uccauccagugguuucuuc

SEQ ID NO: 15475 - RNA, 19 nt, artificial
  Chemically synthesized
auagggcaccaccacacua

SEQ ID NO: 15476 - RNA, 19 nt, artificial
  Chemically synthesized
agaggagcugguguuguug

SEQ ID NO: 15477 - RNA, 19 nt, artificial
  Chemically synthesized
aaaaugcagaugugcuugc

SEQ ID NO: 15478 - RNA, 19 nt, artificial
  Chemically synthesized
agagaucgauauaaaaaug

SEQ ID NO: 15479 - RNA, 19 nt, artificial
  Chemically synthesized
guaguuguaguggauggug

SEQ ID NO: 15480 - RNA, 19 nt, artificial
  Chemically synthesized
ucgacgcuaggaucugacu

SEQ ID NO: 15481 - RNA, 19 nt, artificial
  Chemically synthesized
ugcugugacugcuuguaga

SEQ ID NO: 15482 - RNA, 19 nt, artificial
  Chemically synthesized
guuccaaggccucauucag

SEQ ID NO: 15483 - RNA, 19 nt, artificial
  Chemically synthesized
gucccaguagauuaccacu

SEQ ID NO: 15484 - RNA, 19 nt, artificial
  Chemically synthesized
gucauccaaauacuccaca

SEQ ID NO: 15485 - RNA, 19 nt, artificial
  Chemically synthesized
uuccuuccacucggauaag

SEQ ID NO: 15486 - RNA, 19 nt, artificial
  Chemically synthesized
acaguaaaaaccuuaaaau

SEQ ID NO: 15487 - RNA, 19 nt, artificial
  Chemically synthesized
aagcugguauguccuacuc

SEQ ID NO: 15488 - RNA, 19 nt, artificial
  Chemically synthesized
gauucucuuccucugugcg

SEQ ID NO: 15489 - RNA, 19 nt, artificial
  Chemically synthesized
gcggagauucucuuccucu

SEQ ID NO: 15490 - RNA, 19 nt, artificial
  Chemically synthesized
acgguggcucuagacuuuu

SEQ ID NO: 15491 - RNA, 19 nt, artificial
  Chemically synthesized
acagcaucaaaucauccau

SEQ ID NO: 15492 - RNA, 19 nt, artificial
  Chemically synthesized
aauaagagaucgauauaaa

SEQ ID NO: 15493 - RNA, 19 nt, artificial
  Chemically synthesized
cagauguacauuauuucau

SEQ ID NO: 15494 - RNA, 19 nt, artificial
  Chemically synthesized
guaguuuccauaggucuga

SEQ ID NO: 15495 - RNA, 19 nt, artificial
  Chemically synthesized
agucaggcccuucugucuu

SEQ ID NO: 15496 - RNA, 19 nt, artificial
  Chemically synthesized
uuaccacuggagucuucca

SEQ ID NO: 15497 - RNA, 19 nt, artificial
  Chemically synthesized
ucacagauaugggccuuga

SEQ ID NO: 15498 - RNA, 19 nt, artificial
  Chemically synthesized
auuuccuuuuagguacuaa

SEQ ID NO: 15499 - RNA, 19 nt, artificial
  Chemically synthesized
cuagaauguggcugauugu

SEQ ID NO: 15500 - RNA, 19 nt, artificial
  Chemically synthesized
auggaaguccugggugcuu

SEQ ID NO: 15501 - RNA, 19 nt, artificial
  Chemically synthesized
acuuggcugucccagaaug

SEQ ID NO: 15502 - RNA, 19 nt, artificial
  Chemically synthesized
aguuccaaggccucauuca

SEQ ID NO: 15503 - RNA, 19 nt, artificial
  Chemically synthesized
cguuguuuucaggaaguag

SEQ ID NO: 15504 - RNA, 19 nt, artificial
  Chemically synthesized
caguaaaaaccuuaaaauc

SEQ ID NO: 15505 - RNA, 19 nt, artificial
  Chemically synthesized
agguuuucugggaagggac

SEQ ID NO: 15506 - RNA, 19 nt, artificial
  Chemically synthesized
cccacaacaaaacaccagu

SEQ ID NO: 15507 - RNA, 19 nt, artificial
  Chemically synthesized
cgucccaguagauuaccac

SEQ ID NO: 15508 - RNA, 19 nt, artificial
  Chemically synthesized
ccaaacaucccucacagua

SEQ ID NO: 15509 - RNA, 19 nt, artificial
  Chemically synthesized
acuugacaacucccucuac

SEQ ID NO: 15510 - RNA, 19 nt, artificial
  Chemically synthesized
uggccaguuggcaaaacau

SEQ ID NO: 15511 - RNA, 19 nt, artificial
  Chemically synthesized
ugcaggaacuguuacacau

SEQ ID NO: 15512 - RNA, 19 nt, artificial
  Chemically synthesized
caaaucauccauugcuugg

SEQ ID NO: 15513 - RNA, 19 nt, artificial
  Chemically synthesized
uccuuuuagguacuaaggu

SEQ ID NO: 15514 - RNA, 19 nt, artificial
  Chemically synthesized
guuucaaggccagauguac

SEQ ID NO: 15515 - RNA, 19 nt, artificial
  Chemically synthesized
aguacgugcaagucacaga

SEQ ID NO: 15516 - RNA, 19 nt, artificial
  Chemically synthesized
ugaaauccuccagggugug

SEQ ID NO: 15517 - RNA, 19 nt, artificial
  Chemically synthesized
uacgugcaagucacagacu

SEQ ID NO: 15518 - RNA, 19 nt, artificial
  Chemically synthesized
auucuccauccagugguuu

SEQ ID NO: 15519 - RNA, 19 nt, artificial
  Chemically synthesized
uggcauucugggagcuuca

SEQ ID NO: 15520 - RNA, 19 nt, artificial
  Chemically synthesized
ucaggcccuucugucuuga

SEQ ID NO: 15521 - RNA, 19 nt, artificial
  Chemically synthesized
ucauauacaagagaugaaa

SEQ ID NO: 15522 - RNA, 19 nt, artificial
  Chemically synthesized
ucacaguaaaaaccuuaaa

SEQ ID NO: 15523 - RNA, 19 nt, artificial
  Chemically synthesized
aauggaaguccugggugcu

SEQ ID NO: 15524 - RNA, 19 nt, artificial
  Chemically synthesized
auucugggagcuucaucug

SEQ ID NO: 15525 - RNA, 19 nt, artificial
  Chemically synthesized
cccuucugucuugaacaug

SEQ ID NO: 15526 - RNA, 19 nt, artificial
  Chemically synthesized
acaacucccucuaccuaac

SEQ ID NO: 15527 - RNA, 19 nt, artificial
  Chemically synthesized
aaagcuguuccgucccagu

SEQ ID NO: 15528 - RNA, 19 nt, artificial
  Chemically synthesized
gaugaaauccuccagggug

SEQ ID NO: 15529 - RNA, 19 nt, artificial
  Chemically synthesized
ccuuuuuggacuucaggug

SEQ ID NO: 15530 - RNA, 19 nt, artificial
  Chemically synthesized
guuuucugggaagggacag

SEQ ID NO: 15531 - RNA, 19 nt, artificial
  Chemically synthesized
agauguacauuauuucauu

SEQ ID NO: 15532 - RNA, 19 nt, artificial
  Chemically synthesized
ccuuucuugcggagauucu

SEQ ID NO: 15533 - RNA, 19 nt, artificial
  Chemically synthesized
gagaaaauucaacaugagg

SEQ ID NO: 15534 - RNA, 19 nt, artificial
  Chemically synthesized
guaaaaaccuuaaaaucua

SEQ ID NO: 15535 - RNA, 19 nt, artificial
  Chemically synthesized
uugcaagcaaggguucaaa

SEQ ID NO: 15536 - RNA, 19 nt, artificial
  Chemically synthesized
cccuuucuugcggagauuc

SEQ ID NO: 15537 - RNA, 19 nt, artificial
  Chemically synthesized
ggacagcaucaaaucaucc

SEQ ID NO: 15538 - RNA, 19 nt, artificial
  Chemically synthesized
cagaccaucgcuaucugag

SEQ ID NO: 15539 - RNA, 19 nt, artificial
  Chemically synthesized
agaccaucgcuaucugagc

SEQ ID NO: 15540 - RNA, 19 nt, artificial
  Chemically synthesized
acaacaaaacaccagugca

SEQ ID NO: 15541 - RNA, 19 nt, artificial
  Chemically synthesized
cauucugggagcuucaucu

SEQ ID NO: 15542 - RNA, 19 nt, artificial
  Chemically synthesized
gguagguuuucugggaagg

SEQ ID NO: 15543 - RNA, 19 nt, artificial
  Chemically synthesized
caagagaugaaauccucca

SEQ ID NO: 15544 - RNA, 19 nt, artificial
  Chemically synthesized
caaauggaaguccugggug

SEQ ID NO: 15545 - RNA, 19 nt, artificial
  Chemically synthesized
ccucacaguaaaaaccuua

SEQ ID NO: 15546 - RNA, 19 nt, artificial
  Chemically synthesized
cagauaugggccuugaagu

SEQ ID NO: 15547 - RNA, 19 nt, artificial
  Chemically synthesized
ggcugauuguaaacuaacc

SEQ ID NO: 15548 - RNA, 19 nt, artificial
  Chemically synthesized
caggaaguaguuuccauag

SEQ ID NO: 15549 - RNA, 19 nt, artificial
  Chemically synthesized
cauuucuuacaucucccaa

SEQ ID NO: 15550 - RNA, 19 nt, artificial
  Chemically synthesized
aauacuccacacgcaaauu

SEQ ID NO: 15551 - RNA, 19 nt, artificial
  Chemically synthesized
caagucuugguggauccag

SEQ ID NO: 15552 - RNA, 19 nt, artificial
  Chemically synthesized
ugguacagucagagccaac

SEQ ID NO: 15553 - RNA, 19 nt, artificial
  Chemically synthesized
ccagauguacauuauuuca

SEQ ID NO: 15554 - RNA, 19 nt, artificial
  Chemically synthesized
cuuaaaaucuaagcuggua

SEQ ID NO: 15555 - RNA, 19 nt, artificial
  Chemically synthesized
ugucuugaacaugaguuuu

SEQ ID NO: 15556 - RNA, 19 nt, artificial
  Chemically synthesized
gcaaaugccagcauuucac

SEQ ID NO: 15557 - RNA, 19 nt, artificial
  Chemically synthesized
uguuacacauguaguugua

SEQ ID NO: 15558 - RNA, 19 nt, artificial
  Chemically synthesized
ucacaaccuccgucaugug

SEQ ID NO: 15559 - RNA, 19 nt, artificial
  Chemically synthesized
cccuuuuuggacuucaggu

SEQ ID NO: 15560 - RNA, 19 nt, artificial
  Chemically synthesized
caacucccucuaccuaacc

SEQ ID NO: 15561 - RNA, 19 nt, artificial
  Chemically synthesized
gauuguaaacuaacccuua

SEQ ID NO: 15562 - RNA, 19 nt, artificial
  Chemically synthesized
ugagaagcucaaaacuuuu

SEQ ID NO: 15563 - RNA, 19 nt, artificial
  Chemically synthesized
acugcuuguagauggccau

SEQ ID NO: 15564 - RNA, 19 nt, artificial
  Chemically synthesized
ccacaacaaaacaccagug

SEQ ID NO: 15565 - RNA, 19 nt, artificial
  Chemically synthesized
caagucacagacuuggcug

SEQ ID NO: 15566 - RNA, 19 nt, artificial
  Chemically synthesized
ccuaccuaccuagaaugug

SEQ ID NO: 15567 - RNA, 19 nt, artificial
  Chemically synthesized
aagcuguuccgucccagua

SEQ ID NO: 15568 - RNA, 19 nt, artificial
  Chemically synthesized
gggugaaauauucuccauc

SEQ ID NO: 15569 - RNA, 19 nt, artificial
  Chemically synthesized
guuuccauaggucugaaaa

SEQ ID NO: 15570 - RNA, 19 nt, artificial
  Chemically synthesized
aggcccuucugucuugaac

SEQ ID NO: 15571 - RNA, 19 nt, artificial
  Chemically synthesized
guacagucagagccaaccu

SEQ ID NO: 15572 - RNA, 19 nt, artificial
  Chemically synthesized
cugguuaguacggugaagu

SEQ ID NO: 15573 - RNA, 19 nt, artificial
  Chemically synthesized
acuggagucuuccagugug

SEQ ID NO: 15574 - RNA, 19 nt, artificial
  Chemically synthesized
caucccucacaguaaaaac

SEQ ID NO: 15575 - RNA, 19 nt, artificial
  Chemically synthesized
agagguugucagacagggu

SEQ ID NO: 15576 - RNA, 19 nt, artificial
  Chemically synthesized
cuuccacucggauaagaug

SEQ ID NO: 15577 - RNA, 19 nt, artificial
  Chemically synthesized
acacuaugucgaaaagugu

SEQ ID NO: 15578 - RNA, 19 nt, artificial
  Chemically synthesized
ucaaggccagauguacauu

SEQ ID NO: 15579 - RNA, 19 nt, artificial
  Chemically synthesized
aaggguucaaagacccaaa

SEQ ID NO: 15580 - RNA, 19 nt, artificial
  Chemically synthesized
aguuguaguggaugguggu

SEQ ID NO: 15581 - RNA, 19 nt, artificial
  Chemically synthesized
cugugagguaggugcaaau

SEQ ID NO: 15582 - RNA, 19 nt, artificial
  Chemically synthesized
uggaaucaacccacagcug

SEQ ID NO: 15583 - RNA, 19 nt, artificial
  Chemically synthesized
gugaaaaugcagaugugcu

SEQ ID NO: 15584 - RNA, 19 nt, artificial
  Chemically synthesized
gacuugacaacucccucua

SEQ ID NO: 15585 - RNA, 19 nt, artificial
  Chemically synthesized
cugcuuguagauggccaug

SEQ ID NO: 15586 - RNA, 19 nt, artificial
  Chemically synthesized
ccagcaagacuugacaacu

SEQ ID NO: 15587 - RNA, 19 nt, artificial
  Chemically synthesized
acaccuauugcaagcaagg

SEQ ID NO: 15588 - RNA, 19 nt, artificial
  Chemically synthesized
gagguugucagacaggguu

SEQ ID NO: 15589 - RNA, 19 nt, artificial
  Chemically synthesized
gguucaaagacccaaaacc

SEQ ID NO: 15590 - RNA, 19 nt, artificial
  Chemically synthesized
ccuaccuagaauguggcug

SEQ ID NO: 15591 - RNA, 19 nt, artificial
  Chemically synthesized
cugucuugaacaugaguuu

SEQ ID NO: 15592 - RNA, 19 nt, artificial
  Chemically synthesized
caagagguugucagacagg

SEQ ID NO: 15593 - RNA, 19 nt, artificial
  Chemically synthesized
gcauuucacagauaugggc

SEQ ID NO: 15594 - RNA, 19 nt, artificial
  Chemically synthesized
gugcaaaugccagcauuuc

SEQ ID NO: 15595 - RNA, 19 nt, artificial
  Chemically synthesized
gucuugaacaugaguuuuu

SEQ ID NO: 15596 - RNA, 19 nt, artificial
  Chemically synthesized
gaacaagaaguggagaaug

SEQ ID NO: 15597 - RNA, 19 nt, artificial
  Chemically synthesized
gaguacgugcaagucacag

SEQ ID NO: 15598 - RNA, 19 nt, artificial
  Chemically synthesized
cggagauucucuuccucug

SEQ ID NO: 15599 - RNA, 19 nt, artificial
  Chemically synthesized
gcuugcagaauguaaaaga

SEQ ID NO: 15600 - RNA, 19 nt, artificial
  Chemically synthesized
aaagacccaaaacccaaaa

SEQ ID NO: 15601 - RNA, 19 nt, artificial
  Chemically synthesized
ccagaaugcaagaagccca

SEQ ID NO: 15602 - RNA, 19 nt, artificial
  Chemically synthesized
aaccagcugcccaacugua

SEQ ID NO: 15603 - RNA, 19 nt, artificial
  Chemically synthesized
agguugucagacaggguuu

SEQ ID NO: 15604 - RNA, 19 nt, artificial
  Chemically synthesized
ugggcauccuugaguucca

SEQ ID NO: 15605 - RNA, 19 nt, artificial
  Chemically synthesized
cucucggaacaucucgaag

SEQ ID NO: 15606 - RNA, 19 nt, artificial
  Chemically synthesized
gcauccuugaguuccaagg

SEQ ID NO: 15607 - RNA, 19 nt, artificial
  Chemically synthesized
guaaaagauguugacccuu

SEQ ID NO: 15608 - RNA, 19 nt, artificial
  Chemically synthesized
acagcuucccugguuagua

SEQ ID NO: 15609 - RNA, 19 nt, artificial
  Chemically synthesized
ccaaaacccaaaauggcag

SEQ ID NO: 15610 - RNA, 19 nt, artificial
  Chemically synthesized
cuaacccuuaacugcaaga

SEQ ID NO: 15611 - RNA, 19 nt, artificial
  Chemically synthesized
ugcagaugugcuugcagaa

SEQ ID NO: 15612 - RNA, 19 nt, artificial
  Chemically synthesized
cuugaacaugaguuuuuua

SEQ ID NO: 15613 - RNA, 19 nt, artificial
  Chemically synthesized
ccaaauacuccacacgcaa

SEQ ID NO: 15614 - RNA, 19 nt, artificial
  Chemically synthesized
gguagacugacccuuuuug

SEQ ID NO: 15615 - RNA, 19 nt, artificial
  Chemically synthesized
ucaucuggaccugggucuu

SEQ ID NO: 15616 - RNA, 19 nt, artificial
  Chemically synthesized
cucacaguaaaaaccuuaa

SEQ ID NO: 15617 - RNA, 19 nt, artificial
  Chemically synthesized
ugcuucugacgcacaccua

SEQ ID NO: 15618 - RNA, 19 nt, artificial
  Chemically synthesized
cucauucagcucucggaac

SEQ ID NO: 15619 - RNA, 19 nt, artificial
  Chemically synthesized
agcuucccugguuaguacg

SEQ ID NO: 15620 - RNA, 19 nt, artificial
  Chemically synthesized
gaacguuguuuucaggaag

SEQ ID NO: 15621 - RNA, 19 nt, artificial
  Chemically synthesized
guagauuaccacuggaguc

SEQ ID NO: 15622 - RNA, 19 nt, artificial
  Chemically synthesized
gccaguuggcaaaacaucu

SEQ ID NO: 15623 - RNA, 19 nt, artificial
  Chemically synthesized
cacaguaaaaaccuuaaaa

SEQ ID NO: 15624 - RNA, 19 nt, artificial
  Chemically synthesized
cugugacugcuuguagaug

SEQ ID NO: 15625 - RNA, 19 nt, artificial
  Chemically synthesized
gaaucaacccacagcugca

SEQ ID NO: 15626 - RNA, 19 nt, artificial
  Chemically synthesized
ucuggcauucugggagcuu

SEQ ID NO: 15627 - RNA, 19 nt, artificial
  Chemically synthesized
cauccagugguuucuucuu

SEQ ID NO: 15628 - RNA, 19 nt, artificial
  Chemically synthesized
gcauaaaacaagucuuggu

SEQ ID NO: 15629 - RNA, 19 nt, artificial
  Chemically synthesized
cagaacguuguuuucagga

SEQ ID NO: 15630 - RNA, 19 nt, artificial
  Chemically synthesized
cagcaucaaaucauccauu

SEQ ID NO: 15631 - RNA, 19 nt, artificial
  Chemically synthesized
gguggcucuagacuuuuga

SEQ ID NO: 15632 - RNA, 19 nt, artificial
  Chemically synthesized
guggagaaugucagucuga

SEQ ID NO: 15633 - RNA, 19 nt, artificial
  Chemically synthesized
cacgcaaauuuccuuccac

SEQ ID NO: 15634 - RNA, 19 nt, artificial
  Chemically synthesized
gaagggacagaagaugaca

SEQ ID NO: 15635 - RNA, 19 nt, artificial
  Chemically synthesized
gucuugguggauccagauc

SEQ ID NO: 15636 - RNA, 19 nt, artificial
  Chemically synthesized
gggacaaagcaaauggaag

SEQ ID NO: 15637 - RNA, 19 nt, artificial
  Chemically synthesized
acaucccucacaguaaaaa

SEQ ID NO: 15638 - RNA, 19 nt, artificial
  Chemically synthesized
uccuuccacucggauaaga

SEQ ID NO: 15639 - RNA, 19 nt, artificial
  Chemically synthesized
ggauaagaugcugaggagg

SEQ ID NO: 15640 - RNA, 19 nt, artificial
  Chemically synthesized
ccauccagugguuucuucu

SEQ ID NO: 15641 - RNA, 19 nt, artificial
  Chemically synthesized
ccagaucaucauauacaag

SEQ ID NO: 15642 - RNA, 19 nt, artificial
  Chemically synthesized
ccaagagguugucagacag

SEQ ID NO: 15643 - RNA, 19 nt, artificial
  Chemically synthesized
cucggauaagaugcugagg

SEQ ID NO: 15644 - RNA, 19 nt, artificial
  Chemically synthesized
aucauauacaagagaugaa

SEQ ID NO: 15645 - RNA, 19 nt, artificial
  Chemically synthesized
gacaacucccucuaccuaa

SEQ ID NO: 15646 - RNA, 19 nt, artificial
  Chemically synthesized
ccagcauuucacagauaug

SEQ ID NO: 15647 - RNA, 19 nt, artificial
  Chemically synthesized
gaauguggcugauuguaaa

SEQ ID NO: 15648 - RNA, 19 nt, artificial
  Chemically synthesized
uguaguggauggugguaca

SEQ ID NO: 15649 - RNA, 19 nt, artificial
  Chemically synthesized
caagcaaggguucaaagac

SEQ ID NO: 15650 - RNA, 19 nt, artificial
  Chemically synthesized
acaagucuugguggaucca

SEQ ID NO: 15651 - RNA, 19 nt, artificial
  Chemically synthesized
aaagcuggacagucgccau

SEQ ID NO: 15652 - RNA, 19 nt, artificial
  Chemically synthesized
cggaucugaagggugaaau

SEQ ID NO: 15653 - RNA, 19 nt, artificial
  Chemically synthesized
cccaaaacccaaaauggca

SEQ ID NO: 15654 - RNA, 19 nt, artificial
  Chemically synthesized
ugguuucaaggccagaugu

SEQ ID NO: 15655 - RNA, 19 nt, artificial
  Chemically synthesized
ucuuggccaguuggcaaaa

SEQ ID NO: 15656 - RNA, 19 nt, artificial
  Chemically synthesized
gugagauuuccuuuuaggu

SEQ ID NO: 15657 - RNA, 19 nt, artificial
  Chemically synthesized
cuugaguuccaaggccuca

SEQ ID NO: 15658 - RNA, 19 nt, artificial
  Chemically synthesized
ugaguuccaaggccucauu

SEQ ID NO: 15659 - RNA, 19 nt, artificial
  Chemically synthesized
caaacaucccucacaguaa

SEQ ID NO: 15660 - RNA, 19 nt, artificial
  Chemically synthesized
caaaacuuuuagcgccagu

SEQ ID NO: 15661 - RNA, 19 nt, artificial
  Chemically synthesized
ccaugcaggaacuguuaca

SEQ ID NO: 15662 - RNA, 19 nt, artificial
  Chemically synthesized
acuuuugagaagcucaaaa

SEQ ID NO: 15663 - RNA, 19 nt, artificial
  Chemically synthesized
uggcugucccagaaugcaa

SEQ ID NO: 15664 - RNA, 19 nt, artificial
  Chemically synthesized
gugguuucaaggccagaug

SEQ ID NO: 15665 - RNA, 19 nt, artificial
  Chemically synthesized
accacuggagucuuccagu

SEQ ID NO: 15666 - RNA, 19 nt, artificial
  Chemically synthesized
gaauguaaaagauguugac

SEQ ID NO: 15667 - RNA, 19 nt, artificial
  Chemically synthesized
agucacagacuuggcuguc

SEQ ID NO: 15668 - RNA, 19 nt, artificial
  Chemically synthesized
caaggccagauguacauua

SEQ ID NO: 15669 - RNA, 19 nt, artificial
  Chemically synthesized
acgugcaagucacagacuu

SEQ ID NO: 15670 - RNA, 19 nt, artificial
  Chemically synthesized
gggacagcaucaaaucauc

SEQ ID NO: 15671 - RNA, 19 nt, artificial
  Chemically synthesized
agaaguggagaaugucagu

SEQ ID NO: 15672 - RNA, 19 nt, artificial
  Chemically synthesized
caggccaacuuguucagug

SEQ ID NO: 15673 - RNA, 19 nt, artificial
  Chemically synthesized
ccaacuguagaaacuacca

SEQ ID NO: 15674 - RNA, 19 nt, artificial
  Chemically synthesized
guuuuuuauggcgggaggu

SEQ ID NO: 15675 - RNA, 19 nt, artificial
  Chemically synthesized
gcaucaaaucauccauugc

SEQ ID NO: 15676 - RNA, 19 nt, artificial
  Chemically synthesized
gagauucucuuccucugug

SEQ ID NO: 15677 - RNA, 19 nt, artificial
  Chemically synthesized
agugaaccauuguucaaua

SEQ ID NO: 15678 - RNA, 19 nt, artificial
  Chemically synthesized
caaggguucaaagacccaa

SEQ ID NO: 15679 - RNA, 19 nt, artificial
  Chemically synthesized
ggacaaagcaaauggaagu

SEQ ID NO: 15680 - RNA, 19 nt, artificial
  Chemically synthesized
cagugaaccauuguucaau

SEQ ID NO: 15681 - RNA, 19 nt, artificial
  Chemically synthesized
ccaguuggcaaaacaucuu

SEQ ID NO: 15682 - RNA, 19 nt, artificial
  Chemically synthesized
gggaagggacagaagauga

SEQ ID NO: 15683 - RNA, 19 nt, artificial
  Chemically synthesized
guaauaaaaggugguuuca

SEQ ID NO: 15684 - RNA, 19 nt, artificial
  Chemically synthesized
ccuuaaaaucuaagcuggu

SEQ ID NO: 15685 - RNA, 19 nt, artificial
  Chemically synthesized
cacuaugucgaaaaguguu

SEQ ID NO: 15686 - RNA, 19 nt, artificial
  Chemically synthesized
aaacaucccucacaguaaa

SEQ ID NO: 15687 - RNA, 19 nt, artificial
  Chemically synthesized
ggaacuguuacacauguag

SEQ ID NO: 15688 - RNA, 19 nt, artificial
  Chemically synthesized
aagacccaaaacccaaaau

SEQ ID NO: 15689 - RNA, 19 nt, artificial
  Chemically synthesized
gaucugaagggugaaauau

SEQ ID NO: 15690 - RNA, 19 nt, artificial
  Chemically synthesized
agauaugggccuugaaguu

SEQ ID NO: 15691 - RNA, 19 nt, artificial
  Chemically synthesized
ccucauucagcucucggaa

SEQ ID NO: 15692 - RNA, 19 nt, artificial
  Chemically synthesized
guacuaaggucgaccaaga

SEQ ID NO: 15693 - RNA, 19 nt, artificial
  Chemically synthesized
gguuaguacggugaagugg

SEQ ID NO: 15694 - RNA, 19 nt, artificial
  Chemically synthesized
agucuugguggauccagau

SEQ ID NO: 15695 - RNA, 19 nt, artificial
  Chemically synthesized
gauaugggccuugaaguua

SEQ ID NO: 15696 - RNA, 19 nt, artificial
  Chemically synthesized
gacccuuuuuggacuucag

SEQ ID NO: 15697 - RNA, 19 nt, artificial
  Chemically synthesized
uggcacaaagcuggacagu

SEQ ID NO: 15698 - RNA, 19 nt, artificial
  Chemically synthesized
cgguggcucuagacuuuug

SEQ ID NO: 15699 - RNA, 19 nt, artificial
  Chemically synthesized
caaagacccaaaacccaaa

SEQ ID NO: 15700 - RNA, 19 nt, artificial
  Chemically synthesized
cauauacaagagaugaaau

SEQ ID NO: 15701 - RNA, 19 nt, artificial
  Chemically synthesized
ccauaggucugaaaauguu

SEQ ID NO: 15702 - RNA, 19 nt, artificial
  Chemically synthesized
caacaugagggacagcuuc

SEQ ID NO: 15703 - RNA, 19 nt, artificial
  Chemically synthesized
ggaagggacagaagaugac

SEQ ID NO: 15704 - RNA, 19 nt, artificial
  Chemically synthesized
cuccauccagugguuucuu

SEQ ID NO: 15705 - RNA, 19 nt, artificial
  Chemically synthesized
ccacacuaugucgaaaagu

SEQ ID NO: 15706 - RNA, 19 nt, artificial
  Chemically synthesized
aauuuccuuccacucggau

SEQ ID NO: 15707 - RNA, 19 nt, artificial
  Chemically synthesized
caagaagcccagacggaaa

SEQ ID NO: 15708 - RNA, 19 nt, artificial
  Chemically synthesized
ucagugaaccauuguucaa

SEQ ID NO: 15709 - RNA, 19 nt, artificial
  Chemically synthesized
cagcaaaguuuuauuguaa

SEQ ID NO: 15710 - RNA, 19 nt, artificial
  Chemically synthesized
accugggucuucagugaac

SEQ ID NO: 15711 - RNA, 19 nt, artificial
  Chemically synthesized
ccuuuuagguacuaagguc

SEQ ID NO: 15712 - RNA, 19 nt, artificial
  Chemically synthesized
agucuugagcacaugggag

SEQ ID NO: 15713 - RNA, 19 nt, artificial
  Chemically synthesized
gaacuguuacacauguagu

SEQ ID NO: 15714 - RNA, 19 nt, artificial
  Chemically synthesized
cagugugaugauggugagg

SEQ ID NO: 15715 - RNA, 19 nt, artificial
  Chemically synthesized
gauccagaucaucauauac

SEQ ID NO: 15716 - RNA, 19 nt, artificial
  Chemically synthesized
guggcugauuguaaacuaa

SEQ ID NO: 15717 - RNA, 19 nt, artificial
  Chemically synthesized
aacaucccucacaguaaaa

SEQ ID NO: 15718 - RNA, 19 nt, artificial
  Chemically synthesized
agguagacugacccuuuuu

SEQ ID NO: 15719 - RNA, 19 nt, artificial
  Chemically synthesized
gccagcaagacuugacaac

SEQ ID NO: 15720 - RNA, 19 nt, artificial
  Chemically synthesized
gacagucgccaugacaagu

SEQ ID NO: 15721 - RNA, 19 nt, artificial
  Chemically synthesized
aggccagauguacauuauu

SEQ ID NO: 15722 - RNA, 19 nt, artificial
  Chemically synthesized
guguuucugucauccaaau

SEQ ID NO: 15723 - RNA, 19 nt, artificial
  Chemically synthesized
acugacccuuuuuggacuu

SEQ ID NO: 15724 - RNA, 19 nt, artificial
  Chemically synthesized
ccgagacagaggguuaaau

SEQ ID NO: 15725 - RNA, 19 nt, artificial
  Chemically synthesized
gaaucacagaaacacuuuu

SEQ ID NO: 15726 - RNA, 19 nt, artificial
  Chemically synthesized
ggccuggugaugugauuuu

SEQ ID NO: 15727 - RNA, 19 nt, artificial
  Chemically synthesized
gugaugugauuuuggccau

SEQ ID NO: 15728 - RNA, 19 nt, artificial
  Chemically synthesized
ccguggucuauaucgagau

SEQ ID NO: 15729 - RNA, 19 nt, artificial
  Chemically synthesized
ugacauggguuucuuggua

SEQ ID NO: 15730 - RNA, 19 nt, artificial
  Chemically synthesized
agggugaaaacuucugcuu

SEQ ID NO: 15731 - RNA, 19 nt, artificial
  Chemically synthesized
ugaagaaucacagaaacac

SEQ ID NO: 15732 - RNA, 19 nt, artificial
  Chemically synthesized
ugaagcuguucgaacccaa

SEQ ID NO: 15733 - RNA, 19 nt, artificial
  Chemically synthesized
gacauggguuucuugguaa

SEQ ID NO: 15734 - RNA, 19 nt, artificial
  Chemically synthesized
cgguugcugacauggguuu

SEQ ID NO: 15735 - RNA, 19 nt, artificial
  Chemically synthesized
ggugaaaacuucugcuuga

SEQ ID NO: 15736 - RNA, 19 nt, artificial
  Chemically synthesized
ccuagcaacauauuauagu

SEQ ID NO: 15737 - RNA, 19 nt, artificial
  Chemically synthesized
accgagacagaggguuaaa

SEQ ID NO: 15738 - RNA, 19 nt, artificial
  Chemically synthesized
gccuggugaugugauuuug

SEQ ID NO: 15739 - RNA, 19 nt, artificial
  Chemically synthesized
gguaagcuccugagguaau

SEQ ID NO: 15740 - RNA, 19 nt, artificial
  Chemically synthesized
gggugaaaacuucugcuug

SEQ ID NO: 15741 - RNA, 19 nt, artificial
  Chemically synthesized
cugcucugauuuccuccuu

SEQ ID NO: 15742 - RNA, 19 nt, artificial
  Chemically synthesized
ggugaugugauuuuggcca

SEQ ID NO: 15743 - RNA, 19 nt, artificial
  Chemically synthesized
gccguggucuauaucgaga

SEQ ID NO: 15744 - RNA, 19 nt, artificial
  Chemically synthesized
gugaaaacuucugcuugac

SEQ ID NO: 15745 - RNA, 19 nt, artificial
  Chemically synthesized
agauguuuaugaagcuguu

SEQ ID NO: 15746 - RNA, 19 nt, artificial
  Chemically synthesized
ggagcagaugguacaaaau

SEQ ID NO: 15747 - RNA, 19 nt, artificial
  Chemically synthesized
ugaaggucacagcuggaau

SEQ ID NO: 15748 - RNA, 19 nt, artificial
  Chemically synthesized
cguggucuauaucgagauc

SEQ ID NO: 15749 - RNA, 19 nt, artificial
  Chemically synthesized
guaagcuccugagguaaug

SEQ ID NO: 15750 - RNA, 19 nt, artificial
  Chemically synthesized
uggguuucuugguaagcuc

SEQ ID NO: 15751 - RNA, 19 nt, artificial
  Chemically synthesized
acauggguuucuugguaag

SEQ ID NO: 15752 - RNA, 19 nt, artificial
  Chemically synthesized
ccaucuuuugugggcaguu

SEQ ID NO: 15753 - RNA, 19 nt, artificial
  Chemically synthesized
cugauuuccuccuugccuu

SEQ ID NO: 15754 - RNA, 19 nt, artificial
  Chemically synthesized
cacugaccuuauaugugac

SEQ ID NO: 15755 - RNA, 19 nt, artificial
  Chemically synthesized
gcagaugguacaaaaugcu

SEQ ID NO: 15756 - RNA, 19 nt, artificial
  Chemically synthesized
cggccuggugaugugauuu

SEQ ID NO: 15757 - RNA, 19 nt, artificial
  Chemically synthesized
ugaaaacuucugcuugaca

SEQ ID NO: 15758 - RNA, 19 nt, artificial
  Chemically synthesized
gagggugaaaacuucugcu

SEQ ID NO: 15759 - RNA, 19 nt, artificial
  Chemically synthesized
ggagggugaaaacuucugc

SEQ ID NO: 15760 - RNA, 19 nt, artificial
  Chemically synthesized
accauccugaccuccuauu

SEQ ID NO: 15761 - RNA, 19 nt, artificial
  Chemically synthesized
gaaggagggugaaaacuuc

SEQ ID NO: 15762 - RNA, 19 nt, artificial
  Chemically synthesized
ugaaggagggugaaaacuu

SEQ ID NO: 15763 - RNA, 19 nt, artificial
  Chemically synthesized
caaaaggcuagagguaaag

SEQ ID NO: 15764 - RNA, 19 nt, artificial
  Chemically synthesized
ugcucugauuuccuccuug

SEQ ID NO: 15765 - RNA, 19 nt, artificial
  Chemically synthesized
ugaugugauuuuggccauu

SEQ ID NO: 15766 - RNA, 19 nt, artificial
  Chemically synthesized
uccuuugccaucccuucug

SEQ ID NO: 15767 - RNA, 19 nt, artificial
  Chemically synthesized
cugccguggucuauaucga

SEQ ID NO: 15768 - RNA, 19 nt, artificial
  Chemically synthesized
ugagugcgguugcugacau

SEQ ID NO: 15769 - RNA, 19 nt, artificial
  Chemically synthesized
caucuuuugugggcaguua

SEQ ID NO: 15770 - RNA, 19 nt, artificial
  Chemically synthesized
gcugcugccaucuuuugug

SEQ ID NO: 15771 - RNA, 19 nt, artificial
  Chemically synthesized
ugauuuccuccuugccuuu

SEQ ID NO: 15772 - RNA, 19 nt, artificial
  Chemically synthesized
ccugcucugauuuccuccu

SEQ ID NO: 15773 - RNA, 19 nt, artificial
  Chemically synthesized
acaucgcaacgcugaggau

SEQ ID NO: 15774 - RNA, 19 nt, artificial
  Chemically synthesized
ugcucuuugugguguggug

SEQ ID NO: 15775 - RNA, 19 nt, artificial
  Chemically synthesized
ugcugcucuuuguggugug

SEQ ID NO: 15776 - RNA, 19 nt, artificial
  Chemically synthesized
gucaggugcugcucuuugu

SEQ ID NO: 15777 - RNA, 19 nt, artificial
  Chemically synthesized
cgagaguuucugcaucgug

SEQ ID NO: 15778 - RNA, 19 nt, artificial
  Chemically synthesized
gugcugcucuuuguggugu

SEQ ID NO: 15779 - RNA, 19 nt, artificial
  Chemically synthesized
ggcagugcuguuguuguug

SEQ ID NO: 15780 - RNA, 19 nt, artificial
  Chemically synthesized
cuccugcucugauuuccuc

SEQ ID NO: 15781 - RNA, 19 nt, artificial
  Chemically synthesized
caaaaugcugaagauguuu

SEQ ID NO: 15782 - RNA, 19 nt, artificial
  Chemically synthesized
gaugguacaaaaugcugaa

SEQ ID NO: 15783 - RNA, 19 nt, artificial
  Chemically synthesized
agaugguacaaaaugcuga

SEQ ID NO: 15784 - RNA, 19 nt, artificial
  Chemically synthesized
agaccacaauucccggcau

SEQ ID NO: 15785 - RNA, 19 nt, artificial
  Chemically synthesized
cccggagucaguacaacuu

SEQ ID NO: 15786 - RNA, 19 nt, artificial
  Chemically synthesized
agaaugaauagaucaccaa

SEQ ID NO: 15787 - RNA, 19 nt, artificial
  Chemically synthesized
ggacgagaaacacugaccu

SEQ ID NO: 15788 - RNA, 19 nt, artificial
  Chemically synthesized
gccucagagaacucuggaa

SEQ ID NO: 15789 - RNA, 19 nt, artificial
  Chemically synthesized
cugcugacgucaggaacuu

SEQ ID NO: 15790 - RNA, 19 nt, artificial
  Chemically synthesized
ugaacaccaugaaggucac

SEQ ID NO: 15791 - RNA, 19 nt, artificial
  Chemically synthesized
cucugaagaaucacagaaa

SEQ ID NO: 15792 - RNA, 19 nt, artificial
  Chemically synthesized
cagugcuguuguuguugug

SEQ ID NO: 15793 - RNA, 19 nt, artificial
  Chemically synthesized
cgcugaggauucagacuaa

SEQ ID NO: 15794 - RNA, 19 nt, artificial
  Chemically synthesized
acgcugaggauucagacua

SEQ ID NO: 15795 - RNA, 19 nt, artificial
  Chemically synthesized
uugcugacauggguuucuu

SEQ ID NO: 15796 - RNA, 19 nt, artificial
  Chemically synthesized
gcucugaagaaucacagaa

SEQ ID NO: 15797 - RNA, 19 nt, artificial
  Chemically synthesized
ccaagaguaugaggcuccu

SEQ ID NO: 15798 - RNA, 19 nt, artificial
  Chemically synthesized
aggucacagaaugaauaga

SEQ ID NO: 15799 - RNA, 19 nt, artificial
  Chemically synthesized
ugguacaaaaugcugaaga

SEQ ID NO: 15800 - RNA, 19 nt, artificial
  Chemically synthesized
ugaugaugcugacccugag

SEQ ID NO: 15801 - RNA, 19 nt, artificial
  Chemically synthesized
gugcacuucugaaggacuu

SEQ ID NO: 15802 - RNA, 19 nt, artificial
  Chemically synthesized
gggaaaagaagaauuccuc

SEQ ID NO: 15803 - RNA, 19 nt, artificial
  Chemically synthesized
ucccaugcuuggcuacaga

SEQ ID NO: 15804 - RNA, 19 nt, artificial
  Chemically synthesized
ccggagucaguacaacuuc

SEQ ID NO: 15805 - RNA, 19 nt, artificial
  Chemically synthesized
aggguuaaaugaaccagug

SEQ ID NO: 15806 - RNA, 19 nt, artificial
  Chemically synthesized
gaggguuaaaugaaccagu

SEQ ID NO: 15807 - RNA, 19 nt, artificial
  Chemically synthesized
caccgagacagaggguuaa

SEQ ID NO: 15808 - RNA, 19 nt, artificial
  Chemically synthesized
ccucagagaacucuggaac

SEQ ID NO: 15809 - RNA, 19 nt, artificial
  Chemically synthesized
ugauuggagugaacaccau

SEQ ID NO: 15810 - RNA, 19 nt, artificial
  Chemically synthesized
uugguaagcuccugaggua

SEQ ID NO: 15811 - RNA, 19 nt, artificial
  Chemically synthesized
ccauagugcauggucugau

SEQ ID NO: 15812 - RNA, 19 nt, artificial
  Chemically synthesized
gggcucugaagaaucacag

SEQ ID NO: 15813 - RNA, 19 nt, artificial
  Chemically synthesized
cuccugggcucugaagaau

SEQ ID NO: 15814 - RNA, 19 nt, artificial
  Chemically synthesized
agaggguuaaaugaaccag

SEQ ID NO: 15815 - RNA, 19 nt, artificial
  Chemically synthesized
gaagauguuuaugaagcug

SEQ ID NO: 15816 - RNA, 19 nt, artificial
  Chemically synthesized
gaaaagaagaauuccuccu

SEQ ID NO: 15817 - RNA, 19 nt, artificial
  Chemically synthesized
ugaucgucuucgagaguuu

SEQ ID NO: 15818 - RNA, 19 nt, artificial
  Chemically synthesized
cugcuugacaguuccacau

SEQ ID NO: 15819 - RNA, 19 nt, artificial
  Chemically synthesized
ugagcugcugccaucuuuu

SEQ ID NO: 15820 - RNA, 19 nt, artificial
  Chemically synthesized
ccaccaaaaggcuagaggu

SEQ ID NO: 15821 - RNA, 19 nt, artificial
  Chemically synthesized
agaucaccaagaguaugag

SEQ ID NO: 15822 - RNA, 19 nt, artificial
  Chemically synthesized
cugaucgucuucgagaguu

SEQ ID NO: 15823 - RNA, 19 nt, artificial
  Chemically synthesized
cccuucugaucgucuucga

SEQ ID NO: 15824 - RNA, 19 nt, artificial
  Chemically synthesized
uuggagugaacaccaugaa

SEQ ID NO: 15825 - RNA, 19 nt, artificial
  Chemically synthesized
guccgugugagacugcuaa

SEQ ID NO: 15826 - RNA, 19 nt, artificial
  Chemically synthesized
acaacuucaucgcagaugu

SEQ ID NO: 15827 - RNA, 19 nt, artificial
  Chemically synthesized
caguacaacuucaucgcag

SEQ ID NO: 15828 - RNA, 19 nt, artificial
  Chemically synthesized
cucugaaggagggugaaaa

SEQ ID NO: 15829 - RNA, 19 nt, artificial
  Chemically synthesized
ccaugcuuggcuacagaua

SEQ ID NO: 15830 - RNA, 19 nt, artificial
  Chemically synthesized
agcaaagauucccaugcuu

SEQ ID NO: 15831 - RNA, 19 nt, artificial
  Chemically synthesized
ugaccuccuauuaaagaaa

SEQ ID NO: 15832 - RNA, 19 nt, artificial
  Chemically synthesized
ucugaagaaucacagaaac

SEQ ID NO: 15833 - RNA, 19 nt, artificial
  Chemically synthesized
uccuugccuuucuggcuga

SEQ ID NO: 15834 - RNA, 19 nt, artificial
  Chemically synthesized
cagaaugaauagaucacca

SEQ ID NO: 15835 - RNA, 19 nt, artificial
  Chemically synthesized
gcugacgucaggaacuucu

SEQ ID NO: 15836 - RNA, 19 nt, artificial
  Chemically synthesized
gcugaagauguuuaugaag

SEQ ID NO: 15837 - RNA, 19 nt, artificial
  Chemically synthesized
ggaagcuccauaacugcug

SEQ ID NO: 15838 - RNA, 19 nt, artificial
  Chemically synthesized
uggucuauaucgagauccu

SEQ ID NO: 15839 - RNA, 19 nt, artificial
  Chemically synthesized
gaaaacuucugcuugacag

SEQ ID NO: 15840 - RNA, 19 nt, artificial
  Chemically synthesized
cccaugcuuggcuacagau

SEQ ID NO: 15841 - RNA, 19 nt, artificial
  Chemically synthesized
ggcucugaagaaucacaga

SEQ ID NO: 15842 - RNA, 19 nt, artificial
  Chemically synthesized
agagaacucuggaacccgu

SEQ ID NO: 15843 - RNA, 19 nt, artificial
  Chemically synthesized
gcacuucugaaggacuuca

SEQ ID NO: 15844 - RNA, 19 nt, artificial
  Chemically synthesized
ccucugaaggagggugaaa

SEQ ID NO: 15845 - RNA, 19 nt, artificial
  Chemically synthesized
gaaaaugagcugcugccau

SEQ ID NO: 15846 - RNA, 19 nt, artificial
  Chemically synthesized
ccuccuauuaaagaaaaug

SEQ ID NO: 15847 - RNA, 19 nt, artificial
  Chemically synthesized
ugggcucugaagaaucaca

SEQ ID NO: 15848 - RNA, 19 nt, artificial
  Chemically synthesized
cagaggguuaaaugaacca

SEQ ID NO: 15849 - RNA, 19 nt, artificial
  Chemically synthesized
agaauuccuccuccggaau

SEQ ID NO: 15850 - RNA, 19 nt, artificial
  Chemically synthesized
aagaauuccuccuccggaa

SEQ ID NO: 15851 - RNA, 19 nt, artificial
  Chemically synthesized
cuggaaucuccuuugccau

SEQ ID NO: 15852 - RNA, 19 nt, artificial
  Chemically synthesized
ccacauccauagugcaugg

SEQ ID NO: 15853 - RNA, 19 nt, artificial
  Chemically synthesized
gcaaagauucccaugcuug

SEQ ID NO: 15854 - RNA, 19 nt, artificial
  Chemically synthesized
gagcaaagauucccaugcu

SEQ ID NO: 15855 - RNA, 19 nt, artificial
  Chemically synthesized
gccaucuuuugugggcagu

SEQ ID NO: 15856 - RNA, 19 nt, artificial
  Chemically synthesized
cugaccuccuauuaaagaa

SEQ ID NO: 15857 - RNA, 19 nt, artificial
  Chemically synthesized
cacagaaugaauagaucac

SEQ ID NO: 15858 - RNA, 19 nt, artificial
  Chemically synthesized
cccugaggucacagaauga

SEQ ID NO: 15859 - RNA, 19 nt, artificial
  Chemically synthesized
ugccaucccuucugaucgu

SEQ ID NO: 15860 - RNA, 19 nt, artificial
  Chemically synthesized
ggcuacagauacugacagc

SEQ ID NO: 15861 - RNA, 19 nt, artificial
  Chemically synthesized
uggcuacagauacugacag

SEQ ID NO: 15862 - RNA, 19 nt, artificial
  Chemically synthesized
ggagcaaagauucccaugc

SEQ ID NO: 15863 - RNA, 19 nt, artificial
  Chemically synthesized
agauacuggagcugaccau

SEQ ID NO: 15864 - RNA, 19 nt, artificial
  Chemically synthesized
agcuccauaacugcugcuu

SEQ ID NO: 15865 - RNA, 19 nt, artificial
  Chemically synthesized
gcugaggauucagacuaag

SEQ ID NO: 15866 - RNA, 19 nt, artificial
  Chemically synthesized
caguuccacauccauagug

SEQ ID NO: 15867 - RNA, 19 nt, artificial
  Chemically synthesized
ugacaguuccacauccaua

SEQ ID NO: 15868 - RNA, 19 nt, artificial
  Chemically synthesized
ugggagcaaagauucccau

SEQ ID NO: 15869 - RNA, 19 nt, artificial
  Chemically synthesized
ugccaucuuuugugggcag

SEQ ID NO: 15870 - RNA, 19 nt, artificial
  Chemically synthesized
augagcugcugccaucuuu

SEQ ID NO: 15871 - RNA, 19 nt, artificial
  Chemically synthesized
gcuagagguaaagcuguau

SEQ ID NO: 15872 - RNA, 19 nt, artificial
  Chemically synthesized
caccaaaaggcuagaggua

SEQ ID NO: 15873 - RNA, 19 nt, artificial
  Chemically synthesized
cacuucugaaggacuucag

SEQ ID NO: 15874 - RNA, 19 nt, artificial
  Chemically synthesized
caucccuucugaucgucuu

SEQ ID NO: 15875 - RNA, 19 nt, artificial
  Chemically synthesized
ccaucccuucugaucgucu

SEQ ID NO: 15876 - RNA, 19 nt, artificial
  Chemically synthesized
ggaaucuccuuugccaucc

SEQ ID NO: 15877 - RNA, 19 nt, artificial
  Chemically synthesized
gugaacaccaugaagguca

SEQ ID NO: 15878 - RNA, 19 nt, artificial
  Chemically synthesized
ugggcucauugucaccaac

SEQ ID NO: 15879 - RNA, 19 nt, artificial
  Chemically synthesized
agauucccaugcuuggcua

SEQ ID NO: 15880 - RNA, 19 nt, artificial
  Chemically synthesized
cugccaucuuuugugggca

SEQ ID NO: 15881 - RNA, 19 nt, artificial
  Chemically synthesized
accaaaaggcuagagguaa

SEQ ID NO: 15882 - RNA, 19 nt, artificial
  Chemically synthesized
ugccuuucuggcugagguu

SEQ ID NO: 15883 - RNA, 19 nt, artificial
  Chemically synthesized
gcucugauuuccuccuugc

SEQ ID NO: 15884 - RNA, 19 nt, artificial
  Chemically synthesized
augggcucauugucaccaa

SEQ ID NO: 15885 - RNA, 19 nt, artificial
  Chemically synthesized
ucaucgcagauguggugga

SEQ ID NO: 15886 - RNA, 19 nt, artificial
  Chemically synthesized
gacaguuccacauccauag

SEQ ID NO: 15887 - RNA, 19 nt, artificial
  Chemically synthesized
gcuacagauacugacagcu

SEQ ID NO: 15888 - RNA, 19 nt, artificial
  Chemically synthesized
caguuagucaggugcugcu

SEQ ID NO: 15889 - RNA, 19 nt, artificial
  Chemically synthesized
gaggcuccugcucugauuu

SEQ ID NO: 15890 - RNA, 19 nt, artificial
  Chemically synthesized
acagcuggaaucuccuuug

SEQ ID NO: 15891 - RNA, 19 nt, artificial
  Chemically synthesized
cacagcuggaaucuccuuu

SEQ ID NO: 15892 - RNA, 19 nt, artificial
  Chemically synthesized
gggagcaaagauucccaug

SEQ ID NO: 15893 - RNA, 19 nt, artificial
  Chemically synthesized
gaccauccugaccuccuau

SEQ ID NO: 15894 - RNA, 19 nt, artificial
  Chemically synthesized
ucgagaguuucugcaucgu

SEQ ID NO: 15895 - RNA, 19 nt, artificial
  Chemically synthesized
ggagugaacaccaugaagg

SEQ ID NO: 15896 - RNA, 19 nt, artificial
  Chemically synthesized
ccugaggucacagaaugaa

SEQ ID NO: 15897 - RNA, 19 nt, artificial
  Chemically synthesized
ucacagcuggaaucuccuu

SEQ ID NO: 15898 - RNA, 19 nt, artificial
  Chemically synthesized
gcuggaaucuccuuugcca

SEQ ID NO: 15899 - RNA, 19 nt, artificial
  Chemically synthesized
gcaacgcugaggauucaga

SEQ ID NO: 15900 - RNA, 19 nt, artificial
  Chemically synthesized
cugaggucacagaaugaau

SEQ ID NO: 15901 - RNA, 19 nt, artificial
  Chemically synthesized
cacauccauagugcauggu

SEQ ID NO: 15902 - RNA, 19 nt, artificial
  Chemically synthesized
cagcuauugauuuuggaaa

SEQ ID NO: 15903 - RNA, 19 nt, artificial
  Chemically synthesized
gcuauugauuuuggaaacu

SEQ ID NO: 15904 - RNA, 19 nt, artificial
  Chemically synthesized
agcuauugauuuuggaaac

SEQ ID NO: 15905 - RNA, 19 nt, artificial
  Chemically synthesized
auuuaacccucugucucgg

SEQ ID NO: 15906 - RNA, 19 nt, artificial
  Chemically synthesized
aaaaguguuucugugauuc

SEQ ID NO: 15907 - RNA, 19 nt, artificial
  Chemically synthesized
aaaaucacaucaccaggcc

SEQ ID NO: 15908 - RNA, 19 nt, artificial
  Chemically synthesized
auggccaaaaucacaucac

SEQ ID NO: 15909 - RNA, 19 nt, artificial
  Chemically synthesized
aucucgauauagaccacgg

SEQ ID NO: 15910 - RNA, 19 nt, artificial
  Chemically synthesized
uaccaagaaacccauguca

SEQ ID NO: 15911 - RNA, 19 nt, artificial
  Chemically synthesized
aagcagaaguuuucacccu

SEQ ID NO: 15912 - RNA, 19 nt, artificial
  Chemically synthesized
guguuucugugauucuuca

SEQ ID NO: 15913 - RNA, 19 nt, artificial
  Chemically synthesized
uuggguucgaacagcuuca

SEQ ID NO: 15914 - RNA, 19 nt, artificial
  Chemically synthesized
uuaccaagaaacccauguc

SEQ ID NO: 15915 - RNA, 19 nt, artificial
  Chemically synthesized
aaacccaugucagcaaccg

SEQ ID NO: 15916 - RNA, 19 nt, artificial
  Chemically synthesized
ucaagcagaaguuuucacc

SEQ ID NO: 15917 - RNA, 19 nt, artificial
  Chemically synthesized
acuauaauauguugcuagg

SEQ ID NO: 15918 - RNA, 19 nt, artificial
  Chemically synthesized
uuuaacccucugucucggu

SEQ ID NO: 15919 - RNA, 19 nt, artificial
  Chemically synthesized
caaaaucacaucaccaggc

SEQ ID NO: 15920 - RNA, 19 nt, artificial
  Chemically synthesized
auuaccucaggagcuuacc

SEQ ID NO: 15921 - RNA, 19 nt, artificial
  Chemically synthesized
caagcagaaguuuucaccc

SEQ ID NO: 15922 - RNA, 19 nt, artificial
  Chemically synthesized
aaggaggaaaucagagcag

SEQ ID NO: 15923 - RNA, 19 nt, artificial
  Chemically synthesized
uggccaaaaucacaucacc

SEQ ID NO: 15924 - RNA, 19 nt, artificial
  Chemically synthesized
ucucgauauagaccacggc

SEQ ID NO: 15925 - RNA, 19 nt, artificial
  Chemically synthesized
gucaagcagaaguuuucac

SEQ ID NO: 15926 - RNA, 19 nt, artificial
  Chemically synthesized
aacagcuucauaaacaucu

SEQ ID NO: 15927 - RNA, 19 nt, artificial
  Chemically synthesized
auuuuguaccaucugcucc

SEQ ID NO: 15928 - RNA, 19 nt, artificial
  Chemically synthesized
auuccagcugugaccuuca

SEQ ID NO: 15929 - RNA, 19 nt, artificial
  Chemically synthesized
gaucucgauauagaccacg

SEQ ID NO: 15930 - RNA, 19 nt, artificial
  Chemically synthesized
cauuaccucaggagcuuac

SEQ ID NO: 15931 - RNA, 19 nt, artificial
  Chemically synthesized
gagcuuaccaagaaaccca

SEQ ID NO: 15932 - RNA, 19 nt, artificial
  Chemically synthesized
cuuaccaagaaacccaugu

SEQ ID NO: 15933 - RNA, 19 nt, artificial
  Chemically synthesized
aacugcccacaaaagaugg

SEQ ID NO: 15934 - RNA, 19 nt, artificial
  Chemically synthesized
aaggcaaggaggaaaucag

SEQ ID NO: 15935 - RNA, 19 nt, artificial
  Chemically synthesized
gucacauauaaggucagug

SEQ ID NO: 15936 - RNA, 19 nt, artificial
  Chemically synthesized
agcauuuuguaccaucugc

SEQ ID NO: 15937 - RNA, 19 nt, artificial
  Chemically synthesized
aaaucacaucaccaggccg

SEQ ID NO: 15938 - RNA, 19 nt, artificial
  Chemically synthesized
ugucaagcagaaguuuuca

SEQ ID NO: 15939 - RNA, 19 nt, artificial
  Chemically synthesized
agcagaaguuuucacccuc

SEQ ID NO: 15940 - RNA, 19 nt, artificial
  Chemically synthesized
gcagaaguuuucacccucc

SEQ ID NO: 15941 - RNA, 19 nt, artificial
  Chemically synthesized
aauaggaggucaggauggu

SEQ ID NO: 15942 - RNA, 19 nt, artificial
  Chemically synthesized
gaaguuuucacccuccuuc

SEQ ID NO: 15943 - RNA, 19 nt, artificial
  Chemically synthesized
aaguuuucacccuccuuca

SEQ ID NO: 15944 - RNA, 19 nt, artificial
  Chemically synthesized
cuuuaccucuagccuuuug

SEQ ID NO: 15945 - RNA, 19 nt, artificial
  Chemically synthesized
caaggaggaaaucagagca

SEQ ID NO: 15946 - RNA, 19 nt, artificial
  Chemically synthesized
aauggccaaaaucacauca

SEQ ID NO: 15947 - RNA, 19 nt, artificial
  Chemically synthesized
cagaagggauggcaaagga

SEQ ID NO: 15948 - RNA, 19 nt, artificial
  Chemically synthesized
ucgauauagaccacggcag

SEQ ID NO: 15949 - RNA, 19 nt, artificial
  Chemically synthesized
augucagcaaccgcacuca

SEQ ID NO: 15950 - RNA, 19 nt, artificial
  Chemically synthesized
uaacugcccacaaaagaug

SEQ ID NO: 15951 - RNA, 19 nt, artificial
  Chemically synthesized
cacaaaagauggcagcagc

SEQ ID NO: 15952 - RNA, 19 nt, artificial
  Chemically synthesized
aaaggcaaggaggaaauca

SEQ ID NO: 15953 - RNA, 19 nt, artificial
  Chemically synthesized
aggaggaaaucagagcagg

SEQ ID NO: 15954 - RNA, 19 nt, artificial
  Chemically synthesized
auccucagcguugcgaugu

SEQ ID NO: 15955 - RNA, 19 nt, artificial
  Chemically synthesized
caccacaccacaaagagca

SEQ ID NO: 15956 - RNA, 19 nt, artificial
  Chemically synthesized
cacaccacaaagagcagca

SEQ ID NO: 15957 - RNA, 19 nt, artificial
  Chemically synthesized
acaaagagcagcaccugac

SEQ ID NO: 15958 - RNA, 19 nt, artificial
  Chemically synthesized
cacgaugcagaaacucucg

SEQ ID NO: 15959 - RNA, 19 nt, artificial
  Chemically synthesized
acaccacaaagagcagcac

SEQ ID NO: 15960 - RNA, 19 nt, artificial
  Chemically synthesized
caacaacaacagcacugcc

SEQ ID NO: 15961 - RNA, 19 nt, artificial
  Chemically synthesized
gaggaaaucagagcaggag

SEQ ID NO: 15962 - RNA, 19 nt, artificial
  Chemically synthesized
aaacaucuucagcauuuug

SEQ ID NO: 15963 - RNA, 19 nt, artificial
  Chemically synthesized
uucagcauuuuguaccauc

SEQ ID NO: 15964 - RNA, 19 nt, artificial
  Chemically synthesized
ucagcauuuuguaccaucu

SEQ ID NO: 15965 - RNA, 19 nt, artificial
  Chemically synthesized
augccgggaauuguggucu

SEQ ID NO: 15966 - RNA, 19 nt, artificial
  Chemically synthesized
aaguuguacugacuccggg

SEQ ID NO: 15967 - RNA, 19 nt, artificial
  Chemically synthesized
uuggugaucuauucauucu

SEQ ID NO: 15968 - RNA, 19 nt, artificial
  Chemically synthesized
aggucaguguuucucgucc

SEQ ID NO: 15969 - RNA, 19 nt, artificial
  Chemically synthesized
uuccagaguucucugaggc

SEQ ID NO: 15970 - RNA, 19 nt, artificial
  Chemically synthesized
aaguuccugacgucagcag

SEQ ID NO: 15971 - RNA, 19 nt, artificial
  Chemically synthesized
gugaccuucaugguguuca

SEQ ID NO: 15972 - RNA, 19 nt, artificial
  Chemically synthesized
uuucugugauucuucagag

SEQ ID NO: 15973 - RNA, 19 nt, artificial
  Chemically synthesized
cacaacaacaacagcacug

SEQ ID NO: 15974 - RNA, 19 nt, artificial
  Chemically synthesized
uuagucugaauccucagcg

SEQ ID NO: 15975 - RNA, 19 nt, artificial
  Chemically synthesized
uagucugaauccucagcgu

SEQ ID NO: 15976 - RNA, 19 nt, artificial
  Chemically synthesized
aagaaacccaugucagcaa

SEQ ID NO: 15977 - RNA, 19 nt, artificial
  Chemically synthesized
uucugugauucuucagagc

SEQ ID NO: 15978 - RNA, 19 nt, artificial
  Chemically synthesized
aggagccucauacucuugg

SEQ ID NO: 15979 - RNA, 19 nt, artificial
  Chemically synthesized
ucuauucauucugugaccu

SEQ ID NO: 15980 - RNA, 19 nt, artificial
  Chemically synthesized
ucuucagcauuuuguacca

SEQ ID NO: 15981 - RNA, 19 nt, artificial
  Chemically synthesized
cucagggucagcaucauca

SEQ ID NO: 15982 - RNA, 19 nt, artificial
  Chemically synthesized
aaguccuucagaagugcac

SEQ ID NO: 15983 - RNA, 19 nt, artificial
  Chemically synthesized
gaggaauucuucuuuuccc

SEQ ID NO: 15984 - RNA, 19 nt, artificial
  Chemically synthesized
ucuguagccaagcauggga

SEQ ID NO: 15985 - RNA, 19 nt, artificial
  Chemically synthesized
gaaguuguacugacuccgg

SEQ ID NO: 15986 - RNA, 19 nt, artificial
  Chemically synthesized
cacugguucauuuaacccu

SEQ ID NO: 15987 - RNA, 19 nt, artificial
  Chemically synthesized
acugguucauuuaacccuc

SEQ ID NO: 15988 - RNA, 19 nt, artificial
  Chemically synthesized
uuaacccucugucucggug

SEQ ID NO: 15989 - RNA, 19 nt, artificial
  Chemically synthesized
guuccagaguucucugagg

SEQ ID NO: 15990 - RNA, 19 nt, artificial
  Chemically synthesized
augguguucacuccaauca

SEQ ID NO: 15991 - RNA, 19 nt, artificial
  Chemically synthesized
uaccucaggagcuuaccaa

SEQ ID NO: 15992 - RNA, 19 nt, artificial
  Chemically synthesized
aucagaccaugcacuaugg

SEQ ID NO: 15993 - RNA, 19 nt, artificial
  Chemically synthesized
cugugauucuucagagccc

SEQ ID NO: 15994 - RNA, 19 nt, artificial
  Chemically synthesized
auucuucagagcccaggag

SEQ ID NO: 15995 - RNA, 19 nt, artificial
  Chemically synthesized
cugguucauuuaacccucu

SEQ ID NO: 15996 - RNA, 19 nt, artificial
  Chemically synthesized
cagcuucauaaacaucuuc

SEQ ID NO: 15997 - RNA, 19 nt, artificial
  Chemically synthesized
aggaggaauucuucuuuuc

SEQ ID NO: 15998 - RNA, 19 nt, artificial
  Chemically synthesized
aaacucucgaagacgauca

SEQ ID NO: 15999 - RNA, 19 nt, artificial
  Chemically synthesized
auguggaacugucaagcag

SEQ ID NO: 16000 - RNA, 19 nt, artificial
  Chemically synthesized
aaaagauggcagcagcuca

SEQ ID NO: 16001 - RNA, 19 nt, artificial
  Chemically synthesized
accucuagccuuuuggugg

SEQ ID NO: 16002 - RNA, 19 nt, artificial
  Chemically synthesized
cucauacucuuggugaucu

SEQ ID NO: 16003 - RNA, 19 nt, artificial
  Chemically synthesized
aacucucgaagacgaucag

SEQ ID NO: 16004 - RNA, 19 nt, artificial
  Chemically synthesized
ucgaagacgaucagaaggg

SEQ ID NO: 16005 - RNA, 19 nt, artificial
  Chemically synthesized
uucaugguguucacuccaa

SEQ ID NO: 16006 - RNA, 19 nt, artificial
  Chemically synthesized
uuagcagucucacacggac

SEQ ID NO: 16007 - RNA, 19 nt, artificial
  Chemically synthesized
acaucugcgaugaaguugu

SEQ ID NO: 16008 - RNA, 19 nt, artificial
  Chemically synthesized
cugcgaugaaguuguacug

SEQ ID NO: 16009 - RNA, 19 nt, artificial
  Chemically synthesized
uuuucacccuccuucagag

SEQ ID NO: 16010 - RNA, 19 nt, artificial
  Chemically synthesized
uaucuguagccaagcaugg

SEQ ID NO: 16011 - RNA, 19 nt, artificial
  Chemically synthesized
aagcaugggaaucuuugcu

SEQ ID NO: 16012 - RNA, 19 nt, artificial
  Chemically synthesized
uuucuuuaauaggagguca

SEQ ID NO: 16013 - RNA, 19 nt, artificial
  Chemically synthesized
guuucugugauucuucaga

SEQ ID NO: 16014 - RNA, 19 nt, artificial
  Chemically synthesized
ucagccagaaaggcaagga

SEQ ID NO: 16015 - RNA, 19 nt, artificial
  Chemically synthesized
uggugaucuauucauucug

SEQ ID NO: 16016 - RNA, 19 nt, artificial
  Chemically synthesized
agaaguuccugacgucagc

SEQ ID NO: 16017 - RNA, 19 nt, artificial
  Chemically synthesized
cuucauaaacaucuucagc

SEQ ID NO: 16018 - RNA, 19 nt, artificial
  Chemically synthesized
cagcaguuauggagcuucc

SEQ ID NO: 16019 - RNA, 19 nt, artificial
  Chemically synthesized
aggaucucgauauagacca

SEQ ID NO: 16020 - RNA, 19 nt, artificial
  Chemically synthesized
cugucaagcagaaguuuuc

SEQ ID NO: 16021 - RNA, 19 nt, artificial
  Chemically synthesized
aucuguagccaagcauggg

SEQ ID NO: 16022 - RNA, 19 nt, artificial
  Chemically synthesized
ucugugauucuucagagcc

SEQ ID NO: 16023 - RNA, 19 nt, artificial
  Chemically synthesized
acggguuccagaguucucu

SEQ ID NO: 16024 - RNA, 19 nt, artificial
  Chemically synthesized
ugaaguccuucagaagugc

SEQ ID NO: 16025 - RNA, 19 nt, artificial
  Chemically synthesized
uuucacccuccuucagagg

SEQ ID NO: 16026 - RNA, 19 nt, artificial
  Chemically synthesized
auggcagcagcucauuuuc

SEQ ID NO: 16027 - RNA, 19 nt, artificial
  Chemically synthesized
cauuuucuuuaauaggagg

SEQ ID NO: 16028 - RNA, 19 nt, artificial
  Chemically synthesized
ugugauucuucagagccca

SEQ ID NO: 16029 - RNA, 19 nt, artificial
  Chemically synthesized
ugguucauuuaacccucug

SEQ ID NO: 16030 - RNA, 19 nt, artificial
  Chemically synthesized
auuccggaggaggaauucu

SEQ ID NO: 16031 - RNA, 19 nt, artificial
  Chemically synthesized
uuccggaggaggaauucuu

SEQ ID NO: 16032 - RNA, 19 nt, artificial
  Chemically synthesized
auggcaaaggagauuccag

SEQ ID NO: 16033 - RNA, 19 nt, artificial
  Chemically synthesized
ccaugcacuauggaugugg

SEQ ID NO: 16034 - RNA, 19 nt, artificial
  Chemically synthesized
caagcaugggaaucuuugc

SEQ ID NO: 16035 - RNA, 19 nt, artificial
  Chemically synthesized
agcaugggaaucuuugcuc

SEQ ID NO: 16036 - RNA, 19 nt, artificial
  Chemically synthesized
acugcccacaaaagauggc

SEQ ID NO: 16037 - RNA, 19 nt, artificial
  Chemically synthesized
uucuuuaauaggaggucag

SEQ ID NO: 16038 - RNA, 19 nt, artificial
  Chemically synthesized
gugaucuauucauucugug

SEQ ID NO: 16039 - RNA, 19 nt, artificial
  Chemically synthesized
ucauucugugaccucaggg

SEQ ID NO: 16040 - RNA, 19 nt, artificial
  Chemically synthesized
acgaucagaagggauggca

SEQ ID NO: 16041 - RNA, 19 nt, artificial
  Chemically synthesized
gcugucaguaucuguagcc

SEQ ID NO: 16042 - RNA, 19 nt, artificial
  Chemically synthesized
cugucaguaucuguagcca

SEQ ID NO: 16043 - RNA, 19 nt, artificial
  Chemically synthesized
gcaugggaaucuuugcucc

SEQ ID NO: 16044 - RNA, 19 nt, artificial
  Chemically synthesized
auggucagcuccaguaucu

SEQ ID NO: 16045 - RNA, 19 nt, artificial
  Chemically synthesized
aagcagcaguuauggagcu

SEQ ID NO: 16046 - RNA, 19 nt, artificial
  Chemically synthesized
cuuagucugaauccucagc

SEQ ID NO: 16047 - RNA, 19 nt, artificial
  Chemically synthesized
cacuauggauguggaacug

SEQ ID NO: 16048 - RNA, 19 nt, artificial
  Chemically synthesized
uauggauguggaacuguca

SEQ ID NO: 16049 - RNA, 19 nt, artificial
  Chemically synthesized
augggaaucuuugcuccca

SEQ ID NO: 16050 - RNA, 19 nt, artificial
  Chemically synthesized
cugcccacaaaagauggca

SEQ ID NO: 16051 - RNA, 19 nt, artificial
  Chemically synthesized
aaagauggcagcagcucau

SEQ ID NO: 16052 - RNA, 19 nt, artificial
  Chemically synthesized
auacagcuuuaccucuagc

SEQ ID NO: 16053 - RNA, 19 nt, artificial
  Chemically synthesized
uaccucuagccuuuuggug

SEQ ID NO: 16054 - RNA, 19 nt, artificial
  Chemically synthesized
cugaaguccuucagaagug

SEQ ID NO: 16055 - RNA, 19 nt, artificial
  Chemically synthesized
aagacgaucagaagggaug

SEQ ID NO: 16056 - RNA, 19 nt, artificial
  Chemically synthesized
agacgaucagaagggaugg

SEQ ID NO: 16057 - RNA, 19 nt, artificial
  Chemically synthesized
ggauggcaaaggagauucc

SEQ ID NO: 16058 - RNA, 19 nt, artificial
  Chemically synthesized
ugaccuucaugguguucac

SEQ ID NO: 16059 - RNA, 19 nt, artificial
  Chemically synthesized
guuggugacaaugagccca

SEQ ID NO: 16060 - RNA, 19 nt, artificial
  Chemically synthesized
uagccaagcaugggaaucu

SEQ ID NO: 16061 - RNA, 19 nt, artificial
  Chemically synthesized
ugcccacaaaagauggcag

SEQ ID NO: 16062 - RNA, 19 nt, artificial
  Chemically synthesized
uuaccucuagccuuuuggu

SEQ ID NO: 16063 - RNA, 19 nt, artificial
  Chemically synthesized
aaccucagccagaaaggca

SEQ ID NO: 16064 - RNA, 19 nt, artificial
  Chemically synthesized
gcaaggaggaaaucagagc

SEQ ID NO: 16065 - RNA, 19 nt, artificial
  Chemically synthesized
uuggugacaaugagcccau

SEQ ID NO: 16066 - RNA, 19 nt, artificial
  Chemically synthesized
uccaccacaucugcgauga

SEQ ID NO: 16067 - RNA, 19 nt, artificial
  Chemically synthesized
cuauggauguggaacuguc

SEQ ID NO: 16068 - RNA, 19 nt, artificial
  Chemically synthesized
agcugucaguaucuguagc

SEQ ID NO: 16069 - RNA, 19 nt, artificial
  Chemically synthesized
agcagcaccugacuaacug

SEQ ID NO: 16070 - RNA, 19 nt, artificial
  Chemically synthesized
aaaucagagcaggagccuc

SEQ ID NO: 16071 - RNA, 19 nt, artificial
  Chemically synthesized
caaaggagauuccagcugu

SEQ ID NO: 16072 - RNA, 19 nt, artificial
  Chemically synthesized
aaaggagauuccagcugug

SEQ ID NO: 16073 - RNA, 19 nt, artificial
  Chemically synthesized
caugggaaucuuugcuccc

SEQ ID NO: 16074 - RNA, 19 nt, artificial
  Chemically synthesized
auaggaggucaggaugguc

SEQ ID NO: 16075 - RNA, 19 nt, artificial
  Chemically synthesized
acgaugcagaaacucucga

SEQ ID NO: 16076 - RNA, 19 nt, artificial
  Chemically synthesized
ccuucaugguguucacucc

SEQ ID NO: 16077 - RNA, 19 nt, artificial
  Chemically synthesized
uucauucugugaccucagg

SEQ ID NO: 16078 - RNA, 19 nt, artificial
  Chemically synthesized
aaggagauuccagcuguga

SEQ ID NO: 16079 - RNA, 19 nt, artificial
  Chemically synthesized
uggcaaaggagauuccagc

SEQ ID NO: 16080 - RNA, 19 nt, artificial
  Chemically synthesized
ucugaauccucagcguugc

SEQ ID NO: 16081 - RNA, 19 nt, artificial
  Chemically synthesized
auucauucugugaccucag

SEQ ID NO: 16082 - RNA, 19 nt, artificial
  Chemically synthesized
accaugcacuauggaugug

SEQ ID NO: 16083 - RNA, 19 nt, artificial
  Chemically synthesized
uuuccaaaaucaauagcug

SEQ ID NO: 16084 - RNA, 19 nt, artificial
  Chemically synthesized
aguuuccaaaaucaauagc

SEQ ID NO: 16085 - RNA, 19 nt, artificial
  Chemically synthesized
guuuccaaaaucaauagcu

SEQ ID NO: 16086 - RNA, 19 nt, artificial
  Chemically synthesized
gcaacauauuauaguaaaa

SEQ ID NO: 16087 - RNA, 19 nt, artificial
  Chemically synthesized
ccaaaaggcuagagguaaa

SEQ ID NO: 16088 - RNA, 19 nt, artificial
  Chemically synthesized
gggagcagaugguacaaaa

SEQ ID NO: 16089 - RNA, 19 nt, artificial
  Chemically synthesized
gagaaacacugaccuuaua

SEQ ID NO: 16090 - RNA, 19 nt, artificial
  Chemically synthesized
gggaggugauuggagugaa

SEQ ID NO: 16091 - RNA, 19 nt, artificial
  Chemically synthesized
cgagaaacacugaccuuau

SEQ ID NO: 16092 - RNA, 19 nt, artificial
  Chemically synthesized
gaagcuguucgaacccaau

SEQ ID NO: 16093 - RNA, 19 nt, artificial
  Chemically synthesized
ccugagggaagcuccauaa

SEQ ID NO: 16094 - RNA, 19 nt, artificial
  Chemically synthesized
ugcugaagauguuuaugaa

SEQ ID NO: 16095 - RNA, 19 nt, artificial
  Chemically synthesized
gagacagaggguuaaauga

SEQ ID NO: 16096 - RNA, 19 nt, artificial
  Chemically synthesized
cuuaccggugcgagucaaa

SEQ ID NO: 16097 - RNA, 19 nt, artificial
  Chemically synthesized
ggaggugauuggagugaac

SEQ ID NO: 16098 - RNA, 19 nt, artificial
  Chemically synthesized
gaauagaucaccaagagua

SEQ ID NO: 16099 - RNA, 19 nt, artificial
  Chemically synthesized
aauagaucaccaagaguau

SEQ ID NO: 16100 - RNA, 19 nt, artificial
  Chemically synthesized
gguacaaaaugcugaagau

SEQ ID NO: 16101 - RNA, 19 nt, artificial
  Chemically synthesized
gcuuggcuacagauacuga

SEQ ID NO: 16102 - RNA, 19 nt, artificial
  Chemically synthesized
agacagaggguuaaaugaa

SEQ ID NO: 16103 - RNA, 19 nt, artificial
  Chemically synthesized
cagaaacacuuuuuauaua

SEQ ID NO: 16104 - RNA, 19 nt, artificial
  Chemically synthesized
aauuauaccuagcaacaua

SEQ ID NO: 16105 - RNA, 19 nt, artificial
  Chemically synthesized
agcaacauauuauaguaaa

SEQ ID NO: 16106 - RNA, 19 nt, artificial
  Chemically synthesized
cuagcaacauauuauagua

SEQ ID NO: 16107 - RNA, 19 nt, artificial
  Chemically synthesized
cacagaaacacuuuuuaua

SEQ ID NO: 16108 - RNA, 19 nt, artificial
  Chemically synthesized
ugaugagugcgguugcuga

SEQ ID NO: 16109 - RNA, 19 nt, artificial
  Chemically synthesized
cauccugaccuccuauuaa

SEQ ID NO: 16110 - RNA, 19 nt, artificial
  Chemically synthesized
cggagucaguacaacuuca

SEQ ID NO: 16111 - RNA, 19 nt, artificial
  Chemically synthesized
gaagaaucacagaaacacu

SEQ ID NO: 16112 - RNA, 19 nt, artificial
  Chemically synthesized
aguacaacuucaucgcaga

SEQ ID NO: 16113 - RNA, 19 nt, artificial
  Chemically synthesized
ugaggucacagaaugaaua

SEQ ID NO: 16114 - RNA, 19 nt, artificial
  Chemically synthesized
auaaaauuauaccuagcaa

SEQ ID NO: 16115 - RNA, 19 nt, artificial
  Chemically synthesized
caugaaggucacagcugga

SEQ ID NO: 16116 - RNA, 19 nt, artificial
  Chemically synthesized
uaccuagcaacauauuaua

SEQ ID NO: 16117 - RNA, 19 nt, artificial
  Chemically synthesized
ggcuagagguaaagcugua

SEQ ID NO: 16118 - RNA, 19 nt, artificial
  Chemically synthesized
ccugggcucugaagaauca

SEQ ID NO: 16119 - RNA, 19 nt, artificial
  Chemically synthesized
ccuuugccaucccuucuga

SEQ ID NO: 16120 - RNA, 19 nt, artificial
  Chemically synthesized
ucgcagaugugguggagaa

SEQ ID NO: 16121 - RNA, 19 nt, artificial
  Chemically synthesized
guucgaacccaaucccagu

SEQ ID NO: 16122 - RNA, 19 nt, artificial
  Chemically synthesized
gacagaggguuaaaugaac

SEQ ID NO: 16123 - RNA, 19 nt, artificial
  Chemically synthesized
agaugugguggagaagaca

SEQ ID NO: 16124 - RNA, 19 nt, artificial
  Chemically synthesized
cauagugcauggucugaug

SEQ ID NO: 16125 - RNA, 19 nt, artificial
  Chemically synthesized
auccugaccuccuauuaaa

SEQ ID NO: 16126 - RNA, 19 nt, artificial
  Chemically synthesized
ccauccugaccuccuauua

SEQ ID NO: 16127 - RNA, 19 nt, artificial
  Chemically synthesized
ggucacagaaugaauagau

SEQ ID NO: 16128 - RNA, 19 nt, artificial
  Chemically synthesized
gaaugaauagaucaccaag

SEQ ID NO: 16129 - RNA, 19 nt, artificial
  Chemically synthesized
uaccggugcgagucaaaga

SEQ ID NO: 16130 - RNA, 19 nt, artificial
  Chemically synthesized
cgagacagaggguuaaaug

SEQ ID NO: 16131 - RNA, 19 nt, artificial
  Chemically synthesized
acaaaaugcugaagauguu

SEQ ID NO: 16132 - RNA, 19 nt, artificial
  Chemically synthesized
gggcagugcuguuguuguu

SEQ ID NO: 16133 - RNA, 19 nt, artificial
  Chemically synthesized
cuccauaacugcugcuuca

SEQ ID NO: 16134 - RNA, 19 nt, artificial
  Chemically synthesized
uguuuaugaagcuguucga

SEQ ID NO: 16135 - RNA, 19 nt, artificial
  Chemically synthesized
guuuaugaagcuguucgaa

SEQ ID NO: 16136 - RNA, 19 nt, artificial
  Chemically synthesized
gagggaagcuccauaacug

SEQ ID NO: 16137 - RNA, 19 nt, artificial
  Chemically synthesized
aguaaaaaaugagguggga

SEQ ID NO: 16138 - RNA, 19 nt, artificial
  Chemically synthesized
acuccugggcucugaagaa

SEQ ID NO: 16139 - RNA, 19 nt, artificial
  Chemically synthesized
gcagaugugguggagaaga

SEQ ID NO: 16140 - RNA, 19 nt, artificial
  Chemically synthesized
aaaugcugaagauguuuau

SEQ ID NO: 16141 - RNA, 19 nt, artificial
  Chemically synthesized
cauaacugcugcuucagga

SEQ ID NO: 16142 - RNA, 19 nt, artificial
  Chemically synthesized
ugaccauccugaccuccua

SEQ ID NO: 16143 - RNA, 19 nt, artificial
  Chemically synthesized
acacugaccuuauauguga

SEQ ID NO: 16144 - RNA, 19 nt, artificial
  Chemically synthesized
acgagaaacacugaccuua

SEQ ID NO: 16145 - RNA, 19 nt, artificial
  Chemically synthesized
cauccauagugcauggucu

SEQ ID NO: 16146 - RNA, 19 nt, artificial
  Chemically synthesized
gaccuccuauuaaagaaaa

SEQ ID NO: 16147 - RNA, 19 nt, artificial
  Chemically synthesized
ggagucaguacaacuucau

SEQ ID NO: 16148 - RNA, 19 nt, artificial
  Chemically synthesized
aaaauuauaccuagcaaca

SEQ ID NO: 16149 - RNA, 19 nt, artificial
  Chemically synthesized
ugaauagaucaccaagagu

SEQ ID NO: 16150 - RNA, 19 nt, artificial
  Chemically synthesized
uggucugaugagugcgguu

SEQ ID NO: 16151 - RNA, 19 nt, artificial
  Chemically synthesized
gacgagaaacacugaccuu

SEQ ID NO: 16152 - RNA, 19 nt, artificial
  Chemically synthesized
gagugaacaccaugaaggu

SEQ ID NO: 16153 - RNA, 19 nt, artificial
  Chemically synthesized
uauaccuagcaacauauua

SEQ ID NO: 16154 - RNA, 19 nt, artificial
  Chemically synthesized
gaggugauuggagugaaca

SEQ ID NO: 16155 - RNA, 19 nt, artificial
  Chemically synthesized
ugggagggcuggaucuuuu

SEQ ID NO: 16156 - RNA, 19 nt, artificial
  Chemically synthesized
agaaacacugaccuuauau

SEQ ID NO: 16157 - RNA, 19 nt, artificial
  Chemically synthesized
acagaaacacuuuuuauau

SEQ ID NO: 16158 - RNA, 19 nt, artificial
  Chemically synthesized
cuguucgaacccaauccca

SEQ ID NO: 16159 - RNA, 19 nt, artificial
  Chemically synthesized
guuccacauccauagugca

SEQ ID NO: 16160 - RNA, 19 nt, artificial
  Chemically synthesized
gaagaauuccuccuccgga

SEQ ID NO: 16161 - RNA, 19 nt, artificial
  Chemically synthesized
auaccuagcaacauauuau

SEQ ID NO: 16162 - RNA, 19 nt, artificial
  Chemically synthesized
aaugaauagaucaccaaga

SEQ ID NO: 16163 - RNA, 19 nt, artificial
  Chemically synthesized
gugaugaugcugacccuga

SEQ ID NO: 16164 - RNA, 19 nt, artificial
  Chemically synthesized
ucacagaaacacuuuuuau

SEQ ID NO: 16165 - RNA, 19 nt, artificial
  Chemically synthesized
agugcauggucugaugagu

SEQ ID NO: 16166 - RNA, 19 nt, artificial
  Chemically synthesized
gaugaugcugacccugagu

SEQ ID NO: 16167 - RNA, 19 nt, artificial
  Chemically synthesized
cuuugccaucccuucugau

SEQ ID NO: 16168 - RNA, 19 nt, artificial
  Chemically synthesized
ucuauaucgagauccugga

SEQ ID NO: 16169 - RNA, 19 nt, artificial
  Chemically synthesized
uagcaacauauuauaguaa

SEQ ID NO: 16170 - RNA, 19 nt, artificial
  Chemically synthesized
cuugacaguuccacaucca

SEQ ID NO: 16171 - RNA, 19 nt, artificial
  Chemically synthesized
gagaacucuggaacccguu

SEQ ID NO: 16172 - RNA, 19 nt, artificial
  Chemically synthesized
cuucugaucgucuucgaga

SEQ ID NO: 16173 - RNA, 19 nt, artificial
  Chemically synthesized
aggugauuggagugaacac

SEQ ID NO: 16174 - RNA, 19 nt, artificial
  Chemically synthesized
cauugucaccaacgcccau

SEQ ID NO: 16175 - RNA, 19 nt, artificial
  Chemically synthesized
gagaguuucugcaucgugg

SEQ ID NO: 16176 - RNA, 19 nt, artificial
  Chemically synthesized
gagcaguaggaagcaguca

SEQ ID NO: 16177 - RNA, 19 nt, artificial
  Chemically synthesized
ucugcuugacaguuccaca

SEQ ID NO: 16178 - RNA, 19 nt, artificial
  Chemically synthesized
gaggucacagaaugaauag

SEQ ID NO: 16179 - RNA, 19 nt, artificial
  Chemically synthesized
caugcuuggcuacagauac

SEQ ID NO: 16180 - RNA, 19 nt, artificial
  Chemically synthesized
ugaagauguuuaugaagcu

SEQ ID NO: 16181 - RNA, 19 nt, artificial
  Chemically synthesized
agcuccugagguaauggca

SEQ ID NO: 16182 - RNA, 19 nt, artificial
  Chemically synthesized
uuuugugggcaguuaguca

SEQ ID NO: 16183 - RNA, 19 nt, artificial
  Chemically synthesized
gugauuggagugaacacca

SEQ ID NO: 16184 - RNA, 19 nt, artificial
  Chemically synthesized
ugguaagcuccugagguaa

SEQ ID NO: 16185 - RNA, 19 nt, artificial
  Chemically synthesized
cagaugugguggagaagac

SEQ ID NO: 16186 - RNA, 19 nt, artificial
  Chemically synthesized
uugggaaggcggagucuuu

SEQ ID NO: 16187 - RNA, 19 nt, artificial
  Chemically synthesized
aaauuauaccuagcaacau

SEQ ID NO: 16188 - RNA, 19 nt, artificial
  Chemically synthesized
auuggagugaacaccauga

SEQ ID NO: 16189 - RNA, 19 nt, artificial
  Chemically synthesized
gauuggagugaacaccaug

SEQ ID NO: 16190 - RNA, 19 nt, artificial
  Chemically synthesized
aucacagaaacacuuuuua

SEQ ID NO: 16191 - RNA, 19 nt, artificial
  Chemically synthesized
gaaacacugaccuuauaug

SEQ ID NO: 16192 - RNA, 19 nt, artificial
  Chemically synthesized
uguucgaacccaaucccag

SEQ ID NO: 16193 - RNA, 19 nt, artificial
  Chemically synthesized
ucuuaccggugcgagucaa

SEQ ID NO: 16194 - RNA, 19 nt, artificial
  Chemically synthesized
auuauaccuagcaacauau

SEQ ID NO: 16195 - RNA, 19 nt, artificial
  Chemically synthesized
caccugccguggucuauau

SEQ ID NO: 16196 - RNA, 19 nt, artificial
  Chemically synthesized
ucugaaggagggugaaaac

SEQ ID NO: 16197 - RNA, 19 nt, artificial
  Chemically synthesized
uuggcuacagauacugaca

SEQ ID NO: 16198 - RNA, 19 nt, artificial
  Chemically synthesized
gaaggucacagcuggaauc

SEQ ID NO: 16199 - RNA, 19 nt, artificial
  Chemically synthesized
cugaagaaucacagaaaca

SEQ ID NO: 16200 - RNA, 19 nt, artificial
  Chemically synthesized
ucgcaacgcugaggauuca

SEQ ID NO: 16201 - RNA, 19 nt, artificial
  Chemically synthesized
aagaaucacagaaacacuu

SEQ ID NO: 16202 - RNA, 19 nt, artificial
  Chemically synthesized
gucacagaaugaauagauc

SEQ ID NO: 16203 - RNA, 19 nt, artificial
  Chemically synthesized
ucuuuugugggcaguuagu

SEQ ID NO: 16204 - RNA, 19 nt, artificial
  Chemically synthesized
uugacaguuccacauccau

SEQ ID NO: 16205 - RNA, 19 nt, artificial
  Chemically synthesized
ugacgucaggaacuucuga

SEQ ID NO: 16206 - RNA, 19 nt, artificial
  Chemically synthesized
cuucugcuugacaguucca

SEQ ID NO: 16207 - RNA, 19 nt, artificial
  Chemically synthesized
cuuggcuacagauacugac

SEQ ID NO: 16208 - RNA, 19 nt, artificial
  Chemically synthesized
uaagcggcgacacguauga

SEQ ID NO: 16209 - RNA, 19 nt, artificial
  Chemically synthesized
augaaggucacagcuggaa

SEQ ID NO: 16210 - RNA, 19 nt, artificial
  Chemically synthesized
uggagugaacaccaugaag

SEQ ID NO: 16211 - RNA, 19 nt, artificial
  Chemically synthesized
aguccgugugagacugcua

SEQ ID NO: 16212 - RNA, 19 nt, artificial
  Chemically synthesized
agaaucacagaaacacuuu

SEQ ID NO: 16213 - RNA, 19 nt, artificial
  Chemically synthesized
augcuuggcuacagauacu

SEQ ID NO: 16214 - RNA, 19 nt, artificial
  Chemically synthesized
ccugaccuccuauuaaaga

SEQ ID NO: 16215 - RNA, 19 nt, artificial
  Chemically synthesized
accuccuauuaaagaaaau

SEQ ID NO: 16216 - RNA, 19 nt, artificial
  Chemically synthesized
aggugcugcucuuuguggu

SEQ ID NO: 16217 - RNA, 19 nt, artificial
  Chemically synthesized
ugccguggucuauaucgag

SEQ ID NO: 16218 - RNA, 19 nt, artificial
  Chemically synthesized
cugagggaagcuccauaac

SEQ ID NO: 16219 - RNA, 19 nt, artificial
  Chemically synthesized
agaguaugaggcuccugcu

SEQ ID NO: 16220 - RNA, 19 nt, artificial
  Chemically synthesized
gaacaccaugaaggucaca

SEQ ID NO: 16221 - RNA, 19 nt, artificial
  Chemically synthesized
ucucgaacggcucaggauu

SEQ ID NO: 16222 - RNA, 19 nt, artificial
  Chemically synthesized
cacaauucccggcauucgu

SEQ ID NO: 16223 - RNA, 19 nt, artificial
  Chemically synthesized
auagugcauggucugauga

SEQ ID NO: 16224 - RNA, 19 nt, artificial
  Chemically synthesized
ugugguggagaagacagca

SEQ ID NO: 16225 - RNA, 19 nt, artificial
  Chemically synthesized
aaggagggugaaaacuucu

SEQ ID NO: 16226 - RNA, 19 nt, artificial
  Chemically synthesized
cuccuauuaaagaaaauga

SEQ ID NO: 16227 - RNA, 19 nt, artificial
  Chemically synthesized
ugaggcuccugcucugauu

SEQ ID NO: 16228 - RNA, 19 nt, artificial
  Chemically synthesized
augugauuuuggccauugg

SEQ ID NO: 16229 - RNA, 19 nt, artificial
  Chemically synthesized
aauaaaauuauaccuagca

SEQ ID NO: 16230 - RNA, 19 nt, artificial
  Chemically synthesized
aggcuagagguaaagcugu

SEQ ID NO: 16231 - RNA, 19 nt, artificial
  Chemically synthesized
aaucccaguuggcagugca

SEQ ID NO: 16232 - RNA, 19 nt, artificial
  Chemically synthesized
uagaucaccaagaguauga

SEQ ID NO: 16233 - RNA, 19 nt, artificial
  Chemically synthesized
augagugcgguugcugaca

SEQ ID NO: 16234 - RNA, 19 nt, artificial
  Chemically synthesized
aaacacugaccuuauaugu

SEQ ID NO: 16235 - RNA, 19 nt, artificial
  Chemically synthesized
cugacauggguuucuuggu

SEQ ID NO: 16236 - RNA, 19 nt, artificial
  Chemically synthesized
cuauuaaagaaaaugagcu

SEQ ID NO: 16237 - RNA, 19 nt, artificial
  Chemically synthesized
cugggagcaaagauuccca

SEQ ID NO: 16238 - RNA, 19 nt, artificial
  Chemically synthesized
gaucaccaagaguaugagg

SEQ ID NO: 16239 - RNA, 19 nt, artificial
  Chemically synthesized
ccuucugaucgucuucgag

SEQ ID NO: 16240 - RNA, 19 nt, artificial
  Chemically synthesized
gcagugcuguuguuguugu

SEQ ID NO: 16241 - RNA, 19 nt, artificial
  Chemically synthesized
acgagcaguaggaagcagu

SEQ ID NO: 16242 - RNA, 19 nt, artificial
  Chemically synthesized
uuauaccuagcaacauauu

SEQ ID NO: 16243 - RNA, 19 nt, artificial
  Chemically synthesized
cugaaggagggugaaaacu

SEQ ID NO: 16244 - RNA, 19 nt, artificial
  Chemically synthesized
ccuuucuggcugagguucu

SEQ ID NO: 16245 - RNA, 19 nt, artificial
  Chemically synthesized
ucacagaaugaauagauca

SEQ ID NO: 16246 - RNA, 19 nt, artificial
  Chemically synthesized
uccuauuaaagaaaaugag

SEQ ID NO: 16247 - RNA, 19 nt, artificial
  Chemically synthesized
agggaagcuccauaacugc

SEQ ID NO: 16248 - RNA, 19 nt, artificial
  Chemically synthesized
uccgugugagacugcuaag

SEQ ID NO: 16249 - RNA, 19 nt, artificial
  Chemically synthesized
aaaaugcugaagauguuua

SEQ ID NO: 16250 - RNA, 19 nt, artificial
  Chemically synthesized
ugagggaagcuccauaacu

SEQ ID NO: 16251 - RNA, 19 nt, artificial
  Chemically synthesized
gggaagcuccauaacugcu

SEQ ID NO: 16252 - RNA, 19 nt, artificial
  Chemically synthesized
cuuucuggcugagguucug

SEQ ID NO: 16253 - RNA, 19 nt, artificial
  Chemically synthesized
uacagauacugacagcugg

SEQ ID NO: 16254 - RNA, 19 nt, artificial
  Chemically synthesized
caaagauucccaugcuugg

SEQ ID NO: 16255 - RNA, 19 nt, artificial
  Chemically synthesized
ccuauuaaagaaaaugagc

SEQ ID NO: 16256 - RNA, 19 nt, artificial
  Chemically synthesized
cgugcacuucugaaggacu

SEQ ID NO: 16257 - RNA, 19 nt, artificial
  Chemically synthesized
auagaucaccaagaguaug

SEQ ID NO: 16258 - RNA, 19 nt, artificial
  Chemically synthesized
aaauaaaauuauaccuagc

SEQ ID NO: 16259 - RNA, 19 nt, artificial
  Chemically synthesized
uaucucgaacggcucagga

SEQ ID NO: 16260 - RNA, 19 nt, artificial
  Chemically synthesized
gaccacaauucccggcauu

SEQ ID NO: 16261 - RNA, 19 nt, artificial
  Chemically synthesized
acuucaucgcagauguggu

SEQ ID NO: 16262 - RNA, 19 nt, artificial
  Chemically synthesized
ucuucgagaguuucugcau

SEQ ID NO: 16263 - RNA, 19 nt, artificial
  Chemically synthesized
agaaaaugagcugcugcca

SEQ ID NO: 16264 - RNA, 19 nt, artificial
  Chemically synthesized
uaaaauuauaccuagcaac

SEQ ID NO: 16265 - RNA, 19 nt, artificial
  Chemically synthesized
ccuggugaugugauuuugg

SEQ ID NO: 16266 - RNA, 19 nt, artificial
  Chemically synthesized
gcuccugcucugauuuccu

SEQ ID NO: 16267 - RNA, 19 nt, artificial
  Chemically synthesized
uagugcauggucugaugag

SEQ ID NO: 16268 - RNA, 19 nt, artificial
  Chemically synthesized
uucugaaggacuucaggua

SEQ ID NO: 16269 - RNA, 19 nt, artificial
  Chemically synthesized
caacgcugaggauucagac

SEQ ID NO: 16270 - RNA, 19 nt, artificial
  Chemically synthesized
augaauagaucaccaagag

SEQ ID NO: 16271 - RNA, 19 nt, artificial
  Chemically synthesized
caucgcaacgcugaggauu

SEQ ID NO: 16272 - RNA, 19 nt, artificial
  Chemically synthesized
aacccaaucccaguuggca

SEQ ID NO: 16273 - RNA, 19 nt, artificial
  Chemically synthesized
cagcuggaaucuccuuugc

SEQ ID NO: 16274 - RNA, 19 nt, artificial
  Chemically synthesized
gucacagcuggaaucuccu

SEQ ID NO: 16275 - RNA, 19 nt, artificial
  Chemically synthesized
accuagcaacauauuauag

SEQ ID NO: 16276 - RNA, 19 nt, artificial
  Chemically synthesized
uaaagaaaaugagcugcug

SEQ ID NO: 16277 - RNA, 19 nt, artificial
  Chemically synthesized
ugcugacauggguuucuug

SEQ ID NO: 16278 - RNA, 19 nt, artificial
  Chemically synthesized
guacaacuucaucgcagau

SEQ ID NO: 16279 - RNA, 19 nt, artificial
  Chemically synthesized
aaaacuucugcuugacagu

SEQ ID NO: 16280 - RNA, 19 nt, artificial
  Chemically synthesized
ugugauuuuggccauuggg

SEQ ID NO: 16281 - RNA, 19 nt, artificial
  Chemically synthesized
gucuucgagaguuucugca

SEQ ID NO: 16282 - RNA, 19 nt, artificial
  Chemically synthesized
gugcauggucugaugagug

SEQ ID NO: 16283 - RNA, 19 nt, artificial
  Chemically synthesized
acuucugcuugacaguucc

SEQ ID NO: 16284 - RNA, 19 nt, artificial
  Chemically synthesized
cuccuuugccaucccuucu

SEQ ID NO: 16285 - RNA, 19 nt, artificial
  Chemically synthesized
uuaccggugcgagucaaag

SEQ ID NO: 16286 - RNA, 19 nt, artificial
  Chemically synthesized
uucugaucgucuucgagag

SEQ ID NO: 16287 - RNA, 19 nt, artificial
  Chemically synthesized
gaugugguggagaagacag

SEQ ID NO: 16288 - RNA, 19 nt, artificial
  Chemically synthesized
caacuucaucgcagaugug

SEQ ID NO: 16289 - RNA, 19 nt, artificial
  Chemically synthesized
caccaugaaggucacagcu

SEQ ID NO: 16290 - RNA, 19 nt, artificial
  Chemically synthesized
gagauacuggagcugacca

SEQ ID NO: 16291 - RNA, 19 nt, artificial
  Chemically synthesized
augcugaagauguuuauga

SEQ ID NO: 16292 - RNA, 19 nt, artificial
  Chemically synthesized
cuugguaagcuccugaggu

SEQ ID NO: 16293 - RNA, 19 nt, artificial
  Chemically synthesized
aggagggugaaaacuucug

SEQ ID NO: 16294 - RNA, 19 nt, artificial
  Chemically synthesized
ucauugucaccaacgccca

SEQ ID NO: 16295 - RNA, 19 nt, artificial
  Chemically synthesized
gagcagaugguacaaaaug

SEQ ID NO: 16296 - RNA, 19 nt, artificial
  Chemically synthesized
ugugggcaguuagucaggu

SEQ ID NO: 16297 - RNA, 19 nt, artificial
  Chemically synthesized
guaaaaaaugaggugggag

SEQ ID NO: 16298 - RNA, 19 nt, artificial
  Chemically synthesized
cgucuucgagaguuucugc

SEQ ID NO: 16299 - RNA, 19 nt, artificial
  Chemically synthesized
aaucacagaaacacuuuuu

SEQ ID NO: 16300 - RNA, 19 nt, artificial
  Chemically synthesized
aucuuuugugggcaguuag

SEQ ID NO: 16301 - RNA, 19 nt, artificial
  Chemically synthesized
ucaggugcugcucuuugug

SEQ ID NO: 16302 - RNA, 19 nt, artificial
  Chemically synthesized
uccugggcucugaagaauc

SEQ ID NO: 16303 - RNA, 19 nt, artificial
  Chemically synthesized
ggaaaagaagaauuccucc

SEQ ID NO: 16304 - RNA, 19 nt, artificial
  Chemically synthesized
aucgcagaugugguggaga

SEQ ID NO: 16305 - RNA, 19 nt, artificial
  Chemically synthesized
uuucuugguaagcuccuga

SEQ ID NO: 16306 - RNA, 19 nt, artificial
  Chemically synthesized
aauuccuccuccggaauca

SEQ ID NO: 16307 - RNA, 19 nt, artificial
  Chemically synthesized
cuucugaaggacuucaggu

SEQ ID NO: 16308 - RNA, 19 nt, artificial
  Chemically synthesized
acagauacugacagcuggc

SEQ ID NO: 16309 - RNA, 19 nt, artificial
  Chemically synthesized
gagucaguacaacuucauc

SEQ ID NO: 16310 - RNA, 19 nt, artificial
  Chemically synthesized
ucaccaagaguaugaggcu

SEQ ID NO: 16311 - RNA, 19 nt, artificial
  Chemically synthesized
cuauaucgagauccuggac

SEQ ID NO: 16312 - RNA, 19 nt, artificial
  Chemically synthesized
augaggcuccugcucugau

SEQ ID NO: 16313 - RNA, 19 nt, artificial
  Chemically synthesized
gaugugauuuuggccauug

SEQ ID NO: 16314 - RNA, 19 nt, artificial
  Chemically synthesized
cuucgagaguuucugcauc

SEQ ID NO: 16315 - RNA, 19 nt, artificial
  Chemically synthesized
uacaaaaugcugaagaugu

SEQ ID NO: 16316 - RNA, 19 nt, artificial
  Chemically synthesized
agaguuucugcaucguggg

SEQ ID NO: 16317 - RNA, 19 nt, artificial
  Chemically synthesized
cagaugguacaaaaugcug

SEQ ID NO: 16318 - RNA, 19 nt, artificial
  Chemically synthesized
uuauaguaaaaaaugaggu

SEQ ID NO: 16319 - RNA, 19 nt, artificial
  Chemically synthesized
aggucacagcuggaaucuc

SEQ ID NO: 16320 - RNA, 19 nt, artificial
  Chemically synthesized
gcugacauggguuucuugg

SEQ ID NO: 16321 - RNA, 19 nt, artificial
  Chemically synthesized
auggucugaugagugcggu

SEQ ID NO: 16322 - RNA, 19 nt, artificial
  Chemically synthesized
cuggugaugugauuuuggc

SEQ ID NO: 16323 - RNA, 19 nt, artificial
  Chemically synthesized
gcuugacaguuccacaucc

SEQ ID NO: 16324 - RNA, 19 nt, artificial
  Chemically synthesized
ggucuauaucgagauccug

SEQ ID NO: 16325 - RNA, 19 nt, artificial
  Chemically synthesized
guacaaaaugcugaagaug

SEQ ID NO: 16326 - RNA, 19 nt, artificial
  Chemically synthesized
gaaucuccuuugccauccc

SEQ ID NO: 16327 - RNA, 19 nt, artificial
  Chemically synthesized
gucuauaucgagauccugg

SEQ ID NO: 16328 - RNA, 19 nt, artificial
  Chemically synthesized
aaaaugaggugggagggcu

SEQ ID NO: 16329 - RNA, 19 nt, artificial
  Chemically synthesized
gugcuguuguuguuguggg

SEQ ID NO: 16330 - RNA, 19 nt, artificial
  Chemically synthesized
ucaguacaacuucaucgca

SEQ ID NO: 16331 - RNA, 19 nt, artificial
  Chemically synthesized
aaaaugagcugcugccauc

SEQ ID NO: 16332 - RNA, 19 nt, artificial
  Chemically synthesized
aaggcuagagguaaagcug

SEQ ID NO: 16333 - RNA, 19 nt, artificial
  Chemically synthesized
aucucgaacggcucaggau

SEQ ID NO: 16334 - RNA, 19 nt, artificial
  Chemically synthesized
agcugcugccaucuuuugu

SEQ ID NO: 16335 - RNA, 19 nt, artificial
  Chemically synthesized
agauacugacagcuggccu

SEQ ID NO: 16336 - RNA, 19 nt, artificial
  Chemically synthesized
gguugcugacauggguuuc

SEQ ID NO: 16337 - RNA, 19 nt, artificial
  Chemically synthesized
uauuaaagaaaaugagcug

SEQ ID NO: 16338 - RNA, 19 nt, artificial
  Chemically synthesized
uugccuuucuggcugaggu

SEQ ID NO: 16339 - RNA, 19 nt, artificial
  Chemically synthesized
cugacgucaggaacuucug

SEQ ID NO: 16340 - RNA, 19 nt, artificial
  Chemically synthesized
gguuucuugguaagcuccu

SEQ ID NO: 16341 - RNA, 19 nt, artificial
  Chemically synthesized
guuagucaggugcugcucu

SEQ ID NO: 16342 - RNA, 19 nt, artificial
  Chemically synthesized
uggugaugugauuuuggcc

SEQ ID NO: 16343 - RNA, 19 nt, artificial
  Chemically synthesized
acaguuccacauccauagu

SEQ ID NO: 16344 - RNA, 19 nt, artificial
  Chemically synthesized
ucugaugagugcgguugcu

SEQ ID NO: 16345 - RNA, 19 nt, artificial
  Chemically synthesized
gagcugcugccaucuuuug

SEQ ID NO: 16346 - RNA, 19 nt, artificial
  Chemically synthesized
gauucccaugcuuggcuac

SEQ ID NO: 16347 - RNA, 19 nt, artificial
  Chemically synthesized
uuagucaggugcugcucuu

SEQ ID NO: 16348 - RNA, 19 nt, artificial
  Chemically synthesized
gcuccauaacugcugcuuc

SEQ ID NO: 16349 - RNA, 19 nt, artificial
  Chemically synthesized
uaugaggcuccugcucuga

SEQ ID NO: 16350 - RNA, 19 nt, artificial
  Chemically synthesized
gaagcuccauaacugcugc

SEQ ID NO: 16351 - RNA, 19 nt, artificial
  Chemically synthesized
gauacuggagcugaccauc

SEQ ID NO: 16352 - RNA, 19 nt, artificial
  Chemically synthesized
augaagcuguucgaaccca

SEQ ID NO: 16353 - RNA, 19 nt, artificial
  Chemically synthesized
guuucuugguaagcuccug

SEQ ID NO: 16354 - RNA, 19 nt, artificial
  Chemically synthesized
uacuggagcugaccauccu

SEQ ID NO: 16355 - RNA, 19 nt, artificial
  Chemically synthesized
agcuguucgaacccaaucc

SEQ ID NO: 16356 - RNA, 19 nt, artificial
  Chemically synthesized
aaaggcuagagguaaagcu

SEQ ID NO: 16357 - RNA, 19 nt, artificial
  Chemically synthesized
aaaugagcugcugccaucu

SEQ ID NO: 16358 - RNA, 19 nt, artificial
  Chemically synthesized
uauaguaaaaaaugaggug

SEQ ID NO: 16359 - RNA, 19 nt, artificial
  Chemically synthesized
cugggcucugaagaaucac

SEQ ID NO: 16360 - RNA, 19 nt, artificial
  Chemically synthesized
aagcuguucgaacccaauc

SEQ ID NO: 16361 - RNA, 19 nt, artificial
  Chemically synthesized
guugcugacauggguuucu

SEQ ID NO: 16362 - RNA, 19 nt, artificial
  Chemically synthesized
uuaugaagcuguucgaacc

SEQ ID NO: 16363 - RNA, 19 nt, artificial
  Chemically synthesized
acaccaugaaggucacagc

SEQ ID NO: 16364 - RNA, 19 nt, artificial
  Chemically synthesized
uccugaccuccuauuaaag

SEQ ID NO: 16365 - RNA, 19 nt, artificial
  Chemically synthesized
acaauucccggcauucgug

SEQ ID NO: 16366 - RNA, 19 nt, artificial
  Chemically synthesized
cucagagaacucuggaacc

SEQ ID NO: 16367 - RNA, 19 nt, artificial
  Chemically synthesized
uuaaagaaaaugagcugcu

SEQ ID NO: 16368 - RNA, 19 nt, artificial
  Chemically synthesized
ucuccuuugccaucccuuc

SEQ ID NO: 16369 - RNA, 19 nt, artificial
  Chemically synthesized
uaaaaaaugaggugggagg

SEQ ID NO: 16370 - RNA, 19 nt, artificial
  Chemically synthesized
agcaguaggaagcagucac

SEQ ID NO: 16371 - RNA, 19 nt, artificial
  Chemically synthesized
uuucuggcugagguucuga

SEQ ID NO: 16372 - RNA, 19 nt, artificial
  Chemically synthesized
ccauaacugcugcuucagg

SEQ ID NO: 16373 - RNA, 19 nt, artificial
  Chemically synthesized
ggguuaaaugaaccagugg

SEQ ID NO: 16374 - RNA, 19 nt, artificial
  Chemically synthesized
ucugauuuccuccuugccu

SEQ ID NO: 16375 - RNA, 19 nt, artificial
  Chemically synthesized
uucgaacccaaucccaguu

SEQ ID NO: 16376 - RNA, 19 nt, artificial
  Chemically synthesized
gaucgucuucgagaguuuc

SEQ ID NO: 16377 - RNA, 19 nt, artificial
  Chemically synthesized
acuucugaaggacuucagg

SEQ ID NO: 16378 - RNA, 19 nt, artificial
  Chemically synthesized
aacacugaccuuauaugug

SEQ ID NO: 16379 - RNA, 19 nt, artificial
  Chemically synthesized
auggguuucuugguaagcu

SEQ ID NO: 16380 - RNA, 19 nt, artificial
  Chemically synthesized
aucuccuuugccaucccuu

SEQ ID NO: 16381 - RNA, 19 nt, artificial
  Chemically synthesized
gauguuuaugaagcuguuc

SEQ ID NO: 16382 - RNA, 19 nt, artificial
  Chemically synthesized
uccauagugcauggucuga

SEQ ID NO: 16383 - RNA, 19 nt, artificial
  Chemically synthesized
ucgucuucgagaguuucug

SEQ ID NO: 16384 - RNA, 19 nt, artificial
  Chemically synthesized
agaagaauuccuccuccgg

SEQ ID NO: 16385 - RNA, 19 nt, artificial
  Chemically synthesized
agcagaugguacaaaaugc

SEQ ID NO: 16386 - RNA, 19 nt, artificial
  Chemically synthesized
cuacagauacugacagcug

SEQ ID NO: 16387 - RNA, 19 nt, artificial
  Chemically synthesized
aaucuccuuugccaucccu

SEQ ID NO: 16388 - RNA, 19 nt, artificial
  Chemically synthesized
auuauaguaaaaaaugagg

SEQ ID NO: 16389 - RNA, 19 nt, artificial
  Chemically synthesized
aagauguuuaugaagcugu

SEQ ID NO: 16390 - RNA, 19 nt, artificial
  Chemically synthesized
uaguaaaaaaugagguggg

SEQ ID NO: 16391 - RNA, 19 nt, artificial
  Chemically synthesized
uucuggcugagguucugag

SEQ ID NO: 16392 - RNA, 19 nt, artificial
  Chemically synthesized
aaacuucugcuugacaguu

SEQ ID NO: 16393 - RNA, 19 nt, artificial
  Chemically synthesized
uugugggcaguuagucagg

SEQ ID NO: 16394 - RNA, 19 nt, artificial
  Chemically synthesized
uuugugggcaguuagucag

SEQ ID NO: 16395 - RNA, 19 nt, artificial
  Chemically synthesized
aaugcugaagauguuuaug

SEQ ID NO: 16396 - RNA, 19 nt, artificial
  Chemically synthesized
ugcugacgucaggaacuuc

SEQ ID NO: 16397 - RNA, 19 nt, artificial
  Chemically synthesized
ggugauuggagugaacacc

SEQ ID NO: 16398 - RNA, 19 nt, artificial
  Chemically synthesized
auuuccuccuugccuuucu

SEQ ID NO: 16399 - RNA, 19 nt, artificial
  Chemically synthesized
cuuuugugggcaguuaguc

SEQ ID NO: 16400 - RNA, 19 nt, artificial
  Chemically synthesized
cucugauuuccuccuugcc

SEQ ID NO: 16401 - RNA, 19 nt, artificial
  Chemically synthesized
cuucaucgcagauguggug

SEQ ID NO: 16402 - RNA, 19 nt, artificial
  Chemically synthesized
cauggguuucuugguaagc

SEQ ID NO: 16403 - RNA, 19 nt, artificial
  Chemically synthesized
aaggucacagcuggaaucu

SEQ ID NO: 16404 - RNA, 19 nt, artificial
  Chemically synthesized
augugguggagaagacagc

SEQ ID NO: 16405 - RNA, 19 nt, artificial
  Chemically synthesized
aacgcugaggauucagacu

SEQ ID NO: 16406 - RNA, 19 nt, artificial
  Chemically synthesized
auccauagugcauggucug

SEQ ID NO: 16407 - RNA, 19 nt, artificial
  Chemically synthesized
ucuugguaagcuccugagg

SEQ ID NO: 16408 - RNA, 19 nt, artificial
  Chemically synthesized
auucccaugcuuggcuaca

SEQ ID NO: 16409 - RNA, 19 nt, artificial
  Chemically synthesized
gaugggcucauugucacca

SEQ ID NO: 16410 - RNA, 19 nt, artificial
  Chemically synthesized
cugaagauguuuaugaagc

SEQ ID NO: 16411 - RNA, 19 nt, artificial
  Chemically synthesized
uucccaugcuuggcuacag

SEQ ID NO: 16412 - RNA, 19 nt, artificial
  Chemically synthesized
ucugaucgucuucgagagu

SEQ ID NO: 16413 - RNA, 19 nt, artificial
  Chemically synthesized
aaugagcugcugccaucuu

SEQ ID NO: 16414 - RNA, 19 nt, artificial
  Chemically synthesized
auaacugcugcuucaggag

SEQ ID NO: 16415 - RNA, 19 nt, artificial
  Chemically synthesized
cuagagguaaagcuguauc

SEQ ID NO: 16416 - RNA, 19 nt, artificial
  Chemically synthesized
aaaaaaugaggugggaggg

SEQ ID NO: 16417 - RNA, 19 nt, artificial
  Chemically synthesized
aguuccacauccauagugc

SEQ ID NO: 16418 - RNA, 19 nt, artificial
  Chemically synthesized
agaacucuggaacccguuc

SEQ ID NO: 16419 - RNA, 19 nt, artificial
  Chemically synthesized
ugcuuggcuacagauacug

SEQ ID NO: 16420 - RNA, 19 nt, artificial
  Chemically synthesized
aguaugaggcuccugcucu

SEQ ID NO: 16421 - RNA, 19 nt, artificial
  Chemically synthesized
caagaguaugaggcuccug

SEQ ID NO: 16422 - RNA, 19 nt, artificial
  Chemically synthesized
aagaagaauuccuccuccg

SEQ ID NO: 16423 - RNA, 19 nt, artificial
  Chemically synthesized
aaagaagaauuccuccucc

SEQ ID NO: 16424 - RNA, 19 nt, artificial
  Chemically synthesized
gguuaaaugaaccaguggg

SEQ ID NO: 16425 - RNA, 19 nt, artificial
  Chemically synthesized
agucaggugcugcucuuug

SEQ ID NO: 16426 - RNA, 19 nt, artificial
  Chemically synthesized
uuuccuccuugccuuucug

SEQ ID NO: 16427 - RNA, 19 nt, artificial
  Chemically synthesized
uagucaggugcugcucuuu

SEQ ID NO: 16428 - RNA, 19 nt, artificial
  Chemically synthesized
ugcauggucugaugagugc

SEQ ID NO: 16429 - RNA, 19 nt, artificial
  Chemically synthesized
acagaggguuaaaugaacc

SEQ ID NO: 16430 - RNA, 19 nt, artificial
  Chemically synthesized
cugcucuuugugguguggu

SEQ ID NO: 16431 - RNA, 19 nt, artificial
  Chemically synthesized
caccaagaguaugaggcuc

SEQ ID NO: 16432 - RNA, 19 nt, artificial
  Chemically synthesized
ggguuucuugguaagcucc

SEQ ID NO: 16433 - RNA, 19 nt, artificial
  Chemically synthesized
gacgucaggaacuucugac

SEQ ID NO: 16434 - RNA, 19 nt, artificial
  Chemically synthesized
cugcugccaucuuuugugg

SEQ ID NO: 16435 - RNA, 19 nt, artificial
  Chemically synthesized
aacuucugcuugacaguuc

SEQ ID NO: 16436 - RNA, 19 nt, artificial
  Chemically synthesized
uucuugguaagcuccugag

SEQ ID NO: 16437 - RNA, 19 nt, artificial
  Chemically synthesized
acauccauagugcaugguc

SEQ ID NO: 16438 - RNA, 19 nt, artificial
  Chemically synthesized
uuccacauccauagugcau

SEQ ID NO: 16439 - RNA, 19 nt, artificial
  Chemically synthesized
uccacauccauagugcaug

SEQ ID NO: 16440 - RNA, 19 nt, artificial
  Chemically synthesized
uuuaugaagcuguucgaac

SEQ ID NO: 16441 - RNA, 19 nt, artificial
  Chemically synthesized
agugcuguuguuguugugg

SEQ ID NO: 16442 - RNA, 19 nt, artificial
  Chemically synthesized
acagaaugaauagaucacc

SEQ ID NO: 16443 - RNA, 19 nt, artificial
  Chemically synthesized
auacugacagcuggccucu

SEQ ID NO: 16444 - RNA, 19 nt, artificial
  Chemically synthesized
uagagguaaagcuguaucc

SEQ ID NO: 16445 - RNA, 19 nt, artificial
  Chemically synthesized
ucgaacccaaucccaguug

SEQ ID NO: 16446 - RNA, 19 nt, artificial
  Chemically synthesized
cugaaggacuucagguacc

SEQ ID NO: 16447 - RNA, 19 nt, artificial
  Chemically synthesized
aagaguaugaggcuccugc

SEQ ID NO: 16448 - RNA, 19 nt, artificial
  Chemically synthesized
acgucaggaacuucugacc

SEQ ID NO: 16449 - RNA, 19 nt, artificial
  Chemically synthesized
uaagcuccugagguaaugg

SEQ ID NO: 16450 - RNA, 19 nt, artificial
  Chemically synthesized
uugucaccaacgcccaugu

SEQ ID NO: 16451 - RNA, 19 nt, artificial
  Chemically synthesized
ucugaaggacuucagguac

SEQ ID NO: 16452 - RNA, 19 nt, artificial
  Chemically synthesized
aucgcaacgcugaggauuc

SEQ ID NO: 16453 - RNA, 19 nt, artificial
  Chemically synthesized
ugaaggacuucagguaccg

SEQ ID NO: 16454 - RNA, 19 nt, artificial
  Chemically synthesized
aaaagaagaauuccuccuc

SEQ ID NO: 16455 - RNA, 19 nt, artificial
  Chemically synthesized
uuccuccuccggaaucagu

SEQ ID NO: 16456 - RNA, 19 nt, artificial
  Chemically synthesized
aagauucccaugcuuggcu

SEQ ID NO: 16457 - RNA, 19 nt, artificial
  Chemically synthesized
aucccuucugaucgucuuc

SEQ ID NO: 16458 - RNA, 19 nt, artificial
  Chemically synthesized
gaauuccuccuccggaauc

SEQ ID NO: 16459 - RNA, 19 nt, artificial
  Chemically synthesized
aaagaaaaugagcugcugc

SEQ ID NO: 16460 - RNA, 19 nt, artificial
  Chemically synthesized
agcuggaaucuccuuugcc

SEQ ID NO: 16461 - RNA, 19 nt, artificial
  Chemically synthesized
aagaaaaugagcugcugcc

SEQ ID NO: 16462 - RNA, 19 nt, artificial
  Chemically synthesized
auuccuccuccggaaucag

SEQ ID NO: 16463 - RNA, 19 nt, artificial
  Chemically synthesized
uggaaucuccuuugccauc

SEQ ID NO: 16464 - RNA, 19 nt, artificial
  Chemically synthesized
uuuggaaacucuggagguc

SEQ ID NO: 16465 - RNA, 19 nt, artificial
  Chemically synthesized
gucaguacaacuucaucgc

SEQ ID NO: 16466 - RNA, 19 nt, artificial
  Chemically synthesized
ugcuugacaguuccacauc

SEQ ID NO: 16467 - RNA, 19 nt, artificial
  Chemically synthesized
accacaauucccggcauuc

SEQ ID NO: 16468 - RNA, 19 nt, artificial
  Chemically synthesized
aacaccaugaaggucacag

SEQ ID NO: 16469 - RNA, 19 nt, artificial
  Chemically synthesized
accugccguggucuauauc

SEQ ID NO: 16470 - RNA, 19 nt, artificial
  Chemically synthesized
uucugcuugacaguuccac

SEQ ID NO: 16471 - RNA, 19 nt, artificial
  Chemically synthesized
aaaaaugaggugggagggc

SEQ ID NO: 16472 - RNA, 19 nt, artificial
  Chemically synthesized
auaucgagauccuggaccg

SEQ ID NO: 16473 - RNA, 19 nt, artificial
  Chemically synthesized
auguuuaugaagcuguucg

SEQ ID NO: 16474 - RNA, 19 nt, artificial
  Chemically synthesized
aagcuccugagguaauggc

SEQ ID NO: 16475 - RNA, 19 nt, artificial
  Chemically synthesized
aagcuccauaacugcugcu

SEQ ID NO: 16476 - RNA, 19 nt, artificial
  Chemically synthesized
agucaguacaacuucaucg

SEQ ID NO: 16477 - RNA, 19 nt, artificial
  Chemically synthesized
uaugaagcuguucgaaccc

SEQ ID NO: 16478 - RNA, 19 nt, artificial
  Chemically synthesized
accaugaaggucacagcug

SEQ ID NO: 16479 - RNA, 19 nt, artificial
  Chemically synthesized
agugaacaccaugaagguc

SEQ ID NO: 16480 - RNA, 19 nt, artificial
  Chemically synthesized
uccauaacugcugcuucag

SEQ ID NO: 16481 - RNA, 19 nt, artificial
  Chemically synthesized
uucgagaguuucugcaucg

SEQ ID NO: 16482 - RNA, 19 nt, artificial
  Chemically synthesized
agagguaaagcuguauccc

SEQ ID NO: 16483 - RNA, 19 nt, artificial
  Chemically synthesized
augguacaaaaugcugaag

SEQ ID NO: 16484 - RNA, 19 nt, artificial
  Chemically synthesized
aguuagucaggugcugcuc

SEQ ID NO: 16485 - RNA, 19 nt, artificial
  Chemically synthesized
uccugcucugauuuccucc

SEQ ID NO: 16486 - RNA, 19 nt, artificial
  Chemically synthesized
ugcacuucugaaggacuuc

SEQ ID NO: 16487 - RNA, 19 nt, artificial
  Chemically synthesized
auuaaagaaaaugagcugc

SEQ ID NO: 16488 - RNA, 19 nt, artificial
  Chemically synthesized
auaguaaaaaaugaggugg

SEQ ID NO: 16489 - RNA, 19 nt, artificial
  Chemically synthesized
gauuuccuccuugccuuuc

SEQ ID NO: 16490 - RNA, 19 nt, artificial
  Chemically synthesized
aucgucuucgagaguuucu

SEQ ID NO: 16491 - RNA, 19 nt, artificial
  Chemically synthesized
aaaaggcuagagguaaagc

SEQ ID NO: 16492 - RNA, 19 nt, artificial
  Chemically synthesized
ugcugccaucuuuuguggg

SEQ ID NO: 16493 - RNA, 19 nt, artificial
  Chemically synthesized
uugccaucccuucugaucg

SEQ ID NO: 16494 - RNA, 19 nt, artificial
  Chemically synthesized
aacuucaucgcagaugugg

SEQ ID NO: 16495 - RNA, 19 nt, artificial
  Chemically synthesized
ucccuucugaucgucuucg

SEQ ID NO: 16496 - RNA, 19 nt, artificial
  Chemically synthesized
ucagagaacucuggaaccc

SEQ ID NO: 16497 - RNA, 19 nt, artificial
  Chemically synthesized
aaagauucccaugcuuggc

SEQ ID NO: 16498 - RNA, 19 nt, artificial
  Chemically synthesized
accaagaguaugaggcucc

SEQ ID NO: 16499 - RNA, 19 nt, artificial
  Chemically synthesized
uuugccaucccuucugauc

SEQ ID NO: 16500 - RNA, 19 nt, artificial
  Chemically synthesized
aggcuccugcucugauuuc

SEQ ID NO: 16501 - RNA, 19 nt, artificial
  Chemically synthesized
cugaccuuauaugugaccc

SEQ ID NO: 16502 - RNA, 19 nt, artificial
  Chemically synthesized
uuccuccuugccuuucugg

SEQ ID NO: 16503 - RNA, 19 nt, artificial
  Chemically synthesized
auacuggagcugaccaucc

SEQ ID NO: 16504 - RNA, 19 nt, artificial
  Chemically synthesized
aucaccaagaguaugaggc

SEQ ID NO: 16505 - RNA, 19 nt, artificial
  Chemically synthesized
augaugcugacccugaguc

SEQ ID NO: 16506 - RNA, 19 nt, artificial
  Chemically synthesized
acugaccuuauaugugacc

SEQ ID NO: 16507 - RNA, 19 nt, artificial
  Chemically synthesized
uuggaaacucuggaggucc

SEQ ID NO: 16508 - RNA, 19 nt, artificial
  Chemically synthesized
uaacugcugcuucaggagc

SEQ ID NO: 16509 - RNA, 19 nt, artificial
  Chemically synthesized
guggucuauaucgagaucc

SEQ ID NO: 16510 - RNA, 19 nt, artificial
  Chemically synthesized
uacaacuucaucgcagaug

SEQ ID NO: 16511 - RNA, 19 nt, artificial
  Chemically synthesized
auugucaccaacgcccaug

SEQ ID NO: 16512 - RNA, 19 nt, artificial
  Chemically synthesized
uauaucgagauccuggacc

SEQ ID NO: 16513 - RNA, 19 nt, artificial
  Chemically synthesized
uucaucgcagauguggugg

SEQ ID NO: 16514 - RNA, 19 nt, artificial
  Chemically synthesized
uuuuacuauaauauguugc

SEQ ID NO: 16515 - RNA, 19 nt, artificial
  Chemically synthesized
uuuaccucuagccuuuugg

SEQ ID NO: 16516 - RNA, 19 nt, artificial
  Chemically synthesized
uuuuguaccaucugcuccc

SEQ ID NO: 16517 - RNA, 19 nt, artificial
  Chemically synthesized
uauaaggucaguguuucuc

SEQ ID NO: 16518 - RNA, 19 nt, artificial
  Chemically synthesized
uucacuccaaucaccuccc

SEQ ID NO: 16519 - RNA, 19 nt, artificial
  Chemically synthesized
auaaggucaguguuucucg

SEQ ID NO: 16520 - RNA, 19 nt, artificial
  Chemically synthesized
auuggguucgaacagcuuc

SEQ ID NO: 16521 - RNA, 19 nt, artificial
  Chemically synthesized
uuauggagcuucccucagg

SEQ ID NO: 16522 - RNA, 19 nt, artificial
  Chemically synthesized
uucauaaacaucuucagca

SEQ ID NO: 16523 - RNA, 19 nt, artificial
  Chemically synthesized
ucauuuaacccucugucuc

SEQ ID NO: 16524 - RNA, 19 nt, artificial
  Chemically synthesized
uuugacucgcaccgguaag

SEQ ID NO: 16525 - RNA, 19 nt, artificial
  Chemically synthesized
guucacuccaaucaccucc

SEQ ID NO: 16526 - RNA, 19 nt, artificial
  Chemically synthesized
uacucuuggugaucuauuc

SEQ ID NO: 16527 - RNA, 19 nt, artificial
  Chemically synthesized
auacucuuggugaucuauu

SEQ ID NO: 16528 - RNA, 19 nt, artificial
  Chemically synthesized
aucuucagcauuuuguacc

SEQ ID NO: 16529 - RNA, 19 nt, artificial
  Chemically synthesized
ucaguaucuguagccaagc

SEQ ID NO: 16530 - RNA, 19 nt, artificial
  Chemically synthesized
uucauuuaacccucugucu

SEQ ID NO: 16531 - RNA, 19 nt, artificial
  Chemically synthesized
uauauaaaaaguguuucug

SEQ ID NO: 16532 - RNA, 19 nt, artificial
  Chemically synthesized
uauguugcuagguauaauu

SEQ ID NO: 16533 - RNA, 19 nt, artificial
  Chemically synthesized
uuuacuauaauauguugcu

SEQ ID NO: 16534 - RNA, 19 nt, artificial
  Chemically synthesized
uacuauaauauguugcuag

SEQ ID NO: 16535 - RNA, 19 nt, artificial
  Chemically synthesized
uauaaaaaguguuucugug

SEQ ID NO: 16536 - RNA, 19 nt, artificial
  Chemically synthesized
ucagcaaccgcacucauca

SEQ ID NO: 16537 - RNA, 19 nt, artificial
  Chemically synthesized
uuaauaggaggucaggaug

SEQ ID NO: 16538 - RNA, 19 nt, artificial
  Chemically synthesized
ugaaguuguacugacuccg

SEQ ID NO: 16539 - RNA, 19 nt, artificial
  Chemically synthesized
aguguuucugugauucuuc

SEQ ID NO: 16540 - RNA, 19 nt, artificial
  Chemically synthesized
ucugcgaugaaguuguacu

SEQ ID NO: 16541 - RNA, 19 nt, artificial
  Chemically synthesized
uauucauucugugaccuca

SEQ ID NO: 16542 - RNA, 19 nt, artificial
  Chemically synthesized
uugcuagguauaauuuuau

SEQ ID NO: 16543 - RNA, 19 nt, artificial
  Chemically synthesized
uccagcugugaccuucaug

SEQ ID NO: 16544 - RNA, 19 nt, artificial
  Chemically synthesized
uauaauauguugcuaggua

SEQ ID NO: 16545 - RNA, 19 nt, artificial
  Chemically synthesized
uacagcuuuaccucuagcc

SEQ ID NO: 16546 - RNA, 19 nt, artificial
  Chemically synthesized
ugauucuucagagcccagg

SEQ ID NO: 16547 - RNA, 19 nt, artificial
  Chemically synthesized
ucagaagggauggcaaagg

SEQ ID NO: 16548 - RNA, 19 nt, artificial
  Chemically synthesized
uucuccaccacaucugcga

SEQ ID NO: 16549 - RNA, 19 nt, artificial
  Chemically synthesized
acugggauuggguucgaac

SEQ ID NO: 16550 - RNA, 19 nt, artificial
  Chemically synthesized
guucauuuaacccucuguc

SEQ ID NO: 16551 - RNA, 19 nt, artificial
  Chemically synthesized
ugucuucuccaccacaucu

SEQ ID NO: 16552 - RNA, 19 nt, artificial
  Chemically synthesized
caucagaccaugcacuaug

SEQ ID NO: 16553 - RNA, 19 nt, artificial
  Chemically synthesized
uuuaauaggaggucaggau

SEQ ID NO: 16554 - RNA, 19 nt, artificial
  Chemically synthesized
uaauaggaggucaggaugg

SEQ ID NO: 16555 - RNA, 19 nt, artificial
  Chemically synthesized
aucuauucauucugugacc

SEQ ID NO: 16556 - RNA, 19 nt, artificial
  Chemically synthesized
cuuggugaucuauucauuc

SEQ ID NO: 16557 - RNA, 19 nt, artificial
  Chemically synthesized
ucuuugacucgcaccggua

SEQ ID NO: 16558 - RNA, 19 nt, artificial
  Chemically synthesized
cauuuaacccucugucucg

SEQ ID NO: 16559 - RNA, 19 nt, artificial
  Chemically synthesized
aacaucuucagcauuuugu

SEQ ID NO: 16560 - RNA, 19 nt, artificial
  Chemically synthesized
aacaacaacagcacugccc

SEQ ID NO: 16561 - RNA, 19 nt, artificial
  Chemically synthesized
ugaagcagcaguuauggag

SEQ ID NO: 16562 - RNA, 19 nt, artificial
  Chemically synthesized
ucgaacagcuucauaaaca

SEQ ID NO: 16563 - RNA, 19 nt, artificial
  Chemically synthesized
uucgaacagcuucauaaac

SEQ ID NO: 16564 - RNA, 19 nt, artificial
  Chemically synthesized
caguuauggagcuucccuc

SEQ ID NO: 16565 - RNA, 19 nt, artificial
  Chemically synthesized
ucccaccucauuuuuuacu

SEQ ID NO: 16566 - RNA, 19 nt, artificial
  Chemically synthesized
uucuucagagcccaggagu

SEQ ID NO: 16567 - RNA, 19 nt, artificial
  Chemically synthesized
ucuucuccaccacaucugc

SEQ ID NO: 16568 - RNA, 19 nt, artificial
  Chemically synthesized
auaaacaucuucagcauuu

SEQ ID NO: 16569 - RNA, 19 nt, artificial
  Chemically synthesized
uccugaagcagcaguuaug

SEQ ID NO: 16570 - RNA, 19 nt, artificial
  Chemically synthesized
uaggaggucaggaugguca

SEQ ID NO: 16571 - RNA, 19 nt, artificial
  Chemically synthesized
ucacauauaaggucagugu

SEQ ID NO: 16572 - RNA, 19 nt, artificial
  Chemically synthesized
uaaggucaguguuucucgu

SEQ ID NO: 16573 - RNA, 19 nt, artificial
  Chemically synthesized
agaccaugcacuauggaug

SEQ ID NO: 16574 - RNA, 19 nt, artificial
  Chemically synthesized
uuuucuuuaauaggagguc

SEQ ID NO: 16575 - RNA, 19 nt, artificial
  Chemically synthesized
augaaguuguacugacucc

SEQ ID NO: 16576 - RNA, 19 nt, artificial
  Chemically synthesized
uguugcuagguauaauuuu

SEQ ID NO: 16577 - RNA, 19 nt, artificial
  Chemically synthesized
acucuuggugaucuauuca

SEQ ID NO: 16578 - RNA, 19 nt, artificial
  Chemically synthesized
aaccgcacucaucagacca

SEQ ID NO: 16579 - RNA, 19 nt, artificial
  Chemically synthesized
aaggucaguguuucucguc

SEQ ID NO: 16580 - RNA, 19 nt, artificial
  Chemically synthesized
accuucaugguguucacuc

SEQ ID NO: 16581 - RNA, 19 nt, artificial
  Chemically synthesized
uaauauguugcuagguaua

SEQ ID NO: 16582 - RNA, 19 nt, artificial
  Chemically synthesized
uguucacuccaaucaccuc

SEQ ID NO: 16583 - RNA, 19 nt, artificial
  Chemically synthesized
aaaagauccagcccuccca

SEQ ID NO: 16584 - RNA, 19 nt, artificial
  Chemically synthesized
auauaaggucaguguuucu

SEQ ID NO: 16585 - RNA, 19 nt, artificial
  Chemically synthesized
auauaaaaaguguuucugu

SEQ ID NO: 16586 - RNA, 19 nt, artificial
  Chemically synthesized
ugggauuggguucgaacag

SEQ ID NO: 16587 - RNA, 19 nt, artificial
  Chemically synthesized
ugcacuauggauguggaac

SEQ ID NO: 16588 - RNA, 19 nt, artificial
  Chemically synthesized
uccggaggaggaauucuuc

SEQ ID NO: 16589 - RNA, 19 nt, artificial
  Chemically synthesized
auaauauguugcuagguau

SEQ ID NO: 16590 - RNA, 19 nt, artificial
  Chemically synthesized
ucuuggugaucuauucauu

SEQ ID NO: 16591 - RNA, 19 nt, artificial
  Chemically synthesized
ucagggucagcaucaucac

SEQ ID NO: 16592 - RNA, 19 nt, artificial
  Chemically synthesized
auaaaaaguguuucuguga

SEQ ID NO: 16593 - RNA, 19 nt, artificial
  Chemically synthesized
acucaucagaccaugcacu

SEQ ID NO: 16594 - RNA, 19 nt, artificial
  Chemically synthesized
acucagggucagcaucauc

SEQ ID NO: 16595 - RNA, 19 nt, artificial
  Chemically synthesized
aucagaagggauggcaaag

SEQ ID NO: 16596 - RNA, 19 nt, artificial
  Chemically synthesized
uccaggaucucgauauaga

SEQ ID NO: 16597 - RNA, 19 nt, artificial
  Chemically synthesized
uuacuauaauauguugcua

SEQ ID NO: 16598 - RNA, 19 nt, artificial
  Chemically synthesized
uggauguggaacugucaag

SEQ ID NO: 16599 - RNA, 19 nt, artificial
  Chemically synthesized
aacggguuccagaguucuc

SEQ ID NO: 16600 - RNA, 19 nt, artificial
  Chemically synthesized
ucucgaagacgaucagaag

SEQ ID NO: 16601 - RNA, 19 nt, artificial
  Chemically synthesized
guguucacuccaaucaccu

SEQ ID NO: 16602 - RNA, 19 nt, artificial
  Chemically synthesized
augggcguuggugacaaug

SEQ ID NO: 16603 - RNA, 19 nt, artificial
  Chemically synthesized
ccacgaugcagaaacucuc

SEQ ID NO: 16604 - RNA, 19 nt, artificial
  Chemically synthesized
ugacugcuuccuacugcuc

SEQ ID NO: 16605 - RNA, 19 nt, artificial
  Chemically synthesized
uguggaacugucaagcaga

SEQ ID NO: 16606 - RNA, 19 nt, artificial
  Chemically synthesized
cuauucauucugugaccuc

SEQ ID NO: 16607 - RNA, 19 nt, artificial
  Chemically synthesized
guaucuguagccaagcaug

SEQ ID NO: 16608 - RNA, 19 nt, artificial
  Chemically synthesized
agcuucauaaacaucuuca

SEQ ID NO: 16609 - RNA, 19 nt, artificial
  Chemically synthesized
ugccauuaccucaggagcu

SEQ ID NO: 16610 - RNA, 19 nt, artificial
  Chemically synthesized
ugacuaacugcccacaaaa

SEQ ID NO: 16611 - RNA, 19 nt, artificial
  Chemically synthesized
ugguguucacuccaaucac

SEQ ID NO: 16612 - RNA, 19 nt, artificial
  Chemically synthesized
uuaccucaggagcuuacca

SEQ ID NO: 16613 - RNA, 19 nt, artificial
  Chemically synthesized
gucuucuccaccacaucug

SEQ ID NO: 16614 - RNA, 19 nt, artificial
  Chemically synthesized
aaagacuccgccuucccaa

SEQ ID NO: 16615 - RNA, 19 nt, artificial
  Chemically synthesized
auguugcuagguauaauuu

SEQ ID NO: 16616 - RNA, 19 nt, artificial
  Chemically synthesized
ucaugguguucacuccaau

SEQ ID NO: 16617 - RNA, 19 nt, artificial
  Chemically synthesized
caugguguucacuccaauc

SEQ ID NO: 16618 - RNA, 19 nt, artificial
  Chemically synthesized
uaaaaaguguuucugugau

SEQ ID NO: 16619 - RNA, 19 nt, artificial
  Chemically synthesized
cauauaaggucaguguuuc

SEQ ID NO: 16620 - RNA, 19 nt, artificial
  Chemically synthesized
cugggauuggguucgaaca

SEQ ID NO: 16621 - RNA, 19 nt, artificial
  Chemically synthesized
uugacucgcaccgguaaga

SEQ ID NO: 16622 - RNA, 19 nt, artificial
  Chemically synthesized
auauguugcuagguauaau

SEQ ID NO: 16623 - RNA, 19 nt, artificial
  Chemically synthesized
auauagaccacggcaggug

SEQ ID NO: 16624 - RNA, 19 nt, artificial
  Chemically synthesized
guuuucacccuccuucaga

SEQ ID NO: 16625 - RNA, 19 nt, artificial
  Chemically synthesized
ugucaguaucuguagccaa

SEQ ID NO: 16626 - RNA, 19 nt, artificial
  Chemically synthesized
gauuccagcugugaccuuc

SEQ ID NO: 16627 - RNA, 19 nt, artificial
  Chemically synthesized
uguuucugugauucuucag

SEQ ID NO: 16628 - RNA, 19 nt, artificial
  Chemically synthesized
ugaauccucagcguugcga

SEQ ID NO: 16629 - RNA, 19 nt, artificial
  Chemically synthesized
aaguguuucugugauucuu

SEQ ID NO: 16630 - RNA, 19 nt, artificial
  Chemically synthesized
gaucuauucauucugugac

SEQ ID NO: 16631 - RNA, 19 nt, artificial
  Chemically synthesized
acuaacugcccacaaaaga

SEQ ID NO: 16632 - RNA, 19 nt, artificial
  Chemically synthesized
auggauguggaacugucaa

SEQ ID NO: 16633 - RNA, 19 nt, artificial
  Chemically synthesized
ucagaaguuccugacguca

SEQ ID NO: 16634 - RNA, 19 nt, artificial
  Chemically synthesized
uggaacugucaagcagaag

SEQ ID NO: 16635 - RNA, 19 nt, artificial
  Chemically synthesized
gucaguaucuguagccaag

SEQ ID NO: 16636 - RNA, 19 nt, artificial
  Chemically synthesized
ucauacgugucgccgcuua

SEQ ID NO: 16637 - RNA, 19 nt, artificial
  Chemically synthesized
uuccagcugugaccuucau

SEQ ID NO: 16638 - RNA, 19 nt, artificial
  Chemically synthesized
cuucaugguguucacucca

SEQ ID NO: 16639 - RNA, 19 nt, artificial
  Chemically synthesized
uagcagucucacacggacu

SEQ ID NO: 16640 - RNA, 19 nt, artificial
  Chemically synthesized
aaaguguuucugugauucu

SEQ ID NO: 16641 - RNA, 19 nt, artificial
  Chemically synthesized
aguaucuguagccaagcau

SEQ ID NO: 16642 - RNA, 19 nt, artificial
  Chemically synthesized
ucuuuaauaggaggucagg

SEQ ID NO: 16643 - RNA, 19 nt, artificial
  Chemically synthesized
auuuucuuuaauaggaggu

SEQ ID NO: 16644 - RNA, 19 nt, artificial
  Chemically synthesized
accacaaagagcagcaccu

SEQ ID NO: 16645 - RNA, 19 nt, artificial
  Chemically synthesized
cucgauauagaccacggca

SEQ ID NO: 16646 - RNA, 19 nt, artificial
  Chemically synthesized
guuauggagcuucccucag

SEQ ID NO: 16647 - RNA, 19 nt, artificial
  Chemically synthesized
agcaggagccucauacucu

SEQ ID NO: 16648 - RNA, 19 nt, artificial
  Chemically synthesized
ugugaccuucaugguguuc

SEQ ID NO: 16649 - RNA, 19 nt, artificial
  Chemically synthesized
aauccugagccguucgaga

SEQ ID NO: 16650 - RNA, 19 nt, artificial
  Chemically synthesized
acgaaugccgggaauugug

SEQ ID NO: 16651 - RNA, 19 nt, artificial
  Chemically synthesized
ucaucagaccaugcacuau

SEQ ID NO: 16652 - RNA, 19 nt, artificial
  Chemically synthesized
ugcugucuucuccaccaca

SEQ ID NO: 16653 - RNA, 19 nt, artificial
  Chemically synthesized
agaaguuuucacccuccuu

SEQ ID NO: 16654 - RNA, 19 nt, artificial
  Chemically synthesized
ucauuuucuuuaauaggag

SEQ ID NO: 16655 - RNA, 19 nt, artificial
  Chemically synthesized
aaucagagcaggagccuca

SEQ ID NO: 16656 - RNA, 19 nt, artificial
  Chemically synthesized
ccaauggccaaaaucacau

SEQ ID NO: 16657 - RNA, 19 nt, artificial
  Chemically synthesized
ugcuagguauaauuuuauu

SEQ ID NO: 16658 - RNA, 19 nt, artificial
  Chemically synthesized
acagcuuuaccucuagccu

SEQ ID NO: 16659 - RNA, 19 nt, artificial
  Chemically synthesized
ugcacugccaacugggauu

SEQ ID NO: 16660 - RNA, 19 nt, artificial
  Chemically synthesized
ucauacucuuggugaucua

SEQ ID NO: 16661 - RNA, 19 nt, artificial
  Chemically synthesized
ugucagcaaccgcacucau

SEQ ID NO: 16662 - RNA, 19 nt, artificial
  Chemically synthesized
acauauaaggucaguguuu

SEQ ID NO: 16663 - RNA, 19 nt, artificial
  Chemically synthesized
accaagaaacccaugucag

SEQ ID NO: 16664 - RNA, 19 nt, artificial
  Chemically synthesized
agcucauuuucuuuaauag

SEQ ID NO: 16665 - RNA, 19 nt, artificial
  Chemically synthesized
ugggaaucuuugcucccag

SEQ ID NO: 16666 - RNA, 19 nt, artificial
  Chemically synthesized
ccucauacucuuggugauc

SEQ ID NO: 16667 - RNA, 19 nt, artificial
  Chemically synthesized
cucgaagacgaucagaagg

SEQ ID NO: 16668 - RNA, 19 nt, artificial
  Chemically synthesized
acaacaacaacagcacugc

SEQ ID NO: 16669 - RNA, 19 nt, artificial
  Chemically synthesized
acugcuuccuacugcucgu

SEQ ID NO: 16670 - RNA, 19 nt, artificial
  Chemically synthesized
aauauguugcuagguauaa

SEQ ID NO: 16671 - RNA, 19 nt, artificial
  Chemically synthesized
aguuuucacccuccuucag

SEQ ID NO: 16672 - RNA, 19 nt, artificial
  Chemically synthesized
agaaccucagccagaaagg

SEQ ID NO: 16673 - RNA, 19 nt, artificial
  Chemically synthesized
ugaucuauucauucuguga

SEQ ID NO: 16674 - RNA, 19 nt, artificial
  Chemically synthesized
cucauuuucuuuaauagga

SEQ ID NO: 16675 - RNA, 19 nt, artificial
  Chemically synthesized
gcaguuauggagcuucccu

SEQ ID NO: 16676 - RNA, 19 nt, artificial
  Chemically synthesized
cuuagcagucucacacgga

SEQ ID NO: 16677 - RNA, 19 nt, artificial
  Chemically synthesized
uaaacaucuucagcauuuu

SEQ ID NO: 16678 - RNA, 19 nt, artificial
  Chemically synthesized
aguuauggagcuucccuca

SEQ ID NO: 16679 - RNA, 19 nt, artificial
  Chemically synthesized
agcaguuauggagcuuccc

SEQ ID NO: 16680 - RNA, 19 nt, artificial
  Chemically synthesized
cagaaccucagccagaaag

SEQ ID NO: 16681 - RNA, 19 nt, artificial
  Chemically synthesized
ccagcugucaguaucugua

SEQ ID NO: 16682 - RNA, 19 nt, artificial
  Chemically synthesized
ccaagcaugggaaucuuug

SEQ ID NO: 16683 - RNA, 19 nt, artificial
  Chemically synthesized
gcucauuuucuuuaauagg

SEQ ID NO: 16684 - RNA, 19 nt, artificial
  Chemically synthesized
aguccuucagaagugcacg

SEQ ID NO: 16685 - RNA, 19 nt, artificial
  Chemically synthesized
cauacucuuggugaucuau

SEQ ID NO: 16686 - RNA, 19 nt, artificial
  Chemically synthesized
gcuagguauaauuuuauuu

SEQ ID NO: 16687 - RNA, 19 nt, artificial
  Chemically synthesized
uccugagccguucgagaua

SEQ ID NO: 16688 - RNA, 19 nt, artificial
  Chemically synthesized
aaugccgggaauugugguc

SEQ ID NO: 16689 - RNA, 19 nt, artificial
  Chemically synthesized
accacaucugcgaugaagu

SEQ ID NO: 16690 - RNA, 19 nt, artificial
  Chemically synthesized
augcagaaacucucgaaga

SEQ ID NO: 16691 - RNA, 19 nt, artificial
  Chemically synthesized
uggcagcagcucauuuucu

SEQ ID NO: 16692 - RNA, 19 nt, artificial
  Chemically synthesized
guugcuagguauaauuuua

SEQ ID NO: 16693 - RNA, 19 nt, artificial
  Chemically synthesized
ccaaaaucacaucaccagg

SEQ ID NO: 16694 - RNA, 19 nt, artificial
  Chemically synthesized
aggaaaucagagcaggagc

SEQ ID NO: 16695 - RNA, 19 nt, artificial
  Chemically synthesized
cucaucagaccaugcacua

SEQ ID NO: 16696 - RNA, 19 nt, artificial
  Chemically synthesized
uaccugaaguccuucagaa

SEQ ID NO: 16697 - RNA, 19 nt, artificial
  Chemically synthesized
gucugaauccucagcguug

SEQ ID NO: 16698 - RNA, 19 nt, artificial
  Chemically synthesized
cucuuggugaucuauucau

SEQ ID NO: 16699 - RNA, 19 nt, artificial
  Chemically synthesized
aauccucagcguugcgaug

SEQ ID NO: 16700 - RNA, 19 nt, artificial
  Chemically synthesized
ugccaacugggauuggguu

SEQ ID NO: 16701 - RNA, 19 nt, artificial
  Chemically synthesized
gcaaaggagauuccagcug

SEQ ID NO: 16702 - RNA, 19 nt, artificial
  Chemically synthesized
aggagauuccagcugugac

SEQ ID NO: 16703 - RNA, 19 nt, artificial
  Chemically synthesized
cuauaauauguugcuaggu

SEQ ID NO: 16704 - RNA, 19 nt, artificial
  Chemically synthesized
cagcagcucauuuucuuua

SEQ ID NO: 16705 - RNA, 19 nt, artificial
  Chemically synthesized
caagaaacccaugucagca

SEQ ID NO: 16706 - RNA, 19 nt, artificial
  Chemically synthesized
aucugcgaugaaguuguac

SEQ ID NO: 16707 - RNA, 19 nt, artificial
  Chemically synthesized
acugucaagcagaaguuuu

SEQ ID NO: 16708 - RNA, 19 nt, artificial
  Chemically synthesized
cccaauggccaaaaucaca

SEQ ID NO: 16709 - RNA, 19 nt, artificial
  Chemically synthesized
ugcagaaacucucgaagac

SEQ ID NO: 16710 - RNA, 19 nt, artificial
  Chemically synthesized
cacucaucagaccaugcac

SEQ ID NO: 16711 - RNA, 19 nt, artificial
  Chemically synthesized
ggaacugucaagcagaagu

SEQ ID NO: 16712 - RNA, 19 nt, artificial
  Chemically synthesized
agaagggauggcaaaggag

SEQ ID NO: 16713 - RNA, 19 nt, artificial
  Chemically synthesized
cuuugacucgcaccgguaa

SEQ ID NO: 16714 - RNA, 19 nt, artificial
  Chemically synthesized
cucucgaagacgaucagaa

SEQ ID NO: 16715 - RNA, 19 nt, artificial
  Chemically synthesized
cugucuucuccaccacauc

SEQ ID NO: 16716 - RNA, 19 nt, artificial
  Chemically synthesized
cacaucugcgaugaaguug

SEQ ID NO: 16717 - RNA, 19 nt, artificial
  Chemically synthesized
agcugugaccuucauggug

SEQ ID NO: 16718 - RNA, 19 nt, artificial
  Chemically synthesized
uggucagcuccaguaucuc

SEQ ID NO: 16719 - RNA, 19 nt, artificial
  Chemically synthesized
ucauaaacaucuucagcau

SEQ ID NO: 16720 - RNA, 19 nt, artificial
  Chemically synthesized
accucaggagcuuaccaag

SEQ ID NO: 16721 - RNA, 19 nt, artificial
  Chemically synthesized
cagaaguuuucacccuccu

SEQ ID NO: 16722 - RNA, 19 nt, artificial
  Chemically synthesized
ugggcguuggugacaauga

SEQ ID NO: 16723 - RNA, 19 nt, artificial
  Chemically synthesized
cauuuuguaccaucugcuc

SEQ ID NO: 16724 - RNA, 19 nt, artificial
  Chemically synthesized
accugacuaacugcccaca

SEQ ID NO: 16725 - RNA, 19 nt, artificial
  Chemically synthesized
cucccaccucauuuuuuac

SEQ ID NO: 16726 - RNA, 19 nt, artificial
  Chemically synthesized
gcagaaacucucgaagacg

SEQ ID NO: 16727 - RNA, 19 nt, artificial
  Chemically synthesized
aaaaaguguuucugugauu

SEQ ID NO: 16728 - RNA, 19 nt, artificial
  Chemically synthesized
cuaacugcccacaaaagau

SEQ ID NO: 16729 - RNA, 19 nt, artificial
  Chemically synthesized
cacaaagagcagcaccuga

SEQ ID NO: 16730 - RNA, 19 nt, artificial
  Chemically synthesized
gauucuucagagcccagga

SEQ ID NO: 16731 - RNA, 19 nt, artificial
  Chemically synthesized
ggaggaauucuucuuuucc

SEQ ID NO: 16732 - RNA, 19 nt, artificial
  Chemically synthesized
ucuccaccacaucugcgau

SEQ ID NO: 16733 - RNA, 19 nt, artificial
  Chemically synthesized
ucaggagcuuaccaagaaa

SEQ ID NO: 16734 - RNA, 19 nt, artificial
  Chemically synthesized
ugauuccggaggaggaauu

SEQ ID NO: 16735 - RNA, 19 nt, artificial
  Chemically synthesized
accugaaguccuucagaag

SEQ ID NO: 16736 - RNA, 19 nt, artificial
  Chemically synthesized
gccagcugucaguaucugu

SEQ ID NO: 16737 - RNA, 19 nt, artificial
  Chemically synthesized
gaugaaguuguacugacuc

SEQ ID NO: 16738 - RNA, 19 nt, artificial
  Chemically synthesized
agccucauacucuugguga

SEQ ID NO: 16739 - RNA, 19 nt, artificial
  Chemically synthesized
guccaggaucucgauauag

SEQ ID NO: 16740 - RNA, 19 nt, artificial
  Chemically synthesized
aucagagcaggagccucau

SEQ ID NO: 16741 - RNA, 19 nt, artificial
  Chemically synthesized
caauggccaaaaucacauc

SEQ ID NO: 16742 - RNA, 19 nt, artificial
  Chemically synthesized
gaugcagaaacucucgaag

SEQ ID NO: 16743 - RNA, 19 nt, artificial
  Chemically synthesized
acaucuucagcauuuugua

SEQ ID NO: 16744 - RNA, 19 nt, artificial
  Chemically synthesized
cccacgaugcagaaacucu

SEQ ID NO: 16745 - RNA, 19 nt, artificial
  Chemically synthesized
cagcauuuuguaccaucug

SEQ ID NO: 16746 - RNA, 19 nt, artificial
  Chemically synthesized
accucauuuuuuacuauaa

SEQ ID NO: 16747 - RNA, 19 nt, artificial
  Chemically synthesized
gagauuccagcugugaccu

SEQ ID NO: 16748 - RNA, 19 nt, artificial
  Chemically synthesized
ccaagaaacccaugucagc

SEQ ID NO: 16749 - RNA, 19 nt, artificial
  Chemically synthesized
accgcacucaucagaccau

SEQ ID NO: 16750 - RNA, 19 nt, artificial
  Chemically synthesized
gccaaaaucacaucaccag

SEQ ID NO: 16751 - RNA, 19 nt, artificial
  Chemically synthesized
ggauguggaacugucaagc

SEQ ID NO: 16752 - RNA, 19 nt, artificial
  Chemically synthesized
caggaucucgauauagacc

SEQ ID NO: 16753 - RNA, 19 nt, artificial
  Chemically synthesized
caucuucagcauuuuguac

SEQ ID NO: 16754 - RNA, 19 nt, artificial
  Chemically synthesized
gggauggcaaaggagauuc

SEQ ID NO: 16755 - RNA, 19 nt, artificial
  Chemically synthesized
ccaggaucucgauauagac

SEQ ID NO: 16756 - RNA, 19 nt, artificial
  Chemically synthesized
agcccucccaccucauuuu

SEQ ID NO: 16757 - RNA, 19 nt, artificial
  Chemically synthesized
cccacaacaacaacagcac

SEQ ID NO: 16758 - RNA, 19 nt, artificial
  Chemically synthesized
ugcgaugaaguuguacuga

SEQ ID NO: 16759 - RNA, 19 nt, artificial
  Chemically synthesized
gauggcagcagcucauuuu

SEQ ID NO: 16760 - RNA, 19 nt, artificial
  Chemically synthesized
cagcuuuaccucuagccuu

SEQ ID NO: 16761 - RNA, 19 nt, artificial
  Chemically synthesized
auccugagccguucgagau

SEQ ID NO: 16762 - RNA, 19 nt, artificial
  Chemically synthesized
acaaaagauggcagcagcu

SEQ ID NO: 16763 - RNA, 19 nt, artificial
  Chemically synthesized
aggccagcugucaguaucu

SEQ ID NO: 16764 - RNA, 19 nt, artificial
  Chemically synthesized
gaaacccaugucagcaacc

SEQ ID NO: 16765 - RNA, 19 nt, artificial
  Chemically synthesized
cagcucauuuucuuuaaua

SEQ ID NO: 16766 - RNA, 19 nt, artificial
  Chemically synthesized
accucagccagaaaggcaa

SEQ ID NO: 16767 - RNA, 19 nt, artificial
  Chemically synthesized
cagaaguuccugacgucag

SEQ ID NO: 16768 - RNA, 19 nt, artificial
  Chemically synthesized
aggagcuuaccaagaaacc

SEQ ID NO: 16769 - RNA, 19 nt, artificial
  Chemically synthesized
agagcagcaccugacuaac

SEQ ID NO: 16770 - RNA, 19 nt, artificial
  Chemically synthesized
ggccaaaaucacaucacca

SEQ ID NO: 16771 - RNA, 19 nt, artificial
  Chemically synthesized
acuauggauguggaacugu

SEQ ID NO: 16772 - RNA, 19 nt, artificial
  Chemically synthesized
agcaaccgcacucaucaga

SEQ ID NO: 16773 - RNA, 19 nt, artificial
  Chemically synthesized
caaaagauggcagcagcuc

SEQ ID NO: 16774 - RNA, 19 nt, artificial
  Chemically synthesized
guagccaagcaugggaauc

SEQ ID NO: 16775 - RNA, 19 nt, artificial
  Chemically synthesized
aagagcagcaccugacuaa

SEQ ID NO: 16776 - RNA, 19 nt, artificial
  Chemically synthesized
gaagcagcaguuauggagc

SEQ ID NO: 16777 - RNA, 19 nt, artificial
  Chemically synthesized
ucagagcaggagccucaua

SEQ ID NO: 16778 - RNA, 19 nt, artificial
  Chemically synthesized
gcagcaguuauggagcuuc

SEQ ID NO: 16779 - RNA, 19 nt, artificial
  Chemically synthesized
gauggucagcuccaguauc

SEQ ID NO: 16780 - RNA, 19 nt, artificial
  Chemically synthesized
uggguucgaacagcuucau

SEQ ID NO: 16781 - RNA, 19 nt, artificial
  Chemically synthesized
caggagcuuaccaagaaac

SEQ ID NO: 16782 - RNA, 19 nt, artificial
  Chemically synthesized
aggauggucagcuccagua

SEQ ID NO: 16783 - RNA, 19 nt, artificial
  Chemically synthesized
ggauuggguucgaacagcu

SEQ ID NO: 16784 - RNA, 19 nt, artificial
  Chemically synthesized
agcuuuaccucuagccuuu

SEQ ID NO: 16785 - RNA, 19 nt, artificial
  Chemically synthesized
agauggcagcagcucauuu

SEQ ID NO: 16786 - RNA, 19 nt, artificial
  Chemically synthesized
caccucauuuuuuacuaua

SEQ ID NO: 16787 - RNA, 19 nt, artificial
  Chemically synthesized
gugauucuucagagcccag

SEQ ID NO: 16788 - RNA, 19 nt, artificial
  Chemically synthesized
gauuggguucgaacagcuu

SEQ ID NO: 16789 - RNA, 19 nt, artificial
  Chemically synthesized
agaaacccaugucagcaac

SEQ ID NO: 16790 - RNA, 19 nt, artificial
  Chemically synthesized
gguucgaacagcuucauaa

SEQ ID NO: 16791 - RNA, 19 nt, artificial
  Chemically synthesized
gcugugaccuucauggugu

SEQ ID NO: 16792 - RNA, 19 nt, artificial
  Chemically synthesized
cuuuaauaggaggucagga

SEQ ID NO: 16793 - RNA, 19 nt, artificial
  Chemically synthesized
cacgaaugccgggaauugu

SEQ ID NO: 16794 - RNA, 19 nt, artificial
  Chemically synthesized
gguuccagaguucucugag

SEQ ID NO: 16795 - RNA, 19 nt, artificial
  Chemically synthesized
agcagcucauuuucuuuaa

SEQ ID NO: 16796 - RNA, 19 nt, artificial
  Chemically synthesized
gaagggauggcaaaggaga

SEQ ID NO: 16797 - RNA, 19 nt, artificial
  Chemically synthesized
ccucccaccucauuuuuua

SEQ ID NO: 16798 - RNA, 19 nt, artificial
  Chemically synthesized
gugacugcuuccuacugcu

SEQ ID NO: 16799 - RNA, 19 nt, artificial
  Chemically synthesized
ucagaaccucagccagaaa

SEQ ID NO: 16800 - RNA, 19 nt, artificial
  Chemically synthesized
ccugaagcagcaguuaugg

SEQ ID NO: 16801 - RNA, 19 nt, artificial
  Chemically synthesized
ccacugguucauuuaaccc

SEQ ID NO: 16802 - RNA, 19 nt, artificial
  Chemically synthesized
aggcaaggaggaaaucaga

SEQ ID NO: 16803 - RNA, 19 nt, artificial
  Chemically synthesized
aacugggauuggguucgaa

SEQ ID NO: 16804 - RNA, 19 nt, artificial
  Chemically synthesized
gaaacucucgaagacgauc

SEQ ID NO: 16805 - RNA, 19 nt, artificial
  Chemically synthesized
ccugaaguccuucagaagu

SEQ ID NO: 16806 - RNA, 19 nt, artificial
  Chemically synthesized
cacauauaaggucaguguu

SEQ ID NO: 16807 - RNA, 19 nt, artificial
  Chemically synthesized
agcuuaccaagaaacccau

SEQ ID NO: 16808 - RNA, 19 nt, artificial
  Chemically synthesized
aagggauggcaaaggagau

SEQ ID NO: 16809 - RNA, 19 nt, artificial
  Chemically synthesized
gaacagcuucauaaacauc

SEQ ID NO: 16810 - RNA, 19 nt, artificial
  Chemically synthesized
ucagaccaugcacuaugga

SEQ ID NO: 16811 - RNA, 19 nt, artificial
  Chemically synthesized
cagaaacucucgaagacga

SEQ ID NO: 16812 - RNA, 19 nt, artificial
  Chemically synthesized
ccggaggaggaauucuucu

SEQ ID NO: 16813 - RNA, 19 nt, artificial
  Chemically synthesized
gcauuuuguaccaucugcu

SEQ ID NO: 16814 - RNA, 19 nt, artificial
  Chemically synthesized
cagcugucaguaucuguag

SEQ ID NO: 16815 - RNA, 19 nt, artificial
  Chemically synthesized
agggauggcaaaggagauu

SEQ ID NO: 16816 - RNA, 19 nt, artificial
  Chemically synthesized
ccucauuuuuuacuauaau

SEQ ID NO: 16817 - RNA, 19 nt, artificial
  Chemically synthesized
acagcuucauaaacaucuu

SEQ ID NO: 16818 - RNA, 19 nt, artificial
  Chemically synthesized
cccaccucauuuuuuacua

SEQ ID NO: 16819 - RNA, 19 nt, artificial
  Chemically synthesized
cucagaaccucagccagaa

SEQ ID NO: 16820 - RNA, 19 nt, artificial
  Chemically synthesized
aacugucaagcagaaguuu

SEQ ID NO: 16821 - RNA, 19 nt, artificial
  Chemically synthesized
ccugacuaacugcccacaa

SEQ ID NO: 16822 - RNA, 19 nt, artificial
  Chemically synthesized
cugacuaacugcccacaaa

SEQ ID NO: 16823 - RNA, 19 nt, artificial
  Chemically synthesized
cauaaacaucuucagcauu

SEQ ID NO: 16824 - RNA, 19 nt, artificial
  Chemically synthesized
gaaguuccugacgucagca

SEQ ID NO: 16825 - RNA, 19 nt, artificial
  Chemically synthesized
gguguucacuccaaucacc

SEQ ID NO: 16826 - RNA, 19 nt, artificial
  Chemically synthesized
agaaaggcaaggaggaaau

SEQ ID NO: 16827 - RNA, 19 nt, artificial
  Chemically synthesized
gacuaacugcccacaaaag

SEQ ID NO: 16828 - RNA, 19 nt, artificial
  Chemically synthesized
ggcaaggaggaaaucagag

SEQ ID NO: 16829 - RNA, 19 nt, artificial
  Chemically synthesized
caccacaucugcgaugaag

SEQ ID NO: 16830 - RNA, 19 nt, artificial
  Chemically synthesized
gcuuaccaagaaacccaug

SEQ ID NO: 16831 - RNA, 19 nt, artificial
  Chemically synthesized
agauuccagcugugaccuu

SEQ ID NO: 16832 - RNA, 19 nt, artificial
  Chemically synthesized
gcugucuucuccaccacau

SEQ ID NO: 16833 - RNA, 19 nt, artificial
  Chemically synthesized
agucugaauccucagcguu

SEQ ID NO: 16834 - RNA, 19 nt, artificial
  Chemically synthesized
cagaccaugcacuauggau

SEQ ID NO: 16835 - RNA, 19 nt, artificial
  Chemically synthesized
ccucaggagcuuaccaaga

SEQ ID NO: 16836 - RNA, 19 nt, artificial
  Chemically synthesized
uguagccaagcaugggaau

SEQ ID NO: 16837 - RNA, 19 nt, artificial
  Chemically synthesized
uggugacaaugagcccauc

SEQ ID NO: 16838 - RNA, 19 nt, artificial
  Chemically synthesized
gcuucauaaacaucuucag

SEQ ID NO: 16839 - RNA, 19 nt, artificial
  Chemically synthesized
cuguagccaagcaugggaa

SEQ ID NO: 16840 - RNA, 19 nt, artificial
  Chemically synthesized
acucucgaagacgaucaga

SEQ ID NO: 16841 - RNA, 19 nt, artificial
  Chemically synthesized
aagauggcagcagcucauu

SEQ ID NO: 16842 - RNA, 19 nt, artificial
  Chemically synthesized
cuccugaagcagcaguuau

SEQ ID NO: 16843 - RNA, 19 nt, artificial
  Chemically synthesized
gauacagcuuuaccucuag

SEQ ID NO: 16844 - RNA, 19 nt, artificial
  Chemically synthesized
cccucccaccucauuuuuu

SEQ ID NO: 16845 - RNA, 19 nt, artificial
  Chemically synthesized
gcacuauggauguggaacu

SEQ ID NO: 16846 - RNA, 19 nt, artificial
  Chemically synthesized
gaacggguuccagaguucu

SEQ ID NO: 16847 - RNA, 19 nt, artificial
  Chemically synthesized
caguaucuguagccaagca

SEQ ID NO: 16848 - RNA, 19 nt, artificial
  Chemically synthesized
agagcaggagccucauacu

SEQ ID NO: 16849 - RNA, 19 nt, artificial
  Chemically synthesized
caggagccucauacucuug

SEQ ID NO: 16850 - RNA, 19 nt, artificial
  Chemically synthesized
cggaggaggaauucuucuu

SEQ ID NO: 16851 - RNA, 19 nt, artificial
  Chemically synthesized
ggaggaggaauucuucuuu

SEQ ID NO: 16852 - RNA, 19 nt, artificial
  Chemically synthesized
cccacugguucauuuaacc

SEQ ID NO: 16853 - RNA, 19 nt, artificial
  Chemically synthesized
caaagagcagcaccugacu

SEQ ID NO: 16854 - RNA, 19 nt, artificial
  Chemically synthesized
cagaaaggcaaggaggaaa

SEQ ID NO: 16855 - RNA, 19 nt, artificial
  Chemically synthesized
aaagagcagcaccugacua

SEQ ID NO: 16856 - RNA, 19 nt, artificial
  Chemically synthesized
gcacucaucagaccaugca

SEQ ID NO: 16857 - RNA, 19 nt, artificial
  Chemically synthesized
gguucauuuaacccucugu

SEQ ID NO: 16858 - RNA, 19 nt, artificial
  Chemically synthesized
accacaccacaaagagcag

SEQ ID NO: 16859 - RNA, 19 nt, artificial
  Chemically synthesized
gagccucauacucuuggug

SEQ ID NO: 16860 - RNA, 19 nt, artificial
  Chemically synthesized
ggagcuuaccaagaaaccc

SEQ ID NO: 16861 - RNA, 19 nt, artificial
  Chemically synthesized
gucagaaguuccugacguc

SEQ ID NO: 16862 - RNA, 19 nt, artificial
  Chemically synthesized
ccacaaaagauggcagcag

SEQ ID NO: 16863 - RNA, 19 nt, artificial
  Chemically synthesized
gaacugucaagcagaaguu

SEQ ID NO: 16864 - RNA, 19 nt, artificial
  Chemically synthesized
cucaggagcuuaccaagaa

SEQ ID NO: 16865 - RNA, 19 nt, artificial
  Chemically synthesized
gaccaugcacuauggaugu

SEQ ID NO: 16866 - RNA, 19 nt, artificial
  Chemically synthesized
augcacuauggauguggaa

SEQ ID NO: 16867 - RNA, 19 nt, artificial
  Chemically synthesized
caugcacuauggaugugga

SEQ ID NO: 16868 - RNA, 19 nt, artificial
  Chemically synthesized
guucgaacagcuucauaaa

SEQ ID NO: 16869 - RNA, 19 nt, artificial
  Chemically synthesized
ccacaacaacaacagcacu

SEQ ID NO: 16870 - RNA, 19 nt, artificial
  Chemically synthesized
ggugaucuauucauucugu

SEQ ID NO: 16871 - RNA, 19 nt, artificial
  Chemically synthesized
agaggccagcugucaguau

SEQ ID NO: 16872 - RNA, 19 nt, artificial
  Chemically synthesized
ggauacagcuuuaccucua

SEQ ID NO: 16873 - RNA, 19 nt, artificial
  Chemically synthesized
caacugggauuggguucga

SEQ ID NO: 16874 - RNA, 19 nt, artificial
  Chemically synthesized
gguaccugaaguccuucag

SEQ ID NO: 16875 - RNA, 19 nt, artificial
  Chemically synthesized
gcaggagccucauacucuu

SEQ ID NO: 16876 - RNA, 19 nt, artificial
  Chemically synthesized
ggucagaaguuccugacgu

SEQ ID NO: 16877 - RNA, 19 nt, artificial
  Chemically synthesized
ccauuaccucaggagcuua

SEQ ID NO: 16878 - RNA, 19 nt, artificial
  Chemically synthesized
acaugggcguuggugacaa

SEQ ID NO: 16879 - RNA, 19 nt, artificial
  Chemically synthesized
guaccugaaguccuucaga

SEQ ID NO: 16880 - RNA, 19 nt, artificial
  Chemically synthesized
gaauccucagcguugcgau

SEQ ID NO: 16881 - RNA, 19 nt, artificial
  Chemically synthesized
cgguaccugaaguccuuca

SEQ ID NO: 16882 - RNA, 19 nt, artificial
  Chemically synthesized
gaggaggaauucuucuuuu

SEQ ID NO: 16883 - RNA, 19 nt, artificial
  Chemically synthesized
acugauuccggaggaggaa

SEQ ID NO: 16884 - RNA, 19 nt, artificial
  Chemically synthesized
agccaagcaugggaaucuu

SEQ ID NO: 16885 - RNA, 19 nt, artificial
  Chemically synthesized
gaagacgaucagaagggau

SEQ ID NO: 16886 - RNA, 19 nt, artificial
  Chemically synthesized
gauuccggaggaggaauuc

SEQ ID NO: 16887 - RNA, 19 nt, artificial
  Chemically synthesized
gcagcagcucauuuucuuu

SEQ ID NO: 16888 - RNA, 19 nt, artificial
  Chemically synthesized
ggcaaaggagauuccagcu

SEQ ID NO: 16889 - RNA, 19 nt, artificial
  Chemically synthesized
ggcagcagcucauuuucuu

SEQ ID NO: 16890 - RNA, 19 nt, artificial
  Chemically synthesized
cugauuccggaggaggaau

SEQ ID NO: 16891 - RNA, 19 nt, artificial
  Chemically synthesized
gauggcaaaggagauucca

SEQ ID NO: 16892 - RNA, 19 nt, artificial
  Chemically synthesized
gaccuccagaguuuccaaa

SEQ ID NO: 16893 - RNA, 19 nt, artificial
  Chemically synthesized
gcgaugaaguuguacugac

SEQ ID NO: 16894 - RNA, 19 nt, artificial
  Chemically synthesized
gauguggaacugucaagca

SEQ ID NO: 16895 - RNA, 19 nt, artificial
  Chemically synthesized
gaaugccgggaauuguggu

SEQ ID NO: 16896 - RNA, 19 nt, artificial
  Chemically synthesized
cugugaccuucaugguguu

SEQ ID NO: 16897 - RNA, 19 nt, artificial
  Chemically synthesized
gauauagaccacggcaggu

SEQ ID NO: 16898 - RNA, 19 nt, artificial
  Chemically synthesized
guggaacugucaagcagaa

SEQ ID NO: 16899 - RNA, 19 nt, artificial
  Chemically synthesized
gcccucccaccucauuuuu

SEQ ID NO: 16900 - RNA, 19 nt, artificial
  Chemically synthesized
cgguccaggaucucgauau

SEQ ID NO: 16901 - RNA, 19 nt, artificial
  Chemically synthesized
cgaacagcuucauaaacau

SEQ ID NO: 16902 - RNA, 19 nt, artificial
  Chemically synthesized
gccauuaccucaggagcuu

SEQ ID NO: 16903 - RNA, 19 nt, artificial
  Chemically synthesized
agcagcaguuauggagcuu

SEQ ID NO: 16904 - RNA, 19 nt, artificial
  Chemically synthesized
cgaugaaguuguacugacu

SEQ ID NO: 16905 - RNA, 19 nt, artificial
  Chemically synthesized
ggguucgaacagcuucaua

SEQ ID NO: 16906 - RNA, 19 nt, artificial
  Chemically synthesized
cagcugugaccuucauggu

SEQ ID NO: 16907 - RNA, 19 nt, artificial
  Chemically synthesized
gaccuucaugguguucacu

SEQ ID NO: 16908 - RNA, 19 nt, artificial
  Chemically synthesized
cugaagcagcaguuaugga

SEQ ID NO: 16909 - RNA, 19 nt, artificial
  Chemically synthesized
cgaugcagaaacucucgaa

SEQ ID NO: 16910 - RNA, 19 nt, artificial
  Chemically synthesized
gggauacagcuuuaccucu

SEQ ID NO: 16911 - RNA, 19 nt, artificial
  Chemically synthesized
cuucagcauuuuguaccau

SEQ ID NO: 16912 - RNA, 19 nt, artificial
  Chemically synthesized
gagcagcaccugacuaacu

SEQ ID NO: 16913 - RNA, 19 nt, artificial
  Chemically synthesized
ggaggaaaucagagcagga

SEQ ID NO: 16914 - RNA, 19 nt, artificial
  Chemically synthesized
gaaguccuucagaagugca

SEQ ID NO: 16915 - RNA, 19 nt, artificial
  Chemically synthesized
gcagcucauuuucuuuaau

SEQ ID NO: 16916 - RNA, 19 nt, artificial
  Chemically synthesized
ccaccucauuuuuuacuau

SEQ ID NO: 16917 - RNA, 19 nt, artificial
  Chemically synthesized
gaaaggcaaggaggaaauc

SEQ ID NO: 16918 - RNA, 19 nt, artificial
  Chemically synthesized
agaaacucucgaagacgau

SEQ ID NO: 16919 - RNA, 19 nt, artificial
  Chemically synthesized
gcuuuaccucuagccuuuu

SEQ ID NO: 16920 - RNA, 19 nt, artificial
  Chemically synthesized
cccacaaaagauggcagca

SEQ ID NO: 16921 - RNA, 19 nt, artificial
  Chemically synthesized
cgaucagaagggauggcaa

SEQ ID NO: 16922 - RNA, 19 nt, artificial
  Chemically synthesized
ccacaucugcgaugaaguu

SEQ ID NO: 16923 - RNA, 19 nt, artificial
  Chemically synthesized
cgaagacgaucagaaggga

SEQ ID NO: 16924 - RNA, 19 nt, artificial
  Chemically synthesized
ggguuccagaguucucuga

SEQ ID NO: 16925 - RNA, 19 nt, artificial
  Chemically synthesized
gccaagcaugggaaucuuu

SEQ ID NO: 16926 - RNA, 19 nt, artificial
  Chemically synthesized
ggagccucauacucuuggu

SEQ ID NO: 16927 - RNA, 19 nt, artificial
  Chemically synthesized
gaucagaagggauggcaaa

SEQ ID NO: 16928 - RNA, 19 nt, artificial
  Chemically synthesized
gaaaucagagcaggagccu

SEQ ID NO: 16929 - RNA, 19 nt, artificial
  Chemically synthesized
gggucacauauaaggucag

SEQ ID NO: 16930 - RNA, 19 nt, artificial
  Chemically synthesized
ccagaaaggcaaggaggaa

SEQ ID NO: 16931 - RNA, 19 nt, artificial
  Chemically synthesized
ggauggucagcuccaguau

SEQ ID NO: 16932 - RNA, 19 nt, artificial
  Chemically synthesized
gccucauacucuuggugau

SEQ ID NO: 16933 - RNA, 19 nt, artificial
  Chemically synthesized
gacucagggucagcaucau

SEQ ID NO: 16934 - RNA, 19 nt, artificial
  Chemically synthesized
ggucacauauaaggucagu

SEQ ID NO: 16935 - RNA, 19 nt, artificial
  Chemically synthesized
ggaccuccagaguuuccaa

SEQ ID NO: 16936 - RNA, 19 nt, artificial
  Chemically synthesized
gcuccugaagcagcaguua

SEQ ID NO: 16937 - RNA, 19 nt, artificial
  Chemically synthesized
ggaucucgauauagaccac

SEQ ID NO: 16938 - RNA, 19 nt, artificial
  Chemically synthesized
caucugcgaugaaguugua

SEQ ID NO: 16939 - RNA, 19 nt, artificial
  Chemically synthesized
caugggcguuggugacaau

SEQ ID NO: 16940 - RNA, 19 nt, artificial
  Chemically synthesized
gguccaggaucucgauaua

SEQ ID NO: 16941 - RNA, 19 nt, artificial
  Chemically synthesized
ccaccacaucugcgaugaa

SEQ ID NO: 16942 - RNA, 19 nt, artificial
  Chemically synthesized
ggaacgaguggcgaaugau

SEQ ID NO: 16943 - RNA, 19 nt, artificial
  Chemically synthesized
gggcaaaaauacaguccaa

SEQ ID NO: 16944 - RNA, 19 nt, artificial
  Chemically synthesized
agaggaacgaguggcgaau

SEQ ID NO: 16945 - RNA, 19 nt, artificial
  Chemically synthesized
ggaguaucauuguuuuugu

SEQ ID NO: 16946 - RNA, 19 nt, artificial
  Chemically synthesized
gccucauugaauucgccua

SEQ ID NO: 16947 - RNA, 19 nt, artificial
  Chemically synthesized
ggcaaaaauacaguccaau

SEQ ID NO: 16948 - RNA, 19 nt, artificial
  Chemically synthesized
ggaugccucaguguuaaaa

SEQ ID NO: 16949 - RNA, 19 nt, artificial
  Chemically synthesized
cgggacuaaaagaaaagac

SEQ ID NO: 16950 - RNA, 19 nt, artificial
  Chemically synthesized
ucauugaauucgccuacac

SEQ ID NO: 16951 - RNA, 19 nt, artificial
  Chemically synthesized
gcacugcaaauaacccauc

SEQ ID NO: 16952 - RNA, 19 nt, artificial
  Chemically synthesized
gggacuaaaagaaaagaca

SEQ ID NO: 16953 - RNA, 19 nt, artificial
  Chemically synthesized
ccgggacuaaaagaaaaga

SEQ ID NO: 16954 - RNA, 19 nt, artificial
  Chemically synthesized
agaaaagacagcacugcaa

SEQ ID NO: 16955 - RNA, 19 nt, artificial
  Chemically synthesized
cucauugaauucgccuaca

SEQ ID NO: 16956 - RNA, 19 nt, artificial
  Chemically synthesized
ugauaaguaacccuguaau

SEQ ID NO: 16957 - RNA, 19 nt, artificial
  Chemically synthesized
uggugguguugcuuaucuu

SEQ ID NO: 16958 - RNA, 19 nt, artificial
  Chemically synthesized
gggaguaucauuguuuuug

SEQ ID NO: 16959 - RNA, 19 nt, artificial
  Chemically synthesized
uguugcuuaucuucuggaa

SEQ ID NO: 16960 - RNA, 19 nt, artificial
  Chemically synthesized
ccucauugaauucgccuac

SEQ ID NO: 16961 - RNA, 19 nt, artificial
  Chemically synthesized
caccaugugauuuauucuu

SEQ ID NO: 16962 - RNA, 19 nt, artificial
  Chemically synthesized
acugcaaauaacccaucuu

SEQ ID NO: 16963 - RNA, 19 nt, artificial
  Chemically synthesized
cuaaaagaaaagacagcac

SEQ ID NO: 16964 - RNA, 19 nt, artificial
  Chemically synthesized
gcaaaaauacaguccaaug

SEQ ID NO: 16965 - RNA, 19 nt, artificial
  Chemically synthesized
uccugcacaacuguaucua

SEQ ID NO: 16966 - RNA, 19 nt, artificial
  Chemically synthesized
cccgggaguacaucuacau

SEQ ID NO: 16967 - RNA, 19 nt, artificial
  Chemically synthesized
cugucuucaaggccauguu

SEQ ID NO: 16968 - RNA, 19 nt, artificial
  Chemically synthesized
agaacagacuaacuagugu

SEQ ID NO: 16969 - RNA, 19 nt, artificial
  Chemically synthesized
cacugcaaauaacccaucu

SEQ ID NO: 16970 - RNA, 19 nt, artificial
  Chemically synthesized
ggacuaaaagaaaagacag

SEQ ID NO: 16971 - RNA, 19 nt, artificial
  Chemically synthesized
accgggacuaaaagaaaag

SEQ ID NO: 16972 - RNA, 19 nt, artificial
  Chemically synthesized
ccugcacaacuguaucuau

SEQ ID NO: 16973 - RNA, 19 nt, artificial
  Chemically synthesized
ccucaaucgucuccuuuau

SEQ ID NO: 16974 - RNA, 19 nt, artificial
  Chemically synthesized
ucauguaccagaucgacag

SEQ ID NO: 16975 - RNA, 19 nt, artificial
  Chemically synthesized
guguugcuuaucuucugga

SEQ ID NO: 16976 - RNA, 19 nt, artificial
  Chemically synthesized
ugguguugcuuaucuucug

SEQ ID NO: 16977 - RNA, 19 nt, artificial
  Chemically synthesized
ccaugugauuuauucuugg

SEQ ID NO: 16978 - RNA, 19 nt, artificial
  Chemically synthesized
gcagcugucaccaugugau

SEQ ID NO: 16979 - RNA, 19 nt, artificial
  Chemically synthesized
caucucaaaagaaguccaa

SEQ ID NO: 16980 - RNA, 19 nt, artificial
  Chemically synthesized
agcacugcaaauaacccau

SEQ ID NO: 16981 - RNA, 19 nt, artificial
  Chemically synthesized
aaccgggacuaaaagaaaa

SEQ ID NO: 16982 - RNA, 19 nt, artificial
  Chemically synthesized
acaaaaaccgggacuaaaa

SEQ ID NO: 16983 - RNA, 19 nt, artificial
  Chemically synthesized
guacaaaaaccgggacuaa

SEQ ID NO: 16984 - RNA, 19 nt, artificial
  Chemically synthesized
ugaggcacuuuuguuucuu

SEQ ID NO: 16985 - RNA, 19 nt, artificial
  Chemically synthesized
ccuuaauucagcugagugu

SEQ ID NO: 16986 - RNA, 19 nt, artificial
  Chemically synthesized
acaguguggagagguauga

SEQ ID NO: 16987 - RNA, 19 nt, artificial
  Chemically synthesized
agguggugguguugcuuau

SEQ ID NO: 16988 - RNA, 19 nt, artificial
  Chemically synthesized
cgccucauugaauucgccu

SEQ ID NO: 16989 - RNA, 19 nt, artificial
  Chemically synthesized
guguuaaaaugacaucuca

SEQ ID NO: 16990 - RNA, 19 nt, artificial
  Chemically synthesized
aggaugccucaguguuaaa

SEQ ID NO: 16991 - RNA, 19 nt, artificial
  Chemically synthesized
acgucacacugcaggucaa

SEQ ID NO: 16992 - RNA, 19 nt, artificial
  Chemically synthesized
cgauguggaaacagagacg

SEQ ID NO: 16993 - RNA, 19 nt, artificial
  Chemically synthesized
cgcuacgauguggaaacag

SEQ ID NO: 16994 - RNA, 19 nt, artificial
  Chemically synthesized
agcgcuacgauguggaaac

SEQ ID NO: 16995 - RNA, 19 nt, artificial
  Chemically synthesized
guccugcacaacuguaucu

SEQ ID NO: 16996 - RNA, 19 nt, artificial
  Chemically synthesized
caacaguguggagagguau

SEQ ID NO: 16997 - RNA, 19 nt, artificial
  Chemically synthesized
ugcaucaacugggucaagu

SEQ ID NO: 16998 - RNA, 19 nt, artificial
  Chemically synthesized
gaacggugcugucauguac

SEQ ID NO: 16999 - RNA, 19 nt, artificial
  Chemically synthesized
uccaaggaaaauaaagaac

SEQ ID NO: 17000 - RNA, 19 nt, artificial
  Chemically synthesized
uugauaaguaacccuguaa

SEQ ID NO: 17001 - RNA, 19 nt, artificial
  Chemically synthesized
uggacaguuauuuuguuga

SEQ ID NO: 17002 - RNA, 19 nt, artificial
  Chemically synthesized
guacauagaagccaccgga

SEQ ID NO: 17003 - RNA, 19 nt, artificial
  Chemically synthesized
ucaguguuaaaaugacauc

SEQ ID NO: 17004 - RNA, 19 nt, artificial
  Chemically synthesized
cucaguguuaaaaugacau

SEQ ID NO: 17005 - RNA, 19 nt, artificial
  Chemically synthesized
caaaaauacaguccaaugg

SEQ ID NO: 17006 - RNA, 19 nt, artificial
  Chemically synthesized
ucaaguacgacugcgaaca

SEQ ID NO: 17007 - RNA, 19 nt, artificial
  Chemically synthesized
agauuggcuguguggaguu

SEQ ID NO: 17008 - RNA, 19 nt, artificial
  Chemically synthesized
ugaacggugcugucaugua

SEQ ID NO: 17009 - RNA, 19 nt, artificial
  Chemically synthesized
ggagcgccucauugaauuc

SEQ ID NO: 17010 - RNA, 19 nt, artificial
  Chemically synthesized
gguguccauugaggguauc

SEQ ID NO: 17011 - RNA, 19 nt, artificial
  Chemically synthesized
aguguuaaaaugacaucuc

SEQ ID NO: 17012 - RNA, 19 nt, artificial
  Chemically synthesized
caguguuaaaaugacaucu

SEQ ID NO: 17013 - RNA, 19 nt, artificial
  Chemically synthesized
ccucaguguuaaaaugaca

SEQ ID NO: 17014 - RNA, 19 nt, artificial
  Chemically synthesized
uguacaaaaaccgggacua

SEQ ID NO: 17015 - RNA, 19 nt, artificial
  Chemically synthesized
gcacuuuuguuucuugggc

SEQ ID NO: 17016 - RNA, 19 nt, artificial
  Chemically synthesized
gaggcacuuuuguuucuug

SEQ ID NO: 17017 - RNA, 19 nt, artificial
  Chemically synthesized
acaguguggaguguuacga

SEQ ID NO: 17018 - RNA, 19 nt, artificial
  Chemically synthesized
ccuuuggcaucaugaacga

SEQ ID NO: 17019 - RNA, 19 nt, artificial
  Chemically synthesized
acuuuuguuucuugggcaa

SEQ ID NO: 17020 - RNA, 19 nt, artificial
  Chemically synthesized
gcagauugaccagcagaac

SEQ ID NO: 17021 - RNA, 19 nt, artificial
  Chemically synthesized
ggacaguguggaguguuac

SEQ ID NO: 17022 - RNA, 19 nt, artificial
  Chemically synthesized
ggaaacagagacguggacu

SEQ ID NO: 17023 - RNA, 19 nt, artificial
  Chemically synthesized
uggaaacagagacguggac

SEQ ID NO: 17024 - RNA, 19 nt, artificial
  Chemically synthesized
gauuuauucuuggauaccu

SEQ ID NO: 17025 - RNA, 19 nt, artificial
  Chemically synthesized
uuuguuucuugggcaaaaa

SEQ ID NO: 17026 - RNA, 19 nt, artificial
  Chemically synthesized
cacuuuuguuucuugggca

SEQ ID NO: 17027 - RNA, 19 nt, artificial
  Chemically synthesized
cuggacaguguggaguguu

SEQ ID NO: 17028 - RNA, 19 nt, artificial
  Chemically synthesized
ccgggaguacaucuacaug

SEQ ID NO: 17029 - RNA, 19 nt, artificial
  Chemically synthesized
ccaaggaaaauaaagaaca

SEQ ID NO: 17030 - RNA, 19 nt, artificial
  Chemically synthesized
ggaaaauaaagaacagacu

SEQ ID NO: 17031 - RNA, 19 nt, artificial
  Chemically synthesized
uggcgaaugaucacagcaa

SEQ ID NO: 17032 - RNA, 19 nt, artificial
  Chemically synthesized
ccggauggacaguuauuuu

SEQ ID NO: 17033 - RNA, 19 nt, artificial
  Chemically synthesized
agcaggccuuuggcaucau

SEQ ID NO: 17034 - RNA, 19 nt, artificial
  Chemically synthesized
gugcugucauguaccagau

SEQ ID NO: 17035 - RNA, 19 nt, artificial
  Chemically synthesized
caaggaaaauaaagaacag

SEQ ID NO: 17036 - RNA, 19 nt, artificial
  Chemically synthesized
gcugucaccaugugauuua

SEQ ID NO: 17037 - RNA, 19 nt, artificial
  Chemically synthesized
ccgccuuaauucagcugag

SEQ ID NO: 17038 - RNA, 19 nt, artificial
  Chemically synthesized
ggaggaucauaccaagcag

SEQ ID NO: 17039 - RNA, 19 nt, artificial
  Chemically synthesized
ugguguccauugaggguau

SEQ ID NO: 17040 - RNA, 19 nt, artificial
  Chemically synthesized
cggauggacaguuauuuug

SEQ ID NO: 17041 - RNA, 19 nt, artificial
  Chemically synthesized
gccucaguguuaaaaugac

SEQ ID NO: 17042 - RNA, 19 nt, artificial
  Chemically synthesized
gcguccugcacaacuguau

SEQ ID NO: 17043 - RNA, 19 nt, artificial
  Chemically synthesized
cgaguggcgaaugaucaca

SEQ ID NO: 17044 - RNA, 19 nt, artificial
  Chemically synthesized
cccuggaggaucauaccaa

SEQ ID NO: 17045 - RNA, 19 nt, artificial
  Chemically synthesized
ggauggacaguuauuuugu

SEQ ID NO: 17046 - RNA, 19 nt, artificial
  Chemically synthesized
gcaaugaacaccauccgaa

SEQ ID NO: 17047 - RNA, 19 nt, artificial
  Chemically synthesized
aggaaaauaaagaacagac

SEQ ID NO: 17048 - RNA, 19 nt, artificial
  Chemically synthesized
ccuguaauuuuccaaggaa

SEQ ID NO: 17049 - RNA, 19 nt, artificial
  Chemically synthesized
ccaccggauggacaguuau

SEQ ID NO: 17050 - RNA, 19 nt, artificial
  Chemically synthesized
agaaguccaaagcgggaau

SEQ ID NO: 17051 - RNA, 19 nt, artificial
  Chemically synthesized
cgggacaaaccgccuuaau

SEQ ID NO: 17052 - RNA, 19 nt, artificial
  Chemically synthesized
acacccuggaggaucauac

SEQ ID NO: 17053 - RNA, 19 nt, artificial
  Chemically synthesized
cuacacccuggaggaucau

SEQ ID NO: 17054 - RNA, 19 nt, artificial
  Chemically synthesized
ugagcagauuggcugugug

SEQ ID NO: 17055 - RNA, 19 nt, artificial
  Chemically synthesized
guaccagaucgacagcguu

SEQ ID NO: 17056 - RNA, 19 nt, artificial
  Chemically synthesized
gugguguccauugagggua

SEQ ID NO: 17057 - RNA, 19 nt, artificial
  Chemically synthesized
cccuguaauuuuccaagga

SEQ ID NO: 17058 - RNA, 19 nt, artificial
  Chemically synthesized
uaacccuguaauuuuccaa

SEQ ID NO: 17059 - RNA, 19 nt, artificial
  Chemically synthesized
guaacccuguaauuuucca

SEQ ID NO: 17060 - RNA, 19 nt, artificial
  Chemically synthesized
ucauaccaagcaggccuuu

SEQ ID NO: 17061 - RNA, 19 nt, artificial
  Chemically synthesized
cgccuuaauucagcugagu

SEQ ID NO: 17062 - RNA, 19 nt, artificial
  Chemically synthesized
accgccuuaauucagcuga

SEQ ID NO: 17063 - RNA, 19 nt, artificial
  Chemically synthesized
ucgucuccuuuaugccgug

SEQ ID NO: 17064 - RNA, 19 nt, artificial
  Chemically synthesized
uggaggaucauaccaagca

SEQ ID NO: 17065 - RNA, 19 nt, artificial
  Chemically synthesized
ucaucgauggccacaucua

SEQ ID NO: 17066 - RNA, 19 nt, artificial
  Chemically synthesized
gcuaccuggaggcuuacaa

SEQ ID NO: 17067 - RNA, 19 nt, artificial
  Chemically synthesized
agcaagaggaguucuucaa

SEQ ID NO: 17068 - RNA, 19 nt, artificial
  Chemically synthesized
aguacaucuacaugcauuu

SEQ ID NO: 17069 - RNA, 19 nt, artificial
  Chemically synthesized
cugagcagauuggcugugu

SEQ ID NO: 17070 - RNA, 19 nt, artificial
  Chemically synthesized
cagacuaacuagugucuuu

SEQ ID NO: 17071 - RNA, 19 nt, artificial
  Chemically synthesized
ggaguguuacgacccagau

SEQ ID NO: 17072 - RNA, 19 nt, artificial
  Chemically synthesized
uggagagguaugagccaga

SEQ ID NO: 17073 - RNA, 19 nt, artificial
  Chemically synthesized
ccaugaccaaucagugguc

SEQ ID NO: 17074 - RNA, 19 nt, artificial
  Chemically synthesized
agcugcagaagugcgagau

SEQ ID NO: 17075 - RNA, 19 nt, artificial
  Chemically synthesized
agaugcagcugcagaagug

SEQ ID NO: 17076 - RNA, 19 nt, artificial
  Chemically synthesized
cuguaauuuuccaaggaaa

SEQ ID NO: 17077 - RNA, 19 nt, artificial
  Chemically synthesized
cugucaccaugugauuuau

SEQ ID NO: 17078 - RNA, 19 nt, artificial
  Chemically synthesized
cagcugucaccaugugauu

SEQ ID NO: 17079 - RNA, 19 nt, artificial
  Chemically synthesized
gaccagcagaacuguaccu

SEQ ID NO: 17080 - RNA, 19 nt, artificial
  Chemically synthesized
gggagaaucuacguccuug

SEQ ID NO: 17081 - RNA, 19 nt, artificial
  Chemically synthesized
acgggacaaaccgccuuaa

SEQ ID NO: 17082 - RNA, 19 nt, artificial
  Chemically synthesized
cccaugaccaaucaguggu

SEQ ID NO: 17083 - RNA, 19 nt, artificial
  Chemically synthesized
aggaguucuucaaccuguc

SEQ ID NO: 17084 - RNA, 19 nt, artificial
  Chemically synthesized
gcaagaggaguucuucaac

SEQ ID NO: 17085 - RNA, 19 nt, artificial
  Chemically synthesized
ccaagcaagaggaguucuu

SEQ ID NO: 17086 - RNA, 19 nt, artificial
  Chemically synthesized
gaaguccaaagcgggaauc

SEQ ID NO: 17087 - RNA, 19 nt, artificial
  Chemically synthesized
ggcuaugauggucacacgu

SEQ ID NO: 17088 - RNA, 19 nt, artificial
  Chemically synthesized
ggagaaucuacguccuugg

SEQ ID NO: 17089 - RNA, 19 nt, artificial
  Chemically synthesized
cgaacuuccugcagaugca

SEQ ID NO: 17090 - RNA, 19 nt, artificial
  Chemically synthesized
ccugcaucaacugggucaa

SEQ ID NO: 17091 - RNA, 19 nt, artificial
  Chemically synthesized
uggccaagcaagaggaguu

SEQ ID NO: 17092 - RNA, 19 nt, artificial
  Chemically synthesized
cugucauguaccagaucga

SEQ ID NO: 17093 - RNA, 19 nt, artificial
  Chemically synthesized
ggugcugucauguaccaga

SEQ ID NO: 17094 - RNA, 19 nt, artificial
  Chemically synthesized
accggauggacaguuauuu

SEQ ID NO: 17095 - RNA, 19 nt, artificial
  Chemically synthesized
gccuguacauagaagccac

SEQ ID NO: 17096 - RNA, 19 nt, artificial
  Chemically synthesized
ugggcaaaaauacagucca

SEQ ID NO: 17097 - RNA, 19 nt, artificial
  Chemically synthesized
aggccuuuggcaucaugaa

SEQ ID NO: 17098 - RNA, 19 nt, artificial
  Chemically synthesized
uccucaaucgucuccuuua

SEQ ID NO: 17099 - RNA, 19 nt, artificial
  Chemically synthesized
ccuggaggaucauaccaag

SEQ ID NO: 17100 - RNA, 19 nt, artificial
  Chemically synthesized
guacaucuacaugcauuuu

SEQ ID NO: 17101 - RNA, 19 nt, artificial
  Chemically synthesized
acagacuaacuagugucuu

SEQ ID NO: 17102 - RNA, 19 nt, artificial
  Chemically synthesized
ggccuguacauagaagcca

SEQ ID NO: 17103 - RNA, 19 nt, artificial
  Chemically synthesized
cuguaccuguugaggcacu

SEQ ID NO: 17104 - RNA, 19 nt, artificial
  Chemically synthesized
ccagauacagacaccugga

SEQ ID NO: 17105 - RNA, 19 nt, artificial
  Chemically synthesized
cguccuuggaggcuaugau

SEQ ID NO: 17106 - RNA, 19 nt, artificial
  Chemically synthesized
cacaacuguaucuaugcug

SEQ ID NO: 17107 - RNA, 19 nt, artificial
  Chemically synthesized
ccaacuucgcugagcagau

SEQ ID NO: 17108 - RNA, 19 nt, artificial
  Chemically synthesized
acggugcugucauguacca

SEQ ID NO: 17109 - RNA, 19 nt, artificial
  Chemically synthesized
aguguguccuccacgucau

SEQ ID NO: 17110 - RNA, 19 nt, artificial
  Chemically synthesized
agaaguguguccuccacgu

SEQ ID NO: 17111 - RNA, 19 nt, artificial
  Chemically synthesized
uggaggugguguccauuga

SEQ ID NO: 17112 - RNA, 19 nt, artificial
  Chemically synthesized
agacuaacuagugucuuuc

SEQ ID NO: 17113 - RNA, 19 nt, artificial
  Chemically synthesized
gaacagacuaacuaguguc

SEQ ID NO: 17114 - RNA, 19 nt, artificial
  Chemically synthesized
caggucaaguaccaggaug

SEQ ID NO: 17115 - RNA, 19 nt, artificial
  Chemically synthesized
cagaacuguaccuguugag

SEQ ID NO: 17116 - RNA, 19 nt, artificial
  Chemically synthesized
ccagcagaacuguaccugu

SEQ ID NO: 17117 - RNA, 19 nt, artificial
  Chemically synthesized
gccuuaauucagcugagug

SEQ ID NO: 17118 - RNA, 19 nt, artificial
  Chemically synthesized
guccucaaucgucuccuuu

SEQ ID NO: 17119 - RNA, 19 nt, artificial
  Chemically synthesized
uguccucaaucgucuccuu

SEQ ID NO: 17120 - RNA, 19 nt, artificial
  Chemically synthesized
gaggaguucuucaaccugu

SEQ ID NO: 17121 - RNA, 19 nt, artificial
  Chemically synthesized
gacuaacuagugucuuuca

SEQ ID NO: 17122 - RNA, 19 nt, artificial
  Chemically synthesized
caccggauggacaguuauu

SEQ ID NO: 17123 - RNA, 19 nt, artificial
  Chemically synthesized
gucaccaugugauuuauuc

SEQ ID NO: 17124 - RNA, 19 nt, artificial
  Chemically synthesized
acaucucaaaagaagucca

SEQ ID NO: 17125 - RNA, 19 nt, artificial
  Chemically synthesized
ugacaucucaaaagaaguc

SEQ ID NO: 17126 - RNA, 19 nt, artificial
  Chemically synthesized
cuguugaggcacuuuuguu

SEQ ID NO: 17127 - RNA, 19 nt, artificial
  Chemically synthesized
guaccuguugaggcacuuu

SEQ ID NO: 17128 - RNA, 19 nt, artificial
  Chemically synthesized
uguaccuguugaggcacuu

SEQ ID NO: 17129 - RNA, 19 nt, artificial
  Chemically synthesized
gaagcagauugaccagcag

SEQ ID NO: 17130 - RNA, 19 nt, artificial
  Chemically synthesized
cagauacagacaccuggag

SEQ ID NO: 17131 - RNA, 19 nt, artificial
  Chemically synthesized
uggaguguuacgacccaga

SEQ ID NO: 17132 - RNA, 19 nt, artificial
  Chemically synthesized
acacguuccuggacagugu

SEQ ID NO: 17133 - RNA, 19 nt, artificial
  Chemically synthesized
ggaggcuaugauggucaca

SEQ ID NO: 17134 - RNA, 19 nt, artificial
  Chemically synthesized
cugaguguuacuacccaga

SEQ ID NO: 17135 - RNA, 19 nt, artificial
  Chemically synthesized
gcugaguguuacuacccag

SEQ ID NO: 17136 - RNA, 19 nt, artificial
  Chemically synthesized
ccugucuucaaggccaugu

SEQ ID NO: 17137 - RNA, 19 nt, artificial
  Chemically synthesized
acccuguaauuuuccaagg

SEQ ID NO: 17138 - RNA, 19 nt, artificial
  Chemically synthesized
ugucaccaugugauuuauu

SEQ ID NO: 17139 - RNA, 19 nt, artificial
  Chemically synthesized
uaccuguugaggcacuuuu

SEQ ID NO: 17140 - RNA, 19 nt, artificial
  Chemically synthesized
agauugaccagcagaacug

SEQ ID NO: 17141 - RNA, 19 nt, artificial
  Chemically synthesized
agcagauugaccagcagaa

SEQ ID NO: 17142 - RNA, 19 nt, artificial
  Chemically synthesized
ggaagcagauugaccagca

SEQ ID NO: 17143 - RNA, 19 nt, artificial
  Chemically synthesized
gaggcuaugauggucacac

SEQ ID NO: 17144 - RNA, 19 nt, artificial
  Chemically synthesized
agcugaguguuacuaccca

SEQ ID NO: 17145 - RNA, 19 nt, artificial
  Chemically synthesized
ggucaaguacgacugcgaa

SEQ ID NO: 17146 - RNA, 19 nt, artificial
  Chemically synthesized
acaucuacaugcauuuugg

SEQ ID NO: 17147 - RNA, 19 nt, artificial
  Chemically synthesized
guguccuccacgucaugaa

SEQ ID NO: 17148 - RNA, 19 nt, artificial
  Chemically synthesized
gccuuuggcaucaugaacg

SEQ ID NO: 17149 - RNA, 19 nt, artificial
  Chemically synthesized
uggaggcuaugauggucac

SEQ ID NO: 17150 - RNA, 19 nt, artificial
  Chemically synthesized
ggccuuuggcaucaugaac

SEQ ID NO: 17151 - RNA, 19 nt, artificial
  Chemically synthesized
ugcaaggacuaccugguca

SEQ ID NO: 17152 - RNA, 19 nt, artificial
  Chemically synthesized
cgggaguacaucuacaugc

SEQ ID NO: 17153 - RNA, 19 nt, artificial
  Chemically synthesized
ucaugaacggugcugucau

SEQ ID NO: 17154 - RNA, 19 nt, artificial
  Chemically synthesized
cccucuggaaaugugguuc

SEQ ID NO: 17155 - RNA, 19 nt, artificial
  Chemically synthesized
agcugugugacgucacacu

SEQ ID NO: 17156 - RNA, 19 nt, artificial
  Chemically synthesized
cuaugauggucacacguuc

SEQ ID NO: 17157 - RNA, 19 nt, artificial
  Chemically synthesized
gaaaugugguucccaggga

SEQ ID NO: 17158 - RNA, 19 nt, artificial
  Chemically synthesized
cuggaaaugugguucccag

SEQ ID NO: 17159 - RNA, 19 nt, artificial
  Chemically synthesized
cuaugauggucaggaccag

SEQ ID NO: 17160 - RNA, 19 nt, artificial
  Chemically synthesized
cacugcaggucaaguacca

SEQ ID NO: 17161 - RNA, 19 nt, artificial
  Chemically synthesized
uguugaggcacuuuuguuu

SEQ ID NO: 17162 - RNA, 19 nt, artificial
  Chemically synthesized
agagacguggacuuucgua

SEQ ID NO: 17163 - RNA, 19 nt, artificial
  Chemically synthesized
gccaagcaagaggaguucu

SEQ ID NO: 17164 - RNA, 19 nt, artificial
  Chemically synthesized
aaaugugguucccagggau

SEQ ID NO: 17165 - RNA, 19 nt, artificial
  Chemically synthesized
uggcuguccucaaucgucu

SEQ ID NO: 17166 - RNA, 19 nt, artificial
  Chemically synthesized
ugcagaugcagcugcagaa

SEQ ID NO: 17167 - RNA, 19 nt, artificial
  Chemically synthesized
aucauucgccacucguucc

SEQ ID NO: 17168 - RNA, 19 nt, artificial
  Chemically synthesized
uuggacuguauuuuugccc

SEQ ID NO: 17169 - RNA, 19 nt, artificial
  Chemically synthesized
auucgccacucguuccucu

SEQ ID NO: 17170 - RNA, 19 nt, artificial
  Chemically synthesized
acaaaaacaaugauacucc

SEQ ID NO: 17171 - RNA, 19 nt, artificial
  Chemically synthesized
uaggcgaauucaaugaggc

SEQ ID NO: 17172 - RNA, 19 nt, artificial
  Chemically synthesized
auuggacuguauuuuugcc

SEQ ID NO: 17173 - RNA, 19 nt, artificial
  Chemically synthesized
uuuuaacacugaggcaucc

SEQ ID NO: 17174 - RNA, 19 nt, artificial
  Chemically synthesized
gucuuuucuuuuagucccg

SEQ ID NO: 17175 - RNA, 19 nt, artificial
  Chemically synthesized
guguaggcgaauucaauga

SEQ ID NO: 17176 - RNA, 19 nt, artificial
  Chemically synthesized
gauggguuauuugcagugc

SEQ ID NO: 17177 - RNA, 19 nt, artificial
  Chemically synthesized
ugucuuuucuuuuaguccc

SEQ ID NO: 17178 - RNA, 19 nt, artificial
  Chemically synthesized
ucuuuucuuuuagucccgg

SEQ ID NO: 17179 - RNA, 19 nt, artificial
  Chemically synthesized
uugcagugcugucuuuucu

SEQ ID NO: 17180 - RNA, 19 nt, artificial
  Chemically synthesized
uguaggcgaauucaaugag

SEQ ID NO: 17181 - RNA, 19 nt, artificial
  Chemically synthesized
auuacaggguuacuuauca

SEQ ID NO: 17182 - RNA, 19 nt, artificial
  Chemically synthesized
aagauaagcaacaccacca

SEQ ID NO: 17183 - RNA, 19 nt, artificial
  Chemically synthesized
caaaaacaaugauacuccc

SEQ ID NO: 17184 - RNA, 19 nt, artificial
  Chemically synthesized
uuccagaagauaagcaaca

SEQ ID NO: 17185 - RNA, 19 nt, artificial
  Chemically synthesized
guaggcgaauucaaugagg

SEQ ID NO: 17186 - RNA, 19 nt, artificial
  Chemically synthesized
aagaauaaaucacauggug

SEQ ID NO: 17187 - RNA, 19 nt, artificial
  Chemically synthesized
aagauggguuauuugcagu

SEQ ID NO: 17188 - RNA, 19 nt, artificial
  Chemically synthesized
gugcugucuuuucuuuuag

SEQ ID NO: 17189 - RNA, 19 nt, artificial
  Chemically synthesized
cauuggacuguauuuuugc

SEQ ID NO: 17190 - RNA, 19 nt, artificial
  Chemically synthesized
uagauacaguugugcagga

SEQ ID NO: 17191 - RNA, 19 nt, artificial
  Chemically synthesized
auguagauguacucccggg

SEQ ID NO: 17192 - RNA, 19 nt, artificial
  Chemically synthesized
aacauggccuugaagacag

SEQ ID NO: 17193 - RNA, 19 nt, artificial
  Chemically synthesized
acacuaguuagucuguucu

SEQ ID NO: 17194 - RNA, 19 nt, artificial
  Chemically synthesized
agauggguuauuugcagug

SEQ ID NO: 17195 - RNA, 19 nt, artificial
  Chemically synthesized
cugucuuuucuuuuagucc

SEQ ID NO: 17196 - RNA, 19 nt, artificial
  Chemically synthesized
cuuuucuuuuagucccggu

SEQ ID NO: 17197 - RNA, 19 nt, artificial
  Chemically synthesized
auagauacaguugugcagg

SEQ ID NO: 17198 - RNA, 19 nt, artificial
  Chemically synthesized
auaaaggagacgauugagg

SEQ ID NO: 17199 - RNA, 19 nt, artificial
  Chemically synthesized
cugucgaucugguacauga

SEQ ID NO: 17200 - RNA, 19 nt, artificial
  Chemically synthesized
uccagaagauaagcaacac

SEQ ID NO: 17201 - RNA, 19 nt, artificial
  Chemically synthesized
cagaagauaagcaacacca

SEQ ID NO: 17202 - RNA, 19 nt, artificial
  Chemically synthesized
ccaagaauaaaucacaugg

SEQ ID NO: 17203 - RNA, 19 nt, artificial
  Chemically synthesized
aucacauggugacagcugc

SEQ ID NO: 17204 - RNA, 19 nt, artificial
  Chemically synthesized
uuggacuucuuuugagaug

SEQ ID NO: 17205 - RNA, 19 nt, artificial
  Chemically synthesized
auggguuauuugcagugcu

SEQ ID NO: 17206 - RNA, 19 nt, artificial
  Chemically synthesized
uuuucuuuuagucccgguu

SEQ ID NO: 17207 - RNA, 19 nt, artificial
  Chemically synthesized
uuuuagucccgguuuuugu

SEQ ID NO: 17208 - RNA, 19 nt, artificial
  Chemically synthesized
uuagucccgguuuuuguac

SEQ ID NO: 17209 - RNA, 19 nt, artificial
  Chemically synthesized
aagaaacaaaagugccuca

SEQ ID NO: 17210 - RNA, 19 nt, artificial
  Chemically synthesized
acacucagcugaauuaagg

SEQ ID NO: 17211 - RNA, 19 nt, artificial
  Chemically synthesized
ucauaccucuccacacugu

SEQ ID NO: 17212 - RNA, 19 nt, artificial
  Chemically synthesized
auaagcaacaccaccaccu

SEQ ID NO: 17213 - RNA, 19 nt, artificial
  Chemically synthesized
aggcgaauucaaugaggcg

SEQ ID NO: 17214 - RNA, 19 nt, artificial
  Chemically synthesized
ugagaugucauuuuaacac

SEQ ID NO: 17215 - RNA, 19 nt, artificial
  Chemically synthesized
uuuaacacugaggcauccu

SEQ ID NO: 17216 - RNA, 19 nt, artificial
  Chemically synthesized
uugaccugcagugugacgu

SEQ ID NO: 17217 - RNA, 19 nt, artificial
  Chemically synthesized
cgucucuguuuccacaucg

SEQ ID NO: 17218 - RNA, 19 nt, artificial
  Chemically synthesized
cuguuuccacaucguagcg

SEQ ID NO: 17219 - RNA, 19 nt, artificial
  Chemically synthesized
guuuccacaucguagcgcu

SEQ ID NO: 17220 - RNA, 19 nt, artificial
  Chemically synthesized
agauacaguugugcaggac

SEQ ID NO: 17221 - RNA, 19 nt, artificial
  Chemically synthesized
auaccucuccacacuguug

SEQ ID NO: 17222 - RNA, 19 nt, artificial
  Chemically synthesized
acuugacccaguugaugca

SEQ ID NO: 17223 - RNA, 19 nt, artificial
  Chemically synthesized
guacaugacagcaccguuc

SEQ ID NO: 17224 - RNA, 19 nt, artificial
  Chemically synthesized
guucuuuauuuuccuugga

SEQ ID NO: 17225 - RNA, 19 nt, artificial
  Chemically synthesized
uuacaggguuacuuaucaa

SEQ ID NO: 17226 - RNA, 19 nt, artificial
  Chemically synthesized
ucaacaaaauaacugucca

SEQ ID NO: 17227 - RNA, 19 nt, artificial
  Chemically synthesized
uccgguggcuucuauguac

SEQ ID NO: 17228 - RNA, 19 nt, artificial
  Chemically synthesized
gaugucauuuuaacacuga

SEQ ID NO: 17229 - RNA, 19 nt, artificial
  Chemically synthesized
augucauuuuaacacugag

SEQ ID NO: 17230 - RNA, 19 nt, artificial
  Chemically synthesized
ccauuggacuguauuuuug

SEQ ID NO: 17231 - RNA, 19 nt, artificial
  Chemically synthesized
uguucgcagucguacuuga

SEQ ID NO: 17232 - RNA, 19 nt, artificial
  Chemically synthesized
aacuccacacagccaaucu

SEQ ID NO: 17233 - RNA, 19 nt, artificial
  Chemically synthesized
uacaugacagcaccguuca

SEQ ID NO: 17234 - RNA, 19 nt, artificial
  Chemically synthesized
gaauucaaugaggcgcucc

SEQ ID NO: 17235 - RNA, 19 nt, artificial
  Chemically synthesized
gauacccucaauggacacc

SEQ ID NO: 17236 - RNA, 19 nt, artificial
  Chemically synthesized
gagaugucauuuuaacacu

SEQ ID NO: 17237 - RNA, 19 nt, artificial
  Chemically synthesized
agaugucauuuuaacacug

SEQ ID NO: 17238 - RNA, 19 nt, artificial
  Chemically synthesized
ugucauuuuaacacugagg

SEQ ID NO: 17239 - RNA, 19 nt, artificial
  Chemically synthesized
uagucccgguuuuuguaca

SEQ ID NO: 17240 - RNA, 19 nt, artificial
  Chemically synthesized
gcccaagaaacaaaagugc

SEQ ID NO: 17241 - RNA, 19 nt, artificial
  Chemically synthesized
caagaaacaaaagugccuc

SEQ ID NO: 17242 - RNA, 19 nt, artificial
  Chemically synthesized
ucguaacacuccacacugu

SEQ ID NO: 17243 - RNA, 19 nt, artificial
  Chemically synthesized
ucguucaugaugccaaagg

SEQ ID NO: 17244 - RNA, 19 nt, artificial
  Chemically synthesized
uugcccaagaaacaaaagu

SEQ ID NO: 17245 - RNA, 19 nt, artificial
  Chemically synthesized
guucugcuggucaaucugc

SEQ ID NO: 17246 - RNA, 19 nt, artificial
  Chemically synthesized
guaacacuccacacugucc

SEQ ID NO: 17247 - RNA, 19 nt, artificial
  Chemically synthesized
aguccacgucucuguuucc

SEQ ID NO: 17248 - RNA, 19 nt, artificial
  Chemically synthesized
guccacgucucuguuucca

SEQ ID NO: 17249 - RNA, 19 nt, artificial
  Chemically synthesized
agguauccaagaauaaauc

SEQ ID NO: 17250 - RNA, 19 nt, artificial
  Chemically synthesized
uuuuugcccaagaaacaaa

SEQ ID NO: 17251 - RNA, 19 nt, artificial
  Chemically synthesized
ugcccaagaaacaaaagug

SEQ ID NO: 17252 - RNA, 19 nt, artificial
  Chemically synthesized
aacacuccacacuguccag

SEQ ID NO: 17253 - RNA, 19 nt, artificial
  Chemically synthesized
cauguagauguacucccgg

SEQ ID NO: 17254 - RNA, 19 nt, artificial
  Chemically synthesized
uguucuuuauuuuccuugg

SEQ ID NO: 17255 - RNA, 19 nt, artificial
  Chemically synthesized
agucuguucuuuauuuucc

SEQ ID NO: 17256 - RNA, 19 nt, artificial
  Chemically synthesized
uugcugugaucauucgcca

SEQ ID NO: 17257 - RNA, 19 nt, artificial
  Chemically synthesized
aaaauaacuguccauccgg

SEQ ID NO: 17258 - RNA, 19 nt, artificial
  Chemically synthesized
augaugccaaaggccugcu

SEQ ID NO: 17259 - RNA, 19 nt, artificial
  Chemically synthesized
aucugguacaugacagcac

SEQ ID NO: 17260 - RNA, 19 nt, artificial
  Chemically synthesized
cuguucuuuauuuuccuug

SEQ ID NO: 17261 - RNA, 19 nt, artificial
  Chemically synthesized
uaaaucacauggugacagc

SEQ ID NO: 17262 - RNA, 19 nt, artificial
  Chemically synthesized
cucagcugaauuaaggcgg

SEQ ID NO: 17263 - RNA, 19 nt, artificial
  Chemically synthesized
cugcuugguaugauccucc

SEQ ID NO: 17264 - RNA, 19 nt, artificial
  Chemically synthesized
auacccucaauggacacca

SEQ ID NO: 17265 - RNA, 19 nt, artificial
  Chemically synthesized
caaaauaacuguccauccg

SEQ ID NO: 17266 - RNA, 19 nt, artificial
  Chemically synthesized
gucauuuuaacacugaggc

SEQ ID NO: 17267 - RNA, 19 nt, artificial
  Chemically synthesized
auacaguugugcaggacgc

SEQ ID NO: 17268 - RNA, 19 nt, artificial
  Chemically synthesized
ugugaucauucgccacucg

SEQ ID NO: 17269 - RNA, 19 nt, artificial
  Chemically synthesized
uugguaugauccuccaggg

SEQ ID NO: 17270 - RNA, 19 nt, artificial
  Chemically synthesized
acaaaauaacuguccaucc

SEQ ID NO: 17271 - RNA, 19 nt, artificial
  Chemically synthesized
uucggaugguguucauugc

SEQ ID NO: 17272 - RNA, 19 nt, artificial
  Chemically synthesized
gucuguucuuuauuuuccu

SEQ ID NO: 17273 - RNA, 19 nt, artificial
  Chemically synthesized
uuccuuggaaaauuacagg

SEQ ID NO: 17274 - RNA, 19 nt, artificial
  Chemically synthesized
auaacuguccauccggugg

SEQ ID NO: 17275 - RNA, 19 nt, artificial
  Chemically synthesized
auucccgcuuuggacuucu

SEQ ID NO: 17276 - RNA, 19 nt, artificial
  Chemically synthesized
auuaaggcgguuugucccg

SEQ ID NO: 17277 - RNA, 19 nt, artificial
  Chemically synthesized
guaugauccuccagggugu

SEQ ID NO: 17278 - RNA, 19 nt, artificial
  Chemically synthesized
augauccuccaggguguag

SEQ ID NO: 17279 - RNA, 19 nt, artificial
  Chemically synthesized
cacacagccaaucugcuca

SEQ ID NO: 17280 - RNA, 19 nt, artificial
  Chemically synthesized
aacgcugucgaucugguac

SEQ ID NO: 17281 - RNA, 19 nt, artificial
  Chemically synthesized
uacccucaauggacaccac

SEQ ID NO: 17282 - RNA, 19 nt, artificial
  Chemically synthesized
uccuuggaaaauuacaggg

SEQ ID NO: 17283 - RNA, 19 nt, artificial
  Chemically synthesized
uuggaaaauuacaggguua

SEQ ID NO: 17284 - RNA, 19 nt, artificial
  Chemically synthesized
uggaaaauuacaggguuac

SEQ ID NO: 17285 - RNA, 19 nt, artificial
  Chemically synthesized
aaaggccugcuugguauga

SEQ ID NO: 17286 - RNA, 19 nt, artificial
  Chemically synthesized
acucagcugaauuaaggcg

SEQ ID NO: 17287 - RNA, 19 nt, artificial
  Chemically synthesized
ucagcugaauuaaggcggu

SEQ ID NO: 17288 - RNA, 19 nt, artificial
  Chemically synthesized
cacggcauaaaggagacga

SEQ ID NO: 17289 - RNA, 19 nt, artificial
  Chemically synthesized
ugcuugguaugauccucca

SEQ ID NO: 17290 - RNA, 19 nt, artificial
  Chemically synthesized
uagauguggccaucgauga

SEQ ID NO: 17291 - RNA, 19 nt, artificial
  Chemically synthesized
uuguaagccuccagguagc

SEQ ID NO: 17292 - RNA, 19 nt, artificial
  Chemically synthesized
uugaagaacuccucuugcu

SEQ ID NO: 17293 - RNA, 19 nt, artificial
  Chemically synthesized
aaaugcauguagauguacu

SEQ ID NO: 17294 - RNA, 19 nt, artificial
  Chemically synthesized
acacagccaaucugcucag

SEQ ID NO: 17295 - RNA, 19 nt, artificial
  Chemically synthesized
aaagacacuaguuagucug

SEQ ID NO: 17296 - RNA, 19 nt, artificial
  Chemically synthesized
aucugggucguaacacucc

SEQ ID NO: 17297 - RNA, 19 nt, artificial
  Chemically synthesized
ucuggcucauaccucucca

SEQ ID NO: 17298 - RNA, 19 nt, artificial
  Chemically synthesized
gaccacugauuggucaugg

SEQ ID NO: 17299 - RNA, 19 nt, artificial
  Chemically synthesized
aucucgcacuucugcagcu

SEQ ID NO: 17300 - RNA, 19 nt, artificial
  Chemically synthesized
cacuucugcagcugcaucu

SEQ ID NO: 17301 - RNA, 19 nt, artificial
  Chemically synthesized
uuuccuuggaaaauuacag

SEQ ID NO: 17302 - RNA, 19 nt, artificial
  Chemically synthesized
auaaaucacauggugacag

SEQ ID NO: 17303 - RNA, 19 nt, artificial
  Chemically synthesized
aaucacauggugacagcug

SEQ ID NO: 17304 - RNA, 19 nt, artificial
  Chemically synthesized
agguacaguucugcugguc

SEQ ID NO: 17305 - RNA, 19 nt, artificial
  Chemically synthesized
caaggacguagauucuccc

SEQ ID NO: 17306 - RNA, 19 nt, artificial
  Chemically synthesized
uuaaggcgguuugucccgu

SEQ ID NO: 17307 - RNA, 19 nt, artificial
  Chemically synthesized
accacugauuggucauggg

SEQ ID NO: 17308 - RNA, 19 nt, artificial
  Chemically synthesized
gacagguugaagaacuccu

SEQ ID NO: 17309 - RNA, 19 nt, artificial
  Chemically synthesized
guugaagaacuccucuugc

SEQ ID NO: 17310 - RNA, 19 nt, artificial
  Chemically synthesized
aagaacuccucuugcuugg

SEQ ID NO: 17311 - RNA, 19 nt, artificial
  Chemically synthesized
gauucccgcuuuggacuuc

SEQ ID NO: 17312 - RNA, 19 nt, artificial
  Chemically synthesized
acgugugaccaucauagcc

SEQ ID NO: 17313 - RNA, 19 nt, artificial
  Chemically synthesized
ccaaggacguagauucucc

SEQ ID NO: 17314 - RNA, 19 nt, artificial
  Chemically synthesized
ugcaucugcaggaaguucg

SEQ ID NO: 17315 - RNA, 19 nt, artificial
  Chemically synthesized
uugacccaguugaugcagg

SEQ ID NO: 17316 - RNA, 19 nt, artificial
  Chemically synthesized
aacuccucuugcuuggcca

SEQ ID NO: 17317 - RNA, 19 nt, artificial
  Chemically synthesized
ucgaucugguacaugacag

SEQ ID NO: 17318 - RNA, 19 nt, artificial
  Chemically synthesized
ucugguacaugacagcacc

SEQ ID NO: 17319 - RNA, 19 nt, artificial
  Chemically synthesized
aaauaacuguccauccggu

SEQ ID NO: 17320 - RNA, 19 nt, artificial
  Chemically synthesized
guggcuucuauguacaggc

SEQ ID NO: 17321 - RNA, 19 nt, artificial
  Chemically synthesized
uggacuguauuuuugccca

SEQ ID NO: 17322 - RNA, 19 nt, artificial
  Chemically synthesized
uucaugaugccaaaggccu

SEQ ID NO: 17323 - RNA, 19 nt, artificial
  Chemically synthesized
uaaaggagacgauugagga

SEQ ID NO: 17324 - RNA, 19 nt, artificial
  Chemically synthesized
cuugguaugauccuccagg

SEQ ID NO: 17325 - RNA, 19 nt, artificial
  Chemically synthesized
aaaaugcauguagauguac

SEQ ID NO: 17326 - RNA, 19 nt, artificial
  Chemically synthesized
aagacacuaguuagucugu

SEQ ID NO: 17327 - RNA, 19 nt, artificial
  Chemically synthesized
uggcuucuauguacaggcc

SEQ ID NO: 17328 - RNA, 19 nt, artificial
  Chemically synthesized
agugccucaacagguacag

SEQ ID NO: 17329 - RNA, 19 nt, artificial
  Chemically synthesized
uccaggugucuguaucugg

SEQ ID NO: 17330 - RNA, 19 nt, artificial
  Chemically synthesized
aucauagccuccaaggacg

SEQ ID NO: 17331 - RNA, 19 nt, artificial
  Chemically synthesized
cagcauagauacaguugug

SEQ ID NO: 17332 - RNA, 19 nt, artificial
  Chemically synthesized
aucugcucagcgaaguugg

SEQ ID NO: 17333 - RNA, 19 nt, artificial
  Chemically synthesized
ugguacaugacagcaccgu

SEQ ID NO: 17334 - RNA, 19 nt, artificial
  Chemically synthesized
augacguggaggacacacu

SEQ ID NO: 17335 - RNA, 19 nt, artificial
  Chemically synthesized
acguggaggacacacuucu

SEQ ID NO: 17336 - RNA, 19 nt, artificial
  Chemically synthesized
ucaauggacaccaccucca

SEQ ID NO: 17337 - RNA, 19 nt, artificial
  Chemically synthesized
gaaagacacuaguuagucu

SEQ ID NO: 17338 - RNA, 19 nt, artificial
  Chemically synthesized
gacacuaguuagucuguuc

SEQ ID NO: 17339 - RNA, 19 nt, artificial
  Chemically synthesized
cauccugguacuugaccug

SEQ ID NO: 17340 - RNA, 19 nt, artificial
  Chemically synthesized
cucaacagguacaguucug

SEQ ID NO: 17341 - RNA, 19 nt, artificial
  Chemically synthesized
acagguacaguucugcugg

SEQ ID NO: 17342 - RNA, 19 nt, artificial
  Chemically synthesized
cacucagcugaauuaaggc

SEQ ID NO: 17343 - RNA, 19 nt, artificial
  Chemically synthesized
aaaggagacgauugaggac

SEQ ID NO: 17344 - RNA, 19 nt, artificial
  Chemically synthesized
aaggagacgauugaggaca

SEQ ID NO: 17345 - RNA, 19 nt, artificial
  Chemically synthesized
acagguugaagaacuccuc

SEQ ID NO: 17346 - RNA, 19 nt, artificial
  Chemically synthesized
ugaaagacacuaguuaguc

SEQ ID NO: 17347 - RNA, 19 nt, artificial
  Chemically synthesized
aauaacuguccauccggug

SEQ ID NO: 17348 - RNA, 19 nt, artificial
  Chemically synthesized
gaauaaaucacauggugac

SEQ ID NO: 17349 - RNA, 19 nt, artificial
  Chemically synthesized
uggacuucuuuugagaugu

SEQ ID NO: 17350 - RNA, 19 nt, artificial
  Chemically synthesized
gacuucuuuugagauguca

SEQ ID NO: 17351 - RNA, 19 nt, artificial
  Chemically synthesized
aacaaaagugccucaacag

SEQ ID NO: 17352 - RNA, 19 nt, artificial
  Chemically synthesized
aaagugccucaacagguac

SEQ ID NO: 17353 - RNA, 19 nt, artificial
  Chemically synthesized
aagugccucaacagguaca

SEQ ID NO: 17354 - RNA, 19 nt, artificial
  Chemically synthesized
cugcuggucaaucugcuuc

SEQ ID NO: 17355 - RNA, 19 nt, artificial
  Chemically synthesized
cuccaggugucuguaucug

SEQ ID NO: 17356 - RNA, 19 nt, artificial
  Chemically synthesized
ucugggucguaacacucca

SEQ ID NO: 17357 - RNA, 19 nt, artificial
  Chemically synthesized
acacuguccaggaacgugu

SEQ ID NO: 17358 - RNA, 19 nt, artificial
  Chemically synthesized
ugugaccaucauagccucc

SEQ ID NO: 17359 - RNA, 19 nt, artificial
  Chemically synthesized
ucuggguaguaacacucag

SEQ ID NO: 17360 - RNA, 19 nt, artificial
  Chemically synthesized
cuggguaguaacacucagc

SEQ ID NO: 17361 - RNA, 19 nt, artificial
  Chemically synthesized
acauggccuugaagacagg

SEQ ID NO: 17362 - RNA, 19 nt, artificial
  Chemically synthesized
ccuuggaaaauuacagggu

SEQ ID NO: 17363 - RNA, 19 nt, artificial
  Chemically synthesized
aauaaaucacauggugaca

SEQ ID NO: 17364 - RNA, 19 nt, artificial
  Chemically synthesized
aaaagugccucaacaggua

SEQ ID NO: 17365 - RNA, 19 nt, artificial
  Chemically synthesized
caguucugcuggucaaucu

SEQ ID NO: 17366 - RNA, 19 nt, artificial
  Chemically synthesized
uucugcuggucaaucugcu

SEQ ID NO: 17367 - RNA, 19 nt, artificial
  Chemically synthesized
ugcuggucaaucugcuucc

SEQ ID NO: 17368 - RNA, 19 nt, artificial
  Chemically synthesized
gugugaccaucauagccuc

SEQ ID NO: 17369 - RNA, 19 nt, artificial
  Chemically synthesized
uggguaguaacacucagcu

SEQ ID NO: 17370 - RNA, 19 nt, artificial
  Chemically synthesized
uucgcagucguacuugacc

SEQ ID NO: 17371 - RNA, 19 nt, artificial
  Chemically synthesized
ccaaaaugcauguagaugu

SEQ ID NO: 17372 - RNA, 19 nt, artificial
  Chemically synthesized
uucaugacguggaggacac

SEQ ID NO: 17373 - RNA, 19 nt, artificial
  Chemically synthesized
cguucaugaugccaaaggc

SEQ ID NO: 17374 - RNA, 19 nt, artificial
  Chemically synthesized
gugaccaucauagccucca

SEQ ID NO: 17375 - RNA, 19 nt, artificial
  Chemically synthesized
guucaugaugccaaaggcc

SEQ ID NO: 17376 - RNA, 19 nt, artificial
  Chemically synthesized
ugaccagguaguccuugca

SEQ ID NO: 17377 - RNA, 19 nt, artificial
  Chemically synthesized
gcauguagauguacucccg

SEQ ID NO: 17378 - RNA, 19 nt, artificial
  Chemically synthesized
augacagcaccguucauga

SEQ ID NO: 17379 - RNA, 19 nt, artificial
  Chemically synthesized
gaaccacauuuccagaggg

SEQ ID NO: 17380 - RNA, 19 nt, artificial
  Chemically synthesized
agugugacgucacacagcu

SEQ ID NO: 17381 - RNA, 19 nt, artificial
  Chemically synthesized
gaacgugugaccaucauag

SEQ ID NO: 17382 - RNA, 19 nt, artificial
  Chemically synthesized
ucccugggaaccacauuuc

SEQ ID NO: 17383 - RNA, 19 nt, artificial
  Chemically synthesized
cugggaaccacauuuccag

SEQ ID NO: 17384 - RNA, 19 nt, artificial
  Chemically synthesized
cugguccugaccaucauag

SEQ ID NO: 17385 - RNA, 19 nt, artificial
  Chemically synthesized
ugguacuugaccugcagug

SEQ ID NO: 17386 - RNA, 19 nt, artificial
  Chemically synthesized
aaacaaaagugccucaaca

SEQ ID NO: 17387 - RNA, 19 nt, artificial
  Chemically synthesized
uacgaaaguccacgucucu

SEQ ID NO: 17388 - RNA, 19 nt, artificial
  Chemically synthesized
agaacuccucuugcuuggc

SEQ ID NO: 17389 - RNA, 19 nt, artificial
  Chemically synthesized
aucccugggaaccacauuu

SEQ ID NO: 17390 - RNA, 19 nt, artificial
  Chemically synthesized
agacgauugaggacagcca

SEQ ID NO: 17391 - RNA, 19 nt, artificial
  Chemically synthesized
uucugcagcugcaucugca

SEQ ID NO: 17392 - RNA, 19 nt, artificial
  Chemically synthesized
ggaugggccuguacauaga

SEQ ID NO: 17393 - RNA, 19 nt, artificial
  Chemically synthesized
cauggagcgccucauugaa

SEQ ID NO: 17394 - RNA, 19 nt, artificial
  Chemically synthesized
cauuguuuuuguacaaaaa

SEQ ID NO: 17395 - RNA, 19 nt, artificial
  Chemically synthesized
gcuacgauguggaaacaga

SEQ ID NO: 17396 - RNA, 19 nt, artificial
  Chemically synthesized
gaaugaucacagcaaugaa

SEQ ID NO: 17397 - RNA, 19 nt, artificial
  Chemically synthesized
gcaucaacugggucaagua

SEQ ID NO: 17398 - RNA, 19 nt, artificial
  Chemically synthesized
aaaugacaucucaaaagaa

SEQ ID NO: 17399 - RNA, 19 nt, artificial
  Chemically synthesized
cauccagcccugucuucaa

SEQ ID NO: 17400 - RNA, 19 nt, artificial
  Chemically synthesized
ggcgaaugaucacagcaau

SEQ ID NO: 17401 - RNA, 19 nt, artificial
  Chemically synthesized
gaaaagacagcacugcaaa

SEQ ID NO: 17402 - RNA, 19 nt, artificial
  Chemically synthesized
ccaggaugccucaguguua

SEQ ID NO: 17403 - RNA, 19 nt, artificial
  Chemically synthesized
uguuaaaaugacaucucaa

SEQ ID NO: 17404 - RNA, 19 nt, artificial
  Chemically synthesized
uggacaguguggaguguua

SEQ ID NO: 17405 - RNA, 19 nt, artificial
  Chemically synthesized
gaguaucauuguuuuugua

SEQ ID NO: 17406 - RNA, 19 nt, artificial
  Chemically synthesized
gaugggccuguacauagaa

SEQ ID NO: 17407 - RNA, 19 nt, artificial
  Chemically synthesized
aaaccgggacuaaaagaaa

SEQ ID NO: 17408 - RNA, 19 nt, artificial
  Chemically synthesized
guguuacgacccagauaca

SEQ ID NO: 17409 - RNA, 19 nt, artificial
  Chemically synthesized
gcaaggacuaccuggucaa

SEQ ID NO: 17410 - RNA, 19 nt, artificial
  Chemically synthesized
caucgauggccacaucuau

SEQ ID NO: 17411 - RNA, 19 nt, artificial
  Chemically synthesized
acaguuauuuuguugauaa

SEQ ID NO: 17412 - RNA, 19 nt, artificial
  Chemically synthesized
acaacaguguggagaggua

SEQ ID NO: 17413 - RNA, 19 nt, artificial
  Chemically synthesized
gaguguuacgacccagaua

SEQ ID NO: 17414 - RNA, 19 nt, artificial
  Chemically synthesized
guuacgacccagauacaga

SEQ ID NO: 17415 - RNA, 19 nt, artificial
  Chemically synthesized
ggacaguuauuuuguugau

SEQ ID NO: 17416 - RNA, 19 nt, artificial
  Chemically synthesized
gaaaauaaagaacagacua

SEQ ID NO: 17417 - RNA, 19 nt, artificial
  Chemically synthesized
gggacaaaccgccuuaauu

SEQ ID NO: 17418 - RNA, 19 nt, artificial
  Chemically synthesized
aggaacgaguggcgaauga

SEQ ID NO: 17419 - RNA, 19 nt, artificial
  Chemically synthesized
ucaaggccauguucaccaa

SEQ ID NO: 17420 - RNA, 19 nt, artificial
  Chemically synthesized
aagacagcacugcaaauaa

SEQ ID NO: 17421 - RNA, 19 nt, artificial
  Chemically synthesized
gaguguuacuacccagaga

SEQ ID NO: 17422 - RNA, 19 nt, artificial
  Chemically synthesized
guaucauuguuuuuguaca

SEQ ID NO: 17423 - RNA, 19 nt, artificial
  Chemically synthesized
uuaaaaugacaucucaaaa

SEQ ID NO: 17424 - RNA, 19 nt, artificial
  Chemically synthesized
cuacgauguggaaacagag

SEQ ID NO: 17425 - RNA, 19 nt, artificial
  Chemically synthesized
ucaacugggucaaguacga

SEQ ID NO: 17426 - RNA, 19 nt, artificial
  Chemically synthesized
guggaaacagagacgugga

SEQ ID NO: 17427 - RNA, 19 nt, artificial
  Chemically synthesized
gggaguacaucuacaugca

SEQ ID NO: 17428 - RNA, 19 nt, artificial
  Chemically synthesized
caggaugccucaguguuaa

SEQ ID NO: 17429 - RNA, 19 nt, artificial
  Chemically synthesized
ucauuguuuuuguacaaaa

SEQ ID NO: 17430 - RNA, 19 nt, artificial
  Chemically synthesized
uacaaaaaccgggacuaaa

SEQ ID NO: 17431 - RNA, 19 nt, artificial
  Chemically synthesized
caguuauuuuguugauaag

SEQ ID NO: 17432 - RNA, 19 nt, artificial
  Chemically synthesized
guuaaaaugacaucucaaa

SEQ ID NO: 17433 - RNA, 19 nt, artificial
  Chemically synthesized
gaugccucaguguuaaaau

SEQ ID NO: 17434 - RNA, 19 nt, artificial
  Chemically synthesized
gagcgcuacgauguggaaa

SEQ ID NO: 17435 - RNA, 19 nt, artificial
  Chemically synthesized
cuacguccuuggaggcuau

SEQ ID NO: 17436 - RNA, 19 nt, artificial
  Chemically synthesized
uggucaagaucuucgagga

SEQ ID NO: 17437 - RNA, 19 nt, artificial
  Chemically synthesized
guugauaaguaacccugua

SEQ ID NO: 17438 - RNA, 19 nt, artificial
  Chemically synthesized
gcgcuacgauguggaaaca

SEQ ID NO: 17439 - RNA, 19 nt, artificial
  Chemically synthesized
ucauggagcgccucauuga

SEQ ID NO: 17440 - RNA, 19 nt, artificial
  Chemically synthesized
aaaaugacaucucaaaaga

SEQ ID NO: 17441 - RNA, 19 nt, artificial
  Chemically synthesized
caguguggaguguuacgac

SEQ ID NO: 17442 - RNA, 19 nt, artificial
  Chemically synthesized
accuggucaagaucuucga

SEQ ID NO: 17443 - RNA, 19 nt, artificial
  Chemically synthesized
gagaaucuacguccuugga

SEQ ID NO: 17444 - RNA, 19 nt, artificial
  Chemically synthesized
aacgaguggcgaaugauca

SEQ ID NO: 17445 - RNA, 19 nt, artificial
  Chemically synthesized
gacaguuauuuuguugaua

SEQ ID NO: 17446 - RNA, 19 nt, artificial
  Chemically synthesized
aaaauaaagaacagacuaa

SEQ ID NO: 17447 - RNA, 19 nt, artificial
  Chemically synthesized
uguaauuuuccaaggaaaa

SEQ ID NO: 17448 - RNA, 19 nt, artificial
  Chemically synthesized
gaacgaguggcgaaugauc

SEQ ID NO: 17449 - RNA, 19 nt, artificial
  Chemically synthesized
ucagcuaccuggaggcuua

SEQ ID NO: 17450 - RNA, 19 nt, artificial
  Chemically synthesized
gauggacaguuauuuuguu

SEQ ID NO: 17451 - RNA, 19 nt, artificial
  Chemically synthesized
ugugauuuauucuuggaua

SEQ ID NO: 17452 - RNA, 19 nt, artificial
  Chemically synthesized
caggccuuuggcaucauga

SEQ ID NO: 17453 - RNA, 19 nt, artificial
  Chemically synthesized
guuauuuuguugauaagua

SEQ ID NO: 17454 - RNA, 19 nt, artificial
  Chemically synthesized
aaaagacagcacugcaaau

SEQ ID NO: 17455 - RNA, 19 nt, artificial
  Chemically synthesized
caaaaaccgggacuaaaag

SEQ ID NO: 17456 - RNA, 19 nt, artificial
  Chemically synthesized
aucucaaaagaaguccaaa

SEQ ID NO: 17457 - RNA, 19 nt, artificial
  Chemically synthesized
gagguggugguguugcuua

SEQ ID NO: 17458 - RNA, 19 nt, artificial
  Chemically synthesized
gcaggucaaguaccaggau

SEQ ID NO: 17459 - RNA, 19 nt, artificial
  Chemically synthesized
gauaaguaacccuguaauu

SEQ ID NO: 17460 - RNA, 19 nt, artificial
  Chemically synthesized
uguuucuugggcaaaaaua

SEQ ID NO: 17461 - RNA, 19 nt, artificial
  Chemically synthesized
guuacuacccagagaggaa

SEQ ID NO: 17462 - RNA, 19 nt, artificial
  Chemically synthesized
caaugaacaccauccgaag

SEQ ID NO: 17463 - RNA, 19 nt, artificial
  Chemically synthesized
gaaacagagacguggacuu

SEQ ID NO: 17464 - RNA, 19 nt, artificial
  Chemically synthesized
uacgauguggaaacagaga

SEQ ID NO: 17465 - RNA, 19 nt, artificial
  Chemically synthesized
caaugcugacacgaaggau

SEQ ID NO: 17466 - RNA, 19 nt, artificial
  Chemically synthesized
ccuuggaggcuaugauggu

SEQ ID NO: 17467 - RNA, 19 nt, artificial
  Chemically synthesized
caguguggagagguaugag

SEQ ID NO: 17468 - RNA, 19 nt, artificial
  Chemically synthesized
uguggaguguuacgaccca

SEQ ID NO: 17469 - RNA, 19 nt, artificial
  Chemically synthesized
uuuuguuucuugggcaaaa

SEQ ID NO: 17470 - RNA, 19 nt, artificial
  Chemically synthesized
gcagaacuguaccuguuga

SEQ ID NO: 17471 - RNA, 19 nt, artificial
  Chemically synthesized
aaaaccgggacuaaaagaa

SEQ ID NO: 17472 - RNA, 19 nt, artificial
  Chemically synthesized
gacaaaccgccuuaauuca

SEQ ID NO: 17473 - RNA, 19 nt, artificial
  Chemically synthesized
gaggugacccgaaugacau

SEQ ID NO: 17474 - RNA, 19 nt, artificial
  Chemically synthesized
ggaguacaucuacaugcau

SEQ ID NO: 17475 - RNA, 19 nt, artificial
  Chemically synthesized
aagcaagaggaguucuuca

SEQ ID NO: 17476 - RNA, 19 nt, artificial
  Chemically synthesized
aggacuaccuggucaagau

SEQ ID NO: 17477 - RNA, 19 nt, artificial
  Chemically synthesized
aaguguguccuccacguca

SEQ ID NO: 17478 - RNA, 19 nt, artificial
  Chemically synthesized
caugugauuuauucuugga

SEQ ID NO: 17479 - RNA, 19 nt, artificial
  Chemically synthesized
ggucaaguaccaggaugca

SEQ ID NO: 17480 - RNA, 19 nt, artificial
  Chemically synthesized
gaguacaucuacaugcauu

SEQ ID NO: 17481 - RNA, 19 nt, artificial
  Chemically synthesized
cagcagaacuguaccuguu

SEQ ID NO: 17482 - RNA, 19 nt, artificial
  Chemically synthesized
aagaaaagacagcacugca

SEQ ID NO: 17483 - RNA, 19 nt, artificial
  Chemically synthesized
gucauguaccagaucgaca

SEQ ID NO: 17484 - RNA, 19 nt, artificial
  Chemically synthesized
cagauugaccagcagaacu

SEQ ID NO: 17485 - RNA, 19 nt, artificial
  Chemically synthesized
aauuuuccaaggaaaauaa

SEQ ID NO: 17486 - RNA, 19 nt, artificial
  Chemically synthesized
ccuguugaggcacuuuugu

SEQ ID NO: 17487 - RNA, 19 nt, artificial
  Chemically synthesized
caacuucgcugagcagauu

SEQ ID NO: 17488 - RNA, 19 nt, artificial
  Chemically synthesized
caacuggugacccucauca

SEQ ID NO: 17489 - RNA, 19 nt, artificial
  Chemically synthesized
ugauguacgccuccacuga

SEQ ID NO: 17490 - RNA, 19 nt, artificial
  Chemically synthesized
ucaagaucuucgaggagcu

SEQ ID NO: 17491 - RNA, 19 nt, artificial
  Chemically synthesized
aaaaaccgggacuaaaaga

SEQ ID NO: 17492 - RNA, 19 nt, artificial
  Chemically synthesized
uguugauaaguaacccugu

SEQ ID NO: 17493 - RNA, 19 nt, artificial
  Chemically synthesized
uuggcuguguggaguugca

SEQ ID NO: 17494 - RNA, 19 nt, artificial
  Chemically synthesized
uaaagaacagacuaacuag

SEQ ID NO: 17495 - RNA, 19 nt, artificial
  Chemically synthesized
agcaaugaacaccauccga

SEQ ID NO: 17496 - RNA, 19 nt, artificial
  Chemically synthesized
guguggaaagagcaggcuu

SEQ ID NO: 17497 - RNA, 19 nt, artificial
  Chemically synthesized
guggcgaaugaucacagca

SEQ ID NO: 17498 - RNA, 19 nt, artificial
  Chemically synthesized
agacagcacugcaaauaac

SEQ ID NO: 17499 - RNA, 19 nt, artificial
  Chemically synthesized
agaagugcgagauccugca

SEQ ID NO: 17500 - RNA, 19 nt, artificial
  Chemically synthesized
aaagagcaggcuuccagga

SEQ ID NO: 17501 - RNA, 19 nt, artificial
  Chemically synthesized
uaucauuguuuuuguacaa

SEQ ID NO: 17502 - RNA, 19 nt, artificial
  Chemically synthesized
cagcacugcaaauaaccca

SEQ ID NO: 17503 - RNA, 19 nt, artificial
  Chemically synthesized
agggaugggccuguacaua

SEQ ID NO: 17504 - RNA, 19 nt, artificial
  Chemically synthesized
aaugacaucucaaaagaag

SEQ ID NO: 17505 - RNA, 19 nt, artificial
  Chemically synthesized
cuaccuggaggcuuacaac

SEQ ID NO: 17506 - RNA, 19 nt, artificial
  Chemically synthesized
aacuguaccuguugaggca

SEQ ID NO: 17507 - RNA, 19 nt, artificial
  Chemically synthesized
guuucuugggcaaaaauac

SEQ ID NO: 17508 - RNA, 19 nt, artificial
  Chemically synthesized
aaggaaaauaaagaacaga

SEQ ID NO: 17509 - RNA, 19 nt, artificial
  Chemically synthesized
cuuuuguuucuugggcaaa

SEQ ID NO: 17510 - RNA, 19 nt, artificial
  Chemically synthesized
aaagaacagacuaacuagu

SEQ ID NO: 17511 - RNA, 19 nt, artificial
  Chemically synthesized
gaguggcgaaugaucacag

SEQ ID NO: 17512 - RNA, 19 nt, artificial
  Chemically synthesized
aauucagcugaguguuacu

SEQ ID NO: 17513 - RNA, 19 nt, artificial
  Chemically synthesized
uguggagagguaugagcca

SEQ ID NO: 17514 - RNA, 19 nt, artificial
  Chemically synthesized
auuuuccaaggaaaauaaa

SEQ ID NO: 17515 - RNA, 19 nt, artificial
  Chemically synthesized
ggugguguugcuuaucuuc

SEQ ID NO: 17516 - RNA, 19 nt, artificial
  Chemically synthesized
aguccaaagcgggaaucau

SEQ ID NO: 17517 - RNA, 19 nt, artificial
  Chemically synthesized
auaaagaacagacuaacua

SEQ ID NO: 17518 - RNA, 19 nt, artificial
  Chemically synthesized
acuaccuggucaagaucuu

SEQ ID NO: 17519 - RNA, 19 nt, artificial
  Chemically synthesized
uuuuguacaaaaaccggga

SEQ ID NO: 17520 - RNA, 19 nt, artificial
  Chemically synthesized
uacauagaagccaccggau

SEQ ID NO: 17521 - RNA, 19 nt, artificial
  Chemically synthesized
cagauuggcuguguggagu

SEQ ID NO: 17522 - RNA, 19 nt, artificial
  Chemically synthesized
uauucuuggauaccuggga

SEQ ID NO: 17523 - RNA, 19 nt, artificial
  Chemically synthesized
cauggaggugguguccauu

SEQ ID NO: 17524 - RNA, 19 nt, artificial
  Chemically synthesized
cagagacguggacuuucgu

SEQ ID NO: 17525 - RNA, 19 nt, artificial
  Chemically synthesized
gauugaccagcagaacugu

SEQ ID NO: 17526 - RNA, 19 nt, artificial
  Chemically synthesized
uuucuugggcaaaaauaca

SEQ ID NO: 17527 - RNA, 19 nt, artificial
  Chemically synthesized
gacaguguggaguguuacg

SEQ ID NO: 17528 - RNA, 19 nt, artificial
  Chemically synthesized
cagaugcagcugcagaagu

SEQ ID NO: 17529 - RNA, 19 nt, artificial
  Chemically synthesized
aagcagauugaccagcaga

SEQ ID NO: 17530 - RNA, 19 nt, artificial
  Chemically synthesized
aggcuaugauggucacacg

SEQ ID NO: 17531 - RNA, 19 nt, artificial
  Chemically synthesized
uuccaaggaaaauaaagaa

SEQ ID NO: 17532 - RNA, 19 nt, artificial
  Chemically synthesized
aaccgcaccuucagcuaca

SEQ ID NO: 17533 - RNA, 19 nt, artificial
  Chemically synthesized
gucuucaaggccauguuca

SEQ ID NO: 17534 - RNA, 19 nt, artificial
  Chemically synthesized
cgaaugaucacagcaauga

SEQ ID NO: 17535 - RNA, 19 nt, artificial
  Chemically synthesized
uguccauugaggguaucca

SEQ ID NO: 17536 - RNA, 19 nt, artificial
  Chemically synthesized
uggagcgccucauugaauu

SEQ ID NO: 17537 - RNA, 19 nt, artificial
  Chemically synthesized
aauaaagaacagacuaacu

SEQ ID NO: 17538 - RNA, 19 nt, artificial
  Chemically synthesized
auugaccagcagaacugua

SEQ ID NO: 17539 - RNA, 19 nt, artificial
  Chemically synthesized
aaagaaguccaaagcggga

SEQ ID NO: 17540 - RNA, 19 nt, artificial
  Chemically synthesized
uuacgacccagauacagac

SEQ ID NO: 17541 - RNA, 19 nt, artificial
  Chemically synthesized
aguucuucaaccuguccca

SEQ ID NO: 17542 - RNA, 19 nt, artificial
  Chemically synthesized
uuaauucagcugaguguua

SEQ ID NO: 17543 - RNA, 19 nt, artificial
  Chemically synthesized
cauugaauucgccuacacg

SEQ ID NO: 17544 - RNA, 19 nt, artificial
  Chemically synthesized
agagguggugguguugcuu

SEQ ID NO: 17545 - RNA, 19 nt, artificial
  Chemically synthesized
uaaguaacccuguaauuuu

SEQ ID NO: 17546 - RNA, 19 nt, artificial
  Chemically synthesized
caucaacugggucaaguac

SEQ ID NO: 17547 - RNA, 19 nt, artificial
  Chemically synthesized
ggucaagaucuucgaggag

SEQ ID NO: 17548 - RNA, 19 nt, artificial
  Chemically synthesized
ugccucaguguuaaaauga

SEQ ID NO: 17549 - RNA, 19 nt, artificial
  Chemically synthesized
ucacagcaaugaacaccau

SEQ ID NO: 17550 - RNA, 19 nt, artificial
  Chemically synthesized
caaggacuaccuggucaag

SEQ ID NO: 17551 - RNA, 19 nt, artificial
  Chemically synthesized
aguucauggcccacaaggu

SEQ ID NO: 17552 - RNA, 19 nt, artificial
  Chemically synthesized
ucuucaaggccauguucac

SEQ ID NO: 17553 - RNA, 19 nt, artificial
  Chemically synthesized
ugcaggucaaguaccagga

SEQ ID NO: 17554 - RNA, 19 nt, artificial
  Chemically synthesized
gguguugcuuaucuucugg

SEQ ID NO: 17555 - RNA, 19 nt, artificial
  Chemically synthesized
gaaucuacguccuuggagg

SEQ ID NO: 17556 - RNA, 19 nt, artificial
  Chemically synthesized
caaaagaaguccaaagcgg

SEQ ID NO: 17557 - RNA, 19 nt, artificial
  Chemically synthesized
uuguuucuugggcaaaaau

SEQ ID NO: 17558 - RNA, 19 nt, artificial
  Chemically synthesized
uacgacccagauacagaca

SEQ ID NO: 17559 - RNA, 19 nt, artificial
  Chemically synthesized
aguguuacgacccagauac

SEQ ID NO: 17560 - RNA, 19 nt, artificial
  Chemically synthesized
gcgaaugaucacagcaaug

SEQ ID NO: 17561 - RNA, 19 nt, artificial
  Chemically synthesized
acgaguggcgaaugaucac

SEQ ID NO: 17562 - RNA, 19 nt, artificial
  Chemically synthesized
aguggcgaaugaucacagc

SEQ ID NO: 17563 - RNA, 19 nt, artificial
  Chemically synthesized
cuuaauucagcugaguguu

SEQ ID NO: 17564 - RNA, 19 nt, artificial
  Chemically synthesized
auggagcgccucauugaau

SEQ ID NO: 17565 - RNA, 19 nt, artificial
  Chemically synthesized
gcuaugauggucacacguu

SEQ ID NO: 17566 - RNA, 19 nt, artificial
  Chemically synthesized
aaauaaagaacagacuaac

SEQ ID NO: 17567 - RNA, 19 nt, artificial
  Chemically synthesized
uaaaaugacaucucaaaag

SEQ ID NO: 17568 - RNA, 19 nt, artificial
  Chemically synthesized
guaauuuuccaaggaaaau

SEQ ID NO: 17569 - RNA, 19 nt, artificial
  Chemically synthesized
guugcuuaucuucuggaac

SEQ ID NO: 17570 - RNA, 19 nt, artificial
  Chemically synthesized
guggugguguugcuuaucu

SEQ ID NO: 17571 - RNA, 19 nt, artificial
  Chemically synthesized
aacaguguggagagguaug

SEQ ID NO: 17572 - RNA, 19 nt, artificial
  Chemically synthesized
aguguggaguguuacgacc

SEQ ID NO: 17573 - RNA, 19 nt, artificial
  Chemically synthesized
gguggugguguugcuuauc

SEQ ID NO: 17574 - RNA, 19 nt, artificial
  Chemically synthesized
auggucaggaccagcugaa

SEQ ID NO: 17575 - RNA, 19 nt, artificial
  Chemically synthesized
caaggccauguucaccaac

SEQ ID NO: 17576 - RNA, 19 nt, artificial
  Chemically synthesized
ucuacguccuuggaggcua

SEQ ID NO: 17577 - RNA, 19 nt, artificial
  Chemically synthesized
augacaucucaaaagaagu

SEQ ID NO: 17578 - RNA, 19 nt, artificial
  Chemically synthesized
aaaagaaaagacagcacug

SEQ ID NO: 17579 - RNA, 19 nt, artificial
  Chemically synthesized
acuuccugcagaugcagcu

SEQ ID NO: 17580 - RNA, 19 nt, artificial
  Chemically synthesized
gagacguggacuuucguag

SEQ ID NO: 17581 - RNA, 19 nt, artificial
  Chemically synthesized
acucguugacgccgaacuu

SEQ ID NO: 17582 - RNA, 19 nt, artificial
  Chemically synthesized
ucuugggcaaaaauacagu

SEQ ID NO: 17583 - RNA, 19 nt, artificial
  Chemically synthesized
uguuacgacccagauacag

SEQ ID NO: 17584 - RNA, 19 nt, artificial
  Chemically synthesized
caugaacggugcugucaug

SEQ ID NO: 17585 - RNA, 19 nt, artificial
  Chemically synthesized
ccaaugcugacacgaagga

SEQ ID NO: 17586 - RNA, 19 nt, artificial
  Chemically synthesized
aguuauuuuguugauaagu

SEQ ID NO: 17587 - RNA, 19 nt, artificial
  Chemically synthesized
ucauccagcccugucuuca

SEQ ID NO: 17588 - RNA, 19 nt, artificial
  Chemically synthesized
auggucacacguuccugga

SEQ ID NO: 17589 - RNA, 19 nt, artificial
  Chemically synthesized
ggacaaaccgccuuaauuc

SEQ ID NO: 17590 - RNA, 19 nt, artificial
  Chemically synthesized
gaucauaccaagcaggccu

SEQ ID NO: 17591 - RNA, 19 nt, artificial
  Chemically synthesized
uacccagagaggaacgagu

SEQ ID NO: 17592 - RNA, 19 nt, artificial
  Chemically synthesized
gugguguugcuuaucuucu

SEQ ID NO: 17593 - RNA, 19 nt, artificial
  Chemically synthesized
augccucaguguuaaaaug

SEQ ID NO: 17594 - RNA, 19 nt, artificial
  Chemically synthesized
caucuacaugcauuuuggg

SEQ ID NO: 17595 - RNA, 19 nt, artificial
  Chemically synthesized
acuaaaagaaaagacagca

SEQ ID NO: 17596 - RNA, 19 nt, artificial
  Chemically synthesized
ugugugacgucacacugca

SEQ ID NO: 17597 - RNA, 19 nt, artificial
  Chemically synthesized
uguaccagaucgacagcgu

SEQ ID NO: 17598 - RNA, 19 nt, artificial
  Chemically synthesized
acguccuuggaggcuauga

SEQ ID NO: 17599 - RNA, 19 nt, artificial
  Chemically synthesized
aaacagagacguggacuuu

SEQ ID NO: 17600 - RNA, 19 nt, artificial
  Chemically synthesized
ccaaagcgggaaucaugug

SEQ ID NO: 17601 - RNA, 19 nt, artificial
  Chemically synthesized
aacagcgacgguucuacgu

SEQ ID NO: 17602 - RNA, 19 nt, artificial
  Chemically synthesized
gugauuuauucuuggauac

SEQ ID NO: 17603 - RNA, 19 nt, artificial
  Chemically synthesized
augugauuuauucuuggau

SEQ ID NO: 17604 - RNA, 19 nt, artificial
  Chemically synthesized
ccuggucaagaucuucgag

SEQ ID NO: 17605 - RNA, 19 nt, artificial
  Chemically synthesized
aaguaacccuguaauuuuc

SEQ ID NO: 17606 - RNA, 19 nt, artificial
  Chemically synthesized
ucuuccacgccugcaucaa

SEQ ID NO: 17607 - RNA, 19 nt, artificial
  Chemically synthesized
guccauugaggguauccac

SEQ ID NO: 17608 - RNA, 19 nt, artificial
  Chemically synthesized
guccuuggaggcuaugaug

SEQ ID NO: 17609 - RNA, 19 nt, artificial
  Chemically synthesized
gcuaugauggucaggacca

SEQ ID NO: 17610 - RNA, 19 nt, artificial
  Chemically synthesized
caccacaacaguguggaga

SEQ ID NO: 17611 - RNA, 19 nt, artificial
  Chemically synthesized
caaguacgacugcgaacag

SEQ ID NO: 17612 - RNA, 19 nt, artificial
  Chemically synthesized
uuuccaaggaaaauaaaga

SEQ ID NO: 17613 - RNA, 19 nt, artificial
  Chemically synthesized
uggaaagagcaggcuucca

SEQ ID NO: 17614 - RNA, 19 nt, artificial
  Chemically synthesized
aaagacagcacugcaaaua

SEQ ID NO: 17615 - RNA, 19 nt, artificial
  Chemically synthesized
gauguggaaacagagacgu

SEQ ID NO: 17616 - RNA, 19 nt, artificial
  Chemically synthesized
uaaaagaaaagacagcacu

SEQ ID NO: 17617 - RNA, 19 nt, artificial
  Chemically synthesized
augggccuguacauagaag

SEQ ID NO: 17618 - RNA, 19 nt, artificial
  Chemically synthesized
cuguaucuaugcugcuggg

SEQ ID NO: 17619 - RNA, 19 nt, artificial
  Chemically synthesized
agcagauuggcugugugga

SEQ ID NO: 17620 - RNA, 19 nt, artificial
  Chemically synthesized
caacuguaucuaugcugcu

SEQ ID NO: 17621 - RNA, 19 nt, artificial
  Chemically synthesized
aguguuacuacccagagag

SEQ ID NO: 17622 - RNA, 19 nt, artificial
  Chemically synthesized
uaauuuuccaaggaaaaua

SEQ ID NO: 17623 - RNA, 19 nt, artificial
  Chemically synthesized
ggcacuuuuguuucuuggg

SEQ ID NO: 17624 - RNA, 19 nt, artificial
  Chemically synthesized
uguggaaagagcaggcuuc

SEQ ID NO: 17625 - RNA, 19 nt, artificial
  Chemically synthesized
ugcagaagugcgagauccu

SEQ ID NO: 17626 - RNA, 19 nt, artificial
  Chemically synthesized
acauagaagccaccggaug

SEQ ID NO: 17627 - RNA, 19 nt, artificial
  Chemically synthesized
gcacaacuguaucuaugcu

SEQ ID NO: 17628 - RNA, 19 nt, artificial
  Chemically synthesized
aacuggugacccucaucag

SEQ ID NO: 17629 - RNA, 19 nt, artificial
  Chemically synthesized
aggcacuuuuguuucuugg

SEQ ID NO: 17630 - RNA, 19 nt, artificial
  Chemically synthesized
accuguugaggcacuuuug

SEQ ID NO: 17631 - RNA, 19 nt, artificial
  Chemically synthesized
ugaucacagcaaugaacac

SEQ ID NO: 17632 - RNA, 19 nt, artificial
  Chemically synthesized
cauccaccacaacagugug

SEQ ID NO: 17633 - RNA, 19 nt, artificial
  Chemically synthesized
cugcauccaccacaacagu

SEQ ID NO: 17634 - RNA, 19 nt, artificial
  Chemically synthesized
cuuggaggcuaugaugguc

SEQ ID NO: 17635 - RNA, 19 nt, artificial
  Chemically synthesized
cguccugcacaacuguauc

SEQ ID NO: 17636 - RNA, 19 nt, artificial
  Chemically synthesized
gaggaucauaccaagcagg

SEQ ID NO: 17637 - RNA, 19 nt, artificial
  Chemically synthesized
augaucacagcaaugaaca

SEQ ID NO: 17638 - RNA, 19 nt, artificial
  Chemically synthesized
aaugcugacacgaaggauc

SEQ ID NO: 17639 - RNA, 19 nt, artificial
  Chemically synthesized
gcauccaccacaacagugu

SEQ ID NO: 17640 - RNA, 19 nt, artificial
  Chemically synthesized
gucacacugcaggucaagu

SEQ ID NO: 17641 - RNA, 19 nt, artificial
  Chemically synthesized
uguggaaacagagacgugg

SEQ ID NO: 17642 - RNA, 19 nt, artificial
  Chemically synthesized
accagaucgacagcguugu

SEQ ID NO: 17643 - RNA, 19 nt, artificial
  Chemically synthesized
acuagugucuuucacccug

SEQ ID NO: 17644 - RNA, 19 nt, artificial
  Chemically synthesized
auuuauucuuggauaccug

SEQ ID NO: 17645 - RNA, 19 nt, artificial
  Chemically synthesized
ucuucaaccugucccacug

SEQ ID NO: 17646 - RNA, 19 nt, artificial
  Chemically synthesized
ugaccagcagaacuguacc

SEQ ID NO: 17647 - RNA, 19 nt, artificial
  Chemically synthesized
ggacuaccuggucaagauc

SEQ ID NO: 17648 - RNA, 19 nt, artificial
  Chemically synthesized
cugcaucaacugggucaag

SEQ ID NO: 17649 - RNA, 19 nt, artificial
  Chemically synthesized
caaucgucuccuuuaugcc

SEQ ID NO: 17650 - RNA, 19 nt, artificial
  Chemically synthesized
uuggaggcuaugaugguca

SEQ ID NO: 17651 - RNA, 19 nt, artificial
  Chemically synthesized
ucacacugcaggucaagua

SEQ ID NO: 17652 - RNA, 19 nt, artificial
  Chemically synthesized
uacacccuggaggaucaua

SEQ ID NO: 17653 - RNA, 19 nt, artificial
  Chemically synthesized
agaaucuacguccuuggag

SEQ ID NO: 17654 - RNA, 19 nt, artificial
  Chemically synthesized
agaucuucgaggagcucac

SEQ ID NO: 17655 - RNA, 19 nt, artificial
  Chemically synthesized
aagcaggccuuuggcauca

SEQ ID NO: 17656 - RNA, 19 nt, artificial
  Chemically synthesized
ugauggucacacguuccug

SEQ ID NO: 17657 - RNA, 19 nt, artificial
  Chemically synthesized
cagcaaugaacaccauccg

SEQ ID NO: 17658 - RNA, 19 nt, artificial
  Chemically synthesized
gacuaaaagaaaagacagc

SEQ ID NO: 17659 - RNA, 19 nt, artificial
  Chemically synthesized
cugcaaauaacccaucuuc

SEQ ID NO: 17660 - RNA, 19 nt, artificial
  Chemically synthesized
gucaugaacggugcuguca

SEQ ID NO: 17661 - RNA, 19 nt, artificial
  Chemically synthesized
auaaguaacccuguaauuu

SEQ ID NO: 17662 - RNA, 19 nt, artificial
  Chemically synthesized
aaaccgccuuaauucagcu

SEQ ID NO: 17663 - RNA, 19 nt, artificial
  Chemically synthesized
aguguggagagguaugagc

SEQ ID NO: 17664 - RNA, 19 nt, artificial
  Chemically synthesized
gaacuuccugcagaugcag

SEQ ID NO: 17665 - RNA, 19 nt, artificial
  Chemically synthesized
acuacccagagaggaacga

SEQ ID NO: 17666 - RNA, 19 nt, artificial
  Chemically synthesized
ugcguccugcacaacugua

SEQ ID NO: 17667 - RNA, 19 nt, artificial
  Chemically synthesized
uguuacuacccagagagga

SEQ ID NO: 17668 - RNA, 19 nt, artificial
  Chemically synthesized
cuaccuggucaagaucuuc

SEQ ID NO: 17669 - RNA, 19 nt, artificial
  Chemically synthesized
acgauguggaaacagagac

SEQ ID NO: 17670 - RNA, 19 nt, artificial
  Chemically synthesized
cauguaccagaucgacagc

SEQ ID NO: 17671 - RNA, 19 nt, artificial
  Chemically synthesized
gucaaguacgacugcgaac

SEQ ID NO: 17672 - RNA, 19 nt, artificial
  Chemically synthesized
acaaaccgccuuaauucag

SEQ ID NO: 17673 - RNA, 19 nt, artificial
  Chemically synthesized
aacuagugucuuucacccu

SEQ ID NO: 17674 - RNA, 19 nt, artificial
  Chemically synthesized
gauuggcuguguggaguug

SEQ ID NO: 17675 - RNA, 19 nt, artificial
  Chemically synthesized
auucuuggauaccugggag

SEQ ID NO: 17676 - RNA, 19 nt, artificial
  Chemically synthesized
uguccuccacgucaugaac

SEQ ID NO: 17677 - RNA, 19 nt, artificial
  Chemically synthesized
ucucaaaagaaguccaaag

SEQ ID NO: 17678 - RNA, 19 nt, artificial
  Chemically synthesized
auguggaaacagagacgug

SEQ ID NO: 17679 - RNA, 19 nt, artificial
  Chemically synthesized
aagaaguccaaagcgggaa

SEQ ID NO: 17680 - RNA, 19 nt, artificial
  Chemically synthesized
aucauuguuuuuguacaaa

SEQ ID NO: 17681 - RNA, 19 nt, artificial
  Chemically synthesized
uuggcaucaugaacgagcu

SEQ ID NO: 17682 - RNA, 19 nt, artificial
  Chemically synthesized
caaaccgccuuaauucagc

SEQ ID NO: 17683 - RNA, 19 nt, artificial
  Chemically synthesized
cucaaucgucuccuuuaug

SEQ ID NO: 17684 - RNA, 19 nt, artificial
  Chemically synthesized
aaguccaaagcgggaauca

SEQ ID NO: 17685 - RNA, 19 nt, artificial
  Chemically synthesized
agcuaccuggaggcuuaca

SEQ ID NO: 17686 - RNA, 19 nt, artificial
  Chemically synthesized
auaacccaucuuccgggaa

SEQ ID NO: 17687 - RNA, 19 nt, artificial
  Chemically synthesized
cucaaaagaaguccaaagc

SEQ ID NO: 17688 - RNA, 19 nt, artificial
  Chemically synthesized
gacagcacugcaaauaacc

SEQ ID NO: 17689 - RNA, 19 nt, artificial
  Chemically synthesized
agcugucaccaugugauuu

SEQ ID NO: 17690 - RNA, 19 nt, artificial
  Chemically synthesized
aaggacuaccuggucaaga

SEQ ID NO: 17691 - RNA, 19 nt, artificial
  Chemically synthesized
gacccagauacagacaccu

SEQ ID NO: 17692 - RNA, 19 nt, artificial
  Chemically synthesized
caagcaagaggaguucuuc

SEQ ID NO: 17693 - RNA, 19 nt, artificial
  Chemically synthesized
caagaggaguucuucaacc

SEQ ID NO: 17694 - RNA, 19 nt, artificial
  Chemically synthesized
aucacagcaaugaacacca

SEQ ID NO: 17695 - RNA, 19 nt, artificial
  Chemically synthesized
ucaccaugugauuuauucu

SEQ ID NO: 17696 - RNA, 19 nt, artificial
  Chemically synthesized
agcagaacuguaccuguug

SEQ ID NO: 17697 - RNA, 19 nt, artificial
  Chemically synthesized
aaaaauacaguccaauggg

SEQ ID NO: 17698 - RNA, 19 nt, artificial
  Chemically synthesized
aaugaucacagcaaugaac

SEQ ID NO: 17699 - RNA, 19 nt, artificial
  Chemically synthesized
uauuuuguugauaaguaac

SEQ ID NO: 17700 - RNA, 19 nt, artificial
  Chemically synthesized
uccaaagcgggaaucaugu

SEQ ID NO: 17701 - RNA, 19 nt, artificial
  Chemically synthesized
acccuggaggaucauacca

SEQ ID NO: 17702 - RNA, 19 nt, artificial
  Chemically synthesized
agacguggacuuucguagc

SEQ ID NO: 17703 - RNA, 19 nt, artificial
  Chemically synthesized
guccaaagcgggaaucaug

SEQ ID NO: 17704 - RNA, 19 nt, artificial
  Chemically synthesized
ugcaaauaacccaucuucc

SEQ ID NO: 17705 - RNA, 19 nt, artificial
  Chemically synthesized
uaauucagcugaguguuac

SEQ ID NO: 17706 - RNA, 19 nt, artificial
  Chemically synthesized
aagaggaguucuucaaccu

SEQ ID NO: 17707 - RNA, 19 nt, artificial
  Chemically synthesized
ucuggaaaugugguuccca

SEQ ID NO: 17708 - RNA, 19 nt, artificial
  Chemically synthesized
gcaaauaacccaucuuccg

SEQ ID NO: 17709 - RNA, 19 nt, artificial
  Chemically synthesized
uugaggcacuuuuguuucu

SEQ ID NO: 17710 - RNA, 19 nt, artificial
  Chemically synthesized
ucacacguuccuggacagu

SEQ ID NO: 17711 - RNA, 19 nt, artificial
  Chemically synthesized
cuuuggcaucaugaacgag

SEQ ID NO: 17712 - RNA, 19 nt, artificial
  Chemically synthesized
aucauaccaagcaggccuu

SEQ ID NO: 17713 - RNA, 19 nt, artificial
  Chemically synthesized
aggugacccgaaugacauc

SEQ ID NO: 17714 - RNA, 19 nt, artificial
  Chemically synthesized
aauaacccaucuuccggga

SEQ ID NO: 17715 - RNA, 19 nt, artificial
  Chemically synthesized
accacaacaguguggagag

SEQ ID NO: 17716 - RNA, 19 nt, artificial
  Chemically synthesized
aagaacagacuaacuagug

SEQ ID NO: 17717 - RNA, 19 nt, artificial
  Chemically synthesized
guuuuuguacaaaaaccgg

SEQ ID NO: 17718 - RNA, 19 nt, artificial
  Chemically synthesized
ucaaaagaaguccaaagcg

SEQ ID NO: 17719 - RNA, 19 nt, artificial
  Chemically synthesized
uguguccuccacgucauga

SEQ ID NO: 17720 - RNA, 19 nt, artificial
  Chemically synthesized
ucagcugaguguuacuacc

SEQ ID NO: 17721 - RNA, 19 nt, artificial
  Chemically synthesized
ugucuucaaggccauguuc

SEQ ID NO: 17722 - RNA, 19 nt, artificial
  Chemically synthesized
cacacugcaggucaaguac

SEQ ID NO: 17723 - RNA, 19 nt, artificial
  Chemically synthesized
uggaaaugugguucccagg

SEQ ID NO: 17724 - RNA, 19 nt, artificial
  Chemically synthesized
acgacccagauacagacac

SEQ ID NO: 17725 - RNA, 19 nt, artificial
  Chemically synthesized
aucgauggccacaucuaug

SEQ ID NO: 17726 - RNA, 19 nt, artificial
  Chemically synthesized
guguuacuacccagagagg

SEQ ID NO: 17727 - RNA, 19 nt, artificial
  Chemically synthesized
gacuaccuggucaagaucu

SEQ ID NO: 17728 - RNA, 19 nt, artificial
  Chemically synthesized
acugcaggucaaguaccag

SEQ ID NO: 17729 - RNA, 19 nt, artificial
  Chemically synthesized
aaaagaaguccaaagcggg

SEQ ID NO: 17730 - RNA, 19 nt, artificial
  Chemically synthesized
ugcugucauguaccagauc

SEQ ID NO: 17731 - RNA, 19 nt, artificial
  Chemically synthesized
aaggccauguucaccaacg

SEQ ID NO: 17732 - RNA, 19 nt, artificial
  Chemically synthesized
accaugugauuuauucuug

SEQ ID NO: 17733 - RNA, 19 nt, artificial
  Chemically synthesized
auacagacaccuggagcga

SEQ ID NO: 17734 - RNA, 19 nt, artificial
  Chemically synthesized
augauggucacacguuccu

SEQ ID NO: 17735 - RNA, 19 nt, artificial
  Chemically synthesized
uaacccaucuuccgggaag

SEQ ID NO: 17736 - RNA, 19 nt, artificial
  Chemically synthesized
acagagacguggacuuucg

SEQ ID NO: 17737 - RNA, 19 nt, artificial
  Chemically synthesized
ccuguacauagaagccacc

SEQ ID NO: 17738 - RNA, 19 nt, artificial
  Chemically synthesized
aagugcgagauccugcagu

SEQ ID NO: 17739 - RNA, 19 nt, artificial
  Chemically synthesized
ugaguguuacuacccagag

SEQ ID NO: 17740 - RNA, 19 nt, artificial
  Chemically synthesized
agaggaguucuucaaccug

SEQ ID NO: 17741 - RNA, 19 nt, artificial
  Chemically synthesized
aacugggucaaguacgacu

SEQ ID NO: 17742 - RNA, 19 nt, artificial
  Chemically synthesized
guugaggcacuuuuguuuc

SEQ ID NO: 17743 - RNA, 19 nt, artificial
  Chemically synthesized
auggccacaucuaugccgu

SEQ ID NO: 17744 - RNA, 19 nt, artificial
  Chemically synthesized
acuucgcugagcagauugg

SEQ ID NO: 17745 - RNA, 19 nt, artificial
  Chemically synthesized
cuaacuagugucuuucacc

SEQ ID NO: 17746 - RNA, 19 nt, artificial
  Chemically synthesized
cugcacaacuguaucuaug

SEQ ID NO: 17747 - RNA, 19 nt, artificial
  Chemically synthesized
acgucaugaacggugcugu

SEQ ID NO: 17748 - RNA, 19 nt, artificial
  Chemically synthesized
agauacagacaccuggagc

SEQ ID NO: 17749 - RNA, 19 nt, artificial
  Chemically synthesized
acugggucaaguacgacug

SEQ ID NO: 17750 - RNA, 19 nt, artificial
  Chemically synthesized
acuaacuagugucuuucac

SEQ ID NO: 17751 - RNA, 19 nt, artificial
  Chemically synthesized
aacagagacguggacuuuc

SEQ ID NO: 17752 - RNA, 19 nt, artificial
  Chemically synthesized
cuugggcaaaaauacaguc

SEQ ID NO: 17753 - RNA, 19 nt, artificial
  Chemically synthesized
guucuucaaccugucccac

SEQ ID NO: 17754 - RNA, 19 nt, artificial
  Chemically synthesized
aggucaaguaccaggaugc

SEQ ID NO: 17755 - RNA, 19 nt, artificial
  Chemically synthesized
ucaaguaccaggaugcacc

SEQ ID NO: 17756 - RNA, 19 nt, artificial
  Chemically synthesized
agcgccucauugaauucgc

SEQ ID NO: 17757 - RNA, 19 nt, artificial
  Chemically synthesized
caacugggucaaguacgac

SEQ ID NO: 17758 - RNA, 19 nt, artificial
  Chemically synthesized
ugucauguaccagaucgac

SEQ ID NO: 17759 - RNA, 19 nt, artificial
  Chemically synthesized
ugcuuaucuucuggaaccc

SEQ ID NO: 17760 - RNA, 19 nt, artificial
  Chemically synthesized
uugcuuaucuucuggaacc

SEQ ID NO: 17761 - RNA, 19 nt, artificial
  Chemically synthesized
cauaccaagcaggccuuug

SEQ ID NO: 17762 - RNA, 19 nt, artificial
  Chemically synthesized
gaacuguaccuguugaggc

SEQ ID NO: 17763 - RNA, 19 nt, artificial
  Chemically synthesized
aguaucauuguuuuuguac

SEQ ID NO: 17764 - RNA, 19 nt, artificial
  Chemically synthesized
uugaccagcagaacuguac

SEQ ID NO: 17765 - RNA, 19 nt, artificial
  Chemically synthesized
uggcaucaugaacgagcug

SEQ ID NO: 17766 - RNA, 19 nt, artificial
  Chemically synthesized
cacagcaaugaacaccauc

SEQ ID NO: 17767 - RNA, 19 nt, artificial
  Chemically synthesized
auugaauucgccuacacgg

SEQ ID NO: 17768 - RNA, 19 nt, artificial
  Chemically synthesized
uuuguugauaaguaacccu

SEQ ID NO: 17769 - RNA, 19 nt, artificial
  Chemically synthesized
auccagcccugucuucaag

SEQ ID NO: 17770 - RNA, 19 nt, artificial
  Chemically synthesized
ggaguucuucaaccugucc

SEQ ID NO: 17771 - RNA, 19 nt, artificial
  Chemically synthesized
uucuugggcaaaaauacag

SEQ ID NO: 17772 - RNA, 19 nt, artificial
  Chemically synthesized
uucaaggccauguucacca

SEQ ID NO: 17773 - RNA, 19 nt, artificial
  Chemically synthesized
caaagcgggaaucaugugc

SEQ ID NO: 17774 - RNA, 19 nt, artificial
  Chemically synthesized
uuuuccaaggaaaauaaag

SEQ ID NO: 17775 - RNA, 19 nt, artificial
  Chemically synthesized
cuggucaagaucuucgagg

SEQ ID NO: 17776 - RNA, 19 nt, artificial
  Chemically synthesized
uuccacgccugcaucaacu

SEQ ID NO: 17777 - RNA, 19 nt, artificial
  Chemically synthesized
acaacuguaucuaugcugc

SEQ ID NO: 17778 - RNA, 19 nt, artificial
  Chemically synthesized
aacagacuaacuagugucu

SEQ ID NO: 17779 - RNA, 19 nt, artificial
  Chemically synthesized
auaccaagcaggccuuugg

SEQ ID NO: 17780 - RNA, 19 nt, artificial
  Chemically synthesized
uucuucaaccugucccacu

SEQ ID NO: 17781 - RNA, 19 nt, artificial
  Chemically synthesized
aacuguaucuaugcugcug

SEQ ID NO: 17782 - RNA, 19 nt, artificial
  Chemically synthesized
uuguacaaaaaccgggacu

SEQ ID NO: 17783 - RNA, 19 nt, artificial
  Chemically synthesized
aacccuguaauuuuccaag

SEQ ID NO: 17784 - RNA, 19 nt, artificial
  Chemically synthesized
ugggccuguacauagaagc

SEQ ID NO: 17785 - RNA, 19 nt, artificial
  Chemically synthesized
uuuauucuuggauaccugg

SEQ ID NO: 17786 - RNA, 19 nt, artificial
  Chemically synthesized
aucgucuccuuuaugccgu

SEQ ID NO: 17787 - RNA, 19 nt, artificial
  Chemically synthesized
aaugugguucccagggaug

SEQ ID NO: 17788 - RNA, 19 nt, artificial
  Chemically synthesized
uaacuagugucuuucaccc

SEQ ID NO: 17789 - RNA, 19 nt, artificial
  Chemically synthesized
acagcacugcaaauaaccc

SEQ ID NO: 17790 - RNA, 19 nt, artificial
  Chemically synthesized
cacaacaguguggagaggu

SEQ ID NO: 17791 - RNA, 19 nt, artificial
  Chemically synthesized
auguacgccuccacugagu

SEQ ID NO: 17792 - RNA, 19 nt, artificial
  Chemically synthesized
uacuuccgacagucgcuca

SEQ ID NO: 17793 - RNA, 19 nt, artificial
  Chemically synthesized
gcugucauguaccagaucg

SEQ ID NO: 17794 - RNA, 19 nt, artificial
  Chemically synthesized
uguuuuuguacaaaaaccg

SEQ ID NO: 17795 - RNA, 19 nt, artificial
  Chemically synthesized
uguacauagaagccaccgg

SEQ ID NO: 17796 - RNA, 19 nt, artificial
  Chemically synthesized
caaauaacccaucuuccgg

SEQ ID NO: 17797 - RNA, 19 nt, artificial
  Chemically synthesized
agaacuguaccuguugagg

SEQ ID NO: 17798 - RNA, 19 nt, artificial
  Chemically synthesized
gucaaguaccaggaugcac

SEQ ID NO: 17799 - RNA, 19 nt, artificial
  Chemically synthesized
gucaucgauggccacaucu

SEQ ID NO: 17800 - RNA, 19 nt, artificial
  Chemically synthesized
uuuuuguacaaaaaccggg

SEQ ID NO: 17801 - RNA, 19 nt, artificial
  Chemically synthesized
ucaaucgucuccuuuaugc

SEQ ID NO: 17802 - RNA, 19 nt, artificial
  Chemically synthesized
caagaucuucgaggagcuc

SEQ ID NO: 17803 - RNA, 19 nt, artificial
  Chemically synthesized
aagaucuucgaggagcuca

SEQ ID NO: 17804 - RNA, 19 nt, artificial
  Chemically synthesized
auggacaguuauuuuguug

SEQ ID NO: 17805 - RNA, 19 nt, artificial
  Chemically synthesized
uuacuacccagagaggaac

SEQ ID NO: 17806 - RNA, 19 nt, artificial
  Chemically synthesized
aucaacugggucaaguacg

SEQ ID NO: 17807 - RNA, 19 nt, artificial
  Chemically synthesized
aacuucgcugagcagauug

SEQ ID NO: 17808 - RNA, 19 nt, artificial
  Chemically synthesized
auucagcugaguguuacua

SEQ ID NO: 17809 - RNA, 19 nt, artificial
  Chemically synthesized
acuguaucuaugcugcugg

SEQ ID NO: 17810 - RNA, 19 nt, artificial
  Chemically synthesized
aaucgucuccuuuaugccg

SEQ ID NO: 17811 - RNA, 19 nt, artificial
  Chemically synthesized
uuuuguugauaaguaaccc

SEQ ID NO: 17812 - RNA, 19 nt, artificial
  Chemically synthesized
gagcgccucauugaauucg

SEQ ID NO: 17813 - RNA, 19 nt, artificial
  Chemically synthesized
auuguuuuuguacaaaaac

SEQ ID NO: 17814 - RNA, 19 nt, artificial
  Chemically synthesized
aaagaaaagacagcacugc

SEQ ID NO: 17815 - RNA, 19 nt, artificial
  Chemically synthesized
uuguugauaaguaacccug

SEQ ID NO: 17816 - RNA, 19 nt, artificial
  Chemically synthesized
cuguacauagaagccaccg

SEQ ID NO: 17817 - RNA, 19 nt, artificial
  Chemically synthesized
uucgcugagcagauuggcu

SEQ ID NO: 17818 - RNA, 19 nt, artificial
  Chemically synthesized
acccagauacagacaccug

SEQ ID NO: 17819 - RNA, 19 nt, artificial
  Chemically synthesized
cuggaggaucauaccaagc

SEQ ID NO: 17820 - RNA, 19 nt, artificial
  Chemically synthesized
uuuguacaaaaaccgggac

SEQ ID NO: 17821 - RNA, 19 nt, artificial
  Chemically synthesized
augaacggugcugucaugu

SEQ ID NO: 17822 - RNA, 19 nt, artificial
  Chemically synthesized
uccaccacaacagugugga

SEQ ID NO: 17823 - RNA, 19 nt, artificial
  Chemically synthesized
aaguacgacugcgaacagc

SEQ ID NO: 17824 - RNA, 19 nt, artificial
  Chemically synthesized
guguccauugaggguaucc

SEQ ID NO: 17825 - RNA, 19 nt, artificial
  Chemically synthesized
uuauucuuggauaccuggg

SEQ ID NO: 17826 - RNA, 19 nt, artificial
  Chemically synthesized
aguaacccuguaauuuucc

SEQ ID NO: 17827 - RNA, 19 nt, artificial
  Chemically synthesized
augcugacacgaaggaucg

SEQ ID NO: 17828 - RNA, 19 nt, artificial
  Chemically synthesized
auggaggugguguccauug

SEQ ID NO: 17829 - RNA, 19 nt, artificial
  Chemically synthesized
cagcugaguguuacuaccc

SEQ ID NO: 17830 - RNA, 19 nt, artificial
  Chemically synthesized
uuguuuuuguacaaaaacc

SEQ ID NO: 17831 - RNA, 19 nt, artificial
  Chemically synthesized
aggaucauaccaagcaggc

SEQ ID NO: 17832 - RNA, 19 nt, artificial
  Chemically synthesized
caugaccaaucaguggucg

SEQ ID NO: 17833 - RNA, 19 nt, artificial
  Chemically synthesized
aacggugcugucauguacc

SEQ ID NO: 17834 - RNA, 19 nt, artificial
  Chemically synthesized
uacuacccagagaggaacg

SEQ ID NO: 17835 - RNA, 19 nt, artificial
  Chemically synthesized
uucagcugaguguuacuac

SEQ ID NO: 17836 - RNA, 19 nt, artificial
  Chemically synthesized
cuguccucaaucgucuccu

SEQ ID NO: 17837 - RNA, 19 nt, artificial
  Chemically synthesized
augauggucaggaccagcu

SEQ ID NO: 17838 - RNA, 19 nt, artificial
  Chemically synthesized
aaagcgggaaucaugugcc

SEQ ID NO: 17839 - RNA, 19 nt, artificial
  Chemically synthesized
aucuccaugggcgagaagu

SEQ ID NO: 17840 - RNA, 19 nt, artificial
  Chemically synthesized
uaugauggucacacguucc

SEQ ID NO: 17841 - RNA, 19 nt, artificial
  Chemically synthesized
ugcacaacuguaucuaugc

SEQ ID NO: 17842 - RNA, 19 nt, artificial
  Chemically synthesized
ucgauggccacaucuaugc

SEQ ID NO: 17843 - RNA, 19 nt, artificial
  Chemically synthesized
ugauuuauucuuggauacc

SEQ ID NO: 17844 - RNA, 19 nt, artificial
  Chemically synthesized
gaucacagcaaugaacacc

SEQ ID NO: 17845 - RNA, 19 nt, artificial
  Chemically synthesized
uucuuggauaccugggagg

SEQ ID NO: 17846 - RNA, 19 nt, artificial
  Chemically synthesized
aaauaacccaucuuccggg

SEQ ID NO: 17847 - RNA, 19 nt, artificial
  Chemically synthesized
augaccaaucaguggucgc

SEQ ID NO: 17848 - RNA, 19 nt, artificial
  Chemically synthesized
uaccagaucgacagcguug

SEQ ID NO: 17849 - RNA, 19 nt, artificial
  Chemically synthesized
uccauugaggguauccacc

SEQ ID NO: 17850 - RNA, 19 nt, artificial
  Chemically synthesized
aaccgccuuaauucagcug

SEQ ID NO: 17851 - RNA, 19 nt, artificial
  Chemically synthesized
auuuuguugauaaguaacc

SEQ ID NO: 17852 - RNA, 19 nt, artificial
  Chemically synthesized
acuguaccuguugaggcac

SEQ ID NO: 17853 - RNA, 19 nt, artificial
  Chemically synthesized
uugaauucgccuacacggc

SEQ ID NO: 17854 - RNA, 19 nt, artificial
  Chemically synthesized
aaugaacaccauccgaagc

SEQ ID NO: 17855 - RNA, 19 nt, artificial
  Chemically synthesized
cuucaaggccauguucacc

SEQ ID NO: 17856 - RNA, 19 nt, artificial
  Chemically synthesized
cucuggaaaugugguuccc

SEQ ID NO: 17857 - RNA, 19 nt, artificial
  Chemically synthesized
accagcagaacuguaccug

SEQ ID NO: 17858 - RNA, 19 nt, artificial
  Chemically synthesized
ccucuggaaaugugguucc

SEQ ID NO: 17859 - RNA, 19 nt, artificial
  Chemically synthesized
gucaagaucuucgaggagc

SEQ ID NO: 17860 - RNA, 19 nt, artificial
  Chemically synthesized
acagcaaugaacaccaucc

SEQ ID NO: 17861 - RNA, 19 nt, artificial
  Chemically synthesized
aaucuacguccuuggaggc

SEQ ID NO: 17862 - RNA, 19 nt, artificial
  Chemically synthesized
uaugauggucaggaccagc

SEQ ID NO: 17863 - RNA, 19 nt, artificial
  Chemically synthesized
uccuuggaggcuaugaugg

SEQ ID NO: 17864 - RNA, 19 nt, artificial
  Chemically synthesized
ugcauccaccacaacagug

SEQ ID NO: 17865 - RNA, 19 nt, artificial
  Chemically synthesized
uacaucuacaugcauuuug

SEQ ID NO: 17866 - RNA, 19 nt, artificial
  Chemically synthesized
aacuuccugcagaugcagc

SEQ ID NO: 17867 - RNA, 19 nt, artificial
  Chemically synthesized
auuggcuguguggaguugc

SEQ ID NO: 17868 - RNA, 19 nt, artificial
  Chemically synthesized
uaccuggaggcuuacaacc

SEQ ID NO: 17869 - RNA, 19 nt, artificial
  Chemically synthesized
acacugcaggucaaguacc

SEQ ID NO: 17870 - RNA, 19 nt, artificial
  Chemically synthesized
uaccuggucaagaucuucg

SEQ ID NO: 17871 - RNA, 19 nt, artificial
  Chemically synthesized
gaguucuucaaccuguccc

SEQ ID NO: 17872 - RNA, 19 nt, artificial
  Chemically synthesized
uacguccuuggaggcuaug

SEQ ID NO: 17873 - RNA, 19 nt, artificial
  Chemically synthesized
uuccuggacaguguggagu

SEQ ID NO: 17874 - RNA, 19 nt, artificial
  Chemically synthesized
uuuggcaucaugaacgagc

SEQ ID NO: 17875 - RNA, 19 nt, artificial
  Chemically synthesized
gacaucucaaaagaagucc

SEQ ID NO: 17876 - RNA, 19 nt, artificial
  Chemically synthesized
aucuacguccuuggaggcu

SEQ ID NO: 17877 - RNA, 19 nt, artificial
  Chemically synthesized
uugggcaaaaauacagucc

SEQ ID NO: 17878 - RNA, 19 nt, artificial
  Chemically synthesized
augaacaccauccgaagcg

SEQ ID NO: 17879 - RNA, 19 nt, artificial
  Chemically synthesized
auccaccacaacagugugg

SEQ ID NO: 17880 - RNA, 19 nt, artificial
  Chemically synthesized
auguaccagaucgacagcg

SEQ ID NO: 17881 - RNA, 19 nt, artificial
  Chemically synthesized
ucuauguacaggcccaucc

SEQ ID NO: 17882 - RNA, 19 nt, artificial
  Chemically synthesized
uucaaugaggcgcuccaug

SEQ ID NO: 17883 - RNA, 19 nt, artificial
  Chemically synthesized
uuuuuguacaaaaacaaug

SEQ ID NO: 17884 - RNA, 19 nt, artificial
  Chemically synthesized
ucuguuuccacaucguagc

SEQ ID NO: 17885 - RNA, 19 nt, artificial
  Chemically synthesized
uucauugcugugaucauuc

SEQ ID NO: 17886 - RNA, 19 nt, artificial
  Chemically synthesized
uacuugacccaguugaugc

SEQ ID NO: 17887 - RNA, 19 nt, artificial
  Chemically synthesized
uucuuuugagaugucauuu

SEQ ID NO: 17888 - RNA, 19 nt, artificial
  Chemically synthesized
uugaagacagggcuggaug

SEQ ID NO: 17889 - RNA, 19 nt, artificial
  Chemically synthesized
auugcugugaucauucgcc

SEQ ID NO: 17890 - RNA, 19 nt, artificial
  Chemically synthesized
uuugcagugcugucuuuuc

SEQ ID NO: 17891 - RNA, 19 nt, artificial
  Chemically synthesized
uaacacugaggcauccugg

SEQ ID NO: 17892 - RNA, 19 nt, artificial
  Chemically synthesized
uugagaugucauuuuaaca

SEQ ID NO: 17893 - RNA, 19 nt, artificial
  Chemically synthesized
uaacacuccacacugucca

SEQ ID NO: 17894 - RNA, 19 nt, artificial
  Chemically synthesized
uacaaaaacaaugauacuc

SEQ ID NO: 17895 - RNA, 19 nt, artificial
  Chemically synthesized
uucuauguacaggcccauc

SEQ ID NO: 17896 - RNA, 19 nt, artificial
  Chemically synthesized
uuucuuuuagucccgguuu

SEQ ID NO: 17897 - RNA, 19 nt, artificial
  Chemically synthesized
uguaucugggucguaacac

SEQ ID NO: 17898 - RNA, 19 nt, artificial
  Chemically synthesized
uugaccagguaguccuugc

SEQ ID NO: 17899 - RNA, 19 nt, artificial
  Chemically synthesized
auagauguggccaucgaug

SEQ ID NO: 17900 - RNA, 19 nt, artificial
  Chemically synthesized
uuaucaacaaaauaacugu

SEQ ID NO: 17901 - RNA, 19 nt, artificial
  Chemically synthesized
uaccucuccacacuguugu

SEQ ID NO: 17902 - RNA, 19 nt, artificial
  Chemically synthesized
uaucugggucguaacacuc

SEQ ID NO: 17903 - RNA, 19 nt, artificial
  Chemically synthesized
ucuguaucugggucguaac

SEQ ID NO: 17904 - RNA, 19 nt, artificial
  Chemically synthesized
aucaacaaaauaacugucc

SEQ ID NO: 17905 - RNA, 19 nt, artificial
  Chemically synthesized
uagucuguucuuuauuuuc

SEQ ID NO: 17906 - RNA, 19 nt, artificial
  Chemically synthesized
aauuaaggcgguuuguccc

SEQ ID NO: 17907 - RNA, 19 nt, artificial
  Chemically synthesized
ucauucgccacucguuccu

SEQ ID NO: 17908 - RNA, 19 nt, artificial
  Chemically synthesized
uuggugaacauggccuuga

SEQ ID NO: 17909 - RNA, 19 nt, artificial
  Chemically synthesized
uuauuugcagugcugucuu

SEQ ID NO: 17910 - RNA, 19 nt, artificial
  Chemically synthesized
ucucuggguaguaacacuc

SEQ ID NO: 17911 - RNA, 19 nt, artificial
  Chemically synthesized
uguacaaaaacaaugauac

SEQ ID NO: 17912 - RNA, 19 nt, artificial
  Chemically synthesized
uuuugagaugucauuuuaa

SEQ ID NO: 17913 - RNA, 19 nt, artificial
  Chemically synthesized
cucuguuuccacaucguag

SEQ ID NO: 17914 - RNA, 19 nt, artificial
  Chemically synthesized
ucguacuugacccaguuga

SEQ ID NO: 17915 - RNA, 19 nt, artificial
  Chemically synthesized
uccacgucucuguuuccac

SEQ ID NO: 17916 - RNA, 19 nt, artificial
  Chemically synthesized
ugcauguagauguacuccc

SEQ ID NO: 17917 - RNA, 19 nt, artificial
  Chemically synthesized
uuaacacugaggcauccug

SEQ ID NO: 17918 - RNA, 19 nt, artificial
  Chemically synthesized
uuuuguacaaaaacaauga

SEQ ID NO: 17919 - RNA, 19 nt, artificial
  Chemically synthesized
uuuagucccgguuuuugua

SEQ ID NO: 17920 - RNA, 19 nt, artificial
  Chemically synthesized
cuuaucaacaaaauaacug

SEQ ID NO: 17921 - RNA, 19 nt, artificial
  Chemically synthesized
uuugagaugucauuuuaac

SEQ ID NO: 17922 - RNA, 19 nt, artificial
  Chemically synthesized
auuuuaacacugaggcauc

SEQ ID NO: 17923 - RNA, 19 nt, artificial
  Chemically synthesized
uuuccacaucguagcgcuc

SEQ ID NO: 17924 - RNA, 19 nt, artificial
  Chemically synthesized
auagccuccaaggacguag

SEQ ID NO: 17925 - RNA, 19 nt, artificial
  Chemically synthesized
uccucgaagaucuugacca

SEQ ID NO: 17926 - RNA, 19 nt, artificial
  Chemically synthesized
uacaggguuacuuaucaac

SEQ ID NO: 17927 - RNA, 19 nt, artificial
  Chemically synthesized
uguuuccacaucguagcgc

SEQ ID NO: 17928 - RNA, 19 nt, artificial
  Chemically synthesized
ucaaugaggcgcuccauga

SEQ ID NO: 17929 - RNA, 19 nt, artificial
  Chemically synthesized
ucuuuugagaugucauuuu

SEQ ID NO: 17930 - RNA, 19 nt, artificial
  Chemically synthesized
gucguaacacuccacacug

SEQ ID NO: 17931 - RNA, 19 nt, artificial
  Chemically synthesized
ucgaagaucuugaccaggu

SEQ ID NO: 17932 - RNA, 19 nt, artificial
  Chemically synthesized
uccaaggacguagauucuc

SEQ ID NO: 17933 - RNA, 19 nt, artificial
  Chemically synthesized
ugaucauucgccacucguu

SEQ ID NO: 17934 - RNA, 19 nt, artificial
  Chemically synthesized
uaucaacaaaauaacuguc

SEQ ID NO: 17935 - RNA, 19 nt, artificial
  Chemically synthesized
uuagucuguucuuuauuuu

SEQ ID NO: 17936 - RNA, 19 nt, artificial
  Chemically synthesized
uuuuccuuggaaaauuaca

SEQ ID NO: 17937 - RNA, 19 nt, artificial
  Chemically synthesized
gaucauucgccacucguuc

SEQ ID NO: 17938 - RNA, 19 nt, artificial
  Chemically synthesized
uaagccuccagguagcuga

SEQ ID NO: 17939 - RNA, 19 nt, artificial
  Chemically synthesized
aacaaaauaacuguccauc

SEQ ID NO: 17940 - RNA, 19 nt, artificial
  Chemically synthesized
uauccaagaauaaaucaca

SEQ ID NO: 17941 - RNA, 19 nt, artificial
  Chemically synthesized
ucaugaugccaaaggccug

SEQ ID NO: 17942 - RNA, 19 nt, artificial
  Chemically synthesized
uacuuaucaacaaaauaac

SEQ ID NO: 17943 - RNA, 19 nt, artificial
  Chemically synthesized
auuugcagugcugucuuuu

SEQ ID NO: 17944 - RNA, 19 nt, artificial
  Chemically synthesized
cuuuuagucccgguuuuug

SEQ ID NO: 17945 - RNA, 19 nt, artificial
  Chemically synthesized
uuuggacuucuuuugagau

SEQ ID NO: 17946 - RNA, 19 nt, artificial
  Chemically synthesized
uaagcaacaccaccaccuc

SEQ ID NO: 17947 - RNA, 19 nt, artificial
  Chemically synthesized
auccugguacuugaccugc

SEQ ID NO: 17948 - RNA, 19 nt, artificial
  Chemically synthesized
aauuacaggguuacuuauc

SEQ ID NO: 17949 - RNA, 19 nt, artificial
  Chemically synthesized
uauuuuugcccaagaaaca

SEQ ID NO: 17950 - RNA, 19 nt, artificial
  Chemically synthesized
uuccucucuggguaguaac

SEQ ID NO: 17951 - RNA, 19 nt, artificial
  Chemically synthesized
cuucggaugguguucauug

SEQ ID NO: 17952 - RNA, 19 nt, artificial
  Chemically synthesized
aaguccacgucucuguuuc

SEQ ID NO: 17953 - RNA, 19 nt, artificial
  Chemically synthesized
ucucuguuuccacaucgua

SEQ ID NO: 17954 - RNA, 19 nt, artificial
  Chemically synthesized
auccuucgugucagcauug

SEQ ID NO: 17955 - RNA, 19 nt, artificial
  Chemically synthesized
accaucauagccuccaagg

SEQ ID NO: 17956 - RNA, 19 nt, artificial
  Chemically synthesized
cucauaccucuccacacug

SEQ ID NO: 17957 - RNA, 19 nt, artificial
  Chemically synthesized
ugggucguaacacuccaca

SEQ ID NO: 17958 - RNA, 19 nt, artificial
  Chemically synthesized
uuuugcccaagaaacaaaa

SEQ ID NO: 17959 - RNA, 19 nt, artificial
  Chemically synthesized
ucaacagguacaguucugc

SEQ ID NO: 17960 - RNA, 19 nt, artificial
  Chemically synthesized
uucuuuuagucccgguuuu

SEQ ID NO: 17961 - RNA, 19 nt, artificial
  Chemically synthesized
ugaauuaaggcgguuuguc

SEQ ID NO: 17962 - RNA, 19 nt, artificial
  Chemically synthesized
augucauucgggucaccuc

SEQ ID NO: 17963 - RNA, 19 nt, artificial
  Chemically synthesized
augcauguagauguacucc

SEQ ID NO: 17964 - RNA, 19 nt, artificial
  Chemically synthesized
ugaagaacuccucuugcuu

SEQ ID NO: 17965 - RNA, 19 nt, artificial
  Chemically synthesized
aucuugaccagguaguccu

SEQ ID NO: 17966 - RNA, 19 nt, artificial
  Chemically synthesized
ugacguggaggacacacuu

SEQ ID NO: 17967 - RNA, 19 nt, artificial
  Chemically synthesized
uccaagaauaaaucacaug

SEQ ID NO: 17968 - RNA, 19 nt, artificial
  Chemically synthesized
ugcauccugguacuugacc

SEQ ID NO: 17969 - RNA, 19 nt, artificial
  Chemically synthesized
aaugcauguagauguacuc

SEQ ID NO: 17970 - RNA, 19 nt, artificial
  Chemically synthesized
aacagguacaguucugcug

SEQ ID NO: 17971 - RNA, 19 nt, artificial
  Chemically synthesized
ugcagugcugucuuuucuu

SEQ ID NO: 17972 - RNA, 19 nt, artificial
  Chemically synthesized
ugucgaucugguacaugac

SEQ ID NO: 17973 - RNA, 19 nt, artificial
  Chemically synthesized
aguucugcuggucaaucug

SEQ ID NO: 17974 - RNA, 19 nt, artificial
  Chemically synthesized
uuauuuuccuuggaaaauu

SEQ ID NO: 17975 - RNA, 19 nt, artificial
  Chemically synthesized
acaaaagugccucaacagg

SEQ ID NO: 17976 - RNA, 19 nt, artificial
  Chemically synthesized
aaucugcucagcgaaguug

SEQ ID NO: 17977 - RNA, 19 nt, artificial
  Chemically synthesized
ugaugagggucaccaguug

SEQ ID NO: 17978 - RNA, 19 nt, artificial
  Chemically synthesized
ucaguggaggcguacauca

SEQ ID NO: 17979 - RNA, 19 nt, artificial
  Chemically synthesized
agcuccucgaagaucuuga

SEQ ID NO: 17980 - RNA, 19 nt, artificial
  Chemically synthesized
ucuuuuagucccgguuuuu

SEQ ID NO: 17981 - RNA, 19 nt, artificial
  Chemically synthesized
acaggguuacuuaucaaca

SEQ ID NO: 17982 - RNA, 19 nt, artificial
  Chemically synthesized
ugcaacuccacacagccaa

SEQ ID NO: 17983 - RNA, 19 nt, artificial
  Chemically synthesized
cuaguuagucuguucuuua

SEQ ID NO: 17984 - RNA, 19 nt, artificial
  Chemically synthesized
ucggaugguguucauugcu

SEQ ID NO: 17985 - RNA, 19 nt, artificial
  Chemically synthesized
aagccugcucuuuccacac

SEQ ID NO: 17986 - RNA, 19 nt, artificial
  Chemically synthesized
ugcugugaucauucgccac

SEQ ID NO: 17987 - RNA, 19 nt, artificial
  Chemically synthesized
guuauuugcagugcugucu

SEQ ID NO: 17988 - RNA, 19 nt, artificial
  Chemically synthesized
ugcaggaucucgcacuucu

SEQ ID NO: 17989 - RNA, 19 nt, artificial
  Chemically synthesized
uccuggaagccugcucuuu

SEQ ID NO: 17990 - RNA, 19 nt, artificial
  Chemically synthesized
uuguacaaaaacaaugaua

SEQ ID NO: 17991 - RNA, 19 nt, artificial
  Chemically synthesized
uggguuauuugcagugcug

SEQ ID NO: 17992 - RNA, 19 nt, artificial
  Chemically synthesized
uauguacaggcccaucccu

SEQ ID NO: 17993 - RNA, 19 nt, artificial
  Chemically synthesized
cuucuuuugagaugucauu

SEQ ID NO: 17994 - RNA, 19 nt, artificial
  Chemically synthesized
guuguaagccuccagguag

SEQ ID NO: 17995 - RNA, 19 nt, artificial
  Chemically synthesized
ugccucaacagguacaguu

SEQ ID NO: 17996 - RNA, 19 nt, artificial
  Chemically synthesized
guauuuuugcccaagaaac

SEQ ID NO: 17997 - RNA, 19 nt, artificial
  Chemically synthesized
ucuguucuuuauuuuccuu

SEQ ID NO: 17998 - RNA, 19 nt, artificial
  Chemically synthesized
uuugcccaagaaacaaaag

SEQ ID NO: 17999 - RNA, 19 nt, artificial
  Chemically synthesized
acuaguuagucuguucuuu

SEQ ID NO: 18000 - RNA, 19 nt, artificial
  Chemically synthesized
cugugaucauucgccacuc

SEQ ID NO: 18001 - RNA, 19 nt, artificial
  Chemically synthesized
aguaacacucagcugaauu

SEQ ID NO: 18002 - RNA, 19 nt, artificial
  Chemically synthesized
uggcucauaccucuccaca

SEQ ID NO: 18003 - RNA, 19 nt, artificial
  Chemically synthesized
uuuauuuuccuuggaaaau

SEQ ID NO: 18004 - RNA, 19 nt, artificial
  Chemically synthesized
gaagauaagcaacaccacc

SEQ ID NO: 18005 - RNA, 19 nt, artificial
  Chemically synthesized
augauucccgcuuuggacu

SEQ ID NO: 18006 - RNA, 19 nt, artificial
  Chemically synthesized
uaguuagucuguucuuuau

SEQ ID NO: 18007 - RNA, 19 nt, artificial
  Chemically synthesized
aagaucuugaccagguagu

SEQ ID NO: 18008 - RNA, 19 nt, artificial
  Chemically synthesized
ucccgguuuuuguacaaaa

SEQ ID NO: 18009 - RNA, 19 nt, artificial
  Chemically synthesized
auccgguggcuucuaugua

SEQ ID NO: 18010 - RNA, 19 nt, artificial
  Chemically synthesized
acuccacacagccaaucug

SEQ ID NO: 18011 - RNA, 19 nt, artificial
  Chemically synthesized
ucccagguauccaagaaua

SEQ ID NO: 18012 - RNA, 19 nt, artificial
  Chemically synthesized
aauggacaccaccuccaug

SEQ ID NO: 18013 - RNA, 19 nt, artificial
  Chemically synthesized
acgaaaguccacgucucug

SEQ ID NO: 18014 - RNA, 19 nt, artificial
  Chemically synthesized
acaguucugcuggucaauc

SEQ ID NO: 18015 - RNA, 19 nt, artificial
  Chemically synthesized
uguauuuuugcccaagaaa

SEQ ID NO: 18016 - RNA, 19 nt, artificial
  Chemically synthesized
cguaacacuccacacuguc

SEQ ID NO: 18017 - RNA, 19 nt, artificial
  Chemically synthesized
acuucugcagcugcaucug

SEQ ID NO: 18018 - RNA, 19 nt, artificial
  Chemically synthesized
ucugcuggucaaucugcuu

SEQ ID NO: 18019 - RNA, 19 nt, artificial
  Chemically synthesized
cgugugaccaucauagccu

SEQ ID NO: 18020 - RNA, 19 nt, artificial
  Chemically synthesized
uucuuuauuuuccuuggaa

SEQ ID NO: 18021 - RNA, 19 nt, artificial
  Chemically synthesized
uguagcugaaggugcgguu

SEQ ID NO: 18022 - RNA, 19 nt, artificial
  Chemically synthesized
ugaacauggccuugaagac

SEQ ID NO: 18023 - RNA, 19 nt, artificial
  Chemically synthesized
ucauugcugugaucauucg

SEQ ID NO: 18024 - RNA, 19 nt, artificial
  Chemically synthesized
uggauacccucaauggaca

SEQ ID NO: 18025 - RNA, 19 nt, artificial
  Chemically synthesized
aauucaaugaggcgcucca

SEQ ID NO: 18026 - RNA, 19 nt, artificial
  Chemically synthesized
aguuagucuguucuuuauu

SEQ ID NO: 18027 - RNA, 19 nt, artificial
  Chemically synthesized
uacaguucugcuggucaau

SEQ ID NO: 18028 - RNA, 19 nt, artificial
  Chemically synthesized
ucccgcuuuggacuucuuu

SEQ ID NO: 18029 - RNA, 19 nt, artificial
  Chemically synthesized
gucuguaucugggucguaa

SEQ ID NO: 18030 - RNA, 19 nt, artificial
  Chemically synthesized
ugggacagguugaagaacu

SEQ ID NO: 18031 - RNA, 19 nt, artificial
  Chemically synthesized
uaacacucagcugaauuaa

SEQ ID NO: 18032 - RNA, 19 nt, artificial
  Chemically synthesized
cguguaggcgaauucaaug

SEQ ID NO: 18033 - RNA, 19 nt, artificial
  Chemically synthesized
aagcaacaccaccaccucu

SEQ ID NO: 18034 - RNA, 19 nt, artificial
  Chemically synthesized
aaaauuacaggguuacuua

SEQ ID NO: 18035 - RNA, 19 nt, artificial
  Chemically synthesized
guacuugacccaguugaug

SEQ ID NO: 18036 - RNA, 19 nt, artificial
  Chemically synthesized
cuccucgaagaucuugacc

SEQ ID NO: 18037 - RNA, 19 nt, artificial
  Chemically synthesized
ucauuuuaacacugaggca

SEQ ID NO: 18038 - RNA, 19 nt, artificial
  Chemically synthesized
augguguucauugcuguga

SEQ ID NO: 18039 - RNA, 19 nt, artificial
  Chemically synthesized
cuugaccagguaguccuug

SEQ ID NO: 18040 - RNA, 19 nt, artificial
  Chemically synthesized
accuugugggccaugaacu

SEQ ID NO: 18041 - RNA, 19 nt, artificial
  Chemically synthesized
gugaacauggccuugaaga

SEQ ID NO: 18042 - RNA, 19 nt, artificial
  Chemically synthesized
uccugguacuugaccugca

SEQ ID NO: 18043 - RNA, 19 nt, artificial
  Chemically synthesized
ccagaagauaagcaacacc

SEQ ID NO: 18044 - RNA, 19 nt, artificial
  Chemically synthesized
ccuccaaggacguagauuc

SEQ ID NO: 18045 - RNA, 19 nt, artificial
  Chemically synthesized
ccgcuuuggacuucuuuug

SEQ ID NO: 18046 - RNA, 19 nt, artificial
  Chemically synthesized
auuuuugcccaagaaacaa

SEQ ID NO: 18047 - RNA, 19 nt, artificial
  Chemically synthesized
ugucuguaucugggucgua

SEQ ID NO: 18048 - RNA, 19 nt, artificial
  Chemically synthesized
guaucugggucguaacacu

SEQ ID NO: 18049 - RNA, 19 nt, artificial
  Chemically synthesized
cauugcugugaucauucgc

SEQ ID NO: 18050 - RNA, 19 nt, artificial
  Chemically synthesized
gugaucauucgccacucgu

SEQ ID NO: 18051 - RNA, 19 nt, artificial
  Chemically synthesized
gcugugaucauucgccacu

SEQ ID NO: 18052 - RNA, 19 nt, artificial
  Chemically synthesized
aacacucagcugaauuaag

SEQ ID NO: 18053 - RNA, 19 nt, artificial
  Chemically synthesized
auucaaugaggcgcuccau

SEQ ID NO: 18054 - RNA, 19 nt, artificial
  Chemically synthesized
aacgugugaccaucauagc

SEQ ID NO: 18055 - RNA, 19 nt, artificial
  Chemically synthesized
guuagucuguucuuuauuu

SEQ ID NO: 18056 - RNA, 19 nt, artificial
  Chemically synthesized
cuuuugagaugucauuuua

SEQ ID NO: 18057 - RNA, 19 nt, artificial
  Chemically synthesized
auuuuccuuggaaaauuac

SEQ ID NO: 18058 - RNA, 19 nt, artificial
  Chemically synthesized
guuccagaagauaagcaac

SEQ ID NO: 18059 - RNA, 19 nt, artificial
  Chemically synthesized
agauaagcaacaccaccac

SEQ ID NO: 18060 - RNA, 19 nt, artificial
  Chemically synthesized
cauaccucuccacacuguu

SEQ ID NO: 18061 - RNA, 19 nt, artificial
  Chemically synthesized
ggucguaacacuccacacu

SEQ ID NO: 18062 - RNA, 19 nt, artificial
  Chemically synthesized
gauaagcaacaccaccacc

SEQ ID NO: 18063 - RNA, 19 nt, artificial
  Chemically synthesized
uucagcugguccugaccau

SEQ ID NO: 18064 - RNA, 19 nt, artificial
  Chemically synthesized
guuggugaacauggccuug

SEQ ID NO: 18065 - RNA, 19 nt, artificial
  Chemically synthesized
uagccuccaaggacguaga

SEQ ID NO: 18066 - RNA, 19 nt, artificial
  Chemically synthesized
acuucuuuugagaugucau

SEQ ID NO: 18067 - RNA, 19 nt, artificial
  Chemically synthesized
cagugcugucuuuucuuuu

SEQ ID NO: 18068 - RNA, 19 nt, artificial
  Chemically synthesized
agcugcaucugcaggaagu

SEQ ID NO: 18069 - RNA, 19 nt, artificial
  Chemically synthesized
cuacgaaaguccacgucuc

SEQ ID NO: 18070 - RNA, 19 nt, artificial
  Chemically synthesized
aaguucggcgucaacgagu

SEQ ID NO: 18071 - RNA, 19 nt, artificial
  Chemically synthesized
acuguauuuuugcccaaga

SEQ ID NO: 18072 - RNA, 19 nt, artificial
  Chemically synthesized
cuguaucugggucguaaca

SEQ ID NO: 18073 - RNA, 19 nt, artificial
  Chemically synthesized
caugacagcaccguucaug

SEQ ID NO: 18074 - RNA, 19 nt, artificial
  Chemically synthesized
uccuucgugucagcauugg

SEQ ID NO: 18075 - RNA, 19 nt, artificial
  Chemically synthesized
acuuaucaacaaaauaacu

SEQ ID NO: 18076 - RNA, 19 nt, artificial
  Chemically synthesized
ugaagacagggcuggauga

SEQ ID NO: 18077 - RNA, 19 nt, artificial
  Chemically synthesized
uccaggaacgugugaccau

SEQ ID NO: 18078 - RNA, 19 nt, artificial
  Chemically synthesized
gaauuaaggcgguuugucc

SEQ ID NO: 18079 - RNA, 19 nt, artificial
  Chemically synthesized
aggccugcuugguaugauc

SEQ ID NO: 18080 - RNA, 19 nt, artificial
  Chemically synthesized
acucguuccucucugggua

SEQ ID NO: 18081 - RNA, 19 nt, artificial
  Chemically synthesized
agaagauaagcaacaccac

SEQ ID NO: 18082 - RNA, 19 nt, artificial
  Chemically synthesized
cauuuuaacacugaggcau

SEQ ID NO: 18083 - RNA, 19 nt, artificial
  Chemically synthesized
cccaaaaugcauguagaug

SEQ ID NO: 18084 - RNA, 19 nt, artificial
  Chemically synthesized
ugcugucuuuucuuuuagu

SEQ ID NO: 18085 - RNA, 19 nt, artificial
  Chemically synthesized
ugcagugugacgucacaca

SEQ ID NO: 18086 - RNA, 19 nt, artificial
  Chemically synthesized
acgcugucgaucugguaca

SEQ ID NO: 18087 - RNA, 19 nt, artificial
  Chemically synthesized
ucauagccuccaaggacgu

SEQ ID NO: 18088 - RNA, 19 nt, artificial
  Chemically synthesized
aaaguccacgucucuguuu

SEQ ID NO: 18089 - RNA, 19 nt, artificial
  Chemically synthesized
cacaugauucccgcuuugg

SEQ ID NO: 18090 - RNA, 19 nt, artificial
  Chemically synthesized
acguagaaccgucgcuguu

SEQ ID NO: 18091 - RNA, 19 nt, artificial
  Chemically synthesized
guauccaagaauaaaucac

SEQ ID NO: 18092 - RNA, 19 nt, artificial
  Chemically synthesized
auccaagaauaaaucacau

SEQ ID NO: 18093 - RNA, 19 nt, artificial
  Chemically synthesized
cucgaagaucuugaccagg

SEQ ID NO: 18094 - RNA, 19 nt, artificial
  Chemically synthesized
gaaaauuacaggguuacuu

SEQ ID NO: 18095 - RNA, 19 nt, artificial
  Chemically synthesized
uugaugcaggcguggaaga

SEQ ID NO: 18096 - RNA, 19 nt, artificial
  Chemically synthesized
guggauacccucaauggac

SEQ ID NO: 18097 - RNA, 19 nt, artificial
  Chemically synthesized
caucauagccuccaaggac

SEQ ID NO: 18098 - RNA, 19 nt, artificial
  Chemically synthesized
ugguccugaccaucauagc

SEQ ID NO: 18099 - RNA, 19 nt, artificial
  Chemically synthesized
ucuccacacuguuguggug

SEQ ID NO: 18100 - RNA, 19 nt, artificial
  Chemically synthesized
cuguucgcagucguacuug

SEQ ID NO: 18101 - RNA, 19 nt, artificial
  Chemically synthesized
ucuuuauuuuccuuggaaa

SEQ ID NO: 18102 - RNA, 19 nt, artificial
  Chemically synthesized
uggaagccugcucuuucca

SEQ ID NO: 18103 - RNA, 19 nt, artificial
  Chemically synthesized
uauuugcagugcugucuuu

SEQ ID NO: 18104 - RNA, 19 nt, artificial
  Chemically synthesized
acgucucuguuuccacauc

SEQ ID NO: 18105 - RNA, 19 nt, artificial
  Chemically synthesized
agugcugucuuuucuuuua

SEQ ID NO: 18106 - RNA, 19 nt, artificial
  Chemically synthesized
cuucuauguacaggcccau

SEQ ID NO: 18107 - RNA, 19 nt, artificial
  Chemically synthesized
cccagcagcauagauacag

SEQ ID NO: 18108 - RNA, 19 nt, artificial
  Chemically synthesized
uccacacagccaaucugcu

SEQ ID NO: 18109 - RNA, 19 nt, artificial
  Chemically synthesized
agcagcauagauacaguug

SEQ ID NO: 18110 - RNA, 19 nt, artificial
  Chemically synthesized
cucucuggguaguaacacu

SEQ ID NO: 18111 - RNA, 19 nt, artificial
  Chemically synthesized
uauuuuccuuggaaaauua

SEQ ID NO: 18112 - RNA, 19 nt, artificial
  Chemically synthesized
cccaagaaacaaaagugcc

SEQ ID NO: 18113 - RNA, 19 nt, artificial
  Chemically synthesized
gaagccugcucuuuccaca

SEQ ID NO: 18114 - RNA, 19 nt, artificial
  Chemically synthesized
aggaucucgcacuucugca

SEQ ID NO: 18115 - RNA, 19 nt, artificial
  Chemically synthesized
cauccgguggcuucuaugu

SEQ ID NO: 18116 - RNA, 19 nt, artificial
  Chemically synthesized
agcauagauacaguugugc

SEQ ID NO: 18117 - RNA, 19 nt, artificial
  Chemically synthesized
cugaugagggucaccaguu

SEQ ID NO: 18118 - RNA, 19 nt, artificial
  Chemically synthesized
ccaagaaacaaaagugccu

SEQ ID NO: 18119 - RNA, 19 nt, artificial
  Chemically synthesized
caaaagugccucaacaggu

SEQ ID NO: 18120 - RNA, 19 nt, artificial
  Chemically synthesized
guguucauugcugugauca

SEQ ID NO: 18121 - RNA, 19 nt, artificial
  Chemically synthesized
cacacuguugugguggaug

SEQ ID NO: 18122 - RNA, 19 nt, artificial
  Chemically synthesized
acuguugugguggaugcag

SEQ ID NO: 18123 - RNA, 19 nt, artificial
  Chemically synthesized
gaccaucauagccuccaag

SEQ ID NO: 18124 - RNA, 19 nt, artificial
  Chemically synthesized
gauacaguugugcaggacg

SEQ ID NO: 18125 - RNA, 19 nt, artificial
  Chemically synthesized
ccugcuugguaugauccuc

SEQ ID NO: 18126 - RNA, 19 nt, artificial
  Chemically synthesized
uguucauugcugugaucau

SEQ ID NO: 18127 - RNA, 19 nt, artificial
  Chemically synthesized
gauccuucgugucagcauu

SEQ ID NO: 18128 - RNA, 19 nt, artificial
  Chemically synthesized
acacuguugugguggaugc

SEQ ID NO: 18129 - RNA, 19 nt, artificial
  Chemically synthesized
acuugaccugcagugugac

SEQ ID NO: 18130 - RNA, 19 nt, artificial
  Chemically synthesized
ccacgucucuguuuccaca

SEQ ID NO: 18131 - RNA, 19 nt, artificial
  Chemically synthesized
acaacgcugucgaucuggu

SEQ ID NO: 18132 - RNA, 19 nt, artificial
  Chemically synthesized
cagggugaaagacacuagu

SEQ ID NO: 18133 - RNA, 19 nt, artificial
  Chemically synthesized
cagguauccaagaauaaau

SEQ ID NO: 18134 - RNA, 19 nt, artificial
  Chemically synthesized
cagugggacagguugaaga

SEQ ID NO: 18135 - RNA, 19 nt, artificial
  Chemically synthesized
gguacaguucugcugguca

SEQ ID NO: 18136 - RNA, 19 nt, artificial
  Chemically synthesized
gaucuugaccagguagucc

SEQ ID NO: 18137 - RNA, 19 nt, artificial
  Chemically synthesized
cuugacccaguugaugcag

SEQ ID NO: 18138 - RNA, 19 nt, artificial
  Chemically synthesized
ggcauaaaggagacgauug

SEQ ID NO: 18139 - RNA, 19 nt, artificial
  Chemically synthesized
ugaccaucauagccuccaa

SEQ ID NO: 18140 - RNA, 19 nt, artificial
  Chemically synthesized
uacuugaccugcaguguga

SEQ ID NO: 18141 - RNA, 19 nt, artificial
  Chemically synthesized
uaugauccuccagggugua

SEQ ID NO: 18142 - RNA, 19 nt, artificial
  Chemically synthesized
cuccaaggacguagauucu

SEQ ID NO: 18143 - RNA, 19 nt, artificial
  Chemically synthesized
gugagcuccucgaagaucu

SEQ ID NO: 18144 - RNA, 19 nt, artificial
  Chemically synthesized
ugaugccaaaggccugcuu

SEQ ID NO: 18145 - RNA, 19 nt, artificial
  Chemically synthesized
caggaacgugugaccauca

SEQ ID NO: 18146 - RNA, 19 nt, artificial
  Chemically synthesized
cggaugguguucauugcug

SEQ ID NO: 18147 - RNA, 19 nt, artificial
  Chemically synthesized
gcugucuuuucuuuuaguc

SEQ ID NO: 18148 - RNA, 19 nt, artificial
  Chemically synthesized
gaagauggguuauuugcag

SEQ ID NO: 18149 - RNA, 19 nt, artificial
  Chemically synthesized
ugacagcaccguucaugac

SEQ ID NO: 18150 - RNA, 19 nt, artificial
  Chemically synthesized
aaauuacaggguuacuuau

SEQ ID NO: 18151 - RNA, 19 nt, artificial
  Chemically synthesized
agcugaauuaaggcgguuu

SEQ ID NO: 18152 - RNA, 19 nt, artificial
  Chemically synthesized
gcucauaccucuccacacu

SEQ ID NO: 18153 - RNA, 19 nt, artificial
  Chemically synthesized
cugcaucugcaggaaguuc

SEQ ID NO: 18154 - RNA, 19 nt, artificial
  Chemically synthesized
ucguuccucucuggguagu

SEQ ID NO: 18155 - RNA, 19 nt, artificial
  Chemically synthesized
uacaguugugcaggacgca

SEQ ID NO: 18156 - RNA, 19 nt, artificial
  Chemically synthesized
uccucucuggguaguaaca

SEQ ID NO: 18157 - RNA, 19 nt, artificial
  Chemically synthesized
gaagaucuugaccagguag

SEQ ID NO: 18158 - RNA, 19 nt, artificial
  Chemically synthesized
gucucuguuuccacaucgu

SEQ ID NO: 18159 - RNA, 19 nt, artificial
  Chemically synthesized
gcugucgaucugguacaug

SEQ ID NO: 18160 - RNA, 19 nt, artificial
  Chemically synthesized
guucgcagucguacuugac

SEQ ID NO: 18161 - RNA, 19 nt, artificial
  Chemically synthesized
cugaauuaaggcgguuugu

SEQ ID NO: 18162 - RNA, 19 nt, artificial
  Chemically synthesized
agggugaaagacacuaguu

SEQ ID NO: 18163 - RNA, 19 nt, artificial
  Chemically synthesized
caacuccacacagccaauc

SEQ ID NO: 18164 - RNA, 19 nt, artificial
  Chemically synthesized
cucccagguauccaagaau

SEQ ID NO: 18165 - RNA, 19 nt, artificial
  Chemically synthesized
guucaugacguggaggaca

SEQ ID NO: 18166 - RNA, 19 nt, artificial
  Chemically synthesized
cuuuggacuucuuuugaga

SEQ ID NO: 18167 - RNA, 19 nt, artificial
  Chemically synthesized
cacgucucuguuuccacau

SEQ ID NO: 18168 - RNA, 19 nt, artificial
  Chemically synthesized
uucccgcuuuggacuucuu

SEQ ID NO: 18169 - RNA, 19 nt, artificial
  Chemically synthesized
uuuguacaaaaacaaugau

SEQ ID NO: 18170 - RNA, 19 nt, artificial
  Chemically synthesized
agcucguucaugaugccaa

SEQ ID NO: 18171 - RNA, 19 nt, artificial
  Chemically synthesized
gcugaauuaaggcgguuug

SEQ ID NO: 18172 - RNA, 19 nt, artificial
  Chemically synthesized
cauaaaggagacgauugag

SEQ ID NO: 18173 - RNA, 19 nt, artificial
  Chemically synthesized
ugauucccgcuuuggacuu

SEQ ID NO: 18174 - RNA, 19 nt, artificial
  Chemically synthesized
uguaagccuccagguagcu

SEQ ID NO: 18175 - RNA, 19 nt, artificial
  Chemically synthesized
uucccggaagauggguuau

SEQ ID NO: 18176 - RNA, 19 nt, artificial
  Chemically synthesized
gcuuuggacuucuuuugag

SEQ ID NO: 18177 - RNA, 19 nt, artificial
  Chemically synthesized
gguuauuugcagugcuguc

SEQ ID NO: 18178 - RNA, 19 nt, artificial
  Chemically synthesized
aaaucacauggugacagcu

SEQ ID NO: 18179 - RNA, 19 nt, artificial
  Chemically synthesized
ucuugaccagguaguccuu

SEQ ID NO: 18180 - RNA, 19 nt, artificial
  Chemically synthesized
aggugucuguaucuggguc

SEQ ID NO: 18181 - RNA, 19 nt, artificial
  Chemically synthesized
gaagaacuccucuugcuug

SEQ ID NO: 18182 - RNA, 19 nt, artificial
  Chemically synthesized
gguugaagaacuccucuug

SEQ ID NO: 18183 - RNA, 19 nt, artificial
  Chemically synthesized
ugguguucauugcugugau

SEQ ID NO: 18184 - RNA, 19 nt, artificial
  Chemically synthesized
agaauaaaucacaugguga

SEQ ID NO: 18185 - RNA, 19 nt, artificial
  Chemically synthesized
caacagguacaguucugcu

SEQ ID NO: 18186 - RNA, 19 nt, artificial
  Chemically synthesized
cccauuggacuguauuuuu

SEQ ID NO: 18187 - RNA, 19 nt, artificial
  Chemically synthesized
guucauugcugugaucauu

SEQ ID NO: 18188 - RNA, 19 nt, artificial
  Chemically synthesized
guuacuuaucaacaaaaua

SEQ ID NO: 18189 - RNA, 19 nt, artificial
  Chemically synthesized
acaugauucccgcuuugga

SEQ ID NO: 18190 - RNA, 19 nt, artificial
  Chemically synthesized
ugguaugauccuccagggu

SEQ ID NO: 18191 - RNA, 19 nt, artificial
  Chemically synthesized
gcuacgaaaguccacgucu

SEQ ID NO: 18192 - RNA, 19 nt, artificial
  Chemically synthesized
caugauucccgcuuuggac

SEQ ID NO: 18193 - RNA, 19 nt, artificial
  Chemically synthesized
ggaagauggguuauuugca

SEQ ID NO: 18194 - RNA, 19 nt, artificial
  Chemically synthesized
guaacacucagcugaauua

SEQ ID NO: 18195 - RNA, 19 nt, artificial
  Chemically synthesized
agguugaagaacuccucuu

SEQ ID NO: 18196 - RNA, 19 nt, artificial
  Chemically synthesized
ugggaaccacauuuccaga

SEQ ID NO: 18197 - RNA, 19 nt, artificial
  Chemically synthesized
cggaagauggguuauuugc

SEQ ID NO: 18198 - RNA, 19 nt, artificial
  Chemically synthesized
agaaacaaaagugccucaa

SEQ ID NO: 18199 - RNA, 19 nt, artificial
  Chemically synthesized
acuguccaggaacguguga

SEQ ID NO: 18200 - RNA, 19 nt, artificial
  Chemically synthesized
cucguucaugaugccaaag

SEQ ID NO: 18201 - RNA, 19 nt, artificial
  Chemically synthesized
aaggccugcuugguaugau

SEQ ID NO: 18202 - RNA, 19 nt, artificial
  Chemically synthesized
gaugucauucgggucaccu

SEQ ID NO: 18203 - RNA, 19 nt, artificial
  Chemically synthesized
ucccggaagauggguuauu

SEQ ID NO: 18204 - RNA, 19 nt, artificial
  Chemically synthesized
cucuccacacuguuguggu

SEQ ID NO: 18205 - RNA, 19 nt, artificial
  Chemically synthesized
cacuaguuagucuguucuu

SEQ ID NO: 18206 - RNA, 19 nt, artificial
  Chemically synthesized
ccgguuuuuguacaaaaac

SEQ ID NO: 18207 - RNA, 19 nt, artificial
  Chemically synthesized
cgcuuuggacuucuuuuga

SEQ ID NO: 18208 - RNA, 19 nt, artificial
  Chemically synthesized
ucaugacguggaggacaca

SEQ ID NO: 18209 - RNA, 19 nt, artificial
  Chemically synthesized
gguaguaacacucagcuga

SEQ ID NO: 18210 - RNA, 19 nt, artificial
  Chemically synthesized
gaacauggccuugaagaca

SEQ ID NO: 18211 - RNA, 19 nt, artificial
  Chemically synthesized
guacuugaccugcagugug

SEQ ID NO: 18212 - RNA, 19 nt, artificial
  Chemically synthesized
ccugggaaccacauuucca

SEQ ID NO: 18213 - RNA, 19 nt, artificial
  Chemically synthesized
gugucuguaucugggucgu

SEQ ID NO: 18214 - RNA, 19 nt, artificial
  Chemically synthesized
cauagauguggccaucgau

SEQ ID NO: 18215 - RNA, 19 nt, artificial
  Chemically synthesized
ccucucuggguaguaacac

SEQ ID NO: 18216 - RNA, 19 nt, artificial
  Chemically synthesized
agaucuugaccagguaguc

SEQ ID NO: 18217 - RNA, 19 nt, artificial
  Chemically synthesized
cugguacuugaccugcagu

SEQ ID NO: 18218 - RNA, 19 nt, artificial
  Chemically synthesized
cccgcuuuggacuucuuuu

SEQ ID NO: 18219 - RNA, 19 nt, artificial
  Chemically synthesized
gaucugguacaugacagca

SEQ ID NO: 18220 - RNA, 19 nt, artificial
  Chemically synthesized
cguuggugaacauggccuu

SEQ ID NO: 18221 - RNA, 19 nt, artificial
  Chemically synthesized
caagaauaaaucacauggu

SEQ ID NO: 18222 - RNA, 19 nt, artificial
  Chemically synthesized
ucgcuccaggugucuguau

SEQ ID NO: 18223 - RNA, 19 nt, artificial
  Chemically synthesized
aggaacgugugaccaucau

SEQ ID NO: 18224 - RNA, 19 nt, artificial
  Chemically synthesized
cuucccggaagauggguua

SEQ ID NO: 18225 - RNA, 19 nt, artificial
  Chemically synthesized
cgaaaguccacgucucugu

SEQ ID NO: 18226 - RNA, 19 nt, artificial
  Chemically synthesized
gguggcuucuauguacagg

SEQ ID NO: 18227 - RNA, 19 nt, artificial
  Chemically synthesized
acugcaggaucucgcacuu

SEQ ID NO: 18228 - RNA, 19 nt, artificial
  Chemically synthesized
cucuggguaguaacacuca

SEQ ID NO: 18229 - RNA, 19 nt, artificial
  Chemically synthesized
cagguugaagaacuccucu

SEQ ID NO: 18230 - RNA, 19 nt, artificial
  Chemically synthesized
agucguacuugacccaguu

SEQ ID NO: 18231 - RNA, 19 nt, artificial
  Chemically synthesized
gaaacaaaagugccucaac

SEQ ID NO: 18232 - RNA, 19 nt, artificial
  Chemically synthesized
acggcauagauguggccau

SEQ ID NO: 18233 - RNA, 19 nt, artificial
  Chemically synthesized
ccaaucugcucagcgaagu

SEQ ID NO: 18234 - RNA, 19 nt, artificial
  Chemically synthesized
ggugaaagacacuaguuag

SEQ ID NO: 18235 - RNA, 19 nt, artificial
  Chemically synthesized
cauagauacaguugugcag

SEQ ID NO: 18236 - RNA, 19 nt, artificial
  Chemically synthesized
acagcaccguucaugacgu

SEQ ID NO: 18237 - RNA, 19 nt, artificial
  Chemically synthesized
gcuccaggugucuguaucu

SEQ ID NO: 18238 - RNA, 19 nt, artificial
  Chemically synthesized
cagucguacuugacccagu

SEQ ID NO: 18239 - RNA, 19 nt, artificial
  Chemically synthesized
gugaaagacacuaguuagu

SEQ ID NO: 18240 - RNA, 19 nt, artificial
  Chemically synthesized
gaaaguccacgucucuguu

SEQ ID NO: 18241 - RNA, 19 nt, artificial
  Chemically synthesized
gacuguauuuuugcccaag

SEQ ID NO: 18242 - RNA, 19 nt, artificial
  Chemically synthesized
gugggacagguugaagaac

SEQ ID NO: 18243 - RNA, 19 nt, artificial
  Chemically synthesized
gcauccugguacuugaccu

SEQ ID NO: 18244 - RNA, 19 nt, artificial
  Chemically synthesized
ggugcauccugguacuuga

SEQ ID NO: 18245 - RNA, 19 nt, artificial
  Chemically synthesized
gcgaauucaaugaggcgcu

SEQ ID NO: 18246 - RNA, 19 nt, artificial
  Chemically synthesized
gucguacuugacccaguug

SEQ ID NO: 18247 - RNA, 19 nt, artificial
  Chemically synthesized
gucgaucugguacaugaca

SEQ ID NO: 18248 - RNA, 19 nt, artificial
  Chemically synthesized
ggguuccagaagauaagca

SEQ ID NO: 18249 - RNA, 19 nt, artificial
  Chemically synthesized
gguuccagaagauaagcaa

SEQ ID NO: 18250 - RNA, 19 nt, artificial
  Chemically synthesized
caaaggccugcuugguaug

SEQ ID NO: 18251 - RNA, 19 nt, artificial
  Chemically synthesized
gccucaacagguacaguuc

SEQ ID NO: 18252 - RNA, 19 nt, artificial
  Chemically synthesized
guacaaaaacaaugauacu

SEQ ID NO: 18253 - RNA, 19 nt, artificial
  Chemically synthesized
guacaguucugcuggucaa

SEQ ID NO: 18254 - RNA, 19 nt, artificial
  Chemically synthesized
cagcucguucaugaugcca

SEQ ID NO: 18255 - RNA, 19 nt, artificial
  Chemically synthesized
gaugguguucauugcugug

SEQ ID NO: 18256 - RNA, 19 nt, artificial
  Chemically synthesized
ccguguaggcgaauucaau

SEQ ID NO: 18257 - RNA, 19 nt, artificial
  Chemically synthesized
aggguuacuuaucaacaaa

SEQ ID NO: 18258 - RNA, 19 nt, artificial
  Chemically synthesized
cuugaagacagggcuggau

SEQ ID NO: 18259 - RNA, 19 nt, artificial
  Chemically synthesized
ggacagguugaagaacucc

SEQ ID NO: 18260 - RNA, 19 nt, artificial
  Chemically synthesized
cuguauuuuugcccaagaa

SEQ ID NO: 18261 - RNA, 19 nt, artificial
  Chemically synthesized
uggugaacauggccuugaa

SEQ ID NO: 18262 - RNA, 19 nt, artificial
  Chemically synthesized
gcacaugauucccgcuuug

SEQ ID NO: 18263 - RNA, 19 nt, artificial
  Chemically synthesized
cuuuauuuuccuuggaaaa

SEQ ID NO: 18264 - RNA, 19 nt, artificial
  Chemically synthesized
ccucgaagaucuugaccag

SEQ ID NO: 18265 - RNA, 19 nt, artificial
  Chemically synthesized
aguugaugcaggcguggaa

SEQ ID NO: 18266 - RNA, 19 nt, artificial
  Chemically synthesized
gcagcauagauacaguugu

SEQ ID NO: 18267 - RNA, 19 nt, artificial
  Chemically synthesized
agacacuaguuagucuguu

SEQ ID NO: 18268 - RNA, 19 nt, artificial
  Chemically synthesized
ccaaaggccugcuugguau

SEQ ID NO: 18269 - RNA, 19 nt, artificial
  Chemically synthesized
agugggacagguugaagaa

SEQ ID NO: 18270 - RNA, 19 nt, artificial
  Chemically synthesized
cagcagcauagauacaguu

SEQ ID NO: 18271 - RNA, 19 nt, artificial
  Chemically synthesized
agucccgguuuuuguacaa

SEQ ID NO: 18272 - RNA, 19 nt, artificial
  Chemically synthesized
cuuggaaaauuacaggguu

SEQ ID NO: 18273 - RNA, 19 nt, artificial
  Chemically synthesized
gcuucuauguacaggccca

SEQ ID NO: 18274 - RNA, 19 nt, artificial
  Chemically synthesized
ccagguauccaagaauaaa

SEQ ID NO: 18275 - RNA, 19 nt, artificial
  Chemically synthesized
acggcauaaaggagacgau

SEQ ID NO: 18276 - RNA, 19 nt, artificial
  Chemically synthesized
caucccugggaaccacauu

SEQ ID NO: 18277 - RNA, 19 nt, artificial
  Chemically synthesized
gggugaaagacacuaguua

SEQ ID NO: 18278 - RNA, 19 nt, artificial
  Chemically synthesized
ggguuauuugcagugcugu

SEQ ID NO: 18279 - RNA, 19 nt, artificial
  Chemically synthesized
accucuccacacuguugug

SEQ ID NO: 18280 - RNA, 19 nt, artificial
  Chemically synthesized
acucaguggaggcguacau

SEQ ID NO: 18281 - RNA, 19 nt, artificial
  Chemically synthesized
ugagcgacugucggaagua

SEQ ID NO: 18282 - RNA, 19 nt, artificial
  Chemically synthesized
cgaucugguacaugacagc

SEQ ID NO: 18283 - RNA, 19 nt, artificial
  Chemically synthesized
cgguuuuuguacaaaaaca

SEQ ID NO: 18284 - RNA, 19 nt, artificial
  Chemically synthesized
ccgguggcuucuauguaca

SEQ ID NO: 18285 - RNA, 19 nt, artificial
  Chemically synthesized
ccggaagauggguuauuug

SEQ ID NO: 18286 - RNA, 19 nt, artificial
  Chemically synthesized
ccucaacagguacaguucu

SEQ ID NO: 18287 - RNA, 19 nt, artificial
  Chemically synthesized
gugcauccugguacuugac

SEQ ID NO: 18288 - RNA, 19 nt, artificial
  Chemically synthesized
agauguggccaucgaugac

SEQ ID NO: 18289 - RNA, 19 nt, artificial
  Chemically synthesized
cccgguuuuuguacaaaaa

SEQ ID NO: 18290 - RNA, 19 nt, artificial
  Chemically synthesized
gcauaaaggagacgauuga

SEQ ID NO: 18291 - RNA, 19 nt, artificial
  Chemically synthesized
gagcuccucgaagaucuug

SEQ ID NO: 18292 - RNA, 19 nt, artificial
  Chemically synthesized
ugagcuccucgaagaucuu

SEQ ID NO: 18293 - RNA, 19 nt, artificial
  Chemically synthesized
caacaaaauaacuguccau

SEQ ID NO: 18294 - RNA, 19 nt, artificial
  Chemically synthesized
guuccucucuggguaguaa

SEQ ID NO: 18295 - RNA, 19 nt, artificial
  Chemically synthesized
cguacuugacccaguugau

SEQ ID NO: 18296 - RNA, 19 nt, artificial
  Chemically synthesized
caaucugcucagcgaaguu

SEQ ID NO: 18297 - RNA, 19 nt, artificial
  Chemically synthesized
uaguaacacucagcugaau

SEQ ID NO: 18298 - RNA, 19 nt, artificial
  Chemically synthesized
ccagcagcauagauacagu

SEQ ID NO: 18299 - RNA, 19 nt, artificial
  Chemically synthesized
cggcauaaaggagacgauu

SEQ ID NO: 18300 - RNA, 19 nt, artificial
  Chemically synthesized
ggguuacuuaucaacaaaa

SEQ ID NO: 18301 - RNA, 19 nt, artificial
  Chemically synthesized
cgaauucaaugaggcgcuc

SEQ ID NO: 18302 - RNA, 19 nt, artificial
  Chemically synthesized
guuuuuguacaaaaacaau

SEQ ID NO: 18303 - RNA, 19 nt, artificial
  Chemically synthesized
gcagugcugucuuuucuuu

SEQ ID NO: 18304 - RNA, 19 nt, artificial
  Chemically synthesized
caggguuacuuaucaacaa

SEQ ID NO: 18305 - RNA, 19 nt, artificial
  Chemically synthesized
cgguggcuucuauguacag

SEQ ID NO: 18306 - RNA, 19 nt, artificial
  Chemically synthesized
agccaaucugcucagcgaa

SEQ ID NO: 18307 - RNA, 19 nt, artificial
  Chemically synthesized
caggugucuguaucugggu

SEQ ID NO: 18308 - RNA, 19 nt, artificial
  Chemically synthesized
gcuugguaugauccuccag

SEQ ID NO: 18309 - RNA, 19 nt, artificial
  Chemically synthesized
gucccgguuuuuguacaaa

SEQ ID NO: 18310 - RNA, 19 nt, artificial
  Chemically synthesized
acaugacagcaccguucau

SEQ ID NO: 18311 - RNA, 19 nt, artificial
  Chemically synthesized
uccacacuguuguggugga

SEQ ID NO: 18312 - RNA, 19 nt, artificial
  Chemically synthesized
gcuguucgcagucguacuu

SEQ ID NO: 18313 - RNA, 19 nt, artificial
  Chemically synthesized
ggauacccucaauggacac

SEQ ID NO: 18314 - RNA, 19 nt, artificial
  Chemically synthesized
cccagguauccaagaauaa

SEQ ID NO: 18315 - RNA, 19 nt, artificial
  Chemically synthesized
ggaaaauuacaggguuacu

SEQ ID NO: 18316 - RNA, 19 nt, artificial
  Chemically synthesized
cgauccuucgugucagcau

SEQ ID NO: 18317 - RNA, 19 nt, artificial
  Chemically synthesized
caauggacaccaccuccau

SEQ ID NO: 18318 - RNA, 19 nt, artificial
  Chemically synthesized
ggguaguaacacucagcug

SEQ ID NO: 18319 - RNA, 19 nt, artificial
  Chemically synthesized
gguuuuuguacaaaaacaa

SEQ ID NO: 18320 - RNA, 19 nt, artificial
  Chemically synthesized
gccugcuugguaugauccu

SEQ ID NO: 18321 - RNA, 19 nt, artificial
  Chemically synthesized
cgaccacugauuggucaug

SEQ ID NO: 18322 - RNA, 19 nt, artificial
  Chemically synthesized
gguacaugacagcaccguu

SEQ ID NO: 18323 - RNA, 19 nt, artificial
  Chemically synthesized
cguuccucucuggguagua

SEQ ID NO: 18324 - RNA, 19 nt, artificial
  Chemically synthesized
guaguaacacucagcugaa

SEQ ID NO: 18325 - RNA, 19 nt, artificial
  Chemically synthesized
aggagacgauugaggacag

SEQ ID NO: 18326 - RNA, 19 nt, artificial
  Chemically synthesized
agcugguccugaccaucau

SEQ ID NO: 18327 - RNA, 19 nt, artificial
  Chemically synthesized
ggcacaugauucccgcuuu

SEQ ID NO: 18328 - RNA, 19 nt, artificial
  Chemically synthesized
acuucucgcccauggagau

SEQ ID NO: 18329 - RNA, 19 nt, artificial
  Chemically synthesized
ggaacgugugaccaucaua

SEQ ID NO: 18330 - RNA, 19 nt, artificial
  Chemically synthesized
gcauagauacaguugugca

SEQ ID NO: 18331 - RNA, 19 nt, artificial
  Chemically synthesized
gcauagauguggccaucga

SEQ ID NO: 18332 - RNA, 19 nt, artificial
  Chemically synthesized
gguauccaagaauaaauca

SEQ ID NO: 18333 - RNA, 19 nt, artificial
  Chemically synthesized
gguguucauugcugugauc

SEQ ID NO: 18334 - RNA, 19 nt, artificial
  Chemically synthesized
ccucccagguauccaagaa

SEQ ID NO: 18335 - RNA, 19 nt, artificial
  Chemically synthesized
cccggaagauggguuauuu

SEQ ID NO: 18336 - RNA, 19 nt, artificial
  Chemically synthesized
gcgaccacugauuggucau

SEQ ID NO: 18337 - RNA, 19 nt, artificial
  Chemically synthesized
caacgcugucgaucuggua

SEQ ID NO: 18338 - RNA, 19 nt, artificial
  Chemically synthesized
gguggauacccucaaugga

SEQ ID NO: 18339 - RNA, 19 nt, artificial
  Chemically synthesized
cagcugaauuaaggcgguu

SEQ ID NO: 18340 - RNA, 19 nt, artificial
  Chemically synthesized
gguuacuuaucaacaaaau

SEQ ID NO: 18341 - RNA, 19 nt, artificial
  Chemically synthesized
gugccucaacagguacagu

SEQ ID NO: 18342 - RNA, 19 nt, artificial
  Chemically synthesized
gccguguaggcgaauucaa

SEQ ID NO: 18343 - RNA, 19 nt, artificial
  Chemically synthesized
gcuucggaugguguucauu

SEQ ID NO: 18344 - RNA, 19 nt, artificial
  Chemically synthesized
ggugaacauggccuugaag

SEQ ID NO: 18345 - RNA, 19 nt, artificial
  Chemically synthesized
gggaaccacauuuccagag

SEQ ID NO: 18346 - RNA, 19 nt, artificial
  Chemically synthesized
cagguacaguucugcuggu

SEQ ID NO: 18347 - RNA, 19 nt, artificial
  Chemically synthesized
ggaaccacauuuccagagg

SEQ ID NO: 18348 - RNA, 19 nt, artificial
  Chemically synthesized
gcuccucgaagaucuugac

SEQ ID NO: 18349 - RNA, 19 nt, artificial
  Chemically synthesized
ggaugguguucauugcugu

SEQ ID NO: 18350 - RNA, 19 nt, artificial
  Chemically synthesized
gccuccaaggacguagauu

SEQ ID NO: 18351 - RNA, 19 nt, artificial
  Chemically synthesized
gcugguccugaccaucaua

SEQ ID NO: 18352 - RNA, 19 nt, artificial
  Chemically synthesized
ccaucauagccuccaagga

SEQ ID NO: 18353 - RNA, 19 nt, artificial
  Chemically synthesized
cacuguugugguggaugca

SEQ ID NO: 18354 - RNA, 19 nt, artificial
  Chemically synthesized
caaaaugcauguagaugua

SEQ ID NO: 18355 - RNA, 19 nt, artificial
  Chemically synthesized
gcugcaucugcaggaaguu

SEQ ID NO: 18356 - RNA, 19 nt, artificial
  Chemically synthesized
gcaacuccacacagccaau

SEQ ID NO: 18357 - RNA, 19 nt, artificial
  Chemically synthesized
gguuguaagccuccaggua

SEQ ID NO: 18358 - RNA, 19 nt, artificial
  Chemically synthesized
gguacuugaccugcagugu

SEQ ID NO: 18359 - RNA, 19 nt, artificial
  Chemically synthesized
cgaagaucuugaccaggua

SEQ ID NO: 18360 - RNA, 19 nt, artificial
  Chemically synthesized
gggacagguugaagaacuc

SEQ ID NO: 18361 - RNA, 19 nt, artificial
  Chemically synthesized
cauagccuccaaggacgua

SEQ ID NO: 18362 - RNA, 19 nt, artificial
  Chemically synthesized
acuccacacuguccaggaa

SEQ ID NO: 18363 - RNA, 19 nt, artificial
  Chemically synthesized
gcucguucaugaugccaaa

SEQ ID NO: 18364 - RNA, 19 nt, artificial
  Chemically synthesized
ggacuucuuuugagauguc

SEQ ID NO: 18365 - RNA, 19 nt, artificial
  Chemically synthesized
agccuccaaggacguagau

SEQ ID NO: 18366 - RNA, 19 nt, artificial
  Chemically synthesized
ggacuguauuuuugcccaa

SEQ ID NO: 18367 - RNA, 19 nt, artificial
  Chemically synthesized
cgcuucggaugguguucau

SEQ ID NO: 18368 - RNA, 19 nt, artificial
  Chemically synthesized
ccacacuguugugguggau

SEQ ID NO: 18369 - RNA, 19 nt, artificial
  Chemically synthesized
cgcugucgaucugguacau

SEQ ID NO: 18370 - RNA, 19 nt, artificial
  Chemically synthesized
accugaaauuugcuggaau

SEQ ID NO: 18371 - RNA, 19 nt, artificial
  Chemically synthesized
cgaguaugucgccuauguu

SEQ ID NO: 18372 - RNA, 19 nt, artificial
  Chemically synthesized
cagagagcuuuuugaugau

SEQ ID NO: 18373 - RNA, 19 nt, artificial
  Chemically synthesized
gcagagagcuuuuugauga

SEQ ID NO: 18374 - RNA, 19 nt, artificial
  Chemically synthesized
ccgcuuugaaagugucagu

SEQ ID NO: 18375 - RNA, 19 nt, artificial
  Chemically synthesized
agcuuuuugaugaucccuc

SEQ ID NO: 18376 - RNA, 19 nt, artificial
  Chemically synthesized
ugaccaucaguacuauaau

SEQ ID NO: 18377 - RNA, 19 nt, artificial
  Chemically synthesized
cacaugcaaucuaucucau

SEQ ID NO: 18378 - RNA, 19 nt, artificial
  Chemically synthesized
ccuacuugguucgguacau

SEQ ID NO: 18379 - RNA, 19 nt, artificial
  Chemically synthesized
ccuaugucaacguccagaa

SEQ ID NO: 18380 - RNA, 19 nt, artificial
  Chemically synthesized
agagagcuuuuugaugauc

SEQ ID NO: 18381 - RNA, 19 nt, artificial
  Chemically synthesized
agagcuuuuugaugauccc

SEQ ID NO: 18382 - RNA, 19 nt, artificial
  Chemically synthesized
ucaaacaauaccucaggaa

SEQ ID NO: 18383 - RNA, 19 nt, artificial
  Chemically synthesized
acaugcaaucuaucucauu

SEQ ID NO: 18384 - RNA, 19 nt, artificial
  Chemically synthesized
aaccugaaauuugcuggaa

SEQ ID NO: 18385 - RNA, 19 nt, artificial
  Chemically synthesized
cgcuuugaaagugucaguc

SEQ ID NO: 18386 - RNA, 19 nt, artificial
  Chemically synthesized
gggaccuguuugacaugaa

SEQ ID NO: 18387 - RNA, 19 nt, artificial
  Chemically synthesized
ccuccuaugucaacgucca

SEQ ID NO: 18388 - RNA, 19 nt, artificial
  Chemically synthesized
ucccuccuaugucaacguc

SEQ ID NO: 18389 - RNA, 19 nt, artificial
  Chemically synthesized
guacuauaaugacuucccg

SEQ ID NO: 18390 - RNA, 19 nt, artificial
  Chemically synthesized
agggugugguucggacuaa

SEQ ID NO: 18391 - RNA, 19 nt, artificial
  Chemically synthesized
agacaugaggcuucgggaa

SEQ ID NO: 18392 - RNA, 19 nt, artificial
  Chemically synthesized
gcgcuucaaacaauaccuc

SEQ ID NO: 18393 - RNA, 19 nt, artificial
  Chemically synthesized
ccaaucacucucaccgucu

SEQ ID NO: 18394 - RNA, 19 nt, artificial
  Chemically synthesized
gcauuugcuacugguggac

SEQ ID NO: 18395 - RNA, 19 nt, artificial
  Chemically synthesized
gugguagacaugaggcuuc

SEQ ID NO: 18396 - RNA, 19 nt, artificial
  Chemically synthesized
caaucacucucaccgucuc

SEQ ID NO: 18397 - RNA, 19 nt, artificial
  Chemically synthesized
cgggagcuuugucaauaag

SEQ ID NO: 18398 - RNA, 19 nt, artificial
  Chemically synthesized
ggacaugaacaagcugagu

SEQ ID NO: 18399 - RNA, 19 nt, artificial
  Chemically synthesized
cccaauccugcuaucaaug

SEQ ID NO: 18400 - RNA, 19 nt, artificial
  Chemically synthesized
cgaguugcgcuucaaacaa

SEQ ID NO: 18401 - RNA, 19 nt, artificial
  Chemically synthesized
gcuuugaaagugucaguca

SEQ ID NO: 18402 - RNA, 19 nt, artificial
  Chemically synthesized
ugauggcucagcaugggau

SEQ ID NO: 18403 - RNA, 19 nt, artificial
  Chemically synthesized
ugcgcuucaaacaauaccu

SEQ ID NO: 18404 - RNA, 19 nt, artificial
  Chemically synthesized
augcaaucuaucucauuug

SEQ ID NO: 18405 - RNA, 19 nt, artificial
  Chemically synthesized
accacaugcaaucuaucuc

SEQ ID NO: 18406 - RNA, 19 nt, artificial
  Chemically synthesized
ccaccacaugcaaucuauc

SEQ ID NO: 18407 - RNA, 19 nt, artificial
  Chemically synthesized
guacauggguuguguggag

SEQ ID NO: 18408 - RNA, 19 nt, artificial
  Chemically synthesized
ggaucaccgcuuugaaagu

SEQ ID NO: 18409 - RNA, 19 nt, artificial
  Chemically synthesized
gguucggacuaaggaucac

SEQ ID NO: 18410 - RNA, 19 nt, artificial
  Chemically synthesized
cgggaccuguuugacauga

SEQ ID NO: 18411 - RNA, 19 nt, artificial
  Chemically synthesized
cgcuucaaacaauaccuca

SEQ ID NO: 18412 - RNA, 19 nt, artificial
  Chemically synthesized
gacaugaacaagcugagug

SEQ ID NO: 18413 - RNA, 19 nt, artificial
  Chemically synthesized
gcuucaaacaauaccucag

SEQ ID NO: 18414 - RNA, 19 nt, artificial
  Chemically synthesized
aguugcgcuucaaacaaua

SEQ ID NO: 18415 - RNA, 19 nt, artificial
  Chemically synthesized
agcuaccacauggacaauc

SEQ ID NO: 18416 - RNA, 19 nt, artificial
  Chemically synthesized
cagcuaccacauggacaau

SEQ ID NO: 18417 - RNA, 19 nt, artificial
  Chemically synthesized
accuuaucagcuaccacau

SEQ ID NO: 18418 - RNA, 19 nt, artificial
  Chemically synthesized
ggacuaaggaucaccgcuu

SEQ ID NO: 18419 - RNA, 19 nt, artificial
  Chemically synthesized
ugggcagccuaagcauuug

SEQ ID NO: 18420 - RNA, 19 nt, artificial
  Chemically synthesized
cgaacugugucuacagcaa

SEQ ID NO: 18421 - RNA, 19 nt, artificial
  Chemically synthesized
gugucagucaccuuaucag

SEQ ID NO: 18422 - RNA, 19 nt, artificial
  Chemically synthesized
gggaggaguaaccugaaau

SEQ ID NO: 18423 - RNA, 19 nt, artificial
  Chemically synthesized
gccuaagcauuugcuacug

SEQ ID NO: 18424 - RNA, 19 nt, artificial
  Chemically synthesized
acaaucacuugcccaucau

SEQ ID NO: 18425 - RNA, 19 nt, artificial
  Chemically synthesized
agauccagaaguccgcaaa

SEQ ID NO: 18426 - RNA, 19 nt, artificial
  Chemically synthesized
ccaucaguacuauaaugac

SEQ ID NO: 18427 - RNA, 19 nt, artificial
  Chemically synthesized
agccaccugaccaucagua

SEQ ID NO: 18428 - RNA, 19 nt, artificial
  Chemically synthesized
agccgaguaugucgccuau

SEQ ID NO: 18429 - RNA, 19 nt, artificial
  Chemically synthesized
aggaggagaaagcccugua

SEQ ID NO: 18430 - RNA, 19 nt, artificial
  Chemically synthesized
ucagcuaccacauggacaa

SEQ ID NO: 18431 - RNA, 19 nt, artificial
  Chemically synthesized
gggagcuacauugccugua

SEQ ID NO: 18432 - RNA, 19 nt, artificial
  Chemically synthesized
cugaccaucaguacuauaa

SEQ ID NO: 18433 - RNA, 19 nt, artificial
  Chemically synthesized
gaaauuugcuggaaugcca

SEQ ID NO: 18434 - RNA, 19 nt, artificial
  Chemically synthesized
acguccagaaccuagacaa

SEQ ID NO: 18435 - RNA, 19 nt, artificial
  Chemically synthesized
accaucaguacuauaauga

SEQ ID NO: 18436 - RNA, 19 nt, artificial
  Chemically synthesized
gcaaacagaucaucgccaa

SEQ ID NO: 18437 - RNA, 19 nt, artificial
  Chemically synthesized
cagacugcaaacagaucau

SEQ ID NO: 18438 - RNA, 19 nt, artificial
  Chemically synthesized
accacauggacaaucacuu

SEQ ID NO: 18439 - RNA, 19 nt, artificial
  Chemically synthesized
cuaagcauuugcuacuggu

SEQ ID NO: 18440 - RNA, 19 nt, artificial
  Chemically synthesized
gagauccagaaguccgcaa

SEQ ID NO: 18441 - RNA, 19 nt, artificial
  Chemically synthesized
cgccuauguugccaaagac

SEQ ID NO: 18442 - RNA, 19 nt, artificial
  Chemically synthesized
uggacaaucacuugcccau

SEQ ID NO: 18443 - RNA, 19 nt, artificial
  Chemically synthesized
aggcagagagcuuuuugau

SEQ ID NO: 18444 - RNA, 19 nt, artificial
  Chemically synthesized
ccugaccaucaguacuaua

SEQ ID NO: 18445 - RNA, 19 nt, artificial
  Chemically synthesized
ccgcagacugcaaacagau

SEQ ID NO: 18446 - RNA, 19 nt, artificial
  Chemically synthesized
ggguuuccuacuugguucg

SEQ ID NO: 18447 - RNA, 19 nt, artificial
  Chemically synthesized
ggacaaucacuugcccauc

SEQ ID NO: 18448 - RNA, 19 nt, artificial
  Chemically synthesized
gcagccuaagcauuugcua

SEQ ID NO: 18449 - RNA, 19 nt, artificial
  Chemically synthesized
caggcagagagcuuuuuga

SEQ ID NO: 18450 - RNA, 19 nt, artificial
  Chemically synthesized
ggagcuacauugccuguag

SEQ ID NO: 18451 - RNA, 19 nt, artificial
  Chemically synthesized
gcaaucuaucucauuugca

SEQ ID NO: 18452 - RNA, 19 nt, artificial
  Chemically synthesized
ugcaucccaacgacaaagu

SEQ ID NO: 18453 - RNA, 19 nt, artificial
  Chemically synthesized
gaaugccaaucacucucac

SEQ ID NO: 18454 - RNA, 19 nt, artificial
  Chemically synthesized
caacgacaaagucauggga

SEQ ID NO: 18455 - RNA, 19 nt, artificial
  Chemically synthesized
agccuaagcauuugcuacu

SEQ ID NO: 18456 - RNA, 19 nt, artificial
  Chemically synthesized
ggcagccuaagcauuugcu

SEQ ID NO: 18457 - RNA, 19 nt, artificial
  Chemically synthesized
accugaccaucaguacuau

SEQ ID NO: 18458 - RNA, 19 nt, artificial
  Chemically synthesized
caccugaccaucaguacua

SEQ ID NO: 18459 - RNA, 19 nt, artificial
  Chemically synthesized
ggcuuugauggcucagcau

SEQ ID NO: 18460 - RNA, 19 nt, artificial
  Chemically synthesized
accaccacaugcaaucuau

SEQ ID NO: 18461 - RNA, 19 nt, artificial
  Chemically synthesized
gcagacugcaaacagauca

SEQ ID NO: 18462 - RNA, 19 nt, artificial
  Chemically synthesized
ugaaagugucagucaccuu

SEQ ID NO: 18463 - RNA, 19 nt, artificial
  Chemically synthesized
ggcagagagcuuuuugaug

SEQ ID NO: 18464 - RNA, 19 nt, artificial
  Chemically synthesized
gccacuugggagcuacauu

SEQ ID NO: 18465 - RNA, 19 nt, artificial
  Chemically synthesized
ugucgccuauguugccaaa

SEQ ID NO: 18466 - RNA, 19 nt, artificial
  Chemically synthesized
uggagguccuccagucaau

SEQ ID NO: 18467 - RNA, 19 nt, artificial
  Chemically synthesized
gucaccuuaucagcuacca

SEQ ID NO: 18468 - RNA, 19 nt, artificial
  Chemically synthesized
ucaccgcuuugaaaguguc

SEQ ID NO: 18469 - RNA, 19 nt, artificial
  Chemically synthesized
ccuaagcauuugcuacugg

SEQ ID NO: 18470 - RNA, 19 nt, artificial
  Chemically synthesized
gcccuucgaagaugcucuu

SEQ ID NO: 18471 - RNA, 19 nt, artificial
  Chemically synthesized
ugcuaucaauggcagugca

SEQ ID NO: 18472 - RNA, 19 nt, artificial
  Chemically synthesized
ugacaggauggcuggcuuu

SEQ ID NO: 18473 - RNA, 19 nt, artificial
  Chemically synthesized
ccuucgaguugcgcuucaa

SEQ ID NO: 18474 - RNA, 19 nt, artificial
  Chemically synthesized
uugccaaagacccugugaa

SEQ ID NO: 18475 - RNA, 19 nt, artificial
  Chemically synthesized
ugcaaucuaucucauuugc

SEQ ID NO: 18476 - RNA, 19 nt, artificial
  Chemically synthesized
gcgaacugugucuacagca

SEQ ID NO: 18477 - RNA, 19 nt, artificial
  Chemically synthesized
aguaugugcucacuggcuu

SEQ ID NO: 18478 - RNA, 19 nt, artificial
  Chemically synthesized
uggcuuugauggcucagca

SEQ ID NO: 18479 - RNA, 19 nt, artificial
  Chemically synthesized
agacugcaaacagaucauc

SEQ ID NO: 18480 - RNA, 19 nt, artificial
  Chemically synthesized
gcaucccaacgacaaaguc

SEQ ID NO: 18481 - RNA, 19 nt, artificial
  Chemically synthesized
gcugcaucccaacgacaaa

SEQ ID NO: 18482 - RNA, 19 nt, artificial
  Chemically synthesized
agcauuugcuacuggugga

SEQ ID NO: 18483 - RNA, 19 nt, artificial
  Chemically synthesized
ucaacguccagaaccuaga

SEQ ID NO: 18484 - RNA, 19 nt, artificial
  Chemically synthesized
ugccaaagacccugugaau

SEQ ID NO: 18485 - RNA, 19 nt, artificial
  Chemically synthesized
ccaaccaccacaugcaauc

SEQ ID NO: 18486 - RNA, 19 nt, artificial
  Chemically synthesized
ugcaaacagaucaucgcca

SEQ ID NO: 18487 - RNA, 19 nt, artificial
  Chemically synthesized
ccaacgacaaagucauggg

SEQ ID NO: 18488 - RNA, 19 nt, artificial
  Chemically synthesized
ggagcuuugucaauaagcc

SEQ ID NO: 18489 - RNA, 19 nt, artificial
  Chemically synthesized
ccugcuaucaauggcagug

SEQ ID NO: 18490 - RNA, 19 nt, artificial
  Chemically synthesized
agccacuugggagcuacau

SEQ ID NO: 18491 - RNA, 19 nt, artificial
  Chemically synthesized
ccaccugaccaucaguacu

SEQ ID NO: 18492 - RNA, 19 nt, artificial
  Chemically synthesized
gccaaagacccugugaauc

SEQ ID NO: 18493 - RNA, 19 nt, artificial
  Chemically synthesized
aaccaccacaugcaaucua

SEQ ID NO: 18494 - RNA, 19 nt, artificial
  Chemically synthesized
gcuuugucaauaagcccac

SEQ ID NO: 18495 - RNA, 19 nt, artificial
  Chemically synthesized
cagucaccuuaucagcuac

SEQ ID NO: 18496 - RNA, 19 nt, artificial
  Chemically synthesized
ugacaugaagcccuucgaa

SEQ ID NO: 18497 - RNA, 19 nt, artificial
  Chemically synthesized
cugccacauucuggagugu

SEQ ID NO: 18498 - RNA, 19 nt, artificial
  Chemically synthesized
gccaaccaccacaugcaau

SEQ ID NO: 18499 - RNA, 19 nt, artificial
  Chemically synthesized
cgcagacugcaaacagauc

SEQ ID NO: 18500 - RNA, 19 nt, artificial
  Chemically synthesized
caccuuaucagcuaccaca

SEQ ID NO: 18501 - RNA, 19 nt, artificial
  Chemically synthesized
caggaugucaucagcacca

SEQ ID NO: 18502 - RNA, 19 nt, artificial
  Chemically synthesized
uggccaguaugugcucacu

SEQ ID NO: 18503 - RNA, 19 nt, artificial
  Chemically synthesized
aggaugucaucagcaccau

SEQ ID NO: 18504 - RNA, 19 nt, artificial
  Chemically synthesized
cccuucgaagaugcucuuc

SEQ ID NO: 18505 - RNA, 19 nt, artificial
  Chemically synthesized
uguuugacaugaagcccuu

SEQ ID NO: 18506 - RNA, 19 nt, artificial
  Chemically synthesized
cuguuugacaugaagcccu

SEQ ID NO: 18507 - RNA, 19 nt, artificial
  Chemically synthesized
ggaugucaucagcaccauu

SEQ ID NO: 18508 - RNA, 19 nt, artificial
  Chemically synthesized
ucaucgccaaccaccacau

SEQ ID NO: 18509 - RNA, 19 nt, artificial
  Chemically synthesized
ggguucuuauaauggaaaa

SEQ ID NO: 18510 - RNA, 19 nt, artificial
  Chemically synthesized
cccaagcccaaguacaauc

SEQ ID NO: 18511 - RNA, 19 nt, artificial
  Chemically synthesized
aggaagggcagcugaugau

SEQ ID NO: 18512 - RNA, 19 nt, artificial
  Chemically synthesized
auuccagcaaauuucaggu

SEQ ID NO: 18513 - RNA, 19 nt, artificial
  Chemically synthesized
aacauaggcgacauacucg

SEQ ID NO: 18514 - RNA, 19 nt, artificial
  Chemically synthesized
aucaucaaaaagcucucug

SEQ ID NO: 18515 - RNA, 19 nt, artificial
  Chemically synthesized
ucaucaaaaagcucucugc

SEQ ID NO: 18516 - RNA, 19 nt, artificial
  Chemically synthesized
acugacacuuucaaagcgg

SEQ ID NO: 18517 - RNA, 19 nt, artificial
  Chemically synthesized
gagggaucaucaaaaagcu

SEQ ID NO: 18518 - RNA, 19 nt, artificial
  Chemically synthesized
auuauaguacugaugguca

SEQ ID NO: 18519 - RNA, 19 nt, artificial
  Chemically synthesized
augagauagauugcaugug

SEQ ID NO: 18520 - RNA, 19 nt, artificial
  Chemically synthesized
auguaccgaaccaaguagg

SEQ ID NO: 18521 - RNA, 19 nt, artificial
  Chemically synthesized
uucuggacguugacauagg

SEQ ID NO: 18522 - RNA, 19 nt, artificial
  Chemically synthesized
gaucaucaaaaagcucucu

SEQ ID NO: 18523 - RNA, 19 nt, artificial
  Chemically synthesized
gggaucaucaaaaagcucu

SEQ ID NO: 18524 - RNA, 19 nt, artificial
  Chemically synthesized
uuccugagguauuguuuga

SEQ ID NO: 18525 - RNA, 19 nt, artificial
  Chemically synthesized
aaugagauagauugcaugu

SEQ ID NO: 18526 - RNA, 19 nt, artificial
  Chemically synthesized
uuccagcaaauuucagguu

SEQ ID NO: 18527 - RNA, 19 nt, artificial
  Chemically synthesized
gacugacacuuucaaagcg

SEQ ID NO: 18528 - RNA, 19 nt, artificial
  Chemically synthesized
uucaugucaaacagguccc

SEQ ID NO: 18529 - RNA, 19 nt, artificial
  Chemically synthesized
uggacguugacauaggagg

SEQ ID NO: 18530 - RNA, 19 nt, artificial
  Chemically synthesized
gacguugacauaggaggga

SEQ ID NO: 18531 - RNA, 19 nt, artificial
  Chemically synthesized
cgggaagucauuauaguac

SEQ ID NO: 18532 - RNA, 19 nt, artificial
  Chemically synthesized
uuaguccgaaccacacccu

SEQ ID NO: 18533 - RNA, 19 nt, artificial
  Chemically synthesized
uucccgaagccucaugucu

SEQ ID NO: 18534 - RNA, 19 nt, artificial
  Chemically synthesized
gagguauuguuugaagcgc

SEQ ID NO: 18535 - RNA, 19 nt, artificial
  Chemically synthesized
agacggugagagugauugg

SEQ ID NO: 18536 - RNA, 19 nt, artificial
  Chemically synthesized
guccaccaguagcaaaugc

SEQ ID NO: 18537 - RNA, 19 nt, artificial
  Chemically synthesized
gaagccucaugucuaccac

SEQ ID NO: 18538 - RNA, 19 nt, artificial
  Chemically synthesized
gagacggugagagugauug

SEQ ID NO: 18539 - RNA, 19 nt, artificial
  Chemically synthesized
cuuauugacaaagcucccg

SEQ ID NO: 18540 - RNA, 19 nt, artificial
  Chemically synthesized
acucagcuuguucaugucc

SEQ ID NO: 18541 - RNA, 19 nt, artificial
  Chemically synthesized
cauugauagcaggauuggg

SEQ ID NO: 18542 - RNA, 19 nt, artificial
  Chemically synthesized
uuguuugaagcgcaacucg

SEQ ID NO: 18543 - RNA, 19 nt, artificial
  Chemically synthesized
ugacugacacuuucaaagc

SEQ ID NO: 18544 - RNA, 19 nt, artificial
  Chemically synthesized
aucccaugcugagccauca

SEQ ID NO: 18545 - RNA, 19 nt, artificial
  Chemically synthesized
agguauuguuugaagcgca

SEQ ID NO: 18546 - RNA, 19 nt, artificial
  Chemically synthesized
caaaugagauagauugcau

SEQ ID NO: 18547 - RNA, 19 nt, artificial
  Chemically synthesized
gagauagauugcauguggu

SEQ ID NO: 18548 - RNA, 19 nt, artificial
  Chemically synthesized
gauagauugcauguggugg

SEQ ID NO: 18549 - RNA, 19 nt, artificial
  Chemically synthesized
cuccacacaacccauguac

SEQ ID NO: 18550 - RNA, 19 nt, artificial
  Chemically synthesized
acuuucaaagcggugaucc

SEQ ID NO: 18551 - RNA, 19 nt, artificial
  Chemically synthesized
gugauccuuaguccgaacc

SEQ ID NO: 18552 - RNA, 19 nt, artificial
  Chemically synthesized
ucaugucaaacaggucccg

SEQ ID NO: 18553 - RNA, 19 nt, artificial
  Chemically synthesized
ugagguauuguuugaagcg

SEQ ID NO: 18554 - RNA, 19 nt, artificial
  Chemically synthesized
cacucagcuuguucauguc

SEQ ID NO: 18555 - RNA, 19 nt, artificial
  Chemically synthesized
cugagguauuguuugaagc

SEQ ID NO: 18556 - RNA, 19 nt, artificial
  Chemically synthesized
uauuguuugaagcgcaacu

SEQ ID NO: 18557 - RNA, 19 nt, artificial
  Chemically synthesized
gauuguccaugugguagcu

SEQ ID NO: 18558 - RNA, 19 nt, artificial
  Chemically synthesized
auuguccaugugguagcug

SEQ ID NO: 18559 - RNA, 19 nt, artificial
  Chemically synthesized
augugguagcugauaaggu

SEQ ID NO: 18560 - RNA, 19 nt, artificial
  Chemically synthesized
aagcggugauccuuagucc

SEQ ID NO: 18561 - RNA, 19 nt, artificial
  Chemically synthesized
caaaugcuuaggcugccca

SEQ ID NO: 18562 - RNA, 19 nt, artificial
  Chemically synthesized
uugcuguagacacaguucg

SEQ ID NO: 18563 - RNA, 19 nt, artificial
  Chemically synthesized
cugauaaggugacugacac

SEQ ID NO: 18564 - RNA, 19 nt, artificial
  Chemically synthesized
auuucagguuacuccuccc

SEQ ID NO: 18565 - RNA, 19 nt, artificial
  Chemically synthesized
caguagcaaaugcuuaggc

SEQ ID NO: 18566 - RNA, 19 nt, artificial
  Chemically synthesized
augaugggcaagugauugu

SEQ ID NO: 18567 - RNA, 19 nt, artificial
  Chemically synthesized
uuugcggacuucuggaucu

SEQ ID NO: 18568 - RNA, 19 nt, artificial
  Chemically synthesized
gucauuauaguacugaugg

SEQ ID NO: 18569 - RNA, 19 nt, artificial
  Chemically synthesized
uacugauggucagguggcu

SEQ ID NO: 18570 - RNA, 19 nt, artificial
  Chemically synthesized
auaggcgacauacucggcu

SEQ ID NO: 18571 - RNA, 19 nt, artificial
  Chemically synthesized
uacagggcuuucuccuccu

SEQ ID NO: 18572 - RNA, 19 nt, artificial
  Chemically synthesized
uuguccaugugguagcuga

SEQ ID NO: 18573 - RNA, 19 nt, artificial
  Chemically synthesized
uacaggcaauguagcuccc

SEQ ID NO: 18574 - RNA, 19 nt, artificial
  Chemically synthesized
uuauaguacugauggucag

SEQ ID NO: 18575 - RNA, 19 nt, artificial
  Chemically synthesized
uggcauuccagcaaauuuc

SEQ ID NO: 18576 - RNA, 19 nt, artificial
  Chemically synthesized
uugucuagguucuggacgu

SEQ ID NO: 18577 - RNA, 19 nt, artificial
  Chemically synthesized
ucauuauaguacugauggu

SEQ ID NO: 18578 - RNA, 19 nt, artificial
  Chemically synthesized
uuggcgaugaucuguuugc

SEQ ID NO: 18579 - RNA, 19 nt, artificial
  Chemically synthesized
augaucuguuugcagucug

SEQ ID NO: 18580 - RNA, 19 nt, artificial
  Chemically synthesized
aagugauuguccauguggu

SEQ ID NO: 18581 - RNA, 19 nt, artificial
  Chemically synthesized
accaguagcaaaugcuuag

SEQ ID NO: 18582 - RNA, 19 nt, artificial
  Chemically synthesized
uugcggacuucuggaucuc

SEQ ID NO: 18583 - RNA, 19 nt, artificial
  Chemically synthesized
gucuuuggcaacauaggcg

SEQ ID NO: 18584 - RNA, 19 nt, artificial
  Chemically synthesized
augggcaagugauugucca

SEQ ID NO: 18585 - RNA, 19 nt, artificial
  Chemically synthesized
aucaaaaagcucucugccu

SEQ ID NO: 18586 - RNA, 19 nt, artificial
  Chemically synthesized
uauaguacugauggucagg

SEQ ID NO: 18587 - RNA, 19 nt, artificial
  Chemically synthesized
aucuguuugcagucugcgg

SEQ ID NO: 18588 - RNA, 19 nt, artificial
  Chemically synthesized
cgaaccaaguaggaaaccc

SEQ ID NO: 18589 - RNA, 19 nt, artificial
  Chemically synthesized
gaugggcaagugauugucc

SEQ ID NO: 18590 - RNA, 19 nt, artificial
  Chemically synthesized
uagcaaaugcuuaggcugc

SEQ ID NO: 18591 - RNA, 19 nt, artificial
  Chemically synthesized
ucaaaaagcucucugccug

SEQ ID NO: 18592 - RNA, 19 nt, artificial
  Chemically synthesized
cuacaggcaauguagcucc

SEQ ID NO: 18593 - RNA, 19 nt, artificial
  Chemically synthesized
ugcaaaugagauagauugc

SEQ ID NO: 18594 - RNA, 19 nt, artificial
  Chemically synthesized
acuuugucguugggaugca

SEQ ID NO: 18595 - RNA, 19 nt, artificial
  Chemically synthesized
gugagagugauuggcauuc

SEQ ID NO: 18596 - RNA, 19 nt, artificial
  Chemically synthesized
ucccaugacuuugucguug

SEQ ID NO: 18597 - RNA, 19 nt, artificial
  Chemically synthesized
aguagcaaaugcuuaggcu

SEQ ID NO: 18598 - RNA, 19 nt, artificial
  Chemically synthesized
agcaaaugcuuaggcugcc

SEQ ID NO: 18599 - RNA, 19 nt, artificial
  Chemically synthesized
auaguacugauggucaggu

SEQ ID NO: 18600 - RNA, 19 nt, artificial
  Chemically synthesized
uaguacugauggucaggug

SEQ ID NO: 18601 - RNA, 19 nt, artificial
  Chemically synthesized
augcugagccaucaaagcc

SEQ ID NO: 18602 - RNA, 19 nt, artificial
  Chemically synthesized
auagauugcaugugguggu

SEQ ID NO: 18603 - RNA, 19 nt, artificial
  Chemically synthesized
ugaucuguuugcagucugc

SEQ ID NO: 18604 - RNA, 19 nt, artificial
  Chemically synthesized
aaggugacugacacuuuca

SEQ ID NO: 18605 - RNA, 19 nt, artificial
  Chemically synthesized
caucaaaaagcucucugcc

SEQ ID NO: 18606 - RNA, 19 nt, artificial
  Chemically synthesized
aauguagcucccaaguggc

SEQ ID NO: 18607 - RNA, 19 nt, artificial
  Chemically synthesized
uuuggcaacauaggcgaca

SEQ ID NO: 18608 - RNA, 19 nt, artificial
  Chemically synthesized
auugacuggaggaccucca

SEQ ID NO: 18609 - RNA, 19 nt, artificial
  Chemically synthesized
ugguagcugauaaggugac

SEQ ID NO: 18610 - RNA, 19 nt, artificial
  Chemically synthesized
gacacuuucaaagcgguga

SEQ ID NO: 18611 - RNA, 19 nt, artificial
  Chemically synthesized
ccaguagcaaaugcuuagg

SEQ ID NO: 18612 - RNA, 19 nt, artificial
  Chemically synthesized
aagagcaucuucgaagggc

SEQ ID NO: 18613 - RNA, 19 nt, artificial
  Chemically synthesized
ugcacugccauugauagca

SEQ ID NO: 18614 - RNA, 19 nt, artificial
  Chemically synthesized
aaagccagccauccuguca

SEQ ID NO: 18615 - RNA, 19 nt, artificial
  Chemically synthesized
uugaagcgcaacucgaagg

SEQ ID NO: 18616 - RNA, 19 nt, artificial
  Chemically synthesized
uucacagggucuuuggcaa

SEQ ID NO: 18617 - RNA, 19 nt, artificial
  Chemically synthesized
gcaaaugagauagauugca

SEQ ID NO: 18618 - RNA, 19 nt, artificial
  Chemically synthesized
ugcuguagacacaguucgc

SEQ ID NO: 18619 - RNA, 19 nt, artificial
  Chemically synthesized
aagccagugagcacauacu

SEQ ID NO: 18620 - RNA, 19 nt, artificial
  Chemically synthesized
ugcugagccaucaaagcca

SEQ ID NO: 18621 - RNA, 19 nt, artificial
  Chemically synthesized
gaugaucuguuugcagucu

SEQ ID NO: 18622 - RNA, 19 nt, artificial
  Chemically synthesized
gacuuugucguugggaugc

SEQ ID NO: 18623 - RNA, 19 nt, artificial
  Chemically synthesized
uuugucguugggaugcagc

SEQ ID NO: 18624 - RNA, 19 nt, artificial
  Chemically synthesized
uccaccaguagcaaaugcu

SEQ ID NO: 18625 - RNA, 19 nt, artificial
  Chemically synthesized
ucuagguucuggacguuga

SEQ ID NO: 18626 - RNA, 19 nt, artificial
  Chemically synthesized
auucacagggucuuuggca

SEQ ID NO: 18627 - RNA, 19 nt, artificial
  Chemically synthesized
gauugcauguggugguugg

SEQ ID NO: 18628 - RNA, 19 nt, artificial
  Chemically synthesized
uggcgaugaucuguuugca

SEQ ID NO: 18629 - RNA, 19 nt, artificial
  Chemically synthesized
cccaugacuuugucguugg

SEQ ID NO: 18630 - RNA, 19 nt, artificial
  Chemically synthesized
ggcuuauugacaaagcucc

SEQ ID NO: 18631 - RNA, 19 nt, artificial
  Chemically synthesized
cacugccauugauagcagg

SEQ ID NO: 18632 - RNA, 19 nt, artificial
  Chemically synthesized
auguagcucccaaguggcu

SEQ ID NO: 18633 - RNA, 19 nt, artificial
  Chemically synthesized
aguacugauggucaggugg

SEQ ID NO: 18634 - RNA, 19 nt, artificial
  Chemically synthesized
gauucacagggucuuuggc

SEQ ID NO: 18635 - RNA, 19 nt, artificial
  Chemically synthesized
uagauugcauguggugguu

SEQ ID NO: 18636 - RNA, 19 nt, artificial
  Chemically synthesized
gugggcuuauugacaaagc

SEQ ID NO: 18637 - RNA, 19 nt, artificial
  Chemically synthesized
guagcugauaaggugacug

SEQ ID NO: 18638 - RNA, 19 nt, artificial
  Chemically synthesized
uucgaagggcuucauguca

SEQ ID NO: 18639 - RNA, 19 nt, artificial
  Chemically synthesized
acacuccagaauguggcag

SEQ ID NO: 18640 - RNA, 19 nt, artificial
  Chemically synthesized
auugcauguggugguuggc

SEQ ID NO: 18641 - RNA, 19 nt, artificial
  Chemically synthesized
gaucuguuugcagucugcg

SEQ ID NO: 18642 - RNA, 19 nt, artificial
  Chemically synthesized
ugugguagcugauaaggug

SEQ ID NO: 18643 - RNA, 19 nt, artificial
  Chemically synthesized
uggugcugaugacauccug

SEQ ID NO: 18644 - RNA, 19 nt, artificial
  Chemically synthesized
agugagcacauacuggcca

SEQ ID NO: 18645 - RNA, 19 nt, artificial
  Chemically synthesized
auggugcugaugacauccu

SEQ ID NO: 18646 - RNA, 19 nt, artificial
  Chemically synthesized
gaagagcaucuucgaaggg

SEQ ID NO: 18647 - RNA, 19 nt, artificial
  Chemically synthesized
aagggcuucaugucaaaca

SEQ ID NO: 18648 - RNA, 19 nt, artificial
  Chemically synthesized
agggcuucaugucaaacag

SEQ ID NO: 18649 - RNA, 19 nt, artificial
  Chemically synthesized
aauggugcugaugacaucc

SEQ ID NO: 18650 - RNA, 19 nt, artificial
  Chemically synthesized
auguggugguuggcgauga

SEQ ID NO: 18651 - RNA, 19 nt, artificial
  Chemically synthesized
uuuuccauuauaagaaccc

SEQ ID NO: 18652 - RNA, 19 nt, artificial
  Chemically synthesized
gauuguacuugggcuuggg

SEQ ID NO: 18653 - RNA, 19 nt, artificial
  Chemically synthesized
aucaucagcugcccuuccu

SEQ ID NO: 18654 - RNA, 19 nt, artificial
  Chemically synthesized
acgggagcuuugucaauaa

SEQ ID NO: 18655 - RNA, 19 nt, artificial
  Chemically synthesized
caggauggcuggcuuugau

SEQ ID NO: 18656 - RNA, 19 nt, artificial
  Chemically synthesized
ccagaaguccgcaaacaga

SEQ ID NO: 18657 - RNA, 19 nt, artificial
  Chemically synthesized
caaucuaucucauuugcau

SEQ ID NO: 18658 - RNA, 19 nt, artificial
  Chemically synthesized
gaugaucccuccuauguca

SEQ ID NO: 18659 - RNA, 19 nt, artificial
  Chemically synthesized
ggaggaguaaccugaaauu

SEQ ID NO: 18660 - RNA, 19 nt, artificial
  Chemically synthesized
uaaggaucaccgcuuugaa

SEQ ID NO: 18661 - RNA, 19 nt, artificial
  Chemically synthesized
gaguugcgcuucaaacaau

SEQ ID NO: 18662 - RNA, 19 nt, artificial
  Chemically synthesized
aaauuugcuggaaugccaa

SEQ ID NO: 18663 - RNA, 19 nt, artificial
  Chemically synthesized
gugugguucggacuaagga

SEQ ID NO: 18664 - RNA, 19 nt, artificial
  Chemically synthesized
aaggaucaccgcuuugaaa

SEQ ID NO: 18665 - RNA, 19 nt, artificial
  Chemically synthesized
uuuugaugaucccuccuau

SEQ ID NO: 18666 - RNA, 19 nt, artificial
  Chemically synthesized
ugugguucggacuaaggau

SEQ ID NO: 18667 - RNA, 19 nt, artificial
  Chemically synthesized
uguggagcggaaacuguga

SEQ ID NO: 18668 - RNA, 19 nt, artificial
  Chemically synthesized
cuucgaguugcgcuucaaa

SEQ ID NO: 18669 - RNA, 19 nt, artificial
  Chemically synthesized
ggaccuguuugacaugaag

SEQ ID NO: 18670 - RNA, 19 nt, artificial
  Chemically synthesized
ggaguaaccugaaauuugc

SEQ ID NO: 18671 - RNA, 19 nt, artificial
  Chemically synthesized
gcuaccacauggacaauca

SEQ ID NO: 18672 - RNA, 19 nt, artificial
  Chemically synthesized
augggaugaggaggaggaa

SEQ ID NO: 18673 - RNA, 19 nt, artificial
  Chemically synthesized
ccacgggagcuuugucaau

SEQ ID NO: 18674 - RNA, 19 nt, artificial
  Chemically synthesized
cauucuggagugucccgaa

SEQ ID NO: 18675 - RNA, 19 nt, artificial
  Chemically synthesized
gacuaaggaucaccgcuuu

SEQ ID NO: 18676 - RNA, 19 nt, artificial
  Chemically synthesized
acaugaagcccuucgaaga

SEQ ID NO: 18677 - RNA, 19 nt, artificial
  Chemically synthesized
cacgggagcuuugucaaua

SEQ ID NO: 18678 - RNA, 19 nt, artificial
  Chemically synthesized
ccaucagucugguguguga

SEQ ID NO: 18679 - RNA, 19 nt, artificial
  Chemically synthesized
uagacaugaggcuucggga

SEQ ID NO: 18680 - RNA, 19 nt, artificial
  Chemically synthesized
ccacaugcaaucuaucuca

SEQ ID NO: 18681 - RNA, 19 nt, artificial
  Chemically synthesized
caugaacaagcugagugga

SEQ ID NO: 18682 - RNA, 19 nt, artificial
  Chemically synthesized
gguacauggguugugugga

SEQ ID NO: 18683 - RNA, 19 nt, artificial
  Chemically synthesized
ccugaaauuugcuggaaug

SEQ ID NO: 18684 - RNA, 19 nt, artificial
  Chemically synthesized
gaguaaccugaaauuugcu

SEQ ID NO: 18685 - RNA, 19 nt, artificial
  Chemically synthesized
gaaagugucagucaccuua

SEQ ID NO: 18686 - RNA, 19 nt, artificial
  Chemically synthesized
cagaaguccgcaaacagau

SEQ ID NO: 18687 - RNA, 19 nt, artificial
  Chemically synthesized
ccgaguaugucgccuaugu

SEQ ID NO: 18688 - RNA, 19 nt, artificial
  Chemically synthesized
agaucaucgccaaccacca

SEQ ID NO: 18689 - RNA, 19 nt, artificial
  Chemically synthesized
gaguaugucgccuauguug

SEQ ID NO: 18690 - RNA, 19 nt, artificial
  Chemically synthesized
ucgaguugcgcuucaaaca

SEQ ID NO: 18691 - RNA, 19 nt, artificial
  Chemically synthesized
uuuccuacuugguucggua

SEQ ID NO: 18692 - RNA, 19 nt, artificial
  Chemically synthesized
aaucagagagccugccaca

SEQ ID NO: 18693 - RNA, 19 nt, artificial
  Chemically synthesized
caugcaaucuaucucauuu

SEQ ID NO: 18694 - RNA, 19 nt, artificial
  Chemically synthesized
cuugguucgguacaugggu

SEQ ID NO: 18695 - RNA, 19 nt, artificial
  Chemically synthesized
caaacagaugccaccucca

SEQ ID NO: 18696 - RNA, 19 nt, artificial
  Chemically synthesized
cguccagaaccuagacaag

SEQ ID NO: 18697 - RNA, 19 nt, artificial
  Chemically synthesized
caaacaauaccucaggaac

SEQ ID NO: 18698 - RNA, 19 nt, artificial
  Chemically synthesized
ugucaacguccagaaccua

SEQ ID NO: 18699 - RNA, 19 nt, artificial
  Chemically synthesized
ucgccuauguugccaaaga

SEQ ID NO: 18700 - RNA, 19 nt, artificial
  Chemically synthesized
caaacagaucaucgccaac

SEQ ID NO: 18701 - RNA, 19 nt, artificial
  Chemically synthesized
ccaaagacccugugaauca

SEQ ID NO: 18702 - RNA, 19 nt, artificial
  Chemically synthesized
caugaagcccuucgaagau

SEQ ID NO: 18703 - RNA, 19 nt, artificial
  Chemically synthesized
gcuuuuugaugaucccucc

SEQ ID NO: 18704 - RNA, 19 nt, artificial
  Chemically synthesized
aacagaucaucgccaacca

SEQ ID NO: 18705 - RNA, 19 nt, artificial
  Chemically synthesized
uaaccugaaauuugcugga

SEQ ID NO: 18706 - RNA, 19 nt, artificial
  Chemically synthesized
gcagcgaacugugucuaca

SEQ ID NO: 18707 - RNA, 19 nt, artificial
  Chemically synthesized
ucagucaccuuaucagcua

SEQ ID NO: 18708 - RNA, 19 nt, artificial
  Chemically synthesized
ugguucggacuaaggauca

SEQ ID NO: 18709 - RNA, 19 nt, artificial
  Chemically synthesized
cuauguugccaaagacccu

SEQ ID NO: 18710 - RNA, 19 nt, artificial
  Chemically synthesized
agacccugugaaucagaga

SEQ ID NO: 18711 - RNA, 19 nt, artificial
  Chemically synthesized
caaagacccugugaaucag

SEQ ID NO: 18712 - RNA, 19 nt, artificial
  Chemically synthesized
cuaugucaacguccagaac

SEQ ID NO: 18713 - RNA, 19 nt, artificial
  Chemically synthesized
cuaccacauggacaaucac

SEQ ID NO: 18714 - RNA, 19 nt, artificial
  Chemically synthesized
acuucaacacccggacuca

SEQ ID NO: 18715 - RNA, 19 nt, artificial
  Chemically synthesized
ggugguagacaugaggcuu

SEQ ID NO: 18716 - RNA, 19 nt, artificial
  Chemically synthesized
augaucccuccuaugucaa

SEQ ID NO: 18717 - RNA, 19 nt, artificial
  Chemically synthesized
gguucgguacauggguugu

SEQ ID NO: 18718 - RNA, 19 nt, artificial
  Chemically synthesized
cuacuugguucgguacaug

SEQ ID NO: 18719 - RNA, 19 nt, artificial
  Chemically synthesized
cuacauugccuguaggaca

SEQ ID NO: 18720 - RNA, 19 nt, artificial
  Chemically synthesized
gauccagaaguccgcaaac

SEQ ID NO: 18721 - RNA, 19 nt, artificial
  Chemically synthesized
acaggauggcuggcuuuga

SEQ ID NO: 18722 - RNA, 19 nt, artificial
  Chemically synthesized
ggaaugccaaucacucuca

SEQ ID NO: 18723 - RNA, 19 nt, artificial
  Chemically synthesized
caucaguacuauaaugacu

SEQ ID NO: 18724 - RNA, 19 nt, artificial
  Chemically synthesized
cuuugaaagugucagucac

SEQ ID NO: 18725 - RNA, 19 nt, artificial
  Chemically synthesized
cuggaaugccaaucacucu

SEQ ID NO: 18726 - RNA, 19 nt, artificial
  Chemically synthesized
gugggcagccuaagcauuu

SEQ ID NO: 18727 - RNA, 19 nt, artificial
  Chemically synthesized
augucaacguccagaaccu

SEQ ID NO: 18728 - RNA, 19 nt, artificial
  Chemically synthesized
acaauaccucaggaaccca

SEQ ID NO: 18729 - RNA, 19 nt, artificial
  Chemically synthesized
cuaaggaucaccgcuuuga

SEQ ID NO: 18730 - RNA, 19 nt, artificial
  Chemically synthesized
agugggcagccuaagcauu

SEQ ID NO: 18731 - RNA, 19 nt, artificial
  Chemically synthesized
agugucagucaccuuauca

SEQ ID NO: 18732 - RNA, 19 nt, artificial
  Chemically synthesized
uugacaugaagcccuucga

SEQ ID NO: 18733 - RNA, 19 nt, artificial
  Chemically synthesized
augucgccuauguugccaa

SEQ ID NO: 18734 - RNA, 19 nt, artificial
  Chemically synthesized
caccgcuuugaaaguguca

SEQ ID NO: 18735 - RNA, 19 nt, artificial
  Chemically synthesized
ugaugaucccuccuauguc

SEQ ID NO: 18736 - RNA, 19 nt, artificial
  Chemically synthesized
acaugaacaagcugagugg

SEQ ID NO: 18737 - RNA, 19 nt, artificial
  Chemically synthesized
caauaccucaggaacccac

SEQ ID NO: 18738 - RNA, 19 nt, artificial
  Chemically synthesized
ccacuugggagcuacauug

SEQ ID NO: 18739 - RNA, 19 nt, artificial
  Chemically synthesized
uucaaacaauaccucagga

SEQ ID NO: 18740 - RNA, 19 nt, artificial
  Chemically synthesized
aaagugucagucaccuuau

SEQ ID NO: 18741 - RNA, 19 nt, artificial
  Chemically synthesized
gacaaucacuugcccauca

SEQ ID NO: 18742 - RNA, 19 nt, artificial
  Chemically synthesized
aaagacccugugaaucaga

SEQ ID NO: 18743 - RNA, 19 nt, artificial
  Chemically synthesized
cuccuaugucaacguccag

SEQ ID NO: 18744 - RNA, 19 nt, artificial
  Chemically synthesized
augacaggauggcuggcuu

SEQ ID NO: 18745 - RNA, 19 nt, artificial
  Chemically synthesized
ugaacaagcugaguggagg

SEQ ID NO: 18746 - RNA, 19 nt, artificial
  Chemically synthesized
cuuuuugaugaucccuccu

SEQ ID NO: 18747 - RNA, 19 nt, artificial
  Chemically synthesized
uccuaugucaacguccaga

SEQ ID NO: 18748 - RNA, 19 nt, artificial
  Chemically synthesized
gagcuuuuugaugaucccu

SEQ ID NO: 18749 - RNA, 19 nt, artificial
  Chemically synthesized
gaggaguaaccugaaauuu

SEQ ID NO: 18750 - RNA, 19 nt, artificial
  Chemically synthesized
gaacugugucuacagcaac

SEQ ID NO: 18751 - RNA, 19 nt, artificial
  Chemically synthesized
ugaucccuccuaugucaac

SEQ ID NO: 18752 - RNA, 19 nt, artificial
  Chemically synthesized
uccagaaguccgcaaacag

SEQ ID NO: 18753 - RNA, 19 nt, artificial
  Chemically synthesized
caucccaacgacaaaguca

SEQ ID NO: 18754 - RNA, 19 nt, artificial
  Chemically synthesized
agcuacauugccuguagga

SEQ ID NO: 18755 - RNA, 19 nt, artificial
  Chemically synthesized
guugcgcuucaaacaauac

SEQ ID NO: 18756 - RNA, 19 nt, artificial
  Chemically synthesized
aagagccaccugaccauca

SEQ ID NO: 18757 - RNA, 19 nt, artificial
  Chemically synthesized
agaaguccgcaaacagaug

SEQ ID NO: 18758 - RNA, 19 nt, artificial
  Chemically synthesized
cagccuaagcauuugcuac

SEQ ID NO: 18759 - RNA, 19 nt, artificial
  Chemically synthesized
cagcgaacugugucuacag

SEQ ID NO: 18760 - RNA, 19 nt, artificial
  Chemically synthesized
uugguucgguacauggguu

SEQ ID NO: 18761 - RNA, 19 nt, artificial
  Chemically synthesized
ccacauggacaaucacuug

SEQ ID NO: 18762 - RNA, 19 nt, artificial
  Chemically synthesized
gacaugaagcccuucgaag

SEQ ID NO: 18763 - RNA, 19 nt, artificial
  Chemically synthesized
aagugucagucaccuuauc

SEQ ID NO: 18764 - RNA, 19 nt, artificial
  Chemically synthesized
aggauggcuggcuuugaug

SEQ ID NO: 18765 - RNA, 19 nt, artificial
  Chemically synthesized
guugccaaagacccuguga

SEQ ID NO: 18766 - RNA, 19 nt, artificial
  Chemically synthesized
gcuggaaugccaaucacuc

SEQ ID NO: 18767 - RNA, 19 nt, artificial
  Chemically synthesized
ugcuggaaugccaaucacu

SEQ ID NO: 18768 - RNA, 19 nt, artificial
  Chemically synthesized
aggaguaaccugaaauuug

SEQ ID NO: 18769 - RNA, 19 nt, artificial
  Chemically synthesized
ccuuaucagcuaccacaug

SEQ ID NO: 18770 - RNA, 19 nt, artificial
  Chemically synthesized
gcuaucaauggcagugcac

SEQ ID NO: 18771 - RNA, 19 nt, artificial
  Chemically synthesized
cuaucucauuugcauccgg

SEQ ID NO: 18772 - RNA, 19 nt, artificial
  Chemically synthesized
ugguuccaugggaagcuga

SEQ ID NO: 18773 - RNA, 19 nt, artificial
  Chemically synthesized
uuuuugaugaucccuccua

SEQ ID NO: 18774 - RNA, 19 nt, artificial
  Chemically synthesized
aucagagagccugccacau

SEQ ID NO: 18775 - RNA, 19 nt, artificial
  Chemically synthesized
ucaggaacccacccaaacu

SEQ ID NO: 18776 - RNA, 19 nt, artificial
  Chemically synthesized
aauuugcuggaaugccaau

SEQ ID NO: 18777 - RNA, 19 nt, artificial
  Chemically synthesized
acauggguuguguggaggu

SEQ ID NO: 18778 - RNA, 19 nt, artificial
  Chemically synthesized
aucagcuaccacauggaca

SEQ ID NO: 18779 - RNA, 19 nt, artificial
  Chemically synthesized
cuuugauggcucagcaugg

SEQ ID NO: 18780 - RNA, 19 nt, artificial
  Chemically synthesized
ugaaucagagagccugcca

SEQ ID NO: 18781 - RNA, 19 nt, artificial
  Chemically synthesized
caccacaugcaaucuaucu

SEQ ID NO: 18782 - RNA, 19 nt, artificial
  Chemically synthesized
acagaucaucgccaaccac

SEQ ID NO: 18783 - RNA, 19 nt, artificial
  Chemically synthesized
acuugguucgguacauggg

SEQ ID NO: 18784 - RNA, 19 nt, artificial
  Chemically synthesized
uuugaugaucccuccuaug

SEQ ID NO: 18785 - RNA, 19 nt, artificial
  Chemically synthesized
uuaucagcuaccacaugga

SEQ ID NO: 18786 - RNA, 19 nt, artificial
  Chemically synthesized
acaaggaggagaaagcccu

SEQ ID NO: 18787 - RNA, 19 nt, artificial
  Chemically synthesized
gucagucaccuuaucagcu

SEQ ID NO: 18788 - RNA, 19 nt, artificial
  Chemically synthesized
ugccaaucacucucaccgu

SEQ ID NO: 18789 - RNA, 19 nt, artificial
  Chemically synthesized
auccagaaguccgcaaaca

SEQ ID NO: 18790 - RNA, 19 nt, artificial
  Chemically synthesized
ucaucagcaccauuggcca

SEQ ID NO: 18791 - RNA, 19 nt, artificial
  Chemically synthesized
aucaguacuauaaugacuu

SEQ ID NO: 18792 - RNA, 19 nt, artificial
  Chemically synthesized
guaugugcucacuggcuug

SEQ ID NO: 18793 - RNA, 19 nt, artificial
  Chemically synthesized
gagagcuuuuugaugaucc

SEQ ID NO: 18794 - RNA, 19 nt, artificial
  Chemically synthesized
guuuccuacuugguucggu

SEQ ID NO: 18795 - RNA, 19 nt, artificial
  Chemically synthesized
caacguccagaaccuagac

SEQ ID NO: 18796 - RNA, 19 nt, artificial
  Chemically synthesized
gccuauguugccaaagacc

SEQ ID NO: 18797 - RNA, 19 nt, artificial
  Chemically synthesized
caaucacuugcccaucauc

SEQ ID NO: 18798 - RNA, 19 nt, artificial
  Chemically synthesized
ucagagagccugccacauu

SEQ ID NO: 18799 - RNA, 19 nt, artificial
  Chemically synthesized
uucgguacauggguugugu

SEQ ID NO: 18800 - RNA, 19 nt, artificial
  Chemically synthesized
ucaguacuauaaugacuuc

SEQ ID NO: 18801 - RNA, 19 nt, artificial
  Chemically synthesized
aucccaacgacaaagucau

SEQ ID NO: 18802 - RNA, 19 nt, artificial
  Chemically synthesized
gaccaucaguacuauaaug

SEQ ID NO: 18803 - RNA, 19 nt, artificial
  Chemically synthesized
guaugucgccuauguugcc

SEQ ID NO: 18804 - RNA, 19 nt, artificial
  Chemically synthesized
aaacaauaccucaggaacc

SEQ ID NO: 18805 - RNA, 19 nt, artificial
  Chemically synthesized
gacccugugaaucagagag

SEQ ID NO: 18806 - RNA, 19 nt, artificial
  Chemically synthesized
aguccgcaaacagaugcca

SEQ ID NO: 18807 - RNA, 19 nt, artificial
  Chemically synthesized
cuuugucaauaagcccacg

SEQ ID NO: 18808 - RNA, 19 nt, artificial
  Chemically synthesized
aaucacuugcccaucaucu

SEQ ID NO: 18809 - RNA, 19 nt, artificial
  Chemically synthesized
gugguucggacuaaggauc

SEQ ID NO: 18810 - RNA, 19 nt, artificial
  Chemically synthesized
uccuacuugguucgguaca

SEQ ID NO: 18811 - RNA, 19 nt, artificial
  Chemically synthesized
ucgguacauggguugugug

SEQ ID NO: 18812 - RNA, 19 nt, artificial
  Chemically synthesized
uacuugguucgguacaugg

SEQ ID NO: 18813 - RNA, 19 nt, artificial
  Chemically synthesized
caguaugugcucacuggcu

SEQ ID NO: 18814 - RNA, 19 nt, artificial
  Chemically synthesized
cuucaaacaauaccucagg

SEQ ID NO: 18815 - RNA, 19 nt, artificial
  Chemically synthesized
agagagccugccacauucu

SEQ ID NO: 18816 - RNA, 19 nt, artificial
  Chemically synthesized
cugcaucccaacgacaaag

SEQ ID NO: 18817 - RNA, 19 nt, artificial
  Chemically synthesized
cuugggagcuacauugccu

SEQ ID NO: 18818 - RNA, 19 nt, artificial
  Chemically synthesized
ugguagacaugaggcuucg

SEQ ID NO: 18819 - RNA, 19 nt, artificial
  Chemically synthesized
ucacuugcccaucaucucu

SEQ ID NO: 18820 - RNA, 19 nt, artificial
  Chemically synthesized
auggcucagcaugggauga

SEQ ID NO: 18821 - RNA, 19 nt, artificial
  Chemically synthesized
agcuuugucaauaagccca

SEQ ID NO: 18822 - RNA, 19 nt, artificial
  Chemically synthesized
gcuuugauggcucagcaug

SEQ ID NO: 18823 - RNA, 19 nt, artificial
  Chemically synthesized
aacccacccaaacugguca

SEQ ID NO: 18824 - RNA, 19 nt, artificial
  Chemically synthesized
ugucagucaccuuaucagc

SEQ ID NO: 18825 - RNA, 19 nt, artificial
  Chemically synthesized
gugucuacagcaaccugug

SEQ ID NO: 18826 - RNA, 19 nt, artificial
  Chemically synthesized
cuugcccaggaugucauca

SEQ ID NO: 18827 - RNA, 19 nt, artificial
  Chemically synthesized
aaucuaucucauuugcauc

SEQ ID NO: 18828 - RNA, 19 nt, artificial
  Chemically synthesized
gggagcuuugucaauaagc

SEQ ID NO: 18829 - RNA, 19 nt, artificial
  Chemically synthesized
cauggacaaucacuugccc

SEQ ID NO: 18830 - RNA, 19 nt, artificial
  Chemically synthesized
gaucccuccuaugucaacg

SEQ ID NO: 18831 - RNA, 19 nt, artificial
  Chemically synthesized
ugggagcuacauugccugu

SEQ ID NO: 18832 - RNA, 19 nt, artificial
  Chemically synthesized
gagcuacauugccuguagg

SEQ ID NO: 18833 - RNA, 19 nt, artificial
  Chemically synthesized
ugguucgguacauggguug

SEQ ID NO: 18834 - RNA, 19 nt, artificial
  Chemically synthesized
acuaaggaucaccgcuuug

SEQ ID NO: 18835 - RNA, 19 nt, artificial
  Chemically synthesized
uugaugaucccuccuaugu

SEQ ID NO: 18836 - RNA, 19 nt, artificial
  Chemically synthesized
ccugugaaucagagagccu

SEQ ID NO: 18837 - RNA, 19 nt, artificial
  Chemically synthesized
guaaccugaaauuugcugg

SEQ ID NO: 18838 - RNA, 19 nt, artificial
  Chemically synthesized
uugauggcucagcauggga

SEQ ID NO: 18839 - RNA, 19 nt, artificial
  Chemically synthesized
augaacaagcugaguggag

SEQ ID NO: 18840 - RNA, 19 nt, artificial
  Chemically synthesized
uaccacauggacaaucacu

SEQ ID NO: 18841 - RNA, 19 nt, artificial
  Chemically synthesized
gacugcaaacagaucaucg

SEQ ID NO: 18842 - RNA, 19 nt, artificial
  Chemically synthesized
caucagucuggugugugag

SEQ ID NO: 18843 - RNA, 19 nt, artificial
  Chemically synthesized
guucgguacauggguugug

SEQ ID NO: 18844 - RNA, 19 nt, artificial
  Chemically synthesized
guuugacaugaagcccuuc

SEQ ID NO: 18845 - RNA, 19 nt, artificial
  Chemically synthesized
aauccugcuaucaauggca

SEQ ID NO: 18846 - RNA, 19 nt, artificial
  Chemically synthesized
aaggaggagaaagcccugu

SEQ ID NO: 18847 - RNA, 19 nt, artificial
  Chemically synthesized
accgcuuugaaagugucag

SEQ ID NO: 18848 - RNA, 19 nt, artificial
  Chemically synthesized
augugcucacuggcuugca

SEQ ID NO: 18849 - RNA, 19 nt, artificial
  Chemically synthesized
ccaauccugcuaucaaugg

SEQ ID NO: 18850 - RNA, 19 nt, artificial
  Chemically synthesized
uuugcuggaaugccaauca

SEQ ID NO: 18851 - RNA, 19 nt, artificial
  Chemically synthesized
gucaacguccagaaccuag

SEQ ID NO: 18852 - RNA, 19 nt, artificial
  Chemically synthesized
augucaucagcaccauugg

SEQ ID NO: 18853 - RNA, 19 nt, artificial
  Chemically synthesized
aagacccugugaaucagag

SEQ ID NO: 18854 - RNA, 19 nt, artificial
  Chemically synthesized
ccuauguugccaaagaccc

SEQ ID NO: 18855 - RNA, 19 nt, artificial
  Chemically synthesized
uaugucgccuauguugcca

SEQ ID NO: 18856 - RNA, 19 nt, artificial
  Chemically synthesized
aggaucaccgcuuugaaag

SEQ ID NO: 18857 - RNA, 19 nt, artificial
  Chemically synthesized
cugugucuacagcaaccug

SEQ ID NO: 18858 - RNA, 19 nt, artificial
  Chemically synthesized
gagcuuugucaauaagccc

SEQ ID NO: 18859 - RNA, 19 nt, artificial
  Chemically synthesized
gaagcccuucgaagaugcu

SEQ ID NO: 18860 - RNA, 19 nt, artificial
  Chemically synthesized
uaucagcuaccacauggac

SEQ ID NO: 18861 - RNA, 19 nt, artificial
  Chemically synthesized
caaccaccacaugcaaucu

SEQ ID NO: 18862 - RNA, 19 nt, artificial
  Chemically synthesized
uccugcuaucaauggcagu

SEQ ID NO: 18863 - RNA, 19 nt, artificial
  Chemically synthesized
ucaccuuaucagcuaccac

SEQ ID NO: 18864 - RNA, 19 nt, artificial
  Chemically synthesized
aucccuccuaugucaacgu

SEQ ID NO: 18865 - RNA, 19 nt, artificial
  Chemically synthesized
aguaaccugaaauuugcug

SEQ ID NO: 18866 - RNA, 19 nt, artificial
  Chemically synthesized
ugugucuacagcaaccugu

SEQ ID NO: 18867 - RNA, 19 nt, artificial
  Chemically synthesized
aucacuugcccaucaucuc

SEQ ID NO: 18868 - RNA, 19 nt, artificial
  Chemically synthesized
gucuacagcaaccugugga

SEQ ID NO: 18869 - RNA, 19 nt, artificial
  Chemically synthesized
aguaugucgccuauguugc

SEQ ID NO: 18870 - RNA, 19 nt, artificial
  Chemically synthesized
auggacaaucacuugccca

SEQ ID NO: 18871 - RNA, 19 nt, artificial
  Chemically synthesized
cacuugcccaucaucucug

SEQ ID NO: 18872 - RNA, 19 nt, artificial
  Chemically synthesized
uacauugccuguaggacag

SEQ ID NO: 18873 - RNA, 19 nt, artificial
  Chemically synthesized
gaccuguuugacaugaagc

SEQ ID NO: 18874 - RNA, 19 nt, artificial
  Chemically synthesized
acauucuggagugucccga

SEQ ID NO: 18875 - RNA, 19 nt, artificial
  Chemically synthesized
gguuuccuacuugguucgg

SEQ ID NO: 18876 - RNA, 19 nt, artificial
  Chemically synthesized
uugcuggaaugccaaucac

SEQ ID NO: 18877 - RNA, 19 nt, artificial
  Chemically synthesized
ugugaaucagagagccugc

SEQ ID NO: 18878 - RNA, 19 nt, artificial
  Chemically synthesized
auggcuggcuuugauggcu

SEQ ID NO: 18879 - RNA, 19 nt, artificial
  Chemically synthesized
caauccugcuaucaauggc

SEQ ID NO: 18880 - RNA, 19 nt, artificial
  Chemically synthesized
aaccuguggagcggaaacu

SEQ ID NO: 18881 - RNA, 19 nt, artificial
  Chemically synthesized
aacugugucuacagcaacc

SEQ ID NO: 18882 - RNA, 19 nt, artificial
  Chemically synthesized
gcuacauugccuguaggac

SEQ ID NO: 18883 - RNA, 19 nt, artificial
  Chemically synthesized
ucccaacgacaaagucaug

SEQ ID NO: 18884 - RNA, 19 nt, artificial
  Chemically synthesized
gucgccuauguugccaaag

SEQ ID NO: 18885 - RNA, 19 nt, artificial
  Chemically synthesized
ucuacagcaaccuguggag

SEQ ID NO: 18886 - RNA, 19 nt, artificial
  Chemically synthesized
aaacagaugccaccuccac

SEQ ID NO: 18887 - RNA, 19 nt, artificial
  Chemically synthesized
cugugaaucagagagccug

SEQ ID NO: 18888 - RNA, 19 nt, artificial
  Chemically synthesized
aguacuauaaugacuuccc

SEQ ID NO: 18889 - RNA, 19 nt, artificial
  Chemically synthesized
agcgaacugugucuacagc

SEQ ID NO: 18890 - RNA, 19 nt, artificial
  Chemically synthesized
aucacucucaccgucucca

SEQ ID NO: 18891 - RNA, 19 nt, artificial
  Chemically synthesized
acgacaaagucaugggacc

SEQ ID NO: 18892 - RNA, 19 nt, artificial
  Chemically synthesized
uugaaagugucagucaccu

SEQ ID NO: 18893 - RNA, 19 nt, artificial
  Chemically synthesized
uacuauaaugacuucccgg

SEQ ID NO: 18894 - RNA, 19 nt, artificial
  Chemically synthesized
ugucuacagcaaccugugg

SEQ ID NO: 18895 - RNA, 19 nt, artificial
  Chemically synthesized
aacguccagaaccuagaca

SEQ ID NO: 18896 - RNA, 19 nt, artificial
  Chemically synthesized
aacaauaccucaggaaccc

SEQ ID NO: 18897 - RNA, 19 nt, artificial
  Chemically synthesized
aauaccucaggaacccacc

SEQ ID NO: 18898 - RNA, 19 nt, artificial
  Chemically synthesized
uccagaaccuagacaaggc

SEQ ID NO: 18899 - RNA, 19 nt, artificial
  Chemically synthesized
auucuggagugucccgaag

SEQ ID NO: 18900 - RNA, 19 nt, artificial
  Chemically synthesized
cuaucaauggcagugcacc

SEQ ID NO: 18901 - RNA, 19 nt, artificial
  Chemically synthesized
uugggagcuacauugccug

SEQ ID NO: 18902 - RNA, 19 nt, artificial
  Chemically synthesized
uuccuacuugguucgguac

SEQ ID NO: 18903 - RNA, 19 nt, artificial
  Chemically synthesized
uaagcauuugcuacuggug

SEQ ID NO: 18904 - RNA, 19 nt, artificial
  Chemically synthesized
acugcaaacagaucaucgc

SEQ ID NO: 18905 - RNA, 19 nt, artificial
  Chemically synthesized
agcccuucgaagaugcucu

SEQ ID NO: 18906 - RNA, 19 nt, artificial
  Chemically synthesized
uucgaguugcgcuucaaac

SEQ ID NO: 18907 - RNA, 19 nt, artificial
  Chemically synthesized
cugcaaacagaucaucgcc

SEQ ID NO: 18908 - RNA, 19 nt, artificial
  Chemically synthesized
uguugccaaagacccugug

SEQ ID NO: 18909 - RNA, 19 nt, artificial
  Chemically synthesized
caguacuauaaugacuucc

SEQ ID NO: 18910 - RNA, 19 nt, artificial
  Chemically synthesized
auguugccaaagacccugu

SEQ ID NO: 18911 - RNA, 19 nt, artificial
  Chemically synthesized
uggaaugccaaucacucuc

SEQ ID NO: 18912 - RNA, 19 nt, artificial
  Chemically synthesized
aucaucgccaaccaccaca

SEQ ID NO: 18913 - RNA, 19 nt, artificial
  Chemically synthesized
uugcccaggaugucaucag

SEQ ID NO: 18914 - RNA, 19 nt, artificial
  Chemically synthesized
uugcgcuucaaacaauacc

SEQ ID NO: 18915 - RNA, 19 nt, artificial
  Chemically synthesized
aucaccgcuuugaaagugu

SEQ ID NO: 18916 - RNA, 19 nt, artificial
  Chemically synthesized
uacauggguuguguggagg

SEQ ID NO: 18917 - RNA, 19 nt, artificial
  Chemically synthesized
uuugauggcucagcauggg

SEQ ID NO: 18918 - RNA, 19 nt, artificial
  Chemically synthesized
cugaaauuugcuggaaugc

SEQ ID NO: 18919 - RNA, 19 nt, artificial
  Chemically synthesized
ccuucgaagaugcucuucg

SEQ ID NO: 18920 - RNA, 19 nt, artificial
  Chemically synthesized
cuuaucagcuaccacaugg

SEQ ID NO: 18921 - RNA, 19 nt, artificial
  Chemically synthesized
uauguugccaaagacccug

SEQ ID NO: 18922 - RNA, 19 nt, artificial
  Chemically synthesized
cacuugggagcuacauugc

SEQ ID NO: 18923 - RNA, 19 nt, artificial
  Chemically synthesized
guccagaaccuagacaagg

SEQ ID NO: 18924 - RNA, 19 nt, artificial
  Chemically synthesized
aucucauuugcauccggcg

SEQ ID NO: 18925 - RNA, 19 nt, artificial
  Chemically synthesized
acuauaaugacuucccggg

SEQ ID NO: 18926 - RNA, 19 nt, artificial
  Chemically synthesized
uaucaauggcagugcaccc

SEQ ID NO: 18927 - RNA, 19 nt, artificial
  Chemically synthesized
gaugucaucagcaccauug

SEQ ID NO: 18928 - RNA, 19 nt, artificial
  Chemically synthesized
ugaagcccuucgaagaugc

SEQ ID NO: 18929 - RNA, 19 nt, artificial
  Chemically synthesized
acauggacaaucacuugcc

SEQ ID NO: 18930 - RNA, 19 nt, artificial
  Chemically synthesized
acuugcccaucaucucugc

SEQ ID NO: 18931 - RNA, 19 nt, artificial
  Chemically synthesized
aaugccaaucacucucacc

SEQ ID NO: 18932 - RNA, 19 nt, artificial
  Chemically synthesized
accuguuugacaugaagcc

SEQ ID NO: 18933 - RNA, 19 nt, artificial
  Chemically synthesized
aucagucuggugugugagg

SEQ ID NO: 18934 - RNA, 19 nt, artificial
  Chemically synthesized
ccuguuugacaugaagccc

SEQ ID NO: 18935 - RNA, 19 nt, artificial
  Chemically synthesized
uaugucaacguccagaacc

SEQ ID NO: 18936 - RNA, 19 nt, artificial
  Chemically synthesized
uuugaaagugucagucacc

SEQ ID NO: 18937 - RNA, 19 nt, artificial
  Chemically synthesized
ugaaauuugcuggaaugcc

SEQ ID NO: 18938 - RNA, 19 nt, artificial
  Chemically synthesized
cacauggacaaucacuugc

SEQ ID NO: 18939 - RNA, 19 nt, artificial
  Chemically synthesized
auuugcuacugguggaccc

SEQ ID NO: 18940 - RNA, 19 nt, artificial
  Chemically synthesized
aagcauuugcuacuggugg

SEQ ID NO: 18941 - RNA, 19 nt, artificial
  Chemically synthesized
guucggacuaaggaucacc

SEQ ID NO: 18942 - RNA, 19 nt, artificial
  Chemically synthesized
uaucucauuugcauccggc

SEQ ID NO: 18943 - RNA, 19 nt, artificial
  Chemically synthesized
aacgacaaagucaugggac

SEQ ID NO: 18944 - RNA, 19 nt, artificial
  Chemically synthesized
auugccuguaggacagccu

SEQ ID NO: 18945 - RNA, 19 nt, artificial
  Chemically synthesized
acugugucuacagcaaccu

SEQ ID NO: 18946 - RNA, 19 nt, artificial
  Chemically synthesized
uugucaauaagcccacgcg

SEQ ID NO: 18947 - RNA, 19 nt, artificial
  Chemically synthesized
gaaguccgcaaacagaugc

SEQ ID NO: 18948 - RNA, 19 nt, artificial
  Chemically synthesized
ucuaucucauuugcauccg

SEQ ID NO: 18949 - RNA, 19 nt, artificial
  Chemically synthesized
acuugggagcuacauugcc

SEQ ID NO: 18950 - RNA, 19 nt, artificial
  Chemically synthesized
auccugcuaucaauggcag

SEQ ID NO: 18951 - RNA, 19 nt, artificial
  Chemically synthesized
augaagcccuucgaagaug

SEQ ID NO: 18952 - RNA, 19 nt, artificial
  Chemically synthesized
uuugcuacugguggacccu

SEQ ID NO: 18953 - RNA, 19 nt, artificial
  Chemically synthesized
gaucaccgcuuugaaagug

SEQ ID NO: 18954 - RNA, 19 nt, artificial
  Chemically synthesized
augccaaucacucucaccg

SEQ ID NO: 18955 - RNA, 19 nt, artificial
  Chemically synthesized
uucggacuaaggaucaccg

SEQ ID NO: 18956 - RNA, 19 nt, artificial
  Chemically synthesized
ugucaucagcaccauuggc

SEQ ID NO: 18957 - RNA, 19 nt, artificial
  Chemically synthesized
aaucacucucaccgucucc

SEQ ID NO: 18958 - RNA, 19 nt, artificial
  Chemically synthesized
acccugugaaucagagagc

SEQ ID NO: 18959 - RNA, 19 nt, artificial
  Chemically synthesized
cccaacgacaaagucaugg

SEQ ID NO: 18960 - RNA, 19 nt, artificial
  Chemically synthesized
aucuaucucauuugcaucc

SEQ ID NO: 18961 - RNA, 19 nt, artificial
  Chemically synthesized
cauuugcuacugguggacc

SEQ ID NO: 18962 - RNA, 19 nt, artificial
  Chemically synthesized
aaguccgcaaacagaugcc

SEQ ID NO: 18963 - RNA, 19 nt, artificial
  Chemically synthesized
agucaccuuaucagcuacc

SEQ ID NO: 18964 - RNA, 19 nt, artificial
  Chemically synthesized
acauugccuguaggacagc

SEQ ID NO: 18965 - RNA, 19 nt, artificial
  Chemically synthesized
uuugacaugaagcccuucg

SEQ ID NO: 18966 - RNA, 19 nt, artificial
  Chemically synthesized
ugccacauucuggaguguc

SEQ ID NO: 18967 - RNA, 19 nt, artificial
  Chemically synthesized
cugcuaucaauggcagugc

SEQ ID NO: 18968 - RNA, 19 nt, artificial
  Chemically synthesized
auuugcuggaaugccaauc

SEQ ID NO: 18969 - RNA, 19 nt, artificial
  Chemically synthesized
aaacagaucaucgccaacc

SEQ ID NO: 18970 - RNA, 19 nt, artificial
  Chemically synthesized
aagcccuucgaagaugcuc

SEQ ID NO: 18971 - RNA, 19 nt, artificial
  Chemically synthesized
uaugugcucacuggcuugc

SEQ ID NO: 18972 - RNA, 19 nt, artificial
  Chemically synthesized
uuugucaauaagcccacgc

SEQ ID NO: 18973 - RNA, 19 nt, artificial
  Chemically synthesized
uuauugacaaagcucccgu

SEQ ID NO: 18974 - RNA, 19 nt, artificial
  Chemically synthesized
aucaaagccagccauccug

SEQ ID NO: 18975 - RNA, 19 nt, artificial
  Chemically synthesized
ucuguuugcggacuucugg

SEQ ID NO: 18976 - RNA, 19 nt, artificial
  Chemically synthesized
augcaaaugagauagauug

SEQ ID NO: 18977 - RNA, 19 nt, artificial
  Chemically synthesized
ugacauaggagggaucauc

SEQ ID NO: 18978 - RNA, 19 nt, artificial
  Chemically synthesized
aauuucagguuacuccucc

SEQ ID NO: 18979 - RNA, 19 nt, artificial
  Chemically synthesized
uucaaagcggugauccuua

SEQ ID NO: 18980 - RNA, 19 nt, artificial
  Chemically synthesized
auuguuugaagcgcaacuc

SEQ ID NO: 18981 - RNA, 19 nt, artificial
  Chemically synthesized
uuggcauuccagcaaauuu

SEQ ID NO: 18982 - RNA, 19 nt, artificial
  Chemically synthesized
uccuuaguccgaaccacac

SEQ ID NO: 18983 - RNA, 19 nt, artificial
  Chemically synthesized
uuucaaagcggugauccuu

SEQ ID NO: 18984 - RNA, 19 nt, artificial
  Chemically synthesized
auaggagggaucaucaaaa

SEQ ID NO: 18985 - RNA, 19 nt, artificial
  Chemically synthesized
auccuuaguccgaaccaca

SEQ ID NO: 18986 - RNA, 19 nt, artificial
  Chemically synthesized
ucacaguuuccgcuccaca

SEQ ID NO: 18987 - RNA, 19 nt, artificial
  Chemically synthesized
uuugaagcgcaacucgaag

SEQ ID NO: 18988 - RNA, 19 nt, artificial
  Chemically synthesized
cuucaugucaaacaggucc

SEQ ID NO: 18989 - RNA, 19 nt, artificial
  Chemically synthesized
gcaaauuucagguuacucc

SEQ ID NO: 18990 - RNA, 19 nt, artificial
  Chemically synthesized
ugauuguccaugugguagc

SEQ ID NO: 18991 - RNA, 19 nt, artificial
  Chemically synthesized
uuccuccuccucaucccau

SEQ ID NO: 18992 - RNA, 19 nt, artificial
  Chemically synthesized
auugacaaagcucccgugg

SEQ ID NO: 18993 - RNA, 19 nt, artificial
  Chemically synthesized
uucgggacacuccagaaug

SEQ ID NO: 18994 - RNA, 19 nt, artificial
  Chemically synthesized
aaagcggugauccuuaguc

SEQ ID NO: 18995 - RNA, 19 nt, artificial
  Chemically synthesized
ucuucgaagggcuucaugu

SEQ ID NO: 18996 - RNA, 19 nt, artificial
  Chemically synthesized
uauugacaaagcucccgug

SEQ ID NO: 18997 - RNA, 19 nt, artificial
  Chemically synthesized
ucacacaccagacugaugg

SEQ ID NO: 18998 - RNA, 19 nt, artificial
  Chemically synthesized
ucccgaagccucaugucua

SEQ ID NO: 18999 - RNA, 19 nt, artificial
  Chemically synthesized
ugagauagauugcaugugg

SEQ ID NO: 19000 - RNA, 19 nt, artificial
  Chemically synthesized
uccacucagcuuguucaug

SEQ ID NO: 19001 - RNA, 19 nt, artificial
  Chemically synthesized
uccacacaacccauguacc

SEQ ID NO: 19002 - RNA, 19 nt, artificial
  Chemically synthesized
cauuccagcaaauuucagg

SEQ ID NO: 19003 - RNA, 19 nt, artificial
  Chemically synthesized
agcaaauuucagguuacuc

SEQ ID NO: 19004 - RNA, 19 nt, artificial
  Chemically synthesized
uaaggugacugacacuuuc

SEQ ID NO: 19005 - RNA, 19 nt, artificial
  Chemically synthesized
aucuguuugcggacuucug

SEQ ID NO: 19006 - RNA, 19 nt, artificial
  Chemically synthesized
acauaggcgacauacucgg

SEQ ID NO: 19007 - RNA, 19 nt, artificial
  Chemically synthesized
uggugguuggcgaugaucu

SEQ ID NO: 19008 - RNA, 19 nt, artificial
  Chemically synthesized
caacauaggcgacauacuc

SEQ ID NO: 19009 - RNA, 19 nt, artificial
  Chemically synthesized
uguuugaagcgcaacucga

SEQ ID NO: 19010 - RNA, 19 nt, artificial
  Chemically synthesized
uaccgaaccaaguaggaaa

SEQ ID NO: 19011 - RNA, 19 nt, artificial
  Chemically synthesized
uguggcaggcucucugauu

SEQ ID NO: 19012 - RNA, 19 nt, artificial
  Chemically synthesized
aaaugagauagauugcaug

SEQ ID NO: 19013 - RNA, 19 nt, artificial
  Chemically synthesized
acccauguaccgaaccaag

SEQ ID NO: 19014 - RNA, 19 nt, artificial
  Chemically synthesized
uggagguggcaucuguuug

SEQ ID NO: 19015 - RNA, 19 nt, artificial
  Chemically synthesized
cuugucuagguucuggacg

SEQ ID NO: 19016 - RNA, 19 nt, artificial
  Chemically synthesized
guuccugagguauuguuug

SEQ ID NO: 19017 - RNA, 19 nt, artificial
  Chemically synthesized
uagguucuggacguugaca

SEQ ID NO: 19018 - RNA, 19 nt, artificial
  Chemically synthesized
ucuuuggcaacauaggcga

SEQ ID NO: 19019 - RNA, 19 nt, artificial
  Chemically synthesized
guuggcgaugaucuguuug

SEQ ID NO: 19020 - RNA, 19 nt, artificial
  Chemically synthesized
ugauucacagggucuuugg

SEQ ID NO: 19021 - RNA, 19 nt, artificial
  Chemically synthesized
aucuucgaagggcuucaug

SEQ ID NO: 19022 - RNA, 19 nt, artificial
  Chemically synthesized
ggagggaucaucaaaaagc

SEQ ID NO: 19023 - RNA, 19 nt, artificial
  Chemically synthesized
ugguuggcgaugaucuguu

SEQ ID NO: 19024 - RNA, 19 nt, artificial
  Chemically synthesized
uccagcaaauuucagguua

SEQ ID NO: 19025 - RNA, 19 nt, artificial
  Chemically synthesized
uguagacacaguucgcugc

SEQ ID NO: 19026 - RNA, 19 nt, artificial
  Chemically synthesized
uagcugauaaggugacuga

SEQ ID NO: 19027 - RNA, 19 nt, artificial
  Chemically synthesized
ugauccuuaguccgaacca

SEQ ID NO: 19028 - RNA, 19 nt, artificial
  Chemically synthesized
agggucuuuggcaacauag

SEQ ID NO: 19029 - RNA, 19 nt, artificial
  Chemically synthesized
ucucugauucacagggucu

SEQ ID NO: 19030 - RNA, 19 nt, artificial
  Chemically synthesized
cugauucacagggucuuug

SEQ ID NO: 19031 - RNA, 19 nt, artificial
  Chemically synthesized
guucuggacguugacauag

SEQ ID NO: 19032 - RNA, 19 nt, artificial
  Chemically synthesized
gugauuguccaugugguag

SEQ ID NO: 19033 - RNA, 19 nt, artificial
  Chemically synthesized
ugaguccggguguugaagu

SEQ ID NO: 19034 - RNA, 19 nt, artificial
  Chemically synthesized
aagccucaugucuaccacc

SEQ ID NO: 19035 - RNA, 19 nt, artificial
  Chemically synthesized
uugacauaggagggaucau

SEQ ID NO: 19036 - RNA, 19 nt, artificial
  Chemically synthesized
acaacccauguaccgaacc

SEQ ID NO: 19037 - RNA, 19 nt, artificial
  Chemically synthesized
cauguaccgaaccaaguag

SEQ ID NO: 19038 - RNA, 19 nt, artificial
  Chemically synthesized
uguccuacaggcaauguag

SEQ ID NO: 19039 - RNA, 19 nt, artificial
  Chemically synthesized
guuugcggacuucuggauc

SEQ ID NO: 19040 - RNA, 19 nt, artificial
  Chemically synthesized
ucaaagccagccauccugu

SEQ ID NO: 19041 - RNA, 19 nt, artificial
  Chemically synthesized
ugagagugauuggcauucc

SEQ ID NO: 19042 - RNA, 19 nt, artificial
  Chemically synthesized
agucauuauaguacugaug

SEQ ID NO: 19043 - RNA, 19 nt, artificial
  Chemically synthesized
gugacugacacuuucaaag

SEQ ID NO: 19044 - RNA, 19 nt, artificial
  Chemically synthesized
agagugauuggcauuccag

SEQ ID NO: 19045 - RNA, 19 nt, artificial
  Chemically synthesized
aaaugcuuaggcugcccac

SEQ ID NO: 19046 - RNA, 19 nt, artificial
  Chemically synthesized
agguucuggacguugacau

SEQ ID NO: 19047 - RNA, 19 nt, artificial
  Chemically synthesized
uggguuccugagguauugu

SEQ ID NO: 19048 - RNA, 19 nt, artificial
  Chemically synthesized
ucaaagcggugauccuuag

SEQ ID NO: 19049 - RNA, 19 nt, artificial
  Chemically synthesized
aaugcuuaggcugcccacu

SEQ ID NO: 19050 - RNA, 19 nt, artificial
  Chemically synthesized
ugauaaggugacugacacu

SEQ ID NO: 19051 - RNA, 19 nt, artificial
  Chemically synthesized
ucgaagggcuucaugucaa

SEQ ID NO: 19052 - RNA, 19 nt, artificial
  Chemically synthesized
uuggcaacauaggcgacau

SEQ ID NO: 19053 - RNA, 19 nt, artificial
  Chemically synthesized
ugacacuuucaaagcggug

SEQ ID NO: 19054 - RNA, 19 nt, artificial
  Chemically synthesized
gacauaggagggaucauca

SEQ ID NO: 19055 - RNA, 19 nt, artificial
  Chemically synthesized
ccacucagcuuguucaugu

SEQ ID NO: 19056 - RNA, 19 nt, artificial
  Chemically synthesized
guggguuccugagguauug

SEQ ID NO: 19057 - RNA, 19 nt, artificial
  Chemically synthesized
caauguagcucccaagugg

SEQ ID NO: 19058 - RNA, 19 nt, artificial
  Chemically synthesized
uccugagguauuguuugaa

SEQ ID NO: 19059 - RNA, 19 nt, artificial
  Chemically synthesized
auaaggugacugacacuuu

SEQ ID NO: 19060 - RNA, 19 nt, artificial
  Chemically synthesized
ugaugggcaagugauuguc

SEQ ID NO: 19061 - RNA, 19 nt, artificial
  Chemically synthesized
ucugauucacagggucuuu

SEQ ID NO: 19062 - RNA, 19 nt, artificial
  Chemically synthesized
cuggacguugacauaggag

SEQ ID NO: 19063 - RNA, 19 nt, artificial
  Chemically synthesized
aagccagccauccugucau

SEQ ID NO: 19064 - RNA, 19 nt, artificial
  Chemically synthesized
ccuccacucagcuuguuca

SEQ ID NO: 19065 - RNA, 19 nt, artificial
  Chemically synthesized
aggagggaucaucaaaaag

SEQ ID NO: 19066 - RNA, 19 nt, artificial
  Chemically synthesized
ucuggacguugacauagga

SEQ ID NO: 19067 - RNA, 19 nt, artificial
  Chemically synthesized
agggaucaucaaaaagcuc

SEQ ID NO: 19068 - RNA, 19 nt, artificial
  Chemically synthesized
aaauuucagguuacuccuc

SEQ ID NO: 19069 - RNA, 19 nt, artificial
  Chemically synthesized
guugcuguagacacaguuc

SEQ ID NO: 19070 - RNA, 19 nt, artificial
  Chemically synthesized
guugacauaggagggauca

SEQ ID NO: 19071 - RNA, 19 nt, artificial
  Chemically synthesized
cuguuugcggacuucugga

SEQ ID NO: 19072 - RNA, 19 nt, artificial
  Chemically synthesized
ugacuuugucguugggaug

SEQ ID NO: 19073 - RNA, 19 nt, artificial
  Chemically synthesized
uccuacaggcaauguagcu

SEQ ID NO: 19074 - RNA, 19 nt, artificial
  Chemically synthesized
guauuguuugaagcgcaac

SEQ ID NO: 19075 - RNA, 19 nt, artificial
  Chemically synthesized
ugauggucagguggcucuu

SEQ ID NO: 19076 - RNA, 19 nt, artificial
  Chemically synthesized
caucuguuugcggacuucu

SEQ ID NO: 19077 - RNA, 19 nt, artificial
  Chemically synthesized
guagcaaaugcuuaggcug

SEQ ID NO: 19078 - RNA, 19 nt, artificial
  Chemically synthesized
cuguagacacaguucgcug

SEQ ID NO: 19079 - RNA, 19 nt, artificial
  Chemically synthesized
aacccauguaccgaaccaa

SEQ ID NO: 19080 - RNA, 19 nt, artificial
  Chemically synthesized
caagugauuguccaugugg

SEQ ID NO: 19081 - RNA, 19 nt, artificial
  Chemically synthesized
cuucgaagggcuucauguc

SEQ ID NO: 19082 - RNA, 19 nt, artificial
  Chemically synthesized
gauaaggugacugacacuu

SEQ ID NO: 19083 - RNA, 19 nt, artificial
  Chemically synthesized
caucaaagccagccauccu

SEQ ID NO: 19084 - RNA, 19 nt, artificial
  Chemically synthesized
ucacagggucuuuggcaac

SEQ ID NO: 19085 - RNA, 19 nt, artificial
  Chemically synthesized
gagugauuggcauuccagc

SEQ ID NO: 19086 - RNA, 19 nt, artificial
  Chemically synthesized
agugauuggcauuccagca

SEQ ID NO: 19087 - RNA, 19 nt, artificial
  Chemically synthesized
caaauuucagguuacuccu

SEQ ID NO: 19088 - RNA, 19 nt, artificial
  Chemically synthesized
caugugguagcugauaagg

SEQ ID NO: 19089 - RNA, 19 nt, artificial
  Chemically synthesized
gugcacugccauugauagc

SEQ ID NO: 19090 - RNA, 19 nt, artificial
  Chemically synthesized
ccggaugcaaaugagauag

SEQ ID NO: 19091 - RNA, 19 nt, artificial
  Chemically synthesized
ucagcuucccauggaacca

SEQ ID NO: 19092 - RNA, 19 nt, artificial
  Chemically synthesized
uaggagggaucaucaaaaa

SEQ ID NO: 19093 - RNA, 19 nt, artificial
  Chemically synthesized
auguggcaggcucucugau

SEQ ID NO: 19094 - RNA, 19 nt, artificial
  Chemically synthesized
aguuuggguggguuccuga

SEQ ID NO: 19095 - RNA, 19 nt, artificial
  Chemically synthesized
auuggcauuccagcaaauu

SEQ ID NO: 19096 - RNA, 19 nt, artificial
  Chemically synthesized
accuccacacaacccaugu

SEQ ID NO: 19097 - RNA, 19 nt, artificial
  Chemically synthesized
uguccaugugguagcugau

SEQ ID NO: 19098 - RNA, 19 nt, artificial
  Chemically synthesized
ccaugcugagccaucaaag

SEQ ID NO: 19099 - RNA, 19 nt, artificial
  Chemically synthesized
uggcaggcucucugauuca

SEQ ID NO: 19100 - RNA, 19 nt, artificial
  Chemically synthesized
agauagauugcauguggug

SEQ ID NO: 19101 - RNA, 19 nt, artificial
  Chemically synthesized
gugguuggcgaugaucugu

SEQ ID NO: 19102 - RNA, 19 nt, artificial
  Chemically synthesized
cccauguaccgaaccaagu

SEQ ID NO: 19103 - RNA, 19 nt, artificial
  Chemically synthesized
cauaggagggaucaucaaa

SEQ ID NO: 19104 - RNA, 19 nt, artificial
  Chemically synthesized
uccaugugguagcugauaa

SEQ ID NO: 19105 - RNA, 19 nt, artificial
  Chemically synthesized
agggcuuucuccuccuugu

SEQ ID NO: 19106 - RNA, 19 nt, artificial
  Chemically synthesized
agcugauaaggugacugac

SEQ ID NO: 19107 - RNA, 19 nt, artificial
  Chemically synthesized
acggugagagugauuggca

SEQ ID NO: 19108 - RNA, 19 nt, artificial
  Chemically synthesized
uguuugcggacuucuggau

SEQ ID NO: 19109 - RNA, 19 nt, artificial
  Chemically synthesized
uggccaauggugcugauga

SEQ ID NO: 19110 - RNA, 19 nt, artificial
  Chemically synthesized
aagucauuauaguacugau

SEQ ID NO: 19111 - RNA, 19 nt, artificial
  Chemically synthesized
caagccagugagcacauac

SEQ ID NO: 19112 - RNA, 19 nt, artificial
  Chemically synthesized
ggaucaucaaaaagcucuc

SEQ ID NO: 19113 - RNA, 19 nt, artificial
  Chemically synthesized
accgaaccaaguaggaaac

SEQ ID NO: 19114 - RNA, 19 nt, artificial
  Chemically synthesized
gucuagguucuggacguug

SEQ ID NO: 19115 - RNA, 19 nt, artificial
  Chemically synthesized
ggucuuuggcaacauaggc

SEQ ID NO: 19116 - RNA, 19 nt, artificial
  Chemically synthesized
gaugaugggcaagugauug

SEQ ID NO: 19117 - RNA, 19 nt, artificial
  Chemically synthesized
aauguggcaggcucucuga

SEQ ID NO: 19118 - RNA, 19 nt, artificial
  Chemically synthesized
acacaacccauguaccgaa

SEQ ID NO: 19119 - RNA, 19 nt, artificial
  Chemically synthesized
gaagucauuauaguacuga

SEQ ID NO: 19120 - RNA, 19 nt, artificial
  Chemically synthesized
augacuuugucguugggau

SEQ ID NO: 19121 - RNA, 19 nt, artificial
  Chemically synthesized
cauuauaguacugaugguc

SEQ ID NO: 19122 - RNA, 19 nt, artificial
  Chemically synthesized
ggcaacauaggcgacauac

SEQ ID NO: 19123 - RNA, 19 nt, artificial
  Chemically synthesized
gguuccugagguauuguuu

SEQ ID NO: 19124 - RNA, 19 nt, artificial
  Chemically synthesized
cucucugauucacaggguc

SEQ ID NO: 19125 - RNA, 19 nt, artificial
  Chemically synthesized
uggcaucuguuugcggacu

SEQ ID NO: 19126 - RNA, 19 nt, artificial
  Chemically synthesized
cgugggcuuauugacaaag

SEQ ID NO: 19127 - RNA, 19 nt, artificial
  Chemically synthesized
agaugaugggcaagugauu

SEQ ID NO: 19128 - RNA, 19 nt, artificial
  Chemically synthesized
gauccuuaguccgaaccac

SEQ ID NO: 19129 - RNA, 19 nt, artificial
  Chemically synthesized
uguaccgaaccaaguagga

SEQ ID NO: 19130 - RNA, 19 nt, artificial
  Chemically synthesized
cacacaacccauguaccga

SEQ ID NO: 19131 - RNA, 19 nt, artificial
  Chemically synthesized
ccauguaccgaaccaagua

SEQ ID NO: 19132 - RNA, 19 nt, artificial
  Chemically synthesized
agccagugagcacauacug

SEQ ID NO: 19133 - RNA, 19 nt, artificial
  Chemically synthesized
ccugagguauuguuugaag

SEQ ID NO: 19134 - RNA, 19 nt, artificial
  Chemically synthesized
agaauguggcaggcucucu

SEQ ID NO: 19135 - RNA, 19 nt, artificial
  Chemically synthesized
cuuugucguugggaugcag

SEQ ID NO: 19136 - RNA, 19 nt, artificial
  Chemically synthesized
aggcaauguagcucccaag

SEQ ID NO: 19137 - RNA, 19 nt, artificial
  Chemically synthesized
cgaagccucaugucuacca

SEQ ID NO: 19138 - RNA, 19 nt, artificial
  Chemically synthesized
agagaugaugggcaaguga

SEQ ID NO: 19139 - RNA, 19 nt, artificial
  Chemically synthesized
ucaucccaugcugagccau

SEQ ID NO: 19140 - RNA, 19 nt, artificial
  Chemically synthesized
ugggcuuauugacaaagcu

SEQ ID NO: 19141 - RNA, 19 nt, artificial
  Chemically synthesized
caugcugagccaucaaagc

SEQ ID NO: 19142 - RNA, 19 nt, artificial
  Chemically synthesized
ugaccaguuuggguggguu

SEQ ID NO: 19143 - RNA, 19 nt, artificial
  Chemically synthesized
gcugauaaggugacugaca

SEQ ID NO: 19144 - RNA, 19 nt, artificial
  Chemically synthesized
cacagguugcuguagacac

SEQ ID NO: 19145 - RNA, 19 nt, artificial
  Chemically synthesized
ugaugacauccugggcaag

SEQ ID NO: 19146 - RNA, 19 nt, artificial
  Chemically synthesized
gaugcaaaugagauagauu

SEQ ID NO: 19147 - RNA, 19 nt, artificial
  Chemically synthesized
gcuuauugacaaagcuccc

SEQ ID NO: 19148 - RNA, 19 nt, artificial
  Chemically synthesized
gggcaagugauuguccaug

SEQ ID NO: 19149 - RNA, 19 nt, artificial
  Chemically synthesized
cguugacauaggagggauc

SEQ ID NO: 19150 - RNA, 19 nt, artificial
  Chemically synthesized
acaggcaauguagcuccca

SEQ ID NO: 19151 - RNA, 19 nt, artificial
  Chemically synthesized
ccuacaggcaauguagcuc

SEQ ID NO: 19152 - RNA, 19 nt, artificial
  Chemically synthesized
caacccauguaccgaacca

SEQ ID NO: 19153 - RNA, 19 nt, artificial
  Chemically synthesized
caaagcggugauccuuagu

SEQ ID NO: 19154 - RNA, 19 nt, artificial
  Chemically synthesized
acauaggagggaucaucaa

SEQ ID NO: 19155 - RNA, 19 nt, artificial
  Chemically synthesized
aggcucucugauucacagg

SEQ ID NO: 19156 - RNA, 19 nt, artificial
  Chemically synthesized
ccagcaaauuucagguuac

SEQ ID NO: 19157 - RNA, 19 nt, artificial
  Chemically synthesized
ucccaugcugagccaucaa

SEQ ID NO: 19158 - RNA, 19 nt, artificial
  Chemically synthesized
cuccacucagcuuguucau

SEQ ID NO: 19159 - RNA, 19 nt, artificial
  Chemically synthesized
agugauuguccauguggua

SEQ ID NO: 19160 - RNA, 19 nt, artificial
  Chemically synthesized
cgaugaucuguuugcaguc

SEQ ID NO: 19161 - RNA, 19 nt, artificial
  Chemically synthesized
cucacacaccagacugaug

SEQ ID NO: 19162 - RNA, 19 nt, artificial
  Chemically synthesized
cacaacccauguaccgaac

SEQ ID NO: 19163 - RNA, 19 nt, artificial
  Chemically synthesized
gaagggcuucaugucaaac

SEQ ID NO: 19164 - RNA, 19 nt, artificial
  Chemically synthesized
ugccauugauagcaggauu

SEQ ID NO: 19165 - RNA, 19 nt, artificial
  Chemically synthesized
acagggcuuucuccuccuu

SEQ ID NO: 19166 - RNA, 19 nt, artificial
  Chemically synthesized
cugacacuuucaaagcggu

SEQ ID NO: 19167 - RNA, 19 nt, artificial
  Chemically synthesized
ugcaagccagugagcacau

SEQ ID NO: 19168 - RNA, 19 nt, artificial
  Chemically synthesized
ccauugauagcaggauugg

SEQ ID NO: 19169 - RNA, 19 nt, artificial
  Chemically synthesized
ugauuggcauuccagcaaa

SEQ ID NO: 19170 - RNA, 19 nt, artificial
  Chemically synthesized
cuagguucuggacguugac

SEQ ID NO: 19171 - RNA, 19 nt, artificial
  Chemically synthesized
ccaauggugcugaugacau

SEQ ID NO: 19172 - RNA, 19 nt, artificial
  Chemically synthesized
cucugauucacagggucuu

SEQ ID NO: 19173 - RNA, 19 nt, artificial
  Chemically synthesized
gggucuuuggcaacauagg

SEQ ID NO: 19174 - RNA, 19 nt, artificial
  Chemically synthesized
uggcaacauaggcgacaua

SEQ ID NO: 19175 - RNA, 19 nt, artificial
  Chemically synthesized
cuuucaaagcggugauccu

SEQ ID NO: 19176 - RNA, 19 nt, artificial
  Chemically synthesized
cagguugcuguagacacag

SEQ ID NO: 19177 - RNA, 19 nt, artificial
  Chemically synthesized
gggcuuauugacaaagcuc

SEQ ID NO: 19178 - RNA, 19 nt, artificial
  Chemically synthesized
agcaucuucgaagggcuuc

SEQ ID NO: 19179 - RNA, 19 nt, artificial
  Chemically synthesized
guccaugugguagcugaua

SEQ ID NO: 19180 - RNA, 19 nt, artificial
  Chemically synthesized
agauugcauguggugguug

SEQ ID NO: 19181 - RNA, 19 nt, artificial
  Chemically synthesized
acugccauugauagcagga

SEQ ID NO: 19182 - RNA, 19 nt, artificial
  Chemically synthesized
gugguagcugauaagguga

SEQ ID NO: 19183 - RNA, 19 nt, artificial
  Chemically synthesized
acguugacauaggagggau

SEQ ID NO: 19184 - RNA, 19 nt, artificial
  Chemically synthesized
cagcaaauuucagguuacu

SEQ ID NO: 19185 - RNA, 19 nt, artificial
  Chemically synthesized
acagguugcuguagacaca

SEQ ID NO: 19186 - RNA, 19 nt, artificial
  Chemically synthesized
gagaugaugggcaagugau

SEQ ID NO: 19187 - RNA, 19 nt, artificial
  Chemically synthesized
uccacagguugcuguagac

SEQ ID NO: 19188 - RNA, 19 nt, artificial
  Chemically synthesized
gcaacauaggcgacauacu

SEQ ID NO: 19189 - RNA, 19 nt, artificial
  Chemically synthesized
ugggcaagugauuguccau

SEQ ID NO: 19190 - RNA, 19 nt, artificial
  Chemically synthesized
cagagaugaugggcaagug

SEQ ID NO: 19191 - RNA, 19 nt, artificial
  Chemically synthesized
cuguccuacaggcaaugua

SEQ ID NO: 19192 - RNA, 19 nt, artificial
  Chemically synthesized
gcuucaugucaaacagguc

SEQ ID NO: 19193 - RNA, 19 nt, artificial
  Chemically synthesized
ucgggacacuccagaaugu

SEQ ID NO: 19194 - RNA, 19 nt, artificial
  Chemically synthesized
ccgaaccaaguaggaaacc

SEQ ID NO: 19195 - RNA, 19 nt, artificial
  Chemically synthesized
gugauuggcauuccagcaa

SEQ ID NO: 19196 - RNA, 19 nt, artificial
  Chemically synthesized
gcaggcucucugauucaca

SEQ ID NO: 19197 - RNA, 19 nt, artificial
  Chemically synthesized
agccaucaaagccagccau

SEQ ID NO: 19198 - RNA, 19 nt, artificial
  Chemically synthesized
gccauugauagcaggauug

SEQ ID NO: 19199 - RNA, 19 nt, artificial
  Chemically synthesized
aguuuccgcuccacagguu

SEQ ID NO: 19200 - RNA, 19 nt, artificial
  Chemically synthesized
gguugcuguagacacaguu

SEQ ID NO: 19201 - RNA, 19 nt, artificial
  Chemically synthesized
guccuacaggcaauguagc

SEQ ID NO: 19202 - RNA, 19 nt, artificial
  Chemically synthesized
caugacuuugucguuggga

SEQ ID NO: 19203 - RNA, 19 nt, artificial
  Chemically synthesized
cuuuggcaacauaggcgac

SEQ ID NO: 19204 - RNA, 19 nt, artificial
  Chemically synthesized
cuccacagguugcuguaga

SEQ ID NO: 19205 - RNA, 19 nt, artificial
  Chemically synthesized
guggagguggcaucuguuu

SEQ ID NO: 19206 - RNA, 19 nt, artificial
  Chemically synthesized
caggcucucugauucacag

SEQ ID NO: 19207 - RNA, 19 nt, artificial
  Chemically synthesized
gggaagucauuauaguacu

SEQ ID NO: 19208 - RNA, 19 nt, artificial
  Chemically synthesized
gcuguagacacaguucgcu

SEQ ID NO: 19209 - RNA, 19 nt, artificial
  Chemically synthesized
uggagacggugagagugau

SEQ ID NO: 19210 - RNA, 19 nt, artificial
  Chemically synthesized
ggucccaugacuuugucgu

SEQ ID NO: 19211 - RNA, 19 nt, artificial
  Chemically synthesized
aggugacugacacuuucaa

SEQ ID NO: 19212 - RNA, 19 nt, artificial
  Chemically synthesized
ccgggaagucauuauagua

SEQ ID NO: 19213 - RNA, 19 nt, artificial
  Chemically synthesized
ccacagguugcuguagaca

SEQ ID NO: 19214 - RNA, 19 nt, artificial
  Chemically synthesized
ugucuagguucuggacguu

SEQ ID NO: 19215 - RNA, 19 nt, artificial
  Chemically synthesized
ggguuccugagguauuguu

SEQ ID NO: 19216 - RNA, 19 nt, artificial
  Chemically synthesized
gguggguuccugagguauu

SEQ ID NO: 19217 - RNA, 19 nt, artificial
  Chemically synthesized
gccuugucuagguucugga

SEQ ID NO: 19218 - RNA, 19 nt, artificial
  Chemically synthesized
cuucgggacacuccagaau

SEQ ID NO: 19219 - RNA, 19 nt, artificial
  Chemically synthesized
ggugcacugccauugauag

SEQ ID NO: 19220 - RNA, 19 nt, artificial
  Chemically synthesized
caggcaauguagcucccaa

SEQ ID NO: 19221 - RNA, 19 nt, artificial
  Chemically synthesized
guaccgaaccaaguaggaa

SEQ ID NO: 19222 - RNA, 19 nt, artificial
  Chemically synthesized
caccaguagcaaaugcuua

SEQ ID NO: 19223 - RNA, 19 nt, artificial
  Chemically synthesized
gcgaugaucuguuugcagu

SEQ ID NO: 19224 - RNA, 19 nt, artificial
  Chemically synthesized
agagcaucuucgaagggcu

SEQ ID NO: 19225 - RNA, 19 nt, artificial
  Chemically synthesized
guuugaagcgcaacucgaa

SEQ ID NO: 19226 - RNA, 19 nt, artificial
  Chemically synthesized
ggcgaugaucuguuugcag

SEQ ID NO: 19227 - RNA, 19 nt, artificial
  Chemically synthesized
cacagggucuuuggcaaca

SEQ ID NO: 19228 - RNA, 19 nt, artificial
  Chemically synthesized
ggaagucauuauaguacug

SEQ ID NO: 19229 - RNA, 19 nt, artificial
  Chemically synthesized
acagggucuuuggcaacau

SEQ ID NO: 19230 - RNA, 19 nt, artificial
  Chemically synthesized
gagagugauuggcauucca

SEQ ID NO: 19231 - RNA, 19 nt, artificial
  Chemically synthesized
uguggugguuggcgaugau

SEQ ID NO: 19232 - RNA, 19 nt, artificial
  Chemically synthesized
cugaugacauccugggcaa

SEQ ID NO: 19233 - RNA, 19 nt, artificial
  Chemically synthesized
gguauuguuugaagcgcaa

SEQ ID NO: 19234 - RNA, 19 nt, artificial
  Chemically synthesized
acacuuucaaagcggugau

SEQ ID NO: 19235 - RNA, 19 nt, artificial
  Chemically synthesized
ccuccacacaacccaugua

SEQ ID NO: 19236 - RNA, 19 nt, artificial
  Chemically synthesized
cccaugcugagccaucaaa

SEQ ID NO: 19237 - RNA, 19 nt, artificial
  Chemically synthesized
gcauuccagcaaauuucag

SEQ ID NO: 19238 - RNA, 19 nt, artificial
  Chemically synthesized
cgaagagcaucuucgaagg

SEQ ID NO: 19239 - RNA, 19 nt, artificial
  Chemically synthesized
ccaugugguagcugauaag

SEQ ID NO: 19240 - RNA, 19 nt, artificial
  Chemically synthesized
cagggucuuuggcaacaua

SEQ ID NO: 19241 - RNA, 19 nt, artificial
  Chemically synthesized
gcaauguagcucccaagug

SEQ ID NO: 19242 - RNA, 19 nt, artificial
  Chemically synthesized
ccuugucuagguucuggac

SEQ ID NO: 19243 - RNA, 19 nt, artificial
  Chemically synthesized
cgccggaugcaaaugagau

SEQ ID NO: 19244 - RNA, 19 nt, artificial
  Chemically synthesized
cccgggaagucauuauagu

SEQ ID NO: 19245 - RNA, 19 nt, artificial
  Chemically synthesized
gggugcacugccauugaua

SEQ ID NO: 19246 - RNA, 19 nt, artificial
  Chemically synthesized
caauggugcugaugacauc

SEQ ID NO: 19247 - RNA, 19 nt, artificial
  Chemically synthesized
gcaucuucgaagggcuuca

SEQ ID NO: 19248 - RNA, 19 nt, artificial
  Chemically synthesized
ggcaagugauuguccaugu

SEQ ID NO: 19249 - RNA, 19 nt, artificial
  Chemically synthesized
gcagagaugaugggcaagu

SEQ ID NO: 19250 - RNA, 19 nt, artificial
  Chemically synthesized
ggugagagugauuggcauu

SEQ ID NO: 19251 - RNA, 19 nt, artificial
  Chemically synthesized
ggcuucaugucaaacaggu

SEQ ID NO: 19252 - RNA, 19 nt, artificial
  Chemically synthesized
ccucacacaccagacugau

SEQ ID NO: 19253 - RNA, 19 nt, artificial
  Chemically synthesized
gggcuucaugucaaacagg

SEQ ID NO: 19254 - RNA, 19 nt, artificial
  Chemically synthesized
gguucuggacguugacaua

SEQ ID NO: 19255 - RNA, 19 nt, artificial
  Chemically synthesized
ggugacugacacuuucaaa

SEQ ID NO: 19256 - RNA, 19 nt, artificial
  Chemically synthesized
ggcauuccagcaaauuuca

SEQ ID NO: 19257 - RNA, 19 nt, artificial
  Chemically synthesized
gcaagugauuguccaugug

SEQ ID NO: 19258 - RNA, 19 nt, artificial
  Chemically synthesized
ggguccaccaguagcaaau

SEQ ID NO: 19259 - RNA, 19 nt, artificial
  Chemically synthesized
ccaccaguagcaaaugcuu

SEQ ID NO: 19260 - RNA, 19 nt, artificial
  Chemically synthesized
ggugauccuuaguccgaac

SEQ ID NO: 19261 - RNA, 19 nt, artificial
  Chemically synthesized
gccggaugcaaaugagaua

SEQ ID NO: 19262 - RNA, 19 nt, artificial
  Chemically synthesized
gucccaugacuuugucguu

SEQ ID NO: 19263 - RNA, 19 nt, artificial
  Chemically synthesized
aggcuguccuacaggcaau

SEQ ID NO: 19264 - RNA, 19 nt, artificial
  Chemically synthesized
agguugcuguagacacagu

SEQ ID NO: 19265 - RNA, 19 nt, artificial
  Chemically synthesized
cgcgugggcuuauugacaa

SEQ ID NO: 19266 - RNA, 19 nt, artificial
  Chemically synthesized
gcaucuguuugcggacuuc

SEQ ID NO: 19267 - RNA, 19 nt, artificial
  Chemically synthesized
cggaugcaaaugagauaga

SEQ ID NO: 19268 - RNA, 19 nt, artificial
  Chemically synthesized
ggcaauguagcucccaagu

SEQ ID NO: 19269 - RNA, 19 nt, artificial
  Chemically synthesized
cugccauugauagcaggau

SEQ ID NO: 19270 - RNA, 19 nt, artificial
  Chemically synthesized
caucuucgaagggcuucau

SEQ ID NO: 19271 - RNA, 19 nt, artificial
  Chemically synthesized
aggguccaccaguagcaaa

SEQ ID NO: 19272 - RNA, 19 nt, artificial
  Chemically synthesized
cacuuucaaagcggugauc

SEQ ID NO: 19273 - RNA, 19 nt, artificial
  Chemically synthesized
cggugagagugauuggcau

SEQ ID NO: 19274 - RNA, 19 nt, artificial
  Chemically synthesized
cggugauccuuaguccgaa

SEQ ID NO: 19275 - RNA, 19 nt, artificial
  Chemically synthesized
gccaauggugcugaugaca

SEQ ID NO: 19276 - RNA, 19 nt, artificial
  Chemically synthesized
ggagacggugagagugauu

SEQ ID NO: 19277 - RNA, 19 nt, artificial
  Chemically synthesized
gcucucugauucacagggu

SEQ ID NO: 19278 - RNA, 19 nt, artificial
  Chemically synthesized
ccaugacuuugucguuggg

SEQ ID NO: 19279 - RNA, 19 nt, artificial
  Chemically synthesized
ggaugcaaaugagauagau

SEQ ID NO: 19280 - RNA, 19 nt, artificial
  Chemically synthesized
gguccaccaguagcaaaug

SEQ ID NO: 19281 - RNA, 19 nt, artificial
  Chemically synthesized
ggcaucuguuugcggacuu

SEQ ID NO: 19282 - RNA, 19 nt, artificial
  Chemically synthesized
gguagcugauaaggugacu

SEQ ID NO: 19283 - RNA, 19 nt, artificial
  Chemically synthesized
gcuguccuacaggcaaugu

SEQ ID NO: 19284 - RNA, 19 nt, artificial
  Chemically synthesized
cgaagggcuucaugucaaa

SEQ ID NO: 19285 - RNA, 19 nt, artificial
  Chemically synthesized
gacacuccagaauguggca

SEQ ID NO: 19286 - RNA, 19 nt, artificial
  Chemically synthesized
gcacugccauugauagcag

SEQ ID NO: 19287 - RNA, 19 nt, artificial
  Chemically synthesized
gauuggcauuccagcaaau

SEQ ID NO: 19288 - RNA, 19 nt, artificial
  Chemically synthesized
gguuggcgaugaucuguuu

SEQ ID NO: 19289 - RNA, 19 nt, artificial
  Chemically synthesized
gagcaucuucgaagggcuu

SEQ ID NO: 19290 - RNA, 19 nt, artificial
  Chemically synthesized
gcaagccagugagcacaua

SEQ ID NO: 19291 - RNA, 19 nt, artificial
  Chemically synthesized
gcgugggcuuauugacaaa

SEQ ID NO: 19292 - RNA, 19 nt, artificial
  Chemically synthesized
ccgaggugaucauuuuaaa

SEQ ID NO: 19293 - RNA, 19 nt, artificial
  Chemically synthesized
cccgaggugaucauuuuaa

SEQ ID NO: 19294 - RNA, 19 nt, artificial
  Chemically synthesized
cgugaccacaucuuuaaaa

SEQ ID NO: 19295 - RNA, 19 nt, artificial
  Chemically synthesized
cccuauaaaacauggcgaa

SEQ ID NO: 19296 - RNA, 19 nt, artificial
  Chemically synthesized
gugaccacaucuuuaaaau

SEQ ID NO: 19297 - RNA, 19 nt, artificial
  Chemically synthesized
gaaaaaacuuucaggcccu

SEQ ID NO: 19298 - RNA, 19 nt, artificial
  Chemically synthesized
cccuggagaaugacaacuu

SEQ ID NO: 19299 - RNA, 19 nt, artificial
  Chemically synthesized
cuauaaaacauggcgaaaa

SEQ ID NO: 19300 - RNA, 19 nt, artificial
  Chemically synthesized
ccgugaccacaucuuuaaa

SEQ ID NO: 19301 - RNA, 19 nt, artificial
  Chemically synthesized
accgugaccacaucuuuaa

SEQ ID NO: 19302 - RNA, 19 nt, artificial
  Chemically synthesized
cagaaagacagaauuucau

SEQ ID NO: 19303 - RNA, 19 nt, artificial
  Chemically synthesized
cggacacuggaaagaaaaa

SEQ ID NO: 19304 - RNA, 19 nt, artificial
  Chemically synthesized
cagugcuguuagaauaaaa

SEQ ID NO: 19305 - RNA, 19 nt, artificial
  Chemically synthesized
gcucauucacccaacaaaa

SEQ ID NO: 19306 - RNA, 19 nt, artificial
  Chemically synthesized
ucauuuuaaacuucgcuuc

SEQ ID NO: 19307 - RNA, 19 nt, artificial
  Chemically synthesized
gaggugaucauuuuaaacu

SEQ ID NO: 19308 - RNA, 19 nt, artificial
  Chemically synthesized
cgaggugaucauuuuaaac

SEQ ID NO: 19309 - RNA, 19 nt, artificial
  Chemically synthesized
gcggacacuggaaagaaaa

SEQ ID NO: 19310 - RNA, 19 nt, artificial
  Chemically synthesized
cgccacguaaugagucaaa

SEQ ID NO: 19311 - RNA, 19 nt, artificial
  Chemically synthesized
ccuucagaaagacagaauu

SEQ ID NO: 19312 - RNA, 19 nt, artificial
  Chemically synthesized
ccuauaaaacauggcgaaa

SEQ ID NO: 19313 - RNA, 19 nt, artificial
  Chemically synthesized
acagcaucuucacaaggac

SEQ ID NO: 19314 - RNA, 19 nt, artificial
  Chemically synthesized
cacagcaucuucacaagga

SEQ ID NO: 19315 - RNA, 19 nt, artificial
  Chemically synthesized
cccagugcuguuagaauaa

SEQ ID NO: 19316 - RNA, 19 nt, artificial
  Chemically synthesized
acccgaggugaucauuuua

SEQ ID NO: 19317 - RNA, 19 nt, artificial
  Chemically synthesized
aacccgaggugaucauuuu

SEQ ID NO: 19318 - RNA, 19 nt, artificial
  Chemically synthesized
gcccuggagaaugacaacu

SEQ ID NO: 19319 - RNA, 19 nt, artificial
  Chemically synthesized
acaccgugaccacaucuuu

SEQ ID NO: 19320 - RNA, 19 nt, artificial
  Chemically synthesized
gcaucuucacaaggaccaa

SEQ ID NO: 19321 - RNA, 19 nt, artificial
  Chemically synthesized
gaucacagcaucuucacaa

SEQ ID NO: 19322 - RNA, 19 nt, artificial
  Chemically synthesized
ggagcagaacuugagugug

SEQ ID NO: 19323 - RNA, 19 nt, artificial
  Chemically synthesized
ugaucauuuuaaacuucgc

SEQ ID NO: 19324 - RNA, 19 nt, artificial
  Chemically synthesized
gugaucauuuuaaacuucg

SEQ ID NO: 19325 - RNA, 19 nt, artificial
  Chemically synthesized
cuggaaagaaaaagaagaa

SEQ ID NO: 19326 - RNA, 19 nt, artificial
  Chemically synthesized
aggcccuggagaaugacaa

SEQ ID NO: 19327 - RNA, 19 nt, artificial
  Chemically synthesized
guacaagcuaccggaagug

SEQ ID NO: 19328 - RNA, 19 nt, artificial
  Chemically synthesized
caccgugaccacaucuuua

SEQ ID NO: 19329 - RNA, 19 nt, artificial
  Chemically synthesized
gaccaaaggaaaauaagau

SEQ ID NO: 19330 - RNA, 19 nt, artificial
  Chemically synthesized
cuguuagaauaaaaagccu

SEQ ID NO: 19331 - RNA, 19 nt, artificial
  Chemically synthesized
ucagaaagacagaauuuca

SEQ ID NO: 19332 - RNA, 19 nt, artificial
  Chemically synthesized
aggagcagaacuugagugu

SEQ ID NO: 19333 - RNA, 19 nt, artificial
  Chemically synthesized
ccacuuucuuugacagucc

SEQ ID NO: 19334 - RNA, 19 nt, artificial
  Chemically synthesized
ggaggagcagaacuugagu

SEQ ID NO: 19335 - RNA, 19 nt, artificial
  Chemically synthesized
acaagcuaccggaagugau

SEQ ID NO: 19336 - RNA, 19 nt, artificial
  Chemically synthesized
agaacaccgugaccacauc

SEQ ID NO: 19337 - RNA, 19 nt, artificial
  Chemically synthesized
caaggaccaaaggaaaaua

SEQ ID NO: 19338 - RNA, 19 nt, artificial
  Chemically synthesized
agcaucuucacaaggacca

SEQ ID NO: 19339 - RNA, 19 nt, artificial
  Chemically synthesized
ugucuuaucugccaggaaa

SEQ ID NO: 19340 - RNA, 19 nt, artificial
  Chemically synthesized
cuucagaaagacagaauuu

SEQ ID NO: 19341 - RNA, 19 nt, artificial
  Chemically synthesized
acacuggaaagaaaaagaa

SEQ ID NO: 19342 - RNA, 19 nt, artificial
  Chemically synthesized
gccacguaaugagucaaag

SEQ ID NO: 19343 - RNA, 19 nt, artificial
  Chemically synthesized
ggaaacgccacguaaugag

SEQ ID NO: 19344 - RNA, 19 nt, artificial
  Chemically synthesized
caaggaaacgccacguaau

SEQ ID NO: 19345 - RNA, 19 nt, artificial
  Chemically synthesized
ggaccaaaggaaaauaaga

SEQ ID NO: 19346 - RNA, 19 nt, artificial
  Chemically synthesized
acaaggaccaaaggaaaau

SEQ ID NO: 19347 - RNA, 19 nt, artificial
  Chemically synthesized
gugucuuaucugccaggaa

SEQ ID NO: 19348 - RNA, 19 nt, artificial
  Chemically synthesized
cacuuucuuugacagucca

SEQ ID NO: 19349 - RNA, 19 nt, artificial
  Chemically synthesized
acgaugcggacacuggaaa

SEQ ID NO: 19350 - RNA, 19 nt, artificial
  Chemically synthesized
augguggagaagaaaacuu

SEQ ID NO: 19351 - RNA, 19 nt, artificial
  Chemically synthesized
gcaguuucuuccgacaguu

SEQ ID NO: 19352 - RNA, 19 nt, artificial
  Chemically synthesized
caucuucacaaggaccaaa

SEQ ID NO: 19353 - RNA, 19 nt, artificial
  Chemically synthesized
uguuggaggagcagaacuu

SEQ ID NO: 19354 - RNA, 19 nt, artificial
  Chemically synthesized
ggacacuggaaagaaaaag

SEQ ID NO: 19355 - RNA, 19 nt, artificial
  Chemically synthesized
acgccacguaaugagucaa

SEQ ID NO: 19356 - RNA, 19 nt, artificial
  Chemically synthesized
aaggaccaaaggaaaauaa

SEQ ID NO: 19357 - RNA, 19 nt, artificial
  Chemically synthesized
ucaguuugaugacgaugcg

SEQ ID NO: 19358 - RNA, 19 nt, artificial
  Chemically synthesized
cguaaugagucaaagcugu

SEQ ID NO: 19359 - RNA, 19 nt, artificial
  Chemically synthesized
cacguaaugagucaaagcu

SEQ ID NO: 19360 - RNA, 19 nt, artificial
  Chemically synthesized
ucacaaggaccaaaggaaa

SEQ ID NO: 19361 - RNA, 19 nt, artificial
  Chemically synthesized
gccuuugugaucacagcau

SEQ ID NO: 19362 - RNA, 19 nt, artificial
  Chemically synthesized
gcaagagacugccucaguu

SEQ ID NO: 19363 - RNA, 19 nt, artificial
  Chemically synthesized
cacaaggaccaaaggaaaa

SEQ ID NO: 19364 - RNA, 19 nt, artificial
  Chemically synthesized
ccacguaaugagucaaagc

SEQ ID NO: 19365 - RNA, 19 nt, artificial
  Chemically synthesized
acagaauuucaucacccaa

SEQ ID NO: 19366 - RNA, 19 nt, artificial
  Chemically synthesized
gacacuggaaagaaaaaga

SEQ ID NO: 19367 - RNA, 19 nt, artificial
  Chemically synthesized
ggagaagaaaacuucgguu

SEQ ID NO: 19368 - RNA, 19 nt, artificial
  Chemically synthesized
ccaacaaaacugugucuua

SEQ ID NO: 19369 - RNA, 19 nt, artificial
  Chemically synthesized
ucgcuuccgaaaaaacuuu

SEQ ID NO: 19370 - RNA, 19 nt, artificial
  Chemically synthesized
aaacuucgcuuccgaaaaa

SEQ ID NO: 19371 - RNA, 19 nt, artificial
  Chemically synthesized
cgcgcagaaguacaagcua

SEQ ID NO: 19372 - RNA, 19 nt, artificial
  Chemically synthesized
acaucuuuaaaaugaccca

SEQ ID NO: 19373 - RNA, 19 nt, artificial
  Chemically synthesized
accacaucuuuaaaaugac

SEQ ID NO: 19374 - RNA, 19 nt, artificial
  Chemically synthesized
cccaacaaaacugugucuu

SEQ ID NO: 19375 - RNA, 19 nt, artificial
  Chemically synthesized
cgcucauucacccaacaaa

SEQ ID NO: 19376 - RNA, 19 nt, artificial
  Chemically synthesized
aaaacuuucaggcccuguu

SEQ ID NO: 19377 - RNA, 19 nt, artificial
  Chemically synthesized
cgaaaaaacuuucaggccc

SEQ ID NO: 19378 - RNA, 19 nt, artificial
  Chemically synthesized
gaaguacaagcuaccggaa

SEQ ID NO: 19379 - RNA, 19 nt, artificial
  Chemically synthesized
aacuucgcuuccgaaaaaa

SEQ ID NO: 19380 - RNA, 19 nt, artificial
  Chemically synthesized
agaaguacaagcuaccgga

SEQ ID NO: 19381 - RNA, 19 nt, artificial
  Chemically synthesized
ccacuaggaaccucggauu

SEQ ID NO: 19382 - RNA, 19 nt, artificial
  Chemically synthesized
acaagauuuacaccuccac

SEQ ID NO: 19383 - RNA, 19 nt, artificial
  Chemically synthesized
cacaagauuuacaccucca

SEQ ID NO: 19384 - RNA, 19 nt, artificial
  Chemically synthesized
ggcucccacaagauuuaca

SEQ ID NO: 19385 - RNA, 19 nt, artificial
  Chemically synthesized
ccacaucuuuaaaaugacc

SEQ ID NO: 19386 - RNA, 19 nt, artificial
  Chemically synthesized
cgcuuccgaaaaaacuuuc

SEQ ID NO: 19387 - RNA, 19 nt, artificial
  Chemically synthesized
gagacugccucaguuugau

SEQ ID NO: 19388 - RNA, 19 nt, artificial
  Chemically synthesized
caagagacugccucaguuu

SEQ ID NO: 19389 - RNA, 19 nt, artificial
  Chemically synthesized
uccaaggaaacgccacgua

SEQ ID NO: 19390 - RNA, 19 nt, artificial
  Chemically synthesized
gaccacaucuuuaaaauga

SEQ ID NO: 19391 - RNA, 19 nt, artificial
  Chemically synthesized
ccgcucauucacccaacaa

SEQ ID NO: 19392 - RNA, 19 nt, artificial
  Chemically synthesized
gacagaauuucaucaccca

SEQ ID NO: 19393 - RNA, 19 nt, artificial
  Chemically synthesized
gccuucagaaagacagaau

SEQ ID NO: 19394 - RNA, 19 nt, artificial
  Chemically synthesized
gaaaacccgaggugaucau

SEQ ID NO: 19395 - RNA, 19 nt, artificial
  Chemically synthesized
ggagaaugacaacuuccag

SEQ ID NO: 19396 - RNA, 19 nt, artificial
  Chemically synthesized
caaugguggagaagaaaac

SEQ ID NO: 19397 - RNA, 19 nt, artificial
  Chemically synthesized
gcgcagaaguacaagcuac

SEQ ID NO: 19398 - RNA, 19 nt, artificial
  Chemically synthesized
caacaaaacugugucuuau

SEQ ID NO: 19399 - RNA, 19 nt, artificial
  Chemically synthesized
gcuuccgaaaaaacuuuca

SEQ ID NO: 19400 - RNA, 19 nt, artificial
  Chemically synthesized
cccacaagauuuacaccuc

SEQ ID NO: 19401 - RNA, 19 nt, artificial
  Chemically synthesized
gcucccacaagauuuacac

SEQ ID NO: 19402 - RNA, 19 nt, artificial
  Chemically synthesized
gaaagacagaauuucauca

SEQ ID NO: 19403 - RNA, 19 nt, artificial
  Chemically synthesized
gccucaguuugaugacgau

SEQ ID NO: 19404 - RNA, 19 nt, artificial
  Chemically synthesized
gagaagaaaacuucgguuc

SEQ ID NO: 19405 - RNA, 19 nt, artificial
  Chemically synthesized
caguuguguugugccaaug

SEQ ID NO: 19406 - RNA, 19 nt, artificial
  Chemically synthesized
cgacaguuguguugugcca

SEQ ID NO: 19407 - RNA, 19 nt, artificial
  Chemically synthesized
gcagcaguuucuuccgaca

SEQ ID NO: 19408 - RNA, 19 nt, artificial
  Chemically synthesized
gcuuucuugucuccaagga

SEQ ID NO: 19409 - RNA, 19 nt, artificial
  Chemically synthesized
ccacaagauuuacaccucc

SEQ ID NO: 19410 - RNA, 19 nt, artificial
  Chemically synthesized
caucuuuaaaaugacccau

SEQ ID NO: 19411 - RNA, 19 nt, artificial
  Chemically synthesized
ugaccacaucuuuaaaaug

SEQ ID NO: 19412 - RNA, 19 nt, artificial
  Chemically synthesized
ccuuugugaucacagcauc

SEQ ID NO: 19413 - RNA, 19 nt, artificial
  Chemically synthesized
agacagaauuucaucaccc

SEQ ID NO: 19414 - RNA, 19 nt, artificial
  Chemically synthesized
ggccuucagaaagacagaa

SEQ ID NO: 19415 - RNA, 19 nt, artificial
  Chemically synthesized
ugaugacgaugcggacacu

SEQ ID NO: 19416 - RNA, 19 nt, artificial
  Chemically synthesized
uggagaagaaaacuucggu

SEQ ID NO: 19417 - RNA, 19 nt, artificial
  Chemically synthesized
uugugccaaugguggagaa

SEQ ID NO: 19418 - RNA, 19 nt, artificial
  Chemically synthesized
ccaaggaaacgccacguaa

SEQ ID NO: 19419 - RNA, 19 nt, artificial
  Chemically synthesized
ugaggccggaagugguuuu

SEQ ID NO: 19420 - RNA, 19 nt, artificial
  Chemically synthesized
acaaaacugugucuuaucu

SEQ ID NO: 19421 - RNA, 19 nt, artificial
  Chemically synthesized
cgcagaaguacaagcuacc

SEQ ID NO: 19422 - RNA, 19 nt, artificial
  Chemically synthesized
agauuucuuguaagaacac

SEQ ID NO: 19423 - RNA, 19 nt, artificial
  Chemically synthesized
ucacccaacaaaacugugu

SEQ ID NO: 19424 - RNA, 19 nt, artificial
  Chemically synthesized
cggccuucagaaagacaga

SEQ ID NO: 19425 - RNA, 19 nt, artificial
  Chemically synthesized
gccacuuucuuugacaguc

SEQ ID NO: 19426 - RNA, 19 nt, artificial
  Chemically synthesized
agaaugacaacuuccagga

SEQ ID NO: 19427 - RNA, 19 nt, artificial
  Chemically synthesized
agcaguuucuuccgacagu

SEQ ID NO: 19428 - RNA, 19 nt, artificial
  Chemically synthesized
acgcgcagaaguacaagcu

SEQ ID NO: 19429 - RNA, 19 nt, artificial
  Chemically synthesized
ggaagccagccacuuucuu

SEQ ID NO: 19430 - RNA, 19 nt, artificial
  Chemically synthesized
guggcucccacaagauuua

SEQ ID NO: 19431 - RNA, 19 nt, artificial
  Chemically synthesized
gcuguuagaauaaaaagcc

SEQ ID NO: 19432 - RNA, 19 nt, artificial
  Chemically synthesized
acccaacaaaacugugucu

SEQ ID NO: 19433 - RNA, 19 nt, artificial
  Chemically synthesized
ggugucugaaguggacugu

SEQ ID NO: 19434 - RNA, 19 nt, artificial
  Chemically synthesized
ggcugccuuugugaucaca

SEQ ID NO: 19435 - RNA, 19 nt, artificial
  Chemically synthesized
uggagaaugacaacuucca

SEQ ID NO: 19436 - RNA, 19 nt, artificial
  Chemically synthesized
cagccacuuucuuugacag

SEQ ID NO: 19437 - RNA, 19 nt, artificial
  Chemically synthesized
ccagccacuuucuuugaca

SEQ ID NO: 19438 - RNA, 19 nt, artificial
  Chemically synthesized
ucccacaagauuuacaccu

SEQ ID NO: 19439 - RNA, 19 nt, artificial
  Chemically synthesized
ggaguucagcuuucugcag

SEQ ID NO: 19440 - RNA, 19 nt, artificial
  Chemically synthesized
cacccaacaaaacuguguc

SEQ ID NO: 19441 - RNA, 19 nt, artificial
  Chemically synthesized
ugguggagaagaaaacuuc

SEQ ID NO: 19442 - RNA, 19 nt, artificial
  Chemically synthesized
gccaaugguggagaagaaa

SEQ ID NO: 19443 - RNA, 19 nt, artificial
  Chemically synthesized
ggaacugggaguucagcuu

SEQ ID NO: 19444 - RNA, 19 nt, artificial
  Chemically synthesized
gaagaaaacuucgguucgc

SEQ ID NO: 19445 - RNA, 19 nt, artificial
  Chemically synthesized
gggaguucagcuuucugca

SEQ ID NO: 19446 - RNA, 19 nt, artificial
  Chemically synthesized
ugccucaguuugaugacga

SEQ ID NO: 19447 - RNA, 19 nt, artificial
  Chemically synthesized
gccagccacuuucuuugac

SEQ ID NO: 19448 - RNA, 19 nt, artificial
  Chemically synthesized
gagaccaggugucugaagu

SEQ ID NO: 19449 - RNA, 19 nt, artificial
  Chemically synthesized
cguggcucccacaagauuu

SEQ ID NO: 19450 - RNA, 19 nt, artificial
  Chemically synthesized
gaguucagcuuucugcaga

SEQ ID NO: 19451 - RNA, 19 nt, artificial
  Chemically synthesized
gaacugggaguucagcuuu

SEQ ID NO: 19452 - RNA, 19 nt, artificial
  Chemically synthesized
gaagccagccacuuucuuu

SEQ ID NO: 19453 - RNA, 19 nt, artificial
  Chemically synthesized
ccaaugguggagaagaaaa

SEQ ID NO: 19454 - RNA, 19 nt, artificial
  Chemically synthesized
uuuaaaaugaucaccucgg

SEQ ID NO: 19455 - RNA, 19 nt, artificial
  Chemically synthesized
uuaaaaugaucaccucggg

SEQ ID NO: 19456 - RNA, 19 nt, artificial
  Chemically synthesized
uuuuaaagauguggucacg

SEQ ID NO: 19457 - RNA, 19 nt, artificial
  Chemically synthesized
uucgccauguuuuauaggg

SEQ ID NO: 19458 - RNA, 19 nt, artificial
  Chemically synthesized
auuuuaaagauguggucac

SEQ ID NO: 19459 - RNA, 19 nt, artificial
  Chemically synthesized
agggccugaaaguuuuuuc

SEQ ID NO: 19460 - RNA, 19 nt, artificial
  Chemically synthesized
aaguugucauucuccaggg

SEQ ID NO: 19461 - RNA, 19 nt, artificial
  Chemically synthesized
uuuucgccauguuuuauag

SEQ ID NO: 19462 - RNA, 19 nt, artificial
  Chemically synthesized
uuuaaagauguggucacgg

SEQ ID NO: 19463 - RNA, 19 nt, artificial
  Chemically synthesized
uuaaagauguggucacggu

SEQ ID NO: 19464 - RNA, 19 nt, artificial
  Chemically synthesized
augaaauucugucuuucug

SEQ ID NO: 19465 - RNA, 19 nt, artificial
  Chemically synthesized
uuuuucuuuccaguguccg

SEQ ID NO: 19466 - RNA, 19 nt, artificial
  Chemically synthesized
uuuuauucuaacagcacug

SEQ ID NO: 19467 - RNA, 19 nt, artificial
  Chemically synthesized
uuuuguugggugaaugagc

SEQ ID NO: 19468 - RNA, 19 nt, artificial
  Chemically synthesized
gaagcgaaguuuaaaauga

SEQ ID NO: 19469 - RNA, 19 nt, artificial
  Chemically synthesized
aguuuaaaaugaucaccuc

SEQ ID NO: 19470 - RNA, 19 nt, artificial
  Chemically synthesized
guuuaaaaugaucaccucg

SEQ ID NO: 19471 - RNA, 19 nt, artificial
  Chemically synthesized
uuuucuuuccaguguccgc

SEQ ID NO: 19472 - RNA, 19 nt, artificial
  Chemically synthesized
uuugacucauuacguggcg

SEQ ID NO: 19473 - RNA, 19 nt, artificial
  Chemically synthesized
aauucugucuuucugaagg

SEQ ID NO: 19474 - RNA, 19 nt, artificial
  Chemically synthesized
uuucgccauguuuuauagg

SEQ ID NO: 19475 - RNA, 19 nt, artificial
  Chemically synthesized
guccuugugaagaugcugu

SEQ ID NO: 19476 - RNA, 19 nt, artificial
  Chemically synthesized
uccuugugaagaugcugug

SEQ ID NO: 19477 - RNA, 19 nt, artificial
  Chemically synthesized
uuauucuaacagcacuggg

SEQ ID NO: 19478 - RNA, 19 nt, artificial
  Chemically synthesized
uaaaaugaucaccucgggu

SEQ ID NO: 19479 - RNA, 19 nt, artificial
  Chemically synthesized
aaaaugaucaccucggguu

SEQ ID NO: 19480 - RNA, 19 nt, artificial
  Chemically synthesized
aguugucauucuccagggc

SEQ ID NO: 19481 - RNA, 19 nt, artificial
  Chemically synthesized
aaagauguggucacggugu

SEQ ID NO: 19482 - RNA, 19 nt, artificial
  Chemically synthesized
uugguccuugugaagaugc

SEQ ID NO: 19483 - RNA, 19 nt, artificial
  Chemically synthesized
uugugaagaugcugugauc

SEQ ID NO: 19484 - RNA, 19 nt, artificial
  Chemically synthesized
cacacucaaguucugcucc

SEQ ID NO: 19485 - RNA, 19 nt, artificial
  Chemically synthesized
gcgaaguuuaaaaugauca

SEQ ID NO: 19486 - RNA, 19 nt, artificial
  Chemically synthesized
cgaaguuuaaaaugaucac

SEQ ID NO: 19487 - RNA, 19 nt, artificial
  Chemically synthesized
uucuucuuuuucuuuccag

SEQ ID NO: 19488 - RNA, 19 nt, artificial
  Chemically synthesized
uugucauucuccagggccu

SEQ ID NO: 19489 - RNA, 19 nt, artificial
  Chemically synthesized
cacuuccgguagcuuguac

SEQ ID NO: 19490 - RNA, 19 nt, artificial
  Chemically synthesized
uaaagauguggucacggug

SEQ ID NO: 19491 - RNA, 19 nt, artificial
  Chemically synthesized
aucuuauuuuccuuugguc

SEQ ID NO: 19492 - RNA, 19 nt, artificial
  Chemically synthesized
aggcuuuuuauucuaacag

SEQ ID NO: 19493 - RNA, 19 nt, artificial
  Chemically synthesized
ugaaauucugucuuucuga

SEQ ID NO: 19494 - RNA, 19 nt, artificial
  Chemically synthesized
acacucaaguucugcuccu

SEQ ID NO: 19495 - RNA, 19 nt, artificial
  Chemically synthesized
ggacugucaaagaaagugg

SEQ ID NO: 19496 - RNA, 19 nt, artificial
  Chemically synthesized
acucaaguucugcuccucc

SEQ ID NO: 19497 - RNA, 19 nt, artificial
  Chemically synthesized
aucacuuccgguagcuugu

SEQ ID NO: 19498 - RNA, 19 nt, artificial
  Chemically synthesized
gauguggucacgguguucu

SEQ ID NO: 19499 - RNA, 19 nt, artificial
  Chemically synthesized
uauuuuccuuugguccuug

SEQ ID NO: 19500 - RNA, 19 nt, artificial
  Chemically synthesized
ugguccuugugaagaugcu

SEQ ID NO: 19501 - RNA, 19 nt, artificial
  Chemically synthesized
uuuccuggcagauaagaca

SEQ ID NO: 19502 - RNA, 19 nt, artificial
  Chemically synthesized
aaauucugucuuucugaag

SEQ ID NO: 19503 - RNA, 19 nt, artificial
  Chemically synthesized
uucuuuuucuuuccagugu

SEQ ID NO: 19504 - RNA, 19 nt, artificial
  Chemically synthesized
cuuugacucauuacguggc

SEQ ID NO: 19505 - RNA, 19 nt, artificial
  Chemically synthesized
cucauuacguggcguuucc

SEQ ID NO: 19506 - RNA, 19 nt, artificial
  Chemically synthesized
auuacguggcguuuccuug

SEQ ID NO: 19507 - RNA, 19 nt, artificial
  Chemically synthesized
ucuuauuuuccuuuggucc

SEQ ID NO: 19508 - RNA, 19 nt, artificial
  Chemically synthesized
auuuuccuuugguccuugu

SEQ ID NO: 19509 - RNA, 19 nt, artificial
  Chemically synthesized
uuccuggcagauaagacac

SEQ ID NO: 19510 - RNA, 19 nt, artificial
  Chemically synthesized
uggacugucaaagaaagug

SEQ ID NO: 19511 - RNA, 19 nt, artificial
  Chemically synthesized
uuuccaguguccgcaucgu

SEQ ID NO: 19512 - RNA, 19 nt, artificial
  Chemically synthesized
aaguuuucuucuccaccau

SEQ ID NO: 19513 - RNA, 19 nt, artificial
  Chemically synthesized
aacugucggaagaaacugc

SEQ ID NO: 19514 - RNA, 19 nt, artificial
  Chemically synthesized
uuugguccuugugaagaug

SEQ ID NO: 19515 - RNA, 19 nt, artificial
  Chemically synthesized
aaguucugcuccuccaaca

SEQ ID NO: 19516 - RNA, 19 nt, artificial
  Chemically synthesized
cuuuuucuuuccagugucc

SEQ ID NO: 19517 - RNA, 19 nt, artificial
  Chemically synthesized
uugacucauuacguggcgu

SEQ ID NO: 19518 - RNA, 19 nt, artificial
  Chemically synthesized
uuauuuuccuuugguccuu

SEQ ID NO: 19519 - RNA, 19 nt, artificial
  Chemically synthesized
cgcaucgucaucaaacuga

SEQ ID NO: 19520 - RNA, 19 nt, artificial
  Chemically synthesized
acagcuuugacucauuacg

SEQ ID NO: 19521 - RNA, 19 nt, artificial
  Chemically synthesized
agcuuugacucauuacgug

SEQ ID NO: 19522 - RNA, 19 nt, artificial
  Chemically synthesized
uuuccuuugguccuuguga

SEQ ID NO: 19523 - RNA, 19 nt, artificial
  Chemically synthesized
augcugugaucacaaaggc

SEQ ID NO: 19524 - RNA, 19 nt, artificial
  Chemically synthesized
aacugaggcagucucuugc

SEQ ID NO: 19525 - RNA, 19 nt, artificial
  Chemically synthesized
uuuuccuuugguccuugug

SEQ ID NO: 19526 - RNA, 19 nt, artificial
  Chemically synthesized
gcuuugacucauuacgugg

SEQ ID NO: 19527 - RNA, 19 nt, artificial
  Chemically synthesized
uugggugaugaaauucugu

SEQ ID NO: 19528 - RNA, 19 nt, artificial
  Chemically synthesized
ucuuuuucuuuccaguguc

SEQ ID NO: 19529 - RNA, 19 nt, artificial
  Chemically synthesized
aaccgaaguuuucuucucc

SEQ ID NO: 19530 - RNA, 19 nt, artificial
  Chemically synthesized
uaagacacaguuuuguugg

SEQ ID NO: 19531 - RNA, 19 nt, artificial
  Chemically synthesized
aaaguuuuuucggaagcga

SEQ ID NO: 19532 - RNA, 19 nt, artificial
  Chemically synthesized
uuuuucggaagcgaaguuu

SEQ ID NO: 19533 - RNA, 19 nt, artificial
  Chemically synthesized
uagcuuguacuucugcgcg

SEQ ID NO: 19534 - RNA, 19 nt, artificial
  Chemically synthesized
ugggucauuuuaaagaugu

SEQ ID NO: 19535 - RNA, 19 nt, artificial
  Chemically synthesized
gucauuuuaaagauguggu

SEQ ID NO: 19536 - RNA, 19 nt, artificial
  Chemically synthesized
aagacacaguuuuguuggg

SEQ ID NO: 19537 - RNA, 19 nt, artificial
  Chemically synthesized
uuuguugggugaaugagcg

SEQ ID NO: 19538 - RNA, 19 nt, artificial
  Chemically synthesized
aacagggccugaaaguuuu

SEQ ID NO: 19539 - RNA, 19 nt, artificial
  Chemically synthesized
gggccugaaaguuuuuucg

SEQ ID NO: 19540 - RNA, 19 nt, artificial
  Chemically synthesized
uuccgguagcuuguacuuc

SEQ ID NO: 19541 - RNA, 19 nt, artificial
  Chemically synthesized
uuuuuucggaagcgaaguu

SEQ ID NO: 19542 - RNA, 19 nt, artificial
  Chemically synthesized
uccgguagcuuguacuucu

SEQ ID NO: 19543 - RNA, 19 nt, artificial
  Chemically synthesized
aauccgagguuccuagugg

SEQ ID NO: 19544 - RNA, 19 nt, artificial
  Chemically synthesized
guggagguguaaaucuugu

SEQ ID NO: 19545 - RNA, 19 nt, artificial
  Chemically synthesized
uggagguguaaaucuugug

SEQ ID NO: 19546 - RNA, 19 nt, artificial
  Chemically synthesized
uguaaaucuugugggagcc

SEQ ID NO: 19547 - RNA, 19 nt, artificial
  Chemically synthesized
ggucauuuuaaagaugugg

SEQ ID NO: 19548 - RNA, 19 nt, artificial
  Chemically synthesized
gaaaguuuuuucggaagcg

SEQ ID NO: 19549 - RNA, 19 nt, artificial
  Chemically synthesized
aucaaacugaggcagucuc

SEQ ID NO: 19550 - RNA, 19 nt, artificial
  Chemically synthesized
aaacugaggcagucucuug

SEQ ID NO: 19551 - RNA, 19 nt, artificial
  Chemically synthesized
uacguggcguuuccuugga

SEQ ID NO: 19552 - RNA, 19 nt, artificial
  Chemically synthesized
ucauuuuaaagaugugguc

SEQ ID NO: 19553 - RNA, 19 nt, artificial
  Chemically synthesized
uuguugggugaaugagcgg

SEQ ID NO: 19554 - RNA, 19 nt, artificial
  Chemically synthesized
ugggugaugaaauucuguc

SEQ ID NO: 19555 - RNA, 19 nt, artificial
  Chemically synthesized
auucugucuuucugaaggc

SEQ ID NO: 19556 - RNA, 19 nt, artificial
  Chemically synthesized
augaucaccucggguuuuc

SEQ ID NO: 19557 - RNA, 19 nt, artificial
  Chemically synthesized
cuggaaguugucauucucc

SEQ ID NO: 19558 - RNA, 19 nt, artificial
  Chemically synthesized
guuuucuucuccaccauug

SEQ ID NO: 19559 - RNA, 19 nt, artificial
  Chemically synthesized
guagcuuguacuucugcgc

SEQ ID NO: 19560 - RNA, 19 nt, artificial
  Chemically synthesized
auaagacacaguuuuguug

SEQ ID NO: 19561 - RNA, 19 nt, artificial
  Chemically synthesized
ugaaaguuuuuucggaagc

SEQ ID NO: 19562 - RNA, 19 nt, artificial
  Chemically synthesized
gagguguaaaucuuguggg

SEQ ID NO: 19563 - RNA, 19 nt, artificial
  Chemically synthesized
guguaaaucuugugggagc

SEQ ID NO: 19564 - RNA, 19 nt, artificial
  Chemically synthesized
ugaugaaauucugucuuuc

SEQ ID NO: 19565 - RNA, 19 nt, artificial
  Chemically synthesized
aucgucaucaaacugaggc

SEQ ID NO: 19566 - RNA, 19 nt, artificial
  Chemically synthesized
gaaccgaaguuuucuucuc

SEQ ID NO: 19567 - RNA, 19 nt, artificial
  Chemically synthesized
cauuggcacaacacaacug

SEQ ID NO: 19568 - RNA, 19 nt, artificial
  Chemically synthesized
uggcacaacacaacugucg

SEQ ID NO: 19569 - RNA, 19 nt, artificial
  Chemically synthesized
ugucggaagaaacugcugc

SEQ ID NO: 19570 - RNA, 19 nt, artificial
  Chemically synthesized
uccuuggagacaagaaagc

SEQ ID NO: 19571 - RNA, 19 nt, artificial
  Chemically synthesized
ggagguguaaaucuugugg

SEQ ID NO: 19572 - RNA, 19 nt, artificial
  Chemically synthesized
augggucauuuuaaagaug

SEQ ID NO: 19573 - RNA, 19 nt, artificial
  Chemically synthesized
cauuuuaaagaugugguca

SEQ ID NO: 19574 - RNA, 19 nt, artificial
  Chemically synthesized
gaugcugugaucacaaagg

SEQ ID NO: 19575 - RNA, 19 nt, artificial
  Chemically synthesized
gggugaugaaauucugucu

SEQ ID NO: 19576 - RNA, 19 nt, artificial
  Chemically synthesized
uucugucuuucugaaggcc

SEQ ID NO: 19577 - RNA, 19 nt, artificial
  Chemically synthesized
aguguccgcaucgucauca

SEQ ID NO: 19578 - RNA, 19 nt, artificial
  Chemically synthesized
accgaaguuuucuucucca

SEQ ID NO: 19579 - RNA, 19 nt, artificial
  Chemically synthesized
uucuccaccauuggcacaa

SEQ ID NO: 19580 - RNA, 19 nt, artificial
  Chemically synthesized
uuacguggcguuuccuugg

SEQ ID NO: 19581 - RNA, 19 nt, artificial
  Chemically synthesized
aaaaccacuuccggccuca

SEQ ID NO: 19582 - RNA, 19 nt, artificial
  Chemically synthesized
agauaagacacaguuuugu

SEQ ID NO: 19583 - RNA, 19 nt, artificial
  Chemically synthesized
gguagcuuguacuucugcg

SEQ ID NO: 19584 - RNA, 19 nt, artificial
  Chemically synthesized
guguucuuacaagaaaucu

SEQ ID NO: 19585 - RNA, 19 nt, artificial
  Chemically synthesized
acacaguuuuguuggguga

SEQ ID NO: 19586 - RNA, 19 nt, artificial
  Chemically synthesized
ucugucuuucugaaggccg

SEQ ID NO: 19587 - RNA, 19 nt, artificial
  Chemically synthesized
gacugucaaagaaaguggc

SEQ ID NO: 19588 - RNA, 19 nt, artificial
  Chemically synthesized
uccuggaaguugucauucu

SEQ ID NO: 19589 - RNA, 19 nt, artificial
  Chemically synthesized
acugucggaagaaacugcu

SEQ ID NO: 19590 - RNA, 19 nt, artificial
  Chemically synthesized
agcuuguacuucugcgcgu

SEQ ID NO: 19591 - RNA, 19 nt, artificial
  Chemically synthesized
aagaaaguggcuggcuucc

SEQ ID NO: 19592 - RNA, 19 nt, artificial
  Chemically synthesized
uaaaucuugugggagccac

SEQ ID NO: 19593 - RNA, 19 nt, artificial
  Chemically synthesized
ggcuuuuuauucuaacagc

SEQ ID NO: 19594 - RNA, 19 nt, artificial
  Chemically synthesized
agacacaguuuuguugggu

SEQ ID NO: 19595 - RNA, 19 nt, artificial
  Chemically synthesized
acaguccacuucagacacc

SEQ ID NO: 19596 - RNA, 19 nt, artificial
  Chemically synthesized
ugugaucacaaaggcagcc

SEQ ID NO: 19597 - RNA, 19 nt, artificial
  Chemically synthesized
uggaaguugucauucucca

SEQ ID NO: 19598 - RNA, 19 nt, artificial
  Chemically synthesized
cugucaaagaaaguggcug

SEQ ID NO: 19599 - RNA, 19 nt, artificial
  Chemically synthesized
ugucaaagaaaguggcugg

SEQ ID NO: 19600 - RNA, 19 nt, artificial
  Chemically synthesized
agguguaaaucuuguggga

SEQ ID NO: 19601 - RNA, 19 nt, artificial
  Chemically synthesized
cugcagaaagcugaacucc

SEQ ID NO: 19602 - RNA, 19 nt, artificial
  Chemically synthesized
gacacaguuuuguugggug

SEQ ID NO: 19603 - RNA, 19 nt, artificial
  Chemically synthesized
gaaguuuucuucuccacca

SEQ ID NO: 19604 - RNA, 19 nt, artificial
  Chemically synthesized
uuucuucuccaccauuggc

SEQ ID NO: 19605 - RNA, 19 nt, artificial
  Chemically synthesized
aagcugaacucccaguucc

SEQ ID NO: 19606 - RNA, 19 nt, artificial
  Chemically synthesized
gcgaaccgaaguuuucuuc

SEQ ID NO: 19607 - RNA, 19 nt, artificial
  Chemically synthesized
ugcagaaagcugaacuccc

SEQ ID NO: 19608 - RNA, 19 nt, artificial
  Chemically synthesized
ucgucaucaaacugaggca

SEQ ID NO: 19609 - RNA, 19 nt, artificial
  Chemically synthesized
gucaaagaaaguggcuggc

SEQ ID NO: 19610 - RNA, 19 nt, artificial
  Chemically synthesized
acuucagacaccuggucuc

SEQ ID NO: 19611 - RNA, 19 nt, artificial
  Chemically synthesized
aaaucuugugggagccacg

SEQ ID NO: 19612 - RNA, 19 nt, artificial
  Chemically synthesized
ucugcagaaagcugaacuc

SEQ ID NO: 19613 - RNA, 19 nt, artificial
  Chemically synthesized
aaagcugaacucccaguuc

SEQ ID NO: 19614 - RNA, 19 nt, artificial
  Chemically synthesized
aaagaaaguggcuggcuuc

SEQ ID NO: 19615 - RNA, 19 nt, artificial
  Chemically synthesized
uuuucuucuccaccauugg

SEQ ID NO: 19616 - RNA, 19 nt, artificial
  Chemically synthesized
ggaaagaaaaagaagaaaa

SEQ ID NO: 19617 - RNA, 19 nt, artificial
  Chemically synthesized
ugcggacacuggaaagaaa

SEQ ID NO: 19618 - RNA, 19 nt, artificial
  Chemically synthesized
gaaaaagaagaaaacccga

SEQ ID NO: 19619 - RNA, 19 nt, artificial
  Chemically synthesized
ugccaaugguggagaagaa

SEQ ID NO: 19620 - RNA, 19 nt, artificial
  Chemically synthesized
agugcuguuagaauaaaaa

SEQ ID NO: 19621 - RNA, 19 nt, artificial
  Chemically synthesized
gaagaaaacccgaggugau

SEQ ID NO: 19622 - RNA, 19 nt, artificial
  Chemically synthesized
uggaaagaaaaagaagaaa

SEQ ID NO: 19623 - RNA, 19 nt, artificial
  Chemically synthesized
aggagaccaggugucugaa

SEQ ID NO: 19624 - RNA, 19 nt, artificial
  Chemically synthesized
gaaagaaaaagaagaaaac

SEQ ID NO: 19625 - RNA, 19 nt, artificial
  Chemically synthesized
acuggaaagaaaaagaaga

SEQ ID NO: 19626 - RNA, 19 nt, artificial
  Chemically synthesized
ccagugcuguuagaauaaa

SEQ ID NO: 19627 - RNA, 19 nt, artificial
  Chemically synthesized
cuuucuugucuccaaggaa

SEQ ID NO: 19628 - RNA, 19 nt, artificial
  Chemically synthesized
agaacuugaguguggccga

SEQ ID NO: 19629 - RNA, 19 nt, artificial
  Chemically synthesized
gacaguuguguugugccaa

SEQ ID NO: 19630 - RNA, 19 nt, artificial
  Chemically synthesized
aggugaucauuuuaaacuu

SEQ ID NO: 19631 - RNA, 19 nt, artificial
  Chemically synthesized
caagcuaccggaagugaug

SEQ ID NO: 19632 - RNA, 19 nt, artificial
  Chemically synthesized
cagaauuucaucacccaau

SEQ ID NO: 19633 - RNA, 19 nt, artificial
  Chemically synthesized
cacuggaaagaaaaagaag

SEQ ID NO: 19634 - RNA, 19 nt, artificial
  Chemically synthesized
agaagaaaacccgagguga

SEQ ID NO: 19635 - RNA, 19 nt, artificial
  Chemically synthesized
uuucuugucuccaaggaaa

SEQ ID NO: 19636 - RNA, 19 nt, artificial
  Chemically synthesized
gaaugacaacuuccaggau

SEQ ID NO: 19637 - RNA, 19 nt, artificial
  Chemically synthesized
aaagcuuucuugucuccaa

SEQ ID NO: 19638 - RNA, 19 nt, artificial
  Chemically synthesized
aguacaagcuaccggaagu

SEQ ID NO: 19639 - RNA, 19 nt, artificial
  Chemically synthesized
caagauuuacaccuccaca

SEQ ID NO: 19640 - RNA, 19 nt, artificial
  Chemically synthesized
guaagaacaccgugaccac

SEQ ID NO: 19641 - RNA, 19 nt, artificial
  Chemically synthesized
augacaacuuccaggauga

SEQ ID NO: 19642 - RNA, 19 nt, artificial
  Chemically synthesized
ccuggagaaugacaacuuc

SEQ ID NO: 19643 - RNA, 19 nt, artificial
  Chemically synthesized
guguugugccaauggugga

SEQ ID NO: 19644 - RNA, 19 nt, artificial
  Chemically synthesized
gguggagaagaaaacuucg

SEQ ID NO: 19645 - RNA, 19 nt, artificial
  Chemically synthesized
gugcuguuagaauaaaaag

SEQ ID NO: 19646 - RNA, 19 nt, artificial
  Chemically synthesized
ucuuuaaaaugacccauuu

SEQ ID NO: 19647 - RNA, 19 nt, artificial
  Chemically synthesized
uuggaggagcagaacuuga

SEQ ID NO: 19648 - RNA, 19 nt, artificial
  Chemically synthesized
ucugaaguggacuguguga

SEQ ID NO: 19649 - RNA, 19 nt, artificial
  Chemically synthesized
aacugugucuuaucugcca

SEQ ID NO: 19650 - RNA, 19 nt, artificial
  Chemically synthesized
uaagaacaccgugaccaca

SEQ ID NO: 19651 - RNA, 19 nt, artificial
  Chemically synthesized
aagauuucuuguaagaaca

SEQ ID NO: 19652 - RNA, 19 nt, artificial
  Chemically synthesized
aggaccaaaggaaaauaag

SEQ ID NO: 19653 - RNA, 19 nt, artificial
  Chemically synthesized
gugccaaugguggagaaga

SEQ ID NO: 19654 - RNA, 19 nt, artificial
  Chemically synthesized
uuucguggcucccacaaga

SEQ ID NO: 19655 - RNA, 19 nt, artificial
  Chemically synthesized
acaguuguguugugccaau

SEQ ID NO: 19656 - RNA, 19 nt, artificial
  Chemically synthesized
uucacaaggaccaaaggaa

SEQ ID NO: 19657 - RNA, 19 nt, artificial
  Chemically synthesized
aauaagauuucuuguaaga

SEQ ID NO: 19658 - RNA, 19 nt, artificial
  Chemically synthesized
ccaaaggaaaauaagauuu

SEQ ID NO: 19659 - RNA, 19 nt, artificial
  Chemically synthesized
auuuacaccuccacacuga

SEQ ID NO: 19660 - RNA, 19 nt, artificial
  Chemically synthesized
aaaacauggcgaaaagcuu

SEQ ID NO: 19661 - RNA, 19 nt, artificial
  Chemically synthesized
guuugaugacgaugcggac

SEQ ID NO: 19662 - RNA, 19 nt, artificial
  Chemically synthesized
accaaaggaaaauaagauu

SEQ ID NO: 19663 - RNA, 19 nt, artificial
  Chemically synthesized
aagaacaccgugaccacau

SEQ ID NO: 19664 - RNA, 19 nt, artificial
  Chemically synthesized
gaaacgccacguaaugagu

SEQ ID NO: 19665 - RNA, 19 nt, artificial
  Chemically synthesized
uggaggagcagaacuugag

SEQ ID NO: 19666 - RNA, 19 nt, artificial
  Chemically synthesized
gaacaccgugaccacaucu

SEQ ID NO: 19667 - RNA, 19 nt, artificial
  Chemically synthesized
uaaacuucgcuuccgaaaa

SEQ ID NO: 19668 - RNA, 19 nt, artificial
  Chemically synthesized
uggcgaaaagcuuucuugu

SEQ ID NO: 19669 - RNA, 19 nt, artificial
  Chemically synthesized
uauaaaacauggcgaaaag

SEQ ID NO: 19670 - RNA, 19 nt, artificial
  Chemically synthesized
ggaaaauaagauuucuugu

SEQ ID NO: 19671 - RNA, 19 nt, artificial
  Chemically synthesized
aggaaacgccacguaauga

SEQ ID NO: 19672 - RNA, 19 nt, artificial
  Chemically synthesized
ucuuguaagaacaccguga

SEQ ID NO: 19673 - RNA, 19 nt, artificial
  Chemically synthesized
gucuuaucugccaggaaag

SEQ ID NO: 19674 - RNA, 19 nt, artificial
  Chemically synthesized
ugugaucacagcaucuuca

SEQ ID NO: 19675 - RNA, 19 nt, artificial
  Chemically synthesized
agagacugccucaguuuga

SEQ ID NO: 19676 - RNA, 19 nt, artificial
  Chemically synthesized
aaauaagauuucuuguaag

SEQ ID NO: 19677 - RNA, 19 nt, artificial
  Chemically synthesized
cuucacaaggaccaaagga

SEQ ID NO: 19678 - RNA, 19 nt, artificial
  Chemically synthesized
agccagccacuuucuuuga

SEQ ID NO: 19679 - RNA, 19 nt, artificial
  Chemically synthesized
cauuucguggcucccacaa

SEQ ID NO: 19680 - RNA, 19 nt, artificial
  Chemically synthesized
ucuuaucugccaggaaaga

SEQ ID NO: 19681 - RNA, 19 nt, artificial
  Chemically synthesized
augcggacacuggaaagaa

SEQ ID NO: 19682 - RNA, 19 nt, artificial
  Chemically synthesized
gaaaauaagauuucuugua

SEQ ID NO: 19683 - RNA, 19 nt, artificial
  Chemically synthesized
cuguuggaggagcagaacu

SEQ ID NO: 19684 - RNA, 19 nt, artificial
  Chemically synthesized
agaaaaagaagaaaacccg

SEQ ID NO: 19685 - RNA, 19 nt, artificial
  Chemically synthesized
auuucaucacccaaugcag

SEQ ID NO: 19686 - RNA, 19 nt, artificial
  Chemically synthesized
gagcagaacuugagugugg

SEQ ID NO: 19687 - RNA, 19 nt, artificial
  Chemically synthesized
ugaucacagcaucuucaca

SEQ ID NO: 19688 - RNA, 19 nt, artificial
  Chemically synthesized
accaggugucugaagugga

SEQ ID NO: 19689 - RNA, 19 nt, artificial
  Chemically synthesized
uuuaaacuucgcuuccgaa

SEQ ID NO: 19690 - RNA, 19 nt, artificial
  Chemically synthesized
cauucacccaacaaaacug

SEQ ID NO: 19691 - RNA, 19 nt, artificial
  Chemically synthesized
guuggaggagcagaacuug

SEQ ID NO: 19692 - RNA, 19 nt, artificial
  Chemically synthesized
aguuugaugacgaugcgga

SEQ ID NO: 19693 - RNA, 19 nt, artificial
  Chemically synthesized
gaugcggacacuggaaaga

SEQ ID NO: 19694 - RNA, 19 nt, artificial
  Chemically synthesized
gucugaaguggacugugug

SEQ ID NO: 19695 - RNA, 19 nt, artificial
  Chemically synthesized
cucauucacccaacaaaac

SEQ ID NO: 19696 - RNA, 19 nt, artificial
  Chemically synthesized
ggugaucauuuuaaacuuc

SEQ ID NO: 19697 - RNA, 19 nt, artificial
  Chemically synthesized
aaacauggcgaaaagcuuu

SEQ ID NO: 19698 - RNA, 19 nt, artificial
  Chemically synthesized
agaauuucaucacccaaug

SEQ ID NO: 19699 - RNA, 19 nt, artificial
  Chemically synthesized
gauuuacaccuccacacug

SEQ ID NO: 19700 - RNA, 19 nt, artificial
  Chemically synthesized
uaucugccaggaaagacca

SEQ ID NO: 19701 - RNA, 19 nt, artificial
  Chemically synthesized
acuuucaggcccuguugga

SEQ ID NO: 19702 - RNA, 19 nt, artificial
  Chemically synthesized
aaugguggagaagaaaacu

SEQ ID NO: 19703 - RNA, 19 nt, artificial
  Chemically synthesized
uacaagcuaccggaaguga

SEQ ID NO: 19704 - RNA, 19 nt, artificial
  Chemically synthesized
aucacagcaucuucacaag

SEQ ID NO: 19705 - RNA, 19 nt, artificial
  Chemically synthesized
gaucauuuuaaacuucgcu

SEQ ID NO: 19706 - RNA, 19 nt, artificial
  Chemically synthesized
aauuucaucacccaaugca

SEQ ID NO: 19707 - RNA, 19 nt, artificial
  Chemically synthesized
cuucgcuuccgaaaaaacu

SEQ ID NO: 19708 - RNA, 19 nt, artificial
  Chemically synthesized
uuuuaaacuucgcuuccga

SEQ ID NO: 19709 - RNA, 19 nt, artificial
  Chemically synthesized
guuguguugugccaauggu

SEQ ID NO: 19710 - RNA, 19 nt, artificial
  Chemically synthesized
ugucuccaaggaaacgcca

SEQ ID NO: 19711 - RNA, 19 nt, artificial
  Chemically synthesized
aaggaaacgccacguaaug

SEQ ID NO: 19712 - RNA, 19 nt, artificial
  Chemically synthesized
aaacccgaggugaucauuu

SEQ ID NO: 19713 - RNA, 19 nt, artificial
  Chemically synthesized
ugaaguggacugugugagc

SEQ ID NO: 19714 - RNA, 19 nt, artificial
  Chemically synthesized
aagcuuucuugucuccaag

SEQ ID NO: 19715 - RNA, 19 nt, artificial
  Chemically synthesized
aacaccgugaccacaucuu

SEQ ID NO: 19716 - RNA, 19 nt, artificial
  Chemically synthesized
cuuugugaucacagcaucu

SEQ ID NO: 19717 - RNA, 19 nt, artificial
  Chemically synthesized
uuaaacuucgcuuccgaaa

SEQ ID NO: 19718 - RNA, 19 nt, artificial
  Chemically synthesized
uuguguugugccaauggug

SEQ ID NO: 19719 - RNA, 19 nt, artificial
  Chemically synthesized
aaagaagaaaacccgaggu

SEQ ID NO: 19720 - RNA, 19 nt, artificial
  Chemically synthesized
gacugccucaguuugauga

SEQ ID NO: 19721 - RNA, 19 nt, artificial
  Chemically synthesized
ucguggcucccacaagauu

SEQ ID NO: 19722 - RNA, 19 nt, artificial
  Chemically synthesized
ucauucacccaacaaaacu

SEQ ID NO: 19723 - RNA, 19 nt, artificial
  Chemically synthesized
aggaaagaccagccucacu

SEQ ID NO: 19724 - RNA, 19 nt, artificial
  Chemically synthesized
aaaaagaagaaaacccgag

SEQ ID NO: 19725 - RNA, 19 nt, artificial
  Chemically synthesized
agauuuacaccuccacacu

SEQ ID NO: 19726 - RNA, 19 nt, artificial
  Chemically synthesized
cacuaggaaccucggauug

SEQ ID NO: 19727 - RNA, 19 nt, artificial
  Chemically synthesized
guuagaauaaaaagccucg

SEQ ID NO: 19728 - RNA, 19 nt, artificial
  Chemically synthesized
ugugucuuaucugccagga

SEQ ID NO: 19729 - RNA, 19 nt, artificial
  Chemically synthesized
ucuuugacaguccagccca

SEQ ID NO: 19730 - RNA, 19 nt, artificial
  Chemically synthesized
guugugccaaugguggaga

SEQ ID NO: 19731 - RNA, 19 nt, artificial
  Chemically synthesized
cauggcgaaaagcuuucuu

SEQ ID NO: 19732 - RNA, 19 nt, artificial
  Chemically synthesized
aaaagaagaaaacccgagg

SEQ ID NO: 19733 - RNA, 19 nt, artificial
  Chemically synthesized
aaggaaaauaagauuucuu

SEQ ID NO: 19734 - RNA, 19 nt, artificial
  Chemically synthesized
auaagauuucuuguaagaa

SEQ ID NO: 19735 - RNA, 19 nt, artificial
  Chemically synthesized
cagcaucuucacaaggacc

SEQ ID NO: 19736 - RNA, 19 nt, artificial
  Chemically synthesized
aaacuucgguucgcuccca

SEQ ID NO: 19737 - RNA, 19 nt, artificial
  Chemically synthesized
gaggagcagaacuugagug

SEQ ID NO: 19738 - RNA, 19 nt, artificial
  Chemically synthesized
aguuucuuccgacaguugu

SEQ ID NO: 19739 - RNA, 19 nt, artificial
  Chemically synthesized
guuucuuccgacaguugug

SEQ ID NO: 19740 - RNA, 19 nt, artificial
  Chemically synthesized
uuaaaaugacccauuucgu

SEQ ID NO: 19741 - RNA, 19 nt, artificial
  Chemically synthesized
aucuuuaaaaugacccauu

SEQ ID NO: 19742 - RNA, 19 nt, artificial
  Chemically synthesized
agaaaacccgaggugauca

SEQ ID NO: 19743 - RNA, 19 nt, artificial
  Chemically synthesized
gcgaaaagcuuucuugucu

SEQ ID NO: 19744 - RNA, 19 nt, artificial
  Chemically synthesized
cgaaaagcuuucuugucuc

SEQ ID NO: 19745 - RNA, 19 nt, artificial
  Chemically synthesized
ucuucacaaggaccaaagg

SEQ ID NO: 19746 - RNA, 19 nt, artificial
  Chemically synthesized
aggaaaauaagauuucuug

SEQ ID NO: 19747 - RNA, 19 nt, artificial
  Chemically synthesized
aaacuuucaggcccuguug

SEQ ID NO: 19748 - RNA, 19 nt, artificial
  Chemically synthesized
aaaacccgaggugaucauu

SEQ ID NO: 19749 - RNA, 19 nt, artificial
  Chemically synthesized
aguuguguugugccaaugg

SEQ ID NO: 19750 - RNA, 19 nt, artificial
  Chemically synthesized
gcagaaguacaagcuaccg

SEQ ID NO: 19751 - RNA, 19 nt, artificial
  Chemically synthesized
caguuucuuccgacaguug

SEQ ID NO: 19752 - RNA, 19 nt, artificial
  Chemically synthesized
guggagaagaaaacuucgg

SEQ ID NO: 19753 - RNA, 19 nt, artificial
  Chemically synthesized
aaaggaaaauaagauuucu

SEQ ID NO: 19754 - RNA, 19 nt, artificial
  Chemically synthesized
aaaaaacuuucaggcccug

SEQ ID NO: 19755 - RNA, 19 nt, artificial
  Chemically synthesized
aaagaaaaagaagaaaacc

SEQ ID NO: 19756 - RNA, 19 nt, artificial
  Chemically synthesized
aagagacugccucaguuug

SEQ ID NO: 19757 - RNA, 19 nt, artificial
  Chemically synthesized
cuuccgacaguuguguugu

SEQ ID NO: 19758 - RNA, 19 nt, artificial
  Chemically synthesized
uguugugccaaugguggag

SEQ ID NO: 19759 - RNA, 19 nt, artificial
  Chemically synthesized
aguucagcuuucugcagag

SEQ ID NO: 19760 - RNA, 19 nt, artificial
  Chemically synthesized
ugucugaaguggacugugu

SEQ ID NO: 19761 - RNA, 19 nt, artificial
  Chemically synthesized
ugccuuugugaucacagca

SEQ ID NO: 19762 - RNA, 19 nt, artificial
  Chemically synthesized
aagccagccacuuucuuug

SEQ ID NO: 19763 - RNA, 19 nt, artificial
  Chemically synthesized
aacgccacguaaugaguca

SEQ ID NO: 19764 - RNA, 19 nt, artificial
  Chemically synthesized
acuuucuuugacaguccag

SEQ ID NO: 19765 - RNA, 19 nt, artificial
  Chemically synthesized
ugacaacuuccaggaugac

SEQ ID NO: 19766 - RNA, 19 nt, artificial
  Chemically synthesized
gugaucacagcaucuucac

SEQ ID NO: 19767 - RNA, 19 nt, artificial
  Chemically synthesized
uuccgacaguuguguugug

SEQ ID NO: 19768 - RNA, 19 nt, artificial
  Chemically synthesized
aaaacugugucuuaucugc

SEQ ID NO: 19769 - RNA, 19 nt, artificial
  Chemically synthesized
acguaaugagucaaagcug

SEQ ID NO: 19770 - RNA, 19 nt, artificial
  Chemically synthesized
guaaugagucaaagcugug

SEQ ID NO: 19771 - RNA, 19 nt, artificial
  Chemically synthesized
uaagauuucuuguaagaac

SEQ ID NO: 19772 - RNA, 19 nt, artificial
  Chemically synthesized
caaaggaaaauaagauuuc

SEQ ID NO: 19773 - RNA, 19 nt, artificial
  Chemically synthesized
auucacccaacaaaacugu

SEQ ID NO: 19774 - RNA, 19 nt, artificial
  Chemically synthesized
aagaaaaagaagaaaaccc

SEQ ID NO: 19775 - RNA, 19 nt, artificial
  Chemically synthesized
cuuguaagaacaccgugac

SEQ ID NO: 19776 - RNA, 19 nt, artificial
  Chemically synthesized
aaguggacugugugagccu

SEQ ID NO: 19777 - RNA, 19 nt, artificial
  Chemically synthesized
uucuugucuccaaggaaac

SEQ ID NO: 19778 - RNA, 19 nt, artificial
  Chemically synthesized
uguuagaauaaaaagccuc

SEQ ID NO: 19779 - RNA, 19 nt, artificial
  Chemically synthesized
aggugucugaaguggacug

SEQ ID NO: 19780 - RNA, 19 nt, artificial
  Chemically synthesized
agaccaggugucugaagug

SEQ ID NO: 19781 - RNA, 19 nt, artificial
  Chemically synthesized
uuagaauaaaaagccucgu

SEQ ID NO: 19782 - RNA, 19 nt, artificial
  Chemically synthesized
uucgcuuccgaaaaaacuu

SEQ ID NO: 19783 - RNA, 19 nt, artificial
  Chemically synthesized
acuucgcuuccgaaaaaac

SEQ ID NO: 19784 - RNA, 19 nt, artificial
  Chemically synthesized
agacugccucaguuugaug

SEQ ID NO: 19785 - RNA, 19 nt, artificial
  Chemically synthesized
ugugccaaugguggagaag

SEQ ID NO: 19786 - RNA, 19 nt, artificial
  Chemically synthesized
uugugaucacagcaucuuc

SEQ ID NO: 19787 - RNA, 19 nt, artificial
  Chemically synthesized
cugccuuugugaucacagc

SEQ ID NO: 19788 - RNA, 19 nt, artificial
  Chemically synthesized
caggugucugaaguggacu

SEQ ID NO: 19789 - RNA, 19 nt, artificial
  Chemically synthesized
cauuuuaaacuucgcuucc

SEQ ID NO: 19790 - RNA, 19 nt, artificial
  Chemically synthesized
uguaagaacaccgugacca

SEQ ID NO: 19791 - RNA, 19 nt, artificial
  Chemically synthesized
gaauuucaucacccaaugc

SEQ ID NO: 19792 - RNA, 19 nt, artificial
  Chemically synthesized
aaguacaagcuaccggaag

SEQ ID NO: 19793 - RNA, 19 nt, artificial
  Chemically synthesized
agaaagacagaauuucauc

SEQ ID NO: 19794 - RNA, 19 nt, artificial
  Chemically synthesized
caguuugaugacgaugcgg

SEQ ID NO: 19795 - RNA, 19 nt, artificial
  Chemically synthesized
uaacuaccugacggccugu

SEQ ID NO: 19796 - RNA, 19 nt, artificial
  Chemically synthesized
cagcaguuucuuccgacag

SEQ ID NO: 19797 - RNA, 19 nt, artificial
  Chemically synthesized
aucauuuuaaacuucgcuu

SEQ ID NO: 19798 - RNA, 19 nt, artificial
  Chemically synthesized
aucuucacaaggaccaaag

SEQ ID NO: 19799 - RNA, 19 nt, artificial
  Chemically synthesized
agaagaaaacuucgguucg

SEQ ID NO: 19800 - RNA, 19 nt, artificial
  Chemically synthesized
gugucugaaguggacugug

SEQ ID NO: 19801 - RNA, 19 nt, artificial
  Chemically synthesized
uucguggcucccacaagau

SEQ ID NO: 19802 - RNA, 19 nt, artificial
  Chemically synthesized
acauggcgaaaagcuuucu

SEQ ID NO: 19803 - RNA, 19 nt, artificial
  Chemically synthesized
ggcgaaaagcuuucuuguc

SEQ ID NO: 19804 - RNA, 19 nt, artificial
  Chemically synthesized
cuuucuuugacaguccagc

SEQ ID NO: 19805 - RNA, 19 nt, artificial
  Chemically synthesized
aagaaaacuucgguucgcu

SEQ ID NO: 19806 - RNA, 19 nt, artificial
  Chemically synthesized
cugaaguggacugugugag

SEQ ID NO: 19807 - RNA, 19 nt, artificial
  Chemically synthesized
aagacagaauuucaucacc

SEQ ID NO: 19808 - RNA, 19 nt, artificial
  Chemically synthesized
uuuacaccuccacacugag

SEQ ID NO: 19809 - RNA, 19 nt, artificial
  Chemically synthesized
gagaaugacaacuuccagg

SEQ ID NO: 19810 - RNA, 19 nt, artificial
  Chemically synthesized
cuuccgaaaaaacuuucag

SEQ ID NO: 19811 - RNA, 19 nt, artificial
  Chemically synthesized
ugcuguuagaauaaaaagc

SEQ ID NO: 19812 - RNA, 19 nt, artificial
  Chemically synthesized
agccacuuucuuugacagu

SEQ ID NO: 19813 - RNA, 19 nt, artificial
  Chemically synthesized
aaugacaacuuccaggaug

SEQ ID NO: 19814 - RNA, 19 nt, artificial
  Chemically synthesized
ccgaaaaaacuuucaggcc

SEQ ID NO: 19815 - RNA, 19 nt, artificial
  Chemically synthesized
cagaaguacaagcuaccgg

SEQ ID NO: 19816 - RNA, 19 nt, artificial
  Chemically synthesized
aaagaccagccucacuccu

SEQ ID NO: 19817 - RNA, 19 nt, artificial
  Chemically synthesized
caaaacugugucuuaucug

SEQ ID NO: 19818 - RNA, 19 nt, artificial
  Chemically synthesized
agaaaacuucgguucgcuc

SEQ ID NO: 19819 - RNA, 19 nt, artificial
  Chemically synthesized
uguguugugccaauggugg

SEQ ID NO: 19820 - RNA, 19 nt, artificial
  Chemically synthesized
uggcucccacaagauuuac

SEQ ID NO: 19821 - RNA, 19 nt, artificial
  Chemically synthesized
uuucugcagagggccacua

SEQ ID NO: 19822 - RNA, 19 nt, artificial
  Chemically synthesized
uagaauaaaaagccucgug

SEQ ID NO: 19823 - RNA, 19 nt, artificial
  Chemically synthesized
gcugccuuugugaucacag

SEQ ID NO: 19824 - RNA, 19 nt, artificial
  Chemically synthesized
cuuuaaaaugacccauuuc

SEQ ID NO: 19825 - RNA, 19 nt, artificial
  Chemically synthesized
aagauuuacaccuccacac

SEQ ID NO: 19826 - RNA, 19 nt, artificial
  Chemically synthesized
aaaagcuuucuugucucca

SEQ ID NO: 19827 - RNA, 19 nt, artificial
  Chemically synthesized
gauuucuuguaagaacacc

SEQ ID NO: 19828 - RNA, 19 nt, artificial
  Chemically synthesized
aagcuaccggaagugaugg

SEQ ID NO: 19829 - RNA, 19 nt, artificial
  Chemically synthesized
agcagaacuugaguguggc

SEQ ID NO: 19830 - RNA, 19 nt, artificial
  Chemically synthesized
aagaagaaaacccgaggug

SEQ ID NO: 19831 - RNA, 19 nt, artificial
  Chemically synthesized
cugugucuuaucugccagg

SEQ ID NO: 19832 - RNA, 19 nt, artificial
  Chemically synthesized
aucugccaggaaagaccag

SEQ ID NO: 19833 - RNA, 19 nt, artificial
  Chemically synthesized
ucacagcaucuucacaagg

SEQ ID NO: 19834 - RNA, 19 nt, artificial
  Chemically synthesized
auggcgaaaagcuuucuug

SEQ ID NO: 19835 - RNA, 19 nt, artificial
  Chemically synthesized
cucccacaagauuuacacc

SEQ ID NO: 19836 - RNA, 19 nt, artificial
  Chemically synthesized
aacaaaacugugucuuauc

SEQ ID NO: 19837 - RNA, 19 nt, artificial
  Chemically synthesized
acugugucuuaucugccag

SEQ ID NO: 19838 - RNA, 19 nt, artificial
  Chemically synthesized
agaauaaaaagccucgugc

SEQ ID NO: 19839 - RNA, 19 nt, artificial
  Chemically synthesized
aaaaacuuucaggcccugu

SEQ ID NO: 19840 - RNA, 19 nt, artificial
  Chemically synthesized
cucaguuugaugacgaugc

SEQ ID NO: 19841 - RNA, 19 nt, artificial
  Chemically synthesized
uuguaagaacaccgugacc

SEQ ID NO: 19842 - RNA, 19 nt, artificial
  Chemically synthesized
agcuuucuugucuccaagg

SEQ ID NO: 19843 - RNA, 19 nt, artificial
  Chemically synthesized
uuugaugacgaugcggaca

SEQ ID NO: 19844 - RNA, 19 nt, artificial
  Chemically synthesized
aagaaaacccgaggugauc

SEQ ID NO: 19845 - RNA, 19 nt, artificial
  Chemically synthesized
acugggaguucagcuuucu

SEQ ID NO: 19846 - RNA, 19 nt, artificial
  Chemically synthesized
auuucguggcucccacaag

SEQ ID NO: 19847 - RNA, 19 nt, artificial
  Chemically synthesized
cugggaguucagcuuucug

SEQ ID NO: 19848 - RNA, 19 nt, artificial
  Chemically synthesized
uuucuuguaagaacaccgu

SEQ ID NO: 19849 - RNA, 19 nt, artificial
  Chemically synthesized
uaaaacauggcgaaaagcu

SEQ ID NO: 19850 - RNA, 19 nt, artificial
  Chemically synthesized
uugucuccaaggaaacgcc

SEQ ID NO: 19851 - RNA, 19 nt, artificial
  Chemically synthesized
ucuugucuccaaggaaacg

SEQ ID NO: 19852 - RNA, 19 nt, artificial
  Chemically synthesized
aaagacagaauuucaucac

SEQ ID NO: 19853 - RNA, 19 nt, artificial
  Chemically synthesized
gaaaagcuuucuugucucc

SEQ ID NO: 19854 - RNA, 19 nt, artificial
  Chemically synthesized
auuucuuguaagaacaccg

SEQ ID NO: 19855 - RNA, 19 nt, artificial
  Chemically synthesized
gaaaacuucgguucgcucc

SEQ ID NO: 19856 - RNA, 19 nt, artificial
  Chemically synthesized
auaaaacauggcgaaaagc

SEQ ID NO: 19857 - RNA, 19 nt, artificial
  Chemically synthesized
uucugugcugucuguggcu

SEQ ID NO: 19858 - RNA, 19 nt, artificial
  Chemically synthesized
uaaaaugacccauuucgug

SEQ ID NO: 19859 - RNA, 19 nt, artificial
  Chemically synthesized
ucacuccugggaacugucu

SEQ ID NO: 19860 - RNA, 19 nt, artificial
  Chemically synthesized
uuucaucacccaaugcagg

SEQ ID NO: 19861 - RNA, 19 nt, artificial
  Chemically synthesized
ucugugcugucuguggcuu

SEQ ID NO: 19862 - RNA, 19 nt, artificial
  Chemically synthesized
cacaucuuuaaaaugaccc

SEQ ID NO: 19863 - RNA, 19 nt, artificial
  Chemically synthesized
acugccucaguuugaugac

SEQ ID NO: 19864 - RNA, 19 nt, artificial
  Chemically synthesized
ccucaguuugaugacgaug

SEQ ID NO: 19865 - RNA, 19 nt, artificial
  Chemically synthesized
cuggagaaugacaacuucc

SEQ ID NO: 19866 - RNA, 19 nt, artificial
  Chemically synthesized
uucuuguaagaacaccgug

SEQ ID NO: 19867 - RNA, 19 nt, artificial
  Chemically synthesized
uuccgaaaaaacuuucagg

SEQ ID NO: 19868 - RNA, 19 nt, artificial
  Chemically synthesized
aaacugugucuuaucugcc

SEQ ID NO: 19869 - RNA, 19 nt, artificial
  Chemically synthesized
uuaucugccaggaaagacc

SEQ ID NO: 19870 - RNA, 19 nt, artificial
  Chemically synthesized
aacuuucaggcccuguugg

SEQ ID NO: 19871 - RNA, 19 nt, artificial
  Chemically synthesized
uuugugaucacagcaucuu

SEQ ID NO: 19872 - RNA, 19 nt, artificial
  Chemically synthesized
aaaacuucgguucgcuccc

SEQ ID NO: 19873 - RNA, 19 nt, artificial
  Chemically synthesized
uaaugagucaaagcugugg

SEQ ID NO: 19874 - RNA, 19 nt, artificial
  Chemically synthesized
acuaggaaccucggauugc

SEQ ID NO: 19875 - RNA, 19 nt, artificial
  Chemically synthesized
uccgacaguuguguugugc

SEQ ID NO: 19876 - RNA, 19 nt, artificial
  Chemically synthesized
aacugggaguucagcuuuc

SEQ ID NO: 19877 - RNA, 19 nt, artificial
  Chemically synthesized
uucagaaagacagaauuuc

SEQ ID NO: 19878 - RNA, 19 nt, artificial
  Chemically synthesized
cugccucaguuugaugacg

SEQ ID NO: 19879 - RNA, 19 nt, artificial
  Chemically synthesized
uccgaaaaaacuuucaggc

SEQ ID NO: 19880 - RNA, 19 nt, artificial
  Chemically synthesized
cuuaucugccaggaaagac

SEQ ID NO: 19881 - RNA, 19 nt, artificial
  Chemically synthesized
uucuuccgacaguuguguu

SEQ ID NO: 19882 - RNA, 19 nt, artificial
  Chemically synthesized
cuugucuccaaggaaacgc

SEQ ID NO: 19883 - RNA, 19 nt, artificial
  Chemically synthesized
acaacuuccaggaugaccc

SEQ ID NO: 19884 - RNA, 19 nt, artificial
  Chemically synthesized
ucuuccgacaguuguguug

SEQ ID NO: 19885 - RNA, 19 nt, artificial
  Chemically synthesized
uuucuuccgacaguugugu

SEQ ID NO: 19886 - RNA, 19 nt, artificial
  Chemically synthesized
aacauggcgaaaagcuuuc

SEQ ID NO: 19887 - RNA, 19 nt, artificial
  Chemically synthesized
ugggaguucagcuuucugc

SEQ ID NO: 19888 - RNA, 19 nt, artificial
  Chemically synthesized
aaugagucaaagcuguggc

SEQ ID NO: 19889 - RNA, 19 nt, artificial
  Chemically synthesized
uucacccaacaaaacugug

SEQ ID NO: 19890 - RNA, 19 nt, artificial
  Chemically synthesized
guucagcuuucugcagagg

SEQ ID NO: 19891 - RNA, 19 nt, artificial
  Chemically synthesized
gacaacuuccaggaugacc

SEQ ID NO: 19892 - RNA, 19 nt, artificial
  Chemically synthesized
aaugacccauuucguggcu

SEQ ID NO: 19893 - RNA, 19 nt, artificial
  Chemically synthesized
aaaugacccauuucguggc

SEQ ID NO: 19894 - RNA, 19 nt, artificial
  Chemically synthesized
aaacgccacguaaugaguc

SEQ ID NO: 19895 - RNA, 19 nt, artificial
  Chemically synthesized
uucaucacccaaugcaggg

SEQ ID NO: 19896 - RNA, 19 nt, artificial
  Chemically synthesized
uugaugacgaugcggacac

SEQ ID NO: 19897 - RNA, 19 nt, artificial
  Chemically synthesized
uuuaaaaugacccauuucg

SEQ ID NO: 19898 - RNA, 19 nt, artificial
  Chemically synthesized
aaaaugacccauuucgugg

SEQ ID NO: 19899 - RNA, 19 nt, artificial
  Chemically synthesized
uuucuuugacaguccagcc

SEQ ID NO: 19900 - RNA, 19 nt, artificial
  Chemically synthesized
auuuuaaacuucgcuuccg

SEQ ID NO: 19901 - RNA, 19 nt, artificial
  Chemically synthesized
uuacaccuccacacugagg

SEQ ID NO: 19902 - RNA, 19 nt, artificial
  Chemically synthesized
augagucaaagcuguggcg

SEQ ID NO: 19903 - RNA, 19 nt, artificial
  Chemically synthesized
uucuuugacaguccagccc

SEQ ID NO: 19904 - RNA, 19 nt, artificial
  Chemically synthesized
uucagcuuucugcagaggg

SEQ ID NO: 19905 - RNA, 19 nt, artificial
  Chemically synthesized
augacccauuucguggcuc

SEQ ID NO: 19906 - RNA, 19 nt, artificial
  Chemically synthesized
uuuucuucuuuuucuuucc

SEQ ID NO: 19907 - RNA, 19 nt, artificial
  Chemically synthesized
uuucuuuccaguguccgca

SEQ ID NO: 19908 - RNA, 19 nt, artificial
  Chemically synthesized
ucggguuuucuucuuuuuc

SEQ ID NO: 19909 - RNA, 19 nt, artificial
  Chemically synthesized
uucuucuccaccauuggca

SEQ ID NO: 19910 - RNA, 19 nt, artificial
  Chemically synthesized
uuuuuauucuaacagcacu

SEQ ID NO: 19911 - RNA, 19 nt, artificial
  Chemically synthesized
aucaccucggguuuucuuc

SEQ ID NO: 19912 - RNA, 19 nt, artificial
  Chemically synthesized
uuucuucuuuuucuuucca

SEQ ID NO: 19913 - RNA, 19 nt, artificial
  Chemically synthesized
uucagacaccuggucuccu

SEQ ID NO: 19914 - RNA, 19 nt, artificial
  Chemically synthesized
guuuucuucuuuuucuuuc

SEQ ID NO: 19915 - RNA, 19 nt, artificial
  Chemically synthesized
ucuucuuuuucuuuccagu

SEQ ID NO: 19916 - RNA, 19 nt, artificial
  Chemically synthesized
uuuauucuaacagcacugg

SEQ ID NO: 19917 - RNA, 19 nt, artificial
  Chemically synthesized
uuccuuggagacaagaaag

SEQ ID NO: 19918 - RNA, 19 nt, artificial
  Chemically synthesized
ucggccacacucaaguucu

SEQ ID NO: 19919 - RNA, 19 nt, artificial
  Chemically synthesized
uuggcacaacacaacuguc

SEQ ID NO: 19920 - RNA, 19 nt, artificial
  Chemically synthesized
aaguuuaaaaugaucaccu

SEQ ID NO: 19921 - RNA, 19 nt, artificial
  Chemically synthesized
caucacuuccgguagcuug

SEQ ID NO: 19922 - RNA, 19 nt, artificial
  Chemically synthesized
auugggugaugaaauucug

SEQ ID NO: 19923 - RNA, 19 nt, artificial
  Chemically synthesized
cuucuuuuucuuuccagug

SEQ ID NO: 19924 - RNA, 19 nt, artificial
  Chemically synthesized
ucaccucggguuuucuucu

SEQ ID NO: 19925 - RNA, 19 nt, artificial
  Chemically synthesized
uuuccuuggagacaagaaa

SEQ ID NO: 19926 - RNA, 19 nt, artificial
  Chemically synthesized
auccuggaaguugucauuc

SEQ ID NO: 19927 - RNA, 19 nt, artificial
  Chemically synthesized
uuggagacaagaaagcuuu

SEQ ID NO: 19928 - RNA, 19 nt, artificial
  Chemically synthesized
acuuccgguagcuuguacu

SEQ ID NO: 19929 - RNA, 19 nt, artificial
  Chemically synthesized
uguggagguguaaaucuug

SEQ ID NO: 19930 - RNA, 19 nt, artificial
  Chemically synthesized
guggucacgguguucuuac

SEQ ID NO: 19931 - RNA, 19 nt, artificial
  Chemically synthesized
ucauccuggaaguugucau

SEQ ID NO: 19932 - RNA, 19 nt, artificial
  Chemically synthesized
gaaguugucauucuccagg

SEQ ID NO: 19933 - RNA, 19 nt, artificial
  Chemically synthesized
uccaccauuggcacaacac

SEQ ID NO: 19934 - RNA, 19 nt, artificial
  Chemically synthesized
cgaaguuuucuucuccacc

SEQ ID NO: 19935 - RNA, 19 nt, artificial
  Chemically synthesized
cuuuuuauucuaacagcac

SEQ ID NO: 19936 - RNA, 19 nt, artificial
  Chemically synthesized
aaaugggucauuuuaaaga

SEQ ID NO: 19937 - RNA, 19 nt, artificial
  Chemically synthesized
ucaaguucugcuccuccaa

SEQ ID NO: 19938 - RNA, 19 nt, artificial
  Chemically synthesized
ucacacaguccacuucaga

SEQ ID NO: 19939 - RNA, 19 nt, artificial
  Chemically synthesized
uggcagauaagacacaguu

SEQ ID NO: 19940 - RNA, 19 nt, artificial
  Chemically synthesized
uguggucacgguguucuua

SEQ ID NO: 19941 - RNA, 19 nt, artificial
  Chemically synthesized
uguucuuacaagaaaucuu

SEQ ID NO: 19942 - RNA, 19 nt, artificial
  Chemically synthesized
cuuauuuuccuuugguccu

SEQ ID NO: 19943 - RNA, 19 nt, artificial
  Chemically synthesized
ucuucuccaccauuggcac

SEQ ID NO: 19944 - RNA, 19 nt, artificial
  Chemically synthesized
ucuugugggagccacgaaa

SEQ ID NO: 19945 - RNA, 19 nt, artificial
  Chemically synthesized
auuggcacaacacaacugu

SEQ ID NO: 19946 - RNA, 19 nt, artificial
  Chemically synthesized
uuccuuugguccuugugaa

SEQ ID NO: 19947 - RNA, 19 nt, artificial
  Chemically synthesized
ucuuacaagaaaucuuauu

SEQ ID NO: 19948 - RNA, 19 nt, artificial
  Chemically synthesized
aaaucuuauuuuccuuugg

SEQ ID NO: 19949 - RNA, 19 nt, artificial
  Chemically synthesized
ucaguguggagguguaaau

SEQ ID NO: 19950 - RNA, 19 nt, artificial
  Chemically synthesized
aagcuuuucgccauguuuu

SEQ ID NO: 19951 - RNA, 19 nt, artificial
  Chemically synthesized
guccgcaucgucaucaaac

SEQ ID NO: 19952 - RNA, 19 nt, artificial
  Chemically synthesized
aaucuuauuuuccuuuggu

SEQ ID NO: 19953 - RNA, 19 nt, artificial
  Chemically synthesized
auguggucacgguguucuu

SEQ ID NO: 19954 - RNA, 19 nt, artificial
  Chemically synthesized
acucauuacguggcguuuc

SEQ ID NO: 19955 - RNA, 19 nt, artificial
  Chemically synthesized
cucaaguucugcuccucca

SEQ ID NO: 19956 - RNA, 19 nt, artificial
  Chemically synthesized
agauguggucacgguguuc

SEQ ID NO: 19957 - RNA, 19 nt, artificial
  Chemically synthesized
uuuucggaagcgaaguuua

SEQ ID NO: 19958 - RNA, 19 nt, artificial
  Chemically synthesized
acaagaaagcuuuucgcca

SEQ ID NO: 19959 - RNA, 19 nt, artificial
  Chemically synthesized
cuuuucgccauguuuuaua

SEQ ID NO: 19960 - RNA, 19 nt, artificial
  Chemically synthesized
acaagaaaucuuauuuucc

SEQ ID NO: 19961 - RNA, 19 nt, artificial
  Chemically synthesized
ucauuacguggcguuuccu

SEQ ID NO: 19962 - RNA, 19 nt, artificial
  Chemically synthesized
ucacgguguucuuacaaga

SEQ ID NO: 19963 - RNA, 19 nt, artificial
  Chemically synthesized
cuuuccuggcagauaagac

SEQ ID NO: 19964 - RNA, 19 nt, artificial
  Chemically synthesized
ugaagaugcugugaucaca

SEQ ID NO: 19965 - RNA, 19 nt, artificial
  Chemically synthesized
ucaaacugaggcagucucu

SEQ ID NO: 19966 - RNA, 19 nt, artificial
  Chemically synthesized
cuuacaagaaaucuuauuu

SEQ ID NO: 19967 - RNA, 19 nt, artificial
  Chemically synthesized
uccuuugguccuugugaag

SEQ ID NO: 19968 - RNA, 19 nt, artificial
  Chemically synthesized
ucaaagaaaguggcuggcu

SEQ ID NO: 19969 - RNA, 19 nt, artificial
  Chemically synthesized
uugugggagccacgaaaug

SEQ ID NO: 19970 - RNA, 19 nt, artificial
  Chemically synthesized
ucuuuccuggcagauaaga

SEQ ID NO: 19971 - RNA, 19 nt, artificial
  Chemically synthesized
uucuuuccaguguccgcau

SEQ ID NO: 19972 - RNA, 19 nt, artificial
  Chemically synthesized
uacaagaaaucuuauuuuc

SEQ ID NO: 19973 - RNA, 19 nt, artificial
  Chemically synthesized
aguucugcuccuccaacag

SEQ ID NO: 19974 - RNA, 19 nt, artificial
  Chemically synthesized
cggguuuucuucuuuuucu

SEQ ID NO: 19975 - RNA, 19 nt, artificial
  Chemically synthesized
cugcauugggugaugaaau

SEQ ID NO: 19976 - RNA, 19 nt, artificial
  Chemically synthesized
ccacacucaaguucugcuc

SEQ ID NO: 19977 - RNA, 19 nt, artificial
  Chemically synthesized
ugugaagaugcugugauca

SEQ ID NO: 19978 - RNA, 19 nt, artificial
  Chemically synthesized
uccacuucagacaccuggu

SEQ ID NO: 19979 - RNA, 19 nt, artificial
  Chemically synthesized
uucggaagcgaaguuuaaa

SEQ ID NO: 19980 - RNA, 19 nt, artificial
  Chemically synthesized
caguuuuguugggugaaug

SEQ ID NO: 19981 - RNA, 19 nt, artificial
  Chemically synthesized
caaguucugcuccuccaac

SEQ ID NO: 19982 - RNA, 19 nt, artificial
  Chemically synthesized
uccgcaucgucaucaaacu

SEQ ID NO: 19983 - RNA, 19 nt, artificial
  Chemically synthesized
ucuuuccaguguccgcauc

SEQ ID NO: 19984 - RNA, 19 nt, artificial
  Chemically synthesized
cacacaguccacuucagac

SEQ ID NO: 19985 - RNA, 19 nt, artificial
  Chemically synthesized
guuuuguugggugaaugag

SEQ ID NO: 19986 - RNA, 19 nt, artificial
  Chemically synthesized
gaaguuuaaaaugaucacc

SEQ ID NO: 19987 - RNA, 19 nt, artificial
  Chemically synthesized
aaagcuuuucgccauguuu

SEQ ID NO: 19988 - RNA, 19 nt, artificial
  Chemically synthesized
cauugggugaugaaauucu

SEQ ID NO: 19989 - RNA, 19 nt, artificial
  Chemically synthesized
caguguggagguguaaauc

SEQ ID NO: 19990 - RNA, 19 nt, artificial
  Chemically synthesized
uggucuuuccuggcagaua

SEQ ID NO: 19991 - RNA, 19 nt, artificial
  Chemically synthesized
uccaacagggccugaaagu

SEQ ID NO: 19992 - RNA, 19 nt, artificial
  Chemically synthesized
aguuuucuucuccaccauu

SEQ ID NO: 19993 - RNA, 19 nt, artificial
  Chemically synthesized
ucacuuccgguagcuugua

SEQ ID NO: 19994 - RNA, 19 nt, artificial
  Chemically synthesized
cuugugaagaugcugugau

SEQ ID NO: 19995 - RNA, 19 nt, artificial
  Chemically synthesized
agcgaaguuuaaaaugauc

SEQ ID NO: 19996 - RNA, 19 nt, artificial
  Chemically synthesized
ugcauugggugaugaaauu

SEQ ID NO: 19997 - RNA, 19 nt, artificial
  Chemically synthesized
aguuuuuucggaagcgaag

SEQ ID NO: 19998 - RNA, 19 nt, artificial
  Chemically synthesized
ucggaagcgaaguuuaaaa

SEQ ID NO: 19999 - RNA, 19 nt, artificial
  Chemically synthesized
accauuggcacaacacaac

SEQ ID NO: 20000 - RNA, 19 nt, artificial
  Chemically synthesized
uggcguuuccuuggagaca

SEQ ID NO: 20001 - RNA, 19 nt, artificial
  Chemically synthesized
cauuacguggcguuuccuu

SEQ ID NO: 20002 - RNA, 19 nt, artificial
  Chemically synthesized
aaaugaucaccucggguuu

SEQ ID NO: 20003 - RNA, 19 nt, artificial
  Chemically synthesized
gcucacacaguccacuuca

SEQ ID NO: 20004 - RNA, 19 nt, artificial
  Chemically synthesized
cuuggagacaagaaagcuu

SEQ ID NO: 20005 - RNA, 19 nt, artificial
  Chemically synthesized
aagauguggucacgguguu

SEQ ID NO: 20006 - RNA, 19 nt, artificial
  Chemically synthesized
agaugcugugaucacaaag

SEQ ID NO: 20007 - RNA, 19 nt, artificial
  Chemically synthesized
uuucggaagcgaaguuuaa

SEQ ID NO: 20008 - RNA, 19 nt, artificial
  Chemically synthesized
caccauuggcacaacacaa

SEQ ID NO: 20009 - RNA, 19 nt, artificial
  Chemically synthesized
accucggguuuucuucuuu

SEQ ID NO: 20010 - RNA, 19 nt, artificial
  Chemically synthesized
ucaucaaacugaggcaguc

SEQ ID NO: 20011 - RNA, 19 nt, artificial
  Chemically synthesized
aaucuugugggagccacga

SEQ ID NO: 20012 - RNA, 19 nt, artificial
  Chemically synthesized
aguuuuguugggugaauga

SEQ ID NO: 20013 - RNA, 19 nt, artificial
  Chemically synthesized
agugaggcuggucuuuccu

SEQ ID NO: 20014 - RNA, 19 nt, artificial
  Chemically synthesized
cucggguuuucuucuuuuu

SEQ ID NO: 20015 - RNA, 19 nt, artificial
  Chemically synthesized
aguguggagguguaaaucu

SEQ ID NO: 20016 - RNA, 19 nt, artificial
  Chemically synthesized
caauccgagguuccuagug

SEQ ID NO: 20017 - RNA, 19 nt, artificial
  Chemically synthesized
cgaggcuuuuuauucuaac

SEQ ID NO: 20018 - RNA, 19 nt, artificial
  Chemically synthesized
uccuggcagauaagacaca

SEQ ID NO: 20019 - RNA, 19 nt, artificial
  Chemically synthesized
ugggcuggacugucaaaga

SEQ ID NO: 20020 - RNA, 19 nt, artificial
  Chemically synthesized
ucuccaccauuggcacaac

SEQ ID NO: 20021 - RNA, 19 nt, artificial
  Chemically synthesized
aagaaagcuuuucgccaug

SEQ ID NO: 20022 - RNA, 19 nt, artificial
  Chemically synthesized
ccucggguuuucuucuuuu

SEQ ID NO: 20023 - RNA, 19 nt, artificial
  Chemically synthesized
aagaaaucuuauuuuccuu

SEQ ID NO: 20024 - RNA, 19 nt, artificial
  Chemically synthesized
uucuuacaagaaaucuuau

SEQ ID NO: 20025 - RNA, 19 nt, artificial
  Chemically synthesized
gguccuugugaagaugcug

SEQ ID NO: 20026 - RNA, 19 nt, artificial
  Chemically synthesized
ugggagcgaaccgaaguuu

SEQ ID NO: 20027 - RNA, 19 nt, artificial
  Chemically synthesized
cacucaaguucugcuccuc

SEQ ID NO: 20028 - RNA, 19 nt, artificial
  Chemically synthesized
acaacugucggaagaaacu

SEQ ID NO: 20029 - RNA, 19 nt, artificial
  Chemically synthesized
cacaacugucggaagaaac

SEQ ID NO: 20030 - RNA, 19 nt, artificial
  Chemically synthesized
acgaaaugggucauuuuaa

SEQ ID NO: 20031 - RNA, 19 nt, artificial
  Chemically synthesized
aaugggucauuuuaaagau

SEQ ID NO: 20032 - RNA, 19 nt, artificial
  Chemically synthesized
ugaucaccucggguuuucu

SEQ ID NO: 20033 - RNA, 19 nt, artificial
  Chemically synthesized
agacaagaaagcuuuucgc

SEQ ID NO: 20034 - RNA, 19 nt, artificial
  Chemically synthesized
gagacaagaaagcuuuucg

SEQ ID NO: 20035 - RNA, 19 nt, artificial
  Chemically synthesized
ccuuugguccuugugaaga

SEQ ID NO: 20036 - RNA, 19 nt, artificial
  Chemically synthesized
caagaaaucuuauuuuccu

SEQ ID NO: 20037 - RNA, 19 nt, artificial
  Chemically synthesized
caacagggccugaaaguuu

SEQ ID NO: 20038 - RNA, 19 nt, artificial
  Chemically synthesized
aaugaucaccucggguuuu

SEQ ID NO: 20039 - RNA, 19 nt, artificial
  Chemically synthesized
ccauuggcacaacacaacu

SEQ ID NO: 20040 - RNA, 19 nt, artificial
  Chemically synthesized
cgguagcuuguacuucugc

SEQ ID NO: 20041 - RNA, 19 nt, artificial
  Chemically synthesized
caacugucggaagaaacug

SEQ ID NO: 20042 - RNA, 19 nt, artificial
  Chemically synthesized
ccgaaguuuucuucuccac

SEQ ID NO: 20043 - RNA, 19 nt, artificial
  Chemically synthesized
agaaaucuuauuuuccuuu

SEQ ID NO: 20044 - RNA, 19 nt, artificial
  Chemically synthesized
cagggccugaaaguuuuuu

SEQ ID NO: 20045 - RNA, 19 nt, artificial
  Chemically synthesized
gguuuucuucuuuuucuuu

SEQ ID NO: 20046 - RNA, 19 nt, artificial
  Chemically synthesized
caaacugaggcagucucuu

SEQ ID NO: 20047 - RNA, 19 nt, artificial
  Chemically synthesized
acaacacaacugucggaag

SEQ ID NO: 20048 - RNA, 19 nt, artificial
  Chemically synthesized
cuccaccauuggcacaaca

SEQ ID NO: 20049 - RNA, 19 nt, artificial
  Chemically synthesized
cucugcagaaagcugaacu

SEQ ID NO: 20050 - RNA, 19 nt, artificial
  Chemically synthesized
acacaguccacuucagaca

SEQ ID NO: 20051 - RNA, 19 nt, artificial
  Chemically synthesized
ugcugugaucacaaaggca

SEQ ID NO: 20052 - RNA, 19 nt, artificial
  Chemically synthesized
caaagaaaguggcuggcuu

SEQ ID NO: 20053 - RNA, 19 nt, artificial
  Chemically synthesized
ugacucauuacguggcguu

SEQ ID NO: 20054 - RNA, 19 nt, artificial
  Chemically synthesized
cuggacugucaaagaaagu

SEQ ID NO: 20055 - RNA, 19 nt, artificial
  Chemically synthesized
gucauccuggaaguuguca

SEQ ID NO: 20056 - RNA, 19 nt, artificial
  Chemically synthesized
gugaagaugcugugaucac

SEQ ID NO: 20057 - RNA, 19 nt, artificial
  Chemically synthesized
cacaacacaacugucggaa

SEQ ID NO: 20058 - RNA, 19 nt, artificial
  Chemically synthesized
gcagauaagacacaguuuu

SEQ ID NO: 20059 - RNA, 19 nt, artificial
  Chemically synthesized
cagcuuugacucauuacgu

SEQ ID NO: 20060 - RNA, 19 nt, artificial
  Chemically synthesized
cacagcuuugacucauuac

SEQ ID NO: 20061 - RNA, 19 nt, artificial
  Chemically synthesized
guucuuacaagaaaucuua

SEQ ID NO: 20062 - RNA, 19 nt, artificial
  Chemically synthesized
gaaaucuuauuuuccuuug

SEQ ID NO: 20063 - RNA, 19 nt, artificial
  Chemically synthesized
acaguuuuguugggugaau

SEQ ID NO: 20064 - RNA, 19 nt, artificial
  Chemically synthesized
ggguuuucuucuuuuucuu

SEQ ID NO: 20065 - RNA, 19 nt, artificial
  Chemically synthesized
gucacgguguucuuacaag

SEQ ID NO: 20066 - RNA, 19 nt, artificial
  Chemically synthesized
aggcucacacaguccacuu

SEQ ID NO: 20067 - RNA, 19 nt, artificial
  Chemically synthesized
guuuccuuggagacaagaa

SEQ ID NO: 20068 - RNA, 19 nt, artificial
  Chemically synthesized
gaggcuuuuuauucuaaca

SEQ ID NO: 20069 - RNA, 19 nt, artificial
  Chemically synthesized
caguccacuucagacaccu

SEQ ID NO: 20070 - RNA, 19 nt, artificial
  Chemically synthesized
cacuucagacaccuggucu

SEQ ID NO: 20071 - RNA, 19 nt, artificial
  Chemically synthesized
acgaggcuuuuuauucuaa

SEQ ID NO: 20072 - RNA, 19 nt, artificial
  Chemically synthesized
aaguuuuuucggaagcgaa

SEQ ID NO: 20073 - RNA, 19 nt, artificial
  Chemically synthesized
guuuuuucggaagcgaagu

SEQ ID NO: 20074 - RNA, 19 nt, artificial
  Chemically synthesized
caucaaacugaggcagucu

SEQ ID NO: 20075 - RNA, 19 nt, artificial
  Chemically synthesized
cuucuccaccauuggcaca

SEQ ID NO: 20076 - RNA, 19 nt, artificial
  Chemically synthesized
gaagaugcugugaucacaa

SEQ ID NO: 20077 - RNA, 19 nt, artificial
  Chemically synthesized
gcugugaucacaaaggcag

SEQ ID NO: 20078 - RNA, 19 nt, artificial
  Chemically synthesized
aguccacuucagacaccug

SEQ ID NO: 20079 - RNA, 19 nt, artificial
  Chemically synthesized
ggaagcgaaguuuaaaaug

SEQ ID NO: 20080 - RNA, 19 nt, artificial
  Chemically synthesized
uggucacgguguucuuaca

SEQ ID NO: 20081 - RNA, 19 nt, artificial
  Chemically synthesized
gcauugggugaugaaauuc

SEQ ID NO: 20082 - RNA, 19 nt, artificial
  Chemically synthesized
cuuccgguagcuuguacuu

SEQ ID NO: 20083 - RNA, 19 nt, artificial
  Chemically synthesized
gaugaaauucugucuuucu

SEQ ID NO: 20084 - RNA, 19 nt, artificial
  Chemically synthesized
ccgcaucgucaucaaacug

SEQ ID NO: 20085 - RNA, 19 nt, artificial
  Chemically synthesized
acaggccgucagguaguua

SEQ ID NO: 20086 - RNA, 19 nt, artificial
  Chemically synthesized
cugucggaagaaacugcug

SEQ ID NO: 20087 - RNA, 19 nt, artificial
  Chemically synthesized
aagcgaaguuuaaaaugau

SEQ ID NO: 20088 - RNA, 19 nt, artificial
  Chemically synthesized
cuuugguccuugugaagau

SEQ ID NO: 20089 - RNA, 19 nt, artificial
  Chemically synthesized
cgaaccgaaguuuucuucu

SEQ ID NO: 20090 - RNA, 19 nt, artificial
  Chemically synthesized
cacaguccacuucagacac

SEQ ID NO: 20091 - RNA, 19 nt, artificial
  Chemically synthesized
aucuugugggagccacgaa

SEQ ID NO: 20092 - RNA, 19 nt, artificial
  Chemically synthesized
agaaagcuuuucgccaugu

SEQ ID NO: 20093 - RNA, 19 nt, artificial
  Chemically synthesized
gacaagaaagcuuuucgcc

SEQ ID NO: 20094 - RNA, 19 nt, artificial
  Chemically synthesized
gcuggacugucaaagaaag

SEQ ID NO: 20095 - RNA, 19 nt, artificial
  Chemically synthesized
agcgaaccgaaguuuucuu

SEQ ID NO: 20096 - RNA, 19 nt, artificial
  Chemically synthesized
cucacacaguccacuucag

SEQ ID NO: 20097 - RNA, 19 nt, artificial
  Chemically synthesized
ggugaugaaauucugucuu

SEQ ID NO: 20098 - RNA, 19 nt, artificial
  Chemically synthesized
cucaguguggagguguaaa

SEQ ID NO: 20099 - RNA, 19 nt, artificial
  Chemically synthesized
ccuggaaguugucauucuc

SEQ ID NO: 20100 - RNA, 19 nt, artificial
  Chemically synthesized
cugaaaguuuuuucggaag

SEQ ID NO: 20101 - RNA, 19 nt, artificial
  Chemically synthesized
gcuuuuuauucuaacagca

SEQ ID NO: 20102 - RNA, 19 nt, artificial
  Chemically synthesized
acugucaaagaaaguggcu

SEQ ID NO: 20103 - RNA, 19 nt, artificial
  Chemically synthesized
cauccuggaaguugucauu

SEQ ID NO: 20104 - RNA, 19 nt, artificial
  Chemically synthesized
ggccugaaaguuuuuucgg

SEQ ID NO: 20105 - RNA, 19 nt, artificial
  Chemically synthesized
ccgguagcuuguacuucug

SEQ ID NO: 20106 - RNA, 19 nt, artificial
  Chemically synthesized
aggagugaggcuggucuuu

SEQ ID NO: 20107 - RNA, 19 nt, artificial
  Chemically synthesized
cagauaagacacaguuuug

SEQ ID NO: 20108 - RNA, 19 nt, artificial
  Chemically synthesized
gagcgaaccgaaguuuucu

SEQ ID NO: 20109 - RNA, 19 nt, artificial
  Chemically synthesized
ccaccauuggcacaacaca

SEQ ID NO: 20110 - RNA, 19 nt, artificial
  Chemically synthesized
guaaaucuugugggagcca

SEQ ID NO: 20111 - RNA, 19 nt, artificial
  Chemically synthesized
uaguggcccucugcagaaa

SEQ ID NO: 20112 - RNA, 19 nt, artificial
  Chemically synthesized
cacgaggcuuuuuauucua

SEQ ID NO: 20113 - RNA, 19 nt, artificial
  Chemically synthesized
cugugaucacaaaggcagc

SEQ ID NO: 20114 - RNA, 19 nt, artificial
  Chemically synthesized
gaaaugggucauuuuaaag

SEQ ID NO: 20115 - RNA, 19 nt, artificial
  Chemically synthesized
guguggagguguaaaucuu

SEQ ID NO: 20116 - RNA, 19 nt, artificial
  Chemically synthesized
uggagacaagaaagcuuuu

SEQ ID NO: 20117 - RNA, 19 nt, artificial
  Chemically synthesized
gguguucuuacaagaaauc

SEQ ID NO: 20118 - RNA, 19 nt, artificial
  Chemically synthesized
ccaucacuuccgguagcuu

SEQ ID NO: 20119 - RNA, 19 nt, artificial
  Chemically synthesized
gccacacucaaguucugcu

SEQ ID NO: 20120 - RNA, 19 nt, artificial
  Chemically synthesized
caccucggguuuucuucuu

SEQ ID NO: 20121 - RNA, 19 nt, artificial
  Chemically synthesized
ccuggcagauaagacacag

SEQ ID NO: 20122 - RNA, 19 nt, artificial
  Chemically synthesized
cuggucuuuccuggcagau

SEQ ID NO: 20123 - RNA, 19 nt, artificial
  Chemically synthesized
ccuugugaagaugcuguga

SEQ ID NO: 20124 - RNA, 19 nt, artificial
  Chemically synthesized
caagaaagcuuuucgccau

SEQ ID NO: 20125 - RNA, 19 nt, artificial
  Chemically synthesized
gguguaaaucuugugggag

SEQ ID NO: 20126 - RNA, 19 nt, artificial
  Chemically synthesized
gauaagacacaguuuuguu

SEQ ID NO: 20127 - RNA, 19 nt, artificial
  Chemically synthesized
cuggcagauaagacacagu

SEQ ID NO: 20128 - RNA, 19 nt, artificial
  Chemically synthesized
gcacgaggcuuuuuauucu

SEQ ID NO: 20129 - RNA, 19 nt, artificial
  Chemically synthesized
acagggccugaaaguuuuu

SEQ ID NO: 20130 - RNA, 19 nt, artificial
  Chemically synthesized
gcaucgucaucaaacugag

SEQ ID NO: 20131 - RNA, 19 nt, artificial
  Chemically synthesized
ggucacgguguucuuacaa

SEQ ID NO: 20132 - RNA, 19 nt, artificial
  Chemically synthesized
ccuuggagacaagaaagcu

SEQ ID NO: 20133 - RNA, 19 nt, artificial
  Chemically synthesized
uguccgcaucgucaucaaa

SEQ ID NO: 20134 - RNA, 19 nt, artificial
  Chemically synthesized
gaucaccucggguuuucuu

SEQ ID NO: 20135 - RNA, 19 nt, artificial
  Chemically synthesized
agaaagcugaacucccagu

SEQ ID NO: 20136 - RNA, 19 nt, artificial
  Chemically synthesized
cuugugggagccacgaaau

SEQ ID NO: 20137 - RNA, 19 nt, artificial
  Chemically synthesized
cagaaagcugaacucccag

SEQ ID NO: 20138 - RNA, 19 nt, artificial
  Chemically synthesized
acgguguucuuacaagaaa

SEQ ID NO: 20139 - RNA, 19 nt, artificial
  Chemically synthesized
agcuuuucgccauguuuua

SEQ ID NO: 20140 - RNA, 19 nt, artificial
  Chemically synthesized
ggcguuuccuuggagacaa

SEQ ID NO: 20141 - RNA, 19 nt, artificial
  Chemically synthesized
cguuuccuuggagacaaga

SEQ ID NO: 20142 - RNA, 19 nt, artificial
  Chemically synthesized
gugaugaaauucugucuuu

SEQ ID NO: 20143 - RNA, 19 nt, artificial
  Chemically synthesized
ggagacaagaaagcuuuuc

SEQ ID NO: 20144 - RNA, 19 nt, artificial
  Chemically synthesized
cgguguucuuacaagaaau

SEQ ID NO: 20145 - RNA, 19 nt, artificial
  Chemically synthesized
ggagcgaaccgaaguuuuc

SEQ ID NO: 20146 - RNA, 19 nt, artificial
  Chemically synthesized
gcuuuucgccauguuuuau

SEQ ID NO: 20147 - RNA, 19 nt, artificial
  Chemically synthesized
agccacagacagcacagaa

SEQ ID NO: 20148 - RNA, 19 nt, artificial
  Chemically synthesized
cacgaaaugggucauuuua

SEQ ID NO: 20149 - RNA, 19 nt, artificial
  Chemically synthesized
agacaguucccaggaguga

SEQ ID NO: 20150 - RNA, 19 nt, artificial
  Chemically synthesized
ccugcauugggugaugaaa

SEQ ID NO: 20151 - RNA, 19 nt, artificial
  Chemically synthesized
aagccacagacagcacaga

SEQ ID NO: 20152 - RNA, 19 nt, artificial
  Chemically synthesized
gggucauuuuaaagaugug

SEQ ID NO: 20153 - RNA, 19 nt, artificial
  Chemically synthesized
gucaucaaacugaggcagu

SEQ ID NO: 20154 - RNA, 19 nt, artificial
  Chemically synthesized
caucgucaucaaacugagg

SEQ ID NO: 20155 - RNA, 19 nt, artificial
  Chemically synthesized
ggaaguugucauucuccag

SEQ ID NO: 20156 - RNA, 19 nt, artificial
  Chemically synthesized
cacgguguucuuacaagaa

SEQ ID NO: 20157 - RNA, 19 nt, artificial
  Chemically synthesized
ccugaaaguuuuuucggaa

SEQ ID NO: 20158 - RNA, 19 nt, artificial
  Chemically synthesized
ggcagauaagacacaguuu

SEQ ID NO: 20159 - RNA, 19 nt, artificial
  Chemically synthesized
ggucuuuccuggcagauaa

SEQ ID NO: 20160 - RNA, 19 nt, artificial
  Chemically synthesized
ccaacagggccugaaaguu

SEQ ID NO: 20161 - RNA, 19 nt, artificial
  Chemically synthesized
aagaugcugugaucacaaa

SEQ ID NO: 20162 - RNA, 19 nt, artificial
  Chemically synthesized
gggagcgaaccgaaguuuu

SEQ ID NO: 20163 - RNA, 19 nt, artificial
  Chemically synthesized
ccacagcuuugacucauua

SEQ ID NO: 20164 - RNA, 19 nt, artificial
  Chemically synthesized
gcaauccgagguuccuagu

SEQ ID NO: 20165 - RNA, 19 nt, artificial
  Chemically synthesized
gcacaacacaacugucgga

SEQ ID NO: 20166 - RNA, 19 nt, artificial
  Chemically synthesized
gaaagcugaacucccaguu

SEQ ID NO: 20167 - RNA, 19 nt, artificial
  Chemically synthesized
gaaauucugucuuucugaa

SEQ ID NO: 20168 - RNA, 19 nt, artificial
  Chemically synthesized
cgucaucaaacugaggcag

SEQ ID NO: 20169 - RNA, 19 nt, artificial
  Chemically synthesized
gccugaaaguuuuuucgga

SEQ ID NO: 20170 - RNA, 19 nt, artificial
  Chemically synthesized
gucuuuccuggcagauaag

SEQ ID NO: 20171 - RNA, 19 nt, artificial
  Chemically synthesized
aacacaacugucggaagaa

SEQ ID NO: 20172 - RNA, 19 nt, artificial
  Chemically synthesized
gcguuuccuuggagacaag

SEQ ID NO: 20173 - RNA, 19 nt, artificial
  Chemically synthesized
gggucauccuggaaguugu

SEQ ID NO: 20174 - RNA, 19 nt, artificial
  Chemically synthesized
caacacaacugucggaaga

SEQ ID NO: 20175 - RNA, 19 nt, artificial
  Chemically synthesized
acacaacugucggaagaaa

SEQ ID NO: 20176 - RNA, 19 nt, artificial
  Chemically synthesized
gaaagcuuuucgccauguu

SEQ ID NO: 20177 - RNA, 19 nt, artificial
  Chemically synthesized
gcagaaagcugaacuccca

SEQ ID NO: 20178 - RNA, 19 nt, artificial
  Chemically synthesized
gccacagcuuugacucauu

SEQ ID NO: 20179 - RNA, 19 nt, artificial
  Chemically synthesized
cacaguuuuguugggugaa

SEQ ID NO: 20180 - RNA, 19 nt, artificial
  Chemically synthesized
ccucugcagaaagcugaac

SEQ ID NO: 20181 - RNA, 19 nt, artificial
  Chemically synthesized
ggucauccuggaaguuguc

SEQ ID NO: 20182 - RNA, 19 nt, artificial
  Chemically synthesized
agccacgaaaugggucauu

SEQ ID NO: 20183 - RNA, 19 nt, artificial
  Chemically synthesized
gccacgaaaugggucauuu

SEQ ID NO: 20184 - RNA, 19 nt, artificial
  Chemically synthesized
gacucauuacguggcguuu

SEQ ID NO: 20185 - RNA, 19 nt, artificial
  Chemically synthesized
cccugcauugggugaugaa

SEQ ID NO: 20186 - RNA, 19 nt, artificial
  Chemically synthesized
guguccgcaucgucaucaa

SEQ ID NO: 20187 - RNA, 19 nt, artificial
  Chemically synthesized
cgaaaugggucauuuuaaa

SEQ ID NO: 20188 - RNA, 19 nt, artificial
  Chemically synthesized
ccacgaaaugggucauuuu

SEQ ID NO: 20189 - RNA, 19 nt, artificial
  Chemically synthesized
ggcuggacugucaaagaaa

SEQ ID NO: 20190 - RNA, 19 nt, artificial
  Chemically synthesized
cggaagcgaaguuuaaaau

SEQ ID NO: 20191 - RNA, 19 nt, artificial
  Chemically synthesized
ccucaguguggagguguaa

SEQ ID NO: 20192 - RNA, 19 nt, artificial
  Chemically synthesized
cgccacagcuuugacucau

SEQ ID NO: 20193 - RNA, 19 nt, artificial
  Chemically synthesized
gggcuggacugucaaagaa

SEQ ID NO: 20194 - RNA, 19 nt, artificial
  Chemically synthesized
cccucugcagaaagcugaa

SEQ ID NO: 20195 - RNA, 19 nt, Artificial
  Chemically synthesized
gagccacgaaaugggucau

SEQ ID NO: 20196 - RNA, 19 nt, artificial
  Chemically synthesized
ugccuuauaaccugccuuu

SEQ ID NO: 20197 - RNA, 19 nt, artificial
  Chemically synthesized
caauacaaagcuggauaau

SEQ ID NO: 20198 - RNA, 19 nt, artificial
  Chemically synthesized
gugccuuauaaccugccuu

SEQ ID NO: 20199 - RNA, 19 nt, artificial
  Chemically synthesized
gggaauuucuggugacaua

SEQ ID NO: 20200 - RNA, 19 nt, artificial
  Chemically synthesized
acauucaucaauaucccuc

SEQ ID NO: 20201 - RNA, 19 nt, artificial
  Chemically synthesized
caaaauacaaguacugguu

SEQ ID NO: 20202 - RNA, 19 nt, artificial
  Chemically synthesized
ccauucaaaauacaaguac

SEQ ID NO: 20203 - RNA, 19 nt, artificial
  Chemically synthesized
ggaagaaagacagucgguu

SEQ ID NO: 20204 - RNA, 19 nt, artificial
  Chemically synthesized
ggaaaauggcagacaauuu

SEQ ID NO: 20205 - RNA, 19 nt, artificial
  Chemically synthesized
ccaugauauaaucugaaag

SEQ ID NO: 20206 - RNA, 19 nt, artificial
  Chemically synthesized
gcaguacaaucaucggguu

SEQ ID NO: 20207 - RNA, 19 nt, artificial
  Chemically synthesized
gagagucauuguuugcaau

SEQ ID NO: 20208 - RNA, 19 nt, artificial
  Chemically synthesized
gaaaauggcagacaauuuu

SEQ ID NO: 20209 - RNA, 19 nt, artificial
  Chemically synthesized
gcguuaucugggucuggaa

SEQ ID NO: 20210 - RNA, 19 nt, artificial
  Chemically synthesized
ggguuaaaaaacucaauga

SEQ ID NO: 20211 - RNA, 19 nt, artificial
  Chemically synthesized
cggguuaaaaaacucaaug

SEQ ID NO: 20212 - RNA, 19 nt, artificial
  Chemically synthesized
ucaaaauacaaguacuggu

SEQ ID NO: 20213 - RNA, 19 nt, artificial
  Chemically synthesized
caagguugcagugaaugau

SEQ ID NO: 20214 - RNA, 19 nt, artificial
  Chemically synthesized
ucuaaaccuuacaugugua

SEQ ID NO: 20215 - RNA, 19 nt, artificial
  Chemically synthesized
ccagugcuucauauaccau

SEQ ID NO: 20216 - RNA, 19 nt, artificial
  Chemically synthesized
gaccucaccagugcuucau

SEQ ID NO: 20217 - RNA, 19 nt, artificial
  Chemically synthesized
cuuuaacccacgcuucaau

SEQ ID NO: 20218 - RNA, 19 nt, artificial
  Chemically synthesized
uccacuuuaacccacgcuu

SEQ ID NO: 20219 - RNA, 19 nt, artificial
  Chemically synthesized
gccuuccacuuuaacccac

SEQ ID NO: 20220 - RNA, 19 nt, artificial
  Chemically synthesized
cguuaucugggucuggaaa

SEQ ID NO: 20221 - RNA, 19 nt, artificial
  Chemically synthesized
accucaccagugcuucaua

SEQ ID NO: 20222 - RNA, 19 nt, artificial
  Chemically synthesized
aagaaagacagucgguuuu

SEQ ID NO: 20223 - RNA, 19 nt, artificial
  Chemically synthesized
gggaagaaagacagucggu

SEQ ID NO: 20224 - RNA, 19 nt, artificial
  Chemically synthesized
ccacuuuaacccacgcuuc

SEQ ID NO: 20225 - RNA, 19 nt, artificial
  Chemically synthesized
ccucgcaugcugauaacaa

SEQ ID NO: 20226 - RNA, 19 nt, artificial
  Chemically synthesized
acauguguaaagguuucau

SEQ ID NO: 20227 - RNA, 19 nt, artificial
  Chemically synthesized
cucaccagugcuucauaua

SEQ ID NO: 20228 - RNA, 19 nt, artificial
  Chemically synthesized
ggaauuucuggugacauag

SEQ ID NO: 20229 - RNA, 19 nt, artificial
  Chemically synthesized
ugggaauuucuggugacau

SEQ ID NO: 20230 - RNA, 19 nt, artificial
  Chemically synthesized
acaaucaucggguuaaaaa

SEQ ID NO: 20231 - RNA, 19 nt, artificial
  Chemically synthesized
gccuuauaaccugccuuug

SEQ ID NO: 20232 - RNA, 19 nt, artificial
  Chemically synthesized
ugcguuaucugggucugga

SEQ ID NO: 20233 - RNA, 19 nt, artificial
  Chemically synthesized
cccucuuguaagucaucua

SEQ ID NO: 20234 - RNA, 19 nt, artificial
  Chemically synthesized
accagugcuucauauacca

SEQ ID NO: 20235 - RNA, 19 nt, artificial
  Chemically synthesized
cugggaauuucuggugaca

SEQ ID NO: 20236 - RNA, 19 nt, artificial
  Chemically synthesized
caaucaucggguuaaaaaa

SEQ ID NO: 20237 - RNA, 19 nt, artificial
  Chemically synthesized
ugauaacaauucugggcac

SEQ ID NO: 20238 - RNA, 19 nt, artificial
  Chemically synthesized
ucgcaugcugauaacaauu

SEQ ID NO: 20239 - RNA, 19 nt, artificial
  Chemically synthesized
gccucgcaugcugauaaca

SEQ ID NO: 20240 - RNA, 19 nt, artificial
  Chemically synthesized
gaauuucuggugacauaga

SEQ ID NO: 20241 - RNA, 19 nt, artificial
  Chemically synthesized
ucaucggguuaaaaaacuc

SEQ ID NO: 20242 - RNA, 19 nt, artificial
  Chemically synthesized
aguacaaucaucggguuaa

SEQ ID NO: 20243 - RNA, 19 nt, artificial
  Chemically synthesized
aggagagucauuguuugca

SEQ ID NO: 20244 - RNA, 19 nt, artificial
  Chemically synthesized
cagugcuucauauaccaug

SEQ ID NO: 20245 - RNA, 19 nt, artificial
  Chemically synthesized
caguacaaucaucggguua

SEQ ID NO: 20246 - RNA, 19 nt, artificial
  Chemically synthesized
caauucugggcacggugaa

SEQ ID NO: 20247 - RNA, 19 nt, artificial
  Chemically synthesized
guaaagguuucauguucac

SEQ ID NO: 20248 - RNA, 19 nt, artificial
  Chemically synthesized
gucauuguuugcaauacaa

SEQ ID NO: 20249 - RNA, 19 nt, artificial
  Chemically synthesized
cugauaacaauucugggca

SEQ ID NO: 20250 - RNA, 19 nt, artificial
  Chemically synthesized
gguuucauguucacuguga

SEQ ID NO: 20251 - RNA, 19 nt, artificial
  Chemically synthesized
ugcaguacaaucaucgggu

SEQ ID NO: 20252 - RNA, 19 nt, artificial
  Chemically synthesized
ugcaauacaaagcuggaua

SEQ ID NO: 20253 - RNA, 19 nt, artificial
  Chemically synthesized
cacgcuucaaugagaacaa

SEQ ID NO: 20254 - RNA, 19 nt, artificial
  Chemically synthesized
uguaaagguuucauguuca

SEQ ID NO: 20255 - RNA, 19 nt, artificial
  Chemically synthesized
uguguaaagguuucauguu

SEQ ID NO: 20256 - RNA, 19 nt, artificial
  Chemically synthesized
gggaagggaagaaagacag

SEQ ID NO: 20257 - RNA, 19 nt, artificial
  Chemically synthesized
uugcaauacaaagcuggau

SEQ ID NO: 20258 - RNA, 19 nt, artificial
  Chemically synthesized
agaauugcuuuagauuucc

SEQ ID NO: 20259 - RNA, 19 nt, artificial
  Chemically synthesized
gcuucauauaccaugauau

SEQ ID NO: 20260 - RNA, 19 nt, artificial
  Chemically synthesized
ugcuucauauaccaugaua

SEQ ID NO: 20261 - RNA, 19 nt, artificial
  Chemically synthesized
cuucaagguugcagugaau

SEQ ID NO: 20262 - RNA, 19 nt, artificial
  Chemically synthesized
ucaaugagaacaacaggag

SEQ ID NO: 20263 - RNA, 19 nt, artificial
  Chemically synthesized
ccacgcuucaaugagaaca

SEQ ID NO: 20264 - RNA, 19 nt, artificial
  Chemically synthesized
ucccucuuguaagucaucu

SEQ ID NO: 20265 - RNA, 19 nt, artificial
  Chemically synthesized
acuucaagguugcagugaa

SEQ ID NO: 20266 - RNA, 19 nt, artificial
  Chemically synthesized
acagucgguuuucccauuu

SEQ ID NO: 20267 - RNA, 19 nt, artificial
  Chemically synthesized
cgcuucaaugagaacaaca

SEQ ID NO: 20268 - RNA, 19 nt, artificial
  Chemically synthesized
acgcuucaaugagaacaac

SEQ ID NO: 20269 - RNA, 19 nt, artificial
  Chemically synthesized
ggaaugauguugccuucca

SEQ ID NO: 20270 - RNA, 19 nt, artificial
  Chemically synthesized
ucuuguaagucaucuacuu

SEQ ID NO: 20271 - RNA, 19 nt, artificial
  Chemically synthesized
agucauuguuugcaauaca

SEQ ID NO: 20272 - RNA, 19 nt, artificial
  Chemically synthesized
gcuucaaugagaacaacag

SEQ ID NO: 20273 - RNA, 19 nt, artificial
  Chemically synthesized
acccacgcuucaaugagaa

SEQ ID NO: 20274 - RNA, 19 nt, artificial
  Chemically synthesized
gagggaaugauguugccuu

SEQ ID NO: 20275 - RNA, 19 nt, artificial
  Chemically synthesized
ugaagcccaaugcaaacag

SEQ ID NO: 20276 - RNA, 19 nt, artificial
  Chemically synthesized
cucaaugaaaucagcaaac

SEQ ID NO: 20277 - RNA, 19 nt, artificial
  Chemically synthesized
cccauuugaaagugggaaa

SEQ ID NO: 20278 - RNA, 19 nt, artificial
  Chemically synthesized
acggugaagcccaaugcaa

SEQ ID NO: 20279 - RNA, 19 nt, artificial
  Chemically synthesized
gccacugauugugccuuau

SEQ ID NO: 20280 - RNA, 19 nt, artificial
  Chemically synthesized
ccucuuguaagucaucuac

SEQ ID NO: 20281 - RNA, 19 nt, artificial
  Chemically synthesized
cuaaaccuuacauguguaa

SEQ ID NO: 20282 - RNA, 19 nt, artificial
  Chemically synthesized
gugcuucauauaccaugau

SEQ ID NO: 20283 - RNA, 19 nt, artificial
  Chemically synthesized
cagucgguuuucccauuug

SEQ ID NO: 20284 - RNA, 19 nt, artificial
  Chemically synthesized
ggaaacccaaacccucaag

SEQ ID NO: 20285 - RNA, 19 nt, artificial
  Chemically synthesized
cucacuuguugcaguacaa

SEQ ID NO: 20286 - RNA, 19 nt, artificial
  Chemically synthesized
agagucauuguuugcaaua

SEQ ID NO: 20287 - RNA, 19 nt, artificial
  Chemically synthesized
auguugccuuccacuuuaa

SEQ ID NO: 20288 - RNA, 19 nt, artificial
  Chemically synthesized
ucggguuaaaaaacucaau

SEQ ID NO: 20289 - RNA, 19 nt, artificial
  Chemically synthesized
ccacuucaagguugcagug

SEQ ID NO: 20290 - RNA, 19 nt, artificial
  Chemically synthesized
ccauuugaaagugggaaac

SEQ ID NO: 20291 - RNA, 19 nt, artificial
  Chemically synthesized
gguuuucccauuugaaagu

SEQ ID NO: 20292 - RNA, 19 nt, artificial
  Chemically synthesized
gucgguuuucccauuugaa

SEQ ID NO: 20293 - RNA, 19 nt, artificial
  Chemically synthesized
gagucauuguuugcaauac

SEQ ID NO: 20294 - RNA, 19 nt, artificial
  Chemically synthesized
gaaugauguugccuuccac

SEQ ID NO: 20295 - RNA, 19 nt, artificial
  Chemically synthesized
gcuuuagauuuccaaagag

SEQ ID NO: 20296 - RNA, 19 nt, artificial
  Chemically synthesized
ugcuuuagauuuccaaaga

SEQ ID NO: 20297 - RNA, 19 nt, artificial
  Chemically synthesized
cucgcaugcugauaacaau

SEQ ID NO: 20298 - RNA, 19 nt, artificial
  Chemically synthesized
ccaucuucuggacagccaa

SEQ ID NO: 20299 - RNA, 19 nt, artificial
  Chemically synthesized
uggaaacccaaacccucaa

SEQ ID NO: 20300 - RNA, 19 nt, artificial
  Chemically synthesized
gaaaucagcaaacugggaa

SEQ ID NO: 20301 - RNA, 19 nt, artificial
  Chemically synthesized
gcucacuuguugcaguaca

SEQ ID NO: 20302 - RNA, 19 nt, artificial
  Chemically synthesized
cagugaaugaugcucacuu

SEQ ID NO: 20303 - RNA, 19 nt, artificial
  Chemically synthesized
cccacgcuucaaugagaac

SEQ ID NO: 20304 - RNA, 19 nt, artificial
  Chemically synthesized
agauuuccaaagagggaau

SEQ ID NO: 20305 - RNA, 19 nt, artificial
  Chemically synthesized
gcaaacagaauugcuuuag

SEQ ID NO: 20306 - RNA, 19 nt, artificial
  Chemically synthesized
cccaaugcaaacagaauug

SEQ ID NO: 20307 - RNA, 19 nt, artificial
  Chemically synthesized
ccuuacauguguaaagguu

SEQ ID NO: 20308 - RNA, 19 nt, artificial
  Chemically synthesized
agucgguuuucccauuuga

SEQ ID NO: 20309 - RNA, 19 nt, artificial
  Chemically synthesized
cgcaugcugauaacaauuc

SEQ ID NO: 20310 - RNA, 19 nt, artificial
  Chemically synthesized
ugccucgcaugcugauaac

SEQ ID NO: 20311 - RNA, 19 nt, artificial
  Chemically synthesized
cuacccaucuucuggacag

SEQ ID NO: 20312 - RNA, 19 nt, artificial
  Chemically synthesized
cuggugacauagaccucac

SEQ ID NO: 20313 - RNA, 19 nt, artificial
  Chemically synthesized
gcagugaaugaugcucacu

SEQ ID NO: 20314 - RNA, 19 nt, artificial
  Chemically synthesized
accacuucaagguugcagu

SEQ ID NO: 20315 - RNA, 19 nt, artificial
  Chemically synthesized
ugcaaacagaauugcuuua

SEQ ID NO: 20316 - RNA, 19 nt, artificial
  Chemically synthesized
aaaucagcaaacugggaau

SEQ ID NO: 20317 - RNA, 19 nt, artificial
  Chemically synthesized
ugcagugaaugaugcucac

SEQ ID NO: 20318 - RNA, 19 nt, artificial
  Chemically synthesized
ccugaccacuucaagguug

SEQ ID NO: 20319 - RNA, 19 nt, artificial
  Chemically synthesized
ucccauuugaaagugggaa

SEQ ID NO: 20320 - RNA, 19 nt, artificial
  Chemically synthesized
agacagucgguuuucccau

SEQ ID NO: 20321 - RNA, 19 nt, artificial
  Chemically synthesized
caacaggagagucauuguu

SEQ ID NO: 20322 - RNA, 19 nt, artificial
  Chemically synthesized
agggaaugauguugccuuc

SEQ ID NO: 20323 - RNA, 19 nt, artificial
  Chemically synthesized
ccaaugcaaacagaauugc

SEQ ID NO: 20324 - RNA, 19 nt, artificial
  Chemically synthesized
agcccaaugcaaacagaau

SEQ ID NO: 20325 - RNA, 19 nt, artificial
  Chemically synthesized
uguucacugugagugaaaa

SEQ ID NO: 20326 - RNA, 19 nt, artificial
  Chemically synthesized
ugaugcguuaucugggucu

SEQ ID NO: 20327 - RNA, 19 nt, artificial
  Chemically synthesized
aaaccuuacauguguaaag

SEQ ID NO: 20328 - RNA, 19 nt, artificial
  Chemically synthesized
gugacauagaccucaccag

SEQ ID NO: 20329 - RNA, 19 nt, artificial
  Chemically synthesized
ucagcaaacugggaauuuc

SEQ ID NO: 20330 - RNA, 19 nt, artificial
  Chemically synthesized
gguugaaccugaccacuuc

SEQ ID NO: 20331 - RNA, 19 nt, artificial
  Chemically synthesized
ugguugaaccugaccacuu

SEQ ID NO: 20332 - RNA, 19 nt, artificial
  Chemically synthesized
gugggaaaccauucaaaau

SEQ ID NO: 20333 - RNA, 19 nt, artificial
  Chemically synthesized
ucgguuuucccauuugaaa

SEQ ID NO: 20334 - RNA, 19 nt, artificial
  Chemically synthesized
ugggucuggaaacccaaac

SEQ ID NO: 20335 - RNA, 19 nt, artificial
  Chemically synthesized
cagugaauuaccugucuca

SEQ ID NO: 20336 - RNA, 19 nt, artificial
  Chemically synthesized
acagugaauuaccugucuc

SEQ ID NO: 20337 - RNA, 19 nt, artificial
  Chemically synthesized
aucggguuaaaaaacucaa

SEQ ID NO: 20338 - RNA, 19 nt, artificial
  Chemically synthesized
auagaccucaccagugcuu

SEQ ID NO: 20339 - RNA, 19 nt, artificial
  Chemically synthesized
agugaaugaugcucacuug

SEQ ID NO: 20340 - RNA, 19 nt, artificial
  Chemically synthesized
accugaccacuucaagguu

SEQ ID NO: 20341 - RNA, 19 nt, artificial
  Chemically synthesized
uugaaccugaccacuucaa

SEQ ID NO: 20342 - RNA, 19 nt, artificial
  Chemically synthesized
cgguuuucccauuugaaag

SEQ ID NO: 20343 - RNA, 19 nt, artificial
  Chemically synthesized
agaacaacaggagagucau

SEQ ID NO: 20344 - RNA, 19 nt, artificial
  Chemically synthesized
ucacuuguugcaguacaau

SEQ ID NO: 20345 - RNA, 19 nt, artificial
  Chemically synthesized
aacucaaugaaaucagcaa

SEQ ID NO: 20346 - RNA, 19 nt, artificial
  Chemically synthesized
augcucacuuguugcagua

SEQ ID NO: 20347 - RNA, 19 nt, artificial
  Chemically synthesized
aaagugggaaaccauucaa

SEQ ID NO: 20348 - RNA, 19 nt, artificial
  Chemically synthesized
cauguucacugugagugaa

SEQ ID NO: 20349 - RNA, 19 nt, artificial
  Chemically synthesized
aagugggaaaccauucaaa

SEQ ID NO: 20350 - RNA, 19 nt, artificial
  Chemically synthesized
cacugugagugaaaauuuu

SEQ ID NO: 20351 - RNA, 19 nt, artificial
  Chemically synthesized
ucacugugagugaaaauuu

SEQ ID NO: 20352 - RNA, 19 nt, artificial
  Chemically synthesized
acucaaugaaaucagcaaa

SEQ ID NO: 20353 - RNA, 19 nt, artificial
  Chemically synthesized
uucacugugagugaaaauu

SEQ ID NO: 20354 - RNA, 19 nt, artificial
  Chemically synthesized
gcagacggcuucucacuua

SEQ ID NO: 20355 - RNA, 19 nt, artificial
  Chemically synthesized
agcggaaaauggcagacaa

SEQ ID NO: 20356 - RNA, 19 nt, artificial
  Chemically synthesized
aaaggcagguuauaaggca

SEQ ID NO: 20357 - RNA, 19 nt, artificial
  Chemically synthesized
auuauccagcuuuguauug

SEQ ID NO: 20358 - RNA, 19 nt, artificial
  Chemically synthesized
aaggcagguuauaaggcac

SEQ ID NO: 20359 - RNA, 19 nt, artificial
  Chemically synthesized
uaugucaccagaaauuccc

SEQ ID NO: 20360 - RNA, 19 nt, artificial
  Chemically synthesized
gagggauauugaugaaugu

SEQ ID NO: 20361 - RNA, 19 nt, artificial
  Chemically synthesized
aaccaguacuuguauuuug

SEQ ID NO: 20362 - RNA, 19 nt, artificial
  Chemically synthesized
guacuuguauuuugaaugg

SEQ ID NO: 20363 - RNA, 19 nt, artificial
  Chemically synthesized
aaccgacugucuuucuucc

SEQ ID NO: 20364 - RNA, 19 nt, artificial
  Chemically synthesized
aaauugucugccauuuucc

SEQ ID NO: 20365 - RNA, 19 nt, artificial
  Chemically synthesized
cuuucagauuauaucaugg

SEQ ID NO: 20366 - RNA, 19 nt, artificial
  Chemically synthesized
aacccgaugauuguacugc

SEQ ID NO: 20367 - RNA, 19 nt, artificial
  Chemically synthesized
auugcaaacaaugacucuc

SEQ ID NO: 20368 - RNA, 19 nt, artificial
  Chemically synthesized
aaaauugucugccauuuuc

SEQ ID NO: 20369 - RNA, 19 nt, artificial
  Chemically synthesized
uuccagacccagauaacgc

SEQ ID NO: 20370 - RNA, 19 nt, artificial
  Chemically synthesized
ucauugaguuuuuuaaccc

SEQ ID NO: 20371 - RNA, 19 nt, artificial
  Chemically synthesized
cauugaguuuuuuaacccg

SEQ ID NO: 20372 - RNA, 19 nt, artificial
  Chemically synthesized
accaguacuuguauuuuga

SEQ ID NO: 20373 - RNA, 19 nt, artificial
  Chemically synthesized
aucauucacugcaaccuug

SEQ ID NO: 20374 - RNA, 19 nt, artificial
  Chemically synthesized
uacacauguaagguuuaga

SEQ ID NO: 20375 - RNA, 19 nt, artificial
  Chemically synthesized
augguauaugaagcacugg

SEQ ID NO: 20376 - RNA, 19 nt, artificial
  Chemically synthesized
augaagcacuggugagguc

SEQ ID NO: 20377 - RNA, 19 nt, artificial
  Chemically synthesized
auugaagcguggguuaaag

SEQ ID NO: 20378 - RNA, 19 nt, artificial
  Chemically synthesized
aagcguggguuaaagugga

SEQ ID NO: 20379 - RNA, 19 nt, artificial
  Chemically synthesized
guggguuaaaguggaaggc

SEQ ID NO: 20380 - RNA, 19 nt, artificial
  Chemically synthesized
uuuccagacccagauaacg

SEQ ID NO: 20381 - RNA, 19 nt, artificial
  Chemically synthesized
uaugaagcacuggugaggu

SEQ ID NO: 20382 - RNA, 19 nt, artificial
  Chemically synthesized
aaaaccgacugucuuucuu

SEQ ID NO: 20383 - RNA, 19 nt, artificial
  Chemically synthesized
accgacugucuuucuuccc

SEQ ID NO: 20384 - RNA, 19 nt, artificial
  Chemically synthesized
gaagcguggguuaaagugg

SEQ ID NO: 20385 - RNA, 19 nt, artificial
  Chemically synthesized
uuguuaucagcaugcgagg

SEQ ID NO: 20386 - RNA, 19 nt, artificial
  Chemically synthesized
augaaaccuuuacacaugu

SEQ ID NO: 20387 - RNA, 19 nt, artificial
  Chemically synthesized
uauaugaagcacuggugag

SEQ ID NO: 20388 - RNA, 19 nt, artificial
  Chemically synthesized
cuaugucaccagaaauucc

SEQ ID NO: 20389 - RNA, 19 nt, artificial
  Chemically synthesized
augucaccagaaauuccca

SEQ ID NO: 20390 - RNA, 19 nt, artificial
  Chemically synthesized
uuuuuaacccgaugauugu

SEQ ID NO: 20391 - RNA, 19 nt, artificial
  Chemically synthesized
caaaggcagguuauaaggc

SEQ ID NO: 20392 - RNA, 19 nt, artificial
  Chemically synthesized
uccagacccagauaacgca

SEQ ID NO: 20393 - RNA, 19 nt, artificial
  Chemically synthesized
uagaugacuuacaagaggg

SEQ ID NO: 20394 - RNA, 19 nt, artificial
  Chemically synthesized
ugguauaugaagcacuggu

SEQ ID NO: 20395 - RNA, 19 nt, artificial
  Chemically synthesized
ugucaccagaaauucccag

SEQ ID NO: 20396 - RNA, 19 nt, artificial
  Chemically synthesized
uuuuuuaacccgaugauug

SEQ ID NO: 20397 - RNA, 19 nt, artificial
  Chemically synthesized
gugcccagaauuguuauca

SEQ ID NO: 20398 - RNA, 19 nt, artificial
  Chemically synthesized
aauuguuaucagcaugcga

SEQ ID NO: 20399 - RNA, 19 nt, artificial
  Chemically synthesized
uguuaucagcaugcgaggc

SEQ ID NO: 20400 - RNA, 19 nt, artificial
  Chemically synthesized
ucuaugucaccagaaauuc

SEQ ID NO: 20401 - RNA, 19 nt, artificial
  Chemically synthesized
gaguuuuuuaacccgauga

SEQ ID NO: 20402 - RNA, 19 nt, artificial
  Chemically synthesized
uuaacccgaugauuguacu

SEQ ID NO: 20403 - RNA, 19 nt, artificial
  Chemically synthesized
ugcaaacaaugacucuccu

SEQ ID NO: 20404 - RNA, 19 nt, artificial
  Chemically synthesized
caugguauaugaagcacug

SEQ ID NO: 20405 - RNA, 19 nt, artificial
  Chemically synthesized
uaacccgaugauuguacug

SEQ ID NO: 20406 - RNA, 19 nt, artificial
  Chemically synthesized
uucaccgugcccagaauug

SEQ ID NO: 20407 - RNA, 19 nt, artificial
  Chemically synthesized
gugaacaugaaaccuuuac

SEQ ID NO: 20408 - RNA, 19 nt, artificial
  Chemically synthesized
uuguauugcaaacaaugac

SEQ ID NO: 20409 - RNA, 19 nt, artificial
  Chemically synthesized
ugcccagaauuguuaucag

SEQ ID NO: 20410 - RNA, 19 nt, artificial
  Chemically synthesized
ucacagugaacaugaaacc

SEQ ID NO: 20411 - RNA, 19 nt, artificial
  Chemically synthesized
acccgaugauuguacugca

SEQ ID NO: 20412 - RNA, 19 nt, artificial
  Chemically synthesized
uauccagcuuuguauugca

SEQ ID NO: 20413 - RNA, 19 nt, artificial
  Chemically synthesized
uuguucucauugaagcgug

SEQ ID NO: 20414 - RNA, 19 nt, artificial
  Chemically synthesized
ugaacaugaaaccuuuaca

SEQ ID NO: 20415 - RNA, 19 nt, artificial
  Chemically synthesized
aacaugaaaccuuuacaca

SEQ ID NO: 20416 - RNA, 19 nt, artificial
  Chemically synthesized
cugucuuucuucccuuccc

SEQ ID NO: 20417 - RNA, 19 nt, artificial
  Chemically synthesized
auccagcuuuguauugcaa

SEQ ID NO: 20418 - RNA, 19 nt, artificial
  Chemically synthesized
ggaaaucuaaagcaauucu

SEQ ID NO: 20419 - RNA, 19 nt, artificial
  Chemically synthesized
auaucaugguauaugaagc

SEQ ID NO: 20420 - RNA, 19 nt, artificial
  Chemically synthesized
uaucaugguauaugaagca

SEQ ID NO: 20421 - RNA, 19 nt, artificial
  Chemically synthesized
auucacugcaaccuugaag

SEQ ID NO: 20422 - RNA, 19 nt, artificial
  Chemically synthesized
cuccuguuguucucauuga

SEQ ID NO: 20423 - RNA, 19 nt, artificial
  Chemically synthesized
uguucucauugaagcgugg

SEQ ID NO: 20424 - RNA, 19 nt, artificial
  Chemically synthesized
agaugacuuacaagaggga

SEQ ID NO: 20425 - RNA, 19 nt, artificial
  Chemically synthesized
uucacugcaaccuugaagu

SEQ ID NO: 20426 - RNA, 19 nt, artificial
  Chemically synthesized
aaaugggaaaaccgacugu

SEQ ID NO: 20427 - RNA, 19 nt, artificial
  Chemically synthesized
uguuguucucauugaagcg

SEQ ID NO: 20428 - RNA, 19 nt, artificial
  Chemically synthesized
guuguucucauugaagcgu

SEQ ID NO: 20429 - RNA, 19 nt, artificial
  Chemically synthesized
uggaaggcaacaucauucc

SEQ ID NO: 20430 - RNA, 19 nt, artificial
  Chemically synthesized
aaguagaugacuuacaaga

SEQ ID NO: 20431 - RNA, 19 nt, artificial
  Chemically synthesized
uguauugcaaacaaugacu

SEQ ID NO: 20432 - RNA, 19 nt, artificial
  Chemically synthesized
cuguuguucucauugaagc

SEQ ID NO: 20433 - RNA, 19 nt, artificial
  Chemically synthesized
uucucauugaagcgugggu

SEQ ID NO: 20434 - RNA, 19 nt, artificial
  Chemically synthesized
aaggcaacaucauucccuc

SEQ ID NO: 20435 - RNA, 19 nt, artificial
  Chemically synthesized
cuguuugcauugggcuuca

SEQ ID NO: 20436 - RNA, 19 nt, artificial
  Chemically synthesized
guuugcugauuucauugag

SEQ ID NO: 20437 - RNA, 19 nt, artificial
  Chemically synthesized
uuucccacuuucaaauggg

SEQ ID NO: 20438 - RNA, 19 nt, artificial
  Chemically synthesized
uugcauugggcuucaccgu

SEQ ID NO: 20439 - RNA, 19 nt, artificial
  Chemically synthesized
auaaggcacaaucaguggc

SEQ ID NO: 20440 - RNA, 19 nt, artificial
  Chemically synthesized
guagaugacuuacaagagg

SEQ ID NO: 20441 - RNA, 19 nt, artificial
  Chemically synthesized
uuacacauguaagguuuag

SEQ ID NO: 20442 - RNA, 19 nt, artificial
  Chemically synthesized
aucaugguauaugaagcac

SEQ ID NO: 20443 - RNA, 19 nt, artificial
  Chemically synthesized
caaaugggaaaaccgacug

SEQ ID NO: 20444 - RNA, 19 nt, artificial
  Chemically synthesized
cuugaggguuuggguuucc

SEQ ID NO: 20445 - RNA, 19 nt, artificial
  Chemically synthesized
uuguacugcaacaagugag

SEQ ID NO: 20446 - RNA, 19 nt, artificial
  Chemically synthesized
uauugcaaacaaugacucu

SEQ ID NO: 20447 - RNA, 19 nt, artificial
  Chemically synthesized
uuaaaguggaaggcaacau

SEQ ID NO: 20448 - RNA, 19 nt, artificial
  Chemically synthesized
auugaguuuuuuaacccga

SEQ ID NO: 20449 - RNA, 19 nt, artificial
  Chemically synthesized
cacugcaaccuugaagugg

SEQ ID NO: 20450 - RNA, 19 nt, artificial
  Chemically synthesized
guuucccacuuucaaaugg

SEQ ID NO: 20451 - RNA, 19 nt, artificial
  Chemically synthesized
acuuucaaaugggaaaacc

SEQ ID NO: 20452 - RNA, 19 nt, artificial
  Chemically synthesized
uucaaaugggaaaaccgac

SEQ ID NO: 20453 - RNA, 19 nt, artificial
  Chemically synthesized
guauugcaaacaaugacuc

SEQ ID NO: 20454 - RNA, 19 nt, artificial
  Chemically synthesized
guggaaggcaacaucauuc

SEQ ID NO: 20455 - RNA, 19 nt, artificial
  Chemically synthesized
cucuuuggaaaucuaaagc

SEQ ID NO: 20456 - RNA, 19 nt, artificial
  Chemically synthesized
ucuuuggaaaucuaaagca

SEQ ID NO: 20457 - RNA, 19 nt, artificial
  Chemically synthesized
auuguuaucagcaugcgag

SEQ ID NO: 20458 - RNA, 19 nt, artificial
  Chemically synthesized
uuggcuguccagaagaugg

SEQ ID NO: 20459 - RNA, 19 nt, artificial
  Chemically synthesized
uugaggguuuggguuucca

SEQ ID NO: 20460 - RNA, 19 nt, artificial
  Chemically synthesized
uucccaguuugcugauuuc

SEQ ID NO: 20461 - RNA, 19 nt, artificial
  Chemically synthesized
uguacugcaacaagugagc

SEQ ID NO: 20462 - RNA, 19 nt, artificial
  Chemically synthesized
aagugagcaucauucacug

SEQ ID NO: 20463 - RNA, 19 nt, artificial
  Chemically synthesized
guucucauugaagcguggg

SEQ ID NO: 20464 - RNA, 19 nt, artificial
  Chemically synthesized
auucccucuuuggaaaucu

SEQ ID NO: 20465 - RNA, 19 nt, artificial
  Chemically synthesized
cuaaagcaauucuguuugc

SEQ ID NO: 20466 - RNA, 19 nt, artificial
  Chemically synthesized
caauucuguuugcauuggg

SEQ ID NO: 20467 - RNA, 19 nt, artificial
  Chemically synthesized
aaccuuuacacauguaagg

SEQ ID NO: 20468 - RNA, 19 nt, artificial
  Chemically synthesized
ucaaaugggaaaaccgacu

SEQ ID NO: 20469 - RNA, 19 nt, artificial
  Chemically synthesized
gaauuguuaucagcaugcg

SEQ ID NO: 20470 - RNA, 19 nt, artificial
  Chemically synthesized
guuaucagcaugcgaggca

SEQ ID NO: 20471 - RNA, 19 nt, artificial
  Chemically synthesized
cuguccagaagauggguag

SEQ ID NO: 20472 - RNA, 19 nt, artificial
  Chemically synthesized
gugaggucuaugucaccag

SEQ ID NO: 20473 - RNA, 19 nt, artificial
  Chemically synthesized
agugagcaucauucacugc

SEQ ID NO: 20474 - RNA, 19 nt, artificial
  Chemically synthesized
acugcaaccuugaaguggu

SEQ ID NO: 20475 - RNA, 19 nt, artificial
  Chemically synthesized
uaaagcaauucuguuugca

SEQ ID NO: 20476 - RNA, 19 nt, artificial
  Chemically synthesized
auucccaguuugcugauuu

SEQ ID NO: 20477 - RNA, 19 nt, artificial
  Chemically synthesized
gugagcaucauucacugca

SEQ ID NO: 20478 - RNA, 19 nt, artificial
  Chemically synthesized
caaccuugaaguggucagg

SEQ ID NO: 20479 - RNA, 19 nt, artificial
  Chemically synthesized
uucccacuuucaaauggga

SEQ ID NO: 20480 - RNA, 19 nt, artificial
  Chemically synthesized
augggaaaaccgacugucu

SEQ ID NO: 20481 - RNA, 19 nt, artificial
  Chemically synthesized
aacaaugacucuccuguug

SEQ ID NO: 20482 - RNA, 19 nt, artificial
  Chemically synthesized
gaaggcaacaucauucccu

SEQ ID NO: 20483 - RNA, 19 nt, artificial
  Chemically synthesized
gcaauucuguuugcauugg

SEQ ID NO: 20484 - RNA, 19 nt, artificial
  Chemically synthesized
auucuguuugcauugggcu

SEQ ID NO: 20485 - RNA, 19 nt, artificial
  Chemically synthesized
uuuucacucacagugaaca

SEQ ID NO: 20486 - RNA, 19 nt, artificial
  Chemically synthesized
agacccagauaacgcauca

SEQ ID NO: 20487 - RNA, 19 nt, artificial
  Chemically synthesized
cuuuacacauguaagguuu

SEQ ID NO: 20488 - RNA, 19 nt, artificial
  Chemically synthesized
cuggugaggucuaugucac

SEQ ID NO: 20489 - RNA, 19 nt, artificial
  Chemically synthesized
gaaauucccaguuugcuga

SEQ ID NO: 20490 - RNA, 19 nt, artificial
  Chemically synthesized
gaaguggucagguucaacc

SEQ ID NO: 20491 - RNA, 19 nt, artificial
  Chemically synthesized
aaguggucagguucaacca

SEQ ID NO: 20492 - RNA, 19 nt, artificial
  Chemically synthesized
auuuugaaugguuucccac

SEQ ID NO: 20493 - RNA, 19 nt, artificial
  Chemically synthesized
uuucaaaugggaaaaccga

SEQ ID NO: 20494 - RNA, 19 nt, artificial
  Chemically synthesized
guuuggguuuccagaccca

SEQ ID NO: 20495 - RNA, 19 nt, artificial
  Chemically synthesized
ugagacagguaauucacug

SEQ ID NO: 20496 - RNA, 19 nt, artificial
  Chemically synthesized
gagacagguaauucacugu

SEQ ID NO: 20497 - RNA, 19 nt, artificial
  Chemically synthesized
uugaguuuuuuaacccgau

SEQ ID NO: 20498 - RNA, 19 nt, artificial
  Chemically synthesized
aagcacuggugaggucuau

SEQ ID NO: 20499 - RNA, 19 nt, artificial
  Chemically synthesized
caagugagcaucauucacu

SEQ ID NO: 20500 - RNA, 19 nt, artificial
  Chemically synthesized
aaccuugaaguggucaggu

SEQ ID NO: 20501 - RNA, 19 nt, artificial
  Chemically synthesized
uugaaguggucagguucaa

SEQ ID NO: 20502 - RNA, 19 nt, artificial
  Chemically synthesized
cuuucaaaugggaaaaccg

SEQ ID NO: 20503 - RNA, 19 nt, artificial
  Chemically synthesized
augacucuccuguuguucu

SEQ ID NO: 20504 - RNA, 19 nt, artificial
  Chemically synthesized
auuguacugcaacaaguga

SEQ ID NO: 20505 - RNA, 19 nt, artificial
  Chemically synthesized
uugcugauuucauugaguu

SEQ ID NO: 20506 - RNA, 19 nt, artificial
  Chemically synthesized
uacugcaacaagugagcau

SEQ ID NO: 20507 - RNA, 19 nt, artificial
  Chemically synthesized
uugaaugguuucccacuuu

SEQ ID NO: 20508 - RNA, 19 nt, artificial
  Chemically synthesized
uucacucacagugaacaug

SEQ ID NO: 20509 - RNA, 19 nt, artificial
  Chemically synthesized
uuugaaugguuucccacuu

SEQ ID NO: 20510 - RNA, 19 nt, artificial
  Chemically synthesized
aaaauuuucacucacagug

SEQ ID NO: 20511 - RNA, 19 nt, artificial
  Chemically synthesized
aaauuuucacucacaguga

SEQ ID NO: 20512 - RNA, 19 nt, artificial
  Chemically synthesized
uuugcugauuucauugagu

SEQ ID NO: 20513 - RNA, 19 nt, artificial
  Chemically synthesized
aauuuucacucacagugaa

SEQ ID NO: 20514 - RNA, 19 nt, artificial
  Chemically synthesized
uaagugagaagccgucugc

SEQ ID NO: 20515 - RNA, 19 nt, artificial
  Chemically synthesized
uugucugccauuuuccgcu

SEQ ID NO: 20516 - RNA, 19 nt, artificial
  Chemically synthesized
cggugaagcccaaugcaaa

SEQ ID NO: 20517 - RNA, 19 nt, artificial
  Chemically synthesized
ggagagucauuguuugcaa

SEQ ID NO: 20518 - RNA, 19 nt, artificial
  Chemically synthesized
gcaauacaaagcuggauaa

SEQ ID NO: 20519 - RNA, 19 nt, artificial
  Chemically synthesized
auacaaagcuggauaauaa

SEQ ID NO: 20520 - RNA, 19 nt, artificial
  Chemically synthesized
caaugagaacaacaggaga

SEQ ID NO: 20521 - RNA, 19 nt, artificial
  Chemically synthesized
agugggaaaccauucaaaa

SEQ ID NO: 20522 - RNA, 19 nt, artificial
  Chemically synthesized
ggaaaccauucaaaauaca

SEQ ID NO: 20523 - RNA, 19 nt, artificial
  Chemically synthesized
caucaauaucccucuugua

SEQ ID NO: 20524 - RNA, 19 nt, artificial
  Chemically synthesized
gguuaaaaaacucaaugaa

SEQ ID NO: 20525 - RNA, 19 nt, artificial
  Chemically synthesized
guacaaucaucggguuaaa

SEQ ID NO: 20526 - RNA, 19 nt, artificial
  Chemically synthesized
gaaaccauucaaaauacaa

SEQ ID NO: 20527 - RNA, 19 nt, artificial
  Chemically synthesized
aagucaucuacuuaauaaa

SEQ ID NO: 20528 - RNA, 19 nt, artificial
  Chemically synthesized
cacugauugugccuuauaa

SEQ ID NO: 20529 - RNA, 19 nt, artificial
  Chemically synthesized
cauucaaaauacaaguacu

SEQ ID NO: 20530 - RNA, 19 nt, artificial
  Chemically synthesized
guuaaaaaacucaaugaaa

SEQ ID NO: 20531 - RNA, 19 nt, artificial
  Chemically synthesized
gaagcccaaugcaaacaga

SEQ ID NO: 20532 - RNA, 19 nt, artificial
  Chemically synthesized
ggaagggaagaaagacagu

SEQ ID NO: 20533 - RNA, 19 nt, artificial
  Chemically synthesized
gaaucuaaaccuuacaugu

SEQ ID NO: 20534 - RNA, 19 nt, artificial
  Chemically synthesized
gagugaaaauuuuuacauu

SEQ ID NO: 20535 - RNA, 19 nt, artificial
  Chemically synthesized
gauguugccuuccacuuua

SEQ ID NO: 20536 - RNA, 19 nt, artificial
  Chemically synthesized
accaugauauaaucugaaa

SEQ ID NO: 20537 - RNA, 19 nt, artificial
  Chemically synthesized
ccucaccagugcuucauau

SEQ ID NO: 20538 - RNA, 19 nt, artificial
  Chemically synthesized
cugugagugaaaauuuuua

SEQ ID NO: 20539 - RNA, 19 nt, artificial
  Chemically synthesized
gugccucgcaugcugauaa

SEQ ID NO: 20540 - RNA, 19 nt, artificial
  Chemically synthesized
cugggucuggaaacccaaa

SEQ ID NO: 20541 - RNA, 19 nt, artificial
  Chemically synthesized
gaagaaagacagucgguuu

SEQ ID NO: 20542 - RNA, 19 nt, artificial
  Chemically synthesized
cuucauauaccaugauaua

SEQ ID NO: 20543 - RNA, 19 nt, artificial
  Chemically synthesized
aaauacaaguacugguuga

SEQ ID NO: 20544 - RNA, 19 nt, artificial
  Chemically synthesized
ucauuguuugcaauacaaa

SEQ ID NO: 20545 - RNA, 19 nt, artificial
  Chemically synthesized
ggugaagcccaaugcaaac

SEQ ID NO: 20546 - RNA, 19 nt, artificial
  Chemically synthesized
auaccaugauauaaucuga

SEQ ID NO: 20547 - RNA, 19 nt, artificial
  Chemically synthesized
caaacagaauugcuuuaga

SEQ ID NO: 20548 - RNA, 19 nt, artificial
  Chemically synthesized
gaaagugggaaaccauuca

SEQ ID NO: 20549 - RNA, 19 nt, artificial
  Chemically synthesized
aauacaaagcuggauaaua

SEQ ID NO: 20550 - RNA, 19 nt, artificial
  Chemically synthesized
gcaugcugauaacaauucu

SEQ ID NO: 20551 - RNA, 19 nt, artificial
  Chemically synthesized
aagcccaaugcaaacagaa

SEQ ID NO: 20552 - RNA, 19 nt, artificial
  Chemically synthesized
cacuuuaacccacgcuuca

SEQ ID NO: 20553 - RNA, 19 nt, artificial
  Chemically synthesized
ccaaagagggaaugauguu

SEQ ID NO: 20554 - RNA, 19 nt, artificial
  Chemically synthesized
ucugggucuggaaacccaa

SEQ ID NO: 20555 - RNA, 19 nt, artificial
  Chemically synthesized
cauuguuugcaauacaaag

SEQ ID NO: 20556 - RNA, 19 nt, artificial
  Chemically synthesized
agugaauuaccugucucaa

SEQ ID NO: 20557 - RNA, 19 nt, artificial
  Chemically synthesized
ucaagguugcagugaauga

SEQ ID NO: 20558 - RNA, 19 nt, artificial
  Chemically synthesized
gggaaaccauucaaaauac

SEQ ID NO: 20559 - RNA, 19 nt, artificial
  Chemically synthesized
aaguacugguugaaccuga

SEQ ID NO: 20560 - RNA, 19 nt, artificial
  Chemically synthesized
uggagcaccuggagcuuau

SEQ ID NO: 20561 - RNA, 19 nt, artificial
  Chemically synthesized
cauucaucaauaucccucu

SEQ ID NO: 20562 - RNA, 19 nt, artificial
  Chemically synthesized
agugcuucauauaccauga

SEQ ID NO: 20563 - RNA, 19 nt, artificial
  Chemically synthesized
aauacaaguacugguugaa

SEQ ID NO: 20564 - RNA, 19 nt, artificial
  Chemically synthesized
gugaaaauuuuuacauuca

SEQ ID NO: 20565 - RNA, 19 nt, artificial
  Chemically synthesized
uaccaugauauaaucugaa

SEQ ID NO: 20566 - RNA, 19 nt, artificial
  Chemically synthesized
cuggaaacccaaacccuca

SEQ ID NO: 20567 - RNA, 19 nt, artificial
  Chemically synthesized
uguaagucaucuacuuaau

SEQ ID NO: 20568 - RNA, 19 nt, artificial
  Chemically synthesized
gugagugaaaauuuuuaca

SEQ ID NO: 20569 - RNA, 19 nt, artificial
  Chemically synthesized
ucauauaccaugauauaau

SEQ ID NO: 20570 - RNA, 19 nt, artificial
  Chemically synthesized
acuuuaacccacgcuucaa

SEQ ID NO: 20571 - RNA, 19 nt, artificial
  Chemically synthesized
cagcaaacugggaauuucu

SEQ ID NO: 20572 - RNA, 19 nt, artificial
  Chemically synthesized
gaauugcuuuagauuucca

SEQ ID NO: 20573 - RNA, 19 nt, artificial
  Chemically synthesized
gcccaaugcaaacagaauu

SEQ ID NO: 20574 - RNA, 19 nt, artificial
  Chemically synthesized
agucaucuacuuaauaaau

SEQ ID NO: 20575 - RNA, 19 nt, artificial
  Chemically synthesized
caucggguuaaaaaacuca

SEQ ID NO: 20576 - RNA, 19 nt, artificial
  Chemically synthesized
uuugcaauacaaagcugga

SEQ ID NO: 20577 - RNA, 19 nt, artificial
  Chemically synthesized
gauugugccuuauaaccug

SEQ ID NO: 20578 - RNA, 19 nt, artificial
  Chemically synthesized
caauaucccucuuguaagu

SEQ ID NO: 20579 - RNA, 19 nt, artificial
  Chemically synthesized
ugacauagaccucaccagu

SEQ ID NO: 20580 - RNA, 19 nt, artificial
  Chemically synthesized
caugaugcguuaucugggu

SEQ ID NO: 20581 - RNA, 19 nt, artificial
  Chemically synthesized
aguacugguugaaccugac

SEQ ID NO: 20582 - RNA, 19 nt, artificial
  Chemically synthesized
guaagucaucuacuuaaua

SEQ ID NO: 20583 - RNA, 19 nt, artificial
  Chemically synthesized
caaacugggaauuucuggu

SEQ ID NO: 20584 - RNA, 19 nt, artificial
  Chemically synthesized
gacagucgguuuucccauu

SEQ ID NO: 20585 - RNA, 19 nt, artificial
  Chemically synthesized
agaccucaccagugcuuca

SEQ ID NO: 20586 - RNA, 19 nt, artificial
  Chemically synthesized
ugaaaucagcaaacuggga

SEQ ID NO: 20587 - RNA, 19 nt, artificial
  Chemically synthesized
aaagcuggauaauaacugg

SEQ ID NO: 20588 - RNA, 19 nt, artificial
  Chemically synthesized
aucaauaucccucuuguaa

SEQ ID NO: 20589 - RNA, 19 nt, artificial
  Chemically synthesized
ggccacugauugugccuua

SEQ ID NO: 20590 - RNA, 19 nt, artificial
  Chemically synthesized
aacccacgcuucaaugaga

SEQ ID NO: 20591 - RNA, 19 nt, artificial
  Chemically synthesized
cauauaccaugauauaauc

SEQ ID NO: 20592 - RNA, 19 nt, artificial
  Chemically synthesized
uacaaagcuggauaauaac

SEQ ID NO: 20593 - RNA, 19 nt, artificial
  Chemically synthesized
gaaaauuuuuacauucauc

SEQ ID NO: 20594 - RNA, 19 nt, artificial
  Chemically synthesized
aacugggaauuucugguga

SEQ ID NO: 20595 - RNA, 19 nt, artificial
  Chemically synthesized
ggugacauagaccucacca

SEQ ID NO: 20596 - RNA, 19 nt, artificial
  Chemically synthesized
acaggagagucauuguuug

SEQ ID NO: 20597 - RNA, 19 nt, artificial
  Chemically synthesized
uaucccucuuguaagucau

SEQ ID NO: 20598 - RNA, 19 nt, artificial
  Chemically synthesized
ucaucaauaucccucuugu

SEQ ID NO: 20599 - RNA, 19 nt, artificial
  Chemically synthesized
auugcuuuagauuuccaaa

SEQ ID NO: 20600 - RNA, 19 nt, artificial
  Chemically synthesized
acaauucugggcacgguga

SEQ ID NO: 20601 - RNA, 19 nt, artificial
  Chemically synthesized
gaacaacaggagagucauu

SEQ ID NO: 20602 - RNA, 19 nt, artificial
  Chemically synthesized
gucaucuacuuaauaaaua

SEQ ID NO: 20603 - RNA, 19 nt, artificial
  Chemically synthesized
cuuacauguguaaagguuu

SEQ ID NO: 20604 - RNA, 19 nt, artificial
  Chemically synthesized
aucuaaaccuuacaugugu

SEQ ID NO: 20605 - RNA, 19 nt, artificial
  Chemically synthesized
uacaaucaucggguuaaaa

SEQ ID NO: 20606 - RNA, 19 nt, artificial
  Chemically synthesized
gaugcucacuuguugcagu

SEQ ID NO: 20607 - RNA, 19 nt, artificial
  Chemically synthesized
uugaaagugggaaaccauu

SEQ ID NO: 20608 - RNA, 19 nt, artificial
  Chemically synthesized
cauguguaaagguuucaug

SEQ ID NO: 20609 - RNA, 19 nt, artificial
  Chemically synthesized
aaaauggcagacaauuuuu

SEQ ID NO: 20610 - RNA, 19 nt, artificial
  Chemically synthesized
aaaccauucaaaauacaag

SEQ ID NO: 20611 - RNA, 19 nt, artificial
  Chemically synthesized
uuguaagucaucuacuuaa

SEQ ID NO: 20612 - RNA, 19 nt, artificial
  Chemically synthesized
aauugcuuuagauuuccaa

SEQ ID NO: 20613 - RNA, 19 nt, artificial
  Chemically synthesized
ucuggugacauagaccuca

SEQ ID NO: 20614 - RNA, 19 nt, artificial
  Chemically synthesized
aaccauucaaaauacaagu

SEQ ID NO: 20615 - RNA, 19 nt, artificial
  Chemically synthesized
uaagucaucuacuuaauaa

SEQ ID NO: 20616 - RNA, 19 nt, artificial
  Chemically synthesized
aauuucuggugacauagac

SEQ ID NO: 20617 - RNA, 19 nt, artificial
  Chemically synthesized
ccacugauugugccuuaua

SEQ ID NO: 20618 - RNA, 19 nt, artificial
  Chemically synthesized
acuuguugcaguacaauca

SEQ ID NO: 20619 - RNA, 19 nt, artificial
  Chemically synthesized
ugaccacuucaagguugca

SEQ ID NO: 20620 - RNA, 19 nt, artificial
  Chemically synthesized
ugggaaaccauucaaaaua

SEQ ID NO: 20621 - RNA, 19 nt, artificial
  Chemically synthesized
gaaugaugcucacuuguug

SEQ ID NO: 20622 - RNA, 19 nt, artificial
  Chemically synthesized
gcuccaugaugcguuaucu

SEQ ID NO: 20623 - RNA, 19 nt, artificial
  Chemically synthesized
cuuguaagucaucuacuua

SEQ ID NO: 20624 - RNA, 19 nt, artificial
  Chemically synthesized
aaacagaauugcuuuagau

SEQ ID NO: 20625 - RNA, 19 nt, artificial
  Chemically synthesized
gguugcagugaaugaugcu

SEQ ID NO: 20626 - RNA, 19 nt, artificial
  Chemically synthesized
guugaaccugaccacuuca

SEQ ID NO: 20627 - RNA, 19 nt, artificial
  Chemically synthesized
auguguaaagguuucaugu

SEQ ID NO: 20628 - RNA, 19 nt, artificial
  Chemically synthesized
acugauugugccuuauaac

SEQ ID NO: 20629 - RNA, 19 nt, artificial
  Chemically synthesized
aacagaauugcuuuagauu

SEQ ID NO: 20630 - RNA, 19 nt, artificial
  Chemically synthesized
caaagcuggauaauaacug

SEQ ID NO: 20631 - RNA, 19 nt, artificial
  Chemically synthesized
guuucauguucacugugag

SEQ ID NO: 20632 - RNA, 19 nt, artificial
  Chemically synthesized
acagaauugcuuuagauuu

SEQ ID NO: 20633 - RNA, 19 nt, artificial
  Chemically synthesized
uucaaugagaacaacagga

SEQ ID NO: 20634 - RNA, 19 nt, artificial
  Chemically synthesized
aaugcaaacagaauugcuu

SEQ ID NO: 20635 - RNA, 19 nt, artificial
  Chemically synthesized
aagacagucgguuuuccca

SEQ ID NO: 20636 - RNA, 19 nt, artificial
  Chemically synthesized
acaaagcuggauaauaacu

SEQ ID NO: 20637 - RNA, 19 nt, artificial
  Chemically synthesized
auucaucaauaucccucuu

SEQ ID NO: 20638 - RNA, 19 nt, artificial
  Chemically synthesized
uaaaccuuacauguguaaa

SEQ ID NO: 20639 - RNA, 19 nt, artificial
  Chemically synthesized
ugccuuccacuuuaaccca

SEQ ID NO: 20640 - RNA, 19 nt, artificial
  Chemically synthesized
ugcugauaacaauucuggg

SEQ ID NO: 20641 - RNA, 19 nt, artificial
  Chemically synthesized
caaugcaaacagaauugcu

SEQ ID NO: 20642 - RNA, 19 nt, artificial
  Chemically synthesized
accauucaaaauacaagua

SEQ ID NO: 20643 - RNA, 19 nt, artificial
  Chemically synthesized
ugagugaaaauuuuuacau

SEQ ID NO: 20644 - RNA, 19 nt, artificial
  Chemically synthesized
caugcugauaacaauucug

SEQ ID NO: 20645 - RNA, 19 nt, artificial
  Chemically synthesized
auaucccucuuguaaguca

SEQ ID NO: 20646 - RNA, 19 nt, artificial
  Chemically synthesized
caucuucuggacagccaag

SEQ ID NO: 20647 - RNA, 19 nt, artificial
  Chemically synthesized
gacauagaccucaccagug

SEQ ID NO: 20648 - RNA, 19 nt, artificial
  Chemically synthesized
acugggaauuucuggugac

SEQ ID NO: 20649 - RNA, 19 nt, artificial
  Chemically synthesized
gcaaacugggaauuucugg

SEQ ID NO: 20650 - RNA, 19 nt, artificial
  Chemically synthesized
gagaacaacaggagaguca

SEQ ID NO: 20651 - RNA, 19 nt, artificial
  Chemically synthesized
aagguuucauguucacugu

SEQ ID NO: 20652 - RNA, 19 nt, artificial
  Chemically synthesized
acugugagugaaaauuuuu

SEQ ID NO: 20653 - RNA, 19 nt, artificial
  Chemically synthesized
ugauguugccuuccacuuu

SEQ ID NO: 20654 - RNA, 19 nt, artificial
  Chemically synthesized
auuugaaagugggaaacca

SEQ ID NO: 20655 - RNA, 19 nt, artificial
  Chemically synthesized
acaaguacugguugaaccu

SEQ ID NO: 20656 - RNA, 19 nt, artificial
  Chemically synthesized
caaagagggaaugauguug

SEQ ID NO: 20657 - RNA, 19 nt, artificial
  Chemically synthesized
agggaagaaagacagucgg

SEQ ID NO: 20658 - RNA, 19 nt, artificial
  Chemically synthesized
caugauauaaucugaaagg

SEQ ID NO: 20659 - RNA, 19 nt, artificial
  Chemically synthesized
uuugaaagugggaaaccau

SEQ ID NO: 20660 - RNA, 19 nt, artificial
  Chemically synthesized
agcaaacugggaauuucug

SEQ ID NO: 20661 - RNA, 19 nt, artificial
  Chemically synthesized
cauagaccucaccagugcu

SEQ ID NO: 20662 - RNA, 19 nt, artificial
  Chemically synthesized
ucauguucacugugaguga

SEQ ID NO: 20663 - RNA, 19 nt, artificial
  Chemically synthesized
aucugggucuggaaaccca

SEQ ID NO: 20664 - RNA, 19 nt, artificial
  Chemically synthesized
aacaggagagucauuguuu

SEQ ID NO: 20665 - RNA, 19 nt, artificial
  Chemically synthesized
ugugccuuauaaccugccu

SEQ ID NO: 20666 - RNA, 19 nt, artificial
  Chemically synthesized
gugaagcccaaugcaaaca

SEQ ID NO: 20667 - RNA, 19 nt, artificial
  Chemically synthesized
ccaugaugcguuaucuggg

SEQ ID NO: 20668 - RNA, 19 nt, artificial
  Chemically synthesized
augcaaacagaauugcuuu

SEQ ID NO: 20669 - RNA, 19 nt, artificial
  Chemically synthesized
aaugauguugccuuccacu

SEQ ID NO: 20670 - RNA, 19 nt, artificial
  Chemically synthesized
ccuuccacuuuaacccacg

SEQ ID NO: 20671 - RNA, 19 nt, artificial
  Chemically synthesized
uucauauaccaugauauaa

SEQ ID NO: 20672 - RNA, 19 nt, artificial
  Chemically synthesized
agugaaaauuuuuacauuc

SEQ ID NO: 20673 - RNA, 19 nt, artificial
  Chemically synthesized
cuuguugcaguacaaucau

SEQ ID NO: 20674 - RNA, 19 nt, artificial
  Chemically synthesized
cagaauugcuuuagauuuc

SEQ ID NO: 20675 - RNA, 19 nt, artificial
  Chemically synthesized
caaugaaaucagcaaacug

SEQ ID NO: 20676 - RNA, 19 nt, artificial
  Chemically synthesized
aagguugcagugaaugaug

SEQ ID NO: 20677 - RNA, 19 nt, artificial
  Chemically synthesized
aaacccaaacccucaagga

SEQ ID NO: 20678 - RNA, 19 nt, artificial
  Chemically synthesized
auauuacagugaauuaccu

SEQ ID NO: 20679 - RNA, 19 nt, artificial
  Chemically synthesized
uuaacccacgcuucaauga

SEQ ID NO: 20680 - RNA, 19 nt, artificial
  Chemically synthesized
uaacaauucugggcacggu

SEQ ID NO: 20681 - RNA, 19 nt, artificial
  Chemically synthesized
guucacugugagugaaaau

SEQ ID NO: 20682 - RNA, 19 nt, artificial
  Chemically synthesized
ccuacccaucuucuggaca

SEQ ID NO: 20683 - RNA, 19 nt, artificial
  Chemically synthesized
aacccaaacccucaaggau

SEQ ID NO: 20684 - RNA, 19 nt, artificial
  Chemically synthesized
ugauugugccuuauaaccu

SEQ ID NO: 20685 - RNA, 19 nt, artificial
  Chemically synthesized
ucaccagugcuucauauac

SEQ ID NO: 20686 - RNA, 19 nt, artificial
  Chemically synthesized
uguuugcaauacaaagcug

SEQ ID NO: 20687 - RNA, 19 nt, artificial
  Chemically synthesized
acaacaggagagucauugu

SEQ ID NO: 20688 - RNA, 19 nt, artificial
  Chemically synthesized
aauucugggcacggugaag

SEQ ID NO: 20689 - RNA, 19 nt, artificial
  Chemically synthesized
augagaacaacaggagagu

SEQ ID NO: 20690 - RNA, 19 nt, artificial
  Chemically synthesized
ucaauaucccucuuguaag

SEQ ID NO: 20691 - RNA, 19 nt, artificial
  Chemically synthesized
guguaaagguuucauguuc

SEQ ID NO: 20692 - RNA, 19 nt, artificial
  Chemically synthesized
guuugcaauacaaagcugg

SEQ ID NO: 20693 - RNA, 19 nt, artificial
  Chemically synthesized
caccagugcuucauauacc

SEQ ID NO: 20694 - RNA, 19 nt, artificial
  Chemically synthesized
uuagauuuccaaagaggga

SEQ ID NO: 20695 - RNA, 19 nt, artificial
  Chemically synthesized
gaaccugaccacuucaagg

SEQ ID NO: 20696 - RNA, 19 nt, artificial
  Chemically synthesized
ugaaugaugcucacuuguu

SEQ ID NO: 20697 - RNA, 19 nt, artificial
  Chemically synthesized
caggagagucauuguuugc

SEQ ID NO: 20698 - RNA, 19 nt, artificial
  Chemically synthesized
gugaaugaugcucacuugu

SEQ ID NO: 20699 - RNA, 19 nt, artificial
  Chemically synthesized
acugguugaaccugaccac

SEQ ID NO: 20700 - RNA, 19 nt, artificial
  Chemically synthesized
accuuacauguguaaaggu

SEQ ID NO: 20701 - RNA, 19 nt, artificial
  Chemically synthesized
uacauguguaaagguuuca

SEQ ID NO: 20702 - RNA, 19 nt, artificial
  Chemically synthesized
uuauaaccugccuuugccu

SEQ ID NO: 20703 - RNA, 19 nt, artificial
  Chemically synthesized
ugaaccugaccacuucaag

SEQ ID NO: 20704 - RNA, 19 nt, artificial
  Chemically synthesized
ugugagugaaaauuuuuac

SEQ ID NO: 20705 - RNA, 19 nt, artificial
  Chemically synthesized
cugguugaaccugaccacu

SEQ ID NO: 20706 - RNA, 19 nt, artificial
  Chemically synthesized
aaucuaaaccuuacaugug

SEQ ID NO: 20707 - RNA, 19 nt, artificial
  Chemically synthesized
uugcagugaaugaugcuca

SEQ ID NO: 20708 - RNA, 19 nt, artificial
  Chemically synthesized
cuuaauaaauauuacagug

SEQ ID NO: 20709 - RNA, 19 nt, artificial
  Chemically synthesized
aaaaaacucaaugaaauca

SEQ ID NO: 20710 - RNA, 19 nt, artificial
  Chemically synthesized
uaaaaaacucaaugaaauc

SEQ ID NO: 20711 - RNA, 19 nt, artificial
  Chemically synthesized
auucaaaauacaaguacug

SEQ ID NO: 20712 - RNA, 19 nt, artificial
  Chemically synthesized
uccaaagagggaaugaugu

SEQ ID NO: 20713 - RNA, 19 nt, artificial
  Chemically synthesized
ucaaugaaaucagcaaacu

SEQ ID NO: 20714 - RNA, 19 nt, artificial
  Chemically synthesized
auguucacugugagugaaa

SEQ ID NO: 20715 - RNA, 19 nt, artificial
  Chemically synthesized
cuccaugaugcguuaucug

SEQ ID NO: 20716 - RNA, 19 nt, artificial
  Chemically synthesized
ccuuauaaccugccuuugc

SEQ ID NO: 20717 - RNA, 19 nt, artificial
  Chemically synthesized
cucuuguaagucaucuacu

SEQ ID NO: 20718 - RNA, 19 nt, artificial
  Chemically synthesized
gaagggaagaaagacaguc

SEQ ID NO: 20719 - RNA, 19 nt, artificial
  Chemically synthesized
gucuggaaacccaaacccu

SEQ ID NO: 20720 - RNA, 19 nt, artificial
  Chemically synthesized
aaauggcagacaauuuuuc

SEQ ID NO: 20721 - RNA, 19 nt, artificial
  Chemically synthesized
auuuccaaagagggaauga

SEQ ID NO: 20722 - RNA, 19 nt, artificial
  Chemically synthesized
ucuucuggacagccaagug

SEQ ID NO: 20723 - RNA, 19 nt, artificial
  Chemically synthesized
uagauuuccaaagagggaa

SEQ ID NO: 20724 - RNA, 19 nt, artificial
  Chemically synthesized
guuaucugggucuggaaac

SEQ ID NO: 20725 - RNA, 19 nt, artificial
  Chemically synthesized
uacugguugaaccugacca

SEQ ID NO: 20726 - RNA, 19 nt, artificial
  Chemically synthesized
aaaauacaaguacugguug

SEQ ID NO: 20727 - RNA, 19 nt, artificial
  Chemically synthesized
aagggaagaaagacagucg

SEQ ID NO: 20728 - RNA, 19 nt, artificial
  Chemically synthesized
cuucaaugagaacaacagg

SEQ ID NO: 20729 - RNA, 19 nt, artificial
  Chemically synthesized
auacaaguacugguugaac

SEQ ID NO: 20730 - RNA, 19 nt, artificial
  Chemically synthesized
aaacucaaugaaaucagca

SEQ ID NO: 20731 - RNA, 19 nt, artificial
  Chemically synthesized
cugaccacuucaagguugc

SEQ ID NO: 20732 - RNA, 19 nt, artificial
  Chemically synthesized
aaucaucggguuaaaaaac

SEQ ID NO: 20733 - RNA, 19 nt, artificial
  Chemically synthesized
gaugcguuaucugggucug

SEQ ID NO: 20734 - RNA, 19 nt, artificial
  Chemically synthesized
aaaacucaaugaaaucagc

SEQ ID NO: 20735 - RNA, 19 nt, artificial
  Chemically synthesized
guugcaguacaaucaucgg

SEQ ID NO: 20736 - RNA, 19 nt, artificial
  Chemically synthesized
aaauauuacagugaauuac

SEQ ID NO: 20737 - RNA, 19 nt, artificial
  Chemically synthesized
cuuuagauuuccaaagagg

SEQ ID NO: 20738 - RNA, 19 nt, artificial
  Chemically synthesized
uuuccaaagagggaaugau

SEQ ID NO: 20739 - RNA, 19 nt, artificial
  Chemically synthesized
cacuucaagguugcaguga

SEQ ID NO: 20740 - RNA, 19 nt, artificial
  Chemically synthesized
aaaaacucaaugaaaucag

SEQ ID NO: 20741 - RNA, 19 nt, artificial
  Chemically synthesized
aaugagaacaacaggagag

SEQ ID NO: 20742 - RNA, 19 nt, artificial
  Chemically synthesized
cugauugugccuuauaacc

SEQ ID NO: 20743 - RNA, 19 nt, artificial
  Chemically synthesized
aacaauucugggcacggug

SEQ ID NO: 20744 - RNA, 19 nt, artificial
  Chemically synthesized
augauguugccuuccacuu

SEQ ID NO: 20745 - RNA, 19 nt, artificial
  Chemically synthesized
gaaagacagucgguuuucc

SEQ ID NO: 20746 - RNA, 19 nt, artificial
  Chemically synthesized
aagcuggauaauaacuggg

SEQ ID NO: 20747 - RNA, 19 nt, artificial
  Chemically synthesized
uuacauucaucaauauccc

SEQ ID NO: 20748 - RNA, 19 nt, artificial
  Chemically synthesized
aauggcagacaauuuuucg

SEQ ID NO: 20749 - RNA, 19 nt, artificial
  Chemically synthesized
augaaaucagcaaacuggg

SEQ ID NO: 20750 - RNA, 19 nt, artificial
  Chemically synthesized
uucccauuugaaaguggga

SEQ ID NO: 20751 - RNA, 19 nt, artificial
  Chemically synthesized
uguugccuuccacuuuaac

SEQ ID NO: 20752 - RNA, 19 nt, artificial
  Chemically synthesized
cuuauaaccugccuuugcc

SEQ ID NO: 20753 - RNA, 19 nt, artificial
  Chemically synthesized
uggugacauagaccucacc

SEQ ID NO: 20754 - RNA, 19 nt, artificial
  Chemically synthesized
cuuccacuuuaacccacgc

SEQ ID NO: 20755 - RNA, 19 nt, artificial
  Chemically synthesized
aagagggaaugauguugcc

SEQ ID NO: 20756 - RNA, 19 nt, artificial
  Chemically synthesized
aucaucggguuaaaaaacu

SEQ ID NO: 20757 - RNA, 19 nt, artificial
  Chemically synthesized
agguugcagugaaugaugc

SEQ ID NO: 20758 - RNA, 19 nt, artificial
  Chemically synthesized
ucuggaaacccaaacccuc

SEQ ID NO: 20759 - RNA, 19 nt, artificial
  Chemically synthesized
aaagguuucauguucacug

SEQ ID NO: 20760 - RNA, 19 nt, artificial
  Chemically synthesized
aaacccucaaggauggccu

SEQ ID NO: 20761 - RNA, 19 nt, artificial
  Chemically synthesized
augauauaaucugaaaggg

SEQ ID NO: 20762 - RNA, 19 nt, artificial
  Chemically synthesized
uuccaaagagggaaugaug

SEQ ID NO: 20763 - RNA, 19 nt, artificial
  Chemically synthesized
agagggaaugauguugccu

SEQ ID NO: 20764 - RNA, 19 nt, artificial
  Chemically synthesized
uacauucaucaauaucccu

SEQ ID NO: 20765 - RNA, 19 nt, artificial
  Chemically synthesized
aaucagcaaacugggaauu

SEQ ID NO: 20766 - RNA, 19 nt, artificial
  Chemically synthesized
guugccuuccacuuuaacc

SEQ ID NO: 20767 - RNA, 19 nt, artificial
  Chemically synthesized
ugaaagugggaaaccauuc

SEQ ID NO: 20768 - RNA, 19 nt, artificial
  Chemically synthesized
aaagagggaaugauguugc

SEQ ID NO: 20769 - RNA, 19 nt, artificial
  Chemically synthesized
gcugauaacaauucugggc

SEQ ID NO: 20770 - RNA, 19 nt, artificial
  Chemically synthesized
uuucauguucacugugagu

SEQ ID NO: 20771 - RNA, 19 nt, artificial
  Chemically synthesized
agguuucauguucacugug

SEQ ID NO: 20772 - RNA, 19 nt, artificial
  Chemically synthesized
aauauuacagugaauuacc

SEQ ID NO: 20773 - RNA, 19 nt, artificial
  Chemically synthesized
aucagcaaacugggaauuu

SEQ ID NO: 20774 - RNA, 19 nt, artificial
  Chemically synthesized
uuguuugcaauacaaagcu

SEQ ID NO: 20775 - RNA, 19 nt, artificial
  Chemically synthesized
uacccaucuucuggacagc

SEQ ID NO: 20776 - RNA, 19 nt, artificial
  Chemically synthesized
uucuggugacauagaccuc

SEQ ID NO: 20777 - RNA, 19 nt, artificial
  Chemically synthesized
uuacauguguaaagguuuc

SEQ ID NO: 20778 - RNA, 19 nt, artificial
  Chemically synthesized
acauagaccucaccagugc

SEQ ID NO: 20779 - RNA, 19 nt, artificial
  Chemically synthesized
acccaaacccucaaggaug

SEQ ID NO: 20780 - RNA, 19 nt, artificial
  Chemically synthesized
uaaagguuucauguucacu

SEQ ID NO: 20781 - RNA, 19 nt, artificial
  Chemically synthesized
uuuaacccacgcuucaaug

SEQ ID NO: 20782 - RNA, 19 nt, artificial
  Chemically synthesized
aaccuuacauguguaaagg

SEQ ID NO: 20783 - RNA, 19 nt, artificial
  Chemically synthesized
cacuuguugcaguacaauc

SEQ ID NO: 20784 - RNA, 19 nt, artificial
  Chemically synthesized
gaaacccaaacccucaagg

SEQ ID NO: 20785 - RNA, 19 nt, artificial
  Chemically synthesized
aucuucuggacagccaagu

SEQ ID NO: 20786 - RNA, 19 nt, artificial
  Chemically synthesized
uaacccacgcuucaaugag

SEQ ID NO: 20787 - RNA, 19 nt, artificial
  Chemically synthesized
gauaacaauucugggcacg

SEQ ID NO: 20788 - RNA, 19 nt, artificial
  Chemically synthesized
caaguacugguugaaccug

SEQ ID NO: 20789 - RNA, 19 nt, artificial
  Chemically synthesized
uacagugaauuaccugucu

SEQ ID NO: 20790 - RNA, 19 nt, artificial
  Chemically synthesized
uucaaaauacaaguacugg

SEQ ID NO: 20791 - RNA, 19 nt, artificial
  Chemically synthesized
uguugcaguacaaucaucg

SEQ ID NO: 20792 - RNA, 19 nt, artificial
  Chemically synthesized
aaugaaaucagcaaacugg

SEQ ID NO: 20793 - RNA, 19 nt, artificial
  Chemically synthesized
aaccugaccacuucaaggu

SEQ ID NO: 20794 - RNA, 19 nt, artificial
  Chemically synthesized
aucccucuuguaagucauc

SEQ ID NO: 20795 - RNA, 19 nt, artificial
  Chemically synthesized
gauuuccaaagagggaaug

SEQ ID NO: 20796 - RNA, 19 nt, artificial
  Chemically synthesized
uacaaguacugguugaacc

SEQ ID NO: 20797 - RNA, 19 nt, artificial
  Chemically synthesized
augcugauaacaauucugg

SEQ ID NO: 20798 - RNA, 19 nt, artificial
  Chemically synthesized
aaacugggaauuucuggug

SEQ ID NO: 20799 - RNA, 19 nt, artificial
  Chemically synthesized
gggaaugauguugccuucc

SEQ ID NO: 20800 - RNA, 19 nt, artificial
  Chemically synthesized
augcguuaucugggucugg

SEQ ID NO: 20801 - RNA, 19 nt, artificial
  Chemically synthesized
uuucuggugacauagaccu

SEQ ID NO: 20802 - RNA, 19 nt, artificial
  Chemically synthesized
uuuagauuuccaaagaggg

SEQ ID NO: 20803 - RNA, 19 nt, artificial
  Chemically synthesized
agaaagacagucgguuuuc

SEQ ID NO: 20804 - RNA, 19 nt, artificial
  Chemically synthesized
ugaugcucacuuguugcag

SEQ ID NO: 20805 - RNA, 19 nt, artificial
  Chemically synthesized
auuacagugaauuaccugu

SEQ ID NO: 20806 - RNA, 19 nt, artificial
  Chemically synthesized
auugugccuuauaaccugc

SEQ ID NO: 20807 - RNA, 19 nt, artificial
  Chemically synthesized
guacugguugaaccugacc

SEQ ID NO: 20808 - RNA, 19 nt, artificial
  Chemically synthesized
auuucuggugacauagacc

SEQ ID NO: 20809 - RNA, 19 nt, artificial
  Chemically synthesized
augaugcucacuuguugca

SEQ ID NO: 20810 - RNA, 19 nt, artificial
  Chemically synthesized
uugcuuuagauuuccaaag

SEQ ID NO: 20811 - RNA, 19 nt, artificial
  Chemically synthesized
gaccacuucaagguugcag

SEQ ID NO: 20812 - RNA, 19 nt, artificial
  Chemically synthesized
auauaccaugauauaaucu

SEQ ID NO: 20813 - RNA, 19 nt, artificial
  Chemically synthesized
uuauccuggacaggcaccu

SEQ ID NO: 20814 - RNA, 19 nt, artificial
  Chemically synthesized
guugcagugaaugaugcuc

SEQ ID NO: 20815 - RNA, 19 nt, artificial
  Chemically synthesized
auaacaauucugggcacgg

SEQ ID NO: 20816 - RNA, 19 nt, artificial
  Chemically synthesized
ugagaacaacaggagaguc

SEQ ID NO: 20817 - RNA, 19 nt, artificial
  Chemically synthesized
aaagacagucgguuuuccc

SEQ ID NO: 20818 - RNA, 19 nt, artificial
  Chemically synthesized
uucaagguugcagugaaug

SEQ ID NO: 20819 - RNA, 19 nt, artificial
  Chemically synthesized
uuuacauucaucaauaucc

SEQ ID NO: 20820 - RNA, 19 nt, artificial
  Chemically synthesized
uauaaccugccuuugccug

SEQ ID NO: 20821 - RNA, 19 nt, artificial
  Chemically synthesized
aaugaugcucacuuguugc

SEQ ID NO: 20822 - RNA, 19 nt, artificial
  Chemically synthesized
uccaugaugcguuaucugg

SEQ ID NO: 20823 - RNA, 19 nt, artificial
  Chemically synthesized
auuguuugcaauacaaagc

SEQ ID NO: 20824 - RNA, 19 nt, artificial
  Chemically synthesized
cauuugaaagugggaaacc

SEQ ID NO: 20825 - RNA, 19 nt, artificial
  Chemically synthesized
uugccuuccacuuuaaccc

SEQ ID NO: 20826 - RNA, 19 nt, artificial
  Chemically synthesized
uucaucaauaucccucuug

SEQ ID NO: 20827 - RNA, 19 nt, artificial
  Chemically synthesized
uauaccaugauauaaucug

SEQ ID NO: 20828 - RNA, 19 nt, artificial
  Chemically synthesized
uauuacagugaauuaccug

SEQ ID NO: 20829 - RNA, 19 nt, artificial
  Chemically synthesized
augaugcguuaucuggguc

SEQ ID NO: 20830 - RNA, 19 nt, artificial
  Chemically synthesized
uuccacuuuaacccacgcu

SEQ ID NO: 20831 - RNA, 19 nt, artificial
  Chemically synthesized
uagaccucaccagugcuuc

SEQ ID NO: 20832 - RNA, 19 nt, artificial
  Chemically synthesized
uugugccuuauaaccugcc

SEQ ID NO: 20833 - RNA, 19 nt, artificial
  Chemically synthesized
uuguugcaguacaaucauc

SEQ ID NO: 20834 - RNA, 19 nt, artificial
  Chemically synthesized
guuuucccauuugaaagug

SEQ ID NO: 20835 - RNA, 19 nt, artificial
  Chemically synthesized
auaaccugccuuugccugg

SEQ ID NO: 20836 - RNA, 19 nt, artificial
  Chemically synthesized
uuuuacauucaucaauauc

SEQ ID NO: 20837 - RNA, 19 nt, artificial
  Chemically synthesized
uuucccauuugaaaguggg

SEQ ID NO: 20838 - RNA, 19 nt, artificial
  Chemically synthesized
uuaucugggucuggaaacc

SEQ ID NO: 20839 - RNA, 19 nt, artificial
  Chemically synthesized
ugcucacuuguugcaguac

SEQ ID NO: 20840 - RNA, 19 nt, artificial
  Chemically synthesized
uugcaguacaaucaucggg

SEQ ID NO: 20841 - RNA, 19 nt, artificial
  Chemically synthesized
aacaacaggagagucauug

SEQ ID NO: 20842 - RNA, 19 nt, artificial
  Chemically synthesized
uuuucccauuugaaagugg

SEQ ID NO: 20843 - RNA, 19 nt, artificial
  Chemically synthesized
aauaucccucuuguaaguc

SEQ ID NO: 20844 - RNA, 19 nt, artificial
  Chemically synthesized
uuacagugaauuaccuguc

SEQ ID NO: 20845 - RNA, 19 nt, artificial
  Chemically synthesized
uaucugggucuggaaaccc

SEQ ID NO: 20846 - RNA, 19 nt, artificial
  Chemically synthesized
uucauguucacugugagug

SEQ ID NO: 20847 - RNA, 19 nt, artificial
  Chemically synthesized
uuugcauugggcuucaccg

SEQ ID NO: 20848 - RNA, 19 nt, artificial
  Chemically synthesized
uugcaaacaaugacucucc

SEQ ID NO: 20849 - RNA, 19 nt, artificial
  Chemically synthesized
uuauccagcuuuguauugc

SEQ ID NO: 20850 - RNA, 19 nt, artificial
  Chemically synthesized
uuauuauccagcuuuguau

SEQ ID NO: 20851 - RNA, 19 nt, artificial
  Chemically synthesized
ucuccuguuguucucauug

SEQ ID NO: 20852 - RNA, 19 nt, artificial
  Chemically synthesized
uuuugaaugguuucccacu

SEQ ID NO: 20853 - RNA, 19 nt, artificial
  Chemically synthesized
uguauuuugaaugguuucc

SEQ ID NO: 20854 - RNA, 19 nt, artificial
  Chemically synthesized
uacaagagggauauugaug

SEQ ID NO: 20855 - RNA, 19 nt, artificial
  Chemically synthesized
uucauugaguuuuuuaacc

SEQ ID NO: 20856 - RNA, 19 nt, artificial
  Chemically synthesized
uuuaacccgaugauuguac

SEQ ID NO: 20857 - RNA, 19 nt, artificial
  Chemically synthesized
uuguauuuugaaugguuuc

SEQ ID NO: 20858 - RNA, 19 nt, artificial
  Chemically synthesized
uuuauuaaguagaugacuu

SEQ ID NO: 20859 - RNA, 19 nt, artificial
  Chemically synthesized
uuauaaggcacaaucagug

SEQ ID NO: 20860 - RNA, 19 nt, artificial
  Chemically synthesized
aguacuuguauuuugaaug

SEQ ID NO: 20861 - RNA, 19 nt, artificial
  Chemically synthesized
uuucauugaguuuuuuaac

SEQ ID NO: 20862 - RNA, 19 nt, artificial
  Chemically synthesized
ucuguuugcauugggcuuc

SEQ ID NO: 20863 - RNA, 19 nt, artificial
  Chemically synthesized
acugucuuucuucccuucc

SEQ ID NO: 20864 - RNA, 19 nt, artificial
  Chemically synthesized
acauguaagguuuagauuc

SEQ ID NO: 20865 - RNA, 19 nt, artificial
  Chemically synthesized
aauguaaaaauuuucacuc

SEQ ID NO: 20866 - RNA, 19 nt, artificial
  Chemically synthesized
uaaaguggaaggcaacauc

SEQ ID NO: 20867 - RNA, 19 nt, artificial
  Chemically synthesized
uuucagauuauaucauggu

SEQ ID NO: 20868 - RNA, 19 nt, artificial
  Chemically synthesized
auaugaagcacuggugagg

SEQ ID NO: 20869 - RNA, 19 nt, artificial
  Chemically synthesized
uaaaaauuuucacucacag

SEQ ID NO: 20870 - RNA, 19 nt, artificial
  Chemically synthesized
uuaucagcaugcgaggcac

SEQ ID NO: 20871 - RNA, 19 nt, artificial
  Chemically synthesized
uuuggguuuccagacccag

SEQ ID NO: 20872 - RNA, 19 nt, artificial
  Chemically synthesized
aaaccgacugucuuucuuc

SEQ ID NO: 20873 - RNA, 19 nt, artificial
  Chemically synthesized
uauaucaugguauaugaag

SEQ ID NO: 20874 - RNA, 19 nt, artificial
  Chemically synthesized
ucaaccaguacuuguauuu

SEQ ID NO: 20875 - RNA, 19 nt, artificial
  Chemically synthesized
uuuguauugcaaacaauga

SEQ ID NO: 20876 - RNA, 19 nt, artificial
  Chemically synthesized
guuugcauugggcuucacc

SEQ ID NO: 20877 - RNA, 19 nt, artificial
  Chemically synthesized
ucagauuauaucaugguau

SEQ ID NO: 20878 - RNA, 19 nt, artificial
  Chemically synthesized
ucuaaagcaauucuguuug

SEQ ID NO: 20879 - RNA, 19 nt, artificial
  Chemically synthesized
ugaaugguuucccacuuuc

SEQ ID NO: 20880 - RNA, 19 nt, artificial
  Chemically synthesized
uauuauccagcuuuguauu

SEQ ID NO: 20881 - RNA, 19 nt, artificial
  Chemically synthesized
agaauuguuaucagcaugc

SEQ ID NO: 20882 - RNA, 19 nt, artificial
  Chemically synthesized
uucuguuugcauugggcuu

SEQ ID NO: 20883 - RNA, 19 nt, artificial
  Chemically synthesized
ugaagcguggguuaaagug

SEQ ID NO: 20884 - RNA, 19 nt, artificial
  Chemically synthesized
aacaucauucccucuuugg

SEQ ID NO: 20885 - RNA, 19 nt, artificial
  Chemically synthesized
uuggguuuccagacccaga

SEQ ID NO: 20886 - RNA, 19 nt, artificial
  Chemically synthesized
cuuuguauugcaaacaaug

SEQ ID NO: 20887 - RNA, 19 nt, artificial
  Chemically synthesized
uugagacagguaauucacu

SEQ ID NO: 20888 - RNA, 19 nt, artificial
  Chemically synthesized
ucauucacugcaaccuuga

SEQ ID NO: 20889 - RNA, 19 nt, artificial
  Chemically synthesized
guauuuugaaugguuuccc

SEQ ID NO: 20890 - RNA, 19 nt, artificial
  Chemically synthesized
ucagguucaaccaguacuu

SEQ ID NO: 20891 - RNA, 19 nt, artificial
  Chemically synthesized
auaagcuccaggugcucca

SEQ ID NO: 20892 - RNA, 19 nt, artificial
  Chemically synthesized
agagggauauugaugaaug

SEQ ID NO: 20893 - RNA, 19 nt, artificial
  Chemically synthesized
ucaugguauaugaagcacu

SEQ ID NO: 20894 - RNA, 19 nt, artificial
  Chemically synthesized
uucaaccaguacuuguauu

SEQ ID NO: 20895 - RNA, 19 nt, artificial
  Chemically synthesized
ugaauguaaaaauuuucac

SEQ ID NO: 20896 - RNA, 19 nt, artificial
  Chemically synthesized
uucagauuauaucauggua

SEQ ID NO: 20897 - RNA, 19 nt, artificial
  Chemically synthesized
ugaggguuuggguuuccag

SEQ ID NO: 20898 - RNA, 19 nt, artificial
  Chemically synthesized
auuaaguagaugacuuaca

SEQ ID NO: 20899 - RNA, 19 nt, artificial
  Chemically synthesized
uguaaaaauuuucacucac

SEQ ID NO: 20900 - RNA, 19 nt, artificial
  Chemically synthesized
auuauaucaugguauauga

SEQ ID NO: 20901 - RNA, 19 nt, artificial
  Chemically synthesized
uugaagcguggguuaaagu

SEQ ID NO: 20902 - RNA, 19 nt, artificial
  Chemically synthesized
agaaauucccaguuugcug

SEQ ID NO: 20903 - RNA, 19 nt, artificial
  Chemically synthesized
uggaaaucuaaagcaauuc

SEQ ID NO: 20904 - RNA, 19 nt, artificial
  Chemically synthesized
aauucuguuugcauugggc

SEQ ID NO: 20905 - RNA, 19 nt, artificial
  Chemically synthesized
auuuauuaaguagaugacu

SEQ ID NO: 20906 - RNA, 19 nt, artificial
  Chemically synthesized
ugaguuuuuuaacccgaug

SEQ ID NO: 20907 - RNA, 19 nt, artificial
  Chemically synthesized
uccagcuuuguauugcaaa

SEQ ID NO: 20908 - RNA, 19 nt, artificial
  Chemically synthesized
cagguuauaaggcacaauc

SEQ ID NO: 20909 - RNA, 19 nt, artificial
  Chemically synthesized
acuuacaagagggauauug

SEQ ID NO: 20910 - RNA, 19 nt, artificial
  Chemically synthesized
acuggugaggucuauguca

SEQ ID NO: 20911 - RNA, 19 nt, artificial
  Chemically synthesized
acccagauaacgcaucaug

SEQ ID NO: 20912 - RNA, 19 nt, artificial
  Chemically synthesized
gucagguucaaccaguacu

SEQ ID NO: 20913 - RNA, 19 nt, artificial
  Chemically synthesized
uauuaaguagaugacuuac

SEQ ID NO: 20914 - RNA, 19 nt, artificial
  Chemically synthesized
accagaaauucccaguuug

SEQ ID NO: 20915 - RNA, 19 nt, artificial
  Chemically synthesized
aaugggaaaaccgacuguc

SEQ ID NO: 20916 - RNA, 19 nt, artificial
  Chemically synthesized
ugaagcacuggugaggucu

SEQ ID NO: 20917 - RNA, 19 nt, artificial
  Chemically synthesized
ucccaguuugcugauuuca

SEQ ID NO: 20918 - RNA, 19 nt, artificial
  Chemically synthesized
ccaguuauuauccagcuuu

SEQ ID NO: 20919 - RNA, 19 nt, artificial
  Chemically synthesized
uuacaagagggauauugau

SEQ ID NO: 20920 - RNA, 19 nt, artificial
  Chemically synthesized
uaaggcacaaucaguggcc

SEQ ID NO: 20921 - RNA, 19 nt, artificial
  Chemically synthesized
ucucauugaagcguggguu

SEQ ID NO: 20922 - RNA, 19 nt, artificial
  Chemically synthesized
gauuauaucaugguauaug

SEQ ID NO: 20923 - RNA, 19 nt, artificial
  Chemically synthesized
guuauuauccagcuuugua

SEQ ID NO: 20924 - RNA, 19 nt, artificial
  Chemically synthesized
gaugaauguaaaaauuuuc

SEQ ID NO: 20925 - RNA, 19 nt, artificial
  Chemically synthesized
ucaccagaaauucccaguu

SEQ ID NO: 20926 - RNA, 19 nt, artificial
  Chemically synthesized
uggugaggucuaugucacc

SEQ ID NO: 20927 - RNA, 19 nt, artificial
  Chemically synthesized
caaacaaugacucuccugu

SEQ ID NO: 20928 - RNA, 19 nt, artificial
  Chemically synthesized
augacuuacaagagggaua

SEQ ID NO: 20929 - RNA, 19 nt, artificial
  Chemically synthesized
acaagagggauauugauga

SEQ ID NO: 20930 - RNA, 19 nt, artificial
  Chemically synthesized
uuuggaaaucuaaagcaau

SEQ ID NO: 20931 - RNA, 19 nt, artificial
  Chemically synthesized
ucaccgugcccagaauugu

SEQ ID NO: 20932 - RNA, 19 nt, artificial
  Chemically synthesized
aaugacucuccuguuguuc

SEQ ID NO: 20933 - RNA, 19 nt, artificial
  Chemically synthesized
uauuuauuaaguagaugac

SEQ ID NO: 20934 - RNA, 19 nt, artificial
  Chemically synthesized
aaaccuuuacacauguaag

SEQ ID NO: 20935 - RNA, 19 nt, artificial
  Chemically synthesized
acacauguaagguuuagau

SEQ ID NO: 20936 - RNA, 19 nt, artificial
  Chemically synthesized
uuuuaacccgaugauugua

SEQ ID NO: 20937 - RNA, 19 nt, artificial
  Chemically synthesized
acugcaacaagugagcauc

SEQ ID NO: 20938 - RNA, 19 nt, artificial
  Chemically synthesized
aaugguuucccacuuucaa

SEQ ID NO: 20939 - RNA, 19 nt, artificial
  Chemically synthesized
caugaaaccuuuacacaug

SEQ ID NO: 20940 - RNA, 19 nt, artificial
  Chemically synthesized
aaaaauugucugccauuuu

SEQ ID NO: 20941 - RNA, 19 nt, artificial
  Chemically synthesized
cuuguauuuugaaugguuu

SEQ ID NO: 20942 - RNA, 19 nt, artificial
  Chemically synthesized
uuaaguagaugacuuacaa

SEQ ID NO: 20943 - RNA, 19 nt, artificial
  Chemically synthesized
uuggaaaucuaaagcaauu

SEQ ID NO: 20944 - RNA, 19 nt, artificial
  Chemically synthesized
ugaggucuaugucaccaga

SEQ ID NO: 20945 - RNA, 19 nt, artificial
  Chemically synthesized
acuuguauuuugaaugguu

SEQ ID NO: 20946 - RNA, 19 nt, artificial
  Chemically synthesized
uuauuaaguagaugacuua

SEQ ID NO: 20947 - RNA, 19 nt, artificial
  Chemically synthesized
gucuaugucaccagaaauu

SEQ ID NO: 20948 - RNA, 19 nt, artificial
  Chemically synthesized
uauaaggcacaaucagugg

SEQ ID NO: 20949 - RNA, 19 nt, artificial
  Chemically synthesized
ugauuguacugcaacaagu

SEQ ID NO: 20950 - RNA, 19 nt, artificial
  Chemically synthesized
ugcaaccuugaagugguca

SEQ ID NO: 20951 - RNA, 19 nt, artificial
  Chemically synthesized
uauuuugaaugguuuccca

SEQ ID NO: 20952 - RNA, 19 nt, artificial
  Chemically synthesized
caacaagugagcaucauuc

SEQ ID NO: 20953 - RNA, 19 nt, artificial
  Chemically synthesized
agauaacgcaucauggagc

SEQ ID NO: 20954 - RNA, 19 nt, artificial
  Chemically synthesized
uaaguagaugacuuacaag

SEQ ID NO: 20955 - RNA, 19 nt, artificial
  Chemically synthesized
aucuaaagcaauucuguuu

SEQ ID NO: 20956 - RNA, 19 nt, artificial
  Chemically synthesized
agcaucauucacugcaacc

SEQ ID NO: 20957 - RNA, 19 nt, artificial
  Chemically synthesized
ugaaguggucagguucaac

SEQ ID NO: 20958 - RNA, 19 nt, artificial
  Chemically synthesized
acaugaaaccuuuacacau

SEQ ID NO: 20959 - RNA, 19 nt, artificial
  Chemically synthesized
guuauaaggcacaaucagu

SEQ ID NO: 20960 - RNA, 19 nt, artificial
  Chemically synthesized
aaucuaaagcaauucuguu

SEQ ID NO: 20961 - RNA, 19 nt, artificial
  Chemically synthesized
caguuauuauccagcuuug

SEQ ID NO: 20962 - RNA, 19 nt, artificial
  Chemically synthesized
cucacagugaacaugaaac

SEQ ID NO: 20963 - RNA, 19 nt, artificial
  Chemically synthesized
aaaucuaaagcaauucugu

SEQ ID NO: 20964 - RNA, 19 nt, artificial
  Chemically synthesized
uccuguuguucucauugaa

SEQ ID NO: 20965 - RNA, 19 nt, artificial
  Chemically synthesized
aagcaauucuguuugcauu

SEQ ID NO: 20966 - RNA, 19 nt, artificial
  Chemically synthesized
ugggaaaaccgacugucuu

SEQ ID NO: 20967 - RNA, 19 nt, artificial
  Chemically synthesized
aguuauuauccagcuuugu

SEQ ID NO: 20968 - RNA, 19 nt, artificial
  Chemically synthesized
aagagggauauugaugaau

SEQ ID NO: 20969 - RNA, 19 nt, artificial
  Chemically synthesized
uuuacacauguaagguuua

SEQ ID NO: 20970 - RNA, 19 nt, artificial
  Chemically synthesized
uggguuaaaguggaaggca

SEQ ID NO: 20971 - RNA, 19 nt, artificial
  Chemically synthesized
cccagaauuguuaucagca

SEQ ID NO: 20972 - RNA, 19 nt, artificial
  Chemically synthesized
agcaauucuguuugcauug

SEQ ID NO: 20973 - RNA, 19 nt, artificial
  Chemically synthesized
uacuuguauuuugaauggu

SEQ ID NO: 20974 - RNA, 19 nt, artificial
  Chemically synthesized
auguaaaaauuuucacuca

SEQ ID NO: 20975 - RNA, 19 nt, artificial
  Chemically synthesized
cagaauuguuaucagcaug

SEQ ID NO: 20976 - RNA, 19 nt, artificial
  Chemically synthesized
ugacuuacaagagggauau

SEQ ID NO: 20977 - RNA, 19 nt, artificial
  Chemically synthesized
cuuggcuguccagaagaug

SEQ ID NO: 20978 - RNA, 19 nt, artificial
  Chemically synthesized
cacuggugaggucuauguc

SEQ ID NO: 20979 - RNA, 19 nt, artificial
  Chemically synthesized
gucaccagaaauucccagu

SEQ ID NO: 20980 - RNA, 19 nt, artificial
  Chemically synthesized
ccagaaauucccaguuugc

SEQ ID NO: 20981 - RNA, 19 nt, artificial
  Chemically synthesized
ugacucuccuguuguucuc

SEQ ID NO: 20982 - RNA, 19 nt, artificial
  Chemically synthesized
acagugaacaugaaaccuu

SEQ ID NO: 20983 - RNA, 19 nt, artificial
  Chemically synthesized
aaaaauuuucacucacagu

SEQ ID NO: 20984 - RNA, 19 nt, artificial
  Chemically synthesized
aaaguggaaggcaacauca

SEQ ID NO: 20985 - RNA, 19 nt, artificial
  Chemically synthesized
ugguuucccacuuucaaau

SEQ ID NO: 20986 - RNA, 19 nt, artificial
  Chemically synthesized
agguucaaccaguacuugu

SEQ ID NO: 20987 - RNA, 19 nt, artificial
  Chemically synthesized
caacaucauucccucuuug

SEQ ID NO: 20988 - RNA, 19 nt, artificial
  Chemically synthesized
ccgacugucuuucuucccu

SEQ ID NO: 20989 - RNA, 19 nt, artificial
  Chemically synthesized
ccuuucagauuauaucaug

SEQ ID NO: 20990 - RNA, 19 nt, artificial
  Chemically synthesized
augguuucccacuuucaaa

SEQ ID NO: 20991 - RNA, 19 nt, artificial
  Chemically synthesized
cagaaauucccaguuugcu

SEQ ID NO: 20992 - RNA, 19 nt, artificial
  Chemically synthesized
agcacuggugaggucuaug

SEQ ID NO: 20993 - RNA, 19 nt, artificial
  Chemically synthesized
ucacucacagugaacauga

SEQ ID NO: 20994 - RNA, 19 nt, artificial
  Chemically synthesized
uggguuuccagacccagau

SEQ ID NO: 20995 - RNA, 19 nt, artificial
  Chemically synthesized
aaacaaugacucuccuguu

SEQ ID NO: 20996 - RNA, 19 nt, artificial
  Chemically synthesized
aggcagguuauaaggcaca

SEQ ID NO: 20997 - RNA, 19 nt, artificial
  Chemically synthesized
uguuugcauugggcuucac

SEQ ID NO: 20998 - RNA, 19 nt, artificial
  Chemically synthesized
cccagauaacgcaucaugg

SEQ ID NO: 20999 - RNA, 19 nt, artificial
  Chemically synthesized
aaagcaauucuguuugcau

SEQ ID NO: 21000 - RNA, 19 nt, artificial
  Chemically synthesized
aguggaaggcaacaucauu

SEQ ID NO: 21001 - RNA, 19 nt, artificial
  Chemically synthesized
cguggguuaaaguggaagg

SEQ ID NO: 21002 - RNA, 19 nt, artificial
  Chemically synthesized
uuauaucaugguauaugaa

SEQ ID NO: 21003 - RNA, 19 nt, artificial
  Chemically synthesized
gaauguaaaaauuuucacu

SEQ ID NO: 21004 - RNA, 19 nt, artificial
  Chemically synthesized
augauuguacugcaacaag

SEQ ID NO: 21005 - RNA, 19 nt, artificial
  Chemically synthesized
gaaaucuaaagcaauucug

SEQ ID NO: 21006 - RNA, 19 nt, artificial
  Chemically synthesized
caguuugcugauuucauug

SEQ ID NO: 21007 - RNA, 19 nt, artificial
  Chemically synthesized
caucauucacugcaaccuu

SEQ ID NO: 21008 - RNA, 19 nt, artificial
  Chemically synthesized
uccuugaggguuuggguuu

SEQ ID NO: 21009 - RNA, 19 nt, artificial
  Chemically synthesized
agguaauucacuguaauau

SEQ ID NO: 21010 - RNA, 19 nt, artificial
  Chemically synthesized
ucauugaagcguggguuaa

SEQ ID NO: 21011 - RNA, 19 nt, artificial
  Chemically synthesized
accgugcccagaauuguua

SEQ ID NO: 21012 - RNA, 19 nt, artificial
  Chemically synthesized
auuuucacucacagugaac

SEQ ID NO: 21013 - RNA, 19 nt, artificial
  Chemically synthesized
uguccagaagauggguagg

SEQ ID NO: 21014 - RNA, 19 nt, artificial
  Chemically synthesized
auccuugaggguuuggguu

SEQ ID NO: 21015 - RNA, 19 nt, artificial
  Chemically synthesized
agguuauaaggcacaauca

SEQ ID NO: 21016 - RNA, 19 nt, artificial
  Chemically synthesized
guauaugaagcacugguga

SEQ ID NO: 21017 - RNA, 19 nt, artificial
  Chemically synthesized
cagcuuuguauugcaaaca

SEQ ID NO: 21018 - RNA, 19 nt, artificial
  Chemically synthesized
acaaugacucuccuguugu

SEQ ID NO: 21019 - RNA, 19 nt, artificial
  Chemically synthesized
cuucaccgugcccagaauu

SEQ ID NO: 21020 - RNA, 19 nt, artificial
  Chemically synthesized
acucuccuguuguucucau

SEQ ID NO: 21021 - RNA, 19 nt, artificial
  Chemically synthesized
cuuacaagagggauauuga

SEQ ID NO: 21022 - RNA, 19 nt, artificial
  Chemically synthesized
gaacaugaaaccuuuacac

SEQ ID NO: 21023 - RNA, 19 nt, artificial
  Chemically synthesized
ccagcuuuguauugcaaac

SEQ ID NO: 21024 - RNA, 19 nt, artificial
  Chemically synthesized
gguauaugaagcacuggug

SEQ ID NO: 21025 - RNA, 19 nt, artificial
  Chemically synthesized
ucccucuuuggaaaucuaa

SEQ ID NO: 21026 - RNA, 19 nt, artificial
  Chemically synthesized
ccuugaaguggucagguuc

SEQ ID NO: 21027 - RNA, 19 nt, artificial
  Chemically synthesized
aacaagugagcaucauuca

SEQ ID NO: 21028 - RNA, 19 nt, artificial
  Chemically synthesized
gcaaacaaugacucuccug

SEQ ID NO: 21029 - RNA, 19 nt, artificial
  Chemically synthesized
acaagugagcaucauucac

SEQ ID NO: 21030 - RNA, 19 nt, artificial
  Chemically synthesized
guggucagguucaaccagu

SEQ ID NO: 21031 - RNA, 19 nt, artificial
  Chemically synthesized
accuuuacacauguaaggu

SEQ ID NO: 21032 - RNA, 19 nt, artificial
  Chemically synthesized
ugaaaccuuuacacaugua

SEQ ID NO: 21033 - RNA, 19 nt, artificial
  Chemically synthesized
aggcaaaggcagguuauaa

SEQ ID NO: 21034 - RNA, 19 nt, artificial
  Chemically synthesized
cuugaaguggucagguuca

SEQ ID NO: 21035 - RNA, 19 nt, artificial
  Chemically synthesized
guaaaaauuuucacucaca

SEQ ID NO: 21036 - RNA, 19 nt, artificial
  Chemically synthesized
aguggucagguucaaccag

SEQ ID NO: 21037 - RNA, 19 nt, artificial
  Chemically synthesized
cacauguaagguuuagauu

SEQ ID NO: 21038 - RNA, 19 nt, artificial
  Chemically synthesized
ugagcaucauucacugcaa

SEQ ID NO: 21039 - RNA, 19 nt, artificial
  Chemically synthesized
cacuguaauauuuauuaag

SEQ ID NO: 21040 - RNA, 19 nt, artificial
  Chemically synthesized
ugauuucauugaguuuuuu

SEQ ID NO: 21041 - RNA, 19 nt, artificial
  Chemically synthesized
gauuucauugaguuuuuua

SEQ ID NO: 21042 - RNA, 19 nt, artificial
  Chemically synthesized
caguacuuguauuuugaau

SEQ ID NO: 21043 - RNA, 19 nt, artificial
  Chemically synthesized
acaucauucccucuuugga

SEQ ID NO: 21044 - RNA, 19 nt, artificial
  Chemically synthesized
aguuugcugauuucauuga

SEQ ID NO: 21045 - RNA, 19 nt, artificial
  Chemically synthesized
uuucacucacagugaacau

SEQ ID NO: 21046 - RNA, 19 nt, artificial
  Chemically synthesized
cagauaacgcaucauggag

SEQ ID NO: 21047 - RNA, 19 nt, artificial
  Chemically synthesized
gcaaaggcagguuauaagg

SEQ ID NO: 21048 - RNA, 19 nt, artificial
  Chemically synthesized
aguagaugacuuacaagag

SEQ ID NO: 21049 - RNA, 19 nt, artificial
  Chemically synthesized
gacugucuuucuucccuuc

SEQ ID NO: 21050 - RNA, 19 nt, artificial
  Chemically synthesized
aggguuuggguuuccagac

SEQ ID NO: 21051 - RNA, 19 nt, artificial
  Chemically synthesized
gaaaaauugucugccauuu

SEQ ID NO: 21052 - RNA, 19 nt, artificial
  Chemically synthesized
ucauucccucuuuggaaau

SEQ ID NO: 21053 - RNA, 19 nt, artificial
  Chemically synthesized
cacuuggcuguccagaaga

SEQ ID NO: 21054 - RNA, 19 nt, artificial
  Chemically synthesized
uucccucuuuggaaaucua

SEQ ID NO: 21055 - RNA, 19 nt, artificial
  Chemically synthesized
guuuccagacccagauaac

SEQ ID NO: 21056 - RNA, 19 nt, artificial
  Chemically synthesized
uggucagguucaaccagua

SEQ ID NO: 21057 - RNA, 19 nt, artificial
  Chemically synthesized
caaccaguacuuguauuuu

SEQ ID NO: 21058 - RNA, 19 nt, artificial
  Chemically synthesized
cgacugucuuucuucccuu

SEQ ID NO: 21059 - RNA, 19 nt, artificial
  Chemically synthesized
ccuguuguucucauugaag

SEQ ID NO: 21060 - RNA, 19 nt, artificial
  Chemically synthesized
guucaaccaguacuuguau

SEQ ID NO: 21061 - RNA, 19 nt, artificial
  Chemically synthesized
ugcugauuucauugaguuu

SEQ ID NO: 21062 - RNA, 19 nt, artificial
  Chemically synthesized
gcaaccuugaaguggucag

SEQ ID NO: 21063 - RNA, 19 nt, artificial
  Chemically synthesized
guuuuuuaacccgaugauu

SEQ ID NO: 21064 - RNA, 19 nt, artificial
  Chemically synthesized
cagacccagauaacgcauc

SEQ ID NO: 21065 - RNA, 19 nt, artificial
  Chemically synthesized
gcugauuucauugaguuuu

SEQ ID NO: 21066 - RNA, 19 nt, artificial
  Chemically synthesized
ccgaugauuguacugcaac

SEQ ID NO: 21067 - RNA, 19 nt, artificial
  Chemically synthesized
guaauucacuguaauauuu

SEQ ID NO: 21068 - RNA, 19 nt, artificial
  Chemically synthesized
ccucuuuggaaaucuaaag

SEQ ID NO: 21069 - RNA, 19 nt, artificial
  Chemically synthesized
aucauucccucuuuggaaa

SEQ ID NO: 21070 - RNA, 19 nt, artificial
  Chemically synthesized
ucacugcaaccuugaagug

SEQ ID NO: 21071 - RNA, 19 nt, artificial
  Chemically synthesized
cugauuucauugaguuuuu

SEQ ID NO: 21072 - RNA, 19 nt, artificial
  Chemically synthesized
cucuccuguuguucucauu

SEQ ID NO: 21073 - RNA, 19 nt, artificial
  Chemically synthesized
gguuauaaggcacaaucag

SEQ ID NO: 21074 - RNA, 19 nt, artificial
  Chemically synthesized
caccgugcccagaauuguu

SEQ ID NO: 21075 - RNA, 19 nt, artificial
  Chemically synthesized
aaguggaaggcaacaucau

SEQ ID NO: 21076 - RNA, 19 nt, artificial
  Chemically synthesized
ggaaaaccgacugucuuuc

SEQ ID NO: 21077 - RNA, 19 nt, artificial
  Chemically synthesized
cccaguuauuauccagcuu

SEQ ID NO: 21078 - RNA, 19 nt, artificial
  Chemically synthesized
gggauauugaugaauguaa

SEQ ID NO: 21079 - RNA, 19 nt, artificial
  Chemically synthesized
cgaaaaauugucugccauu

SEQ ID NO: 21080 - RNA, 19 nt, artificial
  Chemically synthesized
cccaguuugcugauuucau

SEQ ID NO: 21081 - RNA, 19 nt, artificial
  Chemically synthesized
ucccacuuucaaaugggaa

SEQ ID NO: 21082 - RNA, 19 nt, artificial
  Chemically synthesized
guuaaaguggaaggcaaca

SEQ ID NO: 21083 - RNA, 19 nt, artificial
  Chemically synthesized
ggcaaaggcagguuauaag

SEQ ID NO: 21084 - RNA, 19 nt, artificial
  Chemically synthesized
ggugaggucuaugucacca

SEQ ID NO: 21085 - RNA, 19 nt, artificial
  Chemically synthesized
gcguggguuaaaguggaag

SEQ ID NO: 21086 - RNA, 19 nt, artificial
  Chemically synthesized
ggcaacaucauucccucuu

SEQ ID NO: 21087 - RNA, 19 nt, artificial
  Chemically synthesized
aguuuuuuaacccgaugau

SEQ ID NO: 21088 - RNA, 19 nt, artificial
  Chemically synthesized
gcaucauucacugcaaccu

SEQ ID NO: 21089 - RNA, 19 nt, artificial
  Chemically synthesized
gaggguuuggguuuccaga

SEQ ID NO: 21090 - RNA, 19 nt, artificial
  Chemically synthesized
cagugaacaugaaaccuuu

SEQ ID NO: 21091 - RNA, 19 nt, artificial
  Chemically synthesized
aggccauccuugaggguuu

SEQ ID NO: 21092 - RNA, 19 nt, artificial
  Chemically synthesized
cccuuucagauuauaucau

SEQ ID NO: 21093 - RNA, 19 nt, artificial
  Chemically synthesized
caucauucccucuuuggaa

SEQ ID NO: 21094 - RNA, 19 nt, artificial
  Chemically synthesized
aggcaacaucauucccucu

SEQ ID NO: 21095 - RNA, 19 nt, artificial
  Chemically synthesized
agggauauugaugaaugua

SEQ ID NO: 21096 - RNA, 19 nt, artificial
  Chemically synthesized
aauucccaguuugcugauu

SEQ ID NO: 21097 - RNA, 19 nt, artificial
  Chemically synthesized
gguuaaaguggaaggcaac

SEQ ID NO: 21098 - RNA, 19 nt, artificial
  Chemically synthesized
gaaugguuucccacuuuca

SEQ ID NO: 21099 - RNA, 19 nt, artificial
  Chemically synthesized
gcaacaucauucccucuuu

SEQ ID NO: 21100 - RNA, 19 nt, artificial
  Chemically synthesized
gcccagaauuguuaucagc

SEQ ID NO: 21101 - RNA, 19 nt, artificial
  Chemically synthesized
acucacagugaacaugaaa

SEQ ID NO: 21102 - RNA, 19 nt, artificial
  Chemically synthesized
cacagugaacaugaaaccu

SEQ ID NO: 21103 - RNA, 19 nt, artificial
  Chemically synthesized
gguaauucacuguaauauu

SEQ ID NO: 21104 - RNA, 19 nt, artificial
  Chemically synthesized
aaauucccaguuugcugau

SEQ ID NO: 21105 - RNA, 19 nt, artificial
  Chemically synthesized
agcuuuguauugcaaacaa

SEQ ID NO: 21106 - RNA, 19 nt, artificial
  Chemically synthesized
gcuguccagaagaugggua

SEQ ID NO: 21107 - RNA, 19 nt, artificial
  Chemically synthesized
gaggucuaugucaccagaa

SEQ ID NO: 21108 - RNA, 19 nt, artificial
  Chemically synthesized
gaaaccuuuacacauguaa

SEQ ID NO: 21109 - RNA, 19 nt, artificial
  Chemically synthesized
gcacuggugaggucuaugu

SEQ ID NO: 21110 - RNA, 19 nt, artificial
  Chemically synthesized
cauccuugaggguuugggu

SEQ ID NO: 21111 - RNA, 19 nt, artificial
  Chemically synthesized
agugaacaugaaaccuuua

SEQ ID NO: 21112 - RNA, 19 nt, artificial
  Chemically synthesized
cauugaagcguggguuaaa

SEQ ID NO: 21113 - RNA, 19 nt, artificial
  Chemically synthesized
ccuuuacacauguaagguu

SEQ ID NO: 21114 - RNA, 19 nt, artificial
  Chemically synthesized
gauuguacugcaacaagug

SEQ ID NO: 21115 - RNA, 19 nt, artificial
  Chemically synthesized
ccuugaggguuuggguuuc

SEQ ID NO: 21116 - RNA, 19 nt, artificial
  Chemically synthesized
acuuggcuguccagaagau

SEQ ID NO: 21117 - RNA, 19 nt, artificial
  Chemically synthesized
cucauugaagcguggguua

SEQ ID NO: 21118 - RNA, 19 nt, artificial
  Chemically synthesized
cgugcccagaauuguuauc

SEQ ID NO: 21119 - RNA, 19 nt, artificial
  Chemically synthesized
cagguucaaccaguacuug

SEQ ID NO: 21120 - RNA, 19 nt, artificial
  Chemically synthesized
agacagguaauucacugua

SEQ ID NO: 21121 - RNA, 19 nt, artificial
  Chemically synthesized
ccaguacuuguauuuugaa

SEQ ID NO: 21122 - RNA, 19 nt, artificial
  Chemically synthesized
cgaugauuguacugcaaca

SEQ ID NO: 21123 - RNA, 19 nt, artificial
  Chemically synthesized
ccaguuugcugauuucauu

SEQ ID NO: 21124 - RNA, 19 nt, artificial
  Chemically synthesized
accuugaaguggucagguu

SEQ ID NO: 21125 - RNA, 19 nt, artificial
  Chemically synthesized
gaugacuuacaagagggau

SEQ ID NO: 21126 - RNA, 19 nt, artificial
  Chemically synthesized
cauucccucuuuggaaauc

SEQ ID NO: 21127 - RNA, 19 nt, artificial
  Chemically synthesized
gguucaaccaguacuugua

SEQ ID NO: 21128 - RNA, 19 nt, artificial
  Chemically synthesized
ccagaauuguuaucagcau

SEQ ID NO: 21129 - RNA, 19 nt, artificial
  Chemically synthesized
caccagaaauucccaguuu

SEQ ID NO: 21130 - RNA, 19 nt, artificial
  Chemically synthesized
ggaaggcaacaucauuccc

SEQ ID NO: 21131 - RNA, 19 nt, artificial
  Chemically synthesized
ccagacccagauaacgcau

SEQ ID NO: 21132 - RNA, 19 nt, artificial
  Chemically synthesized
aggucuaugucaccagaaa

SEQ ID NO: 21133 - RNA, 19 nt, artificial
  Chemically synthesized
cccucuuuggaaaucuaaa

SEQ ID NO: 21134 - RNA, 19 nt, artificial
  Chemically synthesized
gaaaaccgacugucuuucu

SEQ ID NO: 21135 - RNA, 19 nt, artificial
  Chemically synthesized
cugcaacaagugagcauca

SEQ ID NO: 21136 - RNA, 19 nt, artificial
  Chemically synthesized
acagguaauucacuguaau

SEQ ID NO: 21137 - RNA, 19 nt, artificial
  Chemically synthesized
gcagguuauaaggcacaau

SEQ ID NO: 21138 - RNA, 19 nt, artificial
  Chemically synthesized
ggucagguucaaccaguac

SEQ ID NO: 21139 - RNA, 19 nt, artificial
  Chemically synthesized
ggucuaugucaccagaaau

SEQ ID NO: 21140 - RNA, 19 nt, artificial
  Chemically synthesized
ugcaacaagugagcaucau

SEQ ID NO: 21141 - RNA, 19 nt, artificial
  Chemically synthesized
cuuuggaaaucuaaagcaa

SEQ ID NO: 21142 - RNA, 19 nt, artificial
  Chemically synthesized
cugcaaccuugaagugguc

SEQ ID NO: 21143 - RNA, 19 nt, artificial
  Chemically synthesized
agauuauaucaugguauau

SEQ ID NO: 21144 - RNA, 19 nt, artificial
  Chemically synthesized
aggugccuguccaggauaa

SEQ ID NO: 21145 - RNA, 19 nt, artificial
  Chemically synthesized
gagcaucauucacugcaac

SEQ ID NO: 21146 - RNA, 19 nt, artificial
  Chemically synthesized
ccgugcccagaauuguuau

SEQ ID NO: 21147 - RNA, 19 nt, artificial
  Chemically synthesized
gacucuccuguuguucuca

SEQ ID NO: 21148 - RNA, 19 nt, artificial
  Chemically synthesized
gggaaaaccgacugucuuu

SEQ ID NO: 21149 - RNA, 19 nt, artificial
  Chemically synthesized
cauucacugcaaccuugaa

SEQ ID NO: 21150 - RNA, 19 nt, artificial
  Chemically synthesized
ggauauugaugaauguaaa

SEQ ID NO: 21151 - RNA, 19 nt, artificial
  Chemically synthesized
caggcaaaggcagguuaua

SEQ ID NO: 21152 - RNA, 19 nt, artificial
  Chemically synthesized
gcaacaagugagcaucauu

SEQ ID NO: 21153 - RNA, 19 nt, artificial
  Chemically synthesized
ccagauaacgcaucaugga

SEQ ID NO: 21154 - RNA, 19 nt, artificial
  Chemically synthesized
gcuuuguauugcaaacaau

SEQ ID NO: 21155 - RNA, 19 nt, artificial
  Chemically synthesized
gguuucccacuuucaaaug

SEQ ID NO: 21156 - RNA, 19 nt, artificial
  Chemically synthesized
ggguuaaaguggaaggcaa

SEQ ID NO: 21157 - RNA, 19 nt, artificial
  Chemically synthesized
caagagggauauugaugaa

SEQ ID NO: 21158 - RNA, 19 nt, artificial
  Chemically synthesized
cagauuauaucaugguaua

SEQ ID NO: 21159 - RNA, 19 nt, artificial
  Chemically synthesized
cagguaauucacuguaaua

SEQ ID NO: 21160 - RNA, 19 nt, artificial
  Chemically synthesized
gacccagauaacgcaucau

SEQ ID NO: 21161 - RNA, 19 nt, artificial
  Chemically synthesized
agcguggguuaaaguggaa

SEQ ID NO: 21162 - RNA, 19 nt, artificial
  Chemically synthesized
gaagcacuggugaggucua

SEQ ID NO: 21163 - RNA, 19 nt, artificial
  Chemically synthesized
ggcagguuauaaggcacaa

SEQ ID NO: 21164 - RNA, 19 nt, artificial
  Chemically synthesized
gaugauuguacugcaacaa

SEQ ID NO: 21165 - RNA, 19 nt, artificial
  Chemically synthesized
cacuuucaaaugggaaaac

SEQ ID NO: 21166 - RNA, 19 nt, artificial
  Chemically synthesized
ccaggcaaaggcagguuau

SEQ ID NO: 21167 - RNA, 19 nt, artificial
  Chemically synthesized
gauauugaugaauguaaaa

SEQ ID NO: 21168 - RNA, 19 nt, artificial
  Chemically synthesized
cccacuuucaaaugggaaa

SEQ ID NO: 21169 - RNA, 19 nt, artificial
  Chemically synthesized
gguuuccagacccagauaa

SEQ ID NO: 21170 - RNA, 19 nt, artificial
  Chemically synthesized
guacugcaacaagugagca

SEQ ID NO: 21171 - RNA, 19 nt, artificial
  Chemically synthesized
cccgaugauuguacugcaa

SEQ ID NO: 21172 - RNA, 19 nt, artificial
  Chemically synthesized
caaugacucuccuguuguu

SEQ ID NO: 21173 - RNA, 19 nt, artificial
  Chemically synthesized
ccacuuucaaaugggaaaa

SEQ ID NO: 21174 - RNA, 19 nt, artificial
  Chemically synthesized
gacuuacaagagggauauu

SEQ ID NO: 21175 - RNA, 19 nt, artificial
  Chemically synthesized
gacagguaauucacuguaa

SEQ ID NO: 21176 - RNA, 19 nt, artificial
  Chemically synthesized
ggguuuccagacccagaua

SEQ ID NO: 21177 - RNA, 19 nt, artificial
  Chemically synthesized
cacucacagugaacaugaa

SEQ ID NO: 21178 - RNA, 19 nt, artificial
  Chemically synthesized
cggaauuaaugugccacaa

SEQ ID NO: 21179 - RNA, 19 nt, artificial
  Chemically synthesized
gacuuccuuugcccuuuuu

SEQ ID NO: 21180 - RNA, 19 nt, artificial
  Chemically synthesized
ccagugugccacauuaaau

SEQ ID NO: 21181 - RNA, 19 nt, artificial
  Chemically synthesized
agauuucauuaccuccuac

SEQ ID NO: 21182 - RNA, 19 nt, artificial
  Chemically synthesized
gccacuacauugccaucau

SEQ ID NO: 21183 - RNA, 19 nt, artificial
  Chemically synthesized
cagugugccacauuaaaua

SEQ ID NO: 21184 - RNA, 19 nt, artificial
  Chemically synthesized
ucaguuuuuugacuuccuu

SEQ ID NO: 21185 - RNA, 19 nt, artificial
  Chemically synthesized
gucauuuccagauuucauu

SEQ ID NO: 21186 - RNA, 19 nt, artificial
  Chemically synthesized
acauuaaauacccgugcag

SEQ ID NO: 21187 - RNA, 19 nt, artificial
  Chemically synthesized
gccagugugccacauuaaa

SEQ ID NO: 21188 - RNA, 19 nt, artificial
  Chemically synthesized
ccaacagcaagcggauuuu

SEQ ID NO: 21189 - RNA, 19 nt, artificial
  Chemically synthesized
cuacuugccauucacccau

SEQ ID NO: 21190 - RNA, 19 nt, artificial
  Chemically synthesized
gggccaucuggaacuauau

SEQ ID NO: 21191 - RNA, 19 nt, artificial
  Chemically synthesized
gcagaugucucccaaaaag

SEQ ID NO: 21192 - RNA, 19 nt, artificial
  Chemically synthesized
uugccauucacccaucaau

SEQ ID NO: 21193 - RNA, 19 nt, artificial
  Chemically synthesized
ccuccuacuugccauucac

SEQ ID NO: 21194 - RNA, 19 nt, artificial
  Chemically synthesized
accuccuacuugccauuca

SEQ ID NO: 21195 - RNA, 19 nt, artificial
  Chemically synthesized
gaauuaaugugccacaagu

SEQ ID NO: 21196 - RNA, 19 nt, artificial
  Chemically synthesized
ggaauuaaugugccacaag

SEQ ID NO: 21197 - RNA, 19 nt, artificial
  Chemically synthesized
ugcuaccaguuccauauga

SEQ ID NO: 21198 - RNA, 19 nt, artificial
  Chemically synthesized
ccaguguucaagugcagaa

SEQ ID NO: 21199 - RNA, 19 nt, artificial
  Chemically synthesized
gcaugugaugacuguaaau

SEQ ID NO: 21200 - RNA, 19 nt, artificial
  Chemically synthesized
cggauuuucuugcaagauc

SEQ ID NO: 21201 - RNA, 19 nt, artificial
  Chemically synthesized
ccucuuuauuuugguccuu

SEQ ID NO: 21202 - RNA, 19 nt, artificial
  Chemically synthesized
gaauccuaguucaguuuuu

SEQ ID NO: 21203 - RNA, 19 nt, artificial
  Chemically synthesized
ccaucaaugugaaagucag

SEQ ID NO: 21204 - RNA, 19 nt, artificial
  Chemically synthesized
ggccaagcucggaauuaau

SEQ ID NO: 21205 - RNA, 19 nt, artificial
  Chemically synthesized
caguuccauaugaugagaa

SEQ ID NO: 21206 - RNA, 19 nt, artificial
  Chemically synthesized
ucaucaccaaggaacacau

SEQ ID NO: 21207 - RNA, 19 nt, artificial
  Chemically synthesized
ugacugugaauuacgacuu

SEQ ID NO: 21208 - RNA, 19 nt, artificial
  Chemically synthesized
ggauuuucuugcaagauca

SEQ ID NO: 21209 - RNA, 19 nt, artificial
  Chemically synthesized
gcggauuuucuugcaagau

SEQ ID NO: 21210 - RNA, 19 nt, artificial
  Chemically synthesized
cgcagaugucucccaaaaa

SEQ ID NO: 21211 - RNA, 19 nt, artificial
  Chemically synthesized
cucuuuauuuugguccuuu

SEQ ID NO: 21212 - RNA, 19 nt, artificial
  Chemically synthesized
agaggagggaguauuagau

SEQ ID NO: 21213 - RNA, 19 nt, artificial
  Chemically synthesized
ccuuugcccuuuuucccuu

SEQ ID NO: 21214 - RNA, 19 nt, artificial
  Chemically synthesized
cgaauccuaguucaguuuu

SEQ ID NO: 21215 - RNA, 19 nt, artificial
  Chemically synthesized
cuggaauggacaguucauu

SEQ ID NO: 21216 - RNA, 19 nt, artificial
  Chemically synthesized
aguuccauaugaugagaaa

SEQ ID NO: 21217 - RNA, 19 nt, artificial
  Chemically synthesized
ccaggguucuuguuuggac

SEQ ID NO: 21218 - RNA, 19 nt, artificial
  Chemically synthesized
uuaccuccuacuugccauu

SEQ ID NO: 21219 - RNA, 19 nt, artificial
  Chemically synthesized
ucggaauuaaugugccaca

SEQ ID NO: 21220 - RNA, 19 nt, artificial
  Chemically synthesized
ggccaucuggaacuauauc

SEQ ID NO: 21221 - RNA, 19 nt, artificial
  Chemically synthesized
gccucaccuacaauaccau

SEQ ID NO: 21222 - RNA, 19 nt, artificial
  Chemically synthesized
agaaaucuuuggcuuugcu

SEQ ID NO: 21223 - RNA, 19 nt, artificial
  Chemically synthesized
cuguagcaaaugacuguga

SEQ ID NO: 21224 - RNA, 19 nt, artificial
  Chemically synthesized
gcucggaauuaaugugcca

SEQ ID NO: 21225 - RNA, 19 nt, artificial
  Chemically synthesized
ccaagcucggaauuaaugu

SEQ ID NO: 21226 - RNA, 19 nt, artificial
  Chemically synthesized
gaagaguccagcaccaaag

SEQ ID NO: 21227 - RNA, 19 nt, artificial
  Chemically synthesized
ggauuauaccugggaagac

SEQ ID NO: 21228 - RNA, 19 nt, artificial
  Chemically synthesized
cucuccuccuucguguuug

SEQ ID NO: 21229 - RNA, 19 nt, artificial
  Chemically synthesized
gcuuugcuaccaguuccau

SEQ ID NO: 21230 - RNA, 19 nt, artificial
  Chemically synthesized
gacuucucuugcccuucuu

SEQ ID NO: 21231 - RNA, 19 nt, artificial
  Chemically synthesized
guagcaaaugacugugaau

SEQ ID NO: 21232 - RNA, 19 nt, artificial
  Chemically synthesized
ccaucccaguaucucaucu

SEQ ID NO: 21233 - RNA, 19 nt, artificial
  Chemically synthesized
agcggauuuucuugcaaga

SEQ ID NO: 21234 - RNA, 19 nt, artificial
  Chemically synthesized
ggcaccaggguucuuguuu

SEQ ID NO: 21235 - RNA, 19 nt, artificial
  Chemically synthesized
cugaagaggagggaguauu

SEQ ID NO: 21236 - RNA, 19 nt, artificial
  Chemically synthesized
cuuuuucccuuuucuccau

SEQ ID NO: 21237 - RNA, 19 nt, artificial
  Chemically synthesized
cuuugcccuuuuucccuuu

SEQ ID NO: 21238 - RNA, 19 nt, artificial
  Chemically synthesized
caguuuuuugacuuccuuu

SEQ ID NO: 21239 - RNA, 19 nt, artificial
  Chemically synthesized
caagcucggaauuaaugug

SEQ ID NO: 21240 - RNA, 19 nt, artificial
  Chemically synthesized
acuauauccacugcgucuu

SEQ ID NO: 21241 - RNA, 19 nt, artificial
  Chemically synthesized
ugcacccugacuacuuuac

SEQ ID NO: 21242 - RNA, 19 nt, artificial
  Chemically synthesized
cagacaugcugugcuuugu

SEQ ID NO: 21243 - RNA, 19 nt, artificial
  Chemically synthesized
cugcacccugacuacuuua

SEQ ID NO: 21244 - RNA, 19 nt, artificial
  Chemically synthesized
accaguuccauaugaugag

SEQ ID NO: 21245 - RNA, 19 nt, artificial
  Chemically synthesized
cuagagggcaugugaugac

SEQ ID NO: 21246 - RNA, 19 nt, artificial
  Chemically synthesized
cccuucuucuagcagucug

SEQ ID NO: 21247 - RNA, 19 nt, artificial
  Chemically synthesized
uccucuuuauuuugguccu

SEQ ID NO: 21248 - RNA, 19 nt, artificial
  Chemically synthesized
ggaauggacaguucauugc

SEQ ID NO: 21249 - RNA, 19 nt, artificial
  Chemically synthesized
cacccugacuacuuuacca

SEQ ID NO: 21250 - RNA, 19 nt, artificial
  Chemically synthesized
ugcugugcuuuguggaaga

SEQ ID NO: 21251 - RNA, 19 nt, artificial
  Chemically synthesized
ugaugagaaauaaacguuc

SEQ ID NO: 21252 - RNA, 19 nt, artificial
  Chemically synthesized
ugaugacuguaaauguuca

SEQ ID NO: 21253 - RNA, 19 nt, artificial
  Chemically synthesized
ccgauuccaggcacuuucu

SEQ ID NO: 21254 - RNA, 19 nt, artificial
  Chemically synthesized
acagcaagcggauuuucuu

SEQ ID NO: 21255 - RNA, 19 nt, artificial
  Chemically synthesized
cccacaaugucugaagcug

SEQ ID NO: 21256 - RNA, 19 nt, artificial
  Chemically synthesized
cuagauggcuuagguggca

SEQ ID NO: 21257 - RNA, 19 nt, artificial
  Chemically synthesized
uugcccuuuuucccuuuuc

SEQ ID NO: 21258 - RNA, 19 nt, artificial
  Chemically synthesized
uccuaguucaguuuuuuga

SEQ ID NO: 21259 - RNA, 19 nt, artificial
  Chemically synthesized
cgaguuucugcagacuggu

SEQ ID NO: 21260 - RNA, 19 nt, artificial
  Chemically synthesized
ccagauuucauuaccuccu

SEQ ID NO: 21261 - RNA, 19 nt, artificial
  Chemically synthesized
cgccaucaguguucuuacc

SEQ ID NO: 21262 - RNA, 19 nt, artificial
  Chemically synthesized
ugagaaauaaacguucgcu

SEQ ID NO: 21263 - RNA, 19 nt, artificial
  Chemically synthesized
uucaagugcagaaaucuuu

SEQ ID NO: 21264 - RNA, 19 nt, artificial
  Chemically synthesized
gugguauccaguguucaag

SEQ ID NO: 21265 - RNA, 19 nt, artificial
  Chemically synthesized
ucuggguucuagagggcau

SEQ ID NO: 21266 - RNA, 19 nt, artificial
  Chemically synthesized
gaguagacaaccuggcagu

SEQ ID NO: 21267 - RNA, 19 nt, artificial
  Chemically synthesized
cucagcgagaucaacaagu

SEQ ID NO: 21268 - RNA, 19 nt, artificial
  Chemically synthesized
cacauugccuucugaagag

SEQ ID NO: 21269 - RNA, 19 nt, artificial
  Chemically synthesized
ccuuuucuccaugcuuaau

SEQ ID NO: 21270 - RNA, 19 nt, artificial
  Chemically synthesized
gcuugugugugaugugcag

SEQ ID NO: 21271 - RNA, 19 nt, artificial
  Chemically synthesized
ggcuugugugugaugugca

SEQ ID NO: 21272 - RNA, 19 nt, artificial
  Chemically synthesized
ccgccaucaguguucuuac

SEQ ID NO: 21273 - RNA, 19 nt, artificial
  Chemically synthesized
cagugggcuugugugugau

SEQ ID NO: 21274 - RNA, 19 nt, artificial
  Chemically synthesized
cuuucggauaugaggacuu

SEQ ID NO: 21275 - RNA, 19 nt, artificial
  Chemically synthesized
gagaaauaaacguucgcug

SEQ ID NO: 21276 - RNA, 19 nt, artificial
  Chemically synthesized
cagaaaucuuuggcuuugc

SEQ ID NO: 21277 - RNA, 19 nt, artificial
  Chemically synthesized
ccuucuucuagcagucugu

SEQ ID NO: 21278 - RNA, 19 nt, artificial
  Chemically synthesized
ccuuuaugcuugagguucc

SEQ ID NO: 21279 - RNA, 19 nt, artificial
  Chemically synthesized
ggucacauugccuucugaa

SEQ ID NO: 21280 - RNA, 19 nt, artificial
  Chemically synthesized
ucuagagaguuugagccuu

SEQ ID NO: 21281 - RNA, 19 nt, artificial
  Chemically synthesized
gcaaacucagcgagaucaa

SEQ ID NO: 21282 - RNA, 19 nt, artificial
  Chemically synthesized
ucaaugugaaagucagggu

SEQ ID NO: 21283 - RNA, 19 nt, artificial
  Chemically synthesized
gccaucaguguucuuaccu

SEQ ID NO: 21284 - RNA, 19 nt, artificial
  Chemically synthesized
agcugcuggaugagaaguu

SEQ ID NO: 21285 - RNA, 19 nt, artificial
  Chemically synthesized
cguucgcugagguuuuguu

SEQ ID NO: 21286 - RNA, 19 nt, artificial
  Chemically synthesized
cccaucccaguaucucauc

SEQ ID NO: 21287 - RNA, 19 nt, artificial
  Chemically synthesized
aggcaccaggguucuuguu

SEQ ID NO: 21288 - RNA, 19 nt, artificial
  Chemically synthesized
agagggcacaggaaagaag

SEQ ID NO: 21289 - RNA, 19 nt, artificial
  Chemically synthesized
gugggcuugugugugaugu

SEQ ID NO: 21290 - RNA, 19 nt, artificial
  Chemically synthesized
agccucaccuacaauacca

SEQ ID NO: 21291 - RNA, 19 nt, artificial
  Chemically synthesized
agagggagaauucuguucu

SEQ ID NO: 21292 - RNA, 19 nt, artificial
  Chemically synthesized
caaugugaaagucaggguc

SEQ ID NO: 21293 - RNA, 19 nt, artificial
  Chemically synthesized
ggcuuaaguggguugcuuc

SEQ ID NO: 21294 - RNA, 19 nt, artificial
  Chemically synthesized
ggaggagagggagaauucu

SEQ ID NO: 21295 - RNA, 19 nt, artificial
  Chemically synthesized
gcugcuggaugagaaguuc

SEQ ID NO: 21296 - RNA, 19 nt, artificial
  Chemically synthesized
cgcugagguuuuguuucau

SEQ ID NO: 21297 - RNA, 19 nt, artificial
  Chemically synthesized
gggcacugaagaaaggcaa

SEQ ID NO: 21298 - RNA, 19 nt, artificial
  Chemically synthesized
cccaaaaaguugagccuuu

SEQ ID NO: 21299 - RNA, 19 nt, artificial
  Chemically synthesized
gcuuaauggugugaggcgu

SEQ ID NO: 21300 - RNA, 19 nt, artificial
  Chemically synthesized
cccuuuucuccaugcuuaa

SEQ ID NO: 21301 - RNA, 19 nt, artificial
  Chemically synthesized
ucccuuuucuccaugcuua

SEQ ID NO: 21302 - RNA, 19 nt, artificial
  Chemically synthesized
ugcccuuuuucccuuuucu

SEQ ID NO: 21303 - RNA, 19 nt, artificial
  Chemically synthesized
ugacuuccuuugcccuuuu

SEQ ID NO: 21304 - RNA, 19 nt, artificial
  Chemically synthesized
acccucccuuuuccucacu

SEQ ID NO: 21305 - RNA, 19 nt, artificial
  Chemically synthesized
ggaaccucaaggucuauau

SEQ ID NO: 21306 - RNA, 19 nt, artificial
  Chemically synthesized
gcacugaagaaaggcaagg

SEQ ID NO: 21307 - RNA, 19 nt, artificial
  Chemically synthesized
gcccuuuuucccuuuucuc

SEQ ID NO: 21308 - RNA, 19 nt, artificial
  Chemically synthesized
cccugucauuuccagauuu

SEQ ID NO: 21309 - RNA, 19 nt, artificial
  Chemically synthesized
gacaguucauugcacugac

SEQ ID NO: 21310 - RNA, 19 nt, artificial
  Chemically synthesized
caguguucaagugcagaaa

SEQ ID NO: 21311 - RNA, 19 nt, artificial
  Chemically synthesized
ugcgcaaacucagcgagau

SEQ ID NO: 21312 - RNA, 19 nt, artificial
  Chemically synthesized
agaagguccacgugaacuu

SEQ ID NO: 21313 - RNA, 19 nt, artificial
  Chemically synthesized
guguucaagugcagaaauc

SEQ ID NO: 21314 - RNA, 19 nt, artificial
  Chemically synthesized
gggagugguauccaguguu

SEQ ID NO: 21315 - RNA, 19 nt, artificial
  Chemically synthesized
ccaaaaaguugagccuuuc

SEQ ID NO: 21316 - RNA, 19 nt, artificial
  Chemically synthesized
acccaucaaugugaaaguc

SEQ ID NO: 21317 - RNA, 19 nt, artificial
  Chemically synthesized
acaguucauugcacugacu

SEQ ID NO: 21318 - RNA, 19 nt, artificial
  Chemically synthesized
ggacaguucauugcacuga

SEQ ID NO: 21319 - RNA, 19 nt, artificial
  Chemically synthesized
cccuuuuccucacuggaau

SEQ ID NO: 21320 - RNA, 19 nt, artificial
  Chemically synthesized
cccgaagaauguacaaccu

SEQ ID NO: 21321 - RNA, 19 nt, artificial
  Chemically synthesized
aggucuauaucaagacagu

SEQ ID NO: 21322 - RNA, 19 nt, artificial
  Chemically synthesized
cugacuacuuuaccagcuu

SEQ ID NO: 21323 - RNA, 19 nt, artificial
  Chemically synthesized
ccaggauuauaccugggaa

SEQ ID NO: 21324 - RNA, 19 nt, artificial
  Chemically synthesized
cccagacaugcugugcuuu

SEQ ID NO: 21325 - RNA, 19 nt, artificial
  Chemically synthesized
ggccagugugccacauuaa

SEQ ID NO: 21326 - RNA, 19 nt, artificial
  Chemically synthesized
caggcacuuucuguagcaa

SEQ ID NO: 21327 - RNA, 19 nt, artificial
  Chemically synthesized
aggugaccauggcuacauu

SEQ ID NO: 21328 - RNA, 19 nt, artificial
  Chemically synthesized
uugacuuccuuugcccuuu

SEQ ID NO: 21329 - RNA, 19 nt, artificial
  Chemically synthesized
ugacacuccaggcagcuuu

SEQ ID NO: 21330 - RNA, 19 nt, artificial
  Chemically synthesized
cgaagaauguacaaccucu

SEQ ID NO: 21331 - RNA, 19 nt, artificial
  Chemically synthesized
cggaaccucaaggucuaua

SEQ ID NO: 21332 - RNA, 19 nt, artificial
  Chemically synthesized
gcgucuuuggcaucagaua

SEQ ID NO: 21333 - RNA, 19 nt, artificial
  Chemically synthesized
ccuacaauaccaucgccau

SEQ ID NO: 21334 - RNA, 19 nt, artificial
  Chemically synthesized
gugcagaaaucuuuggcuu

SEQ ID NO: 21335 - RNA, 19 nt, artificial
  Chemically synthesized
agggagugguauccagugu

SEQ ID NO: 21336 - RNA, 19 nt, artificial
  Chemically synthesized
cacauuaaauacccgugca

SEQ ID NO: 21337 - RNA, 19 nt, artificial
  Chemically synthesized
ccacauuaaauacccgugc

SEQ ID NO: 21338 - RNA, 19 nt, artificial
  Chemically synthesized
aggcacuuucuguagcaaa

SEQ ID NO: 21339 - RNA, 19 nt, artificial
  Chemically synthesized
ccgaauccuaguucaguuu

SEQ ID NO: 21340 - RNA, 19 nt, artificial
  Chemically synthesized
cccgaauccuaguucaguu

SEQ ID NO: 21341 - RNA, 19 nt, artificial
  Chemically synthesized
ccuaaaagccuguucuguu

SEQ ID NO: 21342 - RNA, 19 nt, artificial
  Chemically synthesized
cccuaaaagccuguucugu

SEQ ID NO: 21343 - RNA, 19 nt, artificial
  Chemically synthesized
acgugaacuugcugcuccu

SEQ ID NO: 21344 - RNA, 19 nt, artificial
  Chemically synthesized
gaagaauguacaaccucuu

SEQ ID NO: 21345 - RNA, 19 nt, artificial
  Chemically synthesized
ggaacuauauccacugcgu

SEQ ID NO: 21346 - RNA, 19 nt, artificial
  Chemically synthesized
ccaucuggaacuauaucca

SEQ ID NO: 21347 - RNA, 19 nt, artificial
  Chemically synthesized
accuacaauaccaucgcca

SEQ ID NO: 21348 - RNA, 19 nt, artificial
  Chemically synthesized
uuguggaagacccuacuuu

SEQ ID NO: 21349 - RNA, 19 nt, artificial
  Chemically synthesized
ucgcugagguuuuguuuca

SEQ ID NO: 21350 - RNA, 19 nt, artificial
  Chemically synthesized
ggcuuugcuaccaguucca

SEQ ID NO: 21351 - RNA, 19 nt, artificial
  Chemically synthesized
aguguucaagugcagaaau

SEQ ID NO: 21352 - RNA, 19 nt, artificial
  Chemically synthesized
gccacauuaaauacccgug

SEQ ID NO: 21353 - RNA, 19 nt, artificial
  Chemically synthesized
uggccagugugccacauua

SEQ ID NO: 21354 - RNA, 19 nt, artificial
  Chemically synthesized
gcacuuucuguagcaaaug

SEQ ID NO: 21355 - RNA, 19 nt, artificial
  Chemically synthesized
caggugaccauggcuacau

SEQ ID NO: 21356 - RNA, 19 nt, artificial
  Chemically synthesized
gcgagaucaacaaguugcu

SEQ ID NO: 21357 - RNA, 19 nt, artificial
  Chemically synthesized
gccuuugcuggucacauug

SEQ ID NO: 21358 - RNA, 19 nt, artificial
  Chemically synthesized
cacccaucaaugugaaagu

SEQ ID NO: 21359 - RNA, 19 nt, artificial
  Chemically synthesized
gccauucacccaucaaugu

SEQ ID NO: 21360 - RNA, 19 nt, artificial
  Chemically synthesized
ccugucauuuccagauuuc

SEQ ID NO: 21361 - RNA, 19 nt, artificial
  Chemically synthesized
ccacaaguguuguggccuu

SEQ ID NO: 21362 - RNA, 19 nt, artificial
  Chemically synthesized
ccacccgaagaauguacaa

SEQ ID NO: 21363 - RNA, 19 nt, artificial
  Chemically synthesized
gcaucagauaugaugacua

SEQ ID NO: 21364 - RNA, 19 nt, artificial
  Chemically synthesized
ggaagacccuacuuucgga

SEQ ID NO: 21365 - RNA, 19 nt, artificial
  Chemically synthesized
ggaagaguccagcaccaaa

SEQ ID NO: 21366 - RNA, 19 nt, artificial
  Chemically synthesized
ugacuguaaauguucacug

SEQ ID NO: 21367 - RNA, 19 nt, artificial
  Chemically synthesized
caagcggauuuucuugcaa

SEQ ID NO: 21368 - RNA, 19 nt, artificial
  Chemically synthesized
gcaagcggauuuucuugca

SEQ ID NO: 21369 - RNA, 19 nt, artificial
  Chemically synthesized
uggcuacauugccaaaccu

SEQ ID NO: 21370 - RNA, 19 nt, artificial
  Chemically synthesized
agccuuucuagauggcuua

SEQ ID NO: 21371 - RNA, 19 nt, artificial
  Chemically synthesized
cucccaaaaaguugagccu

SEQ ID NO: 21372 - RNA, 19 nt, artificial
  Chemically synthesized
agaugucucccaaaaaguu

SEQ ID NO: 21373 - RNA, 19 nt, artificial
  Chemically synthesized
guccuuuaugcuugagguu

SEQ ID NO: 21374 - RNA, 19 nt, artificial
  Chemically synthesized
gauuaucucuagagaguuu

SEQ ID NO: 21375 - RNA, 19 nt, artificial
  Chemically synthesized
ccauucacccaucaaugug

SEQ ID NO: 21376 - RNA, 19 nt, artificial
  Chemically synthesized
cacugacucugggaucuca

SEQ ID NO: 21377 - RNA, 19 nt, artificial
  Chemically synthesized
acaaggacuucucugucug

SEQ ID NO: 21378 - RNA, 19 nt, artificial
  Chemically synthesized
agguccacgugaacuugcu

SEQ ID NO: 21379 - RNA, 19 nt, artificial
  Chemically synthesized
accucaaggucuauaucaa

SEQ ID NO: 21380 - RNA, 19 nt, artificial
  Chemically synthesized
gacuacuuuaccagcuucu

SEQ ID NO: 21381 - RNA, 19 nt, artificial
  Chemically synthesized
gaagacccuacuuucggau

SEQ ID NO: 21382 - RNA, 19 nt, artificial
  Chemically synthesized
acccagacaugcugugcuu

SEQ ID NO: 21383 - RNA, 19 nt, artificial
  Chemically synthesized
caccaaggaacacauccag

SEQ ID NO: 21384 - RNA, 19 nt, artificial
  Chemically synthesized
gagccuuucuagauggcuu

SEQ ID NO: 21385 - RNA, 19 nt, artificial
  Chemically synthesized
aaaaaguugagccuuucua

SEQ ID NO: 21386 - RNA, 19 nt, artificial
  Chemically synthesized
gaggaggagagggagaauu

SEQ ID NO: 21387 - RNA, 19 nt, artificial
  Chemically synthesized
cuggucacauugccuucug

SEQ ID NO: 21388 - RNA, 19 nt, artificial
  Chemically synthesized
agauuaucucuagagaguu

SEQ ID NO: 21389 - RNA, 19 nt, artificial
  Chemically synthesized
aguucaguuuuuugacuuc

SEQ ID NO: 21390 - RNA, 19 nt, artificial
  Chemically synthesized
guguccaguucccuaaaag

SEQ ID NO: 21391 - RNA, 19 nt, artificial
  Chemically synthesized
cccaucaaugugaaaguca

SEQ ID NO: 21392 - RNA, 19 nt, artificial
  Chemically synthesized
ucacccaucaaugugaaag

SEQ ID NO: 21393 - RNA, 19 nt, artificial
  Chemically synthesized
ucaguguucuuaccuggua

SEQ ID NO: 21394 - RNA, 19 nt, artificial
  Chemically synthesized
gagcacuuggagauccuaa

SEQ ID NO: 21395 - RNA, 19 nt, artificial
  Chemically synthesized
agagcacuuggagauccua

SEQ ID NO: 21396 - RNA, 19 nt, artificial
  Chemically synthesized
cccgccaucaguguucuua

SEQ ID NO: 21397 - RNA, 19 nt, artificial
  Chemically synthesized
ggacuucucugucuggaga

SEQ ID NO: 21398 - RNA, 19 nt, artificial
  Chemically synthesized
cccacaaggacuucucugu

SEQ ID NO: 21399 - RNA, 19 nt, artificial
  Chemically synthesized
agaauguacaaccucuucu

SEQ ID NO: 21400 - RNA, 19 nt, artificial
  Chemically synthesized
ccgaagaauguacaaccuc

SEQ ID NO: 21401 - RNA, 19 nt, artificial
  Chemically synthesized
caaggucuauaucaagaca

SEQ ID NO: 21402 - RNA, 19 nt, artificial
  Chemically synthesized
gcggaaccucaaggucuau

SEQ ID NO: 21403 - RNA, 19 nt, artificial
  Chemically synthesized
agcggaaccucaaggucua

SEQ ID NO: 21404 - RNA, 19 nt, artificial
  Chemically synthesized
cgucuuuggcaucagauau

SEQ ID NO: 21405 - RNA, 19 nt, artificial
  Chemically synthesized
gacccuacuuucggauaug

SEQ ID NO: 21406 - RNA, 19 nt, artificial
  Chemically synthesized
cuguaaauguucacugggu

SEQ ID NO: 21407 - RNA, 19 nt, artificial
  Chemically synthesized
cugugaauuacgacuucuc

SEQ ID NO: 21408 - RNA, 19 nt, artificial
  Chemically synthesized
cccaguaucucaucugucc

SEQ ID NO: 21409 - RNA, 19 nt, artificial
  Chemically synthesized
ggcuacauugccaaaccuc

SEQ ID NO: 21410 - RNA, 19 nt, artificial
  Chemically synthesized
ucaaggucuauaucaagac

SEQ ID NO: 21411 - RNA, 19 nt, artificial
  Chemically synthesized
cgccacuacauugccauca

SEQ ID NO: 21412 - RNA, 19 nt, artificial
  Chemically synthesized
cccaggauuauaccuggga

SEQ ID NO: 21413 - RNA, 19 nt, artificial
  Chemically synthesized
acccuacuuucggauauga

SEQ ID NO: 21414 - RNA, 19 nt, artificial
  Chemically synthesized
gagcuggagaagucagaga

SEQ ID NO: 21415 - RNA, 19 nt, artificial
  Chemically synthesized
aggaacacauccaggccuu

SEQ ID NO: 21416 - RNA, 19 nt, artificial
  Chemically synthesized
ugccacauuaaauacccgu

SEQ ID NO: 21417 - RNA, 19 nt, artificial
  Chemically synthesized
gugaauuacgacuucucuu

SEQ ID NO: 21418 - RNA, 19 nt, artificial
  Chemically synthesized
ccauuucugcagccagugu

SEQ ID NO: 21419 - RNA, 19 nt, artificial
  Chemically synthesized
ggguucuuguuuggacccu

SEQ ID NO: 21420 - RNA, 19 nt, artificial
  Chemically synthesized
caaaaaguugagccuuucu

SEQ ID NO: 21421 - RNA, 19 nt, artificial
  Chemically synthesized
ggagaauucuguucuccca

SEQ ID NO: 21422 - RNA, 19 nt, artificial
  Chemically synthesized
gcuggucacauugccuucu

SEQ ID NO: 21423 - RNA, 19 nt, artificial
  Chemically synthesized
ucaaggacuaccugcgguu

SEQ ID NO: 21424 - RNA, 19 nt, artificial
  Chemically synthesized
cuaguucaguuuuuugacu

SEQ ID NO: 21425 - RNA, 19 nt, artificial
  Chemically synthesized
uggucuguguguccaguuc

SEQ ID NO: 21426 - RNA, 19 nt, artificial
  Chemically synthesized
ccaucaguguucuuaccug

SEQ ID NO: 21427 - RNA, 19 nt, artificial
  Chemically synthesized
agacccuuuugugucccau

SEQ ID NO: 21428 - RNA, 19 nt, artificial
  Chemically synthesized
agaagaccacccgaagaau

SEQ ID NO: 21429 - RNA, 19 nt, artificial
  Chemically synthesized
gccaucuggaacuauaucc

SEQ ID NO: 21430 - RNA, 19 nt, artificial
  Chemically synthesized
agggacccguugaacaacu

SEQ ID NO: 21431 - RNA, 19 nt, artificial
  Chemically synthesized
uacgacuucucuugcccuu

SEQ ID NO: 21432 - RNA, 19 nt, artificial
  Chemically synthesized
ggcucaucaccaaggaaca

SEQ ID NO: 21433 - RNA, 19 nt, artificial
  Chemically synthesized
acauugccaaaccucugac

SEQ ID NO: 21434 - RNA, 19 nt, artificial
  Chemically synthesized
accauggcuacauugccaa

SEQ ID NO: 21435 - RNA, 19 nt, artificial
  Chemically synthesized
gccuuucuagauggcuuag

SEQ ID NO: 21436 - RNA, 19 nt, artificial
  Chemically synthesized
ucccaaaaaguugagccuu

SEQ ID NO: 21437 - RNA, 19 nt, artificial
  Chemically synthesized
gguccuuuaugcuugaggu

SEQ ID NO: 21438 - RNA, 19 nt, artificial
  Chemically synthesized
gagaguuugagccuuugcu

SEQ ID NO: 21439 - RNA, 19 nt, artificial
  Chemically synthesized
uucaguuuuuugacuuccu

SEQ ID NO: 21440 - RNA, 19 nt, artificial
  Chemically synthesized
ccaguucccuaaaagccug

SEQ ID NO: 21441 - RNA, 19 nt, artificial
  Chemically synthesized
uguguccaguucccuaaaa

SEQ ID NO: 21442 - RNA, 19 nt, artificial
  Chemically synthesized
agcuggaagagcacuugga

SEQ ID NO: 21443 - RNA, 19 nt, artificial
  Chemically synthesized
ucccuuuuccucacuggaa

SEQ ID NO: 21444 - RNA, 19 nt, artificial
  Chemically synthesized
ccacaaggacuucucuguc

SEQ ID NO: 21445 - RNA, 19 nt, artificial
  Chemically synthesized
acaaccucuucuggaggca

SEQ ID NO: 21446 - RNA, 19 nt, artificial
  Chemically synthesized
caucagauaugaugacuau

SEQ ID NO: 21447 - RNA, 19 nt, artificial
  Chemically synthesized
ggcaucagauaugaugacu

SEQ ID NO: 21448 - RNA, 19 nt, artificial
  Chemically synthesized
cacugcgucuuuggcauca

SEQ ID NO: 21449 - RNA, 19 nt, artificial
  Chemically synthesized
cagggccaucuggaacuau

SEQ ID NO: 21450 - RNA, 19 nt, artificial
  Chemically synthesized
ugacuacuuuaccagcuuc

SEQ ID NO: 21451 - RNA, 19 nt, artificial
  Chemically synthesized
ccugacuacuuuaccagcu

SEQ ID NO: 21452 - RNA, 19 nt, artificial
  Chemically synthesized
accauggcuacucgcugau

SEQ ID NO: 21453 - RNA, 19 nt, artificial
  Chemically synthesized
caggauuauaccugggaag

SEQ ID NO: 21454 - RNA, 19 nt, artificial
  Chemically synthesized
cccuacuuucggauaugag

SEQ ID NO: 21455 - RNA, 19 nt, artificial
  Chemically synthesized
ucaccaaggaacacaucca

SEQ ID NO: 21456 - RNA, 19 nt, artificial
  Chemically synthesized
agaauucuguucucccaga

SEQ ID NO: 21457 - RNA, 19 nt, artificial
  Chemically synthesized
cuccaugcuuaauggugug

SEQ ID NO: 21458 - RNA, 19 nt, artificial
  Chemically synthesized
ugcacugacucugggaucu

SEQ ID NO: 21459 - RNA, 19 nt, artificial
  Chemically synthesized
ugaacuugcugcuccugga

SEQ ID NO: 21460 - RNA, 19 nt, artificial
  Chemically synthesized
cggauaugaggacuucacu

SEQ ID NO: 21461 - RNA, 19 nt, artificial
  Chemically synthesized
ucggauaugaggacuucac

SEQ ID NO: 21462 - RNA, 19 nt, artificial
  Chemically synthesized
gcuuuguggaagacccuac

SEQ ID NO: 21463 - RNA, 19 nt, artificial
  Chemically synthesized
ggacccguugaacaacucu

SEQ ID NO: 21464 - RNA, 19 nt, artificial
  Chemically synthesized
uccuucguguuuggcugug

SEQ ID NO: 21465 - RNA, 19 nt, artificial
  Chemically synthesized
caguuuggagggcacugaa

SEQ ID NO: 21466 - RNA, 19 nt, artificial
  Chemically synthesized
uggcucaucaccaaggaac

SEQ ID NO: 21467 - RNA, 19 nt, artificial
  Chemically synthesized
accgauuccaggcacuuuc

SEQ ID NO: 21468 - RNA, 19 nt, artificial
  Chemically synthesized
caacaaguugcuggcgcau

SEQ ID NO: 21469 - RNA, 19 nt, artificial
  Chemically synthesized
ucaacaaguugcuggcgca

SEQ ID NO: 21470 - RNA, 19 nt, artificial
  Chemically synthesized
ccauggcuacauugccaaa

SEQ ID NO: 21471 - RNA, 19 nt, artificial
  Chemically synthesized
gaauucuguucucccagag

SEQ ID NO: 21472 - RNA, 19 nt, artificial
  Chemically synthesized
ugcuugagguuccaaccug

SEQ ID NO: 21473 - RNA, 19 nt, artificial
  Chemically synthesized
gagccuuugcuggucacau

SEQ ID NO: 21474 - RNA, 19 nt, artificial
  Chemically synthesized
cagauuaucucuagagagu

SEQ ID NO: 21475 - RNA, 19 nt, artificial
  Chemically synthesized
gcagauuaucucuagagag

SEQ ID NO: 21476 - RNA, 19 nt, artificial
  Chemically synthesized
ccaugcuuaauggugugag

SEQ ID NO: 21477 - RNA, 19 nt, artificial
  Chemically synthesized
gcccgaauccuaguucagu

SEQ ID NO: 21478 - RNA, 19 nt, artificial
  Chemically synthesized
caaguguuguggccuuccu

SEQ ID NO: 21479 - RNA, 19 nt, artificial
  Chemically synthesized
ucacuggaauggacaguuc

SEQ ID NO: 21480 - RNA, 19 nt, artificial
  Chemically synthesized
gucuuuggcaucagauaug

SEQ ID NO: 21481 - RNA, 19 nt, artificial
  Chemically synthesized
ugcgucuuuggcaucagau

SEQ ID NO: 21482 - RNA, 19 nt, artificial
  Chemically synthesized
cugcgucuuuggcaucaga

SEQ ID NO: 21483 - RNA, 19 nt, artificial
  Chemically synthesized
gccuauagccucaccuaca

SEQ ID NO: 21484 - RNA, 19 nt, artificial
  Chemically synthesized
acccugacuacuuuaccag

SEQ ID NO: 21485 - RNA, 19 nt, artificial
  Chemically synthesized
ggauaugaggacuucacuc

SEQ ID NO: 21486 - RNA, 19 nt, artificial
  Chemically synthesized
cgcuuugagcuggagaagu

SEQ ID NO: 21487 - RNA, 19 nt, artificial
  Chemically synthesized
ugcagaaaucuuuggcuuu

SEQ ID NO: 21488 - RNA, 19 nt, artificial
  Chemically synthesized
gcccuucuucuagcagucu

SEQ ID NO: 21489 - RNA, 19 nt, artificial
  Chemically synthesized
cgauuccaggcacuuucug

SEQ ID NO: 21490 - RNA, 19 nt, artificial
  Chemically synthesized
gaccauggcuacauugcca

SEQ ID NO: 21491 - RNA, 19 nt, artificial
  Chemically synthesized
gguucuuguuuggacccug

SEQ ID NO: 21492 - RNA, 19 nt, artificial
  Chemically synthesized
uggucacauugccuucuga

SEQ ID NO: 21493 - RNA, 19 nt, artificial
  Chemically synthesized
guguguccaguucccuaaa

SEQ ID NO: 21494 - RNA, 19 nt, artificial
  Chemically synthesized
uguguguccaguucccuaa

SEQ ID NO: 21495 - RNA, 19 nt, artificial
  Chemically synthesized
caguguucuuaccugguag

SEQ ID NO: 21496 - RNA, 19 nt, artificial
  Chemically synthesized
cagagcucaaggacuaccu

SEQ ID NO: 21497 - RNA, 19 nt, artificial
  Chemically synthesized
cagacccuuuuguguccca

SEQ ID NO: 21498 - RNA, 19 nt, artificial
  Chemically synthesized
uggcaucagauaugaugac

SEQ ID NO: 21499 - RNA, 19 nt, artificial
  Chemically synthesized
uccacugcgucuuuggcau

SEQ ID NO: 21500 - RNA, 19 nt, artificial
  Chemically synthesized
cuauagccucaccuacaau

SEQ ID NO: 21501 - RNA, 19 nt, artificial
  Chemically synthesized
agaaguuccaggcagccua

SEQ ID NO: 21502 - RNA, 19 nt, artificial
  Chemically synthesized
gaccgauuccaggcacuuu

SEQ ID NO: 21503 - RNA, 19 nt, artificial
  Chemically synthesized
cgagaucaacaaguugcug

SEQ ID NO: 21504 - RNA, 19 nt, artificial
  Chemically synthesized
gagggagaauucuguucuc

SEQ ID NO: 21505 - RNA, 19 nt, artificial
  Chemically synthesized
ccuuccugaacugggaagu

SEQ ID NO: 21506 - RNA, 19 nt, artificial
  Chemically synthesized
cagccuauagccucaccua

SEQ ID NO: 21507 - RNA, 19 nt, artificial
  Chemically synthesized
gaaguuccaggcagccuau

SEQ ID NO: 21508 - RNA, 19 nt, artificial
  Chemically synthesized
ggaugagaaguuccaggca

SEQ ID NO: 21509 - RNA, 19 nt, artificial
  Chemically synthesized
agcucauucaggcucuggu

SEQ ID NO: 21510 - RNA, 19 nt, artificial
  Chemically synthesized
ugcccuucuucuagcaguc

SEQ ID NO: 21511 - RNA, 19 nt, artificial
  Chemically synthesized
cgcaaacucagcgagauca

SEQ ID NO: 21512 - RNA, 19 nt, artificial
  Chemically synthesized
cuggucuguguguccaguu

SEQ ID NO: 21513 - RNA, 19 nt, artificial
  Chemically synthesized
aggcagcuuugccuucucu

SEQ ID NO: 21514 - RNA, 19 nt, artificial
  Chemically synthesized
cacaaguguuguggccuuc

SEQ ID NO: 21515 - RNA, 19 nt, artificial
  Chemically synthesized
uccaugcuuaaugguguga

SEQ ID NO: 21516 - RNA, 19 nt, artificial
  Chemically synthesized
ugcuggaugagaaguucca

SEQ ID NO: 21517 - RNA, 19 nt, artificial
  Chemically synthesized
agcacuuggagauccuaag

SEQ ID NO: 21518 - RNA, 19 nt, artificial
  Chemically synthesized
cucacuggaauggacaguu

SEQ ID NO: 21519 - RNA, 19 nt, artificial
  Chemically synthesized
gcugugcuuuguggaagac

SEQ ID NO: 21520 - RNA, 19 nt, artificial
  Chemically synthesized
ggcacugaagaaaggcaag

SEQ ID NO: 21521 - RNA, 19 nt, artificial
  Chemically synthesized
ccucacuggaauggacagu

SEQ ID NO: 21522 - RNA, 19 nt, artificial
  Chemically synthesized
uuguggcacauuaauuccg

SEQ ID NO: 21523 - RNA, 19 nt, artificial
  Chemically synthesized
aaaaagggcaaaggaaguc

SEQ ID NO: 21524 - RNA, 19 nt, artificial
  Chemically synthesized
auuuaauguggcacacugg

SEQ ID NO: 21525 - RNA, 19 nt, artificial
  Chemically synthesized
guaggagguaaugaaaucu

SEQ ID NO: 21526 - RNA, 19 nt, artificial
  Chemically synthesized
augauggcaauguaguggc

SEQ ID NO: 21527 - RNA, 19 nt, artificial
  Chemically synthesized
uauuuaauguggcacacug

SEQ ID NO: 21528 - RNA, 19 nt, artificial
  Chemically synthesized
aaggaagucaaaaaacuga

SEQ ID NO: 21529 - RNA, 19 nt, artificial
  Chemically synthesized
aaugaaaucuggaaaugac

SEQ ID NO: 21530 - RNA, 19 nt, artificial
  Chemically synthesized
cugcacggguauuuaaugu

SEQ ID NO: 21531 - RNA, 19 nt, artificial
  Chemically synthesized
uuuaauguggcacacuggc

SEQ ID NO: 21532 - RNA, 19 nt, artificial
  Chemically synthesized
aaaauccgcuugcuguugg

SEQ ID NO: 21533 - RNA, 19 nt, artificial
  Chemically synthesized
augggugaauggcaaguag

SEQ ID NO: 21534 - RNA, 19 nt, artificial
  Chemically synthesized
auauaguuccagauggccc

SEQ ID NO: 21535 - RNA, 19 nt, artificial
  Chemically synthesized
cuuuuugggagacaucugc

SEQ ID NO: 21536 - RNA, 19 nt, artificial
  Chemically synthesized
auugaugggugaauggcaa

SEQ ID NO: 21537 - RNA, 19 nt, artificial
  Chemically synthesized
gugaauggcaaguaggagg

SEQ ID NO: 21538 - RNA, 19 nt, artificial
  Chemically synthesized
ugaauggcaaguaggaggu

SEQ ID NO: 21539 - RNA, 19 nt, artificial
  Chemically synthesized
acuuguggcacauuaauuc

SEQ ID NO: 21540 - RNA, 19 nt, artificial
  Chemically synthesized
cuuguggcacauuaauucc

SEQ ID NO: 21541 - RNA, 19 nt, artificial
  Chemically synthesized
ucauauggaacugguagca

SEQ ID NO: 21542 - RNA, 19 nt, artificial
  Chemically synthesized
uucugcacuugaacacugg

SEQ ID NO: 21543 - RNA, 19 nt, artificial
  Chemically synthesized
auuuacagucaucacaugc

SEQ ID NO: 21544 - RNA, 19 nt, artificial
  Chemically synthesized
gaucuugcaagaaaauccg

SEQ ID NO: 21545 - RNA, 19 nt, artificial
  Chemically synthesized
aaggaccaaaauaaagagg

SEQ ID NO: 21546 - RNA, 19 nt, artificial
  Chemically synthesized
aaaaacugaacuaggauuc

SEQ ID NO: 21547 - RNA, 19 nt, artificial
  Chemically synthesized
cugacuuucacauugaugg

SEQ ID NO: 21548 - RNA, 19 nt, artificial
  Chemically synthesized
auuaauuccgagcuuggcc

SEQ ID NO: 21549 - RNA, 19 nt, artificial
  Chemically synthesized
uucucaucauauggaacug

SEQ ID NO: 21550 - RNA, 19 nt, artificial
  Chemically synthesized
auguguuccuuggugauga

SEQ ID NO: 21551 - RNA, 19 nt, artificial
  Chemically synthesized
aagucguaauucacaguca

SEQ ID NO: 21552 - RNA, 19 nt, artificial
  Chemically synthesized
ugaucuugcaagaaaaucc

SEQ ID NO: 21553 - RNA, 19 nt, artificial
  Chemically synthesized
aucuugcaagaaaauccgc

SEQ ID NO: 21554 - RNA, 19 nt, artificial
  Chemically synthesized
uuuuugggagacaucugcg

SEQ ID NO: 21555 - RNA, 19 nt, artificial
  Chemically synthesized
aaaggaccaaaauaaagag

SEQ ID NO: 21556 - RNA, 19 nt, artificial
  Chemically synthesized
aucuaauacucccuccucu

SEQ ID NO: 21557 - RNA, 19 nt, artificial
  Chemically synthesized
aagggaaaaagggcaaagg

SEQ ID NO: 21558 - RNA, 19 nt, artificial
  Chemically synthesized
aaaacugaacuaggauucg

SEQ ID NO: 21559 - RNA, 19 nt, artificial
  Chemically synthesized
aaugaacuguccauuccag

SEQ ID NO: 21560 - RNA, 19 nt, artificial
  Chemically synthesized
uuucucaucauauggaacu

SEQ ID NO: 21561 - RNA, 19 nt, artificial
  Chemically synthesized
guccaaacaagaacccugg

SEQ ID NO: 21562 - RNA, 19 nt, artificial
  Chemically synthesized
aauggcaaguaggagguaa

SEQ ID NO: 21563 - RNA, 19 nt, artificial
  Chemically synthesized
uguggcacauuaauuccga

SEQ ID NO: 21564 - RNA, 19 nt, artificial
  Chemically synthesized
gauauaguuccagauggcc

SEQ ID NO: 21565 - RNA, 19 nt, artificial
  Chemically synthesized
augguauuguaggugaggc

SEQ ID NO: 21566 - RNA, 19 nt, artificial
  Chemically synthesized
agcaaagccaaagauuucu

SEQ ID NO: 21567 - RNA, 19 nt, artificial
  Chemically synthesized
ucacagucauuugcuacag

SEQ ID NO: 21568 - RNA, 19 nt, artificial
  Chemically synthesized
uggcacauuaauuccgagc

SEQ ID NO: 21569 - RNA, 19 nt, artificial
  Chemically synthesized
acauuaauuccgagcuugg

SEQ ID NO: 21570 - RNA, 19 nt, artificial
  Chemically synthesized
cuuuggugcuggacucuuc

SEQ ID NO: 21571 - RNA, 19 nt, artificial
  Chemically synthesized
gucuucccagguauaaucc

SEQ ID NO: 21572 - RNA, 19 nt, artificial
  Chemically synthesized
caaacacgaaggaggagag

SEQ ID NO: 21573 - RNA, 19 nt, artificial
  Chemically synthesized
auggaacugguagcaaagc

SEQ ID NO: 21574 - RNA, 19 nt, artificial
  Chemically synthesized
aagaagggcaagagaaguc

SEQ ID NO: 21575 - RNA, 19 nt, artificial
  Chemically synthesized
auucacagucauuugcuac

SEQ ID NO: 21576 - RNA, 19 nt, artificial
  Chemically synthesized
agaugagauacugggaugg

SEQ ID NO: 21577 - RNA, 19 nt, artificial
  Chemically synthesized
ucuugcaagaaaauccgcu

SEQ ID NO: 21578 - RNA, 19 nt, artificial
  Chemically synthesized
aaacaagaacccuggugcc

SEQ ID NO: 21579 - RNA, 19 nt, artificial
  Chemically synthesized
aauacucccuccucuucag

SEQ ID NO: 21580 - RNA, 19 nt, artificial
  Chemically synthesized
auggagaaaagggaaaaag

SEQ ID NO: 21581 - RNA, 19 nt, artificial
  Chemically synthesized
aaagggaaaaagggcaaag

SEQ ID NO: 21582 - RNA, 19 nt, artificial
  Chemically synthesized
aaaggaagucaaaaaacug

SEQ ID NO: 21583 - RNA, 19 nt, artificial
  Chemically synthesized
cacauuaauuccgagcuug

SEQ ID NO: 21584 - RNA, 19 nt, artificial
  Chemically synthesized
aagacgcaguggauauagu

SEQ ID NO: 21585 - RNA, 19 nt, artificial
  Chemically synthesized
guaaaguagucagggugca

SEQ ID NO: 21586 - RNA, 19 nt, artificial
  Chemically synthesized
acaaagcacagcaugucug

SEQ ID NO: 21587 - RNA, 19 nt, artificial
  Chemically synthesized
uaaaguagucagggugcag

SEQ ID NO: 21588 - RNA, 19 nt, artificial
  Chemically synthesized
cucaucauauggaacuggu

SEQ ID NO: 21589 - RNA, 19 nt, artificial
  Chemically synthesized
gucaucacaugcccucuag

SEQ ID NO: 21590 - RNA, 19 nt, artificial
  Chemically synthesized
cagacugcuagaagaaggg

SEQ ID NO: 21591 - RNA, 19 nt, artificial
  Chemically synthesized
aggaccaaaauaaagagga

SEQ ID NO: 21592 - RNA, 19 nt, artificial
  Chemically synthesized
gcaaugaacuguccauucc

SEQ ID NO: 21593 - RNA, 19 nt, artificial
  Chemically synthesized
ugguaaaguagucagggug

SEQ ID NO: 21594 - RNA, 19 nt, artificial
  Chemically synthesized
ucuuccacaaagcacagca

SEQ ID NO: 21595 - RNA, 19 nt, artificial
  Chemically synthesized
gaacguuuauuucucauca

SEQ ID NO: 21596 - RNA, 19 nt, artificial
  Chemically synthesized
ugaacauuuacagucauca

SEQ ID NO: 21597 - RNA, 19 nt, artificial
  Chemically synthesized
agaaagugccuggaaucgg

SEQ ID NO: 21598 - RNA, 19 nt, artificial
  Chemically synthesized
aagaaaauccgcuugcugu

SEQ ID NO: 21599 - RNA, 19 nt, artificial
  Chemically synthesized
cagcuucagacauuguggg

SEQ ID NO: 21600 - RNA, 19 nt, artificial
  Chemically synthesized
ugccaccuaagccaucuag

SEQ ID NO: 21601 - RNA, 19 nt, artificial
  Chemically synthesized
gaaaagggaaaaagggcaa

SEQ ID NO: 21602 - RNA, 19 nt, artificial
  Chemically synthesized
ucaaaaaacugaacuagga

SEQ ID NO: 21603 - RNA, 19 nt, artificial
  Chemically synthesized
accagucugcagaaacucg

SEQ ID NO: 21604 - RNA, 19 nt, artificial
  Chemically synthesized
aggagguaaugaaaucugg

SEQ ID NO: 21605 - RNA, 19 nt, artificial
  Chemically synthesized
gguaagaacacugauggcg

SEQ ID NO: 21606 - RNA, 19 nt, artificial
  Chemically synthesized
agcgaacguuuauuucuca

SEQ ID NO: 21607 - RNA, 19 nt, artificial
  Chemically synthesized
aaagauuucugcacuugaa

SEQ ID NO: 21608 - RNA, 19 nt, artificial
  Chemically synthesized
cuugaacacuggauaccac

SEQ ID NO: 21609 - RNA, 19 nt, artificial
  Chemically synthesized
augcccucuagaacccaga

SEQ ID NO: 21610 - RNA, 19 nt, artificial
  Chemically synthesized
acugccagguugucuacuc

SEQ ID NO: 21611 - RNA, 19 nt, artificial
  Chemically synthesized
acuuguugaucucgcugag

SEQ ID NO: 21612 - RNA, 19 nt, artificial
  Chemically synthesized
cucuucagaaggcaaugug

SEQ ID NO: 21613 - RNA, 19 nt, artificial
  Chemically synthesized
auuaagcauggagaaaagg

SEQ ID NO: 21614 - RNA, 19 nt, artificial
  Chemically synthesized
cugcacaucacacacaagc

SEQ ID NO: 21615 - RNA, 19 nt, artificial
  Chemically synthesized
ugcacaucacacacaagcc

SEQ ID NO: 21616 - RNA, 19 nt, artificial
  Chemically synthesized
guaagaacacugauggcgg

SEQ ID NO: 21617 - RNA, 19 nt, artificial
  Chemically synthesized
aucacacacaagcccacug

SEQ ID NO: 21618 - RNA, 19 nt, artificial
  Chemically synthesized
aaguccucauauccgaaag

SEQ ID NO: 21619 - RNA, 19 nt, artificial
  Chemically synthesized
cagcgaacguuuauuucuc

SEQ ID NO: 21620 - RNA, 19 nt, artificial
  Chemically synthesized
gcaaagccaaagauuucug

SEQ ID NO: 21621 - RNA, 19 nt, artificial
  Chemically synthesized
acagacugcuagaagaagg

SEQ ID NO: 21622 - RNA, 19 nt, artificial
  Chemically synthesized
ggaaccucaagcauaaagg

SEQ ID NO: 21623 - RNA, 19 nt, artificial
  Chemically synthesized
uucagaaggcaaugugacc

SEQ ID NO: 21624 - RNA, 19 nt, artificial
  Chemically synthesized
aaggcucaaacucucuaga

SEQ ID NO: 21625 - RNA, 19 nt, artificial
  Chemically synthesized
uugaucucgcugaguuugc

SEQ ID NO: 21626 - RNA, 19 nt, artificial
  Chemically synthesized
acccugacuuucacauuga

SEQ ID NO: 21627 - RNA, 19 nt, artificial
  Chemically synthesized
agguaagaacacugauggc

SEQ ID NO: 21628 - RNA, 19 nt, artificial
  Chemically synthesized
aacuucucauccagcagcu

SEQ ID NO: 21629 - RNA, 19 nt, artificial
  Chemically synthesized
aacaaaaccucagcgaacg

SEQ ID NO: 21630 - RNA, 19 nt, artificial
  Chemically synthesized
gaugagauacugggauggg

SEQ ID NO: 21631 - RNA, 19 nt, artificial
  Chemically synthesized
aacaagaacccuggugccu

SEQ ID NO: 21632 - RNA, 19 nt, artificial
  Chemically synthesized
cuucuuuccugugcccucu

SEQ ID NO: 21633 - RNA, 19 nt, artificial
  Chemically synthesized
acaucacacacaagcccac

SEQ ID NO: 21634 - RNA, 19 nt, artificial
  Chemically synthesized
ugguauuguaggugaggcu

SEQ ID NO: 21635 - RNA, 19 nt, artificial
  Chemically synthesized
agaacagaauucucccucu

SEQ ID NO: 21636 - RNA, 19 nt, artificial
  Chemically synthesized
gacccugacuuucacauug

SEQ ID NO: 21637 - RNA, 19 nt, artificial
  Chemically synthesized
gaagcaacccacuuaagcc

SEQ ID NO: 21638 - RNA, 19 nt, artificial
  Chemically synthesized
agaauucucccucuccucc

SEQ ID NO: 21639 - RNA, 19 nt, artificial
  Chemically synthesized
gaacuucucauccagcagc

SEQ ID NO: 21640 - RNA, 19 nt, artificial
  Chemically synthesized
augaaacaaaaccucagcg

SEQ ID NO: 21641 - RNA, 19 nt, artificial
  Chemically synthesized
uugccuuucuucagugccc

SEQ ID NO: 21642 - RNA, 19 nt, artificial
  Chemically synthesized
aaaggcucaacuuuuuggg

SEQ ID NO: 21643 - RNA, 19 nt, artificial
  Chemically synthesized
acgccucacaccauuaagc

SEQ ID NO: 21644 - RNA, 19 nt, artificial
  Chemically synthesized
uuaagcauggagaaaaggg

SEQ ID NO: 21645 - RNA, 19 nt, artificial
  Chemically synthesized
uaagcauggagaaaaggga

SEQ ID NO: 21646 - RNA, 19 nt, artificial
  Chemically synthesized
agaaaagggaaaaagggca

SEQ ID NO: 21647 - RNA, 19 nt, artificial
  Chemically synthesized
aaaagggcaaaggaaguca

SEQ ID NO: 21648 - RNA, 19 nt, artificial
  Chemically synthesized
agugaggaaaagggagggu

SEQ ID NO: 21649 - RNA, 19 nt, artificial
  Chemically synthesized
auauagaccuugagguucc

SEQ ID NO: 21650 - RNA, 19 nt, artificial
  Chemically synthesized
ccuugccuuucuucagugc

SEQ ID NO: 21651 - RNA, 19 nt, artificial
  Chemically synthesized
gagaaaagggaaaaagggc

SEQ ID NO: 21652 - RNA, 19 nt, artificial
  Chemically synthesized
aaaucuggaaaugacaggg

SEQ ID NO: 21653 - RNA, 19 nt, artificial
  Chemically synthesized
gucagugcaaugaacuguc

SEQ ID NO: 21654 - RNA, 19 nt, artificial
  Chemically synthesized
uuucugcacuugaacacug

SEQ ID NO: 21655 - RNA, 19 nt, artificial
  Chemically synthesized
aucucgcugaguuugcgca

SEQ ID NO: 21656 - RNA, 19 nt, artificial
  Chemically synthesized
aaguucacguggaccuucu

SEQ ID NO: 21657 - RNA, 19 nt, artificial
  Chemically synthesized
gauuucugcacuugaacac

SEQ ID NO: 21658 - RNA, 19 nt, artificial
  Chemically synthesized
aacacuggauaccacuccc

SEQ ID NO: 21659 - RNA, 19 nt, artificial
  Chemically synthesized
gaaaggcucaacuuuuugg

SEQ ID NO: 21660 - RNA, 19 nt, artificial
  Chemically synthesized
gacuuucacauugaugggu

SEQ ID NO: 21661 - RNA, 19 nt, artificial
  Chemically synthesized
agucagugcaaugaacugu

SEQ ID NO: 21662 - RNA, 19 nt, artificial
  Chemically synthesized
ucagugcaaugaacugucc

SEQ ID NO: 21663 - RNA, 19 nt, artificial
  Chemically synthesized
auuccagugaggaaaaggg

SEQ ID NO: 21664 - RNA, 19 nt, artificial
  Chemically synthesized
agguuguacauucuucggg

SEQ ID NO: 21665 - RNA, 19 nt, artificial
  Chemically synthesized
acugucuugauauagaccu

SEQ ID NO: 21666 - RNA, 19 nt, artificial
  Chemically synthesized
aagcugguaaaguagucag

SEQ ID NO: 21667 - RNA, 19 nt, artificial
  Chemically synthesized
uucccagguauaauccugg

SEQ ID NO: 21668 - RNA, 19 nt, artificial
  Chemically synthesized
aaagcacagcaugucuggg

SEQ ID NO: 21669 - RNA, 19 nt, artificial
  Chemically synthesized
uuaauguggcacacuggcc

SEQ ID NO: 21670 - RNA, 19 nt, artificial
  Chemically synthesized
uugcuacagaaagugccug

SEQ ID NO: 21671 - RNA, 19 nt, artificial
  Chemically synthesized
aauguagccauggucaccu

SEQ ID NO: 21672 - RNA, 19 nt, artificial
  Chemically synthesized
aaagggcaaaggaagucaa

SEQ ID NO: 21673 - RNA, 19 nt, artificial
  Chemically synthesized
aaagcugccuggaguguca

SEQ ID NO: 21674 - RNA, 19 nt, artificial
  Chemically synthesized
agagguuguacauucuucg

SEQ ID NO: 21675 - RNA, 19 nt, artificial
  Chemically synthesized
uauagaccuugagguuccg

SEQ ID NO: 21676 - RNA, 19 nt, artificial
  Chemically synthesized
uaucugaugccaaagacgc

SEQ ID NO: 21677 - RNA, 19 nt, artificial
  Chemically synthesized
auggcgaugguauuguagg

(The sequence listing continues in the following parts.)
